United States Patent Application Publication US 2006/0003322 A1 - sequence listing, part 18

SEQ ID NO: 741617 - RNA, 18 nt, Human
ugggauuacaggcgugag

SEQ ID NO: 741618 - RNA, 19 nt, Human
ugggauuacaggcgugagc

SEQ ID NO: 741619 - RNA, 22 nt, Human
ugggauuacaggcgugagccac

SEQ ID NO: 741620 - RNA, 23 nt, Human
ugggauuacaggcgugagccacc

SEQ ID NO: 741621 - RNA, 24 nt, Human
ugggauuacaggcgugagccacca

SEQ ID NO: 741622 - RNA, 27 nt, Human
ugggccucagauccugguggucccagg

SEQ ID NO: 741623 - RNA, 24 nt, Human
ugggguuucaccauguuagccagg

SEQ ID NO: 741624 - RNA, 23 nt, Human
uggugcacaccugcaaccccagc

SEQ ID NO: 741625 - RNA, 21 nt, Human
uguaacuagaacccagcugac

SEQ ID NO: 741626 - RNA, 21 nt, Human
ugucgcccaggcuggagugca

SEQ ID NO: 741627 - RNA, 18 nt, Human
uuaguagagaugggguuu

SEQ ID NO: 741628 - RNA, 22 nt, Human
uuaguagagaugggguuucacc

SEQ ID NO: 741629 - RNA, 24 nt, Human
uuaguagagaugggguuucaccau

SEQ ID NO: 741630 - RNA, 23 nt, Human
uucaucuuauuuuagugccuggc

SEQ ID NO: 741631 - RNA, 19 nt, Human
uucaugccauucuccugcc

SEQ ID NO: 741632 - RNA, 22 nt, Human
uugagucacaggcagaauaacu

SEQ ID NO: 741633 - RNA, 18 nt, Human
uugcagugagccgagauc

SEQ ID NO: 741634 - RNA, 19 nt, Human
uugcagugagccgagauca

SEQ ID NO: 741635 - RNA, 20 nt, Human
uugcagugagccgagaucac

SEQ ID NO: 741636 - RNA, 24 nt, Human
uugcucugucgcccaggcuggagu

SEQ ID NO: 741637 - RNA, 25 nt, Human
uugggaggccgaggcggggggauca

SEQ ID NO: 741638 - RNA, 25 nt, Human
uugggguaaaaguuaaauaaaacac

SEQ ID NO: 741639 - RNA, 19 nt, Human
uuucaccauguuagccagg

SEQ ID NO: 741640 - RNA, 20 nt, Human
uuucaccauguuagccagga

SEQ ID NO: 741641 - RNA, 24 nt, Human
uuucauaugcagucaugcauugcu

SEQ ID NO: 741642 - RNA, 21 nt, Human
uuucuguauuuuuaguagaga

SEQ ID NO: 741643 - RNA, 21 nt, Human
uuuucuguauuuuuaguagag

SEQ ID NO: 741644 - RNA, 24 nt, Human
uuuucuguauuuuuaguagagaug

SEQ ID NO: 741645 - RNA, 24 nt, Human
uuuuuaguagagaugggguuucac

SEQ ID NO: 741646 - RNA, 23 nt, Human
aaaccaccuuccuuuaaccccaa

SEQ ID NO: 741647 - RNA, 24 nt, Human
aagcacuccaaggauuuuuugauu

SEQ ID NO: 741648 - RNA, 25 nt, Human
aagcacuccaaggauuuuuugauuc

SEQ ID NO: 741649 - RNA, 24 nt, Human
accaccuuccuuuaaccccaaccu

SEQ ID NO: 741650 - RNA, 18 nt, Human
accuuccuuuaaccccaa

SEQ ID NO: 741651 - RNA, 21 nt, Human
agaagaacagaagaaacagua

SEQ ID NO: 741652 - RNA, 18 nt, Human
agacccaggaaugccgga

SEQ ID NO: 741653 - RNA, 21 nt, Human
agcauuuugguggguuuugca

SEQ ID NO: 741654 - RNA, 21 nt, Human
agcccaagagugugugggaau

SEQ ID NO: 741655 - RNA, 26 nt, Human
agggagaaaauaaaaauaagggaccc

SEQ ID NO: 741656 - RNA, 18 nt, Human
aguagagagcuuccugaa

SEQ ID NO: 741657 - RNA, 23 nt, Human
agucacguggaaaggcaagcacu

SEQ ID NO: 741658 - RNA, 19 nt, Human
auaaaggucagcccaagag

SEQ ID NO: 741659 - RNA, 25 nt, Human
caaaagcaaaguauuuucucccccu

SEQ ID NO: 741660 - RNA, 24 nt, Human
caaacacauaguucucaaaaccac

SEQ ID NO: 741661 - RNA, 21 nt, Human
cacauaguucucaaaaccacc

SEQ ID NO: 741662 - RNA, 18 nt, Human
cacuucuaaacucaucag

SEQ ID NO: 741663 - RNA, 23 nt, Human
cagaaugugacaucaaaggcuca

SEQ ID NO: 741664 - RNA, 18 nt, Human
caucaaaggcucaguuug

SEQ ID NO: 741665 - RNA, 21 nt, Human
cauuugcucuuuaagagccuu

SEQ ID NO: 741666 - RNA, 20 nt, Human
ccccaaaauggaguacugug

SEQ ID NO: 741667 - RNA, 21 nt, Human
cucccacucuagcagcaagga

SEQ ID NO: 741668 - RNA, 20 nt, Human
cuguuggagggacuuuuugg

SEQ ID NO: 741669 - RNA, 21 nt, Human
cuucauccauaucuucuuuuu

SEQ ID NO: 741670 - RNA, 20 nt, Human
cuuccuuuaaccccaaccuu

SEQ ID NO: 741671 - RNA, 19 nt, Human
cuucuggcugcuucucuga

SEQ ID NO: 741672 - RNA, 19 nt, Human
gaggcuuuaaaaaaaguug

SEQ ID NO: 741673 - RNA, 25 nt, Human
gauaggagcauuuugguggguuuug

SEQ ID NO: 741674 - RNA, 21 nt, Human
gaugcuagaagaacagaagaa

SEQ ID NO: 741675 - RNA, 21 nt, Human
gcaagacaucuuucuccuccc

SEQ ID NO: 741676 - RNA, 19 nt, Human
ggagaagaggacauuugcu

SEQ ID NO: 741677 - RNA, 20 nt, Human
guuguuuucuuucuuuuugu

SEQ ID NO: 741678 - RNA, 21 nt, Human
uaaaaugaaauuauggaccug

SEQ ID NO: 741679 - RNA, 23 nt, Human
uacaguuuggaccccaaaaugga

SEQ ID NO: 741680 - RNA, 21 nt, Human
uagaagaacagaagaaacagu

SEQ ID NO: 741681 - RNA, 21 nt, Human
uagaagaacagaagaaacagu

SEQ ID NO: 741682 - RNA, 27 nt, Human
uagagagcuuccugaaucuugaaguuc

SEQ ID NO: 741683 - RNA, 19 nt, Human
uaggaagacccaggaaugg

SEQ ID NO: 741684 - RNA, 21 nt, Human
uauaaaaucauuguuuucugg

SEQ ID NO: 741685 - RNA, 19 nt, Human
uauugcuguuggagggacu

SEQ ID NO: 741686 - RNA, 23 nt, Human
ucaaauccuggugucaucagggu

SEQ ID NO: 741687 - RNA, 18 nt, Human
ucucaaaaccaccuuccu

SEQ ID NO: 741688 - RNA, 19 nt, Human
ucuuucuuuuuguuacagc

SEQ ID NO: 741689 - RNA, 21 nt, Human
ugaaauuauugagaacagcca

SEQ ID NO: 741690 - RNA, 23 nt, Human
ugagaacagccagacuuucauaa

SEQ ID NO: 741691 - RNA, 24 nt, Human
ugagcauuacaguuuggaccccaa

SEQ ID NO: 741692 - RNA, 23 nt, Human
ugcccuaacguuucugauuuugc

SEQ ID NO: 741693 - RNA, 20 nt, Human
ugcuguuggagggacuuuuu

SEQ ID NO: 741694 - RNA, 25 nt, Human
uggaccccaaaauggaguacuguga

SEQ ID NO: 741695 - RNA, 23 nt, Human
uggguauuaucuuuucuucuuuc

SEQ ID NO: 741696 - RNA, 21 nt, Human
uuuaaacaaaguaauauugag

SEQ ID NO: 741697 - RNA, 21 nt, Human
uuuccaaucaccauucacuuc

SEQ ID NO: 741698 - RNA, 18 nt, Human
uuuuaaauuauaugguua

SEQ ID NO: 741699 - RNA, 24 nt, Human
uuuuuucaacucacuggugcccua

SEQ ID NO: 741700 - RNA, 21 nt, Human
aaaaacaucaaaacuauaagc

SEQ ID NO: 741701 - RNA, 20 nt, Human
aaaauggacaaauguuagaa

SEQ ID NO: 741702 - RNA, 18 nt, Human
aaaccuaagcgaacaaua

SEQ ID NO: 741703 - RNA, 24 nt, Human
aaagugcugggauuauagguuuga

SEQ ID NO: 741704 - RNA, 19 nt, Human
aaccauuuacagacguauu

SEQ ID NO: 741705 - RNA, 23 nt, Human
aacuaaaaucaauuaguaagaca

SEQ ID NO: 741706 - RNA, 19 nt, Human
aacuguuaccccauccuuu

SEQ ID NO: 741707 - RNA, 25 nt, Human
aaguaacugggacugcaggcgcaca

SEQ ID NO: 741708 - RNA, 18 nt, Human
aagugcugggauuauagg

SEQ ID NO: 741709 - RNA, 26 nt, Human
aagugcugggauuauagguuugagcu

SEQ ID NO: 741710 - RNA, 20 nt, Human
aaucaaguguugcagguuua

SEQ ID NO: 741711 - RNA, 24 nt, Human
acaauauacacaaagaaaacuauu

SEQ ID NO: 741712 - RNA, 23 nt, Human
acagugcccggccuacaucugcu

SEQ ID NO: 741713 - RNA, 22 nt, Human
accauguuggagguuggucucg

SEQ ID NO: 741714 - RNA, 19 nt, Human
acccugguaaauauuaugg

SEQ ID NO: 741715 - RNA, 19 nt, Human
acgggguuucaccauguug

SEQ ID NO: 741716 - RNA, 20 nt, Human
acgggguuucaccauguugg

SEQ ID NO: 741717 - RNA, 24 nt, Human
acgggguuucaccauguuggaggu

SEQ ID NO: 741718 - RNA, 19 nt, Human
acuacaggugugugccacu

SEQ ID NO: 741719 - RNA, 24 nt, Human
acuugucucaaauuuuggggguuc

SEQ ID NO: 741720 - RNA, 19 nt, Human
agaaaacuauuuaucuauu

SEQ ID NO: 741721 - RNA, 18 nt, Human
agacagaaucuugcuaug

SEQ ID NO: 741722 - RNA, 19 nt, Human
agacuuaaaaauaacggua

SEQ ID NO: 741723 - RNA, 21 nt, Human
agagacagaaucuugcuaugu

SEQ ID NO: 741724 - RNA, 23 nt, Human
agcagcugggacuacaggugugu

SEQ ID NO: 741725 - RNA, 23 nt, Human
aggagaucauaaaaacaucaaaa

SEQ ID NO: 741726 - RNA, 19 nt, Human
agggacgggguuucaccau

SEQ ID NO: 741727 - RNA, 24 nt, Human
aggugauccacccaccuuggccuc

SEQ ID NO: 741728 - RNA, 25 nt, Human
agguuggagugcagcagcgcaaucu

SEQ ID NO: 741729 - RNA, 23 nt, Human
agguuugagcuacagugcccggc

SEQ ID NO: 741730 - RNA, 23 nt, Human
agugcaacuguuugucucucacc

SEQ ID NO: 741731 - RNA, 24 nt, Human
agugcagcagcgcaaucucagcuc

SEQ ID NO: 741732 - RNA, 24 nt, Human
agugcugggauuauagguuugagc

SEQ ID NO: 741733 - RNA, 23 nt, Human
augagagcuccagagacuuaaaa

SEQ ID NO: 741734 - RNA, 22 nt, Human
caaaaccacugugcuauugcau

SEQ ID NO: 741735 - RNA, 18 nt, Human
caaagugcugggauuaua

SEQ ID NO: 741736 - RNA, 22 nt, Human
caagcaauucuccugccucagc

SEQ ID NO: 741737 - RNA, 27 nt, Human
caagcaauucuccugccucagccuccc

SEQ ID NO: 741738 - RNA, 22 nt, Human
caagugaucuuccugccucagc

SEQ ID NO: 741739 - RNA, 24 nt, Human
cacaccaccaugcccagcuaauuu

SEQ ID NO: 741740 - RNA, 24 nt, Human
caccaugcccagcuaauuuuugua

SEQ ID NO: 741741 - RNA, 22 nt, Human
caccauguuggagguuggucuc

SEQ ID NO: 741742 - RNA, 22 nt, Human
cacccaccuuggccucccaaag

SEQ ID NO: 741743 - RNA, 23 nt, Human
cacccaccuuggccucccaaagu

SEQ ID NO: 741744 - RNA, 22 nt, Human
caccuaucugugaccuggaagc

SEQ ID NO: 741745 - RNA, 18 nt, Human
cacugcaaccuuugccuc

SEQ ID NO: 741746 - RNA, 21 nt, Human
cacugcaaccuuugccuccca

SEQ ID NO: 741747 - RNA, 23 nt, Human
cacugcagauuugaacuccuggg

SEQ ID NO: 741748 - RNA, 18 nt, Human
cagaaucuugcuauguug

SEQ ID NO: 741749 - RNA, 22 nt, Human
cagcacuaucuuguaaaaugau

SEQ ID NO: 741750 - RNA, 18 nt, Human
cagcagcgcaaucucagc

SEQ ID NO: 741751 - RNA, 23 nt, Human
cagccucccaaguaacugggacu

SEQ ID NO: 741752 - RNA, 24 nt, Human
cagcgcaaucucagcucacugcaa

SEQ ID NO: 741753 - RNA, 18 nt, Human
cagcugggacuacaggug

SEQ ID NO: 741754 - RNA, 26 nt, Human
caguguaagauaacaccuucagauua

SEQ ID NO: 741755 - RNA, 21 nt, Human
caucugcuuuuuauacucucu

SEQ ID NO: 741756 - RNA, 18 nt, Human
caugugcagcuuuacaug

SEQ ID NO: 741757 - RNA, 19 nt, Human
cauuccaugugggccugcg

SEQ ID NO: 741758 - RNA, 21 nt, Human
cauuccaugugggccugcgcu

SEQ ID NO: 741759 - RNA, 18 nt, Human
ccaaagugcugggauuau

SEQ ID NO: 741760 - RNA, 21 nt, Human
ccaaagugcugggauuauagg

SEQ ID NO: 741761 - RNA, 22 nt, Human
ccaaagugcugggauuauaggu

SEQ ID NO: 741762 - RNA, 24 nt, Human
cccaaagugcugggauuauagguu

SEQ ID NO: 741763 - RNA, 23 nt, Human
cccaaguaacugggacugcaggc

SEQ ID NO: 741764 - RNA, 23 nt, Human
cccagguucaagcaauucuccug

SEQ ID NO: 741765 - RNA, 24 nt, Human
cccauuaaaagugaaccccagaca

SEQ ID NO: 741766 - RNA, 21 nt, Human
ccccagaaauagacucuuacu

SEQ ID NO: 741767 - RNA, 22 nt, Human
ccccuaaaauguauaaaaccaa

SEQ ID NO: 741768 - RNA, 18 nt, Human
ccuaucugugaccuggaa

SEQ ID NO: 741769 - RNA, 24 nt, Human
ccucccagguucaagcaauucucc

SEQ ID NO: 741770 - RNA, 24 nt, Human
ccucccuuugcuucaaauuguccc

SEQ ID NO: 741771 - RNA, 24 nt, Human
ccugaccucaggugauccacccac

SEQ ID NO: 741772 - RNA, 18 nt, Human
ccugcgcuacuuuucugu

SEQ ID NO: 741773 - RNA, 18 nt, Human
ccuggaagcccccucccc

SEQ ID NO: 741774 - RNA, 22 nt, Human
ccuggguucaagugaucuuccu

SEQ ID NO: 741775 - RNA, 23 nt, Human
ccuggguucaagugaucuuccug

SEQ ID NO: 741776 - RNA, 22 nt, Human
ccugguaaauauuauggaaaag

SEQ ID NO: 741777 - RNA, 23 nt, Human
cgcacaccaccaugcccagcuaa

SEQ ID NO: 741778 - RNA, 19 nt, Human
cuaaacccauuaaaaguga

SEQ ID NO: 741779 - RNA, 18 nt, Human
cuaaaguuauggccaggu

SEQ ID NO: 741780 - RNA, 26 nt, Human
cuaagauaaaugcagaucugacuguc

SEQ ID NO: 741781 - RNA, 24 nt, Human
cucacugcaaccuuugccucccag

SEQ ID NO: 741782 - RNA, 24 nt, Human
cucacugcaaccuuugccucccag

SEQ ID NO: 741783 - RNA, 24 nt, Human
cucaggugauccacccaccuuggc

SEQ ID NO: 741784 - RNA, 23 nt, Human
cuccagagacuuaaaaauaacgg

SEQ ID NO: 741785 - RNA, 18 nt, Human
cucugucgcccagguugg

SEQ ID NO: 741786 - RNA, 23 nt, Human
cugcaaccuuugccucccagguu

SEQ ID NO: 741787 - RNA, 24 nt, Human
cugcaaccuuugccucccagguuc

SEQ ID NO: 741788 - RNA, 24 nt, Human
cugcuuagggcaaaccugccuccc

SEQ ID NO: 741789 - RNA, 19 nt, Human
cuggaagcccccuccccgc

SEQ ID NO: 741790 - RNA, 27 nt, Human
cuggcucuucccaugugggggacgauc

SEQ ID NO: 741791 - RNA, 18 nt, Human
cugguaaguacugugaaa

SEQ ID NO: 741792 - RNA, 21 nt, Human
cuuagggcaaaccugccuccc

SEQ ID NO: 741793 - RNA, 23 nt, Human
cuuccugccucagccucaggagc

SEQ ID NO: 741794 - RNA, 21 nt, Human
gaaacugcuuagggcaaaccu

SEQ ID NO: 741795 - RNA, 20 nt, Human
gaaccccagacaaacuaaaa

SEQ ID NO: 741796 - RNA, 24 nt, Human
gacacgaaauagccagguaaacac

SEQ ID NO: 741797 - RNA, 23 nt, Human
gaccucaggugauccacccaccu

SEQ ID NO: 741798 - RNA, 18 nt, Human
gacgggguuucaccaugu

SEQ ID NO: 741799 - RNA, 21 nt, Human
gacuacaggugugugccacug

SEQ ID NO: 741800 - RNA, 24 nt, Human
gacuacaggugugugccacugugc

SEQ ID NO: 741801 - RNA, 24 nt, Human
gacugcaggcgcacaccaccaugc

SEQ ID NO: 741802 - RNA, 21 nt, Human
gagagcuccagagacuuaaaa

SEQ ID NO: 741803 - RNA, 21 nt, Human
gagauggagucuugcucuguc

SEQ ID NO: 741804 - RNA, 20 nt, Human
gagcagcugggacuacaggu

SEQ ID NO: 741805 - RNA, 26 nt, Human
gagcagcugggacuacaggugugugc

SEQ ID NO: 741806 - RNA, 25 nt, Human
gaucauuuagaguuagcuaauuuaa

SEQ ID NO: 741807 - RNA, 24 nt, Human
gcacugcagauuugaacuccuggg

SEQ ID NO: 741808 - RNA, 22 nt, Human
gcccagcuaauuuuuguauuuu

SEQ ID NO: 741809 - RNA, 20 nt, Human
gcuauugaaggacucuagau

SEQ ID NO: 741810 - RNA, 24 nt, Human
ggaaaagcuaaucagaaacucaaa

SEQ ID NO: 741811 - RNA, 22 nt, Human
ggacgcugaucaucucauuuuu

SEQ ID NO: 741812 - RNA, 20 nt, Human
ggacuacaggugugugccac

SEQ ID NO: 741813 - RNA, 24 nt, Human
ggacuacaggugugugccacugug

SEQ ID NO: 741814 - RNA, 23 nt, Human
ggagucuugcucugucgcccagg

SEQ ID NO: 741815 - RNA, 19 nt, Human
gggacgggguuucaccaug

SEQ ID NO: 741816 - RNA, 18 nt, Human
gggcaaaccugccuccca

SEQ ID NO: 741817 - RNA, 23 nt, Human
gguagagagacaaaacuuaugug

SEQ ID NO: 741818 - RNA, 19 nt, Human
ggucucgaacuccugaccu

SEQ ID NO: 741819 - RNA, 24 nt, Human
gguuggucucgaacuccugaccuc

SEQ ID NO: 741820 - RNA, 22 nt, Human
guaauuuuuuaaagagacagaa

SEQ ID NO: 741821 - RNA, 22 nt, Human
guauaaaaccaagcugugcccc

SEQ ID NO: 741822 - RNA, 24 nt, Human
gugauccacccaccuuggccuccc

SEQ ID NO: 741823 - RNA, 21 nt, Human
gugaucuuccugccucagccu

SEQ ID NO: 741824 - RNA, 19 nt, Human
guuuggacaccaaucauuc

SEQ ID NO: 741825 - RNA, 23 nt, Human
uaaaaacaucaaaacuauaagcc

SEQ ID NO: 741826 - RNA, 18 nt, Human
uaaaagaaguuacuguuu

SEQ ID NO: 741827 - RNA, 23 nt, Human
uaacgguaaaauuucugucuccu

SEQ ID NO: 741828 - RNA, 19 nt, Human
uaacugggacugcaggcgc

SEQ ID NO: 741829 - RNA, 18 nt, Human
uaagauaaaugcagaucu

SEQ ID NO: 741830 - RNA, 24 nt, Human
uaauuuuuguauuuuuauuaggga

SEQ ID NO: 741831 - RNA, 21 nt, Human
uacccagugguacaauuucau

SEQ ID NO: 741832 - RNA, 23 nt, Human
uaccccauccuuuuuauguuucu

SEQ ID NO: 741833 - RNA, 21 nt, Human
uagcaauuacagauguacuca

SEQ ID NO: 741834 - RNA, 21 nt, Human
uagggacgggguuucaccaug

SEQ ID NO: 741835 - RNA, 22 nt, Human
uagggacgggguuucaccaugu

SEQ ID NO: 741836 - RNA, 23 nt, Human
uauaaaaccaagcugugccccaa

SEQ ID NO: 741837 - RNA, 19 nt, Human
uaucagcuagcugggcucu

SEQ ID NO: 741838 - RNA, 18 nt, Human
uauguugcccagauugga

SEQ ID NO: 741839 - RNA, 24 nt, Human
uauuagggacgggguuucaccaug

SEQ ID NO: 741840 - RNA, 19 nt, Human
ucaagugaucuuccugccu

SEQ ID NO: 741841 - RNA, 24 nt, Human
ucaauuaguaagacaaagcacauc

SEQ ID NO: 741842 - RNA, 22 nt, Human
ucacuagaaaugcauuuucauc

SEQ ID NO: 741843 - RNA, 19 nt, Human
ucacugcaaccuuugccuc

SEQ ID NO: 741844 - RNA, 24 nt, Human
ucacugcaaccuuugccucccagg

SEQ ID NO: 741845 - RNA, 25 nt, Human
ucacugcaaccuuugccucccaggu

SEQ ID NO: 741846 - RNA, 27 nt, Human
ucagcucacugcaaccuuugccuccca

SEQ ID NO: 741847 - RNA, 23 nt, Human
ucccaaagugcugggauuauagg

SEQ ID NO: 741848 - RNA, 24 nt, Human
ucccaaguaacugggacugcaggc

SEQ ID NO: 741849 - RNA, 21 nt, Human
ucccagguucaagcaauucuc

SEQ ID NO: 741850 - RNA, 24 nt, Human
ucccagguucaagcaauucuccug

SEQ ID NO: 741851 - RNA, 21 nt, Human
uccccgcuaccagucuuccuc

SEQ ID NO: 741852 - RNA, 20 nt, Human
uccuggguucaagugaucuu

SEQ ID NO: 741853 - RNA, 24 nt, Human
uccuggguucaagugaucuuccug

SEQ ID NO: 741854 - RNA, 18 nt, Human
ucgcccagguuggagugc

SEQ ID NO: 741855 - RNA, 20 nt, Human
ucucacuucgaucucuucca

SEQ ID NO: 741856 - RNA, 25 nt, Human
ucuccugccucagccucccaaguaa

SEQ ID NO: 741857 - RNA, 23 nt, Human
ucucgaacuccugaccucaggug

SEQ ID NO: 741858 - RNA, 19 nt, Human
ucugugaucuggcucuucc

SEQ ID NO: 741859 - RNA, 23 nt, Human
ucugugaucuggcucuucccaug

SEQ ID NO: 741860 - RNA, 23 nt, Human
ucuugcuauguugcccagauugg

SEQ ID NO: 741861 - RNA, 24 nt, Human
ucuugcuauguugcccagauugga

SEQ ID NO: 741862 - RNA, 23 nt, Human
ucuugcucugucgcccagguugg

SEQ ID NO: 741863 - RNA, 24 nt, Human
ucuugcucugucgcccagguugga

SEQ ID NO: 741864 - RNA, 21 nt, Human
ucuugggccuccaaaaucacu

SEQ ID NO: 741865 - RNA, 21 nt, Human
ugaccucaggugauccaccca

SEQ ID NO: 741866 - RNA, 24 nt, Human
ugaccucaggugauccacccaccu

SEQ ID NO: 741867 - RNA, 18 nt, Human
ugaccuggaagcccccuc

SEQ ID NO: 741868 - RNA, 19 nt, Human
ugagagcuccagagacuua

SEQ ID NO: 741869 - RNA, 24 nt, Human
ugauccacccaccuuggccuccca

SEQ ID NO: 741870 - RNA, 23 nt, Human
ugauuuacaguguaagauaacac

SEQ ID NO: 741871 - RNA, 23 nt, Human
ugcaaccuuugccucccagguuc

SEQ ID NO: 741872 - RNA, 21 nt, Human
ugccucagccucaggagcagc

SEQ ID NO: 741873 - RNA, 24 nt, Human
ugccucagccucaggagcagcugg

SEQ ID NO: 741874 - RNA, 24 nt, Human
ugccucagccucccaaguaacugg

SEQ ID NO: 741875 - RNA, 21 nt, Human
ugcuauugaaggacucuagau

SEQ ID NO: 741876 - RNA, 24 nt, Human
ugcucugucgcccagguuggagug

SEQ ID NO: 741877 - RNA, 25 nt, Human
ugcucuuguuuccuuucuaguucuc

SEQ ID NO: 741878 - RNA, 20 nt, Human
uggaauuugggguauuaaga

SEQ ID NO: 741879 - RNA, 22 nt, Human
uggagguuggucucgaacuccu

SEQ ID NO: 741880 - RNA, 23 nt, Human
uggagucuugcucugucgcccag

SEQ ID NO: 741881 - RNA, 24 nt, Human
uggagucuugcucugucgcccagg

SEQ ID NO: 741882 - RNA, 20 nt, Human
uggauguguguccucaaccu

SEQ ID NO: 741883 - RNA, 21 nt, Human
ugggacuacaggugugugcca

SEQ ID NO: 741884 - RNA, 22 nt, Human
ugggacuacaggugugugccac

SEQ ID NO: 741885 - RNA, 22 nt, Human
ugggacuacaggugugugccac

SEQ ID NO: 741886 - RNA, 22 nt, Human
ugggacuacaggugugugccac

SEQ ID NO: 741887 - RNA, 24 nt, Human
ugggacuacaggugugugccacug

SEQ ID NO: 741888 - RNA, 22 nt, Human
ugggacugcaggcgcacaccac

SEQ ID NO: 741889 - RNA, 18 nt, Human
ugggauuauagguuugag

SEQ ID NO: 741890 - RNA, 19 nt, Human
ugggauuauagguuugagc

SEQ ID NO: 741891 - RNA, 22 nt, Human
ugggauuauagguuugagcuac

SEQ ID NO: 741892 - RNA, 22 nt, Human
ugggauuauagguuugagcuac

SEQ ID NO: 741893 - RNA, 23 nt, Human
uggguucaagugaucuuccugcc

SEQ ID NO: 741894 - RNA, 24 nt, Human
uggguucaagugaucuuccugccu

SEQ ID NO: 741895 - RNA, 21 nt, Human
ugucgcccagguuggagugca

SEQ ID NO: 741896 - RNA, 21 nt, Human
uguuugucucucaccuaucug

SEQ ID NO: 741897 - RNA, 24 nt, Human
uuaaaaugugucaguuugguuaca

SEQ ID NO: 741898 - RNA, 18 nt, Human
uuaaagagacagaaucuu

SEQ ID NO: 741899 - RNA, 18 nt, Human
uuaacaaaggaguaaucu

SEQ ID NO: 741900 - RNA, 23 nt, Human
uuaaccauuuacagacguauuua

SEQ ID NO: 741901 - RNA, 21 nt, Human
uuaggacacgaaauagccagg

SEQ ID NO: 741902 - RNA, 21 nt, Human
uuagggacgggguuucaccau

SEQ ID NO: 741903 - RNA, 24 nt, Human
uuauuagggacgggguuucaccau

SEQ ID NO: 741904 - RNA, 21 nt, Human
uucaagcaauucuccugccuc

SEQ ID NO: 741905 - RNA, 24 nt, Human
uucaagcaauucuccugccucagc

SEQ ID NO: 741906 - RNA, 21 nt, Human
uucaagugaucuuccugccuc

SEQ ID NO: 741907 - RNA, 23 nt, Human
uucaagugaucuuccugccucag

SEQ ID NO: 741908 - RNA, 24 nt, Human
uucaagugaucuuccugccucagc

SEQ ID NO: 741909 - RNA, 22 nt, Human
uuccugccucagccucaggagc

SEQ ID NO: 741910 - RNA, 20 nt, Human
uugcccagauuggaaugcug

SEQ ID NO: 741911 - RNA, 18 nt, Human
uuggccucccaaagugcu

SEQ ID NO: 741912 - RNA, 20 nt, Human
uugggguauuaagaauagaa

SEQ ID NO: 741913 - RNA, 23 nt, Human
uuuaaaaacaacaauauacacaa

SEQ ID NO: 741914 - RNA, 21 nt, Human
uuuaacauucauuucccauua

SEQ ID NO: 741915 - RNA, 21 nt, Human
uuucagaaaaauaaaaccuaa

SEQ ID NO: 741916 - RNA, 24 nt, Human
uuugagagguagugaggaaagaaa

SEQ ID NO: 741917 - RNA, 20 nt, Human
uuuuauggauuuuguaauuu

SEQ ID NO: 741918 - RNA, 24 nt, Human
uuuuuauuagggacgggguuucac

SEQ ID NO: 741919 - RNA, 18 nt, Human
uuuuuguauuuuuauuag

SEQ ID NO: 741920 - RNA, 23 nt, Human
uuuuuguauuuuuauuagggacg

SEQ ID NO: 741921 - RNA, 24 nt, Human
aaauuuuuguauuuucuguaggga

SEQ ID NO: 741922 - RNA, 21 nt, Human
aagaacagcaaugagcccaac

SEQ ID NO: 741923 - RNA, 20 nt, Human
aagagccacauugaauaaug

SEQ ID NO: 741924 - RNA, 25 nt, Human
aagcaauccucccaccucagccucc

SEQ ID NO: 741925 - RNA, 18 nt, Human
aagcagcauagacauugc

SEQ ID NO: 741926 - RNA, 19 nt, Human
aaucuuguaaaugaucgcu

SEQ ID NO: 741927 - RNA, 23 nt, Human
aauuuuuguauuuucuguaggga

SEQ ID NO: 741928 - RNA, 24 nt, Human
accauguugccuuggcuggucucg

SEQ ID NO: 741929 - RNA, 20 nt, Human
accucagccucccgaguagc

SEQ ID NO: 741930 - RNA, 19 nt, Human
acuacaggugugugccacc

SEQ ID NO: 741931 - RNA, 23 nt, Human
acugcaugauucaugacaaacug

SEQ ID NO: 741932 - RNA, 21 nt, Human
agcaauccacccaccucagcc

SEQ ID NO: 741933 - RNA, 25 nt, Human
agcaauuuuuaugucuguauguuua

SEQ ID NO: 741934 - RNA, 23 nt, Human
agccucgaccuccugagcucaag

SEQ ID NO: 741935 - RNA, 23 nt, Human
aggacuauaggcacgagccaccg

SEQ ID NO: 741936 - RNA, 21 nt, Human
aggcacgagccaccgugccca

SEQ ID NO: 741937 - RNA, 23 nt, Human
aguagcugagacuacaggugugu

SEQ ID NO: 741938 - RNA, 20 nt, Human
agugcaguggugugaucaug

SEQ ID NO: 741939 - RNA, 23 nt, Human
agugcaguggugugaucauggcu

SEQ ID NO: 741940 - RNA, 24 nt, Human
agugcaguggugugaucauggcuc

SEQ ID NO: 741941 - RNA, 18 nt, Human
augagguuucaccauguu

SEQ ID NO: 741942 - RNA, 25 nt, Human
augagguuucaccauguugccuugg

SEQ ID NO: 741943 - RNA, 21 nt, Human
auuguugugggagggaccugg

SEQ ID NO: 741944 - RNA, 19 nt, Human
caaagugccaggacuauag

SEQ ID NO: 741945 - RNA, 23 nt, Human
caaagugccaggacuauaggcac

SEQ ID NO: 741946 - RNA, 24 nt, Human
caaagugccaggacuauaggcacg

SEQ ID NO: 741947 - RNA, 27 nt, Human
caagcaauccucccaccucagccuccc

SEQ ID NO: 741948 - RNA, 23 nt, Human
caauguaacaacaaaaaauuuca

SEQ ID NO: 741949 - RNA, 24 nt, Human
caccauguugccuuggcuggucuc

SEQ ID NO: 741950 - RNA, 18 nt, Human
cacccaaaucucaucuug

SEQ ID NO: 741951 - RNA, 23 nt, Human
cacccaccucagccacucaaagu

SEQ ID NO: 741952 - RNA, 24 nt, Human
caccucagccucccgaguagcuga

SEQ ID NO: 741953 - RNA, 24 nt, Human
cagccaauagcagaaaagaacgau

SEQ ID NO: 741954 - RNA, 18 nt, Human
cagcccugacagggauaa

SEQ ID NO: 741955 - RNA, 21 nt, Human
cagcccugacagggauaacuu

SEQ ID NO: 741956 - RNA, 21 nt, Human
caggacuauaggcacgagcca

SEQ ID NO: 741957 - RNA, 24 nt, Human
caucaggaagaaauuucaauaaug

SEQ ID NO: 741958 - RNA, 20 nt, Human
ccaccacacccagcaaauuu

SEQ ID NO: 741959 - RNA, 23 nt, Human
ccaccucagccucccgaguagcu

SEQ ID NO: 741960 - RNA, 21 nt, Human
cccauacuguucuugugauaa

SEQ ID NO: 741961 - RNA, 22 nt, Human
cccccauacuguucuugugaua

SEQ ID NO: 741962 - RNA, 24 nt, Human
cccgaguagcugagacuacaggug

SEQ ID NO: 741963 - RNA, 21 nt, Human
cccucccccgcuucggaucac

SEQ ID NO: 741964 - RNA, 19 nt, Human
ccgccgcccccccccuccc

SEQ ID NO: 741965 - RNA, 20 nt, Human
ccuaggcuacagugcagugg

SEQ ID NO: 741966 - RNA, 24 nt, Human
ccucccaccucagccucccgagua

SEQ ID NO: 741967 - RNA, 19 nt, Human
ccucgaccuccugagcuca

SEQ ID NO: 741968 - RNA, 20 nt, Human
ccugagcucaagcaauccuc

SEQ ID NO: 741969 - RNA, 24 nt, Human
ccugguuucaagcaauccacccac

SEQ ID NO: 741970 - RNA, 20 nt, Human
ccuguaagcccaucaucuuc

SEQ ID NO: 741971 - RNA, 22 nt, Human
ccuuuaugagcaguguaaaaac

SEQ ID NO: 741972 - RNA, 25 nt, Human
cgaccuccugagcucaagcaauccu

SEQ ID NO: 741973 - RNA, 23 nt, Human
cuaaagaacagcaaugagcccaa

SEQ ID NO: 741974 - RNA, 21 nt, Human
cucaagcaauccucccaccuc

SEQ ID NO: 741975 - RNA, 24 nt, Human
cucaagcaauccucccaccucagc

SEQ ID NO: 741976 - RNA, 24 nt, Human
cuccccagccacauggaacucuga

SEQ ID NO: 741977 - RNA, 23 nt, Human
cuccugguuucaagcaauccacc

SEQ ID NO: 741978 - RNA, 27 nt, Human
cuccugguuucaagcaauccacccacc

SEQ ID NO: 741979 - RNA, 24 nt, Human
cuccuucugucaccuaggcuacag

SEQ ID NO: 741980 - RNA, 20 nt, Human
cugaagccucgaccuccuga

SEQ ID NO: 741981 - RNA, 24 nt, Human
cuguagggaugagguuucaccaug

SEQ ID NO: 741982 - RNA, 22 nt, Human
cuuguagaguuugauuuuuuuu

SEQ ID NO: 741983 - RNA, 22 nt, Human
cuuugaagauuccuccucaguc

SEQ ID NO: 741984 - RNA, 23 nt, Human
gaacuccugguuucaagcaaucc

SEQ ID NO: 741985 - RNA, 23 nt, Human
gaccuccugagcucaagcaaucc

SEQ ID NO: 741986 - RNA, 19 nt, Human
gagguuucaccauguugcc

SEQ ID NO: 741987 - RNA, 26 nt, Human
gaguagcugagacuacaggugugugc

SEQ ID NO: 741988 - RNA, 19 nt, Human
gaucagaacucuuugaaga

SEQ ID NO: 741989 - RNA, 23 nt, Human
gccuuggcuggucucgaacuccu

SEQ ID NO: 741990 - RNA, 21 nt, Human
gcucacugaagccucgaccuc

SEQ ID NO: 741991 - RNA, 22 nt, Human
ggacuauaggcacgagccaccg

SEQ ID NO: 741992 - RNA, 22 nt, Human
ggcuacagugcaguggugugau

SEQ ID NO: 741993 - RNA, 19 nt, Human
ggcuggucucgaacuccug

SEQ ID NO: 741994 - RNA, 19 nt, Human
gggaugagguuucaccaug

SEQ ID NO: 741995 - RNA, 24 nt, Human
gguuucaagcaauccacccaccuc

SEQ ID NO: 741996 - RNA, 19 nt, Human
guagcugagacuacaggug

SEQ ID NO: 741997 - RNA, 23 nt, Human
uaaaaaucuccaaaugcuuauau

SEQ ID NO: 741998 - RNA, 18 nt, Human
uacaaugugauacaguuu

SEQ ID NO: 741999 - RNA, 24 nt, Human
uacaggugugugccaccacaccca

SEQ ID NO: 742000 - RNA, 18 nt, Human
uaggcacgagccaccgug

SEQ ID NO: 742001 - RNA, 23 nt, Human
uauguuccuuucugagcugcagu

SEQ ID NO: 742002 - RNA, 23 nt, Human
ucaaagugccaggacuauaggca

SEQ ID NO: 742003 - RNA, 21 nt, Human
ucacuaaagaacagcaaugag

SEQ ID NO: 742004 - RNA, 19 nt, Human
ucacuaaguuaauaagugc

SEQ ID NO: 742005 - RNA, 23 nt, Human
ucagcaaggcuagauuucacuaa

SEQ ID NO: 742006 - RNA, 18 nt, Human
ucagccaaaugucuugcc

SEQ ID NO: 742007 - RNA, 21 nt, Human
uccacauacaaugugauacag

SEQ ID NO: 742008 - RNA, 21 nt, Human
uccacccaccucagccacuca

SEQ ID NO: 742009 - RNA, 23 nt, Human
ucccgaguagcugagacuacagg

SEQ ID NO: 742010 - RNA, 24 nt, Human
ucccgaguagcugagacuacaggu

SEQ ID NO: 742011 - RNA, 20 nt, Human
ucccggagcacuugaacuug

SEQ ID NO: 742012 - RNA, 24 nt, Human
ucccggagcacuugaacuugggca

SEQ ID NO: 742013 - RNA, 20 nt, Human
uccuucugucaccuaggcua

SEQ ID NO: 742014 - RNA, 18 nt, Human
ucuccuucugucaccuag

SEQ ID NO: 742015 - RNA, 21 nt, Human
ucucgaacuccugguuucaag

SEQ ID NO: 742016 - RNA, 18 nt, Human
ugaaaauuuaaagggugg

SEQ ID NO: 742017 - RNA, 21 nt, Human
ugagacuacaggugugugcca

SEQ ID NO: 742018 - RNA, 24 nt, Human
ugagacuacaggugugugccacca

SEQ ID NO: 742019 - RNA, 18 nt, Human
ugagguuucaccauguug

SEQ ID NO: 742020 - RNA, 22 nt, Human
ugcaguggugugaucauggcuc

SEQ ID NO: 742021 - RNA, 23 nt, Human
ugcaguggugugaucauggcuca

SEQ ID NO: 742022 - RNA, 19 nt, Human
ugccaccacacccagcaaa

SEQ ID NO: 742023 - RNA, 22 nt, Human
ugcuugauuacucucaucuugc

SEQ ID NO: 742024 - RNA, 23 nt, Human
ugggagaugacugaaucauggcg

SEQ ID NO: 742025 - RNA, 22 nt, Human
uggugugaucauggcucacuga

SEQ ID NO: 742026 - RNA, 21 nt, Human
ugguuucaagcaauccaccca

SEQ ID NO: 742027 - RNA, 22 nt, Human
ugguuucaagcaauccacccac

SEQ ID NO: 742028 - RNA, 21 nt, Human
uguagaguuugauuuuuuuuc

SEQ ID NO: 742029 - RNA, 23 nt, Human
uguagggaugagguuucaccaug

SEQ ID NO: 742030 - RNA, 24 nt, Human
uguagggaugagguuucaccaugu

SEQ ID NO: 742031 - RNA, 18 nt, Human
ugucuccacccaaaucuc

SEQ ID NO: 742032 - RNA, 18 nt, Human
ugugggagggaccuggug

SEQ ID NO: 742033 - RNA, 19 nt, Human
ugugggagggaccuggugg

SEQ ID NO: 742034 - RNA, 24 nt, Human
ugugugccaccacacccagcaaau

SEQ ID NO: 742035 - RNA, 21 nt, Human
uuaaugguaguacaauguuuu

SEQ ID NO: 742036 - RNA, 26 nt, Human
uucaagcaauccacccaccucagcca

SEQ ID NO: 742037 - RNA, 20 nt, Human
uucccauuguugugggaggg

SEQ ID NO: 742038 - RNA, 22 nt, Human
uugagaucugaugguuuuauaa

SEQ ID NO: 742039 - RNA, 22 nt, Human
uugauguaaguaaauauuuuga

SEQ ID NO: 742040 - RNA, 23 nt, Human
uugugaggccuccccagccacau

SEQ ID NO: 742041 - RNA, 22 nt, Human
uugugauaagugaauaagucuc

SEQ ID NO: 742042 - RNA, 24 nt, Human
uuuggccgugucuccacccaaauc

SEQ ID NO: 742043 - RNA, 23 nt, Human
uuuuuguauuuucuguagggaug

SEQ ID NO: 742044 - RNA, 20 nt, Human
aacacugcucaguucaaggu

SEQ ID NO: 742045 - RNA, 19 nt, Human
aacagcagcgugagccccc

SEQ ID NO: 742046 - RNA, 18 nt, Human
aacaguucccugcccaca

SEQ ID NO: 742047 - RNA, 26 nt, Human
aaccucacccccuucccagcuuccag

SEQ ID NO: 742048 - RNA, 18 nt, Human
aagcaggugaaaccccug

SEQ ID NO: 742049 - RNA, 19 nt, Human
aagcaggugaaaccccugc

SEQ ID NO: 742050 - RNA, 18 nt, Human
aaggcccugauuuuggag

SEQ ID NO: 742051 - RNA, 19 nt, Human
aagggcucagcccagggac

SEQ ID NO: 742052 - RNA, 19 nt, Human
aagggggcccaagaggagg

SEQ ID NO: 742053 - RNA, 22 nt, Human
aauagcccuguggacagaaagu

SEQ ID NO: 742054 - RNA, 23 nt, Human
aaugcaauccccaaagagacacu

SEQ ID NO: 742055 - RNA, 22 nt, Human
acaagccccacaaagccgaggg

SEQ ID NO: 742056 - RNA, 26 nt, Human
acacccucuggucccccugcgccccc

SEQ ID NO: 742057 - RNA, 19 nt, Human
acaccgcagcccccagggc

SEQ ID NO: 742058 - RNA, 20 nt, Human
acagaaaguugggcccaggc

SEQ ID NO: 742059 - RNA, 19 nt, Human
acccccaaagcagccacag

SEQ ID NO: 742060 - RNA, 19 nt, Human
accuuguggcccccaggcu

SEQ ID NO: 742061 - RNA, 19 nt, Human
acgguggugucacagcagg

SEQ ID NO: 742062 - RNA, 21 nt, Human
acugaugccaccagaaaacaa

SEQ ID NO: 742063 - RNA, 30 nt, Human
agaaagggggcccaagaggagggggggaaa

SEQ ID NO: 742064 - RNA, 20 nt, Human
agaagcuccccagcacacug

SEQ ID NO: 742065 - RNA, 25 nt, Human
agaccgaguccacuggguggcuggu

SEQ ID NO: 742066 - RNA, 18 nt, Human
agaggagggggggaaggc

SEQ ID NO: 742067 - RNA, 20 nt, Human
agaggccagggcgucaggcg

SEQ ID NO: 742068 - RNA, 26 nt, Human
agaguccaugaguggcccugagcagc

SEQ ID NO: 742069 - RNA, 24 nt, Human
agcacauucccuagucuaccagca

SEQ ID NO: 742070 - RNA, 23 nt, Human
agcacguugggugucugcuuccc

SEQ ID NO: 742071 - RNA, 21 nt, Human
aggaugggagccuggagaaag

SEQ ID NO: 742072 - RNA, 24 nt, Human
aggcaggaaaugcaauccccaaag

SEQ ID NO: 742073 - RNA, 18 nt, Human
aggcaugauggcuucugc

SEQ ID NO: 742074 - RNA, 19 nt, Human
aggcugaggggguccagua

SEQ ID NO: 742075 - RNA, 19 nt, Human
aggggaugggggcuaagaa

SEQ ID NO: 742076 - RNA, 21 nt, Human
aggggaugggggcuaagaaag

SEQ ID NO: 742077 - RNA, 20 nt, Human
aggucucugguggcuugaaa

SEQ ID NO: 742078 - RNA, 18 nt, Human
auagaguugggguccaug

SEQ ID NO: 742079 - RNA, 24 nt, Human
caaaacagagcugccaccagcgca

SEQ ID NO: 742080 - RNA, 19 nt, Human
caaagcagccacaguuggc

SEQ ID NO: 742081 - RNA, 21 nt, Human
caagcccuaguguggaccccc

SEQ ID NO: 742082 - RNA, 18 nt, Human
caaggggaugggggcuaa

SEQ ID NO: 742083 - RNA, 19 nt, Human
caauccccaaagagacacu

SEQ ID NO: 742084 - RNA, 18 nt, Human
cacaaagccgagggaaca

SEQ ID NO: 742085 - RNA, 18 nt, Human
cacacaacugcuccaggg

SEQ ID NO: 742086 - RNA, 23 nt, Human
cacauuuauccuccgccaagcug

SEQ ID NO: 742087 - RNA, 21 nt, Human
cacccaacgcagcucaggggc

SEQ ID NO: 742088 - RNA, 21 nt, Human
cacccccuucccagcuuccag

SEQ ID NO: 742089 - RNA, 23 nt, Human
cacccccuucccagcuuccagcc

SEQ ID NO: 742090 - RNA, 22 nt, Human
caccgcagcccccagggcaggg

SEQ ID NO: 742091 - RNA, 21 nt, Human
cacgccagauaaaaccagaga

SEQ ID NO: 742092 - RNA, 18 nt, Human
cacugcucaguucaaggu

SEQ ID NO: 742093 - RNA, 19 nt, Human
cacugcuggggcagcagcc

SEQ ID NO: 742094 - RNA, 20 nt, Human
cacuguggacgugaaaguca

SEQ ID NO: 742095 - RNA, 21 nt, Human
cagaucauccugggugucccc

SEQ ID NO: 742096 - RNA, 27 nt, Human
cagaucccagauggaacaugauuggag

SEQ ID NO: 742097 - RNA, 22 nt, Human
cagccacacagaagcuccccag

SEQ ID NO: 742098 - RNA, 19 nt, Human
cagcugaaggagucccaca

SEQ ID NO: 742099 - RNA, 26 nt, Human
cagggacaggaugggagccuggagaa

SEQ ID NO: 742100 - RNA, 19 nt, Human
cagggauaaaggacuggag

SEQ ID NO: 742101 - RNA, 22 nt, Human
cagggcagggauaaaggacugg

SEQ ID NO: 742102 - RNA, 22 nt, Human
caggggaugcccggggcccagc

SEQ ID NO: 742103 - RNA, 23 nt, Human
cauucccuagucuaccagcaccu

SEQ ID NO: 742104 - RNA, 23 nt, Human
cauucugaaaauccaccaauuaa

SEQ ID NO: 742105 - RNA, 21 nt, Human
ccaacccccgcaacaccggcc

SEQ ID NO: 742106 - RNA, 19 nt, Human
ccaaggggaccacagcuuc

SEQ ID NO: 742107 - RNA, 21 nt, Human
ccacaaaacagagcugccacc

SEQ ID NO: 742108 - RNA, 22 nt, Human
ccacaccgcagcccccagggca

SEQ ID NO: 742109 - RNA, 18 nt, Human
ccacuggguggcuggugg

SEQ ID NO: 742110 - RNA, 21 nt, Human
ccacuggguggcugguggucu

SEQ ID NO: 742111 - RNA, 19 nt, Human
ccaggcugccaucugugcu

SEQ ID NO: 742112 - RNA, 20 nt, Human
ccauuggccauugggaccgg

SEQ ID NO: 742113 - RNA, 22 nt, Human
cccaacgcagcucaggggcugu

SEQ ID NO: 742114 - RNA, 28 nt, Human
cccaagcccuaguguggacccccccaag

SEQ ID NO: 742115 - RNA, 19 nt, Human
cccacaaagccgagggaac

SEQ ID NO: 742116 - RNA, 25 nt, Human
cccacaaagccgagggaacagcagc

SEQ ID NO: 742117 - RNA, 24 nt, Human
cccacaccgcagcccccagggcag

SEQ ID NO: 742118 - RNA, 23 nt, Human
cccagaaccuggacccuccuaga

SEQ ID NO: 742119 - RNA, 23 nt, Human
cccagauggaacaugauuggagc

SEQ ID NO: 742120 - RNA, 24 nt, Human
ccccaaagcagccacaguuggccc

SEQ ID NO: 742121 - RNA, 22 nt, Human
ccccaagcccuaguguggaccc

SEQ ID NO: 742122 - RNA, 23 nt, Human
ccccaagcccuaguguggacccc

SEQ ID NO: 742123 - RNA, 19 nt, Human
ccccagagaccgaguccac

SEQ ID NO: 742124 - RNA, 20 nt, Human
ccccagagaccgaguccacu

SEQ ID NO: 742125 - RNA, 24 nt, Human
ccccaggcuggggucaacgguggu

SEQ ID NO: 742126 - RNA, 23 nt, Human
ccccccaagcaggugaaaccccc

SEQ ID NO: 742127 - RNA, 22 nt, Human
ccccugcccuggcacccaggag

SEQ ID NO: 742128 - RNA, 21 nt, Human
ccccuuugggucucaggggag

SEQ ID NO: 742129 - RNA, 20 nt, Human
cccggggaaaggucagcucu

SEQ ID NO: 742130 - RNA, 21 nt, Human
cccugcccuggcacccaggag

SEQ ID NO: 742131 - RNA, 19 nt, Human
cccuggggggggccgggcu

SEQ ID NO: 742132 - RNA, 19 nt, Human
ccgagcucaaggcccagga

SEQ ID NO: 742133 - RNA, 19 nt, Human
ccuaguguggaccccccca

SEQ ID NO: 742134 - RNA, 21 nt, Human
ccucugccccggcugcaugag

SEQ ID NO: 742135 - RNA, 21 nt, Human
ccuuguggcccccaggcuggg

SEQ ID NO: 742136 - RNA, 23 nt, Human
ccuuguggcccccaggcuggggu

SEQ ID NO: 742137 - RNA, 18 nt, Human
cguauccacaaaacagag

SEQ ID NO: 742138 - RNA, 19 nt, Human
cgugcagcccggggccugg

SEQ ID NO: 742139 - RNA, 20 nt, Human
cuaggcaggaaaugcaaucc

SEQ ID NO: 742140 - RNA, 19 nt, Human
cuccaacccccgcaacacc

SEQ ID NO: 742141 - RNA, 22 nt, Human
cugccacugaugccaccagaaa

SEQ ID NO: 742142 - RNA, 18 nt, Human
cugcgcccccaugccagg

SEQ ID NO: 742143 - RNA, 18 nt, Human
cugggcaccuggauugga

SEQ ID NO: 742144 - RNA, 24 nt, Human
cuggguggcugguggucuuggccu

SEQ ID NO: 742145 - RNA, 19 nt, Human
cuguccccaagcugggcgu

SEQ ID NO: 742146 - RNA, 24 nt, Human
cuguggcgccaggcguuggugucc

SEQ ID NO: 742147 - RNA, 22 nt, Human
cuucccaggaagcccagaaccu

SEQ ID NO: 742148 - RNA, 18 nt, Human
cuucucagagaaaccggc

SEQ ID NO: 742149 - RNA, 18 nt, Human
gaaaguccaaggucccca

SEQ ID NO: 742150 - RNA, 22 nt, Human
gaacaugauuggagcgggggaa

SEQ ID NO: 742151 - RNA, 25 nt, Human
gaacaugauuggagcgggggaaaga

SEQ ID NO: 742152 - RNA, 19 nt, Human
gagacaguggagauucaga

SEQ ID NO: 742153 - RNA, 18 nt, Human
gagcagcaggcugagggg

SEQ ID NO: 742154 - RNA, 24 nt, Human
gaguggcccugagcagcggggcug

SEQ ID NO: 742155 - RNA, 22 nt, Human
gccgggcuauggcagaggcccg

SEQ ID NO: 742156 - RNA, 20 nt, Human
gccugggcucuugcugcugg

SEQ ID NO: 742157 - RNA, 19 nt, Human
ggacaggaugggagccugg

SEQ ID NO: 742158 - RNA, 23 nt, Human
ggaccgggcccugcugcagagaa

SEQ ID NO: 742159 - RNA, 19 nt, Human
ggagcucaaggacaagccc

SEQ ID NO: 742160 - RNA, 24 nt, Human
ggaugggggcuaagaaaguccaag

SEQ ID NO: 742161 - RNA, 18 nt, Human
ggcaccccacggagggag

SEQ ID NO: 742162 - RNA, 19 nt, Human
ggcaggggaugcccggggc

SEQ ID NO: 742163 - RNA, 24 nt, Human
ggccccagcgcaccucagagacag

SEQ ID NO: 742164 - RNA, 23 nt, Human
ggccugaaggccucuuugucagg

SEQ ID NO: 742165 - RNA, 20 nt, Human
ggcugguggucuuggccucg

SEQ ID NO: 742166 - RNA, 19 nt, Human
gggaccacagcuucugggu

SEQ ID NO: 742167 - RNA, 23 nt, Human
ggggagggcaggggaugcccggg

SEQ ID NO: 742168 - RNA, 22 nt, Human
guggauggcgcuguuccacggc

SEQ ID NO: 742169 - RNA, 21 nt, Human
guguguguagcgagcuuucug

SEQ ID NO: 742170 - RNA, 18 nt, Human
uagagccaucgagccaca

SEQ ID NO: 742171 - RNA, 22 nt, Human
ucagcaaccuuguggcccccag

SEQ ID NO: 742172 - RNA, 20 nt, Human
ucaggggagggcaggggaug

SEQ ID NO: 742173 - RNA, 22 nt, Human
ucaggggagggcaggggaugcc

SEQ ID NO: 742174 - RNA, 20 nt, Human
ucaggggcuguggcugcuag

SEQ ID NO: 742175 - RNA, 18 nt, Human
uccaacccccgcaacacc

SEQ ID NO: 742176 - RNA, 20 nt, Human
uccacaaaacagagcugcca

SEQ ID NO: 742177 - RNA, 22 nt, Human
uccacaaaacagagcugccacc

SEQ ID NO: 742178 - RNA, 23 nt, Human
uccacaaaacagagcugccacca

SEQ ID NO: 742179 - RNA, 18 nt, Human
ucccacaccgcagccccc

SEQ ID NO: 742180 - RNA, 19 nt, Human
ucccaggaagcccagaacc

SEQ ID NO: 742181 - RNA, 25 nt, Human
uccccaaagagacacugcucggcuc

SEQ ID NO: 742182 - RNA, 21 nt, Human
uccccagcacacuggccacag

SEQ ID NO: 742183 - RNA, 22 nt, Human
uccccaggcuguccccaagcug

SEQ ID NO: 742184 - RNA, 25 nt, Human
uccguauccacaaaacagagcugcc

SEQ ID NO: 742185 - RNA, 18 nt, Human
uccuagaguccaugagug

SEQ ID NO: 742186 - RNA, 20 nt, Human
uccugggcugugagcugacg

SEQ ID NO: 742187 - RNA, 23 nt, Human
uccugggcugugagcugacgugc

SEQ ID NO: 742188 - RNA, 21 nt, Human
ucgcuggaauugcagccaugu

SEQ ID NO: 742189 - RNA, 20 nt, Human
ucggcuccagggcggccauu

SEQ ID NO: 742190 - RNA, 22 nt, Human
ucucaggggagggcaggggaug

SEQ ID NO: 742191 - RNA, 20 nt, Human
ucucuggggagaccuuggcc

SEQ ID NO: 742192 - RNA, 18 nt, Human
ucugagagucagcauggg

SEQ ID NO: 742193 - RNA, 23 nt, Human
ugacgugcagcccggggccuggg

SEQ ID NO: 742194 - RNA, 24 nt, Human
ugagcccccugcccuggcacccag

SEQ ID NO: 742195 - RNA, 30 nt, Human
ugagcucaaucaagugagcucagacacaag

SEQ ID NO: 742196 - RNA, 24 nt, Human
ugagcucagacacaaaggagcugg

SEQ ID NO: 742197 - RNA, 19 nt, Human
ugaggagaacaccccagag

SEQ ID NO: 742198 - RNA, 20 nt, Human
ugaguuggagaaggagcgug

SEQ ID NO: 742199 - RNA, 20 nt, Human
ugaguuggagaaggagcgug

SEQ ID NO: 742200 - RNA, 20 nt, Human
ugcagcccggggccugggcu

SEQ ID NO: 742201 - RNA, 20 nt, Human
ugccauagaguuggggucca

SEQ ID NO: 742202 - RNA, 24 nt, Human
ugccauagaguugggguccauguu

SEQ ID NO: 742203 - RNA, 20 nt, Human
ugcccggggaaaggucagcu

SEQ ID NO: 742204 - RNA, 23 nt, Human
ugcccggggaaaggucagcucug

SEQ ID NO: 742205 - RNA, 18 nt, Human
ugcugagcagcaggcuga

SEQ ID NO: 742206 - RNA, 21 nt, Human
ugcugcagagaagggaaggau

SEQ ID NO: 742207 - RNA, 20 nt, Human
ugcugcugguacccggaugc

SEQ ID NO: 742208 - RNA, 23 nt, Human
uggaagacacccucugguccccc

SEQ ID NO: 742209 - RNA, 22 nt, Human
uggagaaagggggcccaagagg

SEQ ID NO: 742210 - RNA, 22 nt, Human
uggccacaguggcauuagggaa

SEQ ID NO: 742211 - RNA, 19 nt, Human
uggcuuauguguuuucagc

SEQ ID NO: 742212 - RNA, 20 nt, Human
ugggagcagcugccacugau

SEQ ID NO: 742213 - RNA, 21 nt, Human
ugggcccaggcugccaucugu

SEQ ID NO: 742214 - RNA, 24 nt, Human
ugggggcaccccaccccgucccug

SEQ ID NO: 742215 - RNA, 22 nt, Human
ugggugaagguggggugcaggu

SEQ ID NO: 742216 - RNA, 18 nt, Human
uggguuccuccaaccccc

SEQ ID NO: 742217 - RNA, 19 nt, Human
ugguggucuuggccucgcu

SEQ ID NO: 742218 - RNA, 21 nt, Human
uguguuuucagcucucuaaag

SEQ ID NO: 742219 - RNA, 21 nt, Human
uuggaaccucacccccuuccc

SEQ ID NO: 742220 - RNA, 18 nt, Human
uuggagaaggagcguguc

SEQ ID NO: 742221 - RNA, 21 nt, Human
uugggugucugcuucccuucu

SEQ ID NO: 742222 - RNA, 21 nt, Human
aaaaauaguaacucagcccuc

SEQ ID NO: 742223 - RNA, 20 nt, Human
accgcaccgcgaacgcuucg

SEQ ID NO: 742224 - RNA, 19 nt, Human
aggacuucuugaagguuuu

SEQ ID NO: 742225 - RNA, 28 nt, Human
cacguccggagcggucucagcagcccca

SEQ ID NO: 742226 - RNA, 22 nt, Human
cacuagccaguguuuggccgac

SEQ ID NO: 742227 - RNA, 20 nt, Human
cagcagccccaugcgcuggc

SEQ ID NO: 742228 - RNA, 18 nt, Human
cauuguaaauaaaaauag

SEQ ID NO: 742229 - RNA, 26 nt, Human
cccuugacuucaguguugaauggcuc

SEQ ID NO: 742230 - RNA, 24 nt, Human
ggagcggucucagcagccccaugc

SEQ ID NO: 742231 - RNA, 18 nt, Human
ugaauggcucuugcaagg

SEQ ID NO: 742232 - RNA, 22 nt, Human
uuuuuuuuuuuuuuaguuugga

SEQ ID NO: 742233 - RNA, 22 nt, Human
aaaaugacuuuaaaaccagugg

SEQ ID NO: 742234 - RNA, 21 nt, Human
aacauccaaccagaaagcuaa

SEQ ID NO: 742235 - RNA, 22 nt, Human
aaccagaaagcuaagcgcucuc

SEQ ID NO: 742236 - RNA, 21 nt, Human
aaugacuuuaaaaccaguggc

SEQ ID NO: 742237 - RNA, 18 nt, Human
agcugaccucagagccca

SEQ ID NO: 742238 - RNA, 22 nt, Human
agcugaccucagagcccaaaac

SEQ ID NO: 742239 - RNA, 19 nt, Human
caaccagaaagcuaagcgc

SEQ ID NO: 742240 - RNA, 22 nt, Human
caagcugaccucagagcccaaa

SEQ ID NO: 742241 - RNA, 26 nt, Human
cagagcccaaaacauccaaccagaaa

SEQ ID NO: 742242 - RNA, 21 nt, Human
cccaaaacauccaaccagaaa

SEQ ID NO: 742243 - RNA, 19 nt, Human
ccgcacaagaccgcucuac

SEQ ID NO: 742244 - RNA, 22 nt, Human
cucagagcccaaaacauccaac

SEQ ID NO: 742245 - RNA, 19 nt, Human
cugugcuggcugucucuuc

SEQ ID NO: 742246 - RNA, 22 nt, Human
gcacaagaccgcucuacagucu

SEQ ID NO: 742247 - RNA, 19 nt, Human
uccaaccagaaagcuaagc

SEQ ID NO: 742248 - RNA, 25 nt, Human
ucuccaagcugaccucagagcccuu

SEQ ID NO: 742249 - RNA, 19 nt, Human
ucucuggugcucuuccauu

SEQ ID NO: 742250 - RNA, 24 nt, Human
ucuggugcucuuccauuccucucc

SEQ ID NO: 742251 - RNA, 18 nt, Human
ugcucaaaaaccaaacag

SEQ ID NO: 742252 - RNA, 21 nt, Human
uggcauaaacacugugcuggc

SEQ ID NO: 742253 - RNA, 25 nt, Human
uuaaaaccaguggcauaaacacugu

SEQ ID NO: 742254 - RNA, 18 nt, Human
uuaaucuuuuuuuucuuc

SEQ ID NO: 742255 - RNA, 20 nt, Human
uuauuuauuuauuuauuuua

SEQ ID NO: 742256 - RNA, 22 nt, Human
aaaauuccagaagaugccuuuc

SEQ ID NO: 742257 - RNA, 21 nt, Human
agcagggggugcagccgccaa

SEQ ID NO: 742258 - RNA, 20 nt, Human
aggagccgugggcccugcag

SEQ ID NO: 742259 - RNA, 18 nt, Human
agguucuagaaguuucuc

SEQ ID NO: 742260 - RNA, 21 nt, Human
auguguggggagcaggggggc

SEQ ID NO: 742261 - RNA, 21 nt, Human
auuacaggaguguugguggcc

SEQ ID NO: 742262 - RNA, 18 nt, Human
cacacccuccgccggccc

SEQ ID NO: 742263 - RNA, 22 nt, Human
cagaagaugccuuucugcagca

SEQ ID NO: 742264 - RNA, 20 nt, Human
cagcacgcugguccuggggc

SEQ ID NO: 742265 - RNA, 18 nt, Human
cagcagcacgcugguccu

SEQ ID NO: 742266 - RNA, 22 nt, Human
cagcugcagcuuccugagguuc

SEQ ID NO: 742267 - RNA, 22 nt, Human
cagcuguugcucaggagccgug

SEQ ID NO: 742268 - RNA, 24 nt, Human
caggagccgugggcccugcaggag

SEQ ID NO: 742269 - RNA, 24 nt, Human
cccagcaaaaaugcuggcuuugcc

SEQ ID NO: 742270 - RNA, 23 nt, Human
ccuccagcugcagcuuccugagg

SEQ ID NO: 742271 - RNA, 19 nt, Human
cgggucacacccuccgccg

SEQ ID NO: 742272 - RNA, 25 nt, Human
cugccaggccgcugagccgccgcgc

SEQ ID NO: 742273 - RNA, 20 nt, Human
cugucgcguauuccaacaca

SEQ ID NO: 742274 - RNA, 25 nt, Human
gaaaaaauuccagaagaugccuuuu

SEQ ID NO: 742275 - RNA, 21 nt, Human
gcagcagcacgcugguccugg

SEQ ID NO: 742276 - RNA, 21 nt, Human
gcagccgccaaggcccgggug

SEQ ID NO: 742277 - RNA, 19 nt, Human
gccgcugcguucucgccca

SEQ ID NO: 742278 - RNA, 22 nt, Human
gccgugggcccugcaggaguau

SEQ ID NO: 742279 - RNA, 22 nt, Human
ggccggugggcagagccuagca

SEQ ID NO: 742280 - RNA, 24 nt, Human
ggggugcagccgccaaggcccggg

SEQ ID NO: 742281 - RNA, 24 nt, Human
guauuccaacacagacauguuuuu

SEQ ID NO: 742282 - RNA, 19 nt, Human
gugggcagagccuagcagg

SEQ ID NO: 742283 - RNA, 19 nt, Human
uaugauguguggggagcag

SEQ ID NO: 742284 - RNA, 19 nt, Human
ucacacccuccgccggccc

SEQ ID NO: 742285 - RNA, 19 nt, Human
ugacgaaaaaauuccagaa

SEQ ID NO: 742286 - RNA, 23 nt, Human
ugccacagcugacgaaaaaauuc

SEQ ID NO: 742287 - RNA, 19 nt, Human
ugccccagcccuccagcug

SEQ ID NO: 742288 - RNA, 19 nt, Human
uggaauuacaggaguguug

SEQ ID NO: 742289 - RNA, 21 nt, Human
ugggcagagccuagcaggggg

SEQ ID NO: 742290 - RNA, 21 nt, Human
uggggagcaggggggcaggug

SEQ ID NO: 742291 - RNA, 23 nt, Human
uggggaggauaugaugugugggg

SEQ ID NO: 742292 - RNA, 25 nt, Human
ugucccagcuguugcucaggagccg

SEQ ID NO: 742293 - RNA, 20 nt, Human
uguggggagcaggggggcag

SEQ ID NO: 742294 - RNA, 19 nt, Human
uguguggggagcagggggg

SEQ ID NO: 742295 - RNA, 20 nt, Human
uuacaggaguguugguggcc

SEQ ID NO: 742296 - RNA, 24 nt, Human
uuccugagguucuagaaguuucuc

SEQ ID NO: 742297 - RNA, 20 nt, Human
uuucccagcaaaaaugcugg

SEQ ID NO: 742298 - RNA, 24 nt, Human
aaaaaaagcaaccccugcccccac

SEQ ID NO: 742299 - RNA, 19 nt, Human
aaaaacccuugucaccuaa

SEQ ID NO: 742300 - RNA, 20 nt, Human
aaaaagcaaccccugccccc

SEQ ID NO: 742301 - RNA, 22 nt, Human
aaaaagcaaccccugcccccac

SEQ ID NO: 742302 - RNA, 22 nt, Human
aaaacaguuuaaacuagauuuu

SEQ ID NO: 742303 - RNA, 18 nt, Human
aaaauucaauguaaagcc

SEQ ID NO: 742304 - RNA, 22 nt, Human
aaacugaaagcaauucuucaau

SEQ ID NO: 742305 - RNA, 26 nt, Human
aaagaagaaaauaccuuuuuaaagag

SEQ ID NO: 742306 - RNA, 28 nt, Human
aaagaagaaaauaccuuuuuaaagagaa

SEQ ID NO: 742307 - RNA, 19 nt, Human
aaauaaaaaaaagcaaccc

SEQ ID NO: 742308 - RNA, 20 nt, Human
aaaucaacuuuuggccgggu

SEQ ID NO: 742309 - RNA, 26 nt, Human
aaauuguagaaaccaguauaugaaau

SEQ ID NO: 742310 - RNA, 20 nt, Human
aacagagugagacuccaucu

SEQ ID NO: 742311 - RNA, 24 nt, Human
aacagagugagacuccaucucaaa

SEQ ID NO: 742312 - RNA, 26 nt, Human
aagcacacacaauagcagaaugaaau

SEQ ID NO: 742313 - RNA, 18 nt, Human
aagcgcccauccacccag

SEQ ID NO: 742314 - RNA, 20 nt, Human
aauaaacaaacuacaccaag

SEQ ID NO: 742315 - RNA, 20 nt, Human
aauaugcugaaaccccaucu

SEQ ID NO: 742316 - RNA, 24 nt, Human
aaucgcuugaacccgggaggcgga

SEQ ID NO: 742317 - RNA, 20 nt, Human
aauuacauuuuucacaucua

SEQ ID NO: 742318 - RNA, 19 nt, Human
acaaaacccaaacugaaag

SEQ ID NO: 742319 - RNA, 21 nt, Human
acacacacacaagcacacaca

SEQ ID NO: 742320 - RNA, 24 nt, Human
acagagugagacuccaucucaaaa

SEQ ID NO: 742321 - RNA, 19 nt, Human
acccaaacugaaagcaauu

SEQ ID NO: 742322 - RNA, 18 nt, Human
accccaucucuacuaaaa

SEQ ID NO: 742323 - RNA, 18 nt, Human
accguccggcagcccagg

SEQ ID NO: 742324 - RNA, 24 nt, Human
acgccacugcacuccagccugggc

SEQ ID NO: 742325 - RNA, 24 nt, Human
acgccacugcacuccagccugggc

SEQ ID NO: 742326 - RNA, 24 nt, Human
acuccagccugggcaacagaguga

SEQ ID NO: 742327 - RNA, 25 nt, Human
acucugcaauuaaagcucagggcua

SEQ ID NO: 742328 - RNA, 24 nt, Human
acugcacuccagccugggcaacag

SEQ ID NO: 742329 - RNA, 24 nt, Human
acugcacuccagccugggcaacag

SEQ ID NO: 742330 - RNA, 22 nt, Human
agaaaggcccuauaggcuuaag

SEQ ID NO: 742331 - RNA, 24 nt, Human
agcacuuugggaggccgaggcggg

SEQ ID NO: 742332 - RNA, 21 nt, Human
agcauuucaaagcaguucugc

SEQ ID NO: 742333 - RNA, 24 nt, Human
agccuggccaauaugcugaaaccc

SEQ ID NO: 742334 - RNA, 24 nt, Human
agccugggcaacagagugagacuc

SEQ ID NO: 742335 - RNA, 19 nt, Human
agcgcccauccacccaggc

SEQ ID NO: 742336 - RNA, 21 nt, Human
agcgucccacagcgacuuccg

SEQ ID NO: 742337 - RNA, 23 nt, Human
agcuggguguggugggacgcgcc

SEQ ID NO: 742338 - RNA, 24 nt, Human
aggcaggagaaucgcuugaacccg

SEQ ID NO: 742339 - RNA, 21 nt, Human
aggccgaggcggguggaucac

SEQ ID NO: 742340 - RNA, 21 nt, Human
aggcggagguugcaguaagcc

SEQ ID NO: 742341 - RNA, 24 nt, Human
aggcggagguugcaguaagccgag

SEQ ID NO: 742342 - RNA, 24 nt, Human
aggcggguggaucacaaggucagg

SEQ ID NO: 742343 - RNA, 20 nt, Human
aggcugaggcaggagaaucg

SEQ ID NO: 742344 - RNA, 24 nt, Human
aggcugaggcaggagaaucgcuug

SEQ ID NO: 742345 - RNA, 24 nt, Human
aggggcucacgccuauaaucccag

SEQ ID NO: 742346 - RNA, 29 nt, Human
auaaaacuuucuuuuaaaggcccauaaaa

SEQ ID NO: 742347 - RNA, 24 nt, Human
auaacacugagaaauuucaaauau

SEQ ID NO: 742348 - RNA, 22 nt, Human
auagaaaaugcuugucaccuua

SEQ ID NO: 742349 - RNA, 19 nt, Human
aucacaaggucaggaguuc

SEQ ID NO: 742350 - RNA, 21 nt, Human
aucacaaggucaggaguucga

SEQ ID NO: 742351 - RNA, 24 nt, Human
aucacgccacugcacuccagccug

SEQ ID NO: 742352 - RNA, 25 nt, Human
aucucaaaaaaacaaacaaacaaac

SEQ ID NO: 742353 - RNA, 18 nt, Human
aucuuacuaaaaauaauu

SEQ ID NO: 742354 - RNA, 20 nt, Human
caaacaaaguauggaacagu

SEQ ID NO: 742355 - RNA, 26 nt, Human
caaacugaaagcaauucuucaauuua

SEQ ID NO: 742356 - RNA, 25 nt, Human
caagcacacacaauagcagaaugaa

SEQ ID NO: 742357 - RNA, 26 nt, Human
caagcgcccauccacccaggcgcccc

SEQ ID NO: 742358 - RNA, 21 nt, Human
caaguucaaccaagacugaag

SEQ ID NO: 742359 - RNA, 19 nt, Human
cacagauccaauccacugu

SEQ ID NO: 742360 - RNA, 24 nt, Human
cacgccuauaaucccagcacuuug

SEQ ID NO: 742361 - RNA, 22 nt, Human
cacuccagccugggcaacagag

SEQ ID NO: 742362 - RNA, 22 nt, Human
cacuccagccugggcaacagag

SEQ ID NO: 742363 - RNA, 24 nt, Human
cacuccagccugggcaacagagug

SEQ ID NO: 742364 - RNA, 19 nt, Human
cacugagaaauuucaaaua

SEQ ID NO: 742365 - RNA, 18 nt, Human
cacugcacuccagccugg

SEQ ID NO: 742366 - RNA, 19 nt, Human
cacugcacuccagccuggg

SEQ ID NO: 742367 - RNA, 21 nt, Human
cacugcacuccagccugggca

SEQ ID NO: 742368 - RNA, 23 nt, Human
cacugcacuccagccugggcaac

SEQ ID NO: 742369 - RNA, 24 nt, Human
cacugcacuccagccugggcaaca

SEQ ID NO: 742370 - RNA, 24 nt, Human
cagcacuuugggaggccgaggcgg

SEQ ID NO: 742371 - RNA, 24 nt, Human
caguuacuugggaggcugaggcag

SEQ ID NO: 742372 - RNA, 24 nt, Human
cauaaaacuuucuuuuaaaggccc

SEQ ID NO: 742373 - RNA, 26 nt, Human
caucucaaaaaaacaaacaaacaaac

SEQ ID NO: 742374 - RNA, 22 nt, Human
ccacccaggcgccccgcucccg

SEQ ID NO: 742375 - RNA, 20 nt, Human
ccacugcacuccagccuggg

SEQ ID NO: 742376 - RNA, 20 nt, Human
ccacugcacuccagccuggg

SEQ ID NO: 742377 - RNA, 21 nt, Human
ccacugcacuccagccugggc

SEQ ID NO: 742378 - RNA, 22 nt, Human
ccacugcacuccagccugggca

SEQ ID NO: 742379 - RNA, 23 nt, Human
ccacugcacuccagccugggcaa

SEQ ID NO: 742380 - RNA, 24 nt, Human
ccacugcacuccagccugggcaac

SEQ ID NO: 742381 - RNA, 19 nt, Human
cccaagcgcccauccaccc

SEQ ID NO: 742382 - RNA, 23 nt, Human
cccagugcuuuuuuccccuugaa

SEQ ID NO: 742383 - RNA, 22 nt, Human
ccccagugcuuuuuuccccuug

SEQ ID NO: 742384 - RNA, 22 nt, Human
ccuauaaucccagcacuuuggg

SEQ ID NO: 742385 - RNA, 21 nt, Human
ccugcccccacacuuuaaaag

SEQ ID NO: 742386 - RNA, 24 nt, Human
ccuggccaauaugcugaaacccca

SEQ ID NO: 742387 - RNA, 22 nt, Human
ccugggcaacagagugagacuc

SEQ ID NO: 742388 - RNA, 22 nt, Human
ccuguugucccaguuacuuggg

SEQ ID NO: 742389 - RNA, 19 nt, Human
cgagaccagccuggccaau

SEQ ID NO: 742390 - RNA, 24 nt, Human
cgagaucacgccacugcacuccag

SEQ ID NO: 742391 - RNA, 26 nt, Human
cgaggcggguggaucacaaggucagg

SEQ ID NO: 742392 - RNA, 23 nt, Human
cgcccauccacccaggcgccccg

SEQ ID NO: 742393 - RNA, 22 nt, Human
cucacgccuauaaucccagcac

SEQ ID NO: 742394 - RNA, 24 nt, Human
cucacgccuauaaucccagcacuu

SEQ ID NO: 742395 - RNA, 23 nt, Human
cuccaucucaaaaaaacaaacaa

SEQ ID NO: 742396 - RNA, 22 nt, Human
cuugcagcauuucaaagcaguu

SEQ ID NO: 742397 - RNA, 19 nt, Human
gacuugcucauauuaguaa

SEQ ID NO: 742398 - RNA, 23 nt, Human
gagaaucgcuugaacccgggagg

SEQ ID NO: 742399 - RNA, 22 nt, Human
gagguugcaguaagccgagauc

SEQ ID NO: 742400 - RNA, 22 nt, Human
gaucacaaggucaggaguucga

SEQ ID NO: 742401 - RNA, 24 nt, Human
gaucacaaggucaggaguucgaga

SEQ ID NO: 742402 - RNA, 24 nt, Human
gcacuccagccugggcaacagagu

SEQ ID NO: 742403 - RNA, 24 nt, Human
gccaauaugcugaaaccccaucuc

SEQ ID NO: 742404 - RNA, 22 nt, Human
gccacugcacuccagccugggc

SEQ ID NO: 742405 - RNA, 24 nt, Human
gccacugcacuccagccugggcaa

SEQ ID NO: 742406 - RNA, 20 nt, Human
gccgagaucacgccacugca

SEQ ID NO: 742407 - RNA, 24 nt, Human
gccgggugcaggggcucacgccua

SEQ ID NO: 742408 - RNA, 21 nt, Human
gcgcccauccacccaggcgcc

SEQ ID NO: 742409 - RNA, 27 nt, Human
ggacuuaggcucuagagucaucuuuag

SEQ ID NO: 742410 - RNA, 24 nt, Human
ggagaaacuaggacuuaggcucua

SEQ ID NO: 742411 - RNA, 18 nt, Human
ggagguugcaguaagccg

SEQ ID NO: 742412 - RNA, 24 nt, Human
ggagguugcaguaagccgagauca

SEQ ID NO: 742413 - RNA, 24 nt, Human
gggcucacgccuauaaucccagca

SEQ ID NO: 742414 - RNA, 23 nt, Human
ggugcaggggcucacgccuauaa

SEQ ID NO: 742415 - RNA, 23 nt, Human
gguggaucacaaggucaggaguu

SEQ ID NO: 742416 - RNA, 21 nt, Human
gguguggugggacgcgccugu

SEQ ID NO: 742417 - RNA, 22 nt, Human
gucaaucuuuugguuguauuuu

SEQ ID NO: 742418 - RNA, 23 nt, Human
guggaucacaaggucaggaguuc

SEQ ID NO: 742419 - RNA, 19 nt, Human
uaaaagcagguuuccaaaa

SEQ ID NO: 742420 - RNA, 18 nt, Human
uaaacaaacuacaccaag

SEQ ID NO: 742421 - RNA, 18 nt, Human
uaacuuuuacuaccagcu

SEQ ID NO: 742422 - RNA, 19 nt, Human
uaagaaaggcccuauaggc

SEQ ID NO: 742423 - RNA, 18 nt, Human
uaagaagggaaggcucuu

SEQ ID NO: 742424 - RNA, 24 nt, Human
uaauuuugucauuacuggcacagg

SEQ ID NO: 742425 - RNA, 21 nt, Human
uacaaacaaaguauggaacag

SEQ ID NO: 742426 - RNA, 21 nt, Human
uacacacacacaagcacacac

SEQ ID NO: 742427 - RNA, 22 nt, Human
uacacacacacaagcacacaca

SEQ ID NO: 742428 - RNA, 25 nt, Human
uacacacacacaagcacacacaaua

SEQ ID NO: 742429 - RNA, 18 nt, Human
uagaaaaugcuugucacc

SEQ ID NO: 742430 - RNA, 18 nt, Human
uagauuuucuaagauaau

SEQ ID NO: 742431 - RNA, 18 nt, Human
uagcagaaugaaauuaca

SEQ ID NO: 742432 - RNA, 24 nt, Human
uauacaaaacccaaacugaaagca

SEQ ID NO: 742433 - RNA, 22 nt, Human
uauuaauuuuguccaguagaga

SEQ ID NO: 742434 - RNA, 22 nt, Human
uauuaccaacaaagcaggauuu

SEQ ID NO: 742435 - RNA, 23 nt, Human
uauucaguugagccauacuuaua

SEQ ID NO: 742436 - RNA, 24 nt, Human
ucacaaggucaggaguucgagacc

SEQ ID NO: 742437 - RNA, 23 nt, Human
ucacgccacugcacuccagccug

SEQ ID NO: 742438 - RNA, 23 nt, Human
uccagccugggcaacagagugag

SEQ ID NO: 742439 - RNA, 24 nt, Human
uccagccugggcaacagagugaga

SEQ ID NO: 742440 - RNA, 18 nt, Human
uccaggcaaaccaaugaa

SEQ ID NO: 742441 - RNA, 21 nt, Human
uccaucucaaaaaaacaaaca

SEQ ID NO: 742442 - RNA, 18 nt, Human
uccucagcgucccacagc

SEQ ID NO: 742443 - RNA, 24 nt, Human
ucgcuugaacccgggaggcggagg

SEQ ID NO: 742444 - RNA, 22 nt, Human
ucuaagugagaggacauaaacu

SEQ ID NO: 742445 - RNA, 24 nt, Human
ucucaaaaaaacaaacaaacaaac

SEQ ID NO: 742446 - RNA, 22 nt, Human
ucucuacuaaaaguauaaaaaa

SEQ ID NO: 742447 - RNA, 19 nt, Human
ucugcaauuaaagcucagg

SEQ ID NO: 742448 - RNA, 21 nt, Human
ucugcaauuaaagcucagggc

SEQ ID NO: 742449 - RNA, 19 nt, Human
ugaaaccccaucucuacua

SEQ ID NO: 742450 - RNA, 22 nt, Human
ugaaauaccaauaaaauuauag

SEQ ID NO: 742451 - RNA, 20 nt, Human
ugaggcaggagaaucgcuug

SEQ ID NO: 742452 - RNA, 24 nt, Human
ugaggcaggagaaucgcuugaacc

SEQ ID NO: 742453 - RNA, 25 nt, Human
ugaggcaggagaaucgcuugaaccc

SEQ ID NO: 742454 - RNA, 18 nt, Human
ugcagaaauaagaugacu

SEQ ID NO: 742455 - RNA, 20 nt, Human
ugccaagaacucaaguucaa

SEQ ID NO: 742456 - RNA, 24 nt, Human
ugcuuuuccaucacucuuuacaua

SEQ ID NO: 742457 - RNA, 22 nt, Human
uggaucacaaggucaggaguuc

SEQ ID NO: 742458 - RNA, 23 nt, Human
ugggaggccgaggcggguggauc

SEQ ID NO: 742459 - RNA, 24 nt, Human
ugggaggccgaggcggguggauca

SEQ ID NO: 742460 - RNA, 19 nt, Human
ugggaggcugaggcaggag

SEQ ID NO: 742461 - RNA, 23 nt, Human
ugggaggcugaggcaggagaauc

SEQ ID NO: 742462 - RNA, 21 nt, Human
uggucagagugccaagaacuc

SEQ ID NO: 742463 - RNA, 18 nt, Human
uuaaaguuacucugcaau

SEQ ID NO: 742464 - RNA, 23 nt, Human
uuaacccuucuuccacuguaccu

SEQ ID NO: 742465 - RNA, 24 nt, Human
uuaagaagggaaggcucuuuuaaa

SEQ ID NO: 742466 - RNA, 23 nt, Human
uuagacaauaaacaaacuacacc

SEQ ID NO: 742467 - RNA, 22 nt, Human
uuagcuggguguggugggacgc

SEQ ID NO: 742468 - RNA, 24 nt, Human
uuagcuggguguggugggacgcgc

SEQ ID NO: 742469 - RNA, 19 nt, Human
uucccauuuaauucuuuug

SEQ ID NO: 742470 - RNA, 24 nt, Human
uugaacccgggaggcggagguugc

SEQ ID NO: 742471 - RNA, 24 nt, Human
uugaauauggaaaaucuuuuaaca

SEQ ID NO: 742472 - RNA, 18 nt, Human
uugaccauuuuauuuuca

SEQ ID NO: 742473 - RNA, 24 nt, Human
uugaccauuuuauuuucaaacaug

SEQ ID NO: 742474 - RNA, 20 nt, Human
uugcaguaagccgagaucac

SEQ ID NO: 742475 - RNA, 25 nt, Human
uugggaggccgaggcggguggauca

SEQ ID NO: 742476 - RNA, 24 nt, Human
uugggaggcugaggcaggagaauc

SEQ ID NO: 742477 - RNA, 23 nt, Human
aaggagaaaaaggauagcaggga

SEQ ID NO: 742478 - RNA, 21 nt, Human
acuggggauccccucagcccc

SEQ ID NO: 742479 - RNA, 21 nt, Human
aggagaaaaaggauagcaggg

SEQ ID NO: 742480 - RNA, 21 nt, Human
aucucacuagcagcucucucc

SEQ ID NO: 742481 - RNA, 25 nt, Human
cacuuuuuuccauuucuuuauaaaa

SEQ ID NO: 742482 - RNA, 22 nt, Human
cccugaacacccagcgcugcuc

SEQ ID NO: 742483 - RNA, 21 nt, Human
cuuggccccugaacacccagc

SEQ ID NO: 742484 - RNA, 18 nt, Human
cuuguuucaauaccuguu

SEQ ID NO: 742485 - RNA, 24 nt, Human
gcagcucucuccccuagaguaggg

SEQ ID NO: 742486 - RNA, 22 nt, Human
uagcagcucucuccccuagagu

SEQ ID NO: 742487 - RNA, 19 nt, Human
ugacuuauguuccaaacac

SEQ ID NO: 742488 - RNA, 20 nt, Human
ugggcaccuccaaaggagaa

SEQ ID NO: 742489 - RNA, 19 nt, Human
uugggcaccuccaaaggag

SEQ ID NO: 742490 - RNA, 20 nt, Human
uuuccauuucuuuauaaaac

SEQ ID NO: 742491 - RNA, 18 nt, Human
uuuucucucucuaguuga

SEQ ID NO: 742492 - RNA, 21 nt, Human
uuuuuuuuuuuuuuuucucuc

SEQ ID NO: 742493 - RNA, 22 nt, Human
aaacaaggcgggggcaaaucug

SEQ ID NO: 742494 - RNA, 19 nt, Human
aaacccuuugggacagucc

SEQ ID NO: 742495 - RNA, 24 nt, Human
aaagugcugggauuacaggcuuga

SEQ ID NO: 742496 - RNA, 24 nt, Human
aaccucaggugauccacccgccuc

SEQ ID NO: 742497 - RNA, 18 nt, Human
aaccuccaccuccaccuc

SEQ ID NO: 742498 - RNA, 20 nt, Human
aacuuauccccucaccucug

SEQ ID NO: 742499 - RNA, 21 nt, Human
aagaacaaggggcugaggaaa

SEQ ID NO: 742500 - RNA, 23 nt, Human
aaggggcucucguggccugaagc

SEQ ID NO: 742501 - RNA, 19 nt, Human
aagucggggcacagcaggc

SEQ ID NO: 742502 - RNA, 19 nt, Human
aagugcugggauuacaggc

SEQ ID NO: 742503 - RNA, 19 nt, Human
aagugcugggauuacaggc

SEQ ID NO: 742504 - RNA, 26 nt, Human
aagugcugggauuacaggcuugagcc

SEQ ID NO: 742505 - RNA, 21 nt, Human
acacugcucccugcuuuccac

SEQ ID NO: 742506 - RNA, 18 nt, Human
acaggguuucaccauguu

SEQ ID NO: 742507 - RNA, 21 nt, Human
acaggguuucaccauguuggc

SEQ ID NO: 742508 - RNA, 24 nt, Human
acaggguuucaccauguuggccag

SEQ ID NO: 742509 - RNA, 24 nt, Human
accauguuggccaggcugaucucg

SEQ ID NO: 742510 - RNA, 20 nt, Human
accccagaguacccugugua

SEQ ID NO: 742511 - RNA, 25 nt, Human
acccgccucggccucccaaagugcu

SEQ ID NO: 742512 - RNA, 22 nt, Human
accuccaccuccaccuccaggg

SEQ ID NO: 742513 - RNA, 23 nt, Human
accucccuccucucaaacuccag

SEQ ID NO: 742514 - RNA, 18 nt, Human
acugcaccccuuuucugc

SEQ ID NO: 742515 - RNA, 18 nt, Human
acugcaccccuuuucugc

SEQ ID NO: 742516 - RNA, 22 nt, Human
agaggaguggggaagggccagg

SEQ ID NO: 742517 - RNA, 23 nt, Human
agcaccaagaugacaaagaccca

SEQ ID NO: 742518 - RNA, 19 nt, Human
agccaccacaccuggccca

SEQ ID NO: 742519 - RNA, 21 nt, Human
agccaccacaccuggcccaga

SEQ ID NO: 742520 - RNA, 23 nt, Human
agccaggguggugaagcugaggc

SEQ ID NO: 742521 - RNA, 23 nt, Human
agcgcccccgccccaugcagccg

SEQ ID NO: 742522 - RNA, 24 nt, Human
aggaaaccaggcacacagcagcca

SEQ ID NO: 742523 - RNA, 21 nt, Human
aggagcggcugggaaggcugc

SEQ ID NO: 742524 - RNA, 18 nt, Human
aggagguaggccagcgcc

SEQ ID NO: 742525 - RNA, 23 nt, Human
aggcaggaugugaggaaaccagg

SEQ ID NO: 742526 - RNA, 28 nt, Human
aggccccccacgaggagcggcugggaag

SEQ ID NO: 742527 - RNA, 18 nt, Human
aggcgggggcaaaucugg

SEQ ID NO: 742528 - RNA, 24 nt, Human
aggguggaggacagggaagaacaa

SEQ ID NO: 742529 - RNA, 24 nt, Human
aggugauccacccgccucggccuc

SEQ ID NO: 742530 - RNA, 18 nt, Human
aguagcugggauuacagg

SEQ ID NO: 742531 - RNA, 20 nt, Human
agugcaauggcgcgaucucg

SEQ ID NO: 742532 - RNA, 24 nt, Human
agugcaauggcgcgaucucggcuc

SEQ ID NO: 742533 - RNA, 24 nt, Human
agugcugggauuacaggcuugagc

SEQ ID NO: 742534 - RNA, 18 nt, Human
augcagccgaggaugagg

SEQ ID NO: 742535 - RNA, 19 nt, Human
auuggggaaaaccacccug

SEQ ID NO: 742536 - RNA, 22 nt, Human
caaagacccaagaccugucccu

SEQ ID NO: 742537 - RNA, 24 nt, Human
caaagugcugggauuacaggcuug

SEQ ID NO: 742538 - RNA, 26 nt, Human
caacugccucacgacauggucccacu

SEQ ID NO: 742539 - RNA, 21 nt, Human
caagcgauucuccugccuaaa

SEQ ID NO: 742540 - RNA, 20 nt, Human
cacagcaccaagaugacaaa

SEQ ID NO: 742541 - RNA, 21 nt, Human
caccauguuggccaggcugau

SEQ ID NO: 742542 - RNA, 24 nt, Human
caccauguuggccaggcugaucuc

SEQ ID NO: 742543 - RNA, 27 nt, Human
caccauguuggccaggcugaucucgaa

SEQ ID NO: 742544 - RNA, 23 nt, Human
cacccgccucggccucccaaagu

SEQ ID NO: 742545 - RNA, 24 nt, Human
cagaacccauuucuuuauaagccu

SEQ ID NO: 742546 - RNA, 21 nt, Human
cagaaucuggguucacuuagu

SEQ ID NO: 742547 - RNA, 19 nt, Human
cagcaacaucccacagcug

SEQ ID NO: 742548 - RNA, 21 nt, Human
cagcaacaucccacagcuggc

SEQ ID NO: 742549 - RNA, 24 nt, Human
cagcacacccgugggugcccagca

SEQ ID NO: 742550 - RNA, 21 nt, Human
cagcagccggcugggguccag

SEQ ID NO: 742551 - RNA, 23 nt, Human
cagcagggcgggugaaggggcuc

SEQ ID NO: 742552 - RNA, 26 nt, Human
cagccagauacucuagcaaccaacac

SEQ ID NO: 742553 - RNA, 19 nt, Human
caggaaaagggcggccaca

SEQ ID NO: 742554 - RNA, 24 nt, Human
caggaugcagggagaagguggccc

SEQ ID NO: 742555 - RNA, 21 nt, Human
caggcacacagcagccagcca

SEQ ID NO: 742556 - RNA, 21 nt, Human
caggcgcccaccaccacgccc

SEQ ID NO: 742557 - RNA, 24 nt, Human
caggguuucaccauguuggccagg

SEQ ID NO: 742558 - RNA, 23 nt, Human
cagguccaaauaccaacucaagu

SEQ ID NO: 742559 - RNA, 19 nt, Human
caguccccggcccaguccu

SEQ ID NO: 742560 - RNA, 19 nt, Human
caucgcguucggcaauuuc

SEQ ID NO: 742561 - RNA, 21 nt, Human
cauggucccacucuaccuccu

SEQ ID NO: 742562 - RNA, 24 nt, Human
cauguuggccaggcugaucucgaa

SEQ ID NO: 742563 - RNA, 22 nt, Human
cauucuaacuuauccccucacc

SEQ ID NO: 742564 - RNA, 19 nt, Human
ccaaagugcugggauuaca

SEQ ID NO: 742565 - RNA, 22 nt, Human
ccaaagugcugggauuacaggc

SEQ ID NO: 742566 - RNA, 23 nt, Human
ccaaagugcugggauuacaggcu

SEQ ID NO: 742567 - RNA, 21 nt, Human
ccaagaugacaaagacccaag

SEQ ID NO: 742568 - RNA, 21 nt, Human
ccacaccuggcccagaaccca

SEQ ID NO: 742569 - RNA, 22 nt, Human
ccagccagauacucuagcaacc

SEQ ID NO: 742570 - RNA, 24 nt, Human
ccaggagaguaaggggucacaggg

SEQ ID NO: 742571 - RNA, 20 nt, Human
ccaggguucaagcgauucuc

SEQ ID NO: 742572 - RNA, 23 nt, Human
ccaggguucaagcgauucuccug

SEQ ID NO: 742573 - RNA, 24 nt, Human
cccaaagugcugggauuacaggcu

SEQ ID NO: 742574 - RNA, 19 nt, Human
cccacauggggcagagggc

SEQ ID NO: 742575 - RNA, 21 nt, Human
cccaccaccacgcccagcuaa

SEQ ID NO: 742576 - RNA, 24 nt, Human
cccacccacauggggcagagggca

SEQ ID NO: 742577 - RNA, 20 nt, Human
cccagcaccucccuccucuc

SEQ ID NO: 742578 - RNA, 22 nt, Human
cccagcaccucccuccucucaa

SEQ ID NO: 742579 - RNA, 23 nt, Human
cccagcaccucccuccucucaaa

SEQ ID NO: 742580 - RNA, 23 nt, Human
cccaugcagccgaggaugaggca

SEQ ID NO: 742581 - RNA, 23 nt, Human
ccccacgaggagcggcugggaag

SEQ ID NO: 742582 - RNA, 22 nt, Human
ccccccacccacauggggcaga

SEQ ID NO: 742583 - RNA, 20 nt, Human
ccccucaccucugccacuua

SEQ ID NO: 742584 - RNA, 23 nt, Human
cccgaguagcugggauuacaggc

SEQ ID NO: 742585 - RNA, 24 nt, Human
cccgaguagcugggauuacaggcg

SEQ ID NO: 742586 - RNA, 21 nt, Human
cccgccccaugcagccgagga

SEQ ID NO: 742587 - RNA, 21 nt, Human
cccgcccccgccgccgcggga

SEQ ID NO: 742588 - RNA, 21 nt, Human
cccuccuaccucucacagcac

SEQ ID NO: 742589 - RNA, 22 nt, Human
ccgaguagcugggauuacaggc

SEQ ID NO: 742590 - RNA, 22 nt, Human
ccuaaccucaggugauccaccc

SEQ ID NO: 742591 - RNA, 23 nt, Human
ccuaaccucaggugauccacccg

SEQ ID NO: 742592 - RNA, 24 nt, Human
ccuccaggguucaagcgauucucc

SEQ ID NO: 742593 - RNA, 21 nt, Human
ccucugccacuuaccuguccc

SEQ ID NO: 742594 - RNA, 19 nt, Human
ccucugggcuccagcagcc

SEQ ID NO: 742595 - RNA, 23 nt, Human
ccugccuaaaccucccgaguagc

SEQ ID NO: 742596 - RNA, 24 nt, Human
ccugccuaaaccucccgaguagcu

SEQ ID NO: 742597 - RNA, 19 nt, Human
ccugcucuggcagccacgg

SEQ ID NO: 742598 - RNA, 18 nt, Human
ccugucccugccacugga

SEQ ID NO: 742599 - RNA, 25 nt, Human
ccuguguaugcuccaccacagggag

SEQ ID NO: 742600 - RNA, 20 nt, Human
cgagcuaaggccaccccgcu

SEQ ID NO: 742601 - RNA, 20 nt, Human
cgccccaugcagccgaggau

SEQ ID NO: 742602 - RNA, 24 nt, Human
cgccucggccucccaaagugcugg

SEQ ID NO: 742603 - RNA, 19 nt, Human
cgcuggagcauucauucac

SEQ ID NO: 742604 - RNA, 21 nt, Human
cucacagcgcccucgggcauc

SEQ ID NO: 742605 - RNA, 24 nt, Human
cucacugcaaccuccaccuccacc

SEQ ID NO: 742606 - RNA, 26 nt, Human
cucacugcaaccuccaccuccaccuc

SEQ ID NO: 742607 - RNA, 18 nt, Human
cuccagagggcuucccag

SEQ ID NO: 742608 - RNA, 19 nt, Human
cuccaguauccagcacacc

SEQ ID NO: 742609 - RNA, 21 nt, Human
cuccugccuaaaccucccgag

SEQ ID NO: 742610 - RNA, 19 nt, Human
cucgugaaggaccuggccc

SEQ ID NO: 742611 - RNA, 22 nt, Human
cucucaaacuccaguauccagc

SEQ ID NO: 742612 - RNA, 23 nt, Human
cucucaccucgaccccagaguac

SEQ ID NO: 742613 - RNA, 18 nt, Human
cugaagcugugguaaagc

SEQ ID NO: 742614 - RNA, 22 nt, Human
cugcaaccuccaccuccaccuc

SEQ ID NO: 742615 - RNA, 22 nt, Human
cuggagggccagauggcucugc

SEQ ID NO: 742616 - RNA, 27 nt, Human
cuggcccagagggcgaaccugaguccc

SEQ ID NO: 742617 - RNA, 24 nt, Human
cugggcuccagcagccggcugggg

SEQ ID NO: 742618 - RNA, 20 nt, Human
cugucuucccacuccagagg

SEQ ID NO: 742619 - RNA, 19 nt, Human
gaagaacaaggggcugaga

SEQ ID NO: 742620 - RNA, 19 nt, Human
gaaggguagcucccuccuc

SEQ ID NO: 742621 - RNA, 19 nt, Human
gaccuggcccagagggcga

SEQ ID NO: 742622 - RNA, 24 nt, Human
gagccaccacaccuggcccagaac

SEQ ID NO: 742623 - RNA, 21 nt, Human
gagcggcugggaaggcugcuu

SEQ ID NO: 742624 - RNA, 23 nt, Human
gagcuucauguuugcccagguga

SEQ ID NO: 742625 - RNA, 19 nt, Human
gaggggcagaggggcugca

SEQ ID NO: 742626 - RNA, 25 nt, Human
gaguagcugggauuacaggcgccca

SEQ ID NO: 742627 - RNA, 23 nt, Human
gaguggggcggcgguugccgguu

SEQ ID NO: 742628 - RNA, 18 nt, Human
gauuacaggcuugagcca

SEQ ID NO: 742629 - RNA, 21 nt, Human
gauuacaggcuugagccacca

SEQ ID NO: 742630 - RNA, 21 nt, Human
gcagaggggcugcaguuugga

SEQ ID NO: 742631 - RNA, 21 nt, Human
gcaguagggcccagaaaaacc

SEQ ID NO: 742632 - RNA, 21 nt, Human
gcgggggcaaaucuggagugg

SEQ ID NO: 742633 - RNA, 21 nt, Human
gcucugccuuucugagcucca

SEQ ID NO: 742634 - RNA, 23 nt, Human
gcugaucucgaacuccuaaccuc

SEQ ID NO: 742635 - RNA, 20 nt, Human
gcugggguccaggguggagg

SEQ ID NO: 742636 - RNA, 23 nt, Human
ggaaaggaggccagagcuucaug

SEQ ID NO: 742637 - RNA, 20 nt, Human
ggaguggggaagggccaggu

SEQ ID NO: 742638 - RNA, 19 nt, Human
ggauuacaggcuugagcca

SEQ ID NO: 742639 - RNA, 20 nt, Human
ggcagagggcaggaaaaggg

SEQ ID NO: 742640 - RNA, 22 nt, Human
ggccucugggcuccagcagccg

SEQ ID NO: 742641 - RNA, 24 nt, Human
ggcgguugccgguggccucagaca

SEQ ID NO: 742642 - RNA, 25 nt, Human
gggagugcagcuggugucgggcccc

SEQ ID NO: 742643 - RNA, 18 nt, Human
gggcagaggggcugcagu

SEQ ID NO: 742644 - RNA, 20 nt, Human
ggggcggcgguugccggugg

SEQ ID NO: 742645 - RNA, 22 nt, Human
ggguuucaccauguuggccagg

SEQ ID NO: 742646 - RNA, 21 nt, Human
gguagcucccuccucgugaag

SEQ ID NO: 742647 - RNA, 18 nt, Human
ggugaagcugaggcagga

SEQ ID NO: 742648 - RNA, 18 nt, Human
guagcugggauuacaggc

SEQ ID NO: 742649 - RNA, 21 nt, Human
gugagggcuuacuguccugca

SEQ ID NO: 742650 - RNA, 24 nt, Human
gugauccacccgccucggccuccc

SEQ ID NO: 742651 - RNA, 21 nt, Human
guggggcggcgguugccggug

SEQ ID NO: 742652 - RNA, 20 nt, Human
guguguguguguacaugugu

SEQ ID NO: 742653 - RNA, 21 nt, Human
uaaaaacagcgcccccgcccc

SEQ ID NO: 742654 - RNA, 22 nt, Human
uaaaaacagcgcccccgcccca

SEQ ID NO: 742655 - RNA, 24 nt, Human
uaacccuuuuucuuuuuuuuuuuu

SEQ ID NO: 742656 - RNA, 24 nt, Human
uaaccucaggugauccacccgccu

SEQ ID NO: 742657 - RNA, 24 nt, Human
uaacuuauccccucaccucugcca

SEQ ID NO: 742658 - RNA, 21 nt, Human
uaauaaauacaggccccccuc

SEQ ID NO: 742659 - RNA, 21 nt, Human
uaauuuuuuuauuuuuaguag

SEQ ID NO: 742660 - RNA, 22 nt, Human
uaauuuuuuuauuuuuaguaga

SEQ ID NO: 742661 - RNA, 22 nt, Human
uacaggcuugagccaccacacc

SEQ ID NO: 742662 - RNA, 24 nt, Human
uagguguguguguguacaugugug

SEQ ID NO: 742663 - RNA, 22 nt, Human
uaguagacaggguuucaccaug

SEQ ID NO: 742664 - RNA, 22 nt, Human
uaugcccucucacugaccagcc

SEQ ID NO: 742665 - RNA, 19 nt, Human
ucaaaacaaggcgggggca

SEQ ID NO: 742666 - RNA, 23 nt, Human
ucaaaacaaggcgggggcaaauc

SEQ ID NO: 742667 - RNA, 22 nt, Human
ucaacagcggcacugucuuccc

SEQ ID NO: 742668 - RNA, 18 nt, Human
ucaacagcgugcugugca

SEQ ID NO: 742669 - RNA, 23 nt, Human
ucacagcgcccucgggcaucgcg

SEQ ID NO: 742670 - RNA, 18 nt, Human
ucaccuagguuggagugc

SEQ ID NO: 742671 - RNA, 18 nt, Human
ucacugcaaccuccaccu

SEQ ID NO: 742672 - RNA, 19 nt, Human
ucacugcaaccuccaccuc

SEQ ID NO: 742673 - RNA, 30 nt, Human
ucacugcaaccuccaccuccaccuccaggg

SEQ ID NO: 742674 - RNA, 18 nt, Human
uccagagggcuucccagu

SEQ ID NO: 742675 - RNA, 24 nt, Human
uccaggguucaagcgauucuccug

SEQ ID NO: 742676 - RNA, 24 nt, Human
ucccaaagugcugggauuacaggc

SEQ ID NO: 742677 - RNA, 18 nt, Human
ucccacagcuggcucaag

SEQ ID NO: 742678 - RNA, 18 nt, Human
ucccacagcuggcucaag

SEQ ID NO: 742679 - RNA, 26 nt, Human
ucccacucuaccuccuaggguccccu

SEQ ID NO: 742680 - RNA, 18 nt, Human
ucccaguaugcccucuca

SEQ ID NO: 742681 - RNA, 23 nt, Human
uccccggcccaguccugggucuu

SEQ ID NO: 742682 - RNA, 21 nt, Human
uccccuaucuccuuucccuca

SEQ ID NO: 742683 - RNA, 24 nt, Human
ucccgaguagcugggauuacaggc

SEQ ID NO: 742684 - RNA, 19 nt, Human
uccugggucuugucucaac

SEQ ID NO: 742685 - RNA, 20 nt, Human
ucgaccccagaguacccugu

SEQ ID NO: 742686 - RNA, 21 nt, Human
ucuaccuaaaccagguguccu

SEQ ID NO: 742687 - RNA, 21 nt, Human
ucuaccuccuaggguccccua

SEQ ID NO: 742688 - RNA, 21 nt, Human
ucugccuuucugagcuccagg

SEQ ID NO: 742689 - RNA, 20 nt, Human
ugaacacugcucccugcuuu

SEQ ID NO: 742690 - RNA, 20 nt, Human
ugagggcuuacuguccugca

SEQ ID NO: 742691 - RNA, 18 nt, Human
ugaggggcagaggggcug

SEQ ID NO: 742692 - RNA, 18 nt, Human
ugcagggagaagguggcc

SEQ ID NO: 742693 - RNA, 24 nt, Human
ugccuaaaccucccgaguagcugg

SEQ ID NO: 742694 - RNA, 24 nt, Human
ugccuuugaggaggcuccuucuac

SEQ ID NO: 742695 - RNA, 22 nt, Human
ugcucuggcagccacgggagug

SEQ ID NO: 742696 - RNA, 21 nt, Human
uggaaucgcuggagcauucau

SEQ ID NO: 742697 - RNA, 19 nt, Human
uggaggggcuguggaggca

SEQ ID NO: 742698 - RNA, 23 nt, Human
uggagugcaauggcgcgaucucg

SEQ ID NO: 742699 - RNA, 24 nt, Human
uggagugcaauggcgcgaucucgg

SEQ ID NO: 742700 - RNA, 24 nt, Human
uggccaggcugaucucgaacuccu

SEQ ID NO: 742701 - RNA, 24 nt, Human
uggcccagaacccauuucuuuaua

SEQ ID NO: 742702 - RNA, 22 nt, Human
uggccucugggcuccagcagcc

SEQ ID NO: 742703 - RNA, 22 nt, Human
ugggaagucggggcacagcagg

SEQ ID NO: 742704 - RNA, 20 nt, Human
ugggaguggaaugugcgggc

SEQ ID NO: 742705 - RNA, 21 nt, Human
ugggauuacaggcgcccacca

SEQ ID NO: 742706 - RNA, 24 nt, Human
ugggauuacaggcgcccaccacca

SEQ ID NO: 742707 - RNA, 18 nt, Human
ugggauuacaggcuugag

SEQ ID NO: 742708 - RNA, 19 nt, Human
ugggauuacaggcuugagc

SEQ ID NO: 742709 - RNA, 21 nt, Human
ugggauuacaggcuugagcca

SEQ ID NO: 742710 - RNA, 22 nt, Human
ugggauuacaggcuugagccac

SEQ ID NO: 742711 - RNA, 24 nt, Human
ugggauuacaggcuugagccacca

SEQ ID NO: 742712 - RNA, 19 nt, Human
uggugaagcugaggcagga

SEQ ID NO: 742713 - RNA, 24 nt, Human
uguagcuuugucaccuagguugga

SEQ ID NO: 742714 - RNA, 20 nt, Human
ugucaccuagguuggagugc

SEQ ID NO: 742715 - RNA, 23 nt, Human
ugugagaggggaagugcagguag

SEQ ID NO: 742716 - RNA, 25 nt, Human
ugugcacgugcaugcgugugaucuc

SEQ ID NO: 742717 - RNA, 24 nt, Human
ugugggaagucggggcacagcagg

SEQ ID NO: 742718 - RNA, 24 nt, Human
uguguacaugugugcacgugcaug

SEQ ID NO: 742719 - RNA, 18 nt, Human
uguguguacaugugugca

SEQ ID NO: 742720 - RNA, 18 nt, Human
uguguguguacaugugug

SEQ ID NO: 742721 - RNA, 22 nt, Human
uguguguguguacaugugugca

SEQ ID NO: 742722 - RNA, 22 nt, Human
uuaguagacaggguuucaccau

SEQ ID NO: 742723 - RNA, 23 nt, Human
uuaguagacaggguuucaccaug

SEQ ID NO: 742724 - RNA, 24 nt, Human
uucaagcgauucuccugccuaaac

SEQ ID NO: 742725 - RNA, 23 nt, Human
uuuaguagacaggguuucaccau

SEQ ID NO: 742726 - RNA, 24 nt, Human
uuuaguagacaggguuucaccaug

SEQ ID NO: 742727 - RNA, 22 nt, Human
uuuauaagccucugccuauggc

SEQ ID NO: 742728 - RNA, 19 nt, Human
uuucaaaacaaggcggggg

SEQ ID NO: 742729 - RNA, 21 nt, Human
uuucaccauguuggccaggcu

SEQ ID NO: 742730 - RNA, 23 nt, Human
uuucuuuuuuuuuuuugagaugg

SEQ ID NO: 742731 - RNA, 24 nt, Human
uuugucaccuagguuggagugcaa

SEQ ID NO: 742732 - RNA, 21 nt, Human
uuuuauuuuuaguagacaggg

SEQ ID NO: 742733 - RNA, 22 nt, Human
uuuuuaguagacaggguuucac

SEQ ID NO: 742734 - RNA, 20 nt, Human
uuuuucuuuuuuuuuuuugg

SEQ ID NO: 742735 - RNA, 24 nt, Human
uuuuuuuauuuuuaguagacaggg

SEQ ID NO: 742736 - RNA, 27 nt, Human
aaaaaauuagcugggugugguggcuca

SEQ ID NO: 742737 - RNA, 23 nt, Human
aaaagagcaaaaggcuggcaugc

SEQ ID NO: 742738 - RNA, 19 nt, Human
aaagaaaaagcccgcccuc

SEQ ID NO: 742739 - RNA, 23 nt, Human
aaagaaaaagcccgcccucacau

SEQ ID NO: 742740 - RNA, 18 nt, Human
aaagccucuccaggccac

SEQ ID NO: 742741 - RNA, 19 nt, Human
aacacggcgaaaccccguc

SEQ ID NO: 742742 - RNA, 20 nt, Human
aacacggcgaaaccccgucu

SEQ ID NO: 742743 - RNA, 21 nt, Human
aacacggcgaaaccccgucuc

SEQ ID NO: 742744 - RNA, 22 nt, Human
aacaugacuccucccuccccca

SEQ ID NO: 742745 - RNA, 19 nt, Human
aaccacagggucagcacaa

SEQ ID NO: 742746 - RNA, 18 nt, Human
aaccuccaacaugacucc

SEQ ID NO: 742747 - RNA, 20 nt, Human
aaccuccaugucuccaucuc

SEQ ID NO: 742748 - RNA, 22 nt, Human
aaccuccaugucuccaucuccc

SEQ ID NO: 742749 - RNA, 19 nt, Human
aaccuggccuccaccaaca

SEQ ID NO: 742750 - RNA, 23 nt, Human
aagaucacgccauugcacuccag

SEQ ID NO: 742751 - RNA, 26 nt, Human
aagcacccgguuccugggcuucauca

SEQ ID NO: 742752 - RNA, 24 nt, Human
aauugcuugaaccugggaggcgga

SEQ ID NO: 742753 - RNA, 25 nt, Human
acaaacuccaagaaaaggggaacgc

SEQ ID NO: 742754 - RNA, 19 nt, Human
acaaagccucuccaggcca

SEQ ID NO: 742755 - RNA, 23 nt, Human
acagaauaagacucugucucaaa

SEQ ID NO: 742756 - RNA, 24 nt, Human
acagaauaagacucugucucaaaa

SEQ ID NO: 742757 - RNA, 22 nt, Human
acagagcaagacuccguuucaa

SEQ ID NO: 742758 - RNA, 18 nt, Human
acagaucucagcacucac

SEQ ID NO: 742759 - RNA, 22 nt, Human
accacugcgcuccagccugggc

SEQ ID NO: 742760 - RNA, 24 nt, Human
accccgucucuacuaaaaauacaa

SEQ ID NO: 742761 - RNA, 24 nt, Human
accucaccaccucccuuuuucuug

SEQ ID NO: 742762 - RNA, 22 nt, Human
accucccuuuuucuugguccaa

SEQ ID NO: 742763 - RNA, 18 nt, Human
accugcuccgccaccgcc

SEQ ID NO: 742764 - RNA, 28 nt, Human
acucugucucaaaaaaaaaaaaaaaaaa

SEQ ID NO: 742765 - RNA, 24 nt, Human
acugcgcuccagccugggcgacag

SEQ ID NO: 742766 - RNA, 26 nt, Human
acugcgcuccagccugggcgacagag

SEQ ID NO: 742767 - RNA, 21 nt, Human
agaaguucgagaccagccugg

SEQ ID NO: 742768 - RNA, 26 nt, Human
agacccaucuucagguugggucagaa

SEQ ID NO: 742769 - RNA, 18 nt, Human
agagaacaacuauuuaca

SEQ ID NO: 742770 - RNA, 19 nt, Human
agagaacaacuauuuacaa

SEQ ID NO: 742771 - RNA, 24 nt, Human
agcacuuugggaggccgagguggg

SEQ ID NO: 742772 - RNA, 23 nt, Human
agccaacgcuggaggccugagca

SEQ ID NO: 742773 - RNA, 24 nt, Human
agccugggcgacagagcaagacuc

SEQ ID NO: 742774 - RNA, 24 nt, Human
agccugggugacagaauaagacuc

SEQ ID NO: 742775 - RNA, 24 nt, Human
agccuggucaacacggcgaaaccc

SEQ ID NO: 742776 - RNA, 19 nt, Human
agcugggugugguggcuca

SEQ ID NO: 742777 - RNA, 22 nt, Human
aggcaggagaccccugcacacg

SEQ ID NO: 742778 - RNA, 21 nt, Human
aggccgagguggguggaucac

SEQ ID NO: 742779 - RNA, 19 nt, Human
aggcggagguugcaguaag

SEQ ID NO: 742780 - RNA, 24 nt, Human
aggcggagguugcaguaagccaag

SEQ ID NO: 742781 - RNA, 24 nt, Human
aggcggagguugcagugagccaag

SEQ ID NO: 742782 - RNA, 20 nt, Human
agggagccaggguccccuag

SEQ ID NO: 742783 - RNA, 24 nt, Human
agggaggcggagguugcagugagc

SEQ ID NO: 742784 - RNA, 24 nt, Human
agggcccugacccagcagcccugc

SEQ ID NO: 742785 - RNA, 22 nt, Human
agguggguggaucaccugaggu

SEQ ID NO: 742786 - RNA, 24 nt, Human
aguggcucaccccuguaaucccag

SEQ ID NO: 742787 - RNA, 18 nt, Human
agugugagggucagggag

SEQ ID NO: 742788 - RNA, 19 nt, Human
aucacaaacuccaagaaaa

SEQ ID NO: 742789 - RNA, 24 nt, Human
aucacgccauugcacuccagccug

SEQ ID NO: 742790 - RNA, 18 nt, Human
auccaccucaccaccucc

SEQ ID NO: 742791 - RNA, 19 nt, Human
augacuccucccuccccca

SEQ ID NO: 742792 - RNA, 24 nt, Human
auggcacaggcaggagaccccugc

SEQ ID NO: 742793 - RNA, 24 nt, Human
auugcaccacugcgcuccagccug

SEQ ID NO: 742794 - RNA, 21 nt, Human
auugcacuccagccuggguga

SEQ ID NO: 742795 - RNA, 24 nt, Human
auugcacuccagccugggugacag

SEQ ID NO: 742796 - RNA, 18 nt, Human
caaaaguaccugaacuga

SEQ ID NO: 742797 - RNA, 20 nt, Human
caacaacccucaaaaguacc

SEQ ID NO: 742798 - RNA, 24 nt, Human
caacacggcgaaaccccgucucua

SEQ ID NO: 742799 - RNA, 18 nt, Human
caacuuccugggccccac

SEQ ID NO: 742800 - RNA, 23 nt, Human
caacuuccugggccccacccucu

SEQ ID NO: 742801 - RNA, 20 nt, Human
cacacgcacaucauaccaca

SEQ ID NO: 742802 - RNA, 23 nt, Human
cacacgggagcauccuuccugaa

SEQ ID NO: 742803 - RNA, 23 nt, Human
cacacucacgcacacgcacauca

SEQ ID NO: 742804 - RNA, 19 nt, Human
cacagaccaugcaaucugg

SEQ ID NO: 742805 - RNA, 18 nt, Human
caccaguacccgggugcc

SEQ ID NO: 742806 - RNA, 23 nt, Human
caccaguacccgggugccuuaug

SEQ ID NO: 742807 - RNA, 22 nt, Human
caccauuggcaaauaaugaaau

SEQ ID NO: 742808 - RNA, 24 nt, Human
caccccuguaaucccagcacuuug

SEQ ID NO: 742809 - RNA, 22 nt, Human
caccuccagagggcaguuucug

SEQ ID NO: 742810 - RNA, 18 nt, Human
cacuccagccugggugac

SEQ ID NO: 742811 - RNA, 20 nt, Human
cacuccagccugggugacag

SEQ ID NO: 742812 - RNA, 19 nt, Human
cacugcgcuccagccuggg

SEQ ID NO: 742813 - RNA, 20 nt, Human
cacugcgcuccagccugggc

SEQ ID NO: 742814 - RNA, 20 nt, Human
cacugcgcuccagccugggc

SEQ ID NO: 742815 - RNA, 21 nt, Human
cacugcgcuccagccugggcg

SEQ ID NO: 742816 - RNA, 22 nt, Human
cacugcgcuccagccugggcga

SEQ ID NO: 742817 - RNA, 24 nt, Human
cacugcgcuccagccugggcgaca

SEQ ID NO: 742818 - RNA, 18 nt, Human
cagaacaaagccucucca

SEQ ID NO: 742819 - RNA, 21 nt, Human
cagaagcagcgcagggcagag

SEQ ID NO: 742820 - RNA, 19 nt, Human
cagaaggcccacagggccc

SEQ ID NO: 742821 - RNA, 22 nt, Human
cagagcucaggacagaucucag

SEQ ID NO: 742822 - RNA, 23 nt, Human
cagcacaacaacccucaaaagua

SEQ ID NO: 742823 - RNA, 22 nt, Human
cagcacuuugggaggccgaggu

SEQ ID NO: 742824 - RNA, 24 nt, Human
cagcacuuugggaggccgaggugg

SEQ ID NO: 742825 - RNA, 19 nt, Human
cagcagaaagaaaaagccc

SEQ ID NO: 742826 - RNA, 25 nt, Human
cagcagaaagaaaaagcccgcccuc

SEQ ID NO: 742827 - RNA, 19 nt, Human
cagcccccuucucguugcc

SEQ ID NO: 742828 - RNA, 24 nt, Human
cagcgcagggcagagauagccccu

SEQ ID NO: 742829 - RNA, 19 nt, Human
cagcuggguccuguccucc

SEQ ID NO: 742830 - RNA, 18 nt, Human
caggcagcucuaccaccc

SEQ ID NO: 742831 - RNA, 21 nt, Human
caggcucuccuccugcuccuc

SEQ ID NO: 742832 - RNA, 20 nt, Human
cagggucagcacaacaaccc

SEQ ID NO: 742833 - RNA, 21 nt, Human
caugacuccucccucccccag

SEQ ID NO: 742834 - RNA, 19 nt, Human
cauugcacuccagccuggg

SEQ ID NO: 742835 - RNA, 21 nt, Human
cauugcacuccagccugggug

SEQ ID NO: 742836 - RNA, 22 nt, Human
cauugcacuccagccuggguga

SEQ ID NO: 742837 - RNA, 24 nt, Human
cauugcacuccagccugggugaca

SEQ ID NO: 742838 - RNA, 24 nt, Human
cauugcacuccagccugggugaca

SEQ ID NO: 742839 - RNA, 25 nt, Human
cauuugaucaacuugaaggccuacu

SEQ ID NO: 742840 - RNA, 19 nt, Human
ccacacacucacgcacacg

SEQ ID NO: 742841 - RNA, 23 nt, Human
ccacagggucagcacaacaaccc

SEQ ID NO: 742842 - RNA, 20 nt, Human
ccacugcgcuccagccuggg

SEQ ID NO: 742843 - RNA, 20 nt, Human
ccacugcgcuccagccuggg

SEQ ID NO: 742844 - RNA, 21 nt, Human
ccacugcgcuccagccugggc

SEQ ID NO: 742845 - RNA, 21 nt, Human
ccacugcgcuccagccugggc

SEQ ID NO: 742846 - RNA, 23 nt, Human
ccacugcgcuccagccugggcga

SEQ ID NO: 742847 - RNA, 24 nt, Human
ccacugcgcuccagccugggcgac

SEQ ID NO: 742848 - RNA, 21 nt, Human
ccaggccccuccccacagagc

SEQ ID NO: 742849 - RNA, 24 nt, Human
ccaggcccugaagccucuacccca

SEQ ID NO: 742850 - RNA, 20 nt, Human
ccauugcacuccagccuggg

SEQ ID NO: 742851 - RNA, 21 nt, Human
ccauugcacuccagccugggu

SEQ ID NO: 742852 - RNA, 21 nt, Human
ccauugcacuccagccugggu

SEQ ID NO: 742853 - RNA, 22 nt, Human
ccauugcacuccagccugggug

SEQ ID NO: 742854 - RNA, 24 nt, Human
ccauugcacuccagccugggugac

SEQ ID NO: 742855 - RNA, 21 nt, Human
cccaaccuggccuccaccaac

SEQ ID NO: 742856 - RNA, 28 nt, Human
cccacagagcucaggacagaucucagca

SEQ ID NO: 742857 - RNA, 26 nt, Human
cccacagagcucaggacagcggaccg

SEQ ID NO: 742858 - RNA, 25 nt, Human
cccacagggcccugacccagcagcc

SEQ ID NO: 742859 - RNA, 22 nt, Human
cccaccucccccaccaguaccc

SEQ ID NO: 742860 - RNA, 22 nt, Human
cccagccucaacugacucuggc

SEQ ID NO: 742861 - RNA, 18 nt, Human
cccagcgaccugggaggc

SEQ ID NO: 742862 - RNA, 24 nt, Human
cccaggcccugaagccucuaccuc

SEQ ID NO: 742863 - RNA, 24 nt, Human
cccaugaauaaccuucccuacccc

SEQ ID NO: 742864 - RNA, 23 nt, Human
ccccacccucugaagagccccag

SEQ ID NO: 742865 - RNA, 24 nt, Human
ccccaccucccccaccaguacccg

SEQ ID NO: 742866 - RNA, 21 nt, Human
ccccuacccuagacaggacag

SEQ ID NO: 742867 - RNA, 19 nt, Human
ccccuguaaucccagcacu

SEQ ID NO: 742868 - RNA, 19 nt, Human
cccuagacaggacagcagg

SEQ ID NO: 742869 - RNA, 21 nt, Human
cccugcacacgggagcauccu

SEQ ID NO: 742870 - RNA, 23 nt, Human
cccugcacacgggagcauccuuc

SEQ ID NO: 742871 - RNA, 21 nt, Human
ccgauagugccagcaguggag

SEQ ID NO: 742872 - RNA, 19 nt, Human
ccgcccucacauccuccug

SEQ ID NO: 742873 - RNA, 19 nt, Human
ccgguuccugggcuucauc

SEQ ID NO: 742874 - RNA, 23 nt, Human
ccuaccccagccaagccuaggaa

SEQ ID NO: 742875 - RNA, 23 nt, Human
ccuacccuagacaggacagcagg

SEQ ID NO: 742876 - RNA, 18 nt, Human
ccucccccaccaguaccc

SEQ ID NO: 742877 - RNA, 19 nt, Human
ccucccuuuuucuuggucc

SEQ ID NO: 742878 - RNA, 19 nt, Human
ccuccucugagccuggggg

SEQ ID NO: 742879 - RNA, 22 nt, Human
ccuccugccccaccucccccac

SEQ ID NO: 742880 - RNA, 18 nt, Human
ccuccuucccucucuccu

SEQ ID NO: 742881 - RNA, 23 nt, Human
ccuccuucccucucuccuucccc

SEQ ID NO: 742882 - RNA, 22 nt, Human
ccugaagccucuaccucccagg

SEQ ID NO: 742883 - RNA, 22 nt, Human
ccugaggucagaaguucgagac

SEQ ID NO: 742884 - RNA, 19 nt, Human
ccuggccuccaccaacacc

SEQ ID NO: 742885 - RNA, 25 nt, Human
ccuggccuccaccaacaccccuaac

SEQ ID NO: 742886 - RNA, 19 nt, Human
ccugggaggcggagguugc

SEQ ID NO: 742887 - RNA, 22 nt, Human
ccugggcgacagagcaagacuc

SEQ ID NO: 742888 - RNA, 22 nt, Human
ccugggugacagaauaagacuc

SEQ ID NO: 742889 - RNA, 23 nt, Human
ccuggucaacacggcgaaacccc

SEQ ID NO: 742890 - RNA, 24 nt, Human
ccuggucaacacggcgaaaccccg

SEQ ID NO: 742891 - RNA, 22 nt, Human
ccuguaaucccagcacuuuggg

SEQ ID NO: 742892 - RNA, 19 nt, Human
cgagaccagccuggucaac

SEQ ID NO: 742893 - RNA, 24 nt, Human
cgagguggguggaucaccugaggu

SEQ ID NO: 742894 - RNA, 22 nt, Human
cgccaggcucuccuccugcucc

SEQ ID NO: 742895 - RNA, 26 nt, Human
cgccauugcacuccagccugggugac

SEQ ID NO: 742896 - RNA, 25 nt, Human
cguggaaggcucagccucuccuccg

SEQ ID NO: 742897 - RNA, 24 nt, Human
cuacccuagacaggacagcaggcu

SEQ ID NO: 742898 - RNA, 24 nt, Human
cucaccccuguaaucccagcacuu

SEQ ID NO: 742899 - RNA, 24 nt, Human
cucccccaccaguacccgggugcc

SEQ ID NO: 742900 - RNA, 22 nt, Human
cuccgccaccgccaggcucucc

SEQ ID NO: 742901 - RNA, 22 nt, Human
cuccucugagccugggggcucc

SEQ ID NO: 742902 - RNA, 20 nt, Human
cucuaccacccaggcccuga

SEQ ID NO: 742903 - RNA, 21 nt, Human
cucuaccucccaggccccagc

SEQ ID NO: 742904 - RNA, 19 nt, Human
cucuccuuauucuacucua

SEQ ID NO: 742905 - RNA, 19 nt, Human
cucugucucaaaaaaaaaa

SEQ ID NO: 742906 - RNA, 22 nt, Human
cugaagccucuaccucccaggc

SEQ ID NO: 742907 - RNA, 20 nt, Human
cuggcccuggggccagcugg

SEQ ID NO: 742908 - RNA, 24 nt, Human
cugggaggcugagacaacgagaau

SEQ ID NO: 742909 - RNA, 18 nt, Human
cuggggcuggcccugggg

SEQ ID NO: 742910 - RNA, 19 nt, Human
cuugaaccugggaggcgga

SEQ ID NO: 742911 - RNA, 21 nt, Human
cuugaaggccuacuguagggc

SEQ ID NO: 742912 - RNA, 22 nt, Human
gacaacgagaauugcuugaacc

SEQ ID NO: 742913 - RNA, 24 nt, Human
gacaacgagaauugcuugaaccug

SEQ ID NO: 742914 - RNA, 23 nt, Human
gacagaauaagacucugucucaa

SEQ ID NO: 742915 - RNA, 19 nt, Human
gacagaucucagcacucac

SEQ ID NO: 742916 - RNA, 20 nt, Human
gagcucaggacagaucucag

SEQ ID NO: 742917 - RNA, 20 nt, Human
gaggaagcuccuucugggca

SEQ ID NO: 742918 - RNA, 22 nt, Human
gaggccugagcagagcuuccuc

SEQ ID NO: 742919 - RNA, 23 nt, Human
gagguggguggaucaccugaggu

SEQ ID NO: 742920 - RNA, 25 nt, Human
gagguggguggaucaccugagguca

SEQ ID NO: 742921 - RNA, 18 nt, Human
gagguugcaguaagccaa

SEQ ID NO: 742922 - RNA, 22 nt, Human
gagguugcaguaagccaagauc

SEQ ID NO: 742923 - RNA, 18 nt, Human
gagguugcagugagccaa

SEQ ID NO: 742924 - RNA, 23 nt, Human
gagguugcagugagccaagauug

SEQ ID NO: 742925 - RNA, 24 nt, Human
gaucaccugaggucagaaguucga

SEQ ID NO: 742926 - RNA, 20 nt, Human
gcaccguuacagaacaaagc

SEQ ID NO: 742927 - RNA, 22 nt, Human
gcagaaucaucagaaucucuaa

SEQ ID NO: 742928 - RNA, 19 nt, Human
gccauugcacuccagccug

SEQ ID NO: 742929 - RNA, 24 nt, Human
gccauugcacuccagccuggguga

SEQ ID NO: 742930 - RNA, 18 nt, Human
gccccaccucccccacca

SEQ ID NO: 742931 - RNA, 18 nt, Human
gcccuggggccagcuggg

SEQ ID NO: 742932 - RNA, 20 nt, Human
gcccuggggccagcuggguc

SEQ ID NO: 742933 - RNA, 24 nt, Human
gcgcuccagccugggcgacagagc

SEQ ID NO: 742934 - RNA, 19 nt, Human
gcggccagcagggagcugg

SEQ ID NO: 742935 - RNA, 21 nt, Human
gcggcggcugcagaggaaugc

SEQ ID NO: 742936 - RNA, 26 nt, Human
gcuucccuccccaaccuggccuccac

SEQ ID NO: 742937 - RNA, 20 nt, Human
ggagguugcaguaagccaag

SEQ ID NO: 742938 - RNA, 24 nt, Human
ggagguugcaguaagccaagauca

SEQ ID NO: 742939 - RNA, 22 nt, Human
ggagguugcagugagccaagau

SEQ ID NO: 742940 - RNA, 24 nt, Human
ggagguugcagugagccaagauug

SEQ ID NO: 742941 - RNA, 20 nt, Human
ggcccuggggccagcugggu

SEQ ID NO: 742942 - RNA, 21 nt, Human
ggcucaugccuguagucccag

SEQ ID NO: 742943 - RNA, 18 nt, Human
ggcuguggccauggccag

SEQ ID NO: 742944 - RNA, 22 nt, Human
gggcuccuccaucuggcugugg

SEQ ID NO: 742945 - RNA, 19 nt, Human
ggggcaggaauccagagga

SEQ ID NO: 742946 - RNA, 20 nt, Human
gggucccucugaucuucccu

SEQ ID NO: 742947 - RNA, 24 nt, Human
gguggcucaugccuguagucccag

SEQ ID NO: 742948 - RNA, 22 nt, Human
ggugugguggcucaugccugua

SEQ ID NO: 742949 - RNA, 19 nt, Human
gucagggaggcggagguug

SEQ ID NO: 742950 - RNA, 20 nt, Human
guccuccuucccucucuccu

SEQ ID NO: 742951 - RNA, 20 nt, Human
guggcuuggacaaacaagcu

SEQ ID NO: 742952 - RNA, 18 nt, Human
guuaacuacaacuuccug

SEQ ID NO: 742953 - RNA, 21 nt, Human
uaagacaucccuggcccauga

SEQ ID NO: 742954 - RNA, 22 nt, Human
uaagacaucccuggcccaugaa

SEQ ID NO: 742955 - RNA, 25 nt, Human
uacaacuuccugggccccacccucu

SEQ ID NO: 742956 - RNA, 23 nt, Human
uaccuagauggccguguaaggac

SEQ ID NO: 742957 - RNA, 18 nt, Human
uaccugaacugaauccac

SEQ ID NO: 742958 - RNA, 18 nt, Human
uagaggaagcuccuucug

SEQ ID NO: 742959 - RNA, 24 nt, Human
uagcugggugugguggcucaugcc

SEQ ID NO: 742960 - RNA, 23 nt, Human
uaggcagcagaaagaaaaagccc

SEQ ID NO: 742961 - RNA, 22 nt, Human
uagucuccgaguuuagaauccu

SEQ ID NO: 742962 - RNA, 22 nt, Human
ucaaaaaaaaaaaaaaaaaaaa

SEQ ID NO: 742963 - RNA, 22 nt, Human
ucaagugggggauaaaaaagaa

SEQ ID NO: 742964 - RNA, 23 nt, Human
ucacgccauugcacuccagccug

SEQ ID NO: 742965 - RNA, 21 nt, Human
ucagccucuccuccgcauccc

SEQ ID NO: 742966 - RNA, 22 nt, Human
ucagccucuccuccgcaucccu

SEQ ID NO: 742967 - RNA, 21 nt, Human
ucagggaggcggagguugcag

SEQ ID NO: 742968 - RNA, 23 nt, Human
uccaccaacaccccuaacaggag

SEQ ID NO: 742969 - RNA, 24 nt, Human
uccaccaacaccccuaacaggagg

SEQ ID NO: 742970 - RNA, 24 nt, Human
uccagccugggcgacagagcaaga

SEQ ID NO: 742971 - RNA, 18 nt, Human
uccagccugggugacaga

SEQ ID NO: 742972 - RNA, 21 nt, Human
ucccagccucaacugacucug

SEQ ID NO: 742973 - RNA, 23 nt, Human
uccccaaccuccaacaugacucc

SEQ ID NO: 742974 - RNA, 19 nt, Human
ucccccaccaguacccggg

SEQ ID NO: 742975 - RNA, 21 nt, Human
ucccuaagacaucccuggccc

SEQ ID NO: 742976 - RNA, 20 nt, Human
ucccuaccccagccaagccu

SEQ ID NO: 742977 - RNA, 18 nt, Human
ucccuuugaacugagccu

SEQ ID NO: 742978 - RNA, 23 nt, Human
uccuccaucuggcuguggccaug

SEQ ID NO: 742979 - RNA, 19 nt, Human
uccucccucccccaggagu

SEQ ID NO: 742980 - RNA, 20 nt, Human
uccuccgcaucccuccuccu

SEQ ID NO: 742981 - RNA, 18 nt, Human
uccugccccaccuccccc

SEQ ID NO: 742982 - RNA, 28 nt, Human
uccugggccccacccucugaagagcccc

SEQ ID NO: 742983 - RNA, 26 nt, Human
ucucaaaaaaaaaaaaaaaaaaaauc

SEQ ID NO: 742984 - RNA, 22 nt, Human
ucuccaggccacugccugaguc

SEQ ID NO: 742985 - RNA, 20 nt, Human
ucucccuuugaacugagccu

SEQ ID NO: 742986 - RNA, 19 nt, Human
ucuccuggggaugggcucc

SEQ ID NO: 742987 - RNA, 22 nt, Human
ucucuacuaaaaauacaaaaaa

SEQ ID NO: 742988 - RNA, 23 nt, Human
ucucucugggaagaagugagcuu

SEQ ID NO: 742989 - RNA, 19 nt, Human
ucuggcccuuggggaaaag

SEQ ID NO: 742990 - RNA, 22 nt, Human
ucuggcugugggagguguggag

SEQ ID NO: 742991 - RNA, 23 nt, Human
ucugucucaaaaaaaaaaaaaaa

SEQ ID NO: 742992 - RNA, 24 nt, Human
ugaaccugggaggcggagguugca

SEQ ID NO: 742993 - RNA, 19 nt, Human
ugaagccucuaccucccag

SEQ ID NO: 742994 - RNA, 18 nt, Human
ugacaggaggggaauaaa

SEQ ID NO: 742995 - RNA, 23 nt, Human
ugacccugaauccucuuccuccc

SEQ ID NO: 742996 - RNA, 24 nt, Human
ugacuccucccucccccaggaguc

SEQ ID NO: 742997 - RNA, 25 nt, Human
ugagacaacgagaauugcuugaacc

SEQ ID NO: 742998 - RNA, 26 nt, Human
ugagacaacgagaauugcuugaaccu

SEQ ID NO: 742999 - RNA, 21 nt, Human
ugagcagaagcagcgcagggc

SEQ ID NO: 743000 - RNA, 22 nt, Human
ugcacuccagccugggugacag

SEQ ID NO: 743001 - RNA, 19 nt, Human
ugcaguggcucaccccugu

SEQ ID NO: 743002 - RNA, 21 nt, Human
ugccagcaguggagggcggcc

SEQ ID NO: 743003 - RNA, 18 nt, Human
ugcccugucagguccucc

SEQ ID NO: 743004 - RNA, 24 nt, Human
ugccuguagucccagcgaccuggg

SEQ ID NO: 743005 - RNA, 23 nt, Human
ugccuucaugcccugucaggucc

SEQ ID NO: 743006 - RNA, 19 nt, Human
ugcucaaccgugcuuccac

SEQ ID NO: 743007 - RNA, 24 nt, Human
uggaucaccugaggucagaaguuc

SEQ ID NO: 743008 - RNA, 27 nt, Human
uggaucaccugaggucagaaguucgag

SEQ ID NO: 743009 - RNA, 20 nt, Human
uggcccgauagugccagcag

SEQ ID NO: 743010 - RNA, 19 nt, Human
uggccuccaccaacacccc

SEQ ID NO: 743011 - RNA, 20 nt, Human
uggccuccaccaacaccccu

SEQ ID NO: 743012 - RNA, 21 nt, Human
uggcucaccccuguaauccca

SEQ ID NO: 743013 - RNA, 22 nt, Human
uggcucaccccuguaaucccag

SEQ ID NO: 743014 - RNA, 24 nt, Human
uggcucaccccuguaaucccagca

SEQ ID NO: 743015 - RNA, 23 nt, Human
ugggaggccgagguggguggauc

SEQ ID NO: 743016 - RNA, 24 nt, Human
ugggaggccgagguggguggauca

SEQ ID NO: 743017 - RNA, 20 nt, Human
ugggaggcggagguugcagu

SEQ ID NO: 743018 - RNA, 29 nt, Human
ugggaggcggagguugcaguaacaacggu

SEQ ID NO: 743019 - RNA, 19 nt, Human
ugggaggcugagacaacga

SEQ ID NO: 743020 - RNA, 20 nt, Human
ugggaggggggcaggaaucc

SEQ ID NO: 743021 - RNA, 20 nt, Human
uggggcuggcccuggggcca

SEQ ID NO: 743022 - RNA, 20 nt, Human
ugggucccucugaucuuccc

SEQ ID NO: 743023 - RNA, 24 nt, Human
uggguggaucaccugaggucagaa

SEQ ID NO: 743024 - RNA, 18 nt, Human
ugggugugguggcucaug

SEQ ID NO: 743025 - RNA, 22 nt, Human
ugguccaacucuggcccuuggg

SEQ ID NO: 743026 - RNA, 18 nt, Human
uggucuggcagcugcccu

SEQ ID NO: 743027 - RNA, 24 nt, Human
ugguggcucaugccuguaguccca

SEQ ID NO: 743028 - RNA, 20 nt, Human
ugucccagccucaacugagg

SEQ ID NO: 743029 - RNA, 20 nt, Human
uguggaaggaacaaccucca

SEQ ID NO: 743030 - RNA, 22 nt, Human
uuacaagggaagcagccacacc

SEQ ID NO: 743031 - RNA, 18 nt, Human
uuagcugggugugguggc

SEQ ID NO: 743032 - RNA, 22 nt, Human
uuagcugggugugguggcucau

SEQ ID NO: 743033 - RNA, 23 nt, Human
uuagcugggugugguggcucaug

SEQ ID NO: 743034 - RNA, 24 nt, Human
uuagcugggugugguggcucaugc

SEQ ID NO: 743035 - RNA, 19 nt, Human
uucaugcauuugaucaacu

SEQ ID NO: 743036 - RNA, 22 nt, Human
uucaugcauuugaucaacuuga

SEQ ID NO: 743037 - RNA, 19 nt, Human
uucaugggaggggggcagg

SEQ ID NO: 743038 - RNA, 22 nt, Human
uuccccuuugucccagccucaa

SEQ ID NO: 743039 - RNA, 18 nt, Human
uuccugggccccacccuc

SEQ ID NO: 743040 - RNA, 20 nt, Human
uuccugggccccacccucug

SEQ ID NO: 743041 - RNA, 24 nt, Human
uuccugggcuucaucacaaacucc

SEQ ID NO: 743042 - RNA, 24 nt, Human
uugaaccugggaggcggagguugc

SEQ ID NO: 743043 - RNA, 23 nt, Human
uugcaccacugcgcuccagccug

SEQ ID NO: 743044 - RNA, 22 nt, Human
uugcagugagccaagauugcac

SEQ ID NO: 743045 - RNA, 24 nt, Human
uugcuugaaccugggaggcggagg

SEQ ID NO: 743046 - RNA, 25 nt, Human
uugggaggccgagguggguggauca

SEQ ID NO: 743047 - RNA, 19 nt, Human
uuucuugguccaacucugg

SEQ ID NO: 743048 - RNA, 19 nt, Human
aaaaaaaaacaaaaacccc

SEQ ID NO: 743049 - RNA, 19 nt, Human
aaaaaaaacaaaaacccca

SEQ ID NO: 743050 - RNA, 27 nt, Human
aaaaaaacaaaaaccccacacaccaag

SEQ ID NO: 743051 - RNA, 18 nt, Human
aaacaaaaaccccacaca

SEQ ID NO: 743052 - RNA, 18 nt, Human
aaacaaaaaccccacaca

SEQ ID NO: 743053 - RNA, 24 nt, Human
acccgaucaaaacacaacaccacc

SEQ ID NO: 743054 - RNA, 23 nt, Human
acgccaacgagacaccacaguuu

SEQ ID NO: 743055 - RNA, 19 nt, Human
aggcaucggccaacaauca

SEQ ID NO: 743056 - RNA, 27 nt, Human
caaaaaccccacacaccaagggacuaa

SEQ ID NO: 743057 - RNA, 24 nt, Human
caaaauauaaaaaaaaaacaaaaa

SEQ ID NO: 743058 - RNA, 20 nt, Human
caacaccaccuuguuaaggu

SEQ ID NO: 743059 - RNA, 23 nt, Human
caacauaggaauaagagccccga

SEQ ID NO: 743060 - RNA, 18 nt, Human
caccugguguggccuggc

SEQ ID NO: 743061 - RNA, 19 nt, Human
cacgccaacgagacaccac

SEQ ID NO: 743062 - RNA, 21 nt, Human
cagaugauccugcagcaacau

SEQ ID NO: 743063 - RNA, 18 nt, Human
cagcacacccaggggaag

SEQ ID NO: 743064 - RNA, 22 nt, Human
cagcacgccaacgagacaccac

SEQ ID NO: 743065 - RNA, 22 nt, Human
cagcccacucagcagagcacca

SEQ ID NO: 743066 - RNA, 19 nt, Human
caggaacaccugguguggc

SEQ ID NO: 743067 - RNA, 21 nt, Human
caggagcccagaugccaggaa

SEQ ID NO: 743068 - RNA, 20 nt, Human
cagucguacugccaacaugc

SEQ ID NO: 743069 - RNA, 24 nt, Human
ccagaacacccgaucaaaacacaa

SEQ ID NO: 743070 - RNA, 23 nt, Human
cccacacaccaagggacuaagau

SEQ ID NO: 743071 - RNA, 19 nt, Human
ccccaaaaacuggucugca

SEQ ID NO: 743072 - RNA, 20 nt, Human
cccgaacaaauugacacuug

SEQ ID NO: 743073 - RNA, 23 nt, Human
cccgaucaaaacacaacaccacc

SEQ ID NO: 743074 - RNA, 20 nt, Human
ccgaaaagccuugccucgcc

SEQ ID NO: 743075 - RNA, 23 nt, Human
ccgcaaagaagagucguggaauc

SEQ ID NO: 743076 - RNA, 25 nt, Human
cgaacaaauugacacuuggauccca

SEQ ID NO: 743077 - RNA, 23 nt, Human
cgaagaacacaauuccaaacuaa

SEQ ID NO: 743078 - RNA, 21 nt, Human
cgccgacggccguaggggccg

SEQ ID NO: 743079 - RNA, 25 nt, Human
cuagaagagccuuccuuacauggca

SEQ ID NO: 743080 - RNA, 26 nt, Human
cucaaaauauaaaaaaaaaacaaaaa

SEQ ID NO: 743081 - RNA, 30 nt, Human
cucaaaauauaaaaaaaaaacaaaaacccc

SEQ ID NO: 743082 - RNA, 22 nt, Human
cugcugcuucagcacacccagg

SEQ ID NO: 743083 - RNA, 24 nt, Human
cugcugcuucagcacacccagggg

SEQ ID NO: 743084 - RNA, 19 nt, Human
gagcucaccccugcuggca

SEQ ID NO: 743085 - RNA, 20 nt, Human
gaucccagaacacccgauca

SEQ ID NO: 743086 - RNA, 18 nt, Human
gcaaagaagagucgugga

SEQ ID NO: 743087 - RNA, 23 nt, Human
gcaggaacaccugguguggccuu

SEQ ID NO: 743088 - RNA, 24 nt, Human
gcgaggcagcguauacauggcccc

SEQ ID NO: 743089 - RNA, 19 nt, Human
gguguggccuggcgaggca

SEQ ID NO: 743090 - RNA, 25 nt, Human
gucugcaauucuucccgcuucucgc

SEQ ID NO: 743091 - RNA, 23 nt, Human
uaaaaaaaaaacaaaaaccccac

SEQ ID NO: 743092 - RNA, 31 nt, Human
uaaaaaaaaaacaaaaaccccacacaccaag

SEQ ID NO: 743093 - RNA, 18 nt, Human
ucaaaggaggcaagcucc

SEQ ID NO: 743094 - RNA, 19 nt, Human
uccagaagaggaagagcuc

SEQ ID NO: 743095 - RNA, 19 nt, Human
ucccugugcucuaggucau

SEQ ID NO: 743096 - RNA, 20 nt, Human
ucggcuguggggcaccugga

SEQ ID NO: 743097 - RNA, 26 nt, Human
ucucccgcaaagaagagucguggaau

SEQ ID NO: 743098 - RNA, 21 nt, Human
ucuccugccacuagugccaac

SEQ ID NO: 743099 - RNA, 20 nt, Human
ugagaauggccaggcaucgg

SEQ ID NO: 743100 - RNA, 20 nt, Human
ugcacugcuaccaaaaaucc

SEQ ID NO: 743101 - RNA, 24 nt, Human
ugcaucugucucacaugcuugggg

SEQ ID NO: 743102 - RNA, 25 nt, Human
ugcuaccaaaaaucccuuugagaag

SEQ ID NO: 743103 - RNA, 22 nt, Human
ugcuagaagagccuuccuuaca

SEQ ID NO: 743104 - RNA, 19 nt, Human
uggacugcagauguuuucc

SEQ ID NO: 743105 - RNA, 19 nt, Human
uuccaugauaccagcagcu

SEQ ID NO: 743106 - RNA, 25 nt, Human
uuuuccaugauaccagcagcuucuc

SEQ ID NO: 743107 - RNA, 18 nt, Human
aaaaaacucacaggagca

SEQ ID NO: 743108 - RNA, 18 nt, Human
aaaaccagucuacauaug

SEQ ID NO: 743109 - RNA, 18 nt, Human
aacacugguaccacuuuc

SEQ ID NO: 743110 - RNA, 22 nt, Human
aacuccgcgcuucagcagcccu

SEQ ID NO: 743111 - RNA, 18 nt, Human
aagcagaaagcuaaucua

SEQ ID NO: 743112 - RNA, 23 nt, Human
aagcaggcagggagaaaugaccc

SEQ ID NO: 743113 - RNA, 19 nt, Human
aauuagcaacauucuccuu

SEQ ID NO: 743114 - RNA, 21 nt, Human
acaaagcaggcagggagaaau

SEQ ID NO: 743115 - RNA, 23 nt, Human
acauagcaacaacaaaaaccagu

SEQ ID NO: 743116 - RNA, 22 nt, Human
accgcgccccccacucccgcgc

SEQ ID NO: 743117 - RNA, 26 nt, Human
agaaaaaaauacauucauuuuuuuca

SEQ ID NO: 743118 - RNA, 18 nt, Human
agaaaugacccuaccuuc

SEQ ID NO: 743119 - RNA, 20 nt, Human
agauaauccaucugugaaaa

SEQ ID NO: 743120 - RNA, 19 nt, Human
agcagaaagcuaaucuaga

SEQ ID NO: 743121 - RNA, 22 nt, Human
agugaaacaugcuguucuuugg

SEQ ID NO: 743122 - RNA, 22 nt, Human
auaaagacaaaaagauuucaca

SEQ ID NO: 743123 - RNA, 22 nt, Human
auacacacuggguaacagugcg

SEQ ID NO: 743124 - RNA, 20 nt, Human
auagcaacaacaaaaaccag

SEQ ID NO: 743125 - RNA, 22 nt, Human
auucugucaauuggucaaaaga

SEQ ID NO: 743126 - RNA, 19 nt, Human
caaaaagcagugaggauaa

SEQ ID NO: 743127 - RNA, 18 nt, Human
caaaaaugcugcaucaac

SEQ ID NO: 743128 - RNA, 23 nt, Human
caaagcuuucugaaaccccuaga

SEQ ID NO: 743129 - RNA, 18 nt, Human
caaauaaaaaaagcagaa

SEQ ID NO: 743130 - RNA, 20 nt, Human
caacaacaaaaaccagucua

SEQ ID NO: 743131 - RNA, 21 nt, Human
caacaacaaaaaccagucuac

SEQ ID NO: 743132 - RNA, 19 nt, Human
cagccacaauguccuacug

SEQ ID NO: 743133 - RNA, 23 nt, Human
caucuguucaucaaagcuuucug

SEQ ID NO: 743134 - RNA, 21 nt, Human
caugcuaguuggcacaaagca

SEQ ID NO: 743135 - RNA, 19 nt, Human
ccagcgacaugcaggcucu

SEQ ID NO: 743136 - RNA, 24 nt, Human
ccccagauaauccaucugugaaaa

SEQ ID NO: 743137 - RNA, 20 nt, Human
ccgaaacugugccaacugcc

SEQ ID NO: 743138 - RNA, 21 nt, Human
ccgaacuccgcgcuucagcag

SEQ ID NO: 743139 - RNA, 24 nt, Human
ccgcgccccccacucccgcgcaga

SEQ ID NO: 743140 - RNA, 19 nt, Human
ccgcgcuucagcagcccug

SEQ ID NO: 743141 - RNA, 21 nt, Human
ccuauacccagcaugcgugaa

SEQ ID NO: 743142 - RNA, 21 nt, Human
cgcgcuucagcagcccugccc

SEQ ID NO: 743143 - RNA, 24 nt, Human
cggaggggguuucagauguuuguc

SEQ ID NO: 743144 - RNA, 21 nt, Human
cggcgcgaccccgaacuccgc

SEQ ID NO: 743145 - RNA, 23 nt, Human
cggcucggaggcuccggcggcgg

SEQ ID NO: 743146 - RNA, 19 nt, Human
cuagagcuuuacuauucua

SEQ ID NO: 743147 - RNA, 19 nt, Human
cucaaaacuuuucacauaa

SEQ ID NO: 743148 - RNA, 21 nt, Human
cucgccucaccagggcaccgc

SEQ ID NO: 743149 - RNA, 23 nt, Human
cugaaaaagagaacugcaaaugu

SEQ ID NO: 743150 - RNA, 19 nt, Human
cuggucuaguuugcuaaaa

SEQ ID NO: 743151 - RNA, 19 nt, Human
cuuucugaaaccccuagag

SEQ ID NO: 743152 - RNA, 21 nt, Human
gaaaaagagaacugcaaaugu

SEQ ID NO: 743153 - RNA, 22 nt, Human
gaacuccgcgcuucagcagccc

SEQ ID NO: 743154 - RNA, 26 nt, Human
gaccccgaacuccgcgcuucagcagc

SEQ ID NO: 743155 - RNA, 18 nt, Human
gaggguccccgcggccgc

SEQ ID NO: 743156 - RNA, 21 nt, Human
gccgcaccgggcucccgcgcc

SEQ ID NO: 743157 - RNA, 19 nt, Human
gccgggcgcaccgcgcccc

SEQ ID NO: 743158 - RNA, 19 nt, Human
gcucuggcuuuguuucacu

SEQ ID NO: 743159 - RNA, 18 nt, Human
ggaggcuccggcggcggg

SEQ ID NO: 743160 - RNA, 18 nt, Human
ggcucccgcgccugccug

SEQ ID NO: 743161 - RNA, 18 nt, Human
gggcauccuccuccucgg

SEQ ID NO: 743162 - RNA, 27 nt, Human
guucauuuuauauauauauuuauaugu

SEQ ID NO: 743163 - RNA, 18 nt, Human
uaaaaaaagcagaaagcu

SEQ ID NO: 743164 - RNA, 21 nt, Human
uaaaguaaugccuaaccagac

SEQ ID NO: 743165 - RNA, 25 nt, Human
uaaccagacucauaaugcauguaga

SEQ ID NO: 743166 - RNA, 21 nt, Human
uacacauaaaguuacauaaau

SEQ ID NO: 743167 - RNA, 20 nt, Human
uaccuucccaaaaaacucaa

SEQ ID NO: 743168 - RNA, 20 nt, Human
uagaugcaacaugcuaguug

SEQ ID NO: 743169 - RNA, 19 nt, Human
uagcaacaacaaaaaccag

SEQ ID NO: 743170 - RNA, 19 nt, Human
uaguuggcacaaagcaggc

SEQ ID NO: 743171 - RNA, 21 nt, Human
uauaacaagucauuauauaca

SEQ ID NO: 743172 - RNA, 22 nt, Human
uauaacaagucauuauauacac

SEQ ID NO: 743173 - RNA, 22 nt, Human
uaucauagaaucaucucugaaa

SEQ ID NO: 743174 - RNA, 21 nt, Human
uauugcaauauacaaagaugc

SEQ ID NO: 743175 - RNA, 19 nt, Human
ucagauguuugucaucuga

SEQ ID NO: 743176 - RNA, 20 nt, Human
ucagcaccaguauuaggugg

SEQ ID NO: 743177 - RNA, 21 nt, Human
ucgggcaggaccuccccuucc

SEQ ID NO: 743178 - RNA, 22 nt, Human
ucugaaaaagagaacugcaaau

SEQ ID NO: 743179 - RNA, 22 nt, Human
ucugaaaccccuagagcuuuac

SEQ ID NO: 743180 - RNA, 23 nt, Human
ugaaaaagagaacugcaaaugua

SEQ ID NO: 743181 - RNA, 21 nt, Human
ugaccaguaaucauuuuccuc

SEQ ID NO: 743182 - RNA, 22 nt, Human
ugaccaguaaucauuuuccuca

SEQ ID NO: 743183 - RNA, 25 nt, Human
ugacuaaaaaaauuaaucuaaauau

SEQ ID NO: 743184 - RNA, 21 nt, Human
ugagcuggguagacucagcca

SEQ ID NO: 743185 - RNA, 19 nt, Human
ugcaaaaagcagugaggau

SEQ ID NO: 743186 - RNA, 20 nt, Human
ugccccaugcagcacuucca

SEQ ID NO: 743187 - RNA, 18 nt, Human
uggcaccaaauaaagagg

SEQ ID NO: 743188 - RNA, 18 nt, Human
uggguaacagugcggagg

SEQ ID NO: 743189 - RNA, 23 nt, Human
ugguaacacugguaccacuuucu

SEQ ID NO: 743190 - RNA, 19 nt, Human
uguagaugcaacaugcuag

SEQ ID NO: 743191 - RNA, 21 nt, Human
ugugaaaauacaaguacugca

SEQ ID NO: 743192 - RNA, 20 nt, Human
uuacauaaauguuuccaccu

SEQ ID NO: 743193 - RNA, 21 nt, Human
uuccaucagcuucagggucca

SEQ ID NO: 743194 - RNA, 25 nt, Human
uucuaaggagcacuuucugcugagg

SEQ ID NO: 743195 - RNA, 25 nt, Human
uuguaggcugaggaagugaagaguu

SEQ ID NO: 743196 - RNA, 18 nt, Human
aagaugccuccucccucc

SEQ ID NO: 743197 - RNA, 21 nt, Human
aagaugccuccucccuccuuc

SEQ ID NO: 743198 - RNA, 21 nt, Human
aagcaguagggggugccgccg

SEQ ID NO: 743199 - RNA, 23 nt, Human
aaggagguuuccccaccccccac

SEQ ID NO: 743200 - RNA, 21 nt, Human
acaaugacaccuagugccccc

SEQ ID NO: 743201 - RNA, 22 nt, Human
acccgcccagcacugccccucc

SEQ ID NO: 743202 - RNA, 28 nt, Human
acccgcccagcacugccccuccuccccc

SEQ ID NO: 743203 - RNA, 18 nt, Human
acccuggagccucccucc

SEQ ID NO: 743204 - RNA, 18 nt, Human
acccuggagccucccucc

SEQ ID NO: 743205 - RNA, 26 nt, Human
agacucugggucccuucaagcaagcu

SEQ ID NO: 743206 - RNA, 20 nt, Human
agccagaaagcugggguguu

SEQ ID NO: 743207 - RNA, 23 nt, Human
aggcaaaauaaauaaccccccaa

SEQ ID NO: 743208 - RNA, 22 nt, Human
aggcugggggcccagauuccuu

SEQ ID NO: 743209 - RNA, 20 nt, Human
agggcacaugggcugaggca

SEQ ID NO: 743210 - RNA, 24 nt, Human
caaaauaaauaaccccccaacccc

SEQ ID NO: 743211 - RNA, 28 nt, Human
caaccacguugauuuccaagccgauccc

SEQ ID NO: 743212 - RNA, 22 nt, Human
caacccccaucgucacucugcu

SEQ ID NO: 743213 - RNA, 19 nt, Human
caagccgaucccugccccc

SEQ ID NO: 743214 - RNA, 21 nt, Human
caccaggccugucugccccag

SEQ ID NO: 743215 - RNA, 27 nt, Human
cacccccacccccgcaccgcucuugac

SEQ ID NO: 743216 - RNA, 21 nt, Human
cacgacacaaagguuuaaaga

SEQ ID NO: 743217 - RNA, 20 nt, Human
cacgcccuggccggcagggc

SEQ ID NO: 743218 - RNA, 22 nt, Human
caggcaaaauaaauaacccccc

SEQ ID NO: 743219 - RNA, 23 nt, Human
caggcugcugcagcuccaccccc

SEQ ID NO: 743220 - RNA, 18 nt, Human
cagguggaaggagguuuc

SEQ ID NO: 743221 - RNA, 21 nt, Human
cauuuauugaguguccacaug

SEQ ID NO: 743222 - RNA, 22 nt, Human
ccacagccgaggggagcccacg

SEQ ID NO: 743223 - RNA, 21 nt, Human
ccaccaggccugucugcccca

SEQ ID NO: 743224 - RNA, 18 nt, Human
ccagaaagcugggguguu

SEQ ID NO: 743225 - RNA, 18 nt, Human
ccaggcugcugcagcucc

SEQ ID NO: 743226 - RNA, 20 nt, Human
cccaccccccaccaggccug

SEQ ID NO: 743227 - RNA, 18 nt, Human
cccacuccuggcuccagg

SEQ ID NO: 743228 - RNA, 22 nt, Human
cccccaucgucacucugcugca

SEQ ID NO: 743229 - RNA, 23 nt, Human
ccccccaacccccaucgucacuc

SEQ ID NO: 743230 - RNA, 24 nt, Human
ccccccaccaggccugucugcccc

SEQ ID NO: 743231 - RNA, 19 nt, Human
ccccuccucccccuugguc

SEQ ID NO: 743232 - RNA, 20 nt, Human
ccccuccucccccuuggucu

SEQ ID NO: 743233 - RNA, 21 nt, Human
ccccugggucuguccccggug

SEQ ID NO: 743234 - RNA, 23 nt, Human
ccccuggguuuauaagaaaggua

SEQ ID NO: 743235 - RNA, 19 nt, Human
ccgccccugggucuguccc

SEQ ID NO: 743236 - RNA, 18 nt, Human
ccgcggcugcuucacucc

SEQ ID NO: 743237 - RNA, 19 nt, Human
ccuccuucccucucugccc

SEQ ID NO: 743238 - RNA, 21 nt, Human
ccuggcuccagccaggccaga

SEQ ID NO: 743239 - RNA, 20 nt, Human
cgaaggaggcaaggugcaga

SEQ ID NO: 743240 - RNA, 20 nt, Human
cgacagggcggcgaugagaa

SEQ ID NO: 743241 - RNA, 22 nt, Human
cucacgccgcguugcccacucc

SEQ ID NO: 743242 - RNA, 21 nt, Human
cugcggccccgagcggcgaag

SEQ ID NO: 743243 - RNA, 18 nt, Human
cugcuccugccagcccug

SEQ ID NO: 743244 - RNA, 21 nt, Human
cuggggcucgagcgaaggagg

SEQ ID NO: 743245 - RNA, 24 nt, Human
cugggucccuucaagcaagcucag

SEQ ID NO: 743246 - RNA, 24 nt, Human
gaauccgcggcugcuucacuccgg

SEQ ID NO: 743247 - RNA, 22 nt, Human
gaccuggggggccagaggaggc

SEQ ID NO: 743248 - RNA, 23 nt, Human
gaggcaguucagacccuggguca

SEQ ID NO: 743249 - RNA, 19 nt, Human
gaucccugcccccaugggg

SEQ ID NO: 743250 - RNA, 26 nt, Human
gcaaaauaaauaaccccccaaccccc

SEQ ID NO: 743251 - RNA, 20 nt, Human
gcagcuccacccccaccccc

SEQ ID NO: 743252 - RNA, 22 nt, Human
gccgcguugcccacuccuggcu

SEQ ID NO: 743253 - RNA, 19 nt, Human
gcggccccgagcggcgaag

SEQ ID NO: 743254 - RNA, 23 nt, Human
ggaggaagucuggggaggggggg

SEQ ID NO: 743255 - RNA, 20 nt, Human
gggagccucgggccgcugcu

SEQ ID NO: 743256 - RNA, 22 nt, Human
gggaggggggggccagauuggg

SEQ ID NO: 743257 - RNA, 19 nt, Human
gggauaaggacaggcaaaa

SEQ ID NO: 743258 - RNA, 22 nt, Human
gggcuggggcucgagcgaagga

SEQ ID NO: 743259 - RNA, 24 nt, Human
ggggaggaagucuggggagggggg

SEQ ID NO: 743260 - RNA, 19 nt, Human
gggggagggaagcaaggga

SEQ ID NO: 743261 - RNA, 18 nt, Human
gggggccagaggaggcac

SEQ ID NO: 743262 - RNA, 21 nt, Human
guguccaagcagggauaagga

SEQ ID NO: 743263 - RNA, 20 nt, Human
gugugugugugugugugugu

SEQ ID NO: 743264 - RNA, 21 nt, Human
gugugugugugugugugugug

SEQ ID NO: 743265 - RNA, 21 nt, Human
gugugugugugugugugugug

SEQ ID NO: 743266 - RNA, 21 nt, Human
gugugugugugugugugugug

SEQ ID NO: 743267 - RNA, 21 nt, Human
gugugugugugugugugugug

SEQ ID NO: 743268 - RNA, 22 nt, Human
guuuuggggaggaagucugggg

SEQ ID NO: 743269 - RNA, 20 nt, Human
uaaagaucugggcccaaaga

SEQ ID NO: 743270 - RNA, 18 nt, Human
uaaauaaccccccaaccc

SEQ ID NO: 743271 - RNA, 20 nt, Human
uaagccugcugucugcccaa

SEQ ID NO: 743272 - RNA, 19 nt, Human
uaaucacuggggaaacaug

SEQ ID NO: 743273 - RNA, 18 nt, Human
ucaagagugugugugugu

SEQ ID NO: 743274 - RNA, 27 nt, Human
ucaagagugugugugugugugugugug

SEQ ID NO: 743275 - RNA, 19 nt, Human
ucacuggggaaacaugcgg

SEQ ID NO: 743276 - RNA, 21 nt, Human
ucccuucaagcaagcucaggu

SEQ ID NO: 743277 - RNA, 21 nt, Human
uccugccagcccugucuuacc

SEQ ID NO: 743278 - RNA, 20 nt, Human
uccuggcuccaggcugcugc

SEQ ID NO: 743279 - RNA, 20 nt, Human
uccuuacacuugaggggugg

SEQ ID NO: 743280 - RNA, 19 nt, Human
ucucgcggccggcauugcc

SEQ ID NO: 743281 - RNA, 26 nt, Human
ucugggucccuucaagcaagcucagg

SEQ ID NO: 743282 - RNA, 18 nt, Human
ucuguccccgguggacac

SEQ ID NO: 743283 - RNA, 20 nt, Human
ugagaucacacaggcugcgg

SEQ ID NO: 743284 - RNA, 18 nt, Human
ugcacagcuuugaacuug

SEQ ID NO: 743285 - RNA, 20 nt, Human
ugcccuaggauggaggcagu

SEQ ID NO: 743286 - RNA, 22 nt, Human
ugcccuugcccucagaaaagcc

SEQ ID NO: 743287 - RNA, 21 nt, Human
ugcuccaaccuuccccggccu

SEQ ID NO: 743288 - RNA, 19 nt, Human
uggaaggagguuuccccac

SEQ ID NO: 743289 - RNA, 25 nt, Human
uggaggcaguucagacccuggguca

SEQ ID NO: 743290 - RNA, 22 nt, Human
uggaguguaaucacuggggaaa

SEQ ID NO: 743291 - RNA, 19 nt, Human
uggcaccagggggacagga

SEQ ID NO: 743292 - RNA, 24 nt, Human
uggggaggaagucuggggaggggg

SEQ ID NO: 743293 - RNA, 18 nt, Human
uggggaggggggggccag

SEQ ID NO: 743294 - RNA, 24 nt, Human
uggggaggggggggccagauuggg

SEQ ID NO: 743295 - RNA, 20 nt, Human
uguguguguguguggucccc

SEQ ID NO: 743296 - RNA, 18 nt, Human
ugugugugugugugugug

SEQ ID NO: 743297 - RNA, 18 nt, Human
ugugugugugugugugug

SEQ ID NO: 743298 - RNA, 18 nt, Human
ugugugugugugugugug

SEQ ID NO: 743299 - RNA, 18 nt, Human
ugugugugugugugugug

SEQ ID NO: 743300 - RNA, 18 nt, Human
ugugugugugugugugug

SEQ ID NO: 743301 - RNA, 18 nt, Human
ugugugugugugugugug

SEQ ID NO: 743302 - RNA, 18 nt, Human
ugugugugugugugugug

SEQ ID NO: 743303 - RNA, 18 nt, Human
ugugugugugugugugug

SEQ ID NO: 743304 - RNA, 18 nt, Human
ugugugugugugugugug

SEQ ID NO: 743305 - RNA, 18 nt, Human
ugugugugugugugugug

SEQ ID NO: 743306 - RNA, 18 nt, Human
ugugugugugugugugug

SEQ ID NO: 743307 - RNA, 18 nt, Human
ugugugugugugugugug

SEQ ID NO: 743308 - RNA, 18 nt, Human
ugugugugugugugugug

SEQ ID NO: 743309 - RNA, 18 nt, Human
ugugugugugugugugug

SEQ ID NO: 743310 - RNA, 18 nt, Human
ugugugugugugugugug

SEQ ID NO: 743311 - RNA, 18 nt, Human
ugugugugugugugugug

SEQ ID NO: 743312 - RNA, 21 nt, Human
ugugugugugugugugugugu

SEQ ID NO: 743313 - RNA, 21 nt, Human
ugugugugugugugugugugu

SEQ ID NO: 743314 - RNA, 21 nt, Human
ugugugugugugugugugugu

SEQ ID NO: 743315 - RNA, 21 nt, Human
ugugugugugugugugugugu

SEQ ID NO: 743316 - RNA, 21 nt, Human
ugugugugugugugugugugu

SEQ ID NO: 743317 - RNA, 21 nt, Human
ugugugugugugugugugugu

SEQ ID NO: 743318 - RNA, 21 nt, Human
ugugugugugugugugugugu

SEQ ID NO: 743319 - RNA, 21 nt, Human
ugugugugugugugugugugu

SEQ ID NO: 743320 - RNA, 21 nt, Human
ugugugugugugugugugugu

SEQ ID NO: 743321 - RNA, 21 nt, Human
ugugugugugugugugugugu

SEQ ID NO: 743322 - RNA, 21 nt, Human
ugugugugugugugugugugu

SEQ ID NO: 743323 - RNA, 21 nt, Human
ugugugugugugugugugugu

SEQ ID NO: 743324 - RNA, 21 nt, Human
ugugugugugugugugugugu

SEQ ID NO: 743325 - RNA, 21 nt, Human
ugugugugugugugugugugu

SEQ ID NO: 743326 - RNA, 21 nt, Human
ugugugugugugugugugugu

SEQ ID NO: 743327 - RNA, 21 nt, Human
ugugugugugugugugugugu

SEQ ID NO: 743328 - RNA, 21 nt, Human
ugugugugugugugugugugu

SEQ ID NO: 743329 - RNA, 21 nt, Human
ugugugugugugugugugugu

SEQ ID NO: 743330 - RNA, 21 nt, Human
ugugugugugugugugugugu

SEQ ID NO: 743331 - RNA, 21 nt, Human
ugugugugugugugugugugu

SEQ ID NO: 743332 - RNA, 21 nt, Human
ugugugugugugugugugugu

SEQ ID NO: 743333 - RNA, 21 nt, Human
ugugugugugugugugugugu

SEQ ID NO: 743334 - RNA, 21 nt, Human
ugugugugugugugugugugu

SEQ ID NO: 743335 - RNA, 21 nt, Human
ugugugugugugugugugugu

SEQ ID NO: 743336 - RNA, 21 nt, Human
ugugugugugugugugugugu

SEQ ID NO: 743337 - RNA, 21 nt, Human
ugugugugugugugugugugu

SEQ ID NO: 743338 - RNA, 21 nt, Human
ugugugugugugugugugugu

SEQ ID NO: 743339 - RNA, 21 nt, Human
ugugugugugugugugugugu

SEQ ID NO: 743340 - RNA, 21 nt, Human
ugugugugugugugugugugu

SEQ ID NO: 743341 - RNA, 21 nt, Human
ugugugugugugugugugugu

SEQ ID NO: 743342 - RNA, 22 nt, Human
ugugugugugugugugugugug

SEQ ID NO: 743343 - RNA, 22 nt, Human
ugugugugugugugugugugug

SEQ ID NO: 743344 - RNA, 22 nt, Human
ugugugugugugugugugugug

SEQ ID NO: 743345 - RNA, 22 nt, Human
ugugugugugugugugugugug

SEQ ID NO: 743346 - RNA, 22 nt, Human
ugugugugugugugugugugug

SEQ ID NO: 743347 - RNA, 22 nt, Human
ugugugugugugugugugugug

SEQ ID NO: 743348 - RNA, 22 nt, Human
ugugugugugugugugugugug

SEQ ID NO: 743349 - RNA, 22 nt, Human
ugugugugugugugugugugug

SEQ ID NO: 743350 - RNA, 22 nt, Human
ugugugugugugugugugugug

SEQ ID NO: 743351 - RNA, 22 nt, Human
ugugugugugugugugugugug

SEQ ID NO: 743352 - RNA, 22 nt, Human
ugugugugugugugugugugug

SEQ ID NO: 743353 - RNA, 23 nt, Human
uguuuuggggaggaagucugggg

SEQ ID NO: 743354 - RNA, 22 nt, Human
uuccuggcuccagccaggccag

SEQ ID NO: 743355 - RNA, 24 nt, Human
aaaaaaccuuuauccaaaaaccag

SEQ ID NO: 743356 - RNA, 26 nt, Human
aaacaaauggacaccauacuauggaa

SEQ ID NO: 743357 - RNA, 19 nt, Human
aaagcacuuuccuucuacc

SEQ ID NO: 743358 - RNA, 26 nt, Human
aacaucuaaacaaacaauaaacaauc

SEQ ID NO: 743359 - RNA, 19 nt, Human
aagacaaaaaauuucccuu

SEQ ID NO: 743360 - RNA, 20 nt, Human
aaugacaucuucagugacuu

SEQ ID NO: 743361 - RNA, 22 nt, Human
aauuuguuagacuagaaccaga

SEQ ID NO: 743362 - RNA, 27 nt, Human
acugaagugcaaagcacuuuccuucua

SEQ ID NO: 743363 - RNA, 22 nt, Human
agacaaaaaauuucccuuaaaa

SEQ ID NO: 743364 - RNA, 22 nt, Human
agccuccagaauaucuuugugg

SEQ ID NO: 743365 - RNA, 20 nt, Human
aguacuuuggagguuaacag

SEQ ID NO: 743366 - RNA, 24 nt, Human
auucuuauuuccacugauuaggaa

SEQ ID NO: 743367 - RNA, 23 nt, Human
caaagucaagucuucaauccacu

SEQ ID NO: 743368 - RNA, 25 nt, Human
cagaauggcuaaaauucucugagug

SEQ ID NO: 743369 - RNA, 20 nt, Human
cccuuaaaaaacaaauggac

SEQ ID NO: 743370 - RNA, 24 nt, Human
cucaaagucaagucuucaauccac

SEQ ID NO: 743371 - RNA, 27 nt, Human
cucaccacuuaaacuuuuuccuuugaa

SEQ ID NO: 743372 - RNA, 22 nt, Human
cuccaacauuuucuuccacgcc

SEQ ID NO: 743373 - RNA, 18 nt, Human
gacaucuucagugacuua

SEQ ID NO: 743374 - RNA, 19 nt, Human
guaaaaauuugaaguaucu

SEQ ID NO: 743375 - RNA, 23 nt, Human
uaaaugacaucuucagugacuua

SEQ ID NO: 743376 - RNA, 22 nt, Human
uaaggaagacaaaaaauuuccc

SEQ ID NO: 743377 - RNA, 20 nt, Human
uaaguuacuuauuucauuua

SEQ ID NO: 743378 - RNA, 21 nt, Human
uacauaggaaacaaaaaaccu

SEQ ID NO: 743379 - RNA, 26 nt, Human
uagcaugcuguuuaagaacucucagg

SEQ ID NO: 743380 - RNA, 21 nt, Human
uagguaucuccaacauuuuuu

SEQ ID NO: 743381 - RNA, 21 nt, Human
uaguacuuuggagguuaacag

SEQ ID NO: 743382 - RNA, 21 nt, Human
uauccaaaaaccacuuuuucu

SEQ ID NO: 743383 - RNA, 23 nt, Human
ucaaagcuauuuuaaaaauuuau

SEQ ID NO: 743384 - RNA, 24 nt, Human
ucaccacuuaaacuuuuuccuuug

SEQ ID NO: 743385 - RNA, 19 nt, Human
ucagcaguuuuccaccucu

SEQ ID NO: 743386 - RNA, 18 nt, Human
ucccaccaacauuuccag

SEQ ID NO: 743387 - RNA, 19 nt, Human
uccuacucuagccuccaga

SEQ ID NO: 743388 - RNA, 21 nt, Human
uccuagguaacucgaauuugc

SEQ ID NO: 743389 - RNA, 22 nt, Human
ucuguacuauaguacuuuggag

SEQ ID NO: 743390 - RNA, 21 nt, Human
ugaaaaaugacucuaccuaca

SEQ ID NO: 743391 - RNA, 23 nt, Human
ugaaugaagauaaaugacaucuu

SEQ ID NO: 743392 - RNA, 22 nt, Human
ugacaucuucagugacuuaaau

SEQ ID NO: 743393 - RNA, 19 nt, Human
ugagaaacaucauauaugu

SEQ ID NO: 743394 - RNA, 22 nt, Human
ugagaaacaucauauauguuuu

SEQ ID NO: 743395 - RNA, 18 nt, Human
uggaaaaacaucuaaaca

SEQ ID NO: 743396 - RNA, 21 nt, Human
uguaaaaucagcaguuuucca

SEQ ID NO: 743397 - RNA, 19 nt, Human
uguaacuaaaaaauaugaa

SEQ ID NO: 743398 - RNA, 25 nt, Human
uguggaauauaaacucaccacuuaa

SEQ ID NO: 743399 - RNA, 23 nt, Human
uuaacaauccuacucuagccucc

SEQ ID NO: 743400 - RNA, 21 nt, Human
uucuuauuuccacugauuagg

SEQ ID NO: 743401 - RNA, 23 nt, Human
uuuagguaucuccaacauuuucu

SEQ ID NO: 743402 - RNA, 24 nt, Human
uuuauugcauuuuguuuacuccaa

SEQ ID NO: 743403 - RNA, 23 nt, Human
uuucccuuaaaaaacaaauggaa

SEQ ID NO: 743404 - RNA, 21 nt, Human
uuugaaguaucuucaaagcua

SEQ ID NO: 743405 - RNA, 23 nt, Human
uuuuagguaucuccaacauuuuc

SEQ ID NO: 743406 - RNA, 24 nt, Human
acagcccuggcggaccaugcgcgc

SEQ ID NO: 743407 - RNA, 18 nt, Human
accuccuccuccuccucc

SEQ ID NO: 743408 - RNA, 20 nt, Human
acucgcccgugccaccgcgc

SEQ ID NO: 743409 - RNA, 19 nt, Human
caccgcgcaagcgccggcu

SEQ ID NO: 743410 - RNA, 19 nt, Human
caccuccucgcccccccac

SEQ ID NO: 743411 - RNA, 18 nt, Human
cacgccgggagcugacac

SEQ ID NO: 743412 - RNA, 22 nt, Human
cagcccugggcgggcggguggg

SEQ ID NO: 743413 - RNA, 18 nt, Human
caggccccggggcugggg

SEQ ID NO: 743414 - RNA, 22 nt, Human
ccaccuccucgcccccccacuc

SEQ ID NO: 743415 - RNA, 19 nt, Human
ccacggcccacagcccugg

SEQ ID NO: 743416 - RNA, 25 nt, Human
ccaugcgcgccccuccccugagccu

SEQ ID NO: 743417 - RNA, 22 nt, Human
cccagcccagcccugggcgggc

SEQ ID NO: 743418 - RNA, 18 nt, Human
ccccugagccugcccgcc

SEQ ID NO: 743419 - RNA, 23 nt, Human
cccggggcugggggcgagggagc

SEQ ID NO: 743420 - RNA, 23 nt, Human
cccgugccaccgcgcaagcgccg

SEQ ID NO: 743421 - RNA, 22 nt, Human
cccuccccugagccugcccgcc

SEQ ID NO: 743422 - RNA, 18 nt, Human
cccuggggcggcgugggg

SEQ ID NO: 743423 - RNA, 22 nt, Human
ccgggggcgggcuggcgggggg

SEQ ID NO: 743424 - RNA, 24 nt, Human
ccgggggcgggcuggcggggggcg

SEQ ID NO: 743425 - RNA, 21 nt, Human
ccuccgaucccagcccagccc

SEQ ID NO: 743426 - RNA, 26 nt, Human
ccuccgaucccagcccagcccugggc

SEQ ID NO: 743427 - RNA, 20 nt, Human
ccuccuccuccuccaccucc

SEQ ID NO: 743428 - RNA, 25 nt, Human
ccuccuccuccuccuccuccuccaa

SEQ ID NO: 743429 - RNA, 18 nt, Human
cgccccuccccugagccu

SEQ ID NO: 743430 - RNA, 22 nt, Human
cggccuccgaucccagcccagc

SEQ ID NO: 743431 - RNA, 18 nt, Human
cgggcggguggguggacg

SEQ ID NO: 743432 - RNA, 22 nt, Human
cucccuggggcggcguggggcu

SEQ ID NO: 743433 - RNA, 20 nt, Human
cuccuccaccuccucgcccc

SEQ ID NO: 743434 - RNA, 20 nt, Human
cuccuccuccaccuccucgc

SEQ ID NO: 743435 - RNA, 21 nt, Human
cuccuccuccuccaccuccuc

SEQ ID NO: 743436 - RNA, 20 nt, Human
cuccuccuccuccuccuccu

SEQ ID NO: 743437 - RNA, 20 nt, Human
cuccuccuccuccuccuccu

SEQ ID NO: 743438 - RNA, 20 nt, Human
cucgccgccaccuccuccuc

SEQ ID NO: 743439 - RNA, 23 nt, Human
cucuaccugaccacgggcugggg

SEQ ID NO: 743440 - RNA, 18 nt, Human
cuggcgccuccucccugg

SEQ ID NO: 743441 - RNA, 18 nt, Human
cuucucgccgccaccucc

SEQ ID NO: 743442 - RNA, 21 nt, Human
cuucucgccgccaccuccucc

SEQ ID NO: 743443 - RNA, 23 nt, Human
gaaaaugcgccacggcccacagc

SEQ ID NO: 743444 - RNA, 23 nt, Human
gagcugacacuucccgcaucuua

SEQ ID NO: 743445 - RNA, 19 nt, Human
gagguggacaaccgggggc

SEQ ID NO: 743446 - RNA, 23 nt, Human
gccacggcccacagcccuggcgg

SEQ ID NO: 743447 - RNA, 20 nt, Human
gccccggggcugggggcgag

SEQ ID NO: 743448 - RNA, 22 nt, Human
gccucgcgauugggcuucgcgg

SEQ ID NO: 743449 - RNA, 18 nt, Human
gcggaccaugcgcgcccc

SEQ ID NO: 743450 - RNA, 18 nt, Human
ggcccggcucgcggccuc

SEQ ID NO: 743451 - RNA, 20 nt, Human
ggccuccgaucccagcccag

SEQ ID NO: 743452 - RNA, 19 nt, Human
ggccucgcgauugggcuuc

SEQ ID NO: 743453 - RNA, 18 nt, Human
ggcggaugggcuggggga

SEQ ID NO: 743454 - RNA, 18 nt, Human
ggcuucgcgggaggugga

SEQ ID NO: 743455 - RNA, 23 nt, Human
gggaggcucacggccuccgaucc

SEQ ID NO: 743456 - RNA, 19 nt, Human
gggcgggcgggugggugga

SEQ ID NO: 743457 - RNA, 24 nt, Human
gggcggguggguggacggcccggc

SEQ ID NO: 743458 - RNA, 22 nt, Human
gggcugggggcgagggagccag

SEQ ID NO: 743459 - RNA, 20 nt, Human
ggggcgggcuggcggggggc

SEQ ID NO: 743460 - RNA, 21 nt, Human
ggggggcgcuuggcggcauug

SEQ ID NO: 743461 - RNA, 23 nt, Human
gugcagggagggucugcaggggc

SEQ ID NO: 743462 - RNA, 21 nt, Human
uccaccuccucgcccccccac

SEQ ID NO: 743463 - RNA, 21 nt, Human
ucccuggggcggcguggggcu

SEQ ID NO: 743464 - RNA, 24 nt, Human
uccuccaccuccucgcccccccac

SEQ ID NO: 743465 - RNA, 20 nt, Human
ucucgccgccaccuccuccu

SEQ ID NO: 743466 - RNA, 20 nt, Human
ucugcaggggcgggaggcuc

SEQ ID NO: 743467 - RNA, 23 nt, Human
uggcggaugggcugggggaccgg

SEQ ID NO: 743468 - RNA, 21 nt, Human
ugggcgggcggguggguggac

SEQ ID NO: 743469 - RNA, 18 nt, Human
aaaagaagaaggacuugg

SEQ ID NO: 743470 - RNA, 22 nt, Human
aaaagaagaaggacuugggcaa

SEQ ID NO: 743471 - RNA, 24 nt, Human
aaaaugcugggauuacaggcauga

SEQ ID NO: 743472 - RNA, 22 nt, Human
aaauccacagccacaucuuuga

SEQ ID NO: 743473 - RNA, 26 nt, Human
aaaugcugggauuacaggcaugaacc

SEQ ID NO: 743474 - RNA, 22 nt, Human
aacaguggcuggucucugcccc

SEQ ID NO: 743475 - RNA, 27 nt, Human
aacccauucccucaacugcggaucccg

SEQ ID NO: 743476 - RNA, 22 nt, Human
aagauccucuuccuucugcccu

SEQ ID NO: 743477 - RNA, 22 nt, Human
aagcgaggauuucaggagcgag

SEQ ID NO: 743478 - RNA, 19 nt, Human
aaggacuugggcaaguugc

SEQ ID NO: 743479 - RNA, 24 nt, Human
aauuuuguauuuuuaguagagacg

SEQ ID NO: 743480 - RNA, 24 nt, Human
acaacccauucccucaacugcgga

SEQ ID NO: 743481 - RNA, 18 nt, Human
acaagauguugccaccuc

SEQ ID NO: 743482 - RNA, 24 nt, Human
acacagacacaguaacagucugau

SEQ ID NO: 743483 - RNA, 22 nt, Human
acagcuccucucccugcuccaa

SEQ ID NO: 743484 - RNA, 22 nt, Human
accucauaagccagggaaacua

SEQ ID NO: 743485 - RNA, 19 nt, Human
accugaagaggcgcaggaa

SEQ ID NO: 743486 - RNA, 19 nt, Human
acgcuuagcgguggcuucu

SEQ ID NO: 743487 - RNA, 24 nt, Human
acgggauuucuccauguuggccag

SEQ ID NO: 743488 - RNA, 19 nt, Human
acucagagguccacagcag

SEQ ID NO: 743489 - RNA, 21 nt, Human
acugccuccgggcuuccccca

SEQ ID NO: 743490 - RNA, 19 nt, Human
agaagcagccucugccccu

SEQ ID NO: 743491 - RNA, 18 nt, Human
agacgggauuucuccaug

SEQ ID NO: 743492 - RNA, 22 nt, Human
agagaaagaagagagcaaaaag

SEQ ID NO: 743493 - RNA, 21 nt, Human
agagagcaaaaagcugcagcc

SEQ ID NO: 743494 - RNA, 22 nt, Human
agagaugccaguggggcuugag

SEQ ID NO: 743495 - RNA, 18 nt, Human
agaugccaguggggcuug

SEQ ID NO: 743496 - RNA, 21 nt, Human
agcccuagauccuuuaaaccu

SEQ ID NO: 743497 - RNA, 21 nt, Human
agcucucacuuccccacuccu

SEQ ID NO: 743498 - RNA, 21 nt, Human
aggaggaggaggacauggggu

SEQ ID NO: 743499 - RNA, 23 nt, Human
aggauugcaggcaugcagcacca

SEQ ID NO: 743500 - RNA, 19 nt, Human
aggcaauaaagaccaguca

SEQ ID NO: 743501 - RNA, 19 nt, Human
aggcaugaaccaccgcgcc

SEQ ID NO: 743502 - RNA, 19 nt, Human
aggcucccaugucauggau

SEQ ID NO: 743503 - RNA, 22 nt, Human
agggcuggacuauguugacaug

SEQ ID NO: 743504 - RNA, 22 nt, Human
agguaugccgagcagacagcug

SEQ ID NO: 743505 - RNA, 24 nt, Human
aggugaucugcccaccuuggccuc

SEQ ID NO: 743506 - RNA, 24 nt, Human
aucagcaccagaacgcacacccag

SEQ ID NO: 743507 - RNA, 18 nt, Human
augcugcuggacccccgc

SEQ ID NO: 743508 - RNA, 19 nt, Human
augcugcuggacccccgcc

SEQ ID NO: 743509 - RNA, 24 nt, Human
caaaaugcugggauuacaggcaug

SEQ ID NO: 743510 - RNA, 23 nt, Human
caaauuaacagcaucucagccaa

SEQ ID NO: 743511 - RNA, 19 nt, Human
caacaggaauagcuaacau

SEQ ID NO: 743512 - RNA, 21 nt, Human
caacaguggcuggucucugcc

SEQ ID NO: 743513 - RNA, 24 nt, Human
cacagugcuacgugcaccagcgug

SEQ ID NO: 743514 - RNA, 19 nt, Human
caccagaacgcacacccag

SEQ ID NO: 743515 - RNA, 24 nt, Human
caccccaggcaauaaagaccaguc

SEQ ID NO: 743516 - RNA, 22 nt, Human
caccccugcucugcccucugcc

SEQ ID NO: 743517 - RNA, 20 nt, Human
cacgcugcuggccugggcug

SEQ ID NO: 743518 - RNA, 23 nt, Human
cacuguaccgggccggacaccuc

SEQ ID NO: 743519 - RNA, 18 nt, Human
cacuuccccacuccucac

SEQ ID NO: 743520 - RNA, 21 nt, Human
cagaucuccgaaguacaagau

SEQ ID NO: 743521 - RNA, 20 nt, Human
cagcaacaguggcuggucuc

SEQ ID NO: 743522 - RNA, 20 nt, Human
cagcaccagaacgcacaccc

SEQ ID NO: 743523 - RNA, 18 nt, Human
cagcaccaugccuggcua

SEQ ID NO: 743524 - RNA, 22 nt, Human
cagccacaucuuugaaugacac

SEQ ID NO: 743525 - RNA, 24 nt, Human
cagccugugaagcuguguaaccga

SEQ ID NO: 743526 - RNA, 24 nt, Human
cagcucaccccugcucugcccucu

SEQ ID NO: 743527 - RNA, 18 nt, Human
cagcuccucucccugcuc

SEQ ID NO: 743528 - RNA, 19 nt, Human
cagcuccucucccugcucc

SEQ ID NO: 743529 - RNA, 24 nt, Human
caggauugcaggcaugcagcacca

SEQ ID NO: 743530 - RNA, 20 nt, Human
caggcaugcagcaccaugcc

SEQ ID NO: 743531 - RNA, 27 nt, Human
cagggacaccuagcccggugcgucugc

SEQ ID NO: 743532 - RNA, 18 nt, Human
caugacuaacuccucauc

SEQ ID NO: 743533 - RNA, 20 nt, Human
caugugcucccucugccagg

SEQ ID NO: 743534 - RNA, 24 nt, Human
cauguuggccaggcuggucucaaa

SEQ ID NO: 743535 - RNA, 18 nt, Human
cauugugcugucccuccu

SEQ ID NO: 743536 - RNA, 21 nt, Human
cauugugcugucccuccugcu

SEQ ID NO: 743537 - RNA, 23 nt, Human
ccaaaaugcugggauuacaggca

SEQ ID NO: 743538 - RNA, 24 nt, Human
ccaaaaugcugggauuacaggcau

SEQ ID NO: 743539 - RNA, 20 nt, Human
ccagacagaucugcaugaac

SEQ ID NO: 743540 - RNA, 20 nt, Human
ccagauccgccucccugggg

SEQ ID NO: 743541 - RNA, 18 nt, Human
ccagccccgcagacucgg

SEQ ID NO: 743542 - RNA, 19 nt, Human
ccagggaaacuagauggcu

SEQ ID NO: 743543 - RNA, 22 nt, Human
ccaugcaugcucagcucacccc

SEQ ID NO: 743544 - RNA, 19 nt, Human
ccauguuggccaggcuggu

SEQ ID NO: 743545 - RNA, 22 nt, Human
ccauguuggccaggcuggucuc

SEQ ID NO: 743546 - RNA, 24 nt, Human
cccaaaaugcugggauuacaggca

SEQ ID NO: 743547 - RNA, 20 nt, Human
cccacaaucccugagggguc

SEQ ID NO: 743548 - RNA, 18 nt, Human
ccccaccgaggccugagc

SEQ ID NO: 743549 - RNA, 21 nt, Human
ccccacuccucaccccccugu

SEQ ID NO: 743550 - RNA, 22 nt, Human
ccccacuccucaccccccugua

SEQ ID NO: 743551 - RNA, 20 nt, Human
cccccaagaccacgcuuagg

SEQ ID NO: 743552 - RNA, 19 nt, Human
ccccuccuggggcucugca

SEQ ID NO: 743553 - RNA, 19 nt, Human
ccccucuggccccagcgcc

SEQ ID NO: 743554 - RNA, 19 nt, Human
ccccuucgccuccgccacc

SEQ ID NO: 743555 - RNA, 20 nt, Human
cccgcgcgaacccugggccg

SEQ ID NO: 743556 - RNA, 22 nt, Human
cccgcgcgaacccugggccgca

SEQ ID NO: 743557 - RNA, 20 nt, Human
cccggccccaccgaggccug

SEQ ID NO: 743558 - RNA, 18 nt, Human
cccuccugcuuccucucc

SEQ ID NO: 743559 - RNA, 21 nt, Human
cccucuggccccagcgccgcu

SEQ ID NO: 743560 - RNA, 18 nt, Human
cccugggccgcacagcuc

SEQ ID NO: 743561 - RNA, 21 nt, Human
cccugggccgcacagcucccg

SEQ ID NO: 743562 - RNA, 20 nt, Human
ccgccaccaccucccgcccg

SEQ ID NO: 743563 - RNA, 19 nt, Human
ccgccgaggacacacacgg

SEQ ID NO: 743564 - RNA, 20 nt, Human
ccgccgaggacacacacggg

SEQ ID NO: 743565 - RNA, 18 nt, Human
ccggcgccaggccgccga

SEQ ID NO: 743566 - RNA, 20 nt, Human
ccguacagcgacggccggcg

SEQ ID NO: 743567 - RNA, 24 nt, Human
ccuccgccaccaccucccgcccgg

SEQ ID NO: 743568 - RNA, 20 nt, Human
ccuccuguccaccucaccaa

SEQ ID NO: 743569 - RNA, 19 nt, Human
ccucugccccacggcuccc

SEQ ID NO: 743570 - RNA, 25 nt, Human
ccucuggccccagcgccgcuggcuc

SEQ ID NO: 743571 - RNA, 24 nt, Human
ccugaccucaggugaucugcccac

SEQ ID NO: 743572 - RNA, 25 nt, Human
ccugcucugcccucugcccuaggaa

SEQ ID NO: 743573 - RNA, 21 nt, Human
ccuggagcaaaaguucuccuc

SEQ ID NO: 743574 - RNA, 20 nt, Human
ccugggccgcacagcucccg

SEQ ID NO: 743575 - RNA, 24 nt, Human
ccuggggcucugcagccucugccc

SEQ ID NO: 743576 - RNA, 24 nt, Human
cgaacccugggccgcacagcuccc

SEQ ID NO: 743577 - RNA, 23 nt, Human
cgcccgccuaggugcuggcccgg

SEQ ID NO: 743578 - RNA, 21 nt, Human
cgccuaggugcuggcccgggc

SEQ ID NO: 743579 - RNA, 23 nt, Human
cgccuccgccaccaccucccgcc

SEQ ID NO: 743580 - RNA, 23 nt, Human
cggcucccgagaggccggggcgg

SEQ ID NO: 743581 - RNA, 24 nt, Human
cgggauuucuccauguuggccagg

SEQ ID NO: 743582 - RNA, 23 nt, Human
cggggcaaauccaggcggguguc

SEQ ID NO: 743583 - RNA, 18 nt, Human
cuaaguccuuucuuggcu

SEQ ID NO: 743584 - RNA, 19 nt, Human
cuaaguccuuucuuggcuc

SEQ ID NO: 743585 - RNA, 20 nt, Human
cucacaggccaaagcaucag

SEQ ID NO: 743586 - RNA, 24 nt, Human
cucaggugaucugcccaccuuggc

SEQ ID NO: 743587 - RNA, 18 nt, Human
cuccagguccaucugcca

SEQ ID NO: 743588 - RNA, 19 nt, Human
cuccaugcaugcucagcuc

SEQ ID NO: 743589 - RNA, 24 nt, Human
cuccauguuggccaggcuggucuc

SEQ ID NO: 743590 - RNA, 21 nt, Human
cucccgagaggccggggcggg

SEQ ID NO: 743591 - RNA, 19 nt, Human
cuccugcugugagcuggcu

SEQ ID NO: 743592 - RNA, 23 nt, Human
cucggggcccagauccgccuccc

SEQ ID NO: 743593 - RNA, 20 nt, Human
cucucacuuccccacuccuc

SEQ ID NO: 743594 - RNA, 22 nt, Human
cucugccccacggcucccgaga

SEQ ID NO: 743595 - RNA, 21 nt, Human
cucugccccgugccuccucca

SEQ ID NO: 743596 - RNA, 22 nt, Human
cucuucugaagaaccaagggug

SEQ ID NO: 743597 - RNA, 18 nt, Human
cugaagaaccaaggguga

SEQ ID NO: 743598 - RNA, 20 nt, Human
cugcagccucugccccacgg

SEQ ID NO: 743599 - RNA, 19 nt, Human
cugcaugcccuggcagggu

SEQ ID NO: 743600 - RNA, 30 nt, Human
cugccaggccagcugucucccagccaugcu

SEQ ID NO: 743601 - RNA, 19 nt, Human
cugccuccgggcuuccccc

SEQ ID NO: 743602 - RNA, 19 nt, Human
cugcuggacccccgccagg

SEQ ID NO: 743603 - RNA, 24 nt, Human
cugcuggacccccgccaggcuccc

SEQ ID NO: 743604 - RNA, 21 nt, Human
cuggagcaaaaguucuccucu

SEQ ID NO: 743605 - RNA, 24 nt, Human
cuuccuggcggucucccccuuaga

SEQ ID NO: 743606 - RNA, 21 nt, Human
cuucugaagaaccaaggguga

SEQ ID NO: 743607 - RNA, 22 nt, Human
cuugcacaccgccuugcacaua

SEQ ID NO: 743608 - RNA, 18 nt, Human
cuuugaaugacacuggcc

SEQ ID NO: 743609 - RNA, 20 nt, Human
gaaguccccuccuguccacc

SEQ ID NO: 743610 - RNA, 23 nt, Human
gaccucaggugaucugcccaccu

SEQ ID NO: 743611 - RNA, 18 nt, Human
gagaaugaagacauggua

SEQ ID NO: 743612 - RNA, 24 nt, Human
gagacgggauuucuccauguuggc

SEQ ID NO: 743613 - RNA, 24 nt, Human
gagcacugccuccgggcuuccccc

SEQ ID NO: 743614 - RNA, 18 nt, Human
gaggagcccggggcaggg

SEQ ID NO: 743615 - RNA, 18 nt, Human
gaggaggaggacaugggg

SEQ ID NO: 743616 - RNA, 19 nt, Human
gaggggcccgggccgggcc

SEQ ID NO: 743617 - RNA, 20 nt, Human
gaggggcccgggccgggccu

SEQ ID NO: 743618 - RNA, 23 nt, Human
gagugggggcaugcuugggaggc

SEQ ID NO: 743619 - RNA, 22 nt, Human
gauuacaggcaugaaccaccgc

SEQ ID NO: 743620 - RNA, 24 nt, Human
gauugcaggcaugcagcaccaugc

SEQ ID NO: 743621 - RNA, 19 nt, Human
gcacaccgccuugcacaua

SEQ ID NO: 743622 - RNA, 18 nt, Human
gcacagcucccgcccgcc

SEQ ID NO: 743623 - RNA, 20 nt, Human
gcacaucuaacaucuacauu

SEQ ID NO: 743624 - RNA, 19 nt, Human
gcagcgagcccugugccac

SEQ ID NO: 743625 - RNA, 21 nt, Human
gccacgcugcuggccugggcu

SEQ ID NO: 743626 - RNA, 22 nt, Human
gcccggccccucuggccccagc

SEQ ID NO: 743627 - RNA, 21 nt, Human
gcccuagauccuuuaaaccuu

SEQ ID NO: 743628 - RNA, 19 nt, Human
gcccugccugcccggcccc

SEQ ID NO: 743629 - RNA, 23 nt, Human
gcccugccugcccggccccaccg

SEQ ID NO: 743630 - RNA, 20 nt, Human
gccgccgaggacacacacgg

SEQ ID NO: 743631 - RNA, 19 nt, Human
gccuggggucucuguuuac

SEQ ID NO: 743632 - RNA, 23 nt, Human
gcuggucucaaacuccugaccuc

SEQ ID NO: 743633 - RNA, 18 nt, Human
gcuuaacucuuuccugcu

SEQ ID NO: 743634 - RNA, 18 nt, Human
gcuuccucuccaggucca

SEQ ID NO: 743635 - RNA, 20 nt, Human
ggaggaggaggaggacaugg

SEQ ID NO: 743636 - RNA, 21 nt, Human
ggaggaggaggaggacauggg

SEQ ID NO: 743637 - RNA, 23 nt, Human
ggaggaggaggaggacauggggu

SEQ ID NO: 743638 - RNA, 22 nt, Human
ggauuacaggcaugaaccaccg

SEQ ID NO: 743639 - RNA, 19 nt, Human
ggcaagaggaauagaaaag

SEQ ID NO: 743640 - RNA, 21 nt, Human
ggccaaagcaucagcaccaga

SEQ ID NO: 743641 - RNA, 18 nt, Human
ggccccuguguucugccu

SEQ ID NO: 743642 - RNA, 21 nt, Human
ggcguggcugagggacucaga

SEQ ID NO: 743643 - RNA, 20 nt, Human
ggcucaccguacagcgacgg

SEQ ID NO: 743644 - RNA, 24 nt, Human
ggcuggucucaaacuccugaccuc

SEQ ID NO: 743645 - RNA, 25 nt, Human
gggaagcauuuucuccuggaccccu

SEQ ID NO: 743646 - RNA, 23 nt, Human
gggauuucuccauguuggccagg

SEQ ID NO: 743647 - RNA, 20 nt, Human
gggcagagaccccaggccag

SEQ ID NO: 743648 - RNA, 18 nt, Human
gggccgggccuacggggc

SEQ ID NO: 743649 - RNA, 24 nt, Human
gggcgccuucagguacagggcgug

SEQ ID NO: 743650 - RNA, 24 nt, Human
gggcuggacuauguugacauggaa

SEQ ID NO: 743651 - RNA, 19 nt, Human
ggggauggggugaacugcu

SEQ ID NO: 743652 - RNA, 21 nt, Human
gggguucacgcucgggggucc

SEQ ID NO: 743653 - RNA, 24 nt, Human
gggguucacgcucgggggucccgg

SEQ ID NO: 743654 - RNA, 20 nt, Human
ggguuccagcagcgagcccu

SEQ ID NO: 743655 - RNA, 18 nt, Human
gguuccagcagcgagccc

SEQ ID NO: 743656 - RNA, 19 nt, Human
guccaguugccaccacucc

SEQ ID NO: 743657 - RNA, 21 nt, Human
gugccagcaacaguggcuggu

SEQ ID NO: 743658 - RNA, 19 nt, Human
gugggaaguacccccagac

SEQ ID NO: 743659 - RNA, 21 nt, Human
guugucugugucagcugugac

SEQ ID NO: 743660 - RNA, 23 nt, Human
uaacagcaucucagccaaccaau

SEQ ID NO: 743661 - RNA, 20 nt, Human
uaacagucugaucucucuuu

SEQ ID NO: 743662 - RNA, 28 nt, Human
uaaccgagacacgcuuuuccuuagguau

SEQ ID NO: 743663 - RNA, 19 nt, Human
uaacucuuuccugcugcac

SEQ ID NO: 743664 - RNA, 20 nt, Human
uaagucuggcuugacaaccc

SEQ ID NO: 743665 - RNA, 20 nt, Human
uacaagaugcgcugcagcag

SEQ ID NO: 743666 - RNA, 23 nt, Human
uacaggcaugaaccaccgcgccc

SEQ ID NO: 743667 - RNA, 20 nt, Human
uaccauguugcuuggacacc

SEQ ID NO: 743668 - RNA, 21 nt, Human
uagcucagccucacaggccaa

SEQ ID NO: 743669 - RNA, 24 nt, Human
uaguagagacgggauuucuccaug

SEQ ID NO: 743670 - RNA, 18 nt, Human
uauguuaucuucucauca

SEQ ID NO: 743671 - RNA, 19 nt, Human
uauguuaucuucucaucag

SEQ ID NO: 743672 - RNA, 21 nt, Human
ucacgcucgggggucccggcu

SEQ ID NO: 743673 - RNA, 18 nt, Human
ucagaucuccgaaguaca

SEQ ID NO: 743674 - RNA, 22 nt, Human
ucagcucaccccugcucugccc

SEQ ID NO: 743675 - RNA, 21 nt, Human
ucaggguccaguugccaccac

SEQ ID NO: 743676 - RNA, 22 nt, Human
ucaggguccaguugccaccacu

SEQ ID NO: 743677 - RNA, 20 nt, Human
ucagguacagggcgugcgcc

SEQ ID NO: 743678 - RNA, 22 nt, Human
ucagguacagggcgugcgccag

SEQ ID NO: 743679 - RNA, 23 nt, Human
uccaugcaugcucagcucacccc

SEQ ID NO: 743680 - RNA, 21 nt, Human
uccauggccacgcugcuggcc

SEQ ID NO: 743681 - RNA, 21 nt, Human
uccauggccacgcugcuggcc

SEQ ID NO: 743682 - RNA, 19 nt, Human
uccaugugcucccucugcc

SEQ ID NO: 743683 - RNA, 24 nt, Human
ucccaaaaugcugggauuacaggc

SEQ ID NO: 743684 - RNA, 26 nt, Human
ucccagccaugcugcuggacccccgc

SEQ ID NO: 743685 - RNA, 20 nt, Human
ucccgaggggcccgggccgg

SEQ ID NO: 743686 - RNA, 24 nt, Human
ucccgcccggccccucuggccccc

SEQ ID NO: 743687 - RNA, 23 nt, Human
ucccgggugccgagcacugccuc

SEQ ID NO: 743688 - RNA, 18 nt, Human
ucccuacaggauugcagg

SEQ ID NO: 743689 - RNA, 18 nt, Human
ucccugaggggucaguca

SEQ ID NO: 743690 - RNA, 23 nt, Human
ucccuuucuacacagacacagua

SEQ ID NO: 743691 - RNA, 19 nt, Human
uccgccaccaccucccgcc

SEQ ID NO: 743692 - RNA, 18 nt, Human
ucgccccuucgccuccgc

SEQ ID NO: 743693 - RNA, 19 nt, Human
ucguggagggggggauggg

SEQ ID NO: 743694 - RNA, 22 nt, Human
ucuacuccaugugcucccucug

SEQ ID NO: 743695 - RNA, 21 nt, Human
ucucauccacuagaggccaaa

SEQ ID NO: 743696 - RNA, 21 nt, Human
ucuccagguccaucugccaca

SEQ ID NO: 743697 - RNA, 21 nt, Human
ucucucuuucuuuucccuaca

SEQ ID NO: 743698 - RNA, 21 nt, Human
ucugaacugagacaugugacu

SEQ ID NO: 743699 - RNA, 19 nt, Human
ucugcagccucugccccac

SEQ ID NO: 743700 - RNA, 25 nt, Human
ucugccacagugcuacgugcaccag

SEQ ID NO: 743701 - RNA, 20 nt, Human
ucugccccucucccuuuccc

SEQ ID NO: 743702 - RNA, 20 nt, Human
ucugguugucugugucagcu

SEQ ID NO: 743703 - RNA, 22 nt, Human
ugaacgggucgagaugccgacg

SEQ ID NO: 743704 - RNA, 21 nt, Human
ugaaugacacuggcccccucc

SEQ ID NO: 743705 - RNA, 19 nt, Human
ugacauggaaauucaccuc

SEQ ID NO: 743706 - RNA, 21 nt, Human
ugacauggaaauucaccuccc

SEQ ID NO: 743707 - RNA, 18 nt, Human
ugaccucaggugaucugc

SEQ ID NO: 743708 - RNA, 20 nt, Human
ugaccucaggugaucugccc

SEQ ID NO: 743709 - RNA, 21 nt, Human
ugaccucaggugaucugccca

SEQ ID NO: 743710 - RNA, 24 nt, Human
ugaccucaggugaucugcccaccu

SEQ ID NO: 743711 - RNA, 18 nt, Human
ugaggaggacuuccuggc

SEQ ID NO: 743712 - RNA, 24 nt, Human
ugaucugcccaccuuggccuccca

SEQ ID NO: 743713 - RNA, 21 nt, Human
ugcagccggugcuugcacacc

SEQ ID NO: 743714 - RNA, 19 nt, Human
ugcaugaacacccacugua

SEQ ID NO: 743715 - RNA, 21 nt, Human
ugcaugggucggagagugggc

SEQ ID NO: 743716 - RNA, 22 nt, Human
ugcccaccuuggccucccaaaa

SEQ ID NO: 743717 - RNA, 22 nt, Human
ugccccacggcucccgagaggc

SEQ ID NO: 743718 - RNA, 20 nt, Human
ugccccgugccuccuccacu

SEQ ID NO: 743719 - RNA, 22 nt, Human
ugcccggccccaccgaggccug

SEQ ID NO: 743720 - RNA, 23 nt, Human
ugcccuggcaggguuccagcagc

SEQ ID NO: 743721 - RNA, 18 nt, Human
ugcucagcucaccccugc

SEQ ID NO: 743722 - RNA, 18 nt, Human
ugcucgcgaaguccccuc

SEQ ID NO: 743723 - RNA, 23 nt, Human
ugcugggauuacaggcaugaacc

SEQ ID NO: 743724 - RNA, 21 nt, Human
ugcuucaacaggaauagcuaa

SEQ ID NO: 743725 - RNA, 24 nt, Human
ugcuugcacaccgccuugcacaua

SEQ ID NO: 743726 - RNA, 18 nt, Human
uggaauagcagagaacgg

SEQ ID NO: 743727 - RNA, 18 nt, Human
uggcagggagaaauucag

SEQ ID NO: 743728 - RNA, 24 nt, Human
uggccaggcuggucucaaacuccu

SEQ ID NO: 743729 - RNA, 24 nt, Human
uggcuugacaacccauucccucaa

SEQ ID NO: 743730 - RNA, 20 nt, Human
ugggaaguacccccagacag

SEQ ID NO: 743731 - RNA, 25 nt, Human
ugggacccuggagcaaaaguucucc

SEQ ID NO: 743732 - RNA, 21 nt, Human
ugggauuacaggcaugaacca

SEQ ID NO: 743733 - RNA, 23 nt, Human
ugggauuacaggcaugaaccacc

SEQ ID NO: 743734 - RNA, 24 nt, Human
ugggauuacaggcaugaaccaccg

SEQ ID NO: 743735 - RNA, 24 nt, Human
ugggauuacaggcaugaaccaccg

SEQ ID NO: 743736 - RNA, 22 nt, Human
ugggguuugauuuugugccuuu

SEQ ID NO: 743737 - RNA, 21 nt, Human
uggguaaugaaggcugaaagg

SEQ ID NO: 743738 - RNA, 20 nt, Human
uggucucugccccgugccuc

SEQ ID NO: 743739 - RNA, 25 nt, Human
uguccaccucaccaaggcuguucug

SEQ ID NO: 743740 - RNA, 18 nt, Human
ugugcucccucugccagg

SEQ ID NO: 743741 - RNA, 23 nt, Human
uguugcuuggacaccagggugga

SEQ ID NO: 743742 - RNA, 21 nt, Human
uuacagagaugccaguggggc

SEQ ID NO: 743743 - RNA, 18 nt, Human
uuaguagagacgggauuu

SEQ ID NO: 743744 - RNA, 24 nt, Human
uuaguagagacgggauuucuccau

SEQ ID NO: 743745 - RNA, 25 nt, Human
uucaggaaaugaugaaugaaugguu

SEQ ID NO: 743746 - RNA, 22 nt, Human
uucccucaacugcggaucccgg

SEQ ID NO: 743747 - RNA, 19 nt, Human
uucccuggcagccucgaug

SEQ ID NO: 743748 - RNA, 23 nt, Human
uucuccaagguuaugcuucaaca

SEQ ID NO: 743749 - RNA, 21 nt, Human
uugauuccauacaacacaugu

SEQ ID NO: 743750 - RNA, 22 nt, Human
uugcccaggcucccacugcugg

SEQ ID NO: 743751 - RNA, 23 nt, Human
uugcccaggcucccacugcuggu

SEQ ID NO: 743752 - RNA, 19 nt, Human
uugccuuugaccuggaugc

SEQ ID NO: 743753 - RNA, 18 nt, Human
uuggccucccaaaaugcu

SEQ ID NO: 743754 - RNA, 21 nt, Human
uuggggcaaagucacaaauua

SEQ ID NO: 743755 - RNA, 20 nt, Human
uuggggcagagaccccaggc

SEQ ID NO: 743756 - RNA, 24 nt, Human
uuuaaaccuugauuccauacaaca

SEQ ID NO: 743757 - RNA, 21 nt, Human
uuucuccauguuggccaggcu

SEQ ID NO: 743758 - RNA, 21 nt, Human
uuucuccuggaccccuugaug

SEQ ID NO: 743759 - RNA, 23 nt, Human
uuucuuaugucuucccuuucuac

SEQ ID NO: 743760 - RNA, 19 nt, Human
uuuuguauuuuuaguagag

SEQ ID NO: 743761 - RNA, 20 nt, Human
uuuuguauuuuuaguagaga

SEQ ID NO: 743762 - RNA, 19 nt, Human
uuuuuaguagagacgggau

SEQ ID NO: 743763 - RNA, 19 nt, Human
aacaaaaaucugacacuac

SEQ ID NO: 743764 - RNA, 20 nt, Human
aagcaacaaaaaucugacac

SEQ ID NO: 743765 - RNA, 23 nt, Human
aagcaacaaaaaucugacacuac

SEQ ID NO: 743766 - RNA, 31 nt, Human
aagcaacaaaaaucugacacuacuugaaacu

SEQ ID NO: 743767 - RNA, 19 nt, Human
acagccgcccaagcaacaa

SEQ ID NO: 743768 - RNA, 24 nt, Human
acguuguggagcaagugggugggc

SEQ ID NO: 743769 - RNA, 19 nt, Human
agaaaccaaucaaagguca

SEQ ID NO: 743770 - RNA, 20 nt, Human
agcacucguagauguugucc

SEQ ID NO: 743771 - RNA, 20 nt, Human
agcuauucacaguuggugca

SEQ ID NO: 743772 - RNA, 24 nt, Human
aggcagcaccaaauggaaauacuu

SEQ ID NO: 743773 - RNA, 18 nt, Human
aggcaggcgucgaugugg

SEQ ID NO: 743774 - RNA, 21 nt, Human
aggcgcggccgggagccggga

SEQ ID NO: 743775 - RNA, 22 nt, Human
aggcgucgaugaaggccugcgc

SEQ ID NO: 743776 - RNA, 22 nt, Human
aggggucaaggcgggggcgccc

SEQ ID NO: 743777 - RNA, 20 nt, Human
aggugcccaggggucaaggc

SEQ ID NO: 743778 - RNA, 22 nt, Human
aggugcccaggggucaaggcgg

SEQ ID NO: 743779 - RNA, 20 nt, Human
auccucuacgggugaggggg

SEQ ID NO: 743780 - RNA, 18 nt, Human
augacugaaaggcaggcg

SEQ ID NO: 743781 - RNA, 19 nt, Human
augaucugcggccgauacc

SEQ ID NO: 743782 - RNA, 19 nt, Human
auggcgcgggcacugccca

SEQ ID NO: 743783 - RNA, 24 nt, Human
caaagccaccaccugcucaaacuu

SEQ ID NO: 743784 - RNA, 20 nt, Human
caagucuuucacucggccca

SEQ ID NO: 743785 - RNA, 27 nt, Human
caaguugaggcccagugggcguccauu

SEQ ID NO: 743786 - RNA, 20 nt, Human
cacuguagcacucguagaug

SEQ ID NO: 743787 - RNA, 18 nt, Human
cagagagcagccccuccu

SEQ ID NO: 743788 - RNA, 26 nt, Human
cagagagcagccccuccuccugcccc

SEQ ID NO: 743789 - RNA, 20 nt, Human
cagagucccagcugcccccc

SEQ ID NO: 743790 - RNA, 19 nt, Human
cagaugggcauucaucucu

SEQ ID NO: 743791 - RNA, 20 nt, Human
cagccccuccuccugccccc

SEQ ID NO: 743792 - RNA, 24 nt, Human
cagccuccgggcuggcggccuccu

SEQ ID NO: 743793 - RNA, 18 nt, Human
cagccugcuccuccagga

SEQ ID NO: 743794 - RNA, 25 nt, Human
cagcuccugugccccccaucccucc

SEQ ID NO: 743795 - RNA, 22 nt, Human
cagcugccccccuccagccccc

SEQ ID NO: 743796 - RNA, 20 nt, Human
caggggucaaggcgggggcg

SEQ ID NO: 743797 - RNA, 25 nt, Human
cauccagaaacuucugcaacgugcc

SEQ ID NO: 743798 - RNA, 24 nt, Human
ccaacagccgcccaagcaacaaaa

SEQ ID NO: 743799 - RNA, 26 nt, Human
ccaccaccugcucaaacuugugcugc

SEQ ID NO: 743800 - RNA, 19 nt, Human
ccagagucccagcugcccc

SEQ ID NO: 743801 - RNA, 21 nt, Human
ccagagucccagcugcccccc

SEQ ID NO: 743802 - RNA, 19 nt, Human
ccagcccccaugggcucug

SEQ ID NO: 743803 - RNA, 23 nt, Human
ccagcugccccccuccagccccc

SEQ ID NO: 743804 - RNA, 19 nt, Human
cccacucuaccaacagccg

SEQ ID NO: 743805 - RNA, 21 nt, Human
cccagaaccggagaggaaggc

SEQ ID NO: 743806 - RNA, 26 nt, Human
cccagcuccugugccccccaucccuc

SEQ ID NO: 743807 - RNA, 24 nt, Human
cccagcugcaggucagagauggag

SEQ ID NO: 743808 - RNA, 24 nt, Human
ccccaucccuccccuccacccucc

SEQ ID NO: 743809 - RNA, 21 nt, Human
ccccauggcgcgggcacugcc

SEQ ID NO: 743810 - RNA, 22 nt, Human
ccccauggcgcgggcacugccc

SEQ ID NO: 743811 - RNA, 20 nt, Human
cccccaucccuccccuccac

SEQ ID NO: 743812 - RNA, 20 nt, Human
ccccccaucccuccccucca

SEQ ID NO: 743813 - RNA, 18 nt, Human
ccccuccacccucccugc

SEQ ID NO: 743814 - RNA, 21 nt, Human
ccuccagcgcggccaugaucu

SEQ ID NO: 743815 - RNA, 20 nt, Human
ccuccccuccacccucccug

SEQ ID NO: 743816 - RNA, 21 nt, Human
ccucuucucagccugcuccuc

SEQ ID NO: 743817 - RNA, 20 nt, Human
ccugcucaaacuugugcugc

SEQ ID NO: 743818 - RNA, 26 nt, Human
cgcggccaugaucugcggccgauacc

SEQ ID NO: 743819 - RNA, 25 nt, Human
cuccagcccccaugggcucugagcc

SEQ ID NO: 743820 - RNA, 23 nt, Human
cuccccuccacccucccugcucc

SEQ ID NO: 743821 - RNA, 18 nt, Human
cuccgggccgugggguug

SEQ ID NO: 743822 - RNA, 23 nt, Human
cuccugcccccgccccagccguc

SEQ ID NO: 743823 - RNA, 19 nt, Human
cuccuuggcguagaggagc

SEQ ID NO: 743824 - RNA, 24 nt, Human
cucuccaugugucucaggccucac

SEQ ID NO: 743825 - RNA, 18 nt, Human
cugcaggucagagaugga

SEQ ID NO: 743826 - RNA, 21 nt, Human
cugccauggccacauuggugu

SEQ ID NO: 743827 - RNA, 19 nt, Human
gagacugaucuggggacag

SEQ ID NO: 743828 - RNA, 19 nt, Human
gagcaagugggugggcaca

SEQ ID NO: 743829 - RNA, 19 nt, Human
gagccagucccaacacugg

SEQ ID NO: 743830 - RNA, 23 nt, Human
gagccagucccaacacuggcuga

SEQ ID NO: 743831 - RNA, 21 nt, Human
gaggaaggcuguuggucuucc

SEQ ID NO: 743832 - RNA, 19 nt, Human
gauggcucugccggugaga

SEQ ID NO: 743833 - RNA, 19 nt, Human
gcagcaccaaauggaaaua

SEQ ID NO: 743834 - RNA, 25 nt, Human
gcagccccuccuccugcccccgccc

SEQ ID NO: 743835 - RNA, 22 nt, Human
gcagccuccgggcuggcggccu

SEQ ID NO: 743836 - RNA, 18 nt, Human
gccauggccacauuggug

SEQ ID NO: 743837 - RNA, 22 nt, Human
gcccaagcaacaaaaaucugac

SEQ ID NO: 743838 - RNA, 18 nt, Human
gcccaggggucaaggcgg

SEQ ID NO: 743839 - RNA, 18 nt, Human
gcgaggcgcggccgggag

SEQ ID NO: 743840 - RNA, 19 nt, Human
gcgcggccgggagccggga

SEQ ID NO: 743841 - RNA, 21 nt, Human
gcgcggccgggagccgggagc

SEQ ID NO: 743842 - RNA, 19 nt, Human
gcggcgggaggcggggggg

SEQ ID NO: 743843 - RNA, 20 nt, Human
gcucccagcuccugugcccc

SEQ ID NO: 743844 - RNA, 24 nt, Human
gcucccagcuccugugccccccau

SEQ ID NO: 743845 - RNA, 22 nt, Human
ggaaguggagauaacauuuugg

SEQ ID NO: 743846 - RNA, 21 nt, Human
ggagacggggcucccagcucc

SEQ ID NO: 743847 - RNA, 19 nt, Human
gggcugcagccuccgggcu

SEQ ID NO: 743848 - RNA, 22 nt, Human
ggggauggaggugcccagggga

SEQ ID NO: 743849 - RNA, 21 nt, Human
gggggcgccccugucucagag

SEQ ID NO: 743850 - RNA, 21 nt, Human
uaaaucucugccauggccaca

SEQ ID NO: 743851 - RNA, 18 nt, Human
uagaagaucaaguugagg

SEQ ID NO: 743852 - RNA, 21 nt, Human
uagaggagcuuguugguuggc

SEQ ID NO: 743853 - RNA, 19 nt, Human
ucaaacuugugcugcaguu

SEQ ID NO: 743854 - RNA, 19 nt, Human
ucacggauacucagaaugg

SEQ ID NO: 743855 - RNA, 21 nt, Human
ucauccagaaacuucugcaac

SEQ ID NO: 743856 - RNA, 23 nt, Human
uccaagucuuucacucggcccag

SEQ ID NO: 743857 - RNA, 22 nt, Human
uccagaaacuucugcaacgugc

SEQ ID NO: 743858 - RNA, 19 nt, Human
uccagagucccagcugccc

SEQ ID NO: 743859 - RNA, 23 nt, Human
uccagcccccaugggcucugagc

SEQ ID NO: 743860 - RNA, 24 nt, Human
ucccagcugccccccuccagcccc

SEQ ID NO: 743861 - RNA, 18 nt, Human
uccuggagaagcccacag

SEQ ID NO: 743862 - RNA, 21 nt, Human
ucggagauuccccucuucuca

SEQ ID NO: 743863 - RNA, 27 nt, Human
ucucagagagcagccccuccuccugcc

SEQ ID NO: 743864 - RNA, 23 nt, Human
ucucuggccuccaucccagagac

SEQ ID NO: 743865 - RNA, 24 nt, Human
ucugccaggucugcccgcucucug

SEQ ID NO: 743866 - RNA, 24 nt, Human
ucuggcaggaacggaguggguggu

SEQ ID NO: 743867 - RNA, 19 nt, Human
ugaguuggcugcgaggggg

SEQ ID NO: 743868 - RNA, 20 nt, Human
ugaucugcggccgauaccuc

SEQ ID NO: 743869 - RNA, 21 nt, Human
ugccaggucugcccgcucucu

SEQ ID NO: 743870 - RNA, 24 nt, Human
ugcccacucuaccaacagccgccc

SEQ ID NO: 743871 - RNA, 18 nt, Human
ugcccaggggucaaggcg

SEQ ID NO: 743872 - RNA, 19 nt, Human
ugcccaggggucaaggcgg

SEQ ID NO: 743873 - RNA, 19 nt, Human
ugcccccgccccagccguc

SEQ ID NO: 743874 - RNA, 21 nt, Human
ugcccccgccccagccgucuc

SEQ ID NO: 743875 - RNA, 20 nt, Human
ugcucaaacuugugcugcag

SEQ ID NO: 743876 - RNA, 21 nt, Human
ugcucaguauuucccagucug

SEQ ID NO: 743877 - RNA, 23 nt, Human
ugcugggcagaugggggagccug

SEQ ID NO: 743878 - RNA, 22 nt, Human
uggcaggaacggaguggguggu

SEQ ID NO: 743879 - RNA, 24 nt, Human
uggcaggaacggagugggugguag

SEQ ID NO: 743880 - RNA, 23 nt, Human
uggcggccuccucucccccaguu

SEQ ID NO: 743881 - RNA, 18 nt, Human
ugggaggggauggaggug

SEQ ID NO: 743882 - RNA, 19 nt, Human
ugggcucugagccaguccc

SEQ ID NO: 743883 - RNA, 23 nt, Human
ugguaguugaagcagaaaccaau

SEQ ID NO: 743884 - RNA, 19 nt, Human
ugguggagagcaggcgggu

SEQ ID NO: 743885 - RNA, 22 nt, Human
uguccaagucuuucacucggcc

SEQ ID NO: 743886 - RNA, 21 nt, Human
uguccuccaucaaagccacca

SEQ ID NO: 743887 - RNA, 19 nt, Human
ugucuugucgaugucaaag

SEQ ID NO: 743888 - RNA, 24 nt, Human
ugugccccccaucccuccccucca

SEQ ID NO: 743889 - RNA, 27 nt, Human
uguggaugagguagaguuucugggcug

SEQ ID NO: 743890 - RNA, 21 nt, Human
uucaucucuugcucgcugagc

SEQ ID NO: 743891 - RNA, 24 nt, Human
uuccagagucccagcugccccccu

SEQ ID NO: 743892 - RNA, 18 nt, Human
uuuccucgacuccucggc

SEQ ID NO: 743893 - RNA, 19 nt, Human
aaauacugaagaugaccag

SEQ ID NO: 743894 - RNA, 18 nt, Human
aacaccaaaucguuuucc

SEQ ID NO: 743895 - RNA, 20 nt, Human
aacauaaccagaaugauauu

SEQ ID NO: 743896 - RNA, 22 nt, Human
aagaugaccagaggcucaggug

SEQ ID NO: 743897 - RNA, 22 nt, Human
aauacugaagaugaccagaggc

SEQ ID NO: 743898 - RNA, 22 nt, Human
acaaaaaacaagcuuaucuaga

SEQ ID NO: 743899 - RNA, 21 nt, Human
acugauagaaauucucucuau

SEQ ID NO: 743900 - RNA, 22 nt, Human
acuucaaggacauuauuacgga

SEQ ID NO: 743901 - RNA, 23 nt, Human
agaaaauacugaagaugaccagu

SEQ ID NO: 743902 - RNA, 25 nt, Human
caaaugacagaaaauacugaagaug

SEQ ID NO: 743903 - RNA, 21 nt, Human
cauuuauucucucaggagcua

SEQ ID NO: 743904 - RNA, 20 nt, Human
cccacgagcuggucaucuuc

SEQ ID NO: 743905 - RNA, 23 nt, Human
cucucaggagcuaaaaacaccaa

SEQ ID NO: 743906 - RNA, 23 nt, Human
cuggcccaugucacugggcuuuc

SEQ ID NO: 743907 - RNA, 24 nt, Human
gcugcuggcccaugucacugggcu

SEQ ID NO: 743908 - RNA, 21 nt, Human
uaaccagaaugauauucgugg

SEQ ID NO: 743909 - RNA, 24 nt, Human
uacacaaugcccucugaaagcuuu

SEQ ID NO: 743910 - RNA, 20 nt, Human
uacggauacacaaugcccuc

SEQ ID NO: 743911 - RNA, 20 nt, Human
ucccacgagcuggucaucuu

SEQ ID NO: 743912 - RNA, 24 nt, Human
ucccacgagcuggucaucuucagu

SEQ ID NO: 743913 - RNA, 25 nt, Human
ucuuucuucucuucauuuauucucu

SEQ ID NO: 743914 - RNA, 19 nt, Human
ugaaagcuuuugcaaauga

SEQ ID NO: 743915 - RNA, 20 nt, Human
ugaacauaaccagaaugaua

SEQ ID NO: 743916 - RNA, 21 nt, Human
ugaagaugaccagaggcucag

SEQ ID NO: 743917 - RNA, 19 nt, Human
ugacagaaaauacugaaga

SEQ ID NO: 743918 - RNA, 25 nt, Human
ugacagaaaauacugaagaugacca

SEQ ID NO: 743919 - RNA, 19 nt, Human
ugaccagaggcucaggugu

SEQ ID NO: 743920 - RNA, 24 nt, Human
ugcaaaugacagaaaauacugaag

SEQ ID NO: 743921 - RNA, 19 nt, Human
ugcuauacaaauauacauu

SEQ ID NO: 743922 - RNA, 21 nt, Human
ugcuggcccaugucacugggc

SEQ ID NO: 743923 - RNA, 23 nt, Human
uguuuuccaacagcacacaaacu

SEQ ID NO: 743924 - RNA, 24 nt, Human
uuccauguuuuccaacagcacaca

SEQ ID NO: 743925 - RNA, 23 nt, Human
uuucaacuuuuacaacauucacu

SEQ ID NO: 743926 - RNA, 24 nt, Human
uuugcaaaugacagaaaauacuga

SEQ ID NO: 743927 - RNA, 23 nt, Human
aaacgucucuuaaagcaaagucc

SEQ ID NO: 743928 - RNA, 26 nt, Human
aacaucacgggugcuggcuccaaagc

SEQ ID NO: 743929 - RNA, 23 nt, Human
aacccacguacgugcguuugcua

SEQ ID NO: 743930 - RNA, 18 nt, Human
aagaagccuuuaaaaaga

SEQ ID NO: 743931 - RNA, 18 nt, Human
aagcaaaguccacagaug

SEQ ID NO: 743932 - RNA, 19 nt, Human
aaggauauauauucucucc

SEQ ID NO: 743933 - RNA, 20 nt, Human
aaguggcaaugaggacuaaa

SEQ ID NO: 743934 - RNA, 18 nt, Human
aaucucccucuacaucuc

SEQ ID NO: 743935 - RNA, 24 nt, Human
aaugcaaucacgagcaaaccaccu

SEQ ID NO: 743936 - RNA, 22 nt, Human
acagcaggucaugggacaaacc

SEQ ID NO: 743937 - RNA, 23 nt, Human
acgggugcuggcuccaaagcucc

SEQ ID NO: 743938 - RNA, 18 nt, Human
acucccuuaaaaauugaa

SEQ ID NO: 743939 - RNA, 22 nt, Human
agaaaaacaagacaagaugaga

SEQ ID NO: 743940 - RNA, 22 nt, Human
agacagguaaacacauuuuuga

SEQ ID NO: 743941 - RNA, 18 nt, Human
agagaucagccucugaaa

SEQ ID NO: 743942 - RNA, 25 nt, Human
agcuucucaggccuucccgggcgac

SEQ ID NO: 743943 - RNA, 21 nt, Human
aguuucguuuaacagcagcuu

SEQ ID NO: 743944 - RNA, 19 nt, Human
auaccaaagucucugaggu

SEQ ID NO: 743945 - RNA, 26 nt, Human
auuugcaugagaagaacuaacaucac

SEQ ID NO: 743946 - RNA, 24 nt, Human
caaaaaaagcuaucuauggaaaua

SEQ ID NO: 743947 - RNA, 19 nt, Human
caaagucucugagguacgu

SEQ ID NO: 743948 - RNA, 24 nt, Human
caagaagccuuuaaaaagacuucu

SEQ ID NO: 743949 - RNA, 20 nt, Human
caagcucucuuuccuccaca

SEQ ID NO: 743950 - RNA, 24 nt, Human
cacuccuaccuaagggaugagagu

SEQ ID NO: 743951 - RNA, 22 nt, Human
cagagaucagccucugaaacuc

SEQ ID NO: 743952 - RNA, 19 nt, Human
cagcgggccguucccuggu

SEQ ID NO: 743953 - RNA, 21 nt, Human
cagcuugggcuccugucuccu

SEQ ID NO: 743954 - RNA, 23 nt, Human
cauuguggaggaccuaauuguuc

SEQ ID NO: 743955 - RNA, 24 nt, Human
cccuggugacuuucugaguggugg

SEQ ID NO: 743956 - RNA, 25 nt, Human
ccucugaaacucauuaucacauaga

SEQ ID NO: 743957 - RNA, 23 nt, Human
cgaaagcuucucaggccuucccg

SEQ ID NO: 743958 - RNA, 24 nt, Human
cgaaucuucuaucagacaacacac

SEQ ID NO: 743959 - RNA, 25 nt, Human
cuaaaauuauuaaguaccuacagaa

SEQ ID NO: 743960 - RNA, 23 nt, Human
cuagcgauagcucagcccucccc

SEQ ID NO: 743961 - RNA, 22 nt, Human
cuccugccuuagaaaaacaaga

SEQ ID NO: 743962 - RNA, 23 nt, Human
cugagaagaaacugcaaaaaacc

SEQ ID NO: 743963 - RNA, 22 nt, Human
cugaguggugggguuccaggaa

SEQ ID NO: 743964 - RNA, 19 nt, Human
cugauguuucucgcacccu

SEQ ID NO: 743965 - RNA, 22 nt, Human
cugcgucacuggucacagcuug

SEQ ID NO: 743966 - RNA, 24 nt, Human
cuucugugucaaugagggaaaaaa

SEQ ID NO: 743967 - RNA, 23 nt, Human
gaaaagcaaaauuaaaacugaga

SEQ ID NO: 743968 - RNA, 22 nt, Human
gagaagaaacugcaaaaaaccc

SEQ ID NO: 743969 - RNA, 20 nt, Human
gcaaugcagggggcacugga

SEQ ID NO: 743970 - RNA, 22 nt, Human
ggaaaagcaaaauuaaaacuga

SEQ ID NO: 743971 - RNA, 21 nt, Human
ggacaaaaguggcaaugagga

SEQ ID NO: 743972 - RNA, 20 nt, Human
ggccuggggaaugaaaaaaa

SEQ ID NO: 743973 - RNA, 21 nt, Human
guagauaucagcccugguacu

SEQ ID NO: 743974 - RNA, 20 nt, Human
uaaagcaaaguccacagauu

SEQ ID NO: 743975 - RNA, 23 nt, Human
uaacaucacgggugcuggcucca

SEQ ID NO: 743976 - RNA, 18 nt, Human
uacagugguguacucuuu

SEQ ID NO: 743977 - RNA, 24 nt, Human
uacaucuguauuacaaggagcagc

SEQ ID NO: 743978 - RNA, 20 nt, Human
uaccugucuucauuguggag

SEQ ID NO: 743979 - RNA, 21 nt, Human
uacuuuuuaaaaggaaaagca

SEQ ID NO: 743980 - RNA, 19 nt, Human
uagggaaacauaaggacaa

SEQ ID NO: 743981 - RNA, 18 nt, Human
uaguggcuucuucuccuc

SEQ ID NO: 743982 - RNA, 21 nt, Human
uauaaaggaaaagcaaaauua

SEQ ID NO: 743983 - RNA, 25 nt, Human
uauaaaggaaaagcaaaauuaaaac

SEQ ID NO: 743984 - RNA, 27 nt, Human
ucacagcaggucaugggacaaaccugu

SEQ ID NO: 743985 - RNA, 24 nt, Human
ucaccaauuaagguauuuggcaga

SEQ ID NO: 743986 - RNA, 20 nt, Human
ucacucaaucagacagguaa

SEQ ID NO: 743987 - RNA, 21 nt, Human
uccaagaagccuuuaaaaaga

SEQ ID NO: 743988 - RNA, 21 nt, Human
uccacagauggaagagucugg

SEQ ID NO: 743989 - RNA, 23 nt, Human
uccacagauggaagagucuggaa

SEQ ID NO: 743990 - RNA, 25 nt, Human
uccacagauggaagagucuggaaaa

SEQ ID NO: 743991 - RNA, 19 nt, Human
uccagucccauucacugca

SEQ ID NO: 743992 - RNA, 21 nt, Human
ucccuagcgauagcucagccc

SEQ ID NO: 743993 - RNA, 27 nt, Human
uccgaaagcuucucaggccuucccggg

SEQ ID NO: 743994 - RNA, 20 nt, Human
uccuggguccauagaguugg

SEQ ID NO: 743995 - RNA, 23 nt, Human
ucgcacccuucucuacuggggaa

SEQ ID NO: 743996 - RNA, 19 nt, Human
ucucaguuucguuuaacag

SEQ ID NO: 743997 - RNA, 24 nt, Human
ucucuuaaagcaaaguccacagau

SEQ ID NO: 743998 - RNA, 23 nt, Human
ucugguaucaauucugcacccug

SEQ ID NO: 743999 - RNA, 24 nt, Human
ucugguaucaauucugcacccuga

SEQ ID NO: 744000 - RNA, 24 nt, Human
ucuuacagugguguacucuuugcc

SEQ ID NO: 744001 - RNA, 23 nt, Human
ugaaaaaaaaauaacaagccucg

SEQ ID NO: 744002 - RNA, 21 nt, Human
ugacuuguagauaucagcccu

SEQ ID NO: 744003 - RNA, 19 nt, Human
ugagaagaaacugcaaaaa

SEQ ID NO: 744004 - RNA, 24 nt, Human
ugagaagaaacugcaaaaaaccca

SEQ ID NO: 744005 - RNA, 25 nt, Human
ugagaagaaacugcaaaaaacccac

SEQ ID NO: 744006 - RNA, 24 nt, Human
ugagaagaacuaacaucacgggug

SEQ ID NO: 744007 - RNA, 22 nt, Human
ugccuuagaaaaacaagacaag

SEQ ID NO: 744008 - RNA, 20 nt, Human
ugcuuccgaaagcuucucag

SEQ ID NO: 744009 - RNA, 22 nt, Human
uggaaaaaaacccagcgggccg

SEQ ID NO: 744010 - RNA, 25 nt, Human
uggaaaaaaacccagcgggccgguu

SEQ ID NO: 744011 - RNA, 24 nt, Human
uggaaaaaaacccagcgggccguu

SEQ ID NO: 744012 - RNA, 21 nt, Human
uggaaacaaacaaaaaaagcu

SEQ ID NO: 744013 - RNA, 23 nt, Human
uggaaauaggccuggggaauggu

SEQ ID NO: 744014 - RNA, 18 nt, Human
uggaacaugacaaaugua

SEQ ID NO: 744015 - RNA, 27 nt, Human
uggcaaugaggacuaaaccagaaagaa

SEQ ID NO: 744016 - RNA, 22 nt, Human
uggcuccaaagcuccuguuuau

SEQ ID NO: 744017 - RNA, 26 nt, Human
uggguccauagaguuggucggaugac

SEQ ID NO: 744018 - RNA, 18 nt, Human
uggugggguuccaggaau

SEQ ID NO: 744019 - RNA, 24 nt, Human
uguuccuuaaccucuucucuccca

SEQ ID NO: 744020 - RNA, 24 nt, Human
uuaaccuuuuacaaucucccucua

SEQ ID NO: 744021 - RNA, 20 nt, Human
uuagaaaaacaagacaagau

SEQ ID NO: 744022 - RNA, 24 nt, Human
uuauuccagccaucuccaugaaag

SEQ ID NO: 744023 - RNA, 20 nt, Human
uuccuuaaccucuucucuuc

SEQ ID NO: 744024 - RNA, 21 nt, Human
uucugcacccugauguuucuc

SEQ ID NO: 744025 - RNA, 22 nt, Human
uuggaacaugacaaauguaaug

SEQ ID NO: 744026 - RNA, 26 nt, Human
uugguacuugagcaagaaccaugaca

SEQ ID NO: 744027 - RNA, 23 nt, Human
uuugcaugagaagaacuaacauc

SEQ ID NO: 744028 - RNA, 20 nt, Human
aaaaaaaaaaaaugggaaaa

SEQ ID NO: 744029 - RNA, 21 nt, Human
aaaaaaaacagccaacagcug

SEQ ID NO: 744030 - RNA, 22 nt, Human
aaaaaauauucaaaagacacca

SEQ ID NO: 744031 - RNA, 18 nt, Human
aaaagcagccccauccau

SEQ ID NO: 744032 - RNA, 23 nt, Human
aaaaugaacaggcaaaccaaaca

SEQ ID NO: 744033 - RNA, 26 nt, Human
aaacaaaugauggcuuauccacacaa

SEQ ID NO: 744034 - RNA, 22 nt, Human
aaacaggcaaaaggcacgaaca

SEQ ID NO: 744035 - RNA, 24 nt, Human
aaagaacuugagucaacaauaagc

SEQ ID NO: 744036 - RNA, 24 nt, Human
aaaggcacgaacagacacaucaca

SEQ ID NO: 744037 - RNA, 21 nt, Human
aaagugcugggauuauacagg

SEQ ID NO: 744038 - RNA, 26 nt, Human
aaagugcugggauuauacaggcauga

SEQ ID NO: 744039 - RNA, 20 nt, Human
aaaguuguuuuuugagacag

SEQ ID NO: 744040 - RNA, 19 nt, Human
aaauuuuaagagacugaca

SEQ ID NO: 744041 - RNA, 22 nt, Human
aacaaaaaaaaacagccaacag

SEQ ID NO: 744042 - RNA, 22 nt, Human
aacaaaacggaagcccuuccaa

SEQ ID NO: 744043 - RNA, 21 nt, Human
aacaaacaacaaaaaaaaaca

SEQ ID NO: 744044 - RNA, 22 nt, Human
aaccacaugaauccuaauucca

SEQ ID NO: 744045 - RNA, 20 nt, Human
aaccuccaccucccaggcuc

SEQ ID NO: 744046 - RNA, 21 nt, Human
aacuacugaaacacaaaacag

SEQ ID NO: 744047 - RNA, 19 nt, Human
aacuucuaaguaggagcag

SEQ ID NO: 744048 - RNA, 22 nt, Human
aagcagaugaaaucauagacau

SEQ ID NO: 744049 - RNA, 18 nt, Human
aagcaucccaacuuaaaa

SEQ ID NO: 744050 - RNA, 22 nt, Human
aagcaucccaacuuaaaaacag

SEQ ID NO: 744051 - RNA, 24 nt, Human
aagcgauccgcccgccucggccuc

SEQ ID NO: 744052 - RNA, 25 nt, Human
aaguaaauauaguaauagcaguaau

SEQ ID NO: 744053 - RNA, 21 nt, Human
aagugcugggauuauacaggc

SEQ ID NO: 744054 - RNA, 21 nt, Human
acaaaagacgacacggaaaag

SEQ ID NO: 744055 - RNA, 18 nt, Human
acaaagcaagagagaugc

SEQ ID NO: 744056 - RNA, 18 nt, Human
acaccauuaagaaaauga

SEQ ID NO: 744057 - RNA, 19 nt, Human
acagacacaucacaaaaga

SEQ ID NO: 744058 - RNA, 22 nt, Human
acagaugacaugauuaucuaca

SEQ ID NO: 744059 - RNA, 20 nt, Human
acagcaggcacccccucacc

SEQ ID NO: 744060 - RNA, 26 nt, Human
acaggcaaaaggcacgaacagacaca

SEQ ID NO: 744061 - RNA, 19 nt, Human
acaggcgccugccaccacg

SEQ ID NO: 744062 - RNA, 20 nt, Human
acccuauuuucuucuucagc

SEQ ID NO: 744063 - RNA, 20 nt, Human
acgaaaaugcaaaggaucua

SEQ ID NO: 744064 - RNA, 20 nt, Human
acgaacagacacaucacaaa

SEQ ID NO: 744065 - RNA, 19 nt, Human
acugaaacacaaaacagcu

SEQ ID NO: 744066 - RNA, 18 nt, Human
acuguuccagcugagcca

SEQ ID NO: 744067 - RNA, 25 nt, Human
agaaaaaaauuauaucguuacaaaa

SEQ ID NO: 744068 - RNA, 22 nt, Human
agaaauuaacagaucuaaauaa

SEQ ID NO: 744069 - RNA, 20 nt, Human
agaacucaaaauauggccuc

SEQ ID NO: 744070 - RNA, 25 nt, Human
agagacccuucaacaagaacaaagg

SEQ ID NO: 744071 - RNA, 23 nt, Human
agcugaggagaagggcugagccc

SEQ ID NO: 744072 - RNA, 20 nt, Human
aggcaaaaggcacgaacaga

SEQ ID NO: 744073 - RNA, 21 nt, Human
aggccuggaguuccuccucag

SEQ ID NO: 744074 - RNA, 18 nt, Human
agggaagaugaagcaguc

SEQ ID NO: 744075 - RNA, 21 nt, Human
aggugguggugguuacacagg

SEQ ID NO: 744076 - RNA, 21 nt, Human
agugcugggauuauacaggcc

SEQ ID NO: 744077 - RNA, 24 nt, Human
auagugacagagauagucuaucac

SEQ ID NO: 744078 - RNA, 19 nt, Human
aucaaucagauaugaucac

SEQ ID NO: 744079 - RNA, 22 nt, Human
augagucuaaaaacaugccaaa

SEQ ID NO: 744080 - RNA, 18 nt, Human
auggaaagaacuugaguc

SEQ ID NO: 744081 - RNA, 24 nt, Human
augggguuucaccaccccggccag

SEQ ID NO: 744082 - RNA, 21 nt, Human
auucuccugccucagccuccc

SEQ ID NO: 744083 - RNA, 23 nt, Human
caaaacggaagcccuuccaauac

SEQ ID NO: 744084 - RNA, 26 nt, Human
caaaaugaacaaacaacaaaaaaaaa

SEQ ID NO: 744085 - RNA, 21 nt, Human
caaaggaucuagaagucaaaa

SEQ ID NO: 744086 - RNA, 19 nt, Human
caacaagaacaaaggcgag

SEQ ID NO: 744087 - RNA, 23 nt, Human
caacauugaggacuauuccuuau

SEQ ID NO: 744088 - RNA, 20 nt, Human
caacuuaaaaacaggcaaaa

SEQ ID NO: 744089 - RNA, 25 nt, Human
caacuuaaaaacaggcaaaaggcac

SEQ ID NO: 744090 - RNA, 25 nt, Human
caagagcucaguucaaccucagaac

SEQ ID NO: 744091 - RNA, 22 nt, Human
caagcaauucuccugccucagc

SEQ ID NO: 744092 - RNA, 19 nt, Human
cacaauggaauacuauuca

SEQ ID NO: 744093 - RNA, 21 nt, Human
caccaccccggccaggcuggu

SEQ ID NO: 744094 - RNA, 24 nt, Human
caccaccccggccaggcuggucuu

SEQ ID NO: 744095 - RNA, 20 nt, Human
caccccggccaggcuggucu

SEQ ID NO: 744096 - RNA, 19 nt, Human
cacgaacagacacaucaca

SEQ ID NO: 744097 - RNA, 22 nt, Human
cacgaacagacacaucacaaaa

SEQ ID NO: 744098 - RNA, 18 nt, Human
cagaauauggaaagaacu

SEQ ID NO: 744099 - RNA, 24 nt, Human
cagacaaguaaguaaagaccuucu

SEQ ID NO: 744100 - RNA, 20 nt, Human
cagcaaggagaacuacugaa

SEQ ID NO: 744101 - RNA, 23 nt, Human
caggcgccugccaccacgccugg

SEQ ID NO: 744102 - RNA, 26 nt, Human
ccaaagugcugggauuauacaggcau

SEQ ID NO: 744103 - RNA, 21 nt, Human
ccaaauguugacacccucauc

SEQ ID NO: 744104 - RNA, 19 nt, Human
ccaauaccugaguucaacu

SEQ ID NO: 744105 - RNA, 22 nt, Human
ccacagcaggcacccccucacc

SEQ ID NO: 744106 - RNA, 19 nt, Human
ccacgggccuggccugaag

SEQ ID NO: 744107 - RNA, 19 nt, Human
cccgagcagcugggauucu

SEQ ID NO: 744108 - RNA, 21 nt, Human
ccuacuguuccagcucagagu

SEQ ID NO: 744109 - RNA, 19 nt, Human
ccuagguacuuacccaaga

SEQ ID NO: 744110 - RNA, 24 nt, Human
ccucccaggcucaagcaauucucc

SEQ ID NO: 744111 - RNA, 20 nt, Human
ccuccuguccccacuguucc

SEQ ID NO: 744112 - RNA, 18 nt, Human
ccugaccucaagcgaucc

SEQ ID NO: 744113 - RNA, 22 nt, Human
ccugaccucaagcgauccgccc

SEQ ID NO: 744114 - RNA, 22 nt, Human
ccugagggcacauacuuaacuc

SEQ ID NO: 744115 - RNA, 24 nt, Human
ccugccucagccucccgagcagcu

SEQ ID NO: 744116 - RNA, 21 nt, Human
ccuuaccacuugcaauagcau

SEQ ID NO: 744117 - RNA, 22 nt, Human
cgaacagacacaucacaaaaga

SEQ ID NO: 744118 - RNA, 24 nt, Human
cgccucggccucccaaagugcugg

SEQ ID NO: 744119 - RNA, 24 nt, Human
cggccaggcuggucuugaacuccu

SEQ ID NO: 744120 - RNA, 24 nt, Human
cucaagcaauucuccugccucagc

SEQ ID NO: 744121 - RNA, 27 nt, Human
cucacaaaauucugacauguccaaauc

SEQ ID NO: 744122 - RNA, 22 nt, Human
cucacugaaaccuccaccuccc

SEQ ID NO: 744123 - RNA, 23 nt, Human
cucacugaaaccuccaccuccca

SEQ ID NO: 744124 - RNA, 24 nt, Human
cucacugaaaccuccaccucccag

SEQ ID NO: 744125 - RNA, 25 nt, Human
cucccaggcucaagcaauucuccug

SEQ ID NO: 744126 - RNA, 26 nt, Human
cuccugaccucaagcgauccgcccgc

SEQ ID NO: 744127 - RNA, 28 nt, Human
cucugugccacagcaggcacccccuccu

SEQ ID NO: 744128 - RNA, 24 nt, Human
cucuugguugcccaggcuagagug

SEQ ID NO: 744129 - RNA, 20 nt, Human
cuguaaggccuucccagcuc

SEQ ID NO: 744130 - RNA, 22 nt, Human
cugugcuccuucacaccugagg

SEQ ID NO: 744131 - RNA, 22 nt, Human
cuucaacuuaacacaucaaaau

SEQ ID NO: 744132 - RNA, 21 nt, Human
cuugaaccaugauucagaguu

SEQ ID NO: 744133 - RNA, 23 nt, Human
cuugagucaacaauaagcauccc

SEQ ID NO: 744134 - RNA, 20 nt, Human
gaaaggacaaagcaagagag

SEQ ID NO: 744135 - RNA, 21 nt, Human
gaacaaacaacaaaaaaaaac

SEQ ID NO: 744136 - RNA, 20 nt, Human
gaagggcugagccgaguagg

SEQ ID NO: 744137 - RNA, 19 nt, Human
gacaguagcagggcugaga

SEQ ID NO: 744138 - RNA, 23 nt, Human
gacccaacaugcugcuacccaca

SEQ ID NO: 744139 - RNA, 24 nt, Human
gaccucaagcgauccgcccgccuc

SEQ ID NO: 744140 - RNA, 20 nt, Human
gagaugccaauuacacauag

SEQ ID NO: 744141 - RNA, 24 nt, Human
gagaugggguuucaccaccccggc

SEQ ID NO: 744142 - RNA, 22 nt, Human
gauagaaagugguuaucugggg

SEQ ID NO: 744143 - RNA, 23 nt, Human
gaucuccgucuuccccacuacac

SEQ ID NO: 744144 - RNA, 19 nt, Human
gcaaaccaaacaugaaaau

SEQ ID NO: 744145 - RNA, 23 nt, Human
gcaggcacccccucaccugugcu

SEQ ID NO: 744146 - RNA, 24 nt, Human
gcgauccgcccgccucggccuccc

SEQ ID NO: 744147 - RNA, 19 nt, Human
gcugaggagaagggcugag

SEQ ID NO: 744148 - RNA, 20 nt, Human
gcugauuuuccagaaaaugu

SEQ ID NO: 744149 - RNA, 23 nt, Human
gcuggucuugaacuccugaccuc

SEQ ID NO: 744150 - RNA, 20 nt, Human
ggcacauacuuaacucaccc

SEQ ID NO: 744151 - RNA, 24 nt, Human
ggcacgaacagacacaucacaaaa

SEQ ID NO: 744152 - RNA, 18 nt, Human
ggccuggaguuccuccuc

SEQ ID NO: 744153 - RNA, 24 nt, Human
ggcuggucuugaacuccugaccuc

SEQ ID NO: 744154 - RNA, 23 nt, Human
gggacagaaucacaaggggagag

SEQ ID NO: 744155 - RNA, 22 nt, Human
gggcugagccgaguagggcugc

SEQ ID NO: 744156 - RNA, 22 nt, Human
gggguuucaccaccccggccag

SEQ ID NO: 744157 - RNA, 18 nt, Human
gggucuuggggaggggac

SEQ ID NO: 744158 - RNA, 19 nt, Human
ggucuugaacuccugaccu

SEQ ID NO: 744159 - RNA, 22 nt, Human
guagcgcauugagacugugccu

SEQ ID NO: 744160 - RNA, 22 nt, Human
guggcacacaggagggcgugga

SEQ ID NO: 744161 - RNA, 21 nt, Human
guugcccaggcuagagugcaa

SEQ ID NO: 744162 - RNA, 20 nt, Human
uaaauugaucuauaaauccc

SEQ ID NO: 744163 - RNA, 19 nt, Human
uaacuagaaaacagcuuuu

SEQ ID NO: 744164 - RNA, 21 nt, Human
uaagagacugacaaugccaag

SEQ ID NO: 744165 - RNA, 19 nt, Human
uaaguuaacugaucuaagu

SEQ ID NO: 744166 - RNA, 23 nt, Human
uaauagcaguaaucacugagcca

SEQ ID NO: 744167 - RNA, 23 nt, Human
uacaaaaugaacaaacaacaaaa

SEQ ID NO: 744168 - RNA, 24 nt, Human
uacaaaaugaacaaacaacaaaaa

SEQ ID NO: 744169 - RNA, 22 nt, Human
uacaacacagcaauuaaagucc

SEQ ID NO: 744170 - RNA, 21 nt, Human
uacaggcaugagccacgggcc

SEQ ID NO: 744171 - RNA, 22 nt, Human
uacaggcgccugccaccacgcc

SEQ ID NO: 744172 - RNA, 21 nt, Human
uacccaagagaaauaaaaaca

SEQ ID NO: 744173 - RNA, 24 nt, Human
uacccaagagaaauaaaaacacau

SEQ ID NO: 744174 - RNA, 22 nt, Human
uaccucgccugcuuucgaacag

SEQ ID NO: 744175 - RNA, 23 nt, Human
uagcgcauugagacugugccuuu

SEQ ID NO: 744176 - RNA, 32 nt, Human
uagggcacacgaugggaggccuggaguucccc

SEQ ID NO: 744177 - RNA, 19 nt, Human
uaguagagaugggguuuca

SEQ ID NO: 744178 - RNA, 23 nt, Human
uaguagagaugggguuucaccac

SEQ ID NO: 744179 - RNA, 24 nt, Human
uaugaucacuguccucaggaaccc

SEQ ID NO: 744180 - RNA, 21 nt, Human
uauuacauguauguuuuucau

SEQ ID NO: 744181 - RNA, 21 nt, Human
ucacagcugaggagaagggcu

SEQ ID NO: 744182 - RNA, 21 nt, Human
ucacucuugguugcccaggcu

SEQ ID NO: 744183 - RNA, 24 nt, Human
ucacucuugguugcccaggcuaga

SEQ ID NO: 744184 - RNA, 24 nt, Human
ucacugaaaccuccaccucccagg

SEQ ID NO: 744185 - RNA, 18 nt, Human
ucagcaaggagaacuacu

SEQ ID NO: 744186 - RNA, 22 nt, Human
uccaagagguggaaaguguuuc

SEQ ID NO: 744187 - RNA, 18 nt, Human
ucccaaagugcugggauu

SEQ ID NO: 744188 - RNA, 26 nt, Human
ucccaaagugcugggauuauacaggc

SEQ ID NO: 744189 - RNA, 23 nt, Human
ucccagcucacugaaaccuccac

SEQ ID NO: 744190 - RNA, 21 nt, Human
ucccaggcucaagcaauucuc

SEQ ID NO: 744191 - RNA, 24 nt, Human
ucccaggcucaagcaauucuccug

SEQ ID NO: 744192 - RNA, 24 nt, Human
uccccacuguuccagcugagccag

SEQ ID NO: 744193 - RNA, 19 nt, Human
uccuagguacuuacccaag

SEQ ID NO: 744194 - RNA, 18 nt, Human
ucggccucccaaagugcu

SEQ ID NO: 744195 - RNA, 27 nt, Human
ucuacaggcgccugccaccacgccugg

SEQ ID NO: 744196 - RNA, 22 nt, Human
ucuacuuaaaaggaagcaggcc

SEQ ID NO: 744197 - RNA, 19 nt, Human
ucuccuggacccuauuuuc

SEQ ID NO: 744198 - RNA, 19 nt, Human
ucugcagauuccucuccug

SEQ ID NO: 744199 - RNA, 18 nt, Human
ucugccccucauccugac

SEQ ID NO: 744200 - RNA, 18 nt, Human
ucuggggcuggagugggc

SEQ ID NO: 744201 - RNA, 24 nt, Human
ucuuccgcauuuuuaguagagaug

SEQ ID NO: 744202 - RNA, 21 nt, Human
ucuucuguaaggccuucccag

SEQ ID NO: 744203 - RNA, 21 nt, Human
ucuugaacuccugaccucaag

SEQ ID NO: 744204 - RNA, 19 nt, Human
ugaaaccuccaccucccag

SEQ ID NO: 744205 - RNA, 23 nt, Human
ugaaaugacacaaugagccagag

SEQ ID NO: 744206 - RNA, 24 nt, Human
ugaaauucagagguaaagacuaac

SEQ ID NO: 744207 - RNA, 22 nt, Human
ugaacaaacaacaaaaaaaaac

SEQ ID NO: 744208 - RNA, 22 nt, Human
ugaacaggcaaaccaaacauga

SEQ ID NO: 744209 - RNA, 26 nt, Human
ugaauaaacaaaugauggcuuaucca

SEQ ID NO: 744210 - RNA, 24 nt, Human
ugacaauuucuuaggaaguuagaa

SEQ ID NO: 744211 - RNA, 18 nt, Human
ugaccucaagcgauccgc

SEQ ID NO: 744212 - RNA, 22 nt, Human
ugagacagaaagauacagacaa

SEQ ID NO: 744213 - RNA, 18 nt, Human
ugaggagaagggcugagc

SEQ ID NO: 744214 - RNA, 19 nt, Human
ugagggaaacacccauuga

SEQ ID NO: 744215 - RNA, 21 nt, Human
ugagggcacauacuuaacuca

SEQ ID NO: 744216 - RNA, 25 nt, Human
ugagucaacaauaagcaucccaacu

SEQ ID NO: 744217 - RNA, 24 nt, Human
ugauacaaaaugaacaaacaacaa

SEQ ID NO: 744218 - RNA, 20 nt, Human
ugauaugagguggggucuug

SEQ ID NO: 744219 - RNA, 22 nt, Human
ugaucacuguccucaggaaccc

SEQ ID NO: 744220 - RNA, 23 nt, Human
ugccacagcaggcacccccucac

SEQ ID NO: 744221 - RNA, 22 nt, Human
ugcccaggcuagagugcaaugc

SEQ ID NO: 744222 - RNA, 24 nt, Human
ugccucagccucccgagcagcugg

SEQ ID NO: 744223 - RNA, 24 nt, Human
uggaaaacucagaauuguuaaaau

SEQ ID NO: 744224 - RNA, 19 nt, Human
uggaaaguguuuccucugc

SEQ ID NO: 744225 - RNA, 22 nt, Human
uggacucugcuuaacuggggau

SEQ ID NO: 744226 - RNA, 21 nt, Human
uggaugaauaaacaaaugaug

SEQ ID NO: 744227 - RNA, 18 nt, Human
uggcuaacucuuccgcau

SEQ ID NO: 744228 - RNA, 22 nt, Human
uggcuuaauaaaaaauauucaa

SEQ ID NO: 744229 - RNA, 22 nt, Human
ugggaggccuggaguuccuccu

SEQ ID NO: 744230 - RNA, 24 nt, Human
ugggauuauacaggcaugagccac

SEQ ID NO: 744231 - RNA, 18 nt, Human
uggggaggggacagaauc

SEQ ID NO: 744232 - RNA, 24 nt, Human
ugggguuucaccaccccggccagg

SEQ ID NO: 744233 - RNA, 18 nt, Human
ugguuacacagguggugg

SEQ ID NO: 744234 - RNA, 20 nt, Human
uguaaggccuucccagcucu

SEQ ID NO: 744235 - RNA, 24 nt, Human
uguaaggccuucccagcucugugc

SEQ ID NO: 744236 - RNA, 21 nt, Human
ugucaccucuucuguaaggcc

SEQ ID NO: 744237 - RNA, 22 nt, Human
uguccacuguccauuuaccucg

SEQ ID NO: 744238 - RNA, 21 nt, Human
ugugagagcugcaaacugaga

SEQ ID NO: 744239 - RNA, 24 nt, Human
uuaaaaacaggcaaaaggcacgaa

SEQ ID NO: 744240 - RNA, 19 nt, Human
uuagauacacaguugugcu

SEQ ID NO: 744241 - RNA, 18 nt, Human
uuaguagagaugggguuu

SEQ ID NO: 744242 - RNA, 22 nt, Human
uuaguagagaugggguuucacc

SEQ ID NO: 744243 - RNA, 23 nt, Human
uuaguagagaugggguuucacca

SEQ ID NO: 744244 - RNA, 18 nt, Human
uucagagguaaagacuaa

SEQ ID NO: 744245 - RNA, 18 nt, Human
uuccacgcauuuccaaac

SEQ ID NO: 744246 - RNA, 23 nt, Human
uucuuuguggcuccacuuuuaac

SEQ ID NO: 744247 - RNA, 20 nt, Human
uuuccaaacaucacucacug

SEQ ID NO: 744248 - RNA, 24 nt, Human
uuuuuaguagagaugggguuucac

SEQ ID NO: 744249 - RNA, 21 nt, Human
aaaaacaacaaaucuuguccc

SEQ ID NO: 744250 - RNA, 21 nt, Human
aaaaagaaaccucaaaagccu

SEQ ID NO: 744251 - RNA, 19 nt, Human
aaacaccaccauuacaaaa

SEQ ID NO: 744252 - RNA, 24 nt, Human
aaacauagcucaguaauucucaga

SEQ ID NO: 744253 - RNA, 19 nt, Human
aaacuagaccuguguucca

SEQ ID NO: 744254 - RNA, 18 nt, Human
aaacuccucaccagacac

SEQ ID NO: 744255 - RNA, 22 nt, Human
aaagaaaacacaacauguuccu

SEQ ID NO: 744256 - RNA, 23 nt, Human
aacaagcaaauauuuuacuagga

SEQ ID NO: 744257 - RNA, 24 nt, Human
aacccuccgcuugcagaucuccau

SEQ ID NO: 744258 - RNA, 20 nt, Human
aacugcuuggcuaucuugac

SEQ ID NO: 744259 - RNA, 21 nt, Human
aagaaaacacaacauguuccu

SEQ ID NO: 744260 - RNA, 21 nt, Human
aagaaaccucaaaagccucaa

SEQ ID NO: 744261 - RNA, 21 nt, Human
aagaaacuccaaauacuuuga

SEQ ID NO: 744262 - RNA, 18 nt, Human
aagcaagguagcaacgca

SEQ ID NO: 744263 - RNA, 21 nt, Human
aagcagaaauacuaacauuac

SEQ ID NO: 744264 - RNA, 20 nt, Human
aagcaggcucagaauggcca

SEQ ID NO: 744265 - RNA, 21 nt, Human
aaggugagucauugucacaaa

SEQ ID NO: 744266 - RNA, 19 nt, Human
aaugcagucaacacugaga

SEQ ID NO: 744267 - RNA, 22 nt, Human
acacaccugugcaaaacaauuc

SEQ ID NO: 744268 - RNA, 24 nt, Human
acaucugaauuagccagagaaaga

SEQ ID NO: 744269 - RNA, 25 nt, Human
accaccaccaccauguaauaauaac

SEQ ID NO: 744270 - RNA, 19 nt, Human
acugcagaagaugggcauc

SEQ ID NO: 744271 - RNA, 19 nt, Human
agaaauuucaagaggguaa

SEQ ID NO: 744272 - RNA, 21 nt, Human
agaacuggaagcuagaacacu

SEQ ID NO: 744273 - RNA, 18 nt, Human
agaacuguuugaaaugga

SEQ ID NO: 744274 - RNA, 20 nt, Human
agagaaagaguagcagcugc

SEQ ID NO: 744275 - RNA, 23 nt, Human
agaggacuuaaagccuuaagcug

SEQ ID NO: 744276 - RNA, 25 nt, Human
agaggacuuaaagccuuaagcuggu

SEQ ID NO: 744277 - RNA, 24 nt, Human
agccuuguguuugugaaauauaac

SEQ ID NO: 744278 - RNA, 22 nt, Human
agcugccuuuuaaacacuacuu

SEQ ID NO: 744279 - RNA, 21 nt, Human
aggaagaaagggaaggaagag

SEQ ID NO: 744280 - RNA, 23 nt, Human
aggaagaaguuggaaaugccaag

SEQ ID NO: 744281 - RNA, 18 nt, Human
aggaagcaggcucgggcc

SEQ ID NO: 744282 - RNA, 19 nt, Human
aggaauuccauugcaauau

SEQ ID NO: 744283 - RNA, 21 nt, Human
aggaggaucucuccauagccc

SEQ ID NO: 744284 - RNA, 26 nt, Human
agggagaaagcaaaaaaaggggaccc

SEQ ID NO: 744285 - RNA, 22 nt, Human
auaacacuggaggaucacauac

SEQ ID NO: 744286 - RNA, 21 nt, Human
auauucuucaccagcuaagaa

SEQ ID NO: 744287 - RNA, 24 nt, Human
augggaaaaggaaaaaaaaauuca

SEQ ID NO: 744288 - RNA, 24 nt, Human
augugcaggaaggacugccacaug

SEQ ID NO: 744289 - RNA, 21 nt, Human
caaaaaaagggagaaagcaaa

SEQ ID NO: 744290 - RNA, 22 nt, Human
caaaaacaacaaaucuuguccc

SEQ ID NO: 744291 - RNA, 25 nt, Human
caaaacuucuaaaauauuuuuaaau

SEQ ID NO: 744292 - RNA, 18 nt, Human
caaaagccucaaugacuc

SEQ ID NO: 744293 - RNA, 23 nt, Human
caaaagccucaaugacucaacag

SEQ ID NO: 744294 - RNA, 24 nt, Human
caaaaugguaacccaagaauaauu

SEQ ID NO: 744295 - RNA, 21 nt, Human
caaaauuacugucacaaaaau

SEQ ID NO: 744296 - RNA, 20 nt, Human
caaacaaaucacauaaaaca

SEQ ID NO: 744297 - RNA, 23 nt, Human
caaacaaaucacauaaaacagaa

SEQ ID NO: 744298 - RNA, 21 nt, Human
caacaaugcagucaacacuga

SEQ ID NO: 744299 - RNA, 18 nt, Human
caagcugaauugaaacca

SEQ ID NO: 744300 - RNA, 22 nt, Human
cacaagaaauguucuuaucugg

SEQ ID NO: 744301 - RNA, 19 nt, Human
cacacugaaaaacuccuca

SEQ ID NO: 744302 - RNA, 27 nt, Human
cacacugaaaaacuccucaccagacac

SEQ ID NO: 744303 - RNA, 18 nt, Human
cacagcuugaagggcccc

SEQ ID NO: 744304 - RNA, 24 nt, Human
cacauaaaacagaagggagagaug

SEQ ID NO: 744305 - RNA, 18 nt, Human
caccacaaaacuucuccu

SEQ ID NO: 744306 - RNA, 24 nt, Human
caccagacacaccugugcaaaaca

SEQ ID NO: 744307 - RNA, 18 nt, Human
caccagcggcaccacaaa

SEQ ID NO: 744308 - RNA, 23 nt, Human
caccaggauaaagaggccauccc

SEQ ID NO: 744309 - RNA, 25 nt, Human
cacugaaaaacuccucaccagacac

SEQ ID NO: 744310 - RNA, 21 nt, Human
cagaaccaguccuaaaauuau

SEQ ID NO: 744311 - RNA, 19 nt, Human
cagaacuguuugaaaugga

SEQ ID NO: 744312 - RNA, 25 nt, Human
cagcagaugauggguacaaagcuga

SEQ ID NO: 744313 - RNA, 21 nt, Human
cagcccagugaccacauauca

SEQ ID NO: 744314 - RNA, 21 nt, Human
cagcuccucgguguucaaccu

SEQ ID NO: 744315 - RNA, 22 nt, Human
caggaauguccccauccccagu

SEQ ID NO: 744316 - RNA, 22 nt, Human
caggcugcaaggaaacacccug

SEQ ID NO: 744317 - RNA, 23 nt, Human
caucucaacuagugaauuuuugc

SEQ ID NO: 744318 - RNA, 23 nt, Human
caucuccauccugcaccuccuug

SEQ ID NO: 744319 - RNA, 19 nt, Human
caugauuccuccucccuca

SEQ ID NO: 744320 - RNA, 23 nt, Human
cauuaaaacaaaacugaaacucu

SEQ ID NO: 744321 - RNA, 21 nt, Human
ccaguaccuucuacuugaccc

SEQ ID NO: 744322 - RNA, 27 nt, Human
cccaaacaaaucacauaaaaggaguuc

SEQ ID NO: 744323 - RNA, 21 nt, Human
cccaauauuaagaacgcaggg

SEQ ID NO: 744324 - RNA, 19 nt, Human
cccccagagaaaaaccuuc

SEQ ID NO: 744325 - RNA, 21 nt, Human
cccuccgcuugcagaucucca

SEQ ID NO: 744326 - RNA, 23 nt, Human
ccggcacugagaagauauucagc

SEQ ID NO: 744327 - RNA, 18 nt, Human
ccucgguguucaaccugg

SEQ ID NO: 744328 - RNA, 24 nt, Human
ccugaccagcaaucacaauaacac

SEQ ID NO: 744329 - RNA, 26 nt, Human
ccuucuaucagcauuuuuccugaccc

SEQ ID NO: 744330 - RNA, 21 nt, Human
cuacacagaaccaguccuaaa

SEQ ID NO: 744331 - RNA, 22 nt, Human
cuaggaaugucaacuaugugca

SEQ ID NO: 744332 - RNA, 22 nt, Human
cuccaaauacuuugacagcucc

SEQ ID NO: 744333 - RNA, 19 nt, Human
cuccaggaacuggugcagc

SEQ ID NO: 744334 - RNA, 24 nt, Human
cucuccauagcccaauauuaagaa

SEQ ID NO: 744335 - RNA, 19 nt, Human
cucuucggucugccuucuc

SEQ ID NO: 744336 - RNA, 27 nt, Human
cugcugggcaacuccaggaacuggugc

SEQ ID NO: 744337 - RNA, 19 nt, Human
cuugacccagauccaugca

SEQ ID NO: 744338 - RNA, 20 nt, Human
gaaaaggaaaaaaaaauuca

SEQ ID NO: 744339 - RNA, 25 nt, Human
gaaaauaauagguaacacuaauagc

SEQ ID NO: 744340 - RNA, 23 nt, Human
gaaaauacugaaaauacaagcua

SEQ ID NO: 744341 - RNA, 18 nt, Human
gaaaggaagaaguuggaa

SEQ ID NO: 744342 - RNA, 22 nt, Human
gaggaagaaagggaaggaagag

SEQ ID NO: 744343 - RNA, 19 nt, Human
gcaccaggauaaagaggcc

SEQ ID NO: 744344 - RNA, 25 nt, Human
gcagcagaugauggguacaaagcug

SEQ ID NO: 744345 - RNA, 21 nt, Human
gcagcugcugcaguagaacug

SEQ ID NO: 744346 - RNA, 24 nt, Human
gcugagaguacaaggacaauuuca

SEQ ID NO: 744347 - RNA, 24 nt, Human
ggcaauaaguggguucaaaaagaa

SEQ ID NO: 744348 - RNA, 18 nt, Human
ggccaggagaagguagcc

SEQ ID NO: 744349 - RNA, 23 nt, Human
ggguaauucucuuaucugcauca

SEQ ID NO: 744350 - RNA, 20 nt, Human
guauuucagcugagcacuga

SEQ ID NO: 744351 - RNA, 23 nt, Human
gugcaaaacaauuccaagggucu

SEQ ID NO: 744352 - RNA, 24 nt, Human
guuaaaaaaaaaaaaaaucaaaau

SEQ ID NO: 744353 - RNA, 23 nt, Human
uaaaaaauaaagaaaacacaaca

SEQ ID NO: 744354 - RNA, 18 nt, Human
uaaaacaaaacugaaacu

SEQ ID NO: 744355 - RNA, 19 nt, Human
uaaaacaaaacugaaacuc

SEQ ID NO: 744356 - RNA, 23 nt, Human
uaaaagaaagcgcacaaccaaaa

SEQ ID NO: 744357 - RNA, 23 nt, Human
uaaacucuauuaaccacuacauu

SEQ ID NO: 744358 - RNA, 22 nt, Human
uaaaggagaaaagcugcuguuu

SEQ ID NO: 744359 - RNA, 24 nt, Human
uaacaaacacaggagcaauugaga

SEQ ID NO: 744360 - RNA, 19 nt, Human
uaacaugauugcuaugugg

SEQ ID NO: 744361 - RNA, 25 nt, Human
uaaggcaagcucacuguaaacuccu

SEQ ID NO: 744362 - RNA, 23 nt, Human
uaagggaaggaggaagaaaggga

SEQ ID NO: 744363 - RNA, 21 nt, Human
uacaaagcugacugguaguuu

SEQ ID NO: 744364 - RNA, 24 nt, Human
uacacauuugauuacaaauaacau

SEQ ID NO: 744365 - RNA, 21 nt, Human
uaccaaaauuacugucacaaa

SEQ ID NO: 744366 - RNA, 21 nt, Human
uaccugccccaucuuggaagc

SEQ ID NO: 744367 - RNA, 22 nt, Human
uagaaacuagaccuguguucca

SEQ ID NO: 744368 - RNA, 19 nt, Human
uagcuucacaaaaugguaa

SEQ ID NO: 744369 - RNA, 23 nt, Human
uaucacacagcccagugaccaca

SEQ ID NO: 744370 - RNA, 24 nt, Human
uaucaguuaaaaaaaaaaaaaauc

SEQ ID NO: 744371 - RNA, 22 nt, Human
uauugagcugauugcugaagcu

SEQ ID NO: 744372 - RNA, 21 nt, Human
uauuuuacauacucccuaagu

SEQ ID NO: 744373 - RNA, 22 nt, Human
ucaaacuaugacuaauuaggca

SEQ ID NO: 744374 - RNA, 18 nt, Human
ucacaaaagcaggcucag

SEQ ID NO: 744375 - RNA, 24 nt, Human
ucacaauaacacaaaaugaaauaa

SEQ ID NO: 744376 - RNA, 24 nt, Human
ucagaacaaucucucuuccuuggu

SEQ ID NO: 744377 - RNA, 20 nt, Human
ucagcuggcaagccuugugu

SEQ ID NO: 744378 - RNA, 18 nt, Human
ucagugggccccugcaga

SEQ ID NO: 744379 - RNA, 22 nt, Human
ucaguuaaaaaaaaaaaaaauc

SEQ ID NO: 744380 - RNA, 24 nt, Human
uccaaaauggaaagggguagaggu

SEQ ID NO: 744381 - RNA, 18 nt, Human
uccacgggggcuugcugg

SEQ ID NO: 744382 - RNA, 24 nt, Human
uccccaguaccuucuacuugaccc

SEQ ID NO: 744383 - RNA, 18 nt, Human
ucccccagagaaaaaccu

SEQ ID NO: 744384 - RNA, 21 nt, Human
ucccccagagaaaaaccuucu

SEQ ID NO: 744385 - RNA, 18 nt, Human
uccuuuagaaacuagacc

SEQ ID NO: 744386 - RNA, 23 nt, Human
ucuccgcuucuucucucagggcc

SEQ ID NO: 744387 - RNA, 25 nt, Human
ucucucacauuaaguuaccagcaaa

SEQ ID NO: 744388 - RNA, 25 nt, Human
ucugccaacaugucuguucccucca

SEQ ID NO: 744389 - RNA, 18 nt, Human
ucugccuucucugccaac

SEQ ID NO: 744390 - RNA, 20 nt, Human
ugaagcaccaggauaaagag

SEQ ID NO: 744391 - RNA, 22 nt, Human
ugacaccaucucuaucuacaca

SEQ ID NO: 744392 - RNA, 22 nt, Human
ugacagaaauuauacaaacugc

SEQ ID NO: 744393 - RNA, 21 nt, Human
ugaccacauaucaauagcuuc

SEQ ID NO: 744394 - RNA, 19 nt, Human
ugaccaggcuccaugaaau

SEQ ID NO: 744395 - RNA, 18 nt, Human
ugacccagauccaugcag

SEQ ID NO: 744396 - RNA, 18 nt, Human
ugacccaggccagcugcu

SEQ ID NO: 744397 - RNA, 20 nt, Human
ugacuaagguaacaauacaa

SEQ ID NO: 744398 - RNA, 22 nt, Human
ugagacagguucccccagagaa

SEQ ID NO: 744399 - RNA, 20 nt, Human
ugagcugccuuuuaaacacu

SEQ ID NO: 744400 - RNA, 22 nt, Human
ugaggucaggucacugugaccc

SEQ ID NO: 744401 - RNA, 22 nt, Human
ugcaggcaaugccccugcucau

SEQ ID NO: 744402 - RNA, 21 nt, Human
ugccaguaucucauaauagac

SEQ ID NO: 744403 - RNA, 20 nt, Human
ugcugaaaacacaacucaau

SEQ ID NO: 744404 - RNA, 19 nt, Human
ugcuucagugggccccugc

SEQ ID NO: 744405 - RNA, 19 nt, Human
uggaaagggguagaggugg

SEQ ID NO: 744406 - RNA, 23 nt, Human
uggaauggaucugucugagugca

SEQ ID NO: 744407 - RNA, 24 nt, Human
uggaggacaauggaugagcaauca

SEQ ID NO: 744408 - RNA, 21 nt, Human
uggaguucuuauuccuggggu

SEQ ID NO: 744409 - RNA, 19 nt, Human
uggcaaaaaggagacacaa

SEQ ID NO: 744410 - RNA, 20 nt, Human
uggcaaaaaggagacacaaa

SEQ ID NO: 744411 - RNA, 21 nt, Human
uggcuaagaaauuucaagagg

SEQ ID NO: 744412 - RNA, 19 nt, Human
uggcuaagggcagucaagc

SEQ ID NO: 744413 - RNA, 18 nt, Human
ugggaaaaggaaaaaaaa

SEQ ID NO: 744414 - RNA, 20 nt, Human
ugguaagcaauacaacaggc

SEQ ID NO: 744415 - RNA, 22 nt, Human
ugguaagcaauacaacaggcuc

SEQ ID NO: 744416 - RNA, 22 nt, Human
uguaaaaccaaagacaaacauu

SEQ ID NO: 744417 - RNA, 22 nt, Human
ugucugagugcaaaucugggug

SEQ ID NO: 744418 - RNA, 21 nt, Human
ugugaaauauaacgaaucuga

SEQ ID NO: 744419 - RNA, 22 nt, Human
ugugcaaaacaauuccaagggu

SEQ ID NO: 744420 - RNA, 20 nt, Human
uguggaaaauccaaaaggug

SEQ ID NO: 744421 - RNA, 19 nt, Human
uuaaguuaccagcaaaugg

SEQ ID NO: 744422 - RNA, 23 nt, Human
uuagcaacaaacaaccauguaga

SEQ ID NO: 744423 - RNA, 19 nt, Human
uucagcugagcacugaaaa

SEQ ID NO: 744424 - RNA, 22 nt, Human
uuuagagggguaauucucuuau

SEQ ID NO: 744425 - RNA, 18 nt, Human
uuucaacuccuucuauca

SEQ ID NO: 744426 - RNA, 18 nt, Human
uuugcaaaaauaacaauu

SEQ ID NO: 744427 - RNA, 25 nt, Human
uuugguuuaaauacaauggagacau

SEQ ID NO: 744428 - RNA, 24 nt, Human
acugcaagaaguaccaguacgggg

SEQ ID NO: 744429 - RNA, 18 nt, Human
agguccuucgugggaggg

SEQ ID NO: 744430 - RNA, 19 nt, Human
caccagcucacuuguccug

SEQ ID NO: 744431 - RNA, 21 nt, Human
cacuguccuccuccguugcag

SEQ ID NO: 744432 - RNA, 19 nt, Human
cacuuggaccugcugggag

SEQ ID NO: 744433 - RNA, 21 nt, Human
cagcccccuugugguguguga

SEQ ID NO: 744434 - RNA, 20 nt, Human
cagcucacuuguccuggggc

SEQ ID NO: 744435 - RNA, 24 nt, Human
cagggaccagaugccccagccccc

SEQ ID NO: 744436 - RNA, 19 nt, Human
caucgucucacuguccucc

SEQ ID NO: 744437 - RNA, 21 nt, Human
ccacccccuuccugggagcag

SEQ ID NO: 744438 - RNA, 18 nt, Human
cccccaaucagcaccgug

SEQ ID NO: 744439 - RNA, 18 nt, Human
ccugugacacgcugcggc

SEQ ID NO: 744440 - RNA, 19 nt, Human
ccugugacacgcugcggcu

SEQ ID NO: 744441 - RNA, 20 nt, Human
ccugugacacgcugcggcug

SEQ ID NO: 744442 - RNA, 21 nt, Human
ccugugacacgcugcggcugu

SEQ ID NO: 744443 - RNA, 19 nt, Human
cgucucuucuuucagagca

SEQ ID NO: 744444 - RNA, 24 nt, Human
cgugaaggugacacgcaaaggugg

SEQ ID NO: 744445 - RNA, 22 nt, Human
cuggaagucccgugaaggugac

SEQ ID NO: 744446 - RNA, 21 nt, Human
cuggcucuucccccaggcagg

SEQ ID NO: 744447 - RNA, 21 nt, Human
cuggugcgcuccacccuggac

SEQ ID NO: 744448 - RNA, 19 nt, Human
cuugaucagguguuugcac

SEQ ID NO: 744449 - RNA, 22 nt, Human
gacauacagauguaaccucggu

SEQ ID NO: 744450 - RNA, 19 nt, Human
gagcagcgagcagugcccc

SEQ ID NO: 744451 - RNA, 21 nt, Human
gagcagcgagcagugccccag

SEQ ID NO: 744452 - RNA, 24 nt, Human
gcaugguggcagguccuucguggg

SEQ ID NO: 744453 - RNA, 18 nt, Human
gcucuggcugaggcuggu

SEQ ID NO: 744454 - RNA, 20 nt, Human
gcugcucuggcugaggcugg

SEQ ID NO: 744455 - RNA, 25 nt, Human
ggccuaguguguguccucaccaaca

SEQ ID NO: 744456 - RNA, 18 nt, Human
ggcugcucuggcugaggc

SEQ ID NO: 744457 - RNA, 22 nt, Human
ggcuguuccucagggccuggcu

SEQ ID NO: 744458 - RNA, 20 nt, Human
gggaggguugccacauaugu

SEQ ID NO: 744459 - RNA, 24 nt, Human
gggcuucaaccagcuucccuuccu

SEQ ID NO: 744460 - RNA, 24 nt, Human
gucguggcugcucuggcugaggcu

SEQ ID NO: 744461 - RNA, 25 nt, Human
uaaaaauaaaaucuuuaaaucucuc

SEQ ID NO: 744462 - RNA, 21 nt, Human
uaaaaucuuuaaaucucucga

SEQ ID NO: 744463 - RNA, 21 nt, Human
uagacauacagauguaaccuc

SEQ ID NO: 744464 - RNA, 22 nt, Human
ucaaggaaggguuucugaggug

SEQ ID NO: 744465 - RNA, 19 nt, Human
ucagagcaucggccuaugg

SEQ ID NO: 744466 - RNA, 18 nt, Human
ucagguagccaacccgcc

SEQ ID NO: 744467 - RNA, 20 nt, Human
ucagguagccaacccgcccg

SEQ ID NO: 744468 - RNA, 26 nt, Human
uccuccuucagcaucugccucucaaa

SEQ ID NO: 744469 - RNA, 18 nt, Human
uccuucagcaucugccuc

SEQ ID NO: 744470 - RNA, 19 nt, Human
ucgcagguuccugccuguc

SEQ ID NO: 744471 - RNA, 23 nt, Human
ucucacuguccuccuccguugca

SEQ ID NO: 744472 - RNA, 20 nt, Human
ucuccggccucgccauaauu

SEQ ID NO: 744473 - RNA, 22 nt, Human
ucucgagccccacgucucuucu

SEQ ID NO: 744474 - RNA, 24 nt, Human
ucucucgagccccacgucucuucu

SEQ ID NO: 744475 - RNA, 21 nt, Human
ugacaccagcucacuuguccu

SEQ ID NO: 744476 - RNA, 22 nt, Human
ugccccagcccccuuguggugu

SEQ ID NO: 744477 - RNA, 18 nt, Human
uggcuggagcugcacuug

SEQ ID NO: 744478 - RNA, 22 nt, Human
uguagagguugaaggccuucuu

SEQ ID NO: 744479 - RNA, 24 nt, Human
ugucaaggaaggguuucugaggug

SEQ ID NO: 744480 - RNA, 24 nt, Human
uguccuggggcucccacagagcac

SEQ ID NO: 744481 - RNA, 19 nt, Human
ugucguggcugcucuggcu

SEQ ID NO: 744482 - RNA, 20 nt, Human
ugucguggcugcucuggcug

SEQ ID NO: 744483 - RNA, 20 nt, Human
uguguccucaccaacaccuu

SEQ ID NO: 744484 - RNA, 19 nt, Human
uguuccagcugugcuccca

SEQ ID NO: 744485 - RNA, 24 nt, Human
uucagcaucugccucucaaacagg

SEQ ID NO: 744486 - RNA, 21 nt, Human
uugaaggccuucuucagguag

SEQ ID NO: 744487 - RNA, 21 nt, Human
uuugcucaucucuccguuccc

SEQ ID NO: 744488 - RNA, 24 nt, Human
uuuuuuuuuuuuuuucuugauugg

SEQ ID NO: 744489 - RNA, 26 nt, Human
uuuuuuuuuuuuuuuuuuucuugggg

SEQ ID NO: 744490 - RNA, 21 nt, Human
aaaagaucuuaaaucaguaag

SEQ ID NO: 744491 - RNA, 21 nt, Human
aaacacacagcaucauggagc

SEQ ID NO: 744492 - RNA, 23 nt, Human
aaagguccaaaaucagucuaagg

SEQ ID NO: 744493 - RNA, 23 nt, Human
aaccugccaacaagaaucguuua

SEQ ID NO: 744494 - RNA, 18 nt, Human
aagaaucguuuauuagca

SEQ ID NO: 744495 - RNA, 21 nt, Human
acacagcaucuucuccuuucc

SEQ ID NO: 744496 - RNA, 21 nt, Human
acagcggcggagcgcggcgga

SEQ ID NO: 744497 - RNA, 22 nt, Human
accgccgccaccgcugccgccc

SEQ ID NO: 744498 - RNA, 23 nt, Human
accgccgccaccgcugccgcccu

SEQ ID NO: 744499 - RNA, 22 nt, Human
acgauaucauacaaagggagcc

SEQ ID NO: 744500 - RNA, 18 nt, Human
acgcgggcggugcuccgg

SEQ ID NO: 744501 - RNA, 22 nt, Human
agacaagaaaguaacaccaaaa

SEQ ID NO: 744502 - RNA, 23 nt, Human
agacaagaaaguaacaccaaaac

SEQ ID NO: 744503 - RNA, 20 nt, Human
aggaacacaccgaaaaucaa

SEQ ID NO: 744504 - RNA, 19 nt, Human
aggcaccgugggggaggcc

SEQ ID NO: 744505 - RNA, 27 nt, Human
aucacauucagauuguuccaucugauu

SEQ ID NO: 744506 - RNA, 25 nt, Human
cacaucuugauuucuauuacuuuuu

SEQ ID NO: 744507 - RNA, 23 nt, Human
cacccgccacccuugcaggacuc

SEQ ID NO: 744508 - RNA, 19 nt, Human
caccuuugaaaagccuccc

SEQ ID NO: 744509 - RNA, 27 nt, Human
cagccacccgccacccuugcaggacuc

SEQ ID NO: 744510 - RNA, 24 nt, Human
caggauuccagaaggcucccagug

SEQ ID NO: 744511 - RNA, 21 nt, Human
cauuaaagugaccucaccaua

SEQ ID NO: 744512 - RNA, 20 nt, Human
ccagaaggcucccagugaag

SEQ ID NO: 744513 - RNA, 22 nt, Human
ccagugguggugugaccucagc

SEQ ID NO: 744514 - RNA, 18 nt, Human
cccauaaauauaauuaag

SEQ ID NO: 744515 - RNA, 21 nt, Human
cccauaaauauaauuaagugu

SEQ ID NO: 744516 - RNA, 18 nt, Human
ccgccgccaccgcugccg

SEQ ID NO: 744517 - RNA, 22 nt, Human
ccgccgccaccgcugccgcccu

SEQ ID NO: 744518 - RNA, 21 nt, Human
ccggcggaggacagcggcgga

SEQ ID NO: 744519 - RNA, 18 nt, Human
ccucagccacccgccacc

SEQ ID NO: 744520 - RNA, 19 nt, Human
cgagucaggcgcuggcuac

SEQ ID NO: 744521 - RNA, 22 nt, Human
cgcgucaaggcugaaccaaaau

SEQ ID NO: 744522 - RNA, 22 nt, Human
cggcggagcgcggcggacggaa

SEQ ID NO: 744523 - RNA, 19 nt, Human
cuaccgccgccaccgcugc

SEQ ID NO: 744524 - RNA, 20 nt, Human
cuaccgccgccaccgcugcc

SEQ ID NO: 744525 - RNA, 24 nt, Human
cuaccgccgccaccgcugccgccc

SEQ ID NO: 744526 - RNA, 23 nt, Human
cucagauacacauuuuauuucau

SEQ ID NO: 744527 - RNA, 23 nt, Human
gcugacccaucguccucccacgc

SEQ ID NO: 744528 - RNA, 22 nt, Human
gcugugaugaagagcaauuggc

SEQ ID NO: 744529 - RNA, 20 nt, Human
ggaauggcuguccauguggg

SEQ ID NO: 744530 - RNA, 22 nt, Human
ggcugguagcucgugccucacc

SEQ ID NO: 744531 - RNA, 21 nt, Human
gggaauggcuguccauguggg

SEQ ID NO: 744532 - RNA, 24 nt, Human
gggcauccaacaucccugcuccuu

SEQ ID NO: 744533 - RNA, 23 nt, Human
guggugugaccucagccacccgc

SEQ ID NO: 744534 - RNA, 18 nt, Human
uaaaagacagauagcugu

SEQ ID NO: 744535 - RNA, 23 nt, Human
uaacaaagccaccuuugaaaagc

SEQ ID NO: 744536 - RNA, 21 nt, Human
uacuuguuuucucacucagau

SEQ ID NO: 744537 - RNA, 23 nt, Human
uaugugguaaaagucucaaaggu

SEQ ID NO: 744538 - RNA, 22 nt, Human
ucaaaagaucuuaaaucaguaa

SEQ ID NO: 744539 - RNA, 20 nt, Human
ucaguaaguaguuucaucca

SEQ ID NO: 744540 - RNA, 26 nt, Human
ucauggacugugacccucugugaagu

SEQ ID NO: 744541 - RNA, 19 nt, Human
uccaaaaucagucuaaggc

SEQ ID NO: 744542 - RNA, 21 nt, Human
ucccauuaaccugccaacaag

SEQ ID NO: 744543 - RNA, 19 nt, Human
ucugaacucuugacaggug

SEQ ID NO: 744544 - RNA, 23 nt, Human
ucugcaauucucuggccucuguu

SEQ ID NO: 744545 - RNA, 20 nt, Human
ugaaacauuaaagugaccuc

SEQ ID NO: 744546 - RNA, 24 nt, Human
ugaacucuugacaggugggcaucc

SEQ ID NO: 744547 - RNA, 23 nt, Human
ugccucaccaagaguuuagcaac

SEQ ID NO: 744548 - RNA, 22 nt, Human
ugggcuccagcauuuauagucc

SEQ ID NO: 744549 - RNA, 20 nt, Human
ugggggaggccuaugucacu

SEQ ID NO: 744550 - RNA, 22 nt, Human
uggucagaucauggacugugac

SEQ ID NO: 744551 - RNA, 21 nt, Human
uguuggacaaacgcgucaagg

SEQ ID NO: 744552 - RNA, 18 nt, Human
uucaucaacacaucuuga

SEQ ID NO: 744553 - RNA, 22 nt, Human
uuccuggcuaugcagacuccuu

SEQ ID NO: 744554 - RNA, 22 nt, Human
uuccuggcuaugcagacuccuu

SEQ ID NO: 744555 - RNA, 19 nt, Human
aaacaaaaaaauagguaug

SEQ ID NO: 744556 - RNA, 25 nt, Human
aaacauaggcaugacaacuaaaaac

SEQ ID NO: 744557 - RNA, 24 nt, Human
aaagugcugggauuacaggcguga

SEQ ID NO: 744558 - RNA, 19 nt, Human
aaccacauguggcuacuga

SEQ ID NO: 744559 - RNA, 25 nt, Human
aaccagcccacauccuaauacacac

SEQ ID NO: 744560 - RNA, 21 nt, Human
aagaagaaaaaguuaagcaug

SEQ ID NO: 744561 - RNA, 20 nt, Human
aagauuaaaacuacagcuau

SEQ ID NO: 744562 - RNA, 19 nt, Human
aagcaugacagcauagcau

SEQ ID NO: 744563 - RNA, 23 nt, Human
aagucaaccuaaauuggaguugu

SEQ ID NO: 744564 - RNA, 19 nt, Human
aagugcugggauuacaggc

SEQ ID NO: 744565 - RNA, 19 nt, Human
aagugcugggauuacaggc

SEQ ID NO: 744566 - RNA, 26 nt, Human
aagugcugggauuacaggcgugagcc

SEQ ID NO: 744567 - RNA, 19 nt, Human
aaguggcugggauuacagg

SEQ ID NO: 744568 - RNA, 23 nt, Human
acacacacacacacacacacaca

SEQ ID NO: 744569 - RNA, 23 nt, Human
acacacacacacacacacacaca

SEQ ID NO: 744570 - RNA, 23 nt, Human
acacacacacacacacacacaca

SEQ ID NO: 744571 - RNA, 22 nt, Human
acagaguguuacucugucaccc

SEQ ID NO: 744572 - RNA, 21 nt, Human
accacaagaggaaacaaaaua

SEQ ID NO: 744573 - RNA, 24 nt, Human
acccaggcuggagugcaauggcau

SEQ ID NO: 744574 - RNA, 33 nt, Human
acccccagguauacacacacacacacacacagu

SEQ ID NO: 744575 - RNA, 25 nt, Human
acucgccucggccucccaaagugcu

SEQ ID NO: 744576 - RNA, 18 nt, Human
acucugucacccaggcug

SEQ ID NO: 744577 - RNA, 20 nt, Human
acucugucacccaggcugga

SEQ ID NO: 744578 - RNA, 27 nt, Human
acucugucacccaggcuggagugcaau

SEQ ID NO: 744579 - RNA, 21 nt, Human
acugagcaucugaaauguggc

SEQ ID NO: 744580 - RNA, 22 nt, Human
aggaaauccacucgccucggcc

SEQ ID NO: 744581 - RNA, 24 nt, Human
aggaaauccacucgccucggccuc

SEQ ID NO: 744582 - RNA, 18 nt, Human
aggugcccgccaccaagc

SEQ ID NO: 744583 - RNA, 19 nt, Human
aggugguagaaaagcaaac

SEQ ID NO: 744584 - RNA, 24 nt, Human
agugcaauggcaugaucuuggcuc

SEQ ID NO: 744585 - RNA, 18 nt, Human
agugcugggauuacaggc

SEQ ID NO: 744586 - RNA, 24 nt, Human
auauuucauuacuguucuguucuu

SEQ ID NO: 744587 - RNA, 22 nt, Human
aucaagcugcuacuagaaaaau

SEQ ID NO: 744588 - RNA, 19 nt, Human
auguucaugauuuucagca

SEQ ID NO: 744589 - RNA, 22 nt, Human
auuacaggugcccgccaccaag

SEQ ID NO: 744590 - RNA, 21 nt, Human
auucuccugccucagccuccc

SEQ ID NO: 744591 - RNA, 26 nt, Human
auuuuucuuuuuuuuuuuucugaaau

SEQ ID NO: 744592 - RNA, 24 nt, Human
auuuuuguauuuuuaguagagaug

SEQ ID NO: 744593 - RNA, 28 nt, Human
caaaauuucuaaaguuccugugucacac

SEQ ID NO: 744594 - RNA, 24 nt, Human
caaagugcugggauuacaggcgug

SEQ ID NO: 744595 - RNA, 22 nt, Human
caagcaauucuccugccucagc

SEQ ID NO: 744596 - RNA, 27 nt, Human
caagcaauucuccugccucagccuccc

SEQ ID NO: 744597 - RNA, 25 nt, Human
caauacagaguucuauacaacaaga

SEQ ID NO: 744598 - RNA, 20 nt, Human
cacacacacacacacacaca

SEQ ID NO: 744599 - RNA, 20 nt, Human
cacacacacacacacacaca

SEQ ID NO: 744600 - RNA, 20 nt, Human
cacacacacacacacacaca

SEQ ID NO: 744601 - RNA, 20 nt, Human
cacacacacacacacacaca

SEQ ID NO: 744602 - RNA, 20 nt, Human
cacacacacacacacacaca

SEQ ID NO: 744603 - RNA, 20 nt, Human
cacacacacacacacacaca

SEQ ID NO: 744604 - RNA, 20 nt, Human
cacacacacacacacacaca

SEQ ID NO: 744605 - RNA, 22 nt, Human
cacacacacacacacacacaca

SEQ ID NO: 744606 - RNA, 22 nt, Human
cacacacacacacacacacaca

SEQ ID NO: 744607 - RNA, 22 nt, Human
cacacacacacacacacacaca

SEQ ID NO: 744608 - RNA, 22 nt, Human
cacacacacacacacacacaca

SEQ ID NO: 744609 - RNA, 22 nt, Human
cacacacacacacacacacaca

SEQ ID NO: 744610 - RNA, 26 nt, Human
cacacacacacacacacacacacaca

SEQ ID NO: 744611 - RNA, 26 nt, Human
cacacacacacacacacacacacaca

SEQ ID NO: 744612 - RNA, 29 nt, Human
cacacacacacacacacacacacacuuca

SEQ ID NO: 744613 - RNA, 25 nt, Human
cacaggauuucaaagauaauacaaa

SEQ ID NO: 744614 - RNA, 18 nt, Human
cacauguggcuacugagc

SEQ ID NO: 744615 - RNA, 21 nt, Human
cacauugcucaggcuggucuc

SEQ ID NO: 744616 - RNA, 24 nt, Human
cacauugcucaggcuggucucaaa

SEQ ID NO: 744617 - RNA, 24 nt, Human
caccaagcccagauaauuuuugua

SEQ ID NO: 744618 - RNA, 27 nt, Human
caccacauugcucaggcuggucucaaa

SEQ ID NO: 744619 - RNA, 31 nt, Human
cacccccagguauacacacacacacacagug

SEQ ID NO: 744620 - RNA, 23 nt, Human
cagccuccaccucccggguucaa

SEQ ID NO: 744621 - RNA, 19 nt, Human
caggugcccgccaccaagc

SEQ ID NO: 744622 - RNA, 18 nt, Human
cauucacuuuccuauguu

SEQ ID NO: 744623 - RNA, 22 nt, Human
ccaaagugcugggauuacaggc

SEQ ID NO: 744624 - RNA, 22 nt, Human
ccaaagugcugggauuacaggc

SEQ ID NO: 744625 - RNA, 24 nt, Human
ccaaagugcugggauuacaggcgu

SEQ ID NO: 744626 - RNA, 20 nt, Human
ccaaauaauacuucaaaaaa

SEQ ID NO: 744627 - RNA, 21 nt, Human
ccaaguggcugggauuacagg

SEQ ID NO: 744628 - RNA, 27 nt, Human
ccaccucccggguucaagcaauucuuu

SEQ ID NO: 744629 - RNA, 19 nt, Human
ccagcccacauccuaauac

SEQ ID NO: 744630 - RNA, 23 nt, Human
cccaaguggcugggauuacaggu

SEQ ID NO: 744631 - RNA, 24 nt, Human
cccaaguggcugggauuacaggug

SEQ ID NO: 744632 - RNA, 18 nt, Human
cccacauccuaauacaca

SEQ ID NO: 744633 - RNA, 19 nt, Human
cccacccccagguauacac

SEQ ID NO: 744634 - RNA, 24 nt, Human
cccacccccagguauacacacaca

SEQ ID NO: 744635 - RNA, 30 nt, Human
cccagguauacacacacacacacacacaca

SEQ ID NO: 744636 - RNA, 23 nt, Human
cccggguucaagcaauucuccug

SEQ ID NO: 744637 - RNA, 18 nt, Human
ccgcagccuccaccuccc

SEQ ID NO: 744638 - RNA, 23 nt, Human
ccgcagccuccaccucccggguu

SEQ ID NO: 744639 - RNA, 24 nt, Human
ccgcagccuccaccucccggguuc

SEQ ID NO: 744640 - RNA, 24 nt, Human
ccucccggguucaagcaauucucc

SEQ ID NO: 744641 - RNA, 23 nt, Human
ccugccucagccucccaaguggc

SEQ ID NO: 744642 - RNA, 24 nt, Human
cgccucggccucccaaagugcugg

SEQ ID NO: 744643 - RNA, 19 nt, Human
cguaaguagauaaaagcua

SEQ ID NO: 744644 - RNA, 24 nt, Human
cuacugagcaucugaaauguggcu

SEQ ID NO: 744645 - RNA, 20 nt, Human
cuaugggacagcacuccucu

SEQ ID NO: 744646 - RNA, 24 nt, Human
cucaccgcagccuccaccucccgg

SEQ ID NO: 744647 - RNA, 24 nt, Human
cucagccucccaaguggcugggau

SEQ ID NO: 744648 - RNA, 23 nt, Human
cucuccugcucuuucagccuuag

SEQ ID NO: 744649 - RNA, 22 nt, Human
cugaaauguggcuaguguaaau

SEQ ID NO: 744650 - RNA, 23 nt, Human
cugccucagccucccaaguggcu

SEQ ID NO: 744651 - RNA, 24 nt, Human
cuggagugcaauggcaugaucuug

SEQ ID NO: 744652 - RNA, 19 nt, Human
cuugacaacagacaguaga

SEQ ID NO: 744653 - RNA, 18 nt, Human
gaaaagcaaaccagccca

SEQ ID NO: 744654 - RNA, 20 nt, Human
gaaaagcaaaccagcccaca

SEQ ID NO: 744655 - RNA, 23 nt, Human
gacagcacuccucuagagcuacu

SEQ ID NO: 744656 - RNA, 20 nt, Human
gagaugggguuucaccacau

SEQ ID NO: 744657 - RNA, 23 nt, Human
gagaugggguuucaccacauugc

SEQ ID NO: 744658 - RNA, 20 nt, Human
gaucauucacuuuccuaugu

SEQ ID NO: 744659 - RNA, 18 nt, Human
gauuacaggcgugagcca

SEQ ID NO: 744660 - RNA, 22 nt, Human
gauuacaggcgugagccacugc

SEQ ID NO: 744661 - RNA, 23 nt, Human
gauuacaggcgugagccacugca

SEQ ID NO: 744662 - RNA, 18 nt, Human
gauuacaggugcccgcca

SEQ ID NO: 744663 - RNA, 18 nt, Human
gcauuuuggggaacuggu

SEQ ID NO: 744664 - RNA, 24 nt, Human
gccucagccucccaaguggcuggg

SEQ ID NO: 744665 - RNA, 23 nt, Human
gcucaggcuggucucaaacuccu

SEQ ID NO: 744666 - RNA, 19 nt, Human
gcuggagugcaauggcaug

SEQ ID NO: 744667 - RNA, 24 nt, Human
ggaaauccacucgccucggccucc

SEQ ID NO: 744668 - RNA, 23 nt, Human
ggcuggucucaaacuccugaccu

SEQ ID NO: 744669 - RNA, 22 nt, Human
ggugcccgccaccaagcccaga

SEQ ID NO: 744670 - RNA, 22 nt, Human
uaaaaagggcauaauucagaua

SEQ ID NO: 744671 - RNA, 19 nt, Human
uaaaagcuagguauuuaau

SEQ ID NO: 744672 - RNA, 21 nt, Human
uaaacauaggcaugacaacua

SEQ ID NO: 744673 - RNA, 24 nt, Human
uaauauuuuggacauacuggggua

SEQ ID NO: 744674 - RNA, 24 nt, Human
uaauuuuuguauuuuuaguagaga

SEQ ID NO: 744675 - RNA, 24 nt, Human
uacaaacaaaaaaauagguaugua

SEQ ID NO: 744676 - RNA, 20 nt, Human
uacacacacacacacacaca

SEQ ID NO: 744677 - RNA, 25 nt, Human
uacacacacacacacacacacacac

SEQ ID NO: 744678 - RNA, 20 nt, Human
uacacacuaaaaagggcaua

SEQ ID NO: 744679 - RNA, 19 nt, Human
uacaggcgugagccacugc

SEQ ID NO: 744680 - RNA, 23 nt, Human
uacaggcgugagccacugcaccc

SEQ ID NO: 744681 - RNA, 18 nt, Human
uacgcuucuccaggucuu

SEQ ID NO: 744682 - RNA, 24 nt, Human
uacucugucacccaggcuggagug

SEQ ID NO: 744683 - RNA, 25 nt, Human
uacuucaaaaaacuauauuuuaaaa

SEQ ID NO: 744684 - RNA, 21 nt, Human
uagaaaaagagcacugcccac

SEQ ID NO: 744685 - RNA, 20 nt, Human
uagaaaagcaaaccagccca

SEQ ID NO: 744686 - RNA, 19 nt, Human
uagaagaaaaagaguggua

SEQ ID NO: 744687 - RNA, 18 nt, Human
uagagcuacuguugauau

SEQ ID NO: 744688 - RNA, 19 nt, Human
uaguagagaugggguuuca

SEQ ID NO: 744689 - RNA, 23 nt, Human
uaguagagaugggguuucaccac

SEQ ID NO: 744690 - RNA, 25 nt, Human
uaguagagaugggguuucaccacau

SEQ ID NO: 744691 - RNA, 22 nt, Human
uauacaaaacucugcauauagc

SEQ ID NO: 744692 - RNA, 25 nt, Human
uauacacacacacacacacacacac

SEQ ID NO: 744693 - RNA, 21 nt, Human
uauuauaagaagacuagaccu

SEQ ID NO: 744694 - RNA, 21 nt, Human
ucaccacauugcucaggcugg

SEQ ID NO: 744695 - RNA, 18 nt, Human
ucacccaggcuggagugc

SEQ ID NO: 744696 - RNA, 24 nt, Human
ucaccgcagccuccaccucccggg

SEQ ID NO: 744697 - RNA, 24 nt, Human
ucccaaagugcugggauuacaggc

SEQ ID NO: 744698 - RNA, 23 nt, Human
ucccaaguggcugggauuacagg

SEQ ID NO: 744699 - RNA, 24 nt, Human
ucccaaguggcugggauuacaggu

SEQ ID NO: 744700 - RNA, 21 nt, Human
ucccggguucaagcaauucuc

SEQ ID NO: 744701 - RNA, 24 nt, Human
ucccggguucaagcaauucuccug

SEQ ID NO: 744702 - RNA, 20 nt, Human
uccuaaacacugacuuucca

SEQ ID NO: 744703 - RNA, 20 nt, Human
uccucuagagcuacuguuga

SEQ ID NO: 744704 - RNA, 24 nt, Human
ucgccucggccucccaaagugcug

SEQ ID NO: 744705 - RNA, 22 nt, Human
ucuaaaguuccugugucacacu

SEQ ID NO: 744706 - RNA, 23 nt, Human
ucuagcaaccacauguggcuacu

SEQ ID NO: 744707 - RNA, 26 nt, Human
ucuccugccucagccucccaaguggc

SEQ ID NO: 744708 - RNA, 24 nt, Human
ucucguauacgcuucuccaggucu

SEQ ID NO: 744709 - RNA, 24 nt, Human
ucugucacccaggcuggagugcaa

SEQ ID NO: 744710 - RNA, 20 nt, Human
ugaaaguacauauccauuga

SEQ ID NO: 744711 - RNA, 22 nt, Human
ugacagagguagaauuuguguc

SEQ ID NO: 744712 - RNA, 18 nt, Human
ugacagcauagcaucaaa

SEQ ID NO: 744713 - RNA, 21 nt, Human
ugacuuuccaaauaauacuuc

SEQ ID NO: 744714 - RNA, 22 nt, Human
ugcccacccccagguauacaca

SEQ ID NO: 744715 - RNA, 24 nt, Human
ugccucagccucccaaguggcugg

SEQ ID NO: 744716 - RNA, 21 nt, Human
ugcugaagaaagucaaccuaa

SEQ ID NO: 744717 - RNA, 24 nt, Human
ugcugggauuacaggcgugagcca

SEQ ID NO: 744718 - RNA, 19 nt, Human
uggagugcaauggcaugau

SEQ ID NO: 744719 - RNA, 24 nt, Human
uggagugcaauggcaugaucuugg

SEQ ID NO: 744720 - RNA, 20 nt, Human
uggcugggauuacaggugcc

SEQ ID NO: 744721 - RNA, 18 nt, Human
ugggauuacaggcgugag

SEQ ID NO: 744722 - RNA, 19 nt, Human
ugggauuacaggcgugagc

SEQ ID NO: 744723 - RNA, 21 nt, Human
ugggauuacaggcgugagcca

SEQ ID NO: 744724 - RNA, 22 nt, Human
ugggauuacaggcgugagccac

SEQ ID NO: 744725 - RNA, 22 nt, Human
ugggauuacaggcgugagccac

SEQ ID NO: 744726 - RNA, 24 nt, Human
ugggauuacaggcgugagccacug

SEQ ID NO: 744727 - RNA, 26 nt, Human
ugggauuacaggcgugagccacugca

SEQ ID NO: 744728 - RNA, 21 nt, Human
ugggauuacaggugcccgcca

SEQ ID NO: 744729 - RNA, 22 nt, Human
ugggauuacaggugcccgccac

SEQ ID NO: 744730 - RNA, 24 nt, Human
ugggauuacaggugcccgccacca

SEQ ID NO: 744731 - RNA, 18 nt, Human
uggggaacugguaaauua

SEQ ID NO: 744732 - RNA, 24 nt, Human
ugggguuucaccacauugcucagg

SEQ ID NO: 744733 - RNA, 19 nt, Human
ugguauugcaaacaguccc

SEQ ID NO: 744734 - RNA, 19 nt, Human
uguagcccaggcaacucug

SEQ ID NO: 744735 - RNA, 21 nt, Human
uguauuuuuaguagagauggg

SEQ ID NO: 744736 - RNA, 19 nt, Human
ugucacacugcauggaacu

SEQ ID NO: 744737 - RNA, 20 nt, Human
ugucacccaggcuggagugc

SEQ ID NO: 744738 - RNA, 22 nt, Human
ugucacccaggcuggagugcaa

SEQ ID NO: 744739 - RNA, 19 nt, Human
ugugcaguguaaugaaagu

SEQ ID NO: 744740 - RNA, 22 nt, Human
uguguuacauagaguccauaug

SEQ ID NO: 744741 - RNA, 24 nt, Human
uguuacucugucacccaggcugga

SEQ ID NO: 744742 - RNA, 23 nt, Human
uuacauauauggcucauaucaua

SEQ ID NO: 744743 - RNA, 22 nt, Human
uuacucugucacccaggcugga

SEQ ID NO: 744744 - RNA, 24 nt, Human
uuacucugucacccaggcuggagu

SEQ ID NO: 744745 - RNA, 18 nt, Human
uuaguagagaugggguuu

SEQ ID NO: 744746 - RNA, 22 nt, Human
uuaguagagaugggguuucacc

SEQ ID NO: 744747 - RNA, 24 nt, Human
uuaguagagaugggguuucaccac

SEQ ID NO: 744748 - RNA, 25 nt, Human
uuaguagagaugggguuucaccaca

SEQ ID NO: 744749 - RNA, 23 nt, Human
uuauuuuuuuaaaucaagcugcu

SEQ ID NO: 744750 - RNA, 21 nt, Human
uucaagcaauucuccugccuc

SEQ ID NO: 744751 - RNA, 24 nt, Human
uucaagcaauucuccugccucagc

SEQ ID NO: 744752 - RNA, 20 nt, Human
uucaugauuuucagcaacaa

SEQ ID NO: 744753 - RNA, 18 nt, Human
uucuuuuuuuuuuuucug

SEQ ID NO: 744754 - RNA, 19 nt, Human
uuggaguuguaauuuauga

SEQ ID NO: 744755 - RNA, 23 nt, Human
uuguauuuuuaguagagaugggg

SEQ ID NO: 744756 - RNA, 23 nt, Human
uuuaacauauucacugauuuaaa

SEQ ID NO: 744757 - RNA, 23 nt, Human
uuuuggacauacugggguaaaua

SEQ ID NO: 744758 - RNA, 24 nt, Human
uuuuuaguagagaugggguuucac

SEQ ID NO: 744759 - RNA, 20 nt, Human
uuuuuguauuuuuaguagag

SEQ ID NO: 744760 - RNA, 20 nt, Human
uuuuuuuuucugagacagag

SEQ ID NO: 744761 - RNA, 24 nt, Human
aaaaaaaucuaaacacuaaggcua

SEQ ID NO: 744762 - RNA, 22 nt, Human
aaaaagccuacagaauaaaaug

SEQ ID NO: 744763 - RNA, 22 nt, Human
aaacaaauuacuaacccaaaac

SEQ ID NO: 744764 - RNA, 21 nt, Human
aaacacucaugguguagacaa

SEQ ID NO: 744765 - RNA, 22 nt, Human
aaacagcugggguaucucugag

SEQ ID NO: 744766 - RNA, 19 nt, Human
aagcaaugcuucacuaaaa

SEQ ID NO: 744767 - RNA, 20 nt, Human
aagccaucucuucuaaaaaa

SEQ ID NO: 744768 - RNA, 21 nt, Human
acaaaacaacuuuucuaaaag

SEQ ID NO: 744769 - RNA, 18 nt, Human
acaaagggaucacauuuc

SEQ ID NO: 744770 - RNA, 18 nt, Human
acaggcugcuaacgcugg

SEQ ID NO: 744771 - RNA, 18 nt, Human
accccgcgaaacuuggcc

SEQ ID NO: 744772 - RNA, 21 nt, Human
acgucucugucguaguaaaca

SEQ ID NO: 744773 - RNA, 24 nt, Human
acguggagacacuguggugagcug

SEQ ID NO: 744774 - RNA, 18 nt, Human
acuaaaauacaguaccug

SEQ ID NO: 744775 - RNA, 18 nt, Human
acuggaauauaacaagcu

SEQ ID NO: 744776 - RNA, 22 nt, Human
agaauauuuaauuggcuuaaaa

SEQ ID NO: 744777 - RNA, 22 nt, Human
agaccugguacaggcugcuaac

SEQ ID NO: 744778 - RNA, 18 nt, Human
agagacgugcuucugguc

SEQ ID NO: 744779 - RNA, 19 nt, Human
agagacgugcuucuggucc

SEQ ID NO: 744780 - RNA, 18 nt, Human
agcagggaccaccugcca

SEQ ID NO: 744781 - RNA, 25 nt, Human
agugaugagcacaguuacaaaggga

SEQ ID NO: 744782 - RNA, 20 nt, Human
augcuucacuaaaauacagu

SEQ ID NO: 744783 - RNA, 24 nt, Human
caacaaaacaacuuuucuaaaagg

SEQ ID NO: 744784 - RNA, 21 nt, Human
caagaguccugcuacuaaaca

SEQ ID NO: 744785 - RNA, 20 nt, Human
cacuuuagaaccugcgguua

SEQ ID NO: 744786 - RNA, 19 nt, Human
cagagacgugcuucugguc

SEQ ID NO: 744787 - RNA, 21 nt, Human
cauacacgugacccuugugca

SEQ ID NO: 744788 - RNA, 22 nt, Human
ccaaaacuuuaaaaaacuuuac

SEQ ID NO: 744789 - RNA, 21 nt, Human
ccaagugcucauuugugcccc

SEQ ID NO: 744790 - RNA, 18 nt, Human
cccagugauggccgcauc

SEQ ID NO: 744791 - RNA, 27 nt, Human
ccgcaucuucccuaucauaaaaaaauc

SEQ ID NO: 744792 - RNA, 19 nt, Human
ccggccucuggggcggcuc

SEQ ID NO: 744793 - RNA, 23 nt, Human
cguacacagccgugggcagagcg

SEQ ID NO: 744794 - RNA, 21 nt, Human
cugccugaucaucuugagagc

SEQ ID NO: 744795 - RNA, 20 nt, Human
cuucugguccugaggacagg

SEQ ID NO: 744796 - RNA, 18 nt, Human
gaaugcagaaaccugaaa

SEQ ID NO: 744797 - RNA, 20 nt, Human
gacaacugacacuucacucu

SEQ ID NO: 744798 - RNA, 18 nt, Human
gaccugguacaggcugcu

SEQ ID NO: 744799 - RNA, 23 nt, Human
gagcacaguuacaaagggaucac

SEQ ID NO: 744800 - RNA, 18 nt, Human
gagcggcccugagagugc

SEQ ID NO: 744801 - RNA, 18 nt, Human
gcggcgcgggcggacgcu

SEQ ID NO: 744802 - RNA, 19 nt, Human
ggccucuggggcggcuccc

SEQ ID NO: 744803 - RNA, 23 nt, Human
ggguuucagcagggaccaccugc

SEQ ID NO: 744804 - RNA, 20 nt, Human
uaaaacaccccgcgaaacuu

SEQ ID NO: 744805 - RNA, 23 nt, Human
uaaaacaccccgcgaaacuuggc

SEQ ID NO: 744806 - RNA, 20 nt, Human
uaaaacauagucaaugcaaa

SEQ ID NO: 744807 - RNA, 19 nt, Human
uaaaaucuagucaccauau

SEQ ID NO: 744808 - RNA, 21 nt, Human
uaaagccugaaugcagaaacu

SEQ ID NO: 744809 - RNA, 22 nt, Human
uaacccaaaacuuuaaaaaacu

SEQ ID NO: 744810 - RNA, 21 nt, Human
uacaggcugcuaacgcugggg

SEQ ID NO: 744811 - RNA, 24 nt, Human
uagacaacaaugugugcagcagag

SEQ ID NO: 744812 - RNA, 24 nt, Human
uagaucacugcuuuccaagagucc

SEQ ID NO: 744813 - RNA, 24 nt, Human
uauguacaguauuucaacaaaaca

SEQ ID NO: 744814 - RNA, 24 nt, Human
ucacucugauguccuugggauuug

SEQ ID NO: 744815 - RNA, 24 nt, Human
ucagaauauuuaauuggcuuaaaa

SEQ ID NO: 744816 - RNA, 22 nt, Human
ucaucuugagagcauacacgug

SEQ ID NO: 744817 - RNA, 19 nt, Human
uccaaaugccacgucucug

SEQ ID NO: 744818 - RNA, 24 nt, Human
uccaagaguccugcuacuaaacac

SEQ ID NO: 744819 - RNA, 19 nt, Human
uccggcuguaucuuagguu

SEQ ID NO: 744820 - RNA, 21 nt, Human
ucuaaguuucguuuccaaaug

SEQ ID NO: 744821 - RNA, 18 nt, Human
ucucugaagacauaacuu

SEQ ID NO: 744822 - RNA, 22 nt, Human
ucucugaguuaacugaccaugu

SEQ ID NO: 744823 - RNA, 23 nt, Human
ucucugaguuaacugaccaugua

SEQ ID NO: 744824 - RNA, 18 nt, Human
ucugcccccgcgccccuc

SEQ ID NO: 744825 - RNA, 21 nt, Human
ucugcccccgcgccccucccg

SEQ ID NO: 744826 - RNA, 21 nt, Human
ucuuacagcauagaucacugc

SEQ ID NO: 744827 - RNA, 23 nt, Human
ucuuacagcauagaucacugcuu

SEQ ID NO: 744828 - RNA, 20 nt, Human
ugaaaaaaagaaucugugac

SEQ ID NO: 744829 - RNA, 21 nt, Human
ugaaugcagaaaccugaaaug

SEQ ID NO: 744830 - RNA, 21 nt, Human
ugagagcauacacgugacccu

SEQ ID NO: 744831 - RNA, 21 nt, Human
ugagcuggagagcggcccuga

SEQ ID NO: 744832 - RNA, 18 nt, Human
ugaugauaaacagcuggg

SEQ ID NO: 744833 - RNA, 19 nt, Human
ugcucauuugugcccccga

SEQ ID NO: 744834 - RNA, 23 nt, Human
uggccuaguggugccgucgugag

SEQ ID NO: 744835 - RNA, 24 nt, Human
uggcuugcccuccaccuccuauuu

SEQ ID NO: 744836 - RNA, 22 nt, Human
ugggaaaguucucaaaauaagc

SEQ ID NO: 744837 - RNA, 19 nt, Human
ugggguaucucugaguuaa

SEQ ID NO: 744838 - RNA, 24 nt, Human
ugugugcagcagagacgugcuucu

SEQ ID NO: 744839 - RNA, 22 nt, Human
uuaauaaaacaccccgcgaaac

SEQ ID NO: 744840 - RNA, 21 nt, Human
uuacagcauagaucacugcuu

SEQ ID NO: 744841 - RNA, 22 nt, Human
uucacucugauguccuugggau

SEQ ID NO: 744842 - RNA, 19 nt, Human
uucauaguugacaggacaa

SEQ ID NO: 744843 - RNA, 19 nt, Human
uugugcauuaccucggccc

SEQ ID NO: 744844 - RNA, 22 nt, Human
uuuacagauuucauuugauagc

SEQ ID NO: 744845 - RNA, 18 nt, Human
uuuacaucuucuuuguca

SEQ ID NO: 744846 - RNA, 20 nt, Human
aaaaagguauucagucccuu

SEQ ID NO: 744847 - RNA, 21 nt, Human
aaaacccccagccugggccca

SEQ ID NO: 744848 - RNA, 21 nt, Human
aaacccccagccugggcccag

SEQ ID NO: 744849 - RNA, 20 nt, Human
aaagagaaaacaggcugggg

SEQ ID NO: 744850 - RNA, 21 nt, Human
aaccauggcaaugaagcaguc

SEQ ID NO: 744851 - RNA, 20 nt, Human
aagagaaaacaggcugggga

SEQ ID NO: 744852 - RNA, 21 nt, Human
aaggggucugaggcaggaggg

SEQ ID NO: 744853 - RNA, 19 nt, Human
agauggcccacagcugaag

SEQ ID NO: 744854 - RNA, 22 nt, Human
agcauuggaggaauccucuuuc

SEQ ID NO: 744855 - RNA, 21 nt, Human
agcuggaggccugguccucca

SEQ ID NO: 744856 - RNA, 18 nt, Human
aggaaaaagguauucagu

SEQ ID NO: 744857 - RNA, 19 nt, Human
aggaauccucuuucccugu

SEQ ID NO: 744858 - RNA, 19 nt, Human
aggcaggaggggaucuuug

SEQ ID NO: 744859 - RNA, 22 nt, Human
aggcagggggaaggaaaaaggu

SEQ ID NO: 744860 - RNA, 23 nt, Human
aggcuccagagcuccuagaggug

SEQ ID NO: 744861 - RNA, 18 nt, Human
agggaaaggagaacaaug

SEQ ID NO: 744862 - RNA, 21 nt, Human
agggagagggcuggacugggg

SEQ ID NO: 744863 - RNA, 22 nt, Human
agggcgaggccagacagcugga

SEQ ID NO: 744864 - RNA, 20 nt, Human
aguucugggcucccaggagg

SEQ ID NO: 744865 - RNA, 20 nt, Human
caaagccaccucuacuuuuc

SEQ ID NO: 744866 - RNA, 21 nt, Human
caaauacugaaaacccccagc

SEQ ID NO: 744867 - RNA, 24 nt, Human
caacacuguacagaacuccaacca

SEQ ID NO: 744868 - RNA, 23 nt, Human
cacaggaccaagcuccuuacaga

SEQ ID NO: 744869 - RNA, 25 nt, Human
cagcccccaaagccccuggcaaagg

SEQ ID NO: 744870 - RNA, 21 nt, Human
caguggaagggagagggcugg

SEQ ID NO: 744871 - RNA, 22 nt, Human
cauuuccaucacccuucggagg

SEQ ID NO: 744872 - RNA, 23 nt, Human
ccaccucuacuuuucuucuucug

SEQ ID NO: 744873 - RNA, 21 nt, Human
ccauggcaaugaagcagucac

SEQ ID NO: 744874 - RNA, 21 nt, Human
cccacagcugaagcagugggc

SEQ ID NO: 744875 - RNA, 21 nt, Human
cccagaaacucacaggaccaa

SEQ ID NO: 744876 - RNA, 20 nt, Human
cccccaaagccccuggcaaa

SEQ ID NO: 744877 - RNA, 19 nt, Human
cccuggcugggccuggggc

SEQ ID NO: 744878 - RNA, 19 nt, Human
ccuagaggugggggggggg

SEQ ID NO: 744879 - RNA, 22 nt, Human
ccugggcccaggcaaccaaggg

SEQ ID NO: 744880 - RNA, 18 nt, Human
ccuggggcaggacccuaa

SEQ ID NO: 744881 - RNA, 20 nt, Human
ccugugcaucagggcugaag

SEQ ID NO: 744882 - RNA, 21 nt, Human
cggaggcugaaggaagggcgg

SEQ ID NO: 744883 - RNA, 19 nt, Human
cuagagguggggggggggc

SEQ ID NO: 744884 - RNA, 22 nt, Human
cucagcccccaaagccccuggc

SEQ ID NO: 744885 - RNA, 22 nt, Human
cucucccaacugcaucgcuccu

SEQ ID NO: 744886 - RNA, 25 nt, Human
cucuggauguggcucugcucagccc

SEQ ID NO: 744887 - RNA, 20 nt, Human
cugaggcaggaggggaucuu

SEQ ID NO: 744888 - RNA, 19 nt, Human
cuggcugggccuggggcag

SEQ ID NO: 744889 - RNA, 24 nt, Human
cugugacagcuccucagcccuggc

SEQ ID NO: 744890 - RNA, 22 nt, Human
cuuacaaauacugaaaaccccc

SEQ ID NO: 744891 - RNA, 21 nt, Human
cuuaugguaccauaauuuguc

SEQ ID NO: 744892 - RNA, 23 nt, Human
cuuccccucugcugcaucaucuc

SEQ ID NO: 744893 - RNA, 23 nt, Human
cuucuagcuuccucucccaacug

SEQ ID NO: 744894 - RNA, 27 nt, Human
cuucuggcucuaagcaaggcaccuuac

SEQ ID NO: 744895 - RNA, 23 nt, Human
cuuuucuucuucuggcugguucu

SEQ ID NO: 744896 - RNA, 25 nt, Human
cuuuucuucuucuggcugguucuuc

SEQ ID NO: 744897 - RNA, 21 nt, Human
gaaaacccccagccugggccc

SEQ ID NO: 744898 - RNA, 24 nt, Human
gaaaggagaacaauggggcagagc

SEQ ID NO: 744899 - RNA, 19 nt, Human
gaagacacaggcaggggga

SEQ ID NO: 744900 - RNA, 21 nt, Human
gagaacaauggggcagagccg

SEQ ID NO: 744901 - RNA, 24 nt, Human
gagaugcccaggggccugggcugg

SEQ ID NO: 744902 - RNA, 19 nt, Human
gcaaguucugggcucccag

SEQ ID NO: 744903 - RNA, 20 nt, Human
gcccaggcaaccaagggcuc

SEQ ID NO: 744904 - RNA, 21 nt, Human
gccccuggcaaaggggucuga

SEQ ID NO: 744905 - RNA, 23 nt, Human
gcuccagagcuccuagagguggg

SEQ ID NO: 744906 - RNA, 19 nt, Human
ggacuggggggcuggcagc

SEQ ID NO: 744907 - RNA, 23 nt, Human
ggacuggggggcuggcagccugu

SEQ ID NO: 744908 - RNA, 26 nt, Human
ggagagcaggugucagguccccaagg

SEQ ID NO: 744909 - RNA, 18 nt, Human
ggaggggaucuuuggcag

SEQ ID NO: 744910 - RNA, 18 nt, Human
ggcucggcucggucgcgg

SEQ ID NO: 744911 - RNA, 19 nt, Human
ggcugguucuucaggaggc

SEQ ID NO: 744912 - RNA, 24 nt, Human
gggccuggggcaggacccuaaagg

SEQ ID NO: 744913 - RNA, 18 nt, Human
gggcugggccacagagcg

SEQ ID NO: 744914 - RNA, 19 nt, Human
ggggcagagcgggguuuga

SEQ ID NO: 744915 - RNA, 20 nt, Human
ggucugaggcaggaggggau

SEQ ID NO: 744916 - RNA, 23 nt, Human
ggucugaggcaggaggggaucuu

SEQ ID NO: 744917 - RNA, 21 nt, Human
gugcaucagggcugaagacac

SEQ ID NO: 744918 - RNA, 22 nt, Human
gugggcugggccacagagcugc

SEQ ID NO: 744919 - RNA, 22 nt, Human
uaagggaaaggagaacaauggg

SEQ ID NO: 744920 - RNA, 19 nt, Human
uagagguggggggggggca

SEQ ID NO: 744921 - RNA, 21 nt, Human
ucccuuagccuggcucggcuc

SEQ ID NO: 744922 - RNA, 24 nt, Human
ucucccaacugcaucgcuccuccu

SEQ ID NO: 744923 - RNA, 23 nt, Human
ucucugugacagcuccucagccc

SEQ ID NO: 744924 - RNA, 27 nt, Human
ucugcaacuaggggauggagcugggac

SEQ ID NO: 744925 - RNA, 23 nt, Human
ugcaucgcuccuccucuguucca

SEQ ID NO: 744926 - RNA, 18 nt, Human
ugcugcaucaucuccugc

SEQ ID NO: 744927 - RNA, 18 nt, Human
ugcugggaaggagagcag

SEQ ID NO: 744928 - RNA, 21 nt, Human
uggacuggggggcuggcagcc

SEQ ID NO: 744929 - RNA, 22 nt, Human
uggagcugggaccucaagguug

SEQ ID NO: 744930 - RNA, 21 nt, Human
uggauguggcucugcucagcc

SEQ ID NO: 744931 - RNA, 18 nt, Human
uggcaaaggggucugagg

SEQ ID NO: 744932 - RNA, 22 nt, Human
uggcagccugugcaucagggcu

SEQ ID NO: 744933 - RNA, 19 nt, Human
uggcucggcucggucgcgg

SEQ ID NO: 744934 - RNA, 19 nt, Human
uggcucggcucggucgcgg

SEQ ID NO: 744935 - RNA, 19 nt, Human
uggcugguucuucaggagg

SEQ ID NO: 744936 - RNA, 18 nt, Human
uggggggggggcagggag

SEQ ID NO: 744937 - RNA, 22 nt, Human
uuacaaauacugaaaaccccca

SEQ ID NO: 744938 - RNA, 24 nt, Human
uuaguauguaaccauggcaaugaa

SEQ ID NO: 744939 - RNA, 22 nt, Human
uuccguaguccaaaggcuuuau

SEQ ID NO: 744940 - RNA, 19 nt, Human
uucuuauacaaaagcccca

SEQ ID NO: 744941 - RNA, 24 nt, Human
aaaagaagaagaaaaaagaaaaaa

SEQ ID NO: 744942 - RNA, 23 nt, Human
aaacaaaacagggguuaccuucc

SEQ ID NO: 744943 - RNA, 22 nt, Human
aaacaugaagguggcuguaauc

SEQ ID NO: 744944 - RNA, 24 nt, Human
aaaccaacuccacuucuaauuuca

SEQ ID NO: 744945 - RNA, 28 nt, Human
aaaccaacuccacuucuaauuucacaac

SEQ ID NO: 744946 - RNA, 24 nt, Human
aaacuccugggcucaagugauccu

SEQ ID NO: 744947 - RNA, 21 nt, Human
aaagaaaaaaaccaacuccac

SEQ ID NO: 744948 - RNA, 22 nt, Human
aacagccagauguuccccuacg

SEQ ID NO: 744949 - RNA, 24 nt, Human
aagaagaaaaaagaaaaaaaccaa

SEQ ID NO: 744950 - RNA, 19 nt, Human
aagaagaagaaaaaagaaa

SEQ ID NO: 744951 - RNA, 20 nt, Human
aagcuccuuuagagaaaccc

SEQ ID NO: 744952 - RNA, 25 nt, Human
aagugauccucccaccuuggccucc

SEQ ID NO: 744953 - RNA, 24 nt, Human
aaucucuugaaccugggaggcaga

SEQ ID NO: 744954 - RNA, 22 nt, Human
aaugcaaacauaggaggcuaaa

SEQ ID NO: 744955 - RNA, 22 nt, Human
aauggaggauuccucaucugga

SEQ ID NO: 744956 - RNA, 22 nt, Human
acaaagcuccuuuagagaaacc

SEQ ID NO: 744957 - RNA, 22 nt, Human
acacuuagguagcgagcugcag

SEQ ID NO: 744958 - RNA, 22 nt, Human
acccaagggcgcuugccaccac

SEQ ID NO: 744959 - RNA, 20 nt, Human
accuuggccuccugaguagc

SEQ ID NO: 744960 - RNA, 18 nt, Human
acucugucacccaggcug

SEQ ID NO: 744961 - RNA, 25 nt, Human
acucugucacccaggcuggagugca

SEQ ID NO: 744962 - RNA, 19 nt, Human
acugccagaggaaugucag

SEQ ID NO: 744963 - RNA, 20 nt, Human
agaaaaaagaaaaaaaccaa

SEQ ID NO: 744964 - RNA, 22 nt, Human
agaagaagaaaaaagaaaaaaa

SEQ ID NO: 744965 - RNA, 19 nt, Human
agccuccugaauagcugag

SEQ ID NO: 744966 - RNA, 19 nt, Human
aggauuccucaucuggagc

SEQ ID NO: 744967 - RNA, 22 nt, Human
aggcagaagaaucucuugaacc

SEQ ID NO: 744968 - RNA, 24 nt, Human
aggcagaagaaucucuugaaccug

SEQ ID NO: 744969 - RNA, 24 nt, Human
aggcugaggcagaagaaucucuug

SEQ ID NO: 744970 - RNA, 19 nt, Human
aggcuggagugcaguggca

SEQ ID NO: 744971 - RNA, 20 nt, Human
aguaacaaaagcagccaaga

SEQ ID NO: 744972 - RNA, 24 nt, Human
agugauucuccugccucagccucc

SEQ ID NO: 744973 - RNA, 20 nt, Human
agugcaguggcaugaucacg

SEQ ID NO: 744974 - RNA, 23 nt, Human
agugcaguggcaugaucacggcu

SEQ ID NO: 744975 - RNA, 24 nt, Human
agugcaguggcaugaucacggcuc

SEQ ID NO: 744976 - RNA, 18 nt, Human
auucuccugccucagccu

SEQ ID NO: 744977 - RNA, 22 nt, Human
caacuuccuggucucaagugau

SEQ ID NO: 744978 - RNA, 27 nt, Human
caagugauccucccaccuuggccuccu

SEQ ID NO: 744979 - RNA, 20 nt, Human
caagugauucuccugccuca

SEQ ID NO: 744980 - RNA, 22 nt, Human
caagugauucuccugccucagc

SEQ ID NO: 744981 - RNA, 22 nt, Human
cacaggcaugccccuccacacc

SEQ ID NO: 744982 - RNA, 23 nt, Human
cacucugucacccaggcuggagu

SEQ ID NO: 744983 - RNA, 24 nt, Human
cacucugucacccaggcuggagug

SEQ ID NO: 744984 - RNA, 20 nt, Human
cacuuaguuguccaggcuag

SEQ ID NO: 744985 - RNA, 28 nt, Human
cacuuuagacaaaacaaagcuccuuuag

SEQ ID NO: 744986 - RNA, 19 nt, Human
cagccaagacuuguguggc

SEQ ID NO: 744987 - RNA, 19 nt, Human
cagccaagacuuguguggc

SEQ ID NO: 744988 - RNA, 24 nt, Human
cagccucaacuuccuggucucaag

SEQ ID NO: 744989 - RNA, 24 nt, Human
cagcuacuuaggaggcugaggcag

SEQ ID NO: 744990 - RNA, 23 nt, Human
caggcaugccccuccacaccugg

SEQ ID NO: 744991 - RNA, 19 nt, Human
cauugcagccucaacuucc

SEQ ID NO: 744992 - RNA, 18 nt, Human
ccaagggcgcuugccacc

SEQ ID NO: 744993 - RNA, 22 nt, Human
ccaagggcgcuugccaccacuc

SEQ ID NO: 744994 - RNA, 24 nt, Human
ccaagggcgcuugccaccacuccc

SEQ ID NO: 744995 - RNA, 24 nt, Human
ccacaggcaugccccuccacaccu

SEQ ID NO: 744996 - RNA, 23 nt, Human
ccaccuuggccuccugaguagcu

SEQ ID NO: 744997 - RNA, 19 nt, Human
cccaagggcgcuugccacc

SEQ ID NO: 744998 - RNA, 23 nt, Human
cccaggcuggagugcaguggcau

SEQ ID NO: 744999 - RNA, 22 nt, Human
ccccuacgauuccaaacaugag

SEQ ID NO: 745000 - RNA, 24 nt, Human
ccucccaccuuggccuccugagua

SEQ ID NO: 745001 - RNA, 22 nt, Human
ccugggcucaagugauccuccc

SEQ ID NO: 745002 - RNA, 21 nt, Human
ccuggucucaagugauucucc

SEQ ID NO: 745003 - RNA, 21 nt, Human
ccuggucucaagugauucucc

SEQ ID NO: 745004 - RNA, 23 nt, Human
ccuggucucaagugauucuccug

SEQ ID NO: 745005 - RNA, 21 nt, Human
ccuguaaucccagcuacuuag

SEQ ID NO: 745006 - RNA, 22 nt, Human
ccuguaaucccagcuacuuagg

SEQ ID NO: 745007 - RNA, 24 nt, Human
cucaagugauccucccaccuuggc

SEQ ID NO: 745008 - RNA, 20 nt, Human
cucaagugauucuccugccu

SEQ ID NO: 745009 - RNA, 21 nt, Human
cucaagugauucuccugccuc

SEQ ID NO: 745010 - RNA, 23 nt, Human
cucaagugauucuccugccucag

SEQ ID NO: 745011 - RNA, 24 nt, Human
cucaagugauucuccugccucagc

SEQ ID NO: 745012 - RNA, 24 nt, Human
cucacucugucacccaggcuggag

SEQ ID NO: 745013 - RNA, 24 nt, Human
cuccugaauagcugagaccacagg

SEQ ID NO: 745014 - RNA, 23 nt, Human
cuccugggcucaagugauccucc

SEQ ID NO: 745015 - RNA, 25 nt, Human
cuccugggcucaagugauccuccca

SEQ ID NO: 745016 - RNA, 23 nt, Human
cugccucagccuccugaauagcu

SEQ ID NO: 745017 - RNA, 21 nt, Human
cuuccuggucucaagugauuc

SEQ ID NO: 745018 - RNA, 24 nt, Human
cuuccuggucucaagugauucucc

SEQ ID NO: 745019 - RNA, 30 nt, Human
cuuuucauauuaaaaaaaaagaagaagaaa

SEQ ID NO: 745020 - RNA, 20 nt, Human
gaacacaugcauuccucaag

SEQ ID NO: 745021 - RNA, 20 nt, Human
gaaccugggaggcagaggcg

SEQ ID NO: 745022 - RNA, 22 nt, Human
gaagaaaaaagaaaaaaaccaa

SEQ ID NO: 745023 - RNA, 21 nt, Human
gaagaagaaaaaagaaaaaaa

SEQ ID NO: 745024 - RNA, 24 nt, Human
gaauagcugagaccacaggcaugc

SEQ ID NO: 745025 - RNA, 18 nt, Human
gagugcaguggcaugauc

SEQ ID NO: 745026 - RNA, 19 nt, Human
gaguuucugagagggcagc

SEQ ID NO: 745027 - RNA, 21 nt, Human
gaguuuuugucccguggaugu

SEQ ID NO: 745028 - RNA, 20 nt, Human
gcaugaucacggcucauugc

SEQ ID NO: 745029 - RNA, 18 nt, Human
gccuccugaguagcugga

SEQ ID NO: 745030 - RNA, 20 nt, Human
gcgcuugccaccacucccag

SEQ ID NO: 745031 - RNA, 19 nt, Human
gcuagucuaaaacuccugg

SEQ ID NO: 745032 - RNA, 23 nt, Human
gcuagucuaaaacuccugggcuc

SEQ ID NO: 745033 - RNA, 18 nt, Human
gcucaagugauccuccca

SEQ ID NO: 745034 - RNA, 22 nt, Human
gcuccuuuagagaaacccuggc

SEQ ID NO: 745035 - RNA, 18 nt, Human
gcucuuauuucuucuuga

SEQ ID NO: 745036 - RNA, 19 nt, Human
gcuggagugcaguggcaug

SEQ ID NO: 745037 - RNA, 22 nt, Human
gggcucaagugauccucccacc

SEQ ID NO: 745038 - RNA, 23 nt, Human
gugauucuccugccucagccucc

SEQ ID NO: 745039 - RNA, 21 nt, Human
uaaaaaaaaagaagaagaaaa

SEQ ID NO: 745040 - RNA, 18 nt, Human
uaaaauacauuuaaugcu

SEQ ID NO: 745041 - RNA, 25 nt, Human
uaaaucagaaacaugaaucuguacc

SEQ ID NO: 745042 - RNA, 21 nt, Human
uagcgagcugcaggaaaccug

SEQ ID NO: 745043 - RNA, 19 nt, Human
uagcuggacccaagggcgc

SEQ ID NO: 745044 - RNA, 26 nt, Human
uaggaggcugaggcagaagaaucucu

SEQ ID NO: 745045 - RNA, 22 nt, Human
uaguuguccaggcuagucuaaa

SEQ ID NO: 745046 - RNA, 24 nt, Human
ucaagugauccucccaccuuggcc

SEQ ID NO: 745047 - RNA, 19 nt, Human
ucaauccuguguuguuguu

SEQ ID NO: 745048 - RNA, 22 nt, Human
ucacccaggcuggagugcagug

SEQ ID NO: 745049 - RNA, 24 nt, Human
ucacucugucacccaggcuggagu

SEQ ID NO: 745050 - RNA, 21 nt, Human
ucagaaacaugaaucuguacc

SEQ ID NO: 745051 - RNA, 22 nt, Human
ucagugaucaugaguccagcca

SEQ ID NO: 745052 - RNA, 24 nt, Human
ucauauuaaaaaaaaagaagaaga

SEQ ID NO: 745053 - RNA, 21 nt, Human
ucauggaaugcaaacauagga

SEQ ID NO: 745054 - RNA, 23 nt, Human
ucauugcagccucaacuuccugg

SEQ ID NO: 745055 - RNA, 21 nt, Human
uccugggcucaagugauccuc

SEQ ID NO: 745056 - RNA, 24 nt, Human
uccuggucucaagugauucuccug

SEQ ID NO: 745057 - RNA, 22 nt, Human
ucucacucugucacccaggcug

SEQ ID NO: 745058 - RNA, 23 nt, Human
ucucacucugucacccaggcugg

SEQ ID NO: 745059 - RNA, 24 nt, Human
ucucacucugucacccaggcugga

SEQ ID NO: 745060 - RNA, 26 nt, Human
ucucacucugucacccaggcuggagu

SEQ ID NO: 745061 - RNA, 27 nt, Human
ucucacucugucacccaggcuggagug

SEQ ID NO: 745062 - RNA, 22 nt, Human
ucucacuuaguuguccaggcua

SEQ ID NO: 745063 - RNA, 24 nt, Human
ucuccugccucagccuccugaaua

SEQ ID NO: 745064 - RNA, 24 nt, Human
ucugucacccaggcuggagugcag

SEQ ID NO: 745065 - RNA, 24 nt, Human
ugagaccacaggcaugccccucca

SEQ ID NO: 745066 - RNA, 20 nt, Human
ugaggcagaagaaucucuug

SEQ ID NO: 745067 - RNA, 24 nt, Human
ugaggcagaagaaucucuugaacc

SEQ ID NO: 745068 - RNA, 24 nt, Human
ugaggcagaagaaucucuugaacc

SEQ ID NO: 745069 - RNA, 24 nt, Human
ugcaaacauaggaggcuaaagcag

SEQ ID NO: 745070 - RNA, 27 nt, Human
ugccucagccuccugaauagcugagac

SEQ ID NO: 745071 - RNA, 19 nt, Human
uggagugcaguggcaugau

SEQ ID NO: 745072 - RNA, 24 nt, Human
uggagugcaguggcaugaucacgg

SEQ ID NO: 745073 - RNA, 21 nt, Human
uggaugugaaucacuaagaac

SEQ ID NO: 745074 - RNA, 19 nt, Human
uggccuccugaguagcugg

SEQ ID NO: 745075 - RNA, 19 nt, Human
ugggaggcagaggcgcagc

SEQ ID NO: 745076 - RNA, 23 nt, Human
ugggagucuggaguuucugagag

SEQ ID NO: 745077 - RNA, 24 nt, Human
ugggcucaagugauccucccaccu

SEQ ID NO: 745078 - RNA, 23 nt, Human
uggucucaagugauucuccugcc

SEQ ID NO: 745079 - RNA, 24 nt, Human
uggucucaagugauucuccugccu

SEQ ID NO: 745080 - RNA, 19 nt, Human
ugucauugccaugggaguc

SEQ ID NO: 745081 - RNA, 22 nt, Human
ugucauugccaugggagucugg

SEQ ID NO: 745082 - RNA, 20 nt, Human
uuaaaaaaaaagaagaagaa

SEQ ID NO: 745083 - RNA, 20 nt, Human
uuaaauuuuuuguagagaug

SEQ ID NO: 745084 - RNA, 25 nt, Human
uuccagccccaacucugcuggaguc

SEQ ID NO: 745085 - RNA, 25 nt, Human
uuccucaaguuuuagaagauaaaua

SEQ ID NO: 745086 - RNA, 24 nt, Human
uuccuguaaucccagcuacuuagg

SEQ ID NO: 745087 - RNA, 23 nt, Human
uucuucuugaguuuuugucccgu

SEQ ID NO: 745088 - RNA, 23 nt, Human
uuguagagauggagucucacuua

SEQ ID NO: 745089 - RNA, 21 nt, Human
uugugcacuaugucuugccac

SEQ ID NO: 745090 - RNA, 21 nt, Human
uuuaccuacaagucugagggu

SEQ ID NO: 745091 - RNA, 24 nt, Human
uuuagaagauaaauaagguggaaa

SEQ ID NO: 745092 - RNA, 24 nt, Human
uuuuuuguagagauggagucucac

SEQ ID NO: 745093 - RNA, 21 nt, Human
aaaaagccacaggagcaaccc

SEQ ID NO: 745094 - RNA, 24 nt, Human
aaaaagccaggagcacaaaaggug

SEQ ID NO: 745095 - RNA, 23 nt, Human
aaaagaaauagcuaggagaugca

SEQ ID NO: 745096 - RNA, 19 nt, Human
aaaauggcccaguccaacu

SEQ ID NO: 745097 - RNA, 20 nt, Human
aaacaaaaagcaugcaccca

SEQ ID NO: 745098 - RNA, 22 nt, Human
aaacauaaaaggagugaacugg

SEQ ID NO: 745099 - RNA, 22 nt, Human
aaacauaagaaguaaugcauca

SEQ ID NO: 745100 - RNA, 19 nt, Human
aaacuaagaaugacagucu

SEQ ID NO: 745101 - RNA, 21 nt, Human
aaagcagcuguaguuuuaagu

SEQ ID NO: 745102 - RNA, 24 nt, Human
aaaggaacauaauaaaauggccca

SEQ ID NO: 745103 - RNA, 24 nt, Human
aacaaaacuucucuguuugacacu

SEQ ID NO: 745104 - RNA, 20 nt, Human
aacacagauccaggcauuag

SEQ ID NO: 745105 - RNA, 21 nt, Human
aacacagauccaggcauuagg

SEQ ID NO: 745106 - RNA, 18 nt, Human
aaccacugugaccauaac

SEQ ID NO: 745107 - RNA, 20 nt, Human
aagacacucaguuggggagg

SEQ ID NO: 745108 - RNA, 21 nt, Human
aagccuccaagcgaagccucc

SEQ ID NO: 745109 - RNA, 19 nt, Human
aauaaaggauccuaccccu

SEQ ID NO: 745110 - RNA, 23 nt, Human
acaagcacccccuuucuaccccc

SEQ ID NO: 745111 - RNA, 22 nt, Human
acacagauccaggcauuaggca

SEQ ID NO: 745112 - RNA, 21 nt, Human
acacugagcaaacaaaaagca

SEQ ID NO: 745113 - RNA, 19 nt, Human
accaguaugcucucaaucu

SEQ ID NO: 745114 - RNA, 22 nt, Human
acccucaggggcuuaaggcccu

SEQ ID NO: 745115 - RNA, 19 nt, Human
accuguuuacaucccccuu

SEQ ID NO: 745116 - RNA, 19 nt, Human
acucuggcucugaccaccu

SEQ ID NO: 745117 - RNA, 21 nt, Human
acugccaauaaauccauaacc

SEQ ID NO: 745118 - RNA, 22 nt, Human
agcaaacaaaaagcaugcaccc

SEQ ID NO: 745119 - RNA, 20 nt, Human
agccaacauaaacgaguucc

SEQ ID NO: 745120 - RNA, 26 nt, Human
agccacaggagcaacccugacagaga

SEQ ID NO: 745121 - RNA, 19 nt, Human
aggagcacaaaaggugcca

SEQ ID NO: 745122 - RNA, 19 nt, Human
aggagcacaaaaggugcca

SEQ ID NO: 745123 - RNA, 24 nt, Human
agggcacagucaaccaugucacug

SEQ ID NO: 745124 - RNA, 18 nt, Human
auuucuggccauguuggg

SEQ ID NO: 745125 - RNA, 26 nt, Human
caaacaaaaagcaugcacccaaauau

SEQ ID NO: 745126 - RNA, 23 nt, Human
caaagccuccaagcgaagccucc

SEQ ID NO: 745127 - RNA, 23 nt, Human
caaguaccauccauuuacuucuc

SEQ ID NO: 745128 - RNA, 22 nt, Human
cacaaaacggcacuuccccuga

SEQ ID NO: 745129 - RNA, 18 nt, Human
cacagauccaggcauuag

SEQ ID NO: 745130 - RNA, 23 nt, Human
caccaaaccaguggagucccugg

SEQ ID NO: 745131 - RNA, 23 nt, Human
caccaggacccucaggggcuuaa

SEQ ID NO: 745132 - RNA, 22 nt, Human
caccauccauuuguccccuacu

SEQ ID NO: 745133 - RNA, 21 nt, Human
cacccccuuucuacccccaaa

SEQ ID NO: 745134 - RNA, 22 nt, Human
cacccccuuucuacccccaaag

SEQ ID NO: 745135 - RNA, 24 nt, Human
cagccccuccuccguccuuugucc

SEQ ID NO: 745136 - RNA, 27 nt, Human
caucccaccauccauuuguccccuacu

SEQ ID NO: 745137 - RNA, 18 nt, Human
caugcagccuucuccuga

SEQ ID NO: 745138 - RNA, 22 nt, Human
caugggucaaucuaggccaaac

SEQ ID NO: 745139 - RNA, 25 nt, Human
ccaguccaacuaaaacaguccuuga

SEQ ID NO: 745140 - RNA, 21 nt, Human
ccagugggucaucagcuacau

SEQ ID NO: 745141 - RNA, 19 nt, Human
cccagugaaacuaaaguag

SEQ ID NO: 745142 - RNA, 20 nt, Human
cccccaaagccuggcuucug

SEQ ID NO: 745143 - RNA, 19 nt, Human
ccccugaggugggcuggug

SEQ ID NO: 745144 - RNA, 20 nt, Human
ccccugaggugggcuggugg

SEQ ID NO: 745145 - RNA, 21 nt, Human
cccucuacuauuucauauaaa

SEQ ID NO: 745146 - RNA, 19 nt, Human
ccggaggccggcccggguc

SEQ ID NO: 745147 - RNA, 30 nt, Human
ccuccgaccucagcaucccaccauccauuu

SEQ ID NO: 745148 - RNA, 21 nt, Human
ccuccguccuuuguccggagg

SEQ ID NO: 745149 - RNA, 19 nt, Human
cuaaaguagaacacagauc

SEQ ID NO: 745150 - RNA, 20 nt, Human
cuaaaguagaacacagaucc

SEQ ID NO: 745151 - RNA, 19 nt, Human
cuccuuagggccaaugaga

SEQ ID NO: 745152 - RNA, 20 nt, Human
gaagucuugcaugcagccuu

SEQ ID NO: 745153 - RNA, 20 nt, Human
gacagucuauuuccuguggu

SEQ ID NO: 745154 - RNA, 23 nt, Human
gagcaaacaaaaagcaugcaccc

SEQ ID NO: 745155 - RNA, 26 nt, Human
gagcaaacaaaaagcaugcacccaaa

SEQ ID NO: 745156 - RNA, 18 nt, Human
gauucccugagucaccag

SEQ ID NO: 745157 - RNA, 24 nt, Human
gcaaacaaaaagcaugcacccaaa

SEQ ID NO: 745158 - RNA, 18 nt, Human
gcacuuccccugaggugg

SEQ ID NO: 745159 - RNA, 24 nt, Human
ggccaagucaggcggcgcggggcg

SEQ ID NO: 745160 - RNA, 21 nt, Human
ggcccgggucucugcaggcgg

SEQ ID NO: 745161 - RNA, 18 nt, Human
uaaaaaagccacaggagc

SEQ ID NO: 745162 - RNA, 26 nt, Human
uaaaauaagcccuggcagcaaacuaa

SEQ ID NO: 745163 - RNA, 22 nt, Human
uaaaauggcccaguccaacuaa

SEQ ID NO: 745164 - RNA, 23 nt, Human
uaaacacacugucacagaugugg

SEQ ID NO: 745165 - RNA, 18 nt, Human
uaaaguagaacacagauc

SEQ ID NO: 745166 - RNA, 28 nt, Human
uaaaguagaacacagauccaggcauuuu

SEQ ID NO: 745167 - RNA, 24 nt, Human
uaaauagaaacaaaacuucucugu

SEQ ID NO: 745168 - RNA, 21 nt, Human
uacaaaagccauucgcauagc

SEQ ID NO: 745169 - RNA, 20 nt, Human
uacuucauaaauagcaggga

SEQ ID NO: 745170 - RNA, 22 nt, Human
uaggccaaacauaaaaggagug

SEQ ID NO: 745171 - RNA, 19 nt, Human
uagugacugcauuuuuaga

SEQ ID NO: 745172 - RNA, 20 nt, Human
uaguuggaaacaacugaaca

SEQ ID NO: 745173 - RNA, 23 nt, Human
ucaccaaaccaguggagucccug

SEQ ID NO: 745174 - RNA, 20 nt, Human
ucauauaaagacacuaaugu

SEQ ID NO: 745175 - RNA, 22 nt, Human
uccagccccuccuccguccuuu

SEQ ID NO: 745176 - RNA, 25 nt, Human
ucccgcccugcgugcagcggccgga

SEQ ID NO: 745177 - RNA, 20 nt, Human
ucccugagucaccaggaccc

SEQ ID NO: 745178 - RNA, 21 nt, Human
ucccugguugaaaauaagagc

SEQ ID NO: 745179 - RNA, 23 nt, Human
uccgaccucagcaucccaccauc

SEQ ID NO: 745180 - RNA, 18 nt, Human
uccggaggccggcccggg

SEQ ID NO: 745181 - RNA, 22 nt, Human
uccuugagucuauuggucaguu

SEQ ID NO: 745182 - RNA, 24 nt, Human
ucgcagcgccguccagccccuccu

SEQ ID NO: 745183 - RNA, 21 nt, Human
ucucaaucuaaaauaagcccu

SEQ ID NO: 745184 - RNA, 22 nt, Human
ucugcagaccccggguacuacu

SEQ ID NO: 745185 - RNA, 24 nt, Human
ucugcaggcgggcuucgcccgggg

SEQ ID NO: 745186 - RNA, 21 nt, Human
ucugcauugcagugcuacaaa

SEQ ID NO: 745187 - RNA, 23 nt, Human
ucugcauugcagugcuacaaaag

SEQ ID NO: 745188 - RNA, 19 nt, Human
ugaaaagguggguggugag

SEQ ID NO: 745189 - RNA, 21 nt, Human
ugaaaagguggguggugagga

SEQ ID NO: 745190 - RNA, 19 nt, Human
ugacacugagcaaacaaaa

SEQ ID NO: 745191 - RNA, 21 nt, Human
ugagaagagggcaggcauggg

SEQ ID NO: 745192 - RNA, 18 nt, Human
ugagcaaacaaaaagcau

SEQ ID NO: 745193 - RNA, 19 nt, Human
ugagucuauuggucaguuc

SEQ ID NO: 745194 - RNA, 18 nt, Human
ugcaauagugcuaugauu

SEQ ID NO: 745195 - RNA, 21 nt, Human
ugcacccaaauauuucuggcc

SEQ ID NO: 745196 - RNA, 23 nt, Human
ugcacccaaauauuucuggccau

SEQ ID NO: 745197 - RNA, 21 nt, Human
uggagucccuggccaagccuc

SEQ ID NO: 745198 - RNA, 22 nt, Human
uggcaagugcacaaaacggcac

SEQ ID NO: 745199 - RNA, 22 nt, Human
uggggugaaagacccggggcug

SEQ ID NO: 745200 - RNA, 24 nt, Human
ugggucaucagcuacauauacauc

SEQ ID NO: 745201 - RNA, 19 nt, Human
ugguuuuaguagaacagau

SEQ ID NO: 745202 - RNA, 25 nt, Human
uguaguuuuaaguggucuggacauu

SEQ ID NO: 745203 - RNA, 25 nt, Human
ugucacugauaaaaacauaagaagu

SEQ ID NO: 745204 - RNA, 26 nt, Human
uuaaaacaaaaacauuuaaaagaaau

SEQ ID NO: 745205 - RNA, 23 nt, Human
uuaguagaacagauacccacugg

SEQ ID NO: 745206 - RNA, 18 nt, Human
uugcaugcagccuucucc

SEQ ID NO: 745207 - RNA, 18 nt, Human
uugcaugcagccuucucc

SEQ ID NO: 745208 - RNA, 18 nt, Human
uugggaauugggggaugg

SEQ ID NO: 745209 - RNA, 20 nt, Human
uuuucagugauguucuaugg

SEQ ID NO: 745210 - RNA, 21 nt, Human
aaaacaaacaaacaaacaaac

SEQ ID NO: 745211 - RNA, 20 nt, Human
aaacaaaaaacaauggcccc

SEQ ID NO: 745212 - RNA, 21 nt, Human
aaacaaaaaacaauggccccc

SEQ ID NO: 745213 - RNA, 26 nt, Human
aaacaaacaaaaaacaauggccccca

SEQ ID NO: 745214 - RNA, 23 nt, Human
aaacaauggcccccacucacuga

SEQ ID NO: 745215 - RNA, 21 nt, Human
aacaaaaaacaauggccccca

SEQ ID NO: 745216 - RNA, 23 nt, Human
aacaaacaaacaaacaaaaaaca

SEQ ID NO: 745217 - RNA, 23 nt, Human
aacaaacaaacaaacaaacaaac

SEQ ID NO: 745218 - RNA, 23 nt, Human
aacaaacaaacaaacaaacaaac

SEQ ID NO: 745219 - RNA, 18 nt, Human
acaaacaaacaaacaaac

SEQ ID NO: 745220 - RNA, 18 nt, Human
acaaacaaacaaacaaac

SEQ ID NO: 745221 - RNA, 24 nt, Human
acaaacaaacaaacaaacaaaaaa

SEQ ID NO: 745222 - RNA, 23 nt, Human
acacuggagcccucccacggaca

SEQ ID NO: 745223 - RNA, 22 nt, Human
agugguggcagcagcagcagcu

SEQ ID NO: 745224 - RNA, 21 nt, Human
caaaaaacaauggcccccacu

SEQ ID NO: 745225 - RNA, 27 nt, Human
caaacaaaaaacaauggcccccacuca

SEQ ID NO: 745226 - RNA, 25 nt, Human
caaacaaacaaacaaacaaaaaaca

SEQ ID NO: 745227 - RNA, 23 nt, Human
cagcaaacggacaccugacuccu

SEQ ID NO: 745228 - RNA, 22 nt, Human
cagcagcagcagcugcuuccaa

SEQ ID NO: 745229 - RNA, 19 nt, Human
caguggcucacccaccuuc

SEQ ID NO: 745230 - RNA, 21 nt, Human
caguggcucacccaccuuccc

SEQ ID NO: 745231 - RNA, 21 nt, Human
ccaaaaacaaacaaacaaaca

SEQ ID NO: 745232 - RNA, 18 nt, Human
ccccuaauaucccauaga

SEQ ID NO: 745233 - RNA, 21 nt, Human
ccgccugcccucuucccagac

SEQ ID NO: 745234 - RNA, 21 nt, Human
cucccaccugcucugagcacu

SEQ ID NO: 745235 - RNA, 23 nt, Human
cucccaccugcucugagcacuug

SEQ ID NO: 745236 - RNA, 23 nt, Human
cuggaauccuccgccccggguuu

SEQ ID NO: 745237 - RNA, 21 nt, Human
cuggagcccucccacggacaa

SEQ ID NO: 745238 - RNA, 24 nt, Human
gacaggagugguggcagcagcagc

SEQ ID NO: 745239 - RNA, 18 nt, Human
gagugguggcagcagcag

SEQ ID NO: 745240 - RNA, 21 nt, Human
gccaaaaacaaacaaacaaac

SEQ ID NO: 745241 - RNA, 24 nt, Human
gccaaaaacaaacaaacaaacaaa

SEQ ID NO: 745242 - RNA, 22 nt, Human
gccugccuggaauccuccgccc

SEQ ID NO: 745243 - RNA, 22 nt, Human
gggccaaaaacaaacaaacaaa

SEQ ID NO: 745244 - RNA, 18 nt, Human
ggugaaggaaaaggaugc

SEQ ID NO: 745245 - RNA, 19 nt, Human
guggcagcagcagcagcug

SEQ ID NO: 745246 - RNA, 18 nt, Human
ucccagacacuggagccc

SEQ ID NO: 745247 - RNA, 19 nt, Human
ucccagacacuggagcccu

SEQ ID NO: 745248 - RNA, 24 nt, Human
ucugccccuaauaucccauagaug

SEQ ID NO: 745249 - RNA, 19 nt, Human
ugacuccuagagccugccu

SEQ ID NO: 745250 - RNA, 20 nt, Human
ugauagcagcaaacggacac

SEQ ID NO: 745251 - RNA, 20 nt, Human
ugauagcagcaaacggacac

SEQ ID NO: 745252 - RNA, 18 nt, Human
ugcacacuccugggcaag

SEQ ID NO: 745253 - RNA, 19 nt, Human
ugcccucuucccagacacu

SEQ ID NO: 745254 - RNA, 25 nt, Human
uggcagcagcagcagcugcuuccaa

SEQ ID NO: 745255 - RNA, 23 nt, Human
uggcucacccaccuucccccagc

SEQ ID NO: 745256 - RNA, 24 nt, Human
uggcucacccaccuucccccagca

SEQ ID NO: 745257 - RNA, 21 nt, Human
uggggcagagaagucaucuug

SEQ ID NO: 745258 - RNA, 23 nt, Human
uguuuuucccuuuagcuguucca

SEQ ID NO: 745259 - RNA, 23 nt, Human
aaaaaaauuuaaaaauucagccc

SEQ ID NO: 745260 - RNA, 20 nt, Human
aaaaaauuaauucaguagac

SEQ ID NO: 745261 - RNA, 21 nt, Human
aaaaucagaaagcaacauuua

SEQ ID NO: 745262 - RNA, 23 nt, Human
aaacaaagaaauauuuaaucuga

SEQ ID NO: 745263 - RNA, 21 nt, Human
aaacaagucccuccccaucag

SEQ ID NO: 745264 - RNA, 22 nt, Human
aaagcaaaacacuuauuuccaa

SEQ ID NO: 745265 - RNA, 18 nt, Human
aaaguaggcaggcagaaa

SEQ ID NO: 745266 - RNA, 22 nt, Human
aacacaccuacugauugcuuga

SEQ ID NO: 745267 - RNA, 21 nt, Human
aacagaaucauccaccuuuga

SEQ ID NO: 745268 - RNA, 23 nt, Human
aagaagcuucaaacuagacacaa

SEQ ID NO: 745269 - RNA, 20 nt, Human
aagcugccaaaguccaacua

SEQ ID NO: 745270 - RNA, 21 nt, Human
acacuacagccuaucaagacg

SEQ ID NO: 745271 - RNA, 24 nt, Human
acuacagccuaucaagacgaaguu

SEQ ID NO: 745272 - RNA, 19 nt, Human
agaagcauuuauuuuaugc

SEQ ID NO: 745273 - RNA, 24 nt, Human
agaauuauacauaaaaguuuccaa

SEQ ID NO: 745274 - RNA, 26 nt, Human
agacaaaagcaaaacacuuauuucca

SEQ ID NO: 745275 - RNA, 19 nt, Human
agacacuugcaucauguua

SEQ ID NO: 745276 - RNA, 24 nt, Human
agaccaucagacaaaagcaaaaca

SEQ ID NO: 745277 - RNA, 20 nt, Human
agcacauucugcuagggcuu

SEQ ID NO: 745278 - RNA, 23 nt, Human
agcccagaccaucagacaaaagc

SEQ ID NO: 745279 - RNA, 18 nt, Human
aggauuuuacacuuguca

SEQ ID NO: 745280 - RNA, 19 nt, Human
aggcagagaguguguguuc

SEQ ID NO: 745281 - RNA, 19 nt, Human
aggcaggaacuggaaccaa

SEQ ID NO: 745282 - RNA, 20 nt, Human
aggcaggaacuggaaccaag

SEQ ID NO: 745283 - RNA, 19 nt, Human
agggcuuugcggaugaccc

SEQ ID NO: 745284 - RNA, 20 nt, Human
auaaaaaucagaaagcaaca

SEQ ID NO: 745285 - RNA, 22 nt, Human
augcugcauuucuugguuuuau

SEQ ID NO: 745286 - RNA, 21 nt, Human
caaauagcacaaugcugaaaa

SEQ ID NO: 745287 - RNA, 20 nt, Human
caagaauaugcaaaacuacu

SEQ ID NO: 745288 - RNA, 25 nt, Human
caagaguuucugcuguacauuucca

SEQ ID NO: 745289 - RNA, 24 nt, Human
caauccuaaaacaccuccaacuuu

SEQ ID NO: 745290 - RNA, 23 nt, Human
caccuccaacuuuccuuaaaagc

SEQ ID NO: 745291 - RNA, 22 nt, Human
cacucuaacagaaucauccacc

SEQ ID NO: 745292 - RNA, 26 nt, Human
cagaccaucagacaaaagcaaaacac

SEQ ID NO: 745293 - RNA, 23 nt, Human
caggcagaaagaauuauacauaa

SEQ ID NO: 745294 - RNA, 22 nt, Human
caucuuucagucaauacacagc

SEQ ID NO: 745295 - RNA, 22 nt, Human
caugaaaaaauucacaagaaag

SEQ ID NO: 745296 - RNA, 19 nt, Human
caugacaucuagaagcauu

SEQ ID NO: 745297 - RNA, 23 nt, Human
caugugcagcacaagaauaugca

SEQ ID NO: 745298 - RNA, 21 nt, Human
cauuuucuguucagggacauu

SEQ ID NO: 745299 - RNA, 18 nt, Human
ccaugacaucuagaagca

SEQ ID NO: 745300 - RNA, 19 nt, Human
ccauuguucccuaagcauc

SEQ ID NO: 745301 - RNA, 25 nt, Human
cccagaccaucagacaaaagcaaaa

SEQ ID NO: 745302 - RNA, 20 nt, Human
cccauguacacuacagccua

SEQ ID NO: 745303 - RNA, 21 nt, Human
cccguaaacaagucccucccc

SEQ ID NO: 745304 - RNA, 20 nt, Human
cccuacucuugcuucccuua

SEQ ID NO: 745305 - RNA, 23 nt, Human
ccuaagcaucuucugauaccuuu

SEQ ID NO: 745306 - RNA, 21 nt, Human
ccuaugcugaacaaugccaag

SEQ ID NO: 745307 - RNA, 23 nt, Human
ccuaugcugaacaaugccaagaa

SEQ ID NO: 745308 - RNA, 24 nt, Human
cguaaacaagucccuccccaucag

SEQ ID NO: 745309 - RNA, 20 nt, Human
cucaaauauaagucugcacu

SEQ ID NO: 745310 - RNA, 20 nt, Human
cucucaaacuucacucuaac

SEQ ID NO: 745311 - RNA, 18 nt, Human
cugccaaaguccaacuau

SEQ ID NO: 745312 - RNA, 20 nt, Human
cugcuucuguuuggccuuca

SEQ ID NO: 745313 - RNA, 20 nt, Human
cuggaaccaaguguuaagca

SEQ ID NO: 745314 - RNA, 19 nt, Human
cuguaaucauguuaugacu

SEQ ID NO: 745315 - RNA, 20 nt, Human
cuuaaaagcugccaaagucc

SEQ ID NO: 745316 - RNA, 22 nt, Human
cuuacaucauacaaggagcaaa

SEQ ID NO: 745317 - RNA, 24 nt, Human
cuucauuuucuguucagggacauu

SEQ ID NO: 745318 - RNA, 21 nt, Human
cuuuccuuaaaagcugccaaa

SEQ ID NO: 745319 - RNA, 22 nt, Human
gaaaagucuaggggaaggggga

SEQ ID NO: 745320 - RNA, 24 nt, Human
gacaaauuucauguuccuccagaa

SEQ ID NO: 745321 - RNA, 22 nt, Human
gacagucuuuacuccuuuaaaa

SEQ ID NO: 745322 - RNA, 21 nt, Human
gacagugggggcaggauagaa

SEQ ID NO: 745323 - RNA, 25 nt, Human
gcaggcagaaagaauuauacauaaa

SEQ ID NO: 745324 - RNA, 18 nt, Human
ggaagggggagaacagag

SEQ ID NO: 745325 - RNA, 21 nt, Human
ggcaauaaggaagagugggga

SEQ ID NO: 745326 - RNA, 25 nt, Human
gggaagggggagaacagaguugcuu

SEQ ID NO: 745327 - RNA, 18 nt, Human
gggauuuuaauguuuucc

SEQ ID NO: 745328 - RNA, 18 nt, Human
gucugcacuuuuguguug

SEQ ID NO: 745329 - RNA, 22 nt, Human
gucuuacaugccuucguuauuu

SEQ ID NO: 745330 - RNA, 24 nt, Human
gugagcuucauuuucuguucaggg

SEQ ID NO: 745331 - RNA, 19 nt, Human
uaaaacaccuccaacuuuc

SEQ ID NO: 745332 - RNA, 24 nt, Human
uaaaaguuuccaaaaggaaaaaca

SEQ ID NO: 745333 - RNA, 22 nt, Human
uaaaauggaugaauuuucagug

SEQ ID NO: 745334 - RNA, 20 nt, Human
uaaaauugcuaccacaucac

SEQ ID NO: 745335 - RNA, 23 nt, Human
uaacaugggaauuccuggcucua

SEQ ID NO: 745336 - RNA, 23 nt, Human
uaagaaaagucuaggggaagggg

SEQ ID NO: 745337 - RNA, 18 nt, Human
uaaggaaauggagugagc

SEQ ID NO: 745338 - RNA, 24 nt, Human
uacaagguucugcuucaaguuuuu

SEQ ID NO: 745339 - RNA, 24 nt, Human
uacucucaaacuucacucuaacag

SEQ ID NO: 745340 - RNA, 23 nt, Human
uacuuuacauuauacacacuuuu

SEQ ID NO: 745341 - RNA, 23 nt, Human
uaucacaaaauuaaaaaccugag

SEQ ID NO: 745342 - RNA, 22 nt, Human
uaugcugaacaaugccaagaaa

SEQ ID NO: 745343 - RNA, 20 nt, Human
uauguguacacauaaagugc

SEQ ID NO: 745344 - RNA, 24 nt, Human
uauuuuauauagauaauggagagu

SEQ ID NO: 745345 - RNA, 24 nt, Human
uccaaaaggaaaaacaaagaaaua

SEQ ID NO: 745346 - RNA, 19 nt, Human
ucccguaaacaagucccuc

SEQ ID NO: 745347 - RNA, 22 nt, Human
ucuggacaugagaaaagacaaa

SEQ ID NO: 745348 - RNA, 23 nt, Human
ugacauuuacucucaaacuucac

SEQ ID NO: 745349 - RNA, 22 nt, Human
ugccuucguuauuuuguuauca

SEQ ID NO: 745350 - RNA, 19 nt, Human
uggacagugggggcaggau

SEQ ID NO: 745351 - RNA, 18 nt, Human
uuagcauuuuaugguagg

SEQ ID NO: 745352 - RNA, 21 nt, Human
uuauaaaaccaaaugcuggac

SEQ ID NO: 745353 - RNA, 22 nt, Human
uuauaaaaccaaaugcuggaca

SEQ ID NO: 745354 - RNA, 21 nt, Human
uucaaacuagacacaaagggu

SEQ ID NO: 745355 - RNA, 18 nt, Human
uuccaaauauuccaacau

SEQ ID NO: 745356 - RNA, 19 nt, Human
uucccguaaacaagucccu

SEQ ID NO: 745357 - RNA, 20 nt, Human
uuccuuaaaagcugccaaag

SEQ ID NO: 745358 - RNA, 18 nt, Human
uuuaacuucucuccugca

SEQ ID NO: 745359 - RNA, 19 nt, Human
uuuccaaaaggaaaaacaa

SEQ ID NO: 745360 - RNA, 24 nt, Human
uuuggccuucauuuucucccuuug

SEQ ID NO: 745361 - RNA, 22 nt, Human
uuuuugcagaagcuggagccug

SEQ ID NO: 745362 - RNA, 21 nt, Human
aacacagaaaacugcaguuag

SEQ ID NO: 745363 - RNA, 19 nt, Human
aacccaggacgcgaaccca

SEQ ID NO: 745364 - RNA, 23 nt, Human
aagcaucagagccucugugaacc

SEQ ID NO: 745365 - RNA, 19 nt, Human
acccaggcccagggcuggg

SEQ ID NO: 745366 - RNA, 21 nt, Human
acccuacaaaauugaacaaca

SEQ ID NO: 745367 - RNA, 18 nt, Human
acugcagccaccgccggc

SEQ ID NO: 745368 - RNA, 19 nt, Human
acugcagccaccgccggcc

SEQ ID NO: 745369 - RNA, 18 nt, Human
aggcggcgggccgggggc

SEQ ID NO: 745370 - RNA, 23 nt, Human
caacccaggacgcgaacccacag

SEQ ID NO: 745371 - RNA, 24 nt, Human
caccagcaaucaaccaaaaagcau

SEQ ID NO: 745372 - RNA, 23 nt, Human
cacccaggcccagggcugggcug

SEQ ID NO: 745373 - RNA, 18 nt, Human
cacggcccagagaucagg

SEQ ID NO: 745374 - RNA, 18 nt, Human
cacggcccagagaucagg

SEQ ID NO: 745375 - RNA, 20 nt, Human
cacugcagccaccgccggcc

SEQ ID NO: 745376 - RNA, 18 nt, Human
cagaacacagaaaacugc

SEQ ID NO: 745377 - RNA, 19 nt, Human
cagagccucugugaaccug

SEQ ID NO: 745378 - RNA, 22 nt, Human
cagccaccgccggccauucuca

SEQ ID NO: 745379 - RNA, 22 nt, Human
cagcuuaaaaaggaugacuaga

SEQ ID NO: 745380 - RNA, 21 nt, Human
cagggccagcgcgcuccgccc

SEQ ID NO: 745381 - RNA, 21 nt, Human
caguuuucagaugugcucugg

SEQ ID NO: 745382 - RNA, 25 nt, Human
caucacacacacgcacggcuacgcc

SEQ ID NO: 745383 - RNA, 22 nt, Human
cauguugguguacauauauaca

SEQ ID NO: 745384 - RNA, 21 nt, Human
ccaccgccggccauucucacc

SEQ ID NO: 745385 - RNA, 20 nt, Human
ccaggacgcgaacccacagc

SEQ ID NO: 745386 - RNA, 18 nt, Human
ccaggcccagggcugggc

SEQ ID NO: 745387 - RNA, 21 nt, Human
ccaucacacacacgcacggcu

SEQ ID NO: 745388 - RNA, 18 nt, Human
cccagagaucagguccuc

SEQ ID NO: 745389 - RNA, 19 nt, Human
ccccccgccuccccgccuc

SEQ ID NO: 745390 - RNA, 22 nt, Human
ccccccgccuccccgccucccc

SEQ ID NO: 745391 - RNA, 20 nt, Human
cccccgccuccccgccuccc

SEQ ID NO: 745392 - RNA, 31 nt, Human
ccccgccgcccgccgcgcggaccccgccugg

SEQ ID NO: 745393 - RNA, 23 nt, Human
ccccgccuccccgcgcgccgccg

SEQ ID NO: 745394 - RNA, 19 nt, Human
cccgccgcgcggaccccgc

SEQ ID NO: 745395 - RNA, 20 nt, Human
cccgccgcgcggaccccgcc

SEQ ID NO: 745396 - RNA, 20 nt, Human
cccgcgcgccgccgcugccg

SEQ ID NO: 745397 - RNA, 23 nt, Human
cccgcgcgccgccgcugccgccg

SEQ ID NO: 745398 - RNA, 18 nt, Human
cccgcgucccacgucccg

SEQ ID NO: 745399 - RNA, 23 nt, Human
cccgcgucccacgucccggggga

SEQ ID NO: 745400 - RNA, 19 nt, Human
ccgcccgucccccgccgcc

SEQ ID NO: 745401 - RNA, 20 nt, Human
ccgcccgucccccgccgccc

SEQ ID NO: 745402 - RNA, 26 nt, Human
ccgccgcccgccgcgcggaccccgcc

SEQ ID NO: 745403 - RNA, 20 nt, Human
ccgccuccccgccuccccgc

SEQ ID NO: 745404 - RNA, 18 nt, Human
ccgcgcgccgccgcugcc

SEQ ID NO: 745405 - RNA, 25 nt, Human
ccgcgcgccgccgcugccgccgccc

SEQ ID NO: 745406 - RNA, 22 nt, Human
ccgcgcggaccccgccugcgcc

SEQ ID NO: 745407 - RNA, 18 nt, Human
ccgcugccgccgccccgc

SEQ ID NO: 745408 - RNA, 19 nt, Human
ccucaucacuccacuuaca

SEQ ID NO: 745409 - RNA, 19 nt, Human
ccuuccuugcagccacgga

SEQ ID NO: 745410 - RNA, 24 nt, Human
cgccgccccgcgcccgggccgcgc

SEQ ID NO: 745411 - RNA, 22 nt, Human
cgccgccgcugccgccgccccg

SEQ ID NO: 745412 - RNA, 22 nt, Human
cgccgcugccgccgccccgcgc

SEQ ID NO: 745413 - RNA, 23 nt, Human
cgucuguuaaauaaaaguuucau

SEQ ID NO: 745414 - RNA, 21 nt, Human
cuccccgcgcgccgccgcugc

SEQ ID NO: 745415 - RNA, 22 nt, Human
cugcgcccgcgucccacguccc

SEQ ID NO: 745416 - RNA, 21 nt, Human
cuguccugggagcuucccaac

SEQ ID NO: 745417 - RNA, 21 nt, Human
gaaaacugcaguuaggaacac

SEQ ID NO: 745418 - RNA, 26 nt, Human
gaacacagaaaacugcaguuaggaac

SEQ ID NO: 745419 - RNA, 18 nt, Human
gacaacgucugcaaaugc

SEQ ID NO: 745420 - RNA, 19 nt, Human
ggacgcgaacccacagcuc

SEQ ID NO: 745421 - RNA, 19 nt, Human
ggcaagcgguacccaugag

SEQ ID NO: 745422 - RNA, 20 nt, Human
ggccgggccccccgccuccc

SEQ ID NO: 745423 - RNA, 21 nt, Human
ggccgggggcgggccggaggc

SEQ ID NO: 745424 - RNA, 24 nt, Human
ggccgggggcgggccggaggcugc

SEQ ID NO: 745425 - RNA, 20 nt, Human
ggcugugaugguaagaaccc

SEQ ID NO: 745426 - RNA, 18 nt, Human
gggcagcuuggccuuccu

SEQ ID NO: 745427 - RNA, 21 nt, Human
gggccccccgccuccccgccu

SEQ ID NO: 745428 - RNA, 20 nt, Human
gggccgaggcgguguccucu

SEQ ID NO: 745429 - RNA, 19 nt, Human
gggccgggggcgggccgga

SEQ ID NO: 745430 - RNA, 25 nt, Human
gggcgcggggagggggcgcaggggc

SEQ ID NO: 745431 - RNA, 24 nt, Human
gggcugggcugccgagcagcugcc

SEQ ID NO: 745432 - RNA, 18 nt, Human
ggggaggggcgcgcagag

SEQ ID NO: 745433 - RNA, 20 nt, Human
gugauucccagggagggcag

SEQ ID NO: 745434 - RNA, 21 nt, Human
uaaaaguuucauguuggugua

SEQ ID NO: 745435 - RNA, 22 nt, Human
uaagaaccaaauguuuccuaag

SEQ ID NO: 745436 - RNA, 18 nt, Human
uagcagacggggaggggc

SEQ ID NO: 745437 - RNA, 22 nt, Human
uauaauagacuguuucccuucc

SEQ ID NO: 745438 - RNA, 19 nt, Human
uauacagggcuauguauaa

SEQ ID NO: 745439 - RNA, 22 nt, Human
ucagagccucugugaaccuggc

SEQ ID NO: 745440 - RNA, 21 nt, Human
ucagguccucaucacuccacu

SEQ ID NO: 745441 - RNA, 24 nt, Human
ucccccgccgcccgccgcgcggac

SEQ ID NO: 745442 - RNA, 19 nt, Human
uccccgcgcgccgccgcug

SEQ ID NO: 745443 - RNA, 22 nt, Human
uccccgcgcgccgccgcugccg

SEQ ID NO: 745444 - RNA, 25 nt, Human
uccccgcgcgccgccgcugccgccg

SEQ ID NO: 745445 - RNA, 23 nt, Human
uccucaggcuaccacugcagcca

SEQ ID NO: 745446 - RNA, 19 nt, Human
ugaacccacccaggcccag

SEQ ID NO: 745447 - RNA, 19 nt, Human
ugauugcaguuuucagaug

SEQ ID NO: 745448 - RNA, 21 nt, Human
ugcagccaccgccggccauuc

SEQ ID NO: 745449 - RNA, 21 nt, Human
ugcagggccagcgcgcuccgc

SEQ ID NO: 745450 - RNA, 24 nt, Human
ugcuuuauuucucuaccggcuuca

SEQ ID NO: 745451 - RNA, 18 nt, Human
uugacccaaccgacaagc

SEQ ID NO: 745452 - RNA, 21 nt, Human
aaaaaaccaaaauccaaaaca

SEQ ID NO: 745453 - RNA, 23 nt, Human
aaaaaccccacaaaaaaccaaaa

SEQ ID NO: 745454 - RNA, 19 nt, Human
aaaaacuccuuacuguaau

SEQ ID NO: 745455 - RNA, 20 nt, Human
aaaaccccacaaaaaaccaa

SEQ ID NO: 745456 - RNA, 20 nt, Human
aaaaggcuuggagagaguuu

SEQ ID NO: 745457 - RNA, 21 nt, Human
aaaccccacaaaaaaccaaaa

SEQ ID NO: 745458 - RNA, 18 nt, Human
aaagucaaacaaacaaua

SEQ ID NO: 745459 - RNA, 22 nt, Human
aaauaaauucacgcaaaaguaa

SEQ ID NO: 745460 - RNA, 23 nt, Human
aaauuucagauuauauaacacau

SEQ ID NO: 745461 - RNA, 24 nt, Human
aaccucccuuacacaaaagacaaa

SEQ ID NO: 745462 - RNA, 23 nt, Human
aaggcaggaagacugcuugaacc

SEQ ID NO: 745463 - RNA, 19 nt, Human
acaaaguuaauuuuuacag

SEQ ID NO: 745464 - RNA, 20 nt, Human
acacacacacacacacagga

SEQ ID NO: 745465 - RNA, 23 nt, Human
acccucuuggucuucugaaacag

SEQ ID NO: 745466 - RNA, 18 nt, Human
agauaaauccaacuguga

SEQ ID NO: 745467 - RNA, 20 nt, Human
agccaaucuuccccacagcu

SEQ ID NO: 745468 - RNA, 19 nt, Human
agccugggcaauguaguga

SEQ ID NO: 745469 - RNA, 20 nt, Human
agccugggcaauguagugag

SEQ ID NO: 745470 - RNA, 23 nt, Human
agccugggcaauguagugaggcc

SEQ ID NO: 745471 - RNA, 18 nt, Human
aggaguucaagacuagcc

SEQ ID NO: 745472 - RNA, 24 nt, Human
aggcaggaagacugcuugaaccca

SEQ ID NO: 745473 - RNA, 24 nt, Human
aguaggcuauuauuuuccuuugga

SEQ ID NO: 745474 - RNA, 23 nt, Human
auaaaugccaugugccaguuuua

SEQ ID NO: 745475 - RNA, 19 nt, Human
auauauauauauauauaua

SEQ ID NO: 745476 - RNA, 25 nt, Human
auccugaauucugcauugaguuucc

SEQ ID NO: 745477 - RNA, 22 nt, Human
aucguuuuuuaacaagauaacu

SEQ ID NO: 745478 - RNA, 20 nt, Human
caaaacacuucaggucccaa

SEQ ID NO: 745479 - RNA, 24 nt, Human
caaaacacuucaggucccaaccag

SEQ ID NO: 745480 - RNA, 21 nt, Human
caaaacaucuuuguuaaauaa

SEQ ID NO: 745481 - RNA, 23 nt, Human
caaaauaauaauuuaaaaacccc

SEQ ID NO: 745482 - RNA, 25 nt, Human
caaccuguaguaccaugggagccaa

SEQ ID NO: 745483 - RNA, 26 nt, Human
caacugugaaaauauagaaaaacucc

SEQ ID NO: 745484 - RNA, 24 nt, Human
caacuuucuaccagaaaguacacu

SEQ ID NO: 745485 - RNA, 25 nt, Human
caagaaauguuccaaaauucaaaaa

SEQ ID NO: 745486 - RNA, 25 nt, Human
cacgcaaaaguaauaaaaagguuuu

SEQ ID NO: 745487 - RNA, 22 nt, Human
cagaaaguacacuaaugugaga

SEQ ID NO: 745488 - RNA, 20 nt, Human
caucuuuguuaaauaaauuc

SEQ ID NO: 745489 - RNA, 24 nt, Human
caugcccagguacuuguauugucc

SEQ ID NO: 745490 - RNA, 27 nt, Human
cauuucaaauguuuuugcagcaacuuu

SEQ ID NO: 745491 - RNA, 19 nt, Human
ccaaaacacuucagguccc

SEQ ID NO: 745492 - RNA, 26 nt, Human
ccacaaaaaaccaaaauccaaaacac

SEQ ID NO: 745493 - RNA, 21 nt, Human
ccacaaaaauggagauucaua

SEQ ID NO: 745494 - RNA, 21 nt, Human
cccagguacuuguauuguccc

SEQ ID NO: 745495 - RNA, 19 nt, Human
cccuuacacaaaagacaaa

SEQ ID NO: 745496 - RNA, 19 nt, Human
ccuguaaucccugcuacuu

SEQ ID NO: 745497 - RNA, 22 nt, Human
ccuguaaucccugcuacuuagg

SEQ ID NO: 745498 - RNA, 22 nt, Human
cgcaaaaguaauaaaaagguuu

SEQ ID NO: 745499 - RNA, 18 nt, Human
cuagauaauauccauaga

SEQ ID NO: 745500 - RNA, 22 nt, Human
cuagccucuagaaccucccuua

SEQ ID NO: 745501 - RNA, 19 nt, Human
cucauugaagcauuuccaa

SEQ ID NO: 745502 - RNA, 23 nt, Human
cugucacaaguucacucauugau

SEQ ID NO: 745503 - RNA, 22 nt, Human
cuuacacaaagacauauauaug

SEQ ID NO: 745504 - RNA, 20 nt, Human
cuugaacccaggaguucaag

SEQ ID NO: 745505 - RNA, 23 nt, Human
cuugaacccaggaguucaagacu

SEQ ID NO: 745506 - RNA, 24 nt, Human
gaaaaggauuccuuaauaugcuga

SEQ ID NO: 745507 - RNA, 18 nt, Human
gaaaauauagaaaaacuc

SEQ ID NO: 745508 - RNA, 21 nt, Human
gaaacaagaaauguuccaaaa

SEQ ID NO: 745509 - RNA, 18 nt, Human
gaaacagagaugcagaaa

SEQ ID NO: 745510 - RNA, 19 nt, Human
gaacaaaaguguacagaua

SEQ ID NO: 745511 - RNA, 18 nt, Human
gacacauaagggaaaugc

SEQ ID NO: 745512 - RNA, 22 nt, Human
gcaggaagacugcuugaaccca

SEQ ID NO: 745513 - RNA, 20 nt, Human
gccuguaaucccugcuacuu

SEQ ID NO: 745514 - RNA, 22 nt, Human
gcuugaacccaggaguucaaga

SEQ ID NO: 745515 - RNA, 22 nt, Human
ggaagaagaaaccagaaaaaaa

SEQ ID NO: 745516 - RNA, 18 nt, Human
gucuucugaaacagagau

SEQ ID NO: 745517 - RNA, 22 nt, Human
uaaaaaccccacaaaaaaccaa

SEQ ID NO: 745518 - RNA, 19 nt, Human
uaaaacuuggugcugcuga

SEQ ID NO: 745519 - RNA, 23 nt, Human
uaaaaugaacaaaaguguacaga

SEQ ID NO: 745520 - RNA, 18 nt, Human
uacacaaaagacaaaaca

SEQ ID NO: 745521 - RNA, 20 nt, Human
uacacacacacacacacaca

SEQ ID NO: 745522 - RNA, 21 nt, Human
uacucagucugguaagucacc

SEQ ID NO: 745523 - RNA, 24 nt, Human
uagaaaaacuccacaaaaauggag

SEQ ID NO: 745524 - RNA, 18 nt, Human
uagccucuagaaccuccc

SEQ ID NO: 745525 - RNA, 20 nt, Human
uagccugggcaauguaguga

SEQ ID NO: 745526 - RNA, 19 nt, Human
uauaacacauaacacagga

SEQ ID NO: 745527 - RNA, 25 nt, Human
uauauacacacacacacacacacag

SEQ ID NO: 745528 - RNA, 26 nt, Human
uauauacacacacacacacacacagg

SEQ ID NO: 745529 - RNA, 18 nt, Human
uauauauauauauauaca

SEQ ID NO: 745530 - RNA, 18 nt, Human
uauauauauauauauaua

SEQ ID NO: 745531 - RNA, 19 nt, Human
uauauauauauauauauau

SEQ ID NO: 745532 - RNA, 21 nt, Human
uauauauauauauauauauac

SEQ ID NO: 745533 - RNA, 20 nt, Human
uauauauuuauauauauaua

SEQ ID NO: 745534 - RNA, 22 nt, Human
uauauuuauauauauauauaua

SEQ ID NO: 745535 - RNA, 24 nt, Human
uccaaaauaauaauuuaaaaaccc

SEQ ID NO: 745536 - RNA, 19 nt, Human
uccaaauauugguacgggg

SEQ ID NO: 745537 - RNA, 21 nt, Human
uccacaaaaauggagauucau

SEQ ID NO: 745538 - RNA, 20 nt, Human
uccccagaaauacucagucu

SEQ ID NO: 745539 - RNA, 19 nt, Human
ucuaccagaaaguacacua

SEQ ID NO: 745540 - RNA, 22 nt, Human
ugaacaaaaguguacagauaug

SEQ ID NO: 745541 - RNA, 23 nt, Human
ugaacccaggaguucaagacuag

SEQ ID NO: 745542 - RNA, 21 nt, Human
ugacacauaagggaaaugcuc

SEQ ID NO: 745543 - RNA, 23 nt, Human
ugagaccaauggccucuucucuc

SEQ ID NO: 745544 - RNA, 23 nt, Human
ugaguaucccuaaucuaaaaguc

SEQ ID NO: 745545 - RNA, 24 nt, Human
ugccuguaaucccugcuacuuagg

SEQ ID NO: 745546 - RNA, 19 nt, Human
ugccuuggauuuaaaacau

SEQ ID NO: 745547 - RNA, 20 nt, Human
uggaagaagaaaccagaaaa

SEQ ID NO: 745548 - RNA, 19 nt, Human
uggagauucauacuuaaaa

SEQ ID NO: 745549 - RNA, 19 nt, Human
uggcuguagcauuaauuuu

SEQ ID NO: 745550 - RNA, 18 nt, Human
uguaaucccugcuacuua

SEQ ID NO: 745551 - RNA, 24 nt, Human
uguaauuaccauuuuguuucuucu

SEQ ID NO: 745552 - RNA, 18 nt, Human
ugucuggaauaauuccag

SEQ ID NO: 745553 - RNA, 21 nt, Human
ugugaaaauauagaaaaacuc

SEQ ID NO: 745554 - RNA, 21 nt, Human
uucaggucccaaccauuuuga

SEQ ID NO: 745555 - RNA, 18 nt, Human
uuccugauuguaacauug

SEQ ID NO: 745556 - RNA, 18 nt, Human
uugaaugguuguuuccag

SEQ ID NO: 745557 - RNA, 19 nt, Human
uugaaugguuguuuccagu

SEQ ID NO: 745558 - RNA, 23 nt, Human
uugcagcaacuuucuaccagaaa

SEQ ID NO: 745559 - RNA, 23 nt, Human
uuggagagaguuuuauuucaguu

SEQ ID NO: 745560 - RNA, 19 nt, Human
uugguacaacaugaaccuc

SEQ ID NO: 745561 - RNA, 23 nt, Human
uuuaaaauuuuuauccugaauuc

SEQ ID NO: 745562 - RNA, 24 nt, Human
uuuaagcaauaaaaauuggcaugu

SEQ ID NO: 745563 - RNA, 19 nt, Human
uuuauauauauauauauau

SEQ ID NO: 745564 - RNA, 20 nt, Human
uuuauauauauauauauauu

SEQ ID NO: 745565 - RNA, 23 nt, Human
uuuaugaagcuuccaauuuuaaa

SEQ ID NO: 745566 - RNA, 23 nt, Human
uuugaaaugcuaccacugucaca

SEQ ID NO: 745567 - RNA, 21 nt, Human
uuugcucaaauguagaaaagg

SEQ ID NO: 745568 - RNA, 22 nt, Human
uuuuacagucacugccacauua

SEQ ID NO: 745569 - RNA, 25 nt, Human
uuuuaugaagcuuccaauuuuaaaa

SEQ ID NO: 745570 - RNA, 21 nt, Human
aaagauugcugccucagacaa

SEQ ID NO: 745571 - RNA, 18 nt, Human
aagagagagaagaagagg

SEQ ID NO: 745572 - RNA, 21 nt, Human
aagcagcagcccggauucuca

SEQ ID NO: 745573 - RNA, 20 nt, Human
aagcagcugagaaccaccug

SEQ ID NO: 745574 - RNA, 19 nt, Human
aagcaggaggaaaagcucc

SEQ ID NO: 745575 - RNA, 27 nt, Human
aaggggacaaugaagagagcuaaggga

SEQ ID NO: 745576 - RNA, 19 nt, Human
aagugaaaaacaacucacc

SEQ ID NO: 745577 - RNA, 21 nt, Human
acaaugaagagagcuaaggga

SEQ ID NO: 745578 - RNA, 23 nt, Human
accauguucuauaaccaaggagc

SEQ ID NO: 745579 - RNA, 21 nt, Human
acuccuuccuucuuccuccug

SEQ ID NO: 745580 - RNA, 19 nt, Human
acugucuccuuccucuuuc

SEQ ID NO: 745581 - RNA, 21 nt, Human
agaaauacaggcauagaggca

SEQ ID NO: 745582 - RNA, 23 nt, Human
agaaauacaggcauagaggcaag

SEQ ID NO: 745583 - RNA, 20 nt, Human
agaagaagaggagaagaaga

SEQ ID NO: 745584 - RNA, 19 nt, Human
agaagccaauccagcuggu

SEQ ID NO: 745585 - RNA, 18 nt, Human
agagaagaagaggagaag

SEQ ID NO: 745586 - RNA, 18 nt, Human
agagagcaguagcugaaa

SEQ ID NO: 745587 - RNA, 18 nt, Human
agagcccuccgccuucuc

SEQ ID NO: 745588 - RNA, 20 nt, Human
agaggcaagagagagaagaa

SEQ ID NO: 745589 - RNA, 22 nt, Human
agaggcaagagagagaagaaga

SEQ ID NO: 745590 - RNA, 22 nt, Human
agaugguagcuaggcccaagca

SEQ ID NO: 745591 - RNA, 23 nt, Human
agcggucacucccgccuuaagcc

SEQ ID NO: 745592 - RNA, 21 nt, Human
aggaaucugcgaagcugcggc

SEQ ID NO: 745593 - RNA, 25 nt, Human
aggagaagaagauagcaggaaguaa

SEQ ID NO: 745594 - RNA, 21 nt, Human
aggaggaauggaguagaccua

SEQ ID NO: 745595 - RNA, 19 nt, Human
aggagucagucuagggcuc

SEQ ID NO: 745596 - RNA, 19 nt, Human
aggcaagagagagaagaag

SEQ ID NO: 745597 - RNA, 27 nt, Human
aggcaagagagagaagaagagggaccc

SEQ ID NO: 745598 - RNA, 23 nt, Human
aggcacuugacuuauucaaguaa

SEQ ID NO: 745599 - RNA, 18 nt, Human
aggcaggaggccggcagc

SEQ ID NO: 745600 - RNA, 22 nt, Human
aggcaggaggccggcagcagga

SEQ ID NO: 745601 - RNA, 23 nt, Human
aggcagggaaggggccagcugca

SEQ ID NO: 745602 - RNA, 24 nt, Human
aggccugucauauugccagaaaua

SEQ ID NO: 745603 - RNA, 22 nt, Human
agggacuucuggguccccaugg

SEQ ID NO: 745604 - RNA, 24 nt, Human
agggggugcugcugggacucaagg

SEQ ID NO: 745605 - RNA, 22 nt, Human
aguaaaggggacaaugaagaga

SEQ ID NO: 745606 - RNA, 24 nt, Human
agucuccaggagguccaagaguag

SEQ ID NO: 745607 - RNA, 21 nt, Human
augccaaagauugcugccuca

SEQ ID NO: 745608 - RNA, 22 nt, Human
auggagcccuggugaaaggcug

SEQ ID NO: 745609 - RNA, 25 nt, Human
auggagcccuggugaaaggcugcug

SEQ ID NO: 745610 - RNA, 18 nt, Human
caaacaguggauggugac

SEQ ID NO: 745611 - RNA, 24 nt, Human
caagcaggaggaaaagcuccacag

SEQ ID NO: 745612 - RNA, 26 nt, Human
caagugaaaaacaacucaccucaaac

SEQ ID NO: 745613 - RNA, 23 nt, Human
cacaaaaagggggugcugcuggg

SEQ ID NO: 745614 - RNA, 23 nt, Human
cacacacaacauccccuaaccac

SEQ ID NO: 745615 - RNA, 21 nt, Human
caccaggaauacgcaacuauc

SEQ ID NO: 745616 - RNA, 20 nt, Human
caccuggcucagagcaggau

SEQ ID NO: 745617 - RNA, 27 nt, Human
cacugggaggugacuuugcccccggga

SEQ ID NO: 745618 - RNA, 22 nt, Human
cacugucuccuuccucuuucug

SEQ ID NO: 745619 - RNA, 24 nt, Human
cagaaauacaggcauagaggcaag

SEQ ID NO: 745620 - RNA, 19 nt, Human
cagaauggagucagucacu

SEQ ID NO: 745621 - RNA, 20 nt, Human
cagauggagcccuggugaaa

SEQ ID NO: 745622 - RNA, 23 nt, Human
cagcaacggggggacaagaggaa

SEQ ID NO: 745623 - RNA, 22 nt, Human
cagcagcacgcagagcucuggu

SEQ ID NO: 745624 - RNA, 18 nt, Human
cagcagccggucgcuucc

SEQ ID NO: 745625 - RNA, 20 nt, Human
cagcccggauucucaauaac

SEQ ID NO: 745626 - RNA, 18 nt, Human
caggacagccccagggaa

SEQ ID NO: 745627 - RNA, 21 nt, Human
caggcccaggcaggaggccgg

SEQ ID NO: 745628 - RNA, 20 nt, Human
caguguagagaaccugggau

SEQ ID NO: 745629 - RNA, 22 nt, Human
cauggcaggucugaggggcaag

SEQ ID NO: 745630 - RNA, 18 nt, Human
ccaaagauugcugccuca

SEQ ID NO: 745631 - RNA, 24 nt, Human
ccaagcaggaggaaaagcuccaca

SEQ ID NO: 745632 - RNA, 21 nt, Human
ccagaaauacaggcauagagg

SEQ ID NO: 745633 - RNA, 24 nt, Human
ccaggaauacgcaacuauccaagg

SEQ ID NO: 745634 - RNA, 19 nt, Human
cccaagcucagcucaaagu

SEQ ID NO: 745635 - RNA, 23 nt, Human
ccccagggcaguguagagaaccc

SEQ ID NO: 745636 - RNA, 22 nt, Human
cccggauucucaauaaccuccg

SEQ ID NO: 745637 - RNA, 22 nt, Human
ccguacacgucgccgauagaca

SEQ ID NO: 745638 - RNA, 21 nt, Human
ccugagcacaggcagccacca

SEQ ID NO: 745639 - RNA, 22 nt, Human
ccuguagaugccaaagauugcu

SEQ ID NO: 745640 - RNA, 23 nt, Human
ccuucccccuucucaaagcuggg

SEQ ID NO: 745641 - RNA, 22 nt, Human
ccuucuuccuccuggcacuguc

SEQ ID NO: 745642 - RNA, 22 nt, Human
ccuuggaaagagagcaguagcu

SEQ ID NO: 745643 - RNA, 19 nt, Human
cgauagacaccuaaggcuu

SEQ ID NO: 745644 - RNA, 19 nt, Human
cggccagcccucuucuugg

SEQ ID NO: 745645 - RNA, 19 nt, Human
cuauaaccaaggagcagca

SEQ ID NO: 745646 - RNA, 18 nt, Human
cucccgccuuaagcccag

SEQ ID NO: 745647 - RNA, 18 nt, Human
cuccuuccuucuuccucc

SEQ ID NO: 745648 - RNA, 18 nt, Human
cugaugcaugggaggcug

SEQ ID NO: 745649 - RNA, 18 nt, Human
cugcagaaacugugggag

SEQ ID NO: 745650 - RNA, 19 nt, Human
cuuccugggcugccagaau

SEQ ID NO: 745651 - RNA, 24 nt, Human
cuucuuccuccuggcacugucucc

SEQ ID NO: 745652 - RNA, 18 nt, Human
cuucuuggaucucgcugu

SEQ ID NO: 745653 - RNA, 22 nt, Human
gaaaagcuccacaggacagccc

SEQ ID NO: 745654 - RNA, 22 nt, Human
gaaaggacagaucauagguggg

SEQ ID NO: 745655 - RNA, 21 nt, Human
gaagaggagaagaagauagca

SEQ ID NO: 745656 - RNA, 21 nt, Human
gaauggagucagucacucugc

SEQ ID NO: 745657 - RNA, 22 nt, Human
gacaaugaagagagcuaaggga

SEQ ID NO: 745658 - RNA, 20 nt, Human
gagaaccugggauuagaggg

SEQ ID NO: 745659 - RNA, 22 nt, Human
gagcacaggcagccaccagggc

SEQ ID NO: 745660 - RNA, 20 nt, Human
gagcagcaacggggggacaa

SEQ ID NO: 745661 - RNA, 19 nt, Human
gagcucugguccccgccag

SEQ ID NO: 745662 - RNA, 20 nt, Human
gcaggaggccggcagcagga

SEQ ID NO: 745663 - RNA, 21 nt, Human
gcagggaaggggccagcugca

SEQ ID NO: 745664 - RNA, 22 nt, Human
gcccaagcaggaggaaaagcuc

SEQ ID NO: 745665 - RNA, 19 nt, Human
gccccagacguuuugcucc

SEQ ID NO: 745666 - RNA, 23 nt, Human
gcccuggggccacaaaaaggggg

SEQ ID NO: 745667 - RNA, 19 nt, Human
ggacacacacaacaucccc

SEQ ID NO: 745668 - RNA, 20 nt, Human
ggagacaaacagcugguccc

SEQ ID NO: 745669 - RNA, 20 nt, Human
ggaggaggaggagggacucu

SEQ ID NO: 745670 - RNA, 21 nt, Human
ggaggaggaggagggacucug

SEQ ID NO: 745671 - RNA, 19 nt, Human
ggaggagggacucugacac

SEQ ID NO: 745672 - RNA, 19 nt, Human
ggaggcugcuuaugcccug

SEQ ID NO: 745673 - RNA, 21 nt, Human
ggauaaaccugagccuggggg

SEQ ID NO: 745674 - RNA, 22 nt, Human
ggcaagggcuggccuuaacagu

SEQ ID NO: 745675 - RNA, 21 nt, Human
ggccccagacguuuugcuccu

SEQ ID NO: 745676 - RNA, 20 nt, Human
ggccgggaccugggaccgac

SEQ ID NO: 745677 - RNA, 18 nt, Human
ggccuuggaaagagagca

SEQ ID NO: 745678 - RNA, 20 nt, Human
gggagcagcugaugcauggg

SEQ ID NO: 745679 - RNA, 24 nt, Human
gguuccgggcucucauuacggagg

SEQ ID NO: 745680 - RNA, 21 nt, Human
guccuggcucgcaggccccag

SEQ ID NO: 745681 - RNA, 21 nt, Human
gugaaaaacaacucaccucaa

SEQ ID NO: 745682 - RNA, 19 nt, Human
guuggagagguuggaggag

SEQ ID NO: 745683 - RNA, 23 nt, Human
uaaaccccagggcaguguagaga

SEQ ID NO: 745684 - RNA, 23 nt, Human
uaacaguugcuuuacuucuccca

SEQ ID NO: 745685 - RNA, 26 nt, Human
uagaggcaagagagagaagaagagga

SEQ ID NO: 745686 - RNA, 21 nt, Human
uagcacccaggacuuccuggg

SEQ ID NO: 745687 - RNA, 22 nt, Human
uagcucgguauuuccaaacaag

SEQ ID NO: 745688 - RNA, 21 nt, Human
uauccaagguaaagccuuuag

SEQ ID NO: 745689 - RNA, 21 nt, Human
ucaaacaguggauggugacag

SEQ ID NO: 745690 - RNA, 18 nt, Human
uccagcugguaaacccca

SEQ ID NO: 745691 - RNA, 23 nt, Human
uccagcugguaaaccccagggca

SEQ ID NO: 745692 - RNA, 20 nt, Human
ucccccuucucaaagcuggg

SEQ ID NO: 745693 - RNA, 19 nt, Human
ucccucacugguuaagcgg

SEQ ID NO: 745694 - RNA, 21 nt, Human
uccuggcugaggguuccgcgc

SEQ ID NO: 745695 - RNA, 23 nt, Human
uccugggcugccagaauggaguc

SEQ ID NO: 745696 - RNA, 26 nt, Human
uccuugaccaggacuaccagcgaggc

SEQ ID NO: 745697 - RNA, 24 nt, Human
ucgcaggccccagacguuuugcuc

SEQ ID NO: 745698 - RNA, 19 nt, Human
ucuauaaccaaggagcagc

SEQ ID NO: 745699 - RNA, 23 nt, Human
ucuccaacugggcacugggcuug

SEQ ID NO: 745700 - RNA, 18 nt, Human
ucucgcugucuguauggu

SEQ ID NO: 745701 - RNA, 19 nt, Human
ucugcagaaacugugggag

SEQ ID NO: 745702 - RNA, 21 nt, Human
ucugcagaaacugugggagau

SEQ ID NO: 745703 - RNA, 22 nt, Human
ucugcgaagcugcggcacaaag

SEQ ID NO: 745704 - RNA, 22 nt, Human
ucugggccaaagucaggagggc

SEQ ID NO: 745705 - RNA, 19 nt, Human
ugaaaaacaacucaccuca

SEQ ID NO: 745706 - RNA, 21 nt, Human
ugaaaaacaacucaccucaaa

SEQ ID NO: 745707 - RNA, 22 nt, Human
ugaaaaacaacucaccucaaac

SEQ ID NO: 745708 - RNA, 23 nt, Human
ugaaaaacaacucaccucaaaca

SEQ ID NO: 745709 - RNA, 21 nt, Human
ugaaaggcugcugccaccugg

SEQ ID NO: 745710 - RNA, 23 nt, Human
ugacaaaauccuagagauucagg

SEQ ID NO: 745711 - RNA, 25 nt, Human
ugacacccuugggaagcaguuggug

SEQ ID NO: 745712 - RNA, 21 nt, Human
ugacagcaggcagggaagggg

SEQ ID NO: 745713 - RNA, 23 nt, Human
ugacuuugcccccggccagcccu

SEQ ID NO: 745714 - RNA, 22 nt, Human
ugccagaaauacaggcauagag

SEQ ID NO: 745715 - RNA, 22 nt, Human
ugcuccacugaagcacagcugc

SEQ ID NO: 745716 - RNA, 21 nt, Human
ugcugcugggacucaaggaua

SEQ ID NO: 745717 - RNA, 22 nt, Human
ugcugcugggacucaaggauac

SEQ ID NO: 745718 - RNA, 24 nt, Human
uggagcugaggaccugagcacagg

SEQ ID NO: 745719 - RNA, 18 nt, Human
uggaggaggaggagggac

SEQ ID NO: 745720 - RNA, 23 nt, Human
uggaggaggaggagggacucuga

SEQ ID NO: 745721 - RNA, 19 nt, Human
uggcucgcaggccccagac

SEQ ID NO: 745722 - RNA, 22 nt, Human
uggcugagacucuucacagaug

SEQ ID NO: 745723 - RNA, 22 nt, Human
ugggaaaggacagaucauaggu

SEQ ID NO: 745724 - RNA, 18 nt, Human
ugggaagcaguuggugau

SEQ ID NO: 745725 - RNA, 19 nt, Human
ugggaagcaguuggugaug

SEQ ID NO: 745726 - RNA, 21 nt, Human
ugggagcagcugaugcauggg

SEQ ID NO: 745727 - RNA, 18 nt, Human
ugggaggcugcuuaugcc

SEQ ID NO: 745728 - RNA, 24 nt, Human
ugggaggcugcuuaugcccugggg

SEQ ID NO: 745729 - RNA, 22 nt, Human
ugggaggugacuuugcccccgg

SEQ ID NO: 745730 - RNA, 21 nt, Human
ugggauuagagggagauggua

SEQ ID NO: 745731 - RNA, 20 nt, Human
ugggcagggcacacagaugg

SEQ ID NO: 745732 - RNA, 18 nt, Human
uggugaugggcagggcac

SEQ ID NO: 745733 - RNA, 24 nt, Human
ugguggcagcagcagcacgcagag

SEQ ID NO: 745734 - RNA, 21 nt, Human
ugucccgggggugcugcagga

SEQ ID NO: 745735 - RNA, 22 nt, Human
ugucuccuuccucuuucugccu

SEQ ID NO: 745736 - RNA, 23 nt, Human
ugugacuccaagugacaaaaucc

SEQ ID NO: 745737 - RNA, 22 nt, Human
uguucuauaaccaaggagcagc

SEQ ID NO: 745738 - RNA, 24 nt, Human
uuaacaguugcuuuacuucuccca

SEQ ID NO: 745739 - RNA, 21 nt, Human
uucagugcuucccucacuggu

SEQ ID NO: 745740 - RNA, 19 nt, Human
uuccucuauaaaauaucug

SEQ ID NO: 745741 - RNA, 20 nt, Human
uuccucuuucugccuccaca

SEQ ID NO: 745742 - RNA, 26 nt, Human
uuccuucuuccuccuggcacugucuc

SEQ ID NO: 745743 - RNA, 22 nt, Human
uucuugguggcagcagcagcac

SEQ ID NO: 745744 - RNA, 19 nt, Human
uuggaguucugaucuuggg

SEQ ID NO: 745745 - RNA, 22 nt, Human
uuugcccccggccagcccucuu

SEQ ID NO: 745746 - RNA, 18 nt, Human
aaaugcccacaggggccg

SEQ ID NO: 745747 - RNA, 20 nt, Human
agaggcaaaaagcaauggca

SEQ ID NO: 745748 - RNA, 25 nt, Human
agaggcaaaaagcaauggcagggag

SEQ ID NO: 745749 - RNA, 18 nt, Human
agcggcgaacgguggggg

SEQ ID NO: 745750 - RNA, 21 nt, Human
aggcaaaaagcaauggcaggg

SEQ ID NO: 745751 - RNA, 23 nt, Human
auggcagggaggugggacagagg

SEQ ID NO: 745752 - RNA, 28 nt, Human
gggagaggcaaaaagcaauggcagggag

SEQ ID NO: 745753 - RNA, 18 nt, Human
gggcaggggggggugcgg

SEQ ID NO: 745754 - RNA, 20 nt, Human
ggugggggggcagggggggg

SEQ ID NO: 745755 - RNA, 20 nt, Human
uuagcggcugaagcagucug

SEQ ID NO: 745756 - RNA, 27 nt, Human
aaaaaaacauugacaauaaaacaacug

SEQ ID NO: 745757 - RNA, 20 nt, Human
aaaaaaauccuuaagccccc

SEQ ID NO: 745758 - RNA, 18 nt, Human
aaaaauacaguaaagaca

SEQ ID NO: 745759 - RNA, 26 nt, Human
aaaaauuaacaagaaugcaaacacga

SEQ ID NO: 745760 - RNA, 27 nt, Human
aaaaugcccucaucauuucacaaacua

SEQ ID NO: 745761 - RNA, 19 nt, Human
aaacagaaauacaagaaaa

SEQ ID NO: 745762 - RNA, 22 nt, Human
aaacuccaaaguaauuuucugg

SEQ ID NO: 745763 - RNA, 21 nt, Human
aaaugaucaaaaaggcugugu

SEQ ID NO: 745764 - RNA, 23 nt, Human
aacuaugaaaaucugugucccca

SEQ ID NO: 745765 - RNA, 23 nt, Human
aagacuuucccucaaacauggaa

SEQ ID NO: 745766 - RNA, 21 nt, Human
aagauuuuuuuuuuacucaaa

SEQ ID NO: 745767 - RNA, 20 nt, Human
aagccccccaaaaauggaaa

SEQ ID NO: 745768 - RNA, 18 nt, Human
acaaagauagaauggaga

SEQ ID NO: 745769 - RNA, 19 nt, Human
acaaugucaaaugcuagag

SEQ ID NO: 745770 - RNA, 28 nt, Human
acacagcuuaaagaaaggagggaacgcc

SEQ ID NO: 745771 - RNA, 19 nt, Human
acacaggacucccucccuc

SEQ ID NO: 745772 - RNA, 19 nt, Human
acacuuaaacaaaaugugc

SEQ ID NO: 745773 - RNA, 20 nt, Human
accaucaaaaaauaaaacaa

SEQ ID NO: 745774 - RNA, 19 nt, Human
acugcaauuuuuauacauu

SEQ ID NO: 745775 - RNA, 24 nt, Human
acuguacaaaauuaccagcaagac

SEQ ID NO: 745776 - RNA, 19 nt, Human
acuugugguuuacuggaac

SEQ ID NO: 745777 - RNA, 24 nt, Human
agaacaaaaauacaguaaagacaa

SEQ ID NO: 745778 - RNA, 25 nt, Human
agacaauaauccagcagcuacaaac

SEQ ID NO: 745779 - RNA, 19 nt, Human
agaggacaaaauguuaaaa

SEQ ID NO: 745780 - RNA, 21 nt, Human
agcaagcagauaaaaugcccu

SEQ ID NO: 745781 - RNA, 20 nt, Human
agccaagaugguaaagccaa

SEQ ID NO: 745782 - RNA, 21 nt, Human
aggacucccucccucccacag

SEQ ID NO: 745783 - RNA, 28 nt, Human
aggcagaaacaguaacacuuaaacaaaa

SEQ ID NO: 745784 - RNA, 21 nt, Human
agucuuguuaagguuuaugug

SEQ ID NO: 745785 - RNA, 19 nt, Human
augacaguucccugccccc

SEQ ID NO: 745786 - RNA, 24 nt, Human
augauguauuaauagaaggcacca

SEQ ID NO: 745787 - RNA, 19 nt, Human
auggaaacuaugaaaaucu

SEQ ID NO: 745788 - RNA, 27 nt, Human
auugcacuauuuguguucccagcauua

SEQ ID NO: 745789 - RNA, 28 nt, Human
caaaaaaaaaauuaacaagaaugcaaac

SEQ ID NO: 745790 - RNA, 24 nt, Human
caaaaaauaaaacaaaaucagcaa

SEQ ID NO: 745791 - RNA, 24 nt, Human
caaaaucagcaaauaacaguaaug

SEQ ID NO: 745792 - RNA, 22 nt, Human
caaaaugaaugacaguucccug

SEQ ID NO: 745793 - RNA, 25 nt, Human
caaacacacaggacucccucccucc

SEQ ID NO: 745794 - RNA, 22 nt, Human
caaagccaaaaaaaaaauuaac

SEQ ID NO: 745795 - RNA, 26 nt, Human
caaauaacugacuuccuccuucccuc

SEQ ID NO: 745796 - RNA, 21 nt, Human
caagaacaaugucucugccgc

SEQ ID NO: 745797 - RNA, 19 nt, Human
caagaaugcaaacacgaug

SEQ ID NO: 745798 - RNA, 23 nt, Human
caagauaaauaauaugcuagucc

SEQ ID NO: 745799 - RNA, 22 nt, Human
caauaaagaugguaauccauug

SEQ ID NO: 745800 - RNA, 22 nt, Human
cacaaacacacaggacucccuc

SEQ ID NO: 745801 - RNA, 24 nt, Human
caccucaauuuaacugauaaccaa

SEQ ID NO: 745802 - RNA, 19 nt, Human
caccuccggcucccgggcu

SEQ ID NO: 745803 - RNA, 25 nt, Human
cagaaacaguaacacuuaaacaaaa

SEQ ID NO: 745804 - RNA, 27 nt, Human
caggagccacucgggugccgaccuggu

SEQ ID NO: 745805 - RNA, 21 nt, Human
caguaaagacaauuuucacug

SEQ ID NO: 745806 - RNA, 19 nt, Human
cauauugcccaguacauga

SEQ ID NO: 745807 - RNA, 26 nt, Human
caucaaaaaauaaaacaaaaucagca

SEQ ID NO: 745808 - RNA, 23 nt, Human
ccaaagccaaaaaaaaaauuaac

SEQ ID NO: 745809 - RNA, 24 nt, Human
ccagcaagacuggaaugauguauu

SEQ ID NO: 745810 - RNA, 20 nt, Human
cccaguacaugaaaaacaaa

SEQ ID NO: 745811 - RNA, 20 nt, Human
cccccaaauagaaaaugcaa

SEQ ID NO: 745812 - RNA, 20 nt, Human
ccgaaaauugcaguauccuc

SEQ ID NO: 745813 - RNA, 20 nt, Human
ccucaucauuucacaaacua

SEQ ID NO: 745814 - RNA, 20 nt, Human
ccugccccccaaauagaaaa

SEQ ID NO: 745815 - RNA, 18 nt, Human
cguagauaguuuaagaua

SEQ ID NO: 745816 - RNA, 21 nt, Human
cuacuuuucuauuauuacacu

SEQ ID NO: 745817 - RNA, 20 nt, Human
cucaaagaauacuuuccacc

SEQ ID NO: 745818 - RNA, 20 nt, Human
cugaaaagaggacaaaaugu

SEQ ID NO: 745819 - RNA, 18 nt, Human
cugaagcugaauggcucu

SEQ ID NO: 745820 - RNA, 26 nt, Human
cuuaaagagcugcuguucuuuucucc

SEQ ID NO: 745821 - RNA, 21 nt, Human
cuuccuccuucccucucccca

SEQ ID NO: 745822 - RNA, 21 nt, Human
gaaacaauuaaacuagauucu

SEQ ID NO: 745823 - RNA, 20 nt, Human
gaaaggaaaaaaggggagga

SEQ ID NO: 745824 - RNA, 20 nt, Human
gaacaagauaaauaauaugc

SEQ ID NO: 745825 - RNA, 19 nt, Human
gaauccuguugugaaauug

SEQ ID NO: 745826 - RNA, 20 nt, Human
gaugaauaauguaccacugc

SEQ ID NO: 745827 - RNA, 22 nt, Human
gcauguccuuuuaaguucacuu

SEQ ID NO: 745828 - RNA, 24 nt, Human
ggaaacagaaauacaagaaaauau

SEQ ID NO: 745829 - RNA, 19 nt, Human
guaguauuaauaaaggcuu

SEQ ID NO: 745830 - RNA, 23 nt, Human
uaaaaauaaaagaugucguccca

SEQ ID NO: 745831 - RNA, 24 nt, Human
uaaaacuguuucaaacagaaaaaa

SEQ ID NO: 745832 - RNA, 20 nt, Human
uaaaaugcccucaucauuuc

SEQ ID NO: 745833 - RNA, 21 nt, Human
uaaagccaauuugguugcaau

SEQ ID NO: 745834 - RNA, 26 nt, Human
uaaccaaagaugcuuuucacaucaaa

SEQ ID NO: 745835 - RNA, 23 nt, Human
uaacugaagaacaagauaaauaa

SEQ ID NO: 745836 - RNA, 26 nt, Human
uaagccccccaaaaauggaaacuaug

SEQ ID NO: 745837 - RNA, 24 nt, Human
uaauaaaggcuucaaaacuccaaa

SEQ ID NO: 745838 - RNA, 19 nt, Human
uaauagucaagaccaucgc

SEQ ID NO: 745839 - RNA, 19 nt, Human
uaccagagaacaaaaauac

SEQ ID NO: 745840 - RNA, 21 nt, Human
uacugcaggugaacaaucacc

SEQ ID NO: 745841 - RNA, 21 nt, Human
uacuggaacuugcuauaaaga

SEQ ID NO: 745842 - RNA, 24 nt, Human
uacuguacaaaauuaccagcaaga

SEQ ID NO: 745843 - RNA, 20 nt, Human
uagaaaaugcaaacacuuaa

SEQ ID NO: 745844 - RNA, 18 nt, Human
uauauauauauauauaua

SEQ ID NO: 745845 - RNA, 19 nt, Human
uauauauauauauauauau

SEQ ID NO: 745846 - RNA, 24 nt, Human
ucaaaggaccugaauucagugggc

SEQ ID NO: 745847 - RNA, 23 nt, Human
ucaaaugcuagaggaaagacugg

SEQ ID NO: 745848 - RNA, 18 nt, Human
ucagaaaguauaaaacug

SEQ ID NO: 745849 - RNA, 19 nt, Human
ucagaaaguauaaaacugu

SEQ ID NO: 745850 - RNA, 21 nt, Human
ucagaaccaauuugcuacuau

SEQ ID NO: 745851 - RNA, 23 nt, Human
ucauacacuauacuguacaaaau

SEQ ID NO: 745852 - RNA, 18 nt, Human
ucccucaaacauggaaga

SEQ ID NO: 745853 - RNA, 22 nt, Human
ugaaaaacaaaauacaugcaag

SEQ ID NO: 745854 - RNA, 20 nt, Human
ugaaacaucagaaacugggg

SEQ ID NO: 745855 - RNA, 19 nt, Human
ugacaguucccugcccccc

SEQ ID NO: 745856 - RNA, 20 nt, Human
ugagauuuuuucccuguugc

SEQ ID NO: 745857 - RNA, 22 nt, Human
ugcaguauccucacuucaggcu

SEQ ID NO: 745858 - RNA, 20 nt, Human
ugcccaguacaugaaaaaca

SEQ ID NO: 745859 - RNA, 21 nt, Human
ugcccaguacaugaaaaacaa

SEQ ID NO: 745860 - RNA, 18 nt, Human
ugccugaaacaucagaaa

SEQ ID NO: 745861 - RNA, 24 nt, Human
ugcuauaaagacagacaauaaucc

SEQ ID NO: 745862 - RNA, 21 nt, Human
uggaaacuaugaaaaucugug

SEQ ID NO: 745863 - RNA, 26 nt, Human
uggaaacuaugaaaaucugugucccc

SEQ ID NO: 745864 - RNA, 23 nt, Human
uggggggagccaagaaaaaaggc

SEQ ID NO: 745865 - RNA, 22 nt, Human
ugguauguacugacugcuccaa

SEQ ID NO: 745866 - RNA, 21 nt, Human
uguacugacugcuccaagcau

SEQ ID NO: 745867 - RNA, 20 nt, Human
ugucucugccgcuacaccuc

SEQ ID NO: 745868 - RNA, 19 nt, Human
ugugcaaaaugaaugacag

SEQ ID NO: 745869 - RNA, 20 nt, Human
ugugcaaaaugaaugacagu

SEQ ID NO: 745870 - RNA, 19 nt, Human
ugugguuuacuggaacuug

SEQ ID NO: 745871 - RNA, 19 nt, Human
uguguacacacgcugguca

SEQ ID NO: 745872 - RNA, 20 nt, Human
uuacaaagauagaauggaga

SEQ ID NO: 745873 - RNA, 24 nt, Human
uuacuaaauagcaaacaguugcau

SEQ ID NO: 745874 - RNA, 18 nt, Human
uuauauauauauauauau

SEQ ID NO: 745875 - RNA, 21 nt, Human
uucaaacagaaaaaaaaaaaa

SEQ ID NO: 745876 - RNA, 25 nt, Human
uuccaaagccaaaaaaaaaauuaac

SEQ ID NO: 745877 - RNA, 24 nt, Human
uugcccaguacaugaaaaacaaaa

SEQ ID NO: 745878 - RNA, 22 nt, Human
uuggugccagaacaguuuucau

SEQ ID NO: 745879 - RNA, 24 nt, Human
uuggugccagaacaguuuucaugg

SEQ ID NO: 745880 - RNA, 19 nt, Human
uuguuaacugaagaacaag

SEQ ID NO: 745881 - RNA, 23 nt, Human
uuucccuguugccuccuguugca

SEQ ID NO: 745882 - RNA, 24 nt, Human
uuuugcagcuguuuggcuuugcag

SEQ ID NO: 745883 - RNA, 24 nt, Human
aaaaaagaaguuauuuaaaaagcu

SEQ ID NO: 745884 - RNA, 27 nt, Human
aaagaaaaaaauaauaauaauaaaagg

SEQ ID NO: 745885 - RNA, 20 nt, Human
aaagagagagagagaacagc

SEQ ID NO: 745886 - RNA, 23 nt, Human
aaauacaucuaaaauuaaaauac

SEQ ID NO: 745887 - RNA, 20 nt, Human
aaauauaaaaagcuacaaac

SEQ ID NO: 745888 - RNA, 25 nt, Human
aacacccaccauccugcugccaccu

SEQ ID NO: 745889 - RNA, 19 nt, Human
aacuugagaaaagacgucc

SEQ ID NO: 745890 - RNA, 27 nt, Human
aagaaaaaaauaauaauaauaaaagga

SEQ ID NO: 745891 - RNA, 20 nt, Human
aagauacuuuuacucuuaua

SEQ ID NO: 745892 - RNA, 21 nt, Human
aaggagaaggaaaaagcauca

SEQ ID NO: 745893 - RNA, 19 nt, Human
aagggacagacgcuuguug

SEQ ID NO: 745894 - RNA, 20 nt, Human
aaguggaauaagcgguccuc

SEQ ID NO: 745895 - RNA, 24 nt, Human
aauaauaaaaggaaaggagaagga

SEQ ID NO: 745896 - RNA, 24 nt, Human
acaggacaagugggaguggauaag

SEQ ID NO: 745897 - RNA, 19 nt, Human
acccaccauccugcugcca

SEQ ID NO: 745898 - RNA, 23 nt, Human
acccagucucgggcccuagggac

SEQ ID NO: 745899 - RNA, 24 nt, Human
accccaagauguggcugagcccuu

SEQ ID NO: 745900 - RNA, 18 nt, Human
agaaagaaauuccuaaag

SEQ ID NO: 745901 - RNA, 21 nt, Human
agaaggauccuggcuuuccaa

SEQ ID NO: 745902 - RNA, 18 nt, Human
agacucccccucucccac

SEQ ID NO: 745903 - RNA, 18 nt, Human
agagagaacagcuugaug

SEQ ID NO: 745904 - RNA, 22 nt, Human
agccuggggccccgugagacuc

SEQ ID NO: 745905 - RNA, 19 nt, Human
agcucugacucuggggcug

SEQ ID NO: 745906 - RNA, 27 nt, Human
aggaaacuuuaaaaacaccaguucuga

SEQ ID NO: 745907 - RNA, 19 nt, Human
aggcaaggcccucccuggu

SEQ ID NO: 745908 - RNA, 23 nt, Human
aggcaaggcccucccuggugagg

SEQ ID NO: 745909 - RNA, 24 nt, Human
aggcagcucggcacccuccuggga

SEQ ID NO: 745910 - RNA, 20 nt, Human
agggcaagacggucccugcc

SEQ ID NO: 745911 - RNA, 22 nt, Human
auuaaaauacaggauugccugg

SEQ ID NO: 745912 - RNA, 20 nt, Human
caaaaccugaaauauuuuua

SEQ ID NO: 745913 - RNA, 23 nt, Human
caacaagggcaggguaaaggaaa

SEQ ID NO: 745914 - RNA, 23 nt, Human
caaucacacccacgcucaggggg

SEQ ID NO: 745915 - RNA, 19 nt, Human
cacagacaucacuuguuuu

SEQ ID NO: 745916 - RNA, 18 nt, Human
caccaacccagcugccag

SEQ ID NO: 745917 - RNA, 21 nt, Human
cacccaccauccugcugccac

SEQ ID NO: 745918 - RNA, 21 nt, Human
cacgcugacacgggagaacag

SEQ ID NO: 745919 - RNA, 18 nt, Human
cacugucccugccccugc

SEQ ID NO: 745920 - RNA, 21 nt, Human
cacuugcuccuccucuuucug

SEQ ID NO: 745921 - RNA, 22 nt, Human
cagaccccaagauguggcugag

SEQ ID NO: 745922 - RNA, 18 nt, Human
cagaggcccugcaaucac

SEQ ID NO: 745923 - RNA, 20 nt, Human
cagaguguggccagcagggc

SEQ ID NO: 745924 - RNA, 24 nt, Human
cagcaucacaaaacacggaaacac

SEQ ID NO: 745925 - RNA, 23 nt, Human
caggcgacaccacacgcugacac

SEQ ID NO: 745926 - RNA, 19 nt, Human
caggguaaaggaaacuuua

SEQ ID NO: 745927 - RNA, 19 nt, Human
cagguuagauuauauaaau

SEQ ID NO: 745928 - RNA, 24 nt, Human
caucacaaaacacggaaacacuuc

SEQ ID NO: 745929 - RNA, 21 nt, Human
ccaccauccugcugccaccug

SEQ ID NO: 745930 - RNA, 22 nt, Human
ccacgauaaacuuuguuagaaa

SEQ ID NO: 745931 - RNA, 24 nt, Human
ccagccuguggccagcucugacuc

SEQ ID NO: 745932 - RNA, 24 nt, Human
ccauccugcugccaccugccaacc

SEQ ID NO: 745933 - RNA, 21 nt, Human
ccauggguuuucucacaguuu

SEQ ID NO: 745934 - RNA, 22 nt, Human
cccaccauccugcugccaccug

SEQ ID NO: 745935 - RNA, 18 nt, Human
cccccaauccccucauca

SEQ ID NO: 745936 - RNA, 23 nt, Human
cccccagaaaugcuccugggcau

SEQ ID NO: 745937 - RNA, 21 nt, Human
cccccucucccacccagucuc

SEQ ID NO: 745938 - RNA, 21 nt, Human
cccuagggacugcgucccucc

SEQ ID NO: 745939 - RNA, 20 nt, Human
ccuccaccaagcugccucuc

SEQ ID NO: 745940 - RNA, 23 nt, Human
ccuccaccaagcugccucuccca

SEQ ID NO: 745941 - RNA, 18 nt, Human
ccugagcggagcagaagg

SEQ ID NO: 745942 - RNA, 25 nt, Human
cggggcagacccuuccucacccgcc

SEQ ID NO: 745943 - RNA, 19 nt, Human
cucacaguuugggcagugg

SEQ ID NO: 745944 - RNA, 20 nt, Human
cuccaccaagcugccucucc

SEQ ID NO: 745945 - RNA, 19 nt, Human
cucccccucucccacccag

SEQ ID NO: 745946 - RNA, 18 nt, Human
cuccggggguccugagcg

SEQ ID NO: 745947 - RNA, 21 nt, Human
cugaacacccaccauccugcu

SEQ ID NO: 745948 - RNA, 21 nt, Human
cugacucuggggcuggugagc

SEQ ID NO: 745949 - RNA, 25 nt, Human
cugacucuggggcuggugagcauug

SEQ ID NO: 745950 - RNA, 18 nt, Human
cugccccugccccugccc

SEQ ID NO: 745951 - RNA, 18 nt, Human
cugccccugccccugccc

SEQ ID NO: 745952 - RNA, 22 nt, Human
cugcccgcuaacacaccaaccc

SEQ ID NO: 745953 - RNA, 24 nt, Human
cugcugccaccugccaaccagaaa

SEQ ID NO: 745954 - RNA, 20 nt, Human
cugucccugccccugccccu

SEQ ID NO: 745955 - RNA, 21 nt, Human
cuuagccugggccucccagac

SEQ ID NO: 745956 - RNA, 20 nt, Human
cuugcuccuccucuuucugu

SEQ ID NO: 745957 - RNA, 18 nt, Human
gacccaugcaggcgacac

SEQ ID NO: 745958 - RNA, 20 nt, Human
gagaacagagaagugccgac

SEQ ID NO: 745959 - RNA, 25 nt, Human
gagcauuggcucacucugucuuccu

SEQ ID NO: 745960 - RNA, 25 nt, Human
gccccgugagacucccccucuccca

SEQ ID NO: 745961 - RNA, 22 nt, Human
gcgacaccacacgcugacacgg

SEQ ID NO: 745962 - RNA, 24 nt, Human
gcgcuugccccgggccguguuugu

SEQ ID NO: 745963 - RNA, 27 nt, Human
gcugccaccugccaaccagaaagcucg

SEQ ID NO: 745964 - RNA, 18 nt, Human
gcuguccuuaaaguggaa

SEQ ID NO: 745965 - RNA, 21 nt, Human
gcuucuguaaagacagagugu

SEQ ID NO: 745966 - RNA, 26 nt, Human
ggaggcagauguuuucgcggggcucc

SEQ ID NO: 745967 - RNA, 21 nt, Human
ggcgacaccacacgcugacac

SEQ ID NO: 745968 - RNA, 18 nt, Human
ggcugaagggacagacgc

SEQ ID NO: 745969 - RNA, 19 nt, Human
gggagauggcagccgggaa

SEQ ID NO: 745970 - RNA, 24 nt, Human
ggguaaaggaaacuuuaaaaacac

SEQ ID NO: 745971 - RNA, 21 nt, Human
guaaaggaaacuuuaaaaaca

SEQ ID NO: 745972 - RNA, 22 nt, Human
uaaaaaaaagagagagagagaa

SEQ ID NO: 745973 - RNA, 19 nt, Human
uaaaacuuugaucuaaguu

SEQ ID NO: 745974 - RNA, 21 nt, Human
uaaacaucccacuugcuccuc

SEQ ID NO: 745975 - RNA, 21 nt, Human
uaacuguaucccccaaucccc

SEQ ID NO: 745976 - RNA, 23 nt, Human
uaagaaauguacaaauauaaaaa

SEQ ID NO: 745977 - RNA, 21 nt, Human
uaagcgguccucaaacuugca

SEQ ID NO: 745978 - RNA, 20 nt, Human
uaauagccacgauaaacuuu

SEQ ID NO: 745979 - RNA, 21 nt, Human
uacaaauauaaaaagcuacaa

SEQ ID NO: 745980 - RNA, 21 nt, Human
uacagcaucacaaaacacgga

SEQ ID NO: 745981 - RNA, 21 nt, Human
uacgacccaugcaggcgacac

SEQ ID NO: 745982 - RNA, 24 nt, Human
ucagaacccaacuguccaucugac

SEQ ID NO: 745983 - RNA, 19 nt, Human
ucagcagagcugcagaggc

SEQ ID NO: 745984 - RNA, 21 nt, Human
ucauggacucgauacaagagu

SEQ ID NO: 745985 - RNA, 27 nt, Human
ucccagaccccaagauguggcugagcc

SEQ ID NO: 745986 - RNA, 18 nt, Human
ucccagggcaggggugcc

SEQ ID NO: 745987 - RNA, 19 nt, Human
ucccagggcaggggugccu

SEQ ID NO: 745988 - RNA, 22 nt, Human
ucccagggcaggggugccuugg

SEQ ID NO: 745989 - RNA, 20 nt, Human
uccuggggaccccacaaugg

SEQ ID NO: 745990 - RNA, 18 nt, Human
ucucacaguuugggcagu

SEQ ID NO: 745991 - RNA, 21 nt, Human
ugaauugggaaauaaaacacu

SEQ ID NO: 745992 - RNA, 21 nt, Human
ugacucagcaaaaaacucgua

SEQ ID NO: 745993 - RNA, 19 nt, Human
ugagaaacaaauccagccc

SEQ ID NO: 745994 - RNA, 24 nt, Human
ugaggcagcucggcacccuccugg

SEQ ID NO: 745995 - RNA, 18 nt, Human
ugccccugccccugcccu

SEQ ID NO: 745996 - RNA, 26 nt, Human
ugccccugccccugcccugccagucc

SEQ ID NO: 745997 - RNA, 21 nt, Human
ugccccugcccugccaguccc

SEQ ID NO: 745998 - RNA, 21 nt, Human
ugcccgcuaacacaccaaccc

SEQ ID NO: 745999 - RNA, 22 nt, Human
ugccugagaaacaaauccagcc

SEQ ID NO: 746000 - RNA, 22 nt, Human
ugccuuagaccucauggacucu

SEQ ID NO: 746001 - RNA, 21 nt, Human
uggacucgauacaagaguaau

SEQ ID NO: 746002 - RNA, 20 nt, Human
uggccagcucugacucuggg

SEQ ID NO: 746003 - RNA, 19 nt, Human
uggcucacucugucuuccu

SEQ ID NO: 746004 - RNA, 18 nt, Human
ugggccucccagacccca

SEQ ID NO: 746005 - RNA, 20 nt, Human
uggggcuggugagcauuggc

SEQ ID NO: 746006 - RNA, 24 nt, Human
uguaaagacagaguguaaggcugg

SEQ ID NO: 746007 - RNA, 21 nt, Human
ugucccugccccugccccugc

SEQ ID NO: 746008 - RNA, 19 nt, Human
ugucuggacuuggcugaga

SEQ ID NO: 746009 - RNA, 21 nt, Human
uguggccagcucugacucugg

SEQ ID NO: 746010 - RNA, 25 nt, Human
uguugccaaaauaauaauaauaaaa

SEQ ID NO: 746011 - RNA, 24 nt, Human
uuaagccccuggaggcugccagcc

SEQ ID NO: 746012 - RNA, 23 nt, Human
uuccuaaagauacuuuuacucuu

SEQ ID NO: 746013 - RNA, 21 nt, Human
uucgcggggcuccgggggucc

SEQ ID NO: 746014 - RNA, 23 nt, Human
uuguuagaaauguacauguugcc

SEQ ID NO: 746015 - RNA, 23 nt, Human
uuuaaaacuuugaucuaaguugg

SEQ ID NO: 746016 - RNA, 20 nt, Human
uuuuuaaaacuuugaucuaa

SEQ ID NO: 746017 - RNA, 22 nt, Human
uuuuuaagccccuggaggcugc

SEQ ID NO: 746018 - RNA, 28 nt, Human
aaaaaagaauuccucuaaucaugucacc

SEQ ID NO: 746019 - RNA, 24 nt, Human
aaaaaagccaaaacugacaaacac

SEQ ID NO: 746020 - RNA, 25 nt, Human
aaaaagacauacaauuuaacacaga

SEQ ID NO: 746021 - RNA, 24 nt, Human
aaaaauuaaccaaauuuugucccu

SEQ ID NO: 746022 - RNA, 21 nt, Human
aaacaagccacugcuuccuca

SEQ ID NO: 746023 - RNA, 21 nt, Human
aaacaauggcaucaaauggac

SEQ ID NO: 746024 - RNA, 20 nt, Human
aaagaauacaacaaagaaga

SEQ ID NO: 746025 - RNA, 24 nt, Human
aaauauuggcagcuugaauaagcu

SEQ ID NO: 746026 - RNA, 21 nt, Human
aacaaagaagaaaaaagccaa

SEQ ID NO: 746027 - RNA, 22 nt, Human
aacaaagaagaaaaaagccaaa

SEQ ID NO: 746028 - RNA, 21 nt, Human
aacacgaaacauugacuaaua

SEQ ID NO: 746029 - RNA, 23 nt, Human
aacagagcagcagaagcaucaag

SEQ ID NO: 746030 - RNA, 22 nt, Human
aacucaauucagaaaugaagaa

SEQ ID NO: 746031 - RNA, 25 nt, Human
aagaaaagaaaacucaauucagaaa

SEQ ID NO: 746032 - RNA, 21 nt, Human
aagaauuccucuaaucauguc

SEQ ID NO: 746033 - RNA, 24 nt, Human
aauaaagaauauauacaaaaggga

SEQ ID NO: 746034 - RNA, 26 nt, Human
aauucagagguauacuucugauuugg

SEQ ID NO: 746035 - RNA, 22 nt, Human
acaaagaagaaaaaagccaaaa

SEQ ID NO: 746036 - RNA, 18 nt, Human
acaacaaagaagaaaaaa

SEQ ID NO: 746037 - RNA, 20 nt, Human
acaacaaagaagaaaaaagc

SEQ ID NO: 746038 - RNA, 25 nt, Human
acaucaagaaaagaaaacucaauuc

SEQ ID NO: 746039 - RNA, 21 nt, Human
acccccagagcaucucaauau

SEQ ID NO: 746040 - RNA, 19 nt, Human
acugcuuccucaaagcaag

SEQ ID NO: 746041 - RNA, 27 nt, Human
agaaaacucaauucagaaaugaagaaa

SEQ ID NO: 746042 - RNA, 24 nt, Human
agaaaauccauggugaaaccugaa

SEQ ID NO: 746043 - RNA, 20 nt, Human
agaaaugaagaaaacuggca

SEQ ID NO: 746044 - RNA, 25 nt, Human
agaauacaacaaagaagaaaaaagc

SEQ ID NO: 746045 - RNA, 19 nt, Human
agaggugugucuauacaua

SEQ ID NO: 746046 - RNA, 18 nt, Human
agcaaggaggcaaguacu

SEQ ID NO: 746047 - RNA, 27 nt, Human
agcaaggaggcaaguacugaagaagaa

SEQ ID NO: 746048 - RNA, 25 nt, Human
agcagaagcaucaagaucaggucca

SEQ ID NO: 746049 - RNA, 21 nt, Human
agcaguuccuuaggagccaac

SEQ ID NO: 746050 - RNA, 19 nt, Human
agcucauuuuuucccucag

SEQ ID NO: 746051 - RNA, 21 nt, Human
agggacaauuuucauacuaaa

SEQ ID NO: 746052 - RNA, 24 nt, Human
agguagggaaacuucuugaacccg

SEQ ID NO: 746053 - RNA, 24 nt, Human
agucucuuuuuuguggagagaagg

SEQ ID NO: 746054 - RNA, 22 nt, Human
auaaagaauacaacaaagaaga

SEQ ID NO: 746055 - RNA, 19 nt, Human
auaaugcggaacacgaaac

SEQ ID NO: 746056 - RNA, 18 nt, Human
auacaauuuaacacagac

SEQ ID NO: 746057 - RNA, 28 nt, Human
auacacccccagagcaucucccguaccg

SEQ ID NO: 746058 - RNA, 20 nt, Human
aucaaaauggguaaguccuu

SEQ ID NO: 746059 - RNA, 20 nt, Human
auccagggaaucccagaaau

SEQ ID NO: 746060 - RNA, 22 nt, Human
caaagcaaggaccaggcuccaa

SEQ ID NO: 746061 - RNA, 19 nt, Human
caacaucaagaaaagaaaa

SEQ ID NO: 746062 - RNA, 21 nt, Human
caagaucagguccaaagaguu

SEQ ID NO: 746063 - RNA, 19 nt, Human
cacccuuucacuugaucuc

SEQ ID NO: 746064 - RNA, 23 nt, Human
cagagcaucucaauaucccuggc

SEQ ID NO: 746065 - RNA, 21 nt, Human
cagcaguuccuuaggagccaa

SEQ ID NO: 746066 - RNA, 22 nt, Human
caucaagaaaagaaaacucaau

SEQ ID NO: 746067 - RNA, 22 nt, Human
caucaagacaauacauaaagaa

SEQ ID NO: 746068 - RNA, 19 nt, Human
caucccaaucuucccaaga

SEQ ID NO: 746069 - RNA, 22 nt, Human
ccagagcaucucaauaucccug

SEQ ID NO: 746070 - RNA, 20 nt, Human
cccucaggugguuaaaggcc

SEQ ID NO: 746071 - RNA, 21 nt, Human
ccuguagucccagcuacucag

SEQ ID NO: 746072 - RNA, 22 nt, Human
ccuguagucccagcuacucagg

SEQ ID NO: 746073 - RNA, 19 nt, Human
ccuuccuuccucuuccucc

SEQ ID NO: 746074 - RNA, 19 nt, Human
ccuuccuuccucuuccucc

SEQ ID NO: 746075 - RNA, 23 nt, Human
ccuuucacuugaucucccucuca

SEQ ID NO: 746076 - RNA, 19 nt, Human
cucaaaagaugauaaacaa

SEQ ID NO: 746077 - RNA, 20 nt, Human
cucaaaagaugauaaacaau

SEQ ID NO: 746078 - RNA, 21 nt, Human
cucaaaagaugauaaacaaug

SEQ ID NO: 746079 - RNA, 21 nt, Human
cucaauucagaaaugaagaaa

SEQ ID NO: 746080 - RNA, 19 nt, Human
cucauauaaugaauccagg

SEQ ID NO: 746081 - RNA, 22 nt, Human
cuggccaccuacagcaaaauau

SEQ ID NO: 746082 - RNA, 23 nt, Human
cuuccucaaagcaaggaccaggc

SEQ ID NO: 746083 - RNA, 20 nt, Human
cuucuugaaacaagccacug

SEQ ID NO: 746084 - RNA, 21 nt, Human
cuugaacccgggaggcggagg

SEQ ID NO: 746085 - RNA, 22 nt, Human
gaaggaaaccaacaucaagaaa

SEQ ID NO: 746086 - RNA, 19 nt, Human
gcgauuuuuuuuuuaaagu

SEQ ID NO: 746087 - RNA, 22 nt, Human
ggagaagggcuaucauacaaca

SEQ ID NO: 746088 - RNA, 23 nt, Human
ggauugguagaggugugucuaua

SEQ ID NO: 746089 - RNA, 22 nt, Human
ggcagguauacaauacaccccc

SEQ ID NO: 746090 - RNA, 21 nt, Human
gggcaacagggguuuguuggg

SEQ ID NO: 746091 - RNA, 24 nt, Human
ggggcaaauucuagacuaaagaaa

SEQ ID NO: 746092 - RNA, 20 nt, Human
ggguuuguugggagaguuag

SEQ ID NO: 746093 - RNA, 19 nt, Human
gguuuguugggagaguuag

SEQ ID NO: 746094 - RNA, 24 nt, Human
gucaccaucucauauaaugaaucc

SEQ ID NO: 746095 - RNA, 24 nt, Human
gucucuuuuuuguggagagaaggg

SEQ ID NO: 746096 - RNA, 25 nt, Human
uaaaaaagcaaaagaauaaagaaua

SEQ ID NO: 746097 - RNA, 22 nt, Human
uaaaaaucugaccccaaggaau

SEQ ID NO: 746098 - RNA, 20 nt, Human
uaaaguaacuuuaaaaaucu

SEQ ID NO: 746099 - RNA, 22 nt, Human
uaaaguguccucacuaccaccu

SEQ ID NO: 746100 - RNA, 24 nt, Human
uaacagagcagcagaagcaucaag

SEQ ID NO: 746101 - RNA, 25 nt, Human
uaacagagcagcagaagcaucaaga

SEQ ID NO: 746102 - RNA, 18 nt, Human
uaagggcaaaugguucaa

SEQ ID NO: 746103 - RNA, 23 nt, Human
uaccucugcuuuggagaagggcu

SEQ ID NO: 746104 - RNA, 19 nt, Human
uagaaaauuaguuucaggg

SEQ ID NO: 746105 - RNA, 18 nt, Human
uauacaauacacccccag

SEQ ID NO: 746106 - RNA, 18 nt, Human
uaugaaggaaaccaacau

SEQ ID NO: 746107 - RNA, 23 nt, Human
uaugagaaacaaaacuggccacc

SEQ ID NO: 746108 - RNA, 21 nt, Human
ucaauucagaaaugaagaaaa

SEQ ID NO: 746109 - RNA, 19 nt, Human
ucagaaaugaagaaaacug

SEQ ID NO: 746110 - RNA, 22 nt, Human
ucagaaguggcuucuugaaaca

SEQ ID NO: 746111 - RNA, 21 nt, Human
ucagagguauacuucugauuu

SEQ ID NO: 746112 - RNA, 24 nt, Human
ucauacaacauucagucagcugaa

SEQ ID NO: 746113 - RNA, 23 nt, Human
uccauauucccaacaaggcuacg

SEQ ID NO: 746114 - RNA, 18 nt, Human
uccauggugaaaccugaa

SEQ ID NO: 746115 - RNA, 19 nt, Human
ucccucucagucucuuuuu

SEQ ID NO: 746116 - RNA, 18 nt, Human
uccugagcugcucagccc

SEQ ID NO: 746117 - RNA, 25 nt, Human
uccuuaggagccaacaugacaggug

SEQ ID NO: 746118 - RNA, 20 nt, Human
uccuuccuuccucuuccucc

SEQ ID NO: 746119 - RNA, 20 nt, Human
ucuagacuaaagaaaugauc

SEQ ID NO: 746120 - RNA, 24 nt, Human
ucuuccaaaugacaacuugaucac

SEQ ID NO: 746121 - RNA, 25 nt, Human
ugaaacaagccacugcuuccucaaa

SEQ ID NO: 746122 - RNA, 18 nt, Human
ugaagaagaaaagggaca

SEQ ID NO: 746123 - RNA, 21 nt, Human
ugacaggugggucagauuucc

SEQ ID NO: 746124 - RNA, 23 nt, Human
ugaccccaaggaauccaggacac

SEQ ID NO: 746125 - RNA, 23 nt, Human
ugagccgcuuacaacagcaguuc

SEQ ID NO: 746126 - RNA, 19 nt, Human
ugaucucccucucagucuc

SEQ ID NO: 746127 - RNA, 23 nt, Human
ugggcaacagggguuuguuggga

SEQ ID NO: 746128 - RNA, 22 nt, Human
uggguagauucuuagaucagaa

SEQ ID NO: 746129 - RNA, 28 nt, Human
uguaauccuguagucccagcuacucagg

SEQ ID NO: 746130 - RNA, 19 nt, Human
uuaacacagacugaguggg

SEQ ID NO: 746131 - RNA, 23 nt, Human
uuauaaaguaacuuuaaaaaucu

SEQ ID NO: 746132 - RNA, 24 nt, Human
uucagaggcuaacagagcagcaga

SEQ ID NO: 746133 - RNA, 23 nt, Human
uucuugaacccgggaggcggagg

SEQ ID NO: 746134 - RNA, 24 nt, Human
uugaacccgggaggcggagguugc

SEQ ID NO: 746135 - RNA, 21 nt, Human
uuuaaaguguccucacuacca

SEQ ID NO: 746136 - RNA, 21 nt, Human
aagcaacaccugccccccagc

SEQ ID NO: 746137 - RNA, 24 nt, Human
aagcagcagccaucaugucgacca

SEQ ID NO: 746138 - RNA, 23 nt, Human
aaucccgucugcgcgucacccac

SEQ ID NO: 746139 - RNA, 21 nt, Human
acacgccauucacgugucucc

SEQ ID NO: 746140 - RNA, 22 nt, Human
accuguaacucccgggauccgu

SEQ ID NO: 746141 - RNA, 19 nt, Human
agacaggcugggcccgggg

SEQ ID NO: 746142 - RNA, 21 nt, Human
agcccuccagccccgccacag

SEQ ID NO: 746143 - RNA, 22 nt, Human
agcuccggcuccccaccccucc

SEQ ID NO: 746144 - RNA, 22 nt, Human
aggcagacgcccgucuccuccg

SEQ ID NO: 746145 - RNA, 21 nt, Human
aggccccaaggcugcgcccag

SEQ ID NO: 746146 - RNA, 21 nt, Human
cacaacggcggcucccguccc

SEQ ID NO: 746147 - RNA, 20 nt, Human
caccagggcucugacagcag

SEQ ID NO: 746148 - RNA, 21 nt, Human
cacgccauucacgugucucca

SEQ ID NO: 746149 - RNA, 24 nt, Human
cagcaagccaaccccgaccccucc

SEQ ID NO: 746150 - RNA, 20 nt, Human
cagcacgggcaggguggagc

SEQ ID NO: 746151 - RNA, 24 nt, Human
cagcagccagaccacgccagucac

SEQ ID NO: 746152 - RNA, 18 nt, Human
cagcgguggggaugcucu

SEQ ID NO: 746153 - RNA, 19 nt, Human
caggcagacgcccgucucc

SEQ ID NO: 746154 - RNA, 22 nt, Human
caggguggccacauccuccccc

SEQ ID NO: 746155 - RNA, 19 nt, Human
cauucacgugucuccaaug

SEQ ID NO: 746156 - RNA, 23 nt, Human
ccacagagcuccggcuccccacc

SEQ ID NO: 746157 - RNA, 21 nt, Human
ccacucaggagucacccacuc

SEQ ID NO: 746158 - RNA, 20 nt, Human
ccacugggcucugagggccc

SEQ ID NO: 746159 - RNA, 22 nt, Human
ccagccccgccacagagcuccg

SEQ ID NO: 746160 - RNA, 23 nt, Human
cccaaacuaaagugcaccccagc

SEQ ID NO: 746161 - RNA, 19 nt, Human
cccagcaagccaaccccga

SEQ ID NO: 746162 - RNA, 22 nt, Human
cccagccucgcccccggcccac

SEQ ID NO: 746163 - RNA, 18 nt, Human
cccaggaggacacggggg

SEQ ID NO: 746164 - RNA, 23 nt, Human
ccccagagcuagucucagaccag

SEQ ID NO: 746165 - RNA, 22 nt, Human
cccccagccucgcccccggccc

SEQ ID NO: 746166 - RNA, 22 nt, Human
cccccgccacccccagagcuag

SEQ ID NO: 746167 - RNA, 24 nt, Human
ccccuugaaacaaggugucuggac

SEQ ID NO: 746168 - RNA, 22 nt, Human
cccgucccgccccaaacuaaag

SEQ ID NO: 746169 - RNA, 19 nt, Human
ccgcaaacccaggcagacg

SEQ ID NO: 746170 - RNA, 18 nt, Human
ccugccccccagccggga

SEQ ID NO: 746171 - RNA, 18 nt, Human
ccugccccccagccggga

SEQ ID NO: 746172 - RNA, 20 nt, Human
ccuucuuccgcuucccgcug

SEQ ID NO: 746173 - RNA, 21 nt, Human
cgagucagagccacccacugg

SEQ ID NO: 746174 - RNA, 21 nt, Human
cgcaaacccaggcagacgccc

SEQ ID NO: 746175 - RNA, 28 nt, Human
cgcaaacccaggcagacgcccgucuccu

SEQ ID NO: 746176 - RNA, 18 nt, Human
cgcacacgccauucacgu

SEQ ID NO: 746177 - RNA, 18 nt, Human
cggggcaggcaggccagg

SEQ ID NO: 746178 - RNA, 21 nt, Human
cgggggugguggcagccaaag

SEQ ID NO: 746179 - RNA, 21 nt, Human
cucacgcccaucccccuugaa

SEQ ID NO: 746180 - RNA, 21 nt, Human
cuccagccccgccacagagcu

SEQ ID NO: 746181 - RNA, 19 nt, Human
cuccccaccccuccccacc

SEQ ID NO: 746182 - RNA, 18 nt, Human
cucccgucccgccccaaa

SEQ ID NO: 746183 - RNA, 19 nt, Human
cuccggcuccccaccccuc

SEQ ID NO: 746184 - RNA, 20 nt, Human
cucgcccccuucucccgcag

SEQ ID NO: 746185 - RNA, 22 nt, Human
gaccacacccauaagcggcucu

SEQ ID NO: 746186 - RNA, 19 nt, Human
gagcagcagcacgggcagg

SEQ ID NO: 746187 - RNA, 24 nt, Human
gagcagcagcacgggcagggugga

SEQ ID NO: 746188 - RNA, 31 nt, Human
gagcuagucucagaccaggaagggagcuggg

SEQ ID NO: 746189 - RNA, 21 nt, Human
gagcuccggcuccccaccccu

SEQ ID NO: 746190 - RNA, 19 nt, Human
gcaaacccaggcagacgcc

SEQ ID NO: 746191 - RNA, 19 nt, Human
gcacagagcagcagcacgg

SEQ ID NO: 746192 - RNA, 21 nt, Human
gcaggcaggccaggcucccag

SEQ ID NO: 746193 - RNA, 22 nt, Human
gccccaaacuaaagugcacccc

SEQ ID NO: 746194 - RNA, 19 nt, Human
gcucacgcccaucccccuu

SEQ ID NO: 746195 - RNA, 24 nt, Human
gcucacgcccaucccccuugaaac

SEQ ID NO: 746196 - RNA, 18 nt, Human
gcuccccaccccucccca

SEQ ID NO: 746197 - RNA, 20 nt, Human
gcuggcuguccgucuggcuc

SEQ ID NO: 746198 - RNA, 20 nt, Human
ggcagcucagguuaaaacug

SEQ ID NO: 746199 - RNA, 21 nt, Human
ggccccgcuucccccagccuc

SEQ ID NO: 746200 - RNA, 19 nt, Human
ggccggacggcgggggccg

SEQ ID NO: 746201 - RNA, 19 nt, Human
gggcgcacucgcacacgcc

SEQ ID NO: 746202 - RNA, 20 nt, Human
gggcgcacucgcacacgccg

SEQ ID NO: 746203 - RNA, 21 nt, Human
gggggccgaagcaacaccugc

SEQ ID NO: 746204 - RNA, 18 nt, Human
ggggugggguggggugag

SEQ ID NO: 746205 - RNA, 19 nt, Human
gggucucaggguggccaca

SEQ ID NO: 746206 - RNA, 24 nt, Human
gugacggggccgcuggcuggcugu

SEQ ID NO: 746207 - RNA, 21 nt, Human
guggagcgggagcagcgugug

SEQ ID NO: 746208 - RNA, 23 nt, Human
uaaacccugaacuuucagacagg

SEQ ID NO: 746209 - RNA, 22 nt, Human
uaagcggcucuccgcaaaccca

SEQ ID NO: 746210 - RNA, 21 nt, Human
ucagguuaaaacugaggggag

SEQ ID NO: 746211 - RNA, 18 nt, Human
uccccaccggguuuuucg

SEQ ID NO: 746212 - RNA, 22 nt, Human
ucccgucccgccccaaacuaaa

SEQ ID NO: 746213 - RNA, 19 nt, Human
uccgcaaacccaggcagac

SEQ ID NO: 746214 - RNA, 22 nt, Human
uccgcaaacccaggcagacgcc

SEQ ID NO: 746215 - RNA, 19 nt, Human
ucucaggguggccacaucc

SEQ ID NO: 746216 - RNA, 24 nt, Human
ucugcaucaucuauucauugaacc

SEQ ID NO: 746217 - RNA, 19 nt, Human
ugaccugagaaaucccguc

SEQ ID NO: 746218 - RNA, 18 nt, Human
ugagacguggaggaagag

SEQ ID NO: 746219 - RNA, 18 nt, Human
ugccccccagccgggaac

SEQ ID NO: 746220 - RNA, 23 nt, Human
ugcggggcaggcaggccaggcuc

SEQ ID NO: 746221 - RNA, 18 nt, Human
ugcucugcuugcccgcuc

SEQ ID NO: 746222 - RNA, 23 nt, Human
ugggguggggugagacguggagg

SEQ ID NO: 746223 - RNA, 26 nt, Human
ugucuggacggaccacacccauaagg

SEQ ID NO: 746224 - RNA, 24 nt, Human
uucccccagccucgcccccggccc

SEQ ID NO: 746225 - RNA, 18 nt, Human
uugggccccgcuuccccc

SEQ ID NO: 746226 - RNA, 19 nt, Human
uuuaaaaacaagaaaaagu

SEQ ID NO: 746227 - RNA, 20 nt, Human
uuuuucggccuaaacccuga

SEQ ID NO: 746228 - RNA, 25 nt, Human
aaacaaacccuggcugccucgggau

SEQ ID NO: 746229 - RNA, 22 nt, Human
aacaaaccagaagggcgacuac

SEQ ID NO: 746230 - RNA, 22 nt, Human
aacaagaaacugaguaucaccc

SEQ ID NO: 746231 - RNA, 20 nt, Human
aacguccccacaagagccca

SEQ ID NO: 746232 - RNA, 22 nt, Human
aagaccagucagguccuaccuc

SEQ ID NO: 746233 - RNA, 21 nt, Human
aagcacccuccucccagaggg

SEQ ID NO: 746234 - RNA, 23 nt, Human
aaggaagaagggagcugcuggag

SEQ ID NO: 746235 - RNA, 21 nt, Human
aauggccccaaagacaggucu

SEQ ID NO: 746236 - RNA, 18 nt, Human
acaagaagccccauggcc

SEQ ID NO: 746237 - RNA, 21 nt, Human
acaaugcggccggcggaggcc

SEQ ID NO: 746238 - RNA, 22 nt, Human
acacacucccaggaugggaagc

SEQ ID NO: 746239 - RNA, 20 nt, Human
acagagggaaggaagaaggg

SEQ ID NO: 746240 - RNA, 19 nt, Human
acagggagcagggugggcc

SEQ ID NO: 746241 - RNA, 18 nt, Human
acaguggggccugcuggc

SEQ ID NO: 746242 - RNA, 22 nt, Human
acccugggagaauguggaaagc

SEQ ID NO: 746243 - RNA, 28 nt, Human
acgcgggacaaggcgggcgggcggacca

SEQ ID NO: 746244 - RNA, 19 nt, Human
acggggcuaggaaucaagc

SEQ ID NO: 746245 - RNA, 24 nt, Human
agaaaaacagaccuugaaaaauau

SEQ ID NO: 746246 - RNA, 21 nt, Human
agagggaaggaagaagggagc

SEQ ID NO: 746247 - RNA, 24 nt, Human
agagggaaggaagaagggagcugc

SEQ ID NO: 746248 - RNA, 20 nt, Human
augauaugcuacauauauac

SEQ ID NO: 746249 - RNA, 22 nt, Human
augcuccccacucuucuugcua

SEQ ID NO: 746250 - RNA, 21 nt, Human
caagagcccaagggggcagcc

SEQ ID NO: 746251 - RNA, 21 nt, Human
caagcucaggggcacuggcag

SEQ ID NO: 746252 - RNA, 18 nt, Human
cacaagagcccaggaguu

SEQ ID NO: 746253 - RNA, 18 nt, Human
cacagccggaaccagugc

SEQ ID NO: 746254 - RNA, 22 nt, Human
cacagccggaaccagugcccca

SEQ ID NO: 746255 - RNA, 22 nt, Human
caccagacacagccggaaccag

SEQ ID NO: 746256 - RNA, 19 nt, Human
caccagccccugaccccag

SEQ ID NO: 746257 - RNA, 19 nt, Human
cacuggcaggcccuagcag

SEQ ID NO: 746258 - RNA, 24 nt, Human
cagaccuugaaaaauauauacaua

SEQ ID NO: 746259 - RNA, 19 nt, Human
cagagcgccgagcaagcgu

SEQ ID NO: 746260 - RNA, 21 nt, Human
cagauggcuggcagcaggcac

SEQ ID NO: 746261 - RNA, 21 nt, Human
cagccucuucccccagccccc

SEQ ID NO: 746262 - RNA, 22 nt, Human
cagcucccaggcaccagccccu

SEQ ID NO: 746263 - RNA, 18 nt, Human
caggcccuagcaggaaca

SEQ ID NO: 746264 - RNA, 21 nt, Human
cagggugggccccaaccuagc

SEQ ID NO: 746265 - RNA, 23 nt, Human
cagguccuaccucucccaacuuc

SEQ ID NO: 746266 - RNA, 22 nt, Human
cagucagguccuaccucuccca

SEQ ID NO: 746267 - RNA, 22 nt, Human
cauggcccacugcuacccuccc

SEQ ID NO: 746268 - RNA, 23 nt, Human
ccaacugccccacagagaacaaa

SEQ ID NO: 746269 - RNA, 23 nt, Human
ccaacugccccacagagaacaaa

SEQ ID NO: 746270 - RNA, 23 nt, Human
ccacagcccuggcaccugcuuca

SEQ ID NO: 746271 - RNA, 21 nt, Human
ccacaggcuccucucuugugc

SEQ ID NO: 746272 - RNA, 18 nt, Human
ccaccaacugccccacag

SEQ ID NO: 746273 - RNA, 22 nt, Human
ccagccccugaccccagccaag

SEQ ID NO: 746274 - RNA, 22 nt, Human
ccaggcaccagccccugacccc

SEQ ID NO: 746275 - RNA, 26 nt, Human
ccagugccccacagaacggggcuagg

SEQ ID NO: 746276 - RNA, 21 nt, Human
ccaugcuccccacucuucuug

SEQ ID NO: 746277 - RNA, 22 nt, Human
cccacagagaacaaaccagaag

SEQ ID NO: 746278 - RNA, 25 nt, Human
cccacagagaacaaaccagaagggc

SEQ ID NO: 746279 - RNA, 21 nt, Human
cccacagcccuggcaccugcu

SEQ ID NO: 746280 - RNA, 18 nt, Human
cccaccaacugccccaca

SEQ ID NO: 746281 - RNA, 23 nt, Human
cccaccaacugccccacagagaa

SEQ ID NO: 746282 - RNA, 18 nt, Human
cccacugcuacccucccc

SEQ ID NO: 746283 - RNA, 19 nt, Human
cccauggcccacugcuacc

SEQ ID NO: 746284 - RNA, 20 nt, Human
ccccacagaacggggcuagg

SEQ ID NO: 746285 - RNA, 21 nt, Human
ccccauggcccacugcuaccc

SEQ ID NO: 746286 - RNA, 24 nt, Human
ccccauggcccacugcuacccucc

SEQ ID NO: 746287 - RNA, 20 nt, Human
ccccgcagccagaccaccag

SEQ ID NO: 746288 - RNA, 18 nt, Human
ccccuccucccccuuccc

SEQ ID NO: 746289 - RNA, 21 nt, Human
cccgcagccagaccaccagac

SEQ ID NO: 746290 - RNA, 23 nt, Human
cccgggacaaauacacacuuuug

SEQ ID NO: 746291 - RNA, 19 nt, Human
cccuagcaggaacagggag

SEQ ID NO: 746292 - RNA, 21 nt, Human
cccuagguggagggcacuaac

SEQ ID NO: 746293 - RNA, 22 nt, Human
cccucccacagcccuggcaccu

SEQ ID NO: 746294 - RNA, 21 nt, Human
ccgauacccugaacgucccca

SEQ ID NO: 746295 - RNA, 19 nt, Human
ccgcagccagaccaccaga

SEQ ID NO: 746296 - RNA, 19 nt, Human
ccgccggggcgcgcccccu

SEQ ID NO: 746297 - RNA, 21 nt, Human
ccgcucagggcgacacagcgg

SEQ ID NO: 746298 - RNA, 22 nt, Human
ccguagcuugccccucccacag

SEQ ID NO: 746299 - RNA, 23 nt, Human
ccguccccagcagaggggaagcc

SEQ ID NO: 746300 - RNA, 19 nt, Human
ccucaccaccacugcaucc

SEQ ID NO: 746301 - RNA, 19 nt, Human
ccucgagccaccugcugcu

SEQ ID NO: 746302 - RNA, 23 nt, Human
ccucgcaccccgauacccugaac

SEQ ID NO: 746303 - RNA, 21 nt, Human
ccucgcuuccuugcccagggg

SEQ ID NO: 746304 - RNA, 19 nt, Human
cgacacagcggccgggccc

SEQ ID NO: 746305 - RNA, 22 nt, Human
cgacgcgggacaaggcgggcgg

SEQ ID NO: 746306 - RNA, 21 nt, Human
cgcgcccccuuuccgcguggg

SEQ ID NO: 746307 - RNA, 26 nt, Human
cggaaccagugccccaggccccucuc

SEQ ID NO: 746308 - RNA, 18 nt, Human
cgggcggacaaugcggcc

SEQ ID NO: 746309 - RNA, 24 nt, Human
cggugcagacagaccucgcacccc

SEQ ID NO: 746310 - RNA, 21 nt, Human
cguagcuugccccucccacag

SEQ ID NO: 746311 - RNA, 22 nt, Human
cguagcuugccccucccacagc

SEQ ID NO: 746312 - RNA, 24 nt, Human
cucaccaccacugcauccagccuc

SEQ ID NO: 746313 - RNA, 20 nt, Human
cucccaggcaccagccccug

SEQ ID NO: 746314 - RNA, 27 nt, Human
cucccaggcaccagccccugaccccag

SEQ ID NO: 746315 - RNA, 18 nt, Human
cuccucccagagggccuc

SEQ ID NO: 746316 - RNA, 22 nt, Human
cucuccacggccaggaacaaga

SEQ ID NO: 746317 - RNA, 24 nt, Human
cugcccguccuuuucaucugcaug

SEQ ID NO: 746318 - RNA, 24 nt, Human
cugcuaaccgccucgagccaccug

SEQ ID NO: 746319 - RNA, 21 nt, Human
cuggagcuaagcacccuccuc

SEQ ID NO: 746320 - RNA, 18 nt, Human
cuuccuugcccaggggca

SEQ ID NO: 746321 - RNA, 23 nt, Human
cuugccccucccacagcccuggc

SEQ ID NO: 746322 - RNA, 18 nt, Human
gaaagcaagcucaggggc

SEQ ID NO: 746323 - RNA, 25 nt, Human
gaaggaagaagggagcugcuggagc

SEQ ID NO: 746324 - RNA, 21 nt, Human
gaccucgcaccccgauacccc

SEQ ID NO: 746325 - RNA, 22 nt, Human
gaccuugaaaaauauauacaua

SEQ ID NO: 746326 - RNA, 19 nt, Human
gagccugcuaaccgccucg

SEQ ID NO: 746327 - RNA, 28 nt, Human
gagcgcaaaacaaacccuggcugccucu

SEQ ID NO: 746328 - RNA, 21 nt, Human
gccagaccaccagacacagcc

SEQ ID NO: 746329 - RNA, 22 nt, Human
gccagccucuucccccagcccc

SEQ ID NO: 746330 - RNA, 23 nt, Human
gccaggaacaagaaacugaguau

SEQ ID NO: 746331 - RNA, 23 nt, Human
gccccaggccccucuccacggcc

SEQ ID NO: 746332 - RNA, 19 nt, Human
gccgagcaagcgugugggg

SEQ ID NO: 746333 - RNA, 19 nt, Human
gccucgcuuccuugcccag

SEQ ID NO: 746334 - RNA, 18 nt, Human
gccugguuagaugugggg

SEQ ID NO: 746335 - RNA, 18 nt, Human
gcggcuucuagcccggcc

SEQ ID NO: 746336 - RNA, 19 nt, Human
gcucagggcgacacagcgg

SEQ ID NO: 746337 - RNA, 24 nt, Human
gcucuaaaaguccccuccuccccc

SEQ ID NO: 746338 - RNA, 22 nt, Human
ggacaaugcggccggcggaggc

SEQ ID NO: 746339 - RNA, 21 nt, Human
ggaguuccaugcuccccacuc

SEQ ID NO: 746340 - RNA, 18 nt, Human
ggccaggaacaagaaacu

SEQ ID NO: 746341 - RNA, 22 nt, Human
ggcccggggcgcgcgggcacgc

SEQ ID NO: 746342 - RNA, 21 nt, Human
ggcucagugcugcagugaagg

SEQ ID NO: 746343 - RNA, 18 nt, Human
gggacaaauacacacuuu

SEQ ID NO: 746344 - RNA, 22 nt, Human
gggcagaggcagcucaccuagc

SEQ ID NO: 746345 - RNA, 21 nt, Human
gggcgacuaccugaacaagag

SEQ ID NO: 746346 - RNA, 19 nt, Human
ggggaagcggcggggugcu

SEQ ID NO: 746347 - RNA, 21 nt, Human
ggugcagacagaccucgcacc

SEQ ID NO: 746348 - RNA, 19 nt, Human
ggugggccccaaccuagca

SEQ ID NO: 746349 - RNA, 20 nt, Human
guggagggcacuaaccuugu

SEQ ID NO: 746350 - RNA, 22 nt, Human
guggagggcacuaaccuuguaa

SEQ ID NO: 746351 - RNA, 24 nt, Human
uaaaaaacuuaagaaccaauagug

SEQ ID NO: 746352 - RNA, 18 nt, Human
uacaguggggccugcugg

SEQ ID NO: 746353 - RNA, 20 nt, Human
uacccugaacguccccacaa

SEQ ID NO: 746354 - RNA, 24 nt, Human
uaccugaacaagagcugcaagagc

SEQ ID NO: 746355 - RNA, 18 nt, Human
uagcaggaacagggagca

SEQ ID NO: 746356 - RNA, 18 nt, Human
ucaccaccacugcaucca

SEQ ID NO: 746357 - RNA, 19 nt, Human
ucagggccugguuagaugu

SEQ ID NO: 746358 - RNA, 18 nt, Human
ucagguccuaccucuccc

SEQ ID NO: 746359 - RNA, 21 nt, Human
ucaguuagaaaaacagacccu

SEQ ID NO: 746360 - RNA, 22 nt, Human
ucccacagcccuggcaccugcu

SEQ ID NO: 746361 - RNA, 25 nt, Human
ucccagagggccucgcuuccuugcc

SEQ ID NO: 746362 - RNA, 22 nt, Human
ucccagauggcuggcagcaggc

SEQ ID NO: 746363 - RNA, 20 nt, Human
ucccagucccccaugauaug

SEQ ID NO: 746364 - RNA, 18 nt, Human
uccccacaagagcccagg

SEQ ID NO: 746365 - RNA, 21 nt, Human
uccccacaagagcccaggagu

SEQ ID NO: 746366 - RNA, 22 nt, Human
uccccagcagaggggaagccua

SEQ ID NO: 746367 - RNA, 20 nt, Human
ucccccuucccuauccaggg

SEQ ID NO: 746368 - RNA, 24 nt, Human
ucccuagguggagggcacuaaccu

SEQ ID NO: 746369 - RNA, 19 nt, Human
uccuagaagucagagcgcc

SEQ ID NO: 746370 - RNA, 21 nt, Human
uccuugcccaggggcagaggc

SEQ ID NO: 746371 - RNA, 24 nt, Human
ucgcaccccgauacccugaacguc

SEQ ID NO: 746372 - RNA, 23 nt, Human
ucuaaaaguccccuccucccccu

SEQ ID NO: 746373 - RNA, 24 nt, Human
ucuaaaaguccccuccucccccuu

SEQ ID NO: 746374 - RNA, 24 nt, Human
ucuccaucaagugcuuccugccug

SEQ ID NO: 746375 - RNA, 24 nt, Human
ucugccagccucuucccccagccc

SEQ ID NO: 746376 - RNA, 23 nt, Human
ugaacaagagcugcaagagccca

SEQ ID NO: 746377 - RNA, 19 nt, Human
ugaaggccugcccgccuuc

SEQ ID NO: 746378 - RNA, 19 nt, Human
ugacaggagagcgcaaaac

SEQ ID NO: 746379 - RNA, 25 nt, Human
ugacaggagagcgcaaaacaaaccc

SEQ ID NO: 746380 - RNA, 22 nt, Human
ugccagccucuucccccagccc

SEQ ID NO: 746381 - RNA, 22 nt, Human
ugccccaggccccucuccacgg

SEQ ID NO: 746382 - RNA, 25 nt, Human
ugcuacccuccccgggacaaauaca

SEQ ID NO: 746383 - RNA, 24 nt, Human
ugcuauaaccccagaugcuaaugg

SEQ ID NO: 746384 - RNA, 25 nt, Human
ugcuauaaccccagaugcuaauggc

SEQ ID NO: 746385 - RNA, 18 nt, Human
ugcugcagugaaggccug

SEQ ID NO: 746386 - RNA, 22 nt, Human
ugcuggagccugcuaaccgccu

SEQ ID NO: 746387 - RNA, 22 nt, Human
ugcuggagccugcuaaccgccu

SEQ ID NO: 746388 - RNA, 21 nt, Human
ugggccccaaccuagcaucag

SEQ ID NO: 746389 - RNA, 20 nt, Human
ugggggaagcggcggggugc

SEQ ID NO: 746390 - RNA, 25 nt, Human
uguggacucuuccccugaagagaau

SEQ ID NO: 746391 - RNA, 22 nt, Human
uguucacccacucccagauggc

SEQ ID NO: 746392 - RNA, 18 nt, Human
uucacccacucccagaug

SEQ ID NO: 746393 - RNA, 18 nt, Human
uucaguuagaaaaacaga

SEQ ID NO: 746394 - RNA, 22 nt, Human
uucaguuagaaaaacagaccuu

SEQ ID NO: 746395 - RNA, 18 nt, Human
uucaucugcauggggcca

SEQ ID NO: 746396 - RNA, 22 nt, Human
uucccagucccccaugauaugc

SEQ ID NO: 746397 - RNA, 18 nt, Human
uucuugcuauaaccccag

SEQ ID NO: 746398 - RNA, 20 nt, Human
uugcccaggggcagaggcag

SEQ ID NO: 746399 - RNA, 25 nt, Human
aaaaaaaaaaaaaacaacaaaaaag

SEQ ID NO: 746400 - RNA, 22 nt, Human
aaaaaaaaaaaacaacaaaaaa

SEQ ID NO: 746401 - RNA, 21 nt, Human
aaaaaaaaaaaagacaaaaaa

SEQ ID NO: 746402 - RNA, 21 nt, Human
aaaaaacaacaaaaaaaaaac

SEQ ID NO: 746403 - RNA, 21 nt, Human
aaaaaagacaaaaaaaaaaaa

SEQ ID NO: 746404 - RNA, 26 nt, Human
aaaaggccaaacacacaaccaaagca

SEQ ID NO: 746405 - RNA, 23 nt, Human
aaacaaaugaacaaaguuuucuu

SEQ ID NO: 746406 - RNA, 20 nt, Human
aaacaacaaaaaaaaaacca

SEQ ID NO: 746407 - RNA, 21 nt, Human
aaauaaaacacaaauaaauga

SEQ ID NO: 746408 - RNA, 18 nt, Human
aaccccgaagaaacugaa

SEQ ID NO: 746409 - RNA, 22 nt, Human
aaccccgaagaaacugaaauuc

SEQ ID NO: 746410 - RNA, 20 nt, Human
aaggccaaacacacaaccaa

SEQ ID NO: 746411 - RNA, 25 nt, Human
acaaaaaaaaaaaaaacaacaaaaa

SEQ ID NO: 746412 - RNA, 23 nt, Human
acaaaaaaaaaaccaaacuccau

SEQ ID NO: 746413 - RNA, 26 nt, Human
acaaaaaaaaaaccaaacuccauuac

SEQ ID NO: 746414 - RNA, 21 nt, Human
accaaacuaccuguucguucu

SEQ ID NO: 746415 - RNA, 18 nt, Human
acgggaccggaggcgccc

SEQ ID NO: 746416 - RNA, 19 nt, Human
agaaacugaaauucaaacu

SEQ ID NO: 746417 - RNA, 21 nt, Human
agaaaguagaaacaaaugaac

SEQ ID NO: 746418 - RNA, 23 nt, Human
agcagcccuguaauaaauaaaac

SEQ ID NO: 746419 - RNA, 20 nt, Human
agcccuguaauaaauaaaac

SEQ ID NO: 746420 - RNA, 19 nt, Human
agcggcgaguccggagucg

SEQ ID NO: 746421 - RNA, 23 nt, Human
agcucagcuccaccaaacuaccu

SEQ ID NO: 746422 - RNA, 23 nt, Human
agcuggcugaagguccgcgggcg

SEQ ID NO: 746423 - RNA, 18 nt, Human
aggaaacaugggagagcc

SEQ ID NO: 746424 - RNA, 24 nt, Human
aggaggaggaggcgguggcggcgg

SEQ ID NO: 746425 - RNA, 23 nt, Human
aggccaaacacacaaccaaagca

SEQ ID NO: 746426 - RNA, 27 nt, Human
aggcgguggcggcggcgugaggggcgg

SEQ ID NO: 746427 - RNA, 19 nt, Human
auagauugcuuucaguuuu

SEQ ID NO: 746428 - RNA, 26 nt, Human
aucaugcuagacaguaaagaaaauug

SEQ ID NO: 746429 - RNA, 21 nt, Human
auuacaauaagagugcuggau

SEQ ID NO: 746430 - RNA, 22 nt, Human
auuacaauaagagugcuggaua

SEQ ID NO: 746431 - RNA, 21 nt, Human
caacaaaaaaaaaaccaaacu

SEQ ID NO: 746432 - RNA, 19 nt, Human
caacagcgcugcaugacau

SEQ ID NO: 746433 - RNA, 24 nt, Human
caauaacuggugacuaccuguacc

SEQ ID NO: 746434 - RNA, 19 nt, Human
caccccugcgggcgggcgg

SEQ ID NO: 746435 - RNA, 19 nt, Human
cagcaggccuuggcugggg

SEQ ID NO: 746436 - RNA, 24 nt, Human
caggccuuggcugggggugggagu

SEQ ID NO: 746437 - RNA, 22 nt, Human
caggggcgggccggcugcuucc

SEQ ID NO: 746438 - RNA, 19 nt, Human
cccccaaagacaaaguccg

SEQ ID NO: 746439 - RNA, 20 nt, Human
cccccaaagacaaaguccga

SEQ ID NO: 746440 - RNA, 19 nt, Human
cccgcggcggcuccuccuu

SEQ ID NO: 746441 - RNA, 23 nt, Human
ccuaaaccccgaagaaacugaaa

SEQ ID NO: 746442 - RNA, 24 nt, Human
cgaagaggaggaggaggaggcggu

SEQ ID NO: 746443 - RNA, 23 nt, Human
cggugguggcuucuccggcuccu

SEQ ID NO: 746444 - RNA, 20 nt, Human
cuccaccaaacuaccuguuc

SEQ ID NO: 746445 - RNA, 22 nt, Human
cucggccuccccucgcggcuuc

SEQ ID NO: 746446 - RNA, 21 nt, Human
cucucgucuccgggcagccgu

SEQ ID NO: 746447 - RNA, 19 nt, Human
cugcgcuggggucugaggc

SEQ ID NO: 746448 - RNA, 19 nt, Human
cugggggugggagugggag

SEQ ID NO: 746449 - RNA, 22 nt, Human
cugggggugggagugggagggc

SEQ ID NO: 746450 - RNA, 18 nt, Human
cuguggcgcgggcaggcg

SEQ ID NO: 746451 - RNA, 21 nt, Human
cuuccuuuuuagcucucgcag

SEQ ID NO: 746452 - RNA, 23 nt, Human
cuuugcuucuuugguuacaaagu

SEQ ID NO: 746453 - RNA, 19 nt, Human
gacaguaaagaaaauugug

SEQ ID NO: 746454 - RNA, 21 nt, Human
gacugccucaggcggaaaccc

SEQ ID NO: 746455 - RNA, 19 nt, Human
gagccgcgggccggagcug

SEQ ID NO: 746456 - RNA, 18 nt, Human
gaggaggaggaggcggug

SEQ ID NO: 746457 - RNA, 23 nt, Human
gaggaggaggaggcgguggcggc

SEQ ID NO: 746458 - RNA, 21 nt, Human
gaggcgccccggcugugugag

SEQ ID NO: 746459 - RNA, 22 nt, Human
gcagaccgcuggcacgggaccg

SEQ ID NO: 746460 - RNA, 23 nt, Human
gcagagaggcacgccggcuccuc

SEQ ID NO: 746461 - RNA, 21 nt, Human
gcggcgacggcggucucggcc

SEQ ID NO: 746462 - RNA, 29 nt, Human
gcgguggcggcggcgugaggggcggugac

SEQ ID NO: 746463 - RNA, 20 nt, Human
gcgguggggcuguggcgcgg

SEQ ID NO: 746464 - RNA, 22 nt, Human
gcucugggggaggggaaagccg

SEQ ID NO: 746465 - RNA, 25 nt, Human
ggaaacaugggagagccaccaaaac

SEQ ID NO: 746466 - RNA, 21 nt, Human
ggaaaccggggagggcagagc

SEQ ID NO: 746467 - RNA, 24 nt, Human
ggaccggaggcgccccggcuguga

SEQ ID NO: 746468 - RNA, 18 nt, Human
ggaggcgguggcggcggc

SEQ ID NO: 746469 - RNA, 23 nt, Human
ggagggcagagaggcacgccggc

SEQ ID NO: 746470 - RNA, 21 nt, Human
ggagggcagagcacgggcccc

SEQ ID NO: 746471 - RNA, 18 nt, Human
ggcagagaggcacgccgg

SEQ ID NO: 746472 - RNA, 19 nt, Human
ggcgaagaggaggaggagg

SEQ ID NO: 746473 - RNA, 22 nt, Human
ggcggcggcgugaggggcggug

SEQ ID NO: 746474 - RNA, 19 nt, Human
ggcggugcugccccgcucg

SEQ ID NO: 746475 - RNA, 26 nt, Human
gggcaggcggcccucccuccccggcu

SEQ ID NO: 746476 - RNA, 23 nt, Human
gggccggagcuggcugaaggucc

SEQ ID NO: 746477 - RNA, 24 nt, Human
gggcgggcgguggggcuguggcgc

SEQ ID NO: 746478 - RNA, 23 nt, Human
gggcuguggcgcgggcaggcggc

SEQ ID NO: 746479 - RNA, 21 nt, Human
gggggaggggaaagccggcuc

SEQ ID NO: 746480 - RNA, 18 nt, Human
ggggugggagugggaggg

SEQ ID NO: 746481 - RNA, 21 nt, Human
guacacuagcucagcuccacc

SEQ ID NO: 746482 - RNA, 21 nt, Human
gugggagggcgaagaggagga

SEQ ID NO: 746483 - RNA, 18 nt, Human
uaaaccccgaagaaacug

SEQ ID NO: 746484 - RNA, 21 nt, Human
uaaaccccgaagaaacugaaa

SEQ ID NO: 746485 - RNA, 25 nt, Human
uaaaccccgaagaaacugaaauuca

SEQ ID NO: 746486 - RNA, 24 nt, Human
uaauacugaaaaggccaaacacac

SEQ ID NO: 746487 - RNA, 25 nt, Human
uagaaugauugucuaauacugaaaa

SEQ ID NO: 746488 - RNA, 19 nt, Human
uagccggagcucagcccca

SEQ ID NO: 746489 - RNA, 24 nt, Human
uagccggagcucagccccagggac

SEQ ID NO: 746490 - RNA, 22 nt, Human
uagcggugguggcuucuccccc

SEQ ID NO: 746491 - RNA, 24 nt, Human
uagcggugguggcuucuccggcuc

SEQ ID NO: 746492 - RNA, 23 nt, Human
uaggaaacaugggagagccacca

SEQ ID NO: 746493 - RNA, 24 nt, Human
uaggaaacaugggagagccaccaa

SEQ ID NO: 746494 - RNA, 28 nt, Human
uauaaaguggaaagaacaccaguggcac

SEQ ID NO: 746495 - RNA, 21 nt, Human
ucagcaggccuuggcuggggg

SEQ ID NO: 746496 - RNA, 19 nt, Human
ucaggguaaauccaugggu

SEQ ID NO: 746497 - RNA, 21 nt, Human
ucccucagaggcggcgagagc

SEQ ID NO: 746498 - RNA, 18 nt, Human
uccgagucugcgcugggg

SEQ ID NO: 746499 - RNA, 21 nt, Human
uccgcgggcgggcgguggggc

SEQ ID NO: 746500 - RNA, 24 nt, Human
uccuaaaccccgaagaaacugaaa

SEQ ID NO: 746501 - RNA, 18 nt, Human
uccugucuuucacuuccu

SEQ ID NO: 746502 - RNA, 19 nt, Human
uccuuuuuagcucucgcag

SEQ ID NO: 746503 - RNA, 19 nt, Human
ucggcgcucggcgcgguca

SEQ ID NO: 746504 - RNA, 23 nt, Human
ucuccggcuccuccucgggggcc

SEQ ID NO: 746505 - RNA, 26 nt, Human
ucuccgggcagccguggucaguccag

SEQ ID NO: 746506 - RNA, 22 nt, Human
ucuccuuguguacugaugacau

SEQ ID NO: 746507 - RNA, 21 nt, Human
ucucugacugagggaaggagc

SEQ ID NO: 746508 - RNA, 21 nt, Human
ucugcgcuggggucugaggcc

SEQ ID NO: 746509 - RNA, 22 nt, Human
ucuuuuguucaauuauugccua

SEQ ID NO: 746510 - RNA, 25 nt, Human
ugaaaagcagaggaaucguggcaaa

SEQ ID NO: 746511 - RNA, 19 nt, Human
ugaaaaggccaaacacaca

SEQ ID NO: 746512 - RNA, 25 nt, Human
ugaaaaggccaaacacacaaccaaa

SEQ ID NO: 746513 - RNA, 18 nt, Human
ugaaauggccgcgccagg

SEQ ID NO: 746514 - RNA, 23 nt, Human
ugaaauggccgcgccagggaugc

SEQ ID NO: 746515 - RNA, 22 nt, Human
ugaacaauuucacagcuuuuua

SEQ ID NO: 746516 - RNA, 19 nt, Human
uggaaagaacaccaguggc

SEQ ID NO: 746517 - RNA, 20 nt, Human
uggaaagaacaccaguggca

SEQ ID NO: 746518 - RNA, 27 nt, Human
uggaaagaacaccaguggcacacaagg

SEQ ID NO: 746519 - RNA, 18 nt, Human
uggcugaagguccgcggg

SEQ ID NO: 746520 - RNA, 23 nt, Human
uggcugggggugggagugggagg

SEQ ID NO: 746521 - RNA, 18 nt, Human
ugggggugggagugggag

SEQ ID NO: 746522 - RNA, 23 nt, Human
uggguccugucggaaaccgggga

SEQ ID NO: 746523 - RNA, 22 nt, Human
ugugugagguagcggugguggc

SEQ ID NO: 746524 - RNA, 23 nt, Human
uuacacuauacaaaauuuacauu

SEQ ID NO: 746525 - RNA, 21 nt, Human
uugugacugagaaaacacuaa

SEQ ID NO: 746526 - RNA, 22 nt, Human
aaaaccugcaccaccagcauca

SEQ ID NO: 746527 - RNA, 22 nt, Human
aaaaggcaaaggucaaacaaaa

SEQ ID NO: 746528 - RNA, 23 nt, Human
aaagauaacaacuuucaaccccc

SEQ ID NO: 746529 - RNA, 25 nt, Human
aacaaaaggccgaagucaccacccg

SEQ ID NO: 746530 - RNA, 18 nt, Human
aacccccacccuuacccc

SEQ ID NO: 746531 - RNA, 21 nt, Human
aagaagagacaggcuccagga

SEQ ID NO: 746532 - RNA, 18 nt, Human
aagcugcaacaucaaaac

SEQ ID NO: 746533 - RNA, 24 nt, Human
acaaagucaaaaggcaaaggucaa

SEQ ID NO: 746534 - RNA, 19 nt, Human
acagacuagugaacugggu

SEQ ID NO: 746535 - RNA, 21 nt, Human
accagcaucaccacacggacu

SEQ ID NO: 746536 - RNA, 21 nt, Human
acccccacccuuaccccagac

SEQ ID NO: 746537 - RNA, 18 nt, Human
acccgaaaggaacaaaca

SEQ ID NO: 746538 - RNA, 22 nt, Human
acugcggagccuccgggcgccg

SEQ ID NO: 746539 - RNA, 23 nt, Human
acuuucaggcuuguuuguuuugu

SEQ ID NO: 746540 - RNA, 22 nt, Human
agaaagaagagacaggcuccag

SEQ ID NO: 746541 - RNA, 24 nt, Human
agaaagaagagacaggcuccagga

SEQ ID NO: 746542 - RNA, 23 nt, Human
agcccggagcccgccgcaggguu

SEQ ID NO: 746543 - RNA, 19 nt, Human
aggaaagagccagcagaga

SEQ ID NO: 746544 - RNA, 26 nt, Human
aggcugaaaguggaucaaaagggacc

SEQ ID NO: 746545 - RNA, 18 nt, Human
aggcuuguuuguuuuguu

SEQ ID NO: 746546 - RNA, 21 nt, Human
agggaggccaccuuuggcucc

SEQ ID NO: 746547 - RNA, 23 nt, Human
agguagcuggcaaaggucagugc

SEQ ID NO: 746548 - RNA, 19 nt, Human
aguggaaaaaggaaaacug

SEQ ID NO: 746549 - RNA, 25 nt, Human
auagccaauauauuuggggacaggg

SEQ ID NO: 746550 - RNA, 22 nt, Human
caaaagaggcacaaagucaaaa

SEQ ID NO: 746551 - RNA, 26 nt, Human
caaaagaggcacaaagucaaaaggca

SEQ ID NO: 746552 - RNA, 22 nt, Human
caaagcaggccacaccgcaggc

SEQ ID NO: 746553 - RNA, 20 nt, Human
caacccccacccuuacccca

SEQ ID NO: 746554 - RNA, 19 nt, Human
cacacggacuggagaucac

SEQ ID NO: 746555 - RNA, 22 nt, Human
cacacggacuggagaucacaau

SEQ ID NO: 746556 - RNA, 23 nt, Human
cagcaucaccacacggacuggag

SEQ ID NO: 746557 - RNA, 20 nt, Human
cagcccggagcccgccgcag

SEQ ID NO: 746558 - RNA, 27 nt, Human
caggaaagagccagcagagaacacuug

SEQ ID NO: 746559 - RNA, 18 nt, Human
caggaccccacagacuag

SEQ ID NO: 746560 - RNA, 20 nt, Human
caucccccucacgcgcgccc

SEQ ID NO: 746561 - RNA, 26 nt, Human
ccaaaucuuuucucacuccccuaauc

SEQ ID NO: 746562 - RNA, 22 nt, Human
ccacagacuagugaacugggug

SEQ ID NO: 746563 - RNA, 18 nt, Human
ccaccagcaucaccacac

SEQ ID NO: 746564 - RNA, 19 nt, Human
ccacccgaaaggaacaaac

SEQ ID NO: 746565 - RNA, 22 nt, Human
ccagaaagaagagacaggcucc

SEQ ID NO: 746566 - RNA, 23 nt, Human
cccacccuuaccccagacuccca

SEQ ID NO: 746567 - RNA, 20 nt, Human
ccccaggacugcuagaaucc

SEQ ID NO: 746568 - RNA, 20 nt, Human
cccgaaaggaacaaacaaaa

SEQ ID NO: 746569 - RNA, 22 nt, Human
cccgccgcgccgccuccugccg

SEQ ID NO: 746570 - RNA, 24 nt, Human
cccgccgcgccgccuccugccgca

SEQ ID NO: 746571 - RNA, 19 nt, Human
ccgaagucaccacccgaaa

SEQ ID NO: 746572 - RNA, 19 nt, Human
ccgccgcgccgccuccugc

SEQ ID NO: 746573 - RNA, 20 nt, Human
ccucccggcccucgucccca

SEQ ID NO: 746574 - RNA, 21 nt, Human
ccuccgggcgccgucuggccc

SEQ ID NO: 746575 - RNA, 26 nt, Human
ccuccgggcgccgucuggcccgcgcg

SEQ ID NO: 746576 - RNA, 20 nt, Human
ccuccugccgcaucccccuc

SEQ ID NO: 746577 - RNA, 22 nt, Human
ccugcaagaccugacaugagcc

SEQ ID NO: 746578 - RNA, 19 nt, Human
ccugcuuccuuucuguggc

SEQ ID NO: 746579 - RNA, 22 nt, Human
cgcggagccucccgggcgacgg

SEQ ID NO: 746580 - RNA, 18 nt, Human
cucacuccccuaaucccc

SEQ ID NO: 746581 - RNA, 23 nt, Human
cucccgccgcgccgccuccugcc

SEQ ID NO: 746582 - RNA, 22 nt, Human
cuccgcccgggcugccugcucc

SEQ ID NO: 746583 - RNA, 19 nt, Human
cuccuccagacacuuucag

SEQ ID NO: 746584 - RNA, 22 nt, Human
cucguccccaugaccagauggg

SEQ ID NO: 746585 - RNA, 23 nt, Human
cugauccugcaagaccugacaug

SEQ ID NO: 746586 - RNA, 23 nt, Human
cuuucaacccccacccuuacccc

SEQ ID NO: 746587 - RNA, 20 nt, Human
gaaaaaggaaaacuguuagg

SEQ ID NO: 746588 - RNA, 22 nt, Human
gaaaaggcuacccggugcccuc

SEQ ID NO: 746589 - RNA, 18 nt, Human
gaaaggaacaaacaaaac

SEQ ID NO: 746590 - RNA, 22 nt, Human
gaacaaacaaaaccugcaccac

SEQ ID NO: 746591 - RNA, 22 nt, Human
gaagagacaggcuccaggaccc

SEQ ID NO: 746592 - RNA, 21 nt, Human
gaaggacggagcagcccggag

SEQ ID NO: 746593 - RNA, 21 nt, Human
gaagugaaacauuuuuguuuu

SEQ ID NO: 746594 - RNA, 22 nt, Human
gaccagaugggacuucaugaga

SEQ ID NO: 746595 - RNA, 18 nt, Human
gaccugguccaguugugg

SEQ ID NO: 746596 - RNA, 19 nt, Human
gcaggaaagagccagcaga

SEQ ID NO: 746597 - RNA, 18 nt, Human
gcauggaggcugaaagug

SEQ ID NO: 746598 - RNA, 20 nt, Human
gcauggaggcugaaagugga

SEQ ID NO: 746599 - RNA, 20 nt, Human
gccgccgccuacuccucccg

SEQ ID NO: 746600 - RNA, 23 nt, Human
gccgucuggcccgcgcgcagcuc

SEQ ID NO: 746601 - RNA, 24 nt, Human
gccuacuccucccgccgcgccgcc

SEQ ID NO: 746602 - RNA, 21 nt, Human
gcggccugaaagguuuuccag

SEQ ID NO: 746603 - RNA, 19 nt, Human
ggaacaaacaaaaccugca

SEQ ID NO: 746604 - RNA, 22 nt, Human
ggaaggacggagcagcccggag

SEQ ID NO: 746605 - RNA, 18 nt, Human
ggaccccacagacuagug

SEQ ID NO: 746606 - RNA, 21 nt, Human
ggcccugcuguccugcuuccu

SEQ ID NO: 746607 - RNA, 19 nt, Human
ggggacagggaggccaccu

SEQ ID NO: 746608 - RNA, 21 nt, Human
uacacuguguugggaaaaaua

SEQ ID NO: 746609 - RNA, 22 nt, Human
uacccggugcccucccggcccu

SEQ ID NO: 746610 - RNA, 22 nt, Human
ucagucacacaguggaaaaagg

SEQ ID NO: 746611 - RNA, 20 nt, Human
uccccaagugugaaaaggcu

SEQ ID NO: 746612 - RNA, 23 nt, Human
ucccccagguagcuggcaaaggu

SEQ ID NO: 746613 - RNA, 19 nt, Human
uccugaccagccuuggaug

SEQ ID NO: 746614 - RNA, 18 nt, Human
uccugccgcaucccccuc

SEQ ID NO: 746615 - RNA, 21 nt, Human
ucucacuccccuaauccccaa

SEQ ID NO: 746616 - RNA, 21 nt, Human
ucuccguggcugguuucacuu

SEQ ID NO: 746617 - RNA, 19 nt, Human
ugaacugggugccuuuagg

SEQ ID NO: 746618 - RNA, 19 nt, Human
ugagaaggaaaugagcggc

SEQ ID NO: 746619 - RNA, 24 nt, Human
ugagaggggcccugcuguccugcu

SEQ ID NO: 746620 - RNA, 18 nt, Human
ugcaccaccagcaucacc

SEQ ID NO: 746621 - RNA, 23 nt, Human
uggagagguggguguuuucuggc

SEQ ID NO: 746622 - RNA, 19 nt, Human
uggaggcugaaaguggauc

SEQ ID NO: 746623 - RNA, 19 nt, Human
uggcaggaaagagccagca

SEQ ID NO: 746624 - RNA, 22 nt, Human
uggcauggaggcugaaagugga

SEQ ID NO: 746625 - RNA, 22 nt, Human
uggcucccgcgcggagccuccc

SEQ ID NO: 746626 - RNA, 23 nt, Human
ugggucuaaccaggcaaagugag

SEQ ID NO: 746627 - RNA, 22 nt, Human
uguccugcuuccuuucuguggc

SEQ ID NO: 746628 - RNA, 27 nt, Human
uuguuuuguuuuauagauucagaaaua

SEQ ID NO: 746629 - RNA, 19 nt, Human
uuuaaacuuugacuuugca

SEQ ID NO: 746630 - RNA, 20 nt, Human
uuuucuggcauggaggcuga

SEQ ID NO: 746631 - RNA, 20 nt, Human
aaaaaacagauauaauacca

SEQ ID NO: 746632 - RNA, 27 nt, Human
aaaacagauauaauaccagcauaaaau

SEQ ID NO: 746633 - RNA, 21 nt, Human
aaacagauauaauaccagcau

SEQ ID NO: 746634 - RNA, 19 nt, Human
acugaagugaaaggcugca

SEQ ID NO: 746635 - RNA, 21 nt, Human
agauaggagaguccggcuggu

SEQ ID NO: 746636 - RNA, 18 nt, Human
agcaccagagccagaccc

SEQ ID NO: 746637 - RNA, 24 nt, Human
agccaggugggcacugaagugaaa

SEQ ID NO: 746638 - RNA, 19 nt, Human
agccugcagggcaggaggg

SEQ ID NO: 746639 - RNA, 21 nt, Human
aggcggggaggacagccugca

SEQ ID NO: 746640 - RNA, 23 nt, Human
aggcggggaggacagccugcagg

SEQ ID NO: 746641 - RNA, 23 nt, Human
auccaguaagaaaaacauaauuu

SEQ ID NO: 746642 - RNA, 23 nt, Human
caacagcgauaacgaggguccca

SEQ ID NO: 746643 - RNA, 25 nt, Human
caccacggaguucgcgcucacggaa

SEQ ID NO: 746644 - RNA, 20 nt, Human
cagagccagacccaccacca

SEQ ID NO: 746645 - RNA, 21 nt, Human
cagagccagacccaccaccac

SEQ ID NO: 746646 - RNA, 20 nt, Human
cagcagcagcuaagcuggau

SEQ ID NO: 746647 - RNA, 22 nt, Human
cagcagcagcuaagcuggaugc

SEQ ID NO: 746648 - RNA, 18 nt, Human
cagcagcuaagcuggaug

SEQ ID NO: 746649 - RNA, 20 nt, Human
cagcagcuaagcuggaugca

SEQ ID NO: 746650 - RNA, 19 nt, Human
caggccccagcugggugcc

SEQ ID NO: 746651 - RNA, 23 nt, Human
caggucagccaggugggcacuga

SEQ ID NO: 746652 - RNA, 27 nt, Human
ccuuuuguccugggaagcagagauugg

SEQ ID NO: 746653 - RNA, 18 nt, Human
cuggagaagcgggugcag

SEQ ID NO: 746654 - RNA, 18 nt, Human
gagaagcgggugcaggag

SEQ ID NO: 746655 - RNA, 19 nt, Human
gagggcucugggggugcca

SEQ ID NO: 746656 - RNA, 22 nt, Human
gcagcaccagagccagacccac

SEQ ID NO: 746657 - RNA, 22 nt, Human
gcucacggaacccaggccugcu

SEQ ID NO: 746658 - RNA, 20 nt, Human
ggagggcucugggggugcca

SEQ ID NO: 746659 - RNA, 19 nt, Human
gggcacugaagugaaaggc

SEQ ID NO: 746660 - RNA, 21 nt, Human
gggcacugaagugaaaggcug

SEQ ID NO: 746661 - RNA, 23 nt, Human
gggcaggaggggcacagacaggc

SEQ ID NO: 746662 - RNA, 24 nt, Human
gggugcaggagggcucugggggug

SEQ ID NO: 746663 - RNA, 21 nt, Human
gugcaggagggcucugggggu

SEQ ID NO: 746664 - RNA, 22 nt, Human
gugccaugguacagccgcaacc

SEQ ID NO: 746665 - RNA, 20 nt, Human
uaaaaaacagauauaauacc

SEQ ID NO: 746666 - RNA, 24 nt, Human
uaagaaaaacauaauuuucucauu

SEQ ID NO: 746667 - RNA, 22 nt, Human
uaauagauuauguuuguacaaa

SEQ ID NO: 746668 - RNA, 28 nt, Human
uagcaaauaauagauuauguuuguacaa

SEQ ID NO: 746669 - RNA, 19 nt, Human
ucugcuuccucagccaagu

SEQ ID NO: 746670 - RNA, 18 nt, Human
ugaagugaaaggcugcag

SEQ ID NO: 746671 - RNA, 19 nt, Human
ugaagugaaaggcugcaga

SEQ ID NO: 746672 - RNA, 23 nt, Human
ugcagagaggcggggaggacagc

SEQ ID NO: 746673 - RNA, 22 nt, Human
ugcagggcaggaggggcacaga

SEQ ID NO: 746674 - RNA, 24 nt, Human
ugcguagauggcagcaccagagga

SEQ ID NO: 746675 - RNA, 23 nt, Human
uguuuguacaaaauccaguaaga

SEQ ID NO: 746676 - RNA, 23 nt, Human
uuaguauuuuguucaacaauuua

SEQ ID NO: 746677 - RNA, 30 nt, Human
uugagcaacagcgauaacgagggucccuuu

SEQ ID NO: 746678 - RNA, 20 nt, Human
uugcucugcgggguccugga

SEQ ID NO: 746679 - RNA, 18 nt, Human
uuugcucugcgggguccu

SEQ ID NO: 746680 - RNA, 21 nt, Human
uuuugcucugcgggguccugg

SEQ ID NO: 746681 - RNA, 22 nt, Human
uuuugcucugcgggguccugga

SEQ ID NO: 746682 - RNA, 25 nt, Human
aaagaagaagauacaugucccagga

SEQ ID NO: 746683 - RNA, 19 nt, Human
aaccuggcccagcacauga

SEQ ID NO: 746684 - RNA, 24 nt, Human
aagaagaagauacaugucccagga

SEQ ID NO: 746685 - RNA, 25 nt, Human
aagcaaucgcuuuccuccuuuuuuc

SEQ ID NO: 746686 - RNA, 18 nt, Human
aaucgcgggaacuaacac

SEQ ID NO: 746687 - RNA, 21 nt, Human
aaugaagagauuaaaaagucu

SEQ ID NO: 746688 - RNA, 19 nt, Human
acaauaagcaaucgcuuuc

SEQ ID NO: 746689 - RNA, 26 nt, Human
acccugugguucgccuagacccaggg

SEQ ID NO: 746690 - RNA, 20 nt, Human
acugcacugggauuuagaug

SEQ ID NO: 746691 - RNA, 23 nt, Human
acuuccaaagaaucuccaacuuc

SEQ ID NO: 746692 - RNA, 18 nt, Human
agauuaaaaagucuggca

SEQ ID NO: 746693 - RNA, 20 nt, Human
agcugcagaaucgcgggaac

SEQ ID NO: 746694 - RNA, 24 nt, Human
aggaucagcagagagguugucagc

SEQ ID NO: 746695 - RNA, 27 nt, Human
aggcaaagaagaagauacaugucccag

SEQ ID NO: 746696 - RNA, 23 nt, Human
aggcuguuuuggggcuguguacu

SEQ ID NO: 746697 - RNA, 22 nt, Human
aggucuuguugccggggcacag

SEQ ID NO: 746698 - RNA, 23 nt, Human
agucgaaaaccuggcccagcaca

SEQ ID NO: 746699 - RNA, 27 nt, Human
auaagcaaucgcuuuccuccuuuuuuc

SEQ ID NO: 746700 - RNA, 21 nt, Human
aucaugcuuagggaaggguug

SEQ ID NO: 746701 - RNA, 25 nt, Human
augcccagcauuccauccucccagc

SEQ ID NO: 746702 - RNA, 24 nt, Human
caacagcacaggcuggagggacaa

SEQ ID NO: 746703 - RNA, 23 nt, Human
caccugcuuauugaacuccacag

SEQ ID NO: 746704 - RNA, 24 nt, Human
caccuugaccucacccugugguuc

SEQ ID NO: 746705 - RNA, 18 nt, Human
cacugugaccaucagagc

SEQ ID NO: 746706 - RNA, 24 nt, Human
cagaagguggccaacccacccucu

SEQ ID NO: 746707 - RNA, 21 nt, Human
cagaaugcucaccuugaccuc

SEQ ID NO: 746708 - RNA, 19 nt, Human
cagcagcugccugauccag

SEQ ID NO: 746709 - RNA, 18 nt, Human
caggaucagcagagaggu

SEQ ID NO: 746710 - RNA, 19 nt, Human
ccaacccacccucugagcc

SEQ ID NO: 746711 - RNA, 24 nt, Human
ccacuuccaaagaaucuccaacuu

SEQ ID NO: 746712 - RNA, 21 nt, Human
ccaggcuguugacugcacugg

SEQ ID NO: 746713 - RNA, 22 nt, Human
ccaguccuucuuccaacuugcu

SEQ ID NO: 746714 - RNA, 22 nt, Human
ccauuagcucaaaguucacaug

SEQ ID NO: 746715 - RNA, 23 nt, Human
cccucugagcccaaauauuguuc

SEQ ID NO: 746716 - RNA, 26 nt, Human
ccuaaccuccaccucgaaccgguucc

SEQ ID NO: 746717 - RNA, 26 nt, Human
cuaacacugugaccaucagagccaga

SEQ ID NO: 746718 - RNA, 19 nt, Human
cugaaagagccagccggua

SEQ ID NO: 746719 - RNA, 21 nt, Human
cugugugguuccccagaacug

SEQ ID NO: 746720 - RNA, 23 nt, Human
cuuagggaaggguugcagagaaa

SEQ ID NO: 746721 - RNA, 21 nt, Human
gaagagauuaaaaagucuggc

SEQ ID NO: 746722 - RNA, 19 nt, Human
gaaggaugggcagcauggg

SEQ ID NO: 746723 - RNA, 22 nt, Human
gaaggaugggcagcaugggcug

SEQ ID NO: 746724 - RNA, 22 nt, Human
gcccuugaugacuuuuccugau

SEQ ID NO: 746725 - RNA, 20 nt, Human
gccuaaccuccaccucgaac

SEQ ID NO: 746726 - RNA, 18 nt, Human
gcucaugguggcuggugc

SEQ ID NO: 746727 - RNA, 18 nt, Human
ggcuguugacugcacugg

SEQ ID NO: 746728 - RNA, 23 nt, Human
gugacacaacaggaucagcagag

SEQ ID NO: 746729 - RNA, 20 nt, Human
guguugccugauuuccuguu

SEQ ID NO: 746730 - RNA, 19 nt, Human
uaaccuccaccucgaacac

SEQ ID NO: 746731 - RNA, 21 nt, Human
uaaccuccaccucgaacacca

SEQ ID NO: 746732 - RNA, 20 nt, Human
uauuaccccuucugagccaa

SEQ ID NO: 746733 - RNA, 18 nt, Human
ucaaaguucacaugaauc

SEQ ID NO: 746734 - RNA, 25 nt, Human
ucacccgccuaaccuccaccucgaa

SEQ ID NO: 746735 - RNA, 18 nt, Human
ucaccggguugcggggag

SEQ ID NO: 746736 - RNA, 24 nt, Human
ucacugagggaguuagauuuggua

SEQ ID NO: 746737 - RNA, 20 nt, Human
ucagcagagagguugucagc

SEQ ID NO: 746738 - RNA, 20 nt, Human
uccaguccaaaaagugaggc

SEQ ID NO: 746739 - RNA, 23 nt, Human
ucccagaaugcucaccuugaccu

SEQ ID NO: 746740 - RNA, 20 nt, Human
ucccagagucccagggccug

SEQ ID NO: 746741 - RNA, 20 nt, Human
ucccagagucccagggccug

SEQ ID NO: 746742 - RNA, 18 nt, Human
ucccaggacuauaggcca

SEQ ID NO: 746743 - RNA, 20 nt, Human
ucccuuaguucuaccaggga

SEQ ID NO: 746744 - RNA, 20 nt, Human
ucuuuguuagcaguggaguc

SEQ ID NO: 746745 - RNA, 21 nt, Human
ugaauccuagcaaccguaacu

SEQ ID NO: 746746 - RNA, 22 nt, Human
ugacacaacaggaucagcagag

SEQ ID NO: 746747 - RNA, 23 nt, Human
ugacugcaucgggacuuguauuu

SEQ ID NO: 746748 - RNA, 24 nt, Human
ugauggaccaguucugucucuggu

SEQ ID NO: 746749 - RNA, 22 nt, Human
ugcagagaaaccuuugcaccag

SEQ ID NO: 746750 - RNA, 22 nt, Human
ugcuuagggaaggguugcagag

SEQ ID NO: 746751 - RNA, 25 nt, Human
uggaaggaugggcagcaugggcugg

SEQ ID NO: 746752 - RNA, 22 nt, Human
uggcuuucaccggguugcgggg

SEQ ID NO: 746753 - RNA, 18 nt, Human
uggggcucagaagguggc

SEQ ID NO: 746754 - RNA, 23 nt, Human
uggugacacaacaggaucagcag

SEQ ID NO: 746755 - RNA, 22 nt, Human
ugguguugccugauuuccuguu

SEQ ID NO: 746756 - RNA, 20 nt, Human
ugugggagugcucauggugg

SEQ ID NO: 746757 - RNA, 18 nt, Human
uuaaugaagagauuaaaa

SEQ ID NO: 746758 - RNA, 24 nt, Human
uucagguagaggagggcucccagg

SEQ ID NO: 746759 - RNA, 19 nt, Human
uucccuggccuuucuuagg

SEQ ID NO: 746760 - RNA, 20 nt, Human
uuccuccuuuuuucaugccc

SEQ ID NO: 746761 - RNA, 21 nt, Human
uuccugauccuaacuucaagc

SEQ ID NO: 746762 - RNA, 18 nt, Human
uugcugccguucccuggc

SEQ ID NO: 746763 - RNA, 24 nt, Human
aaacaagcagcucauaauaaaaga

SEQ ID NO: 746764 - RNA, 19 nt, Human
aacugacuuuaaauacugc

SEQ ID NO: 746765 - RNA, 22 nt, Human
aagcagcucauaauaaaagaaa

SEQ ID NO: 746766 - RNA, 25 nt, Human
acaagcagcucauaauaaaagaaaa

SEQ ID NO: 746767 - RNA, 22 nt, Human
caacugacuuuaaauacugccc

SEQ ID NO: 746768 - RNA, 21 nt, Human
caagaaaaaaaccuacuaaga

SEQ ID NO: 746769 - RNA, 22 nt, Human
caagaaaaaacauccuaagaaa

SEQ ID NO: 746770 - RNA, 21 nt, Human
cacugcuugccaacugacuuu

SEQ ID NO: 746771 - RNA, 22 nt, Human
cucauaauaaaagaaaacugag

SEQ ID NO: 746772 - RNA, 24 nt, Human
cucauaauaaaagaaaacugagcu

SEQ ID NO: 746773 - RNA, 22 nt, Human
gaaaaaaaccuacuaagagcau

SEQ ID NO: 746774 - RNA, 18 nt, Human
gacaagaaaaaacauccu

SEQ ID NO: 746775 - RNA, 22 nt, Human
gagaaagaaucaucaaucucau

SEQ ID NO: 746776 - RNA, 20 nt, Human
gcccuuuaaugcugagauga

SEQ ID NO: 746777 - RNA, 19 nt, Human
ggagaguaaaggaugagug

SEQ ID NO: 746778 - RNA, 20 nt, Human
gugugcugcacccauuccua

SEQ ID NO: 746779 - RNA, 24 nt, Human
uaaaaagacaagaaaaaacauccu

SEQ ID NO: 746780 - RNA, 25 nt, Human
uacaagaaaaaaaccuacuaagagc

SEQ ID NO: 746781 - RNA, 23 nt, Human
uacaccacucaaacaagcagcuc

SEQ ID NO: 746782 - RNA, 21 nt, Human
uaguuacauguguauucaugu

SEQ ID NO: 746783 - RNA, 21 nt, Human
uauaguguaacuauuaaaauu

SEQ ID NO: 746784 - RNA, 19 nt, Human
ucugcuucaagcucuuuca

SEQ ID NO: 746785 - RNA, 18 nt, Human
ugaggggagaguaaagga

SEQ ID NO: 746786 - RNA, 19 nt, Human
ugccaugcuggugugcugc

SEQ ID NO: 746787 - RNA, 22 nt, Human
ugcuucaagcucuuucaguuca

SEQ ID NO: 746788 - RNA, 26 nt, Human
ugugaugaaagguuuuccaggagaaa

SEQ ID NO: 746789 - RNA, 20 nt, Human
uuuacaaaaaucuuauucca

SEQ ID NO: 746790 - RNA, 19 nt, Human
uuucacaaguccugaagau

SEQ ID NO: 746791 - RNA, 20 nt, Human
aacaagcacaugccccccaa

SEQ ID NO: 746792 - RNA, 21 nt, Human
aagcaagagcagccccaugug

SEQ ID NO: 746793 - RNA, 20 nt, Human
aaggugccuaauucauaaac

SEQ ID NO: 746794 - RNA, 20 nt, Human
aauggagaaaccaaugucca

SEQ ID NO: 746795 - RNA, 22 nt, Human
acagccacgccugugcgcagcg

SEQ ID NO: 746796 - RNA, 21 nt, Human
accagcagguucugcgucucc

SEQ ID NO: 746797 - RNA, 23 nt, Human
acuuccuucaccaggacccacaa

SEQ ID NO: 746798 - RNA, 26 nt, Human
agaacacagccagggccccauacuug

SEQ ID NO: 746799 - RNA, 21 nt, Human
agaugcaggcccagggaaucu

SEQ ID NO: 746800 - RNA, 19 nt, Human
agcuggugcgaggcgggcu

SEQ ID NO: 746801 - RNA, 22 nt, Human
aggcaagcaagggcagaucuga

SEQ ID NO: 746802 - RNA, 22 nt, Human
aggcaggaggagaugaggccag

SEQ ID NO: 746803 - RNA, 23 nt, Human
aggcauugagcacaguguaauuu

SEQ ID NO: 746804 - RNA, 22 nt, Human
agucaggagguucaggcucccg

SEQ ID NO: 746805 - RNA, 21 nt, Human
auggagaaaccaauguccaca

SEQ ID NO: 746806 - RNA, 26 nt, Human
caagagcagccccaugugggggcuaa

SEQ ID NO: 746807 - RNA, 22 nt, Human
caagaggcaggaaugaccccca

SEQ ID NO: 746808 - RNA, 22 nt, Human
caagcacaugccccccaaccug

SEQ ID NO: 746809 - RNA, 27 nt, Human
cacaacucacugcuccugggagagcag

SEQ ID NO: 746810 - RNA, 21 nt, Human
caccaggacccacaaccccug

SEQ ID NO: 746811 - RNA, 18 nt, Human
caccugaggguuccauca

SEQ ID NO: 746812 - RNA, 25 nt, Human
caccuuuggcuccacagucugguuc

SEQ ID NO: 746813 - RNA, 20 nt, Human
cacggauggagggacucagc

SEQ ID NO: 746814 - RNA, 21 nt, Human
cagccagggccccauacuugg

SEQ ID NO: 746815 - RNA, 19 nt, Human
cagccccaugugggggcua

SEQ ID NO: 746816 - RNA, 21 nt, Human
caggacccacaaccccugccc

SEQ ID NO: 746817 - RNA, 26 nt, Human
caggugcagcuggugcgaggcgggcu

SEQ ID NO: 746818 - RNA, 22 nt, Human
ccaacaagcacaugccccccaa

SEQ ID NO: 746819 - RNA, 19 nt, Human
ccacagccucuuccugggc

SEQ ID NO: 746820 - RNA, 18 nt, Human
ccaggagaugcaggccca

SEQ ID NO: 746821 - RNA, 20 nt, Human
ccagggccccauacuuggcc

SEQ ID NO: 746822 - RNA, 18 nt, Human
ccaguacuggcuagccag

SEQ ID NO: 746823 - RNA, 23 nt, Human
cccauaccacauagcugcaggaa

SEQ ID NO: 746824 - RNA, 22 nt, Human
ccccaaccuggugccaagaggc

SEQ ID NO: 746825 - RNA, 18 nt, Human
ccccacugaugacaccuu

SEQ ID NO: 746826 - RNA, 21 nt, Human
cccccaguacuggcuagccag

SEQ ID NO: 746827 - RNA, 26 nt, Human
ccuggccgcaguguggagcacagagg

SEQ ID NO: 746828 - RNA, 20 nt, Human
ccugggagagcaggaggggc

SEQ ID NO: 746829 - RNA, 22 nt, Human
ccuuguggcuccagcccugggg

SEQ ID NO: 746830 - RNA, 18 nt, Human
cggcgccaggagaugcag

SEQ ID NO: 746831 - RNA, 22 nt, Human
cguguacagccacgccugugcg

SEQ ID NO: 746832 - RNA, 27 nt, Human
cuagccaggugcuuggccuuaaacacc

SEQ ID NO: 746833 - RNA, 26 nt, Human
cugcaccagccuucuuuccacucaca

SEQ ID NO: 746834 - RNA, 23 nt, Human
cugggcccagaagcagccggcgc

SEQ ID NO: 746835 - RNA, 26 nt, Human
cugggcccagaagcagccggcgccag

SEQ ID NO: 746836 - RNA, 21 nt, Human
cuuuccacucacaacucacug

SEQ ID NO: 746837 - RNA, 23 nt, Human
gaaagcauccacggauggaggga

SEQ ID NO: 746838 - RNA, 22 nt, Human
gaacacagccagggccccauac

SEQ ID NO: 746839 - RNA, 20 nt, Human
gaagcaagagcagccccaug

SEQ ID NO: 746840 - RNA, 22 nt, Human
gaccuugcacucuuccacccac

SEQ ID NO: 746841 - RNA, 22 nt, Human
gagaaaccaauguccacaggua

SEQ ID NO: 746842 - RNA, 19 nt, Human
gauaagggaggaaaggcag

SEQ ID NO: 746843 - RNA, 20 nt, Human
gcagcuggugcgaggcgggc

SEQ ID NO: 746844 - RNA, 20 nt, Human
gccaggccucacagcugcag

SEQ ID NO: 746845 - RNA, 23 nt, Human
gcccuggggcccccugcggucac

SEQ ID NO: 746846 - RNA, 19 nt, Human
gccuggccgcaguguggag

SEQ ID NO: 746847 - RNA, 22 nt, Human
gccuucuuuccacucacaacuc

SEQ ID NO: 746848 - RNA, 26 nt, Human
gcugcacccccaguacuggcuagcca

SEQ ID NO: 746849 - RNA, 24 nt, Human
ggaaaaaacaguauguauaagguu

SEQ ID NO: 746850 - RNA, 21 nt, Human
ggaaauauaucaggaccugag

SEQ ID NO: 746851 - RNA, 20 nt, Human
ggagaaaccaauguccacag

SEQ ID NO: 746852 - RNA, 21 nt, Human
ggagaugaggccagccccacu

SEQ ID NO: 746853 - RNA, 19 nt, Human
ggauaaggggguaacugcu

SEQ ID NO: 746854 - RNA, 21 nt, Human
ggcauccccugaugcagguug

SEQ ID NO: 746855 - RNA, 19 nt, Human
ggcccagaagcagccggcg

SEQ ID NO: 746856 - RNA, 22 nt, Human
ggcccagaagcagccggcgcca

SEQ ID NO: 746857 - RNA, 20 nt, Human
guaaagguccuccagcucuu

SEQ ID NO: 746858 - RNA, 20 nt, Human
guggauaaggggguaacugc

SEQ ID NO: 746859 - RNA, 23 nt, Human
guguacagccacgccugugcgca

SEQ ID NO: 746860 - RNA, 18 nt, Human
uaaagagaaacugauaag

SEQ ID NO: 746861 - RNA, 26 nt, Human
uaagguuuguuauuaucugugguuuu

SEQ ID NO: 746862 - RNA, 19 nt, Human
uaccacauagcugcaggaa

SEQ ID NO: 746863 - RNA, 20 nt, Human
uagauauccacuguaucccc

SEQ ID NO: 746864 - RNA, 23 nt, Human
uagcugcaggaaagcauccacgg

SEQ ID NO: 746865 - RNA, 23 nt, Human
uccacagguauagcucggaccac

SEQ ID NO: 746866 - RNA, 18 nt, Human
uccaggaugggcgugggg

SEQ ID NO: 746867 - RNA, 20 nt, Human
uccccuguggauaagggggu

SEQ ID NO: 746868 - RNA, 20 nt, Human
uccucaugcaaagugagggu

SEQ ID NO: 746869 - RNA, 20 nt, Human
uccuccagcucuucaaugga

SEQ ID NO: 746870 - RNA, 20 nt, Human
uccugggcccagaagcagcc

SEQ ID NO: 746871 - RNA, 24 nt, Human
ucuagccaagugaaaugaauccaa

SEQ ID NO: 746872 - RNA, 24 nt, Human
ucugcaccagccuucuuuccacuc

SEQ ID NO: 746873 - RNA, 21 nt, Human
ucuuuuaguagaagcaagagc

SEQ ID NO: 746874 - RNA, 20 nt, Human
ugagagcacguguacagccc

SEQ ID NO: 746875 - RNA, 18 nt, Human
uggagaaaccaauguccc

SEQ ID NO: 746876 - RNA, 18 nt, Human
ugggaggccuaagcagug

SEQ ID NO: 746877 - RNA, 22 nt, Human
ugggaggccuaagcagugguug

SEQ ID NO: 746878 - RNA, 23 nt, Human
uggggcccccugcggucaccuuu

SEQ ID NO: 746879 - RNA, 22 nt, Human
ugguuuuagacauccacugggg

SEQ ID NO: 746880 - RNA, 24 nt, Human
uguggagcacagagguaugaggca

SEQ ID NO: 746881 - RNA, 25 nt, Human
ugugguuuuagacauccacuggggg

SEQ ID NO: 746882 - RNA, 24 nt, Human
uguucugcccauguuccucaguca

SEQ ID NO: 746883 - RNA, 22 nt, Human
uuggccuuaaacaccauguaaa

SEQ ID NO: 746884 - RNA, 24 nt, Human
uugggccaggccucacagcugcag

SEQ ID NO: 746885 - RNA, 18 nt, Human
uuuuuuaaaguuacugga

SEQ ID NO: 746886 - RNA, 24 nt, Human
uuuuuuuuuuuuuuuuuuuuacag

SEQ ID NO: 746887 - RNA, 21 nt, Human
acaaauucuugaggagcaaaa

SEQ ID NO: 746888 - RNA, 20 nt, Human
acacacacauauaaauacaa

SEQ ID NO: 746889 - RNA, 19 nt, Human
acacccaucuccagccaac

SEQ ID NO: 746890 - RNA, 22 nt, Human
acaggaaucuacagcccaaagc

SEQ ID NO: 746891 - RNA, 24 nt, Human
acauacacgcacgcacgcacgcag

SEQ ID NO: 746892 - RNA, 18 nt, Human
accccccaccccaaaauc

SEQ ID NO: 746893 - RNA, 23 nt, Human
acgcacacacacacacacauaua

SEQ ID NO: 746894 - RNA, 22 nt, Human
acugcugccacgugcccagaaa

SEQ ID NO: 746895 - RNA, 19 nt, Human
agaaucacccaccaggcuc

SEQ ID NO: 746896 - RNA, 24 nt, Human
agacaggaaucuacagcccaaagc

SEQ ID NO: 746897 - RNA, 24 nt, Human
agccacagcauuccagugcucagc

SEQ ID NO: 746898 - RNA, 21 nt, Human
aggaacaaggcagccagucca

SEQ ID NO: 746899 - RNA, 22 nt, Human
aggaagaaaguaaaggccaggg

SEQ ID NO: 746900 - RNA, 20 nt, Human
aggaaucuacagcccaaagc

SEQ ID NO: 746901 - RNA, 23 nt, Human
aggaaucuacagcccaaagcccc

SEQ ID NO: 746902 - RNA, 20 nt, Human
aggcaaacaaauucuugagg

SEQ ID NO: 746903 - RNA, 24 nt, Human
aggcaaacaaauucuugaggagca

SEQ ID NO: 746904 - RNA, 22 nt, Human
agggcuuaggcucagcuccugc

SEQ ID NO: 746905 - RNA, 25 nt, Human
aggggcuggcagaagcugguccaga

SEQ ID NO: 746906 - RNA, 18 nt, Human
caaaaucagcucccuccc

SEQ ID NO: 746907 - RNA, 23 nt, Human
caaggcagccaguccagccagca

SEQ ID NO: 746908 - RNA, 19 nt, Human
cacacacacacacacauau

SEQ ID NO: 746909 - RNA, 18 nt, Human
cacacacccauguuaucc

SEQ ID NO: 746910 - RNA, 19 nt, Human
cacacccauguuaucccca

SEQ ID NO: 746911 - RNA, 19 nt, Human
cacccacacccuguaauac

SEQ ID NO: 746912 - RNA, 21 nt, Human
cacccaccaggcucugccugc

SEQ ID NO: 746913 - RNA, 24 nt, Human
caccccaaaaucagcucccuccca

SEQ ID NO: 746914 - RNA, 20 nt, Human
caccccccaccccaaaauca

SEQ ID NO: 746915 - RNA, 24 nt, Human
caccccccaccccaaaaucagcuc

SEQ ID NO: 746916 - RNA, 21 nt, Human
cacugucuugagacgguucca

SEQ ID NO: 746917 - RNA, 22 nt, Human
cagaagcugguccagaccaaac

SEQ ID NO: 746918 - RNA, 19 nt, Human
cagcccaaagccccgccag

SEQ ID NO: 746919 - RNA, 20 nt, Human
cagugcagccacagcauucc

SEQ ID NO: 746920 - RNA, 19 nt, Human
cagugggccuccaauggcc

SEQ ID NO: 746921 - RNA, 20 nt, Human
ccaccuacagugggccucca

SEQ ID NO: 746922 - RNA, 22 nt, Human
ccacuggccgauccuacugcuu

SEQ ID NO: 746923 - RNA, 22 nt, Human
ccagaccaaacauacacgcacg

SEQ ID NO: 746924 - RNA, 20 nt, Human
ccagccaacccccaggagcc

SEQ ID NO: 746925 - RNA, 21 nt, Human
ccagccaacccccaggagccc

SEQ ID NO: 746926 - RNA, 21 nt, Human
ccagccaacccccaggagccc

SEQ ID NO: 746927 - RNA, 20 nt, Human
ccagggcuuaggcucagcuc

SEQ ID NO: 746928 - RNA, 20 nt, Human
cccaaagccccgccagggcu

SEQ ID NO: 746929 - RNA, 21 nt, Human
cccaccuacagugggccucca

SEQ ID NO: 746930 - RNA, 23 nt, Human
cccaggcaaacaaauucuugagg

SEQ ID NO: 746931 - RNA, 18 nt, Human
cccauguucuccuuuagg

SEQ ID NO: 746932 - RNA, 24 nt, Human
ccccaaaaucagcucccucccacc

SEQ ID NO: 746933 - RNA, 25 nt, Human
ccccaaaaucagcucccucccaccu

SEQ ID NO: 746934 - RNA, 18 nt, Human
ccccaggagcccuuacuc

SEQ ID NO: 746935 - RNA, 24 nt, Human
cccccaggagcccuuacucagcuc

SEQ ID NO: 746936 - RNA, 23 nt, Human
ccucccaccuacagugggccucc

SEQ ID NO: 746937 - RNA, 23 nt, Human
ccucuagucccaccccccacccc

SEQ ID NO: 746938 - RNA, 19 nt, Human
ccuguuuaaccccuucagu

SEQ ID NO: 746939 - RNA, 20 nt, Human
cgcacacacacacacacaua

SEQ ID NO: 746940 - RNA, 25 nt, Human
cgcacgcacacacacacacacauau

SEQ ID NO: 746941 - RNA, 26 nt, Human
cgcacgcacgcacacacacacacaca

SEQ ID NO: 746942 - RNA, 26 nt, Human
cgcacgcacgcacgcacacacacaca

SEQ ID NO: 746943 - RNA, 26 nt, Human
cgcacgcacgcacgcacgcacacaca

SEQ ID NO: 746944 - RNA, 20 nt, Human
cuaaguccuaggccaggaac

SEQ ID NO: 746945 - RNA, 23 nt, Human
cuacagugggccuccaauggccc

SEQ ID NO: 746946 - RNA, 24 nt, Human
cuccugcugucgccacuggccgau

SEQ ID NO: 746947 - RNA, 19 nt, Human
cuggauggcugagaauccc

SEQ ID NO: 746948 - RNA, 19 nt, Human
gaaaguaaaggccaggggc

SEQ ID NO: 746949 - RNA, 18 nt, Human
gaagacaaagagguggca

SEQ ID NO: 746950 - RNA, 23 nt, Human
gagggugggugagaagaugaugg

SEQ ID NO: 746951 - RNA, 24 nt, Human
gcacacacacacacacauauaaau

SEQ ID NO: 746952 - RNA, 25 nt, Human
gcacacacacacacacauauaaaua

SEQ ID NO: 746953 - RNA, 24 nt, Human
gccacagcauuccagugcucagcc

SEQ ID NO: 746954 - RNA, 21 nt, Human
gccagggcuuaggcucagcuc

SEQ ID NO: 746955 - RNA, 20 nt, Human
ggacagaugccacacccauc

SEQ ID NO: 746956 - RNA, 21 nt, Human
ggccaggggcuggcagaagcu

SEQ ID NO: 746957 - RNA, 24 nt, Human
gggcacacacccauguuaucccca

SEQ ID NO: 746958 - RNA, 18 nt, Human
gugcagccacagcauucc

SEQ ID NO: 746959 - RNA, 27 nt, Human
uacaaaaguagggguuggggcaaguac

SEQ ID NO: 746960 - RNA, 26 nt, Human
uacacgcacgcacgcacgcacgcaca

SEQ ID NO: 746961 - RNA, 25 nt, Human
uacacgcacgcacgcacgcacgcag

SEQ ID NO: 746962 - RNA, 19 nt, Human
uacagcccaaagccccgcc

SEQ ID NO: 746963 - RNA, 20 nt, Human
uaccagcaccucagccuagu

SEQ ID NO: 746964 - RNA, 23 nt, Human
uacuuugccacaggggcucugca

SEQ ID NO: 746965 - RNA, 23 nt, Human
uagucccaccccccaccccaaaa

SEQ ID NO: 746966 - RNA, 24 nt, Human
ucagccccucagcugggagaucag

SEQ ID NO: 746967 - RNA, 21 nt, Human
ucccuuuagucagacaggaau

SEQ ID NO: 746968 - RNA, 19 nt, Human
uccuaacccucccagcccc

SEQ ID NO: 746969 - RNA, 26 nt, Human
ucuacagcccaaagccccgccagggc

SEQ ID NO: 746970 - RNA, 18 nt, Human
ucucaauacugcagcuuu

SEQ ID NO: 746971 - RNA, 22 nt, Human
ugacagaaucacccaccaggcu

SEQ ID NO: 746972 - RNA, 18 nt, Human
ugaggagcaaaaaccugu

SEQ ID NO: 746973 - RNA, 18 nt, Human
ugagggcagaauuucaca

SEQ ID NO: 746974 - RNA, 21 nt, Human
ugagggugggugagaagauga

SEQ ID NO: 746975 - RNA, 24 nt, Human
ugagggugggugagaagaugaugg

SEQ ID NO: 746976 - RNA, 22 nt, Human
ugcaggugauaguuaugaagcu

SEQ ID NO: 746977 - RNA, 19 nt, Human
ugccacacccaucuccagc

SEQ ID NO: 746978 - RNA, 23 nt, Human
ugccacgugcccagaaauggcuc

SEQ ID NO: 746979 - RNA, 24 nt, Human
ugccagcacugucuugagacgguc

SEQ ID NO: 746980 - RNA, 23 nt, Human
uggcugagaaucccuuggacccu

SEQ ID NO: 746981 - RNA, 28 nt, Human
uguuuaaccccuucaguauugcccucua

SEQ ID NO: 746982 - RNA, 19 nt, Human
uuaggcucagcuccugcug

SEQ ID NO: 746983 - RNA, 23 nt, Human
uucacauuuuguuugcccugcau

SEQ ID NO: 746984 - RNA, 23 nt, Human
uucacuacagcggaaugcaauga

SEQ ID NO: 746985 - RNA, 21 nt, Human
uucccuccuuuuugagguccc

SEQ ID NO: 746986 - RNA, 21 nt, Human
uuccuuuucuuuuuacaacuu

SEQ ID NO: 746987 - RNA, 20 nt, Human
uugagacgguuccaggccug

SEQ ID NO: 746988 - RNA, 23 nt, Human
uuggugugaagcccuccaauccu

SEQ ID NO: 746989 - RNA, 24 nt, Human
uuucuguugacagaaucacccacc

SEQ ID NO: 746990 - RNA, 21 nt, Human
uuuucauccuaacccucccaa

SEQ ID NO: 746991 - RNA, 25 nt, Human
aaaaaaaaaauuacaaaaacuagga

SEQ ID NO: 746992 - RNA, 20 nt, Human
agaagguuaaugauugagga

SEQ ID NO: 746993 - RNA, 22 nt, Human
aucacugacuuuuuuuccuaag

SEQ ID NO: 746994 - RNA, 18 nt, Human
auuacacucaucuuuuac

SEQ ID NO: 746995 - RNA, 24 nt, Human
cacaagcuccuuuucauucaauuu

SEQ ID NO: 746996 - RNA, 24 nt, Human
ccacuggcuaagagacaccacuua

SEQ ID NO: 746997 - RNA, 21 nt, Human
cuuggcacuggccuuucagcc

SEQ ID NO: 746998 - RNA, 23 nt, Human
gaggaugccagugaagggugcag

SEQ ID NO: 746999 - RNA, 20 nt, Human
ggaggauggccacgcagacu

SEQ ID NO: 747000 - RNA, 18 nt, Human
gugcuuacauacaccaag

SEQ ID NO: 747001 - RNA, 21 nt, Human
uaaaggaacaaaugugcuuac

SEQ ID NO: 747002 - RNA, 19 nt, Human
uacaauuaggaucacugac

SEQ ID NO: 747003 - RNA, 21 nt, Human
uagcaaggucaguuucauuca

SEQ ID NO: 747004 - RNA, 19 nt, Human
uagcucaacccuacaguca

SEQ ID NO: 747005 - RNA, 27 nt, Human
uauguacacauaugaaugaucuguaua

SEQ ID NO: 747006 - RNA, 20 nt, Human
ucaauauaaggguagcaagg

SEQ ID NO: 747007 - RNA, 20 nt, Human
ucagaagguuaaugauugag

SEQ ID NO: 747008 - RNA, 19 nt, Human
ucagcuggaggaaugugga

SEQ ID NO: 747009 - RNA, 18 nt, Human
uggacuuggcacuggccu

SEQ ID NO: 747010 - RNA, 18 nt, Human
uggaugguggggggagga

SEQ ID NO: 747011 - RNA, 26 nt, Human
uggaugguggggggaggauggccacg

SEQ ID NO: 747012 - RNA, 18 nt, Human
uuacaaaaacuaggaaga

SEQ ID NO: 747013 - RNA, 19 nt, Human
uuacauacaccaagaaaaa

SEQ ID NO: 747014 - RNA, 23 nt, Human
uucacaguuuuguaaacagauau

SEQ ID NO: 747015 - RNA, 21 nt, Human
uucagcguuuauugucucucg

SEQ ID NO: 747016 - RNA, 19 nt, Human
uugaugcaggagagggaaa

SEQ ID NO: 747017 - RNA, 22 nt, Human
uuugucuuuuugauucacaguu

SEQ ID NO: 747018 - RNA, 20 nt, Human
uuuuaaaauuuuauguacac

SEQ ID NO: 747019 - RNA, 22 nt, Human
aaaaccucagccagagacagac

SEQ ID NO: 747020 - RNA, 19 nt, Human
aacacacacauucaaaucc

SEQ ID NO: 747021 - RNA, 21 nt, Human
aacauacuuugagugauaaaa

SEQ ID NO: 747022 - RNA, 20 nt, Human
aagaaaaagaugcaugaaaa

SEQ ID NO: 747023 - RNA, 18 nt, Human
aagcacuugugaagaaca

SEQ ID NO: 747024 - RNA, 20 nt, Human
aagugguucuuuaaaauacc

SEQ ID NO: 747025 - RNA, 22 nt, Human
aauuuuuauggcuggauugaaa

SEQ ID NO: 747026 - RNA, 21 nt, Human
acaaagcacuugugaagaaca

SEQ ID NO: 747027 - RNA, 23 nt, Human
accuauuauacaagaaaugcaau

SEQ ID NO: 747028 - RNA, 23 nt, Human
agcaacacaauaauagagaguuu

SEQ ID NO: 747029 - RNA, 24 nt, Human
caacauaauggugaaacaagagua

SEQ ID NO: 747030 - RNA, 18 nt, Human
caagaggugcaguaaugc

SEQ ID NO: 747031 - RNA, 19 nt, Human
cacaaguuaaacggaaaca

SEQ ID NO: 747032 - RNA, 23 nt, Human
cacacaggugaggagcacuuccc

SEQ ID NO: 747033 - RNA, 20 nt, Human
cagccagagacagacaccug

SEQ ID NO: 747034 - RNA, 20 nt, Human
caguaaauacuguacuguau

SEQ ID NO: 747035 - RNA, 23 nt, Human
cccccaaagaugaucagucucug

SEQ ID NO: 747036 - RNA, 24 nt, Human
ccuaaaucccuuaauaaguucuca

SEQ ID NO: 747037 - RNA, 23 nt, Human
cuaggugaaguaugguugcuuug

SEQ ID NO: 747038 - RNA, 22 nt, Human
cucacacacaacuuagugggaa

SEQ ID NO: 747039 - RNA, 20 nt, Human
cugcauccuuccuuuugcuu

SEQ ID NO: 747040 - RNA, 24 nt, Human
cuuuaaaauaccaaugaauggcag

SEQ ID NO: 747041 - RNA, 23 nt, Human
cuuugaggaauccacaucaggag

SEQ ID NO: 747042 - RNA, 20 nt, Human
gaacuuuccauguucuguua

SEQ ID NO: 747043 - RNA, 22 nt, Human
gacaaaaccucagccagagaca

SEQ ID NO: 747044 - RNA, 19 nt, Human
gagcagaagucauagugug

SEQ ID NO: 747045 - RNA, 23 nt, Human
gcagcacauuuguaucuugcuuu

SEQ ID NO: 747046 - RNA, 18 nt, Human
gcagggcuucccccaaag

SEQ ID NO: 747047 - RNA, 18 nt, Human
ggcaauaaaaaauugcau

SEQ ID NO: 747048 - RNA, 24 nt, Human
ggcacaaagcacuugugaagaaca

SEQ ID NO: 747049 - RNA, 23 nt, Human
ggugaaacaagaguauucuccga

SEQ ID NO: 747050 - RNA, 24 nt, Human
guauuugggagcagaagucauagu

SEQ ID NO: 747051 - RNA, 20 nt, Human
guguccuuuuuuuuuuuuuu

SEQ ID NO: 747052 - RNA, 23 nt, Human
uaaaauagacaaaaccucagcca

SEQ ID NO: 747053 - RNA, 22 nt, Human
uaaacggaaacacacacauuca

SEQ ID NO: 747054 - RNA, 19 nt, Human
uaacuaguccuuauuccca

SEQ ID NO: 747055 - RNA, 19 nt, Human
uaaggaaaagcaugacuuu

SEQ ID NO: 747056 - RNA, 19 nt, Human
uagacaaaaccucagccag

SEQ ID NO: 747057 - RNA, 24 nt, Human
uagcaacacaauaauagagaguuu

SEQ ID NO: 747058 - RNA, 25 nt, Human
uagcaacacaauaauagagaguuuc

SEQ ID NO: 747059 - RNA, 19 nt, Human
uccaacuuuaaaaaaaugc

SEQ ID NO: 747060 - RNA, 19 nt, Human
ucuauuugggucuuguuuu

SEQ ID NO: 747061 - RNA, 20 nt, Human
ucucaagacacuaaaauaau

SEQ ID NO: 747062 - RNA, 19 nt, Human
ucucuaggugaaguauggu

SEQ ID NO: 747063 - RNA, 24 nt, Human
ucucuguuuccaaauagucucacu

SEQ ID NO: 747064 - RNA, 24 nt, Human
ucugcagauucuuaaaauacaaga

SEQ ID NO: 747065 - RNA, 21 nt, Human
ucuuucugauuuccaacuccc

SEQ ID NO: 747066 - RNA, 20 nt, Human
ugaaauagaaaaugacaguc

SEQ ID NO: 747067 - RNA, 24 nt, Human
ugaaaugacaacagacucuaggug

SEQ ID NO: 747068 - RNA, 26 nt, Human
ugaagcuugcuacaguuuucuagggu

SEQ ID NO: 747069 - RNA, 22 nt, Human
ugaauggcaggaucuacauuua

SEQ ID NO: 747070 - RNA, 21 nt, Human
ugacaguaaauacuguacugu

SEQ ID NO: 747071 - RNA, 19 nt, Human
ugacuuuauucccaguccu

SEQ ID NO: 747072 - RNA, 20 nt, Human
ugaucuguguccuuuuuuuu

SEQ ID NO: 747073 - RNA, 19 nt, Human
ugaugaagaauauccacgg

SEQ ID NO: 747074 - RNA, 21 nt, Human
ugauuuccaacucccaccccu

SEQ ID NO: 747075 - RNA, 24 nt, Human
ugcccagcaauuuuaaucuauauu

SEQ ID NO: 747076 - RNA, 25 nt, Human
uggcacaacauaaaauaaugguacu

SEQ ID NO: 747077 - RNA, 22 nt, Human
uguaucuauggaugccaucugc

SEQ ID NO: 747078 - RNA, 19 nt, Human
uguuggagccaucugggcc

SEQ ID NO: 747079 - RNA, 20 nt, Human
uuaaaaaugucaagugugca

SEQ ID NO: 747080 - RNA, 24 nt, Human
uuagugggaacuuuccauguucug

SEQ ID NO: 747081 - RNA, 20 nt, Human
uucaaguuuuuauuacaggu

SEQ ID NO: 747082 - RNA, 20 nt, Human
uucacccgcauuauaaaauu

SEQ ID NO: 747083 - RNA, 24 nt, Human
uucacccgcauuauaaaauuuggc

SEQ ID NO: 747084 - RNA, 21 nt, Human
uuccaacucccaccccuuuuc

SEQ ID NO: 747085 - RNA, 20 nt, Human
uuccuaauucuaacaugguc

SEQ ID NO: 747086 - RNA, 20 nt, Human
uuucugaagcuugcuacagu

SEQ ID NO: 747087 - RNA, 19 nt, Human
aaaagacaaaaaagaccaa

SEQ ID NO: 747088 - RNA, 19 nt, Human
aaaagacaaaaaagaccaa

SEQ ID NO: 747089 - RNA, 20 nt, Human
aaaagaccaaggcggcaggu

SEQ ID NO: 747090 - RNA, 23 nt, Human
aaacaggcagaccuccgggccug

SEQ ID NO: 747091 - RNA, 22 nt, Human
aaagacaaaaaagaccaaggcg

SEQ ID NO: 747092 - RNA, 20 nt, Human
aacacgggcgccugagagaa

SEQ ID NO: 747093 - RNA, 22 nt, Human
aacgcgucacuggugaaaccca

SEQ ID NO: 747094 - RNA, 18 nt, Human
aagaccaaggcggcagga

SEQ ID NO: 747095 - RNA, 22 nt, Human
aagcagccugaugccagagagc

SEQ ID NO: 747096 - RNA, 22 nt, Human
aagcucaguggaagagaagugg

SEQ ID NO: 747097 - RNA, 21 nt, Human
aagguguaccaaaggguuaaa

SEQ ID NO: 747098 - RNA, 23 nt, Human
aagucccaagccgugaacagucc

SEQ ID NO: 747099 - RNA, 22 nt, Human
acacuuugggaggccgagguag

SEQ ID NO: 747100 - RNA, 19 nt, Human
acauggugaaacccagucu

SEQ ID NO: 747101 - RNA, 20 nt, Human
acauggugaaacccagucuc

SEQ ID NO: 747102 - RNA, 22 nt, Human
acauggugaaacccagucucua

SEQ ID NO: 747103 - RNA, 18 nt, Human
acauggugaaaccccguc

SEQ ID NO: 747104 - RNA, 19 nt, Human
acauggugaaaccccgucu

SEQ ID NO: 747105 - RNA, 20 nt, Human
acauuuugcaagguguacca

SEQ ID NO: 747106 - RNA, 21 nt, Human
accccgucuaccaaaaauaca

SEQ ID NO: 747107 - RNA, 18 nt, Human
acgccacugcacuccagc

SEQ ID NO: 747108 - RNA, 20 nt, Human
acgcugcggagcacagacgg

SEQ ID NO: 747109 - RNA, 21 nt, Human
acgggguuucauguccaagca

SEQ ID NO: 747110 - RNA, 22 nt, Human
acgggguuucauguccaagcag

SEQ ID NO: 747111 - RNA, 24 nt, Human
acuugagguugggaguucaagacc

SEQ ID NO: 747112 - RNA, 23 nt, Human
agaaaaacagaggcucagccagg

SEQ ID NO: 747113 - RNA, 20 nt, Human
agacggcccugcacaaaaga

SEQ ID NO: 747114 - RNA, 24 nt, Human
agcacuuugggagaacaagguggg

SEQ ID NO: 747115 - RNA, 23 nt, Human
agccacacacccucucggugcca

SEQ ID NO: 747116 - RNA, 24 nt, Human
agccuggcccacauggugaaaccc

SEQ ID NO: 747117 - RNA, 24 nt, Human
agccuggucuacauggugaaaccc

SEQ ID NO: 747118 - RNA, 18 nt, Human
aggaaaaggagaggagga

SEQ ID NO: 747119 - RNA, 23 nt, Human
aggaauucgagaccagccugguc

SEQ ID NO: 747120 - RNA, 22 nt, Human
aggaugucauuagucugagguc

SEQ ID NO: 747121 - RNA, 21 nt, Human
aggccgagguagguggaucac

SEQ ID NO: 747122 - RNA, 24 nt, Human
aggcgggacaaucgcuugaaccag

SEQ ID NO: 747123 - RNA, 24 nt, Human
aggcgugguggcucacacccguaa

SEQ ID NO: 747124 - RNA, 20 nt, Human
aggcugaggcgggacaaucg

SEQ ID NO: 747125 - RNA, 24 nt, Human
aggcugaggcgggacaaucgcuug

SEQ ID NO: 747126 - RNA, 19 nt, Human
agggagcuuggcaucuggg

SEQ ID NO: 747127 - RNA, 20 nt, Human
agggagcuuggcaucugggc

SEQ ID NO: 747128 - RNA, 26 nt, Human
agguagguggaucacuugaggucagg

SEQ ID NO: 747129 - RNA, 22 nt, Human
agguggaucacuugaggucagg

SEQ ID NO: 747130 - RNA, 23 nt, Human
agguggguggaucacuugagguu

SEQ ID NO: 747131 - RNA, 20 nt, Human
auagcaugcugugcucagug

SEQ ID NO: 747132 - RNA, 23 nt, Human
aucacgccacugcacuccagccc

SEQ ID NO: 747133 - RNA, 21 nt, Human
auguccaagcagccugaugcc

SEQ ID NO: 747134 - RNA, 24 nt, Human
auuagccaggcgugguggcucaca

SEQ ID NO: 747135 - RNA, 20 nt, Human
caaaaaagaccaaggcggca

SEQ ID NO: 747136 - RNA, 27 nt, Human
caaaaaagaccaaggcggcaggaaaag

SEQ ID NO: 747137 - RNA, 18 nt, Human
caaaagacaaaaaagacc

SEQ ID NO: 747138 - RNA, 19 nt, Human
caacuuccugagaagugau

SEQ ID NO: 747139 - RNA, 20 nt, Human
caagaccagccuggcccaca

SEQ ID NO: 747140 - RNA, 20 nt, Human
caaggcggcaggaaaaggag

SEQ ID NO: 747141 - RNA, 21 nt, Human
caagguggguggaucacuuga

SEQ ID NO: 747142 - RNA, 24 nt, Human
caagguggguggaucacuugaggu

SEQ ID NO: 747143 - RNA, 20 nt, Human
cacaaaagacaaaaaagacc

SEQ ID NO: 747144 - RNA, 24 nt, Human
cacacccguaauccccacacuuug

SEQ ID NO: 747145 - RNA, 24 nt, Human
cacaccuguaaucucagcacuuug

SEQ ID NO: 747146 - RNA, 24 nt, Human
cacacuuugggaggccgagguagg

SEQ ID NO: 747147 - RNA, 20 nt, Human
cacaggaugggaggauggga

SEQ ID NO: 747148 - RNA, 19 nt, Human
cacauggugaaaccccguc

SEQ ID NO: 747149 - RNA, 19 nt, Human
caccccaggaucaccccau

SEQ ID NO: 747150 - RNA, 23 nt, Human
cacccguaauccccacacuuugg

SEQ ID NO: 747151 - RNA, 24 nt, Human
cacccguaauccccacacuuuggg

SEQ ID NO: 747152 - RNA, 23 nt, Human
caccuguaaucucagcacuuugg

SEQ ID NO: 747153 - RNA, 24 nt, Human
caccuguaaucucagcacuuuggg

SEQ ID NO: 747154 - RNA, 22 nt, Human
cacugcacuccagcccucucgg

SEQ ID NO: 747155 - RNA, 20 nt, Human
cacuugagaccccccaguug

SEQ ID NO: 747156 - RNA, 20 nt, Human
cacuugaggucaggaauucg

SEQ ID NO: 747157 - RNA, 23 nt, Human
cacuugagguugggaguucaaga

SEQ ID NO: 747158 - RNA, 19 nt, Human
cacuuugggagaacaaggu

SEQ ID NO: 747159 - RNA, 24 nt, Human
cagcacuuugggagaacaaggugg

SEQ ID NO: 747160 - RNA, 20 nt, Human
cagcccuggagggagagcag

SEQ ID NO: 747161 - RNA, 22 nt, Human
cagccugaugccagagagcugg

SEQ ID NO: 747162 - RNA, 20 nt, Human
cagccuugggaggcugaggc

SEQ ID NO: 747163 - RNA, 22 nt, Human
cagcggaggaugccagcucaag

SEQ ID NO: 747164 - RNA, 21 nt, Human
caggacagagaccaaguccca

SEQ ID NO: 747165 - RNA, 23 nt, Human
caggcugggcaugguggcucaca

SEQ ID NO: 747166 - RNA, 20 nt, Human
caggggccccggagucuggu

SEQ ID NO: 747167 - RNA, 21 nt, Human
cagugagaugcagugcaguuc

SEQ ID NO: 747168 - RNA, 22 nt, Human
cauaccuguaaucccagccuug

SEQ ID NO: 747169 - RNA, 19 nt, Human
ccaagcagccugaugccag

SEQ ID NO: 747170 - RNA, 24 nt, Human
ccacacuuugggaggccgagguag

SEQ ID NO: 747171 - RNA, 23 nt, Human
ccacugcacuccagcccucucgg

SEQ ID NO: 747172 - RNA, 23 nt, Human
ccacugcacuccagcccucucgg

SEQ ID NO: 747173 - RNA, 23 nt, Human
ccacugcacuccagcccucucgg

SEQ ID NO: 747174 - RNA, 24 nt, Human
ccacugcacuccagcccucucggu

SEQ ID NO: 747175 - RNA, 25 nt, Human
ccacugcacuccagcccucucgguc

SEQ ID NO: 747176 - RNA, 24 nt, Human
ccagaucacgccacugcacuccag

SEQ ID NO: 747177 - RNA, 21 nt, Human
ccagugcaaaccagcggagga

SEQ ID NO: 747178 - RNA, 18 nt, Human
ccagugcaggguggggcc

SEQ ID NO: 747179 - RNA, 18 nt, Human
ccaugcccggcacucuuc

SEQ ID NO: 747180 - RNA, 20 nt, Human
ccaugcccggcacucuucau

SEQ ID NO: 747181 - RNA, 24 nt, Human
cccagccuugggaggcugaggcgg

SEQ ID NO: 747182 - RNA, 25 nt, Human
cccagcuugagcuuggaagggguac

SEQ ID NO: 747183 - RNA, 24 nt, Human
cccagggccccggagccacacacc

SEQ ID NO: 747184 - RNA, 24 nt, Human
cccaguggcaccccaggaucaccc

SEQ ID NO: 747185 - RNA, 24 nt, Human
cccccauuuccuagagagaaaaac

SEQ ID NO: 747186 - RNA, 22 nt, Human
ccccgccccgccccccagccca

SEQ ID NO: 747187 - RNA, 25 nt, Human
ccccuuacucuccugggguggggac

SEQ ID NO: 747188 - RNA, 20 nt, Human
cccgccccgccccccagccc

SEQ ID NO: 747189 - RNA, 18 nt, Human
cccgugcccagugcaaac

SEQ ID NO: 747190 - RNA, 21 nt, Human
cccugggugacugaaccaggg

SEQ ID NO: 747191 - RNA, 18 nt, Human
ccgcugggcaguggccuu

SEQ ID NO: 747192 - RNA, 19 nt, Human
ccucguccccuuacucucc

SEQ ID NO: 747193 - RNA, 19 nt, Human
ccugccgcuccccgccccg

SEQ ID NO: 747194 - RNA, 23 nt, Human
ccuggcccacauggugaaacccc

SEQ ID NO: 747195 - RNA, 24 nt, Human
ccuggcccacauggugaaaccccg

SEQ ID NO: 747196 - RNA, 23 nt, Human
ccugggugacugaaccagggcuc

SEQ ID NO: 747197 - RNA, 22 nt, Human
ccuggucuacauggugaaaccc

SEQ ID NO: 747198 - RNA, 23 nt, Human
ccuggucuacauggugaaaccca

SEQ ID NO: 747199 - RNA, 23 nt, Human
ccuguuccuccccucugcagagu

SEQ ID NO: 747200 - RNA, 24 nt, Human
cgagaccagccuggucuacauggu

SEQ ID NO: 747201 - RNA, 24 nt, Human
cgagguagguggaucacuugaggu

SEQ ID NO: 747202 - RNA, 26 nt, Human
cgagguagguggaucacuugagguca

SEQ ID NO: 747203 - RNA, 22 nt, Human
cgcagucagugucugcuagaac

SEQ ID NO: 747204 - RNA, 20 nt, Human
cgccacugcacuccagcccu

SEQ ID NO: 747205 - RNA, 18 nt, Human
cgccugagagaagccugg

SEQ ID NO: 747206 - RNA, 22 nt, Human
cggcugaaaaaaaugauuacau

SEQ ID NO: 747207 - RNA, 19 nt, Human
cgggcagaggccgcuggaa

SEQ ID NO: 747208 - RNA, 18 nt, Human
cguccacgcagcagggaa

SEQ ID NO: 747209 - RNA, 21 nt, Human
cgucuuccaccaaguuucacg

SEQ ID NO: 747210 - RNA, 22 nt, Human
cucacaccuguaaucucagcac

SEQ ID NO: 747211 - RNA, 24 nt, Human
cucacaccuguaaucucagcacuu

SEQ ID NO: 747212 - RNA, 22 nt, Human
cucaggcuggagaaaaugugaa

SEQ ID NO: 747213 - RNA, 24 nt, Human
cucucuaaaaccuuaugaaguaag

SEQ ID NO: 747214 - RNA, 23 nt, Human
cugcacaaaagacaaaaaagacc

SEQ ID NO: 747215 - RNA, 20 nt, Human
cugcucccuuggacucuucc

SEQ ID NO: 747216 - RNA, 19 nt, Human
cuggccagcggagaggacc

SEQ ID NO: 747217 - RNA, 24 nt, Human
cuuccaccugaugcauggggcuua

SEQ ID NO: 747218 - RNA, 19 nt, Human
gaaaaacaagcgggcagag

SEQ ID NO: 747219 - RNA, 26 nt, Human
gaaaagcucuaacccgagaggccccu

SEQ ID NO: 747220 - RNA, 20 nt, Human
gaaccagggcucgugguccc

SEQ ID NO: 747221 - RNA, 22 nt, Human
gaagagaaguggguggaaaagc

SEQ ID NO: 747222 - RNA, 18 nt, Human
gacccaggggccccggag

SEQ ID NO: 747223 - RNA, 23 nt, Human
gacggcccugcacaaaagacaaa

SEQ ID NO: 747224 - RNA, 23 nt, Human
gagaaucuucucugggcuuuacu

SEQ ID NO: 747225 - RNA, 23 nt, Human
gagcuuggcaucugggcuuggag

SEQ ID NO: 747226 - RNA, 23 nt, Human
gagguagguggaucacuugaggu

SEQ ID NO: 747227 - RNA, 18 nt, Human
gaucacuugaggucagga

SEQ ID NO: 747228 - RNA, 24 nt, Human
gaucacuugaggucaggaauucga

SEQ ID NO: 747229 - RNA, 23 nt, Human
gaucacuugagguugggaguuca

SEQ ID NO: 747230 - RNA, 24 nt, Human
gaucacuugagguugggaguucaa

SEQ ID NO: 747231 - RNA, 21 nt, Human
gcacucuucaugcauuacugc

SEQ ID NO: 747232 - RNA, 20 nt, Human
gcaggguccccgcuguuuug

SEQ ID NO: 747233 - RNA, 20 nt, Human
gcaggguccccgcuguuuug

SEQ ID NO: 747234 - RNA, 21 nt, Human
gcagucagugucugcuagaac

SEQ ID NO: 747235 - RNA, 26 nt, Human
gccauggaguccucacccacuugaga

SEQ ID NO: 747236 - RNA, 22 nt, Human
gcccacauggugaaaccccguc

SEQ ID NO: 747237 - RNA, 20 nt, Human
gcccagaucacgccacugca

SEQ ID NO: 747238 - RNA, 19 nt, Human
gcccuggagggagagcagg

SEQ ID NO: 747239 - RNA, 18 nt, Human
gccguggccauggagucc

SEQ ID NO: 747240 - RNA, 18 nt, Human
gcgcaggguccccgcugu

SEQ ID NO: 747241 - RNA, 18 nt, Human
gcgcaggguccccgcugu

SEQ ID NO: 747242 - RNA, 19 nt, Human
ggaaaaacaagcgggcaga

SEQ ID NO: 747243 - RNA, 23 nt, Human
ggaccagugcaggguggggccgc

SEQ ID NO: 747244 - RNA, 24 nt, Human
ggagccacacacccucucggugcc

SEQ ID NO: 747245 - RNA, 26 nt, Human
ggagccacacacccucucggugccag

SEQ ID NO: 747246 - RNA, 22 nt, Human
ggaggcuucccugggugacuga

SEQ ID NO: 747247 - RNA, 23 nt, Human
ggcaugguggcucacaccuguaa

SEQ ID NO: 747248 - RNA, 21 nt, Human
ggccagcggagaggaccuuga

SEQ ID NO: 747249 - RNA, 20 nt, Human
ggccuggcuugggaucccag

SEQ ID NO: 747250 - RNA, 22 nt, Human
ggccugguggcucuccaguccc

SEQ ID NO: 747251 - RNA, 21 nt, Human
ggcucacaccuguaaucucag

SEQ ID NO: 747252 - RNA, 19 nt, Human
gggacagggggagcagggg

SEQ ID NO: 747253 - RNA, 19 nt, Human
gggcacccagcacaguguc

SEQ ID NO: 747254 - RNA, 24 nt, Human
gggcgugguggugcauaccuguaa

SEQ ID NO: 747255 - RNA, 23 nt, Human
gguggcucacacccguaaucccc

SEQ ID NO: 747256 - RNA, 24 nt, Human
gguggcucacaccuguaaucucag

SEQ ID NO: 747257 - RNA, 24 nt, Human
gguggugcauaccuguaaucccag

SEQ ID NO: 747258 - RNA, 19 nt, Human
ggugucugauggaugaaug

SEQ ID NO: 747259 - RNA, 19 nt, Human
guccaagcagccugaugcc

SEQ ID NO: 747260 - RNA, 23 nt, Human
guccccgcuguuuugauuccaac

SEQ ID NO: 747261 - RNA, 19 nt, Human
gucuuccaccaaguuucac

SEQ ID NO: 747262 - RNA, 21 nt, Human
uaacguggcugcucccuugga

SEQ ID NO: 747263 - RNA, 21 nt, Human
uacauggugaaacccagucuc

SEQ ID NO: 747264 - RNA, 23 nt, Human
uacauggugaaacccagucucua

SEQ ID NO: 747265 - RNA, 22 nt, Human
uaccaaaaauacaaaaaauuag

SEQ ID NO: 747266 - RNA, 25 nt, Human
uaccaaaaauacaaaaaauuagcca

SEQ ID NO: 747267 - RNA, 19 nt, Human
uaccuguaaucccagccuu

SEQ ID NO: 747268 - RNA, 21 nt, Human
uaccuguaaucccagccuugg

SEQ ID NO: 747269 - RNA, 24 nt, Human
uagccaggcgugguggcucacacc

SEQ ID NO: 747270 - RNA, 22 nt, Human
uaggaacaggcugggcauggug

SEQ ID NO: 747271 - RNA, 19 nt, Human
uaggcacaauuaucacccc

SEQ ID NO: 747272 - RNA, 24 nt, Human
uagguggaucacuugaggucagga

SEQ ID NO: 747273 - RNA, 21 nt, Human
ucaagaccagccuggcccaca

SEQ ID NO: 747274 - RNA, 23 nt, Human
ucacuugagguugggaguucaag

SEQ ID NO: 747275 - RNA, 25 nt, Human
ucagaagagacaguucugcugccgu

SEQ ID NO: 747276 - RNA, 25 nt, Human
ucagcccgugccucuagccugugcc

SEQ ID NO: 747277 - RNA, 21 nt, Human
ucaguggccugguggcucucc

SEQ ID NO: 747278 - RNA, 18 nt, Human
uccaggcgggaggcugcg

SEQ ID NO: 747279 - RNA, 22 nt, Human
uccccgccccgccccccagccc

SEQ ID NO: 747280 - RNA, 22 nt, Human
uccccgcuguuuugauuccaac

SEQ ID NO: 747281 - RNA, 23 nt, Human
uccccgugcccagugcaaaccag

SEQ ID NO: 747282 - RNA, 19 nt, Human
ucccugggugacugaacca

SEQ ID NO: 747283 - RNA, 26 nt, Human
ucccuuggaaagacauaggugggaau

SEQ ID NO: 747284 - RNA, 20 nt, Human
ucuaccaaaaauacaaaaaa

SEQ ID NO: 747285 - RNA, 20 nt, Human
ucucaggcuggagaaaaugu

SEQ ID NO: 747286 - RNA, 21 nt, Human
ucucugggcuuuacuuggcuu

SEQ ID NO: 747287 - RNA, 22 nt, Human
ucuguucaccaaagccugcaug

SEQ ID NO: 747288 - RNA, 21 nt, Human
ucuugcucugcccucuccguc

SEQ ID NO: 747289 - RNA, 23 nt, Human
ugaaaaauacaaaauuagccggg

SEQ ID NO: 747290 - RNA, 24 nt, Human
ugaaacccagucucuaugaaaaau

SEQ ID NO: 747291 - RNA, 21 nt, Human
ugaaugaaugagggagaggac

SEQ ID NO: 747292 - RNA, 21 nt, Human
ugacucacuuaauucuggcac

SEQ ID NO: 747293 - RNA, 19 nt, Human
ugagagaagccuggggaug

SEQ ID NO: 747294 - RNA, 19 nt, Human
ugagguaggcacaauuauc

SEQ ID NO: 747295 - RNA, 25 nt, Human
ugagguaggcacaauuaucaccccc

SEQ ID NO: 747296 - RNA, 21 nt, Human
ugagugacaucauucagcuca

SEQ ID NO: 747297 - RNA, 19 nt, Human
ugaugagaaucuucucugg

SEQ ID NO: 747298 - RNA, 20 nt, Human
ugcacaaaagacaaaaaaga

SEQ ID NO: 747299 - RNA, 22 nt, Human
ugcacaaaagacaaaaaagacc

SEQ ID NO: 747300 - RNA, 22 nt, Human
ugcaggguggggccgccugccc

SEQ ID NO: 747301 - RNA, 20 nt, Human
ugccagagagcuggcccucg

SEQ ID NO: 747302 - RNA, 22 nt, Human
ugccucuagccugugccuguuc

SEQ ID NO: 747303 - RNA, 24 nt, Human
ugccucuagccugugccuguuccu

SEQ ID NO: 747304 - RNA, 18 nt, Human
ugccugggccgcugggca

SEQ ID NO: 747305 - RNA, 19 nt, Human
ugccugggccgcugggcag

SEQ ID NO: 747306 - RNA, 19 nt, Human
ugccuguuccuccccucug

SEQ ID NO: 747307 - RNA, 24 nt, Human
ugcguuuauuucucucuaaaaccu

SEQ ID NO: 747308 - RNA, 20 nt, Human
ugcucaguggccugguggcu

SEQ ID NO: 747309 - RNA, 26 nt, Human
uggaagagaaguggguggaaaagcuc

SEQ ID NO: 747310 - RNA, 24 nt, Human
uggaucacuugaggucaggaauuc

SEQ ID NO: 747311 - RNA, 27 nt, Human
uggaucacuugaggucaggaauucgag

SEQ ID NO: 747312 - RNA, 24 nt, Human
uggaucacuugagguugggaguuc

SEQ ID NO: 747313 - RNA, 20 nt, Human
uggcaccccaggaucacccc

SEQ ID NO: 747314 - RNA, 21 nt, Human
uggccugguggcucuccaguc

SEQ ID NO: 747315 - RNA, 21 nt, Human
uggcucacaccuguaaucuca

SEQ ID NO: 747316 - RNA, 24 nt, Human
uggcucacaccuguaaucucagca

SEQ ID NO: 747317 - RNA, 21 nt, Human
ugggagaacaaggugggugga

SEQ ID NO: 747318 - RNA, 24 nt, Human
ugggaggauggguuacauuuugca

SEQ ID NO: 747319 - RNA, 19 nt, Human
ugggaggccgagguaggug

SEQ ID NO: 747320 - RNA, 24 nt, Human
ugggaggccgagguagguggauca

SEQ ID NO: 747321 - RNA, 23 nt, Human
ugggaggcugaggcgggacaauc

SEQ ID NO: 747322 - RNA, 24 nt, Human
ugggaggcugaggcgggacaaucg

SEQ ID NO: 747323 - RNA, 19 nt, Human
ugggcaguggccugaggcc

SEQ ID NO: 747324 - RNA, 21 nt, Human
ugggccgcugggcaguggccu

SEQ ID NO: 747325 - RNA, 21 nt, Human
uggggcaggacagagaccaag

SEQ ID NO: 747326 - RNA, 28 nt, Human
ugggguggggacagggggagcagggguu

SEQ ID NO: 747327 - RNA, 23 nt, Human
ugggguggggacagggggagcca

SEQ ID NO: 747328 - RNA, 22 nt, Human
uggugcauaccuguaaucccag

SEQ ID NO: 747329 - RNA, 24 nt, Human
ugguggcucacaccuguaaucuca

SEQ ID NO: 747330 - RNA, 24 nt, Human
ugguggugcauaccuguaauccca

SEQ ID NO: 747331 - RNA, 20 nt, Human
ugucuagauucagacugcag

SEQ ID NO: 747332 - RNA, 23 nt, Human
ugucuaucugagguaggcacaau

SEQ ID NO: 747333 - RNA, 19 nt, Human
uuagccgggcgugguggug

SEQ ID NO: 747334 - RNA, 20 nt, Human
uuagccgggcgugguggugc

SEQ ID NO: 747335 - RNA, 21 nt, Human
uuagccgggcgugguggugca

SEQ ID NO: 747336 - RNA, 21 nt, Human
uucaagaccagccuggcccac

SEQ ID NO: 747337 - RNA, 24 nt, Human
uucaugcauuacugcguuuauuuc

SEQ ID NO: 747338 - RNA, 18 nt, Human
uuccgugucugcuacaga

SEQ ID NO: 747339 - RNA, 21 nt, Human
uucgagaccagccuggucuac

SEQ ID NO: 747340 - RNA, 19 nt, Human
uucucugggcuuuacuugg

SEQ ID NO: 747341 - RNA, 21 nt, Human
uugaauuagauguugaaacca

SEQ ID NO: 747342 - RNA, 25 nt, Human
uugggaggccgagguagguggauca

SEQ ID NO: 747343 - RNA, 24 nt, Human
uugggaggcugaggcgggacaauc

SEQ ID NO: 747344 - RNA, 18 nt, Human
uugugucuggggcaccca

SEQ ID NO: 747345 - RNA, 22 nt, Human
acacccugccugggcugugagc

SEQ ID NO: 747346 - RNA, 19 nt, Human
accguccuccccuccugcc

SEQ ID NO: 747347 - RNA, 20 nt, Human
acgaaacgcgaucgcggccc

SEQ ID NO: 747348 - RNA, 23 nt, Human
acgagcccauccaggagccacac

SEQ ID NO: 747349 - RNA, 20 nt, Human
agccuugggggcucugagca

SEQ ID NO: 747350 - RNA, 21 nt, Human
agccuugggggcucugagcag

SEQ ID NO: 747351 - RNA, 21 nt, Human
cacagccccagccccacgucc

SEQ ID NO: 747352 - RNA, 18 nt, Human
cagaggagagccuugggg

SEQ ID NO: 747353 - RNA, 23 nt, Human
cagcagguacaccguccuccccu

SEQ ID NO: 747354 - RNA, 22 nt, Human
cagcagguacaccguccucccu

SEQ ID NO: 747355 - RNA, 24 nt, Human
cagccccagccccacguccaggcu

SEQ ID NO: 747356 - RNA, 22 nt, Human
cagcccgagggaccugggacaa

SEQ ID NO: 747357 - RNA, 18 nt, Human
cagccgccugccuugcug

SEQ ID NO: 747358 - RNA, 21 nt, Human
cagguacaccguccuccccuc

SEQ ID NO: 747359 - RNA, 25 nt, Human
cagugcccaggcccaguguauuuuu

SEQ ID NO: 747360 - RNA, 22 nt, Human
ccagcagcgcccacagccccag

SEQ ID NO: 747361 - RNA, 18 nt, Human
cccacguccaggcugcca

SEQ ID NO: 747362 - RNA, 24 nt, Human
cccacguccaggcugccauguccc

SEQ ID NO: 747363 - RNA, 26 nt, Human
cccaucccgccccacgagcccaucca

SEQ ID NO: 747364 - RNA, 31 nt, Human
cccaucccgccccacgagcccauccaggagg

SEQ ID NO: 747365 - RNA, 21 nt, Human
cccgccagcagcgcccacagc

SEQ ID NO: 747366 - RNA, 21 nt, Human
ccugggcugugagcacuauuc

SEQ ID NO: 747367 - RNA, 18 nt, Human
ccuggggaggccuccagg

SEQ ID NO: 747368 - RNA, 25 nt, Human
cgcccacagccccagccccacgucc

SEQ ID NO: 747369 - RNA, 25 nt, Human
cgccccacgagcccauccaggagcc

SEQ ID NO: 747370 - RNA, 25 nt, Human
cgcucagcccgagggaccugggaca

SEQ ID NO: 747371 - RNA, 22 nt, Human
cggcaggccgggccuuccuucu

SEQ ID NO: 747372 - RNA, 18 nt, Human
cguccuccccuccugcca

SEQ ID NO: 747373 - RNA, 19 nt, Human
cuccugccagccugguucu

SEQ ID NO: 747374 - RNA, 21 nt, Human
cuuccugcaucugcacucucc

SEQ ID NO: 747375 - RNA, 22 nt, Human
gaagaccuggccucgcuacaaa

SEQ ID NO: 747376 - RNA, 20 nt, Human
gagggaccugggacaagagc

SEQ ID NO: 747377 - RNA, 22 nt, Human
gcccauccaggagccacacacc

SEQ ID NO: 747378 - RNA, 20 nt, Human
gccgcggccccggacgaaac

SEQ ID NO: 747379 - RNA, 20 nt, Human
gcgagggugguccuggggag

SEQ ID NO: 747380 - RNA, 18 nt, Human
gcuccaggccgcugcuca

SEQ ID NO: 747381 - RNA, 21 nt, Human
gcugcacuauaaauagcggca

SEQ ID NO: 747382 - RNA, 20 nt, Human
ggacaagagcugcucugucc

SEQ ID NO: 747383 - RNA, 21 nt, Human
gggcgaggcucccgcggguuu

SEQ ID NO: 747384 - RNA, 18 nt, Human
gggggcucugagcagcag

SEQ ID NO: 747385 - RNA, 19 nt, Human
ggguccgggcgaggcuccc

SEQ ID NO: 747386 - RNA, 24 nt, Human
ggugguccuggggaggccuccagg

SEQ ID NO: 747387 - RNA, 22 nt, Human
gguuuucuugagccucuggggc

SEQ ID NO: 747388 - RNA, 21 nt, Human
uagcggcaggccgggccuucc

SEQ ID NO: 747389 - RNA, 24 nt, Human
uccccacggccgccgcggccccgg

SEQ ID NO: 747390 - RNA, 25 nt, Human
ucccgcggguuuucuugagccucug

SEQ ID NO: 747391 - RNA, 23 nt, Human
ucccggcgggcagugcccaggcc

SEQ ID NO: 747392 - RNA, 19 nt, Human
uccguaccggaugcggccg

SEQ ID NO: 747393 - RNA, 22 nt, Human
uccguaccggaugcggccgaag

SEQ ID NO: 747394 - RNA, 21 nt, Human
uccuggguccgggcgaggcuc

SEQ ID NO: 747395 - RNA, 19 nt, Human
ucgcugcagccgauucccc

SEQ ID NO: 747396 - RNA, 21 nt, Human
ucgcugcagccgauuccccac

SEQ ID NO: 747397 - RNA, 23 nt, Human
ugccagccugguucugcccucac

SEQ ID NO: 747398 - RNA, 21 nt, Human
ugcccugucccaucccgcccc

SEQ ID NO: 747399 - RNA, 22 nt, Human
ugcccugucccaucccgcccca

SEQ ID NO: 747400 - RNA, 18 nt, Human
ugcggccgaagaccuggc

SEQ ID NO: 747401 - RNA, 19 nt, Human
ugcggccgaagaccuggcc

SEQ ID NO: 747402 - RNA, 25 nt, Human
ugcucuguccugcuugguggcucuc

SEQ ID NO: 747403 - RNA, 23 nt, Human
uggccccgagcacgaguuccuuc

SEQ ID NO: 747404 - RNA, 21 nt, Human
ugggacaagagcugcucuguc

SEQ ID NO: 747405 - RNA, 19 nt, Human
ugggggcucugagcagcag

SEQ ID NO: 747406 - RNA, 19 nt, Human
ugggggcucugagcagcag

SEQ ID NO: 747407 - RNA, 20 nt, Human
ugggggcucugagcagcagg

SEQ ID NO: 747408 - RNA, 22 nt, Human
uuccuggguccgggcgaggcuc

SEQ ID NO: 747409 - RNA, 19 nt, Human
aaaaaaaacuguaaaaaca

SEQ ID NO: 747410 - RNA, 22 nt, Human
aaaaacuguaaaaacagccucc

SEQ ID NO: 747411 - RNA, 24 nt, Human
aaacaaaacaacaacaaaaaaaaa

SEQ ID NO: 747412 - RNA, 19 nt, Human
aacaaaacaacaacaaaaa

SEQ ID NO: 747413 - RNA, 24 nt, Human
acaaaaaaaaacuguaaaaacagc

SEQ ID NO: 747414 - RNA, 24 nt, Human
accgguagugcuagaaaccagucu

SEQ ID NO: 747415 - RNA, 27 nt, Human
accuuauugcugugcucugggcuuggg

SEQ ID NO: 747416 - RNA, 19 nt, Human
agcggaggccagggcgcug

SEQ ID NO: 747417 - RNA, 22 nt, Human
aggcaaaacagaaaaacauuug

SEQ ID NO: 747418 - RNA, 19 nt, Human
aggguccugccccccccac

SEQ ID NO: 747419 - RNA, 20 nt, Human
aggguccugccccccccacc

SEQ ID NO: 747420 - RNA, 22 nt, Human
aggguccugccccccccacccc

SEQ ID NO: 747421 - RNA, 28 nt, Human
caaaaaaaaacuguaaaaacagccucca

SEQ ID NO: 747422 - RNA, 28 nt, Human
caacaaaaaaaaacuguaaaaacagccc

SEQ ID NO: 747423 - RNA, 27 nt, Human
caacguaaaauaaucuucuggacccuu

SEQ ID NO: 747424 - RNA, 21 nt, Human
cacaugggcccggccgagggc

SEQ ID NO: 747425 - RNA, 21 nt, Human
cagccuccauguccacgcccu

SEQ ID NO: 747426 - RNA, 20 nt, Human
cagccugaccagggugggcc

SEQ ID NO: 747427 - RNA, 19 nt, Human
cagggcgcugguggaggca

SEQ ID NO: 747428 - RNA, 22 nt, Human
cagguuuuuccaacccaggccc

SEQ ID NO: 747429 - RNA, 21 nt, Human
caucccugccaggccuagagg

SEQ ID NO: 747430 - RNA, 25 nt, Human
ccaacccaggcccuugacucugccc

SEQ ID NO: 747431 - RNA, 24 nt, Human
cccacccccaccccggcuccugca

SEQ ID NO: 747432 - RNA, 26 nt, Human
ccccagugccacaccaugucccccca

SEQ ID NO: 747433 - RNA, 23 nt, Human
cccccacccccaccccggcuccc

SEQ ID NO: 747434 - RNA, 19 nt, Human
ccccccacccccaccccgg

SEQ ID NO: 747435 - RNA, 22 nt, Human
ccccccacccccaccccggcuc

SEQ ID NO: 747436 - RNA, 24 nt, Human
cccccccacccccaccccggcucc

SEQ ID NO: 747437 - RNA, 18 nt, Human
ccccccccacccccaccc

SEQ ID NO: 747438 - RNA, 21 nt, Human
ccgacucggggccgcgggcgg

SEQ ID NO: 747439 - RNA, 23 nt, Human
ccgcacacacaugggcccggccg

SEQ ID NO: 747440 - RNA, 20 nt, Human
cggcggcucgagaccgacuc

SEQ ID NO: 747441 - RNA, 22 nt, Human
cggggccgcgggcggcacuccg

SEQ ID NO: 747442 - RNA, 24 nt, Human
cguguggaggcccgagcggaggcc

SEQ ID NO: 747443 - RNA, 20 nt, Human
cucugggcuugggggcggcu

SEQ ID NO: 747444 - RNA, 25 nt, Human
cugcaggccgaccuuauugcugugc

SEQ ID NO: 747445 - RNA, 23 nt, Human
cugggcacagggacaucccugcc

SEQ ID NO: 747446 - RNA, 23 nt, Human
cugugcucugggcuugggggcgg

SEQ ID NO: 747447 - RNA, 21 nt, Human
gaccuuauugcugugcucugg

SEQ ID NO: 747448 - RNA, 22 nt, Human
gccagcuccaagggcuauuggg

SEQ ID NO: 747449 - RNA, 24 nt, Human
gcgcugguggaggcaaagcccggg

SEQ ID NO: 747450 - RNA, 18 nt, Human
gcgggccgcacacacaug

SEQ ID NO: 747451 - RNA, 22 nt, Human
gcugggcacagggacaucccug

SEQ ID NO: 747452 - RNA, 24 nt, Human
ggcccuugacucugcccugagcuu

SEQ ID NO: 747453 - RNA, 21 nt, Human
ggcgcugguggaggcaaagcc

SEQ ID NO: 747454 - RNA, 18 nt, Human
ggcucgagaccgacucgg

SEQ ID NO: 747455 - RNA, 20 nt, Human
gggccguggccgggcggcag

SEQ ID NO: 747456 - RNA, 22 nt, Human
gggcgcugguggaggcaaagcc

SEQ ID NO: 747457 - RNA, 20 nt, Human
ggguccugccccccccaccc

SEQ ID NO: 747458 - RNA, 21 nt, Human
ggguuuggggugcccugucag

SEQ ID NO: 747459 - RNA, 21 nt, Human
gguggcaucucaggguccugc

SEQ ID NO: 747460 - RNA, 21 nt, Human
uaaaaacaaaacaacaacaaa

SEQ ID NO: 747461 - RNA, 25 nt, Human
uaaaaacaaaacaacaacaaaaaaa

SEQ ID NO: 747462 - RNA, 26 nt, Human
uagugcuagaaaccagucuucgagcc

SEQ ID NO: 747463 - RNA, 21 nt, Human
ucaggcagaagagacgcaagc

SEQ ID NO: 747464 - RNA, 22 nt, Human
ucagguccugguggcaucucag

SEQ ID NO: 747465 - RNA, 18 nt, Human
uccaacccaggcccuuga

SEQ ID NO: 747466 - RNA, 22 nt, Human
uccauguccacgcccuuccugg

SEQ ID NO: 747467 - RNA, 21 nt, Human
uccugccccccccacccccac

SEQ ID NO: 747468 - RNA, 24 nt, Human
uccugccccccccacccccacccc

SEQ ID NO: 747469 - RNA, 21 nt, Human
ucgauuaaggaggcagccuga

SEQ ID NO: 747470 - RNA, 22 nt, Human
ucucaggguccugcccccccca

SEQ ID NO: 747471 - RNA, 18 nt, Human
ucucccccugccaggcac

SEQ ID NO: 747472 - RNA, 21 nt, Human
ucuuuaaaaacaaaacaacaa

SEQ ID NO: 747473 - RNA, 19 nt, Human
ugccacaccaugucccccc

SEQ ID NO: 747474 - RNA, 20 nt, Human
uggcaucucaggguccugcc

SEQ ID NO: 747475 - RNA, 25 nt, Human
uuaugcauuccugugagucagguuu

SEQ ID NO: 747476 - RNA, 18 nt, Human
uucaggcaaaacagaaaa

SEQ ID NO: 747477 - RNA, 21 nt, Human
uucauucaguggaagauuuau

SEQ ID NO: 747478 - RNA, 23 nt, Human
uuuauaaucucuuuaccugcccu

SEQ ID NO: 747479 - RNA, 23 nt, Human
uuuccaacccaggcccuugacuc

SEQ ID NO: 747480 - RNA, 20 nt, Human
uuuucauucaguggaagauu

SEQ ID NO: 747481 - RNA, 23 nt, Human
aaaaaaaaaaggaaaacagaaag

SEQ ID NO: 747482 - RNA, 22 nt, Human
aaaaaggaaaacagaaagaaag

SEQ ID NO: 747483 - RNA, 23 nt, Human
aaaaaggaaaacagaaagaaaga

SEQ ID NO: 747484 - RNA, 21 nt, Human
aaacagaaagaaagaaaaaga

SEQ ID NO: 747485 - RNA, 23 nt, Human
aaacagaaagaaagaaaagggac

SEQ ID NO: 747486 - RNA, 21 nt, Human
aagaaagaaaaagaacaaaaa

SEQ ID NO: 747487 - RNA, 23 nt, Human
aagugaacagacgcacucccucc

SEQ ID NO: 747488 - RNA, 23 nt, Human
aauaaaauuugagacuacagcca

SEQ ID NO: 747489 - RNA, 21 nt, Human
acgcacucccuccucccccca

SEQ ID NO: 747490 - RNA, 23 nt, Human
agaaagaaagaaaaagaacaaaa

SEQ ID NO: 747491 - RNA, 20 nt, Human
agcaguuuucacgaaguuuu

SEQ ID NO: 747492 - RNA, 23 nt, Human
auacaaccaaaaaucuuaaaacu

SEQ ID NO: 747493 - RNA, 18 nt, Human
cacucccuccucccccca

SEQ ID NO: 747494 - RNA, 24 nt, Human
ccccccacccucaauuaaaaaaaa

SEQ ID NO: 747495 - RNA, 18 nt, Human
ccuaauccaagugugggg

SEQ ID NO: 747496 - RNA, 23 nt, Human
ccuccccccacccucaauuaaaa

SEQ ID NO: 747497 - RNA, 21 nt, Human
gaagucagcuuuuugcaccca

SEQ ID NO: 747498 - RNA, 26 nt, Human
gcacucccuccuccccccacccucaa

SEQ ID NO: 747499 - RNA, 21 nt, Human
uaaagugaacagacgcacucc

SEQ ID NO: 747500 - RNA, 24 nt, Human
uacagccaaauauuuucuaaaacc

SEQ ID NO: 747501 - RNA, 18 nt, Human
uaggaggagggaaacccu

SEQ ID NO: 747502 - RNA, 22 nt, Human
ucaauuaaaaaaaaaaggaaaa

SEQ ID NO: 747503 - RNA, 20 nt, Human
uccaugcuacagaauaaaaa

SEQ ID NO: 747504 - RNA, 25 nt, Human
uccaugcuacagaauaaaauuugag

SEQ ID NO: 747505 - RNA, 18 nt, Human
ucccuccuccccccaccc

SEQ ID NO: 747506 - RNA, 25 nt, Human
ucccuccuccccccacccucaauua

SEQ ID NO: 747507 - RNA, 23 nt, Human
ugaacagacgcacucccuccucc

SEQ ID NO: 747508 - RNA, 21 nt, Human
ugcuucaauauugcugcuuau

SEQ ID NO: 747509 - RNA, 29 nt, Human
uuuuuuuuuuuuuuuuuuuauacuuuugg

SEQ ID NO: 747510 - RNA, 21 nt, Human
acagggcagcccaggggcccu

SEQ ID NO: 747511 - RNA, 18 nt, Human
accuacucagaggcacug

SEQ ID NO: 747512 - RNA, 23 nt, Human
agaggcacugaggccacauuccc

SEQ ID NO: 747513 - RNA, 20 nt, Human
aggcaggaugccacguggcu

SEQ ID NO: 747514 - RNA, 20 nt, Human
aggcaggaugccacguggcu

SEQ ID NO: 747515 - RNA, 23 nt, Human
cacaguaaaucucacccagacca

SEQ ID NO: 747516 - RNA, 21 nt, Human
cagaccacaggcaggaugcca

SEQ ID NO: 747517 - RNA, 20 nt, Human
cauccugaguccaggcucug

SEQ ID NO: 747518 - RNA, 21 nt, Human
cauccugaguccaggcucugc

SEQ ID NO: 747519 - RNA, 25 nt, Human
cauucccaucuccaggcaccaggga

SEQ ID NO: 747520 - RNA, 24 nt, Human
ccaagcccuaguuccaagucaucc

SEQ ID NO: 747521 - RNA, 18 nt, Human
ccugaguccaggcucugc

SEQ ID NO: 747522 - RNA, 18 nt, Human
ccugggggcugaaagggc

SEQ ID NO: 747523 - RNA, 19 nt, Human
cgcucagaacccacgugcc

SEQ ID NO: 747524 - RNA, 23 nt, Human
cucagaacccacgugccucgugc

SEQ ID NO: 747525 - RNA, 18 nt, Human
gagcaccuggagcuggug

SEQ ID NO: 747526 - RNA, 22 nt, Human
gccagaaucuugagcaccugga

SEQ ID NO: 747527 - RNA, 18 nt, Human
gccucagacuggaccaca

SEQ ID NO: 747528 - RNA, 18 nt, Human
gcucugccagaaucuuga

SEQ ID NO: 747529 - RNA, 22 nt, Human
gcugaaagggccucagacugga

SEQ ID NO: 747530 - RNA, 21 nt, Human
gcugguggcaaggcagccugg

SEQ ID NO: 747531 - RNA, 21 nt, Human
ggccacucugggcagaaagca

SEQ ID NO: 747532 - RNA, 22 nt, Human
gggcagcccaggggcccugggc

SEQ ID NO: 747533 - RNA, 23 nt, Human
guuccaagucauccugaguccag

SEQ ID NO: 747534 - RNA, 18 nt, Human
uccagggacguagaaaca

SEQ ID NO: 747535 - RNA, 24 nt, Human
ucuacaucuggucacaguaaaucu

SEQ ID NO: 747536 - RNA, 22 nt, Human
ucuccaggcaccagggaugucu

SEQ ID NO: 747537 - RNA, 23 nt, Human
ucuccaggcaccagggaugucuc

SEQ ID NO: 747538 - RNA, 20 nt, Human
ugauuccauuuggaguuucc

SEQ ID NO: 747539 - RNA, 21 nt, Human
uggagcugguggcaaggcagc

SEQ ID NO: 747540 - RNA, 21 nt, Human
uggaguuuccaaaauccagga

SEQ ID NO: 747541 - RNA, 24 nt, Human
uggccacucugggcagaaagcaaa

SEQ ID NO: 747542 - RNA, 27 nt, Human
uuccaagucauccugaguccaggcucu

SEQ ID NO: 747543 - RNA, 22 nt, Human
uuuuuuuuuuuuuugcaggaug

SEQ ID NO: 747544 - RNA, 18 nt, Human
uuuuuuuuuuuuuuuuug

SEQ ID NO: 747545 - RNA, 21 nt, Human
uuuuuuuuuuuuuuuuugcag

SEQ ID NO: 747546 - RNA, 22 nt, Human
uuuuuuuuuuuuuuuuugcagg

SEQ ID NO: 747547 - RNA, 23 nt, Human
uuuuuuuuuuuuuuuuugcagga

SEQ ID NO: 747548 - RNA, 19 nt, Human
aaagauguaaagagauuga

SEQ ID NO: 747549 - RNA, 22 nt, Human
aaaguauugggauuauaggcau

SEQ ID NO: 747550 - RNA, 23 nt, Human
aaaguauugggauuauaggcaug

SEQ ID NO: 747551 - RNA, 24 nt, Human
aaagugcugggauuacaggcguga

SEQ ID NO: 747552 - RNA, 19 nt, Human
aacaaacagcugcauaaga

SEQ ID NO: 747553 - RNA, 20 nt, Human
aagaaacuuguuccaaguca

SEQ ID NO: 747554 - RNA, 21 nt, Human
aaguauugggauuauaggcau

SEQ ID NO: 747555 - RNA, 19 nt, Human
aagugcugggauuacaggc

SEQ ID NO: 747556 - RNA, 19 nt, Human
aagugcugggauuacaggc

SEQ ID NO: 747557 - RNA, 26 nt, Human
aagugcugggauuacaggcgugagcu

SEQ ID NO: 747558 - RNA, 20 nt, Human
acaguaaguaguggccugau

SEQ ID NO: 747559 - RNA, 24 nt, Human
accauguuggccaagcuggucucg

SEQ ID NO: 747560 - RNA, 20 nt, Human
acccccacucuucccacccc

SEQ ID NO: 747561 - RNA, 21 nt, Human
acccccacucuucccaccccc

SEQ ID NO: 747562 - RNA, 19 nt, Human
acccgccguucaggaagcg

SEQ ID NO: 747563 - RNA, 19 nt, Human
acuacagguguaugcuacc

SEQ ID NO: 747564 - RNA, 24 nt, Human
acuauguugcccaggcuggucuag

SEQ ID NO: 747565 - RNA, 23 nt, Human
acucccaucucagccuccugagu

SEQ ID NO: 747566 - RNA, 24 nt, Human
acucccaucucagccuccugagua

SEQ ID NO: 747567 - RNA, 25 nt, Human
acucuguugcccaggcuggagugca

SEQ ID NO: 747568 - RNA, 21 nt, Human
acucuucccacccccuucccu

SEQ ID NO: 747569 - RNA, 20 nt, Human
acuuucuuucagaggcaacu

SEQ ID NO: 747570 - RNA, 21 nt, Human
agagacagggucucacucugu

SEQ ID NO: 747571 - RNA, 18 nt, Human
agccuccugaguagcuag

SEQ ID NO: 747572 - RNA, 21 nt, Human
agcuaccaugcccggcuggua

SEQ ID NO: 747573 - RNA, 23 nt, Human
agcuaggacuacagguguaugcu

SEQ ID NO: 747574 - RNA, 24 nt, Human
agcuggucucgaacuccugaccuc

SEQ ID NO: 747575 - RNA, 21 nt, Human
agugcaguggugcuaucauag

SEQ ID NO: 747576 - RNA, 23 nt, Human
agugcaguggugcuaucauaguu

SEQ ID NO: 747577 - RNA, 24 nt, Human
agugcaguggugcuaucauaguuc

SEQ ID NO: 747578 - RNA, 18 nt, Human
agugcugggauuacaggc

SEQ ID NO: 747579 - RNA, 22 nt, Human
auagcuggggacccagagacau

SEQ ID NO: 747580 - RNA, 18 nt, Human
aucagugaauuauaauua

SEQ ID NO: 747581 - RNA, 22 nt, Human
auccaagugaaugaugugucca

SEQ ID NO: 747582 - RNA, 22 nt, Human
aucuugccucuacuugccccag

SEQ ID NO: 747583 - RNA, 20 nt, Human
augaccauauuaggauuuuc

SEQ ID NO: 747584 - RNA, 20 nt, Human
augcaugcaggguacaugug

SEQ ID NO: 747585 - RNA, 19 nt, Human
auugaugauuaaacaguuc

SEQ ID NO: 747586 - RNA, 24 nt, Human
auuuuuguauuuuuaguagagaca

SEQ ID NO: 747587 - RNA, 24 nt, Human
caaagugcugggauuacaggcgug

SEQ ID NO: 747588 - RNA, 24 nt, Human
caccacaccuggcuaauuuuugua

SEQ ID NO: 747589 - RNA, 19 nt, Human
caccaugccuggccagagu

SEQ ID NO: 747590 - RNA, 21 nt, Human
caccauguuggccaagcuggu

SEQ ID NO: 747591 - RNA, 24 nt, Human
caccauguuggccaagcuggucuc

SEQ ID NO: 747592 - RNA, 27 nt, Human
caccauguuggccaagcuggucucgaa

SEQ ID NO: 747593 - RNA, 19 nt, Human
cacccccacucuucccacc

SEQ ID NO: 747594 - RNA, 26 nt, Human
cacccccacucuucccacccccuucc

SEQ ID NO: 747595 - RNA, 19 nt, Human
cacuauguugcccaggcug

SEQ ID NO: 747596 - RNA, 22 nt, Human
cacuauguugcccaggcugguc

SEQ ID NO: 747597 - RNA, 24 nt, Human
cacucuguugcccaggcuggagug

SEQ ID NO: 747598 - RNA, 19 nt, Human
cagccuccugaguagcuag

SEQ ID NO: 747599 - RNA, 24 nt, Human
cagggucucacucuguugcccagg

SEQ ID NO: 747600 - RNA, 22 nt, Human
cauaacacagguauugucagcu

SEQ ID NO: 747601 - RNA, 24 nt, Human
caucucagccuccugaguagcuag

SEQ ID NO: 747602 - RNA, 25 nt, Human
caucuccaacuuuaaauaacaaccu

SEQ ID NO: 747603 - RNA, 24 nt, Human
cauguuggccaagcuggucucgaa

SEQ ID NO: 747604 - RNA, 22 nt, Human
ccaaagugcugggauuacaggc

SEQ ID NO: 747605 - RNA, 22 nt, Human
ccaaagugcugggauuacaggc

SEQ ID NO: 747606 - RNA, 24 nt, Human
ccaaagugcugggauuacaggcgu

SEQ ID NO: 747607 - RNA, 20 nt, Human
ccaaccuucucuauccaccc

SEQ ID NO: 747608 - RNA, 26 nt, Human
ccacccccuucccuccucugaagcuu

SEQ ID NO: 747609 - RNA, 23 nt, Human
ccaucucagccuccugaguagcu

SEQ ID NO: 747610 - RNA, 22 nt, Human
cccaggccuggacucucccucc

SEQ ID NO: 747611 - RNA, 19 nt, Human
ccccaccaugccuggccag

SEQ ID NO: 747612 - RNA, 18 nt, Human
ccccaccaugccuggccg

SEQ ID NO: 747613 - RNA, 24 nt, Human
ccccacucuucccacccccuuccc

SEQ ID NO: 747614 - RNA, 19 nt, Human
cccccucuuccucgcucaa

SEQ ID NO: 747615 - RNA, 18 nt, Human
ccccgcgccaaccuucuc

SEQ ID NO: 747616 - RNA, 18 nt, Human
cccgccguucaggaagcg

SEQ ID NO: 747617 - RNA, 19 nt, Human
ccuccaggagaccuuggcc

SEQ ID NO: 747618 - RNA, 21 nt, Human
ccucccgccggucuuccccgc

SEQ ID NO: 747619 - RNA, 21 nt, Human
ccugaccucgggauccgccug

SEQ ID NO: 747620 - RNA, 24 nt, Human
ccugaguagcuaggacuacaggug

SEQ ID NO: 747621 - RNA, 22 nt, Human
ccugucuuggccucccaaagug

SEQ ID NO: 747622 - RNA, 23 nt, Human
cgcauaaaugaaaacaaacagcu

SEQ ID NO: 747623 - RNA, 19 nt, Human
cgccaaaugcuugugcacu

SEQ ID NO: 747624 - RNA, 21 nt, Human
cgccggucacgccaaucgcgc

SEQ ID NO: 747625 - RNA, 24 nt, Human
cuaaaguauugggauuauaggcau

SEQ ID NO: 747626 - RNA, 23 nt, Human
cuaauuuuuguauuuuuaguaga

SEQ ID NO: 747627 - RNA, 24 nt, Human
cucacucuguugcccaggcuggag

SEQ ID NO: 747628 - RNA, 24 nt, Human
cuccugaccucgggauccgccugu

SEQ ID NO: 747629 - RNA, 24 nt, Human
cuccugaguagcuaggacuacagg

SEQ ID NO: 747630 - RNA, 20 nt, Human
cuccuuccuacaccuacuca

SEQ ID NO: 747631 - RNA, 20 nt, Human
cucuacgcauaaaugaaaac

SEQ ID NO: 747632 - RNA, 22 nt, Human
cucuauuauaaacuguauugcu

SEQ ID NO: 747633 - RNA, 24 nt, Human
cucucaggacugacauaaugucaa

SEQ ID NO: 747634 - RNA, 24 nt, Human
cucuuccucgcucaacucgcaaga

SEQ ID NO: 747635 - RNA, 20 nt, Human
cugcaaaucuaaauaccauc

SEQ ID NO: 747636 - RNA, 22 nt, Human
cugcaugaaucuaucuugauuu

SEQ ID NO: 747637 - RNA, 21 nt, Human
cugggcuaaacaguaucaaaa

SEQ ID NO: 747638 - RNA, 23 nt, Human
cugucuuggccucccaaagugcu

SEQ ID NO: 747639 - RNA, 21 nt, Human
cuuaagaaauucuuacacuaa

SEQ ID NO: 747640 - RNA, 21 nt, Human
cuucaccauguuggccaagcu

SEQ ID NO: 747641 - RNA, 23 nt, Human
cuuccagcuucugggcucaucuc

SEQ ID NO: 747642 - RNA, 19 nt, Human
cuugcacccccacucuucc

SEQ ID NO: 747643 - RNA, 21 nt, Human
cuugcacccccacucuuccca

SEQ ID NO: 747644 - RNA, 18 nt, Human
cuugugcacuugagauug

SEQ ID NO: 747645 - RNA, 19 nt, Human
cuugugcacuugagauugc

SEQ ID NO: 747646 - RNA, 18 nt, Human
gaagacuuuccaaacucu

SEQ ID NO: 747647 - RNA, 19 nt, Human
gagaaauaaaaacaaauuc

SEQ ID NO: 747648 - RNA, 26 nt, Human
gaguagcuaggacuacagguguaugc

SEQ ID NO: 747649 - RNA, 21 nt, Human
gauuacaggcgugagcuacca

SEQ ID NO: 747650 - RNA, 24 nt, Human
gauuacaggcgugagcuaccaugc

SEQ ID NO: 747651 - RNA, 19 nt, Human
gcauccaagugaaugaugu

SEQ ID NO: 747652 - RNA, 19 nt, Human
gcccaggcuggagugcagu

SEQ ID NO: 747653 - RNA, 20 nt, Human
gcccaggcuggagugcagug

SEQ ID NO: 747654 - RNA, 21 nt, Human
gcuggagugcaguggugcuag

SEQ ID NO: 747655 - RNA, 22 nt, Human
ggacuacagguguaugcuacca

SEQ ID NO: 747656 - RNA, 23 nt, Human
ggcuggucuagaauuccugaccu

SEQ ID NO: 747657 - RNA, 22 nt, Human
gggauccgccugucuuggccuc

SEQ ID NO: 747658 - RNA, 19 nt, Human
ggucucgaacuccugaccu

SEQ ID NO: 747659 - RNA, 19 nt, Human
guauugggauuauaggcau

SEQ ID NO: 747660 - RNA, 20 nt, Human
gucagcuucaauuuauagcu

SEQ ID NO: 747661 - RNA, 18 nt, Human
gucugguucuaaaaugcc

SEQ ID NO: 747662 - RNA, 19 nt, Human
gucuuaaagcuuaugagaa

SEQ ID NO: 747663 - RNA, 23 nt, Human
uaaaaauggcauaauuaacaggu

SEQ ID NO: 747664 - RNA, 24 nt, Human
uaaaaauggcauaauuaacagguu

SEQ ID NO: 747665 - RNA, 23 nt, Human
uaaaaccucagagcaauguuggu

SEQ ID NO: 747666 - RNA, 21 nt, Human
uaacagguucucucuuccuuc

SEQ ID NO: 747667 - RNA, 25 nt, Human
uaaguaguggccugaucugcaacgu

SEQ ID NO: 747668 - RNA, 24 nt, Human
uaauuuuuguauuuuuaguagaga

SEQ ID NO: 747669 - RNA, 21 nt, Human
uacauugaugaccuuuuagcc

SEQ ID NO: 747670 - RNA, 21 nt, Human
uaccaucuuuuucaugcagaa

SEQ ID NO: 747671 - RNA, 19 nt, Human
uacuauucaugaucuauuu

SEQ ID NO: 747672 - RNA, 21 nt, Human
uacugcugcccaaacuuccac

SEQ ID NO: 747673 - RNA, 26 nt, Human
uacuugaugggcugucucccguuacg

SEQ ID NO: 747674 - RNA, 25 nt, Human
uagacucccaggccuggacucuccc

SEQ ID NO: 747675 - RNA, 22 nt, Human
uagagauugggucucacuaugu

SEQ ID NO: 747676 - RNA, 21 nt, Human
uagcuggggacccagagacau

SEQ ID NO: 747677 - RNA, 24 nt, Human
uaggacuacagguguaugcuacca

SEQ ID NO: 747678 - RNA, 24 nt, Human
uaguagagacagagcuucaccaug

SEQ ID NO: 747679 - RNA, 26 nt, Human
uaguagagacagagcuucaccauguu

SEQ ID NO: 747680 - RNA, 21 nt, Human
uauagcuggggacccagagac

SEQ ID NO: 747681 - RNA, 22 nt, Human
uaugacgcugccuuagggcaaa

SEQ ID NO: 747682 - RNA, 20 nt, Human
uauguugcccaggcuggucu

SEQ ID NO: 747683 - RNA, 22 nt, Human
uauguugcccaggcuggucuag

SEQ ID NO: 747684 - RNA, 23 nt, Human
uauguugcccaggcuggucuaga

SEQ ID NO: 747685 - RNA, 24 nt, Human
uauguugcccaggcuggucuagaa

SEQ ID NO: 747686 - RNA, 24 nt, Human
ucacucuguugcccaggcuggagu

SEQ ID NO: 747687 - RNA, 20 nt, Human
uccacagaacucagacuuuc

SEQ ID NO: 747688 - RNA, 21 nt, Human
uccacauuucuccuuccuaca

SEQ ID NO: 747689 - RNA, 23 nt, Human
uccaucuauguccacagaacuca

SEQ ID NO: 747690 - RNA, 24 nt, Human
ucccaaagugcugggauuacaggc

SEQ ID NO: 747691 - RNA, 18 nt, Human
ucccacccccuucccucc

SEQ ID NO: 747692 - RNA, 22 nt, Human
uccccgcgccaaccuucucuau

SEQ ID NO: 747693 - RNA, 24 nt, Human
uccuaaaguauugggauuauaggc

SEQ ID NO: 747694 - RNA, 23 nt, Human
uccuacaccuacucaucuccaac

SEQ ID NO: 747695 - RNA, 24 nt, Human
uccugaguagcuaggacuacaggu

SEQ ID NO: 747696 - RNA, 19 nt, Human
ucucacuauguugcccagg

SEQ ID NO: 747697 - RNA, 23 nt, Human
ucucacuauguugcccaggcugg

SEQ ID NO: 747698 - RNA, 24 nt, Human
ucucacuauguugcccaggcuggu

SEQ ID NO: 747699 - RNA, 26 nt, Human
ucucacuauguugcccaggcuggucu

SEQ ID NO: 747700 - RNA, 22 nt, Human
ucucacucuguugcccaggcug

SEQ ID NO: 747701 - RNA, 23 nt, Human
ucucacucuguugcccaggcugg

SEQ ID NO: 747702 - RNA, 24 nt, Human
ucucacucuguugcccaggcugga

SEQ ID NO: 747703 - RNA, 26 nt, Human
ucucacucuguugcccaggcuggagu

SEQ ID NO: 747704 - RNA, 24 nt, Human
ucucuugcacccccacucuuccca

SEQ ID NO: 747705 - RNA, 21 nt, Human
ucugaagcuucucgaagacuu

SEQ ID NO: 747706 - RNA, 18 nt, Human
ucuguugcccaggcugga

SEQ ID NO: 747707 - RNA, 24 nt, Human
ucuguugcccaggcuggagugcag

SEQ ID NO: 747708 - RNA, 18 nt, Human
ucuuccccgcgccaaccu

SEQ ID NO: 747709 - RNA, 26 nt, Human
ucuugcacccccacucuucccacccc

SEQ ID NO: 747710 - RNA, 20 nt, Human
ucuuggccucccaaagugcu

SEQ ID NO: 747711 - RNA, 25 nt, Human
ugaagcuucucgaagacuuuccaaa

SEQ ID NO: 747712 - RNA, 18 nt, Human
ugaccucgggauccgccu

SEQ ID NO: 747713 - RNA, 18 nt, Human
ugcacccccacucuuccc

SEQ ID NO: 747714 - RNA, 19 nt, Human
ugcccaaacuuccacauuu

SEQ ID NO: 747715 - RNA, 18 nt, Human
ugcccaggcuggagugca

SEQ ID NO: 747716 - RNA, 21 nt, Human
ugcccaggcuggagugcagug

SEQ ID NO: 747717 - RNA, 24 nt, Human
ugcccaggcuggagugcaguggug

SEQ ID NO: 747718 - RNA, 24 nt, Human
ugcccaggcuggucuagaauuccu

SEQ ID NO: 747719 - RNA, 18 nt, Human
ugcugggauuacaggcgu

SEQ ID NO: 747720 - RNA, 28 nt, Human
uggagugcaguggugcuauccuagcacg

SEQ ID NO: 747721 - RNA, 28 nt, Human
uggagugcaguggugcuauggcucuagc

SEQ ID NO: 747722 - RNA, 24 nt, Human
uggccaagcuggucucgaacuccu

SEQ ID NO: 747723 - RNA, 18 nt, Human
uggccucccaaagugcug

SEQ ID NO: 747724 - RNA, 18 nt, Human
ugggauuacaggcgugag

SEQ ID NO: 747725 - RNA, 22 nt, Human
ugggauuacaggcgugagcuac

SEQ ID NO: 747726 - RNA, 23 nt, Human
ugggauuacaggcgugagcuacc

SEQ ID NO: 747727 - RNA, 24 nt, Human
ugggauuacaggcgugagcuacca

SEQ ID NO: 747728 - RNA, 25 nt, Human
ugggauuacaggcgugagcuaccau

SEQ ID NO: 747729 - RNA, 21 nt, Human
ugggauuauaggcaugcccca

SEQ ID NO: 747730 - RNA, 24 nt, Human
ugggauuauaggcaugccccacca

SEQ ID NO: 747731 - RNA, 25 nt, Human
ugggauuauaggcaugccccaccau

SEQ ID NO: 747732 - RNA, 24 nt, Human
uguaaagagauugaugaggacaau

SEQ ID NO: 747733 - RNA, 22 nt, Human
uuaaauaacaaccucaaaauua

SEQ ID NO: 747734 - RNA, 23 nt, Human
uuaggauuuucuagguguagaca

SEQ ID NO: 747735 - RNA, 24 nt, Human
uuaguagagacagagcuucaccau

SEQ ID NO: 747736 - RNA, 25 nt, Human
uucaaaugaauacuugaugggcugu

SEQ ID NO: 747737 - RNA, 22 nt, Human
uucacaacagacaucuugccuc

SEQ ID NO: 747738 - RNA, 25 nt, Human
uucccacccccuucccuccucugaa

SEQ ID NO: 747739 - RNA, 23 nt, Human
uuccuauagaaagagauagaaaa

SEQ ID NO: 747740 - RNA, 24 nt, Human
uugggucucacuauguugcccagg

SEQ ID NO: 747741 - RNA, 18 nt, Human
uugugcacuugagauugc

SEQ ID NO: 747742 - RNA, 21 nt, Human
uuuagagauugggucucacua

SEQ ID NO: 747743 - RNA, 20 nt, Human
uuuuuguauuuuuaguagag

SEQ ID NO: 747744 - RNA, 20 nt, Human
aacuucuagaaacacaucuc

SEQ ID NO: 747745 - RNA, 18 nt, Human
aaggacaagccccagaac

SEQ ID NO: 747746 - RNA, 21 nt, Human
aagugacugagggccugaaca

SEQ ID NO: 747747 - RNA, 22 nt, Human
acaaccacuaaaagcgaaagga

SEQ ID NO: 747748 - RNA, 20 nt, Human
acaggagaccgggagccacg

SEQ ID NO: 747749 - RNA, 24 nt, Human
acuggugugcaggggccagggcca

SEQ ID NO: 747750 - RNA, 25 nt, Human
agaaaaccaggauguguacaaagug

SEQ ID NO: 747751 - RNA, 23 nt, Human
agaaaacggccccgacacgacca

SEQ ID NO: 747752 - RNA, 22 nt, Human
agaaauaacaaccacuaaaagc

SEQ ID NO: 747753 - RNA, 23 nt, Human
agaacagaaauuccucaagaacg

SEQ ID NO: 747754 - RNA, 18 nt, Human
agcacguccacccgcccc

SEQ ID NO: 747755 - RNA, 20 nt, Human
agccaggcagagcugaugcc

SEQ ID NO: 747756 - RNA, 19 nt, Human
agcccaggaggacggguca

SEQ ID NO: 747757 - RNA, 19 nt, Human
agcgggcgccgcucagccc

SEQ ID NO: 747758 - RNA, 25 nt, Human
aggaaaacuacauucaaaacagcug

SEQ ID NO: 747759 - RNA, 25 nt, Human
aggaaggacaagccccagaacagaa

SEQ ID NO: 747760 - RNA, 23 nt, Human
aggacuuggcugcuacagaaaua

SEQ ID NO: 747761 - RNA, 19 nt, Human
aggcccacaggagaccggg

SEQ ID NO: 747762 - RNA, 20 nt, Human
agggcggcucucggaguucc

SEQ ID NO: 747763 - RNA, 22 nt, Human
aggggcucggcggggucuccgg

SEQ ID NO: 747764 - RNA, 18 nt, Human
agugguccccagccccag

SEQ ID NO: 747765 - RNA, 20 nt, Human
caaaacagcugcaaaggaag

SEQ ID NO: 747766 - RNA, 23 nt, Human
caaaacagcugcaaaggaaggac

SEQ ID NO: 747767 - RNA, 30 nt, Human
caagccccagaacagaaauuccucaagaag

SEQ ID NO: 747768 - RNA, 24 nt, Human
cacagaaagccuuggaugccucca

SEQ ID NO: 747769 - RNA, 24 nt, Human
caccagccaggcagagcugaugcc

SEQ ID NO: 747770 - RNA, 19 nt, Human
cacccggggcccagguggc

SEQ ID NO: 747771 - RNA, 21 nt, Human
cacccggggcccagguggcuc

SEQ ID NO: 747772 - RNA, 22 nt, Human
cacgggggcggcguccugcccu

SEQ ID NO: 747773 - RNA, 18 nt, Human
cagcagaggggcugggag

SEQ ID NO: 747774 - RNA, 20 nt, Human
cagcccccggcccgcggggc

SEQ ID NO: 747775 - RNA, 22 nt, Human
cagccccucacaaaaggacaac

SEQ ID NO: 747776 - RNA, 19 nt, Human
cagcugcuggaguuggggu

SEQ ID NO: 747777 - RNA, 20 nt, Human
cagcuucucguggccugcgg

SEQ ID NO: 747778 - RNA, 21 nt, Human
caggauggcaaggguggcggu

SEQ ID NO: 747779 - RNA, 26 nt, Human
caggcccacaggagaccgggagccac

SEQ ID NO: 747780 - RNA, 21 nt, Human
caucaggagccuccagguucc

SEQ ID NO: 747781 - RNA, 27 nt, Human
caucaggagccuccagguuccacagga

SEQ ID NO: 747782 - RNA, 18 nt, Human
ccagccaggcagagcuga

SEQ ID NO: 747783 - RNA, 18 nt, Human
ccagggcucgggugcagg

SEQ ID NO: 747784 - RNA, 23 nt, Human
cccagaacagaaauuccucaaga

SEQ ID NO: 747785 - RNA, 21 nt, Human
cccagggcucaacuccuuccu

SEQ ID NO: 747786 - RNA, 28 nt, Human
ccccagggcucgggugcagguagcucag

SEQ ID NO: 747787 - RNA, 19 nt, Human
cccgccccugugguggggc

SEQ ID NO: 747788 - RNA, 23 nt, Human
cccggggcccagguggcucugcc

SEQ ID NO: 747789 - RNA, 23 nt, Human
ccgcugccaccgccagcgugcgc

SEQ ID NO: 747790 - RNA, 21 nt, Human
ccgcugccaccgcugccaccg

SEQ ID NO: 747791 - RNA, 19 nt, Human
ccguuguagguggcagggu

SEQ ID NO: 747792 - RNA, 19 nt, Human
ccuccaugggacagucgcc

SEQ ID NO: 747793 - RNA, 26 nt, Human
ccugugguggggcugagccccagggc

SEQ ID NO: 747794 - RNA, 21 nt, Human
cgaaaggaauaaauaucugug

SEQ ID NO: 747795 - RNA, 24 nt, Human
cgacacgaccaaggccgagggcac

SEQ ID NO: 747796 - RNA, 23 nt, Human
cgacugggcccgccgccccacag

SEQ ID NO: 747797 - RNA, 22 nt, Human
cgcccagccuggagucaaaggc

SEQ ID NO: 747798 - RNA, 20 nt, Human
cgccuagggugcccacugca

SEQ ID NO: 747799 - RNA, 26 nt, Human
cgccugcccggugcccaugagggcgg

SEQ ID NO: 747800 - RNA, 22 nt, Human
cggcaagaauauggggcaggag

SEQ ID NO: 747801 - RNA, 23 nt, Human
cggcagcagaggggcugggagau

SEQ ID NO: 747802 - RNA, 21 nt, Human
cggccagcacguccacccgcc

SEQ ID NO: 747803 - RNA, 18 nt, Human
cggggagagaggccugga

SEQ ID NO: 747804 - RNA, 20 nt, Human
cggggcccagguggcucugc

SEQ ID NO: 747805 - RNA, 25 nt, Human
cguguauacacauacgccuagggug

SEQ ID NO: 747806 - RNA, 20 nt, Human
cucaagaacggaaaagaggc

SEQ ID NO: 747807 - RNA, 24 nt, Human
cucagaugauguuucuggcagcuc

SEQ ID NO: 747808 - RNA, 21 nt, Human
cugcggagcccgagcgacccc

SEQ ID NO: 747809 - RNA, 26 nt, Human
cugcuggaguugggguugggugucuu

SEQ ID NO: 747810 - RNA, 23 nt, Human
cuggugugcaggggccagggcca

SEQ ID NO: 747811 - RNA, 19 nt, Human
cuuuuccaagacacggcaa

SEQ ID NO: 747812 - RNA, 23 nt, Human
gaaaacggccccgacacgaccaa

SEQ ID NO: 747813 - RNA, 20 nt, Human
gaacggaaaagaggcgcucc

SEQ ID NO: 747814 - RNA, 21 nt, Human
gagaccgggagccacgggggc

SEQ ID NO: 747815 - RNA, 21 nt, Human
gagcccgagcgaccccagcgg

SEQ ID NO: 747816 - RNA, 18 nt, Human
gagcggggguggggagcc

SEQ ID NO: 747817 - RNA, 23 nt, Human
gcaaaggaaggacaagccccaga

SEQ ID NO: 747818 - RNA, 19 nt, Human
gcaggagccaucugccugc

SEQ ID NO: 747819 - RNA, 26 nt, Human
gccgcucagcccccggcccgcggggc

SEQ ID NO: 747820 - RNA, 27 nt, Human
gcgccugcccggugcccaugagggcgg

SEQ ID NO: 747821 - RNA, 23 nt, Human
gcucuggacuucaaaaugggauc

SEQ ID NO: 747822 - RNA, 18 nt, Human
gcugcaaaggaaggacaa

SEQ ID NO: 747823 - RNA, 18 nt, Human
ggaaaagaggcgcucccu

SEQ ID NO: 747824 - RNA, 20 nt, Human
ggaagccguuguagguggca

SEQ ID NO: 747825 - RNA, 23 nt, Human
ggaaggacaagccccagaacaga

SEQ ID NO: 747826 - RNA, 20 nt, Human
ggacaagccccagaacagaa

SEQ ID NO: 747827 - RNA, 18 nt, Human
ggagcccaggaggacggg

SEQ ID NO: 747828 - RNA, 21 nt, Human
ggagcggggguggggagccca

SEQ ID NO: 747829 - RNA, 22 nt, Human
ggauucuuggcacagaaagccu

SEQ ID NO: 747830 - RNA, 18 nt, Human
ggcuccuuggguggcggc

SEQ ID NO: 747831 - RNA, 20 nt, Human
ggcugggagaugccucucac

SEQ ID NO: 747832 - RNA, 26 nt, Human
gggaauacugggaggaggggcucggc

SEQ ID NO: 747833 - RNA, 18 nt, Human
gggagcggggguggggag

SEQ ID NO: 747834 - RNA, 20 nt, Human
gggaugggaauacugggagg

SEQ ID NO: 747835 - RNA, 21 nt, Human
gggaugggaauacugggagga

SEQ ID NO: 747836 - RNA, 22 nt, Human
gggccagggccaggggcucuca

SEQ ID NO: 747837 - RNA, 19 nt, Human
ggggaugggaauacuggga

SEQ ID NO: 747838 - RNA, 20 nt, Human
ggggcccagguggcucugcc

SEQ ID NO: 747839 - RNA, 21 nt, Human
gggguugggugucuuauccag

SEQ ID NO: 747840 - RNA, 19 nt, Human
gguggcgguuauucugggc

SEQ ID NO: 747841 - RNA, 20 nt, Human
gguggggcugagccccaggg

SEQ ID NO: 747842 - RNA, 18 nt, Human
uagcucagguuuggcaca

SEQ ID NO: 747843 - RNA, 23 nt, Human
ucacuugggauucuuggcacaga

SEQ ID NO: 747844 - RNA, 22 nt, Human
ucagggcggcucucggaguucc

SEQ ID NO: 747845 - RNA, 18 nt, Human
uccagcuguugcaggaug

SEQ ID NO: 747846 - RNA, 23 nt, Human
uccagguuccacaggaaacuucu

SEQ ID NO: 747847 - RNA, 25 nt, Human
uccccagccccagucacuugggauu

SEQ ID NO: 747848 - RNA, 22 nt, Human
ucgccucagccccucacaaaag

SEQ ID NO: 747849 - RNA, 22 nt, Human
ucucauggucggggagagaggc

SEQ ID NO: 747850 - RNA, 21 nt, Human
ucuccggcugcacccggggcc

SEQ ID NO: 747851 - RNA, 18 nt, Human
ucucuuggacauggaccc

SEQ ID NO: 747852 - RNA, 24 nt, Human
ucugagggaauacuggcugggguc

SEQ ID NO: 747853 - RNA, 19 nt, Human
ugcaaaggaaggacaagcc

SEQ ID NO: 747854 - RNA, 22 nt, Human
ugcaggauggcaaggguggcgg

SEQ ID NO: 747855 - RNA, 20 nt, Human
ugcccaaacccucagaugau

SEQ ID NO: 747856 - RNA, 18 nt, Human
ugcccuggagugcgcugu

SEQ ID NO: 747857 - RNA, 23 nt, Human
uggacauggacccccuccaaagu

SEQ ID NO: 747858 - RNA, 24 nt, Human
uggagucaaaggcaucaggagccu

SEQ ID NO: 747859 - RNA, 20 nt, Human
uggcacacagcaggcccaca

SEQ ID NO: 747860 - RNA, 18 nt, Human
uggccgcgugggucccag

SEQ ID NO: 747861 - RNA, 23 nt, Human
ugggaauacugggaggaggggcu

SEQ ID NO: 747862 - RNA, 24 nt, Human
ugggaauacugggaggaggggcuc

SEQ ID NO: 747863 - RNA, 21 nt, Human
ugggaggaggggcucggcggg

SEQ ID NO: 747864 - RNA, 20 nt, Human
ugggauucuuggcacagaaa

SEQ ID NO: 747865 - RNA, 20 nt, Human
uggggagcggggguggggag

SEQ ID NO: 747866 - RNA, 19 nt, Human
uggggcaggagccaucugc

SEQ ID NO: 747867 - RNA, 22 nt, Human
uggggcuccuuggguggcggcu

SEQ ID NO: 747868 - RNA, 18 nt, Human
ugguacaggaaucuugau

SEQ ID NO: 747869 - RNA, 23 nt, Human
ugguggggcugagccccagggcu

SEQ ID NO: 747870 - RNA, 24 nt, Human
uguauacacauacgccuagggugc

SEQ ID NO: 747871 - RNA, 18 nt, Human
ugugggccucaggagggc

SEQ ID NO: 747872 - RNA, 23 nt, Human
ugugguggggcugagccccaggg

SEQ ID NO: 747873 - RNA, 21 nt, Human
uguguacaaagugccugugug

SEQ ID NO: 747874 - RNA, 20 nt, Human
uguugcaggauggcaagggu

SEQ ID NO: 747875 - RNA, 21 nt, Human
uucugggccuacuggugugca

SEQ ID NO: 747876 - RNA, 24 nt, Human
uugugggcccagaguccagcugcu

SEQ ID NO: 747877 - RNA, 22 nt, Human
aaaacacaaaacaaccaaaaga

SEQ ID NO: 747878 - RNA, 21 nt, Human
aaaagaggguuaagccccaaa

SEQ ID NO: 747879 - RNA, 21 nt, Human
aaaauguaagccucuuuucau

SEQ ID NO: 747880 - RNA, 22 nt, Human
aaaauuaggaaaugacaucuuc

SEQ ID NO: 747881 - RNA, 23 nt, Human
aauucagcaaucugugugaacac

SEQ ID NO: 747882 - RNA, 23 nt, Human
agccgccgccgagaacccggagc

SEQ ID NO: 747883 - RNA, 21 nt, Human
auuucaguuuugacugccacu

SEQ ID NO: 747884 - RNA, 21 nt, Human
caaaacacaaaacaaccaaaa

SEQ ID NO: 747885 - RNA, 22 nt, Human
caaggccccggccaaggccaca

SEQ ID NO: 747886 - RNA, 21 nt, Human
cagccgccgccgagaacccgg

SEQ ID NO: 747887 - RNA, 18 nt, Human
ccaaaacacaaaacaacc

SEQ ID NO: 747888 - RNA, 19 nt, Human
ccaaaacacaaaacaacca

SEQ ID NO: 747889 - RNA, 22 nt, Human
ccccaaaacacaaaacaaccaa

SEQ ID NO: 747890 - RNA, 20 nt, Human
cccggccaaggccacagccg

SEQ ID NO: 747891 - RNA, 23 nt, Human
ccggagcaucacgcucaggccgc

SEQ ID NO: 747892 - RNA, 21 nt, Human
cgaccgggagagacccaaggc

SEQ ID NO: 747893 - RNA, 20 nt, Human
cgcucaggccgccacggccg

SEQ ID NO: 747894 - RNA, 18 nt, Human
cgggagagacccaaggcc

SEQ ID NO: 747895 - RNA, 23 nt, Human
gcucacugccuccucucuucgug

SEQ ID NO: 747896 - RNA, 18 nt, Human
gcucaggccgccacggcc

SEQ ID NO: 747897 - RNA, 21 nt, Human
uaagccccaaaacacaaaaca

SEQ ID NO: 747898 - RNA, 26 nt, Human
uaagccccaaaacacaaaacaaccaa

SEQ ID NO: 747899 - RNA, 30 nt, Human
uaagccccaaaacacaaaacaaccaaaagg

SEQ ID NO: 747900 - RNA, 20 nt, Human
uagucauaaaagcauuugaa

SEQ ID NO: 747901 - RNA, 21 nt, Human
uauuaacaaauauggagaaau

SEQ ID NO: 747902 - RNA, 18 nt, Human
ucacugccuccucucuuc

SEQ ID NO: 747903 - RNA, 23 nt, Human
uccauuuuguuuuauugucuuuu

SEQ ID NO: 747904 - RNA, 18 nt, Human
uccccuaacugguaacau

SEQ ID NO: 747905 - RNA, 20 nt, Human
ucccuagaucacaacagcuu

SEQ ID NO: 747906 - RNA, 20 nt, Human
ucucguccuguugcucacug

SEQ ID NO: 747907 - RNA, 23 nt, Human
ucucguccuguugcucacugccu

SEQ ID NO: 747908 - RNA, 24 nt, Human
ugaaaauaaaagucuuccccuaac

SEQ ID NO: 747909 - RNA, 25 nt, Human
uuaaaaaaugccgaaaaugagauau

SEQ ID NO: 747910 - RNA, 24 nt, Human
uuacauuuuaaaaaaugccgaaaa

SEQ ID NO: 747911 - RNA, 22 nt, Human
uucccuagaucacaacagcuua

SEQ ID NO: 747912 - RNA, 23 nt, Human
uuuaaaaaaugccgaaaaugaga

SEQ ID NO: 747913 - RNA, 22 nt, Human
uuucaguuuugacugccacucc

SEQ ID NO: 747914 - RNA, 26 nt, Human
aaaaaaaaaaaaaaaggucuugggag

SEQ ID NO: 747915 - RNA, 26 nt, Human
aacagugugguguuucuguacaggcc

SEQ ID NO: 747916 - RNA, 22 nt, Human
aagcaaaaaggaggaaacaacc

SEQ ID NO: 747917 - RNA, 23 nt, Human
aagcaaaaaggaggaaacaaccc

SEQ ID NO: 747918 - RNA, 19 nt, Human
acuuccagaaaugcagaaa

SEQ ID NO: 747919 - RNA, 20 nt, Human
aggaggaaacaacccaccaa

SEQ ID NO: 747920 - RNA, 23 nt, Human
caaaagcaaaaaggaggaaacaa

SEQ ID NO: 747921 - RNA, 22 nt, Human
caagagauguuuguacaaccau

SEQ ID NO: 747922 - RNA, 24 nt, Human
cacuguucacaaaagcaaaaagga

SEQ ID NO: 747923 - RNA, 18 nt, Human
cagucacaaccagaucga

SEQ ID NO: 747924 - RNA, 20 nt, Human
ccagauccagcaauuccacu

SEQ ID NO: 747925 - RNA, 23 nt, Human
cccuggagcccacgagguuccuu

SEQ ID NO: 747926 - RNA, 21 nt, Human
ccucaaaaaauuaaaaaggga

SEQ ID NO: 747927 - RNA, 19 nt, Human
ccugagaacgaaagaaaau

SEQ ID NO: 747928 - RNA, 24 nt, Human
ccugagaacgaaagaaaaugcuga

SEQ ID NO: 747929 - RNA, 19 nt, Human
cgaaagaaaaugcugacac

SEQ ID NO: 747930 - RNA, 23 nt, Human
cugcggccuccuaaaagucuccc

SEQ ID NO: 747931 - RNA, 18 nt, Human
cuuaaaaaaaaaaaaaaa

SEQ ID NO: 747932 - RNA, 18 nt, Human
cuuaaaaaaaaaaaaaaa

SEQ ID NO: 747933 - RNA, 24 nt, Human
gagcuaccagauccagcaauucca

SEQ ID NO: 747934 - RNA, 21 nt, Human
gaggaaaaacugauccgguga

SEQ ID NO: 747935 - RNA, 19 nt, Human
gcaaaaaggaggaaacaac

SEQ ID NO: 747936 - RNA, 19 nt, Human
gccugggucccuggagccc

SEQ ID NO: 747937 - RNA, 23 nt, Human
gucacaaccagaucgagaugauu

SEQ ID NO: 747938 - RNA, 19 nt, Human
uaaaaagggagcuaccaga

SEQ ID NO: 747939 - RNA, 24 nt, Human
uaagugaaauaaaccagucacaaa

SEQ ID NO: 747940 - RNA, 22 nt, Human
uacaacauggauacaccuuuaa

SEQ ID NO: 747941 - RNA, 21 nt, Human
uccagaaaugcagaaacacau

SEQ ID NO: 747942 - RNA, 24 nt, Human
ucccuggagcccacgagguuccug

SEQ ID NO: 747943 - RNA, 24 nt, Human
ugaaugaaugcaugaaacauggug

SEQ ID NO: 747944 - RNA, 18 nt, Human
ugacgaggagacacggca

SEQ ID NO: 747945 - RNA, 24 nt, Human
ugcagaaacacaucuuuucuucuu

SEQ ID NO: 747946 - RNA, 24 nt, Human
ugcagaaacacaucuuuucuucuu

SEQ ID NO: 747947 - RNA, 22 nt, Human
ugcuacaacauggauacaccuu

SEQ ID NO: 747948 - RNA, 18 nt, Human
uggaaggcugcggccucc

SEQ ID NO: 747949 - RNA, 21 nt, Human
ugggccugggucccuggagcc

SEQ ID NO: 747950 - RNA, 20 nt, Human
uuaaaaaaaaaaaaaaaaaa

SEQ ID NO: 747951 - RNA, 20 nt, Human
uuaaaaaaaaaaaaaaaaaa

SEQ ID NO: 747952 - RNA, 22 nt, Human
uuguacaaccauguucguagca

SEQ ID NO: 747953 - RNA, 18 nt, Human
aacugccugcgccggggc

SEQ ID NO: 747954 - RNA, 24 nt, Human
aagcccccacaagggaaccggggg

SEQ ID NO: 747955 - RNA, 22 nt, Human
acggaaccuaagaagaacugcc

SEQ ID NO: 747956 - RNA, 20 nt, Human
agcaagggggcccaggggga

SEQ ID NO: 747957 - RNA, 18 nt, Human
agcugccaaagcccccac

SEQ ID NO: 747958 - RNA, 23 nt, Human
aggaauggggaggaugagaggga

SEQ ID NO: 747959 - RNA, 18 nt, Human
aggagcaagggggcccag

SEQ ID NO: 747960 - RNA, 21 nt, Human
aggauggaggagcaagggggc

SEQ ID NO: 747961 - RNA, 19 nt, Human
auggggaggaugagaggga

SEQ ID NO: 747962 - RNA, 19 nt, Human
caaagcccccacaagggaa

SEQ ID NO: 747963 - RNA, 23 nt, Human
caaagcccccacaagggaaccgg

SEQ ID NO: 747964 - RNA, 18 nt, Human
cacguccaugcucccagg

SEQ ID NO: 747965 - RNA, 22 nt, Human
ccacguccaugcucccaggccu

SEQ ID NO: 747966 - RNA, 20 nt, Human
ccagggggaagaacagcaga

SEQ ID NO: 747967 - RNA, 19 nt, Human
cgcccaagcacaccggaca

SEQ ID NO: 747968 - RNA, 19 nt, Human
cuaaagcuacacugcacug

SEQ ID NO: 747969 - RNA, 20 nt, Human
cuuaaacuaaagcuacacug

SEQ ID NO: 747970 - RNA, 20 nt, Human
gaacugccugcgccggggcc

SEQ ID NO: 747971 - RNA, 19 nt, Human
gagacggaaccuaagaaga

SEQ ID NO: 747972 - RNA, 22 nt, Human
gaggagcaagggggcccagggg

SEQ ID NO: 747973 - RNA, 18 nt, Human
gaggauggaggagcaagg

SEQ ID NO: 747974 - RNA, 26 nt, Human
gaggauggaggagcaagggggcccag

SEQ ID NO: 747975 - RNA, 23 nt, Human
gcccccacaagggaaccgggggc

SEQ ID NO: 747976 - RNA, 23 nt, Human
gccucaguuccugggcuccuugg

SEQ ID NO: 747977 - RNA, 19 nt, Human
gcugccaaagcccccacaa

SEQ ID NO: 747978 - RNA, 21 nt, Human
ggaggagcaagggggcccagg

SEQ ID NO: 747979 - RNA, 22 nt, Human
ggaggagcaagggggcccaggg

SEQ ID NO: 747980 - RNA, 23 nt, Human
ggcagagguaggagagcuuggau

SEQ ID NO: 747981 - RNA, 23 nt, Human
gggcccagggggaagaacagcag

SEQ ID NO: 747982 - RNA, 18 nt, Human
uaagaagaacugccugcg

SEQ ID NO: 747983 - RNA, 26 nt, Human
uagcugccaaagcccccacaagggaa

SEQ ID NO: 747984 - RNA, 22 nt, Human
uauuuugguucuuccauagcug

SEQ ID NO: 747985 - RNA, 23 nt, Human
uccauagcugccaaagcccccac

SEQ ID NO: 747986 - RNA, 22 nt, Human
ucgccucaguuccugggcuccu

SEQ ID NO: 747987 - RNA, 26 nt, Human
ugagacggaaccuaagaagaacugcc

SEQ ID NO: 747988 - RNA, 18 nt, Human
ugagagaaugaggaugga

SEQ ID NO: 747989 - RNA, 20 nt, Human
ugagagaaugaggauggagg

SEQ ID NO: 747990 - RNA, 19 nt, Human
ugagagggacggcugggca

SEQ ID NO: 747991 - RNA, 22 nt, Human
ugagguugugcugucccuugaa

SEQ ID NO: 747992 - RNA, 22 nt, Human
ugcgaugccgcccaagcacacc

SEQ ID NO: 747993 - RNA, 19 nt, Human
ugcgccggggcgggcgggu

SEQ ID NO: 747994 - RNA, 20 nt, Human
ugggcagagguaggagagcu

SEQ ID NO: 747995 - RNA, 20 nt, Human
cagcaaacaggaagcacuac

SEQ ID NO: 747996 - RNA, 22 nt, Human
cagccccgugacucuggggcug

SEQ ID NO: 747997 - RNA, 22 nt, Human
cagcucccgcccccucagcccc

SEQ ID NO: 747998 - RNA, 22 nt, Human
ccccucagccccgugacucugg

SEQ ID NO: 747999 - RNA, 23 nt, Human
ccgcccccucagccccgugacuc

SEQ ID NO: 748000 - RNA, 23 nt, Human
ccuaugacaggggcagcucccgc

SEQ ID NO: 748001 - RNA, 18 nt, Human
ccucccuaugacaggggc

SEQ ID NO: 748002 - RNA, 22 nt, Human
cucccaccgcccggcucagccc

SEQ ID NO: 748003 - RNA, 19 nt, Human
cucccgcccccucagcccc

SEQ ID NO: 748004 - RNA, 21 nt, Human
cucccgcccccucagccccgu

SEQ ID NO: 748005 - RNA, 18 nt, Human
cugggaaucccccucccu

SEQ ID NO: 748006 - RNA, 18 nt, Human
cugggaaucccccucccu

SEQ ID NO: 748007 - RNA, 19 nt, Human
gcaaacaggaagcacuaca

SEQ ID NO: 748008 - RNA, 18 nt, Human
uagguguuuccugcaucu

SEQ ID NO: 748009 - RNA, 19 nt, Human
ucagccccgugacucuggg

SEQ ID NO: 748010 - RNA, 23 nt, Human
ucagccccgugacucuggggcug

SEQ ID NO: 748011 - RNA, 18 nt, Human
ucccgcccccucagcccc

SEQ ID NO: 748012 - RNA, 21 nt, Human
ucccuaugacaggggcagcuc

SEQ ID NO: 748013 - RNA, 19 nt, Human
ugacaggggcagcucccgc

SEQ ID NO: 748014 - RNA, 20 nt, Human
ugacaggggcagcucccgcc

SEQ ID NO: 748015 - RNA, 24 nt, Human
ugacaggggcagcucccgcccccu

SEQ ID NO: 748016 - RNA, 22 nt, Human
aagccggcagccaagcuuuguc

SEQ ID NO: 748017 - RNA, 26 nt, Human
acaaauuuuuaaaaaauggaacaaaa

SEQ ID NO: 748018 - RNA, 23 nt, Human
accacuguuuugcaaagaaugaa

SEQ ID NO: 748019 - RNA, 23 nt, Human
acccaaccuucagcaagacagca

SEQ ID NO: 748020 - RNA, 20 nt, Human
accugugucacacccucccu

SEQ ID NO: 748021 - RNA, 18 nt, Human
agaaaguaccaagcaagg

SEQ ID NO: 748022 - RNA, 18 nt, Human
agaauggacauccuggcc

SEQ ID NO: 748023 - RNA, 19 nt, Human
aggacuucaaucccuagcc

SEQ ID NO: 748024 - RNA, 20 nt, Human
agggggagcgcaagcgcugu

SEQ ID NO: 748025 - RNA, 21 nt, Human
auagcaccaucugugacccua

SEQ ID NO: 748026 - RNA, 21 nt, Human
caacuuaggaagccaucuccc

SEQ ID NO: 748027 - RNA, 20 nt, Human
cagcaccgaugggccuagaa

SEQ ID NO: 748028 - RNA, 19 nt, Human
cagguccagaaaguaccaa

SEQ ID NO: 748029 - RNA, 24 nt, Human
caguccaucuuucugcccuucuca

SEQ ID NO: 748030 - RNA, 21 nt, Human
ccacagucccuuuagaugccu

SEQ ID NO: 748031 - RNA, 19 nt, Human
ccaggauccaaaggcccuu

SEQ ID NO: 748032 - RNA, 19 nt, Human
cccuagacccugagcacgu

SEQ ID NO: 748033 - RNA, 22 nt, Human
cccucaggcucaggcaccuucc

SEQ ID NO: 748034 - RNA, 18 nt, Human
ccugacccaaccuucagc

SEQ ID NO: 748035 - RNA, 21 nt, Human
ccuuaccacagucccuuuaga

SEQ ID NO: 748036 - RNA, 19 nt, Human
ccuucucauaaagacccuu

SEQ ID NO: 748037 - RNA, 23 nt, Human
ccuuuagaugccugacccaaccu

SEQ ID NO: 748038 - RNA, 20 nt, Human
cguccaguacuggaagugga

SEQ ID NO: 748039 - RNA, 23 nt, Human
cuagccagcuaggaacuuacagu

SEQ ID NO: 748040 - RNA, 19 nt, Human
cuccagauacuuucgguac

SEQ ID NO: 748041 - RNA, 23 nt, Human
cucuacuugcuggccccuccagg

SEQ ID NO: 748042 - RNA, 18 nt, Human
cuguaccacuguuuugca

SEQ ID NO: 748043 - RNA, 21 nt, Human
cuuacaccugugucacacccu

SEQ ID NO: 748044 - RNA, 18 nt, Human
cuuccaguccaucuuucu

SEQ ID NO: 748045 - RNA, 20 nt, Human
cuuguggaaagacucaggcu

SEQ ID NO: 748046 - RNA, 22 nt, Human
cuuguuuggcccucaggcucag

SEQ ID NO: 748047 - RNA, 19 nt, Human
cuuuuggcaaugguauugg

SEQ ID NO: 748048 - RNA, 21 nt, Human
gaacagguagacagugucaag

SEQ ID NO: 748049 - RNA, 21 nt, Human
gagcaccuuguggaaagacuc

SEQ ID NO: 748050 - RNA, 21 nt, Human
ggagagggccgugguucuuug

SEQ ID NO: 748051 - RNA, 21 nt, Human
ggauggaagacagaugcuucu

SEQ ID NO: 748052 - RNA, 26 nt, Human
ggcuccuagaaccuuugcaacaauuc

SEQ ID NO: 748053 - RNA, 18 nt, Human
gggaaggguagucagagc

SEQ ID NO: 748054 - RNA, 27 nt, Human
gggcauccucaauacugucauggguuu

SEQ ID NO: 748055 - RNA, 22 nt, Human
guauagccaacuuaggaagcca

SEQ ID NO: 748056 - RNA, 22 nt, Human
guccuugggcaccuggcaagga

SEQ ID NO: 748057 - RNA, 23 nt, Human
uaagaauaccaauuacuuuccau

SEQ ID NO: 748058 - RNA, 18 nt, Human
uacuugcuggccccucca

SEQ ID NO: 748059 - RNA, 19 nt, Human
uagaacgaguagggggagc

SEQ ID NO: 748060 - RNA, 24 nt, Human
uagaugccugacccaaccuucagc

SEQ ID NO: 748061 - RNA, 18 nt, Human
uagcaccaucugugaccc

SEQ ID NO: 748062 - RNA, 19 nt, Human
uaucccugaagcaguuggu

SEQ ID NO: 748063 - RNA, 22 nt, Human
ucauggguuuccccuugaaucu

SEQ ID NO: 748064 - RNA, 20 nt, Human
uccaggagcuucucugccug

SEQ ID NO: 748065 - RNA, 22 nt, Human
uccauggcggauauuuuggagc

SEQ ID NO: 748066 - RNA, 21 nt, Human
uccuugggcaccuggcaagga

SEQ ID NO: 748067 - RNA, 23 nt, Human
uccuugggcaccuggcaaggaua

SEQ ID NO: 748068 - RNA, 26 nt, Human
ucuacuugcuggccccuccaggucgg

SEQ ID NO: 748069 - RNA, 19 nt, Human
ucucccaguucuggggcuu

SEQ ID NO: 748070 - RNA, 23 nt, Human
ucuguaccacuguuuugcaaaga

SEQ ID NO: 748071 - RNA, 19 nt, Human
ucuuugggaaggguaguca

SEQ ID NO: 748072 - RNA, 23 nt, Human
ugaagaaggaaugaaucuggcuc

SEQ ID NO: 748073 - RNA, 18 nt, Human
ugacccaaccuucagcaa

SEQ ID NO: 748074 - RNA, 21 nt, Human
uggaacagguagacaguguca

SEQ ID NO: 748075 - RNA, 21 nt, Human
ugucauggguuuccccuugaa

SEQ ID NO: 748076 - RNA, 26 nt, Human
uguggaaagacucaggcucagugcca

SEQ ID NO: 748077 - RNA, 19 nt, Human
uuagaugccugacccaacc

SEQ ID NO: 748078 - RNA, 19 nt, Human
uugggaaggguagucagag

SEQ ID NO: 748079 - RNA, 23 nt, Human
uugggacuuguuuggcccucagg

SEQ ID NO: 748080 - RNA, 22 nt, Human
uuugcuugggccaccaacacuc

SEQ ID NO: 748081 - RNA, 18 nt, Human
aaaaacacugcucauggc

SEQ ID NO: 748082 - RNA, 18 nt, Human
aaaaagcaaaaacacugc

SEQ ID NO: 748083 - RNA, 19 nt, Human
aaaagacaccacugccuuu

SEQ ID NO: 748084 - RNA, 22 nt, Human
aaaaggcaggacagugugaaug

SEQ ID NO: 748085 - RNA, 23 nt, Human
aaacccuagcggcuccacacccc

SEQ ID NO: 748086 - RNA, 21 nt, Human
aaagcaaagcgaaagcggccc

SEQ ID NO: 748087 - RNA, 20 nt, Human
aaauaauauuaaaguaggca

SEQ ID NO: 748088 - RNA, 21 nt, Human
aaccacagacucuuuaaaaag

SEQ ID NO: 748089 - RNA, 22 nt, Human
aaccuauuuuucaauuacccac

SEQ ID NO: 748090 - RNA, 22 nt, Human
aagcaaaaggaaagcaaagcga

SEQ ID NO: 748091 - RNA, 23 nt, Human
aaugauuuuccccgcuuuuuagg

SEQ ID NO: 748092 - RNA, 19 nt, Human
acacugguccugugugcug

SEQ ID NO: 748093 - RNA, 22 nt, Human
accaggugucucucucugcagc

SEQ ID NO: 748094 - RNA, 19 nt, Human
accugggccccgcaaaccc

SEQ ID NO: 748095 - RNA, 18 nt, Human
acgcagacuuagaacacc

SEQ ID NO: 748096 - RNA, 19 nt, Human
acuccgggguuuccagccu

SEQ ID NO: 748097 - RNA, 20 nt, Human
acugagaccucucauaacca

SEQ ID NO: 748098 - RNA, 24 nt, Human
acuggauuaacaaacaaauaauau

SEQ ID NO: 748099 - RNA, 22 nt, Human
acuugagggucccaggcuccug

SEQ ID NO: 748100 - RNA, 20 nt, Human
agacucagaaaccaaauccc

SEQ ID NO: 748101 - RNA, 19 nt, Human
agaguccccuuaugggcuc

SEQ ID NO: 748102 - RNA, 19 nt, Human
agcacaugguacgaaauuu

SEQ ID NO: 748103 - RNA, 23 nt, Human
agccaugggaaccgcacaggacu

SEQ ID NO: 748104 - RNA, 22 nt, Human
agccuuacuccgggguuuccag

SEQ ID NO: 748105 - RNA, 23 nt, Human
aggaagcugugcuacaucuagug

SEQ ID NO: 748106 - RNA, 26 nt, Human
aggcaugugaguuugaguagcaaugg

SEQ ID NO: 748107 - RNA, 19 nt, Human
aguucaugaguaaccaugg

SEQ ID NO: 748108 - RNA, 19 nt, Human
aucacuauucagaacugug

SEQ ID NO: 748109 - RNA, 19 nt, Human
augaaacgcuggaaagcca

SEQ ID NO: 748110 - RNA, 24 nt, Human
augggcucuccuucucuguggcuc

SEQ ID NO: 748111 - RNA, 20 nt, Human
augguguggggaaggaaaua

SEQ ID NO: 748112 - RNA, 22 nt, Human
caaaaagcaaaaacacugcuca

SEQ ID NO: 748113 - RNA, 24 nt, Human
caaaagacaaaagaacguugaaaa

SEQ ID NO: 748114 - RNA, 21 nt, Human
caaaaugaaagccacaccuug

SEQ ID NO: 748115 - RNA, 21 nt, Human
caaacauacgaggcucugcac

SEQ ID NO: 748116 - RNA, 20 nt, Human
caaagcgaaagcggcccuga

SEQ ID NO: 748117 - RNA, 26 nt, Human
caaccaaagcgagcacaugguacgag

SEQ ID NO: 748118 - RNA, 22 nt, Human
caagcagacacguccccagaac

SEQ ID NO: 748119 - RNA, 20 nt, Human
caauagguuggccggacauc

SEQ ID NO: 748120 - RNA, 22 nt, Human
caauccaaauccauccacuugg

SEQ ID NO: 748121 - RNA, 21 nt, Human
cacagaucacaacagcugccc

SEQ ID NO: 748122 - RNA, 24 nt, Human
cacagaucacaacagcugcccuga

SEQ ID NO: 748123 - RNA, 23 nt, Human
cacagugucugugccgggugccc

SEQ ID NO: 748124 - RNA, 23 nt, Human
caccccagggacuggcccccaaa

SEQ ID NO: 748125 - RNA, 22 nt, Human
caccuggggcuuugcugccggg

SEQ ID NO: 748126 - RNA, 23 nt, Human
cacgauccacauugaaaacauca

SEQ ID NO: 748127 - RNA, 20 nt, Human
cacguccccagaacauaccg

SEQ ID NO: 748128 - RNA, 20 nt, Human
cagaacacagaaagcugaga

SEQ ID NO: 748129 - RNA, 21 nt, Human
cagaacauaccguaacccaga

SEQ ID NO: 748130 - RNA, 21 nt, Human
cagaagcaaagacaagcaaaa

SEQ ID NO: 748131 - RNA, 20 nt, Human
cagcaaugccucugcccucc

SEQ ID NO: 748132 - RNA, 22 nt, Human
caggugucucucucugcagccu

SEQ ID NO: 748133 - RNA, 20 nt, Human
cagugauaacagcauaugag

SEQ ID NO: 748134 - RNA, 25 nt, Human
caucaaggcaauagccucaucuaac

SEQ ID NO: 748135 - RNA, 22 nt, Human
caucagaacuacacgauccaca

SEQ ID NO: 748136 - RNA, 22 nt, Human
caucucaaaugaaccuugauug

SEQ ID NO: 748137 - RNA, 23 nt, Human
caugggcaagcagacacgucccc

SEQ ID NO: 748138 - RNA, 25 nt, Human
cauuuggaaaggccccugcguaugg

SEQ ID NO: 748139 - RNA, 23 nt, Human
ccaaagggaccugggccccgcaa

SEQ ID NO: 748140 - RNA, 18 nt, Human
ccaacauccagcaaugac

SEQ ID NO: 748141 - RNA, 21 nt, Human
ccaacuucagagccuugauuu

SEQ ID NO: 748142 - RNA, 19 nt, Human
ccagaaauuagcagaaaca

SEQ ID NO: 748143 - RNA, 21 nt, Human
ccagaacacagaaagcugaga

SEQ ID NO: 748144 - RNA, 21 nt, Human
ccagaucauaaauuccagccc

SEQ ID NO: 748145 - RNA, 19 nt, Human
ccagcacagugucugugcc

SEQ ID NO: 748146 - RNA, 22 nt, Human
ccauccaacauccaccacuucu

SEQ ID NO: 748147 - RNA, 25 nt, Human
cccaaaaagcaaaaacacugcucau

SEQ ID NO: 748148 - RNA, 18 nt, Human
cccaaaagacaccacugc

SEQ ID NO: 748149 - RNA, 19 nt, Human
ccccaaaaagcaaaaacac

SEQ ID NO: 748150 - RNA, 20 nt, Human
ccccaaaaagcaaaaacacu

SEQ ID NO: 748151 - RNA, 21 nt, Human
ccccaaaagacaccacugccu

SEQ ID NO: 748152 - RNA, 19 nt, Human
ccccacuguacccugaggc

SEQ ID NO: 748153 - RNA, 20 nt, Human
cccccgccucgccuuugccc

SEQ ID NO: 748154 - RNA, 19 nt, Human
ccccgccucgccuuugccc

SEQ ID NO: 748155 - RNA, 21 nt, Human
cccgacuccccaccacguccu

SEQ ID NO: 748156 - RNA, 22 nt, Human
cccgcaaaccccugccgaggga

SEQ ID NO: 748157 - RNA, 21 nt, Human
cccucgcucucaggaguccgu

SEQ ID NO: 748158 - RNA, 18 nt, Human
ccgaaguuccaaauccag

SEQ ID NO: 748159 - RNA, 23 nt, Human
ccgcacaggacugugcaaccacc

SEQ ID NO: 748160 - RNA, 19 nt, Human
ccuauaaaaggccaaucaa

SEQ ID NO: 748161 - RNA, 21 nt, Human
ccuauuuccaaaucguuuaca

SEQ ID NO: 748162 - RNA, 18 nt, Human
ccucaggaacccccacug

SEQ ID NO: 748163 - RNA, 24 nt, Human
ccucaggaacccccacuguacccu

SEQ ID NO: 748164 - RNA, 19 nt, Human
ccucggggcuccuucgaag

SEQ ID NO: 748165 - RNA, 23 nt, Human
ccugcagcagucccaaaaugaaa

SEQ ID NO: 748166 - RNA, 21 nt, Human
ccugcaggucuggccaagguc

SEQ ID NO: 748167 - RNA, 24 nt, Human
ccugggccccgcaaaccccugccg

SEQ ID NO: 748168 - RNA, 19 nt, Human
ccuuugcccucuccucucc

SEQ ID NO: 748169 - RNA, 22 nt, Human
ccuuuugcuguaaauacuguuu

SEQ ID NO: 748170 - RNA, 24 nt, Human
cgaaguguccaaaccaccagcgug

SEQ ID NO: 748171 - RNA, 20 nt, Human
cgagggagacgcccgccgac

SEQ ID NO: 748172 - RNA, 23 nt, Human
cgagucagacauuuggaaaugcc

SEQ ID NO: 748173 - RNA, 21 nt, Human
cgccaggaccgcgucagccaa

SEQ ID NO: 748174 - RNA, 22 nt, Human
cgcgcccccgguuccgcagccu

SEQ ID NO: 748175 - RNA, 24 nt, Human
cgcgucagccaacauccagcaaug

SEQ ID NO: 748176 - RNA, 24 nt, Human
cggccacacuuagaauacugauug

SEQ ID NO: 748177 - RNA, 21 nt, Human
cgggcccaaagggaccugggc

SEQ ID NO: 748178 - RNA, 23 nt, Human
cguaacccagaucauaaauucca

SEQ ID NO: 748179 - RNA, 20 nt, Human
cucaaggcauccacccccaa

SEQ ID NO: 748180 - RNA, 25 nt, Human
cucaaggcauccacccccagaagca

SEQ ID NO: 748181 - RNA, 21 nt, Human
cucacggggcaggacccuucc

SEQ ID NO: 748182 - RNA, 24 nt, Human
cucgccuuugcccucuccucucca

SEQ ID NO: 748183 - RNA, 22 nt, Human
cucggcaugaacugacaaacau

SEQ ID NO: 748184 - RNA, 20 nt, Human
cucggccacacuuagaauac

SEQ ID NO: 748185 - RNA, 19 nt, Human
cucuccucuccagcgagga

SEQ ID NO: 748186 - RNA, 27 nt, Human
cugaaccccagccacuuuaaaucugcc

SEQ ID NO: 748187 - RNA, 21 nt, Human
cugcagcuuccuuugcuggga

SEQ ID NO: 748188 - RNA, 22 nt, Human
cugccagcacagugucugugcc

SEQ ID NO: 748189 - RNA, 18 nt, Human
cugcccucccugcagcag

SEQ ID NO: 748190 - RNA, 22 nt, Human
cugcccucccugcagcaguccc

SEQ ID NO: 748191 - RNA, 22 nt, Human
cugccgggccccacaggaagcu

SEQ ID NO: 748192 - RNA, 23 nt, Human
cugcgcccgcgcgcccccgguuc

SEQ ID NO: 748193 - RNA, 19 nt, Human
cuucugaaccccagccacu

SEQ ID NO: 748194 - RNA, 24 nt, Human
cuugcugaacuucugaaccccagc

SEQ ID NO: 748195 - RNA, 21 nt, Human
cuuugcugccgggccccacag

SEQ ID NO: 748196 - RNA, 25 nt, Human
cuuuuuggaguugagccaaccaaag

SEQ ID NO: 748197 - RNA, 20 nt, Human
gaacacagaaagcugagacc

SEQ ID NO: 748198 - RNA, 19 nt, Human
gaacuucugaaccccagcc

SEQ ID NO: 748199 - RNA, 18 nt, Human
gaauacaaaaaugcacuu

SEQ ID NO: 748200 - RNA, 24 nt, Human
gacaccacugccuuuucagacauu

SEQ ID NO: 748201 - RNA, 23 nt, Human
gacaccagaaauuagcagaaaca

SEQ ID NO: 748202 - RNA, 18 nt, Human
gacugugcaaccaccccc

SEQ ID NO: 748203 - RNA, 18 nt, Human
gagacgcccgccgacccc

SEQ ID NO: 748204 - RNA, 25 nt, Human
gcaaaagacaaaagaacguugaaaa

SEQ ID NO: 748205 - RNA, 24 nt, Human
gcaaugccucugcccucccugcag

SEQ ID NO: 748206 - RNA, 25 nt, Human
gccccgacuccccaccacguccucc

SEQ ID NO: 748207 - RNA, 26 nt, Human
gcgcccccagaacacaggauacaaua

SEQ ID NO: 748208 - RNA, 21 nt, Human
gcugucauaucaccgcgcccc

SEQ ID NO: 748209 - RNA, 22 nt, Human
ggaaggcucaagcucauuccuc

SEQ ID NO: 748210 - RNA, 22 nt, Human
ggaggacacugguccccuuaaa

SEQ ID NO: 748211 - RNA, 18 nt, Human
ggcaagcagacacguccc

SEQ ID NO: 748212 - RNA, 23 nt, Human
ggcuacacaacugcaaggucacg

SEQ ID NO: 748213 - RNA, 18 nt, Human
gggacaccccggggccgg

SEQ ID NO: 748214 - RNA, 23 nt, Human
gggagacgcccgccgaccccgcc

SEQ ID NO: 748215 - RNA, 19 nt, Human
gggcaagcagacacguccc

SEQ ID NO: 748216 - RNA, 21 nt, Human
gggccccgcaaaccccugccg

SEQ ID NO: 748217 - RNA, 26 nt, Human
gggggauguuaggagaagccgcugug

SEQ ID NO: 748218 - RNA, 21 nt, Human
ggguuuccagccucacagcuu

SEQ ID NO: 748219 - RNA, 23 nt, Human
uaaaaugaacauuauuuguuucc

SEQ ID NO: 748220 - RNA, 23 nt, Human
uaaaucagaaagagcuuuacuua

SEQ ID NO: 748221 - RNA, 20 nt, Human
uaacagcauaugaguuugau

SEQ ID NO: 748222 - RNA, 20 nt, Human
uaacauugcagaaggggaaa

SEQ ID NO: 748223 - RNA, 21 nt, Human
uaacauugcagaaggggaaau

SEQ ID NO: 748224 - RNA, 25 nt, Human
uaacauuuuccccaaaagacaccac

SEQ ID NO: 748225 - RNA, 23 nt, Human
uacaaccauuucuccaguauacu

SEQ ID NO: 748226 - RNA, 22 nt, Human
uacacagaucacaacagcugcc

SEQ ID NO: 748227 - RNA, 19 nt, Human
uacagaguggacuaucaaa

SEQ ID NO: 748228 - RNA, 23 nt, Human
uacuccgggguuuccagccucac

SEQ ID NO: 748229 - RNA, 19 nt, Human
uacucuuuuuggaguugag

SEQ ID NO: 748230 - RNA, 18 nt, Human
uagcagaaacagagcaga

SEQ ID NO: 748231 - RNA, 19 nt, Human
uagccaaagaauuuccaca

SEQ ID NO: 748232 - RNA, 19 nt, Human
uagccaaagaauuuccaca

SEQ ID NO: 748233 - RNA, 19 nt, Human
uagcggcuccacaccccag

SEQ ID NO: 748234 - RNA, 23 nt, Human
uaggagaagccgcugugcuccug

SEQ ID NO: 748235 - RNA, 24 nt, Human
uaucagaaaguugauugauuuuua

SEQ ID NO: 748236 - RNA, 20 nt, Human
uauccuuuuccggggacagu

SEQ ID NO: 748237 - RNA, 21 nt, Human
ucacacgcugcucccccgccu

SEQ ID NO: 748238 - RNA, 18 nt, Human
ucagacauuuggaaaggc

SEQ ID NO: 748239 - RNA, 22 nt, Human
ucauaucaccgcgcccccagaa

SEQ ID NO: 748240 - RNA, 19 nt, Human
ucauccguaauucacugcc

SEQ ID NO: 748241 - RNA, 22 nt, Human
uccaaaccaccagcguggccag

SEQ ID NO: 748242 - RNA, 21 nt, Human
uccaaaucguuuacaggaagu

SEQ ID NO: 748243 - RNA, 18 nt, Human
uccagcuggcgccaggac

SEQ ID NO: 748244 - RNA, 21 nt, Human
ucccaagaugauuaaccaagu

SEQ ID NO: 748245 - RNA, 19 nt, Human
ucccacuuguggcuacaca

SEQ ID NO: 748246 - RNA, 22 nt, Human
ucccucuuugcaacgcuggcug

SEQ ID NO: 748247 - RNA, 20 nt, Human
ucccugcagcagucccaaaa

SEQ ID NO: 748248 - RNA, 26 nt, Human
uccgcgggcccaaagggaccugggcc

SEQ ID NO: 748249 - RNA, 23 nt, Human
uccggggacaguguuacucugga

SEQ ID NO: 748250 - RNA, 19 nt, Human
uccgggguuuccagccucc

SEQ ID NO: 748251 - RNA, 21 nt, Human
uccucgccgcggcuccucuuc

SEQ ID NO: 748252 - RNA, 24 nt, Human
uccuggcacgcgaucagauuucac

SEQ ID NO: 748253 - RNA, 20 nt, Human
uccugggucucaaggcaucc

SEQ ID NO: 748254 - RNA, 24 nt, Human
uccuucucuguggcucccacuugu

SEQ ID NO: 748255 - RNA, 18 nt, Human
ucgccgcggcuccucuuc

SEQ ID NO: 748256 - RNA, 24 nt, Human
ucgccgcggcuccucuucagccgc

SEQ ID NO: 748257 - RNA, 22 nt, Human
ucuaacuauuuuaaugggugga

SEQ ID NO: 748258 - RNA, 18 nt, Human
ucugaagcuccugccagc

SEQ ID NO: 748259 - RNA, 18 nt, Human
ucugaagcuccugccagc

SEQ ID NO: 748260 - RNA, 22 nt, Human
ucugcacuauuuaugcccagga

SEQ ID NO: 748261 - RNA, 20 nt, Human
ucugugccgggugcccgaag

SEQ ID NO: 748262 - RNA, 24 nt, Human
ucuucagccgccgggcccgggacg

SEQ ID NO: 748263 - RNA, 24 nt, Human
ugaaaaguaaaauguuaaaugaga

SEQ ID NO: 748264 - RNA, 21 nt, Human
ugaaacgcuggaaagccaugg

SEQ ID NO: 748265 - RNA, 18 nt, Human
ugaaagcccccucggucc

SEQ ID NO: 748266 - RNA, 27 nt, Human
ugaauggaucuccagcuggcgccagga

SEQ ID NO: 748267 - RNA, 20 nt, Human
ugacagggagcaccuggggc

SEQ ID NO: 748268 - RNA, 25 nt, Human
ugaccccucucugcgugcuuccccc

SEQ ID NO: 748269 - RNA, 25 nt, Human
ugacuggagcugcaguugacugcgg

SEQ ID NO: 748270 - RNA, 25 nt, Human
ugaggugacagggagcaccuggggc

SEQ ID NO: 748271 - RNA, 19 nt, Human
ugcaggaagcagugcggag

SEQ ID NO: 748272 - RNA, 18 nt, Human
ugcccagaaagucuuggu

SEQ ID NO: 748273 - RNA, 20 nt, Human
ugcccagaaagucuugguga

SEQ ID NO: 748274 - RNA, 20 nt, Human
ugccucaggaacccccacug

SEQ ID NO: 748275 - RNA, 23 nt, Human
ugcucacccacucacuucacaug

SEQ ID NO: 748276 - RNA, 18 nt, Human
ugcugggauaucaggugu

SEQ ID NO: 748277 - RNA, 24 nt, Human
uggagcugcaguugacugcgguug

SEQ ID NO: 748278 - RNA, 20 nt, Human
uggaggagcuuugaucucac

SEQ ID NO: 748279 - RNA, 26 nt, Human
uggaggguguggcuuuucuguuucau

SEQ ID NO: 748280 - RNA, 24 nt, Human
uggaucccacagccuucucugugu

SEQ ID NO: 748281 - RNA, 26 nt, Human
uggccccaacuucagagccuugauuu

SEQ ID NO: 748282 - RNA, 20 nt, Human
ugggaaccgcacaggacugu

SEQ ID NO: 748283 - RNA, 20 nt, Human
uggugaauggaucuccagcu

SEQ ID NO: 748284 - RNA, 22 nt, Human
uggugaauggaucuccagcugg

SEQ ID NO: 748285 - RNA, 23 nt, Human
uggugauaagcacgucacuuccu

SEQ ID NO: 748286 - RNA, 28 nt, Human
uguggaaaacguggaaaugauguggcca

SEQ ID NO: 748287 - RNA, 19 nt, Human
uguggacagcugucaucaa

SEQ ID NO: 748288 - RNA, 22 nt, Human
uguggccccaacuucagagccu

SEQ ID NO: 748289 - RNA, 26 nt, Human
uguguccacgcuuuguugugugugug

SEQ ID NO: 748290 - RNA, 21 nt, Human
uguguccugucugucaaggga

SEQ ID NO: 748291 - RNA, 19 nt, Human
ugugugugaaggggggaau

SEQ ID NO: 748292 - RNA, 28 nt, Human
uucaauuacccacugauuucuacagaga

SEQ ID NO: 748293 - RNA, 18 nt, Human
uucacaaguaaaaucaca

SEQ ID NO: 748294 - RNA, 18 nt, Human
uucacugccagggggaug

SEQ ID NO: 748295 - RNA, 20 nt, Human
uuccaguaacuuuuccucuu

SEQ ID NO: 748296 - RNA, 24 nt, Human
uuccccaaaagacaccacugccuu

SEQ ID NO: 748297 - RNA, 20 nt, Human
uuccucuuacaguaagaaaa

SEQ ID NO: 748298 - RNA, 24 nt, Human
uucucuguggcucccacuuguggg

SEQ ID NO: 748299 - RNA, 25 nt, Human
uugccaagcuauccccucaguucau

SEQ ID NO: 748300 - RNA, 21 nt, Human
uuucauuuucaaacacuaaac

SEQ ID NO: 748301 - RNA, 21 nt, Human
uuuccagccucacagcuuuuc

SEQ ID NO: 748302 - RNA, 25 nt, Human
uuucugcagccugggugaccaggug

SEQ ID NO: 748303 - RNA, 21 nt, Human
aaccaaacacccucucuuuca

SEQ ID NO: 748304 - RNA, 21 nt, Human
aaccucaccaccacagguuaa

SEQ ID NO: 748305 - RNA, 22 nt, Human
aagaacugcggcacuucaaaac

SEQ ID NO: 748306 - RNA, 22 nt, Human
aagaacuuuacuuucuuccacc

SEQ ID NO: 748307 - RNA, 18 nt, Human
aagauuccccgcugcuuc

SEQ ID NO: 748308 - RNA, 24 nt, Human
aagauuccccgcugcuucagcuuc

SEQ ID NO: 748309 - RNA, 20 nt, Human
aagcaggaacacaacaggga

SEQ ID NO: 748310 - RNA, 24 nt, Human
aagcaggaacacaacagggaaugc

SEQ ID NO: 748311 - RNA, 20 nt, Human
aagcuagcccuagauggcaa

SEQ ID NO: 748312 - RNA, 20 nt, Human
aaggagaagcaggaacacaa

SEQ ID NO: 748313 - RNA, 22 nt, Human
aaggagaagcaggaacacaaca

SEQ ID NO: 748314 - RNA, 24 nt, Human
aagucuauagauggaagagggggu

SEQ ID NO: 748315 - RNA, 21 nt, Human
aauccaacugguuccaaccuc

SEQ ID NO: 748316 - RNA, 21 nt, Human
acagaauggauguccugaaca

SEQ ID NO: 748317 - RNA, 20 nt, Human
acccacagaauggauguccu

SEQ ID NO: 748318 - RNA, 21 nt, Human
acgaugccauaucucucaaug

SEQ ID NO: 748319 - RNA, 22 nt, Human
acggggcuuuaccauccuucag

SEQ ID NO: 748320 - RNA, 19 nt, Human
acugccggguuccagcugu

SEQ ID NO: 748321 - RNA, 24 nt, Human
acuucaaguuaggucccacaucac

SEQ ID NO: 748322 - RNA, 20 nt, Human
agacaaaaaugacaaagucc

SEQ ID NO: 748323 - RNA, 21 nt, Human
agacaaaaaugacaaagucua

SEQ ID NO: 748324 - RNA, 24 nt, Human
agauuccccgcugcuucagcuucu

SEQ ID NO: 748325 - RNA, 19 nt, Human
agcuacugaaggagaagca

SEQ ID NO: 748326 - RNA, 24 nt, Human
agcugguagguaagcagaggguuu

SEQ ID NO: 748327 - RNA, 23 nt, Human
aucgaugugaacugcucucaauu

SEQ ID NO: 748328 - RNA, 21 nt, Human
aucuguugcugcugaaacugc

SEQ ID NO: 748329 - RNA, 21 nt, Human
caaauacuaagaagaaaggac

SEQ ID NO: 748330 - RNA, 19 nt, Human
caaguguguccugagacag

SEQ ID NO: 748331 - RNA, 22 nt, Human
caccagaaaggcgauagauucc

SEQ ID NO: 748332 - RNA, 25 nt, Human
caccuaaagaaguuuccuuaaguac

SEQ ID NO: 748333 - RNA, 21 nt, Human
cagcagcaguuuucuuggccc

SEQ ID NO: 748334 - RNA, 25 nt, Human
cagcagcaguuuucuuggcccuguu

SEQ ID NO: 748335 - RNA, 24 nt, Human
caucacugccggguuccagcuguu

SEQ ID NO: 748336 - RNA, 23 nt, Human
caucaggauacaacagcucugcc

SEQ ID NO: 748337 - RNA, 19 nt, Human
cccaggucacaaccaaaca

SEQ ID NO: 748338 - RNA, 19 nt, Human
ccccgcugcuucagcuucu

SEQ ID NO: 748339 - RNA, 22 nt, Human
cccugcagcagcaguuuucuug

SEQ ID NO: 748340 - RNA, 25 nt, Human
cuaccaggaaaucgaugugaacugc

SEQ ID NO: 748341 - RNA, 19 nt, Human
cugcgcaaguugugcagcu

SEQ ID NO: 748342 - RNA, 18 nt, Human
cugguguuuuaugaugac

SEQ ID NO: 748343 - RNA, 21 nt, Human
cuuuucuaaagacaaaaauga

SEQ ID NO: 748344 - RNA, 18 nt, Human
gagaaugaagugacaaca

SEQ ID NO: 748345 - RNA, 21 nt, Human
gaguucccggaaguacagcuu

SEQ ID NO: 748346 - RNA, 23 nt, Human
gauauuggaggcaacaccagaaa

SEQ ID NO: 748347 - RNA, 24 nt, Human
gaucuuuucuaaagacaaaaauga

SEQ ID NO: 748348 - RNA, 22 nt, Human
gauucaucaggauacaacagcu

SEQ ID NO: 748349 - RNA, 23 nt, Human
ggaacacaacagggaaugcagac

SEQ ID NO: 748350 - RNA, 22 nt, Human
ggacccccugcagcagcaguuu

SEQ ID NO: 748351 - RNA, 18 nt, Human
gggagcugcuggaugaca

SEQ ID NO: 748352 - RNA, 22 nt, Human
gguaaugaagcagggaagggga

SEQ ID NO: 748353 - RNA, 22 nt, Human
uagaacaguccacuguccagca

SEQ ID NO: 748354 - RNA, 18 nt, Human
uagaauuacaauucacca

SEQ ID NO: 748355 - RNA, 23 nt, Human
uccacuguccagcagaggcugcu

SEQ ID NO: 748356 - RNA, 22 nt, Human
ucccacaucacugccggguucc

SEQ ID NO: 748357 - RNA, 23 nt, Human
ucccccaggucacaaccaaacac

SEQ ID NO: 748358 - RNA, 26 nt, Human
ucccccaggucacaaccaaacacccu

SEQ ID NO: 748359 - RNA, 19 nt, Human
uccguacaagaguguagaa

SEQ ID NO: 748360 - RNA, 20 nt, Human
ucuguugcugcugaaacugc

SEQ ID NO: 748361 - RNA, 18 nt, Human
ugaaagaaaguugauaau

SEQ ID NO: 748362 - RNA, 22 nt, Human
ugagucuaaguggucugguguu

SEQ ID NO: 748363 - RNA, 21 nt, Human
ugcuucaacucuauugcucgc

SEQ ID NO: 748364 - RNA, 22 nt, Human
uggggggagcugcuggaugaca

SEQ ID NO: 748365 - RNA, 24 nt, Human
ugggguaagaagaaaaccugaagg

SEQ ID NO: 748366 - RNA, 23 nt, Human
ugguagguaagcagaggguuugg

SEQ ID NO: 748367 - RNA, 23 nt, Human
ugguuccaaccucaccaccacag

SEQ ID NO: 748368 - RNA, 19 nt, Human
uguagaaaauaaaucauaa

SEQ ID NO: 748369 - RNA, 18 nt, Human
ugugguggggggagcugc

SEQ ID NO: 748370 - RNA, 22 nt, Human
uguuuucaggacccccugcagc

SEQ ID NO: 748371 - RNA, 20 nt, Human
uucaagauuccccgcugcuu

SEQ ID NO: 748372 - RNA, 24 nt, Human
uucaagauuccccgcugcuucagg

SEQ ID NO: 748373 - RNA, 23 nt, Human
uuccaaccucaccaccacagguu

SEQ ID NO: 748374 - RNA, 25 nt, Human
uuuaagaucaauacuuaaaauuauu

SEQ ID NO: 748375 - RNA, 23 nt, Human
uuucaggacccccugcagcagca

SEQ ID NO: 748376 - RNA, 21 nt, Human
aaaaaaguggucacugccuuc

SEQ ID NO: 748377 - RNA, 21 nt, Human
aaaagcacauauguacaaaua

SEQ ID NO: 748378 - RNA, 24 nt, Human
aaacaaacaugguuaaacuaaaau

SEQ ID NO: 748379 - RNA, 23 nt, Human
aaacagucaguaaaagaaaaaac

SEQ ID NO: 748380 - RNA, 22 nt, Human
aacaaacaugguuaaacuaaaa

SEQ ID NO: 748381 - RNA, 22 nt, Human
aacauaaaaagguacaaaagga

SEQ ID NO: 748382 - RNA, 22 nt, Human
aagaaaaaacaaagauauaaaa

SEQ ID NO: 748383 - RNA, 26 nt, Human
aagcaaaagcuaguucaaaagggacc

SEQ ID NO: 748384 - RNA, 21 nt, Human
aagcaacagaaauauggagcu

SEQ ID NO: 748385 - RNA, 18 nt, Human
aagcuuugcaaccccuua

SEQ ID NO: 748386 - RNA, 25 nt, Human
aaguauucaguaaaaacgauacaac

SEQ ID NO: 748387 - RNA, 26 nt, Human
acaaagcuaaaaugcauauguuccuu

SEQ ID NO: 748388 - RNA, 18 nt, Human
acagcagucaaacagcaa

SEQ ID NO: 748389 - RNA, 28 nt, Human
accaacaaaacaaacaugguuaaacuaa

SEQ ID NO: 748390 - RNA, 21 nt, Human
agcaaaagcaaccuuaaagaa

SEQ ID NO: 748391 - RNA, 25 nt, Human
agcaaaagcaaccuuaaagaaguau

SEQ ID NO: 748392 - RNA, 19 nt, Human
agcuaccaacaaaacaaac

SEQ ID NO: 748393 - RNA, 23 nt, Human
agcuucccaacaaaagagggaaa

SEQ ID NO: 748394 - RNA, 20 nt, Human
aggaaaaggaaaucaaggaa

SEQ ID NO: 748395 - RNA, 20 nt, Human
aguaaaagaaaaaacaaaga

SEQ ID NO: 748396 - RNA, 23 nt, Human
aguaaaagaaaaaacaaagauau

SEQ ID NO: 748397 - RNA, 19 nt, Human
aguggagagucgugaggaa

SEQ ID NO: 748398 - RNA, 21 nt, Human
auacaaacacaugcauauaau

SEQ ID NO: 748399 - RNA, 24 nt, Human
auacaagcaucucacagcucaaag

SEQ ID NO: 748400 - RNA, 19 nt, Human
caaaagcaaaagcuaguuc

SEQ ID NO: 748401 - RNA, 21 nt, Human
caaaagcaaaagcuaguucaa

SEQ ID NO: 748402 - RNA, 20 nt, Human
caaacagcaaaagcaaccuu

SEQ ID NO: 748403 - RNA, 24 nt, Human
caaacaugguuaaacuaaaaugag

SEQ ID NO: 748404 - RNA, 20 nt, Human
caaauugcaccuugaaaaga

SEQ ID NO: 748405 - RNA, 32 nt, Human
caagagaaagacgacaggucagcuaagacaaa

SEQ ID NO: 748406 - RNA, 18 nt, Human
cacaugcauauaaucaua

SEQ ID NO: 748407 - RNA, 20 nt, Human
cagcuaagacaaacuccacu

SEQ ID NO: 748408 - RNA, 23 nt, Human
cagucccaagcuuugcaaccccu

SEQ ID NO: 748409 - RNA, 23 nt, Human
cauaaaauacaaacacaugcaua

SEQ ID NO: 748410 - RNA, 27 nt, Human
cauaaaauacaaacacaugcauauagu

SEQ ID NO: 748411 - RNA, 18 nt, Human
cauauauauguauauaua

SEQ ID NO: 748412 - RNA, 19 nt, Human
ccaagcacuagucaacaaa

SEQ ID NO: 748413 - RNA, 22 nt, Human
ccaagcacuagucaacaaaucu

SEQ ID NO: 748414 - RNA, 19 nt, Human
ccauacuucauuuaacauc

SEQ ID NO: 748415 - RNA, 22 nt, Human
ccuaucuagaccuaagaugcua

SEQ ID NO: 748416 - RNA, 24 nt, Human
cucacugccaaaauuuuuuuuaaa

SEQ ID NO: 748417 - RNA, 20 nt, Human
gaauucuaauccaggaagca

SEQ ID NO: 748418 - RNA, 23 nt, Human
gacaggucagcuaagacaaacuu

SEQ ID NO: 748419 - RNA, 22 nt, Human
ggcauaauuauaacaaucauac

SEQ ID NO: 748420 - RNA, 20 nt, Human
gggaccaaauaguggaauuc

SEQ ID NO: 748421 - RNA, 24 nt, Human
gucaaacagcaaaagcaaccuuaa

SEQ ID NO: 748422 - RNA, 19 nt, Human
gugguuacaaacacgaagu

SEQ ID NO: 748423 - RNA, 21 nt, Human
guuacaaacacgaaguguuau

SEQ ID NO: 748424 - RNA, 22 nt, Human
guuuuuuuuuuucuucacuuaa

SEQ ID NO: 748425 - RNA, 23 nt, Human
uaaaagaaaaaacaaagauauaa

SEQ ID NO: 748426 - RNA, 18 nt, Human
uaaaauaaggaccacugu

SEQ ID NO: 748427 - RNA, 23 nt, Human
uaaaauacaaacacaugcauaua

SEQ ID NO: 748428 - RNA, 23 nt, Human
uaaaugucuucucaucauacuuc

SEQ ID NO: 748429 - RNA, 23 nt, Human
uaaguuuuuuuuuuucuucacuu

SEQ ID NO: 748430 - RNA, 22 nt, Human
uaccauucagcagcaaccaaca

SEQ ID NO: 748431 - RNA, 18 nt, Human
uagaaaaccucuauaacc

SEQ ID NO: 748432 - RNA, 22 nt, Human
uaggaugugcacugacuuaaua

SEQ ID NO: 748433 - RNA, 24 nt, Human
uagggaccaaauaguggaauucua

SEQ ID NO: 748434 - RNA, 19 nt, Human
uauacaagcaucucacagc

SEQ ID NO: 748435 - RNA, 21 nt, Human
uauagaaaaccucuauaacca

SEQ ID NO: 748436 - RNA, 18 nt, Human
uauauauguauauauaua

SEQ ID NO: 748437 - RNA, 19 nt, Human
uauauauguauauauauau

SEQ ID NO: 748438 - RNA, 26 nt, Human
uauauguauauauauaugaauguggu

SEQ ID NO: 748439 - RNA, 25 nt, Human
uaucaagaaaggaagcgcaaaauuc

SEQ ID NO: 748440 - RNA, 22 nt, Human
uauggagcuucacauauauaug

SEQ ID NO: 748441 - RNA, 21 nt, Human
uauguauauauauaugaaugu

SEQ ID NO: 748442 - RNA, 21 nt, Human
uauguauauauauaugaaugu

SEQ ID NO: 748443 - RNA, 24 nt, Human
uauguuccuuuucucaauuaugaa

SEQ ID NO: 748444 - RNA, 19 nt, Human
uauugugcaacaugauauu

SEQ ID NO: 748445 - RNA, 21 nt, Human
ucaaagacauuuuuuccuagg

SEQ ID NO: 748446 - RNA, 23 nt, Human
ucuuuaucacuauuuaccacuuc

SEQ ID NO: 748447 - RNA, 21 nt, Human
ugacaauaucguauugguuuu

SEQ ID NO: 748448 - RNA, 22 nt, Human
ugacugcaaaacuugcaagaua

SEQ ID NO: 748449 - RNA, 21 nt, Human
ugagcuucccaacaaaagagg

SEQ ID NO: 748450 - RNA, 20 nt, Human
ugccuacacuaaaugucuuc

SEQ ID NO: 748451 - RNA, 19 nt, Human
ugccucauuaauacuucag

SEQ ID NO: 748452 - RNA, 22 nt, Human
ugccucauuaauacuucagcau

SEQ ID NO: 748453 - RNA, 24 nt, Human
ugcucgccugcuugaacuuuaauu

SEQ ID NO: 748454 - RNA, 23 nt, Human
uggaacucugaagcaaauugcac

SEQ ID NO: 748455 - RNA, 22 nt, Human
uggcuccaagagcaaauaacac

SEQ ID NO: 748456 - RNA, 20 nt, Human
uguaaacgggcaaagaaugc

SEQ ID NO: 748457 - RNA, 19 nt, Human
uguauauauauaugaaugu

SEQ ID NO: 748458 - RNA, 25 nt, Human
ugucaggguaguaagggauuuagcu

SEQ ID NO: 748459 - RNA, 24 nt, Human
uguuaggaugugcacugacuuaau

SEQ ID NO: 748460 - RNA, 22 nt, Human
uuaaagcaacagaaauauggag

SEQ ID NO: 748461 - RNA, 26 nt, Human
uucaagagaaagacgacaggucagcu

SEQ ID NO: 748462 - RNA, 22 nt, Human
uucaagauaaauucaacugcuc

SEQ ID NO: 748463 - RNA, 23 nt, Human
uucacauauauauguauauauau

SEQ ID NO: 748464 - RNA, 30 nt, Human
uucacuaaacauaaauauuuaacauauauu

SEQ ID NO: 748465 - RNA, 18 nt, Human
uucugacugcaaaacuug

SEQ ID NO: 748466 - RNA, 18 nt, Human
uugcaagauacaaagcua

SEQ ID NO: 748467 - RNA, 23 nt, Human
uuuacgaauguagacagcaguca

SEQ ID NO: 748468 - RNA, 22 nt, Human
uuuccagucccaagcuuugcaa

SEQ ID NO: 748469 - RNA, 20 nt, Human
uuuuuuuuuucuucacuuaa

SEQ ID NO: 748470 - RNA, 21 nt, Human
aaguaggaugggcagccuagg

SEQ ID NO: 748471 - RNA, 24 nt, Human
aaucguuugaacccgggaggcaga

SEQ ID NO: 748472 - RNA, 18 nt, Human
aauggcacucuugggggc

SEQ ID NO: 748473 - RNA, 19 nt, Human
aauggcacucuugggggcc

SEQ ID NO: 748474 - RNA, 22 nt, Human
aauggcacucuugggggccucc

SEQ ID NO: 748475 - RNA, 24 nt, Human
acagagugagacucuguauuaaaa

SEQ ID NO: 748476 - RNA, 18 nt, Human
acauaccuaggaacagga

SEQ ID NO: 748477 - RNA, 24 nt, Human
accaauauggugaaaugccgucuc

SEQ ID NO: 748478 - RNA, 24 nt, Human
accaggugcccccucugcucggcc

SEQ ID NO: 748479 - RNA, 20 nt, Human
accccgacucucgccccaac

SEQ ID NO: 748480 - RNA, 23 nt, Human
accuaggugacagagugagacuc

SEQ ID NO: 748481 - RNA, 19 nt, Human
accugagcucauuaggcgg

SEQ ID NO: 748482 - RNA, 21 nt, Human
acgggagccgcgggacgggcu

SEQ ID NO: 748483 - RNA, 24 nt, Human
acugcacuccaaccuaggugacag

SEQ ID NO: 748484 - RNA, 20 nt, Human
acuuaaaauacaaaaacuag

SEQ ID NO: 748485 - RNA, 24 nt, Human
acuuggggucaggaguucgagacc

SEQ ID NO: 748486 - RNA, 22 nt, Human
agaaucguuugaacccgggagg

SEQ ID NO: 748487 - RNA, 20 nt, Human
agacucgagcugagcuggua

SEQ ID NO: 748488 - RNA, 18 nt, Human
agagguugcagugagccg

SEQ ID NO: 748489 - RNA, 24 nt, Human
agagguugcagugagccgacauca

SEQ ID NO: 748490 - RNA, 18 nt, Human
agcacaggaacacaagga

SEQ ID NO: 748491 - RNA, 24 nt, Human
agccgcgggacgggcucagucgac

SEQ ID NO: 748492 - RNA, 26 nt, Human
aggaacacaaggaggccgcccugaac

SEQ ID NO: 748493 - RNA, 20 nt, Human
aggagcccagcccugaagac

SEQ ID NO: 748494 - RNA, 21 nt, Human
aggcagaggcgggcggaacac

SEQ ID NO: 748495 - RNA, 21 nt, Human
aggcagagguugcagugagcc

SEQ ID NO: 748496 - RNA, 22 nt, Human
aggcagagguugcagugagccg

SEQ ID NO: 748497 - RNA, 22 nt, Human
aggcaggcugucugcugucucu

SEQ ID NO: 748498 - RNA, 21 nt, Human
aggcagggauccugcccagca

SEQ ID NO: 748499 - RNA, 21 nt, Human
aggcgggcggaacacuugggg

SEQ ID NO: 748500 - RNA, 23 nt, Human
aggcgggcggaacacuugggguc

SEQ ID NO: 748501 - RNA, 23 nt, Human
aggcucuaaggcucgggccgaga

SEQ ID NO: 748502 - RNA, 24 nt, Human
agguagagccagggcaagugacuu

SEQ ID NO: 748503 - RNA, 24 nt, Human
aguagcucaggccuguaauucuag

SEQ ID NO: 748504 - RNA, 23 nt, Human
aguccgaccaggugcccccucug

SEQ ID NO: 748505 - RNA, 19 nt, Human
aucacaccacugcacucca

SEQ ID NO: 748506 - RNA, 20 nt, Human
auggugaaaugccgucucua

SEQ ID NO: 748507 - RNA, 18 nt, Human
auuaaaaaaaaaaaaaaa

SEQ ID NO: 748508 - RNA, 20 nt, Human
auuaaaaaaaaaaaaaaagu

SEQ ID NO: 748509 - RNA, 18 nt, Human
caaaaacuagcccggcgu

SEQ ID NO: 748510 - RNA, 20 nt, Human
caaagcaaaggacucuuccc

SEQ ID NO: 748511 - RNA, 24 nt, Human
caauauggugaaaugccgucucua

SEQ ID NO: 748512 - RNA, 21 nt, Human
cacaaggaggccgcccugaac

SEQ ID NO: 748513 - RNA, 19 nt, Human
cacaccugcaguuccagcu

SEQ ID NO: 748514 - RNA, 18 nt, Human
cacagaacccagcccaag

SEQ ID NO: 748515 - RNA, 20 nt, Human
cacagaacccagcccaagcc

SEQ ID NO: 748516 - RNA, 26 nt, Human
caccacugcacuccaaccuaggugac

SEQ ID NO: 748517 - RNA, 18 nt, Human
caccccacaccccauuac

SEQ ID NO: 748518 - RNA, 19 nt, Human
caccccauuacuucccagu

SEQ ID NO: 748519 - RNA, 22 nt, Human
caccugcaguuccagcuacuag

SEQ ID NO: 748520 - RNA, 23 nt, Human
caccugcaguuccagcuacuaga

SEQ ID NO: 748521 - RNA, 23 nt, Human
cacuccaaccuaggugacagagu

SEQ ID NO: 748522 - RNA, 19 nt, Human
cacuuggggucaggaguuc

SEQ ID NO: 748523 - RNA, 23 nt, Human
cacuuggggucaggaguucgaga

SEQ ID NO: 748524 - RNA, 23 nt, Human
cagaacccagcccaagccagggg

SEQ ID NO: 748525 - RNA, 19 nt, Human
cagccauggaggagguugg

SEQ ID NO: 748526 - RNA, 19 nt, Human
cagccauggaggagguugg

SEQ ID NO: 748527 - RNA, 26 nt, Human
cagccuaggagcccagcccugaagac

SEQ ID NO: 748528 - RNA, 24 nt, Human
caggccuguaauucuagcacuaug

SEQ ID NO: 748529 - RNA, 19 nt, Human
cauggaggacccaccuucc

SEQ ID NO: 748530 - RNA, 23 nt, Human
cauuacuucccagugcuucccau

SEQ ID NO: 748531 - RNA, 19 nt, Human
ccaccccgacucucgcccc

SEQ ID NO: 748532 - RNA, 20 nt, Human
ccacugcacuccaaccuagg

SEQ ID NO: 748533 - RNA, 24 nt, Human
ccacugcacuccaaccuaggugac

SEQ ID NO: 748534 - RNA, 25 nt, Human
ccacugcacuccaaccuaggugaca

SEQ ID NO: 748535 - RNA, 20 nt, Human
ccagggguggccugugggac

SEQ ID NO: 748536 - RNA, 19 nt, Human
cccacaccccauuacuucc

SEQ ID NO: 748537 - RNA, 21 nt, Human
cccaccuucccaagagggcug

SEQ ID NO: 748538 - RNA, 24 nt, Human
ccccacaccccauuacuucccagu

SEQ ID NO: 748539 - RNA, 24 nt, Human
ccccaccccgacucucgccccaac

SEQ ID NO: 748540 - RNA, 23 nt, Human
ccccauggaggacccaccuuccc

SEQ ID NO: 748541 - RNA, 19 nt, Human
cccccauggaggacccacc

SEQ ID NO: 748542 - RNA, 18 nt, Human
ccccgagucacugggccc

SEQ ID NO: 748543 - RNA, 19 nt, Human
ccccggggggcaccugggg

SEQ ID NO: 748544 - RNA, 21 nt, Human
cccgccccgcgccgucgagaa

SEQ ID NO: 748545 - RNA, 19 nt, Human
cccugaauccccggggggc

SEQ ID NO: 748546 - RNA, 18 nt, Human
ccgcaaggggccaagcgc

SEQ ID NO: 748547 - RNA, 19 nt, Human
ccgcgcccgcagggcccgc

SEQ ID NO: 748548 - RNA, 23 nt, Human
ccugaccaauauggugaaaugcc

SEQ ID NO: 748549 - RNA, 24 nt, Human
ccugaccaauauggugaaaugccg

SEQ ID NO: 748550 - RNA, 25 nt, Human
ccugcaguuccagcuacuagagugg

SEQ ID NO: 748551 - RNA, 21 nt, Human
cgacaucacaccacugcacuc

SEQ ID NO: 748552 - RNA, 20 nt, Human
cgagaagggcccgccuggcg

SEQ ID NO: 748553 - RNA, 18 nt, Human
cgagaccagccugaccaa

SEQ ID NO: 748554 - RNA, 21 nt, Human
cgcaaggggccaagcgcagua

SEQ ID NO: 748555 - RNA, 24 nt, Human
cggaacacuuggggucaggaguuc

SEQ ID NO: 748556 - RNA, 20 nt, Human
cggccuccgcguccccagcc

SEQ ID NO: 748557 - RNA, 19 nt, Human
cggcggugcagcugcuggc

SEQ ID NO: 748558 - RNA, 21 nt, Human
cggcuccgugcucucugcccg

SEQ ID NO: 748559 - RNA, 24 nt, Human
cgggaggcagagguugcagugagc

SEQ ID NO: 748560 - RNA, 19 nt, Human
cuacuagaguggcuggggc

SEQ ID NO: 748561 - RNA, 21 nt, Human
cuagaccugagcucauuaggc

SEQ ID NO: 748562 - RNA, 23 nt, Human
cucaggccuguaauucuagcacu

SEQ ID NO: 748563 - RNA, 21 nt, Human
cucggccuccgcguccccagc

SEQ ID NO: 748564 - RNA, 22 nt, Human
cucgggccgagacugccaaagc

SEQ ID NO: 748565 - RNA, 22 nt, Human
cucucgccccaacccugagaac

SEQ ID NO: 748566 - RNA, 24 nt, Human
cucuguauuaaaaaaaaaaaaaaa

SEQ ID NO: 748567 - RNA, 19 nt, Human
cugcuggcagucggcgugg

SEQ ID NO: 748568 - RNA, 24 nt, Human
cuguauuaaaaaaaaaaaaaaagu

SEQ ID NO: 748569 - RNA, 22 nt, Human
cuuaaaauacaaaaacuagccc

SEQ ID NO: 748570 - RNA, 23 nt, Human
cuugggggccucccucugcucag

SEQ ID NO: 748571 - RNA, 18 nt, Human
gaacacuuggggucagga

SEQ ID NO: 748572 - RNA, 24 nt, Human
gaacacuuggggucaggaguucga

SEQ ID NO: 748573 - RNA, 21 nt, Human
gaacaggaccagggucuccuc

SEQ ID NO: 748574 - RNA, 23 nt, Human
gaaccacuucaagguagagccag

SEQ ID NO: 748575 - RNA, 20 nt, Human
gaacugggcagauucagccc

SEQ ID NO: 748576 - RNA, 18 nt, Human
gaagggacccccauggag

SEQ ID NO: 748577 - RNA, 20 nt, Human
gaagguggggaagucugggg

SEQ ID NO: 748578 - RNA, 18 nt, Human
gaggggcugccugggcag

SEQ ID NO: 748579 - RNA, 22 nt, Human
gcaaaggacucuucccagugga

SEQ ID NO: 748580 - RNA, 21 nt, Human
gcagcggacaggccaaguaga

SEQ ID NO: 748581 - RNA, 19 nt, Human
gcaggugccggcacgcccc

SEQ ID NO: 748582 - RNA, 18 nt, Human
gcagucggcguggugaca

SEQ ID NO: 748583 - RNA, 19 nt, Human
gccccgagucacugggccc

SEQ ID NO: 748584 - RNA, 18 nt, Human
gcgcccaggggcuucccg

SEQ ID NO: 748585 - RNA, 22 nt, Human
gcucucugcccgucgugguucc

SEQ ID NO: 748586 - RNA, 23 nt, Human
ggaacacuuggggucaggaguuc

SEQ ID NO: 748587 - RNA, 19 nt, Human
ggacugggaaggugggggc

SEQ ID NO: 748588 - RNA, 22 nt, Human
ggaggccagugaggguagaagu

SEQ ID NO: 748589 - RNA, 21 nt, Human
ggaguaggugacgaggggcug

SEQ ID NO: 748590 - RNA, 22 nt, Human
ggaguaggugacgaggggcugc

SEQ ID NO: 748591 - RNA, 23 nt, Human
ggagugaaucccacuggaggcca

SEQ ID NO: 748592 - RNA, 22 nt, Human
ggcaaagcgcaaaucgggcccg

SEQ ID NO: 748593 - RNA, 21 nt, Human
ggcaaguggaggagcacagga

SEQ ID NO: 748594 - RNA, 23 nt, Human
ggcaggagaaucguuugaacccg

SEQ ID NO: 748595 - RNA, 18 nt, Human
ggcccgccccgcgccguc

SEQ ID NO: 748596 - RNA, 24 nt, Human
ggccuguaauucuagcacuauggg

SEQ ID NO: 748597 - RNA, 24 nt, Human
ggcgggcggggggaggcggggccg

SEQ ID NO: 748598 - RNA, 18 nt, Human
ggcggugcagcugcuggc

SEQ ID NO: 748599 - RNA, 20 nt, Human
ggcuccgugcucucugcccg

SEQ ID NO: 748600 - RNA, 21 nt, Human
gggaaggugggggcagggcag

SEQ ID NO: 748601 - RNA, 20 nt, Human
gggcagccuaggagcccagc

SEQ ID NO: 748602 - RNA, 19 nt, Human
gggcggggggaggcggggc

SEQ ID NO: 748603 - RNA, 19 nt, Human
ggggacgggagccgcggga

SEQ ID NO: 748604 - RNA, 20 nt, Human
ggggagaggcucugauggug

SEQ ID NO: 748605 - RNA, 22 nt, Human
gguagagccagggcaagugacu

SEQ ID NO: 748606 - RNA, 24 nt, Human
ggugacauaccuaggaacaggacc

SEQ ID NO: 748607 - RNA, 19 nt, Human
gguggcugaagguggggaa

SEQ ID NO: 748608 - RNA, 21 nt, Human
gguggcugaagguggggaagu

SEQ ID NO: 748609 - RNA, 18 nt, Human
ggugguacuguggccugg

SEQ ID NO: 748610 - RNA, 24 nt, Human
gguggugcacaccugcaguuccag

SEQ ID NO: 748611 - RNA, 19 nt, Human
uaacuucacagaacccagc

SEQ ID NO: 748612 - RNA, 21 nt, Human
uaaggcucuaaggcucgggcc

SEQ ID NO: 748613 - RNA, 20 nt, Human
uacaaaaacuagcccggcgu

SEQ ID NO: 748614 - RNA, 21 nt, Human
uaccuaggaacaggaccaggg

SEQ ID NO: 748615 - RNA, 19 nt, Human
uacuagaguggcuggggca

SEQ ID NO: 748616 - RNA, 22 nt, Human
uagcacuaugggaggcagaggc

SEQ ID NO: 748617 - RNA, 24 nt, Human
uagcacuaugggaggcagaggcgg

SEQ ID NO: 748618 - RNA, 22 nt, Human
uagcccuccgacgggcgcccag

SEQ ID NO: 748619 - RNA, 24 nt, Human
uagcucaggccuguaauucuagca

SEQ ID NO: 748620 - RNA, 23 nt, Human
uaggaugggcagccuaggagccc

SEQ ID NO: 748621 - RNA, 20 nt, Human
uaggcagggauccugcccag

SEQ ID NO: 748622 - RNA, 21 nt, Human
uaggugacagagugagacucu

SEQ ID NO: 748623 - RNA, 25 nt, Human
ucaauggcacucuugggggccuccc

SEQ ID NO: 748624 - RNA, 27 nt, Human
ucacugggccccaaagcaaaggacucc

SEQ ID NO: 748625 - RNA, 24 nt, Human
uccaaccuaggugacagagugaga

SEQ ID NO: 748626 - RNA, 28 nt, Human
uccacuccauccaguccggcaaagcgca

SEQ ID NO: 748627 - RNA, 22 nt, Human
uccccaccccgacucucgcccc

SEQ ID NO: 748628 - RNA, 22 nt, Human
uccgaccaggugcccccucugc

SEQ ID NO: 748629 - RNA, 23 nt, Human
uccguggcaaguggaggagcaca

SEQ ID NO: 748630 - RNA, 18 nt, Human
uccuccacuccauccagu

SEQ ID NO: 748631 - RNA, 18 nt, Human
ucguuugaacccgggagg

SEQ ID NO: 748632 - RNA, 21 nt, Human
ucucugcccgucgugguuccg

SEQ ID NO: 748633 - RNA, 20 nt, Human
ucugaugguggcugaaggug

SEQ ID NO: 748634 - RNA, 21 nt, Human
ucugaugguggcugaaggugg

SEQ ID NO: 748635 - RNA, 23 nt, Human
ucuguauuaaaaaaaaaaaaaaa

SEQ ID NO: 748636 - RNA, 23 nt, Human
ugaaaugccgucucuacuuaaaa

SEQ ID NO: 748637 - RNA, 22 nt, Human
ugacgaggggcugccugggcag

SEQ ID NO: 748638 - RNA, 19 nt, Human
ugacuucucucucggccuc

SEQ ID NO: 748639 - RNA, 18 nt, Human
ugccaaagccucaugggg

SEQ ID NO: 748640 - RNA, 18 nt, Human
ugcccccucugcucggcc

SEQ ID NO: 748641 - RNA, 20 nt, Human
ugccugggcagguggggugg

SEQ ID NO: 748642 - RNA, 23 nt, Human
uggaggacccaccuucccaagag

SEQ ID NO: 748643 - RNA, 18 nt, Human
uggaggagcacaggaaca

SEQ ID NO: 748644 - RNA, 23 nt, Human
uggcaagcuccauccguggccca

SEQ ID NO: 748645 - RNA, 24 nt, Human
uggcaagcuccauccguggcccau

SEQ ID NO: 748646 - RNA, 21 nt, Human
uggccugagugugggaacugg

SEQ ID NO: 748647 - RNA, 24 nt, Human
uggccugugggacugggaaggugg

SEQ ID NO: 748648 - RNA, 24 nt, Human
uggcuggggcaggagaaucguuug

SEQ ID NO: 748649 - RNA, 21 nt, Human
ugggacugggaaggugggggc

SEQ ID NO: 748650 - RNA, 18 nt, Human
ugggaggcagaggcgggc

SEQ ID NO: 748651 - RNA, 19 nt, Human
ugggaggcagaggcgggcg

SEQ ID NO: 748652 - RNA, 21 nt, Human
ugggccuccuccacuccaucc

SEQ ID NO: 748653 - RNA, 24 nt, Human
uggggcaggagaaucguuugaacc

SEQ ID NO: 748654 - RNA, 18 nt, Human
uggggcgcgcggggagag

SEQ ID NO: 748655 - RNA, 19 nt, Human
ugggggccucccucugcuc

SEQ ID NO: 748656 - RNA, 20 nt, Human
uggucaauggcacucuuggg

SEQ ID NO: 748657 - RNA, 19 nt, Human
uggugcacaccugcaguuc

SEQ ID NO: 748658 - RNA, 19 nt, Human
ugucacaggccucgcagag

SEQ ID NO: 748659 - RNA, 22 nt, Human
aaaaacagugacauaaggagca

SEQ ID NO: 748660 - RNA, 21 nt, Human
aaaaccaaaggggaaaagggu

SEQ ID NO: 748661 - RNA, 24 nt, Human
aaacaaaaagccugcuuugccagu

SEQ ID NO: 748662 - RNA, 23 nt, Human
aaaccaaugugauaacauagaac

SEQ ID NO: 748663 - RNA, 18 nt, Human
aaacccacgccacagcag

SEQ ID NO: 748664 - RNA, 24 nt, Human
aaagaaaggcaguaugguacacua

SEQ ID NO: 748665 - RNA, 21 nt, Human
aaagguacaggaaaaccaaug

SEQ ID NO: 748666 - RNA, 19 nt, Human
aaauacgguagugacacuu

SEQ ID NO: 748667 - RNA, 24 nt, Human
aaaucugccuaauuuaacacugcc

SEQ ID NO: 748668 - RNA, 18 nt, Human
aaccagaaggugagagug

SEQ ID NO: 748669 - RNA, 21 nt, Human
aaccagaaggugagagugagu

SEQ ID NO: 748670 - RNA, 18 nt, Human
aagagaaagcagauggaa

SEQ ID NO: 748671 - RNA, 18 nt, Human
aagagaaagcagauggaa

SEQ ID NO: 748672 - RNA, 18 nt, Human
aagcaaaaagcaggccug

SEQ ID NO: 748673 - RNA, 22 nt, Human
aagcaguccaaggcccaaaaaa

SEQ ID NO: 748674 - RNA, 23 nt, Human
aagcccaggaaggcagcugggau

SEQ ID NO: 748675 - RNA, 23 nt, Human
aaggaaaaucuuccuccaagcau

SEQ ID NO: 748676 - RNA, 20 nt, Human
aaggaggcuggagaucuucc

SEQ ID NO: 748677 - RNA, 22 nt, Human
aaggcccagaggaagaauggca

SEQ ID NO: 748678 - RNA, 18 nt, Human
aagguacaggaaaaccaa

SEQ ID NO: 748679 - RNA, 23 nt, Human
aagucagacuagugggagaggga

SEQ ID NO: 748680 - RNA, 20 nt, Human
aauaucaaguaagacaacag

SEQ ID NO: 748681 - RNA, 24 nt, Human
aauuuugucauaggcugaaacaga

SEQ ID NO: 748682 - RNA, 20 nt, Human
acacagaugcugcacauccc

SEQ ID NO: 748683 - RNA, 21 nt, Human
acacagaugcugcacaucccc

SEQ ID NO: 748684 - RNA, 19 nt, Human
acagaugcugcacaucccc

SEQ ID NO: 748685 - RNA, 25 nt, Human
acagccagcauaaaguaugaagccc

SEQ ID NO: 748686 - RNA, 22 nt, Human
accuacaaaaugcuacccuaga

SEQ ID NO: 748687 - RNA, 25 nt, Human
acuaagcuggaagggacugcguucc

SEQ ID NO: 748688 - RNA, 18 nt, Human
acugcguuccagccuugc

SEQ ID NO: 748689 - RNA, 18 nt, Human
acugcguuccagccuugc

SEQ ID NO: 748690 - RNA, 23 nt, Human
acugcguuccagccuugcuuugg

SEQ ID NO: 748691 - RNA, 20 nt, Human
acuuuugucauguucagagu

SEQ ID NO: 748692 - RNA, 21 nt, Human
agaaaagcaugaaggcccaga

SEQ ID NO: 748693 - RNA, 23 nt, Human
agaaagcagauggaagacugcau

SEQ ID NO: 748694 - RNA, 23 nt, Human
agaaagcagauggaagagggacc

SEQ ID NO: 748695 - RNA, 22 nt, Human
agaaaggcaguaugguacacua

SEQ ID NO: 748696 - RNA, 21 nt, Human
agacaaaaguacuaaaugauc

SEQ ID NO: 748697 - RNA, 24 nt, Human
agaccuccuaaacccucagguagc

SEQ ID NO: 748698 - RNA, 18 nt, Human
agaggggaggaggaggga

SEQ ID NO: 748699 - RNA, 18 nt, Human
agaggggaggaggaggga

SEQ ID NO: 748700 - RNA, 18 nt, Human
agagugggugcaggcggg

SEQ ID NO: 748701 - RNA, 21 nt, Human
agcaaaaagcaggccuguaaa

SEQ ID NO: 748702 - RNA, 19 nt, Human
agcaggcucauuccugcuc

SEQ ID NO: 748703 - RNA, 22 nt, Human
aggaaaugcagaagcugagaaa

SEQ ID NO: 748704 - RNA, 21 nt, Human
aggagaagagugaccuacaaa

SEQ ID NO: 748705 - RNA, 21 nt, Human
aggagucagaaagacuaagcu

SEQ ID NO: 748706 - RNA, 24 nt, Human
aggcagacaaugguggccuaagca

SEQ ID NO: 748707 - RNA, 20 nt, Human
aggcagcugggauccaguug

SEQ ID NO: 748708 - RNA, 22 nt, Human
aggcucauuccugcucuggacu

SEQ ID NO: 748709 - RNA, 18 nt, Human
agggagaggggaggagga

SEQ ID NO: 748710 - RNA, 22 nt, Human
agggaugggagggagaggggga

SEQ ID NO: 748711 - RNA, 21 nt, Human
aggggccuccccucccacccc

SEQ ID NO: 748712 - RNA, 21 nt, Human
agggggagggagaggggagga

SEQ ID NO: 748713 - RNA, 20 nt, Human
augcacuugaaacauguuaa

SEQ ID NO: 748714 - RNA, 21 nt, Human
caaaaagcaggccuguaaaca

SEQ ID NO: 748715 - RNA, 20 nt, Human
caaaaugcuacccuagaagc

SEQ ID NO: 748716 - RNA, 21 nt, Human
caagaaauacgguagugacac

SEQ ID NO: 748717 - RNA, 20 nt, Human
caagcccaggaaggcagcug

SEQ ID NO: 748718 - RNA, 22 nt, Human
caagcccaggaaggcagcuggg

SEQ ID NO: 748719 - RNA, 23 nt, Human
caaggcccaaaaaagaauuucca

SEQ ID NO: 748720 - RNA, 20 nt, Human
cacaagcccaggaaggcagc

SEQ ID NO: 748721 - RNA, 21 nt, Human
cacaaugcagaaaagcaugaa

SEQ ID NO: 748722 - RNA, 21 nt, Human
cacacagaugcugcacauccc

SEQ ID NO: 748723 - RNA, 21 nt, Human
cacugcuuaggaacauaaaug

SEQ ID NO: 748724 - RNA, 25 nt, Human
cagaaacaaaauaguacaaaggaga

SEQ ID NO: 748725 - RNA, 18 nt, Human
cagauggaagacugcaug

SEQ ID NO: 748726 - RNA, 23 nt, Human
cagguucuuuccugugagccuuu

SEQ ID NO: 748727 - RNA, 22 nt, Human
ccaaacccacgccacagcaggc

SEQ ID NO: 748728 - RNA, 21 nt, Human
ccaacucuggcaacuuuuguc

SEQ ID NO: 748729 - RNA, 22 nt, Human
ccacacagaugcugcacauccc

SEQ ID NO: 748730 - RNA, 24 nt, Human
ccacacagaugcugcacauccccu

SEQ ID NO: 748731 - RNA, 26 nt, Human
ccacuguguguguucagaccuccuuc

SEQ ID NO: 748732 - RNA, 18 nt, Human
ccccucccaccccugauc

SEQ ID NO: 748733 - RNA, 19 nt, Human
ccccucccaccccugaucc

SEQ ID NO: 748734 - RNA, 24 nt, Human
ccccucccaccccugauccugcag

SEQ ID NO: 748735 - RNA, 23 nt, Human
cccugggagcuacgucuacagau

SEQ ID NO: 748736 - RNA, 23 nt, Human
ccuagaagcaguccaaggcccaa

SEQ ID NO: 748737 - RNA, 18 nt, Human
ccucaaugccccaacucu

SEQ ID NO: 748738 - RNA, 18 nt, Human
ccucaggggccuccccuc

SEQ ID NO: 748739 - RNA, 24 nt, Human
ccucagucacgccuagcagucacc

SEQ ID NO: 748740 - RNA, 21 nt, Human
ccuggagagcaccucaggggc

SEQ ID NO: 748741 - RNA, 22 nt, Human
ccugugagccuuuccaaaccca

SEQ ID NO: 748742 - RNA, 19 nt, Human
cuaaagaaguugcucacau

SEQ ID NO: 748743 - RNA, 19 nt, Human
cuagauuaaccucuccacu

SEQ ID NO: 748744 - RNA, 21 nt, Human
cucaccagcagcuggucauga

SEQ ID NO: 748745 - RNA, 21 nt, Human
cucuggacuuuuacucaguuu

SEQ ID NO: 748746 - RNA, 18 nt, Human
cugaauucuucauacugc

SEQ ID NO: 748747 - RNA, 22 nt, Human
cuguguguguucagaccuccuu

SEQ ID NO: 748748 - RNA, 21 nt, Human
cuucaaaaccaaaggggaaaa

SEQ ID NO: 748749 - RNA, 21 nt, Human
cuucauacucaccagcagcug

SEQ ID NO: 748750 - RNA, 18 nt, Human
cuucccuggagagcaccu

SEQ ID NO: 748751 - RNA, 19 nt, Human
cuugcagugguaauaccca

SEQ ID NO: 748752 - RNA, 21 nt, Human
gaagcaguccaaggcccaaaa

SEQ ID NO: 748753 - RNA, 19 nt, Human
gaaggccaugcacuugaaa

SEQ ID NO: 748754 - RNA, 19 nt, Human
gaccuacaaaaugcuaccc

SEQ ID NO: 748755 - RNA, 18 nt, Human
gagcagggaaggaaaugc

SEQ ID NO: 748756 - RNA, 21 nt, Human
gaggaauaagggcaauaagag

SEQ ID NO: 748757 - RNA, 20 nt, Human
gaguaaccaaagguacagga

SEQ ID NO: 748758 - RNA, 21 nt, Human
gagugaaagggaagaaaaggg

SEQ ID NO: 748759 - RNA, 23 nt, Human
gagugaccuacaaaaugcuaccc

SEQ ID NO: 748760 - RNA, 22 nt, Human
gcaaaaagcaggccuguaaaca

SEQ ID NO: 748761 - RNA, 22 nt, Human
gccuccccucccaccccugauc

SEQ ID NO: 748762 - RNA, 20 nt, Human
ggaagggacugcguuccagc

SEQ ID NO: 748763 - RNA, 24 nt, Human
ggacugcguuccagccuugcuuug

SEQ ID NO: 748764 - RNA, 18 nt, Human
ggagaagagugaccuaca

SEQ ID NO: 748765 - RNA, 19 nt, Human
ggagagggggagggagagg

SEQ ID NO: 748766 - RNA, 22 nt, Human
ggagggagaggggaggaggagg

SEQ ID NO: 748767 - RNA, 23 nt, Human
ggagggagaggggaggaggaggg

SEQ ID NO: 748768 - RNA, 22 nt, Human
gggagaagagcauggucacaga

SEQ ID NO: 748769 - RNA, 20 nt, Human
gggccuccccucccaccccu

SEQ ID NO: 748770 - RNA, 18 nt, Human
gggggagggagaggggag

SEQ ID NO: 748771 - RNA, 22 nt, Human
gggugcaggcggggaaaagagg

SEQ ID NO: 748772 - RNA, 22 nt, Human
guacacuauaucuauaguauca

SEQ ID NO: 748773 - RNA, 23 nt, Human
gugaaaauccacacagaugcugc

SEQ ID NO: 748774 - RNA, 22 nt, Human
guguugcugugagcucccuggg

SEQ ID NO: 748775 - RNA, 23 nt, Human
uaaaaacucaagaaauacacagg

SEQ ID NO: 748776 - RNA, 21 nt, Human
uaaacaaaaagccugcuuugc

SEQ ID NO: 748777 - RNA, 21 nt, Human
uaagaauagagccauauauga

SEQ ID NO: 748778 - RNA, 26 nt, Human
uaagcaaaaagcaggccuguaaacau

SEQ ID NO: 748779 - RNA, 23 nt, Human
uaagcuggaagggacugcguucc

SEQ ID NO: 748780 - RNA, 24 nt, Human
uacaaaggagaagagugaccuaca

SEQ ID NO: 748781 - RNA, 22 nt, Human
uagaagcaguccaaggcccaaa

SEQ ID NO: 748782 - RNA, 18 nt, Human
uagauuaaccucuccacu

SEQ ID NO: 748783 - RNA, 21 nt, Human
uaggagcagggaaggaaaugc

SEQ ID NO: 748784 - RNA, 24 nt, Human
uaggauggagacccaagggacauc

SEQ ID NO: 748785 - RNA, 24 nt, Human
uagggcaagaaauaucaaguaaga

SEQ ID NO: 748786 - RNA, 20 nt, Human
uagguccaagaggagguggu

SEQ ID NO: 748787 - RNA, 23 nt, Human
uauuuaaaccccagccccucuuc

SEQ ID NO: 748788 - RNA, 24 nt, Human
ucaaaaacagugacauaaggagca

SEQ ID NO: 748789 - RNA, 24 nt, Human
ucaggggccuccccucccaccccu

SEQ ID NO: 748790 - RNA, 21 nt, Human
ucaugacguagaguaaccaaa

SEQ ID NO: 748791 - RNA, 18 nt, Human
ucauguucagagugggug

SEQ ID NO: 748792 - RNA, 19 nt, Human
uccuaaacccucagguagc

SEQ ID NO: 748793 - RNA, 22 nt, Human
ugaaaauccacacagaugcugc

SEQ ID NO: 748794 - RNA, 23 nt, Human
ugaacacaaucagggaaagagca

SEQ ID NO: 748795 - RNA, 24 nt, Human
ugaacacaaucagggaaagagcaa

SEQ ID NO: 748796 - RNA, 18 nt, Human
ugaagagaaagcagaugg

SEQ ID NO: 748797 - RNA, 19 nt, Human
ugagagaaaacaucgacuu

SEQ ID NO: 748798 - RNA, 23 nt, Human
ugagccuuuccaaacccacgcca

SEQ ID NO: 748799 - RNA, 18 nt, Human
ugaggcagacaauggugg

SEQ ID NO: 748800 - RNA, 21 nt, Human
ugaggcagacaaugguggccc

SEQ ID NO: 748801 - RNA, 23 nt, Human
ugaggcagacaaugguggccucc

SEQ ID NO: 748802 - RNA, 18 nt, Human
ugagggccaagaaagcca

SEQ ID NO: 748803 - RNA, 22 nt, Human
ugccuaaagaaguugcucacau

SEQ ID NO: 748804 - RNA, 21 nt, Human
ugcuuugccaguuuuguuuuc

SEQ ID NO: 748805 - RNA, 22 nt, Human
uggaagaagucagacuaguggg

SEQ ID NO: 748806 - RNA, 21 nt, Human
uggaagggacugcguuccagc

SEQ ID NO: 748807 - RNA, 21 nt, Human
uggagacccaagggacaucag

SEQ ID NO: 748808 - RNA, 22 nt, Human
uggauggcacaagcccaggaag

SEQ ID NO: 748809 - RNA, 22 nt, Human
ugggagaagacaaaaguacuaa

SEQ ID NO: 748810 - RNA, 20 nt, Human
ugggagaagagcauggucac

SEQ ID NO: 748811 - RNA, 18 nt, Human
ugggguggaggaauaagg

SEQ ID NO: 748812 - RNA, 22 nt, Human
ugguagaauggaugggguaaaa

SEQ ID NO: 748813 - RNA, 25 nt, Human
uguaaacaucaauuuugucauaggc

SEQ ID NO: 748814 - RNA, 23 nt, Human
ugucaaaaucugccuaauuuaac

SEQ ID NO: 748815 - RNA, 20 nt, Human
ugucauaggcugaaacagag

SEQ ID NO: 748816 - RNA, 24 nt, Human
ugugaaaauguaucaagauucuuu

SEQ ID NO: 748817 - RNA, 20 nt, Human
ugugguacagaaccacuuaa

SEQ ID NO: 748818 - RNA, 21 nt, Human
uucaagcacaugggagaagac

SEQ ID NO: 748819 - RNA, 24 nt, Human
uucaagcacaugggagaagacaaa

SEQ ID NO: 748820 - RNA, 24 nt, Human
uucuuuccugugagccuuuccaaa

SEQ ID NO: 748821 - RNA, 23 nt, Human
uugcucacauuaaggaugguuug

SEQ ID NO: 748822 - RNA, 19 nt, Human
uugcuuugggcucugucac

SEQ ID NO: 748823 - RNA, 19 nt, Human
uugguauuuuugcacaugu

SEQ ID NO: 748824 - RNA, 18 nt, Human
uuugaaacuuucagaccu

SEQ ID NO: 748825 - RNA, 19 nt, Human
uuugagguuauuuucacaa

SEQ ID NO: 748826 - RNA, 22 nt, Human
aaaaacaaauaagcaaaacuua

SEQ ID NO: 748827 - RNA, 22 nt, Human
aaagcaccauuuauauacugcc

SEQ ID NO: 748828 - RNA, 20 nt, Human
aagcacaaaaacaaauaagc

SEQ ID NO: 748829 - RNA, 21 nt, Human
accaagaauuaagccuauaaa

SEQ ID NO: 748830 - RNA, 20 nt, Human
agcacuggacaaacugaagc

SEQ ID NO: 748831 - RNA, 25 nt, Human
caaaaacaaauaagcaaaacuuaua

SEQ ID NO: 748832 - RNA, 21 nt, Human
caccauaucauacacaguaaa

SEQ ID NO: 748833 - RNA, 20 nt, Human
cagcauggggguugggggug

SEQ ID NO: 748834 - RNA, 21 nt, Human
caucuggaguucugccugacc

SEQ ID NO: 748835 - RNA, 26 nt, Human
ccacuaaagugaacucuuaauuacau

SEQ ID NO: 748836 - RNA, 20 nt, Human
ccuauaaaucuaucuugcca

SEQ ID NO: 748837 - RNA, 19 nt, Human
gcaaguuuuuuucaucugg

SEQ ID NO: 748838 - RNA, 18 nt, Human
ggggugagggacuuaaaa

SEQ ID NO: 748839 - RNA, 18 nt, Human
uacagggcuaggcaaccc

SEQ ID NO: 748840 - RNA, 18 nt, Human
uauacaaacagcaugggg

SEQ ID NO: 748841 - RNA, 22 nt, Human
uauacugccaggccacagcuaa

SEQ ID NO: 748842 - RNA, 23 nt, Human
uauacugccaggccacagcuaaa

SEQ ID NO: 748843 - RNA, 24 nt, Human
ugaagcacaaaaacaaauaagcaa

SEQ ID NO: 748844 - RNA, 19 nt, Human
ugaccaagaauuaagccua

SEQ ID NO: 748845 - RNA, 20 nt, Human
ugccugaccaagaauuaagc

SEQ ID NO: 748846 - RNA, 21 nt, Human
ugccugaccaagaauuaagcc

SEQ ID NO: 748847 - RNA, 24 nt, Human
uucuucccagacagccauauuaaa

SEQ ID NO: 748848 - RNA, 19 nt, Human
aaaccccaguuuuagaucc

SEQ ID NO: 748849 - RNA, 22 nt, Human
aagacgcccccaccccgagccc

SEQ ID NO: 748850 - RNA, 24 nt, Human
aagacgcccccaccccgagcccgg

SEQ ID NO: 748851 - RNA, 21 nt, Human
aagagucauggagagaggagg

SEQ ID NO: 748852 - RNA, 20 nt, Human
acaaaccccagaugaucaaa

SEQ ID NO: 748853 - RNA, 22 nt, Human
acaaaccccagaugaucaaggg

SEQ ID NO: 748854 - RNA, 23 nt, Human
accccgagcccggcaggcuucua

SEQ ID NO: 748855 - RNA, 26 nt, Human
accccuuuccccccucaagccccagg

SEQ ID NO: 748856 - RNA, 24 nt, Human
accuucccccaaaccccaguuuua

SEQ ID NO: 748857 - RNA, 23 nt, Human
accuugcugccuuugcgcuguuu

SEQ ID NO: 748858 - RNA, 21 nt, Human
agaagaagcuaggaugucaag

SEQ ID NO: 748859 - RNA, 19 nt, Human
agccccagggcuaaggagc

SEQ ID NO: 748860 - RNA, 18 nt, Human
aggagggggaaggggaug

SEQ ID NO: 748861 - RNA, 19 nt, Human
aggagguuaggggugggga

SEQ ID NO: 748862 - RNA, 20 nt, Human
aggggaguggggagaggcug

SEQ ID NO: 748863 - RNA, 23 nt, Human
aggggaguggggagaggcugaaa

SEQ ID NO: 748864 - RNA, 26 nt, Human
aucuccccccuuucccuccccccuua

SEQ ID NO: 748865 - RNA, 18 nt, Human
caagccccagggcuaagg

SEQ ID NO: 748866 - RNA, 23 nt, Human
caccaaccuugcugccuuugcgc

SEQ ID NO: 748867 - RNA, 23 nt, Human
cacccuaccccuuuccccccuca

SEQ ID NO: 748868 - RNA, 20 nt, Human
caccuuggcuggagcagagu

SEQ ID NO: 748869 - RNA, 22 nt, Human
cagagcgcccgcgacgccuucc

SEQ ID NO: 748870 - RNA, 20 nt, Human
cagcacaaaggccuguccua

SEQ ID NO: 748871 - RNA, 21 nt, Human
cagcagggagaaaauauggug

SEQ ID NO: 748872 - RNA, 18 nt, Human
caucuccaaagucaccaa

SEQ ID NO: 748873 - RNA, 22 nt, Human
ccccaaaccccaguuuuagauc

SEQ ID NO: 748874 - RNA, 25 nt, Human
ccccaccccgagcccggcaggcuuc

SEQ ID NO: 748875 - RNA, 21 nt, Human
cccccaaaccccaguuuuaga

SEQ ID NO: 748876 - RNA, 22 nt, Human
cccccauggacucuuacccacc

SEQ ID NO: 748877 - RNA, 24 nt, Human
ccccccucaagccccagggcuaag

SEQ ID NO: 748878 - RNA, 18 nt, Human
cccccgcccguuccucgc

SEQ ID NO: 748879 - RNA, 19 nt, Human
ccccuuucccuccccccuu

SEQ ID NO: 748880 - RNA, 23 nt, Human
cccgcagggccuucuugugggcu

SEQ ID NO: 748881 - RNA, 19 nt, Human
cccuccccccuuagaagaa

SEQ ID NO: 748882 - RNA, 22 nt, Human
ccgccguaaauccgaggcccac

SEQ ID NO: 748883 - RNA, 19 nt, Human
ccggcggcaaugcguucuu

SEQ ID NO: 748884 - RNA, 20 nt, Human
ccuaccccuuuccccccuca

SEQ ID NO: 748885 - RNA, 19 nt, Human
ccucaagccccagggcuaa

SEQ ID NO: 748886 - RNA, 25 nt, Human
ccuccggggcgcugggccccagucc

SEQ ID NO: 748887 - RNA, 19 nt, Human
cguaaauccgaggcccacu

SEQ ID NO: 748888 - RNA, 24 nt, Human
cguucacgguggucaggaccggcg

SEQ ID NO: 748889 - RNA, 21 nt, Human
cuaccccuuuccccccucaag

SEQ ID NO: 748890 - RNA, 24 nt, Human
cuaggcgugcguccccccccgccc

SEQ ID NO: 748891 - RNA, 24 nt, Human
cuaguaacuccaggccugucccuu

SEQ ID NO: 748892 - RNA, 24 nt, Human
cuccuggggcccagagguaccacc

SEQ ID NO: 748893 - RNA, 22 nt, Human
cugaaaccuucccccaaacccc

SEQ ID NO: 748894 - RNA, 19 nt, Human
cugggcuggggaguaaagg

SEQ ID NO: 748895 - RNA, 19 nt, Human
cuucauuguccccuuuccu

SEQ ID NO: 748896 - RNA, 19 nt, Human
cuugugggcuaucucucca

SEQ ID NO: 748897 - RNA, 20 nt, Human
gaggaaggccccccacucug

SEQ ID NO: 748898 - RNA, 23 nt, Human
gagggggaaggggauguagaggc

SEQ ID NO: 748899 - RNA, 23 nt, Human
gcgcccgcgacgccuuccuccgg

SEQ ID NO: 748900 - RNA, 21 nt, Human
ggaguaaaggguguggggcaa

SEQ ID NO: 748901 - RNA, 20 nt, Human
ggcauggugggaacagcagg

SEQ ID NO: 748902 - RNA, 19 nt, Human
ggcccagagguaccaccag

SEQ ID NO: 748903 - RNA, 25 nt, Human
gggaguggggagaggcugaaaccuu

SEQ ID NO: 748904 - RNA, 20 nt, Human
gggcggggggggaggaaggc

SEQ ID NO: 748905 - RNA, 19 nt, Human
gggcugaugcuccuggggc

SEQ ID NO: 748906 - RNA, 23 nt, Human
gucccuucauuguccccuuuccu

SEQ ID NO: 748907 - RNA, 21 nt, Human
guguauacauugcuacucagc

SEQ ID NO: 748908 - RNA, 19 nt, Human
uaauccagaugaacuauca

SEQ ID NO: 748909 - RNA, 27 nt, Human
uauaaaaaucuccccccuuucccuccc

SEQ ID NO: 748910 - RNA, 27 nt, Human
uauauauauaaaaaucuccccccuuuc

SEQ ID NO: 748911 - RNA, 18 nt, Human
uauauauauauguauaua

SEQ ID NO: 748912 - RNA, 18 nt, Human
uauauauauguauauaua

SEQ ID NO: 748913 - RNA, 18 nt, Human
uauauauguauauauaua

SEQ ID NO: 748914 - RNA, 19 nt, Human
uauauauguauauauauau

SEQ ID NO: 748915 - RNA, 18 nt, Human
uauauguauauauauaua

SEQ ID NO: 748916 - RNA, 23 nt, Human
uauauguauauauauauaaaaau

SEQ ID NO: 748917 - RNA, 18 nt, Human
ucaauagucuuuccuggu

SEQ ID NO: 748918 - RNA, 23 nt, Human
uccccccucaagccccagggcua

SEQ ID NO: 748919 - RNA, 23 nt, Human
uccugggacugggcacccccaug

SEQ ID NO: 748920 - RNA, 24 nt, Human
ucugcaguccaggccuccuaggcg

SEQ ID NO: 748921 - RNA, 27 nt, Human
ucuuuuuuccccauuuuuucaaggauc

SEQ ID NO: 748922 - RNA, 19 nt, Human
ugcagccgccguaaauccg

SEQ ID NO: 748923 - RNA, 20 nt, Human
ugcugggcaaugggggggcc

SEQ ID NO: 748924 - RNA, 24 nt, Human
uggagagaggagggggaaggggau

SEQ ID NO: 748925 - RNA, 21 nt, Human
uggagcagaguguucuggggg

SEQ ID NO: 748926 - RNA, 23 nt, Human
uggcuugagggggagcaggaggu

SEQ ID NO: 748927 - RNA, 19 nt, Human
ugggcuggggaguaaaggg

SEQ ID NO: 748928 - RNA, 21 nt, Human
uggggcccagagguaccacca

SEQ ID NO: 748929 - RNA, 19 nt, Human
ugggggggcccgcagggcc

SEQ ID NO: 748930 - RNA, 18 nt, Human
uucaaggauggaaagguc

SEQ ID NO: 748931 - RNA, 19 nt, Human
uucaaggauggaaagguca

SEQ ID NO: 748932 - RNA, 20 nt, Human
uucaaggauggaaaggucag

SEQ ID NO: 748933 - RNA, 22 nt, Human
uuccuccggggcgcugggcccc

SEQ ID NO: 748934 - RNA, 19 nt, Human
uugcaucuccaaagucacc

SEQ ID NO: 748935 - RNA, 25 nt, Human
uuuagauccuuugguuuccuucucc

SEQ ID NO: 748936 - RNA, 19 nt, Human
uuucaaggauggaaagguc

SEQ ID NO: 748937 - RNA, 29 nt, Human
aaaaaaaaaaaacaaaaaacacagaaaag

SEQ ID NO: 748938 - RNA, 24 nt, Human
aaaaaaaaaacaaaaaacacagaa

SEQ ID NO: 748939 - RNA, 25 nt, Human
aaaaaaacaaaaaacacagaaaaca

SEQ ID NO: 748940 - RNA, 18 nt, Human
aaaaaaacaggaaugcag

SEQ ID NO: 748941 - RNA, 24 nt, Human
aaaaaacacagaaaacaggaaugc

SEQ ID NO: 748942 - RNA, 26 nt, Human
aaaaacacagaaaacaggaaugcagu

SEQ ID NO: 748943 - RNA, 19 nt, Human
aaaacaaaaaacacagaaa

SEQ ID NO: 748944 - RNA, 22 nt, Human
aaacaaaaaacacagaaaacag

SEQ ID NO: 748945 - RNA, 24 nt, Human
aaaggggugaaacaugaacagcca

SEQ ID NO: 748946 - RNA, 19 nt, Human
aacauagugagaccccauc

SEQ ID NO: 748947 - RNA, 20 nt, Human
aacauagugagaccccaucu

SEQ ID NO: 748948 - RNA, 21 nt, Human
aacauagugagaccccaucuc

SEQ ID NO: 748949 - RNA, 20 nt, Human
aacauggugaaacccugucu

SEQ ID NO: 748950 - RNA, 21 nt, Human
aacauggugaaacccugucuc

SEQ ID NO: 748951 - RNA, 18 nt, Human
aacccaaggaucuuccuc

SEQ ID NO: 748952 - RNA, 23 nt, Human
aaccccaccaccaccccaccauc

SEQ ID NO: 748953 - RNA, 26 nt, Human
aacccugucucuacuaaaaauaccac

SEQ ID NO: 748954 - RNA, 23 nt, Human
aaggcgggcggaucaugagguca

SEQ ID NO: 748955 - RNA, 24 nt, Human
aaucgcuugaacccgggaggcaga

SEQ ID NO: 748956 - RNA, 21 nt, Human
aauuuauagaagcacuuccuu

SEQ ID NO: 748957 - RNA, 24 nt, Human
acagagcgagacucugucucaaaa

SEQ ID NO: 748958 - RNA, 19 nt, Human
accacugcacuccagccug

SEQ ID NO: 748959 - RNA, 24 nt, Human
accacugcacuccagccuggguga

SEQ ID NO: 748960 - RNA, 26 nt, Human
accccaucucuacugcuacccuccaa

SEQ ID NO: 748961 - RNA, 18 nt, Human
acccugucucuacuaaaa

SEQ ID NO: 748962 - RNA, 24 nt, Human
acugcacuccagccugggugacag

SEQ ID NO: 748963 - RNA, 26 nt, Human
acugcacuccagccugggugacagag

SEQ ID NO: 748964 - RNA, 21 nt, Human
acugcucccuaggguuucuac

SEQ ID NO: 748965 - RNA, 20 nt, Human
acuuugguggaaccucuuaa

SEQ ID NO: 748966 - RNA, 23 nt, Human
agaaauaauauauauaaagagaa

SEQ ID NO: 748967 - RNA, 23 nt, Human
agaccccaucucuacugcuaccc

SEQ ID NO: 748968 - RNA, 22 nt, Human
agacugggcaacauagugagac

SEQ ID NO: 748969 - RNA, 24 nt, Human
agagguuucagugagcugaggucg

SEQ ID NO: 748970 - RNA, 22 nt, Human
agauaaggaugguaacugcaga

SEQ ID NO: 748971 - RNA, 24 nt, Human
agauaaggaugguaacugcagaaa

SEQ ID NO: 748972 - RNA, 18 nt, Human
agcacuuugggaagccga

SEQ ID NO: 748973 - RNA, 20 nt, Human
agcacuuugggaagccgagg

SEQ ID NO: 748974 - RNA, 20 nt, Human
agcacuuugggaggucaagg

SEQ ID NO: 748975 - RNA, 19 nt, Human
agccauggcucuguaagcu

SEQ ID NO: 748976 - RNA, 22 nt, Human
agccuggccaacauggugaaac

SEQ ID NO: 748977 - RNA, 24 nt, Human
agccuggccaacauggugaaaccc

SEQ ID NO: 748978 - RNA, 24 nt, Human
agccugggugacagagcgagacuc

SEQ ID NO: 748979 - RNA, 24 nt, Human
aggcacaguggcucacaccuguaa

SEQ ID NO: 748980 - RNA, 20 nt, Human
aggcagagguuucagugagc

SEQ ID NO: 748981 - RNA, 24 nt, Human
aggcagagguuucagugagcugag

SEQ ID NO: 748982 - RNA, 24 nt, Human
aggcgggcggaucaugaggucagg

SEQ ID NO: 748983 - RNA, 24 nt, Human
aggcugaugcaggagaaucgcuug

SEQ ID NO: 748984 - RNA, 20 nt, Human
aggucaaggcgggcggauca

SEQ ID NO: 748985 - RNA, 19 nt, Human
aguaaaaagcaucuccaga

SEQ ID NO: 748986 - RNA, 24 nt, Human
aguggcgggcgccuguaauccuag

SEQ ID NO: 748987 - RNA, 19 nt, Human
aucaugaggucaggaguuc

SEQ ID NO: 748988 - RNA, 20 nt, Human
aucaugaggucaggaguucc

SEQ ID NO: 748989 - RNA, 22 nt, Human
aucucuacugcuacccuccaaa

SEQ ID NO: 748990 - RNA, 18 nt, Human
augcaggagaaucgcuug

SEQ ID NO: 748991 - RNA, 19 nt, Human
augccuguaaucccagcac

SEQ ID NO: 748992 - RNA, 22 nt, Human
auuuguauuguaguugggauuc

SEQ ID NO: 748993 - RNA, 19 nt, Human
caaaaacaggcucuuggac

SEQ ID NO: 748994 - RNA, 18 nt, Human
caaaagcacugcucccua

SEQ ID NO: 748995 - RNA, 24 nt, Human
caacauggugaaacccugucucua

SEQ ID NO: 748996 - RNA, 21 nt, Human
caacccaaggaucuuccucag

SEQ ID NO: 748997 - RNA, 21 nt, Human
caaccccaccaccaccccacc

SEQ ID NO: 748998 - RNA, 25 nt, Human
caagugaauacaacuuuagacuuuu

SEQ ID NO: 748999 - RNA, 24 nt, Human
cacaccuguaauccgagcacuuug

SEQ ID NO: 749000 - RNA, 23 nt, Human
cacaugcugcuagcauuuugcuu

SEQ ID NO: 749001 - RNA, 20 nt, Human
caccaccaccccaccaucuc

SEQ ID NO: 749002 - RNA, 26 nt, Human
caccacugcacuccagccugggugac

SEQ ID NO: 749003 - RNA, 20 nt, Human
caccccuuaacagagcuuaa

SEQ ID NO: 749004 - RNA, 23 nt, Human
caccuguaauccgagcacuuugg

SEQ ID NO: 749005 - RNA, 24 nt, Human
caccuguaauccgagcacuuuggg

SEQ ID NO: 749006 - RNA, 27 nt, Human
caccuguaauccgagcacuuugggaag

SEQ ID NO: 749007 - RNA, 21 nt, Human
cacgguucaagcaaagguacc

SEQ ID NO: 749008 - RNA, 22 nt, Human
cacuccagccugggugacagag

SEQ ID NO: 749009 - RNA, 23 nt, Human
cacuccagccugggugacagagc

SEQ ID NO: 749010 - RNA, 24 nt, Human
cacuccagccugggugacagagcg

SEQ ID NO: 749011 - RNA, 19 nt, Human
cacugcacuccagccuggg

SEQ ID NO: 749012 - RNA, 19 nt, Human
cacugcacuccagccuggg

SEQ ID NO: 749013 - RNA, 22 nt, Human
cacugcacuccagccuggguga

SEQ ID NO: 749014 - RNA, 23 nt, Human
cacugcacuccagccugggugac

SEQ ID NO: 749015 - RNA, 24 nt, Human
cacugcacuccagccugggugaca

SEQ ID NO: 749016 - RNA, 25 nt, Human
cacugcacuccagccugggugacag

SEQ ID NO: 749017 - RNA, 18 nt, Human
cacuguuucaggaucacc

SEQ ID NO: 749018 - RNA, 22 nt, Human
cagagguuucagugagcugagg

SEQ ID NO: 749019 - RNA, 24 nt, Human
cagcacuuugggaggucaaggcgg

SEQ ID NO: 749020 - RNA, 19 nt, Human
caggaguucaagacuagaa

SEQ ID NO: 749021 - RNA, 19 nt, Human
caggaguucaagacuagac

SEQ ID NO: 749022 - RNA, 20 nt, Human
caggcucuuggacacuuucc

SEQ ID NO: 749023 - RNA, 23 nt, Human
cagguggcuucucuagucuguuu

SEQ ID NO: 749024 - RNA, 19 nt, Human
cagugagcugaggucgcac

SEQ ID NO: 749025 - RNA, 19 nt, Human
cauaggauaaaacuaugua

SEQ ID NO: 749026 - RNA, 24 nt, Human
cauagugagaccccaucucuacug

SEQ ID NO: 749027 - RNA, 19 nt, Human
caucauggguugugaugag

SEQ ID NO: 749028 - RNA, 23 nt, Human
caugaacugugauaacucagaua

SEQ ID NO: 749029 - RNA, 20 nt, Human
caugccuguaaucccagcac

SEQ ID NO: 749030 - RNA, 20 nt, Human
ccacugcacuccagccuggg

SEQ ID NO: 749031 - RNA, 20 nt, Human
ccacugcacuccagccuggg

SEQ ID NO: 749032 - RNA, 20 nt, Human
ccacugcacuccagccuggg

SEQ ID NO: 749033 - RNA, 21 nt, Human
ccacugcacuccagccugggu

SEQ ID NO: 749034 - RNA, 24 nt, Human
ccacugcacuccagccugggugac

SEQ ID NO: 749035 - RNA, 21 nt, Human
ccaucucuaugcuuugcuugc

SEQ ID NO: 749036 - RNA, 24 nt, Human
ccauguagcccaguaugcccaugu

SEQ ID NO: 749037 - RNA, 18 nt, Human
cccaaggaucuuccucag

SEQ ID NO: 749038 - RNA, 26 nt, Human
cccaucucuacugcuacccuccaaaa

SEQ ID NO: 749039 - RNA, 26 nt, Human
ccccaucucuacugcuacccuccaaa

SEQ ID NO: 749040 - RNA, 19 nt, Human
cccccuggugguuacgaag

SEQ ID NO: 749041 - RNA, 23 nt, Human
ccccuggugguuacgaaguuauc

SEQ ID NO: 749042 - RNA, 24 nt, Human
cccuaggguuucuacucucuucac

SEQ ID NO: 749043 - RNA, 21 nt, Human
ccuaagaauuuauagaagcac

SEQ ID NO: 749044 - RNA, 18 nt, Human
ccuaggguuucuacucuc

SEQ ID NO: 749045 - RNA, 22 nt, Human
ccuggccaacauggugaaaccc

SEQ ID NO: 749046 - RNA, 24 nt, Human
ccuggccaacauggugaaacccug

SEQ ID NO: 749047 - RNA, 22 nt, Human
ccugggugacagagcgagacuc

SEQ ID NO: 749048 - RNA, 20 nt, Human
ccuguaaucccagcacuuug

SEQ ID NO: 749049 - RNA, 24 nt, Human
ccuguaauccgagcacuuugggaa

SEQ ID NO: 749050 - RNA, 19 nt, Human
ccuguaauccuagcuacuc

SEQ ID NO: 749051 - RNA, 24 nt, Human
cgagaccagccuggccaacauggu

SEQ ID NO: 749052 - RNA, 21 nt, Human
cgcaccacugcacuccagccu

SEQ ID NO: 749053 - RNA, 24 nt, Human
cgccuguaauccuagcuacucggg

SEQ ID NO: 749054 - RNA, 22 nt, Human
cggaucaugaggucaggaguuc

SEQ ID NO: 749055 - RNA, 23 nt, Human
cuaccagaagcccagcuuguguu

SEQ ID NO: 749056 - RNA, 19 nt, Human
cuacuagacccagaugugg

SEQ ID NO: 749057 - RNA, 24 nt, Human
cucacaccuguaauccgagcacuu

SEQ ID NO: 749058 - RNA, 24 nt, Human
cucaugccuguaaucccagcacuu

SEQ ID NO: 749059 - RNA, 19 nt, Human
cucugucucaaaaaaaaaa

SEQ ID NO: 749060 - RNA, 22 nt, Human
cugaaguccauucuggcucugc

SEQ ID NO: 749061 - RNA, 24 nt, Human
cuggccaacauggugaaacccugu

SEQ ID NO: 749062 - RNA, 18 nt, Human
cuggcucugcuacuuaac

SEQ ID NO: 749063 - RNA, 19 nt, Human
cugggugaugucauuuucc

SEQ ID NO: 749064 - RNA, 23 nt, Human
cuguagcccaggaguucaagacu

SEQ ID NO: 749065 - RNA, 20 nt, Human
cugucuacaaacaguaaaag

SEQ ID NO: 749066 - RNA, 24 nt, Human
cugucucaaaaaaaaaaaacaaaa

SEQ ID NO: 749067 - RNA, 22 nt, Human
cuuaaaacacaugcugcuagca

SEQ ID NO: 749068 - RNA, 21 nt, Human
cuucacacaaccgcucccacc

SEQ ID NO: 749069 - RNA, 20 nt, Human
cuugcccagacucccuucac

SEQ ID NO: 749070 - RNA, 19 nt, Human
gaaacccugucucuacuaa

SEQ ID NO: 749071 - RNA, 24 nt, Human
gacagagcgagacucugucucaaa

SEQ ID NO: 749072 - RNA, 23 nt, Human
gagaaucgcuugaacccgggagg

SEQ ID NO: 749073 - RNA, 23 nt, Human
gaggucgcaccacugcacuccag

SEQ ID NO: 749074 - RNA, 22 nt, Human
gaucaugaggucaggaguucga

SEQ ID NO: 749075 - RNA, 24 nt, Human
gaucaugaggucaggaguucgaga

SEQ ID NO: 749076 - RNA, 20 nt, Human
gcaccacugcacuccagccu

SEQ ID NO: 749077 - RNA, 24 nt, Human
gcacuccagccugggugacagagc

SEQ ID NO: 749078 - RNA, 23 nt, Human
gcagauaacucuucacuggcuug

SEQ ID NO: 749079 - RNA, 22 nt, Human
gcaggagaaucgcuugaacccg

SEQ ID NO: 749080 - RNA, 24 nt, Human
gccaacauggugaaacccugucuc

SEQ ID NO: 749081 - RNA, 20 nt, Human
gcgguggcucaugccuguaa

SEQ ID NO: 749082 - RNA, 20 nt, Human
gcuaggcacaguggcucaca

SEQ ID NO: 749083 - RNA, 22 nt, Human
ggaaugcaggcugggugcggug

SEQ ID NO: 749084 - RNA, 27 nt, Human
ggaaugcaggcugggugcgguggcuca

SEQ ID NO: 749085 - RNA, 21 nt, Human
ggaucaugaggucaggaguuc

SEQ ID NO: 749086 - RNA, 21 nt, Human
ggaugguaacugcagaaauaa

SEQ ID NO: 749087 - RNA, 23 nt, Human
ggcggaucaugaggucaggaguu

SEQ ID NO: 749088 - RNA, 23 nt, Human
ggcgggcggaucaugaggucagg

SEQ ID NO: 749089 - RNA, 18 nt, Human
ggcguaguggcgggcgcc

SEQ ID NO: 749090 - RNA, 23 nt, Human
ggcguaguggcgggcgccuguaa

SEQ ID NO: 749091 - RNA, 19 nt, Human
ggcucaaagcugaguacac

SEQ ID NO: 749092 - RNA, 21 nt, Human
ggcucaugccuguaaucccag

SEQ ID NO: 749093 - RNA, 23 nt, Human
ggcugggugcgguggcucaugcc

SEQ ID NO: 749094 - RNA, 23 nt, Human
gguggcucaugccuguaauccca

SEQ ID NO: 749095 - RNA, 24 nt, Human
gguggcucaugccuguaaucccag

SEQ ID NO: 749096 - RNA, 23 nt, Human
guaaaaagcaucuccagauuaca

SEQ ID NO: 749097 - RNA, 18 nt, Human
gugaauacaacuuuagac

SEQ ID NO: 749098 - RNA, 24 nt, Human
gugacagagcgagacucugucuca

SEQ ID NO: 749099 - RNA, 24 nt, Human
guuacaaccagguggcuucucuag

SEQ ID NO: 749100 - RNA, 21 nt, Human
uaaagagaaaucacuccuggg

SEQ ID NO: 749101 - RNA, 20 nt, Human
uaacuguagcccaggaguuc

SEQ ID NO: 749102 - RNA, 19 nt, Human
uaagaauccauagccaugg

SEQ ID NO: 749103 - RNA, 20 nt, Human
uacguagcugguugaggagg

SEQ ID NO: 749104 - RNA, 24 nt, Human
uacuagacccagaugugguugcac

SEQ ID NO: 749105 - RNA, 18 nt, Human
uagcugggcguaguggcg

SEQ ID NO: 749106 - RNA, 23 nt, Human
uaggcuaggcacaguggcucaca

SEQ ID NO: 749107 - RNA, 22 nt, Human
uaguggcgggcgccuguaaucc

SEQ ID NO: 749108 - RNA, 21 nt, Human
ucaaacacaagugaauacaac

SEQ ID NO: 749109 - RNA, 19 nt, Human
ucaaagcaguguacugaug

SEQ ID NO: 749110 - RNA, 21 nt, Human
ucaacagguucuaggacccaa

SEQ ID NO: 749111 - RNA, 18 nt, Human
ucaagcaaagguacccag

SEQ ID NO: 749112 - RNA, 24 nt, Human
ucaugaggucaggaguucgagacc

SEQ ID NO: 749113 - RNA, 22 nt, Human
ucaugccuguaaucccagcacu

SEQ ID NO: 749114 - RNA, 19 nt, Human
uccaaagaauacucccugg

SEQ ID NO: 749115 - RNA, 23 nt, Human
uccagccugggugacagagcgag

SEQ ID NO: 749116 - RNA, 24 nt, Human
uccagccugggugacagagcgaga

SEQ ID NO: 749117 - RNA, 23 nt, Human
uccauagccauggcucuguaagc

SEQ ID NO: 749118 - RNA, 18 nt, Human
uccauucuggcucugcua

SEQ ID NO: 749119 - RNA, 21 nt, Human
uccugggugaugucauuuucc

SEQ ID NO: 749120 - RNA, 23 nt, Human
ucgcaccacugcacuccagccug

SEQ ID NO: 749121 - RNA, 18 nt, Human
ucgcuugaacccgggagg

SEQ ID NO: 749122 - RNA, 24 nt, Human
ucgggaggcugaugcaggagaauc

SEQ ID NO: 749123 - RNA, 25 nt, Human
ucuaaaccuaagaauuuauagaagc

SEQ ID NO: 749124 - RNA, 24 nt, Human
ucucaaaaaaaaaaaacaaaaaac

SEQ ID NO: 749125 - RNA, 21 nt, Human
ucucuacuaaaaauaccacaa

SEQ ID NO: 749126 - RNA, 22 nt, Human
ucucuacuaaaaauaccacaaa

SEQ ID NO: 749127 - RNA, 21 nt, Human
ucucuacugcuacccuccaaa

SEQ ID NO: 749128 - RNA, 20 nt, Human
ucugucucaaaaaaaaaaaa

SEQ ID NO: 749129 - RNA, 22 nt, Human
ucuucaaccccaccaccacccc

SEQ ID NO: 749130 - RNA, 25 nt, Human
ucuucaaccccaccaccaccccacc

SEQ ID NO: 749131 - RNA, 21 nt, Human
ucuucacuggcuuggagaaca

SEQ ID NO: 749132 - RNA, 23 nt, Human
ugacaauuauaccaacaaguuuc

SEQ ID NO: 749133 - RNA, 22 nt, Human
ugagcugaggucgcaccacugc

SEQ ID NO: 749134 - RNA, 24 nt, Human
ugaugcaggagaaucgcuugaacc

SEQ ID NO: 749135 - RNA, 25 nt, Human
ugcaggcugggugcgguggcucaug

SEQ ID NO: 749136 - RNA, 23 nt, Human
ugccuguaaucccagcacuuugg

SEQ ID NO: 749137 - RNA, 23 nt, Human
ugccuguaaucccagcacuuugg

SEQ ID NO: 749138 - RNA, 24 nt, Human
ugccuguaaucccagcacuuuggg

SEQ ID NO: 749139 - RNA, 26 nt, Human
ugcuuugcuugcccagacucccuuca

SEQ ID NO: 749140 - RNA, 24 nt, Human
uggccaacauggugaaacccuguc

SEQ ID NO: 749141 - RNA, 19 nt, Human
uggcucacaccuguaaucc

SEQ ID NO: 749142 - RNA, 19 nt, Human
uggcucacaccuguaaucc

SEQ ID NO: 749143 - RNA, 20 nt, Human
uggcucacaccuguaauccg

SEQ ID NO: 749144 - RNA, 22 nt, Human
uggcucaugccuguaaucccag

SEQ ID NO: 749145 - RNA, 24 nt, Human
uggcucaugccuguaaucccagca

SEQ ID NO: 749146 - RNA, 22 nt, Human
ugggcaacauagugagacccca

SEQ ID NO: 749147 - RNA, 21 nt, Human
uguagaguuccgccucuuaga

SEQ ID NO: 749148 - RNA, 24 nt, Human
ugugauguauugaaucugcccccu

SEQ ID NO: 749149 - RNA, 19 nt, Human
uguuuucaaagcaguguac

SEQ ID NO: 749150 - RNA, 18 nt, Human
uuaaaacacaugcugcua

SEQ ID NO: 749151 - RNA, 18 nt, Human
uuagcugggcguaguggc

SEQ ID NO: 749152 - RNA, 24 nt, Human
uuagcugggcguaguggcgggcgc

SEQ ID NO: 749153 - RNA, 21 nt, Human
uucaaccccaccaccacccca

SEQ ID NO: 749154 - RNA, 26 nt, Human
uucaaccccaccaccaccccaccauc

SEQ ID NO: 749155 - RNA, 21 nt, Human
uuccauguagcccaguaugcc

SEQ ID NO: 749156 - RNA, 20 nt, Human
uuuaacaauauuaaacccuc

SEQ ID NO: 749157 - RNA, 21 nt, Human
uuuaacaccagaaucuaugcc

SEQ ID NO: 749158 - RNA, 28 nt, Human
aacaacaacagcaacaauaacaagaaaa

SEQ ID NO: 749159 - RNA, 22 nt, Human
aacagcaacaauaacaagaaaa

SEQ ID NO: 749160 - RNA, 22 nt, Human
aagagacagggucucacucugu

SEQ ID NO: 749161 - RNA, 25 nt, Human
aagugaucuucccacuucagccucc

SEQ ID NO: 749162 - RNA, 23 nt, Human
acaaacaacaacagcaacaaaac

SEQ ID NO: 749163 - RNA, 22 nt, Human
acaacaacagcaacaauaacaa

SEQ ID NO: 749164 - RNA, 25 nt, Human
acaacaacagcaacaauaacaagaa

SEQ ID NO: 749165 - RNA, 20 nt, Human
acagcaacaauaacaagaaa

SEQ ID NO: 749166 - RNA, 25 nt, Human
acucugucccccaggcuggagugca

SEQ ID NO: 749167 - RNA, 23 nt, Human
acuucagccucccaaguagcuag

SEQ ID NO: 749168 - RNA, 25 nt, Human
agaguugggggagaguaggagaggg

SEQ ID NO: 749169 - RNA, 19 nt, Human
aggcuggagugcaguggca

SEQ ID NO: 749170 - RNA, 23 nt, Human
aguagcuaggaccacaggcacau

SEQ ID NO: 749171 - RNA, 23 nt, Human
agugcaguggcaccaucauggcu

SEQ ID NO: 749172 - RNA, 20 nt, Human
aucaugcuucauccacuuuc

SEQ ID NO: 749173 - RNA, 22 nt, Human
aucccuucaguuuucuuugcug

SEQ ID NO: 749174 - RNA, 26 nt, Human
auuaaaauuaaguuauucuuuccaca

SEQ ID NO: 749175 - RNA, 19 nt, Human
caaggccccuaauucuacc

SEQ ID NO: 749176 - RNA, 27 nt, Human
caagugaucuucccacuucagccuccc

SEQ ID NO: 749177 - RNA, 18 nt, Human
cacaggcacaugccacca

SEQ ID NO: 749178 - RNA, 22 nt, Human
caccaacucuuaucucucugca

SEQ ID NO: 749179 - RNA, 18 nt, Human
caccaugcuuggcuaauu

SEQ ID NO: 749180 - RNA, 22 nt, Human
cacucugucccccaggcuggag

SEQ ID NO: 749181 - RNA, 21 nt, Human
caguggcaccaucauggcuca

SEQ ID NO: 749182 - RNA, 20 nt, Human
cauggcucacugaagccuug

SEQ ID NO: 749183 - RNA, 23 nt, Human
cauucccauuuaagaaucaacau

SEQ ID NO: 749184 - RNA, 19 nt, Human
ccacuuucuaucuuccaga

SEQ ID NO: 749185 - RNA, 21 nt, Human
ccaucuugccuaggcuggucu

SEQ ID NO: 749186 - RNA, 21 nt, Human
ccgcuguucccugcagcgcgg

SEQ ID NO: 749187 - RNA, 19 nt, Human
ccggggcccaggccucggu

SEQ ID NO: 749188 - RNA, 21 nt, Human
ccugcagcgcggguucggggc

SEQ ID NO: 749189 - RNA, 22 nt, Human
ccugggcucaagugaucuuccc

SEQ ID NO: 749190 - RNA, 22 nt, Human
ccuugaacuccugggcucaagu

SEQ ID NO: 749191 - RNA, 23 nt, Human
ccuugaacuccugggcucaagug

SEQ ID NO: 749192 - RNA, 24 nt, Human
cgggauguugccaucuugccuagg

SEQ ID NO: 749193 - RNA, 24 nt, Human
cucaagugaucuucccacuucagc

SEQ ID NO: 749194 - RNA, 24 nt, Human
cucacucugucccccaggcuggag

SEQ ID NO: 749195 - RNA, 24 nt, Human
cucccaaguagcuaggaccacagg

SEQ ID NO: 749196 - RNA, 23 nt, Human
cuccugggcucaagugaucuucc

SEQ ID NO: 749197 - RNA, 19 nt, Human
cugaagccuugaacuccug

SEQ ID NO: 749198 - RNA, 23 nt, Human
cuucccacuucagccucccaagu

SEQ ID NO: 749199 - RNA, 20 nt, Human
cuuugggguuauguuguuca

SEQ ID NO: 749200 - RNA, 21 nt, Human
cuuuguaguauccuguuuuuc

SEQ ID NO: 749201 - RNA, 22 nt, Human
cuuuuugcucuuuaucuggaga

SEQ ID NO: 749202 - RNA, 22 nt, Human
gcacaugccaccaugcuuggcu

SEQ ID NO: 749203 - RNA, 18 nt, Human
gcacuugaguaggagguc

SEQ ID NO: 749204 - RNA, 23 nt, Human
gccuaggcuggucuugaacuccu

SEQ ID NO: 749205 - RNA, 20 nt, Human
gcuggagugcaguggcacca

SEQ ID NO: 749206 - RNA, 19 nt, Human
ggaccacaggcacaugcca

SEQ ID NO: 749207 - RNA, 22 nt, Human
ggaccacaggcacaugccacca

SEQ ID NO: 749208 - RNA, 22 nt, Human
ggauguugccaucuugccuagg

SEQ ID NO: 749209 - RNA, 20 nt, Human
ggcuggucuugaacuccuga

SEQ ID NO: 749210 - RNA, 21 nt, Human
gggcucaagugaucuucccac

SEQ ID NO: 749211 - RNA, 21 nt, Human
gggcucaagugaucuucccac

SEQ ID NO: 749212 - RNA, 18 nt, Human
gggggagaguaggagagg

SEQ ID NO: 749213 - RNA, 21 nt, Human
guagagacgggauguugccau

SEQ ID NO: 749214 - RNA, 23 nt, Human
guaggaggucucagcugucagua

SEQ ID NO: 749215 - RNA, 24 nt, Human
gugaucuucccacuucagccuccc

SEQ ID NO: 749216 - RNA, 24 nt, Human
gugcaguggcaccaucauggcuca

SEQ ID NO: 749217 - RNA, 21 nt, Human
uaaaaauuauuuuguagagac

SEQ ID NO: 749218 - RNA, 21 nt, Human
uaacaagaaauuuuuaacugg

SEQ ID NO: 749219 - RNA, 22 nt, Human
uaaccaaaucccuucaguuuuc

SEQ ID NO: 749220 - RNA, 21 nt, Human
uaccaaauacuuuuagcaguc

SEQ ID NO: 749221 - RNA, 24 nt, Human
uaccaaauacuuuuagcagucuua

SEQ ID NO: 749222 - RNA, 24 nt, Human
uaggaccacaggcacaugccacca

SEQ ID NO: 749223 - RNA, 24 nt, Human
uauaccaaauacuuuuagcagucu

SEQ ID NO: 749224 - RNA, 25 nt, Human
uauccuguuuuucaucuuaaauaca

SEQ ID NO: 749225 - RNA, 22 nt, Human
ucacugaagccuugaacuccug

SEQ ID NO: 749226 - RNA, 24 nt, Human
ucacugaagccuugaacuccuggg

SEQ ID NO: 749227 - RNA, 18 nt, Human
ucagccucccaaguagcu

SEQ ID NO: 749228 - RNA, 20 nt, Human
ucagccucccaaguagcuag

SEQ ID NO: 749229 - RNA, 23 nt, Human
ucaguagacaagcuuuucaggug

SEQ ID NO: 749230 - RNA, 24 nt, Human
ucccccaggcuggagugcaguggc

SEQ ID NO: 749231 - RNA, 26 nt, Human
ucccuccccaucgcccaugucuggga

SEQ ID NO: 749232 - RNA, 20 nt, Human
ucccugcagcgcggguucgg

SEQ ID NO: 749233 - RNA, 19 nt, Human
uccucuucccuccccaucg

SEQ ID NO: 749234 - RNA, 20 nt, Human
uccugggcucaagugaucuu

SEQ ID NO: 749235 - RNA, 24 nt, Human
uccugggcucaagugaucuuccca

SEQ ID NO: 749236 - RNA, 26 nt, Human
uccuuuauacaaacaacaacagcaac

SEQ ID NO: 749237 - RNA, 22 nt, Human
ucggucaccgcgggccucuccu

SEQ ID NO: 749238 - RNA, 19 nt, Human
ucuacgcugaaccccacuc

SEQ ID NO: 749239 - RNA, 21 nt, Human
ucucacucugucccccaggcu

SEQ ID NO: 749240 - RNA, 23 nt, Human
ucucacucugucccccaggcugg

SEQ ID NO: 749241 - RNA, 24 nt, Human
ucucacucugucccccaggcugga

SEQ ID NO: 749242 - RNA, 23 nt, Human
ucugcaagcagccuguucaauuc

SEQ ID NO: 749243 - RNA, 19 nt, Human
ucugucccccaggcuggag

SEQ ID NO: 749244 - RNA, 24 nt, Human
ucugucccccaggcuggagugcag

SEQ ID NO: 749245 - RNA, 22 nt, Human
ucugugcauaagaguuggggga

SEQ ID NO: 749246 - RNA, 22 nt, Human
ucuugccuaggcuggucuugaa

SEQ ID NO: 749247 - RNA, 25 nt, Human
ugagauccucuccacuuuccacagg

SEQ ID NO: 749248 - RNA, 24 nt, Human
ugccaucuugccuaggcuggucuu

SEQ ID NO: 749249 - RNA, 25 nt, Human
ugcuucauccacuuucuaucuucca

SEQ ID NO: 749250 - RNA, 21 nt, Human
uggagugcaguggcaccauca

SEQ ID NO: 749251 - RNA, 24 nt, Human
uggagugcaguggcaccaucaugg

SEQ ID NO: 749252 - RNA, 19 nt, Human
uggcauggguuuccucugc

SEQ ID NO: 749253 - RNA, 20 nt, Human
uggcauggguuuccucugcu

SEQ ID NO: 749254 - RNA, 21 nt, Human
uggcauggguuuccucugcug

SEQ ID NO: 749255 - RNA, 22 nt, Human
ugggcucaagugaucuucccac

SEQ ID NO: 749256 - RNA, 23 nt, Human
ugggcucaagugaucuucccacu

SEQ ID NO: 749257 - RNA, 20 nt, Human
uggguuuccucugcuguugu

SEQ ID NO: 749258 - RNA, 26 nt, Human
uuaaauacaccucaaaucucucugga

SEQ ID NO: 749259 - RNA, 23 nt, Human
uuccagaaauaugcugagauccu

SEQ ID NO: 749260 - RNA, 24 nt, Human
uuccagacuguauaccaaauacuu

SEQ ID NO: 749261 - RNA, 27 nt, Human
uucucuuucuuuucuugcuuuuuaaga

SEQ ID NO: 749262 - RNA, 21 nt, Human
uugucuuuguuucccucagag

SEQ ID NO: 749263 - RNA, 20 nt, Human
uuucaaggccccuaauucua

SEQ ID NO: 749264 - RNA, 24 nt, Human
uuuguagagacgggauguugccau

SEQ ID NO: 749265 - RNA, 20 nt, Human
aaagaguaguuuggacccac

SEQ ID NO: 749266 - RNA, 25 nt, Human
aagcacagguaccaaaauauuaucc

SEQ ID NO: 749267 - RNA, 23 nt, Human
acacacacacacacacacacaca

SEQ ID NO: 749268 - RNA, 23 nt, Human
acacacacacacacacacacaca

SEQ ID NO: 749269 - RNA, 25 nt, Human
acacacacacacacacacacacagu

SEQ ID NO: 749270 - RNA, 29 nt, Human
acacacacacacacacacacauaucccug

SEQ ID NO: 749271 - RNA, 25 nt, Human
acacacacacacacacacauauccc

SEQ ID NO: 749272 - RNA, 22 nt, Human
acgcaggcaugagggguaggga

SEQ ID NO: 749273 - RNA, 24 nt, Human
acuaggacccuagaaaaauucaag

SEQ ID NO: 749274 - RNA, 19 nt, Human
acuucagaaacguugcgaa

SEQ ID NO: 749275 - RNA, 24 nt, Human
agcauguaguauacagacauucug

SEQ ID NO: 749276 - RNA, 20 nt, Human
agggaugaagcacgcacugu

SEQ ID NO: 749277 - RNA, 18 nt, Human
aucuggagagaacuggag

SEQ ID NO: 749278 - RNA, 20 nt, Human
cacacacacacacacacaca

SEQ ID NO: 749279 - RNA, 20 nt, Human
cacacacacacacacacaca

SEQ ID NO: 749280 - RNA, 20 nt, Human
cacacacacacacacacaca

SEQ ID NO: 749281 - RNA, 20 nt, Human
cacacacacacacacacaca

SEQ ID NO: 749282 - RNA, 22 nt, Human
cacacacacacacacacacaca

SEQ ID NO: 749283 - RNA, 26 nt, Human
cacacacacacacacacacacacaua

SEQ ID NO: 749284 - RNA, 22 nt, Human
cacacacacacacacacacaua

SEQ ID NO: 749285 - RNA, 20 nt, Human
cacacacacacacacacaua

SEQ ID NO: 749286 - RNA, 22 nt, Human
caggagcagcgcgcaggcagag

SEQ ID NO: 749287 - RNA, 22 nt, Human
ccaauugcaaaauuugcaucca

SEQ ID NO: 749288 - RNA, 26 nt, Human
ccuggccccagcuucccaauaccagc

SEQ ID NO: 749289 - RNA, 19 nt, Human
cggaagcacuaggacccua

SEQ ID NO: 749290 - RNA, 31 nt, Human
cucuaacacacacacacacacacacacacag

SEQ ID NO: 749291 - RNA, 19 nt, Human
cuucugaacucagaugaaa

SEQ ID NO: 749292 - RNA, 20 nt, Human
cuuugaggaacagggcugug

SEQ ID NO: 749293 - RNA, 21 nt, Human
gagcagcgcgcaggcagagcg

SEQ ID NO: 749294 - RNA, 23 nt, Human
gcaaagaguaguuuggacccaca

SEQ ID NO: 749295 - RNA, 23 nt, Human
gcucugcucagcuuuggguauca

SEQ ID NO: 749296 - RNA, 22 nt, Human
ggccccagcuucccaauaccag

SEQ ID NO: 749297 - RNA, 20 nt, Human
guagggcaugcuaugacucc

SEQ ID NO: 749298 - RNA, 27 nt, Human
uaauuugacuuuaaaaaaaaugacacc

SEQ ID NO: 749299 - RNA, 20 nt, Human
uaccuuagcagcauguagua

SEQ ID NO: 749300 - RNA, 21 nt, Human
uagaacaaaagucugugaugg

SEQ ID NO: 749301 - RNA, 19 nt, Human
uaggucuuggaagucaaag

SEQ ID NO: 749302 - RNA, 28 nt, Human
uauuccguugcugccagucuauucuaac

SEQ ID NO: 749303 - RNA, 18 nt, Human
ucacgcaggcaugagggg

SEQ ID NO: 749304 - RNA, 23 nt, Human
ucacgcaggcaugagggguaggg

SEQ ID NO: 749305 - RNA, 23 nt, Human
uccaggcacaaacaauuuauuuc

SEQ ID NO: 749306 - RNA, 31 nt, Human
uccucucuaacacacacacacacacacacag

SEQ ID NO: 749307 - RNA, 18 nt, Human
ucucucucaucuggagag

SEQ ID NO: 749308 - RNA, 22 nt, Human
ucugaacucagaugaaacaacu

SEQ ID NO: 749309 - RNA, 19 nt, Human
ucugcucuuccucuuccuc

SEQ ID NO: 749310 - RNA, 24 nt, Human
ugaaaagauucucucucaucugga

SEQ ID NO: 749311 - RNA, 24 nt, Human
ugaaacuauaagcuagaggcuuac

SEQ ID NO: 749312 - RNA, 23 nt, Human
ugacaccaauugcaaaauuugca

SEQ ID NO: 749313 - RNA, 23 nt, Human
ugauuuauucacuaccuuagcag

SEQ ID NO: 749314 - RNA, 24 nt, Human
ugcauuuccaggcacaaacaauuu

SEQ ID NO: 749315 - RNA, 23 nt, Human
ugcgaacguuuccuucaaagaca

SEQ ID NO: 749316 - RNA, 22 nt, Human
ugcuuccaaauugacaacacaa

SEQ ID NO: 749317 - RNA, 19 nt, Human
uggcaagcacagguaccaa

SEQ ID NO: 749318 - RNA, 21 nt, Human
uguauaagaauccagaucugg

SEQ ID NO: 749319 - RNA, 20 nt, Human
uuaaguacuaagaaucuucu

SEQ ID NO: 749320 - RNA, 24 nt, Human
uucaaagacaguaaaauaaauaaa

SEQ ID NO: 749321 - RNA, 20 nt, Human
uucucauucuuccaccuuuu

SEQ ID NO: 749322 - RNA, 18 nt, Human
uucugcucuuccucuucc

SEQ ID NO: 749323 - RNA, 26 nt, Human
uuggacccacaauauugcauuacuga

SEQ ID NO: 749324 - RNA, 20 nt, Human
aaaaaaagauccuuccaaaa

SEQ ID NO: 749325 - RNA, 18 nt, Human
aacagccagcucaggucc

SEQ ID NO: 749326 - RNA, 20 nt, Human
aacagccagcucaggucccc

SEQ ID NO: 749327 - RNA, 18 nt, Human
aacuggacaugggggccu

SEQ ID NO: 749328 - RNA, 21 nt, Human
aagauccuuccaaagcuguau

SEQ ID NO: 749329 - RNA, 23 nt, Human
aagcuaauaccacugcuagugcu

SEQ ID NO: 749330 - RNA, 22 nt, Human
aaggauaaaggccgugcaguaa

SEQ ID NO: 749331 - RNA, 18 nt, Human
aaguccuccaaagcccuc

SEQ ID NO: 749332 - RNA, 20 nt, Human
acaggguugaggacaguggg

SEQ ID NO: 749333 - RNA, 18 nt, Human
agaaggcccugaggaguu

SEQ ID NO: 749334 - RNA, 24 nt, Human
aggaaacagccagcucaggucccc

SEQ ID NO: 749335 - RNA, 19 nt, Human
aggaguugggaggaaggga

SEQ ID NO: 749336 - RNA, 19 nt, Human
aggaguugggaggaaggga

SEQ ID NO: 749337 - RNA, 26 nt, Human
aggcacagauacagaaggcccugagg

SEQ ID NO: 749338 - RNA, 23 nt, Human
agggaagaaggugaccaucuagu

SEQ ID NO: 749339 - RNA, 18 nt, Human
agggcacaggcucugccc

SEQ ID NO: 749340 - RNA, 20 nt, Human
auggagcgagacgaaggcag

SEQ ID NO: 749341 - RNA, 24 nt, Human
auuggcccugcugucccaaguccu

SEQ ID NO: 749342 - RNA, 22 nt, Human
caaagcccucuccguaucacca

SEQ ID NO: 749343 - RNA, 25 nt, Human
caaagcccucuccguaucaccagcu

SEQ ID NO: 749344 - RNA, 20 nt, Human
cagagcagucaggcugggac

SEQ ID NO: 749345 - RNA, 19 nt, Human
cagauacagaaggcccuga

SEQ ID NO: 749346 - RNA, 20 nt, Human
cagcucagguccccgcccca

SEQ ID NO: 749347 - RNA, 20 nt, Human
caggcaaaggcccgaauaug

SEQ ID NO: 749348 - RNA, 25 nt, Human
ccaucuaguuaaagaaaaaaagauc

SEQ ID NO: 749349 - RNA, 18 nt, Human
ccccaggggcccagaagg

SEQ ID NO: 749350 - RNA, 18 nt, Human
cccgacccagggacuggc

SEQ ID NO: 749351 - RNA, 19 nt, Human
cccgccccaggggcccaga

SEQ ID NO: 749352 - RNA, 21 nt, Human
cccgccccaggggcccagaag

SEQ ID NO: 749353 - RNA, 24 nt, Human
ccucugggaggauccgcccgaccc

SEQ ID NO: 749354 - RNA, 20 nt, Human
ccuguccaccuucccaccca

SEQ ID NO: 749355 - RNA, 23 nt, Human
cgugcaguaaagggaacauacgg

SEQ ID NO: 749356 - RNA, 21 nt, Human
cucugcccuuggacccuagcc

SEQ ID NO: 749357 - RNA, 21 nt, Human
gacaugggggccugagcugcu

SEQ ID NO: 749358 - RNA, 18 nt, Human
gaggaagggagaacaaug

SEQ ID NO: 749359 - RNA, 21 nt, Human
gaggaguugggaggaagggag

SEQ ID NO: 749360 - RNA, 21 nt, Human
gaggauccgcccgacccaggg

SEQ ID NO: 749361 - RNA, 19 nt, Human
gccgugcaguaaagggaac

SEQ ID NO: 749362 - RNA, 18 nt, Human
ggagcuccaagacugaua

SEQ ID NO: 749363 - RNA, 26 nt, Human
ggcucugcccuuggacccuagcuuua

SEQ ID NO: 749364 - RNA, 21 nt, Human
gucccaaguccuccaaagccc

SEQ ID NO: 749365 - RNA, 18 nt, Human
gugaguuagcagccuagg

SEQ ID NO: 749366 - RNA, 22 nt, Human
uagcagccuaggcacuugggca

SEQ ID NO: 749367 - RNA, 20 nt, Human
ucccaaguccuccaaagccc

SEQ ID NO: 749368 - RNA, 21 nt, Human
ucucuuuggucaggcaaaggc

SEQ ID NO: 749369 - RNA, 18 nt, Human
ugaaagggcugaagggca

SEQ ID NO: 749370 - RNA, 21 nt, Human
ugaagggcacaggcucugccc

SEQ ID NO: 749371 - RNA, 19 nt, Human
ugaggacaguggggacaga

SEQ ID NO: 749372 - RNA, 22 nt, Human
ugaggaguugggaggaagggag

SEQ ID NO: 749373 - RNA, 21 nt, Human
ugcaggcaaagcaggaaacag

SEQ ID NO: 749374 - RNA, 19 nt, Human
ugcaguaaagggaacauac

SEQ ID NO: 749375 - RNA, 26 nt, Human
ugcccuuggacccuagcuuuaggcuc

SEQ ID NO: 749376 - RNA, 18 nt, Human
uguaagauccaguggcuu

SEQ ID NO: 749377 - RNA, 20 nt, Human
ugugguagggaagaagguga

SEQ ID NO: 749378 - RNA, 19 nt, Human
uuggugcaaaacuguaaag

SEQ ID NO: 749379 - RNA, 21 nt, Human
uuuuuuuuuuuuuuuuuuugg

SEQ ID NO: 749380 - RNA, 20 nt, Human
aaaaaacuuguccccuaaac

SEQ ID NO: 749381 - RNA, 19 nt, Human
aaaaauuuuuccacccuag

SEQ ID NO: 749382 - RNA, 21 nt, Human
aaaagaaaaagaaaaagaaag

SEQ ID NO: 749383 - RNA, 19 nt, Human
aaaagaaaaagaaagacaa

SEQ ID NO: 749384 - RNA, 23 nt, Human
aaaagaaaaagaaagacaaucuu

SEQ ID NO: 749385 - RNA, 21 nt, Human
aaagggagauagggguggggc

SEQ ID NO: 749386 - RNA, 24 nt, Human
aaagggagauagggguggggcugu

SEQ ID NO: 749387 - RNA, 23 nt, Human
aaauaggacuccaguguugugga

SEQ ID NO: 749388 - RNA, 22 nt, Human
aacugugagccaauuaaaccuc

SEQ ID NO: 749389 - RNA, 25 nt, Human
aacuuguccccuaaacuugauccug

SEQ ID NO: 749390 - RNA, 22 nt, Human
aagccaauucugucagaccaca

SEQ ID NO: 749391 - RNA, 29 nt, Human
aagcuuuucuuuaagauaugagaggaaga

SEQ ID NO: 749392 - RNA, 18 nt, Human
aagucaucuucaaagcug

SEQ ID NO: 749393 - RNA, 23 nt, Human
aaguugauuucuucaaaggaggu

SEQ ID NO: 749394 - RNA, 20 nt, Human
aaugucaaagcuugggagaa

SEQ ID NO: 749395 - RNA, 21 nt, Human
accuccccuuuccuuuguucc

SEQ ID NO: 749396 - RNA, 21 nt, Human
acuguccugcuuccucagaaa

SEQ ID NO: 749397 - RNA, 22 nt, Human
agaaagaaacuggauuuaagga

SEQ ID NO: 749398 - RNA, 22 nt, Human
agacaaucuuguuuuugugcuu

SEQ ID NO: 749399 - RNA, 19 nt, Human
agagaaaccaguguacaga

SEQ ID NO: 749400 - RNA, 22 nt, Human
agcaccaucuccccuugguacu

SEQ ID NO: 749401 - RNA, 18 nt, Human
agccagaaagugaggugu

SEQ ID NO: 749402 - RNA, 22 nt, Human
aggaauuucacaaaguaauguc

SEQ ID NO: 749403 - RNA, 24 nt, Human
aggcaggggugggggucacaaggu

SEQ ID NO: 749404 - RNA, 25 nt, Human
aggcaggggugggggucacaaggug

SEQ ID NO: 749405 - RNA, 19 nt, Human
agggagauagggguggggc

SEQ ID NO: 749406 - RNA, 23 nt, Human
aguguggccuccgcucccagggu

SEQ ID NO: 749407 - RNA, 25 nt, Human
auaaagcuuuucuuuaagauaugag

SEQ ID NO: 749408 - RNA, 20 nt, Human
auccuacuuaucucuuuuuc

SEQ ID NO: 749409 - RNA, 28 nt, Human
augaaucuuuuuuucuacauaaagcuuu

SEQ ID NO: 749410 - RNA, 20 nt, Human
augcugccuuucuccugcag

SEQ ID NO: 749411 - RNA, 22 nt, Human
caaagcaaacuacagcuguuag

SEQ ID NO: 749412 - RNA, 18 nt, Human
caaaguaaugucaucugu

SEQ ID NO: 749413 - RNA, 24 nt, Human
caagucccucucuuccuguuuuuu

SEQ ID NO: 749414 - RNA, 25 nt, Human
caauggcuaggagaagagacucuga

SEQ ID NO: 749415 - RNA, 24 nt, Human
cacuagaucacugugagaacugaa

SEQ ID NO: 749416 - RNA, 19 nt, Human
cacugcaugugcucaagcu

SEQ ID NO: 749417 - RNA, 25 nt, Human
cagaaaauccuucuucagaguaucc

SEQ ID NO: 749418 - RNA, 22 nt, Human
cagaacaaaaucaacuucuguu

SEQ ID NO: 749419 - RNA, 18 nt, Human
caggggugggggucacaa

SEQ ID NO: 749420 - RNA, 24 nt, Human
caugcaggucacaggggauaugau

SEQ ID NO: 749421 - RNA, 24 nt, Human
ccaaacuacagccaagaucaagua

SEQ ID NO: 749422 - RNA, 19 nt, Human
ccagaagaaggaauuucac

SEQ ID NO: 749423 - RNA, 23 nt, Human
ccagccucuucccaguuuuacaa

SEQ ID NO: 749424 - RNA, 20 nt, Human
ccaugcugccuuucuccugc

SEQ ID NO: 749425 - RNA, 18 nt, Human
ccaugcuuuuagagccag

SEQ ID NO: 749426 - RNA, 23 nt, Human
ccauuguuggagguggggccugg

SEQ ID NO: 749427 - RNA, 19 nt, Human
cccacaauggcuaggagaa

SEQ ID NO: 749428 - RNA, 19 nt, Human
cccauuguuggaggugggg

SEQ ID NO: 749429 - RNA, 25 nt, Human
ccccagaaacugauguugccaugcu

SEQ ID NO: 749430 - RNA, 19 nt, Human
ccuaaugcuggcaauagca

SEQ ID NO: 749431 - RNA, 20 nt, Human
ccuccccuuuccuuuguucc

SEQ ID NO: 749432 - RNA, 19 nt, Human
ccuuuugucucugccucac

SEQ ID NO: 749433 - RNA, 19 nt, Human
cgaaaucagaccuccuccc

SEQ ID NO: 749434 - RNA, 24 nt, Human
cgaaaucagaccuccucccugcaa

SEQ ID NO: 749435 - RNA, 28 nt, Human
cgucaugaaucuuuuuuucuacauaaag

SEQ ID NO: 749436 - RNA, 23 nt, Human
cuaggagaagagacucugaaucc

SEQ ID NO: 749437 - RNA, 22 nt, Human
cucaagucccucucuuccuguu

SEQ ID NO: 749438 - RNA, 21 nt, Human
cucacaauuuauuaggcagcc

SEQ ID NO: 749439 - RNA, 24 nt, Human
cucauuuaaaaagaaaaagaaaaa

SEQ ID NO: 749440 - RNA, 24 nt, Human
cuccugguuucugugggugggaag

SEQ ID NO: 749441 - RNA, 21 nt, Human
cugcuggaagccaaacuacag

SEQ ID NO: 749442 - RNA, 19 nt, Human
cuucaggcccuugaccucc

SEQ ID NO: 749443 - RNA, 22 nt, Human
gaaaauccuucuucagaguauc

SEQ ID NO: 749444 - RNA, 24 nt, Human
gaaagugagguguccuuccucucu

SEQ ID NO: 749445 - RNA, 23 nt, Human
gacuucaggcccuugaccucccu

SEQ ID NO: 749446 - RNA, 22 nt, Human
gaucuguguccucacccaaauc

SEQ ID NO: 749447 - RNA, 25 nt, Human
gauuauucucuggcaggcaggggug

SEQ ID NO: 749448 - RNA, 18 nt, Human
gauucuccacuugcuuca

SEQ ID NO: 749449 - RNA, 19 nt, Human
gcccacugcugucuuuuga

SEQ ID NO: 749450 - RNA, 18 nt, Human
gcgucaugaaucuuuuuu

SEQ ID NO: 749451 - RNA, 22 nt, Human
ggaaggguaggaaacuuggagu

SEQ ID NO: 749452 - RNA, 19 nt, Human
ggagauagggguggggcug

SEQ ID NO: 749453 - RNA, 20 nt, Human
ggcaggcagggguggggguc

SEQ ID NO: 749454 - RNA, 24 nt, Human
ggcuaggagaagagacucugaauc

SEQ ID NO: 749455 - RNA, 19 nt, Human
ggcucagaggccugacagu

SEQ ID NO: 749456 - RNA, 24 nt, Human
ggcugaguccaaaaagagagucag

SEQ ID NO: 749457 - RNA, 23 nt, Human
gggaaggguaggaaacuuggagu

SEQ ID NO: 749458 - RNA, 22 nt, Human
gggagauagggguggggcuguu

SEQ ID NO: 749459 - RNA, 19 nt, Human
gggcucagaggccugacag

SEQ ID NO: 749460 - RNA, 21 nt, Human
gggcuuuuuccaaauugugaa

SEQ ID NO: 749461 - RNA, 18 nt, Human
gggucacaaggugcucag

SEQ ID NO: 749462 - RNA, 21 nt, Human
ggucuuccuccccauguacca

SEQ ID NO: 749463 - RNA, 23 nt, Human
gguggggcuguuuuauaggauuu

SEQ ID NO: 749464 - RNA, 24 nt, Human
gucaaaggggauuauucucuggcc

SEQ ID NO: 749465 - RNA, 24 nt, Human
guccuuccucucuucacuugggcc

SEQ ID NO: 749466 - RNA, 22 nt, Human
guuaggaauacagggaugaaca

SEQ ID NO: 749467 - RNA, 23 nt, Human
uaaaaagaaaaagaaaaagaaag

SEQ ID NO: 749468 - RNA, 26 nt, Human
uaaaaauaguagauauuucuucucuc

SEQ ID NO: 749469 - RNA, 21 nt, Human
uaaagcucccugaggccuccc

SEQ ID NO: 749470 - RNA, 25 nt, Human
uaaagcucccugaggccuccccaga

SEQ ID NO: 749471 - RNA, 25 nt, Human
uaagaugccugcucccacuuugcuu

SEQ ID NO: 749472 - RNA, 24 nt, Human
uaaugucaucuguuaaggcagcaa

SEQ ID NO: 749473 - RNA, 27 nt, Human
uacacacauaguagagaaaccagugua

SEQ ID NO: 749474 - RNA, 23 nt, Human
uacagccaagaucaaguagcugg

SEQ ID NO: 749475 - RNA, 22 nt, Human
uacaugcaggucacaggggaua

SEQ ID NO: 749476 - RNA, 24 nt, Human
uaccaugcugccuuucuccugcag

SEQ ID NO: 749477 - RNA, 22 nt, Human
uacuggguagaguuuucauuaa

SEQ ID NO: 749478 - RNA, 19 nt, Human
uagcaccuccccuuuccuu

SEQ ID NO: 749479 - RNA, 22 nt, Human
uagcagugugagaauggacuaa

SEQ ID NO: 749480 - RNA, 22 nt, Human
uaggaaacuuggaguggggggc

SEQ ID NO: 749481 - RNA, 19 nt, Human
uaggaauacagggaugaac

SEQ ID NO: 749482 - RNA, 20 nt, Human
uaguagauauuucuucucuc

SEQ ID NO: 749483 - RNA, 26 nt, Human
uaguuccccugucuccugguuucugu

SEQ ID NO: 749484 - RNA, 23 nt, Human
uaucaugucugguguaauuuuuu

SEQ ID NO: 749485 - RNA, 22 nt, Human
ucaaagcuggucccauggcugc

SEQ ID NO: 749486 - RNA, 20 nt, Human
ucagaccacaugcuguugug

SEQ ID NO: 749487 - RNA, 22 nt, Human
ucagaccacaugcuguuguggu

SEQ ID NO: 749488 - RNA, 20 nt, Human
ucagcaaagggagauagggg

SEQ ID NO: 749489 - RNA, 26 nt, Human
ucauuuaaaaagaaaaagaaaaagaa

SEQ ID NO: 749490 - RNA, 18 nt, Human
uccaagaugcucugaaac

SEQ ID NO: 749491 - RNA, 21 nt, Human
uccaagaugcucugaaaccac

SEQ ID NO: 749492 - RNA, 21 nt, Human
ucccagggucaagucaucuuc

SEQ ID NO: 749493 - RNA, 18 nt, Human
ucccauggcugcagaagc

SEQ ID NO: 749494 - RNA, 19 nt, Human
ucccauggcugcagaagcc

SEQ ID NO: 749495 - RNA, 19 nt, Human
uccccagaaacugauguug

SEQ ID NO: 749496 - RNA, 21 nt, Human
uccccauguaccaugcugccu

SEQ ID NO: 749497 - RNA, 23 nt, Human
uccuagugugagauguaccaugc

SEQ ID NO: 749498 - RNA, 25 nt, Human
uccuagugugagauguaccaugcuu

SEQ ID NO: 749499 - RNA, 23 nt, Human
uccuggagaagaguuugccauug

SEQ ID NO: 749500 - RNA, 20 nt, Human
ucgcucagucuggucuuccu

SEQ ID NO: 749501 - RNA, 24 nt, Human
ucucaagaagaaaaauaggacucc

SEQ ID NO: 749502 - RNA, 26 nt, Human
ucucaggggagaaaugugacguaaac

SEQ ID NO: 749503 - RNA, 24 nt, Human
ucucauuuaaaaagaaaaagaaaa

SEQ ID NO: 749504 - RNA, 22 nt, Human
ucucuaggaccugagaaccacc

SEQ ID NO: 749505 - RNA, 24 nt, Human
ucucuggcaggcaggggugggggu

SEQ ID NO: 749506 - RNA, 24 nt, Human
ucugccaacagaaauagcauuuuu

SEQ ID NO: 749507 - RNA, 21 nt, Human
ucugcuucuuuucucccuucc

SEQ ID NO: 749508 - RNA, 19 nt, Human
ucugucagaccacaugcug

SEQ ID NO: 749509 - RNA, 21 nt, Human
ugagaacugaacgaaaucaga

SEQ ID NO: 749510 - RNA, 20 nt, Human
ugaguuaaagcucccugagg

SEQ ID NO: 749511 - RNA, 27 nt, Human
ugauggcuuagcuugggcucagaggcc

SEQ ID NO: 749512 - RNA, 25 nt, Human
ugauuggauuacuggguagaguucc

SEQ ID NO: 749513 - RNA, 22 nt, Human
ugcaacuaauuccauuccacaa

SEQ ID NO: 749514 - RNA, 27 nt, Human
ugcuucuuuucucccuuccucccaaga

SEQ ID NO: 749515 - RNA, 26 nt, Human
uggauuacuggguagaguuuucauua

SEQ ID NO: 749516 - RNA, 24 nt, Human
uggcugcagaagccauuguagaua

SEQ ID NO: 749517 - RNA, 21 nt, Human
ugggaaggguaggaaacuugg

SEQ ID NO: 749518 - RNA, 21 nt, Human
uggggaauuaguaaacacaga

SEQ ID NO: 749519 - RNA, 24 nt, Human
uggguggugauuggauuacugggu

SEQ ID NO: 749520 - RNA, 23 nt, Human
ugguggguggugauuggauuacu

SEQ ID NO: 749521 - RNA, 21 nt, Human
uguacagagaaaugaagagau

SEQ ID NO: 749522 - RNA, 19 nt, Human
uguauacaugcaggucaca

SEQ ID NO: 749523 - RNA, 24 nt, Human
ugucucgaggaaacuccuggagaa

SEQ ID NO: 749524 - RNA, 18 nt, Human
uguggugguggagaaagc

SEQ ID NO: 749525 - RNA, 24 nt, Human
uguuagcaccuccccuuuccuuug

SEQ ID NO: 749526 - RNA, 20 nt, Human
uguuguggugguggagaaag

SEQ ID NO: 749527 - RNA, 27 nt, Human
uguuuuacucuuaugacuguggucuca

SEQ ID NO: 749528 - RNA, 19 nt, Human
uuaaucaccugggugcagg

SEQ ID NO: 749529 - RNA, 21 nt, Human
uuccuuucccacaagggugga

SEQ ID NO: 749530 - RNA, 20 nt, Human
uucugccaacagaaauagca

SEQ ID NO: 749531 - RNA, 20 nt, Human
uugaagccaauucugucaga

SEQ ID NO: 749532 - RNA, 21 nt, Human
uugauccugaagucuccuaac

SEQ ID NO: 749533 - RNA, 25 nt, Human
uugcuuccuaccaaauaagcauuua

SEQ ID NO: 749534 - RNA, 23 nt, Human
uuggggguuuggaggaccaagga

SEQ ID NO: 749535 - RNA, 20 nt, Human
uugucucugccucacuacgu

SEQ ID NO: 749536 - RNA, 18 nt, Human
uuguuggagguggggccu

SEQ ID NO: 749537 - RNA, 24 nt, Human
uuuaaaaagaaaaagaaaaagaaa

SEQ ID NO: 749538 - RNA, 30 nt, Human
uuuaaaaauuuuuccacccuagcccuuuuu

SEQ ID NO: 749539 - RNA, 19 nt, Human
uuuucuuuaagauaugaga

SEQ ID NO: 749540 - RNA, 18 nt, Human
uuuuuuuuuuuucuuuug

SEQ ID NO: 749541 - RNA, 23 nt, Human
accaaaggucacagacaugcguu

SEQ ID NO: 749542 - RNA, 22 nt, Human
aggaggcugagaggggaggagg

SEQ ID NO: 749543 - RNA, 22 nt, Human
agucgugugcggcaguggugcg

SEQ ID NO: 749544 - RNA, 25 nt, Human
caggcaucacagugguuaaagucuu

SEQ ID NO: 749545 - RNA, 22 nt, Human
caucacagugguuaaagucuuc

SEQ ID NO: 749546 - RNA, 24 nt, Human
cucggcccuggccgcgggcgcagc

SEQ ID NO: 749547 - RNA, 18 nt, Human
gcaaaauacaggguuccg

SEQ ID NO: 749548 - RNA, 21 nt, Human
gccucggcccuggccgcgggc

SEQ ID NO: 749549 - RNA, 21 nt, Human
ggaggcuagcuaaagaggagg

SEQ ID NO: 749550 - RNA, 20 nt, Human
gggaggcuagcuaaagagga

SEQ ID NO: 749551 - RNA, 19 nt, Human
ggguugccauguuccgaaa

SEQ ID NO: 749552 - RNA, 25 nt, Human
uacagcaucaaauaccauaaauaaa

SEQ ID NO: 749553 - RNA, 21 nt, Human
uaccaaaggucacagacaugc

SEQ ID NO: 749554 - RNA, 23 nt, Human
ucacagugguuaaagucuucucu

SEQ ID NO: 749555 - RNA, 22 nt, Human
ucaggagucgugugcggcagug

SEQ ID NO: 749556 - RNA, 21 nt, Human
ucuucucuuucugggaugaga

SEQ ID NO: 749557 - RNA, 22 nt, Human
ugagaggggaggagggcacucu

SEQ ID NO: 749558 - RNA, 27 nt, Human
ugagaggggaggagggcacucuuuggu

SEQ ID NO: 749559 - RNA, 22 nt, Human
ugaugagauggggaggcuagcu

SEQ ID NO: 749560 - RNA, 21 nt, Human
uggcacuguaaaugauuacca

SEQ ID NO: 749561 - RNA, 19 nt, Human
ugggaugagacacacacgg

SEQ ID NO: 749562 - RNA, 25 nt, Human
uguaaaugauuaccaaaggucacag

SEQ ID NO: 749563 - RNA, 23 nt, Human
uugccauguuccgaaagucgcgc

SEQ ID NO: 749564 - RNA, 20 nt, Human
aaggugcugggauuacaggc

SEQ ID NO: 749565 - RNA, 24 nt, Human
aaggugcugggauuacaggcguga

SEQ ID NO: 749566 - RNA, 22 nt, Human
accucaaccucuaccaccucgg

SEQ ID NO: 749567 - RNA, 23 nt, Human
acggaguuucgcucguugcccag

SEQ ID NO: 749568 - RNA, 24 nt, Human
agaaagcucaaaccagaguggccc

SEQ ID NO: 749569 - RNA, 22 nt, Human
aggcgugagccacugugcccgg

SEQ ID NO: 749570 - RNA, 26 nt, Human
aggugcugggauuacaggcgugagcc

SEQ ID NO: 749571 - RNA, 23 nt, Human
aguagcugggauugcaggcaugu

SEQ ID NO: 749572 - RNA, 24 nt, Human
agugcaauggcacaaccuuggcuc

SEQ ID NO: 749573 - RNA, 24 nt, Human
auggcaguuaaaaugaaaggcaag

SEQ ID NO: 749574 - RNA, 19 nt, Human
caaaauucccaaaucucau

SEQ ID NO: 749575 - RNA, 21 nt, Human
caaggugcugggauuacaggc

SEQ ID NO: 749576 - RNA, 24 nt, Human
caaggugcugggauuacaggcgug

SEQ ID NO: 749577 - RNA, 19 nt, Human
caagugauucuccugccuu

SEQ ID NO: 749578 - RNA, 22 nt, Human
caagugauucuccugccuuggc

SEQ ID NO: 749579 - RNA, 22 nt, Human
cacaaccuuggcucaccucaac

SEQ ID NO: 749580 - RNA, 22 nt, Human
caggcaugugacaccacaccca

SEQ ID NO: 749581 - RNA, 19 nt, Human
cccaggcuggagugcaaug

SEQ ID NO: 749582 - RNA, 20 nt, Human
ccucgguucaagugauucuc

SEQ ID NO: 749583 - RNA, 23 nt, Human
ccucgguucaagugauucuccuc

SEQ ID NO: 749584 - RNA, 23 nt, Human
ccucgguucaagugauucuccug

SEQ ID NO: 749585 - RNA, 23 nt, Human
ccugaguagcugggauugcaggc

SEQ ID NO: 749586 - RNA, 24 nt, Human
ccugaguagcugggauugcaggca

SEQ ID NO: 749587 - RNA, 23 nt, Human
ccugccuuggccuccugaguagc

SEQ ID NO: 749588 - RNA, 21 nt, Human
cgcucguugcccaggcuggag

SEQ ID NO: 749589 - RNA, 23 nt, Human
cggaguuucgcucguugcccagg

SEQ ID NO: 749590 - RNA, 20 nt, Human
cguugcccaggcuggagugc

SEQ ID NO: 749591 - RNA, 24 nt, Human
cucaaugucagucaggcuggucuc

SEQ ID NO: 749592 - RNA, 26 nt, Human
cuccugaccucugcugauccgcccgu

SEQ ID NO: 749593 - RNA, 24 nt, Human
cucguugcccaggcuggagugcaa

SEQ ID NO: 749594 - RNA, 24 nt, Human
cugaguagcugggauugcaggcau

SEQ ID NO: 749595 - RNA, 23 nt, Human
cugccuuggccuccugaguagcu

SEQ ID NO: 749596 - RNA, 19 nt, Human
cugugcccggugugacucu

SEQ ID NO: 749597 - RNA, 24 nt, Human
cuuggccuccugaguagcugggau

SEQ ID NO: 749598 - RNA, 20 nt, Human
gaggcaacaacuauaagcac

SEQ ID NO: 749599 - RNA, 22 nt, Human
gaguagcugggauugcaggcau

SEQ ID NO: 749600 - RNA, 18 nt, Human
gauuacaggcgugagcca

SEQ ID NO: 749601 - RNA, 19 nt, Human
gauuacaggcgugagccac

SEQ ID NO: 749602 - RNA, 21 nt, Human
gauuacaggcgugagccacug

SEQ ID NO: 749603 - RNA, 19 nt, Human
gcccaggcuggagugcaau

SEQ ID NO: 749604 - RNA, 19 nt, Human
gcuggagugcaauggcaca

SEQ ID NO: 749605 - RNA, 23 nt, Human
gcuggucucaaacuccugaccuc

SEQ ID NO: 749606 - RNA, 22 nt, Human
ggaguuucgcucguugcccagg

SEQ ID NO: 749607 - RNA, 21 nt, Human
ggcaacaacuauaagcacauc

SEQ ID NO: 749608 - RNA, 24 nt, Human
ggcuggucucaaacuccugaccuc

SEQ ID NO: 749609 - RNA, 18 nt, Human
ggugcugggauuacaggc

SEQ ID NO: 749610 - RNA, 21 nt, Human
gguucaagugauucuccugcc

SEQ ID NO: 749611 - RNA, 20 nt, Human
guagcugggauugcaggcau

SEQ ID NO: 749612 - RNA, 21 nt, Human
gugcugggauuacaggcguga

SEQ ID NO: 749613 - RNA, 21 nt, Human
gugggguuucucaaugucagu

SEQ ID NO: 749614 - RNA, 24 nt, Human
guuucgcucguugcccaggcugga

SEQ ID NO: 749615 - RNA, 23 nt, Human
uaaaaugaaaggcaagaccuaua

SEQ ID NO: 749616 - RNA, 22 nt, Human
uaauuuuguauuuuuaggagcg

SEQ ID NO: 749617 - RNA, 23 nt, Human
uacaggcgugagccacugugccc

SEQ ID NO: 749618 - RNA, 23 nt, Human
uacaggcgugagccacugugccc

SEQ ID NO: 749619 - RNA, 23 nt, Human
uaguaguuuuuaaaccaaaauuc

SEQ ID NO: 749620 - RNA, 22 nt, Human
ucaaggugcugggauuacaggc

SEQ ID NO: 749621 - RNA, 24 nt, Human
ucaaggugcugggauuacaggcgu

SEQ ID NO: 749622 - RNA, 19 nt, Human
ucaagugauucuccugccu

SEQ ID NO: 749623 - RNA, 24 nt, Human
ucccaaaucucauuucuggcagaa

SEQ ID NO: 749624 - RNA, 24 nt, Human
uccugaguagcugggauugcaggc

SEQ ID NO: 749625 - RNA, 19 nt, Human
ucgcucguugcccaggcug

SEQ ID NO: 749626 - RNA, 20 nt, Human
ucgcucguugcccaggcugg

SEQ ID NO: 749627 - RNA, 21 nt, Human
ucgcucguugcccaggcugga

SEQ ID NO: 749628 - RNA, 24 nt, Human
ucgguucaagugauucuccugccu

SEQ ID NO: 749629 - RNA, 21 nt, Human
ucucaaacuccugaccucugc

SEQ ID NO: 749630 - RNA, 24 nt, Human
ucucaaggugcugggauuacaggc

SEQ ID NO: 749631 - RNA, 23 nt, Human
ucugagacaacuaagcugcauuu

SEQ ID NO: 749632 - RNA, 20 nt, Human
ugaacgcccaggacaucuuc

SEQ ID NO: 749633 - RNA, 22 nt, Human
ugaagcuuccugcaccaggucc

SEQ ID NO: 749634 - RNA, 23 nt, Human
ugaagcuuccugcaccagguccu

SEQ ID NO: 749635 - RNA, 20 nt, Human
ugauucuccugccuuggccu

SEQ ID NO: 749636 - RNA, 20 nt, Human
ugcaauggcacaaccuuggc

SEQ ID NO: 749637 - RNA, 24 nt, Human
ugccaacguucaguugccagaaug

SEQ ID NO: 749638 - RNA, 18 nt, Human
ugcccaggcuggagugca

SEQ ID NO: 749639 - RNA, 21 nt, Human
ugcccaggcuggagugcaaug

SEQ ID NO: 749640 - RNA, 24 nt, Human
ugcccaggcuggagugcaauggca

SEQ ID NO: 749641 - RNA, 20 nt, Human
ugccuuggccuccugaguaa

SEQ ID NO: 749642 - RNA, 24 nt, Human
ugcugggauuacaggcgugagcca

SEQ ID NO: 749643 - RNA, 23 nt, Human
uggagugcaauggcacaaccuug

SEQ ID NO: 749644 - RNA, 24 nt, Human
uggagugcaauggcacaaccuugg

SEQ ID NO: 749645 - RNA, 24 nt, Human
uggcacaaccuuggcucaccucaa

SEQ ID NO: 749646 - RNA, 19 nt, Human
uggcagaaagcucaaacca

SEQ ID NO: 749647 - RNA, 20 nt, Human
uggccuccugaguagcuggg

SEQ ID NO: 749648 - RNA, 19 nt, Human
uggcucaccucaaccucua

SEQ ID NO: 749649 - RNA, 18 nt, Human
ugggauuacaggcgugag

SEQ ID NO: 749650 - RNA, 21 nt, Human
ugggauuacaggcgugagcca

SEQ ID NO: 749651 - RNA, 22 nt, Human
ugggauuacaggcgugagccac

SEQ ID NO: 749652 - RNA, 22 nt, Human
ugggauuacaggcgugagccac

SEQ ID NO: 749653 - RNA, 22 nt, Human
ugggauuacaggcgugagccac

SEQ ID NO: 749654 - RNA, 24 nt, Human
ugggauuacaggcgugagccacug

SEQ ID NO: 749655 - RNA, 26 nt, Human
ugggauuacaggcgugagccacugug

SEQ ID NO: 749656 - RNA, 18 nt, Human
ugggauugcaggcaugug

SEQ ID NO: 749657 - RNA, 24 nt, Human
ugggauugcaggcaugugacacca

SEQ ID NO: 749658 - RNA, 22 nt, Human
uuaaaaugaaaggcaagaccua

SEQ ID NO: 749659 - RNA, 21 nt, Human
uuaggagcggugggguuucuc

SEQ ID NO: 749660 - RNA, 20 nt, Human
uucaagugauucuccugccu

SEQ ID NO: 749661 - RNA, 24 nt, Human
uucaagugauucuccugccuuggc

SEQ ID NO: 749662 - RNA, 20 nt, Human
uucaguugccagaauggcag

SEQ ID NO: 749663 - RNA, 24 nt, Human
uucgcucguugcccaggcuggagu

SEQ ID NO: 749664 - RNA, 18 nt, Human
uugcccaggcuggagugc

SEQ ID NO: 749665 - RNA, 21 nt, Human
uuucgcucguugcccaggcug

SEQ ID NO: 749666 - RNA, 22 nt, Human
uuucgcucguugcccaggcugg

SEQ ID NO: 749667 - RNA, 23 nt, Human
uuucgcucguugcccaggcugga

SEQ ID NO: 749668 - RNA, 18 nt, Human
aaaaaugugaaaaucacc

SEQ ID NO: 749669 - RNA, 27 nt, Human
aaaagaaaaugcaaagugaggaugacc

SEQ ID NO: 749670 - RNA, 20 nt, Human
aaacacaggcuuuucucuug

SEQ ID NO: 749671 - RNA, 22 nt, Human
aaauggccucgccucagagagc

SEQ ID NO: 749672 - RNA, 22 nt, Human
aauaggaaaaguacacauucug

SEQ ID NO: 749673 - RNA, 23 nt, Human
aaucaaguuguguugccugggca

SEQ ID NO: 749674 - RNA, 21 nt, Human
acuccccagguuaaacacccu

SEQ ID NO: 749675 - RNA, 20 nt, Human
agagacacuucugaccucau

SEQ ID NO: 749676 - RNA, 19 nt, Human
agauguuggaggaccaggc

SEQ ID NO: 749677 - RNA, 21 nt, Human
agguaguacagaacaauagug

SEQ ID NO: 749678 - RNA, 20 nt, Human
aguuguguugccugggcacu

SEQ ID NO: 749679 - RNA, 22 nt, Human
auacauuuccagaaccauugcc

SEQ ID NO: 749680 - RNA, 20 nt, Human
auacguaucgauuaucuuuc

SEQ ID NO: 749681 - RNA, 24 nt, Human
augaaaaucaauuuugcacaaaua

SEQ ID NO: 749682 - RNA, 22 nt, Human
caacacacagcaauaaaauaug

SEQ ID NO: 749683 - RNA, 19 nt, Human
caauaggaaaaguacacau

SEQ ID NO: 749684 - RNA, 18 nt, Human
cacccuguaauuuaccuu

SEQ ID NO: 749685 - RNA, 18 nt, Human
cacugacagccagggggc

SEQ ID NO: 749686 - RNA, 21 nt, Human
cacuucugaccucaucggaga

SEQ ID NO: 749687 - RNA, 19 nt, Human
cagcacaguacaaacugcc

SEQ ID NO: 749688 - RNA, 24 nt, Human
cagcacaguacaaacugccacaca

SEQ ID NO: 749689 - RNA, 25 nt, Human
caggaaaacauuaacauuaaaugaa

SEQ ID NO: 749690 - RNA, 18 nt, Human
cauuccguuucuuuuucu

SEQ ID NO: 749691 - RNA, 28 nt, Human
cauuuucaucaccaaacugagccagagg

SEQ ID NO: 749692 - RNA, 18 nt, Human
ccaaagaugcaaaacagg

SEQ ID NO: 749693 - RNA, 20 nt, Human
ccagaggaaugaacauggua

SEQ ID NO: 749694 - RNA, 22 nt, Human
ccauccaucuguucccuacucc

SEQ ID NO: 749695 - RNA, 22 nt, Human
ccuaaaaccauuccuggccuag

SEQ ID NO: 749696 - RNA, 23 nt, Human
ccugaaauucuuguacuucagag

SEQ ID NO: 749697 - RNA, 18 nt, Human
cgccaaagaugcaaaaca

SEQ ID NO: 749698 - RNA, 20 nt, Human
cuaaaaaugugaaaaucacc

SEQ ID NO: 749699 - RNA, 20 nt, Human
cuacucccacuuggguuccu

SEQ ID NO: 749700 - RNA, 24 nt, Human
cuacucccacuuggguuccuuugu

SEQ ID NO: 749701 - RNA, 18 nt, Human
cuccagugugacacaagg

SEQ ID NO: 749702 - RNA, 20 nt, Human
cuggacagguuauaaagagu

SEQ ID NO: 749703 - RNA, 19 nt, Human
cuuggguuccuuuguggua

SEQ ID NO: 749704 - RNA, 26 nt, Human
cuugucauccggcaacagucuucccu

SEQ ID NO: 749705 - RNA, 19 nt, Human
gcagcagaggagagguuug

SEQ ID NO: 749706 - RNA, 19 nt, Human
gcaucauacauuuccagaa

SEQ ID NO: 749707 - RNA, 23 nt, Human
gggccagagguccugacaggaaa

SEQ ID NO: 749708 - RNA, 18 nt, Human
gucaacacacagcaauaa

SEQ ID NO: 749709 - RNA, 20 nt, Human
uaaaaccauuccuggccuag

SEQ ID NO: 749710 - RNA, 25 nt, Human
uaaaucaccugaaauucuuguacuu

SEQ ID NO: 749711 - RNA, 23 nt, Human
uaacuccccagguuaaacacccu

SEQ ID NO: 749712 - RNA, 22 nt, Human
uaagcaggaaaacauuaacauu

SEQ ID NO: 749713 - RNA, 23 nt, Human
uacaaacugccacacaaauuacu

SEQ ID NO: 749714 - RNA, 23 nt, Human
uacagaacaauagugacagccuu

SEQ ID NO: 749715 - RNA, 24 nt, Human
uaggaaaaguacacauucugaaaa

SEQ ID NO: 749716 - RNA, 20 nt, Human
uagggugaggcgcggcuacu

SEQ ID NO: 749717 - RNA, 21 nt, Human
ucaaaacauuuucaucaccaa

SEQ ID NO: 749718 - RNA, 21 nt, Human
ucaccaaacugagccagagga

SEQ ID NO: 749719 - RNA, 18 nt, Human
uccccggcacugccuucc

SEQ ID NO: 749720 - RNA, 22 nt, Human
ucccuacucccacuuggguucc

SEQ ID NO: 749721 - RNA, 24 nt, Human
uccuuugugguaugaaauagagac

SEQ ID NO: 749722 - RNA, 22 nt, Human
ucucuggggagacacagagguc

SEQ ID NO: 749723 - RNA, 18 nt, Human
ucuucgcgccauccaucu

SEQ ID NO: 749724 - RNA, 25 nt, Human
ucuuucaaaacauuuucaucaccaa

SEQ ID NO: 749725 - RNA, 20 nt, Human
ugacagccagggggcuccug

SEQ ID NO: 749726 - RNA, 18 nt, Human
ugacaggaaaucgccaaa

SEQ ID NO: 749727 - RNA, 25 nt, Human
ugaggaacuaaaaaugugaaaauca

SEQ ID NO: 749728 - RNA, 25 nt, Human
ugaggaugaaaauuuccugugggcc

SEQ ID NO: 749729 - RNA, 19 nt, Human
ugggcagcaccuucugggc

SEQ ID NO: 749730 - RNA, 18 nt, Human
ugggccaaaacaaagggu

SEQ ID NO: 749731 - RNA, 19 nt, Human
uguaagauguuggaggacc

SEQ ID NO: 749732 - RNA, 24 nt, Human
ugugaucaagcagcuuaaaucacc

SEQ ID NO: 749733 - RNA, 26 nt, Human
uucccugggggcgucucaggcauucu

SEQ ID NO: 749734 - RNA, 19 nt, Human
uugccauaaucaaguugug

SEQ ID NO: 749735 - RNA, 24 nt, Human
uugccauaaucaaguuguguugcc

SEQ ID NO: 749736 - RNA, 23 nt, Human
aaaaaacaaaacaacaaaacaaa

SEQ ID NO: 749737 - RNA, 18 nt, Human
aaaaagaaccaacugaac

SEQ ID NO: 749738 - RNA, 21 nt, Human
aaaacaaaacaaaacaaaacc

SEQ ID NO: 749739 - RNA, 26 nt, Human
aaaacaaaacaaaacaaaaccccaaa

SEQ ID NO: 749740 - RNA, 25 nt, Human
aaaacaaaacaaaaccccaaaaaag

SEQ ID NO: 749741 - RNA, 21 nt, Human
aaaacaaaacaacaaaacaaa

SEQ ID NO: 749742 - RNA, 21 nt, Human
aaaacaacaaaacaaaacaaa

SEQ ID NO: 749743 - RNA, 22 nt, Human
aaaacaacaaaacaaaacaaaa

SEQ ID NO: 749744 - RNA, 25 nt, Human
aaaacaacaaaacaaaacaaaacaa

SEQ ID NO: 749745 - RNA, 22 nt, Human
aaaaccccaaaaaaagaaccaa

SEQ ID NO: 749746 - RNA, 21 nt, Human
aaaauaucuauugacaguaca

SEQ ID NO: 749747 - RNA, 24 nt, Human
aaacaaaacaaaacaaaaccccaa

SEQ ID NO: 749748 - RNA, 25 nt, Human
aaacaaaacaaaacaaaaccccaaa

SEQ ID NO: 749749 - RNA, 26 nt, Human
aaacaaaacaaaacaaaaccccaaaa

SEQ ID NO: 749750 - RNA, 19 nt, Human
aaacaacaaaacaaaacaa

SEQ ID NO: 749751 - RNA, 19 nt, Human
aaacaacaaaacaaaacaa

SEQ ID NO: 749752 - RNA, 20 nt, Human
aaagcagccauugguugaga

SEQ ID NO: 749753 - RNA, 25 nt, Human
aacaaaacaacaaaacaaaacaaaa

SEQ ID NO: 749754 - RNA, 22 nt, Human
aacucuccucuccccucgggcc

SEQ ID NO: 749755 - RNA, 22 nt, Human
aagaacaucagcaaauucacag

SEQ ID NO: 749756 - RNA, 21 nt, Human
aagcagccauugguugagaua

SEQ ID NO: 749757 - RNA, 18 nt, Human
aagcauggacauguugcc

SEQ ID NO: 749758 - RNA, 26 nt, Human
aagcugaaggggccuucaggcuugga

SEQ ID NO: 749759 - RNA, 28 nt, Human
aaggaaaaaacaaaacaacaaaacaaaa

SEQ ID NO: 749760 - RNA, 20 nt, Human
aaucacagcaaccucaucca

SEQ ID NO: 749761 - RNA, 21 nt, Human
acaaaacaaaacaaaacaaaa

SEQ ID NO: 749762 - RNA, 25 nt, Human
acaaaacaaaacaaaacaaaacccc

SEQ ID NO: 749763 - RNA, 19 nt, Human
acaaaacaaaacaaaaccc

SEQ ID NO: 749764 - RNA, 25 nt, Human
acaaaacaaaacaaaaccccaaaaa

SEQ ID NO: 749765 - RNA, 18 nt, Human
acaaaacaacaaaacaaa

SEQ ID NO: 749766 - RNA, 19 nt, Human
acaaaacaacaaaacaaaa

SEQ ID NO: 749767 - RNA, 21 nt, Human
acaaaaccccaaaaaaagaac

SEQ ID NO: 749768 - RNA, 18 nt, Human
accccaaaaaaagaacca

SEQ ID NO: 749769 - RNA, 24 nt, Human
acucgguucaccuuugacaccugg

SEQ ID NO: 749770 - RNA, 18 nt, Human
agaagcugaaggggccuu

SEQ ID NO: 749771 - RNA, 22 nt, Human
agaagcugaaggggccuucagg

SEQ ID NO: 749772 - RNA, 19 nt, Human
agacacacagaccucgaca

SEQ ID NO: 749773 - RNA, 18 nt, Human
agagauuagcaaaaugaa

SEQ ID NO: 749774 - RNA, 28 nt, Human
agagguggggaagccaggggguggggag

SEQ ID NO: 749775 - RNA, 20 nt, Human
agcaucugaggagccgucuc

SEQ ID NO: 749776 - RNA, 22 nt, Human
agccaggggguggggaguccag

SEQ ID NO: 749777 - RNA, 18 nt, Human
agcgagaggcgcggcugc

SEQ ID NO: 749778 - RNA, 20 nt, Human
aggauugagauggaggggca

SEQ ID NO: 749779 - RNA, 23 nt, Human
aggccucuagcucgccgcuccag

SEQ ID NO: 749780 - RNA, 19 nt, Human
aggggguggggaguccagc

SEQ ID NO: 749781 - RNA, 21 nt, Human
agucgcuaagugaacucccac

SEQ ID NO: 749782 - RNA, 19 nt, Human
auauauauauauauauaua

SEQ ID NO: 749783 - RNA, 19 nt, Human
auauauauauauauauaua

SEQ ID NO: 749784 - RNA, 19 nt, Human
auauauauauauauauaua

SEQ ID NO: 749785 - RNA, 19 nt, Human
auauauauauauauauaua

SEQ ID NO: 749786 - RNA, 19 nt, Human
auauauauauauauauaua

SEQ ID NO: 749787 - RNA, 19 nt, Human
auauauauauauauauaua

SEQ ID NO: 749788 - RNA, 19 nt, Human
auauauauauauauauaua

SEQ ID NO: 749789 - RNA, 19 nt, Human
auauauauauauauauaua

SEQ ID NO: 749790 - RNA, 19 nt, Human
auauauauauauauauaua

SEQ ID NO: 749791 - RNA, 19 nt, Human
auauauauauauauauaua

SEQ ID NO: 749792 - RNA, 19 nt, Human
auauauauauauauauaua

SEQ ID NO: 749793 - RNA, 19 nt, Human
auauauauauauauauaua

SEQ ID NO: 749794 - RNA, 19 nt, Human
auauauauauauauauaua

SEQ ID NO: 749795 - RNA, 19 nt, Human
auauauauauauauauaua

SEQ ID NO: 749796 - RNA, 19 nt, Human
auauauauauauauauaua

SEQ ID NO: 749797 - RNA, 19 nt, Human
auauauauauauauauaua

SEQ ID NO: 749798 - RNA, 19 nt, Human
auauauauauauauauaua

SEQ ID NO: 749799 - RNA, 19 nt, Human
auauauauauauauauaua

SEQ ID NO: 749800 - RNA, 19 nt, Human
auauauauauauauauaua

SEQ ID NO: 749801 - RNA, 19 nt, Human
auauauauauauauauaua

SEQ ID NO: 749802 - RNA, 19 nt, Human
auauauauauauauauaua

SEQ ID NO: 749803 - RNA, 19 nt, Human
auauauauauauauauaua

SEQ ID NO: 749804 - RNA, 19 nt, Human
auauauauauauauauaua

SEQ ID NO: 749805 - RNA, 19 nt, Human
auauauauauauauauaua

SEQ ID NO: 749806 - RNA, 20 nt, Human
aucacagcaaccucauccag

SEQ ID NO: 749807 - RNA, 22 nt, Human
aucugagucgcuaagugaacuc

SEQ ID NO: 749808 - RNA, 18 nt, Human
augcccugcuaggcuggu

SEQ ID NO: 749809 - RNA, 20 nt, Human
augcccugcuaggcuggucu

SEQ ID NO: 749810 - RNA, 21 nt, Human
caaaaaaagaaccaacugaac

SEQ ID NO: 749811 - RNA, 23 nt, Human
caaaacaaaacaaaacaaaaccc

SEQ ID NO: 749812 - RNA, 23 nt, Human
caaaacaaaacaaaaccccaaaa

SEQ ID NO: 749813 - RNA, 25 nt, Human
caaaacaaaaccccaaaaaaagaac

SEQ ID NO: 749814 - RNA, 26 nt, Human
caaaaccccaaaaaaagaagggaguc

SEQ ID NO: 749815 - RNA, 20 nt, Human
caaacucuugccccacuccu

SEQ ID NO: 749816 - RNA, 27 nt, Human
caacaaaacaaaacaaaacaaaacccc

SEQ ID NO: 749817 - RNA, 26 nt, Human
caaucacagcaaccucauccaguaag

SEQ ID NO: 749818 - RNA, 21 nt, Human
cacccgcgcucacccccuaag

SEQ ID NO: 749819 - RNA, 18 nt, Human
cacuggacuuucccuccu

SEQ ID NO: 749820 - RNA, 21 nt, Human
cagacacacagaccucgacac

SEQ ID NO: 749821 - RNA, 21 nt, Human
caguggccucaggauucagcc

SEQ ID NO: 749822 - RNA, 22 nt, Human
caucacaaacaguuauggcuaa

SEQ ID NO: 749823 - RNA, 21 nt, Human
caucacuaaaagcauggacau

SEQ ID NO: 749824 - RNA, 22 nt, Human
caugagaagcugaaggggccuu

SEQ ID NO: 749825 - RNA, 18 nt, Human
cauugguugagauaucug

SEQ ID NO: 749826 - RNA, 19 nt, Human
ccaaaugauuuuccuucug

SEQ ID NO: 749827 - RNA, 21 nt, Human
ccaagggaugagccuuuggga

SEQ ID NO: 749828 - RNA, 19 nt, Human
ccagcccacgaucucugcc

SEQ ID NO: 749829 - RNA, 23 nt, Human
cccaaaaaaagaaccaacugaac

SEQ ID NO: 749830 - RNA, 26 nt, Human
cccaaacucuccucuccccucgggcc

SEQ ID NO: 749831 - RNA, 24 nt, Human
cccacuccugcucuuguaccccca

SEQ ID NO: 749832 - RNA, 20 nt, Human
ccccaaaaaaagaaccaacu

SEQ ID NO: 749833 - RNA, 25 nt, Human
ccccaaaaaaagaaccaacugaaca

SEQ ID NO: 749834 - RNA, 18 nt, Human
ccccaaacucuccucucc

SEQ ID NO: 749835 - RNA, 19 nt, Human
ccccguguggcaggagggc

SEQ ID NO: 749836 - RNA, 20 nt, Human
cccugccccaaacucuccuc

SEQ ID NO: 749837 - RNA, 24 nt, Human
cccugccccaaacucuccucuccc

SEQ ID NO: 749838 - RNA, 24 nt, Human
cgacacccgcgcucacccccuaag

SEQ ID NO: 749839 - RNA, 22 nt, Human
cuccaccagcucaagaaaagga

SEQ ID NO: 749840 - RNA, 20 nt, Human
cucccugccccaaacucucc

SEQ ID NO: 749841 - RNA, 21 nt, Human
cucgacacccgcgcucacccc

SEQ ID NO: 749842 - RNA, 23 nt, Human
cugcagacacacagaccucgaca

SEQ ID NO: 749843 - RNA, 26 nt, Human
cuggaccagcggagugcuccugaaau

SEQ ID NO: 749844 - RNA, 18 nt, Human
cuguuccucccugcccca

SEQ ID NO: 749845 - RNA, 22 nt, Human
cuuaucuccuccauggcuucug

SEQ ID NO: 749846 - RNA, 19 nt, Human
cuuucucccagaaaagccc

SEQ ID NO: 749847 - RNA, 21 nt, Human
gaauaacuuucucccagaaaa

SEQ ID NO: 749848 - RNA, 20 nt, Human
gaaucugaacggaagugcca

SEQ ID NO: 749849 - RNA, 26 nt, Human
gacaacaaagcagccauugguugaga

SEQ ID NO: 749850 - RNA, 18 nt, Human
gacucgguucaccuuuga

SEQ ID NO: 749851 - RNA, 23 nt, Human
gagagguggggaagccagggggu

SEQ ID NO: 749852 - RNA, 21 nt, Human
gaucucugccaccuacauggu

SEQ ID NO: 749853 - RNA, 21 nt, Human
gauuagcaaaaugaaucugaa

SEQ ID NO: 749854 - RNA, 19 nt, Human
gcaucugaggagccgucuc

SEQ ID NO: 749855 - RNA, 22 nt, Human
gccccguguggcaggagggcuc

SEQ ID NO: 749856 - RNA, 18 nt, Human
gcgcggcugccgccggag

SEQ ID NO: 749857 - RNA, 21 nt, Human
gcugccgccggagccgggccc

SEQ ID NO: 749858 - RNA, 18 nt, Human
ggaaaaaacaaaacaaca

SEQ ID NO: 749859 - RNA, 26 nt, Human
ggaaaaaacaaaacaacaaaacaaaa

SEQ ID NO: 749860 - RNA, 26 nt, Human
ggaaaaccuuaaaaucacucaacuga

SEQ ID NO: 749861 - RNA, 19 nt, Human
ggagcaaaguucacgaagg

SEQ ID NO: 749862 - RNA, 22 nt, Human
ggaguccagcuggggauccuug

SEQ ID NO: 749863 - RNA, 21 nt, Human
ggcgcaaucuggaaauggaaa

SEQ ID NO: 749864 - RNA, 21 nt, Human
gggcaugugcaaacaacagaa

SEQ ID NO: 749865 - RNA, 19 nt, Human
gguagguguauagauaguu

SEQ ID NO: 749866 - RNA, 21 nt, Human
gguggggaguccagcugggga

SEQ ID NO: 749867 - RNA, 23 nt, Human
gugcaaacaacagaaagggggaa

SEQ ID NO: 749868 - RNA, 25 nt, Human
guuggcuuugcaaugggagggguag

SEQ ID NO: 749869 - RNA, 22 nt, Human
uaacuuucucccagaaaagccc

SEQ ID NO: 749870 - RNA, 25 nt, Human
uaagaugcacaccugggagcagggc

SEQ ID NO: 749871 - RNA, 19 nt, Human
uaagugaacucccacgugg

SEQ ID NO: 749872 - RNA, 23 nt, Human
uacgaaaugacauucagcuaaua

SEQ ID NO: 749873 - RNA, 18 nt, Human
uagcagucugcagacaca

SEQ ID NO: 749874 - RNA, 24 nt, Human
uagcagucugcagacacacagacc

SEQ ID NO: 749875 - RNA, 21 nt, Human
uagcauguauuuaacuaucuc

SEQ ID NO: 749876 - RNA, 19 nt, Human
uauauauauauauauauau

SEQ ID NO: 749877 - RNA, 19 nt, Human
uauauauauauauauauau

SEQ ID NO: 749878 - RNA, 19 nt, Human
uauauauauauauauauau

SEQ ID NO: 749879 - RNA, 19 nt, Human
uauauauauauauauauau

SEQ ID NO: 749880 - RNA, 19 nt, Human
uauauauauauauauauau

SEQ ID NO: 749881 - RNA, 19 nt, Human
uauauauauauauauauau

SEQ ID NO: 749882 - RNA, 19 nt, Human
uauauauauauauauauau

SEQ ID NO: 749883 - RNA, 19 nt, Human
uauauauauauauauauau

SEQ ID NO: 749884 - RNA, 19 nt, Human
uauauauauauauauauau

SEQ ID NO: 749885 - RNA, 19 nt, Human
uauauauauauauauauau

SEQ ID NO: 749886 - RNA, 19 nt, Human
uauauauauauauauauau

SEQ ID NO: 749887 - RNA, 19 nt, Human
uauauauauauauauauau

SEQ ID NO: 749888 - RNA, 19 nt, Human
uauauauauauauauauau

SEQ ID NO: 749889 - RNA, 19 nt, Human
uauauauauauauauauau

SEQ ID NO: 749890 - RNA, 19 nt, Human
uauauuaaaaagagagcca

SEQ ID NO: 749891 - RNA, 18 nt, Human
uaucugagucgcuaagug

SEQ ID NO: 749892 - RNA, 18 nt, Human
ucacaugagaagcugaag

SEQ ID NO: 749893 - RNA, 24 nt, Human
ucagccagacuuaaacuugcucaa

SEQ ID NO: 749894 - RNA, 19 nt, Human
ucccacguggacacagcca

SEQ ID NO: 749895 - RNA, 20 nt, Human
ucccagaaaagcccacugca

SEQ ID NO: 749896 - RNA, 18 nt, Human
ucccagagacagaaaucc

SEQ ID NO: 749897 - RNA, 20 nt, Human
ucccuugucagacaacaaag

SEQ ID NO: 749898 - RNA, 18 nt, Human
ucgacacccgcgcucacc

SEQ ID NO: 749899 - RNA, 19 nt, Human
ucgcuaagugaacucccac

SEQ ID NO: 749900 - RNA, 21 nt, Human
ucgcuaagugaacucccacgu

SEQ ID NO: 749901 - RNA, 24 nt, Human
ucguauuccagucugugaccacag

SEQ ID NO: 749902 - RNA, 18 nt, Human
ucugcagacacacagacc

SEQ ID NO: 749903 - RNA, 19 nt, Human
ucugcagacacacagaccu

SEQ ID NO: 749904 - RNA, 21 nt, Human
ugaagggcccuucccagucca

SEQ ID NO: 749905 - RNA, 18 nt, Human
ugaagugcaagguuccug

SEQ ID NO: 749906 - RNA, 21 nt, Human
ugaauaacuuucucccagaaa

SEQ ID NO: 749907 - RNA, 22 nt, Human
ugacagguacacuggacuuucc

SEQ ID NO: 749908 - RNA, 19 nt, Human
ugcccugcuaggcuggucu

SEQ ID NO: 749909 - RNA, 24 nt, Human
ugcccugcuaggcuggucuuagua

SEQ ID NO: 749910 - RNA, 18 nt, Human
uggaaaacuagaaaacua

SEQ ID NO: 749911 - RNA, 19 nt, Human
uggaagacuaaagaaccca

SEQ ID NO: 749912 - RNA, 23 nt, Human
ugguagaaaucaaauguaaaaca

SEQ ID NO: 749913 - RNA, 18 nt, Human
uguacaucuacaugugau

SEQ ID NO: 749914 - RNA, 23 nt, Human
ugugcaaacaacagaaaggggga

SEQ ID NO: 749915 - RNA, 23 nt, Human
uguguacaucacaaacaguuaug

SEQ ID NO: 749916 - RNA, 19 nt, Human
uguguuggagcaaaguuca

SEQ ID NO: 749917 - RNA, 19 nt, Human
uguugccgccuggaccagc

SEQ ID NO: 749918 - RNA, 21 nt, Human
uucaaacucuugccccacucc

SEQ ID NO: 749919 - RNA, 22 nt, Human
uucagccagacuuaaacuugcu

SEQ ID NO: 749920 - RNA, 18 nt, Human
uucucccagaaaagccca

SEQ ID NO: 749921 - RNA, 19 nt, Human
uugaauauuuauuuaaaaa

SEQ ID NO: 749922 - RNA, 21 nt, Human
uuggagcaaaguucacgaagg

SEQ ID NO: 749923 - RNA, 24 nt, Human
uuggagcaaaguucacgaaggcca

SEQ ID NO: 749924 - RNA, 21 nt, Human
uugucauagguuagcagucug

SEQ ID NO: 749925 - RNA, 21 nt, Human
uuuaaccacguugaaacacac

SEQ ID NO: 749926 - RNA, 25 nt, Human
aaacagaaacaagaaagcaaggaaa

SEQ ID NO: 749927 - RNA, 25 nt, Human
aaagcaaauaaccaaugaaaucaag

SEQ ID NO: 749928 - RNA, 23 nt, Human
aaauaaccaaugaaaucaagaac

SEQ ID NO: 749929 - RNA, 19 nt, Human
aacaauuuaaaaccccauu

SEQ ID NO: 749930 - RNA, 21 nt, Human
aacaauuuaaaaccccauuuc

SEQ ID NO: 749931 - RNA, 25 nt, Human
aaccaaugaaaucaagaacucccau

SEQ ID NO: 749932 - RNA, 19 nt, Human
aaccaugaaugcagcagca

SEQ ID NO: 749933 - RNA, 18 nt, Human
aacuccuacccuugcccc

SEQ ID NO: 749934 - RNA, 25 nt, Human
aagcaaauaaccaaugaaaucaaga

SEQ ID NO: 749935 - RNA, 22 nt, Human
aagcaaggaaaagauaaucuau

SEQ ID NO: 749936 - RNA, 20 nt, Human
aagccaggguacccuucugu

SEQ ID NO: 749937 - RNA, 21 nt, Human
aaggaaauggaagggaagcgg

SEQ ID NO: 749938 - RNA, 21 nt, Human
aauaagccaggguacccuucu

SEQ ID NO: 749939 - RNA, 26 nt, Human
aauggugggguguagacagaccuggg

SEQ ID NO: 749940 - RNA, 20 nt, Human
acagaggcuaaaaggagaga

SEQ ID NO: 749941 - RNA, 19 nt, Human
accccaagaggacacauac

SEQ ID NO: 749942 - RNA, 24 nt, Human
acgaggagggggaagggaggggau

SEQ ID NO: 749943 - RNA, 22 nt, Human
acgcagccaggccuggagaaag

SEQ ID NO: 749944 - RNA, 18 nt, Human
acgccgggccugcccugg

SEQ ID NO: 749945 - RNA, 20 nt, Human
acuccaggaugugggcccca

SEQ ID NO: 749946 - RNA, 21 nt, Human
acucuuucuccuccuaauccu

SEQ ID NO: 749947 - RNA, 24 nt, Human
agaaacaagaaagcaaggaaaaga

SEQ ID NO: 749948 - RNA, 22 nt, Human
agaaccuuaaccccuggcuuac

SEQ ID NO: 749949 - RNA, 20 nt, Human
agacagaaugaauggugggg

SEQ ID NO: 749950 - RNA, 22 nt, Human
agagauggggccaugcccugcu

SEQ ID NO: 749951 - RNA, 19 nt, Human
agagggcugggcccagaag

SEQ ID NO: 749952 - RNA, 21 nt, Human
aggaaauggaagggaagcggg

SEQ ID NO: 749953 - RNA, 23 nt, Human
aggagggggaagggaggggaugu

SEQ ID NO: 749954 - RNA, 22 nt, Human
aggcaagagcaagucaaaucua

SEQ ID NO: 749955 - RNA, 19 nt, Human
aggcagagaacgcagccag

SEQ ID NO: 749956 - RNA, 24 nt, Human
aggcagagaacgcagccaggccug

SEQ ID NO: 749957 - RNA, 18 nt, Human
aggcagggaaaaggucag

SEQ ID NO: 749958 - RNA, 20 nt, Human
aggcagggaaaaggucaggu

SEQ ID NO: 749959 - RNA, 22 nt, Human
aggcauggcugugcagaagucu

SEQ ID NO: 749960 - RNA, 19 nt, Human
aggcugggguggggcaagg

SEQ ID NO: 749961 - RNA, 22 nt, Human
agggaagccuggggaaagggau

SEQ ID NO: 749962 - RNA, 21 nt, Human
agggaggggauguaaguuucu

SEQ ID NO: 749963 - RNA, 24 nt, Human
agggaggggauguaaguuucuugg

SEQ ID NO: 749964 - RNA, 23 nt, Human
agggcacugucuugagacccuuu

SEQ ID NO: 749965 - RNA, 18 nt, Human
agguacaucaagaaacgg

SEQ ID NO: 749966 - RNA, 21 nt, Human
aguggagaggaaagagaauca

SEQ ID NO: 749967 - RNA, 23 nt, Human
auaaccaaugaaaucaagaacuc

SEQ ID NO: 749968 - RNA, 25 nt, Human
auagcagaaaguaaaaaguggugga

SEQ ID NO: 749969 - RNA, 20 nt, Human
caaaacagaaacaagaaagc

SEQ ID NO: 749970 - RNA, 26 nt, Human
caaauaaccaaugaaaucaagaacuc

SEQ ID NO: 749971 - RNA, 26 nt, Human
caaauucuuggaccaguuuuguccaa

SEQ ID NO: 749972 - RNA, 18 nt, Human
caacaagcagcugaggcc

SEQ ID NO: 749973 - RNA, 19 nt, Human
caacaagcagcugaggccu

SEQ ID NO: 749974 - RNA, 19 nt, Human
cacagggccagcugggaca

SEQ ID NO: 749975 - RNA, 22 nt, Human
cagaaacaagaaagcaaggaaa

SEQ ID NO: 749976 - RNA, 20 nt, Human
cagaaugaaugguggggugu

SEQ ID NO: 749977 - RNA, 20 nt, Human
cagagcccagacgccgggcc

SEQ ID NO: 749978 - RNA, 21 nt, Human
cagcaaugaaagauuaaggca

SEQ ID NO: 749979 - RNA, 23 nt, Human
cagcacaaugcaaacugggucuu

SEQ ID NO: 749980 - RNA, 24 nt, Human
cagcacaaugcaaacugggucuuu

SEQ ID NO: 749981 - RNA, 22 nt, Human
cagcagaagagaacagugaugg

SEQ ID NO: 749982 - RNA, 21 nt, Human
cagccaggccuggagaaaguc

SEQ ID NO: 749983 - RNA, 26 nt, Human
cagcugggacagguagcgcauccccc

SEQ ID NO: 749984 - RNA, 20 nt, Human
caggauuaggaagaggcugg

SEQ ID NO: 749985 - RNA, 21 nt, Human
caggauuaggaagaggcuggg

SEQ ID NO: 749986 - RNA, 21 nt, Human
caggcacaugcccaguaccca

SEQ ID NO: 749987 - RNA, 20 nt, Human
cagugaugggcccuaguccu

SEQ ID NO: 749988 - RNA, 18 nt, Human
cauuucacuuucaaaaca

SEQ ID NO: 749989 - RNA, 19 nt, Human
ccaauccgcaaguacugcc

SEQ ID NO: 749990 - RNA, 21 nt, Human
ccaccuuucugcugaggcagu

SEQ ID NO: 749991 - RNA, 21 nt, Human
ccacugaguguguggcacagg

SEQ ID NO: 749992 - RNA, 22 nt, Human
ccaguuuuguccaaggccaccu

SEQ ID NO: 749993 - RNA, 19 nt, Human
cccaacaugaaaaguggac

SEQ ID NO: 749994 - RNA, 19 nt, Human
cccaaugaaccccacauaa

SEQ ID NO: 749995 - RNA, 19 nt, Human
cccaggccuacagccccaa

SEQ ID NO: 749996 - RNA, 19 nt, Human
ccccccuucugccucuccc

SEQ ID NO: 749997 - RNA, 22 nt, Human
cccgcgcccgccuccgcuccuc

SEQ ID NO: 749998 - RNA, 18 nt, Human
cccuagcccaaugaaccc

SEQ ID NO: 749999 - RNA, 19 nt, Human
cccuagcccaaugaacccc

SEQ ID NO: 750000 - RNA, 21 nt, Human
cccuucuguuaggggagggaa

SEQ ID NO: 750001 - RNA, 19 nt, Human
ccgcgcccgccuccgcucc

SEQ ID NO: 750002 - RNA, 21 nt, Human
ccucauaccacuacccuagcc

SEQ ID NO: 750003 - RNA, 22 nt, Human
ccucccucagggaagccuggga

SEQ ID NO: 750004 - RNA, 19 nt, Human
ccugaaggcagggaaaagg

SEQ ID NO: 750005 - RNA, 22 nt, Human
ccugaauaagccaggguacccu

SEQ ID NO: 750006 - RNA, 23 nt, Human
ccuugccccaguucugcaggcug

SEQ ID NO: 750007 - RNA, 22 nt, Human
cggccgcccgcgcccgccuccg

SEQ ID NO: 750008 - RNA, 19 nt, Human
cucauaccacuacccuagc

SEQ ID NO: 750009 - RNA, 20 nt, Human
cugaagacucuuucuccucc

SEQ ID NO: 750010 - RNA, 22 nt, Human
cugaagacucuuucuccuccua

SEQ ID NO: 750011 - RNA, 18 nt, Human
cugggcccagaaguccug

SEQ ID NO: 750012 - RNA, 18 nt, Human
gaaauuacaccaggucug

SEQ ID NO: 750013 - RNA, 25 nt, Human
gaagggggagccccccuucugccuc

SEQ ID NO: 750014 - RNA, 21 nt, Human
gacacaguguggacuaaggag

SEQ ID NO: 750015 - RNA, 19 nt, Human
gagcucuggguuggaggca

SEQ ID NO: 750016 - RNA, 24 nt, Human
gcaaauaaccaaugaaaucaagaa

SEQ ID NO: 750017 - RNA, 23 nt, Human
gcagccagcagguccucccucag

SEQ ID NO: 750018 - RNA, 18 nt, Human
gcagccaggccuggagaa

SEQ ID NO: 750019 - RNA, 18 nt, Human
gcccagaaguccugaagg

SEQ ID NO: 750020 - RNA, 24 nt, Human
gcccaggaucucccaaggccacac

SEQ ID NO: 750021 - RNA, 19 nt, Human
ggaacgaggagggggaagg

SEQ ID NO: 750022 - RNA, 26 nt, Human
ggaagggaggggauguaaguuucuug

SEQ ID NO: 750023 - RNA, 19 nt, Human
ggacagagccaauccgcaa

SEQ ID NO: 750024 - RNA, 18 nt, Human
ggagaugggagauagcag

SEQ ID NO: 750025 - RNA, 19 nt, Human
ggaggcacagggccagcug

SEQ ID NO: 750026 - RNA, 23 nt, Human
ggauuaggaagaggcuggggugg

SEQ ID NO: 750027 - RNA, 18 nt, Human
ggcaagagggcugggccc

SEQ ID NO: 750028 - RNA, 24 nt, Human
ggccugaaagcaaauaaccaaugg

SEQ ID NO: 750029 - RNA, 24 nt, Human
gggaacagacagacagaaugaaug

SEQ ID NO: 750030 - RNA, 22 nt, Human
gggaacgaggagggggaaggga

SEQ ID NO: 750031 - RNA, 23 nt, Human
gggcaaggaccacaggcagagaa

SEQ ID NO: 750032 - RNA, 20 nt, Human
ggggagcucuggguuggagg

SEQ ID NO: 750033 - RNA, 20 nt, Human
ggguagacucugaaccugcc

SEQ ID NO: 750034 - RNA, 22 nt, Human
guagacagaccuggggcucaga

SEQ ID NO: 750035 - RNA, 18 nt, Human
guagcgcaucccccaaaa

SEQ ID NO: 750036 - RNA, 21 nt, Human
uaaaaggagagauggggccau

SEQ ID NO: 750037 - RNA, 21 nt, Human
uaaaccucauaccacuacccu

SEQ ID NO: 750038 - RNA, 21 nt, Human
uaaccccuggcuuacuguccc

SEQ ID NO: 750039 - RNA, 23 nt, Human
uacagccccaacaugaaaagugg

SEQ ID NO: 750040 - RNA, 25 nt, Human
uacaucaagaaacggccugaaagca

SEQ ID NO: 750041 - RNA, 18 nt, Human
uaccugcuccuuccccua

SEQ ID NO: 750042 - RNA, 21 nt, Human
uagaaaggaaauggaagggaa

SEQ ID NO: 750043 - RNA, 23 nt, Human
uagcagaaaguaaaaaguggugg

SEQ ID NO: 750044 - RNA, 24 nt, Human
uagcagaaaguaaaaaguggugga

SEQ ID NO: 750045 - RNA, 25 nt, Human
uagcagaaaguaaaaagugguggaa

SEQ ID NO: 750046 - RNA, 21 nt, Human
uaggcaguguccagggaacag

SEQ ID NO: 750047 - RNA, 22 nt, Human
uaggcauggaaagcuucuaacc

SEQ ID NO: 750048 - RNA, 22 nt, Human
ucaaaacagaaacaagaaagca

SEQ ID NO: 750049 - RNA, 23 nt, Human
ucaagaacucccauaacccuggu

SEQ ID NO: 750050 - RNA, 19 nt, Human
ucaagcaucugcccucugc

SEQ ID NO: 750051 - RNA, 19 nt, Human
uccacagucucugauccag

SEQ ID NO: 750052 - RNA, 20 nt, Human
uccacagucucugauccagu

SEQ ID NO: 750053 - RNA, 19 nt, Human
ucccagagcccagacgccg

SEQ ID NO: 750054 - RNA, 21 nt, Human
ucccagagcccagacgccggg

SEQ ID NO: 750055 - RNA, 18 nt, Human
ucccagggccacugagug

SEQ ID NO: 750056 - RNA, 22 nt, Human
uccgccucccucagggaagccu

SEQ ID NO: 750057 - RNA, 20 nt, Human
uccgcuccucacugcagcca

SEQ ID NO: 750058 - RNA, 23 nt, Human
ucuaaccaugaaugcagcagcac

SEQ ID NO: 750059 - RNA, 22 nt, Human
ucuucagucccagcugaggcag

SEQ ID NO: 750060 - RNA, 21 nt, Human
ugaaugccuaaugaaacacag

SEQ ID NO: 750061 - RNA, 22 nt, Human
ugaaugccuaaugaaacacaga

SEQ ID NO: 750062 - RNA, 26 nt, Human
ugaggcaagagcaagucaaaucuacc

SEQ ID NO: 750063 - RNA, 18 nt, Human
ugauaugcauaucucaca

SEQ ID NO: 750064 - RNA, 23 nt, Human
ugauaugcauaucucacauaugc

SEQ ID NO: 750065 - RNA, 26 nt, Human
ugauaugcauaucucacauaugcaug

SEQ ID NO: 750066 - RNA, 20 nt, Human
ugcccaguacccaggaaaca

SEQ ID NO: 750067 - RNA, 20 nt, Human
ugccccaguucugcaggcug

SEQ ID NO: 750068 - RNA, 21 nt, Human
uggaaagcuucuaaccaugaa

SEQ ID NO: 750069 - RNA, 18 nt, Human
uggaagggaagcgggaga

SEQ ID NO: 750070 - RNA, 23 nt, Human
uggaagggaagcgggagauggga

SEQ ID NO: 750071 - RNA, 20 nt, Human
uggagaggaaagagaaucag

SEQ ID NO: 750072 - RNA, 18 nt, Human
ugggacagguagcgcauc

SEQ ID NO: 750073 - RNA, 26 nt, Human
uggugggguguagacagaccuggggc

SEQ ID NO: 750074 - RNA, 20 nt, Human
uucaaaaaaaggaaagaacc

SEQ ID NO: 750075 - RNA, 24 nt, Human
uucaaaacagaaacaagaaagcaa

SEQ ID NO: 750076 - RNA, 18 nt, Human
uuccccuacuggaacucc

SEQ ID NO: 750077 - RNA, 24 nt, Human
uucuaaccaugaaugcagcagcac

SEQ ID NO: 750078 - RNA, 21 nt, Human
uuucaaaaaaaggaaagaacc

SEQ ID NO: 750079 - RNA, 22 nt, Human
uuuuccacagucucugauccag

SEQ ID NO: 750080 - RNA, 25 nt, Human
aaacggccugaaucuuuucuggaac

SEQ ID NO: 750081 - RNA, 23 nt, Human
aagacacacggggacaccagcuc

SEQ ID NO: 750082 - RNA, 18 nt, Human
acagcccagccuggaccc

SEQ ID NO: 750083 - RNA, 20 nt, Human
acaggugggaucucuaaagg

SEQ ID NO: 750084 - RNA, 22 nt, Human
acgcgaggcccugcugcccagc

SEQ ID NO: 750085 - RNA, 20 nt, Human
acugcuacccuucagaaaga

SEQ ID NO: 750086 - RNA, 19 nt, Human
agcugacgccagaugacau

SEQ ID NO: 750087 - RNA, 21 nt, Human
agcuuuugcuuucccaaacaa

SEQ ID NO: 750088 - RNA, 19 nt, Human
aggaccccgaagcuguggc

SEQ ID NO: 750089 - RNA, 19 nt, Human
aggcagacauccuggggcc

SEQ ID NO: 750090 - RNA, 23 nt, Human
aggcagacauccuggggcccucg

SEQ ID NO: 750091 - RNA, 19 nt, Human
agggugggagggaugugag

SEQ ID NO: 750092 - RNA, 20 nt, Human
aggugacacacagccagagg

SEQ ID NO: 750093 - RNA, 18 nt, Human
augaaagacacacgggga

SEQ ID NO: 750094 - RNA, 23 nt, Human
cacaggugggcggguuaaaguca

SEQ ID NO: 750095 - RNA, 22 nt, Human
cacauuuuuaaaaaggcuaaac

SEQ ID NO: 750096 - RNA, 23 nt, Human
caccaaagaaaugccacgccaau

SEQ ID NO: 750097 - RNA, 18 nt, Human
cagaaugaaaccucacua

SEQ ID NO: 750098 - RNA, 22 nt, Human
cagagcgcagccucacagcuga

SEQ ID NO: 750099 - RNA, 21 nt, Human
cagcaugacuccagccucugg

SEQ ID NO: 750100 - RNA, 19 nt, Human
cauuacugcuacccuucag

SEQ ID NO: 750101 - RNA, 23 nt, Human
ccaaacaagaugugggcagcaug

SEQ ID NO: 750102 - RNA, 25 nt, Human
ccagccagccaaggugacacacagc

SEQ ID NO: 750103 - RNA, 24 nt, Human
ccagccagccagccaaggugacac

SEQ ID NO: 750104 - RNA, 20 nt, Human
ccagccuggacccaaucaca

SEQ ID NO: 750105 - RNA, 21 nt, Human
ccaugaaagacacacggggac

SEQ ID NO: 750106 - RNA, 22 nt, Human
cccagcacagcuccaggacaca

SEQ ID NO: 750107 - RNA, 23 nt, Human
cccaugcuguuucuuucugagca

SEQ ID NO: 750108 - RNA, 19 nt, Human
ccccgggaagggcucagug

SEQ ID NO: 750109 - RNA, 23 nt, Human
cccucagcgucuccugcuccugu

SEQ ID NO: 750110 - RNA, 27 nt, Human
cccuggccagccagccagccaagguga

SEQ ID NO: 750111 - RNA, 19 nt, Human
ccgaggacagugccacagg

SEQ ID NO: 750112 - RNA, 18 nt, Human
ccuccugccuccccuccc

SEQ ID NO: 750113 - RNA, 23 nt, Human
ccuccugccuccccucccagggg

SEQ ID NO: 750114 - RNA, 22 nt, Human
ccucuccuccugccguccggcc

SEQ ID NO: 750115 - RNA, 23 nt, Human
ccucuggaacccaacaauguauc

SEQ ID NO: 750116 - RNA, 22 nt, Human
ccugcuugcgcaggauggaggu

SEQ ID NO: 750117 - RNA, 23 nt, Human
ccuuacgcgaggcccugcugccc

SEQ ID NO: 750118 - RNA, 21 nt, Human
cggggacaccagcucacuggg

SEQ ID NO: 750119 - RNA, 24 nt, Human
cgugagcgcuugauggccuccucc

SEQ ID NO: 750120 - RNA, 23 nt, Human
cuccccucccaggggaugugaug

SEQ ID NO: 750121 - RNA, 22 nt, Human
cuccugccuccccucccagggg

SEQ ID NO: 750122 - RNA, 21 nt, Human
cucuccucccagcacagaaga

SEQ ID NO: 750123 - RNA, 21 nt, Human
cugugccaaacggccugaauc

SEQ ID NO: 750124 - RNA, 21 nt, Human
cuucccugacagcccagccug

SEQ ID NO: 750125 - RNA, 20 nt, Human
cuugcaaauaaacagaauga

SEQ ID NO: 750126 - RNA, 18 nt, Human
gaaagacacacggggaca

SEQ ID NO: 750127 - RNA, 18 nt, Human
gaaaugccacgccaaugg

SEQ ID NO: 750128 - RNA, 19 nt, Human
gaacgcggccccgcggccc

SEQ ID NO: 750129 - RNA, 18 nt, Human
gacagucccaugaaagac

SEQ ID NO: 750130 - RNA, 23 nt, Human
gagaauugaugagucggagacac

SEQ ID NO: 750131 - RNA, 20 nt, Human
gagacaccagggcgcuuccc

SEQ ID NO: 750132 - RNA, 21 nt, Human
gagugcuuuggggagccuggc

SEQ ID NO: 750133 - RNA, 22 nt, Human
gagugcuuuggggagccuggcu

SEQ ID NO: 750134 - RNA, 25 nt, Human
gaguuuccugaaagccccuccuggg

SEQ ID NO: 750135 - RNA, 25 nt, Human
gaugugggcagcaugacuccagccu

SEQ ID NO: 750136 - RNA, 20 nt, Human
gcacaacacgcagagcgcag

SEQ ID NO: 750137 - RNA, 25 nt, Human
gcacagcuccaggacacaccgagga

SEQ ID NO: 750138 - RNA, 22 nt, Human
gccagaugacaugcagcaguuu

SEQ ID NO: 750139 - RNA, 25 nt, Human
ggaacgcggccccgcggcccgcaga

SEQ ID NO: 750140 - RNA, 20 nt, Human
ggcuccccucuccuccugcc

SEQ ID NO: 750141 - RNA, 18 nt, Human
ggguuuucugucuguucc

SEQ ID NO: 750142 - RNA, 18 nt, Human
uaagugcggcgggaaacc

SEQ ID NO: 750143 - RNA, 21 nt, Human
ucacagcugacgccagaugac

SEQ ID NO: 750144 - RNA, 20 nt, Human
ucagccugcuugcgcaggau

SEQ ID NO: 750145 - RNA, 22 nt, Human
ucauugguaaacuuaaaaaaau

SEQ ID NO: 750146 - RNA, 24 nt, Human
uccacaaacuuuugauaagcuugc

SEQ ID NO: 750147 - RNA, 19 nt, Human
uccaggucggaacaaccuc

SEQ ID NO: 750148 - RNA, 21 nt, Human
ucccaugaaagacacacgggg

SEQ ID NO: 750149 - RNA, 20 nt, Human
uccuccugccuccccuccca

SEQ ID NO: 750150 - RNA, 22 nt, Human
uccuggggcccucggccuccuc

SEQ ID NO: 750151 - RNA, 20 nt, Human
ucggccuccuccugccuccc

SEQ ID NO: 750152 - RNA, 24 nt, Human
ucuuucugagcagacaccaaagaa

SEQ ID NO: 750153 - RNA, 23 nt, Human
ugaaaccucacuagccugaagga

SEQ ID NO: 750154 - RNA, 22 nt, Human
ugaaagacacacggggacacca

SEQ ID NO: 750155 - RNA, 21 nt, Human
ugaaggaacacacuaagugcg

SEQ ID NO: 750156 - RNA, 21 nt, Human
ugagaaaagcugacauacuca

SEQ ID NO: 750157 - RNA, 22 nt, Human
ugagcagacaccaaagaaaugc

SEQ ID NO: 750158 - RNA, 22 nt, Human
ugauaugaccgagggugggagg

SEQ ID NO: 750159 - RNA, 19 nt, Human
ugauggccuccuccucagc

SEQ ID NO: 750160 - RNA, 24 nt, Human
ugcgagacaaagagugcuuugggg

SEQ ID NO: 750161 - RNA, 18 nt, Human
ugcuuuggggagccuggc

SEQ ID NO: 750162 - RNA, 18 nt, Human
uggcagcccgaggcugug

SEQ ID NO: 750163 - RNA, 21 nt, Human
uggccuccuccucagccugcu

SEQ ID NO: 750164 - RNA, 19 nt, Human
ugggaggacacaggugggc

SEQ ID NO: 750165 - RNA, 21 nt, Human
ugggaggacacaggugggcgg

SEQ ID NO: 750166 - RNA, 24 nt, Human
ugggaucucuaaaggggacagucc

SEQ ID NO: 750167 - RNA, 20 nt, Human
ugggcagcaugacuccagcc

SEQ ID NO: 750168 - RNA, 22 nt, Human
uggggcccucggccuccuccug

SEQ ID NO: 750169 - RNA, 18 nt, Human
ugucacauugccagcugu

SEQ ID NO: 750170 - RNA, 23 nt, Human
ugucacauugccagcuguuuccc

SEQ ID NO: 750171 - RNA, 22 nt, Human
ugugggcagcaugacuccagcc

SEQ ID NO: 750172 - RNA, 20 nt, Human
uuacaguuagacucuccucc

SEQ ID NO: 750173 - RNA, 23 nt, Human
uuuacagucacgccaauacauuu

SEQ ID NO: 750174 - RNA, 20 nt, Human
uuuccugaaagccccuccug

SEQ ID NO: 750175 - RNA, 22 nt, Human
uuugcagauuugcugguacggu

SEQ ID NO: 750176 - RNA, 21 nt, Human
uuuucuggaacaaccuaaagg

SEQ ID NO: 750177 - RNA, 21 nt, Human
aaaaaaaggcaacugucagaa

SEQ ID NO: 750178 - RNA, 22 nt, Human
aaaaaagugccccuacacauuu

SEQ ID NO: 750179 - RNA, 19 nt, Human
aaaauccaaggaaaacccc

SEQ ID NO: 750180 - RNA, 23 nt, Human
aaacuaauuuuauuaacaccuua

SEQ ID NO: 750181 - RNA, 20 nt, Human
aaauacagaauuacugcaau

SEQ ID NO: 750182 - RNA, 24 nt, Human
aaccaaaaaagugccccuacacau

SEQ ID NO: 750183 - RNA, 24 nt, Human
aaugacagguuacugccucuaguu

SEQ ID NO: 750184 - RNA, 20 nt, Human
acaguaaaaaaaaaaaaaaa

SEQ ID NO: 750185 - RNA, 18 nt, Human
accuaaauucuuagucau

SEQ ID NO: 750186 - RNA, 24 nt, Human
acuauaucauaaaagacaaugacu

SEQ ID NO: 750187 - RNA, 24 nt, Human
agaacaccuaaaaaacagacugca

SEQ ID NO: 750188 - RNA, 22 nt, Human
agaagcgccaagcaccuccucc

SEQ ID NO: 750189 - RNA, 22 nt, Human
agagcagggccaacguuagaaa

SEQ ID NO: 750190 - RNA, 20 nt, Human
aggccacaagagcagggcca

SEQ ID NO: 750191 - RNA, 22 nt, Human
aggucuuccagucuuucucuca

SEQ ID NO: 750192 - RNA, 19 nt, Human
aggugggugauggggaggg

SEQ ID NO: 750193 - RNA, 20 nt, Human
aggugggugauggggaggga

SEQ ID NO: 750194 - RNA, 21 nt, Human
aguauuaccuucgaacucaga

SEQ ID NO: 750195 - RNA, 25 nt, Human
auaaaauagcccccaguuauuaaaa

SEQ ID NO: 750196 - RNA, 20 nt, Human
auaagacaaaaaagcuaaaa

SEQ ID NO: 750197 - RNA, 31 nt, Human
aucuuuuuuccucaucguuuuugauagggcc

SEQ ID NO: 750198 - RNA, 20 nt, Human
augacaaccaaaaaagugcc

SEQ ID NO: 750199 - RNA, 19 nt, Human
caaaagcacauuuaaggag

SEQ ID NO: 750200 - RNA, 24 nt, Human
cacugcaggggugagugucuuuag

SEQ ID NO: 750201 - RNA, 24 nt, Human
cagaaauguuuaaaaaaaagucuc

SEQ ID NO: 750202 - RNA, 18 nt, Human
cagaacaccuaaaaaaca

SEQ ID NO: 750203 - RNA, 20 nt, Human
cagaacaccuaaaaaacaga

SEQ ID NO: 750204 - RNA, 19 nt, Human
cagcaauacccacgcagau

SEQ ID NO: 750205 - RNA, 23 nt, Human
caggacagagcccuuaaaucuga

SEQ ID NO: 750206 - RNA, 27 nt, Human
ccacgcagauaagacaaaaaagcuaaa

SEQ ID NO: 750207 - RNA, 22 nt, Human
ccagaucaccucagcagaggca

SEQ ID NO: 750208 - RNA, 22 nt, Human
ccauuaaaauaagagcugaaau

SEQ ID NO: 750209 - RNA, 28 nt, Human
cccacgcagauaagacaaaaggaguuuc

SEQ ID NO: 750210 - RNA, 18 nt, Human
cgcaaggggagaggagga

SEQ ID NO: 750211 - RNA, 25 nt, Human
cuaaaaaacagacugcaaauucaac

SEQ ID NO: 750212 - RNA, 18 nt, Human
cuaauccuggagugcaau

SEQ ID NO: 750213 - RNA, 21 nt, Human
cuucugcaaauugguucaaaa

SEQ ID NO: 750214 - RNA, 18 nt, Human
gacaaccaaaaaagugcc

SEQ ID NO: 750215 - RNA, 22 nt, Human
gacugcuuuuaaauauuucuac

SEQ ID NO: 750216 - RNA, 23 nt, Human
gaggccacaagagcagggccaac

SEQ ID NO: 750217 - RNA, 22 nt, Human
gaucaguuuggacggcugguac

SEQ ID NO: 750218 - RNA, 21 nt, Human
gauugccuuuucauggugaac

SEQ ID NO: 750219 - RNA, 23 nt, Human
gcaagcugauaaaauagccccca

SEQ ID NO: 750220 - RNA, 19 nt, Human
gcaaucuuuuuuccucauc

SEQ ID NO: 750221 - RNA, 23 nt, Human
gccaaauuuagaagguuggaauu

SEQ ID NO: 750222 - RNA, 21 nt, Human
gccaagcaccuccuccgcucu

SEQ ID NO: 750223 - RNA, 21 nt, Human
gccugagaagcgccaagcacc

SEQ ID NO: 750224 - RNA, 23 nt, Human
gcuucugcaaauugguucaaaag

SEQ ID NO: 750225 - RNA, 18 nt, Human
ggaagaaaucugucagua

SEQ ID NO: 750226 - RNA, 20 nt, Human
ggugauggggagggaagagg

SEQ ID NO: 750227 - RNA, 22 nt, Human
ggugauggggagggaagaggga

SEQ ID NO: 750228 - RNA, 24 nt, Human
guaaaaaaaaaaaaaaagaauuac

SEQ ID NO: 750229 - RNA, 19 nt, Human
guauaacaggacagagccc

SEQ ID NO: 750230 - RNA, 27 nt, Human
uaaaaaacagacugcaaauucaacuca

SEQ ID NO: 750231 - RNA, 20 nt, Human
uaaaauaaagcagcaauacc

SEQ ID NO: 750232 - RNA, 22 nt, Human
uaaaauagcccccaguuauuaa

SEQ ID NO: 750233 - RNA, 26 nt, Human
uaagacaaaaaagcuaaaauaucuca

SEQ ID NO: 750234 - RNA, 22 nt, Human
uaagacaggacuuuggaacaag

SEQ ID NO: 750235 - RNA, 21 nt, Human
uaagagcugaaauuuuuggca

SEQ ID NO: 750236 - RNA, 22 nt, Human
uacgacaguuccaaauuuuaga

SEQ ID NO: 750237 - RNA, 19 nt, Human
uacuagccaaauuuagaag

SEQ ID NO: 750238 - RNA, 21 nt, Human
uauaacaggacagagcccuua

SEQ ID NO: 750239 - RNA, 20 nt, Human
uauagcaaauucucuauagc

SEQ ID NO: 750240 - RNA, 23 nt, Human
uauaucugaaacuuaaaaaugau

SEQ ID NO: 750241 - RNA, 24 nt, Human
uauaucugaaacuuaaaaaugauu

SEQ ID NO: 750242 - RNA, 22 nt, Human
uaucugaaacuuaaaaaugauu

SEQ ID NO: 750243 - RNA, 27 nt, Human
ucaauaguuaagacaggacuuuggaac

SEQ ID NO: 750244 - RNA, 23 nt, Human
ucacugaggugggugauggggag

SEQ ID NO: 750245 - RNA, 19 nt, Human
ucagaauuuuaauugugau

SEQ ID NO: 750246 - RNA, 22 nt, Human
ucuacaguaaaaaaaaaaaaaa

SEQ ID NO: 750247 - RNA, 23 nt, Human
ugaaaacucaaaccaauuuuugc

SEQ ID NO: 750248 - RNA, 20 nt, Human
ugaaagccacuggcacaacu

SEQ ID NO: 750249 - RNA, 19 nt, Human
ugaaauuuuuggcauuuau

SEQ ID NO: 750250 - RNA, 19 nt, Human
ugacuuccucuaucaguaa

SEQ ID NO: 750251 - RNA, 24 nt, Human
ugagaagcgccaagcaccuccucc

SEQ ID NO: 750252 - RNA, 25 nt, Human
ugcaugaagucuccuauaucugaaa

SEQ ID NO: 750253 - RNA, 26 nt, Human
ugcugccauuugagaugaaaaaaaag

SEQ ID NO: 750254 - RNA, 21 nt, Human
uggcacaaagcagauuaucuu

SEQ ID NO: 750255 - RNA, 19 nt, Human
uggggagggaagagggaag

SEQ ID NO: 750256 - RNA, 24 nt, Human
uguauaacaggacagagcccuuaa

SEQ ID NO: 750257 - RNA, 22 nt, Human
ugucaguuugcccagcuuguac

SEQ ID NO: 750258 - RNA, 18 nt, Human
ugugaauauucaaagcua

SEQ ID NO: 750259 - RNA, 20 nt, Human
ugugugcuaucuuacauaua

SEQ ID NO: 750260 - RNA, 26 nt, Human
uguuuuggcacaaagcagauuaucuu

SEQ ID NO: 750261 - RNA, 19 nt, Human
uucacaaaauguacaagau

SEQ ID NO: 750262 - RNA, 28 nt, Human
uugugccaggcugucccaugcacugcag

SEQ ID NO: 750263 - RNA, 22 nt, Human
uuugcuuuuagaauuaaauucu

SEQ ID NO: 750264 - RNA, 22 nt, Human
aaaaaaaaaaaaagaaaaagaa

SEQ ID NO: 750265 - RNA, 23 nt, Human
aaaaaaaaaagaaaaagaaaaag

SEQ ID NO: 750266 - RNA, 19 nt, Human
aaaaaaaagaaaaagaaaa

SEQ ID NO: 750267 - RNA, 21 nt, Human
aaaaauaagaaaaccagcuug

SEQ ID NO: 750268 - RNA, 22 nt, Human
aaaaauaagaaaaccagcuugc

SEQ ID NO: 750269 - RNA, 21 nt, Human
aaaagaaaaagaaaaagaaaa

SEQ ID NO: 750270 - RNA, 23 nt, Human
aaaagaaaaagaaaaagaaaaag

SEQ ID NO: 750271 - RNA, 18 nt, Human
aacccaggcaaccgcagc

SEQ ID NO: 750272 - RNA, 20 nt, Human
aacuaaaccacccgacgcug

SEQ ID NO: 750273 - RNA, 24 nt, Human
aacuaaaccacccgacgcugguaa

SEQ ID NO: 750274 - RNA, 22 nt, Human
aagggccccgcacucuucagcu

SEQ ID NO: 750275 - RNA, 18 nt, Human
aaucagcuccugggaacc

SEQ ID NO: 750276 - RNA, 24 nt, Human
acaaaugccaccuuguucccggga

SEQ ID NO: 750277 - RNA, 18 nt, Human
acacugagggcaggcgag

SEQ ID NO: 750278 - RNA, 21 nt, Human
acaggggcugccagagccucu

SEQ ID NO: 750279 - RNA, 30 nt, Human
accaaaucguaaaaaaaaaaaaagaaaaaa

SEQ ID NO: 750280 - RNA, 19 nt, Human
accaacccaggcaaccgca

SEQ ID NO: 750281 - RNA, 22 nt, Human
accagcuugcucgcuguaaaaa

SEQ ID NO: 750282 - RNA, 24 nt, Human
acccacaccagcaaaugaggaucc

SEQ ID NO: 750283 - RNA, 20 nt, Human
accggcaccggcuaggcacg

SEQ ID NO: 750284 - RNA, 22 nt, Human
acguggucaguuuucaucuccc

SEQ ID NO: 750285 - RNA, 20 nt, Human
acuccuccccacuuccuccc

SEQ ID NO: 750286 - RNA, 21 nt, Human
acuccuccccacuuccucccc

SEQ ID NO: 750287 - RNA, 21 nt, Human
agaaaaagaaaaagaaaaaga

SEQ ID NO: 750288 - RNA, 22 nt, Human
agaaaaagaaaaagaaaaagaa

SEQ ID NO: 750289 - RNA, 18 nt, Human
agaccaggccugcgggcg

SEQ ID NO: 750290 - RNA, 19 nt, Human
agaccaggccugcgggcgc

SEQ ID NO: 750291 - RNA, 21 nt, Human
agagagccaguccccuacagg

SEQ ID NO: 750292 - RNA, 23 nt, Human
agaggaaggagggccgccaggcc

SEQ ID NO: 750293 - RNA, 19 nt, Human
agcaaggaaggugccacca

SEQ ID NO: 750294 - RNA, 19 nt, Human
aggaagaggcgcucauugg

SEQ ID NO: 750295 - RNA, 23 nt, Human
aggaaggagggccgccaggcccg

SEQ ID NO: 750296 - RNA, 22 nt, Human
aggaggcccaagccgccuuucc

SEQ ID NO: 750297 - RNA, 24 nt, Human
aggagggucucauguaagaggaag

SEQ ID NO: 750298 - RNA, 18 nt, Human
aggcagugcaggcccagg

SEQ ID NO: 750299 - RNA, 27 nt, Human
aggcagugcaggcccaggccucugggc

SEQ ID NO: 750300 - RNA, 18 nt, Human
aggcccaggccucugggc

SEQ ID NO: 750301 - RNA, 18 nt, Human
aggcgaggggugggcccu

SEQ ID NO: 750302 - RNA, 24 nt, Human
agucgguggcccucccccgacccc

SEQ ID NO: 750303 - RNA, 22 nt, Human
auagaaucuucuguuucuucaa

SEQ ID NO: 750304 - RNA, 23 nt, Human
auagaaucuucuguuucuucaaa

SEQ ID NO: 750305 - RNA, 20 nt, Human
aucugaaaaaggauacaaaa

SEQ ID NO: 750306 - RNA, 24 nt, Human
caaaaaacaacaaucucaacgaca

SEQ ID NO: 750307 - RNA, 21 nt, Human
caaagacacugagggcaggcg

SEQ ID NO: 750308 - RNA, 24 nt, Human
caaagcacccccggcaccagcgug

SEQ ID NO: 750309 - RNA, 18 nt, Human
caaaucguaaaaaaaaaa

SEQ ID NO: 750310 - RNA, 23 nt, Human
caccagcgugugacucugcggcc

SEQ ID NO: 750311 - RNA, 18 nt, Human
caccuccuuccaggaggc

SEQ ID NO: 750312 - RNA, 24 nt, Human
cacguggucaguuuucaucucccu

SEQ ID NO: 750313 - RNA, 21 nt, Human
cacugcgcccggccccagccc

SEQ ID NO: 750314 - RNA, 24 nt, Human
cagagccucucggauggcccaaag

SEQ ID NO: 750315 - RNA, 21 nt, Human
cagauccaaaauagacucagg

SEQ ID NO: 750316 - RNA, 18 nt, Human
cagcaccuaggaagaggc

SEQ ID NO: 750317 - RNA, 19 nt, Human
cagggcgggggcugggggg

SEQ ID NO: 750318 - RNA, 20 nt, Human
cauccuugggcacugccggg

SEQ ID NO: 750319 - RNA, 21 nt, Human
ccaaaauagacucaggcuuca

SEQ ID NO: 750320 - RNA, 24 nt, Human
ccaaagcacccccggcaccagcgu

SEQ ID NO: 750321 - RNA, 23 nt, Human
ccaacagccuucgcggauguucu

SEQ ID NO: 750322 - RNA, 22 nt, Human
ccacccgacgcugguaaagccc

SEQ ID NO: 750323 - RNA, 19 nt, Human
ccacggcucagagcggguu

SEQ ID NO: 750324 - RNA, 22 nt, Human
ccagagccucucggauggccca

SEQ ID NO: 750325 - RNA, 25 nt, Human
ccagagccucucggauggcccaaag

SEQ ID NO: 750326 - RNA, 22 nt, Human
ccagcaacguccugggcaaguc

SEQ ID NO: 750327 - RNA, 23 nt, Human
ccagggaggggccugugcuggca

SEQ ID NO: 750328 - RNA, 22 nt, Human
ccagggguccugugugucuucu

SEQ ID NO: 750329 - RNA, 22 nt, Human
cccaaagcacccccggcaccag

SEQ ID NO: 750330 - RNA, 23 nt, Human
ccccacuuccucccccaaccaac

SEQ ID NO: 750331 - RNA, 18 nt, Human
ccccaggaggaagggccc

SEQ ID NO: 750332 - RNA, 19 nt, Human
ccccgaccccccgcucccc

SEQ ID NO: 750333 - RNA, 19 nt, Human
ccccgaggccccggaccca

SEQ ID NO: 750334 - RNA, 19 nt, Human
cccgaggacuuccagggag

SEQ ID NO: 750335 - RNA, 18 nt, Human
cccgaggccccggaccca

SEQ ID NO: 750336 - RNA, 21 nt, Human
cccgaggccccggacccaucc

SEQ ID NO: 750337 - RNA, 26 nt, Human
cccggccccagcccggcaccaagggc

SEQ ID NO: 750338 - RNA, 19 nt, Human
cccgggaagcccaggcuuc

SEQ ID NO: 750339 - RNA, 21 nt, Human
cccgucccugugagcccuggc

SEQ ID NO: 750340 - RNA, 21 nt, Human
cccuccacaaaugccaccuug

SEQ ID NO: 750341 - RNA, 20 nt, Human
cccuggggcagggcgggggc

SEQ ID NO: 750342 - RNA, 21 nt, Human
ccggcaccagcgugugacucu

SEQ ID NO: 750343 - RNA, 20 nt, Human
ccggcaccggcuaggcacgc

SEQ ID NO: 750344 - RNA, 21 nt, Human
ccgucccugugagcccuggcc

SEQ ID NO: 750345 - RNA, 21 nt, Human
ccgugccgauccgcgcuccgc

SEQ ID NO: 750346 - RNA, 19 nt, Human
ccuacaggagccagaccca

SEQ ID NO: 750347 - RNA, 19 nt, Human
ccugcgggcgcucccucca

SEQ ID NO: 750348 - RNA, 19 nt, Human
ccugugcuggcagcagagc

SEQ ID NO: 750349 - RNA, 20 nt, Human
ccuugggcacugccgggccc

SEQ ID NO: 750350 - RNA, 21 nt, Human
ccuugggcacugccgggcccu

SEQ ID NO: 750351 - RNA, 23 nt, Human
ccuuguucccgggaagcccaggc

SEQ ID NO: 750352 - RNA, 19 nt, Human
ccuuuuguugaacaaaagu

SEQ ID NO: 750353 - RNA, 25 nt, Human
cgaggccccggacccauccuugggc

SEQ ID NO: 750354 - RNA, 27 nt, Human
cgcaggcccgcgggguggccaccuccu

SEQ ID NO: 750355 - RNA, 20 nt, Human
cgcuguguuuggggacugaa

SEQ ID NO: 750356 - RNA, 21 nt, Human
cggcgugucaggccgagagca

SEQ ID NO: 750357 - RNA, 21 nt, Human
cgugucaggccgagagcagca

SEQ ID NO: 750358 - RNA, 19 nt, Human
cuacagaccuccuggccgg

SEQ ID NO: 750359 - RNA, 21 nt, Human
cucaacgacacccaagggacu

SEQ ID NO: 750360 - RNA, 26 nt, Human
cucacccacaccagcaaaugaggauc

SEQ ID NO: 750361 - RNA, 24 nt, Human
cucccccaaccaacccaggcaacc

SEQ ID NO: 750362 - RNA, 18 nt, Human
cucccccgaccccccgcu

SEQ ID NO: 750363 - RNA, 20 nt, Human
cucccccgaccccccgcucc

SEQ ID NO: 750364 - RNA, 22 nt, Human
cucccccgaccccccgcucccc

SEQ ID NO: 750365 - RNA, 25 nt, Human
cuccugggaacccgcgugagccgcc

SEQ ID NO: 750366 - RNA, 21 nt, Human
cugagguccucugcuucaccc

SEQ ID NO: 750367 - RNA, 21 nt, Human
cugcggguggcccucagaggc

SEQ ID NO: 750368 - RNA, 25 nt, Human
cuugcucgcuguaaaaaauagaauc

SEQ ID NO: 750369 - RNA, 23 nt, Human
gaaaaagaaaauuccagcaacgu

SEQ ID NO: 750370 - RNA, 18 nt, Human
gaccaggccugcgggcgc

SEQ ID NO: 750371 - RNA, 22 nt, Human
gacucaggacaagcugagggag

SEQ ID NO: 750372 - RNA, 18 nt, Human
gagcggguucugucccca

SEQ ID NO: 750373 - RNA, 22 nt, Human
gcaggcccaggccucugggcuc

SEQ ID NO: 750374 - RNA, 26 nt, Human
gcagggcgggggcugggugcuggagc

SEQ ID NO: 750375 - RNA, 21 nt, Human
gccccagggaccccucccgcu

SEQ ID NO: 750376 - RNA, 19 nt, Human
gcccggccccagcccggca

SEQ ID NO: 750377 - RNA, 22 nt, Human
gcccuggggagagagguguggc

SEQ ID NO: 750378 - RNA, 19 nt, Human
gccucugcccccuccccca

SEQ ID NO: 750379 - RNA, 20 nt, Human
gcggccccagcagaccaggc

SEQ ID NO: 750380 - RNA, 18 nt, Human
gcuccccgaauguggccc

SEQ ID NO: 750381 - RNA, 22 nt, Human
gcuccgcucccgaggacuucca

SEQ ID NO: 750382 - RNA, 20 nt, Human
gcucggagcaccuccaacag

SEQ ID NO: 750383 - RNA, 21 nt, Human
gcugcagccugggccaccauu

SEQ ID NO: 750384 - RNA, 18 nt, Human
ggaacggagaagggcagg

SEQ ID NO: 750385 - RNA, 20 nt, Human
ggagcgaguguggagcgcag

SEQ ID NO: 750386 - RNA, 18 nt, Human
ggaggccagcaaggaagg

SEQ ID NO: 750387 - RNA, 21 nt, Human
ggcagggcgggggcugggggg

SEQ ID NO: 750388 - RNA, 25 nt, Human
ggcgccaaggugggguucacugggg

SEQ ID NO: 750389 - RNA, 18 nt, Human
ggcgggggcugggggggu

SEQ ID NO: 750390 - RNA, 18 nt, Human
gggcgggggcuggggggg

SEQ ID NO: 750391 - RNA, 19 nt, Human
ggggccaugugccagacau

SEQ ID NO: 750392 - RNA, 20 nt, Human
gggggucugugcccggaccg

SEQ ID NO: 750393 - RNA, 25 nt, Human
ggugaaaccagcccaugccgccgga

SEQ ID NO: 750394 - RNA, 24 nt, Human
guccaauuguuuccacuaccaaau

SEQ ID NO: 750395 - RNA, 20 nt, Human
gugccgauccgcgcuccgcc

SEQ ID NO: 750396 - RNA, 18 nt, Human
guggccauugucugcggg

SEQ ID NO: 750397 - RNA, 21 nt, Human
guggcccucccccgacccccc

SEQ ID NO: 750398 - RNA, 22 nt, Human
guuuucaucucccuuucuccac

SEQ ID NO: 750399 - RNA, 22 nt, Human
uaaaaacuacagcuucucucca

SEQ ID NO: 750400 - RNA, 18 nt, Human
uaaaacgcagaggucaac

SEQ ID NO: 750401 - RNA, 26 nt, Human
uaaaccacccgacgcugguaaagccc

SEQ ID NO: 750402 - RNA, 22 nt, Human
ucacagaaauuaaacaucugcc

SEQ ID NO: 750403 - RNA, 22 nt, Human
ucagcccagcgcaggcggcccc

SEQ ID NO: 750404 - RNA, 20 nt, Human
ucaggccgagagcagcaggc

SEQ ID NO: 750405 - RNA, 25 nt, Human
uccaaaauagacucaggcuucagac

SEQ ID NO: 750406 - RNA, 26 nt, Human
uccaacagccuucgcggauguucucc

SEQ ID NO: 750407 - RNA, 23 nt, Human
uccaggcuggaacggagaagggc

SEQ ID NO: 750408 - RNA, 26 nt, Human
uccccacuuccucccccaaccaaccc

SEQ ID NO: 750409 - RNA, 20 nt, Human
uccccaggaggaagggcccc

SEQ ID NO: 750410 - RNA, 22 nt, Human
uccccccaaagcacccccggca

SEQ ID NO: 750411 - RNA, 21 nt, Human
ucccucacccacaccagcaaa

SEQ ID NO: 750412 - RNA, 19 nt, Human
ucccuggggcagggcgggg

SEQ ID NO: 750413 - RNA, 19 nt, Human
uccgcgcaguccagagcca

SEQ ID NO: 750414 - RNA, 21 nt, Human
uccgcgcaguccagagccacg

SEQ ID NO: 750415 - RNA, 21 nt, Human
uccuccccacuuccuccccca

SEQ ID NO: 750416 - RNA, 21 nt, Human
ucgcggauguucuccugggcc

SEQ ID NO: 750417 - RNA, 22 nt, Human
ucggccacaccuggcacguggu

SEQ ID NO: 750418 - RNA, 24 nt, Human
ucgguggcccucccccgacccccc

SEQ ID NO: 750419 - RNA, 22 nt, Human
ucuccacaaaagggacucgaac

SEQ ID NO: 750420 - RNA, 25 nt, Human
ugagggcaggcgaggggugggcccu

SEQ ID NO: 750421 - RNA, 20 nt, Human
ugaucggcgcagcucccccc

SEQ ID NO: 750422 - RNA, 19 nt, Human
ugcaaaagcucaugaggau

SEQ ID NO: 750423 - RNA, 23 nt, Human
ugccacagugcucggagcaccuc

SEQ ID NO: 750424 - RNA, 18 nt, Human
ugccagagccucucggau

SEQ ID NO: 750425 - RNA, 25 nt, Human
ugccgauccgcgcuccgcucccgag

SEQ ID NO: 750426 - RNA, 22 nt, Human
ugcucggagcaccuccaacagc

SEQ ID NO: 750427 - RNA, 18 nt, Human
ugcugagcgcccuggagg

SEQ ID NO: 750428 - RNA, 22 nt, Human
uggagcgcaggcagggucacug

SEQ ID NO: 750429 - RNA, 24 nt, Human
uggccaccuccuuccaggaggccc

SEQ ID NO: 750430 - RNA, 18 nt, Human
uggcccaaaggcggcugc

SEQ ID NO: 750431 - RNA, 20 nt, Human
uggcccaaaggcggcugcag

SEQ ID NO: 750432 - RNA, 22 nt, Human
uggggagagagguguggccauu

SEQ ID NO: 750433 - RNA, 24 nt, Human
ugggggggucugugcccggaccgg

SEQ ID NO: 750434 - RNA, 21 nt, Human
ugggggugggucagugcccac

SEQ ID NO: 750435 - RNA, 19 nt, Human
ugguaaaaacuacagcuuc

SEQ ID NO: 750436 - RNA, 18 nt, Human
uggucccggaacacuccu

SEQ ID NO: 750437 - RNA, 19 nt, Human
uuccagaauuccugaaaau

SEQ ID NO: 750438 - RNA, 25 nt, Human
uuccagggaggggccugugcuggca

SEQ ID NO: 750439 - RNA, 18 nt, Human
uucuccugggccuuccaa

SEQ ID NO: 750440 - RNA, 20 nt, Human
uugccucaggcgccaaggug

SEQ ID NO: 750441 - RNA, 25 nt, Human
uugcucgcuguaaaaaauagaaucu

SEQ ID NO: 750442 - RNA, 18 nt, Human
uuggccccgaggccccgg

SEQ ID NO: 750443 - RNA, 21 nt, Human
uuggggacugaaucccagcac

SEQ ID NO: 750444 - RNA, 21 nt, Human
uuugguaaaaacuacagcuuc

SEQ ID NO: 750445 - RNA, 22 nt, Human
uuuucaucucccuuucuccaca

SEQ ID NO: 750446 - RNA, 26 nt, Human
aaaaaaaaaaaacaaaccacaaccgg

SEQ ID NO: 750447 - RNA, 21 nt, Human
aaaaaaaaaacaaaccacaag

SEQ ID NO: 750448 - RNA, 21 nt, Human
aaaaaaacaaaccacaaccgg

SEQ ID NO: 750449 - RNA, 23 nt, Human
aaaaaacaacaacgaaaaaaaac

SEQ ID NO: 750450 - RNA, 23 nt, Human
aaaacaacaacgaaaaaaaaccc

SEQ ID NO: 750451 - RNA, 24 nt, Human
aaaacaacaacgaaaaaaaacccc

SEQ ID NO: 750452 - RNA, 22 nt, Human
aaaaggaggcauguuuucacaa

SEQ ID NO: 750453 - RNA, 23 nt, Human
aaacaaaccacaaccggcgaaca

SEQ ID NO: 750454 - RNA, 28 nt, Human
aaacaacaacgaaaaaaaaccccaaauc

SEQ ID NO: 750455 - RNA, 23 nt, Human
aaaggaggcauguuuucacaacu

SEQ ID NO: 750456 - RNA, 21 nt, Human
aaauagaucaacagguuaaga

SEQ ID NO: 750457 - RNA, 21 nt, Human
aacaaaccacaaccggcgaac

SEQ ID NO: 750458 - RNA, 26 nt, Human
aacaacaacgaaaaaaaaccccaaaa

SEQ ID NO: 750459 - RNA, 26 nt, Human
aaccggcgaacaucccuuagucccuu

SEQ ID NO: 750460 - RNA, 25 nt, Human
aagaaagcacaucugcacagaggcu

SEQ ID NO: 750461 - RNA, 18 nt, Human
aaugacaacaaaaaaaaa

SEQ ID NO: 750462 - RNA, 23 nt, Human
acaacaaaaaaaaaaggcacgaa

SEQ ID NO: 750463 - RNA, 19 nt, Human
acacuugucuuuuccuggu

SEQ ID NO: 750464 - RNA, 25 nt, Human
acccaaauucaaggacaauuuggcu

SEQ ID NO: 750465 - RNA, 20 nt, Human
accugcugcugcaggcuugc

SEQ ID NO: 750466 - RNA, 23 nt, Human
agacagaauacaagacugggugg

SEQ ID NO: 750467 - RNA, 20 nt, Human
agcaaacuuuaaaaucuuaa

SEQ ID NO: 750468 - RNA, 21 nt, Human
agcaguuggucuggaccagcc

SEQ ID NO: 750469 - RNA, 22 nt, Human
agucuaugugaugaacaagaug

SEQ ID NO: 750470 - RNA, 25 nt, Human
aguuaucaccuuacuuuuggucaaa

SEQ ID NO: 750471 - RNA, 26 nt, Human
caaaagaccucaaauagaucaacagg

SEQ ID NO: 750472 - RNA, 22 nt, Human
caaaccacaaccggcgaacauc

SEQ ID NO: 750473 - RNA, 25 nt, Human
caaacuccaagccuggccuugauug

SEQ ID NO: 750474 - RNA, 21 nt, Human
caacaaaaaaaaaaggcacga

SEQ ID NO: 750475 - RNA, 23 nt, Human
caacaaaaaaaaaaggcacgaaa

SEQ ID NO: 750476 - RNA, 26 nt, Human
caacaaaaaaaaaaggcacgaaauau

SEQ ID NO: 750477 - RNA, 23 nt, Human
caacagguuaagaaguguaaaaa

SEQ ID NO: 750478 - RNA, 18 nt, Human
caaugcagguaugugucc

SEQ ID NO: 750479 - RNA, 22 nt, Human
cauagaaagcugguuuccucca

SEQ ID NO: 750480 - RNA, 19 nt, Human
ccaccagguucuuccuucc

SEQ ID NO: 750481 - RNA, 21 nt, Human
cccugugcauacucucuuuca

SEQ ID NO: 750482 - RNA, 22 nt, Human
ccggagaggaggggacggccca

SEQ ID NO: 750483 - RNA, 21 nt, Human
ccuggaaugaggccuguucuu

SEQ ID NO: 750484 - RNA, 23 nt, Human
ccuggaaugaggccuguucuuga

SEQ ID NO: 750485 - RNA, 19 nt, Human
cggcccagcgagcgcgcgc

SEQ ID NO: 750486 - RNA, 24 nt, Human
cucaaauagaucaacagguuaaga

SEQ ID NO: 750487 - RNA, 25 nt, Human
cucaaucagaugagcaaaagccacu

SEQ ID NO: 750488 - RNA, 19 nt, Human
cugccccccucuuugcucc

SEQ ID NO: 750489 - RNA, 18 nt, Human
cuggauuccauauccugg

SEQ ID NO: 750490 - RNA, 21 nt, Human
cuggcugucugggccggucug

SEQ ID NO: 750491 - RNA, 24 nt, Human
cugggccggucugcuggcuuggga

SEQ ID NO: 750492 - RNA, 25 nt, Human
cuguuuccuuauguagccaacauga

SEQ ID NO: 750493 - RNA, 19 nt, Human
cuuaaccaaggaaaaaaaa

SEQ ID NO: 750494 - RNA, 23 nt, Human
gaaaaaaaaccccaaaucaugga

SEQ ID NO: 750495 - RNA, 24 nt, Human
gaaaaaaaaccccaaaucauggag

SEQ ID NO: 750496 - RNA, 21 nt, Human
gaaaaauacccaaauacaaaa

SEQ ID NO: 750497 - RNA, 18 nt, Human
gagaagauucauuaaugg

SEQ ID NO: 750498 - RNA, 22 nt, Human
gagaaggccacuccuggcuuuc

SEQ ID NO: 750499 - RNA, 21 nt, Human
gagcaaaagccacuugaagaa

SEQ ID NO: 750500 - RNA, 25 nt, Human
gagcauuucaaguuuuuuaagauuc

SEQ ID NO: 750501 - RNA, 18 nt, Human
gcaugagggcugcccccc

SEQ ID NO: 750502 - RNA, 21 nt, Human
gcuaauucuaaaugaauggca

SEQ ID NO: 750503 - RNA, 21 nt, Human
gcuacuaguucagccccucca

SEQ ID NO: 750504 - RNA, 20 nt, Human
gcugcaggcuugcuggccug

SEQ ID NO: 750505 - RNA, 20 nt, Human
ggagaggaggggacggccca

SEQ ID NO: 750506 - RNA, 22 nt, Human
ggaggagccagccucuccugaa

SEQ ID NO: 750507 - RNA, 22 nt, Human
ggaggagggccggagaggaggg

SEQ ID NO: 750508 - RNA, 22 nt, Human
gggccggagaggaggggacggc

SEQ ID NO: 750509 - RNA, 19 nt, Human
gggcugccccccucuuugc

SEQ ID NO: 750510 - RNA, 21 nt, Human
gguaggagaaaugacauagaa

SEQ ID NO: 750511 - RNA, 21 nt, Human
guggaaaacccaaauucaagg

SEQ ID NO: 750512 - RNA, 19 nt, Human
uaaaaaaaccacccuuuua

SEQ ID NO: 750513 - RNA, 25 nt, Human
uaaaauuagcagcucuuccaaaaaa

SEQ ID NO: 750514 - RNA, 26 nt, Human
uaauuuagggacugugcccuggaauc

SEQ ID NO: 750515 - RNA, 21 nt, Human
uaccaggccacccagucacac

SEQ ID NO: 750516 - RNA, 20 nt, Human
uagagaagcucaacaaugca

SEQ ID NO: 750517 - RNA, 24 nt, Human
uaggauuugugcuaugguaggaga

SEQ ID NO: 750518 - RNA, 23 nt, Human
uagucccuagguauugugcuccc

SEQ ID NO: 750519 - RNA, 18 nt, Human
ucaaggacaauuuggcua

SEQ ID NO: 750520 - RNA, 20 nt, Human
ucaaggacaauuuggcuagc

SEQ ID NO: 750521 - RNA, 20 nt, Human
ucacacauaauccuccuugu

SEQ ID NO: 750522 - RNA, 21 nt, Human
ucagcaccugacgugggggca

SEQ ID NO: 750523 - RNA, 25 nt, Human
ucccugugacacacagaagacacuu

SEQ ID NO: 750524 - RNA, 23 nt, Human
ucuaccaggccacccagucacac

SEQ ID NO: 750525 - RNA, 18 nt, Human
ucucauagaaagcugguu

SEQ ID NO: 750526 - RNA, 22 nt, Human
ucuccugaaaucccuccuucug

SEQ ID NO: 750527 - RNA, 19 nt, Human
ucucuuucaauagcagccu

SEQ ID NO: 750528 - RNA, 24 nt, Human
ucugcuaauucuaaaugaauggca

SEQ ID NO: 750529 - RNA, 25 nt, Human
ucugggccggucugcuggcuuggga

SEQ ID NO: 750530 - RNA, 22 nt, Human
ugaaaaauacccaaauacaaaa

SEQ ID NO: 750531 - RNA, 22 nt, Human
ugaaaucccuccuucuguuucc

SEQ ID NO: 750532 - RNA, 21 nt, Human
ugauaaacacaaaagaccuca

SEQ ID NO: 750533 - RNA, 24 nt, Human
ugccggggcguccccaguagagaa

SEQ ID NO: 750534 - RNA, 21 nt, Human
uggaaaacccaaauucaagga

SEQ ID NO: 750535 - RNA, 24 nt, Human
ugggggcaccugcugcugcaggcu

SEQ ID NO: 750536 - RNA, 20 nt, Human
uggugcuaaauucagggcag

SEQ ID NO: 750537 - RNA, 23 nt, Human
uguuaggcaugagggcugccccc

SEQ ID NO: 750538 - RNA, 18 nt, Human
uuaggagggauggaguuu

SEQ ID NO: 750539 - RNA, 19 nt, Human
uuaggagggauggaguuuu

SEQ ID NO: 750540 - RNA, 21 nt, Human
uucaaggacaauuuggcuagc

SEQ ID NO: 750541 - RNA, 22 nt, Human
uuggugcuaaauucagggcagu

SEQ ID NO: 750542 - RNA, 22 nt, Human
uuuaaaauaaaauuagcagcuc

SEQ ID NO: 750543 - RNA, 23 nt, Human
uuuuaagauucuuaggagggaug

SEQ ID NO: 750544 - RNA, 25 nt, Human
aaaaaagaaaaucauuuagcaagag

SEQ ID NO: 750545 - RNA, 18 nt, Human
aaaaacagcccuguucca

SEQ ID NO: 750546 - RNA, 21 nt, Human
aaaaccccagagccugcagca

SEQ ID NO: 750547 - RNA, 20 nt, Human
aaaggaggcauucagacagc

SEQ ID NO: 750548 - RNA, 24 nt, Human
aacagcuucagaggacagggguga

SEQ ID NO: 750549 - RNA, 18 nt, Human
aacccccaugcacccugc

SEQ ID NO: 750550 - RNA, 20 nt, Human
aagagcaguuucauucacaa

SEQ ID NO: 750551 - RNA, 19 nt, Human
aagcaagagcuggagcagc

SEQ ID NO: 750552 - RNA, 29 nt, Human
aagcaagagugaaauggagaagggacccc

SEQ ID NO: 750553 - RNA, 19 nt, Human
aaggaggcauucagacagc

SEQ ID NO: 750554 - RNA, 18 nt, Human
aauccgcugauuuuccuc

SEQ ID NO: 750555 - RNA, 18 nt, Human
acacagaacccccugccc

SEQ ID NO: 750556 - RNA, 24 nt, Human
acagacccagaagcccacagccca

SEQ ID NO: 750557 - RNA, 20 nt, Human
acaugaacaugcaaaacccc

SEQ ID NO: 750558 - RNA, 18 nt, Human
acccagaagcccacagcc

SEQ ID NO: 750559 - RNA, 19 nt, Human
acccugagugcccaagaag

SEQ ID NO: 750560 - RNA, 19 nt, Human
acgaaagcugcuguggucu

SEQ ID NO: 750561 - RNA, 25 nt, Human
agaaacaccccaacucucaaccuuc

SEQ ID NO: 750562 - RNA, 24 nt, Human
agaauauaaaaacagcccuguucc

SEQ ID NO: 750563 - RNA, 22 nt, Human
agacagacccccaccugacuuc

SEQ ID NO: 750564 - RNA, 20 nt, Human
agaccaccucucagagcucc

SEQ ID NO: 750565 - RNA, 21 nt, Human
agagagaugcugaagccuggg

SEQ ID NO: 750566 - RNA, 21 nt, Human
agagcaaggggcuguguuugu

SEQ ID NO: 750567 - RNA, 19 nt, Human
agagccaagagucccaagg

SEQ ID NO: 750568 - RNA, 19 nt, Human
agaugcugaagccugggug

SEQ ID NO: 750569 - RNA, 18 nt, Human
agcaggagacgggugggg

SEQ ID NO: 750570 - RNA, 19 nt, Human
agcaggagacgggugggga

SEQ ID NO: 750571 - RNA, 23 nt, Human
agcccuggcugggucuuuuccca

SEQ ID NO: 750572 - RNA, 18 nt, Human
agccucuccacccucccc

SEQ ID NO: 750573 - RNA, 23 nt, Human
agccuuaaccccaaaggaaaagc

SEQ ID NO: 750574 - RNA, 21 nt, Human
agcugcgcugcccccguccuc

SEQ ID NO: 750575 - RNA, 20 nt, Human
agcuguccaccguggucugg

SEQ ID NO: 750576 - RNA, 22 nt, Human
aggaaagaaggagauagggcag

SEQ ID NO: 750577 - RNA, 29 nt, Human
aggauaaccauugucccccuuccauggaa

SEQ ID NO: 750578 - RNA, 26 nt, Human
aggcagggaggacagcugugaggcug

SEQ ID NO: 750579 - RNA, 19 nt, Human
aggccugggagccggagcc

SEQ ID NO: 750580 - RNA, 19 nt, Human
agggaccauuuggcuuccu

SEQ ID NO: 750581 - RNA, 19 nt, Human
agggaccccauggaaggaa

SEQ ID NO: 750582 - RNA, 25 nt, Human
agggauauauccccagugcucugga

SEQ ID NO: 750583 - RNA, 20 nt, Human
agggggaggaguggaagauu

SEQ ID NO: 750584 - RNA, 20 nt, Human
aggugggaguggaaggcagg

SEQ ID NO: 750585 - RNA, 27 nt, Human
auagggcagugagccucuuaggccucu

SEQ ID NO: 750586 - RNA, 24 nt, Human
aucacaucccucccacuuccccag

SEQ ID NO: 750587 - RNA, 18 nt, Human
aucauuuagcaagagcag

SEQ ID NO: 750588 - RNA, 24 nt, Human
cacagacccagaagcccacagccc

SEQ ID NO: 750589 - RNA, 18 nt, Human
cacagccauggcccucag

SEQ ID NO: 750590 - RNA, 21 nt, Human
cacagcccagguccuucucca

SEQ ID NO: 750591 - RNA, 23 nt, Human
cacagcccagguccuucuccaca

SEQ ID NO: 750592 - RNA, 20 nt, Human
cacauccaccuccuccucga

SEQ ID NO: 750593 - RNA, 22 nt, Human
cacaugccccuccccacccccu

SEQ ID NO: 750594 - RNA, 18 nt, Human
cacccccccuccaaaaaa

SEQ ID NO: 750595 - RNA, 19 nt, Human
caccggacuccucccucca

SEQ ID NO: 750596 - RNA, 19 nt, Human
caccuccuccucgacuccu

SEQ ID NO: 750597 - RNA, 20 nt, Human
caccuugccuacgcccaugu

SEQ ID NO: 750598 - RNA, 21 nt, Human
cacucaacccugagugcccaa

SEQ ID NO: 750599 - RNA, 23 nt, Human
cagaaaaauggauauuucccaga

SEQ ID NO: 750600 - RNA, 25 nt, Human
cagaagacagacccccaccugacuu

SEQ ID NO: 750601 - RNA, 22 nt, Human
cagaagcccacagcccaggucc

SEQ ID NO: 750602 - RNA, 23 nt, Human
cagaagcccacagcccagguccu

SEQ ID NO: 750603 - RNA, 19 nt, Human
cagacccagaagcccacag

SEQ ID NO: 750604 - RNA, 24 nt, Human
cagaccuggaggaugguguguggg

SEQ ID NO: 750605 - RNA, 21 nt, Human
cagccauguccaacagccccu

SEQ ID NO: 750606 - RNA, 21 nt, Human
cagcugccacauccaccuccu

SEQ ID NO: 750607 - RNA, 25 nt, Human
caucacaucccucccacuuccccag

SEQ ID NO: 750608 - RNA, 26 nt, Human
ccaacagccccugaggucuguucucu

SEQ ID NO: 750609 - RNA, 23 nt, Human
ccagcuccucagucucccucuuc

SEQ ID NO: 750610 - RNA, 21 nt, Human
ccagguccuucuccacagcca

SEQ ID NO: 750611 - RNA, 23 nt, Human
ccauuuggcuuccuugggaaagg

SEQ ID NO: 750612 - RNA, 18 nt, Human
cccaaaggaaaagcaacc

SEQ ID NO: 750613 - RNA, 22 nt, Human
cccaagaaguuauaaaaaugua

SEQ ID NO: 750614 - RNA, 20 nt, Human
cccaagauacccucuucaac

SEQ ID NO: 750615 - RNA, 25 nt, Human
cccacagcaccgcugcuuugcuccg

SEQ ID NO: 750616 - RNA, 21 nt, Human
cccagagccugcagcaggaga

SEQ ID NO: 750617 - RNA, 25 nt, Human
cccaggccaagagagaugcugaagc

SEQ ID NO: 750618 - RNA, 18 nt, Human
cccaugcacccugccccc

SEQ ID NO: 750619 - RNA, 21 nt, Human
cccaugcacccugcccccagc

SEQ ID NO: 750620 - RNA, 22 nt, Human
cccaugcacccugcccccagca

SEQ ID NO: 750621 - RNA, 24 nt, Human
cccaugcacccugcccccagcacc

SEQ ID NO: 750622 - RNA, 22 nt, Human
cccauguuuccuccaaaaacca

SEQ ID NO: 750623 - RNA, 23 nt, Human
ccccaaaggaaaagcaacccuuu

SEQ ID NO: 750624 - RNA, 18 nt, Human
ccccaagauacccucuuc

SEQ ID NO: 750625 - RNA, 18 nt, Human
ccccagagccugcagcag

SEQ ID NO: 750626 - RNA, 20 nt, Human
ccccagugcucuggaaaacu

SEQ ID NO: 750627 - RNA, 22 nt, Human
ccccaugcacccugcccccagc

SEQ ID NO: 750628 - RNA, 23 nt, Human
ccccaugcacccugcccccagca

SEQ ID NO: 750629 - RNA, 27 nt, Human
ccccaugcacccugcccccagcaccag

SEQ ID NO: 750630 - RNA, 19 nt, Human
ccccauggacgugcccuuc

SEQ ID NO: 750631 - RNA, 23 nt, Human
cccccugaaauagacgauaagca

SEQ ID NO: 750632 - RNA, 19 nt, Human
cccugagugcccaagaagu

SEQ ID NO: 750633 - RNA, 23 nt, Human
ccgcugauuuuccucucuuccuc

SEQ ID NO: 750634 - RNA, 19 nt, Human
ccucagcugcaacccugcc

SEQ ID NO: 750635 - RNA, 25 nt, Human
ccucccuccacuccacucaacccug

SEQ ID NO: 750636 - RNA, 22 nt, Human
ccuccuccucgacuccugaucu

SEQ ID NO: 750637 - RNA, 18 nt, Human
ccugcccccagcaccaga

SEQ ID NO: 750638 - RNA, 23 nt, Human
ccugcccugcuugcaucccagaa

SEQ ID NO: 750639 - RNA, 24 nt, Human
ccugcccugcuugcaucccagaag

SEQ ID NO: 750640 - RNA, 18 nt, Human
ccugccuggcugagggag

SEQ ID NO: 750641 - RNA, 21 nt, Human
ccugcugaggcagccucucca

SEQ ID NO: 750642 - RNA, 19 nt, Human
ccugggcaguggcagggcc

SEQ ID NO: 750643 - RNA, 20 nt, Human
ccugugccaagggcugggga

SEQ ID NO: 750644 - RNA, 24 nt, Human
cgauaagcaacccccaugcacccu

SEQ ID NO: 750645 - RNA, 19 nt, Human
cggacuccucccuccacuc

SEQ ID NO: 750646 - RNA, 22 nt, Human
cuagaccaccucucagagcucc

SEQ ID NO: 750647 - RNA, 24 nt, Human
cucaacccugagugcccaagaagu

SEQ ID NO: 750648 - RNA, 19 nt, Human
cucacggccaucuaguugc

SEQ ID NO: 750649 - RNA, 18 nt, Human
cucagcugcaacccugcc

SEQ ID NO: 750650 - RNA, 21 nt, Human
cucagcugccacauccaccuc

SEQ ID NO: 750651 - RNA, 24 nt, Human
cucaguccccaccagcauggaugc

SEQ ID NO: 750652 - RNA, 19 nt, Human
cucaguucccaggccugug

SEQ ID NO: 750653 - RNA, 23 nt, Human
cuccaaccccacagcaccgcugc

SEQ ID NO: 750654 - RNA, 22 nt, Human
cuccacagccacaccaagcuuu

SEQ ID NO: 750655 - RNA, 18 nt, Human
cuccacuccacucaaccc

SEQ ID NO: 750656 - RNA, 25 nt, Human
cuccuacccgaacucugccugugcc

SEQ ID NO: 750657 - RNA, 25 nt, Human
cuccucccuccacuccacucaaccc

SEQ ID NO: 750658 - RNA, 18 nt, Human
cucuugggccuggcgugg

SEQ ID NO: 750659 - RNA, 24 nt, Human
cugaaauagacgauaagcaacccc

SEQ ID NO: 750660 - RNA, 18 nt, Human
cugcccaguuucagcugu

SEQ ID NO: 750661 - RNA, 20 nt, Human
cuugcagaagacagaccccc

SEQ ID NO: 750662 - RNA, 18 nt, Human
gaaagaaggagauagggc

SEQ ID NO: 750663 - RNA, 22 nt, Human
gacaagaaggaagguguguggu

SEQ ID NO: 750664 - RNA, 22 nt, Human
gagcuguccaccguggucuggg

SEQ ID NO: 750665 - RNA, 21 nt, Human
gaguggaaggcagggcauugg

SEQ ID NO: 750666 - RNA, 22 nt, Human
gcaaaaccccagagccugcagc

SEQ ID NO: 750667 - RNA, 29 nt, Human
gcaaaaccccagagccugcagcaggagac

SEQ ID NO: 750668 - RNA, 22 nt, Human
gcacagacccagaagcccacag

SEQ ID NO: 750669 - RNA, 21 nt, Human
gcacagccuuaaccccaaagg

SEQ ID NO: 750670 - RNA, 19 nt, Human
gcagccucuccacccuccc

SEQ ID NO: 750671 - RNA, 19 nt, Human
gcagggccaagugcucucc

SEQ ID NO: 750672 - RNA, 22 nt, Human
gcccagguccuucuccacagcc

SEQ ID NO: 750673 - RNA, 22 nt, Human
gcccuggcugggucuuuuccca

SEQ ID NO: 750674 - RNA, 21 nt, Human
gcccuuguguacauaaucucu

SEQ ID NO: 750675 - RNA, 18 nt, Human
gccuuggaagggcgugag

SEQ ID NO: 750676 - RNA, 23 nt, Human
gcuuugcuccgcccauccucugc

SEQ ID NO: 750677 - RNA, 18 nt, Human
ggacaauggagggggagg

SEQ ID NO: 750678 - RNA, 22 nt, Human
ggagcagccagcccuggcuggg

SEQ ID NO: 750679 - RNA, 22 nt, Human
ggcacagacccagaagcccaca

SEQ ID NO: 750680 - RNA, 18 nt, Human
ggccaagugcucuccaac

SEQ ID NO: 750681 - RNA, 21 nt, Human
ggccaagugcucuccaacccc

SEQ ID NO: 750682 - RNA, 19 nt, Human
gggaggagcugaagaaggg

SEQ ID NO: 750683 - RNA, 24 nt, Human
gggaggggacaauggagggggagg

SEQ ID NO: 750684 - RNA, 20 nt, Human
gggcgugaggaaagaaggag

SEQ ID NO: 750685 - RNA, 24 nt, Human
gggcuggggaggggcuaccugggc

SEQ ID NO: 750686 - RNA, 21 nt, Human
ggggaggggacaauggagggg

SEQ ID NO: 750687 - RNA, 18 nt, Human
ggggaggggcuaccuggg

SEQ ID NO: 750688 - RNA, 19 nt, Human
gggggagggaggguauggg

SEQ ID NO: 750689 - RNA, 18 nt, Human
ggugaggucguggagaag

SEQ ID NO: 750690 - RNA, 19 nt, Human
ggugcacacacuggaggcu

SEQ ID NO: 750691 - RNA, 20 nt, Human
guaaaacgugcugcacagcc

SEQ ID NO: 750692 - RNA, 23 nt, Human
guagggaugagcuggggccacag

SEQ ID NO: 750693 - RNA, 19 nt, Human
gucccaggccagcuccuca

SEQ ID NO: 750694 - RNA, 25 nt, Human
guucuggggccugggggugagggca

SEQ ID NO: 750695 - RNA, 27 nt, Human
uaaaacgugcugcacagccuuaacccc

SEQ ID NO: 750696 - RNA, 21 nt, Human
uaacucccccgggccugagca

SEQ ID NO: 750697 - RNA, 18 nt, Human
uaagauggucccaggcca

SEQ ID NO: 750698 - RNA, 28 nt, Human
uaagcaacccccaugcacccugccccca

SEQ ID NO: 750699 - RNA, 21 nt, Human
uagcugccagggcgggcaugc

SEQ ID NO: 750700 - RNA, 20 nt, Human
uaggacacaggccugggagc

SEQ ID NO: 750701 - RNA, 22 nt, Human
uauaggugaggucguggagaag

SEQ ID NO: 750702 - RNA, 19 nt, Human
ucacaucccucccacuucc

SEQ ID NO: 750703 - RNA, 21 nt, Human
ucaccuugccuacgcccaugu

SEQ ID NO: 750704 - RNA, 19 nt, Human
ucagagcuccuggaaauga

SEQ ID NO: 750705 - RNA, 21 nt, Human
ucaggcagccuccccugcgcc

SEQ ID NO: 750706 - RNA, 21 nt, Human
ucaggugggaguggaaggcag

SEQ ID NO: 750707 - RNA, 21 nt, Human
uccaaaaaaagaaaaucauuu

SEQ ID NO: 750708 - RNA, 22 nt, Human
uccaaaaaaagaaaaucauuua

SEQ ID NO: 750709 - RNA, 21 nt, Human
uccaaaauaauaaguucuggg

SEQ ID NO: 750710 - RNA, 18 nt, Human
uccaccguggucuggggg

SEQ ID NO: 750711 - RNA, 23 nt, Human
uccauggaagacacagaaccccc

SEQ ID NO: 750712 - RNA, 19 nt, Human
uccauuuccaggagaggac

SEQ ID NO: 750713 - RNA, 19 nt, Human
ucccagagcaaggggcugu

SEQ ID NO: 750714 - RNA, 21 nt, Human
ucccauccugguccuccauuu

SEQ ID NO: 750715 - RNA, 20 nt, Human
uccccaauguugucugccca

SEQ ID NO: 750716 - RNA, 24 nt, Human
uccccaauguugucugcccaguuu

SEQ ID NO: 750717 - RNA, 20 nt, Human
uccccagugcucuggaaaac

SEQ ID NO: 750718 - RNA, 23 nt, Human
uccccagugcucuggaaaacugg

SEQ ID NO: 750719 - RNA, 18 nt, Human
uccuggaaaugagguccu

SEQ ID NO: 750720 - RNA, 21 nt, Human
uccuugcagaagacagacccc

SEQ ID NO: 750721 - RNA, 18 nt, Human
uccuugggaaagggaagg

SEQ ID NO: 750722 - RNA, 25 nt, Human
ucggcacagacccagaagcccacag

SEQ ID NO: 750723 - RNA, 23 nt, Human
ucucagaagccaaaugaccugcu

SEQ ID NO: 750724 - RNA, 19 nt, Human
ucuccacagccacaccaag

SEQ ID NO: 750725 - RNA, 21 nt, Human
ucuccacagccacaccaagcu

SEQ ID NO: 750726 - RNA, 21 nt, Human
ucuggaaaacuggggcacagg

SEQ ID NO: 750727 - RNA, 25 nt, Human
ugaaaaugaaagugcaccccccucu

SEQ ID NO: 750728 - RNA, 19 nt, Human
ugaaagugcacccccccuc

SEQ ID NO: 750729 - RNA, 18 nt, Human
ugaaauagacgauaagca

SEQ ID NO: 750730 - RNA, 22 nt, Human
ugaaauagacgauaagcaaccc

SEQ ID NO: 750731 - RNA, 22 nt, Human
ugaagccugggugggggacugg

SEQ ID NO: 750732 - RNA, 21 nt, Human
ugagcuggggccacagccaga

SEQ ID NO: 750733 - RNA, 24 nt, Human
ugaggaaagaaggagauagggcag

SEQ ID NO: 750734 - RNA, 18 nt, Human
ugaggaaccagggacccc

SEQ ID NO: 750735 - RNA, 21 nt, Human
ugaggaaccagggaccccaug

SEQ ID NO: 750736 - RNA, 19 nt, Human
ugcagcaggagacgggugg

SEQ ID NO: 750737 - RNA, 24 nt, Human
ugccaagggcuggggaggggcuac

SEQ ID NO: 750738 - RNA, 24 nt, Human
ugccuacgcccauguuuccuccaa

SEQ ID NO: 750739 - RNA, 21 nt, Human
ugccuggcugagggagugaca

SEQ ID NO: 750740 - RNA, 19 nt, Human
ugcugcacagccuuaaccc

SEQ ID NO: 750741 - RNA, 21 nt, Human
ugcugcacagccuuaacccca

SEQ ID NO: 750742 - RNA, 18 nt, Human
uggaagaaagcugaaagg

SEQ ID NO: 750743 - RNA, 20 nt, Human
uggaaggcagggcauugggg

SEQ ID NO: 750744 - RNA, 23 nt, Human
uggaagggcgugaggaaagaagg

SEQ ID NO: 750745 - RNA, 21 nt, Human
uggagaaaggaggcauucaga

SEQ ID NO: 750746 - RNA, 24 nt, Human
uggcagugggcauuugagcccaug

SEQ ID NO: 750747 - RNA, 26 nt, Human
uggccagaaaaauggauauuucccag

SEQ ID NO: 750748 - RNA, 22 nt, Human
ugggaauagcacacauuggaga

SEQ ID NO: 750749 - RNA, 21 nt, Human
ugggaggagcugaagaagggg

SEQ ID NO: 750750 - RNA, 23 nt, Human
uggggaauagcugccagggcggg

SEQ ID NO: 750751 - RNA, 20 nt, Human
uggggaggcagggaggacag

SEQ ID NO: 750752 - RNA, 19 nt, Human
uggggcacagguugagaac

SEQ ID NO: 750753 - RNA, 22 nt, Human
uggggcacagguugagaacgug

SEQ ID NO: 750754 - RNA, 18 nt, Human
uggguaggacacaggccu

SEQ ID NO: 750755 - RNA, 20 nt, Human
ugggucacagccauggcccu

SEQ ID NO: 750756 - RNA, 21 nt, Human
uggguguccccacacccuccu

SEQ ID NO: 750757 - RNA, 19 nt, Human
uggucccaggccagcuccu

SEQ ID NO: 750758 - RNA, 19 nt, Human
uggugggggaggggacaau

SEQ ID NO: 750759 - RNA, 18 nt, Human
uguccagccauguccaac

SEQ ID NO: 750760 - RNA, 20 nt, Human
uguggugggggaggggacaa

SEQ ID NO: 750761 - RNA, 28 nt, Human
uguguacauaaucucuaauauuuauaua

SEQ ID NO: 750762 - RNA, 20 nt, Human
uuaaccccaaaggaaaagca

SEQ ID NO: 750763 - RNA, 22 nt, Human
uuccuccaaaaaccaaccucag

SEQ ID NO: 750764 - RNA, 19 nt, Human
uuucccagaccuggaggau

SEQ ID NO: 750765 - RNA, 28 nt, Human
aagcugccgggacagcguggucugggac

SEQ ID NO: 750766 - RNA, 21 nt, Human
aagugucuuucuuuuggcucu

SEQ ID NO: 750767 - RNA, 22 nt, Human
aauauacacacauaucggugca

SEQ ID NO: 750768 - RNA, 23 nt, Human
agaaaacugcugaccuucacuaa

SEQ ID NO: 750769 - RNA, 19 nt, Human
aggaauaaaagccacauga

SEQ ID NO: 750770 - RNA, 25 nt, Human
aggguggagaccggaggacgagaag

SEQ ID NO: 750771 - RNA, 19 nt, Human
caaguuagaaaacugcuga

SEQ ID NO: 750772 - RNA, 22 nt, Human
cacaaguuagaaaacugcugac

SEQ ID NO: 750773 - RNA, 24 nt, Human
cacugcacaccugcaguacaugug

SEQ ID NO: 750774 - RNA, 23 nt, Human
cacugcccaaccgccuuuccucc

SEQ ID NO: 750775 - RNA, 19 nt, Human
cagauacccuuccugggcu

SEQ ID NO: 750776 - RNA, 21 nt, Human
caucccagauacccuuccugg

SEQ ID NO: 750777 - RNA, 21 nt, Human
ccacccccagguaucugaccc

SEQ ID NO: 750778 - RNA, 22 nt, Human
ccacccccagguaucugacccc

SEQ ID NO: 750779 - RNA, 20 nt, Human
cccacccccagguaucugac

SEQ ID NO: 750780 - RNA, 21 nt, Human
cccacccccagguaucugacc

SEQ ID NO: 750781 - RNA, 18 nt, Human
ccccacccccagguaucu

SEQ ID NO: 750782 - RNA, 21 nt, Human
cccccacuguuugggucucug

SEQ ID NO: 750783 - RNA, 21 nt, Human
ccuccccacccccagguaucu

SEQ ID NO: 750784 - RNA, 18 nt, Human
ccuccuguucaacucucc

SEQ ID NO: 750785 - RNA, 23 nt, Human
cgcagcuacugagcaugcgcaca

SEQ ID NO: 750786 - RNA, 21 nt, Human
cucaggguggagaccggagga

SEQ ID NO: 750787 - RNA, 18 nt, Human
cuccccuggguugacucc

SEQ ID NO: 750788 - RNA, 22 nt, Human
cugggaggaacauauuucagau

SEQ ID NO: 750789 - RNA, 19 nt, Human
gcacagggccagcuccggc

SEQ ID NO: 750790 - RNA, 19 nt, Human
gcagggaaagcugccggga

SEQ ID NO: 750791 - RNA, 22 nt, Human
gcccaaccgccuuuccuccuca

SEQ ID NO: 750792 - RNA, 24 nt, Human
ggccaagugcaucgguggcuuccg

SEQ ID NO: 750793 - RNA, 26 nt, Human
ggucggugcucccucaggguggagac

SEQ ID NO: 750794 - RNA, 27 nt, Human
uaaaaaaugaaauucagaaccgcagca

SEQ ID NO: 750795 - RNA, 19 nt, Human
uaaaacguuugcacaucag

SEQ ID NO: 750796 - RNA, 21 nt, Human
uacacacauaucggugcagua

SEQ ID NO: 750797 - RNA, 18 nt, Human
uaggaugcauucgcagcu

SEQ ID NO: 750798 - RNA, 21 nt, Human
ucagagcaggcucuggauggg

SEQ ID NO: 750799 - RNA, 19 nt, Human
ucagauccagcuuggccuc

SEQ ID NO: 750800 - RNA, 20 nt, Human
uccaguuuacuugggauuuc

SEQ ID NO: 750801 - RNA, 24 nt, Human
uccccacccccagguaucugaccc

SEQ ID NO: 750802 - RNA, 21 nt, Human
uccugggaagcuagauagaaa

SEQ ID NO: 750803 - RNA, 20 nt, Human
ucuucuguggccccucccca

SEQ ID NO: 750804 - RNA, 27 nt, Human
ugacagauucucuuccuuguggcaucc

SEQ ID NO: 750805 - RNA, 19 nt, Human
ugacuccucucuucucuuc

SEQ ID NO: 750806 - RNA, 24 nt, Human
ugagguacugucaguugcagggaa

SEQ ID NO: 750807 - RNA, 23 nt, Human
ugccaaagucaaauucagagcag

SEQ ID NO: 750808 - RNA, 24 nt, Human
ugcucugcuugcuuucugagguag

SEQ ID NO: 750809 - RNA, 20 nt, Human
uggaugggcggaaugugaug

SEQ ID NO: 750810 - RNA, 24 nt, Human
uggauguccuuucacccaacuucu

SEQ ID NO: 750811 - RNA, 21 nt, Human
uggcuuccgggugugcuuccc

SEQ ID NO: 750812 - RNA, 25 nt, Human
uggguugacuccucucuucucuuca

SEQ ID NO: 750813 - RNA, 24 nt, Human
uguuauaaaaaaugaaauucagaa

SEQ ID NO: 750814 - RNA, 23 nt, Human
uguuugggggugguguggagaga

SEQ ID NO: 750815 - RNA, 22 nt, Human
uuacuugggauuuccuucgaug

SEQ ID NO: 750816 - RNA, 20 nt, Human
uucuguggccccuccccacc

SEQ ID NO: 750817 - RNA, 21 nt, Human
aacccagggagaccuguggau

SEQ ID NO: 750818 - RNA, 19 nt, Human
aagaugccucccuccccca

SEQ ID NO: 750819 - RNA, 20 nt, Human
aagcagaaaccaggagcaug

SEQ ID NO: 750820 - RNA, 26 nt, Human
aagcagaaaccaggagcaugggggga

SEQ ID NO: 750821 - RNA, 22 nt, Human
aagcgccucccccgggcgcacc

SEQ ID NO: 750822 - RNA, 20 nt, Human
aaggaaggcccagagcugcg

SEQ ID NO: 750823 - RNA, 22 nt, Human
acacaagggcuccagggcaccu

SEQ ID NO: 750824 - RNA, 22 nt, Human
acagagcaggcucugggacccc

SEQ ID NO: 750825 - RNA, 20 nt, Human
acaggaaguccuuggcugag

SEQ ID NO: 750826 - RNA, 21 nt, Human
acaggggccccugccuccccu

SEQ ID NO: 750827 - RNA, 26 nt, Human
acagucggcacgcccucggcugcacc

SEQ ID NO: 750828 - RNA, 21 nt, Human
accaggagggcaugggccugg

SEQ ID NO: 750829 - RNA, 18 nt, Human
accccagcuccuccccaa

SEQ ID NO: 750830 - RNA, 23 nt, Human
accccgcugccaggguguugaca

SEQ ID NO: 750831 - RNA, 22 nt, Human
accuguggaugggagagggcug

SEQ ID NO: 750832 - RNA, 23 nt, Human
acucccauggccccuucccagac

SEQ ID NO: 750833 - RNA, 22 nt, Human
agaacagaaaggcagagggaga

SEQ ID NO: 750834 - RNA, 20 nt, Human
agaagccucuuuaggcuaga

SEQ ID NO: 750835 - RNA, 20 nt, Human
agaagccucuuuaggcuaga

SEQ ID NO: 750836 - RNA, 22 nt, Human
agagaagccucuuuaggcuaga

SEQ ID NO: 750837 - RNA, 30 nt, Human
agaggggaggggugcagggagguggggccc

SEQ ID NO: 750838 - RNA, 22 nt, Human
agcacaggggccccugccuccc

SEQ ID NO: 750839 - RNA, 21 nt, Human
agcagaaaccaggagcauggg

SEQ ID NO: 750840 - RNA, 22 nt, Human
agccaggccggcagcaggggca

SEQ ID NO: 750841 - RNA, 18 nt, Human
agcggccacugcucccca

SEQ ID NO: 750842 - RNA, 21 nt, Human
aggcagagggagaggccuggg

SEQ ID NO: 750843 - RNA, 21 nt, Human
agggagaggccugggaggggu

SEQ ID NO: 750844 - RNA, 24 nt, Human
augacacccacccagcuaacagag

SEQ ID NO: 750845 - RNA, 19 nt, Human
auuuggggaggggugcagg

SEQ ID NO: 750846 - RNA, 21 nt, Human
caaccguggacagggccgucu

SEQ ID NO: 750847 - RNA, 22 nt, Human
caagaaacaagaugccucccuc

SEQ ID NO: 750848 - RNA, 26 nt, Human
caagaaacaagaugccucccuccccc

SEQ ID NO: 750849 - RNA, 20 nt, Human
caagggcagggaccccccac

SEQ ID NO: 750850 - RNA, 26 nt, Human
cacagcacccugggcccguucucagg

SEQ ID NO: 750851 - RNA, 27 nt, Human
cacagucggcacgcccucggcugcacc

SEQ ID NO: 750852 - RNA, 26 nt, Human
cacccagagcugagaccugggagagg

SEQ ID NO: 750853 - RNA, 18 nt, Human
caccccaggcccaagcac

SEQ ID NO: 750854 - RNA, 23 nt, Human
cacccccgcccaacuuccccacu

SEQ ID NO: 750855 - RNA, 19 nt, Human
caccggggcuguggcagcg

SEQ ID NO: 750856 - RNA, 20 nt, Human
caccggggcuguggcagcgg

SEQ ID NO: 750857 - RNA, 19 nt, Human
cacgcccucggcugcaccc

SEQ ID NO: 750858 - RNA, 18 nt, Human
cagagcugagaccuggga

SEQ ID NO: 750859 - RNA, 18 nt, Human
cagcauucaaagugagug

SEQ ID NO: 750860 - RNA, 24 nt, Human
cagcauucaaagugaguguuuggg

SEQ ID NO: 750861 - RNA, 21 nt, Human
cagcccaaguccccaccuccu

SEQ ID NO: 750862 - RNA, 24 nt, Human
cagcccaaguccccaccuccuaag

SEQ ID NO: 750863 - RNA, 21 nt, Human
cagcuccuccccaaggaaggc

SEQ ID NO: 750864 - RNA, 23 nt, Human
caggaaaaggaagcgccuccccc

SEQ ID NO: 750865 - RNA, 25 nt, Human
caggaagagccagagcugaguggug

SEQ ID NO: 750866 - RNA, 23 nt, Human
caggagcaaccguggacagggcc

SEQ ID NO: 750867 - RNA, 22 nt, Human
caggagcauggggggagccucg

SEQ ID NO: 750868 - RNA, 20 nt, Human
cagugcacagagcaggcucu

SEQ ID NO: 750869 - RNA, 21 nt, Human
ccaaauaccucgccgccaagc

SEQ ID NO: 750870 - RNA, 24 nt, Human
ccaaauaccucgccgccaagcucc

SEQ ID NO: 750871 - RNA, 23 nt, Human
ccagagugggcagaacagggaaa

SEQ ID NO: 750872 - RNA, 18 nt, Human
ccagcccaaguccccacc

SEQ ID NO: 750873 - RNA, 19 nt, Human
ccaggccggcagcaggggc

SEQ ID NO: 750874 - RNA, 19 nt, Human
ccaggggcaccaggagggc

SEQ ID NO: 750875 - RNA, 20 nt, Human
ccaguggguggggcuggugc

SEQ ID NO: 750876 - RNA, 26 nt, Human
cccaaauaccucgccgccaagcuccu

SEQ ID NO: 750877 - RNA, 19 nt, Human
cccaagcacuggacaccuu

SEQ ID NO: 750878 - RNA, 18 nt, Human
cccaccccaggcccaagc

SEQ ID NO: 750879 - RNA, 23 nt, Human
cccagacagagccccgucugaga

SEQ ID NO: 750880 - RNA, 22 nt, Human
cccagagcugagaccugggaga

SEQ ID NO: 750881 - RNA, 18 nt, Human
cccagcccaaguccccac

SEQ ID NO: 750882 - RNA, 24 nt, Human
cccauggccccuucccagacuccu

SEQ ID NO: 750883 - RNA, 23 nt, Human
ccccaaauaccucgccgccaagc

SEQ ID NO: 750884 - RNA, 19 nt, Human
ccccaccccaggcccaagc

SEQ ID NO: 750885 - RNA, 18 nt, Human
ccccaccucagcccuggg

SEQ ID NO: 750886 - RNA, 30 nt, Human
ccccaccucagcccuggggacccccuggcc

SEQ ID NO: 750887 - RNA, 22 nt, Human
ccccaggccuuacuuccccaaa

SEQ ID NO: 750888 - RNA, 21 nt, Human
ccccauccucucugccgccuu

SEQ ID NO: 750889 - RNA, 21 nt, Human
ccccccaccccaggcccaagc

SEQ ID NO: 750890 - RNA, 28 nt, Human
ccccccaccccaggcccaagcacuggac

SEQ ID NO: 750891 - RNA, 22 nt, Human
cccccuuccccauuuccacucc

SEQ ID NO: 750892 - RNA, 24 nt, Human
ccccucuccaggcccccuucccca

SEQ ID NO: 750893 - RNA, 20 nt, Human
ccccugccuccccucuccag

SEQ ID NO: 750894 - RNA, 24 nt, Human
ccccugccuccccucuccaggccc

SEQ ID NO: 750895 - RNA, 20 nt, Human
ccccugcucuauagagggga

SEQ ID NO: 750896 - RNA, 21 nt, Human
ccccugcucuauagaggggag

SEQ ID NO: 750897 - RNA, 18 nt, Human
cccgaaagcaggaguagg

SEQ ID NO: 750898 - RNA, 18 nt, Human
cccgcccaacuuccccac

SEQ ID NO: 750899 - RNA, 22 nt, Human
cccugauuaagaacagaaaggc

SEQ ID NO: 750900 - RNA, 19 nt, Human
cccugguaccccucucccu

SEQ ID NO: 750901 - RNA, 22 nt, Human
cccuuggccccugaccugggac

SEQ ID NO: 750902 - RNA, 18 nt, Human
ccggcagcaggggcaggc

SEQ ID NO: 750903 - RNA, 18 nt, Human
ccguccccaucccagccc

SEQ ID NO: 750904 - RNA, 23 nt, Human
ccguccuucugaggguacaacuc

SEQ ID NO: 750905 - RNA, 19 nt, Human
ccucagccccauccucucu

SEQ ID NO: 750906 - RNA, 19 nt, Human
ccucagcccuggggacccc

SEQ ID NO: 750907 - RNA, 21 nt, Human
ccuccaggauccucccucucc

SEQ ID NO: 750908 - RNA, 22 nt, Human
ccucccaggaagagccagagcu

SEQ ID NO: 750909 - RNA, 19 nt, Human
ccucccucuccucuccucu

SEQ ID NO: 750910 - RNA, 20 nt, Human
ccucccucuccucuccucuc

SEQ ID NO: 750911 - RNA, 19 nt, Human
ccucgccgccaagcuccuc

SEQ ID NO: 750912 - RNA, 19 nt, Human
ccucucugccgccuugggg

SEQ ID NO: 750913 - RNA, 24 nt, Human
ccugcagggaaccacaagaaacaa

SEQ ID NO: 750914 - RNA, 23 nt, Human
ccuggaguccucuaacaccuucc

SEQ ID NO: 750915 - RNA, 20 nt, Human
ccugggaggcaggggcugau

SEQ ID NO: 750916 - RNA, 24 nt, Human
ccuuccccauuuccacucccuggg

SEQ ID NO: 750917 - RNA, 23 nt, Human
cggcuaagaugcaacccagaaac

SEQ ID NO: 750918 - RNA, 22 nt, Human
cgggccgcggcccacacggggc

SEQ ID NO: 750919 - RNA, 27 nt, Human
cucagccugggccucuggcaccccagc

SEQ ID NO: 750920 - RNA, 25 nt, Human
cuccacagucggcacgcccucggcu

SEQ ID NO: 750921 - RNA, 24 nt, Human
cuccaccccaggccuuacuucccc

SEQ ID NO: 750922 - RNA, 19 nt, Human
cuccaggauccucccucuc

SEQ ID NO: 750923 - RNA, 21 nt, Human
cucccauggccccuucccaga

SEQ ID NO: 750924 - RNA, 22 nt, Human
cuccccacccagagcugagacc

SEQ ID NO: 750925 - RNA, 22 nt, Human
cuccccaccucagcccugggga

SEQ ID NO: 750926 - RNA, 21 nt, Human
cuccccucccuauuccccaga

SEQ ID NO: 750927 - RNA, 19 nt, Human
cucccuggcucugcacucc

SEQ ID NO: 750928 - RNA, 21 nt, Human
cucuaacaccuuccccccacc

SEQ ID NO: 750929 - RNA, 22 nt, Human
cucuaacaccuuccccccaccc

SEQ ID NO: 750930 - RNA, 20 nt, Human
cucuggcaccccagcuccuc

SEQ ID NO: 750931 - RNA, 22 nt, Human
cugccagaacccagggagaccu

SEQ ID NO: 750932 - RNA, 18 nt, Human
cugccuccccucuccagg

SEQ ID NO: 750933 - RNA, 19 nt, Human
cuggcaccccagcuccucc

SEQ ID NO: 750934 - RNA, 19 nt, Human
cugggagaggcgcgcagug

SEQ ID NO: 750935 - RNA, 19 nt, Human
cugggggucgcaagggcag

SEQ ID NO: 750936 - RNA, 20 nt, Human
cuugacgaucugugccucag

SEQ ID NO: 750937 - RNA, 19 nt, Human
gaaacaagaugccucccuc

SEQ ID NO: 750938 - RNA, 27 nt, Human
gaaaggaggacaggacuggccugcagg

SEQ ID NO: 750939 - RNA, 26 nt, Human
gaaaggcagagggagaggccugggag

SEQ ID NO: 750940 - RNA, 24 nt, Human
gaaggcuccccaccucagcccugg

SEQ ID NO: 750941 - RNA, 20 nt, Human
gagcaggcucugggacccca

SEQ ID NO: 750942 - RNA, 20 nt, Human
gagcauggggggagccucgg

SEQ ID NO: 750943 - RNA, 21 nt, Human
gagccucggcuaaccucccag

SEQ ID NO: 750944 - RNA, 23 nt, Human
gagggggcaggaaugacucaggc

SEQ ID NO: 750945 - RNA, 19 nt, Human
gaguccucuaacaccuucc

SEQ ID NO: 750946 - RNA, 21 nt, Human
gcaggagcaaccguggacagg

SEQ ID NO: 750947 - RNA, 21 nt, Human
gccagaacccagggagaccug

SEQ ID NO: 750948 - RNA, 21 nt, Human
gccuccuaggagagcaggagc

SEQ ID NO: 750949 - RNA, 18 nt, Human
gcgcaaacuggggaaggg

SEQ ID NO: 750950 - RNA, 18 nt, Human
gcucccgaaagcaggagu

SEQ ID NO: 750951 - RNA, 20 nt, Human
ggacaggacuggccugcagg

SEQ ID NO: 750952 - RNA, 18 nt, Human
ggagagggcugccuuccc

SEQ ID NO: 750953 - RNA, 28 nt, Human
ggaguccucuaacaccuuccccccaccc

SEQ ID NO: 750954 - RNA, 21 nt, Human
ggauggaggaacuggggucag

SEQ ID NO: 750955 - RNA, 20 nt, Human
ggcagaacagggaaaggagg

SEQ ID NO: 750956 - RNA, 20 nt, Human
ggccacugcuccccacccag

SEQ ID NO: 750957 - RNA, 21 nt, Human
ggccugggaggcuggcagaca

SEQ ID NO: 750958 - RNA, 19 nt, Human
gggaacccuacgagggggc

SEQ ID NO: 750959 - RNA, 21 nt, Human
gggaagauggcacacacguug

SEQ ID NO: 750960 - RNA, 19 nt, Human
gggcaccaggagggcaugg

SEQ ID NO: 750961 - RNA, 21 nt, Human
gggcaggaaugacucaggcuc

SEQ ID NO: 750962 - RNA, 22 nt, Human
gggcaugggccugggaggcugg

SEQ ID NO: 750963 - RNA, 24 nt, Human
gggccgcggcccacacggggccuc

SEQ ID NO: 750964 - RNA, 20 nt, Human
gggcuggaaccaggugaaga

SEQ ID NO: 750965 - RNA, 18 nt, Human
ggggccuccuaggagagc

SEQ ID NO: 750966 - RNA, 23 nt, Human
ggugauaggagaggacggagaaa

SEQ ID NO: 750967 - RNA, 21 nt, Human
guggaugggagagggcugccu

SEQ ID NO: 750968 - RNA, 23 nt, Human
guucucagguucuggccugggag

SEQ ID NO: 750969 - RNA, 20 nt, Human
uaacaccuuccccccacccc

SEQ ID NO: 750970 - RNA, 18 nt, Human
uaaccucccaggaagagc

SEQ ID NO: 750971 - RNA, 27 nt, Human
uaagaugcaacccagaaacuuccugcc

SEQ ID NO: 750972 - RNA, 19 nt, Human
uaagccaggccggcagcag

SEQ ID NO: 750973 - RNA, 26 nt, Human
uacaacucugagguagauuucacaga

SEQ ID NO: 750974 - RNA, 20 nt, Human
uacccguccuucugagggua

SEQ ID NO: 750975 - RNA, 24 nt, Human
uaccucgccgccaagcuccucagc

SEQ ID NO: 750976 - RNA, 19 nt, Human
uagaaggcuccccaccuca

SEQ ID NO: 750977 - RNA, 19 nt, Human
uagcucuuuugaaguugau

SEQ ID NO: 750978 - RNA, 25 nt, Human
uaggagagcaggagcaaccguggac

SEQ ID NO: 750979 - RNA, 18 nt, Human
uaucugggggucgcaagg

SEQ ID NO: 750980 - RNA, 21 nt, Human
ucagcagggacucccauggcc

SEQ ID NO: 750981 - RNA, 20 nt, Human
ucagguucuggccugggagg

SEQ ID NO: 750982 - RNA, 22 nt, Human
uccaacccugauuaagaacaga

SEQ ID NO: 750983 - RNA, 21 nt, Human
uccacagcacccugggcccgu

SEQ ID NO: 750984 - RNA, 22 nt, Human
uccaggcccccuuccccauuuc

SEQ ID NO: 750985 - RNA, 24 nt, Human
ucccagaguucaggaaaaggaagc

SEQ ID NO: 750986 - RNA, 20 nt, Human
ucccagcccaaguccccacc

SEQ ID NO: 750987 - RNA, 21 nt, Human
ucccagcccaaguccccaccu

SEQ ID NO: 750988 - RNA, 20 nt, Human
ucccauggccccuucccaga

SEQ ID NO: 750989 - RNA, 22 nt, Human
uccccaaauaccucgccgccaa

SEQ ID NO: 750990 - RNA, 21 nt, Human
uccccaccucagcccugggga

SEQ ID NO: 750991 - RNA, 22 nt, Human
uccccaccucagcccuggggac

SEQ ID NO: 750992 - RNA, 18 nt, Human
uccccacuuccucccgca

SEQ ID NO: 750993 - RNA, 25 nt, Human
uccccacuuccucccgcaggauccc

SEQ ID NO: 750994 - RNA, 20 nt, Human
uccccagagugggcagaaca

SEQ ID NO: 750995 - RNA, 21 nt, Human
uccccauuuccacucccuggg

SEQ ID NO: 750996 - RNA, 20 nt, Human
uccccccaccccaggcccaa

SEQ ID NO: 750997 - RNA, 18 nt, Human
ucccccgggcgcaccggg

SEQ ID NO: 750998 - RNA, 23 nt, Human
ucccugguaccccucucccuggc

SEQ ID NO: 750999 - RNA, 18 nt, Human
uccucagccugggccucu

SEQ ID NO: 751000 - RNA, 20 nt, Human
uccuccaggauccucccucu

SEQ ID NO: 751001 - RNA, 21 nt, Human
uccucuaacaccuucccccca

SEQ ID NO: 751002 - RNA, 23 nt, Human
uccuuggcugaguguuacggggc

SEQ ID NO: 751003 - RNA, 22 nt, Human
ucuaacaccuuccccccacccc

SEQ ID NO: 751004 - RNA, 19 nt, Human
ucuccaggcccccuucccc

SEQ ID NO: 751005 - RNA, 20 nt, Human
ucugggggucgcaagggcag

SEQ ID NO: 751006 - RNA, 21 nt, Human
ucugugccucagugccagggg

SEQ ID NO: 751007 - RNA, 18 nt, Human
ugacucgguagcaagugg

SEQ ID NO: 751008 - RNA, 19 nt, Human
ugaggggguaccugccuug

SEQ ID NO: 751009 - RNA, 21 nt, Human
ugcacccccgcccaacuuccc

SEQ ID NO: 751010 - RNA, 20 nt, Human
ugcagggagguggggccugg

SEQ ID NO: 751011 - RNA, 21 nt, Human
ugcagggagguggggccugga

SEQ ID NO: 751012 - RNA, 20 nt, Human
ugccaugagcccuaggcugg

SEQ ID NO: 751013 - RNA, 21 nt, Human
ugccaugagcccuaggcuggc

SEQ ID NO: 751014 - RNA, 22 nt, Human
ugccuccccucuccaggccccc

SEQ ID NO: 751015 - RNA, 21 nt, Human
ugcgcgagggucggccccucc

SEQ ID NO: 751016 - RNA, 19 nt, Human
uggaaggggacgcgaacgg

SEQ ID NO: 751017 - RNA, 22 nt, Human
uggacauuuggggaggggugca

SEQ ID NO: 751018 - RNA, 20 nt, Human
uggaggaacuggggucagug

SEQ ID NO: 751019 - RNA, 25 nt, Human
uggcacacacguugacucgguagca

SEQ ID NO: 751020 - RNA, 22 nt, Human
uggcaccccagcuccuccccaa

SEQ ID NO: 751021 - RNA, 20 nt, Human
uggcagacaguccccuggcc

SEQ ID NO: 751022 - RNA, 21 nt, Human
uggcagacaguccccuggccg

SEQ ID NO: 751023 - RNA, 22 nt, Human
uggccugggaggcaggggcuga

SEQ ID NO: 751024 - RNA, 19 nt, Human
ugggaccccaaaggcagcc

SEQ ID NO: 751025 - RNA, 20 nt, Human
ugggagggguaugccguccc

SEQ ID NO: 751026 - RNA, 19 nt, Human
ugggccucuggcaccccag

SEQ ID NO: 751027 - RNA, 22 nt, Human
ugggccucuggcaccccagcuc

SEQ ID NO: 751028 - RNA, 18 nt, Human
ugggccugggaggcuggc

SEQ ID NO: 751029 - RNA, 20 nt, Human
ugggccugggaggcuggcag

SEQ ID NO: 751030 - RNA, 20 nt, Human
uggggccuggaagaguugga

SEQ ID NO: 751031 - RNA, 20 nt, Human
ugggguggcaggcuuucgcc

SEQ ID NO: 751032 - RNA, 21 nt, Human
ugggugcuccccagacagagc

SEQ ID NO: 751033 - RNA, 18 nt, Human
uggguggagugugggaag

SEQ ID NO: 751034 - RNA, 23 nt, Human
uggugucaggggcuccagugggg

SEQ ID NO: 751035 - RNA, 18 nt, Human
uguggaugggagagggcu

SEQ ID NO: 751036 - RNA, 23 nt, Human
uuugggggugauaggagaggacg

SEQ ID NO: 751037 - RNA, 20 nt, Human
uuugucccugguaccccucu

SEQ ID NO: 751038 - RNA, 19 nt, Human
aacaaaacgaaauuggggu

SEQ ID NO: 751039 - RNA, 22 nt, Human
aacaaaugaauccuuccccagg

SEQ ID NO: 751040 - RNA, 24 nt, Human
aaggcauccuugcagccccaacca

SEQ ID NO: 751041 - RNA, 23 nt, Human
aauauauaauagaaaauuaccca

SEQ ID NO: 751042 - RNA, 18 nt, Human
accuguaaaggcauccuu

SEQ ID NO: 751043 - RNA, 22 nt, Human
aggcauccuugcagccccaacc

SEQ ID NO: 751044 - RNA, 19 nt, Human
auacaaaaucagcuacgua

SEQ ID NO: 751045 - RNA, 24 nt, Human
auucaaauauuuuaaaauauaaag

SEQ ID NO: 751046 - RNA, 24 nt, Human
caaaaucaauguuuauucugccaa

SEQ ID NO: 751047 - RNA, 22 nt, Human
caacaaaagaagcauuuugaca

SEQ ID NO: 751048 - RNA, 22 nt, Human
caacaaaugaauccuuccccag

SEQ ID NO: 751049 - RNA, 27 nt, Human
caccuucaaccuugggggaaaaugcuu

SEQ ID NO: 751050 - RNA, 18 nt, Human
cacuuacagaugcuccua

SEQ ID NO: 751051 - RNA, 25 nt, Human
cauuuggaaagagaacaaaccugaa

SEQ ID NO: 751052 - RNA, 22 nt, Human
cauuugguugaaaugauuacuc

SEQ ID NO: 751053 - RNA, 18 nt, Human
cggccugacucgcaguag

SEQ ID NO: 751054 - RNA, 27 nt, Human
cucgcaacaaaugaauccuuccccagg

SEQ ID NO: 751055 - RNA, 24 nt, Human
cuguaaaggcauccuugcagcccc

SEQ ID NO: 751056 - RNA, 25 nt, Human
gcaacaaaagaagcauuuugacaaa

SEQ ID NO: 751057 - RNA, 21 nt, Human
ggagaggggaguuguauagug

SEQ ID NO: 751058 - RNA, 23 nt, Human
uaaugccaaguuggcaauuuaau

SEQ ID NO: 751059 - RNA, 19 nt, Human
uaauuuuucuuuuuuguaa

SEQ ID NO: 751060 - RNA, 25 nt, Human
uacaaaacaauaaaaacuguucuuu

SEQ ID NO: 751061 - RNA, 24 nt, Human
uagaagcugaauaaacaaaacgaa

SEQ ID NO: 751062 - RNA, 18 nt, Human
uagaauggaguagaggua

SEQ ID NO: 751063 - RNA, 19 nt, Human
uagcguucuugugcaccug

SEQ ID NO: 751064 - RNA, 24 nt, Human
uccaugaagaacccaauuuacaaa

SEQ ID NO: 751065 - RNA, 20 nt, Human
ugaaauucauuugguugaaa

SEQ ID NO: 751066 - RNA, 22 nt, Human
ugaaauucauuugguugaaaug

SEQ ID NO: 751067 - RNA, 18 nt, Human
ugccaaaaauaagagcaa

SEQ ID NO: 751068 - RNA, 24 nt, Human
ugcuucacugucucuucuauuuau

SEQ ID NO: 751069 - RNA, 20 nt, Human
uggaaaaaaacuuccaugaa

SEQ ID NO: 751070 - RNA, 22 nt, Human
uggaaagagaacaaaccugaaa

SEQ ID NO: 751071 - RNA, 24 nt, Human
uggguguucaauauuuuagaagcu

SEQ ID NO: 751072 - RNA, 19 nt, Human
uuaaucuuuacauacaaaa

SEQ ID NO: 751073 - RNA, 18 nt, Human
uugcauguguucucucuc

SEQ ID NO: 751074 - RNA, 24 nt, Human
uuuaaauaacuuucuuaacccugc

SEQ ID NO: 751075 - RNA, 19 nt, Human
uuucuaguuuuggaaaaaa

SEQ ID NO: 751076 - RNA, 22 nt, Human
uuugugaccacucaccuucaac

SEQ ID NO: 751077 - RNA, 24 nt, Human
uuuuucuuuuuuguaaauuucugu

SEQ ID NO: 751078 - RNA, 18 nt, Human
aaaaaaaaaaaaucccua

SEQ ID NO: 751079 - RNA, 24 nt, Human
aaaaaaccuuaaaagugcggccaa

SEQ ID NO: 751080 - RNA, 22 nt, Human
aaaaaagcacccuuguggcccu

SEQ ID NO: 751081 - RNA, 23 nt, Human
aaaacccaccuuugacacuaucc

SEQ ID NO: 751082 - RNA, 23 nt, Human
aaaagaacccaagaacaaccaca

SEQ ID NO: 751083 - RNA, 20 nt, Human
aaacaacaugcuggcucuga

SEQ ID NO: 751084 - RNA, 22 nt, Human
aaacagaugcaugguuacaaac

SEQ ID NO: 751085 - RNA, 20 nt, Human
aaacagauucacucaacucu

SEQ ID NO: 751086 - RNA, 20 nt, Human
aaagaaugaaaacagaugca

SEQ ID NO: 751087 - RNA, 21 nt, Human
aaagacaaccccagcccaaga

SEQ ID NO: 751088 - RNA, 26 nt, Human
aaagauuaaccaagcucucuagauaa

SEQ ID NO: 751089 - RNA, 23 nt, Human
aaagcacccuuguggcccugcuc

SEQ ID NO: 751090 - RNA, 19 nt, Human
aaauaggaacaguuucaau

SEQ ID NO: 751091 - RNA, 20 nt, Human
aacauuucacacccaaaacu

SEQ ID NO: 751092 - RNA, 25 nt, Human
aaccugacauuuccuucacugcucu

SEQ ID NO: 751093 - RNA, 19 nt, Human
aacugcaucucaaaacaaa

SEQ ID NO: 751094 - RNA, 18 nt, Human
aagaacccaagaacaacc

SEQ ID NO: 751095 - RNA, 23 nt, Human
aagacaaaagaacccaagaacaa

SEQ ID NO: 751096 - RNA, 21 nt, Human
aagacccucccaacccugucc

SEQ ID NO: 751097 - RNA, 24 nt, Human
aaggaaaaauaaaagacccuccca

SEQ ID NO: 751098 - RNA, 21 nt, Human
acaagacaaaagaacccaaga

SEQ ID NO: 751099 - RNA, 22 nt, Human
acaagacaaaagaacccaagaa

SEQ ID NO: 751100 - RNA, 25 nt, Human
acaaugaaagaaacucaaaaguaac

SEQ ID NO: 751101 - RNA, 19 nt, Human
acaguaaaguuagucuggg

SEQ ID NO: 751102 - RNA, 21 nt, Human
acauauaaaaaaaccuuaaaa

SEQ ID NO: 751103 - RNA, 23 nt, Human
acccuuguggcccugcucugggu

SEQ ID NO: 751104 - RNA, 27 nt, Human
accuuaaaagugcggccaagggauuuu

SEQ ID NO: 751105 - RNA, 20 nt, Human
acgaaaauccaccccgaauc

SEQ ID NO: 751106 - RNA, 25 nt, Human
acuagaacaaucuucuucacuacca

SEQ ID NO: 751107 - RNA, 23 nt, Human
acucccaaagccuuccccgcauc

SEQ ID NO: 751108 - RNA, 18 nt, Human
acuugcccuuccucuaaa

SEQ ID NO: 751109 - RNA, 22 nt, Human
agaagcuggaaaacccaccuuu

SEQ ID NO: 751110 - RNA, 26 nt, Human
agacaaaagaacccaagaacaaccac

SEQ ID NO: 751111 - RNA, 18 nt, Human
agacugaaaguuugaaau

SEQ ID NO: 751112 - RNA, 21 nt, Human
agcaaaagguacagcaaagaa

SEQ ID NO: 751113 - RNA, 20 nt, Human
agcagcagcagcagccagag

SEQ ID NO: 751114 - RNA, 18 nt, Human
agcuuagaaaaacuggug

SEQ ID NO: 751115 - RNA, 21 nt, Human
aggaagcacugagaguuugag

SEQ ID NO: 751116 - RNA, 21 nt, Human
agggacaagaaagccauuacu

SEQ ID NO: 751117 - RNA, 20 nt, Human
aguuugagaaaggaagauag

SEQ ID NO: 751118 - RNA, 26 nt, Human
auaaaagacccucccaacccugucca

SEQ ID NO: 751119 - RNA, 20 nt, Human
aucuuauaugcacuugguug

SEQ ID NO: 751120 - RNA, 23 nt, Human
augggcagcaaaagguacagcaa

SEQ ID NO: 751121 - RNA, 26 nt, Human
caaaaagcagcagcagcagccagagg

SEQ ID NO: 751122 - RNA, 23 nt, Human
caaaaaguucauaguguccuuug

SEQ ID NO: 751123 - RNA, 22 nt, Human
caaaacuuggguccugcuaacc

SEQ ID NO: 751124 - RNA, 20 nt, Human
caaaagaacccaagaacaac

SEQ ID NO: 751125 - RNA, 20 nt, Human
caaaaggaggcuggcaccau

SEQ ID NO: 751126 - RNA, 24 nt, Human
caagacaaaagaacccaagaacaa

SEQ ID NO: 751127 - RNA, 31 nt, Human
caagacaaaagaacccaagaacaaccacaaa

SEQ ID NO: 751128 - RNA, 21 nt, Human
cacaaaacuuaagucuucagg

SEQ ID NO: 751129 - RNA, 21 nt, Human
cacaacccuuuccucuucaaa

SEQ ID NO: 751130 - RNA, 20 nt, Human
cacaauuuagauugcccuuc

SEQ ID NO: 751131 - RNA, 24 nt, Human
cacccagaacaacuguuaagccau

SEQ ID NO: 751132 - RNA, 18 nt, Human
caccccgaauccaaaaau

SEQ ID NO: 751133 - RNA, 19 nt, Human
cagcaaaagguacagcaaa

SEQ ID NO: 751134 - RNA, 19 nt, Human
cagcaaagaaugaaaacag

SEQ ID NO: 751135 - RNA, 22 nt, Human
cagcagcagcagccagagggag

SEQ ID NO: 751136 - RNA, 21 nt, Human
cagcagcagccagagggaguu

SEQ ID NO: 751137 - RNA, 18 nt, Human
cagcaugggacuauuugg

SEQ ID NO: 751138 - RNA, 27 nt, Human
cagcuugccaaagcaaaaggccaaugg

SEQ ID NO: 751139 - RNA, 21 nt, Human
caucacuucuuuauuucaaag

SEQ ID NO: 751140 - RNA, 21 nt, Human
ccacaaugaaagaaacucaaa

SEQ ID NO: 751141 - RNA, 28 nt, Human
cccaaagccuuccccgcaucauccacuu

SEQ ID NO: 751142 - RNA, 18 nt, Human
cccacaaaacuuaagucu

SEQ ID NO: 751143 - RNA, 25 nt, Human
cccacaaaacuuaagucuucaggca

SEQ ID NO: 751144 - RNA, 21 nt, Human
cccacugagccugaaguggca

SEQ ID NO: 751145 - RNA, 18 nt, Human
cccuguccaaaaaaaccc

SEQ ID NO: 751146 - RNA, 28 nt, Human
ccuauccuacuacacugguuuuuggaaa

SEQ ID NO: 751147 - RNA, 27 nt, Human
ccucccaacccuguccaaaaaaaccca

SEQ ID NO: 751148 - RNA, 25 nt, Human
cgaauccaaaaauucagacauggaa

SEQ ID NO: 751149 - RNA, 18 nt, Human
cgggacaccaaaaagcag

SEQ ID NO: 751150 - RNA, 23 nt, Human
cgucccagggcaaauaggaacag

SEQ ID NO: 751151 - RNA, 19 nt, Human
cuaaagacaaccccagccc

SEQ ID NO: 751152 - RNA, 22 nt, Human
cuaaauguaaacagauucacuc

SEQ ID NO: 751153 - RNA, 20 nt, Human
cuaacucucugcugcaugcc

SEQ ID NO: 751154 - RNA, 24 nt, Human
cucuaaagaguccuucagguuggg

SEQ ID NO: 751155 - RNA, 19 nt, Human
cuucaacuaagccaaaccc

SEQ ID NO: 751156 - RNA, 18 nt, Human
cuuugagacuacagcgcc

SEQ ID NO: 751157 - RNA, 18 nt, Human
gaaaucacucccaaagcc

SEQ ID NO: 751158 - RNA, 22 nt, Human
gacaaggcaggguguuagguuu

SEQ ID NO: 751159 - RNA, 27 nt, Human
gacugugcagugauccuucgguucccc

SEQ ID NO: 751160 - RNA, 22 nt, Human
gagaaacugucaguucaaaaag

SEQ ID NO: 751161 - RNA, 18 nt, Human
gauguugucugcacugcc

SEQ ID NO: 751162 - RNA, 22 nt, Human
gcaaaaaaaaaaaaaaaaaucc

SEQ ID NO: 751163 - RNA, 22 nt, Human
gcaacauuucacacccaaaacu

SEQ ID NO: 751164 - RNA, 19 nt, Human
gcacugccaaauuuguucc

SEQ ID NO: 751165 - RNA, 18 nt, Human
gcggcagagggcagcauu

SEQ ID NO: 751166 - RNA, 19 nt, Human
ggaugaugcuuucacuuuu

SEQ ID NO: 751167 - RNA, 18 nt, Human
ggcaaaaaaaaaaaaaaa

SEQ ID NO: 751168 - RNA, 24 nt, Human
gguggauugcugcuagggcaucuu

SEQ ID NO: 751169 - RNA, 24 nt, Human
ggugugcuccagauuguugguuca

SEQ ID NO: 751170 - RNA, 23 nt, Human
gugaggcaaucucucugggcuuu

SEQ ID NO: 751171 - RNA, 23 nt, Human
guggcacuagaacaaucuucuuc

SEQ ID NO: 751172 - RNA, 19 nt, Human
uaaaaaauacuauugcaau

SEQ ID NO: 751173 - RNA, 23 nt, Human
uaaaaaauccuauuagaaaccau

SEQ ID NO: 751174 - RNA, 22 nt, Human
uaaaaauacuguaguaggacug

SEQ ID NO: 751175 - RNA, 23 nt, Human
uaaaaauacuguaguaggacugu

SEQ ID NO: 751176 - RNA, 18 nt, Human
uaaaagacccucccaacc

SEQ ID NO: 751177 - RNA, 19 nt, Human
uaaaagacccucccaaccc

SEQ ID NO: 751178 - RNA, 19 nt, Human
uaaagaaaaaaagcacccu

SEQ ID NO: 751179 - RNA, 20 nt, Human
uaaagaaaaaaagcacccuu

SEQ ID NO: 751180 - RNA, 21 nt, Human
uaaccaagcucucuagauaaa

SEQ ID NO: 751181 - RNA, 22 nt, Human
uaacuauacacauauaaaaaaa

SEQ ID NO: 751182 - RNA, 24 nt, Human
uaauaacaauaauaaaaaauccua

SEQ ID NO: 751183 - RNA, 18 nt, Human
uaccugaguuaaaauauc

SEQ ID NO: 751184 - RNA, 23 nt, Human
uauaugcacuugguugcacagaa

SEQ ID NO: 751185 - RNA, 23 nt, Human
uaucaaagugacuuccagugccc

SEQ ID NO: 751186 - RNA, 22 nt, Human
uauuuggcuggaggcagggggc

SEQ ID NO: 751187 - RNA, 23 nt, Human
ucaaagugacuuccagugcccac

SEQ ID NO: 751188 - RNA, 23 nt, Human
ucaagacaagagggagcagcaca

SEQ ID NO: 751189 - RNA, 23 nt, Human
uccaagauuuucgcccaaaaaac

SEQ ID NO: 751190 - RNA, 19 nt, Human
uccacccagaacaacuguu

SEQ ID NO: 751191 - RNA, 18 nt, Human
uccaccccgaauccaaaa

SEQ ID NO: 751192 - RNA, 22 nt, Human
uccacggacaacgaaaauccac

SEQ ID NO: 751193 - RNA, 23 nt, Human
uccacggacaacgaaaauccacc

SEQ ID NO: 751194 - RNA, 28 nt, Human
uccacggacaacgaaaauccaccccgaa

SEQ ID NO: 751195 - RNA, 18 nt, Human
ucccaaagccuuccccgc

SEQ ID NO: 751196 - RNA, 21 nt, Human
ucugacaagacaaaagaaccc

SEQ ID NO: 751197 - RNA, 24 nt, Human
ucuuggggcaaaaaaaaaaaaaaa

SEQ ID NO: 751198 - RNA, 24 nt, Human
ugaaaucacucccaaagccuuccc

SEQ ID NO: 751199 - RNA, 19 nt, Human
ugaagacagaagacuccac

SEQ ID NO: 751200 - RNA, 18 nt, Human
ugaauggguggccuggga

SEQ ID NO: 751201 - RNA, 21 nt, Human
ugacaagacaaaagaacccaa

SEQ ID NO: 751202 - RNA, 23 nt, Human
ugacaagacaaaagaacccaaga

SEQ ID NO: 751203 - RNA, 26 nt, Human
ugagcauaauuagguuagguuaacaa

SEQ ID NO: 751204 - RNA, 22 nt, Human
ugaugcuuucacuuuuguaucc

SEQ ID NO: 751205 - RNA, 19 nt, Human
ugcaugcacucgccagagg

SEQ ID NO: 751206 - RNA, 19 nt, Human
ugccuaaaaagucacugca

SEQ ID NO: 751207 - RNA, 20 nt, Human
ugcuccuacagcgaugcccc

SEQ ID NO: 751208 - RNA, 24 nt, Human
ugcuguucggauuuuuuauuuuua

SEQ ID NO: 751209 - RNA, 22 nt, Human
uggaaacaggcaaagcauacuu

SEQ ID NO: 751210 - RNA, 23 nt, Human
uggaaugugguaggauuucacag

SEQ ID NO: 751211 - RNA, 18 nt, Human
uggcucccacugagccug

SEQ ID NO: 751212 - RNA, 18 nt, Human
uggcuggaggcagggggc

SEQ ID NO: 751213 - RNA, 23 nt, Human
ugggagaagcuggaaaacccacc

SEQ ID NO: 751214 - RNA, 18 nt, Human
ugggugaacguuuucuug

SEQ ID NO: 751215 - RNA, 22 nt, Human
ugguaacuauacacauauaaaa

SEQ ID NO: 751216 - RNA, 21 nt, Human
ugguggauugcugcuagggca

SEQ ID NO: 751217 - RNA, 23 nt, Human
ugucgggacaccaaaaagcagca

SEQ ID NO: 751218 - RNA, 21 nt, Human
uuaaaaauacuguaguaggac

SEQ ID NO: 751219 - RNA, 24 nt, Human
uuagugcaguccuucaagccacaa

SEQ ID NO: 751220 - RNA, 18 nt, Human
uuauaugcacuugguugc

SEQ ID NO: 751221 - RNA, 21 nt, Human
uucaaaugaggggacguuucc

SEQ ID NO: 751222 - RNA, 18 nt, Human
uucaaguaugcuguucgg

SEQ ID NO: 751223 - RNA, 21 nt, Human
uugagggggcaacagagcuag

SEQ ID NO: 751224 - RNA, 18 nt, Human
uuggcuggaggcaggggg

SEQ ID NO: 751225 - RNA, 21 nt, Human
uuggcuggaggcagggggcuu

SEQ ID NO: 751226 - RNA, 20 nt, Human
uuuagagggcuacuuaaaaa

SEQ ID NO: 751227 - RNA, 22 nt, Human
uuucuacaggugaaaaccuucc

SEQ ID NO: 751228 - RNA, 22 nt, Human
uuugugggggcucucuacucug

SEQ ID NO: 751229 - RNA, 19 nt, Human
uuuguuccgaaugagugag

SEQ ID NO: 751230 - RNA, 24 nt, Human
uuuuuuuuuuuaaagaaaaaaagc

SEQ ID NO: 751231 - RNA, 20 nt, Human
aaacacagcucaugccccac

SEQ ID NO: 751232 - RNA, 25 nt, Human
aaacggauguaauccugcauaagac

SEQ ID NO: 751233 - RNA, 21 nt, Human
aaagacucaaaacagauuaga

SEQ ID NO: 751234 - RNA, 19 nt, Human
aacagauuagagaucuuaa

SEQ ID NO: 751235 - RNA, 22 nt, Human
aaccaggaggaagcaacaucca

SEQ ID NO: 751236 - RNA, 21 nt, Human
aacuggcuauuuuguaaagaa

SEQ ID NO: 751237 - RNA, 22 nt, Human
aagcacgagcaggaauaaacaa

SEQ ID NO: 751238 - RNA, 20 nt, Human
aagcaugaucugggggaaag

SEQ ID NO: 751239 - RNA, 18 nt, Human
aaggcaccgcacuaccac

SEQ ID NO: 751240 - RNA, 20 nt, Human
aaguuaccgacguugguagg

SEQ ID NO: 751241 - RNA, 19 nt, Human
acaaagcacagcuuuccuu

SEQ ID NO: 751242 - RNA, 24 nt, Human
acacugcccuuucccacugacacc

SEQ ID NO: 751243 - RNA, 20 nt, Human
acauccaccccagccagacc

SEQ ID NO: 751244 - RNA, 25 nt, Human
accgaagggcaggagccucagccua

SEQ ID NO: 751245 - RNA, 18 nt, Human
accucaauuccugugcug

SEQ ID NO: 751246 - RNA, 18 nt, Human
acugcuuugugauggccu

SEQ ID NO: 751247 - RNA, 19 nt, Human
agaaaacuuuguggugggg

SEQ ID NO: 751248 - RNA, 30 nt, Human
agaaaagaaagaauuaaagcaugaucuggg

SEQ ID NO: 751249 - RNA, 20 nt, Human
agaaacugcaggaagagccu

SEQ ID NO: 751250 - RNA, 18 nt, Human
agacacggcggacaggag

SEQ ID NO: 751251 - RNA, 25 nt, Human
agucccucucuuugugcuuuaagga

SEQ ID NO: 751252 - RNA, 23 nt, Human
aucacaaaaaugacaguccccac

SEQ ID NO: 751253 - RNA, 23 nt, Human
caaauauacaaagcucaauaaac

SEQ ID NO: 751254 - RNA, 23 nt, Human
caacauccaccccagccagacua

SEQ ID NO: 751255 - RNA, 23 nt, Human
caacucccagaagaagcuuaauu

SEQ ID NO: 751256 - RNA, 21 nt, Human
caagccauucuaaagggcaga

SEQ ID NO: 751257 - RNA, 24 nt, Human
cacacccuuucugcuuucaccaag

SEQ ID NO: 751258 - RNA, 23 nt, Human
cacagcucaugccccacugcuuu

SEQ ID NO: 751259 - RNA, 20 nt, Human
caccuggauguuaacugucc

SEQ ID NO: 751260 - RNA, 18 nt, Human
cacucggcaacccagggc

SEQ ID NO: 751261 - RNA, 19 nt, Human
cacugacaccaaguccaac

SEQ ID NO: 751262 - RNA, 18 nt, Human
cagcaacagggacugcuc

SEQ ID NO: 751263 - RNA, 20 nt, Human
cagcuuuccuuuauuuccug

SEQ ID NO: 751264 - RNA, 25 nt, Human
cauauauaugcaauagcacacaccc

SEQ ID NO: 751265 - RNA, 26 nt, Human
cauucaucugcugaugggacaagcca

SEQ ID NO: 751266 - RNA, 23 nt, Human
ccacacgucaccugccugaacgc

SEQ ID NO: 751267 - RNA, 23 nt, Human
ccacacugcccuuucccacugac

SEQ ID NO: 751268 - RNA, 25 nt, Human
ccacgugugacaccucuggaguccu

SEQ ID NO: 751269 - RNA, 18 nt, Human
ccaggcagucucuggcca

SEQ ID NO: 751270 - RNA, 21 nt, Human
cccauauauaugcaauagcac

SEQ ID NO: 751271 - RNA, 19 nt, Human
ccccacacugcccuuuccc

SEQ ID NO: 751272 - RNA, 22 nt, Human
ccccauauauaugcaauagcac

SEQ ID NO: 751273 - RNA, 21 nt, Human
cccuggagaccgacugcccgc

SEQ ID NO: 751274 - RNA, 18 nt, Human
cccuuucugcuuucacca

SEQ ID NO: 751275 - RNA, 22 nt, Human
ccugaaacacagcucaugcccc

SEQ ID NO: 751276 - RNA, 19 nt, Human
ccugacccaccucaauucc

SEQ ID NO: 751277 - RNA, 24 nt, Human
ccuuguagcaauaugugguugcuc

SEQ ID NO: 751278 - RNA, 22 nt, Human
cggcuuggcuugggcgacggcc

SEQ ID NO: 751279 - RNA, 20 nt, Human
cuccacgguggcgggucucc

SEQ ID NO: 751280 - RNA, 21 nt, Human
cugaaacacagcucaugcccc

SEQ ID NO: 751281 - RNA, 19 nt, Human
cugcaggaagagccugucu

SEQ ID NO: 751282 - RNA, 21 nt, Human
cugcccuuucccacugacacc

SEQ ID NO: 751283 - RNA, 23 nt, Human
cuggcacccauggugagcgcugg

SEQ ID NO: 751284 - RNA, 25 nt, Human
cugucaguuccacgugugacaccuc

SEQ ID NO: 751285 - RNA, 21 nt, Human
cuuaacacauucaucugcuga

SEQ ID NO: 751286 - RNA, 22 nt, Human
cuuaagcacgagcaggaauaaa

SEQ ID NO: 751287 - RNA, 23 nt, Human
cuucaccugacccaccucaauuc

SEQ ID NO: 751288 - RNA, 24 nt, Human
cuugaguuucuugcccccugccuc

SEQ ID NO: 751289 - RNA, 20 nt, Human
cuugcccccugccuccacgg

SEQ ID NO: 751290 - RNA, 18 nt, Human
cuuuccuuuauuuccugu

SEQ ID NO: 751291 - RNA, 22 nt, Human
gaacauacacucuuccuucacc

SEQ ID NO: 751292 - RNA, 18 nt, Human
gaacccccuagacuuucc

SEQ ID NO: 751293 - RNA, 24 nt, Human
gaauuaacacugacuuuguaacac

SEQ ID NO: 751294 - RNA, 20 nt, Human
gacaggagcgcgggcgggcg

SEQ ID NO: 751295 - RNA, 19 nt, Human
gagcuugcuccacucgacc

SEQ ID NO: 751296 - RNA, 23 nt, Human
gcccagggcuggugcucuugaug

SEQ ID NO: 751297 - RNA, 23 nt, Human
gcgcggcuuggcuugggcgacgg

SEQ ID NO: 751298 - RNA, 20 nt, Human
gcgguuucuggggucaguac

SEQ ID NO: 751299 - RNA, 23 nt, Human
gcucgcauggccagaauggaacc

SEQ ID NO: 751300 - RNA, 20 nt, Human
ggaggguuggcagcgcggcu

SEQ ID NO: 751301 - RNA, 23 nt, Human
ggcaccuucugaagggguguguc

SEQ ID NO: 751302 - RNA, 19 nt, Human
ggcccagggcuggugcucu

SEQ ID NO: 751303 - RNA, 19 nt, Human
ggggcagaaccaggaggaa

SEQ ID NO: 751304 - RNA, 18 nt, Human
gugcugcccucgagagcu

SEQ ID NO: 751305 - RNA, 20 nt, Human
guggggcagaaccaggagga

SEQ ID NO: 751306 - RNA, 20 nt, Human
guucuugaguuucuugcccc

SEQ ID NO: 751307 - RNA, 28 nt, Human
uaaaaauaggaacauacacucuuccuuc

SEQ ID NO: 751308 - RNA, 21 nt, Human
uaagaacuuaggauucaauga

SEQ ID NO: 751309 - RNA, 22 nt, Human
uaagcccuauaugaaacugucc

SEQ ID NO: 751310 - RNA, 23 nt, Human
uaggaacauacacucuuccuuca

SEQ ID NO: 751311 - RNA, 18 nt, Human
uauaugcaauagcacaca

SEQ ID NO: 751312 - RNA, 22 nt, Human
uauaugcaauagcacacacccu

SEQ ID NO: 751313 - RNA, 23 nt, Human
ucaaucuuaagcacgagcaggaa

SEQ ID NO: 751314 - RNA, 20 nt, Human
ucacaugggacagaaaaguu

SEQ ID NO: 751315 - RNA, 22 nt, Human
ucagucuaaacaaaucaagccc

SEQ ID NO: 751316 - RNA, 25 nt, Human
ucauuuaucauguccuuaaaaucuc

SEQ ID NO: 751317 - RNA, 22 nt, Human
uccagcacuugccacagaaaac

SEQ ID NO: 751318 - RNA, 19 nt, Human
uccugugcaucugauuucc

SEQ ID NO: 751319 - RNA, 23 nt, Human
ucugacacucggcaacccagggc

SEQ ID NO: 751320 - RNA, 21 nt, Human
ucuugcccccugccuccacgg

SEQ ID NO: 751321 - RNA, 24 nt, Human
ugaaacacagcucaugccccacug

SEQ ID NO: 751322 - RNA, 18 nt, Human
ugccccacugcuuuguga

SEQ ID NO: 751323 - RNA, 22 nt, Human
ugccugaacgcuaacuacaaag

SEQ ID NO: 751324 - RNA, 21 nt, Human
ugcuagacacggcggacagga

SEQ ID NO: 751325 - RNA, 24 nt, Human
uggaacccccuagacuuuccacac

SEQ ID NO: 751326 - RNA, 25 nt, Human
uggcccagggcuggugcucuugaug

SEQ ID NO: 751327 - RNA, 19 nt, Human
uggccccugaaacacagcu

SEQ ID NO: 751328 - RNA, 28 nt, Human
ugggacaagccauucuaaaaggucaucc

SEQ ID NO: 751329 - RNA, 18 nt, Human
ugguggggcagaaccagg

SEQ ID NO: 751330 - RNA, 19 nt, Human
ugguuaacacaucuguggu

SEQ ID NO: 751331 - RNA, 23 nt, Human
uguagcaauaugugguugcucag

SEQ ID NO: 751332 - RNA, 22 nt, Human
ugucagugcugcccucgagagc

SEQ ID NO: 751333 - RNA, 23 nt, Human
uguccaaauauacaaagcucaau

SEQ ID NO: 751334 - RNA, 19 nt, Human
ugugacaccucuggagucc

SEQ ID NO: 751335 - RNA, 20 nt, Human
ugugguggggcagaaccagg

SEQ ID NO: 751336 - RNA, 18 nt, Human
uguuauuaaaucacaaaa

SEQ ID NO: 751337 - RNA, 20 nt, Human
uuaaaucacaaaaaugacag

SEQ ID NO: 751338 - RNA, 27 nt, Human
uuaacuguccaaauggcaaauuauuca

SEQ ID NO: 751339 - RNA, 21 nt, Human
uuccagcacuugccacagaaa

SEQ ID NO: 751340 - RNA, 18 nt, Human
uuccuggauuuucacugu

SEQ ID NO: 751341 - RNA, 21 nt, Human
uucuuaggaacacauuuguca

SEQ ID NO: 751342 - RNA, 21 nt, Human
uugaugacugaauuguaagug

SEQ ID NO: 751343 - RNA, 18 nt, Human
uuggcagcgcggcuuggc

SEQ ID NO: 751344 - RNA, 20 nt, Human
uuggcagcgcggcuuggcuu

SEQ ID NO: 751345 - RNA, 19 nt, Human
uugggaaaacgucuuccuu

SEQ ID NO: 751346 - RNA, 23 nt, Human
uugugcuuuaaggaagaugcuuu

SEQ ID NO: 751347 - RNA, 19 nt, Human
uuuggauuuagcauugaca

SEQ ID NO: 751348 - RNA, 23 nt, Human
aaaagaagaaaaauaggaaaaaa

SEQ ID NO: 751349 - RNA, 19 nt, Human
aaacaauaaggacugaaua

SEQ ID NO: 751350 - RNA, 21 nt, Human
aaccccccgcccccccggccu

SEQ ID NO: 751351 - RNA, 23 nt, Human
aagcaaaaagaagaaaaauagga

SEQ ID NO: 751352 - RNA, 20 nt, Human
agaagaaaaaaaauuaaaga

SEQ ID NO: 751353 - RNA, 21 nt, Human
agaagaaaaaaaauuaaagaa

SEQ ID NO: 751354 - RNA, 25 nt, Human
agaagaaaaaaaauuaaagaaagaa

SEQ ID NO: 751355 - RNA, 21 nt, Human
agaguuuaauccacauuuuua

SEQ ID NO: 751356 - RNA, 19 nt, Human
agcaacgaaagaccagaaa

SEQ ID NO: 751357 - RNA, 22 nt, Human
agccccgcgguccccuaacccc

SEQ ID NO: 751358 - RNA, 22 nt, Human
agugacaagcuuauagaaagga

SEQ ID NO: 751359 - RNA, 22 nt, Human
agugcaaaaaaagcaaaaagaa

SEQ ID NO: 751360 - RNA, 24 nt, Human
auccaaaccugacaagcaaaaggc

SEQ ID NO: 751361 - RNA, 21 nt, Human
caagcuuauagaaaggacaau

SEQ ID NO: 751362 - RNA, 27 nt, Human
caauaaggacugaauauauuuggguag

SEQ ID NO: 751363 - RNA, 22 nt, Human
cagaauagcagacuaauggaau

SEQ ID NO: 751364 - RNA, 25 nt, Human
cagcgcagucaacccgaccccuugg

SEQ ID NO: 751365 - RNA, 28 nt, Human
caggagcccaggcagcgccgaggucggg

SEQ ID NO: 751366 - RNA, 20 nt, Human
ccaaagaagcaagagggaaa

SEQ ID NO: 751367 - RNA, 22 nt, Human
cccccccggccucgccuggccc

SEQ ID NO: 751368 - RNA, 21 nt, Human
ccccccggccucgccuggccc

SEQ ID NO: 751369 - RNA, 21 nt, Human
cccccgcccccccggccucgc

SEQ ID NO: 751370 - RNA, 23 nt, Human
ccccgcccccccggccucgccug

SEQ ID NO: 751371 - RNA, 20 nt, Human
ccccggggaguuaauuucuc

SEQ ID NO: 751372 - RNA, 21 nt, Human
ccccuaaccccccgccccccc

SEQ ID NO: 751373 - RNA, 21 nt, Human
cccgcgguccccuaacccccc

SEQ ID NO: 751374 - RNA, 25 nt, Human
cccguuaaaacuagaagaaaaaaaa

SEQ ID NO: 751375 - RNA, 19 nt, Human
cccuaaccccccgcccccc

SEQ ID NO: 751376 - RNA, 20 nt, Human
ccggagaagaccuccggccc

SEQ ID NO: 751377 - RNA, 23 nt, Human
ccuggaccagaagcaacgaaaga

SEQ ID NO: 751378 - RNA, 21 nt, Human
ccuggcccuggccgcucgagc

SEQ ID NO: 751379 - RNA, 22 nt, Human
cgcucgagccccuucccacagc

SEQ ID NO: 751380 - RNA, 24 nt, Human
cgguccccuaaccccccgcccccc

SEQ ID NO: 751381 - RNA, 24 nt, Human
cuagaagaaaaaaaauuaaagaaa

SEQ ID NO: 751382 - RNA, 21 nt, Human
cuggccgcucgagccccuucc

SEQ ID NO: 751383 - RNA, 20 nt, Human
gacuuagggagaggcugcag

SEQ ID NO: 751384 - RNA, 19 nt, Human
gcaaaaaaagcaaaaagaa

SEQ ID NO: 751385 - RNA, 23 nt, Human
gcaaaaaaagcaaaaagaagaaa

SEQ ID NO: 751386 - RNA, 24 nt, Human
gcaaaaaaagcaaaaagaagaaaa

SEQ ID NO: 751387 - RNA, 22 nt, Human
gcaaagagucucuucuaaauca

SEQ ID NO: 751388 - RNA, 24 nt, Human
gcagcgcagucaacccggcggccc

SEQ ID NO: 751389 - RNA, 21 nt, Human
gcagucaacccggcggccccg

SEQ ID NO: 751390 - RNA, 24 nt, Human
gcucccuggccggagaagaccucc

SEQ ID NO: 751391 - RNA, 22 nt, Human
ggagaggcugcaggagcccagg

SEQ ID NO: 751392 - RNA, 18 nt, Human
ggggacuggggccgcgaa

SEQ ID NO: 751393 - RNA, 19 nt, Human
uaaaacuagaagaaaaaaa

SEQ ID NO: 751394 - RNA, 21 nt, Human
uaaccccccgcccccccggcc

SEQ ID NO: 751395 - RNA, 23 nt, Human
uaagugcaauucaauuucagcaa

SEQ ID NO: 751396 - RNA, 19 nt, Human
uacucuaucgagaguuuaa

SEQ ID NO: 751397 - RNA, 18 nt, Human
uagaaugucauaugcuuc

SEQ ID NO: 751398 - RNA, 20 nt, Human
uagccuggaccagaagcaac

SEQ ID NO: 751399 - RNA, 27 nt, Human
uagcuguucuccuuuacuuuauguacu

SEQ ID NO: 751400 - RNA, 24 nt, Human
ucaacaaugcacacaucaaauauu

SEQ ID NO: 751401 - RNA, 18 nt, Human
ucauauuuaagguugaga

SEQ ID NO: 751402 - RNA, 20 nt, Human
uccaaaccugacaagcaaaa

SEQ ID NO: 751403 - RNA, 21 nt, Human
uccccuaaccccccgcccccc

SEQ ID NO: 751404 - RNA, 23 nt, Human
ucccuggccggagaagaccuccg

SEQ ID NO: 751405 - RNA, 21 nt, Human
uccgaaagaugcuauuuaaaa

SEQ ID NO: 751406 - RNA, 18 nt, Human
ucgccuggcccuggccgc

SEQ ID NO: 751407 - RNA, 19 nt, Human
ugacaagcuuauagaaagg

SEQ ID NO: 751408 - RNA, 19 nt, Human
ugcaaaaaaagcaaaaaga

SEQ ID NO: 751409 - RNA, 21 nt, Human
uggaccagaagcaacgaaaga

SEQ ID NO: 751410 - RNA, 19 nt, Human
ugucauaugcuucacaagu

SEQ ID NO: 751411 - RNA, 19 nt, Human
uguuuguuauuuguauugu

SEQ ID NO: 751412 - RNA, 25 nt, Human
uuaaagcuugaagaucaaauuuuaa

SEQ ID NO: 751413 - RNA, 24 nt, Human
uugcacagcgcgagggcggcugcc

SEQ ID NO: 751414 - RNA, 18 nt, Human
uuucacacuaggacuaau

SEQ ID NO: 751415 - RNA, 19 nt, Human
aaaagaacuaccaggaaca

SEQ ID NO: 751416 - RNA, 20 nt, Human
aaaagaacuaccaggaacau

SEQ ID NO: 751417 - RNA, 19 nt, Human
aaccccuaaccugugaucu

SEQ ID NO: 751418 - RNA, 24 nt, Human
acaaagacaaaugguuucuacaaa

SEQ ID NO: 751419 - RNA, 22 nt, Human
agacacugcaaauuucagaacc

SEQ ID NO: 751420 - RNA, 21 nt, Human
auuagaaugucagacucaaaa

SEQ ID NO: 751421 - RNA, 18 nt, Human
caagcacguuccuggcua

SEQ ID NO: 751422 - RNA, 18 nt, Human
caccuaaugagcaggucu

SEQ ID NO: 751423 - RNA, 21 nt, Human
caggaacaugccugaaaaugc

SEQ ID NO: 751424 - RNA, 23 nt, Human
caggaacaugccugaaaaugcua

SEQ ID NO: 751425 - RNA, 21 nt, Human
ccaccacgccucccuaccgca

SEQ ID NO: 751426 - RNA, 20 nt, Human
ccacugaggccaggccacag

SEQ ID NO: 751427 - RNA, 26 nt, Human
ccacugaggccaggccacagucgcau

SEQ ID NO: 751428 - RNA, 19 nt, Human
ccagacauacucauuaaca

SEQ ID NO: 751429 - RNA, 25 nt, Human
ccaucuagagaaaccccuaaccugu

SEQ ID NO: 751430 - RNA, 19 nt, Human
ccaugacaccugcugucac

SEQ ID NO: 751431 - RNA, 22 nt, Human
cccacaaccaggauuccuacaa

SEQ ID NO: 751432 - RNA, 24 nt, Human
cccaugacaccugcugucacugga

SEQ ID NO: 751433 - RNA, 18 nt, Human
cccucagguuggagaaag

SEQ ID NO: 751434 - RNA, 23 nt, Human
cccuggcuggccagaccugaggc

SEQ ID NO: 751435 - RNA, 18 nt, Human
ccuggcuaaaaaauaacc

SEQ ID NO: 751436 - RNA, 22 nt, Human
ccugugaucuagcuuccgaggc

SEQ ID NO: 751437 - RNA, 22 nt, Human
cuucagaccaccacgccucccu

SEQ ID NO: 751438 - RNA, 22 nt, Human
gacccaugacaccugcugucac

SEQ ID NO: 751439 - RNA, 24 nt, Human
gacucaaaagaacuaccaggaaca

SEQ ID NO: 751440 - RNA, 24 nt, Human
gagaaagaaaacuuuuaauuugga

SEQ ID NO: 751441 - RNA, 18 nt, Human
ggacagcaccagcccugg

SEQ ID NO: 751442 - RNA, 24 nt, Human
uaaccagaucuuuuuggccgugcc

SEQ ID NO: 751443 - RNA, 21 nt, Human
uaccgcaagcugcaaacggcc

SEQ ID NO: 751444 - RNA, 19 nt, Human
uagaaugucagacucaaaa

SEQ ID NO: 751445 - RNA, 21 nt, Human
ucaacucuccuuuacccaaaa

SEQ ID NO: 751446 - RNA, 27 nt, Human
ucagugcccuuucuggugcugccuccc

SEQ ID NO: 751447 - RNA, 23 nt, Human
uccagagugagcaagggaaagga

SEQ ID NO: 751448 - RNA, 20 nt, Human
ucccaggagcagacacugca

SEQ ID NO: 751449 - RNA, 21 nt, Human
uccccacaaccaggauuccua

SEQ ID NO: 751450 - RNA, 21 nt, Human
ucuggugcugccucccaggag

SEQ ID NO: 751451 - RNA, 22 nt, Human
ucuggugcugccucccaggagc

SEQ ID NO: 751452 - RNA, 19 nt, Human
ugagcaggucuguccucca

SEQ ID NO: 751453 - RNA, 20 nt, Human
uggcuaaaaaauaaccagau

SEQ ID NO: 751454 - RNA, 23 nt, Human
uguggguaccacugaggccaggc

SEQ ID NO: 751455 - RNA, 18 nt, Human
ugugguagugcugaugug

SEQ ID NO: 751456 - RNA, 22 nt, Human
uuaagacugggucacauccagc

SEQ ID NO: 751457 - RNA, 20 nt, Human
uuagaaaaccuguuuauuaa

SEQ ID NO: 751458 - RNA, 24 nt, Human
uugguucuugugguagugcugaug

SEQ ID NO: 751459 - RNA, 23 nt, Human
aaaaagugaucaccaaggccaga

SEQ ID NO: 751460 - RNA, 28 nt, Human
aaaaauauaucucuuuacacgcaccuuc

SEQ ID NO: 751461 - RNA, 20 nt, Human
aaaauacauucagagccccc

SEQ ID NO: 751462 - RNA, 23 nt, Human
aaagaaacacgguacaaaauaca

SEQ ID NO: 751463 - RNA, 22 nt, Human
aaagugaucaccaaggccagaa

SEQ ID NO: 751464 - RNA, 24 nt, Human
aacacucuugcugucucaccuggu

SEQ ID NO: 751465 - RNA, 18 nt, Human
aagaagacuaaaaauucu

SEQ ID NO: 751466 - RNA, 21 nt, Human
aaggggcuugguuucccaagc

SEQ ID NO: 751467 - RNA, 25 nt, Human
aaggggguuuugaggcucagaacac

SEQ ID NO: 751468 - RNA, 26 nt, Human
aaucauauuccucuuacaaaaauaua

SEQ ID NO: 751469 - RNA, 20 nt, Human
aaucucuucccuugagccuc

SEQ ID NO: 751470 - RNA, 20 nt, Human
aauuaaccuacugugagcac

SEQ ID NO: 751471 - RNA, 19 nt, Human
acacaauuucauucacccc

SEQ ID NO: 751472 - RNA, 24 nt, Human
acacgcaccuucuccauggucucu

SEQ ID NO: 751473 - RNA, 21 nt, Human
acagaagcuggugggccucca

SEQ ID NO: 751474 - RNA, 23 nt, Human
accaccagcaaagaacugaccca

SEQ ID NO: 751475 - RNA, 19 nt, Human
accagcagcugcaguucac

SEQ ID NO: 751476 - RNA, 20 nt, Human
accauggagagaugugucac

SEQ ID NO: 751477 - RNA, 25 nt, Human
accccauuccuuaaagggcccccaa

SEQ ID NO: 751478 - RNA, 24 nt, Human
accuucuccauggucucuuugcua

SEQ ID NO: 751479 - RNA, 22 nt, Human
agaacacacauaaguugguccc

SEQ ID NO: 751480 - RNA, 19 nt, Human
agaauagcacuuggagaag

SEQ ID NO: 751481 - RNA, 19 nt, Human
agacagaaaagaguccaug

SEQ ID NO: 751482 - RNA, 19 nt, Human
agaguccauguaacuagaa

SEQ ID NO: 751483 - RNA, 22 nt, Human
agcacuucuuggguggagauga

SEQ ID NO: 751484 - RNA, 19 nt, Human
aggaaaggggagccuggau

SEQ ID NO: 751485 - RNA, 20 nt, Human
aggaaaggggagccuggauu

SEQ ID NO: 751486 - RNA, 21 nt, Human
aggacucccagucuacccucc

SEQ ID NO: 751487 - RNA, 20 nt, Human
aggcagaagcuuguggucag

SEQ ID NO: 751488 - RNA, 18 nt, Human
agguaguggggguccauu

SEQ ID NO: 751489 - RNA, 21 nt, Human
aguggugggggcagggaccca

SEQ ID NO: 751490 - RNA, 18 nt, Human
aguuggucccauuuuccu

SEQ ID NO: 751491 - RNA, 24 nt, Human
auagaauagcaaagaggcuaugac

SEQ ID NO: 751492 - RNA, 20 nt, Human
aucaacaaaacucgcauuua

SEQ ID NO: 751493 - RNA, 18 nt, Human
augggacucuggaccaac

SEQ ID NO: 751494 - RNA, 18 nt, Human
auuuguaggggucagaag

SEQ ID NO: 751495 - RNA, 19 nt, Human
caaaauacauucagagccc

SEQ ID NO: 751496 - RNA, 19 nt, Human
caccagcaaagaacugacc

SEQ ID NO: 751497 - RNA, 20 nt, Human
caccauggagagauguguca

SEQ ID NO: 751498 - RNA, 21 nt, Human
cagcaggcgcccggggucccu

SEQ ID NO: 751499 - RNA, 21 nt, Human
cagcauggauagaaaggggca

SEQ ID NO: 751500 - RNA, 18 nt, Human
cagcccucccaaacugaa

SEQ ID NO: 751501 - RNA, 26 nt, Human
caggcaucaggacucagggaugccac

SEQ ID NO: 751502 - RNA, 22 nt, Human
cagggacccaggagacagaaaa

SEQ ID NO: 751503 - RNA, 24 nt, Human
ccaauggccccacauggugucucc

SEQ ID NO: 751504 - RNA, 24 nt, Human
ccacauggugucuccaauuaaccu

SEQ ID NO: 751505 - RNA, 19 nt, Human
ccaccaaggcuccuccugc

SEQ ID NO: 751506 - RNA, 21 nt, Human
ccaggagacagaaaagagucc

SEQ ID NO: 751507 - RNA, 23 nt, Human
ccauuaccuccccacacuaucca

SEQ ID NO: 751508 - RNA, 21 nt, Human
cccacaaauggaacccagagu

SEQ ID NO: 751509 - RNA, 19 nt, Human
ccccacauggugucuccaa

SEQ ID NO: 751510 - RNA, 18 nt, Human
ccccagcugaagaccaag

SEQ ID NO: 751511 - RNA, 19 nt, Human
cccccaagggaagcuggcc

SEQ ID NO: 751512 - RNA, 22 nt, Human
cccccugggugggccuggggca

SEQ ID NO: 751513 - RNA, 22 nt, Human
ccccuccacugcuucaugaaag

SEQ ID NO: 751514 - RNA, 24 nt, Human
ccccugggugggccuggggcagcc

SEQ ID NO: 751515 - RNA, 18 nt, Human
cccugggugggccugggg

SEQ ID NO: 751516 - RNA, 22 nt, Human
ccuacugugagcaccauuaccu

SEQ ID NO: 751517 - RNA, 20 nt, Human
ccucccaaacugaaggugag

SEQ ID NO: 751518 - RNA, 19 nt, Human
ccugaggaaucuucaggca

SEQ ID NO: 751519 - RNA, 19 nt, Human
ccuggauagcaaaggaccc

SEQ ID NO: 751520 - RNA, 18 nt, Human
cgacucccgcgucccgcu

SEQ ID NO: 751521 - RNA, 22 nt, Human
cgcccggggucccucucugcga

SEQ ID NO: 751522 - RNA, 24 nt, Human
cguggucaggacucccagucuacc

SEQ ID NO: 751523 - RNA, 19 nt, Human
cucagcccagaagggacaa

SEQ ID NO: 751524 - RNA, 22 nt, Human
cucagggaugccaccugaaggg

SEQ ID NO: 751525 - RNA, 21 nt, Human
cuccauggucucuuugcuacu

SEQ ID NO: 751526 - RNA, 21 nt, Human
cuccucaggccaauggaucug

SEQ ID NO: 751527 - RNA, 22 nt, Human
cucgccaccaaggcuccuccug

SEQ ID NO: 751528 - RNA, 20 nt, Human
cucugcgacucccgcguccc

SEQ ID NO: 751529 - RNA, 20 nt, Human
cugaagggucuccgccacuu

SEQ ID NO: 751530 - RNA, 19 nt, Human
cugcacuccaaggcuucag

SEQ ID NO: 751531 - RNA, 18 nt, Human
cugcgacucccgcguccc

SEQ ID NO: 751532 - RNA, 19 nt, Human
cuggguuauuucacugggg

SEQ ID NO: 751533 - RNA, 24 nt, Human
cuucuugcccuuucucugcuccuc

SEQ ID NO: 751534 - RNA, 18 nt, Human
cuucuuggguggagauga

SEQ ID NO: 751535 - RNA, 18 nt, Human
cuugcaaacucugccagc

SEQ ID NO: 751536 - RNA, 23 nt, Human
gaacacacauaaguuggucccau

SEQ ID NO: 751537 - RNA, 20 nt, Human
gaaucuucaggcagaagcuu

SEQ ID NO: 751538 - RNA, 21 nt, Human
gacccaggucuuggaccaaga

SEQ ID NO: 751539 - RNA, 20 nt, Human
gacucccagucuacccuccc

SEQ ID NO: 751540 - RNA, 23 nt, Human
gagggaauuggggaagugugcca

SEQ ID NO: 751541 - RNA, 24 nt, Human
gcagccaaggggauuguccccaga

SEQ ID NO: 751542 - RNA, 18 nt, Human
gcuccuccugccgggccc

SEQ ID NO: 751543 - RNA, 26 nt, Human
gcugcaguucacuucuugcccuuucu

SEQ ID NO: 751544 - RNA, 20 nt, Human
gcuggggugcuugggagagg

SEQ ID NO: 751545 - RNA, 26 nt, Human
gcuugguuucccaagcuuuccuuagg

SEQ ID NO: 751546 - RNA, 18 nt, Human
ggaagagaugggacucug

SEQ ID NO: 751547 - RNA, 21 nt, Human
ggacugggugggaagcuacug

SEQ ID NO: 751548 - RNA, 21 nt, Human
ggagaggauggaaggggcuug

SEQ ID NO: 751549 - RNA, 22 nt, Human
ggauggugcagguuuggacugg

SEQ ID NO: 751550 - RNA, 18 nt, Human
ggcauccagcaagucucc

SEQ ID NO: 751551 - RNA, 23 nt, Human
ggcgcgcccgcucugugggcgcc

SEQ ID NO: 751552 - RNA, 21 nt, Human
gggaagcuacugguauccagg

SEQ ID NO: 751553 - RNA, 19 nt, Human
gggaugccaccugaagggu

SEQ ID NO: 751554 - RNA, 22 nt, Human
gggcaggguucaugcccuggag

SEQ ID NO: 751555 - RNA, 21 nt, Human
ggggaagagaugggacucugg

SEQ ID NO: 751556 - RNA, 23 nt, Human
guggucaggacucccagucuacc

SEQ ID NO: 751557 - RNA, 19 nt, Human
uaaccuacugugagcacca

SEQ ID NO: 751558 - RNA, 24 nt, Human
uaaggaaaggggagccuggauuuc

SEQ ID NO: 751559 - RNA, 19 nt, Human
uacaauagcccccugggcu

SEQ ID NO: 751560 - RNA, 20 nt, Human
uaccuccccacacuauccag

SEQ ID NO: 751561 - RNA, 25 nt, Human
uagaacccccuaaacaagaugcccc

SEQ ID NO: 751562 - RNA, 21 nt, Human
ucaagagccuugacaauugcc

SEQ ID NO: 751563 - RNA, 22 nt, Human
ucacucuuccugaaaaagugau

SEQ ID NO: 751564 - RNA, 18 nt, Human
ucaggccaauggaucugg

SEQ ID NO: 751565 - RNA, 21 nt, Human
uccaggaugucagaaaccuaa

SEQ ID NO: 751566 - RNA, 21 nt, Human
uccauguaacuagaacccccu

SEQ ID NO: 751567 - RNA, 24 nt, Human
uccauguaacuagaacccccuaaa

SEQ ID NO: 751568 - RNA, 18 nt, Human
ucccagagagagucaacc

SEQ ID NO: 751569 - RNA, 20 nt, Human
uccccagaccaaagagagga

SEQ ID NO: 751570 - RNA, 21 nt, Human
ucccucccacaaauggaaccc

SEQ ID NO: 751571 - RNA, 23 nt, Human
uccucagucucacucuucccuuu

SEQ ID NO: 751572 - RNA, 21 nt, Human
uccucagucucacucuuccug

SEQ ID NO: 751573 - RNA, 19 nt, Human
uccugaaaaagugaucacc

SEQ ID NO: 751574 - RNA, 22 nt, Human
uccuucgguuuggcauuucagc

SEQ ID NO: 751575 - RNA, 20 nt, Human
ucuccaauuaaccuacugug

SEQ ID NO: 751576 - RNA, 23 nt, Human
ucuccauggucucuuugcuacuu

SEQ ID NO: 751577 - RNA, 24 nt, Human
ucucugcuccucaggccaauggau

SEQ ID NO: 751578 - RNA, 18 nt, Human
ucucuggggcuuggcugg

SEQ ID NO: 751579 - RNA, 21 nt, Human
ucucuggggcuuggcuggggu

SEQ ID NO: 751580 - RNA, 24 nt, Human
ucucuggggcuuggcuggggugcu

SEQ ID NO: 751581 - RNA, 19 nt, Human
ucugaggguuaccagcagc

SEQ ID NO: 751582 - RNA, 23 nt, Human
ugaaaaagugaucaccaaggcca

SEQ ID NO: 751583 - RNA, 24 nt, Human
ugaaaaagugaucaccaaggccag

SEQ ID NO: 751584 - RNA, 21 nt, Human
ugaaagaagacuaaaaauucu

SEQ ID NO: 751585 - RNA, 24 nt, Human
ugacuggagcccaccauggagaga

SEQ ID NO: 751586 - RNA, 19 nt, Human
ugagggaauuggggaagug

SEQ ID NO: 751587 - RNA, 23 nt, Human
ugaguccccagggccugcguggu

SEQ ID NO: 751588 - RNA, 19 nt, Human
ugaguuaaacaucggugcc

SEQ ID NO: 751589 - RNA, 21 nt, Human
ugauguggaugagcccucccu

SEQ ID NO: 751590 - RNA, 18 nt, Human
ugcaguggcuuuaaggaa

SEQ ID NO: 751591 - RNA, 25 nt, Human
ugccgggcccuggggcuauuucucc

SEQ ID NO: 751592 - RNA, 22 nt, Human
uggagcuuaccagcccucccaa

SEQ ID NO: 751593 - RNA, 19 nt, Human
uggcaugugaccauccucg

SEQ ID NO: 751594 - RNA, 21 nt, Human
uggcaugugaccauccucgug

SEQ ID NO: 751595 - RNA, 21 nt, Human
ugggaacagaagcuggugggc

SEQ ID NO: 751596 - RNA, 20 nt, Human
ugggagaggauggaaggggc

SEQ ID NO: 751597 - RNA, 19 nt, Human
ugggccuccauccagucag

SEQ ID NO: 751598 - RNA, 21 nt, Human
ugggccuggggcagcccaaau

SEQ ID NO: 751599 - RNA, 24 nt, Human
ugggcucacuguuggugccugagg

SEQ ID NO: 751600 - RNA, 19 nt, Human
uggggcuuggcuggggugc

SEQ ID NO: 751601 - RNA, 20 nt, Human
ugggggaaagaaacacggua

SEQ ID NO: 751602 - RNA, 23 nt, Human
uggggguaaccaggggucuugag

SEQ ID NO: 751603 - RNA, 21 nt, Human
uggggugcuugggagaggaug

SEQ ID NO: 751604 - RNA, 22 nt, Human
uggguggagaugagaagggggc

SEQ ID NO: 751605 - RNA, 24 nt, Human
uggguggagaugagaagggggcug

SEQ ID NO: 751606 - RNA, 23 nt, Human
ugggugggaagcuacugguaucc

SEQ ID NO: 751607 - RNA, 18 nt, Human
ugguauccaggguugggg

SEQ ID NO: 751608 - RNA, 20 nt, Human
uggucugggaagguaguggg

SEQ ID NO: 751609 - RNA, 20 nt, Human
uguaggggucagaagggcag

SEQ ID NO: 751610 - RNA, 21 nt, Human
uuccccagcugaagaccaagc

SEQ ID NO: 751611 - RNA, 24 nt, Human
uucccuugagccuccucugucaug

SEQ ID NO: 751612 - RNA, 21 nt, Human
uucuccaggucuggcucaagg

SEQ ID NO: 751613 - RNA, 18 nt, Human
uuggcuggggugcuuggg

SEQ ID NO: 751614 - RNA, 22 nt, Human
uuggcuggggugcuugggagag

SEQ ID NO: 751615 - RNA, 25 nt, Human
uuggggguccucagucucacucuuc

SEQ ID NO: 751616 - RNA, 20 nt, Human
uuucugagaagcaguguggc

SEQ ID NO: 751617 - RNA, 23 nt, Human
uuucugaggguuaccagcagcug

SEQ ID NO: 751618 - RNA, 22 nt, Human
aagggcacuaucagaaauggaa

SEQ ID NO: 751619 - RNA, 21 nt, Human
acaggguagcaggaggcaaag

SEQ ID NO: 751620 - RNA, 24 nt, Human
agacagaagagcaagggcacuauc

SEQ ID NO: 751621 - RNA, 20 nt, Human
aggagaggauccucaguccu

SEQ ID NO: 751622 - RNA, 19 nt, Human
aggcaaaguccgcaccacu

SEQ ID NO: 751623 - RNA, 21 nt, Human
agggagcuccccgggaccccu

SEQ ID NO: 751624 - RNA, 18 nt, Human
caaaggcguuucuuccug

SEQ ID NO: 751625 - RNA, 19 nt, Human
cagacagaagagcaagggc

SEQ ID NO: 751626 - RNA, 25 nt, Human
ccagaaacuuucccaccccgcucgg

SEQ ID NO: 751627 - RNA, 22 nt, Human
cccacugcaaaggcguuucuuc

SEQ ID NO: 751628 - RNA, 18 nt, Human
ccccgcgcugcaugcccc

SEQ ID NO: 751629 - RNA, 21 nt, Human
cccgcccgcggcgucaccgag

SEQ ID NO: 751630 - RNA, 20 nt, Human
cccgcggcgucaccgagccg

SEQ ID NO: 751631 - RNA, 22 nt, Human
cccgcggcgucaccgagccgcg

SEQ ID NO: 751632 - RNA, 22 nt, Human
cccgggaccccucucuucaaaa

SEQ ID NO: 751633 - RNA, 28 nt, Human
ccgcgcccccgcgcugcaugccccggcg

SEQ ID NO: 751634 - RNA, 25 nt, Human
ccgcgcugcaugccccggcggcccc

SEQ ID NO: 751635 - RNA, 19 nt, Human
ccgcucggcgcagcaacag

SEQ ID NO: 751636 - RNA, 18 nt, Human
ccuagcuaagcccaucug

SEQ ID NO: 751637 - RNA, 27 nt, Human
cgacugacaacuccagaaacuuuccca

SEQ ID NO: 751638 - RNA, 20 nt, Human
cgggaccccucucuucaaaa

SEQ ID NO: 751639 - RNA, 23 nt, Human
cgugucccgcgcgcgggccgugg

SEQ ID NO: 751640 - RNA, 20 nt, Human
cucuuguccagagaggccca

SEQ ID NO: 751641 - RNA, 22 nt, Human
cugcaagaugacagacagaaga

SEQ ID NO: 751642 - RNA, 22 nt, Human
cuggaggagaggauccucaguc

SEQ ID NO: 751643 - RNA, 19 nt, Human
gaaacuuucccaccccgcu

SEQ ID NO: 751644 - RNA, 22 nt, Human
gaaacuuucccaccccgcucgg

SEQ ID NO: 751645 - RNA, 23 nt, Human
gaagcaauuaaacccacugcaaa

SEQ ID NO: 751646 - RNA, 26 nt, Human
gacugacaacuccagaaacuuuccca

SEQ ID NO: 751647 - RNA, 23 nt, Human
gagcaagggcacuaucagaaaug

SEQ ID NO: 751648 - RNA, 19 nt, Human
gagggagcuccccgggacc

SEQ ID NO: 751649 - RNA, 18 nt, Human
gcaagucuuggcaggacc

SEQ ID NO: 751650 - RNA, 22 nt, Human
gcaauuaaacccacugcaaagg

SEQ ID NO: 751651 - RNA, 22 nt, Human
gcccccuacuccucccagccuc

SEQ ID NO: 751652 - RNA, 21 nt, Human
gccgcggagccucuagaucuu

SEQ ID NO: 751653 - RNA, 21 nt, Human
ggaacaggcugcccccuacuc

SEQ ID NO: 751654 - RNA, 18 nt, Human
ggaccccucucuucaaaa

SEQ ID NO: 751655 - RNA, 19 nt, Human
ggcgcagcaacaggguagc

SEQ ID NO: 751656 - RNA, 21 nt, Human
uaaaaauaagugcuugucuug

SEQ ID NO: 751657 - RNA, 22 nt, Human
ucaccgagccgcgcccccgcgc

SEQ ID NO: 751658 - RNA, 27 nt, Human
ucaguaauguacaauaacucuugaguc

SEQ ID NO: 751659 - RNA, 20 nt, Human
ucaguccugugccaagguuu

SEQ ID NO: 751660 - RNA, 20 nt, Human
uccagaaacuuucccacccc

SEQ ID NO: 751661 - RNA, 19 nt, Human
uccccgcggcgcccucgcc

SEQ ID NO: 751662 - RNA, 18 nt, Human
uccugugccaagguuuca

SEQ ID NO: 751663 - RNA, 24 nt, Human
ucgccccgcacccgcgcgcagccu

SEQ ID NO: 751664 - RNA, 21 nt, Human
ucuggucugcacguccagaga

SEQ ID NO: 751665 - RNA, 23 nt, Human
ucuuggcaggacccggcaggggu

SEQ ID NO: 751666 - RNA, 27 nt, Human
ugaacaaaugagcguggucaguaaugu

SEQ ID NO: 751667 - RNA, 21 nt, Human
ugcaucagcaucauaugcaca

SEQ ID NO: 751668 - RNA, 19 nt, Human
ugccaagguuucacgcugu

SEQ ID NO: 751669 - RNA, 21 nt, Human
ugccccggcggccccggccac

SEQ ID NO: 751670 - RNA, 18 nt, Human
ugccggguccccgcccgc

SEQ ID NO: 751671 - RNA, 18 nt, Human
uggagggagcuccccggg

SEQ ID NO: 751672 - RNA, 19 nt, Human
uggagggagcuccccgggg

SEQ ID NO: 751673 - RNA, 21 nt, Human
uggcaggacccggcaggggug

SEQ ID NO: 751674 - RNA, 22 nt, Human
uggcccucgggcauccugcaag

SEQ ID NO: 751675 - RNA, 21 nt, Human
uggccuagcuaagcccaucug

SEQ ID NO: 751676 - RNA, 20 nt, Human
aaaagcagccccagccaccu

SEQ ID NO: 751677 - RNA, 19 nt, Human
aacaugauacaaaaacaca

SEQ ID NO: 751678 - RNA, 22 nt, Human
aagcagccccagccaccuccca

SEQ ID NO: 751679 - RNA, 22 nt, Human
acccccacaccuuggagggagc

SEQ ID NO: 751680 - RNA, 21 nt, Human
acccccaucccgccccuacug

SEQ ID NO: 751681 - RNA, 22 nt, Human
agaggcacgggaggccugcugg

SEQ ID NO: 751682 - RNA, 19 nt, Human
agccaagggccugagcccc

SEQ ID NO: 751683 - RNA, 19 nt, Human
agcgcaggggcagcuugga

SEQ ID NO: 751684 - RNA, 18 nt, Human
aggaaggacuguggaugg

SEQ ID NO: 751685 - RNA, 21 nt, Human
aggaggcccugagcacugccc

SEQ ID NO: 751686 - RNA, 18 nt, Human
aggcagaagucuuaaguu

SEQ ID NO: 751687 - RNA, 20 nt, Human
aggcagggccuacagaggug

SEQ ID NO: 751688 - RNA, 22 nt, Human
aggccccccaggccaggacccu

SEQ ID NO: 751689 - RNA, 20 nt, Human
aggccugccugugcucuccu

SEQ ID NO: 751690 - RNA, 23 nt, Human
agggccugagccccaggccauuc

SEQ ID NO: 751691 - RNA, 23 nt, Human
aucccauuccccagaauccccag

SEQ ID NO: 751692 - RNA, 19 nt, Human
auggagcagggagcuggau

SEQ ID NO: 751693 - RNA, 21 nt, Human
caaaagcagccccagccaccu

SEQ ID NO: 751694 - RNA, 25 nt, Human
caaaagcagccccagccaccuccca

SEQ ID NO: 751695 - RNA, 21 nt, Human
caacaugauacaaaaacacag

SEQ ID NO: 751696 - RNA, 21 nt, Human
caagggccugagccccaggcc

SEQ ID NO: 751697 - RNA, 18 nt, Human
cacacccccaucccgccc

SEQ ID NO: 751698 - RNA, 23 nt, Human
cacacccccaucccgccccuacu

SEQ ID NO: 751699 - RNA, 24 nt, Human
cacagaacucuagcgggauacaga

SEQ ID NO: 751700 - RNA, 19 nt, Human
caccagaccaauggcaccg

SEQ ID NO: 751701 - RNA, 19 nt, Human
caccccagcugcagagcug

SEQ ID NO: 751702 - RNA, 23 nt, Human
caccccagcugcagagcuggaag

SEQ ID NO: 751703 - RNA, 27 nt, Human
caccccucccagcgcaggggcagcuug

SEQ ID NO: 751704 - RNA, 19 nt, Human
caccucccaagcugccaag

SEQ ID NO: 751705 - RNA, 18 nt, Human
cacugcccacccccacac

SEQ ID NO: 751706 - RNA, 22 nt, Human
cagaaaagaugggcaccugaua

SEQ ID NO: 751707 - RNA, 18 nt, Human
cagaauccccaggaggga

SEQ ID NO: 751708 - RNA, 25 nt, Human
cagaggcacgggaggccugcugggg

SEQ ID NO: 751709 - RNA, 19 nt, Human
cagcaucucuuugguuauc

SEQ ID NO: 751710 - RNA, 19 nt, Human
cagcccagguaccccuucc

SEQ ID NO: 751711 - RNA, 23 nt, Human
cagcgaguccugggguaccaaac

SEQ ID NO: 751712 - RNA, 21 nt, Human
caggccccccaggccagcgga

SEQ ID NO: 751713 - RNA, 19 nt, Human
cagggccuacagaggugcc

SEQ ID NO: 751714 - RNA, 22 nt, Human
cagguaccccuuccucugugcc

SEQ ID NO: 751715 - RNA, 20 nt, Human
ccacacccccaucccgcccc

SEQ ID NO: 751716 - RNA, 22 nt, Human
ccacacccccaucccgccccua

SEQ ID NO: 751717 - RNA, 21 nt, Human
ccacuggccagggcuaugcug

SEQ ID NO: 751718 - RNA, 23 nt, Human
ccagccaccucccaagcugccaa

SEQ ID NO: 751719 - RNA, 23 nt, Human
ccaucccgccccuacugcacagg

SEQ ID NO: 751720 - RNA, 22 nt, Human
cccacccccacaccuuggaggg

SEQ ID NO: 751721 - RNA, 18 nt, Human
cccagccaccucccaagc

SEQ ID NO: 751722 - RNA, 19 nt, Human
cccauuccccagaaucccc

SEQ ID NO: 751723 - RNA, 20 nt, Human
ccccaggagggagaagaggg

SEQ ID NO: 751724 - RNA, 24 nt, Human
ccccaggccaguugugcuaggagc

SEQ ID NO: 751725 - RNA, 20 nt, Human
ccccauagcuuacuccugga

SEQ ID NO: 751726 - RNA, 20 nt, Human
ccccucccagcgcaggggcu

SEQ ID NO: 751727 - RNA, 22 nt, Human
ccccugugcaagcagagcuggc

SEQ ID NO: 751728 - RNA, 19 nt, Human
cccgccccuacugcacagg

SEQ ID NO: 751729 - RNA, 21 nt, Human
cccugagcacugcccaccccc

SEQ ID NO: 751730 - RNA, 27 nt, Human
cccugcacccagcccagguaccccuuc

SEQ ID NO: 751731 - RNA, 19 nt, Human
ccgcugcgggggcaaguca

SEQ ID NO: 751732 - RNA, 23 nt, Human
ccucaguuggagcugucucuggc

SEQ ID NO: 751733 - RNA, 24 nt, Human
ccugacccagcuagcgucccugac

SEQ ID NO: 751734 - RNA, 20 nt, Human
ccugcggcggcggcgugucu

SEQ ID NO: 751735 - RNA, 19 nt, Human
ccuuggugcccccuggagg

SEQ ID NO: 751736 - RNA, 18 nt, Human
cucugugccgaccaugcu

SEQ ID NO: 751737 - RNA, 19 nt, Human
cugacccagcuagcguccc

SEQ ID NO: 751738 - RNA, 21 nt, Human
cugacccagcuagcgucccug

SEQ ID NO: 751739 - RNA, 18 nt, Human
cugcccacccccacaccu

SEQ ID NO: 751740 - RNA, 21 nt, Human
cugccccuccuuccugccaga

SEQ ID NO: 751741 - RNA, 20 nt, Human
cugcucuuccacacccccau

SEQ ID NO: 751742 - RNA, 18 nt, Human
cuuggugcccccuggagg

SEQ ID NO: 751743 - RNA, 19 nt, Human
gacacuaggggaaggaagg

SEQ ID NO: 751744 - RNA, 19 nt, Human
gaccugcucuuccacaccc

SEQ ID NO: 751745 - RNA, 19 nt, Human
gagcuggaugccagcggga

SEQ ID NO: 751746 - RNA, 18 nt, Human
gcagcagggaggaggcuu

SEQ ID NO: 751747 - RNA, 19 nt, Human
gcagcagggaggaggcuuc

SEQ ID NO: 751748 - RNA, 19 nt, Human
gcauucccacucagccaag

SEQ ID NO: 751749 - RNA, 21 nt, Human
gcauucccacucagccaaggg

SEQ ID NO: 751750 - RNA, 21 nt, Human
gccccagccaccucccaagcu

SEQ ID NO: 751751 - RNA, 19 nt, Human
gcuaggagccuggaccugc

SEQ ID NO: 751752 - RNA, 21 nt, Human
ggagaagagggaugggcugcc

SEQ ID NO: 751753 - RNA, 20 nt, Human
ggagcagaggcagcacuggc

SEQ ID NO: 751754 - RNA, 18 nt, Human
ggagggacugcugggcug

SEQ ID NO: 751755 - RNA, 20 nt, Human
ggcuggggagggacuggcca

SEQ ID NO: 751756 - RNA, 23 nt, Human
gggaaacugggugagcaagggag

SEQ ID NO: 751757 - RNA, 20 nt, Human
gggcaccugauagcucagcu

SEQ ID NO: 751758 - RNA, 21 nt, Human
gggcugccccuccuuccugcc

SEQ ID NO: 751759 - RNA, 21 nt, Human
gugcucuccucaccacugcug

SEQ ID NO: 751760 - RNA, 20 nt, Human
uaacacucauguccugcagg

SEQ ID NO: 751761 - RNA, 23 nt, Human
uaugcugcaccagaccaauggca

SEQ ID NO: 751762 - RNA, 21 nt, Human
ucagaccuggacugcagcauc

SEQ ID NO: 751763 - RNA, 21 nt, Human
uccacacccccaucccgcccc

SEQ ID NO: 751764 - RNA, 20 nt, Human
ucccacucagccaagggccu

SEQ ID NO: 751765 - RNA, 20 nt, Human
uccccagaauccccaggagg

SEQ ID NO: 751766 - RNA, 18 nt, Human
ucccugagugagaaggcc

SEQ ID NO: 751767 - RNA, 18 nt, Human
uccucaguuggagcuguc

SEQ ID NO: 751768 - RNA, 22 nt, Human
uccuuuggcuccgaggaggccc

SEQ ID NO: 751769 - RNA, 18 nt, Human
ucucucuccauauauucu

SEQ ID NO: 751770 - RNA, 21 nt, Human
ugacccagcuagcgucccuga

SEQ ID NO: 751771 - RNA, 18 nt, Human
ugagugguccuugucccu

SEQ ID NO: 751772 - RNA, 19 nt, Human
ugcacagagccugccugga

SEQ ID NO: 751773 - RNA, 19 nt, Human
ugcacagcuggcaggagca

SEQ ID NO: 751774 - RNA, 18 nt, Human
ugccaaggccccaggcca

SEQ ID NO: 751775 - RNA, 20 nt, Human
ugccaagggccaggcgucgg

SEQ ID NO: 751776 - RNA, 21 nt, Human
ugccaagggccaggcgucggg

SEQ ID NO: 751777 - RNA, 23 nt, Human
ugccagagccacagcucaagggc

SEQ ID NO: 751778 - RNA, 19 nt, Human
ugccggaggggaaacuggg

SEQ ID NO: 751779 - RNA, 20 nt, Human
ugccugugcucuccucacca

SEQ ID NO: 751780 - RNA, 18 nt, Human
ugccuuggugcccccugg

SEQ ID NO: 751781 - RNA, 25 nt, Human
ugccuuggugcccccuggaggcagc

SEQ ID NO: 751782 - RNA, 22 nt, Human
ugcugggcuggggagggacugg

SEQ ID NO: 751783 - RNA, 23 nt, Human
uggagcugucucuggcaaaggca

SEQ ID NO: 751784 - RNA, 19 nt, Human
uggagggacugcugggcug

SEQ ID NO: 751785 - RNA, 19 nt, Human
uggagggagcagacggagg

SEQ ID NO: 751786 - RNA, 19 nt, Human
uggcaaaggcaaaagcagc

SEQ ID NO: 751787 - RNA, 20 nt, Human
uggcaaaggcaaaagcagcc

SEQ ID NO: 751788 - RNA, 19 nt, Human
uggcaccgcccccaccccu

SEQ ID NO: 751789 - RNA, 19 nt, Human
uggcagaggcacgggaggc

SEQ ID NO: 751790 - RNA, 19 nt, Human
uggcaggagcacuggccac

SEQ ID NO: 751791 - RNA, 25 nt, Human
uggcaggagcacuggccaccucccu

SEQ ID NO: 751792 - RNA, 18 nt, Human
uggccagggcuaugcugc

SEQ ID NO: 751793 - RNA, 18 nt, Human
uggcccugcacccagccc

SEQ ID NO: 751794 - RNA, 24 nt, Human
ugggauggcccugcacccagccca

SEQ ID NO: 751795 - RNA, 22 nt, Human
ugggcugccccuccuuccugcc

SEQ ID NO: 751796 - RNA, 20 nt, Human
ugggcuggggagggacuggc

SEQ ID NO: 751797 - RNA, 22 nt, Human
ugucucuggcaaaggcaaaagc

SEQ ID NO: 751798 - RNA, 23 nt, Human
uguuacaucucucucuccauaua

SEQ ID NO: 751799 - RNA, 18 nt, Human
uuacuccuggauguagcc

SEQ ID NO: 751800 - RNA, 24 nt, Human
uuggagagguccucaguuggagcu

SEQ ID NO: 751801 - RNA, 22 nt, Human
uuuccugaccagcgaguccugg

SEQ ID NO: 751802 - RNA, 23 nt, Human
aagacucgcacauuuuucccagg

SEQ ID NO: 751803 - RNA, 24 nt, Human
aagcagucgcccaucuacuucccg

SEQ ID NO: 751804 - RNA, 18 nt, Human
accggccucgcccggccu

SEQ ID NO: 751805 - RNA, 19 nt, Human
acgcaggguguauggcagg

SEQ ID NO: 751806 - RNA, 18 nt, Human
acuugguucaccagaugg

SEQ ID NO: 751807 - RNA, 20 nt, Human
agccaggggccugggagcug

SEQ ID NO: 751808 - RNA, 19 nt, Human
aggggccugggagcugugg

SEQ ID NO: 751809 - RNA, 22 nt, Human
agugaagaaaacaccucggccu

SEQ ID NO: 751810 - RNA, 22 nt, Human
caagacucgcacauuuuuccca

SEQ ID NO: 751811 - RNA, 19 nt, Human
cagggugugcccaggcuuu

SEQ ID NO: 751812 - RNA, 23 nt, Human
cccacacugcuggugccaguggg

SEQ ID NO: 751813 - RNA, 19 nt, Human
cccacccacacugcuggug

SEQ ID NO: 751814 - RNA, 22 nt, Human
cccacccacacugcuggugcca

SEQ ID NO: 751815 - RNA, 18 nt, Human
cccagggccccagauagc

SEQ ID NO: 751816 - RNA, 19 nt, Human
ccccagauagcugcuggca

SEQ ID NO: 751817 - RNA, 23 nt, Human
ccccuggggcugccacuugguuc

SEQ ID NO: 751818 - RNA, 18 nt, Human
cccugcucuggggagaga

SEQ ID NO: 751819 - RNA, 20 nt, Human
ccgccgcguccucaccggcc

SEQ ID NO: 751820 - RNA, 20 nt, Human
ccgcguccucaccggccucg

SEQ ID NO: 751821 - RNA, 20 nt, Human
ccggccucgcccggccuccg

SEQ ID NO: 751822 - RNA, 21 nt, Human
ccugggagcuguggcuugagc

SEQ ID NO: 751823 - RNA, 24 nt, Human
cgcuugucugagaggguccuggca

SEQ ID NO: 751824 - RNA, 20 nt, Human
cuagguccugggugggggga

SEQ ID NO: 751825 - RNA, 25 nt, Human
cugcuguucuuuguaguugugucca

SEQ ID NO: 751826 - RNA, 21 nt, Human
cugugccacgcuugucugaga

SEQ ID NO: 751827 - RNA, 23 nt, Human
cuugguucaccagauggaagguc

SEQ ID NO: 751828 - RNA, 22 nt, Human
gaccacagccacuucccaucug

SEQ ID NO: 751829 - RNA, 20 nt, Human
gaggcccacccacacugcug

SEQ ID NO: 751830 - RNA, 20 nt, Human
gcagcagccgccagacucgc

SEQ ID NO: 751831 - RNA, 25 nt, Human
gcucuggggagagaggcagggugug

SEQ ID NO: 751832 - RNA, 23 nt, Human
gcuugucugagaggguccuggca

SEQ ID NO: 751833 - RNA, 22 nt, Human
ggcagggccucuuuuccagugc

SEQ ID NO: 751834 - RNA, 24 nt, Human
gggcacagggggacuuugguuucu

SEQ ID NO: 751835 - RNA, 22 nt, Human
gggcaggccccuggggcugcca

SEQ ID NO: 751836 - RNA, 24 nt, Human
guaguuguguccaaaccugggcag

SEQ ID NO: 751837 - RNA, 23 nt, Human
uaauaaauuagacggccccaccc

SEQ ID NO: 751838 - RNA, 19 nt, Human
uccugcuguucuuuguagu

SEQ ID NO: 751839 - RNA, 24 nt, Human
ucuguugagaagccucaggacaga

SEQ ID NO: 751840 - RNA, 19 nt, Human
ugagaccacagccacuucc

SEQ ID NO: 751841 - RNA, 19 nt, Human
ugagaggguccuggcagug

SEQ ID NO: 751842 - RNA, 22 nt, Human
ugagccaggggccugggagccg

SEQ ID NO: 751843 - RNA, 18 nt, Human
ugagcggcuccgcgcuca

SEQ ID NO: 751844 - RNA, 20 nt, Human
ugaggcccacccacacugcu

SEQ ID NO: 751845 - RNA, 24 nt, Human
ugagugaagaaaacaccucggccc

SEQ ID NO: 751846 - RNA, 19 nt, Human
ugcgucuuugagccagggg

SEQ ID NO: 751847 - RNA, 21 nt, Human
uggaaggaaugcugggcagua

SEQ ID NO: 751848 - RNA, 20 nt, Human
uggcaguggguacgcagggu

SEQ ID NO: 751849 - RNA, 23 nt, Human
uuagacggccccacccucccagg

SEQ ID NO: 751850 - RNA, 18 nt, Human
aaaaacaccaaaguguaa

SEQ ID NO: 751851 - RNA, 25 nt, Human
aaaaacaccaaaguguaaguauuac

SEQ ID NO: 751852 - RNA, 24 nt, Human
aaacagaagaggagaaagaaacaa

SEQ ID NO: 751853 - RNA, 20 nt, Human
aaacagaagaggagaaaggg

SEQ ID NO: 751854 - RNA, 24 nt, Human
aaagucaccccaugcuauaugcuc

SEQ ID NO: 751855 - RNA, 24 nt, Human
aaaguguugggauuacaggcauga

SEQ ID NO: 751856 - RNA, 19 nt, Human
aacaacacaggacaaucaa

SEQ ID NO: 751857 - RNA, 19 nt, Human
aacacguuggcaguucucc

SEQ ID NO: 751858 - RNA, 18 nt, Human
aacuaaucuuacugaccu

SEQ ID NO: 751859 - RNA, 20 nt, Human
aagaaacuugcagaggaagu

SEQ ID NO: 751860 - RNA, 19 nt, Human
aagaacacaacaaaaccaa

SEQ ID NO: 751861 - RNA, 23 nt, Human
aagaacacaacaaaaccaaaccc

SEQ ID NO: 751862 - RNA, 20 nt, Human
aagaggagaaagaaacaaag

SEQ ID NO: 751863 - RNA, 21 nt, Human
aaguguugggauuacaggcau

SEQ ID NO: 751864 - RNA, 20 nt, Human
aauguugucuucugaaugga

SEQ ID NO: 751865 - RNA, 20 nt, Human
acagauucaagauggccucu

SEQ ID NO: 751866 - RNA, 24 nt, Human
accauguugcucaggcuggccucg

SEQ ID NO: 751867 - RNA, 25 nt, Human
acccaccacaucuuguauuguagac

SEQ ID NO: 751868 - RNA, 23 nt, Human
accuccgccucccaaaguguugg

SEQ ID NO: 751869 - RNA, 18 nt, Human
acgggguuucaccauguu

SEQ ID NO: 751870 - RNA, 19 nt, Human
acgggguuucaccauguug

SEQ ID NO: 751871 - RNA, 24 nt, Human
acgggguuucaccauguugcucag

SEQ ID NO: 751872 - RNA, 23 nt, Human
acuaguaaccuccgccauccucc

SEQ ID NO: 751873 - RNA, 22 nt, Human
agaaaacagcaugcggacucau

SEQ ID NO: 751874 - RNA, 24 nt, Human
agaaccuaagaaaaaacaccaaag

SEQ ID NO: 751875 - RNA, 18 nt, Human
agagcacaaagcugagca

SEQ ID NO: 751876 - RNA, 20 nt, Human
agaggaaguaaggcaaacug

SEQ ID NO: 751877 - RNA, 20 nt, Human
agaggagaaagaaacaaagg

SEQ ID NO: 751878 - RNA, 22 nt, Human
agaucacugcagacucagacaa

SEQ ID NO: 751879 - RNA, 20 nt, Human
agcccaagacaucugaaaau

SEQ ID NO: 751880 - RNA, 21 nt, Human
agcgagaaaacagaagaggag

SEQ ID NO: 751881 - RNA, 22 nt, Human
agcugggaacaugaaaauccuu

SEQ ID NO: 751882 - RNA, 27 nt, Human
aggaaguaaggcaaacuggaagaagcc

SEQ ID NO: 751883 - RNA, 18 nt, Human
aggacaaugaaagucacc

SEQ ID NO: 751884 - RNA, 23 nt, Human
aggcagaaggguacggagugggg

SEQ ID NO: 751885 - RNA, 27 nt, Human
agggcuccaaaggaacuaauaugcugu

SEQ ID NO: 751886 - RNA, 24 nt, Human
aggugaucugcccaccuccgccuc

SEQ ID NO: 751887 - RNA, 18 nt, Human
aguagcugggauuacagg

SEQ ID NO: 751888 - RNA, 23 nt, Human
aguguaauggugcgaucuuggcu

SEQ ID NO: 751889 - RNA, 19 nt, Human
aucccaaaaaagugccgug

SEQ ID NO: 751890 - RNA, 22 nt, Human
augaagaacacaacaaaaccaa

SEQ ID NO: 751891 - RNA, 22 nt, Human
auggagugucgcuuugucgccc

SEQ ID NO: 751892 - RNA, 19 nt, Human
augguuuucuuuuucccca

SEQ ID NO: 751893 - RNA, 19 nt, Human
auuacaggugcacgccacc

SEQ ID NO: 751894 - RNA, 20 nt, Human
auuccugcugcuaguacuag

SEQ ID NO: 751895 - RNA, 24 nt, Human
auuuuuguauuuuuaguagagacg

SEQ ID NO: 751896 - RNA, 20 nt, Human
caaaaggacucacugaagaa

SEQ ID NO: 751897 - RNA, 24 nt, Human
caaaguguugggauuacaggcaug

SEQ ID NO: 751898 - RNA, 24 nt, Human
caaauccccuaauugccaagagag

SEQ ID NO: 751899 - RNA, 19 nt, Human
caagaaauaagagaaggaa

SEQ ID NO: 751900 - RNA, 19 nt, Human
caccagagccuuuuagaga

SEQ ID NO: 751901 - RNA, 24 nt, Human
caccauguugcucaggcuggccuc

SEQ ID NO: 751902 - RNA, 18 nt, Human
cacugcaaccucugccuc

SEQ ID NO: 751903 - RNA, 21 nt, Human
cacugcaaccucugccuccca

SEQ ID NO: 751904 - RNA, 21 nt, Human
cagaaaaagcccaagacaucu

SEQ ID NO: 751905 - RNA, 26 nt, Human
cagaaaaagcccaagacaucugaaaa

SEQ ID NO: 751906 - RNA, 19 nt, Human
cagaaucacgacuaccccc

SEQ ID NO: 751907 - RNA, 19 nt, Human
cagacucagacaauggagg

SEQ ID NO: 751908 - RNA, 20 nt, Human
cagaggaaguaaggcaaacu

SEQ ID NO: 751909 - RNA, 23 nt, Human
cagcugccuuccuacagaucacu

SEQ ID NO: 751910 - RNA, 19 nt, Human
caggacaaucaauaaccau

SEQ ID NO: 751911 - RNA, 22 nt, Human
cagggacauaccuaaguaugcc

SEQ ID NO: 751912 - RNA, 25 nt, Human
caucagagcacaaagcugagcaaac

SEQ ID NO: 751913 - RNA, 22 nt, Human
caugaagaacacaacaaaacca

SEQ ID NO: 751914 - RNA, 23 nt, Human
cauguugcucaggcuggccucga

SEQ ID NO: 751915 - RNA, 23 nt, Human
cauuagaaaccauauccuauaac

SEQ ID NO: 751916 - RNA, 18 nt, Human
cauuauuucuaaccaaaa

SEQ ID NO: 751917 - RNA, 23 nt, Human
ccaaaguguugggauuacaggca

SEQ ID NO: 751918 - RNA, 24 nt, Human
ccaaaguguugggauuacaggcau

SEQ ID NO: 751919 - RNA, 19 nt, Human
ccaccgcgcccggccuucc

SEQ ID NO: 751920 - RNA, 22 nt, Human
ccagaaucacgacuaccccccc

SEQ ID NO: 751921 - RNA, 24 nt, Human
cccaaaguguugggauuacaggca

SEQ ID NO: 751922 - RNA, 24 nt, Human
cccaaauccccuaauugccaagag

SEQ ID NO: 751923 - RNA, 23 nt, Human
cccacaguaacccgaguugaaga

SEQ ID NO: 751924 - RNA, 21 nt, Human
ccccugccucagccucugagu

SEQ ID NO: 751925 - RNA, 22 nt, Human
ccucccagguucaagccauucc

SEQ ID NO: 751926 - RNA, 21 nt, Human
ccucugcccuaaggagcaaag

SEQ ID NO: 751927 - RNA, 24 nt, Human
ccugaccuuaggugaucugcccac

SEQ ID NO: 751928 - RNA, 22 nt, Human
ccugccucagccucugaguagc

SEQ ID NO: 751929 - RNA, 24 nt, Human
cgggguuucaccauguugcucagg

SEQ ID NO: 751930 - RNA, 19 nt, Human
cuaaguaugccugaaacaa

SEQ ID NO: 751931 - RNA, 24 nt, Human
cucacugcaaccucugccucccag

SEQ ID NO: 751932 - RNA, 24 nt, Human
cucacugcaaccucugccucccag

SEQ ID NO: 751933 - RNA, 23 nt, Human
cucagccucugaguagcugggau

SEQ ID NO: 751934 - RNA, 23 nt, Human
cucauucugccaauaacacaugu

SEQ ID NO: 751935 - RNA, 21 nt, Human
cucccugaauuuuuggauuuc

SEQ ID NO: 751936 - RNA, 23 nt, Human
cucugaguagcugggauuacagg

SEQ ID NO: 751937 - RNA, 24 nt, Human
cucugaguagcugggauuacaggu

SEQ ID NO: 751938 - RNA, 21 nt, Human
cugaguagcugggauuacagg

SEQ ID NO: 751939 - RNA, 23 nt, Human
cugcaaccucugccucccagguu

SEQ ID NO: 751940 - RNA, 24 nt, Human
cugcaaccucugccucccagguuc

SEQ ID NO: 751941 - RNA, 22 nt, Human
cugccucagccucugaguagcu

SEQ ID NO: 751942 - RNA, 20 nt, Human
cugccucccagguucaagcc

SEQ ID NO: 751943 - RNA, 18 nt, Human
cuuugucgcccaggcugg

SEQ ID NO: 751944 - RNA, 20 nt, Human
cuuugucgcccaggcuggag

SEQ ID NO: 751945 - RNA, 22 nt, Human
gaaagaaaaguguggggggagg

SEQ ID NO: 751946 - RNA, 18 nt, Human
gaaauaagagaaggaagg

SEQ ID NO: 751947 - RNA, 23 nt, Human
gaagaacacaacaaaaccaaacc

SEQ ID NO: 751948 - RNA, 24 nt, Human
gaaucacgacuacccccccuucag

SEQ ID NO: 751949 - RNA, 24 nt, Human
gaccuuaggugaucugcccaccuc

SEQ ID NO: 751950 - RNA, 21 nt, Human
gacgggguuucaccauguugc

SEQ ID NO: 751951 - RNA, 25 nt, Human
gacuacccccccuucagaggacucc

SEQ ID NO: 751952 - RNA, 19 nt, Human
gagaaggaaggugacuugc

SEQ ID NO: 751953 - RNA, 23 nt, Human
gagacgggguuucaccauguugc

SEQ ID NO: 751954 - RNA, 18 nt, Human
gagcaaucauuacaaggg

SEQ ID NO: 751955 - RNA, 20 nt, Human
gaguaauaaggaaaacuguc

SEQ ID NO: 751956 - RNA, 26 nt, Human
gaguagcugggauuacaggugcacgc

SEQ ID NO: 751957 - RNA, 18 nt, Human
gauuacaggcaugagcca

SEQ ID NO: 751958 - RNA, 22 nt, Human
gauuacaggcaugagccaccgc

SEQ ID NO: 751959 - RNA, 22 nt, Human
gauuacaggcaugagccaccgc

SEQ ID NO: 751960 - RNA, 18 nt, Human
gauuacaggugcacgcca

SEQ ID NO: 751961 - RNA, 19 nt, Human
gcaaacuggaagaagcaua

SEQ ID NO: 751962 - RNA, 22 nt, Human
gcaaccucugccucccagguuc

SEQ ID NO: 751963 - RNA, 18 nt, Human
gcaucuuuuuuucuucuu

SEQ ID NO: 751964 - RNA, 19 nt, Human
gccaucagagcacaaagcu

SEQ ID NO: 751965 - RNA, 20 nt, Human
gcccaggcuggaguguaaug

SEQ ID NO: 751966 - RNA, 19 nt, Human
gcgagaaaacagaagagga

SEQ ID NO: 751967 - RNA, 21 nt, Human
gcucacugcaaccucugccuc

SEQ ID NO: 751968 - RNA, 24 nt, Human
gcuggaguacagaugggugccagu

SEQ ID NO: 751969 - RNA, 21 nt, Human
ggaaagaaccacacccucuca

SEQ ID NO: 751970 - RNA, 20 nt, Human
ggaggguuguucuuacucug

SEQ ID NO: 751971 - RNA, 22 nt, Human
ggauuacaggcaugagccaccg

SEQ ID NO: 751972 - RNA, 19 nt, Human
gggacuuacaaaaaaggga

SEQ ID NO: 751973 - RNA, 20 nt, Human
gggaggcagaaggguacgga

SEQ ID NO: 751974 - RNA, 21 nt, Human
gggaggcagaaggguacggag

SEQ ID NO: 751975 - RNA, 18 nt, Human
ggggagggggaggcagaa

SEQ ID NO: 751976 - RNA, 20 nt, Human
ggggagggggaggcagaagg

SEQ ID NO: 751977 - RNA, 20 nt, Human
ggggggagggggaggcagaa

SEQ ID NO: 751978 - RNA, 23 nt, Human
gggguuucaccauguugcucagg

SEQ ID NO: 751979 - RNA, 20 nt, Human
gguaaagaaaaggaaacaga

SEQ ID NO: 751980 - RNA, 24 nt, Human
guaagaaagaaaagugugggggga

SEQ ID NO: 751981 - RNA, 23 nt, Human
guaauuuuuguauuuuuaguaga

SEQ ID NO: 751982 - RNA, 23 nt, Human
guagagacgggguuucaccaugu

SEQ ID NO: 751983 - RNA, 24 nt, Human
gugaucugcccaccuccgccuccc

SEQ ID NO: 751984 - RNA, 22 nt, Human
uaaaacccaccacaucuuguau

SEQ ID NO: 751985 - RNA, 24 nt, Human
uaaaauaaaacccaccacaucuug

SEQ ID NO: 751986 - RNA, 24 nt, Human
uaacaugaaaaccaucuuucacuc

SEQ ID NO: 751987 - RNA, 20 nt, Human
uaaccuccgccauccuccuu

SEQ ID NO: 751988 - RNA, 19 nt, Human
uaagaaagaaaaguguggg

SEQ ID NO: 751989 - RNA, 24 nt, Human
uaauuuuuguauuuuuaguagaga

SEQ ID NO: 751990 - RNA, 21 nt, Human
uacaauuccaagccauuguac

SEQ ID NO: 751991 - RNA, 23 nt, Human
uacaggcaugagccaccgcgccc

SEQ ID NO: 751992 - RNA, 24 nt, Human
uacaggugcacgccaccacaccca

SEQ ID NO: 751993 - RNA, 18 nt, Human
uacccugugcccucccug

SEQ ID NO: 751994 - RNA, 22 nt, Human
uagagacgggguuucaccaugu

SEQ ID NO: 751995 - RNA, 21 nt, Human
uagcaagcaccuuccuauccc

SEQ ID NO: 751996 - RNA, 21 nt, Human
uaggacaaugaaagucacccc

SEQ ID NO: 751997 - RNA, 24 nt, Human
uaguagagacgggguuucaccaug

SEQ ID NO: 751998 - RNA, 20 nt, Human
uauuguagacaucccagcug

SEQ ID NO: 751999 - RNA, 25 nt, Human
ucaagccauuccccugccucagccu

SEQ ID NO: 752000 - RNA, 24 nt, Human
ucaagcuguguccaacacccacaa

SEQ ID NO: 752001 - RNA, 19 nt, Human
ucacugcaaccucugccuc

SEQ ID NO: 752002 - RNA, 23 nt, Human
ucacugcaaccucugccucccag

SEQ ID NO: 752003 - RNA, 24 nt, Human
ucacugcaaccucugccucccagg

SEQ ID NO: 752004 - RNA, 22 nt, Human
ucagcggauuaaauucuugagc

SEQ ID NO: 752005 - RNA, 24 nt, Human
ucccaaaguguugggauuacaggc

SEQ ID NO: 752006 - RNA, 23 nt, Human
ucccaaauccccuaauugccaag

SEQ ID NO: 752007 - RNA, 19 nt, Human
ucccagguucaagccauuc

SEQ ID NO: 752008 - RNA, 24 nt, Human
ucccagguucaagccauuccccug

SEQ ID NO: 752009 - RNA, 20 nt, Human
uccucagauaaaagaaucaa

SEQ ID NO: 752010 - RNA, 22 nt, Human
ucgcuuugucgcccaggcugga

SEQ ID NO: 752011 - RNA, 24 nt, Human
ucgcuuugucgcccaggcuggagu

SEQ ID NO: 752012 - RNA, 25 nt, Human
ucuaaccaaaagaacaugguuagca

SEQ ID NO: 752013 - RNA, 25 nt, Human
ucuaaccaaaagaacaugguuagca

SEQ ID NO: 752014 - RNA, 24 nt, Human
ucugaaaauuacuaguaaccuccg

SEQ ID NO: 752015 - RNA, 24 nt, Human
ucugaguagcugggauuacaggug

SEQ ID NO: 752016 - RNA, 21 nt, Human
ucuuucuuguucuuuuccucc

SEQ ID NO: 752017 - RNA, 18 nt, Human
ugaaaaagguuuuuaagu

SEQ ID NO: 752018 - RNA, 24 nt, Human
ugaccuuaggugaucugcccaccu

SEQ ID NO: 752019 - RNA, 20 nt, Human
ugagagaggucaagccaugg

SEQ ID NO: 752020 - RNA, 22 nt, Human
ugagcaaaccucucuucuuacc

SEQ ID NO: 752021 - RNA, 20 nt, Human
ugagcgauuugggcuucagc

SEQ ID NO: 752022 - RNA, 25 nt, Human
ugaggagauauaaaacucauucuuu

SEQ ID NO: 752023 - RNA, 24 nt, Human
ugaucugcccaccuccgccuccca

SEQ ID NO: 752024 - RNA, 20 nt, Human
ugauuuuggguuuuguuggc

SEQ ID NO: 752025 - RNA, 18 nt, Human
ugccaauaacacauguca

SEQ ID NO: 752026 - RNA, 21 nt, Human
ugcccaccuccgccucccaaa

SEQ ID NO: 752027 - RNA, 20 nt, Human
ugccucagccucugaguagc

SEQ ID NO: 752028 - RNA, 23 nt, Human
ugccucagccucugaguagcugg

SEQ ID NO: 752029 - RNA, 21 nt, Human
ugccugaaacaacacaggacc

SEQ ID NO: 752030 - RNA, 20 nt, Human
ugcuggaguacagauggggg

SEQ ID NO: 752031 - RNA, 18 nt, Human
uggcaaaaauagcaagca

SEQ ID NO: 752032 - RNA, 24 nt, Human
uggcaaaaauagcaagcaccuucc

SEQ ID NO: 752033 - RNA, 19 nt, Human
ugggauuacaggcaugagc

SEQ ID NO: 752034 - RNA, 21 nt, Human
ugggauuacaggcaugagcca

SEQ ID NO: 752035 - RNA, 22 nt, Human
ugggauuacaggcaugagccac

SEQ ID NO: 752036 - RNA, 23 nt, Human
ugggauuacaggcaugagccacc

SEQ ID NO: 752037 - RNA, 24 nt, Human
ugggauuacaggcaugagccaccg

SEQ ID NO: 752038 - RNA, 24 nt, Human
ugggauuacaggcaugagccaccg

SEQ ID NO: 752039 - RNA, 22 nt, Human
ugggauuacaggugcacgccac

SEQ ID NO: 752040 - RNA, 24 nt, Human
ugggauuacaggugcacgccacca

SEQ ID NO: 752041 - RNA, 18 nt, Human
uggggggagggggaggca

SEQ ID NO: 752042 - RNA, 24 nt, Human
uggggggagggggaggcagaaggg

SEQ ID NO: 752043 - RNA, 22 nt, Human
uguaauggugcgaucuuggcuc

SEQ ID NO: 752044 - RNA, 21 nt, Human
uguauuuuuaguagagacggg

SEQ ID NO: 752045 - RNA, 20 nt, Human
ugucgcccaggcuggagugu

SEQ ID NO: 752046 - RNA, 23 nt, Human
ugucgcuuugucgcccaggcugg

SEQ ID NO: 752047 - RNA, 24 nt, Human
ugucgcuuugucgcccaggcugga

SEQ ID NO: 752048 - RNA, 22 nt, Human
ugugguccuaugagccaaaaug

SEQ ID NO: 752049 - RNA, 18 nt, Human
uguguacuagcaacacau

SEQ ID NO: 752050 - RNA, 21 nt, Human
uguugucuucugaauggaguu

SEQ ID NO: 752051 - RNA, 18 nt, Human
uuaguagagacgggguuu

SEQ ID NO: 752052 - RNA, 22 nt, Human
uuaguagagacgggguuucacc

SEQ ID NO: 752053 - RNA, 24 nt, Human
uuaguagagacgggguuucaccau

SEQ ID NO: 752054 - RNA, 21 nt, Human
uucaagccauuccccugccuc

SEQ ID NO: 752055 - RNA, 24 nt, Human
uuccacguaaacaaaagccuggau

SEQ ID NO: 752056 - RNA, 28 nt, Human
uucuuuuccucccuagcuuuuuuuuuuu

SEQ ID NO: 752057 - RNA, 20 nt, Human
uugaaagaaaacagcaugcg

SEQ ID NO: 752058 - RNA, 22 nt, Human
uugaucccaaaaaagugccgug

SEQ ID NO: 752059 - RNA, 21 nt, Human
uuguagacaucccagcugcau

SEQ ID NO: 752060 - RNA, 23 nt, Human
uuguauuuuuaguagagacgggg

SEQ ID NO: 752061 - RNA, 23 nt, Human
uuuaacuaaucuuacugaccuca

SEQ ID NO: 752062 - RNA, 21 nt, Human
uuucaccauguugcucaggcu

SEQ ID NO: 752063 - RNA, 23 nt, Human
uuucaccauguugcucaggcugg

SEQ ID NO: 752064 - RNA, 23 nt, Human
uuucucauaaaugaauaugcacg

SEQ ID NO: 752065 - RNA, 24 nt, Human
uuugucgcccaggcuggaguguaa

SEQ ID NO: 752066 - RNA, 24 nt, Human
uuuuuaguagagacgggguuucac

SEQ ID NO: 752067 - RNA, 24 nt, Human
uuuuuccaugauuuccuugaggag

SEQ ID NO: 752068 - RNA, 20 nt, Human
uuuuuguauuuuuaguagag

SEQ ID NO: 752069 - RNA, 24 nt, Human
aaagugcugggauuauaggcguga

SEQ ID NO: 752070 - RNA, 18 nt, Human
aaccgggcccacacuaau

SEQ ID NO: 752071 - RNA, 18 nt, Human
aagcaaucagugcagagc

SEQ ID NO: 752072 - RNA, 23 nt, Human
aaggaaaggaauacccagagaac

SEQ ID NO: 752073 - RNA, 19 nt, Human
aaggaaccuacuccgaugc

SEQ ID NO: 752074 - RNA, 19 nt, Human
aaguagcugggauaacagg

SEQ ID NO: 752075 - RNA, 21 nt, Human
aagugcaugugugaggggagu

SEQ ID NO: 752076 - RNA, 19 nt, Human
aagugcugggauuauaggc

SEQ ID NO: 752077 - RNA, 19 nt, Human
aagugcugggauuauaggc

SEQ ID NO: 752078 - RNA, 26 nt, Human
aagugcugggauuauaggcgugagcc

SEQ ID NO: 752079 - RNA, 24 nt, Human
aaguggggauggugggaggaaagg

SEQ ID NO: 752080 - RNA, 24 nt, Human
aaguuccccaaaggacaaggugga

SEQ ID NO: 752081 - RNA, 19 nt, Human
acaacacaacuuccacaug

SEQ ID NO: 752082 - RNA, 20 nt, Human
acacagaaaaacaccuugga

SEQ ID NO: 752083 - RNA, 20 nt, Human
acacggagaagugcaccaga

SEQ ID NO: 752084 - RNA, 18 nt, Human
acaggguuucaccauguu

SEQ ID NO: 752085 - RNA, 23 nt, Human
acaggguuucaccauguuggcca

SEQ ID NO: 752086 - RNA, 24 nt, Human
acaggguuucaccauguuggccag

SEQ ID NO: 752087 - RNA, 25 nt, Human
acagugaaggaaaggaauacccaga

SEQ ID NO: 752088 - RNA, 18 nt, Human
acauccacaugcaaacgc

SEQ ID NO: 752089 - RNA, 18 nt, Human
accauguuggccaggcug

SEQ ID NO: 752090 - RNA, 20 nt, Human
acccaguaacaucaaagcaa

SEQ ID NO: 752091 - RNA, 24 nt, Human
acucuacugugugccccugcucgu

SEQ ID NO: 752092 - RNA, 25 nt, Human
acucugucaaccaggcuggaaugca

SEQ ID NO: 752093 - RNA, 21 nt, Human
agaacagacagcuguguggga

SEQ ID NO: 752094 - RNA, 19 nt, Human
agagaaguggagagagcag

SEQ ID NO: 752095 - RNA, 18 nt, Human
agagcagacacacaagga

SEQ ID NO: 752096 - RNA, 19 nt, Human
agagcagacacacaaggaa

SEQ ID NO: 752097 - RNA, 23 nt, Human
agcaaacuggcgcacacccaggc

SEQ ID NO: 752098 - RNA, 18 nt, Human
agcuagaauguacugagu

SEQ ID NO: 752099 - RNA, 18 nt, Human
agcuuuccucuccccucc

SEQ ID NO: 752100 - RNA, 21 nt, Human
aggaaaggaauacccagagaa

SEQ ID NO: 752101 - RNA, 19 nt, Human
aggcgugagccaccauacc

SEQ ID NO: 752102 - RNA, 19 nt, Human
aggcgugagccaccauacc

SEQ ID NO: 752103 - RNA, 23 nt, Human
agggggcccugggcagcuuuccu

SEQ ID NO: 752104 - RNA, 24 nt, Human
aggugauccgcccuccuuggccuc

SEQ ID NO: 752105 - RNA, 20 nt, Human
aguugaucagagccuccagg

SEQ ID NO: 752106 - RNA, 21 nt, Human
auauaagcagagaaguggaga

SEQ ID NO: 752107 - RNA, 18 nt, Human
aucuuccccggccgcugg

SEQ ID NO: 752108 - RNA, 19 nt, Human
augguuggggacacggagc

SEQ ID NO: 752109 - RNA, 22 nt, Human
caaaacagguguagaacaauau

SEQ ID NO: 752110 - RNA, 18 nt, Human
caaacauaggaagcugca

SEQ ID NO: 752111 - RNA, 21 nt, Human
caaagugcugggauuauaggc

SEQ ID NO: 752112 - RNA, 24 nt, Human
caaagugcugggauuauaggcgug

SEQ ID NO: 752113 - RNA, 18 nt, Human
caagacagcccucuaaac

SEQ ID NO: 752114 - RNA, 20 nt, Human
caagacagcccucuaaaccc

SEQ ID NO: 752115 - RNA, 25 nt, Human
caagacagcccucuaaacccaguaa

SEQ ID NO: 752116 - RNA, 22 nt, Human
cacaaauuuacuagacaugauc

SEQ ID NO: 752117 - RNA, 21 nt, Human
cacauccacaugcaaacgcug

SEQ ID NO: 752118 - RNA, 20 nt, Human
cacaugugaugacuccauca

SEQ ID NO: 752119 - RNA, 24 nt, Human
caccaugccuggcuaauuuuugua

SEQ ID NO: 752120 - RNA, 21 nt, Human
caccauguuggccaggcuggu

SEQ ID NO: 752121 - RNA, 24 nt, Human
caccauguuggccaggcuggucuc

SEQ ID NO: 752122 - RNA, 27 nt, Human
caccauguuggccaggcuggucucaaa

SEQ ID NO: 752123 - RNA, 23 nt, Human
caccucuucccugaaaucuucca

SEQ ID NO: 752124 - RNA, 21 nt, Human
cagaugggggcucgcucccag

SEQ ID NO: 752125 - RNA, 21 nt, Human
cagcaggcgucuuugaugcuc

SEQ ID NO: 752126 - RNA, 24 nt, Human
caggguuucaccauguuggccagg

SEQ ID NO: 752127 - RNA, 22 nt, Human
caguggcuggccuggcuccccc

SEQ ID NO: 752128 - RNA, 18 nt, Human
caguggcuggccuggcug

SEQ ID NO: 752129 - RNA, 31 nt, Human
caucagcaaugacuggacauuuugcuggucc

SEQ ID NO: 752130 - RNA, 22 nt, Human
caugccaccugucaccucagca

SEQ ID NO: 752131 - RNA, 24 nt, Human
cauguuggccaggcuggucucaaa

SEQ ID NO: 752132 - RNA, 18 nt, Human
ccaccauaccuggcuugc

SEQ ID NO: 752133 - RNA, 19 nt, Human
ccagaaagaggagagggac

SEQ ID NO: 752134 - RNA, 18 nt, Human
cccaaguagcugggauaa

SEQ ID NO: 752135 - RNA, 21 nt, Human
cccaccucuucccugaaaucu

SEQ ID NO: 752136 - RNA, 21 nt, Human
ccccugaaccagccagaaaga

SEQ ID NO: 752137 - RNA, 24 nt, Human
cccgccuccccgguuuaagcaauu

SEQ ID NO: 752138 - RNA, 20 nt, Human
cccucccagcucacauccac

SEQ ID NO: 752139 - RNA, 19 nt, Human
ccguagccgcgacuaggca

SEQ ID NO: 752140 - RNA, 26 nt, Human
ccuccaagacagcccucuaaacccag

SEQ ID NO: 752141 - RNA, 22 nt, Human
ccuccagggcacuuggguccau

SEQ ID NO: 752142 - RNA, 24 nt, Human
ccuccccgguuuaagcaauucucc

SEQ ID NO: 752143 - RNA, 18 nt, Human
ccugaccuuaggugaucc

SEQ ID NO: 752144 - RNA, 23 nt, Human
ccugccuuagccucccaaguagc

SEQ ID NO: 752145 - RNA, 24 nt, Human
ccugccuuagccucccaaguagcu

SEQ ID NO: 752146 - RNA, 25 nt, Human
ccuuagccucccaaguagcugggau

SEQ ID NO: 752147 - RNA, 19 nt, Human
cgacuaggcaacucagaca

SEQ ID NO: 752148 - RNA, 19 nt, Human
cguauucuccccagguagu

SEQ ID NO: 752149 - RNA, 19 nt, Human
cucagacacggagaagugc

SEQ ID NO: 752150 - RNA, 22 nt, Human
cucccagcucacauccacaugc

SEQ ID NO: 752151 - RNA, 26 nt, Human
cucccugccuuagccucccaaguagc

SEQ ID NO: 752152 - RNA, 19 nt, Human
cugacugcagucaaagcaa

SEQ ID NO: 752153 - RNA, 26 nt, Human
cugcagcugcaggaagcucgccccca

SEQ ID NO: 752154 - RNA, 21 nt, Human
cugcagucaaagcaaaaaagc

SEQ ID NO: 752155 - RNA, 21 nt, Human
cugcgccagcuuuucagcugc

SEQ ID NO: 752156 - RNA, 18 nt, Human
cuucccaaaggaaccuac

SEQ ID NO: 752157 - RNA, 22 nt, Human
gaacauugcuuugguucguauu

SEQ ID NO: 752158 - RNA, 19 nt, Human
gaagaucacaaauuuacua

SEQ ID NO: 752159 - RNA, 24 nt, Human
gaccuuaggugauccgcccuccuu

SEQ ID NO: 752160 - RNA, 22 nt, Human
gagaaaaugcugaucagcaugg

SEQ ID NO: 752161 - RNA, 24 nt, Human
gauaacaggcgcccgccaccaugc

SEQ ID NO: 752162 - RNA, 18 nt, Human
gauuauaggcgugagcca

SEQ ID NO: 752163 - RNA, 21 nt, Human
gauuauaggcgugagccacca

SEQ ID NO: 752164 - RNA, 24 nt, Human
gauuauaggcgugagccaccauac

SEQ ID NO: 752165 - RNA, 24 nt, Human
gcaaagugcugggauuauaggcgu

SEQ ID NO: 752166 - RNA, 21 nt, Human
gcaacccccgccuccccgguu

SEQ ID NO: 752167 - RNA, 22 nt, Human
gcaacccccgccuccccgguuu

SEQ ID NO: 752168 - RNA, 23 nt, Human
gcacugggaugucuucuaauccc

SEQ ID NO: 752169 - RNA, 19 nt, Human
gcgccagcuuuucagcugc

SEQ ID NO: 752170 - RNA, 19 nt, Human
gcuggaaugcaguggcacg

SEQ ID NO: 752171 - RNA, 19 nt, Human
ggagaagugcaccagaucc

SEQ ID NO: 752172 - RNA, 21 nt, Human
ggagaagugcaccagauccuc

SEQ ID NO: 752173 - RNA, 21 nt, Human
ggagcaaaaguggggauggug

SEQ ID NO: 752174 - RNA, 18 nt, Human
ggaguccuggggaaggaa

SEQ ID NO: 752175 - RNA, 23 nt, Human
ggcuggucucaaacuccugaccu

SEQ ID NO: 752176 - RNA, 21 nt, Human
gggacaugauaacugaccccc

SEQ ID NO: 752177 - RNA, 20 nt, Human
gggauggcguagaacacugg

SEQ ID NO: 752178 - RNA, 19 nt, Human
ggggauggugggaggaaag

SEQ ID NO: 752179 - RNA, 22 nt, Human
ggguuucaccauguuggccagg

SEQ ID NO: 752180 - RNA, 23 nt, Human
uaaaagaacauugcuuugguucg

SEQ ID NO: 752181 - RNA, 22 nt, Human
uaaagacaggguuucaccaugu

SEQ ID NO: 752182 - RNA, 22 nt, Human
uaacaaaacagguguagaacaa

SEQ ID NO: 752183 - RNA, 23 nt, Human
uaaccacagugaaggaaaggaau

SEQ ID NO: 752184 - RNA, 21 nt, Human
uaagaagggcuaaacaaaggc

SEQ ID NO: 752185 - RNA, 24 nt, Human
uaauuuuuguauuuuuaguaaaga

SEQ ID NO: 752186 - RNA, 24 nt, Human
uaguaaagacaggguuucaccaug

SEQ ID NO: 752187 - RNA, 26 nt, Human
uaguaaagacaggguuucaccauguu

SEQ ID NO: 752188 - RNA, 23 nt, Human
uauaggcgugagccaccauaccu

SEQ ID NO: 752189 - RNA, 19 nt, Human
uauucagacaauauaagca

SEQ ID NO: 752190 - RNA, 21 nt, Human
ucaaagcaaaaaagcuacuca

SEQ ID NO: 752191 - RNA, 26 nt, Human
ucaaccaggcuggaaugcaguggcac

SEQ ID NO: 752192 - RNA, 18 nt, Human
ucauugcaacccccgccu

SEQ ID NO: 752193 - RNA, 19 nt, Human
ucauugcaacccccgccuc

SEQ ID NO: 752194 - RNA, 27 nt, Human
ucauugcaacccccgccuccccgguuu

SEQ ID NO: 752195 - RNA, 22 nt, Human
uccacauguccacgccuggucu

SEQ ID NO: 752196 - RNA, 27 nt, Human
uccacauguccacgccuggucucccca

SEQ ID NO: 752197 - RNA, 22 nt, Human
uccaccaucuuccccggccgcu

SEQ ID NO: 752198 - RNA, 23 nt, Human
uccaguccaguuucucucccucu

SEQ ID NO: 752199 - RNA, 24 nt, Human
ucccaaguagcugggauaacaggc

SEQ ID NO: 752200 - RNA, 21 nt, Human
uccccgguuuaagcaauucuc

SEQ ID NO: 752201 - RNA, 25 nt, Human
uccccgguuuaagcaauucucccug

SEQ ID NO: 752202 - RNA, 21 nt, Human
ucccugaaaucuuccagaagu

SEQ ID NO: 752203 - RNA, 23 nt, Human
ucccugaaaucuuccagaaguuc

SEQ ID NO: 752204 - RNA, 24 nt, Human
ucgcaaagugcugggauuauaggc

SEQ ID NO: 752205 - RNA, 26 nt, Human
ucuaaacccaguaacaucaaagcaag

SEQ ID NO: 752206 - RNA, 24 nt, Human
ucucacucugucaaccaggcugga

SEQ ID NO: 752207 - RNA, 22 nt, Human
ugaaacaugccaccugucaccu

SEQ ID NO: 752208 - RNA, 18 nt, Human
ugacccccugaaccagcc

SEQ ID NO: 752209 - RNA, 20 nt, Human
ugaccuuaggugauccgccc

SEQ ID NO: 752210 - RNA, 21 nt, Human
ugaccuuaggugauccgcccu

SEQ ID NO: 752211 - RNA, 22 nt, Human
ugaccuuaggugauccgcccuc

SEQ ID NO: 752212 - RNA, 23 nt, Human
ugacugcagucaaagcaaaaaag

SEQ ID NO: 752213 - RNA, 20 nt, Human
ugagucacucaaacauagga

SEQ ID NO: 752214 - RNA, 24 nt, Human
ugagugacauaucaacuuggccca

SEQ ID NO: 752215 - RNA, 20 nt, Human
ugauccacagaaugucccuu

SEQ ID NO: 752216 - RNA, 18 nt, Human
ugcaccagauccuccagc

SEQ ID NO: 752217 - RNA, 22 nt, Human
ugcaguggcacgaucuuagcuc

SEQ ID NO: 752218 - RNA, 24 nt, Human
ugccuuagccucccaaguagcugg

SEQ ID NO: 752219 - RNA, 19 nt, Human
ugcuuugugaacuggucuc

SEQ ID NO: 752220 - RNA, 22 nt, Human
uggaaauacgggaucgaggcug

SEQ ID NO: 752221 - RNA, 21 nt, Human
uggaauaguccaguguaagaa

SEQ ID NO: 752222 - RNA, 24 nt, Human
uggaaugcaguggcacgaucuuag

SEQ ID NO: 752223 - RNA, 24 nt, Human
uggccaggcuggucucaaacuccu

SEQ ID NO: 752224 - RNA, 18 nt, Human
uggcgcacacccaggcag

SEQ ID NO: 752225 - RNA, 20 nt, Human
ugggaagaucacaaauuuac

SEQ ID NO: 752226 - RNA, 23 nt, Human
ugggagggcagaucuuacguauu

SEQ ID NO: 752227 - RNA, 21 nt, Human
ugggauaacaggcgcccgcca

SEQ ID NO: 752228 - RNA, 22 nt, Human
ugggauaacaggcgcccgccac

SEQ ID NO: 752229 - RNA, 25 nt, Human
ugggauaacaggcgcccgccaccau

SEQ ID NO: 752230 - RNA, 22 nt, Human
ugggauggcguagaacacuggg

SEQ ID NO: 752231 - RNA, 18 nt, Human
ugggauuauaggcgugag

SEQ ID NO: 752232 - RNA, 22 nt, Human
ugggauuauaggcgugagccac

SEQ ID NO: 752233 - RNA, 23 nt, Human
ugggauuauaggcgugagccacc

SEQ ID NO: 752234 - RNA, 24 nt, Human
ugggauuauaggcgugagccacca

SEQ ID NO: 752235 - RNA, 25 nt, Human
ugggauuauaggcgugagccaccau

SEQ ID NO: 752236 - RNA, 19 nt, Human
ugggcacugaauuuguggu

SEQ ID NO: 752237 - RNA, 20 nt, Human
uggggauggugggaggaaag

SEQ ID NO: 752238 - RNA, 18 nt, Human
ugggggagauaggaagga

SEQ ID NO: 752239 - RNA, 18 nt, Human
ugggugaagccguucucg

SEQ ID NO: 752240 - RNA, 21 nt, Human
ugucugggagaauguguguga

SEQ ID NO: 752241 - RNA, 24 nt, Human
ugucugggagaaugugugugaccu

SEQ ID NO: 752242 - RNA, 21 nt, Human
ugucuucuaaucccacuucuu

SEQ ID NO: 752243 - RNA, 18 nt, Human
ugugaggggaguccuggg

SEQ ID NO: 752244 - RNA, 24 nt, Human
uuaguaaagacaggguuucaccau

SEQ ID NO: 752245 - RNA, 18 nt, Human
uucaacuuuaaucccacc

SEQ ID NO: 752246 - RNA, 27 nt, Human
uucccugaaaucuuccagaaguuccaa

SEQ ID NO: 752247 - RNA, 23 nt, Human
uuccuccaagacagcccucuaaa

SEQ ID NO: 752248 - RNA, 21 nt, Human
uuccucuccccuccuugggcu

SEQ ID NO: 752249 - RNA, 21 nt, Human
uucucccugccuuagccuccc

SEQ ID NO: 752250 - RNA, 21 nt, Human
uucuucaaguuucaacuuuaa

SEQ ID NO: 752251 - RNA, 21 nt, Human
uucuugggagggcagaucuua

SEQ ID NO: 752252 - RNA, 24 nt, Human
uuucaccauguuggccaggcuggu

SEQ ID NO: 752253 - RNA, 24 nt, Human
uuuuuaguaaagacaggguuucac

SEQ ID NO: 752254 - RNA, 20 nt, Human
uuuuuguauuuuuaguaaag

SEQ ID NO: 752255 - RNA, 23 nt, Human
uuuuuguauuuuuaguaaagaca

SEQ ID NO: 752256 - RNA, 25 nt, Human
aaacaacccaaauguccaucaacag

SEQ ID NO: 752257 - RNA, 18 nt, Human
aaagaauucagagccuga

SEQ ID NO: 752258 - RNA, 19 nt, Human
aaagugcugggauuacagg

SEQ ID NO: 752259 - RNA, 23 nt, Human
aaagugcugggauuacaggugca

SEQ ID NO: 752260 - RNA, 21 nt, Human
aacaaagcccuaucucaaagc

SEQ ID NO: 752261 - RNA, 19 nt, Human
aacacagugaaaccccguc

SEQ ID NO: 752262 - RNA, 20 nt, Human
aacacagugaaaccccgucu

SEQ ID NO: 752263 - RNA, 21 nt, Human
aacacagugaaaccccgucuc

SEQ ID NO: 752264 - RNA, 21 nt, Human
aacacuggaaacaacccaaau

SEQ ID NO: 752265 - RNA, 21 nt, Human
aaccccgucucuaccaaaaau

SEQ ID NO: 752266 - RNA, 25 nt, Human
aacucaguaacaaaaauuaaaacua

SEQ ID NO: 752267 - RNA, 19 nt, Human
aagaacagcccgcuuuaca

SEQ ID NO: 752268 - RNA, 24 nt, Human
aagagguagcaagaggaggccagg

SEQ ID NO: 752269 - RNA, 24 nt, Human
aagugauccacccaccuuggccuc

SEQ ID NO: 752270 - RNA, 18 nt, Human
aagugcugggauuacagg

SEQ ID NO: 752271 - RNA, 19 nt, Human
aagugcugggauuacaggu

SEQ ID NO: 752272 - RNA, 26 nt, Human
aagugcugggauuacaggugcaagcc

SEQ ID NO: 752273 - RNA, 19 nt, Human
aauaacaccagauuggcac

SEQ ID NO: 752274 - RNA, 24 nt, Human
aaucucuugaaccugggaggcggg

SEQ ID NO: 752275 - RNA, 23 nt, Human
aauuuucuauacauugguacauc

SEQ ID NO: 752276 - RNA, 18 nt, Human
aauuuuguauuuuuagca

SEQ ID NO: 752277 - RNA, 22 nt, Human
acaccagauuggcacagaaaac

SEQ ID NO: 752278 - RNA, 19 nt, Human
acacuggaaacaacccaaa

SEQ ID NO: 752279 - RNA, 23 nt, Human
acagaauagauaucaaguguauc

SEQ ID NO: 752280 - RNA, 18 nt, Human
acaggugcaagccaccau

SEQ ID NO: 752281 - RNA, 24 nt, Human
accauguuggucaggcuggucucg

SEQ ID NO: 752282 - RNA, 24 nt, Human
accccgucucuaccaaaaauacaa

SEQ ID NO: 752283 - RNA, 21 nt, Human
acucugucuuugucuccucug

SEQ ID NO: 752284 - RNA, 22 nt, Human
acuggauuuugaaauaugauuu

SEQ ID NO: 752285 - RNA, 18 nt, Human
acugugaaaucucugaug

SEQ ID NO: 752286 - RNA, 20 nt, Human
agaaggcuuuccuagccuac

SEQ ID NO: 752287 - RNA, 18 nt, Human
agacuuuucugcauugga

SEQ ID NO: 752288 - RNA, 24 nt, Human
agcacuuugggaggcugaggcggg

SEQ ID NO: 752289 - RNA, 18 nt, Human
agccuccagaguagcugg

SEQ ID NO: 752290 - RNA, 24 nt, Human
agccuggccaacacagugaaaccc

SEQ ID NO: 752291 - RNA, 22 nt, Human
agcugggauuacaagcgugagc

SEQ ID NO: 752292 - RNA, 24 nt, Human
agcugggauuacaagcgugagcca

SEQ ID NO: 752293 - RNA, 22 nt, Human
aggcaggaaaaucucuugaacc

SEQ ID NO: 752294 - RNA, 24 nt, Human
aggcaggaaaaucucuugaaccug

SEQ ID NO: 752295 - RNA, 24 nt, Human
aggccaggcgugguggcucaugcc

SEQ ID NO: 752296 - RNA, 23 nt, Human
aggcgggguugcagugagccaag

SEQ ID NO: 752297 - RNA, 24 nt, Human
aggcgugguggcucaugccuguaa

SEQ ID NO: 752298 - RNA, 24 nt, Human
aggcugaggcaggaaaaucucuug

SEQ ID NO: 752299 - RNA, 20 nt, Human
aggcugaggcggguggaccg

SEQ ID NO: 752300 - RNA, 20 nt, Human
aggcugaggcggguggaccg

SEQ ID NO: 752301 - RNA, 22 nt, Human
agguucaagugauucuccagcc

SEQ ID NO: 752302 - RNA, 19 nt, Human
aguagcugggauuacaagc

SEQ ID NO: 752303 - RNA, 25 nt, Human
agugauaagaacagcccgcuuuaca

SEQ ID NO: 752304 - RNA, 19 nt, Human
agugauccacccaccuugg

SEQ ID NO: 752305 - RNA, 22 nt, Human
agugauucuccagcccagccuc

SEQ ID NO: 752306 - RNA, 21 nt, Human
auacuuuucaagacauaguua

SEQ ID NO: 752307 - RNA, 23 nt, Human
aucaguucagauucucugcaaaa

SEQ ID NO: 752308 - RNA, 19 nt, Human
auccacagacucucucuca

SEQ ID NO: 752309 - RNA, 24 nt, Human
aucgugcuauuacacuccaaccug

SEQ ID NO: 752310 - RNA, 19 nt, Human
augccuguaaucccagcac

SEQ ID NO: 752311 - RNA, 23 nt, Human
auguuguacaaggcagauuuucu

SEQ ID NO: 752312 - RNA, 18 nt, Human
auuacacuccaaccuggg

SEQ ID NO: 752313 - RNA, 23 nt, Human
auuacacuccaaccugggcaaca

SEQ ID NO: 752314 - RNA, 21 nt, Human
auuacaggugcaagccaccau

SEQ ID NO: 752315 - RNA, 18 nt, Human
caaaacacuggaaacaac

SEQ ID NO: 752316 - RNA, 24 nt, Human
caaaacacuggaaacaacccaaau

SEQ ID NO: 752317 - RNA, 24 nt, Human
caaagugcugggauuacaggugca

SEQ ID NO: 752318 - RNA, 24 nt, Human
caacacagugaaaccccgucucua

SEQ ID NO: 752319 - RNA, 21 nt, Human
caacccaaauguccaucaaca

SEQ ID NO: 752320 - RNA, 18 nt, Human
caagaggaggccaggcgu

SEQ ID NO: 752321 - RNA, 23 nt, Human
caagugauccacccaccuuggcc

SEQ ID NO: 752322 - RNA, 22 nt, Human
caauccacagacucucucucag

SEQ ID NO: 752323 - RNA, 21 nt, Human
caccauguuggucaggcuggu

SEQ ID NO: 752324 - RNA, 24 nt, Human
caccauguuggucaggcuggucuc

SEQ ID NO: 752325 - RNA, 22 nt, Human
cacccaccuuggccucccaaag

SEQ ID NO: 752326 - RNA, 23 nt, Human
cacccaccuuggccucccaaagu

SEQ ID NO: 752327 - RNA, 24 nt, Human
cacuccaaccugggcaacaagagc

SEQ ID NO: 752328 - RNA, 24 nt, Human
cagcacuuugggaggcugaggcgg

SEQ ID NO: 752329 - RNA, 24 nt, Human
cagcuacuuaggaggcugaggcag

SEQ ID NO: 752330 - RNA, 21 nt, Human
caugagacuuuuuuacuucau

SEQ ID NO: 752331 - RNA, 20 nt, Human
caugccuguaaucccagcac

SEQ ID NO: 752332 - RNA, 24 nt, Human
caugccuguaaucccagcacuuug

SEQ ID NO: 752333 - RNA, 21 nt, Human
cauugucuuccaagggugaaa

SEQ ID NO: 752334 - RNA, 21 nt, Human
ccaaagugcugggauuacagg

SEQ ID NO: 752335 - RNA, 21 nt, Human
ccaaagugcugggauuacagg

SEQ ID NO: 752336 - RNA, 22 nt, Human
ccaaagugcugggauuacaggu

SEQ ID NO: 752337 - RNA, 20 nt, Human
ccaaauauacugaauuacau

SEQ ID NO: 752338 - RNA, 18 nt, Human
ccacagaaaucauaucua

SEQ ID NO: 752339 - RNA, 19 nt, Human
ccagaguagcugggauuac

SEQ ID NO: 752340 - RNA, 23 nt, Human
ccagaguagcugggauuacaagc

SEQ ID NO: 752341 - RNA, 25 nt, Human
ccagaguagcugggauuacaagcgu

SEQ ID NO: 752342 - RNA, 21 nt, Human
ccagcccagccuccagaguag

SEQ ID NO: 752343 - RNA, 24 nt, Human
cccgaccucaagugauccacccac

SEQ ID NO: 752344 - RNA, 24 nt, Human
ccucccagguucaagugauucucc

SEQ ID NO: 752345 - RNA, 23 nt, Human
ccuggccaacacagugaaacccc

SEQ ID NO: 752346 - RNA, 24 nt, Human
ccuggccaacacagugaaaccccg

SEQ ID NO: 752347 - RNA, 21 nt, Human
ccuguaaucccagcuacuuag

SEQ ID NO: 752348 - RNA, 22 nt, Human
ccuguaaucccagcuacuuagg

SEQ ID NO: 752349 - RNA, 24 nt, Human
cuauuacacuccaaccugggcaac

SEQ ID NO: 752350 - RNA, 24 nt, Human
cucaagugauccacccaccuuggc

SEQ ID NO: 752351 - RNA, 22 nt, Human
cucacugaaaccucugccuccc

SEQ ID NO: 752352 - RNA, 23 nt, Human
cucacugaaaccucugccuccca

SEQ ID NO: 752353 - RNA, 24 nt, Human
cucacugaaaccucugccucccag

SEQ ID NO: 752354 - RNA, 23 nt, Human
cucaugccuguaaucccagcacu

SEQ ID NO: 752355 - RNA, 24 nt, Human
cucaugccuguaaucccagcacuu

SEQ ID NO: 752356 - RNA, 19 nt, Human
cucccagguucaagugauu

SEQ ID NO: 752357 - RNA, 18 nt, Human
cugaaaccucugccuccc

SEQ ID NO: 752358 - RNA, 24 nt, Human
cugaaaccucugccucccagguuc

SEQ ID NO: 752359 - RNA, 18 nt, Human
cuggccaacacagugaaa

SEQ ID NO: 752360 - RNA, 20 nt, Human
gaaccugggaggcgggguug

SEQ ID NO: 752361 - RNA, 24 nt, Human
gaccucaagugauccacccaccuu

SEQ ID NO: 752362 - RNA, 19 nt, Human
gagcguggucgugggugcc

SEQ ID NO: 752363 - RNA, 24 nt, Human
gaggaggccaggcgugguggcuca

SEQ ID NO: 752364 - RNA, 24 nt, Human
gaggcgggguugcagugagccaag

SEQ ID NO: 752365 - RNA, 27 nt, Human
gaguagcugggauuacaagcgugagcc

SEQ ID NO: 752366 - RNA, 18 nt, Human
gauuacaagcgugagcca

SEQ ID NO: 752367 - RNA, 24 nt, Human
gauuacaagcgugagccaccaugc

SEQ ID NO: 752368 - RNA, 18 nt, Human
gauuacaggugcaagcca

SEQ ID NO: 752369 - RNA, 24 nt, Human
gauuacaggugcaagccaccaugc

SEQ ID NO: 752370 - RNA, 20 nt, Human
gcaaaacacuggaaacaacc

SEQ ID NO: 752371 - RNA, 22 nt, Human
gcccagccuccagaguagcugg

SEQ ID NO: 752372 - RNA, 19 nt, Human
gcggguggaccgcccgggg

SEQ ID NO: 752373 - RNA, 21 nt, Human
gcucacugaaaccucugccuc

SEQ ID NO: 752374 - RNA, 19 nt, Human
gcuggaaugcaauggcgca

SEQ ID NO: 752375 - RNA, 23 nt, Human
gcuggucucgaacucccgaccuc

SEQ ID NO: 752376 - RNA, 19 nt, Human
ggaaucauugauaauauga

SEQ ID NO: 752377 - RNA, 24 nt, Human
ggaggccaggcgugguggcucaug

SEQ ID NO: 752378 - RNA, 24 nt, Human
ggauuacaagcgugagccaccaug

SEQ ID NO: 752379 - RNA, 24 nt, Human
ggauuacaggugcaagccaccaug

SEQ ID NO: 752380 - RNA, 18 nt, Human
ggcacagaaaacaccugu

SEQ ID NO: 752381 - RNA, 22 nt, Human
gggccucaccauguuggucagg

SEQ ID NO: 752382 - RNA, 22 nt, Human
ggggccucaccauguuggucag

SEQ ID NO: 752383 - RNA, 23 nt, Human
ggggccucaccauguuggucagg

SEQ ID NO: 752384 - RNA, 24 nt, Human
ggggggccucaccauguuggucag

SEQ ID NO: 752385 - RNA, 22 nt, Human
gggguugcagugagccaagauc

SEQ ID NO: 752386 - RNA, 23 nt, Human
gggguugcagugagccaagaucg

SEQ ID NO: 752387 - RNA, 22 nt, Human
ggguagccaggaccuguggaca

SEQ ID NO: 752388 - RNA, 24 nt, Human
ggucgugggugccuguaaucccag

SEQ ID NO: 752389 - RNA, 24 nt, Human
gguggcucaugccuguaaucccag

SEQ ID NO: 752390 - RNA, 21 nt, Human
gguugcagugagccaagaucg

SEQ ID NO: 752391 - RNA, 23 nt, Human
guccuggaaucuuccucuuucuu

SEQ ID NO: 752392 - RNA, 24 nt, Human
gugauccacccaccuuggccuccc

SEQ ID NO: 752393 - RNA, 21 nt, Human
gugcugggauuacaggugcaa

SEQ ID NO: 752394 - RNA, 23 nt, Human
guggcucaugccuguaaucccag

SEQ ID NO: 752395 - RNA, 19 nt, Human
gugggugccuguaauccca

SEQ ID NO: 752396 - RNA, 21 nt, Human
guuguacaaggcagauuuucu

SEQ ID NO: 752397 - RNA, 27 nt, Human
guuuuuuuuuuuuuuuuuuuuuugggg

SEQ ID NO: 752398 - RNA, 18 nt, Human
uaacagcaaaacacugga

SEQ ID NO: 752399 - RNA, 22 nt, Human
uaacuuggauaaacacauccaa

SEQ ID NO: 752400 - RNA, 21 nt, Human
uaagaacuaauaaauaacacc

SEQ ID NO: 752401 - RNA, 23 nt, Human
uaauuuuguauuuuuagcagaga

SEQ ID NO: 752402 - RNA, 18 nt, Human
uacaagcgugagccacca

SEQ ID NO: 752403 - RNA, 24 nt, Human
uacacaaacccuggugcauccauu

SEQ ID NO: 752404 - RNA, 23 nt, Human
uacaggugcaagccaccaugccc

SEQ ID NO: 752405 - RNA, 22 nt, Human
uagacaccuaacaacuuggaua

SEQ ID NO: 752406 - RNA, 25 nt, Human
uagcagagaggggggccucaccaug

SEQ ID NO: 752407 - RNA, 21 nt, Human
uauaacagcaaaacacuggaa

SEQ ID NO: 752408 - RNA, 18 nt, Human
uauacugaauuacauuua

SEQ ID NO: 752409 - RNA, 25 nt, Human
uauaugcauguaugcuaggagcaca

SEQ ID NO: 752410 - RNA, 23 nt, Human
uauuacacuccaaccugggcaac

SEQ ID NO: 752411 - RNA, 24 nt, Human
uauuacacuccaaccugggcaaca

SEQ ID NO: 752412 - RNA, 24 nt, Human
ucacugaaaccucugccucccagg

SEQ ID NO: 752413 - RNA, 25 nt, Human
ucacugaaaccucugccucccaggu

SEQ ID NO: 752414 - RNA, 18 nt, Human
ucacugccaucugaaacu

SEQ ID NO: 752415 - RNA, 24 nt, Human
uccacagaaaucauaucuaggucc

SEQ ID NO: 752416 - RNA, 23 nt, Human
ucccaaaggcaugaacaugucca

SEQ ID NO: 752417 - RNA, 23 nt, Human
ucccaaagugcugggauuacagg

SEQ ID NO: 752418 - RNA, 20 nt, Human
ucccaggguagccaggaccu

SEQ ID NO: 752419 - RNA, 22 nt, Human
ucccaggguagccaggaccugu

SEQ ID NO: 752420 - RNA, 21 nt, Human
ucccagguucaagugauucuc

SEQ ID NO: 752421 - RNA, 22 nt, Human
ucccagguucaagugauucucc

SEQ ID NO: 752422 - RNA, 22 nt, Human
ucgcucuuguugcccaggcugg

SEQ ID NO: 752423 - RNA, 23 nt, Human
ucgcucuuguugcccaggcugga

SEQ ID NO: 752424 - RNA, 21 nt, Human
ucucuugaaccugggaggcgg

SEQ ID NO: 752425 - RNA, 22 nt, Human
ucuuguugcccaggcuggaaug

SEQ ID NO: 752426 - RNA, 19 nt, Human
ugaaaccucugccucccag

SEQ ID NO: 752427 - RNA, 18 nt, Human
ugaaauaacaaaauuagg

SEQ ID NO: 752428 - RNA, 20 nt, Human
ugaaauaacaaaauuagggu

SEQ ID NO: 752429 - RNA, 23 nt, Human
ugaaccugggaggcgggguugca

SEQ ID NO: 752430 - RNA, 20 nt, Human
ugaggcaggaaaaucucuug

SEQ ID NO: 752431 - RNA, 24 nt, Human
ugaggcaggaaaaucucuugaacc

SEQ ID NO: 752432 - RNA, 25 nt, Human
ugaggcaggaaaaucucuugaaccu

SEQ ID NO: 752433 - RNA, 19 nt, Human
ugaggcggguggaccgccc

SEQ ID NO: 752434 - RNA, 24 nt, Human
ugauccacccaccuuggccuccca

SEQ ID NO: 752435 - RNA, 19 nt, Human
ugauucuccagcccagccu

SEQ ID NO: 752436 - RNA, 23 nt, Human
ugcaauggcgcaaucuuggcuca

SEQ ID NO: 752437 - RNA, 18 nt, Human
ugcauuggauguaucaag

SEQ ID NO: 752438 - RNA, 21 nt, Human
ugcccaggcuggaaugcaaug

SEQ ID NO: 752439 - RNA, 23 nt, Human
ugccuguaaucccagcacuuugg

SEQ ID NO: 752440 - RNA, 24 nt, Human
ugccuguaaucccagcacuuuggg

SEQ ID NO: 752441 - RNA, 24 nt, Human
ugccuguaaucccagcuacuuagg

SEQ ID NO: 752442 - RNA, 19 nt, Human
ugcuauuacacuccaaccu

SEQ ID NO: 752443 - RNA, 24 nt, Human
ugcuauuacacuccaaccugggca

SEQ ID NO: 752444 - RNA, 24 nt, Human
ugcugggauuacaggugcaagcca

SEQ ID NO: 752445 - RNA, 21 nt, Human
uggaaucauugauaauaugau

SEQ ID NO: 752446 - RNA, 24 nt, Human
uggaaugcaauggcgcaaucuugg

SEQ ID NO: 752447 - RNA, 22 nt, Human
uggcacagaaaacaccuguguu

SEQ ID NO: 752448 - RNA, 19 nt, Human
uggcucacugaaaccucug

SEQ ID NO: 752449 - RNA, 24 nt, Human
uggcucaugccuguaaucccagca

SEQ ID NO: 752450 - RNA, 23 nt, Human
ugggaggcgggguugcagugagc

SEQ ID NO: 752451 - RNA, 20 nt, Human
ugggaggcugaggcgggugg

SEQ ID NO: 752452 - RNA, 23 nt, Human
ugggaggcugaggcggguggacc

SEQ ID NO: 752453 - RNA, 24 nt, Human
ugggaggcugaggcggguggaccg

SEQ ID NO: 752454 - RNA, 18 nt, Human
ugggauuacaagcgugag

SEQ ID NO: 752455 - RNA, 22 nt, Human
ugggauuacaagcgugagccac

SEQ ID NO: 752456 - RNA, 23 nt, Human
ugggauuacaagcgugagccacc

SEQ ID NO: 752457 - RNA, 24 nt, Human
ugggauuacaagcgugagccacca

SEQ ID NO: 752458 - RNA, 25 nt, Human
ugggauuacaagcgugagccaccau

SEQ ID NO: 752459 - RNA, 22 nt, Human
ugggauuacaggugcaagccac

SEQ ID NO: 752460 - RNA, 24 nt, Human
ugggauuacaggugcaagccacca

SEQ ID NO: 752461 - RNA, 25 nt, Human
ugggauuacaggugcaagccaccau

SEQ ID NO: 752462 - RNA, 21 nt, Human
ugguaccuaguaacuuggaua

SEQ ID NO: 752463 - RNA, 23 nt, Human
uggucaggcuggucucgaacucc

SEQ ID NO: 752464 - RNA, 19 nt, Human
uggucucgaacucccgacc

SEQ ID NO: 752465 - RNA, 24 nt, Human
ugguggcucaugccuguaauccca

SEQ ID NO: 752466 - RNA, 20 nt, Human
uguaucaaguuuauuuccua

SEQ ID NO: 752467 - RNA, 22 nt, Human
uguaugcuaggagcacacugcu

SEQ ID NO: 752468 - RNA, 20 nt, Human
uguauuuuuagcagagaggg

SEQ ID NO: 752469 - RNA, 23 nt, Human
ugugaaucuagaauuauuucaaa

SEQ ID NO: 752470 - RNA, 20 nt, Human
uuaaggguaauuugcugagu

SEQ ID NO: 752471 - RNA, 23 nt, Human
uuaaucaccgaaggcacuagugc

SEQ ID NO: 752472 - RNA, 19 nt, Human
uuacacuccaaccugggca

SEQ ID NO: 752473 - RNA, 18 nt, Human
uuagcagagaggggggcc

SEQ ID NO: 752474 - RNA, 26 nt, Human
uucaagugauucuccaggacuccgug

SEQ ID NO: 752475 - RNA, 24 nt, Human
uucgcucuuguugcccaggcugga

SEQ ID NO: 752476 - RNA, 23 nt, Human
uugaaccugggaggcgggguugc

SEQ ID NO: 752477 - RNA, 22 nt, Human
uugcagugagccaagaucgugc

SEQ ID NO: 752478 - RNA, 18 nt, Human
uugcccaggcuggaaugc

SEQ ID NO: 752479 - RNA, 21 nt, Human
uuggcacagaaaacaccugug

SEQ ID NO: 752480 - RNA, 18 nt, Human
uuggccucccaaagugcu

SEQ ID NO: 752481 - RNA, 23 nt, Human
uuguauuuuuagcagagaggggg

SEQ ID NO: 752482 - RNA, 23 nt, Human
uuguugcccaggcuggaaugcaa

SEQ ID NO: 752483 - RNA, 24 nt, Human
uuucgcucuuguugcccaggcugg

SEQ ID NO: 752484 - RNA, 24 nt, Human
uuucugacauugauagcauucauc

SEQ ID NO: 752485 - RNA, 22 nt, Human
uuucugggcaaaggcuuuccca

SEQ ID NO: 752486 - RNA, 26 nt, Human
uuucuguaugaaguaaugaugaugag

SEQ ID NO: 752487 - RNA, 20 nt, Human
uuuuguauuuuuagcagaga

SEQ ID NO: 752488 - RNA, 20 nt, Human
uuuuuuuuuuugaggcagag

SEQ ID NO: 752489 - RNA, 21 nt, Human
uuuuuuuuuuuuuuuuugagg

SEQ ID NO: 752490 - RNA, 18 nt, Human
aaaaggaaacaugcuaga

SEQ ID NO: 752491 - RNA, 21 nt, Human
aaaaggaaacaugcuagaaaa

SEQ ID NO: 752492 - RNA, 22 nt, Human
aaagacaaaaaggcaacaugug

SEQ ID NO: 752493 - RNA, 20 nt, Human
aaaggugucccauggccccu

SEQ ID NO: 752494 - RNA, 22 nt, Human
aacacccuggcaugacauuccu

SEQ ID NO: 752495 - RNA, 18 nt, Human
aacucucaggccuuggcc

SEQ ID NO: 752496 - RNA, 26 nt, Human
aacuucuccaaaucucaauuuccuua

SEQ ID NO: 752497 - RNA, 18 nt, Human
aaguaaaaggaaacaugc

SEQ ID NO: 752498 - RNA, 22 nt, Human
aagugacuccgauuuucagccc

SEQ ID NO: 752499 - RNA, 22 nt, Human
aauuuguccccucuucucucug

SEQ ID NO: 752500 - RNA, 19 nt, Human
acacacacacagccucagg

SEQ ID NO: 752501 - RNA, 19 nt, Human
acaggagugggucuugucc

SEQ ID NO: 752502 - RNA, 19 nt, Human
accccgccaguggccacag

SEQ ID NO: 752503 - RNA, 19 nt, Human
acuauuccacugguuaagu

SEQ ID NO: 752504 - RNA, 24 nt, Human
acugcagugguuuuccugcagcuc

SEQ ID NO: 752505 - RNA, 22 nt, Human
agaaaacuuacuuacuucaggc

SEQ ID NO: 752506 - RNA, 20 nt, Human
agacaaaaaggcaacaugug

SEQ ID NO: 752507 - RNA, 20 nt, Human
aggugcucaggacccggaag

SEQ ID NO: 752508 - RNA, 21 nt, Human
aguaaaaggaaacaugcuaga

SEQ ID NO: 752509 - RNA, 21 nt, Human
caaccccucuucagagaaagg

SEQ ID NO: 752510 - RNA, 19 nt, Human
caaccugaauucugccucc

SEQ ID NO: 752511 - RNA, 21 nt, Human
caagaaauaccugugugacac

SEQ ID NO: 752512 - RNA, 20 nt, Human
cacaaccaaauuuguccccu

SEQ ID NO: 752513 - RNA, 24 nt, Human
cacacugcagugguuuuccugcag

SEQ ID NO: 752514 - RNA, 18 nt, Human
cacauguuccuaaggugu

SEQ ID NO: 752515 - RNA, 24 nt, Human
cagcagaguugagacuggcuccgg

SEQ ID NO: 752516 - RNA, 21 nt, Human
cagcagggcuuuaccugcccc

SEQ ID NO: 752517 - RNA, 21 nt, Human
caggucccgcacucacucucc

SEQ ID NO: 752518 - RNA, 21 nt, Human
cagguggucaauguccuggug

SEQ ID NO: 752519 - RNA, 23 nt, Human
caugcuagaaaacgugccuagag

SEQ ID NO: 752520 - RNA, 25 nt, Human
cauggccccaaaaagaacugccaag

SEQ ID NO: 752521 - RNA, 18 nt, Human
ccaaaaagaacugccaag

SEQ ID NO: 752522 - RNA, 23 nt, Human
ccaaauuuguccccucuucucuc

SEQ ID NO: 752523 - RNA, 20 nt, Human
ccacccaggguucaggcccu

SEQ ID NO: 752524 - RNA, 18 nt, Human
ccagugcccccacccagg

SEQ ID NO: 752525 - RNA, 23 nt, Human
ccagugcccccacccaggguuca

SEQ ID NO: 752526 - RNA, 18 nt, Human
cccaaaaagaacugccaa

SEQ ID NO: 752527 - RNA, 23 nt, Human
cccccccgaccccgccaguggcc

SEQ ID NO: 752528 - RNA, 20 nt, Human
ccccucuucucucugccaag

SEQ ID NO: 752529 - RNA, 21 nt, Human
ccccuggagaguuuuagccgu

SEQ ID NO: 752530 - RNA, 18 nt, Human
cccggaagaaucaucuac

SEQ ID NO: 752531 - RNA, 21 nt, Human
ccgcugcccccccccgacccc

SEQ ID NO: 752532 - RNA, 21 nt, Human
ccucacugguggugugccacu

SEQ ID NO: 752533 - RNA, 21 nt, Human
cggcuccgccgcugccccccc

SEQ ID NO: 752534 - RNA, 19 nt, Human
cuagaaaacgugccuagag

SEQ ID NO: 752535 - RNA, 24 nt, Human
cucaggacccggaagaaucaucua

SEQ ID NO: 752536 - RNA, 23 nt, Human
cuccgccgcugcccccccccgac

SEQ ID NO: 752537 - RNA, 21 nt, Human
cucugccaagaaucucuucca

SEQ ID NO: 752538 - RNA, 20 nt, Human
cucuuccaagcagugauggc

SEQ ID NO: 752539 - RNA, 21 nt, Human
cugcagugguuuuccugcagc

SEQ ID NO: 752540 - RNA, 22 nt, Human
cugccccacugagaaaacuuac

SEQ ID NO: 752541 - RNA, 24 nt, Human
cugccuccuaagugacuccgauuu

SEQ ID NO: 752542 - RNA, 21 nt, Human
cuucacaaccaaauuuguccc

SEQ ID NO: 752543 - RNA, 21 nt, Human
gaagaaucaucuaccucccag

SEQ ID NO: 752544 - RNA, 23 nt, Human
gaagcaggugcucaggacccgga

SEQ ID NO: 752545 - RNA, 22 nt, Human
gagacagaaccaaguaaaagga

SEQ ID NO: 752546 - RNA, 22 nt, Human
ggccccaaaaagaacugccaag

SEQ ID NO: 752547 - RNA, 26 nt, Human
guaaaaggaaacaugcuagaaaacgu

SEQ ID NO: 752548 - RNA, 22 nt, Human
uaaaaggaaacaugcuagaaaa

SEQ ID NO: 752549 - RNA, 21 nt, Human
uaagugacuccgauuuucagc

SEQ ID NO: 752550 - RNA, 22 nt, Human
uaccgccagaaacaggaguggg

SEQ ID NO: 752551 - RNA, 18 nt, Human
uaccugccccuggagagu

SEQ ID NO: 752552 - RNA, 22 nt, Human
uaccugccccuggagaguuuua

SEQ ID NO: 752553 - RNA, 21 nt, Human
uaccugugugacacagaccca

SEQ ID NO: 752554 - RNA, 20 nt, Human
uagccccuuagcacauguuc

SEQ ID NO: 752555 - RNA, 22 nt, Human
uagccccuuagcacauguuccu

SEQ ID NO: 752556 - RNA, 20 nt, Human
uagcugguaccgccagaaac

SEQ ID NO: 752557 - RNA, 18 nt, Human
uagugcuucugagcccag

SEQ ID NO: 752558 - RNA, 21 nt, Human
uauagugcuucugagcccagc

SEQ ID NO: 752559 - RNA, 18 nt, Human
uauccaaccccucuucag

SEQ ID NO: 752560 - RNA, 22 nt, Human
uaugagacugccccacugagaa

SEQ ID NO: 752561 - RNA, 21 nt, Human
ucaggcauccagugcccccac

SEQ ID NO: 752562 - RNA, 18 nt, Human
uccaaaacuucuucucug

SEQ ID NO: 752563 - RNA, 20 nt, Human
uccaaccccucuucagagaa

SEQ ID NO: 752564 - RNA, 20 nt, Human
uccacucacacacacacaca

SEQ ID NO: 752565 - RNA, 24 nt, Human
uccagaggaccaagaaauaccugu

SEQ ID NO: 752566 - RNA, 21 nt, Human
ucccagcagaguugagacugg

SEQ ID NO: 752567 - RNA, 18 nt, Human
ucuaccucccagcuuugu

SEQ ID NO: 752568 - RNA, 20 nt, Human
ucugccaagaaucucuucca

SEQ ID NO: 752569 - RNA, 21 nt, Human
ugaagcaaagagcugagugag

SEQ ID NO: 752570 - RNA, 19 nt, Human
ugagacuggcuccguugag

SEQ ID NO: 752571 - RNA, 18 nt, Human
ugagucacaggccagagc

SEQ ID NO: 752572 - RNA, 18 nt, Human
ugcagugguuuuccugca

SEQ ID NO: 752573 - RNA, 21 nt, Human
ugccaagaaucucuuccaagc

SEQ ID NO: 752574 - RNA, 23 nt, Human
ugccaagaaucucuuccaagcag

SEQ ID NO: 752575 - RNA, 21 nt, Human
ugccuuauccaaccccucuuc

SEQ ID NO: 752576 - RNA, 23 nt, Human
ugguagaauaaggaagacagcug

SEQ ID NO: 752577 - RNA, 18 nt, Human
uuaccugccccuggagag

SEQ ID NO: 752578 - RNA, 20 nt, Human
uuagccccuuagcacauguu

SEQ ID NO: 752579 - RNA, 20 nt, Human
uuaggggaggucaggugguc

SEQ ID NO: 752580 - RNA, 19 nt, Human
uuccaggguagcugguacc

SEQ ID NO: 752581 - RNA, 24 nt, Human
uuuauuuauuugccuguuuuuguu

SEQ ID NO: 752582 - RNA, 23 nt, Human
uuuggcucuuaagaccuagcagg

SEQ ID NO: 752583 - RNA, 19 nt, Human
aaggacaucauacucugaa

SEQ ID NO: 752584 - RNA, 21 nt, Human
acagcaacugccacauacauc

SEQ ID NO: 752585 - RNA, 19 nt, Human
aggacaucauacucugaaa

SEQ ID NO: 752586 - RNA, 24 nt, Human
caccuacagcuguggcggccaucc

SEQ ID NO: 752587 - RNA, 18 nt, Human
cagcacagguaaaaaucu

SEQ ID NO: 752588 - RNA, 21 nt, Human
cauuguaaacugcagacagca

SEQ ID NO: 752589 - RNA, 24 nt, Human
ccagcacagguaaaaaucuuuuuu

SEQ ID NO: 752590 - RNA, 25 nt, Human
cgaaccggacaaacaaggaggcuga

SEQ ID NO: 752591 - RNA, 21 nt, Human
cugcagacagcaacugccaca

SEQ ID NO: 752592 - RNA, 19 nt, Human
cuguggcggccaucccagc

SEQ ID NO: 752593 - RNA, 24 nt, Human
cuuguguacuuuauugucuucaau

SEQ ID NO: 752594 - RNA, 23 nt, Human
gccacauacaucauagaccagca

SEQ ID NO: 752595 - RNA, 22 nt, Human
gcgggaauacuggugcccuuga

SEQ ID NO: 752596 - RNA, 19 nt, Human
uaaaaaaucuucauuuaca

SEQ ID NO: 752597 - RNA, 19 nt, Human
uaacaucaagguggggaca

SEQ ID NO: 752598 - RNA, 24 nt, Human
uaccaaguaccaguuucuuauauu

SEQ ID NO: 752599 - RNA, 22 nt, Human
uagcagcaccuacagcuguggc

SEQ ID NO: 752600 - RNA, 25 nt, Human
uaugauagugaauuuuaccuuuucu

SEQ ID NO: 752601 - RNA, 21 nt, Human
ucaacgcccggcaaagaccag

SEQ ID NO: 752602 - RNA, 21 nt, Human
ucauauuguuccagagucaug

SEQ ID NO: 752603 - RNA, 24 nt, Human
uccggacauuuaaaauauugauau

SEQ ID NO: 752604 - RNA, 20 nt, Human
uggggacacaaaauaugaua

SEQ ID NO: 752605 - RNA, 19 nt, Human
uguaaacugcagacagcaa

SEQ ID NO: 752606 - RNA, 19 nt, Human
uguggcggccaucccagcg

SEQ ID NO: 752607 - RNA, 21 nt, Human
uuacauuaaaggacaucauac

SEQ ID NO: 752608 - RNA, 24 nt, Human
uucaaauauuuccauuuuuuaaac

SEQ ID NO: 752609 - RNA, 24 nt, Human
uucauauuguuccagagucaugua

SEQ ID NO: 752610 - RNA, 21 nt, Human
uucauugaaaguacaggauaa

SEQ ID NO: 752611 - RNA, 22 nt, Human
uuccagagucauguaacaucaa

SEQ ID NO: 752612 - RNA, 23 nt, Human
uuugaguuuacauuaaaggacau

SEQ ID NO: 752613 - RNA, 22 nt, Human
aaaacaguaacacugacaaaau

SEQ ID NO: 752614 - RNA, 25 nt, Human
aagaagaccaacaauaaaaguacag

SEQ ID NO: 752615 - RNA, 18 nt, Human
aagcagggcucuagggau

SEQ ID NO: 752616 - RNA, 19 nt, Human
acaaggaaauucacaacau

SEQ ID NO: 752617 - RNA, 19 nt, Human
acagugaauuuucuaagcc

SEQ ID NO: 752618 - RNA, 22 nt, Human
acucucggcaucgcugucccgg

SEQ ID NO: 752619 - RNA, 19 nt, Human
acuggcuucauggcuuuuu

SEQ ID NO: 752620 - RNA, 21 nt, Human
agaguuuuguucauggugaug

SEQ ID NO: 752621 - RNA, 21 nt, Human
agcagcgcgugguucucgugc

SEQ ID NO: 752622 - RNA, 19 nt, Human
agccgcagcuucagcucgg

SEQ ID NO: 752623 - RNA, 24 nt, Human
aggugauggcgaggacacaguagc

SEQ ID NO: 752624 - RNA, 20 nt, Human
caaaaucauccuguaucccc

SEQ ID NO: 752625 - RNA, 19 nt, Human
caacauggaaauaaacuga

SEQ ID NO: 752626 - RNA, 22 nt, Human
caacauggaaauaaacugaacc

SEQ ID NO: 752627 - RNA, 25 nt, Human
caacauggaaauaaacugaaccaaa

SEQ ID NO: 752628 - RNA, 22 nt, Human
caagaagaccaacaauaaaagu

SEQ ID NO: 752629 - RNA, 28 nt, Human
caccuccagcuccacgaucuuccggccc

SEQ ID NO: 752630 - RNA, 18 nt, Human
caccuugccgcugagcuc

SEQ ID NO: 752631 - RNA, 19 nt, Human
cacugaaucagacagucug

SEQ ID NO: 752632 - RNA, 20 nt, Human
cagaguccucccgggccuuc

SEQ ID NO: 752633 - RNA, 20 nt, Human
cagcagcgcgugguucucgu

SEQ ID NO: 752634 - RNA, 18 nt, Human
cagcuccuccugcagggg

SEQ ID NO: 752635 - RNA, 22 nt, Human
cagcuccuccugcaggggggcc

SEQ ID NO: 752636 - RNA, 24 nt, Human
caucgcugucccggggacuggggg

SEQ ID NO: 752637 - RNA, 24 nt, Human
ccaacaauaaaaguacaguacaag

SEQ ID NO: 752638 - RNA, 24 nt, Human
ccccaucacucuccuucuugcccg

SEQ ID NO: 752639 - RNA, 22 nt, Human
ccccgccaacaggcccuucccg

SEQ ID NO: 752640 - RNA, 22 nt, Human
ccccggcaccaggacuugcacc

SEQ ID NO: 752641 - RNA, 19 nt, Human
cccgcucccgaagcccgac

SEQ ID NO: 752642 - RNA, 21 nt, Human
cccgcuugggcuggggcaggc

SEQ ID NO: 752643 - RNA, 18 nt, Human
cccgggcccucccgcucc

SEQ ID NO: 752644 - RNA, 20 nt, Human
cccuucccgcuugggcuggg

SEQ ID NO: 752645 - RNA, 23 nt, Human
ccgacccgggcccucccgcuccu

SEQ ID NO: 752646 - RNA, 19 nt, Human
ccgcagcuucagcucggcc

SEQ ID NO: 752647 - RNA, 21 nt, Human
ccgcagcuucagcucggccuc

SEQ ID NO: 752648 - RNA, 22 nt, Human
ccgccaacaggcccuucccgcu

SEQ ID NO: 752649 - RNA, 23 nt, Human
ccuccaaggacgucgggucuccg

SEQ ID NO: 752650 - RNA, 19 nt, Human
ccucuucuacaaacugcag

SEQ ID NO: 752651 - RNA, 21 nt, Human
ccuguugggcagaguuuuguu

SEQ ID NO: 752652 - RNA, 18 nt, Human
ccuucccgcuugggcugg

SEQ ID NO: 752653 - RNA, 23 nt, Human
cgcauguccuccaucucugccuu

SEQ ID NO: 752654 - RNA, 20 nt, Human
cgcgugguucucgugcugca

SEQ ID NO: 752655 - RNA, 18 nt, Human
cgcucccgaagcccgacg

SEQ ID NO: 752656 - RNA, 21 nt, Human
cgcuugggcuggggcaggcga

SEQ ID NO: 752657 - RNA, 22 nt, Human
cggccucccgggugcugggggg

SEQ ID NO: 752658 - RNA, 22 nt, Human
cgggcggcuccucgccaccaug

SEQ ID NO: 752659 - RNA, 18 nt, Human
cucagaguccucccgggc

SEQ ID NO: 752660 - RNA, 18 nt, Human
cuccccaucacucuccuu

SEQ ID NO: 752661 - RNA, 21 nt, Human
cuccucgccaccaugcuccuc

SEQ ID NO: 752662 - RNA, 18 nt, Human
cucugccuugaggccacg

SEQ ID NO: 752663 - RNA, 22 nt, Human
cugacuucagcuccuccugcag

SEQ ID NO: 752664 - RNA, 21 nt, Human
cugcaggggggccccaccccc

SEQ ID NO: 752665 - RNA, 21 nt, Human
cuggagaagcagggcucuagg

SEQ ID NO: 752666 - RNA, 18 nt, Human
cuguauccccuccagcau

SEQ ID NO: 752667 - RNA, 19 nt, Human
cugugaggcagugggggaa

SEQ ID NO: 752668 - RNA, 18 nt, Human
cuucccgcucccgaagcc

SEQ ID NO: 752669 - RNA, 20 nt, Human
cuucccgcuugggcuggggc

SEQ ID NO: 752670 - RNA, 23 nt, Human
cuugcacccucuccuagccagcc

SEQ ID NO: 752671 - RNA, 20 nt, Human
gacaaaauaaaauuaacuua

SEQ ID NO: 752672 - RNA, 22 nt, Human
gacgugcaagccaaguaggaua

SEQ ID NO: 752673 - RNA, 23 nt, Human
gaggacuccagggagucaccgaa

SEQ ID NO: 752674 - RNA, 20 nt, Human
gaucuuccggcccaagaugu

SEQ ID NO: 752675 - RNA, 23 nt, Human
gaucuuccggcccaagauguugg

SEQ ID NO: 752676 - RNA, 25 nt, Human
gcucgcuggccuccgauggcuuccc

SEQ ID NO: 752677 - RNA, 20 nt, Human
gcucuagggauggagcuagu

SEQ ID NO: 752678 - RNA, 26 nt, Human
gcugaucugcagccuggcugacuuca

SEQ ID NO: 752679 - RNA, 23 nt, Human
gcuugggcuggggcaggcggcuc

SEQ ID NO: 752680 - RNA, 19 nt, Human
ggaauguggggcccaacgg

SEQ ID NO: 752681 - RNA, 19 nt, Human
ggcaccaggacuugcaccc

SEQ ID NO: 752682 - RNA, 21 nt, Human
ggcccucccgcuccugcuggc

SEQ ID NO: 752683 - RNA, 23 nt, Human
ggcucuccuccccaucacucucc

SEQ ID NO: 752684 - RNA, 21 nt, Human
gggcuggggcaggcggcucuc

SEQ ID NO: 752685 - RNA, 19 nt, Human
gggggcacgcagccccagg

SEQ ID NO: 752686 - RNA, 22 nt, Human
uacaaaaaguucacugaaucag

SEQ ID NO: 752687 - RNA, 22 nt, Human
uauaaggaucauacagugaauu

SEQ ID NO: 752688 - RNA, 26 nt, Human
uauauacaugcacccgaagacgugca

SEQ ID NO: 752689 - RNA, 23 nt, Human
uauuacaggcacauuuacuguuu

SEQ ID NO: 752690 - RNA, 22 nt, Human
ucacuacaaaaaguucacugaa

SEQ ID NO: 752691 - RNA, 23 nt, Human
ucaguggaggacuccagggaguc

SEQ ID NO: 752692 - RNA, 25 nt, Human
ucauucuagaaacaucucaguuuca

SEQ ID NO: 752693 - RNA, 22 nt, Human
uccaccguccgcucuagccgcu

SEQ ID NO: 752694 - RNA, 22 nt, Human
uccacucuaauucaacauggaa

SEQ ID NO: 752695 - RNA, 20 nt, Human
ucccgggccuucaggagcuc

SEQ ID NO: 752696 - RNA, 23 nt, Human
uccuagccagcccggcucccggg

SEQ ID NO: 752697 - RNA, 22 nt, Human
uccuccugcaggggggccccac

SEQ ID NO: 752698 - RNA, 18 nt, Human
uccucuucuacaaacugc

SEQ ID NO: 752699 - RNA, 18 nt, Human
uccuguauccccuccagc

SEQ ID NO: 752700 - RNA, 21 nt, Human
ucggagauggaccuccggagc

SEQ ID NO: 752701 - RNA, 23 nt, Human
ucggccucccgggugcugggggg

SEQ ID NO: 752702 - RNA, 21 nt, Human
ucgggccuggagaagcagggc

SEQ ID NO: 752703 - RNA, 20 nt, Human
ucgggcggcuccucgccacc

SEQ ID NO: 752704 - RNA, 20 nt, Human
ucgguguggcugcuccucgg

SEQ ID NO: 752705 - RNA, 25 nt, Human
ucugcagccuggcugacuucagcuc

SEQ ID NO: 752706 - RNA, 22 nt, Human
ugagaaaacuagaucucuccug

SEQ ID NO: 752707 - RNA, 22 nt, Human
ugagaaaacuagaucucuccug

SEQ ID NO: 752708 - RNA, 20 nt, Human
ugagcucgugggucaguugc

SEQ ID NO: 752709 - RNA, 22 nt, Human
ugagcucgugggucaguugccg

SEQ ID NO: 752710 - RNA, 20 nt, Human
ugaggcagugggggaaugug

SEQ ID NO: 752711 - RNA, 22 nt, Human
ugaggcagugggggaauguggg

SEQ ID NO: 752712 - RNA, 20 nt, Human
uggcggcggagcucagugga

SEQ ID NO: 752713 - RNA, 18 nt, Human
uggggcccaacgggacgg

SEQ ID NO: 752714 - RNA, 20 nt, Human
uguguaaaaaagauggagac

SEQ ID NO: 752715 - RNA, 20 nt, Human
uguucagaaucucuuaaaau

SEQ ID NO: 752716 - RNA, 19 nt, Human
uucagcucggccucccggg

SEQ ID NO: 752717 - RNA, 21 nt, Human
uuccuccuccaccagcuuuag

SEQ ID NO: 752718 - RNA, 20 nt, Human
uugaccuugagaaaacuaga

SEQ ID NO: 752719 - RNA, 20 nt, Human
uugcugagcucgugggucag

SEQ ID NO: 752720 - RNA, 23 nt, Human
uuggcuuccuccuccaccagcuu

SEQ ID NO: 752721 - RNA, 23 nt, Human
uuucccuuaagaaaacuuugaga

SEQ ID NO: 752722 - RNA, 24 nt, Human
uuuucuaagcccacugaggacuuu

SEQ ID NO: 752723 - RNA, 28 nt, Human
aaaaaaaaaauucacaagaauacaaaaa

SEQ ID NO: 752724 - RNA, 22 nt, Human
aaaaaaaauucacaagaauaca

SEQ ID NO: 752725 - RNA, 21 nt, Human
aaaaucuuugaccugguacca

SEQ ID NO: 752726 - RNA, 18 nt, Human
aaccacugaagaauccca

SEQ ID NO: 752727 - RNA, 28 nt, Human
aagcagaugcacaccagagcacaucccc

SEQ ID NO: 752728 - RNA, 20 nt, Human
aaggagcagacgcagcgcga

SEQ ID NO: 752729 - RNA, 22 nt, Human
acaagcagaugcacaccagagc

SEQ ID NO: 752730 - RNA, 19 nt, Human
acacuucccagaaggcucc

SEQ ID NO: 752731 - RNA, 21 nt, Human
accaaacaacgcauggcccac

SEQ ID NO: 752732 - RNA, 21 nt, Human
accacugaagaaucccaggca

SEQ ID NO: 752733 - RNA, 22 nt, Human
accauucugaagacuagggcaa

SEQ ID NO: 752734 - RNA, 20 nt, Human
agcaaaguagaacaucgaag

SEQ ID NO: 752735 - RNA, 27 nt, Human
agcagaugcacaccagagcacaucccc

SEQ ID NO: 752736 - RNA, 21 nt, Human
aggaggaucggcggagaagcu

SEQ ID NO: 752737 - RNA, 21 nt, Human
aggcuguaccaucuaaaggca

SEQ ID NO: 752738 - RNA, 18 nt, Human
aucuaaaggcaugcaagg

SEQ ID NO: 752739 - RNA, 18 nt, Human
caccagagcacaucccca

SEQ ID NO: 752740 - RNA, 21 nt, Human
cacuucccagaaggcuccaaa

SEQ ID NO: 752741 - RNA, 21 nt, Human
ccacugaagaaucccaggcac

SEQ ID NO: 752742 - RNA, 21 nt, Human
cccaggcacacuucccagaag

SEQ ID NO: 752743 - RNA, 28 nt, Human
cccucugccggugcugcacauuuuugau

SEQ ID NO: 752744 - RNA, 20 nt, Human
ccgaagccccggcugaaggc

SEQ ID NO: 752745 - RNA, 25 nt, Human
ccugaaaccacugaagaaucccagg

SEQ ID NO: 752746 - RNA, 18 nt, Human
ccuggacguggccuagaa

SEQ ID NO: 752747 - RNA, 21 nt, Human
cguaucuucccucugccggug

SEQ ID NO: 752748 - RNA, 23 nt, Human
cuagaagagcugccugcuagaaa

SEQ ID NO: 752749 - RNA, 20 nt, Human
cugccugaaaccacugaaga

SEQ ID NO: 752750 - RNA, 23 nt, Human
cugggcaauagggacaaaaaaaa

SEQ ID NO: 752751 - RNA, 21 nt, Human
gacaagcagaugcacaccaga

SEQ ID NO: 752752 - RNA, 24 nt, Human
gcacauauauuuacaaugacaucc

SEQ ID NO: 752753 - RNA, 19 nt, Human
gcacugucucccgaagccc

SEQ ID NO: 752754 - RNA, 19 nt, Human
gcggagaagcucagcagag

SEQ ID NO: 752755 - RNA, 21 nt, Human
uaaaugcacauauauuuacaa

SEQ ID NO: 752756 - RNA, 18 nt, Human
uaagaccaaacaacgcau

SEQ ID NO: 752757 - RNA, 21 nt, Human
uaagucucugcccagauuuca

SEQ ID NO: 752758 - RNA, 22 nt, Human
uaauaagucucugcccagauuu

SEQ ID NO: 752759 - RNA, 18 nt, Human
uaccaucuaaaggcaugc

SEQ ID NO: 752760 - RNA, 24 nt, Human
uagggacaaaaaaaaaaauucaca

SEQ ID NO: 752761 - RNA, 23 nt, Human
uauaagaccaaacaacgcauggc

SEQ ID NO: 752762 - RNA, 19 nt, Human
ucaaagccccagucucaac

SEQ ID NO: 752763 - RNA, 24 nt, Human
ucauaaagaaagaguaaagcaaau

SEQ ID NO: 752764 - RNA, 18 nt, Human
uccaaaguuauuuuugcu

SEQ ID NO: 752765 - RNA, 24 nt, Human
uccaaaguuauuuuugcuccuugg

SEQ ID NO: 752766 - RNA, 21 nt, Human
ucgguggcugcacugucuccc

SEQ ID NO: 752767 - RNA, 21 nt, Human
ucuuccugacaagcagaugca

SEQ ID NO: 752768 - RNA, 21 nt, Human
ucuuugaccugguaccaguug

SEQ ID NO: 752769 - RNA, 18 nt, Human
ugaccugguaccaguugg

SEQ ID NO: 752770 - RNA, 20 nt, Human
ugcaaggagcagacgcagcg

SEQ ID NO: 752771 - RNA, 23 nt, Human
ugcaaucauaaagaaagaguaaa

SEQ ID NO: 752772 - RNA, 22 nt, Human
ugcccagauuucauccugaagu

SEQ ID NO: 752773 - RNA, 18 nt, Human
ugccugaaaccacugaag

SEQ ID NO: 752774 - RNA, 22 nt, Human
ugccugcuagaaaaggaggauc

SEQ ID NO: 752775 - RNA, 24 nt, Human
ugccugcuagaaaaggaggaucgg

SEQ ID NO: 752776 - RNA, 22 nt, Human
uggaaagcaaaguagaacaucg

SEQ ID NO: 752777 - RNA, 20 nt, Human
uggccuagaagagcugccug

SEQ ID NO: 752778 - RNA, 24 nt, Human
uuaagcagcaaugugacucuuccu

SEQ ID NO: 752779 - RNA, 19 nt, Human
agcuuggugggcaaccugc

SEQ ID NO: 752780 - RNA, 19 nt, Human
agugagguggggaggggcu

SEQ ID NO: 752781 - RNA, 23 nt, Human
ccacuuuggccaaccacccuccu

SEQ ID NO: 752782 - RNA, 18 nt, Human
ccucuuccuuuucccucc

SEQ ID NO: 752783 - RNA, 24 nt, Human
ccuuuucccuccugccaagugucc

SEQ ID NO: 752784 - RNA, 19 nt, Human
cuuuggccaaccacccucc

SEQ ID NO: 752785 - RNA, 20 nt, Human
guccucuuccuuuucccucc

SEQ ID NO: 752786 - RNA, 25 nt, Human
guccucuuccuuuucccuccugcca

SEQ ID NO: 752787 - RNA, 20 nt, Human
gugggcaaccugcugggggc

SEQ ID NO: 752788 - RNA, 21 nt, Human
ugagguggggaggggcucccu

SEQ ID NO: 752789 - RNA, 23 nt, Human
ugagguggggaggggcucccuag

SEQ ID NO: 752790 - RNA, 22 nt, Human
ugccaaguguccuauucucaaa

SEQ ID NO: 752791 - RNA, 18 nt, Human
uggggaggggcucccuag

SEQ ID NO: 752792 - RNA, 22 nt, Human
ugggguccucggaggcuagguu

SEQ ID NO: 752793 - RNA, 19 nt, Human
aaacccuccucuccccuuu

SEQ ID NO: 752794 - RNA, 19 nt, Human
aagcaaaaugcagcaaccc

SEQ ID NO: 752795 - RNA, 20 nt, Human
aagcugcauguggaccucca

SEQ ID NO: 752796 - RNA, 20 nt, Human
aaucuuaggcugggaggagg

SEQ ID NO: 752797 - RNA, 19 nt, Human
acacagggguucugggcag

SEQ ID NO: 752798 - RNA, 18 nt, Human
acacagguucuuugcucc

SEQ ID NO: 752799 - RNA, 19 nt, Human
acagucgggagcagaaggc

SEQ ID NO: 752800 - RNA, 20 nt, Human
accccaccccgauuagcuca

SEQ ID NO: 752801 - RNA, 19 nt, Human
accccuccugcguccuccu

SEQ ID NO: 752802 - RNA, 22 nt, Human
acugucaccuggggcuccccac

SEQ ID NO: 752803 - RNA, 25 nt, Human
agaaaaggagaccuuugccucacgu

SEQ ID NO: 752804 - RNA, 20 nt, Human
agaaaauggagcguugggug

SEQ ID NO: 752805 - RNA, 20 nt, Human
agauggaaucuagaaacccu

SEQ ID NO: 752806 - RNA, 19 nt, Human
agcaaaaugcagcaaccca

SEQ ID NO: 752807 - RNA, 19 nt, Human
agccugcuccacugcggga

SEQ ID NO: 752808 - RNA, 18 nt, Human
agcuagugauucggggcu

SEQ ID NO: 752809 - RNA, 21 nt, Human
agcuguacacagccaggcugg

SEQ ID NO: 752810 - RNA, 18 nt, Human
aggaaaaacacggaggaa

SEQ ID NO: 752811 - RNA, 24 nt, Human
aggaugacacagguucuuugcucc

SEQ ID NO: 752812 - RNA, 26 nt, Human
aggccucugcucccagcuggccccag

SEQ ID NO: 752813 - RNA, 19 nt, Human
aggcggaugccaacagaaa

SEQ ID NO: 752814 - RNA, 21 nt, Human
aggcggcuggagcgccccugg

SEQ ID NO: 752815 - RNA, 22 nt, Human
aggcggcuggagcgccccuggc

SEQ ID NO: 752816 - RNA, 21 nt, Human
agggaagacuuaacucuccga

SEQ ID NO: 752817 - RNA, 20 nt, Human
agggccgaaggcggcucugc

SEQ ID NO: 752818 - RNA, 19 nt, Human
agucgggagcagaaggcug

SEQ ID NO: 752819 - RNA, 21 nt, Human
aguuuagucagccuugagucu

SEQ ID NO: 752820 - RNA, 18 nt, Human
auggacaagcaccccacc

SEQ ID NO: 752821 - RNA, 21 nt, Human
auuuggccacuuaggguccag

SEQ ID NO: 752822 - RNA, 23 nt, Human
caaaacagaacggaaaugcaccc

SEQ ID NO: 752823 - RNA, 19 nt, Human
caaaaugcagcaacccaca

SEQ ID NO: 752824 - RNA, 23 nt, Human
caagcaaaaugcagcaacccaca

SEQ ID NO: 752825 - RNA, 21 nt, Human
cacagccagcaagcggcccag

SEQ ID NO: 752826 - RNA, 22 nt, Human
cacaugauuccagggucccacc

SEQ ID NO: 752827 - RNA, 23 nt, Human
cacccucaucacaugaguggucc

SEQ ID NO: 752828 - RNA, 23 nt, Human
caccuccaugucuccugugaugc

SEQ ID NO: 752829 - RNA, 21 nt, Human
cacuccuuccaagccacuuug

SEQ ID NO: 752830 - RNA, 18 nt, Human
cacugccuggccaggcgg

SEQ ID NO: 752831 - RNA, 18 nt, Human
caggcggaugccaacaga

SEQ ID NO: 752832 - RNA, 20 nt, Human
cauacacgccgugcugcucc

SEQ ID NO: 752833 - RNA, 18 nt, Human
caucaucugggcaggccu

SEQ ID NO: 752834 - RNA, 22 nt, Human
caucugggcaggccuggaagcc

SEQ ID NO: 752835 - RNA, 21 nt, Human
ccaaaacagaacggaaaugca

SEQ ID NO: 752836 - RNA, 18 nt, Human
ccagcuggccccagccca

SEQ ID NO: 752837 - RNA, 23 nt, Human
ccauacacgccgugcugcuccuc

SEQ ID NO: 752838 - RNA, 24 nt, Human
cccacaagccucaggccacagccu

SEQ ID NO: 752839 - RNA, 23 nt, Human
ccccuccugcguccuccuaauuu

SEQ ID NO: 752840 - RNA, 19 nt, Human
cccuccucuccccuuuuuu

SEQ ID NO: 752841 - RNA, 18 nt, Human
ccuccucccaggaggugg

SEQ ID NO: 752842 - RNA, 20 nt, Human
ccuggggcuccccacugcac

SEQ ID NO: 752843 - RNA, 21 nt, Human
ccuugagucugggcugcuccc

SEQ ID NO: 752844 - RNA, 24 nt, Human
cgcugaucugcuugagaggcacca

SEQ ID NO: 752845 - RNA, 22 nt, Human
cgucucagauaaccacugucac

SEQ ID NO: 752846 - RNA, 19 nt, Human
cuccugcguccuccuaauu

SEQ ID NO: 752847 - RNA, 20 nt, Human
cugccggggcuggaccgguu

SEQ ID NO: 752848 - RNA, 22 nt, Human
cugcgcacauucucacagcuug

SEQ ID NO: 752849 - RNA, 18 nt, Human
cuggagccucugguuccc

SEQ ID NO: 752850 - RNA, 19 nt, Human
cuggggugggcaugacugg

SEQ ID NO: 752851 - RNA, 22 nt, Human
cugucaccuggggcuccccacu

SEQ ID NO: 752852 - RNA, 23 nt, Human
cuuugcuccuuugcagcugggau

SEQ ID NO: 752853 - RNA, 20 nt, Human
gaaaaaaggggcacagccag

SEQ ID NO: 752854 - RNA, 20 nt, Human
gaaggaagggcgggagucgc

SEQ ID NO: 752855 - RNA, 20 nt, Human
gacaagcaccccaccccgau

SEQ ID NO: 752856 - RNA, 18 nt, Human
gagcagaaggcuggggcg

SEQ ID NO: 752857 - RNA, 23 nt, Human
gagcagcuucccucucuuaccaa

SEQ ID NO: 752858 - RNA, 20 nt, Human
gagcgccccuggcaggcggg

SEQ ID NO: 752859 - RNA, 22 nt, Human
gaggagaggucugggaaaggcc

SEQ ID NO: 752860 - RNA, 21 nt, Human
gcagccccggaccaggucgcg

SEQ ID NO: 752861 - RNA, 23 nt, Human
gcauaaaacagacccauucccuu

SEQ ID NO: 752862 - RNA, 18 nt, Human
gccuccggccugcccucc

SEQ ID NO: 752863 - RNA, 24 nt, Human
gccucugguucccggcuucacugg

SEQ ID NO: 752864 - RNA, 20 nt, Human
gccuuggaggggccaggccu

SEQ ID NO: 752865 - RNA, 20 nt, Human
gcggcucugccggggcugga

SEQ ID NO: 752866 - RNA, 18 nt, Human
gcuccuuugcagcuggga

SEQ ID NO: 752867 - RNA, 19 nt, Human
gcuguggaggaugccacag

SEQ ID NO: 752868 - RNA, 20 nt, Human
ggaauucucaccagccacau

SEQ ID NO: 752869 - RNA, 18 nt, Human
ggacaagcaccccacccc

SEQ ID NO: 752870 - RNA, 20 nt, Human
ggagagagauggcagcuucu

SEQ ID NO: 752871 - RNA, 21 nt, Human
ggagaggucugggaaaggcca

SEQ ID NO: 752872 - RNA, 18 nt, Human
ggaggaggggacagaaag

SEQ ID NO: 752873 - RNA, 20 nt, Human
ggcauucgaggagaggucug

SEQ ID NO: 752874 - RNA, 21 nt, Human
ggcucuccugcuacgucuggc

SEQ ID NO: 752875 - RNA, 18 nt, Human
ggcuggagggcagacccc

SEQ ID NO: 752876 - RNA, 19 nt, Human
gggaagcugcauguggacc

SEQ ID NO: 752877 - RNA, 20 nt, Human
ggggacagaaagcugugagg

SEQ ID NO: 752878 - RNA, 18 nt, Human
gggguuugaagauggaau

SEQ ID NO: 752879 - RNA, 23 nt, Human
gggguuugaagauggaaucuaga

SEQ ID NO: 752880 - RNA, 23 nt, Human
gggugaaucuuaggcugggagga

SEQ ID NO: 752881 - RNA, 22 nt, Human
gguggaggaggggacagaaagc

SEQ ID NO: 752882 - RNA, 18 nt, Human
gguguucggcuggagggc

SEQ ID NO: 752883 - RNA, 21 nt, Human
gguucugggcagcucccugau

SEQ ID NO: 752884 - RNA, 18 nt, Human
guacacagccaggcuggu

SEQ ID NO: 752885 - RNA, 18 nt, Human
guggaaaaaaggggcaca

SEQ ID NO: 752886 - RNA, 19 nt, Human
gugguuuggaugccacugc

SEQ ID NO: 752887 - RNA, 21 nt, Human
uaaaaaauaaguuaauugaca

SEQ ID NO: 752888 - RNA, 19 nt, Human
uaaggcugaccaggaccag

SEQ ID NO: 752889 - RNA, 23 nt, Human
uaaguaaagagaaaagaaaagga

SEQ ID NO: 752890 - RNA, 18 nt, Human
uaucauugcuggucaaaa

SEQ ID NO: 752891 - RNA, 25 nt, Human
ucaaaaucggccugaggauggccgc

SEQ ID NO: 752892 - RNA, 19 nt, Human
ucaccagccacaugauucc

SEQ ID NO: 752893 - RNA, 19 nt, Human
ucccagcuggccccagccc

SEQ ID NO: 752894 - RNA, 22 nt, Human
ucccccaaagucagcauuuucc

SEQ ID NO: 752895 - RNA, 22 nt, Human
ucccugaugccagccaggccag

SEQ ID NO: 752896 - RNA, 21 nt, Human
uccugggucucgaucgcaccc

SEQ ID NO: 752897 - RNA, 22 nt, Human
ucgcugggcuaugugcugacug

SEQ ID NO: 752898 - RNA, 21 nt, Human
ucuacuagaacuggguguccu

SEQ ID NO: 752899 - RNA, 24 nt, Human
ucuagaaacccuccucuccccuuu

SEQ ID NO: 752900 - RNA, 24 nt, Human
ucuagaaacccuccucuccccuuu

SEQ ID NO: 752901 - RNA, 20 nt, Human
ucucagauaaccacugucac

SEQ ID NO: 752902 - RNA, 23 nt, Human
ucucagauaaccacugucaccuu

SEQ ID NO: 752903 - RNA, 20 nt, Human
ucuccgagagaaaaccugcc

SEQ ID NO: 752904 - RNA, 21 nt, Human
ucugcaaaggcucggguccac

SEQ ID NO: 752905 - RNA, 24 nt, Human
ucugcuguuggccuggcccaaaac

SEQ ID NO: 752906 - RNA, 18 nt, Human
ugaagaagacagugcccc

SEQ ID NO: 752907 - RNA, 19 nt, Human
ugagugggagguccaggug

SEQ ID NO: 752908 - RNA, 23 nt, Human
ugagugggagguccaggugggcc

SEQ ID NO: 752909 - RNA, 18 nt, Human
ugccaggccuccucagau

SEQ ID NO: 752910 - RNA, 19 nt, Human
ugcuggggugggcaugacu

SEQ ID NO: 752911 - RNA, 20 nt, Human
uggcccaaaacagaacggaa

SEQ ID NO: 752912 - RNA, 21 nt, Human
uggcccaaaacagaacggaaa

SEQ ID NO: 752913 - RNA, 21 nt, Human
ugggaaaggccacgcaggcag

SEQ ID NO: 752914 - RNA, 19 nt, Human
ugggagagagauggcagcu

SEQ ID NO: 752915 - RNA, 18 nt, Human
ugggagguccaggugggc

SEQ ID NO: 752916 - RNA, 19 nt, Human
ugggaugaauguucaaguu

SEQ ID NO: 752917 - RNA, 24 nt, Human
ugggcagcucccugaugccagcca

SEQ ID NO: 752918 - RNA, 18 nt, Human
ugggcaggccuggaagcc

SEQ ID NO: 752919 - RNA, 24 nt, Human
ugugcugacugcuuugauggacaa

SEQ ID NO: 752920 - RNA, 21 nt, Human
uugacaaaaaggguuugaagc

SEQ ID NO: 752921 - RNA, 18 nt, Human
uuggaugccacugccugg

SEQ ID NO: 752922 - RNA, 18 nt, Human
uuugcaaacuguuucccu

SEQ ID NO: 752923 - RNA, 21 nt, Human
aaaaaucacuuccuagcaguc

SEQ ID NO: 752924 - RNA, 20 nt, Human
aaaauuugacccaaaaaagg

SEQ ID NO: 752925 - RNA, 19 nt, Human
aaagaggagcuaaauaggg

SEQ ID NO: 752926 - RNA, 19 nt, Human
aaauauccugauaccacac

SEQ ID NO: 752927 - RNA, 22 nt, Human
aaauccugaaagugccaagaag

SEQ ID NO: 752928 - RNA, 23 nt, Human
aacuuuuuuucccccaguuuggg

SEQ ID NO: 752929 - RNA, 26 nt, Human
aagcaaaagaaaaauuugacccaaaa

SEQ ID NO: 752930 - RNA, 21 nt, Human
aagcaagugccaaagaugaca

SEQ ID NO: 752931 - RNA, 24 nt, Human
aaguaaacauucuccaugucagcc

SEQ ID NO: 752932 - RNA, 21 nt, Human
aaguuucaccuacacagcacc

SEQ ID NO: 752933 - RNA, 22 nt, Human
acaaaaccacauuuagcacaaa

SEQ ID NO: 752934 - RNA, 24 nt, Human
acaaaaccacauuuagcacaaagc

SEQ ID NO: 752935 - RNA, 25 nt, Human
acagcaccacauaauuuuaaacaua

SEQ ID NO: 752936 - RNA, 24 nt, Human
acauaauuuuaaacauagcaacca

SEQ ID NO: 752937 - RNA, 19 nt, Human
accacacauacuaaguaca

SEQ ID NO: 752938 - RNA, 21 nt, Human
agacaacagaauuacugucau

SEQ ID NO: 752939 - RNA, 21 nt, Human
agacaagcaagcaaaacaaag

SEQ ID NO: 752940 - RNA, 24 nt, Human
agacgucggagcccgccgccagcc

SEQ ID NO: 752941 - RNA, 19 nt, Human
agagcaaacagugcagacu

SEQ ID NO: 752942 - RNA, 23 nt, Human
agauacaaaugucuauggacauu

SEQ ID NO: 752943 - RNA, 22 nt, Human
agcaaaacacaaaaccacauuu

SEQ ID NO: 752944 - RNA, 21 nt, Human
agcaagugccaaagaugacaa

SEQ ID NO: 752945 - RNA, 20 nt, Human
agccucuaaaagguuagcag

SEQ ID NO: 752946 - RNA, 24 nt, Human
aggaaauuaaaguuaaguuaacau

SEQ ID NO: 752947 - RNA, 18 nt, Human
aggcaaaugauccccaaa

SEQ ID NO: 752948 - RNA, 18 nt, Human
aggcaaaugauccccaaa

SEQ ID NO: 752949 - RNA, 23 nt, Human
aguaaagaacaaaaauguaccca

SEQ ID NO: 752950 - RNA, 20 nt, Human
auaaagccucuaaaagguua

SEQ ID NO: 752951 - RNA, 18 nt, Human
auaauuccaauuagagac

SEQ ID NO: 752952 - RNA, 24 nt, Human
aucuugcacauugguuccauucac

SEQ ID NO: 752953 - RNA, 23 nt, Human
augaguucaacaguuagagaccu

SEQ ID NO: 752954 - RNA, 18 nt, Human
caaaacucauggcuuaag

SEQ ID NO: 752955 - RNA, 23 nt, Human
caaaagaaaaauuugacccaaaa

SEQ ID NO: 752956 - RNA, 22 nt, Human
caaacugguagcagacaaggca

SEQ ID NO: 752957 - RNA, 24 nt, Human
caaagcaaaagaaaaauuugaccc

SEQ ID NO: 752958 - RNA, 20 nt, Human
caaaggaagaagcaaaggga

SEQ ID NO: 752959 - RNA, 21 nt, Human
caagcaagcaaaacaaaggcu

SEQ ID NO: 752960 - RNA, 24 nt, Human
cacacacaaauagcagugcauaua

SEQ ID NO: 752961 - RNA, 19 nt, Human
cagagguuuuacuucuuac

SEQ ID NO: 752962 - RNA, 20 nt, Human
caugcaauauuuagcaugug

SEQ ID NO: 752963 - RNA, 18 nt, Human
cauuaccauguugucaug

SEQ ID NO: 752964 - RNA, 19 nt, Human
ccaauauaccaguaugaac

SEQ ID NO: 752965 - RNA, 19 nt, Human
ccauagaggaaaaaugacu

SEQ ID NO: 752966 - RNA, 18 nt, Human
cccaaaaaagggaaagua

SEQ ID NO: 752967 - RNA, 18 nt, Human
ccgccgccagcccgccgc

SEQ ID NO: 752968 - RNA, 20 nt, Human
ccgccgccagcccgccgcuu

SEQ ID NO: 752969 - RNA, 21 nt, Human
ccgccgccagcccgccgcuug

SEQ ID NO: 752970 - RNA, 18 nt, Human
ccgcgcugcccuggcugc

SEQ ID NO: 752971 - RNA, 27 nt, Human
ccgcgcugcccuggcugcugcugcugc

SEQ ID NO: 752972 - RNA, 21 nt, Human
cgggcucagccagccaggucc

SEQ ID NO: 752973 - RNA, 20 nt, Human
cuagaaaacuuguccaaagc

SEQ ID NO: 752974 - RNA, 24 nt, Human
cuagaagacucauuugagcuuuuu

SEQ ID NO: 752975 - RNA, 27 nt, Human
cucacacauacacacauucuuacauau

SEQ ID NO: 752976 - RNA, 20 nt, Human
cugcugcugcugcgccgggg

SEQ ID NO: 752977 - RNA, 22 nt, Human
cuuacauauauacaaagacaca

SEQ ID NO: 752978 - RNA, 20 nt, Human
cuucaaacaaagcaaaagaa

SEQ ID NO: 752979 - RNA, 24 nt, Human
cuuuuauucacuguugcauaugcu

SEQ ID NO: 752980 - RNA, 23 nt, Human
gaaaguaaaaauagacaagcaag

SEQ ID NO: 752981 - RNA, 19 nt, Human
gacaccccuacucagugaa

SEQ ID NO: 752982 - RNA, 26 nt, Human
gcaaaagaaaaauuugacccaaaaaa

SEQ ID NO: 752983 - RNA, 19 nt, Human
gccgcgcugcccuggcugc

SEQ ID NO: 752984 - RNA, 18 nt, Human
gcucauauuaauuaaaga

SEQ ID NO: 752985 - RNA, 22 nt, Human
ggaaaauuuugaaauacagcaa

SEQ ID NO: 752986 - RNA, 18 nt, Human
ggccuggugugcaugcug

SEQ ID NO: 752987 - RNA, 19 nt, Human
gggaauccuaaaaacaaga

SEQ ID NO: 752988 - RNA, 24 nt, Human
guggauucagauacaaaugucuau

SEQ ID NO: 752989 - RNA, 21 nt, Human
uaaaaauagacaagcaagcaa

SEQ ID NO: 752990 - RNA, 19 nt, Human
uaaaaaugcaguauguauc

SEQ ID NO: 752991 - RNA, 24 nt, Human
uaaaacuauauuuaccuaucaaau

SEQ ID NO: 752992 - RNA, 21 nt, Human
uaaaagcaagugccaaagaug

SEQ ID NO: 752993 - RNA, 25 nt, Human
uaaagaacaaaaauguacccacaaa

SEQ ID NO: 752994 - RNA, 23 nt, Human
uaaagaaucagcagagaagacaa

SEQ ID NO: 752995 - RNA, 18 nt, Human
uaaagauaggucuccaga

SEQ ID NO: 752996 - RNA, 21 nt, Human
uaacaaaaaaagaagcuuuua

SEQ ID NO: 752997 - RNA, 21 nt, Human
uaacacaaaucaaguaguacu

SEQ ID NO: 752998 - RNA, 20 nt, Human
uaacagaaggaaaauuuuga

SEQ ID NO: 752999 - RNA, 23 nt, Human
uaauaauaguaaaacuggaguua

SEQ ID NO: 753000 - RNA, 20 nt, Human
uaauauacuuuagaauaaag

SEQ ID NO: 753001 - RNA, 24 nt, Human
uacauauauuuauauauauacaca

SEQ ID NO: 753002 - RNA, 20 nt, Human
uaccucgugcuucuggaaaa

SEQ ID NO: 753003 - RNA, 26 nt, Human
uacuagaguuucagacuucauucaac

SEQ ID NO: 753004 - RNA, 26 nt, Human
uagacaacagaauuacugucauccua

SEQ ID NO: 753005 - RNA, 25 nt, Human
uagagcaaacagugcagacuuuucc

SEQ ID NO: 753006 - RNA, 18 nt, Human
uagcacaaagccaaaccc

SEQ ID NO: 753007 - RNA, 21 nt, Human
uagcaugaagcaaaacacauu

SEQ ID NO: 753008 - RNA, 19 nt, Human
uagccuagaaaacuugucc

SEQ ID NO: 753009 - RNA, 20 nt, Human
uauaaaacacggcuaaaagc

SEQ ID NO: 753010 - RNA, 23 nt, Human
uauacaguuacacugagccuguu

SEQ ID NO: 753011 - RNA, 23 nt, Human
uauacauauauuuauauauauac

SEQ ID NO: 753012 - RNA, 27 nt, Human
uauuacugccuaagaucaguggaagga

SEQ ID NO: 753013 - RNA, 21 nt, Human
uauuuaccuaucaaauaaaca

SEQ ID NO: 753014 - RNA, 19 nt, Human
ucaauauaaccuaccauga

SEQ ID NO: 753015 - RNA, 21 nt, Human
ucaauauaaccuaccaugagg

SEQ ID NO: 753016 - RNA, 19 nt, Human
ucagaaaaauccacuacuu

SEQ ID NO: 753017 - RNA, 20 nt, Human
uccucucucuugcucucaca

SEQ ID NO: 753018 - RNA, 21 nt, Human
ucucauaucugaagaauuacg

SEQ ID NO: 753019 - RNA, 19 nt, Human
ucucuuauauuuucagcaa

SEQ ID NO: 753020 - RNA, 22 nt, Human
ucucuuauauuuucagcaaauu

SEQ ID NO: 753021 - RNA, 21 nt, Human
ucugaggagauuccugucacu

SEQ ID NO: 753022 - RNA, 18 nt, Human
ucuguuguauuaucacag

SEQ ID NO: 753023 - RNA, 27 nt, Human
ucuuacauauauacaaagacacacaca

SEQ ID NO: 753024 - RNA, 23 nt, Human
ucuucaaaaucaucuagauucau

SEQ ID NO: 753025 - RNA, 25 nt, Human
ucuuguauuuucugauuuuuaccaa

SEQ ID NO: 753026 - RNA, 27 nt, Human
ugaaauacagcaaaacacaaaaccagu

SEQ ID NO: 753027 - RNA, 19 nt, Human
ugaaauacugcaacuguaa

SEQ ID NO: 753028 - RNA, 19 nt, Human
ugaaauagugucaugggac

SEQ ID NO: 753029 - RNA, 26 nt, Human
ugacaaaugccauuguuuauuacugc

SEQ ID NO: 753030 - RNA, 19 nt, Human
ugaguuuccucucucuugc

SEQ ID NO: 753031 - RNA, 19 nt, Human
ugauuaacaaaaaaagaag

SEQ ID NO: 753032 - RNA, 18 nt, Human
ugcauauauuacauaugc

SEQ ID NO: 753033 - RNA, 22 nt, Human
ugccauuucuacugacuucauu

SEQ ID NO: 753034 - RNA, 21 nt, Human
ugcccuggcugcugcugcugc

SEQ ID NO: 753035 - RNA, 23 nt, Human
uggguguaaacuacacaggaaau

SEQ ID NO: 753036 - RNA, 22 nt, Human
ugguuggggggaauaauuuuua

SEQ ID NO: 753037 - RNA, 22 nt, Human
uguauaucaacuuggcuuuuua

SEQ ID NO: 753038 - RNA, 20 nt, Human
uuaaaugugauuaucccaua

SEQ ID NO: 753039 - RNA, 21 nt, Human
uuaaggaguccuaauuuuaaa

SEQ ID NO: 753040 - RNA, 24 nt, Human
uuacaaauuagcacguaaagagug

SEQ ID NO: 753041 - RNA, 19 nt, Human
uuacaguuacaucacagga

SEQ ID NO: 753042 - RNA, 23 nt, Human
uucaaagggagacauuucaguug

SEQ ID NO: 753043 - RNA, 21 nt, Human
uuggggcagugcaacuguggg

SEQ ID NO: 753044 - RNA, 25 nt, Human
uuuacaguuuauuuucccaaauccu

SEQ ID NO: 753045 - RNA, 23 nt, Human
uuucccccaguuugggguuuggg

SEQ ID NO: 753046 - RNA, 22 nt, Human
uuuuaaaacauuucauaaugag

SEQ ID NO: 753047 - RNA, 21 nt, Human
uuuuauaaaaagaucucacug

SEQ ID NO: 753048 - RNA, 25 nt, Human
aaaccaccagccaccaccgcccagu

SEQ ID NO: 753049 - RNA, 18 nt, Human
aaggagcuucagagaaag

SEQ ID NO: 753050 - RNA, 22 nt, Human
aaguucucccuccucacucccc

SEQ ID NO: 753051 - RNA, 19 nt, Human
accaccgcccagucccccu

SEQ ID NO: 753052 - RNA, 19 nt, Human
acccgggccccccgcccgg

SEQ ID NO: 753053 - RNA, 22 nt, Human
acccuggcaccucaggccccca

SEQ ID NO: 753054 - RNA, 20 nt, Human
acccugucugugaacccugg

SEQ ID NO: 753055 - RNA, 24 nt, Human
agagcccugcccaggguucccucc

SEQ ID NO: 753056 - RNA, 23 nt, Human
agcaauggggaaggaggaggaga

SEQ ID NO: 753057 - RNA, 19 nt, Human
agcgcaggaggaaccuguc

SEQ ID NO: 753058 - RNA, 22 nt, Human
agcgccucucuggggucggccc

SEQ ID NO: 753059 - RNA, 19 nt, Human
aggaggagagaggaaggag

SEQ ID NO: 753060 - RNA, 21 nt, Human
caagagcaaggggaaaggagc

SEQ ID NO: 753061 - RNA, 21 nt, Human
caagcccaggacccacucccc

SEQ ID NO: 753062 - RNA, 18 nt, Human
caccaccgcccagucccc

SEQ ID NO: 753063 - RNA, 20 nt, Human
caccacggccuggaccaccg

SEQ ID NO: 753064 - RNA, 19 nt, Human
caccagagcccugcccagg

SEQ ID NO: 753065 - RNA, 18 nt, Human
caccccugugggcugggg

SEQ ID NO: 753066 - RNA, 19 nt, Human
caccgcccagucccccugc

SEQ ID NO: 753067 - RNA, 26 nt, Human
caccgccgccgaccaaaaauuaggaa

SEQ ID NO: 753068 - RNA, 21 nt, Human
caccucaggcccccagguuag

SEQ ID NO: 753069 - RNA, 18 nt, Human
cacugcucccucugggug

SEQ ID NO: 753070 - RNA, 21 nt, Human
cagagcccugcccaggguucc

SEQ ID NO: 753071 - RNA, 21 nt, Human
cagccaccaccgcccaguccc

SEQ ID NO: 753072 - RNA, 22 nt, Human
cagcgugucucuccugcggcuc

SEQ ID NO: 753073 - RNA, 20 nt, Human
caggacccacuccccaggga

SEQ ID NO: 753074 - RNA, 24 nt, Human
caggcccccagguuagaguccccu

SEQ ID NO: 753075 - RNA, 19 nt, Human
caggguucccucccuggcc

SEQ ID NO: 753076 - RNA, 20 nt, Human
cagucccccugcccugcggc

SEQ ID NO: 753077 - RNA, 22 nt, Human
cagucccccugcccugcggccu

SEQ ID NO: 753078 - RNA, 20 nt, Human
caguggccugugcggggggc

SEQ ID NO: 753079 - RNA, 23 nt, Human
caucaccuggcaggcaccacggc

SEQ ID NO: 753080 - RNA, 18 nt, Human
cauugggugcacugggag

SEQ ID NO: 753081 - RNA, 20 nt, Human
ccaccagccacugccuccau

SEQ ID NO: 753082 - RNA, 24 nt, Human
cccacaggacugggaacugcccaa

SEQ ID NO: 753083 - RNA, 24 nt, Human
cccagcaccgccgccgaccaaaaa

SEQ ID NO: 753084 - RNA, 18 nt, Human
ccccagauagccgagccc

SEQ ID NO: 753085 - RNA, 19 nt, Human
ccccgcccggcacaucucc

SEQ ID NO: 753086 - RNA, 20 nt, Human
ccccgcccggcacaucuccc

SEQ ID NO: 753087 - RNA, 24 nt, Human
ccccucccugcccaggaaacuaaa

SEQ ID NO: 753088 - RNA, 18 nt, Human
ccccuggcccagcaccgc

SEQ ID NO: 753089 - RNA, 25 nt, Human
cccggagccggggcuggggggaagc

SEQ ID NO: 753090 - RNA, 20 nt, Human
cccucucccaccagagcccu

SEQ ID NO: 753091 - RNA, 23 nt, Human
cccugcccaggguucccucccug

SEQ ID NO: 753092 - RNA, 23 nt, Human
ccggagcucucaguggccugugc

SEQ ID NO: 753093 - RNA, 19 nt, Human
ccggcagcauuucuggcug

SEQ ID NO: 753094 - RNA, 19 nt, Human
ccucacuacacuuccccca

SEQ ID NO: 753095 - RNA, 20 nt, Human
ccuggccugggccaccagcc

SEQ ID NO: 753096 - RNA, 20 nt, Human
cggcccagcgugucucuccu

SEQ ID NO: 753097 - RNA, 23 nt, Human
cggccuccgugucccuuccuucc

SEQ ID NO: 753098 - RNA, 23 nt, Human
cggccuuuucccagucuccaggg

SEQ ID NO: 753099 - RNA, 19 nt, Human
cucacuacacuucccccaa

SEQ ID NO: 753100 - RNA, 22 nt, Human
cucacuacacuucccccaaaua

SEQ ID NO: 753101 - RNA, 23 nt, Human
cuccccugggguccucugggcuc

SEQ ID NO: 753102 - RNA, 21 nt, Human
cucccucucccaccagagccc

SEQ ID NO: 753103 - RNA, 18 nt, Human
cucugggcuccuccucac

SEQ ID NO: 753104 - RNA, 23 nt, Human
cugccccucccugcccaggaaac

SEQ ID NO: 753105 - RNA, 19 nt, Human
gaagcugccccucccugcc

SEQ ID NO: 753106 - RNA, 24 nt, Human
gacccaaaaucugcuccccagaua

SEQ ID NO: 753107 - RNA, 18 nt, Human
gagccggggcugggggga

SEQ ID NO: 753108 - RNA, 21 nt, Human
gagccggggcuggggggaagc

SEQ ID NO: 753109 - RNA, 20 nt, Human
gaguaagagggcccccuagg

SEQ ID NO: 753110 - RNA, 24 nt, Human
gagucgccccaagggaggggguca

SEQ ID NO: 753111 - RNA, 21 nt, Human
gcccaggacccacuccccagg

SEQ ID NO: 753112 - RNA, 18 nt, Human
gcccaggguucccucccu

SEQ ID NO: 753113 - RNA, 22 nt, Human
gcccaggguucccucccuggcc

SEQ ID NO: 753114 - RNA, 21 nt, Human
gcgaacccgggccccccgccc

SEQ ID NO: 753115 - RNA, 20 nt, Human
gcggccuuuucccagucucc

SEQ ID NO: 753116 - RNA, 22 nt, Human
gcggcucggcgaacccgggccc

SEQ ID NO: 753117 - RNA, 20 nt, Human
ggaaggaggaggagagagga

SEQ ID NO: 753118 - RNA, 24 nt, Human
ggaggagagaggaaggaguaagag

SEQ ID NO: 753119 - RNA, 24 nt, Human
ggcagccgggugcguguccggagc

SEQ ID NO: 753120 - RNA, 20 nt, Human
ggcucggcgaacccgggccc

SEQ ID NO: 753121 - RNA, 21 nt, Human
gggaaggaggaggagagagga

SEQ ID NO: 753122 - RNA, 22 nt, Human
gggaggcagagggggcagguuu

SEQ ID NO: 753123 - RNA, 23 nt, Human
gggcagggaccaagagcaagggg

SEQ ID NO: 753124 - RNA, 18 nt, Human
gggcggccuccguguccc

SEQ ID NO: 753125 - RNA, 19 nt, Human
gggcugggggcccugcggg

SEQ ID NO: 753126 - RNA, 21 nt, Human
ggggacuguagggcccauggc

SEQ ID NO: 753127 - RNA, 23 nt, Human
gguaggagguggcgggacgaggg

SEQ ID NO: 753128 - RNA, 20 nt, Human
gucccuuccuuccccuggcc

SEQ ID NO: 753129 - RNA, 18 nt, Human
gugcguguggcugguggg

SEQ ID NO: 753130 - RNA, 20 nt, Human
uaaagcccucauuucccuuc

SEQ ID NO: 753131 - RNA, 26 nt, Human
uaacagguuccauccagugggggccu

SEQ ID NO: 753132 - RNA, 21 nt, Human
uacagcaauggggaaggagga

SEQ ID NO: 753133 - RNA, 30 nt, Human
uagggaaagauccaagcccaggacccacuu

SEQ ID NO: 753134 - RNA, 27 nt, Human
ucacuacacuucccccaaagggcccuc

SEQ ID NO: 753135 - RNA, 22 nt, Human
ucauugggugcacugggaggca

SEQ ID NO: 753136 - RNA, 19 nt, Human
uccccagauagccgagccc

SEQ ID NO: 753137 - RNA, 21 nt, Human
uccccagauagccgagcccac

SEQ ID NO: 753138 - RNA, 20 nt, Human
uccccuggcccagcaccgcc

SEQ ID NO: 753139 - RNA, 22 nt, Human
uccucugggcuccuccucacua

SEQ ID NO: 753140 - RNA, 19 nt, Human
ucucccggagccggggcug

SEQ ID NO: 753141 - RNA, 19 nt, Human
ucucuggggucggcccagc

SEQ ID NO: 753142 - RNA, 19 nt, Human
ugcccaggaaacuaaagcc

SEQ ID NO: 753143 - RNA, 25 nt, Human
ugcccugcggccuuuucccagucuc

SEQ ID NO: 753144 - RNA, 25 nt, Human
ugccuccaucugucucccucuccca

SEQ ID NO: 753145 - RNA, 22 nt, Human
ugcggagaggagcagcuaacag

SEQ ID NO: 753146 - RNA, 21 nt, Human
ugcguguggcuggugggaaac

SEQ ID NO: 753147 - RNA, 26 nt, Human
uggaagugggcugcacccuuccaagu

SEQ ID NO: 753148 - RNA, 24 nt, Human
uggcugaggggcaccuggagagag

SEQ ID NO: 753149 - RNA, 21 nt, Human
uggcugcggagaggagcagcu

SEQ ID NO: 753150 - RNA, 20 nt, Human
uggcuggugggaaacccugu

SEQ ID NO: 753151 - RNA, 19 nt, Human
ugggaggcagagggggcag

SEQ ID NO: 753152 - RNA, 20 nt, Human
ugggaggcagagggggcagg

SEQ ID NO: 753153 - RNA, 19 nt, Human
uggggaaggaggaggagag

SEQ ID NO: 753154 - RNA, 19 nt, Human
uguccggagcucucagugg

SEQ ID NO: 753155 - RNA, 22 nt, Human
uuaggaaaaaaaaaaaaaaaaa

SEQ ID NO: 753156 - RNA, 23 nt, Human
uuccaaguucucccuccucacuc

SEQ ID NO: 753157 - RNA, 22 nt, Human
uuuuuuuuuuucuuuuccauuu

SEQ ID NO: 753158 - RNA, 23 nt, Human
aaaaaaaaaagauauuuucaaag

SEQ ID NO: 753159 - RNA, 25 nt, Human
aaaaauauauucucuccaaaggaau

SEQ ID NO: 753160 - RNA, 24 nt, Human
aaagugcugggauuacaggcguga

SEQ ID NO: 753161 - RNA, 23 nt, Human
aacaaaaguaagcccaaugccau

SEQ ID NO: 753162 - RNA, 18 nt, Human
aacauuuuaaaaagagau

SEQ ID NO: 753163 - RNA, 24 nt, Human
aaccuuuggagaugacauaaaaug

SEQ ID NO: 753164 - RNA, 21 nt, Human
aagaaaacugauucagaaaac

SEQ ID NO: 753165 - RNA, 20 nt, Human
aaggagaauggacggcaaag

SEQ ID NO: 753166 - RNA, 19 nt, Human
aagugcugggauuacaggc

SEQ ID NO: 753167 - RNA, 19 nt, Human
aagugcugggauuacaggc

SEQ ID NO: 753168 - RNA, 24 nt, Human
aauggcgucuuggcucacugccau

SEQ ID NO: 753169 - RNA, 18 nt, Human
aauucagguuccaaagca

SEQ ID NO: 753170 - RNA, 24 nt, Human
aauuuuguauuuuuaguagaaacg

SEQ ID NO: 753171 - RNA, 18 nt, Human
acagcagugaaguuuuaa

SEQ ID NO: 753172 - RNA, 18 nt, Human
acucauugcccaggcugg

SEQ ID NO: 753173 - RNA, 21 nt, Human
acucauugcccaggcuggggu

SEQ ID NO: 753174 - RNA, 28 nt, Human
acucauugcccaggcuggggugcaaugg

SEQ ID NO: 753175 - RNA, 20 nt, Human
acuggucccuggugccaaaa

SEQ ID NO: 753176 - RNA, 20 nt, Human
agaaaacaaaaguaagccca

SEQ ID NO: 753177 - RNA, 20 nt, Human
agaaucacaaaauacuuuuc

SEQ ID NO: 753178 - RNA, 20 nt, Human
agacuacaucagaaacacaa

SEQ ID NO: 753179 - RNA, 18 nt, Human
agaguugaaaggagaaug

SEQ ID NO: 753180 - RNA, 18 nt, Human
agcugagguaauguaugc

SEQ ID NO: 753181 - RNA, 19 nt, Human
aggagaauggacggcaaag

SEQ ID NO: 753182 - RNA, 20 nt, Human
aggagaauggacggcaaagg

SEQ ID NO: 753183 - RNA, 25 nt, Human
aggagcacaaauccuauugugaacu

SEQ ID NO: 753184 - RNA, 19 nt, Human
aggcuggggugcaauggcg

SEQ ID NO: 753185 - RNA, 23 nt, Human
aguagcugggauugcaggcacau

SEQ ID NO: 753186 - RNA, 24 nt, Human
agugauucuccugccucagccucc

SEQ ID NO: 753187 - RNA, 18 nt, Human
agugcugggauuacaggc

SEQ ID NO: 753188 - RNA, 24 nt, Human
auaaaguuaucuauugcuaguuua

SEQ ID NO: 753189 - RNA, 19 nt, Human
auagaacaaagacagccuu

SEQ ID NO: 753190 - RNA, 20 nt, Human
auagcagcuuuauucaucga

SEQ ID NO: 753191 - RNA, 18 nt, Human
aucuaccuauacuauggc

SEQ ID NO: 753192 - RNA, 19 nt, Human
auggagccuaggaaauauu

SEQ ID NO: 753193 - RNA, 19 nt, Human
auucaauaaagacuacauc

SEQ ID NO: 753194 - RNA, 22 nt, Human
auuguuagcaaauuuauuucuu

SEQ ID NO: 753195 - RNA, 20 nt, Human
caaaacauaaucugugauaa

SEQ ID NO: 753196 - RNA, 20 nt, Human
caaaauacuuuucacaucuu

SEQ ID NO: 753197 - RNA, 23 nt, Human
caacauagaacaaagacagccuu

SEQ ID NO: 753198 - RNA, 23 nt, Human
caaccuccaccucccggguucaa

SEQ ID NO: 753199 - RNA, 18 nt, Human
caagaagcaguaagggaa

SEQ ID NO: 753200 - RNA, 20 nt, Human
caagugauucuccugccuca

SEQ ID NO: 753201 - RNA, 22 nt, Human
caagugauucuccugccucagc

SEQ ID NO: 753202 - RNA, 19 nt, Human
cacgacaaaaagcagguca

SEQ ID NO: 753203 - RNA, 21 nt, Human
cacugcaaccuccaccucccg

SEQ ID NO: 753204 - RNA, 23 nt, Human
cacugcaaccuccaccucccggg

SEQ ID NO: 753205 - RNA, 19 nt, Human
cagaaacuuuaaaugacag

SEQ ID NO: 753206 - RNA, 20 nt, Human
cagccuccugaguagcuggg

SEQ ID NO: 753207 - RNA, 24 nt, Human
cagcucuuacuuccccagaaacaa

SEQ ID NO: 753208 - RNA, 22 nt, Human
caggcacaugccaccaugccca

SEQ ID NO: 753209 - RNA, 23 nt, Human
cauagaacaaagacagccuuuca

SEQ ID NO: 753210 - RNA, 18 nt, Human
ccaaagcaggauaaaaga

SEQ ID NO: 753211 - RNA, 22 nt, Human
ccaaagugcugggauuacaggc

SEQ ID NO: 753212 - RNA, 22 nt, Human
ccaaagugcugggauuacaggc

SEQ ID NO: 753213 - RNA, 24 nt, Human
ccaaagugcugggauuacaggcgu

SEQ ID NO: 753214 - RNA, 18 nt, Human
cccaagaaucacaaaaua

SEQ ID NO: 753215 - RNA, 22 nt, Human
cccaggcuggggugcaauggcg

SEQ ID NO: 753216 - RNA, 24 nt, Human
ccccagaaacaacuaaaaucagca

SEQ ID NO: 753217 - RNA, 23 nt, Human
cccggguucaagugauucuccuc

SEQ ID NO: 753218 - RNA, 23 nt, Human
cccggguucaagugauucuccug

SEQ ID NO: 753219 - RNA, 18 nt, Human
ccuauacuauggcgcagg

SEQ ID NO: 753220 - RNA, 18 nt, Human
ccucauuuacaagccugu

SEQ ID NO: 753221 - RNA, 24 nt, Human
ccucccggguucaagugauucucc

SEQ ID NO: 753222 - RNA, 23 nt, Human
ccugaguagcugggauugcaggc

SEQ ID NO: 753223 - RNA, 24 nt, Human
ccugaguagcugggauugcaggca

SEQ ID NO: 753224 - RNA, 22 nt, Human
ccuuauacaucugaagaaaauc

SEQ ID NO: 753225 - RNA, 25 nt, Human
cuaaaaucagcagaggguggcagaa

SEQ ID NO: 753226 - RNA, 18 nt, Human
cucaauagcaaaacauaa

SEQ ID NO: 753227 - RNA, 24 nt, Human
cucacugcaaccuccaccucccgg

SEQ ID NO: 753228 - RNA, 24 nt, Human
cucagccuccugaguagcugggau

SEQ ID NO: 753229 - RNA, 21 nt, Human
cucauaaccacugcagguauc

SEQ ID NO: 753230 - RNA, 24 nt, Human
cucauugcccaggcuggggugcaa

SEQ ID NO: 753231 - RNA, 24 nt, Human
cuccauguuggucaagcuggucuc

SEQ ID NO: 753232 - RNA, 20 nt, Human
cucccggguucaagugauuc

SEQ ID NO: 753233 - RNA, 22 nt, Human
cuccugguggaaaaacugucuu

SEQ ID NO: 753234 - RNA, 18 nt, Human
cugcaaccuccaccuccc

SEQ ID NO: 753235 - RNA, 23 nt, Human
cugcaaccuccaccucccggguu

SEQ ID NO: 753236 - RNA, 24 nt, Human
cugcaaccuccaccucccggguuc

SEQ ID NO: 753237 - RNA, 23 nt, Human
cugccucagccuccugaguagcu

SEQ ID NO: 753238 - RNA, 19 nt, Human
cuggucccuggugccaaaa

SEQ ID NO: 753239 - RNA, 21 nt, Human
cuggugccaaaaauguugggg

SEQ ID NO: 753240 - RNA, 21 nt, Human
gagcaaaagaagcuagacaca

SEQ ID NO: 753241 - RNA, 21 nt, Human
gagcaacaacuuguauaaagg

SEQ ID NO: 753242 - RNA, 19 nt, Human
gaggugagcagcagguggg

SEQ ID NO: 753243 - RNA, 20 nt, Human
gaggugagcagcaggugggu

SEQ ID NO: 753244 - RNA, 25 nt, Human
gaguagcugggauugcaggcacaug

SEQ ID NO: 753245 - RNA, 18 nt, Human
gauuacaggcgugagcca

SEQ ID NO: 753246 - RNA, 21 nt, Human
gauuacaggcgugagccacca

SEQ ID NO: 753247 - RNA, 24 nt, Human
gauuacaggcgugagccaccaugc

SEQ ID NO: 753248 - RNA, 22 nt, Human
gauugcaggcacaugccaccau

SEQ ID NO: 753249 - RNA, 20 nt, Human
gcccaaugccauuaucgguc

SEQ ID NO: 753250 - RNA, 24 nt, Human
gcccaggcuggggugcaauggcgu

SEQ ID NO: 753251 - RNA, 18 nt, Human
gcugaauaaaugcaccca

SEQ ID NO: 753252 - RNA, 21 nt, Human
ggaaaaacugucuuccacaaa

SEQ ID NO: 753253 - RNA, 19 nt, Human
ggaaaaauauauucucucc

SEQ ID NO: 753254 - RNA, 19 nt, Human
ggaagcaagaagcaguaag

SEQ ID NO: 753255 - RNA, 24 nt, Human
ggauuacaggcgugagccaccaug

SEQ ID NO: 753256 - RNA, 18 nt, Human
gggauugcaggcacaugc

SEQ ID NO: 753257 - RNA, 20 nt, Human
ggggaggguuugcucacuac

SEQ ID NO: 753258 - RNA, 22 nt, Human
ggguucaagugauucuccugcc

SEQ ID NO: 753259 - RNA, 23 nt, Human
ggguucaagugauucuccugccu

SEQ ID NO: 753260 - RNA, 24 nt, Human
gguaauagagacaaucacuguguc

SEQ ID NO: 753261 - RNA, 20 nt, Human
ggucauaauaauaaaugccc

SEQ ID NO: 753262 - RNA, 19 nt, Human
ggugggugagcauuacugc

SEQ ID NO: 753263 - RNA, 18 nt, Human
gucaaagaugguucaaga

SEQ ID NO: 753264 - RNA, 23 nt, Human
gugauucuccugccucagccucc

SEQ ID NO: 753265 - RNA, 20 nt, Human
gugcaauggcgucuuggcuc

SEQ ID NO: 753266 - RNA, 25 nt, Human
uaaaaucagcagagggugacguagc

SEQ ID NO: 753267 - RNA, 21 nt, Human
uaaaggucuuuaugaggcuga

SEQ ID NO: 753268 - RNA, 20 nt, Human
uaaaugacagauuuggacuu

SEQ ID NO: 753269 - RNA, 23 nt, Human
uaaaugcacccaagaaucacaaa

SEQ ID NO: 753270 - RNA, 19 nt, Human
uaagaaggggaaugguucc

SEQ ID NO: 753271 - RNA, 19 nt, Human
uaagaaggggaaugguucc

SEQ ID NO: 753272 - RNA, 18 nt, Human
uaauagagacaaucacug

SEQ ID NO: 753273 - RNA, 21 nt, Human
uaauuuuguauuuuuaguaga

SEQ ID NO: 753274 - RNA, 18 nt, Human
uacaggcgugagccacca

SEQ ID NO: 753275 - RNA, 21 nt, Human
uacaggcgugagccaccaugc

SEQ ID NO: 753276 - RNA, 23 nt, Human
uacaggcgugagccaccaugcuu

SEQ ID NO: 753277 - RNA, 23 nt, Human
uacaucagaaacacaacaagcuu

SEQ ID NO: 753278 - RNA, 27 nt, Human
uaccuaggaauaugcccuuccuuuggg

SEQ ID NO: 753279 - RNA, 19 nt, Human
uagcugaaggaagaagaac

SEQ ID NO: 753280 - RNA, 19 nt, Human
uaggaagguaaggcacugu

SEQ ID NO: 753281 - RNA, 24 nt, Human
uauauagauuucuauuuauaugaa

SEQ ID NO: 753282 - RNA, 22 nt, Human
uauggucauaauaauaaaugcc

SEQ ID NO: 753283 - RNA, 26 nt, Human
ucaaaaguaaacuaucacgacaaaaa

SEQ ID NO: 753284 - RNA, 20 nt, Human
ucaaauauacaaccugcacu

SEQ ID NO: 753285 - RNA, 19 nt, Human
ucaagugauucuccugccu

SEQ ID NO: 753286 - RNA, 23 nt, Human
ucacugcaaccuccaccucccgg

SEQ ID NO: 753287 - RNA, 24 nt, Human
ucacugcaaccuccaccucccggg

SEQ ID NO: 753288 - RNA, 25 nt, Human
ucacugcaaccuccaccucccgggu

SEQ ID NO: 753289 - RNA, 27 nt, Human
ucacugcaaccuccaccucccggguuc

SEQ ID NO: 753290 - RNA, 20 nt, Human
ucagccuccugaguagcugg

SEQ ID NO: 753291 - RNA, 19 nt, Human
uccauguuggucaagcugg

SEQ ID NO: 753292 - RNA, 21 nt, Human
ucccaaagguugggagaaagu

SEQ ID NO: 753293 - RNA, 24 nt, Human
ucccaaagugcugggauuacaggc

SEQ ID NO: 753294 - RNA, 19 nt, Human
uccccagaaacaacuaaaa

SEQ ID NO: 753295 - RNA, 21 nt, Human
ucccccuccugguggaaaaac

SEQ ID NO: 753296 - RNA, 21 nt, Human
ucccggguucaagugauucuc

SEQ ID NO: 753297 - RNA, 24 nt, Human
ucccggguucaagugauucuccug

SEQ ID NO: 753298 - RNA, 21 nt, Human
ucccuugcaucuugucccaaa

SEQ ID NO: 753299 - RNA, 24 nt, Human
uccugaguagcugggauugcaggc

SEQ ID NO: 753300 - RNA, 21 nt, Human
uccugguggaaaaacugucuu

SEQ ID NO: 753301 - RNA, 24 nt, Human
ucuccugccucagccuccugagua

SEQ ID NO: 753302 - RNA, 21 nt, Human
ucugaccauguaggggagggu

SEQ ID NO: 753303 - RNA, 22 nt, Human
ucuuccacaaaacuggucccug

SEQ ID NO: 753304 - RNA, 22 nt, Human
ucuugguuguuugcuccuuaug

SEQ ID NO: 753305 - RNA, 21 nt, Human
ucuuuguccuuuuacccuaaa

SEQ ID NO: 753306 - RNA, 24 nt, Human
ugaaauccauuuauaucuucuagg

SEQ ID NO: 753307 - RNA, 28 nt, Human
ugaauaaaugcacccaagaaucacaaaa

SEQ ID NO: 753308 - RNA, 19 nt, Human
ugacaaaaggcucagaaua

SEQ ID NO: 753309 - RNA, 26 nt, Human
ugacuguaaaacagcuagaaugauau

SEQ ID NO: 753310 - RNA, 20 nt, Human
ugagcagaaauaaacuaauu

SEQ ID NO: 753311 - RNA, 21 nt, Human
ugagcagcaggugggugagca

SEQ ID NO: 753312 - RNA, 20 nt, Human
ugagcauuacugcuugagcu

SEQ ID NO: 753313 - RNA, 20 nt, Human
ugauucuccugccucagccu

SEQ ID NO: 753314 - RNA, 18 nt, Human
ugcccaggcuggggugca

SEQ ID NO: 753315 - RNA, 21 nt, Human
ugcccaggcuggggugcaaug

SEQ ID NO: 753316 - RNA, 23 nt, Human
ugcccuuccuuugggaagcaaga

SEQ ID NO: 753317 - RNA, 24 nt, Human
ugccucagccuccugaguagcugg

SEQ ID NO: 753318 - RNA, 22 nt, Human
ugccuuaggagagaggagaucu

SEQ ID NO: 753319 - RNA, 23 nt, Human
ugcugaauaaaugcacccaagaa

SEQ ID NO: 753320 - RNA, 24 nt, Human
ugcugggauuacaggcgugagcca

SEQ ID NO: 753321 - RNA, 23 nt, Human
uggagcaacaacuuguauaaagg

SEQ ID NO: 753322 - RNA, 19 nt, Human
uggcaacuaggagauaaca

SEQ ID NO: 753323 - RNA, 18 nt, Human
ugggaagcaagaagcagu

SEQ ID NO: 753324 - RNA, 22 nt, Human
ugggagaaaguuaagaaaacug

SEQ ID NO: 753325 - RNA, 18 nt, Human
ugggauuacaggcgugag

SEQ ID NO: 753326 - RNA, 22 nt, Human
ugggauuacaggcgugagccac

SEQ ID NO: 753327 - RNA, 23 nt, Human
ugggauuacaggcgugagccacc

SEQ ID NO: 753328 - RNA, 24 nt, Human
ugggauuacaggcgugagccacca

SEQ ID NO: 753329 - RNA, 25 nt, Human
ugggauuacaggcgugagccaccau

SEQ ID NO: 753330 - RNA, 21 nt, Human
ugggauugcaggcacaugcca

SEQ ID NO: 753331 - RNA, 22 nt, Human
ugggauugcaggcacaugccac

SEQ ID NO: 753332 - RNA, 24 nt, Human
ugggauugcaggcacaugccacca

SEQ ID NO: 753333 - RNA, 25 nt, Human
ugggauugcaggcacaugccaccau

SEQ ID NO: 753334 - RNA, 20 nt, Human
uggggcaacccaucaaaacu

SEQ ID NO: 753335 - RNA, 20 nt, Human
uggggcaacccaucaaaacu

SEQ ID NO: 753336 - RNA, 21 nt, Human
uggggugcaauggcgucuugg

SEQ ID NO: 753337 - RNA, 21 nt, Human
uggucaagcuggucucaaacu

SEQ ID NO: 753338 - RNA, 18 nt, Human
uggugccaaaaauguugg

SEQ ID NO: 753339 - RNA, 19 nt, Human
uguaaaacagcuagaauga

SEQ ID NO: 753340 - RNA, 20 nt, Human
uguacuuauagcuuuuguag

SEQ ID NO: 753341 - RNA, 19 nt, Human
uguauaaaggagaagggag

SEQ ID NO: 753342 - RNA, 20 nt, Human
ugugagaaaauccagcucuu

SEQ ID NO: 753343 - RNA, 18 nt, Human
uguuggggacugcugccu

SEQ ID NO: 753344 - RNA, 19 nt, Human
uguuugcuccuuaugagaa

SEQ ID NO: 753345 - RNA, 20 nt, Human
uucaaguaauaucuggagga

SEQ ID NO: 753346 - RNA, 21 nt, Human
uucaagugauucuccugccuc

SEQ ID NO: 753347 - RNA, 23 nt, Human
uucaagugauucuccugccucag

SEQ ID NO: 753348 - RNA, 24 nt, Human
uucaagugauucuccugccucagc

SEQ ID NO: 753349 - RNA, 19 nt, Human
uucagaaaacaaaaguaag

SEQ ID NO: 753350 - RNA, 22 nt, Human
uucagaaaacaaaaguaagccc

SEQ ID NO: 753351 - RNA, 21 nt, Human
uuucuccauguuggucaagcu

SEQ ID NO: 753352 - RNA, 19 nt, Human
uuugaaguucugccccuuu

SEQ ID NO: 753353 - RNA, 19 nt, Human
uuuggccucccaaagugcu

SEQ ID NO: 753354 - RNA, 18 nt, Human
uuuuguauuuuuaguaga

SEQ ID NO: 753355 - RNA, 25 nt, Human
aaaaaaacccaaacccuuaucccac

SEQ ID NO: 753356 - RNA, 20 nt, Human
aaaaaacaaaaaaacccaaa

SEQ ID NO: 753357 - RNA, 21 nt, Human
aaaaaacccaaacccuuaucc

SEQ ID NO: 753358 - RNA, 22 nt, Human
aaaaaacccaaacccuuauccc

SEQ ID NO: 753359 - RNA, 21 nt, Human
aaaaacaaaaaaacccaaacc

SEQ ID NO: 753360 - RNA, 22 nt, Human
aaaaagcaaauaucaacugaaa

SEQ ID NO: 753361 - RNA, 22 nt, Human
aaaacccaaacccuuaucccac

SEQ ID NO: 753362 - RNA, 27 nt, Human
aaacaaaaaaacccaaacccuuauccc

SEQ ID NO: 753363 - RNA, 23 nt, Human
aaacacaaaaagcaaauaucaac

SEQ ID NO: 753364 - RNA, 22 nt, Human
aaacuguuaaagguuauuacuu

SEQ ID NO: 753365 - RNA, 22 nt, Human
aaagcaaauaucaacugaaagg

SEQ ID NO: 753366 - RNA, 25 nt, Human
aaagcaaauaucaacugaaagguuu

SEQ ID NO: 753367 - RNA, 20 nt, Human
aaauaaacacaaaaagcaaa

SEQ ID NO: 753368 - RNA, 20 nt, Human
aacugcuagaaauccaagca

SEQ ID NO: 753369 - RNA, 21 nt, Human
aacuguuguuccuuagacucu

SEQ ID NO: 753370 - RNA, 22 nt, Human
aagaaaaacagaggacaguaag

SEQ ID NO: 753371 - RNA, 19 nt, Human
aauagacuuaguuacauau

SEQ ID NO: 753372 - RNA, 20 nt, Human
acacuguaaucauucauucu

SEQ ID NO: 753373 - RNA, 27 nt, Human
acauauccauacaucccaacucacaca

SEQ ID NO: 753374 - RNA, 21 nt, Human
acaugaaagaaucucacaaaa

SEQ ID NO: 753375 - RNA, 20 nt, Human
acaugaggcaaucugucagu

SEQ ID NO: 753376 - RNA, 20 nt, Human
accaaaaaacaaaaaaaccc

SEQ ID NO: 753377 - RNA, 22 nt, Human
accuugaaaauaugacuaucac

SEQ ID NO: 753378 - RNA, 20 nt, Human
acuaaugcccauauuuacaa

SEQ ID NO: 753379 - RNA, 27 nt, Human
acuacauucuuuuuuuuuuuuuuucuu

SEQ ID NO: 753380 - RNA, 20 nt, Human
agacuucaaagccugcaagu

SEQ ID NO: 753381 - RNA, 24 nt, Human
agauguuuuuuucuuucagaucuu

SEQ ID NO: 753382 - RNA, 22 nt, Human
agcaaauaucaacugaaagguu

SEQ ID NO: 753383 - RNA, 21 nt, Human
agccucauuucaccugcuuuu

SEQ ID NO: 753384 - RNA, 21 nt, Human
aucacuuuuagcccuuuucuu

SEQ ID NO: 753385 - RNA, 22 nt, Human
augaauaccuaaaacaugaaag

SEQ ID NO: 753386 - RNA, 19 nt, Human
auggugugcacagugccuu

SEQ ID NO: 753387 - RNA, 22 nt, Human
auguaaagugugauguaucucu

SEQ ID NO: 753388 - RNA, 19 nt, Human
caacugcuagaaauccaag

SEQ ID NO: 753389 - RNA, 23 nt, Human
caauugcagguuagguuuucaac

SEQ ID NO: 753390 - RNA, 23 nt, Human
cacaccccccaagaaaagguagu

SEQ ID NO: 753391 - RNA, 21 nt, Human
cacacuguaaucauucauucu

SEQ ID NO: 753392 - RNA, 23 nt, Human
caccaaacauccauaccuugaaa

SEQ ID NO: 753393 - RNA, 18 nt, Human
cagaccaaaaaacaaaaa

SEQ ID NO: 753394 - RNA, 23 nt, Human
cagaccaaaaaacaaaaaaaccc

SEQ ID NO: 753395 - RNA, 28 nt, Human
ccaaacauccauaccuugaaaauaugac

SEQ ID NO: 753396 - RNA, 22 nt, Human
ccacaccccccaagaaaaggua

SEQ ID NO: 753397 - RNA, 19 nt, Human
cccaacucacacacacaua

SEQ ID NO: 753398 - RNA, 22 nt, Human
cccacacccaaaaguuuuaaau

SEQ ID NO: 753399 - RNA, 23 nt, Human
ccccacacccaaaaguuuuaaau

SEQ ID NO: 753400 - RNA, 18 nt, Human
cccucucugccugcccca

SEQ ID NO: 753401 - RNA, 18 nt, Human
ccugccccacacccaaaa

SEQ ID NO: 753402 - RNA, 25 nt, Human
cgucaugaauaccuaaaacaugaaa

SEQ ID NO: 753403 - RNA, 19 nt, Human
cuaacauuuacauacuaug

SEQ ID NO: 753404 - RNA, 25 nt, Human
cucacaaaauaccuauagaauuaaa

SEQ ID NO: 753405 - RNA, 19 nt, Human
cugaauaaagauacaaaaa

SEQ ID NO: 753406 - RNA, 20 nt, Human
cugcaggcaucuacuuuggu

SEQ ID NO: 753407 - RNA, 23 nt, Human
cuuauacagaccaaaaaacaaaa

SEQ ID NO: 753408 - RNA, 20 nt, Human
gaaacuugcaaguggcaguu

SEQ ID NO: 753409 - RNA, 19 nt, Human
gaaagagaaagaucgucau

SEQ ID NO: 753410 - RNA, 20 nt, Human
gacaccaucccucucugccu

SEQ ID NO: 753411 - RNA, 23 nt, Human
gaccaaaaaacaaaaaaacccaa

SEQ ID NO: 753412 - RNA, 24 nt, Human
gaggguaagaaaaacagaggacag

SEQ ID NO: 753413 - RNA, 21 nt, Human
gcaggguccacaccccccaag

SEQ ID NO: 753414 - RNA, 21 nt, Human
ggccauuauugcaaacauucu

SEQ ID NO: 753415 - RNA, 22 nt, Human
guaaagcuaagcauuucauuuc

SEQ ID NO: 753416 - RNA, 24 nt, Human
gucucuacaguuucuauauggagu

SEQ ID NO: 753417 - RNA, 23 nt, Human
uaaaaaguagaugcugccagaaa

SEQ ID NO: 753418 - RNA, 18 nt, Human
uaaaauacaacacaaacc

SEQ ID NO: 753419 - RNA, 18 nt, Human
uaaaaugaaacagccuug

SEQ ID NO: 753420 - RNA, 25 nt, Human
uaaacacaaaaagcaaauaucaacu

SEQ ID NO: 753421 - RNA, 21 nt, Human
uaaauaaacacaaaaagcaaa

SEQ ID NO: 753422 - RNA, 24 nt, Human
uaaauaaacacaaaaagcaaauau

SEQ ID NO: 753423 - RNA, 18 nt, Human
uaagaaaaacagaggaca

SEQ ID NO: 753424 - RNA, 22 nt, Human
uaagcacugaucagagaacuga

SEQ ID NO: 753425 - RNA, 23 nt, Human
uaaugcacuugagcauacguagu

SEQ ID NO: 753426 - RNA, 23 nt, Human
uacagaccaaaaaacaaaaaaac

SEQ ID NO: 753427 - RNA, 18 nt, Human
uaccagaacaccaucaaa

SEQ ID NO: 753428 - RNA, 22 nt, Human
uacuaaugcccauauuuacaaa

SEQ ID NO: 753429 - RNA, 18 nt, Human
uacuggaaauguuuaacu

SEQ ID NO: 753430 - RNA, 20 nt, Human
uagccccagguuucuuuagg

SEQ ID NO: 753431 - RNA, 27 nt, Human
uauacagaccaaaaaacaaaaaaaccc

SEQ ID NO: 753432 - RNA, 21 nt, Human
uauauuaauagacuuaguuac

SEQ ID NO: 753433 - RNA, 20 nt, Human
uauugcauguuuugguaguc

SEQ ID NO: 753434 - RNA, 22 nt, Human
ucaaaaaauacagugauuauga

SEQ ID NO: 753435 - RNA, 19 nt, Human
uccaauggugugcacagug

SEQ ID NO: 753436 - RNA, 24 nt, Human
uccucugccgccaucugcugaaga

SEQ ID NO: 753437 - RNA, 20 nt, Human
ucucugcaggcaucuacuuu

SEQ ID NO: 753438 - RNA, 22 nt, Human
ucugccugccccacacccaaaa

SEQ ID NO: 753439 - RNA, 23 nt, Human
ucugccugccccacacccaaaag

SEQ ID NO: 753440 - RNA, 22 nt, Human
ucuuuagcuuuguacaccuauu

SEQ ID NO: 753441 - RNA, 20 nt, Human
ucuuucaaaucaggaguugu

SEQ ID NO: 753442 - RNA, 21 nt, Human
ugagcagcauuccaauaacgu

SEQ ID NO: 753443 - RNA, 18 nt, Human
ugaucagagaacugagca

SEQ ID NO: 753444 - RNA, 21 nt, Human
ugggacuacauucuuuuuuuu

SEQ ID NO: 753445 - RNA, 18 nt, Human
uuacauauaaauaaacac

SEQ ID NO: 753446 - RNA, 18 nt, Human
uuaguuaucaacaaucau

SEQ ID NO: 753447 - RNA, 21 nt, Human
uucaagaagguaacauuugaa

SEQ ID NO: 753448 - RNA, 26 nt, Human
uucaagaagguaacauuugaaagguu

SEQ ID NO: 753449 - RNA, 25 nt, Human
uucagcuaaaaugaaacagccuuga

SEQ ID NO: 753450 - RNA, 19 nt, Human
uuccauugcagaaaggcuc

SEQ ID NO: 753451 - RNA, 19 nt, Human
uucuucacgcaguuauugu

SEQ ID NO: 753452 - RNA, 21 nt, Human
uugcagugcucuuuuaggcau

SEQ ID NO: 753453 - RNA, 20 nt, Human
uuguuccuuagacucuaugg

SEQ ID NO: 753454 - RNA, 26 nt, Human
uuuuucuuucuuuucuuacaaaaugc

SEQ ID NO: 753455 - RNA, 25 nt, Human
aaaaaagaaaacugaauaucuccau

SEQ ID NO: 753456 - RNA, 19 nt, Human
aaaagaaagaaagaaggca

SEQ ID NO: 753457 - RNA, 19 nt, Human
aaaguuccacuucccuacu

SEQ ID NO: 753458 - RNA, 21 nt, Human
aaauaaccuaacacacagggu

SEQ ID NO: 753459 - RNA, 23 nt, Human
aacaaaccugagaguguuaaaaa

SEQ ID NO: 753460 - RNA, 26 nt, Human
aacaaaugucugacaaauaccaaaac

SEQ ID NO: 753461 - RNA, 20 nt, Human
aacacuggcaaccuaacuua

SEQ ID NO: 753462 - RNA, 20 nt, Human
aacauagugaaacccugucu

SEQ ID NO: 753463 - RNA, 21 nt, Human
aacauagugaaacccugucuc

SEQ ID NO: 753464 - RNA, 24 nt, Human
aagaaaacugaauaucuccauuaa

SEQ ID NO: 753465 - RNA, 19 nt, Human
aagaacuguagucuauggg

SEQ ID NO: 753466 - RNA, 24 nt, Human
aagcugaggcaggaggauugcuug

SEQ ID NO: 753467 - RNA, 22 nt, Human
aagcuuugcaggaguauguggu

SEQ ID NO: 753468 - RNA, 22 nt, Human
aauuuuccuuuauugaaaaagc

SEQ ID NO: 753469 - RNA, 19 nt, Human
acaaagagauaaguagccu

SEQ ID NO: 753470 - RNA, 25 nt, Human
accacacucugggccaacacuacag

SEQ ID NO: 753471 - RNA, 23 nt, Human
accccauuucuuuccuuccucag

SEQ ID NO: 753472 - RNA, 18 nt, Human
agaagccccguguggccc

SEQ ID NO: 753473 - RNA, 19 nt, Human
agaaggcaaaaaagugcca

SEQ ID NO: 753474 - RNA, 20 nt, Human
agaaucaucaaauggaagag

SEQ ID NO: 753475 - RNA, 19 nt, Human
agaccccugguaggcacag

SEQ ID NO: 753476 - RNA, 19 nt, Human
agacuaacucuuagaacca

SEQ ID NO: 753477 - RNA, 23 nt, Human
agagaggucaucugaaacucaga

SEQ ID NO: 753478 - RNA, 21 nt, Human
agcagguuaugauuuuugguc

SEQ ID NO: 753479 - RNA, 22 nt, Human
agccugggcaacauagugaaac

SEQ ID NO: 753480 - RNA, 24 nt, Human
agccugggcaacauagugaaaccc

SEQ ID NO: 753481 - RNA, 24 nt, Human
agccugggcaacauagugaaaccc

SEQ ID NO: 753482 - RNA, 20 nt, Human
aggaguuugagaccagccug

SEQ ID NO: 753483 - RNA, 24 nt, Human
aggauugcuugagcccaggaguuu

SEQ ID NO: 753484 - RNA, 27 nt, Human
aggcaaaaggaagaacugaagggaccc

SEQ ID NO: 753485 - RNA, 28 nt, Human
aggcaaaaggaagaacugaauggcuuag

SEQ ID NO: 753486 - RNA, 24 nt, Human
aggcacgguagcacacaccugugg

SEQ ID NO: 753487 - RNA, 23 nt, Human
aggcaggaggauugcuugagccc

SEQ ID NO: 753488 - RNA, 18 nt, Human
aggguagagggaauaaug

SEQ ID NO: 753489 - RNA, 24 nt, Human
aguaagcuccagagagcaaggcuu

SEQ ID NO: 753490 - RNA, 22 nt, Human
auaaaaugucacgcugcccaca

SEQ ID NO: 753491 - RNA, 24 nt, Human
auauauguauauauagaguuuaga

SEQ ID NO: 753492 - RNA, 21 nt, Human
aucccccuaagucccuggaaa

SEQ ID NO: 753493 - RNA, 25 nt, Human
augacaaggaaguaaaacuaugggu

SEQ ID NO: 753494 - RNA, 24 nt, Human
auugcuugagcccaggaguuugag

SEQ ID NO: 753495 - RNA, 25 nt, Human
caaaugaugcacugggagcaguaac

SEQ ID NO: 753496 - RNA, 21 nt, Human
caacauagugaaacccugucu

SEQ ID NO: 753497 - RNA, 22 nt, Human
caacauagugaaacccugucuc

SEQ ID NO: 753498 - RNA, 24 nt, Human
caacauagugaaacccugucucua

SEQ ID NO: 753499 - RNA, 23 nt, Human
caaccaccggcucagacuccagc

SEQ ID NO: 753500 - RNA, 24 nt, Human
caagcugagaaaagcaggugcuga

SEQ ID NO: 753501 - RNA, 24 nt, Human
caccugugguuccagcuacucagg

SEQ ID NO: 753502 - RNA, 25 nt, Human
cagaaucaucaaauggaagagguua

SEQ ID NO: 753503 - RNA, 21 nt, Human
cagacuaacucuuagaaccaa

SEQ ID NO: 753504 - RNA, 23 nt, Human
cagaggcaaauaacucaucaugg

SEQ ID NO: 753505 - RNA, 20 nt, Human
cagccugggcaacauaguga

SEQ ID NO: 753506 - RNA, 18 nt, Human
caggaaguuucaggaagc

SEQ ID NO: 753507 - RNA, 19 nt, Human
cagggcaguaaccacacuc

SEQ ID NO: 753508 - RNA, 25 nt, Human
caguccagacuaacucuuagaacca

SEQ ID NO: 753509 - RNA, 19 nt, Human
cauugcucugauuccaagg

SEQ ID NO: 753510 - RNA, 18 nt, Human
ccaaacggccucacccgg

SEQ ID NO: 753511 - RNA, 18 nt, Human
ccagucaaacugcaaugg

SEQ ID NO: 753512 - RNA, 23 nt, Human
cccuaagucccuggaaaaguaug

SEQ ID NO: 753513 - RNA, 21 nt, Human
ccuaagauagaacccaaauac

SEQ ID NO: 753514 - RNA, 20 nt, Human
ccuacuuccgaaaguaaggu

SEQ ID NO: 753515 - RNA, 24 nt, Human
ccuaucccccuaagucccuggaaa

SEQ ID NO: 753516 - RNA, 22 nt, Human
ccugggcaacauagugaaaccc

SEQ ID NO: 753517 - RNA, 24 nt, Human
ccugggcaacauagugaaacccug

SEQ ID NO: 753518 - RNA, 21 nt, Human
cugagaaacagcagguuauga

SEQ ID NO: 753519 - RNA, 18 nt, Human
cuggauuagaaagacagc

SEQ ID NO: 753520 - RNA, 22 nt, Human
gaagagaaucaggaugggaagg

SEQ ID NO: 753521 - RNA, 26 nt, Human
gaagagaaucaggaugggaagguuuu

SEQ ID NO: 753522 - RNA, 18 nt, Human
gaaucccuggacuaacuc

SEQ ID NO: 753523 - RNA, 21 nt, Human
gagguagaagaagagaaucag

SEQ ID NO: 753524 - RNA, 18 nt, Human
gauagggagggaggagag

SEQ ID NO: 753525 - RNA, 22 nt, Human
gauugcuugagcccaggaguuu

SEQ ID NO: 753526 - RNA, 24 nt, Human
gauugcuugagcccaggaguuuga

SEQ ID NO: 753527 - RNA, 22 nt, Human
gcccaggaguuugagaccagcc

SEQ ID NO: 753528 - RNA, 21 nt, Human
ggaaacaaacaaaccugagag

SEQ ID NO: 753529 - RNA, 24 nt, Human
ggagggaggagagcagagggaagg

SEQ ID NO: 753530 - RNA, 22 nt, Human
ggauugcuugagcccaggaguu

SEQ ID NO: 753531 - RNA, 18 nt, Human
gggaagguuuuggugauc

SEQ ID NO: 753532 - RNA, 22 nt, Human
gguagcacacaccugugguucc

SEQ ID NO: 753533 - RNA, 24 nt, Human
gguagcacacaccugugguuccag

SEQ ID NO: 753534 - RNA, 19 nt, Human
guaggcacagcacagcuga

SEQ ID NO: 753535 - RNA, 21 nt, Human
gucaccuuggucuugagacuu

SEQ ID NO: 753536 - RNA, 19 nt, Human
gucacgcugcccacaccac

SEQ ID NO: 753537 - RNA, 19 nt, Human
gugaaaagaaaagaaagaa

SEQ ID NO: 753538 - RNA, 23 nt, Human
uaaaagcuuugcaggaguaugug

SEQ ID NO: 753539 - RNA, 22 nt, Human
uaaaauggacauaaauauucaa

SEQ ID NO: 753540 - RNA, 18 nt, Human
uaaaaugucacgcugccc

SEQ ID NO: 753541 - RNA, 20 nt, Human
uaacucaucaugggcagcaa

SEQ ID NO: 753542 - RNA, 21 nt, Human
uaagaaggcaaaaaagugcca

SEQ ID NO: 753543 - RNA, 18 nt, Human
uacagaaucaucaaaugg

SEQ ID NO: 753544 - RNA, 23 nt, Human
uacauagucauuauugcugaucu

SEQ ID NO: 753545 - RNA, 18 nt, Human
uaccaaaguuccacuucc

SEQ ID NO: 753546 - RNA, 19 nt, Human
uaccaaaguuccacuuccc

SEQ ID NO: 753547 - RNA, 24 nt, Human
uaccagcacauaguaagcuccaga

SEQ ID NO: 753548 - RNA, 24 nt, Human
uagcacacaccugugguuccagcu

SEQ ID NO: 753549 - RNA, 23 nt, Human
uagggagggaggagagcagaggg

SEQ ID NO: 753550 - RNA, 22 nt, Human
uagggccaguccagacuaacuc

SEQ ID NO: 753551 - RNA, 22 nt, Human
uauaaccaguacuugcugagac

SEQ ID NO: 753552 - RNA, 24 nt, Human
uauagauauauauauauauaugua

SEQ ID NO: 753553 - RNA, 20 nt, Human
uauauagauauauauauaua

SEQ ID NO: 753554 - RNA, 22 nt, Human
uauauagauauauauauauaua

SEQ ID NO: 753555 - RNA, 18 nt, Human
uauauauauguauauaua

SEQ ID NO: 753556 - RNA, 22 nt, Human
uaucccccuaagucccuggaaa

SEQ ID NO: 753557 - RNA, 21 nt, Human
uauuccuuaaaaauucugguu

SEQ ID NO: 753558 - RNA, 21 nt, Human
ucaaauggaagagguuaaauc

SEQ ID NO: 753559 - RNA, 18 nt, Human
ucacuacagcaaggcaga

SEQ ID NO: 753560 - RNA, 20 nt, Human
ucacuacagcaaggcagaau

SEQ ID NO: 753561 - RNA, 23 nt, Human
uccaaaaggaauccaauuuuugg

SEQ ID NO: 753562 - RNA, 18 nt, Human
uccaaagccuaucccccu

SEQ ID NO: 753563 - RNA, 21 nt, Human
uccaagaacuucucagaaaug

SEQ ID NO: 753564 - RNA, 23 nt, Human
uccacagaucagacugcagaucu

SEQ ID NO: 753565 - RNA, 20 nt, Human
uccacauauaauuugcuggu

SEQ ID NO: 753566 - RNA, 21 nt, Human
ucccccuaagucccuggaaaa

SEQ ID NO: 753567 - RNA, 21 nt, Human
ucccuggacuaacucgugagc

SEQ ID NO: 753568 - RNA, 22 nt, Human
ucccuggacuaacucgugagcc

SEQ ID NO: 753569 - RNA, 22 nt, Human
uccucagcccauccucuguggc

SEQ ID NO: 753570 - RNA, 19 nt, Human
uccuuaaaaauucugguuu

SEQ ID NO: 753571 - RNA, 20 nt, Human
ucugguuugaguuacaggaa

SEQ ID NO: 753572 - RNA, 22 nt, Human
ucuucacuacagcaaggcagaa

SEQ ID NO: 753573 - RNA, 18 nt, Human
ucuuuccuuccucagccc

SEQ ID NO: 753574 - RNA, 18 nt, Human
ucuuucuucuuaaugguu

SEQ ID NO: 753575 - RNA, 23 nt, Human
ugaaaaaaagaaaacugaauauc

SEQ ID NO: 753576 - RNA, 24 nt, Human
ugaaaaagcuuaaugcaacaaugc

SEQ ID NO: 753577 - RNA, 18 nt, Human
ugagaaaaccacaggagc

SEQ ID NO: 753578 - RNA, 22 nt, Human
ugagaaaagcaggugcugaaaa

SEQ ID NO: 753579 - RNA, 20 nt, Human
ugagaccaacagaucagucu

SEQ ID NO: 753580 - RNA, 24 nt, Human
ugagaccagccugggcaacauagu

SEQ ID NO: 753581 - RNA, 23 nt, Human
ugagaguauaugugaagaccagu

SEQ ID NO: 753582 - RNA, 22 nt, Human
ugagauagugccaaucuggagg

SEQ ID NO: 753583 - RNA, 23 nt, Human
ugagcccaggaguuugagaccag

SEQ ID NO: 753584 - RNA, 23 nt, Human
ugaggcaaacagucauuuacccc

SEQ ID NO: 753585 - RNA, 24 nt, Human
ugaggcaggaggauugcuugagcc

SEQ ID NO: 753586 - RNA, 25 nt, Human
ugaggcaggaggauugcuugagccc

SEQ ID NO: 753587 - RNA, 19 nt, Human
ugauuggagaagcagcuug

SEQ ID NO: 753588 - RNA, 25 nt, Human
ugcaacaaugcauuuugauuccuuu

SEQ ID NO: 753589 - RNA, 18 nt, Human
ugcugguguugccuauuu

SEQ ID NO: 753590 - RNA, 18 nt, Human
ugcuugagcccaggaguu

SEQ ID NO: 753591 - RNA, 26 nt, Human
ugcuuuguuaggguaucaagcuguga

SEQ ID NO: 753592 - RNA, 21 nt, Human
uggaggggcuuccuuggaaac

SEQ ID NO: 753593 - RNA, 22 nt, Human
uggaggggcuuccuuggaaacu

SEQ ID NO: 753594 - RNA, 19 nt, Human
ugggaaacaaacaaaccug

SEQ ID NO: 753595 - RNA, 23 nt, Human
ugggaaacaaacaaaccugagag

SEQ ID NO: 753596 - RNA, 24 nt, Human
ugggcaacauagugaaacccuguc

SEQ ID NO: 753597 - RNA, 22 nt, Human
uggugaucuuuagaaguguuau

SEQ ID NO: 753598 - RNA, 20 nt, Human
ugucacgcugcccacaccac

SEQ ID NO: 753599 - RNA, 21 nt, Human
ugucacgcugcccacaccaca

SEQ ID NO: 753600 - RNA, 24 nt, Human
uuaaguaccagcacauaguaagcu

SEQ ID NO: 753601 - RNA, 19 nt, Human
uuauuccagaaaacuccag

SEQ ID NO: 753602 - RNA, 19 nt, Human
uucaaggagaagaaaggag

SEQ ID NO: 753603 - RNA, 21 nt, Human
uuccaaggguagagggaauaa

SEQ ID NO: 753604 - RNA, 24 nt, Human
uuccagcuacucaggaagcugagg

SEQ ID NO: 753605 - RNA, 22 nt, Human
uugagcccaggaguuugagacc

SEQ ID NO: 753606 - RNA, 21 nt, Human
uugcuugagcccaggaguuug

SEQ ID NO: 753607 - RNA, 24 nt, Human
uuuacaauuucaucucuguauccc

SEQ ID NO: 753608 - RNA, 19 nt, Human
uuugcugagaaacagcagg

SEQ ID NO: 753609 - RNA, 19 nt, Human
aaaacaagcagacaucccc

SEQ ID NO: 753610 - RNA, 19 nt, Human
aaacaacguuggcuccuaa

SEQ ID NO: 753611 - RNA, 18 nt, Human
aaacacacuguaaaaaua

SEQ ID NO: 753612 - RNA, 20 nt, Human
aaagagcaaugggaagaaca

SEQ ID NO: 753613 - RNA, 23 nt, Human
aaagggacauccaaacuuuaugc

SEQ ID NO: 753614 - RNA, 25 nt, Human
aaauaccagugcauuucaggugguc

SEQ ID NO: 753615 - RNA, 18 nt, Human
aagaagccguuuggaugc

SEQ ID NO: 753616 - RNA, 24 nt, Human
aagcagacauccccaccaaaggcc

SEQ ID NO: 753617 - RNA, 19 nt, Human
aagugcugaugcugaguga

SEQ ID NO: 753618 - RNA, 18 nt, Human
aauaaagggacauccaaa

SEQ ID NO: 753619 - RNA, 25 nt, Human
acaauggaaaagagaaguguccaaa

SEQ ID NO: 753620 - RNA, 22 nt, Human
acagaaacccauuguaaagaca

SEQ ID NO: 753621 - RNA, 21 nt, Human
acaugccaaauccaacugcuu

SEQ ID NO: 753622 - RNA, 18 nt, Human
accucaaagcccagcgua

SEQ ID NO: 753623 - RNA, 19 nt, Human
acugcuuugucagggccug

SEQ ID NO: 753624 - RNA, 18 nt, Human
acugugcuggguacuuau

SEQ ID NO: 753625 - RNA, 19 nt, Human
acuuauuucaugcauuaga

SEQ ID NO: 753626 - RNA, 20 nt, Human
acuuuuugcuuuauuguccc

SEQ ID NO: 753627 - RNA, 18 nt, Human
agccacacuaguagcuca

SEQ ID NO: 753628 - RNA, 20 nt, Human
aggaaaucuugccauggucc

SEQ ID NO: 753629 - RNA, 19 nt, Human
aggaagaggcuaaucccaa

SEQ ID NO: 753630 - RNA, 25 nt, Human
aggcuaaucccaaggccucagaaca

SEQ ID NO: 753631 - RNA, 19 nt, Human
aggcuucccuaauuuccau

SEQ ID NO: 753632 - RNA, 21 nt, Human
augguccagagaggcaacuga

SEQ ID NO: 753633 - RNA, 20 nt, Human
caaaacaaccauuuagggac

SEQ ID NO: 753634 - RNA, 18 nt, Human
caaacucuguuaugccac

SEQ ID NO: 753635 - RNA, 22 nt, Human
caagaagccguuuggaugcugu

SEQ ID NO: 753636 - RNA, 30 nt, Human
caagcagacauccccaccaaaggccaaaaa

SEQ ID NO: 753637 - RNA, 19 nt, Human
cacacaugccaaauccaac

SEQ ID NO: 753638 - RNA, 22 nt, Human
caccuacuaagagcagggcugu

SEQ ID NO: 753639 - RNA, 21 nt, Human
cacuacgcagccgagcagggu

SEQ ID NO: 753640 - RNA, 24 nt, Human
cagaaacccauuguaaagacaaac

SEQ ID NO: 753641 - RNA, 20 nt, Human
cagaugguucuagagaccca

SEQ ID NO: 753642 - RNA, 21 nt, Human
cagcaguccagccaccugcug

SEQ ID NO: 753643 - RNA, 20 nt, Human
caggauucuugaccaaucag

SEQ ID NO: 753644 - RNA, 19 nt, Human
cagggcagugggucucagc

SEQ ID NO: 753645 - RNA, 21 nt, Human
caguucaaccuugucaggcag

SEQ ID NO: 753646 - RNA, 20 nt, Human
caucucccuagcauggaccc

SEQ ID NO: 753647 - RNA, 27 nt, Human
cauuagaaaaaucuacuauguugcaga

SEQ ID NO: 753648 - RNA, 20 nt, Human
ccaaaggcauagcugaucca

SEQ ID NO: 753649 - RNA, 20 nt, Human
ccaauugugggaagcaaagu

SEQ ID NO: 753650 - RNA, 21 nt, Human
ccacacuaguagcucagggca

SEQ ID NO: 753651 - RNA, 24 nt, Human
ccacagcaagaucuuuaagccaga

SEQ ID NO: 753652 - RNA, 20 nt, Human
ccaccuucucuucucuucuu

SEQ ID NO: 753653 - RNA, 25 nt, Human
cccaaccucuaccucaaagcccagc

SEQ ID NO: 753654 - RNA, 22 nt, Human
cccacaggcacagccacacuag

SEQ ID NO: 753655 - RNA, 22 nt, Human
ccccaaccucuaccucaaagcc

SEQ ID NO: 753656 - RNA, 23 nt, Human
ccccaagaucaguauuucauacu

SEQ ID NO: 753657 - RNA, 21 nt, Human
ccucccaacuaccuagucugc

SEQ ID NO: 753658 - RNA, 20 nt, Human
cgaguugaggagaaagagaa

SEQ ID NO: 753659 - RNA, 20 nt, Human
cuaaucccaaggccucagaa

SEQ ID NO: 753660 - RNA, 24 nt, Human
cuaccucucagcaauucuuuaaaa

SEQ ID NO: 753661 - RNA, 22 nt, Human
cugcagcacuuacuuguccuuc

SEQ ID NO: 753662 - RNA, 18 nt, Human
cuggccacccaagaauaa

SEQ ID NO: 753663 - RNA, 20 nt, Human
cugggugugccuccgcuauu

SEQ ID NO: 753664 - RNA, 20 nt, Human
cuuaccauuaccuaaaaaug

SEQ ID NO: 753665 - RNA, 20 nt, Human
gaaagcuaagagauauagaa

SEQ ID NO: 753666 - RNA, 21 nt, Human
gaagaacaagcucccuuucuc

SEQ ID NO: 753667 - RNA, 23 nt, Human
gaccccaugcaaaugguugacau

SEQ ID NO: 753668 - RNA, 18 nt, Human
gagaaagagaagcaaaug

SEQ ID NO: 753669 - RNA, 23 nt, Human
gagauggccacaauaacuuuuau

SEQ ID NO: 753670 - RNA, 22 nt, Human
gagcgcggcggggccgagcggc

SEQ ID NO: 753671 - RNA, 23 nt, Human
gcaauucuuuaaaacauucagaa

SEQ ID NO: 753672 - RNA, 23 nt, Human
gccgagcggcugggcugccgcgg

SEQ ID NO: 753673 - RNA, 21 nt, Human
gcugaaauaaagggacaucca

SEQ ID NO: 753674 - RNA, 21 nt, Human
ggaaaagagaaguguccaaag

SEQ ID NO: 753675 - RNA, 22 nt, Human
ggcggggccgagcggcugggcu

SEQ ID NO: 753676 - RNA, 22 nt, Human
ggugugccuccgcuauuuuucu

SEQ ID NO: 753677 - RNA, 18 nt, Human
guccagccaccugcugug

SEQ ID NO: 753678 - RNA, 19 nt, Human
uaacugaaguuauuagugg

SEQ ID NO: 753679 - RNA, 24 nt, Human
uaacugacagugaacagaaaccca

SEQ ID NO: 753680 - RNA, 18 nt, Human
uaacuggagguaaacagc

SEQ ID NO: 753681 - RNA, 20 nt, Human
uaacuggagguaaacagcag

SEQ ID NO: 753682 - RNA, 19 nt, Human
uaccaagucaaacccucac

SEQ ID NO: 753683 - RNA, 18 nt, Human
uaccauguguucucucca

SEQ ID NO: 753684 - RNA, 26 nt, Human
uaccauguguucucuccacuagggaa

SEQ ID NO: 753685 - RNA, 25 nt, Human
uaccauuaccuaaaaaugauuuuuu

SEQ ID NO: 753686 - RNA, 21 nt, Human
uaccucaaagcccagcguagc

SEQ ID NO: 753687 - RNA, 21 nt, Human
uacgcucauguuucucaucca

SEQ ID NO: 753688 - RNA, 22 nt, Human
uagcucauuaggaacaggccag

SEQ ID NO: 753689 - RNA, 23 nt, Human
uaugccacauuuggcauaaaaaa

SEQ ID NO: 753690 - RNA, 19 nt, Human
uauguuuguagccucaaac

SEQ ID NO: 753691 - RNA, 21 nt, Human
uauguuuguagccucaaacac

SEQ ID NO: 753692 - RNA, 19 nt, Human
ucaguaauuacuuuauuga

SEQ ID NO: 753693 - RNA, 19 nt, Human
ucauacucccuaaccuugc

SEQ ID NO: 753694 - RNA, 23 nt, Human
uccaaggaacauguuauuaguac

SEQ ID NO: 753695 - RNA, 20 nt, Human
uccacagacuagaaaaucag

SEQ ID NO: 753696 - RNA, 18 nt, Human
uccauaaugaggaagagg

SEQ ID NO: 753697 - RNA, 20 nt, Human
ucccagggccuuggguuccu

SEQ ID NO: 753698 - RNA, 24 nt, Human
ucuaaaauuccuuuucuuuaucca

SEQ ID NO: 753699 - RNA, 21 nt, Human
ucuaaaguuguucuuuuucua

SEQ ID NO: 753700 - RNA, 21 nt, Human
ucuaccucaaagcccagcgua

SEQ ID NO: 753701 - RNA, 22 nt, Human
ucucagacaccuuuggucuaaa

SEQ ID NO: 753702 - RNA, 19 nt, Human
ucuccucugucaagucuaa

SEQ ID NO: 753703 - RNA, 19 nt, Human
ucuuccucuguuccaagga

SEQ ID NO: 753704 - RNA, 19 nt, Human
ugacugaauaaaugaagga

SEQ ID NO: 753705 - RNA, 24 nt, Human
ugaggaagaggcuaaucccaaggc

SEQ ID NO: 753706 - RNA, 24 nt, Human
ugaucaggauggcagcuugcuggc

SEQ ID NO: 753707 - RNA, 20 nt, Human
ugauccugggcgguagcccc

SEQ ID NO: 753708 - RNA, 20 nt, Human
ugauccugggcgguagcccc

SEQ ID NO: 753709 - RNA, 22 nt, Human
ugcaaaaacaagcagacauccc

SEQ ID NO: 753710 - RNA, 20 nt, Human
ugcaaccuugauguccaaau

SEQ ID NO: 753711 - RNA, 18 nt, Human
ugcaggcugggcggggag

SEQ ID NO: 753712 - RNA, 19 nt, Human
ugcauuguucaucucugca

SEQ ID NO: 753713 - RNA, 23 nt, Human
ugcauuguucaucucugcaaccu

SEQ ID NO: 753714 - RNA, 24 nt, Human
ugcauuguucaucucugcaaccuu

SEQ ID NO: 753715 - RNA, 20 nt, Human
ugccaaauccaacugcuuug

SEQ ID NO: 753716 - RNA, 22 nt, Human
ugccgcggcgcgagcucugcag

SEQ ID NO: 753717 - RNA, 18 nt, Human
ugccuccgcuauuuuucu

SEQ ID NO: 753718 - RNA, 20 nt, Human
ugccuuaaaucacaaagagc

SEQ ID NO: 753719 - RNA, 19 nt, Human
uguggcucuuuucuauaua

SEQ ID NO: 753720 - RNA, 24 nt, Human
uucauaaaccccaaccucuaccuc

SEQ ID NO: 753721 - RNA, 20 nt, Human
uucugccaucuucuuuugcc

SEQ ID NO: 753722 - RNA, 20 nt, Human
uucuuuccaccggagaggac

SEQ ID NO: 753723 - RNA, 18 nt, Human
uugaacuccucaaagaug

SEQ ID NO: 753724 - RNA, 24 nt, Human
uuggaugcugugcuccuuacaugg

SEQ ID NO: 753725 - RNA, 20 nt, Human
uuucaucacacaugccaaau

SEQ ID NO: 753726 - RNA, 22 nt, Human
uuucgugguuuuucuuccucug

SEQ ID NO: 753727 - RNA, 24 nt, Human
uuugcaaaaacaagcagacauccc

SEQ ID NO: 753728 - RNA, 23 nt, Human
uuuguggcucuuuucuauauagu

SEQ ID NO: 753729 - RNA, 23 nt, Human
uuuuaaucuguuuugccuuaaau

SEQ ID NO: 753730 - RNA, 20 nt, Human
aaaaagacaaaacaaaacaa

SEQ ID NO: 753731 - RNA, 24 nt, Human
aaaagaccacccacaacgagaaaa

SEQ ID NO: 753732 - RNA, 24 nt, Human
aaacaaaauauauccuauccauaa

SEQ ID NO: 753733 - RNA, 21 nt, Human
aaacaauggcagaaaaacucu

SEQ ID NO: 753734 - RNA, 22 nt, Human
aaacagagaucccagcagugua

SEQ ID NO: 753735 - RNA, 21 nt, Human
aaacccaaaauauuucagcag

SEQ ID NO: 753736 - RNA, 26 nt, Human
aaagaccacccacaacgagaaaagcc

SEQ ID NO: 753737 - RNA, 24 nt, Human
aaagugccgggauuacaggcguga

SEQ ID NO: 753738 - RNA, 19 nt, Human
aaagugcuaggauuacagg

SEQ ID NO: 753739 - RNA, 24 nt, Human
aaagugcuaggauuacaggcauga

SEQ ID NO: 753740 - RNA, 18 nt, Human
aacauggugaaaaccccc

SEQ ID NO: 753741 - RNA, 22 nt, Human
aacauggugaaaacccccgucu

SEQ ID NO: 753742 - RNA, 22 nt, Human
aacauggugaaaccccuaaccu

SEQ ID NO: 753743 - RNA, 23 nt, Human
aacauggugaaaccccuaaccuc

SEQ ID NO: 753744 - RNA, 22 nt, Human
aaccccuaaccucaggugaucc

SEQ ID NO: 753745 - RNA, 18 nt, Human
aaccucaggugauccacc

SEQ ID NO: 753746 - RNA, 19 nt, Human
aaccuccgccucccgguuc

SEQ ID NO: 753747 - RNA, 25 nt, Human
aacucaccccucccaaacaaaauca

SEQ ID NO: 753748 - RNA, 24 nt, Human
aagaaaaacaggaaugucugacaa

SEQ ID NO: 753749 - RNA, 21 nt, Human
aagaaucaccucuugugauuc

SEQ ID NO: 753750 - RNA, 25 nt, Human
aaggcaagcggaucacccgaagcca

SEQ ID NO: 753751 - RNA, 24 nt, Human
aagugauccgccugccucggccuc

SEQ ID NO: 753752 - RNA, 26 nt, Human
aagugcuaggauuacaggcaugagcc

SEQ ID NO: 753753 - RNA, 18 nt, Human
aaguggacaccacaagaa

SEQ ID NO: 753754 - RNA, 20 nt, Human
aaucgccugaacccaggaga

SEQ ID NO: 753755 - RNA, 26 nt, Human
acaaaacaaaacaacacuuuaaccuc

SEQ ID NO: 753756 - RNA, 26 nt, Human
acaccaaauauaccauuagcaaaagc

SEQ ID NO: 753757 - RNA, 18 nt, Human
acaggguuucaccauguu

SEQ ID NO: 753758 - RNA, 19 nt, Human
acaggguuucaccauguua

SEQ ID NO: 753759 - RNA, 20 nt, Human
acaggguuucaccauguuag

SEQ ID NO: 753760 - RNA, 24 nt, Human
acaggguuucaccauguuagccag

SEQ ID NO: 753761 - RNA, 21 nt, Human
acauggugaaaacccccgucu

SEQ ID NO: 753762 - RNA, 22 nt, Human
acauggugaaaacccccgucuc

SEQ ID NO: 753763 - RNA, 24 nt, Human
accaaaauacaaaaauuagcuggu

SEQ ID NO: 753764 - RNA, 21 nt, Human
accacacuccagccugggcag

SEQ ID NO: 753765 - RNA, 20 nt, Human
acccaaaucaacugcuuccu

SEQ ID NO: 753766 - RNA, 20 nt, Human
accccucccaaacaaaauca

SEQ ID NO: 753767 - RNA, 23 nt, Human
acgagaaaagccuacuuccuccu

SEQ ID NO: 753768 - RNA, 18 nt, Human
acguguaacucaccccuc

SEQ ID NO: 753769 - RNA, 24 nt, Human
agaaaaacaggaaugucugacaaa

SEQ ID NO: 753770 - RNA, 20 nt, Human
agaaaacauaaugaagaaaa

SEQ ID NO: 753771 - RNA, 18 nt, Human
agacaaaacaaaacaaca

SEQ ID NO: 753772 - RNA, 21 nt, Human
agacggaagaaucgccugaac

SEQ ID NO: 753773 - RNA, 19 nt, Human
agcacuuaaaacagagauc

SEQ ID NO: 753774 - RNA, 22 nt, Human
agccaggaguucaagaccagcc

SEQ ID NO: 753775 - RNA, 25 nt, Human
agccuggccaacauggugaaaaccc

SEQ ID NO: 753776 - RNA, 24 nt, Human
agccugggcagcugagcgagacuc

SEQ ID NO: 753777 - RNA, 23 nt, Human
agcugggcaugauggcaggugcc

SEQ ID NO: 753778 - RNA, 23 nt, Human
aggaggccaaggcaagcgguggg

SEQ ID NO: 753779 - RNA, 24 nt, Human
aggagggcagaucaagagguuagg

SEQ ID NO: 753780 - RNA, 26 nt, Human
aggcaagcggaucacccgaagccagg

SEQ ID NO: 753781 - RNA, 24 nt, Human
aggugauccaccugucuuggccuc

SEQ ID NO: 753782 - RNA, 19 nt, Human
aguagcugggauuacaggc

SEQ ID NO: 753783 - RNA, 23 nt, Human
aguagcugggauuacaggcgugc

SEQ ID NO: 753784 - RNA, 24 nt, Human
agugcaauggcacaaucucggcuc

SEQ ID NO: 753785 - RNA, 26 nt, Human
auacaaaaaacaauggcagaaaaacu

SEQ ID NO: 753786 - RNA, 23 nt, Human
aucacccgaagccaggaguucaa

SEQ ID NO: 753787 - RNA, 21 nt, Human
auccuggccaacauggugaaa

SEQ ID NO: 753788 - RNA, 24 nt, Human
auggcgccaccacacuccagccug

SEQ ID NO: 753789 - RNA, 23 nt, Human
caaaacaaaacaacacuuuaacc

SEQ ID NO: 753790 - RNA, 26 nt, Human
caaaacaaaacaacacuuuaaccucu

SEQ ID NO: 753791 - RNA, 28 nt, Human
caaaacaccaaauauaccauuagcaaaa

SEQ ID NO: 753792 - RNA, 26 nt, Human
caaaauacaaaaauuagcugggcaug

SEQ ID NO: 753793 - RNA, 23 nt, Human
caaaaugcucauaguguggaugg

SEQ ID NO: 753794 - RNA, 24 nt, Human
caaagugccgggauuacaggcgug

SEQ ID NO: 753795 - RNA, 24 nt, Human
caaagugcuaggauuacaggcaug

SEQ ID NO: 753796 - RNA, 24 nt, Human
caacaaacaaaauauauccuaucc

SEQ ID NO: 753797 - RNA, 26 nt, Human
caacauggugaaaacccccgucucua

SEQ ID NO: 753798 - RNA, 19 nt, Human
caacauggugaaaccccua

SEQ ID NO: 753799 - RNA, 20 nt, Human
caagacacgugagcugaaaa

SEQ ID NO: 753800 - RNA, 24 nt, Human
caagaccagccuggccaacauggu

SEQ ID NO: 753801 - RNA, 24 nt, Human
caagaccauccuggccaacauggu

SEQ ID NO: 753802 - RNA, 27 nt, Human
caagcggaucacccgaagccaggaguu

SEQ ID NO: 753803 - RNA, 24 nt, Human
caagcuccaaaucccacucuuaca

SEQ ID NO: 753804 - RNA, 18 nt, Human
caaggcaagcggaucacc

SEQ ID NO: 753805 - RNA, 22 nt, Human
caagugauccgccugccucggc

SEQ ID NO: 753806 - RNA, 25 nt, Human
caccacacuccagccugggcagcug

SEQ ID NO: 753807 - RNA, 19 nt, Human
caccaccaagcuccaaauc

SEQ ID NO: 753808 - RNA, 18 nt, Human
caccauguuagccaggcu

SEQ ID NO: 753809 - RNA, 22 nt, Human
caccauguuagccaggcugcuc

SEQ ID NO: 753810 - RNA, 27 nt, Human
caccauguuagccaggcugcucucaaa

SEQ ID NO: 753811 - RNA, 26 nt, Human
caccccucccaaacaaaaucaaagga

SEQ ID NO: 753812 - RNA, 23 nt, Human
caccgcaaggaccagcacacuga

SEQ ID NO: 753813 - RNA, 22 nt, Human
caccugccaccuacucaauccc

SEQ ID NO: 753814 - RNA, 23 nt, Human
caccugucuuggccucccaaagu

SEQ ID NO: 753815 - RNA, 24 nt, Human
caccugucuuggccucccaaagug

SEQ ID NO: 753816 - RNA, 24 nt, Human
cacgccuguaaucgcagcacuuug

SEQ ID NO: 753817 - RNA, 20 nt, Human
cacgugagcugaaaaugauc

SEQ ID NO: 753818 - RNA, 18 nt, Human
cacuccagccugggcagc

SEQ ID NO: 753819 - RNA, 24 nt, Human
cacuccagccugggcagcugagcg

SEQ ID NO: 753820 - RNA, 21 nt, Human
cacugacccauaucugugggc

SEQ ID NO: 753821 - RNA, 21 nt, Human
cacugcaaccuccgccucccg

SEQ ID NO: 753822 - RNA, 22 nt, Human
cagcaaucaaucaugaagcuga

SEQ ID NO: 753823 - RNA, 23 nt, Human
cagcaccgcaaggaccagcacac

SEQ ID NO: 753824 - RNA, 20 nt, Human
cagcacuuugggaggccaag

SEQ ID NO: 753825 - RNA, 24 nt, Human
cagcacuuugggaggccaaggagg

SEQ ID NO: 753826 - RNA, 22 nt, Human
cagcugaagucagucuccacca

SEQ ID NO: 753827 - RNA, 21 nt, Human
caggauuucuuccauuuaugg

SEQ ID NO: 753828 - RNA, 24 nt, Human
caggguuucaccauguuagccagg

SEQ ID NO: 753829 - RNA, 24 nt, Human
cagugcgguggcucacgccuguaa

SEQ ID NO: 753830 - RNA, 18 nt, Human
cauaagcauguuggucac

SEQ ID NO: 753831 - RNA, 19 nt, Human
cauaguguggauggcagga

SEQ ID NO: 753832 - RNA, 21 nt, Human
cauggaaaauucauagagcca

SEQ ID NO: 753833 - RNA, 24 nt, Human
cauguuagccaggcugcucucaaa

SEQ ID NO: 753834 - RNA, 33 nt, Human
cauguuagccaggcugcucucaaacuccugaag

SEQ ID NO: 753835 - RNA, 23 nt, Human
ccaaaaaaaaaaaagaccaccca

SEQ ID NO: 753836 - RNA, 20 nt, Human
ccaaaacuauacaaaacacc

SEQ ID NO: 753837 - RNA, 20 nt, Human
ccaaagugccgggauuacag

SEQ ID NO: 753838 - RNA, 22 nt, Human
ccaaagugccgggauuacaggc

SEQ ID NO: 753839 - RNA, 24 nt, Human
ccaaagugccgggauuacaggcgu

SEQ ID NO: 753840 - RNA, 19 nt, Human
ccaaagugcuaggauuaca

SEQ ID NO: 753841 - RNA, 24 nt, Human
ccaaagugcuaggauuacaggcau

SEQ ID NO: 753842 - RNA, 22 nt, Human
ccaaaucccacucuuacaacuc

SEQ ID NO: 753843 - RNA, 21 nt, Human
ccaccacacccgguaauuuuc

SEQ ID NO: 753844 - RNA, 18 nt, Human
ccaccaccaagcuccaaa

SEQ ID NO: 753845 - RNA, 19 nt, Human
ccagcacccuaggaggcca

SEQ ID NO: 753846 - RNA, 21 nt, Human
ccagcacccuaggaggccaag

SEQ ID NO: 753847 - RNA, 23 nt, Human
ccagccuccuuugcuucuaacuu

SEQ ID NO: 753848 - RNA, 23 nt, Human
cccgaguagcugggauuacaggc

SEQ ID NO: 753849 - RNA, 24 nt, Human
cccgaguagcugggauuacaggcg

SEQ ID NO: 753850 - RNA, 22 nt, Human
ccgaguagcugggauuacaggc

SEQ ID NO: 753851 - RNA, 24 nt, Human
ccgaguagcugggauuacaggcgu

SEQ ID NO: 753852 - RNA, 23 nt, Human
ccgccgcagccucccgaguagcu

SEQ ID NO: 753853 - RNA, 23 nt, Human
ccgccucccgguucaagcgauuc

SEQ ID NO: 753854 - RNA, 21 nt, Human
ccuaaccucaggugauccacc

SEQ ID NO: 753855 - RNA, 23 nt, Human
ccuaaccucaggugauccaccug

SEQ ID NO: 753856 - RNA, 24 nt, Human
ccuaaccucaggugauccaccugu

SEQ ID NO: 753857 - RNA, 21 nt, Human
ccuauaaucccagcuacucgg

SEQ ID NO: 753858 - RNA, 24 nt, Human
ccucgcucuuguugcccaggcugg

SEQ ID NO: 753859 - RNA, 25 nt, Human
ccucgcucuuguugcccaggcugga

SEQ ID NO: 753860 - RNA, 24 nt, Human
ccugaaaacaccugccaccuacuc

SEQ ID NO: 753861 - RNA, 19 nt, Human
ccugaccucaaagucgaca

SEQ ID NO: 753862 - RNA, 18 nt, Human
ccugaccucaagugaucc

SEQ ID NO: 753863 - RNA, 21 nt, Human
ccugaccucaagugauccgcc

SEQ ID NO: 753864 - RNA, 23 nt, Human
ccugaccucaagugauccgccug

SEQ ID NO: 753865 - RNA, 18 nt, Human
ccugcaacaugauacugu

SEQ ID NO: 753866 - RNA, 18 nt, Human
ccuggccaacauggugaa

SEQ ID NO: 753867 - RNA, 24 nt, Human
ccuggccaacauggugaaaacccc

SEQ ID NO: 753868 - RNA, 26 nt, Human
ccuggccaacauggugaaaacccccg

SEQ ID NO: 753869 - RNA, 22 nt, Human
ccuggccaacauggugaaaccc

SEQ ID NO: 753870 - RNA, 23 nt, Human
ccuggccaacauggugaaacccc

SEQ ID NO: 753871 - RNA, 23 nt, Human
ccuggccaacauggugaaacccc

SEQ ID NO: 753872 - RNA, 22 nt, Human
ccugggcagcugagcgagacuc

SEQ ID NO: 753873 - RNA, 24 nt, Human
ccuguaaucgcagcacuuugggag

SEQ ID NO: 753874 - RNA, 20 nt, Human
ccuguuuggugccugugggu

SEQ ID NO: 753875 - RNA, 24 nt, Human
cgccaccacacuccagccugggca

SEQ ID NO: 753876 - RNA, 23 nt, Human
cgccuguaaucgcagcacuuugg

SEQ ID NO: 753877 - RNA, 24 nt, Human
cgccuguaaucgcagcacuuuggg

SEQ ID NO: 753878 - RNA, 24 nt, Human
cgcucuuguugcccaggcuggagu

SEQ ID NO: 753879 - RNA, 21 nt, Human
cggaucacccgaagccaggag

SEQ ID NO: 753880 - RNA, 27 nt, Human
cggaucacccgaagccaggaguucaag

SEQ ID NO: 753881 - RNA, 21 nt, Human
cgggauuacaggcgugagcca

SEQ ID NO: 753882 - RNA, 24 nt, Human
cgggauuacaggcgugagccaccg

SEQ ID NO: 753883 - RNA, 22 nt, Human
cgggcccagagggaacccaaau

SEQ ID NO: 753884 - RNA, 21 nt, Human
cguucugcaacucuacccaaa

SEQ ID NO: 753885 - RNA, 21 nt, Human
cucaagugauccgccugccuc

SEQ ID NO: 753886 - RNA, 24 nt, Human
cucacgccuguaaucgcagcacuu

SEQ ID NO: 753887 - RNA, 24 nt, Human
cucacugcaaccuccgccucccgg

SEQ ID NO: 753888 - RNA, 24 nt, Human
cucaggugauccaccugucuuggc

SEQ ID NO: 753889 - RNA, 27 nt, Human
cuccaaaaaaaaaaaagaccacccaca

SEQ ID NO: 753890 - RNA, 24 nt, Human
cucccaaacaaaaucaaaggaccc

SEQ ID NO: 753891 - RNA, 26 nt, Human
cuccugaccucaagugauccgccugc

SEQ ID NO: 753892 - RNA, 22 nt, Human
cucgcucuuguugcccaggcug

SEQ ID NO: 753893 - RNA, 24 nt, Human
cucgcucuuguugcccaggcugga

SEQ ID NO: 753894 - RNA, 18 nt, Human
cucuuguugcccaggcug

SEQ ID NO: 753895 - RNA, 19 nt, Human
cugaccucaaagucgacac

SEQ ID NO: 753896 - RNA, 19 nt, Human
cugagcgagacuccgucuc

SEQ ID NO: 753897 - RNA, 23 nt, Human
cugcaaccuccgccucccgguuc

SEQ ID NO: 753898 - RNA, 20 nt, Human
cugccaccuacucaauccca

SEQ ID NO: 753899 - RNA, 23 nt, Human
cugucuuggccucccaaagugcu

SEQ ID NO: 753900 - RNA, 18 nt, Human
cuuaacuuaaacagaaaa

SEQ ID NO: 753901 - RNA, 24 nt, Human
cuuguugcccaggcuggagugcaa

SEQ ID NO: 753902 - RNA, 18 nt, Human
cuuuauauugugcuuucc

SEQ ID NO: 753903 - RNA, 23 nt, Human
gacaaaacaaaacaacacuuuaa

SEQ ID NO: 753904 - RNA, 24 nt, Human
gaccucaagugauccgccugccuc

SEQ ID NO: 753905 - RNA, 24 nt, Human
gaucacccgaagccaggaguucaa

SEQ ID NO: 753906 - RNA, 24 nt, Human
gauggcaggugccuauaaucccag

SEQ ID NO: 753907 - RNA, 18 nt, Human
gauuacaggcaugagcca

SEQ ID NO: 753908 - RNA, 21 nt, Human
gauuacaggcaugagccacug

SEQ ID NO: 753909 - RNA, 24 nt, Human
gauuacaggcaugagccacugugc

SEQ ID NO: 753910 - RNA, 18 nt, Human
gauuacaggcgugagcca

SEQ ID NO: 753911 - RNA, 22 nt, Human
gauuacaggcgugagccaccgc

SEQ ID NO: 753912 - RNA, 22 nt, Human
gauuacaggcgugagccaccgc

SEQ ID NO: 753913 - RNA, 18 nt, Human
gauuacaggcgugcgcca

SEQ ID NO: 753914 - RNA, 18 nt, Human
gcagcacuuugggaggcc

SEQ ID NO: 753915 - RNA, 26 nt, Human
gccaacauggugaaaacccccgucuc

SEQ ID NO: 753916 - RNA, 18 nt, Human
gccaacauggugaaaccc

SEQ ID NO: 753917 - RNA, 22 nt, Human
gccaccacacuccagccugggc

SEQ ID NO: 753918 - RNA, 19 nt, Human
gcccaggcuggagugcaau

SEQ ID NO: 753919 - RNA, 23 nt, Human
gccgcagccucccgaguagcugg

SEQ ID NO: 753920 - RNA, 24 nt, Human
gccucccgguucaagcgauucucc

SEQ ID NO: 753921 - RNA, 23 nt, Human
gccugaacccaggagaugguggu

SEQ ID NO: 753922 - RNA, 24 nt, Human
gcucuuguugcccaggcuggagug

SEQ ID NO: 753923 - RNA, 19 nt, Human
gcuggagugcaauggcaca

SEQ ID NO: 753924 - RNA, 18 nt, Human
ggacuuggaggcaaagua

SEQ ID NO: 753925 - RNA, 24 nt, Human
ggagauggcgccaccacacuccag

SEQ ID NO: 753926 - RNA, 22 nt, Human
ggauuacaggcaugagccacug

SEQ ID NO: 753927 - RNA, 24 nt, Human
ggauuacaggcaugagccacugug

SEQ ID NO: 753928 - RNA, 21 nt, Human
ggcagaucaagagguuaggag

SEQ ID NO: 753929 - RNA, 18 nt, Human
ggccaaggagggcagauc

SEQ ID NO: 753930 - RNA, 21 nt, Human
ggcccgggcccagagggaacc

SEQ ID NO: 753931 - RNA, 19 nt, Human
ggccgggcgcgguggcuca

SEQ ID NO: 753932 - RNA, 20 nt, Human
ggcgcgguggcucaggccug

SEQ ID NO: 753933 - RNA, 21 nt, Human
ggcucaggccugcaaucccag

SEQ ID NO: 753934 - RNA, 22 nt, Human
gggaggcugagacggaagaauc

SEQ ID NO: 753935 - RNA, 18 nt, Human
gggauuacaggcgugagc

SEQ ID NO: 753936 - RNA, 21 nt, Human
gggauuacaggcgugagccac

SEQ ID NO: 753937 - RNA, 22 nt, Human
gggauuacaggcgugagccacc

SEQ ID NO: 753938 - RNA, 23 nt, Human
gggauuacaggcgugagccaccg

SEQ ID NO: 753939 - RNA, 20 nt, Human
gggcccgguggcccgggccc

SEQ ID NO: 753940 - RNA, 24 nt, Human
gguggcucacgccuguaaucgcag

SEQ ID NO: 753941 - RNA, 18 nt, Human
guagcugggauuacaggc

SEQ ID NO: 753942 - RNA, 18 nt, Human
guagcugggauuacaggc

SEQ ID NO: 753943 - RNA, 24 nt, Human
gugauccaccugucuuggccuccc

SEQ ID NO: 753944 - RNA, 22 nt, Human
gugggcccgguggcccgggccc

SEQ ID NO: 753945 - RNA, 27 nt, Human
guggguccuaaagaaaaagacuuucau

SEQ ID NO: 753946 - RNA, 23 nt, Human
uaaaagauuuauugcaguaauac

SEQ ID NO: 753947 - RNA, 20 nt, Human
uaaaauggaaaacaugaccc

SEQ ID NO: 753948 - RNA, 18 nt, Human
uaaagaaaaagacuuuca

SEQ ID NO: 753949 - RNA, 18 nt, Human
uaaagugccucuaguuga

SEQ ID NO: 753950 - RNA, 23 nt, Human
uaaagugucaggaacagucucag

SEQ ID NO: 753951 - RNA, 23 nt, Human
uaaccaaaaaaugucuuuaacag

SEQ ID NO: 753952 - RNA, 19 nt, Human
uaaccucaggugauccacc

SEQ ID NO: 753953 - RNA, 24 nt, Human
uaaccucaggugauccaccugucu

SEQ ID NO: 753954 - RNA, 22 nt, Human
uaaccucuuuguuccagacacu

SEQ ID NO: 753955 - RNA, 20 nt, Human
uaacuaaguggcuuuucccc

SEQ ID NO: 753956 - RNA, 19 nt, Human
uaagaggcuuaagaaaacc

SEQ ID NO: 753957 - RNA, 19 nt, Human
uacaaaacaccaaauauac

SEQ ID NO: 753958 - RNA, 24 nt, Human
uacaggcaugagccacugugccca

SEQ ID NO: 753959 - RNA, 23 nt, Human
uacaggcgugagccaccgcgccc

SEQ ID NO: 753960 - RNA, 23 nt, Human
uacaggcgugcgccaccacaccc

SEQ ID NO: 753961 - RNA, 24 nt, Human
uaccagcuucaauuuuuuaaaaag

SEQ ID NO: 753962 - RNA, 25 nt, Human
uacccaaaacuauacaaaacaccaa

SEQ ID NO: 753963 - RNA, 20 nt, Human
uacccaauggugauauacug

SEQ ID NO: 753964 - RNA, 18 nt, Human
uacuagaguguaguggga

SEQ ID NO: 753965 - RNA, 21 nt, Human
uagaaagaaaguggacaccac

SEQ ID NO: 753966 - RNA, 24 nt, Human
uagcagaaacaggguuucaccaug

SEQ ID NO: 753967 - RNA, 24 nt, Human
uaggaggccaaggcaagcggauca

SEQ ID NO: 753968 - RNA, 21 nt, Human
uaggauuacaggcaugagcca

SEQ ID NO: 753969 - RNA, 22 nt, Human
uaggauuacaggcaugagccac

SEQ ID NO: 753970 - RNA, 22 nt, Human
uaggauuacaggcaugagccac

SEQ ID NO: 753971 - RNA, 24 nt, Human
uaggauuacaggcaugagccacug

SEQ ID NO: 753972 - RNA, 26 nt, Human
uaggauuacaggcaugagccacugug

SEQ ID NO: 753973 - RNA, 24 nt, Human
uaggccagugcgguggcucacgcc

SEQ ID NO: 753974 - RNA, 24 nt, Human
uagugggagaagaacuuucuugau

SEQ ID NO: 753975 - RNA, 20 nt, Human
uaguugauauuaacaacaac

SEQ ID NO: 753976 - RNA, 23 nt, Human
uauacaaaacaccaaauauacca

SEQ ID NO: 753977 - RNA, 28 nt, Human
uauacaaaacaccaaauauaccauuagc

SEQ ID NO: 753978 - RNA, 22 nt, Human
uaucuuaacuuaaacagaaaau

SEQ ID NO: 753979 - RNA, 20 nt, Human
ucaagaccauccuggccaac

SEQ ID NO: 753980 - RNA, 22 nt, Human
ucaagaccauccuggccaacau

SEQ ID NO: 753981 - RNA, 24 nt, Human
ucaagagguuaggagaucaagacc

SEQ ID NO: 753982 - RNA, 19 nt, Human
ucacugcaaccuccgccuc

SEQ ID NO: 753983 - RNA, 23 nt, Human
ucacugcaaccuccgccucccgg

SEQ ID NO: 753984 - RNA, 24 nt, Human
ucacugcaaccuccgccucccggu

SEQ ID NO: 753985 - RNA, 26 nt, Human
ucacugcaaccuccgccucccgguuc

SEQ ID NO: 753986 - RNA, 23 nt, Human
ucagcaguguaagccaguauguu

SEQ ID NO: 753987 - RNA, 29 nt, Human
ucauacaaaaaacaauggcagaaaaacuc

SEQ ID NO: 753988 - RNA, 22 nt, Human
uccaaaaaaaaaaaagaccacc

SEQ ID NO: 753989 - RNA, 23 nt, Human
uccaaaaaaaaaaaagaccaccc

SEQ ID NO: 753990 - RNA, 19 nt, Human
uccaccaccaagcuccaaa

SEQ ID NO: 753991 - RNA, 24 nt, Human
uccagccugggcagcugagcgaga

SEQ ID NO: 753992 - RNA, 24 nt, Human
ucccaaagugccgggauuacaggc

SEQ ID NO: 753993 - RNA, 24 nt, Human
ucccaaagugcuaggauuacaggc

SEQ ID NO: 753994 - RNA, 22 nt, Human
ucccccuuacagaugugcaaaa

SEQ ID NO: 753995 - RNA, 21 nt, Human
uccccucagaauacaagaaaa

SEQ ID NO: 753996 - RNA, 24 nt, Human
ucccgaguagcugggauuacaggc

SEQ ID NO: 753997 - RNA, 18 nt, Human
ucccgguucaagcgauuc

SEQ ID NO: 753998 - RNA, 20 nt, Human
ucccgguucaagcgauucuc

SEQ ID NO: 753999 - RNA, 18 nt, Human
ucccguccacucuaccca

SEQ ID NO: 754000 - RNA, 19 nt, Human
uccuaaagaaaaagacuuu

SEQ ID NO: 754001 - RNA, 21 nt, Human
uccuaaagaaaaagacuuuca

SEQ ID NO: 754002 - RNA, 24 nt, Human
ucgggaggcugagacggaagaauc

SEQ ID NO: 754003 - RNA, 18 nt, Human
ucuccaaaaaaaaaaaag

SEQ ID NO: 754004 - RNA, 20 nt, Human
ucuccaaaaaaaaaaaagaa

SEQ ID NO: 754005 - RNA, 27 nt, Human
ucuccaaaaaaaaaaaagaccacccac

SEQ ID NO: 754006 - RNA, 23 nt, Human
ucucuggauucuauucuuuagcu

SEQ ID NO: 754007 - RNA, 20 nt, Human
ucuuacuucugaggguuuua

SEQ ID NO: 754008 - RNA, 26 nt, Human
ucuuaugguuaauaugauuaucuacc

SEQ ID NO: 754009 - RNA, 21 nt, Human
ucuuggccucccaaagugcua

SEQ ID NO: 754010 - RNA, 22 nt, Human
ucuuguugcccaggcuggagug

SEQ ID NO: 754011 - RNA, 20 nt, Human
ugaaaaaagcauguaauaaa

SEQ ID NO: 754012 - RNA, 20 nt, Human
ugaaaacaccugccaccuac

SEQ ID NO: 754013 - RNA, 19 nt, Human
ugaacccaggagauggugg

SEQ ID NO: 754014 - RNA, 19 nt, Human
ugacaagacacgugagcug

SEQ ID NO: 754015 - RNA, 18 nt, Human
ugaccucaagugauccgc

SEQ ID NO: 754016 - RNA, 24 nt, Human
ugaccucaagugauccgccugccu

SEQ ID NO: 754017 - RNA, 23 nt, Human
ugacucaaacugguuuggaaguu

SEQ ID NO: 754018 - RNA, 20 nt, Human
ugagacggaagaaucgccug

SEQ ID NO: 754019 - RNA, 24 nt, Human
ugagacggaagaaucgccugaacc

SEQ ID NO: 754020 - RNA, 23 nt, Human
ugagcgagacuccgucuccaaaa

SEQ ID NO: 754021 - RNA, 18 nt, Human
ugauggcaggugccuaua

SEQ ID NO: 754022 - RNA, 19 nt, Human
ugcccaggcaggcauugag

SEQ ID NO: 754023 - RNA, 18 nt, Human
ugcccaggcuggagugca

SEQ ID NO: 754024 - RNA, 21 nt, Human
ugcccaggcuggagugcaaug

SEQ ID NO: 754025 - RNA, 24 nt, Human
ugcccaggcuggagugcaauggca

SEQ ID NO: 754026 - RNA, 24 nt, Human
ugccgggauuacaggcgugagcca

SEQ ID NO: 754027 - RNA, 23 nt, Human
ugccuauaaucccagcuacucgg

SEQ ID NO: 754028 - RNA, 24 nt, Human
ugccuauaaucccagcuacucggg

SEQ ID NO: 754029 - RNA, 22 nt, Human
ugccucggccucccaaagugcc

SEQ ID NO: 754030 - RNA, 24 nt, Human
ugccucggccucccaaagugccgg

SEQ ID NO: 754031 - RNA, 21 nt, Human
ugcucucaaacuccugaccuc

SEQ ID NO: 754032 - RNA, 25 nt, Human
ugcucuuccccaaauugaguccuua

SEQ ID NO: 754033 - RNA, 18 nt, Human
uggaaaauucauagagcc

SEQ ID NO: 754034 - RNA, 18 nt, Human
uggacaccacaagaauga

SEQ ID NO: 754035 - RNA, 23 nt, Human
uggagugcaauggcacaaucucg

SEQ ID NO: 754036 - RNA, 24 nt, Human
uggagugcaauggcacaaucucgg

SEQ ID NO: 754037 - RNA, 24 nt, Human
uggcacaaucucggcucacugcaa

SEQ ID NO: 754038 - RNA, 24 nt, Human
uggcaggugccuauaaucccagcu

SEQ ID NO: 754039 - RNA, 19 nt, Human
uggccaacauggugaaaac

SEQ ID NO: 754040 - RNA, 18 nt, Human
uggccaacauggugaaac

SEQ ID NO: 754041 - RNA, 18 nt, Human
uggcucacgccuguaauc

SEQ ID NO: 754042 - RNA, 24 nt, Human
uggcucacgccuguaaucgcagca

SEQ ID NO: 754043 - RNA, 19 nt, Human
uggcucaggccugcaaucc

SEQ ID NO: 754044 - RNA, 22 nt, Human
uggcucaggccugcaaucccag

SEQ ID NO: 754045 - RNA, 24 nt, Human
uggcucaggccugcaaucccagca

SEQ ID NO: 754046 - RNA, 24 nt, Human
ugggaggccaaggagggcagauca

SEQ ID NO: 754047 - RNA, 18 nt, Human
ugggauuacaggcgugcg

SEQ ID NO: 754048 - RNA, 19 nt, Human
ugggauuacaggcgugcgc

SEQ ID NO: 754049 - RNA, 21 nt, Human
ugggauuacaggcgugcgcca

SEQ ID NO: 754050 - RNA, 22 nt, Human
ugggauuacaggcgugcgccac

SEQ ID NO: 754051 - RNA, 24 nt, Human
ugggauuacaggcgugcgccacca

SEQ ID NO: 754052 - RNA, 24 nt, Human
uggugccuguggguuuuuauuaga

SEQ ID NO: 754053 - RNA, 23 nt, Human
uggugugugggggaaagaaaaac

SEQ ID NO: 754054 - RNA, 26 nt, Human
ugguuuggaaguugcagagcaauggg

SEQ ID NO: 754055 - RNA, 24 nt, Human
uguagaagaacccauaaggggccg

SEQ ID NO: 754056 - RNA, 24 nt, Human
ugucagaaaacauaaugaagaaaa

SEQ ID NO: 754057 - RNA, 19 nt, Human
uguccugaccucaaagucg

SEQ ID NO: 754058 - RNA, 23 nt, Human
ugucuuggccucccaaagugcua

SEQ ID NO: 754059 - RNA, 20 nt, Human
uguggaaguacucuagauga

SEQ ID NO: 754060 - RNA, 24 nt, Human
uguuaggacucuuucauaggauuu

SEQ ID NO: 754061 - RNA, 26 nt, Human
uguucaaaaccacaaaaggguucgau

SEQ ID NO: 754062 - RNA, 20 nt, Human
uguugcccaggcuggagugc

SEQ ID NO: 754063 - RNA, 24 nt, Human
uuagaaaacauuuguaugacucaa

SEQ ID NO: 754064 - RNA, 24 nt, Human
uuagcugggcaugauggcaggugc

SEQ ID NO: 754065 - RNA, 23 nt, Human
uuaggccagugcgguggcucacg

SEQ ID NO: 754066 - RNA, 21 nt, Human
uuauuaaagagcuuuuaucuu

SEQ ID NO: 754067 - RNA, 21 nt, Human
uucaacuagguaagaauaagc

SEQ ID NO: 754068 - RNA, 19 nt, Human
uucaagcgauucucccgcc

SEQ ID NO: 754069 - RNA, 22 nt, Human
uucaauuuuuuaaaaagcuguu

SEQ ID NO: 754070 - RNA, 19 nt, Human
uucaugguuucauaagagg

SEQ ID NO: 754071 - RNA, 23 nt, Human
uugguguucaaaaccacaaaagg

SEQ ID NO: 754072 - RNA, 21 nt, Human
uuucaccauguuagccaggcu

SEQ ID NO: 754073 - RNA, 23 nt, Human
uuugcuucuaacuuuccuaucuu

SEQ ID NO: 754074 - RNA, 22 nt, Human
uuuuuuuuuuugagacggagcc

SEQ ID NO: 754075 - RNA, 19 nt, Human
aaaaaaaaacacccaauga

SEQ ID NO: 754076 - RNA, 18 nt, Human
aaaaguacugugaccaaa

SEQ ID NO: 754077 - RNA, 20 nt, Human
aaaauacccuccccauucuc

SEQ ID NO: 754078 - RNA, 24 nt, Human
aaacaagaaaagcaaccacaagga

SEQ ID NO: 754079 - RNA, 25 nt, Human
aaaggucaaaagcuagggguaagcc

SEQ ID NO: 754080 - RNA, 22 nt, Human
aaagguucccagacuggagaaa

SEQ ID NO: 754081 - RNA, 22 nt, Human
aaauacccaacccauggaaugc

SEQ ID NO: 754082 - RNA, 19 nt, Human
aaaugcaaaggucaaaagc

SEQ ID NO: 754083 - RNA, 26 nt, Human
aacaaaaacaaaccuaauaccuauaa

SEQ ID NO: 754084 - RNA, 22 nt, Human
aacaaaugcaacaaauacucau

SEQ ID NO: 754085 - RNA, 21 nt, Human
aaccuaauaccuauaaucuua

SEQ ID NO: 754086 - RNA, 20 nt, Human
aagagaaacaagaaaagcaa

SEQ ID NO: 754087 - RNA, 21 nt, Human
aagcaguaccauacuguuauc

SEQ ID NO: 754088 - RNA, 22 nt, Human
acauaaccuuuuaaaaugugcc

SEQ ID NO: 754089 - RNA, 20 nt, Human
acccaaugaugcacagacuu

SEQ ID NO: 754090 - RNA, 19 nt, Human
acugaagccugaacacuga

SEQ ID NO: 754091 - RNA, 18 nt, Human
acuguuaucaucgagucu

SEQ ID NO: 754092 - RNA, 26 nt, Human
acuuaucacuuugauagaauccacaa

SEQ ID NO: 754093 - RNA, 24 nt, Human
agaaaggaaacaucuuuuuaaaaa

SEQ ID NO: 754094 - RNA, 19 nt, Human
agaaaggagaaggagccac

SEQ ID NO: 754095 - RNA, 24 nt, Human
agacagagccuguaguuucugugg

SEQ ID NO: 754096 - RNA, 21 nt, Human
agaggcugaagugcaguuuug

SEQ ID NO: 754097 - RNA, 21 nt, Human
agcaaagaaaaacuuaaagaa

SEQ ID NO: 754098 - RNA, 22 nt, Human
agcaaagaaaaacuuaaagaaa

SEQ ID NO: 754099 - RNA, 23 nt, Human
aggcaaaaaugcaauggauaguc

SEQ ID NO: 754100 - RNA, 21 nt, Human
aguagugcuugauaguuugaa

SEQ ID NO: 754101 - RNA, 20 nt, Human
agucugaaauaaaauacaaa

SEQ ID NO: 754102 - RNA, 18 nt, Human
agugcuugauaguuugaa

SEQ ID NO: 754103 - RNA, 18 nt, Human
aucauacuucacaggcag

SEQ ID NO: 754104 - RNA, 22 nt, Human
auccuguaaacacuuuauugca

SEQ ID NO: 754105 - RNA, 21 nt, Human
auggggguugggaagggauau

SEQ ID NO: 754106 - RNA, 19 nt, Human
auuccacaaaaguacugug

SEQ ID NO: 754107 - RNA, 22 nt, Human
caaaaaccuaguacauaaccuu

SEQ ID NO: 754108 - RNA, 19 nt, Human
caaaaagaaacugucacaa

SEQ ID NO: 754109 - RNA, 24 nt, Human
caaaggacuacccuucagaagggc

SEQ ID NO: 754110 - RNA, 18 nt, Human
caaauacucauuugcucc

SEQ ID NO: 754111 - RNA, 19 nt, Human
caaaugcaacaaauacuca

SEQ ID NO: 754112 - RNA, 23 nt, Human
caaaugcaacaaauacucauuug

SEQ ID NO: 754113 - RNA, 19 nt, Human
caaauugaacaaaugcaac

SEQ ID NO: 754114 - RNA, 26 nt, Human
caacaaauacucauuugcucccaaga

SEQ ID NO: 754115 - RNA, 21 nt, Human
caagaaaagcaaccacaagga

SEQ ID NO: 754116 - RNA, 23 nt, Human
caagaaaagcaaccacaaggagg

SEQ ID NO: 754117 - RNA, 23 nt, Human
caauaacuccuaaaaggucaaac

SEQ ID NO: 754118 - RNA, 22 nt, Human
cacccaaugaugcacagacuua

SEQ ID NO: 754119 - RNA, 20 nt, Human
cagcaaaaucaacaacccuc

SEQ ID NO: 754120 - RNA, 24 nt, Human
cagugcagaucuguaucuucuuug

SEQ ID NO: 754121 - RNA, 24 nt, Human
cauaauuaaauauucaccauauac

SEQ ID NO: 754122 - RNA, 21 nt, Human
cauccucuuagaaaauucugg

SEQ ID NO: 754123 - RNA, 22 nt, Human
ccauccacucugaagccacuac

SEQ ID NO: 754124 - RNA, 18 nt, Human
cccaagaaauuaaucuuu

SEQ ID NO: 754125 - RNA, 21 nt, Human
cccaagaaauuaaucuuuaga

SEQ ID NO: 754126 - RNA, 22 nt, Human
ccugaagcccuauagcagacac

SEQ ID NO: 754127 - RNA, 19 nt, Human
ccuguaaacacuuuauugc

SEQ ID NO: 754128 - RNA, 18 nt, Human
cucaagauaaguggaaaa

SEQ ID NO: 754129 - RNA, 24 nt, Human
cugucacaauggggguugggaagg

SEQ ID NO: 754130 - RNA, 25 nt, Human
gaaaaacaaaaacaaaccuaauacc

SEQ ID NO: 754131 - RNA, 21 nt, Human
gaaacugucacaauggggguu

SEQ ID NO: 754132 - RNA, 21 nt, Human
gaacaaaugcaacaaauacuc

SEQ ID NO: 754133 - RNA, 19 nt, Human
gaagcccuauagcagacac

SEQ ID NO: 754134 - RNA, 22 nt, Human
gaagcugaugaucaagaaugau

SEQ ID NO: 754135 - RNA, 21 nt, Human
gcuguugcaauguggaaggca

SEQ ID NO: 754136 - RNA, 19 nt, Human
gggaaguaaaaaagguucc

SEQ ID NO: 754137 - RNA, 22 nt, Human
guaagcagguaaccuaccuggc

SEQ ID NO: 754138 - RNA, 20 nt, Human
gucagacucgguccccugaa

SEQ ID NO: 754139 - RNA, 19 nt, Human
guggaaaaacaaaaacaaa

SEQ ID NO: 754140 - RNA, 20 nt, Human
uaaaaaaaaacacccaauga

SEQ ID NO: 754141 - RNA, 22 nt, Human
uaaaaugugccuaugcucuccu

SEQ ID NO: 754142 - RNA, 22 nt, Human
uaaagcaaagaaaaacuuaaag

SEQ ID NO: 754143 - RNA, 24 nt, Human
uaaagcuacuagcuccuuuccaaa

SEQ ID NO: 754144 - RNA, 18 nt, Human
uaaauuaaaaaaaaacac

SEQ ID NO: 754145 - RNA, 20 nt, Human
uaacaugugcacauugugcu

SEQ ID NO: 754146 - RNA, 18 nt, Human
uaacugaagccugaacac

SEQ ID NO: 754147 - RNA, 22 nt, Human
uaagcacaaacaauccauuuac

SEQ ID NO: 754148 - RNA, 23 nt, Human
uaaggcacgauauuugucacaga

SEQ ID NO: 754149 - RNA, 20 nt, Human
uaaucuuuagaaaggaaaca

SEQ ID NO: 754150 - RNA, 26 nt, Human
uacagcuuuacaaaggacuacccuuc

SEQ ID NO: 754151 - RNA, 23 nt, Human
uauauaaaacuaacaugugcaca

SEQ ID NO: 754152 - RNA, 20 nt, Human
uauggugguggccuuaaagc

SEQ ID NO: 754153 - RNA, 21 nt, Human
ucacaacgcuauuucuagauc

SEQ ID NO: 754154 - RNA, 22 nt, Human
ucacagauaaauguauuguguu

SEQ ID NO: 754155 - RNA, 22 nt, Human
ucacaucaauugggaguucaag

SEQ ID NO: 754156 - RNA, 19 nt, Human
ucauuugcucccaagaaau

SEQ ID NO: 754157 - RNA, 22 nt, Human
uccaaaauaaugucccaaaaau

SEQ ID NO: 754158 - RNA, 22 nt, Human
uccacaaaaguacugugaccaa

SEQ ID NO: 754159 - RNA, 19 nt, Human
uccaggcuacaaguacaua

SEQ ID NO: 754160 - RNA, 18 nt, Human
ucuguaguuguuuagagg

SEQ ID NO: 754161 - RNA, 18 nt, Human
ucuguaucuucuuugcuu

SEQ ID NO: 754162 - RNA, 25 nt, Human
ugaaaauagcagcuuucagugagaa

SEQ ID NO: 754163 - RNA, 20 nt, Human
ugaacaaaugcaacaaauac

SEQ ID NO: 754164 - RNA, 22 nt, Human
ugaacaaaugcaacaaauacuc

SEQ ID NO: 754165 - RNA, 22 nt, Human
ugaaccauucuaaauaauaaca

SEQ ID NO: 754166 - RNA, 21 nt, Human
ugacuagacuaucugcgaaac

SEQ ID NO: 754167 - RNA, 23 nt, Human
ugagaaaggagaaggagccacgu

SEQ ID NO: 754168 - RNA, 22 nt, Human
ugaucuugguaggaaaaaaaaa

SEQ ID NO: 754169 - RNA, 18 nt, Human
ugaugcuaacauauauau

SEQ ID NO: 754170 - RNA, 22 nt, Human
ugcaaaaaaucaaguuuugcug

SEQ ID NO: 754171 - RNA, 18 nt, Human
ugcaaaggucaaaagcua

SEQ ID NO: 754172 - RNA, 19 nt, Human
ugcaacaaauacucauuug

SEQ ID NO: 754173 - RNA, 24 nt, Human
ugcuguugcaauguggaaggcagu

SEQ ID NO: 754174 - RNA, 26 nt, Human
uggaaaaggacagccacagcgucgac

SEQ ID NO: 754175 - RNA, 27 nt, Human
uggaaacuggauugcuuugguuccaua

SEQ ID NO: 754176 - RNA, 24 nt, Human
uggggaaguaaaaaagguucccag

SEQ ID NO: 754177 - RNA, 24 nt, Human
uggucacaucaauugggaguucaa

SEQ ID NO: 754178 - RNA, 21 nt, Human
ugucagacucgguccccugaa

SEQ ID NO: 754179 - RNA, 18 nt, Human
uguguuugucagacucgg

SEQ ID NO: 754180 - RNA, 20 nt, Human
uguguuugucagacucgguc

SEQ ID NO: 754181 - RNA, 23 nt, Human
uuaagcacaaacaauccauuuac

SEQ ID NO: 754182 - RNA, 22 nt, Human
uuacacguuucaagaaaaccau

SEQ ID NO: 754183 - RNA, 26 nt, Human
uucaacauaaauauaaauaaucacau

SEQ ID NO: 754184 - RNA, 19 nt, Human
uucagugagagucugcacu

SEQ ID NO: 754185 - RNA, 21 nt, Human
uugaaugcucauuacaaaugc

SEQ ID NO: 754186 - RNA, 19 nt, Human
uuuaaagggggaaaaaucc

SEQ ID NO: 754187 - RNA, 25 nt, Human
uuucuaaguagugcuugauaguuug

SEQ ID NO: 754188 - RNA, 22 nt, Human
uuuuacugauuguagaucaagu

SEQ ID NO: 754189 - RNA, 20 nt, Human
uuuuucaaacccauccacuc

SEQ ID NO: 754190 - RNA, 28 nt, Human
aaaaaaaaaaaaaaaaaaaacaaaagaa

SEQ ID NO: 754191 - RNA, 22 nt, Human
aaaaaaaacaaaagaaaacaag

SEQ ID NO: 754192 - RNA, 25 nt, Human
aaaaaaacaaaagaaaacaagaaca

SEQ ID NO: 754193 - RNA, 21 nt, Human
aaaaaacaaaagaaaacaaga

SEQ ID NO: 754194 - RNA, 21 nt, Human
aaaaaagaaacuauacaaacu

SEQ ID NO: 754195 - RNA, 22 nt, Human
aaaaacaaaagaaaacaagaac

SEQ ID NO: 754196 - RNA, 23 nt, Human
aaaaagaaaagcaccuaagagaa

SEQ ID NO: 754197 - RNA, 19 nt, Human
aaaacaaaagaaaacaaga

SEQ ID NO: 754198 - RNA, 22 nt, Human
aaaacaagaacagauaugacaa

SEQ ID NO: 754199 - RNA, 23 nt, Human
aaaagaaaacaagaacagauaug

SEQ ID NO: 754200 - RNA, 21 nt, Human
aaaagcaccuaagagaaucca

SEQ ID NO: 754201 - RNA, 19 nt, Human
aaacaagaacagauaugac

SEQ ID NO: 754202 - RNA, 24 nt, Human
aaacagccagauucugucucaaaa

SEQ ID NO: 754203 - RNA, 19 nt, Human
aaagaaaagcaccuaagag

SEQ ID NO: 754204 - RNA, 18 nt, Human
aaaggcugggaaacagca

SEQ ID NO: 754205 - RNA, 23 nt, Human
aacagaaugagacugcaucucaa

SEQ ID NO: 754206 - RNA, 22 nt, Human
aacagccagauucugucucaaa

SEQ ID NO: 754207 - RNA, 18 nt, Human
aacaugaugaaaccccgu

SEQ ID NO: 754208 - RNA, 19 nt, Human
aacaugaugaaaccccguc

SEQ ID NO: 754209 - RNA, 20 nt, Human
aacaugaugaaaccccgucc

SEQ ID NO: 754210 - RNA, 20 nt, Human
aacaugguaaagcuccgacu

SEQ ID NO: 754211 - RNA, 18 nt, Human
aagaaagaaaaagaaaag

SEQ ID NO: 754212 - RNA, 22 nt, Human
aagaaagaaagaaagaaaaaga

SEQ ID NO: 754213 - RNA, 18 nt, Human
aagacaaaauuggaucca

SEQ ID NO: 754214 - RNA, 25 nt, Human
aagacuacaacuacaugagcucuga

SEQ ID NO: 754215 - RNA, 18 nt, Human
aagaucauaaagcugcca

SEQ ID NO: 754216 - RNA, 19 nt, Human
aagcccuuacucagccacc

SEQ ID NO: 754217 - RNA, 21 nt, Human
aagcuccgacucuacaaaaaa

SEQ ID NO: 754218 - RNA, 24 nt, Human
aaggacuacaugggaaagccaaug

SEQ ID NO: 754219 - RNA, 21 nt, Human
aagggacucuggaggccaaga

SEQ ID NO: 754220 - RNA, 24 nt, Human
aaucacuugaggccaggaguugga

SEQ ID NO: 754221 - RNA, 18 nt, Human
aauggcuugaaccuggga

SEQ ID NO: 754222 - RNA, 24 nt, Human
aauggcuugaaccugggaggcgga

SEQ ID NO: 754223 - RNA, 20 nt, Human
aauuguuugaauccaggagg

SEQ ID NO: 754224 - RNA, 23 nt, Human
acaaagcaggucuggagagaagc

SEQ ID NO: 754225 - RNA, 22 nt, Human
acaccaguaaaacuaccaucug

SEQ ID NO: 754226 - RNA, 24 nt, Human
acagaaugagacugcaucucaaaa

SEQ ID NO: 754227 - RNA, 28 nt, Human
acauguaaaaaaagaaacuauacaaacu

SEQ ID NO: 754228 - RNA, 24 nt, Human
accccgucccuacuaaaaguacaa

SEQ ID NO: 754229 - RNA, 20 nt, Human
accugggcaguguggcccuc

SEQ ID NO: 754230 - RNA, 22 nt, Human
acucuggaggccaagagaggag

SEQ ID NO: 754231 - RNA, 24 nt, Human
acugcacuccaacuugggcaacag

SEQ ID NO: 754232 - RNA, 18 nt, Human
acugcacuucagccuggg

SEQ ID NO: 754233 - RNA, 24 nt, Human
acugcacuucagccugggaaacag

SEQ ID NO: 754234 - RNA, 23 nt, Human
acuucagccugggaaacagccag

SEQ ID NO: 754235 - RNA, 24 nt, Human
acuugaggucaggaguucgagacc

SEQ ID NO: 754236 - RNA, 19 nt, Human
agaacagauaugacaaugu

SEQ ID NO: 754237 - RNA, 22 nt, Human
agagaagccagauauaacccaa

SEQ ID NO: 754238 - RNA, 18 nt, Human
agagguugcagugagcug

SEQ ID NO: 754239 - RNA, 24 nt, Human
agagguugcagugagcugaguuca

SEQ ID NO: 754240 - RNA, 20 nt, Human
agagguugcagugagcuggc

SEQ ID NO: 754241 - RNA, 23 nt, Human
agaucacuugaggucaggaguuc

SEQ ID NO: 754242 - RNA, 24 nt, Human
agcacuuugggaggccgaggcagg

SEQ ID NO: 754243 - RNA, 23 nt, Human
agccagauaugguggugggugcc

SEQ ID NO: 754244 - RNA, 22 nt, Human
agccugggaaacagccagauuc

SEQ ID NO: 754245 - RNA, 21 nt, Human
agcuacuggggaagcugaggc

SEQ ID NO: 754246 - RNA, 18 nt, Human
agcugggcgugguggugc

SEQ ID NO: 754247 - RNA, 18 nt, Human
agcugggcgugguggugc

SEQ ID NO: 754248 - RNA, 23 nt, Human
aggaguucgagaccagucuggcc

SEQ ID NO: 754249 - RNA, 20 nt, Human
aggcagagguugcagugagc

SEQ ID NO: 754250 - RNA, 24 nt, Human
aggcagagguugcagugagcugag

SEQ ID NO: 754251 - RNA, 26 nt, Human
aggcagaucacuugaggucaggaguu

SEQ ID NO: 754252 - RNA, 22 nt, Human
aggcaggcagaucacuugaggu

SEQ ID NO: 754253 - RNA, 26 nt, Human
aggcaggcagaucacuugaggucagg

SEQ ID NO: 754254 - RNA, 22 nt, Human
aggcaugagaauggcuugaacc

SEQ ID NO: 754255 - RNA, 24 nt, Human
aggcaugagaauggcuugaaccug

SEQ ID NO: 754256 - RNA, 24 nt, Human
aggcgcgguggcucaugccuguaa

SEQ ID NO: 754257 - RNA, 20 nt, Human
aggcggagguugcagugagc

SEQ ID NO: 754258 - RNA, 24 nt, Human
aggcggagguugcagugagcugag

SEQ ID NO: 754259 - RNA, 24 nt, Human
agguagaaucucaaaaauuuaaac

SEQ ID NO: 754260 - RNA, 24 nt, Human
agucuggccaacaugaugaaaccc

SEQ ID NO: 754261 - RNA, 20 nt, Human
aucacuugaggccaggaguu

SEQ ID NO: 754262 - RNA, 24 nt, Human
aucaugccacugcacuccaacuug

SEQ ID NO: 754263 - RNA, 19 nt, Human
augccuguaaucccagcac

SEQ ID NO: 754264 - RNA, 19 nt, Human
auucccaucagcuaggaca

SEQ ID NO: 754265 - RNA, 26 nt, Human
caaacuagaaggcaaucucaucuuuu

SEQ ID NO: 754266 - RNA, 21 nt, Human
caaaucacacaucccaccccc

SEQ ID NO: 754267 - RNA, 21 nt, Human
caaaucucuacaccugcguca

SEQ ID NO: 754268 - RNA, 20 nt, Human
caacugcuggaagacagggu

SEQ ID NO: 754269 - RNA, 25 nt, Human
caagaucauaaagcugccaaacuuc

SEQ ID NO: 754270 - RNA, 18 nt, Human
caagcccuuacucagcca

SEQ ID NO: 754271 - RNA, 18 nt, Human
caaucucaucuuuuaaua

SEQ ID NO: 754272 - RNA, 24 nt, Human
caauucaaaucacacaucccaccc

SEQ ID NO: 754273 - RNA, 22 nt, Human
cacaggccuuaagacuacaacu

SEQ ID NO: 754274 - RNA, 20 nt, Human
cacccccaaccuacacuguc

SEQ ID NO: 754275 - RNA, 23 nt, Human
cacuaaggacuacaugggaaagc

SEQ ID NO: 754276 - RNA, 23 nt, Human
cacugcacuccaacuugggcaac

SEQ ID NO: 754277 - RNA, 24 nt, Human
cacugcacuccaacuugggcaaca

SEQ ID NO: 754278 - RNA, 18 nt, Human
cacugcacuucagccugg

SEQ ID NO: 754279 - RNA, 19 nt, Human
cacugcacuucagccuggg

SEQ ID NO: 754280 - RNA, 19 nt, Human
cacugcacuucagccuggg

SEQ ID NO: 754281 - RNA, 24 nt, Human
cacugcacuucagccugggaaaca

SEQ ID NO: 754282 - RNA, 21 nt, Human
cacuucagccugggaaacagc

SEQ ID NO: 754283 - RNA, 23 nt, Human
cacuugaggucaggaguucgaga

SEQ ID NO: 754284 - RNA, 27 nt, Human
cagaucacuugaggucaggaguucgag

SEQ ID NO: 754285 - RNA, 24 nt, Human
cagcacuuugggaggccgaggcag

SEQ ID NO: 754286 - RNA, 25 nt, Human
cagcacuuugggaggccgaggcagg

SEQ ID NO: 754287 - RNA, 20 nt, Human
caggaguuggagagcagccu

SEQ ID NO: 754288 - RNA, 18 nt, Human
caggcagaucacuugagg

SEQ ID NO: 754289 - RNA, 20 nt, Human
cauccuggcucagggccuuu

SEQ ID NO: 754290 - RNA, 22 nt, Human
cauccuggcucagggccuuugc

SEQ ID NO: 754291 - RNA, 26 nt, Human
caucucaaaaaaaaaaaaaaaaaaaa

SEQ ID NO: 754292 - RNA, 20 nt, Human
caugccuguaaucccagcac

SEQ ID NO: 754293 - RNA, 24 nt, Human
caugccuguaaucccagcacuuug

SEQ ID NO: 754294 - RNA, 23 nt, Human
ccacugcacuccaacuugggcaa

SEQ ID NO: 754295 - RNA, 24 nt, Human
ccacugcacuccaacuugggcaac

SEQ ID NO: 754296 - RNA, 19 nt, Human
ccacugcacuucagccugg

SEQ ID NO: 754297 - RNA, 20 nt, Human
ccacugcacuucagccuggg

SEQ ID NO: 754298 - RNA, 24 nt, Human
ccacugcacuucagccugggaaac

SEQ ID NO: 754299 - RNA, 26 nt, Human
ccacugcacuucagccugggaaacag

SEQ ID NO: 754300 - RNA, 22 nt, Human
ccaggaggcagagguugcagug

SEQ ID NO: 754301 - RNA, 20 nt, Human
cccaaccuacacuguccccc

SEQ ID NO: 754302 - RNA, 22 nt, Human
ccccaaccuacacugucccccu

SEQ ID NO: 754303 - RNA, 24 nt, Human
ccccaaccuacacugucccccuca

SEQ ID NO: 754304 - RNA, 18 nt, Human
ccccuguugcuccugcuc

SEQ ID NO: 754305 - RNA, 24 nt, Human
cccucaauucaaaucacacauccc

SEQ ID NO: 754306 - RNA, 20 nt, Human
cccugccacccaccuucccu

SEQ ID NO: 754307 - RNA, 25 nt, Human
ccgcggcggcgacaccgccucccuc

SEQ ID NO: 754308 - RNA, 22 nt, Human
ccucagaggcaacugccacucu

SEQ ID NO: 754309 - RNA, 18 nt, Human
ccucagccucuucaagug

SEQ ID NO: 754310 - RNA, 23 nt, Human
ccugaccaacaugguaaagcucc

SEQ ID NO: 754311 - RNA, 24 nt, Human
ccugaccaacaugguaaagcuccg

SEQ ID NO: 754312 - RNA, 19 nt, Human
ccugggaggcggagguugc

SEQ ID NO: 754313 - RNA, 21 nt, Human
ccuguaaucccagcuauucag

SEQ ID NO: 754314 - RNA, 20 nt, Human
ccuuauugcagcacauccug

SEQ ID NO: 754315 - RNA, 21 nt, Human
cgagaccagucuggccaacau

SEQ ID NO: 754316 - RNA, 24 nt, Human
cgauagaaucacuugaggccagga

SEQ ID NO: 754317 - RNA, 23 nt, Human
cguaccuguaauccuagcuacug

SEQ ID NO: 754318 - RNA, 18 nt, Human
cuaaucccagcaggugaa

SEQ ID NO: 754319 - RNA, 21 nt, Human
cuacaccugcgucaccgccgc

SEQ ID NO: 754320 - RNA, 24 nt, Human
cucaugccuguaaucccagcacuu

SEQ ID NO: 754321 - RNA, 22 nt, Human
cuggccaacaugaugaaacccc

SEQ ID NO: 754322 - RNA, 19 nt, Human
cugugcauguuuuucuucu

SEQ ID NO: 754323 - RNA, 19 nt, Human
cuuaucuuguaaacucugu

SEQ ID NO: 754324 - RNA, 20 nt, Human
cuuguaaacucugucucccu

SEQ ID NO: 754325 - RNA, 22 nt, Human
cuuguaaacucugucucccugc

SEQ ID NO: 754326 - RNA, 23 nt, Human
gaaacagcagccaggggcaggag

SEQ ID NO: 754327 - RNA, 19 nt, Human
gaaaccccgucccuacuaa

SEQ ID NO: 754328 - RNA, 24 nt, Human
gaagauuugggaggcagaggcgau

SEQ ID NO: 754329 - RNA, 22 nt, Human
gaaucacuugaggccaggaguu

SEQ ID NO: 754330 - RNA, 22 nt, Human
gagaaugaaagugaugaagggg

SEQ ID NO: 754331 - RNA, 23 nt, Human
gagaauuguuugaauccaggagg

SEQ ID NO: 754332 - RNA, 24 nt, Human
gagacaugagaauuguuugaaucc

SEQ ID NO: 754333 - RNA, 18 nt, Human
gagaucaugccacugcac

SEQ ID NO: 754334 - RNA, 25 nt, Human
gaggcaggcagaucacuugagguca

SEQ ID NO: 754335 - RNA, 22 nt, Human
gagguugcagugagcugagauc

SEQ ID NO: 754336 - RNA, 23 nt, Human
gaguucaugccacugcacuucag

SEQ ID NO: 754337 - RNA, 24 nt, Human
gaucacuugaggucaggaguucga

SEQ ID NO: 754338 - RNA, 22 nt, Human
gaugaaaggacaggguccagga

SEQ ID NO: 754339 - RNA, 18 nt, Human
gcaaucucaucuuuuaau

SEQ ID NO: 754340 - RNA, 21 nt, Human
gcagaucacuugaggucagga

SEQ ID NO: 754341 - RNA, 19 nt, Human
gcagcagaacagcacauga

SEQ ID NO: 754342 - RNA, 22 nt, Human
gccaacaugaugaaaccccguc

SEQ ID NO: 754343 - RNA, 24 nt, Human
gccacugcacuccaacuugggcaa

SEQ ID NO: 754344 - RNA, 20 nt, Human
gcggcggcgacaccgccucc

SEQ ID NO: 754345 - RNA, 20 nt, Human
gcugagaucaugccacugca

SEQ ID NO: 754346 - RNA, 23 nt, Human
gcuggauuucccacacagcaguu

SEQ ID NO: 754347 - RNA, 19 nt, Human
gcuugaaccugggaggcgg

SEQ ID NO: 754348 - RNA, 22 nt, Human
gcuugaaccugggaggcggagg

SEQ ID NO: 754349 - RNA, 22 nt, Human
ggaggcagagguugcagugagc

SEQ ID NO: 754350 - RNA, 18 nt, Human
ggaggugagguguugggg

SEQ ID NO: 754351 - RNA, 22 nt, Human
ggagguugcagugagcugagau

SEQ ID NO: 754352 - RNA, 23 nt, Human
ggagguugcagugagcugagauc

SEQ ID NO: 754353 - RNA, 24 nt, Human
ggagguugcagugagcugagauca

SEQ ID NO: 754354 - RNA, 21 nt, Human
ggcaguguggcccucaauuca

SEQ ID NO: 754355 - RNA, 24 nt, Human
gggcaggaggaaagcugggagagu

SEQ ID NO: 754356 - RNA, 24 nt, Human
gggcgugguggugcguaccuguaa

SEQ ID NO: 754357 - RNA, 18 nt, Human
ggucaggcgcgguggcuc

SEQ ID NO: 754358 - RNA, 21 nt, Human
ggucaggcgcgguggcucaug

SEQ ID NO: 754359 - RNA, 23 nt, Human
gguggcucaugccuguaauccca

SEQ ID NO: 754360 - RNA, 24 nt, Human
gguggcucaugccuguaaucccag

SEQ ID NO: 754361 - RNA, 24 nt, Human
gguggugcguaccuguaauccuag

SEQ ID NO: 754362 - RNA, 24 nt, Human
gguggugggugccuguaaucccag

SEQ ID NO: 754363 - RNA, 19 nt, Human
gugcauguuuuucuucugg

SEQ ID NO: 754364 - RNA, 18 nt, Human
gugccuguaaucccagcu

SEQ ID NO: 754365 - RNA, 23 nt, Human
guggugggugccuguaaucccag

SEQ ID NO: 754366 - RNA, 24 nt, Human
guugcagugagcugagaucaugcc

SEQ ID NO: 754367 - RNA, 21 nt, Human
uaaagcugccaaacuuccaaa

SEQ ID NO: 754368 - RNA, 22 nt, Human
uaagguagaaucucaaaaauuu

SEQ ID NO: 754369 - RNA, 22 nt, Human
uaccuguaauccuagcuacugg

SEQ ID NO: 754370 - RNA, 23 nt, Human
uaccuguaauccuagcuacuggg

SEQ ID NO: 754371 - RNA, 21 nt, Human
uaggauaaauuccaaauggcu

SEQ ID NO: 754372 - RNA, 20 nt, Human
ucaaaaaaaaaaaaaaaaaa

SEQ ID NO: 754373 - RNA, 22 nt, Human
ucaaaaaaaaaaaaaaaaaaaa

SEQ ID NO: 754374 - RNA, 24 nt, Human
ucacacaucccacccccugcugga

SEQ ID NO: 754375 - RNA, 26 nt, Human
ucacuuaguuugggaaaaaaaauuua

SEQ ID NO: 754376 - RNA, 20 nt, Human
ucacuugaggucaggaguuc

SEQ ID NO: 754377 - RNA, 21 nt, Human
ucagccugggaaacagccaga

SEQ ID NO: 754378 - RNA, 23 nt, Human
ucaugccacugcacuccaacuug

SEQ ID NO: 754379 - RNA, 22 nt, Human
ucaugccuguaaucccagcacu

SEQ ID NO: 754380 - RNA, 24 nt, Human
uccaugugcuaggauaaauuccaa

SEQ ID NO: 754381 - RNA, 21 nt, Human
ucccuacuaaaaguacaaaaa

SEQ ID NO: 754382 - RNA, 19 nt, Human
ucucaaaaaaaaaaaaaaa

SEQ ID NO: 754383 - RNA, 24 nt, Human
ucuggccaacaugaugaaaccccg

SEQ ID NO: 754384 - RNA, 24 nt, Human
ugaaccugggaggcggagguugca

SEQ ID NO: 754385 - RNA, 19 nt, Human
ugacauuacaucacuacuu

SEQ ID NO: 754386 - RNA, 19 nt, Human
ugacggagcacgaccuggg

SEQ ID NO: 754387 - RNA, 19 nt, Human
ugagaaugaaagugaugaa

SEQ ID NO: 754388 - RNA, 22 nt, Human
ugagcugagaucaugccacugc

SEQ ID NO: 754389 - RNA, 20 nt, Human
ugagcugggcgugguggugc

SEQ ID NO: 754390 - RNA, 18 nt, Human
ugaggagagagaggagga

SEQ ID NO: 754391 - RNA, 24 nt, Human
ugaggcaugagaauggcuugaacc

SEQ ID NO: 754392 - RNA, 20 nt, Human
ugaguaacccacgcagugaa

SEQ ID NO: 754393 - RNA, 20 nt, Human
ugaguucaguugaagguggg

SEQ ID NO: 754394 - RNA, 23 nt, Human
ugaucccugccacccaccuuccc

SEQ ID NO: 754395 - RNA, 18 nt, Human
ugaugaaaccccgucccu

SEQ ID NO: 754396 - RNA, 19 nt, Human
ugaugaggagagagaggag

SEQ ID NO: 754397 - RNA, 19 nt, Human
ugcaagcccuuacucagcc

SEQ ID NO: 754398 - RNA, 19 nt, Human
ugccaguguuauuacuaac

SEQ ID NO: 754399 - RNA, 21 nt, Human
ugccaguguuauuacuaacaa

SEQ ID NO: 754400 - RNA, 24 nt, Human
ugcccuagaacucaacugcuggaa

SEQ ID NO: 754401 - RNA, 23 nt, Human
ugccuguaaucccagcacuuugg

SEQ ID NO: 754402 - RNA, 24 nt, Human
ugccuguaaucccagcacuuuggg

SEQ ID NO: 754403 - RNA, 24 nt, Human
ugccuguaaucccagcuauucagg

SEQ ID NO: 754404 - RNA, 18 nt, Human
uggagagcagccugacca

SEQ ID NO: 754405 - RNA, 18 nt, Human
uggaggccaagagaggag

SEQ ID NO: 754406 - RNA, 24 nt, Human
uggcucaugccuguaaucccagca

SEQ ID NO: 754407 - RNA, 24 nt, Human
uggcuugaaccugggaggcggagg

SEQ ID NO: 754408 - RNA, 19 nt, Human
ugggaaacagcagccaggg

SEQ ID NO: 754409 - RNA, 24 nt, Human
ugggaggcagaggcgauagaauca

SEQ ID NO: 754410 - RNA, 20 nt, Human
ugggaggccgaggcaggcag

SEQ ID NO: 754411 - RNA, 24 nt, Human
ugggaggccgaggcaggcagauca

SEQ ID NO: 754412 - RNA, 29 nt, Human
ugggaggcggagguugcagugacaacggu

SEQ ID NO: 754413 - RNA, 24 nt, Human
ugggaggcggagguugcagugagc

SEQ ID NO: 754414 - RNA, 22 nt, Human
ugggggaggugagguguugggg

SEQ ID NO: 754415 - RNA, 24 nt, Human
uggucaggcgcgguggcucaugcc

SEQ ID NO: 754416 - RNA, 22 nt, Human
ugguggugcguaccuguaaucc

SEQ ID NO: 754417 - RNA, 24 nt, Human
ugguggugggugccuguaauccca

SEQ ID NO: 754418 - RNA, 25 nt, Human
uguaaaaaaagaaacuauacaaacu

SEQ ID NO: 754419 - RNA, 22 nt, Human
ugucaaguucucggcuuccguu

SEQ ID NO: 754420 - RNA, 21 nt, Human
uguccugggggaggugaggug

SEQ ID NO: 754421 - RNA, 19 nt, Human
ugugaaagacuacagggug

SEQ ID NO: 754422 - RNA, 18 nt, Human
ugugcuguugccuccagc

SEQ ID NO: 754423 - RNA, 18 nt, Human
ugugugagagauggacag

SEQ ID NO: 754424 - RNA, 21 nt, Human
uuagccagauauggugguggg

SEQ ID NO: 754425 - RNA, 22 nt, Human
uucaguugaaggugggggcugg

SEQ ID NO: 754426 - RNA, 24 nt, Human
uucaugccacugcacuucagccug

SEQ ID NO: 754427 - RNA, 24 nt, Human
uugaaccugggaggcggagguugc

SEQ ID NO: 754428 - RNA, 18 nt, Human
uugaggccaggaguugga

SEQ ID NO: 754429 - RNA, 19 nt, Human
uugaguucaguugaaggug

SEQ ID NO: 754430 - RNA, 18 nt, Human
uugcagugagcugagauc

SEQ ID NO: 754431 - RNA, 20 nt, Human
uugcagugagcugagaucau

SEQ ID NO: 754432 - RNA, 21 nt, Human
uugcagugagcugagaucaug

SEQ ID NO: 754433 - RNA, 20 nt, Human
uugcagugagcugaguucau

SEQ ID NO: 754434 - RNA, 21 nt, Human
uugcagugagcugaguucaug

SEQ ID NO: 754435 - RNA, 19 nt, Human
uugcagugagcugaguucc

SEQ ID NO: 754436 - RNA, 25 nt, Human
uugggaggccgaggcaggcagauca

SEQ ID NO: 754437 - RNA, 24 nt, Human
uuguuugaauccaggaggcagagg

SEQ ID NO: 754438 - RNA, 24 nt, Human
uuuaauacauuccucacccccaac

SEQ ID NO: 754439 - RNA, 24 nt, Human
uuucugugucuccuccucaguuga

SEQ ID NO: 754440 - RNA, 20 nt, Human
aaacaaaaauauccaacaac

SEQ ID NO: 754441 - RNA, 21 nt, Human
aaagcuuuccugggucugcuc

SEQ ID NO: 754442 - RNA, 19 nt, Human
aaaggacagaguccccuca

SEQ ID NO: 754443 - RNA, 23 nt, Human
aaaucccuucccagaucccacag

SEQ ID NO: 754444 - RNA, 24 nt, Human
aaccacauggucagcaucagcccu

SEQ ID NO: 754445 - RNA, 22 nt, Human
aacugcauugccccaagagagc

SEQ ID NO: 754446 - RNA, 21 nt, Human
aaggacagaguccccucaaau

SEQ ID NO: 754447 - RNA, 19 nt, Human
aaggcuaaagaauacaagc

SEQ ID NO: 754448 - RNA, 20 nt, Human
acgaagcagagagaagagaa

SEQ ID NO: 754449 - RNA, 19 nt, Human
acgaagcagagagaagagg

SEQ ID NO: 754450 - RNA, 25 nt, Human
acucaccccgugcuccccucccccu

SEQ ID NO: 754451 - RNA, 28 nt, Human
acucaccccgugcuccccucccccuccc

SEQ ID NO: 754452 - RNA, 22 nt, Human
acugcauugccccaagagagca

SEQ ID NO: 754453 - RNA, 21 nt, Human
acugcugcagaucuucccaug

SEQ ID NO: 754454 - RNA, 22 nt, Human
agaaauccugcagcucugauuc

SEQ ID NO: 754455 - RNA, 21 nt, Human
agaagagagguuaagcuuucu

SEQ ID NO: 754456 - RNA, 18 nt, Human
agaaggaacagcccccac

SEQ ID NO: 754457 - RNA, 22 nt, Human
agaaggaggaggguuaaggagc

SEQ ID NO: 754458 - RNA, 22 nt, Human
agacaagagaggauuauaccga

SEQ ID NO: 754459 - RNA, 22 nt, Human
agaccagaggcauagaccaaga

SEQ ID NO: 754460 - RNA, 20 nt, Human
agagcacugagcuccuaauu

SEQ ID NO: 754461 - RNA, 19 nt, Human
agaggcauagaccaagaac

SEQ ID NO: 754462 - RNA, 23 nt, Human
agaguccccucaaaucccuuccc

SEQ ID NO: 754463 - RNA, 24 nt, Human
agaguugucugucugguuguucag

SEQ ID NO: 754464 - RNA, 24 nt, Human
agaguugucugucugguuguucag

SEQ ID NO: 754465 - RNA, 25 nt, Human
agaguugucugucugguuguucagu

SEQ ID NO: 754466 - RNA, 22 nt, Human
agauuuggacaagggagagguu

SEQ ID NO: 754467 - RNA, 18 nt, Human
agcaggaagggaagccac

SEQ ID NO: 754468 - RNA, 21 nt, Human
agcaggaagggaagccacugg

SEQ ID NO: 754469 - RNA, 24 nt, Human
aggaauccuagauuuggacaaggg

SEQ ID NO: 754470 - RNA, 23 nt, Human
aggcuucuccaagaaggaacagc

SEQ ID NO: 754471 - RNA, 20 nt, Human
agggaagggucaggaggugc

SEQ ID NO: 754472 - RNA, 19 nt, Human
agggcagaaggaggagggu

SEQ ID NO: 754473 - RNA, 18 nt, Human
aggggccacgaagcagag

SEQ ID NO: 754474 - RNA, 18 nt, Human
aggugcugggagcaguga

SEQ ID NO: 754475 - RNA, 20 nt, Human
agugguggagggaagggaag

SEQ ID NO: 754476 - RNA, 19 nt, Human
aucccuucccagaucccac

SEQ ID NO: 754477 - RNA, 23 nt, Human
caaaucccuucccagaucccaca

SEQ ID NO: 754478 - RNA, 22 nt, Human
caacaacaauaacaaaagcccu

SEQ ID NO: 754479 - RNA, 24 nt, Human
caacaacaauaacaaaagcccuuc

SEQ ID NO: 754480 - RNA, 22 nt, Human
caagaaauccugcagcucugau

SEQ ID NO: 754481 - RNA, 21 nt, Human
caagagaggauuauaccgagc

SEQ ID NO: 754482 - RNA, 20 nt, Human
caaguucuuaaccagugaca

SEQ ID NO: 754483 - RNA, 19 nt, Human
cagaaggaggaggguuaag

SEQ ID NO: 754484 - RNA, 22 nt, Human
cagaguccccucaaaucccuuc

SEQ ID NO: 754485 - RNA, 24 nt, Human
cagaucccacagcacuuagaaagg

SEQ ID NO: 754486 - RNA, 20 nt, Human
cagcacuuagaaaagagaaa

SEQ ID NO: 754487 - RNA, 21 nt, Human
cagccacucuuccaaaaguuu

SEQ ID NO: 754488 - RNA, 23 nt, Human
caggagccgaggacuggcgggag

SEQ ID NO: 754489 - RNA, 18 nt, Human
cagggcagaaggaggagg

SEQ ID NO: 754490 - RNA, 27 nt, Human
cauaagcagccacucuuccaaaaguuu

SEQ ID NO: 754491 - RNA, 22 nt, Human
cauccuuccuccaugaucucaa

SEQ ID NO: 754492 - RNA, 20 nt, Human
ccaacaacaauaacaaaagg

SEQ ID NO: 754493 - RNA, 20 nt, Human
ccagcccacagaccagaggc

SEQ ID NO: 754494 - RNA, 23 nt, Human
cccacagaccagaggcauagacc

SEQ ID NO: 754495 - RNA, 24 nt, Human
ccccaauaaaaggacagagucccc

SEQ ID NO: 754496 - RNA, 24 nt, Human
ccccucacccuaucaccccuucaa

SEQ ID NO: 754497 - RNA, 23 nt, Human
cccuaucaccccuucaauuuaga

SEQ ID NO: 754498 - RNA, 18 nt, Human
cccucacccuaucacccc

SEQ ID NO: 754499 - RNA, 18 nt, Human
cccugccccggccccugc

SEQ ID NO: 754500 - RNA, 19 nt, Human
cccugccccggccccugcg

SEQ ID NO: 754501 - RNA, 23 nt, Human
ccuacaugagaacacagcagacu

SEQ ID NO: 754502 - RNA, 22 nt, Human
ccucaaaucccuucccagaucc

SEQ ID NO: 754503 - RNA, 22 nt, Human
ccucacccuaucaccccuucaa

SEQ ID NO: 754504 - RNA, 20 nt, Human
ccucuggccccucacccuau

SEQ ID NO: 754505 - RNA, 22 nt, Human
cgaagcagagagaagagagacu

SEQ ID NO: 754506 - RNA, 21 nt, Human
cggaggccccggcugcuuuuu

SEQ ID NO: 754507 - RNA, 27 nt, Human
cucacccuuuuaacugcauugccccaa

SEQ ID NO: 754508 - RNA, 18 nt, Human
cuccaagaaggaacagcc

SEQ ID NO: 754509 - RNA, 20 nt, Human
cucccucucuuuuccucugg

SEQ ID NO: 754510 - RNA, 21 nt, Human
cucuuccagaaagcuuuccug

SEQ ID NO: 754511 - RNA, 18 nt, Human
cuucuucauccuuccucc

SEQ ID NO: 754512 - RNA, 18 nt, Human
gaacacagcagacuuccc

SEQ ID NO: 754513 - RNA, 21 nt, Human
gacuucuucaggcaccuucuu

SEQ ID NO: 754514 - RNA, 25 nt, Human
gagaaaguaaggagcauaaaaauau

SEQ ID NO: 754515 - RNA, 22 nt, Human
gagcaggaagggaagccacugg

SEQ ID NO: 754516 - RNA, 23 nt, Human
gagcagugagggagagaggaggg

SEQ ID NO: 754517 - RNA, 18 nt, Human
gagcugaggagaggccua

SEQ ID NO: 754518 - RNA, 20 nt, Human
gaggagaggccuaggcccug

SEQ ID NO: 754519 - RNA, 20 nt, Human
gaggccccugccccggcccc

SEQ ID NO: 754520 - RNA, 21 nt, Human
gcagcaggagccgaggacugg

SEQ ID NO: 754521 - RNA, 19 nt, Human
gcuccccucccccuccccc

SEQ ID NO: 754522 - RNA, 21 nt, Human
gcuccccucccccucccccau

SEQ ID NO: 754523 - RNA, 21 nt, Human
ggaagggucaggaggugcugg

SEQ ID NO: 754524 - RNA, 23 nt, Human
ggagcagugagggagagaggagg

SEQ ID NO: 754525 - RNA, 24 nt, Human
ggaggcgagcaggaagggaagcca

SEQ ID NO: 754526 - RNA, 23 nt, Human
ggccacgaagcagagagaagaga

SEQ ID NO: 754527 - RNA, 21 nt, Human
ggccccucacccuaucacccc

SEQ ID NO: 754528 - RNA, 23 nt, Human
gggaaacaaaaauauccaacaac

SEQ ID NO: 754529 - RNA, 20 nt, Human
gggaacauuagcccugcggu

SEQ ID NO: 754530 - RNA, 20 nt, Human
gggaagggucaggaggugcu

SEQ ID NO: 754531 - RNA, 21 nt, Human
gggccacgaagcagagagaag

SEQ ID NO: 754532 - RNA, 18 nt, Human
gggccuuuuccuuuuccu

SEQ ID NO: 754533 - RNA, 19 nt, Human
ggucaggcaaaggggccag

SEQ ID NO: 754534 - RNA, 23 nt, Human
ggugcucacugauuuggggagac

SEQ ID NO: 754535 - RNA, 25 nt, Human
ggugcugggagcagugagggagaga

SEQ ID NO: 754536 - RNA, 18 nt, Human
gugagggagagaggaggg

SEQ ID NO: 754537 - RNA, 18 nt, Human
gugcugggagcagugagg

SEQ ID NO: 754538 - RNA, 24 nt, Human
uaacaggugcccugcuccaucucc

SEQ ID NO: 754539 - RNA, 22 nt, Human
ucacgcacacuuucucauuccu

SEQ ID NO: 754540 - RNA, 19 nt, Human
ucaguuggagcucuggugg

SEQ ID NO: 754541 - RNA, 22 nt, Human
ucaguuggagcucuggugggaa

SEQ ID NO: 754542 - RNA, 23 nt, Human
uccaacaacaauaacaaaagccc

SEQ ID NO: 754543 - RNA, 23 nt, Human
uccaagaaggaacagcccccacc

SEQ ID NO: 754544 - RNA, 18 nt, Human
ucccagguugacucaccc

SEQ ID NO: 754545 - RNA, 23 nt, Human
ucccagguugacucaccccgugc

SEQ ID NO: 754546 - RNA, 23 nt, Human
ucccagguugacucaccccgugc

SEQ ID NO: 754547 - RNA, 19 nt, Human
ucccugagaccgaguccca

SEQ ID NO: 754548 - RNA, 24 nt, Human
uccuugaaagagggaagggucagg

SEQ ID NO: 754549 - RNA, 21 nt, Human
ugaaaagacauuggccaaaaa

SEQ ID NO: 754550 - RNA, 18 nt, Human
ugaaagguuuggagagga

SEQ ID NO: 754551 - RNA, 24 nt, Human
ugacaguacagaaaagcaagucuc

SEQ ID NO: 754552 - RNA, 20 nt, Human
ugacucaccccgugcucccc

SEQ ID NO: 754553 - RNA, 24 nt, Human
ugagaacacagcagacuucccucc

SEQ ID NO: 754554 - RNA, 21 nt, Human
ugagggagagaggaggguccc

SEQ ID NO: 754555 - RNA, 18 nt, Human
ugcccugcuccaucuccc

SEQ ID NO: 754556 - RNA, 23 nt, Human
uggaaaccacauggucagcauca

SEQ ID NO: 754557 - RNA, 19 nt, Human
uggaaucucauaagcagcc

SEQ ID NO: 754558 - RNA, 19 nt, Human
uggagggaagggaagggcc

SEQ ID NO: 754559 - RNA, 19 nt, Human
uggcaggcaguguguccca

SEQ ID NO: 754560 - RNA, 20 nt, Human
uggcaggcagugugucccau

SEQ ID NO: 754561 - RNA, 23 nt, Human
uggccaaaaagagaaguugcagg

SEQ ID NO: 754562 - RNA, 18 nt, Human
ugucacaucgccagccuc

SEQ ID NO: 754563 - RNA, 24 nt, Human
uucauccuuccuccaugaucucaa

SEQ ID NO: 754564 - RNA, 20 nt, Human
uuccaugauugcgucuggcu

SEQ ID NO: 754565 - RNA, 24 nt, Human
uuccugggucugcucuagcugcau

SEQ ID NO: 754566 - RNA, 20 nt, Human
uugcagggagggcugacauc

SEQ ID NO: 754567 - RNA, 22 nt, Human
uugcagggagggcugacauccu

SEQ ID NO: 754568 - RNA, 19 nt, Human
uugcccugccagcccacag

SEQ ID NO: 754569 - RNA, 19 nt, Human
uuuaaaucuuccguucuuc

SEQ ID NO: 754570 - RNA, 20 nt, Human
uuuccuaccaggaauccuag

SEQ ID NO: 754571 - RNA, 18 nt, Human
uuuuccucugguucucca

SEQ ID NO: 754572 - RNA, 22 nt, Human
aaaaaaccucaaucaaacaaac

SEQ ID NO: 754573 - RNA, 22 nt, Human
aaaaaauaacauggaaauucau

SEQ ID NO: 754574 - RNA, 21 nt, Human
aaaaaccacccaccacaaaca

SEQ ID NO: 754575 - RNA, 21 nt, Human
aaaaauaagacacaaacagga

SEQ ID NO: 754576 - RNA, 23 nt, Human
aaaaccacccaccacaaacacac

SEQ ID NO: 754577 - RNA, 19 nt, Human
aaaccacccaccacaaaca

SEQ ID NO: 754578 - RNA, 25 nt, Human
aaagcaagaaaagcgguucaaagga

SEQ ID NO: 754579 - RNA, 18 nt, Human
aaagccauuuuagggagg

SEQ ID NO: 754580 - RNA, 20 nt, Human
aaagugaaccacccagugga

SEQ ID NO: 754581 - RNA, 21 nt, Human
aacagcucuuuguggaaacua

SEQ ID NO: 754582 - RNA, 19 nt, Human
aagagaccugaugauauug

SEQ ID NO: 754583 - RNA, 27 nt, Human
aagcaaccgccuuaacucuaaggucaa

SEQ ID NO: 754584 - RNA, 24 nt, Human
aaugcaacauagagugaacacucc

SEQ ID NO: 754585 - RNA, 21 nt, Human
acacacacuuucuccaugagu

SEQ ID NO: 754586 - RNA, 22 nt, Human
acagaagcagcaggaggcaaag

SEQ ID NO: 754587 - RNA, 23 nt, Human
acagggcacagaagcagcaggag

SEQ ID NO: 754588 - RNA, 26 nt, Human
acauacauaacacauuucuuuauaug

SEQ ID NO: 754589 - RNA, 20 nt, Human
acaugaaugaucuacccccc

SEQ ID NO: 754590 - RNA, 20 nt, Human
accaaaaaaccucaaucaaa

SEQ ID NO: 754591 - RNA, 23 nt, Human
agaaugcaacauagagugaacac

SEQ ID NO: 754592 - RNA, 23 nt, Human
agaugccaagauuacuggagacu

SEQ ID NO: 754593 - RNA, 19 nt, Human
agauuacuggagacugggc

SEQ ID NO: 754594 - RNA, 18 nt, Human
agcaagaaaagcgguuca

SEQ ID NO: 754595 - RNA, 19 nt, Human
aggccugacauuuugugug

SEQ ID NO: 754596 - RNA, 23 nt, Human
aggccugacauuuuguguggccu

SEQ ID NO: 754597 - RNA, 23 nt, Human
aggcuggcagcauggucuguggg

SEQ ID NO: 754598 - RNA, 23 nt, Human
aucaaacaaacgaacugaaagac

SEQ ID NO: 754599 - RNA, 25 nt, Human
augcacgaugcaccaagcgugcagu

SEQ ID NO: 754600 - RNA, 18 nt, Human
caaaaaagcaaccgccuu

SEQ ID NO: 754601 - RNA, 22 nt, Human
caacugacuggcccugcagaau

SEQ ID NO: 754602 - RNA, 22 nt, Human
caauaauaaauaacuuuagagg

SEQ ID NO: 754603 - RNA, 18 nt, Human
cacaaacaggacauggua

SEQ ID NO: 754604 - RNA, 20 nt, Human
caccaaaaaaccucaaucaa

SEQ ID NO: 754605 - RNA, 23 nt, Human
cacccgcagugcuuccaggaugg

SEQ ID NO: 754606 - RNA, 23 nt, Human
cagaaacaaguugucauugcacc

SEQ ID NO: 754607 - RNA, 21 nt, Human
cagaagcagcaggaggcaaag

SEQ ID NO: 754608 - RNA, 20 nt, Human
cagcagagccguaaaucaga

SEQ ID NO: 754609 - RNA, 18 nt, Human
caggaggcaaagugaacc

SEQ ID NO: 754610 - RNA, 21 nt, Human
cagggcacagaagcagcagga

SEQ ID NO: 754611 - RNA, 20 nt, Human
caugaaugaucuaccccccc

SEQ ID NO: 754612 - RNA, 24 nt, Human
cauuccaaccaccuagccacccag

SEQ ID NO: 754613 - RNA, 20 nt, Human
ccacccagcccaugcugggu

SEQ ID NO: 754614 - RNA, 21 nt, Human
ccagauacuugguugaaagau

SEQ ID NO: 754615 - RNA, 22 nt, Human
cccagcccaugcugggugcuaa

SEQ ID NO: 754616 - RNA, 24 nt, Human
cccaugcugggugcuaaucaaaag

SEQ ID NO: 754617 - RNA, 19 nt, Human
ccccccauaaacugaaagu

SEQ ID NO: 754618 - RNA, 22 nt, Human
cccucuauguuagaugaaaauc

SEQ ID NO: 754619 - RNA, 18 nt, Human
ccgccgcaccuccgcgcc

SEQ ID NO: 754620 - RNA, 24 nt, Human
ccgccgcaccuccgcgccgggacc

SEQ ID NO: 754621 - RNA, 20 nt, Human
ccgccgccuccggugcugau

SEQ ID NO: 754622 - RNA, 21 nt, Human
cgaacugaaagacacccuguc

SEQ ID NO: 754623 - RNA, 22 nt, Human
cgacacccgcagugcuuccagg

SEQ ID NO: 754624 - RNA, 19 nt, Human
cgccgugggugcggggguu

SEQ ID NO: 754625 - RNA, 22 nt, Human
cggcggcguccagggcggagcg

SEQ ID NO: 754626 - RNA, 19 nt, Human
cgggccggcucccacuccc

SEQ ID NO: 754627 - RNA, 20 nt, Human
cuagccacccagcccaugcu

SEQ ID NO: 754628 - RNA, 21 nt, Human
cuccccagccauauccacaga

SEQ ID NO: 754629 - RNA, 19 nt, Human
cuccccgccgcaccuccgc

SEQ ID NO: 754630 - RNA, 24 nt, Human
cuccgcgccgggaccggcggcguc

SEQ ID NO: 754631 - RNA, 22 nt, Human
cugaagccuuaacagggcacag

SEQ ID NO: 754632 - RNA, 20 nt, Human
cugcugcugcagccgccgcc

SEQ ID NO: 754633 - RNA, 26 nt, Human
cuggaacagaauauuccaacuucugu

SEQ ID NO: 754634 - RNA, 27 nt, Human
gacaaagaaaauauuuaaaaauaagac

SEQ ID NO: 754635 - RNA, 21 nt, Human
gagaaagucaugcccauagca

SEQ ID NO: 754636 - RNA, 21 nt, Human
gagggaaggaggggaagacag

SEQ ID NO: 754637 - RNA, 21 nt, Human
gagggaaggaggggaagacag

SEQ ID NO: 754638 - RNA, 21 nt, Human
gcaaagugaaccacccagugg

SEQ ID NO: 754639 - RNA, 21 nt, Human
gcagagagagagagggccacu

SEQ ID NO: 754640 - RNA, 23 nt, Human
gcuaaucaaaagaggauuuuacu

SEQ ID NO: 754641 - RNA, 18 nt, Human
gcugcugcagccgccgcc

SEQ ID NO: 754642 - RNA, 19 nt, Human
gcugcugcugcagccgccg

SEQ ID NO: 754643 - RNA, 19 nt, Human
ggaaaaagcaagaaaagcg

SEQ ID NO: 754644 - RNA, 20 nt, Human
ggaagacagugucagauucu

SEQ ID NO: 754645 - RNA, 19 nt, Human
ggccuugguccugaaaauu

SEQ ID NO: 754646 - RNA, 28 nt, Human
gggaaaaagcaagaaaagcgguucaaag

SEQ ID NO: 754647 - RNA, 21 nt, Human
gggaagcaggucuuaggaaag

SEQ ID NO: 754648 - RNA, 23 nt, Human
gggguuauaauaaaauucugguu

SEQ ID NO: 754649 - RNA, 21 nt, Human
gguguaccaaaaucugaauaa

SEQ ID NO: 754650 - RNA, 22 nt, Human
guacaacugacuggcccugcag

SEQ ID NO: 754651 - RNA, 18 nt, Human
gucaaagagaguugccau

SEQ ID NO: 754652 - RNA, 22 nt, Human
guccacugucauuccaaccacc

SEQ ID NO: 754653 - RNA, 24 nt, Human
gucccgacuuguugcugcugcugc

SEQ ID NO: 754654 - RNA, 20 nt, Human
uaaaaauaagacacaaacag

SEQ ID NO: 754655 - RNA, 22 nt, Human
uaaaaauaagacacaaacagga

SEQ ID NO: 754656 - RNA, 21 nt, Human
uaaaaggcuaaggugcaauca

SEQ ID NO: 754657 - RNA, 18 nt, Human
uaacauggaaauucauuc

SEQ ID NO: 754658 - RNA, 20 nt, Human
uacaugaacaaacauauaua

SEQ ID NO: 754659 - RNA, 18 nt, Human
uacuggagacugggccag

SEQ ID NO: 754660 - RNA, 22 nt, Human
uacuuuaaauaaaacagaaaca

SEQ ID NO: 754661 - RNA, 22 nt, Human
uacuuuagaaugcaacauagag

SEQ ID NO: 754662 - RNA, 18 nt, Human
uagcagagagagagaggg

SEQ ID NO: 754663 - RNA, 25 nt, Human
uagcugaggggaagguuauacacaa

SEQ ID NO: 754664 - RNA, 21 nt, Human
uaggccaccaaaaaaccucaa

SEQ ID NO: 754665 - RNA, 24 nt, Human
uauauauauguauauauguauaua

SEQ ID NO: 754666 - RNA, 26 nt, Human
uauauaucacaugaaugaucuacccu

SEQ ID NO: 754667 - RNA, 18 nt, Human
uauguauauauguauaua

SEQ ID NO: 754668 - RNA, 20 nt, Human
uauguauauauguauauauu

SEQ ID NO: 754669 - RNA, 23 nt, Human
uauguauauauguauauauuugu

SEQ ID NO: 754670 - RNA, 19 nt, Human
uauguguuauauauaugua

SEQ ID NO: 754671 - RNA, 20 nt, Human
uauguguuauauauauguau

SEQ ID NO: 754672 - RNA, 23 nt, Human
uauguguuauauauauguauaua

SEQ ID NO: 754673 - RNA, 23 nt, Human
uauuuuggaggcuuucaaauuag

SEQ ID NO: 754674 - RNA, 21 nt, Human
ucaagaacauuuucauuaugg

SEQ ID NO: 754675 - RNA, 23 nt, Human
ugcagaauacucagccaaagaag

SEQ ID NO: 754676 - RNA, 23 nt, Human
ugcauagaagcccagaugccaag

SEQ ID NO: 754677 - RNA, 19 nt, Human
ugccaagauuacuggagac

SEQ ID NO: 754678 - RNA, 25 nt, Human
uggcuccuggaacaacguucccucc

SEQ ID NO: 754679 - RNA, 19 nt, Human
uguauaaugauaaguuaca

SEQ ID NO: 754680 - RNA, 21 nt, Human
uguguuauauauauguauaua

SEQ ID NO: 754681 - RNA, 26 nt, Human
uguguuauauauauguauauauguaa

SEQ ID NO: 754682 - RNA, 18 nt, Human
uuacaggacaaagagcau

SEQ ID NO: 754683 - RNA, 23 nt, Human
uuacugcuauuaacagaacuuua

SEQ ID NO: 754684 - RNA, 21 nt, Human
uuagccuaaacagugcuauuc

SEQ ID NO: 754685 - RNA, 18 nt, Human
uugcugcugcugcagccg

SEQ ID NO: 754686 - RNA, 18 nt, Human
uuugcaagcuucuaaaag

SEQ ID NO: 754687 - RNA, 20 nt, Human
aaaaaaaaaaucagggggac

SEQ ID NO: 754688 - RNA, 22 nt, Human
aaaaaaaucagggggaccuaaa

SEQ ID NO: 754689 - RNA, 25 nt, Human
aaaacaccuagagaguauaaaaaca

SEQ ID NO: 754690 - RNA, 25 nt, Human
aaacacuaaagccugcaaaauagcu

SEQ ID NO: 754691 - RNA, 22 nt, Human
aaacugacuagcagcuccaggc

SEQ ID NO: 754692 - RNA, 23 nt, Human
aaagguguucauucucaauacac

SEQ ID NO: 754693 - RNA, 21 nt, Human
aaaguuugaggauucuaagcc

SEQ ID NO: 754694 - RNA, 19 nt, Human
aaauaaacacacaagccaa

SEQ ID NO: 754695 - RNA, 21 nt, Human
aaauagcucuaguuagacuuu

SEQ ID NO: 754696 - RNA, 23 nt, Human
aacagacuucuuauauaaucuaa

SEQ ID NO: 754697 - RNA, 19 nt, Human
aagugcuaagaccacaccu

SEQ ID NO: 754698 - RNA, 19 nt, Human
acaagccaaauauacaugg

SEQ ID NO: 754699 - RNA, 19 nt, Human
acaggagaagcagguaaua

SEQ ID NO: 754700 - RNA, 24 nt, Human
acgaaauaaacacacaagccaaau

SEQ ID NO: 754701 - RNA, 21 nt, Human
acuaaagccugcaaaauagcu

SEQ ID NO: 754702 - RNA, 22 nt, Human
acucuugcucuaaaaaaaaaaa

SEQ ID NO: 754703 - RNA, 18 nt, Human
acuggcucccuggcaaca

SEQ ID NO: 754704 - RNA, 20 nt, Human
agcaaacacaaggucaaaca

SEQ ID NO: 754705 - RNA, 18 nt, Human
agcagaccaauuuaccug

SEQ ID NO: 754706 - RNA, 23 nt, Human
aggacccucugcagaaagugcua

SEQ ID NO: 754707 - RNA, 20 nt, Human
aggagaagcagguaauaaaa

SEQ ID NO: 754708 - RNA, 20 nt, Human
caaaauagcucuaguuagac

SEQ ID NO: 754709 - RNA, 19 nt, Human
caaacagaaagcacauaug

SEQ ID NO: 754710 - RNA, 25 nt, Human
caaauaucuuccucuuuacagcuuc

SEQ ID NO: 754711 - RNA, 22 nt, Human
caacagcaagcagaccaauuua

SEQ ID NO: 754712 - RNA, 18 nt, Human
caaccccccuaaaauucc

SEQ ID NO: 754713 - RNA, 19 nt, Human
caaggucaaacagaaagca

SEQ ID NO: 754714 - RNA, 19 nt, Human
cacacuuucuuucucuccc

SEQ ID NO: 754715 - RNA, 18 nt, Human
caccuagagaguauaaaa

SEQ ID NO: 754716 - RNA, 18 nt, Human
cagcaaacacaaggucaa

SEQ ID NO: 754717 - RNA, 19 nt, Human
cagcaaacacaaggucaaa

SEQ ID NO: 754718 - RNA, 21 nt, Human
cagcaaacacaaggucaaaca

SEQ ID NO: 754719 - RNA, 21 nt, Human
cagcuuaaaaaaugagagcuc

SEQ ID NO: 754720 - RNA, 18 nt, Human
cauagaaaguacagggac

SEQ ID NO: 754721 - RNA, 20 nt, Human
cauagaaaguacagggacac

SEQ ID NO: 754722 - RNA, 19 nt, Human
caucuucuaucuugaaggc

SEQ ID NO: 754723 - RNA, 23 nt, Human
ccccuaaaauuccauucuaucuc

SEQ ID NO: 754724 - RNA, 21 nt, Human
ccuaaucuacuugcugccugc

SEQ ID NO: 754725 - RNA, 22 nt, Human
cgaaauaaacacacaagccaaa

SEQ ID NO: 754726 - RNA, 22 nt, Human
cucccuggcaacagacuucuua

SEQ ID NO: 754727 - RNA, 25 nt, Human
cucuaaaaaaaaaaaaucaggggga

SEQ ID NO: 754728 - RNA, 18 nt, Human
cucuggucaguuuuccuu

SEQ ID NO: 754729 - RNA, 19 nt, Human
cugaagcagcaguaggagg

SEQ ID NO: 754730 - RNA, 21 nt, Human
cuucuuguacaaagacauuga

SEQ ID NO: 754731 - RNA, 24 nt, Human
cuuggauuuuugcucuauuuuucc

SEQ ID NO: 754732 - RNA, 21 nt, Human
cuuucuuuugcaagagaagau

SEQ ID NO: 754733 - RNA, 23 nt, Human
gaaagcacauauguuugcuagaa

SEQ ID NO: 754734 - RNA, 19 nt, Human
gaaauaaacacacaagcca

SEQ ID NO: 754735 - RNA, 21 nt, Human
gggaggguacuaggaaugagg

SEQ ID NO: 754736 - RNA, 22 nt, Human
gguaauaaaacauuaaaaaaga

SEQ ID NO: 754737 - RNA, 22 nt, Human
gguuuggcagcaaacacaaggu

SEQ ID NO: 754738 - RNA, 24 nt, Human
guaauauguuaagaacucuugcuc

SEQ ID NO: 754739 - RNA, 19 nt, Human
uaaaaaaaaaaaaucaggg

SEQ ID NO: 754740 - RNA, 25 nt, Human
uaaaauaaaagcagagaggggaggc

SEQ ID NO: 754741 - RNA, 22 nt, Human
uaaacacuaaagccugcaaaau

SEQ ID NO: 754742 - RNA, 24 nt, Human
uacaacacaaaacaccuagagagu

SEQ ID NO: 754743 - RNA, 20 nt, Human
uacuugcugccugccuuagg

SEQ ID NO: 754744 - RNA, 20 nt, Human
uagaacaaauaucuuccucu

SEQ ID NO: 754745 - RNA, 21 nt, Human
uagcagcuccaggcuggaguu

SEQ ID NO: 754746 - RNA, 22 nt, Human
uaggcaaccccccuaaaauucc

SEQ ID NO: 754747 - RNA, 24 nt, Human
uaucuguauauuguucugaagcag

SEQ ID NO: 754748 - RNA, 22 nt, Human
uauuacaaacaguuggaaccca

SEQ ID NO: 754749 - RNA, 20 nt, Human
ucaaagagaugcagccuggc

SEQ ID NO: 754750 - RNA, 20 nt, Human
uccuaaucuacuugcugccu

SEQ ID NO: 754751 - RNA, 26 nt, Human
ucuaaaaaaaaaaaaucagggggacc

SEQ ID NO: 754752 - RNA, 21 nt, Human
ucuccuauccucaacucuuuu

SEQ ID NO: 754753 - RNA, 21 nt, Human
ugaagcagcaguaggaggacc

SEQ ID NO: 754754 - RNA, 20 nt, Human
ugcucuaaaaaaaaaaaauc

SEQ ID NO: 754755 - RNA, 23 nt, Human
ugcucuauuuuuccuucuuguac

SEQ ID NO: 754756 - RNA, 19 nt, Human
uguaauauguuaagaacuc

SEQ ID NO: 754757 - RNA, 22 nt, Human
uguaauauguuaagaacucuug

SEQ ID NO: 754758 - RNA, 18 nt, Human
uguuaagaacucuugcuc

SEQ ID NO: 754759 - RNA, 20 nt, Human
uugaggcuuaaaaaaauuag

SEQ ID NO: 754760 - RNA, 31 nt, Human
uugcucuaaaaaaaaaaaaucagggggaccc

SEQ ID NO: 754761 - RNA, 21 nt, Human
uuuccuucuacucaaguuucu

SEQ ID NO: 754762 - RNA, 20 nt, Human
aaaaaaaaaaagcacuaaua

SEQ ID NO: 754763 - RNA, 19 nt, Human
aaaaaaaagcacuaauaua

SEQ ID NO: 754764 - RNA, 25 nt, Human
aaaagacacauugaauuuuacuuaa

SEQ ID NO: 754765 - RNA, 19 nt, Human
aaacaacgucuccuccuaa

SEQ ID NO: 754766 - RNA, 24 nt, Human
aaaccaccaggccucuacuucagu

SEQ ID NO: 754767 - RNA, 18 nt, Human
aagcagauugaguugaau

SEQ ID NO: 754768 - RNA, 19 nt, Human
aagcuauaccagaggcaua

SEQ ID NO: 754769 - RNA, 20 nt, Human
aaggagucaauauaggaaac

SEQ ID NO: 754770 - RNA, 25 nt, Human
aaucacugaaauuacagaauaaaua

SEQ ID NO: 754771 - RNA, 21 nt, Human
acagucaaagucucaaguuuc

SEQ ID NO: 754772 - RNA, 22 nt, Human
accagcaggaagaaacugcagg

SEQ ID NO: 754773 - RNA, 18 nt, Human
acccgcccccucccuccc

SEQ ID NO: 754774 - RNA, 25 nt, Human
agauagugagugagaacauucgagc

SEQ ID NO: 754775 - RNA, 26 nt, Human
agugaagggugguagaacuauggaga

SEQ ID NO: 754776 - RNA, 23 nt, Human
augaugauaagaaagaaagccac

SEQ ID NO: 754777 - RNA, 21 nt, Human
auuuauaaucacugaaauuac

SEQ ID NO: 754778 - RNA, 24 nt, Human
caaaaacuuuuuauuaggaaagcu

SEQ ID NO: 754779 - RNA, 21 nt, Human
caagacccgcccccucccucc

SEQ ID NO: 754780 - RNA, 19 nt, Human
cacuagcagugaagggugg

SEQ ID NO: 754781 - RNA, 19 nt, Human
cacugaaauuacagaauaa

SEQ ID NO: 754782 - RNA, 21 nt, Human
caggguaggaaagaucgugag

SEQ ID NO: 754783 - RNA, 20 nt, Human
caucuguauucucuaguuau

SEQ ID NO: 754784 - RNA, 18 nt, Human
ccacaaaugacaaauguc

SEQ ID NO: 754785 - RNA, 20 nt, Human
ccaccaggccucuacuucag

SEQ ID NO: 754786 - RNA, 24 nt, Human
ccagaggcauaaucacuauacaau

SEQ ID NO: 754787 - RNA, 18 nt, Human
ccaggcaugcagcaaacu

SEQ ID NO: 754788 - RNA, 19 nt, Human
cgcccccucccuccccauc

SEQ ID NO: 754789 - RNA, 24 nt, Human
cuacaacuauaaaaaaaauaguua

SEQ ID NO: 754790 - RNA, 23 nt, Human
cuccaaaaaaucuuggcaucagg

SEQ ID NO: 754791 - RNA, 19 nt, Human
cucccuccccaucuugcag

SEQ ID NO: 754792 - RNA, 23 nt, Human
gaaacgcagggcuggaaccugaa

SEQ ID NO: 754793 - RNA, 21 nt, Human
gacccgcccccucccucccca

SEQ ID NO: 754794 - RNA, 21 nt, Human
gagaaaacauuaaaagugcuu

SEQ ID NO: 754795 - RNA, 22 nt, Human
gcuauaccagaggcauaaucac

SEQ ID NO: 754796 - RNA, 20 nt, Human
gugugugugugugugugugu

SEQ ID NO: 754797 - RNA, 21 nt, Human
gugugugugugugugugugug

SEQ ID NO: 754798 - RNA, 21 nt, Human
gugugugugugugugugugug

SEQ ID NO: 754799 - RNA, 21 nt, Human
gugugugugugugugugugug

SEQ ID NO: 754800 - RNA, 21 nt, Human
gugugugugugugugugugug

SEQ ID NO: 754801 - RNA, 23 nt, Human
uaaaagugcuuccuacaaagcug

SEQ ID NO: 754802 - RNA, 22 nt, Human
uaaaucaaaacuacaacuauaa

SEQ ID NO: 754803 - RNA, 25 nt, Human
uaagaaagugcagauguucuccaaa

SEQ ID NO: 754804 - RNA, 20 nt, Human
uaaucacugaaauuacagaa

SEQ ID NO: 754805 - RNA, 26 nt, Human
uaaucacugaaauuacagaauaaaua

SEQ ID NO: 754806 - RNA, 25 nt, Human
uacaaaacaacgucuccuccuaaac

SEQ ID NO: 754807 - RNA, 19 nt, Human
uaggaaagcuauaccagag

SEQ ID NO: 754808 - RNA, 21 nt, Human
uaggaaagcuauaccagaggc

SEQ ID NO: 754809 - RNA, 22 nt, Human
uaggauccauacaaugaucccc

SEQ ID NO: 754810 - RNA, 25 nt, Human
uauggcccuuccuccaaaucgcauc

SEQ ID NO: 754811 - RNA, 22 nt, Human
ucaggaugaagugucacaaaga

SEQ ID NO: 754812 - RNA, 21 nt, Human
ucugugccaugaugauaagaa

SEQ ID NO: 754813 - RNA, 24 nt, Human
ugaaauuacagaauaaauauaugc

SEQ ID NO: 754814 - RNA, 23 nt, Human
ugaagggugguagaacuauggag

SEQ ID NO: 754815 - RNA, 20 nt, Human
ugaagugucacaaagagggu

SEQ ID NO: 754816 - RNA, 21 nt, Human
ugagaacauucgagcaagacc

SEQ ID NO: 754817 - RNA, 23 nt, Human
ugauauauacccaguugcuuuuu

SEQ ID NO: 754818 - RNA, 20 nt, Human
uggagugugugugugugugu

SEQ ID NO: 754819 - RNA, 27 nt, Human
uggaguguguguguguguguguguggu

SEQ ID NO: 754820 - RNA, 23 nt, Human
ugguauggagugugugugugugu

SEQ ID NO: 754821 - RNA, 24 nt, Human
uguguguguaccugcaccagcagg

SEQ ID NO: 754822 - RNA, 19 nt, Human
uguguguguguguguaccu

SEQ ID NO: 754823 - RNA, 22 nt, Human
uguguguguguguguguaccug

SEQ ID NO: 754824 - RNA, 18 nt, Human
ugugugugugugugugug

SEQ ID NO: 754825 - RNA, 18 nt, Human
ugugugugugugugugug

SEQ ID NO: 754826 - RNA, 18 nt, Human
ugugugugugugugugug

SEQ ID NO: 754827 - RNA, 18 nt, Human
ugugugugugugugugug

SEQ ID NO: 754828 - RNA, 18 nt, Human
ugugugugugugugugug

SEQ ID NO: 754829 - RNA, 18 nt, Human
ugugugugugugugugug

SEQ ID NO: 754830 - RNA, 18 nt, Human
ugugugugugugugugug

SEQ ID NO: 754831 - RNA, 18 nt, Human
ugugugugugugugugug

SEQ ID NO: 754832 - RNA, 18 nt, Human
ugugugugugugugugug

SEQ ID NO: 754833 - RNA, 18 nt, Human
ugugugugugugugugug

SEQ ID NO: 754834 - RNA, 18 nt, Human
ugugugugugugugugug

SEQ ID NO: 754835 - RNA, 18 nt, Human
ugugugugugugugugug

SEQ ID NO: 754836 - RNA, 21 nt, Human
ugugugugugugugugugugu

SEQ ID NO: 754837 - RNA, 21 nt, Human
ugugugugugugugugugugu

SEQ ID NO: 754838 - RNA, 21 nt, Human
ugugugugugugugugugugu

SEQ ID NO: 754839 - RNA, 21 nt, Human
ugugugugugugugugugugu

SEQ ID NO: 754840 - RNA, 21 nt, Human
ugugugugugugugugugugu

SEQ ID NO: 754841 - RNA, 21 nt, Human
ugugugugugugugugugugu

SEQ ID NO: 754842 - RNA, 21 nt, Human
ugugugugugugugugugugu

SEQ ID NO: 754843 - RNA, 21 nt, Human
ugugugugugugugugugugu

SEQ ID NO: 754844 - RNA, 21 nt, Human
ugugugugugugugugugugu

SEQ ID NO: 754845 - RNA, 21 nt, Human
ugugugugugugugugugugu

SEQ ID NO: 754846 - RNA, 21 nt, Human
ugugugugugugugugugugu

SEQ ID NO: 754847 - RNA, 21 nt, Human
ugugugugugugugugugugu

SEQ ID NO: 754848 - RNA, 21 nt, Human
ugugugugugugugugugugu

SEQ ID NO: 754849 - RNA, 21 nt, Human
ugugugugugugugugugugu

SEQ ID NO: 754850 - RNA, 21 nt, Human
ugugugugugugugugugugu

SEQ ID NO: 754851 - RNA, 21 nt, Human
ugugugugugugugugugugu

SEQ ID NO: 754852 - RNA, 21 nt, Human
ugugugugugugugugugugu

SEQ ID NO: 754853 - RNA, 21 nt, Human
ugugugugugugugugugugu

SEQ ID NO: 754854 - RNA, 21 nt, Human
ugugugugugugugugugugu

SEQ ID NO: 754855 - RNA, 21 nt, Human
ugugugugugugugugugugu

SEQ ID NO: 754856 - RNA, 21 nt, Human
ugugugugugugugugugugu

SEQ ID NO: 754857 - RNA, 22 nt, Human
ugugugugugugugugugugua

SEQ ID NO: 754858 - RNA, 22 nt, Human
ugugugugugugugugugugug

SEQ ID NO: 754859 - RNA, 22 nt, Human
ugugugugugugugugugugug

SEQ ID NO: 754860 - RNA, 22 nt, Human
ugugugugugugugugugugug

SEQ ID NO: 754861 - RNA, 22 nt, Human
ugugugugugugugugugugug

SEQ ID NO: 754862 - RNA, 22 nt, Human
ugugugugugugugugugugug

SEQ ID NO: 754863 - RNA, 22 nt, Human
ugugugugugugugugugugug

SEQ ID NO: 754864 - RNA, 25 nt, Human
uucaggguaggaaagaucgugagga

SEQ ID NO: 754865 - RNA, 22 nt, Human
uugaauggaaaugguauggagu

SEQ ID NO: 754866 - RNA, 22 nt, Human
uuggcaucaggaugaaguguca

SEQ ID NO: 754867 - RNA, 19 nt, Human
uuuaaaucaaaacuacaac

SEQ ID NO: 754868 - RNA, 25 nt, Human
uuuguucaggguaggaaagaucgug

SEQ ID NO: 754869 - RNA, 22 nt, Human
aaaaacacaaaugucccgugua

SEQ ID NO: 754870 - RNA, 22 nt, Human
aaaccaaggugcgaccaccaac

SEQ ID NO: 754871 - RNA, 24 nt, Human
aaagugcugggauuacaggcguga

SEQ ID NO: 754872 - RNA, 21 nt, Human
aaccugaaacauuccagacca

SEQ ID NO: 754873 - RNA, 25 nt, Human
aagaauucgugagugguucucggcc

SEQ ID NO: 754874 - RNA, 18 nt, Human
aaggaacuaugucauaaa

SEQ ID NO: 754875 - RNA, 19 nt, Human
aagugcugggauuacaggc

SEQ ID NO: 754876 - RNA, 19 nt, Human
aagugcugggauuacaggc

SEQ ID NO: 754877 - RNA, 26 nt, Human
aagugcugggauuacaggcgugagcc

SEQ ID NO: 754878 - RNA, 24 nt, Human
aaguuugcauuuagaaaauuuuga

SEQ ID NO: 754879 - RNA, 27 nt, Human
aaugccaacuucugaaaaaauaaaaau

SEQ ID NO: 754880 - RNA, 18 nt, Human
acauuucacuccaguggg

SEQ ID NO: 754881 - RNA, 19 nt, Human
accaaggugcgaccaccaa

SEQ ID NO: 754882 - RNA, 19 nt, Human
agauaaugccaacuucuga

SEQ ID NO: 754883 - RNA, 20 nt, Human
agcaagagcaccaaacaaga

SEQ ID NO: 754884 - RNA, 20 nt, Human
aggguaucuuuuccuccaaa

SEQ ID NO: 754885 - RNA, 21 nt, Human
aggugggcaggggagcugcuc

SEQ ID NO: 754886 - RNA, 20 nt, Human
aguccccucccccugcagcu

SEQ ID NO: 754887 - RNA, 19 nt, Human
augaacucaagaaccauga

SEQ ID NO: 754888 - RNA, 24 nt, Human
caaagugcugggauuacaggcgug

SEQ ID NO: 754889 - RNA, 23 nt, Human
caaauaacuaaaguuugcauuua

SEQ ID NO: 754890 - RNA, 26 nt, Human
caacuucugaaaaaauaaaaauuuuc

SEQ ID NO: 754891 - RNA, 19 nt, Human
caaguauuucacugaucuc

SEQ ID NO: 754892 - RNA, 20 nt, Human
cacagaccuaaacauccuuu

SEQ ID NO: 754893 - RNA, 18 nt, Human
cacugaucucaguucuuc

SEQ ID NO: 754894 - RNA, 27 nt, Human
caugaaugaaguccccucccccugcag

SEQ ID NO: 754895 - RNA, 18 nt, Human
cauuucacuccaguggga

SEQ ID NO: 754896 - RNA, 20 nt, Human
ccaaagugcugggauuacag

SEQ ID NO: 754897 - RNA, 22 nt, Human
ccaaagugcugggauuacaggc

SEQ ID NO: 754898 - RNA, 22 nt, Human
ccaaagugcugggauuacaggc

SEQ ID NO: 754899 - RNA, 24 nt, Human
ccaaagugcugggauuacaggcgu

SEQ ID NO: 754900 - RNA, 23 nt, Human
ccuaaacauccuuugcaugugau

SEQ ID NO: 754901 - RNA, 24 nt, Human
ccuauaaacacuugaaugaaacaa

SEQ ID NO: 754902 - RNA, 24 nt, Human
ccugcagcuacaggguugaggggc

SEQ ID NO: 754903 - RNA, 18 nt, Human
cgaagguccucucgucuu

SEQ ID NO: 754904 - RNA, 21 nt, Human
cuccaaaaacacaaauguccc

SEQ ID NO: 754905 - RNA, 18 nt, Human
gauuacaggcgugagcca

SEQ ID NO: 754906 - RNA, 23 nt, Human
gauuacaggcgugagccacagca

SEQ ID NO: 754907 - RNA, 27 nt, Human
gauuacuccuucaugaacucaagaacc

SEQ ID NO: 754908 - RNA, 22 nt, Human
ggccuagaaauucuuuucuuca

SEQ ID NO: 754909 - RNA, 20 nt, Human
ggggagcugcucucucuccu

SEQ ID NO: 754910 - RNA, 19 nt, Human
gugggcaggggagcugcuc

SEQ ID NO: 754911 - RNA, 24 nt, Human
uaacugggaaauauaaccuuauaa

SEQ ID NO: 754912 - RNA, 23 nt, Human
uacaggcgugagccacagcaccc

SEQ ID NO: 754913 - RNA, 18 nt, Human
uacaggguugaggggcag

SEQ ID NO: 754914 - RNA, 19 nt, Human
uagcucaauucagacaauc

SEQ ID NO: 754915 - RNA, 23 nt, Human
uaucaaggaacgaguuacugguu

SEQ ID NO: 754916 - RNA, 19 nt, Human
uaugcagagauguuuaaaa

SEQ ID NO: 754917 - RNA, 30 nt, Human
ucaaaccaaggugcgaccaccaacccaugg

SEQ ID NO: 754918 - RNA, 22 nt, Human
uccaagagagugggcauaugga

SEQ ID NO: 754919 - RNA, 24 nt, Human
ucccaaagugcugggauuacaggc

SEQ ID NO: 754920 - RNA, 23 nt, Human
ucgaagguccucucgucuuucug

SEQ ID NO: 754921 - RNA, 18 nt, Human
ucucaaaaagugaaaaag

SEQ ID NO: 754922 - RNA, 19 nt, Human
ugaaaaagcaaaauuuucu

SEQ ID NO: 754923 - RNA, 22 nt, Human
ugaacuucaucucaaaaguaac

SEQ ID NO: 754924 - RNA, 19 nt, Human
ugaaugaaacaacucaaca

SEQ ID NO: 754925 - RNA, 22 nt, Human
ugacuucaaauaacuaaaguuu

SEQ ID NO: 754926 - RNA, 18 nt, Human
ugauaucgauuucccagg

SEQ ID NO: 754927 - RNA, 20 nt, Human
ugauguaauauuuuggaagg

SEQ ID NO: 754928 - RNA, 24 nt, Human
ugccaggaagauaaugccaacuuc

SEQ ID NO: 754929 - RNA, 25 nt, Human
ugcugggauuacaggcgugagccac

SEQ ID NO: 754930 - RNA, 19 nt, Human
uggaaggaacuaugucaua

SEQ ID NO: 754931 - RNA, 18 nt, Human
ugggauuacaggcgugag

SEQ ID NO: 754932 - RNA, 19 nt, Human
ugggauuacaggcgugagc

SEQ ID NO: 754933 - RNA, 21 nt, Human
ugggauuacaggcgugagcca

SEQ ID NO: 754934 - RNA, 22 nt, Human
ugggauuacaggcgugagccac

SEQ ID NO: 754935 - RNA, 22 nt, Human
ugggauuacaggcgugagccac

SEQ ID NO: 754936 - RNA, 23 nt, Human
ugggauuacaggcgugagccaca

SEQ ID NO: 754937 - RNA, 24 nt, Human
ugggauuacaggcgugagccacag

SEQ ID NO: 754938 - RNA, 26 nt, Human
ugggauuacaggcgugagccacagca

SEQ ID NO: 754939 - RNA, 27 nt, Human
ugggauuacaggcgugagccacagcac

SEQ ID NO: 754940 - RNA, 21 nt, Human
ugggcauauggauuaaaccug

SEQ ID NO: 754941 - RNA, 18 nt, Human
uggggaaagacuaucuaa

SEQ ID NO: 754942 - RNA, 18 nt, Human
uguagcuuuaaggagcuu

SEQ ID NO: 754943 - RNA, 21 nt, Human
uuacuccuucaugaacucaag

SEQ ID NO: 754944 - RNA, 19 nt, Human
uucaaauaacuaaaguuug

SEQ ID NO: 754945 - RNA, 21 nt, Human
uucucggccucccaaagugcu

SEQ ID NO: 754946 - RNA, 23 nt, Human
uugauacuaaaauaguccaacug

SEQ ID NO: 754947 - RNA, 24 nt, Human
aaaaccaaaaccaaacaaccccua

SEQ ID NO: 754948 - RNA, 20 nt, Human
aaacaaccccuaccaccaga

SEQ ID NO: 754949 - RNA, 20 nt, Human
aaagaaugugaaggauaagg

SEQ ID NO: 754950 - RNA, 21 nt, Human
aaaggaagggcaugaauucau

SEQ ID NO: 754951 - RNA, 25 nt, Human
aaaguauuaguaaguugcaaaauaa

SEQ ID NO: 754952 - RNA, 19 nt, Human
aaccaaacaaccccuacca

SEQ ID NO: 754953 - RNA, 19 nt, Human
aaccaaccaaacaaggcag

SEQ ID NO: 754954 - RNA, 18 nt, Human
aagacaaagucuuuauuc

SEQ ID NO: 754955 - RNA, 23 nt, Human
aaggagaaugucuuuggucucag

SEQ ID NO: 754956 - RNA, 18 nt, Human
aagggcaaaccacugagc

SEQ ID NO: 754957 - RNA, 20 nt, Human
aaggucacagaaccaaccaa

SEQ ID NO: 754958 - RNA, 27 nt, Human
aaguauuaguaaguugcaaaauaaacu

SEQ ID NO: 754959 - RNA, 19 nt, Human
aaucauggcucacugcagc

SEQ ID NO: 754960 - RNA, 24 nt, Human
acaugcaacaccacgccuggccug

SEQ ID NO: 754961 - RNA, 19 nt, Human
accaaacaaccccuaccac

SEQ ID NO: 754962 - RNA, 23 nt, Human
accccuaccaccagaauccauaa

SEQ ID NO: 754963 - RNA, 21 nt, Human
accuccuuuuccuucuuuuua

SEQ ID NO: 754964 - RNA, 23 nt, Human
acugagcacuuugauauuagaac

SEQ ID NO: 754965 - RNA, 19 nt, Human
acugcagccucaauuuccu

SEQ ID NO: 754966 - RNA, 20 nt, Human
agaaccaaccaaacaaggca

SEQ ID NO: 754967 - RNA, 19 nt, Human
agaauccauaagcuagaua

SEQ ID NO: 754968 - RNA, 24 nt, Human
agacagagacagugaaaaccaaaa

SEQ ID NO: 754969 - RNA, 23 nt, Human
agacagugaaaaccaaaaccaaa

SEQ ID NO: 754970 - RNA, 21 nt, Human
agaccuuggcuugucucucuu

SEQ ID NO: 754971 - RNA, 24 nt, Human
agagacagugaaaaccaaaaccaa

SEQ ID NO: 754972 - RNA, 24 nt, Human
agagacagugaaaaccaaaaccaa

SEQ ID NO: 754973 - RNA, 21 nt, Human
agagguggguaagauuuuagg

SEQ ID NO: 754974 - RNA, 22 nt, Human
agagguggguaagauuuuaggg

SEQ ID NO: 754975 - RNA, 19 nt, Human
aggaagaugagugaugucu

SEQ ID NO: 754976 - RNA, 21 nt, Human
agggcaagaacuaagucuugg

SEQ ID NO: 754977 - RNA, 18 nt, Human
agguagguacuagaugag

SEQ ID NO: 754978 - RNA, 23 nt, Human
aguucuuuuucgacgaggagaag

SEQ ID NO: 754979 - RNA, 24 nt, Human
aucacuuuacaaauaaaauugagg

SEQ ID NO: 754980 - RNA, 19 nt, Human
aucuacucgucccucccca

SEQ ID NO: 754981 - RNA, 22 nt, Human
aucuacucgucccuccccauua

SEQ ID NO: 754982 - RNA, 23 nt, Human
augaauucauaaaacucauaaaa

SEQ ID NO: 754983 - RNA, 22 nt, Human
auuaccauaggaaguugguggu

SEQ ID NO: 754984 - RNA, 24 nt, Human
caaaaccaaacaaccccuaccacc

SEQ ID NO: 754985 - RNA, 26 nt, Human
caaacaaccccuaccaccagaaucca

SEQ ID NO: 754986 - RNA, 23 nt, Human
cacacagauuaaguaauagccag

SEQ ID NO: 754987 - RNA, 18 nt, Human
caccauagcagcaaaaau

SEQ ID NO: 754988 - RNA, 19 nt, Human
cacugcagccucaauuucc

SEQ ID NO: 754989 - RNA, 24 nt, Human
cagaaacaaauaucuuuagaggug

SEQ ID NO: 754990 - RNA, 23 nt, Human
cagcaaaaauagaagaagucuga

SEQ ID NO: 754991 - RNA, 20 nt, Human
cagccucaauuuccugggcu

SEQ ID NO: 754992 - RNA, 23 nt, Human
cagccucaauuuccugggcucca

SEQ ID NO: 754993 - RNA, 18 nt, Human
cagugaaaaccaaaacca

SEQ ID NO: 754994 - RNA, 21 nt, Human
cagugaaaaccaaaaccaaac

SEQ ID NO: 754995 - RNA, 22 nt, Human
ccaaaaccaaacaaccccuacc

SEQ ID NO: 754996 - RNA, 24 nt, Human
ccaaccaaacaaggcagauacagu

SEQ ID NO: 754997 - RNA, 21 nt, Human
ccauaagcuagauaaucugga

SEQ ID NO: 754998 - RNA, 23 nt, Human
ccucaauuuccugggcuccagca

SEQ ID NO: 754999 - RNA, 18 nt, Human
ccuccuuuuccuucuuuu

SEQ ID NO: 755000 - RNA, 22 nt, Human
ccugacuuacagaugaugacac

SEQ ID NO: 755001 - RNA, 26 nt, Human
ccugcugccucaaccucccugaguag

SEQ ID NO: 755002 - RNA, 18 nt, Human
ccuuacagaccaagcucu

SEQ ID NO: 755003 - RNA, 18 nt, Human
cgccuggccuguuaauaa

SEQ ID NO: 755004 - RNA, 23 nt, Human
cucaaaauaaauuuuaaagagaa

SEQ ID NO: 755005 - RNA, 24 nt, Human
cucacugcagccucaauuuccugg

SEQ ID NO: 755006 - RNA, 28 nt, Human
cugauaagauggugaaggaguucuuuuu

SEQ ID NO: 755007 - RNA, 23 nt, Human
cugcagccucaauuuccugggcu

SEQ ID NO: 755008 - RNA, 24 nt, Human
cugccucaaccucccugaguagcu

SEQ ID NO: 755009 - RNA, 24 nt, Human
cuucuuuuuaccaucuacucgucc

SEQ ID NO: 755010 - RNA, 24 nt, Human
cuugcucugucaccuagguuggag

SEQ ID NO: 755011 - RNA, 21 nt, Human
cuugucucucuuuucucuuug

SEQ ID NO: 755012 - RNA, 22 nt, Human
cuuuacagugcauauuuucacu

SEQ ID NO: 755013 - RNA, 19 nt, Human
cuuuucccaacuuuucugu

SEQ ID NO: 755014 - RNA, 24 nt, Human
gaacuguauuucauggguagcaaa

SEQ ID NO: 755015 - RNA, 18 nt, Human
gacaaagaaugugaagga

SEQ ID NO: 755016 - RNA, 21 nt, Human
gacuacagacaugcaacacca

SEQ ID NO: 755017 - RNA, 23 nt, Human
gagacagugaaaaccaaaaccaa

SEQ ID NO: 755018 - RNA, 24 nt, Human
gaguagcugugacuacagacaugc

SEQ ID NO: 755019 - RNA, 22 nt, Human
gcuugucucucuuuucucuuug

SEQ ID NO: 755020 - RNA, 23 nt, Human
ggcagagcgucguaaagguggag

SEQ ID NO: 755021 - RNA, 19 nt, Human
gguuggagugugguggcuc

SEQ ID NO: 755022 - RNA, 19 nt, Human
gugaggaagaugagugaug

SEQ ID NO: 755023 - RNA, 21 nt, Human
gugggauaacucuucuucuca

SEQ ID NO: 755024 - RNA, 20 nt, Human
uaacuugaaaugcuacuagc

SEQ ID NO: 755025 - RNA, 24 nt, Human
uaagaacagaucagaauccccuuc

SEQ ID NO: 755026 - RNA, 24 nt, Human
uaaguggugugccuacugaaaucc

SEQ ID NO: 755027 - RNA, 20 nt, Human
uaaguugcaaaauaaacuaa

SEQ ID NO: 755028 - RNA, 26 nt, Human
uaaguugcaaaauaaacuaagguagg

SEQ ID NO: 755029 - RNA, 23 nt, Human
uaauacaaccaccauagcagcaa

SEQ ID NO: 755030 - RNA, 22 nt, Human
uacaaauaaaauugaggcucac

SEQ ID NO: 755031 - RNA, 23 nt, Human
uacaaccaccauagcagcaaaaa

SEQ ID NO: 755032 - RNA, 23 nt, Human
uacagacaugcaacaccacgccu

SEQ ID NO: 755033 - RNA, 18 nt, Human
uaccauaggaaguuggug

SEQ ID NO: 755034 - RNA, 26 nt, Human
uaccuccuuuuccuucuuuuuaccau

SEQ ID NO: 755035 - RNA, 22 nt, Human
uagaugauccugauugugagga

SEQ ID NO: 755036 - RNA, 22 nt, Human
uagcaaaaggucacagaaacaa

SEQ ID NO: 755037 - RNA, 22 nt, Human
uagggcaagaacuaagucuugg

SEQ ID NO: 755038 - RNA, 22 nt, Human
uagggcaguaaacaagacaaag

SEQ ID NO: 755039 - RNA, 24 nt, Human
uauugguuaauuuguuuuuuuuuu

SEQ ID NO: 755040 - RNA, 21 nt, Human
uauuuuuuuauuuuguauuag

SEQ ID NO: 755041 - RNA, 25 nt, Human
ucaaaguagcaguuaauauuuauug

SEQ ID NO: 755042 - RNA, 23 nt, Human
ucacugcagccucaauuuccugg

SEQ ID NO: 755043 - RNA, 24 nt, Human
ucacugcagccucaauuuccuggg

SEQ ID NO: 755044 - RNA, 18 nt, Human
ucuacucgucccucccca

SEQ ID NO: 755045 - RNA, 19 nt, Human
ucucucuuuucucuuuguc

SEQ ID NO: 755046 - RNA, 19 nt, Human
ucucuggggagacgacaaa

SEQ ID NO: 755047 - RNA, 20 nt, Human
ucuugcucugucaccuaggu

SEQ ID NO: 755048 - RNA, 23 nt, Human
ucuugcucugucaccuagguugg

SEQ ID NO: 755049 - RNA, 24 nt, Human
ucuugcucugucaccuagguugga

SEQ ID NO: 755050 - RNA, 24 nt, Human
ugaaaaccaaaaccaaacaacccc

SEQ ID NO: 755051 - RNA, 18 nt, Human
ugaaggauaaggagaggc

SEQ ID NO: 755052 - RNA, 21 nt, Human
ugacuacagacaugcaacacc

SEQ ID NO: 755053 - RNA, 22 nt, Human
ugagacagggucuugcucuguc

SEQ ID NO: 755054 - RNA, 20 nt, Human
ugauugugaggaagaugagu

SEQ ID NO: 755055 - RNA, 21 nt, Human
ugccucaaccucccugaguag

SEQ ID NO: 755056 - RNA, 24 nt, Human
ugcucugucaccuagguuggagug

SEQ ID NO: 755057 - RNA, 20 nt, Human
ugcugcagugaggucaaaaa

SEQ ID NO: 755058 - RNA, 20 nt, Human
uggagagcgaugucuuggag

SEQ ID NO: 755059 - RNA, 24 nt, Human
uggcucacugcagccucaauuucc

SEQ ID NO: 755060 - RNA, 23 nt, Human
uggcuugucucucuuuuggaagc

SEQ ID NO: 755061 - RNA, 21 nt, Human
uggugguaugauuauuccuga

SEQ ID NO: 755062 - RNA, 20 nt, Human
uguagucuguuuuuccuggc

SEQ ID NO: 755063 - RNA, 22 nt, Human
uguccagggacaugacguaaaa

SEQ ID NO: 755064 - RNA, 19 nt, Human
ugucuuugaauagaugauc

SEQ ID NO: 755065 - RNA, 26 nt, Human
ugugaaggauaaggagaggggaacgc

SEQ ID NO: 755066 - RNA, 18 nt, Human
uuaaagacucaaccuaca

SEQ ID NO: 755067 - RNA, 23 nt, Human
uucaagauaauacaucaguucuc

SEQ ID NO: 755068 - RNA, 19 nt, Human
uuccuggcucugcuucauu

SEQ ID NO: 755069 - RNA, 23 nt, Human
uucuucucaaaauaaauuuuaaa

SEQ ID NO: 755070 - RNA, 22 nt, Human
uugagacagggucuugcucugu

SEQ ID NO: 755071 - RNA, 24 nt, Human
uugcucugucaccuagguuggagu

SEQ ID NO: 755072 - RNA, 21 nt, Human
uuuaccuccuuuuccuucuuu

SEQ ID NO: 755073 - RNA, 26 nt, Human
uuuguuuuuuuuuuuuugagacaggg

SEQ ID NO: 755074 - RNA, 24 nt, Human
uuuuuuuuuugagacagggucuug

SEQ ID NO: 755075 - RNA, 20 nt, Human
uuuuuuuuuuugagacaggg

SEQ ID NO: 755076 - RNA, 23 nt, Human
uuuuuuuuuuuugagacaggguc

SEQ ID NO: 755077 - RNA, 24 nt, Human
uuuuuuuuuuuugagacagggucu

SEQ ID NO: 755078 - RNA, 24 nt, Human
uuuuuuuuuuuuuuuuuuuuaggg

SEQ ID NO: 755079 - RNA, 23 nt, Human
aaaaaaagaaaaagagaaaagag

SEQ ID NO: 755080 - RNA, 24 nt, Human
aaaaaaaucaauucauggugaggc

SEQ ID NO: 755081 - RNA, 23 nt, Human
aaaaagagaaaagagaaaagcaa

SEQ ID NO: 755082 - RNA, 21 nt, Human
aaaaguuaggacuaacugaaa

SEQ ID NO: 755083 - RNA, 20 nt, Human
aaaauugucccaaaacaaac

SEQ ID NO: 755084 - RNA, 21 nt, Human
aaacaaacacacacacaaaca

SEQ ID NO: 755085 - RNA, 23 nt, Human
aaacaaacacacacacaaacaaa

SEQ ID NO: 755086 - RNA, 21 nt, Human
aaaggaaguugcccuugauua

SEQ ID NO: 755087 - RNA, 25 nt, Human
aaauugguuuuauucaaacuuccua

SEQ ID NO: 755088 - RNA, 21 nt, Human
aacaaaaauaaaaaaaagaaa

SEQ ID NO: 755089 - RNA, 23 nt, Human
aacacacacacaaacaaaaaaaa

SEQ ID NO: 755090 - RNA, 23 nt, Human
aaccacuaaacacaccaggaagc

SEQ ID NO: 755091 - RNA, 23 nt, Human
aagagaaaugaaaaccaaagcca

SEQ ID NO: 755092 - RNA, 20 nt, Human
aauggcuuauuuuuggaggg

SEQ ID NO: 755093 - RNA, 22 nt, Human
acaaacaaaaaaaaucaauuca

SEQ ID NO: 755094 - RNA, 24 nt, Human
acaccccuuuccccaaauuaauaa

SEQ ID NO: 755095 - RNA, 23 nt, Human
acacguacaccagauaugucucu

SEQ ID NO: 755096 - RNA, 20 nt, Human
acagccuggcccaagaggcc

SEQ ID NO: 755097 - RNA, 22 nt, Human
accacuaaacacaccaggaagc

SEQ ID NO: 755098 - RNA, 25 nt, Human
acuaaugcuaacaccccuuucccca

SEQ ID NO: 755099 - RNA, 22 nt, Human
agaaaaagagaaaagagaaaag

SEQ ID NO: 755100 - RNA, 21 nt, Human
agagaaaagagaaaagcaagg

SEQ ID NO: 755101 - RNA, 23 nt, Human
agcaaacuauguacaaggaccca

SEQ ID NO: 755102 - RNA, 24 nt, Human
agccuuguguggggcuaaggccaa

SEQ ID NO: 755103 - RNA, 26 nt, Human
aggcagccaggggaagaacuggaaag

SEQ ID NO: 755104 - RNA, 24 nt, Human
agggacccccaaaaaggcagccag

SEQ ID NO: 755105 - RNA, 18 nt, Human
agggggagggauugcaac

SEQ ID NO: 755106 - RNA, 18 nt, Human
agugugggagggggaggg

SEQ ID NO: 755107 - RNA, 21 nt, Human
auaaagucucccuacuuaaaa

SEQ ID NO: 755108 - RNA, 22 nt, Human
auacugcaacacguacaccaga

SEQ ID NO: 755109 - RNA, 21 nt, Human
auucaccucuguacccuccag

SEQ ID NO: 755110 - RNA, 22 nt, Human
caaaacaaacacacacacaaac

SEQ ID NO: 755111 - RNA, 25 nt, Human
caaaacaaacacacacacaaacaaa

SEQ ID NO: 755112 - RNA, 24 nt, Human
caaaagcagucgguacauccagac

SEQ ID NO: 755113 - RNA, 21 nt, Human
caaacacacacacaaacaaaa

SEQ ID NO: 755114 - RNA, 25 nt, Human
caaacacacacacaaacaaaaaaaa

SEQ ID NO: 755115 - RNA, 26 nt, Human
caaguuagaaaaauugguuuuauuca

SEQ ID NO: 755116 - RNA, 20 nt, Human
cacaccaggaagcaucauau

SEQ ID NO: 755117 - RNA, 24 nt, Human
cacacgcgagcuaaguaguuccac

SEQ ID NO: 755118 - RNA, 21 nt, Human
cacagccuggcccaagaggcc

SEQ ID NO: 755119 - RNA, 23 nt, Human
cacagccuggcccaagaggccga

SEQ ID NO: 755120 - RNA, 18 nt, Human
caccgagaaaaggcagug

SEQ ID NO: 755121 - RNA, 26 nt, Human
caccucucuccaaguugagacagggg

SEQ ID NO: 755122 - RNA, 19 nt, Human
caccugcuacccaguucuc

SEQ ID NO: 755123 - RNA, 20 nt, Human
cagcacagaaaauuggaaug

SEQ ID NO: 755124 - RNA, 23 nt, Human
cccaagaggccgagcaguugaga

SEQ ID NO: 755125 - RNA, 23 nt, Human
cccagggcuggcugggcacagcc

SEQ ID NO: 755126 - RNA, 18 nt, Human
cccauggcuggggagaga

SEQ ID NO: 755127 - RNA, 20 nt, Human
cccccaaaaaggcagccagg

SEQ ID NO: 755128 - RNA, 20 nt, Human
cccguguugcucacauccug

SEQ ID NO: 755129 - RNA, 18 nt, Human
ccucaaauggcuuuggcu

SEQ ID NO: 755130 - RNA, 21 nt, Human
ccuccugaaaaaaaccuuaca

SEQ ID NO: 755131 - RNA, 19 nt, Human
ccugcgcuggggcugugaa

SEQ ID NO: 755132 - RNA, 23 nt, Human
cucccagggcuggcugggcacag

SEQ ID NO: 755133 - RNA, 25 nt, Human
cucccagggcuggcugggcacagcc

SEQ ID NO: 755134 - RNA, 19 nt, Human
cugaaaaaaaccuuacaau

SEQ ID NO: 755135 - RNA, 21 nt, Human
cugcgcuggggcugugaacgc

SEQ ID NO: 755136 - RNA, 25 nt, Human
cugugugcaauggcuuauuuuugga

SEQ ID NO: 755137 - RNA, 24 nt, Human
cuuccugccgagaaaucucccaaa

SEQ ID NO: 755138 - RNA, 19 nt, Human
cuuuuuauuccaaaagcag

SEQ ID NO: 755139 - RNA, 19 nt, Human
gcaguaguaggacuuuggc

SEQ ID NO: 755140 - RNA, 18 nt, Human
gcgcuggggcugugaacg

SEQ ID NO: 755141 - RNA, 18 nt, Human
gcuaacaccccuuucccc

SEQ ID NO: 755142 - RNA, 18 nt, Human
ggacuuuggcacuaugaa

SEQ ID NO: 755143 - RNA, 19 nt, Human
ggcaccaaccacuaaacac

SEQ ID NO: 755144 - RNA, 21 nt, Human
ggcaccaaccacuaaacacac

SEQ ID NO: 755145 - RNA, 20 nt, Human
gggggcagugugggaggggg

SEQ ID NO: 755146 - RNA, 19 nt, Human
gucuacuguuugaguuuuc

SEQ ID NO: 755147 - RNA, 24 nt, Human
guuuagucuuugcuuuauugaguu

SEQ ID NO: 755148 - RNA, 26 nt, Human
uaaaaauaaagucucccuacuuaaaa

SEQ ID NO: 755149 - RNA, 20 nt, Human
uaaagucucccuacuuaaaa

SEQ ID NO: 755150 - RNA, 25 nt, Human
uaacugaaaaagugcacucagguau

SEQ ID NO: 755151 - RNA, 18 nt, Human
uaaggagggggcggugag

SEQ ID NO: 755152 - RNA, 18 nt, Human
uacaaugguagugcugga

SEQ ID NO: 755153 - RNA, 22 nt, Human
uacaaugguagugcuggaaaag

SEQ ID NO: 755154 - RNA, 19 nt, Human
uaccacaccgagaaaaggc

SEQ ID NO: 755155 - RNA, 25 nt, Human
uaggacuaacugaaaaagugcacuc

SEQ ID NO: 755156 - RNA, 26 nt, Human
uaggacuuuggcacuaugaacaauuc

SEQ ID NO: 755157 - RNA, 26 nt, Human
uaucauggcacuaaugcuaacacccc

SEQ ID NO: 755158 - RNA, 22 nt, Human
ucaaauggcuuuggcuuuccuu

SEQ ID NO: 755159 - RNA, 20 nt, Human
ucagguaucuaaaauugucc

SEQ ID NO: 755160 - RNA, 22 nt, Human
ucaugcuaacagaggcgggagc

SEQ ID NO: 755161 - RNA, 18 nt, Human
ucauggugaggcuuugag

SEQ ID NO: 755162 - RNA, 22 nt, Human
ucccaaaacaaacacacacaca

SEQ ID NO: 755163 - RNA, 24 nt, Human
ucccaaaacaaacacacacacaaa

SEQ ID NO: 755164 - RNA, 23 nt, Human
uccccaaauuaauaaaacaaaaa

SEQ ID NO: 755165 - RNA, 19 nt, Human
ucccccucaaauggcuuug

SEQ ID NO: 755166 - RNA, 22 nt, Human
ucgguacauccagaccugcgcu

SEQ ID NO: 755167 - RNA, 23 nt, Human
ucucuccaaguugagacaggggc

SEQ ID NO: 755168 - RNA, 21 nt, Human
ucugcugguauuuagaaaggu

SEQ ID NO: 755169 - RNA, 21 nt, Human
ucugugugcaauggcuuauuu

SEQ ID NO: 755170 - RNA, 18 nt, Human
ugaaaacgcaguaguagg

SEQ ID NO: 755171 - RNA, 25 nt, Human
ugagacaggggccuggaucggaucc

SEQ ID NO: 755172 - RNA, 21 nt, Human
ugcaaccagaguucauacugc

SEQ ID NO: 755173 - RNA, 22 nt, Human
ugcaaccagaguucauacugca

SEQ ID NO: 755174 - RNA, 19 nt, Human
ugcuggaaaaggaaguugc

SEQ ID NO: 755175 - RNA, 21 nt, Human
uggagggggauaaggaggggg

SEQ ID NO: 755176 - RNA, 20 nt, Human
uggcccaagaggccgagcag

SEQ ID NO: 755177 - RNA, 21 nt, Human
uguacaaggacccacugaaaa

SEQ ID NO: 755178 - RNA, 22 nt, Human
ugucacaauaguacugaucaug

SEQ ID NO: 755179 - RNA, 18 nt, Human
uuacaacaaaugagcaac

SEQ ID NO: 755180 - RNA, 25 nt, Human
uuagaaaggugcuuaaagaagucag

SEQ ID NO: 755181 - RNA, 24 nt, Human
uuagcccucccuccugaaaaaaac

SEQ ID NO: 755182 - RNA, 19 nt, Human
uuauuguuguuguuuuaau

SEQ ID NO: 755183 - RNA, 18 nt, Human
uucaaagacggagcgucc

SEQ ID NO: 755184 - RNA, 23 nt, Human
uugcccuugauuaaaaagguaac

SEQ ID NO: 755185 - RNA, 21 nt, Human
uuggcacuaugaacaauuccc

SEQ ID NO: 755186 - RNA, 27 nt, Human
uugguuuuauucaaacuuccuagcguu

SEQ ID NO: 755187 - RNA, 20 nt, Human
uuuggagggggauaaggagg

SEQ ID NO: 755188 - RNA, 21 nt, Human
aaaaaagaaaaaugcugaagg

SEQ ID NO: 755189 - RNA, 22 nt, Human
aaaaaagaaaaaugcugaagga

SEQ ID NO: 755190 - RNA, 21 nt, Human
aaaagaaguaaauuccuaugu

SEQ ID NO: 755191 - RNA, 19 nt, Human
aaacaauaccaccucuauc

SEQ ID NO: 755192 - RNA, 26 nt, Human
aaacagaggcccaaagagcucaagca

SEQ ID NO: 755193 - RNA, 19 nt, Human
aaauaaacuuaaacuauaa

SEQ ID NO: 755194 - RNA, 18 nt, Human
aagaaaacuuggcaaaua

SEQ ID NO: 755195 - RNA, 23 nt, Human
aagaagaaugccaaccagcgccc

SEQ ID NO: 755196 - RNA, 18 nt, Human
aagcccuuuuuaggucau

SEQ ID NO: 755197 - RNA, 20 nt, Human
aaggacccaauaucugcccu

SEQ ID NO: 755198 - RNA, 22 nt, Human
aauacauugauaaauucauaca

SEQ ID NO: 755199 - RNA, 21 nt, Human
acaaaguaauaaacagugcac

SEQ ID NO: 755200 - RNA, 22 nt, Human
acaaauccaaagggaacugcca

SEQ ID NO: 755201 - RNA, 27 nt, Human
acacagaaaauggaggaaaggggaccc

SEQ ID NO: 755202 - RNA, 25 nt, Human
acagaaauauugcacaaaguauguc

SEQ ID NO: 755203 - RNA, 24 nt, Human
acagcaaagaccauauccugggug

SEQ ID NO: 755204 - RNA, 23 nt, Human
accccacccugggggccuugcag

SEQ ID NO: 755205 - RNA, 18 nt, Human
accgcauauugagcuaua

SEQ ID NO: 755206 - RNA, 20 nt, Human
acgacuguuaauuagccgca

SEQ ID NO: 755207 - RNA, 18 nt, Human
acuagaaaacuccccacc

SEQ ID NO: 755208 - RNA, 22 nt, Human
acuccccaccccagggagcaca

SEQ ID NO: 755209 - RNA, 21 nt, Human
acuuuccucuucugugagauu

SEQ ID NO: 755210 - RNA, 23 nt, Human
agagucaguugaaguuacaagga

SEQ ID NO: 755211 - RNA, 18 nt, Human
agauaguaaaaucaaacu

SEQ ID NO: 755212 - RNA, 20 nt, Human
agauggucuaguaacuagaa

SEQ ID NO: 755213 - RNA, 21 nt, Human
aguugaaguuacaaggaccca

SEQ ID NO: 755214 - RNA, 18 nt, Human
auccuggguguccugggg

SEQ ID NO: 755215 - RNA, 24 nt, Human
augaaaaaagaaaaaugcugaagg

SEQ ID NO: 755216 - RNA, 20 nt, Human
augaaacacacuguauccug

SEQ ID NO: 755217 - RNA, 22 nt, Human
augagcccagagcacauacaaa

SEQ ID NO: 755218 - RNA, 23 nt, Human
augccagagugaacaucagugag

SEQ ID NO: 755219 - RNA, 19 nt, Human
auuuagaaagcucccccaa

SEQ ID NO: 755220 - RNA, 19 nt, Human
auuuuuuaauauuuauauu

SEQ ID NO: 755221 - RNA, 23 nt, Human
caaacagcaaagaccauauccug

SEQ ID NO: 755222 - RNA, 19 nt, Human
caacucugcgaucguauag

SEQ ID NO: 755223 - RNA, 19 nt, Human
caacugcugcagcucacga

SEQ ID NO: 755224 - RNA, 23 nt, Human
cacaccuacauaucucccuacaa

SEQ ID NO: 755225 - RNA, 24 nt, Human
cacagcuuuccuucacucuaauuc

SEQ ID NO: 755226 - RNA, 26 nt, Human
cauacaaauccaaagggaacugccac

SEQ ID NO: 755227 - RNA, 19 nt, Human
cauucuuggcaccggaaca

SEQ ID NO: 755228 - RNA, 20 nt, Human
ccaacuucucucacgguucu

SEQ ID NO: 755229 - RNA, 18 nt, Human
ccagagcacauacaaauc

SEQ ID NO: 755230 - RNA, 22 nt, Human
ccaugaacagagaggaaugcca

SEQ ID NO: 755231 - RNA, 19 nt, Human
cccaccaccccacccuggg

SEQ ID NO: 755232 - RNA, 21 nt, Human
cccaccauuucuuccuuuuaa

SEQ ID NO: 755233 - RNA, 19 nt, Human
ccccaccaccccacccugg

SEQ ID NO: 755234 - RNA, 23 nt, Human
ccccaccccagggagcacaccua

SEQ ID NO: 755235 - RNA, 21 nt, Human
ccccuugagacuggggaugag

SEQ ID NO: 755236 - RNA, 19 nt, Human
ccggaacagaugaaacaca

SEQ ID NO: 755237 - RNA, 19 nt, Human
ccuaugucagaguaaccga

SEQ ID NO: 755238 - RNA, 22 nt, Human
ccuguuucagagacauuuaaac

SEQ ID NO: 755239 - RNA, 22 nt, Human
ccuugcagugacuccugauggg

SEQ ID NO: 755240 - RNA, 21 nt, Human
cguauagacauguuuccugau

SEQ ID NO: 755241 - RNA, 24 nt, Human
cuaauucauucuugacuagagccu

SEQ ID NO: 755242 - RNA, 21 nt, Human
cucccaucaccaauacacaga

SEQ ID NO: 755243 - RNA, 19 nt, Human
cuccccaccaccccacccu

SEQ ID NO: 755244 - RNA, 18 nt, Human
cugcacauaccugccaga

SEQ ID NO: 755245 - RNA, 22 nt, Human
cuuaaacuauaaauuagaaaca

SEQ ID NO: 755246 - RNA, 23 nt, Human
cuugcagugacuccugaugggaa

SEQ ID NO: 755247 - RNA, 18 nt, Human
gagcacauacaaauccaa

SEQ ID NO: 755248 - RNA, 19 nt, Human
gagcccagagcacauacaa

SEQ ID NO: 755249 - RNA, 23 nt, Human
gcuggucucauuguccuggcuuc

SEQ ID NO: 755250 - RNA, 22 nt, Human
ggaacagaugaaacacacugua

SEQ ID NO: 755251 - RNA, 22 nt, Human
gggagccuauuccaaaccagcg

SEQ ID NO: 755252 - RNA, 21 nt, Human
gugaaaacagaggcccaaaga

SEQ ID NO: 755253 - RNA, 19 nt, Human
uaaaacagggaacacgaac

SEQ ID NO: 755254 - RNA, 19 nt, Human
uaaaaggaucaugaggcug

SEQ ID NO: 755255 - RNA, 22 nt, Human
uaaauuagaaacacaaauaauc

SEQ ID NO: 755256 - RNA, 22 nt, Human
uaacuagaaaacuccccacccc

SEQ ID NO: 755257 - RNA, 24 nt, Human
uaacuagaaaacuccccaccccag

SEQ ID NO: 755258 - RNA, 21 nt, Human
uaacuguugauucuuucccaa

SEQ ID NO: 755259 - RNA, 27 nt, Human
uaagcuaggaaagguuuuucacaccca

SEQ ID NO: 755260 - RNA, 19 nt, Human
uacaaaguaauaaacagug

SEQ ID NO: 755261 - RNA, 21 nt, Human
uacaagucaaacaauaccacc

SEQ ID NO: 755262 - RNA, 19 nt, Human
uacauuaagaagaaugcca

SEQ ID NO: 755263 - RNA, 21 nt, Human
uacauuaagaagaaugccaac

SEQ ID NO: 755264 - RNA, 21 nt, Human
uagaaacacaaauaaucauga

SEQ ID NO: 755265 - RNA, 19 nt, Human
uagaaagcucccccaaaag

SEQ ID NO: 755266 - RNA, 18 nt, Human
uagaagagcucacuguga

SEQ ID NO: 755267 - RNA, 22 nt, Human
uagaagagcucacugugauuaa

SEQ ID NO: 755268 - RNA, 19 nt, Human
uaucauacagacgugaaaa

SEQ ID NO: 755269 - RNA, 19 nt, Human
uaucuccccaccaccccac

SEQ ID NO: 755270 - RNA, 25 nt, Human
uauuacuuucuaaaguguuuuccac

SEQ ID NO: 755271 - RNA, 24 nt, Human
uccaugcugcaauaacauuagaaa

SEQ ID NO: 755272 - RNA, 23 nt, Human
ucccaccauuucuuccuuuuaaa

SEQ ID NO: 755273 - RNA, 18 nt, Human
uccugggguguugacagc

SEQ ID NO: 755274 - RNA, 22 nt, Human
ucggccuuuaaacagcucuaaa

SEQ ID NO: 755275 - RNA, 19 nt, Human
ucuaagaaaacuuggcaaa

SEQ ID NO: 755276 - RNA, 20 nt, Human
ucuuaucuccccaccacccc

SEQ ID NO: 755277 - RNA, 20 nt, Human
ugacuagagccuguaugccu

SEQ ID NO: 755278 - RNA, 19 nt, Human
uggcaaauaacgcuuuggc

SEQ ID NO: 755279 - RNA, 20 nt, Human
uggcuuccccuugagacugg

SEQ ID NO: 755280 - RNA, 24 nt, Human
uucacaaacaguagauugcaccac

SEQ ID NO: 755281 - RNA, 22 nt, Human
uucacaaauacaagucaaacaa

SEQ ID NO: 755282 - RNA, 21 nt, Human
uuccuuuuaaacuacaggauu

SEQ ID NO: 755283 - RNA, 20 nt, Human
uuggaagagucaguugaagu

SEQ ID NO: 755284 - RNA, 20 nt, Human
uuuaaaaauuucuugagcag

SEQ ID NO: 755285 - RNA, 18 nt, Human
uuuccaguucucggccuu

SEQ ID NO: 755286 - RNA, 21 nt, Human
uuucuuccuuuuaaacuacag

SEQ ID NO: 755287 - RNA, 21 nt, Human
aaaaaccauuccguauaaaua

SEQ ID NO: 755288 - RNA, 23 nt, Human
aaaacuaaaaauaaaauacaacu

SEQ ID NO: 755289 - RNA, 24 nt, Human
aaauacaacugaaacuaacaaaac

SEQ ID NO: 755290 - RNA, 19 nt, Human
aacacggggaaaccccguc

SEQ ID NO: 755291 - RNA, 20 nt, Human
aacacggggaaaccccgucu

SEQ ID NO: 755292 - RNA, 21 nt, Human
aacacggggaaaccccgucuc

SEQ ID NO: 755293 - RNA, 18 nt, Human
aagcccacgcagcaaaga

SEQ ID NO: 755294 - RNA, 24 nt, Human
aauaaccagaaagcuacaaagaaa

SEQ ID NO: 755295 - RNA, 20 nt, Human
acaccacugcacuccagccu

SEQ ID NO: 755296 - RNA, 24 nt, Human
acaccacugcacuccagccugggc

SEQ ID NO: 755297 - RNA, 20 nt, Human
acagagcgagacuccgucuc

SEQ ID NO: 755298 - RNA, 20 nt, Human
acagagcgagacuccgucuc

SEQ ID NO: 755299 - RNA, 22 nt, Human
accacugcacuccagccugggc

SEQ ID NO: 755300 - RNA, 24 nt, Human
accacugcacuccagccugggcga

SEQ ID NO: 755301 - RNA, 18 nt, Human
accccgucucuacuaaaa

SEQ ID NO: 755302 - RNA, 24 nt, Human
acugcacuccagccugggcgacag

SEQ ID NO: 755303 - RNA, 26 nt, Human
acugcacuccagccugggcgacagag

SEQ ID NO: 755304 - RNA, 22 nt, Human
agauaaagugaaauaacuauga

SEQ ID NO: 755305 - RNA, 24 nt, Human
agcacuuugggaggccgaggcagg

SEQ ID NO: 755306 - RNA, 24 nt, Human
agccugggcgacagagcgagacuc

SEQ ID NO: 755307 - RNA, 21 nt, Human
aggagcgggggcguccgcagg

SEQ ID NO: 755308 - RNA, 24 nt, Human
aggcaggagaauggcgugaacccg

SEQ ID NO: 755309 - RNA, 24 nt, Human
aggcagggggaucacgaggucagg

SEQ ID NO: 755310 - RNA, 22 nt, Human
aggccgaggcagggggaucacg

SEQ ID NO: 755311 - RNA, 19 nt, Human
aggcgguuugcagugagcc

SEQ ID NO: 755312 - RNA, 22 nt, Human
aggcgguuugcagugagccgag

SEQ ID NO: 755313 - RNA, 19 nt, Human
aggcugaggcaggagaaug

SEQ ID NO: 755314 - RNA, 19 nt, Human
agggggaucacgaggucag

SEQ ID NO: 755315 - RNA, 19 nt, Human
auaaagccaaacaaaacug

SEQ ID NO: 755316 - RNA, 23 nt, Human
auaacuaugaagguaaauaacuc

SEQ ID NO: 755317 - RNA, 21 nt, Human
auacaacugaaacuaacaaaa

SEQ ID NO: 755318 - RNA, 24 nt, Human
aucacaccacugcacuccagccug

SEQ ID NO: 755319 - RNA, 18 nt, Human
auuaaaaauaaauuccgg

SEQ ID NO: 755320 - RNA, 23 nt, Human
caaccgauucccaccccgcccug

SEQ ID NO: 755321 - RNA, 18 nt, Human
caacgaagcaaucuuggc

SEQ ID NO: 755322 - RNA, 21 nt, Human
cacaccacugcacuccagccu

SEQ ID NO: 755323 - RNA, 21 nt, Human
cacagagaagcccacgcagca

SEQ ID NO: 755324 - RNA, 26 nt, Human
caccacugcacuccagccugggcgac

SEQ ID NO: 755325 - RNA, 24 nt, Human
cacgccuguaaucccagcacuuug

SEQ ID NO: 755326 - RNA, 24 nt, Human
cacuccagccugggcgacagagcg

SEQ ID NO: 755327 - RNA, 19 nt, Human
cacugcacuccagccuggg

SEQ ID NO: 755328 - RNA, 21 nt, Human
cacugcacuccagccugggcg

SEQ ID NO: 755329 - RNA, 22 nt, Human
cacugcacuccagccugggcga

SEQ ID NO: 755330 - RNA, 23 nt, Human
cacugcacuccagccugggcgac

SEQ ID NO: 755331 - RNA, 24 nt, Human
cacugcacuccagccugggcgaca

SEQ ID NO: 755332 - RNA, 24 nt, Human
cagcacuuugggaggccgaggcag

SEQ ID NO: 755333 - RNA, 25 nt, Human
cagcacuuugggaggccgaggcagg

SEQ ID NO: 755334 - RNA, 24 nt, Human
cagcuacucaggaggcugaggcag

SEQ ID NO: 755335 - RNA, 20 nt, Human
ccaagcaaauuaauuugaac

SEQ ID NO: 755336 - RNA, 20 nt, Human
ccacugcacuccagccuggg

SEQ ID NO: 755337 - RNA, 21 nt, Human
ccacugcacuccagccugggc

SEQ ID NO: 755338 - RNA, 21 nt, Human
ccacugcacuccagccugggc

SEQ ID NO: 755339 - RNA, 24 nt, Human
ccacugcacuccagccugggcgac

SEQ ID NO: 755340 - RNA, 22 nt, Human
cccacaccgccucucccgggaa

SEQ ID NO: 755341 - RNA, 24 nt, Human
cccaccccgcccuggagaaaugcg

SEQ ID NO: 755342 - RNA, 22 nt, Human
cccacgcagcaaagaauugccc

SEQ ID NO: 755343 - RNA, 18 nt, Human
ccccacaccgccucuccc

SEQ ID NO: 755344 - RNA, 19 nt, Human
ccccaugaacgcucgcagg

SEQ ID NO: 755345 - RNA, 21 nt, Human
cccgucucuacuaaaaaucca

SEQ ID NO: 755346 - RNA, 18 nt, Human
ccgccgaggcuccggcug

SEQ ID NO: 755347 - RNA, 23 nt, Human
ccgccgccgaggcuccggcugcu

SEQ ID NO: 755348 - RNA, 23 nt, Human
ccuggcuaacacggggaaacccc

SEQ ID NO: 755349 - RNA, 24 nt, Human
ccuggcuaacacggggaaaccccg

SEQ ID NO: 755350 - RNA, 22 nt, Human
ccugggcgacagagcgagacuc

SEQ ID NO: 755351 - RNA, 19 nt, Human
ccuguagucccagcuacuc

SEQ ID NO: 755352 - RNA, 21 nt, Human
ccuguagucccagcuacucag

SEQ ID NO: 755353 - RNA, 22 nt, Human
ccuguagucccagcuacucagg

SEQ ID NO: 755354 - RNA, 19 nt, Human
cgagaccauccuggcuaac

SEQ ID NO: 755355 - RNA, 24 nt, Human
cgagaucacaccacugcacuccag

SEQ ID NO: 755356 - RNA, 24 nt, Human
cgaggcagggggaucacgagguca

SEQ ID NO: 755357 - RNA, 23 nt, Human
cgccuguaaucccagcacuuugg

SEQ ID NO: 755358 - RNA, 24 nt, Human
cgccuguaaucccagcacuuuggg

SEQ ID NO: 755359 - RNA, 21 nt, Human
cgcgcacccaggacaccccuc

SEQ ID NO: 755360 - RNA, 21 nt, Human
cguauaaauaaagccaaacaa

SEQ ID NO: 755361 - RNA, 22 nt, Human
cucacgccuguaaucccagcac

SEQ ID NO: 755362 - RNA, 24 nt, Human
cucacgccuguaaucccagcacuu

SEQ ID NO: 755363 - RNA, 21 nt, Human
cugcgggcucugcucgccucu

SEQ ID NO: 755364 - RNA, 22 nt, Human
cugcgggcucugcucgccucug

SEQ ID NO: 755365 - RNA, 23 nt, Human
cuuggcacuaacacgaacacccc

SEQ ID NO: 755366 - RNA, 21 nt, Human
gacagagcgagacuccgucuc

SEQ ID NO: 755367 - RNA, 21 nt, Human
gagaagcccacgcagcaaaga

SEQ ID NO: 755368 - RNA, 19 nt, Human
gcacccaggacaccccucg

SEQ ID NO: 755369 - RNA, 24 nt, Human
gcacuccagccugggcgacagagc

SEQ ID NO: 755370 - RNA, 19 nt, Human
gcccccacaccgccucucc

SEQ ID NO: 755371 - RNA, 19 nt, Human
gcccugguuguccccuuuc

SEQ ID NO: 755372 - RNA, 20 nt, Human
gccgagaucacaccacugca

SEQ ID NO: 755373 - RNA, 23 nt, Human
gccuguagucccagcuacucagg

SEQ ID NO: 755374 - RNA, 22 nt, Human
gcugaggcaggagaauggcgug

SEQ ID NO: 755375 - RNA, 24 nt, Human
ggaacgaacucucucuacaacgaa

SEQ ID NO: 755376 - RNA, 23 nt, Human
ggcgcgguggcucacgccuguaa

SEQ ID NO: 755377 - RNA, 18 nt, Human
ggcgugguggcgggcgcc

SEQ ID NO: 755378 - RNA, 21 nt, Human
ggcucacgccuguaaucccag

SEQ ID NO: 755379 - RNA, 21 nt, Human
gggaaaccccgucucuacuaa

SEQ ID NO: 755380 - RNA, 24 nt, Human
gggcgugguggcgggcgccuguag

SEQ ID NO: 755381 - RNA, 23 nt, Human
gggggcgggguggaggauggggu

SEQ ID NO: 755382 - RNA, 18 nt, Human
gguggcgcauuccuggca

SEQ ID NO: 755383 - RNA, 24 nt, Human
gguggcgggcgccuguagucccag

SEQ ID NO: 755384 - RNA, 23 nt, Human
gguggcucacgccuguaauccca

SEQ ID NO: 755385 - RNA, 24 nt, Human
gguggcucacgccuguaaucccag

SEQ ID NO: 755386 - RNA, 21 nt, Human
uaaaaacuaauaaaucgauac

SEQ ID NO: 755387 - RNA, 24 nt, Human
uaaaacaaaacaacuacauauaaa

SEQ ID NO: 755388 - RNA, 24 nt, Human
uaaaacuaaaaauaaaauacaacu

SEQ ID NO: 755389 - RNA, 18 nt, Human
uaaauaaauuccaagcaa

SEQ ID NO: 755390 - RNA, 24 nt, Human
uaacaaaacucauuuaaaaacuaa

SEQ ID NO: 755391 - RNA, 25 nt, Human
uaacacgaacaccccaugaacgcuc

SEQ ID NO: 755392 - RNA, 24 nt, Human
uaacacggggaaaccccgucucua

SEQ ID NO: 755393 - RNA, 18 nt, Human
uaagcggcucucaaccga

SEQ ID NO: 755394 - RNA, 24 nt, Human
uaagcggcucucaaccgauuccca

SEQ ID NO: 755395 - RNA, 22 nt, Human
uaggcgcgcacccaggacaccc

SEQ ID NO: 755396 - RNA, 23 nt, Human
uaugaagguaaauaacucagaua

SEQ ID NO: 755397 - RNA, 23 nt, Human
ucacaccacugcacuccagccug

SEQ ID NO: 755398 - RNA, 31 nt, Human; identical to SEQ ID NO: 55281

SEQ ID NO: 755399 - RNA, 18 nt, Human
ucacgaggucaggagauc

SEQ ID NO: 755400 - RNA, 24 nt, Human
ucacgaggucaggagaucgagacc

SEQ ID NO: 755401 - RNA, 21 nt, Human
uccaauaagauaaagugaaau

SEQ ID NO: 755402 - RNA, 23 nt, Human
uccagccugggcgacagagcgag

SEQ ID NO: 755403 - RNA, 24 nt, Human
uccagccugggcgacagagcgaga

SEQ ID NO: 755404 - RNA, 24 nt, Human
uccggcugggcgcgguggcucacg

SEQ ID NO: 755405 - RNA, 22 nt, Human
ucuacaacgaagcaaucuuggc

SEQ ID NO: 755406 - RNA, 25 nt, Human
ucucccgggaaugcgggcgcucugg

SEQ ID NO: 755407 - RNA, 19 nt, Human
ucucuacuaaaaauccaaa

SEQ ID NO: 755408 - RNA, 22 nt, Human
ucuggagccgaggagcgggggc

SEQ ID NO: 755409 - RNA, 21 nt, Human
ucuguaacuccuaaaacaaaa

SEQ ID NO: 755410 - RNA, 18 nt, Human
ugaaauaacuaugaaggu

SEQ ID NO: 755411 - RNA, 20 nt, Human
ugaaauaacuaugaagguaa

SEQ ID NO: 755412 - RNA, 23 nt, Human
ugaggcaggagaauggcgugaac

SEQ ID NO: 755413 - RNA, 24 nt, Human
ugaggcaggagaauggcgugaacc

SEQ ID NO: 755414 - RNA, 25 nt, Human
ugaggcaggagaauggcgugaaccc

SEQ ID NO: 755415 - RNA, 20 nt, Human
uggagaaaugcgggcguguc

SEQ ID NO: 755416 - RNA, 24 nt, Human
uggcucacgccuguaaucccagca

SEQ ID NO: 755417 - RNA, 18 nt, Human
ugggagcacagagaagcc

SEQ ID NO: 755418 - RNA, 18 nt, Human
ugggaggccgaggcaggg

SEQ ID NO: 755419 - RNA, 24 nt, Human
ugggaggccgaggcagggggauca

SEQ ID NO: 755420 - RNA, 20 nt, Human
ugggaggcggaccgggagcu

SEQ ID NO: 755421 - RNA, 23 nt, Human
ugggaggcggaccgggagcuccc

SEQ ID NO: 755422 - RNA, 20 nt, Human
ugggguggcgcauuccuggc

SEQ ID NO: 755423 - RNA, 24 nt, Human
ugguggcgggcgccuguaguccca

SEQ ID NO: 755424 - RNA, 23 nt, Human
ugucugcaggcauuuuugauugu

SEQ ID NO: 755425 - RNA, 18 nt, Human
uuaaaggcaucuccgccc

SEQ ID NO: 755426 - RNA, 18 nt, Human
uuagccgggcgugguggc

SEQ ID NO: 755427 - RNA, 22 nt, Human
uuagccgggcgugguggcgggc

SEQ ID NO: 755428 - RNA, 24 nt, Human
uuagccgggcgugguggcgggcgc

SEQ ID NO: 755429 - RNA, 22 nt, Human
uuccguauaaauaaagccaaac

SEQ ID NO: 755430 - RNA, 19 nt, Human
uugcagugagccgagauca

SEQ ID NO: 755431 - RNA, 20 nt, Human
uugcagugagccgagaucac

SEQ ID NO: 755432 - RNA, 25 nt, Human
uugggaggccgaggcagggggauca

SEQ ID NO: 755433 - RNA, 22 nt, Human
uugggggcgggguggaggaugg

SEQ ID NO: 755434 - RNA, 19 nt, Human
uuugcagugagccgagauc

SEQ ID NO: 755435 - RNA, 18 nt, Human
uuugggggcgggguggag

SEQ ID NO: 755436 - RNA, 19 nt, Human
aaaaaaaaaaaacagcuau

SEQ ID NO: 755437 - RNA, 24 nt, Human
aaaaaaaaaaaacagcuauuagga

SEQ ID NO: 755438 - RNA, 18 nt, Human
aaaaaaaaaaacagcuau

SEQ ID NO: 755439 - RNA, 23 nt, Human
aaaaaaaaaaacagcuauuagga

SEQ ID NO: 755440 - RNA, 27 nt, Human
aaaaaaacgagguuuaacauccacagg

SEQ ID NO: 755441 - RNA, 25 nt, Human
aaaaaaauacagaucuaaauuauaa

SEQ ID NO: 755442 - RNA, 25 nt, Human
aaaaaaauacagaucuaaauuauaa

SEQ ID NO: 755443 - RNA, 18 nt, Human
aaaaaaccugaaaacaac

SEQ ID NO: 755444 - RNA, 18 nt, Human
aaaaaaccugaaaacaac

SEQ ID NO: 755445 - RNA, 19 nt, Human
aaaauaacucuugauguau

SEQ ID NO: 755446 - RNA, 19 nt, Human
aaaauaacucuugauguau

SEQ ID NO: 755447 - RNA, 20 nt, Human
aaacaaggcgugcaugaaau

SEQ ID NO: 755448 - RNA, 20 nt, Human
aaacaaggcgugcaugaaau

SEQ ID NO: 755449 - RNA, 24 nt, Human
aaaccaguuucacaacugccucaa

SEQ ID NO: 755450 - RNA, 21 nt, Human
aaccagcuagagaaaagcccg

SEQ ID NO: 755451 - RNA, 21 nt, Human
aacugcaggaaacaauagaug

SEQ ID NO: 755452 - RNA, 21 nt, Human
aacugcaggaaacaauagaug

SEQ ID NO: 755453 - RNA, 27 nt, Human
aaggggccaaagcaaaaggggcaggug

SEQ ID NO: 755454 - RNA, 18 nt, Human
acaugacagagaaaaaaa

SEQ ID NO: 755455 - RNA, 18 nt, Human
acaugacagagaaaaaaa

SEQ ID NO: 755456 - RNA, 24 nt, Human
accaacaaucauaaaccaguuuca

SEQ ID NO: 755457 - RNA, 23 nt, Human
accauggagacugagaucucagu

SEQ ID NO: 755458 - RNA, 19 nt, Human
acuuuuuuuuuuuuuuugc

SEQ ID NO: 755459 - RNA, 21 nt, Human
agaaaaaaaccugaaaacaac

SEQ ID NO: 755460 - RNA, 21 nt, Human
agaaaaaaaccugaaaacaac

SEQ ID NO: 755461 - RNA, 24 nt, Human
agaauaaauuuauuuguaaaauaa

SEQ ID NO: 755462 - RNA, 24 nt, Human
agaauaaauuuauuuguaaaauaa

SEQ ID NO: 755463 - RNA, 21 nt, Human
agggaaaaucuacacugaaaa

SEQ ID NO: 755464 - RNA, 19 nt, Human
auauuucugcaucuacaga

SEQ ID NO: 755465 - RNA, 19 nt, Human
augcagcucauaggccuca

SEQ ID NO: 755466 - RNA, 19 nt, Human
caacagaguacaccaacaa

SEQ ID NO: 755467 - RNA, 20 nt, Human
caacugccucaaauaugaac

SEQ ID NO: 755468 - RNA, 21 nt, Human
cacagcuuccagccuaaacca

SEQ ID NO: 755469 - RNA, 22 nt, Human
cacauaguaacauuauguuucu

SEQ ID NO: 755470 - RNA, 19 nt, Human
caccugaaguaacucugca

SEQ ID NO: 755471 - RNA, 19 nt, Human
caccugaaguaacucugca

SEQ ID NO: 755472 - RNA, 20 nt, Human
cacuagugggaaaacaaggc

SEQ ID NO: 755473 - RNA, 20 nt, Human
cacuagugggaaaacaaggc

SEQ ID NO: 755474 - RNA, 23 nt, Human
cagaguacaccaacaaucauaaa

SEQ ID NO: 755475 - RNA, 18 nt, Human
cagcgcgcgcccaccccc

SEQ ID NO: 755476 - RNA, 21 nt, Human
cagcgguguaacaaauuuuaa

SEQ ID NO: 755477 - RNA, 21 nt, Human
caggaaacaauagaugugaaa

SEQ ID NO: 755478 - RNA, 21 nt, Human
caggaaacaauagaugugaaa

SEQ ID NO: 755479 - RNA, 22 nt, Human
caggacagugacgacaauggag

SEQ ID NO: 755480 - RNA, 23 nt, Human
cagggaaagcugaaggagaucga

SEQ ID NO: 755481 - RNA, 19 nt, Human
caugacagagaaaaaaacc

SEQ ID NO: 755482 - RNA, 19 nt, Human
caugacagagaaaaaaacc

SEQ ID NO: 755483 - RNA, 19 nt, Human
ccauguccccugaaacccu

SEQ ID NO: 755484 - RNA, 19 nt, Human
cccccagcgcgacuggucc

SEQ ID NO: 755485 - RNA, 24 nt, Human
cccccgccucagcgcgcgcccacc

SEQ ID NO: 755486 - RNA, 21 nt, Human
ccccgccucagcgcgcgccca

SEQ ID NO: 755487 - RNA, 21 nt, Human
ccccgcgcggcgggacccccc

SEQ ID NO: 755488 - RNA, 18 nt, Human
ccccugaaacccuaugcu

SEQ ID NO: 755489 - RNA, 18 nt, Human
cccgcccgcgccuccgcc

SEQ ID NO: 755490 - RNA, 22 nt, Human
cccgcccgcgccuccgccccgc

SEQ ID NO: 755491 - RNA, 18 nt, Human
ccgccgagcgcagccgcg

SEQ ID NO: 755492 - RNA, 21 nt, Human
ccucaguugucacaaaggggc

SEQ ID NO: 755493 - RNA, 20 nt, Human
cgccauguccccugaaaccc

SEQ ID NO: 755494 - RNA, 26 nt, Human
cgcccgcccgcgccuccgccccgcgc

SEQ ID NO: 755495 - RNA, 20 nt, Human
cgccugcgcccgcccgcgcc

SEQ ID NO: 755496 - RNA, 18 nt, Human
cgcugcugacucucgcag

SEQ ID NO: 755497 - RNA, 19 nt, Human
cugcuguguaccaccagaa

SEQ ID NO: 755498 - RNA, 22 nt, Human
cuguuacaaaucaaacugcagg

SEQ ID NO: 755499 - RNA, 22 nt, Human
cuguuacaaaucaaacugcagg

SEQ ID NO: 755500 - RNA, 19 nt, Human
cuucacauacacaggcacc

SEQ ID NO: 755501 - RNA, 22 nt, Human
cuuuuuuuuuuuuuuugcaagu

SEQ ID NO: 755502 - RNA, 22 nt, Human
gacuucccgcuccccaagcuuc

SEQ ID NO: 755503 - RNA, 20 nt, Human
gaguuacuuuuuuuuuuuuu

SEQ ID NO: 755504 - RNA, 21 nt, Human
gaguuacuuuuuuuuuuuuuu

SEQ ID NO: 755505 - RNA, 21 nt, Human
gcagagcagcacagugaccac

SEQ ID NO: 755506 - RNA, 21 nt, Human
gcagagcagcacagugaccac

SEQ ID NO: 755507 - RNA, 20 nt, Human
gcagugcauccucagggagc

SEQ ID NO: 755508 - RNA, 20 nt, Human
gcagugcauccucagggagc

SEQ ID NO: 755509 - RNA, 18 nt, Human
gccauguccccugaaacc

SEQ ID NO: 755510 - RNA, 25 nt, Human
gccuaaaccagcuagagaaaagccc

SEQ ID NO: 755511 - RNA, 25 nt, Human
ggacccccgccucagcgcgcgccca

SEQ ID NO: 755512 - RNA, 19 nt, Human
ggagaagaguuuuggggug

SEQ ID NO: 755513 - RNA, 19 nt, Human
ggccaaagcaaaaggggca

SEQ ID NO: 755514 - RNA, 19 nt, Human
ggccgccugcgcccgcccg

SEQ ID NO: 755515 - RNA, 20 nt, Human
gggaaagcugaaggagaucg

SEQ ID NO: 755516 - RNA, 19 nt, Human
ggggugcccucagccugag

SEQ ID NO: 755517 - RNA, 19 nt, Human
guguggggaaaaaaacgag

SEQ ID NO: 755518 - RNA, 23 nt, Human
uaaaauccacauaguaacauuau

SEQ ID NO: 755519 - RNA, 19 nt, Human
uaacaggggucucuccagc

SEQ ID NO: 755520 - RNA, 19 nt, Human
uaacaggggucucuccagc

SEQ ID NO: 755521 - RNA, 23 nt, Human
uaagcaaagaucuuacaaagaag

SEQ ID NO: 755522 - RNA, 23 nt, Human
uaagcaaagaucuuacaaagaag

SEQ ID NO: 755523 - RNA, 24 nt, Human
uaaguuaggagaagaguuuugggg

SEQ ID NO: 755524 - RNA, 20 nt, Human
uaaguuaguuuucacacuca

SEQ ID NO: 755525 - RNA, 23 nt, Human
uacacugaaaaauauuucugcau

SEQ ID NO: 755526 - RNA, 26 nt, Human
uacacugaaaaauauuucugcaucua

SEQ ID NO: 755527 - RNA, 24 nt, Human
uaccucugaacggagaaaugacuu

SEQ ID NO: 755528 - RNA, 20 nt, Human
uacuguaccaaccauggagg

SEQ ID NO: 755529 - RNA, 21 nt, Human
uacuuuuuuuuuuuuuugcaa

SEQ ID NO: 755530 - RNA, 19 nt, Human
uaggagaagaguuuugggg

SEQ ID NO: 755531 - RNA, 18 nt, Human
uauaagcaaagaucuuac

SEQ ID NO: 755532 - RNA, 18 nt, Human
uauaagcaaagaucuuac

SEQ ID NO: 755533 - RNA, 19 nt, Human
uaucccagccaggauugcc

SEQ ID NO: 755534 - RNA, 19 nt, Human
ucacaaaggggccaaagca

SEQ ID NO: 755535 - RNA, 18 nt, Human
uccgccgagcgcagccgc

SEQ ID NO: 755536 - RNA, 19 nt, Human
uccugaguaucauagaccu

SEQ ID NO: 755537 - RNA, 22 nt, Human
ucuaaauuauaaucuauaagca

SEQ ID NO: 755538 - RNA, 22 nt, Human
ucuaaauuauaaucuauaagca

SEQ ID NO: 755539 - RNA, 20 nt, Human
ucuccgcugcugacucucgc

SEQ ID NO: 755540 - RNA, 19 nt, Human
ucugaacggagaaaugacu

SEQ ID NO: 755541 - RNA, 18 nt, Human
ucugcagagcagcacagu

SEQ ID NO: 755542 - RNA, 18 nt, Human
ucugcagagcagcacagu

SEQ ID NO: 755543 - RNA, 22 nt, Human
ucuguaaacuucgccauguccc

SEQ ID NO: 755544 - RNA, 22 nt, Human
ugaaaaaggcugaaauguccuu

SEQ ID NO: 755545 - RNA, 22 nt, Human
ugaaaaaggcugaaauguccuu

SEQ ID NO: 755546 - RNA, 25 nt, Human
ugaaaaaggcugaaauguccuuaau

SEQ ID NO: 755547 - RNA, 25 nt, Human
ugaaaaaggcugaaauguccuuaau

SEQ ID NO: 755548 - RNA, 24 nt, Human
ugaaaacaacuguucuguuacaaa

SEQ ID NO: 755549 - RNA, 24 nt, Human
ugaaaacaacuguucuguuacaaa

SEQ ID NO: 755550 - RNA, 19 nt, Human
ugaaauguccuuaaugaaa

SEQ ID NO: 755551 - RNA, 19 nt, Human
ugaaauguccuuaaugaaa

SEQ ID NO: 755552 - RNA, 22 nt, Human
ugaaauguccuuaaugaaaaag

SEQ ID NO: 755553 - RNA, 19 nt, Human
ugaaguaacucugcagagc

SEQ ID NO: 755554 - RNA, 19 nt, Human
ugaaguaacucugcagagc

SEQ ID NO: 755555 - RNA, 23 nt, Human
ugacagagaaaaaaaccugaaaa

SEQ ID NO: 755556 - RNA, 23 nt, Human
ugacagagaaaaaaaccugaaaa

SEQ ID NO: 755557 - RNA, 22 nt, Human
ugaggacaacacugugaaauuu

SEQ ID NO: 755558 - RNA, 22 nt, Human
ugaggacaacacugugaaauuu

SEQ ID NO: 755559 - RNA, 25 nt, Human
ugaguuaugguuaaaaaaaaaaaaa

SEQ ID NO: 755560 - RNA, 24 nt, Human
ugccaaguagacuucccgcucccc

SEQ ID NO: 755561 - RNA, 23 nt, Human
uguggucaaagacuuacuguacc

SEQ ID NO: 755562 - RNA, 18 nt, Human
uuaaaaaaaaaaaaacag

SEQ ID NO: 755563 - RNA, 25 nt, Human
uuaaaaaaaaaaacagcuauuagga

SEQ ID NO: 755564 - RNA, 23 nt, Human
uucaaaauagacacucugaaaac

SEQ ID NO: 755565 - RNA, 19 nt, Human
aacccagaagccagccuca

SEQ ID NO: 755566 - RNA, 18 nt, Human
aagcugcaucaguggaac

SEQ ID NO: 755567 - RNA, 18 nt, Human
acaaacaaaaauaggaau

SEQ ID NO: 755568 - RNA, 24 nt, Human
acaacccagaagccagccucacgc

SEQ ID NO: 755569 - RNA, 21 nt, Human
acagaugcccucccagccccc

SEQ ID NO: 755570 - RNA, 22 nt, Human
accuugaggcgugcuggcuggg

SEQ ID NO: 755571 - RNA, 18 nt, Human
agccugcgcacgcuggcc

SEQ ID NO: 755572 - RNA, 18 nt, Human
aggagugcuccaggcucu

SEQ ID NO: 755573 - RNA, 19 nt, Human
aggagugcuccaggcucug

SEQ ID NO: 755574 - RNA, 21 nt, Human
auaauaauaaaacaaagguac

SEQ ID NO: 755575 - RNA, 23 nt, Human
cacgugcucugcgagccugcgca

SEQ ID NO: 755576 - RNA, 26 nt, Human
cacuuucuccucuuaacagccagacu

SEQ ID NO: 755577 - RNA, 19 nt, Human
cagaugcccucccagcccc

SEQ ID NO: 755578 - RNA, 20 nt, Human
cagaugcccucccagccccc

SEQ ID NO: 755579 - RNA, 19 nt, Human
cagcagagaguggugugga

SEQ ID NO: 755580 - RNA, 18 nt, Human
cagcccccacugcuggcc

SEQ ID NO: 755581 - RNA, 22 nt, Human
caggaaaggacuaacacagaug

SEQ ID NO: 755582 - RNA, 19 nt, Human
ccaccugcugugccugacc

SEQ ID NO: 755583 - RNA, 25 nt, Human
ccacggaaaaaagcuuugaugaaga

SEQ ID NO: 755584 - RNA, 19 nt, Human
cccggagcucagccacauc

SEQ ID NO: 755585 - RNA, 18 nt, Human
cccucccagcccccacug

SEQ ID NO: 755586 - RNA, 23 nt, Human
ccuccuccugggcuggaaggcag

SEQ ID NO: 755587 - RNA, 22 nt, Human
ccucgaaaguggcgcucagcuu

SEQ ID NO: 755588 - RNA, 21 nt, Human
cgcucagcuucuccuuccucg

SEQ ID NO: 755589 - RNA, 24 nt, Human
cgcuggccucucgugccuccagcu

SEQ ID NO: 755590 - RNA, 25 nt, Human
cgggucacagccaggaaaggacuaa

SEQ ID NO: 755591 - RNA, 22 nt, Human
cgucacagaggcucugcacgug

SEQ ID NO: 755592 - RNA, 18 nt, Human
cucacagcucuccagcag

SEQ ID NO: 755593 - RNA, 24 nt, Human
cucacgcauuccaugcccacaguu

SEQ ID NO: 755594 - RNA, 20 nt, Human
cucgugccuccagcugcucc

SEQ ID NO: 755595 - RNA, 19 nt, Human
cucucgugccuccagcugc

SEQ ID NO: 755596 - RNA, 24 nt, Human
cucucgugccuccagcugcuccuc

SEQ ID NO: 755597 - RNA, 20 nt, Human
cucugucagcuccuggaacc

SEQ ID NO: 755598 - RNA, 21 nt, Human
cugacccugcagcugguccuc

SEQ ID NO: 755599 - RNA, 25 nt, Human
cugcagcaaugccugcuucuccuuc

SEQ ID NO: 755600 - RNA, 20 nt, Human
cugcugcaagcuggggaagg

SEQ ID NO: 755601 - RNA, 21 nt, Human
cuggaaccgcugucugaggag

SEQ ID NO: 755602 - RNA, 19 nt, Human
cuggugcaccugcucacug

SEQ ID NO: 755603 - RNA, 18 nt, Human
cuucuccuucugcagggu

SEQ ID NO: 755604 - RNA, 24 nt, Human
gaacaaauacaaaaugcuguccuc

SEQ ID NO: 755605 - RNA, 25 nt, Human
gaagacaacaggaagucaacacagc

SEQ ID NO: 755606 - RNA, 19 nt, Human
gcagagagugguguggaca

SEQ ID NO: 755607 - RNA, 22 nt, Human
gccccguuuccacaccagcaca

SEQ ID NO: 755608 - RNA, 18 nt, Human
ggcgggucacagccagga

SEQ ID NO: 755609 - RNA, 20 nt, Human
ggugugcugcugcaagcugg

SEQ ID NO: 755610 - RNA, 27 nt, Human
uaaaaaacaaacaaaaauaggaauggu

SEQ ID NO: 755611 - RNA, 18 nt, Human
uaacacagaugcccuccc

SEQ ID NO: 755612 - RNA, 22 nt, Human
uaacgaugacaacaacagcaau

SEQ ID NO: 755613 - RNA, 19 nt, Human
uaagcugcaucaguggaac

SEQ ID NO: 755614 - RNA, 21 nt, Human
uacaaaaugcuguccuccucc

SEQ ID NO: 755615 - RNA, 20 nt, Human
uacaggugaaaagcagcgcu

SEQ ID NO: 755616 - RNA, 24 nt, Human
uagaauaccacggaaaaaagcuuu

SEQ ID NO: 755617 - RNA, 21 nt, Human
ucacagaggcucugcacgugc

SEQ ID NO: 755618 - RNA, 22 nt, Human
ucacagaggcucugcacgugcu

SEQ ID NO: 755619 - RNA, 18 nt, Human
ucacugcccucgaaagug

SEQ ID NO: 755620 - RNA, 22 nt, Human
ucugcagcaaugccugcuucuc

SEQ ID NO: 755621 - RNA, 21 nt, Human
ucugucagcuccuggaaccgc

SEQ ID NO: 755622 - RNA, 18 nt, Human
ugacccaggccaagcugg

SEQ ID NO: 755623 - RNA, 24 nt, Human
ugaggaggucccgcucgucacaga

SEQ ID NO: 755624 - RNA, 20 nt, Human
ugcaucaguggaacaaauac

SEQ ID NO: 755625 - RNA, 18 nt, Human
ugccugacccugcagcug

SEQ ID NO: 755626 - RNA, 22 nt, Human
ugccugacccugcagcuggucc

SEQ ID NO: 755627 - RNA, 21 nt, Human
ugccugcuucuccuucucaca

SEQ ID NO: 755628 - RNA, 19 nt, Human
ugcuguccuccuccugggc

SEQ ID NO: 755629 - RNA, 18 nt, Human
uggaacaaauacaaaaug

SEQ ID NO: 755630 - RNA, 19 nt, Human
uggaaggcagugcacuuuc

SEQ ID NO: 755631 - RNA, 21 nt, Human
uggcugggccccguuuccaca

SEQ ID NO: 755632 - RNA, 21 nt, Human
uggggugugcugcugcaagcu

SEQ ID NO: 755633 - RNA, 21 nt, Human
ugguguggacaacccagaagc

SEQ ID NO: 755634 - RNA, 19 nt, Human
ugucugaggaggucccgcu

SEQ ID NO: 755635 - RNA, 22 nt, Human
ugucugaggaggucccgcucga

SEQ ID NO: 755636 - RNA, 19 nt, Human
uucuaagcugcaucagugg

SEQ ID NO: 755637 - RNA, 18 nt, Human
aaaacacaaguagcuaca

SEQ ID NO: 755638 - RNA, 21 nt, Human
aaagaacagccuccucaucca

SEQ ID NO: 755639 - RNA, 20 nt, Human
aaagcacaucaaugaacaag

SEQ ID NO: 755640 - RNA, 23 nt, Human
aaaugcguggagagaagccccag

SEQ ID NO: 755641 - RNA, 27 nt, Human
aacacacacacacacacacgggaucuc

SEQ ID NO: 755642 - RNA, 24 nt, Human
aaccauuggaaguacaauaaacag

SEQ ID NO: 755643 - RNA, 28 nt, Human
acacacacacacaaacacacacacacac

SEQ ID NO: 755644 - RNA, 31 nt, Human
acacacacacacaaacacacacacacacaca

SEQ ID NO: 755645 - RNA, 26 nt, Human
acacacacacacacaaacacacacaa

SEQ ID NO: 755646 - RNA, 33 nt, Human
acacacacacacacaaacacacacacacacagu

SEQ ID NO: 755647 - RNA, 25 nt, Human
acacacacacacacacacgggaucu

SEQ ID NO: 755648 - RNA, 27 nt, Human
acacacacacacacacacgggaucuca

SEQ ID NO: 755649 - RNA, 21 nt, Human
acacuggcgaagcuaaaacaa

SEQ ID NO: 755650 - RNA, 22 nt, Human
accaguacauggcagcgugcuc

SEQ ID NO: 755651 - RNA, 21 nt, Human
acccacacacacacacacaaa

SEQ ID NO: 755652 - RNA, 18 nt, Human
accuaaaacauggggcuc

SEQ ID NO: 755653 - RNA, 24 nt, Human
acguguuuaaccgugugccaugug

SEQ ID NO: 755654 - RNA, 23 nt, Human
auaaaacacaaguagcuacaaag

SEQ ID NO: 755655 - RNA, 21 nt, Human
auuuuuuaaaaucuguauuuu

SEQ ID NO: 755656 - RNA, 21 nt, Human
caagacaagguggucuggagc

SEQ ID NO: 755657 - RNA, 25 nt, Human
cacaaguagcuacaaagaaauaaaa

SEQ ID NO: 755658 - RNA, 21 nt, Human
cacacacaaacacacacacac

SEQ ID NO: 755659 - RNA, 24 nt, Human
cacacacaaacacacacacacaca

SEQ ID NO: 755660 - RNA, 28 nt, Human
cacacacacacacacgggaucucauaua

SEQ ID NO: 755661 - RNA, 24 nt, Human
caccaccggcuauggauuugaagc

SEQ ID NO: 755662 - RNA, 18 nt, Human
cacugcucagaacuuucc

SEQ ID NO: 755663 - RNA, 18 nt, Human
cagaaggcagccuucugu

SEQ ID NO: 755664 - RNA, 21 nt, Human
cagcccggaaucaguaggcag

SEQ ID NO: 755665 - RNA, 19 nt, Human
ccacacuuuucccagccuc

SEQ ID NO: 755666 - RNA, 19 nt, Human
ccagaaauacagggcauag

SEQ ID NO: 755667 - RNA, 31 nt, Human
cccacacacacacacacaaacacacacacaa

SEQ ID NO: 755668 - RNA, 31 nt, Human
cccacacacacacacacaaacacacacacag

SEQ ID NO: 755669 - RNA, 22 nt, Human
cgacgaaagcacaucaaugaac

SEQ ID NO: 755670 - RNA, 21 nt, Human
gaucuaugcugaagucgggag

SEQ ID NO: 755671 - RNA, 21 nt, Human
gcguuaggugaaaaaaaagga

SEQ ID NO: 755672 - RNA, 19 nt, Human
gcucagaacuuuccgacag

SEQ ID NO: 755673 - RNA, 19 nt, Human
ggaaagaacagccuccuca

SEQ ID NO: 755674 - RNA, 18 nt, Human
gggcauaggaaagaacag

SEQ ID NO: 755675 - RNA, 22 nt, Human
uaaaacacaaguagcuacaaag

SEQ ID NO: 755676 - RNA, 24 nt, Human
uaaaacacaaguagcuacaaagaa

SEQ ID NO: 755677 - RNA, 25 nt, Human
uaagaaagaacccacacacacacac

SEQ ID NO: 755678 - RNA, 23 nt, Human
uacaauaaacagacuguugaacc

SEQ ID NO: 755679 - RNA, 20 nt, Human
uacuguguaggccuuugaau

SEQ ID NO: 755680 - RNA, 19 nt, Human
uaggaaagaacagccuccu

SEQ ID NO: 755681 - RNA, 24 nt, Human
uaggugcguuaggugaaaaaaaag

SEQ ID NO: 755682 - RNA, 23 nt, Human
uagugucuguguccugugcuuuu

SEQ ID NO: 755683 - RNA, 21 nt, Human
uauaauaccaauaaaacacaa

SEQ ID NO: 755684 - RNA, 25 nt, Human
uauccagaaauacagggcauaggag

SEQ ID NO: 755685 - RNA, 23 nt, Human
ucaaaccaguacauggcagcgug

SEQ ID NO: 755686 - RNA, 21 nt, Human
uccaugaguaacaccuaaaac

SEQ ID NO: 755687 - RNA, 18 nt, Human
ucccagccucucucuugc

SEQ ID NO: 755688 - RNA, 19 nt, Human
ucccgggggacgagcgcug

SEQ ID NO: 755689 - RNA, 20 nt, Human
uccgacagccgacgaaagca

SEQ ID NO: 755690 - RNA, 21 nt, Human
ucuguauuuugaagaaaggaa

SEQ ID NO: 755691 - RNA, 21 nt, Human
ucuguauuuugaagaaaggaa

SEQ ID NO: 755692 - RNA, 20 nt, Human
ugaaccguagaaaaacaacu

SEQ ID NO: 755693 - RNA, 20 nt, Human
ugacacuggcgaagcuaaaa

SEQ ID NO: 755694 - RNA, 23 nt, Human
ugcauggauugcuccuuuccucc

SEQ ID NO: 755695 - RNA, 18 nt, Human
ugcuccuuuccuccgcua

SEQ ID NO: 755696 - RNA, 21 nt, Human
uggcacaguaacuuuucaaag

SEQ ID NO: 755697 - RNA, 24 nt, Human
uggcacaguaacuuuucaaaggcu

SEQ ID NO: 755698 - RNA, 25 nt, Human
ugguaugaauaaaaaguuccaagua

SEQ ID NO: 755699 - RNA, 24 nt, Human
uguugaaccguagaaaaacaacug

SEQ ID NO: 755700 - RNA, 18 nt, Human
uguuuaaccgugugccau

SEQ ID NO: 755701 - RNA, 21 nt, Human
uucauaguuuugcaaggggug

SEQ ID NO: 755702 - RNA, 23 nt, Human
aaaaagucgguucaucuucaaac

SEQ ID NO: 755703 - RNA, 22 nt, Human
aauaacaacaguaggacccaaa

SEQ ID NO: 755704 - RNA, 22 nt, Human
acaaaccaaaaaaaaucuaaac

SEQ ID NO: 755705 - RNA, 25 nt, Human
accucugaaucccccccaaugguuu

SEQ ID NO: 755706 - RNA, 23 nt, Human
agccacagucaauguucacagcc

SEQ ID NO: 755707 - RNA, 25 nt, Human
agcccacccagccuaucacacugcc

SEQ ID NO: 755708 - RNA, 24 nt, Human
agcuguacaaaccaaaaaaaaucu

SEQ ID NO: 755709 - RNA, 22 nt, Human
aggauuaccgucccccaggcau

SEQ ID NO: 755710 - RNA, 18 nt, Human
aucuaaacgauuuuaaga

SEQ ID NO: 755711 - RNA, 19 nt, Human
caacaguaggacccaaacu

SEQ ID NO: 755712 - RNA, 21 nt, Human
caacaguaggacccaaacuaa

SEQ ID NO: 755713 - RNA, 20 nt, Human
cagcucaagaagauccgugg

SEQ ID NO: 755714 - RNA, 20 nt, Human
ccacauaaauaacuuuagcc

SEQ ID NO: 755715 - RNA, 21 nt, Human
ccacccagccuaucacacugc

SEQ ID NO: 755716 - RNA, 22 nt, Human
cguggaugcaccucugaauccc

SEQ ID NO: 755717 - RNA, 21 nt, Human
cuggucaguggaacaaaggaa

SEQ ID NO: 755718 - RNA, 19 nt, Human
gaguuccccacagcccucc

SEQ ID NO: 755719 - RNA, 18 nt, Human
ggaguuccccacagcccu

SEQ ID NO: 755720 - RNA, 23 nt, Human
uaaauuuucuuucccaaaaauac

SEQ ID NO: 755721 - RNA, 20 nt, Human
uaagaagagcagcaacucaa

SEQ ID NO: 755722 - RNA, 24 nt, Human
uagcccacccagccuaucacacug

SEQ ID NO: 755723 - RNA, 21 nt, Human
ucaaaccaacaagagcacuag

SEQ ID NO: 755724 - RNA, 19 nt, Human
uccacguugggcagccaca

SEQ ID NO: 755725 - RNA, 18 nt, Human
uccccacagcccuccccu

SEQ ID NO: 755726 - RNA, 19 nt, Human
ugcuuuaguucauuuaaau

SEQ ID NO: 755727 - RNA, 19 nt, Human
ugggcagccacauaaaaac

SEQ ID NO: 755728 - RNA, 19 nt, Human
uguguguguguguguuuug

SEQ ID NO: 755729 - RNA, 22 nt, Human
uguguguuuuguuuuuguucug

SEQ ID NO: 755730 - RNA, 27 nt, Human
uguuucuguuuuugugugugugugugu

SEQ ID NO: 755731 - RNA, 20 nt, Human
uguuuuugugugugugugug

SEQ ID NO: 755732 - RNA, 20 nt, Human
uucacagccuggucagugga

SEQ ID NO: 755733 - RNA, 26 nt, Human
uucuuucccaaaaauacacuccuaaa

SEQ ID NO: 755734 - RNA, 19 nt, Human
uuuaagaagagcagcaacu

SEQ ID NO: 755735 - RNA, 25 nt, Human
uuucuguuuuugugugugugugugu

SEQ ID NO: 755736 - RNA, 23 nt, Human
uuuuuuuuguuucuguuuuugug

SEQ ID NO: 755737 - RNA, 23 nt, Human
aaauccaaccucuccagagcuag

SEQ ID NO: 755738 - RNA, 19 nt, Human
aaccugguccguggugugg

SEQ ID NO: 755739 - RNA, 22 nt, Human
aagaaaagggaaaaaagacagc

SEQ ID NO: 755740 - RNA, 21 nt, Human
aagaaguuaguagcuacacaa

SEQ ID NO: 755741 - RNA, 23 nt, Human
acaccagaaccuuccguagaaca

SEQ ID NO: 755742 - RNA, 22 nt, Human
acagccuugggggaggaugagg

SEQ ID NO: 755743 - RNA, 25 nt, Human
acccgaaccacccuucucaggccuc

SEQ ID NO: 755744 - RNA, 21 nt, Human
accugugacucggccaagcug

SEQ ID NO: 755745 - RNA, 24 nt, Human
agacgugagggccacgggucaccu

SEQ ID NO: 755746 - RNA, 24 nt, Human
agauaccugagguuacaugaggac

SEQ ID NO: 755747 - RNA, 19 nt, Human
agcuccguggcccagcuug

SEQ ID NO: 755748 - RNA, 18 nt, Human
aggccucgcuggaggccc

SEQ ID NO: 755749 - RNA, 21 nt, Human
agggcuuuagaagagccaaua

SEQ ID NO: 755750 - RNA, 20 nt, Human
aguaaggaaagguaaaacca

SEQ ID NO: 755751 - RNA, 20 nt, Human
aguagcuacacaaagccaag

SEQ ID NO: 755752 - RNA, 22 nt, Human
caaaagcaaaauccaaccucuc

SEQ ID NO: 755753 - RNA, 24 nt, Human
caaaccgcaaaauaaagaugagaa

SEQ ID NO: 755754 - RNA, 24 nt, Human
caacaaaguaaccucccagcagag

SEQ ID NO: 755755 - RNA, 26 nt, Human
caacaaaguaaccucccagcagaggu

SEQ ID NO: 755756 - RNA, 19 nt, Human
cagacccaaccggaggccg

SEQ ID NO: 755757 - RNA, 20 nt, Human
cagccaagaucuuguugagu

SEQ ID NO: 755758 - RNA, 26 nt, Human
caucccaggagccuggcaaacacccc

SEQ ID NO: 755759 - RNA, 23 nt, Human
ccacauaauucucucugcccaca

SEQ ID NO: 755760 - RNA, 22 nt, Human
ccagccccggggcuuuguccug

SEQ ID NO: 755761 - RNA, 19 nt, Human
ccaucccaggagccuggca

SEQ ID NO: 755762 - RNA, 25 nt, Human
cccaagaaguuaguagcuacacaaa

SEQ ID NO: 755763 - RNA, 19 nt, Human
cccacagugguuacccgaa

SEQ ID NO: 755764 - RNA, 20 nt, Human
cccaggagccuggcaaacac

SEQ ID NO: 755765 - RNA, 19 nt, Human
cccaugugcuuuccugggc

SEQ ID NO: 755766 - RNA, 19 nt, Human
cccaugugcuuuccugggc

SEQ ID NO: 755767 - RNA, 26 nt, Human
ccccagagacccucaggaugcgccag

SEQ ID NO: 755768 - RNA, 18 nt, Human
ccccggggcuccaggcuc

SEQ ID NO: 755769 - RNA, 20 nt, Human
ccccggggcuccaggcuccc

SEQ ID NO: 755770 - RNA, 21 nt, Human
ccccggggcuccaggcucccu

SEQ ID NO: 755771 - RNA, 19 nt, Human
ccccugguuguggauucca

SEQ ID NO: 755772 - RNA, 26 nt, Human
ccugagacacaccccaacaggaaaca

SEQ ID NO: 755773 - RNA, 21 nt, Human
ccugccaccccuccaggcuuc

SEQ ID NO: 755774 - RNA, 23 nt, Human
ccugccaccccuccaggcuucug

SEQ ID NO: 755775 - RNA, 19 nt, Human
cgaaacacaaaacucaaac

SEQ ID NO: 755776 - RNA, 20 nt, Human
cgcuggaggccccggggcuc

SEQ ID NO: 755777 - RNA, 21 nt, Human
cguuagcguuucuaaucacac

SEQ ID NO: 755778 - RNA, 24 nt, Human
cucaaaccgcaaaauaaagaugag

SEQ ID NO: 755779 - RNA, 21 nt, Human
cuccacaagcugaagauaccu

SEQ ID NO: 755780 - RNA, 25 nt, Human
cuccaugcugagccugggcugcucc

SEQ ID NO: 755781 - RNA, 22 nt, Human
cuccggcuccaacaaccacacc

SEQ ID NO: 755782 - RNA, 26 nt, Human
cucuccaaaaugcagacccaaccgga

SEQ ID NO: 755783 - RNA, 19 nt, Human
cucugcccugccaccccuc

SEQ ID NO: 755784 - RNA, 18 nt, Human
cugccugagacacacccc

SEQ ID NO: 755785 - RNA, 22 nt, Human
cuggaggcacugcagggcuucu

SEQ ID NO: 755786 - RNA, 23 nt, Human
cuggcaaacacccccagagaccc

SEQ ID NO: 755787 - RNA, 22 nt, Human
cuucugcuccuggcaggcucua

SEQ ID NO: 755788 - RNA, 29 nt, Human
cuuucuaggcaacaaaguaaccucccagg

SEQ ID NO: 755789 - RNA, 20 nt, Human
gagaagcuggagcuccgugg

SEQ ID NO: 755790 - RNA, 19 nt, Human
gagcggcacgcuggaagac

SEQ ID NO: 755791 - RNA, 23 nt, Human
gagcuccguggcccagcuugugg

SEQ ID NO: 755792 - RNA, 23 nt, Human
gcacacugaagacgagaucacac

SEQ ID NO: 755793 - RNA, 21 nt, Human
gcuggcuccagugccagcccc

SEQ ID NO: 755794 - RNA, 20 nt, Human
ggaggcacugcagggcuucu

SEQ ID NO: 755795 - RNA, 19 nt, Human
ggccaugggucucgcggcu

SEQ ID NO: 755796 - RNA, 20 nt, Human
ggccccggggcuccaggcuc

SEQ ID NO: 755797 - RNA, 19 nt, Human
gggcaggccccaugcccuc

SEQ ID NO: 755798 - RNA, 23 nt, Human
guauagcaugcugcgcguacaca

SEQ ID NO: 755799 - RNA, 18 nt, Human
gugcaguuuaaccagggg

SEQ ID NO: 755800 - RNA, 21 nt, Human
gugcuuuccugggcaugauau

SEQ ID NO: 755801 - RNA, 23 nt, Human
uaaaaccagagacgugagggcca

SEQ ID NO: 755802 - RNA, 22 nt, Human
uaaagacagcuucgcagcgaaa

SEQ ID NO: 755803 - RNA, 18 nt, Human
uaaggaaagguaaaacca

SEQ ID NO: 755804 - RNA, 25 nt, Human
uaaguaaugaagucucaacauuaca

SEQ ID NO: 755805 - RNA, 24 nt, Human
uauagcaugcugcgcguacacaua

SEQ ID NO: 755806 - RNA, 23 nt, Human
uaucaccaacaagacgcagcugc

SEQ ID NO: 755807 - RNA, 19 nt, Human
uccaugcugagccugggcu

SEQ ID NO: 755808 - RNA, 21 nt, Human
ucccaugugcuuuccugggca

SEQ ID NO: 755809 - RNA, 19 nt, Human
uccguggcccagcuugugg

SEQ ID NO: 755810 - RNA, 18 nt, Human
uccuggcaggcucuaggg

SEQ ID NO: 755811 - RNA, 23 nt, Human
ucucaggccucgcuggaggcccc

SEQ ID NO: 755812 - RNA, 19 nt, Human
ucuccaaaaugcagaccca

SEQ ID NO: 755813 - RNA, 18 nt, Human
ucucucugcccacacucu

SEQ ID NO: 755814 - RNA, 25 nt, Human
ugacacgcucccuccggcuccaaca

SEQ ID NO: 755815 - RNA, 18 nt, Human
ugacucggccaagcugcu

SEQ ID NO: 755816 - RNA, 19 nt, Human
ugacucggccaagcugcug

SEQ ID NO: 755817 - RNA, 20 nt, Human
ugagaagcuggagcuccgug

SEQ ID NO: 755818 - RNA, 21 nt, Human
ugagacacaccccaacaggaa

SEQ ID NO: 755819 - RNA, 20 nt, Human
ugagagaaggugcguggcca

SEQ ID NO: 755820 - RNA, 22 nt, Human
ugauuguccacuucaaaaucuu

SEQ ID NO: 755821 - RNA, 19 nt, Human
ugcaaagggucucuuuuac

SEQ ID NO: 755822 - RNA, 27 nt, Human
ugcgcguacacauacgcagugugcaca

SEQ ID NO: 755823 - RNA, 19 nt, Human
ugcuccuggcaggcucuag

SEQ ID NO: 755824 - RNA, 21 nt, Human
ugcucugcccugccaccccuc

SEQ ID NO: 755825 - RNA, 23 nt, Human
ugcucugcccugccaccccucca

SEQ ID NO: 755826 - RNA, 19 nt, Human
ugcugagccugggcugcuc

SEQ ID NO: 755827 - RNA, 20 nt, Human
uggaggccccggggcuccag

SEQ ID NO: 755828 - RNA, 22 nt, Human
uggaggccccggggcuccaggc

SEQ ID NO: 755829 - RNA, 23 nt, Human
uggaggccccggggcuccaggcu

SEQ ID NO: 755830 - RNA, 24 nt, Human
uggcgggcuggguauuaaagacag

SEQ ID NO: 755831 - RNA, 24 nt, Human
ugggagagagcccacagugguuac

SEQ ID NO: 755832 - RNA, 19 nt, Human
ugguguggacucuccaaaa

SEQ ID NO: 755833 - RNA, 21 nt, Human
ugucgcaaacaccugaucgca

SEQ ID NO: 755834 - RNA, 22 nt, Human
uuaaaccagauuuauucuccac

SEQ ID NO: 755835 - RNA, 23 nt, Human
uuacccgaaccacccuucucagg

SEQ ID NO: 755836 - RNA, 20 nt, Human
uuccaucuggaggcacugca

SEQ ID NO: 755837 - RNA, 22 nt, Human
uuuacaaaagcaaaauccaacc

SEQ ID NO: 755838 - RNA, 21 nt, Human
uuucuggucugugaucuuugg

SEQ ID NO: 755839 - RNA, 19 nt, Human
aaaaaaaaaaaaaaggaaa

SEQ ID NO: 755840 - RNA, 18 nt, Human
aaaaaaacccaauacaaa

SEQ ID NO: 755841 - RNA, 29 nt, Human
aaaaaacccaauacaaagcucugaaaccg

SEQ ID NO: 755842 - RNA, 21 nt, Human
aaaaaagagaaaaaaacccaa

SEQ ID NO: 755843 - RNA, 27 nt, Human
aaaaagauaaagaauuuuaagagcugg

SEQ ID NO: 755844 - RNA, 21 nt, Human
aaaagaaaaaccugaacaaaa

SEQ ID NO: 755845 - RNA, 23 nt, Human
aaaagaaaaaccugaacaaaaaa

SEQ ID NO: 755846 - RNA, 21 nt, Human
aaaaggcaacccaucaccaca

SEQ ID NO: 755847 - RNA, 25 nt, Human
aaaauccauauccaaagccaaccuc

SEQ ID NO: 755848 - RNA, 25 nt, Human
aaagcagcugaaaugcugcaaagca

SEQ ID NO: 755849 - RNA, 23 nt, Human
aaaggcaacccaucaccacaaaa

SEQ ID NO: 755850 - RNA, 21 nt, Human
aacaaaagugaaaagggguca

SEQ ID NO: 755851 - RNA, 21 nt, Human
aacaauaaaacaucacuuuuu

SEQ ID NO: 755852 - RNA, 22 nt, Human
aacccaaccuauauuuccaacu

SEQ ID NO: 755853 - RNA, 25 nt, Human
aagaaaaagauaaagaauuuuaaga

SEQ ID NO: 755854 - RNA, 18 nt, Human
aagaaaagcaggauacga

SEQ ID NO: 755855 - RNA, 19 nt, Human
aagaaaagcaggauacgaa

SEQ ID NO: 755856 - RNA, 23 nt, Human
aagaaaugacaggccaggcagaa

SEQ ID NO: 755857 - RNA, 24 nt, Human
aagacucugaccauauucuccaga

SEQ ID NO: 755858 - RNA, 21 nt, Human
aagcacacauggaaucuaucu

SEQ ID NO: 755859 - RNA, 27 nt, Human
aagcagcugaaaugcugcaaagcauac

SEQ ID NO: 755860 - RNA, 21 nt, Human
aagcaggauacgaaaaauggg

SEQ ID NO: 755861 - RNA, 23 nt, Human
aaguaggaagcggaauugcagga

SEQ ID NO: 755862 - RNA, 21 nt, Human
aagugaaaaauccuccuccuu

SEQ ID NO: 755863 - RNA, 22 nt, Human
aauaagaaaaaaacccaaccua

SEQ ID NO: 755864 - RNA, 19 nt, Human
aauacaaagcucugaaaca

SEQ ID NO: 755865 - RNA, 24 nt, Human
aaugaaaaaaagagaaaaaaaccc

SEQ ID NO: 755866 - RNA, 21 nt, Human
aauucugguuuugccaagaaa

SEQ ID NO: 755867 - RNA, 23 nt, Human
acaaccuccucaccaaaaaaacc

SEQ ID NO: 755868 - RNA, 23 nt, Human
acacacacacacucacacacaca

SEQ ID NO: 755869 - RNA, 24 nt, Human
acacacacacacucacacacacag

SEQ ID NO: 755870 - RNA, 23 nt, Human
acacacacacagacacacacaca

SEQ ID NO: 755871 - RNA, 27 nt, Human
acacacacaccaaaaaaauaaauacaa

SEQ ID NO: 755872 - RNA, 22 nt, Human
acacacucacacacacacacca

SEQ ID NO: 755873 - RNA, 21 nt, Human
acacagacacacacacacuca

SEQ ID NO: 755874 - RNA, 21 nt, Human
accacaacacacacacagaca

SEQ ID NO: 755875 - RNA, 27 nt, Human
accacaacacacacacagacacacaca

SEQ ID NO: 755876 - RNA, 21 nt, Human
accuccucaccaaaaaaaccc

SEQ ID NO: 755877 - RNA, 25 nt, Human
accuccucaccaaaaaaacccaaua

SEQ ID NO: 755878 - RNA, 19 nt, Human
acuacaguuuacagccauu

SEQ ID NO: 755879 - RNA, 21 nt, Human
agaaaaaaaaauauaaaagaa

SEQ ID NO: 755880 - RNA, 23 nt, Human
agaaaaaaaaauauaaaagaaaa

SEQ ID NO: 755881 - RNA, 22 nt, Human
agaaaaaccugaacaaaaaaua

SEQ ID NO: 755882 - RNA, 19 nt, Human
agaaucugguauuaucaag

SEQ ID NO: 755883 - RNA, 18 nt, Human
agacaugaacaaugcacc

SEQ ID NO: 755884 - RNA, 23 nt, Human
agagguagaagaugacaaacaug

SEQ ID NO: 755885 - RNA, 22 nt, Human
agauacagacaugaacaaugca

SEQ ID NO: 755886 - RNA, 23 nt, Human
agcaaauccccaucugaacaaaa

SEQ ID NO: 755887 - RNA, 24 nt, Human
agcaaauccccaucugaacaaaaa

SEQ ID NO: 755888 - RNA, 19 nt, Human
agccugucucuucaaauca

SEQ ID NO: 755889 - RNA, 19 nt, Human
agcuggaagcgaagggguu

SEQ ID NO: 755890 - RNA, 24 nt, Human
agcuggcuuuaaaaaucuggccuc

SEQ ID NO: 755891 - RNA, 22 nt, Human
aggcaacccaucaccacaaaag

SEQ ID NO: 755892 - RNA, 24 nt, Human
agucuguggucacuuagaaacaga

SEQ ID NO: 755893 - RNA, 19 nt, Human
auaaauacaaccuccucac

SEQ ID NO: 755894 - RNA, 21 nt, Human
augaaaaaaagagaaaaaaac

SEQ ID NO: 755895 - RNA, 18 nt, Human
auuugaucacuccuucca

SEQ ID NO: 755896 - RNA, 25 nt, Human
caaaaaucaucuuaaaaaaucaaac

SEQ ID NO: 755897 - RNA, 20 nt, Human
caaagcauaccagaaugaaa

SEQ ID NO: 755898 - RNA, 22 nt, Human
caaccuccucaccaaaaaaacc

SEQ ID NO: 755899 - RNA, 24 nt, Human
caagaaaaagauaaagaauuuuaa

SEQ ID NO: 755900 - RNA, 24 nt, Human
caaggcaaaaaaaguugcaagcaa

SEQ ID NO: 755901 - RNA, 21 nt, Human
caauaagaaaaaaacccaacc

SEQ ID NO: 755902 - RNA, 19 nt, Human
cacaacacacacacagaca

SEQ ID NO: 755903 - RNA, 23 nt, Human
cacacacacaccaaaaaaauaaa

SEQ ID NO: 755904 - RNA, 24 nt, Human
cacacacacacucacacacacaca

SEQ ID NO: 755905 - RNA, 22 nt, Human
cacacacacagacacacacaca

SEQ ID NO: 755906 - RNA, 24 nt, Human
cacacacacucacacacacacacc

SEQ ID NO: 755907 - RNA, 25 nt, Human
cacacacacucacacacacacacca

SEQ ID NO: 755908 - RNA, 21 nt, Human
cacacucacacacacacacca

SEQ ID NO: 755909 - RNA, 24 nt, Human
cacauggaaucuaucuuacacucu

SEQ ID NO: 755910 - RNA, 20 nt, Human
caccaaagcagcugaaaugc

SEQ ID NO: 755911 - RNA, 27 nt, Human
caccaaggcaaaaaaaguugcaagcaa

SEQ ID NO: 755912 - RNA, 20 nt, Human
cacugggccuguuuaagacu

SEQ ID NO: 755913 - RNA, 24 nt, Human
cagaaaaaaaaauauaaaagaaaa

SEQ ID NO: 755914 - RNA, 21 nt, Human
cagaacaggcuugcagauaca

SEQ ID NO: 755915 - RNA, 23 nt, Human
cagauacagacaugaacaaugca

SEQ ID NO: 755916 - RNA, 23 nt, Human
cagcugaugcugccuuagcuggc

SEQ ID NO: 755917 - RNA, 20 nt, Human
caggaucuuccacuuccaug

SEQ ID NO: 755918 - RNA, 21 nt, Human
cauaccagaaugaaaaaaaga

SEQ ID NO: 755919 - RNA, 22 nt, Human
cauauucuccagaagauucuga

SEQ ID NO: 755920 - RNA, 25 nt, Human
cauggaaucuaucuuacacucuuaa

SEQ ID NO: 755921 - RNA, 20 nt, Human
ccaaaaaaacccaauacaaa

SEQ ID NO: 755922 - RNA, 22 nt, Human
ccaaaaaaacccaauacaaagc

SEQ ID NO: 755923 - RNA, 18 nt, Human
ccauucccacaaaagaug

SEQ ID NO: 755924 - RNA, 20 nt, Human
cccaccaaagcagcugaaau

SEQ ID NO: 755925 - RNA, 25 nt, Human
ccccaccaaagcagcugaaaugcuu

SEQ ID NO: 755926 - RNA, 19 nt, Human
ccccaccuuuuuuuucagc

SEQ ID NO: 755927 - RNA, 21 nt, Human
cccgcacagcugaugcugccu

SEQ ID NO: 755928 - RNA, 22 nt, Human
cccugccccccaccuuuuuuuu

SEQ ID NO: 755929 - RNA, 19 nt, Human
ccuaaguaggaagcggaau

SEQ ID NO: 755930 - RNA, 21 nt, Human
ccuccucaccaaaaaaaccca

SEQ ID NO: 755931 - RNA, 19 nt, Human
ccuuccuuucccauuccca

SEQ ID NO: 755932 - RNA, 18 nt, Human
cuuguggauaucuacugg

SEQ ID NO: 755933 - RNA, 24 nt, Human
cuuuuaucuucccuucccugcccc

SEQ ID NO: 755934 - RNA, 23 nt, Human
gaaaucacuuccaggaucugcuc

SEQ ID NO: 755935 - RNA, 20 nt, Human
gaagggguuaucuguguccc

SEQ ID NO: 755936 - RNA, 19 nt, Human
gccaaccucaaguacacag

SEQ ID NO: 755937 - RNA, 19 nt, Human
gcugucuccuuccuuuccc

SEQ ID NO: 755938 - RNA, 18 nt, Human
ggcagaacaggcuugcag

SEQ ID NO: 755939 - RNA, 18 nt, Human
ggcuuuauauaauagaau

SEQ ID NO: 755940 - RNA, 22 nt, Human
gggagguuuaaaaaaaaaaaaa

SEQ ID NO: 755941 - RNA, 21 nt, Human
gggcuuuauauaauagaauuu

SEQ ID NO: 755942 - RNA, 24 nt, Human
ggggagguuuaaaaaaaaaaaaaa

SEQ ID NO: 755943 - RNA, 22 nt, Human
guaaagccugucucuucaaauc

SEQ ID NO: 755944 - RNA, 21 nt, Human
guaaaugggcaacuaccuucu

SEQ ID NO: 755945 - RNA, 22 nt, Human
gucaacuuuuuggugacauuuu

SEQ ID NO: 755946 - RNA, 19 nt, Human
uaaaaaaaaaauccugagc

SEQ ID NO: 755947 - RNA, 21 nt, Human
uaaaauaaguucaagagcaca

SEQ ID NO: 755948 - RNA, 20 nt, Human
uaaauacaaccuccucacca

SEQ ID NO: 755949 - RNA, 22 nt, Human
uaaauacaaccuccucaccaaa

SEQ ID NO: 755950 - RNA, 24 nt, Human
uaaauccacuuuuuaaaaaaauuu

SEQ ID NO: 755951 - RNA, 23 nt, Human
uaaaucccgcacagcugaugcug

SEQ ID NO: 755952 - RNA, 21 nt, Human
uaacuuucagauuucuuccuu

SEQ ID NO: 755953 - RNA, 22 nt, Human
uaagaugaugcuugucuucucc

SEQ ID NO: 755954 - RNA, 20 nt, Human
uaagugaaaaauccuccucc

SEQ ID NO: 755955 - RNA, 21 nt, Human
uaccacauagcaaaauaagau

SEQ ID NO: 755956 - RNA, 22 nt, Human
uaccacauagcaaaauaagaug

SEQ ID NO: 755957 - RNA, 21 nt, Human
uagaaaggguuagucuguggu

SEQ ID NO: 755958 - RNA, 22 nt, Human
uagaagaugacaaacaugagga

SEQ ID NO: 755959 - RNA, 25 nt, Human
uaucaacccucaccuaggcuuuggg

SEQ ID NO: 755960 - RNA, 23 nt, Human
uauccaaagccaaccucaaguac

SEQ ID NO: 755961 - RNA, 18 nt, Human
uaucuacugggaaucuau

SEQ ID NO: 755962 - RNA, 25 nt, Human
uauguucuuuggacuuaauuuuggu

SEQ ID NO: 755963 - RNA, 21 nt, Human
uauuaucaaggacuggguugu

SEQ ID NO: 755964 - RNA, 18 nt, Human
ucagcugagcuauaggcu

SEQ ID NO: 755965 - RNA, 18 nt, Human
uccagguaagaaaugaca

SEQ ID NO: 755966 - RNA, 23 nt, Human
uccccaucugaacaaaaaguaac

SEQ ID NO: 755967 - RNA, 18 nt, Human
ucuuguccuuucccccaa

SEQ ID NO: 755968 - RNA, 23 nt, Human
ugccuaaguaggaagcggaauug

SEQ ID NO: 755969 - RNA, 21 nt, Human
ugcgacgugaccaacuuaaaa

SEQ ID NO: 755970 - RNA, 21 nt, Human
ugcucguagaaaaggcaaccc

SEQ ID NO: 755971 - RNA, 21 nt, Human
uggcagaacaggcuugcagaa

SEQ ID NO: 755972 - RNA, 18 nt, Human
uggggagaaaacaauaag

SEQ ID NO: 755973 - RNA, 21 nt, Human
ugguauuaucaaggacugggu

SEQ ID NO: 755974 - RNA, 23 nt, Human
uggucacuuagaaacagaagccc

SEQ ID NO: 755975 - RNA, 24 nt, Human
uuaaaccuauauaacaaaagugaa

SEQ ID NO: 755976 - RNA, 21 nt, Human
uuacugagaauagaaguguag

SEQ ID NO: 755977 - RNA, 20 nt, Human
uuagaaacagaagcccugcu

SEQ ID NO: 755978 - RNA, 18 nt, Human
uuaucuguguccccacca

SEQ ID NO: 755979 - RNA, 23 nt, Human
uucagauuucuuccuuuuacaau

SEQ ID NO: 755980 - RNA, 24 nt, Human
uucagauuucuuccuuuuacaauu

SEQ ID NO: 755981 - RNA, 24 nt, Human
uucaggaaaagggugggggagguu

SEQ ID NO: 755982 - RNA, 18 nt, Human
uucccuaggcuuuuuuaa

SEQ ID NO: 755983 - RNA, 22 nt, Human
uuccuaauagguuugguacuua

SEQ ID NO: 755984 - RNA, 25 nt, Human
uuggggcuuuauauaauagaauuua

SEQ ID NO: 755985 - RNA, 23 nt, Human
uuuaaaaaaaaaaaaaaggaaaa

SEQ ID NO: 755986 - RNA, 25 nt, Human
uuuaaaaaaaaaaaaaaggaaaaau

SEQ ID NO: 755987 - RNA, 22 nt, Human
uuuacaauuaaguugugauauc

SEQ ID NO: 755988 - RNA, 24 nt, Human
uuuuuuuucagcugagcuauaggc

SEQ ID NO: 755989 - RNA, 19 nt, Human
aaagugcugggauuacagg

SEQ ID NO: 755990 - RNA, 23 nt, Human
aaagugcugggauuacaggcaua

SEQ ID NO: 755991 - RNA, 24 nt, Human
aaagugcugggauuacaggcguga

SEQ ID NO: 755992 - RNA, 21 nt, Human
aacccgcgguuacgccagcgg

SEQ ID NO: 755993 - RNA, 24 nt, Human
aagcauagccuggcccugaagugc

SEQ ID NO: 755994 - RNA, 19 nt, Human
aagugcugggauuacaggc

SEQ ID NO: 755995 - RNA, 19 nt, Human
aagugcugggauuacaggc

SEQ ID NO: 755996 - RNA, 19 nt, Human
aagugcugggauuacaggc

SEQ ID NO: 755997 - RNA, 21 nt, Human
aagugcugggauuacaggcau

SEQ ID NO: 755998 - RNA, 26 nt, Human
aagugcugggauuacaggcauaagcc

SEQ ID NO: 755999 - RNA, 26 nt, Human
aagugcugggauuacaggcgugagcc

SEQ ID NO: 756000 - RNA, 24 nt, Human
acaaacaagggcagaacuagggua

SEQ ID NO: 756001 - RNA, 23 nt, Human
acacacacacauacauacauaca

SEQ ID NO: 756002 - RNA, 24 nt, Human
acacacauacauacauacauauaa

SEQ ID NO: 756003 - RNA, 21 nt, Human
acacauacacacauauguaua

SEQ ID NO: 756004 - RNA, 19 nt, Human
acacauuuccaggguagac

SEQ ID NO: 756005 - RNA, 23 nt, Human
acaggcccacaccaccgugcccg

SEQ ID NO: 756006 - RNA, 25 nt, Human
acauacauacauacauauaaauaca

SEQ ID NO: 756007 - RNA, 33 nt, Human
acauauaaauacacauacacacauauguauagu

SEQ ID NO: 756008 - RNA, 22 nt, Human
accauguuggucaggcuggccu

SEQ ID NO: 756009 - RNA, 24 nt, Human
accauguuggucaggcuggccucg

SEQ ID NO: 756010 - RNA, 19 nt, Human
acccaggcuggagugcagu

SEQ ID NO: 756011 - RNA, 22 nt, Human
accccuccacccuccuuugccu

SEQ ID NO: 756012 - RNA, 25 nt, Human
acccgccucggccuuccaaagugcu

SEQ ID NO: 756013 - RNA, 22 nt, Human
accuccgccucucggguucaag

SEQ ID NO: 756014 - RNA, 20 nt, Human
acgagguuucgccaugcugg

SEQ ID NO: 756015 - RNA, 24 nt, Human
acgagguuucgccaugcuggccag

SEQ ID NO: 756016 - RNA, 18 nt, Human
acucugucacccaggcug

SEQ ID NO: 756017 - RNA, 25 nt, Human
acucugucacccaggcuggagugca

SEQ ID NO: 756018 - RNA, 22 nt, Human
agacagaagguaaaaaacaaag

SEQ ID NO: 756019 - RNA, 22 nt, Human
agagggaagggagagggaggcc

SEQ ID NO: 756020 - RNA, 19 nt, Human
agagggaggccuaaggauu

SEQ ID NO: 756021 - RNA, 23 nt, Human
aggaggcagaccacggaagcaag

SEQ ID NO: 756022 - RNA, 18 nt, Human
aggcauaagccaccaagc

SEQ ID NO: 756023 - RNA, 21 nt, Human
aggcauaagccaccaagcccg

SEQ ID NO: 756024 - RNA, 23 nt, Human
aggcgugagccuccgugcccggc

SEQ ID NO: 756025 - RNA, 25 nt, Human
aggcuggagugcagugacaugaucu

SEQ ID NO: 756026 - RNA, 20 nt, Human
aggcugugggggaggccaug

SEQ ID NO: 756027 - RNA, 21 nt, Human
agggagaauuuuuuuucuuuu

SEQ ID NO: 756028 - RNA, 20 nt, Human
agggagagggaggccuaagg

SEQ ID NO: 756029 - RNA, 18 nt, Human
aggugacccacccgccuc

SEQ ID NO: 756030 - RNA, 22 nt, Human
aguagagacgagguuucgccau

SEQ ID NO: 756031 - RNA, 18 nt, Human
aguagcugcgauuacagg

SEQ ID NO: 756032 - RNA, 24 nt, Human
agugcagugacaugaucucggcuc

SEQ ID NO: 756033 - RNA, 21 nt, Human
agugcaguggcgcaaugucag

SEQ ID NO: 756034 - RNA, 18 nt, Human
agugcugggauuacaggc

SEQ ID NO: 756035 - RNA, 21 nt, Human
auacacacauauguauaugua

SEQ ID NO: 756036 - RNA, 25 nt, Human
auacauacauacauauaaauacaca

SEQ ID NO: 756037 - RNA, 23 nt, Human
auauacauauauauauauauaua

SEQ ID NO: 756038 - RNA, 20 nt, Human
auauauauauacacauauac

SEQ ID NO: 756039 - RNA, 20 nt, Human
aucggugggcccucagaccu

SEQ ID NO: 756040 - RNA, 24 nt, Human
augacuggccacagacacaccccc

SEQ ID NO: 756041 - RNA, 21 nt, Human
augguguuucaccauguuggu

SEQ ID NO: 756042 - RNA, 24 nt, Human
augguguuucaccauguuggucag

SEQ ID NO: 756043 - RNA, 21 nt, Human
auuccccugccucagccuccc

SEQ ID NO: 756044 - RNA, 24 nt, Human
auuuuuguauuuuuaguagagacg

SEQ ID NO: 756045 - RNA, 24 nt, Human
caaagugcugggauuacaggcaua

SEQ ID NO: 756046 - RNA, 24 nt, Human
caaagugcugggauuacaggcgug

SEQ ID NO: 756047 - RNA, 21 nt, Human
caaauccucaucaaagaguuc

SEQ ID NO: 756048 - RNA, 20 nt, Human
caagugauucuccugccuca

SEQ ID NO: 756049 - RNA, 22 nt, Human
caagugauucuccugccucagc

SEQ ID NO: 756050 - RNA, 23 nt, Human
caauaacaaaaggcuuaacauuu

SEQ ID NO: 756051 - RNA, 22 nt, Human
caaugacuggccacagacacac

SEQ ID NO: 756052 - RNA, 24 nt, Human
caauuuuuguauuuuuaguagaga

SEQ ID NO: 756053 - RNA, 22 nt, Human
cacacauacauacauacauaua

SEQ ID NO: 756054 - RNA, 18 nt, Human
cacaccaccgugcccggc

SEQ ID NO: 756055 - RNA, 22 nt, Human
cacagguggacacugaaggcca

SEQ ID NO: 756056 - RNA, 24 nt, Human
caccauguuggucaggcuggccuc

SEQ ID NO: 756057 - RNA, 20 nt, Human
caccccuccacccuccuuug

SEQ ID NO: 756058 - RNA, 23 nt, Human
cacccgccucggccuuccaaagu

SEQ ID NO: 756059 - RNA, 20 nt, Human
cacccuagacaccuuggcca

SEQ ID NO: 756060 - RNA, 23 nt, Human
cacgauaaccucugccucccggg

SEQ ID NO: 756061 - RNA, 23 nt, Human
cacucugucacccaggcuggagu

SEQ ID NO: 756062 - RNA, 24 nt, Human
cacucugucacccaggcuggagug

SEQ ID NO: 756063 - RNA, 18 nt, Human
cacucugucuuccgcgcu

SEQ ID NO: 756064 - RNA, 24 nt, Human
cacucugucuuccgcgcuggagug

SEQ ID NO: 756065 - RNA, 23 nt, Human
cacugcaaccuccgccucucggg

SEQ ID NO: 756066 - RNA, 21 nt, Human
cagcacacaugcuacaaccuu

SEQ ID NO: 756067 - RNA, 22 nt, Human
cagcuuccccgccauuuuccaa

SEQ ID NO: 756068 - RNA, 18 nt, Human
cagcuuccugaguagcug

SEQ ID NO: 756069 - RNA, 18 nt, Human
cagcuucuggcgccucca

SEQ ID NO: 756070 - RNA, 21 nt, Human
caggcgcccgccaccacaccc

SEQ ID NO: 756071 - RNA, 24 nt, Human
caguagcugggacuacaggcgccc

SEQ ID NO: 756072 - RNA, 24 nt, Human
caguuggggagugaggguagugug

SEQ ID NO: 756073 - RNA, 24 nt, Human
cauacauacauacauauaaauaca

SEQ ID NO: 756074 - RNA, 20 nt, Human
cauauacauauauauauaua

SEQ ID NO: 756075 - RNA, 18 nt, Human
cauauauauauauauaca

SEQ ID NO: 756076 - RNA, 24 nt, Human
caugcuggccaggcuggucucaaa

SEQ ID NO: 756077 - RNA, 20 nt, Human
ccaaagugcugggauuacag

SEQ ID NO: 756078 - RNA, 22 nt, Human
ccaaagugcugggauuacaggc

SEQ ID NO: 756079 - RNA, 22 nt, Human
ccaaagugcugggauuacaggc

SEQ ID NO: 756080 - RNA, 22 nt, Human
ccaaagugcugggauuacaggc

SEQ ID NO: 756081 - RNA, 24 nt, Human
ccaaagugcugggauuacaggcau

SEQ ID NO: 756082 - RNA, 24 nt, Human
ccaaagugcugggauuacaggcgu

SEQ ID NO: 756083 - RNA, 18 nt, Human
ccaccuucucauuaaugu

SEQ ID NO: 756084 - RNA, 21 nt, Human
ccagcacacaugcuacaaccu

SEQ ID NO: 756085 - RNA, 19 nt, Human
ccaugcuggccaggcuggu

SEQ ID NO: 756086 - RNA, 22 nt, Human
ccaugcuggccaggcuggucuc

SEQ ID NO: 756087 - RNA, 24 nt, Human
cccaagcauagccuggcccugaag

SEQ ID NO: 756088 - RNA, 21 nt, Human
cccacacacauuuccagggua

SEQ ID NO: 756089 - RNA, 23 nt, Human
cccaguagcugggacuacaggcg

SEQ ID NO: 756090 - RNA, 22 nt, Human
ccccuccacccuccuuugccug

SEQ ID NO: 756091 - RNA, 18 nt, Human
cccgccaccacacccgga

SEQ ID NO: 756092 - RNA, 20 nt, Human
cccggguucaagcaauuccc

SEQ ID NO: 756093 - RNA, 23 nt, Human
cccggguucaagcaauuccccug

SEQ ID NO: 756094 - RNA, 19 nt, Human
cccuagacaccuuggccag

SEQ ID NO: 756095 - RNA, 18 nt, Human
cccugccucagccucccc

SEQ ID NO: 756096 - RNA, 18 nt, Human
ccgccaccacacccggac

SEQ ID NO: 756097 - RNA, 21 nt, Human
ccgcgcuggagugcaguggcg

SEQ ID NO: 756098 - RNA, 22 nt, Human
ccucccggguucaagcaauucc

SEQ ID NO: 756099 - RNA, 18 nt, Human
ccucccuccuuucugccc

SEQ ID NO: 756100 - RNA, 21 nt, Human
ccucucggguucaagugauuc

SEQ ID NO: 756101 - RNA, 24 nt, Human
ccucucggguucaagugauucucc

SEQ ID NO: 756102 - RNA, 22 nt, Human
ccugaccucaggugacccaccc

SEQ ID NO: 756103 - RNA, 23 nt, Human
ccugaccucaggugacccacccg

SEQ ID NO: 756104 - RNA, 19 nt, Human
ccugaguagcugcgauuac

SEQ ID NO: 756105 - RNA, 23 nt, Human
ccugaguagcugcgauuacaggc

SEQ ID NO: 756106 - RNA, 19 nt, Human
ccugccucagccuccccag

SEQ ID NO: 756107 - RNA, 21 nt, Human
ccuggcccugaagugccaauu

SEQ ID NO: 756108 - RNA, 24 nt, Human
cgagguuucgccaugcuggccagg

SEQ ID NO: 756109 - RNA, 24 nt, Human
cgccaugcuggccaggcuggucuc

SEQ ID NO: 756110 - RNA, 27 nt, Human
cgccaugcuggccaggcuggucucaaa

SEQ ID NO: 756111 - RNA, 21 nt, Human
cggguucaagugauucuccug

SEQ ID NO: 756112 - RNA, 24 nt, Human
cucacgauaaccucugccucccgg

SEQ ID NO: 756113 - RNA, 25 nt, Human
cucacgauaaccucugccucccggg

SEQ ID NO: 756114 - RNA, 24 nt, Human
cucacucugucacccaggcuggag

SEQ ID NO: 756115 - RNA, 24 nt, Human
cucacugcaaccuccgccucucgg

SEQ ID NO: 756116 - RNA, 22 nt, Human
cucagcagcuucuggcgccucc

SEQ ID NO: 756117 - RNA, 24 nt, Human
cucagccuccccaguagcugggac

SEQ ID NO: 756118 - RNA, 19 nt, Human
cucagggcugagauucaac

SEQ ID NO: 756119 - RNA, 24 nt, Human
cuccuaaccucgugaucugcccgc

SEQ ID NO: 756120 - RNA, 23 nt, Human
cucggguucaagugauucuccuc

SEQ ID NO: 756121 - RNA, 20 nt, Human
cugaagugccaauuccagca

SEQ ID NO: 756122 - RNA, 19 nt, Human
cugauugccagcacacaug

SEQ ID NO: 756123 - RNA, 24 nt, Human
cugcaaccuccgccucucggguuc

SEQ ID NO: 756124 - RNA, 23 nt, Human
cugccucagccuccccaguagcu

SEQ ID NO: 756125 - RNA, 23 nt, Human
cugccucagcuuccugaguagcu

SEQ ID NO: 756126 - RNA, 24 nt, Human
cuggagugcagugacaugaucucg

SEQ ID NO: 756127 - RNA, 19 nt, Human
cuuacuuuuaggccuuuua

SEQ ID NO: 756128 - RNA, 22 nt, Human
cuucagccuccucagcagcuuc

SEQ ID NO: 756129 - RNA, 25 nt, Human
cuugcccucacuaccuucagccucc

SEQ ID NO: 756130 - RNA, 22 nt, Human
cuuuucagcacgcaugcgugca

SEQ ID NO: 756131 - RNA, 23 nt, Human
gaccacggaagcaaguuuggagg

SEQ ID NO: 756132 - RNA, 22 nt, Human
gacuggccacagacacaccccc

SEQ ID NO: 756133 - RNA, 24 nt, Human
gagaugguguuucaccauguuggu

SEQ ID NO: 756134 - RNA, 18 nt, Human
gauuacaggcauaagcca

SEQ ID NO: 756135 - RNA, 21 nt, Human
gauuacaggcauaagccacca

SEQ ID NO: 756136 - RNA, 19 nt, Human
gauuacaggcccacaccac

SEQ ID NO: 756137 - RNA, 21 nt, Human
gauuacaggcgugagccuccg

SEQ ID NO: 756138 - RNA, 24 nt, Human
gauuacaggcgugagccuccgugc

SEQ ID NO: 756139 - RNA, 21 nt, Human
gauucuccugccucagcuucc

SEQ ID NO: 756140 - RNA, 19 nt, Human
gcagccugcucgccuggcg

SEQ ID NO: 756141 - RNA, 21 nt, Human
gccaagggagaauuuuuuuuc

SEQ ID NO: 756142 - RNA, 20 nt, Human
gccacccuagacaccuuggc

SEQ ID NO: 756143 - RNA, 23 nt, Human
gccaccuucucauuaauguuagc

SEQ ID NO: 756144 - RNA, 19 nt, Human
gcccgccaccacacccgga

SEQ ID NO: 756145 - RNA, 18 nt, Human
gccucagcuuccugagua

SEQ ID NO: 756146 - RNA, 23 nt, Human
gccucggccucccaaagugcugg

SEQ ID NO: 756147 - RNA, 21 nt, Human
gcugcuugucuugugcagguu

SEQ ID NO: 756148 - RNA, 19 nt, Human
gcuggagugcagugacaug

SEQ ID NO: 756149 - RNA, 19 nt, Human
gcuggagugcaguggcgca

SEQ ID NO: 756150 - RNA, 23 nt, Human
gcuggccucgaacuccuaaccuc

SEQ ID NO: 756151 - RNA, 23 nt, Human
gcuggucucaaacuccugaccuc

SEQ ID NO: 756152 - RNA, 19 nt, Human
ggaggagaugagacagagg

SEQ ID NO: 756153 - RNA, 19 nt, Human
ggauuacaggcauaagcca

SEQ ID NO: 756154 - RNA, 18 nt, Human
ggcaggcgcagaacacac

SEQ ID NO: 756155 - RNA, 24 nt, Human
ggcuggucucaaacuccugaccuc

SEQ ID NO: 756156 - RNA, 20 nt, Human
gggcaaaggaauauccuugu

SEQ ID NO: 756157 - RNA, 22 nt, Human
ggguucaagugauucuccugcc

SEQ ID NO: 756158 - RNA, 23 nt, Human
ggguucaagugauucuccugccu

SEQ ID NO: 756159 - RNA, 22 nt, Human
gguguuucaccauguuggucag

SEQ ID NO: 756160 - RNA, 24 nt, Human
gguguuucaccauguuggucaggc

SEQ ID NO: 756161 - RNA, 19 nt, Human
gguucaagugauucuccug

SEQ ID NO: 756162 - RNA, 18 nt, Human
guagcugggacuacaggc

SEQ ID NO: 756163 - RNA, 19 nt, Human
guauauauauauauauaua

SEQ ID NO: 756164 - RNA, 18 nt, Human
guauauguauauauaguu

SEQ ID NO: 756165 - RNA, 24 nt, Human
gugacccacccgccucggccuucc

SEQ ID NO: 756166 - RNA, 24 nt, Human
gugaucugcccgccucggccuccc

SEQ ID NO: 756167 - RNA, 23 nt, Human
gugauucuccugccucagcuucc

SEQ ID NO: 756168 - RNA, 18 nt, Human
gugcagucaggugcugug

SEQ ID NO: 756169 - RNA, 19 nt, Human
guguauauauauauauaua

SEQ ID NO: 756170 - RNA, 21 nt, Human
guguauauauauauauauaaa

SEQ ID NO: 756171 - RNA, 23 nt, Human
uaaaaaacaaaggugguugcucc

SEQ ID NO: 756172 - RNA, 23 nt, Human
uaaaauacccucaggccaguccc

SEQ ID NO: 756173 - RNA, 19 nt, Human
uaacuccacaaacaagggc

SEQ ID NO: 756174 - RNA, 21 nt, Human
uaagaguccaucaaaguguca

SEQ ID NO: 756175 - RNA, 24 nt, Human
uaagccaccaagcccggccaaggg

SEQ ID NO: 756176 - RNA, 28 nt, Human
uacacacacacauacauacauacauaua

SEQ ID NO: 756177 - RNA, 22 nt, Human
uacacauacacacauauguaua

SEQ ID NO: 756178 - RNA, 20 nt, Human
uacacauauacauauauaua

SEQ ID NO: 756179 - RNA, 20 nt, Human
uacaggcauaagccaccaag

SEQ ID NO: 756180 - RNA, 23 nt, Human
uacaggcgcccgccaccacaccc

SEQ ID NO: 756181 - RNA, 22 nt, Human
uaccuucagccuccucagcagc

SEQ ID NO: 756182 - RNA, 22 nt, Human
uagacagaagguaaaaaacaaa

SEQ ID NO: 756183 - RNA, 22 nt, Human
uagagaugguguuucaccaugu

SEQ ID NO: 756184 - RNA, 19 nt, Human
uagccuggcccugaagugc

SEQ ID NO: 756185 - RNA, 20 nt, Human
uaggccgacaccccuccacc

SEQ ID NO: 756186 - RNA, 24 nt, Human
uaguagagacgagguuucgccaug

SEQ ID NO: 756187 - RNA, 24 nt, Human
uaguagagaugguguuucaccaug

SEQ ID NO: 756188 - RNA, 19 nt, Human
uagugugcacacacacagu

SEQ ID NO: 756189 - RNA, 20 nt, Human
uauacacauauauauauaua

SEQ ID NO: 756190 - RNA, 22 nt, Human
uauacacauauauauauauaua

SEQ ID NO: 756191 - RNA, 24 nt, Human
uauacacauauauauauauauaca

SEQ ID NO: 756192 - RNA, 22 nt, Human
uauacacuacaguugacaaaag

SEQ ID NO: 756193 - RNA, 19 nt, Human
uauacauauauauauauau

SEQ ID NO: 756194 - RNA, 22 nt, Human
uauacauauauauauauauaua

SEQ ID NO: 756195 - RNA, 24 nt, Human
uauacauauauauauauauauaca

SEQ ID NO: 756196 - RNA, 24 nt, Human
uauauacacacacacauacauaca

SEQ ID NO: 756197 - RNA, 26 nt, Human
uauauacacacacacauacauacaua

SEQ ID NO: 756198 - RNA, 22 nt, Human
uauauacacauauacauauaua

SEQ ID NO: 756199 - RNA, 24 nt, Human
uauauacacauauacauauauaua

SEQ ID NO: 756200 - RNA, 24 nt, Human
uauauacacauauauauauauaua

SEQ ID NO: 756201 - RNA, 19 nt, Human
uauauauacacauauacau

SEQ ID NO: 756202 - RNA, 23 nt, Human
uauauauacacauauauauauau

SEQ ID NO: 756203 - RNA, 24 nt, Human
uauauauacacauauauauauaua

SEQ ID NO: 756204 - RNA, 27 nt, Human
uauauauacacauauauauauauauua

SEQ ID NO: 756205 - RNA, 20 nt, Human
uauauauauacacauauaca

SEQ ID NO: 756206 - RNA, 22 nt, Human
uauauauauacacauauauaua

SEQ ID NO: 756207 - RNA, 24 nt, Human
uauauauauacacauauauauaua

SEQ ID NO: 756208 - RNA, 27 nt, Human
uauauauauauacacauauacauagug

SEQ ID NO: 756209 - RNA, 24 nt, Human
uauauauauauacacauauauaua

SEQ ID NO: 756210 - RNA, 21 nt, Human
uauauauauauacacauaugc

SEQ ID NO: 756211 - RNA, 24 nt, Human
uauauauauauauacacauauaua

SEQ ID NO: 756212 - RNA, 18 nt, Human
uauguauauguauauaua

SEQ ID NO: 756213 - RNA, 18 nt, Human
uauguauauguauauaua

SEQ ID NO: 756214 - RNA, 20 nt, Human
uauguauauguauauauagu

SEQ ID NO: 756215 - RNA, 19 nt, Human
ucaagugauucuccugccu

SEQ ID NO: 756216 - RNA, 24 nt, Human
ucaauaacaaaaggcuuaacauuu

SEQ ID NO: 756217 - RNA, 24 nt, Human
ucacccaggcuggagugcagugac

SEQ ID NO: 756218 - RNA, 24 nt, Human
ucacgauaaccucugccucccggg

SEQ ID NO: 756219 - RNA, 25 nt, Human
ucacgauaaccucugccucccgggu

SEQ ID NO: 756220 - RNA, 24 nt, Human
ucacucugucacccaggcuggagu

SEQ ID NO: 756221 - RNA, 23 nt, Human
ucacugcaaccuccgccucucgg

SEQ ID NO: 756222 - RNA, 24 nt, Human
ucacugcaaccuccgccucucggg

SEQ ID NO: 756223 - RNA, 25 nt, Human
ucacugcaaccuccgccucucgggu

SEQ ID NO: 756224 - RNA, 27 nt, Human
ucacugcaaccuccgccucucggguuc

SEQ ID NO: 756225 - RNA, 21 nt, Human
ucagcagcuucuggcgccucc

SEQ ID NO: 756226 - RNA, 18 nt, Human
ucagccuccccaguagcu

SEQ ID NO: 756227 - RNA, 20 nt, Human
ucagccuccccaguagcugg

SEQ ID NO: 756228 - RNA, 20 nt, Human
ucagccuccucagcagcuuc

SEQ ID NO: 756229 - RNA, 23 nt, Human
ucagccuccucagcagcuucugg

SEQ ID NO: 756230 - RNA, 23 nt, Human
uccaaagugcugggauuacaggc

SEQ ID NO: 756231 - RNA, 24 nt, Human
uccaaagugcugggauuacaggca

SEQ ID NO: 756232 - RNA, 28 nt, Human
uccacaaacaagggcagaaccggggucc

SEQ ID NO: 756233 - RNA, 24 nt, Human
ucccaaagugcugggauuacaggc

SEQ ID NO: 756234 - RNA, 22 nt, Human
uccccaguagcugggacuacag

SEQ ID NO: 756235 - RNA, 24 nt, Human
uccccaguagcugggacuacaggc

SEQ ID NO: 756236 - RNA, 25 nt, Human
uccccugccucagccuccccaguag

SEQ ID NO: 756237 - RNA, 19 nt, Human
ucccggguucaagcaauuc

SEQ ID NO: 756238 - RNA, 24 nt, Human
ucccggguucaagcaauuccccug

SEQ ID NO: 756239 - RNA, 20 nt, Human
uccgcgcuggagugcagugg

SEQ ID NO: 756240 - RNA, 21 nt, Human
uccgcgcuggagugcaguggc

SEQ ID NO: 756241 - RNA, 24 nt, Human
uccugaguagcugcgauuacaggc

SEQ ID NO: 756242 - RNA, 18 nt, Human
ucggccucccaaagugcu

SEQ ID NO: 756243 - RNA, 23 nt, Human
ucucacucugucacccaggcugg

SEQ ID NO: 756244 - RNA, 24 nt, Human
ucucacucugucacccaggcugga

SEQ ID NO: 756245 - RNA, 26 nt, Human
ucucacucugucacccaggcuggagu

SEQ ID NO: 756246 - RNA, 27 nt, Human
ucucacucugucacccaggcuggagug

SEQ ID NO: 756247 - RNA, 21 nt, Human
ucucggguucaagugauucuc

SEQ ID NO: 756248 - RNA, 24 nt, Human
ucucggguucaagugauucuccug

SEQ ID NO: 756249 - RNA, 19 nt, Human
ucucuccugcuuuaggcug

SEQ ID NO: 756250 - RNA, 24 nt, Human
ucugccucccggguucaagcaauu

SEQ ID NO: 756251 - RNA, 24 nt, Human
ucugucacccaggcuggagugcag

SEQ ID NO: 756252 - RNA, 24 nt, Human
ugaccucaggugacccacccgccu

SEQ ID NO: 756253 - RNA, 25 nt, Human
ugaccucaggugacccacccgccuc

SEQ ID NO: 756254 - RNA, 20 nt, Human
ugacuggccacagacacacc

SEQ ID NO: 756255 - RNA, 25 nt, Human
ugacugggcagggaaagcagccugc

SEQ ID NO: 756256 - RNA, 21 nt, Human
ugagaacauccccaccgcccc

SEQ ID NO: 756257 - RNA, 22 nt, Human
ugagacggagucucacucuguc

SEQ ID NO: 756258 - RNA, 21 nt, Human
ugaugacugguuaaaaaagaa

SEQ ID NO: 756259 - RNA, 24 nt, Human
ugauuaguguguguauauauauau

SEQ ID NO: 756260 - RNA, 20 nt, Human
ugauucuccugccucagcuu

SEQ ID NO: 756261 - RNA, 19 nt, Human
ugcagucaggugcuguguc

SEQ ID NO: 756262 - RNA, 22 nt, Human
ugcagugacaugaucucggcuc

SEQ ID NO: 756263 - RNA, 21 nt, Human
ugccucagccuccccaguagc

SEQ ID NO: 756264 - RNA, 24 nt, Human
ugccucagccuccccaguagcugg

SEQ ID NO: 756265 - RNA, 24 nt, Human
ugccucagcuuccugaguagcugc

SEQ ID NO: 756266 - RNA, 23 nt, Human
ugcgauuacaggcccacaccacc

SEQ ID NO: 756267 - RNA, 24 nt, Human
ugcgauuacaggcccacaccaccg

SEQ ID NO: 756268 - RNA, 21 nt, Human
ugcuggauuucagccacugug

SEQ ID NO: 756269 - RNA, 18 nt, Human
ugcuggccaggcuggucu

SEQ ID NO: 756270 - RNA, 24 nt, Human
ugcugggauuacaggcauaagcca

SEQ ID NO: 756271 - RNA, 20 nt, Human
ugcugggauuacaggcguga

SEQ ID NO: 756272 - RNA, 21 nt, Human
uggagaaaagaggcugugggg

SEQ ID NO: 756273 - RNA, 19 nt, Human
uggagugcagugacaugau

SEQ ID NO: 756274 - RNA, 24 nt, Human
uggagugcagugacaugaucucgg

SEQ ID NO: 756275 - RNA, 19 nt, Human
uggagugcaguggcgcaau

SEQ ID NO: 756276 - RNA, 24 nt, Human
uggccaggcuggucucaaacuccu

SEQ ID NO: 756277 - RNA, 20 nt, Human
uggccucgaacuccuaaccu

SEQ ID NO: 756278 - RNA, 19 nt, Human
uggcgcaaugucagcucac

SEQ ID NO: 756279 - RNA, 21 nt, Human
ugggacuacaggcgcccgcca

SEQ ID NO: 756280 - RNA, 22 nt, Human
ugggacuacaggcgcccgccac

SEQ ID NO: 756281 - RNA, 24 nt, Human
ugggacuacaggcgcccgccacca

SEQ ID NO: 756282 - RNA, 18 nt, Human
ugggauuacaggcauaag

SEQ ID NO: 756283 - RNA, 22 nt, Human
ugggauuacaggcauaagccac

SEQ ID NO: 756284 - RNA, 24 nt, Human
ugggauuacaggcauaagccacca

SEQ ID NO: 756285 - RNA, 18 nt, Human
ugggauuacaggcgugag

SEQ ID NO: 756286 - RNA, 19 nt, Human
ugggauuacaggcgugagc

SEQ ID NO: 756287 - RNA, 20 nt, Human
ugggauuacaggcgugagcc

SEQ ID NO: 756288 - RNA, 23 nt, Human
ugggauuacaggcgugagccucc

SEQ ID NO: 756289 - RNA, 23 nt, Human
ugggauuacaggcgugagccucc

SEQ ID NO: 756290 - RNA, 24 nt, Human
ugggauuacaggcgugagccuccg

SEQ ID NO: 756291 - RNA, 24 nt, Human
uggucaggcuggccucgaacuccu

SEQ ID NO: 756292 - RNA, 24 nt, Human
ugguguuucaccauguuggucagg

SEQ ID NO: 756293 - RNA, 18 nt, Human
uguauauauauauauaua

SEQ ID NO: 756294 - RNA, 22 nt, Human
uguauauauauauauauauaca

SEQ ID NO: 756295 - RNA, 22 nt, Human
ugugcacacacacaaaacccua

SEQ ID NO: 756296 - RNA, 18 nt, Human
uguguauauauauauaua

SEQ ID NO: 756297 - RNA, 20 nt, Human
uguguauauauauauauaua

SEQ ID NO: 756298 - RNA, 22 nt, Human
uguguauauauauauauauaua

SEQ ID NO: 756299 - RNA, 22 nt, Human
uguguguauauauauauauaua

SEQ ID NO: 756300 - RNA, 24 nt, Human
uguguguauauauauauauauaac

SEQ ID NO: 756301 - RNA, 24 nt, Human
uuaggcugcuugucuugugcaggu

SEQ ID NO: 756302 - RNA, 24 nt, Human
uuaguagagacgagguuucgccau

SEQ ID NO: 756303 - RNA, 18 nt, Human
uuaguagagaugguguuu

SEQ ID NO: 756304 - RNA, 24 nt, Human
uuaguagagaugguguuucaccau

SEQ ID NO: 756305 - RNA, 19 nt, Human
uucaacuaggaggcagacc

SEQ ID NO: 756306 - RNA, 21 nt, Human
uucaagcaauuccccugccuc

SEQ ID NO: 756307 - RNA, 24 nt, Human
uucaagcaauuccccugccucagc

SEQ ID NO: 756308 - RNA, 21 nt, Human
uucaagugauucuccugccuc

SEQ ID NO: 756309 - RNA, 23 nt, Human
uucaagugauucuccugccucag

SEQ ID NO: 756310 - RNA, 24 nt, Human
uucaagugauucuccugccucagc

SEQ ID NO: 756311 - RNA, 21 nt, Human
uuccagcacccccgugggcca

SEQ ID NO: 756312 - RNA, 19 nt, Human
uuccccugccucagccucc

SEQ ID NO: 756313 - RNA, 23 nt, Human
uuuaaaauacccucaggccaguc

SEQ ID NO: 756314 - RNA, 21 nt, Human
uuucaccauguuggucaggcu

SEQ ID NO: 756315 - RNA, 21 nt, Human
uuucgccaugcuggccaggcu

SEQ ID NO: 756316 - RNA, 22 nt, Human
uuuuuaguagagacgagguuuc

SEQ ID NO: 756317 - RNA, 24 nt, Human
uuuuuaguagagaugguguuucac

SEQ ID NO: 756318 - RNA, 20 nt, Human
uuuuuguauuuuuaguagag

SEQ ID NO: 756319 - RNA, 18 nt, Human
uuuuuuaguagagauggu

SEQ ID NO: 756320 - RNA, 25 nt, Human
aaacaaagauagacaaaccccagga

SEQ ID NO: 756321 - RNA, 23 nt, Human
aaacaacaacaaaaaaacagcga

SEQ ID NO: 756322 - RNA, 18 nt, Human
aaacuccugccucagcca

SEQ ID NO: 756323 - RNA, 21 nt, Human
aacaacaaaaaaacagcgaga

SEQ ID NO: 756324 - RNA, 21 nt, Human
aacccacuccuaagaagcaga

SEQ ID NO: 756325 - RNA, 19 nt, Human
aagcaaauuaucuccucca

SEQ ID NO: 756326 - RNA, 20 nt, Human
aagcaauccucccaccacag

SEQ ID NO: 756327 - RNA, 25 nt, Human
aagcaauccucccaccacagccucc

SEQ ID NO: 756328 - RNA, 22 nt, Human
aagcaggcgaaaggggccccga

SEQ ID NO: 756329 - RNA, 19 nt, Human
aagcgaacgcccggggcau

SEQ ID NO: 756330 - RNA, 20 nt, Human
aaggggccccgaaggccugc

SEQ ID NO: 756331 - RNA, 18 nt, Human
acaacaaaaaaacagcga

SEQ ID NO: 756332 - RNA, 21 nt, Human
accacagccucccgaguagcu

SEQ ID NO: 756333 - RNA, 23 nt, Human
acccccaagggacaagggcagca

SEQ ID NO: 756334 - RNA, 18 nt, Human
acugcagccucaaccucc

SEQ ID NO: 756335 - RNA, 18 nt, Human
agaagugacaaucucaaa

SEQ ID NO: 756336 - RNA, 25 nt, Human
agcaauccucccaccacagccuccc

SEQ ID NO: 756337 - RNA, 23 nt, Human
agccacaaaucuagaaaacaacu

SEQ ID NO: 756338 - RNA, 22 nt, Human
agcugacugcagccucaaccuc

SEQ ID NO: 756339 - RNA, 19 nt, Human
aggaggugcaggggugcuu

SEQ ID NO: 756340 - RNA, 19 nt, Human
aggcaaaaaauacagcgua

SEQ ID NO: 756341 - RNA, 23 nt, Human
aggcagggacauuaggcaaaaaa

SEQ ID NO: 756342 - RNA, 22 nt, Human
aggccgugagugaccgggcugu

SEQ ID NO: 756343 - RNA, 18 nt, Human
aggcgaaaggggccccga

SEQ ID NO: 756344 - RNA, 24 nt, Human
aggcggcgugcgcggcccgguccg

SEQ ID NO: 756345 - RNA, 25 nt, Human
aggcuggagugcaguggugcaaucu

SEQ ID NO: 756346 - RNA, 21 nt, Human
agggacaagggcagcaggggc

SEQ ID NO: 756347 - RNA, 23 nt, Human
aguagcugggaccacaggugcgc

SEQ ID NO: 756348 - RNA, 18 nt, Human
agugcaguggugcaaucu

SEQ ID NO: 756349 - RNA, 24 nt, Human
agugcaguggugcaaucugagcug

SEQ ID NO: 756350 - RNA, 22 nt, Human
auuaucuccuccaucccucccu

SEQ ID NO: 756351 - RNA, 24 nt, Human
caaccgccccccucccccaccaag

SEQ ID NO: 756352 - RNA, 25 nt, Human
caaccuccuggacucaagcaauccu

SEQ ID NO: 756353 - RNA, 20 nt, Human
caagcaauccucccaccaca

SEQ ID NO: 756354 - RNA, 23 nt, Human
caagcgaacgcccggggcaugcc

SEQ ID NO: 756355 - RNA, 24 nt, Human
cacagcaagcgaacgcccggggca

SEQ ID NO: 756356 - RNA, 22 nt, Human
cacaggcacuggcaccagacca

SEQ ID NO: 756357 - RNA, 22 nt, Human
cacaggugcgcaccaccacacc

SEQ ID NO: 756358 - RNA, 24 nt, Human
caccacagccucccgaguagcugg

SEQ ID NO: 756359 - RNA, 21 nt, Human
caccagaccaucaaagcccag

SEQ ID NO: 756360 - RNA, 18 nt, Human
caccaggccucgucccug

SEQ ID NO: 756361 - RNA, 22 nt, Human
caccccccaaccuccccgaccc

SEQ ID NO: 756362 - RNA, 20 nt, Human
caccuggagaaggcgcuucc

SEQ ID NO: 756363 - RNA, 20 nt, Human
cagacccccgggcuuccccu

SEQ ID NO: 756364 - RNA, 22 nt, Human
cagaguaagacacagagauacc

SEQ ID NO: 756365 - RNA, 22 nt, Human
cagcagcguggguggguggagc

SEQ ID NO: 756366 - RNA, 19 nt, Human
cagcaggggcacccgcccg

SEQ ID NO: 756367 - RNA, 20 nt, Human
cagccucaaccuccuggacu

SEQ ID NO: 756368 - RNA, 23 nt, Human
cagccucaaccuccuggacucaa

SEQ ID NO: 756369 - RNA, 25 nt, Human
cagccucaaccuccuggacucaagc

SEQ ID NO: 756370 - RNA, 19 nt, Human
cagcggcgcgcucuccccc

SEQ ID NO: 756371 - RNA, 23 nt, Human
caggagccggggugaggcgagag

SEQ ID NO: 756372 - RNA, 24 nt, Human
cagggcaaccgccccccuccccca

SEQ ID NO: 756373 - RNA, 21 nt, Human
caggggcggccaccagagagc

SEQ ID NO: 756374 - RNA, 24 nt, Human
cagggucucgcucuguugcccagg

SEQ ID NO: 756375 - RNA, 24 nt, Human
caggugacagcagcgugggugggu

SEQ ID NO: 756376 - RNA, 27 nt, Human
cauaauauuuuaaaacaacaacaaaaa

SEQ ID NO: 756377 - RNA, 22 nt, Human
caucucggguggggaaaaacca

SEQ ID NO: 756378 - RNA, 23 nt, Human
ccaccacagccucccgaguagcu

SEQ ID NO: 756379 - RNA, 25 nt, Human
ccagcaacagugaugguuccugagg

SEQ ID NO: 756380 - RNA, 21 nt, Human
cccaaccuccccgaccccggc

SEQ ID NO: 756381 - RNA, 23 nt, Human
cccacuccuaagaagcagauucc

SEQ ID NO: 756382 - RNA, 20 nt, Human
cccaggagcccaccagggga

SEQ ID NO: 756383 - RNA, 19 nt, Human
cccaggcuggagugcagug

SEQ ID NO: 756384 - RNA, 30 nt, Human
ccccaaccuccccgaccccggcccucuccu

SEQ ID NO: 756385 - RNA, 21 nt, Human
ccccccaaccuccccgacccc

SEQ ID NO: 756386 - RNA, 23 nt, Human
ccccccaaccuccccgaccccgg

SEQ ID NO: 756387 - RNA, 18 nt, Human
ccccccccccgaggcuca

SEQ ID NO: 756388 - RNA, 19 nt, Human
cccccgagcccgccuggcc

SEQ ID NO: 756389 - RNA, 24 nt, Human
cccccgagcccgccuggcccugcu

SEQ ID NO: 756390 - RNA, 25 nt, Human
cccccgagcccgccuggcccugcuc

SEQ ID NO: 756391 - RNA, 19 nt, Human
cccccgggcuuccccuggc

SEQ ID NO: 756392 - RNA, 24 nt, Human
ccccgaaggccugccucggcccug

SEQ ID NO: 756393 - RNA, 19 nt, Human
ccccgagcccgccuggccc

SEQ ID NO: 756394 - RNA, 20 nt, Human
ccccgagcccgccuggcccu

SEQ ID NO: 756395 - RNA, 22 nt, Human
cccucggcgucgcacccccagg

SEQ ID NO: 756396 - RNA, 21 nt, Human
ccgccccccucccccaccaag

SEQ ID NO: 756397 - RNA, 22 nt, Human
ccgcucgggccgggccccgcuc

SEQ ID NO: 756398 - RNA, 19 nt, Human
ccgcuggcuccugucgccc

SEQ ID NO: 756399 - RNA, 25 nt, Human
ccgggagcagcggcgcgcucucccc

SEQ ID NO: 756400 - RNA, 19 nt, Human
ccgggcuuccccuggccag

SEQ ID NO: 756401 - RNA, 22 nt, Human
ccuccaucccucccuggggcag

SEQ ID NO: 756402 - RNA, 23 nt, Human
ccucccaccacagccucccgagu

SEQ ID NO: 756403 - RNA, 18 nt, Human
ccucucagagaauccugg

SEQ ID NO: 756404 - RNA, 24 nt, Human
ccugccucagccauuuuuuguuuu

SEQ ID NO: 756405 - RNA, 20 nt, Human
ccuggacucaagcaauccuc

SEQ ID NO: 756406 - RNA, 19 nt, Human
ccugggggccucccucauc

SEQ ID NO: 756407 - RNA, 22 nt, Human
cgagguuccuggguggagaugc

SEQ ID NO: 756408 - RNA, 23 nt, Human
cgagguuccuggguggagaugcu

SEQ ID NO: 756409 - RNA, 25 nt, Human
cgcgugcggcgucccgcuggcuccu

SEQ ID NO: 756410 - RNA, 24 nt, Human
cggcccccgagcccgccuggcccu

SEQ ID NO: 756411 - RNA, 22 nt, Human
cggcccgguccgggagcagcgg

SEQ ID NO: 756412 - RNA, 24 nt, Human
cucaacccacuccuaagaagcaga

SEQ ID NO: 756413 - RNA, 19 nt, Human
cucaagcaauccucccacc

SEQ ID NO: 756414 - RNA, 24 nt, Human
cucaagcaauccucccaccacagc

SEQ ID NO: 756415 - RNA, 27 nt, Human
cucacaaaggugguuuauguacagaag

SEQ ID NO: 756416 - RNA, 21 nt, Human
cuccagggcaaccgccccccu

SEQ ID NO: 756417 - RNA, 23 nt, Human
cuccccgaccccggcccucucca

SEQ ID NO: 756418 - RNA, 24 nt, Human
cucccgaguagcugggaccacagg

SEQ ID NO: 756419 - RNA, 21 nt, Human
cucgcucuguugcccaggcug

SEQ ID NO: 756420 - RNA, 24 nt, Human
cucgcucuguugcccaggcuggag

SEQ ID NO: 756421 - RNA, 18 nt, Human
cucggcgucgcaccccca

SEQ ID NO: 756422 - RNA, 23 nt, Human
cucgggccgggccccgcucgguu

SEQ ID NO: 756423 - RNA, 20 nt, Human
cucuguugcccaggcuggag

SEQ ID NO: 756424 - RNA, 22 nt, Human
cugcagccucaaccuccuggac

SEQ ID NO: 756425 - RNA, 20 nt, Human
gaagcaggcgaaaggggccc

SEQ ID NO: 756426 - RNA, 19 nt, Human
gacagcagcgugggugggu

SEQ ID NO: 756427 - RNA, 20 nt, Human
gacagcagcgugggugggug

SEQ ID NO: 756428 - RNA, 18 nt, Human
gacccccgggcuuccccu

SEQ ID NO: 756429 - RNA, 20 nt, Human
gagacagggucucgcucugu

SEQ ID NO: 756430 - RNA, 20 nt, Human
gagagaaacaaagauagaca

SEQ ID NO: 756431 - RNA, 20 nt, Human
gagcugggaagcuguccaca

SEQ ID NO: 756432 - RNA, 20 nt, Human
gaggccccagacccccgggc

SEQ ID NO: 756433 - RNA, 22 nt, Human
gaggccccagacccccgggcuu

SEQ ID NO: 756434 - RNA, 21 nt, Human
gaggcggcgugcgcggcccgg

SEQ ID NO: 756435 - RNA, 18 nt, Human
gagggagaggcaccugga

SEQ ID NO: 756436 - RNA, 20 nt, Human
gagguuccuggguggagaug

SEQ ID NO: 756437 - RNA, 22 nt, Human
gauagacaaaccccaggagaga

SEQ ID NO: 756438 - RNA, 22 nt, Human
gcagcggcgcgcucucccccgc

SEQ ID NO: 756439 - RNA, 18 nt, Human
gcaggggcacccgcccgc

SEQ ID NO: 756440 - RNA, 20 nt, Human
gcccaggcuggagugcagug

SEQ ID NO: 756441 - RNA, 20 nt, Human
gccccagacccccgggcuuc

SEQ ID NO: 756442 - RNA, 23 nt, Human
gccccagacccccgggcuucccu

SEQ ID NO: 756443 - RNA, 19 nt, Human
gccccgaaggccugccucu

SEQ ID NO: 756444 - RNA, 18 nt, Human
gccucaaccuccuggacu

SEQ ID NO: 756445 - RNA, 23 nt, Human
gccucggcccugugucccccgac

SEQ ID NO: 756446 - RNA, 19 nt, Human
gcguccugccccccccccg

SEQ ID NO: 756447 - RNA, 20 nt, Human
gcuauauagcccaggcuggu

SEQ ID NO: 756448 - RNA, 25 nt, Human
gcucuguugcccaggcuggagugca

SEQ ID NO: 756449 - RNA, 19 nt, Human
gcugacaccccccaaccuc

SEQ ID NO: 756450 - RNA, 24 nt, Human
gcuggagugcaguggugcaaucug

SEQ ID NO: 756451 - RNA, 21 nt, Human
gcuucccagccugggcugaag

SEQ ID NO: 756452 - RNA, 20 nt, Human
ggacaccaggccucgucccu

SEQ ID NO: 756453 - RNA, 22 nt, Human
ggagacagggucucgcucuguu

SEQ ID NO: 756454 - RNA, 21 nt, Human
ggagaggcaccuggagaaggc

SEQ ID NO: 756455 - RNA, 21 nt, Human
ggcgcagacggagggaggccc

SEQ ID NO: 756456 - RNA, 21 nt, Human
ggcugacaccccccaaccucc

SEQ ID NO: 756457 - RNA, 22 nt, Human
gggagaggcaccuggagaaggc

SEQ ID NO: 756458 - RNA, 19 nt, Human
gggccucccucauccugag

SEQ ID NO: 756459 - RNA, 23 nt, Human
ggggucggggacacgaggacagg

SEQ ID NO: 756460 - RNA, 22 nt, Human
gggucuugcuauauagcccagg

SEQ ID NO: 756461 - RNA, 21 nt, Human
gucagcgccacgccgggcgag

SEQ ID NO: 756462 - RNA, 20 nt, Human
gucgcacccccaggccccgc

SEQ ID NO: 756463 - RNA, 22 nt, Human
gugcaggggugcuuugucugca

SEQ ID NO: 756464 - RNA, 21 nt, Human
guggagaugcuccaaaaauuc

SEQ ID NO: 756465 - RNA, 21 nt, Human
uaaaacaacaacaaaaaaaca

SEQ ID NO: 756466 - RNA, 25 nt, Human
uaauauaagcaaauuaucuccucca

SEQ ID NO: 756467 - RNA, 20 nt, Human
uagaaagagccucacaaagg

SEQ ID NO: 756468 - RNA, 24 nt, Human
uauauagcccaggcuggucccaaa

SEQ ID NO: 756469 - RNA, 24 nt, Human
uaucuccuccaucccucccugggg

SEQ ID NO: 756470 - RNA, 21 nt, Human
ucaacccacuccuaagaagca

SEQ ID NO: 756471 - RNA, 23 nt, Human
ucaucucggguggggaaaaacca

SEQ ID NO: 756472 - RNA, 20 nt, Human
uccacacucacuaccaacca

SEQ ID NO: 756473 - RNA, 22 nt, Human
ucccaccacagccucccgagua

SEQ ID NO: 756474 - RNA, 19 nt, Human
uccccuggccggcccccga

SEQ ID NO: 756475 - RNA, 23 nt, Human
ucccgaguagcugggaccacagg

SEQ ID NO: 756476 - RNA, 24 nt, Human
ucccgaguagcugggaccacaggu

SEQ ID NO: 756477 - RNA, 20 nt, Human
ucccuggggcaggagacagc

SEQ ID NO: 756478 - RNA, 23 nt, Human
uccugucgcccuagggggcaccc

SEQ ID NO: 756479 - RNA, 24 nt, Human
ucgcucuguugcccaggcuggagu

SEQ ID NO: 756480 - RNA, 19 nt, Human
ucucgcucuguugcccagg

SEQ ID NO: 756481 - RNA, 23 nt, Human
ucucgcucuguugcccaggcugg

SEQ ID NO: 756482 - RNA, 24 nt, Human
ucucgcucuguugcccaggcugga

SEQ ID NO: 756483 - RNA, 26 nt, Human
ucucgcucuguugcccaggcuggagu

SEQ ID NO: 756484 - RNA, 27 nt, Human
ucucgcucuguugcccaggcuggagug

SEQ ID NO: 756485 - RNA, 19 nt, Human
ucugcgcaggccgcccagg

SEQ ID NO: 756486 - RNA, 21 nt, Human
ucugcgcaggccgcccaggag

SEQ ID NO: 756487 - RNA, 24 nt, Human
ucuguugcccaggcuggagugcag

SEQ ID NO: 756488 - RNA, 23 nt, Human
ucuugcuauauagcccaggcugg

SEQ ID NO: 756489 - RNA, 24 nt, Human
ucuugcuauauagcccaggcuggu

SEQ ID NO: 756490 - RNA, 19 nt, Human
ugaccgggcugugccgaaa

SEQ ID NO: 756491 - RNA, 20 nt, Human
ugacugcagccucaaccucc

SEQ ID NO: 756492 - RNA, 23 nt, Human
ugacugcagccucaaccuccugg

SEQ ID NO: 756493 - RNA, 23 nt, Human
ugagagaaacaaagauagacaaa

SEQ ID NO: 756494 - RNA, 20 nt, Human
ugaugguuccugaggcggcg

SEQ ID NO: 756495 - RNA, 21 nt, Human
ugcacagaguaagacacagag

SEQ ID NO: 756496 - RNA, 21 nt, Human
ugcagcuccggccugcccuuc

SEQ ID NO: 756497 - RNA, 20 nt, Human
ugcaguagcaccuuuucgag

SEQ ID NO: 756498 - RNA, 18 nt, Human
ugcccaggcuggagugca

SEQ ID NO: 756499 - RNA, 21 nt, Human
ugcccaggcuggagugcagug

SEQ ID NO: 756500 - RNA, 24 nt, Human
ugcccaggcuggagugcaguggug

SEQ ID NO: 756501 - RNA, 21 nt, Human
ugccuccagcaacagugaugg

SEQ ID NO: 756502 - RNA, 19 nt, Human
ugcgcaggccgcccaggag

SEQ ID NO: 756503 - RNA, 21 nt, Human
ugcgcaggccgcccaggagcc

SEQ ID NO: 756504 - RNA, 22 nt, Human
ugcuuugucugcaaggaagccu

SEQ ID NO: 756505 - RNA, 20 nt, Human
ugcuuuuuuuuuuuuuugga

SEQ ID NO: 756506 - RNA, 18 nt, Human
uggagugcaguggugcaa

SEQ ID NO: 756507 - RNA, 21 nt, Human
uggagugcaguggugcaaucu

SEQ ID NO: 756508 - RNA, 19 nt, Human
uggcaccagaccaucaaag

SEQ ID NO: 756509 - RNA, 22 nt, Human
uggcaccagaccaucaaagccc

SEQ ID NO: 756510 - RNA, 18 nt, Human
uggccaggugcacagggg

SEQ ID NO: 756511 - RNA, 21 nt, Human
ugggaccacaggugcgcacca

SEQ ID NO: 756512 - RNA, 24 nt, Human
ugggaccacaggugcgcaccacca

SEQ ID NO: 756513 - RNA, 20 nt, Human
ugggggccucccucauccug

SEQ ID NO: 756514 - RNA, 24 nt, Human
uggggucuugcuauauagcccagg

SEQ ID NO: 756515 - RNA, 23 nt, Human
uggguggagaugcuccaaaaauu

SEQ ID NO: 756516 - RNA, 21 nt, Human
uguaaaaaauuuguagugaug

SEQ ID NO: 756517 - RNA, 18 nt, Human
uguacccgaagagcuggg

SEQ ID NO: 756518 - RNA, 19 nt, Human
uguagugauggggucuugc

SEQ ID NO: 756519 - RNA, 21 nt, Human
uguuuuguuuuguuuuucuua

SEQ ID NO: 756520 - RNA, 19 nt, Human
uucuuaaagccacaaaucu

SEQ ID NO: 756521 - RNA, 28 nt, Human
uuuaaaacaacaacaaaaaaacagcgag

SEQ ID NO: 756522 - RNA, 21 nt, Human
uuuuggcugacaccccccaac

SEQ ID NO: 756523 - RNA, 26 nt, Human
uuuuuuuuuuuuggagacagggucuc

SEQ ID NO: 756524 - RNA, 24 nt, Human
uuuuuuuuuuuuuuggagacaggg

SEQ ID NO: 756525 - RNA, 23 nt, Human
aaacauagagucacaacaauuau

SEQ ID NO: 756526 - RNA, 21 nt, Human
aaauccgguaccaacuggcca

SEQ ID NO: 756527 - RNA, 19 nt, Human
aggcagcaggucauguagc

SEQ ID NO: 756528 - RNA, 22 nt, Human
caacuggccaaaauuaccucag

SEQ ID NO: 756529 - RNA, 20 nt, Human
caacuggccaaaauuaccuu

SEQ ID NO: 756530 - RNA, 19 nt, Human
cgguaccaacuggccaaaa

SEQ ID NO: 756531 - RNA, 22 nt, Human
gugacaauaaaagcucuguguc

SEQ ID NO: 756532 - RNA, 18 nt, Human
ucuccguaggcagcaggu

SEQ ID NO: 756533 - RNA, 24 nt, Human
ucugugucuggagcaaaccggggc

SEQ ID NO: 756534 - RNA, 22 nt, Human
ugcacagacugaaugauaaagc

SEQ ID NO: 756535 - RNA, 19 nt, Human
ugucuggagcaaacauaga

SEQ ID NO: 756536 - RNA, 20 nt, Human
ugucuggagcaaacauagag

SEQ ID NO: 756537 - RNA, 26 nt, Human
aaaaaaaggacacaauguauaauaaa

SEQ ID NO: 756538 - RNA, 18 nt, Human
aaaaaaucccuccccucc

SEQ ID NO: 756539 - RNA, 22 nt, Human
aaaaagccugaauacacaaaug

SEQ ID NO: 756540 - RNA, 24 nt, Human
aaaacaaaagcaaagcaaaagcaa

SEQ ID NO: 756541 - RNA, 22 nt, Human
aaacaaaagcaaagcaaaagca

SEQ ID NO: 756542 - RNA, 23 nt, Human
aaacaacagcagcaauagcuaaa

SEQ ID NO: 756543 - RNA, 26 nt, Human
aacaacagcagcaauagcuaaaaaaa

SEQ ID NO: 756544 - RNA, 18 nt, Human
aagaaagaaaaaacucaa

SEQ ID NO: 756545 - RNA, 23 nt, Human
aagaacauaaaaaaucccucccc

SEQ ID NO: 756546 - RNA, 27 nt, Human
aagaacauaaaaaaucccuccccuccc

SEQ ID NO: 756547 - RNA, 21 nt, Human
aagcaaaaaccugucaugagc

SEQ ID NO: 756548 - RNA, 20 nt, Human
aagcaaaagcaaaaaccugu

SEQ ID NO: 756549 - RNA, 21 nt, Human
aagcaaaagcaaaaaccuguc

SEQ ID NO: 756550 - RNA, 26 nt, Human
aagcaaaagcaaaaaccugucaugag

SEQ ID NO: 756551 - RNA, 19 nt, Human
aauccccuccccgcaacaa

SEQ ID NO: 756552 - RNA, 19 nt, Human
acaaaagcaaagcaaaagc

SEQ ID NO: 756553 - RNA, 24 nt, Human
acaaaagcaaagcaaaagcaaaaa

SEQ ID NO: 756554 - RNA, 23 nt, Human
acacagaagaacauaaaaaaucc

SEQ ID NO: 756555 - RNA, 18 nt, Human
acgaaauaaacuguauuc

SEQ ID NO: 756556 - RNA, 23 nt, Human
acuuauguuuuugcaguaagaag

SEQ ID NO: 756557 - RNA, 24 nt, Human
agaaagaaaaaacucaacacagaa

SEQ ID NO: 756558 - RNA, 26 nt, Human
agaaagaaaaaacucaacacagaaga

SEQ ID NO: 756559 - RNA, 21 nt, Human
agaauaaaaaacaacagcagc

SEQ ID NO: 756560 - RNA, 23 nt, Human
agcaaagcaaaagcaaaaaccug

SEQ ID NO: 756561 - RNA, 19 nt, Human
aggaauguguugaaagaaa

SEQ ID NO: 756562 - RNA, 20 nt, Human
auaaaaaacaacagcagcaa

SEQ ID NO: 756563 - RNA, 24 nt, Human
aucccuccccucccucuccuccca

SEQ ID NO: 756564 - RNA, 23 nt, Human
auuuguggcuuuucauuuuccuu

SEQ ID NO: 756565 - RNA, 30 nt, Human
caaaagcaaagcaaaagcaaaaaccugucu

SEQ ID NO: 756566 - RNA, 23 nt, Human
caaagcaaaagcaaaaaccuguc

SEQ ID NO: 756567 - RNA, 19 nt, Human
caacacagaagaacauaaa

SEQ ID NO: 756568 - RNA, 25 nt, Human
caacacagaagaacauaaaaaaucc

SEQ ID NO: 756569 - RNA, 27 nt, Human
caacagcagcaauagcuaaaaaaagga

SEQ ID NO: 756570 - RNA, 19 nt, Human
cagaacaauuucuuaaaug

SEQ ID NO: 756571 - RNA, 19 nt, Human
cagcagcaauagcuaaaaa

SEQ ID NO: 756572 - RNA, 24 nt, Human
cagcagcaauagcuaaaaaaagga

SEQ ID NO: 756573 - RNA, 27 nt, Human
cauaacaguaauaaaaaagaagcaaga

SEQ ID NO: 756574 - RNA, 25 nt, Human
caucuguaaaaagcaaaaucauaac

SEQ ID NO: 756575 - RNA, 21 nt, Human
ccaacaucuguaaaaagcaaa

SEQ ID NO: 756576 - RNA, 18 nt, Human
ccccaaauguuuucccuu

SEQ ID NO: 756577 - RNA, 18 nt, Human
cccccgggaaggcgcccg

SEQ ID NO: 756578 - RNA, 19 nt, Human
ccccucccucuccucccac

SEQ ID NO: 756579 - RNA, 19 nt, Human
ccuccccucccucuccucc

SEQ ID NO: 756580 - RNA, 27 nt, Human
cgaaauaaacuguauucugguaaaucc

SEQ ID NO: 756581 - RNA, 20 nt, Human
cuaaaaaaaggacacaaugu

SEQ ID NO: 756582 - RNA, 24 nt, Human
cucuccucccacucccccgggaag

SEQ ID NO: 756583 - RNA, 18 nt, Human
cugguaaauccccucccc

SEQ ID NO: 756584 - RNA, 18 nt, Human
gaauucuaaugaguugac

SEQ ID NO: 756585 - RNA, 21 nt, Human
gcaaagcaaaagcaaaaaccu

SEQ ID NO: 756586 - RNA, 19 nt, Human
gcuuucauuuccacaucca

SEQ ID NO: 756587 - RNA, 21 nt, Human
ggaacaucuguggaauaugau

SEQ ID NO: 756588 - RNA, 22 nt, Human
guuauaauacacacauaucacu

SEQ ID NO: 756589 - RNA, 26 nt, Human
uaaaaaaaggacacaauguauaauaa

SEQ ID NO: 756590 - RNA, 18 nt, Human
uaaaaaaucccuccccuc

SEQ ID NO: 756591 - RNA, 24 nt, Human
uaauuuaaaagaaagaaagaaaaa

SEQ ID NO: 756592 - RNA, 19 nt, Human
uacauugauuugauggaaa

SEQ ID NO: 756593 - RNA, 24 nt, Human
uacuauucuuuuauauaaagugac

SEQ ID NO: 756594 - RNA, 23 nt, Human
uacucuuucaaaaacaaaagcug

SEQ ID NO: 756595 - RNA, 19 nt, Human
uagaauucacgaaauaaac

SEQ ID NO: 756596 - RNA, 21 nt, Human
uauaauacacacauaucacug

SEQ ID NO: 756597 - RNA, 23 nt, Human
uauaggauuuacccucgcugacu

SEQ ID NO: 756598 - RNA, 23 nt, Human
uaucagaagcaucaguacuuuua

SEQ ID NO: 756599 - RNA, 26 nt, Human
ucaaaaacaaaagcaaagcaaaagca

SEQ ID NO: 756600 - RNA, 19 nt, Human
ucaagccagguacuaauaa

SEQ ID NO: 756601 - RNA, 19 nt, Human
uccauucaggaaauagagc

SEQ ID NO: 756602 - RNA, 18 nt, Human
ucccucuccucccacucc

SEQ ID NO: 756603 - RNA, 18 nt, Human
ucucugugacaaaagacu

SEQ ID NO: 756604 - RNA, 25 nt, Human
ucucugugacaaaagacuguuacuu

SEQ ID NO: 756605 - RNA, 23 nt, Human
ucuggaaucauguaaaaaucacu

SEQ ID NO: 756606 - RNA, 23 nt, Human
ugaaaacacuaggcuucaagcca

SEQ ID NO: 756607 - RNA, 21 nt, Human
ugaaggggaacaucuguggaa

SEQ ID NO: 756608 - RNA, 19 nt, Human
ugaguugacguaaauaauc

SEQ ID NO: 756609 - RNA, 23 nt, Human
uggaaagauggucauaugcgaua

SEQ ID NO: 756610 - RNA, 21 nt, Human
uggguccaguccugcacccac

SEQ ID NO: 756611 - RNA, 22 nt, Human
uuaacacuacuucauuugacag

SEQ ID NO: 756612 - RNA, 24 nt, Human
uuagcauuaaacaguacuauuuuu

SEQ ID NO: 756613 - RNA, 25 nt, Human
uuagcauuaaacaguacuauuuuuu

SEQ ID NO: 756614 - RNA, 23 nt, Human
uucaacaaucagaagaaaaaauc

SEQ ID NO: 756615 - RNA, 29 nt, Human
uuuaaaccauguauacagcucaacagcaa

SEQ ID NO: 756616 - RNA, 19 nt, Human
uuugaaggggaacaucugu

SEQ ID NO: 756617 - RNA, 20 nt, Human
uuugaaggggaacaucugug

SEQ ID NO: 756618 - RNA, 18 nt, Human
uuuguggcuuuucauuuu

SEQ ID NO: 756619 - RNA, 19 nt, Human
uuuguggcuuuucauuuuc

SEQ ID NO: 756620 - RNA, 23 nt, Human
uuuuuuucaguuuacauuaucuc

SEQ ID NO: 756621 - RNA, 21 nt, Human
aaaaggacagaaauggauuag

SEQ ID NO: 756622 - RNA, 24 nt, Human
aaaaggucagaaauaauccacaaa

SEQ ID NO: 756623 - RNA, 20 nt, Human
aaaauauucauuuggaccuc

SEQ ID NO: 756624 - RNA, 26 nt, Human
aaacaaauaaacaacugcagaucaaa

SEQ ID NO: 756625 - RNA, 19 nt, Human
aaaggagaaaaagaaaagg

SEQ ID NO: 756626 - RNA, 24 nt, Human
aaagugcugggaugacaggcguga

SEQ ID NO: 756627 - RNA, 18 nt, Human
aacauggugaaaccucac

SEQ ID NO: 756628 - RNA, 20 nt, Human
aacauggugaaaccucaccu

SEQ ID NO: 756629 - RNA, 21 nt, Human
aacauggugaaaccucaccuc

SEQ ID NO: 756630 - RNA, 19 nt, Human
aagaaaccagccaacgaau

SEQ ID NO: 756631 - RNA, 18 nt, Human
aaggagaaaaagaaaagg

SEQ ID NO: 756632 - RNA, 26 nt, Human
aaggagaaaaagaaaaggucagaaau

SEQ ID NO: 756633 - RNA, 21 nt, Human
aaguaauuuuccugccucagc

SEQ ID NO: 756634 - RNA, 30 nt, Human
aaguguugaaaauguugaguuacugaacuu

SEQ ID NO: 756635 - RNA, 19 nt, Human
aaugugaaaacaaaaauga

SEQ ID NO: 756636 - RNA, 19 nt, Human
aauuacuuaaaaacaagca

SEQ ID NO: 756637 - RNA, 18 nt, Human
acaggguuucaccauguu

SEQ ID NO: 756638 - RNA, 19 nt, Human
acaggguuucaccauguug

SEQ ID NO: 756639 - RNA, 24 nt, Human
acaggguuucaccauguugaccag

SEQ ID NO: 756640 - RNA, 19 nt, Human
acccagguuggaguacagu

SEQ ID NO: 756641 - RNA, 19 nt, Human
acuaaacuagcagcugcuc

SEQ ID NO: 756642 - RNA, 25 nt, Human
acucuguuacccagguuggaguaca

SEQ ID NO: 756643 - RNA, 23 nt, Human
acuggucucgaacuccugaccuc

SEQ ID NO: 756644 - RNA, 18 nt, Human
acuugaguuucuugaagg

SEQ ID NO: 756645 - RNA, 23 nt, Human
agaaaccagccaacgaaugacaa

SEQ ID NO: 756646 - RNA, 24 nt, Human
agcaaaaauaacuuuaaaaaaaac

SEQ ID NO: 756647 - RNA, 23 nt, Human
agccugggcaacauggugaaacc

SEQ ID NO: 756648 - RNA, 24 nt, Human
agccugggcaacauggugaaaccu

SEQ ID NO: 756649 - RNA, 25 nt, Human
agccugggcaacauggugaaaccuc

SEQ ID NO: 756650 - RNA, 21 nt, Human
aggagaaaaagaaaaggucag

SEQ ID NO: 756651 - RNA, 18 nt, Human
aggccgaggcaggcgggu

SEQ ID NO: 756652 - RNA, 21 nt, Human
aggccgaggcaggcgggucac

SEQ ID NO: 756653 - RNA, 23 nt, Human
aguagcugggaugacaggcgugu

SEQ ID NO: 756654 - RNA, 20 nt, Human
auaugccauaaaugugcaua

SEQ ID NO: 756655 - RNA, 18 nt, Human
augagguccuguaugugg

SEQ ID NO: 756656 - RNA, 20 nt, Human
augaguuuauaauaaacacc

SEQ ID NO: 756657 - RNA, 18 nt, Human
auggucugugacauuuuc

SEQ ID NO: 756658 - RNA, 22 nt, Human
auuaacaagugauaauguuacu

SEQ ID NO: 756659 - RNA, 21 nt, Human
auuguggggggacaagaggag

SEQ ID NO: 756660 - RNA, 24 nt, Human
auuuuuguauuuuuaguagagaca

SEQ ID NO: 756661 - RNA, 24 nt, Human
caaagugcugggaugacaggcgug

SEQ ID NO: 756662 - RNA, 20 nt, Human
caaauuaaaagcauucugua

SEQ ID NO: 756663 - RNA, 23 nt, Human
caacaaauuaaaagcauucugua

SEQ ID NO: 756664 - RNA, 19 nt, Human
caacaacugccaacuccca

SEQ ID NO: 756665 - RNA, 25 nt, Human
caacacccagcaaucuaaaaagaaa

SEQ ID NO: 756666 - RNA, 24 nt, Human
caacauggugaaaccucaccucua

SEQ ID NO: 756667 - RNA, 23 nt, Human
caacugccaacucccaacaccca

SEQ ID NO: 756668 - RNA, 25 nt, Human
caacugccaacucccaacacccagc

SEQ ID NO: 756669 - RNA, 22 nt, Human
caauacuacagagacuagauga

SEQ ID NO: 756670 - RNA, 21 nt, Human
cacaaaccagaaaauuagggc

SEQ ID NO: 756671 - RNA, 24 nt, Human
caccaugaucagcuaauuuuugua

SEQ ID NO: 756672 - RNA, 21 nt, Human
caccauguugaccagacuggu

SEQ ID NO: 756673 - RNA, 24 nt, Human
caccauguugaccagacuggucuc

SEQ ID NO: 756674 - RNA, 27 nt, Human
caccauguugaccagacuggucucgaa

SEQ ID NO: 756675 - RNA, 23 nt, Human
cacccguaaucuugggaggccga

SEQ ID NO: 756676 - RNA, 21 nt, Human
caccugcaaaacugccugggu

SEQ ID NO: 756677 - RNA, 23 nt, Human
caccugccuuugccucccaaagu

SEQ ID NO: 756678 - RNA, 21 nt, Human
cacgacauaauguggcuuugg

SEQ ID NO: 756679 - RNA, 22 nt, Human
cacucuguuacccagguuggag

SEQ ID NO: 756680 - RNA, 21 nt, Human
cagaaagaaaccagccaacga

SEQ ID NO: 756681 - RNA, 30 nt, Human
cagaaauaauccacaaaccagaaaauuagg

SEQ ID NO: 756682 - RNA, 25 nt, Human
cagaagcuuaagaccagccugggca

SEQ ID NO: 756683 - RNA, 25 nt, Human
cagcaaaaauaaaagguuagggaga

SEQ ID NO: 756684 - RNA, 18 nt, Human
caggguuucaccauguug

SEQ ID NO: 756685 - RNA, 19 nt, Human
caguggccaacucuuccca

SEQ ID NO: 756686 - RNA, 24 nt, Human
caucccagguuuaaguaauuuucc

SEQ ID NO: 756687 - RNA, 24 nt, Human
cauguugaccagacuggucucgaa

SEQ ID NO: 756688 - RNA, 23 nt, Human
cauuuuacuagccuugaaacacu

SEQ ID NO: 756689 - RNA, 22 nt, Human
ccaaagugcugggaugacaggc

SEQ ID NO: 756690 - RNA, 24 nt, Human
ccaaagugcugggaugacaggcgu

SEQ ID NO: 756691 - RNA, 24 nt, Human
ccagccagaaagaaaccagccaac

SEQ ID NO: 756692 - RNA, 23 nt, Human
cccagguuuaaguaauuuuccug

SEQ ID NO: 756693 - RNA, 21 nt, Human
ccucuuacaugccucagcaaa

SEQ ID NO: 756694 - RNA, 19 nt, Human
ccucuucucuuuuuucucc

SEQ ID NO: 756695 - RNA, 21 nt, Human
ccugaccucaggugauccacc

SEQ ID NO: 756696 - RNA, 23 nt, Human
ccugaccucaggugauccaccug

SEQ ID NO: 756697 - RNA, 23 nt, Human
ccugaccucaggugauccaccug

SEQ ID NO: 756698 - RNA, 23 nt, Human
ccugccucagccuaccgaguagc

SEQ ID NO: 756699 - RNA, 24 nt, Human
ccugggcaacauggugaaaccuca

SEQ ID NO: 756700 - RNA, 24 nt, Human
cgggucacuugagcucagaagcuu

SEQ ID NO: 756701 - RNA, 22 nt, Human
cggugugggguagcuauaaagg

SEQ ID NO: 756702 - RNA, 19 nt, Human
cguuuacacauaucugugu

SEQ ID NO: 756703 - RNA, 23 nt, Human
cuaaaauaacagcaauguaucua

SEQ ID NO: 756704 - RNA, 20 nt, Human
cuaacuacaacucgaaaaug

SEQ ID NO: 756705 - RNA, 26 nt, Human
cucagcaaaaauaaaagguuagggag

SEQ ID NO: 756706 - RNA, 24 nt, Human
cucagccuaccgaguagcugggau

SEQ ID NO: 756707 - RNA, 18 nt, Human
cucccaacacccagcaau

SEQ ID NO: 756708 - RNA, 23 nt, Human
cucuugcaugaacaaagguuuuu

SEQ ID NO: 756709 - RNA, 19 nt, Human
cugaaguuuuuuuccaaau

SEQ ID NO: 756710 - RNA, 20 nt, Human
cugcaaccuccacaucccaa

SEQ ID NO: 756711 - RNA, 24 nt, Human
cugcaaccuccacaucccagguuu

SEQ ID NO: 756712 - RNA, 23 nt, Human
cugccucagccuaccgaguagcu

SEQ ID NO: 756713 - RNA, 18 nt, Human
cuguguguaaauauagac

SEQ ID NO: 756714 - RNA, 21 nt, Human
cuuaaaaugugaaaacaaaaa

SEQ ID NO: 756715 - RNA, 22 nt, Human
cuuaagaccagccugggcaaca

SEQ ID NO: 756716 - RNA, 18 nt, Human
cuugggaggccgaggcag

SEQ ID NO: 756717 - RNA, 22 nt, Human
cuuguaaaagcaauucaugcaa

SEQ ID NO: 756718 - RNA, 22 nt, Human
gaaaaguccaaaauauuuacaa

SEQ ID NO: 756719 - RNA, 22 nt, Human
gaaaauguugaguuacugaacc

SEQ ID NO: 756720 - RNA, 19 nt, Human
gaaacaacauacuagagac

SEQ ID NO: 756721 - RNA, 19 nt, Human
gaacaaagguuuuuccucu

SEQ ID NO: 756722 - RNA, 20 nt, Human
gacaagaggagugauuucuu

SEQ ID NO: 756723 - RNA, 23 nt, Human
gaccucaggugauccaccugccu

SEQ ID NO: 756724 - RNA, 19 nt, Human
gaccucaguucacugcaac

SEQ ID NO: 756725 - RNA, 22 nt, Human
gacuucaaaaucagacauucaa

SEQ ID NO: 756726 - RNA, 22 nt, Human
gagacagucucacucuguuacc

SEQ ID NO: 756727 - RNA, 22 nt, Human
gagauguacacauuuagguuug

SEQ ID NO: 756728 - RNA, 21 nt, Human
gagccguuuuuugcccaacug

SEQ ID NO: 756729 - RNA, 23 nt, Human
gagccguuuuuugcccaacugga

SEQ ID NO: 756730 - RNA, 21 nt, Human
gaguacaguggcagcacgacc

SEQ ID NO: 756731 - RNA, 18 nt, Human
gaguggaggauuaaugag

SEQ ID NO: 756732 - RNA, 18 nt, Human
gaugacaggcgugagcca

SEQ ID NO: 756733 - RNA, 24 nt, Human
gaugacaggcgugagccacggugc

SEQ ID NO: 756734 - RNA, 22 nt, Human
gcaaccuccacaucccagguuu

SEQ ID NO: 756735 - RNA, 24 nt, Human
gcaagacuucaccuuccaucccag

SEQ ID NO: 756736 - RNA, 21 nt, Human
gccuuugccucccaaagugcu

SEQ ID NO: 756737 - RNA, 22 nt, Human
gccuuugccucccaaagugcug

SEQ ID NO: 756738 - RNA, 26 nt, Human
ggaaaucacuaacuacaacucgaaaa

SEQ ID NO: 756739 - RNA, 18 nt, Human
ggaccucuacuuuuaaau

SEQ ID NO: 756740 - RNA, 18 nt, Human
ggccgggugugguggcuc

SEQ ID NO: 756741 - RNA, 21 nt, Human
ggccgggugugguggcucaca

SEQ ID NO: 756742 - RNA, 20 nt, Human
gggaggucugaagaagugau

SEQ ID NO: 756743 - RNA, 20 nt, Human
ggguucuguaguucugucug

SEQ ID NO: 756744 - RNA, 19 nt, Human
ggucucgaacuccugaccu

SEQ ID NO: 756745 - RNA, 20 nt, Human
ggucucgaacuccugaccuc

SEQ ID NO: 756746 - RNA, 24 nt, Human
gguggcucacacccguaaucuugg

SEQ ID NO: 756747 - RNA, 23 nt, Human
ggugugguggcucacacccguaa

SEQ ID NO: 756748 - RNA, 24 nt, Human
gugauccaccugccuuugccuccc

SEQ ID NO: 756749 - RNA, 21 nt, Human
gugggaagggcaggcuauuuu

SEQ ID NO: 756750 - RNA, 20 nt, Human
guuuuuugcccaacuggaau

SEQ ID NO: 756751 - RNA, 19 nt, Human
uaaaaaaauucauaaaagg

SEQ ID NO: 756752 - RNA, 24 nt, Human
uaaaaagccaaaaccuacauuccc

SEQ ID NO: 756753 - RNA, 18 nt, Human
uaaaacucagacaacaaa

SEQ ID NO: 756754 - RNA, 22 nt, Human
uaaaaugaauaaaacucagaca

SEQ ID NO: 756755 - RNA, 25 nt, Human
uaaacaaauaaacaacugcagauca

SEQ ID NO: 756756 - RNA, 19 nt, Human
uaaacggguuucuuaaaag

SEQ ID NO: 756757 - RNA, 19 nt, Human
uaacuguaaacaaauaaac

SEQ ID NO: 756758 - RNA, 20 nt, Human
uaacuguaaacaaauaaaca

SEQ ID NO: 756759 - RNA, 18 nt, Human
uaauaaacaccugcaaaa

SEQ ID NO: 756760 - RNA, 19 nt, Human
uaauaaaucugaucacagg

SEQ ID NO: 756761 - RNA, 24 nt, Human
uaauuuuuguauuuuuaguagaga

SEQ ID NO: 756762 - RNA, 23 nt, Human
uacaaaaucuagcaaaaggacau

SEQ ID NO: 756763 - RNA, 23 nt, Human
uacaauacuugaaaauaaugcaa

SEQ ID NO: 756764 - RNA, 21 nt, Human
uacccagguuggaguacagug

SEQ ID NO: 756765 - RNA, 23 nt, Human
uacuagagacauauuuaacuuaa

SEQ ID NO: 756766 - RNA, 22 nt, Human
uacugaacuaaaaagccaaaac

SEQ ID NO: 756767 - RNA, 20 nt, Human
uacuugaaaauauucauuug

SEQ ID NO: 756768 - RNA, 21 nt, Human
uagaagugcuucaagaaaaua

SEQ ID NO: 756769 - RNA, 22 nt, Human
uagagacaggguuucaccaugu

SEQ ID NO: 756770 - RNA, 24 nt, Human
uagauaauacuacuuguaaaagca

SEQ ID NO: 756771 - RNA, 24 nt, Human
uaguagagacaggguuucaccaug

SEQ ID NO: 756772 - RNA, 25 nt, Human
uaguagagacaggguuucaccaugu

SEQ ID NO: 756773 - RNA, 24 nt, Human
uauaaagaaacaacauacuagaga

SEQ ID NO: 756774 - RNA, 25 nt, Human
uauaauaaacaccugcaaaacugcc

SEQ ID NO: 756775 - RNA, 21 nt, Human
uauaaucaaauguaagaugcc

SEQ ID NO: 756776 - RNA, 25 nt, Human
uaucuguguguucauccagaagauu

SEQ ID NO: 756777 - RNA, 19 nt, Human
uauggcauauuugcauaug

SEQ ID NO: 756778 - RNA, 18 nt, Human
uauugugguuacgcagaa

SEQ ID NO: 756779 - RNA, 21 nt, Human
ucacugcaaccuccacauccc

SEQ ID NO: 756780 - RNA, 24 nt, Human
ucacugcaaccuccacaucccagg

SEQ ID NO: 756781 - RNA, 20 nt, Human
ucagccuaccgaguagcugg

SEQ ID NO: 756782 - RNA, 22 nt, Human
uccacaaaccagaaaauuaggg

SEQ ID NO: 756783 - RNA, 24 nt, Human
uccacaaaccagaaaauuagggcu

SEQ ID NO: 756784 - RNA, 18 nt, Human
uccacaucccagguuuaa

SEQ ID NO: 756785 - RNA, 23 nt, Human
uccaggcaacuauaagggucuau

SEQ ID NO: 756786 - RNA, 24 nt, Human
ucccaaagugcugggaugacaggc

SEQ ID NO: 756787 - RNA, 18 nt, Human
ucccaaaguucucgggag

SEQ ID NO: 756788 - RNA, 19 nt, Human
ucccaaaguucucgggaga

SEQ ID NO: 756789 - RNA, 18 nt, Human
ucccagguuuaaguaauu

SEQ ID NO: 756790 - RNA, 20 nt, Human
ucccagguuuaaguaauuuu

SEQ ID NO: 756791 - RNA, 24 nt, Human
ucccagguuuaaguaauuuuccug

SEQ ID NO: 756792 - RNA, 21 nt, Human
ucccuuggaacuguagaaaag

SEQ ID NO: 756793 - RNA, 21 nt, Human
uccugcaagucgaccugccaa

SEQ ID NO: 756794 - RNA, 19 nt, Human
ucucacucuguuacccagg

SEQ ID NO: 756795 - RNA, 24 nt, Human
ucucacucuguuacccagguugga

SEQ ID NO: 756796 - RNA, 19 nt, Human
ucuccuucuuccauugaaa

SEQ ID NO: 756797 - RNA, 19 nt, Human
ucucgaacuccugaccuca

SEQ ID NO: 756798 - RNA, 21 nt, Human
ucucgggagauguacacauuu

SEQ ID NO: 756799 - RNA, 20 nt, Human
ucuguaguucugucuguuuu

SEQ ID NO: 756800 - RNA, 19 nt, Human
ucuguguguucauccagaa

SEQ ID NO: 756801 - RNA, 24 nt, Human
ucuguuacccagguuggaguacag

SEQ ID NO: 756802 - RNA, 18 nt, Human
ucuuuuuucuccuucuuc

SEQ ID NO: 756803 - RNA, 19 nt, Human
ucuuuuuucuccuucuucc

SEQ ID NO: 756804 - RNA, 27 nt, Human
ugaaaacaaaaaugaaaauccccuuuc

SEQ ID NO: 756805 - RNA, 18 nt, Human
ugaaaauccccuuucuug

SEQ ID NO: 756806 - RNA, 24 nt, Human
ugaaugacuauguauuuuagaagu

SEQ ID NO: 756807 - RNA, 26 nt, Human
ugacaauacugacaguaagucauccc

SEQ ID NO: 756808 - RNA, 21 nt, Human
ugacaguaagucaucccaaag

SEQ ID NO: 756809 - RNA, 24 nt, Human
ugaccagacuggucucgaacuccu

SEQ ID NO: 756810 - RNA, 24 nt, Human
ugaccucaggugauccaccugccu

SEQ ID NO: 756811 - RNA, 19 nt, Human
ugagcaacacaagcagcau

SEQ ID NO: 756812 - RNA, 20 nt, Human
ugauauaaacuguuuuccuu

SEQ ID NO: 756813 - RNA, 25 nt, Human
ugaucacaggauaaaaaaauucaua

SEQ ID NO: 756814 - RNA, 24 nt, Human
ugccucagccuaccgaguagcugg

SEQ ID NO: 756815 - RNA, 18 nt, Human
uggcaagacuucaccuuc

SEQ ID NO: 756816 - RNA, 22 nt, Human
uggcaucuucaguacagauucc

SEQ ID NO: 756817 - RNA, 18 nt, Human
uggcucacacccguaauc

SEQ ID NO: 756818 - RNA, 20 nt, Human
ugggaggccgaggcaggcgg

SEQ ID NO: 756819 - RNA, 24 nt, Human
ugggaggccgaggcaggcggguca

SEQ ID NO: 756820 - RNA, 18 nt, Human
ugggaugacaggcgugag

SEQ ID NO: 756821 - RNA, 19 nt, Human
ugggaugacaggcgugagc

SEQ ID NO: 756822 - RNA, 22 nt, Human
ugggaugacaggcgugagccac

SEQ ID NO: 756823 - RNA, 23 nt, Human
ugggaugacaggcgugagccacg

SEQ ID NO: 756824 - RNA, 22 nt, Human
ugggaugacaggcgugugccac

SEQ ID NO: 756825 - RNA, 24 nt, Human
ugggaugacaggcgugugccacca

SEQ ID NO: 756826 - RNA, 25 nt, Human
ugggaugacaggcgugugccaccau

SEQ ID NO: 756827 - RNA, 21 nt, Human
ugggccgggugugguggcuca

SEQ ID NO: 756828 - RNA, 18 nt, Human
uggggggacaagaggagu

SEQ ID NO: 756829 - RNA, 21 nt, Human
ugguuuucuuuguucuuccau

SEQ ID NO: 756830 - RNA, 22 nt, Human
uguaaacaaauaaacaacugca

SEQ ID NO: 756831 - RNA, 18 nt, Human
ugugcauauaugugcugu

SEQ ID NO: 756832 - RNA, 23 nt, Human
ugugcauauaugugcugugugua

SEQ ID NO: 756833 - RNA, 22 nt, Human
ugugguuuuggcuccagccaga

SEQ ID NO: 756834 - RNA, 20 nt, Human
uguucuuccauucuaaacuu

SEQ ID NO: 756835 - RNA, 19 nt, Human
uguuuggaaaaauauaagg

SEQ ID NO: 756836 - RNA, 19 nt, Human
uuaaaagcauucuguaaua

SEQ ID NO: 756837 - RNA, 23 nt, Human
uuaauugaugaauuuauauaaag

SEQ ID NO: 756838 - RNA, 18 nt, Human
uuacuuagguuucccaag

SEQ ID NO: 756839 - RNA, 24 nt, Human
uuaguagagacaggguuucaccau

SEQ ID NO: 756840 - RNA, 20 nt, Human
uucaaaaucagacauucaau

SEQ ID NO: 756841 - RNA, 23 nt, Human
uucaaugucugugagauguucuu

SEQ ID NO: 756842 - RNA, 22 nt, Human
uugaaaauauucauuuggaccu

SEQ ID NO: 756843 - RNA, 18 nt, Human
uugcccuuuaucuccuga

SEQ ID NO: 756844 - RNA, 19 nt, Human
uuggaacuguagaaaagcu

SEQ ID NO: 756845 - RNA, 20 nt, Human
uuuaaauuucuuccuuucgu

SEQ ID NO: 756846 - RNA, 21 nt, Human
uuuaaauuucuuccuuucguc

SEQ ID NO: 756847 - RNA, 23 nt, Human
uuuaaguaauuuuccugccucag

SEQ ID NO: 756848 - RNA, 21 nt, Human
uuucaccauguugaccagacu

SEQ ID NO: 756849 - RNA, 20 nt, Human
uuuccucuucucuuuuuucu

SEQ ID NO: 756850 - RNA, 25 nt, Human
uuuguacaauagauugcuucauugg

SEQ ID NO: 756851 - RNA, 24 nt, Human
uuuuccucuucucuuuuuucuccu

SEQ ID NO: 756852 - RNA, 24 nt, Human
uuuuuaguagagacaggguuucac

SEQ ID NO: 756853 - RNA, 20 nt, Human
uuuuuguauuuuuaguagag

SEQ ID NO: 756854 - RNA, 23 nt, Human
aaagaaaauauaauaugaucugg

SEQ ID NO: 756855 - RNA, 24 nt, Human
aaauaucuucaugaaccuuugacc

SEQ ID NO: 756856 - RNA, 19 nt, Human
aagaggccaaaaccaaaau

SEQ ID NO: 756857 - RNA, 25 nt, Human
aaggagccucauacuucugaaauau

SEQ ID NO: 756858 - RNA, 22 nt, Human
aagggaagcaaaaaacugcaua

SEQ ID NO: 756859 - RNA, 25 nt, Human
aauaaaaauaaaaaauugcauuuac

SEQ ID NO: 756860 - RNA, 20 nt, Human
acacauaauauuuccaaaga

SEQ ID NO: 756861 - RNA, 24 nt, Human
aggaccagaaguccaaauuaaacc

SEQ ID NO: 756862 - RNA, 20 nt, Human
auaaagaaaauauaauauga

SEQ ID NO: 756863 - RNA, 23 nt, Human
caaaaauggacaucaagggcaua

SEQ ID NO: 756864 - RNA, 22 nt, Human
caacauccccaaacaaaauuua

SEQ ID NO: 756865 - RNA, 18 nt, Human
cacaaagucuuaguuucu

SEQ ID NO: 756866 - RNA, 18 nt, Human
cagaaguagaugaaagcu

SEQ ID NO: 756867 - RNA, 23 nt, Human
cagggcgagugcggcugccuccc

SEQ ID NO: 756868 - RNA, 22 nt, Human
caguacucaguacaaaucaaaa

SEQ ID NO: 756869 - RNA, 18 nt, Human
ccagggcgagugcggcug

SEQ ID NO: 756870 - RNA, 19 nt, Human
cccaggccgcacagcucgc

SEQ ID NO: 756871 - RNA, 26 nt, Human
ccccacaugccacaguuaaaucccug

SEQ ID NO: 756872 - RNA, 23 nt, Human
ccccgggagccgcuggaagagcc

SEQ ID NO: 756873 - RNA, 21 nt, Human
ccuccaaaccuacccaaaaau

SEQ ID NO: 756874 - RNA, 19 nt, Human
cgaaaauaccaacaucccc

SEQ ID NO: 756875 - RNA, 24 nt, Human
cuaaacuucuaggcgucugcacau

SEQ ID NO: 756876 - RNA, 24 nt, Human
cuauuuuugucugcuuuaagauuu

SEQ ID NO: 756877 - RNA, 21 nt, Human
cucccgcucgccccggacgcc

SEQ ID NO: 756878 - RNA, 19 nt, Human
cugaaauauagauguuaac

SEQ ID NO: 756879 - RNA, 19 nt, Human
gaccuccggccggucccag

SEQ ID NO: 756880 - RNA, 22 nt, Human
gauagugaagucaaaggaaaaa

SEQ ID NO: 756881 - RNA, 19 nt, Human
gcggcugccagggcgagug

SEQ ID NO: 756882 - RNA, 24 nt, Human
ggaagcaaaaaacugcauaguaag

SEQ ID NO: 756883 - RNA, 18 nt, Human
uaaaacccuuaguauaaa

SEQ ID NO: 756884 - RNA, 22 nt, Human
uaacaggccagcuugcaaccag

SEQ ID NO: 756885 - RNA, 25 nt, Human
uaacuugaucgaaaauaccaacauc

SEQ ID NO: 756886 - RNA, 18 nt, Human
uaagaggccaaaaccaaa

SEQ ID NO: 756887 - RNA, 25 nt, Human
uaagaggccaaaaccaaaauaucuu

SEQ ID NO: 756888 - RNA, 24 nt, Human
uaagauuuuaacuugaucgaaaau

SEQ ID NO: 756889 - RNA, 23 nt, Human
uaagccggcaggcaggaagaucu

SEQ ID NO: 756890 - RNA, 21 nt, Human
uaauuaguccccacaugccaa

SEQ ID NO: 756891 - RNA, 23 nt, Human
uacacauaauauuuccaaagagu

SEQ ID NO: 756892 - RNA, 21 nt, Human
uacagaaguagaugaaagcug

SEQ ID NO: 756893 - RNA, 21 nt, Human
uacccaaaaauggacaucaag

SEQ ID NO: 756894 - RNA, 18 nt, Human
uaccucaaauaaugacac

SEQ ID NO: 756895 - RNA, 22 nt, Human
uagcuaccucaaauaaugacac

SEQ ID NO: 756896 - RNA, 23 nt, Human
uaggauuaagaggccaaaaccaa

SEQ ID NO: 756897 - RNA, 22 nt, Human
uauagacugaauacacuuucaa

SEQ ID NO: 756898 - RNA, 22 nt, Human
ucaaaacauucuccaacuuaag

SEQ ID NO: 756899 - RNA, 20 nt, Human
uccccaaacaaaauuuacug

SEQ ID NO: 756900 - RNA, 18 nt, Human
uccccacaugccacaguu

SEQ ID NO: 756901 - RNA, 19 nt, Human
ucccugacaguacuguuaa

SEQ ID NO: 756902 - RNA, 22 nt, Human
ucuaggauuaagaggccaaaac

SEQ ID NO: 756903 - RNA, 21 nt, Human
ugaaauuuuggaaauuuuugu

SEQ ID NO: 756904 - RNA, 20 nt, Human
ugaaucagaaacagauuuua

SEQ ID NO: 756905 - RNA, 21 nt, Human
ugaauggagccggcggcugcu

SEQ ID NO: 756906 - RNA, 23 nt, Human
ugaguacacauaauauuuccaaa

SEQ ID NO: 756907 - RNA, 20 nt, Human
ugaguuacagaaguagauga

SEQ ID NO: 756908 - RNA, 20 nt, Human
ugcaccuccaaaccuaccca

SEQ ID NO: 756909 - RNA, 21 nt, Human
ugcaccuccaaaccuacccaa

SEQ ID NO: 756910 - RNA, 24 nt, Human
ugcagacaaaaaaaauuacagcaa

SEQ ID NO: 756911 - RNA, 21 nt, Human
ugcauaaggaucaagaucaag

SEQ ID NO: 756912 - RNA, 22 nt, Human
uggaagagcccgggaaaggagg

SEQ ID NO: 756913 - RNA, 18 nt, Human
uggggugcaccuccaaac

SEQ ID NO: 756914 - RNA, 26 nt, Human
uuaaaaacaacaacuauguuacaaag

SEQ ID NO: 756915 - RNA, 22 nt, Human
uuaaaacuucuagaacccucac

SEQ ID NO: 756916 - RNA, 24 nt, Human
uuaaauggucucaaaacauucucc

SEQ ID NO: 756917 - RNA, 18 nt, Human
uuagggagguggcaagau

SEQ ID NO: 756918 - RNA, 22 nt, Human
uuuuaacuugaucgaaaauacc

SEQ ID NO: 756919 - RNA, 22 nt, Human
aaaaaaaaaaaaacccacagag

SEQ ID NO: 756920 - RNA, 21 nt, Human
aaaaaaaaaaaacccacagag

SEQ ID NO: 756921 - RNA, 19 nt, Human
aaaacaaaaacaaaaacaa

SEQ ID NO: 756922 - RNA, 24 nt, Human
aaaacaauaaaaaaaaaaaaaccc

SEQ ID NO: 756923 - RNA, 19 nt, Human
aaaaccaaaaaagcuugga

SEQ ID NO: 756924 - RNA, 24 nt, Human
aaacaaaaacaaaaacaauaaaaa

SEQ ID NO: 756925 - RNA, 24 nt, Human
aaacaauaaaaaaaaaaaaaccca

SEQ ID NO: 756926 - RNA, 22 nt, Human
aaaccccgucuccaccaaaaaa

SEQ ID NO: 756927 - RNA, 24 nt, Human
aaagugcugggauuacaggcauga

SEQ ID NO: 756928 - RNA, 24 nt, Human
aaagugcugggauuagagacauga

SEQ ID NO: 756929 - RNA, 19 nt, Human
aacacggugaaaccccguc

SEQ ID NO: 756930 - RNA, 20 nt, Human
aacacggugaaaccccgucu

SEQ ID NO: 756931 - RNA, 21 nt, Human
aacacggugaaaccccgucuc

SEQ ID NO: 756932 - RNA, 24 nt, Human
aacacuuugggaggccaagguggg

SEQ ID NO: 756933 - RNA, 25 nt, Human
aaggccccuucccuggaggggaugc

SEQ ID NO: 756934 - RNA, 19 nt, Human
aagugcugggauuacaggc

SEQ ID NO: 756935 - RNA, 21 nt, Human
aagugcugggauuacaggcau

SEQ ID NO: 756936 - RNA, 26 nt, Human
aagugcugggauuacaggcaugagcc

SEQ ID NO: 756937 - RNA, 26 nt, Human
aagugcugggauuagagacaugagcc

SEQ ID NO: 756938 - RNA, 23 nt, Human
aauaaaaaaaaaaaaacccacag

SEQ ID NO: 756939 - RNA, 20 nt, Human
aauuguuugaacccaggagg

SEQ ID NO: 756940 - RNA, 24 nt, Human
aauuguuugaacccaggaggcgga

SEQ ID NO: 756941 - RNA, 19 nt, Human
acagacaggguuucaccau

SEQ ID NO: 756942 - RNA, 22 nt, Human
acaggcgcaugccaccacgccc

SEQ ID NO: 756943 - RNA, 20 nt, Human
acaggguuucaccauauugg

SEQ ID NO: 756944 - RNA, 24 nt, Human
acaggguuucaccauauuggccag

SEQ ID NO: 756945 - RNA, 21 nt, Human
acaugagccauugcaccuggc

SEQ ID NO: 756946 - RNA, 24 nt, Human
accauguugcucagacuggucuug

SEQ ID NO: 756947 - RNA, 24 nt, Human
accauguuggccagaccggucucg

SEQ ID NO: 756948 - RNA, 19 nt, Human
acccaggcuggagugcaau

SEQ ID NO: 756949 - RNA, 19 nt, Human
acccaggcuggagugcagu

SEQ ID NO: 756950 - RNA, 25 nt, Human
acccgccucggccucccaaagugcu

SEQ ID NO: 756951 - RNA, 21 nt, Human
accucagucucccaaagugcu

SEQ ID NO: 756952 - RNA, 23 nt, Human
accucagucucccaaagugcugg

SEQ ID NO: 756953 - RNA, 24 nt, Human
accuugugauccacccgccucggc

SEQ ID NO: 756954 - RNA, 18 nt, Human
acucugucacccaggcug

SEQ ID NO: 756955 - RNA, 25 nt, Human
acucugucacccaggcuggagugca

SEQ ID NO: 756956 - RNA, 19 nt, Human
acugcagccucaaacuccu

SEQ ID NO: 756957 - RNA, 18 nt, Human
acugcagccuccgccucc

SEQ ID NO: 756958 - RNA, 20 nt, Human
agaaaaaggaggaauaugau

SEQ ID NO: 756959 - RNA, 21 nt, Human
agacagaauuguuugaaccca

SEQ ID NO: 756960 - RNA, 18 nt, Human
agacagacagacagacag

SEQ ID NO: 756961 - RNA, 18 nt, Human
agacagacagacagacag

SEQ ID NO: 756962 - RNA, 18 nt, Human
agacagacagacagacag

SEQ ID NO: 756963 - RNA, 18 nt, Human
agacagacagacagacag

SEQ ID NO: 756964 - RNA, 18 nt, Human
agacagacagacagacag

SEQ ID NO: 756965 - RNA, 18 nt, Human
agacagacagacagacag

SEQ ID NO: 756966 - RNA, 18 nt, Human
agacagacagacagacag

SEQ ID NO: 756967 - RNA, 19 nt, Human
agacagacagacagacaga

SEQ ID NO: 756968 - RNA, 19 nt, Human
agacagacagacagacaga

SEQ ID NO: 756969 - RNA, 19 nt, Human
agacagacagacagacaga

SEQ ID NO: 756970 - RNA, 19 nt, Human
agacagacagacagacaga

SEQ ID NO: 756971 - RNA, 19 nt, Human
agacagacagacagacaga

SEQ ID NO: 756972 - RNA, 19 nt, Human
agacagacagacagacaga

SEQ ID NO: 756973 - RNA, 21 nt, Human
agacagacagacagauagaua

SEQ ID NO: 756974 - RNA, 25 nt, Human
agacagggagaagcugcugagguug

SEQ ID NO: 756975 - RNA, 18 nt, Human
agagagggugaagcuuaa

SEQ ID NO: 756976 - RNA, 24 nt, Human
agagagggugaagcuuaaagagag

SEQ ID NO: 756977 - RNA, 18 nt, Human
agagcaguaaggccccuu

SEQ ID NO: 756978 - RNA, 24 nt, Human
agauagauagacagacagacagac

SEQ ID NO: 756979 - RNA, 23 nt, Human
agccgggcaugguggcaggcgcc

SEQ ID NO: 756980 - RNA, 18 nt, Human
agccuccagagcagcugg

SEQ ID NO: 756981 - RNA, 18 nt, Human
agccuccugaguagcuag

SEQ ID NO: 756982 - RNA, 24 nt, Human
agccugggggacaagaacgagacu

SEQ ID NO: 756983 - RNA, 23 nt, Human
agcucaagugaucugcccaccuc

SEQ ID NO: 756984 - RNA, 21 nt, Human
aggccaaggugggcggaucac

SEQ ID NO: 756985 - RNA, 24 nt, Human
aggcgcgguggcucacgccuguaa

SEQ ID NO: 756986 - RNA, 21 nt, Human
aggcggagguuacagugagcc

SEQ ID NO: 756987 - RNA, 24 nt, Human
aggcggagguuacagugagccgag

SEQ ID NO: 756988 - RNA, 25 nt, Human
aggcuggagugcagugguaccaucu

SEQ ID NO: 756989 - RNA, 23 nt, Human
aggugggcggaucacuugagguc

SEQ ID NO: 756990 - RNA, 19 nt, Human
agguugucagguuccuacu

SEQ ID NO: 756991 - RNA, 22 nt, Human
aguacagacaggguuucaccau

SEQ ID NO: 756992 - RNA, 23 nt, Human
agucauugcacucaagccugggg

SEQ ID NO: 756993 - RNA, 27 nt, Human
agucugucacccaggcuggagugcaau

SEQ ID NO: 756994 - RNA, 24 nt, Human
agugauucuccugccucagccucc

SEQ ID NO: 756995 - RNA, 24 nt, Human
agugcagugguaccaucucagcuc

SEQ ID NO: 756996 - RNA, 18 nt, Human
agugcugggauuacaggc

SEQ ID NO: 756997 - RNA, 18 nt, Human
auagcucacugcagccuc

SEQ ID NO: 756998 - RNA, 21 nt, Human
aucacuugaggucgggaguuc

SEQ ID NO: 756999 - RNA, 18 nt, Human
augggguuucaccauguu

SEQ ID NO: 757000 - RNA, 22 nt, Human
augggguuucaccauguuggcc

SEQ ID NO: 757001 - RNA, 23 nt, Human
augggguuucaccauguuggcca

SEQ ID NO: 757002 - RNA, 24 nt, Human
augggguuucaccauguuggccag

SEQ ID NO: 757003 - RNA, 21 nt, Human
auuuuauauauauagauauau

SEQ ID NO: 757004 - RNA, 23 nt, Human
caaacuccugaccuugugaucca

SEQ ID NO: 757005 - RNA, 24 nt, Human
caaagugcugggauuacaggcaug

SEQ ID NO: 757006 - RNA, 24 nt, Human
caaagugcugggauuagagacaug

SEQ ID NO: 757007 - RNA, 24 nt, Human
caacacuuugggaggccaaggugg

SEQ ID NO: 757008 - RNA, 19 nt, Human
caagaacgagacuucucuc

SEQ ID NO: 757009 - RNA, 20 nt, Human
caagaacgagacuucucuca

SEQ ID NO: 757010 - RNA, 24 nt, Human
caaggugggcggaucacuugaggu

SEQ ID NO: 757011 - RNA, 22 nt, Human
caagugauucuccugccucagc

SEQ ID NO: 757012 - RNA, 27 nt, Human
caagugauucuccugccucagccucca

SEQ ID NO: 757013 - RNA, 19 nt, Human
caauuggcuccugcaagcc

SEQ ID NO: 757014 - RNA, 21 nt, Human
caccauauuggccaggcugau

SEQ ID NO: 757015 - RNA, 24 nt, Human
caccauauuggccaggcugaucuc

SEQ ID NO: 757016 - RNA, 27 nt, Human
caccauauuggccaggcugaucucaaa

SEQ ID NO: 757017 - RNA, 23 nt, Human
caccauguugcucagacuggucu

SEQ ID NO: 757018 - RNA, 24 nt, Human
caccauguugcucagacuggucuu

SEQ ID NO: 757019 - RNA, 27 nt, Human
caccauguugcucagacuggucuugaa

SEQ ID NO: 757020 - RNA, 18 nt, Human
caccauguuggccagacc

SEQ ID NO: 757021 - RNA, 21 nt, Human
caccauguuggccagaccggu

SEQ ID NO: 757022 - RNA, 24 nt, Human
caccauguuggccagaccggucuc

SEQ ID NO: 757023 - RNA, 27 nt, Human
caccauguuggccagaccggucucgaa

SEQ ID NO: 757024 - RNA, 23 nt, Human
cacccgccucggccucccaaagu

SEQ ID NO: 757025 - RNA, 24 nt, Human
cacgccuguaaucccaacacuuug

SEQ ID NO: 757026 - RNA, 22 nt, Human
cacgcgauucuccugccucagc

SEQ ID NO: 757027 - RNA, 24 nt, Human
cacuaugcccggcuaauuuuugua

SEQ ID NO: 757028 - RNA, 18 nt, Human
cacucgccucuagcugca

SEQ ID NO: 757029 - RNA, 22 nt, Human
cacucugucacccaggcuggag

SEQ ID NO: 757030 - RNA, 23 nt, Human
cacucugucacccaggcuggagu

SEQ ID NO: 757031 - RNA, 23 nt, Human
cacugcagccuccgccuccuggg

SEQ ID NO: 757032 - RNA, 19 nt, Human
cacuggguggcaggagagc

SEQ ID NO: 757033 - RNA, 23 nt, Human
cacuggguggcaggagagcagua

SEQ ID NO: 757034 - RNA, 21 nt, Human
cacuuuugaaaaacaauuugg

SEQ ID NO: 757035 - RNA, 20 nt, Human
cagcagaccacaugguacca

SEQ ID NO: 757036 - RNA, 24 nt, Human
cagccucaaacuccugggcucaag

SEQ ID NO: 757037 - RNA, 18 nt, Human
cagccuccugaguagcua

SEQ ID NO: 757038 - RNA, 19 nt, Human
cagcucaagugaucugccc

SEQ ID NO: 757039 - RNA, 18 nt, Human
caggaguggggugugaaa

SEQ ID NO: 757040 - RNA, 24 nt, Human
caggcgauccacccaccucggccc

SEQ ID NO: 757041 - RNA, 22 nt, Human
caggcgcgguggcucacgccug

SEQ ID NO: 757042 - RNA, 21 nt, Human
caggcugaucucaaacuccug

SEQ ID NO: 757043 - RNA, 24 nt, Human
caggguuucaccauauuggccagg

SEQ ID NO: 757044 - RNA, 24 nt, Human
cauauuggccaggcugaucucaaa

SEQ ID NO: 757045 - RNA, 22 nt, Human
caugccaccacgcccggccaau

SEQ ID NO: 757046 - RNA, 19 nt, Human
caugucucugugccccaca

SEQ ID NO: 757047 - RNA, 24 nt, Human
cauguugcucagacuggucuugaa

SEQ ID NO: 757048 - RNA, 24 nt, Human
cauguuggccagaccggucucgaa

SEQ ID NO: 757049 - RNA, 23 nt, Human
cauucaaauaaugcucacuaaca

SEQ ID NO: 757050 - RNA, 19 nt, Human
cauugcacucaagccuggg

SEQ ID NO: 757051 - RNA, 22 nt, Human
cauugcacucaagccuggggga

SEQ ID NO: 757052 - RNA, 23 nt, Human
cauugcacucaagccugggggac

SEQ ID NO: 757053 - RNA, 24 nt, Human
cauugcacucaagccugggggaca

SEQ ID NO: 757054 - RNA, 25 nt, Human
cauugcacucaagccugggggacaa

SEQ ID NO: 757055 - RNA, 18 nt, Human
ccaaaaaagcuuggacca

SEQ ID NO: 757056 - RNA, 23 nt, Human
ccaaagugcugggauuacaggca

SEQ ID NO: 757057 - RNA, 24 nt, Human
ccaaagugcugggauuacaggcau

SEQ ID NO: 757058 - RNA, 24 nt, Human
ccaaagugcugggauuagagacau

SEQ ID NO: 757059 - RNA, 19 nt, Human
ccaacacuuugggaggcca

SEQ ID NO: 757060 - RNA, 24 nt, Human
ccacaugguaccacucccagccau

SEQ ID NO: 757061 - RNA, 19 nt, Human
ccaccaaaaaauacaaaaa

SEQ ID NO: 757062 - RNA, 18 nt, Human
ccaggucugggaccuucc

SEQ ID NO: 757063 - RNA, 21 nt, Human
ccauugcaccuggccaaaaaa

SEQ ID NO: 757064 - RNA, 22 nt, Human
ccauugcaccuggccaaaaaag

SEQ ID NO: 757065 - RNA, 24 nt, Human
cccaaagugcugggauuacaggca

SEQ ID NO: 757066 - RNA, 18 nt, Human
cccagccauagacuggac

SEQ ID NO: 757067 - RNA, 24 nt, Human
cccgaucucaggcgauccacccac

SEQ ID NO: 757068 - RNA, 23 nt, Human
cccggccaacacggugaaacccc

SEQ ID NO: 757069 - RNA, 24 nt, Human
cccggccaacacggugaaaccccg

SEQ ID NO: 757070 - RNA, 24 nt, Human
ccuacuggguucaagugauucucc

SEQ ID NO: 757071 - RNA, 19 nt, Human
ccuccgccuccuggguuca

SEQ ID NO: 757072 - RNA, 19 nt, Human
ccuccgccuccuggguuca

SEQ ID NO: 757073 - RNA, 24 nt, Human
ccuccuggguucacgcgauucucc

SEQ ID NO: 757074 - RNA, 20 nt, Human
ccugaccuugugauccaccc

SEQ ID NO: 757075 - RNA, 24 nt, Human
ccugaguagcuaggacuacaggug

SEQ ID NO: 757076 - RNA, 21 nt, Human
ccuuaaucccagcuacuuggg

SEQ ID NO: 757077 - RNA, 25 nt, Human
cgauccacccaccucggcccauauc

SEQ ID NO: 757078 - RNA, 26 nt, Human
cgcaugccaccacgcccggccaaucu

SEQ ID NO: 757079 - RNA, 23 nt, Human
cgccuguaaucccaacacuuugg

SEQ ID NO: 757080 - RNA, 24 nt, Human
cgccuguaaucccaacacuuuggg

SEQ ID NO: 757081 - RNA, 24 nt, Human
cggaucacuugaggucgggaguuc

SEQ ID NO: 757082 - RNA, 20 nt, Human
cuacaggugaccaccacuau

SEQ ID NO: 757083 - RNA, 18 nt, Human
cuaguagagaugggguuu

SEQ ID NO: 757084 - RNA, 22 nt, Human
cuaguagagaugggguuucacc

SEQ ID NO: 757085 - RNA, 24 nt, Human
cuaguagagaugggguuucaccau

SEQ ID NO: 757086 - RNA, 24 nt, Human
cucaagugaucugcccaccucagu

SEQ ID NO: 757087 - RNA, 22 nt, Human
cucacgccuguaaucccaacac

SEQ ID NO: 757088 - RNA, 24 nt, Human
cucacgccuguaaucccaacacuu

SEQ ID NO: 757089 - RNA, 24 nt, Human
cucacucugucacccaggcuggag

SEQ ID NO: 757090 - RNA, 21 nt, Human
cucacugcagccucaaacucc

SEQ ID NO: 757091 - RNA, 24 nt, Human
cucacugcagccucaaacuccugg

SEQ ID NO: 757092 - RNA, 24 nt, Human
cucacugcagccuccgccuccugg

SEQ ID NO: 757093 - RNA, 22 nt, Human
cucccacuguggccaaucucaa

SEQ ID NO: 757094 - RNA, 24 nt, Human
cuccugaccuugugauccacccgc

SEQ ID NO: 757095 - RNA, 24 nt, Human
cuccugaguagcuaggacuacagg

SEQ ID NO: 757096 - RNA, 19 nt, Human
cuccugcaagccaaacaag

SEQ ID NO: 757097 - RNA, 21 nt, Human
cuccuggguucacgcgauucu

SEQ ID NO: 757098 - RNA, 20 nt, Human
cucuuggaauucagaccaug

SEQ ID NO: 757099 - RNA, 31 nt, Human
cugcaagccaaacaagcuggcucuagcacag

SEQ ID NO: 757100 - RNA, 23 nt, Human
cugcagccucaaacuccugggcu

SEQ ID NO: 757101 - RNA, 23 nt, Human
cugcagccuccgccuccuggguu

SEQ ID NO: 757102 - RNA, 23 nt, Human
cugccucagccuccugaguagcu

SEQ ID NO: 757103 - RNA, 18 nt, Human
cuggaccaagggguacac

SEQ ID NO: 757104 - RNA, 18 nt, Human
cuggcagucucugguggg

SEQ ID NO: 757105 - RNA, 22 nt, Human
cuggcagucucuggugggugga

SEQ ID NO: 757106 - RNA, 22 nt, Human
cuguagauauggcacacuuuug

SEQ ID NO: 757107 - RNA, 19 nt, Human
cugucacccaggcuggagu

SEQ ID NO: 757108 - RNA, 24 nt, Human
cuucuaguagagaugggguuucac

SEQ ID NO: 757109 - RNA, 24 nt, Human
gaaaccccgucuccaccaaaaaau

SEQ ID NO: 757110 - RNA, 19 nt, Human
gaacacauggccauauccc

SEQ ID NO: 757111 - RNA, 26 nt, Human
gaacuggaagauguuguugagccucu

SEQ ID NO: 757112 - RNA, 19 nt, Human
gaagacagggagaagcugc

SEQ ID NO: 757113 - RNA, 23 nt, Human
gacagacagacagacagacagac

SEQ ID NO: 757114 - RNA, 23 nt, Human
gacagacagacagacagacagac

SEQ ID NO: 757115 - RNA, 19 nt, Human
gaccaugugaccaucaggu

SEQ ID NO: 757116 - RNA, 22 nt, Human
gaccuugugauccacccgccuc

SEQ ID NO: 757117 - RNA, 22 nt, Human
gaccuugugauccacccgccuc

SEQ ID NO: 757118 - RNA, 24 nt, Human
gaccuugugauccacccgccucgg

SEQ ID NO: 757119 - RNA, 21 nt, Human
gacuacaggugaccaccacua

SEQ ID NO: 757120 - RNA, 26 nt, Human
gagaggaagacagggagaagcugccg

SEQ ID NO: 757121 - RNA, 20 nt, Human
gagaugggguuucaccaugu

SEQ ID NO: 757122 - RNA, 24 nt, Human
gagaugggguuucaccauguuggc

SEQ ID NO: 757123 - RNA, 23 nt, Human
gagguuacagugagccgagauug

SEQ ID NO: 757124 - RNA, 25 nt, Human
gaguagcuaggacuacaggugacca

SEQ ID NO: 757125 - RNA, 24 nt, Human
gaucacuugaggucgggaguucga

SEQ ID NO: 757126 - RNA, 24 nt, Human
gaucucaggcgauccacccaccuc

SEQ ID NO: 757127 - RNA, 18 nt, Human
gauuacaggcaugagcca

SEQ ID NO: 757128 - RNA, 22 nt, Human
gauuacaggcaugagccaccgc

SEQ ID NO: 757129 - RNA, 22 nt, Human
gauuacaggcaugagccaccgc

SEQ ID NO: 757130 - RNA, 18 nt, Human
gauuagagacaugagcca

SEQ ID NO: 757131 - RNA, 23 nt, Human
gauuagagacaugagccauugca

SEQ ID NO: 757132 - RNA, 25 nt, Human
gcaacagagagagaaacagagaaaa

SEQ ID NO: 757133 - RNA, 26 nt, Human
gcaacagagagagaaacagagaaaaa

SEQ ID NO: 757134 - RNA, 25 nt, Human
gcaugccaccacgcccggccaaucu

SEQ ID NO: 757135 - RNA, 24 nt, Human
gccaacacggugaaaccccgucuc

SEQ ID NO: 757136 - RNA, 22 nt, Human
gcccggcuaauuuuuguauuuu

SEQ ID NO: 757137 - RNA, 20 nt, Human
gccucagccuccugaguagc

SEQ ID NO: 757138 - RNA, 23 nt, Human
gccucggccucccaaagugcugg

SEQ ID NO: 757139 - RNA, 22 nt, Human
gccuuaaucccagcuacuuggg

SEQ ID NO: 757140 - RNA, 24 nt, Human
gcgauucuccugccucagccuccu

SEQ ID NO: 757141 - RNA, 19 nt, Human
gcuggagugcaauagcaca

SEQ ID NO: 757142 - RNA, 20 nt, Human
gcuggagugcagugguacca

SEQ ID NO: 757143 - RNA, 18 nt, Human
ggacagcccacccagucc

SEQ ID NO: 757144 - RNA, 28 nt, Human
ggaggcagagacagaauuguuugaaccc

SEQ ID NO: 757145 - RNA, 21 nt, Human
ggaggcggagguuacagugag

SEQ ID NO: 757146 - RNA, 22 nt, Human
ggagguuacagugagccgagau

SEQ ID NO: 757147 - RNA, 24 nt, Human
ggagguuacagugagccgagauug

SEQ ID NO: 757148 - RNA, 23 nt, Human
ggaucacuugaggucgggaguuc

SEQ ID NO: 757149 - RNA, 22 nt, Human
ggauuacaggcaugagccaccg

SEQ ID NO: 757150 - RNA, 21 nt, Human
ggccaggcgcgguggcucacg

SEQ ID NO: 757151 - RNA, 22 nt, Human
gggguuucaccauguuggccag

SEQ ID NO: 757152 - RNA, 20 nt, Human
ggguucaagugauucuccug

SEQ ID NO: 757153 - RNA, 23 nt, Human
gguggcucacgccuguaauccca

SEQ ID NO: 757154 - RNA, 23 nt, Human
guagagaugggguuucaccaugu

SEQ ID NO: 757155 - RNA, 24 nt, Human
gugauccacccgccucggccuccc

SEQ ID NO: 757156 - RNA, 24 nt, Human
gugaucugcccaccucagucuccc

SEQ ID NO: 757157 - RNA, 21 nt, Human
gugauucuccugccucagccu

SEQ ID NO: 757158 - RNA, 22 nt, Human
guggcucacgccuguaauccca

SEQ ID NO: 757159 - RNA, 19 nt, Human
gugggcggaucacuugagg

SEQ ID NO: 757160 - RNA, 20 nt, Human
guguuguuccaggucuggga

SEQ ID NO: 757161 - RNA, 21 nt, Human
uaaaaaaaaaaaaacccacag

SEQ ID NO: 757162 - RNA, 23 nt, Human
uaaaaaaaaaaaaacccacagag

SEQ ID NO: 757163 - RNA, 18 nt, Human
uaaggccccuucccugga

SEQ ID NO: 757164 - RNA, 24 nt, Human
uaauuuuuguauuuuuaguacaga

SEQ ID NO: 757165 - RNA, 23 nt, Human
uacaggcaugagccaccgcgccc

SEQ ID NO: 757166 - RNA, 23 nt, Human
uacaggugaccaccacuaugccc

SEQ ID NO: 757167 - RNA, 24 nt, Human
uacuggguucaagugauucuccug

SEQ ID NO: 757168 - RNA, 18 nt, Human
uagacuggaccaaggggu

SEQ ID NO: 757169 - RNA, 22 nt, Human
uagagaugggguuucaccaugu

SEQ ID NO: 757170 - RNA, 22 nt, Human
uagauagauagauagauagaca

SEQ ID NO: 757171 - RNA, 22 nt, Human
uagauagauagauagauagaua

SEQ ID NO: 757172 - RNA, 24 nt, Human
uagcacaauuucagcucacugcaa

SEQ ID NO: 757173 - RNA, 24 nt, Human
uagcucacugcagccucaaacucc

SEQ ID NO: 757174 - RNA, 24 nt, Human
uaguacagacaggguuucaccaua

SEQ ID NO: 757175 - RNA, 24 nt, Human
uaguagagaugggguuucaccaug

SEQ ID NO: 757176 - RNA, 26 nt, Human
uaguagagaugggguuucaccauguu

SEQ ID NO: 757177 - RNA, 24 nt, Human
uagucugucacccaggcuggagug

SEQ ID NO: 757178 - RNA, 24 nt, Human
uagugcaauaauagcucacugcag

SEQ ID NO: 757179 - RNA, 22 nt, Human
uauaaaacaugccauccuucaa

SEQ ID NO: 757180 - RNA, 22 nt, Human
uauccuagaccagcauaagaac

SEQ ID NO: 757181 - RNA, 24 nt, Human
uaugucacccaggcuggaaugcag

SEQ ID NO: 757182 - RNA, 31 nt, Human
uauuuuuuuuuuuguguggagauggagucuu

SEQ ID NO: 757183 - RNA, 19 nt, Human
ucaagugauucuccugccu

SEQ ID NO: 757184 - RNA, 19 nt, Human
ucacccaggcuggaaugca

SEQ ID NO: 757185 - RNA, 18 nt, Human
ucacccaggcuggagugc

SEQ ID NO: 757186 - RNA, 24 nt, Human
ucacccaggcuggagugcaguggu

SEQ ID NO: 757187 - RNA, 24 nt, Human
ucacucugucacccaggcuggagu

SEQ ID NO: 757188 - RNA, 24 nt, Human
ucacugcaacuuccgccuacuggg

SEQ ID NO: 757189 - RNA, 24 nt, Human
ucacugcagccucaaacuccuggg

SEQ ID NO: 757190 - RNA, 23 nt, Human
ucacugcagccuccgccuccugg

SEQ ID NO: 757191 - RNA, 24 nt, Human
ucacugcagccuccgccuccuggg

SEQ ID NO: 757192 - RNA, 25 nt, Human
ucacugcagccuccgccuccugggu

SEQ ID NO: 757193 - RNA, 20 nt, Human
ucaggcgauccacccaccuc

SEQ ID NO: 757194 - RNA, 19 nt, Human
ucauugcacucaagccugg

SEQ ID NO: 757195 - RNA, 22 nt, Human
ucauugcacucaagccuggggg

SEQ ID NO: 757196 - RNA, 24 nt, Human
ucauugcacucaagccugggggac

SEQ ID NO: 757197 - RNA, 20 nt, Human
uccacacacagcccuucuca

SEQ ID NO: 757198 - RNA, 18 nt, Human
ucccaaagugcugggauu

SEQ ID NO: 757199 - RNA, 24 nt, Human
ucccaaagugcugggauuacaggc

SEQ ID NO: 757200 - RNA, 22 nt, Human
ucccagccauagacuggaccaa

SEQ ID NO: 757201 - RNA, 23 nt, Human
ucccagccauagacuggaccaag

SEQ ID NO: 757202 - RNA, 20 nt, Human
ucccuuucugcaaaguuaac

SEQ ID NO: 757203 - RNA, 24 nt, Human
uccugaguagcuaggacuacaggu

SEQ ID NO: 757204 - RNA, 20 nt, Human
uccugcaagccaaacaagcu

SEQ ID NO: 757205 - RNA, 18 nt, Human
uccugggcucaagcgauc

SEQ ID NO: 757206 - RNA, 21 nt, Human
uccuggguucacgcgauucuc

SEQ ID NO: 757207 - RNA, 24 nt, Human
uccuggguucacgcgauucuccug

SEQ ID NO: 757208 - RNA, 18 nt, Human
ucggccucccaaagugcu

SEQ ID NO: 757209 - RNA, 19 nt, Human
ucucaccauguugcucaga

SEQ ID NO: 757210 - RNA, 23 nt, Human
ucucacucugucacccaggcugg

SEQ ID NO: 757211 - RNA, 24 nt, Human
ucucacucugucacccaggcugga

SEQ ID NO: 757212 - RNA, 26 nt, Human
ucucacucugucacccaggcuggagu

SEQ ID NO: 757213 - RNA, 27 nt, Human
ucucacucugucacccaggcuggagug

SEQ ID NO: 757214 - RNA, 23 nt, Human
ucuccugccucagccuccagagc

SEQ ID NO: 757215 - RNA, 24 nt, Human
ucuccugccucagccuccugagua

SEQ ID NO: 757216 - RNA, 25 nt, Human
ucucucaaaacaaaaacaaaaacaa

SEQ ID NO: 757217 - RNA, 21 nt, Human
ucugcccaccucagucuccca

SEQ ID NO: 757218 - RNA, 24 nt, Human
ucugucacccaggcuggagugcaa

SEQ ID NO: 757219 - RNA, 24 nt, Human
ucugucacccaggcuggagugcag

SEQ ID NO: 757220 - RNA, 20 nt, Human
ucuguguuguuccaggucug

SEQ ID NO: 757221 - RNA, 24 nt, Human
ucuuagucugucacccaggcugga

SEQ ID NO: 757222 - RNA, 24 nt, Human
ucuugauaugucacccaggcugga

SEQ ID NO: 757223 - RNA, 22 nt, Human
ugaaaccccgucuccaccaaaa

SEQ ID NO: 757224 - RNA, 23 nt, Human
ugaccuugugauccacccgccuc

SEQ ID NO: 757225 - RNA, 22 nt, Human
ugagacggagucuuagucuguc

SEQ ID NO: 757226 - RNA, 24 nt, Human
ugaucugcccaccucagucuccca

SEQ ID NO: 757227 - RNA, 25 nt, Human
ugaucugcccaccucagucucccaa

SEQ ID NO: 757228 - RNA, 20 nt, Human
ugauucuccugccucagccu

SEQ ID NO: 757229 - RNA, 23 nt, Human
ugcaguagggacaaacuagaaac

SEQ ID NO: 757230 - RNA, 24 nt, Human
ugcccggcuaauuuuuguauuuuu

SEQ ID NO: 757231 - RNA, 24 nt, Human
ugccucagccuccagagcagcugg

SEQ ID NO: 757232 - RNA, 24 nt, Human
ugccucagccuccugaguagcuag

SEQ ID NO: 757233 - RNA, 18 nt, Human
ugcuggcagucucuggug

SEQ ID NO: 757234 - RNA, 24 nt, Human
ugcuggcagucucuggugggugga

SEQ ID NO: 757235 - RNA, 20 nt, Human
uggaauugggagacagggau

SEQ ID NO: 757236 - RNA, 25 nt, Human
uggaauugggagacagggauuugug

SEQ ID NO: 757237 - RNA, 18 nt, Human
uggagaagugguaugccc

SEQ ID NO: 757238 - RNA, 18 nt, Human
uggagcaaaagcugcuag

SEQ ID NO: 757239 - RNA, 19 nt, Human
uggagugcagugguaccau

SEQ ID NO: 757240 - RNA, 23 nt, Human
uggagugcagugguaccaucuca

SEQ ID NO: 757241 - RNA, 20 nt, Human
uggcacacuuuugaaaaaca

SEQ ID NO: 757242 - RNA, 18 nt, Human
uggcaguauuuaucaaau

SEQ ID NO: 757243 - RNA, 23 nt, Human
uggcaguauuuaucaaauaacug

SEQ ID NO: 757244 - RNA, 22 nt, Human
uggccaaaaaaggaauaaauau

SEQ ID NO: 757245 - RNA, 24 nt, Human
uggccaggcgcgguggcucacgcc

SEQ ID NO: 757246 - RNA, 24 nt, Human
uggccaggcugaucucaaacuccu

SEQ ID NO: 757247 - RNA, 24 nt, Human
uggcucacgccuguaaucccaaca

SEQ ID NO: 757248 - RNA, 23 nt, Human
uggcucuagcacaccacugggug

SEQ ID NO: 757249 - RNA, 21 nt, Human
ugggaggcagagacagaauug

SEQ ID NO: 757250 - RNA, 19 nt, Human
ugggaggccaaggugggcg

SEQ ID NO: 757251 - RNA, 24 nt, Human
ugggaggccaaggugggcggauca

SEQ ID NO: 757252 - RNA, 18 nt, Human
ugggauuacaggcaugag

SEQ ID NO: 757253 - RNA, 19 nt, Human
ugggauuacaggcaugagc

SEQ ID NO: 757254 - RNA, 21 nt, Human
ugggauuacaggcaugagcca

SEQ ID NO: 757255 - RNA, 22 nt, Human
ugggauuacaggcaugagccac

SEQ ID NO: 757256 - RNA, 23 nt, Human
ugggauuacaggcaugagccacc

SEQ ID NO: 757257 - RNA, 24 nt, Human
ugggauuacaggcaugagccaccg

SEQ ID NO: 757258 - RNA, 24 nt, Human
ugggauuacaggcaugagccaccg

SEQ ID NO: 757259 - RNA, 21 nt, Human
ugggauuagagacaugagcca

SEQ ID NO: 757260 - RNA, 22 nt, Human
ugggauuagagacaugagccau

SEQ ID NO: 757261 - RNA, 24 nt, Human
ugggauuagagacaugagccauug

SEQ ID NO: 757262 - RNA, 24 nt, Human
ugggauuagagacaugagccauug

SEQ ID NO: 757263 - RNA, 23 nt, Human
ugggguuucaccauguuggccag

SEQ ID NO: 757264 - RNA, 20 nt, Human
uggguggcaggagagcagua

SEQ ID NO: 757265 - RNA, 23 nt, Human
uggguucaagugauucuccugcc

SEQ ID NO: 757266 - RNA, 20 nt, Human
uggguucacgcgauucuccu

SEQ ID NO: 757267 - RNA, 19 nt, Human
ugguaccaucucagcucac

SEQ ID NO: 757268 - RNA, 24 nt, Human
ugguaccaucucagcucacugcag

SEQ ID NO: 757269 - RNA, 18 nt, Human
uguaaagucagagcuggg

SEQ ID NO: 757270 - RNA, 23 nt, Human
uguagagaugagcucucaccaug

SEQ ID NO: 757271 - RNA, 22 nt, Human
uguagauauggcacacuuuuga

SEQ ID NO: 757272 - RNA, 20 nt, Human
ugucacccaggcuggagugc

SEQ ID NO: 757273 - RNA, 20 nt, Human
uguugcucagacuggucuug

SEQ ID NO: 757274 - RNA, 25 nt, Human
uuacagugagccgagauugagucau

SEQ ID NO: 757275 - RNA, 18 nt, Human
uuagccgggcaugguggc

SEQ ID NO: 757276 - RNA, 24 nt, Human
uuaguacagacaggguuucaccau

SEQ ID NO: 757277 - RNA, 21 nt, Human
uucaagugauucuccugccuc

SEQ ID NO: 757278 - RNA, 23 nt, Human
uucaagugauucuccugccucag

SEQ ID NO: 757279 - RNA, 24 nt, Human
uucaagugauucuccugccucagc

SEQ ID NO: 757280 - RNA, 20 nt, Human
uuccaacucuauccuagacc

SEQ ID NO: 757281 - RNA, 22 nt, Human
uucccuggaggggaugcuggca

SEQ ID NO: 757282 - RNA, 20 nt, Human
uucuuuuuuuuuuuuuucuu

SEQ ID NO: 757283 - RNA, 22 nt, Human
uugcaccaagauguucaccaca

SEQ ID NO: 757284 - RNA, 24 nt, Human
uugcacucaagccugggggacaag

SEQ ID NO: 757285 - RNA, 18 nt, Human
uuggcuccugcaagccaa

SEQ ID NO: 757286 - RNA, 20 nt, Human
uugggaggcagagacagaau

SEQ ID NO: 757287 - RNA, 24 nt, Human
uuguuugaacccaggaggcggagg

SEQ ID NO: 757288 - RNA, 21 nt, Human
uuucaccauauuggccaggcu

SEQ ID NO: 757289 - RNA, 24 nt, Human
uuucaccauguuggccagaccggu

SEQ ID NO: 757290 - RNA, 25 nt, Human
uuuuauuuuauauauauagauauau

SEQ ID NO: 757291 - RNA, 24 nt, Human
uuuuuaguacagacaggguuucac

SEQ ID NO: 757292 - RNA, 20 nt, Human
uuuuuguauuuuuaguacag

SEQ ID NO: 757293 - RNA, 23 nt, Human
uuuuuguauuuuuaguacagaca

SEQ ID NO: 757294 - RNA, 19 nt, Human
aaaaccaaacgcugcuguc

SEQ ID NO: 757295 - RNA, 21 nt, Human
aaaagcuuugugucaugagaa

SEQ ID NO: 757296 - RNA, 22 nt, Human
aaacccucaccagccccgcccu

SEQ ID NO: 757297 - RNA, 19 nt, Human
aaagugcugggaucugugc

SEQ ID NO: 757298 - RNA, 23 nt, Human
aaagugcugggaucugugcuucg

SEQ ID NO: 757299 - RNA, 19 nt, Human
aaauaaauagauggggaug

SEQ ID NO: 757300 - RNA, 25 nt, Human
aacccgggugggcaggagcacauug

SEQ ID NO: 757301 - RNA, 25 nt, Human
aagaaaaguggauaaaaccaaacgc

SEQ ID NO: 757302 - RNA, 19 nt, Human
aagcacuuuaacaucagga

SEQ ID NO: 757303 - RNA, 18 nt, Human
aagcuagcugaggaggug

SEQ ID NO: 757304 - RNA, 20 nt, Human
aagugcugggaucugugcuu

SEQ ID NO: 757305 - RNA, 21 nt, Human
acacacacacaugcacaugau

SEQ ID NO: 757306 - RNA, 23 nt, Human
acacugugaccacuggggcaccu

SEQ ID NO: 757307 - RNA, 20 nt, Human
accagccccgcccucugacc

SEQ ID NO: 757308 - RNA, 21 nt, Human
acccaggcuggagugcagugu

SEQ ID NO: 757309 - RNA, 21 nt, Human
acccccuguagcagggagagg

SEQ ID NO: 757310 - RNA, 24 nt, Human
acccgggugggcaggagcacauug

SEQ ID NO: 757311 - RNA, 24 nt, Human
accgucacccaggcuggagugcag

SEQ ID NO: 757312 - RNA, 19 nt, Human
acugcagccucaaucuccu

SEQ ID NO: 757313 - RNA, 21 nt, Human
agaaaaguggauaaaaccaaa

SEQ ID NO: 757314 - RNA, 24 nt, Human
agacaggacagggacaguuugugg

SEQ ID NO: 757315 - RNA, 18 nt, Human
agacgagcccacuccccc

SEQ ID NO: 757316 - RNA, 20 nt, Human
agaucucgggggcggggggc

SEQ ID NO: 757317 - RNA, 18 nt, Human
agcagggagaggcuccug

SEQ ID NO: 757318 - RNA, 19 nt, Human
agccugggagccccaagca

SEQ ID NO: 757319 - RNA, 23 nt, Human
agcugaccugagcaauccagcgu

SEQ ID NO: 757320 - RNA, 21 nt, Human
aggcaggacuggcacugaggu

SEQ ID NO: 757321 - RNA, 22 nt, Human
aggcaggacuggcacugagguc

SEQ ID NO: 757322 - RNA, 23 nt, Human
aggcaugcgccaccgugucuggc

SEQ ID NO: 757323 - RNA, 22 nt, Human
aggcuccugggccccagaagcu

SEQ ID NO: 757324 - RNA, 21 nt, Human
aggcugagcagggaaggccac

SEQ ID NO: 757325 - RNA, 19 nt, Human
agggugacaagaccuaaaa

SEQ ID NO: 757326 - RNA, 21 nt, Human
agguccacucugaaggauggc

SEQ ID NO: 757327 - RNA, 20 nt, Human
agugcagugucgcgaucaug

SEQ ID NO: 757328 - RNA, 24 nt, Human
aguuagcugggacuacaggcaugc

SEQ ID NO: 757329 - RNA, 20 nt, Human
aucuccacagaucuucaccg

SEQ ID NO: 757330 - RNA, 20 nt, Human
augcacacccguguuuacaa

SEQ ID NO: 757331 - RNA, 20 nt, Human
augggccugggggcagcccu

SEQ ID NO: 757332 - RNA, 23 nt, Human
auguaggggaggauguggggggc

SEQ ID NO: 757333 - RNA, 21 nt, Human
caaagcucccagaggcaguuc

SEQ ID NO: 757334 - RNA, 22 nt, Human
caacaacaagccgccgccacag

SEQ ID NO: 757335 - RNA, 22 nt, Human
caacaggagccucagcucccag

SEQ ID NO: 757336 - RNA, 21 nt, Human
caagaaaaguggauaaaacca

SEQ ID NO: 757337 - RNA, 18 nt, Human
caagcagcugaccugagc

SEQ ID NO: 757338 - RNA, 22 nt, Human
caagugauccuccugccucagc

SEQ ID NO: 757339 - RNA, 27 nt, Human
caagugauccuccugccucagccuccc

SEQ ID NO: 757340 - RNA, 27 nt, Human
caagugauccuccugccucagccuccc

SEQ ID NO: 757341 - RNA, 23 nt, Human
caaucaggaaggaagcacgccuc

SEQ ID NO: 757342 - RNA, 23 nt, Human
cacaacaacaagccgccgccaca

SEQ ID NO: 757343 - RNA, 21 nt, Human
cacacccagccugggagcccc

SEQ ID NO: 757344 - RNA, 21 nt, Human
cacagaucuucaccgcacacc

SEQ ID NO: 757345 - RNA, 19 nt, Human
cacaugcacacccguguuu

SEQ ID NO: 757346 - RNA, 19 nt, Human
cacauucccaggacuugga

SEQ ID NO: 757347 - RNA, 18 nt, Human
caccgcacacccgugugc

SEQ ID NO: 757348 - RNA, 21 nt, Human
caccgucacccaggcuggagu

SEQ ID NO: 757349 - RNA, 27 nt, Human
cacgcacacacacacaugcacaugauu

SEQ ID NO: 757350 - RNA, 19 nt, Human
cacugcagccucaaucucc

SEQ ID NO: 757351 - RNA, 18 nt, Human
cagcagggaaggugaggc

SEQ ID NO: 757352 - RNA, 23 nt, Human
cagccucaaucuccugggcucaa

SEQ ID NO: 757353 - RNA, 24 nt, Human
cagccucaaucuccugggcucaag

SEQ ID NO: 757354 - RNA, 21 nt, Human
caggaagaaagucccugggcu

SEQ ID NO: 757355 - RNA, 21 nt, Human
caggaaggaagcacgccucgg

SEQ ID NO: 757356 - RNA, 22 nt, Human
cagggaaggccacagaucugcc

SEQ ID NO: 757357 - RNA, 20 nt, Human
cagggccaggcucucccccu

SEQ ID NO: 757358 - RNA, 22 nt, Human
cagggccaggcucucccccugg

SEQ ID NO: 757359 - RNA, 23 nt, Human
cagugcggaacccgggugggcag

SEQ ID NO: 757360 - RNA, 18 nt, Human
caguuccacugagugagg

SEQ ID NO: 757361 - RNA, 18 nt, Human
cauaaagcucgaguagaa

SEQ ID NO: 757362 - RNA, 20 nt, Human
cauccacaugcacacccgug

SEQ ID NO: 757363 - RNA, 19 nt, Human
ccaagcagcugaccugagc

SEQ ID NO: 757364 - RNA, 22 nt, Human
ccacacugugaccacuggggca

SEQ ID NO: 757365 - RNA, 23 nt, Human
ccacuggggcaccuccugauuau

SEQ ID NO: 757366 - RNA, 22 nt, Human
ccagcggaggcucccuggggcc

SEQ ID NO: 757367 - RNA, 20 nt, Human
ccaggcucucccccuggaga

SEQ ID NO: 757368 - RNA, 18 nt, Human
ccagugccacacgcucuc

SEQ ID NO: 757369 - RNA, 19 nt, Human
ccaguuagcugggacuaca

SEQ ID NO: 757370 - RNA, 24 nt, Human
cccaguuagcugggacuacaggca

SEQ ID NO: 757371 - RNA, 19 nt, Human
ccccacccccuguagcagg

SEQ ID NO: 757372 - RNA, 22 nt, Human
ccccagaagcuggagggggugg

SEQ ID NO: 757373 - RNA, 22 nt, Human
ccccgcccucugaccagccugu

SEQ ID NO: 757374 - RNA, 22 nt, Human
ccccuguagcagggagaggcuc

SEQ ID NO: 757375 - RNA, 20 nt, Human
cccgugccacgcacucuaag

SEQ ID NO: 757376 - RNA, 19 nt, Human
cccugacaccugcugcugc

SEQ ID NO: 757377 - RNA, 23 nt, Human
cccugcugagcaggacccccacc

SEQ ID NO: 757378 - RNA, 18 nt, Human
cccugggcuccagaucuc

SEQ ID NO: 757379 - RNA, 24 nt, Human
cccuggggccuggcuagggugccg

SEQ ID NO: 757380 - RNA, 22 nt, Human
cccuggguagcaaaggacaggg

SEQ ID NO: 757381 - RNA, 21 nt, Human
ccgcccucugaccagccuguc

SEQ ID NO: 757382 - RNA, 19 nt, Human
ccgggcucuggaaauugcc

SEQ ID NO: 757383 - RNA, 22 nt, Human
ccucaaucuccugggcucaagu

SEQ ID NO: 757384 - RNA, 21 nt, Human
ccuccugccucagccucccag

SEQ ID NO: 757385 - RNA, 22 nt, Human
ccuccugggagggcagggacug

SEQ ID NO: 757386 - RNA, 20 nt, Human
ccugccucagccucccaguu

SEQ ID NO: 757387 - RNA, 23 nt, Human
ccugccucagccucccaguuagc

SEQ ID NO: 757388 - RNA, 25 nt, Human
ccugcugcugcuaucuugacccgac

SEQ ID NO: 757389 - RNA, 22 nt, Human
ccugggcucaagugauccuccu

SEQ ID NO: 757390 - RNA, 23 nt, Human
ccugggcucaagugauccuccug

SEQ ID NO: 757391 - RNA, 33 nt, Human
ccuguggcuaaggcacacccagccugggagccg

SEQ ID NO: 757392 - RNA, 22 nt, Human
cgagcccacucccccgcuuccu

SEQ ID NO: 757393 - RNA, 22 nt, Human
cgcacacacacacaugcacaug

SEQ ID NO: 757394 - RNA, 21 nt, Human
cgccaaagcucccagaggcag

SEQ ID NO: 757395 - RNA, 21 nt, Human
cgcuuccugccccucagcagc

SEQ ID NO: 757396 - RNA, 19 nt, Human
cggaacccgggugggcagg

SEQ ID NO: 757397 - RNA, 20 nt, Human
cggcgggauggcgaguccgg

SEQ ID NO: 757398 - RNA, 20 nt, Human
cgugugcauccacaugcaca

SEQ ID NO: 757399 - RNA, 18 nt, Human
cuaaaaccaccaccuacc

SEQ ID NO: 757400 - RNA, 21 nt, Human
cuaaaaccaccaccuacccug

SEQ ID NO: 757401 - RNA, 20 nt, Human
cuaugaggcgcugagcgacc

SEQ ID NO: 757402 - RNA, 24 nt, Human
cucaagugauccuccugccucagc

SEQ ID NO: 757403 - RNA, 21 nt, Human
cucacugcagccucaaucucc

SEQ ID NO: 757404 - RNA, 24 nt, Human
cucacugcagccucaaucuccugg

SEQ ID NO: 757405 - RNA, 21 nt, Human
cucccccgcuuccugccccuc

SEQ ID NO: 757406 - RNA, 20 nt, Human
cuccugauuauccaagaaaa

SEQ ID NO: 757407 - RNA, 19 nt, Human
cuccugggccccagaagcu

SEQ ID NO: 757408 - RNA, 25 nt, Human
cuccugggcucaagugauccuccug

SEQ ID NO: 757409 - RNA, 20 nt, Human
cucuacauacaaaaugcccu

SEQ ID NO: 757410 - RNA, 19 nt, Human
cugagcaggacccccaccc

SEQ ID NO: 757411 - RNA, 23 nt, Human
cuggccgacgugacccagaugcu

SEQ ID NO: 757412 - RNA, 21 nt, Human
cugugaccacuggggcaccuc

SEQ ID NO: 757413 - RNA, 24 nt, Human
cuugacccgaccacccgccccaac

SEQ ID NO: 757414 - RNA, 19 nt, Human
gacaguuugugggccagug

SEQ ID NO: 757415 - RNA, 20 nt, Human
gacccgaccacccgccccaa

SEQ ID NO: 757416 - RNA, 22 nt, Human
gaccugcuggaggccugcaccc

SEQ ID NO: 757417 - RNA, 20 nt, Human
gacuacaggcaugcgccacc

SEQ ID NO: 757418 - RNA, 21 nt, Human
gacuggcacugagguccacuc

SEQ ID NO: 757419 - RNA, 19 nt, Human
gaggaagacaggacaggga

SEQ ID NO: 757420 - RNA, 18 nt, Human
gaggcgguggagggagug

SEQ ID NO: 757421 - RNA, 20 nt, Human
gauguggggggcuccuucaa

SEQ ID NO: 757422 - RNA, 27 nt, Human
gcacacccagccugggagccccaagca

SEQ ID NO: 757423 - RNA, 21 nt, Human
gccucagcucccagcuccauc

SEQ ID NO: 757424 - RNA, 21 nt, Human
gcggaacccgggugggcagga

SEQ ID NO: 757425 - RNA, 21 nt, Human
gcucacugcagccucaaucuc

SEQ ID NO: 757426 - RNA, 23 nt, Human
gcugcugucugggcccagcggag

SEQ ID NO: 757427 - RNA, 20 nt, Human
ggaaggugaggcgguggagg

SEQ ID NO: 757428 - RNA, 19 nt, Human
ggacagugcggaacccggg

SEQ ID NO: 757429 - RNA, 19 nt, Human
ggaccaagaggcugagcag

SEQ ID NO: 757430 - RNA, 21 nt, Human
ggacuacaggcaugcgccacc

SEQ ID NO: 757431 - RNA, 24 nt, Human
ggacuacaggcaugcgccaccgug

SEQ ID NO: 757432 - RNA, 28 nt, Human
ggagacgagcccacucccccgcuuccuu

SEQ ID NO: 757433 - RNA, 24 nt, Human
ggaggauguggggggcuccuucaa

SEQ ID NO: 757434 - RNA, 21 nt, Human
ggaggggguggugucuugagc

SEQ ID NO: 757435 - RNA, 20 nt, Human
ggcaguuccacugagugagg

SEQ ID NO: 757436 - RNA, 23 nt, Human
ggccacagaucugccaggaagaa

SEQ ID NO: 757437 - RNA, 18 nt, Human
ggccaggcucucccccug

SEQ ID NO: 757438 - RNA, 21 nt, Human
ggccccgcacauucccaggac

SEQ ID NO: 757439 - RNA, 24 nt, Human
gggaccaagaggcugagcagggaa

SEQ ID NO: 757440 - RNA, 21 nt, Human
gggcucaagugauccuccugc

SEQ ID NO: 757441 - RNA, 22 nt, Human
gggcucaagugauccuccugcc

SEQ ID NO: 757442 - RNA, 25 nt, Human
ggggggaccaagaggcugagcaggg

SEQ ID NO: 757443 - RNA, 24 nt, Human
gucaggcguggugccccuggggca

SEQ ID NO: 757444 - RNA, 23 nt, Human
gucccugggcuccagaucucggg

SEQ ID NO: 757445 - RNA, 23 nt, Human
gucucaccgucacccaggcugga

SEQ ID NO: 757446 - RNA, 24 nt, Human
gugauccuccugccucagccuccc

SEQ ID NO: 757447 - RNA, 27 nt, Human
gugcauccacaugcacacccguguuua

SEQ ID NO: 757448 - RNA, 18 nt, Human
guggagcuagcagaggcc

SEQ ID NO: 757449 - RNA, 20 nt, Human
guggggggaccaagaggcug

SEQ ID NO: 757450 - RNA, 19 nt, Human
uaaacuuaagaucucaucc

SEQ ID NO: 757451 - RNA, 20 nt, Human
uaggacaaacccucaccagc

SEQ ID NO: 757452 - RNA, 25 nt, Human
uaggacaaacccucaccagccccgc

SEQ ID NO: 757453 - RNA, 24 nt, Human
uaucaaaagcuuugugucaugaga

SEQ ID NO: 757454 - RNA, 24 nt, Human
ucacccaggcuggagugcaguguc

SEQ ID NO: 757455 - RNA, 23 nt, Human
ucacugcagccucaaucuccugg

SEQ ID NO: 757456 - RNA, 24 nt, Human
ucacugcagccucaaucuccuggg

SEQ ID NO: 757457 - RNA, 24 nt, Human
ucagcagccacaagaugggggaag

SEQ ID NO: 757458 - RNA, 24 nt, Human
ucagcucccagcuccaucuccaca

SEQ ID NO: 757459 - RNA, 21 nt, Human
uccacaacaacaagccgccgc

SEQ ID NO: 757460 - RNA, 23 nt, Human
uccagaucucgggggcggggggc

SEQ ID NO: 757461 - RNA, 23 nt, Human
uccaucuccacagaucuucaccg

SEQ ID NO: 757462 - RNA, 18 nt, Human
ucccaggacuuggaagcu

SEQ ID NO: 757463 - RNA, 24 nt, Human
ucccaguuagcugggacuacaggc

SEQ ID NO: 757464 - RNA, 24 nt, Human
ucccccgcuuccugccccucagca

SEQ ID NO: 757465 - RNA, 19 nt, Human
ucccugggcuccagaucuc

SEQ ID NO: 757466 - RNA, 25 nt, Human
ucccugggcuccagaucucgggggc

SEQ ID NO: 757467 - RNA, 23 nt, Human
ucccuggggccuggcuagggugc

SEQ ID NO: 757468 - RNA, 22 nt, Human
uccuccugccucagccucccag

SEQ ID NO: 757469 - RNA, 27 nt, Human
uccuccugccucagccucccaguuagc

SEQ ID NO: 757470 - RNA, 21 nt, Human
uccugggcucaagugauccuc

SEQ ID NO: 757471 - RNA, 22 nt, Human
uccugggcucaagugauccucc

SEQ ID NO: 757472 - RNA, 24 nt, Human
uccugggcucaagugauccuccug

SEQ ID NO: 757473 - RNA, 19 nt, Human
uccugggucccugaggguu

SEQ ID NO: 757474 - RNA, 20 nt, Human
uccugggucccugaggguuc

SEQ ID NO: 757475 - RNA, 22 nt, Human
ucucaccgucacccaggcugga

SEQ ID NO: 757476 - RNA, 24 nt, Human
ucucaccgucacccaggcuggagu

SEQ ID NO: 757477 - RNA, 21 nt, Human
ucuugagcccugacaccugcu

SEQ ID NO: 757478 - RNA, 20 nt, Human
ugacccagaugcugaggcag

SEQ ID NO: 757479 - RNA, 21 nt, Human
ugacccgaccacccgccccaa

SEQ ID NO: 757480 - RNA, 19 nt, Human
ugagaagaugcggcugugg

SEQ ID NO: 757481 - RNA, 22 nt, Human
ugagaagaugcggcuguggaag

SEQ ID NO: 757482 - RNA, 18 nt, Human
ugagcaggacccccaccc

SEQ ID NO: 757483 - RNA, 24 nt, Human
ugaggcaggacuggcacugagguc

SEQ ID NO: 757484 - RNA, 19 nt, Human
ugcacacacgcacacacac

SEQ ID NO: 757485 - RNA, 26 nt, Human
ugcacacacgcacacacacacaugca

SEQ ID NO: 757486 - RNA, 25 nt, Human
ugcacacacgcacacacacacaugg

SEQ ID NO: 757487 - RNA, 21 nt, Human
ugccaggaagaaagucccugg

SEQ ID NO: 757488 - RNA, 23 nt, Human
ugccaggaagaaagucccugggc

SEQ ID NO: 757489 - RNA, 26 nt, Human
ugccaggaagaaagucccugggcucc

SEQ ID NO: 757490 - RNA, 18 nt, Human
ugccucagccucccaguu

SEQ ID NO: 757491 - RNA, 24 nt, Human
ugccucagccucccaguuagcugg

SEQ ID NO: 757492 - RNA, 18 nt, Human
ugccuguggcuaaggcaa

SEQ ID NO: 757493 - RNA, 19 nt, Human
ugcuggagagaaagcuggg

SEQ ID NO: 757494 - RNA, 18 nt, Human
uggagacacaaguggugg

SEQ ID NO: 757495 - RNA, 22 nt, Human
uggaggccugcacccuacuccu

SEQ ID NO: 757496 - RNA, 22 nt, Human
uggaggggguggugucuugagc

SEQ ID NO: 757497 - RNA, 19 nt, Human
uggagugcagugucgcgau

SEQ ID NO: 757498 - RNA, 19 nt, Human
uggcucgggaggaagacag

SEQ ID NO: 757499 - RNA, 21 nt, Human
ugggacuacaggcaugcgcca

SEQ ID NO: 757500 - RNA, 22 nt, Human
ugggacuacaggcaugcgccac

SEQ ID NO: 757501 - RNA, 23 nt, Human
ugggacuacaggcaugcgccacc

SEQ ID NO: 757502 - RNA, 24 nt, Human
ugggacuacaggcaugcgccaccg

SEQ ID NO: 757503 - RNA, 21 nt, Human
ugggagggcagggacuggccc

SEQ ID NO: 757504 - RNA, 20 nt, Human
ugggcucaagugauccuccu

SEQ ID NO: 757505 - RNA, 24 nt, Human
ugggcucaagugauccuccugccu

SEQ ID NO: 757506 - RNA, 30 nt, Human
uucaaagcuugcacacacgcacacacacag

SEQ ID NO: 757507 - RNA, 23 nt, Human
uuccugccccucagcagccacaa

SEQ ID NO: 757508 - RNA, 22 nt, Human
uuccugggucccugaggguucc

SEQ ID NO: 757509 - RNA, 20 nt, Human
uuggaagcucuagagacaau

SEQ ID NO: 757510 - RNA, 22 nt, Human
uuuggaagcugaguuccugggu

SEQ ID NO: 757511 - RNA, 25 nt, Human
aaaaaagggccuauaccauguagua

SEQ ID NO: 757512 - RNA, 25 nt, Human
aaacagugcaagaaaaaaauccaaa

SEQ ID NO: 757513 - RNA, 19 nt, Human
aaagaccaaggaaugcauu

SEQ ID NO: 757514 - RNA, 22 nt, Human
aaauguuagaaucuacaaagcu

SEQ ID NO: 757515 - RNA, 29 nt, Human
aagaaaaaaauccaaauaagcuuuuggaa

SEQ ID NO: 757516 - RNA, 18 nt, Human
aagaaaaaagggccuaua

SEQ ID NO: 757517 - RNA, 22 nt, Human
aagcaaccauguaacuuuugag

SEQ ID NO: 757518 - RNA, 23 nt, Human
aagcaaccauguaacuuuugagu

SEQ ID NO: 757519 - RNA, 22 nt, Human
aauaacaccacccaacaccucc

SEQ ID NO: 757520 - RNA, 22 nt, Human
aaucugggaggaacuugguugc

SEQ ID NO: 757521 - RNA, 24 nt, Human
aauuuucacaacucaguagucuua

SEQ ID NO: 757522 - RNA, 21 nt, Human
acauagcauuucaagccaugc

SEQ ID NO: 757523 - RNA, 20 nt, Human
acuaagaagcaguuuuucau

SEQ ID NO: 757524 - RNA, 22 nt, Human
acuguuauuuaggcaaagacca

SEQ ID NO: 757525 - RNA, 21 nt, Human
agcggcggaggagaacgcggc

SEQ ID NO: 757526 - RNA, 18 nt, Human
augcuugcuacauacagu

SEQ ID NO: 757527 - RNA, 22 nt, Human
caacagaugaaaaaugcuugcu

SEQ ID NO: 757528 - RNA, 20 nt, Human
caacgagacuacauauagca

SEQ ID NO: 757529 - RNA, 20 nt, Human
caagaaaaaaauccaaauaa

SEQ ID NO: 757530 - RNA, 22 nt, Human
caagaaaaaaauccaaauaagc

SEQ ID NO: 757531 - RNA, 23 nt, Human
cacaaaacagugcaagaaaaaaa

SEQ ID NO: 757532 - RNA, 24 nt, Human
cacagcagcacgagcucacaugga

SEQ ID NO: 757533 - RNA, 21 nt, Human
cacaguuacacuucuaauacc

SEQ ID NO: 757534 - RNA, 18 nt, Human
cacauggaagacugaaag

SEQ ID NO: 757535 - RNA, 21 nt, Human
caccacccaacaccuccuauc

SEQ ID NO: 757536 - RNA, 25 nt, Human
cauuucaagccaugcuauggucuau

SEQ ID NO: 757537 - RNA, 23 nt, Human
ccaaauaagcuuuuggagugcaa

SEQ ID NO: 757538 - RNA, 18 nt, Human
ccccgaagcggccggcuc

SEQ ID NO: 757539 - RNA, 18 nt, Human
ccggaggagcggcggagg

SEQ ID NO: 757540 - RNA, 22 nt, Human
ccggcggccagggccccgaagc

SEQ ID NO: 757541 - RNA, 23 nt, Human
ccuucucacguccgccccucccg

SEQ ID NO: 757542 - RNA, 19 nt, Human
cucuucugcagacuuuggc

SEQ ID NO: 757543 - RNA, 25 nt, Human
cuguaccaucaaguguugcaucaca

SEQ ID NO: 757544 - RNA, 20 nt, Human
cuucgugcuaaaccacuuuc

SEQ ID NO: 757545 - RNA, 24 nt, Human
gaagacaagugauaauacaauaug

SEQ ID NO: 757546 - RNA, 18 nt, Human
gaaucuacaaagcuguag

SEQ ID NO: 757547 - RNA, 22 nt, Human
gccggcggccagggccccgaag

SEQ ID NO: 757548 - RNA, 19 nt, Human
ggaauaacaccacccaaca

SEQ ID NO: 757549 - RNA, 20 nt, Human
ggcggccagggccccgaagc

SEQ ID NO: 757550 - RNA, 26 nt, Human
uaaacuaagaagcaguuuuucauuca

SEQ ID NO: 757551 - RNA, 25 nt, Human
uaagucucugugcuuuugcugcaua

SEQ ID NO: 757552 - RNA, 25 nt, Human
uauuauggaauucugaccucuagaa

SEQ ID NO: 757553 - RNA, 23 nt, Human
ucacagcagcacgagcucacaug

SEQ ID NO: 757554 - RNA, 18 nt, Human
ucccuggguuuaagaaaa

SEQ ID NO: 757555 - RNA, 21 nt, Human
ugaaauaauagcacaguuaca

SEQ ID NO: 757556 - RNA, 24 nt, Human
ugcaagaaaaaaauccaaauaagc

SEQ ID NO: 757557 - RNA, 20 nt, Human
ugcauucaaaaaacugaagu

SEQ ID NO: 757558 - RNA, 21 nt, Human
uggagugcacaccaacaacug

SEQ ID NO: 757559 - RNA, 19 nt, Human
uucaaaaaacugaaguuaa

SEQ ID NO: 757560 - RNA, 23 nt, Human
uucaucuuuaaacuccauaauga

SEQ ID NO: 757561 - RNA, 21 nt, Human
uuccuggacacuauguucuuc

SEQ ID NO: 757562 - RNA, 22 nt, Human
uuucauucaucuuuaaacucca

SEQ ID NO: 757563 - RNA, 18 nt, Human
uuuugagugacauauauu

SEQ ID NO: 757564 - RNA, 19 nt, Human
aaaaaaaaaaagcaucaag

SEQ ID NO: 757565 - RNA, 25 nt, Human
aaaaaagacauggaaacugccaaaa

SEQ ID NO: 757566 - RNA, 18 nt, Human
aaaaaauuccacccccca

SEQ ID NO: 757567 - RNA, 22 nt, Human
aaaaagaaaaaaggagagguaa

SEQ ID NO: 757568 - RNA, 26 nt, Human
aaacaaacaaacaaacaaacaaaccc

SEQ ID NO: 757569 - RNA, 22 nt, Human
aaacaaacaaacaaacaaaccc

SEQ ID NO: 757570 - RNA, 23 nt, Human
aaacaaacaaacaaacaaaccca

SEQ ID NO: 757571 - RNA, 18 nt, Human
aaacaaacaaacccacaa

SEQ ID NO: 757572 - RNA, 22 nt, Human
aaacaaacaaacccacaacaca

SEQ ID NO: 757573 - RNA, 24 nt, Human
aaacaguagucagaaagccaugca

SEQ ID NO: 757574 - RNA, 20 nt, Human
aaagaaaagaugggaaagaa

SEQ ID NO: 757575 - RNA, 18 nt, Human
aaagacauggaaacugcc

SEQ ID NO: 757576 - RNA, 22 nt, Human
aaagcugaaagcugcuaaaaag

SEQ ID NO: 757577 - RNA, 24 nt, Human
aaauugcugggauuacaggcguga

SEQ ID NO: 757578 - RNA, 26 nt, Human
aacaaacaaacaaacaaacaaaccca

SEQ ID NO: 757579 - RNA, 21 nt, Human
aacaaacccacaacacacuca

SEQ ID NO: 757580 - RNA, 20 nt, Human
aacacacucacacuaaccaa

SEQ ID NO: 757581 - RNA, 25 nt, Human
aacacacucacacuaaccaaggcua

SEQ ID NO: 757582 - RNA, 22 nt, Human
aacacaguuuggugguuagucu

SEQ ID NO: 757583 - RNA, 21 nt, Human
aacauuugguuuuuuccuccu

SEQ ID NO: 757584 - RNA, 19 nt, Human
aaccaaggcuagagagcac

SEQ ID NO: 757585 - RNA, 22 nt, Human
aaccagcuugcgaaaagaguuc

SEQ ID NO: 757586 - RNA, 22 nt, Human
aagaaaacaaagcacagcuuga

SEQ ID NO: 757587 - RNA, 19 nt, Human
aagaaaaccaagcaaaaau

SEQ ID NO: 757588 - RNA, 19 nt, Human
aagaagaaaacaaagcaca

SEQ ID NO: 757589 - RNA, 27 nt, Human
aagaagaaaacaaagcacagcuugaaa

SEQ ID NO: 757590 - RNA, 19 nt, Human
aagaagguuuuaguuuaga

SEQ ID NO: 757591 - RNA, 20 nt, Human
aagagaauaaggugggagag

SEQ ID NO: 757592 - RNA, 18 nt, Human
aagaugccaagcucaaaa

SEQ ID NO: 757593 - RNA, 27 nt, Human
aaggcaaaaggugagcaaaagggaccc

SEQ ID NO: 757594 - RNA, 24 nt, Human
aagugauccacuugccucggccuc

SEQ ID NO: 757595 - RNA, 19 nt, Human
aagugucccuacaaagagg

SEQ ID NO: 757596 - RNA, 18 nt, Human
acaaacaaacaaacaaac

SEQ ID NO: 757597 - RNA, 18 nt, Human
acaaacaaacaaacaaac

SEQ ID NO: 757598 - RNA, 21 nt, Human
acaaacaaacaaacccacaac

SEQ ID NO: 757599 - RNA, 30 nt, Human
acaaacccacaacacacucacacuaaccaa

SEQ ID NO: 757600 - RNA, 19 nt, Human
acaaagaagaaaacaaagc

SEQ ID NO: 757601 - RNA, 22 nt, Human
acacuaaccaaggcuagagagc

SEQ ID NO: 757602 - RNA, 18 nt, Human
acacuacuacucugagag

SEQ ID NO: 757603 - RNA, 21 nt, Human
accaaaaaaaaaaaaagcauc

SEQ ID NO: 757604 - RNA, 19 nt, Human
accaugggguauguugggg

SEQ ID NO: 757605 - RNA, 18 nt, Human
acuggguuucaucauguu

SEQ ID NO: 757606 - RNA, 19 nt, Human
acuggguuucaucauguug

SEQ ID NO: 757607 - RNA, 20 nt, Human
acuggguuucaucauguugg

SEQ ID NO: 757608 - RNA, 23 nt, Human
acuggguuucaucauguuggcca

SEQ ID NO: 757609 - RNA, 18 nt, Human
agaaaacaaagcacagcu

SEQ ID NO: 757610 - RNA, 19 nt, Human
agaaagccaugcagccuaa

SEQ ID NO: 757611 - RNA, 23 nt, Human
agacauggaaacugccaaaaaug

SEQ ID NO: 757612 - RNA, 23 nt, Human
agacuggguuucaucauguuggc

SEQ ID NO: 757613 - RNA, 22 nt, Human
agaggugugaucucagcucugc

SEQ ID NO: 757614 - RNA, 22 nt, Human
agccaugcagccuaaaauagcc

SEQ ID NO: 757615 - RNA, 24 nt, Human
agcgauucuccugccucagccucc

SEQ ID NO: 757616 - RNA, 21 nt, Human
agcugggaauacagaggccug

SEQ ID NO: 757617 - RNA, 21 nt, Human
aggcaguucuaugaacauuug

SEQ ID NO: 757618 - RNA, 22 nt, Human
agguuuuaguuuagaggaaagg

SEQ ID NO: 757619 - RNA, 19 nt, Human
agugcagaggugugaucuc

SEQ ID NO: 757620 - RNA, 23 nt, Human
auagaacaaagaagaaaacaaag

SEQ ID NO: 757621 - RNA, 24 nt, Human
auagaacaaagaagaaaacaaagc

SEQ ID NO: 757622 - RNA, 19 nt, Human
auagagcagucuccaggag

SEQ ID NO: 757623 - RNA, 24 nt, Human
augcagaauaaaauaaauagaccc

SEQ ID NO: 757624 - RNA, 24 nt, Human
caaaagaaaaccaagcaaaaauga

SEQ ID NO: 757625 - RNA, 21 nt, Human
caaaaggcaaaaggugagcaa

SEQ ID NO: 757626 - RNA, 23 nt, Human
caaacaaacaaacaaacccacaa

SEQ ID NO: 757627 - RNA, 21 nt, Human
caaacaaacaaacccacaaca

SEQ ID NO: 757628 - RNA, 21 nt, Human
caaacacuacuacucugagag

SEQ ID NO: 757629 - RNA, 24 nt, Human
caaauugcugggauuacaggcgug

SEQ ID NO: 757630 - RNA, 27 nt, Human
caacuacaucaaaaaccauagaacaaa

SEQ ID NO: 757631 - RNA, 18 nt, Human
caagaguucaaaugaaca

SEQ ID NO: 757632 - RNA, 22 nt, Human
caagcgauucuccugccucagc

SEQ ID NO: 757633 - RNA, 27 nt, Human
caagcgauucuccugccucagccuccc

SEQ ID NO: 757634 - RNA, 22 nt, Human
caagugauccacuugccucggc

SEQ ID NO: 757635 - RNA, 19 nt, Human
cacacacucacacacauau

SEQ ID NO: 757636 - RNA, 24 nt, Human
cacacaguccaacggaggaggcac

SEQ ID NO: 757637 - RNA, 24 nt, Human
cacacucacacacauauagggcca

SEQ ID NO: 757638 - RNA, 19 nt, Human
caccaugcacagaaagggu

SEQ ID NO: 757639 - RNA, 24 nt, Human
caccaugccuggcuaauuuuugua

SEQ ID NO: 757640 - RNA, 23 nt, Human
caccccccaccccauuuuuugga

SEQ ID NO: 757641 - RNA, 21 nt, Human
caccucaacuacaucaaaaac

SEQ ID NO: 757642 - RNA, 22 nt, Human
cagaauaaaauaaauagaccca

SEQ ID NO: 757643 - RNA, 23 nt, Human
cagcuugcgaaaagaguucaccu

SEQ ID NO: 757644 - RNA, 22 nt, Human
caggcaaagauuucgcuggaaa

SEQ ID NO: 757645 - RNA, 21 nt, Human
cagucuccaggaguauaaucc

SEQ ID NO: 757646 - RNA, 25 nt, Human
cagucuccaggaguauaaucccaua

SEQ ID NO: 757647 - RNA, 24 nt, Human
caucauguuggccacgcuggucuu

SEQ ID NO: 757648 - RNA, 22 nt, Human
cauggaaacugccaaaaauggc

SEQ ID NO: 757649 - RNA, 20 nt, Human
cauguuggccacgcuggucu

SEQ ID NO: 757650 - RNA, 20 nt, Human
cauguuggccacgcuggucu

SEQ ID NO: 757651 - RNA, 23 nt, Human
cauugagaacuuucugaacuuuc

SEQ ID NO: 757652 - RNA, 24 nt, Human
ccaaauagcugggaauacagaggc

SEQ ID NO: 757653 - RNA, 20 nt, Human
ccaaauugcugggauuacag

SEQ ID NO: 757654 - RNA, 22 nt, Human
ccaaauugcugggauuacaggc

SEQ ID NO: 757655 - RNA, 22 nt, Human
ccaaauugcugggauuacaggc

SEQ ID NO: 757656 - RNA, 24 nt, Human
ccaaauugcugggauuacaggcgu

SEQ ID NO: 757657 - RNA, 23 nt, Human
ccacaacacacucacacuaacca

SEQ ID NO: 757658 - RNA, 18 nt, Human
ccaccgcgcccggccucc

SEQ ID NO: 757659 - RNA, 23 nt, Human
ccagcaucaccauccgucaccuc

SEQ ID NO: 757660 - RNA, 18 nt, Human
ccaggcaguucuaugaac

SEQ ID NO: 757661 - RNA, 22 nt, Human
cccacaacacacucacacuaac

SEQ ID NO: 757662 - RNA, 24 nt, Human
cccacaacacacucacacuaacca

SEQ ID NO: 757663 - RNA, 20 nt, Human
cccaggcuggagugcagagg

SEQ ID NO: 757664 - RNA, 20 nt, Human
ccugaccucaagugauccac

SEQ ID NO: 757665 - RNA, 20 nt, Human
ccugaccucaagugauccac

SEQ ID NO: 757666 - RNA, 23 nt, Human
ccugaccucaagugauccacuug

SEQ ID NO: 757667 - RNA, 24 nt, Human
cgcucugucacccaggcuggagug

SEQ ID NO: 757668 - RNA, 19 nt, Human
cuacuuaccaugaugucuu

SEQ ID NO: 757669 - RNA, 23 nt, Human
cucaagugauccacuugccucgg

SEQ ID NO: 757670 - RNA, 25 nt, Human
cuccugccucagccucccaaauagc

SEQ ID NO: 757671 - RNA, 24 nt, Human
cucgcucugucacccaggcuggag

SEQ ID NO: 757672 - RNA, 25 nt, Human
cucucucucucuuacucucucucgu

SEQ ID NO: 757673 - RNA, 24 nt, Human
cucugcauauauuugaagaauccc

SEQ ID NO: 757674 - RNA, 23 nt, Human
cugccucagccucccaaauagcu

SEQ ID NO: 757675 - RNA, 24 nt, Human
cugccucccgaauucaagcgauuc

SEQ ID NO: 757676 - RNA, 24 nt, Human
cuggagugcagaggugugaucuca

SEQ ID NO: 757677 - RNA, 19 nt, Human
cuggguuucaucauguugg

SEQ ID NO: 757678 - RNA, 20 nt, Human
cuugccucggccucccaaau

SEQ ID NO: 757679 - RNA, 21 nt, Human
cuugccucggccucccaaauu

SEQ ID NO: 757680 - RNA, 20 nt, Human
gaaacugaucuuugagguug

SEQ ID NO: 757681 - RNA, 20 nt, Human
gaaagccaugcagccuaaaa

SEQ ID NO: 757682 - RNA, 24 nt, Human
gaagaaaacaaagcacagcuugaa

SEQ ID NO: 757683 - RNA, 25 nt, Human
gaaggcagacagaggcaaaggaagg

SEQ ID NO: 757684 - RNA, 24 nt, Human
gaccucaagugauccacuugccuc

SEQ ID NO: 757685 - RNA, 19 nt, Human
gaggcugacgggaagcaga

SEQ ID NO: 757686 - RNA, 23 nt, Human
gauggcaugagaaaaacuaggaa

SEQ ID NO: 757687 - RNA, 18 nt, Human
gauuacaggcgugagcca

SEQ ID NO: 757688 - RNA, 22 nt, Human
gauuacaggcgugagccaccgc

SEQ ID NO: 757689 - RNA, 22 nt, Human
gauuacaggcgugagccaccgc

SEQ ID NO: 757690 - RNA, 25 nt, Human
gcacagcuugaaaaggaagggaacc

SEQ ID NO: 757691 - RNA, 24 nt, Human
gcgauucuccugccucagccuccc

SEQ ID NO: 757692 - RNA, 25 nt, Human
gcucugucacccaggcuggagugca

SEQ ID NO: 757693 - RNA, 23 nt, Human
gcugacgggaagcagaggaggaa

SEQ ID NO: 757694 - RNA, 21 nt, Human
gcugcuaaaaagaaaaaagga

SEQ ID NO: 757695 - RNA, 19 nt, Human
gcuggagugcagaggugug

SEQ ID NO: 757696 - RNA, 23 nt, Human
gcuggucuugaacuccugaccuc

SEQ ID NO: 757697 - RNA, 21 nt, Human
ggaaaaaaaaauuccaccccc

SEQ ID NO: 757698 - RNA, 22 nt, Human
ggagaaagaauggaagguuacg

SEQ ID NO: 757699 - RNA, 22 nt, Human
ggcacacacucacacacauaua

SEQ ID NO: 757700 - RNA, 24 nt, Human
ggcagacagaggcaaaggaaggga

SEQ ID NO: 757701 - RNA, 23 nt, Human
gggaagcagaggaggaaaugaag

SEQ ID NO: 757702 - RNA, 20 nt, Human
ggguuucaucauguuggcca

SEQ ID NO: 757703 - RNA, 19 nt, Human
ggucuugaacuccugaccu

SEQ ID NO: 757704 - RNA, 18 nt, Human
guagucagaaagccaugc

SEQ ID NO: 757705 - RNA, 24 nt, Human
gugauccacuugccucggccuccc

SEQ ID NO: 757706 - RNA, 24 nt, Human
guggcacguuugcacugggugcuu

SEQ ID NO: 757707 - RNA, 23 nt, Human
uaaaaaauuuccagucgaggucc

SEQ ID NO: 757708 - RNA, 19 nt, Human
uaaaacaacaaaguagagu

SEQ ID NO: 757709 - RNA, 20 nt, Human
uaaaacaguagucagaaagc

SEQ ID NO: 757710 - RNA, 22 nt, Human
uaaaacaguagucagaaagcca

SEQ ID NO: 757711 - RNA, 20 nt, Human
uaaaauaaauagacccauua

SEQ ID NO: 757712 - RNA, 23 nt, Human
uaaaauagccagcaucaccaucc

SEQ ID NO: 757713 - RNA, 26 nt, Human
uaaccaaaaaaaaaaaaagcaucaag

SEQ ID NO: 757714 - RNA, 23 nt, Human
uaagaaaacaaacaaacaaacaa

SEQ ID NO: 757715 - RNA, 27 nt, Human
uaagaaaacaaacaaacaaacaaacaa

SEQ ID NO: 757716 - RNA, 19 nt, Human
uaagcgucuccauuuuuuc

SEQ ID NO: 757717 - RNA, 24 nt, Human
uaauuuuuguauuuuuaguagaga

SEQ ID NO: 757718 - RNA, 23 nt, Human
uacaggcgugagccaccgcgccc

SEQ ID NO: 757719 - RNA, 27 nt, Human
uacaucaaaaaccauagaacaaagaag

SEQ ID NO: 757720 - RNA, 24 nt, Human
uaccuaaccaaaaaaaaaaaaagc

SEQ ID NO: 757721 - RNA, 26 nt, Human
uagaacaaagaagaaaacaaagcaca

SEQ ID NO: 757722 - RNA, 23 nt, Human
uagccagcaucaccauccgucac

SEQ ID NO: 757723 - RNA, 24 nt, Human
uaguagagacuggguuucaucaug

SEQ ID NO: 757724 - RNA, 18 nt, Human
uaguuuagaggaaaggga

SEQ ID NO: 757725 - RNA, 20 nt, Human
ucaaaugaacacauuucuca

SEQ ID NO: 757726 - RNA, 21 nt, Human
ucaagugauccacuugccucg

SEQ ID NO: 757727 - RNA, 18 nt, Human
ucacccaggcuggagugc

SEQ ID NO: 757728 - RNA, 22 nt, Human
ucagagaaggcagacagaggca

SEQ ID NO: 757729 - RNA, 18 nt, Human
ucagaguguggugacagu

SEQ ID NO: 757730 - RNA, 20 nt, Human
ucagccucccaaauagcugg

SEQ ID NO: 757731 - RNA, 24 nt, Human
ucccaaauugcugggauuacaggc

SEQ ID NO: 757732 - RNA, 21 nt, Human
ucccgaauucaagcgauucuc

SEQ ID NO: 757733 - RNA, 24 nt, Human
ucccgaauucaagcgauucuccug

SEQ ID NO: 757734 - RNA, 24 nt, Human
ucgcucugucacccaggcuggagu

SEQ ID NO: 757735 - RNA, 26 nt, Human
ucuaacucugucuggcagaggcugag

SEQ ID NO: 757736 - RNA, 25 nt, Human
ucuaggaaggauagagcagucucca

SEQ ID NO: 757737 - RNA, 19 nt, Human
ucucgcucugucacccagg

SEQ ID NO: 757738 - RNA, 23 nt, Human
ucucgcucugucacccaggcugg

SEQ ID NO: 757739 - RNA, 24 nt, Human
ucucgcucugucacccaggcugga

SEQ ID NO: 757740 - RNA, 26 nt, Human
ucucgcucugucacccaggcuggagu

SEQ ID NO: 757741 - RNA, 27 nt, Human
ucucgcucugucacccaggcuggagug

SEQ ID NO: 757742 - RNA, 18 nt, Human
ucucuaaagauaccuuuu

SEQ ID NO: 757743 - RNA, 24 nt, Human
ucugucacccaggcuggagugcag

SEQ ID NO: 757744 - RNA, 21 nt, Human
ucuugaacuccugaccucaag

SEQ ID NO: 757745 - RNA, 19 nt, Human
ucuuucucucucucucucc

SEQ ID NO: 757746 - RNA, 23 nt, Human
ucuuuuuucagaguguggugaca

SEQ ID NO: 757747 - RNA, 20 nt, Human
ugaaaaggaacugauggcau

SEQ ID NO: 757748 - RNA, 19 nt, Human
ugaacuggguagguguggg

SEQ ID NO: 757749 - RNA, 21 nt, Human
ugaagucaucagagcuucaaa

SEQ ID NO: 757750 - RNA, 23 nt, Human
ugacaaacacuacuacucugaga

SEQ ID NO: 757751 - RNA, 19 nt, Human
ugaccucaagugauccacu

SEQ ID NO: 757752 - RNA, 20 nt, Human
ugaccucaagugauccacuu

SEQ ID NO: 757753 - RNA, 24 nt, Human
ugaccucaagugauccacuugccu

SEQ ID NO: 757754 - RNA, 19 nt, Human
ugagaaaaacuaggaaaua

SEQ ID NO: 757755 - RNA, 19 nt, Human
ugagaaaaacuaggaaaua

SEQ ID NO: 757756 - RNA, 22 nt, Human
ugagacggagucucgcucuguc

SEQ ID NO: 757757 - RNA, 22 nt, Human
ugagguugguaucucccagggc

SEQ ID NO: 757758 - RNA, 19 nt, Human
ugauggcaugagaaaaacu

SEQ ID NO: 757759 - RNA, 23 nt, Human
ugcacagaaaggguacccaaagc

SEQ ID NO: 757760 - RNA, 22 nt, Human
ugcagaggugugaucucagcuc

SEQ ID NO: 757761 - RNA, 21 nt, Human
ugcagccuaaaauagccagca

SEQ ID NO: 757762 - RNA, 29 nt, Human
ugcagccuaaaauagccagcaucaccauu

SEQ ID NO: 757763 - RNA, 18 nt, Human
ugcauuuuucauugagaa

SEQ ID NO: 757764 - RNA, 22 nt, Human
ugccaagcucaaaagaaaacca

SEQ ID NO: 757765 - RNA, 23 nt, Human
ugccaagcucaaaagaaaaccaa

SEQ ID NO: 757766 - RNA, 24 nt, Human
ugccucagccucccaaauagcugg

SEQ ID NO: 757767 - RNA, 21 nt, Human
ugccucggccucccaaauugc

SEQ ID NO: 757768 - RNA, 24 nt, Human
ugccucggccucccaaauugcugg

SEQ ID NO: 757769 - RNA, 24 nt, Human
ugcugggauuacaggcgugagcca

SEQ ID NO: 757770 - RNA, 20 nt, Human
uggaaaccagcuugcgaaaa

SEQ ID NO: 757771 - RNA, 19 nt, Human
uggagugcagaggugugau

SEQ ID NO: 757772 - RNA, 28 nt, Human
uggagugcagaggugugauggcucuagc

SEQ ID NO: 757773 - RNA, 19 nt, Human
uggauuuauuugugaacua

SEQ ID NO: 757774 - RNA, 24 nt, Human
uggccacgcuggucuugaacuccu

SEQ ID NO: 757775 - RNA, 24 nt, Human
ugggaauacagaggccugccacca

SEQ ID NO: 757776 - RNA, 18 nt, Human
ugggauuacaggcgugag

SEQ ID NO: 757777 - RNA, 19 nt, Human
ugggauuacaggcgugagc

SEQ ID NO: 757778 - RNA, 21 nt, Human
ugggauuacaggcgugagcca

SEQ ID NO: 757779 - RNA, 22 nt, Human
ugggauuacaggcgugagccac

SEQ ID NO: 757780 - RNA, 23 nt, Human
ugggauuacaggcgugagccacc

SEQ ID NO: 757781 - RNA, 24 nt, Human
ugggauuacaggcgugagccaccg

SEQ ID NO: 757782 - RNA, 28 nt, Human
ugggguauguuggggauugaccacuggg

SEQ ID NO: 757783 - RNA, 18 nt, Human
uggguuucaucauguugg

SEQ ID NO: 757784 - RNA, 24 nt, Human
ugguaagcaugcagaauaaaauaa

SEQ ID NO: 757785 - RNA, 24 nt, Human
ugguuuuuuccuccuuggaaaccu

SEQ ID NO: 757786 - RNA, 21 nt, Human
ugucacccaggcuggagugca

SEQ ID NO: 757787 - RNA, 19 nt, Human
ugucagggagcccuccagg

SEQ ID NO: 757788 - RNA, 21 nt, Human
uguuuugucagggagcccucc

SEQ ID NO: 757789 - RNA, 21 nt, Human
uuaguagagacuggguuucau

SEQ ID NO: 757790 - RNA, 24 nt, Human
uuaguagagacuggguuucaucau

SEQ ID NO: 757791 - RNA, 21 nt, Human
uucaagcgauucuccugccuc

SEQ ID NO: 757792 - RNA, 23 nt, Human
uucaagcgauucuccugccucag

SEQ ID NO: 757793 - RNA, 24 nt, Human
uucaagcgauucuccugccucagc

SEQ ID NO: 757794 - RNA, 23 nt, Human
uuggauuuauuugugaacuaguu

SEQ ID NO: 757795 - RNA, 23 nt, Human
uuuaagaaaacaaacaaacaaac

SEQ ID NO: 757796 - RNA, 21 nt, Human
uuucaucauguuggccacgcu

SEQ ID NO: 757797 - RNA, 24 nt, Human
uuuuuaguagagacuggguuucau

SEQ ID NO: 757798 - RNA, 19 nt, Human
uuuuucuuaguguuauacu

SEQ ID NO: 757799 - RNA, 20 nt, Human
uuuuuguauuuuuaguagag

SEQ ID NO: 757800 - RNA, 21 nt, Human
aaaccuaacaguuuaccagaa

SEQ ID NO: 757801 - RNA, 21 nt, Human
aaccggacaaaaagaggugau

SEQ ID NO: 757802 - RNA, 18 nt, Human
aagagauaaccggacaaa

SEQ ID NO: 757803 - RNA, 19 nt, Human
aagaugcccaaagauauac

SEQ ID NO: 757804 - RNA, 21 nt, Human
aauucagccagucuccaguug

SEQ ID NO: 757805 - RNA, 20 nt, Human
acacacuacccagcauggca

SEQ ID NO: 757806 - RNA, 22 nt, Human
agauauacaaaacaaacaauac

SEQ ID NO: 757807 - RNA, 24 nt, Human
agcaaaacagaacucucauuuuaa

SEQ ID NO: 757808 - RNA, 18 nt, Human
agcaaaugaaaacauagu

SEQ ID NO: 757809 - RNA, 23 nt, Human
agcaaucuugagugggguguuua

SEQ ID NO: 757810 - RNA, 18 nt, Human
agccuaugacaaauaacu

SEQ ID NO: 757811 - RNA, 24 nt, Human
agcuagcuuuuuggagcaacacaa

SEQ ID NO: 757812 - RNA, 23 nt, Human
aggagaaauacagcaaaacagaa

SEQ ID NO: 757813 - RNA, 23 nt, Human
aggcagaagcacuaggccagugc

SEQ ID NO: 757814 - RNA, 23 nt, Human
agucuauuuguccucugcuuguu

SEQ ID NO: 757815 - RNA, 18 nt, Human
agugcacaacucugcuac

SEQ ID NO: 757816 - RNA, 21 nt, Human
auaaaaaaggugaguagcccu

SEQ ID NO: 757817 - RNA, 25 nt, Human
auaaaacacuuaaugaaaaauuuuc

SEQ ID NO: 757818 - RNA, 21 nt, Human
auaaaauauacugaaccaaua

SEQ ID NO: 757819 - RNA, 20 nt, Human
auauaaagaaaugaagacua

SEQ ID NO: 757820 - RNA, 21 nt, Human
aucaucaauagccuaugacaa

SEQ ID NO: 757821 - RNA, 20 nt, Human
auggauuuauguuugcaaac

SEQ ID NO: 757822 - RNA, 25 nt, Human
caaaacagaacucucauuuuaaaau

SEQ ID NO: 757823 - RNA, 20 nt, Human
caacucugcuacaacgagau

SEQ ID NO: 757824 - RNA, 19 nt, Human
cacaaugcugagaaagugc

SEQ ID NO: 757825 - RNA, 22 nt, Human
caccauuauuuaagccugcacu

SEQ ID NO: 757826 - RNA, 21 nt, Human
cacguaguuggggagcagggg

SEQ ID NO: 757827 - RNA, 21 nt, Human
cagcaaaacagaacucucauu

SEQ ID NO: 757828 - RNA, 19 nt, Human
caguuuaccagaauuugua

SEQ ID NO: 757829 - RNA, 19 nt, Human
cauuauuuaagccugcacu

SEQ ID NO: 757830 - RNA, 23 nt, Human
ccaaagauauacaaaacaaacaa

SEQ ID NO: 757831 - RNA, 24 nt, Human
ccaagagucuucaaaaaugcuccu

SEQ ID NO: 757832 - RNA, 22 nt, Human
ccagaaccuacguuuaaccagg

SEQ ID NO: 757833 - RNA, 20 nt, Human
ccccugcaaccuauagaaac

SEQ ID NO: 757834 - RNA, 23 nt, Human
ccccugcaaccuauagaaacauu

SEQ ID NO: 757835 - RNA, 20 nt, Human
ccgcugaauacugaagaccc

SEQ ID NO: 757836 - RNA, 19 nt, Human
ccucucccuuuaaaauccc

SEQ ID NO: 757837 - RNA, 21 nt, Human
cuaggccagugcuuacugcuc

SEQ ID NO: 757838 - RNA, 20 nt, Human
cuggcccuuuacugcuaaaa

SEQ ID NO: 757839 - RNA, 20 nt, Human
cuuuauuucugcuaaucuga

SEQ ID NO: 757840 - RNA, 18 nt, Human
cuuuuccaaaucagacaa

SEQ ID NO: 757841 - RNA, 21 nt, Human
gacacuguuuucacaaucacu

SEQ ID NO: 757842 - RNA, 20 nt, Human
gauacacacuacccagcaug

SEQ ID NO: 757843 - RNA, 28 nt, Human
gcaaguccuucuagauaugugaaagaga

SEQ ID NO: 757844 - RNA, 19 nt, Human
gcuagacacaagaugccca

SEQ ID NO: 757845 - RNA, 19 nt, Human
ggguagaaauuccagcagc

SEQ ID NO: 757846 - RNA, 24 nt, Human
guaaggcaaaaaagcaguuccuuu

SEQ ID NO: 757847 - RNA, 19 nt, Human
guaguuggggagcaggggc

SEQ ID NO: 757848 - RNA, 23 nt, Human
guauauauauacaaguauauacu

SEQ ID NO: 757849 - RNA, 20 nt, Human
gugcuacccaucaacaucca

SEQ ID NO: 757850 - RNA, 21 nt, Human
uaaaagaaauaagaaagcuga

SEQ ID NO: 757851 - RNA, 20 nt, Human
uaaaagauuucccaaaauca

SEQ ID NO: 757852 - RNA, 24 nt, Human
uaaaccaucaauacccagaaauuu

SEQ ID NO: 757853 - RNA, 19 nt, Human
uaaagauaaacucucagac

SEQ ID NO: 757854 - RNA, 18 nt, Human
uaaagcucuuuauuucug

SEQ ID NO: 757855 - RNA, 19 nt, Human
uaagaucuguacuuaaccu

SEQ ID NO: 757856 - RNA, 21 nt, Human
uaagauuagcagugcuauucc

SEQ ID NO: 757857 - RNA, 19 nt, Human
uaagcugauaaggugaaac

SEQ ID NO: 757858 - RNA, 25 nt, Human
uacaaauuuuaaacacuuuuacaaa

SEQ ID NO: 757859 - RNA, 22 nt, Human
uacaacgagauacaugcuagag

SEQ ID NO: 757860 - RNA, 18 nt, Human
uacccaucaacauccaga

SEQ ID NO: 757861 - RNA, 18 nt, Human
uagaaaacacuacacaau

SEQ ID NO: 757862 - RNA, 23 nt, Human
uagaugcaauuagaaaacacuac

SEQ ID NO: 757863 - RNA, 22 nt, Human
uagcuagacacaagaugcccaa

SEQ ID NO: 757864 - RNA, 23 nt, Human
uagcuagcuuuuuggagcaacac

SEQ ID NO: 757865 - RNA, 23 nt, Human
uauaaagaaaugaagacuaugga

SEQ ID NO: 757866 - RNA, 23 nt, Human
uauauauauacaaguauauacug

SEQ ID NO: 757867 - RNA, 18 nt, Human
uauuuguccucugcuugu

SEQ ID NO: 757868 - RNA, 26 nt, Human
ucaacauccagaaccuacguuuaacc

SEQ ID NO: 757869 - RNA, 19 nt, Human
ucaucaauagccuaugaca

SEQ ID NO: 757870 - RNA, 19 nt, Human
ucccucaacauauaaaaga

SEQ ID NO: 757871 - RNA, 24 nt, Human
uccuuauaccaaagcaguaaggca

SEQ ID NO: 757872 - RNA, 21 nt, Human
ucuggcccuuuacugcuaaaa

SEQ ID NO: 757873 - RNA, 23 nt, Human
ucuuucuucuuuuauaaaucuuc

SEQ ID NO: 757874 - RNA, 23 nt, Human
ugaaagagaaaaaucauguaacc

SEQ ID NO: 757875 - RNA, 18 nt, Human
ugagaaagugcacaacuc

SEQ ID NO: 757876 - RNA, 19 nt, Human
ugagcauuggcacagucug

SEQ ID NO: 757877 - RNA, 22 nt, Human
ugauaaggugaaacaauaaugu

SEQ ID NO: 757878 - RNA, 24 nt, Human
ugcaagaaccuuugggcaccagcu

SEQ ID NO: 757879 - RNA, 23 nt, Human
ugcccaaagauauacaaaacaaa

SEQ ID NO: 757880 - RNA, 19 nt, Human
ugcucauguuuuucauccu

SEQ ID NO: 757881 - RNA, 18 nt, Human
ugcugugauuuuccuuua

SEQ ID NO: 757882 - RNA, 22 nt, Human
uggcacguaguuggggagcagg

SEQ ID NO: 757883 - RNA, 20 nt, Human
ugggcaccagcuagaguaua

SEQ ID NO: 757884 - RNA, 21 nt, Human
uguguaggaaaaccucucugg

SEQ ID NO: 757885 - RNA, 23 nt, Human
uguuugcaaacauuaauuuccuu

SEQ ID NO: 757886 - RNA, 30 nt, Human
uucuagcaugaaugugaaccaggcuucacu

SEQ ID NO: 757887 - RNA, 27 nt, Human
uuuauaaaucuucuggugcuaacugcc

SEQ ID NO: 757888 - RNA, 25 nt, Human
uuuaucaugcaauuugaccaagagu

SEQ ID NO: 757889 - RNA, 21 nt, Human
uuucuuuuuucagagcauggu

SEQ ID NO: 757890 - RNA, 23 nt, Human
uuugcaagaaccuuugggcacca

SEQ ID NO: 757891 - RNA, 22 nt, Human
uuuucuagcaugaaugugaacc

SEQ ID NO: 757892 - RNA, 24 nt, Human
aaaacuccacugguaaauagaaca

SEQ ID NO: 757893 - RNA, 19 nt, Human
aaaauccuuaaaugaagcu

SEQ ID NO: 757894 - RNA, 22 nt, Human
aaaauguaggaaucaagcauga

SEQ ID NO: 757895 - RNA, 24 nt, Human
aaauauuaacagcauucgugagcc

SEQ ID NO: 757896 - RNA, 21 nt, Human
aagaagaaaauauuaaauggg

SEQ ID NO: 757897 - RNA, 22 nt, Human
aagaagaaaauauuaaaugggg

SEQ ID NO: 757898 - RNA, 19 nt, Human
agacccaacaaaauguagg

SEQ ID NO: 757899 - RNA, 18 nt, Human
agauuggauaugaucuaa

SEQ ID NO: 757900 - RNA, 20 nt, Human
agucugacuuuuucugguuu

SEQ ID NO: 757901 - RNA, 22 nt, Human
agucugacuuuuucugguuugg

SEQ ID NO: 757902 - RNA, 22 nt, Human
agugaaacgcaaccacugcaga

SEQ ID NO: 757903 - RNA, 22 nt, Human
auaaaaagagucuucuguuuuu

SEQ ID NO: 757904 - RNA, 23 nt, Human
auccccuuguaccccucccacug

SEQ ID NO: 757905 - RNA, 30 nt, Human
auuuuucuuauccccuuguaccccucccaa

SEQ ID NO: 757906 - RNA, 23 nt, Human
caagacucuaaaauguugggaga

SEQ ID NO: 757907 - RNA, 19 nt, Human
cagaaaaacuccacuggua

SEQ ID NO: 757908 - RNA, 21 nt, Human
caggaucuccaaauggauuua

SEQ ID NO: 757909 - RNA, 21 nt, Human
ccacagggcuuguuucuggcu

SEQ ID NO: 757910 - RNA, 18 nt, Human
ccucugaggaaagcagag

SEQ ID NO: 757911 - RNA, 19 nt, Human
ccuucaaaccacagggcuu

SEQ ID NO: 757912 - RNA, 21 nt, Human
cgaacaguuucuugaacaccu

SEQ ID NO: 757913 - RNA, 20 nt, Human
cgcaaccacugcagaaaaac

SEQ ID NO: 757914 - RNA, 18 nt, Human
cuaugcuaaagaagaaaa

SEQ ID NO: 757915 - RNA, 19 nt, Human
cuccacugguaaauagaac

SEQ ID NO: 757916 - RNA, 21 nt, Human
cuuauccccuuguaccccucc

SEQ ID NO: 757917 - RNA, 26 nt, Human
cuuuauggucacaaaugcuucuggcu

SEQ ID NO: 757918 - RNA, 21 nt, Human
gaaaaaaaucaugacauuuuu

SEQ ID NO: 757919 - RNA, 18 nt, Human
gaaaggagggaggaaaag

SEQ ID NO: 757920 - RNA, 18 nt, Human
gaaaggagggaggaaaag

SEQ ID NO: 757921 - RNA, 19 nt, Human
gaaaggagggaggaaaagg

SEQ ID NO: 757922 - RNA, 19 nt, Human
gcaaccacugcagaaaaac

SEQ ID NO: 757923 - RNA, 20 nt, Human
ggaggaaaagggugguggug

SEQ ID NO: 757924 - RNA, 24 nt, Human
ggaggaaaagggugguggugguaa

SEQ ID NO: 757925 - RNA, 21 nt, Human
guaguacaauccagccaaaca

SEQ ID NO: 757926 - RNA, 19 nt, Human
uaaaaagagucuucuguuu

SEQ ID NO: 757927 - RNA, 21 nt, Human
uaacagcauucgugagccaau

SEQ ID NO: 757928 - RNA, 19 nt, Human
uaacucacaaaaaaauccu

SEQ ID NO: 757929 - RNA, 20 nt, Human
uacaauccagccaaacaaaa

SEQ ID NO: 757930 - RNA, 23 nt, Human
uauuuggaaaggagggaggaaaa

SEQ ID NO: 757931 - RNA, 26 nt, Human
uauuuggaaaggagggaggaaaaggg

SEQ ID NO: 757932 - RNA, 23 nt, Human
ucaaauacuguggagucugcacc

SEQ ID NO: 757933 - RNA, 20 nt, Human
ucaauuagucccauccucac

SEQ ID NO: 757934 - RNA, 26 nt, Human
ugacagugcuaugcuaaagaagaaaa

SEQ ID NO: 757935 - RNA, 23 nt, Human
ugagagaaaauaacgagggaagu

SEQ ID NO: 757936 - RNA, 25 nt, Human
ugagagaaaauaacgagggaagugu

SEQ ID NO: 757937 - RNA, 19 nt, Human
ugaggaaagcagaggagag

SEQ ID NO: 757938 - RNA, 21 nt, Human
uggaaaggagggaggaaaagg

SEQ ID NO: 757939 - RNA, 19 nt, Human
uggcaggaccggaaaaaaa

SEQ ID NO: 757940 - RNA, 19 nt, Human
uggugcauaucaauuaguc

SEQ ID NO: 757941 - RNA, 27 nt, Human
uguaccccucccacugucauuaugcua

SEQ ID NO: 757942 - RNA, 24 nt, Human
uuucuuauccccuuguaccccucc

SEQ ID NO: 757943 - RNA, 28 nt, Human
aaacaaaaauaaagcaccaggguucuga

SEQ ID NO: 757944 - RNA, 19 nt, Human
aagcaccaggguucugagc

SEQ ID NO: 757945 - RNA, 19 nt, Human
acaaaaauaaagcaccagg

SEQ ID NO: 757946 - RNA, 19 nt, Human
acaaaagauuaaaacaaaa

SEQ ID NO: 757947 - RNA, 20 nt, Human
agcaccaggguucugagcag

SEQ ID NO: 757948 - RNA, 26 nt, Human
auacacuauuugcagaauaggaaaau

SEQ ID NO: 757949 - RNA, 24 nt, Human
cacuauuugcagaauaggaaaauc

SEQ ID NO: 757950 - RNA, 24 nt, Human
cagaaauaguguaaaugcucuuga

SEQ ID NO: 757951 - RNA, 20 nt, Human
cagaauacuucaggaaacca

SEQ ID NO: 757952 - RNA, 20 nt, Human
gcagaaauaguguaaaugcu

SEQ ID NO: 757953 - RNA, 22 nt, Human
gcagaaauaguguaaaugcucu

SEQ ID NO: 757954 - RNA, 23 nt, Human
uaacauguuucuuuggaaaaaug

SEQ ID NO: 757955 - RNA, 20 nt, Human
uaaggugaguauaucagcaa

SEQ ID NO: 757956 - RNA, 18 nt, Human
uaggaaaaucaucacugg

SEQ ID NO: 757957 - RNA, 18 nt, Human
ugaguggaagagaagcug

SEQ ID NO: 757958 - RNA, 22 nt, Human
ugcagaauaggaaaaucaucac

SEQ ID NO: 757959 - RNA, 24 nt, Human
uggcaacaaaagauuaaaacaaaa

SEQ ID NO: 757960 - RNA, 22 nt, Human
aaaaaaaagaaaaaaaggaaag

SEQ ID NO: 757961 - RNA, 20 nt, Human
aaaaaacaaccccaacccca

SEQ ID NO: 757962 - RNA, 22 nt, Human
aaaaaagaaacacaaaaaaaaa

SEQ ID NO: 757963 - RNA, 26 nt, Human
aaaaaagaaacacaaaaaaaagaaaa

SEQ ID NO: 757964 - RNA, 22 nt, Human
aaaaacguauuuucuucuguuc

SEQ ID NO: 757965 - RNA, 21 nt, Human
aaaacaaaacagggaugcaga

SEQ ID NO: 757966 - RNA, 20 nt, Human
aaaauaccauaaauucguua

SEQ ID NO: 757967 - RNA, 24 nt, Human
aaacguugaagaucacacgaaaaa

SEQ ID NO: 757968 - RNA, 24 nt, Human
aaagugcugggauuacaggcguga

SEQ ID NO: 757969 - RNA, 24 nt, Human
aaagugcugggauuacaggcguga

SEQ ID NO: 757970 - RNA, 21 nt, Human
aacagagaaagaaaaaagaaa

SEQ ID NO: 757971 - RNA, 18 nt, Human
aagaaaaaaaaagaaaaa

SEQ ID NO: 757972 - RNA, 19 nt, Human
aagaaaacagagaaagaaa

SEQ ID NO: 757973 - RNA, 20 nt, Human
aagaaaacagagaaagaaaa

SEQ ID NO: 757974 - RNA, 20 nt, Human
aagaaacacaaaaaaaagag

SEQ ID NO: 757975 - RNA, 24 nt, Human
aagccgcuggaauuacaggcaugc

SEQ ID NO: 757976 - RNA, 19 nt, Human
aagugcugggauuacaggc

SEQ ID NO: 757977 - RNA, 19 nt, Human
aagugcugggauuacaggc

SEQ ID NO: 757978 - RNA, 19 nt, Human
aagugcugggauuacaggc

SEQ ID NO: 757979 - RNA, 19 nt, Human
aagugcugggauuacaggc

SEQ ID NO: 757980 - RNA, 26 nt, Human
aagugcugggauuacaggcgugagcc

SEQ ID NO: 757981 - RNA, 26 nt, Human
aagugcugggauuacaggcgugagcc

SEQ ID NO: 757982 - RNA, 21 nt, Human
aaguucaagugauucuccugc

SEQ ID NO: 757983 - RNA, 22 nt, Human
aaguucaagugauucuccugcc

SEQ ID NO: 757984 - RNA, 23 nt, Human
aauaucucaaacuauuccugguu

SEQ ID NO: 757985 - RNA, 21 nt, Human
aaucauuuccccacuaauaaa

SEQ ID NO: 757986 - RNA, 19 nt, Human
aaugcaguggugugaucuc

SEQ ID NO: 757987 - RNA, 20 nt, Human
aaugcaguggugugaucucg

SEQ ID NO: 757988 - RNA, 24 nt, Human
aauuacaggcaugcaccaccaugc

SEQ ID NO: 757989 - RNA, 24 nt, Human
aauuacaggcgcccaccaccaugc

SEQ ID NO: 757990 - RNA, 22 nt, Human
acaaccccaaccccauccccgc

SEQ ID NO: 757991 - RNA, 21 nt, Human
acacaaaaaaaagaaaaaaaa

SEQ ID NO: 757992 - RNA, 22 nt, Human
acacgaaaaacagcaccagcau

SEQ ID NO: 757993 - RNA, 21 nt, Human
acaggcaaagaauaaaauauc

SEQ ID NO: 757994 - RNA, 23 nt, Human
accaguucugggagagagagacc

SEQ ID NO: 757995 - RNA, 18 nt, Human
acgggguuucaccguguu

SEQ ID NO: 757996 - RNA, 19 nt, Human
acgggguuucaccguguua

SEQ ID NO: 757997 - RNA, 20 nt, Human
acgggguuucaccguguuag

SEQ ID NO: 757998 - RNA, 24 nt, Human
acuauguuggccaagcuggucuug

SEQ ID NO: 757999 - RNA, 25 nt, Human
acucuagugcccaggcuggaaugca

SEQ ID NO: 758000 - RNA, 22 nt, Human
agaaaagaaguuaagaaaagaa

SEQ ID NO: 758001 - RNA, 20 nt, Human
agaaauaauccaaaacaaaa

SEQ ID NO: 758002 - RNA, 19 nt, Human
agacagagucucacucuag

SEQ ID NO: 758003 - RNA, 18 nt, Human
agccaaaucccuucucug

SEQ ID NO: 758004 - RNA, 18 nt, Human
agccaccgugcccagccc

SEQ ID NO: 758005 - RNA, 23 nt, Human
agcuggucuugaacuccugaccu

SEQ ID NO: 758006 - RNA, 20 nt, Human
aggcaugcaccaccaugccc

SEQ ID NO: 758007 - RNA, 23 nt, Human
agggaugcagaucugucagaauu

SEQ ID NO: 758008 - RNA, 24 nt, Human
aggugaucugcccaccucggccuc

SEQ ID NO: 758009 - RNA, 24 nt, Human
agguuauccgcccaccuuggccuc

SEQ ID NO: 758010 - RNA, 20 nt, Human
aguagagacgggguuucacc

SEQ ID NO: 758011 - RNA, 18 nt, Human
aguagcuggaauuacagg

SEQ ID NO: 758012 - RNA, 25 nt, Human
aguaguaaaauacaaauaaaacuuu

SEQ ID NO: 758013 - RNA, 18 nt, Human
agugcugggauuacaggc

SEQ ID NO: 758014 - RNA, 18 nt, Human
agugcugggauuacaggc

SEQ ID NO: 758015 - RNA, 19 nt, Human
auagagaaaaaacaacccc

SEQ ID NO: 758016 - RNA, 22 nt, Human
aucccaaacuccagcccugugg

SEQ ID NO: 758017 - RNA, 22 nt, Human
aucugcagcauaagccaccaag

SEQ ID NO: 758018 - RNA, 24 nt, Human
augagacagcauuuuccaaaacag

SEQ ID NO: 758019 - RNA, 22 nt, Human
auggcuaugagaccaaugugcc

SEQ ID NO: 758020 - RNA, 18 nt, Human
augggauuucacuauguu

SEQ ID NO: 758021 - RNA, 20 nt, Human
augggauuucacuauguugg

SEQ ID NO: 758022 - RNA, 18 nt, Human
auucuccugccucagccu

SEQ ID NO: 758023 - RNA, 24 nt, Human
auuuuucuauuuuuaguagagacg

SEQ ID NO: 758024 - RNA, 22 nt, Human
caaaaucuguaaugccaagaaa

SEQ ID NO: 758025 - RNA, 24 nt, Human
caaagugcugggauuacaggcgug

SEQ ID NO: 758026 - RNA, 24 nt, Human
caaagugcugggauuacaggcgug

SEQ ID NO: 758027 - RNA, 23 nt, Human
caaccuccaccucccaaguucaa

SEQ ID NO: 758028 - RNA, 22 nt, Human
caagugauucuccugccucagc

SEQ ID NO: 758029 - RNA, 23 nt, Human
caccaccaugcccagcuuaauuu

SEQ ID NO: 758030 - RNA, 22 nt, Human
caccagaaccauguaagaaaac

SEQ ID NO: 758031 - RNA, 23 nt, Human
caccaugcccgcuaguuuuugua

SEQ ID NO: 758032 - RNA, 23 nt, Human
cacccaaaaacguugaagaucac

SEQ ID NO: 758033 - RNA, 20 nt, Human
caccccaauuaaaaaacaca

SEQ ID NO: 758034 - RNA, 21 nt, Human
caccguguuagccacgcuggu

SEQ ID NO: 758035 - RNA, 24 nt, Human
caccguguuagccacgcuggucuc

SEQ ID NO: 758036 - RNA, 24 nt, Human
caccucggccucccaaagugcugg

SEQ ID NO: 758037 - RNA, 22 nt, Human
caccuggaaaaggcugaccagg

SEQ ID NO: 758038 - RNA, 21 nt, Human
cacuauguuggccaagcuggu

SEQ ID NO: 758039 - RNA, 24 nt, Human
cacuauguuggccaagcuggucuu

SEQ ID NO: 758040 - RNA, 21 nt, Human
cacugcaaccuccaccuccca

SEQ ID NO: 758041 - RNA, 18 nt, Human
cacugcaaccucugccuc

SEQ ID NO: 758042 - RNA, 21 nt, Human
cacugcaaccucugccuccca

SEQ ID NO: 758043 - RNA, 25 nt, Human
cagaaauaauccaaaacaaaacagg

SEQ ID NO: 758044 - RNA, 19 nt, Human
cagcaccagcaucagcaaa

SEQ ID NO: 758045 - RNA, 26 nt, Human
cagcaucagcaaaugugaauccacca

SEQ ID NO: 758046 - RNA, 21 nt, Human
caggcgcccaccaccaugccc

SEQ ID NO: 758047 - RNA, 20 nt, Human
cauccagaauggcaucuguu

SEQ ID NO: 758048 - RNA, 25 nt, Human
caugcccgcuaguuuuuguauuuuu

SEQ ID NO: 758049 - RNA, 21 nt, Human
cauguaagaaaacagagaaag

SEQ ID NO: 758050 - RNA, 22 nt, Human
ccaaagugcugggauuacaggc

SEQ ID NO: 758051 - RNA, 22 nt, Human
ccaaagugcugggauuacaggc

SEQ ID NO: 758052 - RNA, 22 nt, Human
ccaaagugcugggauuacaggc

SEQ ID NO: 758053 - RNA, 22 nt, Human
ccaaagugcugggauuacaggc

SEQ ID NO: 758054 - RNA, 24 nt, Human
ccaaagugcugggauuacaggcgu

SEQ ID NO: 758055 - RNA, 24 nt, Human
ccaaagugcugggauuacaggcgu

SEQ ID NO: 758056 - RNA, 24 nt, Human
ccaagccgcuggaauuacaggcau

SEQ ID NO: 758057 - RNA, 24 nt, Human
ccaccucccaaguucaagugauuc

SEQ ID NO: 758058 - RNA, 19 nt, Human
ccacugcaaccuccaccuc

SEQ ID NO: 758059 - RNA, 27 nt, Human
ccacugcaaccuccaccucccaaguuc

SEQ ID NO: 758060 - RNA, 19 nt, Human
ccagcuauauccaacaguu

SEQ ID NO: 758061 - RNA, 24 nt, Human
cccacugcaaccuccaccucccaa

SEQ ID NO: 758062 - RNA, 20 nt, Human
cccaggcuggaaugcagugg

SEQ ID NO: 758063 - RNA, 19 nt, Human
ccccaaccccauccccgcc

SEQ ID NO: 758064 - RNA, 22 nt, Human
ccccaaccccauccccgccaag

SEQ ID NO: 758065 - RNA, 24 nt, Human
ccccagagucuuguuaaaucaaau

SEQ ID NO: 758066 - RNA, 20 nt, Human
ccgugcccagcccaaaagua

SEQ ID NO: 758067 - RNA, 24 nt, Human
ccucccaaguucaagugauucucc

SEQ ID NO: 758068 - RNA, 24 nt, Human
ccucccagguugaagcgauucucc

SEQ ID NO: 758069 - RNA, 24 nt, Human
ccugaccuuaggugaucugcccac

SEQ ID NO: 758070 - RNA, 23 nt, Human
ccugaguagcuggaauuacaggc

SEQ ID NO: 758071 - RNA, 24 nt, Human
ccugccucagccuuccaagccgcu

SEQ ID NO: 758072 - RNA, 21 nt, Human
cgcuggaauuacaggcaugca

SEQ ID NO: 758073 - RNA, 19 nt, Human
cgggguuucaccguguuag

SEQ ID NO: 758074 - RNA, 24 nt, Human
cucacugcaaccucugccucccag

SEQ ID NO: 758075 - RNA, 24 nt, Human
cucacugcaaccucugccucccag

SEQ ID NO: 758076 - RNA, 24 nt, Human
cucagguuauccgcccaccuuggc

SEQ ID NO: 758077 - RNA, 24 nt, Human
cuccugccucaacccccugaguag

SEQ ID NO: 758078 - RNA, 23 nt, Human
cuccugccucagccuuccaagcc

SEQ ID NO: 758079 - RNA, 23 nt, Human
cugcaaccuccaccucccaaguu

SEQ ID NO: 758080 - RNA, 24 nt, Human
cugcaaccuccaccucccaaguuc

SEQ ID NO: 758081 - RNA, 23 nt, Human
cugcaaccucugccucccagguu

SEQ ID NO: 758082 - RNA, 23 nt, Human
cugccucaacccccugaguagcu

SEQ ID NO: 758083 - RNA, 21 nt, Human
cuuccaagccgcuggaauuac

SEQ ID NO: 758084 - RNA, 20 nt, Human
gaaaaacagcaccagcaucg

SEQ ID NO: 758085 - RNA, 22 nt, Human
gaaucugcagcauaagccacca

SEQ ID NO: 758086 - RNA, 24 nt, Human
gaccucagguuauccgcccaccuu

SEQ ID NO: 758087 - RNA, 24 nt, Human
gaccuuaggugaucugcccaccuc

SEQ ID NO: 758088 - RNA, 24 nt, Human
gagaaagaaaaaagaaacacaaaa

SEQ ID NO: 758089 - RNA, 24 nt, Human
gagacgggguuucaccguguuagc

SEQ ID NO: 758090 - RNA, 25 nt, Human
gaguagcuggaauuacaggcgccca

SEQ ID NO: 758091 - RNA, 25 nt, Human
gagucucacucuagugcccaggcug

SEQ ID NO: 758092 - RNA, 18 nt, Human
gauuacaggcgugagcca

SEQ ID NO: 758093 - RNA, 18 nt, Human
gauuacaggcgugagcca

SEQ ID NO: 758094 - RNA, 19 nt, Human
gauuacaggcgugagccac

SEQ ID NO: 758095 - RNA, 21 nt, Human
gauuacaggcgugagccaccg

SEQ ID NO: 758096 - RNA, 24 nt, Human
gauuacaggcgugagccaccgugc

SEQ ID NO: 758097 - RNA, 22 nt, Human
gauuacaggcgugagccacugc

SEQ ID NO: 758098 - RNA, 19 nt, Human
gauucuccugccucagccu

SEQ ID NO: 758099 - RNA, 21 nt, Human
gcaaccucugccucccagguu

SEQ ID NO: 758100 - RNA, 21 nt, Human
gcaguggucugaucuuggcuc

SEQ ID NO: 758101 - RNA, 21 nt, Human
gcucacugcaaccucugccuc

SEQ ID NO: 758102 - RNA, 21 nt, Human
gcucagcucccaauauaaagc

SEQ ID NO: 758103 - RNA, 25 nt, Human
gcucuauugcccaggcuggagggca

SEQ ID NO: 758104 - RNA, 23 nt, Human
gcuggucucaaacuccugaccuc

SEQ ID NO: 758105 - RNA, 23 nt, Human
ggagucuugcucuauugcccagg

SEQ ID NO: 758106 - RNA, 22 nt, Human
ggauuucacuauguuggccaag

SEQ ID NO: 758107 - RNA, 22 nt, Human
ggcuggaaugcaguggugugau

SEQ ID NO: 758108 - RNA, 18 nt, Human
gggauuucacuauguugg

SEQ ID NO: 758109 - RNA, 18 nt, Human
gggguuucaccguguuag

SEQ ID NO: 758110 - RNA, 21 nt, Human
gguccagaugguucccagcac

SEQ ID NO: 758111 - RNA, 19 nt, Human
ggucuugaacuccugaccu

SEQ ID NO: 758112 - RNA, 23 nt, Human
guagagacgggguuucaccgugu

SEQ ID NO: 758113 - RNA, 24 nt, Human
gucuugcucuauugcccaggcugg

SEQ ID NO: 758114 - RNA, 22 nt, Human
gugagccaccgugcccagccca

SEQ ID NO: 758115 - RNA, 24 nt, Human
gugaucugcccaccucggccuccc

SEQ ID NO: 758116 - RNA, 24 nt, Human
gugauucuccugccucagccuucc

SEQ ID NO: 758117 - RNA, 23 nt, Human
gugccugaaggugccagcuuugg

SEQ ID NO: 758118 - RNA, 19 nt, Human
gugguuguuaaggaacccc

SEQ ID NO: 758119 - RNA, 20 nt, Human
guuauaaggggagguguggc

SEQ ID NO: 758120 - RNA, 21 nt, Human
guuuucucugacccagcugaa

SEQ ID NO: 758121 - RNA, 24 nt, Human
guuuuuguauuuuuaguagagaug

SEQ ID NO: 758122 - RNA, 20 nt, Human
uaaaauaucccauguaccuc

SEQ ID NO: 758123 - RNA, 22 nt, Human
uaacuucugcaaagguccagau

SEQ ID NO: 758124 - RNA, 20 nt, Human
uaagaaaagaaaaaaacgua

SEQ ID NO: 758125 - RNA, 23 nt, Human
uaauuuuucuauuuuuaguagag

SEQ ID NO: 758126 - RNA, 24 nt, Human
uaauuuuucuauuuuuaguagaga

SEQ ID NO: 758127 - RNA, 24 nt, Human
uacaggcaugcaccaccaugccca

SEQ ID NO: 758128 - RNA, 24 nt, Human
uacaggcgugagccaccgugccca

SEQ ID NO: 758129 - RNA, 19 nt, Human
uacaggcgugagccacugc

SEQ ID NO: 758130 - RNA, 23 nt, Human
uacaggcgugagccacugcgccc

SEQ ID NO: 758131 - RNA, 23 nt, Human
uagagaaaaaacaaccccaaccc

SEQ ID NO: 758132 - RNA, 22 nt, Human
uagagaugggauuucacuaugu

SEQ ID NO: 758133 - RNA, 20 nt, Human
uagcuggaauuacaggcgcc

SEQ ID NO: 758134 - RNA, 21 nt, Human
uaguagagacgggguuucacc

SEQ ID NO: 758135 - RNA, 24 nt, Human
uaguagagacgggguuucaccgug

SEQ ID NO: 758136 - RNA, 25 nt, Human
uaguagagacgggguuucaccgugu

SEQ ID NO: 758137 - RNA, 26 nt, Human
uaguagagacgggguuucaccguugg

SEQ ID NO: 758138 - RNA, 24 nt, Human
uaguagagaugggauuucacuaug

SEQ ID NO: 758139 - RNA, 24 nt, Human
uaguuuuuguauuuuuaguagaga

SEQ ID NO: 758140 - RNA, 25 nt, Human
uauccaggauccagcuauauccaac

SEQ ID NO: 758141 - RNA, 24 nt, Human
uauguuggccaagcuggucuugaa

SEQ ID NO: 758142 - RNA, 23 nt, Human
uauuuauuuaugagauggagucu

SEQ ID NO: 758143 - RNA, 19 nt, Human
ucaaaacucuguuccacug

SEQ ID NO: 758144 - RNA, 18 nt, Human
ucaagugauucuccugcc

SEQ ID NO: 758145 - RNA, 24 nt, Human
ucaccguguuagccacgcuggucu

SEQ ID NO: 758146 - RNA, 22 nt, Human
ucacuauguuggccaagcuggu

SEQ ID NO: 758147 - RNA, 19 nt, Human
ucacugcaaccucugccuc

SEQ ID NO: 758148 - RNA, 24 nt, Human
ucacugcaaccucugccucccagg

SEQ ID NO: 758149 - RNA, 25 nt, Human
ucacugcaaccucugccucccaggu

SEQ ID NO: 758150 - RNA, 26 nt, Human
uccaaaacagaaauaauccaaaacaa

SEQ ID NO: 758151 - RNA, 24 nt, Human
ucccaaagugcugggauuacaggc

SEQ ID NO: 758152 - RNA, 24 nt, Human
ucccaaagugcugggauuacaggc

SEQ ID NO: 758153 - RNA, 21 nt, Human
ucccaaguucaagugauucuc

SEQ ID NO: 758154 - RNA, 24 nt, Human
ucccaaguucaagugauucuccug

SEQ ID NO: 758155 - RNA, 21 nt, Human
ucccagguugaagcgauucuc

SEQ ID NO: 758156 - RNA, 24 nt, Human
ucccagguugaagcgauucuccug

SEQ ID NO: 758157 - RNA, 23 nt, Human
uccccgccaagggaaaaaaaaaa

SEQ ID NO: 758158 - RNA, 21 nt, Human
uccgcccaccuuggccuccca

SEQ ID NO: 758159 - RNA, 18 nt, Human
ucggccucccaaagugcu

SEQ ID NO: 758160 - RNA, 24 nt, Human
ucuaugccacugcagaaauaagga

SEQ ID NO: 758161 - RNA, 23 nt, Human
ucucacucuagugcccaggcugg

SEQ ID NO: 758162 - RNA, 24 nt, Human
ucucacucuagugcccaggcugga

SEQ ID NO: 758163 - RNA, 24 nt, Human
ucuccugccucaacccccugagua

SEQ ID NO: 758164 - RNA, 22 nt, Human
ucucucggcacacguuuguugg

SEQ ID NO: 758165 - RNA, 20 nt, Human
ucugccucccagguugaagc

SEQ ID NO: 758166 - RNA, 19 nt, Human
ucuguaguuuucaucuucu

SEQ ID NO: 758167 - RNA, 23 nt, Human
ucuugaacuccugaccuuaggug

SEQ ID NO: 758168 - RNA, 19 nt, Human
ucuugcucuauugcccagg

SEQ ID NO: 758169 - RNA, 22 nt, Human
ucuugcucuauugcccaggcug

SEQ ID NO: 758170 - RNA, 23 nt, Human
ucuugcucuauugcccaggcugg

SEQ ID NO: 758171 - RNA, 24 nt, Human
ucuugcucuauugcccaggcugga

SEQ ID NO: 758172 - RNA, 20 nt, Human
ucuuuuuuuuugagacagag

SEQ ID NO: 758173 - RNA, 22 nt, Human
ucuuuuuuuuugagacagaguc

SEQ ID NO: 758174 - RNA, 24 nt, Human
ugaccaguuuuagucaagaaguuu

SEQ ID NO: 758175 - RNA, 18 nt, Human
ugaccucagguuauccgc

SEQ ID NO: 758176 - RNA, 20 nt, Human
ugaccucagguuauccgccc

SEQ ID NO: 758177 - RNA, 19 nt, Human
ugaccuccauguuccuccu

SEQ ID NO: 758178 - RNA, 20 nt, Human
ugaccuuaggugaucugccc

SEQ ID NO: 758179 - RNA, 24 nt, Human
ugaccuuaggugaucugcccaccu

SEQ ID NO: 758180 - RNA, 23 nt, Human
ugagacagagucucacucuagug

SEQ ID NO: 758181 - RNA, 22 nt, Human
ugagacagcauuuuccaaaaca

SEQ ID NO: 758182 - RNA, 22 nt, Human
ugagauggagucuugcucuauu

SEQ ID NO: 758183 - RNA, 24 nt, Human
ugaggucacagggucaauggucac

SEQ ID NO: 758184 - RNA, 24 nt, Human
ugaucugcccaccucggccuccca

SEQ ID NO: 758185 - RNA, 19 nt, Human
ugcccagcuuaauuuuucu

SEQ ID NO: 758186 - RNA, 21 nt, Human
ugcccaggcuggaaugcagug

SEQ ID NO: 758187 - RNA, 24 nt, Human
ugcccaggcuggaaugcaguggug

SEQ ID NO: 758188 - RNA, 21 nt, Human
ugccucaacccccugaguagc

SEQ ID NO: 758189 - RNA, 24 nt, Human
ugccucaacccccugaguagcugg

SEQ ID NO: 758190 - RNA, 24 nt, Human
ugccucagccuuccaagccgcugg

SEQ ID NO: 758191 - RNA, 22 nt, Human
ugcgcccggcugagaaaacuaa

SEQ ID NO: 758192 - RNA, 24 nt, Human
ugcugggauuacaggcgugagcca

SEQ ID NO: 758193 - RNA, 24 nt, Human
ugcugggauuacaggcgugagcca

SEQ ID NO: 758194 - RNA, 23 nt, Human
uggaaauaaaagguugucuguau

SEQ ID NO: 758195 - RNA, 19 nt, Human
uggaaugcaguggugugau

SEQ ID NO: 758196 - RNA, 23 nt, Human
uggaaugcaguggugugaucucg

SEQ ID NO: 758197 - RNA, 24 nt, Human
uggaaugcaguggugugaucucgg

SEQ ID NO: 758198 - RNA, 23 nt, Human
uggaaugcuaaaaggcaacauuu

SEQ ID NO: 758199 - RNA, 21 nt, Human
uggaauuacaggcaugcacca

SEQ ID NO: 758200 - RNA, 24 nt, Human
uggaauuacaggcaugcaccacca

SEQ ID NO: 758201 - RNA, 21 nt, Human
uggaauuacaggcgcccacca

SEQ ID NO: 758202 - RNA, 24 nt, Human
uggaauuacaggcgcccaccacca

SEQ ID NO: 758203 - RNA, 25 nt, Human
uggaauuacaggcgcccaccaccau

SEQ ID NO: 758204 - RNA, 24 nt, Human
uggagucuugcucuauugcccagg

SEQ ID NO: 758205 - RNA, 24 nt, Human
uggccaagcuggucuugaacuccu

SEQ ID NO: 758206 - RNA, 19 nt, Human
ugggauuacaggcgugagc

SEQ ID NO: 758207 - RNA, 21 nt, Human
ugggauuacaggcgugagcca

SEQ ID NO: 758208 - RNA, 21 nt, Human
ugggauuacaggcgugagcca

SEQ ID NO: 758209 - RNA, 22 nt, Human
ugggauuacaggcgugagccac

SEQ ID NO: 758210 - RNA, 22 nt, Human
ugggauuacaggcgugagccac

SEQ ID NO: 758211 - RNA, 22 nt, Human
ugggauuacaggcgugagccac

SEQ ID NO: 758212 - RNA, 23 nt, Human
ugggauuacaggcgugagccacc

SEQ ID NO: 758213 - RNA, 23 nt, Human
ugggauuacaggcgugagccacc

SEQ ID NO: 758214 - RNA, 24 nt, Human
ugggauuacaggcgugagccaccg

SEQ ID NO: 758215 - RNA, 24 nt, Human
ugggauuacaggcgugagccacug

SEQ ID NO: 758216 - RNA, 26 nt, Human
ugggauuacaggcgugagccacugcg

SEQ ID NO: 758217 - RNA, 19 nt, Human
ugggauuucacuauguugg

SEQ ID NO: 758218 - RNA, 24 nt, Human
ugggauuucacuauguuggccaag

SEQ ID NO: 758219 - RNA, 21 nt, Human
ugugguuguuaaggaaccccu

SEQ ID NO: 758220 - RNA, 25 nt, Human
ugugguuguuaaggaaccccuuuaa

SEQ ID NO: 758221 - RNA, 19 nt, Human
uuaagugguuaguuggaca

SEQ ID NO: 758222 - RNA, 22 nt, Human
uuacaacauauaggaaaccaga

SEQ ID NO: 758223 - RNA, 18 nt, Human
uuaguagagacgggguuu

SEQ ID NO: 758224 - RNA, 22 nt, Human
uuaguagagacgggguuucacc

SEQ ID NO: 758225 - RNA, 24 nt, Human
uuaguagagacgggguuucaccgu

SEQ ID NO: 758226 - RNA, 18 nt, Human
uuaguagagaugggauuu

SEQ ID NO: 758227 - RNA, 24 nt, Human
uuaguagagaugggauuucacuau

SEQ ID NO: 758228 - RNA, 21 nt, Human
uucaagugauucuccugccuc

SEQ ID NO: 758229 - RNA, 23 nt, Human
uucaagugauucuccugccucag

SEQ ID NO: 758230 - RNA, 24 nt, Human
uucaagugauucuccugccucagc

SEQ ID NO: 758231 - RNA, 18 nt, Human
uucucucucucuccgggc

SEQ ID NO: 758232 - RNA, 18 nt, Human
uugcccaggcuggagggc

SEQ ID NO: 758233 - RNA, 18 nt, Human
uuggccucccaaagugcu

SEQ ID NO: 758234 - RNA, 21 nt, Human
uuucaccguguuagccacgcu

SEQ ID NO: 758235 - RNA, 21 nt, Human
uuucacuauguuggccaagcu

SEQ ID NO: 758236 - RNA, 19 nt, Human
uuugaaaugaccuaccacu

SEQ ID NO: 758237 - RNA, 23 nt, Human
uuugagacagagucucacucuag

SEQ ID NO: 758238 - RNA, 22 nt, Human
uuugaggucacagggucaaugg

SEQ ID NO: 758239 - RNA, 19 nt, Human
uuuguaaccaguuauauau

SEQ ID NO: 758240 - RNA, 22 nt, Human
uuugugguuguuaaggaacccc

SEQ ID NO: 758241 - RNA, 18 nt, Human
uuuucaucuucuuggcug

SEQ ID NO: 758242 - RNA, 24 nt, Human
uuuuuaguagagacgggguuucac

SEQ ID NO: 758243 - RNA, 24 nt, Human
uuuuuaguagagaugggauuucac

SEQ ID NO: 758244 - RNA, 20 nt, Human
uuuuuguauuuuuaguagag

SEQ ID NO: 758245 - RNA, 21 nt, Human
uuuuuguauuuuuaguagaga

SEQ ID NO: 758246 - RNA, 20 nt, Human
aaaacauacaaaacuucacc

SEQ ID NO: 758247 - RNA, 24 nt, Human
aaagugcugggauuacagguguga

SEQ ID NO: 758248 - RNA, 22 nt, Human
aagaaaagauagaaaaagggac

SEQ ID NO: 758249 - RNA, 20 nt, Human
aagaagaaaagauagaaaaa

SEQ ID NO: 758250 - RNA, 18 nt, Human
aagugcugggauuacagg

SEQ ID NO: 758251 - RNA, 19 nt, Human
aagugcugggauuacaggu

SEQ ID NO: 758252 - RNA, 26 nt, Human
aagugcugggauuacaggugugagcc

SEQ ID NO: 758253 - RNA, 19 nt, Human
aaucauagcuuacugcaac

SEQ ID NO: 758254 - RNA, 24 nt, Human
accaacuucuagcagauccccuua

SEQ ID NO: 758255 - RNA, 18 nt, Human
acucugucacccaggcug

SEQ ID NO: 758256 - RNA, 25 nt, Human
acucugucacccaggcuggaguaca

SEQ ID NO: 758257 - RNA, 21 nt, Human
acugcaaccucaaauuccugg

SEQ ID NO: 758258 - RNA, 22 nt, Human
acugcaaccucaaauuccuggg

SEQ ID NO: 758259 - RNA, 23 nt, Human
acugcaacuuuuuaaaacccacu

SEQ ID NO: 758260 - RNA, 24 nt, Human
agggauccucccaccucagccucc

SEQ ID NO: 758261 - RNA, 21 nt, Human
agggauggaagcagcaauagg

SEQ ID NO: 758262 - RNA, 23 nt, Human
aguacaguggcacaaucauagcu

SEQ ID NO: 758263 - RNA, 18 nt, Human
auagcuuacugcaaccuc

SEQ ID NO: 758264 - RNA, 24 nt, Human
auauuaaauagcuaaagaagaaaa

SEQ ID NO: 758265 - RNA, 24 nt, Human
caaagugcugggauuacaggugug

SEQ ID NO: 758266 - RNA, 18 nt, Human
caacuucuagcagauccc

SEQ ID NO: 758267 - RNA, 24 nt, Human
caccucagccucccaaagugcugg

SEQ ID NO: 758268 - RNA, 22 nt, Human
cacucugucacccaggcuggag

SEQ ID NO: 758269 - RNA, 23 nt, Human
cacucugucacccaggcuggagu

SEQ ID NO: 758270 - RNA, 21 nt, Human
ccaaagugcugggauuacagg

SEQ ID NO: 758271 - RNA, 21 nt, Human
ccaaagugcugggauuacagg

SEQ ID NO: 758272 - RNA, 24 nt, Human
ccaaagugcugggauuacaggugu

SEQ ID NO: 758273 - RNA, 21 nt, Human
cccacuuauaauuucuucuuu

SEQ ID NO: 758274 - RNA, 22 nt, Human
ccucacucugucacccaggcug

SEQ ID NO: 758275 - RNA, 24 nt, Human
ccucacucugucacccaggcugga

SEQ ID NO: 758276 - RNA, 25 nt, Human
ccucacucugucacccaggcuggag

SEQ ID NO: 758277 - RNA, 26 nt, Human
ccucacucugucacccaggcuggagu

SEQ ID NO: 758278 - RNA, 21 nt, Human
ccuccggaggccacggaggcu

SEQ ID NO: 758279 - RNA, 22 nt, Human
cuaguccacuagcuccuuccua

SEQ ID NO: 758280 - RNA, 20 nt, Human
cucacuccuuaccuucccug

SEQ ID NO: 758281 - RNA, 24 nt, Human
cucacucugucacccaggcuggag

SEQ ID NO: 758282 - RNA, 21 nt, Human
cuuacugcaaccucaaauucc

SEQ ID NO: 758283 - RNA, 21 nt, Human
gaaacuguguacucuuuuugc

SEQ ID NO: 758284 - RNA, 20 nt, Human
gaggccacggaggcuguuac

SEQ ID NO: 758285 - RNA, 18 nt, Human
gaugccuggcccacugca

SEQ ID NO: 758286 - RNA, 18 nt, Human
gauuacaggugugagcca

SEQ ID NO: 758287 - RNA, 18 nt, Human
gauuacaggugugagcca

SEQ ID NO: 758288 - RNA, 18 nt, Human
gauuacaggugugagcca

SEQ ID NO: 758289 - RNA, 19 nt, Human
gcuggaguacaguggcaca

SEQ ID NO: 758290 - RNA, 21 nt, Human
ggaggccacggaggcuguuac

SEQ ID NO: 758291 - RNA, 22 nt, Human
gggauggaagcagcaauaggaa

SEQ ID NO: 758292 - RNA, 23 nt, Human
uacaggugugagccaugaugccu

SEQ ID NO: 758293 - RNA, 25 nt, Human
uacccuggcucuaguccacuagcuc

SEQ ID NO: 758294 - RNA, 23 nt, Human
uacugcaaccucaaauuccuggg

SEQ ID NO: 758295 - RNA, 18 nt, Human
uagaaaaaccauuuggcg

SEQ ID NO: 758296 - RNA, 22 nt, Human
uagcagauccccuuacccuggc

SEQ ID NO: 758297 - RNA, 24 nt, Human
uagcagauccccuuacccuggcuc

SEQ ID NO: 758298 - RNA, 24 nt, Human
ucacucugucacccaggcuggagu

SEQ ID NO: 758299 - RNA, 18 nt, Human
ucagccucccaaagugcu

SEQ ID NO: 758300 - RNA, 23 nt, Human
ucccaaagugcugggauuacagg

SEQ ID NO: 758301 - RNA, 27 nt, Human
uccucccaccucagccucccaaagugc

SEQ ID NO: 758302 - RNA, 19 nt, Human
ucuagcagauccccuuacc

SEQ ID NO: 758303 - RNA, 24 nt, Human
ucuaucauuucgagggauggaagc

SEQ ID NO: 758304 - RNA, 18 nt, Human
ucugucacccaggcugga

SEQ ID NO: 758305 - RNA, 24 nt, Human
ucugucacccaggcuggaguacag

SEQ ID NO: 758306 - RNA, 19 nt, Human
ugcaacuuuuuaaaaccca

SEQ ID NO: 758307 - RNA, 24 nt, Human
ugcugggauuacaggugugagcca

SEQ ID NO: 758308 - RNA, 19 nt, Human
uggaaacuguguacucuuu

SEQ ID NO: 758309 - RNA, 23 nt, Human
uggaagcagcaauaggaaacuga

SEQ ID NO: 758310 - RNA, 19 nt, Human
uggaguacaguggcacaau

SEQ ID NO: 758311 - RNA, 24 nt, Human
uggcacaaucauagcuuacugcaa

SEQ ID NO: 758312 - RNA, 18 nt, Human
uggcggaagaccaacuuc

SEQ ID NO: 758313 - RNA, 18 nt, Human
ugggauuacaggugugag

SEQ ID NO: 758314 - RNA, 19 nt, Human
ugggauuacaggugugagc

SEQ ID NO: 758315 - RNA, 21 nt, Human
ugggauuacaggugugagcca

SEQ ID NO: 758316 - RNA, 21 nt, Human
ugggauuacaggugugagcca

SEQ ID NO: 758317 - RNA, 21 nt, Human
ugggauuacaggugugagcca

SEQ ID NO: 758318 - RNA, 22 nt, Human
ugggauuacaggugugagccau

SEQ ID NO: 758319 - RNA, 23 nt, Human
ugggauuacaggugugagccaug

SEQ ID NO: 758320 - RNA, 27 nt, Human
ugggauuacaggugugagccaugaugc

SEQ ID NO: 758321 - RNA, 24 nt, Human
uuacugcaaccucaaauuccuggg

SEQ ID NO: 758322 - RNA, 21 nt, Human
aaacaggucgugcuccucccc

SEQ ID NO: 758323 - RNA, 18 nt, Human
acccaacgcccccuccca

SEQ ID NO: 758324 - RNA, 21 nt, Human
agggaacugagugaggaugau

SEQ ID NO: 758325 - RNA, 24 nt, Human
caaacaggucgugcuccuccccag

SEQ ID NO: 758326 - RNA, 21 nt, Human
cacccaacgcccccucccaga

SEQ ID NO: 758327 - RNA, 20 nt, Human
cagcaaacaggucgugcucc

SEQ ID NO: 758328 - RNA, 24 nt, Human
cagcugucagucugugcuaccagg

SEQ ID NO: 758329 - RNA, 19 nt, Human
ccaaauaaauaccagaggc

SEQ ID NO: 758330 - RNA, 24 nt, Human
ccaaauaaauaccagaggccaccc

SEQ ID NO: 758331 - RNA, 24 nt, Human
ccaaauaaauaccagaggccaccc

SEQ ID NO: 758332 - RNA, 23 nt, Human
ccagaggccacccaacgcccccu

SEQ ID NO: 758333 - RNA, 25 nt, Human
ccagcaaacaggucgugcuccuccc

SEQ ID NO: 758334 - RNA, 20 nt, Human
ccagccccauccugggcauu

SEQ ID NO: 758335 - RNA, 19 nt, Human
cccaagcuauagcccaaga

SEQ ID NO: 758336 - RNA, 22 nt, Human
cccagccccgcccucggccuuc

SEQ ID NO: 758337 - RNA, 22 nt, Human
ccccaagcuauagcccaagagc

SEQ ID NO: 758338 - RNA, 19 nt, Human
ccccagccccauccugggc

SEQ ID NO: 758339 - RNA, 23 nt, Human
ccccagccccauccugggcauuc

SEQ ID NO: 758340 - RNA, 19 nt, Human
cccccauagccacaggccu

SEQ ID NO: 758341 - RNA, 22 nt, Human
ccccgcccucggccuucucuuc

SEQ ID NO: 758342 - RNA, 20 nt, Human
ccccucccagacagggcugu

SEQ ID NO: 758343 - RNA, 21 nt, Human
ccccugugugaggggccccca

SEQ ID NO: 758344 - RNA, 20 nt, Human
cuuggccccaagcuauagcc

SEQ ID NO: 758345 - RNA, 23 nt, Human
gccacccaacgcccccucccaga

SEQ ID NO: 758346 - RNA, 23 nt, Human
gcccagcaaacaggucgugcucc

SEQ ID NO: 758347 - RNA, 23 nt, Human
gccugggucccuguauaggaccc

SEQ ID NO: 758348 - RNA, 23 nt, Human
gcuaccagggaacugagugagga

SEQ ID NO: 758349 - RNA, 25 nt, Human
uaaauaccagaggccacccaacgcc

SEQ ID NO: 758350 - RNA, 23 nt, Human
uaccagaggccacccaacgcccc

SEQ ID NO: 758351 - RNA, 18 nt, Human
uaccagggaacugaguga

SEQ ID NO: 758352 - RNA, 18 nt, Human
uagcccaagagcagcugu

SEQ ID NO: 758353 - RNA, 24 nt, Human
uccccagccccgcccucggccuuc

SEQ ID NO: 758354 - RNA, 21 nt, Human
ucccccagcccuaggcuucua

SEQ ID NO: 758355 - RNA, 23 nt, Human
ucccuguauaggacccuaagggu

SEQ ID NO: 758356 - RNA, 19 nt, Human
ugagacaucuuggccccaa

SEQ ID NO: 758357 - RNA, 24 nt, Human
ugcuaccagggaacugagugagga

SEQ ID NO: 758358 - RNA, 18 nt, Human
uuccucgcccccagcccc

SEQ ID NO: 758359 - RNA, 22 nt, Human
uuggccccaagcuauagcccaa

SEQ ID NO: 758360 - RNA, 19 nt, Human
aaacauccugaagaugaug

SEQ ID NO: 758361 - RNA, 21 nt, Human
aaauagugugauuuagauucu

SEQ ID NO: 758362 - RNA, 19 nt, Human
aaauuauaauuggccacac

SEQ ID NO: 758363 - RNA, 21 nt, Human
aacacauagcucaagcuucca

SEQ ID NO: 758364 - RNA, 18 nt, Human
aagaauuccaaacuauau

SEQ ID NO: 758365 - RNA, 21 nt, Human
aagcaccuucucuggucagcc

SEQ ID NO: 758366 - RNA, 19 nt, Human
aagggcugcaugcuuugca

SEQ ID NO: 758367 - RNA, 24 nt, Human
aaguacucaggaggcugagaacac

SEQ ID NO: 758368 - RNA, 23 nt, Human
acaacaaaacagccccaaacaga

SEQ ID NO: 758369 - RNA, 23 nt, Human
acaguagagcaaagaauuccaaa

SEQ ID NO: 758370 - RNA, 20 nt, Human
acaguggcuaagcuggguug

SEQ ID NO: 758371 - RNA, 21 nt, Human
acgacccuuuaaaacugaaaa

SEQ ID NO: 758372 - RNA, 22 nt, Human
agaaacaacagauuccaaaaca

SEQ ID NO: 758373 - RNA, 21 nt, Human
agaagagagcugcuaccucac

SEQ ID NO: 758374 - RNA, 20 nt, Human
agaaggcaacuuucaaaaca

SEQ ID NO: 758375 - RNA, 24 nt, Human
agaauggcagcggcagcaaauagg

SEQ ID NO: 758376 - RNA, 26 nt, Human
agacaguuuugugacaaagucuuuga

SEQ ID NO: 758377 - RNA, 18 nt, Human
agccguggcaggcgagca

SEQ ID NO: 758378 - RNA, 22 nt, Human
agcugaggaaguccugaagaaa

SEQ ID NO: 758379 - RNA, 30 nt, Human
aggaaggcgcagcucuguggaaaggucacc

SEQ ID NO: 758380 - RNA, 21 nt, Human
aggcagggaccaaaauuccuu

SEQ ID NO: 758381 - RNA, 22 nt, Human
auuuccuggucccuccaaaaug

SEQ ID NO: 758382 - RNA, 19 nt, Human
caaaacagccccaaacaga

SEQ ID NO: 758383 - RNA, 19 nt, Human
caaaacagccccaaacaga

SEQ ID NO: 758384 - RNA, 23 nt, Human
caaagguggacacagaacccacu

SEQ ID NO: 758385 - RNA, 20 nt, Human
caacaaaacagccccaaaca

SEQ ID NO: 758386 - RNA, 19 nt, Human
cacagcaaguuugcucuau

SEQ ID NO: 758387 - RNA, 19 nt, Human
caccgcacggcuggagaaa

SEQ ID NO: 758388 - RNA, 22 nt, Human
caccgcacggcuggagaaacaa

SEQ ID NO: 758389 - RNA, 22 nt, Human
caccgcagcugccagcccccug

SEQ ID NO: 758390 - RNA, 24 nt, Human
cacuacugugugugugugugcgug

SEQ ID NO: 758391 - RNA, 18 nt, Human
cagagcuccugaagcacc

SEQ ID NO: 758392 - RNA, 18 nt, Human
cagcccccugugcuugga

SEQ ID NO: 758393 - RNA, 19 nt, Human
cagcggcagcaaauagggc

SEQ ID NO: 758394 - RNA, 19 nt, Human
caggaggcugagaacacaa

SEQ ID NO: 758395 - RNA, 23 nt, Human
caggcaauggaaacaggagccga

SEQ ID NO: 758396 - RNA, 19 nt, Human
cagggccagccccaaggcu

SEQ ID NO: 758397 - RNA, 21 nt, Human
caguaaacucucaccgcagcu

SEQ ID NO: 758398 - RNA, 19 nt, Human
caucucauuuauuuguagc

SEQ ID NO: 758399 - RNA, 23 nt, Human
caugacuucuuuuuuuucuuuuu

SEQ ID NO: 758400 - RNA, 18 nt, Human
caugaggcugcaccgcac

SEQ ID NO: 758401 - RNA, 21 nt, Human
caugaggcugcaccgcacggc

SEQ ID NO: 758402 - RNA, 23 nt, Human
ccaaaaacauagucuuaaacaaa

SEQ ID NO: 758403 - RNA, 18 nt, Human
ccaaaacaauuaguagca

SEQ ID NO: 758404 - RNA, 20 nt, Human
ccaaacagauugccaugagc

SEQ ID NO: 758405 - RNA, 23 nt, Human
ccagcccccugugcuuggccaug

SEQ ID NO: 758406 - RNA, 18 nt, Human
ccagggcacuuccaacac

SEQ ID NO: 758407 - RNA, 22 nt, Human
ccauccuuaacauucagcugac

SEQ ID NO: 758408 - RNA, 18 nt, Human
ccccuucucuccccgauc

SEQ ID NO: 758409 - RNA, 19 nt, Human
ccccuucucuccccgaucc

SEQ ID NO: 758410 - RNA, 21 nt, Human
cccugugcuuggccaugcccc

SEQ ID NO: 758411 - RNA, 24 nt, Human
cccuuucagaaggcaacuuucaaa

SEQ ID NO: 758412 - RNA, 23 nt, Human
ccgguccuaggcagggaccaaaa

SEQ ID NO: 758413 - RNA, 19 nt, Human
ccuccacagcaaguuugcu

SEQ ID NO: 758414 - RNA, 22 nt, Human
ccugaagcaccuucucugguca

SEQ ID NO: 758415 - RNA, 22 nt, Human
cgguccuaggcagggaccaaaa

SEQ ID NO: 758416 - RNA, 19 nt, Human
cucugcuaguguuaggaaa

SEQ ID NO: 758417 - RNA, 20 nt, Human
cugcaugcuuugcagggcca

SEQ ID NO: 758418 - RNA, 20 nt, Human
cugccagcccccugugcuug

SEQ ID NO: 758419 - RNA, 24 nt, Human
cuuacauuuccuggucccuccaaa

SEQ ID NO: 758420 - RNA, 22 nt, Human
cuuccagagcugcacuuucucu

SEQ ID NO: 758421 - RNA, 21 nt, Human
gaagcaccuucucuggucagc

SEQ ID NO: 758422 - RNA, 19 nt, Human
gagcagaugccugggcucg

SEQ ID NO: 758423 - RNA, 25 nt, Human
gagcuuguuuuuaucacaguuagac

SEQ ID NO: 758424 - RNA, 21 nt, Human
gccacaacaaaacagccccaa

SEQ ID NO: 758425 - RNA, 20 nt, Human
gcuacauuuaccugucaguu

SEQ ID NO: 758426 - RNA, 19 nt, Human
gcugagcucugagggcuac

SEQ ID NO: 758427 - RNA, 19 nt, Human
ggcagaagggcugcaugcu

SEQ ID NO: 758428 - RNA, 20 nt, Human
ggguugggggcaugaggcug

SEQ ID NO: 758429 - RNA, 24 nt, Human
gucaggucacauugucuucuucca

SEQ ID NO: 758430 - RNA, 28 nt, Human
gugugugugugugcgugcaugcggugug

SEQ ID NO: 758431 - RNA, 19 nt, Human
uaaagugcaucauuuuauu

SEQ ID NO: 758432 - RNA, 20 nt, Human
uacauucuuuuucuuuuccu

SEQ ID NO: 758433 - RNA, 19 nt, Human
uaccugagggcugaagggg

SEQ ID NO: 758434 - RNA, 19 nt, Human
uagaauaaaguccugagcu

SEQ ID NO: 758435 - RNA, 23 nt, Human
uagaauaaaguccugagcuuguu

SEQ ID NO: 758436 - RNA, 20 nt, Human
uagaggcagaagggcugcaa

SEQ ID NO: 758437 - RNA, 21 nt, Human
uaguagcaucucauuuauuug

SEQ ID NO: 758438 - RNA, 21 nt, Human
uaguuuuacauucuuuuucuu

SEQ ID NO: 758439 - RNA, 18 nt, Human
uauguaccgucuuugugu

SEQ ID NO: 758440 - RNA, 21 nt, Human
uauguaccgucuuuguguaug

SEQ ID NO: 758441 - RNA, 19 nt, Human
ucacacacgugaggaaggc

SEQ ID NO: 758442 - RNA, 22 nt, Human
ucagaaggcaacuuucaaaaca

SEQ ID NO: 758443 - RNA, 21 nt, Human
ucagccuccaaacuucuucag

SEQ ID NO: 758444 - RNA, 22 nt, Human
uccaaaaugucuaauauagaca

SEQ ID NO: 758445 - RNA, 24 nt, Human
uccacagcaaguuugcucuauaga

SEQ ID NO: 758446 - RNA, 19 nt, Human
uccuggucccuccaaaaug

SEQ ID NO: 758447 - RNA, 20 nt, Human
ucggcugcuucucuacauuu

SEQ ID NO: 758448 - RNA, 18 nt, Human
ucuccaggcucuucuccc

SEQ ID NO: 758449 - RNA, 20 nt, Human
ucucucuguccucugcagau

SEQ ID NO: 758450 - RNA, 22 nt, Human
ucugcaauguaaacaguagagc

SEQ ID NO: 758451 - RNA, 20 nt, Human
ugaagagauggaggauuugg

SEQ ID NO: 758452 - RNA, 22 nt, Human
ugaagagauggaggauuuggug

SEQ ID NO: 758453 - RNA, 23 nt, Human
ugacagaagagagcugcuaccuc

SEQ ID NO: 758454 - RNA, 18 nt, Human
ugacgauaaaaucagacu

SEQ ID NO: 758455 - RNA, 20 nt, Human
ugacuuaagccccuuuaugu

SEQ ID NO: 758456 - RNA, 23 nt, Human
ugagaacacaggccccuucucuc

SEQ ID NO: 758457 - RNA, 18 nt, Human
ugcaugcgcgugcgcaug

SEQ ID NO: 758458 - RNA, 26 nt, Human
ugccacaacaaaacagccccaaacag

SEQ ID NO: 758459 - RNA, 19 nt, Human
ugccaugagcaugcuagcc

SEQ ID NO: 758460 - RNA, 24 nt, Human
ugccuugggcugagcucugagggc

SEQ ID NO: 758461 - RNA, 21 nt, Human
ugcgcgugcgcaugugcacau

SEQ ID NO: 758462 - RNA, 23 nt, Human
ugcgugcaugcgcgugcgcaugu

SEQ ID NO: 758463 - RNA, 20 nt, Human
ugcuaguguuaggaaagcuc

SEQ ID NO: 758464 - RNA, 23 nt, Human
uggcagaaacaacagauuccaaa

SEQ ID NO: 758465 - RNA, 22 nt, Human
uggcuagugccacaacaaaaca

SEQ ID NO: 758466 - RNA, 21 nt, Human
uggguugggggcaugaggcug

SEQ ID NO: 758467 - RNA, 21 nt, Human
uggugucuuacauuuccuggu

SEQ ID NO: 758468 - RNA, 20 nt, Human
uguaaacaguagagcaaaga

SEQ ID NO: 758469 - RNA, 21 nt, Human
uguaugcaggcugacuuaagc

SEQ ID NO: 758470 - RNA, 27 nt, Human
ugucuuacauuuccuggucccuccaaa

SEQ ID NO: 758471 - RNA, 21 nt, Human
ugugcacauacugcagucuug

SEQ ID NO: 758472 - RNA, 18 nt, Human
ugugcgugcaugcgcgug

SEQ ID NO: 758473 - RNA, 25 nt, Human
ugugugcgugcaugcgcgugcgcag

SEQ ID NO: 758474 - RNA, 20 nt, Human
ugugugugugugcgugcaug

SEQ ID NO: 758475 - RNA, 18 nt, Human
ugugugugugugugcgug

SEQ ID NO: 758476 - RNA, 25 nt, Human
uuaaaaaaguaacagcaaaucauga

SEQ ID NO: 758477 - RNA, 22 nt, Human
uuccacggcaaguuuggucguc

SEQ ID NO: 758478 - RNA, 22 nt, Human
uucucuggggacaguaaacucu

SEQ ID NO: 758479 - RNA, 23 nt, Human
uucuuuuucuuuuccuuaaaacu

SEQ ID NO: 758480 - RNA, 18 nt, Human
uuggaccagccaguuucu

SEQ ID NO: 758481 - RNA, 22 nt, Human
uuugcaguuaacuggguccaag

SEQ ID NO: 758482 - RNA, 20 nt, Human
aaaauggucccguccuuaug

SEQ ID NO: 758483 - RNA, 19 nt, Human
aaacuuaaccuagaaguuu

SEQ ID NO: 758484 - RNA, 19 nt, Human
acagugguuuuauugacau

SEQ ID NO: 758485 - RNA, 25 nt, Human
aggaggaggcggugccgccacugcc

SEQ ID NO: 758486 - RNA, 18 nt, Human
auaaaccagaauauuccu

SEQ ID NO: 758487 - RNA, 25 nt, Human
auaaugaggcacacucaguauugca

SEQ ID NO: 758488 - RNA, 27 nt, Human
caaaauaauggggaaacuuuucauagc

SEQ ID NO: 758489 - RNA, 21 nt, Human
caccucacaaguuugauguca

SEQ ID NO: 758490 - RNA, 24 nt, Human
cagaauauuccucuuuuuaucccc

SEQ ID NO: 758491 - RNA, 20 nt, Human
cagcaucguucuuaguccau

SEQ ID NO: 758492 - RNA, 19 nt, Human
ccccggcgccgcgacuggg

SEQ ID NO: 758493 - RNA, 19 nt, Human
cucaaacuuaaccuagaag

SEQ ID NO: 758494 - RNA, 18 nt, Human
gaggaggaggcggugccg

SEQ ID NO: 758495 - RNA, 26 nt, Human
gauaaugaggcacacucaguauugca

SEQ ID NO: 758496 - RNA, 19 nt, Human
gcaucguucuuaguccaug

SEQ ID NO: 758497 - RNA, 25 nt, Human
gcauuuguaauuuaguaauucuuau

SEQ ID NO: 758498 - RNA, 20 nt, Human
gcccccggcgccgcgacugg

SEQ ID NO: 758499 - RNA, 18 nt, Human
gggaaugugaggaggagg

SEQ ID NO: 758500 - RNA, 20 nt, Human
uaaauguccaaugcuucaca

SEQ ID NO: 758501 - RNA, 18 nt, Human
uaauucuuauacaggaca

SEQ ID NO: 758502 - RNA, 24 nt, Human
uauuugguauccuucuugcacugu

SEQ ID NO: 758503 - RNA, 26 nt, Human
ucaccgcauccucuuggggggcccuc

SEQ ID NO: 758504 - RNA, 21 nt, Human
ucuaaccccgccaccccggga

SEQ ID NO: 758505 - RNA, 20 nt, Human
ucuaggaaauaaaccagaau

SEQ ID NO: 758506 - RNA, 20 nt, Human
ucucucuguagacaaaggau

SEQ ID NO: 758507 - RNA, 19 nt, Human
ugacauguacauuccaaua

SEQ ID NO: 758508 - RNA, 25 nt, Human
ugacauguacauuccaauauguuua

SEQ ID NO: 758509 - RNA, 21 nt, Human
ugagaaacugagaacgcucca

SEQ ID NO: 758510 - RNA, 18 nt, Human
ugaggaggaggcggugcc

SEQ ID NO: 758511 - RNA, 22 nt, Human
ugauauguuuauauacagugug

SEQ ID NO: 758512 - RNA, 27 nt, Human
uguuuacagcugcaagauaaugaggca

SEQ ID NO: 758513 - RNA, 23 nt, Human
uuacagcugcaagauaaugaggc

SEQ ID NO: 758514 - RNA, 22 nt, Human
uuaguaauucuuauacaggaca

SEQ ID NO: 758515 - RNA, 20 nt, Human
uuuagacuuuaucacuguau

SEQ ID NO: 758516 - RNA, 24 nt, Human
uuuguaauuuaguaauucuuauac

SEQ ID NO: 758517 - RNA, 19 nt, Human
uuuuuugcuugaaagccag

SEQ ID NO: 758518 - RNA, 23 nt, Human
aaaagccaguuagacccacccau

SEQ ID NO: 758519 - RNA, 23 nt, Human
aaacaaucgaaaaucggcuacaa

SEQ ID NO: 758520 - RNA, 23 nt, Human
aaacuugcaaacaauucucucgg

SEQ ID NO: 758521 - RNA, 22 nt, Human
aaagacauuguauagagacuug

SEQ ID NO: 758522 - RNA, 23 nt, Human
aaagcccuucuccacaccugccc

SEQ ID NO: 758523 - RNA, 19 nt, Human
aaaggggagaaagagaggu

SEQ ID NO: 758524 - RNA, 20 nt, Human
aaaugccuuccugauaccac

SEQ ID NO: 758525 - RNA, 19 nt, Human
aacaacaguagccccaucu

SEQ ID NO: 758526 - RNA, 19 nt, Human
aacaacaguagccccaucu

SEQ ID NO: 758527 - RNA, 18 nt, Human
aacuugcaaacaauucuc

SEQ ID NO: 758528 - RNA, 18 nt, Human
aagaaaaugcagauucaa

SEQ ID NO: 758529 - RNA, 23 nt, Human
aaggaaugagaagggaggggagg

SEQ ID NO: 758530 - RNA, 19 nt, Human
aauacagugugacaccucu

SEQ ID NO: 758531 - RNA, 20 nt, Human
aaugcaaaagcuccaagaga

SEQ ID NO: 758532 - RNA, 23 nt, Human
acaacaguagccccaucuuacag

SEQ ID NO: 758533 - RNA, 19 nt, Human
acaggucacccgcgcagca

SEQ ID NO: 758534 - RNA, 20 nt, Human
acauccuuuaaaaacaaaga

SEQ ID NO: 758535 - RNA, 20 nt, Human
acccuaaacguugaaacaac

SEQ ID NO: 758536 - RNA, 21 nt, Human
acccuuuucguaucuuccacc

SEQ ID NO: 758537 - RNA, 23 nt, Human
agaaggagaggggcggaaaaaga

SEQ ID NO: 758538 - RNA, 21 nt, Human
agaagggaggggaggggagga

SEQ ID NO: 758539 - RNA, 23 nt, Human
agaaugcauacaaacacauccuu

SEQ ID NO: 758540 - RNA, 21 nt, Human
agauucaauuggguggguugc

SEQ ID NO: 758541 - RNA, 22 nt, Human
aggaaagaggaaugcuaaaugu

SEQ ID NO: 758542 - RNA, 19 nt, Human
aggaagcaaaagaggaaga

SEQ ID NO: 758543 - RNA, 18 nt, Human
aggggaggggaggagaga

SEQ ID NO: 758544 - RNA, 19 nt, Human
aggggaggggaggagagau

SEQ ID NO: 758545 - RNA, 19 nt, Human
aguagaaucuaugcucugc

SEQ ID NO: 758546 - RNA, 24 nt, Human
auaaaacccaaaacuugcaaacaa

SEQ ID NO: 758547 - RNA, 25 nt, Human
auacaaacacauccuuuaaaaacaa

SEQ ID NO: 758548 - RNA, 19 nt, Human
augugcugggauacauaug

SEQ ID NO: 758549 - RNA, 23 nt, Human
auuuagccauuaaauucuccaca

SEQ ID NO: 758550 - RNA, 21 nt, Human
cacacgcaagaagagaaagug

SEQ ID NO: 758551 - RNA, 25 nt, Human
cacauccuuuaaaaacaaagaaaag

SEQ ID NO: 758552 - RNA, 18 nt, Human
cagaaugcauacaaacac

SEQ ID NO: 758553 - RNA, 24 nt, Human
cagaaugcauacaaacacauccuu

SEQ ID NO: 758554 - RNA, 22 nt, Human
caguuuacacaaauguuuccca

SEQ ID NO: 758555 - RNA, 21 nt, Human
cauggcuuaaaaggggagaaa

SEQ ID NO: 758556 - RNA, 21 nt, Human
cauugcuugcugcccacaggg

SEQ ID NO: 758557 - RNA, 23 nt, Human
ccacaaaagccaguuagacccac

SEQ ID NO: 758558 - RNA, 21 nt, Human
cccacacgcaagaagagaaag

SEQ ID NO: 758559 - RNA, 18 nt, Human
ccugccccacacgcaaga

SEQ ID NO: 758560 - RNA, 20 nt, Human
cuaaacguugaaacaacaca

SEQ ID NO: 758561 - RNA, 19 nt, Human
cuuccaccgaagcugagaa

SEQ ID NO: 758562 - RNA, 20 nt, Human
cuugcugcccacagggauaa

SEQ ID NO: 758563 - RNA, 27 nt, Human
gaaauugcacacccuuuucguaucuuc

SEQ ID NO: 758564 - RNA, 22 nt, Human
gagaaaucccgugccaaggcac

SEQ ID NO: 758565 - RNA, 19 nt, Human
gagaagggaggggagggga

SEQ ID NO: 758566 - RNA, 18 nt, Human
gaggagagaaggagaggg

SEQ ID NO: 758567 - RNA, 20 nt, Human
gaggggaggggaggagagaa

SEQ ID NO: 758568 - RNA, 19 nt, Human
gcauauaaaaauaggugcu

SEQ ID NO: 758569 - RNA, 23 nt, Human
ggcaggggcgggggagggggagg

SEQ ID NO: 758570 - RNA, 20 nt, Human
gggagaaagagagguggggc

SEQ ID NO: 758571 - RNA, 24 nt, Human
gggagaaagagagguggggcaggg

SEQ ID NO: 758572 - RNA, 22 nt, Human
gggaggggaggagagaaggaga

SEQ ID NO: 758573 - RNA, 19 nt, Human
gggcaggggcgggggaggg

SEQ ID NO: 758574 - RNA, 22 nt, Human
gggcgggggagggggaggaagc

SEQ ID NO: 758575 - RNA, 26 nt, Human
ggggaggggaggagagaaggagaggg

SEQ ID NO: 758576 - RNA, 21 nt, Human
ggggagggggaggaagcaaaa

SEQ ID NO: 758577 - RNA, 23 nt, Human
ggggcgggggagggggaggaagc

SEQ ID NO: 758578 - RNA, 22 nt, Human
uaauaaaacccaaaacuugcaa

SEQ ID NO: 758579 - RNA, 19 nt, Human
uacaauaguagucaaauga

SEQ ID NO: 758580 - RNA, 23 nt, Human
uagccccaucuuacagauauccu

SEQ ID NO: 758581 - RNA, 24 nt, Human
uccacaaaagccaguuagacccac

SEQ ID NO: 758582 - RNA, 25 nt, Human
uccacaaaagccaguuagacccacc

SEQ ID NO: 758583 - RNA, 18 nt, Human
uccaccauucuuagcacu

SEQ ID NO: 758584 - RNA, 19 nt, Human
ucccgugccaaggcacuuc

SEQ ID NO: 758585 - RNA, 25 nt, Human
ucguaucuuccaccgaagcugagaa

SEQ ID NO: 758586 - RNA, 26 nt, Human
ucuguacaaaugcaacuggguuuggu

SEQ ID NO: 758587 - RNA, 23 nt, Human
ugaaaaugccuuccugauaccac

SEQ ID NO: 758588 - RNA, 22 nt, Human
ugaaacaacacaauuaaucaaa

SEQ ID NO: 758589 - RNA, 18 nt, Human
ugaaggaaagaggaaugg

SEQ ID NO: 758590 - RNA, 21 nt, Human
ugagaagggaggggaggggag

SEQ ID NO: 758591 - RNA, 22 nt, Human
uggggcaggggcgggggagggg

SEQ ID NO: 758592 - RNA, 24 nt, Human
uguccagaaugcauacaaacacau

SEQ ID NO: 758593 - RNA, 25 nt, Human
uuaaaggaaauugcacacccuuucc

SEQ ID NO: 758594 - RNA, 19 nt, Human
uuacacaaauguuucccac

SEQ ID NO: 758595 - RNA, 22 nt, Human
uuuguccacaucuauggugauc

SEQ ID NO: 758596 - RNA, 23 nt, Human
uuuuuuuaauucaaauguccaga

SEQ ID NO: 758597 - RNA, 21 nt, Human
cuuuuaccugcaaagcagcua

SEQ ID NO: 758598 - RNA, 21 nt, Human
ucaaaacacaagccucuuuau

SEQ ID NO: 758599 - RNA, 25 nt, Human
ucaaaacacaagccucuuuauucac

SEQ ID NO: 758600 - RNA, 18 nt, Human
uguuuaaaaauccaauua

SEQ ID NO: 758601 - RNA, 24 nt, Human
uucacauuguuuaaaaauccaauu

SEQ ID NO: 758602 - RNA, 24 nt, Human
uuuuuuuuuuucaaaacacaagcc

SEQ ID NO: 758603 - RNA, 22 nt, Human
aaaaacaaauguggccuggagc

SEQ ID NO: 758604 - RNA, 20 nt, Human
aaaacaaacaaaaacaaaaa

SEQ ID NO: 758605 - RNA, 22 nt, Human
aaaacaaacaaaaacaaaaaca

SEQ ID NO: 758606 - RNA, 21 nt, Human
aaaaggacaaaaauagggaaa

SEQ ID NO: 758607 - RNA, 24 nt, Human
aaacaaaaacaaaaacaacaaaaa

SEQ ID NO: 758608 - RNA, 21 nt, Human
aaacaaacaaaaacaaaaaca

SEQ ID NO: 758609 - RNA, 19 nt, Human
aaacacgcaacaaaaaaca

SEQ ID NO: 758610 - RNA, 21 nt, Human
aaauagcaaaacaaacaaaaa

SEQ ID NO: 758611 - RNA, 31 nt, Human
aaauagcaaaacaaacaaaaacaaaaacaaa

SEQ ID NO: 758612 - RNA, 23 nt, Human
aaauggaaguacacucuagaacc

SEQ ID NO: 758613 - RNA, 24 nt, Human
aaauuguugccaaauguauccauu

SEQ ID NO: 758614 - RNA, 23 nt, Human
aacaucuauacauuccuuuauuc

SEQ ID NO: 758615 - RNA, 22 nt, Human
aacuugaugaacacauuaauga

SEQ ID NO: 758616 - RNA, 24 nt, Human
aagaaagcacuuaucaggaggacu

SEQ ID NO: 758617 - RNA, 19 nt, Human
aagacagggaaguccaaac

SEQ ID NO: 758618 - RNA, 21 nt, Human
aagucuaugaacaauucuggu

SEQ ID NO: 758619 - RNA, 26 nt, Human
aagugaccaugcaucaagcugaaggu

SEQ ID NO: 758620 - RNA, 23 nt, Human
aaugucauaaaaaucucaaaaau

SEQ ID NO: 758621 - RNA, 23 nt, Human
acaaacaaaaacaaaaacaacaa

SEQ ID NO: 758622 - RNA, 20 nt, Human
acauuacagagacugaagag

SEQ ID NO: 758623 - RNA, 23 nt, Human
acucagcucagauuccuaauagg

SEQ ID NO: 758624 - RNA, 27 nt, Human
agaaaacaaaaucuagcaaacaaucau

SEQ ID NO: 758625 - RNA, 30 nt, Human
aggaguuuuguguguggaguccuggguuuu

SEQ ID NO: 758626 - RNA, 19 nt, Human
auagaacucuuuacaaaua

SEQ ID NO: 758627 - RNA, 19 nt, Human
aucaauauccacccacucu

SEQ ID NO: 758628 - RNA, 21 nt, Human
aucaugcgcacaaaauguguu

SEQ ID NO: 758629 - RNA, 24 nt, Human
augaauuuaaaauagccacaaaca

SEQ ID NO: 758630 - RNA, 24 nt, Human
auggaagccuagccacguuacugu

SEQ ID NO: 758631 - RNA, 22 nt, Human
caaacaaaaacaaaaacaacaa

SEQ ID NO: 758632 - RNA, 26 nt, Human
caaacaaaaacaaaaacaacaaaaau

SEQ ID NO: 758633 - RNA, 23 nt, Human
caaaguacaccauggaaaacccu

SEQ ID NO: 758634 - RNA, 19 nt, Human
caacaaaaaacagaugcug

SEQ ID NO: 758635 - RNA, 22 nt, Human
caacaaaaaacagaugcugcuu

SEQ ID NO: 758636 - RNA, 22 nt, Human
caacucagaccaucuuaaguua

SEQ ID NO: 758637 - RNA, 22 nt, Human
caauacaaagcccuaguuagua

SEQ ID NO: 758638 - RNA, 24 nt, Human
cacaaaauguguuuucccauaaca

SEQ ID NO: 758639 - RNA, 23 nt, Human
caccaaggauuggaaagcaguag

SEQ ID NO: 758640 - RNA, 20 nt, Human
cacugacauuacaguacuuc

SEQ ID NO: 758641 - RNA, 18 nt, Human
caggaguuuugugugugg

SEQ ID NO: 758642 - RNA, 20 nt, Human
caggggaagguaaaugggcc

SEQ ID NO: 758643 - RNA, 24 nt, Human
caucuccgucacggcccccgggag

SEQ ID NO: 758644 - RNA, 20 nt, Human
caucuguaaacagaauacca

SEQ ID NO: 758645 - RNA, 19 nt, Human
ccaaacaaacaacucagac

SEQ ID NO: 758646 - RNA, 24 nt, Human
ccaacuauauuugagacaaaauua

SEQ ID NO: 758647 - RNA, 25 nt, Human
ccagcagcgccucgcagcgccuccc

SEQ ID NO: 758648 - RNA, 26 nt, Human
ccauggaaaacccucgggggaaaauu

SEQ ID NO: 758649 - RNA, 18 nt, Human
ccccgggagcggcgggga

SEQ ID NO: 758650 - RNA, 21 nt, Human
cccgcccgcggccccuccucc

SEQ ID NO: 758651 - RNA, 19 nt, Human
ccgcccgcggccccuccuc

SEQ ID NO: 758652 - RNA, 19 nt, Human
ccgcugcgggcucccgccu

SEQ ID NO: 758653 - RNA, 23 nt, Human
ccuacauuuauuauuauuacuau

SEQ ID NO: 758654 - RNA, 19 nt, Human
ccuaucagcccugaaaaaa

SEQ ID NO: 758655 - RNA, 19 nt, Human
ccuccgcugcgggcucccg

SEQ ID NO: 758656 - RNA, 20 nt, Human
cuaaacuaugauaccuagca

SEQ ID NO: 758657 - RNA, 20 nt, Human
cuaauacaucuguaaacaga

SEQ ID NO: 758658 - RNA, 19 nt, Human
cuccuccgcugcgggcucc

SEQ ID NO: 758659 - RNA, 20 nt, Human
cuccuggagucccaagggcu

SEQ ID NO: 758660 - RNA, 25 nt, Human
cucugcuguuucuuucacacuuuag

SEQ ID NO: 758661 - RNA, 21 nt, Human
cugucacucuucuauguaggc

SEQ ID NO: 758662 - RNA, 22 nt, Human
cuuccaaugccaacuauauuug

SEQ ID NO: 758663 - RNA, 21 nt, Human
cuuuugucgucuugccccuau

SEQ ID NO: 758664 - RNA, 22 nt, Human
gagugcuuauuucuugcaaagu

SEQ ID NO: 758665 - RNA, 18 nt, Human
gcaaaacaaacaaaaaca

SEQ ID NO: 758666 - RNA, 23 nt, Human
gcaaaacaaacaaaaacaaaaac

SEQ ID NO: 758667 - RNA, 31 nt, Human
gcaaaacaaacaaaaacaaaaacaacaaaag

SEQ ID NO: 758668 - RNA, 22 nt, Human
gcaacuccaaagaguuacauag

SEQ ID NO: 758669 - RNA, 19 nt, Human
gcagcccgagggccagcag

SEQ ID NO: 758670 - RNA, 20 nt, Human
gcccgcggccccuccuccgc

SEQ ID NO: 758671 - RNA, 20 nt, Human
gccuggagcagacccaucag

SEQ ID NO: 758672 - RNA, 19 nt, Human
gcucccgccuuccccgccc

SEQ ID NO: 758673 - RNA, 19 nt, Human
ggagcagacccaucagucc

SEQ ID NO: 758674 - RNA, 19 nt, Human
ggauuggaaagcaguagua

SEQ ID NO: 758675 - RNA, 18 nt, Human
ggcccccgggagcggcgg

SEQ ID NO: 758676 - RNA, 21 nt, Human
gggaagacagggaaguccaaa

SEQ ID NO: 758677 - RNA, 22 nt, Human
gguaauuucaaaccacacuaaa

SEQ ID NO: 758678 - RNA, 20 nt, Human
guagguuuaauaguuggccu

SEQ ID NO: 758679 - RNA, 18 nt, Human
guccauguuuuaugaaca

SEQ ID NO: 758680 - RNA, 22 nt, Human
gugauuggggaucauucuggag

SEQ ID NO: 758681 - RNA, 25 nt, Human
uaaaaaucucaaaaauguaauguua

SEQ ID NO: 758682 - RNA, 23 nt, Human
uaaaauagccacaaacaggguga

SEQ ID NO: 758683 - RNA, 25 nt, Human
uaaaauggaaacacgcaacaaaaaa

SEQ ID NO: 758684 - RNA, 18 nt, Human
uaaaauuucugauugccu

SEQ ID NO: 758685 - RNA, 22 nt, Human
uaaagaagugaccaugcaucaa

SEQ ID NO: 758686 - RNA, 23 nt, Human
uaacaccauauuaucacaagucu

SEQ ID NO: 758687 - RNA, 19 nt, Human
uaacaguauuucaauuaug

SEQ ID NO: 758688 - RNA, 23 nt, Human
uaccaaaagacugaaaaaggaca

SEQ ID NO: 758689 - RNA, 25 nt, Human
uaccugaggaacuaguucagcaguu

SEQ ID NO: 758690 - RNA, 25 nt, Human
uagaaagagaugggaaacaaaaucc

SEQ ID NO: 758691 - RNA, 22 nt, Human
uagacugcagaugcaaacauuu

SEQ ID NO: 758692 - RNA, 23 nt, Human
uagacugcagaugcaaacauuua

SEQ ID NO: 758693 - RNA, 21 nt, Human
uagcaaaacaaacaaaaacaa

SEQ ID NO: 758694 - RNA, 24 nt, Human
uagcauacaugcugcaaaaaccuc

SEQ ID NO: 758695 - RNA, 18 nt, Human
uaugccauguaaguaaac

SEQ ID NO: 758696 - RNA, 23 nt, Human
uaugucacugacauuacaguacu

SEQ ID NO: 758697 - RNA, 20 nt, Human
ucaaauguuccaccaggggc

SEQ ID NO: 758698 - RNA, 18 nt, Human
uccaccauuguuuauuac

SEQ ID NO: 758699 - RNA, 19 nt, Human
ucccaggaguuuugugugg

SEQ ID NO: 758700 - RNA, 22 nt, Human
ucccggccuccgcagguuuccg

SEQ ID NO: 758701 - RNA, 21 nt, Human
uccugggaaagagcugagccu

SEQ ID NO: 758702 - RNA, 23 nt, Human
uccuuuagcauaugguagugucu

SEQ ID NO: 758703 - RNA, 21 nt, Human
ucuacaguauacauucaagua

SEQ ID NO: 758704 - RNA, 21 nt, Human
ucuagaaauaacaugacucau

SEQ ID NO: 758705 - RNA, 20 nt, Human
ucuaucaucaauaguccuuu

SEQ ID NO: 758706 - RNA, 21 nt, Human
ucuucauaucaccaaggauug

SEQ ID NO: 758707 - RNA, 18 nt, Human
ucuuugggggaagacagg

SEQ ID NO: 758708 - RNA, 18 nt, Human
ucuuugggggaagacagg

SEQ ID NO: 758709 - RNA, 24 nt, Human
ugaaaaacacuguauuuagaaaaa

SEQ ID NO: 758710 - RNA, 19 nt, Human
ugaaaaaggacaaaaauag

SEQ ID NO: 758711 - RNA, 24 nt, Human
ugaaaaaggacaaaaauagggaaa

SEQ ID NO: 758712 - RNA, 19 nt, Human
ugaaauacuauacuuaugg

SEQ ID NO: 758713 - RNA, 21 nt, Human
ugaacacauuaaugaaaaaaa

SEQ ID NO: 758714 - RNA, 18 nt, Human
ugaagaaacaugcaauca

SEQ ID NO: 758715 - RNA, 23 nt, Human
ugacacacccuguuucaacuuag

SEQ ID NO: 758716 - RNA, 22 nt, Human
ugacauguuuuuccagaguauc

SEQ ID NO: 758717 - RNA, 19 nt, Human
ugacuaaugcucaagagcu

SEQ ID NO: 758718 - RNA, 21 nt, Human
ugaggaacuaguucagcaguu

SEQ ID NO: 758719 - RNA, 23 nt, Human
ugaggaacuaguucagcaguuaa

SEQ ID NO: 758720 - RNA, 19 nt, Human
ugagucuggcuuuuacucu

SEQ ID NO: 758721 - RNA, 23 nt, Human
ugcuaaauagcaaaacaaacaaa

SEQ ID NO: 758722 - RNA, 18 nt, Human
ugcuguuucuuucacacu

SEQ ID NO: 758723 - RNA, 23 nt, Human
uggccuggagcagacccaucagu

SEQ ID NO: 758724 - RNA, 22 nt, Human
uguacagagacaagcaggguua

SEQ ID NO: 758725 - RNA, 22 nt, Human
ugugagauuagcacagcuguau

SEQ ID NO: 758726 - RNA, 23 nt, Human
uguguaucuauguacaaaacaua

SEQ ID NO: 758727 - RNA, 21 nt, Human
uguguguggaguccuggguuu

SEQ ID NO: 758728 - RNA, 19 nt, Human
uguuccaccaggggcaguc

SEQ ID NO: 758729 - RNA, 22 nt, Human
uguugauuaucuaaagaacuca

SEQ ID NO: 758730 - RNA, 23 nt, Human
uuauuuguaaauguucaaaaaaa

SEQ ID NO: 758731 - RNA, 20 nt, Human
uucacagaaccagaugcuuc

SEQ ID NO: 758732 - RNA, 18 nt, Human
uucaugaagaaacaugca

SEQ ID NO: 758733 - RNA, 22 nt, Human
uuccccgccccuugcagccgcc

SEQ ID NO: 758734 - RNA, 23 nt, Human
uuuacaauaaucaguuuccuaaa

SEQ ID NO: 758735 - RNA, 20 nt, Human
aaaaaaaacagaacaaaaua

SEQ ID NO: 758736 - RNA, 27 nt, Human
aaaaaaacagaacaaaauauaaccaag

SEQ ID NO: 758737 - RNA, 18 nt, Human
aaaaagccaauagagaac

SEQ ID NO: 758738 - RNA, 19 nt, Human
aaaaauacaaaacuuagcc

SEQ ID NO: 758739 - RNA, 19 nt, Human
aaacagacgugacugagau

SEQ ID NO: 758740 - RNA, 23 nt, Human
aaacagccuuauucaaauuuuca

SEQ ID NO: 758741 - RNA, 20 nt, Human
aaagaauuccuuaccauaca

SEQ ID NO: 758742 - RNA, 24 nt, Human
aaagauauuccuggaaacugugug

SEQ ID NO: 758743 - RNA, 23 nt, Human
aaaggccccauccccugcaaauc

SEQ ID NO: 758744 - RNA, 22 nt, Human
aagcagaacauggaggacagga

SEQ ID NO: 758745 - RNA, 18 nt, Human
aaguaugucuugauauac

SEQ ID NO: 758746 - RNA, 20 nt, Human
aauauggugaaaccccaucu

SEQ ID NO: 758747 - RNA, 22 nt, Human
aaucacucaaaugaaaaaaaga

SEQ ID NO: 758748 - RNA, 18 nt, Human
aaugaaaaaucaaagaug

SEQ ID NO: 758749 - RNA, 22 nt, Human
aaugaaaaaucaaagaugacua

SEQ ID NO: 758750 - RNA, 24 nt, Human
acagaacaagacucugccucaaaa

SEQ ID NO: 758751 - RNA, 22 nt, Human
acagggcaguaaaacuuaggag

SEQ ID NO: 758752 - RNA, 20 nt, Human
accauacacagugauacaaa

SEQ ID NO: 758753 - RNA, 21 nt, Human
accgacucccucugugcacgc

SEQ ID NO: 758754 - RNA, 18 nt, Human
accuggucuggagacccu

SEQ ID NO: 758755 - RNA, 24 nt, Human
accuggucuggagacccucucaga

SEQ ID NO: 758756 - RNA, 24 nt, Human
acgccacugcacuccagcccaggc

SEQ ID NO: 758757 - RNA, 25 nt, Human
acgccacugcacuccagcccaggca

SEQ ID NO: 758758 - RNA, 28 nt, Human
acucugccucaaaaaaaaaaaaaaaaaa

SEQ ID NO: 758759 - RNA, 25 nt, Human
acucuguagcuggcaccaaaagcug

SEQ ID NO: 758760 - RNA, 20 nt, Human
acugcaagcuccgccuccug

SEQ ID NO: 758761 - RNA, 24 nt, Human
acugcacuccagcccaggcaacag

SEQ ID NO: 758762 - RNA, 18 nt, Human
acugcacucuagccuggg

SEQ ID NO: 758763 - RNA, 25 nt, Human
acugcacucuagccugggcaacaua

SEQ ID NO: 758764 - RNA, 19 nt, Human
acuuuccuuauuggcuugg

SEQ ID NO: 758765 - RNA, 21 nt, Human
agaaaaaugaagaaauuucaa

SEQ ID NO: 758766 - RNA, 24 nt, Human
agcacuuucggaggcugagguggg

SEQ ID NO: 758767 - RNA, 20 nt, Human
agccaagcagaacauggagg

SEQ ID NO: 758768 - RNA, 23 nt, Human
agccgggcgugcuggcgcaugcc

SEQ ID NO: 758769 - RNA, 19 nt, Human
agccuggccaauaugguga

SEQ ID NO: 758770 - RNA, 22 nt, Human
agccuggccaauauggugaaac

SEQ ID NO: 758771 - RNA, 24 nt, Human
agccuggccaauauggugaaaccc

SEQ ID NO: 758772 - RNA, 23 nt, Human
agccugggcaacauagcaagacc

SEQ ID NO: 758773 - RNA, 24 nt, Human
agccugggcaacauagcaagaccu

SEQ ID NO: 758774 - RNA, 20 nt, Human
agcgcaguggcgcaaucucg

SEQ ID NO: 758775 - RNA, 24 nt, Human
agcgcaguggcgcaaucucggcuc

SEQ ID NO: 758776 - RNA, 24 nt, Human
agcuauacugagucuggauaaaua

SEQ ID NO: 758777 - RNA, 18 nt, Human
agcuccgccuccuggguu

SEQ ID NO: 758778 - RNA, 19 nt, Human
agcugaggcaggguugcuu

SEQ ID NO: 758779 - RNA, 20 nt, Human
aggaguuugagaccagccug

SEQ ID NO: 758780 - RNA, 18 nt, Human
aggcaggagaaucacuug

SEQ ID NO: 758781 - RNA, 24 nt, Human
aggcaggagaaucacuugaacccg

SEQ ID NO: 758782 - RNA, 24 nt, Human
aggcugaggcaggagaaucacuug

SEQ ID NO: 758783 - RNA, 19 nt, Human
aggcugaggugggcggauc

SEQ ID NO: 758784 - RNA, 24 nt, Human
aggugggcggaucacaaggucagg

SEQ ID NO: 758785 - RNA, 21 nt, Human
auaagacaggcaaaaucagaa

SEQ ID NO: 758786 - RNA, 20 nt, Human
auacacuucacuaagaauug

SEQ ID NO: 758787 - RNA, 21 nt, Human
aucacaaggucaggaguuuga

SEQ ID NO: 758788 - RNA, 23 nt, Human
aucacgccacugcacuccagccc

SEQ ID NO: 758789 - RNA, 19 nt, Human
auggugaaaccccaucucu

SEQ ID NO: 758790 - RNA, 18 nt, Human
auuuuaagcuauacugag

SEQ ID NO: 758791 - RNA, 20 nt, Human
caaaaauacaaaacuuagcc

SEQ ID NO: 758792 - RNA, 19 nt, Human
caaaagcugaaaagaauuc

SEQ ID NO: 758793 - RNA, 26 nt, Human
caaaaucagaaggagaaaauuuagaa

SEQ ID NO: 758794 - RNA, 18 nt, Human
caaagaugacuaccugaa

SEQ ID NO: 758795 - RNA, 24 nt, Human
caaaggaaaccaggccuauccccu

SEQ ID NO: 758796 - RNA, 24 nt, Human
caacagaacaagacucugccucaa

SEQ ID NO: 758797 - RNA, 22 nt, Human
caacauagcaagaccuugucuc

SEQ ID NO: 758798 - RNA, 24 nt, Human
caacauagcaagaccuugucucuu

SEQ ID NO: 758799 - RNA, 24 nt, Human
caagaucacgccacugcacuccag

SEQ ID NO: 758800 - RNA, 20 nt, Human
caagggacuugggagcaucu

SEQ ID NO: 758801 - RNA, 24 nt, Human
caauauggugaaaccccaucucug

SEQ ID NO: 758802 - RNA, 24 nt, Human
cacaaggucaggaguuugagacca

SEQ ID NO: 758803 - RNA, 22 nt, Human
caccaaaagcugaaaagaauuc

SEQ ID NO: 758804 - RNA, 23 nt, Human
caccuguagucccagcuacuugg

SEQ ID NO: 758805 - RNA, 23 nt, Human
cacgccuguaaucccagcacuuu

SEQ ID NO: 758806 - RNA, 25 nt, Human
cacuaaaccaaaaagccaauagaga

SEQ ID NO: 758807 - RNA, 19 nt, Human
cacugcacuccagcccagg

SEQ ID NO: 758808 - RNA, 21 nt, Human
cacugcacuccagcccaggca

SEQ ID NO: 758809 - RNA, 22 nt, Human
cacugcacuccagcccaggcaa

SEQ ID NO: 758810 - RNA, 23 nt, Human
cacugcacuccagcccaggcaac

SEQ ID NO: 758811 - RNA, 27 nt, Human
cacugcacuccagcccaggcaacagaa

SEQ ID NO: 758812 - RNA, 18 nt, Human
cacugcacucuagccugg

SEQ ID NO: 758813 - RNA, 19 nt, Human
cacugcacucuagccuggg

SEQ ID NO: 758814 - RNA, 21 nt, Human
cacugcacucuagccugggca

SEQ ID NO: 758815 - RNA, 23 nt, Human
cacugcacucuagccugggcaac

SEQ ID NO: 758816 - RNA, 24 nt, Human
cacugcacucuagccugggcaaca

SEQ ID NO: 758817 - RNA, 25 nt, Human
cagaacaaaauaaggcaguuggacg

SEQ ID NO: 758818 - RNA, 22 nt, Human
cagagcacuagugauuuuucuu

SEQ ID NO: 758819 - RNA, 24 nt, Human
cagcaaugucauguuugugauuuu

SEQ ID NO: 758820 - RNA, 20 nt, Human
cagcaccaaagcaugaguca

SEQ ID NO: 758821 - RNA, 24 nt, Human
cagcacuuucggaggcugaggugg

SEQ ID NO: 758822 - RNA, 20 nt, Human
cagcccaggcaacagaacaa

SEQ ID NO: 758823 - RNA, 24 nt, Human
cagcuacucgggaggcugaggcag

SEQ ID NO: 758824 - RNA, 25 nt, Human
cauagcaagaccuugucucuuaaaa

SEQ ID NO: 758825 - RNA, 18 nt, Human
cauccaaaaccaggaagu

SEQ ID NO: 758826 - RNA, 20 nt, Human
cauccccugcaaaucauuuc

SEQ ID NO: 758827 - RNA, 23 nt, Human
ccaaagaagucuauacaaaaacu

SEQ ID NO: 758828 - RNA, 21 nt, Human
ccaagcagaacauggaggaca

SEQ ID NO: 758829 - RNA, 21 nt, Human
ccaaguauuuacgccaaaucc

SEQ ID NO: 758830 - RNA, 18 nt, Human
ccacaaagaaucacucaa

SEQ ID NO: 758831 - RNA, 20 nt, Human
ccacuacuuccuccuccugu

SEQ ID NO: 758832 - RNA, 19 nt, Human
ccacugcacuccagcccag

SEQ ID NO: 758833 - RNA, 20 nt, Human
ccacugcacuccagcccagg

SEQ ID NO: 758834 - RNA, 20 nt, Human
ccacugcacuccagcccagg

SEQ ID NO: 758835 - RNA, 21 nt, Human
ccacugcacuccagcccaggc

SEQ ID NO: 758836 - RNA, 24 nt, Human
ccacugcacuccagcccaggcaac

SEQ ID NO: 758837 - RNA, 20 nt, Human
ccacugcacucuagccuggg

SEQ ID NO: 758838 - RNA, 20 nt, Human
ccacugcacucuagccuggg

SEQ ID NO: 758839 - RNA, 21 nt, Human
ccacugcacucuagccugggc

SEQ ID NO: 758840 - RNA, 23 nt, Human
ccacugcacucuagccugggcaa

SEQ ID NO: 758841 - RNA, 24 nt, Human
ccacugcacucuagccugggcaac

SEQ ID NO: 758842 - RNA, 23 nt, Human
cccucugugagcucaagguaguc

SEQ ID NO: 758843 - RNA, 21 nt, Human
ccuccuccugucagcaaacag

SEQ ID NO: 758844 - RNA, 23 nt, Human
ccuggccaauauggugaaacccc

SEQ ID NO: 758845 - RNA, 24 nt, Human
ccuggccaauauggugaaacccca

SEQ ID NO: 758846 - RNA, 21 nt, Human
ccugggcaacauagcaagacc

SEQ ID NO: 758847 - RNA, 21 nt, Human
ccugggugcucaaagaaugug

SEQ ID NO: 758848 - RNA, 21 nt, Human
ccuguaauuccagcuacucgg

SEQ ID NO: 758849 - RNA, 22 nt, Human
ccuguaauuccagcuacucggg

SEQ ID NO: 758850 - RNA, 21 nt, Human
ccuguagucccagcuacuugg

SEQ ID NO: 758851 - RNA, 28 nt, Human
ccugugaauagccacugcacucuagccu

SEQ ID NO: 758852 - RNA, 24 nt, Human
cgccacugcacuccagcccaggca

SEQ ID NO: 758853 - RNA, 24 nt, Human
cgccuguaaucccagcacuuucgg

SEQ ID NO: 758854 - RNA, 21 nt, Human
cggaucacaaggucaggaguu

SEQ ID NO: 758855 - RNA, 20 nt, Human
cuaacgaagccaagcagaaa

SEQ ID NO: 758856 - RNA, 25 nt, Human
cuagaaaaauaaagcaaccucaaaa

SEQ ID NO: 758857 - RNA, 23 nt, Human
cucaaaaaaaaaaaaaaaaaaaa

SEQ ID NO: 758858 - RNA, 24 nt, Human
cucacgccuguaaucccagcacuu

SEQ ID NO: 758859 - RNA, 25 nt, Human
cucacgccuguaaucccagcacuuu

SEQ ID NO: 758860 - RNA, 24 nt, Human
cucgcucuguugcccaggcuggag

SEQ ID NO: 758861 - RNA, 19 nt, Human
cucugccucaaaaaaaaaa

SEQ ID NO: 758862 - RNA, 22 nt, Human
cucugccucaaaaaaaaaaaaa

SEQ ID NO: 758863 - RNA, 22 nt, Human
cucuguugcccaggcuggagcg

SEQ ID NO: 758864 - RNA, 23 nt, Human
cucuguugcccaggcuggagcgc

SEQ ID NO: 758865 - RNA, 23 nt, Human
cugaggcaggguugcuugaaccc

SEQ ID NO: 758866 - RNA, 23 nt, Human
cugcaccugugaauagccacugc

SEQ ID NO: 758867 - RNA, 18 nt, Human
cuggauuaaucucacagc

SEQ ID NO: 758868 - RNA, 27 nt, Human
cuuaaaaaaaaaauuggagaggggguu

SEQ ID NO: 758869 - RNA, 19 nt, Human
cuuguucauucccuuggau

SEQ ID NO: 758870 - RNA, 21 nt, Human
gaaaugcucaccgacucccuc

SEQ ID NO: 758871 - RNA, 24 nt, Human
gaagagagcugcaagggacuuggg

SEQ ID NO: 758872 - RNA, 24 nt, Human
gaauagccacugcacucuagccug

SEQ ID NO: 758873 - RNA, 20 nt, Human
gacgugguggcucacgccug

SEQ ID NO: 758874 - RNA, 23 nt, Human
gacgugguggcucacgccuguaa

SEQ ID NO: 758875 - RNA, 23 nt, Human
gagaaucacuugaacccgggggg

SEQ ID NO: 758876 - RNA, 20 nt, Human
gagagggggugggagguaag

SEQ ID NO: 758877 - RNA, 21 nt, Human
gaucacaaggucaggaguuug

SEQ ID NO: 758878 - RNA, 22 nt, Human
gaucacaaggucaggaguuuga

SEQ ID NO: 758879 - RNA, 24 nt, Human
gaucacaaggucaggaguuugaga

SEQ ID NO: 758880 - RNA, 21 nt, Human
gcaggagaaucacuugaaccc

SEQ ID NO: 758881 - RNA, 21 nt, Human
gcaguggcgcaaucucggcuc

SEQ ID NO: 758882 - RNA, 23 nt, Human
gcaguuggacgugguggcucacg

SEQ ID NO: 758883 - RNA, 20 nt, Human
gccaagaucacgccacugca

SEQ ID NO: 758884 - RNA, 24 nt, Human
gccaauauggugaaaccccaucuc

SEQ ID NO: 758885 - RNA, 21 nt, Human
gccacugcacucuagccuggg

SEQ ID NO: 758886 - RNA, 22 nt, Human
gccacugcacucuagccugggc

SEQ ID NO: 758887 - RNA, 24 nt, Human
gccacugcacucuagccugggcaa

SEQ ID NO: 758888 - RNA, 19 nt, Human
gcuggagcgcaguggcgca

SEQ ID NO: 758889 - RNA, 24 nt, Human
gcuggcgcaugccuguaauuccag

SEQ ID NO: 758890 - RNA, 22 nt, Human
ggaaaugcucaccgacucccuc

SEQ ID NO: 758891 - RNA, 22 nt, Human
ggaggcugaggugggcggauca

SEQ ID NO: 758892 - RNA, 23 nt, Human
ggagucucgcucuguugcccagg

SEQ ID NO: 758893 - RNA, 20 nt, Human
ggaucacaaggucaggaguu

SEQ ID NO: 758894 - RNA, 23 nt, Human
ggaucacaaggucaggaguuuga

SEQ ID NO: 758895 - RNA, 24 nt, Human
ggcaaagauuuuaagaaaccgaag

SEQ ID NO: 758896 - RNA, 23 nt, Human
ggcggaucacaaggucaggaguu

SEQ ID NO: 758897 - RNA, 19 nt, Human
ggcggggguugcagugagc

SEQ ID NO: 758898 - RNA, 23 nt, Human
ggcggggguugcagugagccaag

SEQ ID NO: 758899 - RNA, 23 nt, Human
ggcgugcuggcgcaugccuguaa

SEQ ID NO: 758900 - RNA, 23 nt, Human
gggaggcugaggcaggagaauca

SEQ ID NO: 758901 - RNA, 19 nt, Human
gggcaugguagcaugcacc

SEQ ID NO: 758902 - RNA, 24 nt, Human
gggcaugguagcaugcaccuguag

SEQ ID NO: 758903 - RNA, 19 nt, Human
gggguugcagugagccaag

SEQ ID NO: 758904 - RNA, 23 nt, Human
gggguugcagugagccaagauca

SEQ ID NO: 758905 - RNA, 24 nt, Human
gguggcucacgccuguaaucccag

SEQ ID NO: 758906 - RNA, 20 nt, Human
gguugcagugagccaagauc

SEQ ID NO: 758907 - RNA, 24 nt, Human
gucucgcucuguugcccaggcugg

SEQ ID NO: 758908 - RNA, 19 nt, Human
guuuagaugacagucccuc

SEQ ID NO: 758909 - RNA, 24 nt, Human
uaaaacuuacauccaaaaccagga

SEQ ID NO: 758910 - RNA, 19 nt, Human
uaaagguacuagaggugcu

SEQ ID NO: 758911 - RNA, 19 nt, Human
uaacgaagccaagcagaac

SEQ ID NO: 758912 - RNA, 18 nt, Human
uaaguguaaucaauacac

SEQ ID NO: 758913 - RNA, 23 nt, Human
uacaaaggaaaccaggccuaucc

SEQ ID NO: 758914 - RNA, 24 nt, Human
uacacagugauacaauuaaugcuc

SEQ ID NO: 758915 - RNA, 19 nt, Human
uacacugaaaaaauuacac

SEQ ID NO: 758916 - RNA, 24 nt, Human
uaccaaguauuuacgccaaauccu

SEQ ID NO: 758917 - RNA, 19 nt, Human
uacuuccuccuccugucag

SEQ ID NO: 758918 - RNA, 19 nt, Human
uacuugguuagcugaggca

SEQ ID NO: 758919 - RNA, 18 nt, Human
uagaaguuauaugcaucu

SEQ ID NO: 758920 - RNA, 22 nt, Human
uagcaugcaccuguagucccag

SEQ ID NO: 758921 - RNA, 23 nt, Human
uagcugaggcaggguugcuugaa

SEQ ID NO: 758922 - RNA, 23 nt, Human
uagugauuuuucuucugaagaga

SEQ ID NO: 758923 - RNA, 20 nt, Human
uauaagacaggcaaaaucag

SEQ ID NO: 758924 - RNA, 23 nt, Human
uaugaaauuauaaaauuccacaa

SEQ ID NO: 758925 - RNA, 19 nt, Human
uauuaaacaguucagacua

SEQ ID NO: 758926 - RNA, 23 nt, Human
ucaaaaaaaaaaaaaaaaaaaaa

SEQ ID NO: 758927 - RNA, 24 nt, Human
ucacaaggucaggaguuugagacc

SEQ ID NO: 758928 - RNA, 18 nt, Human
ucacugcaagcuccgccu

SEQ ID NO: 758929 - RNA, 23 nt, Human
ucacugcaagcuccgccuccugg

SEQ ID NO: 758930 - RNA, 24 nt, Human
ucacugcaagcuccgccuccuggg

SEQ ID NO: 758931 - RNA, 23 nt, Human
ucacuugaacccggggggcgggg

SEQ ID NO: 758932 - RNA, 21 nt, Human
ucagugguuccccugguuuag

SEQ ID NO: 758933 - RNA, 22 nt, Human
uccacaauacacuucacuaaga

SEQ ID NO: 758934 - RNA, 24 nt, Human
uccccugcaaaucauuucauguaa

SEQ ID NO: 758935 - RNA, 24 nt, Human
ucccuggaaaaggccccauccccu

SEQ ID NO: 758936 - RNA, 21 nt, Human
uccgccgcccagauaaccgcc

SEQ ID NO: 758937 - RNA, 20 nt, Human
uccugaaagcaaaaccucau

SEQ ID NO: 758938 - RNA, 21 nt, Human
uccuggguucaauguugugaa

SEQ ID NO: 758939 - RNA, 18 nt, Human
uccuuauuggcuugggua

SEQ ID NO: 758940 - RNA, 24 nt, Human
ucggaggcugaggugggcggauca

SEQ ID NO: 758941 - RNA, 25 nt, Human
ucgggaggcugaggcaggagaauca

SEQ ID NO: 758942 - RNA, 19 nt, Human
ucucgcucuguugcccagg

SEQ ID NO: 758943 - RNA, 23 nt, Human
ucucgcucuguugcccaggcugg

SEQ ID NO: 758944 - RNA, 24 nt, Human
ucucgcucuguugcccaggcugga

SEQ ID NO: 758945 - RNA, 26 nt, Human
ucucgcucuguugcccaggcuggagc

SEQ ID NO: 758946 - RNA, 29 nt, Human
ucucuuaaaaaaaaaauuggagagggggu

SEQ ID NO: 758947 - RNA, 23 nt, Human
ucugaagcaccuuuugaguugua

SEQ ID NO: 758948 - RNA, 23 nt, Human
ucugccucauuccaaaauuuucc

SEQ ID NO: 758949 - RNA, 19 nt, Human
ucuggauuaaucucacagc

SEQ ID NO: 758950 - RNA, 21 nt, Human
ucuguagcuggcaccaaaagc

SEQ ID NO: 758951 - RNA, 18 nt, Human
ucuguugcccaggcugga

SEQ ID NO: 758952 - RNA, 19 nt, Human
ucuuguucauucccuugga

SEQ ID NO: 758953 - RNA, 20 nt, Human
ugaaaugguugauucugugg

SEQ ID NO: 758954 - RNA, 24 nt, Human
ugaagaccacaagucucaagucaa

SEQ ID NO: 758955 - RNA, 21 nt, Human
ugaaguuccccaaacuugaaa

SEQ ID NO: 758956 - RNA, 23 nt, Human
ugagaccagccuggccaauaugg

SEQ ID NO: 758957 - RNA, 24 nt, Human
ugagaccagccuggccaauauggu

SEQ ID NO: 758958 - RNA, 20 nt, Human
ugaggcaggagaaucacuug

SEQ ID NO: 758959 - RNA, 24 nt, Human
ugaggcaggagaaucacuugaacc

SEQ ID NO: 758960 - RNA, 25 nt, Human
ugaggcaggagaaucacuugaaccc

SEQ ID NO: 758961 - RNA, 21 nt, Human
ugaggcaggguugcuugaacc

SEQ ID NO: 758962 - RNA, 21 nt, Human
ugaggugggcggaucacaagg

SEQ ID NO: 758963 - RNA, 24 nt, Human
ugaggugggcggaucacaagguca

SEQ ID NO: 758964 - RNA, 26 nt, Human
ugaggugggcggaucacaaggucagg

SEQ ID NO: 758965 - RNA, 23 nt, Human
ugaggugggcggaucacaagguu

SEQ ID NO: 758966 - RNA, 23 nt, Human
ugagucaaaaagguuugguauua

SEQ ID NO: 758967 - RNA, 23 nt, Human
ugauauacugugaaacauggcca

SEQ ID NO: 758968 - RNA, 24 nt, Human
ugcaccuguagucccagcuacuug

SEQ ID NO: 758969 - RNA, 19 nt, Human
ugcacgcucacacaugggg

SEQ ID NO: 758970 - RNA, 22 nt, Human
ugcaguaaccuggucuggagac

SEQ ID NO: 758971 - RNA, 21 nt, Human
ugccaaaaauacaaaacuuag

SEQ ID NO: 758972 - RNA, 21 nt, Human
ugcccaggcuggagcgcagug

SEQ ID NO: 758973 - RNA, 24 nt, Human
ugcccaggcuggagcgcaguggcg

SEQ ID NO: 758974 - RNA, 19 nt, Human
ugccucauuccaaaauuuu

SEQ ID NO: 758975 - RNA, 23 nt, Human
ugccuguaauuccagcuacucgg

SEQ ID NO: 758976 - RNA, 24 nt, Human
ugccuguaauuccagcuacucggg

SEQ ID NO: 758977 - RNA, 24 nt, Human
ugcuggcgcaugccuguaauucca

SEQ ID NO: 758978 - RNA, 21 nt, Human
ugcuugauauacugugaaaca

SEQ ID NO: 758979 - RNA, 19 nt, Human
uggacgugguggcucacgc

SEQ ID NO: 758980 - RNA, 21 nt, Human
uggagagggggugggagguaa

SEQ ID NO: 758981 - RNA, 24 nt, Human
uggagcgcaguggcgcaaucucgg

SEQ ID NO: 758982 - RNA, 24 nt, Human
uggagucucgcucuguugcccagg

SEQ ID NO: 758983 - RNA, 24 nt, Human
uggccaauauggugaaaccccauc

SEQ ID NO: 758984 - RNA, 21 nt, Human
uggcgcaugccuguaauucca

SEQ ID NO: 758985 - RNA, 22 nt, Human
uggcucacgccuguaaucccag

SEQ ID NO: 758986 - RNA, 24 nt, Human
uggcucacgccuguaaucccagca

SEQ ID NO: 758987 - RNA, 24 nt, Human
ugguagcaugcaccuguaguccca

SEQ ID NO: 758988 - RNA, 24 nt, Human
ugguggcucacgccuguaauccca

SEQ ID NO: 758989 - RNA, 21 nt, Human
ugugaaacauggccagcucaa

SEQ ID NO: 758990 - RNA, 22 nt, Human
ugugcaauucuuccaguguugc

SEQ ID NO: 758991 - RNA, 22 nt, Human
uguuccacaauacacuucacua

SEQ ID NO: 758992 - RNA, 19 nt, Human
uuacauaauuugcagagga

SEQ ID NO: 758993 - RNA, 22 nt, Human
uuauggucuuuugaaguucccc

SEQ ID NO: 758994 - RNA, 24 nt, Human
uugaacccggggggcggggguugc

SEQ ID NO: 758995 - RNA, 20 nt, Human
uugcagugagccaagaucac

SEQ ID NO: 758996 - RNA, 19 nt, Human
uuuaucgccuaagaaugcu

SEQ ID NO: 758997 - RNA, 24 nt, Human
aaaaaaacauagcaacaaagagac

SEQ ID NO: 758998 - RNA, 25 nt, Human
aaacaaaaaaacauagcaacaaaga

SEQ ID NO: 758999 - RNA, 26 nt, Human
aaacaaaaaaacauagcaacaaagag

SEQ ID NO: 759000 - RNA, 21 nt, Human
aaacagaugggagaacaagac

SEQ ID NO: 759001 - RNA, 24 nt, Human
aaacuuggaagcagcauuuggcag

SEQ ID NO: 759002 - RNA, 18 nt, Human
aaagacacccccgccccc

SEQ ID NO: 759003 - RNA, 24 nt, Human
aaagugcugggauuacaggcguga

SEQ ID NO: 759004 - RNA, 21 nt, Human
aaaguucacauccccccacca

SEQ ID NO: 759005 - RNA, 22 nt, Human
aaaguucacauccccccaccaa

SEQ ID NO: 759006 - RNA, 18 nt, Human
aaccaggggaagaguucc

SEQ ID NO: 759007 - RNA, 21 nt, Human
aagaauaaacagaugggagaa

SEQ ID NO: 759008 - RNA, 23 nt, Human
aagacacccccgcccccagaaga

SEQ ID NO: 759009 - RNA, 20 nt, Human
aagacccuccucuuccuugg

SEQ ID NO: 759010 - RNA, 30 nt, Human
aagacccuccucuuccuuuucccccacagg

SEQ ID NO: 759011 - RNA, 22 nt, Human
aagaguuccugaagaaaugggu

SEQ ID NO: 759012 - RNA, 23 nt, Human
aaggucuuaaagggguuuuggga

SEQ ID NO: 759013 - RNA, 19 nt, Human
aagugcugggauuacaggc

SEQ ID NO: 759014 - RNA, 19 nt, Human
aagugcugggauuacaggc

SEQ ID NO: 759015 - RNA, 24 nt, Human
aaugcaauggcgugaucucggcuc

SEQ ID NO: 759016 - RNA, 22 nt, Human
acaaaaaaacauagcaacaaag

SEQ ID NO: 759017 - RNA, 24 nt, Human
accaugcucggggcucccugaggc

SEQ ID NO: 759018 - RNA, 19 nt, Human
agaaagccccaaaguaguc

SEQ ID NO: 759019 - RNA, 22 nt, Human
agacaaccuucucccgccccuc

SEQ ID NO: 759020 - RNA, 24 nt, Human
agacauggguuuaggaacaugaaa

SEQ ID NO: 759021 - RNA, 22 nt, Human
agagauggguggggggcgaugg

SEQ ID NO: 759022 - RNA, 24 nt, Human
agagcugagcugucaggccugagc

SEQ ID NO: 759023 - RNA, 24 nt, Human
agcauguuagucaggcuggucuug

SEQ ID NO: 759024 - RNA, 20 nt, Human
agccacauggacucaaacuu

SEQ ID NO: 759025 - RNA, 18 nt, Human
agccccaccccacaucag

SEQ ID NO: 759026 - RNA, 23 nt, Human
agccccaccccacaucagacacc

SEQ ID NO: 759027 - RNA, 18 nt, Human
agccccauuucacaggug

SEQ ID NO: 759028 - RNA, 20 nt, Human
agccccauuucacagguggg

SEQ ID NO: 759029 - RNA, 18 nt, Human
agccucugagcaacuccu

SEQ ID NO: 759030 - RNA, 26 nt, Human
agcugcacaugguaggcgcugugugu

SEQ ID NO: 759031 - RNA, 19 nt, Human
aggacuuuggggacccugg

SEQ ID NO: 759032 - RNA, 18 nt, Human
agggcgagggggaggagg

SEQ ID NO: 759033 - RNA, 24 nt, Human
aggugauccacccaucucagccuc

SEQ ID NO: 759034 - RNA, 19 nt, Human
agguucaagugauucuccu

SEQ ID NO: 759035 - RNA, 21 nt, Human
aguagcugggauuacaggugc

SEQ ID NO: 759036 - RNA, 24 nt, Human
agugauucuccuuccucagccuuc

SEQ ID NO: 759037 - RNA, 22 nt, Human
aguggcucugagcaaguuuuaa

SEQ ID NO: 759038 - RNA, 20 nt, Human
augggguuucagcauguuag

SEQ ID NO: 759039 - RNA, 21 nt, Human
augggguuucagcauguuagu

SEQ ID NO: 759040 - RNA, 20 nt, Human
auuccugggaacuucaaaca

SEQ ID NO: 759041 - RNA, 24 nt, Human
caaagugcugggauuacaggcgug

SEQ ID NO: 759042 - RNA, 22 nt, Human
caacaaagagacccagcuucca

SEQ ID NO: 759043 - RNA, 23 nt, Human
caacaaagagacccagcuuccag

SEQ ID NO: 759044 - RNA, 22 nt, Human
caacauacaaaagucuggagaa

SEQ ID NO: 759045 - RNA, 22 nt, Human
caagugauucuccuuccucagc

SEQ ID NO: 759046 - RNA, 24 nt, Human
cacaggugggcaaacugaggcaga

SEQ ID NO: 759047 - RNA, 24 nt, Human
cacauccccccaccaagcacgguc

SEQ ID NO: 759048 - RNA, 24 nt, Human
caccauguccagcuaauuuuucua

SEQ ID NO: 759049 - RNA, 24 nt, Human
caccauguggcucagcaugcaggc

SEQ ID NO: 759050 - RNA, 22 nt, Human
cacccaucucagccucccaaag

SEQ ID NO: 759051 - RNA, 23 nt, Human
cacccaucucagccucccaaagu

SEQ ID NO: 759052 - RNA, 26 nt, Human
caccggaaccccucaaauauuccugg

SEQ ID NO: 759053 - RNA, 19 nt, Human
cagaaugacgggugaccac

SEQ ID NO: 759054 - RNA, 18 nt, Human
cagagauggguggggggc

SEQ ID NO: 759055 - RNA, 19 nt, Human
cagcagugcuggccaagcc

SEQ ID NO: 759056 - RNA, 24 nt, Human
cagcauguuagucaggcuggucuu

SEQ ID NO: 759057 - RNA, 19 nt, Human
cagcccaccgcgugcccug

SEQ ID NO: 759058 - RNA, 19 nt, Human
cagcgagcgcuccucggcc

SEQ ID NO: 759059 - RNA, 21 nt, Human
caggugccugccaccaugucc

SEQ ID NO: 759060 - RNA, 22 nt, Human
caucaccggaaccccucaaaua

SEQ ID NO: 759061 - RNA, 27 nt, Human
caucagacacccuuuggcagauauccu

SEQ ID NO: 759062 - RNA, 24 nt, Human
cauccccccaccaagcacggucuc

SEQ ID NO: 759063 - RNA, 24 nt, Human
caucucagccucccaaagugcugg

SEQ ID NO: 759064 - RNA, 24 nt, Human
cauguuagucaggcuggucuugaa

SEQ ID NO: 759065 - RNA, 22 nt, Human
ccaaagugcugggauuacaggc

SEQ ID NO: 759066 - RNA, 22 nt, Human
ccaaagugcugggauuacaggc

SEQ ID NO: 759067 - RNA, 24 nt, Human
ccaaagugcugggauuacaggcgu

SEQ ID NO: 759068 - RNA, 23 nt, Human
ccaagauccccagaacaaccagg

SEQ ID NO: 759069 - RNA, 24 nt, Human
ccacagagaagaucccuaaacaca

SEQ ID NO: 759070 - RNA, 22 nt, Human
ccacaucagacacccuuuggca

SEQ ID NO: 759071 - RNA, 26 nt, Human
ccacccaucucagccucccaaagugc

SEQ ID NO: 759072 - RNA, 19 nt, Human
ccaccuagaaccuuccugg

SEQ ID NO: 759073 - RNA, 19 nt, Human
ccacugcgcccagccccaa

SEQ ID NO: 759074 - RNA, 20 nt, Human
ccacugcgcccagccccaau

SEQ ID NO: 759075 - RNA, 23 nt, Human
ccagaaucuuccaccggcuuucc

SEQ ID NO: 759076 - RNA, 25 nt, Human
ccagccccaccccacaucagacacc

SEQ ID NO: 759077 - RNA, 24 nt, Human
cccaagauccccagaacaaccagg

SEQ ID NO: 759078 - RNA, 19 nt, Human
cccaccccacaucagacac

SEQ ID NO: 759079 - RNA, 22 nt, Human
cccaccccacaucagacacccu

SEQ ID NO: 759080 - RNA, 22 nt, Human
ccccagaacaaccaggggaaga

SEQ ID NO: 759081 - RNA, 21 nt, Human
ccccccaccaagcacggucuc

SEQ ID NO: 759082 - RNA, 21 nt, Human
cccgacuacccucagaaucca

SEQ ID NO: 759083 - RNA, 18 nt, Human
cccgcccccagaagacgg

SEQ ID NO: 759084 - RNA, 20 nt, Human
cccgcccccagaagacgggg

SEQ ID NO: 759085 - RNA, 21 nt, Human
cccgccccucaccucugagaa

SEQ ID NO: 759086 - RNA, 22 nt, Human
cccucagaauccaaauucugca

SEQ ID NO: 759087 - RNA, 22 nt, Human
cccugaggcucuguccccacac

SEQ ID NO: 759088 - RNA, 21 nt, Human
ccgaguagcugggauuacagg

SEQ ID NO: 759089 - RNA, 23 nt, Human
ccgaguagcugggauuacaggug

SEQ ID NO: 759090 - RNA, 21 nt, Human
ccgccgcucuggccccgcucu

SEQ ID NO: 759091 - RNA, 23 nt, Human
ccgccgcucuggccccgcucugg

SEQ ID NO: 759092 - RNA, 19 nt, Human
ccgcugaggaaaccuaagg

SEQ ID NO: 759093 - RNA, 22 nt, Human
ccggccccugcuguuaguuccg

SEQ ID NO: 759094 - RNA, 24 nt, Human
ccuacuagguucaagugauucucc

SEQ ID NO: 759095 - RNA, 23 nt, Human
ccugaucucaggugauccaccca

SEQ ID NO: 759096 - RNA, 18 nt, Human
ccuggcucugugcugccc

SEQ ID NO: 759097 - RNA, 24 nt, Human
ccuuccucagccuuccgaguagcu

SEQ ID NO: 759098 - RNA, 26 nt, Human
cgagggggaggagggcaucccaggag

SEQ ID NO: 759099 - RNA, 18 nt, Human
cgaguggccucgccuggc

SEQ ID NO: 759100 - RNA, 21 nt, Human
cgagugucuguccaucugucc

SEQ ID NO: 759101 - RNA, 23 nt, Human
cgcugugcuccucacaaccugga

SEQ ID NO: 759102 - RNA, 19 nt, Human
cgggaucggggccgucugc

SEQ ID NO: 759103 - RNA, 22 nt, Human
cguugcccaggcuagaaugcaa

SEQ ID NO: 759104 - RNA, 19 nt, Human
cucaaacuuggaagcagca

SEQ ID NO: 759105 - RNA, 19 nt, Human
cucaaguggcuaaguggcu

SEQ ID NO: 759106 - RNA, 19 nt, Human
cucacugcaaccucugccu

SEQ ID NO: 759107 - RNA, 24 nt, Human
cucagccuuccgaguagcugggau

SEQ ID NO: 759108 - RNA, 21 nt, Human
cucccaagauccccagaacaa

SEQ ID NO: 759109 - RNA, 18 nt, Human
cuccgugcgaggcccagc

SEQ ID NO: 759110 - RNA, 21 nt, Human
cuccucggccucggcgccgcc

SEQ ID NO: 759111 - RNA, 24 nt, Human
cuccucggccucggcgccgcccgc

SEQ ID NO: 759112 - RNA, 18 nt, Human
cuccucuuccuuuucccc

SEQ ID NO: 759113 - RNA, 19 nt, Human
cuccuuccgcucucucuca

SEQ ID NO: 759114 - RNA, 18 nt, Human
cucugccucagugagcug

SEQ ID NO: 759115 - RNA, 20 nt, Human
cugcaaccucugccuacuag

SEQ ID NO: 759116 - RNA, 24 nt, Human
cugcaaccucugccuacuagguuc

SEQ ID NO: 759117 - RNA, 23 nt, Human
cugccuacuagguucaagugauu

SEQ ID NO: 759118 - RNA, 20 nt, Human
cugcggcuccagcacuggcg

SEQ ID NO: 759119 - RNA, 22 nt, Human
cuggccccagaggagacaaccu

SEQ ID NO: 759120 - RNA, 21 nt, Human
cugguucuggcccugccacuu

SEQ ID NO: 759121 - RNA, 19 nt, Human
cuucaugcuggaccaggcc

SEQ ID NO: 759122 - RNA, 23 nt, Human
cuuuggggacccugguucuggcc

SEQ ID NO: 759123 - RNA, 21 nt, Human
gaaaagacacccccgccccca

SEQ ID NO: 759124 - RNA, 21 nt, Human
gacaaccuucucccgccccuc

SEQ ID NO: 759125 - RNA, 25 nt, Human
gacccuccucuuccuuuucccccac

SEQ ID NO: 759126 - RNA, 19 nt, Human
gacccugguucuggcccug

SEQ ID NO: 759127 - RNA, 23 nt, Human
gacuucagugagguaggugguau

SEQ ID NO: 759128 - RNA, 21 nt, Human
gagaacaagacccuccucuuc

SEQ ID NO: 759129 - RNA, 19 nt, Human
gagcccaaagaauaaacag

SEQ ID NO: 759130 - RNA, 21 nt, Human
gagcugagcugucaggccuga

SEQ ID NO: 759131 - RNA, 19 nt, Human
gaggcucuguccccacacu

SEQ ID NO: 759132 - RNA, 21 nt, Human
gagguauucccagcccagggc

SEQ ID NO: 759133 - RNA, 18 nt, Human
gaguggccucgccuggcu

SEQ ID NO: 759134 - RNA, 24 nt, Human
gaucucaggugauccacccaucuc

SEQ ID NO: 759135 - RNA, 18 nt, Human
gauuacaggcgugagcca

SEQ ID NO: 759136 - RNA, 19 nt, Human
gauuacaggcgugagccac

SEQ ID NO: 759137 - RNA, 22 nt, Human
gauuacaggcgugagccacugc

SEQ ID NO: 759138 - RNA, 18 nt, Human
gauuacaggugccugcca

SEQ ID NO: 759139 - RNA, 22 nt, Human
gauuacaggugccugccaccau

SEQ ID NO: 759140 - RNA, 22 nt, Human
gcaaccucugccuacuagguuc

SEQ ID NO: 759141 - RNA, 21 nt, Human
gcagagggcucuccagagaug

SEQ ID NO: 759142 - RNA, 24 nt, Human
gcccaggcuagaaugcaauggcgu

SEQ ID NO: 759143 - RNA, 21 nt, Human
gccgcugugcuccucacaacc

SEQ ID NO: 759144 - RNA, 18 nt, Human
gccucgccuggcugcggc

SEQ ID NO: 759145 - RNA, 22 nt, Human
gcgugggugagguauucccagc

SEQ ID NO: 759146 - RNA, 19 nt, Human
gcuagaaugcaauggcgug

SEQ ID NO: 759147 - RNA, 25 nt, Human
gcucagcuggaggccuuucuggaac

SEQ ID NO: 759148 - RNA, 23 nt, Human
gcugggcccggccggggcucugc

SEQ ID NO: 759149 - RNA, 18 nt, Human
ggaaaaacaaaccuggga

SEQ ID NO: 759150 - RNA, 22 nt, Human
ggaaaaacaaaccugggaguaa

SEQ ID NO: 759151 - RNA, 23 nt, Human
ggacagcaccauguggcucagca

SEQ ID NO: 759152 - RNA, 22 nt, Human
ggagagggauuuagggccugag

SEQ ID NO: 759153 - RNA, 20 nt, Human
ggcagcugcacaugguaggc

SEQ ID NO: 759154 - RNA, 24 nt, Human
ggcuggucuugaacuccugaucuc

SEQ ID NO: 759155 - RNA, 18 nt, Human
gggacgugaacauagacc

SEQ ID NO: 759156 - RNA, 19 nt, Human
gggcacagggcggagcagc

SEQ ID NO: 759157 - RNA, 19 nt, Human
gggcaggccuggggcuggg

SEQ ID NO: 759158 - RNA, 24 nt, Human
gggcggagcagcgccagcagggga

SEQ ID NO: 759159 - RNA, 18 nt, Human
gggguuucagcauguuag

SEQ ID NO: 759160 - RNA, 22 nt, Human
ggguuucagcauguuagucagg

SEQ ID NO: 759161 - RNA, 18 nt, Human
guagcugggauuacaggu

SEQ ID NO: 759162 - RNA, 22 nt, Human
gucggccccggccccgggaguc

SEQ ID NO: 759163 - RNA, 23 nt, Human
gugaacauagacccgccgcucug

SEQ ID NO: 759164 - RNA, 24 nt, Human
gugauccacccaucucagccuccc

SEQ ID NO: 759165 - RNA, 18 nt, Human
gugauucuccuuccucag

SEQ ID NO: 759166 - RNA, 20 nt, Human
gugauucuccuuccucagcc

SEQ ID NO: 759167 - RNA, 24 nt, Human
gugauucuccuuccucagccuucc

SEQ ID NO: 759168 - RNA, 19 nt, Human
gugcagagggcucuccaga

SEQ ID NO: 759169 - RNA, 23 nt, Human
uaaacagaugggagaacaagacc

SEQ ID NO: 759170 - RNA, 21 nt, Human
uaagauggggucggacaggca

SEQ ID NO: 759171 - RNA, 23 nt, Human
uaaggucuuaaagggguuuuggg

SEQ ID NO: 759172 - RNA, 19 nt, Human
uacaggcgugagccacugc

SEQ ID NO: 759173 - RNA, 24 nt, Human
uacaggcgugagccacugcgccca

SEQ ID NO: 759174 - RNA, 24 nt, Human
uaccgugcauccuugcagauggaa

SEQ ID NO: 759175 - RNA, 20 nt, Human
uacuagguucaagugauucu

SEQ ID NO: 759176 - RNA, 23 nt, Human
uagaaugcaauggcgugaucucg

SEQ ID NO: 759177 - RNA, 24 nt, Human
uagaaugcaauggcgugaucucgg

SEQ ID NO: 759178 - RNA, 23 nt, Human
uagcaacaaagagacccagcuuc

SEQ ID NO: 759179 - RNA, 19 nt, Human
uagggccugagaaaggcag

SEQ ID NO: 759180 - RNA, 23 nt, Human
uaguagacaugggguuucagcau

SEQ ID NO: 759181 - RNA, 24 nt, Human
uaguagacaugggguuucagcaug

SEQ ID NO: 759182 - RNA, 24 nt, Human
uagucaggcuggucuugaacuccu

SEQ ID NO: 759183 - RNA, 20 nt, Human
uaguuccggacaguuccuug

SEQ ID NO: 759184 - RNA, 20 nt, Human
ucaaauggggcuggaccaug

SEQ ID NO: 759185 - RNA, 23 nt, Human
ucacaaccuggacugccucccug

SEQ ID NO: 759186 - RNA, 18 nt, Human
ucacugcaaccucugccu

SEQ ID NO: 759187 - RNA, 19 nt, Human
ucacugcaaccucugccua

SEQ ID NO: 759188 - RNA, 24 nt, Human
ucacugcaaccucugccuacuagg

SEQ ID NO: 759189 - RNA, 20 nt, Human
ucagccuuccgaguagcugg

SEQ ID NO: 759190 - RNA, 18 nt, Human
ucagugagcuggucugag

SEQ ID NO: 759191 - RNA, 24 nt, Human
ucccaaagugcugggauuacaggc

SEQ ID NO: 759192 - RNA, 24 nt, Human
ucccaagauccccagaacaaccag

SEQ ID NO: 759193 - RNA, 18 nt, Human
ucccaccuagaaccuucc

SEQ ID NO: 759194 - RNA, 19 nt, Human
ucccgccccucaccucuga

SEQ ID NO: 759195 - RNA, 23 nt, Human
ucccugaggcucuguccccacac

SEQ ID NO: 759196 - RNA, 22 nt, Human
uccgagcuuggccaaaugcugg

SEQ ID NO: 759197 - RNA, 24 nt, Human
uccgagggcugggcccggccgggg

SEQ ID NO: 759198 - RNA, 22 nt, Human
uccgaguagcugggauuacagg

SEQ ID NO: 759199 - RNA, 23 nt, Human
uccgaguagcugggauuacaggu

SEQ ID NO: 759200 - RNA, 24 nt, Human
uccgaguagcugggauuacaggug

SEQ ID NO: 759201 - RNA, 24 nt, Human
ucgaguggccucgccuggcugcgg

SEQ ID NO: 759202 - RNA, 18 nt, Human
ucgcagaccccgguggcg

SEQ ID NO: 759203 - RNA, 23 nt, Human
ucgcucucguugcccaggcuaga

SEQ ID NO: 759204 - RNA, 21 nt, Human
ucucaaguggcuaaguggcuc

SEQ ID NO: 759205 - RNA, 20 nt, Human
ucucagccucccaaagugcu

SEQ ID NO: 759206 - RNA, 22 nt, Human
ucucccaagauccccagaacaa

SEQ ID NO: 759207 - RNA, 24 nt, Human
ucucccgccccucaccucugagaa

SEQ ID NO: 759208 - RNA, 19 nt, Human
ucucuaaaauagcaugauu

SEQ ID NO: 759209 - RNA, 19 nt, Human
ucugcagguuccuccgugc

SEQ ID NO: 759210 - RNA, 23 nt, Human
ucugcagguuccuccgugcgagg

SEQ ID NO: 759211 - RNA, 23 nt, Human
ucuugaacuccugaucucaggug

SEQ ID NO: 759212 - RNA, 22 nt, Human
ucuuuggcuggaagcaaaaggc

SEQ ID NO: 759213 - RNA, 18 nt, Human
ugaaaccaccagcccacc

SEQ ID NO: 759214 - RNA, 20 nt, Human
ugacucccaucgccggcccc

SEQ ID NO: 759215 - RNA, 20 nt, Human
ugagcaacuccucugccuca

SEQ ID NO: 759216 - RNA, 19 nt, Human
ugagccauccagcagugcu

SEQ ID NO: 759217 - RNA, 21 nt, Human
ugagguaggugguaucagccc

SEQ ID NO: 759218 - RNA, 20 nt, Human
ugagugcccuggcugggugg

SEQ ID NO: 759219 - RNA, 24 nt, Human
ugauccacccaucucagccuccca

SEQ ID NO: 759220 - RNA, 24 nt, Human
ugaucucaggugauccacccaucu

SEQ ID NO: 759221 - RNA, 20 nt, Human
ugauucuccuuccucagccu

SEQ ID NO: 759222 - RNA, 18 nt, Human
ugcaauggcgugaucucg

SEQ ID NO: 759223 - RNA, 21 nt, Human
ugcagcgagcgcuccucggcc

SEQ ID NO: 759224 - RNA, 21 nt, Human
ugcccuggcugggugguuccg

SEQ ID NO: 759225 - RNA, 22 nt, Human
ugccuacuagguucaagugauu

SEQ ID NO: 759226 - RNA, 20 nt, Human
ugcuccucacaaccuggacu

SEQ ID NO: 759227 - RNA, 20 nt, Human
ugcuccuuccgcucucucuc

SEQ ID NO: 759228 - RNA, 24 nt, Human
ugcugggauuacaggcgugagcca

SEQ ID NO: 759229 - RNA, 19 nt, Human
uggaaaaacaaaccuggga

SEQ ID NO: 759230 - RNA, 19 nt, Human
uggccaaaugcuggcccca

SEQ ID NO: 759231 - RNA, 22 nt, Human
uggccccgcucugggcaucagc

SEQ ID NO: 759232 - RNA, 20 nt, Human
uggcgugaucucggcucacu

SEQ ID NO: 759233 - RNA, 24 nt, Human
uggcugcggcuccagcacuggcgu

SEQ ID NO: 759234 - RNA, 19 nt, Human
uggcuggaagcaaaaggcc

SEQ ID NO: 759235 - RNA, 21 nt, Human
uggcuggaagcaaaaggccgu

SEQ ID NO: 759236 - RNA, 24 nt, Human
ugggaacuucaaacaaaaaaacau

SEQ ID NO: 759237 - RNA, 23 nt, Human
ugggaguaacaccuuacugucug

SEQ ID NO: 759238 - RNA, 19 nt, Human
ugggauuacaggcgugagc

SEQ ID NO: 759239 - RNA, 21 nt, Human
ugggauuacaggcgugagcca

SEQ ID NO: 759240 - RNA, 22 nt, Human
ugggauuacaggcgugagccac

SEQ ID NO: 759241 - RNA, 22 nt, Human
ugggauuacaggcgugagccac

SEQ ID NO: 759242 - RNA, 24 nt, Human
ugggauuacaggcgugagccacug

SEQ ID NO: 759243 - RNA, 26 nt, Human
ugggauuacaggcgugagccacugcg

SEQ ID NO: 759244 - RNA, 21 nt, Human
ugggauuacaggugccugcca

SEQ ID NO: 759245 - RNA, 22 nt, Human
ugggauuacaggugccugccac

SEQ ID NO: 759246 - RNA, 24 nt, Human
ugggauuacaggugccugccacca

SEQ ID NO: 759247 - RNA, 25 nt, Human
ugggauuacaggugccugccaccau

SEQ ID NO: 759248 - RNA, 20 nt, Human
ugggcugguguucguggagu

SEQ ID NO: 759249 - RNA, 18 nt, Human
uggggaggaugagcuggg

SEQ ID NO: 759250 - RNA, 20 nt, Human
uggggaggaugagcugggac

SEQ ID NO: 759251 - RNA, 22 nt, Human
ugggggagagagaaaguucaca

SEQ ID NO: 759252 - RNA, 24 nt, Human
ugggguuucagcauguuagucagg

SEQ ID NO: 759253 - RNA, 26 nt, Human
uggguggggggcgaugggcggggggc

SEQ ID NO: 759254 - RNA, 22 nt, Human
ugguaucagccccauuucacag

SEQ ID NO: 759255 - RNA, 18 nt, Human
uggugccugugugcuggu

SEQ ID NO: 759256 - RNA, 20 nt, Human
ugguucuggcccugccacuu

SEQ ID NO: 759257 - RNA, 19 nt, Human
ugucugguucucaaguggc

SEQ ID NO: 759258 - RNA, 24 nt, Human
uguggcucagcaugcaggccaggc

SEQ ID NO: 759259 - RNA, 22 nt, Human
uguguuucucccaagaucccca

SEQ ID NO: 759260 - RNA, 28 nt, Human
uuacaaagggcgagggggaggagggcau

SEQ ID NO: 759261 - RNA, 24 nt, Human
uuacuuuggaaaaacaaaccuggg

SEQ ID NO: 759262 - RNA, 18 nt, Human
uuaguagacaugggguuu

SEQ ID NO: 759263 - RNA, 20 nt, Human
uuaguagacaugggguuuca

SEQ ID NO: 759264 - RNA, 24 nt, Human
uuaguagacaugggguuucagcau

SEQ ID NO: 759265 - RNA, 23 nt, Human
uucaaacaaaaaaacauagcaac

SEQ ID NO: 759266 - RNA, 23 nt, Human
uucaagugauucuccuuccucag

SEQ ID NO: 759267 - RNA, 24 nt, Human
uucaagugauucuccuuccucagc

SEQ ID NO: 759268 - RNA, 20 nt, Human
uucacauccccccaccaagc

SEQ ID NO: 759269 - RNA, 23 nt, Human
uucccaucuccuauuagaacaaa

SEQ ID NO: 759270 - RNA, 24 nt, Human
uuccgaguagcugggauuacaggu

SEQ ID NO: 759271 - RNA, 24 nt, Human
uuccugggaacuucaaacaaaaaa

SEQ ID NO: 759272 - RNA, 24 nt, Human
uucgcucucguugcccaggcuaga

SEQ ID NO: 759273 - RNA, 19 nt, Human
uugcucugagccauccagc

SEQ ID NO: 759274 - RNA, 18 nt, Human
uugggauuaaaguacagu

SEQ ID NO: 759275 - RNA, 23 nt, Human
uuggguaggggacaggccugcuc

SEQ ID NO: 759276 - RNA, 26 nt, Human
aaaaaaaaaacgaacaaacaaaaagg

SEQ ID NO: 759277 - RNA, 22 nt, Human
aaaacaaacaaacaaaaaaaaa

SEQ ID NO: 759278 - RNA, 23 nt, Human
aaaacacucuuguucccaucuuu

SEQ ID NO: 759279 - RNA, 23 nt, Human
aaaacacucuuguucccaucuuu

SEQ ID NO: 759280 - RNA, 25 nt, Human
aaaaucuucccaaaaauacacacua

SEQ ID NO: 759281 - RNA, 21 nt, Human
aaaauucaaagcacauucccc

SEQ ID NO: 759282 - RNA, 25 nt, Human
aaacaaaaaaaaaacgaacaaacaa

SEQ ID NO: 759283 - RNA, 24 nt, Human
aaacaaacaaaaaaaaaacgaaca

SEQ ID NO: 759284 - RNA, 20 nt, Human
aaacucugugugagccacua

SEQ ID NO: 759285 - RNA, 22 nt, Human
aaaucccccaagaguguauccc

SEQ ID NO: 759286 - RNA, 24 nt, Human
aacacauuucaaaaauaucaaaaa

SEQ ID NO: 759287 - RNA, 21 nt, Human
aacaccagccuggccaacaug

SEQ ID NO: 759288 - RNA, 24 nt, Human
aacagagcaggauugacuguagcc

SEQ ID NO: 759289 - RNA, 19 nt, Human
aacauggugaaaccccguc

SEQ ID NO: 759290 - RNA, 20 nt, Human
aacauggugaaaccccgucu

SEQ ID NO: 759291 - RNA, 21 nt, Human
aacauggugaaaccccgucuc

SEQ ID NO: 759292 - RNA, 18 nt, Human
aacgaauagcagacaaga

SEQ ID NO: 759293 - RNA, 18 nt, Human
aacuaguaaagagaauca

SEQ ID NO: 759294 - RNA, 21 nt, Human
aagaaauguagaggcagaaug

SEQ ID NO: 759295 - RNA, 20 nt, Human
aagaagauuggcucgagugc

SEQ ID NO: 759296 - RNA, 21 nt, Human
aaggucauuucagaacugggu

SEQ ID NO: 759297 - RNA, 24 nt, Human
aaguuaccucauaggucaaagagu

SEQ ID NO: 759298 - RNA, 22 nt, Human
aaguucagauucucgagggguu

SEQ ID NO: 759299 - RNA, 24 nt, Human
aauggcaggugccuguaaucccag

SEQ ID NO: 759300 - RNA, 25 nt, Human
acaaagccaugaaaaagauuccacu

SEQ ID NO: 759301 - RNA, 21 nt, Human
acagaaguaugaagaaacugc

SEQ ID NO: 759302 - RNA, 22 nt, Human
acaggagaauggcuugaaccca

SEQ ID NO: 759303 - RNA, 22 nt, Human
accaauguauugcacacauaca

SEQ ID NO: 759304 - RNA, 20 nt, Human
accacgcugcuccugcuggc

SEQ ID NO: 759305 - RNA, 24 nt, Human
accaguaguuugacaaucugggga

SEQ ID NO: 759306 - RNA, 22 nt, Human
accauugcacuccagccugagc

SEQ ID NO: 759307 - RNA, 23 nt, Human
acccagggacagaggcugcagug

SEQ ID NO: 759308 - RNA, 18 nt, Human
acccaguucucucucugc

SEQ ID NO: 759309 - RNA, 24 nt, Human
accccaccauugcacuccagccug

SEQ ID NO: 759310 - RNA, 18 nt, Human
acgcagggcugggcaugg

SEQ ID NO: 759311 - RNA, 19 nt, Human
acucaaacucuccucucca

SEQ ID NO: 759312 - RNA, 26 nt, Human
agaaggaaguaaaaagugagggaccc

SEQ ID NO: 759313 - RNA, 18 nt, Human
agacaggagaauggcuug

SEQ ID NO: 759314 - RNA, 27 nt, Human
agacaggagaauggcuugaacccaggg

SEQ ID NO: 759315 - RNA, 19 nt, Human
agacuauuugcagaugcau

SEQ ID NO: 759316 - RNA, 22 nt, Human
agaggcugcagugacccgagac

SEQ ID NO: 759317 - RNA, 20 nt, Human
agcaacuaguaaagagaauc

SEQ ID NO: 759318 - RNA, 22 nt, Human
agcaacuaguaaagagaaucaa

SEQ ID NO: 759319 - RNA, 20 nt, Human
agcaaugaccacgcugcucc

SEQ ID NO: 759320 - RNA, 24 nt, Human
agcacuuugggaggcagaggaggg

SEQ ID NO: 759321 - RNA, 22 nt, Human
agccuggccaacauggugaaac

SEQ ID NO: 759322 - RNA, 24 nt, Human
agccuggccaacauggugaaaccc

SEQ ID NO: 759323 - RNA, 20 nt, Human
agccuugggcccccgcuccc

SEQ ID NO: 759324 - RNA, 22 nt, Human
aggaacaagucuaaccugagug

SEQ ID NO: 759325 - RNA, 22 nt, Human
aggaggguggaucaccugaggu

SEQ ID NO: 759326 - RNA, 20 nt, Human
aggcaggcaaauucucaaag

SEQ ID NO: 759327 - RNA, 24 nt, Human
aggcugagacaggagaauggcuug

SEQ ID NO: 759328 - RNA, 24 nt, Human
aggguggaucaccugaggucaaga

SEQ ID NO: 759329 - RNA, 18 nt, Human
agucugacauccaaaagu

SEQ ID NO: 759330 - RNA, 22 nt, Human
auggcaggugccuguaauccca

SEQ ID NO: 759331 - RNA, 21 nt, Human
auucaguagaucugccacacc

SEQ ID NO: 759332 - RNA, 18 nt, Human
auugcacuccagccugag

SEQ ID NO: 759333 - RNA, 20 nt, Human
auuucagaacuggguuuuga

SEQ ID NO: 759334 - RNA, 19 nt, Human
caaaaagaaauguagaggc

SEQ ID NO: 759335 - RNA, 20 nt, Human
caaaaagaaauguagaggca

SEQ ID NO: 759336 - RNA, 22 nt, Human
caaaaauacaccauggcugcca

SEQ ID NO: 759337 - RNA, 21 nt, Human
caaaaauacacuauaaugagu

SEQ ID NO: 759338 - RNA, 18 nt, Human
caaaaugauccuaggaga

SEQ ID NO: 759339 - RNA, 24 nt, Human
caaacucuccucuccagugcaggc

SEQ ID NO: 759340 - RNA, 24 nt, Human
caacauggugaaaccccgucucua

SEQ ID NO: 759341 - RNA, 26 nt, Human
caacauuuggaauuacagaguucugc

SEQ ID NO: 759342 - RNA, 20 nt, Human
caagaaggguucaccauaau

SEQ ID NO: 759343 - RNA, 24 nt, Human
caauacaaccuaaugguuccugaa

SEQ ID NO: 759344 - RNA, 22 nt, Human
cacagucaaugaaaagugcucu

SEQ ID NO: 759345 - RNA, 18 nt, Human
caccaaaugaggcaaaca

SEQ ID NO: 759346 - RNA, 21 nt, Human
caccagccuggccaacauggu

SEQ ID NO: 759347 - RNA, 21 nt, Human
caccaguaaaugaacucacca

SEQ ID NO: 759348 - RNA, 18 nt, Human
cacucaucacuaucaucc

SEQ ID NO: 759349 - RNA, 18 nt, Human
cagcacuuugggaggcag

SEQ ID NO: 759350 - RNA, 26 nt, Human
cagcacuuugggaggcagaggagggu

SEQ ID NO: 759351 - RNA, 19 nt, Human
caggugguaggacugauac

SEQ ID NO: 759352 - RNA, 20 nt, Human
cagugacccgagaccccacc

SEQ ID NO: 759353 - RNA, 22 nt, Human
cauaauggcaggugccuguaau

SEQ ID NO: 759354 - RNA, 27 nt, Human
cauauaaaaauaagguggcaaaacacu

SEQ ID NO: 759355 - RNA, 24 nt, Human
cauggugaaaccccgucucuaaaa

SEQ ID NO: 759356 - RNA, 26 nt, Human
cauuagaguguaccaaaucccccaag

SEQ ID NO: 759357 - RNA, 19 nt, Human
cauugcacuccagccugag

SEQ ID NO: 759358 - RNA, 20 nt, Human
cauugcacuccagccugagc

SEQ ID NO: 759359 - RNA, 21 nt, Human
cauugcacuccagccugagcg

SEQ ID NO: 759360 - RNA, 22 nt, Human
cauugcacuccagccugagcga

SEQ ID NO: 759361 - RNA, 23 nt, Human
cauugcacuccagccugagcgac

SEQ ID NO: 759362 - RNA, 27 nt, Human
cauugcacuccagccugagcgacugag

SEQ ID NO: 759363 - RNA, 19 nt, Human
cauuuacuuuugguaaggu

SEQ ID NO: 759364 - RNA, 24 nt, Human
cauuuacuuuugguaaggucauuu

SEQ ID NO: 759365 - RNA, 24 nt, Human
ccaacacccaguucucucucugcc

SEQ ID NO: 759366 - RNA, 22 nt, Human
ccacacugugcccaguggggca

SEQ ID NO: 759367 - RNA, 28 nt, Human
ccaccauugcacuccagccugagcgacu

SEQ ID NO: 759368 - RNA, 20 nt, Human
ccauugcacuccagccugag

SEQ ID NO: 759369 - RNA, 21 nt, Human
ccauugcacuccagccugagc

SEQ ID NO: 759370 - RNA, 24 nt, Human
ccauugcacuccagccugagcgac

SEQ ID NO: 759371 - RNA, 22 nt, Human
cccaaaagaagauccuauuacc

SEQ ID NO: 759372 - RNA, 22 nt, Human
cccacugucuggaugacaucca

SEQ ID NO: 759373 - RNA, 25 nt, Human
ccccaacuauggggcaaaagucacu

SEQ ID NO: 759374 - RNA, 21 nt, Human
ccccgcuccccgcccuuagga

SEQ ID NO: 759375 - RNA, 18 nt, Human
ccucuaagaagauuggcu

SEQ ID NO: 759376 - RNA, 19 nt, Human
ccugauggcucucacacuu

SEQ ID NO: 759377 - RNA, 23 nt, Human
ccuggccaacauggugaaacccc

SEQ ID NO: 759378 - RNA, 24 nt, Human
ccuggccaacauggugaaaccccg

SEQ ID NO: 759379 - RNA, 24 nt, Human
ccuguaaucacagcacuuugggag

SEQ ID NO: 759380 - RNA, 21 nt, Human
ccuguaaucccagcuacucgg

SEQ ID NO: 759381 - RNA, 24 nt, Human
ccuuccccauuuucauccccaaaa

SEQ ID NO: 759382 - RNA, 21 nt, Human
cgaacaaacaaaaagaaaugu

SEQ ID NO: 759383 - RNA, 22 nt, Human
cguagagaagaaugaaaagcca

SEQ ID NO: 759384 - RNA, 19 nt, Human
cgucucaaaacaaacaaac

SEQ ID NO: 759385 - RNA, 21 nt, Human
cuaaaauucucaauagcugac

SEQ ID NO: 759386 - RNA, 23 nt, Human
cuacaacccgaagguucugccau

SEQ ID NO: 759387 - RNA, 24 nt, Human
cuauucuacaacccgaagguucug

SEQ ID NO: 759388 - RNA, 23 nt, Human
cucaaaacaaacaaacaaaaaaa

SEQ ID NO: 759389 - RNA, 18 nt, Human
cucaaacucuccucucca

SEQ ID NO: 759390 - RNA, 19 nt, Human
cucaaacucuccucuccag

SEQ ID NO: 759391 - RNA, 23 nt, Human
cucaccuccaacauucuagagaa

SEQ ID NO: 759392 - RNA, 20 nt, Human
cuccaacauucuagagaacc

SEQ ID NO: 759393 - RNA, 22 nt, Human
cuuaagcuucucuacucaaugg

SEQ ID NO: 759394 - RNA, 21 nt, Human
cuucccaaaaauacacacgaa

SEQ ID NO: 759395 - RNA, 25 nt, Human
gaaaauauauuuauauuuaacccuc

SEQ ID NO: 759396 - RNA, 18 nt, Human
gaauagcagacaagaagg

SEQ ID NO: 759397 - RNA, 21 nt, Human
gagcaagacuccgucucaaaa

SEQ ID NO: 759398 - RNA, 23 nt, Human
gaggaggguggaucaccugaggu

SEQ ID NO: 759399 - RNA, 23 nt, Human
gaucaccugaggucaagaguuca

SEQ ID NO: 759400 - RNA, 24 nt, Human
gaucaccugaggucaagaguucaa

SEQ ID NO: 759401 - RNA, 22 nt, Human
gauugguucuacauuuccaaca

SEQ ID NO: 759402 - RNA, 24 nt, Human
gccaacauggugaaaccccgucuc

SEQ ID NO: 759403 - RNA, 22 nt, Human
gccacacccaacuggcuccauc

SEQ ID NO: 759404 - RNA, 25 nt, Human
gccuggccaacauggugaaaccccg

SEQ ID NO: 759405 - RNA, 21 nt, Human
ggaaagccuccacccagaagg

SEQ ID NO: 759406 - RNA, 20 nt, Human
ggaagaagagcaucauuuga

SEQ ID NO: 759407 - RNA, 19 nt, Human
gggaggcagaggagggugg

SEQ ID NO: 759408 - RNA, 24 nt, Human
gggcauaauggcaggugccuguaa

SEQ ID NO: 759409 - RNA, 21 nt, Human
gggcaugguggcugaggccug

SEQ ID NO: 759410 - RNA, 24 nt, Human
gggcaugguggcugaggccuguaa

SEQ ID NO: 759411 - RNA, 20 nt, Human
gggguugaacauuagacauc

SEQ ID NO: 759412 - RNA, 25 nt, Human
guaccaaaucccccaagaguguauc

SEQ ID NO: 759413 - RNA, 24 nt, Human
gucuggaugacauccacuggcaac

SEQ ID NO: 759414 - RNA, 20 nt, Human
guuuagaaaacacaaugucu

SEQ ID NO: 759415 - RNA, 18 nt, Human
uaaaaaaaauuucccaua

SEQ ID NO: 759416 - RNA, 21 nt, Human
uaaaaguguuccaaaaauuca

SEQ ID NO: 759417 - RNA, 18 nt, Human
uaaaaucaagcaaugcca

SEQ ID NO: 759418 - RNA, 22 nt, Human
uaaaauucucaauagcugacca

SEQ ID NO: 759419 - RNA, 18 nt, Human
uaaagcagacugcaaaaa

SEQ ID NO: 759420 - RNA, 19 nt, Human
uaagcaaaucuuccaaugg

SEQ ID NO: 759421 - RNA, 24 nt, Human
uaagcaaaucuuccaauggaaaaa

SEQ ID NO: 759422 - RNA, 23 nt, Human
uacacuguucaacauucaagagg

SEQ ID NO: 759423 - RNA, 18 nt, Human
uacagaacagcugcuuuc

SEQ ID NO: 759424 - RNA, 23 nt, Human
uacaucacucaucacuaucaucc

SEQ ID NO: 759425 - RNA, 21 nt, Human
uacauuuccaacagacaucau

SEQ ID NO: 759426 - RNA, 19 nt, Human
uaccacacagaacaacauu

SEQ ID NO: 759427 - RNA, 19 nt, Human
uaccacacagaacaacauu

SEQ ID NO: 759428 - RNA, 21 nt, Human
uaccacacagaacaacauuug

SEQ ID NO: 759429 - RNA, 21 nt, Human
uaccaguuuauccagagccag

SEQ ID NO: 759430 - RNA, 19 nt, Human
uaccccaacccugcacagc

SEQ ID NO: 759431 - RNA, 21 nt, Human
uacgacaaugauugcacaaaa

SEQ ID NO: 759432 - RNA, 22 nt, Human
uacgacaaugauugcacaaaac

SEQ ID NO: 759433 - RNA, 24 nt, Human
uagaaaacacaaugucuguaaguu

SEQ ID NO: 759434 - RNA, 20 nt, Human
uagcacccagcaaugaccac

SEQ ID NO: 759435 - RNA, 19 nt, Human
uagucccuuuccugcccag

SEQ ID NO: 759436 - RNA, 23 nt, Human
ucaaaacaaacaaacaaaaaaaa

SEQ ID NO: 759437 - RNA, 20 nt, Human
ucacagagauccaucagcag

SEQ ID NO: 759438 - RNA, 18 nt, Human
ucacucaucacuaucauc

SEQ ID NO: 759439 - RNA, 20 nt, Human
uccaaaaauucaaagcacau

SEQ ID NO: 759440 - RNA, 28 nt, Human
uccaaaaauucaaagcacauuccccauu

SEQ ID NO: 759441 - RNA, 21 nt, Human
uccaucagcagcaacuaguaa

SEQ ID NO: 759442 - RNA, 19 nt, Human
ucccauauaaaaauaaggu

SEQ ID NO: 759443 - RNA, 26 nt, Human
uccccaaaagaagauccuauuacccc

SEQ ID NO: 759444 - RNA, 24 nt, Human
ucccuaccccaacccugcacagcc

SEQ ID NO: 759445 - RNA, 19 nt, Human
ucuauagugcacugcagcu

SEQ ID NO: 759446 - RNA, 25 nt, Human
ucucaaaacaaacaaacaaaaaaaa

SEQ ID NO: 759447 - RNA, 21 nt, Human
ucuccuggaaaacagcacuca

SEQ ID NO: 759448 - RNA, 25 nt, Human
ucucucagaaauuaucuuaagcucc

SEQ ID NO: 759449 - RNA, 20 nt, Human
ucucuucauuaauaauuauu

SEQ ID NO: 759450 - RNA, 19 nt, Human
ucugccauaacuuaagguc

SEQ ID NO: 759451 - RNA, 22 nt, Human
ucugccauaacuuaaggucacg

SEQ ID NO: 759452 - RNA, 18 nt, Human
ucugggagaagugcauga

SEQ ID NO: 759453 - RNA, 20 nt, Human
ugaagacaucacugaauggc

SEQ ID NO: 759454 - RNA, 23 nt, Human
ugaagugucuuucuuauguuuua

SEQ ID NO: 759455 - RNA, 22 nt, Human
ugacagccuguuuagaaaacac

SEQ ID NO: 759456 - RNA, 24 nt, Human
ugacccgagaccccaccauugcac

SEQ ID NO: 759457 - RNA, 20 nt, Human
ugacuugacucuauagugca

SEQ ID NO: 759458 - RNA, 24 nt, Human
ugagacaggagaauggcuugaacc

SEQ ID NO: 759459 - RNA, 19 nt, Human
ugagagaaaacccuauagc

SEQ ID NO: 759460 - RNA, 21 nt, Human
ugagagaaaacccuauagcau

SEQ ID NO: 759461 - RNA, 21 nt, Human
ugagcaagacuccgucucaaa

SEQ ID NO: 759462 - RNA, 22 nt, Human
ugagcaagacuccgucucaaaa

SEQ ID NO: 759463 - RNA, 19 nt, Human
ugagucuuaagacuacaau

SEQ ID NO: 759464 - RNA, 23 nt, Human
ugccuguaaucccagcuacucgg

SEQ ID NO: 759465 - RNA, 24 nt, Human
ugccuguaaucccagcuacucggg

SEQ ID NO: 759466 - RNA, 18 nt, Human
ugcugaaggucuacaugg

SEQ ID NO: 759467 - RNA, 21 nt, Human
ugcuuaccccaacuauggggc

SEQ ID NO: 759468 - RNA, 23 nt, Human
uggaaugugcaaagaguauaggu

SEQ ID NO: 759469 - RNA, 19 nt, Human
uggaauuacagaguucugc

SEQ ID NO: 759470 - RNA, 23 nt, Human
uggacaaaaauacaccaaccccg

SEQ ID NO: 759471 - RNA, 20 nt, Human
uggacuccuaaacugcuccc

SEQ ID NO: 759472 - RNA, 24 nt, Human
uggaucaccugaggucaagaguuc

SEQ ID NO: 759473 - RNA, 26 nt, Human
uggaucaccugaggucaagaguucaa

SEQ ID NO: 759474 - RNA, 19 nt, Human
uggcaacagugagagaaaa

SEQ ID NO: 759475 - RNA, 24 nt, Human
uggcaggugccuguaaucccagcu

SEQ ID NO: 759476 - RNA, 24 nt, Human
uggccaacauggugaaaccccguc

SEQ ID NO: 759477 - RNA, 19 nt, Human
uggcuccgaguucaacccc

SEQ ID NO: 759478 - RNA, 19 nt, Human
ugggaggcagaggagggug

SEQ ID NO: 759479 - RNA, 24 nt, Human
ugggaggcagaggaggguggauca

SEQ ID NO: 759480 - RNA, 23 nt, Human
ugggagguacacacagagaccug

SEQ ID NO: 759481 - RNA, 23 nt, Human
uggguaaaaucaagcaaugccaa

SEQ ID NO: 759482 - RNA, 22 nt, Human
uggguuuugaggugguuccaau

SEQ ID NO: 759483 - RNA, 20 nt, Human
ugguacauuuaucgauaaca

SEQ ID NO: 759484 - RNA, 23 nt, Human
uguaucaggagugguaauucaau

SEQ ID NO: 759485 - RNA, 20 nt, Human
ugugacugacugaucaccaa

SEQ ID NO: 759486 - RNA, 24 nt, Human
uguuauuucauuuucauuuuuucu

SEQ ID NO: 759487 - RNA, 20 nt, Human
uuagaguguaccaaaucccc

SEQ ID NO: 759488 - RNA, 23 nt, Human
uuauuguuauuguuauuuuuaca

SEQ ID NO: 759489 - RNA, 21 nt, Human
uucaacaccagccuggccaac

SEQ ID NO: 759490 - RNA, 20 nt, Human
uugggaggcagaggagggug

SEQ ID NO: 759491 - RNA, 25 nt, Human
uugggcccccgcuccccgcccuuag

SEQ ID NO: 759492 - RNA, 24 nt, Human
uuucacagucugacauccaaaagu

SEQ ID NO: 759493 - RNA, 18 nt, Human
uuuucuguaagcuuaaga

SEQ ID NO: 759494 - RNA, 23 nt, Human
aaaaaagaaagaaaagaaaagaa

SEQ ID NO: 759495 - RNA, 25 nt, Human
aaaaaugaugaaaaacauugugcaa

SEQ ID NO: 759496 - RNA, 21 nt, Human
aaaagaacccaucuggagggc

SEQ ID NO: 759497 - RNA, 21 nt, Human
aaaguccauggaagccaagag

SEQ ID NO: 759498 - RNA, 20 nt, Human
aacauaaugaaagaucaucu

SEQ ID NO: 759499 - RNA, 18 nt, Human
aagaaacuuuuagacagg

SEQ ID NO: 759500 - RNA, 21 nt, Human
aaggaccaaaaaaagaugaca

SEQ ID NO: 759501 - RNA, 22 nt, Human
aauuaaaaaagaaagaaaagaa

SEQ ID NO: 759502 - RNA, 18 nt, Human
aauuguuuaaaagaaccc

SEQ ID NO: 759503 - RNA, 20 nt, Human
acaaacugaaggcaguaauc

SEQ ID NO: 759504 - RNA, 18 nt, Human
acaggcggcaaacgacgc

SEQ ID NO: 759505 - RNA, 21 nt, Human
accacauuuacgaagaaagca

SEQ ID NO: 759506 - RNA, 24 nt, Human
agaaaacaauucuuugucacacua

SEQ ID NO: 759507 - RNA, 21 nt, Human
agaaagacgcugcccacaaca

SEQ ID NO: 759508 - RNA, 18 nt, Human
agccggagcucuggcaug

SEQ ID NO: 759509 - RNA, 21 nt, Human
agccuuggaucucagaaguca

SEQ ID NO: 759510 - RNA, 18 nt, Human
aggacuucuugcuucagc

SEQ ID NO: 759511 - RNA, 26 nt, Human
aggcggcaaacgacgcagcuggagga

SEQ ID NO: 759512 - RNA, 18 nt, Human
agguuuucucguaccuca

SEQ ID NO: 759513 - RNA, 19 nt, Human
auaauuaaaaaagaaagaa

SEQ ID NO: 759514 - RNA, 19 nt, Human
auauagcaaaggcagagaa

SEQ ID NO: 759515 - RNA, 22 nt, Human
aucuggagggcaggauauuuuu

SEQ ID NO: 759516 - RNA, 23 nt, Human
augacacauuaaaacagagaaaa

SEQ ID NO: 759517 - RNA, 22 nt, Human
caaacgacgcagcuggaggacc

SEQ ID NO: 759518 - RNA, 23 nt, Human
cacaacauaaugaaagaucaucu

SEQ ID NO: 759519 - RNA, 20 nt, Human
cacugagcgagggagcccca

SEQ ID NO: 759520 - RNA, 19 nt, Human
cacuuuguccacuccacau

SEQ ID NO: 759521 - RNA, 26 nt, Human
cagaacacaucuuucucggagugcag

SEQ ID NO: 759522 - RNA, 21 nt, Human
caguggacacggagaacaaug

SEQ ID NO: 759523 - RNA, 23 nt, Human
caugacacauuaaaacagagaaa

SEQ ID NO: 759524 - RNA, 18 nt, Human
caugccaaucguggcugc

SEQ ID NO: 759525 - RNA, 26 nt, Human
cccccaugccaaucguggcugcugug

SEQ ID NO: 759526 - RNA, 19 nt, Human
cccgcacggccuccucuuu

SEQ ID NO: 759527 - RNA, 23 nt, Human
ccuccucuuccuccuccacucuc

SEQ ID NO: 759528 - RNA, 23 nt, Human
ccucuuuguucgcaggcggaggu

SEQ ID NO: 759529 - RNA, 19 nt, Human
cgacugcuggcaacagcag

SEQ ID NO: 759530 - RNA, 22 nt, Human
cgcuucaguggacacggagaac

SEQ ID NO: 759531 - RNA, 18 nt, Human
cggaggucucggcggcuc

SEQ ID NO: 759532 - RNA, 20 nt, Human
cguagcaaggaccaaaaaaa

SEQ ID NO: 759533 - RNA, 23 nt, Human
cuagaaaaguccauggaagccaa

SEQ ID NO: 759534 - RNA, 26 nt, Human
cugcauauagcaaaggcagagaaaga

SEQ ID NO: 759535 - RNA, 19 nt, Human
cuuuguucgcaggcggagg

SEQ ID NO: 759536 - RNA, 25 nt, Human
gaaauacaccuuauuuauaauuucu

SEQ ID NO: 759537 - RNA, 22 nt, Human
gcagagaaagacgcugcccaca

SEQ ID NO: 759538 - RNA, 26 nt, Human
ggauauuuuuuuaauugccagagagc

SEQ ID NO: 759539 - RNA, 20 nt, Human
guccucuuccuccuccucuu

SEQ ID NO: 759540 - RNA, 19 nt, Human
guuacagaacacaucuuuc

SEQ ID NO: 759541 - RNA, 23 nt, Human
uaaaagaacccaucuggagggca

SEQ ID NO: 759542 - RNA, 21 nt, Human
uaaaaucuccuuuguucauua

SEQ ID NO: 759543 - RNA, 21 nt, Human
uaacaaaaaugaugaaaaaca

SEQ ID NO: 759544 - RNA, 20 nt, Human
uaacaaaauaccacauuuac

SEQ ID NO: 759545 - RNA, 19 nt, Human
uagcaaggaccaaaaaaag

SEQ ID NO: 759546 - RNA, 20 nt, Human
uagcaaggaccaaaaaaaga

SEQ ID NO: 759547 - RNA, 21 nt, Human
uauuugccaaccuaaagcccc

SEQ ID NO: 759548 - RNA, 25 nt, Human
ucaccacaaauggcuguauucuggu

SEQ ID NO: 759549 - RNA, 24 nt, Human
ucagcacauuucugacaaagaaag

SEQ ID NO: 759550 - RNA, 25 nt, Human
uccaauaauuaaaaaagaaagaaaa

SEQ ID NO: 759551 - RNA, 20 nt, Human
uccacaggcggcaaacgacg

SEQ ID NO: 759552 - RNA, 21 nt, Human
uccacaggcggcaaacgacgc

SEQ ID NO: 759553 - RNA, 22 nt, Human
uccacauuggccaucagagggg

SEQ ID NO: 759554 - RNA, 25 nt, Human
uccacucucaccacaaauggcugua

SEQ ID NO: 759555 - RNA, 23 nt, Human
uccauggaagccaagagacgaga

SEQ ID NO: 759556 - RNA, 22 nt, Human
uccuccuccucuuccuccucca

SEQ ID NO: 759557 - RNA, 20 nt, Human
ucgcgcccggcggaaccgca

SEQ ID NO: 759558 - RNA, 24 nt, Human
ucggagugcagaugcuccuucuug

SEQ ID NO: 759559 - RNA, 20 nt, Human
ucuuccuccuccucuucccc

SEQ ID NO: 759560 - RNA, 23 nt, Human
ugagaucuagcaauggcuuaaau

SEQ ID NO: 759561 - RNA, 20 nt, Human
ugcaagugacaaguucugca

SEQ ID NO: 759562 - RNA, 21 nt, Human
ugcagggucacacuggggcag

SEQ ID NO: 759563 - RNA, 23 nt, Human
ugcuucagccggagcucuggcau

SEQ ID NO: 759564 - RNA, 20 nt, Human
ugggucuuaagacgagggga

SEQ ID NO: 759565 - RNA, 20 nt, Human
uugucccacagcaaagaaaa

SEQ ID NO: 759566 - RNA, 25 nt, Human
uuuauaauuucuucucauucuauac

SEQ ID NO: 759567 - RNA, 24 nt, Human
uuugcccagcaucaaucuuaguca

SEQ ID NO: 759568 - RNA, 18 nt, Human
uuuuuauauuagcaaaca

SEQ ID NO: 759569 - RNA, 19 nt, Human
aacuuccucuccugcccug

SEQ ID NO: 759570 - RNA, 25 nt, Human
aauuuuuguuuaaaaaaauuaggga

SEQ ID NO: 759571 - RNA, 23 nt, Human
acagguauuguguggauggaugu

SEQ ID NO: 759572 - RNA, 18 nt, Human
agcccuggggccggggca

SEQ ID NO: 759573 - RNA, 22 nt, Human
auggaguuccugggggaagccc

SEQ ID NO: 759574 - RNA, 24 nt, Human
auggccaaauaauauuccauugua

SEQ ID NO: 759575 - RNA, 23 nt, Human
caaauaauauuccauuguaugga

SEQ ID NO: 759576 - RNA, 18 nt, Human
cacagauuugccuauucu

SEQ ID NO: 759577 - RNA, 21 nt, Human
cacguggcacgcaguaggucc

SEQ ID NO: 759578 - RNA, 20 nt, Human
caggcuguggcaugcgucag

SEQ ID NO: 759579 - RNA, 27 nt, Human
cauuccacaauuucaucaucuuccaaa

SEQ ID NO: 759580 - RNA, 18 nt, Human
ccccaaauaugaccauuu

SEQ ID NO: 759581 - RNA, 20 nt, Human
cccuccgcacugcuuuuccc

SEQ ID NO: 759582 - RNA, 27 nt, Human
ccuggggccggggcaucugcccagggc

SEQ ID NO: 759583 - RNA, 19 nt, Human
ccugggggaagcccugggg

SEQ ID NO: 759584 - RNA, 24 nt, Human
ccuguggcagagccaagccggggc

SEQ ID NO: 759585 - RNA, 18 nt, Human
cuccaguaccuggcaacc

SEQ ID NO: 759586 - RNA, 19 nt, Human
cuggaacucucgcuaggcg

SEQ ID NO: 759587 - RNA, 19 nt, Human
cuugugcucugccuuaggc

SEQ ID NO: 759588 - RNA, 22 nt, Human
gcagaugagcagcugacucccc

SEQ ID NO: 759589 - RNA, 21 nt, Human
gccaaauauccuuuacgugac

SEQ ID NO: 759590 - RNA, 21 nt, Human
gcugugccuucucugcucggc

SEQ ID NO: 759591 - RNA, 24 nt, Human
ggaguuccugggggaagcccuggg

SEQ ID NO: 759592 - RNA, 20 nt, Human
gggggggaagaaccuggauc

SEQ ID NO: 759593 - RNA, 19 nt, Human
guccacaguuaccacuggc

SEQ ID NO: 759594 - RNA, 26 nt, Human
uaaaaaaauuagggaaaaaccccaaa

SEQ ID NO: 759595 - RNA, 21 nt, Human
uauuggacaucccugcugugu

SEQ ID NO: 759596 - RNA, 23 nt, Human
ucaucaucuuccaaagaaagccc

SEQ ID NO: 759597 - RNA, 20 nt, Human
ucaugccucuucucucuucc

SEQ ID NO: 759598 - RNA, 23 nt, Human
uccacaauuucaucaucuuccaa

SEQ ID NO: 759599 - RNA, 21 nt, Human
ucccugcugugugguuucacc

SEQ ID NO: 759600 - RNA, 20 nt, Human
ucucuugggcauagaccugg

SEQ ID NO: 759601 - RNA, 21 nt, Human
ucugacggcugcugugccuuc

SEQ ID NO: 759602 - RNA, 19 nt, Human
ugacggcugcugugccuuc

SEQ ID NO: 759603 - RNA, 20 nt, Human
ugacuccccagucccauccc

SEQ ID NO: 759604 - RNA, 22 nt, Human
ugagcagcugacuccccagucc

SEQ ID NO: 759605 - RNA, 21 nt, Human
ugaggcacaggugggcgucug

SEQ ID NO: 759606 - RNA, 20 nt, Human
ugagugugggggggaagaac

SEQ ID NO: 759607 - RNA, 19 nt, Human
ugccucuucucucuuccuc

SEQ ID NO: 759608 - RNA, 21 nt, Human
ugcugugagucuugugcucug

SEQ ID NO: 759609 - RNA, 21 nt, Human
uggauggauguuuucaauucu

SEQ ID NO: 759610 - RNA, 27 nt, Human
uggauggauguuuucaauucucuuggg

SEQ ID NO: 759611 - RNA, 18 nt, Human
uggcagagccaagccccu

SEQ ID NO: 759612 - RNA, 19 nt, Human
uggcagagccaagccccuu

SEQ ID NO: 759613 - RNA, 18 nt, Human
uggcagggcccggacggc

SEQ ID NO: 759614 - RNA, 21 nt, Human
uggcuucuuucacuuagcgua

SEQ ID NO: 759615 - RNA, 20 nt, Human
ugggaagguuauacuuuuau

SEQ ID NO: 759616 - RNA, 25 nt, Human
ugggucuguucuguuacauggaguu

SEQ ID NO: 759617 - RNA, 23 nt, Human
ugugcaaccaucauuccacaauu

SEQ ID NO: 759618 - RNA, 18 nt, Human
uguggauggacauuuggg

SEQ ID NO: 759619 - RNA, 22 nt, Human
uucacaaaguugugcaaccauc

SEQ ID NO: 759620 - RNA, 18 nt, Human
uuccugccauuagccugc

SEQ ID NO: 759621 - RNA, 18 nt, Human
uugauugagugugggggg

SEQ ID NO: 759622 - RNA, 24 nt, Human
uuggacaucccugcugugugguuu

SEQ ID NO: 759623 - RNA, 19 nt, Human
uuuguaggauucacucagg

SEQ ID NO: 759624 - RNA, 22 nt, Human
aaacacacacuauauugcagcc

SEQ ID NO: 759625 - RNA, 20 nt, Human
aaacagcagaaggccaacaa

SEQ ID NO: 759626 - RNA, 23 nt, Human
aaaggcacacgcagccacaaaua

SEQ ID NO: 759627 - RNA, 22 nt, Human
aacacauaguucaaagaaccca

SEQ ID NO: 759628 - RNA, 22 nt, Human
aacaccaaagacuucaaaaaca

SEQ ID NO: 759629 - RNA, 19 nt, Human
aagagaccuuuaaaaguga

SEQ ID NO: 759630 - RNA, 23 nt, Human
aagcagaguggaaguagcaagaa

SEQ ID NO: 759631 - RNA, 21 nt, Human
aauccccuacuugggccagga

SEQ ID NO: 759632 - RNA, 18 nt, Human
acaaaaaugggaagagaa

SEQ ID NO: 759633 - RNA, 21 nt, Human
acaacagugcaauaccaagac

SEQ ID NO: 759634 - RNA, 18 nt, Human
acacacgcccacacacac

SEQ ID NO: 759635 - RNA, 19 nt, Human
acagacacaaucaaaagcc

SEQ ID NO: 759636 - RNA, 26 nt, Human
acagacccaggauggcccucauccca

SEQ ID NO: 759637 - RNA, 21 nt, Human
acauccacagaacugggugac

SEQ ID NO: 759638 - RNA, 20 nt, Human
acccccuuccccaccuauac

SEQ ID NO: 759639 - RNA, 21 nt, Human
acccccuuccccaccuauacc

SEQ ID NO: 759640 - RNA, 19 nt, Human
accuccuccgcuuccuccu

SEQ ID NO: 759641 - RNA, 19 nt, Human
acucugugucaagguagua

SEQ ID NO: 759642 - RNA, 21 nt, Human
agaaacagcaucaugggaugc

SEQ ID NO: 759643 - RNA, 22 nt, Human
agaaagccacacaagaacagca

SEQ ID NO: 759644 - RNA, 23 nt, Human
agaacccacuuucaaagggggaa

SEQ ID NO: 759645 - RNA, 24 nt, Human
agaagaccaaaauguacaaaaaug

SEQ ID NO: 759646 - RNA, 19 nt, Human
agaaggaaaggggucaggg

SEQ ID NO: 759647 - RNA, 24 nt, Human
agaauagcagaaacuccagucuca

SEQ ID NO: 759648 - RNA, 18 nt, Human
agaauguuggggaggaga

SEQ ID NO: 759649 - RNA, 23 nt, Human
agagcugugaggaggagaggagg

SEQ ID NO: 759650 - RNA, 21 nt, Human
agaggaacuucccccaaacac

SEQ ID NO: 759651 - RNA, 19 nt, Human
agcagcuauggggcuggcu

SEQ ID NO: 759652 - RNA, 22 nt, Human
agcggcucccuuuccaucuuga

SEQ ID NO: 759653 - RNA, 21 nt, Human
aggaacgucaaaggaccacag

SEQ ID NO: 759654 - RNA, 18 nt, Human
aggagagcagagcagagc

SEQ ID NO: 759655 - RNA, 22 nt, Human
aggcaaacaaagucuagccagg

SEQ ID NO: 759656 - RNA, 24 nt, Human
aggcaaacaaagucuagccagguc

SEQ ID NO: 759657 - RNA, 24 nt, Human
aggcaagaaaccccggcuucccaa

SEQ ID NO: 759658 - RNA, 23 nt, Human
aggcaggugaaucgacugacagg

SEQ ID NO: 759659 - RNA, 21 nt, Human
agggacccagcagcucugggc

SEQ ID NO: 759660 - RNA, 22 nt, Human
agggcagaggaaugcuccccgc

SEQ ID NO: 759661 - RNA, 18 nt, Human
aggggaaaaggcuugaag

SEQ ID NO: 759662 - RNA, 18 nt, Human
aguacuuuugaccaagua

SEQ ID NO: 759663 - RNA, 19 nt, Human
auauauauauauauauaua

SEQ ID NO: 759664 - RNA, 19 nt, Human
auauauauauauauauaua

SEQ ID NO: 759665 - RNA, 19 nt, Human
auauauaugcauauauaua

SEQ ID NO: 759666 - RNA, 25 nt, Human
augccacuccaaagaggaaccccag

SEQ ID NO: 759667 - RNA, 19 nt, Human
auggccccucccaccucaa

SEQ ID NO: 759668 - RNA, 22 nt, Human
auggggcuggcuuuaugaaaga

SEQ ID NO: 759669 - RNA, 22 nt, Human
auuccaguuacaaacagaacaa

SEQ ID NO: 759670 - RNA, 18 nt, Human
caaaacagagugcaggga

SEQ ID NO: 759671 - RNA, 19 nt, Human
caaaacagagugcagggac

SEQ ID NO: 759672 - RNA, 20 nt, Human
caaacccccaaaacaugagg

SEQ ID NO: 759673 - RNA, 21 nt, Human
caaaggcucagcaccagcaca

SEQ ID NO: 759674 - RNA, 24 nt, Human
caacaccaaagacuucaaaaacau

SEQ ID NO: 759675 - RNA, 25 nt, Human
caacuccauuaggaaugagcuaaag

SEQ ID NO: 759676 - RNA, 21 nt, Human
caagacuggauggagaugagc

SEQ ID NO: 759677 - RNA, 21 nt, Human
cacaaaggcacacgcagccac

SEQ ID NO: 759678 - RNA, 20 nt, Human
cacacacgcccacacacaca

SEQ ID NO: 759679 - RNA, 21 nt, Human
cacagacacaaucaaaagccc

SEQ ID NO: 759680 - RNA, 18 nt, Human
cacagccuggcuguugga

SEQ ID NO: 759681 - RNA, 18 nt, Human
cacagggcaggaggggag

SEQ ID NO: 759682 - RNA, 21 nt, Human
cacaguucugucuucauuggg

SEQ ID NO: 759683 - RNA, 23 nt, Human
caccaaaaacuccaugggaacag

SEQ ID NO: 759684 - RNA, 24 nt, Human
caccaaagacuucaaaaacauucc

SEQ ID NO: 759685 - RNA, 21 nt, Human
caccagcacauccacagaacu

SEQ ID NO: 759686 - RNA, 22 nt, Human
cacccccuuccccaccuauacc

SEQ ID NO: 759687 - RNA, 22 nt, Human
cacgcagccacaaauacacaau

SEQ ID NO: 759688 - RNA, 24 nt, Human
cacguucacuuacucauuuuccca

SEQ ID NO: 759689 - RNA, 19 nt, Human
cacuauauugcagccaggc

SEQ ID NO: 759690 - RNA, 26 nt, Human
cacucacagugacucgaugaaacuca

SEQ ID NO: 759691 - RNA, 22 nt, Human
cacuccaaagaggaaccccaga

SEQ ID NO: 759692 - RNA, 19 nt, Human
cagacacagagggcacaga

SEQ ID NO: 759693 - RNA, 20 nt, Human
cagagaaggaaaggggucag

SEQ ID NO: 759694 - RNA, 19 nt, Human
cagagaggacaagaaaggg

SEQ ID NO: 759695 - RNA, 19 nt, Human
cagcacgaggaugagguag

SEQ ID NO: 759696 - RNA, 22 nt, Human
cagcagaaggccaacaagagua

SEQ ID NO: 759697 - RNA, 24 nt, Human
cagcaguuuagugauucaccccuu

SEQ ID NO: 759698 - RNA, 20 nt, Human
cagccuauuucugcauccuu

SEQ ID NO: 759699 - RNA, 19 nt, Human
caggaggggaggauagaaa

SEQ ID NO: 759700 - RNA, 25 nt, Human
cauauauauauauauauauauacgg

SEQ ID NO: 759701 - RNA, 22 nt, Human
ccaaaaacuccaugggaacaga

SEQ ID NO: 759702 - RNA, 19 nt, Human
ccacccccuuccccaccua

SEQ ID NO: 759703 - RNA, 21 nt, Human
ccagaaagccacacaagaaca

SEQ ID NO: 759704 - RNA, 18 nt, Human
ccagaccauauugugauc

SEQ ID NO: 759705 - RNA, 22 nt, Human
ccaggcaaagagaccuuuaaaa

SEQ ID NO: 759706 - RNA, 26 nt, Human
cccaacuccauuaggaaugagcuaaa

SEQ ID NO: 759707 - RNA, 20 nt, Human
cccagaacccccaaucuaau

SEQ ID NO: 759708 - RNA, 22 nt, Human
cccagaacccccaaucuaaugc

SEQ ID NO: 759709 - RNA, 22 nt, Human
cccagcaaugcacacacgccca

SEQ ID NO: 759710 - RNA, 27 nt, Human
cccagcaccaaaaacuccaugggaaca

SEQ ID NO: 759711 - RNA, 18 nt, Human
ccccagaguccauccauc

SEQ ID NO: 759712 - RNA, 19 nt, Human
cccccuuccccaccuauac

SEQ ID NO: 759713 - RNA, 20 nt, Human
cccccuuccccaccuauacc

SEQ ID NO: 759714 - RNA, 18 nt, Human
ccccgagcgcccgaccuu

SEQ ID NO: 759715 - RNA, 21 nt, Human
ccccuacuugggagguggggu

SEQ ID NO: 759716 - RNA, 18 nt, Human
cccgccucccgggccccg

SEQ ID NO: 759717 - RNA, 19 nt, Human
ccgccgccuccgggccucg

SEQ ID NO: 759718 - RNA, 21 nt, Human
ccggcugaggcaagaaacccc

SEQ ID NO: 759719 - RNA, 18 nt, Human
ccucaccucauugcaucu

SEQ ID NO: 759720 - RNA, 22 nt, Human
ccugcagucuccauggccccuc

SEQ ID NO: 759721 - RNA, 25 nt, Human
cgcagccacaaauacacaauuaacc

SEQ ID NO: 759722 - RNA, 23 nt, Human
cgccucccgggccccgagcgccc

SEQ ID NO: 759723 - RNA, 23 nt, Human
cggccaagaagcucagcagauac

SEQ ID NO: 759724 - RNA, 22 nt, Human
cggcugaggcaagaaaccccgg

SEQ ID NO: 759725 - RNA, 20 nt, Human
cgggauagguuggcaacagg

SEQ ID NO: 759726 - RNA, 21 nt, Human
cuauccaccccaaugucaaaa

SEQ ID NO: 759727 - RNA, 21 nt, Human
cuccugcgccgccgccuccgg

SEQ ID NO: 759728 - RNA, 19 nt, Human
cuccuggccacccccuucc

SEQ ID NO: 759729 - RNA, 19 nt, Human
cucuacaccaaggcaucag

SEQ ID NO: 759730 - RNA, 24 nt, Human
cucuugggaagaagugcuuccuug

SEQ ID NO: 759731 - RNA, 22 nt, Human
cugaggcaagaaaccccggcuu

SEQ ID NO: 759732 - RNA, 18 nt, Human
cugccgacaggagacaca

SEQ ID NO: 759733 - RNA, 22 nt, Human
cugccgacaggagacacaggga

SEQ ID NO: 759734 - RNA, 19 nt, Human
cugcgccgccgccuccggg

SEQ ID NO: 759735 - RNA, 23 nt, Human
cugcgccgccgccuccgggccuc

SEQ ID NO: 759736 - RNA, 21 nt, Human
cugcgcggcccgccucccggg

SEQ ID NO: 759737 - RNA, 18 nt, Human
cugcuccuggccaccccc

SEQ ID NO: 759738 - RNA, 24 nt, Human
cugcuccuggccacccccuucccc

SEQ ID NO: 759739 - RNA, 19 nt, Human
cuugagucuucuuccuucu

SEQ ID NO: 759740 - RNA, 22 nt, Human
cuugccgggcacaguguuagaa

SEQ ID NO: 759741 - RNA, 23 nt, Human
gaaucgacuauccaccccaaugu

SEQ ID NO: 759742 - RNA, 24 nt, Human
gaccagaccauauugugaucccaa

SEQ ID NO: 759743 - RNA, 23 nt, Human
gaccagugugcgaagguagagac

SEQ ID NO: 759744 - RNA, 20 nt, Human
gacugugaugacagcagaau

SEQ ID NO: 759745 - RNA, 18 nt, Human
gagaaggaaaggggucag

SEQ ID NO: 759746 - RNA, 19 nt, Human
gagaaggaaaggggucagg

SEQ ID NO: 759747 - RNA, 24 nt, Human
gagcugaucaacaucccuguaacc

SEQ ID NO: 759748 - RNA, 23 nt, Human
gagcugugaggaggagaggaggg

SEQ ID NO: 759749 - RNA, 22 nt, Human
gaguacuuuugaccaaguauaa

SEQ ID NO: 759750 - RNA, 25 nt, Human
gcaacaccaaagacuucaaaaacau

SEQ ID NO: 759751 - RNA, 18 nt, Human
gcaaugcacacacgccca

SEQ ID NO: 759752 - RNA, 21 nt, Human
gcacagacacaaucaaaagcc

SEQ ID NO: 759753 - RNA, 18 nt, Human
gcacagagcccagcaugg

SEQ ID NO: 759754 - RNA, 20 nt, Human
gcaggacaccaacuucuucu

SEQ ID NO: 759755 - RNA, 19 nt, Human
gcauggaauccccuacuug

SEQ ID NO: 759756 - RNA, 24 nt, Human
gcauggaauccccuacuugggcca

SEQ ID NO: 759757 - RNA, 20 nt, Human
gccgccgccuccgggccucg

SEQ ID NO: 759758 - RNA, 19 nt, Human
gccgggcacaguguuagaa

SEQ ID NO: 759759 - RNA, 22 nt, Human
gccuaauuccauuuugaaaguc

SEQ ID NO: 759760 - RNA, 24 nt, Human
gcgcugcgcggcccgccucccggg

SEQ ID NO: 759761 - RNA, 21 nt, Human
gcggcccgccucccgggcccc

SEQ ID NO: 759762 - RNA, 25 nt, Human
ggacuucccccacccaguggcaggg

SEQ ID NO: 759763 - RNA, 19 nt, Human
ggagggcaggacaccaacu

SEQ ID NO: 759764 - RNA, 20 nt, Human
ggcaaacaaagucuagccag

SEQ ID NO: 759765 - RNA, 18 nt, Human
ggcaggaaauugcccugu

SEQ ID NO: 759766 - RNA, 22 nt, Human
ggcucugguuugaucagagagg

SEQ ID NO: 759767 - RNA, 23 nt, Human
ggcuggaggccuaacagcaagca

SEQ ID NO: 759768 - RNA, 24 nt, Human
ggcuguuggagccccaucagaacu

SEQ ID NO: 759769 - RNA, 22 nt, Human
gggaggagauagggucuuggga

SEQ ID NO: 759770 - RNA, 23 nt, Human
gggcagaggaaugcuccccgccu

SEQ ID NO: 759771 - RNA, 19 nt, Human
gggcaggacaccaacuucu

SEQ ID NO: 759772 - RNA, 23 nt, Human
ggggaggagauagggucuuggga

SEQ ID NO: 759773 - RNA, 24 nt, Human
ggggaggagauagggucuugggac

SEQ ID NO: 759774 - RNA, 24 nt, Human
ggugcacuaaucuacaaacagcag

SEQ ID NO: 759775 - RNA, 23 nt, Human
guauaaaaccacagagaagacca

SEQ ID NO: 759776 - RNA, 21 nt, Human
gucaaaggaccacagccuggc

SEQ ID NO: 759777 - RNA, 23 nt, Human
gucuucuuuucuuccccaccucc

SEQ ID NO: 759778 - RNA, 21 nt, Human
gucuuucuucccauggacccu

SEQ ID NO: 759779 - RNA, 19 nt, Human
gugagagcucccugccucc

SEQ ID NO: 759780 - RNA, 22 nt, Human
gugaggaggagaggagggccca

SEQ ID NO: 759781 - RNA, 22 nt, Human
guuuggcaucuugcaaaacaga

SEQ ID NO: 759782 - RNA, 20 nt, Human
uaaaaccacagagaagacca

SEQ ID NO: 759783 - RNA, 22 nt, Human
uaacccaaaucccucacagaua

SEQ ID NO: 759784 - RNA, 18 nt, Human
uacccuaggugugcugac

SEQ ID NO: 759785 - RNA, 22 nt, Human
uacugggcaucugcagagagga

SEQ ID NO: 759786 - RNA, 19 nt, Human
uagaaaguugggagggcag

SEQ ID NO: 759787 - RNA, 24 nt, Human
uagcaucaaaaaccuuccaaauau

SEQ ID NO: 759788 - RNA, 19 nt, Human
uaggacauucaccugccuc

SEQ ID NO: 759789 - RNA, 21 nt, Human
uaggacauucaccugccucuc

SEQ ID NO: 759790 - RNA, 22 nt, Human
uaggacauucaccugccucucc

SEQ ID NO: 759791 - RNA, 22 nt, Human
uauauacgucaaacccccaaaa

SEQ ID NO: 759792 - RNA, 20 nt, Human
uauauauauauauauauacg

SEQ ID NO: 759793 - RNA, 18 nt, Human
uauauaugcauauauaua

SEQ ID NO: 759794 - RNA, 21 nt, Human
uauauaugcauauauauauau

SEQ ID NO: 759795 - RNA, 25 nt, Human
uauauaugcauauauauauauauau

SEQ ID NO: 759796 - RNA, 22 nt, Human
uauaugcauauauauauauaua

SEQ ID NO: 759797 - RNA, 25 nt, Human
uauaugcauauauauauauauauau

SEQ ID NO: 759798 - RNA, 22 nt, Human
uaugcauauauauauauauaua

SEQ ID NO: 759799 - RNA, 18 nt, Human
ucaaaugugugggugggu

SEQ ID NO: 759800 - RNA, 20 nt, Human
ucaccccuuugcccaccccc

SEQ ID NO: 759801 - RNA, 21 nt, Human
ucagcaccagcacauccacag

SEQ ID NO: 759802 - RNA, 24 nt, Human
uccaaguaaucucuguacauggua

SEQ ID NO: 759803 - RNA, 23 nt, Human
uccacagaacugggugacaggca

SEQ ID NO: 759804 - RNA, 22 nt, Human
uccaccccaaugucaaaauggc

SEQ ID NO: 759805 - RNA, 21 nt, Human
ucccagaggcuuuuccuucuc

SEQ ID NO: 759806 - RNA, 18 nt, Human
ucccauggacccucagcc

SEQ ID NO: 759807 - RNA, 21 nt, Human
ucccccaaacacauaguucaa

SEQ ID NO: 759808 - RNA, 18 nt, Human
ucccgggccccgagcgcc

SEQ ID NO: 759809 - RNA, 19 nt, Human
ucccgggccccgagcgccc

SEQ ID NO: 759810 - RNA, 19 nt, Human
ucccugaggacaguucaga

SEQ ID NO: 759811 - RNA, 24 nt, Human
ucccugcuguaagucaaucuauaa

SEQ ID NO: 759812 - RNA, 23 nt, Human
uccugcgccgccgccuccgggcc

SEQ ID NO: 759813 - RNA, 24 nt, Human
uccuuuaggcaaacaaagucuagc

SEQ ID NO: 759814 - RNA, 23 nt, Human
ucuacaccaaggcaucaguuucu

SEQ ID NO: 759815 - RNA, 19 nt, Human
ucuagaaugaguugggaag

SEQ ID NO: 759816 - RNA, 20 nt, Human
ucuccaaguaaucucuguac

SEQ ID NO: 759817 - RNA, 28 nt, Human
ucuccaauccaauuugucauccccuuua

SEQ ID NO: 759818 - RNA, 21 nt, Human
ucucuuccauuuaguucaggu

SEQ ID NO: 759819 - RNA, 25 nt, Human
ucugcaaagacaccucaugagcacc

SEQ ID NO: 759820 - RNA, 19 nt, Human
ucugucuucuuuucuuccc

SEQ ID NO: 759821 - RNA, 24 nt, Human
ucuguuccuuuaggcaaacaaagu

SEQ ID NO: 759822 - RNA, 23 nt, Human
ucuugucaguuugggaaugauua

SEQ ID NO: 759823 - RNA, 25 nt, Human
ugaaaacacaaaggcacacgcagcc

SEQ ID NO: 759824 - RNA, 26 nt, Human
ugaaaacacaaaggcacacgcagcca

SEQ ID NO: 759825 - RNA, 20 nt, Human
ugaaaagaaauauaaaagga

SEQ ID NO: 759826 - RNA, 21 nt, Human
ugaaaagaaauauaaaaggau

SEQ ID NO: 759827 - RNA, 24 nt, Human
ugagagcugugaggaggagaggag

SEQ ID NO: 759828 - RNA, 19 nt, Human
ugaggaggagaggagggcc

SEQ ID NO: 759829 - RNA, 21 nt, Human
ugagggacccagcagcucugg

SEQ ID NO: 759830 - RNA, 24 nt, Human
ugagggacccagcagcucugggcu

SEQ ID NO: 759831 - RNA, 21 nt, Human
ugagggauggacacagggcag

SEQ ID NO: 759832 - RNA, 20 nt, Human
ugauccccccuguucuccuc

SEQ ID NO: 759833 - RNA, 23 nt, Human
ugcaaagacaccucaugagcacc

SEQ ID NO: 759834 - RNA, 19 nt, Human
ugcacagacacagagggca

SEQ ID NO: 759835 - RNA, 25 nt, Human
ugcacagacacagagggcacagagc

SEQ ID NO: 759836 - RNA, 20 nt, Human
ugcacuaaucuacaaacagc

SEQ ID NO: 759837 - RNA, 20 nt, Human
ugcaucuccccaggcacagu

SEQ ID NO: 759838 - RNA, 21 nt, Human
ugcccuguggugcaguaaccu

SEQ ID NO: 759839 - RNA, 22 nt, Human
ugccuacccagcaccaaaaacu

SEQ ID NO: 759840 - RNA, 24 nt, Human
uggaaaauuuguuuuuaagugggg

SEQ ID NO: 759841 - RNA, 18 nt, Human
uggaagggagaaacuagg

SEQ ID NO: 759842 - RNA, 22 nt, Human
uggaaguagcaagaagccggcu

SEQ ID NO: 759843 - RNA, 24 nt, Human
uggaaguagcaagaagccggcuga

SEQ ID NO: 759844 - RNA, 20 nt, Human
uggaauccccuacuugggcc

SEQ ID NO: 759845 - RNA, 18 nt, Human
uggaaucuuugagcuggu

SEQ ID NO: 759846 - RNA, 23 nt, Human
uggaugagauuuaugaaugaugu

SEQ ID NO: 759847 - RNA, 20 nt, Human
uggcacaagacaaagggcag

SEQ ID NO: 759848 - RNA, 19 nt, Human
uggccuccaguucccaucu

SEQ ID NO: 759849 - RNA, 21 nt, Human
ugggaaaacacucugugucaa

SEQ ID NO: 759850 - RNA, 24 nt, Human
ugggagggcaggacaccaacuucu

SEQ ID NO: 759851 - RNA, 25 nt, Human
ugggaugccacuccaaagaggaacc

SEQ ID NO: 759852 - RNA, 22 nt, Human
uggggaaacugaucucucccca

SEQ ID NO: 759853 - RNA, 18 nt, Human
uggggagggacuuccccc

SEQ ID NO: 759854 - RNA, 20 nt, Human
ugggguagggaggggauucc

SEQ ID NO: 759855 - RNA, 20 nt, Human
ugggugugauauuaaacacc

SEQ ID NO: 759856 - RNA, 19 nt, Human
ugugaggaggagaggaggg

SEQ ID NO: 759857 - RNA, 25 nt, Human
uguuagaaaggaaauucaagauccc

SEQ ID NO: 759858 - RNA, 19 nt, Human
uuaugaaagauuggccucc

SEQ ID NO: 759859 - RNA, 18 nt, Human
uuccuguccugcagucuc

SEQ ID NO: 759860 - RNA, 19 nt, Human
uucuugauccccccuguuc

SEQ ID NO: 759861 - RNA, 23 nt, Human
uugacucacucuccucacuuccu

SEQ ID NO: 759862 - RNA, 22 nt, Human
uugagaaacaacagccuguaaa

SEQ ID NO: 759863 - RNA, 26 nt, Human
uugcccaccccccaaccuugcacagu

SEQ ID NO: 759864 - RNA, 19 nt, Human
uuggaaagagagcaaaggc

SEQ ID NO: 759865 - RNA, 21 nt, Human
uuggcaucuugcaaaacagag

SEQ ID NO: 759866 - RNA, 21 nt, Human
uuuggcaucuugcaaaacaga

SEQ ID NO: 759867 - RNA, 21 nt, Human
uuugugguuguucauuugcca

SEQ ID NO: 759868 - RNA, 25 nt, Human
aaaaaacugacccagaaaaacagac

SEQ ID NO: 759869 - RNA, 23 nt, Human
aaaaaugaguaagucuggccuuc

SEQ ID NO: 759870 - RNA, 18 nt, Human
aaaacugacccagaaaaa

SEQ ID NO: 759871 - RNA, 21 nt, Human
aaacaggggccuaacaggggc

SEQ ID NO: 759872 - RNA, 25 nt, Human
aaacauucagaacaugcccagagaa

SEQ ID NO: 759873 - RNA, 19 nt, Human
aaaggaaaugaugaaaagg

SEQ ID NO: 759874 - RNA, 20 nt, Human
aaaggggagaugaggagagg

SEQ ID NO: 759875 - RNA, 20 nt, Human
aaaguaaacagugugcuucc

SEQ ID NO: 759876 - RNA, 24 nt, Human
aacccagcacucgucauuuuuaca

SEQ ID NO: 759877 - RNA, 18 nt, Human
aagccccacaugcucuuc

SEQ ID NO: 759878 - RNA, 26 nt, Human
aagcccccgcagagcagccggggaga

SEQ ID NO: 759879 - RNA, 21 nt, Human
aagcuucgucauuuugaggac

SEQ ID NO: 759880 - RNA, 20 nt, Human
aagggcaccagaggccacag

SEQ ID NO: 759881 - RNA, 21 nt, Human
aaugucuaacuguuggacaac

SEQ ID NO: 759882 - RNA, 21 nt, Human
acacccacaccccagccugcc

SEQ ID NO: 759883 - RNA, 22 nt, Human
acacgacuguucauacaucuau

SEQ ID NO: 759884 - RNA, 24 nt, Human
acaggaaguaucacaaaaggcagc

SEQ ID NO: 759885 - RNA, 24 nt, Human
accccagccugccccauccucagc

SEQ ID NO: 759886 - RNA, 20 nt, Human
accccaggccacacccacac

SEQ ID NO: 759887 - RNA, 19 nt, Human
acccugagauggcugaggg

SEQ ID NO: 759888 - RNA, 20 nt, Human
acugcagggccucagcacag

SEQ ID NO: 759889 - RNA, 23 nt, Human
acuucgcgcucacuccgaagcca

SEQ ID NO: 759890 - RNA, 24 nt, Human
agaaagaaauccuggcaaacugag

SEQ ID NO: 759891 - RNA, 20 nt, Human
agaccccacacaagccacgg

SEQ ID NO: 759892 - RNA, 22 nt, Human
agaggagggagcacugggugcu

SEQ ID NO: 759893 - RNA, 20 nt, Human
agaggcucucagcacuuugc

SEQ ID NO: 759894 - RNA, 24 nt, Human
agaguagaggagggagcacugggg

SEQ ID NO: 759895 - RNA, 20 nt, Human
agauggagggcgugaaaugg

SEQ ID NO: 759896 - RNA, 21 nt, Human
agcacaucacugcucaggaaa

SEQ ID NO: 759897 - RNA, 19 nt, Human
agcacugggugcugcugcu

SEQ ID NO: 759898 - RNA, 19 nt, Human
aggaaaugaugaaaaggaa

SEQ ID NO: 759899 - RNA, 25 nt, Human
aggaauccugugggcuaaccugggc

SEQ ID NO: 759900 - RNA, 23 nt, Human
aggcaaaaaaaacugacccagaa

SEQ ID NO: 759901 - RNA, 20 nt, Human
aggcgaggugguaggaucgg

SEQ ID NO: 759902 - RNA, 24 nt, Human
agggaacugggagaggggaaagag

SEQ ID NO: 759903 - RNA, 22 nt, Human
agggagcacugggugcugcugc

SEQ ID NO: 759904 - RNA, 21 nt, Human
agggcugguuuccuccagcgc

SEQ ID NO: 759905 - RNA, 19 nt, Human
aggggaaagaggauggaac

SEQ ID NO: 759906 - RNA, 24 nt, Human
agggggcagaagaggcucagagga

SEQ ID NO: 759907 - RNA, 23 nt, Human
agggggcucuaaagaagauacca

SEQ ID NO: 759908 - RNA, 23 nt, Human
agguggcugaccccuggcucugc

SEQ ID NO: 759909 - RNA, 20 nt, Human
aguacgggaaugguggggag

SEQ ID NO: 759910 - RNA, 20 nt, Human
aucucugacccgccuucccc

SEQ ID NO: 759911 - RNA, 23 nt, Human
caaaaaaaacugacccagaaaaa

SEQ ID NO: 759912 - RNA, 25 nt, Human
caaaaaaaacugacccagaaaaaca

SEQ ID NO: 759913 - RNA, 24 nt, Human
caaaaaguaaacagugugcuuccu

SEQ ID NO: 759914 - RNA, 19 nt, Human
caaaggggagaugaggaga

SEQ ID NO: 759915 - RNA, 19 nt, Human
caagauaaaagccuagagu

SEQ ID NO: 759916 - RNA, 19 nt, Human
caagggcaccagaggccag

SEQ ID NO: 759917 - RNA, 19 nt, Human
cacacaagccacggggugg

SEQ ID NO: 759918 - RNA, 19 nt, Human
caccaagccccacaugcuc

SEQ ID NO: 759919 - RNA, 22 nt, Human
caccaagccccacaugcucuuc

SEQ ID NO: 759920 - RNA, 23 nt, Human
caccagcacuucgcgcucacucc

SEQ ID NO: 759921 - RNA, 19 nt, Human
caccccaggccacacccac

SEQ ID NO: 759922 - RNA, 20 nt, Human
cacccccuuugcccccaaca

SEQ ID NO: 759923 - RNA, 27 nt, Human
cacccugagauggcugagggggccagg

SEQ ID NO: 759924 - RNA, 21 nt, Human
cacugugucccuugagaagca

SEQ ID NO: 759925 - RNA, 18 nt, Human
cagcaaacgcccauccug

SEQ ID NO: 759926 - RNA, 22 nt, Human
cagcacaucacugcucaggaaa

SEQ ID NO: 759927 - RNA, 18 nt, Human
cagcagaaguggccuggc

SEQ ID NO: 759928 - RNA, 22 nt, Human
cagcagugccuguggucggcgc

SEQ ID NO: 759929 - RNA, 24 nt, Human
cagcaugaaggcaguggcugggga

SEQ ID NO: 759930 - RNA, 19 nt, Human
cagccaguaccucgccccg

SEQ ID NO: 759931 - RNA, 25 nt, Human
cagccaguaccucgccccgcccucu

SEQ ID NO: 759932 - RNA, 24 nt, Human
caggaugcuggggccccaggucag

SEQ ID NO: 759933 - RNA, 24 nt, Human
caggccccugggacagggcugggg

SEQ ID NO: 759934 - RNA, 21 nt, Human
caggcugcagaaagcauggga

SEQ ID NO: 759935 - RNA, 26 nt, Human
caguggcagcaaacggccacugagcu

SEQ ID NO: 759936 - RNA, 22 nt, Human
caguucuccuguaccauggccu

SEQ ID NO: 759937 - RNA, 19 nt, Human
cauaacaacuacaggcugc

SEQ ID NO: 759938 - RNA, 19 nt, Human
caucccccugcacacuuau

SEQ ID NO: 759939 - RNA, 19 nt, Human
caugccagccagcccagcc

SEQ ID NO: 759940 - RNA, 22 nt, Human
caugcccagagaagggcagcag

SEQ ID NO: 759941 - RNA, 21 nt, Human
ccaagaagagcagcacaucac

SEQ ID NO: 759942 - RNA, 20 nt, Human
ccacccuuagccuggcccug

SEQ ID NO: 759943 - RNA, 22 nt, Human
ccaccgaguucggagccgcggg

SEQ ID NO: 759944 - RNA, 18 nt, Human
ccagcccaaagccccacc

SEQ ID NO: 759945 - RNA, 25 nt, Human
ccagcccugagccaccccaggccac

SEQ ID NO: 759946 - RNA, 22 nt, Human
ccaggaccaccgaguucggagc

SEQ ID NO: 759947 - RNA, 19 nt, Human
ccaggccacacccacaccc

SEQ ID NO: 759948 - RNA, 22 nt, Human
ccaggccacacccacaccccag

SEQ ID NO: 759949 - RNA, 21 nt, Human
ccauccucagcagaaguggcc

SEQ ID NO: 759950 - RNA, 18 nt, Human
ccaucuuucagcauucca

SEQ ID NO: 759951 - RNA, 18 nt, Human
cccacugcucaccagcac

SEQ ID NO: 759952 - RNA, 18 nt, Human
cccagcccaaagccccac

SEQ ID NO: 759953 - RNA, 18 nt, Human
cccagcccagcucaccca

SEQ ID NO: 759954 - RNA, 19 nt, Human
cccaugcucccuccccucu

SEQ ID NO: 759955 - RNA, 30 nt, Human
ccccaggccacacccacaccccagccugcc

SEQ ID NO: 759956 - RNA, 19 nt, Human
cccccaucucugacccgcc

SEQ ID NO: 759957 - RNA, 20 nt, Human
ccccucccagcccaaagccc

SEQ ID NO: 759958 - RNA, 19 nt, Human
ccccucugugggcugagga

SEQ ID NO: 759959 - RNA, 22 nt, Human
ccccucugugggcugaggagga

SEQ ID NO: 759960 - RNA, 20 nt, Human
cccgcaagauaaaagccuag

SEQ ID NO: 759961 - RNA, 18 nt, Human
cccgccacccccuuugcc

SEQ ID NO: 759962 - RNA, 27 nt, Human
cccgccacccccuuugcccccaacaaa

SEQ ID NO: 759963 - RNA, 18 nt, Human
cccgcccccagcaagggc

SEQ ID NO: 759964 - RNA, 28 nt, Human
cccuccaccaagccccacaugcucuucc

SEQ ID NO: 759965 - RNA, 23 nt, Human
cccucccagcccaaagccccacc

SEQ ID NO: 759966 - RNA, 23 nt, Human
cccugggacagggcuggggugug

SEQ ID NO: 759967 - RNA, 20 nt, Human
ccgaagccagugaagccccc

SEQ ID NO: 759968 - RNA, 24 nt, Human
ccucagcagaaguggccuggccuc

SEQ ID NO: 759969 - RNA, 19 nt, Human
ccuccagcgcucccuggcu

SEQ ID NO: 759970 - RNA, 22 nt, Human
ccuccccaucccagccugaggc

SEQ ID NO: 759971 - RNA, 21 nt, Human
ccucuagcuuuucccucuaga

SEQ ID NO: 759972 - RNA, 23 nt, Human
ccucuggacagugugucugaccu

SEQ ID NO: 759973 - RNA, 18 nt, Human
ccugaagccuuggcaccu

SEQ ID NO: 759974 - RNA, 22 nt, Human
ccugcccgcacucgcccagggg

SEQ ID NO: 759975 - RNA, 18 nt, Human
ccugcugaggacucucca

SEQ ID NO: 759976 - RNA, 20 nt, Human
ccuggccccaugcucccucc

SEQ ID NO: 759977 - RNA, 21 nt, Human
ccuggcuccagaggccuguca

SEQ ID NO: 759978 - RNA, 25 nt, Human
ccugggacccagaaccacauacgga

SEQ ID NO: 759979 - RNA, 22 nt, Human
ccuggggccccuccaccaagcc

SEQ ID NO: 759980 - RNA, 26 nt, Human
ccuguaccauggccuagacccagaag

SEQ ID NO: 759981 - RNA, 22 nt, Human
ccuuuuguuaccaaggugagcc

SEQ ID NO: 759982 - RNA, 19 nt, Human
cgaagccagugaagccccc

SEQ ID NO: 759983 - RNA, 24 nt, Human
cgagaacaaucuggucucagaucc

SEQ ID NO: 759984 - RNA, 22 nt, Human
cgauggcaccuuugccaaaggu

SEQ ID NO: 759985 - RNA, 21 nt, Human
cgauuagacaaaagaacaacu

SEQ ID NO: 759986 - RNA, 19 nt, Human
cggcagggaaugcgggggg

SEQ ID NO: 759987 - RNA, 21 nt, Human
cggcagggaaugcggggggug

SEQ ID NO: 759988 - RNA, 23 nt, Human
cggggaccuagaagccagcccuu

SEQ ID NO: 759989 - RNA, 21 nt, Human
cuagacccagaagaaaauaaa

SEQ ID NO: 759990 - RNA, 21 nt, Human
cuaugcauucacugccccaaa

SEQ ID NO: 759991 - RNA, 19 nt, Human
cucagaucccugcccgcac

SEQ ID NO: 759992 - RNA, 20 nt, Human
cucccugggacccagaacca

SEQ ID NO: 759993 - RNA, 22 nt, Human
cugccgauggcaccuuugccaa

SEQ ID NO: 759994 - RNA, 22 nt, Human
cugcugaggacucuccaagcau

SEQ ID NO: 759995 - RNA, 20 nt, Human
cuggcaccuggccccaugcu

SEQ ID NO: 759996 - RNA, 22 nt, Human
cuggccccugccccagugcuuu

SEQ ID NO: 759997 - RNA, 22 nt, Human
cuggcgcucaggccuaccccuu

SEQ ID NO: 759998 - RNA, 19 nt, Human
cuggcucagggaggagucg

SEQ ID NO: 759999 - RNA, 22 nt, Human
cuuccaggaccaccgaguucgg

SEQ ID NO: 760000 - RNA, 20 nt, Human
cuugcagcucacuuggggga

SEQ ID NO: 760001 - RNA, 19 nt, Human
gaaaugguggaaaccaaaa

SEQ ID NO: 760002 - RNA, 20 nt, Human
gaacacggaccugagacuuc

SEQ ID NO: 760003 - RNA, 20 nt, Human
gaagauaccagaagguacca

SEQ ID NO: 760004 - RNA, 18 nt, Human
gaagcaggaaugcacaug

SEQ ID NO: 760005 - RNA, 21 nt, Human
gagcacugggugcugcugcuc

SEQ ID NO: 760006 - RNA, 21 nt, Human
gaggagccacacugagcggag

SEQ ID NO: 760007 - RNA, 24 nt, Human
gauuagacaaaagaacaacugagu

SEQ ID NO: 760008 - RNA, 19 nt, Human
gcagcaugaaggcaguggc

SEQ ID NO: 760009 - RNA, 20 nt, Human
gccaaggaacacggggugcc

SEQ ID NO: 760010 - RNA, 26 nt, Human
gccacacccacaccccagccugcccc

SEQ ID NO: 760011 - RNA, 19 nt, Human
gccacugagcuucucccca

SEQ ID NO: 760012 - RNA, 23 nt, Human
gccccacaugcucuuccgccaca

SEQ ID NO: 760013 - RNA, 19 nt, Human
gcccugagccaccccaggc

SEQ ID NO: 760014 - RNA, 21 nt, Human
gcgaggugguaggaucgggcc

SEQ ID NO: 760015 - RNA, 22 nt, Human
gcugaccccuggcucugccagu

SEQ ID NO: 760016 - RNA, 21 nt, Human
gcuggcagcugacuuuugacc

SEQ ID NO: 760017 - RNA, 20 nt, Human
ggacccagaaccacauacgg

SEQ ID NO: 760018 - RNA, 18 nt, Human
ggcagcaugaaggcagug

SEQ ID NO: 760019 - RNA, 20 nt, Human
ggcaggaggcgacuagaggc

SEQ ID NO: 760020 - RNA, 25 nt, Human
ggcagggaaugcgggggguggaggg

SEQ ID NO: 760021 - RNA, 21 nt, Human
ggcucuuuauucucgaggccu

SEQ ID NO: 760022 - RNA, 18 nt, Human
ggcuggcucagggaggag

SEQ ID NO: 760023 - RNA, 22 nt, Human
gggaacacggaccugagacuuc

SEQ ID NO: 760024 - RNA, 21 nt, Human
gggagagggggaugggauggg

SEQ ID NO: 760025 - RNA, 23 nt, Human
gggagcacugggugcugcugcuc

SEQ ID NO: 760026 - RNA, 20 nt, Human
gggccccuccaccaagcccc

SEQ ID NO: 760027 - RNA, 18 nt, Human
ggggaugggauggggcag

SEQ ID NO: 760028 - RNA, 22 nt, Human
ggggaugggauggggcaggggg

SEQ ID NO: 760029 - RNA, 21 nt, Human
ggggcacucucccaggcugcu

SEQ ID NO: 760030 - RNA, 21 nt, Human
ggggcuggcucuuuauucucg

SEQ ID NO: 760031 - RNA, 21 nt, Human
ggggugcccucaucucuuggg

SEQ ID NO: 760032 - RNA, 20 nt, Human
ggguguguguuagucuuccc

SEQ ID NO: 760033 - RNA, 20 nt, Human
gguaggaucgggccuggccu

SEQ ID NO: 760034 - RNA, 18 nt, Human
gguaggggccgagagggc

SEQ ID NO: 760035 - RNA, 19 nt, Human
gguuccaaggcucccuggg

SEQ ID NO: 760036 - RNA, 23 nt, Human
guaaacauucagaacaugcccag

SEQ ID NO: 760037 - RNA, 22 nt, Human
gugcuugcucuagcccaggguc

SEQ ID NO: 760038 - RNA, 19 nt, Human
uaaaagccuagaguugcag

SEQ ID NO: 760039 - RNA, 19 nt, Human
uaaaaggaaaugguggaaa

SEQ ID NO: 760040 - RNA, 22 nt, Human
uaacuguuggacaacuguuugg

SEQ ID NO: 760041 - RNA, 22 nt, Human
uaagaaggguccccagucaccc

SEQ ID NO: 760042 - RNA, 22 nt, Human
uaagcaaggcaauggcucaaau

SEQ ID NO: 760043 - RNA, 23 nt, Human
uacccgcccccagcaagggcagc

SEQ ID NO: 760044 - RNA, 22 nt, Human
uacuuuucaugcaaaaaguaaa

SEQ ID NO: 760045 - RNA, 20 nt, Human
ucacucggcagggaaugcgg

SEQ ID NO: 760046 - RNA, 19 nt, Human
ucagaauuguggcugcaga

SEQ ID NO: 760047 - RNA, 20 nt, Human
ucaguucugccucuggacag

SEQ ID NO: 760048 - RNA, 21 nt, Human
ucaguucugccucuggacagu

SEQ ID NO: 760049 - RNA, 20 nt, Human
uccaccaagccccacaugcc

SEQ ID NO: 760050 - RNA, 19 nt, Human
uccaugcuggcccaugugg

SEQ ID NO: 760051 - RNA, 21 nt, Human
ucccaagaagucgccuggcuc

SEQ ID NO: 760052 - RNA, 20 nt, Human
ucccauccaaucacaggccc

SEQ ID NO: 760053 - RNA, 23 nt, Human
uccccagagaagcaggaaugcac

SEQ ID NO: 760054 - RNA, 22 nt, Human
ucccugcccgcacucgcccagg

SEQ ID NO: 760055 - RNA, 23 nt, Human
uccugcuuggcuggccugcucug

SEQ ID NO: 760056 - RNA, 20 nt, Human
uccugggccugccugccuga

SEQ ID NO: 760057 - RNA, 21 nt, Human
ucuauggccuuuuguuaccaa

SEQ ID NO: 760058 - RNA, 18 nt, Human
ucucugagggagcacagg

SEQ ID NO: 760059 - RNA, 23 nt, Human
ucucuugggggcacucucccagg

SEQ ID NO: 760060 - RNA, 21 nt, Human
ucugcagccaguaccucgccc

SEQ ID NO: 760061 - RNA, 19 nt, Human
ugaagagggguggcuggcu

SEQ ID NO: 760062 - RNA, 25 nt, Human
ugaaggcaguggcuggggaauggca

SEQ ID NO: 760063 - RNA, 21 nt, Human
ugacccgccuuccccucccag

SEQ ID NO: 760064 - RNA, 21 nt, Human
ugacgcaggggcuccugcaug

SEQ ID NO: 760065 - RNA, 23 nt, Human
ugagcagacacugcagggccuca

SEQ ID NO: 760066 - RNA, 19 nt, Human
ugagccacccuuagccugg

SEQ ID NO: 760067 - RNA, 19 nt, Human
ugaggccaggugugaccug

SEQ ID NO: 760068 - RNA, 18 nt, Human
ugaggucagucccuccug

SEQ ID NO: 760069 - RNA, 24 nt, Human
ugaguacgggaaugguggggaggg

SEQ ID NO: 760070 - RNA, 19 nt, Human
ugauggaacugagccaccc

SEQ ID NO: 760071 - RNA, 22 nt, Human
ugcaugugaaauccuugucagu

SEQ ID NO: 760072 - RNA, 23 nt, Human
ugcccagagaagggcagcagccg

SEQ ID NO: 760073 - RNA, 23 nt, Human
ugccgauggcaccuuugccaaag

SEQ ID NO: 760074 - RNA, 21 nt, Human
ugccucuggacagugugucug

SEQ ID NO: 760075 - RNA, 23 nt, Human
ugcucaggaaacaggggccuaac

SEQ ID NO: 760076 - RNA, 20 nt, Human
ugcugcugcucuggccccug

SEQ ID NO: 760077 - RNA, 23 nt, Human
ugcuugcucuagcccagggucca

SEQ ID NO: 760078 - RNA, 19 nt, Human
ugcuuuggggacccuagca

SEQ ID NO: 760079 - RNA, 22 nt, Human
uggcaaacugaguuugcaaaac

SEQ ID NO: 760080 - RNA, 19 nt, Human
uggcacagaggaaccugga

SEQ ID NO: 760081 - RNA, 25 nt, Human
uggcagcaaacggccacugagcuuc

SEQ ID NO: 760082 - RNA, 22 nt, Human
uggcaggaggcgacuagaggcu

SEQ ID NO: 760083 - RNA, 25 nt, Human
uggccccugccccagugcuuugggg

SEQ ID NO: 760084 - RNA, 20 nt, Human
uggcuaaagggcugguuucc

SEQ ID NO: 760085 - RNA, 19 nt, Human
uggcucagggaggagucgg

SEQ ID NO: 760086 - RNA, 22 nt, Human
uggcucagggaggagucgggag

SEQ ID NO: 760087 - RNA, 20 nt, Human
uggcuccagaggccugucag

SEQ ID NO: 760088 - RNA, 18 nt, Human
uggcugaccccuggcucu

SEQ ID NO: 760089 - RNA, 18 nt, Human
uggcugagggggccaggc

SEQ ID NO: 760090 - RNA, 25 nt, Human
uggcugagggggccaggccccuggg

SEQ ID NO: 760091 - RNA, 22 nt, Human
uggcuggcuuaggguaggggcc

SEQ ID NO: 760092 - RNA, 18 nt, Human
uggcuggggaauggcaca

SEQ ID NO: 760093 - RNA, 21 nt, Human
ugucugugcgcagcaaacgcc

SEQ ID NO: 760094 - RNA, 24 nt, Human
uguggagaugccuucccgaggacu

SEQ ID NO: 760095 - RNA, 20 nt, Human
uguggcugcagaggcaucuu

SEQ ID NO: 760096 - RNA, 19 nt, Human
uuaaaacaaaaacccagca

SEQ ID NO: 760097 - RNA, 22 nt, Human
uuagccuggcccuggcccaucc

SEQ ID NO: 760098 - RNA, 23 nt, Human
uucuaugcauucacugccccaaa

SEQ ID NO: 760099 - RNA, 26 nt, Human
uuugcccccaacaaauccuggggccc

SEQ ID NO: 760100 - RNA, 24 nt, Human
aaaaaaacaaacaaaaccacaccu

SEQ ID NO: 760101 - RNA, 26 nt, Human
aaaaaaacaaacaaaaccacaccugg

SEQ ID NO: 760102 - RNA, 21 nt, Human
aaaaaaauacaaacagaagaa

SEQ ID NO: 760103 - RNA, 24 nt, Human
aaaaaacaaacaaaaccacaccug

SEQ ID NO: 760104 - RNA, 22 nt, Human
aaaaacaagcaacacuaacuua

SEQ ID NO: 760105 - RNA, 19 nt, Human
aaaaacacaaauaagcaug

SEQ ID NO: 760106 - RNA, 20 nt, Human
aaaacaaacaaaaccacacc

SEQ ID NO: 760107 - RNA, 23 nt, Human
aaaauaauauuaugacauugacc

SEQ ID NO: 760108 - RNA, 22 nt, Human
aaacaaaaacaagcaacacuaa

SEQ ID NO: 760109 - RNA, 22 nt, Human
aaacaaaaccacaccugggcug

SEQ ID NO: 760110 - RNA, 27 nt, Human
aaacaaaaccacaccugggcuggaaaa

SEQ ID NO: 760111 - RNA, 18 nt, Human
aaacaaaagaaucacaga

SEQ ID NO: 760112 - RNA, 18 nt, Human
aaacaaaagaaucacaga

SEQ ID NO: 760113 - RNA, 24 nt, Human
aaacagaagaacucuuucacaauc

SEQ ID NO: 760114 - RNA, 24 nt, Human
aaacauagaaaaaaacaaacaaaa

SEQ ID NO: 760115 - RNA, 19 nt, Human
aacaaacaaaaccacaccu

SEQ ID NO: 760116 - RNA, 25 nt, Human
aacaacaccacaacaacaaacaaaa

SEQ ID NO: 760117 - RNA, 20 nt, Human
aacccacaaacauagaaaaa

SEQ ID NO: 760118 - RNA, 22 nt, Human
aacccacaaacauagaaaaaaa

SEQ ID NO: 760119 - RNA, 24 nt, Human
aagcagacaaaggugugaaucaaa

SEQ ID NO: 760120 - RNA, 21 nt, Human
aaggacaucacagcacagaaa

SEQ ID NO: 760121 - RNA, 19 nt, Human
aagugucacaccaaggaaa

SEQ ID NO: 760122 - RNA, 22 nt, Human
aaugcuagaaaaauguccacgc

SEQ ID NO: 760123 - RNA, 24 nt, Human
acaaaaaguaguagugcauaacaa

SEQ ID NO: 760124 - RNA, 26 nt, Human
acaaaaaucaaacaugaaggaaaaau

SEQ ID NO: 760125 - RNA, 23 nt, Human
acaaaaccacaccugggcuggaa

SEQ ID NO: 760126 - RNA, 21 nt, Human
acaaacagaagaacucuuuca

SEQ ID NO: 760127 - RNA, 21 nt, Human
acaaacaguauugcacauaac

SEQ ID NO: 760128 - RNA, 24 nt, Human
acaacaaacaaaagaaucacagag

SEQ ID NO: 760129 - RNA, 26 nt, Human
acaccacaacaacaaacaaaagaauc

SEQ ID NO: 760130 - RNA, 18 nt, Human
acagaggcuuuaaacagu

SEQ ID NO: 760131 - RNA, 28 nt, Human
acagauuuccagaacacuguaagccccg

SEQ ID NO: 760132 - RNA, 19 nt, Human
acaguacaaggacaucaca

SEQ ID NO: 760133 - RNA, 23 nt, Human
acaguauugcacauaacaacaaa

SEQ ID NO: 760134 - RNA, 21 nt, Human
accaaaauccucggcaaaaca

SEQ ID NO: 760135 - RNA, 18 nt, Human
acuauugaaaaaauacca

SEQ ID NO: 760136 - RNA, 22 nt, Human
acucuaucccuaaaaucacaaa

SEQ ID NO: 760137 - RNA, 23 nt, Human
agaacucuuucacaauccugguc

SEQ ID NO: 760138 - RNA, 18 nt, Human
agaagaacucuuucacaa

SEQ ID NO: 760139 - RNA, 21 nt, Human
agaagaacucuuucacaaucc

SEQ ID NO: 760140 - RNA, 21 nt, Human
agacaguagccugacggccgc

SEQ ID NO: 760141 - RNA, 21 nt, Human
agagagcaacuaaaggcuuau

SEQ ID NO: 760142 - RNA, 20 nt, Human
agaggcuuuaaacaguuaag

SEQ ID NO: 760143 - RNA, 20 nt, Human
agcuauguaaaauggugcaa

SEQ ID NO: 760144 - RNA, 20 nt, Human
agcuuuuaaaaaaaucucag

SEQ ID NO: 760145 - RNA, 22 nt, Human
aggaagaagauuaaaaaaagau

SEQ ID NO: 760146 - RNA, 22 nt, Human
agucagaaauagugaccuucca

SEQ ID NO: 760147 - RNA, 25 nt, Human
auaaauuucacaauauauaacagag

SEQ ID NO: 760148 - RNA, 22 nt, Human
auccaguaaaaaacuauuuugu

SEQ ID NO: 760149 - RNA, 20 nt, Human
auugcaacuaaacaugggag

SEQ ID NO: 760150 - RNA, 23 nt, Human
auugcacauaacaacaaauaguc

SEQ ID NO: 760151 - RNA, 19 nt, Human
auuuaugccuuuuuucuuu

SEQ ID NO: 760152 - RNA, 20 nt, Human
caaaaaucaaacaugaagga

SEQ ID NO: 760153 - RNA, 22 nt, Human
caaaagaucaugucagucagaa

SEQ ID NO: 760154 - RNA, 23 nt, Human
caaaauagagagcaacuaaaggc

SEQ ID NO: 760155 - RNA, 20 nt, Human
caaacaaaagaaucacagac

SEQ ID NO: 760156 - RNA, 23 nt, Human
caagucaaaauagagagcaacua

SEQ ID NO: 760157 - RNA, 22 nt, Human
caaucagaacaacaccacaaca

SEQ ID NO: 760158 - RNA, 20 nt, Human
cacaacaacaaacaaaagaa

SEQ ID NO: 760159 - RNA, 18 nt, Human
cacaauauauaacagagc

SEQ ID NO: 760160 - RNA, 18 nt, Human
cacagaaaacacagcgac

SEQ ID NO: 760161 - RNA, 24 nt, Human
cacagaaaacacagcgacuuaaau

SEQ ID NO: 760162 - RNA, 21 nt, Human
cacagauuuccagaacacuuc

SEQ ID NO: 760163 - RNA, 18 nt, Human
caccacaacaacaaacaa

SEQ ID NO: 760164 - RNA, 19 nt, Human
caccugggcuggaaaaaag

SEQ ID NO: 760165 - RNA, 19 nt, Human
cacuuuacauaaccaagca

SEQ ID NO: 760166 - RNA, 23 nt, Human
cagaugaaaaaaaacccacaaac

SEQ ID NO: 760167 - RNA, 25 nt, Human
cagcaaccugauuaaguaaacaugc

SEQ ID NO: 760168 - RNA, 21 nt, Human
cagcacagaaaacacagcggu

SEQ ID NO: 760169 - RNA, 24 nt, Human
caggaccuguguuacccaggggcu

SEQ ID NO: 760170 - RNA, 22 nt, Human
cauucuagaccacgcuagugcu

SEQ ID NO: 760171 - RNA, 21 nt, Human
ccagaacacuguaagcccuga

SEQ ID NO: 760172 - RNA, 26 nt, Human
ccauccacaaauuugcuugaagagga

SEQ ID NO: 760173 - RNA, 19 nt, Human
cccaggccaucuuauuuug

SEQ ID NO: 760174 - RNA, 19 nt, Human
cccucucuuuucccuccuu

SEQ ID NO: 760175 - RNA, 22 nt, Human
cccugaggcagugcccucucuu

SEQ ID NO: 760176 - RNA, 25 nt, Human
ccuaaaaucacaaaaguguguuguu

SEQ ID NO: 760177 - RNA, 19 nt, Human
ccugggcuggaaaaaagcc

SEQ ID NO: 760178 - RNA, 24 nt, Human
cgagaacgaaugcacagauuucca

SEQ ID NO: 760179 - RNA, 21 nt, Human
cuagaaaaauguccacgcuag

SEQ ID NO: 760180 - RNA, 19 nt, Human
cuagaccacgcuagugcua

SEQ ID NO: 760181 - RNA, 21 nt, Human
cucagacaaccaacucugccc

SEQ ID NO: 760182 - RNA, 21 nt, Human
cuuccagcuuuuaaaaaaauc

SEQ ID NO: 760183 - RNA, 20 nt, Human
cuuuaugcuguacaaucuuc

SEQ ID NO: 760184 - RNA, 20 nt, Human
gaaaaaaacaaacaaaacca

SEQ ID NO: 760185 - RNA, 23 nt, Human
gaaaaaauaccagcaugaagaaa

SEQ ID NO: 760186 - RNA, 19 nt, Human
gaaaacaaacuauagcuug

SEQ ID NO: 760187 - RNA, 24 nt, Human
gaaaacaaacuauagcuugagagc

SEQ ID NO: 760188 - RNA, 21 nt, Human
gaagaaaagguacauauuuga

SEQ ID NO: 760189 - RNA, 19 nt, Human
gaagaagauuaaaaaaaga

SEQ ID NO: 760190 - RNA, 22 nt, Human
gaaugcacagauuuccagaaca

SEQ ID NO: 760191 - RNA, 19 nt, Human
gacaguacaaggacaucac

SEQ ID NO: 760192 - RNA, 19 nt, Human
gcacagaaaacacagcgac

SEQ ID NO: 760193 - RNA, 25 nt, Human
gcagcaaaagcuauugcagcauaaa

SEQ ID NO: 760194 - RNA, 24 nt, Human
gcagcugacucuaucccuaaaauc

SEQ ID NO: 760195 - RNA, 20 nt, Human
gcagcuuugaguguccaguu

SEQ ID NO: 760196 - RNA, 23 nt, Human
gcauuuuuaauccaguaaaaaac

SEQ ID NO: 760197 - RNA, 21 nt, Human
gcccaagggugaaugcuagaa

SEQ ID NO: 760198 - RNA, 21 nt, Human
gcccucucuuuucccuccuug

SEQ ID NO: 760199 - RNA, 25 nt, Human
ggggcacauuuauuuacaaaacaaa

SEQ ID NO: 760200 - RNA, 22 nt, Human
guaacaauauuacaaagguuuu

SEQ ID NO: 760201 - RNA, 21 nt, Human
guacaaucuuccagcuuuuaa

SEQ ID NO: 760202 - RNA, 18 nt, Human
uaaaaucacaaaagugug

SEQ ID NO: 760203 - RNA, 18 nt, Human
uaaccaagcauuuucauc

SEQ ID NO: 760204 - RNA, 21 nt, Human
uaaguaaacaugcagucagaa

SEQ ID NO: 760205 - RNA, 25 nt, Human
uaagugcaugcuccaguucaaaaca

SEQ ID NO: 760206 - RNA, 19 nt, Human
uaauaaaaagacccaauuc

SEQ ID NO: 760207 - RNA, 21 nt, Human
uaauaauaaaaagacccaauu

SEQ ID NO: 760208 - RNA, 21 nt, Human
uaauauaacauuaacaacuug

SEQ ID NO: 760209 - RNA, 20 nt, Human
uacuccaguacuuguggcug

SEQ ID NO: 760210 - RNA, 20 nt, Human
uagaauacaaaaaguaguag

SEQ ID NO: 760211 - RNA, 18 nt, Human
uauauaacagagcaccgc

SEQ ID NO: 760212 - RNA, 21 nt, Human
uaugccuuuuuucuuuucuuu

SEQ ID NO: 760213 - RNA, 23 nt, Human
uaugccuuuuuucuuuucuuuuu

SEQ ID NO: 760214 - RNA, 26 nt, Human
uauguaaaauggugcaagcacuaaga

SEQ ID NO: 760215 - RNA, 24 nt, Human
uauuuucuucuuucagguugauua

SEQ ID NO: 760216 - RNA, 18 nt, Human
ucaguuaugaacugucaa

SEQ ID NO: 760217 - RNA, 18 nt, Human
ucccagucaaguugcagg

SEQ ID NO: 760218 - RNA, 20 nt, Human
uccuuaaagaaaauacgaaa

SEQ ID NO: 760219 - RNA, 24 nt, Human
ucggcagcugacucuaucccuaaa

SEQ ID NO: 760220 - RNA, 24 nt, Human
ucucuuuaaaaaaauacaaacaga

SEQ ID NO: 760221 - RNA, 21 nt, Human
ucugcaauucugcauuauacu

SEQ ID NO: 760222 - RNA, 23 nt, Human
ucugccaacuuuugaaaacuguc

SEQ ID NO: 760223 - RNA, 19 nt, Human
ugaaaaaaaacccacaaac

SEQ ID NO: 760224 - RNA, 21 nt, Human
ugaaaaaaaacccacaaacau

SEQ ID NO: 760225 - RNA, 22 nt, Human
ugaaaaaaaacccacaaacaua

SEQ ID NO: 760226 - RNA, 25 nt, Human
ugaaaaaaaacccacaaacauagaa

SEQ ID NO: 760227 - RNA, 19 nt, Human
ugacucuaucccuaaaauc

SEQ ID NO: 760228 - RNA, 21 nt, Human
ugagaaagcacuccuuaaaga

SEQ ID NO: 760229 - RNA, 23 nt, Human
ugaggcagugcccucucuuuucc

SEQ ID NO: 760230 - RNA, 20 nt, Human
ugauugagaaagcacuccuu

SEQ ID NO: 760231 - RNA, 24 nt, Human
ugcaacuaaacaugggagaacaaa

SEQ ID NO: 760232 - RNA, 21 nt, Human
ugcauaacaaaauuucuugua

SEQ ID NO: 760233 - RNA, 21 nt, Human
ugcuccaguucaaaacaauca

SEQ ID NO: 760234 - RNA, 26 nt, Human
uggaaaaaagcaauuauuaccaaaaa

SEQ ID NO: 760235 - RNA, 22 nt, Human
uggaguuuauuuuuuguaaccu

SEQ ID NO: 760236 - RNA, 21 nt, Human
ugggagaacaaaacaaaaaca

SEQ ID NO: 760237 - RNA, 23 nt, Human
uguaagcccugaggcagugcccc

SEQ ID NO: 760238 - RNA, 20 nt, Human
uguacagaugaaaaaaaacc

SEQ ID NO: 760239 - RNA, 21 nt, Human
uguacagaugaaaaaaaaccc

SEQ ID NO: 760240 - RNA, 18 nt, Human
uguuaugggcucuuccca

SEQ ID NO: 760241 - RNA, 25 nt, Human
uuagaaaauaucauuuucuuuccua

SEQ ID NO: 760242 - RNA, 22 nt, Human
uucaaaaaaucgacuaguucaa

SEQ ID NO: 760243 - RNA, 24 nt, Human
uucuuguacagaugaaaaaaaacc

SEQ ID NO: 760244 - RNA, 21 nt, Human
uuguaacuaagagcucaugug

SEQ ID NO: 760245 - RNA, 22 nt, Human
uuuaaaaaaauacaaacagaag

SEQ ID NO: 760246 - RNA, 18 nt, Human
uuuacaaaacaaaaggga

SEQ ID NO: 760247 - RNA, 27 nt, Human
uuuacauagucuugcaaucauugugug

SEQ ID NO: 760248 - RNA, 26 nt, Human
uuugaucacaguuagacauaaucacu

SEQ ID NO: 760249 - RNA, 23 nt, Human
uuugguuuucuggacaaggucug

SEQ ID NO: 760250 - RNA, 18 nt, Human
uuuuugaaggacccucuc

SEQ ID NO: 760251 - RNA, 23 nt, Human
aaaccaggaucaacacacaaaaa

SEQ ID NO: 760252 - RNA, 21 nt, Human
aagccuccaggccucacccaa

SEQ ID NO: 760253 - RNA, 19 nt, Human
aagccugcuggguucaucu

SEQ ID NO: 760254 - RNA, 18 nt, Human
aagcuggcccccacuccc

SEQ ID NO: 760255 - RNA, 25 nt, Human
aaggagcugugucuugggcaccugg

SEQ ID NO: 760256 - RNA, 21 nt, Human
aagucaaugcucuggaagccg

SEQ ID NO: 760257 - RNA, 24 nt, Human
acaggccagcaaacuuaggccucu

SEQ ID NO: 760258 - RNA, 20 nt, Human
accccgagccccacuugccc

SEQ ID NO: 760259 - RNA, 21 nt, Human
acgugugaaguucugcaagag

SEQ ID NO: 760260 - RNA, 19 nt, Human
acucccucucccaccauac

SEQ ID NO: 760261 - RNA, 23 nt, Human
agaacccacaggggccccugccc

SEQ ID NO: 760262 - RNA, 24 nt, Human
agaacccacaggggccccugcccu

SEQ ID NO: 760263 - RNA, 23 nt, Human
agacaccuuccuccaaacagcuu

SEQ ID NO: 760264 - RNA, 18 nt, Human
agacagacaccuuccucc

SEQ ID NO: 760265 - RNA, 23 nt, Human
agacccuaccuccugggaggagg

SEQ ID NO: 760266 - RNA, 22 nt, Human
agagcugugcugggaucuagga

SEQ ID NO: 760267 - RNA, 18 nt, Human
agaguucugaugcuuuuc

SEQ ID NO: 760268 - RNA, 28 nt, Human
agcacccaucuucccucccagauaugac

SEQ ID NO: 760269 - RNA, 21 nt, Human
agccacagcacuccuuugguu

SEQ ID NO: 760270 - RNA, 20 nt, Human
agccuggucccaggcugaag

SEQ ID NO: 760271 - RNA, 18 nt, Human
aggaaagccagagaaaag

SEQ ID NO: 760272 - RNA, 18 nt, Human
aggcaagaggaaaaaucu

SEQ ID NO: 760273 - RNA, 20 nt, Human
aggccagcaaacuuaggccu

SEQ ID NO: 760274 - RNA, 19 nt, Human
aggccucacccaaacccaa

SEQ ID NO: 760275 - RNA, 19 nt, Human
agugcccccuaccccgagc

SEQ ID NO: 760276 - RNA, 24 nt, Human
agugcccccuaccccgagccccac

SEQ ID NO: 760277 - RNA, 19 nt, Human
aguggcugcagcucagcag

SEQ ID NO: 760278 - RNA, 18 nt, Human
aguucugcaagagguuuc

SEQ ID NO: 760279 - RNA, 18 nt, Human
aucaggcuucccaagcau

SEQ ID NO: 760280 - RNA, 21 nt, Human
auucaccucugaagccuccag

SEQ ID NO: 760281 - RNA, 23 nt, Human
caaacccaaugaccaaucaggag

SEQ ID NO: 760282 - RNA, 18 nt, Human
caacacacaaaaagugca

SEQ ID NO: 760283 - RNA, 23 nt, Human
caacccucucccagcacccaucu

SEQ ID NO: 760284 - RNA, 21 nt, Human
caagaaaaccacaggccagca

SEQ ID NO: 760285 - RNA, 22 nt, Human
caagcagugcccccuaccccga

SEQ ID NO: 760286 - RNA, 19 nt, Human
cacacugcacuccacuccc

SEQ ID NO: 760287 - RNA, 21 nt, Human
cacaggccagcaaacuuaggc

SEQ ID NO: 760288 - RNA, 20 nt, Human
cacaggggccccugcccucc

SEQ ID NO: 760289 - RNA, 18 nt, Human
cacccaaacccaaugacc

SEQ ID NO: 760290 - RNA, 19 nt, Human
cacccaucuucccucccag

SEQ ID NO: 760291 - RNA, 23 nt, Human
caccucccucugcagccccugcc

SEQ ID NO: 760292 - RNA, 24 nt, Human
caccucccucugcagccccugccc

SEQ ID NO: 760293 - RNA, 22 nt, Human
cacucugccaaccucauuuacu

SEQ ID NO: 760294 - RNA, 26 nt, Human
cacugaaauacagaucugggaaacca

SEQ ID NO: 760295 - RNA, 18 nt, Human
cagcaccaggcccaagcc

SEQ ID NO: 760296 - RNA, 21 nt, Human
cagcaugaggugagaacaggg

SEQ ID NO: 760297 - RNA, 19 nt, Human
cagccaagacccuaccucc

SEQ ID NO: 760298 - RNA, 22 nt, Human
cagcucccuccccuggagcccc

SEQ ID NO: 760299 - RNA, 21 nt, Human
cagggcugcaguucucagccc

SEQ ID NO: 760300 - RNA, 20 nt, Human
ccacaaggacaacaggggac

SEQ ID NO: 760301 - RNA, 23 nt, Human
ccacagacgugcccucccaagcc

SEQ ID NO: 760302 - RNA, 22 nt, Human
ccacaucuaagagauuucaaaa

SEQ ID NO: 760303 - RNA, 20 nt, Human
ccaccuccuaagccugcugg

SEQ ID NO: 760304 - RNA, 24 nt, Human
ccagacagacaccuuccuccaaac

SEQ ID NO: 760305 - RNA, 22 nt, Human
ccagacucuggcucucuaugcc

SEQ ID NO: 760306 - RNA, 22 nt, Human
ccaggcccaagccacacugcac

SEQ ID NO: 760307 - RNA, 24 nt, Human
ccaggcccaagccacacugcacuc

SEQ ID NO: 760308 - RNA, 22 nt, Human
ccauggguagccccagcauggg

SEQ ID NO: 760309 - RNA, 25 nt, Human
cccaagcauaaauucaccucugaag

SEQ ID NO: 760310 - RNA, 23 nt, Human
cccaagccacacugcacuccacu

SEQ ID NO: 760311 - RNA, 22 nt, Human
cccacagacgugcccucccaag

SEQ ID NO: 760312 - RNA, 24 nt, Human
cccacagacgugcccucccaagcc

SEQ ID NO: 760313 - RNA, 19 nt, Human
cccacccuccuagggcccc

SEQ ID NO: 760314 - RNA, 18 nt, Human
cccagaaugagcaggcuc

SEQ ID NO: 760315 - RNA, 21 nt, Human
cccaggcugaaggggaagccg

SEQ ID NO: 760316 - RNA, 19 nt, Human
ccccacagacgugcccucc

SEQ ID NO: 760317 - RNA, 20 nt, Human
ccccacagacgugcccuccc

SEQ ID NO: 760318 - RNA, 23 nt, Human
cccccaacccucucccagcaccc

SEQ ID NO: 760319 - RNA, 25 nt, Human
cccccaacccucucccagcacccau

SEQ ID NO: 760320 - RNA, 23 nt, Human
cccccacccuccuagggccccau

SEQ ID NO: 760321 - RNA, 23 nt, Human
cccccacugccacucugccaacc

SEQ ID NO: 760322 - RNA, 22 nt, Human
ccccccaagaaaaccacaggcc

SEQ ID NO: 760323 - RNA, 20 nt, Human
cccccuaccccgagccccac

SEQ ID NO: 760324 - RNA, 26 nt, Human
cccccugcccccaacccucucccagc

SEQ ID NO: 760325 - RNA, 19 nt, Human
ccccuccuucccgccccca

SEQ ID NO: 760326 - RNA, 22 nt, Human
ccccugcccagcuguccucacc

SEQ ID NO: 760327 - RNA, 24 nt, Human
ccccugcccucccccccaagaaaa

SEQ ID NO: 760328 - RNA, 18 nt, Human
cccucaggcuuggcccag

SEQ ID NO: 760329 - RNA, 22 nt, Human
cccucccaagcccgagcacgcu

SEQ ID NO: 760330 - RNA, 24 nt, Human
cccucugcagccccugcccagcug

SEQ ID NO: 760331 - RNA, 21 nt, Human
cccugcccccaacccucuccc

SEQ ID NO: 760332 - RNA, 22 nt, Human
cccugcccccaacccucuccca

SEQ ID NO: 760333 - RNA, 19 nt, Human
cccuggccuccccagcucc

SEQ ID NO: 760334 - RNA, 23 nt, Human
ccuagggccccauuucccucagg

SEQ ID NO: 760335 - RNA, 23 nt, Human
ccucacagagucucagggccagg

SEQ ID NO: 760336 - RNA, 20 nt, Human
ccucccuuguaaacacugaa

SEQ ID NO: 760337 - RNA, 21 nt, Human
ccugaaagaccuugccccucc

SEQ ID NO: 760338 - RNA, 21 nt, Human
ccugcccagcuguccucaccc

SEQ ID NO: 760339 - RNA, 23 nt, Human
ccugcccccaacccucucccagc

SEQ ID NO: 760340 - RNA, 20 nt, Human
ccugcccucccccccaagaa

SEQ ID NO: 760341 - RNA, 22 nt, Human
ccuggccuccccagcucccucc

SEQ ID NO: 760342 - RNA, 18 nt, Human
ccugggaggagggccuuc

SEQ ID NO: 760343 - RNA, 20 nt, Human
ccuucccgcccccacccucc

SEQ ID NO: 760344 - RNA, 23 nt, Human
ccuugccccuccuucccgccccc

SEQ ID NO: 760345 - RNA, 20 nt, Human
cuacugcagggcaaaggagg

SEQ ID NO: 760346 - RNA, 22 nt, Human
cucagccccagccccugccccc

SEQ ID NO: 760347 - RNA, 19 nt, Human
cuccagcccccucacagag

SEQ ID NO: 760348 - RNA, 21 nt, Human
cuccaggccucacccaaaccu

SEQ ID NO: 760349 - RNA, 22 nt, Human
cucccaagcccgagcacgcucg

SEQ ID NO: 760350 - RNA, 21 nt, Human
cuccccagcucccuccccugg

SEQ ID NO: 760351 - RNA, 21 nt, Human
cucccucucccaccauacucc

SEQ ID NO: 760352 - RNA, 22 nt, Human
cugcaguucucagccccagccc

SEQ ID NO: 760353 - RNA, 24 nt, Human
cugccacucugccaaccucauuua

SEQ ID NO: 760354 - RNA, 21 nt, Human
cugcccccaacccucucccag

SEQ ID NO: 760355 - RNA, 18 nt, Human
cuggcccccacucccccu

SEQ ID NO: 760356 - RNA, 22 nt, Human
cuuauacccuggccuccccagc

SEQ ID NO: 760357 - RNA, 22 nt, Human
cuugcccauggguagccccagc

SEQ ID NO: 760358 - RNA, 20 nt, Human
cuuggcccagccucagagaa

SEQ ID NO: 760359 - RNA, 23 nt, Human
cuuggcccagccucagagaagac

SEQ ID NO: 760360 - RNA, 18 nt, Human
cuugggccaagcugagag

SEQ ID NO: 760361 - RNA, 19 nt, Human
cuuguaaacacugaaauac

SEQ ID NO: 760362 - RNA, 18 nt, Human
gaacccacaggggccccu

SEQ ID NO: 760363 - RNA, 18 nt, Human
gaagugcucagcuagcag

SEQ ID NO: 760364 - RNA, 24 nt, Human
gacgugcccucccaagcccgagca

SEQ ID NO: 760365 - RNA, 23 nt, Human
gacuacuuuucggaaaucuccac

SEQ ID NO: 760366 - RNA, 21 nt, Human
gaggugagaacagggccucug

SEQ ID NO: 760367 - RNA, 25 nt, Human
gcagggcaaaggaggaaagccagag

SEQ ID NO: 760368 - RNA, 26 nt, Human
gcccagccucagagaagagggaacgc

SEQ ID NO: 760369 - RNA, 19 nt, Human
gcccauggguagccccagg

SEQ ID NO: 760370 - RNA, 29 nt, Human
gccccacuugcccauggguagccccagcc

SEQ ID NO: 760371 - RNA, 24 nt, Human
gcccccacccuccuagggccccau

SEQ ID NO: 760372 - RNA, 23 nt, Human
gcccucccccccaagaaaaccac

SEQ ID NO: 760373 - RNA, 19 nt, Human
gccgucucugggaggugga

SEQ ID NO: 760374 - RNA, 21 nt, Human
gcuccgucucucacccccaca

SEQ ID NO: 760375 - RNA, 22 nt, Human
ggagcagcaugaggugagaaca

SEQ ID NO: 760376 - RNA, 18 nt, Human
gggaaggagcugugucuu

SEQ ID NO: 760377 - RNA, 18 nt, Human
gggagcccucaggguuca

SEQ ID NO: 760378 - RNA, 21 nt, Human
gggcacagcaggcuaagggca

SEQ ID NO: 760379 - RNA, 22 nt, Human
gggcacagcaggcuaagggcac

SEQ ID NO: 760380 - RNA, 20 nt, Human
gggcauggcaaguuggggga

SEQ ID NO: 760381 - RNA, 18 nt, Human
gggcugcaguucucagcc

SEQ ID NO: 760382 - RNA, 20 nt, Human
ggggucaguggggugggugg

SEQ ID NO: 760383 - RNA, 23 nt, Human
gguaaagcuggcccccacucccc

SEQ ID NO: 760384 - RNA, 22 nt, Human
ggucccaggcugaaggggaagc

SEQ ID NO: 760385 - RNA, 20 nt, Human
ggugagaacagggccucugg

SEQ ID NO: 760386 - RNA, 19 nt, Human
gguuugauuucaggugggu

SEQ ID NO: 760387 - RNA, 22 nt, Human
gucuugggcaccugguggugcc

SEQ ID NO: 760388 - RNA, 19 nt, Human
guggcuccgucucucaccc

SEQ ID NO: 760389 - RNA, 18 nt, Human
uaaggagauccaaguccc

SEQ ID NO: 760390 - RNA, 21 nt, Human
uaagggcacagagagagaugg

SEQ ID NO: 760391 - RNA, 20 nt, Human
uaggccucuguggcccccua

SEQ ID NO: 760392 - RNA, 22 nt, Human
ucacagagucucagggccaggg

SEQ ID NO: 760393 - RNA, 23 nt, Human
ucacagagucucagggccagggc

SEQ ID NO: 760394 - RNA, 22 nt, Human
ucacccagugccaccuccuaag

SEQ ID NO: 760395 - RNA, 20 nt, Human
ucaccucugaagccuccagg

SEQ ID NO: 760396 - RNA, 22 nt, Human
ucagagcugugcugggaucuag

SEQ ID NO: 760397 - RNA, 18 nt, Human
ucagggccagggccaagg

SEQ ID NO: 760398 - RNA, 23 nt, Human
uccaagucccuucccuucagguu

SEQ ID NO: 760399 - RNA, 23 nt, Human
uccaggccucacccaaacccaau

SEQ ID NO: 760400 - RNA, 20 nt, Human
ucccaagcccgagcacgcuc

SEQ ID NO: 760401 - RNA, 21 nt, Human
ucccagacagacaccuuccuc

SEQ ID NO: 760402 - RNA, 26 nt, Human
ucccagacagacaccuuccuccaaac

SEQ ID NO: 760403 - RNA, 21 nt, Human
ucccagcaccaggcccaagcc

SEQ ID NO: 760404 - RNA, 18 nt, Human
ucccagcacccaucuucc

SEQ ID NO: 760405 - RNA, 19 nt, Human
ucccaggcugaaggggaag

SEQ ID NO: 760406 - RNA, 21 nt, Human
ucccccccaagaaaaccacag

SEQ ID NO: 760407 - RNA, 22 nt, Human
ucccucaggcuuggcccagccu

SEQ ID NO: 760408 - RNA, 21 nt, Human
ucccucugcagccccugccca

SEQ ID NO: 760409 - RNA, 18 nt, Human
uccucacccagugccacc

SEQ ID NO: 760410 - RNA, 18 nt, Human
uccucccagacagacacc

SEQ ID NO: 760411 - RNA, 19 nt, Human
uccuucccgcccccacccu

SEQ ID NO: 760412 - RNA, 19 nt, Human
uccuuggcagcaagggccc

SEQ ID NO: 760413 - RNA, 22 nt, Human
ucuccacccaggggaaccacag

SEQ ID NO: 760414 - RNA, 23 nt, Human
ucucccaccauacuccucuuugg

SEQ ID NO: 760415 - RNA, 21 nt, Human
ucucccagcacccaucuuccc

SEQ ID NO: 760416 - RNA, 20 nt, Human
ucugcagagcccccacugcc

SEQ ID NO: 760417 - RNA, 19 nt, Human
ucugcagccccugcccagc

SEQ ID NO: 760418 - RNA, 26 nt, Human
ucugcagccccugcccagcuguccuc

SEQ ID NO: 760419 - RNA, 22 nt, Human
ugaaagaccuugccccuccuuc

SEQ ID NO: 760420 - RNA, 23 nt, Human
ugacaaaccccacaaucaucagu

SEQ ID NO: 760421 - RNA, 19 nt, Human
ugaggcugggcuccuuggc

SEQ ID NO: 760422 - RNA, 18 nt, Human
ugagggcaagggggaggc

SEQ ID NO: 760423 - RNA, 18 nt, Human
ugagguaaagcuggcccc

SEQ ID NO: 760424 - RNA, 27 nt, Human
ugcagagcccccacugccacucugcca

SEQ ID NO: 760425 - RNA, 20 nt, Human
ugccccauccucccagacag

SEQ ID NO: 760426 - RNA, 20 nt, Human
ugcccccuaccccgagcccc

SEQ ID NO: 760427 - RNA, 21 nt, Human
ugcccccugcccccaacccuc

SEQ ID NO: 760428 - RNA, 22 nt, Human
ugcccucccccccaagaaaacc

SEQ ID NO: 760429 - RNA, 21 nt, Human
ugcuucaagcagugcccccua

SEQ ID NO: 760430 - RNA, 18 nt, Human
uggcagcaagggcccaga

SEQ ID NO: 760431 - RNA, 21 nt, Human
uggcugcagcucagcaggucc

SEQ ID NO: 760432 - RNA, 18 nt, Human
ugggcaccugguggugcc

SEQ ID NO: 760433 - RNA, 23 nt, Human
ugggucugguuccugaaagaccu

SEQ ID NO: 760434 - RNA, 19 nt, Human
uggguggccgucucuggga

SEQ ID NO: 760435 - RNA, 19 nt, Human
ugugcugggaucuaggaaa

SEQ ID NO: 760436 - RNA, 20 nt, Human
uguggcuugaagaaucacgu

SEQ ID NO: 760437 - RNA, 24 nt, Human
uuccacaucuaagagauuucaaaa

SEQ ID NO: 760438 - RNA, 21 nt, Human
uucucagccccagccccugcc

SEQ ID NO: 760439 - RNA, 23 nt, Human
uucucagccccagccccugcccc

SEQ ID NO: 760440 - RNA, 21 nt, Human
uugcccccugcccccaacccu

SEQ ID NO: 760441 - RNA, 21 nt, Human
uugguuugauuucaggugggu

SEQ ID NO: 760442 - RNA, 22 nt, Human
uuuacugccccauccucccaga

SEQ ID NO: 760443 - RNA, 22 nt, Human
uuuccaccucccucugcagccc

SEQ ID NO: 760444 - RNA, 23 nt, Human
aacaacaacagcucaggaaccaa

SEQ ID NO: 760445 - RNA, 23 nt, Human
aacacaaguccaacaacaacagc

SEQ ID NO: 760446 - RNA, 21 nt, Human
aagaaauaacgaauauaagac

SEQ ID NO: 760447 - RNA, 19 nt, Human
aagaagccacuaaaaggac

SEQ ID NO: 760448 - RNA, 20 nt, Human
aagccucaguggcaucccag

SEQ ID NO: 760449 - RNA, 23 nt, Human
aagggaacuucuacucuucaguu

SEQ ID NO: 760450 - RNA, 23 nt, Human
agaaaacucuagguuuuugccaa

SEQ ID NO: 760451 - RNA, 24 nt, Human
augccacucaauuuuaagaagcca

SEQ ID NO: 760452 - RNA, 19 nt, Human
caauuuauuuuuuccuagu

SEQ ID NO: 760453 - RNA, 23 nt, Human
cagcaaaaaaagggcuaaguuca

SEQ ID NO: 760454 - RNA, 18 nt, Human
cauagcacgguccauaug

SEQ ID NO: 760455 - RNA, 18 nt, Human
ccaaacaauaaggagagc

SEQ ID NO: 760456 - RNA, 26 nt, Human
ccaacaacaacagcucaggaaccaaa

SEQ ID NO: 760457 - RNA, 20 nt, Human
cgacugcuuguuucuccugu

SEQ ID NO: 760458 - RNA, 20 nt, Human
gauaaaaaaaucugcaaggg

SEQ ID NO: 760459 - RNA, 20 nt, Human
ggugaguuauuaaacccauu

SEQ ID NO: 760460 - RNA, 22 nt, Human
uaaaaggacacuuucugcagca

SEQ ID NO: 760461 - RNA, 24 nt, Human
uaaaauucccaaaguggaauauca

SEQ ID NO: 760462 - RNA, 18 nt, Human
uaagacaaaucaaaacca

SEQ ID NO: 760463 - RNA, 22 nt, Human
uacaaauacuaaaauucccaaa

SEQ ID NO: 760464 - RNA, 22 nt, Human
uacuaaaauucccaaaguggaa

SEQ ID NO: 760465 - RNA, 22 nt, Human
uagauuuagggaaaaacgacua

SEQ ID NO: 760466 - RNA, 27 nt, Human
ucugcagcaaaaaaagggccggggucc

SEQ ID NO: 760467 - RNA, 19 nt, Human
ugcagcaaaaaaagggcua

SEQ ID NO: 760468 - RNA, 21 nt, Human
ugcgacugcuuguuucuccug

SEQ ID NO: 760469 - RNA, 19 nt, Human
ugucacugauaaaaaaauc

SEQ ID NO: 760470 - RNA, 21 nt, Human
uuccuagucacucauuggaac

SEQ ID NO: 760471 - RNA, 22 nt, Human
uugagaaaaacuuuugcaacuc

SEQ ID NO: 760472 - RNA, 21 nt, Human
uuuaagaagccacuaaaagga

SEQ ID NO: 760473 - RNA, 23 nt, Human
uuugacaaagacacaauaauaua

SEQ ID NO: 760474 - RNA, 19 nt, Human
uuuuaaggaacuuuaggga

SEQ ID NO: 760475 - RNA, 18 nt, Human
aaccaagccaugccaggu

SEQ ID NO: 760476 - RNA, 22 nt, Human
ccagcgcgccccgaucuuucuc

SEQ ID NO: 760477 - RNA, 19 nt, Human
cccccaagccuuaucuuau

SEQ ID NO: 760478 - RNA, 27 nt, Human
ccgaagcugucuaagugagguggcucc

SEQ ID NO: 760479 - RNA, 21 nt, Human
ggagaugaaggaagggaaaaa

SEQ ID NO: 760480 - RNA, 19 nt, Human
ggcuccaaggagacaaagc

SEQ ID NO: 760481 - RNA, 22 nt, Human
uaagucuuucgaaaaagucauu

SEQ ID NO: 760482 - RNA, 19 nt, Human
ucgaaaaagucauuucauc

SEQ ID NO: 760483 - RNA, 23 nt, Human
ucgaaaaagucauuucaucuuca

SEQ ID NO: 760484 - RNA, 24 nt, Human
ucugcauccacauccgaagcuguc

SEQ ID NO: 760485 - RNA, 21 nt, Human
uggauuauuucgugcaucccc

SEQ ID NO: 760486 - RNA, 23 nt, Human
aaaaaaaaaaaaaaaacaucuug

SEQ ID NO: 760487 - RNA, 19 nt, Human
aaaaaagauucuuuauuga

SEQ ID NO: 760488 - RNA, 19 nt, Human
aaaagcagcagacacagaa

SEQ ID NO: 760489 - RNA, 24 nt, Human
aaaauguugggaucacagguguga

SEQ ID NO: 760490 - RNA, 23 nt, Human
aaacauaaucuuaagcaaaagca

SEQ ID NO: 760491 - RNA, 24 nt, Human
aaagugcugagauuacaggcauga

SEQ ID NO: 760492 - RNA, 26 nt, Human
aaauguugggaucacaggugugagcc

SEQ ID NO: 760493 - RNA, 23 nt, Human
aaccucaggugauccaccugccu

SEQ ID NO: 760494 - RNA, 27 nt, Human
aacugauacugguggcccaggaggcca

SEQ ID NO: 760495 - RNA, 23 nt, Human
aagcaaaagcagcagacacagaa

SEQ ID NO: 760496 - RNA, 25 nt, Human
aagcaguccuccugccucagccucc

SEQ ID NO: 760497 - RNA, 25 nt, Human
aagcaguccuccugccucagccucc

SEQ ID NO: 760498 - RNA, 26 nt, Human
aagugcugagauuacaggcaugagcc

SEQ ID NO: 760499 - RNA, 23 nt, Human
acaauuuuuccgaagggaaguau

SEQ ID NO: 760500 - RNA, 22 nt, Human
acagcagccuugaccucccagg

SEQ ID NO: 760501 - RNA, 22 nt, Human
accauguugaucaggcuggucu

SEQ ID NO: 760502 - RNA, 19 nt, Human
accucauuuuacuugucca

SEQ ID NO: 760503 - RNA, 19 nt, Human
acgggguuucaccauguug

SEQ ID NO: 760504 - RNA, 21 nt, Human
acgggguuucaccauguugau

SEQ ID NO: 760505 - RNA, 24 nt, Human
acgggguuucaccauguugaucag

SEQ ID NO: 760506 - RNA, 18 nt, Human
acuacaugcaggacugua

SEQ ID NO: 760507 - RNA, 21 nt, Human
acucugucaccuaggcugaag

SEQ ID NO: 760508 - RNA, 21 nt, Human
agaugaagagguggagcacag

SEQ ID NO: 760509 - RNA, 19 nt, Human
agauuacaggcaugagcca

SEQ ID NO: 760510 - RNA, 22 nt, Human
agauuacaggcaugagccacca

SEQ ID NO: 760511 - RNA, 22 nt, Human
agcauuuauucaccccugcggc

SEQ ID NO: 760512 - RNA, 24 nt, Human
agggagcagacgcgggggccggcc

SEQ ID NO: 760513 - RNA, 21 nt, Human
aggggaggggagggggcaaag

SEQ ID NO: 760514 - RNA, 23 nt, Human
aggggccgggcgcuggagaacag

SEQ ID NO: 760515 - RNA, 24 nt, Human
aggugauccaccugccuuggccuc

SEQ ID NO: 760516 - RNA, 22 nt, Human
aguaaagacgggguuucaccau

SEQ ID NO: 760517 - RNA, 18 nt, Human
agucggggcggggacugg

SEQ ID NO: 760518 - RNA, 20 nt, Human
aguggucgagggcacaguua

SEQ ID NO: 760519 - RNA, 24 nt, Human
auccugaguaccugggaccacagg

SEQ ID NO: 760520 - RNA, 19 nt, Human
aucgagagcagccccacca

SEQ ID NO: 760521 - RNA, 19 nt, Human
augaaggccccugcacccc

SEQ ID NO: 760522 - RNA, 20 nt, Human
augaggaaacugaacagggg

SEQ ID NO: 760523 - RNA, 24 nt, Human
augguacucuggugggggaugcau

SEQ ID NO: 760524 - RNA, 21 nt, Human
caaaagcagcagacacagaac

SEQ ID NO: 760525 - RNA, 22 nt, Human
caaaagcagcagacacagaaca

SEQ ID NO: 760526 - RNA, 25 nt, Human
caaaagcagcagacacagaacagaa

SEQ ID NO: 760527 - RNA, 24 nt, Human
caaaauguugggaucacaggugug

SEQ ID NO: 760528 - RNA, 25 nt, Human
caaacuccugggcucaagcaguccu

SEQ ID NO: 760529 - RNA, 24 nt, Human
caaagugcugagauuacaggcaug

SEQ ID NO: 760530 - RNA, 23 nt, Human
caacucaccccgaugccuaacgc

SEQ ID NO: 760531 - RNA, 21 nt, Human
caagagcagggagagagaagu

SEQ ID NO: 760532 - RNA, 22 nt, Human
caagcaguccuccugccucagc

SEQ ID NO: 760533 - RNA, 24 nt, Human
cacaggugugagccaccaucccca

SEQ ID NO: 760534 - RNA, 18 nt, Human
caccauccccagccaggc

SEQ ID NO: 760535 - RNA, 23 nt, Human
caccauguugaucaggcuggucu

SEQ ID NO: 760536 - RNA, 24 nt, Human
caccauguugaucaggcuggucuu

SEQ ID NO: 760537 - RNA, 19 nt, Human
cacccagauguguguccuc

SEQ ID NO: 760538 - RNA, 22 nt, Human
caccuaggcugaagugccgugc

SEQ ID NO: 760539 - RNA, 24 nt, Human
caccucagcauccugaguaccugg

SEQ ID NO: 760540 - RNA, 23 nt, Human
caccugccuuggccucccaaagu

SEQ ID NO: 760541 - RNA, 24 nt, Human
caccugccuuggccucccaaagug

SEQ ID NO: 760542 - RNA, 22 nt, Human
cacucugucaccuaggcugaag

SEQ ID NO: 760543 - RNA, 23 nt, Human
cacucugucaccuaggcugaagu

SEQ ID NO: 760544 - RNA, 22 nt, Human
cagcagacacagaacagaauga

SEQ ID NO: 760545 - RNA, 20 nt, Human
cagcauccugaguaccuggg

SEQ ID NO: 760546 - RNA, 23 nt, Human
cagccuugaccucccaggcucag

SEQ ID NO: 760547 - RNA, 19 nt, Human
cagcugcaccaguguggag

SEQ ID NO: 760548 - RNA, 18 nt, Human
caggggaggggagggggc

SEQ ID NO: 760549 - RNA, 19 nt, Human
caggggcccgggcggggag

SEQ ID NO: 760550 - RNA, 22 nt, Human
caggugauucucccaccucagc

SEQ ID NO: 760551 - RNA, 22 nt, Human
cagucggggcggggacuggcgg

SEQ ID NO: 760552 - RNA, 20 nt, Human
cauccaggcgugguugcgug

SEQ ID NO: 760553 - RNA, 24 nt, Human
caugcagccuuaagcccacuaugc

SEQ ID NO: 760554 - RNA, 24 nt, Human
cauguugaucaggcuggucuugaa

SEQ ID NO: 760555 - RNA, 20 nt, Human
ccaaaauguugggaucacag

SEQ ID NO: 760556 - RNA, 24 nt, Human
ccaaaauguugggaucacaggugu

SEQ ID NO: 760557 - RNA, 27 nt, Human
ccaaacccacagaauguacaacgcuga

SEQ ID NO: 760558 - RNA, 23 nt, Human
ccaaagugcugagauuacaggca

SEQ ID NO: 760559 - RNA, 24 nt, Human
ccaaagugcugagauuacaggcau

SEQ ID NO: 760560 - RNA, 19 nt, Human
ccaccauccccagccaggc

SEQ ID NO: 760561 - RNA, 18 nt, Human
ccaguguaaacgacagac

SEQ ID NO: 760562 - RNA, 23 nt, Human
cccacagaauguacaacgcugag

SEQ ID NO: 760563 - RNA, 23 nt, Human
cccaggcucaggugauucuccca

SEQ ID NO: 760564 - RNA, 18 nt, Human
ccccuagagacuucuccu

SEQ ID NO: 760565 - RNA, 22 nt, Human
ccccugcaccccugcuuugcca

SEQ ID NO: 760566 - RNA, 24 nt, Human
cccuaggaaccaccgugggacucu

SEQ ID NO: 760567 - RNA, 18 nt, Human
cccugugaguggggaaug

SEQ ID NO: 760568 - RNA, 21 nt, Human
ccuaaccucaggugauccacc

SEQ ID NO: 760569 - RNA, 23 nt, Human
ccuaaccucaggugauccaccug

SEQ ID NO: 760570 - RNA, 23 nt, Human
ccuaaccucaggugauccaccug

SEQ ID NO: 760571 - RNA, 21 nt, Human
ccuagagacuucuccuaccuc

SEQ ID NO: 760572 - RNA, 24 nt, Human
ccucccaggcucaggugauucucc

SEQ ID NO: 760573 - RNA, 18 nt, Human
ccuccugccucagccucc

SEQ ID NO: 760574 - RNA, 22 nt, Human
ccugaguaccugggaccacagg

SEQ ID NO: 760575 - RNA, 23 nt, Human
ccugccucagccuccaaaauguu

SEQ ID NO: 760576 - RNA, 20 nt, Human
ccugggcucaagcaguccuc

SEQ ID NO: 760577 - RNA, 23 nt, Human
ccugggcucaagcaguccuccug

SEQ ID NO: 760578 - RNA, 21 nt, Human
ccuuccgugggaagguucugg

SEQ ID NO: 760579 - RNA, 22 nt, Human
cgcgcgccucucgagaggccgg

SEQ ID NO: 760580 - RNA, 23 nt, Human
cgcuucugagucacuucacuccu

SEQ ID NO: 760581 - RNA, 21 nt, Human
cggaagcaacacuaugaaagc

SEQ ID NO: 760582 - RNA, 23 nt, Human
cggcaaggcugggcaguacggcc

SEQ ID NO: 760583 - RNA, 21 nt, Human
cggcggccgacaggggcccgg

SEQ ID NO: 760584 - RNA, 24 nt, Human
cgggguuucaccauguugaucagg

SEQ ID NO: 760585 - RNA, 19 nt, Human
cuaaaauugcuuuaaaaau

SEQ ID NO: 760586 - RNA, 24 nt, Human
cucaggugauccaccugccuuggc

SEQ ID NO: 760587 - RNA, 21 nt, Human
cucaggugauucucccaccuc

SEQ ID NO: 760588 - RNA, 23 nt, Human
cucaggugauucucccaccucag

SEQ ID NO: 760589 - RNA, 24 nt, Human
cucaggugauucucccaccucagc

SEQ ID NO: 760590 - RNA, 21 nt, Human
cucccaaagugcugagauuac

SEQ ID NO: 760591 - RNA, 19 nt, Human
cucccaggcucaggugauu

SEQ ID NO: 760592 - RNA, 25 nt, Human
cuccugggcucaagcaguccuccug

SEQ ID NO: 760593 - RNA, 19 nt, Human
cucugggcuaagcugacuc

SEQ ID NO: 760594 - RNA, 24 nt, Human
cugcaccccugcuuugccaccaag

SEQ ID NO: 760595 - RNA, 23 nt, Human
cugccuuggccucccaaagugcu

SEQ ID NO: 760596 - RNA, 25 nt, Human
cuggcggcggccgacaggggcccuu

SEQ ID NO: 760597 - RNA, 24 nt, Human
cuggugggggaugcaugucauuac

SEQ ID NO: 760598 - RNA, 22 nt, Human
cuugauccugaccccuagagac

SEQ ID NO: 760599 - RNA, 25 nt, Human
cuuuccaugcagccuuaagcccacu

SEQ ID NO: 760600 - RNA, 18 nt, Human
cuuugccaccaagcuacc

SEQ ID NO: 760601 - RNA, 18 nt, Human
gaaacugaacaggggccg

SEQ ID NO: 760602 - RNA, 24 nt, Human
gaacaggggccgggcgcuggagaa

SEQ ID NO: 760603 - RNA, 22 nt, Human
gaaggccccugcaccccugcuu

SEQ ID NO: 760604 - RNA, 19 nt, Human
gacuggcacugauggcuga

SEQ ID NO: 760605 - RNA, 22 nt, Human
gagaacagacaguucacaggcg

SEQ ID NO: 760606 - RNA, 18 nt, Human
gagauggcggagcgcagc

SEQ ID NO: 760607 - RNA, 23 nt, Human
gagauggggucuccuuauauugc

SEQ ID NO: 760608 - RNA, 20 nt, Human
gagcagccccaccagagugg

SEQ ID NO: 760609 - RNA, 26 nt, Human
gaggaugccucguucaaccucauuuu

SEQ ID NO: 760610 - RNA, 18 nt, Human
gaggggagggggcaaagg

SEQ ID NO: 760611 - RNA, 19 nt, Human
gagguucccaguccuugga

SEQ ID NO: 760612 - RNA, 25 nt, Human
gaguuuuaugauauccucaugggag

SEQ ID NO: 760613 - RNA, 18 nt, Human
gaucacaggugugagcca

SEQ ID NO: 760614 - RNA, 25 nt, Human
gaucaucucaaacuccugggcucaa

SEQ ID NO: 760615 - RNA, 18 nt, Human
gaucucuguaccuuccuc

SEQ ID NO: 760616 - RNA, 20 nt, Human
gaugaaggccccugcacccc

SEQ ID NO: 760617 - RNA, 18 nt, Human
gauuacaggcaugagcca

SEQ ID NO: 760618 - RNA, 22 nt, Human
gauuacaggcaugagccaccac

SEQ ID NO: 760619 - RNA, 22 nt, Human
gccuuggccucccaaagugcug

SEQ ID NO: 760620 - RNA, 23 nt, Human
gcuggucuugaacuccuaaccuc

SEQ ID NO: 760621 - RNA, 18 nt, Human
gcuuugagggcccugggg

SEQ ID NO: 760622 - RNA, 21 nt, Human
ggagaacagacaguucacagg

SEQ ID NO: 760623 - RNA, 18 nt, Human
ggagcucccuuaggggag

SEQ ID NO: 760624 - RNA, 20 nt, Human
ggagcuggaagggccaugga

SEQ ID NO: 760625 - RNA, 21 nt, Human
ggaggccacuagugaggaggu

SEQ ID NO: 760626 - RNA, 27 nt, Human
ggagguggcucuguagcuccgaccacg

SEQ ID NO: 760627 - RNA, 20 nt, Human
ggcagagcccagacuaugca

SEQ ID NO: 760628 - RNA, 24 nt, Human
ggcuggucuugaacuccuaaccuc

SEQ ID NO: 760629 - RNA, 19 nt, Human
gggaagggagaaucgccac

SEQ ID NO: 760630 - RNA, 23 nt, Human
gggacaguggauacgggccagag

SEQ ID NO: 760631 - RNA, 22 nt, Human
gggagagaugaagagguggagc

SEQ ID NO: 760632 - RNA, 19 nt, Human
gggagggagcagacgcggg

SEQ ID NO: 760633 - RNA, 19 nt, Human
gggccagagcaggugggga

SEQ ID NO: 760634 - RNA, 19 nt, Human
gggccagagcaggugggga

SEQ ID NO: 760635 - RNA, 21 nt, Human
ggggaggggagggggcaaagg

SEQ ID NO: 760636 - RNA, 22 nt, Human
ggggaggggagggggcaaaggg

SEQ ID NO: 760637 - RNA, 23 nt, Human
ggggaggggagggggcaaagggc

SEQ ID NO: 760638 - RNA, 22 nt, Human
ggggguuuuagggcaggaaaug

SEQ ID NO: 760639 - RNA, 23 nt, Human
gggguuucaccauguugaucagg

SEQ ID NO: 760640 - RNA, 24 nt, Human
guacaaguguggaauuacucgaga

SEQ ID NO: 760641 - RNA, 24 nt, Human
gugauccaccugccuuggccuccc

SEQ ID NO: 760642 - RNA, 21 nt, Human
guuaggggagagaugaagagg

SEQ ID NO: 760643 - RNA, 24 nt, Human
uaaaaaaaaaaaaaaaaaaaacau

SEQ ID NO: 760644 - RNA, 24 nt, Human
uaaacgacagacuucagaugauac

SEQ ID NO: 760645 - RNA, 22 nt, Human
uaaagacgggguuucaccaugu

SEQ ID NO: 760646 - RNA, 24 nt, Human
uaaccucaggugauccaccugccu

SEQ ID NO: 760647 - RNA, 19 nt, Human
uaauuuuuuguaguuuuag

SEQ ID NO: 760648 - RNA, 22 nt, Human
uacagcagccuugaccucccag

SEQ ID NO: 760649 - RNA, 24 nt, Human
uacaggcaugagccaccacgccca

SEQ ID NO: 760650 - RNA, 24 nt, Human
uacuguuguguuaaggcagguuga

SEQ ID NO: 760651 - RNA, 24 nt, Human
uaguaaagacgggguuucaccaug

SEQ ID NO: 760652 - RNA, 26 nt, Human
uaguaaagacgggguuucaccauguu

SEQ ID NO: 760653 - RNA, 19 nt, Human
uaugcaggcaggggagccu

SEQ ID NO: 760654 - RNA, 18 nt, Human
ucacaggcgcucagcugc

SEQ ID NO: 760655 - RNA, 21 nt, Human
ucaccaugccuggcugauuuu

SEQ ID NO: 760656 - RNA, 21 nt, Human
ucagauguggcauucugcacu

SEQ ID NO: 760657 - RNA, 27 nt, Human
ucagcauuaaaaaaaaaaaaaaaaaaa

SEQ ID NO: 760658 - RNA, 18 nt, Human
ucagcccuaaugggcaga

SEQ ID NO: 760659 - RNA, 21 nt, Human
ucaggugauccaccugccuug

SEQ ID NO: 760660 - RNA, 21 nt, Human
ucaugggagcagggaggaccc

SEQ ID NO: 760661 - RNA, 21 nt, Human
uccaugcagccuuaagcccac

SEQ ID NO: 760662 - RNA, 23 nt, Human
uccaugccugaggaccauguaag

SEQ ID NO: 760663 - RNA, 24 nt, Human
ucccaaagugcugagauuacaggc

SEQ ID NO: 760664 - RNA, 21 nt, Human
ucccaggcucaggugauucuc

SEQ ID NO: 760665 - RNA, 23 nt, Human
ucccaggcucaggugauucuccc

SEQ ID NO: 760666 - RNA, 18 nt, Human
ucccugggcaagagcagg

SEQ ID NO: 760667 - RNA, 25 nt, Human
uccuccaugucuauaucagcccuaa

SEQ ID NO: 760668 - RNA, 22 nt, Human
uccugggcucaagcaguccucc

SEQ ID NO: 760669 - RNA, 24 nt, Human
uccugggcucaagcaguccuccug

SEQ ID NO: 760670 - RNA, 24 nt, Human
uccuuggagcuggaagggccaugg

SEQ ID NO: 760671 - RNA, 21 nt, Human
ucgagagcagccccaccagag

SEQ ID NO: 760672 - RNA, 24 nt, Human
ucucaaacuccugggcucaagcag

SEQ ID NO: 760673 - RNA, 19 nt, Human
ucucacucugucaccuagg

SEQ ID NO: 760674 - RNA, 24 nt, Human
ucucacucugucaccuaggcugaa

SEQ ID NO: 760675 - RNA, 19 nt, Human
ucuguaugguacucuggug

SEQ ID NO: 760676 - RNA, 18 nt, Human
ugaaggccccugcacccc

SEQ ID NO: 760677 - RNA, 20 nt, Human
ugaaguggucgagggcacag

SEQ ID NO: 760678 - RNA, 21 nt, Human
ugaccccuagagacuucuccu

SEQ ID NO: 760679 - RNA, 22 nt, Human
ugagacgaggucucacucuguc

SEQ ID NO: 760680 - RNA, 22 nt, Human
ugagauuacaggcaugagccac

SEQ ID NO: 760681 - RNA, 23 nt, Human
ugagauuacaggcaugagccacc

SEQ ID NO: 760682 - RNA, 24 nt, Human
ugagauuacaggcaugagccacca

SEQ ID NO: 760683 - RNA, 24 nt, Human
ugagauuacaggcaugagccacca

SEQ ID NO: 760684 - RNA, 19 nt, Human
ugaggaaacugaacagggg

SEQ ID NO: 760685 - RNA, 24 nt, Human
ugaucaggcuggucuugaacuccu

SEQ ID NO: 760686 - RNA, 22 nt, Human
ugaugacaguguuccacucucu

SEQ ID NO: 760687 - RNA, 22 nt, Human
ugaugaccagcaugccuuucuu

SEQ ID NO: 760688 - RNA, 20 nt, Human
ugccaggcaccaggauucag

SEQ ID NO: 760689 - RNA, 25 nt, Human
ugcccggcuaauuuuuuguaguuuu

SEQ ID NO: 760690 - RNA, 23 nt, Human
ugccucagccuccaaaauguugg

SEQ ID NO: 760691 - RNA, 19 nt, Human
uggauaggaggggaggcug

SEQ ID NO: 760692 - RNA, 19 nt, Human
uggcugggaaugccaggca

SEQ ID NO: 760693 - RNA, 24 nt, Human
uggcuuacagcagccuugaccucc

SEQ ID NO: 760694 - RNA, 24 nt, Human
ugggaccacaggugcacgucacca

SEQ ID NO: 760695 - RNA, 18 nt, Human
ugggaucacaggugugag

SEQ ID NO: 760696 - RNA, 22 nt, Human
ugggaucacaggugugagccac

SEQ ID NO: 760697 - RNA, 23 nt, Human
ugggaucacaggugugagccacc

SEQ ID NO: 760698 - RNA, 24 nt, Human
ugggaucacaggugugagccacca

SEQ ID NO: 760699 - RNA, 25 nt, Human
ugggaucacaggugugagccaccau

SEQ ID NO: 760700 - RNA, 24 nt, Human
ugggcucaagcaguccuccugccu

SEQ ID NO: 760701 - RNA, 18 nt, Human
ugggggauauggauagga

SEQ ID NO: 760702 - RNA, 19 nt, Human
ugugagccaccauccccag

SEQ ID NO: 760703 - RNA, 20 nt, Human
ugugguggcaacagucaaag

SEQ ID NO: 760704 - RNA, 19 nt, Human
ugugucaggggaggggagg

SEQ ID NO: 760705 - RNA, 18 nt, Human
uguuccacucucucaucc

SEQ ID NO: 760706 - RNA, 20 nt, Human
uuaaaaaaaaaaaaaaaaaa

SEQ ID NO: 760707 - RNA, 23 nt, Human
uuacagcagccuugaccucccag

SEQ ID NO: 760708 - RNA, 23 nt, Human
uuaggggagggggcacagaggca

SEQ ID NO: 760709 - RNA, 24 nt, Human
uuaguaaagacgggguuucaccau

SEQ ID NO: 760710 - RNA, 25 nt, Human
uuauugauacauacggaagcaacac

SEQ ID NO: 760711 - RNA, 18 nt, Human
uucacagucggggcgggg

SEQ ID NO: 760712 - RNA, 21 nt, Human
uucacugagucgugcauuuuu

SEQ ID NO: 760713 - RNA, 18 nt, Human
uucauccacugucagcac

SEQ ID NO: 760714 - RNA, 19 nt, Human
uucauccacugucagcacc

SEQ ID NO: 760715 - RNA, 21 nt, Human
uucucacccuuaucucuccag

SEQ ID NO: 760716 - RNA, 22 nt, Human
uuggcauuuuuguuugaguagg

SEQ ID NO: 760717 - RNA, 18 nt, Human
uuggccucccaaagugcu

SEQ ID NO: 760718 - RNA, 24 nt, Human
uuguagagauggggucuccuuaua

SEQ ID NO: 760719 - RNA, 24 nt, Human
uuucaccauguugaucaggcuggu

SEQ ID NO: 760720 - RNA, 20 nt, Human
uuugcuguaacuaaaauugc

SEQ ID NO: 760721 - RNA, 18 nt, Human
uuuguagagauggggucu

SEQ ID NO: 760722 - RNA, 24 nt, Human
uuuguagagauggggucuccuuau

SEQ ID NO: 760723 - RNA, 19 nt, Human
uuuuuuguagagauggggu

SEQ ID NO: 760724 - RNA, 22 nt, Human
aagacacuaguacuuguccagc

SEQ ID NO: 760725 - RNA, 21 nt, Human
aaguacauaaucugacauaau

SEQ ID NO: 760726 - RNA, 23 nt, Human
acagcagguguaauagcugauuu

SEQ ID NO: 760727 - RNA, 20 nt, Human
acugguuguugccaggaaaa

SEQ ID NO: 760728 - RNA, 23 nt, Human
agccacuccaggguccagagccg

SEQ ID NO: 760729 - RNA, 23 nt, Human
aggcaaccaguuugaaaaucagg

SEQ ID NO: 760730 - RNA, 22 nt, Human
caguggauuuucugcuuagcuu

SEQ ID NO: 760731 - RNA, 20 nt, Human
ccugcagccacuccaggguc

SEQ ID NO: 760732 - RNA, 19 nt, Human
cgcggugguggccguggcc

SEQ ID NO: 760733 - RNA, 25 nt, Human
cuaaaucuccuauaauucucacggu

SEQ ID NO: 760734 - RNA, 24 nt, Human
cuagucauaaacagccuucaaaga

SEQ ID NO: 760735 - RNA, 25 nt, Human
cuagucauaaacagccuucaaagaa

SEQ ID NO: 760736 - RNA, 28 nt, Human
cucuuuccugcuauuguucgcuucagau

SEQ ID NO: 760737 - RNA, 25 nt, Human
gaagucuuaaaaaagaggcuuuguc

SEQ ID NO: 760738 - RNA, 21 nt, Human
gagaugaaagugguuuuucag

SEQ ID NO: 760739 - RNA, 25 nt, Human
gagccguagcacgcucggcagggaa

SEQ ID NO: 760740 - RNA, 22 nt, Human
gccguggccgcugccgccgccg

SEQ ID NO: 760741 - RNA, 18 nt, Human
gcggugguggccguggcc

SEQ ID NO: 760742 - RNA, 20 nt, Human
ggccguggccgcugccgccg

SEQ ID NO: 760743 - RNA, 26 nt, Human
ggucaauaaaaucuaccaucgaccac

SEQ ID NO: 760744 - RNA, 22 nt, Human
uaaaacuuucagaaugcagcau

SEQ ID NO: 760745 - RNA, 18 nt, Human
uacauuuguuguggccuc

SEQ ID NO: 760746 - RNA, 24 nt, Human
uagaggaauccaccuuuuagaggg

SEQ ID NO: 760747 - RNA, 24 nt, Human
uagcaaaaaagaugcaggcaacca

SEQ ID NO: 760748 - RNA, 23 nt, Human
uauagcaaaaaagaugcaggcaa

SEQ ID NO: 760749 - RNA, 21 nt, Human
ucagaaagccgaaacugguug

SEQ ID NO: 760750 - RNA, 19 nt, Human
uccacacaguuuggauaca

SEQ ID NO: 760751 - RNA, 26 nt, Human
uccauauagcaaaaaagaugcaggca

SEQ ID NO: 760752 - RNA, 18 nt, Human
ucggcagggaauuuuucu

SEQ ID NO: 760753 - RNA, 25 nt, Human
ucuaagacacuaguacuuguccagc

SEQ ID NO: 760754 - RNA, 18 nt, Human
ucuauggcaauacugguu

SEQ ID NO: 760755 - RNA, 22 nt, Human
ugaaaagaggcaguuucuaugg

SEQ ID NO: 760756 - RNA, 24 nt, Human
ugaaaagaggcaguuucuauggca

SEQ ID NO: 760757 - RNA, 21 nt, Human
ugaaaaucagggaaaguagaa

SEQ ID NO: 760758 - RNA, 18 nt, Human
ugauuuucacucuugucu

SEQ ID NO: 760759 - RNA, 18 nt, Human
ugcaaaaaugugccuucc

SEQ ID NO: 760760 - RNA, 25 nt, Human
ugcagugaugaggaaguguguguac

SEQ ID NO: 760761 - RNA, 22 nt, Human
ugccauuuuuaaaaauuaaaau

SEQ ID NO: 760762 - RNA, 23 nt, Human
uguaucaggcauccuaacuggcc

SEQ ID NO: 760763 - RNA, 24 nt, Human
uguaucaggcauccuaacuggcca

SEQ ID NO: 760764 - RNA, 22 nt, Human
uguuguggccucuggacaucua

SEQ ID NO: 760765 - RNA, 20 nt, Human
uuagaggguuaagggguuag

SEQ ID NO: 760766 - RNA, 20 nt, Human
aaaaggacauuccagauaua

SEQ ID NO: 760767 - RNA, 25 nt, Human
aaacaaauaaaaaccauguauccaa

SEQ ID NO: 760768 - RNA, 23 nt, Human
aaaccauguauccaagacuuagg

SEQ ID NO: 760769 - RNA, 25 nt, Human
aaagaacaucauggaaaauuuuaaa

SEQ ID NO: 760770 - RNA, 24 nt, Human
aaagagcgagacuccgucucaaaa

SEQ ID NO: 760771 - RNA, 19 nt, Human
aaagugcugggacuacagg

SEQ ID NO: 760772 - RNA, 24 nt, Human
aaagugcugggacuacaggcacga

SEQ ID NO: 760773 - RNA, 25 nt, Human
aaauaaaaaccauguauccaagacu

SEQ ID NO: 760774 - RNA, 19 nt, Human
aacauggugaaaccccauc

SEQ ID NO: 760775 - RNA, 20 nt, Human
aacauggugaaaccccaucu

SEQ ID NO: 760776 - RNA, 21 nt, Human
aacauggugaaaccccaucuc

SEQ ID NO: 760777 - RNA, 21 nt, Human
aacauggugaaaccccaucuc

SEQ ID NO: 760778 - RNA, 23 nt, Human
aacccacccuccacgcuucccug

SEQ ID NO: 760779 - RNA, 20 nt, Human
aaccucugccucccgggccc

SEQ ID NO: 760780 - RNA, 23 nt, Human
aaccuguacagagaaucaugccu

SEQ ID NO: 760781 - RNA, 19 nt, Human
aacuuguuauucauccuca

SEQ ID NO: 760782 - RNA, 19 nt, Human
aagugcugggacuacaggc

SEQ ID NO: 760783 - RNA, 26 nt, Human
aagugcugggacuacaggcacgagcc

SEQ ID NO: 760784 - RNA, 24 nt, Human
aauggcuugaacccgggaggcaga

SEQ ID NO: 760785 - RNA, 23 nt, Human
acaaaacaaauaaaaaccaugua

SEQ ID NO: 760786 - RNA, 23 nt, Human
accacaggccgcacccacgaacc

SEQ ID NO: 760787 - RNA, 18 nt, Human
accacgccuggcuaauuu

SEQ ID NO: 760788 - RNA, 18 nt, Human
accaugauggucaggcug

SEQ ID NO: 760789 - RNA, 20 nt, Human
accuaggaguuccaccuuau

SEQ ID NO: 760790 - RNA, 30 nt, Human
accuaggaguuccaccuuauuucuuaaaaa

SEQ ID NO: 760791 - RNA, 23 nt, Human
accucaugaucugcccaccggcc

SEQ ID NO: 760792 - RNA, 28 nt, Human
acuccgucucaaaaaaaaaaaaaaaaaa

SEQ ID NO: 760793 - RNA, 22 nt, Human
acucgauuggaacccacccucc

SEQ ID NO: 760794 - RNA, 18 nt, Human
acugcacgccagccuggg

SEQ ID NO: 760795 - RNA, 24 nt, Human
acugugccacugcacgccagccug

SEQ ID NO: 760796 - RNA, 25 nt, Human
acuucccucuugggccuuuucgcua

SEQ ID NO: 760797 - RNA, 22 nt, Human
agaaugaagugguucccuagcc

SEQ ID NO: 760798 - RNA, 24 nt, Human
agagcuugcagugagccgagacug

SEQ ID NO: 760799 - RNA, 21 nt, Human
agccgagacugugccacugca

SEQ ID NO: 760800 - RNA, 21 nt, Human
agccgggcaugguggcucacg

SEQ ID NO: 760801 - RNA, 22 nt, Human
agccuggccaacauggugaaac

SEQ ID NO: 760802 - RNA, 24 nt, Human
agccuggccaacauggugaaaccc

SEQ ID NO: 760803 - RNA, 24 nt, Human
agccugggcgaaagagcgagacuc

SEQ ID NO: 760804 - RNA, 18 nt, Human
aggaaaugcagacuaaau

SEQ ID NO: 760805 - RNA, 21 nt, Human
aggcacgagccaccgggccca

SEQ ID NO: 760806 - RNA, 21 nt, Human
aggcagagcuugcagugagcc

SEQ ID NO: 760807 - RNA, 24 nt, Human
aggcagagcuugcagugagccgag

SEQ ID NO: 760808 - RNA, 18 nt, Human
aggcagguggaucaccug

SEQ ID NO: 760809 - RNA, 22 nt, Human
aggcagguggaucaccugaggu

SEQ ID NO: 760810 - RNA, 26 nt, Human
aggcagguggaucaccugaggucagg

SEQ ID NO: 760811 - RNA, 21 nt, Human
aggccgaggcagguggaucac

SEQ ID NO: 760812 - RNA, 18 nt, Human
agggaggagaauggcuug

SEQ ID NO: 760813 - RNA, 24 nt, Human
agggaggagaauggcuugaacccg

SEQ ID NO: 760814 - RNA, 22 nt, Human
agguggaucaccugaggucagg

SEQ ID NO: 760815 - RNA, 25 nt, Human
aguagcugggauuacaggcgcaugu

SEQ ID NO: 760816 - RNA, 20 nt, Human
agugcaauggcgugaucucg

SEQ ID NO: 760817 - RNA, 24 nt, Human
agugcaauggcgugaucucggcuc

SEQ ID NO: 760818 - RNA, 27 nt, Human
auaaaaaccauguauccaagacuuagg

SEQ ID NO: 760819 - RNA, 22 nt, Human
auaaagaagaacuuuaccuccu

SEQ ID NO: 760820 - RNA, 23 nt, Human
auaauagguaagaucaaaagcuu

SEQ ID NO: 760821 - RNA, 19 nt, Human
aucucuucuuuuacauguu

SEQ ID NO: 760822 - RNA, 24 nt, Human
augagguuucaccaugauggucag

SEQ ID NO: 760823 - RNA, 22 nt, Human
caaaaacaaaacaaauaaaaac

SEQ ID NO: 760824 - RNA, 19 nt, Human
caaaaaccuuuccucuaga

SEQ ID NO: 760825 - RNA, 23 nt, Human
caaagugcugggacuacaggcac

SEQ ID NO: 760826 - RNA, 24 nt, Human
caaagugcugggacuacaggcacg

SEQ ID NO: 760827 - RNA, 19 nt, Human
caacauaaaauucgcaaag

SEQ ID NO: 760828 - RNA, 18 nt, Human
caacauggugaaacccca

SEQ ID NO: 760829 - RNA, 23 nt, Human
caaccucugccucccgggcccaa

SEQ ID NO: 760830 - RNA, 24 nt, Human
caaccucugccucccgggcccaag

SEQ ID NO: 760831 - RNA, 22 nt, Human
caagugauucuccugucucagc

SEQ ID NO: 760832 - RNA, 21 nt, Human
cacaguuacuaccgcccgggc

SEQ ID NO: 760833 - RNA, 21 nt, Human
caccaugauggucaggcuggu

SEQ ID NO: 760834 - RNA, 24 nt, Human
caccaugauggucaggcuggucuc

SEQ ID NO: 760835 - RNA, 21 nt, Human
cacccacgaaccugguccggc

SEQ ID NO: 760836 - RNA, 23 nt, Human
cacgccagccugggcgaaagagc

SEQ ID NO: 760837 - RNA, 24 nt, Human
cacgccugcaaucccagcaccuug

SEQ ID NO: 760838 - RNA, 23 nt, Human
cacuauaaaguucacaaccuuca

SEQ ID NO: 760839 - RNA, 21 nt, Human
cacugcaaccucugccucccg

SEQ ID NO: 760840 - RNA, 23 nt, Human
cacugcaaccucugccucccggg

SEQ ID NO: 760841 - RNA, 20 nt, Human
cacugcacgccagccugggc

SEQ ID NO: 760842 - RNA, 23 nt, Human
cacugcacgccagccugggcgaa

SEQ ID NO: 760843 - RNA, 24 nt, Human
cagcaccuugggaggccgaggcag

SEQ ID NO: 760844 - RNA, 25 nt, Human
cagcaccuugggaggccgaggcagg

SEQ ID NO: 760845 - RNA, 23 nt, Human
cagcagcgauucguuucuccuuc

SEQ ID NO: 760846 - RNA, 26 nt, Human
caggaaccuuuucuccaccuuggccc

SEQ ID NO: 760847 - RNA, 24 nt, Human
caggacaccccaggcuuuucuuga

SEQ ID NO: 760848 - RNA, 24 nt, Human
cagguggaucaccugaggucagga

SEQ ID NO: 760849 - RNA, 19 nt, Human
ccaaagugcugggacuaca

SEQ ID NO: 760850 - RNA, 22 nt, Human
ccaccgggcccagccagaaauu

SEQ ID NO: 760851 - RNA, 21 nt, Human
ccacugcacgccagccugggc

SEQ ID NO: 760852 - RNA, 21 nt, Human
ccacugcacgccagccugggc

SEQ ID NO: 760853 - RNA, 24 nt, Human
cccaaagugcugggacuacaggca

SEQ ID NO: 760854 - RNA, 23 nt, Human
cccaacuaaccgccaccucugac

SEQ ID NO: 760855 - RNA, 19 nt, Human
cccacgaaccugguccggc

SEQ ID NO: 760856 - RNA, 21 nt, Human
cccaggcuggagugcaauggc

SEQ ID NO: 760857 - RNA, 21 nt, Human
cccaucuccacuaaaaauaca

SEQ ID NO: 760858 - RNA, 23 nt, Human
cccgaguagcugggauuacaggc

SEQ ID NO: 760859 - RNA, 24 nt, Human
cccgaguagcugggauuacaggcg

SEQ ID NO: 760860 - RNA, 23 nt, Human
cccgggcccaagugauucuccuc

SEQ ID NO: 760861 - RNA, 22 nt, Human
cccucagaaaagcagcggccac

SEQ ID NO: 760862 - RNA, 22 nt, Human
ccgaguagcugggauuacaggc

SEQ ID NO: 760863 - RNA, 18 nt, Human
ccgcccgggccuccaggc

SEQ ID NO: 760864 - RNA, 19 nt, Human
ccuacaggaaaugcagacu

SEQ ID NO: 760865 - RNA, 19 nt, Human
ccuccacgcuucccuggcc

SEQ ID NO: 760866 - RNA, 24 nt, Human
ccucccgggcccaagugauucucc

SEQ ID NO: 760867 - RNA, 20 nt, Human
ccugaaauacaguuccuaca

SEQ ID NO: 760868 - RNA, 21 nt, Human
ccugaggucaggaguugagac

SEQ ID NO: 760869 - RNA, 22 nt, Human
ccugcaaucccagcaccuuggg

SEQ ID NO: 760870 - RNA, 23 nt, Human
ccuggccaacauggugaaacccc

SEQ ID NO: 760871 - RNA, 24 nt, Human
ccuggccaacauggugaaacccca

SEQ ID NO: 760872 - RNA, 22 nt, Human
ccuggccccaacuaaccgccac

SEQ ID NO: 760873 - RNA, 22 nt, Human
ccugggcgaaagagcgagacuc

SEQ ID NO: 760874 - RNA, 19 nt, Human
ccuguaaucccagccacuc

SEQ ID NO: 760875 - RNA, 24 nt, Human
cgaggcagguggaucaccugaggu

SEQ ID NO: 760876 - RNA, 26 nt, Human
cgaggcagguggaucaccugagguca

SEQ ID NO: 760877 - RNA, 22 nt, Human
cgcccgggccuccaggccucag

SEQ ID NO: 760878 - RNA, 21 nt, Human
cgccugcaaucccagcaccuu

SEQ ID NO: 760879 - RNA, 23 nt, Human
cgccugcaaucccagcaccuugg

SEQ ID NO: 760880 - RNA, 23 nt, Human
cgccuguaaucccagccacucgg

SEQ ID NO: 760881 - RNA, 23 nt, Human
cuaaauaaaauguggaccuacau

SEQ ID NO: 760882 - RNA, 20 nt, Human
cuaccgcccgggccuccagg

SEQ ID NO: 760883 - RNA, 22 nt, Human
cucaagcgccuucucuggaaac

SEQ ID NO: 760884 - RNA, 23 nt, Human
cucacgccugcaaucccagcacc

SEQ ID NO: 760885 - RNA, 24 nt, Human
cucacgccugcaaucccagcaccu

SEQ ID NO: 760886 - RNA, 24 nt, Human
cucacugcaaccucugccucccgg

SEQ ID NO: 760887 - RNA, 23 nt, Human
cucagcugcccgaguagcuggga

SEQ ID NO: 760888 - RNA, 23 nt, Human
cuccacgcuucccuggccccaac

SEQ ID NO: 760889 - RNA, 22 nt, Human
cuccaggccucagggcugcaga

SEQ ID NO: 760890 - RNA, 20 nt, Human
cucccgggcccaagugauuc

SEQ ID NO: 760891 - RNA, 19 nt, Human
cuccgucucaaaaaaaaaa

SEQ ID NO: 760892 - RNA, 20 nt, Human
cuccugaccucaugaucugc

SEQ ID NO: 760893 - RNA, 20 nt, Human
cucuuguugcccaggcugga

SEQ ID NO: 760894 - RNA, 22 nt, Human
cugcaaccucugccucccgggc

SEQ ID NO: 760895 - RNA, 23 nt, Human
cugcaaccucugccucccgggcc

SEQ ID NO: 760896 - RNA, 19 nt, Human
cugcaccacaggccgcacc

SEQ ID NO: 760897 - RNA, 24 nt, Human
cugcccaccggccucccaaagugc

SEQ ID NO: 760898 - RNA, 23 nt, Human
cuggccaacauggugaaacccca

SEQ ID NO: 760899 - RNA, 23 nt, Human
cugucucagcugcccgaguagcu

SEQ ID NO: 760900 - RNA, 24 nt, Human
cuugcagugagccgagacugugcc

SEQ ID NO: 760901 - RNA, 25 nt, Human
cuuggcccggccugcaaaaccuggc

SEQ ID NO: 760902 - RNA, 24 nt, Human
cuuguugcccaggcuggagugcaa

SEQ ID NO: 760903 - RNA, 20 nt, Human
gaacccgggaggcagagcuu

SEQ ID NO: 760904 - RNA, 19 nt, Human
gaaguugagaugaugagug

SEQ ID NO: 760905 - RNA, 23 nt, Human
gagaccagccuggccaacauggu

SEQ ID NO: 760906 - RNA, 19 nt, Human
gagcgagacuccgucucaa

SEQ ID NO: 760907 - RNA, 18 nt, Human
gagcuugcagugagccga

SEQ ID NO: 760908 - RNA, 19 nt, Human
gaggcagguggaucaccug

SEQ ID NO: 760909 - RNA, 19 nt, Human
gagggaaccggcuuuuaga

SEQ ID NO: 760910 - RNA, 18 nt, Human
gagguuucaccaugaugg

SEQ ID NO: 760911 - RNA, 22 nt, Human
gagguuucaccaugauggucag

SEQ ID NO: 760912 - RNA, 22 nt, Human
gaguagcugggauuacaggcgc

SEQ ID NO: 760913 - RNA, 21 nt, Human
gaucaccugaggucaggaguu

SEQ ID NO: 760914 - RNA, 23 nt, Human
gaucaccugaggucaggaguuga

SEQ ID NO: 760915 - RNA, 24 nt, Human
gaucaccugaggucaggaguugag

SEQ ID NO: 760916 - RNA, 24 nt, Human
gcacccacgaaccugguccggcac

SEQ ID NO: 760917 - RNA, 22 nt, Human
gcagcagcgauucguuucuccu

SEQ ID NO: 760918 - RNA, 24 nt, Human
gccaacauggugaaaccccaucuc

SEQ ID NO: 760919 - RNA, 24 nt, Human
gccacugcacgccagccugggcga

SEQ ID NO: 760920 - RNA, 24 nt, Human
gcccgaguagcugggauuacaggc

SEQ ID NO: 760921 - RNA, 26 nt, Human
gccgcacccacgaaccugguccggca

SEQ ID NO: 760922 - RNA, 21 nt, Human
gcucuuguugcccaggcugga

SEQ ID NO: 760923 - RNA, 24 nt, Human
gcucuuguugcccaggcuggagug

SEQ ID NO: 760924 - RNA, 19 nt, Human
gcuggagugcaauggcgug

SEQ ID NO: 760925 - RNA, 23 nt, Human
gcuggucucaaacuccugaccuc

SEQ ID NO: 760926 - RNA, 21 nt, Human
ggacuacaggcacgagccacc

SEQ ID NO: 760927 - RNA, 22 nt, Human
ggacuacaggcacgagccaccg

SEQ ID NO: 760928 - RNA, 22 nt, Human
ggaguuccaccuuauuucuuaa

SEQ ID NO: 760929 - RNA, 22 nt, Human
ggcuggagugcaauggcgugau

SEQ ID NO: 760930 - RNA, 24 nt, Human
ggcuggucucaaacuccugaccuc

SEQ ID NO: 760931 - RNA, 24 nt, Human
gggcaugguggcucacgccugcaa

SEQ ID NO: 760932 - RNA, 19 nt, Human
gggcccaagugauucuccu

SEQ ID NO: 760933 - RNA, 24 nt, Human
gguggcgggcgccuguaaucccag

SEQ ID NO: 760934 - RNA, 24 nt, Human
gguggcucacgccugcaaucccag

SEQ ID NO: 760935 - RNA, 23 nt, Human
gguucaauauuuuuggcaagaug

SEQ ID NO: 760936 - RNA, 20 nt, Human
guagaauagcaaaaacaaaa

SEQ ID NO: 760937 - RNA, 22 nt, Human
gucaauauuccauucucccaau

SEQ ID NO: 760938 - RNA, 19 nt, Human
gugaaguugagaugaugag

SEQ ID NO: 760939 - RNA, 23 nt, Human
gugaaguugagaugaugaguggg

SEQ ID NO: 760940 - RNA, 23 nt, Human
guggcgggcgccuguaaucccag

SEQ ID NO: 760941 - RNA, 23 nt, Human
uaaaguucacaaccuucacugaa

SEQ ID NO: 760942 - RNA, 20 nt, Human
uaaaguucuuuucuaggaug

SEQ ID NO: 760943 - RNA, 25 nt, Human
uaaauacacaaaaguagaauagcaa

SEQ ID NO: 760944 - RNA, 24 nt, Human
uaauuuuugcauuuuuagcggaga

SEQ ID NO: 760945 - RNA, 19 nt, Human
uaccuaggaguuccaccuu

SEQ ID NO: 760946 - RNA, 21 nt, Human
uagaauagcaaaaacaaaaca

SEQ ID NO: 760947 - RNA, 23 nt, Human
uagaauagcaaaaacaaaacaaa

SEQ ID NO: 760948 - RNA, 20 nt, Human
uagaauguacuuccuaugcu

SEQ ID NO: 760949 - RNA, 21 nt, Human
uagcaaaaacaaaacaaauaa

SEQ ID NO: 760950 - RNA, 24 nt, Human
uagcggagaugagguuucaccaug

SEQ ID NO: 760951 - RNA, 21 nt, Human
ucaaaaaaaaaaaaaaaaaaa

SEQ ID NO: 760952 - RNA, 23 nt, Human
ucaaaagcuuuuccacauucagu

SEQ ID NO: 760953 - RNA, 24 nt, Human
ucacacauaacaaaguuucuuaau

SEQ ID NO: 760954 - RNA, 23 nt, Human
ucacugcaaccucugccucccgg

SEQ ID NO: 760955 - RNA, 24 nt, Human
ucacugcaaccucugccucccggg

SEQ ID NO: 760956 - RNA, 20 nt, Human
ucagaaaagcagcggccaca

SEQ ID NO: 760957 - RNA, 22 nt, Human
ucagaaaagcagcggccacagu

SEQ ID NO: 760958 - RNA, 18 nt, Human
ucagaagcaggguccaca

SEQ ID NO: 760959 - RNA, 24 nt, Human
uccacagacaccagagagggaacc

SEQ ID NO: 760960 - RNA, 21 nt, Human
uccacaggaaccuuuucucca

SEQ ID NO: 760961 - RNA, 22 nt, Human
uccacauucaguccuguaauaa

SEQ ID NO: 760962 - RNA, 23 nt, Human
uccaggccucagggcugcagaag

SEQ ID NO: 760963 - RNA, 20 nt, Human
uccauuauuucauuaugugu

SEQ ID NO: 760964 - RNA, 24 nt, Human
ucccaaagugcugggacuacaggc

SEQ ID NO: 760965 - RNA, 21 nt, Human
ucccgggcccaagugauucuc

SEQ ID NO: 760966 - RNA, 24 nt, Human
ucccgggcccaagugauucuccug

SEQ ID NO: 760967 - RNA, 25 nt, Human
ucccuggccccaacuaaccgccacc

SEQ ID NO: 760968 - RNA, 23 nt, Human
uccgucucaaaaaaaaaaaaaaa

SEQ ID NO: 760969 - RNA, 19 nt, Human
uccuuaacuucugguugcc

SEQ ID NO: 760970 - RNA, 24 nt, Human
ucuccaacugcaccacaggccgcu

SEQ ID NO: 760971 - RNA, 22 nt, Human
ucucuaaacugggaguuggcuc

SEQ ID NO: 760972 - RNA, 24 nt, Human
ucuuaaaaugccauuuuauugguu

SEQ ID NO: 760973 - RNA, 22 nt, Human
ucuuguugcccaggcuggagug

SEQ ID NO: 760974 - RNA, 19 nt, Human
ugaaaccccaucuccacua

SEQ ID NO: 760975 - RNA, 22 nt, Human
ugaaaccccaucuccacuaaaa

SEQ ID NO: 760976 - RNA, 19 nt, Human
ugaaaggcuucuauauguu

SEQ ID NO: 760977 - RNA, 22 nt, Human
ugaagugagagccgggcauggu

SEQ ID NO: 760978 - RNA, 22 nt, Human
ugaauuuccuaaaguuuaacau

SEQ ID NO: 760979 - RNA, 23 nt, Human
ugagaccagccuggccaacaugg

SEQ ID NO: 760980 - RNA, 22 nt, Human
ugagccgagacugugccacugc

SEQ ID NO: 760981 - RNA, 24 nt, Human
ugagggaggagaauggcuugaacc

SEQ ID NO: 760982 - RNA, 24 nt, Human
ugagguuucaccaugauggucagg

SEQ ID NO: 760983 - RNA, 22 nt, Human
ugaucugcccaccggccuccca

SEQ ID NO: 760984 - RNA, 18 nt, Human
ugcccaggcuggagugca

SEQ ID NO: 760985 - RNA, 21 nt, Human
ugcccaggcuggagugcaaug

SEQ ID NO: 760986 - RNA, 21 nt, Human
ugcccaggcuggagugcaaug

SEQ ID NO: 760987 - RNA, 24 nt, Human
ugcccaggcuggagugcaauggcg

SEQ ID NO: 760988 - RNA, 24 nt, Human
ugcucuuguugcccaggcuggagu

SEQ ID NO: 760989 - RNA, 19 nt, Human
ugcugggacuacaggcacg

SEQ ID NO: 760990 - RNA, 24 nt, Human
ugcugggacuacaggcacgagcca

SEQ ID NO: 760991 - RNA, 19 nt, Human
uggagugcaauggcgugau

SEQ ID NO: 760992 - RNA, 23 nt, Human
uggagugcaauggcgugaucucg

SEQ ID NO: 760993 - RNA, 24 nt, Human
uggagugcaauggcgugaucucgg

SEQ ID NO: 760994 - RNA, 23 nt, Human
uggaucaccugaggucaggaguu

SEQ ID NO: 760995 - RNA, 26 nt, Human
uggaucaccugaggucaggaguugag

SEQ ID NO: 760996 - RNA, 20 nt, Human
uggcaacauccacaaguuuu

SEQ ID NO: 760997 - RNA, 23 nt, Human
uggcaacauccacaaguuuuaau

SEQ ID NO: 760998 - RNA, 24 nt, Human
uggcagggcuggggaagcaggcag

SEQ ID NO: 760999 - RNA, 24 nt, Human
uggccaacauggugaaaccccauc

SEQ ID NO: 761000 - RNA, 23 nt, Human
uggcccggccugcaaaaccuggc

SEQ ID NO: 761001 - RNA, 22 nt, Human
uggcgggcgccuguaaucccag

SEQ ID NO: 761002 - RNA, 20 nt, Human
uggcgugaucucggcucacu

SEQ ID NO: 761003 - RNA, 22 nt, Human
uggcucacgccugcaaucccag

SEQ ID NO: 761004 - RNA, 24 nt, Human
uggcucacgccugcaaucccagca

SEQ ID NO: 761005 - RNA, 20 nt, Human
uggcuugaacccgggaggca

SEQ ID NO: 761006 - RNA, 21 nt, Human
ugggacuacaggcacgagcca

SEQ ID NO: 761007 - RNA, 22 nt, Human
ugggacuacaggcacgagccac

SEQ ID NO: 761008 - RNA, 23 nt, Human
ugggacuacaggcacgagccacc

SEQ ID NO: 761009 - RNA, 24 nt, Human
ugggacuacaggcacgagccaccg

SEQ ID NO: 761010 - RNA, 26 nt, Human
ugggacuacaggcacgagccaccggg

SEQ ID NO: 761011 - RNA, 24 nt, Human
ugggaggccgaggcagguggauca

SEQ ID NO: 761012 - RNA, 19 nt, Human
ugggauuacaggcgcauca

SEQ ID NO: 761013 - RNA, 24 nt, Human
ugggauuacaggcgcaugugacca

SEQ ID NO: 761014 - RNA, 24 nt, Human
uggucaggcuggucucaaacuccu

SEQ ID NO: 761015 - RNA, 24 nt, Human
ugguggcgggcgccuguaauccca

SEQ ID NO: 761016 - RNA, 24 nt, Human
ugguggcucacgccugcaauccca

SEQ ID NO: 761017 - RNA, 21 nt, Human
uggugucaaccuguacagaga

SEQ ID NO: 761018 - RNA, 24 nt, Human
uggugugguggcgggcgccuguaa

SEQ ID NO: 761019 - RNA, 23 nt, Human
uguaauaaaguucuuuucuagga

SEQ ID NO: 761020 - RNA, 19 nt, Human
ugugguggcgggcgccugu

SEQ ID NO: 761021 - RNA, 24 nt, Human
uguguauaucuuacuguagcacau

SEQ ID NO: 761022 - RNA, 20 nt, Human
uguugcccaggcuggagugc

SEQ ID NO: 761023 - RNA, 24 nt, Human
uuaaacuggcuauaauuucaugga

SEQ ID NO: 761024 - RNA, 23 nt, Human
uuaccuccuuaacuucugguugc

SEQ ID NO: 761025 - RNA, 24 nt, Human
uuagcggagaugagguuucaccau

SEQ ID NO: 761026 - RNA, 21 nt, Human
uucagaagcaggguccacaga

SEQ ID NO: 761027 - RNA, 23 nt, Human
uucaggacaccccaggcuuuucu

SEQ ID NO: 761028 - RNA, 23 nt, Human
uuccaaucccaauguguagagcu

SEQ ID NO: 761029 - RNA, 22 nt, Human
uucccacauuuagcaguaguaa

SEQ ID NO: 761030 - RNA, 18 nt, Human
uugcagugagccgagacu

SEQ ID NO: 761031 - RNA, 19 nt, Human
uugcagugagccgagacug

SEQ ID NO: 761032 - RNA, 22 nt, Human
uugcagugagccgagacugugc

SEQ ID NO: 761033 - RNA, 18 nt, Human
uugcccaggcuggagugc

SEQ ID NO: 761034 - RNA, 18 nt, Human
uugcuccuuuuuguguca

SEQ ID NO: 761035 - RNA, 23 nt, Human
uugcucuuguugcccaggcugga

SEQ ID NO: 761036 - RNA, 25 nt, Human
uugggaggccgaggcagguggauca

SEQ ID NO: 761037 - RNA, 18 nt, Human
uuuaaacauaugaaguga

SEQ ID NO: 761038 - RNA, 19 nt, Human
uuuacauaaccacaaugcu

SEQ ID NO: 761039 - RNA, 21 nt, Human
uuucaccaugauggucaggcu

SEQ ID NO: 761040 - RNA, 20 nt, Human
uuugacugaugucucaaguc

SEQ ID NO: 761041 - RNA, 24 nt, Human
uuugcucuuguugcccaggcugga

SEQ ID NO: 761042 - RNA, 24 nt, Human
uuuuacaaaaaaacaccauuugaa

SEQ ID NO: 761043 - RNA, 24 nt, Human
uuuugcucuuguugcccaggcugg

SEQ ID NO: 761044 - RNA, 24 nt, Human
uuuuuagcggagaugagguuucac

SEQ ID NO: 761045 - RNA, 22 nt, Human
uuuuuuucuuugagauagaguu

SEQ ID NO: 761046 - RNA, 22 nt, Human
aacuugcuauaaauacauagaa

SEQ ID NO: 761047 - RNA, 22 nt, Human
acauagaaaccgcaggcgccac

SEQ ID NO: 761048 - RNA, 21 nt, Human
acccggagccccuuccuacuu

SEQ ID NO: 761049 - RNA, 23 nt, Human
agcaguggucaggggaccuuggc

SEQ ID NO: 761050 - RNA, 18 nt, Human
agggcccugccacgcccc

SEQ ID NO: 761051 - RNA, 21 nt, Human
agggcuccucugagcaguggu

SEQ ID NO: 761052 - RNA, 23 nt, Human
agugggccccgccagggcugacc

SEQ ID NO: 761053 - RNA, 19 nt, Human
caaggguuugggcccacug

SEQ ID NO: 761054 - RNA, 21 nt, Human
cacccugccagcuccgcggcc

SEQ ID NO: 761055 - RNA, 24 nt, Human
caccugggguuuccugaguuucua

SEQ ID NO: 761056 - RNA, 19 nt, Human
cagagcagccacccggagc

SEQ ID NO: 761057 - RNA, 19 nt, Human
caggacccggggccgccgg

SEQ ID NO: 761058 - RNA, 22 nt, Human
caggcgccacccugccagcucc

SEQ ID NO: 761059 - RNA, 23 nt, Human
ccacgccccggcccccagcuguc

SEQ ID NO: 761060 - RNA, 21 nt, Human
ccagucccagagcagccaccc

SEQ ID NO: 761061 - RNA, 18 nt, Human
ccccacggagcccccgag

SEQ ID NO: 761062 - RNA, 26 nt, Human
ccccacggagcccccgagacgcgggg

SEQ ID NO: 761063 - RNA, 23 nt, Human
cccgguuucacggauuucaaggg

SEQ ID NO: 761064 - RNA, 20 nt, Human
ccgcaggcgccacccugccg

SEQ ID NO: 761065 - RNA, 26 nt, Human
ccggagccccuuccuacuuaggaaag

SEQ ID NO: 761066 - RNA, 18 nt, Human
ccucgcagcugccgccgc

SEQ ID NO: 761067 - RNA, 19 nt, Human
ccucgcagcugccgccgcu

SEQ ID NO: 761068 - RNA, 20 nt, Human
ccuuggcccugcuccccacc

SEQ ID NO: 761069 - RNA, 18 nt, Human
ccuuuacauauguacauc

SEQ ID NO: 761070 - RNA, 24 nt, Human
cgccuguuucuccgagccucgcag

SEQ ID NO: 761071 - RNA, 26 nt, Human
cggagcccccgagacgcggggcccug

SEQ ID NO: 761072 - RNA, 20 nt, Human
cggccuggggccugggagag

SEQ ID NO: 761073 - RNA, 21 nt, Human
cggccuggggccugggagagg

SEQ ID NO: 761074 - RNA, 20 nt, Human
cggcgccuguuucuccgagc

SEQ ID NO: 761075 - RNA, 21 nt, Human
cgugguggcggcgguggcggc

SEQ ID NO: 761076 - RNA, 20 nt, Human
cugcggccagggccuagggc

SEQ ID NO: 761077 - RNA, 22 nt, Human
cugggguuuccugaguuucuag

SEQ ID NO: 761078 - RNA, 21 nt, Human
gagcaccugggguuuccugag

SEQ ID NO: 761079 - RNA, 25 nt, Human
gagcccgcggcgccuguuucuccga

SEQ ID NO: 761080 - RNA, 21 nt, Human
gccuagggcuccucugagcag

SEQ ID NO: 761081 - RNA, 21 nt, Human
gcgcggagcccgcggcgccug

SEQ ID NO: 761082 - RNA, 18 nt, Human
gcggcaggcggggugggg

SEQ ID NO: 761083 - RNA, 20 nt, Human
ggacuccaggacccggggcc

SEQ ID NO: 761084 - RNA, 21 nt, Human
ggaggagaggcacagagaggg

SEQ ID NO: 761085 - RNA, 21 nt, Human
ggccagggccuagggcuccuc

SEQ ID NO: 761086 - RNA, 18 nt, Human
ggcccugagcaccugggg

SEQ ID NO: 761087 - RNA, 23 nt, Human
ggcgggacuccaggacccggggc

SEQ ID NO: 761088 - RNA, 22 nt, Human
gggcagcaggcggcgggacucc

SEQ ID NO: 761089 - RNA, 19 nt, Human
gggcugggggagggagaau

SEQ ID NO: 761090 - RNA, 19 nt, Human
ggggucagggaagggcugg

SEQ ID NO: 761091 - RNA, 20 nt, Human
ggggucagggaagggcuggg

SEQ ID NO: 761092 - RNA, 18 nt, Human
guccggccgggcgcggag

SEQ ID NO: 761093 - RNA, 23 nt, Human
guggcggcgguggcggcagcauc

SEQ ID NO: 761094 - RNA, 24 nt, Human
gugggccccgccagggcugaccag

SEQ ID NO: 761095 - RNA, 25 nt, Human
gugguggcggcgguggcggcagcaa

SEQ ID NO: 761096 - RNA, 22 nt, Human
uaacuuaggggucagggaaggg

SEQ ID NO: 761097 - RNA, 20 nt, Human
uaggggucagggaagggcug

SEQ ID NO: 761098 - RNA, 20 nt, Human
ucacuuccggguuucgggcc

SEQ ID NO: 761099 - RNA, 23 nt, Human
ucagaacuugcuauaaauacaua

SEQ ID NO: 761100 - RNA, 21 nt, Human
ucagggaagggcugggggagg

SEQ ID NO: 761101 - RNA, 22 nt, Human
ucccagagcagccacccggagc

SEQ ID NO: 761102 - RNA, 23 nt, Human
ucccagagcagccacccggagcc

SEQ ID NO: 761103 - RNA, 22 nt, Human
uccgugguggcggcgguggcuu

SEQ ID NO: 761104 - RNA, 18 nt, Human
uccugaguuucuagcucu

SEQ ID NO: 761105 - RNA, 25 nt, Human
ucgcagcugccgccgcucacuuccg

SEQ ID NO: 761106 - RNA, 19 nt, Human
ucgcuccgugguggcggcg

SEQ ID NO: 761107 - RNA, 27 nt, Human
ucgcuccgugguggcggcgguggcggc

SEQ ID NO: 761108 - RNA, 20 nt, Human
ucggccgggcagcaggcggc

SEQ ID NO: 761109 - RNA, 22 nt, Human
ugaaggcacugcggccagggcc

SEQ ID NO: 761110 - RNA, 21 nt, Human
ugagcaccugggguuuccuga

SEQ ID NO: 761111 - RNA, 22 nt, Human
ugagugggccccgccagggcug

SEQ ID NO: 761112 - RNA, 23 nt, Human
ugcuccuaggggagaaacggucc

SEQ ID NO: 761113 - RNA, 20 nt, Human
uggcggcgguggcggcagca

SEQ ID NO: 761114 - RNA, 19 nt, Human
ugggagaggugagcgggca

SEQ ID NO: 761115 - RNA, 19 nt, Human
ugggggagggagaauugca

SEQ ID NO: 761116 - RNA, 24 nt, Human
ugggguccucggccgggcagcagg

SEQ ID NO: 761117 - RNA, 22 nt, Human
uguccugagugggccccgccag

SEQ ID NO: 761118 - RNA, 19 nt, Human
aaacucagaggcugggcag

SEQ ID NO: 761119 - RNA, 21 nt, Human
aaagagaaaaacauaagaaug

SEQ ID NO: 761120 - RNA, 20 nt, Human
aaauauaugcuauucacaca

SEQ ID NO: 761121 - RNA, 19 nt, Human
aaaucguuucuuuccuccu

SEQ ID NO: 761122 - RNA, 20 nt, Human
aacagaaaacucagaggcug

SEQ ID NO: 761123 - RNA, 19 nt, Human
aacaugccugugagguagg

SEQ ID NO: 761124 - RNA, 19 nt, Human
aacaugccugugagguagg

SEQ ID NO: 761125 - RNA, 19 nt, Human
aacgaguaaaaagaccgca

SEQ ID NO: 761126 - RNA, 24 nt, Human
aagagaaaaacauaagaaugaaaa

SEQ ID NO: 761127 - RNA, 21 nt, Human
aagccaaauugugagcccuug

SEQ ID NO: 761128 - RNA, 18 nt, Human
aaggaagaaggggcugga

SEQ ID NO: 761129 - RNA, 24 nt, Human
aaggucacagacggcggccaagcu

SEQ ID NO: 761130 - RNA, 22 nt, Human
aauaaaagggcaggagucugga

SEQ ID NO: 761131 - RNA, 25 nt, Human
aaucuucauaaccuaaagcugggag

SEQ ID NO: 761132 - RNA, 19 nt, Human
acacccgccuccugccagg

SEQ ID NO: 761133 - RNA, 22 nt, Human
acaggcacaggaaacacggcaa

SEQ ID NO: 761134 - RNA, 22 nt, Human
acauacagacaccgccgcccgc

SEQ ID NO: 761135 - RNA, 25 nt, Human
accgcagagagggcugagacccaga

SEQ ID NO: 761136 - RNA, 18 nt, Human
accgccgcccgccccucg

SEQ ID NO: 761137 - RNA, 20 nt, Human
accuaaagcugggagggacc

SEQ ID NO: 761138 - RNA, 24 nt, Human
agaauaaccauagcaaaaggucac

SEQ ID NO: 761139 - RNA, 19 nt, Human
agagagggcugagacccag

SEQ ID NO: 761140 - RNA, 19 nt, Human
agaggcugggcagaugggc

SEQ ID NO: 761141 - RNA, 20 nt, Human
agcagccccucagguacuga

SEQ ID NO: 761142 - RNA, 23 nt, Human
agcucaggagcgggcacuggacc

SEQ ID NO: 761143 - RNA, 22 nt, Human
aggaagcagcuugggacagggg

SEQ ID NO: 761144 - RNA, 23 nt, Human
aggcacacagaggucaagugacu

SEQ ID NO: 761145 - RNA, 24 nt, Human
aggccccaagguuccuggcagagg

SEQ ID NO: 761146 - RNA, 18 nt, Human
agggcuggcacacacauc

SEQ ID NO: 761147 - RNA, 20 nt, Human
aggugccccgagagccagcg

SEQ ID NO: 761148 - RNA, 23 nt, Human
aguaaaaucuucauaaccuaaag

SEQ ID NO: 761149 - RNA, 25 nt, Human
auagagcagccccucagguacugag

SEQ ID NO: 761150 - RNA, 22 nt, Human
auggcaggugcccaaggcugcc

SEQ ID NO: 761151 - RNA, 22 nt, Human
caaggccccaagguuccuggca

SEQ ID NO: 761152 - RNA, 24 nt, Human
caaggccccaagguuccuggcaga

SEQ ID NO: 761153 - RNA, 20 nt, Human
caagugacuugcccaagguc

SEQ ID NO: 761154 - RNA, 22 nt, Human
cacaacaugccugugagguagg

SEQ ID NO: 761155 - RNA, 18 nt, Human
cacagcauagagcagccc

SEQ ID NO: 761156 - RNA, 23 nt, Human
cacuggaccgagggcuggcacac

SEQ ID NO: 761157 - RNA, 22 nt, Human
cagacaccgccgcccgccccuc

SEQ ID NO: 761158 - RNA, 24 nt, Human
cagcaagaggaaaaaaaaaguuuu

SEQ ID NO: 761159 - RNA, 18 nt, Human
cagcauagagcagccccu

SEQ ID NO: 761160 - RNA, 20 nt, Human
caucuuguaaacaagcuagu

SEQ ID NO: 761161 - RNA, 23 nt, Human
cauggcaggugcccaaggcugcc

SEQ ID NO: 761162 - RNA, 20 nt, Human
cccccugcagcaagcgccag

SEQ ID NO: 761163 - RNA, 20 nt, Human
cccccugcagcaagcgccag

SEQ ID NO: 761164 - RNA, 21 nt, Human
ccccggcccccgccccggcuc

SEQ ID NO: 761165 - RNA, 24 nt, Human
ccccuaccccgcccugcaggcccc

SEQ ID NO: 761166 - RNA, 21 nt, Human
ccccugcagcaagcgccagcc

SEQ ID NO: 761167 - RNA, 20 nt, Human
ccccugcccuccccuacccc

SEQ ID NO: 761168 - RNA, 20 nt, Human
ccccuggaagccacucggga

SEQ ID NO: 761169 - RNA, 22 nt, Human
cccgccuccugccaggugcccc

SEQ ID NO: 761170 - RNA, 18 nt, Human
cccgcucugccguuccgc

SEQ ID NO: 761171 - RNA, 24 nt, Human
cccggcccccgccccggcuccggc

SEQ ID NO: 761172 - RNA, 19 nt, Human
cccugcaggcccgggccau

SEQ ID NO: 761173 - RNA, 28 nt, Human
cccugcccuccccuaccccgcccugcag

SEQ ID NO: 761174 - RNA, 24 nt, Human
ccgcagagagggcugagacccaga

SEQ ID NO: 761175 - RNA, 18 nt, Human
ccgccccggcuccggccc

SEQ ID NO: 761176 - RNA, 23 nt, Human
ccgccgcccgccccucgggcacc

SEQ ID NO: 761177 - RNA, 19 nt, Human
ccgcugcgccgccgccgcc

SEQ ID NO: 761178 - RNA, 22 nt, Human
ccgcugcgccgccgccgccucu

SEQ ID NO: 761179 - RNA, 25 nt, Human
ccguuccgcugcgccgccgccgccu

SEQ ID NO: 761180 - RNA, 24 nt, Human
ccuccugccaggugccccgagagc

SEQ ID NO: 761181 - RNA, 24 nt, Human
ccucgggcaccggacacaggcgcg

SEQ ID NO: 761182 - RNA, 19 nt, Human
ccugacacugcccagggcu

SEQ ID NO: 761183 - RNA, 19 nt, Human
ccuggggacgggggggggg

SEQ ID NO: 761184 - RNA, 21 nt, Human
cgcauacacagcauagagcag

SEQ ID NO: 761185 - RNA, 18 nt, Human
cggcggcggcgcugggug

SEQ ID NO: 761186 - RNA, 20 nt, Human
cggggcugagccccugcccu

SEQ ID NO: 761187 - RNA, 23 nt, Human
cgggggcaggagagagagaagga

SEQ ID NO: 761188 - RNA, 18 nt, Human
cgggugccugcgccgggc

SEQ ID NO: 761189 - RNA, 24 nt, Human
cuaggccccggcccccgccccggc

SEQ ID NO: 761190 - RNA, 20 nt, Human
cuauccaaccagggagcuac

SEQ ID NO: 761191 - RNA, 23 nt, Human
cucccgggcggcagcuccgaccc

SEQ ID NO: 761192 - RNA, 23 nt, Human
cucugaagggaaaagagaaaaac

SEQ ID NO: 761193 - RNA, 21 nt, Human
cugggagugggaugcgggggc

SEQ ID NO: 761194 - RNA, 22 nt, Human
cuuguacacacaccuagauaua

SEQ ID NO: 761195 - RNA, 18 nt, Human
gagccccugcccuccccu

SEQ ID NO: 761196 - RNA, 23 nt, Human
gagcggggauagcuggggaaagg

SEQ ID NO: 761197 - RNA, 19 nt, Human
gaguccugccugacacugc

SEQ ID NO: 761198 - RNA, 19 nt, Human
gaugggcccuuaggagugc

SEQ ID NO: 761199 - RNA, 18 nt, Human
gcagaggggaggcacggg

SEQ ID NO: 761200 - RNA, 25 nt, Human
gccccgagagccagcggcggcggcg

SEQ ID NO: 761201 - RNA, 22 nt, Human
gccgggcgccucggccgccucc

SEQ ID NO: 761202 - RNA, 22 nt, Human
gccuaggccccggcccccgccc

SEQ ID NO: 761203 - RNA, 20 nt, Human
gcggcggcgcugggugggca

SEQ ID NO: 761204 - RNA, 20 nt, Human
ggacacaggcgcggcugagg

SEQ ID NO: 761205 - RNA, 25 nt, Human
ggagagagagaaggauaauuggggu

SEQ ID NO: 761206 - RNA, 24 nt, Human
ggaggaaguugaggcacacagagg

SEQ ID NO: 761207 - RNA, 23 nt, Human
ggagugcggggcggggggagggg

SEQ ID NO: 761208 - RNA, 19 nt, Human
ggagugggaugcgggggca

SEQ ID NO: 761209 - RNA, 19 nt, Human
ggcagaggggaggcacggg

SEQ ID NO: 761210 - RNA, 18 nt, Human
gggagugggaugcggggg

SEQ ID NO: 761211 - RNA, 23 nt, Human
gggaugcgggggcaggagagaga

SEQ ID NO: 761212 - RNA, 21 nt, Human
gggcaggagagagagaaggau

SEQ ID NO: 761213 - RNA, 20 nt, Human
gggcaggagucuggagugug

SEQ ID NO: 761214 - RNA, 21 nt, Human
gggcaugggugagcagauggg

SEQ ID NO: 761215 - RNA, 19 nt, Human
gggccgggaguugccgacg

SEQ ID NO: 761216 - RNA, 20 nt, Human
gggccgggaguugccgacgu

SEQ ID NO: 761217 - RNA, 19 nt, Human
ggggcaggagagagagaag

SEQ ID NO: 761218 - RNA, 19 nt, Human
gggggagggaggggacgca

SEQ ID NO: 761219 - RNA, 20 nt, Human
gggggagggggguggagacc

SEQ ID NO: 761220 - RNA, 23 nt, Human
gguacugagcuggcuucggggcu

SEQ ID NO: 761221 - RNA, 22 nt, Human
ggucacacacaaggccccaagg

SEQ ID NO: 761222 - RNA, 22 nt, Human
guaaaaucuucauaaccuaaag

SEQ ID NO: 761223 - RNA, 22 nt, Human
gugacacccugggagugggaug

SEQ ID NO: 761224 - RNA, 23 nt, Human
gugcggggcggggggaggggggu

SEQ ID NO: 761225 - RNA, 19 nt, Human
gugugugcgcgugagguug

SEQ ID NO: 761226 - RNA, 20 nt, Human
uacacagcauagagcagccc

SEQ ID NO: 761227 - RNA, 19 nt, Human
uacaggcacaggaaacacg

SEQ ID NO: 761228 - RNA, 18 nt, Human
uaugugcauauguacaca

SEQ ID NO: 761229 - RNA, 22 nt, Human
uaugugcauauguacacauaca

SEQ ID NO: 761230 - RNA, 25 nt, Human
uaugugcauauguacacauacauac

SEQ ID NO: 761231 - RNA, 22 nt, Human
uccaaccagggagcuacaggca

SEQ ID NO: 761232 - RNA, 22 nt, Human
uccaccacggccagcaagagga

SEQ ID NO: 761233 - RNA, 21 nt, Human
ucccgggccgagggcaggggc

SEQ ID NO: 761234 - RNA, 20 nt, Human
ucucucuguccucugggccc

SEQ ID NO: 761235 - RNA, 18 nt, Human
ugaaggaagaaggggcug

SEQ ID NO: 761236 - RNA, 19 nt, Human
ugaaggaagaaggggcugg

SEQ ID NO: 761237 - RNA, 21 nt, Human
ugaaggaagaaggggcuggag

SEQ ID NO: 761238 - RNA, 19 nt, Human
ugacacccugggaguggga

SEQ ID NO: 761239 - RNA, 18 nt, Human
ugagccccugcccucccc

SEQ ID NO: 761240 - RNA, 21 nt, Human
ugaguaaaaucuucauaaccu

SEQ ID NO: 761241 - RNA, 19 nt, Human
ugcauauguacacauacau

SEQ ID NO: 761242 - RNA, 18 nt, Human
ugccaggugccccgagag

SEQ ID NO: 761243 - RNA, 20 nt, Human
ugcgccgccgccgccucucg

SEQ ID NO: 761244 - RNA, 22 nt, Human
ugcgccgggcgccucggccgcc

SEQ ID NO: 761245 - RNA, 21 nt, Human
ugcgugugugugugugcgcgu

SEQ ID NO: 761246 - RNA, 22 nt, Human
ugcgugugugugugugcgcgug

SEQ ID NO: 761247 - RNA, 21 nt, Human
ugcuuacacacaagguauaua

SEQ ID NO: 761248 - RNA, 22 nt, Human
uggaagccacucgggaguccua

SEQ ID NO: 761249 - RNA, 21 nt, Human
uggcucagggucucuagacag

SEQ ID NO: 761250 - RNA, 24 nt, Human
ugggcccucaaccgcagagagggc

SEQ ID NO: 761251 - RNA, 20 nt, Human
uggggacggggggggggucc

SEQ ID NO: 761252 - RNA, 23 nt, Human
uggggacgggggggggguccccc

SEQ ID NO: 761253 - RNA, 23 nt, Human
ugggugagcagaugggcguuugu

SEQ ID NO: 761254 - RNA, 26 nt, Human
uguacacauacauacagacaccgccg

SEQ ID NO: 761255 - RNA, 19 nt, Human
uguccaucucucuguccuc

SEQ ID NO: 761256 - RNA, 20 nt, Human
uguccucugggcccucaacc

SEQ ID NO: 761257 - RNA, 22 nt, Human
ugugcgcgugagguugugugug

SEQ ID NO: 761258 - RNA, 24 nt, Human
uuacacacacuuguacacacaccu

SEQ ID NO: 761259 - RNA, 23 nt, Human
uucgcacuuaguuuuuguguuuu

SEQ ID NO: 761260 - RNA, 23 nt, Human
uugcccaaggucacagacggcgg

SEQ ID NO: 761261 - RNA, 18 nt, Human
agagggugggugggagag

SEQ ID NO: 761262 - RNA, 20 nt, Human
gcagaggaggugccgcccgc

SEQ ID NO: 761263 - RNA, 18 nt, Human
gggugggugggagagugg

SEQ ID NO: 761264 - RNA, 20 nt, Human
ggugggagaguggaaggggc

SEQ ID NO: 761265 - RNA, 22 nt, Human
uccaaggcaggacagggcagga

SEQ ID NO: 761266 - RNA, 24 nt, Human
uuaccugcagaggaggugccgccc

SEQ ID NO: 761267 - RNA, 22 nt, Human
uugaauacucuauauaguaaac

SEQ ID NO: 761268 - RNA, 22 nt, Human
aaaaaaagagagagggaaagaa

SEQ ID NO: 761269 - RNA, 31 nt, Human
aaaaaagaagacccacccuaacaaaaaaaaa

SEQ ID NO: 761270 - RNA, 23 nt, Human
aaaaaagagagagggaaagaaaa

SEQ ID NO: 761271 - RNA, 20 nt, Human
aaaaaagagagagggaaagg

SEQ ID NO: 761272 - RNA, 19 nt, Human
aaaagaaauucuucagaga

SEQ ID NO: 761273 - RNA, 19 nt, Human
aaaagaaauucuucagaga

SEQ ID NO: 761274 - RNA, 24 nt, Human
aaaagaagacccacccuaacaaaa

SEQ ID NO: 761275 - RNA, 18 nt, Human
aaaauuagccuauaccag

SEQ ID NO: 761276 - RNA, 23 nt, Human
aaacauacaguauauuauaguga

SEQ ID NO: 761277 - RNA, 19 nt, Human
aaaugccaaccucagcaag

SEQ ID NO: 761278 - RNA, 20 nt, Human
aagaaaaaaagaagacccac

SEQ ID NO: 761279 - RNA, 24 nt, Human
aaggugauauguuugguaguguau

SEQ ID NO: 761280 - RNA, 23 nt, Human
aauuguuuucuccucugcacuaa

SEQ ID NO: 761281 - RNA, 21 nt, Human
acaaaugcaagcucacaaaac

SEQ ID NO: 761282 - RNA, 22 nt, Human
acaugcccauucuauuauaaaa

SEQ ID NO: 761283 - RNA, 18 nt, Human
acccuauacauaagagau

SEQ ID NO: 761284 - RNA, 19 nt, Human
accuaacaauauaagcacu

SEQ ID NO: 761285 - RNA, 22 nt, Human
acuguuguuucuggggaagguu

SEQ ID NO: 761286 - RNA, 18 nt, Human
agaaaacaaucgcaauca

SEQ ID NO: 761287 - RNA, 21 nt, Human
agaaaacaaucgcaaucacug

SEQ ID NO: 761288 - RNA, 21 nt, Human
agaaagcagcuugaaguuuac

SEQ ID NO: 761289 - RNA, 19 nt, Human
aggcaagauguacaaugug

SEQ ID NO: 761290 - RNA, 19 nt, Human
aggugguaaagauuucagc

SEQ ID NO: 761291 - RNA, 23 nt, Human
auauauguauguguauacccuua

SEQ ID NO: 761292 - RNA, 21 nt, Human
caaaauucagucugaucaucc

SEQ ID NO: 761293 - RNA, 22 nt, Human
caaaauucuccauuuccuuuuc

SEQ ID NO: 761294 - RNA, 23 nt, Human
caacauuaaccacaugcaaucaa

SEQ ID NO: 761295 - RNA, 22 nt, Human
cacagaucauuugacauaaaac

SEQ ID NO: 761296 - RNA, 21 nt, Human
cacccuaacaaaaaaaacaaa

SEQ ID NO: 761297 - RNA, 21 nt, Human
cccacccuaacaaaaaaaaca

SEQ ID NO: 761298 - RNA, 23 nt, Human
cccacccuaacaaaaaaaacaaa

SEQ ID NO: 761299 - RNA, 19 nt, Human
cucacaaaugcaagcucac

SEQ ID NO: 761300 - RNA, 20 nt, Human
gaauucugauggugguggca

SEQ ID NO: 761301 - RNA, 20 nt, Human
gacagaagugcuuaauaauc

SEQ ID NO: 761302 - RNA, 20 nt, Human
gacauuuacuaucaaaaaua

SEQ ID NO: 761303 - RNA, 25 nt, Human
gagaagcagcagaaacuuaugggag

SEQ ID NO: 761304 - RNA, 19 nt, Human
gcacuagauugcuuucaca

SEQ ID NO: 761305 - RNA, 22 nt, Human
ggaguucuucaaaauuagccua

SEQ ID NO: 761306 - RNA, 21 nt, Human
ggauaacagaugugcuaaaac

SEQ ID NO: 761307 - RNA, 19 nt, Human
gggaaagaaaaaaagaagg

SEQ ID NO: 761308 - RNA, 21 nt, Human
guauacccuuauacacauaca

SEQ ID NO: 761309 - RNA, 19 nt, Human
gugguggcagcaguuaugg

SEQ ID NO: 761310 - RNA, 18 nt, Human
guguauguauguaauaua

SEQ ID NO: 761311 - RNA, 22 nt, Human
guuaaaaaaagagagagggaaa

SEQ ID NO: 761312 - RNA, 18 nt, Human
guuucuaagccccuccag

SEQ ID NO: 761313 - RNA, 19 nt, Human
guuugauuaugaauucuga

SEQ ID NO: 761314 - RNA, 19 nt, Human
uaaaacaaacagaucaggu

SEQ ID NO: 761315 - RNA, 24 nt, Human
uaaaacaaacagaucagguuauca

SEQ ID NO: 761316 - RNA, 21 nt, Human
uaacaaaaaaaacaaaauuga

SEQ ID NO: 761317 - RNA, 21 nt, Human
uaacaauauaagcacugaaaa

SEQ ID NO: 761318 - RNA, 18 nt, Human
uaacagaugugcuaaaac

SEQ ID NO: 761319 - RNA, 19 nt, Human
uaauaaauuaaaaaagcua

SEQ ID NO: 761320 - RNA, 28 nt, Human
uaauauauacuucuacacuuguuauguu

SEQ ID NO: 761321 - RNA, 24 nt, Human
uaaugaauuaugcaauugcaaagu

SEQ ID NO: 761322 - RNA, 23 nt, Human
uacaguauaugagguaaaaucaa

SEQ ID NO: 761323 - RNA, 23 nt, Human
uacggauaacagaugugcuaaaa

SEQ ID NO: 761324 - RNA, 25 nt, Human
uacuaugaaaaacauaagccacugu

SEQ ID NO: 761325 - RNA, 21 nt, Human
uagaaaguuuuucuauaagaa

SEQ ID NO: 761326 - RNA, 28 nt, Human
uagaguuuuuggaauguacaguauauga

SEQ ID NO: 761327 - RNA, 21 nt, Human
uagcacuagauugcuuucaca

SEQ ID NO: 761328 - RNA, 23 nt, Human
uagccuauaccagacagagugag

SEQ ID NO: 761329 - RNA, 21 nt, Human
uaggaagguguccacuaaaag

SEQ ID NO: 761330 - RNA, 19 nt, Human
uagguauaucagguucaca

SEQ ID NO: 761331 - RNA, 21 nt, Human
uaggugccuuccauugcaaag

SEQ ID NO: 761332 - RNA, 26 nt, Human
uaggugccuuccauugcaaagugagu

SEQ ID NO: 761333 - RNA, 24 nt, Human
uaguacaugacaaaauaaaaugua

SEQ ID NO: 761334 - RNA, 21 nt, Human
uauaaaagcaauacagaaaua

SEQ ID NO: 761335 - RNA, 20 nt, Human
uauaagaaggcauuuguuaa

SEQ ID NO: 761336 - RNA, 18 nt, Human
uauacacauacauauagu

SEQ ID NO: 761337 - RNA, 21 nt, Human
uauaugccauauauguaugug

SEQ ID NO: 761338 - RNA, 26 nt, Human
uauauguauguguauacccuuauaca

SEQ ID NO: 761339 - RNA, 20 nt, Human
uaucagguucacagcucaag

SEQ ID NO: 761340 - RNA, 24 nt, Human
uauggugauaaaauaaauaguuuu

SEQ ID NO: 761341 - RNA, 22 nt, Human
uauguaauauauacuucuacac

SEQ ID NO: 761342 - RNA, 20 nt, Human
uauguguacacuuguuauau

SEQ ID NO: 761343 - RNA, 28 nt, Human
uauguguauacccuuauacacauacaua

SEQ ID NO: 761344 - RNA, 22 nt, Human
ucaaaaauaggaaguucauuug

SEQ ID NO: 761345 - RNA, 20 nt, Human
ucaauagugucaccuuuaag

SEQ ID NO: 761346 - RNA, 19 nt, Human
ucacagcucaaggugguaa

SEQ ID NO: 761347 - RNA, 20 nt, Human
ucagccuuauacaauuuuaa

SEQ ID NO: 761348 - RNA, 22 nt, Human
ucuacacuuguuauguguauau

SEQ ID NO: 761349 - RNA, 21 nt, Human
ucuccauuuccuuuuccuuca

SEQ ID NO: 761350 - RNA, 21 nt, Human
ucuucagagaucuucaaagca

SEQ ID NO: 761351 - RNA, 21 nt, Human
ugacaaaauucuccauuuccu

SEQ ID NO: 761352 - RNA, 23 nt, Human
ugagguaaaaucaagauuacauu

SEQ ID NO: 761353 - RNA, 18 nt, Human
ugcaacauuaaccacaug

SEQ ID NO: 761354 - RNA, 22 nt, Human
ugcuaaaacaagaauuguagau

SEQ ID NO: 761355 - RNA, 22 nt, Human
uggaacaguauccaaacagaca

SEQ ID NO: 761356 - RNA, 30 nt, Human
uggcagcaguuaugggagaagcagcagaag

SEQ ID NO: 761357 - RNA, 19 nt, Human
ugggagaagcagcagaaac

SEQ ID NO: 761358 - RNA, 21 nt, Human
ugggagaagcagcagaaacuu

SEQ ID NO: 761359 - RNA, 21 nt, Human
ugggaguucuucaaaauuagc

SEQ ID NO: 761360 - RNA, 19 nt, Human
uggugauaaaauaaauagu

SEQ ID NO: 761361 - RNA, 20 nt, Human
uggugguggcagcaguuaug

SEQ ID NO: 761362 - RNA, 18 nt, Human
uguagauaguuucauuau

SEQ ID NO: 761363 - RNA, 26 nt, Human
uguauguguauacccuuauacacaua

SEQ ID NO: 761364 - RNA, 18 nt, Human
uguggcacuuuaaagaag

SEQ ID NO: 761365 - RNA, 22 nt, Human
uguguauacccuuauacacaua

SEQ ID NO: 761366 - RNA, 19 nt, Human
uguguauauguguacacuu

SEQ ID NO: 761367 - RNA, 20 nt, Human
uguuuucuccucugcacuaa

SEQ ID NO: 761368 - RNA, 24 nt, Human
uuaguacaugacaaaauaaaaugu

SEQ ID NO: 761369 - RNA, 25 nt, Human
uuaugaauucugauggugguggcag

SEQ ID NO: 761370 - RNA, 21 nt, Human
uuaugauuacuuucuaaaaag

SEQ ID NO: 761371 - RNA, 24 nt, Human
uuccuucaucccauucuaauacaa

SEQ ID NO: 761372 - RNA, 21 nt, Human
uuuuguuucuaagccccucca

SEQ ID NO: 761373 - RNA, 25 nt, Human
aaaaaaaaagacauuuauauccuua

SEQ ID NO: 761374 - RNA, 20 nt, Human
aaaagaaaacugaucuugga

SEQ ID NO: 761375 - RNA, 23 nt, Human
aaacaaaacaagaacaguuauug

SEQ ID NO: 761376 - RNA, 20 nt, Human
aaacauccuguaacagcuuc

SEQ ID NO: 761377 - RNA, 20 nt, Human
aacaaaacaagaacaguuau

SEQ ID NO: 761378 - RNA, 21 nt, Human
aacaacauuuguaaaagcucu

SEQ ID NO: 761379 - RNA, 19 nt, Human
aacacgugcugucguuuuc

SEQ ID NO: 761380 - RNA, 21 nt, Human
aacccaaacaauaagcagauc

SEQ ID NO: 761381 - RNA, 20 nt, Human
aagaaaacugaucuuggaau

SEQ ID NO: 761382 - RNA, 22 nt, Human
aaugucugucucauuaaaugac

SEQ ID NO: 761383 - RNA, 19 nt, Human
acuauuuagucuugcugca

SEQ ID NO: 761384 - RNA, 19 nt, Human
acugacccacgggugugug

SEQ ID NO: 761385 - RNA, 21 nt, Human
agaaaacaccaagagaaaggc

SEQ ID NO: 761386 - RNA, 24 nt, Human
agaaaacaccaagagaaaggcaag

SEQ ID NO: 761387 - RNA, 28 nt, Human
agaaaacaccaagagaaaggcaagacug

SEQ ID NO: 761388 - RNA, 21 nt, Human
agaaagaaaacaccaagagaa

SEQ ID NO: 761389 - RNA, 23 nt, Human
agaaagaggugaaagucacagaa

SEQ ID NO: 761390 - RNA, 25 nt, Human
agaaagcagcauuuaaaaaacagaa

SEQ ID NO: 761391 - RNA, 23 nt, Human
agaauagcggaguacccgaaaaa

SEQ ID NO: 761392 - RNA, 18 nt, Human
agaggcuguucaagagaa

SEQ ID NO: 761393 - RNA, 27 nt, Human
agcaaaugugaccuuauaacuacucau

SEQ ID NO: 761394 - RNA, 22 nt, Human
agcucaauuccauugacaacug

SEQ ID NO: 761395 - RNA, 22 nt, Human
agggaugggcagauaagagcuu

SEQ ID NO: 761396 - RNA, 20 nt, Human
auagauuccaacagcaacau

SEQ ID NO: 761397 - RNA, 18 nt, Human
auaugaagucuuuuagaa

SEQ ID NO: 761398 - RNA, 22 nt, Human
auggcuacauuuuugaagagga

SEQ ID NO: 761399 - RNA, 20 nt, Human
auggugcaaaaacugcuuuc

SEQ ID NO: 761400 - RNA, 20 nt, Human
auugaagcauaagagggaag

SEQ ID NO: 761401 - RNA, 25 nt, Human
caaaugccgcauuuucauagcaagg

SEQ ID NO: 761402 - RNA, 23 nt, Human
cacacaggccaugaaaacaaagc

SEQ ID NO: 761403 - RNA, 24 nt, Human
cacagcuacucugaaaacaaaaau

SEQ ID NO: 761404 - RNA, 21 nt, Human
cacaggccaugaaaacaaagc

SEQ ID NO: 761405 - RNA, 22 nt, Human
cacauagcacagcuacucugaa

SEQ ID NO: 761406 - RNA, 22 nt, Human
caccaagagaaaggcaagacug

SEQ ID NO: 761407 - RNA, 29 nt, Human
caccaagagaaaggcaagacuguuaaaau

SEQ ID NO: 761408 - RNA, 24 nt, Human
caccgaccacaauccuugauauuc

SEQ ID NO: 761409 - RNA, 22 nt, Human
cagaacccaaaucguguacuag

SEQ ID NO: 761410 - RNA, 22 nt, Human
cagcaacaggaagagcuucuac

SEQ ID NO: 761411 - RNA, 19 nt, Human
cagcagcaacaggaagagc

SEQ ID NO: 761412 - RNA, 22 nt, Human
caggauccauguagcagagcuu

SEQ ID NO: 761413 - RNA, 20 nt, Human
caguuuaauuaaaaaacuac

SEQ ID NO: 761414 - RNA, 22 nt, Human
cauacaaacaucaagucuuaga

SEQ ID NO: 761415 - RNA, 19 nt, Human
cauauuuaugugugugugu

SEQ ID NO: 761416 - RNA, 22 nt, Human
cauauuuauguguguguguguu

SEQ ID NO: 761417 - RNA, 20 nt, Human
ccacacguaauccauuucca

SEQ ID NO: 761418 - RNA, 23 nt, Human
cccaaacaauaagcagaucugga

SEQ ID NO: 761419 - RNA, 18 nt, Human
cccuuuaaggauggcuac

SEQ ID NO: 761420 - RNA, 24 nt, Human
cgaaaaagaaaacugaucuuggaa

SEQ ID NO: 761421 - RNA, 21 nt, Human
cuaaagcacucauuccaauaa

SEQ ID NO: 761422 - RNA, 24 nt, Human
cugagcagaacccaaaucguguac

SEQ ID NO: 761423 - RNA, 20 nt, Human
cugggagaaagaaagaaaaa

SEQ ID NO: 761424 - RNA, 19 nt, Human
cuucacuucuuuuacuugg

SEQ ID NO: 761425 - RNA, 24 nt, Human
gaaaacaaaaauaaacaaaacaag

SEQ ID NO: 761426 - RNA, 19 nt, Human
gaaaauuuucagacaugaa

SEQ ID NO: 761427 - RNA, 20 nt, Human
gagaaaggagucaucuuaau

SEQ ID NO: 761428 - RNA, 19 nt, Human
gagccaaagaaacaacuua

SEQ ID NO: 761429 - RNA, 18 nt, Human
gcaacaaacauccuguaa

SEQ ID NO: 761430 - RNA, 19 nt, Human
gcaggauguucucucaugg

SEQ ID NO: 761431 - RNA, 23 nt, Human
ggccaugaaaacaaagcuuuaac

SEQ ID NO: 761432 - RNA, 18 nt, Human
gguggcuugaacccaaac

SEQ ID NO: 761433 - RNA, 21 nt, Human
guaacugacccacgggugugu

SEQ ID NO: 761434 - RNA, 19 nt, Human
gugagacgauacuaacaaa

SEQ ID NO: 761435 - RNA, 20 nt, Human
uaaaaaaaugucugucucau

SEQ ID NO: 761436 - RNA, 18 nt, Human
uaaccuggaaauuaaaua

SEQ ID NO: 761437 - RNA, 20 nt, Human
uaagaaagcuuuaacuguga

SEQ ID NO: 761438 - RNA, 19 nt, Human
uaagagaaaggagucaucu

SEQ ID NO: 761439 - RNA, 22 nt, Human
uacccgaaaaagaaaacugauc

SEQ ID NO: 761440 - RNA, 23 nt, Human
uacuuggccucugcagauauucc

SEQ ID NO: 761441 - RNA, 23 nt, Human
uagcaaaaaaggauuaaagcuga

SEQ ID NO: 761442 - RNA, 27 nt, Human
uagcaucauauuucuccccagagacac

SEQ ID NO: 761443 - RNA, 23 nt, Human
uagcggaguacccgaaaaagaaa

SEQ ID NO: 761444 - RNA, 24 nt, Human
uagcuucaaaaccuaauuuuaaaa

SEQ ID NO: 761445 - RNA, 25 nt, Human
ucaaagaaaacaguaacuaaagcac

SEQ ID NO: 761446 - RNA, 22 nt, Human
ucacacaggccaugaaaacaaa

SEQ ID NO: 761447 - RNA, 21 nt, Human
ucacaugaaaacccauugcau

SEQ ID NO: 761448 - RNA, 18 nt, Human
ucacauucuucacuucuc

SEQ ID NO: 761449 - RNA, 21 nt, Human
ucacuucuacuagugaaaaag

SEQ ID NO: 761450 - RNA, 22 nt, Human
ucaguucccuuuaaggauggcu

SEQ ID NO: 761451 - RNA, 22 nt, Human
uccucuaaauggugcaaaaacu

SEQ ID NO: 761452 - RNA, 21 nt, Human
ucuacacugcauugauaguuu

SEQ ID NO: 761453 - RNA, 19 nt, Human
ucuuagauuuacuacugcu

SEQ ID NO: 761454 - RNA, 18 nt, Human
ugaaaaagaacacgugcu

SEQ ID NO: 761455 - RNA, 30 nt, Human
ugaaaacaaaaauaaacaaaacaagaacag

SEQ ID NO: 761456 - RNA, 19 nt, Human
ugaggggagauggguagca

SEQ ID NO: 761457 - RNA, 20 nt, Human
ugaggucagagagaaagccu

SEQ ID NO: 761458 - RNA, 23 nt, Human
ugauggcaugaucuuaugcaucu

SEQ ID NO: 761459 - RNA, 18 nt, Human
uggaaaagucuugguggu

SEQ ID NO: 761460 - RNA, 21 nt, Human
uggaaaagucuuggugguaga

SEQ ID NO: 761461 - RNA, 21 nt, Human
uggaaugaggucagagagaaa

SEQ ID NO: 761462 - RNA, 24 nt, Human
uggaaugaggucagagagaaagcc

SEQ ID NO: 761463 - RNA, 18 nt, Human
uggcaugaucuuaugcau

SEQ ID NO: 761464 - RNA, 23 nt, Human
uggcaugaucuuaugcaucuacu

SEQ ID NO: 761465 - RNA, 18 nt, Human
ugggagaaagaaagaaaa

SEQ ID NO: 761466 - RNA, 19 nt, Human
uguagugcugauuucugau

SEQ ID NO: 761467 - RNA, 20 nt, Human
uguccaaagucuacacugca

SEQ ID NO: 761468 - RNA, 23 nt, Human
ugugcaaugauggcaugaucuua

SEQ ID NO: 761469 - RNA, 23 nt, Human
uguggaagguguaauuuguuuuu

SEQ ID NO: 761470 - RNA, 18 nt, Human
ugugugugugugugucca

SEQ ID NO: 761471 - RNA, 21 nt, Human
uguguguguguguguccagug

SEQ ID NO: 761472 - RNA, 18 nt, Human
uuaacaucuuuccuuccc

SEQ ID NO: 761473 - RNA, 19 nt, Human
uuacuuggccucugcagau

SEQ ID NO: 761474 - RNA, 24 nt, Human
uuauguguguguguguguccagug

SEQ ID NO: 761475 - RNA, 23 nt, Human
uucaaccauaacguccacauuua

SEQ ID NO: 761476 - RNA, 21 nt, Human
uucauuguuccuggcacuuug

SEQ ID NO: 761477 - RNA, 20 nt, Human
uucuacuagugaaaaagaag

SEQ ID NO: 761478 - RNA, 19 nt, Human
uugaaagcaaaugugaccu

SEQ ID NO: 761479 - RNA, 19 nt, Human
uuugcauucuucuucuuag

SEQ ID NO: 761480 - RNA, 19 nt, Human
uuuguagaagccucgaguc

SEQ ID NO: 761481 - RNA, 25 nt, Human
uuuucuggcaacaaacauccuguaa

SEQ ID NO: 761482 - RNA, 27 nt, Human
aaagacacagaagaggagaauuuugcu

SEQ ID NO: 761483 - RNA, 21 nt, Human
aaauagacucaaacaugugaa

SEQ ID NO: 761484 - RNA, 23 nt, Human
aacaaauagacucaaacauguga

SEQ ID NO: 761485 - RNA, 23 nt, Human
aaccaagucaauccccuggcccc

SEQ ID NO: 761486 - RNA, 21 nt, Human
aagcagauauagcugggguau

SEQ ID NO: 761487 - RNA, 19 nt, Human
acagaagcuuucugccuuc

SEQ ID NO: 761488 - RNA, 24 nt, Human
acagagagagacuugaagcccaaa

SEQ ID NO: 761489 - RNA, 23 nt, Human
acauccagagccaaggcuuaaca

SEQ ID NO: 761490 - RNA, 19 nt, Human
acccugacaggugaucuga

SEQ ID NO: 761491 - RNA, 19 nt, Human
accugguacccuugucagg

SEQ ID NO: 761492 - RNA, 19 nt, Human
acugggaaagacacagaag

SEQ ID NO: 761493 - RNA, 18 nt, Human
agaauucucucuauaacu

SEQ ID NO: 761494 - RNA, 23 nt, Human
agagacuugaagcccaaaaugau

SEQ ID NO: 761495 - RNA, 22 nt, Human
agagagagacuugaagcccaaa

SEQ ID NO: 761496 - RNA, 18 nt, Human
aggggggacuacuguaua

SEQ ID NO: 761497 - RNA, 20 nt, Human
aguagccagucacaaagacc

SEQ ID NO: 761498 - RNA, 21 nt, Human
auacccugacaggugaucuga

SEQ ID NO: 761499 - RNA, 21 nt, Human
augaaauuggugcuggugaag

SEQ ID NO: 761500 - RNA, 23 nt, Human
augggagagcaggagggcaugag

SEQ ID NO: 761501 - RNA, 18 nt, Human
caaaguaccucacccaua

SEQ ID NO: 761502 - RNA, 23 nt, Human
caaauaucuaggccacauccaga

SEQ ID NO: 761503 - RNA, 22 nt, Human
caaaucaagaccugcuccuuuc

SEQ ID NO: 761504 - RNA, 19 nt, Human
caagcacugucauacccug

SEQ ID NO: 761505 - RNA, 22 nt, Human
caagcacugucauacccugaca

SEQ ID NO: 761506 - RNA, 21 nt, Human
caagucaauccccuggccccc

SEQ ID NO: 761507 - RNA, 19 nt, Human
cacuguacaaagaaagggu

SEQ ID NO: 761508 - RNA, 20 nt, Human
cacuguacaaagaaagggug

SEQ ID NO: 761509 - RNA, 24 nt, Human
cauggauucaauaaagccauauaa

SEQ ID NO: 761510 - RNA, 23 nt, Human
cauuacauugaaaggaugucuuu

SEQ ID NO: 761511 - RNA, 24 nt, Human
ccagaaaugcucuugcaauuucag

SEQ ID NO: 761512 - RNA, 22 nt, Human
ccagcucccaagggcugccccc

SEQ ID NO: 761513 - RNA, 20 nt, Human
cccacaggaacuaguaagau

SEQ ID NO: 761514 - RNA, 19 nt, Human
cccauugccaaaccccauu

SEQ ID NO: 761515 - RNA, 23 nt, Human
cccauugccaaaccccauuagcu

SEQ ID NO: 761516 - RNA, 21 nt, Human
ccccucucuggagguuuccca

SEQ ID NO: 761517 - RNA, 18 nt, Human
ccccuggcccccagcucc

SEQ ID NO: 761518 - RNA, 21 nt, Human
ccccuggcccccagcucccaa

SEQ ID NO: 761519 - RNA, 22 nt, Human
ccuccccucucuggagguuucc

SEQ ID NO: 761520 - RNA, 18 nt, Human
ccuguuccuggggcuccc

SEQ ID NO: 761521 - RNA, 19 nt, Human
cuagguguccuguaccccc

SEQ ID NO: 761522 - RNA, 20 nt, Human
cuccuaauaagguuugugcc

SEQ ID NO: 761523 - RNA, 22 nt, Human
cucuaugaauugagggcucuac

SEQ ID NO: 761524 - RNA, 27 nt, Human
cucuggagguuucccauaauacuuggg

SEQ ID NO: 761525 - RNA, 22 nt, Human
cugaagguugcauuuuggacac

SEQ ID NO: 761526 - RNA, 18 nt, Human
cugcccccuuuugccaga

SEQ ID NO: 761527 - RNA, 18 nt, Human
cugcccccuuuugccaga

SEQ ID NO: 761528 - RNA, 20 nt, Human
cugcccccuuuugccagaag

SEQ ID NO: 761529 - RNA, 24 nt, Human
cugggguauauggaggugucaggg

SEQ ID NO: 761530 - RNA, 18 nt, Human
cuucaucugguuucuuuc

SEQ ID NO: 761531 - RNA, 18 nt, Human
cuugcuggguccuuuuca

SEQ ID NO: 761532 - RNA, 24 nt, Human
gaaagacacagaagaggagaauuu

SEQ ID NO: 761533 - RNA, 20 nt, Human
gaauuaaucccuacuacacu

SEQ ID NO: 761534 - RNA, 24 nt, Human
gagagacuugaagcccaaaaugau

SEQ ID NO: 761535 - RNA, 18 nt, Human
gauacauuauuucccuuc

SEQ ID NO: 761536 - RNA, 20 nt, Human
gccaaaccccauuagcuaaa

SEQ ID NO: 761537 - RNA, 19 nt, Human
gccacauccagagccaagg

SEQ ID NO: 761538 - RNA, 19 nt, Human
gccagagcugagaacaucc

SEQ ID NO: 761539 - RNA, 19 nt, Human
ggaagcccuggugaggagg

SEQ ID NO: 761540 - RNA, 24 nt, Human
ggaggugucaggaggugugggggc

SEQ ID NO: 761541 - RNA, 21 nt, Human
ggauaugcuagacuaaggaau

SEQ ID NO: 761542 - RNA, 18 nt, Human
ggcgaaagcaucagugag

SEQ ID NO: 761543 - RNA, 24 nt, Human
guaguauacucuacuggcccaaag

SEQ ID NO: 761544 - RNA, 22 nt, Human
guuccuggggcucccuccuucc

SEQ ID NO: 761545 - RNA, 21 nt, Human
guugccuugggcauggauuca

SEQ ID NO: 761546 - RNA, 22 nt, Human
guugggcaaaucaagaccugcu

SEQ ID NO: 761547 - RNA, 24 nt, Human
uaacuaaauuauguguagaaacaa

SEQ ID NO: 761548 - RNA, 22 nt, Human
uaacuuaugggaauuaaucccu

SEQ ID NO: 761549 - RNA, 19 nt, Human
uacaagcacugucauaccc

SEQ ID NO: 761550 - RNA, 21 nt, Human
uacaguacaugguacuguaaa

SEQ ID NO: 761551 - RNA, 20 nt, Human
uacauauacacaugccuaug

SEQ ID NO: 761552 - RNA, 21 nt, Human
uaccucugugcaauuaaggca

SEQ ID NO: 761553 - RNA, 19 nt, Human
uacuggcccaaaguaccuc

SEQ ID NO: 761554 - RNA, 18 nt, Human
uagaaacaaauagacuca

SEQ ID NO: 761555 - RNA, 23 nt, Human
uagaaacaaauagacucaaacau

SEQ ID NO: 761556 - RNA, 23 nt, Human
uagacuaaggaaugauucaauaa

SEQ ID NO: 761557 - RNA, 19 nt, Human
uaggguaugacuucauuca

SEQ ID NO: 761558 - RNA, 23 nt, Human
ucaauaaagccauauaaaucuga

SEQ ID NO: 761559 - RNA, 18 nt, Human
ucagauguaaacauaacu

SEQ ID NO: 761560 - RNA, 18 nt, Human
ucaggaggugugggggca

SEQ ID NO: 761561 - RNA, 24 nt, Human
ucaugggagagcaggagggcauga

SEQ ID NO: 761562 - RNA, 20 nt, Human
uccaauguguaaaagagccc

SEQ ID NO: 761563 - RNA, 24 nt, Human
ucccaagggcugcccccuuuugcc

SEQ ID NO: 761564 - RNA, 20 nt, Human
ucccauaauacuuggguggg

SEQ ID NO: 761565 - RNA, 24 nt, Human
uccccucucuggagguuucccaua

SEQ ID NO: 761566 - RNA, 19 nt, Human
uccuacauauacacaugcc

SEQ ID NO: 761567 - RNA, 20 nt, Human
uccuggggcucccuccuucc

SEQ ID NO: 761568 - RNA, 18 nt, Human
ucucuuauguuucagacu

SEQ ID NO: 761569 - RNA, 20 nt, Human
ucucuuauguuucagacugg

SEQ ID NO: 761570 - RNA, 21 nt, Human
ucugggacugucuucuuacau

SEQ ID NO: 761571 - RNA, 23 nt, Human
ucuggguucuucugcaucuguuu

SEQ ID NO: 761572 - RNA, 22 nt, Human
ugaaaauacagauaagggggga

SEQ ID NO: 761573 - RNA, 20 nt, Human
ugaacacacacaggauccua

SEQ ID NO: 761574 - RNA, 22 nt, Human
ugaacacacacaggauccuaga

SEQ ID NO: 761575 - RNA, 23 nt, Human
ugaauacaagcacugucauaccc

SEQ ID NO: 761576 - RNA, 20 nt, Human
ugagaacauccucgugcucu

SEQ ID NO: 761577 - RNA, 18 nt, Human
ugaggcuugcuggguccu

SEQ ID NO: 761578 - RNA, 24 nt, Human
ugaguuugaacacacacaggaucc

SEQ ID NO: 761579 - RNA, 22 nt, Human
ugccagaaguuucaacccacaa

SEQ ID NO: 761580 - RNA, 18 nt, Human
uggccuuuggagccaggg

SEQ ID NO: 761581 - RNA, 21 nt, Human
uggcuuacacagaagcuuucu

SEQ ID NO: 761582 - RNA, 18 nt, Human
ugggacuccuguuccugg

SEQ ID NO: 761583 - RNA, 21 nt, Human
ugggugauuuuuugccauacc

SEQ ID NO: 761584 - RNA, 19 nt, Human
uguacccccacaggaacua

SEQ ID NO: 761585 - RNA, 20 nt, Human
ugugacuuuuacccccacug

SEQ ID NO: 761586 - RNA, 22 nt, Human
ugugauauacaucauggacauc

SEQ ID NO: 761587 - RNA, 21 nt, Human
uuagaauucucucuauaacuu

SEQ ID NO: 761588 - RNA, 23 nt, Human
uucaucccacuacucagaaucgg

SEQ ID NO: 761589 - RNA, 21 nt, Human
uucauuuuguuaguuguugag

SEQ ID NO: 761590 - RNA, 20 nt, Human
uuccacaagugaggcuugcu

SEQ ID NO: 761591 - RNA, 23 nt, Human
uugagggcucuacuaagccagca

SEQ ID NO: 761592 - RNA, 24 nt, Human
uuucauuccacaagugaggcuugc

SEQ ID NO: 761593 - RNA, 24 nt, Human
uuuguuugccuucccauugccaaa

SEQ ID NO: 761594 - RNA, 21 nt, Human
uuuucagaagggguggaccug

SEQ ID NO: 761595 - RNA, 18 nt, Human
uuuuguacaguacauggu

SEQ ID NO: 761596 - RNA, 23 nt, Human
aaaacaaaacaaaacaaaacaga

SEQ ID NO: 761597 - RNA, 24 nt, Human
aaaacaaaacaaaacaaaacagaa

SEQ ID NO: 761598 - RNA, 25 nt, Human
aaaacaaaacaaaacagaaauuucc

SEQ ID NO: 761599 - RNA, 20 nt, Human
aaaaccaacacaaaaaugca

SEQ ID NO: 761600 - RNA, 24 nt, Human
aaaagcacuggcaaacacccauaa

SEQ ID NO: 761601 - RNA, 22 nt, Human
aaacaaaacaaaacaaaacaaa

SEQ ID NO: 761602 - RNA, 24 nt, Human
aaacaaaacaaaacaaaacagaaa

SEQ ID NO: 761603 - RNA, 22 nt, Human
aaacagaaagacaccccaacgc

SEQ ID NO: 761604 - RNA, 21 nt, Human
aaacauuuuuagcagaugauc

SEQ ID NO: 761605 - RNA, 21 nt, Human
aaagacaccccaacgccaaag

SEQ ID NO: 761606 - RNA, 18 nt, Human
aaagcaacuuauaagccc

SEQ ID NO: 761607 - RNA, 18 nt, Human
aaagcacuggcaaacacc

SEQ ID NO: 761608 - RNA, 19 nt, Human
aacaaaacaaaacaaaaca

SEQ ID NO: 761609 - RNA, 23 nt, Human
aaccaaauaugaagaguuaagau

SEQ ID NO: 761610 - RNA, 22 nt, Human
aagcagagcuugcuuuaugauc

SEQ ID NO: 761611 - RNA, 20 nt, Human
aagcagaucccaaaaccaaa

SEQ ID NO: 761612 - RNA, 27 nt, Human
aagcauccuuucaggucaccacugauu

SEQ ID NO: 761613 - RNA, 23 nt, Human
aaggaugaccacccuauccaugc

SEQ ID NO: 761614 - RNA, 27 nt, Human
aauacccauugcauucuaagcggaaca

SEQ ID NO: 761615 - RNA, 23 nt, Human
aauccagucuaagagagaguuca

SEQ ID NO: 761616 - RNA, 22 nt, Human
aaugaugauuaucuaaggaauu

SEQ ID NO: 761617 - RNA, 18 nt, Human
aaugcaauugucaaggcc

SEQ ID NO: 761618 - RNA, 24 nt, Human
aauuuauuagggcuccaaaaccuu

SEQ ID NO: 761619 - RNA, 27 nt, Human
acaaaacaaaacaaaacaaaacagaaa

SEQ ID NO: 761620 - RNA, 19 nt, Human
acaaaauucccuucccuug

SEQ ID NO: 761621 - RNA, 24 nt, Human
acaacaaagcaaagcuagccuaga

SEQ ID NO: 761622 - RNA, 21 nt, Human
accccauucccgugcccucug

SEQ ID NO: 761623 - RNA, 21 nt, Human
acccuauuacaucagaaaugg

SEQ ID NO: 761624 - RNA, 21 nt, Human
accuugaaaaccccauucccg

SEQ ID NO: 761625 - RNA, 22 nt, Human
acuuauauuuuuccugaaugaa

SEQ ID NO: 761626 - RNA, 22 nt, Human
acuuugacagguagaugagggg

SEQ ID NO: 761627 - RNA, 28 nt, Human
agaaaaccaacacaaaaaugcaauucac

SEQ ID NO: 761628 - RNA, 19 nt, Human
agaaagacaccccaacgcc

SEQ ID NO: 761629 - RNA, 24 nt, Human
agaaagacaccccaacgccaaaga

SEQ ID NO: 761630 - RNA, 18 nt, Human
agaggaagagaggaugag

SEQ ID NO: 761631 - RNA, 19 nt, Human
agcagguacgaaugaccuu

SEQ ID NO: 761632 - RNA, 24 nt, Human
agccauggccaaagcagaucagaa

SEQ ID NO: 761633 - RNA, 18 nt, Human
aggaagagaggaugagaa

SEQ ID NO: 761634 - RNA, 18 nt, Human
aggaugcuguagcauuag

SEQ ID NO: 761635 - RNA, 19 nt, Human
aggcaaaugccaaggggga

SEQ ID NO: 761636 - RNA, 20 nt, Human
agggggaauuccuucccguu

SEQ ID NO: 761637 - RNA, 20 nt, Human
aggugaacaacaaagcaagc

SEQ ID NO: 761638 - RNA, 23 nt, Human
agucauugauuccuucuuugggg

SEQ ID NO: 761639 - RNA, 24 nt, Human
auaaagguuaauauauuuuuuuca

SEQ ID NO: 761640 - RNA, 23 nt, Human
auaaugguaucuuucuauauagu

SEQ ID NO: 761641 - RNA, 21 nt, Human
auaccggggaaguguucuaca

SEQ ID NO: 761642 - RNA, 23 nt, Human
augcaacauacaacugacacucc

SEQ ID NO: 761643 - RNA, 21 nt, Human
augcuguagcauuaggcuggu

SEQ ID NO: 761644 - RNA, 20 nt, Human
caaaaagcaacuuauaagcc

SEQ ID NO: 761645 - RNA, 20 nt, Human
caaaaagcacuggcaaacac

SEQ ID NO: 761646 - RNA, 24 nt, Human
caaaaagcacuggcaaacacccau

SEQ ID NO: 761647 - RNA, 21 nt, Human
caaaacaaaacaaaacaaaac

SEQ ID NO: 761648 - RNA, 24 nt, Human
caaaacaaaacaaaacaaaacaaa

SEQ ID NO: 761649 - RNA, 25 nt, Human
caaaacaaaacaaaacaaaacagaa

SEQ ID NO: 761650 - RNA, 21 nt, Human
caaaacaaaacagaaauuucc

SEQ ID NO: 761651 - RNA, 25 nt, Human
caaaggcacaacgaagcuggagacc

SEQ ID NO: 761652 - RNA, 27 nt, Human
caacugacacuccaaacagaaagacac

SEQ ID NO: 761653 - RNA, 20 nt, Human
caagcaggcugagauaucag

SEQ ID NO: 761654 - RNA, 23 nt, Human
caauguucacagcucacaaggga

SEQ ID NO: 761655 - RNA, 22 nt, Human
caauugcagauaauaauuuagc

SEQ ID NO: 761656 - RNA, 20 nt, Human
cacagcaccuaugacacaag

SEQ ID NO: 761657 - RNA, 25 nt, Human
caccacugauuucaaaacaaaacaa

SEQ ID NO: 761658 - RNA, 25 nt, Human
cagaucccaaaaccaaauaugaaga

SEQ ID NO: 761659 - RNA, 23 nt, Human
cagcagguacgaaugaccuuaau

SEQ ID NO: 761660 - RNA, 18 nt, Human
cagccauggccaaagcag

SEQ ID NO: 761661 - RNA, 22 nt, Human
cagcuuuuucuuugucuuagaa

SEQ ID NO: 761662 - RNA, 21 nt, Human
cauauauauacacauauguau

SEQ ID NO: 761663 - RNA, 24 nt, Human
cauauauauacacauauguaugua

SEQ ID NO: 761664 - RNA, 20 nt, Human
cauauguauguaugcguacg

SEQ ID NO: 761665 - RNA, 22 nt, Human
caugcaacauacaacugacacu

SEQ ID NO: 761666 - RNA, 21 nt, Human
cauucuuuucuucuggcacca

SEQ ID NO: 761667 - RNA, 24 nt, Human
ccaaaaccuuuaaucacuguguau

SEQ ID NO: 761668 - RNA, 23 nt, Human
ccaaacagaaagacaccccaacg

SEQ ID NO: 761669 - RNA, 18 nt, Human
ccagagagacuacugauc

SEQ ID NO: 761670 - RNA, 23 nt, Human
ccagaucugugcagaaaaccaac

SEQ ID NO: 761671 - RNA, 26 nt, Human
cccauugcauucuaagcggaacagcc

SEQ ID NO: 761672 - RNA, 23 nt, Human
cccuucgccuccgcccccggggg

SEQ ID NO: 761673 - RNA, 24 nt, Human
ccuccugcaagucgcccccucucg

SEQ ID NO: 761674 - RNA, 23 nt, Human
ccucuggaaccggcagugucguc

SEQ ID NO: 761675 - RNA, 21 nt, Human
ccugaaaggagcacauugugg

SEQ ID NO: 761676 - RNA, 18 nt, Human
cgcccccucucggagccc

SEQ ID NO: 761677 - RNA, 24 nt, Human
cgccuccgcccccggggggagccu

SEQ ID NO: 761678 - RNA, 19 nt, Human
cuaaggaauugcaccugag

SEQ ID NO: 761679 - RNA, 27 nt, Human
cuaugcugugauaaucggggucucagg

SEQ ID NO: 761680 - RNA, 21 nt, Human
cucaaagcagaucccaaaacc

SEQ ID NO: 761681 - RNA, 19 nt, Human
cuccaaacagaaagacacc

SEQ ID NO: 761682 - RNA, 25 nt, Human
cuccugcaagucgcccccucucgga

SEQ ID NO: 761683 - RNA, 21 nt, Human
cugauuucaaaacaaaacaaa

SEQ ID NO: 761684 - RNA, 21 nt, Human
cuggcaccaacacccuucgcc

SEQ ID NO: 761685 - RNA, 24 nt, Human
cuuauaagcccacaaagaaggaac

SEQ ID NO: 761686 - RNA, 23 nt, Human
cuucuacuugcuucccuguugca

SEQ ID NO: 761687 - RNA, 20 nt, Human
gaggacuuugguggaagccu

SEQ ID NO: 761688 - RNA, 19 nt, Human
gaguaagggugggcggaga

SEQ ID NO: 761689 - RNA, 24 nt, Human
gauuaucuaaggaauugcaccuga

SEQ ID NO: 761690 - RNA, 25 nt, Human
gcaaaaagcaacuuauaagcccaca

SEQ ID NO: 761691 - RNA, 21 nt, Human
gcugggaaucgcaaucauuca

SEQ ID NO: 761692 - RNA, 23 nt, Human
gggaauuccuucccguugacguc

SEQ ID NO: 761693 - RNA, 23 nt, Human
gggagaguccaaaauaucacuuu

SEQ ID NO: 761694 - RNA, 18 nt, Human
gguuugguguuuuuuuug

SEQ ID NO: 761695 - RNA, 22 nt, Human
guaaaagauguccaauugcaga

SEQ ID NO: 761696 - RNA, 24 nt, Human
guauuuuuuuuuaaaugaagaugg

SEQ ID NO: 761697 - RNA, 20 nt, Human
gugauguugggugaccucug

SEQ ID NO: 761698 - RNA, 19 nt, Human
uaaaagccaggaaacaggu

SEQ ID NO: 761699 - RNA, 21 nt, Human
uaagcccacaaagaaggaacu

SEQ ID NO: 761700 - RNA, 21 nt, Human
uacaacugacacuccaaacag

SEQ ID NO: 761701 - RNA, 23 nt, Human
uacacaugaagcgggagcuacac

SEQ ID NO: 761702 - RNA, 20 nt, Human
uacaccugguucucccauga

SEQ ID NO: 761703 - RNA, 21 nt, Human
uacacugcgaucacccugccu

SEQ ID NO: 761704 - RNA, 24 nt, Human
uacauauauauacacauauguaug

SEQ ID NO: 761705 - RNA, 20 nt, Human
uaccuuaaaagccaggaaac

SEQ ID NO: 761706 - RNA, 20 nt, Human
uacucucacucccaaauucu

SEQ ID NO: 761707 - RNA, 27 nt, Human
uagacaacagcagguacgaaugaccuu

SEQ ID NO: 761708 - RNA, 20 nt, Human
uagacucaggucuaguuuga

SEQ ID NO: 761709 - RNA, 22 nt, Human
uagcaaagcgauggcucucccg

SEQ ID NO: 761710 - RNA, 18 nt, Human
uaggauuaugggaaaccu

SEQ ID NO: 761711 - RNA, 21 nt, Human
uaggauuaugggaaaccuauu

SEQ ID NO: 761712 - RNA, 19 nt, Human
uaggcguuaacaacuugca

SEQ ID NO: 761713 - RNA, 21 nt, Human
uaguuuacauauauauacaca

SEQ ID NO: 761714 - RNA, 21 nt, Human
uauagcccggugucuguuucc

SEQ ID NO: 761715 - RNA, 24 nt, Human
uauauacacauauguauguaugcg

SEQ ID NO: 761716 - RNA, 24 nt, Human
uauauauacacauauguauguaug

SEQ ID NO: 761717 - RNA, 21 nt, Human
uaucacuuuuagucagagggu

SEQ ID NO: 761718 - RNA, 22 nt, Human
uaucauggacuuuuucuugggu

SEQ ID NO: 761719 - RNA, 22 nt, Human
uauccaaacagcuuccuuuucu

SEQ ID NO: 761720 - RNA, 21 nt, Human
uauggggaaugugguggaggc

SEQ ID NO: 761721 - RNA, 21 nt, Human
ucaaagcagaucccaaaacca

SEQ ID NO: 761722 - RNA, 22 nt, Human
ucaaagcagaucccaaaaccaa

SEQ ID NO: 761723 - RNA, 22 nt, Human
ucaccagcauuuuuucagccau

SEQ ID NO: 761724 - RNA, 18 nt, Human
ucccaugauagcuggaag

SEQ ID NO: 761725 - RNA, 19 nt, Human
uccuugagcuaugcuguga

SEQ ID NO: 761726 - RNA, 19 nt, Human
ucgcccccucucggagccc

SEQ ID NO: 761727 - RNA, 21 nt, Human
ucuucaauugcuuggauucau

SEQ ID NO: 761728 - RNA, 18 nt, Human
ucuucuggcaccaacacc

SEQ ID NO: 761729 - RNA, 23 nt, Human
ugaaaggagcacauuguggggua

SEQ ID NO: 761730 - RNA, 25 nt, Human
ugaacaacaaagcaaagcuagccua

SEQ ID NO: 761731 - RNA, 23 nt, Human
ugaacacuacuucuauuuacaaa

SEQ ID NO: 761732 - RNA, 28 nt, Human
ugaagaugggaccucaaagcagauccca

SEQ ID NO: 761733 - RNA, 19 nt, Human
ugaagcaaaaggaugagug

SEQ ID NO: 761734 - RNA, 27 nt, Human
ugaagguuuucauuugcaaguuuuuaa

SEQ ID NO: 761735 - RNA, 24 nt, Human
ugacaauaucaccagcauuuuuuc

SEQ ID NO: 761736 - RNA, 22 nt, Human
ugagaaaggugccucucccucc

SEQ ID NO: 761737 - RNA, 22 nt, Human
ugagauaucaguaucugaagca

SEQ ID NO: 761738 - RNA, 22 nt, Human
ugaguucuaagucaaguauccu

SEQ ID NO: 761739 - RNA, 21 nt, Human
ugauaaucggggucucagggg

SEQ ID NO: 761740 - RNA, 19 nt, Human
ugcaaguuuuuaacacuga

SEQ ID NO: 761741 - RNA, 21 nt, Human
ugcaauguauaaaaaaaaaau

SEQ ID NO: 761742 - RNA, 21 nt, Human
ugcaauugucaaggccugaaa

SEQ ID NO: 761743 - RNA, 19 nt, Human
ugccucucccuccaaaaau

SEQ ID NO: 761744 - RNA, 23 nt, Human
ugcuggaaaucugagaaaauacc

SEQ ID NO: 761745 - RNA, 22 nt, Human
uggaaaucugagaaaauaccca

SEQ ID NO: 761746 - RNA, 22 nt, Human
uggcaaacacccauaacuuagc

SEQ ID NO: 761747 - RNA, 20 nt, Human
uggcaugagggcaucauuau

SEQ ID NO: 761748 - RNA, 21 nt, Human
uggcauuuugagaucuauacu

SEQ ID NO: 761749 - RNA, 18 nt, Human
ugggugaccucuggaagc

SEQ ID NO: 761750 - RNA, 27 nt, Human
uggguugauuuauaaauugggacaccu

SEQ ID NO: 761751 - RNA, 23 nt, Human
ugguaucauggacuuuuucuugg

SEQ ID NO: 761752 - RNA, 18 nt, Human
ugguuuuuguaaaagaug

SEQ ID NO: 761753 - RNA, 18 nt, Human
uguauacagaauauguau

SEQ ID NO: 761754 - RNA, 18 nt, Human
uguauacagaauauguau

SEQ ID NO: 761755 - RNA, 21 nt, Human
uguguauacagaauauguaug

SEQ ID NO: 761756 - RNA, 23 nt, Human
uguguauacagaauauguaugua

SEQ ID NO: 761757 - RNA, 21 nt, Human
uguugcacuaaaaugcacgug

SEQ ID NO: 761758 - RNA, 23 nt, Human
uguugggugaccucuggaagcuc

SEQ ID NO: 761759 - RNA, 20 nt, Human
uuacauccuguuugcuggaa

SEQ ID NO: 761760 - RNA, 24 nt, Human
uuaccacaucuagcgcuuaacaaa

SEQ ID NO: 761761 - RNA, 23 nt, Human
uuaggcguuaacaacuugcagcu

SEQ ID NO: 761762 - RNA, 21 nt, Human
uucagccauggccaaagcaga

SEQ ID NO: 761763 - RNA, 22 nt, Human
uuggcauuuugagaucuauacu

SEQ ID NO: 761764 - RNA, 18 nt, Human
uuuacauauauauacaca

SEQ ID NO: 761765 - RNA, 23 nt, Human
uuuacauauauauacacauaugu

SEQ ID NO: 761766 - RNA, 24 nt, Human
uuuacauauauauacacauaugua

SEQ ID NO: 761767 - RNA, 22 nt, Human
uuucauggcauuuaccacaucu

SEQ ID NO: 761768 - RNA, 24 nt, Human
uuuuagcagaugaucggaaaggau

SEQ ID NO: 761769 - RNA, 18 nt, Human
uuuuuagauggaugcugg

SEQ ID NO: 761770 - RNA, 22 nt, Human
aaauauuaaaauacuaugagcu

SEQ ID NO: 761771 - RNA, 23 nt, Human
aacaggcucuagacuccggaaga

SEQ ID NO: 761772 - RNA, 19 nt, Human
aagagcccgcccgagccgc

SEQ ID NO: 761773 - RNA, 22 nt, Human
aagagcccgcccgagccgcucc

SEQ ID NO: 761774 - RNA, 22 nt, Human
aaggcaaaaaaaagaucaaaaa

SEQ ID NO: 761775 - RNA, 20 nt, Human
aauauaaacauaaacuaacc

SEQ ID NO: 761776 - RNA, 20 nt, Human
aaugacuauuuuaucauuuu

SEQ ID NO: 761777 - RNA, 23 nt, Human
agacuccggaagagcuguaagcc

SEQ ID NO: 761778 - RNA, 21 nt, Human
agccccggccggcccgccucc

SEQ ID NO: 761779 - RNA, 24 nt, Human
agcuggcugagcgucaagagcccg

SEQ ID NO: 761780 - RNA, 20 nt, Human
aggcaaaaaaaagaucaaaa

SEQ ID NO: 761781 - RNA, 27 nt, Human
aggcaaaaaaaagaucaaaagggaccc

SEQ ID NO: 761782 - RNA, 21 nt, Human
aggcuucuggcacauaaaaug

SEQ ID NO: 761783 - RNA, 22 nt, Human
auacauuugccaaaauguuccc

SEQ ID NO: 761784 - RNA, 20 nt, Human
caaauauaaagucuaugaau

SEQ ID NO: 761785 - RNA, 22 nt, Human
caacucuuaaggcaaaaaaaag

SEQ ID NO: 761786 - RNA, 23 nt, Human
cagaacaccaacaggcucuagac

SEQ ID NO: 761787 - RNA, 21 nt, Human
caggcucuagacuccggaaga

SEQ ID NO: 761788 - RNA, 21 nt, Human
caucugaacuauauaaugacu

SEQ ID NO: 761789 - RNA, 23 nt, Human
cauuguuuugcuuaacaguuuua

SEQ ID NO: 761790 - RNA, 24 nt, Human
cauuuuacuugaauuaaaaccaga

SEQ ID NO: 761791 - RNA, 19 nt, Human
cccauaaaauugacaguga

SEQ ID NO: 761792 - RNA, 23 nt, Human
ccccggccggcccgccucccggg

SEQ ID NO: 761793 - RNA, 21 nt, Human
ccgagccgcuccagccccggc

SEQ ID NO: 761794 - RNA, 19 nt, Human
cuaaaucauucuuucagcc

SEQ ID NO: 761795 - RNA, 21 nt, Human
cuauguuuguccuaguuguau

SEQ ID NO: 761796 - RNA, 18 nt, Human
cuccagccccggccggcc

SEQ ID NO: 761797 - RNA, 21 nt, Human
cugcuggggugggagaggccg

SEQ ID NO: 761798 - RNA, 26 nt, Human
cuuaaggcaaaaaaaagaucaaaaaa

SEQ ID NO: 761799 - RNA, 21 nt, Human
cuuauaaauauuuccaauugc

SEQ ID NO: 761800 - RNA, 22 nt, Human
cuucuggcauuaaaagccacaa

SEQ ID NO: 761801 - RNA, 19 nt, Human
cuugaauuaaaaccagaau

SEQ ID NO: 761802 - RNA, 20 nt, Human
gagcgaagcuggcugagcgu

SEQ ID NO: 761803 - RNA, 19 nt, Human
gcaaaaaaaagaucaaaaa

SEQ ID NO: 761804 - RNA, 22 nt, Human
gcauuaaaagccacaacacaaa

SEQ ID NO: 761805 - RNA, 19 nt, Human
gcccgagccgcuccagccc

SEQ ID NO: 761806 - RNA, 21 nt, Human
gccggcgggucagggcgggac

SEQ ID NO: 761807 - RNA, 20 nt, Human
gcuccagccccggccggccc

SEQ ID NO: 761808 - RNA, 19 nt, Human
gugcgcuuccaccugcggg

SEQ ID NO: 761809 - RNA, 19 nt, Human
uaaacauaaacuaaccccu

SEQ ID NO: 761810 - RNA, 24 nt, Human
uaaagauuaaaaaaacaagaguuc

SEQ ID NO: 761811 - RNA, 25 nt, Human
uaaagucuaugaaucuuauacuuuu

SEQ ID NO: 761812 - RNA, 20 nt, Human
uaaguucuaaagauuaaaaa

SEQ ID NO: 761813 - RNA, 20 nt, Human
uaaugacuauuuuaucauuu

SEQ ID NO: 761814 - RNA, 20 nt, Human
uacacugaggcagcaaaugu

SEQ ID NO: 761815 - RNA, 19 nt, Human
uauaaauucugguaacuuu

SEQ ID NO: 761816 - RNA, 23 nt, Human
uauacagaaaauauuuaaaauuc

SEQ ID NO: 761817 - RNA, 21 nt, Human
uaucagcauuuucacagaaag

SEQ ID NO: 761818 - RNA, 21 nt, Human
ucccgaggccggagcgaagcu

SEQ ID NO: 761819 - RNA, 18 nt, Human
ucuuaaggcaaaaaaaag

SEQ ID NO: 761820 - RNA, 22 nt, Human
ucuucuggcauuaaaagccaca

SEQ ID NO: 761821 - RNA, 18 nt, Human
ugaagugcaguggugugg

SEQ ID NO: 761822 - RNA, 19 nt, Human
ugaagugcagugguguggc

SEQ ID NO: 761823 - RNA, 22 nt, Human
ugaagugcagugguguggcagg

SEQ ID NO: 761824 - RNA, 26 nt, Human
ugaagugcagugguguggggcucuag

SEQ ID NO: 761825 - RNA, 19 nt, Human
ugcagugguguggcagggu

SEQ ID NO: 761826 - RNA, 22 nt, Human
ugggagaggccggcgggucagg

SEQ ID NO: 761827 - RNA, 19 nt, Human
uggggugggagaggccggc

SEQ ID NO: 761828 - RNA, 22 nt, Human
uggggugggagaggccggcggg

SEQ ID NO: 761829 - RNA, 22 nt, Human
uggucugaaguggaagugaagu

SEQ ID NO: 761830 - RNA, 21 nt, Human
uguaaaaaaugaaaaucauuu

SEQ ID NO: 761831 - RNA, 18 nt, Human
uguacaucugaauauaca

SEQ ID NO: 761832 - RNA, 20 nt, Human
uguacaucugaauauacauu

SEQ ID NO: 761833 - RNA, 18 nt, Human
ugucauacaaauauaaag

SEQ ID NO: 761834 - RNA, 25 nt, Human
uuaaauucuuaaaguagggacagaa

SEQ ID NO: 761835 - RNA, 23 nt, Human
uuaaguucuaaagauuaaaaaaa

SEQ ID NO: 761836 - RNA, 23 nt, Human
uucagaauaagugagcaauuaaa

SEQ ID NO: 761837 - RNA, 22 nt, Human
uuugccaaaauguuccauuagu

SEQ ID NO: 761838 - RNA, 26 nt, Human
aaaauacacacacuaaauauacaaug

SEQ ID NO: 761839 - RNA, 19 nt, Human
aaaauauaaaaauaagaaa

SEQ ID NO: 761840 - RNA, 23 nt, Human
aaaaugccacaucagauuaaaug

SEQ ID NO: 761841 - RNA, 22 nt, Human
aaagaguauuauaucaaugaua

SEQ ID NO: 761842 - RNA, 18 nt, Human
aacuugcuccgucaacug

SEQ ID NO: 761843 - RNA, 19 nt, Human
aagaagaggacuggacaug

SEQ ID NO: 761844 - RNA, 19 nt, Human
aagcacuuaacacuggugg

SEQ ID NO: 761845 - RNA, 24 nt, Human
aaggccuuccugggggcugcccag

SEQ ID NO: 761846 - RNA, 20 nt, Human
acccaacagggcaucgggca

SEQ ID NO: 761847 - RNA, 18 nt, Human
accccauuguccaagcag

SEQ ID NO: 761848 - RNA, 25 nt, Human
acucaguggcucugacaacagaugu

SEQ ID NO: 761849 - RNA, 23 nt, Human
acugcauucuaaaucaccacauc

SEQ ID NO: 761850 - RNA, 20 nt, Human
agaaacacacacugcuuuga

SEQ ID NO: 761851 - RNA, 21 nt, Human
agaagaaaagauggcagggag

SEQ ID NO: 761852 - RNA, 21 nt, Human
agaugcguuugcucgguggca

SEQ ID NO: 761853 - RNA, 18 nt, Human
agauguagagaaggagau

SEQ ID NO: 761854 - RNA, 20 nt, Human
agauguagagaaggagauua

SEQ ID NO: 761855 - RNA, 19 nt, Human
agcaacagaaccaagguca

SEQ ID NO: 761856 - RNA, 24 nt, Human
agcagaagaaaagauggcagggag

SEQ ID NO: 761857 - RNA, 18 nt, Human
agcaggugcaccagcccc

SEQ ID NO: 761858 - RNA, 19 nt, Human
aggcaggaaacaaggcaag

SEQ ID NO: 761859 - RNA, 20 nt, Human
aggcaggaaacaaggcaagg

SEQ ID NO: 761860 - RNA, 18 nt, Human
aggcauggcuuuguuucu

SEQ ID NO: 761861 - RNA, 20 nt, Human
aggcugcagcagguccagcc

SEQ ID NO: 761862 - RNA, 21 nt, Human
agggaggggguaguggaagac

SEQ ID NO: 761863 - RNA, 23 nt, Human
agggaggggguaguggaagacug

SEQ ID NO: 761864 - RNA, 22 nt, Human
aggugcaccagcccccuggugg

SEQ ID NO: 761865 - RNA, 18 nt, Human
agguuccagcagagggaa

SEQ ID NO: 761866 - RNA, 24 nt, Human
aucuggacggcugacucacaaggg

SEQ ID NO: 761867 - RNA, 22 nt, Human
caacagggcaucgggcaaccug

SEQ ID NO: 761868 - RNA, 26 nt, Human
caacuccccaaaguagcagaagaaaa

SEQ ID NO: 761869 - RNA, 22 nt, Human
caagugacagagggcuuuagca

SEQ ID NO: 761870 - RNA, 25 nt, Human
caauaccacaagagacauacagaag

SEQ ID NO: 761871 - RNA, 21 nt, Human
caaugccaggaguuacuuuaa

SEQ ID NO: 761872 - RNA, 18 nt, Human
cacaaggucuacagaugg

SEQ ID NO: 761873 - RNA, 22 nt, Human
caccacaucauucccaacuugu

SEQ ID NO: 761874 - RNA, 19 nt, Human
cacccaugaauccagaagc

SEQ ID NO: 761875 - RNA, 19 nt, Human
caccccccgcaaccccacu

SEQ ID NO: 761876 - RNA, 24 nt, Human
cagcagagggaagaagaggacugg

SEQ ID NO: 761877 - RNA, 21 nt, Human
cagcaggugcaccagcccccu

SEQ ID NO: 761878 - RNA, 21 nt, Human
caggagagcucaggcuggcug

SEQ ID NO: 761879 - RNA, 20 nt, Human
caggcaguccccccaccccc

SEQ ID NO: 761880 - RNA, 21 nt, Human
caggcaguccccccacccccc

SEQ ID NO: 761881 - RNA, 23 nt, Human
caguacuguguacaacauauaaa

SEQ ID NO: 761882 - RNA, 20 nt, Human
cauacuuacagaagccaaaa

SEQ ID NO: 761883 - RNA, 25 nt, Human
cauagagcauacuuacagaagccaa

SEQ ID NO: 761884 - RNA, 20 nt, Human
caugaauccagaagcacuuu

SEQ ID NO: 761885 - RNA, 23 nt, Human
ccaaagguuccagcagagggaag

SEQ ID NO: 761886 - RNA, 19 nt, Human
ccagaagcacuuaacacug

SEQ ID NO: 761887 - RNA, 21 nt, Human
ccagcagagggaagaagagga

SEQ ID NO: 761888 - RNA, 22 nt, Human
cccacagcucuccacaucagcc

SEQ ID NO: 761889 - RNA, 23 nt, Human
cccauuguccaagcagagcuauu

SEQ ID NO: 761890 - RNA, 20 nt, Human
ccccaaccccauuguccaag

SEQ ID NO: 761891 - RNA, 21 nt, Human
ccccaccccccgcaaccccac

SEQ ID NO: 761892 - RNA, 20 nt, Human
ccccauuguccaagcagagc

SEQ ID NO: 761893 - RNA, 20 nt, Human
cccccaccccccgcaacccc

SEQ ID NO: 761894 - RNA, 25 nt, Human
cccccaccccccgcaaccccacucc

SEQ ID NO: 761895 - RNA, 18 nt, Human
cccccgcaaccccacucc

SEQ ID NO: 761896 - RNA, 22 nt, Human
cccccgcaaccccacuccgugc

SEQ ID NO: 761897 - RNA, 23 nt, Human
cccgcaaccccacuccgugccac

SEQ ID NO: 761898 - RNA, 18 nt, Human
ccucuggcuccucucccu

SEQ ID NO: 761899 - RNA, 21 nt, Human
ccucugggagucaggcagucc

SEQ ID NO: 761900 - RNA, 19 nt, Human
ccuggccaucaacucccca

SEQ ID NO: 761901 - RNA, 24 nt, Human
cgcaaccccacuccgugccacauu

SEQ ID NO: 761902 - RNA, 24 nt, Human
cgucaaaaggagccucacaguccc

SEQ ID NO: 761903 - RNA, 21 nt, Human
cuaaaucaccacaucauuccc

SEQ ID NO: 761904 - RNA, 18 nt, Human
cucuccacaucagccgug

SEQ ID NO: 761905 - RNA, 22 nt, Human
cucugagauucuguagaacagg

SEQ ID NO: 761906 - RNA, 20 nt, Human
cuguagcuggauggcgagac

SEQ ID NO: 761907 - RNA, 21 nt, Human
gaaagacaacccuauucccca

SEQ ID NO: 761908 - RNA, 19 nt, Human
gaagagacguucauguucu

SEQ ID NO: 761909 - RNA, 22 nt, Human
gaaggccuuccugggggcugcc

SEQ ID NO: 761910 - RNA, 22 nt, Human
gagaaaaaaaccuuucagauaa

SEQ ID NO: 761911 - RNA, 21 nt, Human
gcagaagaaaagauggcaggg

SEQ ID NO: 761912 - RNA, 21 nt, Human
gcagcccaauggguuauaccc

SEQ ID NO: 761913 - RNA, 18 nt, Human
gcuggauggcgagaccac

SEQ ID NO: 761914 - RNA, 18 nt, Human
gcuggcuucuuuccuggc

SEQ ID NO: 761915 - RNA, 18 nt, Human
gcuucuuuccuggccauc

SEQ ID NO: 761916 - RNA, 18 nt, Human
ggcaggcugacuguggcu

SEQ ID NO: 761917 - RNA, 20 nt, Human
ggcauggcuuuguuucuucc

SEQ ID NO: 761918 - RNA, 23 nt, Human
gggaggggguaguggaagacugg

SEQ ID NO: 761919 - RNA, 23 nt, Human
gggcagcccaauggguuauaccc

SEQ ID NO: 761920 - RNA, 18 nt, Human
ggggaaggcaagagugcu

SEQ ID NO: 761921 - RNA, 19 nt, Human
guauugcugugacaggugg

SEQ ID NO: 761922 - RNA, 23 nt, Human
gucacauauggcagcaagcagcc

SEQ ID NO: 761923 - RNA, 21 nt, Human
guccaaagugacagggaggau

SEQ ID NO: 761924 - RNA, 19 nt, Human
gucuacagauggcauuuuc

SEQ ID NO: 761925 - RNA, 23 nt, Human
guuccagcagagggaagaagagg

SEQ ID NO: 761926 - RNA, 26 nt, Human
uaaaaauaagaaacacacacugcuuu

SEQ ID NO: 761927 - RNA, 22 nt, Human
uaaaaugacuuucacauacaca

SEQ ID NO: 761928 - RNA, 26 nt, Human
uaaaaugacuuucacauacacaggug

SEQ ID NO: 761929 - RNA, 22 nt, Human
uaaacagacgcuuaaguugaca

SEQ ID NO: 761930 - RNA, 24 nt, Human
uaagaaacacacacugcuuugaaa

SEQ ID NO: 761931 - RNA, 18 nt, Human
uaagcaagaacccucaac

SEQ ID NO: 761932 - RNA, 21 nt, Human
uacaauacauccauuuacaga

SEQ ID NO: 761933 - RNA, 18 nt, Human
uacagaagcagugcuuuc

SEQ ID NO: 761934 - RNA, 18 nt, Human
uacaucguuuucaccacu

SEQ ID NO: 761935 - RNA, 25 nt, Human
uaccacaagagacauacagaagcag

SEQ ID NO: 761936 - RNA, 22 nt, Human
uacuuuaacccugugcuggcuu

SEQ ID NO: 761937 - RNA, 23 nt, Human
uagacccacagcucuccacauca

SEQ ID NO: 761938 - RNA, 26 nt, Human
ucaaaauacacacacuaaauauacaa

SEQ ID NO: 761939 - RNA, 20 nt, Human
ucaccugcaaacaucuggac

SEQ ID NO: 761940 - RNA, 19 nt, Human
ucacucaugcuucagauga

SEQ ID NO: 761941 - RNA, 20 nt, Human
ucaggcuggcuggccuuggg

SEQ ID NO: 761942 - RNA, 19 nt, Human
ucaucaagagauacaucgu

SEQ ID NO: 761943 - RNA, 21 nt, Human
uccaagcagagcuauucaagg

SEQ ID NO: 761944 - RNA, 26 nt, Human
uccacaucagccguguccucuggcuc

SEQ ID NO: 761945 - RNA, 18 nt, Human
uccagaagcacuuaacac

SEQ ID NO: 761946 - RNA, 21 nt, Human
uccagaagcacuuaacacugg

SEQ ID NO: 761947 - RNA, 22 nt, Human
uccccaaaguagcagaagaaaa

SEQ ID NO: 761948 - RNA, 21 nt, Human
uccccccaccccccgcaaccc

SEQ ID NO: 761949 - RNA, 22 nt, Human
uccccccaccccccgcaacccc

SEQ ID NO: 761950 - RNA, 19 nt, Human
uccucuggcuccucucccu

SEQ ID NO: 761951 - RNA, 22 nt, Human
uccucuggcuccucucccucca

SEQ ID NO: 761952 - RNA, 20 nt, Human
ucgaagauguuucaucaaga

SEQ ID NO: 761953 - RNA, 21 nt, Human
ucucccuccacuguagcugga

SEQ ID NO: 761954 - RNA, 19 nt, Human
ucugacaacagauguagag

SEQ ID NO: 761955 - RNA, 21 nt, Human
ucugcaggcugcagcaggucc

SEQ ID NO: 761956 - RNA, 21 nt, Human
ucuggaaggccuuccuggggg

SEQ ID NO: 761957 - RNA, 18 nt, Human
ucugucuugcaggagagc

SEQ ID NO: 761958 - RNA, 18 nt, Human
ucugucuugcaggagagc

SEQ ID NO: 761959 - RNA, 19 nt, Human
ucuucccaaaccugccuga

SEQ ID NO: 761960 - RNA, 22 nt, Human
ugaaaagcaagaugcguuugcu

SEQ ID NO: 761961 - RNA, 19 nt, Human
ugacagguggugacccugg

SEQ ID NO: 761962 - RNA, 21 nt, Human
ugacgaaaaugccacaucaga

SEQ ID NO: 761963 - RNA, 25 nt, Human
ugagaaaaaaaccuuucagauaaaa

SEQ ID NO: 761964 - RNA, 26 nt, Human
ugaucuaaauuaagcaagaacccuca

SEQ ID NO: 761965 - RNA, 26 nt, Human
uggaucacacugagacagaaaaguuc

SEQ ID NO: 761966 - RNA, 24 nt, Human
uggauggcgagaccacugcagggc

SEQ ID NO: 761967 - RNA, 25 nt, Human
uggcaaaugacucaacugugacccu

SEQ ID NO: 761968 - RNA, 23 nt, Human
uggcagggaggggguaguggaag

SEQ ID NO: 761969 - RNA, 18 nt, Human
uggcuccucucccuccac

SEQ ID NO: 761970 - RNA, 21 nt, Human
uguagaacaggaugcguucga

SEQ ID NO: 761971 - RNA, 23 nt, Human
uguccaagcagagcuauucaagg

SEQ ID NO: 761972 - RNA, 21 nt, Human
ugugacccugaggucagcagg

SEQ ID NO: 761973 - RNA, 18 nt, Human
ugugcuggcuucuuuccu

SEQ ID NO: 761974 - RNA, 23 nt, Human
uguguacaacauauaaauacaug

SEQ ID NO: 761975 - RNA, 21 nt, Human
uguuucuucccaaaccugccu

SEQ ID NO: 761976 - RNA, 23 nt, Human
uuaaugcaaugaugcugaagaug

SEQ ID NO: 761977 - RNA, 20 nt, Human
uuccuggccaucaacucccc

SEQ ID NO: 761978 - RNA, 24 nt, Human
uugcaggagagcucaggcuggcug

SEQ ID NO: 761979 - RNA, 21 nt, Human
uuuccuggccaucaacucccc

SEQ ID NO: 761980 - RNA, 22 nt, Human
aaaaaaaaaaaaaaagaaagaa

SEQ ID NO: 761981 - RNA, 26 nt, Human
aaaaaaaaaagaaagaaagaaaagaa

SEQ ID NO: 761982 - RNA, 23 nt, Human
aaaaagaaaaaagauauuuacaa

SEQ ID NO: 761983 - RNA, 22 nt, Human
aaaccaauguauguugauccca

SEQ ID NO: 761984 - RNA, 23 nt, Human
aaagaaaaaagauauuuacaagu

SEQ ID NO: 761985 - RNA, 25 nt, Human
aaagaccugcucuaaauccaaauaa

SEQ ID NO: 761986 - RNA, 25 nt, Human
aaauucuuuucaaaucaauagaucc

SEQ ID NO: 761987 - RNA, 23 nt, Human
aacacuuuuuaaaaaauaaaugg

SEQ ID NO: 761988 - RNA, 18 nt, Human
aagaaaaaaaaagaccug

SEQ ID NO: 761989 - RNA, 19 nt, Human
aagaaaaaaaaagaccugc

SEQ ID NO: 761990 - RNA, 24 nt, Human
aagauuuuuccaaagcuuucacag

SEQ ID NO: 761991 - RNA, 20 nt, Human
aaucgccuucuccccccccc

SEQ ID NO: 761992 - RNA, 21 nt, Human
aaucuggacaaaguggaauuu

SEQ ID NO: 761993 - RNA, 19 nt, Human
aauuugcaugguuguccuc

SEQ ID NO: 761994 - RNA, 21 nt, Human
acagacaggucguaaaauuac

SEQ ID NO: 761995 - RNA, 21 nt, Human
accacuucuacgcugccccca

SEQ ID NO: 761996 - RNA, 19 nt, Human
acuguccacucuucagcag

SEQ ID NO: 761997 - RNA, 23 nt, Human
agagauaugccuaauuuaaacaa

SEQ ID NO: 761998 - RNA, 25 nt, Human
agagugcagcaagauaaccucacug

SEQ ID NO: 761999 - RNA, 20 nt, Human
agcacaucccauuuucagca

SEQ ID NO: 762000 - RNA, 22 nt, Human
aggccagaaaauucugggacaa

SEQ ID NO: 762001 - RNA, 23 nt, Human
agugaagaucacugaaaaagccu

SEQ ID NO: 762002 - RNA, 24 nt, Human
auaacagcaccuaaaauacuaaaa

SEQ ID NO: 762003 - RNA, 24 nt, Human
auaauccccuaagauggagacuca

SEQ ID NO: 762004 - RNA, 23 nt, Human
auacaagcacuucagaaaucaga

SEQ ID NO: 762005 - RNA, 21 nt, Human
auacacaaagggaagagacca

SEQ ID NO: 762006 - RNA, 24 nt, Human
auuuacauauacagugaagaucac

SEQ ID NO: 762007 - RNA, 20 nt, Human
caaaguucacaagacuguga

SEQ ID NO: 762008 - RNA, 21 nt, Human
caaauucuuuucaaaucaaua

SEQ ID NO: 762009 - RNA, 18 nt, Human
cacaagacuccauaguca

SEQ ID NO: 762010 - RNA, 18 nt, Human
cagaaaauucugggacaa

SEQ ID NO: 762011 - RNA, 22 nt, Human
cagagaauacaaauacaaacac

SEQ ID NO: 762012 - RNA, 21 nt, Human
cagagugcagcaagauaaccu

SEQ ID NO: 762013 - RNA, 21 nt, Human
cagccucaagcuugaccaaaa

SEQ ID NO: 762014 - RNA, 21 nt, Human
caucaagaaaaugacaccaau

SEQ ID NO: 762015 - RNA, 22 nt, Human
ccaaaaaaaaaaaaaaaaaaaa

SEQ ID NO: 762016 - RNA, 23 nt, Human
ccaaaaaaaaaaaaaaaaaaaaa

SEQ ID NO: 762017 - RNA, 22 nt, Human
ccaaaguaagguccaacugucc

SEQ ID NO: 762018 - RNA, 23 nt, Human
ccaaauaaauuuccacuucuccc

SEQ ID NO: 762019 - RNA, 21 nt, Human
ccaccccccagaaucaauuuu

SEQ ID NO: 762020 - RNA, 23 nt, Human
ccccccccuccccuuccgcagcc

SEQ ID NO: 762021 - RNA, 21 nt, Human
ccgccgccgccgccgcaucca

SEQ ID NO: 762022 - RNA, 23 nt, Human
ccuaagauggagacucaagacau

SEQ ID NO: 762023 - RNA, 18 nt, Human
ccuccggguugccgacuc

SEQ ID NO: 762024 - RNA, 20 nt, Human
cgccgccgccgccgcauccc

SEQ ID NO: 762025 - RNA, 23 nt, Human
cguaaaauuacagacucauuggc

SEQ ID NO: 762026 - RNA, 20 nt, Human
cuacgcugcccccacccccc

SEQ ID NO: 762027 - RNA, 23 nt, Human
cucauuggcauugaacauaacaa

SEQ ID NO: 762028 - RNA, 21 nt, Human
cuccggggcucuccgggaucc

SEQ ID NO: 762029 - RNA, 21 nt, Human
cugcugaaacagaaauuaugu

SEQ ID NO: 762030 - RNA, 20 nt, Human
cuggacaaaguggaauuuca

SEQ ID NO: 762031 - RNA, 19 nt, Human
cuguacagcauuacaaaaa

SEQ ID NO: 762032 - RNA, 20 nt, Human
cuuaaguaauuuauuucuac

SEQ ID NO: 762033 - RNA, 23 nt, Human
cuucuacgcugcccccacccccc

SEQ ID NO: 762034 - RNA, 19 nt, Human
cuuuaugucuacauagcca

SEQ ID NO: 762035 - RNA, 19 nt, Human
gaagauuaagggugcccag

SEQ ID NO: 762036 - RNA, 22 nt, Human
gacucgcuacuccgcucacucc

SEQ ID NO: 762037 - RNA, 25 nt, Human
gcauccaaucgccuucucccccccc

SEQ ID NO: 762038 - RNA, 22 nt, Human
gccgcagauaaaagcuauacaa

SEQ ID NO: 762039 - RNA, 18 nt, Human
gcugcccccaccccccag

SEQ ID NO: 762040 - RNA, 21 nt, Human
ggcuaaagcaugugaccacaa

SEQ ID NO: 762041 - RNA, 20 nt, Human
uaaaagaaaaauaaucacau

SEQ ID NO: 762042 - RNA, 20 nt, Human
uaaaaugucauuuuccaaaa

SEQ ID NO: 762043 - RNA, 20 nt, Human
uaaaauguucuuaauauuuc

SEQ ID NO: 762044 - RNA, 21 nt, Human
uaaaauuacagacucauuggc

SEQ ID NO: 762045 - RNA, 22 nt, Human
uaaaauuacagacucauuggca

SEQ ID NO: 762046 - RNA, 21 nt, Human
uaaagcaugugaccacaaaug

SEQ ID NO: 762047 - RNA, 23 nt, Human
uaaagccgcagauaaaagcuaua

SEQ ID NO: 762048 - RNA, 23 nt, Human
uaacucuccaacaaauagugaca

SEQ ID NO: 762049 - RNA, 22 nt, Human
uaagauaauccccuaagaugga

SEQ ID NO: 762050 - RNA, 24 nt, Human
uaaggaaacauuucaaaaccaaug

SEQ ID NO: 762051 - RNA, 24 nt, Human
uaaguaauuuauuucuacauuuug

SEQ ID NO: 762052 - RNA, 18 nt, Human
uaaguuagaauaugauuu

SEQ ID NO: 762053 - RNA, 19 nt, Human
uacaaugaagaaaaaaaaa

SEQ ID NO: 762054 - RNA, 22 nt, Human
uacagaaaacagcacaucccau

SEQ ID NO: 762055 - RNA, 27 nt, Human
uacagcauuacaaaaaugugaaaugaa

SEQ ID NO: 762056 - RNA, 24 nt, Human
uacaguacauauuuucaaaaugaa

SEQ ID NO: 762057 - RNA, 23 nt, Human
uagcugauauacuuggauauacc

SEQ ID NO: 762058 - RNA, 23 nt, Human
uagugacaucaagaaaaugacac

SEQ ID NO: 762059 - RNA, 27 nt, Human
uauuauaauguagauuaaacaaauuug

SEQ ID NO: 762060 - RNA, 25 nt, Human
ucaaaaacaugcaacucacuauaaa

SEQ ID NO: 762061 - RNA, 22 nt, Human
ucagccucaagcuugaccaaaa

SEQ ID NO: 762062 - RNA, 24 nt, Human
uccgccgccgccgccgcauccaau

SEQ ID NO: 762063 - RNA, 22 nt, Human
ucuacacaaaaaaaaaaaaaaa

SEQ ID NO: 762064 - RNA, 24 nt, Human
ucuacgcugcccccaccccccaga

SEQ ID NO: 762065 - RNA, 25 nt, Human
ucuccgggauccgccgccgccgccg

SEQ ID NO: 762066 - RNA, 21 nt, Human
ucuggacaaaguggaauuuca

SEQ ID NO: 762067 - RNA, 19 nt, Human
ugaaaaagccuccuguugc

SEQ ID NO: 762068 - RNA, 20 nt, Human
ugaaacagaaauuauguguu

SEQ ID NO: 762069 - RNA, 23 nt, Human
ugaaaggccagaaaauucuggga

SEQ ID NO: 762070 - RNA, 21 nt, Human
ugaagaaaaaaaaagaccugc

SEQ ID NO: 762071 - RNA, 22 nt, Human
ugacaaaaauacaaagcuauuc

SEQ ID NO: 762072 - RNA, 24 nt, Human
ugacagccucucauaauuacuggu

SEQ ID NO: 762073 - RNA, 23 nt, Human
ugacauaauacuaugugauggca

SEQ ID NO: 762074 - RNA, 21 nt, Human
ugcaauuuaaucaaugacaaa

SEQ ID NO: 762075 - RNA, 21 nt, Human
ugcaucaaaggcuuuauucag

SEQ ID NO: 762076 - RNA, 20 nt, Human
ugccccaucuauuauaacca

SEQ ID NO: 762077 - RNA, 21 nt, Human
ugccccaucuauuauaaccaa

SEQ ID NO: 762078 - RNA, 24 nt, Human
ugccccaucuauuauaaccaaucu

SEQ ID NO: 762079 - RNA, 19 nt, Human
uggaauauuucuaaugugu

SEQ ID NO: 762080 - RNA, 22 nt, Human
uggcuaaagcaugugaccacaa

SEQ ID NO: 762081 - RNA, 21 nt, Human
ugucuacauagccaucgcaca

SEQ ID NO: 762082 - RNA, 21 nt, Human
ugugaaaugaaauuugcuuaa

SEQ ID NO: 762083 - RNA, 23 nt, Human
ugugauaaauuuaauaaguuaga

SEQ ID NO: 762084 - RNA, 19 nt, Human
uuaaccaugaaaaaacaua

SEQ ID NO: 762085 - RNA, 21 nt, Human
uucacaguaaaauugcagaga

SEQ ID NO: 762086 - RNA, 20 nt, Human
uugcaugguuguccuccuau

SEQ ID NO: 762087 - RNA, 22 nt, Human
uuguacugcugaaacagaaauu

SEQ ID NO: 762088 - RNA, 23 nt, Human
uuucaaaucaauagauccaauaa

SEQ ID NO: 762089 - RNA, 27 nt, Human
uuucuacacaaaaaaaaaaaaaaagaa

SEQ ID NO: 762090 - RNA, 20 nt, Human
uuuuauuauaauguagauua

SEQ ID NO: 762091 - RNA, 25 nt, Human
aaacaacgaccacgccaguucuccu

SEQ ID NO: 762092 - RNA, 18 nt, Human
aaagugcuguccauaacu

SEQ ID NO: 762093 - RNA, 28 nt, Human
aaggacacccccaccugcaagggccagg

SEQ ID NO: 762094 - RNA, 22 nt, Human
acagugcuagagugcagaaaac

SEQ ID NO: 762095 - RNA, 19 nt, Human
acccacggaaucuaaggca

SEQ ID NO: 762096 - RNA, 18 nt, Human
acccccaccugcaagggc

SEQ ID NO: 762097 - RNA, 21 nt, Human
acccccaccugcaagggcaag

SEQ ID NO: 762098 - RNA, 27 nt, Human
accuccugucagacccagacucugcug

SEQ ID NO: 762099 - RNA, 19 nt, Human
acgcacccuccaccaagag

SEQ ID NO: 762100 - RNA, 18 nt, Human
acucaggaccgcuaauaa

SEQ ID NO: 762101 - RNA, 20 nt, Human
agaacagugaaauggcaaaa

SEQ ID NO: 762102 - RNA, 26 nt, Human
agaguucuaauaagcuaagcuuaaag

SEQ ID NO: 762103 - RNA, 21 nt, Human
agcagaacagugaaauggcaa

SEQ ID NO: 762104 - RNA, 22 nt, Human
agcccauuucuuuggaauucgg

SEQ ID NO: 762105 - RNA, 18 nt, Human
agcgcuuccacacagugc

SEQ ID NO: 762106 - RNA, 20 nt, Human
agcucccaggaucuggcucc

SEQ ID NO: 762107 - RNA, 21 nt, Human
agugaaccuugcuggggccug

SEQ ID NO: 762108 - RNA, 19 nt, Human
auauucccccagcccccac

SEQ ID NO: 762109 - RNA, 20 nt, Human
auguccaucacccucaaaau

SEQ ID NO: 762110 - RNA, 18 nt, Human
caaagaaucccaauccuc

SEQ ID NO: 762111 - RNA, 24 nt, Human
caacaugcauauucccccagcccc

SEQ ID NO: 762112 - RNA, 24 nt, Human
caauaaacaccaucaucccugagu

SEQ ID NO: 762113 - RNA, 24 nt, Human
cacagacuacccagacaacacgga

SEQ ID NO: 762114 - RNA, 24 nt, Human
cacccccaccugcaagggcaagga

SEQ ID NO: 762115 - RNA, 22 nt, Human
caccugcaagggcaaggaaagc

SEQ ID NO: 762116 - RNA, 22 nt, Human
cagacaacacggacugcugaag

SEQ ID NO: 762117 - RNA, 20 nt, Human
cagcccccaccuccaucuug

SEQ ID NO: 762118 - RNA, 23 nt, Human
cagcucccaggaucuggcuccag

SEQ ID NO: 762119 - RNA, 19 nt, Human
cagugaaccuugcuggggc

SEQ ID NO: 762120 - RNA, 21 nt, Human
cagugaaccuugcuggggccu

SEQ ID NO: 762121 - RNA, 19 nt, Human
cauguccaucacccucaaa

SEQ ID NO: 762122 - RNA, 21 nt, Human
cauguccaucacccucaaaau

SEQ ID NO: 762123 - RNA, 22 nt, Human
cauucauuaacuaucugcgggg

SEQ ID NO: 762124 - RNA, 25 nt, Human
cauucauuaacuaucugcgggguug

SEQ ID NO: 762125 - RNA, 22 nt, Human
ccacggaaucuaaggcagcaca

SEQ ID NO: 762126 - RNA, 18 nt, Human
ccccggagaaggggcuuc

SEQ ID NO: 762127 - RNA, 22 nt, Human
ccugcaagggcaaggaaagcgu

SEQ ID NO: 762128 - RNA, 22 nt, Human
cuaaggcagcacaguggcuuau

SEQ ID NO: 762129 - RNA, 20 nt, Human
cucccaggaucuggcuccag

SEQ ID NO: 762130 - RNA, 20 nt, Human
cugcuccuugcugacagcuc

SEQ ID NO: 762131 - RNA, 21 nt, Human
cugcuccuugcugacagcucc

SEQ ID NO: 762132 - RNA, 21 nt, Human
gaaaacauguccaucacccuc

SEQ ID NO: 762133 - RNA, 20 nt, Human
gagaaggggcuuccccuccu

SEQ ID NO: 762134 - RNA, 21 nt, Human
gcaaggaaagcgugugcuccc

SEQ ID NO: 762135 - RNA, 25 nt, Human
gcagaaaacauguccaucacccuca

SEQ ID NO: 762136 - RNA, 23 nt, Human
gcuagagugcagaaaacaugucc

SEQ ID NO: 762137 - RNA, 23 nt, Human
ggacacccccaccugcaagggca

SEQ ID NO: 762138 - RNA, 22 nt, Human
gggaagguggggccagggcugg

SEQ ID NO: 762139 - RNA, 22 nt, Human
uaaaaacgccggcuucugcaac

SEQ ID NO: 762140 - RNA, 23 nt, Human
uaaaaacgccggcuucugcaaca

SEQ ID NO: 762141 - RNA, 24 nt, Human
uacagagcccugacuuuacauuuc

SEQ ID NO: 762142 - RNA, 23 nt, Human
uacccagacaacacggacugcug

SEQ ID NO: 762143 - RNA, 21 nt, Human
uaccugcuccuugcugacagc

SEQ ID NO: 762144 - RNA, 24 nt, Human
uacgcacccuccaccaagaguucu

SEQ ID NO: 762145 - RNA, 24 nt, Human
ucaaaauggugacgcugaccuccu

SEQ ID NO: 762146 - RNA, 18 nt, Human
uccacacagugcuagagu

SEQ ID NO: 762147 - RNA, 22 nt, Human
uccacacagugcuagagugcag

SEQ ID NO: 762148 - RNA, 18 nt, Human
ucgcuggguugacguucc

SEQ ID NO: 762149 - RNA, 18 nt, Human
ucggacagccaggcugcu

SEQ ID NO: 762150 - RNA, 24 nt, Human
ugaacaaagaaucccaauccucag

SEQ ID NO: 762151 - RNA, 23 nt, Human
ugaagccuuuucuggaaugugug

SEQ ID NO: 762152 - RNA, 22 nt, Human
ugacagccagggucggaagcac

SEQ ID NO: 762153 - RNA, 22 nt, Human
ugacauuucaaugggaaaaaga

SEQ ID NO: 762154 - RNA, 24 nt, Human
ugcaagggcaaggaaagcgugugc

SEQ ID NO: 762155 - RNA, 19 nt, Human
ugcagaaaacauguccauc

SEQ ID NO: 762156 - RNA, 21 nt, Human
ugcccagggcagaccauucau

SEQ ID NO: 762157 - RNA, 20 nt, Human
ugggaaaaagauugugcauu

SEQ ID NO: 762158 - RNA, 18 nt, Human
uuccacacagugcuagag

SEQ ID NO: 762159 - RNA, 21 nt, Human
uuccacacagugcuagagugc

SEQ ID NO: 762160 - RNA, 18 nt, Human
uucccccagcccccaccu

SEQ ID NO: 762161 - RNA, 20 nt, Human
uucccccagcccccaccucc

SEQ ID NO: 762162 - RNA, 18 nt, Human
uugcuggggccugauucu

SEQ ID NO: 762163 - RNA, 22 nt, Human
uugcuggggccugauucuuuuc

SEQ ID NO: 762164 - RNA, 28 nt, Human
aaaaaaaaacaaaaacaaaaacauugca

SEQ ID NO: 762165 - RNA, 25 nt, Human
aaaaacacaaaacaaauucagcagu

SEQ ID NO: 762166 - RNA, 24 nt, Human
aaaaacaucaaacauacucaaaaa

SEQ ID NO: 762167 - RNA, 26 nt, Human
aaacaauucuccugccucagccaccc

SEQ ID NO: 762168 - RNA, 25 nt, Human
aaacacaaaacaaauucagcagcuc

SEQ ID NO: 762169 - RNA, 18 nt, Human
aaacagacaggaauaaua

SEQ ID NO: 762170 - RNA, 20 nt, Human
aaacauacucaaaaacaggc

SEQ ID NO: 762171 - RNA, 26 nt, Human
aaagaaacaaccuaauugcaccuagg

SEQ ID NO: 762172 - RNA, 20 nt, Human
aaagacacuuuaccucugug

SEQ ID NO: 762173 - RNA, 18 nt, Human
aaagguuucagaaauucu

SEQ ID NO: 762174 - RNA, 24 nt, Human
aaagugauaggauuauaggcguga

SEQ ID NO: 762175 - RNA, 20 nt, Human
aacuaaaaacaaagaaacaa

SEQ ID NO: 762176 - RNA, 23 nt, Human
aagcuagaaaaucacucacugcu

SEQ ID NO: 762177 - RNA, 23 nt, Human
aagcugauaucgauauaacccua

SEQ ID NO: 762178 - RNA, 19 nt, Human
aaggcaguuaucuuuuaaa

SEQ ID NO: 762179 - RNA, 23 nt, Human
aauuuaugagacacuguuuucuu

SEQ ID NO: 762180 - RNA, 23 nt, Human
acaaaauccauuguuccuagaca

SEQ ID NO: 762181 - RNA, 27 nt, Human
acagacagcuccacagguaucaaaaac

SEQ ID NO: 762182 - RNA, 22 nt, Human
acagccacagaacugaaaagcc

SEQ ID NO: 762183 - RNA, 19 nt, Human
acagguaucaaaaaccaaa

SEQ ID NO: 762184 - RNA, 21 nt, Human
acagguaucaaaaaccaaagu

SEQ ID NO: 762185 - RNA, 20 nt, Human
accaaauaccaaacuacugc

SEQ ID NO: 762186 - RNA, 23 nt, Human
agaaaaucacucacugcuaaauc

SEQ ID NO: 762187 - RNA, 24 nt, Human
agagaugggguuucgucauguugg

SEQ ID NO: 762188 - RNA, 21 nt, Human
agcaaacuccuacagguaauu

SEQ ID NO: 762189 - RNA, 19 nt, Human
agccaccgcacuuggccua

SEQ ID NO: 762190 - RNA, 18 nt, Human
aggcgugagccaccgcac

SEQ ID NO: 762191 - RNA, 18 nt, Human
aggcgugagccaccgcac

SEQ ID NO: 762192 - RNA, 19 nt, Human
agggaaacagucauucaau

SEQ ID NO: 762193 - RNA, 19 nt, Human
agguuucagaaauucugau

SEQ ID NO: 762194 - RNA, 18 nt, Human
auaaaacaaguguuuccu

SEQ ID NO: 762195 - RNA, 24 nt, Human
aucaaaaagcuucacauuuauaaa

SEQ ID NO: 762196 - RNA, 23 nt, Human
augcccacguguuuaaccggcca

SEQ ID NO: 762197 - RNA, 23 nt, Human
augggguuucgucauguuggcca

SEQ ID NO: 762198 - RNA, 24 nt, Human
augggguuucgucauguuggccag

SEQ ID NO: 762199 - RNA, 24 nt, Human
caaaaaaaaaacaaaaacaaaaac

SEQ ID NO: 762200 - RNA, 22 nt, Human
caaaacugacacagcaguauua

SEQ ID NO: 762201 - RNA, 22 nt, Human
caaacaauucuccugccucagc

SEQ ID NO: 762202 - RNA, 27 nt, Human
caaacaauucuccugccucagccaccc

SEQ ID NO: 762203 - RNA, 21 nt, Human
caaagcuagaaaaucacucac

SEQ ID NO: 762204 - RNA, 24 nt, Human
caaagugauaggauuauaggcgug

SEQ ID NO: 762205 - RNA, 20 nt, Human
caacaggacagauuauuguc

SEQ ID NO: 762206 - RNA, 18 nt, Human
caacaugucaaaagacau

SEQ ID NO: 762207 - RNA, 21 nt, Human
caagcuggaaagauaaacaac

SEQ ID NO: 762208 - RNA, 18 nt, Human
caaggaaaacaaaaucaa

SEQ ID NO: 762209 - RNA, 20 nt, Human
caauagaaauaaauuguaua

SEQ ID NO: 762210 - RNA, 21 nt, Human
cacauuuuuaauaagcaccaa

SEQ ID NO: 762211 - RNA, 18 nt, Human
cacccuaucuacucaucu

SEQ ID NO: 762212 - RNA, 21 nt, Human
cacccuaucuacucaucucca

SEQ ID NO: 762213 - RNA, 21 nt, Human
cagaaaaaaugaacagagaca

SEQ ID NO: 762214 - RNA, 24 nt, Human
cagauacaaaauccauuguuccua

SEQ ID NO: 762215 - RNA, 21 nt, Human
cagcaagggaccagacauaua

SEQ ID NO: 762216 - RNA, 24 nt, Human
cagcuccacagguaucaaaaacca

SEQ ID NO: 762217 - RNA, 21 nt, Human
cagguaucaaaaaccaaagug

SEQ ID NO: 762218 - RNA, 18 nt, Human
cauguuggccaggcuggu

SEQ ID NO: 762219 - RNA, 20 nt, Human
cauguuggccaggcuggucu

SEQ ID NO: 762220 - RNA, 20 nt, Human
cauguuggccaggcuggucu

SEQ ID NO: 762221 - RNA, 24 nt, Human
cauguuggccaggcuggucuugaa

SEQ ID NO: 762222 - RNA, 22 nt, Human
cauucaauacuuaacacugagu

SEQ ID NO: 762223 - RNA, 18 nt, Human
ccaaaaacagugaaaucc

SEQ ID NO: 762224 - RNA, 22 nt, Human
ccaaagugauaggauuauaggc

SEQ ID NO: 762225 - RNA, 24 nt, Human
ccaaagugauaggauuauaggcgu

SEQ ID NO: 762226 - RNA, 24 nt, Human
ccacccaaguaguugggguuacag

SEQ ID NO: 762227 - RNA, 22 nt, Human
cccaaccuacagacagcuccac

SEQ ID NO: 762228 - RNA, 22 nt, Human
cccaaguaguugggguuacagg

SEQ ID NO: 762229 - RNA, 23 nt, Human
cccaaguaguugggguuacaggu

SEQ ID NO: 762230 - RNA, 24 nt, Human
cccaaguaguugggguuacaggua

SEQ ID NO: 762231 - RNA, 21 nt, Human
ccccuucauuaauacugucca

SEQ ID NO: 762232 - RNA, 21 nt, Human
cccuaaaaauagagaaaaaac

SEQ ID NO: 762233 - RNA, 22 nt, Human
ccuacagacagcuccacaggua

SEQ ID NO: 762234 - RNA, 24 nt, Human
ccucccagguucaaacaauucucc

SEQ ID NO: 762235 - RNA, 27 nt, Human
ccuccugucuuccacagagaagacaaa

SEQ ID NO: 762236 - RNA, 21 nt, Human
ccucugugaauaaaacaagug

SEQ ID NO: 762237 - RNA, 21 nt, Human
ccugaccucaggugaucugcc

SEQ ID NO: 762238 - RNA, 23 nt, Human
ccugaccucaggugaucugccug

SEQ ID NO: 762239 - RNA, 23 nt, Human
cgauauaacccuacuauuuacaa

SEQ ID NO: 762240 - RNA, 24 nt, Human
cgucauguuggccaggcuggucuu

SEQ ID NO: 762241 - RNA, 27 nt, Human
cgucauguuggccaggcuggucuugaa

SEQ ID NO: 762242 - RNA, 20 nt, Human
cuaaacagccacagaacuga

SEQ ID NO: 762243 - RNA, 18 nt, Human
cucacugcuaaaucaugg

SEQ ID NO: 762244 - RNA, 20 nt, Human
cucagucuuccaggacuugg

SEQ ID NO: 762245 - RNA, 26 nt, Human
cuccugaccucaggugaucugccugc

SEQ ID NO: 762246 - RNA, 20 nt, Human
cucuguugcccaggcuggaa

SEQ ID NO: 762247 - RNA, 20 nt, Human
cugacacagcaguauuaaaa

SEQ ID NO: 762248 - RNA, 23 nt, Human
cugcagccuccgccucccagguu

SEQ ID NO: 762249 - RNA, 21 nt, Human
cuuaaaacaauuaagcuagca

SEQ ID NO: 762250 - RNA, 19 nt, Human
cuuccacagagaagacaaa

SEQ ID NO: 762251 - RNA, 21 nt, Human
cuugcucuguugcccaggcug

SEQ ID NO: 762252 - RNA, 24 nt, Human
cuuuuuaguagagaugggguuucg

SEQ ID NO: 762253 - RNA, 19 nt, Human
gaacugaaaagccuuggca

SEQ ID NO: 762254 - RNA, 19 nt, Human
gacacuguuuucuucuuaa

SEQ ID NO: 762255 - RNA, 21 nt, Human
gaccacaaugccaucacaaaa

SEQ ID NO: 762256 - RNA, 22 nt, Human
gaccucaggugaucugccugcc

SEQ ID NO: 762257 - RNA, 23 nt, Human
gagaugggguuucgucauguugg

SEQ ID NO: 762258 - RNA, 24 nt, Human
gagaugggguuucgucauguuggc

SEQ ID NO: 762259 - RNA, 18 nt, Human
gauuauaggcgugagcca

SEQ ID NO: 762260 - RNA, 20 nt, Human
gauuauaggcgugagccacc

SEQ ID NO: 762261 - RNA, 23 nt, Human
gauuauaggcgugagccaccgca

SEQ ID NO: 762262 - RNA, 18 nt, Human
gcaaggaaaacaaaauca

SEQ ID NO: 762263 - RNA, 22 nt, Human
gcagccuccgccucccagguuc

SEQ ID NO: 762264 - RNA, 24 nt, Human
gcccaggcuggaaugcaauggugu

SEQ ID NO: 762265 - RNA, 25 nt, Human
gcucuguugcccaggcuggaaugca

SEQ ID NO: 762266 - RNA, 23 nt, Human
gcuggucuugaacuccugaccuc

SEQ ID NO: 762267 - RNA, 20 nt, Human
gcuguagccuccugucuucc

SEQ ID NO: 762268 - RNA, 23 nt, Human
ggaaagauaaacaacaugacagg

SEQ ID NO: 762269 - RNA, 22 nt, Human
ggauuauaggcgugagccaccg

SEQ ID NO: 762270 - RNA, 24 nt, Human
ggcuggucuugaacuccugaccuc

SEQ ID NO: 762271 - RNA, 22 nt, Human
gggguuucgucauguuggccag

SEQ ID NO: 762272 - RNA, 24 nt, Human
ggguuacagguauaugccaccaug

SEQ ID NO: 762273 - RNA, 19 nt, Human
ggucuugaacuccugaccu

SEQ ID NO: 762274 - RNA, 24 nt, Human
gucaacuugcuuccaguucaaaac

SEQ ID NO: 762275 - RNA, 22 nt, Human
guccuuggucaacuugcuucca

SEQ ID NO: 762276 - RNA, 24 nt, Human
gucuugcucuguugcccaggcugg

SEQ ID NO: 762277 - RNA, 21 nt, Human
guggugaacacgaugaagaaa

SEQ ID NO: 762278 - RNA, 21 nt, Human
guuccuguccccuuuuccuuc

SEQ ID NO: 762279 - RNA, 27 nt, Human
uaaaaacaucaaacauacucaaaaaca

SEQ ID NO: 762280 - RNA, 23 nt, Human
uaaauuaaaagaggcuacuauga

SEQ ID NO: 762281 - RNA, 24 nt, Human
uaaauuaaaagaggcuacuaugau

SEQ ID NO: 762282 - RNA, 23 nt, Human
uaagagccaaagcuagaaaauca

SEQ ID NO: 762283 - RNA, 23 nt, Human
uaaguagauaacauguuaaaugu

SEQ ID NO: 762284 - RNA, 22 nt, Human
uaagugcaauuuaauauaugaa

SEQ ID NO: 762285 - RNA, 24 nt, Human
uaaguuaauaauguuccacauuua

SEQ ID NO: 762286 - RNA, 22 nt, Human
uaauaagcaccaaauaccaaac

SEQ ID NO: 762287 - RNA, 24 nt, Human
uaauuuuuugucuuuuuaguagag

SEQ ID NO: 762288 - RNA, 25 nt, Human
uaauuuuuugucuuuuuaguagaga

SEQ ID NO: 762289 - RNA, 21 nt, Human
uacaaugucauuucccuaguu

SEQ ID NO: 762290 - RNA, 23 nt, Human
uacacugcaccuguguuaccaaa

SEQ ID NO: 762291 - RNA, 24 nt, Human
uacagguauaugccaccaugccca

SEQ ID NO: 762292 - RNA, 22 nt, Human
uaccaaaaaaaaaacaaaaaca

SEQ ID NO: 762293 - RNA, 23 nt, Human
uaccaaaaaaaaaacaaaaacaa

SEQ ID NO: 762294 - RNA, 24 nt, Human
uaccaaaaaaaaaacaaaaacaaa

SEQ ID NO: 762295 - RNA, 25 nt, Human
uaccaaaaaaaaaacaaaaacaaaa

SEQ ID NO: 762296 - RNA, 22 nt, Human
uaccuaauaagagccaaagcua

SEQ ID NO: 762297 - RNA, 25 nt, Human
uacuagacuacaguacuuuaaaaca

SEQ ID NO: 762298 - RNA, 19 nt, Human
uagacuacaaaagagcuug

SEQ ID NO: 762299 - RNA, 18 nt, Human
uaggauuauaggcgugag

SEQ ID NO: 762300 - RNA, 19 nt, Human
uaggauuauaggcgugagc

SEQ ID NO: 762301 - RNA, 21 nt, Human
uaggauuauaggcgugagcca

SEQ ID NO: 762302 - RNA, 22 nt, Human
uaggauuauaggcgugagccac

SEQ ID NO: 762303 - RNA, 23 nt, Human
uaggauuauaggcgugagccacc

SEQ ID NO: 762304 - RNA, 24 nt, Human
uaggauuauaggcgugagccaccg

SEQ ID NO: 762305 - RNA, 23 nt, Human
uaggucagaauuagaaaaaagua

SEQ ID NO: 762306 - RNA, 24 nt, Human
uaguagagaugggguuucgucaug

SEQ ID NO: 762307 - RNA, 19 nt, Human
uauacaauacauuaaguac

SEQ ID NO: 762308 - RNA, 23 nt, Human
uauaggcgugagccaccgcacuu

SEQ ID NO: 762309 - RNA, 22 nt, Human
uauauacaauacauuaaguacu

SEQ ID NO: 762310 - RNA, 24 nt, Human
uaucuugcuuucuuccccuugucu

SEQ ID NO: 762311 - RNA, 18 nt, Human
ucaaacauacucaaaaac

SEQ ID NO: 762312 - RNA, 19 nt, Human
ucacugcagccuccgccuc

SEQ ID NO: 762313 - RNA, 23 nt, Human
ucacugcagccuccgccucccag

SEQ ID NO: 762314 - RNA, 24 nt, Human
ucacugcagccuccgccucccagg

SEQ ID NO: 762315 - RNA, 25 nt, Human
ucagcaaacuccuacagguaauuac

SEQ ID NO: 762316 - RNA, 21 nt, Human
ucaguguuuuguguaucuuca

SEQ ID NO: 762317 - RNA, 21 nt, Human
ucaugacuaggggaguacagg

SEQ ID NO: 762318 - RNA, 19 nt, Human
uccaacuuuagcccuuuga

SEQ ID NO: 762319 - RNA, 21 nt, Human
uccacaauguuccuaauucaa

SEQ ID NO: 762320 - RNA, 24 nt, Human
uccaguucaaaacaaaccacauuu

SEQ ID NO: 762321 - RNA, 24 nt, Human
ucccaaagugauaggauuauaggc

SEQ ID NO: 762322 - RNA, 23 nt, Human
ucccagcucacugcagccuccgc

SEQ ID NO: 762323 - RNA, 21 nt, Human
ucccagguucaaacaauucuc

SEQ ID NO: 762324 - RNA, 24 nt, Human
ucccagguucaaacaauucuccug

SEQ ID NO: 762325 - RNA, 23 nt, Human
ucccuaaauuauccuuguuacaa

SEQ ID NO: 762326 - RNA, 22 nt, Human
ucgucauguuggccaggcuggu

SEQ ID NO: 762327 - RNA, 22 nt, Human
ucuaccacucaauagaaauaaa

SEQ ID NO: 762328 - RNA, 22 nt, Human
ucuguauuuuagcuuaagaaaa

SEQ ID NO: 762329 - RNA, 18 nt, Human
ucuguugcccaggcugga

SEQ ID NO: 762330 - RNA, 24 nt, Human
ucuguugcccaggcuggaaugcaa

SEQ ID NO: 762331 - RNA, 18 nt, Human
ucuuccucauuccuaaau

SEQ ID NO: 762332 - RNA, 23 nt, Human
ucuugaacuccugaccucaggug

SEQ ID NO: 762333 - RNA, 23 nt, Human
ucuugcucuguugcccaggcugg

SEQ ID NO: 762334 - RNA, 24 nt, Human
ucuugcucuguugcccaggcugga

SEQ ID NO: 762335 - RNA, 19 nt, Human
ucuuggauugggccuaauu

SEQ ID NO: 762336 - RNA, 24 nt, Human
ugaaacuaaaaacaaagaaacaac

SEQ ID NO: 762337 - RNA, 21 nt, Human
ugaacagagacaaaacagugu

SEQ ID NO: 762338 - RNA, 18 nt, Human
ugaccucaggugaucugc

SEQ ID NO: 762339 - RNA, 20 nt, Human
ugaccucaggugaucugccu

SEQ ID NO: 762340 - RNA, 24 nt, Human
ugaccucaggugaucugccugccu

SEQ ID NO: 762341 - RNA, 23 nt, Human
ugauacccuaaaaauagagaaaa

SEQ ID NO: 762342 - RNA, 22 nt, Human
ugauuuacaaugucauuucccu

SEQ ID NO: 762343 - RNA, 22 nt, Human
ugauuuacuaugauacccuaaa

SEQ ID NO: 762344 - RNA, 20 nt, Human
ugcaaugguguaaucccagc

SEQ ID NO: 762345 - RNA, 23 nt, Human
ugcagccuccgccucccagguuc

SEQ ID NO: 762346 - RNA, 20 nt, Human
ugcccagcuaauuuuuuguc

SEQ ID NO: 762347 - RNA, 21 nt, Human
ugcccaggcuggaaugcaaug

SEQ ID NO: 762348 - RNA, 20 nt, Human
ugccucagccacccaaguag

SEQ ID NO: 762349 - RNA, 20 nt, Human
uggaaaaggggauguccaca

SEQ ID NO: 762350 - RNA, 20 nt, Human
uggaaagauaaacaacauga

SEQ ID NO: 762351 - RNA, 20 nt, Human
uggaaagauaaacaacauga

SEQ ID NO: 762352 - RNA, 24 nt, Human
uggccaggcuggucuugaacuccu

SEQ ID NO: 762353 - RNA, 20 nt, Human
uggccugguccguuuuauga

SEQ ID NO: 762354 - RNA, 22 nt, Human
ugggguuacagguauaugccac

SEQ ID NO: 762355 - RNA, 24 nt, Human
ugggguuacagguauaugccacca

SEQ ID NO: 762356 - RNA, 24 nt, Human
ugggguuucgucauguuggccagg

SEQ ID NO: 762357 - RNA, 24 nt, Human
ugguguaaucccagcucacugcag

SEQ ID NO: 762358 - RNA, 22 nt, Human
uguccccuuuuccuucacaguc

SEQ ID NO: 762359 - RNA, 25 nt, Human
ugucucagucuuccaggacuuggag

SEQ ID NO: 762360 - RNA, 19 nt, Human
ugucuuuuuaguagagaug

SEQ ID NO: 762361 - RNA, 18 nt, Human
uguuccuguccccuuuuc

SEQ ID NO: 762362 - RNA, 20 nt, Human
uguuccuguccccuuuuccu

SEQ ID NO: 762363 - RNA, 20 nt, Human
uuacagguauaugccaccau

SEQ ID NO: 762364 - RNA, 18 nt, Human
uuaguagagaugggguuu

SEQ ID NO: 762365 - RNA, 19 nt, Human
uuaguagagaugggguuuc

SEQ ID NO: 762366 - RNA, 24 nt, Human
uuaguagagaugggguuucgucau

SEQ ID NO: 762367 - RNA, 23 nt, Human
uuauuacagaaaaacacaaaaca

SEQ ID NO: 762368 - RNA, 26 nt, Human
uucaaacaauucuccugccucagcca

SEQ ID NO: 762369 - RNA, 20 nt, Human
uuccuguccccuuuuccuuc

SEQ ID NO: 762370 - RNA, 22 nt, Human
uuccuuggcaguuuuacacagg

SEQ ID NO: 762371 - RNA, 23 nt, Human
uugagacagucuugcucuguugc

SEQ ID NO: 762372 - RNA, 24 nt, Human
uugagacagucuugcucuguugcc

SEQ ID NO: 762373 - RNA, 18 nt, Human
uugcccaggcuggaaugc

SEQ ID NO: 762374 - RNA, 22 nt, Human
uugcuacuaucaauuauucucg

SEQ ID NO: 762375 - RNA, 21 nt, Human
uugggguuacagguauaugcc

SEQ ID NO: 762376 - RNA, 19 nt, Human
uuguauguuaaggaaggaa

SEQ ID NO: 762377 - RNA, 19 nt, Human
uuuacuaugauacccuaaa

SEQ ID NO: 762378 - RNA, 19 nt, Human
uuuauagaugccaccuaaa

SEQ ID NO: 762379 - RNA, 24 nt, Human
uuucgucauguuggccaggcuggu

SEQ ID NO: 762380 - RNA, 24 nt, Human
uuucuuuauuuacaguacaagucu

SEQ ID NO: 762381 - RNA, 21 nt, Human
uuuugagacagucuugcucug

SEQ ID NO: 762382 - RNA, 22 nt, Human
uuuuuaguagagaugggguuuc

SEQ ID NO: 762383 - RNA, 21 nt, Human
uuuuugucuuuuuaguagaga

SEQ ID NO: 762384 - RNA, 24 nt, Human
uuuuugucuuuuuaguagagaugg

SEQ ID NO: 762385 - RNA, 24 nt, Human
uuuuuugucuuuuuaguagagaug

SEQ ID NO: 762386 - RNA, 18 nt, Human
aaaacacaaagaccuggg

SEQ ID NO: 762387 - RNA, 20 nt, Human
aaaacuguucccacuuccaa

SEQ ID NO: 762388 - RNA, 23 nt, Human
aaacaccaccacgggagugagcc

SEQ ID NO: 762389 - RNA, 25 nt, Human
aaacaccaccacgggagugagccca

SEQ ID NO: 762390 - RNA, 18 nt, Human
aaacagggcaaaacacaa

SEQ ID NO: 762391 - RNA, 24 nt, Human
aaacaugaaaaacuauaaaaauaa

SEQ ID NO: 762392 - RNA, 25 nt, Human
aaacaugaaaaacuauaaaaauaau

SEQ ID NO: 762393 - RNA, 18 nt, Human
aacacuguuucagacgag

SEQ ID NO: 762394 - RNA, 18 nt, Human
aaccauagcuauaaauua

SEQ ID NO: 762395 - RNA, 24 nt, Human
aaccauagcuauaaauuaaagugc

SEQ ID NO: 762396 - RNA, 25 nt, Human
aagcaaaacaugaaaaacuauaaaa

SEQ ID NO: 762397 - RNA, 18 nt, Human
aagcucgaaagcgaacac

SEQ ID NO: 762398 - RNA, 18 nt, Human
aagugcuuuacauuuugc

SEQ ID NO: 762399 - RNA, 18 nt, Human
aaguuucccaaagacccg

SEQ ID NO: 762400 - RNA, 23 nt, Human
aauauacauacauauacaagaca

SEQ ID NO: 762401 - RNA, 21 nt, Human
aauccuggagcaauccugcug

SEQ ID NO: 762402 - RNA, 19 nt, Human
aauggcugauuaauacgca

SEQ ID NO: 762403 - RNA, 21 nt, Human
aauuaaacuccgaggaaccca

SEQ ID NO: 762404 - RNA, 21 nt, Human
acaagacacaggaaaugagag

SEQ ID NO: 762405 - RNA, 23 nt, Human
acacacacacacacgcacacaca

SEQ ID NO: 762406 - RNA, 23 nt, Human
acacacacacacgcacacacaca

SEQ ID NO: 762407 - RNA, 24 nt, Human
acacacacacacgcacacacacac

SEQ ID NO: 762408 - RNA, 23 nt, Human
acagugagacccaaaguuuccca

SEQ ID NO: 762409 - RNA, 21 nt, Human
acccaaaguuucccaaagacc

SEQ ID NO: 762410 - RNA, 23 nt, Human
agacaaaaguaaaaaauacgacc

SEQ ID NO: 762411 - RNA, 22 nt, Human
agcaagaaacauuaacguacag

SEQ ID NO: 762412 - RNA, 22 nt, Human
agccaacacaggcagccucaca

SEQ ID NO: 762413 - RNA, 25 nt, Human
agccacacacacgugcacacacaca

SEQ ID NO: 762414 - RNA, 21 nt, Human
agccgacgccgcaacguaaua

SEQ ID NO: 762415 - RNA, 22 nt, Human
agcguggaacaccccacacccc

SEQ ID NO: 762416 - RNA, 22 nt, Human
agcuguggcaguaaagggcacc

SEQ ID NO: 762417 - RNA, 21 nt, Human
aggaaauaaugucggacaaaa

SEQ ID NO: 762418 - RNA, 23 nt, Human
aggaaauaaugucggacaaaaac

SEQ ID NO: 762419 - RNA, 19 nt, Human
aggaacccaagcagguggc

SEQ ID NO: 762420 - RNA, 20 nt, Human
aggcaacagugagacccaaa

SEQ ID NO: 762421 - RNA, 18 nt, Human
aggcagccucacagucuu

SEQ ID NO: 762422 - RNA, 20 nt, Human
agugaccaguauuauauuug

SEQ ID NO: 762423 - RNA, 19 nt, Human
aguuacuccagggaacgca

SEQ ID NO: 762424 - RNA, 20 nt, Human
aguuacuccagggaacgcag

SEQ ID NO: 762425 - RNA, 18 nt, Human
aucauccuaagacacccg

SEQ ID NO: 762426 - RNA, 20 nt, Human
auggaacacuuauaaaugca

SEQ ID NO: 762427 - RNA, 22 nt, Human
auuaaagugcuuuacauuuugc

SEQ ID NO: 762428 - RNA, 19 nt, Human
auuaacguacagauaccag

SEQ ID NO: 762429 - RNA, 20 nt, Human
caaaacacaaagaccugggg

SEQ ID NO: 762430 - RNA, 20 nt, Human
caaacagugaaacuaagggc

SEQ ID NO: 762431 - RNA, 24 nt, Human
caaaggacggguccaaaaguccca

SEQ ID NO: 762432 - RNA, 19 nt, Human
caaauguaaugcccuacug

SEQ ID NO: 762433 - RNA, 26 nt, Human
caagcagguggccugugcuguaauga

SEQ ID NO: 762434 - RNA, 20 nt, Human
caauaaaaacugauuccaug

SEQ ID NO: 762435 - RNA, 19 nt, Human
caaugucaacaacucacaa

SEQ ID NO: 762436 - RNA, 23 nt, Human
caauguuucaccaaagcaaaaca

SEQ ID NO: 762437 - RNA, 18 nt, Human
cacacacacacacacaca

SEQ ID NO: 762438 - RNA, 20 nt, Human
cacacacacacacacacaca

SEQ ID NO: 762439 - RNA, 26 nt, Human
cacacacacacacacacacacgcaca

SEQ ID NO: 762440 - RNA, 25 nt, Human
cacacacacacacacacacgcacac

SEQ ID NO: 762441 - RNA, 26 nt, Human
cacacacacacacacgcacacacaca

SEQ ID NO: 762442 - RNA, 22 nt, Human
cacacacacacgcacacacaca

SEQ ID NO: 762443 - RNA, 33 nt, Human
cacacacacgugcacacacacacacacacagug

SEQ ID NO: 762444 - RNA, 18 nt, Human
cacacgcacacacacacc

SEQ ID NO: 762445 - RNA, 21 nt, Human
cacagcccugcaucaggcaag

SEQ ID NO: 762446 - RNA, 19 nt, Human
caccaggcucacucagcag

SEQ ID NO: 762447 - RNA, 20 nt, Human
cacccuuuccagggucaaag

SEQ ID NO: 762448 - RNA, 26 nt, Human
cacgugcacacacacacacacacaca

SEQ ID NO: 762449 - RNA, 23 nt, Human
cagaaauuagaguagaagcugac

SEQ ID NO: 762450 - RNA, 23 nt, Human
cagauuccaaaauauguacagag

SEQ ID NO: 762451 - RNA, 20 nt, Human
cagcaacaucuggacacagc

SEQ ID NO: 762452 - RNA, 22 nt, Human
cagcaaggugccccggcuccug

SEQ ID NO: 762453 - RNA, 18 nt, Human
cagcagcaguggaugagc

SEQ ID NO: 762454 - RNA, 24 nt, Human
caggaguccaguuucugagguccc

SEQ ID NO: 762455 - RNA, 21 nt, Human
cagggcaaaacacaaagaccu

SEQ ID NO: 762456 - RNA, 21 nt, Human
caguaaagggcaccagugugc

SEQ ID NO: 762457 - RNA, 18 nt, Human
caugagaccucaggagac

SEQ ID NO: 762458 - RNA, 22 nt, Human
cauuaaaugaaauucuggacac

SEQ ID NO: 762459 - RNA, 24 nt, Human
cauuucaugugcuacaugggaggu

SEQ ID NO: 762460 - RNA, 22 nt, Human
ccaaagcaaaacaugaaaaacu

SEQ ID NO: 762461 - RNA, 22 nt, Human
ccaagagaaaaagugaggcccc

SEQ ID NO: 762462 - RNA, 25 nt, Human
ccagccaggcaacagugagacccaa

SEQ ID NO: 762463 - RNA, 19 nt, Human
cccaccacaagaccuggaa

SEQ ID NO: 762464 - RNA, 24 nt, Human
cccacuuccaaacacuguuucaga

SEQ ID NO: 762465 - RNA, 19 nt, Human
ccccggcuccugagagcuc

SEQ ID NO: 762466 - RNA, 21 nt, Human
cccuccuaccucaccguaaaa

SEQ ID NO: 762467 - RNA, 25 nt, Human
ccgacgccgcaacguaauacagaag

SEQ ID NO: 762468 - RNA, 23 nt, Human
ccuaagacacccagacuuucaaa

SEQ ID NO: 762469 - RNA, 21 nt, Human
ccuacugcaccugcaccuacc

SEQ ID NO: 762470 - RNA, 24 nt, Human
ccuccaaagaaauauguuuuucac

SEQ ID NO: 762471 - RNA, 21 nt, Human
ccugaagacccaaguagggag

SEQ ID NO: 762472 - RNA, 24 nt, Human
ccugcaccuaccgguccccagaug

SEQ ID NO: 762473 - RNA, 20 nt, Human
ccugugucucuccaaguggu

SEQ ID NO: 762474 - RNA, 22 nt, Human
cgacacagcagcgaacagcaag

SEQ ID NO: 762475 - RNA, 18 nt, Human
cgagguaaacacaaaauc

SEQ ID NO: 762476 - RNA, 25 nt, Human
cgugcacacacacacacacacacac

SEQ ID NO: 762477 - RNA, 20 nt, Human
cgugcacacacacacacagu

SEQ ID NO: 762478 - RNA, 25 nt, Human
cuaccgguccccagauggguucccu

SEQ ID NO: 762479 - RNA, 23 nt, Human
cucccaacauagcguggaacacc

SEQ ID NO: 762480 - RNA, 25 nt, Human
cugagcaccacagggcugcgccccc

SEQ ID NO: 762481 - RNA, 27 nt, Human
cugcaccuaccgguccccagauggguu

SEQ ID NO: 762482 - RNA, 18 nt, Human
cuguaaauauuaccuucc

SEQ ID NO: 762483 - RNA, 20 nt, Human
cuugugcgccuaaguggaga

SEQ ID NO: 762484 - RNA, 20 nt, Human
cuuugccucuacugcccaga

SEQ ID NO: 762485 - RNA, 21 nt, Human
gaaaagaacauauacaaagca

SEQ ID NO: 762486 - RNA, 20 nt, Human
gacacagcagcgaacagcaa

SEQ ID NO: 762487 - RNA, 18 nt, Human
gaggugccucucaucccu

SEQ ID NO: 762488 - RNA, 23 nt, Human
gcaauccugcuggucgccagcca

SEQ ID NO: 762489 - RNA, 23 nt, Human
gcacccuuuccagggucaaacuc

SEQ ID NO: 762490 - RNA, 27 nt, Human
gcaguaaagggcaccagugugccugga

SEQ ID NO: 762491 - RNA, 23 nt, Human
gcaguggaugagcucacauuaga

SEQ ID NO: 762492 - RNA, 19 nt, Human
gcagugugggaggcucugg

SEQ ID NO: 762493 - RNA, 24 nt, Human
gccacacacacgugcacacacaca

SEQ ID NO: 762494 - RNA, 18 nt, Human
gcugacuacacgacagca

SEQ ID NO: 762495 - RNA, 23 nt, Human
ggacaaaaacacaacaaccccgg

SEQ ID NO: 762496 - RNA, 21 nt, Human
ggcaaaacacaaagaccuggg

SEQ ID NO: 762497 - RNA, 23 nt, Human
ggcucucaaacaccaccacggga

SEQ ID NO: 762498 - RNA, 21 nt, Human
gggaggcucuggcaauuggac

SEQ ID NO: 762499 - RNA, 21 nt, Human
gucagcuugugcgccuaagug

SEQ ID NO: 762500 - RNA, 27 nt, Human
gugaaaagaacauauacaaagcacccu

SEQ ID NO: 762501 - RNA, 20 nt, Human
uaaaaauaauaagacuccca

SEQ ID NO: 762502 - RNA, 22 nt, Human
uaaacacaaaauccuggagcaa

SEQ ID NO: 762503 - RNA, 22 nt, Human
uaaagugcuuuacauuuugcuu

SEQ ID NO: 762504 - RNA, 24 nt, Human
uaacuucuaaacuccagguuaccu

SEQ ID NO: 762505 - RNA, 27 nt, Human
uaauuuagccacacacacgugcacaca

SEQ ID NO: 762506 - RNA, 22 nt, Human
uacaggacaaaacuguucccac

SEQ ID NO: 762507 - RNA, 19 nt, Human
uagaagacgacacagcagc

SEQ ID NO: 762508 - RNA, 23 nt, Human
uagaagacgacacagcagcgaac

SEQ ID NO: 762509 - RNA, 18 nt, Human
uagcuauaaauuaaagug

SEQ ID NO: 762510 - RNA, 22 nt, Human
uaguguccuggucacuccugca

SEQ ID NO: 762511 - RNA, 21 nt, Human
ucaaacucucacaaaaauggc

SEQ ID NO: 762512 - RNA, 24 nt, Human
ucaccaaagcaaaacaugaaaaac

SEQ ID NO: 762513 - RNA, 19 nt, Human
ucaccggggccugcuggcu

SEQ ID NO: 762514 - RNA, 21 nt, Human
ucaggacagcaggagcugaaa

SEQ ID NO: 762515 - RNA, 22 nt, Human
ucauuaaaugaaauucuggaca

SEQ ID NO: 762516 - RNA, 21 nt, Human
uccaaaagucccacguccuuc

SEQ ID NO: 762517 - RNA, 20 nt, Human
uccaaauggugcaaauccaa

SEQ ID NO: 762518 - RNA, 24 nt, Human
uccauggaacacuuauaaaugcau

SEQ ID NO: 762519 - RNA, 18 nt, Human
ucccaaagacccgucucu

SEQ ID NO: 762520 - RNA, 18 nt, Human
ucccaacauagcguggaa

SEQ ID NO: 762521 - RNA, 24 nt, Human
ucccggucgcagacaccgcagaaa

SEQ ID NO: 762522 - RNA, 24 nt, Human
uccuuggaccagcuccugaagacc

SEQ ID NO: 762523 - RNA, 21 nt, Human
ucggacaaaaacacaacacau

SEQ ID NO: 762524 - RNA, 20 nt, Human
ucuaaaaccuguuuauaacc

SEQ ID NO: 762525 - RNA, 24 nt, Human
ucucugagguaguguuguuggcuc

SEQ ID NO: 762526 - RNA, 22 nt, Human
ugaaaagaacauauacaaagca

SEQ ID NO: 762527 - RNA, 23 nt, Human
ugaaaagaacauauacaaagcac

SEQ ID NO: 762528 - RNA, 21 nt, Human
ugaaacuaagggcugccggug

SEQ ID NO: 762529 - RNA, 22 nt, Human
ugaagacccaaguagggaggug

SEQ ID NO: 762530 - RNA, 20 nt, Human
ugacuccugaucaccacgcu

SEQ ID NO: 762531 - RNA, 23 nt, Human
ugagagccucuuuaucaaaacug

SEQ ID NO: 762532 - RNA, 23 nt, Human
ugagccuccagguggacguauug

SEQ ID NO: 762533 - RNA, 21 nt, Human
ugaggucccuccaguuugcca

SEQ ID NO: 762534 - RNA, 20 nt, Human
ugaucaccacgcugcagcag

SEQ ID NO: 762535 - RNA, 24 nt, Human
ugcaauaagcucgaaagcgaacac

SEQ ID NO: 762536 - RNA, 25 nt, Human
ugcacacacacacacacacacacgc

SEQ ID NO: 762537 - RNA, 18 nt, Human
ugccccggcuccugagag

SEQ ID NO: 762538 - RNA, 24 nt, Human
ugccccggcuccugagagcucugc

SEQ ID NO: 762539 - RNA, 18 nt, Human
ugcccugggcucagaccu

SEQ ID NO: 762540 - RNA, 20 nt, Human
ugcccugggcucagaccuuu

SEQ ID NO: 762541 - RNA, 19 nt, Human
ugccugagcaccacagggc

SEQ ID NO: 762542 - RNA, 21 nt, Human
ugcuccgccuuggucccgguc

SEQ ID NO: 762543 - RNA, 18 nt, Human
uggaacaccccacacccc

SEQ ID NO: 762544 - RNA, 22 nt, Human
uggaacaccccacacccccggc

SEQ ID NO: 762545 - RNA, 26 nt, Human
uggaacaccccacacccccggcgacu

SEQ ID NO: 762546 - RNA, 20 nt, Human
uggcacugagaggcgucccc

SEQ ID NO: 762547 - RNA, 20 nt, Human
ugugcaguggccccagaagc

SEQ ID NO: 762548 - RNA, 19 nt, Human
uuacuccagggaacgcagg

SEQ ID NO: 762549 - RNA, 20 nt, Human
uuagccacacacacgugcaa

SEQ ID NO: 762550 - RNA, 21 nt, Human
uucacacaaauguaaugcccu

SEQ ID NO: 762551 - RNA, 20 nt, Human
uucacagacuuaaguaacaa

SEQ ID NO: 762552 - RNA, 27 nt, Human
uuccagcuauaaaccaaagugcuccag

SEQ ID NO: 762553 - RNA, 21 nt, Human
uucuugggcccggggcuguca

SEQ ID NO: 762554 - RNA, 21 nt, Human
uugaaacaucuaaaaccuguu

SEQ ID NO: 762555 - RNA, 21 nt, Human
uuggaccuccagccaagagaa

SEQ ID NO: 762556 - RNA, 25 nt, Human
uuucauauugcaaugaagacaguca

SEQ ID NO: 762557 - RNA, 18 nt, Human
uuugcagaacuguaacag

SEQ ID NO: 762558 - RNA, 22 nt, Human
uuugccucuacugcccagagga

SEQ ID NO: 762559 - RNA, 22 nt, Human
uuuuuuaacuucuaaacuccag

SEQ ID NO: 762560 - RNA, 24 nt, Human
aaaaauugggaaaacuucacacua

SEQ ID NO: 762561 - RNA, 21 nt, Human
aaaauaagcccaucucuccac

SEQ ID NO: 762562 - RNA, 21 nt, Human
aaagcauaugccaaguguguc

SEQ ID NO: 762563 - RNA, 26 nt, Human
aacaauauuccugcaaguaucgccaa

SEQ ID NO: 762564 - RNA, 21 nt, Human
aaccauuuccuugaacccaga

SEQ ID NO: 762565 - RNA, 22 nt, Human
aauaccgagaguacugaccuug

SEQ ID NO: 762566 - RNA, 25 nt, Human
acaaaccucaggaaaaggggaacgc

SEQ ID NO: 762567 - RNA, 23 nt, Human
acagaauucaagaccaaaacugg

SEQ ID NO: 762568 - RNA, 19 nt, Human
acaggugcaugaagcauuu

SEQ ID NO: 762569 - RNA, 20 nt, Human
acccagaccaucagggagcu

SEQ ID NO: 762570 - RNA, 20 nt, Human
accucauccauccccuucuc

SEQ ID NO: 762571 - RNA, 24 nt, Human
agacaaacaugaaggcugagucua

SEQ ID NO: 762572 - RNA, 18 nt, Human
agacaagaggugcuaucc

SEQ ID NO: 762573 - RNA, 19 nt, Human
agagagagcuagaaagggc

SEQ ID NO: 762574 - RNA, 23 nt, Human
agagucacaggugcuguguucug

SEQ ID NO: 762575 - RNA, 21 nt, Human
agccagcaggcaucugcagug

SEQ ID NO: 762576 - RNA, 19 nt, Human
agccauucagcugcaaccc

SEQ ID NO: 762577 - RNA, 22 nt, Human
agcuagaaagggcaggagugag

SEQ ID NO: 762578 - RNA, 18 nt, Human
agcucaguggcgcgagcc

SEQ ID NO: 762579 - RNA, 21 nt, Human
agcugggugagugucugcggc

SEQ ID NO: 762580 - RNA, 20 nt, Human
agcuggugggugagugagcu

SEQ ID NO: 762581 - RNA, 22 nt, Human
agcuguguggugggggaugcag

SEQ ID NO: 762582 - RNA, 20 nt, Human
aggaagaccaacccuggaaa

SEQ ID NO: 762583 - RNA, 22 nt, Human
aggcaguguucaauuaacaaag

SEQ ID NO: 762584 - RNA, 20 nt, Human
aggcugaggcaggagaucgc

SEQ ID NO: 762585 - RNA, 22 nt, Human
aggcugaggcaggagaucgcuc

SEQ ID NO: 762586 - RNA, 18 nt, Human
aguacugaccuugaguaa

SEQ ID NO: 762587 - RNA, 21 nt, Human
aucuucaguuccuuugggggu

SEQ ID NO: 762588 - RNA, 22 nt, Human
caaaaaaagcccacacaaccac

SEQ ID NO: 762589 - RNA, 19 nt, Human
caaaauaagcccaucucuc

SEQ ID NO: 762590 - RNA, 23 nt, Human
caaaauaagcccaucucuccacc

SEQ ID NO: 762591 - RNA, 18 nt, Human
caaaggacuccaaucaaa

SEQ ID NO: 762592 - RNA, 23 nt, Human
caagaccaaaacugcaauaacug

SEQ ID NO: 762593 - RNA, 23 nt, Human
caagggacucuguaccaucugga

SEQ ID NO: 762594 - RNA, 19 nt, Human
cacaaaauucaaguaacag

SEQ ID NO: 762595 - RNA, 20 nt, Human
cacagaauucaagaccaaaa

SEQ ID NO: 762596 - RNA, 22 nt, Human
caccuacagccuucccaaaaaa

SEQ ID NO: 762597 - RNA, 19 nt, Human
cagcaaugguacaauccca

SEQ ID NO: 762598 - RNA, 18 nt, Human
cagccggcuggugcugga

SEQ ID NO: 762599 - RNA, 19 nt, Human
cagguccuuugagucagga

SEQ ID NO: 762600 - RNA, 20 nt, Human
caucaacaauauuccugcaa

SEQ ID NO: 762601 - RNA, 19 nt, Human
caucaagucauccguacca

SEQ ID NO: 762602 - RNA, 21 nt, Human
cauccccuucucaggaagacc

SEQ ID NO: 762603 - RNA, 28 nt, Human
caucucuccaccuacagccuucccaaaa

SEQ ID NO: 762604 - RNA, 22 nt, Human
ccaauacaucuguguacaaaga

SEQ ID NO: 762605 - RNA, 21 nt, Human
ccacaauauuuauuuugccac

SEQ ID NO: 762606 - RNA, 25 nt, Human
ccaccuacagccuucccaaaaaaca

SEQ ID NO: 762607 - RNA, 22 nt, Human
ccauccccuucucaggaagacc

SEQ ID NO: 762608 - RNA, 21 nt, Human
cccaaaaaacaggcuguaggc

SEQ ID NO: 762609 - RNA, 20 nt, Human
ccccgcuaccccacucgcug

SEQ ID NO: 762610 - RNA, 21 nt, Human
ccccuccguaaagcaugaaaa

SEQ ID NO: 762611 - RNA, 20 nt, Human
cccuucucaggaagaccaaa

SEQ ID NO: 762612 - RNA, 21 nt, Human
cgacacaauccccuccguaaa

SEQ ID NO: 762613 - RNA, 20 nt, Human
cgucaguuagcaaguagcug

SEQ ID NO: 762614 - RNA, 24 nt, Human
cuaacuccuauuauaaaacuucca

SEQ ID NO: 762615 - RNA, 23 nt, Human
cuacagccuucccaaaaaacagg

SEQ ID NO: 762616 - RNA, 18 nt, Human
cuccagagaaaggcagug

SEQ ID NO: 762617 - RNA, 25 nt, Human
cucucauaguaaaagccugcucuac

SEQ ID NO: 762618 - RNA, 24 nt, Human
cucuccaccuacagccuucccaaa

SEQ ID NO: 762619 - RNA, 19 nt, Human
cucugaaggcccccagaac

SEQ ID NO: 762620 - RNA, 18 nt, Human
cucuguguggcucagagu

SEQ ID NO: 762621 - RNA, 23 nt, Human
cuguguguuaccucauccauccc

SEQ ID NO: 762622 - RNA, 23 nt, Human
cuucucaggaagaccaacccugg

SEQ ID NO: 762623 - RNA, 19 nt, Human
cuuuggggguaaaaauacc

SEQ ID NO: 762624 - RNA, 23 nt, Human
cuuuuuacaguuucuguccuagc

SEQ ID NO: 762625 - RNA, 21 nt, Human
gaacaugacuauucugacuca

SEQ ID NO: 762626 - RNA, 20 nt, Human
gagaaggggcaaagaaaagg

SEQ ID NO: 762627 - RNA, 18 nt, Human
gagcgcagggaagccagc

SEQ ID NO: 762628 - RNA, 21 nt, Human
gagcgccccgggcucuggcac

SEQ ID NO: 762629 - RNA, 18 nt, Human
gagcugugugguggggga

SEQ ID NO: 762630 - RNA, 26 nt, Human
gcacuggggccuucuccaaccggagg

SEQ ID NO: 762631 - RNA, 22 nt, Human
gcccaucucuccaccuacagcc

SEQ ID NO: 762632 - RNA, 20 nt, Human
gccgagcgcagggaagccag

SEQ ID NO: 762633 - RNA, 26 nt, Human
gcgaacacaaaccucaggaaaagcug

SEQ ID NO: 762634 - RNA, 21 nt, Human
gcugagcggcugagcucgcgg

SEQ ID NO: 762635 - RNA, 19 nt, Human
ggaaaacagcccuguucua

SEQ ID NO: 762636 - RNA, 24 nt, Human
ggacagcaaugguacaaucccaag

SEQ ID NO: 762637 - RNA, 20 nt, Human
ggccucuaccucauuaacca

SEQ ID NO: 762638 - RNA, 24 nt, Human
gggaaaucucacacgacacaaucc

SEQ ID NO: 762639 - RNA, 25 nt, Human
gggcaggagugagagggagcuagaa

SEQ ID NO: 762640 - RNA, 23 nt, Human
gggcucuggcacggcuaccgucc

SEQ ID NO: 762641 - RNA, 18 nt, Human
ggggccuucuccagagaa

SEQ ID NO: 762642 - RNA, 18 nt, Human
gggucucugggcccugag

SEQ ID NO: 762643 - RNA, 20 nt, Human
gguuucuuuauuuucuaaag

SEQ ID NO: 762644 - RNA, 18 nt, Human
gugcaugaagcauuuuua

SEQ ID NO: 762645 - RNA, 20 nt, Human
gugggggaugcaggccaggc

SEQ ID NO: 762646 - RNA, 20 nt, Human
guugcucaucccugaaccua

SEQ ID NO: 762647 - RNA, 20 nt, Human
uaaaaaguaguaccucucau

SEQ ID NO: 762648 - RNA, 26 nt, Human
uaaaaaguaguaccucucauaguaaa

SEQ ID NO: 762649 - RNA, 29 nt, Human
uaacugaagugcuacuucaccucugguua

SEQ ID NO: 762650 - RNA, 19 nt, Human
uaauauuggcugcaucaac

SEQ ID NO: 762651 - RNA, 22 nt, Human
uacaaugcaugcauguuauugg

SEQ ID NO: 762652 - RNA, 25 nt, Human
uaccacgaagaagauaaaauggcuu

SEQ ID NO: 762653 - RNA, 25 nt, Human
uaccccacucgcugagcggcugagc

SEQ ID NO: 762654 - RNA, 22 nt, Human
uagagccauucagcugcaaccc

SEQ ID NO: 762655 - RNA, 18 nt, Human
uagcauaagaauaaaaaa

SEQ ID NO: 762656 - RNA, 24 nt, Human
uagcucaaauuaauauuggcugca

SEQ ID NO: 762657 - RNA, 24 nt, Human
uauuggcugcaucaacaauauucc

SEQ ID NO: 762658 - RNA, 25 nt, Human
ucaaaaaaagcccacacaaccacau

SEQ ID NO: 762659 - RNA, 20 nt, Human
ucaaaaaaagcccacacaag

SEQ ID NO: 762660 - RNA, 23 nt, Human
ucaaaaagcacaaaauucaagua

SEQ ID NO: 762661 - RNA, 21 nt, Human
ucaagucagacaucccucaag

SEQ ID NO: 762662 - RNA, 23 nt, Human
ucacagggacucugaaggccccc

SEQ ID NO: 762663 - RNA, 23 nt, Human
ucagaauuaacaauccauuagcu

SEQ ID NO: 762664 - RNA, 21 nt, Human
ucauccguaccacugaggauc

SEQ ID NO: 762665 - RNA, 23 nt, Human
uccaccuacagccuucccaaaaa

SEQ ID NO: 762666 - RNA, 19 nt, Human
uccagagacaaacaugaag

SEQ ID NO: 762667 - RNA, 23 nt, Human
uccagauacaaaguuucggggag

SEQ ID NO: 762668 - RNA, 19 nt, Human
ucccaaaaaacaggcugua

SEQ ID NO: 762669 - RNA, 20 nt, Human
uccccuucucaggaagacca

SEQ ID NO: 762670 - RNA, 25 nt, Human
ucgcggagcugggugagugucugcc

SEQ ID NO: 762671 - RNA, 21 nt, Human
ucuaacuccuauuauaaaacu

SEQ ID NO: 762672 - RNA, 24 nt, Human
ucucacacgacacaauccccuccg

SEQ ID NO: 762673 - RNA, 18 nt, Human
ucucugggcccugagggu

SEQ ID NO: 762674 - RNA, 18 nt, Human
ucugcagucuagagcugg

SEQ ID NO: 762675 - RNA, 20 nt, Human
ucugcagucuagagcuggug

SEQ ID NO: 762676 - RNA, 24 nt, Human
ucugcagugcggagccugcaaggc

SEQ ID NO: 762677 - RNA, 21 nt, Human
ucuguaaaguuuagcugaugg

SEQ ID NO: 762678 - RNA, 18 nt, Human
ucuugguuuuuacacgcu

SEQ ID NO: 762679 - RNA, 22 nt, Human
ugaaaaauugggaaaacuucac

SEQ ID NO: 762680 - RNA, 25 nt, Human
ugaacccagaccaucagggagcuag

SEQ ID NO: 762681 - RNA, 20 nt, Human
ugaccggcccgugggagcag

SEQ ID NO: 762682 - RNA, 22 nt, Human
ugagaaggggcaaagaaaagga

SEQ ID NO: 762683 - RNA, 23 nt, Human
ugagagagagcuagaaagggcag

SEQ ID NO: 762684 - RNA, 25 nt, Human
ugagagggagcuagaaagcacuggg

SEQ ID NO: 762685 - RNA, 18 nt, Human
ugagcucgcggagcuggg

SEQ ID NO: 762686 - RNA, 24 nt, Human
ugagguggaaacacuauuaucugu

SEQ ID NO: 762687 - RNA, 20 nt, Human
ugagugucugcggcugaccg

SEQ ID NO: 762688 - RNA, 23 nt, Human
ugcaaggcugaggcaggagaucg

SEQ ID NO: 762689 - RNA, 22 nt, Human
ugcaucaacaauauuccugcaa

SEQ ID NO: 762690 - RNA, 25 nt, Human
ugccacaagaauccacuucgucagu

SEQ ID NO: 762691 - RNA, 22 nt, Human
ugcuguguucuggcuucugagc

SEQ ID NO: 762692 - RNA, 18 nt, Human
uggaaauaggugagagga

SEQ ID NO: 762693 - RNA, 28 nt, Human
uggcacagaauucaagaccaaaacugca

SEQ ID NO: 762694 - RNA, 24 nt, Human
uggcgaggagaaggggauugagga

SEQ ID NO: 762695 - RNA, 20 nt, Human
uggcuucugagcagaggccu

SEQ ID NO: 762696 - RNA, 24 nt, Human
ugggaaaucucacacgacacaauc

SEQ ID NO: 762697 - RNA, 23 nt, Human
ugguaugcaaaauaagcccaucu

SEQ ID NO: 762698 - RNA, 24 nt, Human
ugucugcggcugaccggcccgugg

SEQ ID NO: 762699 - RNA, 23 nt, Human
ugugcauaagaucuucagcuggg

SEQ ID NO: 762700 - RNA, 18 nt, Human
uguggcucagaguuccca

SEQ ID NO: 762701 - RNA, 23 nt, Human
uuaccucauccauccccuucuca

SEQ ID NO: 762702 - RNA, 18 nt, Human
uuacuugguacaaugcau

SEQ ID NO: 762703 - RNA, 22 nt, Human
uuagagccauucagcugcaacc

SEQ ID NO: 762704 - RNA, 21 nt, Human
uucaaaaaaagcccacacaac

SEQ ID NO: 762705 - RNA, 18 nt, Human
uucaagagaggaaagaac

SEQ ID NO: 762706 - RNA, 21 nt, Human
uucuucauuuugcagguagaa

SEQ ID NO: 762707 - RNA, 21 nt, Human
uugaacccagaccaucaggga

SEQ ID NO: 762708 - RNA, 21 nt, Human
uuugcagguagaaauagacag

SEQ ID NO: 762709 - RNA, 24 nt, Human
aagcggcagguggugcacgguggg

SEQ ID NO: 762710 - RNA, 26 nt, Human
aagcggcagguggugcacgguggguu

SEQ ID NO: 762711 - RNA, 22 nt, Human
aauaaaccagaugaaacaagua

SEQ ID NO: 762712 - RNA, 19 nt, Human
acaaagcaagauuggaagc

SEQ ID NO: 762713 - RNA, 24 nt, Human
accuccuccccuccuuccucuuua

SEQ ID NO: 762714 - RNA, 25 nt, Human
agacauuuugugaaaauuaaaaaug

SEQ ID NO: 762715 - RNA, 19 nt, Human
agccagcgccuggucaugg

SEQ ID NO: 762716 - RNA, 22 nt, Human
aggcuuuuugacaaucuuuaau

SEQ ID NO: 762717 - RNA, 18 nt, Human
auggucaaugucugcauc

SEQ ID NO: 762718 - RNA, 19 nt, Human
augucagggugcugcucuu

SEQ ID NO: 762719 - RNA, 18 nt, Human
auuacuguuuauggguga

SEQ ID NO: 762720 - RNA, 21 nt, Human
caaguacaaguuguuuacuga

SEQ ID NO: 762721 - RNA, 22 nt, Human
caccaacacggucuccugcacc

SEQ ID NO: 762722 - RNA, 26 nt, Human
caccacacgccgcuccuccaccaaca

SEQ ID NO: 762723 - RNA, 25 nt, Human
cacgccuggcuccagaucugugccu

SEQ ID NO: 762724 - RNA, 19 nt, Human
cagcggcugucucuuccug

SEQ ID NO: 762725 - RNA, 19 nt, Human
cauggucaaugucugcauc

SEQ ID NO: 762726 - RNA, 23 nt, Human
ccagggccugcugcugcuccucc

SEQ ID NO: 762727 - RNA, 21 nt, Human
cccccgccgccccugcgcccc

SEQ ID NO: 762728 - RNA, 22 nt, Human
ccccgccgccccugcgcccccg

SEQ ID NO: 762729 - RNA, 18 nt, Human
ccccgcugucucccgccg

SEQ ID NO: 762730 - RNA, 21 nt, Human
ccccuccuuccucuuuagccc

SEQ ID NO: 762731 - RNA, 20 nt, Human
ccccugcgcccccgccgccu

SEQ ID NO: 762732 - RNA, 18 nt, Human
cccgccgccuccuggggc

SEQ ID NO: 762733 - RNA, 20 nt, Human
cccucuuucccuuuaaugcc

SEQ ID NO: 762734 - RNA, 18 nt, Human
ccgccccugcgcccccgc

SEQ ID NO: 762735 - RNA, 19 nt, Human
ccuccuccccuccuuccuc

SEQ ID NO: 762736 - RNA, 21 nt, Human
ccuugucagugaccucccucg

SEQ ID NO: 762737 - RNA, 25 nt, Human
cuccagggccugcugcugcuccucc

SEQ ID NO: 762738 - RNA, 21 nt, Human
cucugcuccucuugucgcuca

SEQ ID NO: 762739 - RNA, 23 nt, Human
cucugcuccucuugucgcucacg

SEQ ID NO: 762740 - RNA, 21 nt, Human
cugcgcccccgccgccucccc

SEQ ID NO: 762741 - RNA, 21 nt, Human
cugcugcuccuccuugggcgg

SEQ ID NO: 762742 - RNA, 20 nt, Human
cuucucaauucuugucucug

SEQ ID NO: 762743 - RNA, 20 nt, Human
gaaaggcaugaauuguuuau

SEQ ID NO: 762744 - RNA, 22 nt, Human
gacagcuucuagcauuugaggg

SEQ ID NO: 762745 - RNA, 21 nt, Human
gaccuccuccccuccuuccuc

SEQ ID NO: 762746 - RNA, 24 nt, Human
gagaccacgguuuauauuguuggu

SEQ ID NO: 762747 - RNA, 20 nt, Human
gagcagguauagcugaaaac

SEQ ID NO: 762748 - RNA, 21 nt, Human
gccagugucuuuauuaauggu

SEQ ID NO: 762749 - RNA, 19 nt, Human
gcccucuuucccuuuaaug

SEQ ID NO: 762750 - RNA, 22 nt, Human
gcccucuuucccuuuaaugccu

SEQ ID NO: 762751 - RNA, 20 nt, Human
gcccuggcagcaaacuccug

SEQ ID NO: 762752 - RNA, 21 nt, Human
gcccuggcagcaaacuccugu

SEQ ID NO: 762753 - RNA, 24 nt, Human
gccgcuccuccaccaacacggucu

SEQ ID NO: 762754 - RNA, 21 nt, Human
gcgcugcagcggcggcgaacu

SEQ ID NO: 762755 - RNA, 21 nt, Human
gcugaaucagauugcuuuauu

SEQ ID NO: 762756 - RNA, 18 nt, Human
ggcucggccuccuggucc

SEQ ID NO: 762757 - RNA, 23 nt, Human
ggguagugguggugguacuggug

SEQ ID NO: 762758 - RNA, 22 nt, Human
gucaaggucaauucuucuggac

SEQ ID NO: 762759 - RNA, 25 nt, Human
uaauaauaauaaacuaugaaaggca

SEQ ID NO: 762760 - RNA, 20 nt, Human
uccagggccugcugcugcuc

SEQ ID NO: 762761 - RNA, 21 nt, Human
uccucuggucaauccucucca

SEQ ID NO: 762762 - RNA, 21 nt, Human
uccuguuccaggacagcuuua

SEQ ID NO: 762763 - RNA, 20 nt, Human
ucgcucacgggaagcagcgg

SEQ ID NO: 762764 - RNA, 23 nt, Human
ucgcuucucaauucuugucucug

SEQ ID NO: 762765 - RNA, 19 nt, Human
ucugaaaugcccccuuuca

SEQ ID NO: 762766 - RNA, 20 nt, Human
ucugaaaugcccccuuucac

SEQ ID NO: 762767 - RNA, 21 nt, Human
ucuggucaauccucuccaucu

SEQ ID NO: 762768 - RNA, 23 nt, Human
ugaaaggcaugaauuguuuaugu

SEQ ID NO: 762769 - RNA, 24 nt, Human
ugaaaugcccccuuucacaguuuu

SEQ ID NO: 762770 - RNA, 22 nt, Human
ugacugcauucaugugcaagcu

SEQ ID NO: 762771 - RNA, 21 nt, Human
ugaggaaaucugacacaccgg

SEQ ID NO: 762772 - RNA, 19 nt, Human
ugccugagccagcgccugg

SEQ ID NO: 762773 - RNA, 19 nt, Human
uggauuccgagucugaucc

SEQ ID NO: 762774 - RNA, 22 nt, Human
uggcugcacucugcuccucuug

SEQ ID NO: 762775 - RNA, 22 nt, Human
ugggaagaucucucugccagug

SEQ ID NO: 762776 - RNA, 21 nt, Human
ugggaucagcagggagcccgg

SEQ ID NO: 762777 - RNA, 18 nt, Human
uggggcucggccuccugg

SEQ ID NO: 762778 - RNA, 21 nt, Human
uggucauggucaaugucugca

SEQ ID NO: 762779 - RNA, 19 nt, Human
ugguggugguacugguggu

SEQ ID NO: 762780 - RNA, 23 nt, Human
ugucgcucacgggaagcagcggc

SEQ ID NO: 762781 - RNA, 22 nt, Human
ugugaaugcgggcugugcugca

SEQ ID NO: 762782 - RNA, 24 nt, Human
ugugaugguuuugguuucggugug

SEQ ID NO: 762783 - RNA, 20 nt, Human
uuaauaauaauaaacuauga

SEQ ID NO: 762784 - RNA, 21 nt, Human
uuccucuggucaauccucucc

SEQ ID NO: 762785 - RNA, 24 nt, Human
uuccucuuuagcccccuccgucaa

SEQ ID NO: 762786 - RNA, 24 nt, Human
uucgagcuguuuugcagcccuggc

SEQ ID NO: 762787 - RNA, 18 nt, Human
uugucagugaccucccuc

SEQ ID NO: 762788 - RNA, 23 nt, Human
uuucggugugaacuacuggcacu

SEQ ID NO: 762789 - RNA, 24 nt, Human
aaacauuucacacuaucaggcuac

SEQ ID NO: 762790 - RNA, 20 nt, Human
aaacccagcaaaucagcaaa

SEQ ID NO: 762791 - RNA, 25 nt, Human
aaacuguguucuuuucaaugcuugg

SEQ ID NO: 762792 - RNA, 21 nt, Human
aaagaaaaaaaauguuaagaa

SEQ ID NO: 762793 - RNA, 21 nt, Human
aaagaaacuugaaccacacug

SEQ ID NO: 762794 - RNA, 18 nt, Human
aaagaaguagaaagcugu

SEQ ID NO: 762795 - RNA, 22 nt, Human
aacccagcaaaucagcaaaaaa

SEQ ID NO: 762796 - RNA, 18 nt, Human
aaccccugauuccuccaa

SEQ ID NO: 762797 - RNA, 19 nt, Human
aagaaaaccaaagaaaagc

SEQ ID NO: 762798 - RNA, 22 nt, Human
aaggccagaggcacuggaaacu

SEQ ID NO: 762799 - RNA, 20 nt, Human
acacagcaccuauaucuugu

SEQ ID NO: 762800 - RNA, 24 nt, Human
acagauauaaaauuauuuuaaaaa

SEQ ID NO: 762801 - RNA, 22 nt, Human
acagcaauuccaaaguuuuaaa

SEQ ID NO: 762802 - RNA, 23 nt, Human
accugugaacaauugauuuccuu

SEQ ID NO: 762803 - RNA, 20 nt, Human
acucugugucugcuuucagu

SEQ ID NO: 762804 - RNA, 21 nt, Human
agaggugaugaauuucagaug

SEQ ID NO: 762805 - RNA, 18 nt, Human
auagaacaucugccaccc

SEQ ID NO: 762806 - RNA, 22 nt, Human
auggagguuguggccuugccua

SEQ ID NO: 762807 - RNA, 22 nt, Human
caaaauaaugcuaguuaauccc

SEQ ID NO: 762808 - RNA, 20 nt, Human
caaaccccugauuccuccaa

SEQ ID NO: 762809 - RNA, 23 nt, Human
caaauauuuauugauguuaaauc

SEQ ID NO: 762810 - RNA, 18 nt, Human
caauagagauagguccau

SEQ ID NO: 762811 - RNA, 23 nt, Human
cacauucagaaaaauuugccaag

SEQ ID NO: 762812 - RNA, 22 nt, Human
caccagcacaacaauccaaagu

SEQ ID NO: 762813 - RNA, 21 nt, Human
cacuacuacacaaaccucaga

SEQ ID NO: 762814 - RNA, 21 nt, Human
cacugugcuucagaaucauug

SEQ ID NO: 762815 - RNA, 18 nt, Human
cagcaaaaaaaggucaca

SEQ ID NO: 762816 - RNA, 20 nt, Human
cagcaugugugcuccacacu

SEQ ID NO: 762817 - RNA, 20 nt, Human
cagguccucacuuucuacca

SEQ ID NO: 762818 - RNA, 21 nt, Human
caguaggaaggccagaggcac

SEQ ID NO: 762819 - RNA, 26 nt, Human
ccagcaccuucuuaaggcaaaguuuc

SEQ ID NO: 762820 - RNA, 19 nt, Human
ccuaaaaucuuccacuacu

SEQ ID NO: 762821 - RNA, 21 nt, Human
ccuaaaaucuuccacuacuac

SEQ ID NO: 762822 - RNA, 20 nt, Human
ccucagacacacugcaaucu

SEQ ID NO: 762823 - RNA, 23 nt, Human
ccuggccuuugcuaccucuccug

SEQ ID NO: 762824 - RNA, 22 nt, Human
ccuuggaauccagcaccuucuu

SEQ ID NO: 762825 - RNA, 20 nt, Human
cuccacacuuccagcuggcc

SEQ ID NO: 762826 - RNA, 20 nt, Human
cuccagagaggugaugaauu

SEQ ID NO: 762827 - RNA, 19 nt, Human
cuccucccuacuccuucca

SEQ ID NO: 762828 - RNA, 20 nt, Human
cugccacccggugcucaagc

SEQ ID NO: 762829 - RNA, 23 nt, Human
cuggcccuggguuccuugacuug

SEQ ID NO: 762830 - RNA, 22 nt, Human
cuguguucuuuucaaugcuugg

SEQ ID NO: 762831 - RNA, 23 nt, Human
cuugaaccacacugcauagaaca

SEQ ID NO: 762832 - RNA, 20 nt, Human
gaacuaagguauuaaccuug

SEQ ID NO: 762833 - RNA, 21 nt, Human
gaaucaacucagucuagcuga

SEQ ID NO: 762834 - RNA, 20 nt, Human
gcagcagggaagugaacuaa

SEQ ID NO: 762835 - RNA, 21 nt, Human
gccaccaugcagucucaaucc

SEQ ID NO: 762836 - RNA, 23 nt, Human
gcuggcccuggguuccuugaccg

SEQ ID NO: 762837 - RNA, 20 nt, Human
ggcaguauucagugucaggu

SEQ ID NO: 762838 - RNA, 18 nt, Human
ggucaaggcaauggcugu

SEQ ID NO: 762839 - RNA, 21 nt, Human
gucugcuuucaguaggaaggc

SEQ ID NO: 762840 - RNA, 24 nt, Human
uaaauacaauauaaagguggcaaa

SEQ ID NO: 762841 - RNA, 24 nt, Human
uaauaugaaauauaugggguggua

SEQ ID NO: 762842 - RNA, 24 nt, Human
uaauaugguuuguaaauaaguuuc

SEQ ID NO: 762843 - RNA, 24 nt, Human
uacaauagagauagguccaugaga

SEQ ID NO: 762844 - RNA, 18 nt, Human
uacacugugcuucagaau

SEQ ID NO: 762845 - RNA, 22 nt, Human
uacagguccucacuuucuacca

SEQ ID NO: 762846 - RNA, 20 nt, Human
uacuuuuuuuggcuuggugc

SEQ ID NO: 762847 - RNA, 24 nt, Human
uaggaaggccagaggcacuggaaa

SEQ ID NO: 762848 - RNA, 18 nt, Human
uaucaggcuacacagcac

SEQ ID NO: 762849 - RNA, 21 nt, Human
uauuagcauuaucuacuuaaa

SEQ ID NO: 762850 - RNA, 24 nt, Human
ucaagccuauuaaucacuuaaacc

SEQ ID NO: 762851 - RNA, 24 nt, Human
ucaguguuucagcuuuaacaagaa

SEQ ID NO: 762852 - RNA, 23 nt, Human
uccauacuagcaaugcauauaag

SEQ ID NO: 762853 - RNA, 20 nt, Human
ucuccacagcaugugugcuc

SEQ ID NO: 762854 - RNA, 26 nt, Human
ucuccugugccuucuacuuuuaucua

SEQ ID NO: 762855 - RNA, 23 nt, Human
ugaaaacacuacacauaaagaaa

SEQ ID NO: 762856 - RNA, 19 nt, Human
ugaaacaguaauaugaaau

SEQ ID NO: 762857 - RNA, 24 nt, Human
ugaacggucuucaugcacucugug

SEQ ID NO: 762858 - RNA, 20 nt, Human
ugaagaaaaccaaagaaaag

SEQ ID NO: 762859 - RNA, 19 nt, Human
ugacaaaggaauauguugg

SEQ ID NO: 762860 - RNA, 25 nt, Human
ugcucuacauaccuaaaaucuucca

SEQ ID NO: 762861 - RNA, 23 nt, Human
uggccucagguuggaacgcugcu

SEQ ID NO: 762862 - RNA, 18 nt, Human
uguaaauaaguuuccuac

SEQ ID NO: 762863 - RNA, 19 nt, Human
ugucucuccuuaugucucc

SEQ ID NO: 762864 - RNA, 22 nt, Human
ugugcaauguguauauuuguau

SEQ ID NO: 762865 - RNA, 22 nt, Human
ugugugcuccacagcaugugug

SEQ ID NO: 762866 - RNA, 23 nt, Human
uuaaacuaaguuugguauaucaa

SEQ ID NO: 762867 - RNA, 20 nt, Human
uuagcauuaucuacuuaaac

SEQ ID NO: 762868 - RNA, 18 nt, Human
uuccagcuggcccugggu

SEQ ID NO: 762869 - RNA, 18 nt, Human
uuccagcuggcccugggu

SEQ ID NO: 762870 - RNA, 18 nt, Human
uuuaacaagaaugcugga

SEQ ID NO: 762871 - RNA, 19 nt, Human
uuugaagaaaaccaaagaa

SEQ ID NO: 762872 - RNA, 18 nt, Human
aaaagagaguuaauaagu

SEQ ID NO: 762873 - RNA, 22 nt, Human
aaaaguguagaauaacacugcu

SEQ ID NO: 762874 - RNA, 26 nt, Human
aaaauguauuuaaaugauacaaagca

SEQ ID NO: 762875 - RNA, 26 nt, Human
aaacaaaauguauuuaaaugauacaa

SEQ ID NO: 762876 - RNA, 18 nt, Human
aaacagauauugguuucu

SEQ ID NO: 762877 - RNA, 21 nt, Human
aacacugcuacaaaucaucua

SEQ ID NO: 762878 - RNA, 20 nt, Human
aacacuucaaacacguggua

SEQ ID NO: 762879 - RNA, 19 nt, Human
aaccauuuucuaaaagccu

SEQ ID NO: 762880 - RNA, 22 nt, Human
aacuaaucucuuagccccuucc

SEQ ID NO: 762881 - RNA, 20 nt, Human
aagaaacccgauugaacaaa

SEQ ID NO: 762882 - RNA, 18 nt, Human
aagaucaccauuguacca

SEQ ID NO: 762883 - RNA, 23 nt, Human
aagcugguuucagccgugacaca

SEQ ID NO: 762884 - RNA, 20 nt, Human
aaguaguucauugaguuagu

SEQ ID NO: 762885 - RNA, 21 nt, Human
acaaccauuuucuaaaagccu

SEQ ID NO: 762886 - RNA, 23 nt, Human
accaaacagcaguccacauacaa

SEQ ID NO: 762887 - RNA, 23 nt, Human
acccguuuuauucaaugaucccu

SEQ ID NO: 762888 - RNA, 20 nt, Human
agaaaaagaaugcagaccau

SEQ ID NO: 762889 - RNA, 20 nt, Human
agaaugcagaccauacuaag

SEQ ID NO: 762890 - RNA, 19 nt, Human
aggcaaaaagaaaagaaac

SEQ ID NO: 762891 - RNA, 22 nt, Human
agguauuuauuugaaaugaaaa

SEQ ID NO: 762892 - RNA, 18 nt, Human
aguggaguuugcuugcug

SEQ ID NO: 762893 - RNA, 20 nt, Human
auccagagaaauaauuaguu

SEQ ID NO: 762894 - RNA, 25 nt, Human
auggaacacagaaagauauccagag

SEQ ID NO: 762895 - RNA, 22 nt, Human
augugcauuuuagugcauaagu

SEQ ID NO: 762896 - RNA, 26 nt, Human
auuaguggaguuugcuugcuggcagg

SEQ ID NO: 762897 - RNA, 25 nt, Human
caaaaacaaaaaaauagacauugau

SEQ ID NO: 762898 - RNA, 22 nt, Human
caaaugaacagguggauggaug

SEQ ID NO: 762899 - RNA, 24 nt, Human
caacacugagguggugcguagcca

SEQ ID NO: 762900 - RNA, 23 nt, Human
cacaguucauuuaccaaaacaaa

SEQ ID NO: 762901 - RNA, 24 nt, Human
caccaagaaacagauauugguuuc

SEQ ID NO: 762902 - RNA, 23 nt, Human
cacugcuacaaaucaucuagagg

SEQ ID NO: 762903 - RNA, 25 nt, Human
cacugcuacaaaucaucuagagggc

SEQ ID NO: 762904 - RNA, 18 nt, Human
cagaaaaagaaugcagac

SEQ ID NO: 762905 - RNA, 22 nt, Human
cagcuacugucaucagggagaa

SEQ ID NO: 762906 - RNA, 24 nt, Human
caguuuuacaacaaaguuuauaug

SEQ ID NO: 762907 - RNA, 22 nt, Human
caugauucauggacaaaaggag

SEQ ID NO: 762908 - RNA, 21 nt, Human
cauuaguugagacagggcugu

SEQ ID NO: 762909 - RNA, 22 nt, Human
ccagacaggggcaaggcccaca

SEQ ID NO: 762910 - RNA, 21 nt, Human
ccagaggaaauacuaccauga

SEQ ID NO: 762911 - RNA, 18 nt, Human
ccaguaucuucaauuuac

SEQ ID NO: 762912 - RNA, 20 nt, Human
cccacagcaccagcugccag

SEQ ID NO: 762913 - RNA, 24 nt, Human
ccccauuccuguacucuacacccg

SEQ ID NO: 762914 - RNA, 26 nt, Human
cggcuggacuccuauucucccacacu

SEQ ID NO: 762915 - RNA, 21 nt, Human
cguagccagguacaagacgcc

SEQ ID NO: 762916 - RNA, 24 nt, Human
cuauuauccagacggauggcugcu

SEQ ID NO: 762917 - RNA, 22 nt, Human
cuuucuuuccuuuuuuuacccc

SEQ ID NO: 762918 - RNA, 18 nt, Human
gaacacagaaagauaucc

SEQ ID NO: 762919 - RNA, 22 nt, Human
gagugagacagagguugucuau

SEQ ID NO: 762920 - RNA, 20 nt, Human
gcacaauuucugcaacuguu

SEQ ID NO: 762921 - RNA, 19 nt, Human
gccagguacaagacgccca

SEQ ID NO: 762922 - RNA, 24 nt, Human
ggaaaaaaagaccacagauaaugu

SEQ ID NO: 762923 - RNA, 22 nt, Human
ggaaaacagaacacaacuuuuc

SEQ ID NO: 762924 - RNA, 23 nt, Human
ggaaaguuuaaaaguguucaucc

SEQ ID NO: 762925 - RNA, 20 nt, Human
ggacaggagaaucgggaagg

SEQ ID NO: 762926 - RNA, 21 nt, Human
ggagaguguggggggaguaag

SEQ ID NO: 762927 - RNA, 18 nt, Human
ggagggagaguguggggg

SEQ ID NO: 762928 - RNA, 21 nt, Human
gggguaaacaugauucaugga

SEQ ID NO: 762929 - RNA, 19 nt, Human
gguuaauuuuaagcaguuc

SEQ ID NO: 762930 - RNA, 26 nt, Human
guaaauaaauuuacauggaacacaga

SEQ ID NO: 762931 - RNA, 25 nt, Human
guaagacacagaaaggaaaacagaa

SEQ ID NO: 762932 - RNA, 19 nt, Human
guagaacauuagugucacc

SEQ ID NO: 762933 - RNA, 18 nt, Human
guccacaaucaauccagu

SEQ ID NO: 762934 - RNA, 19 nt, Human
gugauucuguugauuucug

SEQ ID NO: 762935 - RNA, 21 nt, Human
guuacuagccuaguuuaagug

SEQ ID NO: 762936 - RNA, 18 nt, Human
guuauggaaguucuguua

SEQ ID NO: 762937 - RNA, 18 nt, Human
uaaagaacaccucugcca

SEQ ID NO: 762938 - RNA, 25 nt, Human
uacaauauacauaguuacuugcaaa

SEQ ID NO: 762939 - RNA, 26 nt, Human
uacauaacacacauuuaaaaaaaucc

SEQ ID NO: 762940 - RNA, 23 nt, Human
uacuugcaaagaagucagauuua

SEQ ID NO: 762941 - RNA, 18 nt, Human
uagaaaguuaguaaugga

SEQ ID NO: 762942 - RNA, 19 nt, Human
uagaauaacacugcuacaa

SEQ ID NO: 762943 - RNA, 18 nt, Human
uaguagaacaaauuaaau

SEQ ID NO: 762944 - RNA, 21 nt, Human
uauauauauauauauguacau

SEQ ID NO: 762945 - RNA, 23 nt, Human
uauauauauauguacauaacaca

SEQ ID NO: 762946 - RNA, 24 nt, Human
uauauauguacauaacacacauuu

SEQ ID NO: 762947 - RNA, 19 nt, Human
uauauauuauauauauaua

SEQ ID NO: 762948 - RNA, 23 nt, Human
uauauauuauauauauauauaua

SEQ ID NO: 762949 - RNA, 19 nt, Human
uauauguacauaacacaca

SEQ ID NO: 762950 - RNA, 25 nt, Human
uauauuauauauauauauauaugua

SEQ ID NO: 762951 - RNA, 19 nt, Human
uauauucauagcaaaaaca

SEQ ID NO: 762952 - RNA, 23 nt, Human
uaucaggaagaacaaauuuguuc

SEQ ID NO: 762953 - RNA, 20 nt, Human
uauuuuugaaugcaugugca

SEQ ID NO: 762954 - RNA, 22 nt, Human
ucaccugaaucgcgucugcccc

SEQ ID NO: 762955 - RNA, 21 nt, Human
ucagauaucacagacugcaca

SEQ ID NO: 762956 - RNA, 19 nt, Human
ucagcauuauuuauuagaa

SEQ ID NO: 762957 - RNA, 19 nt, Human
ucaugcaacaaguaaccaa

SEQ ID NO: 762958 - RNA, 24 nt, Human
ucccaccaccaagccuuuucucug

SEQ ID NO: 762959 - RNA, 21 nt, Human
ucccauauaguuuccuauuac

SEQ ID NO: 762960 - RNA, 22 nt, Human
uccuuuuauuaacaaguauauu

SEQ ID NO: 762961 - RNA, 20 nt, Human
ugaaaggaaaaaaagaccac

SEQ ID NO: 762962 - RNA, 27 nt, Human
ugaaaugaaaaaaaaauuacuuaagua

SEQ ID NO: 762963 - RNA, 19 nt, Human
ugaacaaaacaguugccca

SEQ ID NO: 762964 - RNA, 26 nt, Human
ugaacaaacuacaaagaucaggcugu

SEQ ID NO: 762965 - RNA, 20 nt, Human
ugaaugaacaaacuacaaag

SEQ ID NO: 762966 - RNA, 24 nt, Human
ugaaugaacaaacuacaaagauca

SEQ ID NO: 762967 - RNA, 21 nt, Human
ugaccaaacagcaguccacau

SEQ ID NO: 762968 - RNA, 25 nt, Human
ugaccaaacagcaguccacauacaa

SEQ ID NO: 762969 - RNA, 18 nt, Human
ugauauguaaucauaaau

SEQ ID NO: 762970 - RNA, 22 nt, Human
ugcaugaugccucugugagggu

SEQ ID NO: 762971 - RNA, 23 nt, Human
ugcuacaaaucaucuagagggcc

SEQ ID NO: 762972 - RNA, 31 nt, Human
ugcugaaauuaaaaauacuuucuaaaaacaa

SEQ ID NO: 762973 - RNA, 22 nt, Human
uggaugaacaaaugaacaggug

SEQ ID NO: 762974 - RNA, 20 nt, Human
uggaugaaugaacaaacuac

SEQ ID NO: 762975 - RNA, 24 nt, Human
uggauggaugaaugaacaaacuac

SEQ ID NO: 762976 - RNA, 24 nt, Human
ugggcaacuugaaagaaaugacau

SEQ ID NO: 762977 - RNA, 19 nt, Human
ugggggagggagagugugg

SEQ ID NO: 762978 - RNA, 21 nt, Human
uguaugugaguguacuuguau

SEQ ID NO: 762979 - RNA, 22 nt, Human
uguauuuaaaugauacaaagca

SEQ ID NO: 762980 - RNA, 22 nt, Human
ugugaaggccuuuccuuucgca

SEQ ID NO: 762981 - RNA, 22 nt, Human
ugugaaggugugaaggccuauc

SEQ ID NO: 762982 - RNA, 19 nt, Human
uguugauuucugcauuaga

SEQ ID NO: 762983 - RNA, 21 nt, Human
uuaaaaaaaucccaccaccaa

SEQ ID NO: 762984 - RNA, 22 nt, Human
uuaaucauguauuguaauugug

SEQ ID NO: 762985 - RNA, 26 nt, Human
uuaaugccgauaauccuuuuauuaac

SEQ ID NO: 762986 - RNA, 19 nt, Human
uuauauauauauauauauu

SEQ ID NO: 762987 - RNA, 19 nt, Human
uucauggacaaaaggagga

SEQ ID NO: 762988 - RNA, 26 nt, Human
uucauuuaccaaaacaaaauguauuu

SEQ ID NO: 762989 - RNA, 24 nt, Human
uuccagcuuuaaucccccuggauu

SEQ ID NO: 762990 - RNA, 20 nt, Human
uucuugugcuguucaccuga

SEQ ID NO: 762991 - RNA, 21 nt, Human
uugcuggcaggagugagacag

SEQ ID NO: 762992 - RNA, 18 nt, Human
uuggaaaagccaaagccg

SEQ ID NO: 762993 - RNA, 24 nt, Human
uuguagaccuuucaggggaagccu

SEQ ID NO: 762994 - RNA, 30 nt, Human
uuuaauauauauuauauauauauauauauu

SEQ ID NO: 762995 - RNA, 20 nt, Human
uuuacauaaccaccaagaaa

SEQ ID NO: 762996 - RNA, 21 nt, Human
uuuacauaaccaccaagaaac

SEQ ID NO: 762997 - RNA, 18 nt, Human
uuugcaugaugccucugu

SEQ ID NO: 762998 - RNA, 20 nt, Human
uuugguuuccaccuucuagu

SEQ ID NO: 762999 - RNA, 23 nt, Human
uuuguucuuaagcugguuucagc

SEQ ID NO: 763000 - RNA, 21 nt, Human
agacagugacaggagucaggg

SEQ ID NO: 763001 - RNA, 18 nt, Human
agccgcgcccccuccagc

SEQ ID NO: 763002 - RNA, 21 nt, Human
aggagacccgagaggaggagg

SEQ ID NO: 763003 - RNA, 19 nt, Human
aggaggaggagacccgaga

SEQ ID NO: 763004 - RNA, 19 nt, Human
aggaggcggcgagcggcgg

SEQ ID NO: 763005 - RNA, 22 nt, Human
aucuugucuccuaacacccgga

SEQ ID NO: 763006 - RNA, 22 nt, Human
auucuauuuucagucgcuccca

SEQ ID NO: 763007 - RNA, 20 nt, Human
cacugccgccgccgcgaccc

SEQ ID NO: 763008 - RNA, 21 nt, Human
caggaggaggaggaggcagca

SEQ ID NO: 763009 - RNA, 18 nt, Human
cccacauaggaucaaagu

SEQ ID NO: 763010 - RNA, 19 nt, Human
cccccuccagcuccuccuc

SEQ ID NO: 763011 - RNA, 23 nt, Human
ccccgccccggccccagcucggc

SEQ ID NO: 763012 - RNA, 24 nt, Human
cccggccccagcucggccucgguc

SEQ ID NO: 763013 - RNA, 19 nt, Human
ccgagaggaggaggcggcg

SEQ ID NO: 763014 - RNA, 18 nt, Human
ccgccagcgcccccacug

SEQ ID NO: 763015 - RNA, 18 nt, Human
ccgccgccgccgccgccg

SEQ ID NO: 763016 - RNA, 27 nt, Human
ccgccgccgccgccguccccgccccgg

SEQ ID NO: 763017 - RNA, 18 nt, Human
ccgccgccgccguccccg

SEQ ID NO: 763018 - RNA, 19 nt, Human
ccgccgccgccguccccgc

SEQ ID NO: 763019 - RNA, 19 nt, Human
ccgccgccguccccgcccc

SEQ ID NO: 763020 - RNA, 20 nt, Human
ccgccgccguccccgccccg

SEQ ID NO: 763021 - RNA, 18 nt, Human
ccgccgccgucgccgccg

SEQ ID NO: 763022 - RNA, 24 nt, Human
ccgccgccgucgccgccgccgccg

SEQ ID NO: 763023 - RNA, 21 nt, Human
ccgccgcgacccccgccggcc

SEQ ID NO: 763024 - RNA, 24 nt, Human
ccgccguccccgccccggccccag

SEQ ID NO: 763025 - RNA, 18 nt, Human
ccgccgucgccgccgccg

SEQ ID NO: 763026 - RNA, 24 nt, Human
ccgccgucgccgccgccgccgccg

SEQ ID NO: 763027 - RNA, 21 nt, Human
ccgcggcccgccagcgccccc

SEQ ID NO: 763028 - RNA, 23 nt, Human
ccggagccgcggcccggcccccg

SEQ ID NO: 763029 - RNA, 22 nt, Human
ccggcgccagggagcgaccgag

SEQ ID NO: 763030 - RNA, 24 nt, Human
ccggcgccgccgccgucgccgccg

SEQ ID NO: 763031 - RNA, 24 nt, Human
ccgucgccgccgccgccgccgccg

SEQ ID NO: 763032 - RNA, 27 nt, Human
ccgucgccgccgccgccgccgccgucc

SEQ ID NO: 763033 - RNA, 24 nt, Human
cgacccccgccggccgccagcccu

SEQ ID NO: 763034 - RNA, 18 nt, Human
cgagcggcggggcggagg

SEQ ID NO: 763035 - RNA, 24 nt, Human
cgcccccacugccgccgccgcgac

SEQ ID NO: 763036 - RNA, 22 nt, Human
cgccccggccccagcucggccu

SEQ ID NO: 763037 - RNA, 23 nt, Human
cgccgccgccgccgccgccgucc

SEQ ID NO: 763038 - RNA, 23 nt, Human
cgccgccgccgccgccguccccg

SEQ ID NO: 763039 - RNA, 24 nt, Human
cgccgccgccgucgccgccgccgg

SEQ ID NO: 763040 - RNA, 22 nt, Human
cgccggagccugcagcugcccc

SEQ ID NO: 763041 - RNA, 27 nt, Human
cgcggcccggcccccgccacccgcggc

SEQ ID NO: 763042 - RNA, 20 nt, Human
cggcccggcccccgccaccc

SEQ ID NO: 763043 - RNA, 21 nt, Human
cuucugagagccgccgccauc

SEQ ID NO: 763044 - RNA, 18 nt, Human
gacccgagaggaggaggc

SEQ ID NO: 763045 - RNA, 22 nt, Human
gacccgagaggaggaggcggcg

SEQ ID NO: 763046 - RNA, 18 nt, Human
gaccggccuucugagagc

SEQ ID NO: 763047 - RNA, 20 nt, Human
gaggaggcggcgagcggcgg

SEQ ID NO: 763048 - RNA, 20 nt, Human
gauggagacagugacaggag

SEQ ID NO: 763049 - RNA, 19 nt, Human
ggagccgcggcccggcccc

SEQ ID NO: 763050 - RNA, 21 nt, Human
ggaggagacccgagaggagga

SEQ ID NO: 763051 - RNA, 19 nt, Human
gggauggagacagugacag

SEQ ID NO: 763052 - RNA, 21 nt, Human
ucagcuuuauuuggggaugga

SEQ ID NO: 763053 - RNA, 20 nt, Human
ucagggugaagggcaaagga

SEQ ID NO: 763054 - RNA, 21 nt, Human
ucgccgccgccgccgccgccg

SEQ ID NO: 763055 - RNA, 21 nt, Human
ucuucugcuuguuccucucuu

SEQ ID NO: 763056 - RNA, 19 nt, Human
ugacaggagucagggugaa

SEQ ID NO: 763057 - RNA, 23 nt, Human
ugccccgucuauccaccuccgga

SEQ ID NO: 763058 - RNA, 23 nt, Human
uucggcggucgcuggugcugcug

SEQ ID NO: 763059 - RNA, 20 nt, Human
uucugcuuguuccucucuuu

SEQ ID NO: 763060 - RNA, 20 nt, Human
aaccagagcugcggagauuu

SEQ ID NO: 763061 - RNA, 22 nt, Human
aauuccaccagucaaucaaaaa

SEQ ID NO: 763062 - RNA, 22 nt, Human
acaggaaccagagcugcggaga

SEQ ID NO: 763063 - RNA, 21 nt, Human
acccauuacuucuuacacucu

SEQ ID NO: 763064 - RNA, 22 nt, Human
acuaaaauacagaaaauaauca

SEQ ID NO: 763065 - RNA, 21 nt, Human
agaaagaaguaaaacuacaag

SEQ ID NO: 763066 - RNA, 18 nt, Human
agaagaaacaaaauaauc

SEQ ID NO: 763067 - RNA, 21 nt, Human
agagcugcggagauuuuaggg

SEQ ID NO: 763068 - RNA, 22 nt, Human
agcugcggagauuuuagggagu

SEQ ID NO: 763069 - RNA, 18 nt, Human
aguagccuaacaaccccc

SEQ ID NO: 763070 - RNA, 20 nt, Human
auaaaaauaagcauuucuca

SEQ ID NO: 763071 - RNA, 18 nt, Human
auaaaaguacuuuaaccc

SEQ ID NO: 763072 - RNA, 25 nt, Human
auaaacagaaagaaguaaaacuaca

SEQ ID NO: 763073 - RNA, 24 nt, Human
aucuuugcaacuggaacuuuuugg

SEQ ID NO: 763074 - RNA, 23 nt, Human
auucaaguuauccuacuuuacag

SEQ ID NO: 763075 - RNA, 19 nt, Human
auuuaagcuauaauucuag

SEQ ID NO: 763076 - RNA, 22 nt, Human
auuuuaaguuuagaauuauuua

SEQ ID NO: 763077 - RNA, 21 nt, Human
caaaucagccgcgggaaaggc

SEQ ID NO: 763078 - RNA, 21 nt, Human
cacaaauauuagagucaccau

SEQ ID NO: 763079 - RNA, 22 nt, Human
caccaaauauuuaacuucucca

SEQ ID NO: 763080 - RNA, 22 nt, Human
caccgcacugagccggccccgc

SEQ ID NO: 763081 - RNA, 20 nt, Human
cacucuaaacuacagauuuu

SEQ ID NO: 763082 - RNA, 19 nt, Human
cagaucugauauuccuggg

SEQ ID NO: 763083 - RNA, 18 nt, Human
cagccgcgggaaaggcgg

SEQ ID NO: 763084 - RNA, 20 nt, Human
caggaaccagagcugcggag

SEQ ID NO: 763085 - RNA, 22 nt, Human
caggaagacagaaaagauggug

SEQ ID NO: 763086 - RNA, 21 nt, Human
cccauguccucuccaaauuca

SEQ ID NO: 763087 - RNA, 23 nt, Human
ccccuuuuauuuuagaaagaccc

SEQ ID NO: 763088 - RNA, 18 nt, Human
ccgcacugagccggcccc

SEQ ID NO: 763089 - RNA, 18 nt, Human
ccgcugccgcacagccgc

SEQ ID NO: 763090 - RNA, 20 nt, Human
ccgcugccgcacagccgcgc

SEQ ID NO: 763091 - RNA, 23 nt, Human
cgaaggggccgcgagcugcagug

SEQ ID NO: 763092 - RNA, 18 nt, Human
cgcucgggcugggcugcg

SEQ ID NO: 763093 - RNA, 19 nt, Human
cucuccuuucuacccacua

SEQ ID NO: 763094 - RNA, 22 nt, Human
cuucuuacacucuaaacuacag

SEQ ID NO: 763095 - RNA, 19 nt, Human
cuuuuuggguugauggaag

SEQ ID NO: 763096 - RNA, 23 nt, Human
gacugugcugcaacaaaggacuu

SEQ ID NO: 763097 - RNA, 18 nt, Human
gcggcgcucggcgcucgg

SEQ ID NO: 763098 - RNA, 21 nt, Human
ggcugcgcggagaggcucugg

SEQ ID NO: 763099 - RNA, 23 nt, Human
gguuuuucucuccuuucuaccca

SEQ ID NO: 763100 - RNA, 19 nt, Human
guggcggcggcgcgcggcg

SEQ ID NO: 763101 - RNA, 19 nt, Human
uaacagguuuaaaagggag

SEQ ID NO: 763102 - RNA, 22 nt, Human
uaagaauacuauaaaucucugu

SEQ ID NO: 763103 - RNA, 18 nt, Human
uaaggcaaaucagccgcg

SEQ ID NO: 763104 - RNA, 18 nt, Human
uaaguuuagaauuauuua

SEQ ID NO: 763105 - RNA, 23 nt, Human
uacuauauacuaaaauacagaaa

SEQ ID NO: 763106 - RNA, 19 nt, Human
uacuucuuacacucuaaac

SEQ ID NO: 763107 - RNA, 19 nt, Human
uagccagacuaaaaucuca

SEQ ID NO: 763108 - RNA, 20 nt, Human
uagccagacuaaaaucucac

SEQ ID NO: 763109 - RNA, 23 nt, Human
uagccagacuaaaaucucaccaa

SEQ ID NO: 763110 - RNA, 22 nt, Human
uagcuguaaccacugauguugu

SEQ ID NO: 763111 - RNA, 18 nt, Human
uauaaaugaucaagauug

SEQ ID NO: 763112 - RNA, 22 nt, Human
uauauauaugugcacauauaua

SEQ ID NO: 763113 - RNA, 20 nt, Human
uauauaugugcacauauaua

SEQ ID NO: 763114 - RNA, 22 nt, Human
uauauaugugcacauauauaua

SEQ ID NO: 763115 - RNA, 18 nt, Human
uaugugcacauauauaua

SEQ ID NO: 763116 - RNA, 24 nt, Human
uauucugccuuauuagguuauauu

SEQ ID NO: 763117 - RNA, 24 nt, Human
uauugcagaagaaacaaaauaauc

SEQ ID NO: 763118 - RNA, 21 nt, Human
ucaaaauaaauaacaucuuga

SEQ ID NO: 763119 - RNA, 19 nt, Human
ucagaagaaaauaaugugu

SEQ ID NO: 763120 - RNA, 21 nt, Human
uccucuccaaauucagaucuc

SEQ ID NO: 763121 - RNA, 18 nt, Human
ucggcgcucgggcugggc

SEQ ID NO: 763122 - RNA, 21 nt, Human
ucucagauuuucacuuagucu

SEQ ID NO: 763123 - RNA, 23 nt, Human
ucuccauuaaagauuuuuuaaaa

SEQ ID NO: 763124 - RNA, 21 nt, Human
ugaaguaauaccauuucuguu

SEQ ID NO: 763125 - RNA, 19 nt, Human
ugauuuguggaaaucuacc

SEQ ID NO: 763126 - RNA, 21 nt, Human
ugcacauauauauaucaaaca

SEQ ID NO: 763127 - RNA, 21 nt, Human
ugcagaagaaacaaaauaauc

SEQ ID NO: 763128 - RNA, 21 nt, Human
ugccgcacagccgcgccugcc

SEQ ID NO: 763129 - RNA, 18 nt, Human
uggaacuuuuuggguuga

SEQ ID NO: 763130 - RNA, 19 nt, Human
uggaacuuuuuggguugau

SEQ ID NO: 763131 - RNA, 27 nt, Human
uggaauaaauagucauaaaaauaagca

SEQ ID NO: 763132 - RNA, 20 nt, Human
uggcggcggcgcgcggcgcu

SEQ ID NO: 763133 - RNA, 23 nt, Human
uggcggcggcgcgcggcgcucgg

SEQ ID NO: 763134 - RNA, 22 nt, Human
uguaauaaaaguacuuuaaccc

SEQ ID NO: 763135 - RNA, 24 nt, Human
uguacccauuacuucuuacacucu

SEQ ID NO: 763136 - RNA, 20 nt, Human
uuaaagcaguagaauucaca

SEQ ID NO: 763137 - RNA, 20 nt, Human
uuauuagaaugaauauucaa

SEQ ID NO: 763138 - RNA, 21 nt, Human
uucagcagauuuacacaaaua

SEQ ID NO: 763139 - RNA, 19 nt, Human
uucaguggguuuuucuccu

SEQ ID NO: 763140 - RNA, 18 nt, Human
uuccccauguccucucca

SEQ ID NO: 763141 - RNA, 23 nt, Human
uucuuccccauguccucuccaaa

SEQ ID NO: 763142 - RNA, 21 nt, Human
uuuauauuugcaguagccuaa

SEQ ID NO: 763143 - RNA, 24 nt, Human
uuugcaguagccuaacaaccccuu

SEQ ID NO: 763144 - RNA, 19 nt, Human
aagagacaguucagaugca

SEQ ID NO: 763145 - RNA, 21 nt, Human
aaucaccuaagcccaggguaa

SEQ ID NO: 763146 - RNA, 22 nt, Human
aaucaccuaagcccaggguaaa

SEQ ID NO: 763147 - RNA, 21 nt, Human
accaccaacuuccacucaggu

SEQ ID NO: 763148 - RNA, 21 nt, Human
accacuguccugggugcugac

SEQ ID NO: 763149 - RNA, 20 nt, Human
acugcaguucagucuguguu

SEQ ID NO: 763150 - RNA, 21 nt, Human
agaguaugauucuggcucuga

SEQ ID NO: 763151 - RNA, 21 nt, Human
agguuacaacaucuuuggccc

SEQ ID NO: 763152 - RNA, 24 nt, Human
cacagaaccacccaacuucccugg

SEQ ID NO: 763153 - RNA, 18 nt, Human
ccaacuuccacucagguc

SEQ ID NO: 763154 - RNA, 22 nt, Human
cccaguccugauggcuuuccuc

SEQ ID NO: 763155 - RNA, 20 nt, Human
ccuugugccuggcaaacuuc

SEQ ID NO: 763156 - RNA, 22 nt, Human
cucagguuucuuucuccauauu

SEQ ID NO: 763157 - RNA, 25 nt, Human
cucccagguuacaacaucuuuggcc

SEQ ID NO: 763158 - RNA, 19 nt, Human
cuccucagguuucuuucuc

SEQ ID NO: 763159 - RNA, 19 nt, Human
cuucagagaagucucccag

SEQ ID NO: 763160 - RNA, 24 nt, Human
cuuucuucagagaagucucccagg

SEQ ID NO: 763161 - RNA, 18 nt, Human
gacagaccaagcacagaa

SEQ ID NO: 763162 - RNA, 22 nt, Human
gcacagaaccacccaacuuccc

SEQ ID NO: 763163 - RNA, 20 nt, Human
ggugcugacacagaacaguc

SEQ ID NO: 763164 - RNA, 18 nt, Human
ucccagguuacaacaucu

SEQ ID NO: 763165 - RNA, 19 nt, Human
ucuuaaacaguuuucuuuc

SEQ ID NO: 763166 - RNA, 22 nt, Human
ugaaaaaagcucauuuacaaga

SEQ ID NO: 763167 - RNA, 25 nt, Human
ugaugagaaucaccuaagcccaggg

SEQ ID NO: 763168 - RNA, 18 nt, Human
ugcauguaguuguuugua

SEQ ID NO: 763169 - RNA, 22 nt, Human
ugcauguaguuguuuguaggcu

SEQ ID NO: 763170 - RNA, 19 nt, Human
uuaccaccaacuuccacuc

SEQ ID NO: 763171 - RNA, 18 nt, Human
uucccuggcccuuucucc

SEQ ID NO: 763172 - RNA, 21 nt, Human
uucccuggcccuuucucccga

SEQ ID NO: 763173 - RNA, 21 nt, Human
uucccuggcccuuucucccgg

SEQ ID NO: 763174 - RNA, 21 nt, Human
uucuggcucugaaaaaagcuc

SEQ ID NO: 763175 - RNA, 27 nt, Human
aaaagaacagcacacggaugaaccaaa

SEQ ID NO: 763176 - RNA, 23 nt, Human
aacauggcaaaacccucucagaa

SEQ ID NO: 763177 - RNA, 22 nt, Human
aacccucucagaacccaaaaga

SEQ ID NO: 763178 - RNA, 20 nt, Human
aagcaaacauggcaaaaccc

SEQ ID NO: 763179 - RNA, 22 nt, Human
agaaacacaagggcaauuuggc

SEQ ID NO: 763180 - RNA, 24 nt, Human
agcaaacauggcaaaacccucuca

SEQ ID NO: 763181 - RNA, 24 nt, Human
caaaacccucucagaacccaaaag

SEQ ID NO: 763182 - RNA, 23 nt, Human
caaucaaccuuuucauucccaag

SEQ ID NO: 763183 - RNA, 21 nt, Human
cccaaaagaacagcacacgga

SEQ ID NO: 763184 - RNA, 19 nt, Human
gaacagcacacggaugaac

SEQ ID NO: 763185 - RNA, 24 nt, Human
gcaaaacccucucagaacccaaaa

SEQ ID NO: 763186 - RNA, 24 nt, Human
ggcaaaacccucucagaacccaaa

SEQ ID NO: 763187 - RNA, 21 nt, Human
ggguggagagaaacacaaggg

SEQ ID NO: 763188 - RNA, 21 nt, Human
gguggagagaaacacaagggc

SEQ ID NO: 763189 - RNA, 19 nt, Human
uacaagcaaacauggcaaa

SEQ ID NO: 763190 - RNA, 19 nt, Human
ucagaacccaaaagaacag

SEQ ID NO: 763191 - RNA, 18 nt, Human
uccuguuuauuuccuugg

SEQ ID NO: 763192 - RNA, 19 nt, Human
ugacuuggucauacaagca

SEQ ID NO: 763193 - RNA, 20 nt, Human
ugaggaaagcagcugugaua

SEQ ID NO: 763194 - RNA, 19 nt, Human
uggagagaaacacaagggc

SEQ ID NO: 763195 - RNA, 20 nt, Human
ugugaggaaagcagcuguga

SEQ ID NO: 763196 - RNA, 18 nt, Human
uucccaagcuguacacaa

SEQ ID NO: 763197 - RNA, 23 nt, Human
aaacagaacccaugucugucuca

SEQ ID NO: 763198 - RNA, 22 nt, Human
aagaggaaauauggacaaagga

SEQ ID NO: 763199 - RNA, 21 nt, Human
aaucaagccaaaguugccuaa

SEQ ID NO: 763200 - RNA, 24 nt, Human
aguauaaaauagcugcugaucaaa

SEQ ID NO: 763201 - RNA, 21 nt, Human
auugaaaagguucuuccauuu

SEQ ID NO: 763202 - RNA, 19 nt, Human
auuuaaucugucaugugaa

SEQ ID NO: 763203 - RNA, 19 nt, Human
cacaccuggccaguacuuu

SEQ ID NO: 763204 - RNA, 21 nt, Human
caccaacaugcccuagucccc

SEQ ID NO: 763205 - RNA, 22 nt, Human
caggaaaagcugaugcugguug

SEQ ID NO: 763206 - RNA, 21 nt, Human
cauuaacuguggaagcaauga

SEQ ID NO: 763207 - RNA, 22 nt, Human
ccauuaacuguggaagcaauga

SEQ ID NO: 763208 - RNA, 23 nt, Human
cccauuaacuguggaagcaauga

SEQ ID NO: 763209 - RNA, 24 nt, Human
ccuuaugaguauaaaauagcugcu

SEQ ID NO: 763210 - RNA, 20 nt, Human
cugggccugaagucacugua

SEQ ID NO: 763211 - RNA, 27 nt, Human
cugguucugggccugaagucacuguag

SEQ ID NO: 763212 - RNA, 21 nt, Human
cuguaggucgacugugaaugc

SEQ ID NO: 763213 - RNA, 18 nt, Human
gaagggaaguccauaaga

SEQ ID NO: 763214 - RNA, 20 nt, Human
gagcuggaagagcucugggu

SEQ ID NO: 763215 - RNA, 22 nt, Human
gcuggcaggagcuggaagagcu

SEQ ID NO: 763216 - RNA, 20 nt, Human
ggagaagucuaggccaggcu

SEQ ID NO: 763217 - RNA, 20 nt, Human
ggucuguacacugaccuuau

SEQ ID NO: 763218 - RNA, 25 nt, Human
ggugugaaaagcaauuuaaacaugu

SEQ ID NO: 763219 - RNA, 21 nt, Human
uaaguuuuuggccaugaaaca

SEQ ID NO: 763220 - RNA, 23 nt, Human
uaguuuacuugcauuugaggauc

SEQ ID NO: 763221 - RNA, 19 nt, Human
ucaaaacauucaucuucga

SEQ ID NO: 763222 - RNA, 19 nt, Human
ucacugaaugucucgugug

SEQ ID NO: 763223 - RNA, 19 nt, Human
ucagaauugaaaagguucu

SEQ ID NO: 763224 - RNA, 23 nt, Human
ucagccuuacacaauugugggug

SEQ ID NO: 763225 - RNA, 19 nt, Human
uccagggagcugucucugg

SEQ ID NO: 763226 - RNA, 21 nt, Human
ucucaggaaaagcugaugcug

SEQ ID NO: 763227 - RNA, 21 nt, Human
ucuggucucuucuagcucccc

SEQ ID NO: 763228 - RNA, 27 nt, Human
ucuucuaugaguccuacccauuaagag

SEQ ID NO: 763229 - RNA, 22 nt, Human
ugaagggaaguccauaagaaca

SEQ ID NO: 763230 - RNA, 18 nt, Human
ugaaugucucgugugggg

SEQ ID NO: 763231 - RNA, 19 nt, Human
ugaaugucucguguggggu

SEQ ID NO: 763232 - RNA, 20 nt, Human
ugcccuaguccccaugaagc

SEQ ID NO: 763233 - RNA, 23 nt, Human
ugcugguugccauggagcugcac

SEQ ID NO: 763234 - RNA, 20 nt, Human
uggguccagggagcugucuc

SEQ ID NO: 763235 - RNA, 19 nt, Human
ugucucacggccuccacug

SEQ ID NO: 763236 - RNA, 23 nt, Human
uuccuuguacuucuccagcuguu

SEQ ID NO: 763237 - RNA, 23 nt, Human
uugcaaagcugaaggaggaggcu

SEQ ID NO: 763238 - RNA, 19 nt, Human
uugccuaacuauagcuaua

SEQ ID NO: 763239 - RNA, 18 nt, Human
uuuaaagcauguaccagc

SEQ ID NO: 763240 - RNA, 22 nt, Human
aaaaaagagaaaagagagagaa

SEQ ID NO: 763241 - RNA, 20 nt, Human
aaacuugccuaauuuccagg

SEQ ID NO: 763242 - RNA, 18 nt, Human
aaagugcugggacuacag

SEQ ID NO: 763243 - RNA, 19 nt, Human
aaagugcugggacuacagg

SEQ ID NO: 763244 - RNA, 22 nt, Human
aaagugcugggacuacaggugu

SEQ ID NO: 763245 - RNA, 24 nt, Human
aaagugcugggacuacagguguga

SEQ ID NO: 763246 - RNA, 23 nt, Human
aaaugaccagagaaacugggaac

SEQ ID NO: 763247 - RNA, 21 nt, Human
aacuccaagacuaaacuaaag

SEQ ID NO: 763248 - RNA, 19 nt, Human
aagaguaaggccauucugu

SEQ ID NO: 763249 - RNA, 21 nt, Human
aagaugcugguggcaguggug

SEQ ID NO: 763250 - RNA, 19 nt, Human
aagcucugggacuacaggc

SEQ ID NO: 763251 - RNA, 19 nt, Human
aaguagcugggguuucagg

SEQ ID NO: 763252 - RNA, 24 nt, Human
aaguagcugggguuucaggcacgc

SEQ ID NO: 763253 - RNA, 19 nt, Human
aagugcugggacuacaggu

SEQ ID NO: 763254 - RNA, 26 nt, Human
aagugcugggacuacaggugugagcc

SEQ ID NO: 763255 - RNA, 22 nt, Human
aauagugauugagcaguccaug

SEQ ID NO: 763256 - RNA, 24 nt, Human
aauuuuguauuuuuagcagagaca

SEQ ID NO: 763257 - RNA, 24 nt, Human
acaggauuucaccauguuggccag

SEQ ID NO: 763258 - RNA, 18 nt, Human
accauguuggccaggcug

SEQ ID NO: 763259 - RNA, 18 nt, Human
accauguuggccaggcug

SEQ ID NO: 763260 - RNA, 19 nt, Human
acccaggcuggagugcagu

SEQ ID NO: 763261 - RNA, 23 nt, Human
acccaggcuggagugcaguggug

SEQ ID NO: 763262 - RNA, 22 nt, Human
accgcagcucaguaaaaugacu

SEQ ID NO: 763263 - RNA, 23 nt, Human
accucagccucccaaagcucugg

SEQ ID NO: 763264 - RNA, 19 nt, Human
acuacaggugugagccacu

SEQ ID NO: 763265 - RNA, 19 nt, Human
acucccugcccagagccag

SEQ ID NO: 763266 - RNA, 25 nt, Human
acugcagccuccaccuccccgguuc

SEQ ID NO: 763267 - RNA, 19 nt, Human
agaaacugggaaccagaga

SEQ ID NO: 763268 - RNA, 24 nt, Human
agagucucacucugucccucaggc

SEQ ID NO: 763269 - RNA, 18 nt, Human
aggaaaaaaagagaaaag

SEQ ID NO: 763270 - RNA, 19 nt, Human
aggaaaaaaagagaaaaga

SEQ ID NO: 763271 - RNA, 22 nt, Human
aggaaggggauugggccacaga

SEQ ID NO: 763272 - RNA, 25 nt, Human
aggaaucccgggugcuccccccgag

SEQ ID NO: 763273 - RNA, 19 nt, Human
aggagggacaggauacaga

SEQ ID NO: 763274 - RNA, 23 nt, Human
aggauuucaccauguuggccagg

SEQ ID NO: 763275 - RNA, 25 nt, Human
aggcuggagugcaguggugcgaucu

SEQ ID NO: 763276 - RNA, 24 nt, Human
aggugguuuuggagaaaacaagga

SEQ ID NO: 763277 - RNA, 18 nt, Human
aguagccgggauuacagg

SEQ ID NO: 763278 - RNA, 22 nt, Human
aguagcgaugggguuucaccau

SEQ ID NO: 763279 - RNA, 19 nt, Human
agugauccacccaccucag

SEQ ID NO: 763280 - RNA, 20 nt, Human
agugcaguggugcgaucucg

SEQ ID NO: 763281 - RNA, 23 nt, Human
agugcaguggugcgaucucggcu

SEQ ID NO: 763282 - RNA, 24 nt, Human
agugcaguggugcgaucucggcuc

SEQ ID NO: 763283 - RNA, 23 nt, Human
agugccucagccucccaaguagc

SEQ ID NO: 763284 - RNA, 24 nt, Human
agugccucagccucccaaguagcu

SEQ ID NO: 763285 - RNA, 20 nt, Human
auaggaacaucucuuugaau

SEQ ID NO: 763286 - RNA, 22 nt, Human
aucaaugucaacaacugcucuu

SEQ ID NO: 763287 - RNA, 20 nt, Human
aucacccaggcuggagugca

SEQ ID NO: 763288 - RNA, 18 nt, Human
aucauggcaaugcauuuu

SEQ ID NO: 763289 - RNA, 18 nt, Human
augggguuucaccauguu

SEQ ID NO: 763290 - RNA, 22 nt, Human
augggguuucaccauguuggcc

SEQ ID NO: 763291 - RNA, 24 nt, Human
augggguuucaccauguuggccag

SEQ ID NO: 763292 - RNA, 21 nt, Human
caaaagaaucaggaaauuugc

SEQ ID NO: 763293 - RNA, 24 nt, Human
caaagcucugggacuacaggcgug

SEQ ID NO: 763294 - RNA, 30 nt, Human
caaagcucugggacuacaggcgugagccaa

SEQ ID NO: 763295 - RNA, 23 nt, Human
caaccuccaccucccaggcucaa

SEQ ID NO: 763296 - RNA, 24 nt, Human
caaccuccaccucccaggcucaag

SEQ ID NO: 763297 - RNA, 19 nt, Human
caagaagaugcugguggca

SEQ ID NO: 763298 - RNA, 27 nt, Human
caagcgauucuagugccucagccuccc

SEQ ID NO: 763299 - RNA, 24 nt, Human
caagcgauucucuccugccucagc

SEQ ID NO: 763300 - RNA, 21 nt, Human
cacagcacaggccuuacaucu

SEQ ID NO: 763301 - RNA, 23 nt, Human
caccaaaaugaccagagaaacug

SEQ ID NO: 763302 - RNA, 24 nt, Human
caccaugcccggcuaauuuuugua

SEQ ID NO: 763303 - RNA, 21 nt, Human
caccauguuggccaggcuggu

SEQ ID NO: 763304 - RNA, 21 nt, Human
caccauguuggccaggcuggu

SEQ ID NO: 763305 - RNA, 24 nt, Human
caccauguuggccaggcuggucuc

SEQ ID NO: 763306 - RNA, 24 nt, Human
caccauguuggccaggcuggucuc

SEQ ID NO: 763307 - RNA, 27 nt, Human
caccauguuggccaggcuggucucaaa

SEQ ID NO: 763308 - RNA, 27 nt, Human
caccauguuggccaggcuggucucaaa

SEQ ID NO: 763309 - RNA, 22 nt, Human
cacccaccucagccucccaaag

SEQ ID NO: 763310 - RNA, 23 nt, Human
cacccaccucagccucccaaagc

SEQ ID NO: 763311 - RNA, 24 nt, Human
cacccaggcuggagugcaguggug

SEQ ID NO: 763312 - RNA, 24 nt, Human
cacucugucccucaggcuagaaug

SEQ ID NO: 763313 - RNA, 21 nt, Human
cacugcaaccuccaccuccca

SEQ ID NO: 763314 - RNA, 22 nt, Human
cagagacaggauuucaccaugu

SEQ ID NO: 763315 - RNA, 19 nt, Human
cagcgcagcucagcugcuc

SEQ ID NO: 763316 - RNA, 19 nt, Human
cagcgcagcucagcugcuc

SEQ ID NO: 763317 - RNA, 24 nt, Human
caggauuucaccauguuggccagg

SEQ ID NO: 763318 - RNA, 20 nt, Human
caggcacgccaccaugccca

SEQ ID NO: 763319 - RNA, 24 nt, Human
cauguuggccaggcuggucucaaa

SEQ ID NO: 763320 - RNA, 24 nt, Human
cauguuggccaggcuggucucaaa

SEQ ID NO: 763321 - RNA, 22 nt, Human
ccaagcuucccacgacccuggu

SEQ ID NO: 763322 - RNA, 24 nt, Human
ccacccaccucagccucccaaagc

SEQ ID NO: 763323 - RNA, 24 nt, Human
ccaccucccaggcucaagcgauuc

SEQ ID NO: 763324 - RNA, 20 nt, Human
ccacugcgcccagccuaaac

SEQ ID NO: 763325 - RNA, 20 nt, Human
ccacugcgcccagccuaaac

SEQ ID NO: 763326 - RNA, 24 nt, Human
ccacugcgcccagccuaaacugac

SEQ ID NO: 763327 - RNA, 27 nt, Human
ccagugauccacccaccucagccuccc

SEQ ID NO: 763328 - RNA, 18 nt, Human
ccaucacccaggcuggag

SEQ ID NO: 763329 - RNA, 24 nt, Human
cccaaagcucugggacuacaggcg

SEQ ID NO: 763330 - RNA, 25 nt, Human
ccccgguucaagcgauucucuccug

SEQ ID NO: 763331 - RNA, 19 nt, Human
cccgaguagccgggauuac

SEQ ID NO: 763332 - RNA, 24 nt, Human
cccgaguagccgggauuacaggug

SEQ ID NO: 763333 - RNA, 18 nt, Human
ccgcgcccagccuaaacu

SEQ ID NO: 763334 - RNA, 21 nt, Human
ccguggaaaucagaagggcaa

SEQ ID NO: 763335 - RNA, 22 nt, Human
ccuaaagugcugggacuacagg

SEQ ID NO: 763336 - RNA, 24 nt, Human
ccuaaagugcugggacuacaggug

SEQ ID NO: 763337 - RNA, 25 nt, Human
ccucagaaaucaggacauccccccu

SEQ ID NO: 763338 - RNA, 19 nt, Human
ccucagagccacagcacag

SEQ ID NO: 763339 - RNA, 24 nt, Human
ccucagagccacagcacaggccuu

SEQ ID NO: 763340 - RNA, 22 nt, Human
ccucagccuccuaaagugcugg

SEQ ID NO: 763341 - RNA, 19 nt, Human
ccucaggugaucacccccc

SEQ ID NO: 763342 - RNA, 24 nt, Human
ccuccccgguucaagcgauucucu

SEQ ID NO: 763343 - RNA, 19 nt, Human
ccugaccucaggugaucac

SEQ ID NO: 763344 - RNA, 19 nt, Human
ccugugccugacuccaaag

SEQ ID NO: 763345 - RNA, 30 nt, Human; identical to SEQ ID NO: 675786

SEQ ID NO: 763346 - RNA, 22 nt, Human
cgggauuacaggugagcgccac

SEQ ID NO: 763347 - RNA, 24 nt, Human
cgggauuacaggugagcgccacca

SEQ ID NO: 763348 - RNA, 24 nt, Human
cuaaagugcugggacuacaggugu

SEQ ID NO: 763349 - RNA, 24 nt, Human
cuaacuccaaaacuaaacuccaag

SEQ ID NO: 763350 - RNA, 21 nt, Human
cucaaacuccugacccaguga

SEQ ID NO: 763351 - RNA, 24 nt, Human
cucacugcaaccuccaccucccag

SEQ ID NO: 763352 - RNA, 24 nt, Human
cucagccucccaaguagcuggggu

SEQ ID NO: 763353 - RNA, 20 nt, Human
cuccacugcuuaaaccacag

SEQ ID NO: 763354 - RNA, 20 nt, Human
cuccaucacccaggcuggag

SEQ ID NO: 763355 - RNA, 23 nt, Human
cuccugccucagccucccgagua

SEQ ID NO: 763356 - RNA, 23 nt, Human
cugcaaccuccaccucccaggcu

SEQ ID NO: 763357 - RNA, 24 nt, Human
cugcagccuccaccuccccgguuc

SEQ ID NO: 763358 - RNA, 22 nt, Human
cugccucagccucccgaguagc

SEQ ID NO: 763359 - RNA, 26 nt, Human
cuggaaaacgaccuaacuuuggucua

SEQ ID NO: 763360 - RNA, 20 nt, Human
cuggagcuggcaccugugcc

SEQ ID NO: 763361 - RNA, 23 nt, Human
cuggucucaaacuccugacccag

SEQ ID NO: 763362 - RNA, 22 nt, Human
gaaaacaaggaaggcggaagaa

SEQ ID NO: 763363 - RNA, 22 nt, Human
gacccagugauccacccaccuc

SEQ ID NO: 763364 - RNA, 23 nt, Human
gaccucaggugaucaccccccuc

SEQ ID NO: 763365 - RNA, 18 nt, Human
gacuacaggcgugagcca

SEQ ID NO: 763366 - RNA, 21 nt, Human
gacuacaggcgugagccaccg

SEQ ID NO: 763367 - RNA, 22 nt, Human
gacuacaggcgugagccaccgc

SEQ ID NO: 763368 - RNA, 18 nt, Human
gacuacaggugugagcca

SEQ ID NO: 763369 - RNA, 19 nt, Human
gacuacaggugugagccac

SEQ ID NO: 763370 - RNA, 22 nt, Human
gacuacaggugugagccacugc

SEQ ID NO: 763371 - RNA, 19 nt, Human
gacuuauccauggacucgu

SEQ ID NO: 763372 - RNA, 19 nt, Human
gagauuuuucugagagcuu

SEQ ID NO: 763373 - RNA, 20 nt, Human
gagcagaaaggggggcagga

SEQ ID NO: 763374 - RNA, 26 nt, Human
gaggagggacaggauacagaagggau

SEQ ID NO: 763375 - RNA, 25 nt, Human
gaguagccgggauuacaggugagcg

SEQ ID NO: 763376 - RNA, 22 nt, Human
gauagaaauguaggauuucagg

SEQ ID NO: 763377 - RNA, 22 nt, Human
gaucuccacucacugcaaccuc

SEQ ID NO: 763378 - RNA, 24 nt, Human
gauuacaggugagcgccaccaugc

SEQ ID NO: 763379 - RNA, 21 nt, Human
gauucuagugccucagccucc

SEQ ID NO: 763380 - RNA, 22 nt, Human
gcaaccuccaccucccaggcuc

SEQ ID NO: 763381 - RNA, 22 nt, Human
gcagccuccaccuccccgguuc

SEQ ID NO: 763382 - RNA, 22 nt, Human
gccaggcauuuucauguaugcc

SEQ ID NO: 763383 - RNA, 22 nt, Human
gcccggcuaauuuuuguauuuu

SEQ ID NO: 763384 - RNA, 20 nt, Human
gccucagccucccgaguagc

SEQ ID NO: 763385 - RNA, 24 nt, Human
gcgauucuagugccucagccuccc

SEQ ID NO: 763386 - RNA, 25 nt, Human
gcuccaucacccaggcuggagugca

SEQ ID NO: 763387 - RNA, 24 nt, Human
gcucuuuggccacuaagaaaguga

SEQ ID NO: 763388 - RNA, 23 nt, Human
gcuggucucaaacuccugaccuc

SEQ ID NO: 763389 - RNA, 19 nt, Human
ggaaccagagaaacaagga

SEQ ID NO: 763390 - RNA, 21 nt, Human
ggacuacaggcgugagccacc

SEQ ID NO: 763391 - RNA, 22 nt, Human
ggacuacaggcgugagccaccg

SEQ ID NO: 763392 - RNA, 20 nt, Human
ggacuacaggugugagccac

SEQ ID NO: 763393 - RNA, 22 nt, Human
ggacuacaggugugagccacug

SEQ ID NO: 763394 - RNA, 19 nt, Human
ggagaccagugaguacacu

SEQ ID NO: 763395 - RNA, 20 nt, Human
ggagcgacggcagccaccac

SEQ ID NO: 763396 - RNA, 22 nt, Human
ggcaaugcauuuuugagguuuu

SEQ ID NO: 763397 - RNA, 18 nt, Human
ggccaugagcgaguucag

SEQ ID NO: 763398 - RNA, 24 nt, Human
ggccaugagcgaguucagacagaa

SEQ ID NO: 763399 - RNA, 21 nt, Human
ggccucagagccacagcacag

SEQ ID NO: 763400 - RNA, 24 nt, Human
ggcuggucucaaacuccugaccuc

SEQ ID NO: 763401 - RNA, 21 nt, Human
ggcuugaucuucuauggucag

SEQ ID NO: 763402 - RNA, 21 nt, Human
gggauuacaggugagcgccac

SEQ ID NO: 763403 - RNA, 23 nt, Human
gggauuacaggugagcgccacca

SEQ ID NO: 763404 - RNA, 21 nt, Human
ggggagcagggguggaaucug

SEQ ID NO: 763405 - RNA, 22 nt, Human
gggguuucaccauguuggccag

SEQ ID NO: 763406 - RNA, 18 nt, Human
ggguuucaccauguuggc

SEQ ID NO: 763407 - RNA, 23 nt, Human
ggugaucaccccccucagccucc

SEQ ID NO: 763408 - RNA, 21 nt, Human
gguuauaggggacaggaggaa

SEQ ID NO: 763409 - RNA, 21 nt, Human
gguuucaggcacgccaccaug

SEQ ID NO: 763410 - RNA, 19 nt, Human
guagccgggauuacaggug

SEQ ID NO: 763411 - RNA, 23 nt, Human
gugaucaccccccucagccuccu

SEQ ID NO: 763412 - RNA, 24 nt, Human
gugauccacccaccucagccuccc

SEQ ID NO: 763413 - RNA, 24 nt, Human
gugucagguaauuugccaggcauu

SEQ ID NO: 763414 - RNA, 19 nt, Human
uaaaaggagaggaagggga

SEQ ID NO: 763415 - RNA, 21 nt, Human
uaaaauacguucaaacuauag

SEQ ID NO: 763416 - RNA, 24 nt, Human
uaaagugcugggacuacaggugug

SEQ ID NO: 763417 - RNA, 26 nt, Human
uaaauacauacacacacacacagaga

SEQ ID NO: 763418 - RNA, 24 nt, Human
uaaauuuuguauuuuuagcagaga

SEQ ID NO: 763419 - RNA, 20 nt, Human
uaacuccaaaacuaaacucc

SEQ ID NO: 763420 - RNA, 22 nt, Human
uaacuccaaaacuaaacuccaa

SEQ ID NO: 763421 - RNA, 21 nt, Human
uaacuccucaccaagcuuccc

SEQ ID NO: 763422 - RNA, 23 nt, Human
uaacuccucaccaagcuucccac

SEQ ID NO: 763423 - RNA, 23 nt, Human
uaauaauaaaaucauggcaaugc

SEQ ID NO: 763424 - RNA, 19 nt, Human
uaauuuuuguauuuuuuag

SEQ ID NO: 763425 - RNA, 24 nt, Human
uacagaagggauaugcaaggcuag

SEQ ID NO: 763426 - RNA, 24 nt, Human
uacaggcgugagccaccgcgccca

SEQ ID NO: 763427 - RNA, 19 nt, Human
uacaggugugagccacugc

SEQ ID NO: 763428 - RNA, 24 nt, Human
uacaggugugagccacugcgccca

SEQ ID NO: 763429 - RNA, 24 nt, Human
uagcagagacaggauuucaccaug

SEQ ID NO: 763430 - RNA, 25 nt, Human
uagcagagacaggauuucaccaugu

SEQ ID NO: 763431 - RNA, 18 nt, Human
uagcugggguuucaggca

SEQ ID NO: 763432 - RNA, 19 nt, Human
uaggaauguugggggcugu

SEQ ID NO: 763433 - RNA, 24 nt, Human
uaguagcgaugggguuucaccaug

SEQ ID NO: 763434 - RNA, 22 nt, Human
uauacauauacauauaaauaca

SEQ ID NO: 763435 - RNA, 24 nt, Human
uauauacauauacauauaaauaca

SEQ ID NO: 763436 - RNA, 21 nt, Human
uauggucaguguuuccucacc

SEQ ID NO: 763437 - RNA, 24 nt, Human
ucacccaggcuggagugcaguggu

SEQ ID NO: 763438 - RNA, 24 nt, Human
ucacugcaaccuccaccucccagg

SEQ ID NO: 763439 - RNA, 25 nt, Human
ucacugcaaccuccaccucccaggc

SEQ ID NO: 763440 - RNA, 27 nt, Human
ucacugcaaccuccaccucccaggcuc

SEQ ID NO: 763441 - RNA, 19 nt, Human
ucacugcagccuccaccuc

SEQ ID NO: 763442 - RNA, 24 nt, Human
ucacugcagccuccaccuccccgg

SEQ ID NO: 763443 - RNA, 25 nt, Human
ucacugcagccuccaccuccccggu

SEQ ID NO: 763444 - RNA, 27 nt, Human
ucacugcagccuccaccuccccgguuc

SEQ ID NO: 763445 - RNA, 20 nt, Human
ucagccucccaaagcucugg

SEQ ID NO: 763446 - RNA, 23 nt, Human
ucagccucccaaagcucugggac

SEQ ID NO: 763447 - RNA, 18 nt, Human
ucagccucccaaguagcu

SEQ ID NO: 763448 - RNA, 20 nt, Human
ucagccucccaaguagcugg

SEQ ID NO: 763449 - RNA, 20 nt, Human
ucagccucccaaguagcugg

SEQ ID NO: 763450 - RNA, 21 nt, Human
ucagccucccgaguagccggg

SEQ ID NO: 763451 - RNA, 19 nt, Human
ucaggcacgccaccaugcc

SEQ ID NO: 763452 - RNA, 20 nt, Human
ucaguauuuucuagaacugu

SEQ ID NO: 763453 - RNA, 24 nt, Human
ucauguaugccuuuauuuaacccu

SEQ ID NO: 763454 - RNA, 27 nt, Human
uccacagugcccagccucucccugcuc

SEQ ID NO: 763455 - RNA, 21 nt, Human
uccacccaccucagccuccca

SEQ ID NO: 763456 - RNA, 19 nt, Human
uccagguacuccuccucgu

SEQ ID NO: 763457 - RNA, 24 nt, Human
uccaucacccaggcuggagugcag

SEQ ID NO: 763458 - RNA, 21 nt, Human
uccauggacucgucugcucug

SEQ ID NO: 763459 - RNA, 22 nt, Human
ucccaaagcucugggacuacag

SEQ ID NO: 763460 - RNA, 24 nt, Human
ucccaaagcucugggacuacaggc

SEQ ID NO: 763461 - RNA, 24 nt, Human
ucccaaguagcugggguuucaggc

SEQ ID NO: 763462 - RNA, 18 nt, Human
ucccacgacccugguugc

SEQ ID NO: 763463 - RNA, 19 nt, Human
ucccaggcucaagcgauuc

SEQ ID NO: 763464 - RNA, 24 nt, Human
ucccaggcucaagcgauucuagug

SEQ ID NO: 763465 - RNA, 21 nt, Human
uccccgguucaagcgauucuc

SEQ ID NO: 763466 - RNA, 26 nt, Human
uccccgguucaagcgauucucuccug

SEQ ID NO: 763467 - RNA, 23 nt, Human
ucccgaguagccgggauuacagg

SEQ ID NO: 763468 - RNA, 24 nt, Human
ucccgaguagccgggauuacaggu

SEQ ID NO: 763469 - RNA, 18 nt, Human
ucccgggugcuccacugc

SEQ ID NO: 763470 - RNA, 20 nt, Human
ucccugcucacucugcaugg

SEQ ID NO: 763471 - RNA, 20 nt, Human
ucccugcucacucugcaugg

SEQ ID NO: 763472 - RNA, 24 nt, Human
uccuaaagugcugggacuacaggu

SEQ ID NO: 763473 - RNA, 22 nt, Human
uccucguggaauaaaaauuggu

SEQ ID NO: 763474 - RNA, 18 nt, Human
ucuaaaucugugcuccuc

SEQ ID NO: 763475 - RNA, 18 nt, Human
ucucacucugucccucag

SEQ ID NO: 763476 - RNA, 24 nt, Human
ucucacucugucccucaggcuaga

SEQ ID NO: 763477 - RNA, 18 nt, Human
ucucuggggagcaggggu

SEQ ID NO: 763478 - RNA, 28 nt, Human
ucucuggggagcaggggugacguaaacg

SEQ ID NO: 763479 - RNA, 21 nt, Human
ucucuggggagcaggggugga

SEQ ID NO: 763480 - RNA, 26 nt, Human
ucuguggccaugagcgaguucagaca

SEQ ID NO: 763481 - RNA, 23 nt, Human
ucuugcuccaucacccaggcugg

SEQ ID NO: 763482 - RNA, 24 nt, Human
ucuugcuccaucacccaggcugga

SEQ ID NO: 763483 - RNA, 26 nt, Human
ucuuuggccacuaagaaagugacccu

SEQ ID NO: 763484 - RNA, 21 nt, Human
ugaccucaggugaucaccccc

SEQ ID NO: 763485 - RNA, 22 nt, Human
ugaccucaggugaucacccccc

SEQ ID NO: 763486 - RNA, 23 nt, Human
ugaccucaggugaucaccccccu

SEQ ID NO: 763487 - RNA, 23 nt, Human
ugaccucaggugaucaccccccu

SEQ ID NO: 763488 - RNA, 18 nt, Human
ugacuccaaagcccgugu

SEQ ID NO: 763489 - RNA, 18 nt, Human
ugagaagcacaccucaga

SEQ ID NO: 763490 - RNA, 23 nt, Human
ugagaagcacaccucagaaauca

SEQ ID NO: 763491 - RNA, 21 nt, Human
ugagacagaauccggauucuc

SEQ ID NO: 763492 - RNA, 24 nt, Human
ugagacagaauccggauucucaca

SEQ ID NO: 763493 - RNA, 18 nt, Human
ugagagcuuccuuucugc

SEQ ID NO: 763494 - RNA, 22 nt, Human
ugagauggagucuugcuccauc

SEQ ID NO: 763495 - RNA, 24 nt, Human
ugauccacccaccucagccuccca

SEQ ID NO: 763496 - RNA, 21 nt, Human
ugcaaggcuaacuccaaaacu

SEQ ID NO: 763497 - RNA, 22 nt, Human
ugccaaugggcgcgggagacau

SEQ ID NO: 763498 - RNA, 25 nt, Human
ugcccggcuaauuuuuguauuuuuu

SEQ ID NO: 763499 - RNA, 24 nt, Human
ugccucagccucccaaguagcugg

SEQ ID NO: 763500 - RNA, 24 nt, Human
ugccucagccucccgaguagccgg

SEQ ID NO: 763501 - RNA, 23 nt, Human
ugccugacuccaaagcccgugug

SEQ ID NO: 763502 - RNA, 24 nt, Human
ugcugggacuacaggugugagcca

SEQ ID NO: 763503 - RNA, 22 nt, Human
ugcugguggcaguggugauggc

SEQ ID NO: 763504 - RNA, 20 nt, Human
ugcuuaaaccacaggaccug

SEQ ID NO: 763505 - RNA, 21 nt, Human
ugcuucccauuaaggcacacu

SEQ ID NO: 763506 - RNA, 18 nt, Human
uggaaggaaaaaaagaga

SEQ ID NO: 763507 - RNA, 21 nt, Human
uggaggagggacaggauacag

SEQ ID NO: 763508 - RNA, 23 nt, Human
uggagugcaguggugcgaucucg

SEQ ID NO: 763509 - RNA, 24 nt, Human
uggagugcaguggugcgaucucgg

SEQ ID NO: 763510 - RNA, 24 nt, Human
uggccaggcuggucucaaacuccu

SEQ ID NO: 763511 - RNA, 24 nt, Human
uggccaggcuggucucaaacuccu

SEQ ID NO: 763512 - RNA, 18 nt, Human
ugggacuacaggcgugag

SEQ ID NO: 763513 - RNA, 19 nt, Human
ugggacuacaggcgugagc

SEQ ID NO: 763514 - RNA, 21 nt, Human
ugggacuacaggcgugagcca

SEQ ID NO: 763515 - RNA, 22 nt, Human
ugggacuacaggcgugagccac

SEQ ID NO: 763516 - RNA, 23 nt, Human
ugggacuacaggcgugagccacc

SEQ ID NO: 763517 - RNA, 24 nt, Human
ugggacuacaggcgugagccaccg

SEQ ID NO: 763518 - RNA, 19 nt, Human
ugggacuacaggugugagc

SEQ ID NO: 763519 - RNA, 21 nt, Human
ugggacuacaggugugagcca

SEQ ID NO: 763520 - RNA, 22 nt, Human
ugggacuacaggugugagccac

SEQ ID NO: 763521 - RNA, 22 nt, Human
ugggacuacaggugugagccac

SEQ ID NO: 763522 - RNA, 24 nt, Human
ugggacuacaggugugagccacug

SEQ ID NO: 763523 - RNA, 24 nt, Human
ugggguuucaccauguuggccagg

SEQ ID NO: 763524 - RNA, 22 nt, Human
ugggguuucaggcacgccacca

SEQ ID NO: 763525 - RNA, 23 nt, Human
ugggguuucaggcacgccaccau

SEQ ID NO: 763526 - RNA, 23 nt, Human
ugggugaccauucuguggccaug

SEQ ID NO: 763527 - RNA, 25 nt, Human
uggucaguguuuccucaccgcagcu

SEQ ID NO: 763528 - RNA, 24 nt, Human
uggugcgaucucggcucacugcag

SEQ ID NO: 763529 - RNA, 18 nt, Human
uguagaaaugaggccccc

SEQ ID NO: 763530 - RNA, 18 nt, Human
ugucuggagcgacggcag

SEQ ID NO: 763531 - RNA, 18 nt, Human
uguggaaggaaaaaaaga

SEQ ID NO: 763532 - RNA, 24 nt, Human
uuagcagagacaggauuucaccau

SEQ ID NO: 763533 - RNA, 18 nt, Human
uuaguagcgaugggguuu

SEQ ID NO: 763534 - RNA, 24 nt, Human
uuaguagcgaugggguuucaccau

SEQ ID NO: 763535 - RNA, 22 nt, Human
uucaaaagcuggagcuggcacc

SEQ ID NO: 763536 - RNA, 23 nt, Human
uucaagcgauucucuccugccuc

SEQ ID NO: 763537 - RNA, 25 nt, Human
uucaagcgauucucuccugccucag

SEQ ID NO: 763538 - RNA, 24 nt, Human
uucaauaauuagacaucaauguca

SEQ ID NO: 763539 - RNA, 24 nt, Human
uucuauggucaguguuuccucacc

SEQ ID NO: 763540 - RNA, 22 nt, Human
uucucuccugccucagccuccc

SEQ ID NO: 763541 - RNA, 24 nt, Human
uugcuccaucacccaggcuggagu

SEQ ID NO: 763542 - RNA, 24 nt, Human
uugugugagcagaaaggggggcag

SEQ ID NO: 763543 - RNA, 21 nt, Human
uuuacaaguaagaugagccuu

SEQ ID NO: 763544 - RNA, 22 nt, Human
uuuacaccaaaaugaccagaga

SEQ ID NO: 763545 - RNA, 24 nt, Human
uuucaccauguuggccaggcuggu

SEQ ID NO: 763546 - RNA, 24 nt, Human
uuucaccauguuggccaggcuggu

SEQ ID NO: 763547 - RNA, 19 nt, Human
uuugccaggcauuuucaug

SEQ ID NO: 763548 - RNA, 24 nt, Human
uuuuuaguagcgaugggguuucac

SEQ ID NO: 763549 - RNA, 23 nt, Human
aaauggucugugaucacugaagc

SEQ ID NO: 763550 - RNA, 24 nt, Human
aaauguugaaaaugcaaauagacu

SEQ ID NO: 763551 - RNA, 21 nt, Human
aagaaagacaaaaaacuugca

SEQ ID NO: 763552 - RNA, 25 nt, Human
aauaaacaaaugaaaaaguauacaa

SEQ ID NO: 763553 - RNA, 23 nt, Human
aauaaauuacuuaucucccugaa

SEQ ID NO: 763554 - RNA, 20 nt, Human
acccagauacacccuggcac

SEQ ID NO: 763555 - RNA, 22 nt, Human
acuaucuccuuuuuauauauac

SEQ ID NO: 763556 - RNA, 19 nt, Human
acuuaaguccugaggggug

SEQ ID NO: 763557 - RNA, 22 nt, Human
agaaauaaacaaaugaaaaagu

SEQ ID NO: 763558 - RNA, 18 nt, Human
agaaggagggaauagaga

SEQ ID NO: 763559 - RNA, 20 nt, Human
agcugcuuuucgaggaucug

SEQ ID NO: 763560 - RNA, 21 nt, Human
agcugcuuuucgaggaucugg

SEQ ID NO: 763561 - RNA, 20 nt, Human
aggagaugccucuggagcau

SEQ ID NO: 763562 - RNA, 24 nt, Human
aggcuuugaauguucacaaauagg

SEQ ID NO: 763563 - RNA, 23 nt, Human
agugggacgauuagggauaacau

SEQ ID NO: 763564 - RNA, 22 nt, Human
auaaaaucuucacaguauaaaa

SEQ ID NO: 763565 - RNA, 18 nt, Human
augaaaugcauuauaucc

SEQ ID NO: 763566 - RNA, 27 nt, Human
augaacuuuuaagaaagaaagacaaaa

SEQ ID NO: 763567 - RNA, 23 nt, Human
caaaugaaaaaguauacaaaacu

SEQ ID NO: 763568 - RNA, 23 nt, Human
caacacuucaaacccaggucucc

SEQ ID NO: 763569 - RNA, 21 nt, Human
cacagccuauaaaaauccuuu

SEQ ID NO: 763570 - RNA, 26 nt, Human
ccuguuugcaaacagugaaaacccac

SEQ ID NO: 763571 - RNA, 22 nt, Human
cugguuacccagauacacccug

SEQ ID NO: 763572 - RNA, 22 nt, Human
gaaaacccacagccuauaaaaa

SEQ ID NO: 763573 - RNA, 22 nt, Human
gcaaacagugaaaacccacagc

SEQ ID NO: 763574 - RNA, 21 nt, Human
ggagcaaagaacucauuuucc

SEQ ID NO: 763575 - RNA, 20 nt, Human
ggcaaauuagguagauuuua

SEQ ID NO: 763576 - RNA, 24 nt, Human
ggguggcaguuaugagaaggaggg

SEQ ID NO: 763577 - RNA, 23 nt, Human
uaaaaucuucacaguauaaaacu

SEQ ID NO: 763578 - RNA, 23 nt, Human
uaagaaggaacauagccuguuug

SEQ ID NO: 763579 - RNA, 18 nt, Human
uaaguuuucaacguguaa

SEQ ID NO: 763580 - RNA, 26 nt, Human
uaaguuuucaacguguaaauuucaca

SEQ ID NO: 763581 - RNA, 19 nt, Human
uacauaugcuuaagaagga

SEQ ID NO: 763582 - RNA, 18 nt, Human
uacccagauacacccugg

SEQ ID NO: 763583 - RNA, 21 nt, Human
uagcauuuuaaagaggaagau

SEQ ID NO: 763584 - RNA, 22 nt, Human
uagcauuuuaaagaggaagauu

SEQ ID NO: 763585 - RNA, 24 nt, Human
uaugagaaggagggaauagagaaa

SEQ ID NO: 763586 - RNA, 24 nt, Human
ucagagcugcuuuucgaggaucug

SEQ ID NO: 763587 - RNA, 23 nt, Human
uccaaguaauuuucauauauugc

SEQ ID NO: 763588 - RNA, 24 nt, Human
ucccugggucaccauuacaaaugu

SEQ ID NO: 763589 - RNA, 23 nt, Human
uccuagaccucuagagacaauuc

SEQ ID NO: 763590 - RNA, 20 nt, Human
ugaaaugcauuauauccuag

SEQ ID NO: 763591 - RNA, 24 nt, Human
ugagaaggagggaauagagaaaua

SEQ ID NO: 763592 - RNA, 21 nt, Human
ugcaaacagugaaaacccaca

SEQ ID NO: 763593 - RNA, 25 nt, Human
ugcuuauuaaaaauaaaaaugggaa

SEQ ID NO: 763594 - RNA, 23 nt, Human
uguaaugaauugucucauaaucu

SEQ ID NO: 763595 - RNA, 20 nt, Human
ugugagcauuuacugaggag

SEQ ID NO: 763596 - RNA, 24 nt, Human
uguuugcaaacagugaaaacccac

SEQ ID NO: 763597 - RNA, 19 nt, Human
uuaaaaauaaaaaugggaa

SEQ ID NO: 763598 - RNA, 22 nt, Human
uuaaaaauaucaauuaaauccu

SEQ ID NO: 763599 - RNA, 21 nt, Human
uucaacacuucaaacccaggu

SEQ ID NO: 763600 - RNA, 20 nt, Human
uucaugugagcauuuacuga

SEQ ID NO: 763601 - RNA, 22 nt, Human
uuuacauaugcuuaagaaggaa

SEQ ID NO: 763602 - RNA, 18 nt, Human
uuucagagcugcuuuucg

SEQ ID NO: 763603 - RNA, 22 nt, Human
uuugcaaacagugaaaacccac

SEQ ID NO: 763604 - RNA, 19 nt, Human
aacuggcuucuagcaguug

SEQ ID NO: 763605 - RNA, 24 nt, Human
aaugauguaaaacauggagagaga

SEQ ID NO: 763606 - RNA, 21 nt, Human
agacucuugccauaagaauuc

SEQ ID NO: 763607 - RNA, 20 nt, Human
aggcgggcuccggccgcuuc

SEQ ID NO: 763608 - RNA, 21 nt, Human
aggcgggcuccggccgcuucu

SEQ ID NO: 763609 - RNA, 21 nt, Human
gaggagaaaacucuggguucu

SEQ ID NO: 763610 - RNA, 22 nt, Human
gcaaagauuuuuuuucauuaag

SEQ ID NO: 763611 - RNA, 23 nt, Human
gcuuuuuuuucuuuuccccuuaa

SEQ ID NO: 763612 - RNA, 23 nt, Human
gcuuuuuuuucuuuuccccuuaa

SEQ ID NO: 763613 - RNA, 21 nt, Human
ggaaaaggcaaauucagccgu

SEQ ID NO: 763614 - RNA, 20 nt, Human
gggaagcugagggggccgag

SEQ ID NO: 763615 - RNA, 20 nt, Human
gggaagcugagggggccgag

SEQ ID NO: 763616 - RNA, 18 nt, Human
uacagaugaggagaaaac

SEQ ID NO: 763617 - RNA, 19 nt, Human
ucaaagcagucacagcuuc

SEQ ID NO: 763618 - RNA, 19 nt, Human
ucucugggcccucuggucg

SEQ ID NO: 763619 - RNA, 20 nt, Human
ugaaaugcacugacaucuuc

SEQ ID NO: 763620 - RNA, 25 nt, Human
ugcaaagauuuuuuuucauuaagug

SEQ ID NO: 763621 - RNA, 21 nt, Human
ugccauaagaauucaauaagg

SEQ ID NO: 763622 - RNA, 20 nt, Human
uggcaauauuugauuuugac

SEQ ID NO: 763623 - RNA, 24 nt, Human
ugggaaaaggcaaauucagccgua

SEQ ID NO: 763624 - RNA, 18 nt, Human
uguuuuguuuuccguuuc

SEQ ID NO: 763625 - RNA, 23 nt, Human
uuugggauuuuaaccagggcucc

SEQ ID NO: 763626 - RNA, 24 nt, Human
aaagucaggaagagcugaaaggau

SEQ ID NO: 763627 - RNA, 22 nt, Human
aacgugcccacauaagacagga

SEQ ID NO: 763628 - RNA, 18 nt, Human
aagcaggcggccgagccc

SEQ ID NO: 763629 - RNA, 19 nt, Human
aaguccugggccacaucaa

SEQ ID NO: 763630 - RNA, 22 nt, Human
aauuuuggccaagagucaaaaa

SEQ ID NO: 763631 - RNA, 21 nt, Human
acacaaguucaaaaugauauu

SEQ ID NO: 763632 - RNA, 18 nt, Human
acauggcaccucaggcgg

SEQ ID NO: 763633 - RNA, 19 nt, Human
agacaaggccagcgagagc

SEQ ID NO: 763634 - RNA, 20 nt, Human
agacaaggccagcgagagcg

SEQ ID NO: 763635 - RNA, 21 nt, Human
agacaggaggcugaucccaac

SEQ ID NO: 763636 - RNA, 21 nt, Human
agagucaaaaaaaugcauuua

SEQ ID NO: 763637 - RNA, 23 nt, Human
agcaggcggccgagcccggcgca

SEQ ID NO: 763638 - RNA, 20 nt, Human
agcccggcgcaaaaucacca

SEQ ID NO: 763639 - RNA, 21 nt, Human
aggcagguuaaugcuuucuuu

SEQ ID NO: 763640 - RNA, 18 nt, Human
aggcggccgagcccggcg

SEQ ID NO: 763641 - RNA, 21 nt, Human
augcuguauuuccugcuggcu

SEQ ID NO: 763642 - RNA, 19 nt, Human
cacaaaccaaagggcuggg

SEQ ID NO: 763643 - RNA, 21 nt, Human
cagauacccacaaaccaaagg

SEQ ID NO: 763644 - RNA, 22 nt, Human
caggaaacuccuggguccccga

SEQ ID NO: 763645 - RNA, 22 nt, Human
caggaagagcugaaaggauucu

SEQ ID NO: 763646 - RNA, 20 nt, Human
caggcggcuccggcagcgcu

SEQ ID NO: 763647 - RNA, 23 nt, Human
cauggcaccucaggcggcuccgg

SEQ ID NO: 763648 - RNA, 28 nt, Human
ccacugaaauccacaugcgaaaauaggg

SEQ ID NO: 763649 - RNA, 23 nt, Human
cccacaaaccaaagggcugggaa

SEQ ID NO: 763650 - RNA, 19 nt, Human
cccacauaagacaggaggc

SEQ ID NO: 763651 - RNA, 22 nt, Human
ccggcucuccucgacccccucu

SEQ ID NO: 763652 - RNA, 21 nt, Human
cgacuccggcucuccucgacc

SEQ ID NO: 763653 - RNA, 22 nt, Human
cgacuccggcucuccucgaccc

SEQ ID NO: 763654 - RNA, 23 nt, Human
cgcacacuccugaaucagaaacu

SEQ ID NO: 763655 - RNA, 21 nt, Human
cguaauaaaugccugucugcc

SEQ ID NO: 763656 - RNA, 24 nt, Human
cuggcuggcucgguaauuuuucuu

SEQ ID NO: 763657 - RNA, 18 nt, Human
gacuccggcucuccucga

SEQ ID NO: 763658 - RNA, 18 nt, Human
gagacaauuuggcuuugu

SEQ ID NO: 763659 - RNA, 21 nt, Human
gcagcgcuggacacaggaaac

SEQ ID NO: 763660 - RNA, 21 nt, Human
gcuggacacaggaaacuccug

SEQ ID NO: 763661 - RNA, 18 nt, Human
gcuguauuuccugcuggc

SEQ ID NO: 763662 - RNA, 24 nt, Human
ggaagcaggcggccgagcccggcg

SEQ ID NO: 763663 - RNA, 21 nt, Human
guaauaaaugccugucugccu

SEQ ID NO: 763664 - RNA, 18 nt, Human
uaaaugccugucugccuc

SEQ ID NO: 763665 - RNA, 23 nt, Human
uaagacaggaggcugaucccaac

SEQ ID NO: 763666 - RNA, 18 nt, Human
uaccaucgccacugaaau

SEQ ID NO: 763667 - RNA, 23 nt, Human
uagacugacacguacaacagaga

SEQ ID NO: 763668 - RNA, 23 nt, Human
ucagaggcagguuaaugcuuucu

SEQ ID NO: 763669 - RNA, 21 nt, Human
uccacaugcgaaaauaggcag

SEQ ID NO: 763670 - RNA, 23 nt, Human
uccuggguccccgacuccggcuc

SEQ ID NO: 763671 - RNA, 26 nt, Human
ucgccacugaaauccacaugcgaaaa

SEQ ID NO: 763672 - RNA, 19 nt, Human
ucuucgguuaacuccgcuu

SEQ ID NO: 763673 - RNA, 21 nt, Human
ugagacaaggccagcgagagc

SEQ ID NO: 763674 - RNA, 19 nt, Human
ugggaaagucaggaagagc

SEQ ID NO: 763675 - RNA, 20 nt, Human
uuuacacaaguucaaaauga

SEQ ID NO: 763676 - RNA, 20 nt, Human
aacacuuguuuuucauaagc

SEQ ID NO: 763677 - RNA, 19 nt, Human
aagcguugaaaaauuaccu

SEQ ID NO: 763678 - RNA, 22 nt, Human
aauagcucacauuuguuccaag

SEQ ID NO: 763679 - RNA, 25 nt, Human
aaucacuuaaaaugagacugguuaa

SEQ ID NO: 763680 - RNA, 25 nt, Human
aaucaucugaaagcucugccucuga

SEQ ID NO: 763681 - RNA, 22 nt, Human
aggaggaauaacccggaguuca

SEQ ID NO: 763682 - RNA, 21 nt, Human
aguaagcguugaaaaauuacc

SEQ ID NO: 763683 - RNA, 23 nt, Human
auaaagauggagauaacagacac

SEQ ID NO: 763684 - RNA, 19 nt, Human
aucaucugaaagcucugcc

SEQ ID NO: 763685 - RNA, 18 nt, Human
caaaagaaucaucugaaa

SEQ ID NO: 763686 - RNA, 18 nt, Human
caacaagcacauguaccc

SEQ ID NO: 763687 - RNA, 21 nt, Human
caacaagcacauguacccccu

SEQ ID NO: 763688 - RNA, 29 nt, Human
caacaagcacauguacccccuggaucuaa

SEQ ID NO: 763689 - RNA, 24 nt, Human
caacauggauagagcuggaggcca

SEQ ID NO: 763690 - RNA, 24 nt, Human
cacaaucccauccaucuucaggcc

SEQ ID NO: 763691 - RNA, 27 nt, Human
cacauuuguuccaagaagucagugaaa

SEQ ID NO: 763692 - RNA, 19 nt, Human
caugucauuugcagcaaca

SEQ ID NO: 763693 - RNA, 22 nt, Human
ccaaccuaaguaucuaccaaca

SEQ ID NO: 763694 - RNA, 19 nt, Human
ccccuggaucuaaaauaaa

SEQ ID NO: 763695 - RNA, 19 nt, Human
cuggauaaagaaaacguga

SEQ ID NO: 763696 - RNA, 20 nt, Human
cuuucuucuucaucucuuuu

SEQ ID NO: 763697 - RNA, 20 nt, Human
cuuugaggaaugaggaggaa

SEQ ID NO: 763698 - RNA, 24 nt, Human
ggccauuauccuaugugaacuaaa

SEQ ID NO: 763699 - RNA, 20 nt, Human
gggaaagagugugagcggca

SEQ ID NO: 763700 - RNA, 21 nt, Human
uaaaauacaccauuauauguu

SEQ ID NO: 763701 - RNA, 21 nt, Human
uaaaucacuuaaaaugagacu

SEQ ID NO: 763702 - RNA, 23 nt, Human
uaacagacacuggggacuccaau

SEQ ID NO: 763703 - RNA, 18 nt, Human
uaacccggaguucaguag

SEQ ID NO: 763704 - RNA, 19 nt, Human
uauccaccaaggcacugua

SEQ ID NO: 763705 - RNA, 26 nt, Human
uaugcaacuauaaaaaagaaugaaau

SEQ ID NO: 763706 - RNA, 19 nt, Human
uauuaugcaacuauaaaaa

SEQ ID NO: 763707 - RNA, 24 nt, Human
uccauaaaucacuuaaaaugagac

SEQ ID NO: 763708 - RNA, 20 nt, Human
ucucacuuaaaaguaggagc

SEQ ID NO: 763709 - RNA, 23 nt, Human
ucucuuuuuuagauugucuagcu

SEQ ID NO: 763710 - RNA, 24 nt, Human
ucuuucuucuucaucucuuuuccu

SEQ ID NO: 763711 - RNA, 19 nt, Human
ugaaaucaugucauuugca

SEQ ID NO: 763712 - RNA, 25 nt, Human
ugaacuaaaucagacauaaaaaaua

SEQ ID NO: 763713 - RNA, 20 nt, Human
ugacuggauaaagaaaacgu

SEQ ID NO: 763714 - RNA, 23 nt, Human
ugagaagucuucuuuguuuucaa

SEQ ID NO: 763715 - RNA, 22 nt, Human
ugcaacuauaaaaaagaaugaa

SEQ ID NO: 763716 - RNA, 21 nt, Human
ugcuuugguuguuugcuuucu

SEQ ID NO: 763717 - RNA, 23 nt, Human
uggaaacauauuggaacacuugu

SEQ ID NO: 763718 - RNA, 28 nt, Human
uggaacacuuguuuuucauuggacaucc

SEQ ID NO: 763719 - RNA, 24 nt, Human
uggaaccaaccuaaguaucuacca

SEQ ID NO: 763720 - RNA, 22 nt, Human
uggagauaacagacacugggga

SEQ ID NO: 763721 - RNA, 18 nt, Human
uggauagagcuggaggcc

SEQ ID NO: 763722 - RNA, 22 nt, Human
uugaaaaauuaccuguugggua

SEQ ID NO: 763723 - RNA, 22 nt, Human
uugcagcaauauuuacaauagg

SEQ ID NO: 763724 - RNA, 18 nt, Human
uuuuagauugucuagcug

SEQ ID NO: 763725 - RNA, 20 nt, Human
aaacaagguuacagaaugua

SEQ ID NO: 763726 - RNA, 23 nt, Human
aaacacucuucacaaaaggacuc

SEQ ID NO: 763727 - RNA, 20 nt, Human
aacauagcaagaccccaucu

SEQ ID NO: 763728 - RNA, 21 nt, Human
aacauagcaagaccccaucuc

SEQ ID NO: 763729 - RNA, 25 nt, Human
aagaagaaagacauccagucuucca

SEQ ID NO: 763730 - RNA, 24 nt, Human
acacugggcuucugacugcaaguu

SEQ ID NO: 763731 - RNA, 24 nt, Human
acauagcaagaccccaucucaaaa

SEQ ID NO: 763732 - RNA, 18 nt, Human
accccaucucaaaaaaaa

SEQ ID NO: 763733 - RNA, 25 nt, Human
acccucggcggacugaaagcaaagg

SEQ ID NO: 763734 - RNA, 20 nt, Human
acuaagucauuugcaaagcc

SEQ ID NO: 763735 - RNA, 21 nt, Human
agcacaaccauuaccaacacu

SEQ ID NO: 763736 - RNA, 24 nt, Human
agccugggcaacauagcaagaccc

SEQ ID NO: 763737 - RNA, 21 nt, Human
aggcuauuucuucccuuucuu

SEQ ID NO: 763738 - RNA, 22 nt, Human
agggaagagaaucuuucagaug

SEQ ID NO: 763739 - RNA, 18 nt, Human
aguuaguggugaaaaaaa

SEQ ID NO: 763740 - RNA, 25 nt, Human
aguuucuccuuuccaaaagccagcu

SEQ ID NO: 763741 - RNA, 20 nt, Human
aucaauuauugaguccaggg

SEQ ID NO: 763742 - RNA, 18 nt, Human
aucccgacaaacucccag

SEQ ID NO: 763743 - RNA, 20 nt, Human
auggaacauggggccacccc

SEQ ID NO: 763744 - RNA, 20 nt, Human
caacagaaaauaaagacccc

SEQ ID NO: 763745 - RNA, 24 nt, Human
caacccaaucgaggagaacaagau

SEQ ID NO: 763746 - RNA, 22 nt, Human
caacgcagacagggccuguguc

SEQ ID NO: 763747 - RNA, 22 nt, Human
caagauaggcuucauagcuggg

SEQ ID NO: 763748 - RNA, 19 nt, Human
caagaucuguggugugcuc

SEQ ID NO: 763749 - RNA, 20 nt, Human
caagguuacagaauguagug

SEQ ID NO: 763750 - RNA, 20 nt, Human
cacaaccauuaccaacacug

SEQ ID NO: 763751 - RNA, 19 nt, Human
caccuguaaucucagcagg

SEQ ID NO: 763752 - RNA, 19 nt, Human
caccuguaaucucagcagg

SEQ ID NO: 763753 - RNA, 23 nt, Human
cacuaagucauuugcaaagcccc

SEQ ID NO: 763754 - RNA, 23 nt, Human
cacugccucacggggugcccaga

SEQ ID NO: 763755 - RNA, 21 nt, Human
cagcucuaagacuugucucuc

SEQ ID NO: 763756 - RNA, 19 nt, Human
cagggccugugucucagga

SEQ ID NO: 763757 - RNA, 20 nt, Human
caggguccauuucaaauucu

SEQ ID NO: 763758 - RNA, 23 nt, Human
cauagcaagaccccaucucaaaa

SEQ ID NO: 763759 - RNA, 23 nt, Human
cauggaacauggggccaccccaa

SEQ ID NO: 763760 - RNA, 23 nt, Human
cccaaacgccguacagcacaacc

SEQ ID NO: 763761 - RNA, 21 nt, Human
cccaucucaaaaaaaaaagcg

SEQ ID NO: 763762 - RNA, 19 nt, Human
ccccaucucaaaaaaaaaa

SEQ ID NO: 763763 - RNA, 23 nt, Human
cccgacucccaggauuuuaaggc

SEQ ID NO: 763764 - RNA, 21 nt, Human
cccuuucuuuuaaaagacaaa

SEQ ID NO: 763765 - RNA, 22 nt, Human
ccgccagaacccucggcggacu

SEQ ID NO: 763766 - RNA, 18 nt, Human
ccucacggggugcccaga

SEQ ID NO: 763767 - RNA, 24 nt, Human
ccugggcaacauagcaagacccca

SEQ ID NO: 763768 - RNA, 24 nt, Human
cgguaugguggcuuacaccuguaa

SEQ ID NO: 763769 - RNA, 19 nt, Human
cuacuuaaauauaaacauc

SEQ ID NO: 763770 - RNA, 25 nt, Human
cucccagccaugugcaagcacugcc

SEQ ID NO: 763771 - RNA, 19 nt, Human
cucuugcauuacugccuuc

SEQ ID NO: 763772 - RNA, 21 nt, Human
cugccucacggggugcccaga

SEQ ID NO: 763773 - RNA, 20 nt, Human
cuggguggcaggcaacgugg

SEQ ID NO: 763774 - RNA, 18 nt, Human
cugguuucagcucaaagc

SEQ ID NO: 763775 - RNA, 26 nt, Human
cuuacaccuguaaucucagcagggag

SEQ ID NO: 763776 - RNA, 19 nt, Human
gacacuggaggugucccag

SEQ ID NO: 763777 - RNA, 24 nt, Human
gagcaggcgcccucucggugggcc

SEQ ID NO: 763778 - RNA, 24 nt, Human
gaggcgggaggguugcuugagccc

SEQ ID NO: 763779 - RNA, 18 nt, Human
gauccuuccagccagcca

SEQ ID NO: 763780 - RNA, 19 nt, Human
gccagaacccucggcggac

SEQ ID NO: 763781 - RNA, 26 nt, Human
gccguacagcacaaccauuaccaaca

SEQ ID NO: 763782 - RNA, 20 nt, Human
ggaagagaaucuuucagaug

SEQ ID NO: 763783 - RNA, 18 nt, Human
ggacacuggagguguccc

SEQ ID NO: 763784 - RNA, 19 nt, Human
ggaggugucccaggagcuu

SEQ ID NO: 763785 - RNA, 24 nt, Human
gggaauggaguaaaagaaacaagg

SEQ ID NO: 763786 - RNA, 22 nt, Human
gggaggguugcuugagcccagg

SEQ ID NO: 763787 - RNA, 24 nt, Human
gguggcuuacaccuguaaucucag

SEQ ID NO: 763788 - RNA, 19 nt, Human
guaaggcuauuucuucccu

SEQ ID NO: 763789 - RNA, 21 nt, Human
guacagcacaaccauuaccaa

SEQ ID NO: 763790 - RNA, 20 nt, Human
gucacagguguuauguuguc

SEQ ID NO: 763791 - RNA, 19 nt, Human
gugcacuuggaggaacagg

SEQ ID NO: 763792 - RNA, 18 nt, Human
gugcuggacacuggaggu

SEQ ID NO: 763793 - RNA, 24 nt, Human
guugcgguaugguggcuuacaccu

SEQ ID NO: 763794 - RNA, 19 nt, Human
uaaaagaaacaagguuaca

SEQ ID NO: 763795 - RNA, 21 nt, Human
uaaaagaaacaagguuacaga

SEQ ID NO: 763796 - RNA, 22 nt, Human
uaaaagaaacaagguuacagaa

SEQ ID NO: 763797 - RNA, 26 nt, Human
uaaaagaaacaagguuacagaaugua

SEQ ID NO: 763798 - RNA, 19 nt, Human
uaaaagacaaauuucaugg

SEQ ID NO: 763799 - RNA, 19 nt, Human
uaaauauaaacaucucuac

SEQ ID NO: 763800 - RNA, 18 nt, Human
uaaucugggaauggagua

SEQ ID NO: 763801 - RNA, 20 nt, Human
uacaccuguaaucucagcag

SEQ ID NO: 763802 - RNA, 18 nt, Human
uaccuaacaagggaagag

SEQ ID NO: 763803 - RNA, 18 nt, Human
uagcaagaccccaucuca

SEQ ID NO: 763804 - RNA, 22 nt, Human
uaugaucaggcacuugggaauc

SEQ ID NO: 763805 - RNA, 18 nt, Human
uauuucuucccuuucuuu

SEQ ID NO: 763806 - RNA, 21 nt, Human
ucaaaaaaaaaagcggggggg

SEQ ID NO: 763807 - RNA, 29 nt, Human
ucagggauccuuccagccagccaucuucc

SEQ ID NO: 763808 - RNA, 19 nt, Human
ucaugguuucccauuccaa

SEQ ID NO: 763809 - RNA, 23 nt, Human
uccagggcaggggggccaccaga

SEQ ID NO: 763810 - RNA, 23 nt, Human
uccuuuccaaaagccagcucuaa

SEQ ID NO: 763811 - RNA, 18 nt, Human
ucggcggacugaaagcaa

SEQ ID NO: 763812 - RNA, 27 nt, Human
ucuauugcuagagcacagccggggucc

SEQ ID NO: 763813 - RNA, 19 nt, Human
ugacugcaaguuucuccuu

SEQ ID NO: 763814 - RNA, 23 nt, Human
ugagcauggaacauggggccacc

SEQ ID NO: 763815 - RNA, 23 nt, Human
ugagcccaggcguuuaagaccag

SEQ ID NO: 763816 - RNA, 18 nt, Human
ugccuguccugcccuuca

SEQ ID NO: 763817 - RNA, 18 nt, Human
uggaggaacaggggcugu

SEQ ID NO: 763818 - RNA, 21 nt, Human
uggcauccggucagcugagca

SEQ ID NO: 763819 - RNA, 21 nt, Human
uggcuggagcucucauacuuu

SEQ ID NO: 763820 - RNA, 21 nt, Human
uggcuuacaccuguaaucuca

SEQ ID NO: 763821 - RNA, 24 nt, Human
uggcuuacaccuguaaucucagca

SEQ ID NO: 763822 - RNA, 22 nt, Human
uggcuuugaaugucaucucugg

SEQ ID NO: 763823 - RNA, 22 nt, Human
ugggcaacauagcaagacccca

SEQ ID NO: 763824 - RNA, 24 nt, Human
ugguggcuuacaccuguaaucuca

SEQ ID NO: 763825 - RNA, 24 nt, Human
uguccugcccuucagggauccuuc

SEQ ID NO: 763826 - RNA, 25 nt, Human
uguccugcccuucagggauccuucc

SEQ ID NO: 763827 - RNA, 21 nt, Human
ugugugcuggacacuggaggu

SEQ ID NO: 763828 - RNA, 25 nt, Human
uugaaugucaucucugaagcaugga

SEQ ID NO: 763829 - RNA, 24 nt, Human
uugcaaagccccaggguccauuuc

SEQ ID NO: 763830 - RNA, 23 nt, Human
uuucaugguuucccauuccaaga

SEQ ID NO: 763831 - RNA, 23 nt, Human
aaaaacugauuauuguggauuuc

SEQ ID NO: 763832 - RNA, 19 nt, Human
aacaggaguacugccaaca

SEQ ID NO: 763833 - RNA, 25 nt, Human
acucuaugaccaaaguucaaaacug

SEQ ID NO: 763834 - RNA, 21 nt, Human
aucaaucaaccuccauaacaa

SEQ ID NO: 763835 - RNA, 27 nt, Human
aucaucaacaaaaugacaagucaaagu

SEQ ID NO: 763836 - RNA, 21 nt, Human
caacaaaaugacaagucaaag

SEQ ID NO: 763837 - RNA, 21 nt, Human
cagcaaaaacugauuauugug

SEQ ID NO: 763838 - RNA, 18 nt, Human
cagcacaggcagcggcgg

SEQ ID NO: 763839 - RNA, 25 nt, Human
caggcagcggcggcgcccgcccucc

SEQ ID NO: 763840 - RNA, 25 nt, Human
caguaaagcuggaauuuagagacua

SEQ ID NO: 763841 - RNA, 24 nt, Human
ccaacgugcuuugcaucaucaaca

SEQ ID NO: 763842 - RNA, 20 nt, Human
ccgcccuccggcccacccug

SEQ ID NO: 763843 - RNA, 18 nt, Human
cguauaccauugacaagu

SEQ ID NO: 763844 - RNA, 18 nt, Human
cugcuguaaaacccaucc

SEQ ID NO: 763845 - RNA, 23 nt, Human
cuuuccuuucucagaaucaucuc

SEQ ID NO: 763846 - RNA, 18 nt, Human
ggaauuuagagacuaaug

SEQ ID NO: 763847 - RNA, 23 nt, Human
uaaagcuggaauuuagagacuaa

SEQ ID NO: 763848 - RNA, 19 nt, Human
uagaacuucacaguaaagc

SEQ ID NO: 763849 - RNA, 22 nt, Human
uagggaccaccaaauacugaaa

SEQ ID NO: 763850 - RNA, 24 nt, Human
ucaaaacugauuuuaaggaacugu

SEQ ID NO: 763851 - RNA, 23 nt, Human
ucaacaaaaugacaagucaaagu

SEQ ID NO: 763852 - RNA, 18 nt, Human
ucagauaucaaucaaccu

SEQ ID NO: 763853 - RNA, 25 nt, Human
ucagauaucaaucaaccuccauaac

SEQ ID NO: 763854 - RNA, 21 nt, Human
ugcacaaauaugcugauaucc

SEQ ID NO: 763855 - RNA, 20 nt, Human
uuaaguauucucaguccaac

SEQ ID NO: 763856 - RNA, 21 nt, Human
aaaaaacaaacaaacaaaacc

SEQ ID NO: 763857 - RNA, 23 nt, Human
aaaaaagaucaaucuggaauaug

SEQ ID NO: 763858 - RNA, 18 nt, Human
aaaacccuacaauaaacc

SEQ ID NO: 763859 - RNA, 18 nt, Human
aaaagaauaugcaaaaag

SEQ ID NO: 763860 - RNA, 21 nt, Human
aaacaaaacccuacaauaaac

SEQ ID NO: 763861 - RNA, 27 nt, Human
aacaaacaaacaaaacccuacaauaaa

SEQ ID NO: 763862 - RNA, 21 nt, Human
aacgcagugcuuggucaggag

SEQ ID NO: 763863 - RNA, 22 nt, Human
aagugagcaaugacuccggagc

SEQ ID NO: 763864 - RNA, 20 nt, Human
acaaaaaagaucaaucugga

SEQ ID NO: 763865 - RNA, 19 nt, Human
acacugaguccucucuugg

SEQ ID NO: 763866 - RNA, 24 nt, Human
acucuuugucagcucacgaauuca

SEQ ID NO: 763867 - RNA, 18 nt, Human
acuuggaacuacuugugg

SEQ ID NO: 763868 - RNA, 18 nt, Human
agcuucaaguaauuuucc

SEQ ID NO: 763869 - RNA, 22 nt, Human
aggaaaaaggagcuccaugaua

SEQ ID NO: 763870 - RNA, 22 nt, Human
agguaaucaguuuuuccagaac

SEQ ID NO: 763871 - RNA, 21 nt, Human
augacaaaaaagaucaaucug

SEQ ID NO: 763872 - RNA, 24 nt, Human
auguucuccaagcagacuuuguca

SEQ ID NO: 763873 - RNA, 19 nt, Human
caaacaaacaaaacccuac

SEQ ID NO: 763874 - RNA, 21 nt, Human
caaccuuugaugucuuuaggu

SEQ ID NO: 763875 - RNA, 20 nt, Human
caauaugaacaagaaacuug

SEQ ID NO: 763876 - RNA, 21 nt, Human
cagccccgaccccagcggccu

SEQ ID NO: 763877 - RNA, 21 nt, Human
caugaaaauccagcuucaagu

SEQ ID NO: 763878 - RNA, 19 nt, Human
ccagaacaauagcucauca

SEQ ID NO: 763879 - RNA, 23 nt, Human
ccccuucucucauccugcugaau

SEQ ID NO: 763880 - RNA, 20 nt, Human
ccuacaguuacguuagugcc

SEQ ID NO: 763881 - RNA, 21 nt, Human
cuauucacaauaugaacaaga

SEQ ID NO: 763882 - RNA, 26 nt, Human
cucguacgugcagccccgaccccagc

SEQ ID NO: 763883 - RNA, 18 nt, Human
cucuuggcaauacuucaa

SEQ ID NO: 763884 - RNA, 26 nt, Human
cugcugaauugugcucugagauuucc

SEQ ID NO: 763885 - RNA, 19 nt, Human
cuucacacugaguccucuc

SEQ ID NO: 763886 - RNA, 23 nt, Human
cuucgcucugaacccgggcgucc

SEQ ID NO: 763887 - RNA, 23 nt, Human
cuugaaaagucagaacaauaaaa

SEQ ID NO: 763888 - RNA, 19 nt, Human
cuuuguggggcuuggugug

SEQ ID NO: 763889 - RNA, 20 nt, Human
gacaaaaaagaucaaucugg

SEQ ID NO: 763890 - RNA, 20 nt, Human
gccccgaccccagcggccug

SEQ ID NO: 763891 - RNA, 19 nt, Human
gccuagaguuugaaaggcc

SEQ ID NO: 763892 - RNA, 22 nt, Human
gggaaaggagcaccuuuuaugu

SEQ ID NO: 763893 - RNA, 20 nt, Human
ggugacuuggaacuacuugu

SEQ ID NO: 763894 - RNA, 23 nt, Human
guuccaaaaaaguuguucagaaa

SEQ ID NO: 763895 - RNA, 24 nt, Human
uaaaaaacaaacaaacaaaacccu

SEQ ID NO: 763896 - RNA, 19 nt, Human
uaaaagaagggggaaagga

SEQ ID NO: 763897 - RNA, 19 nt, Human
uagguuucuaaaacgaaca

SEQ ID NO: 763898 - RNA, 21 nt, Human
uaugcaaaaaaggaauaaguu

SEQ ID NO: 763899 - RNA, 23 nt, Human
ucagaacaauaaaagaauaugca

SEQ ID NO: 763900 - RNA, 18 nt, Human
uccaaggaaaguaugagg

SEQ ID NO: 763901 - RNA, 19 nt, Human
ucccaaacuucauuucuaa

SEQ ID NO: 763902 - RNA, 22 nt, Human
ucguacgugcagccccgacccc

SEQ ID NO: 763903 - RNA, 20 nt, Human
ucuaaaacgaacauccucuc

SEQ ID NO: 763904 - RNA, 19 nt, Human
ucucggaagacaaauacaa

SEQ ID NO: 763905 - RNA, 22 nt, Human
ucuuaaaaugcuuuuucaaacu

SEQ ID NO: 763906 - RNA, 23 nt, Human
ucuuuagguuucuaaaacgaaca

SEQ ID NO: 763907 - RNA, 20 nt, Human
ugaagugagcaaugacuccc

SEQ ID NO: 763908 - RNA, 22 nt, Human
ugacuaaggaccaguuuaacaa

SEQ ID NO: 763909 - RNA, 22 nt, Human
ugagaacgcagugcuuggucag

SEQ ID NO: 763910 - RNA, 22 nt, Human
ugaugucuuuagguuucuaaaa

SEQ ID NO: 763911 - RNA, 22 nt, Human
ugcaaaaagguuauuucugauu

SEQ ID NO: 763912 - RNA, 22 nt, Human
uggaaaucauuugcuuuaaaaa

SEQ ID NO: 763913 - RNA, 20 nt, Human
ugucuaaauuguccaugucu

SEQ ID NO: 763914 - RNA, 23 nt, Human
uguucagaaacuuuucuauucac

SEQ ID NO: 763915 - RNA, 24 nt, Human
uguuguuguuuuucuuuuuuaaug

SEQ ID NO: 763916 - RNA, 20 nt, Human
uucaaguaauuuuccaauac

SEQ ID NO: 763917 - RNA, 23 nt, Human
uucgcucugaacccgggcguccc

SEQ ID NO: 763918 - RNA, 24 nt, Human
uugaagcaaagaugacaaaaaaga

SEQ ID NO: 763919 - RNA, 21 nt, Human
uuguuguuguuuuucuuuuuu

SEQ ID NO: 763920 - RNA, 25 nt, Human
uuuaaaaaacaaacaaacaaaaccc

SEQ ID NO: 763921 - RNA, 22 nt, Human
uuuacacucauucagaacuuca

SEQ ID NO: 763922 - RNA, 22 nt, Human
uuuccaaaauuuuuucccaaac

SEQ ID NO: 763923 - RNA, 22 nt, Human
uuugcuugucuuuuuuccaaaa

SEQ ID NO: 763924 - RNA, 23 nt, Human
uuuuucuuuuuuaauguuaaccu

SEQ ID NO: 763925 - RNA, 19 nt, Human
uuuuuuccaaaauuuuuuc

SEQ ID NO: 763926 - RNA, 19 nt, Human
uuuuuuuucuguuguuuug

SEQ ID NO: 763927 - RNA, 25 nt, Human
aaaacaaacaauaauacaaaaaagu

SEQ ID NO: 763928 - RNA, 20 nt, Human
aagaggccagaaaaagccgu

SEQ ID NO: 763929 - RNA, 25 nt, Human
aagaggccagaaaaagcuucagaca

SEQ ID NO: 763930 - RNA, 20 nt, Human
aagcaauuccaaucaccuca

SEQ ID NO: 763931 - RNA, 21 nt, Human
aauugcacuuguucuggagga

SEQ ID NO: 763932 - RNA, 24 nt, Human
acaaaacaaacaauaauacaaaaa

SEQ ID NO: 763933 - RNA, 19 nt, Human
acaaauuuacaaggucaga

SEQ ID NO: 763934 - RNA, 19 nt, Human
accagcugcugcuguuucc

SEQ ID NO: 763935 - RNA, 20 nt, Human
accuagugugcgaaacgacc

SEQ ID NO: 763936 - RNA, 20 nt, Human
accuagugugcgaaacgacc

SEQ ID NO: 763937 - RNA, 23 nt, Human
accugauugugauacaacagaaa

SEQ ID NO: 763938 - RNA, 19 nt, Human
agcauggucaaagcaauuc

SEQ ID NO: 763939 - RNA, 19 nt, Human
agccuugcucuccaauccu

SEQ ID NO: 763940 - RNA, 23 nt, Human
aggcagcauggucaaagcaauuc

SEQ ID NO: 763941 - RNA, 18 nt, Human
auacaccuaacaugcuaa

SEQ ID NO: 763942 - RNA, 24 nt, Human
caaacaauaauacaaaaaaguuuu

SEQ ID NO: 763943 - RNA, 22 nt, Human
caagguagaaugcagagcugcc

SEQ ID NO: 763944 - RNA, 23 nt, Human
cacauaaagaaaggaggugaauu

SEQ ID NO: 763945 - RNA, 18 nt, Human
caccgccuccagcccgga

SEQ ID NO: 763946 - RNA, 19 nt, Human
cauacacucuugcccagga

SEQ ID NO: 763947 - RNA, 23 nt, Human
caugagccacauguucuucaaga

SEQ ID NO: 763948 - RNA, 19 nt, Human
ccagaaaaagcuucagaca

SEQ ID NO: 763949 - RNA, 23 nt, Human
cgacuagagaaaagaggccagaa

SEQ ID NO: 763950 - RNA, 19 nt, Human
cgagcagagagcgucgggc

SEQ ID NO: 763951 - RNA, 22 nt, Human
cgccuccagcccggauccgcuu

SEQ ID NO: 763952 - RNA, 18 nt, Human
cgccucggacccuucggc

SEQ ID NO: 763953 - RNA, 20 nt, Human
cuggaacuagaauuguccuc

SEQ ID NO: 763954 - RNA, 19 nt, Human
cugggcccugggcgcugcg

SEQ ID NO: 763955 - RNA, 19 nt, Human
cuuaugagaacuacucuaa

SEQ ID NO: 763956 - RNA, 20 nt, Human
gaggagaaguuaauucuuca

SEQ ID NO: 763957 - RNA, 21 nt, Human
gcaagcgccucggacccuucg

SEQ ID NO: 763958 - RNA, 18 nt, Human
gccucggacccuucggcu

SEQ ID NO: 763959 - RNA, 22 nt, Human
gcugcugccuguaugccaccua

SEQ ID NO: 763960 - RNA, 20 nt, Human
ggcacuggaggcugggcgcu

SEQ ID NO: 763961 - RNA, 19 nt, Human
gggcacuggaggcugggcg

SEQ ID NO: 763962 - RNA, 22 nt, Human
gggcacuggaggcugggcgcug

SEQ ID NO: 763963 - RNA, 23 nt, Human
gggcacuggaggcugggcgcugg

SEQ ID NO: 763964 - RNA, 23 nt, Human
gugauacaacagaaaguacagaa

SEQ ID NO: 763965 - RNA, 21 nt, Human
guuuuggaacaggguuaagac

SEQ ID NO: 763966 - RNA, 20 nt, Human
uaaaaaaagcuuuauuagug

SEQ ID NO: 763967 - RNA, 21 nt, Human
uaaaaacuuaaaaacuaugug

SEQ ID NO: 763968 - RNA, 24 nt, Human
uaaaccacuuagaccucagcacuu

SEQ ID NO: 763969 - RNA, 26 nt, Human
uaaucaauauucauacaccgugacac

SEQ ID NO: 763970 - RNA, 18 nt, Human
uacaaagagcuuuaaaac

SEQ ID NO: 763971 - RNA, 23 nt, Human
uacaaagagcuuuaaaacacaau

SEQ ID NO: 763972 - RNA, 20 nt, Human
uacaacagaaaguacagaac

SEQ ID NO: 763973 - RNA, 23 nt, Human
uacaacagaaaguacagaacagu

SEQ ID NO: 763974 - RNA, 24 nt, Human
uaccugauugugauacaacagaaa

SEQ ID NO: 763975 - RNA, 18 nt, Human
uaugccaccuagugugcg

SEQ ID NO: 763976 - RNA, 20 nt, Human
ucagacaauuccagucaagc

SEQ ID NO: 763977 - RNA, 21 nt, Human
ucaggaagggcuucaaaauua

SEQ ID NO: 763978 - RNA, 22 nt, Human
ucccuuugcaaaaacagaaaaa

SEQ ID NO: 763979 - RNA, 18 nt, Human
ugaacacaaaacaaacaa

SEQ ID NO: 763980 - RNA, 28 nt, Human
ugacaccgccuccagcccggauccgcuu

SEQ ID NO: 763981 - RNA, 22 nt, Human
ugauacaacagaaaguacagaa

SEQ ID NO: 763982 - RNA, 18 nt, Human
ugccuucugaauugcacu

SEQ ID NO: 763983 - RNA, 20 nt, Human
uggaauuuuauggagaauac

SEQ ID NO: 763984 - RNA, 24 nt, Human
uggagccauuuuccuucucuucag

SEQ ID NO: 763985 - RNA, 19 nt, Human
uggaggcugggcgcugggc

SEQ ID NO: 763986 - RNA, 21 nt, Human
uguauuuacugccacauacuu

SEQ ID NO: 763987 - RNA, 19 nt, Human
ugucagggaguccucuaca

SEQ ID NO: 763988 - RNA, 19 nt, Human
uguccucuucaucuaacuc

SEQ ID NO: 763989 - RNA, 22 nt, Human
uguggccaucuaucagcacgag

SEQ ID NO: 763990 - RNA, 20 nt, Human
uguuuggagccauuuuccuu

SEQ ID NO: 763991 - RNA, 22 nt, Human
uucuggaggagaaguuaauucu

SEQ ID NO: 763992 - RNA, 21 nt, Human
uugauucccgauccucuucac

SEQ ID NO: 763993 - RNA, 22 nt, Human
uugcgcaagcgccucggacccu

SEQ ID NO: 763994 - RNA, 22 nt, Human
uuguaugcauacacucuugccc

SEQ ID NO: 763995 - RNA, 21 nt, Human
uuuauaagaucucccccauaa

SEQ ID NO: 763996 - RNA, 20 nt, Human
uuuauuugacaauaaaacug

SEQ ID NO: 763997 - RNA, 19 nt, Human
uuuuccuucucuucagccu

SEQ ID NO: 763998 - RNA, 24 nt, Human
aaaaauagaaaucucucuggaaaa

SEQ ID NO: 763999 - RNA, 22 nt, Human
aacugcguggcacugcugcugg

SEQ ID NO: 764000 - RNA, 18 nt, Human
aacuuuaccaaggaaaga

SEQ ID NO: 764001 - RNA, 22 nt, Human
aacuuuaccaaggaaagaucua

SEQ ID NO: 764002 - RNA, 22 nt, Human
aagacaccccugaauccaggga

SEQ ID NO: 764003 - RNA, 19 nt, Human
aagcaugcggugugcauac

SEQ ID NO: 764004 - RNA, 24 nt, Human
aaggacccugcaaagguugagggc

SEQ ID NO: 764005 - RNA, 24 nt, Human
aaggcucaaagguaggaaggaccc

SEQ ID NO: 764006 - RNA, 19 nt, Human
aaguucagguaagucagca

SEQ ID NO: 764007 - RNA, 19 nt, Human
aaguuggcggccacacugc

SEQ ID NO: 764008 - RNA, 23 nt, Human
acaaagucaggaggaaaaaaaac

SEQ ID NO: 764009 - RNA, 20 nt, Human
accaggaccaagaauguucc

SEQ ID NO: 764010 - RNA, 19 nt, Human
accccgguucaagggcagg

SEQ ID NO: 764011 - RNA, 20 nt, Human
acccugcauuucaccaauca

SEQ ID NO: 764012 - RNA, 19 nt, Human
agaggucgugcccgggggc

SEQ ID NO: 764013 - RNA, 24 nt, Human
agauugaagaguacaagauagcac

SEQ ID NO: 764014 - RNA, 21 nt, Human
agcugauuucgacucaaguuc

SEQ ID NO: 764015 - RNA, 22 nt, Human
aggaaaagucaaacuuuaccaa

SEQ ID NO: 764016 - RNA, 25 nt, Human
aggaggggaggagggugugggcagg

SEQ ID NO: 764017 - RNA, 21 nt, Human
aggcaggcaggcagggcggac

SEQ ID NO: 764018 - RNA, 21 nt, Human
aggcaggcagggcggacagcu

SEQ ID NO: 764019 - RNA, 20 nt, Human
aggcagggcggacagcugau

SEQ ID NO: 764020 - RNA, 26 nt, Human
aggcggccguggcagcucggcgggcg

SEQ ID NO: 764021 - RNA, 18 nt, Human
agugaaaaucaaaggcua

SEQ ID NO: 764022 - RNA, 27 nt, Human
auagcaccaaaaguaauucaguacauc

SEQ ID NO: 764023 - RNA, 22 nt, Human
aucauaacccaagcaccaggac

SEQ ID NO: 764024 - RNA, 22 nt, Human
aucuccccaagcuaagaaacaa

SEQ ID NO: 764025 - RNA, 22 nt, Human
aucuucuucuugacuccugcca

SEQ ID NO: 764026 - RNA, 19 nt, Human
auggcucagggugcucauu

SEQ ID NO: 764027 - RNA, 26 nt, Human
auuaagcaguaaaaaacugguguuua

SEQ ID NO: 764028 - RNA, 19 nt, Human
auucuuuuuuuuccuuuua

SEQ ID NO: 764029 - RNA, 23 nt, Human
caaaauguuaguuuucuguccuc

SEQ ID NO: 764030 - RNA, 19 nt, Human
caaagacaccccugaaucc

SEQ ID NO: 764031 - RNA, 23 nt, Human
caagguggccccuauacagcuca

SEQ ID NO: 764032 - RNA, 19 nt, Human
caaucaacacaaagucagg

SEQ ID NO: 764033 - RNA, 22 nt, Human
cagaccccgguucaagggcagg

SEQ ID NO: 764034 - RNA, 19 nt, Human
cagcaacgacacuuccuuc

SEQ ID NO: 764035 - RNA, 20 nt, Human
cagcgcccuucgcggcuccg

SEQ ID NO: 764036 - RNA, 20 nt, Human
caggcagggcggacagcuga

SEQ ID NO: 764037 - RNA, 21 nt, Human
cagugugaguacguguacacg

SEQ ID NO: 764038 - RNA, 22 nt, Human
cauaacccaagcaccaggacca

SEQ ID NO: 764039 - RNA, 24 nt, Human
caucuucucccgggcccccccacc

SEQ ID NO: 764040 - RNA, 20 nt, Human
cauguaaaauaaggaggcuu

SEQ ID NO: 764041 - RNA, 19 nt, Human
ccaaaggaaagacuuccau

SEQ ID NO: 764042 - RNA, 23 nt, Human
ccaagcaccaggaccaagaaugu

SEQ ID NO: 764043 - RNA, 20 nt, Human
ccacacaggcaggcaggcag

SEQ ID NO: 764044 - RNA, 26 nt, Human
ccaccacccgccccgccgggggcgcc

SEQ ID NO: 764045 - RNA, 26 nt, Human
ccaccgccgccaccacccgccccgcc

SEQ ID NO: 764046 - RNA, 18 nt, Human
ccagaccccgguucaagg

SEQ ID NO: 764047 - RNA, 23 nt, Human
cccccaccccgccccgccgcucc

SEQ ID NO: 764048 - RNA, 24 nt, Human
ccccccggaguuggccgccuccuc

SEQ ID NO: 764049 - RNA, 25 nt, Human
ccccgcugccaccgccgccaccacc

SEQ ID NO: 764050 - RNA, 22 nt, Human
ccccuauacagcucaauugccc

SEQ ID NO: 764051 - RNA, 27 nt, Human
ccccuauacagcucaauugcccagucc

SEQ ID NO: 764052 - RNA, 18 nt, Human
cccgccccgccgcuccug

SEQ ID NO: 764053 - RNA, 20 nt, Human
cccgggcccccccaccccgc

SEQ ID NO: 764054 - RNA, 18 nt, Human
ccgccccgccgcuccugc

SEQ ID NO: 764055 - RNA, 23 nt, Human
ccgccgccaccacccgccccgcc

SEQ ID NO: 764056 - RNA, 22 nt, Human
ccgccgggggcgccgguuccuc

SEQ ID NO: 764057 - RNA, 25 nt, Human
ccgcugccaccgccgccaccacccg

SEQ ID NO: 764058 - RNA, 24 nt, Human
ccucaagcgcgcgcuccagacccc

SEQ ID NO: 764059 - RNA, 18 nt, Human
ccuggaauucuccucccc

SEQ ID NO: 764060 - RNA, 20 nt, Human
ccuggaauucuccuccccuc

SEQ ID NO: 764061 - RNA, 18 nt, Human
ccuugaccuuggaacaag

SEQ ID NO: 764062 - RNA, 24 nt, Human
cgcuccugcgggggggucacagcg

SEQ ID NO: 764063 - RNA, 20 nt, Human
cgcugugaucucguugcagc

SEQ ID NO: 764064 - RNA, 22 nt, Human
cucccgggcccccccaccccgc

SEQ ID NO: 764065 - RNA, 21 nt, Human
cuccuccacgugaggcucuaa

SEQ ID NO: 764066 - RNA, 21 nt, Human
cuccugcgggggggucacagc

SEQ ID NO: 764067 - RNA, 18 nt, Human
cuggcuaagauaaaauuc

SEQ ID NO: 764068 - RNA, 22 nt, Human
cuucccggcgucgccaucuucu

SEQ ID NO: 764069 - RNA, 18 nt, Human
cuugacacucuuguccug

SEQ ID NO: 764070 - RNA, 23 nt, Human
gaaaagucaaacuuuaccaagga

SEQ ID NO: 764071 - RNA, 19 nt, Human
gaaauuccuucaauuuccu

SEQ ID NO: 764072 - RNA, 20 nt, Human
gaggggaggagggugugggc

SEQ ID NO: 764073 - RNA, 21 nt, Human
gauuucaacugaccuaucugc

SEQ ID NO: 764074 - RNA, 23 nt, Human
gcaacgacacuuccuucccuuga

SEQ ID NO: 764075 - RNA, 19 nt, Human
gcaagguggccccuauaca

SEQ ID NO: 764076 - RNA, 18 nt, Human
gccacacugcccagcgcc

SEQ ID NO: 764077 - RNA, 20 nt, Human
gcccccccaccccgccccgc

SEQ ID NO: 764078 - RNA, 22 nt, Human
gcccuucgcggcucccuuuuua

SEQ ID NO: 764079 - RNA, 19 nt, Human
gccgggguggaaguuggcg

SEQ ID NO: 764080 - RNA, 18 nt, Human
gcgcgcgcuccagacccc

SEQ ID NO: 764081 - RNA, 23 nt, Human
ggaaguuugcaaggcaaaggcuc

SEQ ID NO: 764082 - RNA, 24 nt, Human
ggaccaagaauguuccacggcuca

SEQ ID NO: 764083 - RNA, 19 nt, Human
ggaggcggccguggcagcu

SEQ ID NO: 764084 - RNA, 22 nt, Human
ggaggcggccguggcagcucgg

SEQ ID NO: 764085 - RNA, 20 nt, Human
ggcagcagcucaccgggagg

SEQ ID NO: 764086 - RNA, 22 nt, Human
ggcagcagcucaccgggaggga

SEQ ID NO: 764087 - RNA, 20 nt, Human
ggccacacugcccagcgccc

SEQ ID NO: 764088 - RNA, 23 nt, Human
ggcgacagagcacagcguuugga

SEQ ID NO: 764089 - RNA, 19 nt, Human
ggcucauggcuuuauuuga

SEQ ID NO: 764090 - RNA, 24 nt, Human
gggaggcggccguggcagcucggu

SEQ ID NO: 764091 - RNA, 23 nt, Human
gggauggaaguuugcaaggcaaa

SEQ ID NO: 764092 - RNA, 18 nt, Human
gggcccccccaccccgcc

SEQ ID NO: 764093 - RNA, 18 nt, Human
gguaggaaggacccugca

SEQ ID NO: 764094 - RNA, 21 nt, Human
ggugguggggaugaugaagug

SEQ ID NO: 764095 - RNA, 21 nt, Human
gugaaaaucaaaggcuaaaug

SEQ ID NO: 764096 - RNA, 21 nt, Human
guggugguggggaugaugaag

SEQ ID NO: 764097 - RNA, 21 nt, Human
guggugguggugguggggaug

SEQ ID NO: 764098 - RNA, 21 nt, Human
guguuacagauugaagaguac

SEQ ID NO: 764099 - RNA, 20 nt, Human
uaaaugaacauuucaaauaa

SEQ ID NO: 764100 - RNA, 19 nt, Human
uacccugcauuucaccaau

SEQ ID NO: 764101 - RNA, 18 nt, Human
uacuaaacuguauucuac

SEQ ID NO: 764102 - RNA, 18 nt, Human
uagccaucuaugagagcu

SEQ ID NO: 764103 - RNA, 22 nt, Human
uaggacagaggggcuugccggg

SEQ ID NO: 764104 - RNA, 25 nt, Human
uauacuaaacuguauucuacaaagu

SEQ ID NO: 764105 - RNA, 19 nt, Human
ucaccaaucaacacaaagu

SEQ ID NO: 764106 - RNA, 21 nt, Human
ucacccaaaauguguuuauua

SEQ ID NO: 764107 - RNA, 19 nt, Human
ucaccgggagggagaggag

SEQ ID NO: 764108 - RNA, 22 nt, Human
ucaggaggaaaaaaaacucaca

SEQ ID NO: 764109 - RNA, 19 nt, Human
uccacggcucauggcuuua

SEQ ID NO: 764110 - RNA, 27 nt, Human
uccaucaucuccccaagcuaagaaaca

SEQ ID NO: 764111 - RNA, 20 nt, Human
uccauuaacuguuugagcug

SEQ ID NO: 764112 - RNA, 19 nt, Human
uccccuggauucaugaaaa

SEQ ID NO: 764113 - RNA, 18 nt, Human
ucccgggcccccccaccc

SEQ ID NO: 764114 - RNA, 19 nt, Human
ucccugcaagguggccccu

SEQ ID NO: 764115 - RNA, 22 nt, Human
uccgagaggucgugcccggggg

SEQ ID NO: 764116 - RNA, 21 nt, Human
uccucaagcgcgcgcuccaga

SEQ ID NO: 764117 - RNA, 23 nt, Human
ucuccccaagcuaagaaacaaga

SEQ ID NO: 764118 - RNA, 20 nt, Human
ucugaucugacuuagcagca

SEQ ID NO: 764119 - RNA, 18 nt, Human
ucugcagauuaacgaugg

SEQ ID NO: 764120 - RNA, 19 nt, Human
ucuucugguaaugauccaa

SEQ ID NO: 764121 - RNA, 18 nt, Human
ugagcgcccuucugcaua

SEQ ID NO: 764122 - RNA, 20 nt, Human
ugccaccgccgccaccaccc

SEQ ID NO: 764123 - RNA, 20 nt, Human
ugccgcagugcuccaccgaa

SEQ ID NO: 764124 - RNA, 24 nt, Human
ugccuugaccuuggaacaaggccc

SEQ ID NO: 764125 - RNA, 22 nt, Human
ugcgauuaagacuuugagaggc

SEQ ID NO: 764126 - RNA, 21 nt, Human
ugcuaaaucccuguccuugac

SEQ ID NO: 764127 - RNA, 18 nt, Human
ugcugauggugguggugg

SEQ ID NO: 764128 - RNA, 23 nt, Human
uggaauucuccuccccucugccc

SEQ ID NO: 764129 - RNA, 21 nt, Human
uggaugaggaagcaugcggug

SEQ ID NO: 764130 - RNA, 23 nt, Human
ugggaggaauccaaucgaauggu

SEQ ID NO: 764131 - RNA, 18 nt, Human
uggggggcgggcggggag

SEQ ID NO: 764132 - RNA, 19 nt, Human
uggugguggugguggggau

SEQ ID NO: 764133 - RNA, 20 nt, Human
uggugguggugguggugguc

SEQ ID NO: 764134 - RNA, 24 nt, Human
uguaaaauaaggaggcugccuuga

SEQ ID NO: 764135 - RNA, 19 nt, Human
uguaaagaaugcuuccugu

SEQ ID NO: 764136 - RNA, 20 nt, Human
uguaaagaaugcuuccuguu

SEQ ID NO: 764137 - RNA, 19 nt, Human
uguauagaucaaguugggc

SEQ ID NO: 764138 - RNA, 24 nt, Human
uguauagaucaaguugggccaaaa

SEQ ID NO: 764139 - RNA, 22 nt, Human
uguccuggaauucuccuccccc

SEQ ID NO: 764140 - RNA, 22 nt, Human
uuaagcaguaaaaaacuggugu

SEQ ID NO: 764141 - RNA, 26 nt, Human
uucaauacugacccaaaggaaagacu

SEQ ID NO: 764142 - RNA, 19 nt, Human
uuccagugauacaaaaugg

SEQ ID NO: 764143 - RNA, 18 nt, Human
uugggguucgcuucccgg

SEQ ID NO: 764144 - RNA, 25 nt, Human
uuuaagugacuccuccacgugaggc

SEQ ID NO: 764145 - RNA, 23 nt, Human
uuugcagucgucgucguuguauu

SEQ ID NO: 764146 - RNA, 24 nt, Human
aaagaaaaagccugugcuuccagc

SEQ ID NO: 764147 - RNA, 22 nt, Human
aaagcuucugcucccaacaugg

SEQ ID NO: 764148 - RNA, 19 nt, Human
aaaggguugggauuacagg

SEQ ID NO: 764149 - RNA, 26 nt, Human
aaguagccccaauaagauggcaggau

SEQ ID NO: 764150 - RNA, 19 nt, Human
acaaggacugacucuuuuc

SEQ ID NO: 764151 - RNA, 25 nt, Human
acagacacugacaaaaguagcccca

SEQ ID NO: 764152 - RNA, 24 nt, Human
acuauguugcccaggcuggucuug

SEQ ID NO: 764153 - RNA, 25 nt, Human
acuauguugcccaggcuggucuuga

SEQ ID NO: 764154 - RNA, 19 nt, Human
acuuugguuaagaaaugcu

SEQ ID NO: 764155 - RNA, 21 nt, Human
agacagggucuuucucugucc

SEQ ID NO: 764156 - RNA, 24 nt, Human
aggguugggauuacaggccugagc

SEQ ID NO: 764157 - RNA, 24 nt, Human
auccucccgucuuuaccuuccaaa

SEQ ID NO: 764158 - RNA, 23 nt, Human
auggcacaaacacaucucauugc

SEQ ID NO: 764159 - RNA, 22 nt, Human
auguugcccaggcuggucuuga

SEQ ID NO: 764160 - RNA, 24 nt, Human
caaagccaaccauuuccgagacac

SEQ ID NO: 764161 - RNA, 27 nt, Human
caagugauccucccgucuuuaccuucc

SEQ ID NO: 764162 - RNA, 22 nt, Human
cacaguaagaaaagaaucuguc

SEQ ID NO: 764163 - RNA, 19 nt, Human
cacuauguugcccaggcug

SEQ ID NO: 764164 - RNA, 24 nt, Human
cacuauguugcccaggcuggucuu

SEQ ID NO: 764165 - RNA, 18 nt, Human
cagaugccgaugccaagg

SEQ ID NO: 764166 - RNA, 27 nt, Human
ccaaagccaaccauuuccgagacacag

SEQ ID NO: 764167 - RNA, 19 nt, Human
ccaaaggguugggauuaca

SEQ ID NO: 764168 - RNA, 22 nt, Human
ccaaaggguugggauuacaggc

SEQ ID NO: 764169 - RNA, 18 nt, Human
ccacugcacccaguccca

SEQ ID NO: 764170 - RNA, 18 nt, Human
cccaaagccaaccauuuc

SEQ ID NO: 764171 - RNA, 24 nt, Human
ccgucuuuaccuuccaaaggguug

SEQ ID NO: 764172 - RNA, 21 nt, Human
ccucaagugauccucccgucu

SEQ ID NO: 764173 - RNA, 19 nt, Human
ccucccgucuuuaccuucc

SEQ ID NO: 764174 - RNA, 22 nt, Human
ccucccgucuuuaccuuccaaa

SEQ ID NO: 764175 - RNA, 18 nt, Human
ccuggccucaagugaucc

SEQ ID NO: 764176 - RNA, 22 nt, Human
ccuggccucaagugauccuccc

SEQ ID NO: 764177 - RNA, 22 nt, Human
ccuggccucaagugauccuccc

SEQ ID NO: 764178 - RNA, 24 nt, Human
cucaagugauccucccgucuuuac

SEQ ID NO: 764179 - RNA, 20 nt, Human
gagacagggucuuucucugu

SEQ ID NO: 764180 - RNA, 18 nt, Human
gauuacaggccugagcca

SEQ ID NO: 764181 - RNA, 19 nt, Human
gauuacaggccugagccac

SEQ ID NO: 764182 - RNA, 23 nt, Human
gauuacaggccugagccacugca

SEQ ID NO: 764183 - RNA, 23 nt, Human
gcucgugcacgcgcacuaagagc

SEQ ID NO: 764184 - RNA, 23 nt, Human
gcuggucuugaacuccuggccuc

SEQ ID NO: 764185 - RNA, 20 nt, Human
ggagcaugauuuaguuuuuc

SEQ ID NO: 764186 - RNA, 24 nt, Human
ggcuggucuugaacuccuggccuc

SEQ ID NO: 764187 - RNA, 25 nt, Human
uaaauaucaaauucaaaucuucagu

SEQ ID NO: 764188 - RNA, 20 nt, Human
uaagaaaugcugaguacaac

SEQ ID NO: 764189 - RNA, 22 nt, Human
uaagaaaugcugaguacaacuu

SEQ ID NO: 764190 - RNA, 19 nt, Human
uaauucccaaacaaccaca

SEQ ID NO: 764191 - RNA, 24 nt, Human
uaauuuuuuuuauuuuuuguagag

SEQ ID NO: 764192 - RNA, 24 nt, Human
uacaggccugagccacugcaccca

SEQ ID NO: 764193 - RNA, 23 nt, Human
uauguugcccaggcuggucuuga

SEQ ID NO: 764194 - RNA, 24 nt, Human
uauguugcccaggcuggucuugaa

SEQ ID NO: 764195 - RNA, 20 nt, Human
uauugugccagacaagauau

SEQ ID NO: 764196 - RNA, 24 nt, Human
ucauugcggccuggaccuccuggc

SEQ ID NO: 764197 - RNA, 23 nt, Human
uccaaaggguugggauuacaggc

SEQ ID NO: 764198 - RNA, 22 nt, Human
ucccaaacaaccacaagaccuu

SEQ ID NO: 764199 - RNA, 18 nt, Human
ucccgucuuuaccuucca

SEQ ID NO: 764200 - RNA, 19 nt, Human
uccugaacugcccaaagcc

SEQ ID NO: 764201 - RNA, 19 nt, Human
ucucacuauguugcccagg

SEQ ID NO: 764202 - RNA, 23 nt, Human
ucucacuauguugcccaggcugg

SEQ ID NO: 764203 - RNA, 24 nt, Human
ucucacuauguugcccaggcuggu

SEQ ID NO: 764204 - RNA, 26 nt, Human
ucucacuauguugcccaggcuggucu

SEQ ID NO: 764205 - RNA, 27 nt, Human
ucucacuauguugcccaggcuggucuu

SEQ ID NO: 764206 - RNA, 30 nt, Human
ucucugucacccagacuggugugcaauggg

SEQ ID NO: 764207 - RNA, 24 nt, Human
ucugucacccagacuggugugcaa

SEQ ID NO: 764208 - RNA, 21 nt, Human
ucuugaacuccuggccucaag

SEQ ID NO: 764209 - RNA, 19 nt, Human
ucuuucucugucacccaga

SEQ ID NO: 764210 - RNA, 19 nt, Human
ugacucuuuucaaaauuca

SEQ ID NO: 764211 - RNA, 22 nt, Human
ugagacagggucuuucucuguc

SEQ ID NO: 764212 - RNA, 24 nt, Human
ugcauucucacuauguugcccagg

SEQ ID NO: 764213 - RNA, 19 nt, Human
ugccagacaagauauaaaa

SEQ ID NO: 764214 - RNA, 24 nt, Human
ugcccaggcuggucuugaacuccu

SEQ ID NO: 764215 - RNA, 26 nt, Human
uggcaggauuuggggguggugucuuu

SEQ ID NO: 764216 - RNA, 18 nt, Human
uggccucaagugauccuc

SEQ ID NO: 764217 - RNA, 20 nt, Human
uggccucaagugauccuccc

SEQ ID NO: 764218 - RNA, 24 nt, Human
uggccucaagugauccucccgucu

SEQ ID NO: 764219 - RNA, 19 nt, Human
ugggauuacaggccugagc

SEQ ID NO: 764220 - RNA, 21 nt, Human
ugggauuacaggccugagcca

SEQ ID NO: 764221 - RNA, 22 nt, Human
ugggauuacaggccugagccac

SEQ ID NO: 764222 - RNA, 22 nt, Human
ugggauuacaggccugagccac

SEQ ID NO: 764223 - RNA, 24 nt, Human
ugggauuacaggccugagccacug

SEQ ID NO: 764224 - RNA, 26 nt, Human
ugggauuacaggccugagccacugca

SEQ ID NO: 764225 - RNA, 19 nt, Human
ugucaugacauccugcuga

SEQ ID NO: 764226 - RNA, 25 nt, Human
uucaguguucuacuuauuuugggug

SEQ ID NO: 764227 - RNA, 24 nt, Human
uucucacuauguugcccaggcugg

SEQ ID NO: 764228 - RNA, 20 nt, Human
uuggggguggugucuuuccu

SEQ ID NO: 764229 - RNA, 24 nt, Human
uuguagagaugcauucucacuaug

SEQ ID NO: 764230 - RNA, 22 nt, Human
uuucucugucacccagacuggu

SEQ ID NO: 764231 - RNA, 24 nt, Human
uuuguagagaugcauucucacuau

SEQ ID NO: 764232 - RNA, 19 nt, Human
aaacaccucuuuuucagaa

SEQ ID NO: 764233 - RNA, 19 nt, Human
aaacggacaaagguaaauc

SEQ ID NO: 764234 - RNA, 20 nt, Human
aacauaauaaaaucucuucu

SEQ ID NO: 764235 - RNA, 20 nt, Human
aaccaaacaccucuuuuuca

SEQ ID NO: 764236 - RNA, 19 nt, Human
aaccaaagccagauccagc

SEQ ID NO: 764237 - RNA, 18 nt, Human
aacccgccaaccugcacg

SEQ ID NO: 764238 - RNA, 22 nt, Human
aaggacacaaaggaagggagga

SEQ ID NO: 764239 - RNA, 19 nt, Human
aauuccaggggaggaggau

SEQ ID NO: 764240 - RNA, 21 nt, Human
acaccgacaccucggggacac

SEQ ID NO: 764241 - RNA, 19 nt, Human
acagcuaacaaaacgugau

SEQ ID NO: 764242 - RNA, 18 nt, Human
agaaaauuugcagacuac

SEQ ID NO: 764243 - RNA, 20 nt, Human
agaacagagagcguuaaaag

SEQ ID NO: 764244 - RNA, 24 nt, Human
agaauaaggacacaaaggaaggga

SEQ ID NO: 764245 - RNA, 21 nt, Human
agagucaacacauaaaaaagu

SEQ ID NO: 764246 - RNA, 23 nt, Human
agccacucucccugcucccuagg

SEQ ID NO: 764247 - RNA, 18 nt, Human
agcucagcaaaccgacag

SEQ ID NO: 764248 - RNA, 22 nt, Human
aggaagggaggaaaauguucuu

SEQ ID NO: 764249 - RNA, 20 nt, Human
aggcaguuccaagaguaaca

SEQ ID NO: 764250 - RNA, 21 nt, Human
agggccuggcugcccucgcgu

SEQ ID NO: 764251 - RNA, 22 nt, Human
auaaaacuguggaaacugugcu

SEQ ID NO: 764252 - RNA, 23 nt, Human
auccaauugggugaugagaaggg

SEQ ID NO: 764253 - RNA, 21 nt, Human
augauucaagccgccacugug

SEQ ID NO: 764254 - RNA, 25 nt, Human
caaagguaaaucacagcuaacaaaa

SEQ ID NO: 764255 - RNA, 20 nt, Human
cacaagcucucccuccuggc

SEQ ID NO: 764256 - RNA, 21 nt, Human
cacacauaaaacuguggaaac

SEQ ID NO: 764257 - RNA, 19 nt, Human
cacaccgacaccucgggga

SEQ ID NO: 764258 - RNA, 18 nt, Human
cacacguaaccaaacacc

SEQ ID NO: 764259 - RNA, 19 nt, Human
cacagcuaacaaaacguga

SEQ ID NO: 764260 - RNA, 26 nt, Human
caccacaccgacaccucggggacacc

SEQ ID NO: 764261 - RNA, 19 nt, Human
cacgguguuauucugccac

SEQ ID NO: 764262 - RNA, 22 nt, Human
cacguaaccaaacaccucuuuu

SEQ ID NO: 764263 - RNA, 26 nt, Human
cagaauggcuccgugaagucuuuuaa

SEQ ID NO: 764264 - RNA, 20 nt, Human
cagcgcaguggcccccugga

SEQ ID NO: 764265 - RNA, 21 nt, Human
cauuucuugaugauucaagcc

SEQ ID NO: 764266 - RNA, 23 nt, Human
ccacaaagucucaguaccugaga

SEQ ID NO: 764267 - RNA, 23 nt, Human
ccacaccgacaccucggggacac

SEQ ID NO: 764268 - RNA, 24 nt, Human
ccacuguggcagggaaugccgccu

SEQ ID NO: 764269 - RNA, 19 nt, Human
cccacaaagucucaguacc

SEQ ID NO: 764270 - RNA, 19 nt, Human
cccagaucagccugggugg

SEQ ID NO: 764271 - RNA, 19 nt, Human
cccgaggcccagaucagcc

SEQ ID NO: 764272 - RNA, 19 nt, Human
cccucaccacaccgacacc

SEQ ID NO: 764273 - RNA, 27 nt, Human
ccgacagccagaacagugauacggagc

SEQ ID NO: 764274 - RNA, 19 nt, Human
cgacagccagaacagugau

SEQ ID NO: 764275 - RNA, 23 nt, Human
cgacguacugagcaggaugcugc

SEQ ID NO: 764276 - RNA, 21 nt, Human
cggcaacagcgcaguggcccc

SEQ ID NO: 764277 - RNA, 19 nt, Human
cguaaccaaacaccucuuu

SEQ ID NO: 764278 - RNA, 24 nt, Human
cguaaccaaacaccucuuuuucag

SEQ ID NO: 764279 - RNA, 21 nt, Human
cucacacguaaccaaacaccu

SEQ ID NO: 764280 - RNA, 22 nt, Human
cucacacguaaccaaacaccuc

SEQ ID NO: 764281 - RNA, 25 nt, Human
cucgacaauuucuucuuccuggggc

SEQ ID NO: 764282 - RNA, 25 nt, Human
cuggaggccugcuauggggagcugg

SEQ ID NO: 764283 - RNA, 22 nt, Human
cuucuguauagaaaagcuacag

SEQ ID NO: 764284 - RNA, 24 nt, Human
gagccacucucccugcucccuagg

SEQ ID NO: 764285 - RNA, 18 nt, Human
gagcccgagccacucucc

SEQ ID NO: 764286 - RNA, 23 nt, Human
gagguacucucaucccgccccca

SEQ ID NO: 764287 - RNA, 19 nt, Human
gcccacaaagucucaguac

SEQ ID NO: 764288 - RNA, 21 nt, Human
gcucacacguaaccaaacacc

SEQ ID NO: 764289 - RNA, 23 nt, Human
ggucauucccuuuuuaacucaaa

SEQ ID NO: 764290 - RNA, 19 nt, Human
guaaaucacagcuaacaaa

SEQ ID NO: 764291 - RNA, 20 nt, Human
guggcagggaaugccgccug

SEQ ID NO: 764292 - RNA, 21 nt, Human
uaaaaagggaauccccggaac

SEQ ID NO: 764293 - RNA, 20 nt, Human
uaacucaaaugacuguaucc

SEQ ID NO: 764294 - RNA, 25 nt, Human
uacuaaagccccauuuauccauuuc

SEQ ID NO: 764295 - RNA, 20 nt, Human
uagaaaagcuacagcuccac

SEQ ID NO: 764296 - RNA, 20 nt, Human
uagaaaagcuacagcuccac

SEQ ID NO: 764297 - RNA, 18 nt, Human
uaucccaacuuucuuccu

SEQ ID NO: 764298 - RNA, 19 nt, Human
uaucccaacuuucuuccug

SEQ ID NO: 764299 - RNA, 18 nt, Human
uauuuauuuauuuauuuu

SEQ ID NO: 764300 - RNA, 23 nt, Human
ucacagccuuucacaagcucucc

SEQ ID NO: 764301 - RNA, 21 nt, Human
ucagacauuuggccuccugac

SEQ ID NO: 764302 - RNA, 22 nt, Human
ucauugauauuaaaaccaaagc

SEQ ID NO: 764303 - RNA, 25 nt, Human
ucauuuccauuuucuccuguaggga

SEQ ID NO: 764304 - RNA, 20 nt, Human
uccaggggaggaggauuaga

SEQ ID NO: 764305 - RNA, 19 nt, Human
uccccggaacauaauaaaa

SEQ ID NO: 764306 - RNA, 20 nt, Human
ucccgaggcccagaucagcc

SEQ ID NO: 764307 - RNA, 19 nt, Human
uccgcuggguucccgaggc

SEQ ID NO: 764308 - RNA, 22 nt, Human
uccgcuggguucccgaggccca

SEQ ID NO: 764309 - RNA, 24 nt, Human
uccugacugcuauauucuuguccu

SEQ ID NO: 764310 - RNA, 23 nt, Human
ucuacauuggaaagagccggggc

SEQ ID NO: 764311 - RNA, 18 nt, Human
ucucuccuccucauuucc

SEQ ID NO: 764312 - RNA, 18 nt, Human
ucugaggcccacaaaguc

SEQ ID NO: 764313 - RNA, 21 nt, Human
ucugccuuaaagaauggaauc

SEQ ID NO: 764314 - RNA, 18 nt, Human
ugccuuaaagaauggaau

SEQ ID NO: 764315 - RNA, 18 nt, Human
uggaaucaucagugacca

SEQ ID NO: 764316 - RNA, 22 nt, Human
uggcagggaaugccgccuggcc

SEQ ID NO: 764317 - RNA, 19 nt, Human
uguacuucaacgccagcgg

SEQ ID NO: 764318 - RNA, 18 nt, Human
uuccuggugucugaggcc

SEQ ID NO: 764319 - RNA, 19 nt, Human
uuccuggugucugaggccc

SEQ ID NO: 764320 - RNA, 23 nt, Human
uucuuguccuaauaacauucauu

SEQ ID NO: 764321 - RNA, 22 nt, Human
uugaggcugaaauuccauuaau

SEQ ID NO: 764322 - RNA, 18 nt, Human
uugggugaugagaagggc

SEQ ID NO: 764323 - RNA, 20 nt, Human
uuuaaacggacaaagguaaa

SEQ ID NO: 764324 - RNA, 19 nt, Human
uuuuccauaaccccuucua

SEQ ID NO: 764325 - RNA, 18 nt, Human
uuuuucuagcccgucuua

SEQ ID NO: 764326 - RNA, 23 nt, Human
aaaaugcagccaagcuuuugcug

SEQ ID NO: 764327 - RNA, 25 nt, Human
aaacacguacacaagccaggccccc

SEQ ID NO: 764328 - RNA, 26 nt, Human
aaacacguacacaagccaggcccccc

SEQ ID NO: 764329 - RNA, 24 nt, Human
aaagagacacgacgcagaugcuga

SEQ ID NO: 764330 - RNA, 19 nt, Human
aaagcacaaagagacacga

SEQ ID NO: 764331 - RNA, 19 nt, Human
aacaacaccugccaccaac

SEQ ID NO: 764332 - RNA, 18 nt, Human
aaccaaauuccuuccugg

SEQ ID NO: 764333 - RNA, 19 nt, Human
aacccacagaccaaauaag

SEQ ID NO: 764334 - RNA, 18 nt, Human
aagcaagugugaugcugc

SEQ ID NO: 764335 - RNA, 20 nt, Human
aagcagggauggcuugggaa

SEQ ID NO: 764336 - RNA, 23 nt, Human
aagcagggauggcuugggacagc

SEQ ID NO: 764337 - RNA, 22 nt, Human
aaggaugucccuggagcccucc

SEQ ID NO: 764338 - RNA, 25 nt, Human
acaaacaaaagcacaaagagacacg

SEQ ID NO: 764339 - RNA, 31 nt, Human
acaaacaaaagcacaaagagacacgacgcag

SEQ ID NO: 764340 - RNA, 22 nt, Human
acacaagcaagagaugggcacu

SEQ ID NO: 764341 - RNA, 21 nt, Human
acacugcagcguuccaggacc

SEQ ID NO: 764342 - RNA, 26 nt, Human
acacugcagcguuccaggaccacaga

SEQ ID NO: 764343 - RNA, 18 nt, Human
acaggcugggcuggggac

SEQ ID NO: 764344 - RNA, 18 nt, Human
accagaugcaacacgccc

SEQ ID NO: 764345 - RNA, 20 nt, Human
acccagccguggucuguacc

SEQ ID NO: 764346 - RNA, 18 nt, Human
acgcccggcccagcccag

SEQ ID NO: 764347 - RNA, 20 nt, Human
acugcaccuguggcucacca

SEQ ID NO: 764348 - RNA, 18 nt, Human
acugggagagaacaggcu

SEQ ID NO: 764349 - RNA, 19 nt, Human
acugugcgcuucccccagg

SEQ ID NO: 764350 - RNA, 19 nt, Human
agaacagccaggcaggcug

SEQ ID NO: 764351 - RNA, 23 nt, Human
agacaccaggccugggcugugca

SEQ ID NO: 764352 - RNA, 18 nt, Human
agacagugacggggaccu

SEQ ID NO: 764353 - RNA, 18 nt, Human
agagaacaggcugggcug

SEQ ID NO: 764354 - RNA, 22 nt, Human
agagaugggcacuggacacugu

SEQ ID NO: 764355 - RNA, 19 nt, Human
agaugcaacacgccccacc

SEQ ID NO: 764356 - RNA, 20 nt, Human
agaugcaacacgccccacca

SEQ ID NO: 764357 - RNA, 18 nt, Human
agcaagggcuaaucucac

SEQ ID NO: 764358 - RNA, 19 nt, Human
agccacgggagagcaaacg

SEQ ID NO: 764359 - RNA, 19 nt, Human
agcccccacagcuccgccc

SEQ ID NO: 764360 - RNA, 21 nt, Human
agcccccacagcuccgcccag

SEQ ID NO: 764361 - RNA, 23 nt, Human
agcuggugccucugcugaggucu

SEQ ID NO: 764362 - RNA, 21 nt, Human
aggcccugccagcagccccca

SEQ ID NO: 764363 - RNA, 21 nt, Human
aggccucugcagcugcuggcu

SEQ ID NO: 764364 - RNA, 24 nt, Human
aggcugcacgccucucuggcauca

SEQ ID NO: 764365 - RNA, 18 nt, Human
agggcagcucuggagggc

SEQ ID NO: 764366 - RNA, 20 nt, Human
agggcagcucuggagggcag

SEQ ID NO: 764367 - RNA, 20 nt, Human
agugggagcagcugccacaa

SEQ ID NO: 764368 - RNA, 18 nt, Human
aguuggcacagcguaggc

SEQ ID NO: 764369 - RNA, 21 nt, Human
auagaaucucauucagaucuu

SEQ ID NO: 764370 - RNA, 22 nt, Human
auagaaucucauucagaucuug

SEQ ID NO: 764371 - RNA, 22 nt, Human
augacccaggcucagcuuaggu

SEQ ID NO: 764372 - RNA, 20 nt, Human
augacuaggccccgcccaca

SEQ ID NO: 764373 - RNA, 20 nt, Human
augacuaggccccgcccaca

SEQ ID NO: 764374 - RNA, 18 nt, Human
auggaacaaaaccacacu

SEQ ID NO: 764375 - RNA, 24 nt, Human
auggagcuugggagugcagaggcc

SEQ ID NO: 764376 - RNA, 20 nt, Human
auggcuaggccccacccaca

SEQ ID NO: 764377 - RNA, 20 nt, Human
auggcuaggccccauccaca

SEQ ID NO: 764378 - RNA, 20 nt, Human
auggcuaggcccuguccaca

SEQ ID NO: 764379 - RNA, 26 nt, Human
caaaaaugcagccaagcuuuugcugu

SEQ ID NO: 764380 - RNA, 23 nt, Human
caaaagcacaaagagacacgacg

SEQ ID NO: 764381 - RNA, 23 nt, Human
caaacgcugcuuccaaaaccaaa

SEQ ID NO: 764382 - RNA, 25 nt, Human
cacaaacaaaagcacaaagagacac

SEQ ID NO: 764383 - RNA, 23 nt, Human
cacacugcaaaacaacuuuuuau

SEQ ID NO: 764384 - RNA, 20 nt, Human
cacagcucaccccucccaug

SEQ ID NO: 764385 - RNA, 18 nt, Human
cacagcuccgcccagccc

SEQ ID NO: 764386 - RNA, 28 nt, Human
caccccacccauagcuagccccauucac

SEQ ID NO: 764387 - RNA, 23 nt, Human
cacccugcuguucucagaagcaa

SEQ ID NO: 764388 - RNA, 21 nt, Human
cacgagccuaugcugucccuu

SEQ ID NO: 764389 - RNA, 20 nt, Human
cacgccucucuggcaucacg

SEQ ID NO: 764390 - RNA, 24 nt, Human
cagacaaacgagcaaagggaguuc

SEQ ID NO: 764391 - RNA, 19 nt, Human
cagacgucauuucuguugc

SEQ ID NO: 764392 - RNA, 21 nt, Human
cagaggccgcacacauggggu

SEQ ID NO: 764393 - RNA, 21 nt, Human
cagaugcaacacgccccacca

SEQ ID NO: 764394 - RNA, 21 nt, Human
cagcagacagaccacagccag

SEQ ID NO: 764395 - RNA, 20 nt, Human
cagccaccugcacggggcca

SEQ ID NO: 764396 - RNA, 18 nt, Human
cagcccacuccaccagcu

SEQ ID NO: 764397 - RNA, 18 nt, Human
cagccccacucacagcuc

SEQ ID NO: 764398 - RNA, 24 nt, Human
cagcgccccagggaguggacccgg

SEQ ID NO: 764399 - RNA, 24 nt, Human
cagcgcugccaucacggcguggag

SEQ ID NO: 764400 - RNA, 18 nt, Human
cagcggguccacuccuuc

SEQ ID NO: 764401 - RNA, 23 nt, Human
cagcucaccccucccauggcucc

SEQ ID NO: 764402 - RNA, 21 nt, Human
cagcugucuggugggugaugu

SEQ ID NO: 764403 - RNA, 18 nt, Human
caggagacaaaaauagac

SEQ ID NO: 764404 - RNA, 18 nt, Human
caggcccuugggagcuug

SEQ ID NO: 764405 - RNA, 18 nt, Human
caggguggggcggguccu

SEQ ID NO: 764406 - RNA, 23 nt, Human
ccaaagcucuaggccacugguuc

SEQ ID NO: 764407 - RNA, 18 nt, Human
ccaacaccgggcccuggg

SEQ ID NO: 764408 - RNA, 20 nt, Human
ccacacugcagcguuccagg

SEQ ID NO: 764409 - RNA, 21 nt, Human
ccagaaccccuggcccccagg

SEQ ID NO: 764410 - RNA, 31 nt, Human
ccagcagcccccacagcuccgcccagcccaa

SEQ ID NO: 764411 - RNA, 22 nt, Human
ccaggccugggcugugcagggg

SEQ ID NO: 764412 - RNA, 18 nt, Human
ccagggguuaagccuguc

SEQ ID NO: 764413 - RNA, 18 nt, Human
cccagcccagcccagccc

SEQ ID NO: 764414 - RNA, 18 nt, Human
cccagcccagcccagccc

SEQ ID NO: 764415 - RNA, 25 nt, Human
cccagccccucccugcacucucucc

SEQ ID NO: 764416 - RNA, 21 nt, Human
ccccacacaggcuaaggcucc

SEQ ID NO: 764417 - RNA, 19 nt, Human
ccccacccacagcucgccc

SEQ ID NO: 764418 - RNA, 20 nt, Human
ccccauccacagcucacccc

SEQ ID NO: 764419 - RNA, 22 nt, Human
ccccauccacagcucaccccuc

SEQ ID NO: 764420 - RNA, 22 nt, Human
cccccacagcuccgcccagccc

SEQ ID NO: 764421 - RNA, 23 nt, Human
cccccaggaacucccuccuaggc

SEQ ID NO: 764422 - RNA, 22 nt, Human
ccccgcccacagcucaccccuc

SEQ ID NO: 764423 - RNA, 22 nt, Human
ccccgcccacagcucaccccuc

SEQ ID NO: 764424 - RNA, 23 nt, Human
ccccgcugacucgcuuccaccca

SEQ ID NO: 764425 - RNA, 23 nt, Human
ccccggcaggaguccccacaggg

SEQ ID NO: 764426 - RNA, 21 nt, Human
ccccucccauggcuccauggg

SEQ ID NO: 764427 - RNA, 24 nt, Human
cccgcagggccagaaccccuggcc

SEQ ID NO: 764428 - RNA, 18 nt, Human
cccgccaccagcuuggga

SEQ ID NO: 764429 - RNA, 20 nt, Human
cccuccucuccuccucuucc

SEQ ID NO: 764430 - RNA, 23 nt, Human
cccuggguuggaguuuagcccug

SEQ ID NO: 764431 - RNA, 21 nt, Human
cccugugccaggaaagccucc

SEQ ID NO: 764432 - RNA, 22 nt, Human
ccuacaaaggccuccuaagagc

SEQ ID NO: 764433 - RNA, 19 nt, Human
ccuccggguacugcaccug

SEQ ID NO: 764434 - RNA, 24 nt, Human
ccuccucucucccuuucacaagcc

SEQ ID NO: 764435 - RNA, 21 nt, Human
ccucuccuaagccaucuugac

SEQ ID NO: 764436 - RNA, 23 nt, Human
ccugccaccaacgucgacccuga

SEQ ID NO: 764437 - RNA, 22 nt, Human
ccuggcuucugagccuggggcc

SEQ ID NO: 764438 - RNA, 18 nt, Human
ccugggaagggcagcucu

SEQ ID NO: 764439 - RNA, 26 nt, Human
ccuguaacccaaagcucuaggccacu

SEQ ID NO: 764440 - RNA, 27 nt, Human
ccuguccccguggacggaagccuuggg

SEQ ID NO: 764441 - RNA, 21 nt, Human
ccuuaucccuuccaaaagauc

SEQ ID NO: 764442 - RNA, 28 nt, Human
ccuuccacaaacaaaagcacaaagagac

SEQ ID NO: 764443 - RNA, 19 nt, Human
cgcccagcccacuccacca

SEQ ID NO: 764444 - RNA, 21 nt, Human
cgcccagcccacuccaccagc

SEQ ID NO: 764445 - RNA, 22 nt, Human
cgccucucuggcaucacagucc

SEQ ID NO: 764446 - RNA, 18 nt, Human
cggcgcuggcuucgugcc

SEQ ID NO: 764447 - RNA, 19 nt, Human
cggguccugcacuuugggu

SEQ ID NO: 764448 - RNA, 23 nt, Human
cuaaauacaaaaugccaaagacc

SEQ ID NO: 764449 - RNA, 18 nt, Human
cucacucucuacuucguc

SEQ ID NO: 764450 - RNA, 18 nt, Human
cucccauggcucagcccc

SEQ ID NO: 764451 - RNA, 18 nt, Human
cuccgcccagcccacucc

SEQ ID NO: 764452 - RNA, 24 nt, Human
cuccuccucuuucuccccauccug

SEQ ID NO: 764453 - RNA, 24 nt, Human
cucuaggccacugguucccaagag

SEQ ID NO: 764454 - RNA, 24 nt, Human
cugaagcuuugagcuggcaagcag

SEQ ID NO: 764455 - RNA, 18 nt, Human
cugagcuagguugggcua

SEQ ID NO: 764456 - RNA, 24 nt, Human
cuuggaacggcgagccugccuccu

SEQ ID NO: 764457 - RNA, 27 nt, Human
gaaaacacguacacaagccaggccccc

SEQ ID NO: 764458 - RNA, 25 nt, Human
gaacagacaucacccugcuguucuc

SEQ ID NO: 764459 - RNA, 21 nt, Human
gcaaacgcugcuuccaaaacc

SEQ ID NO: 764460 - RNA, 23 nt, Human
gcagacaccaggccugggcugug

SEQ ID NO: 764461 - RNA, 23 nt, Human
gcagggccagaaccccuggcccc

SEQ ID NO: 764462 - RNA, 28 nt, Human
gccaugcugcagaaaaggcgcccagggg

SEQ ID NO: 764463 - RNA, 20 nt, Human
gcccagcccacuccaccagc

SEQ ID NO: 764464 - RNA, 20 nt, Human
gccccaggcacacccaccuc

SEQ ID NO: 764465 - RNA, 18 nt, Human
gcccugcuuggcucugcc

SEQ ID NO: 764466 - RNA, 22 nt, Human
gccuccuccucuuucuccccau

SEQ ID NO: 764467 - RNA, 21 nt, Human
gccucucuggcaucacagucc

SEQ ID NO: 764468 - RNA, 19 nt, Human
gccugaggcaggaaagccc

SEQ ID NO: 764469 - RNA, 23 nt, Human
gccuggggccuccuccucuuucu

SEQ ID NO: 764470 - RNA, 19 nt, Human
gcgaccagcgucguuuggc

SEQ ID NO: 764471 - RNA, 23 nt, Human
gcucaccagccaccugcacgggg

SEQ ID NO: 764472 - RNA, 18 nt, Human
gcugaggucugugagcag

SEQ ID NO: 764473 - RNA, 18 nt, Human
gcuguaaggcuccacuga

SEQ ID NO: 764474 - RNA, 22 nt, Human
gcuugagaaugcauugccauuu

SEQ ID NO: 764475 - RNA, 21 nt, Human
gcuuugcugcuguucuugaag

SEQ ID NO: 764476 - RNA, 24 nt, Human
ggaccugaagcuuugagcuggcag

SEQ ID NO: 764477 - RNA, 24 nt, Human
ggacggaagccuugggagaagcug

SEQ ID NO: 764478 - RNA, 18 nt, Human
ggagacaggggccaggcu

SEQ ID NO: 764479 - RNA, 21 nt, Human
ggagcuugggagugcagaggc

SEQ ID NO: 764480 - RNA, 19 nt, Human
ggauagcaagggugacggg

SEQ ID NO: 764481 - RNA, 20 nt, Human
ggcaggagucccuuucuugg

SEQ ID NO: 764482 - RNA, 19 nt, Human
ggcccuggggccgugggca

SEQ ID NO: 764483 - RNA, 18 nt, Human
ggcggguggggugaaggc

SEQ ID NO: 764484 - RNA, 19 nt, Human
ggcuguaaggcuccacuga

SEQ ID NO: 764485 - RNA, 20 nt, Human
gggaagggcagcucuggagg

SEQ ID NO: 764486 - RNA, 19 nt, Human
ggggaggaguuggggacag

SEQ ID NO: 764487 - RNA, 22 nt, Human
ggguaguuggcacagcguaggc

SEQ ID NO: 764488 - RNA, 22 nt, Human
ggguggggcggguccugcacuu

SEQ ID NO: 764489 - RNA, 21 nt, Human
ggugauguggagguguugcag

SEQ ID NO: 764490 - RNA, 20 nt, Human
ggugccucugcugaggucug

SEQ ID NO: 764491 - RNA, 18 nt, Human
guauggaacauuggccuc

SEQ ID NO: 764492 - RNA, 19 nt, Human
gucccuggcuucugagccu

SEQ ID NO: 764493 - RNA, 21 nt, Human
gugaacaacaccugccaccaa

SEQ ID NO: 764494 - RNA, 20 nt, Human
gugacuaggccccgcccaca

SEQ ID NO: 764495 - RNA, 18 nt, Human
gugccucugcugaggucu

SEQ ID NO: 764496 - RNA, 18 nt, Human
gugcuuucugcagguuuu

SEQ ID NO: 764497 - RNA, 18 nt, Human
guggucuucucuggcccu

SEQ ID NO: 764498 - RNA, 22 nt, Human
guggucuugguggucuucucug

SEQ ID NO: 764499 - RNA, 18 nt, Human
guuccaggaccacagaac

SEQ ID NO: 764500 - RNA, 22 nt, Human
uaaaaggccaauaaugagaaua

SEQ ID NO: 764501 - RNA, 21 nt, Human
uaaauacaaaaugccaaagac

SEQ ID NO: 764502 - RNA, 24 nt, Human
uacacaguccaucaaguuaccagc

SEQ ID NO: 764503 - RNA, 21 nt, Human
uagacauucagcagacagacc

SEQ ID NO: 764504 - RNA, 21 nt, Human
uagcccugcuuggcucugccc

SEQ ID NO: 764505 - RNA, 21 nt, Human
uaggcccugccagcagccccc

SEQ ID NO: 764506 - RNA, 20 nt, Human
ucaccccucccaugacuagg

SEQ ID NO: 764507 - RNA, 22 nt, Human
ucaccccucccaugacuaggcc

SEQ ID NO: 764508 - RNA, 28 nt, Human
ucaccccucccauggcuccaugggccaa

SEQ ID NO: 764509 - RNA, 24 nt, Human
ucacggcguggagacagugacggg

SEQ ID NO: 764510 - RNA, 20 nt, Human
ucacuucugccucuuuucug

SEQ ID NO: 764511 - RNA, 21 nt, Human
ucagcagacagaccacagcca

SEQ ID NO: 764512 - RNA, 23 nt, Human
ucagccccacucacagcucaccc

SEQ ID NO: 764513 - RNA, 22 nt, Human
ucagccucagcagugucagcuc

SEQ ID NO: 764514 - RNA, 21 nt, Human
ucagcugaagacacuggcuug

SEQ ID NO: 764515 - RNA, 19 nt, Human
ucagucaggucacucaccc

SEQ ID NO: 764516 - RNA, 19 nt, Human
uccacaaacaaaagcacaa

SEQ ID NO: 764517 - RNA, 21 nt, Human
uccacugaaauccccccggcg

SEQ ID NO: 764518 - RNA, 23 nt, Human
uccaggaccacagaacagccagg

SEQ ID NO: 764519 - RNA, 24 nt, Human
ucccuggagcccuccagcuggugc

SEQ ID NO: 764520 - RNA, 19 nt, Human
ucccuggcuucugagccug

SEQ ID NO: 764521 - RNA, 20 nt, Human
ucccuggcuucugagccugg

SEQ ID NO: 764522 - RNA, 21 nt, Human
ucccuggcuucugagccuggg

SEQ ID NO: 764523 - RNA, 22 nt, Human
uccuaggcccugccagcagccc

SEQ ID NO: 764524 - RNA, 22 nt, Human
ucuaaauacaaaaugccaaaga

SEQ ID NO: 764525 - RNA, 21 nt, Human
ucuccuuccacaaacaaaagc

SEQ ID NO: 764526 - RNA, 18 nt, Human
ucucuggcccuuccaccu

SEQ ID NO: 764527 - RNA, 24 nt, Human
ucugccucuuuucugcugguuucu

SEQ ID NO: 764528 - RNA, 21 nt, Human
ucugucccuggcuucugagcc

SEQ ID NO: 764529 - RNA, 22 nt, Human
ugaagacacuggcuugagaaug

SEQ ID NO: 764530 - RNA, 26 nt, Human
ugagaaugcauugccauugucguaga

SEQ ID NO: 764531 - RNA, 18 nt, Human
ugagccuggggccuccuc

SEQ ID NO: 764532 - RNA, 19 nt, Human
ugaugugaaccaagggaca

SEQ ID NO: 764533 - RNA, 18 nt, Human
ugcagacaccaggccugg

SEQ ID NO: 764534 - RNA, 21 nt, Human
ugcagacaccaggccugggcu

SEQ ID NO: 764535 - RNA, 23 nt, Human
ugcagagccuccucucucccuuu

SEQ ID NO: 764536 - RNA, 22 nt, Human
ugcagccaagcuuuugcugugc

SEQ ID NO: 764537 - RNA, 23 nt, Human
ugcgggaacgguggucuuggugg

SEQ ID NO: 764538 - RNA, 20 nt, Human
ugcugcucccauggcucagc

SEQ ID NO: 764539 - RNA, 19 nt, Human
uggaacaaaaccacacugc

SEQ ID NO: 764540 - RNA, 22 nt, Human
uggaacaaaaccacacugcagc

SEQ ID NO: 764541 - RNA, 21 nt, Human
uggcaagcagggauggcuugg

SEQ ID NO: 764542 - RNA, 24 nt, Human
uggcacugccuggauucaguuugg

SEQ ID NO: 764543 - RNA, 18 nt, Human
uggcaucacaguccgcac

SEQ ID NO: 764544 - RNA, 22 nt, Human
uggcuaggccccacccacagcu

SEQ ID NO: 764545 - RNA, 22 nt, Human
uggcuaggccccauccacagcu

SEQ ID NO: 764546 - RNA, 18 nt, Human
uggcucaccagccaccug

SEQ ID NO: 764547 - RNA, 24 nt, Human
uggcuccacaggcuccgcacgccc

SEQ ID NO: 764548 - RNA, 19 nt, Human
uggcucggacccauggcgg

SEQ ID NO: 764549 - RNA, 20 nt, Human
uggcucggacccauggcggg

SEQ ID NO: 764550 - RNA, 21 nt, Human
uggcuucugagccuggggccu

SEQ ID NO: 764551 - RNA, 24 nt, Human
uggcuucugagccuggggccuccu

SEQ ID NO: 764552 - RNA, 25 nt, Human
ugggaagggcagcucuggagggcag

SEQ ID NO: 764553 - RNA, 25 nt, Human
ugggaagggcagcucuggagggcag

SEQ ID NO: 764554 - RNA, 26 nt, Human
ugggaagggcagcucuggagggcagu

SEQ ID NO: 764555 - RNA, 19 nt, Human
ugggagaagcugucagcug

SEQ ID NO: 764556 - RNA, 22 nt, Human
ugggagagaacaggcugggcug

SEQ ID NO: 764557 - RNA, 25 nt, Human
uggggacaccuguguccuccuccca

SEQ ID NO: 764558 - RNA, 21 nt, Human
uggugccucugcugaggucug

SEQ ID NO: 764559 - RNA, 18 nt, Human
uguauggaacauuggccu

SEQ ID NO: 764560 - RNA, 21 nt, Human
ugugcaggugucucacuuucu

SEQ ID NO: 764561 - RNA, 19 nt, Human
uuacccagcgagcuucaag

SEQ ID NO: 764562 - RNA, 20 nt, Human
uuccaaaagaucggccuaua

SEQ ID NO: 764563 - RNA, 23 nt, Human
uucucagaagcaagugugaugcu

SEQ ID NO: 764564 - RNA, 21 nt, Human
uucuggccuguuuggucccag

SEQ ID NO: 764565 - RNA, 24 nt, Human
uucuggccuguuuggucccagccc

SEQ ID NO: 764566 - RNA, 22 nt, Human
uucuuggggacucacucucuac

SEQ ID NO: 764567 - RNA, 21 nt, Human
uuggggccaucggccuucuga

SEQ ID NO: 764568 - RNA, 20 nt, Human
uuuagcccugcuuggcucuu

SEQ ID NO: 764569 - RNA, 24 nt, Human
uuucuaaccauugggucucuccug

SEQ ID NO: 764570 - RNA, 19 nt, Human
uuucugcugguuucuggcc

SEQ ID NO: 764571 - RNA, 25 nt, Human
uuuucacacugcaaaacaacuuuuu

SEQ ID NO: 764572 - RNA, 21 nt, Human
aaaaaaaaaaacaacaacaac

SEQ ID NO: 764573 - RNA, 26 nt, Human
aaaaaaaacaacaacaacaaaugugg

SEQ ID NO: 764574 - RNA, 21 nt, Human
aaacagauaauauuuuuugca

SEQ ID NO: 764575 - RNA, 23 nt, Human
aaacaucaucaaaauggaaagaa

SEQ ID NO: 764576 - RNA, 19 nt, Human
aaagacagucccugccuuc

SEQ ID NO: 764577 - RNA, 24 nt, Human
aagagcucucugacuacacugaaa

SEQ ID NO: 764578 - RNA, 22 nt, Human
aagcuccaacugugaaccucac

SEQ ID NO: 764579 - RNA, 18 nt, Human
aauagcuccaagccaugg

SEQ ID NO: 764580 - RNA, 19 nt, Human
acacaccaaagcaagaaca

SEQ ID NO: 764581 - RNA, 20 nt, Human
acuagauuuuucuuauccug

SEQ ID NO: 764582 - RNA, 23 nt, Human
agaauccuuucauuuccaagccu

SEQ ID NO: 764583 - RNA, 18 nt, Human
agacauauagauaagugg

SEQ ID NO: 764584 - RNA, 23 nt, Human
agagcaccauucagcagguggaa

SEQ ID NO: 764585 - RNA, 21 nt, Human
agcagguggaaacagaucaaa

SEQ ID NO: 764586 - RNA, 23 nt, Human
agccaugguaaugauucauaacc

SEQ ID NO: 764587 - RNA, 19 nt, Human
agcuaguaauggaugaugu

SEQ ID NO: 764588 - RNA, 21 nt, Human
agcuccaacugugaaccucac

SEQ ID NO: 764589 - RNA, 22 nt, Human
aggaagaagguccagaauguuu

SEQ ID NO: 764590 - RNA, 25 nt, Human
aggaaggcuggggugagcuuggggu

SEQ ID NO: 764591 - RNA, 19 nt, Human
aggaaguuuguugcauuuc

SEQ ID NO: 764592 - RNA, 21 nt, Human
aggcuggggugagcuuggggu

SEQ ID NO: 764593 - RNA, 23 nt, Human
agggacacacacccuguuacuuc

SEQ ID NO: 764594 - RNA, 19 nt, Human
agugccuuuauuauuauua

SEQ ID NO: 764595 - RNA, 21 nt, Human
aguuuucgguuacugaaauug

SEQ ID NO: 764596 - RNA, 26 nt, Human
auagaaaagacagucccugccuucaa

SEQ ID NO: 764597 - RNA, 21 nt, Human
auagacauauagauaaguggu

SEQ ID NO: 764598 - RNA, 22 nt, Human
aucaaaauggaaagaacccaau

SEQ ID NO: 764599 - RNA, 19 nt, Human
aucaaauuuggaugaaauu

SEQ ID NO: 764600 - RNA, 20 nt, Human
aucaaggaauggagccacac

SEQ ID NO: 764601 - RNA, 23 nt, Human
aucucccccucuucugcaaaucc

SEQ ID NO: 764602 - RNA, 21 nt, Human
caaagcaagaacaggagaucc

SEQ ID NO: 764603 - RNA, 23 nt, Human
caagaauacccauuccuucagga

SEQ ID NO: 764604 - RNA, 23 nt, Human
caaggaauggagccacacaccaa

SEQ ID NO: 764605 - RNA, 21 nt, Human
cacacacccuguuacuucacc

SEQ ID NO: 764606 - RNA, 22 nt, Human
caccaaagcaagaacaggagau

SEQ ID NO: 764607 - RNA, 21 nt, Human
caccucuuuucuucuuauguu

SEQ ID NO: 764608 - RNA, 23 nt, Human
cagagcaccauucagcaggugga

SEQ ID NO: 764609 - RNA, 22 nt, Human
cagaugaaaacauucaucccuc

SEQ ID NO: 764610 - RNA, 19 nt, Human
cauccaauagcuccaagcc

SEQ ID NO: 764611 - RNA, 20 nt, Human
ccaagaccccaagcauccaa

SEQ ID NO: 764612 - RNA, 23 nt, Human
ccaagaccccaagcauccaauag

SEQ ID NO: 764613 - RNA, 21 nt, Human
ccacacaccaaagcaagaaca

SEQ ID NO: 764614 - RNA, 23 nt, Human
ccacacaccaaagcaagaacagg

SEQ ID NO: 764615 - RNA, 22 nt, Human
cccaccuuauuaucaaaaaaua

SEQ ID NO: 764616 - RNA, 18 nt, Human
ccccauugaaaacagagc

SEQ ID NO: 764617 - RNA, 23 nt, Human
ccccauugaaaacagagcaccaa

SEQ ID NO: 764618 - RNA, 21 nt, Human
ccuccaugauuucaucuccau

SEQ ID NO: 764619 - RNA, 21 nt, Human
ccuggccugaauaccuuggcc

SEQ ID NO: 764620 - RNA, 20 nt, Human
ccuguuacuucaccagcaau

SEQ ID NO: 764621 - RNA, 20 nt, Human
cgaaagaaaccuugcucuca

SEQ ID NO: 764622 - RNA, 22 nt, Human
cguaugucaccugcgggaacuc

SEQ ID NO: 764623 - RNA, 23 nt, Human
cuaguuucugucaauccuuuuuu

SEQ ID NO: 764624 - RNA, 23 nt, Human
cucaaaucuuuuagaaauuuauu

SEQ ID NO: 764625 - RNA, 25 nt, Human
gaaaugccuccaugauuucaucucc

SEQ ID NO: 764626 - RNA, 20 nt, Human
gaaggcuggggugagcuugg

SEQ ID NO: 764627 - RNA, 21 nt, Human
gaaggcuggggugagcuuggg

SEQ ID NO: 764628 - RNA, 20 nt, Human
gaauaggggagauagauagg

SEQ ID NO: 764629 - RNA, 21 nt, Human
gaauuuugauaacguuguaau

SEQ ID NO: 764630 - RNA, 20 nt, Human
gaccccaagcauccaauagc

SEQ ID NO: 764631 - RNA, 19 nt, Human
gaguggccaugauuuucaa

SEQ ID NO: 764632 - RNA, 19 nt, Human
gauuagagagauggauaga

SEQ ID NO: 764633 - RNA, 21 nt, Human
gcagagcaucugguaccacca

SEQ ID NO: 764634 - RNA, 21 nt, Human
gcauaccuuaaaauacuaaca

SEQ ID NO: 764635 - RNA, 22 nt, Human
gccacacaccaaagcaagaaca

SEQ ID NO: 764636 - RNA, 22 nt, Human
ggaaaaacgaagugaauuuuga

SEQ ID NO: 764637 - RNA, 24 nt, Human
ggcaagaaaagcuccaacugugaa

SEQ ID NO: 764638 - RNA, 25 nt, Human
gggcaagaaugaaacgucaguagcc

SEQ ID NO: 764639 - RNA, 20 nt, Human
guccguaugucaccugcggg

SEQ ID NO: 764640 - RNA, 26 nt, Human
gucuaagaacauuauggaaaagagaa

SEQ ID NO: 764641 - RNA, 19 nt, Human
guuauuuaacagagaagac

SEQ ID NO: 764642 - RNA, 18 nt, Human
guuuacagauagaauguc

SEQ ID NO: 764643 - RNA, 21 nt, Human
guuuccaugaagaucugcagu

SEQ ID NO: 764644 - RNA, 18 nt, Human
uaaccuaguagucucuuu

SEQ ID NO: 764645 - RNA, 24 nt, Human
uaaccucagcgucagacuugguau

SEQ ID NO: 764646 - RNA, 22 nt, Human
uaacuuguaaacagaaacagca

SEQ ID NO: 764647 - RNA, 23 nt, Human
uaauaugccccauugaaaacaga

SEQ ID NO: 764648 - RNA, 18 nt, Human
uaccaggucuagauguuu

SEQ ID NO: 764649 - RNA, 21 nt, Human
uacuguggacucagagcaaga

SEQ ID NO: 764650 - RNA, 19 nt, Human
uagaauauucuauagaauc

SEQ ID NO: 764651 - RNA, 23 nt, Human
uagaauguauacuuucugaaaac

SEQ ID NO: 764652 - RNA, 26 nt, Human
uagauagauagauagacauauagaua

SEQ ID NO: 764653 - RNA, 26 nt, Human
uagauagauagauagacauauagaua

SEQ ID NO: 764654 - RNA, 19 nt, Human
uagcacgucuauuaaacua

SEQ ID NO: 764655 - RNA, 19 nt, Human
uaucagacugaggaugacc

SEQ ID NO: 764656 - RNA, 24 nt, Human
uaucagacugaggaugaccccuuu

SEQ ID NO: 764657 - RNA, 24 nt, Human
uaucccaagaccccaagcauccaa

SEQ ID NO: 764658 - RNA, 22 nt, Human
uaugccccauugaaaacagagc

SEQ ID NO: 764659 - RNA, 18 nt, Human
uauguugcuauuucccuu

SEQ ID NO: 764660 - RNA, 21 nt, Human
uauguugcuauuucccuuagu

SEQ ID NO: 764661 - RNA, 19 nt, Human
uauuccccaccaugaaaca

SEQ ID NO: 764662 - RNA, 22 nt, Human
uauugagcaagcuuucaaaauc

SEQ ID NO: 764663 - RNA, 20 nt, Human
ucaaauacugaccuuacauc

SEQ ID NO: 764664 - RNA, 20 nt, Human
ucaagcaccaagagugugcu

SEQ ID NO: 764665 - RNA, 18 nt, Human
ucaaggaauggagccaca

SEQ ID NO: 764666 - RNA, 19 nt, Human
ucaccacagaugaaaacau

SEQ ID NO: 764667 - RNA, 22 nt, Human
ucaccuucuaucuaucccaaga

SEQ ID NO: 764668 - RNA, 20 nt, Human
ucauaguacaguauacagua

SEQ ID NO: 764669 - RNA, 22 nt, Human
ucccaagaccccaagcauccaa

SEQ ID NO: 764670 - RNA, 18 nt, Human
ucggcaaaauuugagcgg

SEQ ID NO: 764671 - RNA, 23 nt, Human
ucuauagaauccuuucauuucca

SEQ ID NO: 764672 - RNA, 19 nt, Human
ucugcaaauccagagcaag

SEQ ID NO: 764673 - RNA, 19 nt, Human
ucugguaccaccaggagau

SEQ ID NO: 764674 - RNA, 22 nt, Human
ucuguauaacuuauuccccacc

SEQ ID NO: 764675 - RNA, 19 nt, Human
ucugucaauccuuuuuucu

SEQ ID NO: 764676 - RNA, 20 nt, Human
ucugucaauccuuuuuucuu

SEQ ID NO: 764677 - RNA, 20 nt, Human
ucuuauguugcuauuucccu

SEQ ID NO: 764678 - RNA, 24 nt, Human
ucuucugcaaauccagagcaagag

SEQ ID NO: 764679 - RNA, 24 nt, Human
ugaaaaaagaucuaaaaaugugcu

SEQ ID NO: 764680 - RNA, 21 nt, Human
ugaaaacagagcaccaaagac

SEQ ID NO: 764681 - RNA, 26 nt, Human
ugaaacgucaguagcccuugauaaaa

SEQ ID NO: 764682 - RNA, 26 nt, Human
ugaaagaaacaaccuuauguaauaug

SEQ ID NO: 764683 - RNA, 19 nt, Human
ugacuuauagucaugccuu

SEQ ID NO: 764684 - RNA, 23 nt, Human
ugagaugcucucaaaucuuuuag

SEQ ID NO: 764685 - RNA, 18 nt, Human
ugagcuuggggucaaugg

SEQ ID NO: 764686 - RNA, 18 nt, Human
ugcacauaaaauuucacc

SEQ ID NO: 764687 - RNA, 24 nt, Human
ugccagaguauggugggagauggc

SEQ ID NO: 764688 - RNA, 21 nt, Human
ugcgggaacucauugcaacag

SEQ ID NO: 764689 - RNA, 27 nt, Human
ugcuagacuccuauugcuuuaaaaauu

SEQ ID NO: 764690 - RNA, 19 nt, Human
ugcuauuucccuuaguuuc

SEQ ID NO: 764691 - RNA, 26 nt, Human
ugcuauuucccuuaguuucuucuaaa

SEQ ID NO: 764692 - RNA, 23 nt, Human
uggaaaagagaagccaccucuuu

SEQ ID NO: 764693 - RNA, 23 nt, Human
ugguaaugauucauaaccucagc

SEQ ID NO: 764694 - RNA, 20 nt, Human
ugguaggaaaagauauugca

SEQ ID NO: 764695 - RNA, 20 nt, Human
ugguguagagucuuacuggu

SEQ ID NO: 764696 - RNA, 19 nt, Human
ugucaauccuuuuuucuuu

SEQ ID NO: 764697 - RNA, 20 nt, Human
ugucagagcaccauucagca

SEQ ID NO: 764698 - RNA, 18 nt, Human
ugugaugccacugcucuu

SEQ ID NO: 764699 - RNA, 26 nt, Human
uuaccaggucuagauguuuccguuac

SEQ ID NO: 764700 - RNA, 18 nt, Human
uucauaaggcauaaauaa

SEQ ID NO: 764701 - RNA, 21 nt, Human
uuccccaccaugaaacaucau

SEQ ID NO: 764702 - RNA, 19 nt, Human
uugaaaacagagcaccaaa

SEQ ID NO: 764703 - RNA, 22 nt, Human
uuuagacucagguacaagaaau

SEQ ID NO: 764704 - RNA, 21 nt, Human
uuuagccauugucucuacucu

SEQ ID NO: 764705 - RNA, 19 nt, Human
uuuauaccacuuaacaaaa

SEQ ID NO: 764706 - RNA, 20 nt, Human
uuuugcuuuucugcaaggcu

SEQ ID NO: 764707 - RNA, 21 nt, Human
aaaaacucacaaguaaaauaa

SEQ ID NO: 764708 - RNA, 20 nt, Human
aaaacuaauuaagguacuug

SEQ ID NO: 764709 - RNA, 22 nt, Human
aaaacuuaaauaaaagacacca

SEQ ID NO: 764710 - RNA, 22 nt, Human
aaaaggaaacaaaagaaauuca

SEQ ID NO: 764711 - RNA, 19 nt, Human
aaacaggguuucaaagaca

SEQ ID NO: 764712 - RNA, 24 nt, Human
aaaccuacugcugggugguuuuga

SEQ ID NO: 764713 - RNA, 19 nt, Human
aaagucacaaaaaccauau

SEQ ID NO: 764714 - RNA, 21 nt, Human
aaagucacaaaaaccauauga

SEQ ID NO: 764715 - RNA, 24 nt, Human
aaccauaugacaaaacaaauuaaa

SEQ ID NO: 764716 - RNA, 18 nt, Human
aagcaaccccaaaguggu

SEQ ID NO: 764717 - RNA, 25 nt, Human
aagcaaccccaaagugguaaaagau

SEQ ID NO: 764718 - RNA, 21 nt, Human
aagcugucuccagaccuucug

SEQ ID NO: 764719 - RNA, 20 nt, Human
aaggaaaaaaggaaacaaaa

SEQ ID NO: 764720 - RNA, 20 nt, Human
aaggaaacaaaagaaauuca

SEQ ID NO: 764721 - RNA, 25 nt, Human
acacaccaccgcacuggcugaaagu

SEQ ID NO: 764722 - RNA, 19 nt, Human
acaccaccgcacuggcuga

SEQ ID NO: 764723 - RNA, 18 nt, Human
acagaaacacacaacaca

SEQ ID NO: 764724 - RNA, 18 nt, Human
accagcuuuucuuaacuu

SEQ ID NO: 764725 - RNA, 18 nt, Human
agaaacacacaacacaag

SEQ ID NO: 764726 - RNA, 23 nt, Human
agaaacacacaacacaaggguua

SEQ ID NO: 764727 - RNA, 19 nt, Human
agacaacccucugggccag

SEQ ID NO: 764728 - RNA, 27 nt, Human
agacagaaacacacaacaaccccgggg

SEQ ID NO: 764729 - RNA, 19 nt, Human
agacagaaaccccaguaug

SEQ ID NO: 764730 - RNA, 21 nt, Human
agccaucaaccaccaccacuu

SEQ ID NO: 764731 - RNA, 20 nt, Human
agcucacugcaaaaugcuug

SEQ ID NO: 764732 - RNA, 23 nt, Human
aggccuugagaauuuuccuuucu

SEQ ID NO: 764733 - RNA, 23 nt, Human
agguaacccacaggccauacacc

SEQ ID NO: 764734 - RNA, 23 nt, Human
aucccacccuuuuccccucccca

SEQ ID NO: 764735 - RNA, 18 nt, Human
caaaggccuggucacagu

SEQ ID NO: 764736 - RNA, 19 nt, Human
caaaggccuggucacagug

SEQ ID NO: 764737 - RNA, 19 nt, Human
caaccaccaccacuuccug

SEQ ID NO: 764738 - RNA, 19 nt, Human
cacacaccaccgcacuggc

SEQ ID NO: 764739 - RNA, 26 nt, Human
cacacaccaccgcacuggcugaaagu

SEQ ID NO: 764740 - RNA, 18 nt, Human
cacaccaccgcacuggcu

SEQ ID NO: 764741 - RNA, 26 nt, Human
cacagguuugaagucaaccaaagcac

SEQ ID NO: 764742 - RNA, 19 nt, Human
caccgcacuggcugaaagu

SEQ ID NO: 764743 - RNA, 19 nt, Human
cagaaagaaugugaaagca

SEQ ID NO: 764744 - RNA, 21 nt, Human
cagagagaacaagugcuuuuc

SEQ ID NO: 764745 - RNA, 23 nt, Human
cagguuugaagucaaccaaagca

SEQ ID NO: 764746 - RNA, 24 nt, Human
cauauuuuuguauucuuucaaauu

SEQ ID NO: 764747 - RNA, 22 nt, Human
ccacagaugacaagagcucaaa

SEQ ID NO: 764748 - RNA, 21 nt, Human
cccacccuuuuccccucccca

SEQ ID NO: 764749 - RNA, 21 nt, Human
ccccauuuccccuuuuuuugu

SEQ ID NO: 764750 - RNA, 22 nt, Human
ccccauuuccccuuuuuuuguu

SEQ ID NO: 764751 - RNA, 20 nt, Human
cccuccccauuuccccuuuu

SEQ ID NO: 764752 - RNA, 21 nt, Human
cccuuuuccccuccccauuuc

SEQ ID NO: 764753 - RNA, 24 nt, Human
ccuaugguccagaaaaaauucacc

SEQ ID NO: 764754 - RNA, 24 nt, Human
cuauacauugcgaaagucaacccc

SEQ ID NO: 764755 - RNA, 24 nt, Human
cuccacacuugugcauacauuacu

SEQ ID NO: 764756 - RNA, 26 nt, Human
cuccccauuuccccuuuuuuuguuca

SEQ ID NO: 764757 - RNA, 18 nt, Human
cugcagaauugacaugug

SEQ ID NO: 764758 - RNA, 21 nt, Human
cugggccaggaaugaggaguc

SEQ ID NO: 764759 - RNA, 24 nt, Human
cuggucacaguggcucccgggagg

SEQ ID NO: 764760 - RNA, 18 nt, Human
cugucucuucuguuuccc

SEQ ID NO: 764761 - RNA, 18 nt, Human
gaaaagccaucaaccacc

SEQ ID NO: 764762 - RNA, 22 nt, Human
gaugaaaacuacccuuugcugc

SEQ ID NO: 764763 - RNA, 22 nt, Human
gccaucaaccaccaccacuucc

SEQ ID NO: 764764 - RNA, 18 nt, Human
gcgaaagucaaccccccc

SEQ ID NO: 764765 - RNA, 21 nt, Human
gcuacacacaccaccgcacug

SEQ ID NO: 764766 - RNA, 22 nt, Human
ggaaaaaaggaaacaaaagaaa

SEQ ID NO: 764767 - RNA, 20 nt, Human
ggaaguuuccagguccauga

SEQ ID NO: 764768 - RNA, 20 nt, Human
gggaagaaaagccccugcau

SEQ ID NO: 764769 - RNA, 27 nt, Human
uaaaaaaaaaauucaaaguucugauga

SEQ ID NO: 764770 - RNA, 25 nt, Human
uaaauaaaagacaccagaugaaaac

SEQ ID NO: 764771 - RNA, 18 nt, Human
uaaccaggacauggaagu

SEQ ID NO: 764772 - RNA, 19 nt, Human
uaacccacaggccauacac

SEQ ID NO: 764773 - RNA, 28 nt, Human
uaacuuaaaaaacuuaaauaaaagacac

SEQ ID NO: 764774 - RNA, 24 nt, Human
uacaaaugguuugauauaucagau

SEQ ID NO: 764775 - RNA, 20 nt, Human
uacaccaguaacuaagagga

SEQ ID NO: 764776 - RNA, 19 nt, Human
uacagacuuuuucacacag

SEQ ID NO: 764777 - RNA, 20 nt, Human
uaugucaccagcuuuucuua

SEQ ID NO: 764778 - RNA, 26 nt, Human
uauuuuuguauucuuucaaauuguuu

SEQ ID NO: 764779 - RNA, 19 nt, Human
ucaaagacaacccucuggg

SEQ ID NO: 764780 - RNA, 19 nt, Human
ucacagugcaggacugugg

SEQ ID NO: 764781 - RNA, 21 nt, Human
ucagacagaaacacacaacac

SEQ ID NO: 764782 - RNA, 20 nt, Human
ucagguaacccacaggccau

SEQ ID NO: 764783 - RNA, 19 nt, Human
ucccacccuuuuccccucc

SEQ ID NO: 764784 - RNA, 23 nt, Human
ucccacccuuuuccccuccccau

SEQ ID NO: 764785 - RNA, 19 nt, Human
ucugaagaaaaggaugugg

SEQ ID NO: 764786 - RNA, 20 nt, Human
ucuguagcaaauccagggcu

SEQ ID NO: 764787 - RNA, 26 nt, Human
ugaagucaaccaaagcacucaugcua

SEQ ID NO: 764788 - RNA, 20 nt, Human
ugaauuggguuucagcuacu

SEQ ID NO: 764789 - RNA, 18 nt, Human
ugagaggagagaccuggc

SEQ ID NO: 764790 - RNA, 19 nt, Human
ugagaggagagaccuggcu

SEQ ID NO: 764791 - RNA, 22 nt, Human
ugagaggagagaccuggcuucc

SEQ ID NO: 764792 - RNA, 19 nt, Human
ugagccagagagaacaagu

SEQ ID NO: 764793 - RNA, 22 nt, Human
ugaguugagcuugacugccuuc

SEQ ID NO: 764794 - RNA, 19 nt, Human
ugcaaaaggacacugucuc

SEQ ID NO: 764795 - RNA, 24 nt, Human
ugcauacauuacuuucuccaugca

SEQ ID NO: 764796 - RNA, 23 nt, Human
ugcauugacacacagguuugaag

SEQ ID NO: 764797 - RNA, 24 nt, Human
uggccacuuaacauggcagaacuu

SEQ ID NO: 764798 - RNA, 22 nt, Human
ugggaacacuagggagacagaa

SEQ ID NO: 764799 - RNA, 21 nt, Human
uggggaccagugguuggggcu

SEQ ID NO: 764800 - RNA, 19 nt, Human
uggggcuacacacaccacc

SEQ ID NO: 764801 - RNA, 24 nt, Human
uggucugaagaaaaggaugugggu

SEQ ID NO: 764802 - RNA, 21 nt, Human
uguuaacaaaaccuacugcug

SEQ ID NO: 764803 - RNA, 19 nt, Human
uucuagggaagaaaagccc

SEQ ID NO: 764804 - RNA, 22 nt, Human
uucugcuuagaauuggguuucu

SEQ ID NO: 764805 - RNA, 23 nt, Human
uuuaaaaagucccagauuaugga

SEQ ID NO: 764806 - RNA, 18 nt, Human
uuugcaugauucucucca

SEQ ID NO: 764807 - RNA, 19 nt, Human
uuuguucaaaccaugguaa

SEQ ID NO: 764808 - RNA, 21 nt, Human
uuuuaaaguuuuuuuguaggg

SEQ ID NO: 764809 - RNA, 18 nt, Human
uuuuuguucaaaccaugg

SEQ ID NO: 764810 - RNA, 29 nt, Human
aaaaaaacaaaaacaaaaacaaaccgagg

SEQ ID NO: 764811 - RNA, 27 nt, Human
aaaacaaaaacaaaaacaaaccgacga

SEQ ID NO: 764812 - RNA, 21 nt, Human
aaaagaaaaagaaaaaccaaa

SEQ ID NO: 764813 - RNA, 20 nt, Human
aaaagccuucacuacauccc

SEQ ID NO: 764814 - RNA, 21 nt, Human
aaacaaaccgacgaaccaaac

SEQ ID NO: 764815 - RNA, 23 nt, Human
aaacagaccacauccucugccag

SEQ ID NO: 764816 - RNA, 22 nt, Human
aaagaaauguacuuuuauagaa

SEQ ID NO: 764817 - RNA, 18 nt, Human
aaagcaccaguauaaaac

SEQ ID NO: 764818 - RNA, 31 nt, Human
aaagggggaaaaaaacaaaaacaaaaacaaa

SEQ ID NO: 764819 - RNA, 26 nt, Human
aaaugaggaggugcuggggaggcccc

SEQ ID NO: 764820 - RNA, 24 nt, Human
aacaaaccgacgaaccaaacaaaa

SEQ ID NO: 764821 - RNA, 20 nt, Human
aacauggugaaaucucaucu

SEQ ID NO: 764822 - RNA, 19 nt, Human
aacccagccaagacaaggc

SEQ ID NO: 764823 - RNA, 21 nt, Human
aaccgacgaaccaaacaaaaa

SEQ ID NO: 764824 - RNA, 24 nt, Human
aacuguccucagaagcucaaccca

SEQ ID NO: 764825 - RNA, 24 nt, Human
aagaggaagaugaaacagcagaga

SEQ ID NO: 764826 - RNA, 18 nt, Human
aagcacaaaauagagaau

SEQ ID NO: 764827 - RNA, 23 nt, Human
aagcaccaguauaaaacagagaa

SEQ ID NO: 764828 - RNA, 18 nt, Human
aagcacccauuuccuggc

SEQ ID NO: 764829 - RNA, 24 nt, Human
aagcagauacccccagauggcuua

SEQ ID NO: 764830 - RNA, 23 nt, Human
aaggaggaggggaggagaaaggg

SEQ ID NO: 764831 - RNA, 31 nt, Human
aagggaaaugaggaggugcuggggaggcccc

SEQ ID NO: 764832 - RNA, 18 nt, Human
aauugggggcugucagau

SEQ ID NO: 764833 - RNA, 20 nt, Human
aauuguuugagccuggaagg

SEQ ID NO: 764834 - RNA, 22 nt, Human
acaaaaacaaaccgacgaacca

SEQ ID NO: 764835 - RNA, 19 nt, Human
acaagagugaaacuccauc

SEQ ID NO: 764836 - RNA, 20 nt, Human
acaauaggguugugcagguu

SEQ ID NO: 764837 - RNA, 26 nt, Human
acgcacggccacacgcgcacccacgc

SEQ ID NO: 764838 - RNA, 18 nt, Human
acugcacuccauccuggg

SEQ ID NO: 764839 - RNA, 24 nt, Human
acugcgucacugcacuccauccug

SEQ ID NO: 764840 - RNA, 24 nt, Human
acuuugggagacugaggugggcag

SEQ ID NO: 764841 - RNA, 28 nt, Human
agaaaaagaaaaaccaaacacugaagaa

SEQ ID NO: 764842 - RNA, 18 nt, Human
agaaggaggaggaggagc

SEQ ID NO: 764843 - RNA, 21 nt, Human
agaauuguuugagccuggaag

SEQ ID NO: 764844 - RNA, 21 nt, Human
agacaggugacacaggagagc

SEQ ID NO: 764845 - RNA, 22 nt, Human
agaccagccuggccaacauggu

SEQ ID NO: 764846 - RNA, 25 nt, Human
agacuccuggugguuauuucuggaa

SEQ ID NO: 764847 - RNA, 21 nt, Human
agacugaggugggcagaucgc

SEQ ID NO: 764848 - RNA, 20 nt, Human
agagagcagagcuuacccug

SEQ ID NO: 764849 - RNA, 22 nt, Human
agaggaagaugaaacagcagag

SEQ ID NO: 764850 - RNA, 21 nt, Human
agaggaggagaaggaggagga

SEQ ID NO: 764851 - RNA, 19 nt, Human
agcacccauuuccuggcag

SEQ ID NO: 764852 - RNA, 24 nt, Human
agcacuuugggagacugagguggg

SEQ ID NO: 764853 - RNA, 23 nt, Human
agccgggugugauggcaggcauc

SEQ ID NO: 764854 - RNA, 21 nt, Human
agccuggccaacauggugaaa

SEQ ID NO: 764855 - RNA, 19 nt, Human
aggaggagaaggaggagga

SEQ ID NO: 764856 - RNA, 20 nt, Human
aggaggaggagcagcgaucg

SEQ ID NO: 764857 - RNA, 19 nt, Human
aggaggggaggagaaaggg

SEQ ID NO: 764858 - RNA, 22 nt, Human
aggcaggagaauuguuugagcc

SEQ ID NO: 764859 - RNA, 23 nt, Human
aggcaggagaauuguuugagccu

SEQ ID NO: 764860 - RNA, 24 nt, Human
aggcaggagaauuguuugagccug

SEQ ID NO: 764861 - RNA, 19 nt, Human
aggcagucauuaguccagg

SEQ ID NO: 764862 - RNA, 19 nt, Human
aggcccugagcucuggaag

SEQ ID NO: 764863 - RNA, 21 nt, Human
aggcugaggcaggagaauugu

SEQ ID NO: 764864 - RNA, 24 nt, Human
aggcugaggcaggagaauuguuug

SEQ ID NO: 764865 - RNA, 24 nt, Human
aggugcaguggcucaugucuauaa

SEQ ID NO: 764866 - RNA, 22 nt, Human
aggugggcagaucgccugaggu

SEQ ID NO: 764867 - RNA, 26 nt, Human
aggugggcagaucgccugaggucagg

SEQ ID NO: 764868 - RNA, 21 nt, Human
agguguugguugcagugagcu

SEQ ID NO: 764869 - RNA, 24 nt, Human
agguguugguugcagugagcugag

SEQ ID NO: 764870 - RNA, 24 nt, Human
aguggcucaugucuauaaucccag

SEQ ID NO: 764871 - RNA, 18 nt, Human
aucccaucuucucuuucu

SEQ ID NO: 764872 - RNA, 21 nt, Human
auggggccugcucacugaaac

SEQ ID NO: 764873 - RNA, 19 nt, Human
auggugcagggacacugcu

SEQ ID NO: 764874 - RNA, 19 nt, Human
augucuauaaucccagcac

SEQ ID NO: 764875 - RNA, 24 nt, Human
auucaaggugguccccacacccag

SEQ ID NO: 764876 - RNA, 23 nt, Human
caaaccgacgaaccaaacaaaaa

SEQ ID NO: 764877 - RNA, 22 nt, Human
caaaggaaacaaacuuagacca

SEQ ID NO: 764878 - RNA, 24 nt, Human
caaaggguuaccuguagccggggc

SEQ ID NO: 764879 - RNA, 27 nt, Human
caacacaacuguaucgcuccaaagacc

SEQ ID NO: 764880 - RNA, 24 nt, Human
caacauggugaaaucucaucucua

SEQ ID NO: 764881 - RNA, 24 nt, Human
caacccaccuucaauuuacuccca

SEQ ID NO: 764882 - RNA, 19 nt, Human
caagacaaggccccuuggc

SEQ ID NO: 764883 - RNA, 22 nt, Human
caagagaggcagcagacagucc

SEQ ID NO: 764884 - RNA, 24 nt, Human
caauaaaaaagagaaucccaggcc

SEQ ID NO: 764885 - RNA, 22 nt, Human
cacacccagcacccaugugugc

SEQ ID NO: 764886 - RNA, 22 nt, Human
cacacgcccacacgcacagaca

SEQ ID NO: 764887 - RNA, 24 nt, Human
caccaguauaaaacagagaauccc

SEQ ID NO: 764888 - RNA, 21 nt, Human
cacccagcacccaugugugcc

SEQ ID NO: 764889 - RNA, 18 nt, Human
cacccauuuccuggcagc

SEQ ID NO: 764890 - RNA, 19 nt, Human
caccggcagcgccgguucc

SEQ ID NO: 764891 - RNA, 20 nt, Human
cacgcaccccacgcacggcc

SEQ ID NO: 764892 - RNA, 19 nt, Human
cacugcacuccauccuggg

SEQ ID NO: 764893 - RNA, 19 nt, Human
cacugcacuccauccuggg

SEQ ID NO: 764894 - RNA, 23 nt, Human
cacugcacuccauccugggugac

SEQ ID NO: 764895 - RNA, 24 nt, Human
cacugcacuccauccugggugaca

SEQ ID NO: 764896 - RNA, 18 nt, Human
cagaaucagucugcccug

SEQ ID NO: 764897 - RNA, 20 nt, Human
cagacacgccugcgggcagc

SEQ ID NO: 764898 - RNA, 22 nt, Human
cagagacaggugacacaggaga

SEQ ID NO: 764899 - RNA, 22 nt, Human
cagaguccccaugggcccacca

SEQ ID NO: 764900 - RNA, 20 nt, Human
cagauaucaagagaggcagc

SEQ ID NO: 764901 - RNA, 22 nt, Human
cagauaucaagagaggcagcag

SEQ ID NO: 764902 - RNA, 27 nt, Human
cagaucgccugaggucaggaguugaag

SEQ ID NO: 764903 - RNA, 24 nt, Human
cagcacuuugggagacugaggugg

SEQ ID NO: 764904 - RNA, 19 nt, Human
cagccaagacaaggccccu

SEQ ID NO: 764905 - RNA, 21 nt, Human
cagcuagggccuuugccuccu

SEQ ID NO: 764906 - RNA, 24 nt, Human
cagcuagggccuuugccuccuggg

SEQ ID NO: 764907 - RNA, 24 nt, Human
cagcugcucgggaggcugaggcag

SEQ ID NO: 764908 - RNA, 23 nt, Human
caggauagagagcuggcucuaaa

SEQ ID NO: 764909 - RNA, 21 nt, Human
caguauaaaacagagaauccc

SEQ ID NO: 764910 - RNA, 22 nt, Human
cagugguccuucaggaucaggg

SEQ ID NO: 764911 - RNA, 23 nt, Human
caucuccugaagcagauaccccc

SEQ ID NO: 764912 - RNA, 20 nt, Human
caucucuacuaaaaauacaa

SEQ ID NO: 764913 - RNA, 20 nt, Human
caugucuauaaucccagcac

SEQ ID NO: 764914 - RNA, 24 nt, Human
caugucuauaaucccagcacuuug

SEQ ID NO: 764915 - RNA, 20 nt, Human
ccagcgcacacgugcacacg

SEQ ID NO: 764916 - RNA, 19 nt, Human
cccaaggcaaaggguuacc

SEQ ID NO: 764917 - RNA, 23 nt, Human
cccacacccagaccccaauauuu

SEQ ID NO: 764918 - RNA, 22 nt, Human
cccacacgcacagacacgccug

SEQ ID NO: 764919 - RNA, 20 nt, Human
cccacgcacggccacacgcg

SEQ ID NO: 764920 - RNA, 26 nt, Human
cccacgcacggccacacgcgcaccca

SEQ ID NO: 764921 - RNA, 21 nt, Human
cccacuggggcagaguuccag

SEQ ID NO: 764922 - RNA, 19 nt, Human
cccagaaucagucugcccu

SEQ ID NO: 764923 - RNA, 25 nt, Human
cccaucuucucuuucuucuuuuucc

SEQ ID NO: 764924 - RNA, 24 nt, Human
ccccagauggcuuauugauggggc

SEQ ID NO: 764925 - RNA, 22 nt, Human
ccccaggcaccggcagcgccgg

SEQ ID NO: 764926 - RNA, 20 nt, Human
ccccaugggcccaccacgag

SEQ ID NO: 764927 - RNA, 21 nt, Human
cccccggcucuaccuguugug

SEQ ID NO: 764928 - RNA, 21 nt, Human
cccgcgccccgacccccaggc

SEQ ID NO: 764929 - RNA, 23 nt, Human
cccgcgccccgacccccaggcac

SEQ ID NO: 764930 - RNA, 22 nt, Human
ccgcggcgguggcgaggcggcg

SEQ ID NO: 764931 - RNA, 20 nt, Human
ccggcagcgccgguuccucc

SEQ ID NO: 764932 - RNA, 24 nt, Human
ccggcuucgcccgcgccccgaccc

SEQ ID NO: 764933 - RNA, 22 nt, Human
ccuagccgcggcgguggcgagg

SEQ ID NO: 764934 - RNA, 19 nt, Human
ccuccagcccuagccgcgg

SEQ ID NO: 764935 - RNA, 19 nt, Human
ccuggccaacauggugaaa

SEQ ID NO: 764936 - RNA, 19 nt, Human
ccuggccaacauggugaaa

SEQ ID NO: 764937 - RNA, 24 nt, Human
ccuggccaacauggugaaaucuca

SEQ ID NO: 764938 - RNA, 19 nt, Human
ccugggagcuggugcccag

SEQ ID NO: 764939 - RNA, 24 nt, Human
cgaagacgcgggagauggagccga

SEQ ID NO: 764940 - RNA, 20 nt, Human
cgccccgacccccaggcacc

SEQ ID NO: 764941 - RNA, 18 nt, Human
cgcccuguagccagagga

SEQ ID NO: 764942 - RNA, 26 nt, Human
cgcggccgggcacccccggcucuacc

SEQ ID NO: 764943 - RNA, 23 nt, Human
cggaggagaaaaaagaggaggag

SEQ ID NO: 764944 - RNA, 23 nt, Human
cggccgacccaggcccgcuuccu

SEQ ID NO: 764945 - RNA, 24 nt, Human
cggcuucgcccgcgccccgacccc

SEQ ID NO: 764946 - RNA, 22 nt, Human
cuagccgcggcgguggcgaggc

SEQ ID NO: 764947 - RNA, 21 nt, Human
cuagggccuuugccuccuggg

SEQ ID NO: 764948 - RNA, 21 nt, Human
cuauaaucccagcacuuuggg

SEQ ID NO: 764949 - RNA, 21 nt, Human
cucaggggccacccugccucu

SEQ ID NO: 764950 - RNA, 23 nt, Human
cucaugucuauaaucccagcacu

SEQ ID NO: 764951 - RNA, 24 nt, Human
cucaugucuauaaucccagcacuu

SEQ ID NO: 764952 - RNA, 22 nt, Human
cuccaaccucucuaugcugagu

SEQ ID NO: 764953 - RNA, 20 nt, Human
cuccucuauguaauaaucag

SEQ ID NO: 764954 - RNA, 20 nt, Human
cuccuggugguuauuucugg

SEQ ID NO: 764955 - RNA, 22 nt, Human
cucuuagcuauuuuuauaagca

SEQ ID NO: 764956 - RNA, 23 nt, Human
cugaacuccuucccuuuuuccua

SEQ ID NO: 764957 - RNA, 23 nt, Human
cuggccaacauggugaaaucuca

SEQ ID NO: 764958 - RNA, 19 nt, Human
cuggggcagaguuccaggc

SEQ ID NO: 764959 - RNA, 21 nt, Human
cugugccugcggccgacccag

SEQ ID NO: 764960 - RNA, 26 nt, Human
cuugcacacacgcccacacgcacaga

SEQ ID NO: 764961 - RNA, 18 nt, Human
cuugccuugguucuguua

SEQ ID NO: 764962 - RNA, 24 nt, Human
cuuucuucuuuuuccguuuuuggu

SEQ ID NO: 764963 - RNA, 18 nt, Human
gaagaugaaacagcagag

SEQ ID NO: 764964 - RNA, 24 nt, Human
gaauuuugggacagaaacaaacuu

SEQ ID NO: 764965 - RNA, 18 nt, Human
gaccucugacaaacccag

SEQ ID NO: 764966 - RNA, 18 nt, Human
gagaacuccuucugcaga

SEQ ID NO: 764967 - RNA, 19 nt, Human
gagacaggugacacaggag

SEQ ID NO: 764968 - RNA, 20 nt, Human
gagagaggugacaaagagcu

SEQ ID NO: 764969 - RNA, 20 nt, Human
gaggaggccaucuaaagucc

SEQ ID NO: 764970 - RNA, 21 nt, Human
gaggaggggaggagaaagggg

SEQ ID NO: 764971 - RNA, 23 nt, Human
gaucgccugaggucaggaguuga

SEQ ID NO: 764972 - RNA, 24 nt, Human
gaucgccugaggucaggaguugaa

SEQ ID NO: 764973 - RNA, 23 nt, Human
gauugaaaaaaaugguuccauaa

SEQ ID NO: 764974 - RNA, 18 nt, Human
gcaaaagacuaggacugg

SEQ ID NO: 764975 - RNA, 26 nt, Human
gcagagcuacagcuccaauuggggga

SEQ ID NO: 764976 - RNA, 22 nt, Human
gcagcuagggccuuugccuccu

SEQ ID NO: 764977 - RNA, 24 nt, Human
gccaacauggugaaaucucaucuc

SEQ ID NO: 764978 - RNA, 18 nt, Human
gccaagacuccuggguca

SEQ ID NO: 764979 - RNA, 21 nt, Human
gcccagucuggccucucaacc

SEQ ID NO: 764980 - RNA, 18 nt, Human
gccgcccaccugagcaga

SEQ ID NO: 764981 - RNA, 28 nt, Human
gcgcacccccaggacaggggggaacgcc

SEQ ID NO: 764982 - RNA, 19 nt, Human
gcgucacugcacuccaucc

SEQ ID NO: 764983 - RNA, 18 nt, Human
ggacaucaaaaacagacc

SEQ ID NO: 764984 - RNA, 21 nt, Human
ggacaucaaaaacagaccaca

SEQ ID NO: 764985 - RNA, 18 nt, Human
ggagaaaaaagaggagga

SEQ ID NO: 764986 - RNA, 18 nt, Human
ggaggagaaggaggagga

SEQ ID NO: 764987 - RNA, 21 nt, Human
ggaggaggggaggagaaaggg

SEQ ID NO: 764988 - RNA, 25 nt, Human
ggcagaucgccugaggucaggaguu

SEQ ID NO: 764989 - RNA, 24 nt, Human
gggaacccuuaauagccuacaggu

SEQ ID NO: 764990 - RNA, 20 nt, Human
gggacagaaacaaacuuggg

SEQ ID NO: 764991 - RNA, 24 nt, Human
gggggcgagagaggugacaaagag

SEQ ID NO: 764992 - RNA, 20 nt, Human
gucacugcacuccauccugg

SEQ ID NO: 764993 - RNA, 24 nt, Human
gucacugcacuccauccuggguga

SEQ ID NO: 764994 - RNA, 21 nt, Human
guccccacacccagaccccaa

SEQ ID NO: 764995 - RNA, 19 nt, Human
guccucuccugcccagucu

SEQ ID NO: 764996 - RNA, 18 nt, Human
gucgagggacuuccgcug

SEQ ID NO: 764997 - RNA, 26 nt, Human
guggagggaacccuuaauagccuaca

SEQ ID NO: 764998 - RNA, 19 nt, Human
guugcagugagcugagacu

SEQ ID NO: 764999 - RNA, 21 nt, Human
guugcagugagcugagacugc

SEQ ID NO: 765000 - RNA, 23 nt, Human
guuucauaaaaaggaggagggga

SEQ ID NO: 765001 - RNA, 21 nt, Human
uaaaaaagagaaucccaggcc

SEQ ID NO: 765002 - RNA, 24 nt, Human
uaaaacaauaaaaaagagaauccc

SEQ ID NO: 765003 - RNA, 24 nt, Human
uaaaccagauuaacaacacaacug

SEQ ID NO: 765004 - RNA, 24 nt, Human
uaaagaaagaaacggcaaugcaac

SEQ ID NO: 765005 - RNA, 23 nt, Human
uaaguuccugucccagucugucc

SEQ ID NO: 765006 - RNA, 23 nt, Human
uacaaaagccuucacuacauccc

SEQ ID NO: 765007 - RNA, 21 nt, Human
uacaagcacagagugcacaau

SEQ ID NO: 765008 - RNA, 20 nt, Human
uacagcuccaauugggggcu

SEQ ID NO: 765009 - RNA, 24 nt, Human
uacucuuagcuauuuuuauaagca

SEQ ID NO: 765010 - RNA, 18 nt, Human
uagccucuagcuuccccc

SEQ ID NO: 765011 - RNA, 23 nt, Human
uagcgguuuggacgagggacauu

SEQ ID NO: 765012 - RNA, 19 nt, Human
uauggccguggggggaagg

SEQ ID NO: 765013 - RNA, 26 nt, Human
ucaaguuucauaaaaaggaggagggg

SEQ ID NO: 765014 - RNA, 19 nt, Human
ucacaccaggggggcggga

SEQ ID NO: 765015 - RNA, 19 nt, Human
ucacugcacuccauccugg

SEQ ID NO: 765016 - RNA, 21 nt, Human
ucacugcacuccauccugggu

SEQ ID NO: 765017 - RNA, 24 nt, Human
ucacugcacuccauccugggugac

SEQ ID NO: 765018 - RNA, 22 nt, Human
ucagagaccccuccaguggccc

SEQ ID NO: 765019 - RNA, 24 nt, Human
ucauaaaaaggaggaggggaggag

SEQ ID NO: 765020 - RNA, 21 nt, Human
uccaggcugugccugcggccg

SEQ ID NO: 765021 - RNA, 25 nt, Human
uccaucacacacacauacaaauaaa

SEQ ID NO: 765022 - RNA, 19 nt, Human
uccauccugggugacaaga

SEQ ID NO: 765023 - RNA, 19 nt, Human
ucccaucuucucuuucuuc

SEQ ID NO: 765024 - RNA, 24 nt, Human
ucccgccaggugcaguggcucaug

SEQ ID NO: 765025 - RNA, 21 nt, Human
ucccuagaguuccuggggucc

SEQ ID NO: 765026 - RNA, 22 nt, Human
ucccucuggcgaagacgcggga

SEQ ID NO: 765027 - RNA, 18 nt, Human
ucccuuuuuccuagggag

SEQ ID NO: 765028 - RNA, 18 nt, Human
uccuccgcggcccggcuu

SEQ ID NO: 765029 - RNA, 21 nt, Human
uccuccgcggcccggcuucgc

SEQ ID NO: 765030 - RNA, 18 nt, Human
uccuggcagcaggaaugu

SEQ ID NO: 765031 - RNA, 21 nt, Human
uccugggagcuggugcccagu

SEQ ID NO: 765032 - RNA, 22 nt, Human
uccuuccaggcaggagcuccag

SEQ ID NO: 765033 - RNA, 24 nt, Human
ucgacauggcuuccaacuguccuc

SEQ ID NO: 765034 - RNA, 23 nt, Human
ucgggaggcugaggcaggagaau

SEQ ID NO: 765035 - RNA, 20 nt, Human
ucucaggggccacccugccu

SEQ ID NO: 765036 - RNA, 21 nt, Human
ucuccugcccagucuggccuc

SEQ ID NO: 765037 - RNA, 21 nt, Human
ucucuacuaaaaauacaaaaa

SEQ ID NO: 765038 - RNA, 22 nt, Human
ucugaccaacaaauuagccacu

SEQ ID NO: 765039 - RNA, 21 nt, Human
ucugaguuagagcuagagcuu

SEQ ID NO: 765040 - RNA, 18 nt, Human
ucuuucuucuuuuuccgu

SEQ ID NO: 765041 - RNA, 18 nt, Human
ugaagcagauacccccag

SEQ ID NO: 765042 - RNA, 21 nt, Human
ugaagcagauacccccagaug

SEQ ID NO: 765043 - RNA, 20 nt, Human
ugacaaagagcugcaugaug

SEQ ID NO: 765044 - RNA, 22 nt, Human
ugacauuaacugaguuuuggaa

SEQ ID NO: 765045 - RNA, 23 nt, Human
ugagaauggugcagggacacugc

SEQ ID NO: 765046 - RNA, 21 nt, Human
ugagacugcgucacugcacuc

SEQ ID NO: 765047 - RNA, 20 nt, Human
ugagauggggggauaaaaag

SEQ ID NO: 765048 - RNA, 22 nt, Human
ugagauggggggauaaaaaggg

SEQ ID NO: 765049 - RNA, 25 nt, Human
ugagauggggggauaaaaaggguuu

SEQ ID NO: 765050 - RNA, 24 nt, Human
ugagccuggaagguguugguugca

SEQ ID NO: 765051 - RNA, 22 nt, Human
ugagcugagacugcgucacugc

SEQ ID NO: 765052 - RNA, 24 nt, Human
ugaggcaggagaauuguuugagcc

SEQ ID NO: 765053 - RNA, 25 nt, Human
ugaggcaggagaauuguuugagccu

SEQ ID NO: 765054 - RNA, 18 nt, Human
ugaggcagucauuagucc

SEQ ID NO: 765055 - RNA, 24 nt, Human
ugaggugggcagaucgccugaggu

SEQ ID NO: 765056 - RNA, 26 nt, Human
ugaggugggcagaucgccugagguca

SEQ ID NO: 765057 - RNA, 24 nt, Human
ugaugaaauaaacaaaggaaacaa

SEQ ID NO: 765058 - RNA, 25 nt, Human
ugccaagguccgucaaccuucucca

SEQ ID NO: 765059 - RNA, 19 nt, Human
ugccagaguccccaugggc

SEQ ID NO: 765060 - RNA, 20 nt, Human
ugccagcugcucgggaggcu

SEQ ID NO: 765061 - RNA, 18 nt, Human
ugccuugguucuguuagu

SEQ ID NO: 765062 - RNA, 19 nt, Human
ugcgcggggggcgcgcggc

SEQ ID NO: 765063 - RNA, 19 nt, Human
ugcgggcagcaggcgcagg

SEQ ID NO: 765064 - RNA, 24 nt, Human
uggaagguguugguugcagugagc

SEQ ID NO: 765065 - RNA, 22 nt, Human
uggaauugcaagcauaaugcca

SEQ ID NO: 765066 - RNA, 20 nt, Human
uggauaggaacaucuuugcc

SEQ ID NO: 765067 - RNA, 23 nt, Human
uggccaacauggugaaaucucau

SEQ ID NO: 765068 - RNA, 21 nt, Human
uggcucaugucuauaauccca

SEQ ID NO: 765069 - RNA, 22 nt, Human
uggcucaugucuauaaucccag

SEQ ID NO: 765070 - RNA, 24 nt, Human
uggcucaugucuauaaucccagca

SEQ ID NO: 765071 - RNA, 21 nt, Human
uggcuguagguauaacuccac

SEQ ID NO: 765072 - RNA, 20 nt, Human
ugggagacugaggugggcag

SEQ ID NO: 765073 - RNA, 23 nt, Human
ugggagacugaggugggcagauc

SEQ ID NO: 765074 - RNA, 24 nt, Human
ugggagacugaggugggcagaucg

SEQ ID NO: 765075 - RNA, 25 nt, Human
ugggaggagaagcccacggucccag

SEQ ID NO: 765076 - RNA, 21 nt, Human
ugggcaaaagacuaggacugg

SEQ ID NO: 765077 - RNA, 24 nt, Human
ugggcagaucgccugaggucagga

SEQ ID NO: 765078 - RNA, 22 nt, Human
ugggggcugucagauuccuccu

SEQ ID NO: 765079 - RNA, 23 nt, Human
uggugcagggacacugcuggcug

SEQ ID NO: 765080 - RNA, 23 nt, Human
ugguggacgucagaugcccaagg

SEQ ID NO: 765081 - RNA, 19 nt, Human
ugucccagucuguccucug

SEQ ID NO: 765082 - RNA, 18 nt, Human
ugucgcccuguagccaga

SEQ ID NO: 765083 - RNA, 21 nt, Human
uguguccuccgcggcccggcu

SEQ ID NO: 765084 - RNA, 20 nt, Human
uguguucaccucauuucuuu

SEQ ID NO: 765085 - RNA, 19 nt, Human
uguuagaggcgcucggcca

SEQ ID NO: 765086 - RNA, 20 nt, Human
uuccauuguguugccagccc

SEQ ID NO: 765087 - RNA, 18 nt, Human
uuccuggcagcaggaaug

SEQ ID NO: 765088 - RNA, 18 nt, Human
uugcagagcccaucuguc

SEQ ID NO: 765089 - RNA, 19 nt, Human
uugcagugagcugagacug

SEQ ID NO: 765090 - RNA, 22 nt, Human
uugcagugagcugagacugcgu

SEQ ID NO: 765091 - RNA, 24 nt, Human
uugggagacugaggugggcagauc

SEQ ID NO: 765092 - RNA, 21 nt, Human
uugguccugagcuuugggcug

SEQ ID NO: 765093 - RNA, 22 nt, Human
uuuaaaagagccgguuugaccu

SEQ ID NO: 765094 - RNA, 21 nt, Human
uuuccaagcaacacuguuaug

SEQ ID NO: 765095 - RNA, 24 nt, Human
uuucugcugccagaguccccaugg

SEQ ID NO: 765096 - RNA, 23 nt, Human
uuucuucuuuuuccguuuuuggu

SEQ ID NO: 765097 - RNA, 18 nt, Human
uuuggaaaaagccgucuc

SEQ ID NO: 765098 - RNA, 22 nt, Human
uuuuacacacugauuuccaagc

SEQ ID NO: 765099 - RNA, 23 nt, Human
aaaaaggacaccuucaguccaga

SEQ ID NO: 765100 - RNA, 23 nt, Human
aaaacagcaucauuuuagaggca

SEQ ID NO: 765101 - RNA, 19 nt, Human
aaaaggacaccuucagucc

SEQ ID NO: 765102 - RNA, 23 nt, Human
aaacacacaccuccccagaaagc

SEQ ID NO: 765103 - RNA, 18 nt, Human
aacagcucuggacaguga

SEQ ID NO: 765104 - RNA, 18 nt, Human
aaccauagugauugcuac

SEQ ID NO: 765105 - RNA, 21 nt, Human
aaccugcuucaucuucagucu

SEQ ID NO: 765106 - RNA, 23 nt, Human
aagaaaacauuuaaaacaaggcu

SEQ ID NO: 765107 - RNA, 23 nt, Human
aagaucgugccacugcacuccag

SEQ ID NO: 765108 - RNA, 23 nt, Human
aagcuacagucaucucuauaacc

SEQ ID NO: 765109 - RNA, 24 nt, Human
aagcuacagucaucucuauaacca

SEQ ID NO: 765110 - RNA, 21 nt, Human
aagcuaccuuaccuugagcuc

SEQ ID NO: 765111 - RNA, 19 nt, Human
aagcuccuuaaggacaaga

SEQ ID NO: 765112 - RNA, 22 nt, Human
aaggacaagaaguaugcccugu

SEQ ID NO: 765113 - RNA, 20 nt, Human
aauagggugaaaccccaucu

SEQ ID NO: 765114 - RNA, 19 nt, Human
acagaagugcugggauuag

SEQ ID NO: 765115 - RNA, 24 nt, Human
acagagcaacacuccgucucaaaa

SEQ ID NO: 765116 - RNA, 23 nt, Human
accaagaauauaaaauaaaugca

SEQ ID NO: 765117 - RNA, 24 nt, Human
accccaucucuacuaaaaauacaa

SEQ ID NO: 765118 - RNA, 20 nt, Human
accccggccccagccccacc

SEQ ID NO: 765119 - RNA, 24 nt, Human
acugcacuccagcuugggugacag

SEQ ID NO: 765120 - RNA, 26 nt, Human
acugcacuccagcuugggugacagag

SEQ ID NO: 765121 - RNA, 22 nt, Human
acugccuuucucuacucccuag

SEQ ID NO: 765122 - RNA, 19 nt, Human
acuggagugcugauaaucc

SEQ ID NO: 765123 - RNA, 18 nt, Human
acuuugggacaguaacag

SEQ ID NO: 765124 - RNA, 22 nt, Human
agacaggcggaugaccugaggg

SEQ ID NO: 765125 - RNA, 18 nt, Human
agaggcacgggacgcggg

SEQ ID NO: 765126 - RNA, 23 nt, Human
agaguagccaagugugcucuggg

SEQ ID NO: 765127 - RNA, 23 nt, Human
agaguauguucugccuacaagga

SEQ ID NO: 765128 - RNA, 18 nt, Human
agcacaaaccucgcagug

SEQ ID NO: 765129 - RNA, 23 nt, Human
agccagacgugguggugcgugcc

SEQ ID NO: 765130 - RNA, 23 nt, Human
agcuggucaguaccggugggccu

SEQ ID NO: 765131 - RNA, 19 nt, Human
aggaagacaucaucauaga

SEQ ID NO: 765132 - RNA, 22 nt, Human
aggaagucaggucaacucaaaa

SEQ ID NO: 765133 - RNA, 21 nt, Human
aggagauaacagugcauuaag

SEQ ID NO: 765134 - RNA, 22 nt, Human
aggcaggagaaucacuugaacc

SEQ ID NO: 765135 - RNA, 24 nt, Human
aggcaggagaaucacuugaaccug

SEQ ID NO: 765136 - RNA, 24 nt, Human
aggccucgcuggggugcagcgaca

SEQ ID NO: 765137 - RNA, 24 nt, Human
aggcugaggcaggagaaucacuug

SEQ ID NO: 765138 - RNA, 21 nt, Human
aggggcauaguauuuugguuu

SEQ ID NO: 765139 - RNA, 19 nt, Human
agguggagguuggagugag

SEQ ID NO: 765140 - RNA, 24 nt, Human
agguggagguuggagugagccaag

SEQ ID NO: 765141 - RNA, 18 nt, Human
agguucccucugucccac

SEQ ID NO: 765142 - RNA, 23 nt, Human
aguaaguauggccuuagguacaa

SEQ ID NO: 765143 - RNA, 19 nt, Human
agugcaguuguuacucucu

SEQ ID NO: 765144 - RNA, 25 nt, Human
auaaaaccuaaauuuuuaacaugcu

SEQ ID NO: 765145 - RNA, 18 nt, Human
aucaguaagguccuggcu

SEQ ID NO: 765146 - RNA, 24 nt, Human
aucgugccacugcacuccagcuug

SEQ ID NO: 765147 - RNA, 21 nt, Human
caagggacuccucggcggcca

SEQ ID NO: 765148 - RNA, 24 nt, Human
cacaccuauaaucccagcacuucg

SEQ ID NO: 765149 - RNA, 22 nt, Human
caccuauaaucccagcacuucg

SEQ ID NO: 765150 - RNA, 22 nt, Human
cacuccagcuugggugacagag

SEQ ID NO: 765151 - RNA, 19 nt, Human
cacugcacuccagcuuggg

SEQ ID NO: 765152 - RNA, 21 nt, Human
cacugcacuccagcuugggug

SEQ ID NO: 765153 - RNA, 22 nt, Human
cacugcacuccagcuuggguga

SEQ ID NO: 765154 - RNA, 23 nt, Human
cacugcacuccagcuugggugac

SEQ ID NO: 765155 - RNA, 24 nt, Human
cacugcacuccagcuugggugaca

SEQ ID NO: 765156 - RNA, 24 nt, Human
cacugcacuccagcuugggugaca

SEQ ID NO: 765157 - RNA, 18 nt, Human
cagaaacuccuuccaaug

SEQ ID NO: 765158 - RNA, 20 nt, Human
cagcacuucgggaggccgag

SEQ ID NO: 765159 - RNA, 28 nt, Human
cagcacuucgggaggccgagacaggcgg

SEQ ID NO: 765160 - RNA, 22 nt, Human
cagcaucauuuuagaggcauag

SEQ ID NO: 765161 - RNA, 20 nt, Human
cagccccaccugcggucccg

SEQ ID NO: 765162 - RNA, 23 nt, Human
cagcuaagaaagaacucagccac

SEQ ID NO: 765163 - RNA, 24 nt, Human
cagcuacucgggaggcugaggcag

SEQ ID NO: 765164 - RNA, 22 nt, Human
cagggaaggggugcuggggaaa

SEQ ID NO: 765165 - RNA, 20 nt, Human
caguugcuucaccaggaaug

SEQ ID NO: 765166 - RNA, 26 nt, Human
cauaacaguaucuaauaaauuucaaa

SEQ ID NO: 765167 - RNA, 24 nt, Human
caucccaggagggcuuacugucac

SEQ ID NO: 765168 - RNA, 20 nt, Human
ccaccugaguuugcgccuga

SEQ ID NO: 765169 - RNA, 18 nt, Human
ccacugcacuccagcuug

SEQ ID NO: 765170 - RNA, 20 nt, Human
ccacugcacuccagcuuggg

SEQ ID NO: 765171 - RNA, 20 nt, Human
ccacugcacuccagcuuggg

SEQ ID NO: 765172 - RNA, 20 nt, Human
ccacugcacuccagcuuggg

SEQ ID NO: 765173 - RNA, 21 nt, Human
ccacugcacuccagcuugggu

SEQ ID NO: 765174 - RNA, 21 nt, Human
ccacugcacuccagcuugggu

SEQ ID NO: 765175 - RNA, 23 nt, Human
ccacugcacuccagcuuggguga

SEQ ID NO: 765176 - RNA, 24 nt, Human
ccacugcacuccagcuugggugac

SEQ ID NO: 765177 - RNA, 22 nt, Human
cccccgaccccggccccagccc

SEQ ID NO: 765178 - RNA, 19 nt, Human
cccccgcgaccgccgcucc

SEQ ID NO: 765179 - RNA, 26 nt, Human
ccccggccccagccccaccugcgguc

SEQ ID NO: 765180 - RNA, 18 nt, Human
cccggccccagccccacc

SEQ ID NO: 765181 - RNA, 19 nt, Human
cccguagucccagcuacuc

SEQ ID NO: 765182 - RNA, 21 nt, Human
cccguagucccagcuacucgg

SEQ ID NO: 765183 - RNA, 21 nt, Human
cccucugucccaccgcuuguc

SEQ ID NO: 765184 - RNA, 21 nt, Human
cccucugucccaccgcuuguc

SEQ ID NO: 765185 - RNA, 18 nt, Human
ccgcccgccgcccgccgc

SEQ ID NO: 765186 - RNA, 20 nt, Human
ccgcccgccgcccgccgcuc

SEQ ID NO: 765187 - RNA, 21 nt, Human
ccgccgcccgccgcuccgcgg

SEQ ID NO: 765188 - RNA, 30 nt, Human
ccgccgcccgccgcuccgcgguccgccuuc

SEQ ID NO: 765189 - RNA, 20 nt, Human
ccgccgcuccgcgguccgcc

SEQ ID NO: 765190 - RNA, 20 nt, Human
ccgccgcuccgcgguccgcc

SEQ ID NO: 765191 - RNA, 21 nt, Human
ccgcgaccgccgcuccacuuc

SEQ ID NO: 765192 - RNA, 20 nt, Human
ccggugggccuggugagaug

SEQ ID NO: 765193 - RNA, 24 nt, Human
ccugaccaauagggugaaacccca

SEQ ID NO: 765194 - RNA, 21 nt, Human
cgcgccgcccgccgcccgccg

SEQ ID NO: 765195 - RNA, 20 nt, Human
cgcgcgcgcgccgcccgccg

SEQ ID NO: 765196 - RNA, 24 nt, Human
cgggaggcugaggcaggagaauca

SEQ ID NO: 765197 - RNA, 24 nt, Human
cucacaccuauaaucccagcacuu

SEQ ID NO: 765198 - RNA, 25 nt, Human
cucacaccuauaaucccagcacuuc

SEQ ID NO: 765199 - RNA, 24 nt, Human
cuccgucucaaaaaaaaaaaaggc

SEQ ID NO: 765200 - RNA, 23 nt, Human
cucucgcgcgcgcgcgcgcgccg

SEQ ID NO: 765201 - RNA, 19 nt, Human
cucucuucagcguuuuggu

SEQ ID NO: 765202 - RNA, 20 nt, Human
cuggagccugugcucugggc

SEQ ID NO: 765203 - RNA, 18 nt, Human
cuggcuauguccuggagg

SEQ ID NO: 765204 - RNA, 19 nt, Human
cuggcuauguccuggagga

SEQ ID NO: 765205 - RNA, 18 nt, Human
cugguucaggcuggaguc

SEQ ID NO: 765206 - RNA, 18 nt, Human
cugugcucugggcugggc

SEQ ID NO: 765207 - RNA, 20 nt, Human
cuuuguaugucacugcauga

SEQ ID NO: 765208 - RNA, 22 nt, Human
cuuuguucccaacugggugcgg

SEQ ID NO: 765209 - RNA, 18 nt, Human
gaaaaagauucuugauag

SEQ ID NO: 765210 - RNA, 18 nt, Human
gaacaguuauugucugug

SEQ ID NO: 765211 - RNA, 24 nt, Human
gacagagcaacacuccgucucaaa

SEQ ID NO: 765212 - RNA, 22 nt, Human
gaccacaaagguaaaguuugcc

SEQ ID NO: 765213 - RNA, 19 nt, Human
gagccugugcucugggcug

SEQ ID NO: 765214 - RNA, 23 nt, Human
gagguuggagugagccaagaucg

SEQ ID NO: 765215 - RNA, 24 nt, Human
gcacuccagcuugggugacagagc

SEQ ID NO: 765216 - RNA, 24 nt, Human
gcagaaaaugacugaaaaaagaga

SEQ ID NO: 765217 - RNA, 24 nt, Human
gcagacccagaugugaagaaacca

SEQ ID NO: 765218 - RNA, 21 nt, Human
gcaggagaaucacuugaaccu

SEQ ID NO: 765219 - RNA, 18 nt, Human
gcagggaaggggugcugg

SEQ ID NO: 765220 - RNA, 19 nt, Human
gcaucauaguuugcauuuu

SEQ ID NO: 765221 - RNA, 20 nt, Human
gccaagaucgugccacugca

SEQ ID NO: 765222 - RNA, 19 nt, Human
gccacugcacuccagcuug

SEQ ID NO: 765223 - RNA, 21 nt, Human
gccacugcacuccagcuuggg

SEQ ID NO: 765224 - RNA, 19 nt, Human
gcugcugccugcuguggag

SEQ ID NO: 765225 - RNA, 18 nt, Human
gcuggggugcagcggcuc

SEQ ID NO: 765226 - RNA, 18 nt, Human
gcuguggaggggcugugg

SEQ ID NO: 765227 - RNA, 21 nt, Human
ggacaagaaguaugcccuguc

SEQ ID NO: 765228 - RNA, 24 nt, Human
ggagguuggagugagccaagaucg

SEQ ID NO: 765229 - RNA, 23 nt, Human
ggaugaccugaggugaggaauuc

SEQ ID NO: 765230 - RNA, 21 nt, Human
ggcucacaccuauaaucccag

SEQ ID NO: 765231 - RNA, 18 nt, Human
gggaccacaaagguaaag

SEQ ID NO: 765232 - RNA, 23 nt, Human
gggagugaggggcuccuuaaagc

SEQ ID NO: 765233 - RNA, 22 nt, Human
gggcaccaggcacauggugagg

SEQ ID NO: 765234 - RNA, 20 nt, Human
ggggcauaguauuuugguuu

SEQ ID NO: 765235 - RNA, 24 nt, Human
gggugcgguggcucacaccuauaa

SEQ ID NO: 765236 - RNA, 24 nt, Human
gguggcucacaccuauaaucccag

SEQ ID NO: 765237 - RNA, 25 nt, Human
guaaaacagcaggagacuaucagaa

SEQ ID NO: 765238 - RNA, 30 nt, Human
guaaaguuugcccucaaaaagcuucaaagg

SEQ ID NO: 765239 - RNA, 19 nt, Human
guagacuuagcuacaugaa

SEQ ID NO: 765240 - RNA, 19 nt, Human
gucaccuuuuucuucagga

SEQ ID NO: 765241 - RNA, 20 nt, Human
uaaaaacccuaaaacaauga

SEQ ID NO: 765242 - RNA, 21 nt, Human
uaaaaauacaaaaauuagcca

SEQ ID NO: 765243 - RNA, 24 nt, Human
uaaaacagcaggagacuaucagaa

SEQ ID NO: 765244 - RNA, 18 nt, Human
uaacaacagcaaaauuau

SEQ ID NO: 765245 - RNA, 18 nt, Human
uaacaguaucuaauaaau

SEQ ID NO: 765246 - RNA, 21 nt, Human
uaagaugaugcugggaacuca

SEQ ID NO: 765247 - RNA, 25 nt, Human
uaaggacaagaaguaugcccugucc

SEQ ID NO: 765248 - RNA, 19 nt, Human
uaagguagacugacauaga

SEQ ID NO: 765249 - RNA, 26 nt, Human
uaagguagacugacauagaaaccccc

SEQ ID NO: 765250 - RNA, 18 nt, Human
uacacagacaaaucuuua

SEQ ID NO: 765251 - RNA, 21 nt, Human
uaccggugggccuggugagau

SEQ ID NO: 765252 - RNA, 24 nt, Human
uacuucaucacaaggauuguuuca

SEQ ID NO: 765253 - RNA, 23 nt, Human
uagaauucuuccuucauuguaua

SEQ ID NO: 765254 - RNA, 19 nt, Human
uagaggcacgggacgcggg

SEQ ID NO: 765255 - RNA, 19 nt, Human
uagcucaagaaaacauuua

SEQ ID NO: 765256 - RNA, 18 nt, Human
uagguaaaugucaucccu

SEQ ID NO: 765257 - RNA, 21 nt, Human
uaguaucagcccugcugccaa

SEQ ID NO: 765258 - RNA, 21 nt, Human
uauaauacauacauaucaccc

SEQ ID NO: 765259 - RNA, 19 nt, Human
uauacaaggaaaacagggu

SEQ ID NO: 765260 - RNA, 23 nt, Human
uauuaaggggcauaguauuuugg

SEQ ID NO: 765261 - RNA, 24 nt, Human
uauuuacagaacagauuuggggau

SEQ ID NO: 765262 - RNA, 19 nt, Human
ucaaagaaaugcugaaggu

SEQ ID NO: 765263 - RNA, 19 nt, Human
ucaaaggucuccuuagagg

SEQ ID NO: 765264 - RNA, 23 nt, Human
ucacaaacacacaccuccccaga

SEQ ID NO: 765265 - RNA, 19 nt, Human
ucacuugaaccuggaaggu

SEQ ID NO: 765266 - RNA, 22 nt, Human
ucaucccuuuccauucuuaaga

SEQ ID NO: 765267 - RNA, 18 nt, Human
uccagcuugggugacaga

SEQ ID NO: 765268 - RNA, 22 nt, Human
uccauagaauucuuccuucauu

SEQ ID NO: 765269 - RNA, 19 nt, Human
ucccacgguuugagggccc

SEQ ID NO: 765270 - RNA, 19 nt, Human
ucccaggagggcuuacugu

SEQ ID NO: 765271 - RNA, 18 nt, Human
ucccuccuccuccucccc

SEQ ID NO: 765272 - RNA, 24 nt, Human
ucccucugucccaccgcuugucuu

SEQ ID NO: 765273 - RNA, 23 nt, Human
ucccugaaacuagauaaauacga

SEQ ID NO: 765274 - RNA, 25 nt, Human
ucgggaggcugaggcaggagaauca

SEQ ID NO: 765275 - RNA, 23 nt, Human
ucgugccacugcacuccagcuug

SEQ ID NO: 765276 - RNA, 21 nt, Human
ucuccuuagaggucccacggu

SEQ ID NO: 765277 - RNA, 23 nt, Human
ucucuacuaaaaauacaaaaauu

SEQ ID NO: 765278 - RNA, 19 nt, Human
ucugggcugggcuggccug

SEQ ID NO: 765279 - RNA, 24 nt, Human
ucuuauuuuaaaaaauggaagggg

SEQ ID NO: 765280 - RNA, 18 nt, Human
ucuucagcguuuuggugu

SEQ ID NO: 765281 - RNA, 19 nt, Human
ugaaaccccaucucuacua

SEQ ID NO: 765282 - RNA, 21 nt, Human
ugagaugggugguacugugag

SEQ ID NO: 765283 - RNA, 22 nt, Human
ugagccaagaucgugccacugc

SEQ ID NO: 765284 - RNA, 20 nt, Human
ugaggcaggagaaucacuug

SEQ ID NO: 765285 - RNA, 24 nt, Human
ugaggcaggagaaucacuugaacc

SEQ ID NO: 765286 - RNA, 25 nt, Human
ugaggcaggagaaucacuugaaccu

SEQ ID NO: 765287 - RNA, 18 nt, Human
ugaugagugucacuaugc

SEQ ID NO: 765288 - RNA, 24 nt, Human
ugcaacccugcuccggugcccccg

SEQ ID NO: 765289 - RNA, 21 nt, Human
ugcagggaaggggugcugggg

SEQ ID NO: 765290 - RNA, 24 nt, Human
ugccacugcacuccagcuugggug

SEQ ID NO: 765291 - RNA, 24 nt, Human
ugcccguagucccagcuacucggg

SEQ ID NO: 765292 - RNA, 18 nt, Human
ugcgugcagaaaaugacu

SEQ ID NO: 765293 - RNA, 18 nt, Human
ugcuccggugcccccgac

SEQ ID NO: 765294 - RNA, 19 nt, Human
ugcugggaacucaguucca

SEQ ID NO: 765295 - RNA, 21 nt, Human
ugcugguucugcugcuguugc

SEQ ID NO: 765296 - RNA, 21 nt, Human
ugcuguucugcuguggugggg

SEQ ID NO: 765297 - RNA, 19 nt, Human
uggaacacaugcagggaag

SEQ ID NO: 765298 - RNA, 24 nt, Human
uggaagguggagguuggagugagc

SEQ ID NO: 765299 - RNA, 24 nt, Human
uggagauuucuggcuauguccugg

SEQ ID NO: 765300 - RNA, 22 nt, Human
uggagcacgaaaagcuacaguc

SEQ ID NO: 765301 - RNA, 19 nt, Human
uggcacagacaucccagga

SEQ ID NO: 765302 - RNA, 24 nt, Human
uggcucacaccuauaaucccagca

SEQ ID NO: 765303 - RNA, 20 nt, Human
ugggugacagagcaacacuc

SEQ ID NO: 765304 - RNA, 18 nt, Human
uggugcgugcccguaguc

SEQ ID NO: 765305 - RNA, 24 nt, Human
uggugcgugcccguagucccagcu

SEQ ID NO: 765306 - RNA, 24 nt, Human
ugguggugcgugcccguaguccca

SEQ ID NO: 765307 - RNA, 18 nt, Human
uguauaguuucugcugca

SEQ ID NO: 765308 - RNA, 18 nt, Human
ugucacagaucacaagcu

SEQ ID NO: 765309 - RNA, 20 nt, Human
uguggaggggcugugggcug

SEQ ID NO: 765310 - RNA, 18 nt, Human
uguugcuaaaucaguuca

SEQ ID NO: 765311 - RNA, 24 nt, Human
uuaaaaauagucacucuauaucua

SEQ ID NO: 765312 - RNA, 21 nt, Human
uuaaagcagcuaagaaagaac

SEQ ID NO: 765313 - RNA, 20 nt, Human
uuagaaguaaacaaaaagac

SEQ ID NO: 765314 - RNA, 20 nt, Human
uuagccagacgugguggugc

SEQ ID NO: 765315 - RNA, 18 nt, Human
uuaggcacaauuauuaag

SEQ ID NO: 765316 - RNA, 24 nt, Human
uuagugagcauuauuaugcugaga

SEQ ID NO: 765317 - RNA, 21 nt, Human
uucacaaauaggaauuauagg

SEQ ID NO: 765318 - RNA, 22 nt, Human
uucauuguauaguuucugcugc

SEQ ID NO: 765319 - RNA, 18 nt, Human
uucuuguuuggaggcacc

SEQ ID NO: 765320 - RNA, 21 nt, Human
uucuuguuuggaggcaccugg

SEQ ID NO: 765321 - RNA, 18 nt, Human
uugcuggagccugugcuc

SEQ ID NO: 765322 - RNA, 22 nt, Human
uuggagugagccaagaucgugc

SEQ ID NO: 765323 - RNA, 24 nt, Human
uuggugugggccaucgagacugua

SEQ ID NO: 765324 - RNA, 18 nt, Human
uuguuaaaaaggacaccu

SEQ ID NO: 765325 - RNA, 22 nt, Human
uuucacaaacacacaccucccc

SEQ ID NO: 765326 - RNA, 18 nt, Human
uuuggauuuguaauuucc

SEQ ID NO: 765327 - RNA, 22 nt, Human
aaagcacccugucccaacccua

SEQ ID NO: 765328 - RNA, 19 nt, Human
aaagccuccggcaaaggca

SEQ ID NO: 765329 - RNA, 21 nt, Human
aacccuaucuuccauacugac

SEQ ID NO: 765330 - RNA, 19 nt, Human
aagaaggggacauuuccaa

SEQ ID NO: 765331 - RNA, 21 nt, Human
aagcaaccccaaacugagggc

SEQ ID NO: 765332 - RNA, 23 nt, Human
aagcaaccccaaacugagggcaa

SEQ ID NO: 765333 - RNA, 21 nt, Human
aagcuucccccuggaugcucc

SEQ ID NO: 765334 - RNA, 19 nt, Human
aaugagagaacagccaggc

SEQ ID NO: 765335 - RNA, 20 nt, Human
acagucugaacugggaugga

SEQ ID NO: 765336 - RNA, 27 nt, Human
accccagagcucuccucugcugacccc

SEQ ID NO: 765337 - RNA, 21 nt, Human
accccgcuugccagacuccag

SEQ ID NO: 765338 - RNA, 19 nt, Human
accuuaacucccuccagcc

SEQ ID NO: 765339 - RNA, 18 nt, Human
accuugagcuggccuggg

SEQ ID NO: 765340 - RNA, 18 nt, Human
acucguucacccucugcc

SEQ ID NO: 765341 - RNA, 24 nt, Human
agaacagccaggcgcuggcuuggg

SEQ ID NO: 765342 - RNA, 20 nt, Human
agacagcagagccaggaggg

SEQ ID NO: 765343 - RNA, 22 nt, Human
agacccuaacuuaacacccugc

SEQ ID NO: 765344 - RNA, 22 nt, Human
agagcaagggcuagaacucaag

SEQ ID NO: 765345 - RNA, 22 nt, Human
agaggagagguuggggagaggg

SEQ ID NO: 765346 - RNA, 20 nt, Human
agaggccugauggugucccu

SEQ ID NO: 765347 - RNA, 26 nt, Human
agagggcagugacaaugagagaacag

SEQ ID NO: 765348 - RNA, 19 nt, Human
agaugggaaagcugagggu

SEQ ID NO: 765349 - RNA, 26 nt, Human
agcaccuucucaucuucacagcagca

SEQ ID NO: 765350 - RNA, 19 nt, Human
agccaggaggggagggacg

SEQ ID NO: 765351 - RNA, 19 nt, Human
agccauauuccucccugag

SEQ ID NO: 765352 - RNA, 27 nt, Human
agcccaacuagcccaccaccaccaccc

SEQ ID NO: 765353 - RNA, 18 nt, Human
agcuggccugggagaccu

SEQ ID NO: 765354 - RNA, 23 nt, Human
aggaccuucugaacacaccccgc

SEQ ID NO: 765355 - RNA, 22 nt, Human
aggagcauuccugaggcccaag

SEQ ID NO: 765356 - RNA, 21 nt, Human
aggcaagaggcaggacacagg

SEQ ID NO: 765357 - RNA, 22 nt, Human
aggcagccaauugcuuggcuga

SEQ ID NO: 765358 - RNA, 25 nt, Human
aggcucccccaggucacugggcacc

SEQ ID NO: 765359 - RNA, 24 nt, Human
agggaaccagugagggccugcagc

SEQ ID NO: 765360 - RNA, 21 nt, Human
agggguggucagcugggcugc

SEQ ID NO: 765361 - RNA, 22 nt, Human
agguagcaaguccaggggucca

SEQ ID NO: 765362 - RNA, 18 nt, Human
agugcacuggggaaggga

SEQ ID NO: 765363 - RNA, 20 nt, Human
caacaugaaggagcuggaug

SEQ ID NO: 765364 - RNA, 21 nt, Human
caaccccagagcucuccucug

SEQ ID NO: 765365 - RNA, 25 nt, Human
caacucuggaaacuacagaacucag

SEQ ID NO: 765366 - RNA, 20 nt, Human
caaggugaacucguucaccc

SEQ ID NO: 765367 - RNA, 20 nt, Human
caaguccugggccuaaggga

SEQ ID NO: 765368 - RNA, 22 nt, Human
cacaugguagcucuguaucucu

SEQ ID NO: 765369 - RNA, 23 nt, Human
caccccgguaagucccaaaccca

SEQ ID NO: 765370 - RNA, 25 nt, Human
caccccgguaagucccaaacccaaa

SEQ ID NO: 765371 - RNA, 20 nt, Human
cacccugucccaacccuauc

SEQ ID NO: 765372 - RNA, 22 nt, Human
cagaaauacaggcagacccuaa

SEQ ID NO: 765373 - RNA, 22 nt, Human
cagaacucagccauauuccucc

SEQ ID NO: 765374 - RNA, 24 nt, Human
cagaaggaacagaugagcuggagg

SEQ ID NO: 765375 - RNA, 19 nt, Human
cagagccaggaggggaggg

SEQ ID NO: 765376 - RNA, 18 nt, Human
cagagcucuccucugcug

SEQ ID NO: 765377 - RNA, 22 nt, Human
cagcagcagguaggggcuuugg

SEQ ID NO: 765378 - RNA, 22 nt, Human
cagcagguaggggcuuugggac

SEQ ID NO: 765379 - RNA, 18 nt, Human
cauccccaaccccagagc

SEQ ID NO: 765380 - RNA, 25 nt, Human
caucggccccuaaauucaagcccaa

SEQ ID NO: 765381 - RNA, 20 nt, Human
caucugagccaauccugucc

SEQ ID NO: 765382 - RNA, 19 nt, Human
ccaccaccaccacccaccc

SEQ ID NO: 765383 - RNA, 19 nt, Human
ccaccaccaccacccaccc

SEQ ID NO: 765384 - RNA, 22 nt, Human
ccaccaccaccacccacccccg

SEQ ID NO: 765385 - RNA, 23 nt, Human
ccaccaccaccacccacccccga

SEQ ID NO: 765386 - RNA, 23 nt, Human
ccaccaccacccacccccgacuu

SEQ ID NO: 765387 - RNA, 19 nt, Human
ccaccacccacccccgacu

SEQ ID NO: 765388 - RNA, 19 nt, Human
ccagacagcagagccagga

SEQ ID NO: 765389 - RNA, 21 nt, Human
ccagagcucuccucugcugac

SEQ ID NO: 765390 - RNA, 21 nt, Human
cccaaacccaaacugucccuc

SEQ ID NO: 765391 - RNA, 21 nt, Human
cccaaagaggccagacccuuu

SEQ ID NO: 765392 - RNA, 18 nt, Human
cccaacuagcccaccacc

SEQ ID NO: 765393 - RNA, 18 nt, Human
cccaaggagcccucuaag

SEQ ID NO: 765394 - RNA, 25 nt, Human
cccaccaccaccacccacccccgac

SEQ ID NO: 765395 - RNA, 19 nt, Human
ccccagagcucuccucugc

SEQ ID NO: 765396 - RNA, 24 nt, Human
ccccaggucacugggcaccaggca

SEQ ID NO: 765397 - RNA, 19 nt, Human
ccccaggucuaaugagccu

SEQ ID NO: 765398 - RNA, 19 nt, Human
cccccagcugauccugaag

SEQ ID NO: 765399 - RNA, 22 nt, Human
ccccgcuugccagacuccagaa

SEQ ID NO: 765400 - RNA, 23 nt, Human
cccggggagaauuuuccugccuc

SEQ ID NO: 765401 - RNA, 20 nt, Human
ccggcagcgagguggaacuc

SEQ ID NO: 765402 - RNA, 18 nt, Human
ccgggguggggucggggg

SEQ ID NO: 765403 - RNA, 20 nt, Human
ccggugcauggccugggagg

SEQ ID NO: 765404 - RNA, 21 nt, Human
ccuaacuuaacacccugcuca

SEQ ID NO: 765405 - RNA, 26 nt, Human
ccuaggaccuucugaacacacccuuu

SEQ ID NO: 765406 - RNA, 22 nt, Human
ccuccugcuaguccucugggaa

SEQ ID NO: 765407 - RNA, 19 nt, Human
ccugaggcccaaggagccc

SEQ ID NO: 765408 - RNA, 22 nt, Human
ccugcuagaaucuccucuaugc

SEQ ID NO: 765409 - RNA, 24 nt, Human
ccuugagcuggccugggagaccuc

SEQ ID NO: 765410 - RNA, 23 nt, Human
cgagguggaacucaggcugagcc

SEQ ID NO: 765411 - RNA, 24 nt, Human
cgcgccuuggcuucuuucagaucc

SEQ ID NO: 765412 - RNA, 20 nt, Human
cggccccuaaauucaagccc

SEQ ID NO: 765413 - RNA, 23 nt, Human
cgggguggggucggggguggggc

SEQ ID NO: 765414 - RNA, 26 nt, Human
cuaaauucaagcccaacuagcccacc

SEQ ID NO: 765415 - RNA, 23 nt, Human
cuaaugagccuucuucuggcucu

SEQ ID NO: 765416 - RNA, 20 nt, Human
cuacaagggacccagcagca

SEQ ID NO: 765417 - RNA, 18 nt, Human
cuaugcauccuggccaug

SEQ ID NO: 765418 - RNA, 21 nt, Human
cuccagccucacuuggggguu

SEQ ID NO: 765419 - RNA, 22 nt, Human
cucuuugucucucucuuuccca

SEQ ID NO: 765420 - RNA, 19 nt, Human
cugaaccucuagaaggcuc

SEQ ID NO: 765421 - RNA, 21 nt, Human
cugaagccaagcuucccccug

SEQ ID NO: 765422 - RNA, 23 nt, Human
cugcauucuacaagaggcaagag

SEQ ID NO: 765423 - RNA, 21 nt, Human
cugcccaaagaggccagaccc

SEQ ID NO: 765424 - RNA, 18 nt, Human
cugcuccugccugggacu

SEQ ID NO: 765425 - RNA, 19 nt, Human
cuggaaacuacagaacuca

SEQ ID NO: 765426 - RNA, 24 nt, Human
cuggcucugcccucccgggguggg

SEQ ID NO: 765427 - RNA, 22 nt, Human
cuguccccucuggccguggcuc

SEQ ID NO: 765428 - RNA, 23 nt, Human
cuguccccucuggccguggcucu

SEQ ID NO: 765429 - RNA, 22 nt, Human
cugucggggcucuggggacugg

SEQ ID NO: 765430 - RNA, 19 nt, Human
cuucuggcucugcccuccc

SEQ ID NO: 765431 - RNA, 20 nt, Human
cuuuagcaacauccugguau

SEQ ID NO: 765432 - RNA, 20 nt, Human
gaaaguagcaugacagggac

SEQ ID NO: 765433 - RNA, 21 nt, Human
gaacacaccccgcuugccaga

SEQ ID NO: 765434 - RNA, 23 nt, Human
gaaccagugagggccugcagcca

SEQ ID NO: 765435 - RNA, 23 nt, Human
gaccccucugucggggcucuggg

SEQ ID NO: 765436 - RNA, 22 nt, Human
gaccuuaacucccuccagccuc

SEQ ID NO: 765437 - RNA, 18 nt, Human
gagagagaaagagagagu

SEQ ID NO: 765438 - RNA, 20 nt, Human
gagagagagagagaaagaga

SEQ ID NO: 765439 - RNA, 23 nt, Human
gagcacucugagggacuccuggc

SEQ ID NO: 765440 - RNA, 19 nt, Human
gagcuggaugugacuuuuc

SEQ ID NO: 765441 - RNA, 21 nt, Human
gaggccagacccuuugggucc

SEQ ID NO: 765442 - RNA, 19 nt, Human
gaggcccaaguccugggcc

SEQ ID NO: 765443 - RNA, 22 nt, Human
gagugugugugcaucggugugu

SEQ ID NO: 765444 - RNA, 24 nt, Human
gauauggacacugggacugagguc

SEQ ID NO: 765445 - RNA, 20 nt, Human
gauggugucccuucccuggg

SEQ ID NO: 765446 - RNA, 23 nt, Human
gcagcaacaugaaggagcuggau

SEQ ID NO: 765447 - RNA, 19 nt, Human
gcagcagguaggggcuuug

SEQ ID NO: 765448 - RNA, 20 nt, Human
gccacgggaauuggagcugg

SEQ ID NO: 765449 - RNA, 28 nt, Human
gcccucaggggucaucugagccaauccu

SEQ ID NO: 765450 - RNA, 24 nt, Human
gcccucccgggguggggucggggg

SEQ ID NO: 765451 - RNA, 19 nt, Human
gcgccuguugaagagcugg

SEQ ID NO: 765452 - RNA, 20 nt, Human
gcugccuccugcuaguccuc

SEQ ID NO: 765453 - RNA, 18 nt, Human
ggaaaugcagguagaaau

SEQ ID NO: 765454 - RNA, 18 nt, Human
ggaggcccaaguccuggg

SEQ ID NO: 765455 - RNA, 24 nt, Human
ggcagugacaaugagagaacagcc

SEQ ID NO: 765456 - RNA, 21 nt, Human
ggccccuaaauucaagcccaa

SEQ ID NO: 765457 - RNA, 22 nt, Human
ggcugggcuucuguccccucug

SEQ ID NO: 765458 - RNA, 21 nt, Human
gggaauuggagcugggagggg

SEQ ID NO: 765459 - RNA, 21 nt, Human
gggacuggggugccguggagg

SEQ ID NO: 765460 - RNA, 24 nt, Human
gggccugcagccaggcucccccag

SEQ ID NO: 765461 - RNA, 19 nt, Human
ggggaagggauggggcagg

SEQ ID NO: 765462 - RNA, 22 nt, Human
ggggacuggggugccguggaga

SEQ ID NO: 765463 - RNA, 22 nt, Human
ggggagagggcagugacaauga

SEQ ID NO: 765464 - RNA, 24 nt, Human
guauggaacccugaagguagcaag

SEQ ID NO: 765465 - RNA, 24 nt, Human
guccagggguccauauacacacug

SEQ ID NO: 765466 - RNA, 23 nt, Human
gugugugugcaucggugugugua

SEQ ID NO: 765467 - RNA, 21 nt, Human
gugugugugugugugugugug

SEQ ID NO: 765468 - RNA, 27 nt, Human
uaacuagugugugugugugugugugug

SEQ ID NO: 765469 - RNA, 18 nt, Human
uaagagcaccuucucauc

SEQ ID NO: 765470 - RNA, 19 nt, Human
uaagauguccuggacaguc

SEQ ID NO: 765471 - RNA, 21 nt, Human
uaaggucacucuuucauucca

SEQ ID NO: 765472 - RNA, 20 nt, Human
uacccccagcugauccugaa

SEQ ID NO: 765473 - RNA, 18 nt, Human
uagaaggcucuaccagcc

SEQ ID NO: 765474 - RNA, 23 nt, Human
uaucauggaaugcauuucaagag

SEQ ID NO: 765475 - RNA, 19 nt, Human
uccaaggggaccagaaaua

SEQ ID NO: 765476 - RNA, 18 nt, Human
uccccaaccccagagcuc

SEQ ID NO: 765477 - RNA, 23 nt, Human
ucccccaggucacugggcaccag

SEQ ID NO: 765478 - RNA, 20 nt, Human
ucccgggguggggucggggg

SEQ ID NO: 765479 - RNA, 26 nt, Human
ucccuccagccucacuuggggguucc

SEQ ID NO: 765480 - RNA, 22 nt, Human
ucccugaguccccccuggggac

SEQ ID NO: 765481 - RNA, 22 nt, Human
uccucagccaauuccauacccc

SEQ ID NO: 765482 - RNA, 21 nt, Human
uccucuaugcuacugccucag

SEQ ID NO: 765483 - RNA, 19 nt, Human
uccugaggcccaaggagcc

SEQ ID NO: 765484 - RNA, 22 nt, Human
ucuacaagaggcaagaggcagg

SEQ ID NO: 765485 - RNA, 25 nt, Human
ucuaugcuacugccucagccagagg

SEQ ID NO: 765486 - RNA, 27 nt, Human
ucucaaagccuccggcaaaggcagcca

SEQ ID NO: 765487 - RNA, 21 nt, Human
ucuccgugaggcuagugcucc

SEQ ID NO: 765488 - RNA, 24 nt, Human
ucucuggggcugcccaaagaggcc

SEQ ID NO: 765489 - RNA, 24 nt, Human
ucugcuagguccucccugaagcca

SEQ ID NO: 765490 - RNA, 25 nt, Human
ucuggcucugcccucccgggguggg

SEQ ID NO: 765491 - RNA, 19 nt, Human
ucuguaucucuucucuccc

SEQ ID NO: 765492 - RNA, 21 nt, Human
ucuuauggcugcagauaagau

SEQ ID NO: 765493 - RNA, 18 nt, Human
ugaaucacagccaccaag

SEQ ID NO: 765494 - RNA, 20 nt, Human
ugacgaagccaggaaaaucc

SEQ ID NO: 765495 - RNA, 18 nt, Human
ugagcccagaaccugcca

SEQ ID NO: 765496 - RNA, 23 nt, Human
ugaggcccaaggagcccucuaag

SEQ ID NO: 765497 - RNA, 19 nt, Human
ugagggcaaucagguaaag

SEQ ID NO: 765498 - RNA, 19 nt, Human
ugagggccugcagccaggc

SEQ ID NO: 765499 - RNA, 22 nt, Human
ugauaaaaauagagcuugucug

SEQ ID NO: 765500 - RNA, 18 nt, Human
ugcccaaagaggccagac

SEQ ID NO: 765501 - RNA, 21 nt, Human
ugccccgccucauccaaggca

SEQ ID NO: 765502 - RNA, 19 nt, Human
ugccucuucccuccagagg

SEQ ID NO: 765503 - RNA, 21 nt, Human
ugcgacacaggccuaggaccu

SEQ ID NO: 765504 - RNA, 19 nt, Human
uggaacucaggcugagccc

SEQ ID NO: 765505 - RNA, 21 nt, Human
uggaacucaggcugagccccg

SEQ ID NO: 765506 - RNA, 19 nt, Human
uggaaugcauuucaagacu

SEQ ID NO: 765507 - RNA, 22 nt, Human
uggaggcccaaguccugggccu

SEQ ID NO: 765508 - RNA, 23 nt, Human
uggccugggaggcuugaagggag

SEQ ID NO: 765509 - RNA, 24 nt, Human
uggcucugcccucccggggugggg

SEQ ID NO: 765510 - RNA, 23 nt, Human
ugggaagggauggaaaacagcug

SEQ ID NO: 765511 - RNA, 19 nt, Human
ugggacuuggugccaggga

SEQ ID NO: 765512 - RNA, 20 nt, Human
ugggagggguggucagcugg

SEQ ID NO: 765513 - RNA, 21 nt, Human
ugggagggguggucagcugga

SEQ ID NO: 765514 - RNA, 22 nt, Human
ugggagggguggucagcugggc

SEQ ID NO: 765515 - RNA, 23 nt, Human
ugggagggguggucagcugggcc

SEQ ID NO: 765516 - RNA, 19 nt, Human
uggggacuggggugccgug

SEQ ID NO: 765517 - RNA, 20 nt, Human
uggggucggggguggggcuu

SEQ ID NO: 765518 - RNA, 22 nt, Human
uggggugccguggagggccugg

SEQ ID NO: 765519 - RNA, 20 nt, Human
ugugugcaucggugugugua

SEQ ID NO: 765520 - RNA, 20 nt, Human
ugugugugcaucggugugug

SEQ ID NO: 765521 - RNA, 21 nt, Human
ugugugugcaucggugugugu

SEQ ID NO: 765522 - RNA, 18 nt, Human
ugugugugugugugugug

SEQ ID NO: 765523 - RNA, 18 nt, Human
ugugugugugugugugug

SEQ ID NO: 765524 - RNA, 18 nt, Human
ugugugugugugugugug

SEQ ID NO: 765525 - RNA, 18 nt, Human
ugugugugugugugugug

SEQ ID NO: 765526 - RNA, 18 nt, Human
ugugugugugugugugug

SEQ ID NO: 765527 - RNA, 18 nt, Human
ugugugugugugugugug

SEQ ID NO: 765528 - RNA, 18 nt, Human
ugugugugugugugugug

SEQ ID NO: 765529 - RNA, 18 nt, Human
ugugugugugugugugug

SEQ ID NO: 765530 - RNA, 18 nt, Human
ugugugugugugugugug

SEQ ID NO: 765531 - RNA, 18 nt, Human
ugugugugugugugugug

SEQ ID NO: 765532 - RNA, 18 nt, Human
ugugugugugugugugug

SEQ ID NO: 765533 - RNA, 18 nt, Human
ugugugugugugugugug

SEQ ID NO: 765534 - RNA, 18 nt, Human
ugugugugugugugugug

SEQ ID NO: 765535 - RNA, 18 nt, Human
ugugugugugugugugug

SEQ ID NO: 765536 - RNA, 18 nt, Human
ugugugugugugugugug

SEQ ID NO: 765537 - RNA, 21 nt, Human
ugugugugugugugugugugu

SEQ ID NO: 765538 - RNA, 21 nt, Human
ugugugugugugugugugugu

SEQ ID NO: 765539 - RNA, 21 nt, Human
ugugugugugugugugugugu

SEQ ID NO: 765540 - RNA, 21 nt, Human
ugugugugugugugugugugu

SEQ ID NO: 765541 - RNA, 21 nt, Human
ugugugugugugugugugugu

SEQ ID NO: 765542 - RNA, 21 nt, Human
ugugugugugugugugugugu

SEQ ID NO: 765543 - RNA, 21 nt, Human
ugugugugugugugugugugu

SEQ ID NO: 765544 - RNA, 21 nt, Human
ugugugugugugugugugugu

SEQ ID NO: 765545 - RNA, 21 nt, Human
ugugugugugugugugugugu

SEQ ID NO: 765546 - RNA, 21 nt, Human
ugugugugugugugugugugu

SEQ ID NO: 765547 - RNA, 21 nt, Human
ugugugugugugugugugugu

SEQ ID NO: 765548 - RNA, 21 nt, Human
ugugugugugugugugugugu

SEQ ID NO: 765549 - RNA, 21 nt, Human
ugugugugugugugugugugu

SEQ ID NO: 765550 - RNA, 21 nt, Human
ugugugugugugugugugugu

SEQ ID NO: 765551 - RNA, 21 nt, Human
ugugugugugugugugugugu

SEQ ID NO: 765552 - RNA, 21 nt, Human
ugugugugugugugugugugu

SEQ ID NO: 765553 - RNA, 21 nt, Human
ugugugugugugugugugugu

SEQ ID NO: 765554 - RNA, 21 nt, Human
ugugugugugugugugugugu

SEQ ID NO: 765555 - RNA, 21 nt, Human
ugugugugugugugugugugu

SEQ ID NO: 765556 - RNA, 21 nt, Human
ugugugugugugugugugugu

SEQ ID NO: 765557 - RNA, 21 nt, Human
ugugugugugugugugugugu

SEQ ID NO: 765558 - RNA, 21 nt, Human
ugugugugugugugugugugu

SEQ ID NO: 765559 - RNA, 21 nt, Human
ugugugugugugugugugugu

SEQ ID NO: 765560 - RNA, 21 nt, Human
ugugugugugugugugugugu

SEQ ID NO: 765561 - RNA, 21 nt, Human
ugugugugugugugugugugu

SEQ ID NO: 765562 - RNA, 21 nt, Human
ugugugugugugugugugugu

SEQ ID NO: 765563 - RNA, 21 nt, Human
ugugugugugugugugugugu

SEQ ID NO: 765564 - RNA, 21 nt, Human
ugugugugugugugugugugu

SEQ ID NO: 765565 - RNA, 22 nt, Human
ugugugugugugugugugugug

SEQ ID NO: 765566 - RNA, 22 nt, Human
ugugugugugugugugugugug

SEQ ID NO: 765567 - RNA, 22 nt, Human
ugugugugugugugugugugug

SEQ ID NO: 765568 - RNA, 22 nt, Human
ugugugugugugugugugugug

SEQ ID NO: 765569 - RNA, 22 nt, Human
ugugugugugugugugugugug

SEQ ID NO: 765570 - RNA, 22 nt, Human
ugugugugugugugugugugug

SEQ ID NO: 765571 - RNA, 22 nt, Human
ugugugugugugugugugugug

SEQ ID NO: 765572 - RNA, 22 nt, Human
ugugugugugugugugugugug

SEQ ID NO: 765573 - RNA, 22 nt, Human
ugugugugugugugugugugug

SEQ ID NO: 765574 - RNA, 22 nt, Human
ugugugugugugugugugugug

SEQ ID NO: 765575 - RNA, 22 nt, Human
ugugugugugugugugugugug

SEQ ID NO: 765576 - RNA, 22 nt, Human
ugugugugugugugugugugug

SEQ ID NO: 765577 - RNA, 22 nt, Human
ugugugugugugugugugugug

SEQ ID NO: 765578 - RNA, 26 nt, Human
uucaccuacauacguuugauccucag

SEQ ID NO: 765579 - RNA, 18 nt, Human
uucccugggaggggcccu

SEQ ID NO: 765580 - RNA, 22 nt, Human
uuccugaggcccaaggagcccu

SEQ ID NO: 765581 - RNA, 20 nt, Human
uuuccugccucuucccucca

SEQ ID NO: 765582 - RNA, 21 nt, Human
aagagcugucacaacuucucc

SEQ ID NO: 765583 - RNA, 19 nt, Human
aagcagaggugaggacagg

SEQ ID NO: 765584 - RNA, 22 nt, Human
aagcaguggcuugaugggcauu

SEQ ID NO: 765585 - RNA, 18 nt, Human
aaggagcugggacuauag

SEQ ID NO: 765586 - RNA, 24 nt, Human
aaggagcugggacuauaggcaugu

SEQ ID NO: 765587 - RNA, 21 nt, Human
aaucaccuaagagcaaacacc

SEQ ID NO: 765588 - RNA, 22 nt, Human
acagcugggacagggagggagc

SEQ ID NO: 765589 - RNA, 22 nt, Human
acaugcaaaggugcagcaugga

SEQ ID NO: 765590 - RNA, 22 nt, Human
acccagcagccguaccggggag

SEQ ID NO: 765591 - RNA, 21 nt, Human
acccugcagaggaccccacug

SEQ ID NO: 765592 - RNA, 23 nt, Human
acccugcagaggaccccacuguc

SEQ ID NO: 765593 - RNA, 22 nt, Human
accgaggggcugacucaggauu

SEQ ID NO: 765594 - RNA, 25 nt, Human
acuauguugcccaggcuggccuuga

SEQ ID NO: 765595 - RNA, 23 nt, Human
acugugagagggagcgagcuucg

SEQ ID NO: 765596 - RNA, 27 nt, Human
agaaacagugagaacgcacguggacaa

SEQ ID NO: 765597 - RNA, 21 nt, Human
agaaaggacagguccacgcaa

SEQ ID NO: 765598 - RNA, 21 nt, Human
agaaaugucagggcaguccuc

SEQ ID NO: 765599 - RNA, 25 nt, Human
agaggccagcaccgaggggcugacu

SEQ ID NO: 765600 - RNA, 18 nt, Human
agaggugaggacagggca

SEQ ID NO: 765601 - RNA, 21 nt, Human
agauagcuggaauaccagcug

SEQ ID NO: 765602 - RNA, 26 nt, Human
agaucucggguguucugggccccuuc

SEQ ID NO: 765603 - RNA, 21 nt, Human
agcagagucuaggaauuucca

SEQ ID NO: 765604 - RNA, 19 nt, Human
aggcccgggagagaaacga

SEQ ID NO: 765605 - RNA, 20 nt, Human
aggcggugccgagcgugggg

SEQ ID NO: 765606 - RNA, 20 nt, Human
agggcaucacuaggcucaga

SEQ ID NO: 765607 - RNA, 24 nt, Human
agggcucccacaccuccgggggcu

SEQ ID NO: 765608 - RNA, 22 nt, Human
aggggcugacucaggaugggga

SEQ ID NO: 765609 - RNA, 24 nt, Human
agggucucugucacccaggcugga

SEQ ID NO: 765610 - RNA, 20 nt, Human
agugaaguggcgcaaucucg

SEQ ID NO: 765611 - RNA, 24 nt, Human
agugaaguggcgcaaucucggcuc

SEQ ID NO: 765612 - RNA, 23 nt, Human
auacaaaacccaaaucaugacca

SEQ ID NO: 765613 - RNA, 22 nt, Human
auagcuacagaugguaaagaaa

SEQ ID NO: 765614 - RNA, 19 nt, Human
aucaccuaagagcaaacac

SEQ ID NO: 765615 - RNA, 22 nt, Human
augccagacagccucacccaca

SEQ ID NO: 765616 - RNA, 18 nt, Human
auggggcuucacuauguu

SEQ ID NO: 765617 - RNA, 24 nt, Human
caaaaaauccauacaaaacccaaa

SEQ ID NO: 765618 - RNA, 20 nt, Human
caagaagcuggugaggggcc

SEQ ID NO: 765619 - RNA, 21 nt, Human
caagcaagaccaagagggcac

SEQ ID NO: 765620 - RNA, 21 nt, Human
cacccacaauuccagggccuc

SEQ ID NO: 765621 - RNA, 20 nt, Human
caccgaggggcugacucagg

SEQ ID NO: 765622 - RNA, 20 nt, Human
caccuaagagcaaacaccac

SEQ ID NO: 765623 - RNA, 20 nt, Human
caccuaagagcaaacaccac

SEQ ID NO: 765624 - RNA, 21 nt, Human
caccucagccccccaaggagc

SEQ ID NO: 765625 - RNA, 24 nt, Human
caccucagccccccaaggagcugg

SEQ ID NO: 765626 - RNA, 18 nt, Human
caccugccucccugcggu

SEQ ID NO: 765627 - RNA, 19 nt, Human
caccuggacgggaggcucg

SEQ ID NO: 765628 - RNA, 19 nt, Human
cacuauguugcccaggcug

SEQ ID NO: 765629 - RNA, 24 nt, Human
cacuauguugcccaggcuggccuu

SEQ ID NO: 765630 - RNA, 26 nt, Human
cacuauguugcccaggcuggccuuga

SEQ ID NO: 765631 - RNA, 23 nt, Human
cacucacccuaugccagacagcc

SEQ ID NO: 765632 - RNA, 21 nt, Human
cagcaucugaacagagccugc

SEQ ID NO: 765633 - RNA, 19 nt, Human
cagccccccaaggagcugg

SEQ ID NO: 765634 - RNA, 21 nt, Human
cagccccccaaggagcuggga

SEQ ID NO: 765635 - RNA, 20 nt, Human
cagcccucacacucacccua

SEQ ID NO: 765636 - RNA, 21 nt, Human
caggacaggggccacuccaug

SEQ ID NO: 765637 - RNA, 20 nt, Human
caggcugcagaaggcaagga

SEQ ID NO: 765638 - RNA, 18 nt, Human
caggucaaaguggaggca

SEQ ID NO: 765639 - RNA, 24 nt, Human
cauacaaaacccaaaucaugacca

SEQ ID NO: 765640 - RNA, 22 nt, Human
caugcaaaggugcagcauggag

SEQ ID NO: 765641 - RNA, 19 nt, Human
ccacacucuuuuucucucu

SEQ ID NO: 765642 - RNA, 18 nt, Human
ccagacagccucacccac

SEQ ID NO: 765643 - RNA, 21 nt, Human
ccagacagccucacccacaau

SEQ ID NO: 765644 - RNA, 24 nt, Human
cccaaggagcugggacuauaggca

SEQ ID NO: 765645 - RNA, 20 nt, Human
cccaaguuccuuuagcuucc

SEQ ID NO: 765646 - RNA, 29 nt, Human
cccagcccacacucuuuuucucucuuuuc

SEQ ID NO: 765647 - RNA, 21 nt, Human
cccaggacaggggccacucca

SEQ ID NO: 765648 - RNA, 18 nt, Human
ccccagggcuucuguggg

SEQ ID NO: 765649 - RNA, 18 nt, Human
ccccguccgccugcccgc

SEQ ID NO: 765650 - RNA, 22 nt, Human
ccccguccgccugcccgccccc

SEQ ID NO: 765651 - RNA, 22 nt, Human
ccccugcauauuuccuuagcuc

SEQ ID NO: 765652 - RNA, 19 nt, Human
cccugagucucugugaggg

SEQ ID NO: 765653 - RNA, 23 nt, Human
ccgccugcccgcccccgcccgcc

SEQ ID NO: 765654 - RNA, 24 nt, Human
ccucugggccacggcacccagccc

SEQ ID NO: 765655 - RNA, 24 nt, Human
ccuggacucaagagaucugcccuc

SEQ ID NO: 765656 - RNA, 21 nt, Human
ccuggggguuucacuuccugc

SEQ ID NO: 765657 - RNA, 18 nt, Human
ccugugacuaccaagguc

SEQ ID NO: 765658 - RNA, 22 nt, Human
cgagcggcagcaccuugucagg

SEQ ID NO: 765659 - RNA, 24 nt, Human
cgaggcuggcgaggagugaggaga

SEQ ID NO: 765660 - RNA, 19 nt, Human
cgggggcagggggagggac

SEQ ID NO: 765661 - RNA, 25 nt, Human
cgggggguggggggcagaagcugca

SEQ ID NO: 765662 - RNA, 24 nt, Human
cggguguucugggccccuucgggg

SEQ ID NO: 765663 - RNA, 25 nt, Human
cguccgccugcccgcccccgcccgc

SEQ ID NO: 765664 - RNA, 22 nt, Human
cuaaucaccuaagagcaaacac

SEQ ID NO: 765665 - RNA, 24 nt, Human
cuacaaagccccauaggacugcag

SEQ ID NO: 765666 - RNA, 18 nt, Human
cuacagcaugacccaggg

SEQ ID NO: 765667 - RNA, 21 nt, Human
cuaggcucagacaggagcuaa

SEQ ID NO: 765668 - RNA, 25 nt, Human
cucacccuaugccagacagccucac

SEQ ID NO: 765669 - RNA, 24 nt, Human
cucagaugaucuucccaccucagc

SEQ ID NO: 765670 - RNA, 24 nt, Human
cuccagacccaccugccucccugc

SEQ ID NO: 765671 - RNA, 19 nt, Human
cuccaugcuccagacccac

SEQ ID NO: 765672 - RNA, 21 nt, Human
cuccccacaguccacagaaag

SEQ ID NO: 765673 - RNA, 19 nt, Human
cucugucacccaggcugga

SEQ ID NO: 765674 - RNA, 18 nt, Human
cugacucaggauggggag

SEQ ID NO: 765675 - RNA, 20 nt, Human
cugcagaggaccccacuguc

SEQ ID NO: 765676 - RNA, 18 nt, Human
gaagaggagaaaaaaagg

SEQ ID NO: 765677 - RNA, 19 nt, Human
gaagccccguccgccugcc

SEQ ID NO: 765678 - RNA, 23 nt, Human
gaagcugcagcuaggcggugccg

SEQ ID NO: 765679 - RNA, 21 nt, Human
gacagggagggagcuggggaa

SEQ ID NO: 765680 - RNA, 19 nt, Human
gacccagggaggacgacaa

SEQ ID NO: 765681 - RNA, 19 nt, Human
gacgggggguggggggcag

SEQ ID NO: 765682 - RNA, 24 nt, Human
gacuauaggcaugugccaccaugc

SEQ ID NO: 765683 - RNA, 20 nt, Human
gacugcgggggcagggggag

SEQ ID NO: 765684 - RNA, 18 nt, Human
gagaaaaaaagggagaga

SEQ ID NO: 765685 - RNA, 24 nt, Human
gagcagagucuaggaauuuccagg

SEQ ID NO: 765686 - RNA, 18 nt, Human
gagcggcagcggccaccc

SEQ ID NO: 765687 - RNA, 21 nt, Human
gagcugaccauuuugacccug

SEQ ID NO: 765688 - RNA, 26 nt, Human
gagcuggggugagagcuagucuaggg

SEQ ID NO: 765689 - RNA, 23 nt, Human
gaggagaaaaaaagggagagaga

SEQ ID NO: 765690 - RNA, 21 nt, Human
gaggugaggacagggcaucac

SEQ ID NO: 765691 - RNA, 19 nt, Human
gcagcauggagacagcauc

SEQ ID NO: 765692 - RNA, 22 nt, Human
gcaggcaggagaggccagcacc

SEQ ID NO: 765693 - RNA, 20 nt, Human
gcauggagacagcaucugaa

SEQ ID NO: 765694 - RNA, 21 nt, Human
gcucggccuccccacagucca

SEQ ID NO: 765695 - RNA, 19 nt, Human
gcuggccuugaacuccugg

SEQ ID NO: 765696 - RNA, 21 nt, Human
ggaaagccagaagcaccugga

SEQ ID NO: 765697 - RNA, 19 nt, Human
ggacagggagggagcuggg

SEQ ID NO: 765698 - RNA, 24 nt, Human
ggacuauaggcaugugccaccaug

SEQ ID NO: 765699 - RNA, 19 nt, Human
ggagaauagggugcggggg

SEQ ID NO: 765700 - RNA, 21 nt, Human
ggagacagcaucugaacagag

SEQ ID NO: 765701 - RNA, 18 nt, Human
ggagaggaacugaaggga

SEQ ID NO: 765702 - RNA, 20 nt, Human
ggcacaguggggacacuggg

SEQ ID NO: 765703 - RNA, 18 nt, Human
ggcagaagcugcagcuag

SEQ ID NO: 765704 - RNA, 18 nt, Human
ggcgaggcuggcgaggag

SEQ ID NO: 765705 - RNA, 23 nt, Human
ggcuaggucacauuucaguccug

SEQ ID NO: 765706 - RNA, 22 nt, Human
ggcuugucucgacaacacugcc

SEQ ID NO: 765707 - RNA, 23 nt, Human
gggaaaagaaacagugagaacgc

SEQ ID NO: 765708 - RNA, 22 nt, Human
gggacgggggguggggggcaga

SEQ ID NO: 765709 - RNA, 22 nt, Human
gggaggcucgccgucucccaug

SEQ ID NO: 765710 - RNA, 21 nt, Human
gggccggacauggggacgggg

SEQ ID NO: 765711 - RNA, 20 nt, Human
ggggacgggggguggggggc

SEQ ID NO: 765712 - RNA, 22 nt, Human
ggggacgggggguggggggcag

SEQ ID NO: 765713 - RNA, 24 nt, Human
ggggaugcuggccaggcccgggag

SEQ ID NO: 765714 - RNA, 22 nt, Human
ggggcuucacuauguugcccag

SEQ ID NO: 765715 - RNA, 23 nt, Human
ggggcuucacuauguugcccagg

SEQ ID NO: 765716 - RNA, 18 nt, Human
ggggguggggggcagaag

SEQ ID NO: 765717 - RNA, 24 nt, Human
ggggguggggggcagaagcugcag

SEQ ID NO: 765718 - RNA, 21 nt, Human
ggggguuucacuuccugccag

SEQ ID NO: 765719 - RNA, 19 nt, Human
gguccccaagggugcagag

SEQ ID NO: 765720 - RNA, 24 nt, Human
ggucucugucacccaggcuggagu

SEQ ID NO: 765721 - RNA, 26 nt, Human
ggugcagcauggagacagcaucugaa

SEQ ID NO: 765722 - RNA, 20 nt, Human
guauuuuuuugcagagaugg

SEQ ID NO: 765723 - RNA, 22 nt, Human
gucaaggaagaaguggggcuca

SEQ ID NO: 765724 - RNA, 20 nt, Human
gucacagcugggacagggag

SEQ ID NO: 765725 - RNA, 21 nt, Human
gucucugucacccaggcugga

SEQ ID NO: 765726 - RNA, 25 nt, Human
gugcagcauggagacagcaucugaa

SEQ ID NO: 765727 - RNA, 18 nt, Human
guggacccaagggcuagg

SEQ ID NO: 765728 - RNA, 20 nt, Human
uaagacccuuucccuacagc

SEQ ID NO: 765729 - RNA, 24 nt, Human
uacaaaacccaaaucaugaccagg

SEQ ID NO: 765730 - RNA, 19 nt, Human
uacaacagggaccuugaaa

SEQ ID NO: 765731 - RNA, 18 nt, Human
uagucuagggcucccaca

SEQ ID NO: 765732 - RNA, 18 nt, Human
uauggaccaaaggaacag

SEQ ID NO: 765733 - RNA, 19 nt, Human
uauguugcccaggcuggcc

SEQ ID NO: 765734 - RNA, 22 nt, Human
uauguugcccaggcuggccuug

SEQ ID NO: 765735 - RNA, 24 nt, Human
uauguugcccaggcuggccuugaa

SEQ ID NO: 765736 - RNA, 22 nt, Human
ucaaugccugucugcccagggg

SEQ ID NO: 765737 - RNA, 21 nt, Human
ucacaacuucuccaagcaaga

SEQ ID NO: 765738 - RNA, 21 nt, Human
ucacccaggcuggagugaagu

SEQ ID NO: 765739 - RNA, 20 nt, Human
ucagaugaucuucccaccuu

SEQ ID NO: 765740 - RNA, 18 nt, Human
ucagccccccaaggagcu

SEQ ID NO: 765741 - RNA, 18 nt, Human
ucagccccccaaggagcu

SEQ ID NO: 765742 - RNA, 20 nt, Human
ucagccccccaaggagcugg

SEQ ID NO: 765743 - RNA, 19 nt, Human
uccacagaaaggacagguc

SEQ ID NO: 765744 - RNA, 22 nt, Human
uccacagaaaggacagguccac

SEQ ID NO: 765745 - RNA, 24 nt, Human
ucccaccucagccccccaaggagc

SEQ ID NO: 765746 - RNA, 26 nt, Human
ucccucaucgcugccccugguuucug

SEQ ID NO: 765747 - RNA, 18 nt, Human
ucccugaaugcccaaguu

SEQ ID NO: 765748 - RNA, 22 nt, Human
ucccugcggugacagucagccu

SEQ ID NO: 765749 - RNA, 22 nt, Human
ucccuggggguuucacuuccug

SEQ ID NO: 765750 - RNA, 21 nt, Human
uccgccugcccgcccccgccc

SEQ ID NO: 765751 - RNA, 21 nt, Human
uccuaagacccuuucccuaca

SEQ ID NO: 765752 - RNA, 21 nt, Human
uccuggauaccagaggggccc

SEQ ID NO: 765753 - RNA, 22 nt, Human
ucggccuccccacaguccacag

SEQ ID NO: 765754 - RNA, 18 nt, Human
ucuccuucuccuaggcug

SEQ ID NO: 765755 - RNA, 21 nt, Human
ucucggcucacugcugccucg

SEQ ID NO: 765756 - RNA, 19 nt, Human
ucucggguguucugggccc

SEQ ID NO: 765757 - RNA, 22 nt, Human
ucucggguguucugggccccuu

SEQ ID NO: 765758 - RNA, 21 nt, Human
ucucugggcgcaggagggccc

SEQ ID NO: 765759 - RNA, 23 nt, Human
ucucugucacccaggcuggagug

SEQ ID NO: 765760 - RNA, 24 nt, Human
ucucugucacccaggcuggaguga

SEQ ID NO: 765761 - RNA, 22 nt, Human
ucuggcacaguggggacacugg

SEQ ID NO: 765762 - RNA, 25 nt, Human
ucuggcacaguggggacacuggaac

SEQ ID NO: 765763 - RNA, 22 nt, Human
ucugucacccaggcuggaguga

SEQ ID NO: 765764 - RNA, 22 nt, Human
ugaaggggugaggaauaacaca

SEQ ID NO: 765765 - RNA, 23 nt, Human
ugaaguggcgcaaucucggcuca

SEQ ID NO: 765766 - RNA, 22 nt, Human
ugacugcgggggcagggggagg

SEQ ID NO: 765767 - RNA, 19 nt, Human
ugagcugaggagaggcuug

SEQ ID NO: 765768 - RNA, 22 nt, Human
ugagcugaggagaggcuugucu

SEQ ID NO: 765769 - RNA, 24 nt, Human
ugaggacagggcaucacuaggcuc

SEQ ID NO: 765770 - RNA, 23 nt, Human
ugaucuucccaccucagcccccc

SEQ ID NO: 765771 - RNA, 24 nt, Human
ugcagagauggggcuucacuaugu

SEQ ID NO: 765772 - RNA, 21 nt, Human
ugcagccaggucaaaguggag

SEQ ID NO: 765773 - RNA, 22 nt, Human
ugcaugcagggccccagggccg

SEQ ID NO: 765774 - RNA, 19 nt, Human
ugccaccaugcccagcuau

SEQ ID NO: 765775 - RNA, 26 nt, Human
ugccagacagccucacccacaauucc

SEQ ID NO: 765776 - RNA, 24 nt, Human
ugcccagcuauuuuuuuguauuuu

SEQ ID NO: 765777 - RNA, 24 nt, Human
ugcccaggcuggccuugaacuccu

SEQ ID NO: 765778 - RNA, 18 nt, Human
ugccucagaaccuggcag

SEQ ID NO: 765779 - RNA, 22 nt, Human
ugccucagaaccuggcagaagc

SEQ ID NO: 765780 - RNA, 18 nt, Human
ugcuccagacccaccugc

SEQ ID NO: 765781 - RNA, 27 nt, Human
uggaacccuucuguggggccggacuca

SEQ ID NO: 765782 - RNA, 18 nt, Human
uggaagaccagugggucu

SEQ ID NO: 765783 - RNA, 18 nt, Human
uggaagcagaggugagga

SEQ ID NO: 765784 - RNA, 19 nt, Human
uggaagcagaggugaggac

SEQ ID NO: 765785 - RNA, 24 nt, Human
uggagugaaguggcgcaaucucgg

SEQ ID NO: 765786 - RNA, 21 nt, Human
uggauaccagaggggccccag

SEQ ID NO: 765787 - RNA, 23 nt, Human
uggcagcaggcuggcgaggcugg

SEQ ID NO: 765788 - RNA, 23 nt, Human
uggccaacaggcugaagcagugg

SEQ ID NO: 765789 - RNA, 19 nt, Human
uggcuugaugggcauuuuc

SEQ ID NO: 765790 - RNA, 23 nt, Human
ugggaagaggagaaaaaaaggga

SEQ ID NO: 765791 - RNA, 18 nt, Human
ugggacuauaggcaugug

SEQ ID NO: 765792 - RNA, 21 nt, Human
ugggacuauaggcaugugcca

SEQ ID NO: 765793 - RNA, 22 nt, Human
ugggacuauaggcaugugccac

SEQ ID NO: 765794 - RNA, 24 nt, Human
ugggacuauaggcaugugccacca

SEQ ID NO: 765795 - RNA, 23 nt, Human
uggggaagguggaagaccagugg

SEQ ID NO: 765796 - RNA, 24 nt, Human
uggggaagguggaagaccaguggg

SEQ ID NO: 765797 - RNA, 24 nt, Human
uggggcuucacuauguugcccagg

SEQ ID NO: 765798 - RNA, 21 nt, Human
ugguaaagaaaugucagggca

SEQ ID NO: 765799 - RNA, 21 nt, Human
ugucacccaggcuggagugaa

SEQ ID NO: 765800 - RNA, 19 nt, Human
ugugagggacucagaggcu

SEQ ID NO: 765801 - RNA, 19 nt, Human
uguggaggagucacagcug

SEQ ID NO: 765802 - RNA, 20 nt, Human
uguggggaacccagaagccg

SEQ ID NO: 765803 - RNA, 21 nt, Human
ugugugcccaggcacagggca

SEQ ID NO: 765804 - RNA, 21 nt, Human
uuccagggccucugggcugcu

SEQ ID NO: 765805 - RNA, 25 nt, Human
uucccaccucagccccccaaggagc

SEQ ID NO: 765806 - RNA, 26 nt, Human
uuucaaaaaauccauacaaaacccaa

SEQ ID NO: 765807 - RNA, 24 nt, Human
uuuuucucucuuuucaaaaaaucc

SEQ ID NO: 765808 - RNA, 22 nt, Human
uuuuuuguauuuuuuugcagag

SEQ ID NO: 765809 - RNA, 25 nt, Human
uuuuuuguauuuuuuugcagagaug

SEQ ID NO: 765810 - RNA, 22 nt, Human
aaacagcuccuggagcucccca

SEQ ID NO: 765811 - RNA, 25 nt, Human
aaagcaccuccaccucuccucacug

SEQ ID NO: 765812 - RNA, 24 nt, Human
aaaugcccccuaggugcugggggc

SEQ ID NO: 765813 - RNA, 21 nt, Human
aacagcuccuggagcucccca

SEQ ID NO: 765814 - RNA, 24 nt, Human
aacaguucuucucuccuggccuuc

SEQ ID NO: 765815 - RNA, 19 nt, Human
aagcagcucuuuaagccuc

SEQ ID NO: 765816 - RNA, 23 nt, Human
aagccccgucccuccccgcccag

SEQ ID NO: 765817 - RNA, 19 nt, Human
aaucccauccuccccccuc

SEQ ID NO: 765818 - RNA, 21 nt, Human
agagccguccccucggccccc

SEQ ID NO: 765819 - RNA, 19 nt, Human
agaggggagggaauggagu

SEQ ID NO: 765820 - RNA, 25 nt, Human
aggaagaagggauggagaaaccugg

SEQ ID NO: 765821 - RNA, 20 nt, Human
aggcaugcaccacugcaccc

SEQ ID NO: 765822 - RNA, 21 nt, Human
agggagaggcaaacucccaaa

SEQ ID NO: 765823 - RNA, 21 nt, Human
aguagcugggacuacaggcau

SEQ ID NO: 765824 - RNA, 24 nt, Human
agugcaguugugugaucacgacuc

SEQ ID NO: 765825 - RNA, 22 nt, Human
agugccgcucggccgaccgccc

SEQ ID NO: 765826 - RNA, 24 nt, Human
aucccauccuccccccucccccca

SEQ ID NO: 765827 - RNA, 26 nt, Human
aucccauccuccccccuccccccauu

SEQ ID NO: 765828 - RNA, 19 nt, Human
auccuggucccuccagucc

SEQ ID NO: 765829 - RNA, 19 nt, Human
augcaccacugcacccagc

SEQ ID NO: 765830 - RNA, 23 nt, Human
augggguuucgccauguuggcca

SEQ ID NO: 765831 - RNA, 24 nt, Human
augggguuucgccauguuggccag

SEQ ID NO: 765832 - RNA, 19 nt, Human
caaaacagcuuuugcaggc

SEQ ID NO: 765833 - RNA, 25 nt, Human
caaauucucuuuuguggugggaggc

SEQ ID NO: 765834 - RNA, 18 nt, Human
caagccccgucccucccc

SEQ ID NO: 765835 - RNA, 18 nt, Human
caaguuggggauguggcu

SEQ ID NO: 765836 - RNA, 24 nt, Human
cacacaggccuaagggaggggcac

SEQ ID NO: 765837 - RNA, 19 nt, Human
caccccguuuucauuucuc

SEQ ID NO: 765838 - RNA, 22 nt, Human
caccuagaggggcgcuccagag

SEQ ID NO: 765839 - RNA, 21 nt, Human
caccuggaaccuuggccaagu

SEQ ID NO: 765840 - RNA, 24 nt, Human
cacugcacccagcuaauuuuugua

SEQ ID NO: 765841 - RNA, 22 nt, Human
cagagaugggguuucgccaugu

SEQ ID NO: 765842 - RNA, 22 nt, Human
cagcaauagggagcugugucag

SEQ ID NO: 765843 - RNA, 19 nt, Human
cagcagaaaaaggcgugcc

SEQ ID NO: 765844 - RNA, 22 nt, Human
cagcagaaaaaggcgugccaua

SEQ ID NO: 765845 - RNA, 26 nt, Human
cagcagaaaaaggcgugccauacaca

SEQ ID NO: 765846 - RNA, 18 nt, Human
cagccucggucuccccaa

SEQ ID NO: 765847 - RNA, 20 nt, Human
cagcgcccuccgcgcaggga

SEQ ID NO: 765848 - RNA, 22 nt, Human
cagcuacucagcucaccccggu

SEQ ID NO: 765849 - RNA, 18 nt, Human
cagcucaaaaugcccccu

SEQ ID NO: 765850 - RNA, 21 nt, Human
cagcuccuggagcuccccaac

SEQ ID NO: 765851 - RNA, 20 nt, Human
cagucuccugaguagcuggg

SEQ ID NO: 765852 - RNA, 20 nt, Human
caugcaccacugcacccagc

SEQ ID NO: 765853 - RNA, 24 nt, Human
cauguuggccaggcuggucucaaa

SEQ ID NO: 765854 - RNA, 24 nt, Human
cauuggagaaagagcuuccagcug

SEQ ID NO: 765855 - RNA, 20 nt, Human
ccaaaugcugggauuauagu

SEQ ID NO: 765856 - RNA, 23 nt, Human
ccaaaugcugggauuauagucau

SEQ ID NO: 765857 - RNA, 18 nt, Human
ccaccaaggcgcaagccc

SEQ ID NO: 765858 - RNA, 18 nt, Human
ccacugcacccagcuaau

SEQ ID NO: 765859 - RNA, 22 nt, Human
ccagagagcccuaccccuugcc

SEQ ID NO: 765860 - RNA, 25 nt, Human
ccagagagcccuaccccuugcccag

SEQ ID NO: 765861 - RNA, 20 nt, Human
ccaggguucaaacaauucuc

SEQ ID NO: 765862 - RNA, 26 nt, Human
ccaucugagguauccuguggcuuggg

SEQ ID NO: 765863 - RNA, 20 nt, Human
ccauggagaucccaggagaa

SEQ ID NO: 765864 - RNA, 19 nt, Human
ccauguuggccaggcuggu

SEQ ID NO: 765865 - RNA, 22 nt, Human
ccauguuggccaggcuggucuc

SEQ ID NO: 765866 - RNA, 24 nt, Human
cccaaccccaaggcuccucacgau

SEQ ID NO: 765867 - RNA, 19 nt, Human
cccaccccuuggaggaggc

SEQ ID NO: 765868 - RNA, 23 nt, Human
ccccaaagcaccuccaccucucc

SEQ ID NO: 765869 - RNA, 20 nt, Human
ccccaaccccaaggcuccuc

SEQ ID NO: 765870 - RNA, 22 nt, Human
ccccaggaaaucgucagauucc

SEQ ID NO: 765871 - RNA, 18 nt, Human
ccccauggagaucccagg

SEQ ID NO: 765872 - RNA, 21 nt, Human
cccgaucucagcccacccuuc

SEQ ID NO: 765873 - RNA, 24 nt, Human
cccgccucagucuccugaguagcu

SEQ ID NO: 765874 - RNA, 20 nt, Human
cccuaagguccuaugugcac

SEQ ID NO: 765875 - RNA, 18 nt, Human
ccgcgcaggcgcagugcc

SEQ ID NO: 765876 - RNA, 21 nt, Human
ccucaaguuggggauguggcu

SEQ ID NO: 765877 - RNA, 22 nt, Human
ccuccaaccagcauccuggucc

SEQ ID NO: 765878 - RNA, 26 nt, Human
ccuccagaaacccagcuacucagcuc

SEQ ID NO: 765879 - RNA, 24 nt, Human
ccuccaggguucaaacaauucucc

SEQ ID NO: 765880 - RNA, 25 nt, Human
ccuccgcgcaggcgcagugccgcuc

SEQ ID NO: 765881 - RNA, 24 nt, Human
ccucggucuccccaaaugcuggga

SEQ ID NO: 765882 - RNA, 23 nt, Human
ccucucauucuucaccucggaaa

SEQ ID NO: 765883 - RNA, 23 nt, Human
ccugaguagcugggacuacaggc

SEQ ID NO: 765884 - RNA, 24 nt, Human
ccugaguagcugggacuacaggca

SEQ ID NO: 765885 - RNA, 25 nt, Human
ccuggaaccuuggccaagucucaag

SEQ ID NO: 765886 - RNA, 20 nt, Human
ccuugcccagggcccccccu

SEQ ID NO: 765887 - RNA, 24 nt, Human
cgccauguuggccaggcuggucuc

SEQ ID NO: 765888 - RNA, 23 nt, Human
cgccucagucuccugaguagcug

SEQ ID NO: 765889 - RNA, 24 nt, Human
cgccucagucuccugaguagcugg

SEQ ID NO: 765890 - RNA, 24 nt, Human
cgguaccagagccccgggaugugg

SEQ ID NO: 765891 - RNA, 25 nt, Human
cgugccauacacacauguggaaaag

SEQ ID NO: 765892 - RNA, 23 nt, Human
cuaauuuuuguauuuuuagcaga

SEQ ID NO: 765893 - RNA, 24 nt, Human
cuacaaccucugccuccaggguuc

SEQ ID NO: 765894 - RNA, 19 nt, Human
cucaaaaugcccccuaggu

SEQ ID NO: 765895 - RNA, 24 nt, Human
cucagucuccugaguagcugggac

SEQ ID NO: 765896 - RNA, 20 nt, Human
cuccagccgugccacccuuc

SEQ ID NO: 765897 - RNA, 20 nt, Human
cuccccaaccccaaggcucc

SEQ ID NO: 765898 - RNA, 23 nt, Human
cuccccaacuuaaaacagcuccc

SEQ ID NO: 765899 - RNA, 24 nt, Human
cuccccccauuuauuuuuugcaca

SEQ ID NO: 765900 - RNA, 20 nt, Human
cuccccgcccagcgcccucc

SEQ ID NO: 765901 - RNA, 20 nt, Human
cuguguuuguguuucucucu

SEQ ID NO: 765902 - RNA, 18 nt, Human
cuucugcagaucucccca

SEQ ID NO: 765903 - RNA, 23 nt, Human
cuucugcagaucuccccaacccc

SEQ ID NO: 765904 - RNA, 22 nt, Human
cuuggcaauuggucuggggucc

SEQ ID NO: 765905 - RNA, 24 nt, Human
gaccuuaagugaucugccagccuc

SEQ ID NO: 765906 - RNA, 23 nt, Human
gacuacaggcaugcaccacugca

SEQ ID NO: 765907 - RNA, 20 nt, Human
gagaugggguuucgccaugu

SEQ ID NO: 765908 - RNA, 24 nt, Human
gagaugggguuucgccauguuggc

SEQ ID NO: 765909 - RNA, 20 nt, Human
gaggggcacagaggguaugg

SEQ ID NO: 765910 - RNA, 20 nt, Human
gaguagcugggacuacaggc

SEQ ID NO: 765911 - RNA, 24 nt, Human
gaguagcugggacuacaggcaugc

SEQ ID NO: 765912 - RNA, 23 nt, Human
gcacagaggguauggcaccugga

SEQ ID NO: 765913 - RNA, 25 nt, Human
gccauguuggccaggcuggucucaa

SEQ ID NO: 765914 - RNA, 19 nt, Human
gcccaggcuggagugcagu

SEQ ID NO: 765915 - RNA, 21 nt, Human
gccccccgagccccgccccug

SEQ ID NO: 765916 - RNA, 24 nt, Human
gccucagucuccugaguagcuggg

SEQ ID NO: 765917 - RNA, 24 nt, Human
gccucggucuccccaaaugcuggg

SEQ ID NO: 765918 - RNA, 18 nt, Human
ggagggaauggaguauug

SEQ ID NO: 765919 - RNA, 21 nt, Human
ggaggggcacagaggguaugg

SEQ ID NO: 765920 - RNA, 21 nt, Human
ggcgugccauacacacaugug

SEQ ID NO: 765921 - RNA, 23 nt, Human
ggcuggucucaaacuccugaccu

SEQ ID NO: 765922 - RNA, 23 nt, Human
gggcaaagguccugcuuggcagc

SEQ ID NO: 765923 - RNA, 24 nt, Human
ggggcauccuccauuccuaauucc

SEQ ID NO: 765924 - RNA, 22 nt, Human
gggguuucgccauguuggccag

SEQ ID NO: 765925 - RNA, 23 nt, Human
ggguauggcaccuggaaccuugg

SEQ ID NO: 765926 - RNA, 22 nt, Human
ggguuucgccauguuggccagg

SEQ ID NO: 765927 - RNA, 18 nt, Human
gguagaggggagggaaug

SEQ ID NO: 765928 - RNA, 24 nt, Human
gucuuggccuggaauucccacccc

SEQ ID NO: 765929 - RNA, 24 nt, Human
gugaucugccagccucggucuccc

SEQ ID NO: 765930 - RNA, 21 nt, Human
guggccucccgagagggcggg

SEQ ID NO: 765931 - RNA, 18 nt, Human
uaaaacagcuccuggagc

SEQ ID NO: 765932 - RNA, 25 nt, Human
uaaaacagcuccuggagcuccccaa

SEQ ID NO: 765933 - RNA, 21 nt, Human
uaaaaguaaaacuccucagga

SEQ ID NO: 765934 - RNA, 24 nt, Human
uaauuuuuguauuuuuagcagaga

SEQ ID NO: 765935 - RNA, 24 nt, Human
uacaggcaugcaccacugcaccca

SEQ ID NO: 765936 - RNA, 24 nt, Human
uagcagagaugggguuucgccaug

SEQ ID NO: 765937 - RNA, 25 nt, Human
uagcagcaauagggagcugugucag

SEQ ID NO: 765938 - RNA, 24 nt, Human
uaggugucuuuucaacacagccuu

SEQ ID NO: 765939 - RNA, 23 nt, Human
uauuguucuguugcccaggcugg

SEQ ID NO: 765940 - RNA, 24 nt, Human
uauuguucuguugcccaggcugga

SEQ ID NO: 765941 - RNA, 23 nt, Human
uauuuggaaaauucuggaaaagg

SEQ ID NO: 765942 - RNA, 23 nt, Human
ucacuacaaccucugccuccagg

SEQ ID NO: 765943 - RNA, 24 nt, Human
ucacuacaaccucugccuccaggg

SEQ ID NO: 765944 - RNA, 25 nt, Human
ucacuacaaccucugccuccagggu

SEQ ID NO: 765945 - RNA, 26 nt, Human
ucacuacaaccucugccuccaggguu

SEQ ID NO: 765946 - RNA, 24 nt, Human
ucagaaucuuuccaagaauccauu

SEQ ID NO: 765947 - RNA, 22 nt, Human
ucagcccacccuuccauggggc

SEQ ID NO: 765948 - RNA, 23 nt, Human
ucagucuccugaguagcugggac

SEQ ID NO: 765949 - RNA, 22 nt, Human
ucaguuuugccaucugucaaau

SEQ ID NO: 765950 - RNA, 26 nt, Human
uccagccaggucacuguaacuuugcu

SEQ ID NO: 765951 - RNA, 19 nt, Human
uccccaaaugcugggauua

SEQ ID NO: 765952 - RNA, 18 nt, Human
uccccaaccccaaggcuc

SEQ ID NO: 765953 - RNA, 19 nt, Human
uccccaggccuggagcucu

SEQ ID NO: 765954 - RNA, 24 nt, Human
ucccccuugcuggcucagcuccag

SEQ ID NO: 765955 - RNA, 21 nt, Human
uccccgcccagcgcccuccgc

SEQ ID NO: 765956 - RNA, 24 nt, Human
uccugaguagcugggacuacaggc

SEQ ID NO: 765957 - RNA, 24 nt, Human
ucgcacgugcuguuccccaggccu

SEQ ID NO: 765958 - RNA, 22 nt, Human
ucgccauguuggccaggcuggu

SEQ ID NO: 765959 - RNA, 24 nt, Human
ucgccauguuggccaggcuggucu

SEQ ID NO: 765960 - RNA, 23 nt, Human
ucuaguaagugguucccucucau

SEQ ID NO: 765961 - RNA, 23 nt, Human
ucucaagcagcucuuuaagccuc

SEQ ID NO: 765962 - RNA, 24 nt, Human
ucugccuccaggguucaaacaauu

SEQ ID NO: 765963 - RNA, 23 nt, Human
ucuggucuccuucuguucuuucc

SEQ ID NO: 765964 - RNA, 18 nt, Human
ucuguugcccaggcugga

SEQ ID NO: 765965 - RNA, 19 nt, Human
ucuguugcccaggcuggag

SEQ ID NO: 765966 - RNA, 24 nt, Human
ucuuucucucauucucuuucuccc

SEQ ID NO: 765967 - RNA, 18 nt, Human
ugaccuuaagugaucugc

SEQ ID NO: 765968 - RNA, 24 nt, Human
ugaccuuaagugaucugccagccu

SEQ ID NO: 765969 - RNA, 23 nt, Human
ugaucacgacucacuacaaccuc

SEQ ID NO: 765970 - RNA, 24 nt, Human
ugaucugccagccucggucucccc

SEQ ID NO: 765971 - RNA, 18 nt, Human
ugcccaggcuggagugca

SEQ ID NO: 765972 - RNA, 20 nt, Human
ugcccaggcuggagugcagu

SEQ ID NO: 765973 - RNA, 24 nt, Human
ugcccaggcuggagugcaguugug

SEQ ID NO: 765974 - RNA, 18 nt, Human
ugcccagggcccccccuc

SEQ ID NO: 765975 - RNA, 19 nt, Human
uggaauccagucucucccc

SEQ ID NO: 765976 - RNA, 18 nt, Human
uggaggaggccgaggggg

SEQ ID NO: 765977 - RNA, 19 nt, Human
uggagugcaguugugugau

SEQ ID NO: 765978 - RNA, 19 nt, Human
uggagugcaguugugugau

SEQ ID NO: 765979 - RNA, 19 nt, Human
uggccaagucucaagcagc

SEQ ID NO: 765980 - RNA, 24 nt, Human
uggccaggcuggucucaaacuccu

SEQ ID NO: 765981 - RNA, 20 nt, Human
uggccuggaauucccacccc

SEQ ID NO: 765982 - RNA, 21 nt, Human
uggcguggagccccccgagcc

SEQ ID NO: 765983 - RNA, 23 nt, Human
ugggaccaggggaucccaaauuc

SEQ ID NO: 765984 - RNA, 21 nt, Human
ugggacuacaggcaugcacca

SEQ ID NO: 765985 - RNA, 24 nt, Human
ugggacuacaggcaugcaccacug

SEQ ID NO: 765986 - RNA, 24 nt, Human
ugggacuacaggcaugcaccacug

SEQ ID NO: 765987 - RNA, 19 nt, Human
uggggcacacaggccuaag

SEQ ID NO: 765988 - RNA, 21 nt, Human
uggggcacacaggccuaaggg

SEQ ID NO: 765989 - RNA, 18 nt, Human
ugggggcguggccucaag

SEQ ID NO: 765990 - RNA, 24 nt, Human
ugggguuucgccauguuggccagg

SEQ ID NO: 765991 - RNA, 21 nt, Human
uguauuuuuagcagagauggg

SEQ ID NO: 765992 - RNA, 23 nt, Human
ugucuuuucaacacagccuucag

SEQ ID NO: 765993 - RNA, 21 nt, Human
uguggcuuggguguuugaauc

SEQ ID NO: 765994 - RNA, 18 nt, Human
ugugucacuguguuugug

SEQ ID NO: 765995 - RNA, 19 nt, Human
uguguuuguguuucucucu

SEQ ID NO: 765996 - RNA, 21 nt, Human
uguugcccaggcuggagugca

SEQ ID NO: 765997 - RNA, 18 nt, Human
uuagcagagaugggguuu

SEQ ID NO: 765998 - RNA, 22 nt, Human
uuagcagagaugggguuucgcc

SEQ ID NO: 765999 - RNA, 24 nt, Human
uuagcagagaugggguuucgccau

SEQ ID NO: 766000 - RNA, 24 nt, Human
uucaaacaauucucccgccucagu

SEQ ID NO: 766001 - RNA, 26 nt, Human
uucaccucggaaagccuccccaucug

SEQ ID NO: 766002 - RNA, 28 nt, Human
uucaguguccccaaagcaccuccaccuc

SEQ ID NO: 766003 - RNA, 25 nt, Human
uucucuuucuccccccuagaguuuc

SEQ ID NO: 766004 - RNA, 24 nt, Human
uugaaaucccauccuccccccucc

SEQ ID NO: 766005 - RNA, 22 nt, Human
uugcccaggcuggagugcaguu

SEQ ID NO: 766006 - RNA, 24 nt, Human
uugcuggcucagcuccagccgugc

SEQ ID NO: 766007 - RNA, 23 nt, Human
uuguauuuuuagcagagaugggg

SEQ ID NO: 766008 - RNA, 21 nt, Human
uuguucuguugcccaggcugg

SEQ ID NO: 766009 - RNA, 22 nt, Human
uuguucuguugcccaggcugga

SEQ ID NO: 766010 - RNA, 24 nt, Human
uuguucuguugcccaggcuggagu

SEQ ID NO: 766011 - RNA, 24 nt, Human
uuucgccauguuggccaggcuggu

SEQ ID NO: 766012 - RNA, 25 nt, Human
uuucuggucuccuucuguucuuucc

SEQ ID NO: 766013 - RNA, 23 nt, Human
uuuuuagcagagaugggguuucg

SEQ ID NO: 766014 - RNA, 24 nt, Human
uuuuuagcagagaugggguuucgc

SEQ ID NO: 766015 - RNA, 20 nt, Human
uuuuuguauuuuuagcagag

SEQ ID NO: 766016 - RNA, 23 nt, Human
uuuuuguauuuuuagcagagaug

SEQ ID NO: 766017 - RNA, 22 nt, Human
aaagucuacccaaaccaucacu

SEQ ID NO: 766018 - RNA, 21 nt, Human
aacagcuugcugggcacaaaa

SEQ ID NO: 766019 - RNA, 18 nt, Human
aaccaaaauagaagugaa

SEQ ID NO: 766020 - RNA, 22 nt, Human
aacuguagguauccagggaguc

SEQ ID NO: 766021 - RNA, 19 nt, Human
aagaaaaacagagaaaaca

SEQ ID NO: 766022 - RNA, 19 nt, Human
aagaaaccugaguuuggau

SEQ ID NO: 766023 - RNA, 19 nt, Human
aagcaauguaaacuaguua

SEQ ID NO: 766024 - RNA, 21 nt, Human
aagucuacccaaaccaucacc

SEQ ID NO: 766025 - RNA, 21 nt, Human
aaguuuucugugaacuuaaaa

SEQ ID NO: 766026 - RNA, 19 nt, Human
accccacucaagugaggua

SEQ ID NO: 766027 - RNA, 19 nt, Human
accccggcgccucccacag

SEQ ID NO: 766028 - RNA, 19 nt, Human
agaagaaaaacagagaaaa

SEQ ID NO: 766029 - RNA, 21 nt, Human
agaagaaaaacagagaaaaca

SEQ ID NO: 766030 - RNA, 27 nt, Human
agacaaaugcaauagaaaaaaaucaag

SEQ ID NO: 766031 - RNA, 21 nt, Human
agcccuguugcucugcaguuu

SEQ ID NO: 766032 - RNA, 21 nt, Human
agcuggaaucaaagaauaaug

SEQ ID NO: 766033 - RNA, 21 nt, Human
aggaaaaauaauugucuguca

SEQ ID NO: 766034 - RNA, 19 nt, Human
aguaagugauguaucuugc

SEQ ID NO: 766035 - RNA, 24 nt, Human
auacugaagcccuguugcucugca

SEQ ID NO: 766036 - RNA, 23 nt, Human
augcaagaucauuaauauaaaca

SEQ ID NO: 766037 - RNA, 24 nt, Human
auuaaguuuucugugaacuuaaaa

SEQ ID NO: 766038 - RNA, 26 nt, Human
auuacaaauauuaaaugccuuuaauc

SEQ ID NO: 766039 - RNA, 19 nt, Human
auugggggaaaaggaaaac

SEQ ID NO: 766040 - RNA, 23 nt, Human
caaacagggcauuguacacccau

SEQ ID NO: 766041 - RNA, 22 nt, Human
caaagaucuaugcaaauacaaa

SEQ ID NO: 766042 - RNA, 21 nt, Human
caaauagaaacaucuuguacc

SEQ ID NO: 766043 - RNA, 21 nt, Human
caccauuuaaauucguuucca

SEQ ID NO: 766044 - RNA, 20 nt, Human
caccccggcgccucccacag

SEQ ID NO: 766045 - RNA, 19 nt, Human
cagagaaguuagagaagaa

SEQ ID NO: 766046 - RNA, 19 nt, Human
ccagagaugugacccagga

SEQ ID NO: 766047 - RNA, 19 nt, Human
cccacucaagugagguaac

SEQ ID NO: 766048 - RNA, 24 nt, Human
cccuaaccaguaaguacaaacagg

SEQ ID NO: 766049 - RNA, 26 nt, Human
ccggcgccucccacagacacagcccc

SEQ ID NO: 766050 - RNA, 22 nt, Human
ccucccacagacacagccccaa

SEQ ID NO: 766051 - RNA, 21 nt, Human
cuucaggcucauuccuuuugu

SEQ ID NO: 766052 - RNA, 23 nt, Human
gaacugacaauguuauggugagu

SEQ ID NO: 766053 - RNA, 21 nt, Human
gaagaaaaacagagaaaacaa

SEQ ID NO: 766054 - RNA, 21 nt, Human
gauucucuucuaguaacaauu

SEQ ID NO: 766055 - RNA, 22 nt, Human
gcagugacauuauuuugaccua

SEQ ID NO: 766056 - RNA, 25 nt, Human
gcuggcaaguuacccugacccuaac

SEQ ID NO: 766057 - RNA, 19 nt, Human
gggaaaaggaaaaccccac

SEQ ID NO: 766058 - RNA, 23 nt, Human
uaaaaaaaaagucuacccaaacc

SEQ ID NO: 766059 - RNA, 26 nt, Human
uaaaacaaacgcucacauuaauuuuu

SEQ ID NO: 766060 - RNA, 19 nt, Human
uacaguaugucugaaaaaa

SEQ ID NO: 766061 - RNA, 19 nt, Human
uagaacugacaauguuaug

SEQ ID NO: 766062 - RNA, 21 nt, Human
uaugaaaugacgaauuugaua

SEQ ID NO: 766063 - RNA, 26 nt, Human
uccaaagaaauguuuagcagacaaau

SEQ ID NO: 766064 - RNA, 23 nt, Human
uccacuggcaaaaguuuuaacaa

SEQ ID NO: 766065 - RNA, 25 nt, Human
uccaggcaaaaauccaauuuuaaaa

SEQ ID NO: 766066 - RNA, 22 nt, Human
ucuugggcuggcaaguuacccu

SEQ ID NO: 766067 - RNA, 19 nt, Human
ugaaaguagagccuuugga

SEQ ID NO: 766068 - RNA, 19 nt, Human
ugaauauacugaagcccug

SEQ ID NO: 766069 - RNA, 28 nt, Human
ugacccaggaaacaauucaucaauaggg

SEQ ID NO: 766070 - RNA, 22 nt, Human
ugaguuuggauguagaaauaau

SEQ ID NO: 766071 - RNA, 22 nt, Human
ugccuucaaccaaaauagaagu

SEQ ID NO: 766072 - RNA, 18 nt, Human
uggaaacagaaugaacuu

SEQ ID NO: 766073 - RNA, 23 nt, Human
ugggcacaaaauuuacucaaaau

SEQ ID NO: 766074 - RNA, 19 nt, Human
uguaaacuaguuauaaaau

SEQ ID NO: 766075 - RNA, 19 nt, Human
uguaaagguaucacuuuau

SEQ ID NO: 766076 - RNA, 19 nt, Human
uguagggauaaugaacaca

SEQ ID NO: 766077 - RNA, 19 nt, Human
ugucugucauuuucuucuc

SEQ ID NO: 766078 - RNA, 20 nt, Human
uucaaccaaaauagaaguga

SEQ ID NO: 766079 - RNA, 23 nt, Human
uucaaccaaaauagaagugaagc

SEQ ID NO: 766080 - RNA, 25 nt, Human
uucagagaaguuagagaagaaaaac

SEQ ID NO: 766081 - RNA, 20 nt, Human
uuguaaagguaucacuuuau

SEQ ID NO: 766082 - RNA, 27 nt, Human
uuuaaacuuuugucuucauuguaaagg

SEQ ID NO: 766083 - RNA, 21 nt, Human
aaaaaaaaaaaaucagggaca

SEQ ID NO: 766084 - RNA, 26 nt, Human
aaaaaaaaaaauccaaccauguggga

SEQ ID NO: 766085 - RNA, 25 nt, Human
aaaaaaaaaauccaaccauguggga

SEQ ID NO: 766086 - RNA, 21 nt, Human
aaaaaaacagcaacaacaaac

SEQ ID NO: 766087 - RNA, 25 nt, Human
aaaaaaacccaaaaacaaaaacaaa

SEQ ID NO: 766088 - RNA, 23 nt, Human
aaaaaacaaaaagacaaaaaaac

SEQ ID NO: 766089 - RNA, 21 nt, Human
aaaaaacccaaaaacaaaaac

SEQ ID NO: 766090 - RNA, 30 nt, Human
aaaaacaaaacagacauaaaaagacaaaaa

SEQ ID NO: 766091 - RNA, 21 nt, Human
aaaaagacaaaaaaacagcaa

SEQ ID NO: 766092 - RNA, 26 nt, Human
aaaaagccaaagcgacucacugugaa

SEQ ID NO: 766093 - RNA, 19 nt, Human
aaaacaaaaacaaaaaaca

SEQ ID NO: 766094 - RNA, 22 nt, Human
aaaacaaaaagacaaaaaaaca

SEQ ID NO: 766095 - RNA, 18 nt, Human
aaaacagacauaaaaaga

SEQ ID NO: 766096 - RNA, 18 nt, Human
aaaagacaaaaaaacagc

SEQ ID NO: 766097 - RNA, 26 nt, Human
aaaagacaaaaaaacagcaacaacaa

SEQ ID NO: 766098 - RNA, 26 nt, Human
aaacaaaaacaaaaaacaaacuaaca

SEQ ID NO: 766099 - RNA, 27 nt, Human
aaacaaaaacaaaaaacaaacuaacaa

SEQ ID NO: 766100 - RNA, 25 nt, Human
aaacaaaacagacauaaaaagacaa

SEQ ID NO: 766101 - RNA, 26 nt, Human
aaacaaaacagacauaaaaagacaaa

SEQ ID NO: 766102 - RNA, 27 nt, Human
aaacaaacuaacaaaaaaccggacccc

SEQ ID NO: 766103 - RNA, 24 nt, Human
aaacagacauaaaaagacaaaaau

SEQ ID NO: 766104 - RNA, 18 nt, Human
aaacagcaacaacaaaca

SEQ ID NO: 766105 - RNA, 26 nt, Human
aaacagcaacaacaaacaacuuuuaa

SEQ ID NO: 766106 - RNA, 18 nt, Human
aaacuccagagguuacug

SEQ ID NO: 766107 - RNA, 26 nt, Human
aaagaaauguccaaaaggguaagaaa

SEQ ID NO: 766108 - RNA, 22 nt, Human
aaagacaaaaauaaagccaaaa

SEQ ID NO: 766109 - RNA, 20 nt, Human
aaauaaagccaaaaaaaccc

SEQ ID NO: 766110 - RNA, 23 nt, Human
aaauaaagccaaaaaaacccaaa

SEQ ID NO: 766111 - RNA, 22 nt, Human
aacaaccaaaaaauucuaacag

SEQ ID NO: 766112 - RNA, 21 nt, Human
aaccaaaaaauucuaacagcc

SEQ ID NO: 766113 - RNA, 31 nt, Human
aacccaaaaacaaaaacaaaaaacaaacuag

SEQ ID NO: 766114 - RNA, 20 nt, Human
aacugggcagcaacuucuuu

SEQ ID NO: 766115 - RNA, 24 nt, Human
aagacaaaaauaaagccaaaaaaa

SEQ ID NO: 766116 - RNA, 23 nt, Human
aagaccacaggcuaaaaugccca

SEQ ID NO: 766117 - RNA, 23 nt, Human
aagauaccaaaugcggaugccau

SEQ ID NO: 766118 - RNA, 20 nt, Human
aagcagaaaucagaaauguc

SEQ ID NO: 766119 - RNA, 30 nt, Human
aagccaaaaaaacccaaaaacaaaaacaaa

SEQ ID NO: 766120 - RNA, 18 nt, Human
aagcccaaagugaagcag

SEQ ID NO: 766121 - RNA, 22 nt, Human
aaugcucaucccauuaaacauc

SEQ ID NO: 766122 - RNA, 18 nt, Human
aauggccaguuuaaagca

SEQ ID NO: 766123 - RNA, 21 nt, Human
aauuaaaaaauaaaaggcaag

SEQ ID NO: 766124 - RNA, 18 nt, Human
acagacauaaaaagacaa

SEQ ID NO: 766125 - RNA, 22 nt, Human
acagcaacaacaaacaacuuuu

SEQ ID NO: 766126 - RNA, 22 nt, Human
accccacccugagagcaggccg

SEQ ID NO: 766127 - RNA, 20 nt, Human
acccugagagcaggccgcag

SEQ ID NO: 766128 - RNA, 24 nt, Human
accgcaauaaaacacaauuuguuu

SEQ ID NO: 766129 - RNA, 21 nt, Human
acgaagaagaggaagcccaaa

SEQ ID NO: 766130 - RNA, 25 nt, Human
acucaaaaaaaaaaaaaaaauccaa

SEQ ID NO: 766131 - RNA, 19 nt, Human
agaaaucagaaaugucuuu

SEQ ID NO: 766132 - RNA, 28 nt, Human
agacaaaaauaaagccaaaaaaacccaa

SEQ ID NO: 766133 - RNA, 19 nt, Human
agaucagggacugaaaaug

SEQ ID NO: 766134 - RNA, 20 nt, Human
agauucacuuagaaccacug

SEQ ID NO: 766135 - RNA, 21 nt, Human
agccaaaaaaacccaaaaaca

SEQ ID NO: 766136 - RNA, 20 nt, Human
agcuuccuucauuuauuuca

SEQ ID NO: 766137 - RNA, 24 nt, Human
aggaagcagcaaccauggacuuuc

SEQ ID NO: 766138 - RNA, 26 nt, Human
auaaaaagacaaaaauaaagccaaaa

SEQ ID NO: 766139 - RNA, 23 nt, Human
auaaagccaaaaaaacccaaaaa

SEQ ID NO: 766140 - RNA, 20 nt, Human
auauacacacacacuuguag

SEQ ID NO: 766141 - RNA, 19 nt, Human
auauagagauauauacaua

SEQ ID NO: 766142 - RNA, 20 nt, Human
auugccuggagcugcacaac

SEQ ID NO: 766143 - RNA, 22 nt, Human
auuugagagggagccccuuuaa

SEQ ID NO: 766144 - RNA, 26 nt, Human
caaaaaaacccaaaaacaaaaacaaa

SEQ ID NO: 766145 - RNA, 24 nt, Human
caaaaaacaaacuaacaaaaaacu

SEQ ID NO: 766146 - RNA, 26 nt, Human
caaaaacaaaaacaaaaaacaaacua

SEQ ID NO: 766147 - RNA, 20 nt, Human
caaaaagccaaagcgacuca

SEQ ID NO: 766148 - RNA, 26 nt, Human
caaaaggguaagaaaaacaaaacaga

SEQ ID NO: 766149 - RNA, 22 nt, Human
caaagugaagcagaaaucagaa

SEQ ID NO: 766150 - RNA, 21 nt, Human
caacucaaaaaaaaaaaaaaa

SEQ ID NO: 766151 - RNA, 20 nt, Human
caagaggcacuacaagagaa

SEQ ID NO: 766152 - RNA, 19 nt, Human
caauuacuguaaguagaag

SEQ ID NO: 766153 - RNA, 24 nt, Human
cacaacucaaaaaaaaaaaaaaaa

SEQ ID NO: 766154 - RNA, 21 nt, Human
cagcuagaauuagcuuguauu

SEQ ID NO: 766155 - RNA, 21 nt, Human
cagugaaauuaaaaaauaaaa

SEQ ID NO: 766156 - RNA, 26 nt, Human
cauaaaaagacaaaaauaaagccaaa

SEQ ID NO: 766157 - RNA, 18 nt, Human
cauugugucuuuaagauu

SEQ ID NO: 766158 - RNA, 18 nt, Human
ccacccugagagcaggcc

SEQ ID NO: 766159 - RNA, 26 nt, Human
cccaaaaacaaaaacaaaaaacaaac

SEQ ID NO: 766160 - RNA, 21 nt, Human
cccaccggcaggucgcaauaa

SEQ ID NO: 766161 - RNA, 19 nt, Human
ccgcaguuuaucaaaaagc

SEQ ID NO: 766162 - RNA, 20 nt, Human
ccuuuuauaccuuucaaaua

SEQ ID NO: 766163 - RNA, 21 nt, Human
cguuuauuuuaacaaccaaaa

SEQ ID NO: 766164 - RNA, 23 nt, Human
cuaacaaaaaacuuuuaaagaaa

SEQ ID NO: 766165 - RNA, 18 nt, Human
cuccgacucggagacaaa

SEQ ID NO: 766166 - RNA, 18 nt, Human
gaaagcacaacucaaaaa

SEQ ID NO: 766167 - RNA, 19 nt, Human
gaaaucgcuucacauacuc

SEQ ID NO: 766168 - RNA, 24 nt, Human
gauauauacauauacauauacaca

SEQ ID NO: 766169 - RNA, 20 nt, Human
gcaacaaagaaauguccaaa

SEQ ID NO: 766170 - RNA, 21 nt, Human
gcaauaaaacgcacagggacc

SEQ ID NO: 766171 - RNA, 23 nt, Human
gcaguuuaucaaaaagccaaagc

SEQ ID NO: 766172 - RNA, 24 nt, Human
gccaaaaaaacccaaaaacaaaaa

SEQ ID NO: 766173 - RNA, 25 nt, Human
ggaaaaaagaacauuuacaauaugu

SEQ ID NO: 766174 - RNA, 19 nt, Human
ggaaggauggggccagggc

SEQ ID NO: 766175 - RNA, 20 nt, Human
ggaugccaucgauagaugaa

SEQ ID NO: 766176 - RNA, 18 nt, Human
guguacagagugaccuuc

SEQ ID NO: 766177 - RNA, 22 nt, Human
guucccaccggcaggucgcaau

SEQ ID NO: 766178 - RNA, 26 nt, Human
uaaaaaacaaaaagacaaaaaaacag

SEQ ID NO: 766179 - RNA, 18 nt, Human
uaaaaggcaagacuuagc

SEQ ID NO: 766180 - RNA, 18 nt, Human
uaaaaugcccacagauuc

SEQ ID NO: 766181 - RNA, 23 nt, Human
uaaagccaaaaaaacccaaaaac

SEQ ID NO: 766182 - RNA, 25 nt, Human
uaaagccaaaaaaacccaaaaacaa

SEQ ID NO: 766183 - RNA, 23 nt, Human
uaaauaaauuucacaacaaaaug

SEQ ID NO: 766184 - RNA, 26 nt, Human
uaacucggagaucaggaagcagcaag

SEQ ID NO: 766185 - RNA, 24 nt, Human
uaagaaaaacaaaacagacauaaa

SEQ ID NO: 766186 - RNA, 25 nt, Human
uaagaaaaacaaaacagacauaaaa

SEQ ID NO: 766187 - RNA, 26 nt, Human
uaagcugccagauaggaagccauagg

SEQ ID NO: 766188 - RNA, 23 nt, Human
uaaguagaaguggaaaguaaugc

SEQ ID NO: 766189 - RNA, 18 nt, Human
uaauuuucagauuugaag

SEQ ID NO: 766190 - RNA, 23 nt, Human
uacauaaacaagucuuuucuuua

SEQ ID NO: 766191 - RNA, 24 nt, Human
uacguucacuaggccaguccugaa

SEQ ID NO: 766192 - RNA, 21 nt, Human
uagaugaaccaccuuguaaga

SEQ ID NO: 766193 - RNA, 24 nt, Human
uaggaaggauggggccagggcuaa

SEQ ID NO: 766194 - RNA, 18 nt, Human
uagguaacugggauaaug

SEQ ID NO: 766195 - RNA, 20 nt, Human
uauacauauacauauacaca

SEQ ID NO: 766196 - RNA, 25 nt, Human
uauacauauacauauacacacacac

SEQ ID NO: 766197 - RNA, 19 nt, Human
uauauacauauacauauac

SEQ ID NO: 766198 - RNA, 22 nt, Human
uauauacauauacauauacaca

SEQ ID NO: 766199 - RNA, 18 nt, Human
ucacaaaaaaaaaaaaag

SEQ ID NO: 766200 - RNA, 22 nt, Human
ucacaacaaaauguggcucaua

SEQ ID NO: 766201 - RNA, 22 nt, Human
ucacuaggccaguccugaaugu

SEQ ID NO: 766202 - RNA, 23 nt, Human
ucaguuuuacuuauuuggaauuc

SEQ ID NO: 766203 - RNA, 18 nt, Human
uccacagaaaugcaucug

SEQ ID NO: 766204 - RNA, 23 nt, Human
uccacagaaaugcaucuguucac

SEQ ID NO: 766205 - RNA, 19 nt, Human
ucccuuuaaaaacuccaga

SEQ ID NO: 766206 - RNA, 19 nt, Human
ucggaaauacugaacuuau

SEQ ID NO: 766207 - RNA, 23 nt, Human
ucuggcaagaccacaggcuaaaa

SEQ ID NO: 766208 - RNA, 21 nt, Human
ugaaccaccuuguaagagcuu

SEQ ID NO: 766209 - RNA, 19 nt, Human
ugaacugcgaauccuccuc

SEQ ID NO: 766210 - RNA, 19 nt, Human
ugaaguguaaaagauacca

SEQ ID NO: 766211 - RNA, 28 nt, Human
ugcaaacaaccauccuuuugcaaaggua

SEQ ID NO: 766212 - RNA, 18 nt, Human
ugccuggagcugcacaac

SEQ ID NO: 766213 - RNA, 20 nt, Human
ugccuggagcugcacaacga

SEQ ID NO: 766214 - RNA, 24 nt, Human
uggaaaaaagaacauuuacaauau

SEQ ID NO: 766215 - RNA, 18 nt, Human
uggaauguguacgaagaa

SEQ ID NO: 766216 - RNA, 23 nt, Human
uguagguaacugggauaauguuu

SEQ ID NO: 766217 - RNA, 23 nt, Human
ugugcaacaaagaaauguccaaa

SEQ ID NO: 766218 - RNA, 21 nt, Human
uuaaagcugcagcauacuaca

SEQ ID NO: 766219 - RNA, 21 nt, Human
uuaauccuuauucacauuguu

SEQ ID NO: 766220 - RNA, 18 nt, Human
uuacuguaaguagaagug

SEQ ID NO: 766221 - RNA, 23 nt, Human
uucacaaaaaaaaaaaaaggcgg

SEQ ID NO: 766222 - RNA, 28 nt, Human
uugaaaaauaccuaauaaauuuuugguu

SEQ ID NO: 766223 - RNA, 18 nt, Human
uugcaacaugucuucucc

SEQ ID NO: 766224 - RNA, 18 nt, Human
uugcaacaugucuucucc

SEQ ID NO: 766225 - RNA, 21 nt, Human
uuuaauggccaguuuaaagca

SEQ ID NO: 766226 - RNA, 21 nt, Human
uuucaguuuuacuuauuugga

SEQ ID NO: 766227 - RNA, 22 nt, Human
uuucauaguucuuuucauccug

SEQ ID NO: 766228 - RNA, 23 nt, Human
uuuuaagugugcauugugucuuu

SEQ ID NO: 766229 - RNA, 25 nt, Human
aaacggaauaaagagaacacacccc

SEQ ID NO: 766230 - RNA, 23 nt, Human
aaacugaggccagacagcucgga

SEQ ID NO: 766231 - RNA, 22 nt, Human
aaagcagacaaucuggcaacac

SEQ ID NO: 766232 - RNA, 21 nt, Human
aacaugcccaggaggggagga

SEQ ID NO: 766233 - RNA, 26 nt, Human
aaccucacagccaggccagcccccag

SEQ ID NO: 766234 - RNA, 21 nt, Human
aaccugguccauuuuccacag

SEQ ID NO: 766235 - RNA, 18 nt, Human
aacucucccccacauccc

SEQ ID NO: 766236 - RNA, 21 nt, Human
aacuggcucacaagaggccuc

SEQ ID NO: 766237 - RNA, 21 nt, Human
aagagcugccagccuguggcg

SEQ ID NO: 766238 - RNA, 24 nt, Human
aagcacccccaucuaacugcgaga

SEQ ID NO: 766239 - RNA, 20 nt, Human
aagcacuggccuucccacca

SEQ ID NO: 766240 - RNA, 20 nt, Human
aagcaucccgccccaucacc

SEQ ID NO: 766241 - RNA, 25 nt, Human
aaggauccuaccccagcccagccca

SEQ ID NO: 766242 - RNA, 25 nt, Human
aaggauccugcaaguuggaaccucc

SEQ ID NO: 766243 - RNA, 22 nt, Human
aaggccccaaagucccugccuc

SEQ ID NO: 766244 - RNA, 20 nt, Human
aaucuggcaacacagggccg

SEQ ID NO: 766245 - RNA, 19 nt, Human
acacagcccuucaggccuc

SEQ ID NO: 766246 - RNA, 21 nt, Human
acacagcccuucaggccuccu

SEQ ID NO: 766247 - RNA, 22 nt, Human
acaccaucaucauguugggccc

SEQ ID NO: 766248 - RNA, 21 nt, Human
acacugcagccauccagagcu

SEQ ID NO: 766249 - RNA, 23 nt, Human
accacuauguccugugcuggucu

SEQ ID NO: 766250 - RNA, 22 nt, Human
acccaacucccagagagaagcc

SEQ ID NO: 766251 - RNA, 19 nt, Human
accccuccucugcccacac

SEQ ID NO: 766252 - RNA, 25 nt, Human
accuugaccccuccucagccagcag

SEQ ID NO: 766253 - RNA, 19 nt, Human
accuuucucagaaggacuc

SEQ ID NO: 766254 - RNA, 18 nt, Human
acucgaccagccagaaug

SEQ ID NO: 766255 - RNA, 24 nt, Human
acugagcaugaggagccaggcuuu

SEQ ID NO: 766256 - RNA, 28 nt, Human
agagacccaggcccaagcaucccgcccc

SEQ ID NO: 766257 - RNA, 20 nt, Human
agaggccucccacacaccgg

SEQ ID NO: 766258 - RNA, 23 nt, Human
agcagagccuguguaaacaugcc

SEQ ID NO: 766259 - RNA, 19 nt, Human
agcagcccccaccuccagg

SEQ ID NO: 766260 - RNA, 18 nt, Human
agccagcagcccccaccu

SEQ ID NO: 766261 - RNA, 19 nt, Human
agcgagcccagggacacag

SEQ ID NO: 766262 - RNA, 21 nt, Human
agcggagaaaagucggaggga

SEQ ID NO: 766263 - RNA, 21 nt, Human
agcugccagccuguggcgccu

SEQ ID NO: 766264 - RNA, 19 nt, Human
agcuuggggggcugagcug

SEQ ID NO: 766265 - RNA, 23 nt, Human
agcuuucuugaacucaccuugac

SEQ ID NO: 766266 - RNA, 22 nt, Human
aggccucuggucacucgaccag

SEQ ID NO: 766267 - RNA, 20 nt, Human
aggccuggggcagaagcauc

SEQ ID NO: 766268 - RNA, 27 nt, Human
aggccuuggaggaagaggacuggcagu

SEQ ID NO: 766269 - RNA, 23 nt, Human
agguagcuuucuugaacucaccu

SEQ ID NO: 766270 - RNA, 20 nt, Human
auaccuuaaacuucaguugu

SEQ ID NO: 766271 - RNA, 21 nt, Human
aucacaucccaaggccagagg

SEQ ID NO: 766272 - RNA, 18 nt, Human
aucccuuucucacuugca

SEQ ID NO: 766273 - RNA, 18 nt, Human
aucuccaccccaccccca

SEQ ID NO: 766274 - RNA, 22 nt, Human
aucuccaccccacccccacccc

SEQ ID NO: 766275 - RNA, 18 nt, Human
auggccagagugcaaggc

SEQ ID NO: 766276 - RNA, 21 nt, Human
auggccagagugcaaggcgcc

SEQ ID NO: 766277 - RNA, 18 nt, Human
augggauggugagucaag

SEQ ID NO: 766278 - RNA, 23 nt, Human
caaacccugucauucccgggaag

SEQ ID NO: 766279 - RNA, 24 nt, Human
caacaggcagagcugggacugagc

SEQ ID NO: 766280 - RNA, 20 nt, Human
caacucccagagagaagcca

SEQ ID NO: 766281 - RNA, 23 nt, Human
caacucccagagagaagccaggg

SEQ ID NO: 766282 - RNA, 25 nt, Human
caacuucuuggcucucucugcuccc

SEQ ID NO: 766283 - RNA, 19 nt, Human
caagaggccucccacacac

SEQ ID NO: 766284 - RNA, 21 nt, Human
caaggauccuaccccagccca

SEQ ID NO: 766285 - RNA, 24 nt, Human
caagggcuccuggcacugcuggcg

SEQ ID NO: 766286 - RNA, 23 nt, Human
caagucccagugggaagggcugg

SEQ ID NO: 766287 - RNA, 21 nt, Human
caaucacccccccaaccuggu

SEQ ID NO: 766288 - RNA, 22 nt, Human
cacacauucacacaggccucug

SEQ ID NO: 766289 - RNA, 18 nt, Human
cacacuacccccacuccc

SEQ ID NO: 766290 - RNA, 20 nt, Human
caccaccaggcccugugggc

SEQ ID NO: 766291 - RNA, 21 nt, Human
caccccacccccaccccccau

SEQ ID NO: 766292 - RNA, 21 nt, Human
cacccccaccccccaucacag

SEQ ID NO: 766293 - RNA, 18 nt, Human
caccccuccucugcccac

SEQ ID NO: 766294 - RNA, 21 nt, Human
caccccuccucugcccacaca

SEQ ID NO: 766295 - RNA, 19 nt, Human
cacccuuuaccugcaccuc

SEQ ID NO: 766296 - RNA, 19 nt, Human
cacugcuggcggagagacc

SEQ ID NO: 766297 - RNA, 20 nt, Human
cagaagcauccuagucuggu

SEQ ID NO: 766298 - RNA, 21 nt, Human
cagagccuguguaaacaugcc

SEQ ID NO: 766299 - RNA, 19 nt, Human
cagaggccuuggaggaaga

SEQ ID NO: 766300 - RNA, 23 nt, Human
cagcagaaccagcaguuucccuc

SEQ ID NO: 766301 - RNA, 24 nt, Human
cagcagaaccagcaguuucccuca

SEQ ID NO: 766302 - RNA, 22 nt, Human
cagcagguggauccuggccccc

SEQ ID NO: 766303 - RNA, 18 nt, Human
cagccaggcccugucccu

SEQ ID NO: 766304 - RNA, 19 nt, Human
cagccaggcccugucccuc

SEQ ID NO: 766305 - RNA, 24 nt, Human
cagcccuucugcagccuuacugac

SEQ ID NO: 766306 - RNA, 24 nt, Human
cagccucucaguaaaacaaaaccu

SEQ ID NO: 766307 - RNA, 18 nt, Human
cagccugaacaaagucua

SEQ ID NO: 766308 - RNA, 22 nt, Human
cagccuguggcgccuucccuga

SEQ ID NO: 766309 - RNA, 20 nt, Human
cagcuccuggacuggcaccc

SEQ ID NO: 766310 - RNA, 23 nt, Human
cagcugagcagcuguggccccuu

SEQ ID NO: 766311 - RNA, 22 nt, Human
cagcuguggccccuuuaacagg

SEQ ID NO: 766312 - RNA, 21 nt, Human
caggccagcccccagagcaga

SEQ ID NO: 766313 - RNA, 21 nt, Human
caggcuggggacaaccccagg

SEQ ID NO: 766314 - RNA, 24 nt, Human
caguuguagaguuaaaaacuccaa

SEQ ID NO: 766315 - RNA, 27 nt, Human
caucacaggccugguaaggcugggaga

SEQ ID NO: 766316 - RNA, 21 nt, Human
cauccagacccggaaaggacc

SEQ ID NO: 766317 - RNA, 21 nt, Human
cauccgucucccuggcaggcc

SEQ ID NO: 766318 - RNA, 22 nt, Human
cauggccagagugcaaggcgcc

SEQ ID NO: 766319 - RNA, 23 nt, Human
cauuccaggcaggaaaagcaggu

SEQ ID NO: 766320 - RNA, 20 nt, Human
ccaagcccagacccuccgca

SEQ ID NO: 766321 - RNA, 20 nt, Human
ccaccccacccccacccccc

SEQ ID NO: 766322 - RNA, 18 nt, Human
ccacuggguaucucaugc

SEQ ID NO: 766323 - RNA, 25 nt, Human
ccagaaccaggagcggcucccucuc

SEQ ID NO: 766324 - RNA, 22 nt, Human
ccagaaugagacggacuccuug

SEQ ID NO: 766325 - RNA, 22 nt, Human
ccagccaucauugcaaccccaa

SEQ ID NO: 766326 - RNA, 23 nt, Human
ccagcccccagagcagagccugu

SEQ ID NO: 766327 - RNA, 24 nt, Human
ccagcccccagagcagagccugug

SEQ ID NO: 766328 - RNA, 20 nt, Human
ccaggcccaagcaucccgcc

SEQ ID NO: 766329 - RNA, 20 nt, Human
ccaggggcaaaggagcugaa

SEQ ID NO: 766330 - RNA, 21 nt, Human
cccacacaccggcugcagaga

SEQ ID NO: 766331 - RNA, 18 nt, Human
cccagcugucccucagug

SEQ ID NO: 766332 - RNA, 19 nt, Human
cccaggguuugcucaacuc

SEQ ID NO: 766333 - RNA, 21 nt, Human
cccaucuuggcccugcuagaa

SEQ ID NO: 766334 - RNA, 21 nt, Human
ccccaaagucccugccucucu

SEQ ID NO: 766335 - RNA, 26 nt, Human
ccccagaaaccucacagccaggccag

SEQ ID NO: 766336 - RNA, 18 nt, Human
ccccagcccagcccagcu

SEQ ID NO: 766337 - RNA, 19 nt, Human
ccccagggggaacuugggg

SEQ ID NO: 766338 - RNA, 19 nt, Human
ccccaggugccuagguucu

SEQ ID NO: 766339 - RNA, 19 nt, Human
ccccaucaccccauguccg

SEQ ID NO: 766340 - RNA, 18 nt, Human
ccccaucuuggcccugcu

SEQ ID NO: 766341 - RNA, 19 nt, Human
ccccgaagucucagcucag

SEQ ID NO: 766342 - RNA, 21 nt, Human
ccccuccucagccagcagccc

SEQ ID NO: 766343 - RNA, 20 nt, Human
ccuaagacuccagaaccagg

SEQ ID NO: 766344 - RNA, 23 nt, Human
ccucaaacccugucauucccggg

SEQ ID NO: 766345 - RNA, 23 nt, Human
ccucaagggccugaaggcucucc

SEQ ID NO: 766346 - RNA, 23 nt, Human
ccuccagaaccuaccccuggcuu

SEQ ID NO: 766347 - RNA, 26 nt, Human
ccucccaaggugagccaucucuucuu

SEQ ID NO: 766348 - RNA, 25 nt, Human
ccucccacacaccggcugcagagau

SEQ ID NO: 766349 - RNA, 21 nt, Human
ccucccagggugccucuggcc

SEQ ID NO: 766350 - RNA, 22 nt, Human
ccucucacuuucccacugggua

SEQ ID NO: 766351 - RNA, 19 nt, Human
ccugaaagcugggauggga

SEQ ID NO: 766352 - RNA, 22 nt, Human
ccugcagccucuugcccugccu

SEQ ID NO: 766353 - RNA, 23 nt, Human
ccugcagccucuugcccugccuu

SEQ ID NO: 766354 - RNA, 23 nt, Human
ccugccacaagugacuggcccag

SEQ ID NO: 766355 - RNA, 21 nt, Human
ccugcuccugagcggcagcau

SEQ ID NO: 766356 - RNA, 19 nt, Human
ccugcuucccuuucccugg

SEQ ID NO: 766357 - RNA, 24 nt, Human
ccuggcacugagcaugaggagcca

SEQ ID NO: 766358 - RNA, 18 nt, Human
ccuucaggccuccuucuc

SEQ ID NO: 766359 - RNA, 23 nt, Human
ccuucccaccaucagcagaucca

SEQ ID NO: 766360 - RNA, 19 nt, Human
ccuuccccaugcauaaggc

SEQ ID NO: 766361 - RNA, 18 nt, Human
ccuucccuuccucuuugc

SEQ ID NO: 766362 - RNA, 19 nt, Human
ccuucccuuccucuuugcu

SEQ ID NO: 766363 - RNA, 18 nt, Human
cgagagcagcuugggggg

SEQ ID NO: 766364 - RNA, 23 nt, Human
cgaggggguggguugucuggggu

SEQ ID NO: 766365 - RNA, 20 nt, Human
cgccccugcuccugagcggc

SEQ ID NO: 766366 - RNA, 20 nt, Human
cgggaaaacaacuggcucag

SEQ ID NO: 766367 - RNA, 25 nt, Human
cgggcagcagugagggcuggcagag

SEQ ID NO: 766368 - RNA, 23 nt, Human
cuagagcaacaggcagagcuggg

SEQ ID NO: 766369 - RNA, 18 nt, Human
cuaguuucagccuggcac

SEQ ID NO: 766370 - RNA, 19 nt, Human
cucacagccaggccagccu

SEQ ID NO: 766371 - RNA, 19 nt, Human
cucacuugcaucccccagu

SEQ ID NO: 766372 - RNA, 21 nt, Human
cucauaucuacuccccucaaa

SEQ ID NO: 766373 - RNA, 19 nt, Human
cuccaaauaaaauacuaac

SEQ ID NO: 766374 - RNA, 21 nt, Human
cuccaaauaaaauacuaacgg

SEQ ID NO: 766375 - RNA, 22 nt, Human
cuccaccccacccccacccccc

SEQ ID NO: 766376 - RNA, 23 nt, Human
cuccagaaccuaccccuggcucu

SEQ ID NO: 766377 - RNA, 23 nt, Human
cuccccaguguucugccccuggc

SEQ ID NO: 766378 - RNA, 22 nt, Human
cuccgccaagcccagacccucc

SEQ ID NO: 766379 - RNA, 21 nt, Human
cuccucugcccacacagcacu

SEQ ID NO: 766380 - RNA, 18 nt, Human
cucuauaccuggcucccc

SEQ ID NO: 766381 - RNA, 19 nt, Human
cugaccagcuggccuccca

SEQ ID NO: 766382 - RNA, 20 nt, Human
cugccagggcccugaugccc

SEQ ID NO: 766383 - RNA, 20 nt, Human
cugccagggcccugaugccc

SEQ ID NO: 766384 - RNA, 20 nt, Human
cugcccaccuccccacuccu

SEQ ID NO: 766385 - RNA, 21 nt, Human
cugccccuggcacugagcaug

SEQ ID NO: 766386 - RNA, 22 nt, Human
cuggaacacacucuuccugcag

SEQ ID NO: 766387 - RNA, 19 nt, Human
cuggcccagccaucauugc

SEQ ID NO: 766388 - RNA, 25 nt, Human
cuggcccagccaucauugcaacccc

SEQ ID NO: 766389 - RNA, 25 nt, Human
cuucaaaggcaccauccgucucccu

SEQ ID NO: 766390 - RNA, 23 nt, Human
cuugagccuccagaaccuacccc

SEQ ID NO: 766391 - RNA, 21 nt, Human
cuuggaggaagaggacuggca

SEQ ID NO: 766392 - RNA, 19 nt, Human
cuugggacuccggaggacc

SEQ ID NO: 766393 - RNA, 19 nt, Human
cuugguggacuucucccca

SEQ ID NO: 766394 - RNA, 19 nt, Human
cuugucaccagccccgccu

SEQ ID NO: 766395 - RNA, 20 nt, Human
gaaaaacggaauaaagagaa

SEQ ID NO: 766396 - RNA, 21 nt, Human
gaacacacucuuccugcagcc

SEQ ID NO: 766397 - RNA, 23 nt, Human
gacccuccgcagggagccugugg

SEQ ID NO: 766398 - RNA, 19 nt, Human
gacucaguggcuuuuccuc

SEQ ID NO: 766399 - RNA, 19 nt, Human
gacuccuacccugcuuccc

SEQ ID NO: 766400 - RNA, 27 nt, Human
gagaacaaugacgggcagccgguaccc

SEQ ID NO: 766401 - RNA, 18 nt, Human
gagagacccaggcccaag

SEQ ID NO: 766402 - RNA, 18 nt, Human
gagcagagccuguguaaa

SEQ ID NO: 766403 - RNA, 19 nt, Human
gagccacgagcucaugcuc

SEQ ID NO: 766404 - RNA, 21 nt, Human
gagccuccagaaccuaccccu

SEQ ID NO: 766405 - RNA, 19 nt, Human
gagcugccagccuguggcg

SEQ ID NO: 766406 - RNA, 19 nt, Human
gagcugggaucacaucagc

SEQ ID NO: 766407 - RNA, 21 nt, Human
gagcugggaucacaucagcca

SEQ ID NO: 766408 - RNA, 23 nt, Human
gagcuuacaacccuaguucugcu

SEQ ID NO: 766409 - RNA, 24 nt, Human
gaugaaaaggaaacuugggacucc

SEQ ID NO: 766410 - RNA, 19 nt, Human
gcagcagugagggcuggca

SEQ ID NO: 766411 - RNA, 22 nt, Human
gccagagugcaaggcgccuuua

SEQ ID NO: 766412 - RNA, 22 nt, Human
gcccagagguccuucccugggc

SEQ ID NO: 766413 - RNA, 20 nt, Human
gcccugcauguauguuccug

SEQ ID NO: 766414 - RNA, 18 nt, Human
gccuccugacaaacagcc

SEQ ID NO: 766415 - RNA, 19 nt, Human
gccugugccaagcuccugg

SEQ ID NO: 766416 - RNA, 23 nt, Human
gccugugccaagcuccugguuaa

SEQ ID NO: 766417 - RNA, 23 nt, Human
gccuguguaaacaugcccaggag

SEQ ID NO: 766418 - RNA, 18 nt, Human
gcggagagacccaggccc

SEQ ID NO: 766419 - RNA, 22 nt, Human
gcuacauaugagaaacaguuaa

SEQ ID NO: 766420 - RNA, 18 nt, Human
gcuccuguacaauaaaau

SEQ ID NO: 766421 - RNA, 23 nt, Human
gcuguccccaucuuggcccugcu

SEQ ID NO: 766422 - RNA, 19 nt, Human
ggaaaacaacuggcucaca

SEQ ID NO: 766423 - RNA, 22 nt, Human
ggaaacuugggacuccggagga

SEQ ID NO: 766424 - RNA, 22 nt, Human
ggaaaggauccugcaaguugga

SEQ ID NO: 766425 - RNA, 21 nt, Human
ggaacuuggggaggcaaggga

SEQ ID NO: 766426 - RNA, 18 nt, Human
ggagcugaaagacagucc

SEQ ID NO: 766427 - RNA, 19 nt, Human
ggauggugacuaaggcccc

SEQ ID NO: 766428 - RNA, 21 nt, Human
ggcaauacugagaugagaaca

SEQ ID NO: 766429 - RNA, 18 nt, Human
ggcagcagugagggcugg

SEQ ID NO: 766430 - RNA, 22 nt, Human
ggcagccgucacaaagcacccc

SEQ ID NO: 766431 - RNA, 20 nt, Human
ggcauaguaggaacauggag

SEQ ID NO: 766432 - RNA, 22 nt, Human
ggccucaagggccugaaggcuc

SEQ ID NO: 766433 - RNA, 24 nt, Human
ggcggagagacccaggcccaagca

SEQ ID NO: 766434 - RNA, 20 nt, Human
ggcucagugggagcgagagc

SEQ ID NO: 766435 - RNA, 18 nt, Human
ggcugggagauuucccac

SEQ ID NO: 766436 - RNA, 21 nt, Human
gggcagacugcccaccucccc

SEQ ID NO: 766437 - RNA, 25 nt, Human
gggcaggcuggggacaaccccaggu

SEQ ID NO: 766438 - RNA, 19 nt, Human
ggggaacuuggggaggcaa

SEQ ID NO: 766439 - RNA, 27 nt, Human
ggggguggguugucugggggggauccc

SEQ ID NO: 766440 - RNA, 18 nt, Human
ggguaucucaugcugacg

SEQ ID NO: 766441 - RNA, 23 nt, Human
gguggcuggcaugaugggugagg

SEQ ID NO: 766442 - RNA, 23 nt, Human
gucccuggcagacuuacagccuc

SEQ ID NO: 766443 - RNA, 18 nt, Human
gugaaagugaaaggaagg

SEQ ID NO: 766444 - RNA, 21 nt, Human
guggaggcgggaaaacaacug

SEQ ID NO: 766445 - RNA, 23 nt, Human
guuaggcauccucccagggcuca

SEQ ID NO: 766446 - RNA, 23 nt, Human
guuccagcagguggauccuggcc

SEQ ID NO: 766447 - RNA, 24 nt, Human
uaaaaacuccaaauaaaauacuaa

SEQ ID NO: 766448 - RNA, 18 nt, Human
uaaggugaauuagggucc

SEQ ID NO: 766449 - RNA, 24 nt, Human
uaaggugaauuaggguccgagggg

SEQ ID NO: 766450 - RNA, 19 nt, Human
uaccccagcccagcccagc

SEQ ID NO: 766451 - RNA, 21 nt, Human
uacugacagcugucccuggca

SEQ ID NO: 766452 - RNA, 21 nt, Human
uagaagagggauagggguggc

SEQ ID NO: 766453 - RNA, 21 nt, Human
uagaagagggauagggguggc

SEQ ID NO: 766454 - RNA, 22 nt, Human
uagccccccagcccuucugcag

SEQ ID NO: 766455 - RNA, 20 nt, Human
uagggguggcuggcaugaug

SEQ ID NO: 766456 - RNA, 31 nt, Human
uaggguccgaggggguggguugucugggguu

SEQ ID NO: 766457 - RNA, 21 nt, Human
ucaagcagccugauccugaac

SEQ ID NO: 766458 - RNA, 19 nt, Human
ucaagggucaccaugcccc

SEQ ID NO: 766459 - RNA, 19 nt, Human
ucacaagaggccucccaca

SEQ ID NO: 766460 - RNA, 24 nt, Human
ucacaccaucaucauguugggccc

SEQ ID NO: 766461 - RNA, 24 nt, Human
ucauccauuuacccuuccacaauc

SEQ ID NO: 766462 - RNA, 20 nt, Human
ucauugcaaccccaagccaa

SEQ ID NO: 766463 - RNA, 21 nt, Human
ucauugcaaccccaagccaag

SEQ ID NO: 766464 - RNA, 26 nt, Human
uccaccccacccccaccccccaucac

SEQ ID NO: 766465 - RNA, 19 nt, Human
uccaccccacccccacccu

SEQ ID NO: 766466 - RNA, 18 nt, Human
uccagagcuugagggagc

SEQ ID NO: 766467 - RNA, 21 nt, Human
ucccaaggccagagggcugcu

SEQ ID NO: 766468 - RNA, 18 nt, Human
uccccaguguucugcccc

SEQ ID NO: 766469 - RNA, 24 nt, Human
ucccgccccaucaccccaugucca

SEQ ID NO: 766470 - RNA, 18 nt, Human
uccucagccagcagcccc

SEQ ID NO: 766471 - RNA, 21 nt, Human
uccucagccagcagcccccac

SEQ ID NO: 766472 - RNA, 23 nt, Human
uccugagccacgagcucaugcuc

SEQ ID NO: 766473 - RNA, 24 nt, Human
uccugcaaguuggaaccuccuaag

SEQ ID NO: 766474 - RNA, 20 nt, Human
uccuuguguagccccccagc

SEQ ID NO: 766475 - RNA, 24 nt, Human
uccuuguguagccccccagcccuu

SEQ ID NO: 766476 - RNA, 24 nt, Human
ucuccgcauccucucacuuuccca

SEQ ID NO: 766477 - RNA, 24 nt, Human
ucucugcuccccaaacccuggccc

SEQ ID NO: 766478 - RNA, 21 nt, Human
ucugggaggagacucaguggc

SEQ ID NO: 766479 - RNA, 18 nt, Human
ucuucgagggggguggug

SEQ ID NO: 766480 - RNA, 21 nt, Human
ugaaaaacggaauaaagagaa

SEQ ID NO: 766481 - RNA, 20 nt, Human
ugaacucucccccacauccc

SEQ ID NO: 766482 - RNA, 18 nt, Human
ugaacuggggggagcugg

SEQ ID NO: 766483 - RNA, 18 nt, Human
ugacaacaggaaugagau

SEQ ID NO: 766484 - RNA, 19 nt, Human
ugacaacaggaaugagaug

SEQ ID NO: 766485 - RNA, 20 nt, Human
ugacccagcaacugcaaagg

SEQ ID NO: 766486 - RNA, 20 nt, Human
ugacgggcagcagugagggg

SEQ ID NO: 766487 - RNA, 22 nt, Human
ugagaaacaguuaaaaauaaau

SEQ ID NO: 766488 - RNA, 19 nt, Human
ugagaugaggugauaccau

SEQ ID NO: 766489 - RNA, 24 nt, Human
ugagccacgagcucaugcucuugg

SEQ ID NO: 766490 - RNA, 26 nt, Human
ugagccacgagcucaugcucuugggg

SEQ ID NO: 766491 - RNA, 23 nt, Human
ugaggccagacagcucggaccag

SEQ ID NO: 766492 - RNA, 19 nt, Human
ugauccugaacucuccccc

SEQ ID NO: 766493 - RNA, 21 nt, Human
ugcacacauucacacaggccu

SEQ ID NO: 766494 - RNA, 21 nt, Human
ugcacccuuuaccugcaccuc

SEQ ID NO: 766495 - RNA, 19 nt, Human
ugcagcugagccagaaaac

SEQ ID NO: 766496 - RNA, 23 nt, Human
ugcccagagguccuucccugggc

SEQ ID NO: 766497 - RNA, 19 nt, Human
ugcccugccuugucaccag

SEQ ID NO: 766498 - RNA, 21 nt, Human
ugcugggggauuaucagcugg

SEQ ID NO: 766499 - RNA, 18 nt, Human
ugcuuuaucaucacaucc

SEQ ID NO: 766500 - RNA, 23 nt, Human
uggacuaaguuuuccccaaauac

SEQ ID NO: 766501 - RNA, 26 nt, Human
uggcagacuuacagccucucaguaaa

SEQ ID NO: 766502 - RNA, 18 nt, Human
uggcagagcggagaaaag

SEQ ID NO: 766503 - RNA, 20 nt, Human
uggcagagcggagaaaaguc

SEQ ID NO: 766504 - RNA, 29 nt, Human
uggcauccucuuuugccaguauuggguuu

SEQ ID NO: 766505 - RNA, 23 nt, Human
uggcuccccaguguucugccccu

SEQ ID NO: 766506 - RNA, 19 nt, Human
ugggaggagacucaguggc

SEQ ID NO: 766507 - RNA, 21 nt, Human
ugggaugggauggugagucaa

SEQ ID NO: 766508 - RNA, 20 nt, Human
ugggcucacagauguugcug

SEQ ID NO: 766509 - RNA, 23 nt, Human
uggggaggcaagggacugaccag

SEQ ID NO: 766510 - RNA, 18 nt, Human
uggggccuggggugcugg

SEQ ID NO: 766511 - RNA, 18 nt, Human
uggggggcugagcuggaa

SEQ ID NO: 766512 - RNA, 21 nt, Human
ugggugaggggaacaugagaa

SEQ ID NO: 766513 - RNA, 19 nt, Human
uguagccccccagcccuuc

SEQ ID NO: 766514 - RNA, 23 nt, Human
uguccagccacagcuccuggacu

SEQ ID NO: 766515 - RNA, 22 nt, Human
ugucuggggucagccuuggagg

SEQ ID NO: 766516 - RNA, 23 nt, Human
ugucuggggucagccuuggaggc

SEQ ID NO: 766517 - RNA, 22 nt, Human
uguguagccccccagcccuucu

SEQ ID NO: 766518 - RNA, 23 nt, Human
uguuaaagaauggaaggcaggcc

SEQ ID NO: 766519 - RNA, 22 nt, Human
uguugcuugagccuccagaacc

SEQ ID NO: 766520 - RNA, 22 nt, Human
uguuucuucucucuugucagau

SEQ ID NO: 766521 - RNA, 22 nt, Human
uucuggguccuccgccaagccc

SEQ ID NO: 766522 - RNA, 21 nt, Human
uuggaggaagaggacuggcag

SEQ ID NO: 766523 - RNA, 27 nt, Human
uuggggcagauguggccugugccaagc

SEQ ID NO: 766524 - RNA, 23 nt, Human
uuucucagaaggacuccuacccu

SEQ ID NO: 766525 - RNA, 18 nt, Human
uuugcaaucaccccccca

SEQ ID NO: 766526 - RNA, 19 nt, Human
uuugcaaucacccccccaa

SEQ ID NO: 766527 - RNA, 21 nt, Human
aaaacagaauccccugaccuc

SEQ ID NO: 766528 - RNA, 22 nt, Human
aaaacagaauccccugaccucc

SEQ ID NO: 766529 - RNA, 23 nt, Human
aaaaccuuuccugaagaccacag

SEQ ID NO: 766530 - RNA, 20 nt, Human
aacaggggaaaugaaaaaaa

SEQ ID NO: 766531 - RNA, 18 nt, Human
aaccaaaacagaaucccc

SEQ ID NO: 766532 - RNA, 24 nt, Human
aagacaaaccaaaacagaaucccc

SEQ ID NO: 766533 - RNA, 21 nt, Human
aagaggagaauggccguagug

SEQ ID NO: 766534 - RNA, 22 nt, Human
aagugcuggcauggaugggugg

SEQ ID NO: 766535 - RNA, 24 nt, Human
aagugcuggcauggaugggugggg

SEQ ID NO: 766536 - RNA, 20 nt, Human
aaucccacuccuccugcugc

SEQ ID NO: 766537 - RNA, 23 nt, Human
acgccaaacuaacaaacaaaaca

SEQ ID NO: 766538 - RNA, 19 nt, Human
acugcaccuggcccucaga

SEQ ID NO: 766539 - RNA, 22 nt, Human
agaauccccugaccuccugccc

SEQ ID NO: 766540 - RNA, 20 nt, Human
agaggagcgagggugcucca

SEQ ID NO: 766541 - RNA, 23 nt, Human
agccagcaaguuguagcaaccuc

SEQ ID NO: 766542 - RNA, 28 nt, Human
agccuccagagguggccagugagaguag

SEQ ID NO: 766543 - RNA, 25 nt, Human
aggagaugggggggggcauauggag

SEQ ID NO: 766544 - RNA, 19 nt, Human
aggagcgcccaagaggaga

SEQ ID NO: 766545 - RNA, 18 nt, Human
aggcagagccuccagagg

SEQ ID NO: 766546 - RNA, 20 nt, Human
aggcagagccuccagaggug

SEQ ID NO: 766547 - RNA, 22 nt, Human
aggcugaggagcgcccaagagg

SEQ ID NO: 766548 - RNA, 23 nt, Human
agguggccagugagaguaggugc

SEQ ID NO: 766549 - RNA, 19 nt, Human
aguggcaacaggccaaggc

SEQ ID NO: 766550 - RNA, 21 nt, Human
auccgguagcccauguugagc

SEQ ID NO: 766551 - RNA, 22 nt, Human
auccuuuuucaaaaccuuuccu

SEQ ID NO: 766552 - RNA, 19 nt, Human
augggaaggagggcagaaa

SEQ ID NO: 766553 - RNA, 22 nt, Human
caaaacagaauccccugaccuc

SEQ ID NO: 766554 - RNA, 22 nt, Human
caaaccaaaacagaauccccug

SEQ ID NO: 766555 - RNA, 23 nt, Human
caaaccaaaacagaauccccuga

SEQ ID NO: 766556 - RNA, 18 nt, Human
caaacuaacaaacaaaac

SEQ ID NO: 766557 - RNA, 21 nt, Human
caaccuccaccccuaacgcca

SEQ ID NO: 766558 - RNA, 23 nt, Human
caauugcgucacccucacucucc

SEQ ID NO: 766559 - RNA, 19 nt, Human
cacccucacucuccuggga

SEQ ID NO: 766560 - RNA, 19 nt, Human
caccugaggcagaaggggu

SEQ ID NO: 766561 - RNA, 21 nt, Human
cacugcucaggcccgugaucc

SEQ ID NO: 766562 - RNA, 20 nt, Human
cagaaaggucacagugaggc

SEQ ID NO: 766563 - RNA, 18 nt, Human
cagagcuaguagccagga

SEQ ID NO: 766564 - RNA, 21 nt, Human
cagcagaguaggccuggcugg

SEQ ID NO: 766565 - RNA, 20 nt, Human
caggaagcgccaccucagca

SEQ ID NO: 766566 - RNA, 18 nt, Human
caggacagucccugaaga

SEQ ID NO: 766567 - RNA, 24 nt, Human
caggagacccaccccucuccccuc

SEQ ID NO: 766568 - RNA, 22 nt, Human
cagggcccuugggaaaggcaga

SEQ ID NO: 766569 - RNA, 23 nt, Human
caguagcaggggcuggggaccag

SEQ ID NO: 766570 - RNA, 22 nt, Human
caucaccuccaacgggucugca

SEQ ID NO: 766571 - RNA, 22 nt, Human
cauccaguguaaagcuuggggc

SEQ ID NO: 766572 - RNA, 19 nt, Human
ccaccccucuccccucaga

SEQ ID NO: 766573 - RNA, 20 nt, Human
ccagggcucccauccuuccu

SEQ ID NO: 766574 - RNA, 19 nt, Human
cccaccccucuccccucag

SEQ ID NO: 766575 - RNA, 24 nt, Human
cccaccccucuccccucagagcag

SEQ ID NO: 766576 - RNA, 18 nt, Human
cccacccucugccagggc

SEQ ID NO: 766577 - RNA, 19 nt, Human
ccccggcacccccacugcu

SEQ ID NO: 766578 - RNA, 25 nt, Human
ccccggcacccccacugcucaggcc

SEQ ID NO: 766579 - RNA, 20 nt, Human
ccccucagagcagcagggga

SEQ ID NO: 766580 - RNA, 20 nt, Human
ccccugaccuccugcccagg

SEQ ID NO: 766581 - RNA, 19 nt, Human
cccucagagcuguccucau

SEQ ID NO: 766582 - RNA, 18 nt, Human
cccuugggaaaggcagag

SEQ ID NO: 766583 - RNA, 22 nt, Human
ccggcacugcaccuggcccuca

SEQ ID NO: 766584 - RNA, 21 nt, Human
ccucacucuccugggagcgga

SEQ ID NO: 766585 - RNA, 22 nt, Human
ccuccagggacaugaaagcagg

SEQ ID NO: 766586 - RNA, 27 nt, Human
ccuccugcucuuuuuuucagggcuggg

SEQ ID NO: 766587 - RNA, 20 nt, Human
cgccaaacuaacaaacaaaa

SEQ ID NO: 766588 - RNA, 22 nt, Human
cgccaaacuaacaaacaaaaca

SEQ ID NO: 766589 - RNA, 21 nt, Human
cuccagagguggccagugaga

SEQ ID NO: 766590 - RNA, 24 nt, Human
cuccagggcucccauccuuccuuu

SEQ ID NO: 766591 - RNA, 24 nt, Human
cuccugggagcggagcaacaaaaa

SEQ ID NO: 766592 - RNA, 24 nt, Human
cugggagcggagcaacaaaaaggc

SEQ ID NO: 766593 - RNA, 22 nt, Human
cuugcccacuccagggcuccca

SEQ ID NO: 766594 - RNA, 23 nt, Human
gaaaggucacagugaggcugagg

SEQ ID NO: 766595 - RNA, 21 nt, Human
gacagucccugaagacaguuc

SEQ ID NO: 766596 - RNA, 23 nt, Human
gacccauccuuuuucaaaaccuu

SEQ ID NO: 766597 - RNA, 20 nt, Human
gcaacaggccaaggcgagcc

SEQ ID NO: 766598 - RNA, 18 nt, Human
gcagaaagggcagagaag

SEQ ID NO: 766599 - RNA, 21 nt, Human
gccguagugcagaagugcugg

SEQ ID NO: 766600 - RNA, 20 nt, Human
gcuggcauggaugggugggg

SEQ ID NO: 766601 - RNA, 20 nt, Human
gcuggggaccagggcuggag

SEQ ID NO: 766602 - RNA, 19 nt, Human
ggagaggagcgagggugcu

SEQ ID NO: 766603 - RNA, 23 nt, Human
ggagcuagccuugcaggcuaggg

SEQ ID NO: 766604 - RNA, 20 nt, Human
ggaugggaaggagggcagaa

SEQ ID NO: 766605 - RNA, 25 nt, Human
ggaugggaaggagggcagaaagggc

SEQ ID NO: 766606 - RNA, 22 nt, Human
ggcucaggagacccaccccucu

SEQ ID NO: 766607 - RNA, 21 nt, Human
ggcuggggaccagggcuggag

SEQ ID NO: 766608 - RNA, 22 nt, Human
gggagcggagcaacaaaaaggc

SEQ ID NO: 766609 - RNA, 23 nt, Human
gggagcggagcaacaaaaaggcu

SEQ ID NO: 766610 - RNA, 22 nt, Human
gggcagaaagggcagagaaggg

SEQ ID NO: 766611 - RNA, 24 nt, Human
gggccagagcuaguagccaggaga

SEQ ID NO: 766612 - RNA, 20 nt, Human
guagcaaccuccaccccuaa

SEQ ID NO: 766613 - RNA, 21 nt, Human
gugcagugccccacccucugc

SEQ ID NO: 766614 - RNA, 23 nt, Human
gugcuggcauggauggguggggu

SEQ ID NO: 766615 - RNA, 19 nt, Human
guguccccuccugcucuuu

SEQ ID NO: 766616 - RNA, 24 nt, Human
uaacgccaaacuaacaaacaaaac

SEQ ID NO: 766617 - RNA, 21 nt, Human
ucagagcagcaggggacagag

SEQ ID NO: 766618 - RNA, 22 nt, Human
ucagcagguggccuggucuugc

SEQ ID NO: 766619 - RNA, 20 nt, Human
ucagcuuguuccuccccacc

SEQ ID NO: 766620 - RNA, 26 nt, Human
ucaggagacccaccccucuccccuca

SEQ ID NO: 766621 - RNA, 20 nt, Human
uccacagcgaccucagcagg

SEQ ID NO: 766622 - RNA, 19 nt, Human
uccaguguaaagcuugggg

SEQ ID NO: 766623 - RNA, 22 nt, Human
uccccugaccuccugcccaggg

SEQ ID NO: 766624 - RNA, 21 nt, Human
ucccugaagacaguucagcuu

SEQ ID NO: 766625 - RNA, 24 nt, Human
uccgaaagccagcaaguuguagca

SEQ ID NO: 766626 - RNA, 22 nt, Human
uccuccccaccugaggcagaag

SEQ ID NO: 766627 - RNA, 24 nt, Human
uccugcucuuuuuuucagggcugg

SEQ ID NO: 766628 - RNA, 23 nt, Human
ucuccccucagagcagcagggga

SEQ ID NO: 766629 - RNA, 19 nt, Human
ucuuuggucuuuguggcgg

SEQ ID NO: 766630 - RNA, 18 nt, Human
ugaaagcaggagaugggg

SEQ ID NO: 766631 - RNA, 24 nt, Human
ugaagacaguucagcuuguuccuc

SEQ ID NO: 766632 - RNA, 24 nt, Human
ugagcagcaucaccuccaacgggu

SEQ ID NO: 766633 - RNA, 21 nt, Human
uggagggucuagcugggccgg

SEQ ID NO: 766634 - RNA, 25 nt, Human
uggcagaaaggucacagugaggcug

SEQ ID NO: 766635 - RNA, 18 nt, Human
ugggaugggaaggagggc

SEQ ID NO: 766636 - RNA, 19 nt, Human
ugggaugggaaggagggca

SEQ ID NO: 766637 - RNA, 21 nt, Human
ugggaugggaaggagggcaga

SEQ ID NO: 766638 - RNA, 21 nt, Human
ugggcuccgcucuaacacugg

SEQ ID NO: 766639 - RNA, 18 nt, Human
uggggcugcuggggaggg

SEQ ID NO: 766640 - RNA, 19 nt, Human
ugggggggggcauauggag

SEQ ID NO: 766641 - RNA, 24 nt, Human
ugggguaaggugcagugccccacc

SEQ ID NO: 766642 - RNA, 18 nt, Human
ugguggggaagacaaacc

SEQ ID NO: 766643 - RNA, 26 nt, Human
uguaaagcuuggggcugcuggggagg

SEQ ID NO: 766644 - RNA, 20 nt, Human
uuggucuuuguggcggcuca

SEQ ID NO: 766645 - RNA, 21 nt, Human
uuguggcggcucagcaugugg

SEQ ID NO: 766646 - RNA, 21 nt, Human
aaaaacagacagacuucagug

SEQ ID NO: 766647 - RNA, 20 nt, Human
aaaaugccaaaccuaagugg

SEQ ID NO: 766648 - RNA, 20 nt, Human
aaaauggugaaaccccaucu

SEQ ID NO: 766649 - RNA, 22 nt, Human
aaacuguaauccacaauauucu

SEQ ID NO: 766650 - RNA, 21 nt, Human
aaagaaaugagguaugaugaa

SEQ ID NO: 766651 - RNA, 23 nt, Human
aaauauaaaauaugaaaagucuu

SEQ ID NO: 766652 - RNA, 22 nt, Human
aacaaaaucaguagaaauauaa

SEQ ID NO: 766653 - RNA, 20 nt, Human
aaccauauaauggaaaaaac

SEQ ID NO: 766654 - RNA, 27 nt, Human
aaccauauaauggaaaaaacaagaaac

SEQ ID NO: 766655 - RNA, 18 nt, Human
aacugcuugaacccggga

SEQ ID NO: 766656 - RNA, 23 nt, Human
aagaacagaccauuuuccuuuga

SEQ ID NO: 766657 - RNA, 19 nt, Human
aagaaccuauauuucaaag

SEQ ID NO: 766658 - RNA, 24 nt, Human
aagcagagguugcagugagccaag

SEQ ID NO: 766659 - RNA, 25 nt, Human
aagcagagguugcagugagccaaga

SEQ ID NO: 766660 - RNA, 23 nt, Human
aagcaggaaacugcuugaacccg

SEQ ID NO: 766661 - RNA, 27 nt, Human
aauaaaaauucccucuaauaauguaga

SEQ ID NO: 766662 - RNA, 25 nt, Human
aauaauaaaauagaaauucaguaau

SEQ ID NO: 766663 - RNA, 24 nt, Human
aauacacuaaaauaauacugagac

SEQ ID NO: 766664 - RNA, 21 nt, Human
aaugaccaccucauuaauaaa

SEQ ID NO: 766665 - RNA, 21 nt, Human
aauuauacuaccaagggggcc

SEQ ID NO: 766666 - RNA, 20 nt, Human
acacaaauguaauaaugacu

SEQ ID NO: 766667 - RNA, 23 nt, Human
acagagcgagacuccgucucaaa

SEQ ID NO: 766668 - RNA, 18 nt, Human
accccaucucuacuaaaa

SEQ ID NO: 766669 - RNA, 24 nt, Human
accugaggucaggaguucaagacu

SEQ ID NO: 766670 - RNA, 18 nt, Human
acucagaagaaaaauacu

SEQ ID NO: 766671 - RNA, 21 nt, Human
acuccgugacagcaaguucac

SEQ ID NO: 766672 - RNA, 24 nt, Human
acugcauuccagccugggugacag

SEQ ID NO: 766673 - RNA, 26 nt, Human
acugcauuccagccugggugacagag

SEQ ID NO: 766674 - RNA, 23 nt, Human
agaaagauguuagcuguuaagug

SEQ ID NO: 766675 - RNA, 18 nt, Human
agacagacuucaccuaca

SEQ ID NO: 766676 - RNA, 22 nt, Human
agacagccaauauaaaaaacag

SEQ ID NO: 766677 - RNA, 19 nt, Human
agacuucaccuacagcagu

SEQ ID NO: 766678 - RNA, 20 nt, Human
agagaucauuuuugucuaca

SEQ ID NO: 766679 - RNA, 24 nt, Human
agagguugcagugagccaagaucg

SEQ ID NO: 766680 - RNA, 23 nt, Human
agaucaccugaggucaggaguuc

SEQ ID NO: 766681 - RNA, 21 nt, Human
agccuggcaugguggcauguc

SEQ ID NO: 766682 - RNA, 24 nt, Human
agccugggugacagagcgagacuc

SEQ ID NO: 766683 - RNA, 26 nt, Human
aggcgggcagaucaccugaggucagg

SEQ ID NO: 766684 - RNA, 18 nt, Human
agguacuaagguacuaac

SEQ ID NO: 766685 - RNA, 24 nt, Human
aguggcucaggccuguaaugucag

SEQ ID NO: 766686 - RNA, 18 nt, Human
aguguucugccuuggcua

SEQ ID NO: 766687 - RNA, 22 nt, Human
auaaaacaggcacuggcaguga

SEQ ID NO: 766688 - RNA, 21 nt, Human
auaaauacaacccaggaacac

SEQ ID NO: 766689 - RNA, 24 nt, Human
aucgugccacugcauuccagccug

SEQ ID NO: 766690 - RNA, 20 nt, Human
augaagcacugauaugaaca

SEQ ID NO: 766691 - RNA, 24 nt, Human
augguggcaugucuguaaucccag

SEQ ID NO: 766692 - RNA, 19 nt, Human
caaaaccucacaggcaaga

SEQ ID NO: 766693 - RNA, 21 nt, Human
caaaaccuuaacacuaguuau

SEQ ID NO: 766694 - RNA, 23 nt, Human
caaauuuucucuucauauuagac

SEQ ID NO: 766695 - RNA, 22 nt, Human
caagaguugaaucgauaaccau

SEQ ID NO: 766696 - RNA, 24 nt, Human
caagaucgugccacugcauuccag

SEQ ID NO: 766697 - RNA, 24 nt, Human
caaggcgggcagaucaccugaggu

SEQ ID NO: 766698 - RNA, 26 nt, Human
caaggcgggcagaucaccugagguca

SEQ ID NO: 766699 - RNA, 21 nt, Human
cacaaauguaauaaugaccac

SEQ ID NO: 766700 - RNA, 22 nt, Human
cacaaauguaauaaugaccacc

SEQ ID NO: 766701 - RNA, 24 nt, Human
caccuacagcagucucuugaaaac

SEQ ID NO: 766702 - RNA, 23 nt, Human
caccugaggucaggaguucaaga

SEQ ID NO: 766703 - RNA, 19 nt, Human
cacugcauuccagccuggg

SEQ ID NO: 766704 - RNA, 19 nt, Human
cacugcauuccagccuggg

SEQ ID NO: 766705 - RNA, 22 nt, Human
cacugcauuccagccuggguga

SEQ ID NO: 766706 - RNA, 24 nt, Human
cacugcauuccagccugggugaca

SEQ ID NO: 766707 - RNA, 25 nt, Human
cacugcauuccagccugggugacag

SEQ ID NO: 766708 - RNA, 22 nt, Human
cagacagacuucagugaaagcu

SEQ ID NO: 766709 - RNA, 24 nt, Human
cagaucaccugaggucaggaguuc

SEQ ID NO: 766710 - RNA, 27 nt, Human
cagaucaccugaggucaggaguucaag

SEQ ID NO: 766711 - RNA, 24 nt, Human
cagcacuuugggaggccaaggcgg

SEQ ID NO: 766712 - RNA, 18 nt, Human
caggaguucaagacuaga

SEQ ID NO: 766713 - RNA, 24 nt, Human
caggccuguaaugucagcacuuug

SEQ ID NO: 766714 - RNA, 24 nt, Human
cagugacaaauguuguuaggggaa

SEQ ID NO: 766715 - RNA, 22 nt, Human
cauuccagccugggugacagag

SEQ ID NO: 766716 - RNA, 23 nt, Human
cauuccagccugggugacagagc

SEQ ID NO: 766717 - RNA, 23 nt, Human
cauuuuacagauaaugcaaauua

SEQ ID NO: 766718 - RNA, 20 nt, Human
ccacugcauuccagccuggg

SEQ ID NO: 766719 - RNA, 20 nt, Human
ccacugcauuccagccuggg

SEQ ID NO: 766720 - RNA, 21 nt, Human
ccacugcauuccagccugggu

SEQ ID NO: 766721 - RNA, 21 nt, Human
ccacugcauuccagccugggu

SEQ ID NO: 766722 - RNA, 23 nt, Human
ccacugcauuccagccuggguga

SEQ ID NO: 766723 - RNA, 24 nt, Human
ccacugcauuccagccugggugac

SEQ ID NO: 766724 - RNA, 22 nt, Human
ccauucuucucaugaaugacaa

SEQ ID NO: 766725 - RNA, 22 nt, Human
ccuauauuucaaagcuccaaaa

SEQ ID NO: 766726 - RNA, 20 nt, Human
ccugauaaagcaagcuuugg

SEQ ID NO: 766727 - RNA, 22 nt, Human
ccugggugacagagcgagacuc

SEQ ID NO: 766728 - RNA, 18 nt, Human
ccuuuguuaacaaaggcu

SEQ ID NO: 766729 - RNA, 23 nt, Human
ccuuuuguuuguuuuggaaccua

SEQ ID NO: 766730 - RNA, 24 nt, Human
cgggaagcagagguugcagugagc

SEQ ID NO: 766731 - RNA, 24 nt, Human
cgggcagaucaccugaggucagga

SEQ ID NO: 766732 - RNA, 24 nt, Human
cgucucaaaugaaaaaaaaaaaaa

SEQ ID NO: 766733 - RNA, 20 nt, Human
cucagaagaaaaauacugua

SEQ ID NO: 766734 - RNA, 24 nt, Human
cucaggccuguaaugucagcacuu

SEQ ID NO: 766735 - RNA, 18 nt, Human
cucuugaaaacuugguug

SEQ ID NO: 766736 - RNA, 24 nt, Human
cugaagcaggaaacugcuugaacc

SEQ ID NO: 766737 - RNA, 18 nt, Human
cugaauugaaauaucucu

SEQ ID NO: 766738 - RNA, 21 nt, Human
cugacugaauugaaauaucuc

SEQ ID NO: 766739 - RNA, 24 nt, Human
cugcuugaacccgggaagcagagg

SEQ ID NO: 766740 - RNA, 18 nt, Human
cuguaaucccagcuacuu

SEQ ID NO: 766741 - RNA, 20 nt, Human
cuguaaucccagcuacuugg

SEQ ID NO: 766742 - RNA, 23 nt, Human
cuuggagagcuguuuaaagaaau

SEQ ID NO: 766743 - RNA, 21 nt, Human
cuuggcuagacagacuucacc

SEQ ID NO: 766744 - RNA, 22 nt, Human
gaaaaucugaaaucaucuugcc

SEQ ID NO: 766745 - RNA, 19 nt, Human
gaagcacugauaugaacaa

SEQ ID NO: 766746 - RNA, 21 nt, Human
gaaguauuaaagacuuuuccc

SEQ ID NO: 766747 - RNA, 21 nt, Human
gacaaaggacauuuuuacuac

SEQ ID NO: 766748 - RNA, 19 nt, Human
gacaagggcaauguguucc

SEQ ID NO: 766749 - RNA, 21 nt, Human
gacagagcgagacuccgucuc

SEQ ID NO: 766750 - RNA, 18 nt, Human
gagcuuccuuuuugaauc

SEQ ID NO: 766751 - RNA, 18 nt, Human
gagguugcagugagccaa

SEQ ID NO: 766752 - RNA, 23 nt, Human
gaucaccugaggucaggaguuca

SEQ ID NO: 766753 - RNA, 24 nt, Human
gaucaccugaggucaggaguucaa

SEQ ID NO: 766754 - RNA, 24 nt, Human
gcauuccagccugggugacagagc

SEQ ID NO: 766755 - RNA, 24 nt, Human
gccaaaauggugaaaccccaucuc

SEQ ID NO: 766756 - RNA, 20 nt, Human
gccaaaccuaaguggaaauc

SEQ ID NO: 766757 - RNA, 20 nt, Human
gccaagaucgugccacugca

SEQ ID NO: 766758 - RNA, 19 nt, Human
gccacugcauuccagccug

SEQ ID NO: 766759 - RNA, 24 nt, Human
gccacugcauuccagccuggguga

SEQ ID NO: 766760 - RNA, 20 nt, Human
ggaagcagagguugcaguga

SEQ ID NO: 766761 - RNA, 25 nt, Human
ggcagaucaccugaggucaggaguu

SEQ ID NO: 766762 - RNA, 19 nt, Human
ggcaugucuguaaucccag

SEQ ID NO: 766763 - RNA, 20 nt, Human
ggccaaaauggugaaacccc

SEQ ID NO: 766764 - RNA, 23 nt, Human
ggcgcaguggcucaggccuguaa

SEQ ID NO: 766765 - RNA, 19 nt, Human
ggcugggcgcaguggcuca

SEQ ID NO: 766766 - RNA, 20 nt, Human
gggcaugguccugauaaagc

SEQ ID NO: 766767 - RNA, 19 nt, Human
guaugacaaaggacauuuu

SEQ ID NO: 766768 - RNA, 24 nt, Human
uaaaaaaauuuuucagauauagga

SEQ ID NO: 766769 - RNA, 18 nt, Human
uaaaaaacagacagacuu

SEQ ID NO: 766770 - RNA, 27 nt, Human
uaaaaaauacagugagcuaggucaaaa

SEQ ID NO: 766771 - RNA, 22 nt, Human
uaaaaugugaugcuuuauacaa

SEQ ID NO: 766772 - RNA, 26 nt, Human
uaaauaaaugcacuauuuuauacaga

SEQ ID NO: 766773 - RNA, 21 nt, Human
uaaauuaugaaaauuuaacuc

SEQ ID NO: 766774 - RNA, 24 nt, Human
uaaggaacauaccuggcugcuggc

SEQ ID NO: 766775 - RNA, 19 nt, Human
uaauagccucaaaacugua

SEQ ID NO: 766776 - RNA, 24 nt, Human
uaauccucaauuuaacacacccaa

SEQ ID NO: 766777 - RNA, 23 nt, Human
uaauuagcauuuuacuccgugac

SEQ ID NO: 766778 - RNA, 24 nt, Human
uaauuuauuaaagccuuacacugc

SEQ ID NO: 766779 - RNA, 18 nt, Human
uacuaacaagacaagggc

SEQ ID NO: 766780 - RNA, 21 nt, Human
uagaauuuaaaggaggccaac

SEQ ID NO: 766781 - RNA, 20 nt, Human
uagagcuuuaagcauuuaac

SEQ ID NO: 766782 - RNA, 20 nt, Human
uauaaagaaauacuaaagac

SEQ ID NO: 766783 - RNA, 24 nt, Human
uaugaacaaaaccucacaggcaag

SEQ ID NO: 766784 - RNA, 21 nt, Human
uauguuuauguuuugaacugu

SEQ ID NO: 766785 - RNA, 23 nt, Human
uauuggcugggcgcaguggcuca

SEQ ID NO: 766786 - RNA, 23 nt, Human
ucaccugaggucaggaguucaag

SEQ ID NO: 766787 - RNA, 22 nt, Human
ucauucaggagccuuuguugau

SEQ ID NO: 766788 - RNA, 21 nt, Human
uccagccugggugacagagcg

SEQ ID NO: 766789 - RNA, 23 nt, Human
uccagccugggugacagagcgag

SEQ ID NO: 766790 - RNA, 24 nt, Human
uccagccugggugacagagcgaga

SEQ ID NO: 766791 - RNA, 23 nt, Human
ucgugccacugcauuccagccug

SEQ ID NO: 766792 - RNA, 23 nt, Human
ucucaaaugaaaaaaaaaaaaaa

SEQ ID NO: 766793 - RNA, 22 nt, Human
ucuccaaaaauacacuuuucau

SEQ ID NO: 766794 - RNA, 20 nt, Human
ucucccuuggcagugguggu

SEQ ID NO: 766795 - RNA, 22 nt, Human
ucucuacuaaaaauauuaaaaa

SEQ ID NO: 766796 - RNA, 18 nt, Human
ucugaagcaggaaacugc

SEQ ID NO: 766797 - RNA, 23 nt, Human
ucugacugaauugaaauaucucu

SEQ ID NO: 766798 - RNA, 20 nt, Human
ucugcaguaagaaauguccu

SEQ ID NO: 766799 - RNA, 22 nt, Human
ucugcaguaagaaauguccuuc

SEQ ID NO: 766800 - RNA, 21 nt, Human
ucuguaaucccagcuacuugg

SEQ ID NO: 766801 - RNA, 19 nt, Human
ucuguauuuggggagaaaa

SEQ ID NO: 766802 - RNA, 24 nt, Human
ugaaaacuugguugcccaucugaa

SEQ ID NO: 766803 - RNA, 19 nt, Human
ugaaaccccaucucuacua

SEQ ID NO: 766804 - RNA, 18 nt, Human
ugaaagcaagugaaaagu

SEQ ID NO: 766805 - RNA, 20 nt, Human
ugaaagcaagugaaaagugg

SEQ ID NO: 766806 - RNA, 19 nt, Human
ugaaagcagaacuuaugaa

SEQ ID NO: 766807 - RNA, 23 nt, Human
ugaaagcagaacuuaugaaaugc

SEQ ID NO: 766808 - RNA, 23 nt, Human
ugaagcaggaaacugcuugaacc

SEQ ID NO: 766809 - RNA, 24 nt, Human
ugaagcaggaaacugcuugaaccc

SEQ ID NO: 766810 - RNA, 20 nt, Human
ugaagucauagugcuacaau

SEQ ID NO: 766811 - RNA, 20 nt, Human
ugaauaaaugcauagcaaua

SEQ ID NO: 766812 - RNA, 22 nt, Human
ugacagcaagugacgaugugag

SEQ ID NO: 766813 - RNA, 18 nt, Human
ugaccaccucauuaauaa

SEQ ID NO: 766814 - RNA, 20 nt, Human
ugacgaugugaggcuuaaaa

SEQ ID NO: 766815 - RNA, 22 nt, Human
ugagccaagaucgugccacugc

SEQ ID NO: 766816 - RNA, 18 nt, Human
ugagcuaggucaaaguca

SEQ ID NO: 766817 - RNA, 25 nt, Human
ugauaugaacaaaaccucacaggca

SEQ ID NO: 766818 - RNA, 18 nt, Human
ugcugaaagcagaacuua

SEQ ID NO: 766819 - RNA, 21 nt, Human
uggaaaaaacaagaaacaaga

SEQ ID NO: 766820 - RNA, 18 nt, Human
uggaauguuacaguacca

SEQ ID NO: 766821 - RNA, 20 nt, Human
uggcagugacagcaagugac

SEQ ID NO: 766822 - RNA, 25 nt, Human
uggcaguggugguagcauaggaaac

SEQ ID NO: 766823 - RNA, 26 nt, Human
uggcaguggugguagcauaggaaacu

SEQ ID NO: 766824 - RNA, 19 nt, Human
uggcaucgaauacuuucac

SEQ ID NO: 766825 - RNA, 20 nt, Human
uggcaugucuguaaucccag

SEQ ID NO: 766826 - RNA, 22 nt, Human
uggccaaaauggugaaacccca

SEQ ID NO: 766827 - RNA, 24 nt, Human
uggcucaggccuguaaugucagca

SEQ ID NO: 766828 - RNA, 24 nt, Human
ugggaggccaaggcgggcagauca

SEQ ID NO: 766829 - RNA, 21 nt, Human
ugguauuggcugggcgcagug

SEQ ID NO: 766830 - RNA, 18 nt, Human
uggucagauguuuaaugg

SEQ ID NO: 766831 - RNA, 22 nt, Human
ugguggcaugucuguaauccca

SEQ ID NO: 766832 - RNA, 19 nt, Human
ugguucauauaaauguaua

SEQ ID NO: 766833 - RNA, 21 nt, Human
uguaaucccagcuacuuggaa

SEQ ID NO: 766834 - RNA, 23 nt, Human
ugucuguaaucccagcuacuugg

SEQ ID NO: 766835 - RNA, 19 nt, Human
uguuucaaugcuuuaucag

SEQ ID NO: 766836 - RNA, 22 nt, Human
uuaaagccuuacacugcuguuc

SEQ ID NO: 766837 - RNA, 25 nt, Human
uuaagcauuuaacauuaucaauacu

SEQ ID NO: 766838 - RNA, 21 nt, Human
uuauccgccacauaugaaggc

SEQ ID NO: 766839 - RNA, 18 nt, Human
uucaaauauauuguagcc

SEQ ID NO: 766840 - RNA, 22 nt, Human
uucauugacacaaauguaauaa

SEQ ID NO: 766841 - RNA, 18 nt, Human
uuccaaggguggcacagu

SEQ ID NO: 766842 - RNA, 22 nt, Human
uugcagugagccaagaucgugc

SEQ ID NO: 766843 - RNA, 23 nt, Human
uugcaguuuuaugauuauucugg

SEQ ID NO: 766844 - RNA, 21 nt, Human
uuucucccuuggcaguggugg

SEQ ID NO: 766845 - RNA, 23 nt, Human
uuuugcaguuuuaugauuauucu

SEQ ID NO: 766846 - RNA, 23 nt, Human
aaaaaagaaaaaaauaauaauag

SEQ ID NO: 766847 - RNA, 20 nt, Human
aaaaacugccacaaaugcca

SEQ ID NO: 766848 - RNA, 19 nt, Human
aaaaagccaaugcauuuuc

SEQ ID NO: 766849 - RNA, 23 nt, Human
aaaaagccguccaaaucacacaa

SEQ ID NO: 766850 - RNA, 22 nt, Human
aaacaaaacaaacuaccaccac

SEQ ID NO: 766851 - RNA, 25 nt, Human
aaacaaaacaaacuaccaccacuaa

SEQ ID NO: 766852 - RNA, 21 nt, Human
aaacaaacuaccaccacuaaa

SEQ ID NO: 766853 - RNA, 19 nt, Human
aaacugacacaaauaugca

SEQ ID NO: 766854 - RNA, 19 nt, Human
aaacugccacaaaugccag

SEQ ID NO: 766855 - RNA, 18 nt, Human
aaaucacacaacaguuag

SEQ ID NO: 766856 - RNA, 19 nt, Human
aacacuccauuaaaacaca

SEQ ID NO: 766857 - RNA, 20 nt, Human
aacagggcaagacuccaucu

SEQ ID NO: 766858 - RNA, 27 nt, Human
aacaguuucaaaacagcuauuuuggug

SEQ ID NO: 766859 - RNA, 19 nt, Human
aacauggugaaaccccauc

SEQ ID NO: 766860 - RNA, 20 nt, Human
aacauggugaaaccccaucu

SEQ ID NO: 766861 - RNA, 21 nt, Human
aacauggugaaaccccaucuc

SEQ ID NO: 766862 - RNA, 21 nt, Human
aacauggugaaaccccaucuc

SEQ ID NO: 766863 - RNA, 31 nt, Human
aagcaauuaaaacaguuucaaaacagcuauu

SEQ ID NO: 766864 - RNA, 21 nt, Human
aagcagacauaaauacucuau

SEQ ID NO: 766865 - RNA, 21 nt, Human
aaguuuguuuucucaacugga

SEQ ID NO: 766866 - RNA, 24 nt, Human
aauugcuugaacccgggaggcgga

SEQ ID NO: 766867 - RNA, 19 nt, Human
acaaaacaaacuaccacca

SEQ ID NO: 766868 - RNA, 18 nt, Human
acaacagaaacagcaggc

SEQ ID NO: 766869 - RNA, 21 nt, Human
acaagacaacagaaacagcag

SEQ ID NO: 766870 - RNA, 21 nt, Human
acacagcacacacacacagaa

SEQ ID NO: 766871 - RNA, 19 nt, Human
acagaaacagcaggccaca

SEQ ID NO: 766872 - RNA, 24 nt, Human
acagggcaagacuccaucucaaaa

SEQ ID NO: 766873 - RNA, 20 nt, Human
acauacaagacaacagaaac

SEQ ID NO: 766874 - RNA, 23 nt, Human
accccaucucuacuaaaauacaa

SEQ ID NO: 766875 - RNA, 23 nt, Human
acuaaaauacaaaaaaucagcca

SEQ ID NO: 766876 - RNA, 24 nt, Human
acugcacuccagccugggcaacag

SEQ ID NO: 766877 - RNA, 24 nt, Human
acugcacuccagccugggcaacag

SEQ ID NO: 766878 - RNA, 19 nt, Human
acugcauuccaauauccaa

SEQ ID NO: 766879 - RNA, 18 nt, Human
agacaacagaaacagcag

SEQ ID NO: 766880 - RNA, 21 nt, Human
agacaacagaaacagcaggcc

SEQ ID NO: 766881 - RNA, 23 nt, Human
agacaacagaaacagcaggccac

SEQ ID NO: 766882 - RNA, 21 nt, Human
agacauaaauacucuaugauc

SEQ ID NO: 766883 - RNA, 18 nt, Human
agagugggaugggucugg

SEQ ID NO: 766884 - RNA, 21 nt, Human
agauauguacacaucacccuc

SEQ ID NO: 766885 - RNA, 19 nt, Human
agaugaguggggaaaccug

SEQ ID NO: 766886 - RNA, 27 nt, Human
agauguuuguuuaguucaaguagagau

SEQ ID NO: 766887 - RNA, 24 nt, Human
agcaagaaugccaagacagagaaa

SEQ ID NO: 766888 - RNA, 20 nt, Human
agcauccugcagaaaauagc

SEQ ID NO: 766889 - RNA, 18 nt, Human
agccaggcauggcggugu

SEQ ID NO: 766890 - RNA, 24 nt, Human
agcccaggcaacauggugaaaccc

SEQ ID NO: 766891 - RNA, 24 nt, Human
agccugggcaacagggcaagacuc

SEQ ID NO: 766892 - RNA, 21 nt, Human
aggcaacauggugaaacccca

SEQ ID NO: 766893 - RNA, 24 nt, Human
aggcaggagaauugcuugaacccg

SEQ ID NO: 766894 - RNA, 20 nt, Human
aggcaggcagacugccugag

SEQ ID NO: 766895 - RNA, 19 nt, Human
aggcauggcggugugcacc

SEQ ID NO: 766896 - RNA, 24 nt, Human
aggcgcaguggcucaugucuguaa

SEQ ID NO: 766897 - RNA, 21 nt, Human
aggcggagguugcagugagcc

SEQ ID NO: 766898 - RNA, 24 nt, Human
aggcggagguugcagugagccgag

SEQ ID NO: 766899 - RNA, 21 nt, Human
aggcugaggcaggagaauugc

SEQ ID NO: 766900 - RNA, 24 nt, Human
aggcugaggcaggagaauugcuug

SEQ ID NO: 766901 - RNA, 21 nt, Human
aggcugaggcaggcagacugc

SEQ ID NO: 766902 - RNA, 20 nt, Human
aggguccaaacaacagagaa

SEQ ID NO: 766903 - RNA, 22 nt, Human
agugauucauucaaggcaacac

SEQ ID NO: 766904 - RNA, 23 nt, Human
aguggcucaugucuguaauccca

SEQ ID NO: 766905 - RNA, 24 nt, Human
aguggcucaugucuguaaucccag

SEQ ID NO: 766906 - RNA, 18 nt, Human
auaaauauuaaaaugaca

SEQ ID NO: 766907 - RNA, 21 nt, Human
aucuugccucugauccuucua

SEQ ID NO: 766908 - RNA, 20 nt, Human
augaaacaaaacaaacuacc

SEQ ID NO: 766909 - RNA, 19 nt, Human
augucuguaaucccagcac

SEQ ID NO: 766910 - RNA, 26 nt, Human
caaaaagccguccaaaucacacaaca

SEQ ID NO: 766911 - RNA, 18 nt, Human
caaaauggccacuagagg

SEQ ID NO: 766912 - RNA, 23 nt, Human
caaacauguaguacuugcuuggg

SEQ ID NO: 766913 - RNA, 21 nt, Human
caacagaaacagcaggccaca

SEQ ID NO: 766914 - RNA, 23 nt, Human
caacagaaacagcaggccacaua

SEQ ID NO: 766915 - RNA, 25 nt, Human
caacaguuaggagcuacauagggcc

SEQ ID NO: 766916 - RNA, 22 nt, Human
caacauggugaaaccccaucuc

SEQ ID NO: 766917 - RNA, 24 nt, Human
caacauggugaaaccccaucucua

SEQ ID NO: 766918 - RNA, 24 nt, Human
caagacaacagaaacagcaggcca

SEQ ID NO: 766919 - RNA, 21 nt, Human
caagacuccaucucaaaaaaa

SEQ ID NO: 766920 - RNA, 23 nt, Human
caagacuccaucucaaaaaaaga

SEQ ID NO: 766921 - RNA, 22 nt, Human
caaggcaacacuccauuaaaac

SEQ ID NO: 766922 - RNA, 21 nt, Human
cacacacacacagaaacaaaa

SEQ ID NO: 766923 - RNA, 23 nt, Human
cacacacacacagaaacaaaaga

SEQ ID NO: 766924 - RNA, 25 nt, Human
cacagcacacacacacagaaacaaa

SEQ ID NO: 766925 - RNA, 23 nt, Human
cacagguacucaagagauauaug

SEQ ID NO: 766926 - RNA, 18 nt, Human
caccacuaaaaaacccgu

SEQ ID NO: 766927 - RNA, 23 nt, Human
caccacuaaaaaacccguaagag

SEQ ID NO: 766928 - RNA, 19 nt, Human
caccccucuuuuuucaagg

SEQ ID NO: 766929 - RNA, 21 nt, Human
cacccucugaaugaacaauau

SEQ ID NO: 766930 - RNA, 23 nt, Human
cacuccagccugggcaacagggc

SEQ ID NO: 766931 - RNA, 19 nt, Human
cacugcacuccagccuggg

SEQ ID NO: 766932 - RNA, 21 nt, Human
cacugcacuccagccugggca

SEQ ID NO: 766933 - RNA, 22 nt, Human
cacugcacuccagccugggcaa

SEQ ID NO: 766934 - RNA, 23 nt, Human
cacugcacuccagccugggcaac

SEQ ID NO: 766935 - RNA, 24 nt, Human
cacugcacuccagccugggcaaca

SEQ ID NO: 766936 - RNA, 27 nt, Human
cacugcacuccagccugggcaacaggg

SEQ ID NO: 766937 - RNA, 21 nt, Human
cagcaaaauaggcuccgucug

SEQ ID NO: 766938 - RNA, 21 nt, Human
cagcacucuaggaggcugagg

SEQ ID NO: 766939 - RNA, 24 nt, Human
cagcacucuaggaggcugaggcag

SEQ ID NO: 766940 - RNA, 19 nt, Human
cagcaggccacauaauauc

SEQ ID NO: 766941 - RNA, 24 nt, Human
cagcuacucgggaggcugaggcag

SEQ ID NO: 766942 - RNA, 19 nt, Human
cagcucaaaacucaggcaa

SEQ ID NO: 766943 - RNA, 20 nt, Human
caggcaacauggugaaaccc

SEQ ID NO: 766944 - RNA, 21 nt, Human
cauuagcaacuaccauacaaa

SEQ ID NO: 766945 - RNA, 18 nt, Human
cauuuucaucacauauau

SEQ ID NO: 766946 - RNA, 24 nt, Human
ccaagacagagaaaucuauucaca

SEQ ID NO: 766947 - RNA, 19 nt, Human
ccacagaaaaggccugucc

SEQ ID NO: 766948 - RNA, 18 nt, Human
ccacugcacuccagccug

SEQ ID NO: 766949 - RNA, 20 nt, Human
ccacugcacuccagccuggg

SEQ ID NO: 766950 - RNA, 21 nt, Human
ccacugcacuccagccugggc

SEQ ID NO: 766951 - RNA, 23 nt, Human
ccacugcacuccagccugggcaa

SEQ ID NO: 766952 - RNA, 24 nt, Human
ccacugcacuccagccugggcaac

SEQ ID NO: 766953 - RNA, 23 nt, Human
ccaggcaacauggugaaacccca

SEQ ID NO: 766954 - RNA, 26 nt, Human
cccaagcaauuaaaacaguuucaaaa

SEQ ID NO: 766955 - RNA, 23 nt, Human
ccuacaucaguuaaaagcauccu

SEQ ID NO: 766956 - RNA, 21 nt, Human
ccugcacucccagcuacucgg

SEQ ID NO: 766957 - RNA, 22 nt, Human
ccugggcaacagggcaagacuc

SEQ ID NO: 766958 - RNA, 24 nt, Human
cgagaucgugccacugcacuccag

SEQ ID NO: 766959 - RNA, 24 nt, Human
cgggaggcggagguugcagugagc

SEQ ID NO: 766960 - RNA, 20 nt, Human
cgugcaauagcaaaacugua

SEQ ID NO: 766961 - RNA, 23 nt, Human
cguucaucauagaggcaaaauau

SEQ ID NO: 766962 - RNA, 23 nt, Human
cucaugucuguaaucccagcacu

SEQ ID NO: 766963 - RNA, 18 nt, Human
cuccauuaaaacacacac

SEQ ID NO: 766964 - RNA, 22 nt, Human
cucucugcaccucaccagguaa

SEQ ID NO: 766965 - RNA, 18 nt, Human
cugacuguccaacagcag

SEQ ID NO: 766966 - RNA, 21 nt, Human
cugcacucccagcuacucggg

SEQ ID NO: 766967 - RNA, 20 nt, Human
cugcaggcugccaucucauc

SEQ ID NO: 766968 - RNA, 23 nt, Human
cuggaucacaggagagugggaug

SEQ ID NO: 766969 - RNA, 19 nt, Human
cuggccacaaagagaaucu

SEQ ID NO: 766970 - RNA, 20 nt, Human
cugucuugcuucuucaucug

SEQ ID NO: 766971 - RNA, 20 nt, Human
cuucacacaauuuauaaaau

SEQ ID NO: 766972 - RNA, 23 nt, Human
gaaaucgugcaauagcaaaacug

SEQ ID NO: 766973 - RNA, 20 nt, Human
gaaggauuaucuugugaaag

SEQ ID NO: 766974 - RNA, 19 nt, Human
gaauauuucuuuacagcac

SEQ ID NO: 766975 - RNA, 23 nt, Human
gagaauugcuugaacccgggagg

SEQ ID NO: 766976 - RNA, 23 nt, Human
gagguugcagugagccgagaucg

SEQ ID NO: 766977 - RNA, 19 nt, Human
gaguuugcaaccagcccag

SEQ ID NO: 766978 - RNA, 20 nt, Human
gauagagaaugacacaaugu

SEQ ID NO: 766979 - RNA, 19 nt, Human
gcaaaaagccguccaaauc

SEQ ID NO: 766980 - RNA, 21 nt, Human
gcaaaccauugaaaaucaccc

SEQ ID NO: 766981 - RNA, 24 nt, Human
gcaagggaaaaugaucucauacua

SEQ ID NO: 766982 - RNA, 24 nt, Human
gcacuccagccugggcaacagggc

SEQ ID NO: 766983 - RNA, 24 nt, Human
gcagcaaaauaggcuccgucugaa

SEQ ID NO: 766984 - RNA, 18 nt, Human
gccaaugcauuuucauca

SEQ ID NO: 766985 - RNA, 19 nt, Human
gccacaaaugccagucgga

SEQ ID NO: 766986 - RNA, 19 nt, Human
gccacugcacuccagccug

SEQ ID NO: 766987 - RNA, 22 nt, Human
gccacugcacuccagccugggc

SEQ ID NO: 766988 - RNA, 24 nt, Human
gccacugcacuccagccugggcaa

SEQ ID NO: 766989 - RNA, 18 nt, Human
gccccuuuggauuguugg

SEQ ID NO: 766990 - RNA, 20 nt, Human
gccgagaucgugccacugca

SEQ ID NO: 766991 - RNA, 19 nt, Human
gccuguccugggcuccugg

SEQ ID NO: 766992 - RNA, 24 nt, Human
gcgcgcacacucucacacacagca

SEQ ID NO: 766993 - RNA, 20 nt, Human
ggaauauauuuccccauuag

SEQ ID NO: 766994 - RNA, 21 nt, Human
ggagagugggaugggucuggg

SEQ ID NO: 766995 - RNA, 20 nt, Human
ggagguugcagugagccgag

SEQ ID NO: 766996 - RNA, 22 nt, Human
ggagguugcagugagccgagau

SEQ ID NO: 766997 - RNA, 24 nt, Human
ggagguugcagugagccgagaucg

SEQ ID NO: 766998 - RNA, 21 nt, Human
ggccaggcgcaguggcucaug

SEQ ID NO: 766999 - RNA, 20 nt, Human
gugcaccugcacucccagcu

SEQ ID NO: 767000 - RNA, 19 nt, Human
gugucaaauucugguuucc

SEQ ID NO: 767001 - RNA, 18 nt, Human
gugugucaaauucugguu

SEQ ID NO: 767002 - RNA, 24 nt, Human
guugcagugagccgagaucgugcc

SEQ ID NO: 767003 - RNA, 21 nt, Human
uaaaaaacccguaagaggggc

SEQ ID NO: 767004 - RNA, 24 nt, Human
uaaaacacugacuguccaacagcc

SEQ ID NO: 767005 - RNA, 24 nt, Human
uaaaagcaguaaguuauccagcua

SEQ ID NO: 767006 - RNA, 21 nt, Human
uaaagcucuuccuuucucccc

SEQ ID NO: 767007 - RNA, 19 nt, Human
uaaagugcacauugcuacc

SEQ ID NO: 767008 - RNA, 23 nt, Human
uaacaaggaauaaaaacugacaa

SEQ ID NO: 767009 - RNA, 20 nt, Human
uaagaggcgcaaguuggcug

SEQ ID NO: 767010 - RNA, 18 nt, Human
uaagcaaaccauugaaaa

SEQ ID NO: 767011 - RNA, 18 nt, Human
uacaagacaacagaaaca

SEQ ID NO: 767012 - RNA, 22 nt, Human
uacacaucacccucugaaugaa

SEQ ID NO: 767013 - RNA, 19 nt, Human
uaccaccacuaaaaaaccc

SEQ ID NO: 767014 - RNA, 19 nt, Human
uaccauggcuggcuuccca

SEQ ID NO: 767015 - RNA, 20 nt, Human
uaccauggcuggcuucccag

SEQ ID NO: 767016 - RNA, 22 nt, Human
uagaaaaaacugaagccuuuca

SEQ ID NO: 767017 - RNA, 23 nt, Human
uagaaacauuaaaacacugacug

SEQ ID NO: 767018 - RNA, 19 nt, Human
uagauauguacacaucacc

SEQ ID NO: 767019 - RNA, 19 nt, Human
uagcaacuaccauacaaaa

SEQ ID NO: 767020 - RNA, 25 nt, Human
uauauacaauauagauauguacaca

SEQ ID NO: 767021 - RNA, 26 nt, Human
uaucauaaaacuaagauaaucagucc

SEQ ID NO: 767022 - RNA, 22 nt, Human
uaugaucccccaagcaucaaaa

SEQ ID NO: 767023 - RNA, 19 nt, Human
uaugcaaaaagccguccaa

SEQ ID NO: 767024 - RNA, 21 nt, Human
ucaaagaaagggaccaaaugu

SEQ ID NO: 767025 - RNA, 24 nt, Human
ucaaucagcucaaaacucaggcaa

SEQ ID NO: 767026 - RNA, 19 nt, Human
ucagauaaaagcaguaagu

SEQ ID NO: 767027 - RNA, 20 nt, Human
ucagcaagaaugccaagaca

SEQ ID NO: 767028 - RNA, 19 nt, Human
ucagccaggcauggcggug

SEQ ID NO: 767029 - RNA, 22 nt, Human
ucaugucuguaaucccagcacu

SEQ ID NO: 767030 - RNA, 20 nt, Human
uccaaggggcuggaacugag

SEQ ID NO: 767031 - RNA, 23 nt, Human
uccaauuagaaaaaacugaagcc

SEQ ID NO: 767032 - RNA, 21 nt, Human
uccagaaaaauccgauuuaac

SEQ ID NO: 767033 - RNA, 23 nt, Human
uccaucucaaaaaaagaaaaaaa

SEQ ID NO: 767034 - RNA, 23 nt, Human
uccccggauugauucccucccac

SEQ ID NO: 767035 - RNA, 23 nt, Human
ucgggaggcugaggcaggagaau

SEQ ID NO: 767036 - RNA, 26 nt, Human
ucuagaaaacagugacuuaagcaaac

SEQ ID NO: 767037 - RNA, 22 nt, Human
ucucacacacagcacacacaca

SEQ ID NO: 767038 - RNA, 26 nt, Human
ucucacacacagcacacacacacaga

SEQ ID NO: 767039 - RNA, 19 nt, Human
ucuccugaacagagugucc

SEQ ID NO: 767040 - RNA, 20 nt, Human
ucuuuacagcacuaaacagu

SEQ ID NO: 767041 - RNA, 25 nt, Human
ugaaacaaaacaaacuaccaccacu

SEQ ID NO: 767042 - RNA, 19 nt, Human
ugaaaccccaucucuacua

SEQ ID NO: 767043 - RNA, 21 nt, Human
ugaauaaucaccuucaaauaa

SEQ ID NO: 767044 - RNA, 22 nt, Human
ugagccgagaucgugccacugc

SEQ ID NO: 767045 - RNA, 24 nt, Human
ugaggcaggagaauugcuugaacc

SEQ ID NO: 767046 - RNA, 25 nt, Human
ugaggcaggagaauugcuugaaccc

SEQ ID NO: 767047 - RNA, 20 nt, Human
ugaggcaggcagacugccug

SEQ ID NO: 767048 - RNA, 21 nt, Human
ugaggcaggcagacugccuga

SEQ ID NO: 767049 - RNA, 25 nt, Human
ugaggcaggcagacugccugagcuc

SEQ ID NO: 767050 - RNA, 23 nt, Human
ugagugucuuaucuguaaauucu

SEQ ID NO: 767051 - RNA, 20 nt, Human
ugaucccccaagcaucaaaa

SEQ ID NO: 767052 - RNA, 18 nt, Human
ugaugauagagaaugaca

SEQ ID NO: 767053 - RNA, 23 nt, Human
ugcaggcugccaucucaucuugc

SEQ ID NO: 767054 - RNA, 23 nt, Human
ugccaagacagagaaaucuauuc

SEQ ID NO: 767055 - RNA, 24 nt, Human
ugccacugcacuccagccugggca

SEQ ID NO: 767056 - RNA, 19 nt, Human
uggagugugucaaauucug

SEQ ID NO: 767057 - RNA, 19 nt, Human
uggccagggcccacagaaa

SEQ ID NO: 767058 - RNA, 23 nt, Human
uggccauucuugcuaaguuuaaa

SEQ ID NO: 767059 - RNA, 24 nt, Human
uggcucaugucuguaaucccagca

SEQ ID NO: 767060 - RNA, 18 nt, Human
ugggcuccuggaccaccu

SEQ ID NO: 767061 - RNA, 21 nt, Human
ugguuaacaucaaacugacac

SEQ ID NO: 767062 - RNA, 18 nt, Human
uguacauauauuuacaca

SEQ ID NO: 767063 - RNA, 27 nt, Human
uguacauauauuuacacauauguaucu

SEQ ID NO: 767064 - RNA, 19 nt, Human
ugucaaauucugguuuccu

SEQ ID NO: 767065 - RNA, 21 nt, Human
ugucaaauucugguuuccuug

SEQ ID NO: 767066 - RNA, 18 nt, Human
ugucuguaaucccagcac

SEQ ID NO: 767067 - RNA, 24 nt, Human
ugucuguaaucccagcacucuagg

SEQ ID NO: 767068 - RNA, 23 nt, Human
uucaaaaacugccacaaaugccu

SEQ ID NO: 767069 - RNA, 23 nt, Human
uucaagacaaccuagaugagugg

SEQ ID NO: 767070 - RNA, 21 nt, Human
uucaagacauaauaauccaau

SEQ ID NO: 767071 - RNA, 24 nt, Human
uugaacccgggaggcggagguugc

SEQ ID NO: 767072 - RNA, 19 nt, Human
uugauccaaggggcuggaa

SEQ ID NO: 767073 - RNA, 18 nt, Human
uugcagugagccgagauc

SEQ ID NO: 767074 - RNA, 22 nt, Human
uugcagugagccgagaucgugc

SEQ ID NO: 767075 - RNA, 24 nt, Human
uugcuugaacccgggaggcggagg

SEQ ID NO: 767076 - RNA, 24 nt, Human
uuggaaaaaaucuauuuccuuuca

SEQ ID NO: 767077 - RNA, 20 nt, Human
uugugaaagaaggcagacua

SEQ ID NO: 767078 - RNA, 23 nt, Human
uuuaaagugcacauugcuaccca

SEQ ID NO: 767079 - RNA, 22 nt, Human
uuuacuauucuuucccccuaaa

SEQ ID NO: 767080 - RNA, 28 nt, Human
uuuuuguacauauauuuacacauaugua

SEQ ID NO: 767081 - RNA, 18 nt, Human
aaaaagauauaaguuacu

SEQ ID NO: 767082 - RNA, 22 nt, Human
aaaauaaaacaaaucacacaga

SEQ ID NO: 767083 - RNA, 24 nt, Human
aaacaagaaggaaaagcauguggg

SEQ ID NO: 767084 - RNA, 21 nt, Human
aaagaaacgacuguccacuga

SEQ ID NO: 767085 - RNA, 24 nt, Human
aaauaauaaauaaaaguuuaaaac

SEQ ID NO: 767086 - RNA, 21 nt, Human
aaggacacaucuucugcugcc

SEQ ID NO: 767087 - RNA, 25 nt, Human
aaggagacaaaaggcuuuggaggga

SEQ ID NO: 767088 - RNA, 21 nt, Human
aaguauugcaaccucugaacu

SEQ ID NO: 767089 - RNA, 23 nt, Human
acaaaguuuccacacuuccucca

SEQ ID NO: 767090 - RNA, 23 nt, Human
acacagaacacagaggggcuggu

SEQ ID NO: 767091 - RNA, 18 nt, Human
acacagaggggcugcuga

SEQ ID NO: 767092 - RNA, 23 nt, Human
acagaacacagaggggcugcuga

SEQ ID NO: 767093 - RNA, 18 nt, Human
acagagaagggcagaggg

SEQ ID NO: 767094 - RNA, 19 nt, Human
acuucagagaacagagaga

SEQ ID NO: 767095 - RNA, 19 nt, Human
agaaaaaagcugcuaucuc

SEQ ID NO: 767096 - RNA, 21 nt, Human
agaaaaaagcugcuaucucau

SEQ ID NO: 767097 - RNA, 25 nt, Human
agaaaacauacacuaccaguaccau

SEQ ID NO: 767098 - RNA, 19 nt, Human
agagagccuccaugagagc

SEQ ID NO: 767099 - RNA, 24 nt, Human
agagagccuccaugagagcucagc

SEQ ID NO: 767100 - RNA, 18 nt, Human
agaggagaacgugggucu

SEQ ID NO: 767101 - RNA, 20 nt, Human
agaggggcugcugaacaacg

SEQ ID NO: 767102 - RNA, 25 nt, Human
agccccggcaguaccucgcacagcc

SEQ ID NO: 767103 - RNA, 21 nt, Human
agcugauuacaaaacacagga

SEQ ID NO: 767104 - RNA, 22 nt, Human
aggcuuuggagggaaagaaaau

SEQ ID NO: 767105 - RNA, 21 nt, Human
agggagggagugcacuguggg

SEQ ID NO: 767106 - RNA, 21 nt, Human
agggagggagugcacuguggg

SEQ ID NO: 767107 - RNA, 22 nt, Human
aggggaaggcaugaaaacaaaa

SEQ ID NO: 767108 - RNA, 18 nt, Human
aggggguggacagagaag

SEQ ID NO: 767109 - RNA, 18 nt, Human
aggggguggacagagaag

SEQ ID NO: 767110 - RNA, 22 nt, Human
agugcagcccucaaauuagaau

SEQ ID NO: 767111 - RNA, 24 nt, Human
auucuuuucacaagcaccuggauc

SEQ ID NO: 767112 - RNA, 22 nt, Human
caaaaggaaagaagaaaggacc

SEQ ID NO: 767113 - RNA, 27 nt, Human
caaaaggaaagaagaaaggaccccacu

SEQ ID NO: 767114 - RNA, 20 nt, Human
caacaggaccagccucccuu

SEQ ID NO: 767115 - RNA, 22 nt, Human
caaccucugaacugccaauuuu

SEQ ID NO: 767116 - RNA, 22 nt, Human
caaggagacaaaaggcuuugga

SEQ ID NO: 767117 - RNA, 19 nt, Human
caccucaaaaaagaaacga

SEQ ID NO: 767118 - RNA, 21 nt, Human
cacgucagcugcacguggcug

SEQ ID NO: 767119 - RNA, 20 nt, Human
cacuucagagaacagagaga

SEQ ID NO: 767120 - RNA, 22 nt, Human
cagaacacagaggggcugcuga

SEQ ID NO: 767121 - RNA, 24 nt, Human
cagagaauaaauagucugaaaccg

SEQ ID NO: 767122 - RNA, 21 nt, Human
cagugaaggucuugaagaagc

SEQ ID NO: 767123 - RNA, 21 nt, Human
ccagaaaaaagcugcuaucuc

SEQ ID NO: 767124 - RNA, 20 nt, Human
cccagaaaaaagcugcuauc

SEQ ID NO: 767125 - RNA, 24 nt, Human
cccagaaaaaagcugcuaucucau

SEQ ID NO: 767126 - RNA, 20 nt, Human
cccauaaaagaaaagcccuc

SEQ ID NO: 767127 - RNA, 18 nt, Human
cccucccgugccuuccuc

SEQ ID NO: 767128 - RNA, 23 nt, Human
ccuauuguuaaaggugucuuggg

SEQ ID NO: 767129 - RNA, 18 nt, Human
ccucccgugccuuccuca

SEQ ID NO: 767130 - RNA, 20 nt, Human
ccucgcacagccacccuccc

SEQ ID NO: 767131 - RNA, 19 nt, Human
ccucuagggcaaccggccc

SEQ ID NO: 767132 - RNA, 22 nt, Human
cuaaguauugcaaccucugaac

SEQ ID NO: 767133 - RNA, 23 nt, Human
cuaugacuggaacuggaaggaac

SEQ ID NO: 767134 - RNA, 22 nt, Human
cucaaaguauccuuuguggaca

SEQ ID NO: 767135 - RNA, 22 nt, Human
cuccucuagggcaaccggcccc

SEQ ID NO: 767136 - RNA, 21 nt, Human
cucugggucccagaaaaaagc

SEQ ID NO: 767137 - RNA, 18 nt, Human
cugaaacaagaaggaaaa

SEQ ID NO: 767138 - RNA, 19 nt, Human
cuggaacuggaaggaacga

SEQ ID NO: 767139 - RNA, 20 nt, Human
gaaaauaucuuguugugacc

SEQ ID NO: 767140 - RNA, 23 nt, Human
gaccccaccuucccccagguuag

SEQ ID NO: 767141 - RNA, 21 nt, Human
gagaauaaauagucugaaacc

SEQ ID NO: 767142 - RNA, 18 nt, Human
gagccuccaugagagcuc

SEQ ID NO: 767143 - RNA, 18 nt, Human
gcagagggagggagugca

SEQ ID NO: 767144 - RNA, 21 nt, Human
gcuguucugaaacaagaagga

SEQ ID NO: 767145 - RNA, 21 nt, Human
ggaagagagggaggugggagc

SEQ ID NO: 767146 - RNA, 23 nt, Human
ggagacaaaaggcuuuggaggga

SEQ ID NO: 767147 - RNA, 21 nt, Human
ggagcaagagaggagaacgug

SEQ ID NO: 767148 - RNA, 26 nt, Human
gggaaggcaugaaaacaaaaggucac

SEQ ID NO: 767149 - RNA, 18 nt, Human
gguccauucaguccaugg

SEQ ID NO: 767150 - RNA, 20 nt, Human
gugacagcacccuggccagc

SEQ ID NO: 767151 - RNA, 18 nt, Human
guggcugaggauggaggc

SEQ ID NO: 767152 - RNA, 22 nt, Human
uaaaacaaaucacacagaacac

SEQ ID NO: 767153 - RNA, 22 nt, Human
uaagaacacacuugggaguuuc

SEQ ID NO: 767154 - RNA, 21 nt, Human
uaagcuuuuucccuauccuuu

SEQ ID NO: 767155 - RNA, 21 nt, Human
uaagucacaugguuggacugg

SEQ ID NO: 767156 - RNA, 19 nt, Human
uaccaaagccuuguuuccc

SEQ ID NO: 767157 - RNA, 20 nt, Human
uagaauaaauaagucacaug

SEQ ID NO: 767158 - RNA, 22 nt, Human
uagaauaaauaagucacauggu

SEQ ID NO: 767159 - RNA, 21 nt, Human
uagggcaaccggccccccucc

SEQ ID NO: 767160 - RNA, 18 nt, Human
uaugacccgugccgcgug

SEQ ID NO: 767161 - RNA, 24 nt, Human
uauuaugccugguugugguucuuc

SEQ ID NO: 767162 - RNA, 19 nt, Human
uauuuaaaauacggcagac

SEQ ID NO: 767163 - RNA, 20 nt, Human
uccuaaggauaaaaagaggc

SEQ ID NO: 767164 - RNA, 23 nt, Human
ucuagggcaaccggccccccucc

SEQ ID NO: 767165 - RNA, 22 nt, Human
ucucauuagcggcuugguguga

SEQ ID NO: 767166 - RNA, 18 nt, Human
ugaagaagcugggccacc

SEQ ID NO: 767167 - RNA, 19 nt, Human
ugaaugcacacauacaaca

SEQ ID NO: 767168 - RNA, 22 nt, Human
ugacagugcaggggcacuuccu

SEQ ID NO: 767169 - RNA, 21 nt, Human
ugaugcauuacaacacacuuu

SEQ ID NO: 767170 - RNA, 18 nt, Human
ugcacacauacaacagca

SEQ ID NO: 767171 - RNA, 25 nt, Human
uggaacacggugucacaggacaaag

SEQ ID NO: 767172 - RNA, 18 nt, Human
uggaaccgguuugguauu

SEQ ID NO: 767173 - RNA, 19 nt, Human
uggaaugccacagacacac

SEQ ID NO: 767174 - RNA, 24 nt, Human
uggaaugccacagacacacuauga

SEQ ID NO: 767175 - RNA, 21 nt, Human
ugggagcaagagaggagaacg

SEQ ID NO: 767176 - RNA, 25 nt, Human
uggggggaagagagggaggugggag

SEQ ID NO: 767177 - RNA, 22 nt, Human
ugucacaggacaccaugguguc

SEQ ID NO: 767178 - RNA, 21 nt, Human
ugucuagcuuaggagggggug

SEQ ID NO: 767179 - RNA, 25 nt, Human
ugucuggaacacggugucacaggag

SEQ ID NO: 767180 - RNA, 18 nt, Human
uuagugaauaaaauugug

SEQ ID NO: 767181 - RNA, 18 nt, Human
uucacaagcaccuggauc

SEQ ID NO: 767182 - RNA, 18 nt, Human
uucagugcuucucaaaag

SEQ ID NO: 767183 - RNA, 22 nt, Human
uugguagugguugcacaauguu

SEQ ID NO: 767184 - RNA, 24 nt, Human
uuguuccuuaggggcuuucucaaa

SEQ ID NO: 767185 - RNA, 19 nt, Human
uuuauuuacuauacuaagu

SEQ ID NO: 767186 - RNA, 21 nt, Human
uuucccuauccuuuuuccuuu

SEQ ID NO: 767187 - RNA, 21 nt, Human
uuugucuagcuuaggaggggg

SEQ ID NO: 767188 - RNA, 19 nt, Human
aagcaaacgccaggccccc

SEQ ID NO: 767189 - RNA, 24 nt, Human
aauugcuacaauuuaauuacaaau

SEQ ID NO: 767190 - RNA, 23 nt, Human
acgccaggcccccaucugcaggc

SEQ ID NO: 767191 - RNA, 20 nt, Human
agggaagggcugaagcaaac

SEQ ID NO: 767192 - RNA, 19 nt, Human
agggugcugguggcugugg

SEQ ID NO: 767193 - RNA, 24 nt, Human
augacuauucaaaauuugacauuu

SEQ ID NO: 767194 - RNA, 20 nt, Human
auuggcauuuuaaaaaccau

SEQ ID NO: 767195 - RNA, 24 nt, Human
auuugcagagcagaguucagaaug

SEQ ID NO: 767196 - RNA, 20 nt, Human
caccccagaaccaugaucau

SEQ ID NO: 767197 - RNA, 22 nt, Human
cacccccaaccagcaaccgaaa

SEQ ID NO: 767198 - RNA, 24 nt, Human
caggugcccaugagcucugcacuc

SEQ ID NO: 767199 - RNA, 18 nt, Human
cauuuuuguacaaaaucc

SEQ ID NO: 767200 - RNA, 21 nt, Human
cauuuuuguacaaaauccugg

SEQ ID NO: 767201 - RNA, 19 nt, Human
ccaaaagacauuugcagag

SEQ ID NO: 767202 - RNA, 21 nt, Human
ccaaccagcaaccgaaagccu

SEQ ID NO: 767203 - RNA, 19 nt, Human
ccaggcccccaucugcagg

SEQ ID NO: 767204 - RNA, 22 nt, Human
ccaggcccccaucugcaggcug

SEQ ID NO: 767205 - RNA, 23 nt, Human
cccaucugcaggcugcucagagu

SEQ ID NO: 767206 - RNA, 23 nt, Human
cccccaaccagcaaccgaaagcc

SEQ ID NO: 767207 - RNA, 19 nt, Human
ccuccuguaccagccccac

SEQ ID NO: 767208 - RNA, 20 nt, Human
ccucuccccaccccagaacc

SEQ ID NO: 767209 - RNA, 20 nt, Human
cgccaggcccccaucugcag

SEQ ID NO: 767210 - RNA, 22 nt, Human
cgccaggcccccaucugcaggc

SEQ ID NO: 767211 - RNA, 27 nt, Human
cuccccuggcaagucacucagcucccc

SEQ ID NO: 767212 - RNA, 24 nt, Human
cugaagcaaacgccaggcccccau

SEQ ID NO: 767213 - RNA, 25 nt, Human
gacgugguggugccccucgccugca

SEQ ID NO: 767214 - RNA, 19 nt, Human
gagaagcagggaguucaaa

SEQ ID NO: 767215 - RNA, 24 nt, Human
gaucauuuuuguacaaaauccugg

SEQ ID NO: 767216 - RNA, 18 nt, Human
gcacucagggaagggcug

SEQ ID NO: 767217 - RNA, 20 nt, Human
uacacuaucaugagaccaaa

SEQ ID NO: 767218 - RNA, 18 nt, Human
uacugcauauauaccucu

SEQ ID NO: 767219 - RNA, 19 nt, Human
uauauaccucuuagcaaaa

SEQ ID NO: 767220 - RNA, 19 nt, Human
ucacaauugcauaguucua

SEQ ID NO: 767221 - RNA, 23 nt, Human
ucauaucaaagaugagaagcagg

SEQ ID NO: 767222 - RNA, 24 nt, Human
uccaugagccuccuguaccaggaa

SEQ ID NO: 767223 - RNA, 20 nt, Human
uccccuggcaagucacucag

SEQ ID NO: 767224 - RNA, 23 nt, Human
uccccuggcaagucacucagcuc

SEQ ID NO: 767225 - RNA, 18 nt, Human
ugagaagcagggaguuca

SEQ ID NO: 767226 - RNA, 18 nt, Human
ugagggugcugguggcug

SEQ ID NO: 767227 - RNA, 19 nt, Human
ugcauuguugcugagauau

SEQ ID NO: 767228 - RNA, 20 nt, Human
ugcucccuuuccucucccca

SEQ ID NO: 767229 - RNA, 27 nt, Human
uggcagccuuuggacgugguggugccc

SEQ ID NO: 767230 - RNA, 19 nt, Human
uggcccagaaaagccacca

SEQ ID NO: 767231 - RNA, 18 nt, Human
uggcuuuuggugaaugug

SEQ ID NO: 767232 - RNA, 25 nt, Human
uguacaaaauccuggugaagaauca

SEQ ID NO: 767233 - RNA, 25 nt, Human
ugugcucccuuuccucuccccaccc

SEQ ID NO: 767234 - RNA, 19 nt, Human
uguguauaaaagguacugc

SEQ ID NO: 767235 - RNA, 20 nt, Human
uuccuguagaauucaacuga

SEQ ID NO: 767236 - RNA, 24 nt, Human
uugcauaguucuaaaaugccugga

SEQ ID NO: 767237 - RNA, 23 nt, Human
uugcuacaauuuaauuacaaauc

SEQ ID NO: 767238 - RNA, 19 nt, Human
uuggcauuuuaaaaaccau

SEQ ID NO: 767239 - RNA, 19 nt, Human
uuuuuuuuuuuuuuugcuu

SEQ ID NO: 767240 - RNA, 23 nt, Human
uuuuuuuuuuuuuuugcuuauaa

SEQ ID NO: 767241 - RNA, 23 nt, Human
aaaugcccagucccacccuacac

SEQ ID NO: 767242 - RNA, 22 nt, Human
aagacuuuuggacucaggugac

SEQ ID NO: 767243 - RNA, 23 nt, Human
aagacuuuuggacucaggugacc

SEQ ID NO: 767244 - RNA, 18 nt, Human
aagcagccacucaagccg

SEQ ID NO: 767245 - RNA, 21 nt, Human
aauuucagagucacagugaug

SEQ ID NO: 767246 - RNA, 19 nt, Human
acaccgcgggccccgcgca

SEQ ID NO: 767247 - RNA, 24 nt, Human
acacugcaaagggagauucuggac

SEQ ID NO: 767248 - RNA, 18 nt, Human
acaggaggagacuacaca

SEQ ID NO: 767249 - RNA, 23 nt, Human
acaggaggagacuacacagggcu

SEQ ID NO: 767250 - RNA, 19 nt, Human
acagggcuuggggacguuc

SEQ ID NO: 767251 - RNA, 22 nt, Human
acagggcuuggggacguucccc

SEQ ID NO: 767252 - RNA, 25 nt, Human
accccaugagucucugugccagagg

SEQ ID NO: 767253 - RNA, 19 nt, Human
accgcgggccccgcgcagc

SEQ ID NO: 767254 - RNA, 20 nt, Human
acugugcccagccucagggg

SEQ ID NO: 767255 - RNA, 22 nt, Human
agaaaagacugaaacauuuucu

SEQ ID NO: 767256 - RNA, 21 nt, Human
agaaagaggcaauguccucau

SEQ ID NO: 767257 - RNA, 21 nt, Human
agaaaggcugguaucugcccu

SEQ ID NO: 767258 - RNA, 21 nt, Human
agaaaggcugguaucugcccu

SEQ ID NO: 767259 - RNA, 22 nt, Human
agaagccccuggccgcagcucc

SEQ ID NO: 767260 - RNA, 22 nt, Human
agaagccuagaacauggacccc

SEQ ID NO: 767261 - RNA, 20 nt, Human
agagguuggugggggaaggg

SEQ ID NO: 767262 - RNA, 21 nt, Human
agagugaggggacugcuccau

SEQ ID NO: 767263 - RNA, 19 nt, Human
agcagaaaaguaacagcag

SEQ ID NO: 767264 - RNA, 21 nt, Human
agcagccacucaagccgaguc

SEQ ID NO: 767265 - RNA, 20 nt, Human
agccccagguacuugggcug

SEQ ID NO: 767266 - RNA, 18 nt, Human
aggaaaggagggagagga

SEQ ID NO: 767267 - RNA, 19 nt, Human
aggagaaaaaugcuauuca

SEQ ID NO: 767268 - RNA, 18 nt, Human
aggagccugucuauaacc

SEQ ID NO: 767269 - RNA, 20 nt, Human
aggagguguccucuucccag

SEQ ID NO: 767270 - RNA, 26 nt, Human
aggcagcuucugcugaccuucccuuc

SEQ ID NO: 767271 - RNA, 19 nt, Human
aggcaggcaugcgagucug

SEQ ID NO: 767272 - RNA, 20 nt, Human
aggccuuccaugccaggccc

SEQ ID NO: 767273 - RNA, 24 nt, Human
aggcugggcucaggagaggaagcc

SEQ ID NO: 767274 - RNA, 19 nt, Human
agggaccagagcgcauugg

SEQ ID NO: 767275 - RNA, 20 nt, Human
agggaccagagcgcauugga

SEQ ID NO: 767276 - RNA, 19 nt, Human
agggccacacaucugucug

SEQ ID NO: 767277 - RNA, 19 nt, Human
aggggaauggugauuucag

SEQ ID NO: 767278 - RNA, 18 nt, Human
aggggcccagacagauau

SEQ ID NO: 767279 - RNA, 20 nt, Human
agggugacaucccauaggga

SEQ ID NO: 767280 - RNA, 18 nt, Human
agugguuuuguggccagg

SEQ ID NO: 767281 - RNA, 23 nt, Human
aguguugcucaaguguucucaga

SEQ ID NO: 767282 - RNA, 19 nt, Human
aguuaagacgcuggcagug

SEQ ID NO: 767283 - RNA, 25 nt, Human
auuaaaaaaaaaaaaaaaagaaaau

SEQ ID NO: 767284 - RNA, 20 nt, Human
auuugccaggagaguagguu

SEQ ID NO: 767285 - RNA, 18 nt, Human
caaaaggccuuccaugcc

SEQ ID NO: 767286 - RNA, 22 nt, Human
caaccccagcagcucaccaccc

SEQ ID NO: 767287 - RNA, 18 nt, Human
caccacccugcuuccagc

SEQ ID NO: 767288 - RNA, 23 nt, Human
caccauggcuaugaaaaggccug

SEQ ID NO: 767289 - RNA, 20 nt, Human
cacgcagaggagcaugcagc

SEQ ID NO: 767290 - RNA, 22 nt, Human
cacucugcuggucugaagggaa

SEQ ID NO: 767291 - RNA, 21 nt, Human
cagcccaaggccaguggcaca

SEQ ID NO: 767292 - RNA, 20 nt, Human
caggcccccuuggcccuagg

SEQ ID NO: 767293 - RNA, 25 nt, Human
caggcccccuuggcccuaggccaug

SEQ ID NO: 767294 - RNA, 22 nt, Human
cagggaacaagauggacuucca

SEQ ID NO: 767295 - RNA, 18 nt, Human
cagggagacagggcuugg

SEQ ID NO: 767296 - RNA, 24 nt, Human
cauaacacacggacugaagaauuu

SEQ ID NO: 767297 - RNA, 20 nt, Human
caucccauagggagcagcag

SEQ ID NO: 767298 - RNA, 18 nt, Human
ccaacucuccucacucac

SEQ ID NO: 767299 - RNA, 18 nt, Human
ccaaggagcagacuugga

SEQ ID NO: 767300 - RNA, 18 nt, Human
ccaagguugccaaaaaua

SEQ ID NO: 767301 - RNA, 23 nt, Human
ccacauccuccagcugccccuuc

SEQ ID NO: 767302 - RNA, 19 nt, Human
ccacugugcccagccucag

SEQ ID NO: 767303 - RNA, 22 nt, Human
ccacugugcccagccucagggc

SEQ ID NO: 767304 - RNA, 18 nt, Human
ccaggccuggcugcuuca

SEQ ID NO: 767305 - RNA, 21 nt, Human
ccauucaggcccccuuggccc

SEQ ID NO: 767306 - RNA, 21 nt, Human
cccagacagauauccugggca

SEQ ID NO: 767307 - RNA, 18 nt, Human
ccccaaggagguguccuc

SEQ ID NO: 767308 - RNA, 21 nt, Human
ccccaaggagguguccucuuc

SEQ ID NO: 767309 - RNA, 20 nt, Human
ccccagcagcucaccacccu

SEQ ID NO: 767310 - RNA, 20 nt, Human
cccccuuuccaugcucuggg

SEQ ID NO: 767311 - RNA, 20 nt, Human
cccucuuggcuuuugggcuu

SEQ ID NO: 767312 - RNA, 19 nt, Human
cccugcucagggcucugca

SEQ ID NO: 767313 - RNA, 22 nt, Human
cccugcuuccagcuaagguggg

SEQ ID NO: 767314 - RNA, 20 nt, Human
ccgcgggccccgcgcagccc

SEQ ID NO: 767315 - RNA, 20 nt, Human
ccugcaauggccgagguugu

SEQ ID NO: 767316 - RNA, 23 nt, Human
ccugccaguguguuugcuccauu

SEQ ID NO: 767317 - RNA, 18 nt, Human
cggcaggccugaccuggc

SEQ ID NO: 767318 - RNA, 19 nt, Human
cggcggacucuacacaccg

SEQ ID NO: 767319 - RNA, 21 nt, Human
cgggacgcggcuccggggcgg

SEQ ID NO: 767320 - RNA, 19 nt, Human
cucagugauagggagaagc

SEQ ID NO: 767321 - RNA, 22 nt, Human
cuccaggagcucuaggcaggca

SEQ ID NO: 767322 - RNA, 23 nt, Human
cucgccauugucuggguugcagc

SEQ ID NO: 767323 - RNA, 18 nt, Human
cucuacucaaaaugcccc

SEQ ID NO: 767324 - RNA, 19 nt, Human
cucuacucuuugcugaggg

SEQ ID NO: 767325 - RNA, 18 nt, Human
cucuccucuuccuccaga

SEQ ID NO: 767326 - RNA, 19 nt, Human
cugcuaaagacuuuuggac

SEQ ID NO: 767327 - RNA, 19 nt, Human
cugcucagcugacccucgg

SEQ ID NO: 767328 - RNA, 24 nt, Human
cuggcccagaccagagcugacccc

SEQ ID NO: 767329 - RNA, 21 nt, Human
cuggggccuugccaggcagcu

SEQ ID NO: 767330 - RNA, 21 nt, Human
cuguaaggcuuucccaggacc

SEQ ID NO: 767331 - RNA, 19 nt, Human
cuucacucugcuggucuga

SEQ ID NO: 767332 - RNA, 19 nt, Human
cuucccucuuggcuuuugg

SEQ ID NO: 767333 - RNA, 20 nt, Human
cuuggggacguuccccucag

SEQ ID NO: 767334 - RNA, 21 nt, Human
cuuugugucaccauggcuaug

SEQ ID NO: 767335 - RNA, 22 nt, Human
gaaaacgaaaugggcuucacug

SEQ ID NO: 767336 - RNA, 24 nt, Human
gaaaacgaaaugggcuucacuggg

SEQ ID NO: 767337 - RNA, 23 nt, Human
gaaaagacugaaacauuuucuca

SEQ ID NO: 767338 - RNA, 18 nt, Human
gagagguuccuagaaucc

SEQ ID NO: 767339 - RNA, 23 nt, Human
gagaguagguaagagccccugug

SEQ ID NO: 767340 - RNA, 20 nt, Human
gagcagacuuggagugguuu

SEQ ID NO: 767341 - RNA, 20 nt, Human
gagcagcaggaccagaaagg

SEQ ID NO: 767342 - RNA, 19 nt, Human
gagggcuggggcuuggagg

SEQ ID NO: 767343 - RNA, 19 nt, Human
gcaaaaccccaggccuggc

SEQ ID NO: 767344 - RNA, 21 nt, Human
gcacaccuacuaguaacagca

SEQ ID NO: 767345 - RNA, 21 nt, Human
gccgcagcuccuugcuuuccu

SEQ ID NO: 767346 - RNA, 20 nt, Human
gccucuucuuaagccccagc

SEQ ID NO: 767347 - RNA, 22 nt, Human
gccuggggccuugccaggcagc

SEQ ID NO: 767348 - RNA, 22 nt, Human
gcucaggagaggaagccaagga

SEQ ID NO: 767349 - RNA, 18 nt, Human
gcuccauucaggcccccu

SEQ ID NO: 767350 - RNA, 21 nt, Human
gcucuggggugggccuggcug

SEQ ID NO: 767351 - RNA, 22 nt, Human
gcuggggcuuggaggccaggcu

SEQ ID NO: 767352 - RNA, 20 nt, Human
ggaaacagaagccuagaaca

SEQ ID NO: 767353 - RNA, 21 nt, Human
ggaaggagggcuggggcuugg

SEQ ID NO: 767354 - RNA, 18 nt, Human
ggagaagaggcuggcugc

SEQ ID NO: 767355 - RNA, 20 nt, Human
ggagaggaugucacuguccu

SEQ ID NO: 767356 - RNA, 23 nt, Human
ggagauucuggacggggguuggg

SEQ ID NO: 767357 - RNA, 19 nt, Human
ggagugguuuuguggccag

SEQ ID NO: 767358 - RNA, 19 nt, Human
ggaugggaacucuacucuu

SEQ ID NO: 767359 - RNA, 19 nt, Human
ggcagggcgucugcaacuc

SEQ ID NO: 767360 - RNA, 21 nt, Human
ggccuggcuacuuauaacuug

SEQ ID NO: 767361 - RNA, 21 nt, Human
ggccuugccaggcagcuucug

SEQ ID NO: 767362 - RNA, 23 nt, Human
ggcuucagaggagccugucuaua

SEQ ID NO: 767363 - RNA, 21 nt, Human
gggaagggagaaaggaaagga

SEQ ID NO: 767364 - RNA, 27 nt, Human
gggcaggggcgguccaggagaggaugc

SEQ ID NO: 767365 - RNA, 21 nt, Human
gggccuggcuggccuggggcc

SEQ ID NO: 767366 - RNA, 18 nt, Human
ggggaagggagaaaggaa

SEQ ID NO: 767367 - RNA, 18 nt, Human
ggggaagggagaaaggaa

SEQ ID NO: 767368 - RNA, 21 nt, Human
ggggcucacucccccaaggag

SEQ ID NO: 767369 - RNA, 25 nt, Human
gucaaguuaccuucugcagaaaagc

SEQ ID NO: 767370 - RNA, 18 nt, Human
gugguuccuacaggagga

SEQ ID NO: 767371 - RNA, 18 nt, Human
guuccuacaggaggagac

SEQ ID NO: 767372 - RNA, 18 nt, Human
uaacagcagcugacugca

SEQ ID NO: 767373 - RNA, 18 nt, Human
uaauccaaccccagcagg

SEQ ID NO: 767374 - RNA, 24 nt, Human
uacuugggcugagggcagaaagag

SEQ ID NO: 767375 - RNA, 22 nt, Human
uagagccagcuaccaguucucc

SEQ ID NO: 767376 - RNA, 22 nt, Human
uagcagaaaaguaacagcagag

SEQ ID NO: 767377 - RNA, 24 nt, Human
uagcaggcccucacccaggaaguu

SEQ ID NO: 767378 - RNA, 20 nt, Human
uagguaagagccccugugcu

SEQ ID NO: 767379 - RNA, 24 nt, Human
uaguaacagcagcugacugcagaa

SEQ ID NO: 767380 - RNA, 20 nt, Human
ucaagaagccccuggccgca

SEQ ID NO: 767381 - RNA, 21 nt, Human
ucagagucacagugaugggag

SEQ ID NO: 767382 - RNA, 21 nt, Human
uccacugugcccagccucagg

SEQ ID NO: 767383 - RNA, 18 nt, Human
uccagucaggauucucca

SEQ ID NO: 767384 - RNA, 30 nt, Human
ucccaaauaauccaaccccagcagcucacc

SEQ ID NO: 767385 - RNA, 25 nt, Human
ucccaaguguugcucaaguguuccc

SEQ ID NO: 767386 - RNA, 18 nt, Human
ucccagggcuucuccuug

SEQ ID NO: 767387 - RNA, 26 nt, Human
ucccgagucccugggaagggcugccu

SEQ ID NO: 767388 - RNA, 20 nt, Human
ucccgucuaugauguggggc

SEQ ID NO: 767389 - RNA, 24 nt, Human
ucccugcagcuccaccacauccuc

SEQ ID NO: 767390 - RNA, 22 nt, Human
ucccugggaagggcugccuccc

SEQ ID NO: 767391 - RNA, 24 nt, Human
ucccugggaagggcugccuccccc

SEQ ID NO: 767392 - RNA, 23 nt, Human
uccuggguauaaccuuggggcuc

SEQ ID NO: 767393 - RNA, 19 nt, Human
uccuuucucaaccaaaaag

SEQ ID NO: 767394 - RNA, 20 nt, Human
ucucaaagcccagagcuugu

SEQ ID NO: 767395 - RNA, 22 nt, Human
ucucagagucccucucacaaac

SEQ ID NO: 767396 - RNA, 19 nt, Human
ucuccaggcuaguugccuu

SEQ ID NO: 767397 - RNA, 21 nt, Human
ucuccucacucacccguggag

SEQ ID NO: 767398 - RNA, 18 nt, Human
ucucgccauugucugggu

SEQ ID NO: 767399 - RNA, 22 nt, Human
ucucuuggcucuggggugggcc

SEQ ID NO: 767400 - RNA, 22 nt, Human
ucuugguagucagaucucgcua

SEQ ID NO: 767401 - RNA, 18 nt, Human
ugaccuucccucuuggcu

SEQ ID NO: 767402 - RNA, 19 nt, Human
ugagagguuccuagaaucc

SEQ ID NO: 767403 - RNA, 23 nt, Human
ugagaucgagcagcccaaggcca

SEQ ID NO: 767404 - RNA, 19 nt, Human
ugagcccagauuugucucc

SEQ ID NO: 767405 - RNA, 22 nt, Human
ugagcuggaaugaugaggaagc

SEQ ID NO: 767406 - RNA, 22 nt, Human
ugaggaagaggaaugcuaggug

SEQ ID NO: 767407 - RNA, 23 nt, Human
ugaggaagaggaaugcuagguga

SEQ ID NO: 767408 - RNA, 18 nt, Human
ugaggaagcagagccccg

SEQ ID NO: 767409 - RNA, 23 nt, Human
ugaggagaagcagccacucaagc

SEQ ID NO: 767410 - RNA, 18 nt, Human
ugaggcaggagaaaaaug

SEQ ID NO: 767411 - RNA, 21 nt, Human
ugagggaaguguccccuggga

SEQ ID NO: 767412 - RNA, 24 nt, Human
ugagggaccagagcgcauuggauu

SEQ ID NO: 767413 - RNA, 25 nt, Human
ugagggcagaaagaggcaauguccu

SEQ ID NO: 767414 - RNA, 20 nt, Human
ugcccugcuagccccaggua

SEQ ID NO: 767415 - RNA, 22 nt, Human
ugcuaaagacuuuuggacucag

SEQ ID NO: 767416 - RNA, 22 nt, Human
ugcuggggaaggacaugugaug

SEQ ID NO: 767417 - RNA, 23 nt, Human
ugcuuugggcuaugaguccuggg

SEQ ID NO: 767418 - RNA, 20 nt, Human
uggaccccacggccggccaa

SEQ ID NO: 767419 - RNA, 21 nt, Human
uggccagagacuuaucuauug

SEQ ID NO: 767420 - RNA, 18 nt, Human
uggcccagaccagagcug

SEQ ID NO: 767421 - RNA, 22 nt, Human
uggcccagaccagagcugaccc

SEQ ID NO: 767422 - RNA, 22 nt, Human
uggcucuggggugggccuggcu

SEQ ID NO: 767423 - RNA, 20 nt, Human
ugggcugagggcagaaagag

SEQ ID NO: 767424 - RNA, 22 nt, Human
uggggaaggacaugugaugagc

SEQ ID NO: 767425 - RNA, 19 nt, Human
uguaaggcuuucccaggac

SEQ ID NO: 767426 - RNA, 22 nt, Human
uguagguguccucaaaugaaga

SEQ ID NO: 767427 - RNA, 20 nt, Human
ugucaaguuaccuucugcag

SEQ ID NO: 767428 - RNA, 22 nt, Human
ugucuggguugcagccaggggc

SEQ ID NO: 767429 - RNA, 21 nt, Human
ugugaaaccugcaauggccga

SEQ ID NO: 767430 - RNA, 24 nt, Human
ugugaaggcugggccacgcagagg

SEQ ID NO: 767431 - RNA, 21 nt, Human
ugugcacauguauauaagugg

SEQ ID NO: 767432 - RNA, 21 nt, Human
ugugcacauguauauaagugu

SEQ ID NO: 767433 - RNA, 23 nt, Human
ugugcacauguauauaagugugg

SEQ ID NO: 767434 - RNA, 21 nt, Human
uguggaagaacucuggggcug

SEQ ID NO: 767435 - RNA, 19 nt, Human
ugugguggcaggucccguc

SEQ ID NO: 767436 - RNA, 22 nt, Human
uuaggcccaggaguccugcgcu

SEQ ID NO: 767437 - RNA, 21 nt, Human
uuagggccacacaucugucug

SEQ ID NO: 767438 - RNA, 20 nt, Human
uuccuguuguggaagaacuc

SEQ ID NO: 767439 - RNA, 22 nt, Human
uucugaaggcauggacagcugg

SEQ ID NO: 767440 - RNA, 22 nt, Human
uucuguaaccuguuuauuuucu

SEQ ID NO: 767441 - RNA, 24 nt, Human
uugcugagggaaguguccccuggg

SEQ ID NO: 767442 - RNA, 22 nt, Human
uugguuagaaacacugaucuca

SEQ ID NO: 767443 - RNA, 20 nt, Human
uuguggaagaacucuggggc

SEQ ID NO: 767444 - RNA, 21 nt, Human
uuucccaggaccuucucugca

SEQ ID NO: 767445 - RNA, 21 nt, Human
aaaaaagcgaaaccaaccuuc

SEQ ID NO: 767446 - RNA, 25 nt, Human
aaaaagccaaacacuaaaucuauaa

SEQ ID NO: 767447 - RNA, 20 nt, Human
aaaagaacuauauacaacau

SEQ ID NO: 767448 - RNA, 23 nt, Human
aaacaaaagaggagaaaagggac

SEQ ID NO: 767449 - RNA, 27 nt, Human
aaacagaacauagaaaaauaaacagga

SEQ ID NO: 767450 - RNA, 22 nt, Human
aaagcaccuaacacaaaaaaca

SEQ ID NO: 767451 - RNA, 23 nt, Human
aaagcaccuaacacaaaaaacag

SEQ ID NO: 767452 - RNA, 21 nt, Human
aacauugcuaagacacaguua

SEQ ID NO: 767453 - RNA, 22 nt, Human
aagaggcaaaaauaaauauugc

SEQ ID NO: 767454 - RNA, 23 nt, Human
aagaguacuccgaauguaaggau

SEQ ID NO: 767455 - RNA, 18 nt, Human
aagcaccuaacacaaaaa

SEQ ID NO: 767456 - RNA, 25 nt, Human
aagcauuuuaaaagacaacaguguu

SEQ ID NO: 767457 - RNA, 20 nt, Human
aagcgaaaccaaccuucaug

SEQ ID NO: 767458 - RNA, 19 nt, Human
aaggaaaaaaagcgaaacc

SEQ ID NO: 767459 - RNA, 20 nt, Human
aaggaaacaacacgcugcaa

SEQ ID NO: 767460 - RNA, 21 nt, Human
aagugaaagugauacacaacc

SEQ ID NO: 767461 - RNA, 27 nt, Human
aaucaaguucagccaaagcaccuaaca

SEQ ID NO: 767462 - RNA, 23 nt, Human
acaaacaauagcauuuagacaua

SEQ ID NO: 767463 - RNA, 21 nt, Human
acagcacagagguaaauaacc

SEQ ID NO: 767464 - RNA, 22 nt, Human
acuccugagaucaaacacauug

SEQ ID NO: 767465 - RNA, 21 nt, Human
acucugcaauucuaggagccc

SEQ ID NO: 767466 - RNA, 21 nt, Human
acuggcauccaaacauuccca

SEQ ID NO: 767467 - RNA, 20 nt, Human
agaaagaccucuuuuaaaaa

SEQ ID NO: 767468 - RNA, 22 nt, Human
agaauucuugguggaaacagcc

SEQ ID NO: 767469 - RNA, 27 nt, Human
agacaaaaaacaguuaaauaaacaaaa

SEQ ID NO: 767470 - RNA, 21 nt, Human
agacaaaauuuaauauaugca

SEQ ID NO: 767471 - RNA, 19 nt, Human
agaggagaaaaaagagagg

SEQ ID NO: 767472 - RNA, 24 nt, Human
agaguggauuuucacauugguaug

SEQ ID NO: 767473 - RNA, 23 nt, Human
agauucugaaugaagaaaacugg

SEQ ID NO: 767474 - RNA, 20 nt, Human
agcauuaagacaugcaccca

SEQ ID NO: 767475 - RNA, 26 nt, Human
agcauuuagacauaaaguaggaagca

SEQ ID NO: 767476 - RNA, 18 nt, Human
aggggggcuggggagagg

SEQ ID NO: 767477 - RNA, 22 nt, Human
agugcauuaguguuaaaguggc

SEQ ID NO: 767478 - RNA, 22 nt, Human
aguggauuuucacauugguaug

SEQ ID NO: 767479 - RNA, 18 nt, Human
aguuccaacugcgguuuu

SEQ ID NO: 767480 - RNA, 25 nt, Human
aucacaucuucacaugcucuuaaag

SEQ ID NO: 767481 - RNA, 19 nt, Human
aucauaauauggugaaguu

SEQ ID NO: 767482 - RNA, 19 nt, Human
augggaaacagaaagcaaa

SEQ ID NO: 767483 - RNA, 24 nt, Human
augugauuuucauuaaaaucaggu

SEQ ID NO: 767484 - RNA, 19 nt, Human
auuacacauggcaugcaaa

SEQ ID NO: 767485 - RNA, 20 nt, Human
auuccuuaacugagccaccg

SEQ ID NO: 767486 - RNA, 18 nt, Human
caaaaaaagaaagucacc

SEQ ID NO: 767487 - RNA, 23 nt, Human
caaaauccccuggacuaauacau

SEQ ID NO: 767488 - RNA, 19 nt, Human
caaaucagcaguuacacag

SEQ ID NO: 767489 - RNA, 24 nt, Human
caaauccuuccucugcaagaguuc

SEQ ID NO: 767490 - RNA, 21 nt, Human
caagcuauaaaauacaaagca

SEQ ID NO: 767491 - RNA, 18 nt, Human
caauggugcggggggggg

SEQ ID NO: 767492 - RNA, 18 nt, Human
cacuagaguggaccuugc

SEQ ID NO: 767493 - RNA, 22 nt, Human
cacugugugaccccaugcaggc

SEQ ID NO: 767494 - RNA, 21 nt, Human
cagaagcugagaucaaacccc

SEQ ID NO: 767495 - RNA, 24 nt, Human
cagagaacccagaaaacccaucug

SEQ ID NO: 767496 - RNA, 21 nt, Human
cagcauaaggcaaaauccccu

SEQ ID NO: 767497 - RNA, 23 nt, Human
cagcauuaagacaugcacccacc

SEQ ID NO: 767498 - RNA, 20 nt, Human
caggaauuaaccugcccccu

SEQ ID NO: 767499 - RNA, 21 nt, Human
caugcaaagagaaauuacuac

SEQ ID NO: 767500 - RNA, 19 nt, Human
cauguagggcauuuacucu

SEQ ID NO: 767501 - RNA, 22 nt, Human
cauguagggcauuuacucuuau

SEQ ID NO: 767502 - RNA, 19 nt, Human
cauugaacuuucaaaucug

SEQ ID NO: 767503 - RNA, 20 nt, Human
ccaacaucugaaaucaaacu

SEQ ID NO: 767504 - RNA, 21 nt, Human
ccauagguuaucagagaaccc

SEQ ID NO: 767505 - RNA, 21 nt, Human
ccccuugaacucauguccaaa

SEQ ID NO: 767506 - RNA, 23 nt, Human
cccucuucuaagauuuucuaaaa

SEQ ID NO: 767507 - RNA, 18 nt, Human
ccucuagaaaagaacuag

SEQ ID NO: 767508 - RNA, 22 nt, Human
ccuucagaaacauuccaccuaa

SEQ ID NO: 767509 - RNA, 19 nt, Human
cuagaggugagauauggga

SEQ ID NO: 767510 - RNA, 23 nt, Human
cuauaaaauacaaagcaaaacca

SEQ ID NO: 767511 - RNA, 20 nt, Human
cucacaaaauauuuagaauc

SEQ ID NO: 767512 - RNA, 22 nt, Human
cucauguccaaaaugucuuguc

SEQ ID NO: 767513 - RNA, 22 nt, Human
cugcccccuugaacucaugucc

SEQ ID NO: 767514 - RNA, 19 nt, Human
cuggaagaaaacagaaugu

SEQ ID NO: 767515 - RNA, 24 nt, Human
cugugugaccccaugcaggccagu

SEQ ID NO: 767516 - RNA, 28 nt, Human
cuuaaguaauuugcuuuacaaaaaaaga

SEQ ID NO: 767517 - RNA, 23 nt, Human
cuuauccuuaguuugaccucagc

SEQ ID NO: 767518 - RNA, 24 nt, Human
gaaaaaaagcgaaaccaaccuuca

SEQ ID NO: 767519 - RNA, 21 nt, Human
gaaaacaacucuagaaaccug

SEQ ID NO: 767520 - RNA, 19 nt, Human
gaacagagugcaacaugca

SEQ ID NO: 767521 - RNA, 21 nt, Human
gaagaaaacaacucuagaaac

SEQ ID NO: 767522 - RNA, 18 nt, Human
gaaugaagaaaacuggca

SEQ ID NO: 767523 - RNA, 21 nt, Human
gacaaggcagggucugagcuu

SEQ ID NO: 767524 - RNA, 26 nt, Human
gaguaggcaccaugauauuuacacca

SEQ ID NO: 767525 - RNA, 20 nt, Human
gauaugggaaacagaaagca

SEQ ID NO: 767526 - RNA, 21 nt, Human
gggcuggggagaggaaagagu

SEQ ID NO: 767527 - RNA, 24 nt, Human
gucacuugaucaacaaacagauuc

SEQ ID NO: 767528 - RNA, 21 nt, Human
gugaccccaugcaggccaguc

SEQ ID NO: 767529 - RNA, 20 nt, Human
gugcauuaguguuaaagugg

SEQ ID NO: 767530 - RNA, 25 nt, Human
uaaaaaccaaaauaugaagaaagua

SEQ ID NO: 767531 - RNA, 22 nt, Human
uaaaaccaaucugaaguccuca

SEQ ID NO: 767532 - RNA, 19 nt, Human
uaaaauacaaagcaaaacc

SEQ ID NO: 767533 - RNA, 24 nt, Human
uaaaguggcauuaaaaaaacuucu

SEQ ID NO: 767534 - RNA, 18 nt, Human
uaacaagcuauaaaauac

SEQ ID NO: 767535 - RNA, 22 nt, Human
uaacucacugugugaccccaug

SEQ ID NO: 767536 - RNA, 21 nt, Human
uaagacaugcacccaccccuc

SEQ ID NO: 767537 - RNA, 18 nt, Human
uaaggcuacaaaacagaa

SEQ ID NO: 767538 - RNA, 21 nt, Human
uacccuuaaguaaaagacaaa

SEQ ID NO: 767539 - RNA, 21 nt, Human
uagaaaagaacuagaagucac

SEQ ID NO: 767540 - RNA, 23 nt, Human
uagaaaccugucaagcuaaaaau

SEQ ID NO: 767541 - RNA, 18 nt, Human
uagaccucuaaucaggga

SEQ ID NO: 767542 - RNA, 23 nt, Human
uagaggugagauaugggaaacag

SEQ ID NO: 767543 - RNA, 19 nt, Human
uaggagauaguaucuccau

SEQ ID NO: 767544 - RNA, 18 nt, Human
uagggucaaaauaaguuu

SEQ ID NO: 767545 - RNA, 19 nt, Human
uagguuaucagagaaccca

SEQ ID NO: 767546 - RNA, 23 nt, Human
uauaaggaaaaaagccaaacacu

SEQ ID NO: 767547 - RNA, 22 nt, Human
uauaugcacacaguuuuauaua

SEQ ID NO: 767548 - RNA, 21 nt, Human
uaucugaaaauaacauauugg

SEQ ID NO: 767549 - RNA, 23 nt, Human
ucaagaaaaguuuuccacacaac

SEQ ID NO: 767550 - RNA, 19 nt, Human
ucaguaaacaguaugagga

SEQ ID NO: 767551 - RNA, 19 nt, Human
uccaucacugacuguuuag

SEQ ID NO: 767552 - RNA, 18 nt, Human
ucuaccacuaacucacug

SEQ ID NO: 767553 - RNA, 19 nt, Human
ucugcuaaaauucucuuuc

SEQ ID NO: 767554 - RNA, 23 nt, Human
ugaaauauuccaaauccuuccuc

SEQ ID NO: 767555 - RNA, 22 nt, Human
ugaagguaaggggggcugggga

SEQ ID NO: 767556 - RNA, 23 nt, Human
ugagaacagagugcaacaugcaa

SEQ ID NO: 767557 - RNA, 21 nt, Human
ugauaaagaauauaaaguacu

SEQ ID NO: 767558 - RNA, 19 nt, Human
ugauuuucauuaaaaucag

SEQ ID NO: 767559 - RNA, 21 nt, Human
ugcauuaguguuaaaguggca

SEQ ID NO: 767560 - RNA, 18 nt, Human
ugccaaggagacaugggg

SEQ ID NO: 767561 - RNA, 18 nt, Human
ugccaggacaaggcaggg

SEQ ID NO: 767562 - RNA, 18 nt, Human
ugcuaagacacaguuaau

SEQ ID NO: 767563 - RNA, 23 nt, Human
uggacuccugagaucaaacacau

SEQ ID NO: 767564 - RNA, 20 nt, Human
ugucuuguccaguaugggag

SEQ ID NO: 767565 - RNA, 18 nt, Human
uuaaaacuaucaaaaguc

SEQ ID NO: 767566 - RNA, 26 nt, Human
uuaaaagacaacaguguuuuaggcug

SEQ ID NO: 767567 - RNA, 20 nt, Human
uuaaauaaacaaaagaggag

SEQ ID NO: 767568 - RNA, 21 nt, Human
uuaacauuucuucucacaaaa

SEQ ID NO: 767569 - RNA, 21 nt, Human
uuacaaaaaaagaaagucacc

SEQ ID NO: 767570 - RNA, 24 nt, Human
uuaggcugagaauuguuugagccc

SEQ ID NO: 767571 - RNA, 24 nt, Human
uuaggucugccaugaaaaugaauu

SEQ ID NO: 767572 - RNA, 21 nt, Human
uucaguuugucaaauucaagu

SEQ ID NO: 767573 - RNA, 23 nt, Human
uucauaauuuccaacucaaaaau

SEQ ID NO: 767574 - RNA, 21 nt, Human
uucuaagauuuucuaaaacuu

SEQ ID NO: 767575 - RNA, 22 nt, Human
uucuaggagcccccaagaguac

SEQ ID NO: 767576 - RNA, 24 nt, Human
uucuuaaggcuacaaaacagaaca

SEQ ID NO: 767577 - RNA, 25 nt, Human
uugaaaaugaaauauuccaaauccu

SEQ ID NO: 767578 - RNA, 19 nt, Human
uugaagauuugagaggaaa

SEQ ID NO: 767579 - RNA, 20 nt, Human
uugaagauuugagaggaaau

SEQ ID NO: 767580 - RNA, 18 nt, Human
uugagaggaaaugaagag

SEQ ID NO: 767581 - RNA, 20 nt, Human
uuggaagcauuuuaaaagac

SEQ ID NO: 767582 - RNA, 23 nt, Human
uuggguggauaucaaucuacaag

SEQ ID NO: 767583 - RNA, 23 nt, Human
uuuaaagccuucagaaacauucc

SEQ ID NO: 767584 - RNA, 21 nt, Human
uuuagaaucugucagugcauu

SEQ ID NO: 767585 - RNA, 22 nt, Human
uuuguacucaguguaaggcuau

SEQ ID NO: 767586 - RNA, 21 nt, Human
accacgacgucuggagagagg

SEQ ID NO: 767587 - RNA, 20 nt, Human
agaaggaagcgcagaaacuc

SEQ ID NO: 767588 - RNA, 22 nt, Human
caggcaacuggccgacuccgac

SEQ ID NO: 767589 - RNA, 27 nt, Human
ccgaccaacagagaaaucgggaacuga

SEQ ID NO: 767590 - RNA, 21 nt, Human
cgacuccgaccaacagagaaa

SEQ ID NO: 767591 - RNA, 24 nt, Human
gacgucuggagagagggagaagga

SEQ ID NO: 767592 - RNA, 18 nt, Human
ggagaaacaguggaccag

SEQ ID NO: 767593 - RNA, 18 nt, Human
uggccgacuccgaccaac

SEQ ID NO: 767594 - RNA, 21 nt, Human
uuacauuuauaggagaaacag

SEQ ID NO: 767595 - RNA, 24 nt, Human
aaaaaaaaaacacauguuagaaca

SEQ ID NO: 767596 - RNA, 22 nt, Human
aaaaagaaagggucugaucuga

SEQ ID NO: 767597 - RNA, 23 nt, Human
aaaaauuaagagaagaaagacaa

SEQ ID NO: 767598 - RNA, 23 nt, Human
aaagacaaaaaagaaagggucug

SEQ ID NO: 767599 - RNA, 23 nt, Human
aacaacggaacaaacaucagaga

SEQ ID NO: 767600 - RNA, 22 nt, Human
aagagaagaaagacaaaaaaga

SEQ ID NO: 767601 - RNA, 19 nt, Human
aagggcucccggcccugau

SEQ ID NO: 767602 - RNA, 20 nt, Human
aagucaaagggggaaggagg

SEQ ID NO: 767603 - RNA, 22 nt, Human
acaaacaucagagagcaucccc

SEQ ID NO: 767604 - RNA, 21 nt, Human
acacaugcugggggucuuugu

SEQ ID NO: 767605 - RNA, 24 nt, Human
acagagcaagaccacguaucaaaa

SEQ ID NO: 767606 - RNA, 27 nt, Human
accacguaucaaaaaaaaaaaaaaaaa

SEQ ID NO: 767607 - RNA, 20 nt, Human
acccuccggcagggcucugg

SEQ ID NO: 767608 - RNA, 18 nt, Human
acugcacugcagccugag

SEQ ID NO: 767609 - RNA, 20 nt, Human
acugcacugcagccugagug

SEQ ID NO: 767610 - RNA, 21 nt, Human
acugcacugcagccugaguga

SEQ ID NO: 767611 - RNA, 24 nt, Human
acugcacugcagccugagugacag

SEQ ID NO: 767612 - RNA, 20 nt, Human
agaaaagacagauggaaaca

SEQ ID NO: 767613 - RNA, 22 nt, Human
agaaaagaggcauuuaaaaauu

SEQ ID NO: 767614 - RNA, 20 nt, Human
agaagaaagacaaaaaagaa

SEQ ID NO: 767615 - RNA, 21 nt, Human
agacaaaaaagaaagggucug

SEQ ID NO: 767616 - RNA, 27 nt, Human
agacaaaaaagaaagggucugaucuga

SEQ ID NO: 767617 - RNA, 27 nt, Human
agagaagaaagacaaaaaagaaagggu

SEQ ID NO: 767618 - RNA, 22 nt, Human
agagcauccccugcaaagcccc

SEQ ID NO: 767619 - RNA, 22 nt, Human
aggaaaacacagugccugcaga

SEQ ID NO: 767620 - RNA, 20 nt, Human
aggagccccagggagcagga

SEQ ID NO: 767621 - RNA, 19 nt, Human
aggaggucaaggccgcagc

SEQ ID NO: 767622 - RNA, 23 nt, Human
aggcagccguggaaucagggcag

SEQ ID NO: 767623 - RNA, 24 nt, Human
aucaugccacugcacugcagccug

SEQ ID NO: 767624 - RNA, 19 nt, Human
auggaagauagcacccaca

SEQ ID NO: 767625 - RNA, 21 nt, Human
caaacaucagagagcaucccc

SEQ ID NO: 767626 - RNA, 21 nt, Human
caaagcccccaccccagagcc

SEQ ID NO: 767627 - RNA, 27 nt, Human
caacccccuggucccugguggcuccuu

SEQ ID NO: 767628 - RNA, 24 nt, Human
caacggcagcaucuccaacugcac

SEQ ID NO: 767629 - RNA, 23 nt, Human
caacugcacaaagaccccuugcu

SEQ ID NO: 767630 - RNA, 18 nt, Human
caagagcucguacaaguc

SEQ ID NO: 767631 - RNA, 24 nt, Human
caaugcccaugaauauacccaaag

SEQ ID NO: 767632 - RNA, 23 nt, Human
cacacaaccuccuugggagcccc

SEQ ID NO: 767633 - RNA, 21 nt, Human
caccgcacgccaucagcuugc

SEQ ID NO: 767634 - RNA, 19 nt, Human
caccuguagucucaucuac

SEQ ID NO: 767635 - RNA, 21 nt, Human
caccuguagucucaucuacag

SEQ ID NO: 767636 - RNA, 22 nt, Human
cacucaacccccuggucccugg

SEQ ID NO: 767637 - RNA, 20 nt, Human
cacugcacugcagccugagu

SEQ ID NO: 767638 - RNA, 24 nt, Human
cacugcacugcagccugagugaca

SEQ ID NO: 767639 - RNA, 23 nt, Human
cacugcagccugagugacagagc

SEQ ID NO: 767640 - RNA, 23 nt, Human
cagagggacagcccccagcaccc

SEQ ID NO: 767641 - RNA, 25 nt, Human
cagagggacagcccccagcacccuc

SEQ ID NO: 767642 - RNA, 22 nt, Human
cagccaccgcacgccaucagcu

SEQ ID NO: 767643 - RNA, 23 nt, Human
ccaccgcacgccaucagcuugcc

SEQ ID NO: 767644 - RNA, 20 nt, Human
ccacugcacugcagccugag

SEQ ID NO: 767645 - RNA, 21 nt, Human
ccacugcacugcagccugagu

SEQ ID NO: 767646 - RNA, 24 nt, Human
ccacugcacugcagccugagugac

SEQ ID NO: 767647 - RNA, 21 nt, Human
ccaguccugagagggucaaaa

SEQ ID NO: 767648 - RNA, 22 nt, Human
ccauacacacaaccuccuuggg

SEQ ID NO: 767649 - RNA, 22 nt, Human
ccaugaauauacccaaaguguc

SEQ ID NO: 767650 - RNA, 18 nt, Human
cccaugaauauacccaaa

SEQ ID NO: 767651 - RNA, 24 nt, Human
cccccagcacccuccggcagggcu

SEQ ID NO: 767652 - RNA, 22 nt, Human
ccccgcagccaccgcacgccau

SEQ ID NO: 767653 - RNA, 24 nt, Human
ccccugcaaagcccccaccccaga

SEQ ID NO: 767654 - RNA, 23 nt, Human
cccugagccuccgaaggcagcuc

SEQ ID NO: 767655 - RNA, 19 nt, Human
ccugcaaagcccccacccc

SEQ ID NO: 767656 - RNA, 22 nt, Human
ccugcaaagcccccaccccaga

SEQ ID NO: 767657 - RNA, 20 nt, Human
ccugcaaagcccccaccccg

SEQ ID NO: 767658 - RNA, 20 nt, Human
ccugcugauggaagcggggc

SEQ ID NO: 767659 - RNA, 19 nt, Human
cggcagcaucuccaacugc

SEQ ID NO: 767660 - RNA, 19 nt, Human
cggcagggcucuggacagc

SEQ ID NO: 767661 - RNA, 21 nt, Human
cucaaacaccuguagucucau

SEQ ID NO: 767662 - RNA, 24 nt, Human
cucaagaaaagaggcauuuaaaaa

SEQ ID NO: 767663 - RNA, 25 nt, Human
cucccggcccugauaccccgcagcc

SEQ ID NO: 767664 - RNA, 21 nt, Human
cucccugagccuccgaaggca

SEQ ID NO: 767665 - RNA, 24 nt, Human
cuccugcaagucaaagggggaagg

SEQ ID NO: 767666 - RNA, 23 nt, Human
cucuggacagcuaagcccagucc

SEQ ID NO: 767667 - RNA, 21 nt, Human
cugcacaaagaccccuugcug

SEQ ID NO: 767668 - RNA, 24 nt, Human
cuugagcacaggaggucaaggccg

SEQ ID NO: 767669 - RNA, 21 nt, Human
gaaacaaccagcuccaaaggg

SEQ ID NO: 767670 - RNA, 24 nt, Human
gaacaaacaucagagagcaucccc

SEQ ID NO: 767671 - RNA, 20 nt, Human
gaagaaagacaaaaaagaaa

SEQ ID NO: 767672 - RNA, 22 nt, Human
gaagacaucacaagugucagga

SEQ ID NO: 767673 - RNA, 22 nt, Human
gacaagagcucguacaagucca

SEQ ID NO: 767674 - RNA, 20 nt, Human
gacagcccccagcacccucc

SEQ ID NO: 767675 - RNA, 24 nt, Human
gagagcauccccugcaaagccccc

SEQ ID NO: 767676 - RNA, 21 nt, Human
gagcacaggaggucaaggccg

SEQ ID NO: 767677 - RNA, 18 nt, Human
gaggacagccccugagga

SEQ ID NO: 767678 - RNA, 19 nt, Human
gaggagaggcugggcugcc

SEQ ID NO: 767679 - RNA, 18 nt, Human
gcaaaaaaaaaaacaaaa

SEQ ID NO: 767680 - RNA, 21 nt, Human
gcagcgagccaugaucaugcc

SEQ ID NO: 767681 - RNA, 21 nt, Human
gcagcuccucuaacgccuccc

SEQ ID NO: 767682 - RNA, 24 nt, Human
gccacaacggcagcaucuccaacu

SEQ ID NO: 767683 - RNA, 18 nt, Human
gccagggccgggcaccgg

SEQ ID NO: 767684 - RNA, 19 nt, Human
gccaugaucaugccacugc

SEQ ID NO: 767685 - RNA, 24 nt, Human
gcuccuugccugccugccugaggc

SEQ ID NO: 767686 - RNA, 18 nt, Human
gcugccccaagccccugc

SEQ ID NO: 767687 - RNA, 20 nt, Human
ggcaggcagcuccucaggca

SEQ ID NO: 767688 - RNA, 19 nt, Human
ggcccugauaccccgcagc

SEQ ID NO: 767689 - RNA, 18 nt, Human
ggccuccuggagaaguug

SEQ ID NO: 767690 - RNA, 20 nt, Human
gggaaggagggugcuuucuc

SEQ ID NO: 767691 - RNA, 19 nt, Human
gggucugaucugaggcuga

SEQ ID NO: 767692 - RNA, 19 nt, Human
gguggaggagaggcugggc

SEQ ID NO: 767693 - RNA, 23 nt, Human
gucccaggaggauaaaagccauc

SEQ ID NO: 767694 - RNA, 22 nt, Human
uaccccgcagccaccgcacgcc

SEQ ID NO: 767695 - RNA, 18 nt, Human
uagaaaagacagauggaa

SEQ ID NO: 767696 - RNA, 21 nt, Human
uagaaaagacagauggaaaca

SEQ ID NO: 767697 - RNA, 22 nt, Human
uauauacauuuacaucugcaua

SEQ ID NO: 767698 - RNA, 26 nt, Human
uauaugcauaaauauguagguauaua

SEQ ID NO: 767699 - RNA, 21 nt, Human
ucagcuugccaugucaaugac

SEQ ID NO: 767700 - RNA, 25 nt, Human
uccaaagggacucccugagccuccg

SEQ ID NO: 767701 - RNA, 22 nt, Human
uccacacauuuuagccugagau

SEQ ID NO: 767702 - RNA, 18 nt, Human
ucccaaagggcucccggc

SEQ ID NO: 767703 - RNA, 21 nt, Human
ucccaaagggcucccggcccu

SEQ ID NO: 767704 - RNA, 19 nt, Human
ucccaggguacacacaugc

SEQ ID NO: 767705 - RNA, 26 nt, Human
uccccugcaaagcccccaccccagag

SEQ ID NO: 767706 - RNA, 19 nt, Human
ucccugagccuccgaaggc

SEQ ID NO: 767707 - RNA, 19 nt, Human
ucuggguggaggagaggcu

SEQ ID NO: 767708 - RNA, 22 nt, Human
ugaauauacccaaaguguccca

SEQ ID NO: 767709 - RNA, 22 nt, Human
ugacaagagcucguacaagucc

SEQ ID NO: 767710 - RNA, 18 nt, Human
ugagccuccgaaggcagc

SEQ ID NO: 767711 - RNA, 22 nt, Human
ugagccuccgaaggcagcuccu

SEQ ID NO: 767712 - RNA, 19 nt, Human
ugaggcugagguauuggag

SEQ ID NO: 767713 - RNA, 24 nt, Human
ugauggaagcggggcugcaggacg

SEQ ID NO: 767714 - RNA, 18 nt, Human
ugcaaagcccccacccca

SEQ ID NO: 767715 - RNA, 23 nt, Human
ugcacaaagaccccuugcugcca

SEQ ID NO: 767716 - RNA, 22 nt, Human
ugcauauaugcauaaauaugua

SEQ ID NO: 767717 - RNA, 23 nt, Human
ugcauauaugcauaaauauguag

SEQ ID NO: 767718 - RNA, 20 nt, Human
ugccccaagccccugcucag

SEQ ID NO: 767719 - RNA, 23 nt, Human
ugccccaagccccugcucagggc

SEQ ID NO: 767720 - RNA, 21 nt, Human
ugccugccugccugaggcagc

SEQ ID NO: 767721 - RNA, 21 nt, Human
ugcugauggaagcggggcugc

SEQ ID NO: 767722 - RNA, 21 nt, Human
uggaagaaggcaggcagcucc

SEQ ID NO: 767723 - RNA, 21 nt, Human
uggaagauagcacccacagug

SEQ ID NO: 767724 - RNA, 21 nt, Human
uggcucccugaggagccccuc

SEQ ID NO: 767725 - RNA, 18 nt, Human
uggguggaggagaggcug

SEQ ID NO: 767726 - RNA, 24 nt, Human
ugugcauauaugcauaaauaugua

SEQ ID NO: 767727 - RNA, 22 nt, Human
uguguggcuuuacuguuccacu

SEQ ID NO: 767728 - RNA, 20 nt, Human
uuccucccaaagggcucccg

SEQ ID NO: 767729 - RNA, 21 nt, Human
agucgauuucacggccagcgc

SEQ ID NO: 767730 - RNA, 19 nt, Human
ccgcccacagagccagccg

SEQ ID NO: 767731 - RNA, 24 nt, Human
cucgucuucagcuucuagauggug

SEQ ID NO: 767732 - RNA, 19 nt, Human
gaaaaaaggcugcaaagua

SEQ ID NO: 767733 - RNA, 19 nt, Human
gaccagggggaaaaaaggc

SEQ ID NO: 767734 - RNA, 25 nt, Human
gccaccgcccacagagccagccguc

SEQ ID NO: 767735 - RNA, 21 nt, Human
ucucacaaaaucaaaacggga

SEQ ID NO: 767736 - RNA, 21 nt, Human
ugaccuacgcucucacaaaau

SEQ ID NO: 767737 - RNA, 22 nt, Human
uuucacggccagcgcggucacu

SEQ ID NO: 767738 - RNA, 18 nt, Human
aaaauuagcugggcgugg

SEQ ID NO: 767739 - RNA, 21 nt, Human
aaacaaaacaaaacaaacaaa

SEQ ID NO: 767740 - RNA, 23 nt, Human
aaacaggaaauaucacucuguua

SEQ ID NO: 767741 - RNA, 20 nt, Human
aaacauucugaaccacaugc

SEQ ID NO: 767742 - RNA, 20 nt, Human
aaagaagagguguaaaaagg

SEQ ID NO: 767743 - RNA, 22 nt, Human
aaagagccccacccagcccugu

SEQ ID NO: 767744 - RNA, 22 nt, Human
aaagaucccucuuaggccacca

SEQ ID NO: 767745 - RNA, 21 nt, Human
aaagucucugcuguguccuaa

SEQ ID NO: 767746 - RNA, 23 nt, Human
aaauauaggagcaaguggacuau

SEQ ID NO: 767747 - RNA, 19 nt, Human
aacaacuuccuacacucuu

SEQ ID NO: 767748 - RNA, 18 nt, Human
aacacggugaaaccccac

SEQ ID NO: 767749 - RNA, 20 nt, Human
aacacggugaaaccccaccu

SEQ ID NO: 767750 - RNA, 20 nt, Human
aacacggugaaaccccaccu

SEQ ID NO: 767751 - RNA, 21 nt, Human
aacacggugaaaccccaccuc

SEQ ID NO: 767752 - RNA, 20 nt, Human
aacagagugaaacuccaccu

SEQ ID NO: 767753 - RNA, 21 nt, Human
aaccagacuaaguuuggcacg

SEQ ID NO: 767754 - RNA, 18 nt, Human
aaccugaacucugauuug

SEQ ID NO: 767755 - RNA, 18 nt, Human
aagaucugggucccugua

SEQ ID NO: 767756 - RNA, 23 nt, Human
aaggagugggagugguaaaugga

SEQ ID NO: 767757 - RNA, 22 nt, Human
aaguaaacaggaaauaucacuc

SEQ ID NO: 767758 - RNA, 22 nt, Human
aagugagagaaaguuguuucuu

SEQ ID NO: 767759 - RNA, 24 nt, Human
aaucacuugaaccugggaggcgga

SEQ ID NO: 767760 - RNA, 21 nt, Human
aaucagggagagauagguggg

SEQ ID NO: 767761 - RNA, 19 nt, Human
aaucuggagcaagcuauac

SEQ ID NO: 767762 - RNA, 22 nt, Human
aaugaccccagcauuuagaaag

SEQ ID NO: 767763 - RNA, 19 nt, Human
acaaaaacugugagaaaca

SEQ ID NO: 767764 - RNA, 24 nt, Human
acaaacaaacaaccugugcaaaau

SEQ ID NO: 767765 - RNA, 23 nt, Human
acagagugaaacuccaccuaaaa

SEQ ID NO: 767766 - RNA, 22 nt, Human
accacugcacuccagccugggc

SEQ ID NO: 767767 - RNA, 19 nt, Human
acccccagggaaccacccu

SEQ ID NO: 767768 - RNA, 23 nt, Human
acccccagggaaccacccucuuc

SEQ ID NO: 767769 - RNA, 23 nt, Human
accugcucagguccccaaauguc

SEQ ID NO: 767770 - RNA, 24 nt, Human
acuccagccugggcaacagaguga

SEQ ID NO: 767771 - RNA, 21 nt, Human
acugagaagauucugugauaa

SEQ ID NO: 767772 - RNA, 24 nt, Human
acugcacuccagccugggcaacag

SEQ ID NO: 767773 - RNA, 24 nt, Human
acugcacuccagccugggcaacag

SEQ ID NO: 767774 - RNA, 24 nt, Human
acuugaggucaggaguucgagacc

SEQ ID NO: 767775 - RNA, 25 nt, Human
agaaaaacauacaggguacuuucuu

SEQ ID NO: 767776 - RNA, 21 nt, Human
agaaaaccuaacauacagccg

SEQ ID NO: 767777 - RNA, 22 nt, Human
agaaaagaucccucuuaggcca

SEQ ID NO: 767778 - RNA, 19 nt, Human
agaaacgcaggaaggaugg

SEQ ID NO: 767779 - RNA, 22 nt, Human
agagaagcuuuacuuaaaauac

SEQ ID NO: 767780 - RNA, 23 nt, Human
agagcagacuagucccaauccuu

SEQ ID NO: 767781 - RNA, 19 nt, Human
agaguggagagcagacuag

SEQ ID NO: 767782 - RNA, 20 nt, Human
agaguuucuguuuaauaucc

SEQ ID NO: 767783 - RNA, 22 nt, Human
agaugccaguugcguguuuagg

SEQ ID NO: 767784 - RNA, 22 nt, Human
agcaaaguacgagaacacagug

SEQ ID NO: 767785 - RNA, 18 nt, Human
agcauuuugggaggcuga

SEQ ID NO: 767786 - RNA, 24 nt, Human
agcauuuugggaggcugagguggg

SEQ ID NO: 767787 - RNA, 21 nt, Human
agccgauaugccccuuaacac

SEQ ID NO: 767788 - RNA, 23 nt, Human
agccgauaugccccuuaacacca

SEQ ID NO: 767789 - RNA, 22 nt, Human
agccugggcaacagagugaaac

SEQ ID NO: 767790 - RNA, 24 nt, Human
agccugggcaacagagugaaacuc

SEQ ID NO: 767791 - RNA, 24 nt, Human
agcuacuugggaggcugagguggg

SEQ ID NO: 767792 - RNA, 26 nt, Human
aggagugcaggcgggcugugauuuua

SEQ ID NO: 767793 - RNA, 21 nt, Human
aggcagggaagagugcacaaa

SEQ ID NO: 767794 - RNA, 18 nt, Human
aggcaggggggccucagg

SEQ ID NO: 767795 - RNA, 20 nt, Human
aggcaggggggccucagggg

SEQ ID NO: 767796 - RNA, 25 nt, Human
aggcggagguugcagugacaacggu

SEQ ID NO: 767797 - RNA, 19 nt, Human
aggcggagguugcagugag

SEQ ID NO: 767798 - RNA, 20 nt, Human
aggcggagguugcagugagc

SEQ ID NO: 767799 - RNA, 24 nt, Human
aggcggagguugcagugagcagag

SEQ ID NO: 767800 - RNA, 21 nt, Human
aggcggggcccuuuucuggcu

SEQ ID NO: 767801 - RNA, 24 nt, Human
aggcugaggugggagaaucacuug

SEQ ID NO: 767802 - RNA, 23 nt, Human
aggggagggggaggcaggggggc

SEQ ID NO: 767803 - RNA, 22 nt, Human
agguagucuaguuagcaaagug

SEQ ID NO: 767804 - RNA, 24 nt, Human
aggugggagaaucacuugaaccug

SEQ ID NO: 767805 - RNA, 24 nt, Human
aguggcucacgccuguaaucccag

SEQ ID NO: 767806 - RNA, 22 nt, Human
aguuuuugguucggguuuuccu

SEQ ID NO: 767807 - RNA, 18 nt, Human
auacagccgauaugcccc

SEQ ID NO: 767808 - RNA, 19 nt, Human
auagaaugugguacauaca

SEQ ID NO: 767809 - RNA, 24 nt, Human
aucacuugaggucaggaguucgag

SEQ ID NO: 767810 - RNA, 22 nt, Human
augccuauaauaaguaacaaga

SEQ ID NO: 767811 - RNA, 26 nt, Human
augcuggcagggcagacagcaugggg

SEQ ID NO: 767812 - RNA, 26 nt, Human
caaaguacgagaacacaguggguaug

SEQ ID NO: 767813 - RNA, 20 nt, Human
caacacggugaaaccccacc

SEQ ID NO: 767814 - RNA, 20 nt, Human
caaucucuagacuagagaca

SEQ ID NO: 767815 - RNA, 23 nt, Human
cacccagcccuguuuggugccac

SEQ ID NO: 767816 - RNA, 24 nt, Human
cacgccuguaaucccagcauuuug

SEQ ID NO: 767817 - RNA, 22 nt, Human
cacuccagccugggcaacagag

SEQ ID NO: 767818 - RNA, 22 nt, Human
cacuccagccugggcaacagag

SEQ ID NO: 767819 - RNA, 24 nt, Human
cacuccagccugggcaacagagug

SEQ ID NO: 767820 - RNA, 18 nt, Human
cacugcacuccagccugg

SEQ ID NO: 767821 - RNA, 19 nt, Human
cacugcacuccagccuggg

SEQ ID NO: 767822 - RNA, 21 nt, Human
cacugcacuccagccugggca

SEQ ID NO: 767823 - RNA, 23 nt, Human
cacugcacuccagccugggcaac

SEQ ID NO: 767824 - RNA, 24 nt, Human
cacugcacuccagccugggcaaca

SEQ ID NO: 767825 - RNA, 21 nt, Human
cacuugaaccugggaggcgga

SEQ ID NO: 767826 - RNA, 23 nt, Human
cacuugaggucaggaguucgaga

SEQ ID NO: 767827 - RNA, 19 nt, Human
cagcaaaguacgagaacac

SEQ ID NO: 767828 - RNA, 21 nt, Human
cagcauggggacugugcuuuc

SEQ ID NO: 767829 - RNA, 21 nt, Human
cagcauuuugggaggcugagg

SEQ ID NO: 767830 - RNA, 24 nt, Human
cagcauuuugggaggcugaggugg

SEQ ID NO: 767831 - RNA, 24 nt, Human
cagcuacuugggaggcugaggugg

SEQ ID NO: 767832 - RNA, 21 nt, Human
caggaugcugagaugcuggca

SEQ ID NO: 767833 - RNA, 19 nt, Human
caggggacacggauggcag

SEQ ID NO: 767834 - RNA, 18 nt, Human
cagugggccagcccuggg

SEQ ID NO: 767835 - RNA, 19 nt, Human
cagugguaucuuggacucu

SEQ ID NO: 767836 - RNA, 23 nt, Human
caugccacagucacagauacugu

SEQ ID NO: 767837 - RNA, 25 nt, Human
ccaccacugcacuccagccugggca

SEQ ID NO: 767838 - RNA, 20 nt, Human
ccacccagcccuguuuggug

SEQ ID NO: 767839 - RNA, 20 nt, Human
ccaccuaaaaaaaaaaaaaa

SEQ ID NO: 767840 - RNA, 20 nt, Human
ccacugcacuccagccuggg

SEQ ID NO: 767841 - RNA, 20 nt, Human
ccacugcacuccagccuggg

SEQ ID NO: 767842 - RNA, 21 nt, Human
ccacugcacuccagccugggc

SEQ ID NO: 767843 - RNA, 23 nt, Human
ccacugcacuccagccugggcaa

SEQ ID NO: 767844 - RNA, 24 nt, Human
ccacugcacuccagccugggcaac

SEQ ID NO: 767845 - RNA, 22 nt, Human
cccaccucuacuaaaagauaca

SEQ ID NO: 767846 - RNA, 18 nt, Human
cccagggcaggaggaaga

SEQ ID NO: 767847 - RNA, 19 nt, Human
ccccaaagagccccaccca

SEQ ID NO: 767848 - RNA, 20 nt, Human
ccccaaagagccccacccag

SEQ ID NO: 767849 - RNA, 21 nt, Human
ccccaaagagccccacccagc

SEQ ID NO: 767850 - RNA, 24 nt, Human
ccccaaagagccccacccagcccu

SEQ ID NO: 767851 - RNA, 19 nt, Human
cccuaugcugacccaaccc

SEQ ID NO: 767852 - RNA, 18 nt, Human
ccgacuuauauuuccugu

SEQ ID NO: 767853 - RNA, 24 nt, Human
ccgaucacuugaggucaggaguuc

SEQ ID NO: 767854 - RNA, 24 nt, Human
ccugaccaacacggugaaacccca

SEQ ID NO: 767855 - RNA, 24 nt, Human
ccuggacugcuuuggaaaugaccu

SEQ ID NO: 767856 - RNA, 19 nt, Human
ccugggaggcggagguugc

SEQ ID NO: 767857 - RNA, 24 nt, Human
ccugggcaacagagugaaacucca

SEQ ID NO: 767858 - RNA, 24 nt, Human
cgccuguaaucccagcauuuuggg

SEQ ID NO: 767859 - RNA, 20 nt, Human
cgggccaggugggguggggg

SEQ ID NO: 767860 - RNA, 22 nt, Human
cgggccagucccacagcaaaga

SEQ ID NO: 767861 - RNA, 21 nt, Human
cuaaaaaaaaaaaaaaugagu

SEQ ID NO: 767862 - RNA, 25 nt, Human
cuaaaagaccugcucagguccccaa

SEQ ID NO: 767863 - RNA, 21 nt, Human
cucacgccuguaaucccagca

SEQ ID NO: 767864 - RNA, 21 nt, Human
cucacgccuguaaucccagca

SEQ ID NO: 767865 - RNA, 21 nt, Human
cuccaccuaaaaaaaaaaaaa

SEQ ID NO: 767866 - RNA, 18 nt, Human
cugaagccuugagucagg

SEQ ID NO: 767867 - RNA, 21 nt, Human
cuggcgggccagucccacagc

SEQ ID NO: 767868 - RNA, 19 nt, Human
cuggucauuggcugcaagu

SEQ ID NO: 767869 - RNA, 22 nt, Human
cugugagaaacauauaguccac

SEQ ID NO: 767870 - RNA, 23 nt, Human
cuuuagugcaugaacagaucagg

SEQ ID NO: 767871 - RNA, 18 nt, Human
gaagaagaaaaacauaca

SEQ ID NO: 767872 - RNA, 23 nt, Human
gagaaucacuugaaccugggagg

SEQ ID NO: 767873 - RNA, 21 nt, Human
gagaauugacccagggcagga

SEQ ID NO: 767874 - RNA, 18 nt, Human
gagccugggggaagggga

SEQ ID NO: 767875 - RNA, 23 nt, Human
gaggugggccgaucacuugaggu

SEQ ID NO: 767876 - RNA, 21 nt, Human
gagugguaaauggaggcagaa

SEQ ID NO: 767877 - RNA, 22 nt, Human
gaucacuugaggucaggaguuc

SEQ ID NO: 767878 - RNA, 24 nt, Human
gaucacuugaggucaggaguucga

SEQ ID NO: 767879 - RNA, 19 nt, Human
gaucucuuaagguaucuug

SEQ ID NO: 767880 - RNA, 24 nt, Human
gcacuccagccugggcaacagagu

SEQ ID NO: 767881 - RNA, 18 nt, Human
gcaggggggccucagggg

SEQ ID NO: 767882 - RNA, 21 nt, Human
gccaguggcucacgccuguaa

SEQ ID NO: 767883 - RNA, 21 nt, Human
gccuugagucaggaaggagaa

SEQ ID NO: 767884 - RNA, 19 nt, Human
gcgggccaggugggguggg

SEQ ID NO: 767885 - RNA, 19 nt, Human
gcgggccagucccacagca

SEQ ID NO: 767886 - RNA, 18 nt, Human
gcuaaaucuggagcaagc

SEQ ID NO: 767887 - RNA, 19 nt, Human
gcugggugaugguaacugu

SEQ ID NO: 767888 - RNA, 20 nt, Human
gcuucuggucauuggcugca

SEQ ID NO: 767889 - RNA, 19 nt, Human
ggaaaacucugaagccuug

SEQ ID NO: 767890 - RNA, 22 nt, Human
ggaagaagaaaaacauacaggg

SEQ ID NO: 767891 - RNA, 18 nt, Human
ggagguugcagugagcag

SEQ ID NO: 767892 - RNA, 20 nt, Human
ggagguugcagugagcaggc

SEQ ID NO: 767893 - RNA, 19 nt, Human
ggagugguaaauggaggca

SEQ ID NO: 767894 - RNA, 20 nt, Human
ggccagucccacagcaaaga

SEQ ID NO: 767895 - RNA, 24 nt, Human
gggaaauuuuaguuagaaaaggug

SEQ ID NO: 767896 - RNA, 19 nt, Human
gggcccucaggagugcagg

SEQ ID NO: 767897 - RNA, 24 nt, Human
ggggaaggggagccugagaggcga

SEQ ID NO: 767898 - RNA, 21 nt, Human
guccuggcugaccucuuucuu

SEQ ID NO: 767899 - RNA, 22 nt, Human
guuacaguucuuuuuccucaca

SEQ ID NO: 767900 - RNA, 24 nt, Human
uaaaaaaaaaaaaaaugaguuuag

SEQ ID NO: 767901 - RNA, 23 nt, Human
uaaaaucacugaaaaacuguuuc

SEQ ID NO: 767902 - RNA, 21 nt, Human
uacagccgauaugccccuuuu

SEQ ID NO: 767903 - RNA, 21 nt, Human
uagagacagcgaugcccaugu

SEQ ID NO: 767904 - RNA, 19 nt, Human
uaggcgaaaugagaugcca

SEQ ID NO: 767905 - RNA, 24 nt, Human
uagguaacaaguaggccaagaacg

SEQ ID NO: 767906 - RNA, 20 nt, Human
ucacgccuguaaucccagca

SEQ ID NO: 767907 - RNA, 25 nt, Human
ucacucuguuagaaaaaaaaaaaaa

SEQ ID NO: 767908 - RNA, 24 nt, Human
ucacuugaaccugggaggcggagg

SEQ ID NO: 767909 - RNA, 25 nt, Human
ucacuugaaccugggaggcggaggu

SEQ ID NO: 767910 - RNA, 27 nt, Human
ucagagguuuaauugggcuuucugacc

SEQ ID NO: 767911 - RNA, 19 nt, Human
ucagcaaaguacgagaaca

SEQ ID NO: 767912 - RNA, 25 nt, Human
ucagcacaaaugcaauaaugugccg

SEQ ID NO: 767913 - RNA, 21 nt, Human
ucaggagugcaggcgggcugu

SEQ ID NO: 767914 - RNA, 18 nt, Human
ucagggagagauaggugg

SEQ ID NO: 767915 - RNA, 24 nt, Human
ucagugauuuuucuucuuccugcc

SEQ ID NO: 767916 - RNA, 19 nt, Human
ucauuaggaaggggagggg

SEQ ID NO: 767917 - RNA, 21 nt, Human
uccaagcccaggcagauucca

SEQ ID NO: 767918 - RNA, 24 nt, Human
uccaugcgggcuucccaaacaacu

SEQ ID NO: 767919 - RNA, 19 nt, Human
ucccacugcccccaacacc

SEQ ID NO: 767920 - RNA, 21 nt, Human
ucccacugcccccaacaccag

SEQ ID NO: 767921 - RNA, 19 nt, Human
ucuaaguaaacaggaaaua

SEQ ID NO: 767922 - RNA, 23 nt, Human
ucugaagccuauguauaauacuu

SEQ ID NO: 767923 - RNA, 19 nt, Human
ugaaaccccaccucuacua

SEQ ID NO: 767924 - RNA, 19 nt, Human
ugaacagagauacuaguca

SEQ ID NO: 767925 - RNA, 20 nt, Human
ugaacagagauacuagucag

SEQ ID NO: 767926 - RNA, 24 nt, Human
ugaaccugggaggcggagguugca

SEQ ID NO: 767927 - RNA, 23 nt, Human
ugagaacuagagauguucaacga

SEQ ID NO: 767928 - RNA, 19 nt, Human
ugagcagugggccagcccu

SEQ ID NO: 767929 - RNA, 20 nt, Human
ugaggugggagaaucacuug

SEQ ID NO: 767930 - RNA, 24 nt, Human
ugaggugggagaaucacuugaacc

SEQ ID NO: 767931 - RNA, 24 nt, Human
ugaggugggccgaucacuugaggu

SEQ ID NO: 767932 - RNA, 21 nt, Human
ugauaggaggcagaagugaga

SEQ ID NO: 767933 - RNA, 21 nt, Human
ugauggguugauggagaugca

SEQ ID NO: 767934 - RNA, 21 nt, Human
ugcaggggacacggauggcag

SEQ ID NO: 767935 - RNA, 23 nt, Human
ugcaggggacacggauggcaggu

SEQ ID NO: 767936 - RNA, 18 nt, Human
ugccaauauagguaaaau

SEQ ID NO: 767937 - RNA, 19 nt, Human
ugccacagucacagauacu

SEQ ID NO: 767938 - RNA, 21 nt, Human
ugcgggccagguggggugggg

SEQ ID NO: 767939 - RNA, 24 nt, Human
ugcguguggucccagcuacuuggg

SEQ ID NO: 767940 - RNA, 19 nt, Human
ugcuaauugcagagcuuuu

SEQ ID NO: 767941 - RNA, 19 nt, Human
ugcucugcagcuugggaga

SEQ ID NO: 767942 - RNA, 25 nt, Human
uggaaagagguaccauuuuguauuu

SEQ ID NO: 767943 - RNA, 22 nt, Human
uggaaagauaacaaugcauuca

SEQ ID NO: 767944 - RNA, 26 nt, Human
uggaaagauaacaaugcauucaaaca

SEQ ID NO: 767945 - RNA, 21 nt, Human
uggaagaagaaaaacauacag

SEQ ID NO: 767946 - RNA, 26 nt, Human
uggcaaggcggggcccuuuucuggcu

SEQ ID NO: 767947 - RNA, 18 nt, Human
uggcagaaucagguaggc

SEQ ID NO: 767948 - RNA, 22 nt, Human
uggcucacgccuguaaucccag

SEQ ID NO: 767949 - RNA, 24 nt, Human
uggcucacgccuguaaucccagca

SEQ ID NO: 767950 - RNA, 27 nt, Human
uggcucugggugugaauuucuuccuaa

SEQ ID NO: 767951 - RNA, 24 nt, Human
ugggagagguggugaccaagaagg

SEQ ID NO: 767952 - RNA, 24 nt, Human
ugggaggcggagguugcagugagc

SEQ ID NO: 767953 - RNA, 19 nt, Human
ugggaggcugaggugggag

SEQ ID NO: 767954 - RNA, 24 nt, Human
ugggaggcugaggugggagaauca

SEQ ID NO: 767955 - RNA, 18 nt, Human
ugggaggcugaggugggc

SEQ ID NO: 767956 - RNA, 20 nt, Human
ugggaggcugaggugggccg

SEQ ID NO: 767957 - RNA, 24 nt, Human
ugggaggcugaggugggccgauca

SEQ ID NO: 767958 - RNA, 18 nt, Human
uggguuguuugacugcug

SEQ ID NO: 767959 - RNA, 24 nt, Human
ugguggcgcaugcgugugguccca

SEQ ID NO: 767960 - RNA, 24 nt, Human
ugugcaaaaucacaaaggggcaag

SEQ ID NO: 767961 - RNA, 20 nt, Human
uguuucaagaaaauaaugga

SEQ ID NO: 767962 - RNA, 28 nt, Human
uguuucuuaaucuccagcuaaaucugga

SEQ ID NO: 767963 - RNA, 24 nt, Human
uuagaaaaaaaaaaaaaaagaauc

SEQ ID NO: 767964 - RNA, 18 nt, Human
uuagcugggcgugguggc

SEQ ID NO: 767965 - RNA, 24 nt, Human
uuagcugggcgugguggcgcaugc

SEQ ID NO: 767966 - RNA, 24 nt, Human
uucagugauuuuucuucuuccugc

SEQ ID NO: 767967 - RNA, 19 nt, Human
uucauuuuccuucuacugu

SEQ ID NO: 767968 - RNA, 24 nt, Human
uucccaccacugcacuccagccug

SEQ ID NO: 767969 - RNA, 24 nt, Human
uugaaccugggaggcggagguugc

SEQ ID NO: 767970 - RNA, 25 nt, Human
uugggaggcugaggugggagaauca

SEQ ID NO: 767971 - RNA, 22 nt, Human
uugggaggcugaggugggccga

SEQ ID NO: 767972 - RNA, 20 nt, Human
uuuagugcuuguaaaaauga

SEQ ID NO: 767973 - RNA, 24 nt, Human
uuucacuuagucugagcucugcga

SEQ ID NO: 767974 - RNA, 21 nt, Human
uuucuuggguuguuugacugc

SEQ ID NO: 767975 - RNA, 18 nt, Human
uuugcuggaaccuuauca

SEQ ID NO: 767976 - RNA, 22 nt, Human
uuuucauuuuuguacaaauuuu

SEQ ID NO: 767977 - RNA, 23 nt, Human
uuuuucuucuuccugccaccuuu

SEQ ID NO: 767978 - RNA, 18 nt, Human
cauugcaauucacccucc

SEQ ID NO: 767979 - RNA, 24 nt, Human
cccagaaauaccgaaagaugccaa

SEQ ID NO: 767980 - RNA, 22 nt, Human
ccuccuggagccucccucugaa

SEQ ID NO: 767981 - RNA, 24 nt, Human
cgaaagaugccaagugaacacugu

SEQ ID NO: 767982 - RNA, 21 nt, Human
cucagcucuuuggugguggug

SEQ ID NO: 767983 - RNA, 18 nt, Human
ucagcucuuugguggugg

SEQ ID NO: 767984 - RNA, 20 nt, Human
ucuuuggugguggugaucaa

SEQ ID NO: 767985 - RNA, 18 nt, Human
ugccaagugaacacuguu

SEQ ID NO: 767986 - RNA, 19 nt, Human
ugggagccucagcucuuug

SEQ ID NO: 767987 - RNA, 22 nt, Human
uugcaauucacccucccagaaa

SEQ ID NO: 767988 - RNA, 25 nt, Human
uuggugguggugaucauugcaauuc

SEQ ID NO: 767989 - RNA, 22 nt, Human
aaaaagaaacacccacacagaa

SEQ ID NO: 767990 - RNA, 24 nt, Human
aaaaagaaacacccacacagaaga

SEQ ID NO: 767991 - RNA, 21 nt, Human
aaagagcugggcaguagcugg

SEQ ID NO: 767992 - RNA, 24 nt, Human
aaagagcugggcaguagcugguug

SEQ ID NO: 767993 - RNA, 24 nt, Human
aaagugcugggauuacaggcguga

SEQ ID NO: 767994 - RNA, 20 nt, Human
aaccagaggcugggaauccc

SEQ ID NO: 767995 - RNA, 19 nt, Human
aagaagaggagauuaagga

SEQ ID NO: 767996 - RNA, 24 nt, Human
aagcagcugggauuacaggcgugu

SEQ ID NO: 767997 - RNA, 25 nt, Human
aagcagcugggauuacaggcgugug

SEQ ID NO: 767998 - RNA, 23 nt, Human
aagcaggacaagcagccagucaa

SEQ ID NO: 767999 - RNA, 22 nt, Human
aagccagcucauccucccucag

SEQ ID NO: 768000 - RNA, 21 nt, Human
aagugcugaacauguggaacu

SEQ ID NO: 768001 - RNA, 19 nt, Human
aagugcugggauuacaggc

SEQ ID NO: 768002 - RNA, 19 nt, Human
aagugcugggauuacaggc

SEQ ID NO: 768003 - RNA, 26 nt, Human
aagugcugggauuacaggcgugagcc

SEQ ID NO: 768004 - RNA, 21 nt, Human
aauaaacaccacagcuccccc

SEQ ID NO: 768005 - RNA, 20 nt, Human
acaauaaauguuacauauug

SEQ ID NO: 768006 - RNA, 29 nt, Human
acacagaagauagagggaaaagggacccc

SEQ ID NO: 768007 - RNA, 18 nt, Human
acaggguuuugccacauu

SEQ ID NO: 768008 - RNA, 20 nt, Human
acaggguuuugccacauugg

SEQ ID NO: 768009 - RNA, 24 nt, Human
acaggguuuugccacauuggccag

SEQ ID NO: 768010 - RNA, 19 nt, Human
acauuggccagguuggucu

SEQ ID NO: 768011 - RNA, 18 nt, Human
accacgcccagcuaauuu

SEQ ID NO: 768012 - RNA, 23 nt, Human
accacgcccagcuaauuuuugua

SEQ ID NO: 768013 - RNA, 23 nt, Human
acucaucuuggcuucccaaagug

SEQ ID NO: 768014 - RNA, 25 nt, Human
acucaucuuggcuucccaaagugcu

SEQ ID NO: 768015 - RNA, 20 nt, Human
agacggaaaaaaauaaauaa

SEQ ID NO: 768016 - RNA, 22 nt, Human
agaggcucccuugucccugccc

SEQ ID NO: 768017 - RNA, 21 nt, Human
agccaggcccccacuucagcu

SEQ ID NO: 768018 - RNA, 22 nt, Human
agcugggauuacaggcgugugc

SEQ ID NO: 768019 - RNA, 21 nt, Human
aggaagaaaagaugcugagga

SEQ ID NO: 768020 - RNA, 21 nt, Human
aggagugcugggggcucaugu

SEQ ID NO: 768021 - RNA, 20 nt, Human
aggccccaccaucaccugac

SEQ ID NO: 768022 - RNA, 25 nt, Human
aggccggagugcagugacgugaucu

SEQ ID NO: 768023 - RNA, 23 nt, Human
aggcucagggcguuuuguagggu

SEQ ID NO: 768024 - RNA, 19 nt, Human
aggcucccuugucccugcc

SEQ ID NO: 768025 - RNA, 19 nt, Human
agguaggaggacugggggg

SEQ ID NO: 768026 - RNA, 24 nt, Human
aguaugaaaagccaacaaaaagaa

SEQ ID NO: 768027 - RNA, 20 nt, Human
agugcagugacgugaucucg

SEQ ID NO: 768028 - RNA, 24 nt, Human
agugcagugacgugaucucggcuc

SEQ ID NO: 768029 - RNA, 28 nt, Human
augaaaagccaacaaaaagaaacaccca

SEQ ID NO: 768030 - RNA, 18 nt, Human
auguuacauauuguaguc

SEQ ID NO: 768031 - RNA, 25 nt, Human
auuuuuguauuuuuuaguggagaca

SEQ ID NO: 768032 - RNA, 24 nt, Human
caaaaagaaacacccacacagaag

SEQ ID NO: 768033 - RNA, 24 nt, Human
caaagcaugacaaaauuacgucug

SEQ ID NO: 768034 - RNA, 24 nt, Human
caaagugcugggauuacaggcgug

SEQ ID NO: 768035 - RNA, 18 nt, Human
caacaaaaagaaacaccc

SEQ ID NO: 768036 - RNA, 18 nt, Human
caacaaaaagaaacaccc

SEQ ID NO: 768037 - RNA, 23 nt, Human
caacaaaaagaaacacccacaca

SEQ ID NO: 768038 - RNA, 20 nt, Human
caaugcuauuuggcugcggc

SEQ ID NO: 768039 - RNA, 19 nt, Human
cacaggauggcaucucaaa

SEQ ID NO: 768040 - RNA, 20 nt, Human
cacaguccugagagcuggcu

SEQ ID NO: 768041 - RNA, 24 nt, Human
caccacagcucccccaguggccca

SEQ ID NO: 768042 - RNA, 20 nt, Human
caccggugucuugucuuucu

SEQ ID NO: 768043 - RNA, 22 nt, Human
caccucagcuggaagcagggac

SEQ ID NO: 768044 - RNA, 23 nt, Human
cacgcuuggccucucacuccuaa

SEQ ID NO: 768045 - RNA, 23 nt, Human
cagaccuacccagccugcaucca

SEQ ID NO: 768046 - RNA, 20 nt, Human
cagcacaauuccuuuauuca

SEQ ID NO: 768047 - RNA, 22 nt, Human
cagcacaauuccuuuauucauc

SEQ ID NO: 768048 - RNA, 18 nt, Human
cagccacaguccugagag

SEQ ID NO: 768049 - RNA, 20 nt, Human
cagccuccagccacaguccu

SEQ ID NO: 768050 - RNA, 24 nt, Human
caggguuuugccacauuggccagg

SEQ ID NO: 768051 - RNA, 24 nt, Human
caucagggaagggaggacauagga

SEQ ID NO: 768052 - RNA, 19 nt, Human
caucucaaaccagaggcug

SEQ ID NO: 768053 - RNA, 22 nt, Human
caucucccucugugcuugaccc

SEQ ID NO: 768054 - RNA, 22 nt, Human
ccaaagugcugggauuacaggc

SEQ ID NO: 768055 - RNA, 22 nt, Human
ccaaagugcugggauuacaggc

SEQ ID NO: 768056 - RNA, 24 nt, Human
ccaaagugcugggauuacaggcgu

SEQ ID NO: 768057 - RNA, 21 nt, Human
ccaacaaaaagaaacacccac

SEQ ID NO: 768058 - RNA, 22 nt, Human
ccaagcagcugggauuacaggc

SEQ ID NO: 768059 - RNA, 24 nt, Human
ccaagcagcugggauuacaggcgu

SEQ ID NO: 768060 - RNA, 18 nt, Human
ccacauuggccagguugg

SEQ ID NO: 768061 - RNA, 19 nt, Human
ccacauuggccagguuggu

SEQ ID NO: 768062 - RNA, 21 nt, Human
ccacauuggccagguuggucu

SEQ ID NO: 768063 - RNA, 20 nt, Human
ccaccucagcuggaagcagg

SEQ ID NO: 768064 - RNA, 25 nt, Human
ccagcauguacccccacucuuuccu

SEQ ID NO: 768065 - RNA, 23 nt, Human
ccaggccggagugcagugacgug

SEQ ID NO: 768066 - RNA, 19 nt, Human
ccagguucaagcaauucuc

SEQ ID NO: 768067 - RNA, 22 nt, Human
ccagguucaagcaauucuccug

SEQ ID NO: 768068 - RNA, 20 nt, Human
ccaguggcacaggccugugu

SEQ ID NO: 768069 - RNA, 18 nt, Human
ccaucaccugacugccag

SEQ ID NO: 768070 - RNA, 19 nt, Human
cccaagcagcugggauuac

SEQ ID NO: 768071 - RNA, 23 nt, Human
cccaagcagcugggauuacaggc

SEQ ID NO: 768072 - RNA, 24 nt, Human
cccacacagaagauagagggaaaa

SEQ ID NO: 768073 - RNA, 30 nt, Human
cccaccaucaccugacugccagaccuaccc

SEQ ID NO: 768074 - RNA, 21 nt, Human
cccagccuccagccacagucc

SEQ ID NO: 768075 - RNA, 19 nt, Human
cccagucuuugcugccugc

SEQ ID NO: 768076 - RNA, 19 nt, Human
ccccacuucagcucuuccc

SEQ ID NO: 768077 - RNA, 24 nt, Human
ccccaguggcccaggaaaauucug

SEQ ID NO: 768078 - RNA, 23 nt, Human
ccccucagaacacagagcugcca

SEQ ID NO: 768079 - RNA, 18 nt, Human
ccccuccuccucccuccc

SEQ ID NO: 768080 - RNA, 23 nt, Human
ccccuccuccucccucccuccag

SEQ ID NO: 768081 - RNA, 23 nt, Human
cccucagaacacagagcugccau

SEQ ID NO: 768082 - RNA, 23 nt, Human
cccucagccucccaagcagcugg

SEQ ID NO: 768083 - RNA, 22 nt, Human
cccucaggcucagcagcuccca

SEQ ID NO: 768084 - RNA, 24 nt, Human
cccucucagcacauucucagccac

SEQ ID NO: 768085 - RNA, 21 nt, Human
cccucuuccaccauccuggcc

SEQ ID NO: 768086 - RNA, 21 nt, Human
cccugcugggccagcucugcc

SEQ ID NO: 768087 - RNA, 19 nt, Human
ccgauguguugauuccucu

SEQ ID NO: 768088 - RNA, 27 nt, Human
ccgccuuccagguucaagcaauucuuu

SEQ ID NO: 768089 - RNA, 19 nt, Human
ccucagcuggaagcaggga

SEQ ID NO: 768090 - RNA, 27 nt, Human
ccucagcuggaagcagggacgggaguu

SEQ ID NO: 768091 - RNA, 23 nt, Human
ccuccagccacaguccugagagc

SEQ ID NO: 768092 - RNA, 18 nt, Human
ccucugugaaccaucacc

SEQ ID NO: 768093 - RNA, 23 nt, Human
ccucugugcuugacccugcuggg

SEQ ID NO: 768094 - RNA, 20 nt, Human
ccucuuccaccauccuggcc

SEQ ID NO: 768095 - RNA, 23 nt, Human
ccugaugccaggugaucuacuca

SEQ ID NO: 768096 - RNA, 21 nt, Human
ccugcccucagccucccaagc

SEQ ID NO: 768097 - RNA, 21 nt, Human
ccugcugggccagcucugccc

SEQ ID NO: 768098 - RNA, 21 nt, Human
ccuggggauuuagagauuugu

SEQ ID NO: 768099 - RNA, 20 nt, Human
ccugggugcugccuaggucu

SEQ ID NO: 768100 - RNA, 24 nt, Human
ccuuccagguucaagcaauucucc

SEQ ID NO: 768101 - RNA, 19 nt, Human
ccuuggauugggacaaagg

SEQ ID NO: 768102 - RNA, 21 nt, Human
ccuuucuccuccccuccuucc

SEQ ID NO: 768103 - RNA, 19 nt, Human
cggagugcagugacgugau

SEQ ID NO: 768104 - RNA, 23 nt, Human
cggagugcagugacgugaucucg

SEQ ID NO: 768105 - RNA, 24 nt, Human
cggagugcagugacgugaucucgg

SEQ ID NO: 768106 - RNA, 19 nt, Human
cggcggugagggaagugaa

SEQ ID NO: 768107 - RNA, 22 nt, Human
cgggagcaggaguuaggaagaa

SEQ ID NO: 768108 - RNA, 22 nt, Human
cucaaaccagaggcugggaauc

SEQ ID NO: 768109 - RNA, 23 nt, Human
cuccagccacaguccugagagcu

SEQ ID NO: 768110 - RNA, 19 nt, Human
cuccggggcgucagggacg

SEQ ID NO: 768111 - RNA, 19 nt, Human
cucuguaccuacugccccc

SEQ ID NO: 768112 - RNA, 18 nt, Human
cucugugcuugacccugc

SEQ ID NO: 768113 - RNA, 19 nt, Human
cucuucugaagcugaggau

SEQ ID NO: 768114 - RNA, 24 nt, Human
cugccagaccuacccagccugcau

SEQ ID NO: 768115 - RNA, 24 nt, Human
cugcccccgaaagugcugaacaug

SEQ ID NO: 768116 - RNA, 22 nt, Human
cuggcaccaguggcacaggccu

SEQ ID NO: 768117 - RNA, 19 nt, Human
cuuuauucaucuuucccuc

SEQ ID NO: 768118 - RNA, 20 nt, Human
cuuucuccuccccuccuucc

SEQ ID NO: 768119 - RNA, 19 nt, Human
cuuucuuuuuccuucuucu

SEQ ID NO: 768120 - RNA, 20 nt, Human
cuuugucuggcccucuucca

SEQ ID NO: 768121 - RNA, 18 nt, Human
gaacauguggaacuggau

SEQ ID NO: 768122 - RNA, 18 nt, Human
gagcaggaguuaggaaga

SEQ ID NO: 768123 - RNA, 23 nt, Human
gaggcugggaauccccucagaac

SEQ ID NO: 768124 - RNA, 24 nt, Human
gaugccaggugaucuacucaucuu

SEQ ID NO: 768125 - RNA, 18 nt, Human
gauuacaggcgugagcca

SEQ ID NO: 768126 - RNA, 21 nt, Human
gauuacaggcgugagccacca

SEQ ID NO: 768127 - RNA, 22 nt, Human
gauuacaggcgugagccaccac

SEQ ID NO: 768128 - RNA, 22 nt, Human
gcaaccuccgccuuccagguuc

SEQ ID NO: 768129 - RNA, 19 nt, Human
gcagacccagccuccagcc

SEQ ID NO: 768130 - RNA, 24 nt, Human
gcauuauagcagacccagccucca

SEQ ID NO: 768131 - RNA, 21 nt, Human
gccacacuuccagagggguga

SEQ ID NO: 768132 - RNA, 22 nt, Human
gcccagcuaauuuuuguauuuu

SEQ ID NO: 768133 - RNA, 19 nt, Human
gccggagugcagugacgug

SEQ ID NO: 768134 - RNA, 21 nt, Human
gccucccaagcagcugggauu

SEQ ID NO: 768135 - RNA, 25 nt, Human
gcucugucacccaggccggagugca

SEQ ID NO: 768136 - RNA, 21 nt, Human
ggacuggggggaagggaggga

SEQ ID NO: 768137 - RNA, 18 nt, Human
ggagacaggguuuugcca

SEQ ID NO: 768138 - RNA, 24 nt, Human
ggagaguaugaaaagccaacaaaa

SEQ ID NO: 768139 - RNA, 21 nt, Human
ggaggagugcugggggcucau

SEQ ID NO: 768140 - RNA, 19 nt, Human
ggauuacaggcgugagcca

SEQ ID NO: 768141 - RNA, 20 nt, Human
ggcaccaguggcacaggccu

SEQ ID NO: 768142 - RNA, 21 nt, Human
ggccagucuuguuuucugucu

SEQ ID NO: 768143 - RNA, 21 nt, Human
ggcccuaccugucugcucaga

SEQ ID NO: 768144 - RNA, 18 nt, Human
gggaagggagggaaaacu

SEQ ID NO: 768145 - RNA, 18 nt, Human
gggaggggagggggcggc

SEQ ID NO: 768146 - RNA, 21 nt, Human
gggcggaagugccuagccucu

SEQ ID NO: 768147 - RNA, 18 nt, Human
ggggagagucagcuuaaa

SEQ ID NO: 768148 - RNA, 18 nt, Human
ggggaggggagggggcgg

SEQ ID NO: 768149 - RNA, 23 nt, Human
ggggguuuccauugauucacccu

SEQ ID NO: 768150 - RNA, 18 nt, Human
ggguggcucagcuaaggg

SEQ ID NO: 768151 - RNA, 24 nt, Human
gguagacggaggagugcugggggc

SEQ ID NO: 768152 - RNA, 20 nt, Human
ggucugguuggcacugucuc

SEQ ID NO: 768153 - RNA, 20 nt, Human
ggugaggcugccagaggccc

SEQ ID NO: 768154 - RNA, 19 nt, Human
gguuguuugcuuuugccuu

SEQ ID NO: 768155 - RNA, 25 nt, Human
gucagcgugacagccaguaccacca

SEQ ID NO: 768156 - RNA, 24 nt, Human
guggcccaggaaaauucuggccca

SEQ ID NO: 768157 - RNA, 18 nt, Human
uaaagagguguggcauca

SEQ ID NO: 768158 - RNA, 21 nt, Human
uaaauaaauucacggcgguga

SEQ ID NO: 768159 - RNA, 25 nt, Human
uaauuuuuguauuuuuuaguggaga

SEQ ID NO: 768160 - RNA, 19 nt, Human
uacaggcgugagccaccac

SEQ ID NO: 768161 - RNA, 21 nt, Human
uacaggcgugagccaccacgc

SEQ ID NO: 768162 - RNA, 23 nt, Human
uacaggcgugagccaccacgcuu

SEQ ID NO: 768163 - RNA, 24 nt, Human
uagacggaggagugcugggggcuc

SEQ ID NO: 768164 - RNA, 19 nt, Human
uaguggagacaggguuuug

SEQ ID NO: 768165 - RNA, 23 nt, Human
uaguggagacaggguuuugccac

SEQ ID NO: 768166 - RNA, 24 nt, Human
uaguggagacaggguuuugccaca

SEQ ID NO: 768167 - RNA, 18 nt, Human
ucacugcaaccuccgccu

SEQ ID NO: 768168 - RNA, 19 nt, Human
ucacugcaaccuccgccuu

SEQ ID NO: 768169 - RNA, 24 nt, Human
ucacugcaaccuccgccuuccagg

SEQ ID NO: 768170 - RNA, 24 nt, Human
ucacugcaaccuccgccuuccagg

SEQ ID NO: 768171 - RNA, 27 nt, Human
ucacugcaaccuccgccuuccagguuc

SEQ ID NO: 768172 - RNA, 20 nt, Human
ucagaacacagagcugccau

SEQ ID NO: 768173 - RNA, 24 nt, Human
ucagcagcucccaccuuauuuucc

SEQ ID NO: 768174 - RNA, 18 nt, Human
ucagccucccaagcagcu

SEQ ID NO: 768175 - RNA, 19 nt, Human
ucagggguggguggcucag

SEQ ID NO: 768176 - RNA, 24 nt, Human
uccaccauccuggccucucugccu

SEQ ID NO: 768177 - RNA, 24 nt, Human
ucccaaagugcugggauuacaggc

SEQ ID NO: 768178 - RNA, 24 nt, Human
ucccaagcagcugggauuacaggc

SEQ ID NO: 768179 - RNA, 25 nt, Human
ucccaccuuauuuuccaucuuucuu

SEQ ID NO: 768180 - RNA, 23 nt, Human
uccccacuuucccuuggauuggg

SEQ ID NO: 768181 - RNA, 21 nt, Human
ucccccaguggcccaggaaaa

SEQ ID NO: 768182 - RNA, 22 nt, Human
ucccccaguggcccaggaaaau

SEQ ID NO: 768183 - RNA, 21 nt, Human
ucccucaggcucagcagcucc

SEQ ID NO: 768184 - RNA, 18 nt, Human
ucccuccuaucaucuccc

SEQ ID NO: 768185 - RNA, 18 nt, Human
ucccucugugcuugaccc

SEQ ID NO: 768186 - RNA, 22 nt, Human
uccuaaugugaauaaacaccac

SEQ ID NO: 768187 - RNA, 19 nt, Human
uccucuuuuuuccccuccu

SEQ ID NO: 768188 - RNA, 20 nt, Human
uccugggugcugccuagguc

SEQ ID NO: 768189 - RNA, 24 nt, Human
ucuccugcccucagccucccaagc

SEQ ID NO: 768190 - RNA, 18 nt, Human
ucucuggaagggccaguc

SEQ ID NO: 768191 - RNA, 23 nt, Human
ucugccucugugaaccaucaccu

SEQ ID NO: 768192 - RNA, 27 nt, Human
ucugccuuuucuuggugugucuuuccc

SEQ ID NO: 768193 - RNA, 24 nt, Human
ucuggaagaggucuguuggcgggg

SEQ ID NO: 768194 - RNA, 19 nt, Human
ucuggcucugucacccagg

SEQ ID NO: 768195 - RNA, 24 nt, Human
ucuggcucugucacccaggccgga

SEQ ID NO: 768196 - RNA, 24 nt, Human
ucugucacccaggccggagugcag

SEQ ID NO: 768197 - RNA, 23 nt, Human
ucuucugaagcugaggaugaaag

SEQ ID NO: 768198 - RNA, 20 nt, Human
ucuugaacuccugaugccag

SEQ ID NO: 768199 - RNA, 23 nt, Human
ugaaaagccaacaaaaagaaaca

SEQ ID NO: 768200 - RNA, 21 nt, Human
ugaaagaagaggagauuaagg

SEQ ID NO: 768201 - RNA, 20 nt, Human
ugaagaggaacuagccagau

SEQ ID NO: 768202 - RNA, 24 nt, Human
ugacagccaguaccaccucagcug

SEQ ID NO: 768203 - RNA, 18 nt, Human
ugagcagaucucaguaaa

SEQ ID NO: 768204 - RNA, 22 nt, Human
ugcagugacgugaucucggcuc

SEQ ID NO: 768205 - RNA, 20 nt, Human
ugccacauuggccagguugg

SEQ ID NO: 768206 - RNA, 22 nt, Human
ugccacauuggccagguugguc

SEQ ID NO: 768207 - RNA, 24 nt, Human
ugccagaccuacccagccugcauc

SEQ ID NO: 768208 - RNA, 21 nt, Human
ugccaggugaucuacucaucu

SEQ ID NO: 768209 - RNA, 19 nt, Human
ugccucaacucuccagcua

SEQ ID NO: 768210 - RNA, 24 nt, Human
ugcugggauuacaggcgugagcca

SEQ ID NO: 768211 - RNA, 19 nt, Human
ugcugggggcucaugucag

SEQ ID NO: 768212 - RNA, 20 nt, Human
uggaagggacuucuccgaug

SEQ ID NO: 768213 - RNA, 26 nt, Human
uggagagcugugaggcacaggauggc

SEQ ID NO: 768214 - RNA, 21 nt, Human
uggcaagggcugacuccgggu

SEQ ID NO: 768215 - RNA, 22 nt, Human
uggcaagggcugacuccggguc

SEQ ID NO: 768216 - RNA, 24 nt, Human
uggccagguuggucuugaacuccu

SEQ ID NO: 768217 - RNA, 23 nt, Human
ugggacaaaggccuagcuuaggc

SEQ ID NO: 768218 - RNA, 18 nt, Human
ugggauuacaggcgugag

SEQ ID NO: 768219 - RNA, 19 nt, Human
ugggauuacaggcgugagc

SEQ ID NO: 768220 - RNA, 22 nt, Human
ugggauuacaggcgugagccac

SEQ ID NO: 768221 - RNA, 23 nt, Human
ugggauuacaggcgugagccacc

SEQ ID NO: 768222 - RNA, 24 nt, Human
ugggauuacaggcgugagccacca

SEQ ID NO: 768223 - RNA, 18 nt, Human
ugggauuacaggcgugug

SEQ ID NO: 768224 - RNA, 19 nt, Human
ugggauuacaggcgugugc

SEQ ID NO: 768225 - RNA, 24 nt, Human
ugggauuacaggcgugugcaacca

SEQ ID NO: 768226 - RNA, 18 nt, Human
uguaaaggaaggggaucc

SEQ ID NO: 768227 - RNA, 21 nt, Human
uuagagauuuguggcacaaca

SEQ ID NO: 768228 - RNA, 18 nt, Human
uuaguggagacaggguuu

SEQ ID NO: 768229 - RNA, 21 nt, Human
uuaguggagacaggguuuugc

SEQ ID NO: 768230 - RNA, 25 nt, Human
uuaguggagacaggguuuugccaca

SEQ ID NO: 768231 - RNA, 25 nt, Human
uucaagcaauucuccugcccucagc

SEQ ID NO: 768232 - RNA, 18 nt, Human
uucccaguuaccccaauu

SEQ ID NO: 768233 - RNA, 22 nt, Human
uuccugggugcugccuaggucc

SEQ ID NO: 768234 - RNA, 21 nt, Human
uucucugugaaaugguuccau

SEQ ID NO: 768235 - RNA, 18 nt, Human
uugcacuccuucuuuguc

SEQ ID NO: 768236 - RNA, 24 nt, Human
uuuccccuccuccucccucccccc

SEQ ID NO: 768237 - RNA, 18 nt, Human
uuuccuucuucuuuuucc

SEQ ID NO: 768238 - RNA, 22 nt, Human
uuugccuuucuccuccccuccu

SEQ ID NO: 768239 - RNA, 21 nt, Human
uuuuuaguggagacaggguuu

SEQ ID NO: 768240 - RNA, 21 nt, Human
uuuuuguauuuuuuaguggag

SEQ ID NO: 768241 - RNA, 22 nt, Human
uuuuuuaguggagacaggguuu

SEQ ID NO: 768242 - RNA, 23 nt, Human
aaaguacaccaccauucaccaca

SEQ ID NO: 768243 - RNA, 22 nt, Human
aagagugucuaccacaccuuug

SEQ ID NO: 768244 - RNA, 23 nt, Human
aaggaaaugaauauaaaagcacu

SEQ ID NO: 768245 - RNA, 23 nt, Human
acaggaaaaaaaaaauauuuuca

SEQ ID NO: 768246 - RNA, 21 nt, Human
accaauuacauacuccaccau

SEQ ID NO: 768247 - RNA, 23 nt, Human
accaauuacauacuccaccauuu

SEQ ID NO: 768248 - RNA, 20 nt, Human
accugaacacucacgcugcc

SEQ ID NO: 768249 - RNA, 18 nt, Human
agauguaaucacacgacc

SEQ ID NO: 768250 - RNA, 23 nt, Human
aggaagaauaaaaucuaagucca

SEQ ID NO: 768251 - RNA, 20 nt, Human
aggagcacagcugccggagc

SEQ ID NO: 768252 - RNA, 24 nt, Human
auggugacagcuuuaaaguacacc

SEQ ID NO: 768253 - RNA, 24 nt, Human
caaaaggucccccaggcaucaaug

SEQ ID NO: 768254 - RNA, 27 nt, Human
cacacgaccgaagacgagcuggucauc

SEQ ID NO: 768255 - RNA, 22 nt, Human
cacacgggccaugagauguaau

SEQ ID NO: 768256 - RNA, 23 nt, Human
cacaggaaaaaaaaaauauuuuc

SEQ ID NO: 768257 - RNA, 23 nt, Human
cagcacaaauuuaucacaauuaa

SEQ ID NO: 768258 - RNA, 18 nt, Human
cagcugccggagcuccgc

SEQ ID NO: 768259 - RNA, 20 nt, Human
caguguauggcugucaggau

SEQ ID NO: 768260 - RNA, 22 nt, Human
cauaagggaagcaguguauggc

SEQ ID NO: 768261 - RNA, 18 nt, Human
ccaggacuguauuaacaa

SEQ ID NO: 768262 - RNA, 21 nt, Human
cccacacacgggccaugagau

SEQ ID NO: 768263 - RNA, 19 nt, Human
ccccgcccugccucuuccc

SEQ ID NO: 768264 - RNA, 19 nt, Human
cccugugcucggucucccc

SEQ ID NO: 768265 - RNA, 21 nt, Human
ccgcaagcuuccacaaauugc

SEQ ID NO: 768266 - RNA, 24 nt, Human
ccugaacacucacgcugcccugga

SEQ ID NO: 768267 - RNA, 18 nt, Human
cggccgaggagcacagcu

SEQ ID NO: 768268 - RNA, 20 nt, Human
cgucaaagaaggggaugacg

SEQ ID NO: 768269 - RNA, 21 nt, Human
cucagccucgaggcaaaaggu

SEQ ID NO: 768270 - RNA, 23 nt, Human
gaaauucuuaaaacuguuuauaa

SEQ ID NO: 768271 - RNA, 22 nt, Human
gaaugccaggacuguauuaaca

SEQ ID NO: 768272 - RNA, 23 nt, Human
gaguacaguuuaaggagucucug

SEQ ID NO: 768273 - RNA, 20 nt, Human
gaugggguucaggucagugu

SEQ ID NO: 768274 - RNA, 20 nt, Human
gcggauguugugggaucucu

SEQ ID NO: 768275 - RNA, 23 nt, Human
gcggcggauguugugggaucucu

SEQ ID NO: 768276 - RNA, 20 nt, Human
gcuuuggaaagcauccugag

SEQ ID NO: 768277 - RNA, 24 nt, Human
ggauguaugcauacuuagaaucca

SEQ ID NO: 768278 - RNA, 19 nt, Human
guaucaucuaagaaagcuc

SEQ ID NO: 768279 - RNA, 18 nt, Human
guccucccugugcucggu

SEQ ID NO: 768280 - RNA, 26 nt, Human
uaaaagaaaauauaacauggugaagg

SEQ ID NO: 768281 - RNA, 21 nt, Human
uaaaguacaccaccauucacc

SEQ ID NO: 768282 - RNA, 21 nt, Human
uaaaguacaccaccauucacc

SEQ ID NO: 768283 - RNA, 23 nt, Human
uaagacacaaugaaaacuuugaa

SEQ ID NO: 768284 - RNA, 19 nt, Human
uaagacgcucgucuucucc

SEQ ID NO: 768285 - RNA, 23 nt, Human
uauguacauaacaauauacugua

SEQ ID NO: 768286 - RNA, 24 nt, Human
uauugccagugagauuuaaaaaaa

SEQ ID NO: 768287 - RNA, 21 nt, Human
ucaaagaaggggaugacguga

SEQ ID NO: 768288 - RNA, 18 nt, Human
ucagaaagucugcaacug

SEQ ID NO: 768289 - RNA, 22 nt, Human
uccaccucggccgaggagcaca

SEQ ID NO: 768290 - RNA, 24 nt, Human
uccccagugauuggcuuuggaaag

SEQ ID NO: 768291 - RNA, 22 nt, Human
ucccccaggcaucaaugucagu

SEQ ID NO: 768292 - RNA, 18 nt, Human
uccccuugguccucccug

SEQ ID NO: 768293 - RNA, 22 nt, Human
ucccggucugcguaaauggcau

SEQ ID NO: 768294 - RNA, 19 nt, Human
ucccugccauguagauccc

SEQ ID NO: 768295 - RNA, 19 nt, Human
uccgccaccuucuuacuca

SEQ ID NO: 768296 - RNA, 18 nt, Human
uccuuaagcagcuucacu

SEQ ID NO: 768297 - RNA, 20 nt, Human
ucuccccuuccccuuggucc

SEQ ID NO: 768298 - RNA, 19 nt, Human
ucugcaacuggaacagcug

SEQ ID NO: 768299 - RNA, 19 nt, Human
ucuucaaagaaucccucca

SEQ ID NO: 768300 - RNA, 22 nt, Human
ugaaaacgcaagucagaaaguc

SEQ ID NO: 768301 - RNA, 18 nt, Human
ugagcugcaguuugauca

SEQ ID NO: 768302 - RNA, 19 nt, Human
ugaggacugcucaugcaug

SEQ ID NO: 768303 - RNA, 23 nt, Human
ugaguauuaaaaauguagaaaug

SEQ ID NO: 768304 - RNA, 18 nt, Human
ugaguuuggguuccuugu

SEQ ID NO: 768305 - RNA, 21 nt, Human
ugauauguacauaacaauaua

SEQ ID NO: 768306 - RNA, 24 nt, Human
ugcaaggaaaugaauauaaaagca

SEQ ID NO: 768307 - RNA, 19 nt, Human
ugccacaggaaaaaaaaaa

SEQ ID NO: 768308 - RNA, 23 nt, Human
ugcucggucuccccagugauugg

SEQ ID NO: 768309 - RNA, 20 nt, Human
uggcaaaaggaugaaauucu

SEQ ID NO: 768310 - RNA, 22 nt, Human
uggcaaaaggaugaaauucuua

SEQ ID NO: 768311 - RNA, 18 nt, Human
uggcaucucaaacaugaa

SEQ ID NO: 768312 - RNA, 20 nt, Human
ugguacaugacagggaugcg

SEQ ID NO: 768313 - RNA, 18 nt, Human
uguacauaacaauauacu

SEQ ID NO: 768314 - RNA, 25 nt, Human
uguagaaauguaauacauauaugua

SEQ ID NO: 768315 - RNA, 20 nt, Human
uguggugcugguacaugaca

SEQ ID NO: 768316 - RNA, 21 nt, Human
uguuggagucccacugauggc

SEQ ID NO: 768317 - RNA, 21 nt, Human
uucaaagaaucccuccacauc

SEQ ID NO: 768318 - RNA, 26 nt, Human
uucaaccugaaugugccacaggaaaa

SEQ ID NO: 768319 - RNA, 24 nt, Human
uucacuuuauugucaggauaucgc

SEQ ID NO: 768320 - RNA, 18 nt, Human
uucaggucaguguggugc

SEQ ID NO: 768321 - RNA, 18 nt, Human
uuccuuaagcagcuucac

SEQ ID NO: 768322 - RNA, 23 nt, Human
uucgguaagacgcucgucuucuc

SEQ ID NO: 768323 - RNA, 21 nt, Human
uugcacugcucuuccaccccg

SEQ ID NO: 768324 - RNA, 20 nt, Human
uuguaaauauacuccuuucc

SEQ ID NO: 768325 - RNA, 22 nt, Human
uuuaaucagacguucguuuacc

SEQ ID NO: 768326 - RNA, 21 nt, Human
uuuuccuuucuugcaacucuu

SEQ ID NO: 768327 - RNA, 19 nt, Human
uuuuucuguaggccaucua

SEQ ID NO: 768328 - RNA, 20 nt, Human
aaaaccccaaucuugguagc

SEQ ID NO: 768329 - RNA, 21 nt, Human
aaaggggugagaugggucauc

SEQ ID NO: 768330 - RNA, 24 nt, Human
acuccugauuauuuuaaaaggcca

SEQ ID NO: 768331 - RNA, 27 nt, Human
acugcauucuaggcuuucuggcuaacc

SEQ ID NO: 768332 - RNA, 28 nt, Human
agauauugaggcaggaaaaaaaaagggg

SEQ ID NO: 768333 - RNA, 19 nt, Human
agaucuggggcgggggaug

SEQ ID NO: 768334 - RNA, 19 nt, Human
agcuguguguguugagagu

SEQ ID NO: 768335 - RNA, 18 nt, Human
aggcaggaaaaaaaaagg

SEQ ID NO: 768336 - RNA, 21 nt, Human
aggcaggaaaaaaaaaggggu

SEQ ID NO: 768337 - RNA, 27 nt, Human
aggcaggaaaaaaaaaggggugagguc

SEQ ID NO: 768338 - RNA, 19 nt, Human
aggcaggagugaaaggagg

SEQ ID NO: 768339 - RNA, 25 nt, Human
agggagcaccccguggcggcggcgg

SEQ ID NO: 768340 - RNA, 22 nt, Human
agggagggagcaccccguggcg

SEQ ID NO: 768341 - RNA, 22 nt, Human
agggccaguauucucagaugac

SEQ ID NO: 768342 - RNA, 23 nt, Human
agguggccggacuugggcgggag

SEQ ID NO: 768343 - RNA, 22 nt, Human
agguggcuuggcagucaggcag

SEQ ID NO: 768344 - RNA, 19 nt, Human
aguggcuuuccaacugugu

SEQ ID NO: 768345 - RNA, 19 nt, Human
auacuaggaaacuugcaag

SEQ ID NO: 768346 - RNA, 24 nt, Human
auaucuuuuaaaauaaaaaacaga

SEQ ID NO: 768347 - RNA, 22 nt, Human
auuggugacuuugccuccuggg

SEQ ID NO: 768348 - RNA, 23 nt, Human
caaaaucuguuuugaaaagguau

SEQ ID NO: 768349 - RNA, 19 nt, Human
caacacagaaccgaguccu

SEQ ID NO: 768350 - RNA, 25 nt, Human
cacagguaggaaaacaaaaucuguu

SEQ ID NO: 768351 - RNA, 19 nt, Human
cacccccgagacucggccu

SEQ ID NO: 768352 - RNA, 19 nt, Human
cacuccgucagggcaaagu

SEQ ID NO: 768353 - RNA, 21 nt, Human
cacucggugugcagcuuggca

SEQ ID NO: 768354 - RNA, 19 nt, Human
cagcaaagggcagcuaugc

SEQ ID NO: 768355 - RNA, 21 nt, Human
caggaaaugcacucugaggac

SEQ ID NO: 768356 - RNA, 20 nt, Human
ccaggaaaugcacucugagg

SEQ ID NO: 768357 - RNA, 24 nt, Human
ccaguggcuuuccaacuguguccc

SEQ ID NO: 768358 - RNA, 18 nt, Human
cccccgagacucggccua

SEQ ID NO: 768359 - RNA, 18 nt, Human
ccccguggcggcggcggc

SEQ ID NO: 768360 - RNA, 20 nt, Human
ccccugacuccccacccacc

SEQ ID NO: 768361 - RNA, 19 nt, Human
cccugagccgccgcugccc

SEQ ID NO: 768362 - RNA, 18 nt, Human
ccgagacucggccuaagg

SEQ ID NO: 768363 - RNA, 22 nt, Human
ccgccgcugcccgcugcugugc

SEQ ID NO: 768364 - RNA, 23 nt, Human
ccgcugcugugccaccgccgccg

SEQ ID NO: 768365 - RNA, 18 nt, Human
ccguguggcuugcaaaau

SEQ ID NO: 768366 - RNA, 20 nt, Human
ccucccaccccugacucccc

SEQ ID NO: 768367 - RNA, 22 nt, Human
ccucccaccccugacuccccac

SEQ ID NO: 768368 - RNA, 18 nt, Human
ccuccucuuccuccuucu

SEQ ID NO: 768369 - RNA, 19 nt, Human
ccuccucuuccuccuucuc

SEQ ID NO: 768370 - RNA, 21 nt, Human
ccucugcuuccgggccacucc

SEQ ID NO: 768371 - RNA, 23 nt, Human
ccucugcuuccgggccacuccgu

SEQ ID NO: 768372 - RNA, 22 nt, Human
ccucuuccuccuucuccuccca

SEQ ID NO: 768373 - RNA, 26 nt, Human
ccugaaacccugaccuaggcuucagg

SEQ ID NO: 768374 - RNA, 22 nt, Human
ccugcauuggugacuuugccuc

SEQ ID NO: 768375 - RNA, 18 nt, Human
ccugcuucgauucaguug

SEQ ID NO: 768376 - RNA, 22 nt, Human
ccuggggcuggacuccugaaac

SEQ ID NO: 768377 - RNA, 20 nt, Human
ccuugaaagaguucauuccu

SEQ ID NO: 768378 - RNA, 21 nt, Human
cgccgaaauguguucucucug

SEQ ID NO: 768379 - RNA, 23 nt, Human
cgccgccgcggcugcccuauuuc

SEQ ID NO: 768380 - RNA, 20 nt, Human
cgggaccggagcccgugagg

SEQ ID NO: 768381 - RNA, 26 nt, Human
cguggcggcggcggcgaccccgcccc

SEQ ID NO: 768382 - RNA, 20 nt, Human
cucccaacccguguggcuug

SEQ ID NO: 768383 - RNA, 21 nt, Human
cugaccuaggcuucaggccug

SEQ ID NO: 768384 - RNA, 21 nt, Human
cugccgccgggaccggagccc

SEQ ID NO: 768385 - RNA, 23 nt, Human
cuggccccacucguguccuuggg

SEQ ID NO: 768386 - RNA, 22 nt, Human
cuucaggaacucaccuggcccc

SEQ ID NO: 768387 - RNA, 22 nt, Human
cuugcuacaggaggccccccug

SEQ ID NO: 768388 - RNA, 26 nt, Human
cuuggcacagaaaugaucccuuuaca

SEQ ID NO: 768389 - RNA, 19 nt, Human
cuuuugucuguaaaaaugu

SEQ ID NO: 768390 - RNA, 20 nt, Human
gagaaagggcaggccagucu

SEQ ID NO: 768391 - RNA, 21 nt, Human
gagaugggucauccaugcauc

SEQ ID NO: 768392 - RNA, 18 nt, Human
gaggcuguugaggcucca

SEQ ID NO: 768393 - RNA, 18 nt, Human
gaugcagguggcuuggca

SEQ ID NO: 768394 - RNA, 20 nt, Human
gauucaguugugucuggcau

SEQ ID NO: 768395 - RNA, 22 nt, Human
gcagcugcgagggagaagaugc

SEQ ID NO: 768396 - RNA, 19 nt, Human
gcaguaagggacaaugacu

SEQ ID NO: 768397 - RNA, 19 nt, Human
gcagugucaggacuagggg

SEQ ID NO: 768398 - RNA, 24 nt, Human
gccaccgccgccgcggcugcccuu

SEQ ID NO: 768399 - RNA, 19 nt, Human
gccuccuggggcuggacuc

SEQ ID NO: 768400 - RNA, 25 nt, Human
gcuggacuccugaaacccugaccua

SEQ ID NO: 768401 - RNA, 21 nt, Human
ggaacucaccuggccccacuc

SEQ ID NO: 768402 - RNA, 25 nt, Human
ggagaagcaggugcugcagaaguug

SEQ ID NO: 768403 - RNA, 24 nt, Human
ggaguggaugggccacagguagga

SEQ ID NO: 768404 - RNA, 24 nt, Human
ggccuaaggcagggaaggauauag

SEQ ID NO: 768405 - RNA, 21 nt, Human
ggcggcggcggcgaccccgcc

SEQ ID NO: 768406 - RNA, 19 nt, Human
ggguguuccuuggcccagg

SEQ ID NO: 768407 - RNA, 20 nt, Human
guggccggacuugggcggga

SEQ ID NO: 768408 - RNA, 21 nt, Human
gugugcagcuuggcacagaaa

SEQ ID NO: 768409 - RNA, 21 nt, Human
uaaaauaaaaaacagacguac

SEQ ID NO: 768410 - RNA, 26 nt, Human
uacaauggaaauuuuuccaaaaaaaa

SEQ ID NO: 768411 - RNA, 18 nt, Human
uacacagcagcauauguu

SEQ ID NO: 768412 - RNA, 22 nt, Human
ucaaaccaggacacauguaagu

SEQ ID NO: 768413 - RNA, 21 nt, Human
ucaggccugcuucgauucagu

SEQ ID NO: 768414 - RNA, 20 nt, Human
ucauaugugggagagggaag

SEQ ID NO: 768415 - RNA, 23 nt, Human
uccaggaaaugcacucugaggac

SEQ ID NO: 768416 - RNA, 21 nt, Human
ucccaccccugacuccccacc

SEQ ID NO: 768417 - RNA, 19 nt, Human
ucccaugaaccucugcugg

SEQ ID NO: 768418 - RNA, 18 nt, Human
ucccgggcucgcuggagg

SEQ ID NO: 768419 - RNA, 18 nt, Human
ucccugagccgccgcugc

SEQ ID NO: 768420 - RNA, 19 nt, Human
uccuuuuucugucaggggc

SEQ ID NO: 768421 - RNA, 23 nt, Human
ucuauugguuuuccugccaaaag

SEQ ID NO: 768422 - RNA, 18 nt, Human
ucucaugagaucuggggc

SEQ ID NO: 768423 - RNA, 23 nt, Human
ucucccaacccguguggcuugca

SEQ ID NO: 768424 - RNA, 19 nt, Human
ucuccucccaccccugacu

SEQ ID NO: 768425 - RNA, 19 nt, Human
ucuguucuggguucugcag

SEQ ID NO: 768426 - RNA, 22 nt, Human
ucuuccuccuucuccucccccc

SEQ ID NO: 768427 - RNA, 23 nt, Human
ugacuccccacccaaccaacucu

SEQ ID NO: 768428 - RNA, 24 nt, Human
ugacuuaggaauccugcugcccag

SEQ ID NO: 768429 - RNA, 22 nt, Human
ugagacacauaaggagaaugca

SEQ ID NO: 768430 - RNA, 21 nt, Human
ugagaccaccucucccaaccc

SEQ ID NO: 768431 - RNA, 22 nt, Human
ugaggacagcaaagggcagcua

SEQ ID NO: 768432 - RNA, 20 nt, Human
ugaggcaggaaaaaaaaagg

SEQ ID NO: 768433 - RNA, 18 nt, Human
ugagguggccuggucugc

SEQ ID NO: 768434 - RNA, 19 nt, Human
ugcaguguguguguauuga

SEQ ID NO: 768435 - RNA, 24 nt, Human
ugccaaaaggcauuuaccucccug

SEQ ID NO: 768436 - RNA, 24 nt, Human
ugccaggcaagcccagucugcccu

SEQ ID NO: 768437 - RNA, 19 nt, Human
ugcccagaggggcucgugu

SEQ ID NO: 768438 - RNA, 24 nt, Human
ugcccaugugagagucaccacagc

SEQ ID NO: 768439 - RNA, 22 nt, Human
ugccuccuggggcuggacuccu

SEQ ID NO: 768440 - RNA, 24 nt, Human
ugcggggaugggguaccagagagg

SEQ ID NO: 768441 - RNA, 18 nt, Human
uggagaagcaggguggca

SEQ ID NO: 768442 - RNA, 20 nt, Human
uggcaaaggaaaauccuggu

SEQ ID NO: 768443 - RNA, 20 nt, Human
uggccccacucguguccuug

SEQ ID NO: 768444 - RNA, 21 nt, Human
ugggaugugggguugugacca

SEQ ID NO: 768445 - RNA, 19 nt, Human
ugggguaccagagaggagu

SEQ ID NO: 768446 - RNA, 23 nt, Human
ugggguugugaccacccccgaga

SEQ ID NO: 768447 - RNA, 23 nt, Human
ugggguuucugcauugagccugg

SEQ ID NO: 768448 - RNA, 22 nt, Human
ugguaaaaaugggagauuggga

SEQ ID NO: 768449 - RNA, 19 nt, Human
ugugaaggcaacugacaga

SEQ ID NO: 768450 - RNA, 20 nt, Human
ugugcagcuuggcacagaaa

SEQ ID NO: 768451 - RNA, 24 nt, Human
uguugaggcuccagcucccugagc

SEQ ID NO: 768452 - RNA, 18 nt, Human
uuccuaacgaaaaaaccc

SEQ ID NO: 768453 - RNA, 22 nt, Human
uuccuccucuuccuccuucucc

SEQ ID NO: 768454 - RNA, 19 nt, Human
uuccucuccuugaaagagu

SEQ ID NO: 768455 - RNA, 27 nt, Human
uucuggguucugcaguguguguguauu

SEQ ID NO: 768456 - RNA, 24 nt, Human
uugcaaaaugaucauucaaaccag

SEQ ID NO: 768457 - RNA, 22 nt, Human
uugcugagucucugaucuaggc

SEQ ID NO: 768458 - RNA, 20 nt, Human
uuggagaagcaggguggcaa

SEQ ID NO: 768459 - RNA, 21 nt, Human
aaaacaacagcaagcagagag

SEQ ID NO: 768460 - RNA, 19 nt, Human
aaaaugacaagucuuucuc

SEQ ID NO: 768461 - RNA, 23 nt, Human
aaacaaaccacaaacuuacucuc

SEQ ID NO: 768462 - RNA, 21 nt, Human
aaaccagaaacaaaccacaaa

SEQ ID NO: 768463 - RNA, 18 nt, Human
aaaugacaagucuuucuc

SEQ ID NO: 768464 - RNA, 22 nt, Human
aacaagaaccaaagcaaggucg

SEQ ID NO: 768465 - RNA, 23 nt, Human
aacacagaauauaaaaucaggca

SEQ ID NO: 768466 - RNA, 27 nt, Human
aaccauacucccggcgaugggcaccca

SEQ ID NO: 768467 - RNA, 25 nt, Human
aacuuacucuccaagagagccccca

SEQ ID NO: 768468 - RNA, 20 nt, Human
aaggccugguucacccuuga

SEQ ID NO: 768469 - RNA, 19 nt, Human
acaacagcaagcagagagc

SEQ ID NO: 768470 - RNA, 21 nt, Human
acaacagcaagcagagagcag

SEQ ID NO: 768471 - RNA, 23 nt, Human
acaacagcaagcagagagcaggg

SEQ ID NO: 768472 - RNA, 24 nt, Human
acaacagcaagcagagagcagggg

SEQ ID NO: 768473 - RNA, 27 nt, Human
acagugccgguggcagcugaaccauac

SEQ ID NO: 768474 - RNA, 24 nt, Human
accccgcuuuccucggaccucagc

SEQ ID NO: 768475 - RNA, 22 nt, Human
acuccugcccacacuuugacac

SEQ ID NO: 768476 - RNA, 18 nt, Human
agaacgcgcaggaaaucc

SEQ ID NO: 768477 - RNA, 19 nt, Human
agaacgugcaaacagggcu

SEQ ID NO: 768478 - RNA, 22 nt, Human
agaagacuucccaggaaugcuu

SEQ ID NO: 768479 - RNA, 26 nt, Human
agaagacuucccaggaaugcuuucuu

SEQ ID NO: 768480 - RNA, 22 nt, Human
agacacacaccacaagaccucc

SEQ ID NO: 768481 - RNA, 20 nt, Human
agagaacagaauccccgcug

SEQ ID NO: 768482 - RNA, 23 nt, Human
agagaaucacccaccagacagcg

SEQ ID NO: 768483 - RNA, 19 nt, Human
agagagcaggggaggaaag

SEQ ID NO: 768484 - RNA, 24 nt, Human
agagccccugugaguacuuggaac

SEQ ID NO: 768485 - RNA, 20 nt, Human
agaggaugggaagaggggag

SEQ ID NO: 768486 - RNA, 21 nt, Human
agaggaugggaagaggggagu

SEQ ID NO: 768487 - RNA, 21 nt, Human
agcaagucccuggaaugcagg

SEQ ID NO: 768488 - RNA, 24 nt, Human
aggaccccucauagaugacaagaa

SEQ ID NO: 768489 - RNA, 24 nt, Human
aggcaggcaaagcacauuuauaag

SEQ ID NO: 768490 - RNA, 21 nt, Human
aggcugaggcaggcaaagcac

SEQ ID NO: 768491 - RNA, 22 nt, Human
aggggcuucaccagcucagugg

SEQ ID NO: 768492 - RNA, 20 nt, Human
agggugggggcugcaauggg

SEQ ID NO: 768493 - RNA, 18 nt, Human
aucaggcaaaacaaacac

SEQ ID NO: 768494 - RNA, 23 nt, Human
augcaaggucaggguggaaggcc

SEQ ID NO: 768495 - RNA, 19 nt, Human
augcugccugcaguggcug

SEQ ID NO: 768496 - RNA, 21 nt, Human
augcugccugcaguggcuggu

SEQ ID NO: 768497 - RNA, 19 nt, Human
caaaccaacaccaaggagc

SEQ ID NO: 768498 - RNA, 22 nt, Human
caaaccaacaccaaggagcugg

SEQ ID NO: 768499 - RNA, 20 nt, Human
caacuagaacgugcaaacag

SEQ ID NO: 768500 - RNA, 21 nt, Human
caagaagggcagccgaggaua

SEQ ID NO: 768501 - RNA, 21 nt, Human
caagagagcccccacaaccca

SEQ ID NO: 768502 - RNA, 22 nt, Human
caagagagcccccacaacccaa

SEQ ID NO: 768503 - RNA, 18 nt, Human
caaggaguuucccagagc

SEQ ID NO: 768504 - RNA, 23 nt, Human
cacagucagagaacagaaucccc

SEQ ID NO: 768505 - RNA, 24 nt, Human
caccaagcaccgcaguguggcacc

SEQ ID NO: 768506 - RNA, 18 nt, Human
caccacauagcagcuggc

SEQ ID NO: 768507 - RNA, 26 nt, Human
caccacauagcagcuggccccgcacc

SEQ ID NO: 768508 - RNA, 22 nt, Human
caccacuguaaaccagaaacaa

SEQ ID NO: 768509 - RNA, 19 nt, Human
caccccgcuuuccucggac

SEQ ID NO: 768510 - RNA, 20 nt, Human
caccgugcacccaaagagga

SEQ ID NO: 768511 - RNA, 21 nt, Human
caccuggcacagaggauggga

SEQ ID NO: 768512 - RNA, 22 nt, Human
caccuucacucagugucagcca

SEQ ID NO: 768513 - RNA, 24 nt, Human
cacgugcugcaggaugcccaaaag

SEQ ID NO: 768514 - RNA, 22 nt, Human
cacugcaucacuucuggaagac

SEQ ID NO: 768515 - RNA, 22 nt, Human
cagaaacaaaccacaaacuuac

SEQ ID NO: 768516 - RNA, 26 nt, Human
cagaagcccuucaaggucaaagcuuc

SEQ ID NO: 768517 - RNA, 24 nt, Human
cagaauagcgucaaaacaacagcc

SEQ ID NO: 768518 - RNA, 19 nt, Human
cagacaacaagacucucac

SEQ ID NO: 768519 - RNA, 20 nt, Human
cagagaaucacccaccagac

SEQ ID NO: 768520 - RNA, 21 nt, Human
cagaugcaaguggcuguuccu

SEQ ID NO: 768521 - RNA, 25 nt, Human
cagcaacaacuccacaucccaacca

SEQ ID NO: 768522 - RNA, 24 nt, Human
cagcucaguggcaaauaucagaca

SEQ ID NO: 768523 - RNA, 19 nt, Human
cagcugcagcagcugacac

SEQ ID NO: 768524 - RNA, 21 nt, Human
caggaaugcuuucuuacaagg

SEQ ID NO: 768525 - RNA, 20 nt, Human
cagggcagagaaucacccac

SEQ ID NO: 768526 - RNA, 25 nt, Human
caggggaggaaagacaugcugccug

SEQ ID NO: 768527 - RNA, 23 nt, Human
caguggcaaauaucagacaacaa

SEQ ID NO: 768528 - RNA, 22 nt, Human
cauggaagugaaugacucucaa

SEQ ID NO: 768529 - RNA, 22 nt, Human
ccaauuuauugcaaaccaacac

SEQ ID NO: 768530 - RNA, 28 nt, Human
ccacuguaaaccagaaacaaaccacaag

SEQ ID NO: 768531 - RNA, 26 nt, Human
ccaguccagggugguggcucagggca

SEQ ID NO: 768532 - RNA, 18 nt, Human
cccacaacccaaguaucc

SEQ ID NO: 768533 - RNA, 20 nt, Human
cccacaacccaaguauccau

SEQ ID NO: 768534 - RNA, 22 nt, Human
cccacaacccaaguauccauag

SEQ ID NO: 768535 - RNA, 22 nt, Human
cccacacuuugacaccgugcac

SEQ ID NO: 768536 - RNA, 19 nt, Human
ccccacaacccaaguaucc

SEQ ID NO: 768537 - RNA, 22 nt, Human
ccccaugcagaaauuccuccuc

SEQ ID NO: 768538 - RNA, 25 nt, Human
cccucaugcaagcacagagcuucac

SEQ ID NO: 768539 - RNA, 19 nt, Human
cccuggaaugcagggagcc

SEQ ID NO: 768540 - RNA, 20 nt, Human
ccgccucagcccacgcgucc

SEQ ID NO: 768541 - RNA, 20 nt, Human
ccgcugcaucuggaccugag

SEQ ID NO: 768542 - RNA, 18 nt, Human
ccucaaugggaagaacuc

SEQ ID NO: 768543 - RNA, 21 nt, Human
ccugcccacacuuugacaccg

SEQ ID NO: 768544 - RNA, 23 nt, Human
cgcaccuucucuggaacagucug

SEQ ID NO: 768545 - RNA, 21 nt, Human
cgccugagaguccagcaacaa

SEQ ID NO: 768546 - RNA, 24 nt, Human
cuaaaaagagaaaacaggcagggu

SEQ ID NO: 768547 - RNA, 19 nt, Human
cuccaagagagcccccaca

SEQ ID NO: 768548 - RNA, 22 nt, Human
cucuuccucuuccuuucuucug

SEQ ID NO: 768549 - RNA, 25 nt, Human
cugagcccagaaccuaggcuuucuc

SEQ ID NO: 768550 - RNA, 21 nt, Human
cugcugagcugauggacaugc

SEQ ID NO: 768551 - RNA, 23 nt, Human
cuguaaaccagaaacaaaccaca

SEQ ID NO: 768552 - RNA, 18 nt, Human
cuucagcuucgccugaga

SEQ ID NO: 768553 - RNA, 28 nt, Human
cuuggccucuuccucuuccuuucuucug

SEQ ID NO: 768554 - RNA, 25 nt, Human
gaacaacuagaacgugcaaacaggg

SEQ ID NO: 768555 - RNA, 20 nt, Human
gaacacaggccugaggaccu

SEQ ID NO: 768556 - RNA, 19 nt, Human
gacagugccgguggcagcu

SEQ ID NO: 768557 - RNA, 24 nt, Human
gaccagaugcaaguggcuguuccu

SEQ ID NO: 768558 - RNA, 20 nt, Human
gagaaaugcaacacagaaua

SEQ ID NO: 768559 - RNA, 21 nt, Human
gagcacagucuggcaccuggc

SEQ ID NO: 768560 - RNA, 23 nt, Human
gagcacagucuggcaccuggcac

SEQ ID NO: 768561 - RNA, 19 nt, Human
gaggaugggaagaggggag

SEQ ID NO: 768562 - RNA, 22 nt, Human
gaguuucccagagcagccucag

SEQ ID NO: 768563 - RNA, 24 nt, Human
gcaagcgauagaagucugucuugc

SEQ ID NO: 768564 - RNA, 18 nt, Human
gcaaggaguuucccagag

SEQ ID NO: 768565 - RNA, 29 nt, Human
gccccaugcagaaauuccuccucucccaa

SEQ ID NO: 768566 - RNA, 22 nt, Human
gccucccgcccuagguacgcuu

SEQ ID NO: 768567 - RNA, 18 nt, Human
ggaagaacuccaggaaaa

SEQ ID NO: 768568 - RNA, 22 nt, Human
ggaccugagcccagaaccuagg

SEQ ID NO: 768569 - RNA, 24 nt, Human
ggagacacacaccacaagaccucc

SEQ ID NO: 768570 - RNA, 20 nt, Human
ggaggcugcacuuucucuac

SEQ ID NO: 768571 - RNA, 28 nt, Human
ggcaaaacaaacacuagucaccauggaa

SEQ ID NO: 768572 - RNA, 22 nt, Human
ggccccgcaccuucucuggaac

SEQ ID NO: 768573 - RNA, 18 nt, Human
ggcuuauccaugcucuga

SEQ ID NO: 768574 - RNA, 18 nt, Human
gggcaucucacaccacug

SEQ ID NO: 768575 - RNA, 24 nt, Human
guccagcaacaacuccacauccca

SEQ ID NO: 768576 - RNA, 23 nt, Human
uaaaccagaaacaaaccacaaac

SEQ ID NO: 768577 - RNA, 25 nt, Human
uaaaccagaaacaaaccacaaacuu

SEQ ID NO: 768578 - RNA, 19 nt, Human
uaaagcagggcagggagug

SEQ ID NO: 768579 - RNA, 18 nt, Human
uacagcucggccgccccu

SEQ ID NO: 768580 - RNA, 24 nt, Human
uacucccggcgaugggcacccaga

SEQ ID NO: 768581 - RNA, 26 nt, Human
uagcaucugcgggccuugauucuugc

SEQ ID NO: 768582 - RNA, 18 nt, Human
uagcgucaaaacaacagc

SEQ ID NO: 768583 - RNA, 22 nt, Human
uaucagacaacaagacucucac

SEQ ID NO: 768584 - RNA, 21 nt, Human
ucaaugggaagaacuccagga

SEQ ID NO: 768585 - RNA, 21 nt, Human
ucacacacacagcgccgccuc

SEQ ID NO: 768586 - RNA, 22 nt, Human
ucacaccacugcaucacuucug

SEQ ID NO: 768587 - RNA, 22 nt, Human
ucacuucaacaagaaccaaagc

SEQ ID NO: 768588 - RNA, 18 nt, Human
uccacaaccacaccaagc

SEQ ID NO: 768589 - RNA, 21 nt, Human
uccacaaccacaccaagcacc

SEQ ID NO: 768590 - RNA, 19 nt, Human
uccacaucccaaccagaag

SEQ ID NO: 768591 - RNA, 22 nt, Human
uccacaucccaaccagaagaca

SEQ ID NO: 768592 - RNA, 18 nt, Human
uccaggaaaaaaaaugac

SEQ ID NO: 768593 - RNA, 18 nt, Human
uccccugacaauaggccc

SEQ ID NO: 768594 - RNA, 24 nt, Human
ucccuggagaacagguaagauugg

SEQ ID NO: 768595 - RNA, 18 nt, Human
ucucaggacuuguggcug

SEQ ID NO: 768596 - RNA, 26 nt, Human
ucucccagaagcccuucaaggucaaa

SEQ ID NO: 768597 - RNA, 24 nt, Human
ucucgucuuugcaccuuggcugga

SEQ ID NO: 768598 - RNA, 20 nt, Human
ugaaagaaaggauggcuagg

SEQ ID NO: 768599 - RNA, 20 nt, Human
ugaaagaaaggauggcuagg

SEQ ID NO: 768600 - RNA, 23 nt, Human
ugaaugacucucaaagucuccca

SEQ ID NO: 768601 - RNA, 23 nt, Human
ugacacagucuuggccucuuccu

SEQ ID NO: 768602 - RNA, 26 nt, Human
ugacuucagcuucgccugagaguccu

SEQ ID NO: 768603 - RNA, 21 nt, Human
ugagcaagaagaccacgugaa

SEQ ID NO: 768604 - RNA, 22 nt, Human
ugagcccagaaccuaggcuuuc

SEQ ID NO: 768605 - RNA, 21 nt, Human
ugcagggcaucucacaccacu

SEQ ID NO: 768606 - RNA, 24 nt, Human
ugcgguagaggaagccaaagagaa

SEQ ID NO: 768607 - RNA, 20 nt, Human
uggaacacaggccugaggac

SEQ ID NO: 768608 - RNA, 18 nt, Human
uggccucuuccucuuccu

SEQ ID NO: 768609 - RNA, 20 nt, Human
uggcucagggcauaggcuug

SEQ ID NO: 768610 - RNA, 18 nt, Human
uggcuguuccugccaugg

SEQ ID NO: 768611 - RNA, 18 nt, Human
ugggaagaacuccaggaa

SEQ ID NO: 768612 - RNA, 24 nt, Human
ugggaagaacuccaggaaaaaaaa

SEQ ID NO: 768613 - RNA, 19 nt, Human
ugggaagaggggagucuuc

SEQ ID NO: 768614 - RNA, 20 nt, Human
ugggacuggcuccuucucag

SEQ ID NO: 768615 - RNA, 21 nt, Human
ugggggcugcaaugggggccc

SEQ ID NO: 768616 - RNA, 19 nt, Human
ugguggccgggcuugguuc

SEQ ID NO: 768617 - RNA, 23 nt, Human
ugguucacccuugaaagaaagga

SEQ ID NO: 768618 - RNA, 24 nt, Human
uguaaaccagaaacaaaccacaaa

SEQ ID NO: 768619 - RNA, 22 nt, Human
ugucuaaaaagagaaaacaggc

SEQ ID NO: 768620 - RNA, 25 nt, Human
ugugaugaucggagcaacauguuug

SEQ ID NO: 768621 - RNA, 23 nt, Human
uguggucaaagguuuugaauacc

SEQ ID NO: 768622 - RNA, 20 nt, Human
uucaacaagaaccaaagcaa

SEQ ID NO: 768623 - RNA, 21 nt, Human
uuccaaaggggguaucuaggg

SEQ ID NO: 768624 - RNA, 22 nt, Human
uuccuuucuucugauuuucucu

SEQ ID NO: 768625 - RNA, 23 nt, Human
uucucagcugcagcagcugacac

SEQ ID NO: 768626 - RNA, 18 nt, Human
uugcgguagaggaagcca

SEQ ID NO: 768627 - RNA, 24 nt, Human
uuggacccacagaagacuucccag

SEQ ID NO: 768628 - RNA, 23 nt, Human
uuucccagagcagccucaggcac

SEQ ID NO: 768629 - RNA, 23 nt, Human
uuugcugggauauccucuccugc

SEQ ID NO: 768630 - RNA, 23 nt, Human
uuuuuuuuuuuuuuuuuuuuggg

SEQ ID NO: 768631 - RNA, 23 nt, Human
aaaacaaagagggacaucugaac

SEQ ID NO: 768632 - RNA, 21 nt, Human
aaaagaaaauaaauuucuggu

SEQ ID NO: 768633 - RNA, 19 nt, Human
aaaaggcaagguaacuagu

SEQ ID NO: 768634 - RNA, 22 nt, Human
aacaaagagggacaucugaaca

SEQ ID NO: 768635 - RNA, 23 nt, Human
aacacaugaagucaaagggagac

SEQ ID NO: 768636 - RNA, 21 nt, Human
aacccgagcugcugaggaguu

SEQ ID NO: 768637 - RNA, 18 nt, Human
aagacagccuucuuccuc

SEQ ID NO: 768638 - RNA, 18 nt, Human
aagacuuggauuuucccu

SEQ ID NO: 768639 - RNA, 21 nt, Human
aagaugcuuuucccuuccaca

SEQ ID NO: 768640 - RNA, 18 nt, Human
aagcuuccgaagcugcuc

SEQ ID NO: 768641 - RNA, 18 nt, Human
aaguaacaaauaaagguc

SEQ ID NO: 768642 - RNA, 21 nt, Human
aaucaggggaagaggcagggc

SEQ ID NO: 768643 - RNA, 20 nt, Human
aaucauuccaaagccaagga

SEQ ID NO: 768644 - RNA, 21 nt, Human
acaaaaaaaaaaaacaaagag

SEQ ID NO: 768645 - RNA, 25 nt, Human
acaaaagacagccuucuuccucaca

SEQ ID NO: 768646 - RNA, 18 nt, Human
acacaguaaaggacaucu

SEQ ID NO: 768647 - RNA, 20 nt, Human
acauuauaacccgagcugcu

SEQ ID NO: 768648 - RNA, 21 nt, Human
accuugaaaaccuuaagaaug

SEQ ID NO: 768649 - RNA, 21 nt, Human
agaugggagugcagguaguuu

SEQ ID NO: 768650 - RNA, 24 nt, Human
agcagcuauccauccccuuucaac

SEQ ID NO: 768651 - RNA, 19 nt, Human
agccgugcaugcccccucu

SEQ ID NO: 768652 - RNA, 18 nt, Human
aggaaggaagacuuggau

SEQ ID NO: 768653 - RNA, 20 nt, Human
aggcaauguccucugauguu

SEQ ID NO: 768654 - RNA, 18 nt, Human
aggcagggcugcagcucu

SEQ ID NO: 768655 - RNA, 21 nt, Human
agggguuuuccuggcaauugc

SEQ ID NO: 768656 - RNA, 23 nt, Human
agggguuuuccuggcaauugcuu

SEQ ID NO: 768657 - RNA, 22 nt, Human
agucugauggaagucccucauu

SEQ ID NO: 768658 - RNA, 19 nt, Human
augcccccucugggaugcc

SEQ ID NO: 768659 - RNA, 20 nt, Human
augcccccucugggaugccc

SEQ ID NO: 768660 - RNA, 20 nt, Human
caaaacagaauuaucugaac

SEQ ID NO: 768661 - RNA, 23 nt, Human
caaaggacacaagcuuccgaagc

SEQ ID NO: 768662 - RNA, 19 nt, Human
caacuuccugaccagugcc

SEQ ID NO: 768663 - RNA, 26 nt, Human
cacagguuguuagagaaagauuuucu

SEQ ID NO: 768664 - RNA, 21 nt, Human
cacccucacggccuauuccaa

SEQ ID NO: 768665 - RNA, 19 nt, Human
cacucugcucugacuucug

SEQ ID NO: 768666 - RNA, 23 nt, Human
cagcuguucuccugugacugaca

SEQ ID NO: 768667 - RNA, 20 nt, Human
caggaagaacaucauugcag

SEQ ID NO: 768668 - RNA, 30 nt, Human
cauacaaagccauuagcaaaaauauguaac

SEQ ID NO: 768669 - RNA, 21 nt, Human
cauccuaaaaggcaagguaac

SEQ ID NO: 768670 - RNA, 22 nt, Human
caucugaaucugagaaaugauu

SEQ ID NO: 768671 - RNA, 23 nt, Human
cauggagacgucugacaaagaaa

SEQ ID NO: 768672 - RNA, 21 nt, Human
caugucaguacuaaaauagag

SEQ ID NO: 768673 - RNA, 19 nt, Human
ccagggucaaaucagggga

SEQ ID NO: 768674 - RNA, 23 nt, Human
ccauuagcaaaaauauguaacaa

SEQ ID NO: 768675 - RNA, 20 nt, Human
cccagcuguucuccugugac

SEQ ID NO: 768676 - RNA, 22 nt, Human
ccccucugggaugccccggccu

SEQ ID NO: 768677 - RNA, 19 nt, Human
ccuauuaccuuccagguuc

SEQ ID NO: 768678 - RNA, 20 nt, Human
ccucugggaugccccggccu

SEQ ID NO: 768679 - RNA, 20 nt, Human
cggccuucaaggccaccccc

SEQ ID NO: 768680 - RNA, 19 nt, Human
cguugcauguuuggugguc

SEQ ID NO: 768681 - RNA, 23 nt, Human
cucacacccucacggccuauucc

SEQ ID NO: 768682 - RNA, 25 nt, Human
cuccugccccauugcugggguuugg

SEQ ID NO: 768683 - RNA, 23 nt, Human
cucuccuauauucacagguuguu

SEQ ID NO: 768684 - RNA, 23 nt, Human
cugcagaauugcaguugaaugua

SEQ ID NO: 768685 - RNA, 24 nt, Human
cugugacugacaugugggcaguag

SEQ ID NO: 768686 - RNA, 23 nt, Human
cuuucccuuuucuucugccaucu

SEQ ID NO: 768687 - RNA, 19 nt, Human
gaagagccgugcaugcccc

SEQ ID NO: 768688 - RNA, 24 nt, Human
gagccgugcaugcccccucuggga

SEQ ID NO: 768689 - RNA, 20 nt, Human
gcaggggugggugcugaggg

SEQ ID NO: 768690 - RNA, 22 nt, Human
gcggagggucucuuuacaguag

SEQ ID NO: 768691 - RNA, 20 nt, Human
gcuaucagcuccggagauga

SEQ ID NO: 768692 - RNA, 19 nt, Human
ggaaauuacacucuccugc

SEQ ID NO: 768693 - RNA, 18 nt, Human
gggagaaagaucauaaua

SEQ ID NO: 768694 - RNA, 19 nt, Human
gggugggauaagaacaucc

SEQ ID NO: 768695 - RNA, 23 nt, Human
guaaaggacaucuuggugaaaca

SEQ ID NO: 768696 - RNA, 18 nt, Human
guaaggaauucaucccuu

SEQ ID NO: 768697 - RNA, 19 nt, Human
guaggacuuuuugguaacc

SEQ ID NO: 768698 - RNA, 23 nt, Human
guccucaggauuacccuuuuccu

SEQ ID NO: 768699 - RNA, 18 nt, Human
gugcaugcccccucuggg

SEQ ID NO: 768700 - RNA, 21 nt, Human
guggagcagagcacuggagga

SEQ ID NO: 768701 - RNA, 20 nt, Human
uaaaaggcaagguaacuauu

SEQ ID NO: 768702 - RNA, 25 nt, Human
uaacuacaggaucgggagccaaaug

SEQ ID NO: 768703 - RNA, 18 nt, Human
uaagaaauacuuugaguu

SEQ ID NO: 768704 - RNA, 22 nt, Human
uaagaacauccuaaaaggcaag

SEQ ID NO: 768705 - RNA, 19 nt, Human
uaagaaccacuccugcccc

SEQ ID NO: 768706 - RNA, 24 nt, Human
uacaguuuacaacaacucaaggga

SEQ ID NO: 768707 - RNA, 18 nt, Human
uaccccuauuaccuucca

SEQ ID NO: 768708 - RNA, 20 nt, Human
uagagaugggagugcaggua

SEQ ID NO: 768709 - RNA, 21 nt, Human
uauuaugagaaaauauucugu

SEQ ID NO: 768710 - RNA, 22 nt, Human
uauuccaaaaagugggaagggc

SEQ ID NO: 768711 - RNA, 24 nt, Human
ucaacucaacaguuagagaguaaa

SEQ ID NO: 768712 - RNA, 26 nt, Human
ucacacccucacggccuauuccaaaa

SEQ ID NO: 768713 - RNA, 22 nt, Human
ucacagucacgcccuucuuguc

SEQ ID NO: 768714 - RNA, 19 nt, Human
ucagaaaauucaaaaguac

SEQ ID NO: 768715 - RNA, 21 nt, Human
uccacaaggcugcucucccca

SEQ ID NO: 768716 - RNA, 23 nt, Human
uccacaguuaggugaucuuucuu

SEQ ID NO: 768717 - RNA, 20 nt, Human
uccaggaagaacaucauugc

SEQ ID NO: 768718 - RNA, 23 nt, Human
uccaggcagguugcuuucuaagg

SEQ ID NO: 768719 - RNA, 19 nt, Human
uccuggcaauugcuugugg

SEQ ID NO: 768720 - RNA, 18 nt, Human
ucguugcauguuuggugg

SEQ ID NO: 768721 - RNA, 23 nt, Human
ucuaaggccgcugucuuggccuu

SEQ ID NO: 768722 - RNA, 19 nt, Human
ucuaauuaucuguucacuu

SEQ ID NO: 768723 - RNA, 23 nt, Human
ucuacagaauaccuugaaaaccu

SEQ ID NO: 768724 - RNA, 20 nt, Human
ucucaucaaacuggccaauc

SEQ ID NO: 768725 - RNA, 19 nt, Human
ucugcuuguuggcuuccug

SEQ ID NO: 768726 - RNA, 20 nt, Human
ucuucaguguuucccagucu

SEQ ID NO: 768727 - RNA, 26 nt, Human
ucuugugugggguuaacuacaggauc

SEQ ID NO: 768728 - RNA, 19 nt, Human
ugaaaaucauuccaaagcc

SEQ ID NO: 768729 - RNA, 21 nt, Human
ugaaaaucauuccaaagccaa

SEQ ID NO: 768730 - RNA, 22 nt, Human
ugaaacacacacacauuauaac

SEQ ID NO: 768731 - RNA, 24 nt, Human
ugaaacacacacacauuauaaccc

SEQ ID NO: 768732 - RNA, 21 nt, Human
ugaaagccguuguucgcaguc

SEQ ID NO: 768733 - RNA, 23 nt, Human
ugaacaaagagggaaacauagga

SEQ ID NO: 768734 - RNA, 20 nt, Human
ugaauucacagugaaaauaa

SEQ ID NO: 768735 - RNA, 21 nt, Human
ugacaaagaaaaggauguugc

SEQ ID NO: 768736 - RNA, 19 nt, Human
ugagaaacaacugugagag

SEQ ID NO: 768737 - RNA, 19 nt, Human
ugcccccucugggaugccc

SEQ ID NO: 768738 - RNA, 20 nt, Human
ugcccccucugggaugcccc

SEQ ID NO: 768739 - RNA, 18 nt, Human
ugcugcuuuggggagaga

SEQ ID NO: 768740 - RNA, 18 nt, Human
ugcuuggcucagucugca

SEQ ID NO: 768741 - RNA, 19 nt, Human
ugcuuggcucagucugcaa

SEQ ID NO: 768742 - RNA, 19 nt, Human
uggagcagagcacuggagg

SEQ ID NO: 768743 - RNA, 18 nt, Human
uggcuuccuguuucuccu

SEQ ID NO: 768744 - RNA, 22 nt, Human
ugggaagggcauggggagcagc

SEQ ID NO: 768745 - RNA, 22 nt, Human
ugggaucagcuauuacauccuc

SEQ ID NO: 768746 - RNA, 18 nt, Human
uggggcacacaggucugg

SEQ ID NO: 768747 - RNA, 23 nt, Human
ugguuugguuuuagagaugggag

SEQ ID NO: 768748 - RNA, 23 nt, Human
uguaacaaaacucuuacuaauac

SEQ ID NO: 768749 - RNA, 22 nt, Human
ugugccaacugcuuggguacag

SEQ ID NO: 768750 - RNA, 22 nt, Human
uguuaaagugacauugucaaua

SEQ ID NO: 768751 - RNA, 24 nt, Human
uuacccuuuuccuugauuuucaca

SEQ ID NO: 768752 - RNA, 22 nt, Human
uuauacuugcuuucccuuuucu

SEQ ID NO: 768753 - RNA, 24 nt, Human
uucacugcaggggugggugcugag

SEQ ID NO: 768754 - RNA, 19 nt, Human
uuccacaaggcugcucucc

SEQ ID NO: 768755 - RNA, 18 nt, Human
uuccuggucaaaggacac

SEQ ID NO: 768756 - RNA, 23 nt, Human
uucuaauuaucuguucacuugga

SEQ ID NO: 768757 - RNA, 23 nt, Human
uucugccaucuuuaucuucugcu

SEQ ID NO: 768758 - RNA, 24 nt, Human
uugaguuuuaaaggagaagcaagu

SEQ ID NO: 768759 - RNA, 20 nt, Human
uugcaguugaauguagguca

SEQ ID NO: 768760 - RNA, 21 nt, Human
uugcaguugaauguaggucaa

SEQ ID NO: 768761 - RNA, 24 nt, Human
uugcaucugaaucugagaaaugau

SEQ ID NO: 768762 - RNA, 26 nt, Human
uuuacaacaacucaagggagaaagau

SEQ ID NO: 768763 - RNA, 21 nt, Human
uuucacaccaugcagaucuug

SEQ ID NO: 768764 - RNA, 21 nt, Human
uuucagggacagaagggcgga

SEQ ID NO: 768765 - RNA, 23 nt, Human
uuucccuuuucuucugccaucuu

SEQ ID NO: 768766 - RNA, 21 nt, Human
uuuccuggcaauugcuugugg

SEQ ID NO: 768767 - RNA, 25 nt, Human
uuucuugucacuguagcucaaaagu

SEQ ID NO: 768768 - RNA, 22 nt, Human
uuuggggaaguuuucaauuugu

SEQ ID NO: 768769 - RNA, 19 nt, Human
agccccggcuggccgcagc

SEQ ID NO: 768770 - RNA, 22 nt, Human
caaaaugucacauaaacagccc

SEQ ID NO: 768771 - RNA, 23 nt, Human
cacauaaacagcccaguaauaaa

SEQ ID NO: 768772 - RNA, 20 nt, Human
ccggagcccaacauaacaag

SEQ ID NO: 768773 - RNA, 18 nt, Human
ccuccggguuaccaagca

SEQ ID NO: 768774 - RNA, 23 nt, Human
cgcgguuuccaaucucucccucc

SEQ ID NO: 768775 - RNA, 25 nt, Human
cuucagagacaccucaugucucucu

SEQ ID NO: 768776 - RNA, 20 nt, Human
aggcgggaagggggcagguc

SEQ ID NO: 768777 - RNA, 24 nt, Human
aggggggaggaugugggggaggcc

SEQ ID NO: 768778 - RNA, 25 nt, Human
aucuccuucggggcucaacugcugg

SEQ ID NO: 768779 - RNA, 22 nt, Human
caaaaauagacucucuuuuuuc

SEQ ID NO: 768780 - RNA, 21 nt, Human
caccccucacacacccaucuc

SEQ ID NO: 768781 - RNA, 21 nt, Human
caccccucucccaucccugcc

SEQ ID NO: 768782 - RNA, 20 nt, Human
caggccugaugcccacuccu

SEQ ID NO: 768783 - RNA, 19 nt, Human
ccccugggcggaggguagg

SEQ ID NO: 768784 - RNA, 20 nt, Human
ccccugggcggaggguaggc

SEQ ID NO: 768785 - RNA, 18 nt, Human
cccggcccuggaagugga

SEQ ID NO: 768786 - RNA, 24 nt, Human
ccugcagguggggcugccugaucu

SEQ ID NO: 768787 - RNA, 23 nt, Human
ccugccgugcuggcaccugcagc

SEQ ID NO: 768788 - RNA, 18 nt, Human
ccugcugggagugucagc

SEQ ID NO: 768789 - RNA, 23 nt, Human
cucaccccucacacacccaucuc

SEQ ID NO: 768790 - RNA, 20 nt, Human
cuccuggguccaggccaggg

SEQ ID NO: 768791 - RNA, 21 nt, Human
cucgcuccccaccccucuccc

SEQ ID NO: 768792 - RNA, 19 nt, Human
cucucccaucccugccgug

SEQ ID NO: 768793 - RNA, 24 nt, Human
cuggcggaggcagccgcuuccccu

SEQ ID NO: 768794 - RNA, 24 nt, Human
gaagggggcaggucgcugcuccag

SEQ ID NO: 768795 - RNA, 21 nt, Human
gacucgcuccccaccccucuc

SEQ ID NO: 768796 - RNA, 19 nt, Human
gacucgcuccccaccccuu

SEQ ID NO: 768797 - RNA, 18 nt, Human
gccugaacaaugcugggg

SEQ ID NO: 768798 - RNA, 19 nt, Human
gccuggcggaggcagccgc

SEQ ID NO: 768799 - RNA, 24 nt, Human
ggcaggggcugauccccuggaggg

SEQ ID NO: 768800 - RNA, 22 nt, Human
ggcaggucgcugcuccaggaag

SEQ ID NO: 768801 - RNA, 23 nt, Human
ggccaggggaugugagggcugug

SEQ ID NO: 768802 - RNA, 18 nt, Human
ggccuggcggaggcagcc

SEQ ID NO: 768803 - RNA, 20 nt, Human
ggcuggcuggggugcuggcc

SEQ ID NO: 768804 - RNA, 22 nt, Human
ggcuggggugcuggccccaggg

SEQ ID NO: 768805 - RNA, 23 nt, Human
ggcuguggggugcugggaggggg

SEQ ID NO: 768806 - RNA, 22 nt, Human
gggaaggagagcagugucccag

SEQ ID NO: 768807 - RNA, 22 nt, Human
gggcggggaaggagagcagugu

SEQ ID NO: 768808 - RNA, 21 nt, Human
ggggcugauccccuggagggc

SEQ ID NO: 768809 - RNA, 22 nt, Human
ggugcugggaggggggcagugu

SEQ ID NO: 768810 - RNA, 20 nt, Human
gugacucgcuccccaccccu

SEQ ID NO: 768811 - RNA, 18 nt, Human
gugcaggcgggaaggggg

SEQ ID NO: 768812 - RNA, 21 nt, Human
guggagggaagugcaggcggg

SEQ ID NO: 768813 - RNA, 18 nt, Human
uaagggagggugcuuucu

SEQ ID NO: 768814 - RNA, 23 nt, Human
uacccugcugggagugucagccu

SEQ ID NO: 768815 - RNA, 22 nt, Human
ucaccccucacacacccaucuc

SEQ ID NO: 768816 - RNA, 22 nt, Human
ucccaggccugaugcccacucc

SEQ ID NO: 768817 - RNA, 21 nt, Human
uccccaccccucucccauccc

SEQ ID NO: 768818 - RNA, 23 nt, Human
uccucaccccucacacacccauc

SEQ ID NO: 768819 - RNA, 18 nt, Human
uccuggaagcggccuggc

SEQ ID NO: 768820 - RNA, 20 nt, Human
ucgcuccccaccccucuccc

SEQ ID NO: 768821 - RNA, 19 nt, Human
ucuccugggucuccugggu

SEQ ID NO: 768822 - RNA, 25 nt, Human
ugacucgcuccccaccccucuccca

SEQ ID NO: 768823 - RNA, 24 nt, Human
ugaugcccacuccucauuccuaag

SEQ ID NO: 768824 - RNA, 20 nt, Human
ugcuuucuccugggucuccu

SEQ ID NO: 768825 - RNA, 22 nt, Human
uggaaguggagggaagugcagg

SEQ ID NO: 768826 - RNA, 24 nt, Human
uggagggaagugcaggcgggaagg

SEQ ID NO: 768827 - RNA, 22 nt, Human
uggcccggggcuuccuggaagc

SEQ ID NO: 768828 - RNA, 19 nt, Human
uggcggaggcagccgcuuc

SEQ ID NO: 768829 - RNA, 20 nt, Human
ugggaggggggcaguguuga

SEQ ID NO: 768830 - RNA, 18 nt, Human
ugucuggcuggugugagg

SEQ ID NO: 768831 - RNA, 20 nt, Human
ugugaggagaagcccggccc

SEQ ID NO: 768832 - RNA, 23 nt, Human
uuccuaagggagggugcuuucuc

SEQ ID NO: 768833 - RNA, 23 nt, Human
aaaaaaacaacaaaaaacacaca

SEQ ID NO: 768834 - RNA, 28 nt, Human
aaaaaacaacaaaaaacacacaacaaaa

SEQ ID NO: 768835 - RNA, 20 nt, Human
aaaaaacacacaacaaaacc

SEQ ID NO: 768836 - RNA, 24 nt, Human
aaaaaacacacaacaaaaccacca

SEQ ID NO: 768837 - RNA, 25 nt, Human
aaaaaacacacaacaaaaccaccaa

SEQ ID NO: 768838 - RNA, 26 nt, Human
aaaaaacacacaacaaaaccaccaac

SEQ ID NO: 768839 - RNA, 23 nt, Human
aaaaacacacaacaaaaccacca

SEQ ID NO: 768840 - RNA, 20 nt, Human
aaaauaaauaugcucuggcc

SEQ ID NO: 768841 - RNA, 20 nt, Human
aaaauagcagaaacccccaa

SEQ ID NO: 768842 - RNA, 20 nt, Human
aaacaacaaaaaacacacaa

SEQ ID NO: 768843 - RNA, 26 nt, Human
aaacaacaaaaaacacacaacaaaac

SEQ ID NO: 768844 - RNA, 23 nt, Human
aaacacacaacaaaaccaccaac

SEQ ID NO: 768845 - RNA, 24 nt, Human
aaacacacaacaaaaccaccaaca

SEQ ID NO: 768846 - RNA, 22 nt, Human
aaacagaaauccugaaaggggc

SEQ ID NO: 768847 - RNA, 21 nt, Human
aaaccaccaacaacaaaaaag

SEQ ID NO: 768848 - RNA, 20 nt, Human
aaagcaaaaaauagcagaaa

SEQ ID NO: 768849 - RNA, 20 nt, Human
aacacacaacaaaaccacca

SEQ ID NO: 768850 - RNA, 22 nt, Human
aaccaccaacaacaaaaaagag

SEQ ID NO: 768851 - RNA, 22 nt, Human
aagaaaaaaaaaagccauggga

SEQ ID NO: 768852 - RNA, 20 nt, Human
aagaggccgagggugauggu

SEQ ID NO: 768853 - RNA, 21 nt, Human
aagaggccgagggugauggug

SEQ ID NO: 768854 - RNA, 24 nt, Human
aagcaaaaaauagcagaagggacc

SEQ ID NO: 768855 - RNA, 18 nt, Human
aaggugaggccaggggga

SEQ ID NO: 768856 - RNA, 20 nt, Human
acaacaaaaaacacacaaca

SEQ ID NO: 768857 - RNA, 22 nt, Human
acaacggaaacacuucucuuca

SEQ ID NO: 768858 - RNA, 19 nt, Human
acacaacaaaaccaccaac

SEQ ID NO: 768859 - RNA, 21 nt, Human
acacaacaaaaccaccaacaa

SEQ ID NO: 768860 - RNA, 27 nt, Human
acacaacaaaaccaccaacaacaaaaa

SEQ ID NO: 768861 - RNA, 20 nt, Human
acacugaggccucugcagac

SEQ ID NO: 768862 - RNA, 19 nt, Human
acagagaagagagagaggg

SEQ ID NO: 768863 - RNA, 19 nt, Human
acagcaccugaaauggggg

SEQ ID NO: 768864 - RNA, 23 nt, Human
acccgccugcccuugggagcccu

SEQ ID NO: 768865 - RNA, 19 nt, Human
agagaagagacagagaaga

SEQ ID NO: 768866 - RNA, 26 nt, Human
agagacagagaagagagagaggggag

SEQ ID NO: 768867 - RNA, 21 nt, Human
agagagggccugggggaaagg

SEQ ID NO: 768868 - RNA, 20 nt, Human
agagaugggaagggggucaa

SEQ ID NO: 768869 - RNA, 23 nt, Human
agaggcuccggccgccugcgucc

SEQ ID NO: 768870 - RNA, 20 nt, Human
aggacagcaccugaaauggg

SEQ ID NO: 768871 - RNA, 20 nt, Human
aggcaagggucccuucccug

SEQ ID NO: 768872 - RNA, 18 nt, Human
aggccgugggggccucca

SEQ ID NO: 768873 - RNA, 21 nt, Human
aggccucuggggaaggaacag

SEQ ID NO: 768874 - RNA, 19 nt, Human
agggaggucuaguccccuu

SEQ ID NO: 768875 - RNA, 18 nt, Human
aggggaggagagacggag

SEQ ID NO: 768876 - RNA, 19 nt, Human
agggggagggagagaaagg

SEQ ID NO: 768877 - RNA, 22 nt, Human
aggggugaggcaagggucccuu

SEQ ID NO: 768878 - RNA, 23 nt, Human
agggucccuucccuggucuucuc

SEQ ID NO: 768879 - RNA, 23 nt, Human
agguggcagggaaagcccagagc

SEQ ID NO: 768880 - RNA, 19 nt, Human
agugaaggccagccgaggu

SEQ ID NO: 768881 - RNA, 21 nt, Human
aucugugucuuguugccacca

SEQ ID NO: 768882 - RNA, 19 nt, Human
aucuuugcagggggaggga

SEQ ID NO: 768883 - RNA, 21 nt, Human
caaaaaacacacaacaaaacc

SEQ ID NO: 768884 - RNA, 21 nt, Human
caaaaaaugccacacgcagac

SEQ ID NO: 768885 - RNA, 18 nt, Human
caaaaccaccaacaacaa

SEQ ID NO: 768886 - RNA, 22 nt, Human
caacaaaaaacacacaacaaaa

SEQ ID NO: 768887 - RNA, 24 nt, Human
caacaaaaaacacacaacaaaacc

SEQ ID NO: 768888 - RNA, 26 nt, Human
caacaaaaaacacacaacaaaaccac

SEQ ID NO: 768889 - RNA, 21 nt, Human
caacaaaaccaccaacaacaa

SEQ ID NO: 768890 - RNA, 23 nt, Human
caacaaaaccaccaacaacaaaa

SEQ ID NO: 768891 - RNA, 24 nt, Human
caacgaggaaaaaaauagagaaga

SEQ ID NO: 768892 - RNA, 20 nt, Human
caagcugagauaccagaggc

SEQ ID NO: 768893 - RNA, 28 nt, Human
cacaacaaaaccaccaacaacaaaaaag

SEQ ID NO: 768894 - RNA, 19 nt, Human
cacaacagucacuuuccag

SEQ ID NO: 768895 - RNA, 18 nt, Human
cacaauuaggcagaaaac

SEQ ID NO: 768896 - RNA, 21 nt, Human
caccgggucaguggugccccg

SEQ ID NO: 768897 - RNA, 21 nt, Human
cacgcacagccacacugaggc

SEQ ID NO: 768898 - RNA, 22 nt, Human
cacgccuccucugcuuucuggg

SEQ ID NO: 768899 - RNA, 20 nt, Human
cagaaacccccaacucuuga

SEQ ID NO: 768900 - RNA, 22 nt, Human
cagacccccgcggggccccucu

SEQ ID NO: 768901 - RNA, 18 nt, Human
cagagcggagaccccugc

SEQ ID NO: 768902 - RNA, 21 nt, Human
cagccgagguuaacacugggc

SEQ ID NO: 768903 - RNA, 23 nt, Human
cagggggaugugggguguggguu

SEQ ID NO: 768904 - RNA, 21 nt, Human
cagguccggguggcuuccagg

SEQ ID NO: 768905 - RNA, 22 nt, Human
ccacccagggcgaaggcaaggg

SEQ ID NO: 768906 - RNA, 19 nt, Human
ccacgcacagccacacuga

SEQ ID NO: 768907 - RNA, 22 nt, Human
ccaggcccugaauggccgcugg

SEQ ID NO: 768908 - RNA, 20 nt, Human
ccagguaccccaucuguguc

SEQ ID NO: 768909 - RNA, 19 nt, Human
ccaugggaauaaauucuga

SEQ ID NO: 768910 - RNA, 23 nt, Human
cccacagcaccuggcccugcguc

SEQ ID NO: 768911 - RNA, 18 nt, Human
ccccggggccaggggcuc

SEQ ID NO: 768912 - RNA, 18 nt, Human
cccgcggggccccucucu

SEQ ID NO: 768913 - RNA, 20 nt, Human
cccucucugauuccaccuuc

SEQ ID NO: 768914 - RNA, 20 nt, Human
ccucauccuccgaggaugag

SEQ ID NO: 768915 - RNA, 22 nt, Human
ccuccuccucuucuuccuccuc

SEQ ID NO: 768916 - RNA, 20 nt, Human
ccuccucuucuuccuccucu

SEQ ID NO: 768917 - RNA, 19 nt, Human
ccuuucccgcggaggggcc

SEQ ID NO: 768918 - RNA, 19 nt, Human
cgcacagccacacugaggc

SEQ ID NO: 768919 - RNA, 22 nt, Human
cggagccaggggcuccaggggg

SEQ ID NO: 768920 - RNA, 20 nt, Human
cgucaaggcuuagauuugug

SEQ ID NO: 768921 - RNA, 19 nt, Human
cuccggccgccugcguccg

SEQ ID NO: 768922 - RNA, 21 nt, Human
cuccgggucacaacagucacu

SEQ ID NO: 768923 - RNA, 22 nt, Human
cuccuccuccucuucuuccucc

SEQ ID NO: 768924 - RNA, 18 nt, Human
cugauuccaccuucacau

SEQ ID NO: 768925 - RNA, 18 nt, Human
cuggggaaggaacaggcu

SEQ ID NO: 768926 - RNA, 23 nt, Human
cuucaaaaaccuuuuuccccuuc

SEQ ID NO: 768927 - RNA, 23 nt, Human
cuucccgcauguuucuacaagaa

SEQ ID NO: 768928 - RNA, 25 nt, Human
cuugaucuugaaaccggcgggcaca

SEQ ID NO: 768929 - RNA, 22 nt, Human
cuuuugucuuuuuuuuccuuuu

SEQ ID NO: 768930 - RNA, 24 nt, Human
gaaaauaaauaugcucuggccuuc

SEQ ID NO: 768931 - RNA, 19 nt, Human
gaacaggcugcagcucggg

SEQ ID NO: 768932 - RNA, 24 nt, Human
gaauaaaaaaaaaacaacaaaaaa

SEQ ID NO: 768933 - RNA, 18 nt, Human
gacagcccuuuggaggcu

SEQ ID NO: 768934 - RNA, 22 nt, Human
gacauccuuugagucuggugcc

SEQ ID NO: 768935 - RNA, 18 nt, Human
gagcccugucccacccag

SEQ ID NO: 768936 - RNA, 20 nt, Human
gaggaaaaaaauagagaaga

SEQ ID NO: 768937 - RNA, 22 nt, Human
gaggacuccgggucacaacagu

SEQ ID NO: 768938 - RNA, 19 nt, Human
gcacaagaaaaaaaaaagc

SEQ ID NO: 768939 - RNA, 21 nt, Human
gcacaagaaaaaaaaaagcca

SEQ ID NO: 768940 - RNA, 24 nt, Human
gcagcucccucauggagcgcgcuc

SEQ ID NO: 768941 - RNA, 22 nt, Human
gccacacgcagacggucugaca

SEQ ID NO: 768942 - RNA, 19 nt, Human
gccagggggaggggugagg

SEQ ID NO: 768943 - RNA, 27 nt, Human
gccagggggaggggugaggcaaggguc

SEQ ID NO: 768944 - RNA, 19 nt, Human
gccggagccaggggcucca

SEQ ID NO: 768945 - RNA, 21 nt, Human
gcggggggccgggccccgggg

SEQ ID NO: 768946 - RNA, 21 nt, Human
ggacacgggccacgcacagcc

SEQ ID NO: 768947 - RNA, 20 nt, Human
ggagagagagaagcugaugc

SEQ ID NO: 768948 - RNA, 21 nt, Human
ggagcaaggugaggccagggg

SEQ ID NO: 768949 - RNA, 19 nt, Human
ggccaggggcuccacgcuc

SEQ ID NO: 768950 - RNA, 21 nt, Human
gggccggagccaggggcucca

SEQ ID NO: 768951 - RNA, 19 nt, Human
gggccuccgagaggcuccc

SEQ ID NO: 768952 - RNA, 20 nt, Human
ggggaggagagacggagagg

SEQ ID NO: 768953 - RNA, 21 nt, Human
ggggaggggugaggcaagggu

SEQ ID NO: 768954 - RNA, 18 nt, Human
ggggcgggcgcggggggc

SEQ ID NO: 768955 - RNA, 21 nt, Human
ggggcuggggcuccuggggag

SEQ ID NO: 768956 - RNA, 23 nt, Human
gggggaugugggguguggguugg

SEQ ID NO: 768957 - RNA, 22 nt, Human
gggucccuucccuggucuucuc

SEQ ID NO: 768958 - RNA, 22 nt, Human
ggugggagcagcucccucaugg

SEQ ID NO: 768959 - RNA, 22 nt, Human
guccagguccggguggcuucca

SEQ ID NO: 768960 - RNA, 19 nt, Human
gugaggcaagggucccuuc

SEQ ID NO: 768961 - RNA, 18 nt, Human
uaacuugaaucagccguc

SEQ ID NO: 768962 - RNA, 23 nt, Human
uacagaauuuacaugauaacaag

SEQ ID NO: 768963 - RNA, 25 nt, Human
uacaucaagacacacaacggaaaca

SEQ ID NO: 768964 - RNA, 24 nt, Human
uagagagggccugggggaaaggaa

SEQ ID NO: 768965 - RNA, 23 nt, Human
uagcagcauucacaggaagaggc

SEQ ID NO: 768966 - RNA, 21 nt, Human
uaggcagaaaaccgcaaacgg

SEQ ID NO: 768967 - RNA, 20 nt, Human
uagggggugcugggguguga

SEQ ID NO: 768968 - RNA, 23 nt, Human
uagguugaggggcugccggcagg

SEQ ID NO: 768969 - RNA, 25 nt, Human
uauacagaaguugguucugaacuuc

SEQ ID NO: 768970 - RNA, 20 nt, Human
uaugaacaaauauuuacauc

SEQ ID NO: 768971 - RNA, 23 nt, Human
uaugaacaaauauuuacaucaag

SEQ ID NO: 768972 - RNA, 23 nt, Human
ucaaaagggaaaaaaaaaccguc

SEQ ID NO: 768973 - RNA, 21 nt, Human
ucaagacacacaacggaaaca

SEQ ID NO: 768974 - RNA, 21 nt, Human
ucaguggugccccaggccucu

SEQ ID NO: 768975 - RNA, 23 nt, Human
uccacgcucgggagucccagggc

SEQ ID NO: 768976 - RNA, 23 nt, Human
ucccagggcuacggcugacaucc

SEQ ID NO: 768977 - RNA, 24 nt, Human
ucccagggcuacggcugacauccu

SEQ ID NO: 768978 - RNA, 21 nt, Human
uccuccgaggaugagggcgag

SEQ ID NO: 768979 - RNA, 18 nt, Human
uccuccucuucuuccucc

SEQ ID NO: 768980 - RNA, 18 nt, Human
uccuugaucuugaaaccu

SEQ ID NO: 768981 - RNA, 19 nt, Human
ucucugauuccaccuucac

SEQ ID NO: 768982 - RNA, 18 nt, Human
ucucugggagaaguaauc

SEQ ID NO: 768983 - RNA, 23 nt, Human
ucugaggucaaggccgugggggc

SEQ ID NO: 768984 - RNA, 21 nt, Human
ucuuccuccucuucccuggcc

SEQ ID NO: 768985 - RNA, 20 nt, Human
ucuuuguacagaauuuacau

SEQ ID NO: 768986 - RNA, 27 nt, Human
ugaaaagcagagauuuguucaaugaaa

SEQ ID NO: 768987 - RNA, 20 nt, Human
ugaaagaaaaaugacucgac

SEQ ID NO: 768988 - RNA, 23 nt, Human
ugaaagaaaaaugacucgacaca

SEQ ID NO: 768989 - RNA, 20 nt, Human
ugagauaccagaggcuccgg

SEQ ID NO: 768990 - RNA, 18 nt, Human
ugaggccagggggagggg

SEQ ID NO: 768991 - RNA, 18 nt, Human
ugagguggcagggaaagc

SEQ ID NO: 768992 - RNA, 24 nt, Human
ugagugggugaagcuuauaagcca

SEQ ID NO: 768993 - RNA, 20 nt, Human
ugaucuugaaaccggcgggc

SEQ ID NO: 768994 - RNA, 19 nt, Human
ugcacuggggccuccgaga

SEQ ID NO: 768995 - RNA, 22 nt, Human
ugcacuggggccuccgagaggc

SEQ ID NO: 768996 - RNA, 23 nt, Human
ugccaccaauuuccuugaucuug

SEQ ID NO: 768997 - RNA, 18 nt, Human
ugcuggggugugaggugg

SEQ ID NO: 768998 - RNA, 24 nt, Human
ugggagcagcucccucauggagcg

SEQ ID NO: 768999 - RNA, 25 nt, Human
ugggagcccugucccacccagggcg

SEQ ID NO: 769000 - RNA, 19 nt, Human
uggggaaaggugugggguc

SEQ ID NO: 769001 - RNA, 23 nt, Human
ugggggcgggcgcggggggccgg

SEQ ID NO: 769002 - RNA, 22 nt, Human
uggggucuccucacugugccca

SEQ ID NO: 769003 - RNA, 18 nt, Human
ugggguguggguuggggg

SEQ ID NO: 769004 - RNA, 22 nt, Human
uggguagaggacagcaccugaa

SEQ ID NO: 769005 - RNA, 18 nt, Human
uggguugggggugagugg

SEQ ID NO: 769006 - RNA, 24 nt, Human
uguggggucuccucacugugccca

SEQ ID NO: 769007 - RNA, 23 nt, Human
uucacaggaagaggccgagggug

SEQ ID NO: 769008 - RNA, 22 nt, Human
uuccagaaauuauuuacacgcc

SEQ ID NO: 769009 - RNA, 19 nt, Human
uucccuggccacuaccucc

SEQ ID NO: 769010 - RNA, 24 nt, Human
uucccuggucuucucgaacacccc

SEQ ID NO: 769011 - RNA, 20 nt, Human
uugaacccaagguuuagggg

SEQ ID NO: 769012 - RNA, 24 nt, Human
uugaucuugaaaccggcgggcaca

SEQ ID NO: 769013 - RNA, 26 nt, Human
uuuacacgccuccucugcuuucuggg

SEQ ID NO: 769014 - RNA, 22 nt, Human
uuugcuuuauaaaaguuacuau

SEQ ID NO: 769015 - RNA, 22 nt, Human
uuuuuuggaaguacaaagaaau

SEQ ID NO: 769016 - RNA, 23 nt, Human
aaaaaaucaaaaccaagccaacc

SEQ ID NO: 769017 - RNA, 25 nt, Human
aaaaaaucaaaaccaagccaaccca

SEQ ID NO: 769018 - RNA, 28 nt, Human
aaaacaaacaaacaagcaaaaaaucaaa

SEQ ID NO: 769019 - RNA, 20 nt, Human
aaaaucaaaaccaagccaac

SEQ ID NO: 769020 - RNA, 25 nt, Human
aaacaaacaaacaagcaaaaaauca

SEQ ID NO: 769021 - RNA, 25 nt, Human
aaacaagcaaaaaaucaaaaccaag

SEQ ID NO: 769022 - RNA, 19 nt, Human
aaacaauaugugauccaua

SEQ ID NO: 769023 - RNA, 26 nt, Human
aaacuagucauauuuuaucaacauuu

SEQ ID NO: 769024 - RNA, 23 nt, Human
aaagugcaaaaucaucuaacuga

SEQ ID NO: 769025 - RNA, 22 nt, Human
aaaucuucucuagagaaaaagc

SEQ ID NO: 769026 - RNA, 19 nt, Human
aacccaaauauccccagcc

SEQ ID NO: 769027 - RNA, 20 nt, Human
aagaguuuaccauaaacacu

SEQ ID NO: 769028 - RNA, 20 nt, Human
aagauuuucugcaauuauuc

SEQ ID NO: 769029 - RNA, 20 nt, Human
aagcaaaaaaucaaaaccaa

SEQ ID NO: 769030 - RNA, 21 nt, Human
aagcaaaaaaucaaaaccaag

SEQ ID NO: 769031 - RNA, 24 nt, Human
aagcacuugaauuaucuaaaaaua

SEQ ID NO: 769032 - RNA, 21 nt, Human
aagccaacccaaauaucccca

SEQ ID NO: 769033 - RNA, 24 nt, Human
acaaaacaaacaaacaagcaaaaa

SEQ ID NO: 769034 - RNA, 20 nt, Human
acaaugacagccaacaguga

SEQ ID NO: 769035 - RNA, 23 nt, Human
acccaggguagcuuggaauguug

SEQ ID NO: 769036 - RNA, 20 nt, Human
acuuugagcaguuugagucu

SEQ ID NO: 769037 - RNA, 24 nt, Human
agacugauaagccuguaaaaauaa

SEQ ID NO: 769038 - RNA, 20 nt, Human
agaugaugguggguggccgu

SEQ ID NO: 769039 - RNA, 23 nt, Human
agccuggggcugggcccgagcuc

SEQ ID NO: 769040 - RNA, 28 nt, Human
aggaggcagaggagcagagauaaggugg

SEQ ID NO: 769041 - RNA, 23 nt, Human
agggaggaggcagaggagcagag

SEQ ID NO: 769042 - RNA, 25 nt, Human
agguacccaggguagcuuggaaugu

SEQ ID NO: 769043 - RNA, 19 nt, Human
agucaugccaagaaaacca

SEQ ID NO: 769044 - RNA, 22 nt, Human
auccucgcugcccucgcuccug

SEQ ID NO: 769045 - RNA, 18 nt, Human
caaaagccgccuucaaaa

SEQ ID NO: 769046 - RNA, 18 nt, Human
caacagugagacugauaa

SEQ ID NO: 769047 - RNA, 23 nt, Human
caagaaaaccaaaaaagaugaaa

SEQ ID NO: 769048 - RNA, 23 nt, Human
cacaaugacagccaacagugaga

SEQ ID NO: 769049 - RNA, 21 nt, Human
cacagcgugcucagcagagac

SEQ ID NO: 769050 - RNA, 21 nt, Human
cacuagcuucuacugcacaaa

SEQ ID NO: 769051 - RNA, 21 nt, Human
cacuguguagcuccucuaggc

SEQ ID NO: 769052 - RNA, 24 nt, Human
cagaauuguucuauaaaaguauca

SEQ ID NO: 769053 - RNA, 21 nt, Human
cagcacaaaagccgccuucaa

SEQ ID NO: 769054 - RNA, 21 nt, Human
cagcgggacuuccuuccuccu

SEQ ID NO: 769055 - RNA, 25 nt, Human
caucccaccgaugauacacacauca

SEQ ID NO: 769056 - RNA, 20 nt, Human
caucuaacugaaaaugacgg

SEQ ID NO: 769057 - RNA, 22 nt, Human
caugccaagaaaaccaaaaaag

SEQ ID NO: 769058 - RNA, 20 nt, Human
cauucuagccaucuugauug

SEQ ID NO: 769059 - RNA, 23 nt, Human
ccaacccaaauauccccagccuu

SEQ ID NO: 769060 - RNA, 18 nt, Human
cccaaccuuaugccuugg

SEQ ID NO: 769061 - RNA, 28 nt, Human
cccgacaccggccccaagauucauuagc

SEQ ID NO: 769062 - RNA, 20 nt, Human
ccggcagccgggaaggccug

SEQ ID NO: 769063 - RNA, 18 nt, Human
ccucugauccucgcugcc

SEQ ID NO: 769064 - RNA, 18 nt, Human
ccugcgaaugggcugcag

SEQ ID NO: 769065 - RNA, 22 nt, Human
cgccggcagccgggaaggccug

SEQ ID NO: 769066 - RNA, 21 nt, Human
cgccugggguuuccuaguugc

SEQ ID NO: 769067 - RNA, 26 nt, Human
cggccccaagauucauuagcgacggg

SEQ ID NO: 769068 - RNA, 25 nt, Human
cuccgaggagcgccggcagccggga

SEQ ID NO: 769069 - RNA, 21 nt, Human
cugccuugaagaaccugcaug

SEQ ID NO: 769070 - RNA, 21 nt, Human
gaacagggaggaggcagagga

SEQ ID NO: 769071 - RNA, 20 nt, Human
gagacaaccaagaacccguc

SEQ ID NO: 769072 - RNA, 23 nt, Human
gaggcagaggagcagagauaagg

SEQ ID NO: 769073 - RNA, 24 nt, Human
gaguaugcuuccuaauaacuugaa

SEQ ID NO: 769074 - RNA, 21 nt, Human
gccucugcgccugggguuucc

SEQ ID NO: 769075 - RNA, 21 nt, Human
ggaaggccuggccucugaucc

SEQ ID NO: 769076 - RNA, 25 nt, Human
gggaacagggaggaggcagaggagc

SEQ ID NO: 769077 - RNA, 18 nt, Human
ggggcugggcccgagcuc

SEQ ID NO: 769078 - RNA, 19 nt, Human
guaaaacacaugcaacauu

SEQ ID NO: 769079 - RNA, 19 nt, Human
guggcagcgggacuuccuu

SEQ ID NO: 769080 - RNA, 22 nt, Human
gugugcacaccgcuugcucaca

SEQ ID NO: 769081 - RNA, 23 nt, Human
uaaaaaacagaguaugcuuccua

SEQ ID NO: 769082 - RNA, 21 nt, Human
uaaaaaccuaauacacaacaa

SEQ ID NO: 769083 - RNA, 21 nt, Human
uaaaacacaugcaacauuuuc

SEQ ID NO: 769084 - RNA, 25 nt, Human
uaaaguuaccaaaaagauucagcua

SEQ ID NO: 769085 - RNA, 20 nt, Human
uaagaagaaaaccucucuua

SEQ ID NO: 769086 - RNA, 18 nt, Human
uaagcaaaaacacaucau

SEQ ID NO: 769087 - RNA, 22 nt, Human
uacaaaacaaacaaacaagcaa

SEQ ID NO: 769088 - RNA, 24 nt, Human
uacaaaacaaacaaacaagcaaaa

SEQ ID NO: 769089 - RNA, 22 nt, Human
uaccaaaaagauucagcuauaa

SEQ ID NO: 769090 - RNA, 21 nt, Human
uagacuuuccugaagccagaa

SEQ ID NO: 769091 - RNA, 20 nt, Human
uagauguuuucauucacacu

SEQ ID NO: 769092 - RNA, 19 nt, Human
uagccaucuugauuggaua

SEQ ID NO: 769093 - RNA, 23 nt, Human
uagccaucuugauuggauaacau

SEQ ID NO: 769094 - RNA, 19 nt, Human
uagccaugccuuucugcua

SEQ ID NO: 769095 - RNA, 19 nt, Human
uauaaaaguaucauggaau

SEQ ID NO: 769096 - RNA, 25 nt, Human
uauguuuguucugucaucccaccga

SEQ ID NO: 769097 - RNA, 24 nt, Human
uauuuucaccaccaacauuauuag

SEQ ID NO: 769098 - RNA, 22 nt, Human
ucaaaaccaagccaacccaaau

SEQ ID NO: 769099 - RNA, 22 nt, Human
ucaaaaucuucucuagagaaaa

SEQ ID NO: 769100 - RNA, 26 nt, Human
ucaaucucuauucucagagguauuca

SEQ ID NO: 769101 - RNA, 18 nt, Human
ucagaacaucugcagaua

SEQ ID NO: 769102 - RNA, 20 nt, Human
ucagcagagacaaccaagaa

SEQ ID NO: 769103 - RNA, 18 nt, Human
uccuuuccaggaccacca

SEQ ID NO: 769104 - RNA, 21 nt, Human
ucgcuccuggccucugcgccu

SEQ ID NO: 769105 - RNA, 23 nt, Human
ucuaaucagaggagagugaagag

SEQ ID NO: 769106 - RNA, 23 nt, Human
ucuagcucugucaugccaucgcc

SEQ ID NO: 769107 - RNA, 22 nt, Human
ucucaaagugcaaaaucaucua

SEQ ID NO: 769108 - RNA, 18 nt, Human
ucuccgucuccugauuuc

SEQ ID NO: 769109 - RNA, 20 nt, Human
ucuccgugugcacaccgcuu

SEQ ID NO: 769110 - RNA, 18 nt, Human
ucucuagagaaaaagcuc

SEQ ID NO: 769111 - RNA, 22 nt, Human
ucuuaggguaagcaaaaacaca

SEQ ID NO: 769112 - RNA, 23 nt, Human
ucuuuagaucuuuuucuccuguu

SEQ ID NO: 769113 - RNA, 18 nt, Human
ucuuuuauugagaaguuc

SEQ ID NO: 769114 - RNA, 22 nt, Human
ugaaggucuuacaaauaaucau

SEQ ID NO: 769115 - RNA, 22 nt, Human
ugacacagcgugcucagcagag

SEQ ID NO: 769116 - RNA, 23 nt, Human
ugaugaacgcuuugaggcuaggc

SEQ ID NO: 769117 - RNA, 24 nt, Human
ugaugguggguggccgucagcaca

SEQ ID NO: 769118 - RNA, 21 nt, Human
ugauuaacuucuggaaugucg

SEQ ID NO: 769119 - RNA, 23 nt, Human
ugcaaauacucuaucuaaauccu

SEQ ID NO: 769120 - RNA, 19 nt, Human
ugcacaaagguacccaggg

SEQ ID NO: 769121 - RNA, 20 nt, Human
ugccuugggucuucaucuga

SEQ ID NO: 769122 - RNA, 24 nt, Human
ugcugugacuucuccuuuucguga

SEQ ID NO: 769123 - RNA, 23 nt, Human
uggccucugauccucgcugcccu

SEQ ID NO: 769124 - RNA, 25 nt, Human
ugguuaaaaaugaaucaaaacuuca

SEQ ID NO: 769125 - RNA, 23 nt, Human
ugugcacaccgcuugcucacaug

SEQ ID NO: 769126 - RNA, 23 nt, Human
uguguagcuccucuaggccuugc

SEQ ID NO: 769127 - RNA, 23 nt, Human
uguucagaauucaaaugauuaac

SEQ ID NO: 769128 - RNA, 18 nt, Human
uuaccaggggugucaagu

SEQ ID NO: 769129 - RNA, 21 nt, Human
uuaccaggggugucaaguuuu

SEQ ID NO: 769130 - RNA, 22 nt, Human
uuaucuaaaaauaagaagaaaa

SEQ ID NO: 769131 - RNA, 24 nt, Human
uucaugaucauaaauauguuuguu

SEQ ID NO: 769132 - RNA, 18 nt, Human
uuccagugguuaaaaaug

SEQ ID NO: 769133 - RNA, 24 nt, Human
uucgguguucugcgguggccaugg

SEQ ID NO: 769134 - RNA, 18 nt, Human
uugaagaaccugcauguc

SEQ ID NO: 769135 - RNA, 19 nt, Human
uuggucgguucaaaugcag

SEQ ID NO: 769136 - RNA, 20 nt, Human
uuuauuuucaccaccaacau

SEQ ID NO: 769137 - RNA, 22 nt, Human
aaaaaacaaaaaaccuguaagc

SEQ ID NO: 769138 - RNA, 21 nt, Human
aaaaaaccuguaagcaaugcu

SEQ ID NO: 769139 - RNA, 22 nt, Human
aaaaggauuaaaaugaagaaaa

SEQ ID NO: 769140 - RNA, 25 nt, Human
aaacagccaaauaaaacuguaacag

SEQ ID NO: 769141 - RNA, 20 nt, Human
aaacaguagaucacaaauag

SEQ ID NO: 769142 - RNA, 25 nt, Human
aaacuaguuuuaaucuaaacgugua

SEQ ID NO: 769143 - RNA, 24 nt, Human
aaagaaauauauccauauuccuuc

SEQ ID NO: 769144 - RNA, 22 nt, Human
aaagagauagaaagccuuuuuu

SEQ ID NO: 769145 - RNA, 24 nt, Human
aaagcugcaccauaauaaaaaaau

SEQ ID NO: 769146 - RNA, 23 nt, Human
aaauauaagaguuacauauccug

SEQ ID NO: 769147 - RNA, 22 nt, Human
aagcaggugaaccugauaacac

SEQ ID NO: 769148 - RNA, 22 nt, Human
aaucauucaagucuuuuccuga

SEQ ID NO: 769149 - RNA, 24 nt, Human
acaggcugcacugguaaccacgac

SEQ ID NO: 769150 - RNA, 18 nt, Human
acuaacccucugguauac

SEQ ID NO: 769151 - RNA, 23 nt, Human
acugaugccuaaaggccuuauaa

SEQ ID NO: 769152 - RNA, 18 nt, Human
agagaaauguauauauuu

SEQ ID NO: 769153 - RNA, 22 nt, Human
agagaauguuaauacuugagug

SEQ ID NO: 769154 - RNA, 21 nt, Human
agaguuacauauccuggucuc

SEQ ID NO: 769155 - RNA, 21 nt, Human
augacaacagagcuuaauguc

SEQ ID NO: 769156 - RNA, 23 nt, Human
auuaaaaaaaagcugcaccauaa

SEQ ID NO: 769157 - RNA, 24 nt, Human
caaauauacauaaauauaagaaca

SEQ ID NO: 769158 - RNA, 18 nt, Human
caagaacuaaaucuuucc

SEQ ID NO: 769159 - RNA, 23 nt, Human
caagaacuaaaucuuuccaaagc

SEQ ID NO: 769160 - RNA, 22 nt, Human
cacaacacugaaauauaacagg

SEQ ID NO: 769161 - RNA, 22 nt, Human
cacauaauuuguaaucuuaacc

SEQ ID NO: 769162 - RNA, 22 nt, Human
cacaugaaauaaaauacaaagg

SEQ ID NO: 769163 - RNA, 21 nt, Human
cacuccaaaauacugugguuu

SEQ ID NO: 769164 - RNA, 29 nt, Human
cagcaacuucucauaacauauucuugguu

SEQ ID NO: 769165 - RNA, 22 nt, Human
caggcugcacugguaaccacga

SEQ ID NO: 769166 - RNA, 25 nt, Human
cagguaagcacaccauacacuguac

SEQ ID NO: 769167 - RNA, 22 nt, Human
caguauuuuacagcacagcauc

SEQ ID NO: 769168 - RNA, 18 nt, Human
caucucauuccuauucuu

SEQ ID NO: 769169 - RNA, 19 nt, Human
caucucauuccuauucuuu

SEQ ID NO: 769170 - RNA, 22 nt, Human
caugaaagaaaacaaacuacgc

SEQ ID NO: 769171 - RNA, 20 nt, Human
caugugguuuaaagcgaacc

SEQ ID NO: 769172 - RNA, 18 nt, Human
ccaaagcugugucaaaua

SEQ ID NO: 769173 - RNA, 26 nt, Human
ccaacuaacccucugguauacacugu

SEQ ID NO: 769174 - RNA, 20 nt, Human
ccuguaagcaaugcucuaga

SEQ ID NO: 769175 - RNA, 20 nt, Human
cggaaaaaccaagaacuaaa

SEQ ID NO: 769176 - RNA, 18 nt, Human
cuacacauguaucuugca

SEQ ID NO: 769177 - RNA, 25 nt, Human
cuagcagcucuuuacaacaccuccu

SEQ ID NO: 769178 - RNA, 22 nt, Human
cucuuacaugcaaacaguagau

SEQ ID NO: 769179 - RNA, 19 nt, Human
cuuugaugagggaaauuua

SEQ ID NO: 769180 - RNA, 22 nt, Human
gaaaauguugauaacccagaug

SEQ ID NO: 769181 - RNA, 20 nt, Human
gaauaaacccccaggagaga

SEQ ID NO: 769182 - RNA, 20 nt, Human
gauugcuuugaugagggaaa

SEQ ID NO: 769183 - RNA, 21 nt, Human
gcacagcaucuuaaaaaacaa

SEQ ID NO: 769184 - RNA, 21 nt, Human
gcaucuuaaaaaacaaaaaac

SEQ ID NO: 769185 - RNA, 18 nt, Human
gcucuuuacaacaccucc

SEQ ID NO: 769186 - RNA, 21 nt, Human
ggacacacacaaauuuaagaa

SEQ ID NO: 769187 - RNA, 21 nt, Human
ggccuuauaauaauagaaaag

SEQ ID NO: 769188 - RNA, 19 nt, Human
guaaaaugugcaauucccc

SEQ ID NO: 769189 - RNA, 23 nt, Human
guauacacuguuaaagaacaaag

SEQ ID NO: 769190 - RNA, 20 nt, Human
uaaaaaaaagcaacaaauaa

SEQ ID NO: 769191 - RNA, 25 nt, Human
uaaaaaacaaaaaaccuguaagcaa

SEQ ID NO: 769192 - RNA, 21 nt, Human
uaaaacacauaauuuguaauc

SEQ ID NO: 769193 - RNA, 21 nt, Human
uaaagacuucuugagaacuug

SEQ ID NO: 769194 - RNA, 25 nt, Human
uacaaaacggaaaaaccaagaacua

SEQ ID NO: 769195 - RNA, 23 nt, Human
uagcaaaccaucugaagacaaga

SEQ ID NO: 769196 - RNA, 19 nt, Human
uagcagaauuugacaggcu

SEQ ID NO: 769197 - RNA, 21 nt, Human
uaucucuacuucccaugaaag

SEQ ID NO: 769198 - RNA, 20 nt, Human
uaugacaguauuuuacagca

SEQ ID NO: 769199 - RNA, 22 nt, Human
uaugauacaauacugucuuccc

SEQ ID NO: 769200 - RNA, 26 nt, Human
uauguuauauacacaauauguauaca

SEQ ID NO: 769201 - RNA, 22 nt, Human
uccauugucuugcauccaauuu

SEQ ID NO: 769202 - RNA, 20 nt, Human
ucuagaguggacagguaagc

SEQ ID NO: 769203 - RNA, 20 nt, Human
ucuuuacaacaccuccucuu

SEQ ID NO: 769204 - RNA, 18 nt, Human
ugaaagaaaacaaacuac

SEQ ID NO: 769205 - RNA, 21 nt, Human
ugaaagaaaacaaacuacgca

SEQ ID NO: 769206 - RNA, 20 nt, Human
ugaaauaaaauacaaaggua

SEQ ID NO: 769207 - RNA, 19 nt, Human
ugaaaugaacaaauuuagu

SEQ ID NO: 769208 - RNA, 23 nt, Human
ugaaaugaacaaauuuaguaacg

SEQ ID NO: 769209 - RNA, 19 nt, Human
ugaagaaaaacccaauaua

SEQ ID NO: 769210 - RNA, 21 nt, Human
ugagugaauaauaaauagagu

SEQ ID NO: 769211 - RNA, 23 nt, Human
ugcaaauuuaccaugaauguucu

SEQ ID NO: 769212 - RNA, 18 nt, Human
ugccaacuuauaaaguga

SEQ ID NO: 769213 - RNA, 23 nt, Human
ugguuuacauuccaguuguucau

SEQ ID NO: 769214 - RNA, 26 nt, Human
uguuauauacacaauauguauacacu

SEQ ID NO: 769215 - RNA, 20 nt, Human
uuaaaaaaaagcugcaccau

SEQ ID NO: 769216 - RNA, 23 nt, Human
uuaaacagccaaauaaaacuguc

SEQ ID NO: 769217 - RNA, 22 nt, Human
uucaggaagucuuacaucuuca

SEQ ID NO: 769218 - RNA, 19 nt, Human
uuggcaauuagaaagauuu

SEQ ID NO: 769219 - RNA, 19 nt, Human
uuuccccaacuaacccucu

SEQ ID NO: 769220 - RNA, 21 nt, Human
uuuugcaaaugcuguaacacc

SEQ ID NO: 769221 - RNA, 19 nt, Human
aacaccauccuucccgccc

SEQ ID NO: 769222 - RNA, 21 nt, Human
aacaccauccuucccgcccgc

SEQ ID NO: 769223 - RNA, 20 nt, Human
accucuggauucuuccuccc

SEQ ID NO: 769224 - RNA, 22 nt, Human
agaaacaccauccuucccgccc

SEQ ID NO: 769225 - RNA, 18 nt, Human
auccugccucccuccgcu

SEQ ID NO: 769226 - RNA, 22 nt, Human
caacgccagcagcccugcggag

SEQ ID NO: 769227 - RNA, 21 nt, Human
caccugggcucccgagggccc

SEQ ID NO: 769228 - RNA, 18 nt, Human
cagcuaagagccgucucc

SEQ ID NO: 769229 - RNA, 21 nt, Human
cagcuaagagccgucucccuc

SEQ ID NO: 769230 - RNA, 21 nt, Human
caggggagcagccucggaccc

SEQ ID NO: 769231 - RNA, 20 nt, Human
cagucgauccugccucccuc

SEQ ID NO: 769232 - RNA, 21 nt, Human
cccacggcgcggcuccggggc

SEQ ID NO: 769233 - RNA, 22 nt, Human
cccugcucgauguccgagucgg

SEQ ID NO: 769234 - RNA, 25 nt, Human
ccgcccgccugcgccgccgccgccg

SEQ ID NO: 769235 - RNA, 23 nt, Human
ccgccugcgccgccgccgccgcc

SEQ ID NO: 769236 - RNA, 18 nt, Human
ccgcgccgguugcucccg

SEQ ID NO: 769237 - RNA, 23 nt, Human
ccucccaaucucaugucagcaaa

SEQ ID NO: 769238 - RNA, 24 nt, Human
ccuccgcugccucaguggcacccg

SEQ ID NO: 769239 - RNA, 19 nt, Human
cgcccgucagucgauccug

SEQ ID NO: 769240 - RNA, 20 nt, Human
cgccgccgccgccucucaac

SEQ ID NO: 769241 - RNA, 20 nt, Human
cgccgccgccucucaacagc

SEQ ID NO: 769242 - RNA, 21 nt, Human
cgccggcuccuggacacggcc

SEQ ID NO: 769243 - RNA, 18 nt, Human
cgcugcucgggcugaggg

SEQ ID NO: 769244 - RNA, 20 nt, Human
cggccgcgggugcacggggc

SEQ ID NO: 769245 - RNA, 19 nt, Human
cggcucccgguccgcaccu

SEQ ID NO: 769246 - RNA, 19 nt, Human
cggcuccuggacacggccu

SEQ ID NO: 769247 - RNA, 23 nt, Human
cgguccggcucccgguccgcacc

SEQ ID NO: 769248 - RNA, 23 nt, Human
cucccgagcacacguugcuucug

SEQ ID NO: 769249 - RNA, 23 nt, Human
cucccgguccgcaccugccgcuc

SEQ ID NO: 769250 - RNA, 21 nt, Human
cuccgcugccucaguggcacc

SEQ ID NO: 769251 - RNA, 18 nt, Human
gauccugccucccuccgc

SEQ ID NO: 769252 - RNA, 20 nt, Human
gcagcccugcggagcggcgg

SEQ ID NO: 769253 - RNA, 19 nt, Human
gccuugaacgcagcuaaga

SEQ ID NO: 769254 - RNA, 19 nt, Human
ggagcagccucggacccga

SEQ ID NO: 769255 - RNA, 20 nt, Human
ucgauccugccucccuccgc

SEQ ID NO: 769256 - RNA, 21 nt, Human
ucgcccacggcgcggcuccgg

SEQ ID NO: 769257 - RNA, 19 nt, Human
ucgcugcucgggcugaggg

SEQ ID NO: 769258 - RNA, 19 nt, Human
ugagggacgccggcuccug

SEQ ID NO: 769259 - RNA, 21 nt, Human
ugccaaaccucgguccggcuc

SEQ ID NO: 769260 - RNA, 23 nt, Human
ugccucaguggcacccgcgccgg

SEQ ID NO: 769261 - RNA, 24 nt, Human
ugcucgggcugagggcgcaggggc

SEQ ID NO: 769262 - RNA, 21 nt, Human
uggauucuuccucccaaucuc

SEQ ID NO: 769263 - RNA, 22 nt, Human
uggcgaguggaugucgcugcuc

SEQ ID NO: 769264 - RNA, 20 nt, Human
ugucgcugcucgggcugagg

SEQ ID NO: 769265 - RNA, 23 nt, Human
uucuccgucuucgcugcuuccgc

SEQ ID NO: 769266 - RNA, 19 nt, Human
uuggcagccaccuaguccu

SEQ ID NO: 769267 - RNA, 23 nt, Human
uuggcagccaccuaguccuuuuc

SEQ ID NO: 769268 - RNA, 24 nt, Human
uuggcagccaccuaguccuuuucu

SEQ ID NO: 769269 - RNA, 23 nt, Human
aaaaaaaaagcaugagccacaaa

SEQ ID NO: 769270 - RNA, 24 nt, Human
aaaaaagacaucuuccaacacuga

SEQ ID NO: 769271 - RNA, 21 nt, Human
aaaaagacaucuuccaacacu

SEQ ID NO: 769272 - RNA, 22 nt, Human
aaaagaugcugcaacauaaaau

SEQ ID NO: 769273 - RNA, 21 nt, Human
aaaagcaugagccacaaagaa

SEQ ID NO: 769274 - RNA, 20 nt, Human
aaaaggaaacaaaacuguuu

SEQ ID NO: 769275 - RNA, 22 nt, Human
aaaaggaaacaaaacuguuuua

SEQ ID NO: 769276 - RNA, 22 nt, Human
aaaaguagccauguuacuaaac

SEQ ID NO: 769277 - RNA, 21 nt, Human
aaagcaugaauuauuauuacc

SEQ ID NO: 769278 - RNA, 20 nt, Human
aacucacucugcaacaacag

SEQ ID NO: 769279 - RNA, 20 nt, Human
aacuccuuuuguuucagaga

SEQ ID NO: 769280 - RNA, 18 nt, Human
aagcaaauguuaagcuga

SEQ ID NO: 769281 - RNA, 21 nt, Human
aagcaaauguuaagcugaaac

SEQ ID NO: 769282 - RNA, 26 nt, Human
acaaagaaaagaugcugcaacauaaa

SEQ ID NO: 769283 - RNA, 19 nt, Human
acaaagcaagcauggaagc

SEQ ID NO: 769284 - RNA, 20 nt, Human
acaguaucuagcucaagaca

SEQ ID NO: 769285 - RNA, 25 nt, Human
agagacugaggaucacagaggcaca

SEQ ID NO: 769286 - RNA, 22 nt, Human
aggcaggccaugccuuuuggcc

SEQ ID NO: 769287 - RNA, 20 nt, Human
agguggaggaaaagaggcau

SEQ ID NO: 769288 - RNA, 21 nt, Human
agugucuuucaaaucaauucc

SEQ ID NO: 769289 - RNA, 24 nt, Human
auaaaguacccauccagguauaag

SEQ ID NO: 769290 - RNA, 21 nt, Human
caaaagcucuguucucaguag

SEQ ID NO: 769291 - RNA, 20 nt, Human
caaagcaagcauggaagcuc

SEQ ID NO: 769292 - RNA, 21 nt, Human
caaccaugacaacuaagggca

SEQ ID NO: 769293 - RNA, 22 nt, Human
caacuguuuccaauggaaagaa

SEQ ID NO: 769294 - RNA, 20 nt, Human
cacaaagaaaagaugcugca

SEQ ID NO: 769295 - RNA, 22 nt, Human
cacaaagaaaagaugcugcaac

SEQ ID NO: 769296 - RNA, 23 nt, Human
cacaaagaaaagaugcugcaaca

SEQ ID NO: 769297 - RNA, 23 nt, Human
cacaguaucuagcucaagacagg

SEQ ID NO: 769298 - RNA, 24 nt, Human
caccuguauacaccgcauaaaagu

SEQ ID NO: 769299 - RNA, 19 nt, Human
cacuaagcugucuauuccc

SEQ ID NO: 769300 - RNA, 19 nt, Human
cacucugcaacaacagggc

SEQ ID NO: 769301 - RNA, 19 nt, Human
cagagcaggaagaacugug

SEQ ID NO: 769302 - RNA, 19 nt, Human
cagcaccuaacacaguauc

SEQ ID NO: 769303 - RNA, 19 nt, Human
cagguuacagggacaaagg

SEQ ID NO: 769304 - RNA, 22 nt, Human
cauccagguauaaguaugcagc

SEQ ID NO: 769305 - RNA, 19 nt, Human
cauggaagcucaugaaaaa

SEQ ID NO: 769306 - RNA, 22 nt, Human
ccaagcaaauguuaagcugaaa

SEQ ID NO: 769307 - RNA, 20 nt, Human
ccacaaagaaaagaugcugc

SEQ ID NO: 769308 - RNA, 21 nt, Human
ccacaaagaaaagaugcugca

SEQ ID NO: 769309 - RNA, 23 nt, Human
ccagcaccuaacacaguaucuag

SEQ ID NO: 769310 - RNA, 18 nt, Human
cccugaaaauaaccaacc

SEQ ID NO: 769311 - RNA, 25 nt, Human
ccgaaacgcaggagacauggaucca

SEQ ID NO: 769312 - RNA, 19 nt, Human
ccugaagggcagugaugcc

SEQ ID NO: 769313 - RNA, 19 nt, Human
cggucaggcggcggcugcu

SEQ ID NO: 769314 - RNA, 24 nt, Human
cuacaguggugucaaaaucaguuc

SEQ ID NO: 769315 - RNA, 24 nt, Human
cucccggcucuuuucccucuuuuc

SEQ ID NO: 769316 - RNA, 19 nt, Human
cucuuuucccucuuuuccc

SEQ ID NO: 769317 - RNA, 19 nt, Human
cugaaaauaaccaaccaug

SEQ ID NO: 769318 - RNA, 23 nt, Human
cugacaaccagauuucaaaauau

SEQ ID NO: 769319 - RNA, 21 nt, Human
cuugcccaccucucucccggc

SEQ ID NO: 769320 - RNA, 24 nt, Human
cuuuagcaaagucuguacuuuacc

SEQ ID NO: 769321 - RNA, 23 nt, Human
gaagaaagcuuagguagaacacc

SEQ ID NO: 769322 - RNA, 18 nt, Human
gacaucuguuugacauga

SEQ ID NO: 769323 - RNA, 19 nt, Human
gagccacaaagaaaagaug

SEQ ID NO: 769324 - RNA, 20 nt, Human
gcaugucuggguaaaaucuc

SEQ ID NO: 769325 - RNA, 24 nt, Human
gccacacuggagacauuuaaagua

SEQ ID NO: 769326 - RNA, 21 nt, Human
gcccucguccuugcccaccuc

SEQ ID NO: 769327 - RNA, 21 nt, Human
gcugaaccaaagcggcacagc

SEQ ID NO: 769328 - RNA, 22 nt, Human
gcuugcuuuucuggcuugcugg

SEQ ID NO: 769329 - RNA, 24 nt, Human
ggaaacaaaacuguuuuagcucag

SEQ ID NO: 769330 - RNA, 22 nt, Human
ggccaagcaaauguuaagcuga

SEQ ID NO: 769331 - RNA, 20 nt, Human
ggucaggcggcggcugcugc

SEQ ID NO: 769332 - RNA, 22 nt, Human
guacucccagcaccuaacacag

SEQ ID NO: 769333 - RNA, 21 nt, Human
guagaacaccuguauacaccg

SEQ ID NO: 769334 - RNA, 23 nt, Human
guagcuuuucuggcuugcuuuuc

SEQ ID NO: 769335 - RNA, 22 nt, Human
guccuugcccaccucucucccg

SEQ ID NO: 769336 - RNA, 24 nt, Human
gucuucuucacugaguuggauucc

SEQ ID NO: 769337 - RNA, 21 nt, Human
uaaaaaaaaagcaugagccac

SEQ ID NO: 769338 - RNA, 23 nt, Human
uaaaaauccaugcauguaacccu

SEQ ID NO: 769339 - RNA, 22 nt, Human
uaacuuuaauucuuagcaaauc

SEQ ID NO: 769340 - RNA, 23 nt, Human
uaauaacuacugccaagcagaac

SEQ ID NO: 769341 - RNA, 26 nt, Human
uaauauacacacuaaucauaauuaua

SEQ ID NO: 769342 - RNA, 20 nt, Human
uacaguccacaggcuauuca

SEQ ID NO: 769343 - RNA, 21 nt, Human
uacuucauccuuucauuaggg

SEQ ID NO: 769344 - RNA, 24 nt, Human
uagcacagaaugagagccugugcu

SEQ ID NO: 769345 - RNA, 23 nt, Human
uagguagaacaccuguauacacc

SEQ ID NO: 769346 - RNA, 20 nt, Human
uaucuaauauugaguuaaua

SEQ ID NO: 769347 - RNA, 19 nt, Human
uaucugaauggcagagacu

SEQ ID NO: 769348 - RNA, 20 nt, Human
uaugguaaaacauuucacuc

SEQ ID NO: 769349 - RNA, 20 nt, Human
uauuaccagaaacucgguug

SEQ ID NO: 769350 - RNA, 21 nt, Human
uauuuugccucuugaagucuc

SEQ ID NO: 769351 - RNA, 21 nt, Human
ucagacguuuuaaugucuccu

SEQ ID NO: 769352 - RNA, 18 nt, Human
ucaguaggucaacuggug

SEQ ID NO: 769353 - RNA, 19 nt, Human
ucccccgguuucccccucc

SEQ ID NO: 769354 - RNA, 21 nt, Human
ucccugaggauaaggaucugc

SEQ ID NO: 769355 - RNA, 26 nt, Human
uccucagaaacagagaucagauucac

SEQ ID NO: 769356 - RNA, 21 nt, Human
ucguucugucuucuucacuga

SEQ ID NO: 769357 - RNA, 19 nt, Human
ucuaaaagggaaagucacc

SEQ ID NO: 769358 - RNA, 23 nt, Human
ucuaauauucuuauuaccagaaa

SEQ ID NO: 769359 - RNA, 21 nt, Human
ucuacaaauuggaaaugcuag

SEQ ID NO: 769360 - RNA, 20 nt, Human
ucucaguaggucaacuggug

SEQ ID NO: 769361 - RNA, 23 nt, Human
ucugaauggcagagacugaggau

SEQ ID NO: 769362 - RNA, 22 nt, Human
ucuggcuugcuuuucuggcuug

SEQ ID NO: 769363 - RNA, 20 nt, Human
ugaaaaaggcagagcaggaa

SEQ ID NO: 769364 - RNA, 19 nt, Human
ugaaccaaagcggcacagc

SEQ ID NO: 769365 - RNA, 23 nt, Human
ugaagucucaguuuucucaucua

SEQ ID NO: 769366 - RNA, 21 nt, Human
ugagugacuugaucauauaaa

SEQ ID NO: 769367 - RNA, 22 nt, Human
ugcaaaaacagaugcuauauca

SEQ ID NO: 769368 - RNA, 23 nt, Human
ugccaagcagaacaaaauguccu

SEQ ID NO: 769369 - RNA, 21 nt, Human
ugccacuaagcugucuauucc

SEQ ID NO: 769370 - RNA, 19 nt, Human
ugcccuaagguaucugugc

SEQ ID NO: 769371 - RNA, 23 nt, Human
ugcccucgcccucguccuugccc

SEQ ID NO: 769372 - RNA, 20 nt, Human
uggaaaugcuagaaccucac

SEQ ID NO: 769373 - RNA, 24 nt, Human
uggccugacaaccagauuucaaaa

SEQ ID NO: 769374 - RNA, 20 nt, Human
ugggguauaauuuaaugaaa

SEQ ID NO: 769375 - RNA, 20 nt, Human
uggggugggggccuaccauc

SEQ ID NO: 769376 - RNA, 22 nt, Human
uggggugggggccuaccaucug

SEQ ID NO: 769377 - RNA, 21 nt, Human
uguaaaaaggaaacaaaacug

SEQ ID NO: 769378 - RNA, 18 nt, Human
uguaacccuaaaaaaaaa

SEQ ID NO: 769379 - RNA, 20 nt, Human
ugucucuuggcaggaagaaa

SEQ ID NO: 769380 - RNA, 20 nt, Human
ugucuuaucucccauaaaca

SEQ ID NO: 769381 - RNA, 18 nt, Human
ugugugucugugugugug

SEQ ID NO: 769382 - RNA, 25 nt, Human
uguuguagcuuuucuggcuugcuuu

SEQ ID NO: 769383 - RNA, 20 nt, Human
uguuucagagaguuuuacag

SEQ ID NO: 769384 - RNA, 18 nt, Human
uuaugguccaaucauauc

SEQ ID NO: 769385 - RNA, 18 nt, Human
uuccaauaaaaaacaagg

SEQ ID NO: 769386 - RNA, 21 nt, Human
uuccaauggaaagaauauugg

SEQ ID NO: 769387 - RNA, 28 nt, Human
uuggauuccugaagggcagugaugccuu

SEQ ID NO: 769388 - RNA, 18 nt, Human
uuggggugggggccuacc

SEQ ID NO: 769389 - RNA, 21 nt, Human
uuuucuggcuugcuuuucugg

SEQ ID NO: 769390 - RNA, 24 nt, Human
uuuuguuucagagaguuuuacagg

SEQ ID NO: 769391 - RNA, 23 nt, Human
accaccaccucuagguucuccau

SEQ ID NO: 769392 - RNA, 24 nt, Human
accacugcuacucucacuguugca

SEQ ID NO: 769393 - RNA, 22 nt, Human
acuguugcagucugugcugucc

SEQ ID NO: 769394 - RNA, 19 nt, Human
aucacuauucccaccugca

SEQ ID NO: 769395 - RNA, 19 nt, Human
caaaagcacuaaggucaua

SEQ ID NO: 769396 - RNA, 22 nt, Human
cacuauaugacaagaaauuuac

SEQ ID NO: 769397 - RNA, 21 nt, Human
cagguggauaggaaaucaauu

SEQ ID NO: 769398 - RNA, 18 nt, Human
ccaccugcaccaccaccu

SEQ ID NO: 769399 - RNA, 21 nt, Human
ccacugcuacucucacuguug

SEQ ID NO: 769400 - RNA, 21 nt, Human
cucuuggcuuuuaccaccacu

SEQ ID NO: 769401 - RNA, 19 nt, Human
gagaacauaaucagguggg

SEQ ID NO: 769402 - RNA, 23 nt, Human
ggucauaugaucuuaaguucaaa

SEQ ID NO: 769403 - RNA, 20 nt, Human
uaaaaaaaaauccccauggu

SEQ ID NO: 769404 - RNA, 20 nt, Human
uaaacuaaccagagaacaua

SEQ ID NO: 769405 - RNA, 23 nt, Human
uaccaccacugcuacucucacug

SEQ ID NO: 769406 - RNA, 22 nt, Human
uaggcacauuaaaaaaaaaucc

SEQ ID NO: 769407 - RNA, 22 nt, Human
ucccaccugcaccaccaccucu

SEQ ID NO: 769408 - RNA, 22 nt, Human
ucugugcuguccaaguuaucug

SEQ ID NO: 769409 - RNA, 21 nt, Human
ucuuggcuuuuaccaccacug

SEQ ID NO: 769410 - RNA, 21 nt, Human
ucuuuuuauugaauauucugg

SEQ ID NO: 769411 - RNA, 21 nt, Human
uggcuaaacuaaccagagaac

SEQ ID NO: 769412 - RNA, 20 nt, Human
uguaaacaauuauacaugua

SEQ ID NO: 769413 - RNA, 22 nt, Human
uuauacauguauuuaucacccu

SEQ ID NO: 769414 - RNA, 20 nt, Human
uucuuaaacaaggcuaaaga

SEQ ID NO: 769415 - RNA, 18 nt, Human
uuuuuuuuuuuuuuuuug

SEQ ID NO: 769416 - RNA, 22 nt, Human
aaaaccccuuccuguaccacga

SEQ ID NO: 769417 - RNA, 24 nt, Human
aaagugcugggauuaaaggcauga

SEQ ID NO: 769418 - RNA, 24 nt, Human
aaagugcugggauuacaggcguga

SEQ ID NO: 769419 - RNA, 24 nt, Human
aaagugcugggauuauagguguga

SEQ ID NO: 769420 - RNA, 22 nt, Human
aagaaaaaaaaacugaccaagc

SEQ ID NO: 769421 - RNA, 22 nt, Human
aagaugcccccgaguuuagaau

SEQ ID NO: 769422 - RNA, 18 nt, Human
aagcaacucagccuccca

SEQ ID NO: 769423 - RNA, 24 nt, Human
aagcgauccaccaagcuuggccuc

SEQ ID NO: 769424 - RNA, 19 nt, Human
aaggcacucagugguacag

SEQ ID NO: 769425 - RNA, 19 nt, Human
aaguagcugggacuacagg

SEQ ID NO: 769426 - RNA, 20 nt, Human
aaguagcugggacuacaggu

SEQ ID NO: 769427 - RNA, 26 nt, Human
aaguagcugggacuacaggugcacac

SEQ ID NO: 769428 - RNA, 19 nt, Human
aagugcugggauuaaaggc

SEQ ID NO: 769429 - RNA, 19 nt, Human
aagugcugggauuacaggc

SEQ ID NO: 769430 - RNA, 19 nt, Human
aagugcugggauuacaggc

SEQ ID NO: 769431 - RNA, 18 nt, Human
aagugcugggauuauagg

SEQ ID NO: 769432 - RNA, 26 nt, Human
aagugcugggauuauaggugugagcc

SEQ ID NO: 769433 - RNA, 18 nt, Human
acaggguuucaccauguu

SEQ ID NO: 769434 - RNA, 19 nt, Human
acaggguuucaccauguug

SEQ ID NO: 769435 - RNA, 24 nt, Human
acaggguuucaccauguugaccag

SEQ ID NO: 769436 - RNA, 25 nt, Human
accauauugcccagacugaucuuaa

SEQ ID NO: 769437 - RNA, 24 nt, Human
acggccucagccucccgaguagcu

SEQ ID NO: 769438 - RNA, 23 nt, Human
acggugcaaucacagcucacugc

SEQ ID NO: 769439 - RNA, 24 nt, Human
acugcuggccccccuggcuguggg

SEQ ID NO: 769440 - RNA, 21 nt, Human
agaaaaaaaaacugaccaagc

SEQ ID NO: 769441 - RNA, 20 nt, Human
agacagggucucgcucugua

SEQ ID NO: 769442 - RNA, 18 nt, Human
agacggcggccccucccc

SEQ ID NO: 769443 - RNA, 24 nt, Human
agagaaacaaaacugagccacugg

SEQ ID NO: 769444 - RNA, 22 nt, Human
agcucacugcccuccuggccuc

SEQ ID NO: 769445 - RNA, 22 nt, Human
agcugggacuacaggcuugggc

SEQ ID NO: 769446 - RNA, 24 nt, Human
aggcgaucugcccaccucggccuc

SEQ ID NO: 769447 - RNA, 19 nt, Human
aggcgugaaucaccgcgcc

SEQ ID NO: 769448 - RNA, 24 nt, Human
agggauccuacggccucagccucc

SEQ ID NO: 769449 - RNA, 18 nt, Human
agggcucggggcgggggg

SEQ ID NO: 769450 - RNA, 25 nt, Human
agguugggguggggacucagaaggg

SEQ ID NO: 769451 - RNA, 21 nt, Human
agguuugaacagguuggggug

SEQ ID NO: 769452 - RNA, 19 nt, Human
aguagcugggacuacaggc

SEQ ID NO: 769453 - RNA, 19 nt, Human
aguagcugggacuacaggc

SEQ ID NO: 769454 - RNA, 25 nt, Human
aguagcugggacuacaggcuugggc

SEQ ID NO: 769455 - RNA, 18 nt, Human
agugcugggauuacaggc

SEQ ID NO: 769456 - RNA, 20 nt, Human
auuggggacccccugccuca

SEQ ID NO: 769457 - RNA, 24 nt, Human
caaagugcugggauuaaaggcaug

SEQ ID NO: 769458 - RNA, 21 nt, Human
caaagugcugggauuacaggc

SEQ ID NO: 769459 - RNA, 24 nt, Human
caaagugcugggauuacaggcgug

SEQ ID NO: 769460 - RNA, 24 nt, Human
caaagugcugggauuauaggugug

SEQ ID NO: 769461 - RNA, 24 nt, Human
caacucagccucccaaagugcugg

SEQ ID NO: 769462 - RNA, 21 nt, Human
caagaugcccccgaguuuaga

SEQ ID NO: 769463 - RNA, 22 nt, Human
cacagugcccggucugaagcac

SEQ ID NO: 769464 - RNA, 21 nt, Human
cacauccaucagugccaggag

SEQ ID NO: 769465 - RNA, 27 nt, Human
caccauauugcccagacugaucuuaaa

SEQ ID NO: 769466 - RNA, 18 nt, Human
caccauguugaccaggcc

SEQ ID NO: 769467 - RNA, 21 nt, Human
caccauguugaccaggccggu

SEQ ID NO: 769468 - RNA, 24 nt, Human
caccauguugaccaggccggucuc

SEQ ID NO: 769469 - RNA, 27 nt, Human
caccauguugaccaggccggucucgaa

SEQ ID NO: 769470 - RNA, 24 nt, Human
cagccucgaacuccugggcucaag

SEQ ID NO: 769471 - RNA, 20 nt, Human
cagcuggccaaagaaaaaaa

SEQ ID NO: 769472 - RNA, 21 nt, Human
cagcuggccaaagaaaaaaaa

SEQ ID NO: 769473 - RNA, 21 nt, Human
cagggucucgcucuguaaccc

SEQ ID NO: 769474 - RNA, 24 nt, Human
caggguuucaccauguugaccagg

SEQ ID NO: 769475 - RNA, 20 nt, Human
caguagcgcaaucucggcuc

SEQ ID NO: 769476 - RNA, 24 nt, Human
cauauugcccagacugaucuuaaa

SEQ ID NO: 769477 - RNA, 24 nt, Human
caugccaagcugauuuuuaaaaau

SEQ ID NO: 769478 - RNA, 24 nt, Human
cauguugaccaggccggucucgaa

SEQ ID NO: 769479 - RNA, 24 nt, Human
ccaaagugcugggauuaaaggcau

SEQ ID NO: 769480 - RNA, 20 nt, Human
ccaaagugcugggauuauag

SEQ ID NO: 769481 - RNA, 21 nt, Human
ccaaagugcugggauuauagg

SEQ ID NO: 769482 - RNA, 24 nt, Human
ccaaagugcugggauuauaggugu

SEQ ID NO: 769483 - RNA, 20 nt, Human
ccacugggcagcuggccaaa

SEQ ID NO: 769484 - RNA, 18 nt, Human
ccagcacagcuguucccg

SEQ ID NO: 769485 - RNA, 21 nt, Human
ccaggagugcagggaugcaaa

SEQ ID NO: 769486 - RNA, 18 nt, Human
cccaaagguggacuuuuc

SEQ ID NO: 769487 - RNA, 23 nt, Human
cccaaguagcugggacuacaggu

SEQ ID NO: 769488 - RNA, 24 nt, Human
cccaaguagcugggacuacaggug

SEQ ID NO: 769489 - RNA, 20 nt, Human
cccacgugauuucaaaucca

SEQ ID NO: 769490 - RNA, 21 nt, Human
cccagaacagggccugcccac

SEQ ID NO: 769491 - RNA, 19 nt, Human
ccccagaacagggccugcc

SEQ ID NO: 769492 - RNA, 20 nt, Human
cccccaggcacgggucccgg

SEQ ID NO: 769493 - RNA, 19 nt, Human
cccccgaguuuagaaucug

SEQ ID NO: 769494 - RNA, 18 nt, Human
cccccugccucccaauuu

SEQ ID NO: 769495 - RNA, 24 nt, Human
cccgaguagcugggacuacaggcu

SEQ ID NO: 769496 - RNA, 22 nt, Human
cccgggcccugcuaccacaagg

SEQ ID NO: 769497 - RNA, 21 nt, Human
ccggucucgaacuccugaccu

SEQ ID NO: 769498 - RNA, 20 nt, Human
ccucaaggcuccggacucag

SEQ ID NO: 769499 - RNA, 24 nt, Human
ccucaucgcccgucggcgugucca

SEQ ID NO: 769500 - RNA, 24 nt, Human
ccuccuggccucaaggcuccggac

SEQ ID NO: 769501 - RNA, 19 nt, Human
ccucgaacuccugggcuca

SEQ ID NO: 769502 - RNA, 22 nt, Human
ccucgaacuccugggcucaagg

SEQ ID NO: 769503 - RNA, 24 nt, Human
ccugaccucaggcgaucugcccac

SEQ ID NO: 769504 - RNA, 18 nt, Human
ccuggcuguggagguggg

SEQ ID NO: 769505 - RNA, 19 nt, Human
ccuggcugugggggauggg

SEQ ID NO: 769506 - RNA, 19 nt, Human
ccugggcucaagggauccu

SEQ ID NO: 769507 - RNA, 25 nt, Human
ccuguaccacgaggugaguuuagag

SEQ ID NO: 769508 - RNA, 25 nt, Human
cgaacuccugggcucaagggauccu

SEQ ID NO: 769509 - RNA, 24 nt, Human
cgaucugcccaccucggccucuca

SEQ ID NO: 769510 - RNA, 21 nt, Human
cggccccuccccggguccccc

SEQ ID NO: 769511 - RNA, 25 nt, Human
cuacggccucagccucccgaguagc

SEQ ID NO: 769512 - RNA, 22 nt, Human
cucaagcaacucagccucccaa

SEQ ID NO: 769513 - RNA, 24 nt, Human
cucagccucccaaguagcugggac

SEQ ID NO: 769514 - RNA, 24 nt, Human
cucagccucccgaguagcugggac

SEQ ID NO: 769515 - RNA, 26 nt, Human
cucaggcccugcugacauccuggcug

SEQ ID NO: 769516 - RNA, 19 nt, Human
cuccccgggucccccaggc

SEQ ID NO: 769517 - RNA, 21 nt, Human
cucucaggcucaagcaacuca

SEQ ID NO: 769518 - RNA, 22 nt, Human
cugacuguccagcacagcuguu

SEQ ID NO: 769519 - RNA, 23 nt, Human
cugcagccucgaacuccugggcu

SEQ ID NO: 769520 - RNA, 25 nt, Human
cuggccaaagaaaaaaaaacugacc

SEQ ID NO: 769521 - RNA, 18 nt, Human
cuggccucaaggcuccgg

SEQ ID NO: 769522 - RNA, 20 nt, Human
cugggauuaaaggcaugagc

SEQ ID NO: 769523 - RNA, 21 nt, Human
cugggauuauaggugugagcc

SEQ ID NO: 769524 - RNA, 18 nt, Human
cuucuguugcccaggcug

SEQ ID NO: 769525 - RNA, 24 nt, Human
cuucuucuguugcccaggcuggag

SEQ ID NO: 769526 - RNA, 24 nt, Human
gaccucaggcgaucugcccaccuc

SEQ ID NO: 769527 - RNA, 20 nt, Human
gagacagggucucgcucugu

SEQ ID NO: 769528 - RNA, 19 nt, Human
gagaucacaucugcccaaa

SEQ ID NO: 769529 - RNA, 22 nt, Human
gauccuacggccucagccuccc

SEQ ID NO: 769530 - RNA, 18 nt, Human
gaugcaaaggcccgcagg

SEQ ID NO: 769531 - RNA, 18 nt, Human
gauuaaaggcaugagcca

SEQ ID NO: 769532 - RNA, 19 nt, Human
gauuaaaggcaugagccac

SEQ ID NO: 769533 - RNA, 19 nt, Human
gauuacaggcgugaaucac

SEQ ID NO: 769534 - RNA, 22 nt, Human
gauuacaggcgugaaucaccgc

SEQ ID NO: 769535 - RNA, 18 nt, Human
gauuauaggugugagcca

SEQ ID NO: 769536 - RNA, 21 nt, Human
gauuauaggugugagccacca

SEQ ID NO: 769537 - RNA, 24 nt, Human
gauuauaggugugagccaccaugc

SEQ ID NO: 769538 - RNA, 24 nt, Human
gcagcuggccaaagaaaaaaaaac

SEQ ID NO: 769539 - RNA, 21 nt, Human
gccaagcugauuuuuaaaaau

SEQ ID NO: 769540 - RNA, 19 nt, Human
gccaggauccucaucgccc

SEQ ID NO: 769541 - RNA, 21 nt, Human
gcccagacugaucuuaaaccg

SEQ ID NO: 769542 - RNA, 22 nt, Human
gcccaggcuggagugucacggu

SEQ ID NO: 769543 - RNA, 23 nt, Human
gccggucucgaacuccugaccuc

SEQ ID NO: 769544 - RNA, 24 nt, Human
gcgauccaccaagcuuggccuccc

SEQ ID NO: 769545 - RNA, 22 nt, Human
gcgaucugcccaccucggccuc

SEQ ID NO: 769546 - RNA, 24 nt, Human
gcgcagcccagaggaaggggaacc

SEQ ID NO: 769547 - RNA, 23 nt, Human
gcguggggaugccggcugggagc

SEQ ID NO: 769548 - RNA, 22 nt, Human
gcucuguaacccaggcuggagu

SEQ ID NO: 769549 - RNA, 19 nt, Human
ggacuacaggcuugggcca

SEQ ID NO: 769550 - RNA, 23 nt, Human
ggacucagccucccaaguagcug

SEQ ID NO: 769551 - RNA, 19 nt, Human
ggagguggguggggggucu

SEQ ID NO: 769552 - RNA, 24 nt, Human
ggauuauaggugugagccaccaug

SEQ ID NO: 769553 - RNA, 24 nt, Human
ggccggucucgaacuccugaccuc

SEQ ID NO: 769554 - RNA, 23 nt, Human
ggccucagccucccgaguagcug

SEQ ID NO: 769555 - RNA, 24 nt, Human
ggccucagccucccgaguagcugg

SEQ ID NO: 769556 - RNA, 21 nt, Human
ggcggggggugggugggggug

SEQ ID NO: 769557 - RNA, 19 nt, Human
gggaggcccagccaggauc

SEQ ID NO: 769558 - RNA, 21 nt, Human
gggcggggggugggugggggu

SEQ ID NO: 769559 - RNA, 22 nt, Human
gggcggggggugggugggggug

SEQ ID NO: 769560 - RNA, 24 nt, Human
gggcggggggugggugggggugcc

SEQ ID NO: 769561 - RNA, 22 nt, Human
gggcucggggcggggggugggu

SEQ ID NO: 769562 - RNA, 18 nt, Human
ggggauggggcccucgag

SEQ ID NO: 769563 - RNA, 21 nt, Human
ggggggucuguuuggagcagg

SEQ ID NO: 769564 - RNA, 23 nt, Human
gggggugggugggggugccucug

SEQ ID NO: 769565 - RNA, 20 nt, Human
gguggggccccagaacaggg

SEQ ID NO: 769566 - RNA, 21 nt, Human
gguuugaacagguuggggugg

SEQ ID NO: 769567 - RNA, 20 nt, Human
gucugggcuggccuugaacu

SEQ ID NO: 769568 - RNA, 22 nt, Human
gugaaaggcacucagugguaca

SEQ ID NO: 769569 - RNA, 21 nt, Human
uaagugacaaagucuucuucu

SEQ ID NO: 769570 - RNA, 23 nt, Human
uacagagcguuacucaaaaggaa

SEQ ID NO: 769571 - RNA, 27 nt, Human
uaccacgaggugaguuuagagccaacu

SEQ ID NO: 769572 - RNA, 24 nt, Human
uacuagagacaggguuucaccaug

SEQ ID NO: 769573 - RNA, 20 nt, Human
uagagacaggguuucaccau

SEQ ID NO: 769574 - RNA, 21 nt, Human
uagagacaggguuucaccaug

SEQ ID NO: 769575 - RNA, 22 nt, Human
uagagacaggguuucaccaugu

SEQ ID NO: 769576 - RNA, 22 nt, Human
ucaaagugcugggauuacaggc

SEQ ID NO: 769577 - RNA, 24 nt, Human
ucaaagugcugggauuacaggcgu

SEQ ID NO: 769578 - RNA, 23 nt, Human
ucaaauccaggccucagugacac

SEQ ID NO: 769579 - RNA, 22 nt, Human
ucaagcaacucagccucccaaa

SEQ ID NO: 769580 - RNA, 18 nt, Human
ucagccucccaaagugcu

SEQ ID NO: 769581 - RNA, 20 nt, Human
ucagccucccaaguagcugg

SEQ ID NO: 769582 - RNA, 23 nt, Human
ucagccucccgaguagcugggac

SEQ ID NO: 769583 - RNA, 21 nt, Human
ucaggcccugcugacauccug

SEQ ID NO: 769584 - RNA, 20 nt, Human
uccaccaagcuuggccuccc

SEQ ID NO: 769585 - RNA, 25 nt, Human
uccaugccgcagccgcauccaaaga

SEQ ID NO: 769586 - RNA, 24 nt, Human
ucccaaagugcugggauuaaaggc

SEQ ID NO: 769587 - RNA, 23 nt, Human
ucccaaagugcugggauuauagg

SEQ ID NO: 769588 - RNA, 24 nt, Human
ucccaaguagcugggacuacaggu

SEQ ID NO: 769589 - RNA, 18 nt, Human
ucccagggcuggauggug

SEQ ID NO: 769590 - RNA, 24 nt, Human
ucccgaguagcugggacuacaggc

SEQ ID NO: 769591 - RNA, 18 nt, Human
uccugggcucaagggauc

SEQ ID NO: 769592 - RNA, 20 nt, Human
uccugggcucaagggauccu

SEQ ID NO: 769593 - RNA, 24 nt, Human
ucgcugcagccucgaacuccuggg

SEQ ID NO: 769594 - RNA, 22 nt, Human
ucggcgcgcacacguccaggag

SEQ ID NO: 769595 - RNA, 24 nt, Human
ucuacaaagacauucagacagagc

SEQ ID NO: 769596 - RNA, 24 nt, Human
ucucaaagugcugggauuacaggc

SEQ ID NO: 769597 - RNA, 18 nt, Human
ucucacucuguugucugg

SEQ ID NO: 769598 - RNA, 23 nt, Human
ucucacucuguugucugggcugg

SEQ ID NO: 769599 - RNA, 18 nt, Human
ucucaggcucaagcaacu

SEQ ID NO: 769600 - RNA, 19 nt, Human
ucucaggcucaagcaacuc

SEQ ID NO: 769601 - RNA, 23 nt, Human
ucucgaacuccugaccucaggcg

SEQ ID NO: 769602 - RNA, 23 nt, Human
ucucgcucuguaacccaggcugg

SEQ ID NO: 769603 - RNA, 24 nt, Human
ucucgcucuguaacccaggcugga

SEQ ID NO: 769604 - RNA, 24 nt, Human
ucuguaacccaggcuggaguucag

SEQ ID NO: 769605 - RNA, 22 nt, Human
ucuucuguugcccaggcuggag

SEQ ID NO: 769606 - RNA, 23 nt, Human
ucuucuguugcccaggcuggagu

SEQ ID NO: 769607 - RNA, 24 nt, Human
ucuucuguugcccaggcuggagug

SEQ ID NO: 769608 - RNA, 23 nt, Human
ucuucuucuguugcccaggcugg

SEQ ID NO: 769609 - RNA, 24 nt, Human
ucuucuucuguugcccaggcugga

SEQ ID NO: 769610 - RNA, 19 nt, Human
ugacacauggcagaguggg

SEQ ID NO: 769611 - RNA, 18 nt, Human
ugacauccuggcugugga

SEQ ID NO: 769612 - RNA, 24 nt, Human
ugaccaggccggucucgaacuccu

SEQ ID NO: 769613 - RNA, 18 nt, Human
ugaccucaggcgaucugc

SEQ ID NO: 769614 - RNA, 20 nt, Human
ugaccucaggcgaucugccc

SEQ ID NO: 769615 - RNA, 21 nt, Human
ugaccucaggcgaucugccca

SEQ ID NO: 769616 - RNA, 22 nt, Human
ugcaaaggcccgcagguggggg

SEQ ID NO: 769617 - RNA, 24 nt, Human
ugcacaccaccacgccaggcuaau

SEQ ID NO: 769618 - RNA, 20 nt, Human
ugcccaggcuggagugucac

SEQ ID NO: 769619 - RNA, 24 nt, Human
ugcccaggcuggagugucacggug

SEQ ID NO: 769620 - RNA, 24 nt, Human
ugcccccgaguuuagaaucugcuu

SEQ ID NO: 769621 - RNA, 20 nt, Human
ugccucugggcuccgggucu

SEQ ID NO: 769622 - RNA, 23 nt, Human
ugcugggauuacaggcgugaauc

SEQ ID NO: 769623 - RNA, 21 nt, Human
uggagguggguggggggucug

SEQ ID NO: 769624 - RNA, 22 nt, Human
uggccaaagaaaaaaaaacuga

SEQ ID NO: 769625 - RNA, 27 nt, Human
uggccaaagaaaaaaaaacugaccaag

SEQ ID NO: 769626 - RNA, 20 nt, Human
uggcuguggagguggguggg

SEQ ID NO: 769627 - RNA, 22 nt, Human
ugggacuacaggcuugggccac

SEQ ID NO: 769628 - RNA, 24 nt, Human
ugggacuacaggcuugggccacca

SEQ ID NO: 769629 - RNA, 24 nt, Human
ugggacuacaggugcacaccacca

SEQ ID NO: 769630 - RNA, 22 nt, Human
ugggauuaaaggcaugagccac

SEQ ID NO: 769631 - RNA, 24 nt, Human
ugggauuaaaggcaugagccacag

SEQ ID NO: 769632 - RNA, 26 nt, Human
ugggauuaaaggcaugagccacagug

SEQ ID NO: 769633 - RNA, 18 nt, Human
ugggauuacaggcgugaa

SEQ ID NO: 769634 - RNA, 19 nt, Human
ugggauuacaggcgugaau

SEQ ID NO: 769635 - RNA, 21 nt, Human
ugggauuacaggcgugaauca

SEQ ID NO: 769636 - RNA, 22 nt, Human
ugggauuacaggcgugaaucac

SEQ ID NO: 769637 - RNA, 23 nt, Human
ugggauuacaggcgugaaucacc

SEQ ID NO: 769638 - RNA, 24 nt, Human
ugggauuacaggcgugaaucaccg

SEQ ID NO: 769639 - RNA, 18 nt, Human
ugggauuauaggugugag

SEQ ID NO: 769640 - RNA, 22 nt, Human
ugggauuauaggugugagccac

SEQ ID NO: 769641 - RNA, 23 nt, Human
ugggauuauaggugugagccacc

SEQ ID NO: 769642 - RNA, 24 nt, Human
ugggauuauaggugugagccacca

SEQ ID NO: 769643 - RNA, 25 nt, Human
ugggauuauaggugugagccaccau

SEQ ID NO: 769644 - RNA, 21 nt, Human
ugggcuuguccugcacaugug

SEQ ID NO: 769645 - RNA, 18 nt, Human
uggggacccccugccuca

SEQ ID NO: 769646 - RNA, 21 nt, Human
uggggacccccugccucaggg

SEQ ID NO: 769647 - RNA, 20 nt, Human
ugggggcguggggaugccgg

SEQ ID NO: 769648 - RNA, 22 nt, Human
uggggggucuguuuggagcagg

SEQ ID NO: 769649 - RNA, 18 nt, Human
ugggguggggacucagaa

SEQ ID NO: 769650 - RNA, 21 nt, Human
uggugucauuucuguaacaau

SEQ ID NO: 769651 - RNA, 23 nt, Human
ugugaaaggcacucagugguaca

SEQ ID NO: 769652 - RNA, 20 nt, Human
uguggcucuccccacagggg

SEQ ID NO: 769653 - RNA, 22 nt, Human
uguuuuaaaggaaaccuacaga

SEQ ID NO: 769654 - RNA, 24 nt, Human
uuacuagagacaggguuucaccau

SEQ ID NO: 769655 - RNA, 20 nt, Human
uuagagccagcaagaugccc

SEQ ID NO: 769656 - RNA, 20 nt, Human
uucaaacacagagaaacaaa

SEQ ID NO: 769657 - RNA, 19 nt, Human
uugcccaggcuggaguguc

SEQ ID NO: 769658 - RNA, 18 nt, Human
uuggagcaggcugggcug

SEQ ID NO: 769659 - RNA, 22 nt, Human
uuggagcaggcugggcuggggg

SEQ ID NO: 769660 - RNA, 18 nt, Human
uuggccucccaaagugcu

SEQ ID NO: 769661 - RNA, 24 nt, Human
uuggggacccccugccucagggcc

SEQ ID NO: 769662 - RNA, 24 nt, Human
uuguagagauggggugucaccaua

SEQ ID NO: 769663 - RNA, 24 nt, Human
uuucaccauguugaccaggccggu

SEQ ID NO: 769664 - RNA, 24 nt, Human
uuuguagagauggggugucaccau

SEQ ID NO: 769665 - RNA, 24 nt, Human
uuuuuacuagagacaggguuucac

SEQ ID NO: 769666 - RNA, 24 nt, Human
uuuuuuguagagauggggugucac

SEQ ID NO: 769667 - RNA, 18 nt, Human
aacaaagggaccccaccc

SEQ ID NO: 769668 - RNA, 23 nt, Human
aacaaagggaccccacccuccca

SEQ ID NO: 769669 - RNA, 19 nt, Human
aagcagaaguggggcaaug

SEQ ID NO: 769670 - RNA, 19 nt, Human
aagugaugcuuuagucuca

SEQ ID NO: 769671 - RNA, 20 nt, Human
acacaaagcagaaguggggc

SEQ ID NO: 769672 - RNA, 22 nt, Human
acagcaggggagcugaggcagg

SEQ ID NO: 769673 - RNA, 22 nt, Human
acaggccccugccacccaccac

SEQ ID NO: 769674 - RNA, 18 nt, Human
acuccaaaagccagcccc

SEQ ID NO: 769675 - RNA, 21 nt, Human
acuggggugggggcagcagag

SEQ ID NO: 769676 - RNA, 22 nt, Human
acuggggugggggcagcagagc

SEQ ID NO: 769677 - RNA, 20 nt, Human
agacugccugcagcccuagg

SEQ ID NO: 769678 - RNA, 19 nt, Human
agauaggaagggggguggu

SEQ ID NO: 769679 - RNA, 20 nt, Human
agauaggaagggggguggug

SEQ ID NO: 769680 - RNA, 18 nt, Human
agccggcuccugggcccu

SEQ ID NO: 769681 - RNA, 18 nt, Human
agggggcugaaaggagga

SEQ ID NO: 769682 - RNA, 21 nt, Human
agggggcugaaaggaggaugg

SEQ ID NO: 769683 - RNA, 19 nt, Human
agugaaaugcagguaccca

SEQ ID NO: 769684 - RNA, 22 nt, Human
caacaaagggaccccacccucc

SEQ ID NO: 769685 - RNA, 23 nt, Human
caacaaagggaccccacccuccc

SEQ ID NO: 769686 - RNA, 25 nt, Human
caacaaagggaccccacccucccag

SEQ ID NO: 769687 - RNA, 22 nt, Human
caagagcacaaagcacagcacc

SEQ ID NO: 769688 - RNA, 18 nt, Human
caccccaggauuucccag

SEQ ID NO: 769689 - RNA, 20 nt, Human
cacccccuuucuucucuucc

SEQ ID NO: 769690 - RNA, 24 nt, Human
caccccgagccccuagccugugcu

SEQ ID NO: 769691 - RNA, 20 nt, Human
caccucaacacuccaaaagc

SEQ ID NO: 769692 - RNA, 23 nt, Human
caccucaacacuccaaaagccag

SEQ ID NO: 769693 - RNA, 19 nt, Human
cagauauucaccucaacac

SEQ ID NO: 769694 - RNA, 21 nt, Human
cagcagagcugagacccucca

SEQ ID NO: 769695 - RNA, 22 nt, Human
cagcagagcugagacccuccac

SEQ ID NO: 769696 - RNA, 18 nt, Human
cagcagccaagagcacaa

SEQ ID NO: 769697 - RNA, 23 nt, Human
cagcagccaagagcacaaagcac

SEQ ID NO: 769698 - RNA, 25 nt, Human
cagcaggaggaggagcacacgaacc

SEQ ID NO: 769699 - RNA, 19 nt, Human
cagccaagagcacaaagca

SEQ ID NO: 769700 - RNA, 20 nt, Human
cagccucccacacacagccc

SEQ ID NO: 769701 - RNA, 22 nt, Human
cagcucccggucacaggccccu

SEQ ID NO: 769702 - RNA, 20 nt, Human
cagcucuucccccaagaccu

SEQ ID NO: 769703 - RNA, 25 nt, Human
caggggcccacaagacucuccuaau

SEQ ID NO: 769704 - RNA, 23 nt, Human
cagucucugccagcaacugggag

SEQ ID NO: 769705 - RNA, 19 nt, Human
ccaaccacccugcaucuug

SEQ ID NO: 769706 - RNA, 18 nt, Human
ccacuccaggccuugcuu

SEQ ID NO: 769707 - RNA, 21 nt, Human
ccacugcagggccuggggguc

SEQ ID NO: 769708 - RNA, 21 nt, Human
cccaaccacccugcaucuugg

SEQ ID NO: 769709 - RNA, 20 nt, Human
cccaccacuaccgccaacac

SEQ ID NO: 769710 - RNA, 23 nt, Human
cccccaagaccuagaggguccaa

SEQ ID NO: 769711 - RNA, 24 nt, Human
ccccucagagauccaagaacccau

SEQ ID NO: 769712 - RNA, 24 nt, Human
cccucagagauccaagaacccauu

SEQ ID NO: 769713 - RNA, 20 nt, Human
cccuguggcuggcuccagag

SEQ ID NO: 769714 - RNA, 24 nt, Human
ccggcuccugggcccucccugcag

SEQ ID NO: 769715 - RNA, 18 nt, Human
ccuaccaccugccccugg

SEQ ID NO: 769716 - RNA, 21 nt, Human
ccucccagccggcuccugggc

SEQ ID NO: 769717 - RNA, 19 nt, Human
ccugcagccucugagcagc

SEQ ID NO: 769718 - RNA, 19 nt, Human
ccugcucccugcccuggaa

SEQ ID NO: 769719 - RNA, 23 nt, Human
ccugggcccucccugcagccucu

SEQ ID NO: 769720 - RNA, 20 nt, Human
ccuguggcuggcuccagagc

SEQ ID NO: 769721 - RNA, 20 nt, Human
cgagccccuagccugugcua

SEQ ID NO: 769722 - RNA, 23 nt, Human
cggccccuugucuucagcccucc

SEQ ID NO: 769723 - RNA, 19 nt, Human
cggcuccugggcccucccu

SEQ ID NO: 769724 - RNA, 23 nt, Human
cuagguggggccugcucccugcc

SEQ ID NO: 769725 - RNA, 22 nt, Human
cuccaccccgagccccuagccc

SEQ ID NO: 769726 - RNA, 18 nt, Human
cuccagagcugccugguc

SEQ ID NO: 769727 - RNA, 21 nt, Human
cuccagagcugccuggucccc

SEQ ID NO: 769728 - RNA, 21 nt, Human
cucccagccggcuccugggcc

SEQ ID NO: 769729 - RNA, 25 nt, Human
cucccggucacaggccccugccuug

SEQ ID NO: 769730 - RNA, 25 nt, Human
cuccuggccccaaccacccugcauc

SEQ ID NO: 769731 - RNA, 19 nt, Human
cucuuggugcgccauucac

SEQ ID NO: 769732 - RNA, 19 nt, Human
cugcggaaggcaaaaggag

SEQ ID NO: 769733 - RNA, 18 nt, Human
cuguuccuuccccucaga

SEQ ID NO: 769734 - RNA, 18 nt, Human
gaccccacccucccagcc

SEQ ID NO: 769735 - RNA, 19 nt, Human
gacgggggccucugacuga

SEQ ID NO: 769736 - RNA, 25 nt, Human
gagacacaaagcagaaguggggcaa

SEQ ID NO: 769737 - RNA, 18 nt, Human
gagacccuccaccccgag

SEQ ID NO: 769738 - RNA, 25 nt, Human
gagacccuccaccccgagccccuag

SEQ ID NO: 769739 - RNA, 22 nt, Human
gagccccuagccugugcuaucc

SEQ ID NO: 769740 - RNA, 24 nt, Human
gcaacaaagggaccccacccuccc

SEQ ID NO: 769741 - RNA, 21 nt, Human
gcacccccuuucuucucuucc

SEQ ID NO: 769742 - RNA, 23 nt, Human
gccacagcuugggaagcuaggcu

SEQ ID NO: 769743 - RNA, 22 nt, Human
gcccugagcuauucaugauccc

SEQ ID NO: 769744 - RNA, 22 nt, Human
gccggccccuugucuucagccc

SEQ ID NO: 769745 - RNA, 22 nt, Human
gccugagggggaggagcugagg

SEQ ID NO: 769746 - RNA, 21 nt, Human
gcugagacccuccaccccgag

SEQ ID NO: 769747 - RNA, 23 nt, Human
ggaagcuaggcuaguacuggggu

SEQ ID NO: 769748 - RNA, 21 nt, Human
ggaaggcaaaaggagggacgg

SEQ ID NO: 769749 - RNA, 23 nt, Human
ggagacagcaggggagcugaggc

SEQ ID NO: 769750 - RNA, 18 nt, Human
ggcacaggccagacugcc

SEQ ID NO: 769751 - RNA, 18 nt, Human
ggccccaaccacccugca

SEQ ID NO: 769752 - RNA, 19 nt, Human
ggccucuuuugcuguuccu

SEQ ID NO: 769753 - RNA, 23 nt, Human
ggcugccagggagggcaggagag

SEQ ID NO: 769754 - RNA, 20 nt, Human
ggcuggugggcacaggagac

SEQ ID NO: 769755 - RNA, 20 nt, Human
gggcaggagagaucuggagu

SEQ ID NO: 769756 - RNA, 18 nt, Human
gggccucugacugagcag

SEQ ID NO: 769757 - RNA, 19 nt, Human
gggcuggugggcacaggag

SEQ ID NO: 769758 - RNA, 19 nt, Human
ggggagcugaggcaggaag

SEQ ID NO: 769759 - RNA, 21 nt, Human
ggggccugcucccugcccugg

SEQ ID NO: 769760 - RNA, 20 nt, Human
gguccuggcugccagggagg

SEQ ID NO: 769761 - RNA, 19 nt, Human
uaaagggggcugaaaggag

SEQ ID NO: 769762 - RNA, 23 nt, Human
uaagccacagcuugggaagcuag

SEQ ID NO: 769763 - RNA, 19 nt, Human
uacccagcucuucccccaa

SEQ ID NO: 769764 - RNA, 21 nt, Human
uagccugugcuauccucccag

SEQ ID NO: 769765 - RNA, 19 nt, Human
uaguacuggggugggggca

SEQ ID NO: 769766 - RNA, 23 nt, Human
uauuaagugaugcuuuagucuca

SEQ ID NO: 769767 - RNA, 22 nt, Human
ucccagccggcuccugggcccu

SEQ ID NO: 769768 - RNA, 21 nt, Human
ucccugcagccucugagcagc

SEQ ID NO: 769769 - RNA, 19 nt, Human
ucccugcccuggaagcuag

SEQ ID NO: 769770 - RNA, 20 nt, Human
uccggccguagccgcagccg

SEQ ID NO: 769771 - RNA, 18 nt, Human
uccuggccccaaccaccc

SEQ ID NO: 769772 - RNA, 23 nt, Human
uccugggcccucccugcagccuc

SEQ ID NO: 769773 - RNA, 18 nt, Human
uccuugaggaggggaagg

SEQ ID NO: 769774 - RNA, 19 nt, Human
uccuugaggaggggaaggg

SEQ ID NO: 769775 - RNA, 24 nt, Human
ucuccggccguagccgcagccgcc

SEQ ID NO: 769776 - RNA, 24 nt, Human
ucugccagcaacugggaguggggu

SEQ ID NO: 769777 - RNA, 23 nt, Human
ugagacccuccaccccgagcccc

SEQ ID NO: 769778 - RNA, 18 nt, Human
ugaggaagaagggccucu

SEQ ID NO: 769779 - RNA, 19 nt, Human
ugaggaagaagggccucuu

SEQ ID NO: 769780 - RNA, 25 nt, Human
ugaggaggggaagggucugcagaga

SEQ ID NO: 769781 - RNA, 21 nt, Human
ugaggcaauccuggcugcagc

SEQ ID NO: 769782 - RNA, 20 nt, Human
ugaggcaggaaggcuggccc

SEQ ID NO: 769783 - RNA, 28 nt, Human
ugaucucugcucccagauauucaccucc

SEQ ID NO: 769784 - RNA, 20 nt, Human
ugcagccccugcagcaggag

SEQ ID NO: 769785 - RNA, 19 nt, Human
ugcccggguccgggggcag

SEQ ID NO: 769786 - RNA, 20 nt, Human
ugcccggguccgggggcagc

SEQ ID NO: 769787 - RNA, 24 nt, Human
ugccugcagcccuagguggggccu

SEQ ID NO: 769788 - RNA, 19 nt, Human
ugcgugcaugagucugcgu

SEQ ID NO: 769789 - RNA, 20 nt, Human
ugcuucucuaacagccccug

SEQ ID NO: 769790 - RNA, 19 nt, Human
uggcacaggccagacugcc

SEQ ID NO: 769791 - RNA, 23 nt, Human
uggcuccagagcugccugguccc

SEQ ID NO: 769792 - RNA, 20 nt, Human
uggcuggcuccagagcugcc

SEQ ID NO: 769793 - RNA, 21 nt, Human
uggggugggggcagcagagcu

SEQ ID NO: 769794 - RNA, 22 nt, Human
uggggugggggcagcagagcug

SEQ ID NO: 769795 - RNA, 20 nt, Human
ugggugauccuugaggaggg

SEQ ID NO: 769796 - RNA, 24 nt, Human
ugguggggugacuacaggugcugg

SEQ ID NO: 769797 - RNA, 19 nt, Human
uguggcuggcuccagagcu

SEQ ID NO: 769798 - RNA, 23 nt, Human
ugugguggggugacuacaggugc

SEQ ID NO: 769799 - RNA, 25 nt, Human
ugugugcgugcaugagucugcgugu

SEQ ID NO: 769800 - RNA, 23 nt, Human
uguuccuuccccucagagaucca

SEQ ID NO: 769801 - RNA, 25 nt, Human
uucccccaagaccuagaggguccaa

SEQ ID NO: 769802 - RNA, 21 nt, Human
aaaaaagaaaaaagaaaagaa

SEQ ID NO: 769803 - RNA, 20 nt, Human
aaaaaagaaaauacguggga

SEQ ID NO: 769804 - RNA, 24 nt, Human
aaaaaagaaaauacuuaaaaacac

SEQ ID NO: 769805 - RNA, 25 nt, Human
aaaaaagaaaauacuuaaaaacaca

SEQ ID NO: 769806 - RNA, 18 nt, Human
aaaaacacacaauggcgg

SEQ ID NO: 769807 - RNA, 21 nt, Human
aaaaaccuguuaaaacaugcu

SEQ ID NO: 769808 - RNA, 18 nt, Human
aaaaagaaaaaagaaaag

SEQ ID NO: 769809 - RNA, 27 nt, Human
aaauaagcggcaccagccucgcucccu

SEQ ID NO: 769810 - RNA, 21 nt, Human
aagaaaaaccuguuaaaacau

SEQ ID NO: 769811 - RNA, 24 nt, Human
aagaaaauacuuaaaaacacacaa

SEQ ID NO: 769812 - RNA, 23 nt, Human
acagcccagaguuaucauggcca

SEQ ID NO: 769813 - RNA, 23 nt, Human
acugccucgcucuuucucaggcu

SEQ ID NO: 769814 - RNA, 22 nt, Human
agaaaaaagaaaagaaaaaccu

SEQ ID NO: 769815 - RNA, 27 nt, Human
agacaggaggugauagaggagggaccc

SEQ ID NO: 769816 - RNA, 20 nt, Human
agcacaccagcaucugaaac

SEQ ID NO: 769817 - RNA, 20 nt, Human
aggccgagacaaggccacac

SEQ ID NO: 769818 - RNA, 20 nt, Human
aguaguaagcuuccccaagu

SEQ ID NO: 769819 - RNA, 19 nt, Human
aucagcaaauaaacucuaa

SEQ ID NO: 769820 - RNA, 19 nt, Human
aucucuagcacauuccugg

SEQ ID NO: 769821 - RNA, 23 nt, Human
augaaagccaaauauccauaaua

SEQ ID NO: 769822 - RNA, 23 nt, Human
caaaauaagcggcaccagccucg

SEQ ID NO: 769823 - RNA, 21 nt, Human
caaacaauacugacaaaaaag

SEQ ID NO: 769824 - RNA, 18 nt, Human
caaggccgagacaaggcc

SEQ ID NO: 769825 - RNA, 20 nt, Human
cacucuccacagagcaacag

SEQ ID NO: 769826 - RNA, 18 nt, Human
cagaguuaucauggccaa

SEQ ID NO: 769827 - RNA, 24 nt, Human
cagugacaaaucggcagaaguucc

SEQ ID NO: 769828 - RNA, 20 nt, Human
cauggagccccccagcuucu

SEQ ID NO: 769829 - RNA, 22 nt, Human
ccaaacaauacugacaaaaaag

SEQ ID NO: 769830 - RNA, 23 nt, Human
ccaaacaauacugacaaaaaaga

SEQ ID NO: 769831 - RNA, 26 nt, Human
ccaaacaauacugacaaaaaagaaaa

SEQ ID NO: 769832 - RNA, 19 nt, Human
ccaacuaggauccgcucca

SEQ ID NO: 769833 - RNA, 21 nt, Human
ccaggaaaucccaaaugaaga

SEQ ID NO: 769834 - RNA, 22 nt, Human
ccaggcuuccaucauccaugcc

SEQ ID NO: 769835 - RNA, 21 nt, Human
cccccggcccuggcccggucc

SEQ ID NO: 769836 - RNA, 19 nt, Human
ccccgcaacccgggcgccc

SEQ ID NO: 769837 - RNA, 20 nt, Human
ccccgcaacccgggcgcccg

SEQ ID NO: 769838 - RNA, 27 nt, Human
ccccggcccuggcccgguccccucggc

SEQ ID NO: 769839 - RNA, 19 nt, Human
cccgcacgcagugcacagg

SEQ ID NO: 769840 - RNA, 25 nt, Human
cccgggcgcccgcccguccgcccuc

SEQ ID NO: 769841 - RNA, 22 nt, Human
cccucaggccgccccucccgcc

SEQ ID NO: 769842 - RNA, 19 nt, Human
ccgcaacccgggcgcccgc

SEQ ID NO: 769843 - RNA, 19 nt, Human
ccgccgcuaccgcggcucg

SEQ ID NO: 769844 - RNA, 26 nt, Human
ccucagggacuacuucauucuucucu

SEQ ID NO: 769845 - RNA, 18 nt, Human
ccucccgccgccgccgcu

SEQ ID NO: 769846 - RNA, 23 nt, Human
cgcccccggcccuggcccggucc

SEQ ID NO: 769847 - RNA, 21 nt, Human
cgccccgcaccgcauccugga

SEQ ID NO: 769848 - RNA, 21 nt, Human
cgcgcagcacaccugugugug

SEQ ID NO: 769849 - RNA, 20 nt, Human
cgcuccaggcuuccaucauc

SEQ ID NO: 769850 - RNA, 22 nt, Human
cucccgccgccgccgcuaccgc

SEQ ID NO: 769851 - RNA, 21 nt, Human
cugaaacuugccauccuugcc

SEQ ID NO: 769852 - RNA, 18 nt, Human
cugcugcuggcuggugcu

SEQ ID NO: 769853 - RNA, 19 nt, Human
cuggugcugggaggucaga

SEQ ID NO: 769854 - RNA, 23 nt, Human
gagcccccgcaacccgggcgccc

SEQ ID NO: 769855 - RNA, 18 nt, Human
gagggcaccagcuucaaa

SEQ ID NO: 769856 - RNA, 20 nt, Human
gaucagaaugugguacggga

SEQ ID NO: 769857 - RNA, 21 nt, Human
gaucaggauaguugugaagac

SEQ ID NO: 769858 - RNA, 18 nt, Human
gcagucagccagcagggc

SEQ ID NO: 769859 - RNA, 18 nt, Human
gcccaguguucagcuugg

SEQ ID NO: 769860 - RNA, 19 nt, Human
gcccgguccccucggccgc

SEQ ID NO: 769861 - RNA, 24 nt, Human
gcccucaggccgccccucccgccg

SEQ ID NO: 769862 - RNA, 23 nt, Human
gccggggccgagaccggccgggc

SEQ ID NO: 769863 - RNA, 25 nt, Human
gcgcagcacaccuguguguggccua

SEQ ID NO: 769864 - RNA, 20 nt, Human
gcucccucucccuaucacuc

SEQ ID NO: 769865 - RNA, 21 nt, Human
ggagggcaccagcuucaaaau

SEQ ID NO: 769866 - RNA, 21 nt, Human
ggcaccgagcccccgcaaccc

SEQ ID NO: 769867 - RNA, 19 nt, Human
gggcagucagccagcaggg

SEQ ID NO: 769868 - RNA, 20 nt, Human
gggccgagaccggccgggca

SEQ ID NO: 769869 - RNA, 19 nt, Human
ggucagaugucgaugcccu

SEQ ID NO: 769870 - RNA, 23 nt, Human
guccgcccucaggccgccccucc

SEQ ID NO: 769871 - RNA, 18 nt, Human
gucuccagcgugauguug

SEQ ID NO: 769872 - RNA, 18 nt, Human
uaaaaagcaaaucagcaa

SEQ ID NO: 769873 - RNA, 23 nt, Human
uaagcuuccccaaguucuggcac

SEQ ID NO: 769874 - RNA, 23 nt, Human
uagcacauuccugggaaucugca

SEQ ID NO: 769875 - RNA, 23 nt, Human
ucaaaauaagcggcaccagcccu

SEQ ID NO: 769876 - RNA, 26 nt, Human
ucacaaugccauugacugccuccccg

SEQ ID NO: 769877 - RNA, 19 nt, Human
ucaguccagggaggccuca

SEQ ID NO: 769878 - RNA, 23 nt, Human
ucagugccacauccucauacaug

SEQ ID NO: 769879 - RNA, 19 nt, Human
uccacagagcaacagcguc

SEQ ID NO: 769880 - RNA, 20 nt, Human
uccagugguguaggagguga

SEQ ID NO: 769881 - RNA, 24 nt, Human
ucccaaaugaagacauuuuugaag

SEQ ID NO: 769882 - RNA, 20 nt, Human
ucccgccgccgccgcuaccg

SEQ ID NO: 769883 - RNA, 23 nt, Human
ucccuuugauuggagcauggggc

SEQ ID NO: 769884 - RNA, 19 nt, Human
uccugcugcuggcuggugc

SEQ ID NO: 769885 - RNA, 20 nt, Human
uccugcugcuggcuggugcu

SEQ ID NO: 769886 - RNA, 18 nt, Human
uccuggaucugcccagug

SEQ ID NO: 769887 - RNA, 20 nt, Human
ucucauccaccucaggcugg

SEQ ID NO: 769888 - RNA, 21 nt, Human
ucugcccaguguucagcuugg

SEQ ID NO: 769889 - RNA, 22 nt, Human
ugaaagacaggaggugauagag

SEQ ID NO: 769890 - RNA, 20 nt, Human
ugaagacauuuuugaagagc

SEQ ID NO: 769891 - RNA, 22 nt, Human
ugacggggcgggggggcaccgg

SEQ ID NO: 769892 - RNA, 22 nt, Human
ugaucagugccacauccucaua

SEQ ID NO: 769893 - RNA, 25 nt, Human
ugccacauccucauacaugugugca

SEQ ID NO: 769894 - RNA, 21 nt, Human
ugccauccuugccgauguucc

SEQ ID NO: 769895 - RNA, 19 nt, Human
uggacuccuggaucugccc

SEQ ID NO: 769896 - RNA, 21 nt, Human
uggacuccuggaucugcccag

SEQ ID NO: 769897 - RNA, 22 nt, Human
uggcucccaagcacaccagcau

SEQ ID NO: 769898 - RNA, 20 nt, Human
ugggugagaugguaacaagc

SEQ ID NO: 769899 - RNA, 22 nt, Human
ugggugagaugguaacaagccu

SEQ ID NO: 769900 - RNA, 26 nt, Human
uguugauugcagugacaaaucggcag

SEQ ID NO: 769901 - RNA, 18 nt, Human
uuccagcauguggccacg

SEQ ID NO: 769902 - RNA, 21 nt, Human
uucccgcgcagcacaccugug

SEQ ID NO: 769903 - RNA, 19 nt, Human
uuccucagggacuacuuca

SEQ ID NO: 769904 - RNA, 18 nt, Human
uuccugggaaucugcaug

SEQ ID NO: 769905 - RNA, 18 nt, Human
uugaaagacaggagguga

SEQ ID NO: 769906 - RNA, 18 nt, Human
aaaaaaaacgaaaagguc

SEQ ID NO: 769907 - RNA, 21 nt, Human
aaaaaaggucacgaggucaga

SEQ ID NO: 769908 - RNA, 19 nt, Human
aggcauacaagguagaaau

SEQ ID NO: 769909 - RNA, 21 nt, Human
caaaaaaggucacgaggucag

SEQ ID NO: 769910 - RNA, 18 nt, Human
caaguugaaaaaaaaaac

SEQ ID NO: 769911 - RNA, 19 nt, Human
cucugucggccauuuuggc

SEQ ID NO: 769912 - RNA, 19 nt, Human
gaaaaaaaaaacgaaaagg

SEQ ID NO: 769913 - RNA, 22 nt, Human
uaaauccagcaaauugaggcau

SEQ ID NO: 769914 - RNA, 22 nt, Human
uaucuguuuuuuuguauuuuaa

SEQ ID NO: 769915 - RNA, 19 nt, Human
ucaaguuagugcugcugcu

SEQ ID NO: 769916 - RNA, 23 nt, Human
ucacgaggucagaguugaaaguu

SEQ ID NO: 769917 - RNA, 23 nt, Human
ucucucacacacucucccucuug

SEQ ID NO: 769918 - RNA, 22 nt, Human
ucuuuuugucuaucuguuuuuu

SEQ ID NO: 769919 - RNA, 22 nt, Human
uuuaaauauucagaaaccagca

SEQ ID NO: 769920 - RNA, 24 nt, Human
uuuuugucuaucuguuuuuuugua

SEQ ID NO: 769921 - RNA, 19 nt, Human
aacugaaaaaucaaaucug

SEQ ID NO: 769922 - RNA, 21 nt, Human
acuguucacccuccccauguc

SEQ ID NO: 769923 - RNA, 18 nt, Human
cacucugcagccuuccuc

SEQ ID NO: 769924 - RNA, 23 nt, Human
cagccccgucaagcagagggagg

SEQ ID NO: 769925 - RNA, 19 nt, Human
caggucacuucugcggccu

SEQ ID NO: 769926 - RNA, 20 nt, Human
caugucuguuuccuccguca

SEQ ID NO: 769927 - RNA, 23 nt, Human
ccaccccccacagccuccaaccu

SEQ ID NO: 769928 - RNA, 26 nt, Human
ccagcaaccuucucccuccguucucc

SEQ ID NO: 769929 - RNA, 19 nt, Human
ccccacagccuccaaccua

SEQ ID NO: 769930 - RNA, 19 nt, Human
cccccgcugccggcuccuc

SEQ ID NO: 769931 - RNA, 18 nt, Human
cccggccaccccccacag

SEQ ID NO: 769932 - RNA, 20 nt, Human
ccgcccccgcugccggcucc

SEQ ID NO: 769933 - RNA, 23 nt, Human
ccggccagcaaccuucucccucc

SEQ ID NO: 769934 - RNA, 28 nt, Human
ccucacaguuacagccgcccccgcugcc

SEQ ID NO: 769935 - RNA, 24 nt, Human
cgccacucugcagccuuccucaca

SEQ ID NO: 769936 - RNA, 21 nt, Human
cucccuccguucuccagcagc

SEQ ID NO: 769937 - RNA, 19 nt, Human
cugcagccuuccucacagu

SEQ ID NO: 769938 - RNA, 24 nt, Human
cugcagccuuccucacaguuacag

SEQ ID NO: 769939 - RNA, 19 nt, Human
gacuacggacgcccuagac

SEQ ID NO: 769940 - RNA, 19 nt, Human
gacuacggacgcccuagac

SEQ ID NO: 769941 - RNA, 24 nt, Human
gagcuggcgcccggccacccccca

SEQ ID NO: 769942 - RNA, 22 nt, Human
gggccucgccaucuuggcaccg

SEQ ID NO: 769943 - RNA, 19 nt, Human
gggcuucacggaggccggg

SEQ ID NO: 769944 - RNA, 19 nt, Human
ucaaaucugcuuuucacac

SEQ ID NO: 769945 - RNA, 18 nt, Human
ucacugcugcugcacugu

SEQ ID NO: 769946 - RNA, 19 nt, Human
uccuccgucacugcugcug

SEQ ID NO: 769947 - RNA, 20 nt, Human
uccuccgucacugcugcugc

SEQ ID NO: 769948 - RNA, 22 nt, Human
uccuccgucacugcugcugcac

SEQ ID NO: 769949 - RNA, 23 nt, Human
ucucuagaccuggggcuucacgg

SEQ ID NO: 769950 - RNA, 19 nt, Human
ucugcagccuuccucacag

SEQ ID NO: 769951 - RNA, 23 nt, Human
ucuguuuccuccgucacugcugc

SEQ ID NO: 769952 - RNA, 21 nt, Human
ugcggccugggagcuggcgcc

SEQ ID NO: 769953 - RNA, 19 nt, Human
uggcaccgccccgcggcaa

SEQ ID NO: 769954 - RNA, 18 nt, Human
uggcgcccggccaccccc

SEQ ID NO: 769955 - RNA, 21 nt, Human
ugucuguuuccuccgucacug

SEQ ID NO: 769956 - RNA, 28 nt, Human
uuccuccgucacugcugcugcacuguaa

SEQ ID NO: 769957 - RNA, 24 nt, Human
uugggccucgccaucuuggcaccg

SEQ ID NO: 769958 - RNA, 20 nt, Human
aaaauaggguuccauuaaaa

SEQ ID NO: 769959 - RNA, 24 nt, Human
aaauagaccuaugacacccagagu

SEQ ID NO: 769960 - RNA, 21 nt, Human
acaaaaacuugccgcauugaa

SEQ ID NO: 769961 - RNA, 20 nt, Human
acuauaaacaugaagaccgu

SEQ ID NO: 769962 - RNA, 23 nt, Human
agugguaguggucuccuuuaugu

SEQ ID NO: 769963 - RNA, 21 nt, Human
aguuguaggguuugcaaauuu

SEQ ID NO: 769964 - RNA, 22 nt, Human
auuccacaaaccgucuccaucc

SEQ ID NO: 769965 - RNA, 22 nt, Human
caaugggcugcaauauuugcaa

SEQ ID NO: 769966 - RNA, 18 nt, Human
cacuuuauguaaaagggu

SEQ ID NO: 769967 - RNA, 20 nt, Human
caggaauuucuaccccagug

SEQ ID NO: 769968 - RNA, 19 nt, Human
ccccacgaggcggcccaga

SEQ ID NO: 769969 - RNA, 18 nt, Human
ccccggggucgccgccgg

SEQ ID NO: 769970 - RNA, 19 nt, Human
ccccggggucgccgccggg

SEQ ID NO: 769971 - RNA, 21 nt, Human
ccccggggucgccgccgggcg

SEQ ID NO: 769972 - RNA, 22 nt, Human
ccgggcgcccccucccucccca

SEQ ID NO: 769973 - RNA, 24 nt, Human
ccuuuauguacauaaugcagaagu

SEQ ID NO: 769974 - RNA, 18 nt, Human
cgcccccucccuccccac

SEQ ID NO: 769975 - RNA, 20 nt, Human
cuuaaaauagaccuaugaca

SEQ ID NO: 769976 - RNA, 21 nt, Human
cuuaaaauuccacaaaccguc

SEQ ID NO: 769977 - RNA, 18 nt, Human
cuuaaccaggaaaauguu

SEQ ID NO: 769978 - RNA, 23 nt, Human
cuuaacggucacgcauaugaaac

SEQ ID NO: 769979 - RNA, 24 nt, Human
gcaaaaguuuacuacaaugagcac

SEQ ID NO: 769980 - RNA, 24 nt, Human
uaaaaggguacagguagaaaagua

SEQ ID NO: 769981 - RNA, 23 nt, Human
uaaacaugaagaccguacuuauc

SEQ ID NO: 769982 - RNA, 24 nt, Human
uaauaaaagaucuuucugaaauuu

SEQ ID NO: 769983 - RNA, 21 nt, Human
uaauuuauuuuaacuucauuu

SEQ ID NO: 769984 - RNA, 22 nt, Human
uaccuucaaaucuacaaagcaa

SEQ ID NO: 769985 - RNA, 22 nt, Human
uaggcaggaaaaaaagcguguu

SEQ ID NO: 769986 - RNA, 22 nt, Human
uauaaaauaggguuccauuaaa

SEQ ID NO: 769987 - RNA, 21 nt, Human
uauguacauaaugcagaagug

SEQ ID NO: 769988 - RNA, 21 nt, Human
uccacaaaccgucuccaucca

SEQ ID NO: 769989 - RNA, 22 nt, Human
ugcuauuugaaaaaagcucugu

SEQ ID NO: 769990 - RNA, 19 nt, Human
uggacuauaaacaugaaga

SEQ ID NO: 769991 - RNA, 18 nt, Human
uugcaaauuuggacuaua

SEQ ID NO: 769992 - RNA, 20 nt, Human
uuguguuuuaggcaggaaaa

SEQ ID NO: 769993 - RNA, 21 nt, Human
uuuaacuuuuuuauaugaaua

SEQ ID NO: 769994 - RNA, 23 nt, Human
aaaaaaagaaaaaaacccccaaa

SEQ ID NO: 769995 - RNA, 21 nt, Human
aaaaaacaaaaccccagaaaa

SEQ ID NO: 769996 - RNA, 21 nt, Human
aaaaaggcauuauuugagacu

SEQ ID NO: 769997 - RNA, 31 nt, Human
aaacauucuagaauaacaucauuaaaaacag

SEQ ID NO: 769998 - RNA, 23 nt, Human
aaaccuccugccacaccccuuaa

SEQ ID NO: 769999 - RNA, 18 nt, Human
aacacugcucacuuugau

SEQ ID NO: 770000 - RNA, 22 nt, Human
aacucaucgaguccaaaaccuc

SEQ ID NO: 770001 - RNA, 21 nt, Human
aagaaaaaaacccccaaauca

SEQ ID NO: 770002 - RNA, 22 nt, Human
aaggcuccucuauccagcacca

SEQ ID NO: 770003 - RNA, 21 nt, Human
aauauggcuguuaauuucugu

SEQ ID NO: 770004 - RNA, 24 nt, Human
acaaaaccccagaaaauugcaaag

SEQ ID NO: 770005 - RNA, 20 nt, Human
acaccccuuaaaaccccaga

SEQ ID NO: 770006 - RNA, 19 nt, Human
agaaccucugcucucugcu

SEQ ID NO: 770007 - RNA, 23 nt, Human
agaccacaaccaaaacacagcac

SEQ ID NO: 770008 - RNA, 25 nt, Human
agaccacaaccaaaacacagcacca

SEQ ID NO: 770009 - RNA, 19 nt, Human
agcaaaaaaaccgcaucug

SEQ ID NO: 770010 - RNA, 20 nt, Human
agcaaaaaaaccgcaucuga

SEQ ID NO: 770011 - RNA, 24 nt, Human
agcaccaguuaucuucaguucuuu

SEQ ID NO: 770012 - RNA, 19 nt, Human
aggagggucggucaguguu

SEQ ID NO: 770013 - RNA, 19 nt, Human
agggagcaaaaaaaccgca

SEQ ID NO: 770014 - RNA, 23 nt, Human
agguaaaaaacaaaaccccagaa

SEQ ID NO: 770015 - RNA, 26 nt, Human
aguggcacaguucuagguacucacug

SEQ ID NO: 770016 - RNA, 19 nt, Human
auauauguauauauauaua

SEQ ID NO: 770017 - RNA, 21 nt, Human
auaugcacucaaaaaaauggg

SEQ ID NO: 770018 - RNA, 19 nt, Human
auauguauauauauauaua

SEQ ID NO: 770019 - RNA, 20 nt, Human
auauguauauauauauauau

SEQ ID NO: 770020 - RNA, 18 nt, Human
auguauauauauauauau

SEQ ID NO: 770021 - RNA, 19 nt, Human
auguauauauauauauaua

SEQ ID NO: 770022 - RNA, 20 nt, Human
auguauauauauauauauaa

SEQ ID NO: 770023 - RNA, 25 nt, Human
auucaaauuauauauauauauguau

SEQ ID NO: 770024 - RNA, 23 nt, Human
caaaaccccagaaaauugcaaag

SEQ ID NO: 770025 - RNA, 25 nt, Human
caaaaccccagaaaauugcaaaggg

SEQ ID NO: 770026 - RNA, 21 nt, Human
caaaguugacagcacagcuaa

SEQ ID NO: 770027 - RNA, 20 nt, Human
caacacaguaaaccgggaua

SEQ ID NO: 770028 - RNA, 23 nt, Human
caaugccaacucaacacaguaaa

SEQ ID NO: 770029 - RNA, 21 nt, Human
cacacuccauuuaaaaaaaag

SEQ ID NO: 770030 - RNA, 21 nt, Human
cacagcaccauuucaaauaga

SEQ ID NO: 770031 - RNA, 20 nt, Human
cacaggccauuuugccccuu

SEQ ID NO: 770032 - RNA, 25 nt, Human
caccccuuaaaaccccaguccuuaa

SEQ ID NO: 770033 - RNA, 18 nt, Human
cacuacuacguaucauaa

SEQ ID NO: 770034 - RNA, 19 nt, Human
cagcacagcuaaaguuucc

SEQ ID NO: 770035 - RNA, 20 nt, Human
caguggcaggggcugacugg

SEQ ID NO: 770036 - RNA, 23 nt, Human
cauaagggagcaaaaaaaccgca

SEQ ID NO: 770037 - RNA, 18 nt, Human
caucacacuguucaggcu

SEQ ID NO: 770038 - RNA, 21 nt, Human
ccaaaaccuccugccacaccc

SEQ ID NO: 770039 - RNA, 25 nt, Human
ccacaaccaaaacacagcaccauuu

SEQ ID NO: 770040 - RNA, 18 nt, Human
ccagcauuaucugacuua

SEQ ID NO: 770041 - RNA, 24 nt, Human
ccagcauuaucugacuuaauucuc

SEQ ID NO: 770042 - RNA, 21 nt, Human
cccccaaaucaugggauucau

SEQ ID NO: 770043 - RNA, 23 nt, Human
cccuuaaaaccccaguccuuaag

SEQ ID NO: 770044 - RNA, 18 nt, Human
ccgccccccucccaaucc

SEQ ID NO: 770045 - RNA, 23 nt, Human
ccuccaagccuacaaaugccaua

SEQ ID NO: 770046 - RNA, 24 nt, Human
ccuccugccacaccccuuaaaacc

SEQ ID NO: 770047 - RNA, 18 nt, Human
ccuguacaaauggaaaaa

SEQ ID NO: 770048 - RNA, 23 nt, Human
cuccugccacaccccuuaaaacc

SEQ ID NO: 770049 - RNA, 23 nt, Human
cugguauaaaaaaaaaaagaaaa

SEQ ID NO: 770050 - RNA, 24 nt, Human
cugguauaaaaaaaaaaagaaaaa

SEQ ID NO: 770051 - RNA, 21 nt, Human
cuuaaaaccccaguccuuaag

SEQ ID NO: 770052 - RNA, 24 nt, Human
gaaaaaaacccccaaaucauggga

SEQ ID NO: 770053 - RNA, 18 nt, Human
gaagaaggggacaucagu

SEQ ID NO: 770054 - RNA, 22 nt, Human
gcaagcugccauaauaaaaaau

SEQ ID NO: 770055 - RNA, 18 nt, Human
gcacucaaaaaaaugggu

SEQ ID NO: 770056 - RNA, 20 nt, Human
ggcuuuucuucuacuuuuuc

SEQ ID NO: 770057 - RNA, 24 nt, Human
gggaaaaagguaaaaaacaaaacc

SEQ ID NO: 770058 - RNA, 20 nt, Human
gguaaaaaacaaaaccccag

SEQ ID NO: 770059 - RNA, 23 nt, Human
gguggaaacucaucgaguccaaa

SEQ ID NO: 770060 - RNA, 21 nt, Human
guauauauauauauauauuua

SEQ ID NO: 770061 - RNA, 24 nt, Human
guuugcucuguugcuguucagaga

SEQ ID NO: 770062 - RNA, 21 nt, Human
uaaacaccagcuaaaaacugg

SEQ ID NO: 770063 - RNA, 23 nt, Human
uaauaaaaaauaaggcuccucua

SEQ ID NO: 770064 - RNA, 20 nt, Human
uacaagcuugcaaagccucg

SEQ ID NO: 770065 - RNA, 18 nt, Human
uaccuccaagccuacaaa

SEQ ID NO: 770066 - RNA, 23 nt, Human
uagagaauacuuuauuaguuucu

SEQ ID NO: 770067 - RNA, 22 nt, Human
uagcaguauguuaugcaucaau

SEQ ID NO: 770068 - RNA, 22 nt, Human
uagccuuuaagauuuuguuucu

SEQ ID NO: 770069 - RNA, 21 nt, Human
uaguagcugggaccaucacac

SEQ ID NO: 770070 - RNA, 21 nt, Human
uaguagguacaagcuugcaaa

SEQ ID NO: 770071 - RNA, 23 nt, Human
uauaaaaaaaaaaagaaaaaaac

SEQ ID NO: 770072 - RNA, 19 nt, Human
uauaaaaagaccaauagca

SEQ ID NO: 770073 - RNA, 18 nt, Human
uauauauauauguauaua

SEQ ID NO: 770074 - RNA, 20 nt, Human
uauauauauguauauauaua

SEQ ID NO: 770075 - RNA, 23 nt, Human
uauauauauguauauauauauau

SEQ ID NO: 770076 - RNA, 18 nt, Human
uauauguauauauauaua

SEQ ID NO: 770077 - RNA, 18 nt, Human
uauccgaagaacauaagg

SEQ ID NO: 770078 - RNA, 19 nt, Human
uaucugacuuaauucucca

SEQ ID NO: 770079 - RNA, 18 nt, Human
uauguauauauauauaua

SEQ ID NO: 770080 - RNA, 19 nt, Human
uauguauauauauauauau

SEQ ID NO: 770081 - RNA, 24 nt, Human
uauguauauauauauauauauuua

SEQ ID NO: 770082 - RNA, 21 nt, Human
ucacugguacagcagcugugu

SEQ ID NO: 770083 - RNA, 22 nt, Human
uccaaaaccuccugccacaccc

SEQ ID NO: 770084 - RNA, 21 nt, Human
ucccgccccccucccaauccc

SEQ ID NO: 770085 - RNA, 19 nt, Human
ucgguggaaacucaucgag

SEQ ID NO: 770086 - RNA, 24 nt, Human
ucuauccagcaccaguuaucuuca

SEQ ID NO: 770087 - RNA, 22 nt, Human
ucuccauguuuucccgcccccc

SEQ ID NO: 770088 - RNA, 19 nt, Human
ucugauaaagcacggucac

SEQ ID NO: 770089 - RNA, 22 nt, Human
ucugauaaagcacggucacuac

SEQ ID NO: 770090 - RNA, 18 nt, Human
ugaaucaucaucuggaaa

SEQ ID NO: 770091 - RNA, 18 nt, Human
ugacuggaacugcuucug

SEQ ID NO: 770092 - RNA, 24 nt, Human
ugauaaagcacggucacuacuacg

SEQ ID NO: 770093 - RNA, 22 nt, Human
ugcacucaaaaaaaugggugca

SEQ ID NO: 770094 - RNA, 19 nt, Human
ugccacaccccuuaaaacc

SEQ ID NO: 770095 - RNA, 23 nt, Human
ugccuggggugcaaacuguguag

SEQ ID NO: 770096 - RNA, 22 nt, Human
ugggugcauacauuuauauaua

SEQ ID NO: 770097 - RNA, 18 nt, Human
uguauauauauauauaua

SEQ ID NO: 770098 - RNA, 20 nt, Human
uguuuucccgccccccuccc

SEQ ID NO: 770099 - RNA, 23 nt, Human
uuaaaaacagcucugauaaagca

SEQ ID NO: 770100 - RNA, 21 nt, Human
uuaucugacuuaauucuccau

SEQ ID NO: 770101 - RNA, 20 nt, Human
uucaaauuauauauauauau

SEQ ID NO: 770102 - RNA, 23 nt, Human
uucaaauuauauauauauaugua

SEQ ID NO: 770103 - RNA, 20 nt, Human
uucacagagguaugauacag

SEQ ID NO: 770104 - RNA, 21 nt, Human
uuccagguucugcagucaucu

SEQ ID NO: 770105 - RNA, 19 nt, Human
uugauucuacuuuuccagc

SEQ ID NO: 770106 - RNA, 20 nt, Human
uugcucuguugcuguucaga

SEQ ID NO: 770107 - RNA, 21 nt, Human
uugguggcuauggagggugca

SEQ ID NO: 770108 - RNA, 23 nt, Human
uuuccagguucugcagucaucug

SEQ ID NO: 770109 - RNA, 20 nt, Human
uuucuagaccaauauggcug

SEQ ID NO: 770110 - RNA, 23 nt, Human
uuuucccgccccccucccaaucc

SEQ ID NO: 770111 - RNA, 19 nt, Human
aaaccaaugugaaucccau

SEQ ID NO: 770112 - RNA, 23 nt, Human
aaauauccacauccccaaauccu

SEQ ID NO: 770113 - RNA, 19 nt, Human
aaccaaugugaaucccaug

SEQ ID NO: 770114 - RNA, 22 nt, Human
aaccaaugugaaucccauggaa

SEQ ID NO: 770115 - RNA, 20 nt, Human
aagacuuuggguucuccaug

SEQ ID NO: 770116 - RNA, 21 nt, Human
aaggcccccuggagauggggg

SEQ ID NO: 770117 - RNA, 19 nt, Human
aaggggcaggccugggcca

SEQ ID NO: 770118 - RNA, 20 nt, Human
aaugaaugaacaaaaacugc

SEQ ID NO: 770119 - RNA, 18 nt, Human
acaugggaaaaaugaggu

SEQ ID NO: 770120 - RNA, 22 nt, Human
accacaggaaaucauugguaac

SEQ ID NO: 770121 - RNA, 24 nt, Human
accagacucagcccucacagcagc

SEQ ID NO: 770122 - RNA, 22 nt, Human
acugggcagggggcgggggagg

SEQ ID NO: 770123 - RNA, 19 nt, Human
agaacacaggcgcugggcc

SEQ ID NO: 770124 - RNA, 19 nt, Human
agacccccaacccugcccc

SEQ ID NO: 770125 - RNA, 21 nt, Human
agacccccaacccugccccac

SEQ ID NO: 770126 - RNA, 19 nt, Human
agagggagaggagauuggg

SEQ ID NO: 770127 - RNA, 20 nt, Human
agcaggaaaaggagggaccu

SEQ ID NO: 770128 - RNA, 22 nt, Human
agcaggaaaaggagggaccuga

SEQ ID NO: 770129 - RNA, 19 nt, Human
agcggaccccuggcacuca

SEQ ID NO: 770130 - RNA, 21 nt, Human
aggaggggggauucagcccug

SEQ ID NO: 770131 - RNA, 25 nt, Human
aggcaggagcgaaggggcaggccug

SEQ ID NO: 770132 - RNA, 20 nt, Human
aggcccucagggagcgggag

SEQ ID NO: 770133 - RNA, 19 nt, Human
aggcgccaggggcugccug

SEQ ID NO: 770134 - RNA, 25 nt, Human
agggaccugagggugcacaggaggg

SEQ ID NO: 770135 - RNA, 23 nt, Human
agggggcgggggagggggggggu

SEQ ID NO: 770136 - RNA, 21 nt, Human
agugcauggcaguuaucagcu

SEQ ID NO: 770137 - RNA, 21 nt, Human
agugccagcaggaaaaggagg

SEQ ID NO: 770138 - RNA, 19 nt, Human
aucagcaacaauauuaaaa

SEQ ID NO: 770139 - RNA, 21 nt, Human
caaauccuacacgugauuuug

SEQ ID NO: 770140 - RNA, 24 nt, Human
caacccuuuggccgcccggccaca

SEQ ID NO: 770141 - RNA, 22 nt, Human
caaggucggcggaucacaaaca

SEQ ID NO: 770142 - RNA, 23 nt, Human
cacacgcaugcaugcaggccggc

SEQ ID NO: 770143 - RNA, 20 nt, Human
cacagccuuccuggucccca

SEQ ID NO: 770144 - RNA, 26 nt, Human
cacagccuuccugguccccauccucc

SEQ ID NO: 770145 - RNA, 18 nt, Human
caccgggaacacagggcu

SEQ ID NO: 770146 - RNA, 20 nt, Human
cacguugacuccuuuguucc

SEQ ID NO: 770147 - RNA, 19 nt, Human
cacugcuauaaauauagaa

SEQ ID NO: 770148 - RNA, 19 nt, Human
cagaacacaggcgcugggc

SEQ ID NO: 770149 - RNA, 19 nt, Human
cagaacuuggaggacaggg

SEQ ID NO: 770150 - RNA, 26 nt, Human
cagacccccaacccugccccacgacc

SEQ ID NO: 770151 - RNA, 20 nt, Human
cagcaggaaaaggagggacc

SEQ ID NO: 770152 - RNA, 22 nt, Human
cagcaugaccgugcucggcccc

SEQ ID NO: 770153 - RNA, 18 nt, Human
cagccaacacagagccag

SEQ ID NO: 770154 - RNA, 18 nt, Human
cagccagggcugggggaa

SEQ ID NO: 770155 - RNA, 24 nt, Human
cagcugccugaguucacuguucgg

SEQ ID NO: 770156 - RNA, 18 nt, Human
cagggccacugcgaggag

SEQ ID NO: 770157 - RNA, 22 nt, Human
cauccccaaauccuacacguga

SEQ ID NO: 770158 - RNA, 21 nt, Human
ccaaaauuacauauauuucua

SEQ ID NO: 770159 - RNA, 21 nt, Human
ccaacccugccccacgaccgc

SEQ ID NO: 770160 - RNA, 24 nt, Human
ccaaggaucuccaccggccccacu

SEQ ID NO: 770161 - RNA, 21 nt, Human
ccagacccuacagcggccucc

SEQ ID NO: 770162 - RNA, 23 nt, Human
ccagagcuucaggcaggguucuc

SEQ ID NO: 770163 - RNA, 21 nt, Human
ccaggggcugccugcuaggau

SEQ ID NO: 770164 - RNA, 19 nt, Human
ccauggaauggaaaaaacc

SEQ ID NO: 770165 - RNA, 26 nt, Human
cccaacccugccccacgaccgccggc

SEQ ID NO: 770166 - RNA, 23 nt, Human
cccacacgcaguucguucagggc

SEQ ID NO: 770167 - RNA, 23 nt, Human
cccacugagggagcggaccccug

SEQ ID NO: 770168 - RNA, 28 nt, Human
cccagcccggcacacgcaugcaugcagu

SEQ ID NO: 770169 - RNA, 20 nt, Human
cccauggaauggaaaaaacc

SEQ ID NO: 770170 - RNA, 18 nt, Human
ccccagcuggguauagga

SEQ ID NO: 770171 - RNA, 20 nt, Human
cccccggguccgggggcagc

SEQ ID NO: 770172 - RNA, 21 nt, Human
cccccuggagauggggguccc

SEQ ID NO: 770173 - RNA, 21 nt, Human
ccccggguccgggggcagccc

SEQ ID NO: 770174 - RNA, 23 nt, Human
ccccguauggcccaagccccuca

SEQ ID NO: 770175 - RNA, 24 nt, Human
ccccuagggaaccagacucagccc

SEQ ID NO: 770176 - RNA, 21 nt, Human
ccggccccacacgcaguucgu

SEQ ID NO: 770177 - RNA, 23 nt, Human
ccgggggcagcccggcuccuucc

SEQ ID NO: 770178 - RNA, 23 nt, Human
ccuacagcggccuccuccagaac

SEQ ID NO: 770179 - RNA, 22 nt, Human
ccucacagcagccaacacagag

SEQ ID NO: 770180 - RNA, 18 nt, Human
ccuccccacccccggguc

SEQ ID NO: 770181 - RNA, 19 nt, Human
ccuccccauccucccuggg

SEQ ID NO: 770182 - RNA, 23 nt, Human
ccugcuaggaugugccggcccca

SEQ ID NO: 770183 - RNA, 22 nt, Human
cggaacaaugugcuccccuccc

SEQ ID NO: 770184 - RNA, 23 nt, Human
cggcacacgcaugcaugcaggcc

SEQ ID NO: 770185 - RNA, 24 nt, Human
cgggaacacagggcucccucuccc

SEQ ID NO: 770186 - RNA, 23 nt, Human
cucacaacccuuuggccgcccgg

SEQ ID NO: 770187 - RNA, 23 nt, Human
cuccccuccccacccccgggucc

SEQ ID NO: 770188 - RNA, 19 nt, Human
cuccucgcugggcugaccc

SEQ ID NO: 770189 - RNA, 19 nt, Human
cuccugggacuuccuugga

SEQ ID NO: 770190 - RNA, 23 nt, Human
cucggcccaggcccucagggagc

SEQ ID NO: 770191 - RNA, 24 nt, Human
cugaaaucagcaacaauauuaaaa

SEQ ID NO: 770192 - RNA, 22 nt, Human
cuggcaccagcucuggaaaugc

SEQ ID NO: 770193 - RNA, 18 nt, Human
cuguuuccgccugcccca

SEQ ID NO: 770194 - RNA, 18 nt, Human
gaaccagacucagcccuc

SEQ ID NO: 770195 - RNA, 22 nt, Human
gacagggaucaggcugggaagg

SEQ ID NO: 770196 - RNA, 23 nt, Human
gacucacaacccuuuggccgccc

SEQ ID NO: 770197 - RNA, 22 nt, Human
gacucagcccucacagcagcca

SEQ ID NO: 770198 - RNA, 20 nt, Human
gcagcccggcuccuuccggg

SEQ ID NO: 770199 - RNA, 21 nt, Human
gcagcggaauguaacaaaccc

SEQ ID NO: 770200 - RNA, 24 nt, Human
gcagcuccguggcgggcgggcggg

SEQ ID NO: 770201 - RNA, 22 nt, Human
gcagggggcgggggaggggggg

SEQ ID NO: 770202 - RNA, 23 nt, Human
gcagggggcgggggagggggggg

SEQ ID NO: 770203 - RNA, 18 nt, Human
gcagggggguggaggggc

SEQ ID NO: 770204 - RNA, 18 nt, Human
gcaguucguucagggcag

SEQ ID NO: 770205 - RNA, 18 nt, Human
gccaccugggcagagggc

SEQ ID NO: 770206 - RNA, 22 nt, Human
gcccugaaaagcgucggguccc

SEQ ID NO: 770207 - RNA, 20 nt, Human
gcggaacaaugugcuccccu

SEQ ID NO: 770208 - RNA, 19 nt, Human
gcggaauguaacaaacccc

SEQ ID NO: 770209 - RNA, 18 nt, Human
gcucagccagacccuaca

SEQ ID NO: 770210 - RNA, 18 nt, Human
gcuccccuccccaccccc

SEQ ID NO: 770211 - RNA, 20 nt, Human
gcuccguggcgggcgggcgg

SEQ ID NO: 770212 - RNA, 22 nt, Human
gcugccugaguucacuguucgg

SEQ ID NO: 770213 - RNA, 19 nt, Human
ggaaccagacucagcccuc

SEQ ID NO: 770214 - RNA, 19 nt, Human
ggacaagaaaggauuggga

SEQ ID NO: 770215 - RNA, 20 nt, Human
ggacagggaucaggcuggga

SEQ ID NO: 770216 - RNA, 23 nt, Human
ggaccccuggcacucagugccag

SEQ ID NO: 770217 - RNA, 26 nt, Human
ggagaggagauugggcacgggucugg

SEQ ID NO: 770218 - RNA, 24 nt, Human
ggagccagggccacugcgaggaga

SEQ ID NO: 770219 - RNA, 23 nt, Human
ggagcgaaggggcaggccugggc

SEQ ID NO: 770220 - RNA, 18 nt, Human
ggcagcaaccccagcugg

SEQ ID NO: 770221 - RNA, 22 nt, Human
ggcagggggcgggggagggggg

SEQ ID NO: 770222 - RNA, 18 nt, Human
ggcaggguucucccgggc

SEQ ID NO: 770223 - RNA, 18 nt, Human
ggcccagccagggcuggg

SEQ ID NO: 770224 - RNA, 21 nt, Human
ggcgggaggugggagccaggg

SEQ ID NO: 770225 - RNA, 18 nt, Human
ggcgggcgggcaggcaga

SEQ ID NO: 770226 - RNA, 19 nt, Human
ggcgggcgggcaggcagac

SEQ ID NO: 770227 - RNA, 19 nt, Human
ggcgggcgggcgggcaggc

SEQ ID NO: 770228 - RNA, 18 nt, Human
ggcgggggaggggggggg

SEQ ID NO: 770229 - RNA, 20 nt, Human
gggcagcaaccccagcuggg

SEQ ID NO: 770230 - RNA, 20 nt, Human
gggcagggggguggaggggc

SEQ ID NO: 770231 - RNA, 23 nt, Human
gggcagggggguggaggggcugg

SEQ ID NO: 770232 - RNA, 19 nt, Human
gggcgggggaggggggggg

SEQ ID NO: 770233 - RNA, 19 nt, Human
ggggucgggaagggagggg

SEQ ID NO: 770234 - RNA, 22 nt, Human
ggggucgggaagggagggguug

SEQ ID NO: 770235 - RNA, 19 nt, Human
gugugcaguacagugcaug

SEQ ID NO: 770236 - RNA, 23 nt, Human
uaagagcucccgcccugcggaac

SEQ ID NO: 770237 - RNA, 24 nt, Human
uacauauauuucuacauauauaug

SEQ ID NO: 770238 - RNA, 23 nt, Human
uagcaaggucggcggaucacaaa

SEQ ID NO: 770239 - RNA, 20 nt, Human
uaggccagaaguugguaaau

SEQ ID NO: 770240 - RNA, 24 nt, Human
ucagccagacccuacagcggccuc

SEQ ID NO: 770241 - RNA, 25 nt, Human
ucagggacacucaggcagcuccgug

SEQ ID NO: 770242 - RNA, 22 nt, Human
ucagggcagcaaccccagcugg

SEQ ID NO: 770243 - RNA, 21 nt, Human
ucagucucucucggcccaggc

SEQ ID NO: 770244 - RNA, 18 nt, Human
ucaugccuaggccagaag

SEQ ID NO: 770245 - RNA, 19 nt, Human
uccagagcuucaggcaggg

SEQ ID NO: 770246 - RNA, 22 nt, Human
uccccaaauccuacacgugauu

SEQ ID NO: 770247 - RNA, 23 nt, Human
uccccauccucccugggccccac

SEQ ID NO: 770248 - RNA, 23 nt, Human
uccccguauggcccaagccccuc

SEQ ID NO: 770249 - RNA, 18 nt, Human
uccccuagggaaccagac

SEQ ID NO: 770250 - RNA, 23 nt, Human
ucccugggccccacccacaaguu

SEQ ID NO: 770251 - RNA, 28 nt, Human
ucccugggccccacccacaaguuuccag

SEQ ID NO: 770252 - RNA, 20 nt, Human
uccgccugccccaggaacug

SEQ ID NO: 770253 - RNA, 24 nt, Human
uccgggggcagcccggcuccuucc

SEQ ID NO: 770254 - RNA, 19 nt, Human
uccuccagaacuuggagga

SEQ ID NO: 770255 - RNA, 21 nt, Human
uccuggggccaaggaucucca

SEQ ID NO: 770256 - RNA, 21 nt, Human
uccugguccccauccuccugg

SEQ ID NO: 770257 - RNA, 21 nt, Human
ucgcugggcugacccuggcac

SEQ ID NO: 770258 - RNA, 20 nt, Human
ucggggucaaggagggggga

SEQ ID NO: 770259 - RNA, 23 nt, Human
ucggggucaaggaggggggauuc

SEQ ID NO: 770260 - RNA, 23 nt, Human
ucucucuuuguuguccgcccgac

SEQ ID NO: 770261 - RNA, 20 nt, Human
ucuggauccuuuaagagcuc

SEQ ID NO: 770262 - RNA, 23 nt, Human
ucuuaaauauccacauccccaaa

SEQ ID NO: 770263 - RNA, 22 nt, Human
ucuuuggagcuuggcaaaugca

SEQ ID NO: 770264 - RNA, 19 nt, Human
ugagcacagacccccaacc

SEQ ID NO: 770265 - RNA, 21 nt, Human
ugagcacagacccccaacccu

SEQ ID NO: 770266 - RNA, 22 nt, Human
ugaggcagcaggcgccaggggc

SEQ ID NO: 770267 - RNA, 21 nt, Human
ugaggguggggcuggaauguu

SEQ ID NO: 770268 - RNA, 21 nt, Human
ugaggguggggcuggaauguu

SEQ ID NO: 770269 - RNA, 18 nt, Human
ugcaaggaacagggcccc

SEQ ID NO: 770270 - RNA, 21 nt, Human
ugccagcaggaaaaggaggga

SEQ ID NO: 770271 - RNA, 18 nt, Human
ugccuaggccagaaguug

SEQ ID NO: 770272 - RNA, 19 nt, Human
uggagauggggguccacag

SEQ ID NO: 770273 - RNA, 24 nt, Human
uggagggagaaaugcccugaaaag

SEQ ID NO: 770274 - RNA, 25 nt, Human
uggcaagcccccaccacaggaaauc

SEQ ID NO: 770275 - RNA, 21 nt, Human
uggcacucagugccagcagga

SEQ ID NO: 770276 - RNA, 20 nt, Human
uggcgggcgggcgggcaggc

SEQ ID NO: 770277 - RNA, 22 nt, Human
uggcgggcgggcgggcaggcag

SEQ ID NO: 770278 - RNA, 18 nt, Human
ugggaccagggaaagugg

SEQ ID NO: 770279 - RNA, 23 nt, Human
ugggacgcccuccagccugaggg

SEQ ID NO: 770280 - RNA, 19 nt, Human
ugggagccagggccacugc

SEQ ID NO: 770281 - RNA, 21 nt, Human
ugggaguugggcccuggcugg

SEQ ID NO: 770282 - RNA, 18 nt, Human
ugggcagagggcacgcca

SEQ ID NO: 770283 - RNA, 23 nt, Human
ugggcagggggcgggggaggggg

SEQ ID NO: 770284 - RNA, 26 nt, Human
ugggcagggggcgggggagggggggg

SEQ ID NO: 770285 - RNA, 21 nt, Human
ugggcccagccagggcugggg

SEQ ID NO: 770286 - RNA, 18 nt, Human
ugggcugacccuggcacc

SEQ ID NO: 770287 - RNA, 20 nt, Human
uggggccaaggaucuccacc

SEQ ID NO: 770288 - RNA, 22 nt, Human
uggggcucaggaaauggcucgu

SEQ ID NO: 770289 - RNA, 22 nt, Human
uggggcuggaauguuguuccug

SEQ ID NO: 770290 - RNA, 20 nt, Human
ugggggugggaccaggcuga

SEQ ID NO: 770291 - RNA, 22 nt, Human
ugugcaaggaacagggccccca

SEQ ID NO: 770292 - RNA, 21 nt, Human
ugugcuccccuccccaccccc

SEQ ID NO: 770293 - RNA, 24 nt, Human
uguguuucccccccaauagcugcu

SEQ ID NO: 770294 - RNA, 18 nt, Human
uguuaaaaauuucaauca

SEQ ID NO: 770295 - RNA, 18 nt, Human
uuaaaaaaaguacaaauc

SEQ ID NO: 770296 - RNA, 23 nt, Human
uucagcccuggggcucaggaaau

SEQ ID NO: 770297 - RNA, 19 nt, Human
uucaugcaaaacaacagag

SEQ ID NO: 770298 - RNA, 20 nt, Human
uucaugcaaaacaacagagg

SEQ ID NO: 770299 - RNA, 19 nt, Human
uuccagagcuucaggcagg

SEQ ID NO: 770300 - RNA, 19 nt, Human
uugguaaauaagagaguaa

SEQ ID NO: 770301 - RNA, 21 nt, Human
uuuccagagcuucaggcaggg

SEQ ID NO: 770302 - RNA, 20 nt, Human
uuuggagcuuggcaaaugca

SEQ ID NO: 770303 - RNA, 26 nt, Human
aaaaaaaaaaaaccaaaacaauaaac

SEQ ID NO: 770304 - RNA, 21 nt, Human
aaaaaacaaaaaaccagccug

SEQ ID NO: 770305 - RNA, 21 nt, Human
aaaaacaucuacuugaccccc

SEQ ID NO: 770306 - RNA, 19 nt, Human
aaaaaccaaaacaauaaac

SEQ ID NO: 770307 - RNA, 22 nt, Human
aaaacaaaacagguuuauugca

SEQ ID NO: 770308 - RNA, 22 nt, Human
aaacaaauuauagcucagagau

SEQ ID NO: 770309 - RNA, 20 nt, Human
aaacaggaaaaacauaaaca

SEQ ID NO: 770310 - RNA, 23 nt, Human
aaaccaaaacaauaaacaggaaa

SEQ ID NO: 770311 - RNA, 20 nt, Human
aaagaacccaucuagcaugu

SEQ ID NO: 770312 - RNA, 27 nt, Human
aaaugcaaaaaaaaaaaaaaaaccaaa

SEQ ID NO: 770313 - RNA, 23 nt, Human
aaaugcugagaagccccugagcu

SEQ ID NO: 770314 - RNA, 20 nt, Human
aacaaaaaacaaaaaaccag

SEQ ID NO: 770315 - RNA, 27 nt, Human
aacaucuacuugacccccuuuuaugac

SEQ ID NO: 770316 - RNA, 20 nt, Human
acaaaaaaccagccuggaga

SEQ ID NO: 770317 - RNA, 26 nt, Human
acaaaaaaccagccuggagaucuaca

SEQ ID NO: 770318 - RNA, 20 nt, Human
acaagaguuccucucuaaac

SEQ ID NO: 770319 - RNA, 18 nt, Human
acagaccaggggcugacc

SEQ ID NO: 770320 - RNA, 22 nt, Human
acagcucauccaaaugacaaau

SEQ ID NO: 770321 - RNA, 23 nt, Human
acaggaaaaacauaaacacugug

SEQ ID NO: 770322 - RNA, 24 nt, Human
accuccaugagaagucuuggaaac

SEQ ID NO: 770323 - RNA, 23 nt, Human
acggugcaauaauuuauugguau

SEQ ID NO: 770324 - RNA, 22 nt, Human
agaaaauaaaccagcucuccac

SEQ ID NO: 770325 - RNA, 19 nt, Human
agaauaaauagucccccuu

SEQ ID NO: 770326 - RNA, 18 nt, Human
agcaggcaacagaggccu

SEQ ID NO: 770327 - RNA, 25 nt, Human
aggaaaaacauaaacacugugcuac

SEQ ID NO: 770328 - RNA, 21 nt, Human
aggcaacagaggccugauguc

SEQ ID NO: 770329 - RNA, 22 nt, Human
auaaacaggaaaaacauaaaca

SEQ ID NO: 770330 - RNA, 30 nt, Human
augcaaaaaaaaaaaaaaaaccaaaacaag

SEQ ID NO: 770331 - RNA, 23 nt, Human
augcaaaaaaaaaaaaaaaaccc

SEQ ID NO: 770332 - RNA, 26 nt, Human
caacaaaaaacaaaaaaccagccugg

SEQ ID NO: 770333 - RNA, 22 nt, Human
caacagcuuugcguuuucuaag

SEQ ID NO: 770334 - RNA, 22 nt, Human
caccuaaugaugaacuuaucuc

SEQ ID NO: 770335 - RNA, 21 nt, Human
cagaaaauaaaccagcucucc

SEQ ID NO: 770336 - RNA, 19 nt, Human
caggaaaaacauaaacacu

SEQ ID NO: 770337 - RNA, 22 nt, Human
caguggcugaggaaauuucugc

SEQ ID NO: 770338 - RNA, 24 nt, Human
caguugccaggggacacucucagu

SEQ ID NO: 770339 - RNA, 21 nt, Human
cauaacuuccaagguacacag

SEQ ID NO: 770340 - RNA, 18 nt, Human
caucaaucuauuaggagu

SEQ ID NO: 770341 - RNA, 24 nt, Human
cauguaauaaauaaucgcuagcca

SEQ ID NO: 770342 - RNA, 23 nt, Human
cauuacaaccccauauucuuuug

SEQ ID NO: 770343 - RNA, 18 nt, Human
ccacaagaguuccucucu

SEQ ID NO: 770344 - RNA, 18 nt, Human
cccccuuuccccagucuu

SEQ ID NO: 770345 - RNA, 23 nt, Human
ccccgcguccucucaagcgccgg

SEQ ID NO: 770346 - RNA, 23 nt, Human
ccucucaagcgccgggaugagga

SEQ ID NO: 770347 - RNA, 25 nt, Human
cucuccacaagaguuccucucuaaa

SEQ ID NO: 770348 - RNA, 26 nt, Human
cuguaaaacagcaaacaccuccauga

SEQ ID NO: 770349 - RNA, 21 nt, Human
cuugcugaucacagaccaggg

SEQ ID NO: 770350 - RNA, 21 nt, Human
gaagugggcagggcauaaucu

SEQ ID NO: 770351 - RNA, 25 nt, Human
gacuuuggaaaugaugacugaaaua

SEQ ID NO: 770352 - RNA, 19 nt, Human
gagaauggaggagaguagg

SEQ ID NO: 770353 - RNA, 20 nt, Human
gagaucuacauugugaugcu

SEQ ID NO: 770354 - RNA, 22 nt, Human
gaguagguauucauugaagugg

SEQ ID NO: 770355 - RNA, 22 nt, Human
gcaaaaaaaaaaaaaaaaccaa

SEQ ID NO: 770356 - RNA, 24 nt, Human
gcaaaaaaaaaaaaaaaaccaaaa

SEQ ID NO: 770357 - RNA, 22 nt, Human
gcagaauaaauagucccccuuu

SEQ ID NO: 770358 - RNA, 21 nt, Human
gccccugagcuugggauuuug

SEQ ID NO: 770359 - RNA, 23 nt, Human
gccccugagcuugggauuuuguu

SEQ ID NO: 770360 - RNA, 18 nt, Human
ggugagugauccggaagc

SEQ ID NO: 770361 - RNA, 27 nt, Human
guaaaacagcaaacaccuccaugagaa

SEQ ID NO: 770362 - RNA, 22 nt, Human
guaaaugcugagaagccccuga

SEQ ID NO: 770363 - RNA, 19 nt, Human
gucccccuuuccccagucu

SEQ ID NO: 770364 - RNA, 20 nt, Human
gucccccuuuccccagucuu

SEQ ID NO: 770365 - RNA, 24 nt, Human
guguauccauagucuacauucaca

SEQ ID NO: 770366 - RNA, 26 nt, Human
uaaaacagcaaacaccuccaugagaa

SEQ ID NO: 770367 - RNA, 18 nt, Human
uaaaaccuuuuuugagcu

SEQ ID NO: 770368 - RNA, 24 nt, Human
uaaaccagcucuccacaagaguuc

SEQ ID NO: 770369 - RNA, 19 nt, Human
uaaauagucccccuuuccc

SEQ ID NO: 770370 - RNA, 27 nt, Human
uaaggagaacuugccagcaagggugag

SEQ ID NO: 770371 - RNA, 23 nt, Human
uaaggcagaauaaauaguccccc

SEQ ID NO: 770372 - RNA, 28 nt, Human
uaauuccuagacauucuaaaacaaaaca

SEQ ID NO: 770373 - RNA, 22 nt, Human
uacacagaaucuaauacuaacg

SEQ ID NO: 770374 - RNA, 24 nt, Human
uaccuccaaagguaaguaacacaa

SEQ ID NO: 770375 - RNA, 23 nt, Human
uagacauucuaaaacaaaacagg

SEQ ID NO: 770376 - RNA, 23 nt, Human
uagcuaauucccaaagaagagaa

SEQ ID NO: 770377 - RNA, 23 nt, Human
uagcugauauugcaagguuuugc

SEQ ID NO: 770378 - RNA, 22 nt, Human
uagucccccuuuccccagucuu

SEQ ID NO: 770379 - RNA, 26 nt, Human
uauuugccauugauuuaaggcagaau

SEQ ID NO: 770380 - RNA, 22 nt, Human
uccaaagguaaguaacacaaau

SEQ ID NO: 770381 - RNA, 20 nt, Human
ucccaaagaagagaauaaca

SEQ ID NO: 770382 - RNA, 19 nt, Human
uccccagucuuaacaacaa

SEQ ID NO: 770383 - RNA, 24 nt, Human
uccccagucuuaacaacaaaaaac

SEQ ID NO: 770384 - RNA, 21 nt, Human
ucccggaguguaaaucuagcu

SEQ ID NO: 770385 - RNA, 23 nt, Human
ucuguaaacauaaaguguuuaau

SEQ ID NO: 770386 - RNA, 20 nt, Human
ugacuccuuucuuggccagc

SEQ ID NO: 770387 - RNA, 23 nt, Human
ugagcagugcucacaccuaauga

SEQ ID NO: 770388 - RNA, 19 nt, Human
ugauggagaauggaggaga

SEQ ID NO: 770389 - RNA, 22 nt, Human
ugauggagaauggaggagagua

SEQ ID NO: 770390 - RNA, 18 nt, Human
ugcaaaaaaaaaaaaaaa

SEQ ID NO: 770391 - RNA, 24 nt, Human
ugcaaaugcaaaaaaaaaaaaaaa

SEQ ID NO: 770392 - RNA, 26 nt, Human
ugcaaaugcaaaaaaaaaaaaaaaac

SEQ ID NO: 770393 - RNA, 21 nt, Human
ugcuuacauaacagaaaaaca

SEQ ID NO: 770394 - RNA, 23 nt, Human
ugcuuuauuugaugaaccagccu

SEQ ID NO: 770395 - RNA, 18 nt, Human
uggaaacuuggaagugac

SEQ ID NO: 770396 - RNA, 26 nt, Human
ugggauuuuguuaagcaguugccagg

SEQ ID NO: 770397 - RNA, 22 nt, Human
ugggcagggcauaaucugugcu

SEQ ID NO: 770398 - RNA, 19 nt, Human
uggugagugauccggaagc

SEQ ID NO: 770399 - RNA, 18 nt, Human
uguaaaacagcaaacacc

SEQ ID NO: 770400 - RNA, 25 nt, Human
uguaaaacagcaaacaccuccauga

SEQ ID NO: 770401 - RNA, 19 nt, Human
ugucuugcacuuucugcag

SEQ ID NO: 770402 - RNA, 22 nt, Human
ugugauguuuaguuucugaaau

SEQ ID NO: 770403 - RNA, 23 nt, Human
ugugcaaaugcaaaaaaaaaaaa

SEQ ID NO: 770404 - RNA, 19 nt, Human
uguuuaguuucugaaaugc

SEQ ID NO: 770405 - RNA, 19 nt, Human
uuaagcaguugccagggga

SEQ ID NO: 770406 - RNA, 21 nt, Human
uuagaagaccgugugucucaa

SEQ ID NO: 770407 - RNA, 18 nt, Human
uucagaagagccuuucag

SEQ ID NO: 770408 - RNA, 26 nt, Human
uugaagugggcagggcauaaucugug

SEQ ID NO: 770409 - RNA, 24 nt, Human
aaaaauaaaggaguggccgguacc

SEQ ID NO: 770410 - RNA, 22 nt, Human
aacaugcucaaaaacuuuagaa

SEQ ID NO: 770411 - RNA, 24 nt, Human
auuugauuuuuauaucaccagagu

SEQ ID NO: 770412 - RNA, 22 nt, Human
cuaauaauuagagaaaacaugc

SEQ ID NO: 770413 - RNA, 20 nt, Human
cuuauaagucuucuaauuuc

SEQ ID NO: 770414 - RNA, 23 nt, Human
uauaucaccagagucagaaacuu

SEQ ID NO: 770415 - RNA, 24 nt, Human
ucagcuaggaaaggaaaacugaag

SEQ ID NO: 770416 - RNA, 19 nt, Human
ucuuguuauuuccccucca

SEQ ID NO: 770417 - RNA, 21 nt, Human
ugaacaaaucaucagcuagga

SEQ ID NO: 770418 - RNA, 25 nt, Human
ugaacaaaucaucagcuaggaaagg

SEQ ID NO: 770419 - RNA, 23 nt, Human
ugaagcuaggguuuccuuauaag

SEQ ID NO: 770420 - RNA, 18 nt, Human
uggauuuucuguugauca

SEQ ID NO: 770421 - RNA, 25 nt, Human
uucuugaauaaugauuaagugaaca

SEQ ID NO: 770422 - RNA, 26 nt, Human
uucuuguuauuuccccuccaagauuu

SEQ ID NO: 770423 - RNA, 21 nt, Human
uugauuuuuauaucaccagag

SEQ ID NO: 770424 - RNA, 23 nt, Human
uuucuauaugugauauauuaaua

SEQ ID NO: 770425 - RNA, 20 nt, Human
aaaaaagaaaaagcaauuaa

SEQ ID NO: 770426 - RNA, 24 nt, Human
aaaacacuccaguguaauaaaaca

SEQ ID NO: 770427 - RNA, 18 nt, Human
aaaacagacacaaucaua

SEQ ID NO: 770428 - RNA, 21 nt, Human
aagcaauuaaugaccucccca

SEQ ID NO: 770429 - RNA, 22 nt, Human
aauaaaacagacacaaucauaa

SEQ ID NO: 770430 - RNA, 24 nt, Human
aauuuguucacagaucaaauuacu

SEQ ID NO: 770431 - RNA, 27 nt, Human
caaaaaaauucacaguuauucugcaga

SEQ ID NO: 770432 - RNA, 24 nt, Human
caacaagauuuuuuucuaaaaguu

SEQ ID NO: 770433 - RNA, 20 nt, Human
cacauuaucaucaacaagau

SEQ ID NO: 770434 - RNA, 22 nt, Human
cacuguacacagaaugauggaa

SEQ ID NO: 770435 - RNA, 20 nt, Human
ccagagaggaauaggcugcu

SEQ ID NO: 770436 - RNA, 25 nt, Human
ccccaaaaucacauuaucaucaaca

SEQ ID NO: 770437 - RNA, 18 nt, Human
gacacaaucauaauuugu

SEQ ID NO: 770438 - RNA, 19 nt, Human
gacacaaucauaauuuguu

SEQ ID NO: 770439 - RNA, 19 nt, Human
uacuucacuguacacagaa

SEQ ID NO: 770440 - RNA, 21 nt, Human
uacuucacuguacacagaaug

SEQ ID NO: 770441 - RNA, 24 nt, Human
uauauacaaacagguauuuauaua

SEQ ID NO: 770442 - RNA, 24 nt, Human
uccccaaaaucacauuaucaucaa

SEQ ID NO: 770443 - RNA, 18 nt, Human
ucuacauuuaaaaaagaa

SEQ ID NO: 770444 - RNA, 22 nt, Human
uuaaugaccuccccaaaaucac

SEQ ID NO: 770445 - RNA, 24 nt, Human
uuacucaagcuauauacaaacagg

SEQ ID NO: 770446 - RNA, 22 nt, Human
uuagugguauacaaucauauca

SEQ ID NO: 770447 - RNA, 22 nt, Human
uuccagagaggaauaggcugcu

SEQ ID NO: 770448 - RNA, 19 nt, Human
uuuuaaagaugcaggaauu

SEQ ID NO: 770449 - RNA, 21 nt, Human
aaagcccccuccucacuccuc

SEQ ID NO: 770450 - RNA, 18 nt, Human
aaagccgaaagugcuccc

SEQ ID NO: 770451 - RNA, 23 nt, Human
aagaggaggccucgccgggucug

SEQ ID NO: 770452 - RNA, 19 nt, Human
acacacacacaaaacgaaa

SEQ ID NO: 770453 - RNA, 20 nt, Human
acacacacacacacacaaaa

SEQ ID NO: 770454 - RNA, 18 nt, Human
acagcuccaccuccuccc

SEQ ID NO: 770455 - RNA, 20 nt, Human
accacacacacacacacaca

SEQ ID NO: 770456 - RNA, 21 nt, Human
accacacacacacacacacaa

SEQ ID NO: 770457 - RNA, 22 nt, Human
accucgcgaucccguggcccug

SEQ ID NO: 770458 - RNA, 20 nt, Human
accugcacauaggacagcag

SEQ ID NO: 770459 - RNA, 21 nt, Human
acucccauccccacagcucca

SEQ ID NO: 770460 - RNA, 22 nt, Human
acucccauccccacagcuccac

SEQ ID NO: 770461 - RNA, 25 nt, Human
agauacaugaccucgcgaucccgug

SEQ ID NO: 770462 - RNA, 18 nt, Human
agccccgguuuuucuugc

SEQ ID NO: 770463 - RNA, 20 nt, Human
aggaagcagaggcccuggga

SEQ ID NO: 770464 - RNA, 20 nt, Human
aggagggggaaggacauggu

SEQ ID NO: 770465 - RNA, 19 nt, Human
aggcggggcggggugggga

SEQ ID NO: 770466 - RNA, 21 nt, Human
aggcuugggggcggggguggc

SEQ ID NO: 770467 - RNA, 24 nt, Human
agggggugcagcugagaaagggaa

SEQ ID NO: 770468 - RNA, 19 nt, Human
aggguccagggacucuugg

SEQ ID NO: 770469 - RNA, 22 nt, Human
auaggacagcagugagcuacug

SEQ ID NO: 770470 - RNA, 21 nt, Human
augaccucgcgaucccguggc

SEQ ID NO: 770471 - RNA, 21 nt, Human
augguccaaugggggaaagug

SEQ ID NO: 770472 - RNA, 22 nt, Human
augguccaaugggggaaagugg

SEQ ID NO: 770473 - RNA, 21 nt, Human
caacccuccuccccucagugc

SEQ ID NO: 770474 - RNA, 22 nt, Human
caaguuacagaaacugggccga

SEQ ID NO: 770475 - RNA, 21 nt, Human
caauuuugaggguccagggac

SEQ ID NO: 770476 - RNA, 18 nt, Human
cacagcuccaccuccucc

SEQ ID NO: 770477 - RNA, 23 nt, Human
cacaggacuggagccuggccagg

SEQ ID NO: 770478 - RNA, 21 nt, Human
cacaggcuccaaguguugggg

SEQ ID NO: 770479 - RNA, 23 nt, Human
caccccauaaguauauuuagcuc

SEQ ID NO: 770480 - RNA, 19 nt, Human
caccccugcuggaaggggg

SEQ ID NO: 770481 - RNA, 23 nt, Human
cacuccucccaccugucccucca

SEQ ID NO: 770482 - RNA, 23 nt, Human
cacucugaaaggcaaugacugga

SEQ ID NO: 770483 - RNA, 19 nt, Human
cacugccggccggcccagc

SEQ ID NO: 770484 - RNA, 21 nt, Human
cacugccucucccaggaggcc

SEQ ID NO: 770485 - RNA, 29 nt, Human
cagaaaaagcccccuccucacuccuccca

SEQ ID NO: 770486 - RNA, 26 nt, Human
cagaaaacagaggagggccagggcag

SEQ ID NO: 770487 - RNA, 23 nt, Human
cagaaacugggccgacgaagaca

SEQ ID NO: 770488 - RNA, 19 nt, Human
cagcuccaccuccucccaa

SEQ ID NO: 770489 - RNA, 25 nt, Human
caggccccccaguggccagcccucc

SEQ ID NO: 770490 - RNA, 20 nt, Human
caugucaccuuugacucaug

SEQ ID NO: 770491 - RNA, 21 nt, Human
ccacacacacacacacacaaa

SEQ ID NO: 770492 - RNA, 22 nt, Human
ccagggcagcaaggacacagag

SEQ ID NO: 770493 - RNA, 23 nt, Human
ccaguggccagcccucccaggac

SEQ ID NO: 770494 - RNA, 21 nt, Human
cccacagcuccaccuccuccc

SEQ ID NO: 770495 - RNA, 21 nt, Human
cccaggacagcaggguggugg

SEQ ID NO: 770496 - RNA, 23 nt, Human
cccaucuugcugggcccugggag

SEQ ID NO: 770497 - RNA, 19 nt, Human
ccccacagcuccaccuccu

SEQ ID NO: 770498 - RNA, 18 nt, Human
ccccacggcccccacccc

SEQ ID NO: 770499 - RNA, 21 nt, Human
cccccuccucacuccucccac

SEQ ID NO: 770500 - RNA, 18 nt, Human
ccccucggccuccaggcc

SEQ ID NO: 770501 - RNA, 18 nt, Human
ccccuucccgccucccuu

SEQ ID NO: 770502 - RNA, 19 nt, Human
cccgccccucggccuccag

SEQ ID NO: 770503 - RNA, 20 nt, Human
cccgccccucggccuccagg

SEQ ID NO: 770504 - RNA, 21 nt, Human
cccucagugcagcuacagagg

SEQ ID NO: 770505 - RNA, 23 nt, Human
cccuuuuuccaggcuuuucuggg

SEQ ID NO: 770506 - RNA, 23 nt, Human
ccgccccucggccuccaggccug

SEQ ID NO: 770507 - RNA, 21 nt, Human
ccgccucccuuuuuccaggcu

SEQ ID NO: 770508 - RNA, 24 nt, Human
ccgcgcucuccggcgcccgccccu

SEQ ID NO: 770509 - RNA, 27 nt, Human
ccucacuccucccaccugucccuccag

SEQ ID NO: 770510 - RNA, 22 nt, Human
ccuccaggggugggaccaaccc

SEQ ID NO: 770511 - RNA, 22 nt, Human
ccuccucccaagucccugacuc

SEQ ID NO: 770512 - RNA, 18 nt, Human
ccuccuguccaggccuuc

SEQ ID NO: 770513 - RNA, 21 nt, Human
ccucgggcugagccccaucuc

SEQ ID NO: 770514 - RNA, 19 nt, Human
ccuggcgggucagggcugu

SEQ ID NO: 770515 - RNA, 20 nt, Human
ccuggcgggucagggcuguc

SEQ ID NO: 770516 - RNA, 19 nt, Human
ccuguccaggccuucacuu

SEQ ID NO: 770517 - RNA, 21 nt, Human
ccuuuuuccaggcuuuucugg

SEQ ID NO: 770518 - RNA, 19 nt, Human
cgaaagugcuccccuuccc

SEQ ID NO: 770519 - RNA, 22 nt, Human
cggaaggaauggccugguucuc

SEQ ID NO: 770520 - RNA, 18 nt, Human
cgucuggcuggggagggg

SEQ ID NO: 770521 - RNA, 19 nt, Human
cgugcacaugccggugcgu

SEQ ID NO: 770522 - RNA, 21 nt, Human
cuacuggcacaggacuggagc

SEQ ID NO: 770523 - RNA, 18 nt, Human
cuagaaccuucuaggagg

SEQ ID NO: 770524 - RNA, 24 nt, Human
cucaugcguguuugcgugcacaug

SEQ ID NO: 770525 - RNA, 22 nt, Human
cucaugcucacugccucuccca

SEQ ID NO: 770526 - RNA, 18 nt, Human
cuccaccuccucccaagu

SEQ ID NO: 770527 - RNA, 24 nt, Human
cuccaggggugggaccaacccucc

SEQ ID NO: 770528 - RNA, 22 nt, Human
cuccccuucccgccucccuuuu

SEQ ID NO: 770529 - RNA, 20 nt, Human
cuccuaccuggcccggcuac

SEQ ID NO: 770530 - RNA, 21 nt, Human
cuccucacuccucccaccugu

SEQ ID NO: 770531 - RNA, 21 nt, Human
cuccucccaccugucccucca

SEQ ID NO: 770532 - RNA, 18 nt, Human
cucgcgaucccguggccc

SEQ ID NO: 770533 - RNA, 20 nt, Human
cucuccggcgcccgccccuc

SEQ ID NO: 770534 - RNA, 18 nt, Human
cucugggguggcugccuc

SEQ ID NO: 770535 - RNA, 19 nt, Human
cucugggguggcugccucu

SEQ ID NO: 770536 - RNA, 20 nt, Human
cugauagggccugacugcgc

SEQ ID NO: 770537 - RNA, 18 nt, Human
cugcaggcggggcggggu

SEQ ID NO: 770538 - RNA, 22 nt, Human
cuuugacucaugcucacugccu

SEQ ID NO: 770539 - RNA, 21 nt, Human
gaccucgcgaucccguggccc

SEQ ID NO: 770540 - RNA, 21 nt, Human
gacuccuccuguccaggccuu

SEQ ID NO: 770541 - RNA, 22 nt, Human
gaggaagcagaggcccugggag

SEQ ID NO: 770542 - RNA, 21 nt, Human
gaggagggccagggcagcaag

SEQ ID NO: 770543 - RNA, 20 nt, Human
gcaaacccaggugccaggga

SEQ ID NO: 770544 - RNA, 23 nt, Human
gcacccaagucccuccuggaggc

SEQ ID NO: 770545 - RNA, 25 nt, Human
gcacccaagucccuccuggaggcca

SEQ ID NO: 770546 - RNA, 18 nt, Human
gcagaaaaagcccccucc

SEQ ID NO: 770547 - RNA, 22 nt, Human
gccaggguauggggagcagugg

SEQ ID NO: 770548 - RNA, 20 nt, Human
gcccaggccccccaguggcc

SEQ ID NO: 770549 - RNA, 24 nt, Human
gcccaggccccccaguggccagcc

SEQ ID NO: 770550 - RNA, 20 nt, Human
gcggggcgggguggggagau

SEQ ID NO: 770551 - RNA, 21 nt, Human
gcucguggggccaccuaaggc

SEQ ID NO: 770552 - RNA, 22 nt, Human
ggaaaugcacaugccucuggag

SEQ ID NO: 770553 - RNA, 26 nt, Human
ggaaaugcacaugccucuggagcccc

SEQ ID NO: 770554 - RNA, 19 nt, Human
ggaaggaauggccugguuc

SEQ ID NO: 770555 - RNA, 20 nt, Human
ggaggagggggaaggacaug

SEQ ID NO: 770556 - RNA, 19 nt, Human
ggaggucagcgagccccgc

SEQ ID NO: 770557 - RNA, 18 nt, Human
ggcccagccucaugcugc

SEQ ID NO: 770558 - RNA, 24 nt, Human
ggccgacgaagacagggccagaaa

SEQ ID NO: 770559 - RNA, 19 nt, Human
gggaggagggggaaggaca

SEQ ID NO: 770560 - RNA, 18 nt, Human
gggcagcaaggacacaga

SEQ ID NO: 770561 - RNA, 21 nt, Human
gggcagcaaggacacagaggg

SEQ ID NO: 770562 - RNA, 23 nt, Human
gggcagcaaggacacagaggggc

SEQ ID NO: 770563 - RNA, 21 nt, Human
gggcagcccaggccccccagu

SEQ ID NO: 770564 - RNA, 21 nt, Human
ggggacgggguccugccuguc

SEQ ID NO: 770565 - RNA, 18 nt, Human
ggguccugccuguccuug

SEQ ID NO: 770566 - RNA, 20 nt, Human
ggugaucagugaccaggaac

SEQ ID NO: 770567 - RNA, 21 nt, Human
gguggccaggggaagaggagg

SEQ ID NO: 770568 - RNA, 21 nt, Human
gugcaccccaucugucaucug

SEQ ID NO: 770569 - RNA, 19 nt, Human
guggccaggggaagaggag

SEQ ID NO: 770570 - RNA, 28 nt, Human
uacggcuccuguggucucugggguggcu

SEQ ID NO: 770571 - RNA, 20 nt, Human
ucacugccucucccaggagg

SEQ ID NO: 770572 - RNA, 18 nt, Human
ucaggcuugggggcgggg

SEQ ID NO: 770573 - RNA, 24 nt, Human
ucauucuauuuucagcuucccuca

SEQ ID NO: 770574 - RNA, 23 nt, Human
uccaggcuuuucuggagucuggg

SEQ ID NO: 770575 - RNA, 24 nt, Human
ucccaggacagcaggguggugggg

SEQ ID NO: 770576 - RNA, 22 nt, Human
ucccaucuugcugggcccuggg

SEQ ID NO: 770577 - RNA, 20 nt, Human
ucccccauaccucgcacucc

SEQ ID NO: 770578 - RNA, 24 nt, Human
ucccuggcccccacggcccccacc

SEQ ID NO: 770579 - RNA, 29 nt, Human
ucccuggggaccaagaaguagacuccugg

SEQ ID NO: 770580 - RNA, 20 nt, Human
uccuguggucucuggggugg

SEQ ID NO: 770581 - RNA, 18 nt, Human
ucgccgggucuggcugug

SEQ ID NO: 770582 - RNA, 20 nt, Human
ucucugggguggcugccucu

SEQ ID NO: 770583 - RNA, 18 nt, Human
ucugcacccaagucccuc

SEQ ID NO: 770584 - RNA, 20 nt, Human
ucugcugggcacauuccugc

SEQ ID NO: 770585 - RNA, 22 nt, Human
ugaccuauagaaagccgaaagu

SEQ ID NO: 770586 - RNA, 21 nt, Human
ugauuccuccacucccauccc

SEQ ID NO: 770587 - RNA, 23 nt, Human
ugcagagggggugcagcugagaa

SEQ ID NO: 770588 - RNA, 22 nt, Human
ugccagggauugggauucucuu

SEQ ID NO: 770589 - RNA, 18 nt, Human
ugccaggguauggggagc

SEQ ID NO: 770590 - RNA, 20 nt, Human
ugcugcugcccaaggcccga

SEQ ID NO: 770591 - RNA, 20 nt, Human
ugcuggaaggggggggucua

SEQ ID NO: 770592 - RNA, 19 nt, Human
ugcuuacaucugcacccaa

SEQ ID NO: 770593 - RNA, 20 nt, Human
uggaaccucugggagcaggg

SEQ ID NO: 770594 - RNA, 22 nt, Human
uggaaccucugggagcagggaa

SEQ ID NO: 770595 - RNA, 23 nt, Human
uggaaggggggggucuagaaccu

SEQ ID NO: 770596 - RNA, 18 nt, Human
uggaggggcagcccaggc

SEQ ID NO: 770597 - RNA, 18 nt, Human
uggagucugggcagcucc

SEQ ID NO: 770598 - RNA, 21 nt, Human
uggaugaggcaaacccaggug

SEQ ID NO: 770599 - RNA, 24 nt, Human
uggcagaaaaagcccccuccucaa

SEQ ID NO: 770600 - RNA, 22 nt, Human
uggcccccacggcccccacccc

SEQ ID NO: 770601 - RNA, 22 nt, Human
ugggaccaacccuccuccccuc

SEQ ID NO: 770602 - RNA, 19 nt, Human
ugggauucucuucccaaaa

SEQ ID NO: 770603 - RNA, 19 nt, Human
ugggcuggcagccacaggg

SEQ ID NO: 770604 - RNA, 21 nt, Human
uggggaggggcccuuccccag

SEQ ID NO: 770605 - RNA, 25 nt, Human
ugggggcggggguggcagaaaaagc

SEQ ID NO: 770606 - RNA, 18 nt, Human
uguagggcccugggagag

SEQ ID NO: 770607 - RNA, 18 nt, Human
ugucuagugcuccacugc

SEQ ID NO: 770608 - RNA, 19 nt, Human
ugucugaaugcgugcaccc

SEQ ID NO: 770609 - RNA, 20 nt, Human
ugucugggagagugucccug

SEQ ID NO: 770610 - RNA, 24 nt, Human
ugugucuucagaucugcagagggg

SEQ ID NO: 770611 - RNA, 21 nt, Human
uuaaccacaggcuccaagugu

SEQ ID NO: 770612 - RNA, 18 nt, Human
uucuggagucugggcagc

SEQ ID NO: 770613 - RNA, 24 nt, Human
uugcgugcacaugccggugcguac

SEQ ID NO: 770614 - RNA, 22 nt, Human
uugcugggcccugggaggucag

SEQ ID NO: 770615 - RNA, 23 nt, Human
uugcugggcccugggaggucagc

SEQ ID NO: 770616 - RNA, 23 nt, Human
uugguaagcuugaagagcugugu

SEQ ID NO: 770617 - RNA, 23 nt, Human
uugguaaguuugaagagcugugu

SEQ ID NO: 770618 - RNA, 24 nt, Human
uuucuggagucugggcagcuccug

SEQ ID NO: 770619 - RNA, 25 nt, Human
uuuuccaggcuuuucuggagucugg

SEQ ID NO: 770620 - RNA, 18 nt, Human
uuuucuugcuuacaucug

SEQ ID NO: 770621 - RNA, 19 nt, Human
uuuucuugcuuacaucugc

SEQ ID NO: 770622 - RNA, 27 nt, Human
aaacaaguggccucauguuguaaugac

SEQ ID NO: 770623 - RNA, 23 nt, Human
aaaccucucccauuuaccugcuc

SEQ ID NO: 770624 - RNA, 19 nt, Human
aaaggcccaggagugaaga

SEQ ID NO: 770625 - RNA, 22 nt, Human
aagcauuuggcaagagggggca

SEQ ID NO: 770626 - RNA, 22 nt, Human
aaggggaggaucggauggaugg

SEQ ID NO: 770627 - RNA, 25 nt, Human
agaaagaagcaugaaaaguucccga

SEQ ID NO: 770628 - RNA, 23 nt, Human
agacaaggcaggugacgggagug

SEQ ID NO: 770629 - RNA, 22 nt, Human
agacaauccacgaaggaaggac

SEQ ID NO: 770630 - RNA, 22 nt, Human
agccacagccacagccacagcc

SEQ ID NO: 770631 - RNA, 20 nt, Human
aggaaggacaggggaaggga

SEQ ID NO: 770632 - RNA, 20 nt, Human
aggaaggacaggggaagggg

SEQ ID NO: 770633 - RNA, 21 nt, Human
aggaaggacaggggaagggga

SEQ ID NO: 770634 - RNA, 19 nt, Human
aggacaggggaaggggagg

SEQ ID NO: 770635 - RNA, 20 nt, Human
aggacaggggaaggggagga

SEQ ID NO: 770636 - RNA, 19 nt, Human
aggcaaaucccuggagcuc

SEQ ID NO: 770637 - RNA, 18 nt, Human
aggcaaggcggugggagg

SEQ ID NO: 770638 - RNA, 23 nt, Human
aggcaaggcggugggaggugggg

SEQ ID NO: 770639 - RNA, 20 nt, Human
aggcaggugacgggaguggu

SEQ ID NO: 770640 - RNA, 20 nt, Human
aggcggugggaggugggggc

SEQ ID NO: 770641 - RNA, 19 nt, Human
aggcuccuucauaccucuc

SEQ ID NO: 770642 - RNA, 21 nt, Human
aggcuccuucauaccucuccu

SEQ ID NO: 770643 - RNA, 24 nt, Human
auggggcaaacagaauggguggag

SEQ ID NO: 770644 - RNA, 26 nt, Human
cacagccacagccacagccacgugga

SEQ ID NO: 770645 - RNA, 18 nt, Human
cacgaaggaaggacaggg

SEQ ID NO: 770646 - RNA, 20 nt, Human
cacuuggguagugccaaaug

SEQ ID NO: 770647 - RNA, 19 nt, Human
cagaaagugucaagcacug

SEQ ID NO: 770648 - RNA, 20 nt, Human
cagaaagugucaagcacugg

SEQ ID NO: 770649 - RNA, 21 nt, Human
cagaccaagaccucaggugga

SEQ ID NO: 770650 - RNA, 21 nt, Human
cagauaggauccaggagugcc

SEQ ID NO: 770651 - RNA, 21 nt, Human
cagccuucucccaugagcaag

SEQ ID NO: 770652 - RNA, 24 nt, Human
caggacaaugcaccucagcaccuu

SEQ ID NO: 770653 - RNA, 20 nt, Human
cagggcccagccacagccac

SEQ ID NO: 770654 - RNA, 24 nt, Human
caggggaaggggaggaucggaugg

SEQ ID NO: 770655 - RNA, 21 nt, Human
cauguguagccagcuaaaagu

SEQ ID NO: 770656 - RNA, 18 nt, Human
cauugggcaagcuggggu

SEQ ID NO: 770657 - RNA, 23 nt, Human
ccacagccacagccacguggaua

SEQ ID NO: 770658 - RNA, 23 nt, Human
ccacagccacguggauaauguuc

SEQ ID NO: 770659 - RNA, 23 nt, Human
ccagaagcauugggcaagcuggg

SEQ ID NO: 770660 - RNA, 22 nt, Human
ccagccacagccacagccacag

SEQ ID NO: 770661 - RNA, 19 nt, Human
ccagggcccagccacagcc

SEQ ID NO: 770662 - RNA, 23 nt, Human
ccaggguuaucugcgucauuggc

SEQ ID NO: 770663 - RNA, 24 nt, Human
cccacaguggggcaggaaggaggc

SEQ ID NO: 770664 - RNA, 20 nt, Human
cccagccacagccacagcca

SEQ ID NO: 770665 - RNA, 21 nt, Human
cccagccacagccacagccac

SEQ ID NO: 770666 - RNA, 20 nt, Human
ccucauccugccuuccagcu

SEQ ID NO: 770667 - RNA, 18 nt, Human
ccuccauaauguccaggc

SEQ ID NO: 770668 - RNA, 21 nt, Human
ccugccagggcccagccacag

SEQ ID NO: 770669 - RNA, 21 nt, Human
ccuggagcucacccuaaaaca

SEQ ID NO: 770670 - RNA, 19 nt, Human
cgauaggcugggcucuuuc

SEQ ID NO: 770671 - RNA, 22 nt, Human
cuagcgggggaugaagaauaaa

SEQ ID NO: 770672 - RNA, 24 nt, Human
cuagucagcuggaaaccucuccca

SEQ ID NO: 770673 - RNA, 20 nt, Human
cucagguggagaaagaagca

SEQ ID NO: 770674 - RNA, 22 nt, Human
cucucccauuuaccugcuccuc

SEQ ID NO: 770675 - RNA, 24 nt, Human
cucucccauuuaccugcuccucag

SEQ ID NO: 770676 - RNA, 19 nt, Human
cuuccuccaacaggcuaca

SEQ ID NO: 770677 - RNA, 23 nt, Human
gacaaggcaggugacgggagugg

SEQ ID NO: 770678 - RNA, 26 nt, Human
gacaauggagacaauccacgaaggaa

SEQ ID NO: 770679 - RNA, 20 nt, Human
gaggaucggauggauggucu

SEQ ID NO: 770680 - RNA, 19 nt, Human
gaugaagaauaaagaacag

SEQ ID NO: 770681 - RNA, 20 nt, Human
gccacuucuggaaauggccc

SEQ ID NO: 770682 - RNA, 20 nt, Human
ggaacuagaaggagucggug

SEQ ID NO: 770683 - RNA, 20 nt, Human
ggaggugggcaggcuucugg

SEQ ID NO: 770684 - RNA, 21 nt, Human
ggcccagccacagccacagcc

SEQ ID NO: 770685 - RNA, 20 nt, Human
ggcugugcucugugguauag

SEQ ID NO: 770686 - RNA, 24 nt, Human
gggaacuagaaggagucgguggag

SEQ ID NO: 770687 - RNA, 22 nt, Human
gggcaagcuggggugagguugg

SEQ ID NO: 770688 - RNA, 19 nt, Human
gggcagagaccacagccuu

SEQ ID NO: 770689 - RNA, 19 nt, Human
ggggaaggggaggaucgga

SEQ ID NO: 770690 - RNA, 18 nt, Human
ggggguaaaggggugagg

SEQ ID NO: 770691 - RNA, 22 nt, Human
ggguggaggugggcaggcuucu

SEQ ID NO: 770692 - RNA, 24 nt, Human
gugaaaguggggaagggaacuaga

SEQ ID NO: 770693 - RNA, 19 nt, Human
gugaguccugaggucuucu

SEQ ID NO: 770694 - RNA, 19 nt, Human
guggagggguccgugccuu

SEQ ID NO: 770695 - RNA, 26 nt, Human
uaaaacaaguggccucauguguagcc

SEQ ID NO: 770696 - RNA, 19 nt, Human
uaaagaacagacaaggcag

SEQ ID NO: 770697 - RNA, 18 nt, Human
uaagucccaagaaagcag

SEQ ID NO: 770698 - RNA, 22 nt, Human
uaagucccaagaaagcaggaca

SEQ ID NO: 770699 - RNA, 20 nt, Human
uaccuugacaagugauagga

SEQ ID NO: 770700 - RNA, 19 nt, Human
ucccauuuaccugcuccuc

SEQ ID NO: 770701 - RNA, 23 nt, Human
ucccuggagcucacccuaaaaca

SEQ ID NO: 770702 - RNA, 24 nt, Human
uccuucauaccucuccucauccug

SEQ ID NO: 770703 - RNA, 21 nt, Human
ucgauaggcugggcucuuucc

SEQ ID NO: 770704 - RNA, 24 nt, Human
ucucccaugagcaagucuggaggu

SEQ ID NO: 770705 - RNA, 19 nt, Human
ugaggggugggacacagga

SEQ ID NO: 770706 - RNA, 18 nt, Human
ugcguuguugguucuucc

SEQ ID NO: 770707 - RNA, 19 nt, Human
uggaaauggcccacagugg

SEQ ID NO: 770708 - RNA, 23 nt, Human
uggagaaggcaauggggguaaag

SEQ ID NO: 770709 - RNA, 21 nt, Human
uggaggugggcaggcuucugg

SEQ ID NO: 770710 - RNA, 20 nt, Human
uggagguggggggauguucc

SEQ ID NO: 770711 - RNA, 24 nt, Human
uggagugggugguacagguggaaa

SEQ ID NO: 770712 - RNA, 20 nt, Human
uggcaagagggggcagagac

SEQ ID NO: 770713 - RNA, 24 nt, Human
uggcaggugcuuucagguuucugg

SEQ ID NO: 770714 - RNA, 22 nt, Human
ugggaggugggggcacugucug

SEQ ID NO: 770715 - RNA, 22 nt, Human
ugggggcacugucuggacaaug

SEQ ID NO: 770716 - RNA, 19 nt, Human
uggggguaaaggggugagg

SEQ ID NO: 770717 - RNA, 25 nt, Human
uggguggaggugggcaggcuucugg

SEQ ID NO: 770718 - RNA, 23 nt, Human
uguguagccagcuaaaaguagcu

SEQ ID NO: 770719 - RNA, 23 nt, Human
uuggacgaguagaaaagaggguu

SEQ ID NO: 770720 - RNA, 18 nt, Human
aaaaggccgggugugggc

SEQ ID NO: 770721 - RNA, 20 nt, Human
aacauggcgaaacccugucu

SEQ ID NO: 770722 - RNA, 21 nt, Human
aacauggcgaaacccugucuc

SEQ ID NO: 770723 - RNA, 21 nt, Human
aacccugucucuaccaaaaau

SEQ ID NO: 770724 - RNA, 18 nt, Human
aacuuccaaccucaccuc

SEQ ID NO: 770725 - RNA, 23 nt, Human
aagcuccugcgcuucccaauccc

SEQ ID NO: 770726 - RNA, 21 nt, Human
accaggccuccuccacccugc

SEQ ID NO: 770727 - RNA, 20 nt, Human
acccgcccugcccccacccc

SEQ ID NO: 770728 - RNA, 23 nt, Human
acccgcccugcccccaccccggg

SEQ ID NO: 770729 - RNA, 18 nt, Human
acccugcuaacacccaac

SEQ ID NO: 770730 - RNA, 24 nt, Human
acccugucucuaccaaaaauacaa

SEQ ID NO: 770731 - RNA, 27 nt, Human
accucaccuccugccucccuccuccaa

SEQ ID NO: 770732 - RNA, 21 nt, Human
accuugggaccccuaacacca

SEQ ID NO: 770733 - RNA, 23 nt, Human
agaaguucaagaccagccugggc

SEQ ID NO: 770734 - RNA, 22 nt, Human
agagcugccccaccagcgugcc

SEQ ID NO: 770735 - RNA, 22 nt, Human
agccugggcaacauggcgaaac

SEQ ID NO: 770736 - RNA, 24 nt, Human
agccugggcaacauggcgaaaccc

SEQ ID NO: 770737 - RNA, 19 nt, Human
aggaggcaacgcuccaaaa

SEQ ID NO: 770738 - RNA, 25 nt, Human
aggcaagcacaggcgggugggggcu

SEQ ID NO: 770739 - RNA, 21 nt, Human
aggcaggcauaucacuugagg

SEQ ID NO: 770740 - RNA, 22 nt, Human
aggcaggcauaucacuugaggu

SEQ ID NO: 770741 - RNA, 26 nt, Human
aggcaggcauaucacuugaggucaga

SEQ ID NO: 770742 - RNA, 24 nt, Human
aggcgggugggggcucgggucgga

SEQ ID NO: 770743 - RNA, 21 nt, Human
aggcugaggcaggcauaucac

SEQ ID NO: 770744 - RNA, 24 nt, Human
aggcugaggcaggcauaucacuug

SEQ ID NO: 770745 - RNA, 21 nt, Human
agggcaucauugaucuggggc

SEQ ID NO: 770746 - RNA, 23 nt, Human
aucacuugaggucagaaguucaa

SEQ ID NO: 770747 - RNA, 23 nt, Human
aucuggggcacaucugaggucag

SEQ ID NO: 770748 - RNA, 20 nt, Human
augcugccccagcuccggcu

SEQ ID NO: 770749 - RNA, 24 nt, Human
auugaucuggggcacaucugaggu

SEQ ID NO: 770750 - RNA, 22 nt, Human
caacauggcgaaacccugucuc

SEQ ID NO: 770751 - RNA, 24 nt, Human
caacauggcgaaacccugucucua

SEQ ID NO: 770752 - RNA, 21 nt, Human
caacuuccaaccucaccuccu

SEQ ID NO: 770753 - RNA, 23 nt, Human
caagacaagagcugccccaccag

SEQ ID NO: 770754 - RNA, 21 nt, Human
cacccaaccaucccauccuag

SEQ ID NO: 770755 - RNA, 19 nt, Human
cacccacgcugggccgucc

SEQ ID NO: 770756 - RNA, 20 nt, Human
cacccugcuaacacccaacc

SEQ ID NO: 770757 - RNA, 25 nt, Human
cacccugcuaacacccaaccauccc

SEQ ID NO: 770758 - RNA, 19 nt, Human
cagaagggacucaucggca

SEQ ID NO: 770759 - RNA, 20 nt, Human
cagaaucucgcaggccacac

SEQ ID NO: 770760 - RNA, 21 nt, Human
cagccuccuggggguccagag

SEQ ID NO: 770761 - RNA, 21 nt, Human
cagcgugggacagcugggcac

SEQ ID NO: 770762 - RNA, 24 nt, Human
cauaucacuugaggucagaaguuc

SEQ ID NO: 770763 - RNA, 23 nt, Human
caucccauccuaggcuccuuacc

SEQ ID NO: 770764 - RNA, 22 nt, Human
ccacaccaggccuccuccaccc

SEQ ID NO: 770765 - RNA, 18 nt, Human
ccagcuccggcugacucc

SEQ ID NO: 770766 - RNA, 22 nt, Human
cccaagacaagcugguccugaa

SEQ ID NO: 770767 - RNA, 19 nt, Human
cccacgcugggccgucccc

SEQ ID NO: 770768 - RNA, 19 nt, Human
ccccacccacgcugggccg

SEQ ID NO: 770769 - RNA, 19 nt, Human
cccccaagacaagcugguc

SEQ ID NO: 770770 - RNA, 22 nt, Human
cccccaagacaagcugguccug

SEQ ID NO: 770771 - RNA, 18 nt, Human
ccccuaacaccagcuccc

SEQ ID NO: 770772 - RNA, 24 nt, Human
ccccuugggaggcugaggcaggca

SEQ ID NO: 770773 - RNA, 24 nt, Human
cccgcccugcccccaccccgggag

SEQ ID NO: 770774 - RNA, 24 nt, Human
ccuaacaccagcucccgcugggac

SEQ ID NO: 770775 - RNA, 19 nt, Human
ccucagacccucaaggccc

SEQ ID NO: 770776 - RNA, 22 nt, Human
ccuccugccucccuccuccaaa

SEQ ID NO: 770777 - RNA, 23 nt, Human
ccugcuaacacccaaccauccca

SEQ ID NO: 770778 - RNA, 22 nt, Human
ccugggcaacauggcgaaaccc

SEQ ID NO: 770779 - RNA, 24 nt, Human
ccugggcaacauggcgaaacccug

SEQ ID NO: 770780 - RNA, 20 nt, Human
ccuuaccacccccaagacaa

SEQ ID NO: 770781 - RNA, 24 nt, Human
cgguguccucacucucucucgcuc

SEQ ID NO: 770782 - RNA, 26 nt, Human
cuaacacucaucccuuuugccucuca

SEQ ID NO: 770783 - RNA, 22 nt, Human
cucaccuccugccucccuccuc

SEQ ID NO: 770784 - RNA, 19 nt, Human
cucagacccucaaggcccc

SEQ ID NO: 770785 - RNA, 22 nt, Human
cuccaaaacuucucuucucagu

SEQ ID NO: 770786 - RNA, 23 nt, Human
cuccaagacaagagcugccccac

SEQ ID NO: 770787 - RNA, 22 nt, Human
cucccuggcaccagccuccugg

SEQ ID NO: 770788 - RNA, 21 nt, Human
cuccuccaaacuuucacacgg

SEQ ID NO: 770789 - RNA, 21 nt, Human
cugggacggaacagggaaggc

SEQ ID NO: 770790 - RNA, 23 nt, Human
cuuccaaccucaccuccugccuc

SEQ ID NO: 770791 - RNA, 27 nt, Human
gaagcuccugcgcuucccaaucccaca

SEQ ID NO: 770792 - RNA, 24 nt, Human
gaaugugggggugucagggugaug

SEQ ID NO: 770793 - RNA, 19 nt, Human
gaggcugccggugcucugc

SEQ ID NO: 770794 - RNA, 18 nt, Human
gcaauaugaaauagaagc

SEQ ID NO: 770795 - RNA, 23 nt, Human
gcacgcacacucacaccagccug

SEQ ID NO: 770796 - RNA, 22 nt, Human
gcccacaccaggccuccuccac

SEQ ID NO: 770797 - RNA, 21 nt, Human
gcuccugcgcuucccaauccc

SEQ ID NO: 770798 - RNA, 21 nt, Human
ggaccccuaacaccagcuccc

SEQ ID NO: 770799 - RNA, 22 nt, Human
ggacucaucggcacccagggca

SEQ ID NO: 770800 - RNA, 19 nt, Human
ggaggagggagcuggggac

SEQ ID NO: 770801 - RNA, 21 nt, Human
ggccugguugaaagugcaggg

SEQ ID NO: 770802 - RNA, 21 nt, Human
ggccugucucccuggcaccag

SEQ ID NO: 770803 - RNA, 23 nt, Human
gggacccucuggcacccccaccc

SEQ ID NO: 770804 - RNA, 22 nt, Human
gggcaucauugaucuggggcac

SEQ ID NO: 770805 - RNA, 20 nt, Human
ggggcggcaaggcuccaccc

SEQ ID NO: 770806 - RNA, 24 nt, Human
ggggcuguugccggggaggccccu

SEQ ID NO: 770807 - RNA, 18 nt, Human
ggguugggccugucuccc

SEQ ID NO: 770808 - RNA, 19 nt, Human
ggguugggccugucucccu

SEQ ID NO: 770809 - RNA, 20 nt, Human
ggugaugagggcaauggggg

SEQ ID NO: 770810 - RNA, 21 nt, Human
gguggguugggccugucuccc

SEQ ID NO: 770811 - RNA, 24 nt, Human
guaccccuugggaggcugaggcag

SEQ ID NO: 770812 - RNA, 19 nt, Human
guggccgucugcgcugcag

SEQ ID NO: 770813 - RNA, 21 nt, Human
uaccaaaaauacaaaaauuag

SEQ ID NO: 770814 - RNA, 19 nt, Human
uaggcuccuuaccaccccc

SEQ ID NO: 770815 - RNA, 20 nt, Human
uauauaauauauaauauaug

SEQ ID NO: 770816 - RNA, 24 nt, Human
uaucacuugaggucagaaguucaa

SEQ ID NO: 770817 - RNA, 22 nt, Human
uaucuuuauucuaggaggcaac

SEQ ID NO: 770818 - RNA, 20 nt, Human
ucagggugaugagggcaaug

SEQ ID NO: 770819 - RNA, 19 nt, Human
uccaaaacuucucuucuca

SEQ ID NO: 770820 - RNA, 21 nt, Human
uccaagacaagagcugcccca

SEQ ID NO: 770821 - RNA, 25 nt, Human
uccaggaaggggaaagggcagagga

SEQ ID NO: 770822 - RNA, 23 nt, Human
ucccuggcaccagccuccugggg

SEQ ID NO: 770823 - RNA, 21 nt, Human
ucccuuuugccucucagcggc

SEQ ID NO: 770824 - RNA, 21 nt, Human
uccuggaaccuugcucaacuu

SEQ ID NO: 770825 - RNA, 19 nt, Human
ugaaagugcagggucuggg

SEQ ID NO: 770826 - RNA, 19 nt, Human
ugaagcuccugcgcuuccc

SEQ ID NO: 770827 - RNA, 18 nt, Human
ugacgcagaaacaagggc

SEQ ID NO: 770828 - RNA, 19 nt, Human
ugacggcuccaagacaagg

SEQ ID NO: 770829 - RNA, 20 nt, Human
ugacuccuggaaccuugcuc

SEQ ID NO: 770830 - RNA, 26 nt, Human
ugaggcaggcauaucacuugagguca

SEQ ID NO: 770831 - RNA, 21 nt, Human
ugaggcugccggugcucugca

SEQ ID NO: 770832 - RNA, 20 nt, Human
ugagggcaaugggggccauc

SEQ ID NO: 770833 - RNA, 18 nt, Human
ugccacucaaggcccuga

SEQ ID NO: 770834 - RNA, 18 nt, Human
ugccccagcuccggcuga

SEQ ID NO: 770835 - RNA, 21 nt, Human
ugccccagcuccggcugacuc

SEQ ID NO: 770836 - RNA, 22 nt, Human
ugccggugcucugcaggaagcc

SEQ ID NO: 770837 - RNA, 23 nt, Human
ugccucccuccuccaaacuuuca

SEQ ID NO: 770838 - RNA, 22 nt, Human
uggaccugagcuaaaaggccgg

SEQ ID NO: 770839 - RNA, 21 nt, Human
ugggaacugcagagaccccug

SEQ ID NO: 770840 - RNA, 21 nt, Human
ugggacggaacagggaaggcu

SEQ ID NO: 770841 - RNA, 18 nt, Human
ugggaggagggagcuggg

SEQ ID NO: 770842 - RNA, 19 nt, Human
ugggaggcugaggcaggca

SEQ ID NO: 770843 - RNA, 24 nt, Human
ugggaggcugaggcaggcauauca

SEQ ID NO: 770844 - RNA, 22 nt, Human
uggggcacaucugaggucagaa

SEQ ID NO: 770845 - RNA, 19 nt, Human
uggggcuguugccggggag

SEQ ID NO: 770846 - RNA, 20 nt, Human
ugggggccaucgugggaccc

SEQ ID NO: 770847 - RNA, 19 nt, Human
uggguugaggcugccggug

SEQ ID NO: 770848 - RNA, 22 nt, Human
uugaucuggggcacaucugagg

SEQ ID NO: 770849 - RNA, 24 nt, Human
aaacaaaauucacccaacauugaa

SEQ ID NO: 770850 - RNA, 24 nt, Human
aaacacuuacuuuggagaaacaga

SEQ ID NO: 770851 - RNA, 27 nt, Human
aaaucacaaacacuuacuuuggagaaa

SEQ ID NO: 770852 - RNA, 22 nt, Human
aacaaaauucacccaacauuga

SEQ ID NO: 770853 - RNA, 18 nt, Human
aagaaucuggggccaaca

SEQ ID NO: 770854 - RNA, 26 nt, Human
agacaaaagugaacaacuauggucca

SEQ ID NO: 770855 - RNA, 21 nt, Human
agauauaccaccacuugcuau

SEQ ID NO: 770856 - RNA, 23 nt, Human
agggggcgcuggcgggagagcgg

SEQ ID NO: 770857 - RNA, 21 nt, Human
cacugcaguaugaggaacaaa

SEQ ID NO: 770858 - RNA, 24 nt, Human
ccgagcccggcggcggaagaggcg

SEQ ID NO: 770859 - RNA, 20 nt, Human
ccgcgaggagggggcgcugg

SEQ ID NO: 770860 - RNA, 22 nt, Human
ccucggggcggaguggaagggc

SEQ ID NO: 770861 - RNA, 18 nt, Human
cgaggagggggcgcuggc

SEQ ID NO: 770862 - RNA, 23 nt, Human
cgggagagcgggccgcugcgacc

SEQ ID NO: 770863 - RNA, 18 nt, Human
cguggccgcgaggagggg

SEQ ID NO: 770864 - RNA, 22 nt, Human
cuaaaaacaaaauucacccaac

SEQ ID NO: 770865 - RNA, 18 nt, Human
cugcggaggccccgagcc

SEQ ID NO: 770866 - RNA, 19 nt, Human
cugcggaggccccgagccc

SEQ ID NO: 770867 - RNA, 21 nt, Human
cuggcagacaaaagugaacaa

SEQ ID NO: 770868 - RNA, 24 nt, Human
cuguauugugcuccucaaauaccu

SEQ ID NO: 770869 - RNA, 23 nt, Human
gaacaaaucacaaacacuuacuu

SEQ ID NO: 770870 - RNA, 20 nt, Human
gcgcuggcgggagagcgggc

SEQ ID NO: 770871 - RNA, 21 nt, Human
gcgcuggcgggagagcgggcc

SEQ ID NO: 770872 - RNA, 18 nt, Human
gcgcuggcggggaagggc

SEQ ID NO: 770873 - RNA, 19 nt, Human
ggaacaaaucacaaacacu

SEQ ID NO: 770874 - RNA, 19 nt, Human
ggagggggcgcuggcggga

SEQ ID NO: 770875 - RNA, 19 nt, Human
ggccgcugcgaccucgggg

SEQ ID NO: 770876 - RNA, 19 nt, Human
gggaagggcucccucagcg

SEQ ID NO: 770877 - RNA, 20 nt, Human
ggggagagcgagacgcgggc

SEQ ID NO: 770878 - RNA, 18 nt, Human
guggccgcgaggaggggg

SEQ ID NO: 770879 - RNA, 23 nt, Human
uaaaauucugcagcagccuaaag

SEQ ID NO: 770880 - RNA, 21 nt, Human
uauacaagucaguuguacaau

SEQ ID NO: 770881 - RNA, 24 nt, Human
uauuuuaagagaaaggugaacaug

SEQ ID NO: 770882 - RNA, 21 nt, Human
uccucaaauaccuagagccag

SEQ ID NO: 770883 - RNA, 27 nt, Human
ucuaaaaaauucuuucuuccauaggaa

SEQ ID NO: 770884 - RNA, 23 nt, Human
ucuaaaaacaaaauucacccaac

SEQ ID NO: 770885 - RNA, 23 nt, Human
ucuggggccaacauuuguauuuu

SEQ ID NO: 770886 - RNA, 22 nt, Human
ugaacaugaacaucagauuaac

SEQ ID NO: 770887 - RNA, 23 nt, Human
ugcaguaugaggaacaaaucaca

SEQ ID NO: 770888 - RNA, 20 nt, Human
uggaagggcacgcgcuggcg

SEQ ID NO: 770889 - RNA, 19 nt, Human
uguauuuuaucagaaaaaa

SEQ ID NO: 770890 - RNA, 24 nt, Human
uuaaaauucugcagcagccuaaag

SEQ ID NO: 770891 - RNA, 20 nt, Human
uuuuaagagaaaggugaaca

SEQ ID NO: 770892 - RNA, 24 nt, Human
aaaaaaggaaaaacuauacaacgc

SEQ ID NO: 770893 - RNA, 21 nt, Human
aaaaagagaaaaguugcacaa

SEQ ID NO: 770894 - RNA, 22 nt, Human
aaaaagagaaaaguugcacaaa

SEQ ID NO: 770895 - RNA, 19 nt, Human
aaagugcuaggauuacagg

SEQ ID NO: 770896 - RNA, 24 nt, Human
aaagugcuaggauuacagguguga

SEQ ID NO: 770897 - RNA, 21 nt, Human
aaccaagucugaaaccaaugg

SEQ ID NO: 770898 - RNA, 20 nt, Human
aaccaaucuuaauugaacca

SEQ ID NO: 770899 - RNA, 28 nt, Human
aacuaauuauaauacguuucccagccuc

SEQ ID NO: 770900 - RNA, 20 nt, Human
aagcagacucacaaguaagc

SEQ ID NO: 770901 - RNA, 22 nt, Human
aaggaacaccauucugauacca

SEQ ID NO: 770902 - RNA, 22 nt, Human
aaggaugcaugguccagccuuc

SEQ ID NO: 770903 - RNA, 26 nt, Human
aagugcuaggauuacaggugugagcu

SEQ ID NO: 770904 - RNA, 19 nt, Human
acagaguacuuccugaggg

SEQ ID NO: 770905 - RNA, 24 nt, Human
acuauguugccuaggcuggucuug

SEQ ID NO: 770906 - RNA, 21 nt, Human
acuugauucaggccacauuca

SEQ ID NO: 770907 - RNA, 20 nt, Human
agacaagcaguuacaccccc

SEQ ID NO: 770908 - RNA, 22 nt, Human
agaucucacuauguugccuagg

SEQ ID NO: 770909 - RNA, 24 nt, Human
aggugauccuucucccuuggccuc

SEQ ID NO: 770910 - RNA, 25 nt, Human
auacaaaaaaggaaaaacuauacaa

SEQ ID NO: 770911 - RNA, 22 nt, Human
auuuuauuauggaaaauuaaaa

SEQ ID NO: 770912 - RNA, 18 nt, Human
caaaacucagaugcccug

SEQ ID NO: 770913 - RNA, 24 nt, Human
caaagugcuaggauuacaggugug

SEQ ID NO: 770914 - RNA, 23 nt, Human
caaauaugaaaugcuugcacuua

SEQ ID NO: 770915 - RNA, 22 nt, Human
caacucaggacaauaaaaacaa

SEQ ID NO: 770916 - RNA, 25 nt, Human
cacagaguacuuccugagggagaga

SEQ ID NO: 770917 - RNA, 23 nt, Human
cacuaccgaugcugaaagacaag

SEQ ID NO: 770918 - RNA, 24 nt, Human
cacuauguugccuaggcuggucuu

SEQ ID NO: 770919 - RNA, 20 nt, Human
caguucacagaaauggcuga

SEQ ID NO: 770920 - RNA, 18 nt, Human
cauguguauauauauagc

SEQ ID NO: 770921 - RNA, 21 nt, Human
ccaaagugcuaggauuacagg

SEQ ID NO: 770922 - RNA, 24 nt, Human
ccaaagugcuaggauuacaggugu

SEQ ID NO: 770923 - RNA, 21 nt, Human
ccaacagaauuugugaaagac

SEQ ID NO: 770924 - RNA, 22 nt, Human
ccaacagaauuugugaaagaca

SEQ ID NO: 770925 - RNA, 24 nt, Human
cgagaucucacuauguugccuagg

SEQ ID NO: 770926 - RNA, 23 nt, Human
cuaaagccacaguucacagaaau

SEQ ID NO: 770927 - RNA, 21 nt, Human
cugagcucaggugauccuucu

SEQ ID NO: 770928 - RNA, 20 nt, Human
cuguuuuugugugugauaug

SEQ ID NO: 770929 - RNA, 20 nt, Human
cuugaacuccugagcucagg

SEQ ID NO: 770930 - RNA, 19 nt, Human
gaaagaaguuuuaauguaa

SEQ ID NO: 770931 - RNA, 20 nt, Human
gagggagagaauucagauaa

SEQ ID NO: 770932 - RNA, 19 nt, Human
gagguggagaugcucaugg

SEQ ID NO: 770933 - RNA, 19 nt, Human
gauuacaggugugagcuac

SEQ ID NO: 770934 - RNA, 23 nt, Human
gauuacaggugugagcuacugca

SEQ ID NO: 770935 - RNA, 22 nt, Human
gccacaguucacagaaauggcu

SEQ ID NO: 770936 - RNA, 23 nt, Human
gccuaggcuggucuugaacuccu

SEQ ID NO: 770937 - RNA, 21 nt, Human
ggagaaaaacuaauuauaaua

SEQ ID NO: 770938 - RNA, 22 nt, Human
ggauuacaggugugagcuacug

SEQ ID NO: 770939 - RNA, 24 nt, Human
ggcuggucuugaacuccugagcuc

SEQ ID NO: 770940 - RNA, 21 nt, Human
gguuaauaaggaaaagagaaa

SEQ ID NO: 770941 - RNA, 19 nt, Human
guuguccaucccucuucca

SEQ ID NO: 770942 - RNA, 21 nt, Human
uaacagguuaagcuucugaaa

SEQ ID NO: 770943 - RNA, 22 nt, Human
uacaggugugagcuacugcacc

SEQ ID NO: 770944 - RNA, 23 nt, Human
uacaggugugagcuacugcaccu

SEQ ID NO: 770945 - RNA, 18 nt, Human
uacauguguauauauaua

SEQ ID NO: 770946 - RNA, 26 nt, Human
uacccugaccuuggagaaagaaguuu

SEQ ID NO: 770947 - RNA, 18 nt, Human
uacuauaugacuaaugcc

SEQ ID NO: 770948 - RNA, 22 nt, Human
uagagacgagaucucacuaugu

SEQ ID NO: 770949 - RNA, 19 nt, Human
uaggauuacaggugugagc

SEQ ID NO: 770950 - RNA, 22 nt, Human
uaggauuacaggugugagcuac

SEQ ID NO: 770951 - RNA, 22 nt, Human
uaggauuacaggugugagcuac

SEQ ID NO: 770952 - RNA, 24 nt, Human
uaggauuacaggugugagcuacug

SEQ ID NO: 770953 - RNA, 25 nt, Human
uaggauuacaggugugagcuacugc

SEQ ID NO: 770954 - RNA, 20 nt, Human
uauauaaugggcuaccacuu

SEQ ID NO: 770955 - RNA, 20 nt, Human
uauguugccuaggcuggucu

SEQ ID NO: 770956 - RNA, 24 nt, Human
uauguugccuaggcuggucuugaa

SEQ ID NO: 770957 - RNA, 20 nt, Human
ucagagguaugaauaggggg

SEQ ID NO: 770958 - RNA, 23 nt, Human
ucccaaagugcuaggauuacagg

SEQ ID NO: 770959 - RNA, 23 nt, Human
ucccuuggccucccaaagugcua

SEQ ID NO: 770960 - RNA, 23 nt, Human
ucucacuauguugccuaggcugg

SEQ ID NO: 770961 - RNA, 24 nt, Human
ucucacuauguugccuaggcuggu

SEQ ID NO: 770962 - RNA, 21 nt, Human
ucucccuuggccucccaaagu

SEQ ID NO: 770963 - RNA, 24 nt, Human
ucugaaaccaauggaaaaaaaaaa

SEQ ID NO: 770964 - RNA, 23 nt, Human
ucuugaacuccugagcucaggug

SEQ ID NO: 770965 - RNA, 18 nt, Human
ugaaagacaauuggaggu

SEQ ID NO: 770966 - RNA, 22 nt, Human
ugaaaggaaguguaauagagua

SEQ ID NO: 770967 - RNA, 25 nt, Human
ugaacuccugagcucaggugauccu

SEQ ID NO: 770968 - RNA, 25 nt, Human
ugaagcaaaacucagaugcccuguc

SEQ ID NO: 770969 - RNA, 18 nt, Human
ugagcucaggugauccuu

SEQ ID NO: 770970 - RNA, 20 nt, Human
ugagcucaggugauccuucu

SEQ ID NO: 770971 - RNA, 22 nt, Human
ugauccuucucccuuggccucc

SEQ ID NO: 770972 - RNA, 23 nt, Human
ugcaccuggccccaacauuauuu

SEQ ID NO: 770973 - RNA, 24 nt, Human
ugccaguuuacacauucaccaaca

SEQ ID NO: 770974 - RNA, 20 nt, Human
ugcuaggauuacagguguga

SEQ ID NO: 770975 - RNA, 19 nt, Human
uggaaauauuuuuugccaa

SEQ ID NO: 770976 - RNA, 20 nt, Human
uggagguacuaaagccacag

SEQ ID NO: 770977 - RNA, 19 nt, Human
ugggagaaaaacuaauuau

SEQ ID NO: 770978 - RNA, 19 nt, Human
uggguaguguauauuuugc

SEQ ID NO: 770979 - RNA, 22 nt, Human
uggguaguguauauuuugcagg

SEQ ID NO: 770980 - RNA, 24 nt, Human
uggucuugaacuccugagcucagg

SEQ ID NO: 770981 - RNA, 22 nt, Human
uguaagcuaaauggaaccagca

SEQ ID NO: 770982 - RNA, 20 nt, Human
uguagagaaacaacauaaug

SEQ ID NO: 770983 - RNA, 24 nt, Human
uguggaaauauuuuuugccaaagg

SEQ ID NO: 770984 - RNA, 23 nt, Human
uguguacccagcuucaacagaag

SEQ ID NO: 770985 - RNA, 21 nt, Human
uuauaauacguuucccagccu

SEQ ID NO: 770986 - RNA, 24 nt, Human
uucaccaacagaauuugugaaaga

SEQ ID NO: 770987 - RNA, 19 nt, Human
uuccugagggagagaauuc

SEQ ID NO: 770988 - RNA, 20 nt, Human
uuguccaucccucuuccaua

SEQ ID NO: 770989 - RNA, 22 nt, Human
uuuaaacuugauucaggccaca

SEQ ID NO: 770990 - RNA, 19 nt, Human
uuuacauguguauauauau

SEQ ID NO: 770991 - RNA, 19 nt, Human
aaccagccuggcaccaccu

SEQ ID NO: 770992 - RNA, 21 nt, Human
accagucgcgcccaaaccucg

SEQ ID NO: 770993 - RNA, 22 nt, Human
accuggcgccccgccaccccca

SEQ ID NO: 770994 - RNA, 23 nt, Human
agcagcggcggcagcuagcaacc

SEQ ID NO: 770995 - RNA, 18 nt, Human
aggcagguccugcgcggg

SEQ ID NO: 770996 - RNA, 23 nt, Human
caaccagccuggcaccaccuccc

SEQ ID NO: 770997 - RNA, 25 nt, Human
cacccccaacacugccccgaggccc

SEQ ID NO: 770998 - RNA, 22 nt, Human
caucucaaccaccagccucugu

SEQ ID NO: 770999 - RNA, 22 nt, Human
ccacguccagccucuguccucu

SEQ ID NO: 771000 - RNA, 19 nt, Human
ccagccucuguggggggca

SEQ ID NO: 771001 - RNA, 21 nt, Human
ccccaacacugccccgaggcc

SEQ ID NO: 771002 - RNA, 23 nt, Human
cccccaacacugccccgaggccc

SEQ ID NO: 771003 - RNA, 22 nt, Human
ccccgaggcccggugacaauga

SEQ ID NO: 771004 - RNA, 25 nt, Human
ccccgccacccccaacacugccccg

SEQ ID NO: 771005 - RNA, 21 nt, Human
cccugugggccucugggccca

SEQ ID NO: 771006 - RNA, 24 nt, Human
ccgccacccccaacacugccccga

SEQ ID NO: 771007 - RNA, 23 nt, Human
ccggugacaaugaagcggccgga

SEQ ID NO: 771008 - RNA, 21 nt, Human
ccggugacaaugaagcggccu

SEQ ID NO: 771009 - RNA, 18 nt, Human
ccuggcaccaccucccca

SEQ ID NO: 771010 - RNA, 20 nt, Human
cgcccaaaccucgggucggc

SEQ ID NO: 771011 - RNA, 18 nt, Human
cgcgcggggccugcagau

SEQ ID NO: 771012 - RNA, 24 nt, Human
cggaaccagucgcgcccaaaccuc

SEQ ID NO: 771013 - RNA, 19 nt, Human
cggccggggugagcagcgg

SEQ ID NO: 771014 - RNA, 28 nt, Human
gccccgaggcccggugacaaugaagcgg

SEQ ID NO: 771015 - RNA, 19 nt, Human
ggccucugggcccacgucc

SEQ ID NO: 771016 - RNA, 20 nt, Human
ucuguccucugccuuccguu

SEQ ID NO: 771017 - RNA, 19 nt, Human
ugccccgaggcccggugac

SEQ ID NO: 771018 - RNA, 21 nt, Human
ugcggaaccagucgcgcccaa

SEQ ID NO: 771019 - RNA, 20 nt, Human
uggcaccaccuccccagccc

SEQ ID NO: 771020 - RNA, 23 nt, Human
ugggccucugggcccacguccag

SEQ ID NO: 771021 - RNA, 23 nt, Human
ugggcgucccugugggccucugg

SEQ ID NO: 771022 - RNA, 18 nt, Human
uguucccggcaucccugg

SEQ ID NO: 771023 - RNA, 20 nt, Human
uucuucgacaguguucccgg

SEQ ID NO: 771024 - RNA, 22 nt, Human
cagcaccgugagcacgaugcca

SEQ ID NO: 771025 - RNA, 22 nt, Human
caggaccaccacucccagcacc

SEQ ID NO: 771026 - RNA, 20 nt, Human
ccccucgguggcaucggcgc

SEQ ID NO: 771027 - RNA, 18 nt, Human
ccucgcuguccaccacgu

SEQ ID NO: 771028 - RNA, 20 nt, Human
uccugcuccucgcuguccac

SEQ ID NO: 771029 - RNA, 25 nt, Human
ucgcuguccaccacguccagcagau

SEQ ID NO: 771030 - RNA, 22 nt, Human
ugaaguccaggaccaccacucc

SEQ ID NO: 771031 - RNA, 22 nt, Human
aaaacacuggccagaacucugc

SEQ ID NO: 771032 - RNA, 21 nt, Human
aaacuggaggcgguaccaaag

SEQ ID NO: 771033 - RNA, 20 nt, Human
aaagacauuucccucagacu

SEQ ID NO: 771034 - RNA, 19 nt, Human
aaagagccugagggggggc

SEQ ID NO: 771035 - RNA, 19 nt, Human
aaagguagagaaaaguuga

SEQ ID NO: 771036 - RNA, 20 nt, Human
aacaaagccacacccaauag

SEQ ID NO: 771037 - RNA, 21 nt, Human
aacaugauuugggccuuuggc

SEQ ID NO: 771038 - RNA, 20 nt, Human
aacuacuggguaagauggaa

SEQ ID NO: 771039 - RNA, 19 nt, Human
aacucugcuuacagacuac

SEQ ID NO: 771040 - RNA, 23 nt, Human
aacuucuaaauaaaccaaaaacc

SEQ ID NO: 771041 - RNA, 21 nt, Human
aagacguguguaaagcuuucu

SEQ ID NO: 771042 - RNA, 19 nt, Human
aagcauaauuagguuugug

SEQ ID NO: 771043 - RNA, 24 nt, Human
aaucgcuugaacccgggaggcaga

SEQ ID NO: 771044 - RNA, 18 nt, Human
aauuagccaggcauggug

SEQ ID NO: 771045 - RNA, 23 nt, Human
acaaaacacuggccagaacucug

SEQ ID NO: 771046 - RNA, 18 nt, Human
acaaagccacacccaaua

SEQ ID NO: 771047 - RNA, 18 nt, Human
acaagugacccaaagcau

SEQ ID NO: 771048 - RNA, 24 nt, Human
acaauccccagaaugcaaauugcc

SEQ ID NO: 771049 - RNA, 24 nt, Human
acagaaaaaaacaaaaaacacaga

SEQ ID NO: 771050 - RNA, 18 nt, Human
acuccagcuuucucaaga

SEQ ID NO: 771051 - RNA, 21 nt, Human
acuguaacuaucuucauugau

SEQ ID NO: 771052 - RNA, 24 nt, Human
acuguaauccagccugggcaaugg

SEQ ID NO: 771053 - RNA, 26 nt, Human
acuguaauccagccugggcaauggag

SEQ ID NO: 771054 - RNA, 19 nt, Human
acuguacuugacucgggag

SEQ ID NO: 771055 - RNA, 24 nt, Human
acuugaggucaggaguucgagacc

SEQ ID NO: 771056 - RNA, 18 nt, Human
acuuuuuggccauaaucc

SEQ ID NO: 771057 - RNA, 20 nt, Human
agaaacaaauuggcagguga

SEQ ID NO: 771058 - RNA, 23 nt, Human
agaacauguaugcccacuuacaa

SEQ ID NO: 771059 - RNA, 18 nt, Human
agaagagauuguuuuuaa

SEQ ID NO: 771060 - RNA, 18 nt, Human
agaagcaauaaacacaga

SEQ ID NO: 771061 - RNA, 22 nt, Human
agaaguugcagugagccgagau

SEQ ID NO: 771062 - RNA, 24 nt, Human
agaaguugcagugagccgagauug

SEQ ID NO: 771063 - RNA, 22 nt, Human
agaaucgcuugaacccgggagg

SEQ ID NO: 771064 - RNA, 18 nt, Human
agacaagcaugauauucu

SEQ ID NO: 771065 - RNA, 23 nt, Human
agacugauuucuuccaacucucu

SEQ ID NO: 771066 - RNA, 19 nt, Human
agauggucucaguuauuag

SEQ ID NO: 771067 - RNA, 23 nt, Human
agccaggcaugguggcacaugcc

SEQ ID NO: 771068 - RNA, 24 nt, Human
agccugggcaauggagcaagacuc

SEQ ID NO: 771069 - RNA, 24 nt, Human
aggaaaaaauagagaaaaauggag

SEQ ID NO: 771070 - RNA, 21 nt, Human
aggcagaaguugcagugagcc

SEQ ID NO: 771071 - RNA, 24 nt, Human
aggcagaaguugcagugagccgag

SEQ ID NO: 771072 - RNA, 24 nt, Human
aggcaggagaaucgcuugaacccg

SEQ ID NO: 771073 - RNA, 21 nt, Human
aggccaacucguaaauaaugu

SEQ ID NO: 771074 - RNA, 19 nt, Human
aggcgguaccaaagaacuc

SEQ ID NO: 771075 - RNA, 20 nt, Human
aggcugaggcaggagaaucg

SEQ ID NO: 771076 - RNA, 24 nt, Human
aggcugaggcaggagaaucgcuug

SEQ ID NO: 771077 - RNA, 23 nt, Human
aggcuguaguacuugaggucugu

SEQ ID NO: 771078 - RNA, 23 nt, Human
agguggguggaucacuugagguc

SEQ ID NO: 771079 - RNA, 19 nt, Human
aguugggggcuguuuguuu

SEQ ID NO: 771080 - RNA, 22 nt, Human
auaaaccaaaaaccacuaaguc

SEQ ID NO: 771081 - RNA, 24 nt, Human
aucacuugaggucaggaguucgag

SEQ ID NO: 771082 - RNA, 21 nt, Human
augaaaacugcaggcaaauac

SEQ ID NO: 771083 - RNA, 24 nt, Human
auggagcaagacucugucucaaaa

SEQ ID NO: 771084 - RNA, 18 nt, Human
augguauauuuauacccc

SEQ ID NO: 771085 - RNA, 19 nt, Human
auggucucaguuauuagaa

SEQ ID NO: 771086 - RNA, 22 nt, Human
auguguguguauaugugugugu

SEQ ID NO: 771087 - RNA, 23 nt, Human
auugauaccacuagaacuaagac

SEQ ID NO: 771088 - RNA, 24 nt, Human
auugcgccacuguaauccagccug

SEQ ID NO: 771089 - RNA, 23 nt, Human
auuuaucagcauaagugcauuuu

SEQ ID NO: 771090 - RNA, 24 nt, Human
caaaaaacaaacagaaaaaaacaa

SEQ ID NO: 771091 - RNA, 20 nt, Human
caaaaauacaccauagacga

SEQ ID NO: 771092 - RNA, 23 nt, Human
caaacuaguagaagcuuccacaa

SEQ ID NO: 771093 - RNA, 23 nt, Human
caccucagugucuguaacaccau

SEQ ID NO: 771094 - RNA, 21 nt, Human
cacuguaauccagccugggca

SEQ ID NO: 771095 - RNA, 23 nt, Human
cacuugaggucaggaguucgaga

SEQ ID NO: 771096 - RNA, 20 nt, Human
cagaaaaaaacaaaaaacac

SEQ ID NO: 771097 - RNA, 21 nt, Human
cagaacucugcuuacagacua

SEQ ID NO: 771098 - RNA, 19 nt, Human
cagacaagcaugauauucu

SEQ ID NO: 771099 - RNA, 24 nt, Human
cagcuacucaggaggcugaggcag

SEQ ID NO: 771100 - RNA, 22 nt, Human
caggcaaauucuaauauacagu

SEQ ID NO: 771101 - RNA, 24 nt, Human
caucagaauuuaaaaaggaacaag

SEQ ID NO: 771102 - RNA, 20 nt, Human
caucucuacuaaaaauacaa

SEQ ID NO: 771103 - RNA, 23 nt, Human
ccaauaaacuccuuaggccaagc

SEQ ID NO: 771104 - RNA, 20 nt, Human
ccacuguaauccagccuggg

SEQ ID NO: 771105 - RNA, 20 nt, Human
ccacuguaauccagccuggg

SEQ ID NO: 771106 - RNA, 21 nt, Human
ccacuguaauccagccugggc

SEQ ID NO: 771107 - RNA, 24 nt, Human
ccacuguaauccagccugggcaau

SEQ ID NO: 771108 - RNA, 24 nt, Human
ccauuuggauucugcaugauuucu

SEQ ID NO: 771109 - RNA, 23 nt, Human
cccacuggcggagacugauuucu

SEQ ID NO: 771110 - RNA, 23 nt, Human
cccaguaacaaauacaaacauaa

SEQ ID NO: 771111 - RNA, 21 nt, Human
ccccagaaugcaaauugccau

SEQ ID NO: 771112 - RNA, 19 nt, Human
ccccagugcccuagagacc

SEQ ID NO: 771113 - RNA, 19 nt, Human
ccugaccaacaaggugaaa

SEQ ID NO: 771114 - RNA, 24 nt, Human
ccugaccaacaaggugaaaucuca

SEQ ID NO: 771115 - RNA, 22 nt, Human
ccuggaagcuuugaggcucuag

SEQ ID NO: 771116 - RNA, 22 nt, Human
ccugggcaauggagcaagacuc

SEQ ID NO: 771117 - RNA, 21 nt, Human
ccuguagucccagcuacucag

SEQ ID NO: 771118 - RNA, 21 nt, Human
cgagaccagccugaccaacaa

SEQ ID NO: 771119 - RNA, 25 nt, Human
cgagguggguggaucacuugagguu

SEQ ID NO: 771120 - RNA, 24 nt, Human
cgccacuguaauccagccugggca

SEQ ID NO: 771121 - RNA, 24 nt, Human
cgggaggcagaaguugcagugagc

SEQ ID NO: 771122 - RNA, 27 nt, Human
cuagcaccaacauauguuacaaaugaa

SEQ ID NO: 771123 - RNA, 21 nt, Human
cucaaaaaacaaacagaaaaa

SEQ ID NO: 771124 - RNA, 23 nt, Human
cucacuuccauuucagacuuaac

SEQ ID NO: 771125 - RNA, 22 nt, Human
cucugucucaaaaaacaaacag

SEQ ID NO: 771126 - RNA, 19 nt, Human
cugacaagugacccaaagc

SEQ ID NO: 771127 - RNA, 20 nt, Human
cugacguggagagggaugga

SEQ ID NO: 771128 - RNA, 21 nt, Human
cugaugcaugucuuggauuga

SEQ ID NO: 771129 - RNA, 24 nt, Human
cuuaagcaugcaaacauaaccacc

SEQ ID NO: 771130 - RNA, 24 nt, Human
cuugucuuggccuggaagcuuuga

SEQ ID NO: 771131 - RNA, 25 nt, Human
cuuuauuaguuuucccuggguguga

SEQ ID NO: 771132 - RNA, 25 nt, Human
gaaagagccugagggggggcggagc

SEQ ID NO: 771133 - RNA, 20 nt, Human
gaacauuuggaagugacagc

SEQ ID NO: 771134 - RNA, 21 nt, Human
gacaauaaagacauuucccuc

SEQ ID NO: 771135 - RNA, 18 nt, Human
gagagaaggagggagcag

SEQ ID NO: 771136 - RNA, 18 nt, Human
gagauaauuaugcucaaa

SEQ ID NO: 771137 - RNA, 23 nt, Human
gagauugcgccacuguaauccag

SEQ ID NO: 771138 - RNA, 20 nt, Human
gagcaagacucugucucaaa

SEQ ID NO: 771139 - RNA, 24 nt, Human
gagguggguggaucacuugagguu

SEQ ID NO: 771140 - RNA, 23 nt, Human
gauaucuucaaacagcaacaauu

SEQ ID NO: 771141 - RNA, 21 nt, Human
gaucacuugaggucaggaguu

SEQ ID NO: 771142 - RNA, 24 nt, Human
gaucacuugaggucaggaguucga

SEQ ID NO: 771143 - RNA, 19 nt, Human
gauugagcauucacugcgg

SEQ ID NO: 771144 - RNA, 19 nt, Human
gcagaauacccaccaggaa

SEQ ID NO: 771145 - RNA, 22 nt, Human
gccacuguaauccagccugggc

SEQ ID NO: 771146 - RNA, 24 nt, Human
gccacuguaauccagccugggcaa

SEQ ID NO: 771147 - RNA, 23 nt, Human
gccaucauccccaaggaaaaaca

SEQ ID NO: 771148 - RNA, 19 nt, Human
gcccugaugcaugucuugg

SEQ ID NO: 771149 - RNA, 24 nt, Human
gccugaccaacaaggugaaaucuc

SEQ ID NO: 771150 - RNA, 22 nt, Human
gccuggucuacuguacuugacu

SEQ ID NO: 771151 - RNA, 23 nt, Human
gccuugggaugcuugucuuggcc

SEQ ID NO: 771152 - RNA, 23 nt, Human
gcucauuuaaagugcaaaucuga

SEQ ID NO: 771153 - RNA, 19 nt, Human
gcugcagccuuauugaucu

SEQ ID NO: 771154 - RNA, 20 nt, Human
gcuguaguacuugaggucug

SEQ ID NO: 771155 - RNA, 22 nt, Human
ggaaaaauaaaacuuacauaga

SEQ ID NO: 771156 - RNA, 18 nt, Human
ggagcaagacucugucuc

SEQ ID NO: 771157 - RNA, 21 nt, Human
gguggaucacuugaggucagg

SEQ ID NO: 771158 - RNA, 24 nt, Human
guaauccagccugggcaauggagc

SEQ ID NO: 771159 - RNA, 21 nt, Human
guugcagugagccgagauugc

SEQ ID NO: 771160 - RNA, 18 nt, Human
uaaaaacacaaaaacuac

SEQ ID NO: 771161 - RNA, 23 nt, Human
uaaaaacacaaaaacuacugggu

SEQ ID NO: 771162 - RNA, 19 nt, Human
uaaagcagcugcaggugaa

SEQ ID NO: 771163 - RNA, 19 nt, Human
uaaauaaaccaaaaaccac

SEQ ID NO: 771164 - RNA, 24 nt, Human
uaacauuagcugacugacccuggc

SEQ ID NO: 771165 - RNA, 19 nt, Human
uaagaagcagacaagcaug

SEQ ID NO: 771166 - RNA, 18 nt, Human
uaaggcucuugagcauuu

SEQ ID NO: 771167 - RNA, 23 nt, Human
uaauccagccugggcaauggagc

SEQ ID NO: 771168 - RNA, 25 nt, Human
uaaucuccuuuauucaucacaaagc

SEQ ID NO: 771169 - RNA, 21 nt, Human
uacaaaacacuggccagaacu

SEQ ID NO: 771170 - RNA, 20 nt, Human
uacaaaacacuggccagaag

SEQ ID NO: 771171 - RNA, 18 nt, Human
uaccaaggagaaaguggg

SEQ ID NO: 771172 - RNA, 18 nt, Human
uaccaaggagaaaguggg

SEQ ID NO: 771173 - RNA, 19 nt, Human
uaccaaggagaaagugggu

SEQ ID NO: 771174 - RNA, 20 nt, Human
uacguuguggcuuuauuagu

SEQ ID NO: 771175 - RNA, 21 nt, Human
uacuguacuugacucgggagg

SEQ ID NO: 771176 - RNA, 23 nt, Human
uacuuuggcaacuuggaacccaa

SEQ ID NO: 771177 - RNA, 19 nt, Human
uagaacuaagacaauaaau

SEQ ID NO: 771178 - RNA, 20 nt, Human
uaugccaacauuuucaggag

SEQ ID NO: 771179 - RNA, 23 nt, Human
uaugucaugcaagcauccuagau

SEQ ID NO: 771180 - RNA, 21 nt, Human
uauguguguguauaugugugu

SEQ ID NO: 771181 - RNA, 18 nt, Human
uaugugugugugcaugca

SEQ ID NO: 771182 - RNA, 23 nt, Human
uauuucaacaaagccacacccaa

SEQ ID NO: 771183 - RNA, 22 nt, Human
ucaagccugaauuaccagcaaa

SEQ ID NO: 771184 - RNA, 24 nt, Human
uccacaagccuaaggguucaagcc

SEQ ID NO: 771185 - RNA, 18 nt, Human
uccauuaucaccauaucu

SEQ ID NO: 771186 - RNA, 21 nt, Human
uccccagaaugcaaauugcca

SEQ ID NO: 771187 - RNA, 18 nt, Human
uccgugggauccccugga

SEQ ID NO: 771188 - RNA, 18 nt, Human
ucgcuugaacccgggagg

SEQ ID NO: 771189 - RNA, 25 nt, Human
ucuaauauauauauaaauacaauga

SEQ ID NO: 771190 - RNA, 19 nt, Human
ucuacuaauuuccucuuuc

SEQ ID NO: 771191 - RNA, 24 nt, Human
ucucaaaaaacaaacagaaaaaaa

SEQ ID NO: 771192 - RNA, 22 nt, Human
ucucuacuaaaaauacaaaaaa

SEQ ID NO: 771193 - RNA, 25 nt, Human
ucugacaaccacaauaaauacagac

SEQ ID NO: 771194 - RNA, 19 nt, Human
ucugauuauuugcaagauu

SEQ ID NO: 771195 - RNA, 19 nt, Human
ucugucugcggugcggugg

SEQ ID NO: 771196 - RNA, 22 nt, Human
ugaaaaaggcugcucuuccaaa

SEQ ID NO: 771197 - RNA, 20 nt, Human
ugacaagugacccaaagcau

SEQ ID NO: 771198 - RNA, 21 nt, Human
ugacaugauuugggagaagag

SEQ ID NO: 771199 - RNA, 19 nt, Human
ugacaugcugggaauauau

SEQ ID NO: 771200 - RNA, 23 nt, Human
ugacuuaaaaucaaugggaaaaa

SEQ ID NO: 771201 - RNA, 18 nt, Human
ugagcauuuacaguaaug

SEQ ID NO: 771202 - RNA, 22 nt, Human
ugagccgagauugcgccacugu

SEQ ID NO: 771203 - RNA, 20 nt, Human
ugaggcaggagaaucgcuug

SEQ ID NO: 771204 - RNA, 24 nt, Human
ugaggcaggagaaucgcuugaacc

SEQ ID NO: 771205 - RNA, 25 nt, Human
ugaggcaggagaaucgcuugaaccc

SEQ ID NO: 771206 - RNA, 22 nt, Human
ugauagguaagggaauaauggg

SEQ ID NO: 771207 - RNA, 20 nt, Human
ugaugaaaaaggcugcucuu

SEQ ID NO: 771208 - RNA, 19 nt, Human
ugauuucaaaguacauccc

SEQ ID NO: 771209 - RNA, 18 nt, Human
ugauuucuuccaacucuc

SEQ ID NO: 771210 - RNA, 22 nt, Human
ugccaaaugauaaggcucuuga

SEQ ID NO: 771211 - RNA, 24 nt, Human
ugccuguagucccagcuacucagg

SEQ ID NO: 771212 - RNA, 23 nt, Human
ugcuuuuuagaauucauuuuaca

SEQ ID NO: 771213 - RNA, 20 nt, Human
uggaacccaaaaaugucuug

SEQ ID NO: 771214 - RNA, 26 nt, Human
uggagcaagacucugucucaaaaaac

SEQ ID NO: 771215 - RNA, 24 nt, Human
uggaucacuugaggucaggaguuc

SEQ ID NO: 771216 - RNA, 27 nt, Human
uggaucacuugaggucaggaguucgag

SEQ ID NO: 771217 - RNA, 19 nt, Human
uggauccacaagccuaagg

SEQ ID NO: 771218 - RNA, 19 nt, Human
uggccuugggaugcuuguc

SEQ ID NO: 771219 - RNA, 19 nt, Human
ugggaauauauuucuguga

SEQ ID NO: 771220 - RNA, 19 nt, Human
ugggagaagaggaaggcag

SEQ ID NO: 771221 - RNA, 23 nt, Human
ugggaugcuugucuuggccugga

SEQ ID NO: 771222 - RNA, 20 nt, Human
ugggucugggaaggcugcug

SEQ ID NO: 771223 - RNA, 27 nt, Human
ugguagcaaacacuucuuucaaauuuc

SEQ ID NO: 771224 - RNA, 24 nt, Human
ugguauguguguguauaugugugu

SEQ ID NO: 771225 - RNA, 24 nt, Human
ugguggcacaugccuguaguccca

SEQ ID NO: 771226 - RNA, 22 nt, Human
uguaacaccauuuaugcuacag

SEQ ID NO: 771227 - RNA, 24 nt, Human
ugugaaacuuaacaaaccccauaa

SEQ ID NO: 771228 - RNA, 18 nt, Human
ugugugcaugcacaugug

SEQ ID NO: 771229 - RNA, 23 nt, Human
uguguguauaugugugugugcau

SEQ ID NO: 771230 - RNA, 24 nt, Human
ugugugugcaugcacauguguuug

SEQ ID NO: 771231 - RNA, 19 nt, Human
uguguguguauaugugugu

SEQ ID NO: 771232 - RNA, 20 nt, Human
uguguguguauaugugugug

SEQ ID NO: 771233 - RNA, 22 nt, Human
uguguguguauaugugugugug

SEQ ID NO: 771234 - RNA, 21 nt, Human
uuaauggaaaagugacaugcu

SEQ ID NO: 771235 - RNA, 24 nt, Human
uuacagacuaccaucuuccauuau

SEQ ID NO: 771236 - RNA, 22 nt, Human
uuacuaagaagcagacaagcau

SEQ ID NO: 771237 - RNA, 25 nt, Human
uuaguuaaaauaguagccauauuca

SEQ ID NO: 771238 - RNA, 24 nt, Human
uuauuggugacuuuuuacaagugg

SEQ ID NO: 771239 - RNA, 19 nt, Human
uucaauggaaccuccacca

SEQ ID NO: 771240 - RNA, 24 nt, Human
uucacuuuucuuucuuuaggaugc

SEQ ID NO: 771241 - RNA, 26 nt, Human
uucagacuuaacauuuacuaagaagc

SEQ ID NO: 771242 - RNA, 20 nt, Human
uuccucuuuacauuuuuggu

SEQ ID NO: 771243 - RNA, 18 nt, Human
uucguuguguuaguggcc

SEQ ID NO: 771244 - RNA, 18 nt, Human
uugcagugagccgagauu

SEQ ID NO: 771245 - RNA, 19 nt, Human
uugcagugagccgagauug

SEQ ID NO: 771246 - RNA, 22 nt, Human
uugcagugagccgagauugcgc

SEQ ID NO: 771247 - RNA, 23 nt, Human
uugcgccacuguaauccagccug

SEQ ID NO: 771248 - RNA, 21 nt, Human
uuugaaagagccugagggggg

SEQ ID NO: 771249 - RNA, 19 nt, Human
uuuucaggagagacuuuac

SEQ ID NO: 771250 - RNA, 22 nt, Human
uuuuccucuuuacauuuuuggu

SEQ ID NO: 771251 - RNA, 21 nt, Human
aaaaccaugcaggccaaauca

SEQ ID NO: 771252 - RNA, 20 nt, Human
aaacccagcuagccuuggaa

SEQ ID NO: 771253 - RNA, 23 nt, Human
aaagaaaaagggguaggaggaaa

SEQ ID NO: 771254 - RNA, 24 nt, Human
aaagcacugggauuacaggcauga

SEQ ID NO: 771255 - RNA, 24 nt, Human
aaagugcugggauuacaggcauga

SEQ ID NO: 771256 - RNA, 21 nt, Human
aaccuccagcaaugcccagcu

SEQ ID NO: 771257 - RNA, 20 nt, Human
aagaagugguuuuauuccag

SEQ ID NO: 771258 - RNA, 18 nt, Human
aagcaaaaacagaacagg

SEQ ID NO: 771259 - RNA, 18 nt, Human
aagcaaaaacagaacagg

SEQ ID NO: 771260 - RNA, 18 nt, Human
aagcagaaguccccugug

SEQ ID NO: 771261 - RNA, 21 nt, Human
aagcagugcucacgugaggcu

SEQ ID NO: 771262 - RNA, 24 nt, Human
aagugauccaccugucuuggccuu

SEQ ID NO: 771263 - RNA, 19 nt, Human
aagugcugggauuacaggc

SEQ ID NO: 771264 - RNA, 21 nt, Human
aagugcugggauuacaggcau

SEQ ID NO: 771265 - RNA, 21 nt, Human
acaaagggggaaaugugugau

SEQ ID NO: 771266 - RNA, 19 nt, Human
acaaguggucccugccuuc

SEQ ID NO: 771267 - RNA, 20 nt, Human
acauuuuguuuguuugagac

SEQ ID NO: 771268 - RNA, 24 nt, Human
accauuuuggucaggcuggucucg

SEQ ID NO: 771269 - RNA, 20 nt, Human
acgggguuucaccauuuugg

SEQ ID NO: 771270 - RNA, 21 nt, Human
acgggguuucaccauuuuggu

SEQ ID NO: 771271 - RNA, 24 nt, Human
acgggguuucaccauuuuggucag

SEQ ID NO: 771272 - RNA, 18 nt, Human
acuaaagugcaaauuccc

SEQ ID NO: 771273 - RNA, 22 nt, Human
acuccaucacaccaggucugag

SEQ ID NO: 771274 - RNA, 19 nt, Human
agaagggaugagaggcaga

SEQ ID NO: 771275 - RNA, 24 nt, Human
agacaggaagggaguagcacagaa

SEQ ID NO: 771276 - RNA, 24 nt, Human
agacugagcuggggccugcugacu

SEQ ID NO: 771277 - RNA, 25 nt, Human
agagaugagcccacccagcugcagg

SEQ ID NO: 771278 - RNA, 21 nt, Human
agaggggcacaggcacccaga

SEQ ID NO: 771279 - RNA, 18 nt, Human
agcagcugaggggagaga

SEQ ID NO: 771280 - RNA, 21 nt, Human
agccucugggccuuggguccc

SEQ ID NO: 771281 - RNA, 21 nt, Human
aggaccagcaggggaccaaga

SEQ ID NO: 771282 - RNA, 20 nt, Human
aggagggugagcaggggaag

SEQ ID NO: 771283 - RNA, 24 nt, Human
aggagugcagugacacgaucucgg

SEQ ID NO: 771284 - RNA, 25 nt, Human
aggcaggagugcagugacacgaucu

SEQ ID NO: 771285 - RNA, 23 nt, Human
aggcauuggcagugggauagcug

SEQ ID NO: 771286 - RNA, 24 nt, Human
aggcauuggcagugggauagcugg

SEQ ID NO: 771287 - RNA, 21 nt, Human
agggaugaaguguggggccag

SEQ ID NO: 771288 - RNA, 19 nt, Human
agggcucugagggcaguug

SEQ ID NO: 771289 - RNA, 20 nt, Human
agggcuucugaggaggguga

SEQ ID NO: 771290 - RNA, 24 nt, Human
aggugcaggagacacugcaccagc

SEQ ID NO: 771291 - RNA, 22 nt, Human
aguagagacgggguuucaccau

SEQ ID NO: 771292 - RNA, 18 nt, Human
aguagcugggauuacaga

SEQ ID NO: 771293 - RNA, 24 nt, Human
agugcagugacacgaucucggcuc

SEQ ID NO: 771294 - RNA, 18 nt, Human
agugcugggauuacaggc

SEQ ID NO: 771295 - RNA, 21 nt, Human
aguggugacagugugggugag

SEQ ID NO: 771296 - RNA, 18 nt, Human
aguugcuggggcugagga

SEQ ID NO: 771297 - RNA, 19 nt, Human
aguugguggacagggagca

SEQ ID NO: 771298 - RNA, 19 nt, Human
aguuugcagaaguuccugu

SEQ ID NO: 771299 - RNA, 19 nt, Human
auccucaccccagggaguc

SEQ ID NO: 771300 - RNA, 24 nt, Human
augauccacccaucucagccuccc

SEQ ID NO: 771301 - RNA, 21 nt, Human
auuccagaaggcauuggcagu

SEQ ID NO: 771302 - RNA, 24 nt, Human
auuuuuguguuuuuaguagagacg

SEQ ID NO: 771303 - RNA, 21 nt, Human
caaaccuccagcaaugcccag

SEQ ID NO: 771304 - RNA, 24 nt, Human
caaagcacugggauuacaggcaug

SEQ ID NO: 771305 - RNA, 24 nt, Human
caaagugcugggauuacaggcaug

SEQ ID NO: 771306 - RNA, 21 nt, Human
caagaaauacuuauugaacau

SEQ ID NO: 771307 - RNA, 19 nt, Human
caagacaaguggucccugc

SEQ ID NO: 771308 - RNA, 22 nt, Human
caagcgauucuccugucucagc

SEQ ID NO: 771309 - RNA, 18 nt, Human
caagugacuccaccucuc

SEQ ID NO: 771310 - RNA, 22 nt, Human
caagugauccaccugucuuggc

SEQ ID NO: 771311 - RNA, 19 nt, Human
caaguggucccugccuuca

SEQ ID NO: 771312 - RNA, 21 nt, Human
caaugcccagcuggagagagu

SEQ ID NO: 771313 - RNA, 19 nt, Human
cacagcaaacugcuguuca

SEQ ID NO: 771314 - RNA, 20 nt, Human
cacagguccagcaagugggc

SEQ ID NO: 771315 - RNA, 23 nt, Human
caccacgcccggcuaauuuuugu

SEQ ID NO: 771316 - RNA, 19 nt, Human
caccauccaaaagcgcuua

SEQ ID NO: 771317 - RNA, 30 nt, Human
caccauccaaaagcgcuuaaagugucccag

SEQ ID NO: 771318 - RNA, 21 nt, Human
caccauuuuggucaggcuggu

SEQ ID NO: 771319 - RNA, 24 nt, Human
caccauuuuggucaggcuggucuc

SEQ ID NO: 771320 - RNA, 20 nt, Human
cacccacugucccaucuccu

SEQ ID NO: 771321 - RNA, 22 nt, Human
cacccaucucagccucccaaag

SEQ ID NO: 771322 - RNA, 23 nt, Human
cacccaucucagccucccaaagu

SEQ ID NO: 771323 - RNA, 22 nt, Human
cacccuccucacugcuugcacc

SEQ ID NO: 771324 - RNA, 24 nt, Human
caccucaagugauccaccugucuu

SEQ ID NO: 771325 - RNA, 18 nt, Human
caccugucuuggccuucc

SEQ ID NO: 771326 - RNA, 23 nt, Human
caccugucuuggccuuccaaagc

SEQ ID NO: 771327 - RNA, 26 nt, Human
cacugcaccagccccacugcagggcu

SEQ ID NO: 771328 - RNA, 23 nt, Human
cacugcuaccucugccucccggg

SEQ ID NO: 771329 - RNA, 23 nt, Human
cacugcuugcaccgacugaggca

SEQ ID NO: 771330 - RNA, 20 nt, Human
cacugggauuacaggcauga

SEQ ID NO: 771331 - RNA, 24 nt, Human
cacugugucuggagcucaguuucc

SEQ ID NO: 771332 - RNA, 20 nt, Human
cagagacccaggcacccucc

SEQ ID NO: 771333 - RNA, 22 nt, Human
cagagacugggucuugcuaugu

SEQ ID NO: 771334 - RNA, 19 nt, Human
cagagagccuaaaggucaa

SEQ ID NO: 771335 - RNA, 24 nt, Human
cagcaggggaccaagaaggacggc

SEQ ID NO: 771336 - RNA, 20 nt, Human
cagccuccugaguagcuggg

SEQ ID NO: 771337 - RNA, 19 nt, Human
cagcugaggggagagagau

SEQ ID NO: 771338 - RNA, 19 nt, Human
cagcuuuaagcccugcccu

SEQ ID NO: 771339 - RNA, 22 nt, Human
caggagacacugcaccagcccc

SEQ ID NO: 771340 - RNA, 19 nt, Human
caggagugcuugugaccau

SEQ ID NO: 771341 - RNA, 24 nt, Human
caggggaagugcuggagcagccuc

SEQ ID NO: 771342 - RNA, 20 nt, Human
cauccaaaagcgcuuaaagu

SEQ ID NO: 771343 - RNA, 24 nt, Human
caucucagccucccaaagugcugg

SEQ ID NO: 771344 - RNA, 24 nt, Human
caugauccacccaucucagccucc

SEQ ID NO: 771345 - RNA, 21 nt, Human
caugcuuuggucaagaagagg

SEQ ID NO: 771346 - RNA, 21 nt, Human
cauuacggaagugccugggug

SEQ ID NO: 771347 - RNA, 21 nt, Human
ccaaaccuccagcaaugccca

SEQ ID NO: 771348 - RNA, 22 nt, Human
ccaaagcacugggauuacaggc

SEQ ID NO: 771349 - RNA, 24 nt, Human
ccaaagcacugggauuacaggcau

SEQ ID NO: 771350 - RNA, 23 nt, Human
ccaaagugcugggauuacaggca

SEQ ID NO: 771351 - RNA, 24 nt, Human
ccaaagugcugggauuacaggcau

SEQ ID NO: 771352 - RNA, 20 nt, Human
ccaccacgcccggcuaauuu

SEQ ID NO: 771353 - RNA, 18 nt, Human
ccaccagcucccuguagg

SEQ ID NO: 771354 - RNA, 26 nt, Human
ccacccaucucagccucccaaagugc

SEQ ID NO: 771355 - RNA, 24 nt, Human
ccaccccuucucagcugugugauc

SEQ ID NO: 771356 - RNA, 22 nt, Human
ccagcuuuaagcccugcccuuc

SEQ ID NO: 771357 - RNA, 19 nt, Human
cccaaagaaguauuuccuc

SEQ ID NO: 771358 - RNA, 24 nt, Human
cccaaagugcugggauuacaggca

SEQ ID NO: 771359 - RNA, 21 nt, Human
cccacagauccucgcucugaa

SEQ ID NO: 771360 - RNA, 23 nt, Human
cccacagguccagcaagugggcu

SEQ ID NO: 771361 - RNA, 19 nt, Human
cccaccauccaaaagcgcu

SEQ ID NO: 771362 - RNA, 24 nt, Human
cccaccauccaaaagcgcuuaaag

SEQ ID NO: 771363 - RNA, 19 nt, Human
ccccagcuguuuguuuucg

SEQ ID NO: 771364 - RNA, 20 nt, Human
ccccauccugccucuaacac

SEQ ID NO: 771365 - RNA, 20 nt, Human
cccccgcagagagccuaaaa

SEQ ID NO: 771366 - RNA, 21 nt, Human
cccccuagugggaagcugccu

SEQ ID NO: 771367 - RNA, 18 nt, Human
cccccuccccacagaucc

SEQ ID NO: 771368 - RNA, 19 nt, Human
ccccucuuccaucuucucu

SEQ ID NO: 771369 - RNA, 20 nt, Human
ccccucuuccaucuucucuc

SEQ ID NO: 771370 - RNA, 20 nt, Human
cccggguucaagcgauucuc

SEQ ID NO: 771371 - RNA, 23 nt, Human
cccggguucaagcgauucuccug

SEQ ID NO: 771372 - RNA, 21 nt, Human
cccugccuucauggagcucac

SEQ ID NO: 771373 - RNA, 23 nt, Human
ccggggcgggggcgcucgcagcc

SEQ ID NO: 771374 - RNA, 22 nt, Human
ccucaaggacagcuaguggcac

SEQ ID NO: 771375 - RNA, 24 nt, Human
ccucccggguucaagcgauucucc

SEQ ID NO: 771376 - RNA, 19 nt, Human
ccucuaacaccagcuuuaa

SEQ ID NO: 771377 - RNA, 21 nt, Human
ccugaccucaugauccaccca

SEQ ID NO: 771378 - RNA, 19 nt, Human
ccugaguagcugggauuac

SEQ ID NO: 771379 - RNA, 20 nt, Human
ccuggguggaggauggagug

SEQ ID NO: 771380 - RNA, 23 nt, Human
ccuggguggugagggagcccucc

SEQ ID NO: 771381 - RNA, 18 nt, Human
ccuguuucuucaugcucu

SEQ ID NO: 771382 - RNA, 19 nt, Human
ccuucuuuguagggaugaa

SEQ ID NO: 771383 - RNA, 24 nt, Human
cgcucugucacccaggcaggagug

SEQ ID NO: 771384 - RNA, 23 nt, Human
cgugggcucaaggauuugcccuc

SEQ ID NO: 771385 - RNA, 19 nt, Human
cuaagcuucugaccuguga

SEQ ID NO: 771386 - RNA, 23 nt, Human
cuagaacccacgucacugggugg

SEQ ID NO: 771387 - RNA, 18 nt, Human
cucaagugauccaccugu

SEQ ID NO: 771388 - RNA, 24 nt, Human
cucaagugauccaccugucuuggc

SEQ ID NO: 771389 - RNA, 24 nt, Human
cucacugcuaccucugccucccgg

SEQ ID NO: 771390 - RNA, 18 nt, Human
cucacuucuuaucagugc

SEQ ID NO: 771391 - RNA, 24 nt, Human
cucagccuccugaguagcugggau

SEQ ID NO: 771392 - RNA, 19 nt, Human
cucccccuccccacagauc

SEQ ID NO: 771393 - RNA, 18 nt, Human
cucccuucuuucucuucc

SEQ ID NO: 771394 - RNA, 18 nt, Human
cuccugaccucaugaucc

SEQ ID NO: 771395 - RNA, 22 nt, Human
cucucggauacaggaaacccag

SEQ ID NO: 771396 - RNA, 24 nt, Human
cucugugcaucacuuucuuccuug

SEQ ID NO: 771397 - RNA, 22 nt, Human
cugcauccccccaccauccaaa

SEQ ID NO: 771398 - RNA, 19 nt, Human
cuggcuggauucuggaaau

SEQ ID NO: 771399 - RNA, 19 nt, Human
cugggcccacauggccccc

SEQ ID NO: 771400 - RNA, 24 nt, Human
cugggucuugcuauguugcccagg

SEQ ID NO: 771401 - RNA, 23 nt, Human
cugucucagccuccugaguagcu

SEQ ID NO: 771402 - RNA, 25 nt, Human
cuuaaagugucccacagguccagca

SEQ ID NO: 771403 - RNA, 21 nt, Human
cuugcuuuucuguaguuugca

SEQ ID NO: 771404 - RNA, 20 nt, Human
gaacccacgucacugggugg

SEQ ID NO: 771405 - RNA, 25 nt, Human
gaccaagaaggacggcccggauucc

SEQ ID NO: 771406 - RNA, 19 nt, Human
gacccagccucucugggcc

SEQ ID NO: 771407 - RNA, 22 nt, Human
gacccagccucucugggcccac

SEQ ID NO: 771408 - RNA, 22 nt, Human
gaccucaugauccacccaucuc

SEQ ID NO: 771409 - RNA, 24 nt, Human
gaccucaugauccacccaucucag

SEQ ID NO: 771410 - RNA, 21 nt, Human
gacuuugcucccccuccccac

SEQ ID NO: 771411 - RNA, 22 nt, Human
gagacccagccucucugggccc

SEQ ID NO: 771412 - RNA, 18 nt, Human
gagacgggguuucaccau

SEQ ID NO: 771413 - RNA, 24 nt, Human
gagacgggguuucaccauuuuggu

SEQ ID NO: 771414 - RNA, 24 nt, Human
gagaggcuguggcugcuuuccaga

SEQ ID NO: 771415 - RNA, 20 nt, Human
gaggauggaguguugcuugg

SEQ ID NO: 771416 - RNA, 24 nt, Human
gaguagcugggauuacagacgcgc

SEQ ID NO: 771417 - RNA, 18 nt, Human
gauuacagacgcgcgcca

SEQ ID NO: 771418 - RNA, 18 nt, Human
gauuacaggcaugagcca

SEQ ID NO: 771419 - RNA, 19 nt, Human
gauuacaggcaugagccac

SEQ ID NO: 771420 - RNA, 23 nt, Human
gauuacaggcaugagccacugca

SEQ ID NO: 771421 - RNA, 21 nt, Human
gauuacaggcaugagcuacca

SEQ ID NO: 771422 - RNA, 22 nt, Human
gauuacaggcaugagcuaccau

SEQ ID NO: 771423 - RNA, 21 nt, Human
gauucuccugucucagccucc

SEQ ID NO: 771424 - RNA, 22 nt, Human
gcacaggagccucucggauaca

SEQ ID NO: 771425 - RNA, 18 nt, Human
gccacugcacccagccgu

SEQ ID NO: 771426 - RNA, 24 nt, Human
gcgauucuccugucucagccuccu

SEQ ID NO: 771427 - RNA, 18 nt, Human
gcgccccaggugggggac

SEQ ID NO: 771428 - RNA, 20 nt, Human
gcuagccaguggcaggcaca

SEQ ID NO: 771429 - RNA, 19 nt, Human
gcuggagcagccucugggc

SEQ ID NO: 771430 - RNA, 23 nt, Human
gcuggucucgaacuccugaccuc

SEQ ID NO: 771431 - RNA, 21 nt, Human
ggaaaugugugauucagcccc

SEQ ID NO: 771432 - RNA, 18 nt, Human
ggaaggcaggggcggagc

SEQ ID NO: 771433 - RNA, 19 nt, Human
ggaagugcuggagcagccu

SEQ ID NO: 771434 - RNA, 20 nt, Human
ggagggcuucugaggagggu

SEQ ID NO: 771435 - RNA, 22 nt, Human
ggagggggagggaagacugagc

SEQ ID NO: 771436 - RNA, 18 nt, Human
ggauacaggaaacccagc

SEQ ID NO: 771437 - RNA, 22 nt, Human
ggauuacaggcaugagccacug

SEQ ID NO: 771438 - RNA, 24 nt, Human
ggauuacaggcaugagcuaccaug

SEQ ID NO: 771439 - RNA, 24 nt, Human
ggcagacgggcgccccaggugggg

SEQ ID NO: 771440 - RNA, 24 nt, Human
ggcuggucucgaacuccugaccuc

SEQ ID NO: 771441 - RNA, 18 nt, Human
gggagagagaugagccca

SEQ ID NO: 771442 - RNA, 20 nt, Human
gggagggggagggaagacug

SEQ ID NO: 771443 - RNA, 21 nt, Human
gggagggggugggcgugggcu

SEQ ID NO: 771444 - RNA, 19 nt, Human
gggcagggccgaggguggg

SEQ ID NO: 771445 - RNA, 18 nt, Human
ggggaagugcuggagcag

SEQ ID NO: 771446 - RNA, 22 nt, Human
gggggagggaagacugagcugg

SEQ ID NO: 771447 - RNA, 20 nt, Human
gggggucaaggaccaugucc

SEQ ID NO: 771448 - RNA, 23 nt, Human
gggguuucaccauuuuggucagg

SEQ ID NO: 771449 - RNA, 22 nt, Human
gggucuugcuauguugcccagg

SEQ ID NO: 771450 - RNA, 24 nt, Human
gggugagcaggggaagugcuggag

SEQ ID NO: 771451 - RNA, 20 nt, Human
ggguggugggagacuggagg

SEQ ID NO: 771452 - RNA, 22 nt, Human
ggguuucaccauuuuggucagg

SEQ ID NO: 771453 - RNA, 23 nt, Human
gguccagcaagugggcugggcac

SEQ ID NO: 771454 - RNA, 19 nt, Human
ggucucgaacuccugaccu

SEQ ID NO: 771455 - RNA, 20 nt, Human
ggugagcaggggaagugcug

SEQ ID NO: 771456 - RNA, 18 nt, Human
gguggugggagacuggag

SEQ ID NO: 771457 - RNA, 20 nt, Human
gguguguguuucauaaagac

SEQ ID NO: 771458 - RNA, 20 nt, Human
guagcugggauuacagacgc

SEQ ID NO: 771459 - RNA, 19 nt, Human
guccuccugggagaagagg

SEQ ID NO: 771460 - RNA, 21 nt, Human
gugauccaccugucuuggccu

SEQ ID NO: 771461 - RNA, 24 nt, Human
gugauccaccugucuuggccuucc

SEQ ID NO: 771462 - RNA, 19 nt, Human
gugcuugugaccaugugga

SEQ ID NO: 771463 - RNA, 19 nt, Human
guggucccugccuucaugg

SEQ ID NO: 771464 - RNA, 22 nt, Human
gugucuuacucccuucuuucuc

SEQ ID NO: 771465 - RNA, 19 nt, Human
uaagauaggucuaguuugg

SEQ ID NO: 771466 - RNA, 24 nt, Human
uaagaugaacgaaugacugaauca

SEQ ID NO: 771467 - RNA, 19 nt, Human
uaagcuucugaccugugag

SEQ ID NO: 771468 - RNA, 21 nt, Human
uaagugcagagacugggucuu

SEQ ID NO: 771469 - RNA, 24 nt, Human
uaauuuuuguguuuuuaguagaga

SEQ ID NO: 771470 - RNA, 23 nt, Human
uacagacgcgcgccaccacgccc

SEQ ID NO: 771471 - RNA, 24 nt, Human
uacaggcaugagccacugcaccca

SEQ ID NO: 771472 - RNA, 24 nt, Human
uacaggcaugagcuaccaugccca

SEQ ID NO: 771473 - RNA, 19 nt, Human
uaccaugcccagucaugcc

SEQ ID NO: 771474 - RNA, 20 nt, Human
uacucccuucuuucucuucc

SEQ ID NO: 771475 - RNA, 21 nt, Human
uagaagucacugaccuggguu

SEQ ID NO: 771476 - RNA, 24 nt, Human
uaguaagauaggucuaguuugggu

SEQ ID NO: 771477 - RNA, 23 nt, Human
uaguagagacgggguuucaccau

SEQ ID NO: 771478 - RNA, 20 nt, Human
uauguugcccaggcuggucu

SEQ ID NO: 771479 - RNA, 22 nt, Human
uauguugcccaggcuggucuag

SEQ ID NO: 771480 - RNA, 25 nt, Human
uauguugcccaggcuggucuagcua

SEQ ID NO: 771481 - RNA, 26 nt, Human
uauguugcccaggcuggucuagcuag

SEQ ID NO: 771482 - RNA, 22 nt, Human
ucacgugaggcuggucaugcca

SEQ ID NO: 771483 - RNA, 24 nt, Human
ucacugcuaccucugccucccggg

SEQ ID NO: 771484 - RNA, 18 nt, Human
ucacuggguggcugggag

SEQ ID NO: 771485 - RNA, 20 nt, Human
ucagccuccugaguagcugg

SEQ ID NO: 771486 - RNA, 18 nt, Human
ucaggagcuagggauaca

SEQ ID NO: 771487 - RNA, 24 nt, Human
uccaaagcacugggauuacaggca

SEQ ID NO: 771488 - RNA, 18 nt, Human
uccaagacaggaagggag

SEQ ID NO: 771489 - RNA, 19 nt, Human
uccaccucucugugcauca

SEQ ID NO: 771490 - RNA, 19 nt, Human
uccagaucagaggaggagg

SEQ ID NO: 771491 - RNA, 21 nt, Human
uccagcaagugggcugggcac

SEQ ID NO: 771492 - RNA, 20 nt, Human
uccaucuucucucauucacc

SEQ ID NO: 771493 - RNA, 24 nt, Human
ucccaaagugcugggauuacaggc

SEQ ID NO: 771494 - RNA, 20 nt, Human
ucccagcagggcucuugcuu

SEQ ID NO: 771495 - RNA, 21 nt, Human
ucccggguucaagcgauucuc

SEQ ID NO: 771496 - RNA, 24 nt, Human
ucccggguucaagcgauucuccug

SEQ ID NO: 771497 - RNA, 24 nt, Human
ucccuggguggugagggagcccuc

SEQ ID NO: 771498 - RNA, 18 nt, Human
uccugaguagcugggauu

SEQ ID NO: 771499 - RNA, 21 nt, Human
uccuugacccugaccugucuc

SEQ ID NO: 771500 - RNA, 19 nt, Human
uccuugugagguaagcagg

SEQ ID NO: 771501 - RNA, 23 nt, Human
ucucaccucaagugauccaccug

SEQ ID NO: 771502 - RNA, 20 nt, Human
ucucagccucccaaagugcu

SEQ ID NO: 771503 - RNA, 18 nt, Human
ucuccaggccacucaauu

SEQ ID NO: 771504 - RNA, 24 nt, Human
ucuccugucucagccuccugagua

SEQ ID NO: 771505 - RNA, 19 nt, Human
ucucgaacuccugaccuca

SEQ ID NO: 771506 - RNA, 19 nt, Human
ucucgcucugucacccagg

SEQ ID NO: 771507 - RNA, 24 nt, Human
ucucgcucugucacccaggcagga

SEQ ID NO: 771508 - RNA, 24 nt, Human
ucugucacccaggcaggagugcag

SEQ ID NO: 771509 - RNA, 18 nt, Human
ucuugcuauguugcccag

SEQ ID NO: 771510 - RNA, 19 nt, Human
ucuugcuauguugcccagg

SEQ ID NO: 771511 - RNA, 23 nt, Human
ucuugcuauguugcccaggcugg

SEQ ID NO: 771512 - RNA, 24 nt, Human
ucuugcuauguugcccaggcuggu

SEQ ID NO: 771513 - RNA, 20 nt, Human
ugaaucccagcuccaccccu

SEQ ID NO: 771514 - RNA, 21 nt, Human
ugacaagggggagaagaguug

SEQ ID NO: 771515 - RNA, 25 nt, Human
ugaccugucucccaggauuaguggg

SEQ ID NO: 771516 - RNA, 25 nt, Human
ugacugaaucacccaaucauuagga

SEQ ID NO: 771517 - RNA, 24 nt, Human
ugagaagggaugagaggcagagac

SEQ ID NO: 771518 - RNA, 22 nt, Human
ugagagugucggaucaauggaa

SEQ ID NO: 771519 - RNA, 25 nt, Human
ugagcaagugacuccaccucucugu

SEQ ID NO: 771520 - RNA, 22 nt, Human
ugaggagacugagugaagggag

SEQ ID NO: 771521 - RNA, 19 nt, Human
ugaggagggugagcagggg

SEQ ID NO: 771522 - RNA, 20 nt, Human
ugaggccaguaaucuacacc

SEQ ID NO: 771523 - RNA, 19 nt, Human
ugaggcuggucaugccagc

SEQ ID NO: 771524 - RNA, 22 nt, Human
ugagggcaguugguggacaggg

SEQ ID NO: 771525 - RNA, 24 nt, Human
ugagguaagcaggggagggagccc

SEQ ID NO: 771526 - RNA, 21 nt, Human
ugagucucgcucugucaccca

SEQ ID NO: 771527 - RNA, 24 nt, Human
ugaucuguacauucucuggcacaa

SEQ ID NO: 771528 - RNA, 18 nt, Human
ugcaccagccccacugca

SEQ ID NO: 771529 - RNA, 24 nt, Human
ugcagagacugggucuugcuaugu

SEQ ID NO: 771530 - RNA, 22 nt, Human
ugcagugacacgaucucggcuc

SEQ ID NO: 771531 - RNA, 22 nt, Human
ugcuauguugcccaggcugguc

SEQ ID NO: 771532 - RNA, 18 nt, Human
ugcucccccuccccacag

SEQ ID NO: 771533 - RNA, 19 nt, Human
uggaaaaagcagugcucac

SEQ ID NO: 771534 - RNA, 22 nt, Human
uggaaggcaggggcggagccug

SEQ ID NO: 771535 - RNA, 23 nt, Human
uggaaggcaggggcggagccugg

SEQ ID NO: 771536 - RNA, 26 nt, Human
uggaggaagcccagagggcucugagg

SEQ ID NO: 771537 - RNA, 18 nt, Human
uggccauccucaccccag

SEQ ID NO: 771538 - RNA, 22 nt, Human
uggcugcuuuccagaauggcac

SEQ ID NO: 771539 - RNA, 23 nt, Human
ugggaagcugccuucuuuguagg

SEQ ID NO: 771540 - RNA, 24 nt, Human
ugggagaagaggggcacaggcacc

SEQ ID NO: 771541 - RNA, 18 nt, Human
ugggagggggugggcgug

SEQ ID NO: 771542 - RNA, 18 nt, Human
ugggagggggugggcgug

SEQ ID NO: 771543 - RNA, 21 nt, Human
ugggagggggugggcgugggc

SEQ ID NO: 771544 - RNA, 22 nt, Human
ugggagggggugggcgugggcc

SEQ ID NO: 771545 - RNA, 21 nt, Human
ugggauuacagacgcgcgcca

SEQ ID NO: 771546 - RNA, 22 nt, Human
ugggauuacagacgcgcgccac

SEQ ID NO: 771547 - RNA, 24 nt, Human
ugggauuacagacgcgcgccacca

SEQ ID NO: 771548 - RNA, 18 nt, Human
ugggauuacaggcaugag

SEQ ID NO: 771549 - RNA, 19 nt, Human
ugggauuacaggcaugagc

SEQ ID NO: 771550 - RNA, 21 nt, Human
ugggauuacaggcaugagcca

SEQ ID NO: 771551 - RNA, 22 nt, Human
ugggauuacaggcaugagccac

SEQ ID NO: 771552 - RNA, 22 nt, Human
ugggauuacaggcaugagccac

SEQ ID NO: 771553 - RNA, 24 nt, Human
ugggauuacaggcaugagccacug

SEQ ID NO: 771554 - RNA, 26 nt, Human
ugggauuacaggcaugagccacugca

SEQ ID NO: 771555 - RNA, 22 nt, Human
ugggauuacaggcaugagcuac

SEQ ID NO: 771556 - RNA, 23 nt, Human
ugggauuacaggcaugagcuacc

SEQ ID NO: 771557 - RNA, 24 nt, Human
ugggauuacaggcaugagcuacca

SEQ ID NO: 771558 - RNA, 25 nt, Human
ugggauuacaggcaugagcuaccau

SEQ ID NO: 771559 - RNA, 23 nt, Human
ugggcgugggcucaaggauuugc

SEQ ID NO: 771560 - RNA, 20 nt, Human
ugggcucaaggauuugcccu

SEQ ID NO: 771561 - RNA, 22 nt, Human
ugggggacugggccggcgugcu

SEQ ID NO: 771562 - RNA, 21 nt, Human
uggguuaagacugugggccua

SEQ ID NO: 771563 - RNA, 25 nt, Human
uggguuucucuccuauuugccuccc

SEQ ID NO: 771564 - RNA, 24 nt, Human
uggucaggcuggucucgaacuccu

SEQ ID NO: 771565 - RNA, 21 nt, Human
uggucagugccuucaccuccu

SEQ ID NO: 771566 - RNA, 20 nt, Human
ugucacaucacccacugucc

SEQ ID NO: 771567 - RNA, 21 nt, Human
ugucacaucacccacuguccc

SEQ ID NO: 771568 - RNA, 24 nt, Human
ugucucagccuccugaguagcugg

SEQ ID NO: 771569 - RNA, 22 nt, Human
ugucugagaaacaaugucacau

SEQ ID NO: 771570 - RNA, 19 nt, Human
ugugauucagccccagagg

SEQ ID NO: 771571 - RNA, 20 nt, Human
uguggggccagcaggguggu

SEQ ID NO: 771572 - RNA, 23 nt, Human
uguggugguugucaggagcuagg

SEQ ID NO: 771573 - RNA, 21 nt, Human
uguguuuuuaguagagacggg

SEQ ID NO: 771574 - RNA, 19 nt, Human
uguugcccaggcuggucua

SEQ ID NO: 771575 - RNA, 20 nt, Human
uuaaaaaacgugcugaccca

SEQ ID NO: 771576 - RNA, 22 nt, Human
uuaguagagacgggguuucacc

SEQ ID NO: 771577 - RNA, 24 nt, Human
uuaguagagacgggguuucaccau

SEQ ID NO: 771578 - RNA, 23 nt, Human
uucaagcgauucuccugucucag

SEQ ID NO: 771579 - RNA, 18 nt, Human
uucuuacauggcaucagu

SEQ ID NO: 771580 - RNA, 19 nt, Human
uugcccucugccuuagaug

SEQ ID NO: 771581 - RNA, 19 nt, Human
uugcucccccuccccacag

SEQ ID NO: 771582 - RNA, 20 nt, Human
uuggaacauuuaugagaagg

SEQ ID NO: 771583 - RNA, 21 nt, Human
uugguggacagggagcagcug

SEQ ID NO: 771584 - RNA, 25 nt, Human
uuguagggaugaaguguggggccag

SEQ ID NO: 771585 - RNA, 24 nt, Human
uuucaccauuuuggucaggcuggu

SEQ ID NO: 771586 - RNA, 21 nt, Human
uuugcagaaguuccuguccag

SEQ ID NO: 771587 - RNA, 24 nt, Human
uuuguguuuuuaguagagacgggg

SEQ ID NO: 771588 - RNA, 19 nt, Human
uuuguuuucgcucgcgccu

SEQ ID NO: 771589 - RNA, 24 nt, Human
uuuuuaguagagacgggguuucac

SEQ ID NO: 771590 - RNA, 20 nt, Human
uuuuuguguuuuuaguagag

SEQ ID NO: 771591 - RNA, 23 nt, Human
aaacagggaucagugacagcaac

SEQ ID NO: 771592 - RNA, 22 nt, Human
aacacugaagaucugagaagcu

SEQ ID NO: 771593 - RNA, 22 nt, Human
acuauaaacauaauagaacuau

SEQ ID NO: 771594 - RNA, 24 nt, Human
acuauaaacauaauagaacuauga

SEQ ID NO: 771595 - RNA, 19 nt, Human
acucuggaaaacgucuugg

SEQ ID NO: 771596 - RNA, 22 nt, Human
agaauuguaaaaaaugauauac

SEQ ID NO: 771597 - RNA, 23 nt, Human
agcagcuaaaaaacuuauuccac

SEQ ID NO: 771598 - RNA, 21 nt, Human
agcuaaaaaacuuauuccaca

SEQ ID NO: 771599 - RNA, 20 nt, Human
aggcaucauuaaaaaggaaa

SEQ ID NO: 771600 - RNA, 27 nt, Human
aucaaagauucuuuuuuuuuuucuuuu

SEQ ID NO: 771601 - RNA, 22 nt, Human
auucuuuuuuuuuuucuuuuuu

SEQ ID NO: 771602 - RNA, 20 nt, Human
caaaacagggaucagugaca

SEQ ID NO: 771603 - RNA, 21 nt, Human
caaguagcuuaaaagccagca

SEQ ID NO: 771604 - RNA, 24 nt, Human
cacuagaauacucuugauagugca

SEQ ID NO: 771605 - RNA, 21 nt, Human
caggauuuuugaccaaguagc

SEQ ID NO: 771606 - RNA, 25 nt, Human
cuacacaaaaacgaucaaaauacuc

SEQ ID NO: 771607 - RNA, 19 nt, Human
cugcacacaaacacaagag

SEQ ID NO: 771608 - RNA, 23 nt, Human
ggaaauaaaaauauacucccacc

SEQ ID NO: 771609 - RNA, 18 nt, Human
gugcuauauacuugcugg

SEQ ID NO: 771610 - RNA, 18 nt, Human
uaaaagccagcaaaacag

SEQ ID NO: 771611 - RNA, 23 nt, Human
uaaaagccagcaaaacagggauc

SEQ ID NO: 771612 - RNA, 19 nt, Human
uaaugguggaaaaaaaggc

SEQ ID NO: 771613 - RNA, 21 nt, Human
uacacuguuagaaauuuacca

SEQ ID NO: 771614 - RNA, 19 nt, Human
uaccagugaacacugaaga

SEQ ID NO: 771615 - RNA, 20 nt, Human
uagaacuaugaacaaauguc

SEQ ID NO: 771616 - RNA, 20 nt, Human
uaggaaauaaaaauauacuc

SEQ ID NO: 771617 - RNA, 19 nt, Human
uaucuacacaaaaacgauc

SEQ ID NO: 771618 - RNA, 19 nt, Human
ucaccaggugcacguucca

SEQ ID NO: 771619 - RNA, 18 nt, Human
uccacauguucuuaaagc

SEQ ID NO: 771620 - RNA, 22 nt, Human
uggaaaaaaaggcaagugucau

SEQ ID NO: 771621 - RNA, 22 nt, Human
uggaaauuuuuuacuucaaacg

SEQ ID NO: 771622 - RNA, 21 nt, Human
uuaaagucucugaugucuccc

SEQ ID NO: 771623 - RNA, 23 nt, Human
uucucugcacacaaacacaagag

SEQ ID NO: 771624 - RNA, 20 nt, Human
uuggaaauuuuuuacuucaa

SEQ ID NO: 771625 - RNA, 25 nt, Human
aaaauaaccuccugacuuguaaauu

SEQ ID NO: 771626 - RNA, 28 nt, Human
aaaccgaccccaccaaccugaguaaugc

SEQ ID NO: 771627 - RNA, 22 nt, Human
aacagcccuauauccacccucu

SEQ ID NO: 771628 - RNA, 20 nt, Human
aaccacagccaaaacuaaaa

SEQ ID NO: 771629 - RNA, 18 nt, Human
aacccuggcuuaaaaaca

SEQ ID NO: 771630 - RNA, 18 nt, Human
aagcaaauacaagagaac

SEQ ID NO: 771631 - RNA, 20 nt, Human
aaguaggaaauacugaaaga

SEQ ID NO: 771632 - RNA, 21 nt, Human
aaguaggaaauacugaaagag

SEQ ID NO: 771633 - RNA, 26 nt, Human
aauaugcuuugggggcugcuuugcuu

SEQ ID NO: 771634 - RNA, 19 nt, Human
aauccgggguucccuccuu

SEQ ID NO: 771635 - RNA, 20 nt, Human
acccuagcauguccuccuug

SEQ ID NO: 771636 - RNA, 20 nt, Human
accuguguuuuuuuuugaaa

SEQ ID NO: 771637 - RNA, 26 nt, Human
agaaagacucuaggcacucucacuga

SEQ ID NO: 771638 - RNA, 21 nt, Human
agaauucuguuuuuaccuucc

SEQ ID NO: 771639 - RNA, 24 nt, Human
agagaucaguguggaaugcaauaa

SEQ ID NO: 771640 - RNA, 18 nt, Human
agcccuauauccacccuc

SEQ ID NO: 771641 - RNA, 19 nt, Human
aggaagagauaaaagaagg

SEQ ID NO: 771642 - RNA, 24 nt, Human
agucacaauauauaaaccacagcc

SEQ ID NO: 771643 - RNA, 21 nt, Human
auacuguauuuucaguacaca

SEQ ID NO: 771644 - RNA, 18 nt, Human
aucccuagagucuucccu

SEQ ID NO: 771645 - RNA, 18 nt, Human
aucugucauguuuuccuu

SEQ ID NO: 771646 - RNA, 19 nt, Human
augcagccugcacaugcau

SEQ ID NO: 771647 - RNA, 22 nt, Human
augcagccugcacaugcauuga

SEQ ID NO: 771648 - RNA, 19 nt, Human
augcugcaacacgucacaa

SEQ ID NO: 771649 - RNA, 29 nt, Human
caaaacaaguaacucaacuuguauaaaaa

SEQ ID NO: 771650 - RNA, 23 nt, Human
caaaccgaccccaccaaccugag

SEQ ID NO: 771651 - RNA, 23 nt, Human
caaggacaggaugcagccugcac

SEQ ID NO: 771652 - RNA, 19 nt, Human
caagggaaggacuuucuug

SEQ ID NO: 771653 - RNA, 21 nt, Human
cacaaaaauagaauuucuaua

SEQ ID NO: 771654 - RNA, 23 nt, Human
cacaauauauaaaccacagccaa

SEQ ID NO: 771655 - RNA, 25 nt, Human
cacaauauauaaaccacagccaaaa

SEQ ID NO: 771656 - RNA, 19 nt, Human
cacagauuaagugaagaca

SEQ ID NO: 771657 - RNA, 25 nt, Human
cagcaaaugggugaggaagauuugc

SEQ ID NO: 771658 - RNA, 24 nt, Human
caucucuagcaggaucaauccuga

SEQ ID NO: 771659 - RNA, 18 nt, Human
cccuccuuuuccucuucu

SEQ ID NO: 771660 - RNA, 18 nt, Human
cccuccuuuuccucuucu

SEQ ID NO: 771661 - RNA, 19 nt, Human
cccuccuuuuccucuucuu

SEQ ID NO: 771662 - RNA, 19 nt, Human
ccucuuugggauuugagcc

SEQ ID NO: 771663 - RNA, 20 nt, Human
ccugaagugcaauagaaagu

SEQ ID NO: 771664 - RNA, 22 nt, Human
cgagcaaguggcucacaauggc

SEQ ID NO: 771665 - RNA, 18 nt, Human
cguuguugcucuugcccc

SEQ ID NO: 771666 - RNA, 21 nt, Human
cuauaucuucucaaaccgacc

SEQ ID NO: 771667 - RNA, 19 nt, Human
cugcuuugcuuugcaaaug

SEQ ID NO: 771668 - RNA, 23 nt, Human
cugguccucuucuacccaugccu

SEQ ID NO: 771669 - RNA, 24 nt, Human
cugguccucuucuacccaugccuu

SEQ ID NO: 771670 - RNA, 20 nt, Human
cuuaggaucuucaaaguccc

SEQ ID NO: 771671 - RNA, 20 nt, Human
cuucucggucagcuacuuag

SEQ ID NO: 771672 - RNA, 22 nt, Human
cuugggagaaugaagauuccau

SEQ ID NO: 771673 - RNA, 20 nt, Human
gaacuuccaacccaguucac

SEQ ID NO: 771674 - RNA, 20 nt, Human
gacucuacgacucucgguug

SEQ ID NO: 771675 - RNA, 18 nt, Human
gauccuguuucuccaucu

SEQ ID NO: 771676 - RNA, 19 nt, Human
gcaacacgucacaacauaa

SEQ ID NO: 771677 - RNA, 19 nt, Human
gcagaaaccuaggaagcaa

SEQ ID NO: 771678 - RNA, 24 nt, Human
gcugcuuugcuuugcaaauggacc

SEQ ID NO: 771679 - RNA, 24 nt, Human
ggacaggaugcagccugcacaugg

SEQ ID NO: 771680 - RNA, 23 nt, Human
ggguguuuacagggagaaaaagg

SEQ ID NO: 771681 - RNA, 21 nt, Human
gguuauaaaaccucuuuggga

SEQ ID NO: 771682 - RNA, 19 nt, Human
guccucuucuacccaugcc

SEQ ID NO: 771683 - RNA, 19 nt, Human
gucuuauaccuuuucuuuc

SEQ ID NO: 771684 - RNA, 24 nt, Human
gucuuauaccuuuucuuucuuugc

SEQ ID NO: 771685 - RNA, 20 nt, Human
guguuuacagggagaaaaag

SEQ ID NO: 771686 - RNA, 20 nt, Human
uaaacaugcugaaauggaaa

SEQ ID NO: 771687 - RNA, 19 nt, Human
uaaaccacagccaaaacua

SEQ ID NO: 771688 - RNA, 23 nt, Human
uaacaauccaagauuaagauucu

SEQ ID NO: 771689 - RNA, 23 nt, Human
uaagauauaauuuggcaagucuu

SEQ ID NO: 771690 - RNA, 21 nt, Human
uacagggagaaaaagggaagu

SEQ ID NO: 771691 - RNA, 24 nt, Human
uaccaagggaaggacuuucuugac

SEQ ID NO: 771692 - RNA, 24 nt, Human
uacuuggguguuuacagggagaaa

SEQ ID NO: 771693 - RNA, 19 nt, Human
uagcaaauguuugcgaccu

SEQ ID NO: 771694 - RNA, 23 nt, Human
uagcauguccuccuugcugcuug

SEQ ID NO: 771695 - RNA, 21 nt, Human
uagcugcagauugcauaaaug

SEQ ID NO: 771696 - RNA, 24 nt, Human
uauaaacccuggcuuaaaaacaag

SEQ ID NO: 771697 - RNA, 19 nt, Human
uauacaauucuauuaagau

SEQ ID NO: 771698 - RNA, 19 nt, Human
uauauccacccucugaucc

SEQ ID NO: 771699 - RNA, 23 nt, Human
ucaaaccgaccccaccaaccuga

SEQ ID NO: 771700 - RNA, 21 nt, Human
ucacccuagcauguccuccuu

SEQ ID NO: 771701 - RNA, 21 nt, Human
ucacucuuagcuucuuccuuu

SEQ ID NO: 771702 - RNA, 19 nt, Human
ucagcuacuuagaauuuca

SEQ ID NO: 771703 - RNA, 20 nt, Human
ucagcuacuuagaauuucag

SEQ ID NO: 771704 - RNA, 22 nt, Human
ucauauccaauccgggguuccc

SEQ ID NO: 771705 - RNA, 21 nt, Human
uccacugaaaauacucucuaa

SEQ ID NO: 771706 - RNA, 18 nt, Human
ucccaagccagagaaagc

SEQ ID NO: 771707 - RNA, 19 nt, Human
ucccaagccagagaaagcu

SEQ ID NO: 771708 - RNA, 22 nt, Human
ucccaagccagagaaagcuuac

SEQ ID NO: 771709 - RNA, 19 nt, Human
ucccuccuuuuccucuucu

SEQ ID NO: 771710 - RNA, 22 nt, Human
uccuaacaagaagugcaaaaca

SEQ ID NO: 771711 - RNA, 21 nt, Human
uccuggguuuauaguacugcu

SEQ ID NO: 771712 - RNA, 23 nt, Human
uccuugauugacaaauccuccuu

SEQ ID NO: 771713 - RNA, 20 nt, Human
ucgguugcuaaaugcuagaa

SEQ ID NO: 771714 - RNA, 19 nt, Human
ucuccugguuuaccuggcu

SEQ ID NO: 771715 - RNA, 21 nt, Human
ugaaaggcaaacuuccugggu

SEQ ID NO: 771716 - RNA, 20 nt, Human
ugaaagugcuaucaggagcu

SEQ ID NO: 771717 - RNA, 23 nt, Human
ugaauagcugcagauugcauaaa

SEQ ID NO: 771718 - RNA, 23 nt, Human
ugacaaauccuccuugggaauau

SEQ ID NO: 771719 - RNA, 19 nt, Human
ugcaaaacaaguaacucaa

SEQ ID NO: 771720 - RNA, 23 nt, Human
ugcaaaacaaguaacucaacuug

SEQ ID NO: 771721 - RNA, 19 nt, Human
ugccccccugguccucuuc

SEQ ID NO: 771722 - RNA, 18 nt, Human
ugcugggaguguccuggc

SEQ ID NO: 771723 - RNA, 24 nt, Human
ugcuguagguuucagauaauaguu

SEQ ID NO: 771724 - RNA, 22 nt, Human
uggaaugaaggcguuaucuauc

SEQ ID NO: 771725 - RNA, 19 nt, Human
uggaaugcaauaagcuuua

SEQ ID NO: 771726 - RNA, 22 nt, Human
uggccaaauaagcaguugauac

SEQ ID NO: 771727 - RNA, 22 nt, Human
uggcuuaggaucuucaaagucc

SEQ ID NO: 771728 - RNA, 22 nt, Human
ugggauuugagcccagcaaguu

SEQ ID NO: 771729 - RNA, 24 nt, Human
uggguguuuacagggagaaaaagg

SEQ ID NO: 771730 - RNA, 20 nt, Human
ugguacgucuucugugucuc

SEQ ID NO: 771731 - RNA, 18 nt, Human
uguaaagacacaaaaaua

SEQ ID NO: 771732 - RNA, 18 nt, Human
ugucacauaauaccaaag

SEQ ID NO: 771733 - RNA, 18 nt, Human
uguccuggccaaauaagc

SEQ ID NO: 771734 - RNA, 19 nt, Human
ugugaaauaauagagucaa

SEQ ID NO: 771735 - RNA, 20 nt, Human
uguuuuauugcagagaaguu

SEQ ID NO: 771736 - RNA, 21 nt, Human
uguuuuuuuuugaaaggcaaa

SEQ ID NO: 771737 - RNA, 21 nt, Human
uuaccaagggaaggacuuucu

SEQ ID NO: 771738 - RNA, 24 nt, Human
uuacuccugaauaaaaaaaucacu

SEQ ID NO: 771739 - RNA, 27 nt, Human
uugacuuuaccucaccaucugucaugu

SEQ ID NO: 771740 - RNA, 23 nt, Human
uuuccagugcuugggagaaugaa

SEQ ID NO: 771741 - RNA, 19 nt, Human
uuugugcugggaguguccu

SEQ ID NO: 771742 - RNA, 27 nt, Human
aauacaaaauaaaaaaagacugucuca

SEQ ID NO: 771743 - RNA, 23 nt, Human
accccgcaggagggaaggcagca

SEQ ID NO: 771744 - RNA, 21 nt, Human
agaggcgggugggaggcgggc

SEQ ID NO: 771745 - RNA, 23 nt, Human
aggaccagcgggacggcaggaga

SEQ ID NO: 771746 - RNA, 18 nt, Human
aggaggacggggcucuag

SEQ ID NO: 771747 - RNA, 18 nt, Human
aggaggggcugcgggccg

SEQ ID NO: 771748 - RNA, 19 nt, Human
agggcuggggggcagaggg

SEQ ID NO: 771749 - RNA, 21 nt, Human
agggcuggggggcagagggug

SEQ ID NO: 771750 - RNA, 23 nt, Human
aggggcaggaggggcugcgggcc

SEQ ID NO: 771751 - RNA, 20 nt, Human
aggggccagcuggguucuca

SEQ ID NO: 771752 - RNA, 23 nt, Human
aggggccagcuggguucucagag

SEQ ID NO: 771753 - RNA, 23 nt, Human
aggggcugcgggccggguggggg

SEQ ID NO: 771754 - RNA, 21 nt, Human
aggugagggggaagggggucc

SEQ ID NO: 771755 - RNA, 18 nt, Human
cacccccaccccgcagga

SEQ ID NO: 771756 - RNA, 21 nt, Human
caccccgcaggagggaaggca

SEQ ID NO: 771757 - RNA, 20 nt, Human
cacccgggagggagggccug

SEQ ID NO: 771758 - RNA, 20 nt, Human
cagcaggcccgcucuucccu

SEQ ID NO: 771759 - RNA, 19 nt, Human
ccacccgggagggagggcc

SEQ ID NO: 771760 - RNA, 22 nt, Human
ccacuggggucugucccacccc

SEQ ID NO: 771761 - RNA, 20 nt, Human
cccacccccaccccgcagga

SEQ ID NO: 771762 - RNA, 21 nt, Human
cccccgaagaccggccagccc

SEQ ID NO: 771763 - RNA, 24 nt, Human
cccccgaagaccggccagccccug

SEQ ID NO: 771764 - RNA, 21 nt, Human
ccccuggagcacagaggcggg

SEQ ID NO: 771765 - RNA, 18 nt, Human
cccgcgacccacgugagg

SEQ ID NO: 771766 - RNA, 26 nt, Human
cccgcggcggggccccggcccggagc

SEQ ID NO: 771767 - RNA, 22 nt, Human
ccgcugcucugggcugccucgg

SEQ ID NO: 771768 - RNA, 22 nt, Human
ccucggccagguggacggguua

SEQ ID NO: 771769 - RNA, 20 nt, Human
cgccgcggucgccgccgccc

SEQ ID NO: 771770 - RNA, 22 nt, Human
cgcgacccacgugaggagcaga

SEQ ID NO: 771771 - RNA, 22 nt, Human
cggcagacccuggggcuaacug

SEQ ID NO: 771772 - RNA, 18 nt, Human
cggcccggagccgcccgg

SEQ ID NO: 771773 - RNA, 21 nt, Human
cgggaagacaguguccggagg

SEQ ID NO: 771774 - RNA, 18 nt, Human
cgggcucuguccuggucu

SEQ ID NO: 771775 - RNA, 21 nt, Human
cgggggugggcugggcugggc

SEQ ID NO: 771776 - RNA, 25 nt, Human
cggguccagcccacacugcgcugag

SEQ ID NO: 771777 - RNA, 20 nt, Human
gaccggccagccccuggagc

SEQ ID NO: 771778 - RNA, 19 nt, Human
gagcgggggugggcugggc

SEQ ID NO: 771779 - RNA, 19 nt, Human
gagggcuggggggcagagg

SEQ ID NO: 771780 - RNA, 20 nt, Human
gaggugccggccaccacccg

SEQ ID NO: 771781 - RNA, 19 nt, Human
gagugguggaagccggcgc

SEQ ID NO: 771782 - RNA, 20 nt, Human
gcaggaggggcaggaggggc

SEQ ID NO: 771783 - RNA, 18 nt, Human
gccucggccagguggacg

SEQ ID NO: 771784 - RNA, 21 nt, Human
gcgccgcggucgccgccgccc

SEQ ID NO: 771785 - RNA, 21 nt, Human
ggaagacaguguccggaggcc

SEQ ID NO: 771786 - RNA, 19 nt, Human
ggaggggcaggaggggcug

SEQ ID NO: 771787 - RNA, 18 nt, Human
ggcagaggguggggaccg

SEQ ID NO: 771788 - RNA, 26 nt, Human
ggcagaggguggggaccggcggaggg

SEQ ID NO: 771789 - RNA, 20 nt, Human
ggcaggaggggcugcgggcc

SEQ ID NO: 771790 - RNA, 20 nt, Human
ggcccggagccgcccgggcc

SEQ ID NO: 771791 - RNA, 20 nt, Human
ggcuggggggcagagggugg

SEQ ID NO: 771792 - RNA, 19 nt, Human
gggaagacaguguccggag

SEQ ID NO: 771793 - RNA, 21 nt, Human
gggcagaggguggggaccggc

SEQ ID NO: 771794 - RNA, 20 nt, Human
gggcaggaggggcugcgggc

SEQ ID NO: 771795 - RNA, 20 nt, Human
gggggugggcugggcugggc

SEQ ID NO: 771796 - RNA, 18 nt, Human
ggggugggcugggcuggg

SEQ ID NO: 771797 - RNA, 19 nt, Human
ggggugggcugggcugggc

SEQ ID NO: 771798 - RNA, 21 nt, Human
ggucuccaucagcagcaguuu

SEQ ID NO: 771799 - RNA, 20 nt, Human
ggucugucccacccccaccc

SEQ ID NO: 771800 - RNA, 23 nt, Human
gucccugccuggaggugaggggg

SEQ ID NO: 771801 - RNA, 20 nt, Human
guggggcggcgaguggugga

SEQ ID NO: 771802 - RNA, 23 nt, Human
uaacaauacaaaauaaaaaaaga

SEQ ID NO: 771803 - RNA, 26 nt, Human
uagagacgccagagggcuggggggca

SEQ ID NO: 771804 - RNA, 22 nt, Human
uagcgggaagacaguguccgga

SEQ ID NO: 771805 - RNA, 25 nt, Human
ucaaacaaaccugggacaagcccgc

SEQ ID NO: 771806 - RNA, 19 nt, Human
uccagcccacacugcgcug

SEQ ID NO: 771807 - RNA, 20 nt, Human
uccaucagcagcaguuucua

SEQ ID NO: 771808 - RNA, 22 nt, Human
uccaucagcagcaguuucuaga

SEQ ID NO: 771809 - RNA, 19 nt, Human
ucccgcugcucugggcugc

SEQ ID NO: 771810 - RNA, 18 nt, Human
ugagggggaagggggucc

SEQ ID NO: 771811 - RNA, 22 nt, Human
ugccucggccagguggacgggu

SEQ ID NO: 771812 - RNA, 20 nt, Human
ugcgggccgggugggggcgg

SEQ ID NO: 771813 - RNA, 18 nt, Human
uggaagaggcauggggcu

SEQ ID NO: 771814 - RNA, 22 nt, Human
uggaagaggcauggggcuaagg

SEQ ID NO: 771815 - RNA, 21 nt, Human
uggcaggaggggcaggagggg

SEQ ID NO: 771816 - RNA, 22 nt, Human
uggcaggaggggcaggaggggc

SEQ ID NO: 771817 - RNA, 20 nt, Human
ugggaaagaugcugugcaag

SEQ ID NO: 771818 - RNA, 23 nt, Human
ugggcugccucggccagguggaa

SEQ ID NO: 771819 - RNA, 18 nt, Human
ugucccacccccaccccg

SEQ ID NO: 771820 - RNA, 20 nt, Human
uguccuggucuccaucagca

SEQ ID NO: 771821 - RNA, 24 nt, Human
aaagauguauuucccugaggcccc

SEQ ID NO: 771822 - RNA, 21 nt, Human
agauguauuucccugaggccc

SEQ ID NO: 771823 - RNA, 25 nt, Human
agcagcaccagcagcucccagcgca

SEQ ID NO: 771824 - RNA, 21 nt, Human
agccccucccucccugcggcu

SEQ ID NO: 771825 - RNA, 24 nt, Human
augccacuguugccccacccugac

SEQ ID NO: 771826 - RNA, 21 nt, Human
cacccugacccacguucccug

SEQ ID NO: 771827 - RNA, 23 nt, Human
cagcagcagcagcaccagcagcu

SEQ ID NO: 771828 - RNA, 28 nt, Human
cagcagcagcagcaccagcagcucccag

SEQ ID NO: 771829 - RNA, 23 nt, Human
cagcagcagcagcagcagcacca

SEQ ID NO: 771830 - RNA, 19 nt, Human
cagccggggcccgggcggc

SEQ ID NO: 771831 - RNA, 21 nt, Human
cagcgcaccgcccggcgccuc

SEQ ID NO: 771832 - RNA, 20 nt, Human
caggagcaaccuccgccucu

SEQ ID NO: 771833 - RNA, 19 nt, Human
cccagcgcaccgcccggcg

SEQ ID NO: 771834 - RNA, 22 nt, Human
cccucuggccagccccucccuc

SEQ ID NO: 771835 - RNA, 18 nt, Human
cccugcugccucucccuc

SEQ ID NO: 771836 - RNA, 22 nt, Human
ccggcgccuccgggcugcggcu

SEQ ID NO: 771837 - RNA, 19 nt, Human
ccgggggcggcguccuggc

SEQ ID NO: 771838 - RNA, 20 nt, Human
ccugacccacguucccugcu

SEQ ID NO: 771839 - RNA, 21 nt, Human
cgcugccgccgccgccgccgc

SEQ ID NO: 771840 - RNA, 20 nt, Human
cgggcggcggagggugggca

SEQ ID NO: 771841 - RNA, 20 nt, Human
cugcugccucucccucuggc

SEQ ID NO: 771842 - RNA, 21 nt, Human
gcgcugccgccgccgccgccg

SEQ ID NO: 771843 - RNA, 21 nt, Human
ggccaagaaguggagacccgg

SEQ ID NO: 771844 - RNA, 21 nt, Human
ggcccgggcggcggagggugg

SEQ ID NO: 771845 - RNA, 18 nt, Human
ggcggcagcgggggcccg

SEQ ID NO: 771846 - RNA, 21 nt, Human
ggggcgcacucgcgggcgggg

SEQ ID NO: 771847 - RNA, 19 nt, Human
uacaggagcaaccuccgcc

SEQ ID NO: 771848 - RNA, 19 nt, Human
ucccugaggccccgcaccu

SEQ ID NO: 771849 - RNA, 18 nt, Human
ucgcgggcgcugucaugg

SEQ ID NO: 771850 - RNA, 18 nt, Human
ugccucucccucuggcca

SEQ ID NO: 771851 - RNA, 18 nt, Human
ugcuguagcagcuccugg

SEQ ID NO: 771852 - RNA, 19 nt, Human
ugcuguagcagcuccuggc

SEQ ID NO: 771853 - RNA, 26 nt, Human
uggagacccggccgggggcggcgucc

SEQ ID NO: 771854 - RNA, 18 nt, Human
uguagcagcuccuggcgc

SEQ ID NO: 771855 - RNA, 24 nt, Human
aaaaaguuaauucaaaaacuuuug

SEQ ID NO: 771856 - RNA, 18 nt, Human
aaaaugccaagaaccugg

SEQ ID NO: 771857 - RNA, 23 nt, Human
aaacaaaacaaaacaaacuuaaa

SEQ ID NO: 771858 - RNA, 24 nt, Human
aaaguguugggauuacaagcauga

SEQ ID NO: 771859 - RNA, 23 nt, Human
aaaugaggcaggagaauaggguc

SEQ ID NO: 771860 - RNA, 19 nt, Human
aacaaagugaaaccccguc

SEQ ID NO: 771861 - RNA, 20 nt, Human
aacaaagugaaaccccgucu

SEQ ID NO: 771862 - RNA, 21 nt, Human
aacaaagugaaaccccgucuc

SEQ ID NO: 771863 - RNA, 22 nt, Human
aaccccaccucuccauaccuaa

SEQ ID NO: 771864 - RNA, 18 nt, Human
aagaaaccugaccaaggc

SEQ ID NO: 771865 - RNA, 23 nt, Human
aagaaaccugaccaaggccuaau

SEQ ID NO: 771866 - RNA, 23 nt, Human
aagaauacucguaaugcaauguc

SEQ ID NO: 771867 - RNA, 18 nt, Human
aagacaccaccggccauc

SEQ ID NO: 771868 - RNA, 25 nt, Human
aagcaauucucccaccuuggcuucc

SEQ ID NO: 771869 - RNA, 21 nt, Human
aaguguugggauuacaagcau

SEQ ID NO: 771870 - RNA, 22 nt, Human
aauccauuuccuuuugccuaga

SEQ ID NO: 771871 - RNA, 18 nt, Human
acagaagaaagacccuca

SEQ ID NO: 771872 - RNA, 23 nt, Human
acagagcgagacucugucucaaa

SEQ ID NO: 771873 - RNA, 24 nt, Human
acagagcgagacucugucucaaaa

SEQ ID NO: 771874 - RNA, 20 nt, Human
acauagagguugggaaacag

SEQ ID NO: 771875 - RNA, 21 nt, Human
acauuaucaucucccccaccc

SEQ ID NO: 771876 - RNA, 24 nt, Human
accccgucucuauuaaaaauacaa

SEQ ID NO: 771877 - RNA, 21 nt, Human
accuuggcuucccaaaguguu

SEQ ID NO: 771878 - RNA, 21 nt, Human
acucuguugcccaggcuggag

SEQ ID NO: 771879 - RNA, 25 nt, Human
acugcaaccaccagacacaacggcu

SEQ ID NO: 771880 - RNA, 24 nt, Human
acugcacuccagccugggugacag

SEQ ID NO: 771881 - RNA, 26 nt, Human
acugcacuccagccugggugacagag

SEQ ID NO: 771882 - RNA, 22 nt, Human
agaacugaaucaaaaggaaaac

SEQ ID NO: 771883 - RNA, 19 nt, Human
agaagacaccaccggccau

SEQ ID NO: 771884 - RNA, 23 nt, Human
agacagaaauauuguaugucccu

SEQ ID NO: 771885 - RNA, 23 nt, Human
agacagggaaccuaaggcugauu

SEQ ID NO: 771886 - RNA, 18 nt, Human
agagugacauauuaggcu

SEQ ID NO: 771887 - RNA, 18 nt, Human
agaguucuaaaauucuga

SEQ ID NO: 771888 - RNA, 24 nt, Human
agcacuuugggaggccgaggcagg

SEQ ID NO: 771889 - RNA, 23 nt, Human
agcagcugggacuacaggugugu

SEQ ID NO: 771890 - RNA, 21 nt, Human
agccauccuccugcuuagccu

SEQ ID NO: 771891 - RNA, 24 nt, Human
agccugggugacagagcgagacuc

SEQ ID NO: 771892 - RNA, 22 nt, Human
agcugggacuacaggugugugu

SEQ ID NO: 771893 - RNA, 24 nt, Human
aggaaaaccccaccucuccauacc

SEQ ID NO: 771894 - RNA, 21 nt, Human
aggcaagagaauggugugaac

SEQ ID NO: 771895 - RNA, 27 nt, Human
aggcaagagaauggugugaacccagga

SEQ ID NO: 771896 - RNA, 24 nt, Human
aggcagguggaucaugaggucagg

SEQ ID NO: 771897 - RNA, 20 nt, Human
aggccgaggcagguggauca

SEQ ID NO: 771898 - RNA, 24 nt, Human
aggcgcgguggcuccugccuguaa

SEQ ID NO: 771899 - RNA, 24 nt, Human
aggcggagcuugcagugagcugag

SEQ ID NO: 771900 - RNA, 20 nt, Human
aggcuuccugaaguucaaga

SEQ ID NO: 771901 - RNA, 24 nt, Human
agguaggaaugggaguuagcggga

SEQ ID NO: 771902 - RNA, 25 nt, Human
agguggaucaugaggucaggagauu

SEQ ID NO: 771903 - RNA, 21 nt, Human
agugcaguggugcaaucauag

SEQ ID NO: 771904 - RNA, 23 nt, Human
agugcaguggugcaaucauagcu

SEQ ID NO: 771905 - RNA, 24 nt, Human
agugcaguggugcaaucauagcuc

SEQ ID NO: 771906 - RNA, 21 nt, Human
aucaucucccccacccaaagu

SEQ ID NO: 771907 - RNA, 24 nt, Human
aucgcgccacugcacuccagccug

SEQ ID NO: 771908 - RNA, 22 nt, Human
caaaaaaacaaaacaaaacaaa

SEQ ID NO: 771909 - RNA, 20 nt, Human
caaaacaaaacaaacuuaaa

SEQ ID NO: 771910 - RNA, 20 nt, Human
caaccaccagacacaacggc

SEQ ID NO: 771911 - RNA, 24 nt, Human
caacggcuaggaauaacagcagag

SEQ ID NO: 771912 - RNA, 21 nt, Human
caagaaccuggacacccucca

SEQ ID NO: 771913 - RNA, 23 nt, Human
caagauucccacacccagauacu

SEQ ID NO: 771914 - RNA, 20 nt, Human
caaucagacuggucauaggc

SEQ ID NO: 771915 - RNA, 24 nt, Human
caaugucaagugagaagcaggaca

SEQ ID NO: 771916 - RNA, 21 nt, Human
cacauggcugccuuccuuaug

SEQ ID NO: 771917 - RNA, 22 nt, Human
cacauuaucaucucccccaccc

SEQ ID NO: 771918 - RNA, 19 nt, Human
caccaguaacaguuugacc

SEQ ID NO: 771919 - RNA, 22 nt, Human
cacuccagccugggugacagag

SEQ ID NO: 771920 - RNA, 23 nt, Human
cacuccagccugggugacagagc

SEQ ID NO: 771921 - RNA, 24 nt, Human
cacuccagccugggugacagagcg

SEQ ID NO: 771922 - RNA, 19 nt, Human
cacugcacuccagccuggg

SEQ ID NO: 771923 - RNA, 21 nt, Human
cacugcacuccagccugggug

SEQ ID NO: 771924 - RNA, 22 nt, Human
cacugcacuccagccuggguga

SEQ ID NO: 771925 - RNA, 23 nt, Human
cacugcacuccagccugggugac

SEQ ID NO: 771926 - RNA, 24 nt, Human
cacugcacuccagccugggugaca

SEQ ID NO: 771927 - RNA, 25 nt, Human
cacugcacuccagccugggugacag

SEQ ID NO: 771928 - RNA, 20 nt, Human
cagaauggcuucaggauuaa

SEQ ID NO: 771929 - RNA, 20 nt, Human
cagacuuuaaagugcuuccc

SEQ ID NO: 771930 - RNA, 22 nt, Human
cagagcugagucucauggccac

SEQ ID NO: 771931 - RNA, 24 nt, Human
cagcacuuugggaggccgaggcag

SEQ ID NO: 771932 - RNA, 24 nt, Human
cagcacuuugggaggccgaggcag

SEQ ID NO: 771933 - RNA, 18 nt, Human
cagcugggacuacaggug

SEQ ID NO: 771934 - RNA, 25 nt, Human
caggugugugucgcuacaccuggcu

SEQ ID NO: 771935 - RNA, 24 nt, Human
caguggugaauaacacaaacuccc

SEQ ID NO: 771936 - RNA, 19 nt, Human
ccaaaguguugggauuaca

SEQ ID NO: 771937 - RNA, 24 nt, Human
ccaaaguguugggauuacaagcau

SEQ ID NO: 771938 - RNA, 23 nt, Human
ccaaggcacuaauugaaaggcug

SEQ ID NO: 771939 - RNA, 18 nt, Human
ccaaggcuuacuucuuug

SEQ ID NO: 771940 - RNA, 19 nt, Human
ccaagucuguccuuuugua

SEQ ID NO: 771941 - RNA, 21 nt, Human
ccaauggcaaaccucuagagg

SEQ ID NO: 771942 - RNA, 20 nt, Human
ccacugcacuccagccuggg

SEQ ID NO: 771943 - RNA, 20 nt, Human
ccacugcacuccagccuggg

SEQ ID NO: 771944 - RNA, 21 nt, Human
ccacugcacuccagccugggu

SEQ ID NO: 771945 - RNA, 21 nt, Human
ccacugcacuccagccugggu

SEQ ID NO: 771946 - RNA, 24 nt, Human
ccacugcacuccagccugggugac

SEQ ID NO: 771947 - RNA, 19 nt, Human
ccauccuccugcuuagccu

SEQ ID NO: 771948 - RNA, 22 nt, Human
ccauugugucuggccuggguga

SEQ ID NO: 771949 - RNA, 23 nt, Human
ccauugugucuggccugggugau

SEQ ID NO: 771950 - RNA, 21 nt, Human
cccacacccagauacuaagac

SEQ ID NO: 771951 - RNA, 20 nt, Human
cccugucuccccuagacaaa

SEQ ID NO: 771952 - RNA, 24 nt, Human
ccugagcagcugggacuacaggug

SEQ ID NO: 771953 - RNA, 23 nt, Human
ccuggcuaacaaagugaaacccc

SEQ ID NO: 771954 - RNA, 24 nt, Human
ccuggcuaacaaagugaaaccccg

SEQ ID NO: 771955 - RNA, 18 nt, Human
ccuggcuucaagcaauuc

SEQ ID NO: 771956 - RNA, 20 nt, Human
ccuggcuucaagcaauucuc

SEQ ID NO: 771957 - RNA, 20 nt, Human
ccugggcccaagccauccuc

SEQ ID NO: 771958 - RNA, 22 nt, Human
ccugggugacagagcgagacuc

SEQ ID NO: 771959 - RNA, 20 nt, Human
ccuguaaucccagcacuuug

SEQ ID NO: 771960 - RNA, 22 nt, Human
ccuguaaucccagcacuuuggg

SEQ ID NO: 771961 - RNA, 24 nt, Human
ccuuggccagcccauuauuaauga

SEQ ID NO: 771962 - RNA, 24 nt, Human
cgagacucugucucaaaaaaacaa

SEQ ID NO: 771963 - RNA, 26 nt, Human
cgccacugcacuccagccugggugac

SEQ ID NO: 771964 - RNA, 19 nt, Human
cggcuaggaauaacagcag

SEQ ID NO: 771965 - RNA, 21 nt, Human
cucacugcagcguugaacucc

SEQ ID NO: 771966 - RNA, 25 nt, Human
cucauccacacacaucaccuuucag

SEQ ID NO: 771967 - RNA, 24 nt, Human
cuccugccuguaaucccagcacuu

SEQ ID NO: 771968 - RNA, 20 nt, Human
cuccugggcccaagccaucu

SEQ ID NO: 771969 - RNA, 21 nt, Human
cuguagucccagauacuuggg

SEQ ID NO: 771970 - RNA, 21 nt, Human
cugucucaaaaaaacaaaaca

SEQ ID NO: 771971 - RNA, 24 nt, Human
cuuagccuccugagcagcugggac

SEQ ID NO: 771972 - RNA, 19 nt, Human
cuuauaaucagcuacaguc

SEQ ID NO: 771973 - RNA, 19 nt, Human
cuugcagugagcugagauc

SEQ ID NO: 771974 - RNA, 21 nt, Human
cuugcagugagcugagaucgc

SEQ ID NO: 771975 - RNA, 18 nt, Human
cuuggcaguggucgcuuu

SEQ ID NO: 771976 - RNA, 21 nt, Human
cuuuggagagugugccauugg

SEQ ID NO: 771977 - RNA, 18 nt, Human
cuuugucgcccaggcugg

SEQ ID NO: 771978 - RNA, 23 nt, Human
gacaaagaacauuugcaauacag

SEQ ID NO: 771979 - RNA, 23 nt, Human
gagaagacaccaccggccaucaa

SEQ ID NO: 771980 - RNA, 20 nt, Human
gagcagcugggacuacaggu

SEQ ID NO: 771981 - RNA, 23 nt, Human
gagcuugcagugagcugagaucg

SEQ ID NO: 771982 - RNA, 23 nt, Human
gaggcagguggaucaugagguca

SEQ ID NO: 771983 - RNA, 18 nt, Human
gagugcaguggugcaauc

SEQ ID NO: 771984 - RNA, 18 nt, Human
gauuacaagcaugagcca

SEQ ID NO: 771985 - RNA, 18 nt, Human
gauuacaagcaugagcca

SEQ ID NO: 771986 - RNA, 21 nt, Human
gauuacaagcaugagccauug

SEQ ID NO: 771987 - RNA, 22 nt, Human
gcaagagaauggugugaaccca

SEQ ID NO: 771988 - RNA, 24 nt, Human
gcacuccagccugggugacagagc

SEQ ID NO: 771989 - RNA, 24 nt, Human
gcauauaaaagaaaccugaccaag

SEQ ID NO: 771990 - RNA, 23 nt, Human
gccacauuugucaacugugucuu

SEQ ID NO: 771991 - RNA, 19 nt, Human
gccacugcacuccagccug

SEQ ID NO: 771992 - RNA, 24 nt, Human
gccacugcacuccagccuggguga

SEQ ID NO: 771993 - RNA, 19 nt, Human
gcccaggcuggagugcagu

SEQ ID NO: 771994 - RNA, 20 nt, Human
gcccaggcuggagugcagug

SEQ ID NO: 771995 - RNA, 21 nt, Human
gcccaggcugggcucagauuc

SEQ ID NO: 771996 - RNA, 20 nt, Human
gcugagaucgcgccacugca

SEQ ID NO: 771997 - RNA, 19 nt, Human
gcuuugucgcccaggcugg

SEQ ID NO: 771998 - RNA, 19 nt, Human
gcuuugucgcccaggcugg

SEQ ID NO: 771999 - RNA, 19 nt, Human
ggagaauagggucuggaga

SEQ ID NO: 772000 - RNA, 18 nt, Human
ggagcuugcagugagcug

SEQ ID NO: 772001 - RNA, 24 nt, Human
ggagcuugcagugagcugagaucg

SEQ ID NO: 772002 - RNA, 24 nt, Human
ggauuacaagcaugagccauugug

SEQ ID NO: 772003 - RNA, 23 nt, Human
ggcagguggaucaugaggucagg

SEQ ID NO: 772004 - RNA, 20 nt, Human
gggagguauuuuuaacaagg

SEQ ID NO: 772005 - RNA, 23 nt, Human
gggagguauuuuuaacaaggcac

SEQ ID NO: 772006 - RNA, 19 nt, Human
gggcccaagccauccuccu

SEQ ID NO: 772007 - RNA, 19 nt, Human
gguaggaaugggaguuagc

SEQ ID NO: 772008 - RNA, 23 nt, Human
gguggcuccugccuguaauccca

SEQ ID NO: 772009 - RNA, 24 nt, Human
gguggcuccugccuguaaucccag

SEQ ID NO: 772010 - RNA, 22 nt, Human
guagcuauuaaugucagguuuu

SEQ ID NO: 772011 - RNA, 19 nt, Human
gugaauaacacaaacucca

SEQ ID NO: 772012 - RNA, 24 nt, Human
gugacagagcgagacucugucuca

SEQ ID NO: 772013 - RNA, 21 nt, Human
gugauuugucuuugguggaag

SEQ ID NO: 772014 - RNA, 18 nt, Human
guggguaaucaggcccag

SEQ ID NO: 772015 - RNA, 20 nt, Human
uaaacaaaaacaaagagaaa

SEQ ID NO: 772016 - RNA, 22 nt, Human
uaaacaaaaacaaagagaauau

SEQ ID NO: 772017 - RNA, 18 nt, Human
uaacaaaaggaucagagg

SEQ ID NO: 772018 - RNA, 24 nt, Human
uaacaaaauguuaauacuagcuaa

SEQ ID NO: 772019 - RNA, 24 nt, Human
uaacaaagugaaaccccgucucua

SEQ ID NO: 772020 - RNA, 24 nt, Human
uaaccaauggcaaaccucuagagg

SEQ ID NO: 772021 - RNA, 19 nt, Human
uaagccacagaaauagcca

SEQ ID NO: 772022 - RNA, 20 nt, Human
uacacaggaguauaacuuug

SEQ ID NO: 772023 - RNA, 19 nt, Human
uacauggacugaaaugaac

SEQ ID NO: 772024 - RNA, 23 nt, Human
uagaagaagaaugcuguuuugau

SEQ ID NO: 772025 - RNA, 21 nt, Human
uagcucccaacaaccaauccc

SEQ ID NO: 772026 - RNA, 23 nt, Human
uagcuuccuuuggguuauacuga

SEQ ID NO: 772027 - RNA, 23 nt, Human
uaggagagucuauauggacaaug

SEQ ID NO: 772028 - RNA, 24 nt, Human
uaggagagucuauauggacaauga

SEQ ID NO: 772029 - RNA, 24 nt, Human
uagguacuuaaaacuuaaaaaaag

SEQ ID NO: 772030 - RNA, 22 nt, Human
uaugaccauacuaauggaaaaa

SEQ ID NO: 772031 - RNA, 23 nt, Human
uauugcuuugucgcccaggcugg

SEQ ID NO: 772032 - RNA, 24 nt, Human
uauugcuuugucgcccaggcuggg

SEQ ID NO: 772033 - RNA, 22 nt, Human
uauuuuuuauuuuuuguagaga

SEQ ID NO: 772034 - RNA, 23 nt, Human
uauuuuuuauuuuuuuugagaca

SEQ ID NO: 772035 - RNA, 22 nt, Human
ucaagaagcuacccugucuccc

SEQ ID NO: 772036 - RNA, 18 nt, Human
ucaagcaauucucccacc

SEQ ID NO: 772037 - RNA, 24 nt, Human
ucacugcagcguugaacuccuggg

SEQ ID NO: 772038 - RNA, 20 nt, Human
ucagacuggucauaggccaa

SEQ ID NO: 772039 - RNA, 20 nt, Human
ucagguuuuaucucugcacu

SEQ ID NO: 772040 - RNA, 24 nt, Human
ucaugaggucaggagauugagacc

SEQ ID NO: 772041 - RNA, 19 nt, Human
uccaaggauuuuauggaaa

SEQ ID NO: 772042 - RNA, 23 nt, Human
uccagccugggugacagagcgag

SEQ ID NO: 772043 - RNA, 24 nt, Human
uccagccugggugacagagcgaga

SEQ ID NO: 772044 - RNA, 18 nt, Human
ucccaaaguguugggauu

SEQ ID NO: 772045 - RNA, 24 nt, Human
ucccaaaguguugggauuacaagc

SEQ ID NO: 772046 - RNA, 24 nt, Human
ucccccacccaaaguggagcuauu

SEQ ID NO: 772047 - RNA, 18 nt, Human
ucccuuggccagcccauu

SEQ ID NO: 772048 - RNA, 24 nt, Human
uccugagcagcugggacuacaggu

SEQ ID NO: 772049 - RNA, 20 nt, Human
uccugggcccaagccauccu

SEQ ID NO: 772050 - RNA, 20 nt, Human
uccuucucaaaaaaaaaaag

SEQ ID NO: 772051 - RNA, 19 nt, Human
ucgcccaggcugggcucag

SEQ ID NO: 772052 - RNA, 21 nt, Human
ucgcccaggcugggcucagau

SEQ ID NO: 772053 - RNA, 23 nt, Human
ucgcgccacugcacuccagccug

SEQ ID NO: 772054 - RNA, 19 nt, Human
ucuaaaauaugacaacagc

SEQ ID NO: 772055 - RNA, 25 nt, Human
ucucuauuaaaaauacaaaaaaauu

SEQ ID NO: 772056 - RNA, 18 nt, Human
ucuguugcccaggcugga

SEQ ID NO: 772057 - RNA, 24 nt, Human
ucuguugcccaggcuggagugcag

SEQ ID NO: 772058 - RNA, 23 nt, Human
ucuuacucuguugcccaggcugg

SEQ ID NO: 772059 - RNA, 24 nt, Human
ucuuacucuguugcccaggcugga

SEQ ID NO: 772060 - RNA, 18 nt, Human
ucuuccuagcucauccac

SEQ ID NO: 772061 - RNA, 22 nt, Human
ugaaaaaugaaagugccucuga

SEQ ID NO: 772062 - RNA, 18 nt, Human
ugaaauauugcuacuucu

SEQ ID NO: 772063 - RNA, 20 nt, Human
ugaaauguucuagcaaagcc

SEQ ID NO: 772064 - RNA, 22 nt, Human
ugacuuauaaucagcuacaguc

SEQ ID NO: 772065 - RNA, 21 nt, Human
ugagaagcaggacaaagaaca

SEQ ID NO: 772066 - RNA, 28 nt, Human
ugagaagcaggacaaagaacauuugcaa

SEQ ID NO: 772067 - RNA, 24 nt, Human
ugagaccauccuggcuaacaaagu

SEQ ID NO: 772068 - RNA, 20 nt, Human
ugagaguuacgugaucucca

SEQ ID NO: 772069 - RNA, 24 nt, Human
ugagaucgcgccacugcacuccag

SEQ ID NO: 772070 - RNA, 22 nt, Human
ugagcugagaucgcgccacugc

SEQ ID NO: 772071 - RNA, 18 nt, Human
ugaggcaagagaauggug

SEQ ID NO: 772072 - RNA, 24 nt, Human
ugaggcaagagaauggugugaacc

SEQ ID NO: 772073 - RNA, 25 nt, Human
ugaggcaagagaauggugugaaccc

SEQ ID NO: 772074 - RNA, 20 nt, Human
ugaggcaggagaauaggguc

SEQ ID NO: 772075 - RNA, 18 nt, Human
ugcccaggcuggagugca

SEQ ID NO: 772076 - RNA, 21 nt, Human
ugcccaggcuggagugcagug

SEQ ID NO: 772077 - RNA, 24 nt, Human
ugcccaggcuggagugcaguggug

SEQ ID NO: 772078 - RNA, 23 nt, Human
ugccuguaaucccagcacuuugg

SEQ ID NO: 772079 - RNA, 23 nt, Human
ugccuguaaucccagcacuuugg

SEQ ID NO: 772080 - RNA, 20 nt, Human
ugccuugguuuuuggaccau

SEQ ID NO: 772081 - RNA, 22 nt, Human
ugcucugauccuucucaaaaaa

SEQ ID NO: 772082 - RNA, 19 nt, Human
ugcuuugucgcccaggcug

SEQ ID NO: 772083 - RNA, 18 nt, Human
uggagugcaguggugcaa

SEQ ID NO: 772084 - RNA, 19 nt, Human
uggagugcaguggugcaau

SEQ ID NO: 772085 - RNA, 23 nt, Human
uggcaguggucgcuuugcaaaau

SEQ ID NO: 772086 - RNA, 23 nt, Human
uggcucccucccuuggccagccc

SEQ ID NO: 772087 - RNA, 19 nt, Human
uggcuccugccuguaaucc

SEQ ID NO: 772088 - RNA, 20 nt, Human
uggcuccugccuguaauccc

SEQ ID NO: 772089 - RNA, 21 nt, Human
uggcuccugccuguaauccca

SEQ ID NO: 772090 - RNA, 24 nt, Human
uggcuccugccuguaaucccagca

SEQ ID NO: 772091 - RNA, 21 nt, Human
uggcuucaagcaauucuccca

SEQ ID NO: 772092 - RNA, 24 nt, Human
uggcuucaagcaauucucccaccu

SEQ ID NO: 772093 - RNA, 21 nt, Human
ugggacuacaggugugugucg

SEQ ID NO: 772094 - RNA, 22 nt, Human
ugggacuacaggugugugucgc

SEQ ID NO: 772095 - RNA, 24 nt, Human
ugggacuacaggugugugucgcua

SEQ ID NO: 772096 - RNA, 24 nt, Human
ugggaggccgaggcagguggauca

SEQ ID NO: 772097 - RNA, 20 nt, Human
ugggaggcugaggcaagaga

SEQ ID NO: 772098 - RNA, 19 nt, Human
ugggauuacaagcaugagc

SEQ ID NO: 772099 - RNA, 21 nt, Human
ugggauuacaagcaugagcca

SEQ ID NO: 772100 - RNA, 21 nt, Human
ugggauuacaagcaugagcca

SEQ ID NO: 772101 - RNA, 22 nt, Human
ugggauuacaagcaugagccau

SEQ ID NO: 772102 - RNA, 23 nt, Human
ugggauuacaagcaugagccauu

SEQ ID NO: 772103 - RNA, 24 nt, Human
ugggauuacaagcaugagccauug

SEQ ID NO: 772104 - RNA, 27 nt, Human
ugggauuacaagcaugagccauugugu

SEQ ID NO: 772105 - RNA, 20 nt, Human
uggguaaucaggcccaguau

SEQ ID NO: 772106 - RNA, 21 nt, Human
uggguuucauggcucccuccc

SEQ ID NO: 772107 - RNA, 20 nt, Human
ugguaacuuuggagaguguu

SEQ ID NO: 772108 - RNA, 22 nt, Human
uggugaauaacacaaacuccau

SEQ ID NO: 772109 - RNA, 24 nt, Human
uggugcaaucauagcucacugcag

SEQ ID NO: 772110 - RNA, 24 nt, Human
ugguggcgggcgacuguaguccca

SEQ ID NO: 772111 - RNA, 19 nt, Human
ugucaacugugucuuuaug

SEQ ID NO: 772112 - RNA, 19 nt, Human
uguccaaaaugccaagaac

SEQ ID NO: 772113 - RNA, 24 nt, Human
uguugggauuacaagcaugagcca

SEQ ID NO: 772114 - RNA, 24 nt, Human
uguuguaagccacagaaauagcca

SEQ ID NO: 772115 - RNA, 25 nt, Human
uuaauauauguuguaaugauuaugu

SEQ ID NO: 772116 - RNA, 22 nt, Human
uuacauauauauacaaccacaa

SEQ ID NO: 772117 - RNA, 24 nt, Human
uuacucuguugcccaggcuggagu

SEQ ID NO: 772118 - RNA, 18 nt, Human
uuagccgggcgugguggc

SEQ ID NO: 772119 - RNA, 23 nt, Human
uuauggaaagccuggauaacauu

SEQ ID NO: 772120 - RNA, 24 nt, Human
uucaagcaauucucccaccuuggc

SEQ ID NO: 772121 - RNA, 22 nt, Human
uucccacacccagauacuaaga

SEQ ID NO: 772122 - RNA, 20 nt, Human
uuccuagaacugaaucaaaa

SEQ ID NO: 772123 - RNA, 24 nt, Human
uucuuacucuguugcccaggcugg

SEQ ID NO: 772124 - RNA, 19 nt, Human
uucuuguugcacuuugugu

SEQ ID NO: 772125 - RNA, 19 nt, Human
uugaaauauugcuacuucu

SEQ ID NO: 772126 - RNA, 24 nt, Human
uugagacaguucuuacucuguugc

SEQ ID NO: 772127 - RNA, 18 nt, Human
uugcagugagcugagauc

SEQ ID NO: 772128 - RNA, 22 nt, Human
uugcagugagcugagaucgcgc

SEQ ID NO: 772129 - RNA, 20 nt, Human
uugcuuugucgcccaggcug

SEQ ID NO: 772130 - RNA, 21 nt, Human
uugcuuugucgcccaggcugg

SEQ ID NO: 772131 - RNA, 25 nt, Human
uugggaggccgaggcagguggauca

SEQ ID NO: 772132 - RNA, 20 nt, Human
uugggauuacaagcaugagc

SEQ ID NO: 772133 - RNA, 25 nt, Human
uuguaagccacagaaauagccacau

SEQ ID NO: 772134 - RNA, 23 nt, Human
uuuacacaggguguacgccaagu

SEQ ID NO: 772135 - RNA, 24 nt, Human
uuuacauauauauacaaccacaca

SEQ ID NO: 772136 - RNA, 22 nt, Human
uuucugcauugcagaugaaaaa

SEQ ID NO: 772137 - RNA, 19 nt, Human
uuugguggaagugguagac

SEQ ID NO: 772138 - RNA, 20 nt, Human
aaaaaaaaagcaagcuugaa

SEQ ID NO: 772139 - RNA, 25 nt, Human
aaaaaaaagcaagcuugagcugccu

SEQ ID NO: 772140 - RNA, 26 nt, Human
aaaaaacagccaggcaugguggcuug

SEQ ID NO: 772141 - RNA, 18 nt, Human
aaaacaaccauuagcaau

SEQ ID NO: 772142 - RNA, 23 nt, Human
aaaagaaaaaagauuugccaaaa

SEQ ID NO: 772143 - RNA, 24 nt, Human
aaacagcaccuaccauaugacuca

SEQ ID NO: 772144 - RNA, 19 nt, Human
aaacccaggagcagagcag

SEQ ID NO: 772145 - RNA, 19 nt, Human
aaagccccauucauaaauc

SEQ ID NO: 772146 - RNA, 24 nt, Human
aacauucucucugccucccugccu

SEQ ID NO: 772147 - RNA, 22 nt, Human
aaccacucaauuguacgcuuaa

SEQ ID NO: 772148 - RNA, 23 nt, Human
aagcaagcuugagcugccuaagu

SEQ ID NO: 772149 - RNA, 23 nt, Human
aagcacauuugcuaggcugagca

SEQ ID NO: 772150 - RNA, 19 nt, Human
aauccaaaauacuuuauca

SEQ ID NO: 772151 - RNA, 27 nt, Human
acaaucaagauuugccaaaaaacagcc

SEQ ID NO: 772152 - RNA, 25 nt, Human
acacagcaaacccaggagcagagca

SEQ ID NO: 772153 - RNA, 21 nt, Human
acagguggcaaccuuggcuca

SEQ ID NO: 772154 - RNA, 21 nt, Human
acaugaccaucauuuguuuuc

SEQ ID NO: 772155 - RNA, 22 nt, Human
accaaagauuucaugaaaugac

SEQ ID NO: 772156 - RNA, 22 nt, Human
acgcgguagaccagggggaguc

SEQ ID NO: 772157 - RNA, 18 nt, Human
agacagccaugagaucag

SEQ ID NO: 772158 - RNA, 20 nt, Human
agacagccaugagaucaggg

SEQ ID NO: 772159 - RNA, 18 nt, Human
agacuugaaagaucagug

SEQ ID NO: 772160 - RNA, 22 nt, Human
agagagaccucuuucuucagga

SEQ ID NO: 772161 - RNA, 20 nt, Human
agagucaaugaaaauaugaa

SEQ ID NO: 772162 - RNA, 19 nt, Human
agcagagcccugucucaaa

SEQ ID NO: 772163 - RNA, 20 nt, Human
agcagcacucaaucccuggu

SEQ ID NO: 772164 - RNA, 23 nt, Human
agccaggcaugguggcuugugcc

SEQ ID NO: 772165 - RNA, 24 nt, Human
agccaugagaucagggugggacug

SEQ ID NO: 772166 - RNA, 21 nt, Human
aggagcagagcaggaucggca

SEQ ID NO: 772167 - RNA, 20 nt, Human
aggcaggcaggcuagauauu

SEQ ID NO: 772168 - RNA, 20 nt, Human
aggcagugagcaagguaggg

SEQ ID NO: 772169 - RNA, 24 nt, Human
aggcugaggugggaggaucccuug

SEQ ID NO: 772170 - RNA, 19 nt, Human
agugagcaagguaggagag

SEQ ID NO: 772171 - RNA, 20 nt, Human
aguggugaugguugaacaag

SEQ ID NO: 772172 - RNA, 19 nt, Human
aguggugggacaaggggcu

SEQ ID NO: 772173 - RNA, 18 nt, Human
aucgaaauacaaaagcua

SEQ ID NO: 772174 - RNA, 20 nt, Human
auuuguuuucauuuccugag

SEQ ID NO: 772175 - RNA, 25 nt, Human
caaaaaagaaaaaagauuugccaaa

SEQ ID NO: 772176 - RNA, 18 nt, Human
caaaacacaaaccuucag

SEQ ID NO: 772177 - RNA, 18 nt, Human
caaaauaaauaugccagg

SEQ ID NO: 772178 - RNA, 21 nt, Human
caaaaucagguguugguugcc

SEQ ID NO: 772179 - RNA, 26 nt, Human
caaacagcaccuaccauaugacucag

SEQ ID NO: 772180 - RNA, 21 nt, Human
caacaugaccaucauuuguuu

SEQ ID NO: 772181 - RNA, 22 nt, Human
caagaggggcccacccaggccc

SEQ ID NO: 772182 - RNA, 28 nt, Human
cacaaucaagauuugccaaaaaacagcc

SEQ ID NO: 772183 - RNA, 23 nt, Human
cacacagcaaacccaggagcaga

SEQ ID NO: 772184 - RNA, 21 nt, Human
cacaguguuuaacacugccca

SEQ ID NO: 772185 - RNA, 20 nt, Human
caccaaagauuucaugaaau

SEQ ID NO: 772186 - RNA, 23 nt, Human
cacggaucacaggucugagaagu

SEQ ID NO: 772187 - RNA, 28 nt, Human
cacuaaucuagccaccauucagucacac

SEQ ID NO: 772188 - RNA, 18 nt, Human
cagcacucaaucccuggu

SEQ ID NO: 772189 - RNA, 20 nt, Human
caggaucaccaauuaugcca

SEQ ID NO: 772190 - RNA, 21 nt, Human
caggauuccaaauuaauguua

SEQ ID NO: 772191 - RNA, 18 nt, Human
cauuuguuuucauuuccu

SEQ ID NO: 772192 - RNA, 24 nt, Human
ccaaagauuucaugaaaugacauu

SEQ ID NO: 772193 - RNA, 23 nt, Human
ccacccaggccccagcuugauuu

SEQ ID NO: 772194 - RNA, 19 nt, Human
ccacuaaucuagccaccau

SEQ ID NO: 772195 - RNA, 24 nt, Human
cccacagguaaaggguaaugcugg

SEQ ID NO: 772196 - RNA, 20 nt, Human
cccaggccccagcuugauuu

SEQ ID NO: 772197 - RNA, 19 nt, Human
cccucccagagcccuucac

SEQ ID NO: 772198 - RNA, 23 nt, Human
ccucaaggguuagacaucucucc

SEQ ID NO: 772199 - RNA, 22 nt, Human
ccuccuuaucugucucccagac

SEQ ID NO: 772200 - RNA, 18 nt, Human
ccuucagaguagugcuca

SEQ ID NO: 772201 - RNA, 18 nt, Human
cggagugugcugcuuucc

SEQ ID NO: 772202 - RNA, 24 nt, Human
cggcugcuugggaggcugaggugg

SEQ ID NO: 772203 - RNA, 21 nt, Human
cuaagucccgcucacacacac

SEQ ID NO: 772204 - RNA, 19 nt, Human
cucaugcuuucagcguucc

SEQ ID NO: 772205 - RNA, 19 nt, Human
cugaaggcugggcauuugc

SEQ ID NO: 772206 - RNA, 22 nt, Human
cugaaucaugcauauccuugcu

SEQ ID NO: 772207 - RNA, 21 nt, Human
cugacugcuguggacacugag

SEQ ID NO: 772208 - RNA, 28 nt, Human
cugcucccacuaaucuagccaccauuca

SEQ ID NO: 772209 - RNA, 26 nt, Human
cuucaaggaaaaaacugcaacaugac

SEQ ID NO: 772210 - RNA, 24 nt, Human
cuuccucuuuguuauacacacaga

SEQ ID NO: 772211 - RNA, 24 nt, Human
gaaaacguacacucacaugccuuc

SEQ ID NO: 772212 - RNA, 22 nt, Human
gaaaguaucaucugggcugaag

SEQ ID NO: 772213 - RNA, 24 nt, Human
gacaaugaaaggagagacagccau

SEQ ID NO: 772214 - RNA, 23 nt, Human
gacuugaaagaucaguguauaca

SEQ ID NO: 772215 - RNA, 18 nt, Human
gagcugccuaagucccgc

SEQ ID NO: 772216 - RNA, 19 nt, Human
gaguuugcaaccagccuga

SEQ ID NO: 772217 - RNA, 20 nt, Human
gaucacaggucugagaagug

SEQ ID NO: 772218 - RNA, 23 nt, Human
gaucaccaauuaugccaaggaga

SEQ ID NO: 772219 - RNA, 20 nt, Human
gcaaacccaggagcagagca

SEQ ID NO: 772220 - RNA, 24 nt, Human
gcacaacauucucucugccucccu

SEQ ID NO: 772221 - RNA, 18 nt, Human
gcagagcccugucucaaa

SEQ ID NO: 772222 - RNA, 20 nt, Human
gcagagcccugucucaaaag

SEQ ID NO: 772223 - RNA, 23 nt, Human
gcugcuugggaggcugagguggg

SEQ ID NO: 772224 - RNA, 20 nt, Human
gcuugugccugcagucccgg

SEQ ID NO: 772225 - RNA, 21 nt, Human
ggacaaggggcucaacagcag

SEQ ID NO: 772226 - RNA, 18 nt, Human
ggcagcuagcucacccuc

SEQ ID NO: 772227 - RNA, 18 nt, Human
gggcaggaaaucggucug

SEQ ID NO: 772228 - RNA, 23 nt, Human
gugaauuuacuaaaaccacucaa

SEQ ID NO: 772229 - RNA, 21 nt, Human
uaaaaguuuccuucgagugua

SEQ ID NO: 772230 - RNA, 24 nt, Human
uaaacugcagagauuaaaaguuuc

SEQ ID NO: 772231 - RNA, 18 nt, Human
uaacaggugugugauaag

SEQ ID NO: 772232 - RNA, 27 nt, Human
uaagagacagguggcaaccuuggcuca

SEQ ID NO: 772233 - RNA, 18 nt, Human
uacacacagagacacaga

SEQ ID NO: 772234 - RNA, 26 nt, Human
uaccaagaggggcccacccaggcccc

SEQ ID NO: 772235 - RNA, 24 nt, Human
uaccaagggccacacagcaaaccc

SEQ ID NO: 772236 - RNA, 18 nt, Human
uaccacgcugggcugguc

SEQ ID NO: 772237 - RNA, 24 nt, Human
uacgcuuaaaaaaaaaagcaagcu

SEQ ID NO: 772238 - RNA, 19 nt, Human
uacuaaaaccacucaauug

SEQ ID NO: 772239 - RNA, 22 nt, Human
uagauccuacgguauguuagaa

SEQ ID NO: 772240 - RNA, 24 nt, Human
uauaggacucacagaaaacaacca

SEQ ID NO: 772241 - RNA, 24 nt, Human
uaugguccccuggagagaagcagg

SEQ ID NO: 772242 - RNA, 24 nt, Human
ucaagauuugccaaaaaacagcca

SEQ ID NO: 772243 - RNA, 18 nt, Human
ucacagucugaugaggga

SEQ ID NO: 772244 - RNA, 23 nt, Human
ucacuggggagaagauacacgga

SEQ ID NO: 772245 - RNA, 23 nt, Human
ucagcccacgcugagucugaugc

SEQ ID NO: 772246 - RNA, 24 nt, Human
ucagcccacgcugagucugaugcc

SEQ ID NO: 772247 - RNA, 21 nt, Human
ucauucacuguaaaauuuggu

SEQ ID NO: 772248 - RNA, 23 nt, Human
ucauuuguuuucauuuccugagu

SEQ ID NO: 772249 - RNA, 23 nt, Human
uccaaaauacuuuaucaccaaag

SEQ ID NO: 772250 - RNA, 24 nt, Human
uccaaaauacuuuaucaccaaaga

SEQ ID NO: 772251 - RNA, 18 nt, Human
uccaagugaaaacaaggu

SEQ ID NO: 772252 - RNA, 20 nt, Human
uccagguaggaggauuuaga

SEQ ID NO: 772253 - RNA, 18 nt, Human
ucuaaacuaacagcagca

SEQ ID NO: 772254 - RNA, 18 nt, Human
ucuaaacuaacagcagca

SEQ ID NO: 772255 - RNA, 18 nt, Human
ucucaaaaaagaaaaaag

SEQ ID NO: 772256 - RNA, 23 nt, Human
ucugacaaugaaaggagagacag

SEQ ID NO: 772257 - RNA, 20 nt, Human
ucuucauucccugaaucaug

SEQ ID NO: 772258 - RNA, 22 nt, Human
ucuuggacccucccagagcccu

SEQ ID NO: 772259 - RNA, 26 nt, Human
ugaaaacaagguuauuuggucgacug

SEQ ID NO: 772260 - RNA, 19 nt, Human
ugaaaacauuccugcacac

SEQ ID NO: 772261 - RNA, 22 nt, Human
ugaaagccccauucauaaaucc

SEQ ID NO: 772262 - RNA, 18 nt, Human
ugaagagaacaaacagug

SEQ ID NO: 772263 - RNA, 19 nt, Human
ugaagagaacaaacagugg

SEQ ID NO: 772264 - RNA, 26 nt, Human
ugaauccaaaauacuuuaucaccaaa

SEQ ID NO: 772265 - RNA, 24 nt, Human
ugccugcagucccggcugcuuggg

SEQ ID NO: 772266 - RNA, 18 nt, Human
ugccuggguaugagaagg

SEQ ID NO: 772267 - RNA, 18 nt, Human
ugccuuccugccugcagc

SEQ ID NO: 772268 - RNA, 20 nt, Human
ugcuguggacacugaguaca

SEQ ID NO: 772269 - RNA, 21 nt, Human
uggaagaaaacguacacucac

SEQ ID NO: 772270 - RNA, 18 nt, Human
uggcgggaguggugggac

SEQ ID NO: 772271 - RNA, 25 nt, Human
uggcgggaguggugggacaaggggc

SEQ ID NO: 772272 - RNA, 19 nt, Human
ugggaggcugaggugggag

SEQ ID NO: 772273 - RNA, 19 nt, Human
ugggcaggaaaucggucug

SEQ ID NO: 772274 - RNA, 24 nt, Human
uggucaggugggcaggaaaucggu

SEQ ID NO: 772275 - RNA, 23 nt, Human
ugguggcuugugccugcaguccc

SEQ ID NO: 772276 - RNA, 28 nt, Human
uguaauauuucuaaaaugucauuuaauc

SEQ ID NO: 772277 - RNA, 18 nt, Human
ugugccugcagucccggc

SEQ ID NO: 772278 - RNA, 22 nt, Human
ugugccugcagucccggcugcu

SEQ ID NO: 772279 - RNA, 23 nt, Human
ugugccugcagucccggcugcuu

SEQ ID NO: 772280 - RNA, 19 nt, Human
uguuggauaacaggugugu

SEQ ID NO: 772281 - RNA, 20 nt, Human
uuaaaguguaacaaaacccc

SEQ ID NO: 772282 - RNA, 25 nt, Human
uucacagauaccaagaggggcccac

SEQ ID NO: 772283 - RNA, 20 nt, Human
uuccaaacagcaccuaccau

SEQ ID NO: 772284 - RNA, 20 nt, Human
uugcacuuaauuugaauccg

SEQ ID NO: 772285 - RNA, 21 nt, Human
uugcagucccucacagaccug

SEQ ID NO: 772286 - RNA, 23 nt, Human
uuggaaagauucacagauaccaa

SEQ ID NO: 772287 - RNA, 19 nt, Human
uuguaauauuucuaaaaug

SEQ ID NO: 772288 - RNA, 18 nt, Human
uuguuuucauuuccugag

SEQ ID NO: 772289 - RNA, 24 nt, Human
uuguuuucauuuccugaguaagcu

SEQ ID NO: 772290 - RNA, 20 nt, Human
uuugcagucccucacagacc

SEQ ID NO: 772291 - RNA, 19 nt, Human
aaaaaaaaaaaaaaagagg

SEQ ID NO: 772292 - RNA, 25 nt, Human
aaaaaaagcaaaaacagcuuuauaa

SEQ ID NO: 772293 - RNA, 18 nt, Human
aaaaaagccagacccaag

SEQ ID NO: 772294 - RNA, 19 nt, Human
aaaaaagccagacccaagg

SEQ ID NO: 772295 - RNA, 19 nt, Human
aaaaacagcuuuauaaaca

SEQ ID NO: 772296 - RNA, 21 nt, Human
aaaaagccagacccaagggac

SEQ ID NO: 772297 - RNA, 24 nt, Human
aaaacaaaacaggaaacuccccaa

SEQ ID NO: 772298 - RNA, 21 nt, Human
aaaacaaaggaaaaaaaccca

SEQ ID NO: 772299 - RNA, 21 nt, Human
aaaacccaaaaaaacuguuuc

SEQ ID NO: 772300 - RNA, 22 nt, Human
aaaagaaaaaaaaaaaaaaaag

SEQ ID NO: 772301 - RNA, 21 nt, Human
aaacaaaacaggaaacucccc

SEQ ID NO: 772302 - RNA, 23 nt, Human
aaacaaaacaggaaacuccccaa

SEQ ID NO: 772303 - RNA, 18 nt, Human
aaacaacccagcugaaag

SEQ ID NO: 772304 - RNA, 24 nt, Human
aaagcucaguaaaugucacaaaag

SEQ ID NO: 772305 - RNA, 18 nt, Human
aaaggauucccugccucc

SEQ ID NO: 772306 - RNA, 19 nt, Human
aaccugggcuaaccagaag

SEQ ID NO: 772307 - RNA, 23 nt, Human
aaccuuaauuaaagagaccccag

SEQ ID NO: 772308 - RNA, 21 nt, Human
aagaaaaaaaaaaaaaaaaga

SEQ ID NO: 772309 - RNA, 22 nt, Human
aagaaaaaaaaaaaaaaaagag

SEQ ID NO: 772310 - RNA, 18 nt, Human
aagagcaugaaggaucuu

SEQ ID NO: 772311 - RNA, 22 nt, Human
aagauccagucucuacaaaaaa

SEQ ID NO: 772312 - RNA, 18 nt, Human
aagaucccagaaggucag

SEQ ID NO: 772313 - RNA, 21 nt, Human
aaggaucuuauugggagggau

SEQ ID NO: 772314 - RNA, 21 nt, Human
aaguucucuaagcuacucucc

SEQ ID NO: 772315 - RNA, 23 nt, Human
aaguuguuuuaagaaaaggauuc

SEQ ID NO: 772316 - RNA, 23 nt, Human
aaucaaagcaauaguaauaaaca

SEQ ID NO: 772317 - RNA, 21 nt, Human
aaucaacaggacagaauaacu

SEQ ID NO: 772318 - RNA, 22 nt, Human
aaucacugaaauguacacuuga

SEQ ID NO: 772319 - RNA, 24 nt, Human
aaucacuugagcacaacaauucaa

SEQ ID NO: 772320 - RNA, 22 nt, Human
acaagcuccuuucucucugcaa

SEQ ID NO: 772321 - RNA, 23 nt, Human
acaccaucaccacuucaccaucc

SEQ ID NO: 772322 - RNA, 22 nt, Human
acacccagccuauaaucccagc

SEQ ID NO: 772323 - RNA, 19 nt, Human
acacugccaucuacaucuc

SEQ ID NO: 772324 - RNA, 24 nt, Human
acagaauucuacucagcaauaaaa

SEQ ID NO: 772325 - RNA, 23 nt, Human
acagagugagacuaugucucaaa

SEQ ID NO: 772326 - RNA, 24 nt, Human
acagagugagacuaugucucaaaa

SEQ ID NO: 772327 - RNA, 20 nt, Human
acaggacaacaguaacuaaa

SEQ ID NO: 772328 - RNA, 26 nt, Human
acaggacaacaguaacuaaaugacuc

SEQ ID NO: 772329 - RNA, 24 nt, Human
accacacccagccuauaaucccag

SEQ ID NO: 772330 - RNA, 21 nt, Human
accaccaucacagcccuaccu

SEQ ID NO: 772331 - RNA, 19 nt, Human
accacugcacuccagccug

SEQ ID NO: 772332 - RNA, 24 nt, Human
accacugcacuccagccuggguga

SEQ ID NO: 772333 - RNA, 18 nt, Human
accauccacaacauccuc

SEQ ID NO: 772334 - RNA, 25 nt, Human
accauuuugugcauuacuaucccca

SEQ ID NO: 772335 - RNA, 19 nt, Human
accuaaacugagaaagauu

SEQ ID NO: 772336 - RNA, 22 nt, Human
accucaccuccuuacuucccag

SEQ ID NO: 772337 - RNA, 23 nt, Human
accucaccuccuuacuucccagc

SEQ ID NO: 772338 - RNA, 21 nt, Human
acuaugucucaaaaaaaaaga

SEQ ID NO: 772339 - RNA, 28 nt, Human
acuaugucucaaaaaaaaagaaaaaaaa

SEQ ID NO: 772340 - RNA, 23 nt, Human
acucaagugacaaccaccaucac

SEQ ID NO: 772341 - RNA, 24 nt, Human
acuccagccugggugacagaguga

SEQ ID NO: 772342 - RNA, 24 nt, Human
acugcacuccagccugggugacag

SEQ ID NO: 772343 - RNA, 26 nt, Human
acugcacuccagccugggugacagag

SEQ ID NO: 772344 - RNA, 21 nt, Human
acuucgcaaacuaaugacguc

SEQ ID NO: 772345 - RNA, 24 nt, Human
agaaaaaaaaaaaaaaaagaggga

SEQ ID NO: 772346 - RNA, 23 nt, Human
agaaagggcaaauuuauagagaa

SEQ ID NO: 772347 - RNA, 21 nt, Human
agaaauacucagaggcuuaga

SEQ ID NO: 772348 - RNA, 23 nt, Human
agaauuucuucagcuuuccauac

SEQ ID NO: 772349 - RNA, 22 nt, Human
agaggcugcagaggugcucugu

SEQ ID NO: 772350 - RNA, 18 nt, Human
agaugggagaaucacuug

SEQ ID NO: 772351 - RNA, 24 nt, Human
agcacuuugggaggcugagauggg

SEQ ID NO: 772352 - RNA, 22 nt, Human
agccaugguuagcauuauaacc

SEQ ID NO: 772353 - RNA, 22 nt, Human
agccugggugacagagugagac

SEQ ID NO: 772354 - RNA, 23 nt, Human
agcuauuuaaaaaaacaaaacag

SEQ ID NO: 772355 - RNA, 21 nt, Human
agcugcuuccuauaccuggag

SEQ ID NO: 772356 - RNA, 20 nt, Human
aggaaaagcagucccagaag

SEQ ID NO: 772357 - RNA, 25 nt, Human
aggaaagacaaagaaacacacccua

SEQ ID NO: 772358 - RNA, 19 nt, Human
aggagaauuucuucagcuu

SEQ ID NO: 772359 - RNA, 24 nt, Human
aggcuaagaugggaggauugcuug

SEQ ID NO: 772360 - RNA, 20 nt, Human
aggcucauaaucaacaggac

SEQ ID NO: 772361 - RNA, 24 nt, Human
aggcucccagccuuuccccaguga

SEQ ID NO: 772362 - RNA, 24 nt, Human
aggcugagaugggagaaucacuug

SEQ ID NO: 772363 - RNA, 22 nt, Human
aggcugcagaggugcucugucu

SEQ ID NO: 772364 - RNA, 24 nt, Human
aggcuggaaaaaaaaacuguccaa

SEQ ID NO: 772365 - RNA, 18 nt, Human
agggagagauuuccucua

SEQ ID NO: 772366 - RNA, 23 nt, Human
aguaacuaaaugacucaagugac

SEQ ID NO: 772367 - RNA, 24 nt, Human
agucuuccucaaagcuuucucggc

SEQ ID NO: 772368 - RNA, 20 nt, Human
auacagcagggugagagggg

SEQ ID NO: 772369 - RNA, 20 nt, Human
aucaaaaguuacuguaaacu

SEQ ID NO: 772370 - RNA, 25 nt, Human
aucacagcccuaccuucugauuuag

SEQ ID NO: 772371 - RNA, 21 nt, Human
augauuaggggaaaaaaagca

SEQ ID NO: 772372 - RNA, 20 nt, Human
auguucagugucugaagaag

SEQ ID NO: 772373 - RNA, 19 nt, Human
auguuucccuggguuggcu

SEQ ID NO: 772374 - RNA, 24 nt, Human
auucaccucaccuccuuacuuccc

SEQ ID NO: 772375 - RNA, 20 nt, Human
auuuuaucucauuuuuguca

SEQ ID NO: 772376 - RNA, 24 nt, Human
caaaaagucaacgagagcucauaa

SEQ ID NO: 772377 - RNA, 20 nt, Human
caaaacagaccagcacagca

SEQ ID NO: 772378 - RNA, 22 nt, Human
caaaacaggaaacuccccaaac

SEQ ID NO: 772379 - RNA, 22 nt, Human
caaaauagaaauacucagaggc

SEQ ID NO: 772380 - RNA, 21 nt, Human
caaacaaaagucagcagaaca

SEQ ID NO: 772381 - RNA, 23 nt, Human
caaaccucaaaaacauuagcuaa

SEQ ID NO: 772382 - RNA, 19 nt, Human
caaaggaaaaaaacccaaa

SEQ ID NO: 772383 - RNA, 18 nt, Human
caacaagacacacaugca

SEQ ID NO: 772384 - RNA, 22 nt, Human
caacagaauucuacucagcaau

SEQ ID NO: 772385 - RNA, 20 nt, Human
caaccaccaucacagcccua

SEQ ID NO: 772386 - RNA, 20 nt, Human
caaccucugucccacagccu

SEQ ID NO: 772387 - RNA, 19 nt, Human
caagaccuucugggcccag

SEQ ID NO: 772388 - RNA, 23 nt, Human
cacacagcacaguagcaaucaga

SEQ ID NO: 772389 - RNA, 19 nt, Human
cacacccagccuauaaucc

SEQ ID NO: 772390 - RNA, 30 nt, Human
cacacccagccuauaaucccagcacuuugg

SEQ ID NO: 772391 - RNA, 18 nt, Human
cacagccacauacugaau

SEQ ID NO: 772392 - RNA, 23 nt, Human
cacccgagaagcgccacuaccac

SEQ ID NO: 772393 - RNA, 23 nt, Human
caccucaccuccuuacuucccag

SEQ ID NO: 772394 - RNA, 19 nt, Human
cacucagacacaugcucau

SEQ ID NO: 772395 - RNA, 22 nt, Human
cacuccagccugggugacagag

SEQ ID NO: 772396 - RNA, 24 nt, Human
cacuccagccugggugacagagug

SEQ ID NO: 772397 - RNA, 20 nt, Human
cacuccuccgagagcuuaaa

SEQ ID NO: 772398 - RNA, 19 nt, Human
cacugcacuccagccuggg

SEQ ID NO: 772399 - RNA, 21 nt, Human
cacugcacuccagccugggug

SEQ ID NO: 772400 - RNA, 22 nt, Human
cacugcacuccagccuggguga

SEQ ID NO: 772401 - RNA, 23 nt, Human
cacugcacuccagccugggugac

SEQ ID NO: 772402 - RNA, 24 nt, Human
cacugcacuccagccugggugaca

SEQ ID NO: 772403 - RNA, 24 nt, Human
cacugcacuccagccugggugaca

SEQ ID NO: 772404 - RNA, 22 nt, Human
cacuucgcaaacuaaugacguc

SEQ ID NO: 772405 - RNA, 23 nt, Human
cagaauucuacucagcaauaaaa

SEQ ID NO: 772406 - RNA, 20 nt, Human
cagcacagcaggccuccccu

SEQ ID NO: 772407 - RNA, 20 nt, Human
cagcacaguagcaaucagaa

SEQ ID NO: 772408 - RNA, 18 nt, Human
cagcacccgagaagcgcc

SEQ ID NO: 772409 - RNA, 24 nt, Human
cagcacuuugggaggcugagaugg

SEQ ID NO: 772410 - RNA, 19 nt, Human
cagcaguaggggguuggcc

SEQ ID NO: 772411 - RNA, 21 nt, Human
cagcaguaggggguuggccag

SEQ ID NO: 772412 - RNA, 24 nt, Human
cagcaguaggggguuggccagugg

SEQ ID NO: 772413 - RNA, 23 nt, Human
cagcugccauuugguuuguauag

SEQ ID NO: 772414 - RNA, 20 nt, Human
cagcuuuguaaguggagcca

SEQ ID NO: 772415 - RNA, 20 nt, Human
caggaaacuccccaaacaaa

SEQ ID NO: 772416 - RNA, 19 nt, Human
cagggcucuccaauuccuc

SEQ ID NO: 772417 - RNA, 19 nt, Human
caguaggggguuggccagu

SEQ ID NO: 772418 - RNA, 19 nt, Human
caugcuaauugccagcaca

SEQ ID NO: 772419 - RNA, 23 nt, Human
cauuucuauacaaauucucaaac

SEQ ID NO: 772420 - RNA, 20 nt, Human
ccaaaccauccuucaagcau

SEQ ID NO: 772421 - RNA, 22 nt, Human
ccaaaucugccuaacaaaggca

SEQ ID NO: 772422 - RNA, 20 nt, Human
ccacugcacuccagccuggg

SEQ ID NO: 772423 - RNA, 20 nt, Human
ccacugcacuccagccuggg

SEQ ID NO: 772424 - RNA, 20 nt, Human
ccacugcacuccagccuggg

SEQ ID NO: 772425 - RNA, 21 nt, Human
ccacugcacuccagccugggu

SEQ ID NO: 772426 - RNA, 21 nt, Human
ccacugcacuccagccugggu

SEQ ID NO: 772427 - RNA, 24 nt, Human
ccacugcacuccagccugggugac

SEQ ID NO: 772428 - RNA, 19 nt, Human
ccagcugcugugacuuugg

SEQ ID NO: 772429 - RNA, 23 nt, Human
cccaaacaaaagucagcagaaca

SEQ ID NO: 772430 - RNA, 24 nt, Human
cccaaagaaggauuaauaacuacc

SEQ ID NO: 772431 - RNA, 21 nt, Human
cccacagccacauacugaauu

SEQ ID NO: 772432 - RNA, 23 nt, Human
cccaguggaggugcugggcugcu

SEQ ID NO: 772433 - RNA, 18 nt, Human
cccccucuucagcuccac

SEQ ID NO: 772434 - RNA, 20 nt, Human
cccccucuucagcuccacca

SEQ ID NO: 772435 - RNA, 20 nt, Human
ccccuauaaguccuacguuu

SEQ ID NO: 772436 - RNA, 23 nt, Human
ccccugggacuggggaaggugaa

SEQ ID NO: 772437 - RNA, 22 nt, Human
cccuaagaggucaaucuacaaa

SEQ ID NO: 772438 - RNA, 20 nt, Human
cccuguccagucugggggag

SEQ ID NO: 772439 - RNA, 30 nt, Human
ccuccuguucuccccacccacuucgcaaaa

SEQ ID NO: 772440 - RNA, 24 nt, Human
ccuccuucagaucguacucugcca

SEQ ID NO: 772441 - RNA, 22 nt, Human
ccugaugguucaggagccuggg

SEQ ID NO: 772442 - RNA, 22 nt, Human
ccuggcacccaguuuaguuccu

SEQ ID NO: 772443 - RNA, 20 nt, Human
ccugggugacagagugagac

SEQ ID NO: 772444 - RNA, 20 nt, Human
ccuguccccugggacugggg

SEQ ID NO: 772445 - RNA, 21 nt, Human
ccuguugucccagcuacucgg

SEQ ID NO: 772446 - RNA, 21 nt, Human
ccuuacuucccagcuucucca

SEQ ID NO: 772447 - RNA, 23 nt, Human
ccuuugguagcaguaucuuuucu

SEQ ID NO: 772448 - RNA, 18 nt, Human
cgccccaucccccucuuc

SEQ ID NO: 772449 - RNA, 21 nt, Human
cuaaguaaaaaagccagaccc

SEQ ID NO: 772450 - RNA, 24 nt, Human
cuaguguccugaaaaauauuuccu

SEQ ID NO: 772451 - RNA, 24 nt, Human
cucaaaaaaaaagaaaaaaaaaaa

SEQ ID NO: 772452 - RNA, 18 nt, Human
cucaccuccuuacuuccc

SEQ ID NO: 772453 - RNA, 25 nt, Human
cuccaaaucugccuaacaaaggcag

SEQ ID NO: 772454 - RNA, 20 nt, Human
cuccuguaccccacacugcc

SEQ ID NO: 772455 - RNA, 22 nt, Human
cucuauacacgaagguagcucc

SEQ ID NO: 772456 - RNA, 23 nt, Human
cucuccuaugacaugugaccuaa

SEQ ID NO: 772457 - RNA, 24 nt, Human
cugaauuuauaccaacuuuguuuc

SEQ ID NO: 772458 - RNA, 19 nt, Human
cugcagcaguucuggcucu

SEQ ID NO: 772459 - RNA, 19 nt, Human
cugcauuugcccaggccua

SEQ ID NO: 772460 - RNA, 18 nt, Human
cugcccccuccucacagu

SEQ ID NO: 772461 - RNA, 21 nt, Human
cugccucccaaaccauccuuc

SEQ ID NO: 772462 - RNA, 18 nt, Human
cuggggaaggugaaucuc

SEQ ID NO: 772463 - RNA, 23 nt, Human
cugucccucccccaaagaaggau

SEQ ID NO: 772464 - RNA, 22 nt, Human
cuucagaucguacucugccacu

SEQ ID NO: 772465 - RNA, 20 nt, Human
cuucccgcugugcaccccuc

SEQ ID NO: 772466 - RNA, 22 nt, Human
cuuguagagauuaguguaucca

SEQ ID NO: 772467 - RNA, 24 nt, Human
cuuugcuguugggccuccccucca

SEQ ID NO: 772468 - RNA, 20 nt, Human
gaaaagaucccagaagguca

SEQ ID NO: 772469 - RNA, 24 nt, Human
gaaaaggauucccugccucccaaa

SEQ ID NO: 772470 - RNA, 20 nt, Human
gaaacaacccagcugaaagc

SEQ ID NO: 772471 - RNA, 18 nt, Human
gaaauauccaaacuguga

SEQ ID NO: 772472 - RNA, 21 nt, Human
gaauucugagcuuggacaggc

SEQ ID NO: 772473 - RNA, 24 nt, Human
gacaccaucaccacuucaccaucc

SEQ ID NO: 772474 - RNA, 21 nt, Human
gaugggaggauugcuugagcc

SEQ ID NO: 772475 - RNA, 18 nt, Human
gaugguucaggagccugg

SEQ ID NO: 772476 - RNA, 19 nt, Human
gcaacaaaagaccccagca

SEQ ID NO: 772477 - RNA, 24 nt, Human
gcacuccagccugggugacagagu

SEQ ID NO: 772478 - RNA, 20 nt, Human
gcagaggugcucugucuacc

SEQ ID NO: 772479 - RNA, 21 nt, Human
gcaggugacuaaguggugugc

SEQ ID NO: 772480 - RNA, 25 nt, Human
gccccaucccccucuucagcuccac

SEQ ID NO: 772481 - RNA, 21 nt, Human
gcccccacuacacaccaaauu

SEQ ID NO: 772482 - RNA, 27 nt, Human
gcccccuccucacaguuggguagauuc

SEQ ID NO: 772483 - RNA, 20 nt, Human
gccccuaccucccaacauaa

SEQ ID NO: 772484 - RNA, 19 nt, Human
gcccgccccaucccccucu

SEQ ID NO: 772485 - RNA, 20 nt, Human
ggaaacucgcauguuucccu

SEQ ID NO: 772486 - RNA, 24 nt, Human
ggaaccugggcuaaccagaagccc

SEQ ID NO: 772487 - RNA, 19 nt, Human
ggacaaacaggcaagggcu

SEQ ID NO: 772488 - RNA, 22 nt, Human
ggacccuuauugacgaaggccu

SEQ ID NO: 772489 - RNA, 24 nt, Human
ggcagaaggacaucaaggccccca

SEQ ID NO: 772490 - RNA, 21 nt, Human
gggaggcuaagaugggaggau

SEQ ID NO: 772491 - RNA, 19 nt, Human
gggcagcugagccucaaau

SEQ ID NO: 772492 - RNA, 20 nt, Human
gggguggcucaccacaccca

SEQ ID NO: 772493 - RNA, 24 nt, Human
gguaagaacaggauuaacuguaaa

SEQ ID NO: 772494 - RNA, 18 nt, Human
gucaaucuacaaaacuug

SEQ ID NO: 772495 - RNA, 19 nt, Human
gucaguauguucagugucu

SEQ ID NO: 772496 - RNA, 24 nt, Human
gucauaccacugcacuccagccug

SEQ ID NO: 772497 - RNA, 23 nt, Human
gugaagcacagcacccgagaagc

SEQ ID NO: 772498 - RNA, 18 nt, Human
gugauucccaaaacucaa

SEQ ID NO: 772499 - RNA, 19 nt, Human
gugcaucugucccuuuaca

SEQ ID NO: 772500 - RNA, 20 nt, Human
gugcugggcugcuccgggac

SEQ ID NO: 772501 - RNA, 24 nt, Human
gugucugaagaagacuagaaaugc

SEQ ID NO: 772502 - RNA, 18 nt, Human
guuuuaagaaaaggauuc

SEQ ID NO: 772503 - RNA, 21 nt, Human
uaaaacaaaggaaaaaaaccc

SEQ ID NO: 772504 - RNA, 23 nt, Human
uaaacuaacauugggaccagcca

SEQ ID NO: 772505 - RNA, 18 nt, Human
uaacaaggaaggcaauuu

SEQ ID NO: 772506 - RNA, 21 nt, Human
uaacaguuucaauaccucaau

SEQ ID NO: 772507 - RNA, 23 nt, Human
uaaccaagucuguguaggaaauu

SEQ ID NO: 772508 - RNA, 20 nt, Human
uaagaacaggauuaacugua

SEQ ID NO: 772509 - RNA, 21 nt, Human
uaagacacaacagauucaagg

SEQ ID NO: 772510 - RNA, 24 nt, Human
uaagacacaacagauucaaggaug

SEQ ID NO: 772511 - RNA, 19 nt, Human
uaagacaccaggaagacca

SEQ ID NO: 772512 - RNA, 21 nt, Human
uaagacaccaggaagaccaag

SEQ ID NO: 772513 - RNA, 19 nt, Human
uaaguaaaaaagccagacc

SEQ ID NO: 772514 - RNA, 18 nt, Human
uacacaccaaauuagagu

SEQ ID NO: 772515 - RNA, 22 nt, Human
uaccacugcacuccagccuggg

SEQ ID NO: 772516 - RNA, 23 nt, Human
uaccuguugucccagcuacucgg

SEQ ID NO: 772517 - RNA, 24 nt, Human
uaccuguugucccagcuacucggg

SEQ ID NO: 772518 - RNA, 25 nt, Human
uagcaaacucuaacuagccuguguu

SEQ ID NO: 772519 - RNA, 20 nt, Human
uagcaacaaaagaccccagc

SEQ ID NO: 772520 - RNA, 18 nt, Human
uagcugaaaagaucccag

SEQ ID NO: 772521 - RNA, 20 nt, Human
uaggaagguaagauugggga

SEQ ID NO: 772522 - RNA, 18 nt, Human
uaggggguuggccaguga

SEQ ID NO: 772523 - RNA, 25 nt, Human
uaucacuguucaaaaagucaacgag

SEQ ID NO: 772524 - RNA, 20 nt, Human
ucaaacuucuaguugccaau

SEQ ID NO: 772525 - RNA, 21 nt, Human
ucacauggggaaauguggaca

SEQ ID NO: 772526 - RNA, 23 nt, Human
ucaccucaccuccuuacuuccca

SEQ ID NO: 772527 - RNA, 20 nt, Human
ucagaaagaagccacuauua

SEQ ID NO: 772528 - RNA, 20 nt, Human
ucagagucacaguauuguga

SEQ ID NO: 772529 - RNA, 21 nt, Human
ucagcuccaccauuuugugca

SEQ ID NO: 772530 - RNA, 22 nt, Human
ucagcuuuccauacccuagucc

SEQ ID NO: 772531 - RNA, 23 nt, Human
ucagggcucuccaauuccucauc

SEQ ID NO: 772532 - RNA, 18 nt, Human
ucaguauguucagugucu

SEQ ID NO: 772533 - RNA, 21 nt, Human
ucauaaggagaauuucuucag

SEQ ID NO: 772534 - RNA, 23 nt, Human
ucauaccacugcacuccagccug

SEQ ID NO: 772535 - RNA, 18 nt, Human
uccacaagcuccacuccc

SEQ ID NO: 772536 - RNA, 23 nt, Human
uccagaaagggcaaauuuauaga

SEQ ID NO: 772537 - RNA, 24 nt, Human
uccagaaagggcaaauuuauagag

SEQ ID NO: 772538 - RNA, 23 nt, Human
uccagccugggugacagagugag

SEQ ID NO: 772539 - RNA, 24 nt, Human
uccagccugggugacagagugaga

SEQ ID NO: 772540 - RNA, 30 nt, Human
uccaucaacagaauucuacucagcaauaaa

SEQ ID NO: 772541 - RNA, 21 nt, Human
uccaugcuaaacuggcaggaa

SEQ ID NO: 772542 - RNA, 25 nt, Human
ucccauccaacucaauagauuccac

SEQ ID NO: 772543 - RNA, 25 nt, Human
uccccuauaaguccuacguucggag

SEQ ID NO: 772544 - RNA, 24 nt, Human
uccccugggacuggggaaggugaa

SEQ ID NO: 772545 - RNA, 18 nt, Human
uccccugucccugucacc

SEQ ID NO: 772546 - RNA, 23 nt, Human
ucccugccucccaaaccauccuu

SEQ ID NO: 772547 - RNA, 18 nt, Human
ucccugggagaauggccu

SEQ ID NO: 772548 - RNA, 20 nt, Human
ucccugggagaauggccugg

SEQ ID NO: 772549 - RNA, 21 nt, Human
ucccuggguuggcuuccugcu

SEQ ID NO: 772550 - RNA, 19 nt, Human
uccuggguuccugaugguu

SEQ ID NO: 772551 - RNA, 20 nt, Human
uccuggguuccugaugguuc

SEQ ID NO: 772552 - RNA, 21 nt, Human
ucgaaagagcuauuuaaaaaa

SEQ ID NO: 772553 - RNA, 25 nt, Human
ucggaauucugagcuuggacaggcu

SEQ ID NO: 772554 - RNA, 19 nt, Human
ucggccuuuaguaccaaaa

SEQ ID NO: 772555 - RNA, 20 nt, Human
ucuccaauuccucauccccu

SEQ ID NO: 772556 - RNA, 20 nt, Human
ucuccaggugcucacugucc

SEQ ID NO: 772557 - RNA, 22 nt, Human
ucuccuguccccugggacuggg

SEQ ID NO: 772558 - RNA, 21 nt, Human
ucugcaaucccaacgcauuuc

SEQ ID NO: 772559 - RNA, 22 nt, Human
ucugucccuuuacagauuucuc

SEQ ID NO: 772560 - RNA, 19 nt, Human
ugaagcacagcacccgaga

SEQ ID NO: 772561 - RNA, 23 nt, Human
ugacauccaaaacagaccagcac

SEQ ID NO: 772562 - RNA, 26 nt, Human
ugagaaaagucacugacagccagagg

SEQ ID NO: 772563 - RNA, 20 nt, Human
ugagaugggagaaucacuug

SEQ ID NO: 772564 - RNA, 21 nt, Human
ugagaugggagaaucacuuga

SEQ ID NO: 772565 - RNA, 22 nt, Human
ugagauucucaacagcugccau

SEQ ID NO: 772566 - RNA, 21 nt, Human
ugaguaauaguuacagcuaca

SEQ ID NO: 772567 - RNA, 19 nt, Human
ugcaaagcuggguaugugg

SEQ ID NO: 772568 - RNA, 21 nt, Human
ugcaauuuccuuaacucgaaa

SEQ ID NO: 772569 - RNA, 22 nt, Human
ugcagaggugcucugucuaccg

SEQ ID NO: 772570 - RNA, 21 nt, Human
ugcaggagaccccgggggugg

SEQ ID NO: 772571 - RNA, 22 nt, Human
ugcagggugcaaugagucacau

SEQ ID NO: 772572 - RNA, 18 nt, Human
ugccagcacagcaggccu

SEQ ID NO: 772573 - RNA, 22 nt, Human
ugccaucuacaucucuauacac

SEQ ID NO: 772574 - RNA, 18 nt, Human
ugccuaacaaaggcagca

SEQ ID NO: 772575 - RNA, 18 nt, Human
ugccucccaaaccauccu

SEQ ID NO: 772576 - RNA, 21 nt, Human
ugccucuaaaaaccagacuga

SEQ ID NO: 772577 - RNA, 21 nt, Human
ugccugacaccuuguagagau

SEQ ID NO: 772578 - RNA, 20 nt, Human
uggaugguuucacuuucuug

SEQ ID NO: 772579 - RNA, 18 nt, Human
uggcaaaaagaguuggac

SEQ ID NO: 772580 - RNA, 23 nt, Human
uggcagaucaacccuagugcucu

SEQ ID NO: 772581 - RNA, 21 nt, Human
uggccagugagggcaggugac

SEQ ID NO: 772582 - RNA, 22 nt, Human
uggcuugcugguucuucuucug

SEQ ID NO: 772583 - RNA, 21 nt, Human
ugggaauuaaugugucugucu

SEQ ID NO: 772584 - RNA, 19 nt, Human
ugggaggcugagaugggag

SEQ ID NO: 772585 - RNA, 24 nt, Human
ugggaggcugagaugggagaauca

SEQ ID NO: 772586 - RNA, 20 nt, Human
uggguuccugaugguucagg

SEQ ID NO: 772587 - RNA, 23 nt, Human
uggugcaucugucccuuuacaga

SEQ ID NO: 772588 - RNA, 24 nt, Human
ugguggugcguaccuguuguccca

SEQ ID NO: 772589 - RNA, 19 nt, Human
ugguucaggagccugggcu

SEQ ID NO: 772590 - RNA, 22 nt, Human
ugguuucacuuucuuguccacu

SEQ ID NO: 772591 - RNA, 18 nt, Human
ugucauauuagccuaaaa

SEQ ID NO: 772592 - RNA, 22 nt, Human
ugucauggacaaaccucaaaaa

SEQ ID NO: 772593 - RNA, 24 nt, Human
ugugaaacagggguaaguguccga

SEQ ID NO: 772594 - RNA, 22 nt, Human
uguguugugagugacaauugug

SEQ ID NO: 772595 - RNA, 18 nt, Human
uguugggccuccccucca

SEQ ID NO: 772596 - RNA, 20 nt, Human
uuagcuggccgugguggugc

SEQ ID NO: 772597 - RNA, 20 nt, Human
uuagcuggccgugguggugc

SEQ ID NO: 772598 - RNA, 23 nt, Human
uucacacaacuuuccucucuaac

SEQ ID NO: 772599 - RNA, 22 nt, Human
uuccaaccucugucccacagcc

SEQ ID NO: 772600 - RNA, 19 nt, Human
uuccacaagcuccacuccc

SEQ ID NO: 772601 - RNA, 20 nt, Human
uucgcaaacuaaugacgucc

SEQ ID NO: 772602 - RNA, 21 nt, Human
uugaaagcugagauucccugu

SEQ ID NO: 772603 - RNA, 18 nt, Human
uugacgaaggccugcccc

SEQ ID NO: 772604 - RNA, 26 nt, Human
uuggcagccucuucacacaacuuucc

SEQ ID NO: 772605 - RNA, 25 nt, Human
uugggaggcugagaugggagaauca

SEQ ID NO: 772606 - RNA, 21 nt, Human
uuucuuguccacucagacaca

SEQ ID NO: 772607 - RNA, 23 nt, Human
uuugugcauuacuauccccagau

SEQ ID NO: 772608 - RNA, 25 nt, Human
uuugugcauuacuauccccagauga

SEQ ID NO: 772609 - RNA, 24 nt, Human
uuuuaugaaaauuauuuucuucag

SEQ ID NO: 772610 - RNA, 25 nt, Human
uuuucuuagucagcuuauuuuguuu

SEQ ID NO: 772611 - RNA, 23 nt, Human
uuuuucuuuugaaauaaagaugg

SEQ ID NO: 772612 - RNA, 23 nt, Human
uuuuugucauauuagccuaaaau

SEQ ID NO: 772613 - RNA, 18 nt, Human
aaaaaaaaaaaaucccug

SEQ ID NO: 772614 - RNA, 21 nt, Human
aaaaguaaacaccccaaaucc

SEQ ID NO: 772615 - RNA, 20 nt, Human
aaaaugccacagagcaugga

SEQ ID NO: 772616 - RNA, 28 nt, Human
aaacaaacacaaaauacuugugggagau

SEQ ID NO: 772617 - RNA, 20 nt, Human
aaacaaauaugagaacugga

SEQ ID NO: 772618 - RNA, 21 nt, Human
aaacaccccaaauccuccaaa

SEQ ID NO: 772619 - RNA, 19 nt, Human
aaacaguuuucauuuuggg

SEQ ID NO: 772620 - RNA, 23 nt, Human
aaagaagaaauggaaaccaaagg

SEQ ID NO: 772621 - RNA, 18 nt, Human
aaagugccccccgagggg

SEQ ID NO: 772622 - RNA, 22 nt, Human
aacaacacuugguagcagccuu

SEQ ID NO: 772623 - RNA, 22 nt, Human
aacaccccaaauccuccaaaaa

SEQ ID NO: 772624 - RNA, 24 nt, Human
aacagauucaaggaaugucaaaaa

SEQ ID NO: 772625 - RNA, 23 nt, Human
aagaaaacugggggcaaaacagg

SEQ ID NO: 772626 - RNA, 21 nt, Human
aagaagaaauggaaaccaaag

SEQ ID NO: 772627 - RNA, 22 nt, Human
aagaucuuuccacucaaggcac

SEQ ID NO: 772628 - RNA, 19 nt, Human
aagcagcagguagauaugg

SEQ ID NO: 772629 - RNA, 25 nt, Human
aagccaugaaacaugaauccaaaau

SEQ ID NO: 772630 - RNA, 24 nt, Human
aaggcgcagcgcggggcaugcagg

SEQ ID NO: 772631 - RNA, 23 nt, Human
aaggggggcggggggcagacggc

SEQ ID NO: 772632 - RNA, 19 nt, Human
aagugccccccgaggggcc

SEQ ID NO: 772633 - RNA, 22 nt, Human
acaaacaugugccacgucacca

SEQ ID NO: 772634 - RNA, 18 nt, Human
acaaaugaucuccaccau

SEQ ID NO: 772635 - RNA, 25 nt, Human
acaagccaugaaacaugaauccaaa

SEQ ID NO: 772636 - RNA, 23 nt, Human
acacaacaaagacccucugucau

SEQ ID NO: 772637 - RNA, 25 nt, Human
acagagaagaaaaaaagagaagggg

SEQ ID NO: 772638 - RNA, 21 nt, Human
acagcagaacacacccuccac

SEQ ID NO: 772639 - RNA, 21 nt, Human
acagucacaagccaugaaaca

SEQ ID NO: 772640 - RNA, 26 nt, Human
accacugccauaaaagaauagaaaca

SEQ ID NO: 772641 - RNA, 21 nt, Human
acuaagaucuuuccacucaag

SEQ ID NO: 772642 - RNA, 21 nt, Human
acuacagcacauuuacagccu

SEQ ID NO: 772643 - RNA, 18 nt, Human
acuaggaaaucaaaaggu

SEQ ID NO: 772644 - RNA, 20 nt, Human
acuccaucugacaaaagcca

SEQ ID NO: 772645 - RNA, 21 nt, Human
acugcugacacuggcuacagg

SEQ ID NO: 772646 - RNA, 20 nt, Human
acugugccugcugcugcugc

SEQ ID NO: 772647 - RNA, 19 nt, Human
acuuggccauuccucccag

SEQ ID NO: 772648 - RNA, 21 nt, Human
agaacacacccuccaccucuc

SEQ ID NO: 772649 - RNA, 21 nt, Human
agaacucugauccuuacacuu

SEQ ID NO: 772650 - RNA, 20 nt, Human
agaagaaauggaaaccaaag

SEQ ID NO: 772651 - RNA, 24 nt, Human
agaaggggggcggggggcagacgg

SEQ ID NO: 772652 - RNA, 19 nt, Human
agacaacagaggaacuacu

SEQ ID NO: 772653 - RNA, 19 nt, Human
agacaaccauaaagacuug

SEQ ID NO: 772654 - RNA, 22 nt, Human
agacugcaucacuuggaacuca

SEQ ID NO: 772655 - RNA, 20 nt, Human
agagaaggggggcggggggc

SEQ ID NO: 772656 - RNA, 20 nt, Human
agaggugggcuaugguguga

SEQ ID NO: 772657 - RNA, 20 nt, Human
agaggugggcuauggugugc

SEQ ID NO: 772658 - RNA, 24 nt, Human
agauaagcuggcagcuugacaggc

SEQ ID NO: 772659 - RNA, 24 nt, Human
agcaggaaagccuuucauuaaagu

SEQ ID NO: 772660 - RNA, 22 nt, Human
agcucucuagcaugcugggggg

SEQ ID NO: 772661 - RNA, 24 nt, Human
aggaaagcaaauaaaugaaagacg

SEQ ID NO: 772662 - RNA, 22 nt, Human
aggaauaaggcuuugguuauca

SEQ ID NO: 772663 - RNA, 18 nt, Human
aggaggggcuccaggccu

SEQ ID NO: 772664 - RNA, 18 nt, Human
aggaggguggucacagcu

SEQ ID NO: 772665 - RNA, 22 nt, Human
aggcaucccagcuuucuucccc

SEQ ID NO: 772666 - RNA, 23 nt, Human
aggccaacacuugcacaaacacc

SEQ ID NO: 772667 - RNA, 18 nt, Human
aggucccuuccccgcccu

SEQ ID NO: 772668 - RNA, 22 nt, Human
auaaauaugacauauauacccc

SEQ ID NO: 772669 - RNA, 22 nt, Human
auaugucguauauacauauaua

SEQ ID NO: 772670 - RNA, 23 nt, Human
aucacuuuuaggaucagcuucgu

SEQ ID NO: 772671 - RNA, 22 nt, Human
augaaagacgguggggacacag

SEQ ID NO: 772672 - RNA, 24 nt, Human
augcauaaccacagcagaacacac

SEQ ID NO: 772673 - RNA, 22 nt, Human
augcugccugggcugugugggc

SEQ ID NO: 772674 - RNA, 24 nt, Human
auggaauacuguggaaaauaacug

SEQ ID NO: 772675 - RNA, 23 nt, Human
caaaacacacaaaauagaucccc

SEQ ID NO: 772676 - RNA, 18 nt, Human
caaaaccaaagucugcuc

SEQ ID NO: 772677 - RNA, 22 nt, Human
caaaauagauccccuuuacuaa

SEQ ID NO: 772678 - RNA, 23 nt, Human
caaaaugccacagagcauggacg

SEQ ID NO: 772679 - RNA, 22 nt, Human
caaaaugguccccagaugagcc

SEQ ID NO: 772680 - RNA, 20 nt, Human
caacacuugcacaaacaccu

SEQ ID NO: 772681 - RNA, 18 nt, Human
caacagaggaacuacugg

SEQ ID NO: 772682 - RNA, 20 nt, Human
cacaagccaugaaacaugaa

SEQ ID NO: 772683 - RNA, 19 nt, Human
cacaccccucgagacaacc

SEQ ID NO: 772684 - RNA, 22 nt, Human
caccaccaucucccuguggcug

SEQ ID NO: 772685 - RNA, 22 nt, Human
cacccggcgagcucgcggagcc

SEQ ID NO: 772686 - RNA, 19 nt, Human
caccgcgcgcuccaggagc

SEQ ID NO: 772687 - RNA, 29 nt, Human
cacugccauaaaagaauagaaacagagag

SEQ ID NO: 772688 - RNA, 23 nt, Human
cacugugccugcugcugcugcuc

SEQ ID NO: 772689 - RNA, 24 nt, Human
cagaaaaaaaacaaagaaaacugg

SEQ ID NO: 772690 - RNA, 21 nt, Human
cagaugagccauggugaacca

SEQ ID NO: 772691 - RNA, 25 nt, Human
cagcagagaagcagcagguagauau

SEQ ID NO: 772692 - RNA, 18 nt, Human
cagcaggaagaagacuag

SEQ ID NO: 772693 - RNA, 24 nt, Human
cagcaggucccuuccccgcccccu

SEQ ID NO: 772694 - RNA, 18 nt, Human
caggaaacaaacacaaaa

SEQ ID NO: 772695 - RNA, 25 nt, Human
caggagcgcccaggcggcugcagcu

SEQ ID NO: 772696 - RNA, 19 nt, Human
caguagaaaacuacagcac

SEQ ID NO: 772697 - RNA, 24 nt, Human
cauaaaagaauagaaacagagaag

SEQ ID NO: 772698 - RNA, 24 nt, Human
cauagagggaccuugaggagcugg

SEQ ID NO: 772699 - RNA, 18 nt, Human
cauucacuguacuagggu

SEQ ID NO: 772700 - RNA, 19 nt, Human
ccaaagacggcagcucagg

SEQ ID NO: 772701 - RNA, 22 nt, Human
ccaaagucugcucagagaggug

SEQ ID NO: 772702 - RNA, 20 nt, Human
ccaacacuugcacaaacacc

SEQ ID NO: 772703 - RNA, 19 nt, Human
ccacacugcugucacaugc

SEQ ID NO: 772704 - RNA, 22 nt, Human
ccagaagcacuaacuuacugaa

SEQ ID NO: 772705 - RNA, 20 nt, Human
ccagcaaagagauuuagagc

SEQ ID NO: 772706 - RNA, 18 nt, Human
ccaggcggcugcagcugc

SEQ ID NO: 772707 - RNA, 19 nt, Human
cccaaagacggcagcucag

SEQ ID NO: 772708 - RNA, 21 nt, Human
ccccccgcuacacuuccgcaa

SEQ ID NO: 772709 - RNA, 20 nt, Human
cccccugcgcucggcuccgg

SEQ ID NO: 772710 - RNA, 21 nt, Human
ccccugaacacaaacuugacu

SEQ ID NO: 772711 - RNA, 23 nt, Human
cccugggucuccagaaaaaaaac

SEQ ID NO: 772712 - RNA, 21 nt, Human
ccgcgcgcuccaggagcgccc

SEQ ID NO: 772713 - RNA, 19 nt, Human
ccgcggcugcugccacggc

SEQ ID NO: 772714 - RNA, 23 nt, Human
ccgcgguggccgccgccuccccc

SEQ ID NO: 772715 - RNA, 23 nt, Human
ccucaagaacagcagauagguau

SEQ ID NO: 772716 - RNA, 23 nt, Human
ccucacuccaccacugccauaaa

SEQ ID NO: 772717 - RNA, 23 nt, Human
ccucccaauccccugggccauuu

SEQ ID NO: 772718 - RNA, 22 nt, Human
ccucccauccccugaacacaaa

SEQ ID NO: 772719 - RNA, 20 nt, Human
ccucgagacaaccauaaaga

SEQ ID NO: 772720 - RNA, 21 nt, Human
ccugaaaauggcugccccagc

SEQ ID NO: 772721 - RNA, 22 nt, Human
ccuggaagugaaugaauacuga

SEQ ID NO: 772722 - RNA, 25 nt, Human
ccuuugaaaaaucccaguguacaaa

SEQ ID NO: 772723 - RNA, 20 nt, Human
cgaaagagcaguccucugca

SEQ ID NO: 772724 - RNA, 19 nt, Human
cgcaacggagcugcaugga

SEQ ID NO: 772725 - RNA, 21 nt, Human
cgcgcgcggcucccagagccu

SEQ ID NO: 772726 - RNA, 23 nt, Human
cggcaaucccugaaauaaaccuc

SEQ ID NO: 772727 - RNA, 18 nt, Human
cguauauacauauauaua

SEQ ID NO: 772728 - RNA, 20 nt, Human
cuccaaaauggaauacugug

SEQ ID NO: 772729 - RNA, 18 nt, Human
cuccaagugucccagaag

SEQ ID NO: 772730 - RNA, 22 nt, Human
cuccagaaaaaaaacaaagaaa

SEQ ID NO: 772731 - RNA, 23 nt, Human
cugaaaauagaaucucaucaaag

SEQ ID NO: 772732 - RNA, 19 nt, Human
cugcaaccuuucucugcaa

SEQ ID NO: 772733 - RNA, 18 nt, Human
cugcagcaggucccuucc

SEQ ID NO: 772734 - RNA, 18 nt, Human
cugugugggcuggaggag

SEQ ID NO: 772735 - RNA, 19 nt, Human
cuugcccaccaccaucucc

SEQ ID NO: 772736 - RNA, 20 nt, Human
cuugcccaccaccaucuccc

SEQ ID NO: 772737 - RNA, 18 nt, Human
cuuugcguagacaaugac

SEQ ID NO: 772738 - RNA, 23 nt, Human
cuuuuggccaugaacuccccgcu

SEQ ID NO: 772739 - RNA, 24 nt, Human
gaaaauccagacucucacagagaa

SEQ ID NO: 772740 - RNA, 18 nt, Human
gaaacaaacacaaaauac

SEQ ID NO: 772741 - RNA, 18 nt, Human
gaaccauagagggaccuu

SEQ ID NO: 772742 - RNA, 20 nt, Human
gaagaaaaaaagagaagggg

SEQ ID NO: 772743 - RNA, 25 nt, Human
gaagacaacuccugacaaggccgaa

SEQ ID NO: 772744 - RNA, 20 nt, Human
gaagucccauucuucccagg

SEQ ID NO: 772745 - RNA, 20 nt, Human
gacaacuccagaaaugcagg

SEQ ID NO: 772746 - RNA, 24 nt, Human
gacacaggaaggaucccaaagacg

SEQ ID NO: 772747 - RNA, 18 nt, Human
gacacgguuacuguuuua

SEQ ID NO: 772748 - RNA, 18 nt, Human
gacagucacaagccauga

SEQ ID NO: 772749 - RNA, 22 nt, Human
gaccacacugcugucacaugcc

SEQ ID NO: 772750 - RNA, 21 nt, Human
gagacaaccauaaagacuuga

SEQ ID NO: 772751 - RNA, 19 nt, Human
gagcaguccucugcagacc

SEQ ID NO: 772752 - RNA, 21 nt, Human
gaggcccaggaaagcaaauaa

SEQ ID NO: 772753 - RNA, 20 nt, Human
gagguuaaguuguucaagaa

SEQ ID NO: 772754 - RNA, 19 nt, Human
gcaaggcgcagcgcggggc

SEQ ID NO: 772755 - RNA, 21 nt, Human
gcaugcacugugccugcugcu

SEQ ID NO: 772756 - RNA, 20 nt, Human
gccgcggcugcugccacggc

SEQ ID NO: 772757 - RNA, 18 nt, Human
gccgcgguggccgccgcc

SEQ ID NO: 772758 - RNA, 23 nt, Human
gccucacuccaccacugccauaa

SEQ ID NO: 772759 - RNA, 20 nt, Human
gcgcagcgcggggcaugcag

SEQ ID NO: 772760 - RNA, 22 nt, Human
gcgcgcuccaggagcgcccagg

SEQ ID NO: 772761 - RNA, 23 nt, Human
gcgcggcucccagagccuagugc

SEQ ID NO: 772762 - RNA, 23 nt, Human
gcgcugaacugagcccacccggc

SEQ ID NO: 772763 - RNA, 18 nt, Human
gcggagcugcugggucgc

SEQ ID NO: 772764 - RNA, 22 nt, Human
gcggcucccagagccuagugcu

SEQ ID NO: 772765 - RNA, 24 nt, Human
ggcuauggugugcaggcugcaacc

SEQ ID NO: 772766 - RNA, 18 nt, Human
gguaaaaaaauaaggcca

SEQ ID NO: 772767 - RNA, 21 nt, Human
ggucaucuugaagcauagucu

SEQ ID NO: 772768 - RNA, 24 nt, Human
guagauauggcaugcacugugccu

SEQ ID NO: 772769 - RNA, 23 nt, Human
gugccugcugcugcugcucuugu

SEQ ID NO: 772770 - RNA, 18 nt, Human
guguuuugcucuuguuga

SEQ ID NO: 772771 - RNA, 27 nt, Human
guuaaguuguucaagaauuuaaaaagu

SEQ ID NO: 772772 - RNA, 21 nt, Human
guugauuggcaggugaggaag

SEQ ID NO: 772773 - RNA, 19 nt, Human
uaaaaaaauaaggccaaaa

SEQ ID NO: 772774 - RNA, 18 nt, Human
uaaaaaguaaacacccca

SEQ ID NO: 772775 - RNA, 24 nt, Human
uaaaaaguaaacaccccaaauccu

SEQ ID NO: 772776 - RNA, 19 nt, Human
uaaaguagccacacacccc

SEQ ID NO: 772777 - RNA, 27 nt, Human
uaaaguagccacacaccccucgagacc

SEQ ID NO: 772778 - RNA, 21 nt, Human
uaagaucuuuccacucaaggg

SEQ ID NO: 772779 - RNA, 23 nt, Human
uagaaaacuacagcacauuuaca

SEQ ID NO: 772780 - RNA, 25 nt, Human
uagcaugcugggggggucacgucag

SEQ ID NO: 772781 - RNA, 24 nt, Human
uagccacacaccccucgagacaac

SEQ ID NO: 772782 - RNA, 22 nt, Human
uauuaaacaagacuuccucuga

SEQ ID NO: 772783 - RNA, 24 nt, Human
ucaaagcuuaacauauucacucug

SEQ ID NO: 772784 - RNA, 20 nt, Human
ucaaaguugucaaaauggug

SEQ ID NO: 772785 - RNA, 18 nt, Human
ucacucugaaaacagcgg

SEQ ID NO: 772786 - RNA, 24 nt, Human
ucagaaaaguagaggacacagguu

SEQ ID NO: 772787 - RNA, 18 nt, Human
ucagacucugccacgaag

SEQ ID NO: 772788 - RNA, 19 nt, Human
ucagagaggugggcuaugg

SEQ ID NO: 772789 - RNA, 22 nt, Human
ucauuuugggguuacaaaaaag

SEQ ID NO: 772790 - RNA, 18 nt, Human
uccaagugucccagaagc

SEQ ID NO: 772791 - RNA, 23 nt, Human
uccacagaaacacucaguuucau

SEQ ID NO: 772792 - RNA, 21 nt, Human
ucccagagccuagugcugcag

SEQ ID NO: 772793 - RNA, 25 nt, Human
ucccaggccaacacuugcacaaaca

SEQ ID NO: 772794 - RNA, 23 nt, Human
uccccgcccccugcgcucggcuc

SEQ ID NO: 772795 - RNA, 20 nt, Human
ucccugggucuccagaaaaa

SEQ ID NO: 772796 - RNA, 23 nt, Human
uccgcaacggagcugcauggagc

SEQ ID NO: 772797 - RNA, 25 nt, Human
uccucacauaaaauucugugcugug

SEQ ID NO: 772798 - RNA, 18 nt, Human
uccucuccucugggaaga

SEQ ID NO: 772799 - RNA, 20 nt, Human
ucuacacccaaauucuuacu

SEQ ID NO: 772800 - RNA, 25 nt, Human
ucugagugccagggcagaacaggga

SEQ ID NO: 772801 - RNA, 19 nt, Human
ucuuacucugguggcuuga

SEQ ID NO: 772802 - RNA, 20 nt, Human
ugaaaacagcggagcugcug

SEQ ID NO: 772803 - RNA, 21 nt, Human
ugaaaauagaaucucaucaaa

SEQ ID NO: 772804 - RNA, 22 nt, Human
ugaaaauggcugccccagcuac

SEQ ID NO: 772805 - RNA, 22 nt, Human
ugacaggcugaagaguccucug

SEQ ID NO: 772806 - RNA, 24 nt, Human
ugacaucuacacccaaauucuuac

SEQ ID NO: 772807 - RNA, 18 nt, Human
ugacuucacaaagccuca

SEQ ID NO: 772808 - RNA, 24 nt, Human
ugagaacacaguaagaggagggug

SEQ ID NO: 772809 - RNA, 20 nt, Human
ugaguacuuggccuggcccg

SEQ ID NO: 772810 - RNA, 20 nt, Human
ugaucuccaccaugggccuc

SEQ ID NO: 772811 - RNA, 18 nt, Human
ugcacaaagaugaugggg

SEQ ID NO: 772812 - RNA, 26 nt, Human
ugcacugugccugcugcugcugcucu

SEQ ID NO: 772813 - RNA, 22 nt, Human
ugcagaugaagacaacuccuga

SEQ ID NO: 772814 - RNA, 19 nt, Human
ugcauaaccacagcagaac

SEQ ID NO: 772815 - RNA, 20 nt, Human
ugccagggcagaacagggag

SEQ ID NO: 772816 - RNA, 22 nt, Human
ugccauaaaagaauagaaacag

SEQ ID NO: 772817 - RNA, 21 nt, Human
ugccugggcugugugggcugg

SEQ ID NO: 772818 - RNA, 20 nt, Human
ugcugggggggucacgucag

SEQ ID NO: 772819 - RNA, 18 nt, Human
uggaaccauagagggacc

SEQ ID NO: 772820 - RNA, 22 nt, Human
uggaaggaaaaccagugaccac

SEQ ID NO: 772821 - RNA, 23 nt, Human
uggaaggggaauaaaaaacagau

SEQ ID NO: 772822 - RNA, 22 nt, Human
uggagugggcuuggggacaguc

SEQ ID NO: 772823 - RNA, 23 nt, Human
uggcaauaccucaguagcucagc

SEQ ID NO: 772824 - RNA, 24 nt, Human
ugggcgccgggcgcacggcgaguc

SEQ ID NO: 772825 - RNA, 19 nt, Human
ugggcugggaagagacugc

SEQ ID NO: 772826 - RNA, 18 nt, Human
uggggagagcagaacugc

SEQ ID NO: 772827 - RNA, 19 nt, Human
uggggagagcagaacugcu

SEQ ID NO: 772828 - RNA, 26 nt, Human
uguacaaacaugugccacgucaccac

SEQ ID NO: 772829 - RNA, 21 nt, Human
ugucaaaaugguggcaauacc

SEQ ID NO: 772830 - RNA, 24 nt, Human
ugucccuaauguuuucauacuagu

SEQ ID NO: 772831 - RNA, 20 nt, Human
ugugccugcugcugcugcuc

SEQ ID NO: 772832 - RNA, 21 nt, Human
ugugugggcuggaggaggugg

SEQ ID NO: 772833 - RNA, 26 nt, Human
ugugugggcuggaggagguggggaca

SEQ ID NO: 772834 - RNA, 18 nt, Human
uuaucaucuagcaaaaug

SEQ ID NO: 772835 - RNA, 24 nt, Human
uucaaaacacacaaaauagauccc

SEQ ID NO: 772836 - RNA, 21 nt, Human
uucaaauucuuuuauuaaagu

SEQ ID NO: 772837 - RNA, 21 nt, Human
uuccuacuuuugauuucuuca

SEQ ID NO: 772838 - RNA, 22 nt, Human
uuuauagucuuccucccauccc

SEQ ID NO: 772839 - RNA, 24 nt, Human
uuuggagugggcuuggggacaguc

SEQ ID NO: 772840 - RNA, 21 nt, Human
uuuuccacaaacuucucucca

SEQ ID NO: 772841 - RNA, 19 nt, Human
uuuugcucuuguugaguug

SEQ ID NO: 772842 - RNA, 19 nt, Human
aaagugcugggguuacagg

SEQ ID NO: 772843 - RNA, 24 nt, Human
aaagugcugggguuacaggcguga

SEQ ID NO: 772844 - RNA, 21 nt, Human
aaccuaccaggaagaccaggg

SEQ ID NO: 772845 - RNA, 19 nt, Human
aagacagggaccggaacug

SEQ ID NO: 772846 - RNA, 20 nt, Human
aagcagcugggacuacaggu

SEQ ID NO: 772847 - RNA, 26 nt, Human
aagcagcugggacuacaggugcaugc

SEQ ID NO: 772848 - RNA, 25 nt, Human
aagugauucuccugccucagccucc

SEQ ID NO: 772849 - RNA, 19 nt, Human
aagugcugggguuacaggc

SEQ ID NO: 772850 - RNA, 26 nt, Human
aagugcugggguuacaggcgugagcc

SEQ ID NO: 772851 - RNA, 21 nt, Human
acaaaaccuaccaggaagacc

SEQ ID NO: 772852 - RNA, 18 nt, Human
acacaguagcaaaauaug

SEQ ID NO: 772853 - RNA, 18 nt, Human
accagccugugucugcag

SEQ ID NO: 772854 - RNA, 19 nt, Human
accagccugugucugcagc

SEQ ID NO: 772855 - RNA, 22 nt, Human
accuccaccucucggguucaag

SEQ ID NO: 772856 - RNA, 19 nt, Human
acuacaggugcaugccagu

SEQ ID NO: 772857 - RNA, 19 nt, Human
acuacccacagacacugau

SEQ ID NO: 772858 - RNA, 25 nt, Human
acucugucgccaggcuggagugcaa

SEQ ID NO: 772859 - RNA, 21 nt, Human
agaccccuacccuccggucaa

SEQ ID NO: 772860 - RNA, 24 nt, Human
agagggaaggaaggcugagaaugg

SEQ ID NO: 772861 - RNA, 21 nt, Human
agccugugucugcagcccugg

SEQ ID NO: 772862 - RNA, 18 nt, Human
aggagcccuugcagcacc

SEQ ID NO: 772863 - RNA, 24 nt, Human
aggcccagaagacgccgacgcuca

SEQ ID NO: 772864 - RNA, 24 nt, Human
agugcaauggcacgaucuuggcuc

SEQ ID NO: 772865 - RNA, 19 nt, Human
auccacacaguagcaaaau

SEQ ID NO: 772866 - RNA, 18 nt, Human
augggguuucaccauguu

SEQ ID NO: 772867 - RNA, 22 nt, Human
augggguuucaccauguuggcc

SEQ ID NO: 772868 - RNA, 23 nt, Human
augggguuucaccauguuggcca

SEQ ID NO: 772869 - RNA, 24 nt, Human
augggguuucaccauguuggccag

SEQ ID NO: 772870 - RNA, 18 nt, Human
auucuccugccucagccu

SEQ ID NO: 772871 - RNA, 24 nt, Human
caaagugcugggguuacaggcgug

SEQ ID NO: 772872 - RNA, 21 nt, Human
caaccuccaccucucggguuc

SEQ ID NO: 772873 - RNA, 18 nt, Human
caagaaacuccacaggcc

SEQ ID NO: 772874 - RNA, 24 nt, Human
caagucaaaauaagacacaggcag

SEQ ID NO: 772875 - RNA, 22 nt, Human
caagugauucuccugccucagc

SEQ ID NO: 772876 - RNA, 23 nt, Human
caauaaaaauaaauggauccaca

SEQ ID NO: 772877 - RNA, 18 nt, Human
caccauguuggccaggau

SEQ ID NO: 772878 - RNA, 22 nt, Human
caccauguuggccaggaugguc

SEQ ID NO: 772879 - RNA, 24 nt, Human
caccauguuggccaggauggucuc

SEQ ID NO: 772880 - RNA, 23 nt, Human
cacucugucgccaggcuggagug

SEQ ID NO: 772881 - RNA, 21 nt, Human
cacugggggauggaagaacuc

SEQ ID NO: 772882 - RNA, 20 nt, Human
cagaagacgccgacgcucac

SEQ ID NO: 772883 - RNA, 23 nt, Human
cagccucccaagcagcugggacu

SEQ ID NO: 772884 - RNA, 21 nt, Human
cagcugggacuacaggugcau

SEQ ID NO: 772885 - RNA, 22 nt, Human
caggagcccuugcagcaccagc

SEQ ID NO: 772886 - RNA, 22 nt, Human
caggauggucuccaucucuuga

SEQ ID NO: 772887 - RNA, 18 nt, Human
caggcccagaagacgccg

SEQ ID NO: 772888 - RNA, 19 nt, Human
caggcccagaagacgccga

SEQ ID NO: 772889 - RNA, 24 nt, Human
caugccaguacgcccagcuaauuu

SEQ ID NO: 772890 - RNA, 22 nt, Human
ccaaagugcugggguuacaggc

SEQ ID NO: 772891 - RNA, 22 nt, Human
ccaaagugcugggguuacaggc

SEQ ID NO: 772892 - RNA, 24 nt, Human
ccaaagugcugggguuacaggcgu

SEQ ID NO: 772893 - RNA, 23 nt, Human
ccaagaaacuccacaggcccaga

SEQ ID NO: 772894 - RNA, 23 nt, Human
ccacaauaaaaauaaauggaucc

SEQ ID NO: 772895 - RNA, 21 nt, Human
ccacaucaucucauuuuucaa

SEQ ID NO: 772896 - RNA, 22 nt, Human
cccaagcagcugggacuacagg

SEQ ID NO: 772897 - RNA, 21 nt, Human
ccccucaaaauggcagugcaa

SEQ ID NO: 772898 - RNA, 21 nt, Human
cccgcggccccuguccaagaa

SEQ ID NO: 772899 - RNA, 19 nt, Human
cccuggguccugagguacc

SEQ ID NO: 772900 - RNA, 22 nt, Human
cccuguccaagaaacuccacag

SEQ ID NO: 772901 - RNA, 24 nt, Human
ccucucggguucaagugauucucc

SEQ ID NO: 772902 - RNA, 22 nt, Human
ccugagguaccacugggggaug

SEQ ID NO: 772903 - RNA, 19 nt, Human
ccuggagccccgcggcccc

SEQ ID NO: 772904 - RNA, 22 nt, Human
cgaagcggacgcucacagaaac

SEQ ID NO: 772905 - RNA, 19 nt, Human
cggguucaagugauucucc

SEQ ID NO: 772906 - RNA, 21 nt, Human
cggguucaagugauucuccug

SEQ ID NO: 772907 - RNA, 18 nt, Human
cucacucugucgccaggc

SEQ ID NO: 772908 - RNA, 23 nt, Human
cucacucugucgccaggcuggag

SEQ ID NO: 772909 - RNA, 19 nt, Human
cuccaaggagagccccagc

SEQ ID NO: 772910 - RNA, 20 nt, Human
cucucggguucaagugauuc

SEQ ID NO: 772911 - RNA, 24 nt, Human
cucuugaccucgugacccgcccgc

SEQ ID NO: 772912 - RNA, 23 nt, Human
cugccucagccucccaagcagcu

SEQ ID NO: 772913 - RNA, 20 nt, Human
cugugucugcagcccugggu

SEQ ID NO: 772914 - RNA, 24 nt, Human
gacagagucucacucugucgccag

SEQ ID NO: 772915 - RNA, 22 nt, Human
gaccucgugacccgcccgccuc

SEQ ID NO: 772916 - RNA, 22 nt, Human
gacgaagcggacgcucacagaa

SEQ ID NO: 772917 - RNA, 21 nt, Human
gauucuccugccucagccucc

SEQ ID NO: 772918 - RNA, 19 nt, Human
gcagcugggacuacaggug

SEQ ID NO: 772919 - RNA, 23 nt, Human
gccaggauggucuccaucucuug

SEQ ID NO: 772920 - RNA, 24 nt, Human
gcccagcuaauuuuuuuguauuuu

SEQ ID NO: 772921 - RNA, 23 nt, Human
gccucggccucccaaagugcugg

SEQ ID NO: 772922 - RNA, 19 nt, Human
gcuggagugcaauggcacg

SEQ ID NO: 772923 - RNA, 24 nt, Human
ggaaacguaaaagacagggaccgg

SEQ ID NO: 772924 - RNA, 19 nt, Human
ggacagaccccuacccucc

SEQ ID NO: 772925 - RNA, 19 nt, Human
ggaccggaacugaauggga

SEQ ID NO: 772926 - RNA, 18 nt, Human
gggggauggaagaacucc

SEQ ID NO: 772927 - RNA, 22 nt, Human
gggguuucaccauguuggccag

SEQ ID NO: 772928 - RNA, 22 nt, Human
ggguucaagugauucuccugcc

SEQ ID NO: 772929 - RNA, 22 nt, Human
ggguuucaccauguuggccagg

SEQ ID NO: 772930 - RNA, 18 nt, Human
gguuacaggcgugagcca

SEQ ID NO: 772931 - RNA, 22 nt, Human
gguuacaggcgugagccacugc

SEQ ID NO: 772932 - RNA, 19 nt, Human
gguucaagugauucuccug

SEQ ID NO: 772933 - RNA, 24 nt, Human
guacaaaaccuaccaggaagacca

SEQ ID NO: 772934 - RNA, 24 nt, Human
gugacccgcccgccucggccuccc

SEQ ID NO: 772935 - RNA, 24 nt, Human
gugauucuccugccucagccuccc

SEQ ID NO: 772936 - RNA, 23 nt, Human
uaaaagacagggaccggaacuga

SEQ ID NO: 772937 - RNA, 24 nt, Human
uaaauggauccacacaguagcaaa

SEQ ID NO: 772938 - RNA, 22 nt, Human
uaagacacaggcagccaguucg

SEQ ID NO: 772939 - RNA, 20 nt, Human
uacacuccacaauaaaaaua

SEQ ID NO: 772940 - RNA, 22 nt, Human
uacaggcgugagccacugcgcc

SEQ ID NO: 772941 - RNA, 22 nt, Human
uacaggcgugagccacugcgcc

SEQ ID NO: 772942 - RNA, 23 nt, Human
uacaggcgugagccacugcgccu

SEQ ID NO: 772943 - RNA, 26 nt, Human
uaccaggaagaccagggacagacccc

SEQ ID NO: 772944 - RNA, 23 nt, Human
uagcaaaauauguguacaaaacc

SEQ ID NO: 772945 - RNA, 24 nt, Human
uaguagacaugggguuucaccaug

SEQ ID NO: 772946 - RNA, 22 nt, Human
ucaaaauaagacacaggcagcc

SEQ ID NO: 772947 - RNA, 19 nt, Human
ucaagugauucuccugccu

SEQ ID NO: 772948 - RNA, 24 nt, Human
ucaccauguuggccaggauggucu

SEQ ID NO: 772949 - RNA, 23 nt, Human
ucacuucaaccuccaccucucgg

SEQ ID NO: 772950 - RNA, 24 nt, Human
ucacuucaaccuccaccucucggg

SEQ ID NO: 772951 - RNA, 20 nt, Human
ucagccucccaagcagcugg

SEQ ID NO: 772952 - RNA, 21 nt, Human
uccacaggcccagaagacgcc

SEQ ID NO: 772953 - RNA, 23 nt, Human
uccacaggcccagaagacgccga

SEQ ID NO: 772954 - RNA, 24 nt, Human
ucccaaagugcugggguuacaggc

SEQ ID NO: 772955 - RNA, 23 nt, Human
ucccaagcagcugggacuacagg

SEQ ID NO: 772956 - RNA, 18 nt, Human
ucggccucccaaagugcu

SEQ ID NO: 772957 - RNA, 23 nt, Human
ucggccucccaaagugcuggggu

SEQ ID NO: 772958 - RNA, 21 nt, Human
ucucacucugucgccaggcug

SEQ ID NO: 772959 - RNA, 23 nt, Human
ucucacucugucgccaggcugga

SEQ ID NO: 772960 - RNA, 23 nt, Human
ucuccugccucagccucccaagc

SEQ ID NO: 772961 - RNA, 21 nt, Human
ucucggguucaagugauucuc

SEQ ID NO: 772962 - RNA, 24 nt, Human
ucucggguucaagugauucuccug

SEQ ID NO: 772963 - RNA, 21 nt, Human
ucugucgccaggcuggagugc

SEQ ID NO: 772964 - RNA, 23 nt, Human
ucugucgccaggcuggagugcaa

SEQ ID NO: 772965 - RNA, 21 nt, Human
ugaagauuccaacuacccaca

SEQ ID NO: 772966 - RNA, 24 nt, Human
ugccucagccucccaagcagcugg

SEQ ID NO: 772967 - RNA, 20 nt, Human
uggaagaacuccaaggagag

SEQ ID NO: 772968 - RNA, 23 nt, Human
uggagugcaauggcacgaucuug

SEQ ID NO: 772969 - RNA, 24 nt, Human
uggagugcaauggcacgaucuugg

SEQ ID NO: 772970 - RNA, 22 nt, Human
uggccacaucaucucauuuuuc

SEQ ID NO: 772971 - RNA, 24 nt, Human
uggccaggauggucuccaucucuu

SEQ ID NO: 772972 - RNA, 22 nt, Human
ugggacagagucucacucuguc

SEQ ID NO: 772973 - RNA, 21 nt, Human
ugggacuacaggugcaugcca

SEQ ID NO: 772974 - RNA, 18 nt, Human
ugggguuacaggcgugag

SEQ ID NO: 772975 - RNA, 19 nt, Human
ugggguuacaggcgugagc

SEQ ID NO: 772976 - RNA, 22 nt, Human
ugggguuacaggcgugagccac

SEQ ID NO: 772977 - RNA, 22 nt, Human
ugggguuacaggcgugagccac

SEQ ID NO: 772978 - RNA, 24 nt, Human
ugggguuacaggcgugagccacug

SEQ ID NO: 772979 - RNA, 24 nt, Human
ugggguuucaccauguuggccagg

SEQ ID NO: 772980 - RNA, 23 nt, Human
uggguccugagguaccacugggg

SEQ ID NO: 772981 - RNA, 21 nt, Human
uggucuccaucucuugaccuc

SEQ ID NO: 772982 - RNA, 21 nt, Human
uguauuuuuaguagacauggg

SEQ ID NO: 772983 - RNA, 23 nt, Human
uguguacaaaaccuaccaggaag

SEQ ID NO: 772984 - RNA, 20 nt, Human
ugugucugcagcccuggguc

SEQ ID NO: 772985 - RNA, 20 nt, Human
uuacaggcgugagccacugc

SEQ ID NO: 772986 - RNA, 18 nt, Human
uuaguagacaugggguuu

SEQ ID NO: 772987 - RNA, 22 nt, Human
uuaguagacaugggguuucacc

SEQ ID NO: 772988 - RNA, 24 nt, Human
uuaguagacaugggguuucaccau

SEQ ID NO: 772989 - RNA, 21 nt, Human
uucaagugauucuccugccuc

SEQ ID NO: 772990 - RNA, 23 nt, Human
uucaagugauucuccugccucag

SEQ ID NO: 772991 - RNA, 24 nt, Human
uucaagugauucuccugccucagc

SEQ ID NO: 772992 - RNA, 21 nt, Human
uuguauacacuccacaauaaa

SEQ ID NO: 772993 - RNA, 23 nt, Human
uuguauuuuuaguagacaugggg

SEQ ID NO: 772994 - RNA, 19 nt, Human
uuucaccauguuggccagg

SEQ ID NO: 772995 - RNA, 20 nt, Human
uuucaccauguuggccagga

SEQ ID NO: 772996 - RNA, 24 nt, Human
uuuuuaguagacaugggguuucac

SEQ ID NO: 772997 - RNA, 22 nt, Human
uuuuuuguauuuuuaguagaca

SEQ ID NO: 772998 - RNA, 28 nt, Human
uuuuuuuuuuuugugggacagagucuca

SEQ ID NO: 772999 - RNA, 19 nt, Human
uuuuuuuuuuuuuuuuugu

SEQ ID NO: 773000 - RNA, 22 nt, Human
uuuuuuuuuuuuuuuuuguggg

SEQ ID NO: 773001 - RNA, 19 nt, Human
aaaaaauacaaaaagccag

SEQ ID NO: 773002 - RNA, 19 nt, Human
aaaaagccaggcauaguga

SEQ ID NO: 773003 - RNA, 24 nt, Human
aaaaugcagccagucucuuugcua

SEQ ID NO: 773004 - RNA, 22 nt, Human
aaacaaggcaagucccuuccac

SEQ ID NO: 773005 - RNA, 19 nt, Human
aaacacacguucuaagugu

SEQ ID NO: 773006 - RNA, 24 nt, Human
aacacuuugggaggccaagguggg

SEQ ID NO: 773007 - RNA, 21 nt, Human
aacagcggugccacaagcgag

SEQ ID NO: 773008 - RNA, 19 nt, Human
aacaugguaaaccccaucu

SEQ ID NO: 773009 - RNA, 20 nt, Human
aacaugguaaaccccaucuc

SEQ ID NO: 773010 - RNA, 18 nt, Human
aaccucugccuguuaccc

SEQ ID NO: 773011 - RNA, 20 nt, Human
aaccucugccuguuacccag

SEQ ID NO: 773012 - RNA, 24 nt, Human
aaccugggugacagagcaagacuc

SEQ ID NO: 773013 - RNA, 21 nt, Human
aagaaaaagagguuuaaugaa

SEQ ID NO: 773014 - RNA, 20 nt, Human
aagaccuuccccugucuggg

SEQ ID NO: 773015 - RNA, 24 nt, Human
aagcaaaaggggaaaccccuuauu

SEQ ID NO: 773016 - RNA, 24 nt, Human
aagcaaaaggggaaaccucuuaua

SEQ ID NO: 773017 - RNA, 19 nt, Human
aagcgaggcccgcagggcg

SEQ ID NO: 773018 - RNA, 24 nt, Human
aauagacgucgcgcuccugcuugc

SEQ ID NO: 773019 - RNA, 22 nt, Human
aaucaucucccucgaguucaaa

SEQ ID NO: 773020 - RNA, 21 nt, Human
acacagagucgcgauccacca

SEQ ID NO: 773021 - RNA, 23 nt, Human
acagagcaagacuccaucuaagg

SEQ ID NO: 773022 - RNA, 25 nt, Human
accccaucucuacuaaaaaauacaa

SEQ ID NO: 773023 - RNA, 21 nt, Human
accgccugggaggaggcuggc

SEQ ID NO: 773024 - RNA, 23 nt, Human
accugggugacagagcaagacuc

SEQ ID NO: 773025 - RNA, 20 nt, Human
acgaaguggcuaaaggcccc

SEQ ID NO: 773026 - RNA, 22 nt, Human
acuaaaaaauacaaaaagccag

SEQ ID NO: 773027 - RNA, 18 nt, Human
acugcacuccaaccuggg

SEQ ID NO: 773028 - RNA, 24 nt, Human
acugcacuccaaccugggugacag

SEQ ID NO: 773029 - RNA, 22 nt, Human
acugcauggccggcauaaaggc

SEQ ID NO: 773030 - RNA, 29 nt, Human
agaagcacagaccaccagaguaagaacag

SEQ ID NO: 773031 - RNA, 23 nt, Human
agacaagagagaaugagagccaa

SEQ ID NO: 773032 - RNA, 25 nt, Human
agacaagagagaaugagaggggacc

SEQ ID NO: 773033 - RNA, 20 nt, Human
agaggugggagguuccuggg

SEQ ID NO: 773034 - RNA, 20 nt, Human
agcagcugguuccagcacau

SEQ ID NO: 773035 - RNA, 26 nt, Human
agccaaacaccuccccagcuggacug

SEQ ID NO: 773036 - RNA, 23 nt, Human
agccaggcauagugaugcaugcc

SEQ ID NO: 773037 - RNA, 25 nt, Human
agcccagcaugcugacggugagcac

SEQ ID NO: 773038 - RNA, 20 nt, Human
agccuggauuucaugucccg

SEQ ID NO: 773039 - RNA, 23 nt, Human
agccuggccaacaugguaaaccc

SEQ ID NO: 773040 - RNA, 21 nt, Human
agccuguaaaaucaaaggcua

SEQ ID NO: 773041 - RNA, 23 nt, Human
aggaagucccaaacuuucccaca

SEQ ID NO: 773042 - RNA, 18 nt, Human
aggagggguugcagugag

SEQ ID NO: 773043 - RNA, 23 nt, Human
aggcaagagagaaugagaacuaa

SEQ ID NO: 773044 - RNA, 26 nt, Human
aggcaagagagaaugagaagggaccc

SEQ ID NO: 773045 - RNA, 24 nt, Human
aggcauagugaugcaugccuguaa

SEQ ID NO: 773046 - RNA, 21 nt, Human
aggccaaggugggugcaucac

SEQ ID NO: 773047 - RNA, 21 nt, Human
aggcggccacuuccagccagc

SEQ ID NO: 773048 - RNA, 22 nt, Human
agggguugcagugagcugauug

SEQ ID NO: 773049 - RNA, 18 nt, Human
agugagcgcaaccccagg

SEQ ID NO: 773050 - RNA, 24 nt, Human
agugaugcaugccuguaaucucag

SEQ ID NO: 773051 - RNA, 21 nt, Human
agugcaguguuaggagucucu

SEQ ID NO: 773052 - RNA, 23 nt, Human
agugcccccucccuaggccccac

SEQ ID NO: 773053 - RNA, 21 nt, Human
aucaaucaugccuucccaaca

SEQ ID NO: 773054 - RNA, 21 nt, Human
aucacuaggucaggaguuuga

SEQ ID NO: 773055 - RNA, 23 nt, Human
aucacucccuucuaggccacacc

SEQ ID NO: 773056 - RNA, 22 nt, Human
aucccaacacuuugggaggcca

SEQ ID NO: 773057 - RNA, 23 nt, Human
augaguuuuagguggggacacag

SEQ ID NO: 773058 - RNA, 19 nt, Human
augccuguaaucccaacac

SEQ ID NO: 773059 - RNA, 21 nt, Human
auuggugugagugugggggug

SEQ ID NO: 773060 - RNA, 24 nt, Human
auugugccacugcacuccaaccug

SEQ ID NO: 773061 - RNA, 22 nt, Human
caaaacgaaguggcuaaaggcc

SEQ ID NO: 773062 - RNA, 23 nt, Human
caaaaguccauacuccaaagucu

SEQ ID NO: 773063 - RNA, 24 nt, Human
caaaaguccauacuccaaagucuc

SEQ ID NO: 773064 - RNA, 18 nt, Human
caaaguuccacaaaucuc

SEQ ID NO: 773065 - RNA, 23 nt, Human
caaauggguuagugcaguguuag

SEQ ID NO: 773066 - RNA, 21 nt, Human
caacacuuugggaggccaagg

SEQ ID NO: 773067 - RNA, 24 nt, Human
caacacuuugggaggccaaggugg

SEQ ID NO: 773068 - RNA, 19 nt, Human
caacaugguaaaccccauc

SEQ ID NO: 773069 - RNA, 24 nt, Human
caaggugggugcaucacuagguca

SEQ ID NO: 773070 - RNA, 24 nt, Human
caagucccuuccaccuaugagccu

SEQ ID NO: 773071 - RNA, 22 nt, Human
cacaacacauggcaauuauggg

SEQ ID NO: 773072 - RNA, 26 nt, Human
cacacagagucgcgauccaccaggcg

SEQ ID NO: 773073 - RNA, 21 nt, Human
cacaccccaggcacaugugca

SEQ ID NO: 773074 - RNA, 23 nt, Human
cacagaccaccagaguaagaaca

SEQ ID NO: 773075 - RNA, 23 nt, Human
cacagccaaaccauaucauucuc

SEQ ID NO: 773076 - RNA, 25 nt, Human
cacaguucaggugagugcuggggac

SEQ ID NO: 773077 - RNA, 25 nt, Human
cacaguuccauguggcugggaggcc

SEQ ID NO: 773078 - RNA, 19 nt, Human
caccagaacaguauggcgg

SEQ ID NO: 773079 - RNA, 18 nt, Human
caccauaucggguaggau

SEQ ID NO: 773080 - RNA, 23 nt, Human
cacuccaaccugggugacagagc

SEQ ID NO: 773081 - RNA, 23 nt, Human
cacugcacuccaaccugggugac

SEQ ID NO: 773082 - RNA, 24 nt, Human
cacugcacuccaaccugggugaca

SEQ ID NO: 773083 - RNA, 24 nt, Human
cagacucagcugcaaagucagaaa

SEQ ID NO: 773084 - RNA, 23 nt, Human
cagcacccaagucaccucaugaa

SEQ ID NO: 773085 - RNA, 19 nt, Human
cagcagggcaguuaaaucu

SEQ ID NO: 773086 - RNA, 20 nt, Human
cagcagggcaguuaaaucuu

SEQ ID NO: 773087 - RNA, 22 nt, Human
cagcagggcaguuaaaucuuaa

SEQ ID NO: 773088 - RNA, 18 nt, Human
cagcggugccacaagcga

SEQ ID NO: 773089 - RNA, 20 nt, Human
caggaagagagcugaccuuu

SEQ ID NO: 773090 - RNA, 19 nt, Human
caucacuaggucaggaguu

SEQ ID NO: 773091 - RNA, 24 nt, Human
caucacuaggucaggaguuugaga

SEQ ID NO: 773092 - RNA, 21 nt, Human
caucaggcugcaaauuuucca

SEQ ID NO: 773093 - RNA, 20 nt, Human
caugccacuuuucuccagac

SEQ ID NO: 773094 - RNA, 20 nt, Human
caugccuguaaucccaacac

SEQ ID NO: 773095 - RNA, 20 nt, Human
cauggucuugggcagcucca

SEQ ID NO: 773096 - RNA, 20 nt, Human
ccaaaccauaucauucucuu

SEQ ID NO: 773097 - RNA, 20 nt, Human
ccacacagagucgcgaucca

SEQ ID NO: 773098 - RNA, 20 nt, Human
ccacugcacuccaaccuggg

SEQ ID NO: 773099 - RNA, 24 nt, Human
ccacugcacuccaaccugggugac

SEQ ID NO: 773100 - RNA, 21 nt, Human
ccaggcauagugaugcaugcc

SEQ ID NO: 773101 - RNA, 21 nt, Human
ccaguccuccuguucccuggg

SEQ ID NO: 773102 - RNA, 25 nt, Human
cccaauaaggaacugcgagguaccc

SEQ ID NO: 773103 - RNA, 18 nt, Human
cccagggcugagcccaug

SEQ ID NO: 773104 - RNA, 24 nt, Human
cccauggucuugggcagcuccacc

SEQ ID NO: 773105 - RNA, 20 nt, Human
ccccaaagucuuaacucauu

SEQ ID NO: 773106 - RNA, 23 nt, Human
ccccagcuggacugggaccaaau

SEQ ID NO: 773107 - RNA, 20 nt, Human
cccgccagcucaagcaacag

SEQ ID NO: 773108 - RNA, 21 nt, Human
cccgccagcucaagcaacagc

SEQ ID NO: 773109 - RNA, 20 nt, Human
cccuaggccccaccuucagc

SEQ ID NO: 773110 - RNA, 21 nt, Human
cccucgaguucaaaguuccac

SEQ ID NO: 773111 - RNA, 19 nt, Human
cccugcaagucuguuccca

SEQ ID NO: 773112 - RNA, 19 nt, Human
ccgccagcucaagcaacag

SEQ ID NO: 773113 - RNA, 19 nt, Human
ccuacgcgcaccuccgcca

SEQ ID NO: 773114 - RNA, 19 nt, Human
ccuaggccccaccuucagc

SEQ ID NO: 773115 - RNA, 20 nt, Human
ccucccacaauuaugggagc

SEQ ID NO: 773116 - RNA, 19 nt, Human
ccugcauggcccugcaagu

SEQ ID NO: 773117 - RNA, 23 nt, Human
ccuggccaacaugguaaacccca

SEQ ID NO: 773118 - RNA, 20 nt, Human
ccuguaaucccaacacuuug

SEQ ID NO: 773119 - RNA, 22 nt, Human
ccuguaaucccaacacuuuggg

SEQ ID NO: 773120 - RNA, 19 nt, Human
ccuguaaucucagcuacuc

SEQ ID NO: 773121 - RNA, 19 nt, Human
ccuguucccugggagggga

SEQ ID NO: 773122 - RNA, 21 nt, Human
ccuucagcagcugguuccagc

SEQ ID NO: 773123 - RNA, 20 nt, Human
ccuucuaggccacaccccag

SEQ ID NO: 773124 - RNA, 19 nt, Human
cgaaaagcucacccuugua

SEQ ID NO: 773125 - RNA, 23 nt, Human
cuaaaggccccaugcaagucuga

SEQ ID NO: 773126 - RNA, 19 nt, Human
cuacuaaaaaauacaaaaa

SEQ ID NO: 773127 - RNA, 23 nt, Human
cuacuaaaaaauacaaaaagcca

SEQ ID NO: 773128 - RNA, 21 nt, Human
cucacacacacacacgcacac

SEQ ID NO: 773129 - RNA, 24 nt, Human
cucaugccuguaaucccaacacuu

SEQ ID NO: 773130 - RNA, 28 nt, Human
cuccagcaccggggccacaagguacccc

SEQ ID NO: 773131 - RNA, 21 nt, Human
cuccaugcccccuuccuccag

SEQ ID NO: 773132 - RNA, 25 nt, Human
cucccuaggccccaccuucagcagc

SEQ ID NO: 773133 - RNA, 21 nt, Human
cuccggcugagguugcucuuc

SEQ ID NO: 773134 - RNA, 19 nt, Human
cuccugcuugccuggcucc

SEQ ID NO: 773135 - RNA, 22 nt, Human
cucuacuaaaaaauacaaaaag

SEQ ID NO: 773136 - RNA, 22 nt, Human
cucuggcuuccaccccagggaa

SEQ ID NO: 773137 - RNA, 22 nt, Human
cucugugcuaagcccaguccuc

SEQ ID NO: 773138 - RNA, 21 nt, Human
cugcaaagucagaaaaaacuc

SEQ ID NO: 773139 - RNA, 19 nt, Human
cugcagggggcuugaauuu

SEQ ID NO: 773140 - RNA, 18 nt, Human
cuguaaaaucaaaggcua

SEQ ID NO: 773141 - RNA, 19 nt, Human
cugucucgucgccgggcgc

SEQ ID NO: 773142 - RNA, 18 nt, Human
cuguuccaaccucugccu

SEQ ID NO: 773143 - RNA, 20 nt, Human
cuuagaaagagaaaauggcu

SEQ ID NO: 773144 - RNA, 18 nt, Human
gaacaguauggcggaaac

SEQ ID NO: 773145 - RNA, 22 nt, Human
gaacaugaugauggcucugugc

SEQ ID NO: 773146 - RNA, 20 nt, Human
gaacugcauggccggcauaa

SEQ ID NO: 773147 - RNA, 18 nt, Human
gaagagaaaauggcugag

SEQ ID NO: 773148 - RNA, 24 nt, Human
gaccuuccccugucuguuuauugg

SEQ ID NO: 773149 - RNA, 20 nt, Human
gagggggagguuucucuuug

SEQ ID NO: 773150 - RNA, 25 nt, Human
gcaaccccaggucguagccccacac

SEQ ID NO: 773151 - RNA, 19 nt, Human
gcagacaagagagaaugag

SEQ ID NO: 773152 - RNA, 18 nt, Human
gcagauuggugugagugu

SEQ ID NO: 773153 - RNA, 21 nt, Human
gcaggagguggguucccaugg

SEQ ID NO: 773154 - RNA, 23 nt, Human
gcaucacuaggucaggaguuuga

SEQ ID NO: 773155 - RNA, 23 nt, Human
gccaacaugguaaaccccaucuc

SEQ ID NO: 773156 - RNA, 24 nt, Human
gccaagcaaaaggggaaaccccuu

SEQ ID NO: 773157 - RNA, 21 nt, Human
gccacaccccaggcacaugug

SEQ ID NO: 773158 - RNA, 21 nt, Human
gccacaguucaggugagugcu

SEQ ID NO: 773159 - RNA, 24 nt, Human
gccacugcacuccaaccuggguga

SEQ ID NO: 773160 - RNA, 21 nt, Human
gcccauguauguacacaaaug

SEQ ID NO: 773161 - RNA, 20 nt, Human
gcccgccagcucaagcaaca

SEQ ID NO: 773162 - RNA, 24 nt, Human
gccuggccaacaugguaaacccca

SEQ ID NO: 773163 - RNA, 20 nt, Human
gcgggugugacggaggguuc

SEQ ID NO: 773164 - RNA, 18 nt, Human
gcuaaauacacccauuuc

SEQ ID NO: 773165 - RNA, 23 nt, Human
gcucaagcaacagcggugccacc

SEQ ID NO: 773166 - RNA, 20 nt, Human
gcucagcaaucagagccuca

SEQ ID NO: 773167 - RNA, 18 nt, Human
gcuggcgugguggcucau

SEQ ID NO: 773168 - RNA, 22 nt, Human
gcuggggacucagggccuggcu

SEQ ID NO: 773169 - RNA, 18 nt, Human
ggagguggguucccaugg

SEQ ID NO: 773170 - RNA, 23 nt, Human
ggcgugguggcucaugccuguaa

SEQ ID NO: 773171 - RNA, 21 nt, Human
ggcuauuuauuuccuacgaga

SEQ ID NO: 773172 - RNA, 21 nt, Human
gggcuugaauuuauccucaga

SEQ ID NO: 773173 - RNA, 22 nt, Human
gggggaagagaaaauggcugag

SEQ ID NO: 773174 - RNA, 24 nt, Human
ggggggaagagaaaauggcugaga

SEQ ID NO: 773175 - RNA, 18 nt, Human
gggguugcagugagcuga

SEQ ID NO: 773176 - RNA, 21 nt, Human
gggguugcagugagcugauug

SEQ ID NO: 773177 - RNA, 24 nt, Human
gggugcaucacuaggucaggaguu

SEQ ID NO: 773178 - RNA, 23 nt, Human
gguggcucaugccuguaauccca

SEQ ID NO: 773179 - RNA, 21 nt, Human
gguuaccgggcccugggcugg

SEQ ID NO: 773180 - RNA, 18 nt, Human
gucuugggcagcuccacc

SEQ ID NO: 773181 - RNA, 22 nt, Human
guugcagugagcugauugugcc

SEQ ID NO: 773182 - RNA, 22 nt, Human
uaaaauauagcaagagucaccu

SEQ ID NO: 773183 - RNA, 18 nt, Human
uaaaaucaucagcucuca

SEQ ID NO: 773184 - RNA, 23 nt, Human
uaaaccccaucucuacuaaaaaa

SEQ ID NO: 773185 - RNA, 30 nt, Human
uaaaucaucucccucgaguucaaaguuccu

SEQ ID NO: 773186 - RNA, 25 nt, Human
uaagaaaacacacguucuaagugug

SEQ ID NO: 773187 - RNA, 18 nt, Human
uaagaucaaguccccacc

SEQ ID NO: 773188 - RNA, 21 nt, Human
uaagauggacaaagauggcca

SEQ ID NO: 773189 - RNA, 25 nt, Human
uaagauggacaaagauggccacgaa

SEQ ID NO: 773190 - RNA, 19 nt, Human
uaagcccaguccuccuguu

SEQ ID NO: 773191 - RNA, 24 nt, Human
uaaggugauauuuggauggggaca

SEQ ID NO: 773192 - RNA, 20 nt, Human
uaaucucagcuacucaaucg

SEQ ID NO: 773193 - RNA, 19 nt, Human
uagaaagagaaaauggcug

SEQ ID NO: 773194 - RNA, 23 nt, Human
uagaggugggagguuccugggag

SEQ ID NO: 773195 - RNA, 19 nt, Human
uagcccagcaugcugacgg

SEQ ID NO: 773196 - RNA, 23 nt, Human
uagccccacacagagucgcgauc

SEQ ID NO: 773197 - RNA, 23 nt, Human
uagccuggccaacaugguaaacc

SEQ ID NO: 773198 - RNA, 23 nt, Human
uaggaggagggguugcagugagc

SEQ ID NO: 773199 - RNA, 23 nt, Human
uaggccccaccuucagcagcugg

SEQ ID NO: 773200 - RNA, 20 nt, Human
uaggucaggaguuugagacu

SEQ ID NO: 773201 - RNA, 24 nt, Human
uagugaugcaugccuguaaucuca

SEQ ID NO: 773202 - RNA, 25 nt, Human
uaucagcauuuuggucaaagcugaa

SEQ ID NO: 773203 - RNA, 24 nt, Human
uauguacacaaauggguuagugca

SEQ ID NO: 773204 - RNA, 18 nt, Human
ucacauccaggucacacu

SEQ ID NO: 773205 - RNA, 23 nt, Human
ucacuaccaccagaacaguaugg

SEQ ID NO: 773206 - RNA, 24 nt, Human
ucacuaggucaggaguuugagacu

SEQ ID NO: 773207 - RNA, 23 nt, Human
ucagugcccccucccuaggcccc

SEQ ID NO: 773208 - RNA, 23 nt, Human
ucauguccucucauuuaaaaauc

SEQ ID NO: 773209 - RNA, 21 nt, Human
uccaaagucucaucugaaaca

SEQ ID NO: 773210 - RNA, 22 nt, Human
uccagcaccggggccacaagca

SEQ ID NO: 773211 - RNA, 18 nt, Human
ucccaccaggucccuccc

SEQ ID NO: 773212 - RNA, 19 nt, Human
ucccuggccccucccaaau

SEQ ID NO: 773213 - RNA, 20 nt, Human
ucgcuugaaccuaggaggag

SEQ ID NO: 773214 - RNA, 18 nt, Human
ucuaaguguggugggggc

SEQ ID NO: 773215 - RNA, 21 nt, Human
ucucauguccucucauuuaaa

SEQ ID NO: 773216 - RNA, 22 nt, Human
ucucuaggaagucccaaacuuu

SEQ ID NO: 773217 - RNA, 21 nt, Human
ucucucucucucucucucaca

SEQ ID NO: 773218 - RNA, 18 nt, Human
ugacuccaugucucacau

SEQ ID NO: 773219 - RNA, 22 nt, Human
ugacuccaugucucacauccag

SEQ ID NO: 773220 - RNA, 23 nt, Human
ugacuccaugucucacauccagg

SEQ ID NO: 773221 - RNA, 22 nt, Human
ugagaacuaagcaaaaggggaa

SEQ ID NO: 773222 - RNA, 20 nt, Human
ugagaccaacucagccugga

SEQ ID NO: 773223 - RNA, 23 nt, Human
ugagacuagccuggccaacaugg

SEQ ID NO: 773224 - RNA, 24 nt, Human
ugagacuagccuggccaacauggu

SEQ ID NO: 773225 - RNA, 24 nt, Human
ugagccuguaaaaucaaaggcuag

SEQ ID NO: 773226 - RNA, 22 nt, Human
ugauauuuggauggggacacag

SEQ ID NO: 773227 - RNA, 22 nt, Human
ugaugcaugccuguaaucucag

SEQ ID NO: 773228 - RNA, 21 nt, Human
ugcaucacuaggucaggaguu

SEQ ID NO: 773229 - RNA, 22 nt, Human
ugcaucacuaggucaggaguuu

SEQ ID NO: 773230 - RNA, 18 nt, Human
ugcauggccggcauaaag

SEQ ID NO: 773231 - RNA, 24 nt, Human
ugccagauacccuaaaucaucucc

SEQ ID NO: 773232 - RNA, 20 nt, Human
ugccggcgggcaaauagacg

SEQ ID NO: 773233 - RNA, 22 nt, Human
ugccuggcuccagcaccggggc

SEQ ID NO: 773234 - RNA, 23 nt, Human
ugccuguaaucccaacacuuugg

SEQ ID NO: 773235 - RNA, 19 nt, Human
ugccuguaaucucagcuac

SEQ ID NO: 773236 - RNA, 22 nt, Human
ugccuguaaucucagcuacuca

SEQ ID NO: 773237 - RNA, 19 nt, Human
ugcgcgauggccaccacuu

SEQ ID NO: 773238 - RNA, 24 nt, Human
uggcaugccacuuuucuccagacu

SEQ ID NO: 773239 - RNA, 19 nt, Human
uggcccagggcugagccca

SEQ ID NO: 773240 - RNA, 21 nt, Human
uggccugcauggcccugcaag

SEQ ID NO: 773241 - RNA, 19 nt, Human
uggcuaaauacacccauuu

SEQ ID NO: 773242 - RNA, 21 nt, Human
uggcucaugccuguaauccca

SEQ ID NO: 773243 - RNA, 24 nt, Human
uggcucaugccuguaaucccaaca

SEQ ID NO: 773244 - RNA, 23 nt, Human
uggcuggcgugguggcucaugcc

SEQ ID NO: 773245 - RNA, 21 nt, Human
ugggaccaaaucagccacagu

SEQ ID NO: 773246 - RNA, 19 nt, Human
ugggaggccaaggugggug

SEQ ID NO: 773247 - RNA, 21 nt, Human
ugggaggccaaggugggugca

SEQ ID NO: 773248 - RNA, 18 nt, Human
uggguucccauggucuug

SEQ ID NO: 773249 - RNA, 20 nt, Human
ugguauagaggugggagguu

SEQ ID NO: 773250 - RNA, 24 nt, Human
ugguggcucaugccuguaauccca

SEQ ID NO: 773251 - RNA, 18 nt, Human
uggugugagugugggggu

SEQ ID NO: 773252 - RNA, 20 nt, Human
ugucgaaaagcucacccuug

SEQ ID NO: 773253 - RNA, 24 nt, Human
ugugcuuuuaaaccccaaccaugu

SEQ ID NO: 773254 - RNA, 21 nt, Human
uguucagaagcacagaccacc

SEQ ID NO: 773255 - RNA, 20 nt, Human
uguuucccuuuuaaaacuga

SEQ ID NO: 773256 - RNA, 25 nt, Human
uguuucucucucucucucucucuca

SEQ ID NO: 773257 - RNA, 20 nt, Human
uuacauggcagcagacaaga

SEQ ID NO: 773258 - RNA, 21 nt, Human
uucagcagcugguuccagcac

SEQ ID NO: 773259 - RNA, 18 nt, Human
uucccaucaggcacauuu

SEQ ID NO: 773260 - RNA, 24 nt, Human
uuccuccagaucauccagccucag

SEQ ID NO: 773261 - RNA, 22 nt, Human
uucucucccuggccccucccaa

SEQ ID NO: 773262 - RNA, 20 nt, Human
uugcagugagcugauugugc

SEQ ID NO: 773263 - RNA, 23 nt, Human
uugugccacugcacuccaaccug

SEQ ID NO: 773264 - RNA, 21 nt, Human
uuuaaaacugaaugcuuuuaa

SEQ ID NO: 773265 - RNA, 19 nt, Human
uuucccuuuuaaaacugaa

SEQ ID NO: 773266 - RNA, 21 nt, Human
uuuccugucuucugaucccuc

SEQ ID NO: 773267 - RNA, 23 nt, Human
uuugcuccaugcccccuuccucc

SEQ ID NO: 773268 - RNA, 19 nt, Human
aaaccaacaucagagaaca

SEQ ID NO: 773269 - RNA, 21 nt, Human
aaacucaaggccaaacuagug

SEQ ID NO: 773270 - RNA, 23 nt, Human
aaccuuguccacacagaggagau

SEQ ID NO: 773271 - RNA, 18 nt, Human
aaggcaaccuuguccaca

SEQ ID NO: 773272 - RNA, 21 nt, Human
aaguauucugcaaccuuggau

SEQ ID NO: 773273 - RNA, 19 nt, Human
aaucuguucuuccccucac

SEQ ID NO: 773274 - RNA, 22 nt, Human
acaaccacaacugcaaagaccu

SEQ ID NO: 773275 - RNA, 23 nt, Human
acacaagugggaggaaugggguc

SEQ ID NO: 773276 - RNA, 22 nt, Human
acagggcaugcaguguagucaa

SEQ ID NO: 773277 - RNA, 20 nt, Human
accagguagcuccuuaccac

SEQ ID NO: 773278 - RNA, 20 nt, Human
acccucuccuggccccuuuc

SEQ ID NO: 773279 - RNA, 21 nt, Human
accugagcuugauaaggagac

SEQ ID NO: 773280 - RNA, 19 nt, Human
agaaaaaccaacaucagag

SEQ ID NO: 773281 - RNA, 19 nt, Human
agaaggccugcuucauuua

SEQ ID NO: 773282 - RNA, 23 nt, Human
agaaucagcuagguccagcugga

SEQ ID NO: 773283 - RNA, 21 nt, Human
agaccacccaauuccaacccu

SEQ ID NO: 773284 - RNA, 19 nt, Human
agcaaggcaaccuugucca

SEQ ID NO: 773285 - RNA, 21 nt, Human
agcagcccccacucuggccug

SEQ ID NO: 773286 - RNA, 21 nt, Human
agccuaucuggaauucacccc

SEQ ID NO: 773287 - RNA, 20 nt, Human
agccugggcagaaaagugau

SEQ ID NO: 773288 - RNA, 22 nt, Human
agccugggcagaaaagugauuc

SEQ ID NO: 773289 - RNA, 19 nt, Human
agcuggggccaggcuuucu

SEQ ID NO: 773290 - RNA, 23 nt, Human
aggcagcaggccaggcuccugca

SEQ ID NO: 773291 - RNA, 18 nt, Human
aggcauccauaaaagcuc

SEQ ID NO: 773292 - RNA, 24 nt, Human
aguauucugcaaccuuggauggaa

SEQ ID NO: 773293 - RNA, 19 nt, Human
agucuucacgggagguuuc

SEQ ID NO: 773294 - RNA, 25 nt, Human
aucgccaagccuacucuaagccagc

SEQ ID NO: 773295 - RNA, 18 nt, Human
aucugcuuugcucucccc

SEQ ID NO: 773296 - RNA, 19 nt, Human
aucugcuuugcucucccca

SEQ ID NO: 773297 - RNA, 22 nt, Human
augaaguucaggugguuguggc

SEQ ID NO: 773298 - RNA, 20 nt, Human
auggaggaaugggguggcag

SEQ ID NO: 773299 - RNA, 19 nt, Human
caaaauucucaggagucuc

SEQ ID NO: 773300 - RNA, 25 nt, Human
caacaucacaggugugggugggcaa

SEQ ID NO: 773301 - RNA, 23 nt, Human
caaccacaacugcaaagaccucu

SEQ ID NO: 773302 - RNA, 24 nt, Human
cacaacaucacagguguggguggg

SEQ ID NO: 773303 - RNA, 20 nt, Human
cacaaccacaacugcaaaga

SEQ ID NO: 773304 - RNA, 23 nt, Human
cacccacagguaaaugacaccuc

SEQ ID NO: 773305 - RNA, 24 nt, Human
caccucuucucccaaggccuucaa

SEQ ID NO: 773306 - RNA, 23 nt, Human
caccugaaaccacgggaagaaac

SEQ ID NO: 773307 - RNA, 21 nt, Human
cagaacagagacucaagccag

SEQ ID NO: 773308 - RNA, 19 nt, Human
cagagcagcauauuaggga

SEQ ID NO: 773309 - RNA, 21 nt, Human
cagauaccacaucccacauug

SEQ ID NO: 773310 - RNA, 19 nt, Human
cagauucacuguccuggug

SEQ ID NO: 773311 - RNA, 18 nt, Human
cagcagcagggagugcag

SEQ ID NO: 773312 - RNA, 22 nt, Human
cagcagcagggagugcaguugg

SEQ ID NO: 773313 - RNA, 18 nt, Human
cagcagcccccacucugg

SEQ ID NO: 773314 - RNA, 19 nt, Human
cagccagguacaucuacca

SEQ ID NO: 773315 - RNA, 21 nt, Human
cagcccucucuuccauccccu

SEQ ID NO: 773316 - RNA, 21 nt, Human
cagcccucucuuccauccccu

SEQ ID NO: 773317 - RNA, 19 nt, Human
cagcugguuggaggagagg

SEQ ID NO: 773318 - RNA, 19 nt, Human
caggcccuccaagccccuc

SEQ ID NO: 773319 - RNA, 24 nt, Human
cagggcaugcaguguagucaaagg

SEQ ID NO: 773320 - RNA, 19 nt, Human
cagguacaucuaccaggug

SEQ ID NO: 773321 - RNA, 19 nt, Human
caguguagucaaagggaaa

SEQ ID NO: 773322 - RNA, 18 nt, Human
cccaaggccuucaaccca

SEQ ID NO: 773323 - RNA, 18 nt, Human
ccccuuucuugggcccca

SEQ ID NO: 773324 - RNA, 22 nt, Human
cccuugggcagccagcccucuc

SEQ ID NO: 773325 - RNA, 23 nt, Human
ccucacccacagguaaaugacac

SEQ ID NO: 773326 - RNA, 21 nt, Human
ccuuaccaccucuucucccaa

SEQ ID NO: 773327 - RNA, 22 nt, Human
cgccaagccuacucuaagccag

SEQ ID NO: 773328 - RNA, 19 nt, Human
cgugcuggcaccuaugcug

SEQ ID NO: 773329 - RNA, 23 nt, Human
cuaccacacugagaauuggcagg

SEQ ID NO: 773330 - RNA, 18 nt, Human
cucaaacucaaggccaaa

SEQ ID NO: 773331 - RNA, 19 nt, Human
cucaaaguauucugcaacc

SEQ ID NO: 773332 - RNA, 24 nt, Human
cucacaaccacaacugcaaagacc

SEQ ID NO: 773333 - RNA, 20 nt, Human
cuccagggacaccugcuucc

SEQ ID NO: 773334 - RNA, 18 nt, Human
cucuccuggggcagaauc

SEQ ID NO: 773335 - RNA, 22 nt, Human
cucugcuucaggauugccugga

SEQ ID NO: 773336 - RNA, 20 nt, Human
cugaaaguuuaguacuacug

SEQ ID NO: 773337 - RNA, 19 nt, Human
cugcucaucccccgccaaa

SEQ ID NO: 773338 - RNA, 23 nt, Human
cugcuuugcucuccccagcuggg

SEQ ID NO: 773339 - RNA, 23 nt, Human
cuucaggggugcauuaccucucc

SEQ ID NO: 773340 - RNA, 21 nt, Human
cuuugcucuccccagcugggg

SEQ ID NO: 773341 - RNA, 25 nt, Human
gaagagacccuaagaaaaaccaaca

SEQ ID NO: 773342 - RNA, 20 nt, Human
gaagcucccccaacacacac

SEQ ID NO: 773343 - RNA, 23 nt, Human
gaauguugagcucauucuucuua

SEQ ID NO: 773344 - RNA, 19 nt, Human
gacucauuuuccaaagguu

SEQ ID NO: 773345 - RNA, 22 nt, Human
gagaauuggcagggcuuugggu

SEQ ID NO: 773346 - RNA, 28 nt, Human
gagugcaguugggucaggcgcguggggg

SEQ ID NO: 773347 - RNA, 24 nt, Human
gaucucucggccuuuucuuauacc

SEQ ID NO: 773348 - RNA, 19 nt, Human
gcacaucaggaaaaaggaa

SEQ ID NO: 773349 - RNA, 21 nt, Human
gcagccagcccucucuuccau

SEQ ID NO: 773350 - RNA, 24 nt, Human
gccagguacaucuaccaggugucu

SEQ ID NO: 773351 - RNA, 22 nt, Human
gcccagaggcuccaagauuugc

SEQ ID NO: 773352 - RNA, 27 nt, Human
gcccagaggcuccaagauuugccagcc

SEQ ID NO: 773353 - RNA, 20 nt, Human
gcccuccaagccccucaccc

SEQ ID NO: 773354 - RNA, 20 nt, Human
gcuccuuaccaccucuucuc

SEQ ID NO: 773355 - RNA, 18 nt, Human
ggaauccauucccuuggg

SEQ ID NO: 773356 - RNA, 22 nt, Human
ggagcuccaucacgaugcccuu

SEQ ID NO: 773357 - RNA, 21 nt, Human
ggccccuuucuugggccccau

SEQ ID NO: 773358 - RNA, 23 nt, Human
gggccaggcuuucuuggacuccu

SEQ ID NO: 773359 - RNA, 23 nt, Human
ggguaggguaagaggagguggug

SEQ ID NO: 773360 - RNA, 23 nt, Human
gggugaagcuucagggaguucag

SEQ ID NO: 773361 - RNA, 21 nt, Human
gguguagcauuugccugagga

SEQ ID NO: 773362 - RNA, 21 nt, Human
gguuucugaggaguccaaaga

SEQ ID NO: 773363 - RNA, 22 nt, Human
guagcgcagguuggguaccggg

SEQ ID NO: 773364 - RNA, 22 nt, Human
gucuuggacacgggaggccugc

SEQ ID NO: 773365 - RNA, 22 nt, Human
gugacugagguccaguagugcu

SEQ ID NO: 773366 - RNA, 21 nt, Human
gugcaugcauaccuauaagca

SEQ ID NO: 773367 - RNA, 21 nt, Human
guuguaccugggaccaauucc

SEQ ID NO: 773368 - RNA, 20 nt, Human
uaaacaaagaagauacuaca

SEQ ID NO: 773369 - RNA, 20 nt, Human
uaaauacaaaauaauaauaa

SEQ ID NO: 773370 - RNA, 26 nt, Human
uaagaaaaaccaacaucagagaacau

SEQ ID NO: 773371 - RNA, 18 nt, Human
uacaggaguguguauuug

SEQ ID NO: 773372 - RNA, 23 nt, Human
uacaucuaccaggugucucaaac

SEQ ID NO: 773373 - RNA, 21 nt, Human
uacauugagaaucagcuaggu

SEQ ID NO: 773374 - RNA, 21 nt, Human
uacccacaccuggcaguuuuc

SEQ ID NO: 773375 - RNA, 29 nt, Human
uagagcccugucauccucugucuccaggg

SEQ ID NO: 773376 - RNA, 24 nt, Human
uagccuaucuggaauucacccccc

SEQ ID NO: 773377 - RNA, 21 nt, Human
uaggaagcuuaauagucaggc

SEQ ID NO: 773378 - RNA, 24 nt, Human
uaggguaagaggagguggugaucu

SEQ ID NO: 773379 - RNA, 21 nt, Human
uagguguacacaagugggagg

SEQ ID NO: 773380 - RNA, 21 nt, Human
ucaagccagguuuaaugauca

SEQ ID NO: 773381 - RNA, 19 nt, Human
ucagagcccuagauggugc

SEQ ID NO: 773382 - RNA, 22 nt, Human
ucaggggugcauuaccucuccu

SEQ ID NO: 773383 - RNA, 19 nt, Human
ucaugcuauaacccucugu

SEQ ID NO: 773384 - RNA, 18 nt, Human
ucauuaauggggacuaca

SEQ ID NO: 773385 - RNA, 23 nt, Human
uccaaagguuuucaacuucccca

SEQ ID NO: 773386 - RNA, 21 nt, Human
uccacacagaggagauauaua

SEQ ID NO: 773387 - RNA, 21 nt, Human
ucccaaggccuucaacccaug

SEQ ID NO: 773388 - RNA, 27 nt, Human
ucccaaggccuucaacccaugguucuu

SEQ ID NO: 773389 - RNA, 22 nt, Human
ucccagauuuccugaugagucu

SEQ ID NO: 773390 - RNA, 24 nt, Human
uccccaaucauaauaggaagcuua

SEQ ID NO: 773391 - RNA, 21 nt, Human
ucccccaacacacacaacauc

SEQ ID NO: 773392 - RNA, 23 nt, Human
uccuaguuccuauagcuccagua

SEQ ID NO: 773393 - RNA, 19 nt, Human
ucgauggaggaauggggug

SEQ ID NO: 773394 - RNA, 21 nt, Human
ucgugcuggcaccuaugcugu

SEQ ID NO: 773395 - RNA, 21 nt, Human
ucuagaggaucuggagaacuu

SEQ ID NO: 773396 - RNA, 22 nt, Human
ucugugccauuggucccaggac

SEQ ID NO: 773397 - RNA, 21 nt, Human
ucuguucuuccccucacuccu

SEQ ID NO: 773398 - RNA, 21 nt, Human
ugaacaggaacucauccagug

SEQ ID NO: 773399 - RNA, 21 nt, Human
ugaagagauggcauacauuga

SEQ ID NO: 773400 - RNA, 21 nt, Human
ugacuugcuaaacaaagaaga

SEQ ID NO: 773401 - RNA, 21 nt, Human
ugagcuugauaaggagacugg

SEQ ID NO: 773402 - RNA, 22 nt, Human
ugagggaaaugcugcaccucuc

SEQ ID NO: 773403 - RNA, 20 nt, Human
ugauaaggagacuggaugaa

SEQ ID NO: 773404 - RNA, 20 nt, Human
ugaugagucugaggagggag

SEQ ID NO: 773405 - RNA, 25 nt, Human
ugcagcagaggugguaucucugaga

SEQ ID NO: 773406 - RNA, 18 nt, Human
ugccagccuagguguaca

SEQ ID NO: 773407 - RNA, 21 nt, Human
ugccauuggucccaggacaag

SEQ ID NO: 773408 - RNA, 18 nt, Human
ugccccagaaggccugcu

SEQ ID NO: 773409 - RNA, 23 nt, Human
ugcuguguaacugggcaaggaau

SEQ ID NO: 773410 - RNA, 19 nt, Human
uggaagcucccccaacaca

SEQ ID NO: 773411 - RNA, 21 nt, Human
uggaagucaaggugcuggugu

SEQ ID NO: 773412 - RNA, 22 nt, Human
uggaauggaauguugagcucau

SEQ ID NO: 773413 - RNA, 24 nt, Human
uggaauguugagcucauucuucuu

SEQ ID NO: 773414 - RNA, 22 nt, Human
uggaauucaccccccaucuaca

SEQ ID NO: 773415 - RNA, 20 nt, Human
uggaggaaugggguggcaga

SEQ ID NO: 773416 - RNA, 25 nt, Human
uggcagaacuccccuucugaaaguu

SEQ ID NO: 773417 - RNA, 20 nt, Human
uggcaggcauccauaaaagc

SEQ ID NO: 773418 - RNA, 21 nt, Human
uggcauggucacugucucucc

SEQ ID NO: 773419 - RNA, 20 nt, Human
uggcuccuguggaagcuccc

SEQ ID NO: 773420 - RNA, 21 nt, Human
ugggaggaauggggucuugga

SEQ ID NO: 773421 - RNA, 18 nt, Human
ugugcaugaaguugugca

SEQ ID NO: 773422 - RNA, 20 nt, Human
uguggcuccuguggaagcuc

SEQ ID NO: 773423 - RNA, 21 nt, Human
ugugggugggcagagauagaa

SEQ ID NO: 773424 - RNA, 26 nt, Human
uguugugacugagguccaguagugcu

SEQ ID NO: 773425 - RNA, 25 nt, Human
uucacuguccugguggaagucaagg

SEQ ID NO: 773426 - RNA, 27 nt, Human
uucccuugggcagccagcccucucuuc

SEQ ID NO: 773427 - RNA, 24 nt, Human
uucgugcuggcaccuaugcuguga

SEQ ID NO: 773428 - RNA, 19 nt, Human
uuggaggagagguccaggu

SEQ ID NO: 773429 - RNA, 19 nt, Human
uuggcagggcuuuggguac

SEQ ID NO: 773430 - RNA, 19 nt, Human
uuuaaugaucauugucuag

SEQ ID NO: 773431 - RNA, 20 nt, Human
uuuggggucuugcucucugu

SEQ ID NO: 773432 - RNA, 24 nt, Human
uuuucaccuucacccugcucaucc

SEQ ID NO: 773433 - RNA, 23 nt, Human
aaaaaaaacacucuccaagugga

SEQ ID NO: 773434 - RNA, 18 nt, Human
aaaaaaacacucuccaag

SEQ ID NO: 773435 - RNA, 19 nt, Human
aaaaaacacucuccaagug

SEQ ID NO: 773436 - RNA, 24 nt, Human
aaaauguugggauuacaggcguga

SEQ ID NO: 773437 - RNA, 24 nt, Human
aaaguacugggauuacaggcauga

SEQ ID NO: 773438 - RNA, 26 nt, Human
aaauguugggauuacaggcgugagcc

SEQ ID NO: 773439 - RNA, 21 nt, Human
aacuuguaacaugaaacucca

SEQ ID NO: 773440 - RNA, 26 nt, Human
aagaaauaacaaauuguguaacagaa

SEQ ID NO: 773441 - RNA, 21 nt, Human
aagaguguauugugugacuug

SEQ ID NO: 773442 - RNA, 19 nt, Human
aaguacugggauuacaggc

SEQ ID NO: 773443 - RNA, 21 nt, Human
aaguacugggauuacaggcau

SEQ ID NO: 773444 - RNA, 19 nt, Human
aaguagcugggaugacagg

SEQ ID NO: 773445 - RNA, 22 nt, Human
aaugacauaguugaaaaaaucc

SEQ ID NO: 773446 - RNA, 22 nt, Human
aauuucucaagguauacugguu

SEQ ID NO: 773447 - RNA, 19 nt, Human
acaggguuucaccaugcug

SEQ ID NO: 773448 - RNA, 20 nt, Human
acaggguuucaccaugcugg

SEQ ID NO: 773449 - RNA, 24 nt, Human
acaggguuucaccaugcuggccag

SEQ ID NO: 773450 - RNA, 18 nt, Human
acaggguuuugccauguu

SEQ ID NO: 773451 - RNA, 23 nt, Human
acaggguuuugccauguuggcca

SEQ ID NO: 773452 - RNA, 24 nt, Human
acaggguuuugccauguuggccag

SEQ ID NO: 773453 - RNA, 26 nt, Human
acaguaaucaaagcaaacauuuuauc

SEQ ID NO: 773454 - RNA, 21 nt, Human
acauuucaucuuuccccccac

SEQ ID NO: 773455 - RNA, 19 nt, Human
accacacacaaaaaaaaca

SEQ ID NO: 773456 - RNA, 24 nt, Human
accaugcuggccaggcuggucucg

SEQ ID NO: 773457 - RNA, 18 nt, Human
agacaggguuuugccaug

SEQ ID NO: 773458 - RNA, 22 nt, Human
agaccacacacaaaaaaaacac

SEQ ID NO: 773459 - RNA, 24 nt, Human
agaugauccgcccaccuuggccuc

SEQ ID NO: 773460 - RNA, 19 nt, Human
agcauccacugugcuuucc

SEQ ID NO: 773461 - RNA, 24 nt, Human
agcgauucuccugccucagccucc

SEQ ID NO: 773462 - RNA, 22 nt, Human
aggcacagacgguauugaucgg

SEQ ID NO: 773463 - RNA, 21 nt, Human
aggcacgcaccaccaugccag

SEQ ID NO: 773464 - RNA, 24 nt, Human
aggccaggagcaaaacauugagga

SEQ ID NO: 773465 - RNA, 24 nt, Human
aggugauccaccugccucggccuc

SEQ ID NO: 773466 - RNA, 22 nt, Human
aguagagacaggguuucaccau

SEQ ID NO: 773467 - RNA, 22 nt, Human
aguagagacaggguuuugccau

SEQ ID NO: 773468 - RNA, 18 nt, Human
aguagcugggacuacagg

SEQ ID NO: 773469 - RNA, 19 nt, Human
aguagcugggacuacaggc

SEQ ID NO: 773470 - RNA, 24 nt, Human
auauuuacaaagccuagcauccac

SEQ ID NO: 773471 - RNA, 22 nt, Human
aucugcuuuucuacauccccau

SEQ ID NO: 773472 - RNA, 22 nt, Human
augccaggcugauuuuuuguau

SEQ ID NO: 773473 - RNA, 18 nt, Human
augcuuuuuaaaauuucu

SEQ ID NO: 773474 - RNA, 22 nt, Human
auggcagcauuuucuuuggaac

SEQ ID NO: 773475 - RNA, 21 nt, Human
augugauacacagauuguccc

SEQ ID NO: 773476 - RNA, 24 nt, Human
auguguggccucauaauaaaguua

SEQ ID NO: 773477 - RNA, 24 nt, Human
auuauuguauuuuuaguagagaca

SEQ ID NO: 773478 - RNA, 18 nt, Human
auucuugguauaucaaag

SEQ ID NO: 773479 - RNA, 23 nt, Human
auuucagaaaugugcuuuuucau

SEQ ID NO: 773480 - RNA, 22 nt, Human
auuuuuuguauuuuuaguagag

SEQ ID NO: 773481 - RNA, 24 nt, Human
caaaauguugggauuacaggcgug

SEQ ID NO: 773482 - RNA, 21 nt, Human
caaaguaaauuccaggaaugu

SEQ ID NO: 773483 - RNA, 24 nt, Human
caaaguacugggauuacaggcaug

SEQ ID NO: 773484 - RNA, 20 nt, Human
caaauuaagaagauaguaac

SEQ ID NO: 773485 - RNA, 22 nt, Human
caagcaauucuccugccucagc

SEQ ID NO: 773486 - RNA, 22 nt, Human
caagcgauucuccugccucagc

SEQ ID NO: 773487 - RNA, 27 nt, Human
caagcgauucuccugccucagccuccc

SEQ ID NO: 773488 - RNA, 22 nt, Human
caagugcaguauuuuucaugaa

SEQ ID NO: 773489 - RNA, 23 nt, Human
caauagucuuucaaaauaacuaa

SEQ ID NO: 773490 - RNA, 18 nt, Human
cacaacuauuugcagcag

SEQ ID NO: 773491 - RNA, 21 nt, Human
caccaugcuggccaggcuggu

SEQ ID NO: 773492 - RNA, 24 nt, Human
caccaugcuggccaggcuggucuc

SEQ ID NO: 773493 - RNA, 27 nt, Human
caccaugcuggccaggcuggucucgaa

SEQ ID NO: 773494 - RNA, 25 nt, Human
cacccaggcuggagugcagcagggc

SEQ ID NO: 773495 - RNA, 22 nt, Human
caccccagaccacacacaaaaa

SEQ ID NO: 773496 - RNA, 24 nt, Human
caccccagaccacacacaaaaaaa

SEQ ID NO: 773497 - RNA, 26 nt, Human
caccccagaccacacacaaaaaaaac

SEQ ID NO: 773498 - RNA, 23 nt, Human
caccugccucggccucccaaagu

SEQ ID NO: 773499 - RNA, 20 nt, Human
cacgcaccaccaugccaggc

SEQ ID NO: 773500 - RNA, 19 nt, Human
cacugcaaccucugccugc

SEQ ID NO: 773501 - RNA, 23 nt, Human
cacugcaaccucugccugccggg

SEQ ID NO: 773502 - RNA, 23 nt, Human
cacugcaaucacugccuccuggg

SEQ ID NO: 773503 - RNA, 19 nt, Human
cagaaaugugcuuuuucau

SEQ ID NO: 773504 - RNA, 19 nt, Human
cagaccacacacaaaaaaa

SEQ ID NO: 773505 - RNA, 18 nt, Human
cagcaaggggcagggucc

SEQ ID NO: 773506 - RNA, 21 nt, Human
cagcagcaauagucuuucaaa

SEQ ID NO: 773507 - RNA, 22 nt, Human
cagcagcaauagucuuucaaaa

SEQ ID NO: 773508 - RNA, 18 nt, Human
cagcagggcgaucucggc

SEQ ID NO: 773509 - RNA, 24 nt, Human
caggguuucaccaugcuggccagg

SEQ ID NO: 773510 - RNA, 24 nt, Human
caggguuuugccauguuggccagg

SEQ ID NO: 773511 - RNA, 22 nt, Human
caggugauccaccugccucggc

SEQ ID NO: 773512 - RNA, 19 nt, Human
caggugcccgccaccaugc

SEQ ID NO: 773513 - RNA, 24 nt, Human
caguauggcagcauuuucuuugga

SEQ ID NO: 773514 - RNA, 24 nt, Human
caugcuggccaggcuggucucgaa

SEQ ID NO: 773515 - RNA, 24 nt, Human
cauguuggccaggcuggucucgaa

SEQ ID NO: 773516 - RNA, 20 nt, Human
cauuguuagaacagaagaua

SEQ ID NO: 773517 - RNA, 22 nt, Human
ccaaaauguugggauuacaggc

SEQ ID NO: 773518 - RNA, 22 nt, Human
ccaaaauguugggauuacaggc

SEQ ID NO: 773519 - RNA, 24 nt, Human
ccaaaauguugggauuacaggcgu

SEQ ID NO: 773520 - RNA, 24 nt, Human
ccaaaguacugggauuacaggcau

SEQ ID NO: 773521 - RNA, 23 nt, Human
ccacugcgcccggcccuuucaga

SEQ ID NO: 773522 - RNA, 19 nt, Human
ccacuggauccacuugaug

SEQ ID NO: 773523 - RNA, 19 nt, Human
ccagaccacacacaaaaaa

SEQ ID NO: 773524 - RNA, 19 nt, Human
ccaggccaggagcaaaaca

SEQ ID NO: 773525 - RNA, 19 nt, Human
ccauguuggccaggcuggu

SEQ ID NO: 773526 - RNA, 22 nt, Human
ccauguuggccaggcuggucuc

SEQ ID NO: 773527 - RNA, 23 nt, Human
ccauguuggccaggcuggucucg

SEQ ID NO: 773528 - RNA, 24 nt, Human
cccaaaguacugggauuacaggca

SEQ ID NO: 773529 - RNA, 18 nt, Human
cccaaguagcugggauga

SEQ ID NO: 773530 - RNA, 18 nt, Human
cccaggcuggagugcagc

SEQ ID NO: 773531 - RNA, 20 nt, Human
ccccugaaaaaacgaacaaa

SEQ ID NO: 773532 - RNA, 23 nt, Human
cccuauguuaaacccgugguuuc

SEQ ID NO: 773533 - RNA, 24 nt, Human
cccucugucacccaggcuggagug

SEQ ID NO: 773534 - RNA, 24 nt, Human
cccugaguagcugggacuacaggc

SEQ ID NO: 773535 - RNA, 19 nt, Human
ccggguucaagcaauucuc

SEQ ID NO: 773536 - RNA, 22 nt, Human
ccggguucaagcaauucuccug

SEQ ID NO: 773537 - RNA, 22 nt, Human
ccuagcauccacugugcuuucc

SEQ ID NO: 773538 - RNA, 19 nt, Human
ccucagcccugaguagcug

SEQ ID NO: 773539 - RNA, 24 nt, Human
ccuccuggguucaagcgauucucc

SEQ ID NO: 773540 - RNA, 20 nt, Human
ccuccuucagccaacagagu

SEQ ID NO: 773541 - RNA, 23 nt, Human
ccugaguagcugggacuacaggc

SEQ ID NO: 773542 - RNA, 24 nt, Human
ccugaguagcugggacuacaggca

SEQ ID NO: 773543 - RNA, 21 nt, Human
ccugaucucaggugauccacc

SEQ ID NO: 773544 - RNA, 24 nt, Human
ccugccggguucaagcaauucucc

SEQ ID NO: 773545 - RNA, 24 nt, Human
ccuggccucagaugauccgcccac

SEQ ID NO: 773546 - RNA, 23 nt, Human
ccuggguucaagcgauucuccug

SEQ ID NO: 773547 - RNA, 21 nt, Human
ccuuuccuccugugguuuugu

SEQ ID NO: 773548 - RNA, 22 nt, Human
cgcccaccuuggccucccaaaa

SEQ ID NO: 773549 - RNA, 24 nt, Human
cucacugcaaccucugccugccgg

SEQ ID NO: 773550 - RNA, 24 nt, Human
cucacugcaaucacugccuccugg

SEQ ID NO: 773551 - RNA, 24 nt, Human
cucagaugauccgcccaccuuggc

SEQ ID NO: 773552 - RNA, 22 nt, Human
cucagcccugaguagcugggac

SEQ ID NO: 773553 - RNA, 23 nt, Human
cucagccucccaaguagcuggga

SEQ ID NO: 773554 - RNA, 21 nt, Human
cucaggugauccaccugccuc

SEQ ID NO: 773555 - RNA, 19 nt, Human
cuccaaaauuccucaaaau

SEQ ID NO: 773556 - RNA, 24 nt, Human
cucccucugucacccaggcuggag

SEQ ID NO: 773557 - RNA, 21 nt, Human
cuccugccucagcccugagua

SEQ ID NO: 773558 - RNA, 21 nt, Human
cuccuggguucaagcgauucu

SEQ ID NO: 773559 - RNA, 23 nt, Human
cucugucacccaggcuggagugc

SEQ ID NO: 773560 - RNA, 19 nt, Human
cugaguucuuauaaacacu

SEQ ID NO: 773561 - RNA, 24 nt, Human
cugcaaccucugccugccggguuc

SEQ ID NO: 773562 - RNA, 21 nt, Human
cugccucagcccugaguagcu

SEQ ID NO: 773563 - RNA, 23 nt, Human
cugccucagccucccaaguagcu

SEQ ID NO: 773564 - RNA, 27 nt, Human
cugggugaugauggguguguucucuuc

SEQ ID NO: 773565 - RNA, 20 nt, Human
cuuaucugauagcagcacug

SEQ ID NO: 773566 - RNA, 18 nt, Human
cuucaagggcaggaaacc

SEQ ID NO: 773567 - RNA, 22 nt, Human
cuuguaacaugaaacuccagcu

SEQ ID NO: 773568 - RNA, 19 nt, Human
cuuucaaaauaacuaaaac

SEQ ID NO: 773569 - RNA, 18 nt, Human
gaaguuucaccuuccagg

SEQ ID NO: 773570 - RNA, 21 nt, Human
gaaugucacuaugacacaaaa

SEQ ID NO: 773571 - RNA, 19 nt, Human
gacaggguuuugccauguu

SEQ ID NO: 773572 - RNA, 24 nt, Human
gacuacaggcacgcaccaccaugc

SEQ ID NO: 773573 - RNA, 21 nt, Human
gagacggagucucgcucuauu

SEQ ID NO: 773574 - RNA, 24 nt, Human
gaguagcugggacuacaggcacgc

SEQ ID NO: 773575 - RNA, 24 nt, Human
gaugacaggugcccgccaccaugc

SEQ ID NO: 773576 - RNA, 19 nt, Human
gauggccagcaaggggcag

SEQ ID NO: 773577 - RNA, 21 nt, Human
gauuacaggcaugaucuaaau

SEQ ID NO: 773578 - RNA, 18 nt, Human
gauuacaggcgugagcca

SEQ ID NO: 773579 - RNA, 22 nt, Human
gauuacaggcgugagccacugc

SEQ ID NO: 773580 - RNA, 22 nt, Human
gauuacaggcgugagccacugc

SEQ ID NO: 773581 - RNA, 24 nt, Human
gauuuuuuguauuuuuaguagaga

SEQ ID NO: 773582 - RNA, 22 nt, Human
gcaaccucugccugccggguuc

SEQ ID NO: 773583 - RNA, 20 nt, Human
gcagcagcaauagucuuuca

SEQ ID NO: 773584 - RNA, 20 nt, Human
gccauguuggccaggcuggu

SEQ ID NO: 773585 - RNA, 20 nt, Human
gccucagccucccaaguagc

SEQ ID NO: 773586 - RNA, 24 nt, Human
gcgauucuccugccucagccuccc

SEQ ID NO: 773587 - RNA, 25 nt, Human
gcucuauugcccaggcuugcaugca

SEQ ID NO: 773588 - RNA, 23 nt, Human
gcuggucucgaacuccuggccuc

SEQ ID NO: 773589 - RNA, 24 nt, Human
ggccucagaugauccgcccaccuu

SEQ ID NO: 773590 - RNA, 24 nt, Human
ggcuggucucgaacuccugaucuc

SEQ ID NO: 773591 - RNA, 24 nt, Human
ggcuggucucgaacuccuggccuc

SEQ ID NO: 773592 - RNA, 22 nt, Human
ggguuuugccauguuggccagg

SEQ ID NO: 773593 - RNA, 23 nt, Human
gguuugaguuaccuccuucagcc

SEQ ID NO: 773594 - RNA, 21 nt, Human
guaacaaccguuccccugaaa

SEQ ID NO: 773595 - RNA, 23 nt, Human
guagagacaggguuuugccaugu

SEQ ID NO: 773596 - RNA, 21 nt, Human
gucccgggaaaaacaaacccu

SEQ ID NO: 773597 - RNA, 24 nt, Human
gugauccaccugccucggccuccc

SEQ ID NO: 773598 - RNA, 18 nt, Human
gugguuuuguuucucaag

SEQ ID NO: 773599 - RNA, 22 nt, Human
guuuuguuuccuuccagaggga

SEQ ID NO: 773600 - RNA, 19 nt, Human
uaaaauuucucaagguaua

SEQ ID NO: 773601 - RNA, 21 nt, Human
uaaauaaagguaaagcuguuu

SEQ ID NO: 773602 - RNA, 19 nt, Human
uaacuuuuugcuauuggaa

SEQ ID NO: 773603 - RNA, 23 nt, Human
uaauuauuguauuuuuaguagag

SEQ ID NO: 773604 - RNA, 24 nt, Human
uaauuauuguauuuuuaguagaga

SEQ ID NO: 773605 - RNA, 18 nt, Human
uacacagauugucccggg

SEQ ID NO: 773606 - RNA, 24 nt, Human
uacacagauugucccgggaagcgu

SEQ ID NO: 773607 - RNA, 23 nt, Human
uacagauucauccuauaacuggu

SEQ ID NO: 773608 - RNA, 19 nt, Human
uacaggcgugagccacugc

SEQ ID NO: 773609 - RNA, 23 nt, Human
uacaggcgugagccacugcgccc

SEQ ID NO: 773610 - RNA, 24 nt, Human
uaccauaggaaauuugaagaaaua

SEQ ID NO: 773611 - RNA, 27 nt, Human
uaccuaaaauguacauuccuaaauaaa

SEQ ID NO: 773612 - RNA, 21 nt, Human
uaccuaugauaaagacuccaa

SEQ ID NO: 773613 - RNA, 20 nt, Human
uacugggauuacaggcauga

SEQ ID NO: 773614 - RNA, 22 nt, Human
uagaaaaaggcugaauuaacac

SEQ ID NO: 773615 - RNA, 20 nt, Human
uagagacaggguuucaccau

SEQ ID NO: 773616 - RNA, 22 nt, Human
uagagacaggguuuugccaugu

SEQ ID NO: 773617 - RNA, 24 nt, Human
uaguagagacaggguuucaccaug

SEQ ID NO: 773618 - RNA, 26 nt, Human
uaguagagacaggguuucaccaugcu

SEQ ID NO: 773619 - RNA, 24 nt, Human
uaguagagacaggguuuugccaug

SEQ ID NO: 773620 - RNA, 22 nt, Human
uauaauuaugaaaaaauaugcc

SEQ ID NO: 773621 - RNA, 24 nt, Human
uauaauuaugaaaaaauaugccuc

SEQ ID NO: 773622 - RNA, 21 nt, Human
uaucacuacuaucugucccgg

SEQ ID NO: 773623 - RNA, 19 nt, Human
ucaagcgauucuccugccu

SEQ ID NO: 773624 - RNA, 18 nt, Human
ucacccaggcuggagugc

SEQ ID NO: 773625 - RNA, 21 nt, Human
ucaccccagaccacacacaaa

SEQ ID NO: 773626 - RNA, 18 nt, Human
ucacugcaaccucugccu

SEQ ID NO: 773627 - RNA, 19 nt, Human
ucacugcaaccucugccug

SEQ ID NO: 773628 - RNA, 24 nt, Human
ucacugcaaccucugccugccggg

SEQ ID NO: 773629 - RNA, 24 nt, Human
ucacugcaaucacugccuccuggg

SEQ ID NO: 773630 - RNA, 19 nt, Human
ucacugccuccuggguuca

SEQ ID NO: 773631 - RNA, 18 nt, Human
ucagccucccaaguagcu

SEQ ID NO: 773632 - RNA, 20 nt, Human
ucagccucccaaguagcugg

SEQ ID NO: 773633 - RNA, 21 nt, Human
ucaggugauccaccugccucg

SEQ ID NO: 773634 - RNA, 23 nt, Human
ucauucugggugaugauggggag

SEQ ID NO: 773635 - RNA, 21 nt, Human
uccaaacuauauauagaaaca

SEQ ID NO: 773636 - RNA, 27 nt, Human
uccaugaucaagauaauaccggggucc

SEQ ID NO: 773637 - RNA, 24 nt, Human
ucccaaaauguugggauuacaggc

SEQ ID NO: 773638 - RNA, 24 nt, Human
ucccaaaguacugggauuacaggc

SEQ ID NO: 773639 - RNA, 23 nt, Human
ucccaaguagcugggaugacagg

SEQ ID NO: 773640 - RNA, 20 nt, Human
ucccucugucacccaggcug

SEQ ID NO: 773641 - RNA, 24 nt, Human
ucccucugucacccaggcuggagu

SEQ ID NO: 773642 - RNA, 19 nt, Human
uccguucucauucugggug

SEQ ID NO: 773643 - RNA, 21 nt, Human
uccuggguucaagcgauucuc

SEQ ID NO: 773644 - RNA, 24 nt, Human
uccuggguucaagcgauucuccug

SEQ ID NO: 773645 - RNA, 22 nt, Human
ucucccucugucacccaggcug

SEQ ID NO: 773646 - RNA, 23 nt, Human
ucucccucugucacccaggcugg

SEQ ID NO: 773647 - RNA, 24 nt, Human
ucucccucugucacccaggcugga

SEQ ID NO: 773648 - RNA, 21 nt, Human
ucuccugccucagcccugagu

SEQ ID NO: 773649 - RNA, 26 nt, Human
ucuccugccucagccucccaaguagc

SEQ ID NO: 773650 - RNA, 19 nt, Human
ucucgaacuccugaucuca

SEQ ID NO: 773651 - RNA, 20 nt, Human
ucucgaacuccuggccucag

SEQ ID NO: 773652 - RNA, 19 nt, Human
ucucgcucuauugcccagg

SEQ ID NO: 773653 - RNA, 24 nt, Human
ucucgcucuauugcccaggcuugc

SEQ ID NO: 773654 - RNA, 25 nt, Human
ucucgcucuauugcccaggcuugca

SEQ ID NO: 773655 - RNA, 19 nt, Human
ucugauagcagcacugcug

SEQ ID NO: 773656 - RNA, 24 nt, Human
ucugucacccaggcuggagugcag

SEQ ID NO: 773657 - RNA, 25 nt, Human
ugaaaaaacgaacaaaauccauuag

SEQ ID NO: 773658 - RNA, 19 nt, Human
ugaaaaaauccagaccaca

SEQ ID NO: 773659 - RNA, 18 nt, Human
ugacccuggauuuuuccc

SEQ ID NO: 773660 - RNA, 19 nt, Human
ugacccuggauuuuucccu

SEQ ID NO: 773661 - RNA, 22 nt, Human
ugagacggagucucccucuguc

SEQ ID NO: 773662 - RNA, 20 nt, Human
ugaguuuuguuuuguuuugu

SEQ ID NO: 773663 - RNA, 24 nt, Human
ugauccgcccaccuuggccuccca

SEQ ID NO: 773664 - RNA, 24 nt, Human
ugaucucaggugauccaccugccu

SEQ ID NO: 773665 - RNA, 20 nt, Human
ugauuguaacuaaguaacaa

SEQ ID NO: 773666 - RNA, 23 nt, Human
ugcacuaucacuacuaucugucc

SEQ ID NO: 773667 - RNA, 22 nt, Human
ugcagcagggcgaucucggcuc

SEQ ID NO: 773668 - RNA, 22 nt, Human
ugcaguggugcuaucucagcuc

SEQ ID NO: 773669 - RNA, 24 nt, Human
ugccauguuggccaggcuggucuc

SEQ ID NO: 773670 - RNA, 27 nt, Human
ugccauguuggccaggcuggucucgaa

SEQ ID NO: 773671 - RNA, 24 nt, Human
ugcccaggcuugcaugcaguggug

SEQ ID NO: 773672 - RNA, 24 nt, Human
ugccggguucaagcaauucuccug

SEQ ID NO: 773673 - RNA, 19 nt, Human
ugccucagcccugaguagc

SEQ ID NO: 773674 - RNA, 22 nt, Human
ugccucagcccugaguagcugg

SEQ ID NO: 773675 - RNA, 24 nt, Human
ugccucagccucccaaguagcugg

SEQ ID NO: 773676 - RNA, 24 nt, Human
ugccucggccucccaaaguacugg

SEQ ID NO: 773677 - RNA, 18 nt, Human
ugcuggccaggcuggucu

SEQ ID NO: 773678 - RNA, 22 nt, Human
uggaaaagaaauacaaaucuuu

SEQ ID NO: 773679 - RNA, 24 nt, Human
uggagugcagcagggcgaucucgg

SEQ ID NO: 773680 - RNA, 24 nt, Human
uggccaggcuggucucgaacuccu

SEQ ID NO: 773681 - RNA, 24 nt, Human
uggccaggcuggucucgaacuccu

SEQ ID NO: 773682 - RNA, 18 nt, Human
uggccucagaugauccgc

SEQ ID NO: 773683 - RNA, 21 nt, Human
ugggacuacaggcacgcacca

SEQ ID NO: 773684 - RNA, 24 nt, Human
ugggacuacaggcacgcaccacca

SEQ ID NO: 773685 - RNA, 21 nt, Human
ugggaugacaggugcccgcca

SEQ ID NO: 773686 - RNA, 22 nt, Human
ugggaugacaggugcccgccac

SEQ ID NO: 773687 - RNA, 18 nt, Human
ugggauuacaggcaugau

SEQ ID NO: 773688 - RNA, 21 nt, Human
ugggauuacaggcaugaucua

SEQ ID NO: 773689 - RNA, 19 nt, Human
ugggauuacaggcgugagc

SEQ ID NO: 773690 - RNA, 21 nt, Human
ugggauuacaggcgugagcca

SEQ ID NO: 773691 - RNA, 22 nt, Human
ugggauuacaggcgugagccac

SEQ ID NO: 773692 - RNA, 22 nt, Human
ugggauuacaggcgugagccac

SEQ ID NO: 773693 - RNA, 24 nt, Human
ugggauuacaggcgugagccacug

SEQ ID NO: 773694 - RNA, 26 nt, Human
ugggauuacaggcgugagccacugcg

SEQ ID NO: 773695 - RNA, 23 nt, Human
uggguucaagcgauucuccugcc

SEQ ID NO: 773696 - RNA, 24 nt, Human
uggugcuaucucagcucacugcaa

SEQ ID NO: 773697 - RNA, 19 nt, Human
uuaaacccgugguuucuca

SEQ ID NO: 773698 - RNA, 24 nt, Human
uuaguagagacaggguuucaccau

SEQ ID NO: 773699 - RNA, 24 nt, Human
uuaguagagacaggguuuugccau

SEQ ID NO: 773700 - RNA, 21 nt, Human
uucaagcaauucuccugccuc

SEQ ID NO: 773701 - RNA, 24 nt, Human
uucaagcaauucuccugccucagc

SEQ ID NO: 773702 - RNA, 21 nt, Human
uucaagcgauucuccugccuc

SEQ ID NO: 773703 - RNA, 23 nt, Human
uucaagcgauucuccugccucag

SEQ ID NO: 773704 - RNA, 24 nt, Human
uucaagcgauucuccugccucagc

SEQ ID NO: 773705 - RNA, 18 nt, Human
uuccuaaauaaagguaaa

SEQ ID NO: 773706 - RNA, 19 nt, Human
uuccuauucuuuuguuuuu

SEQ ID NO: 773707 - RNA, 21 nt, Human
uuccuauucuuuuguuuuugu

SEQ ID NO: 773708 - RNA, 23 nt, Human
uuccuccugugguuuuguuucuc

SEQ ID NO: 773709 - RNA, 29 nt, Human
uucuuccuuuccuccugugguuuuguuuc

SEQ ID NO: 773710 - RNA, 26 nt, Human
uugaagaaauaacaaauuguguaaag

SEQ ID NO: 773711 - RNA, 24 nt, Human
uugccauguuggccaggcuggucu

SEQ ID NO: 773712 - RNA, 23 nt, Human
uuguuuuguuuuguuuccuucca

SEQ ID NO: 773713 - RNA, 22 nt, Human
uuucaaaauaacuaaaacaaac

SEQ ID NO: 773714 - RNA, 21 nt, Human
uuucaccaugcuggccaggcu

SEQ ID NO: 773715 - RNA, 26 nt, Human
uuucucaagacauauaggugguucca

SEQ ID NO: 773716 - RNA, 18 nt, Human
uuuguuuuguuuuguuuc

SEQ ID NO: 773717 - RNA, 23 nt, Human
uuuucuagcaaugaacaugacuu

SEQ ID NO: 773718 - RNA, 23 nt, Human
uuuugccauguuggccaggcugg

SEQ ID NO: 773719 - RNA, 21 nt, Human
uuuuuaguagagacaggguuu

SEQ ID NO: 773720 - RNA, 24 nt, Human
uuuuuaguagagacaggguuucac

SEQ ID NO: 773721 - RNA, 24 nt, Human
uuuuuaguagagacaggguuuugc

SEQ ID NO: 773722 - RNA, 27 nt, Human
uuuuucuuccuuuccuccugugguuuu

SEQ ID NO: 773723 - RNA, 21 nt, Human
uuuuuguauuuuuaguagaga

SEQ ID NO: 773724 - RNA, 24 nt, Human
uuuuuuguauuuuuaguagagaca

SEQ ID NO: 773725 - RNA, 23 nt, Human
aaaacacaacagcagcuguucaa

SEQ ID NO: 773726 - RNA, 18 nt, Human
aaaaccaaagauauaacc

SEQ ID NO: 773727 - RNA, 23 nt, Human
aaacaagcacauauaccauaaaa

SEQ ID NO: 773728 - RNA, 19 nt, Human
aaacagaugagacauaaaa

SEQ ID NO: 773729 - RNA, 18 nt, Human
aaaugggcacauaugcau

SEQ ID NO: 773730 - RNA, 18 nt, Human
aagagccagaaacuaaau

SEQ ID NO: 773731 - RNA, 18 nt, Human
aagggaacauuaaguuuc

SEQ ID NO: 773732 - RNA, 21 nt, Human
aaucucuuccugcaagaucuc

SEQ ID NO: 773733 - RNA, 20 nt, Human
agaaaacaagcacauauacc

SEQ ID NO: 773734 - RNA, 21 nt, Human
agaaaacaagcacauauacca

SEQ ID NO: 773735 - RNA, 22 nt, Human
agaaaacaagcacauauaccau

SEQ ID NO: 773736 - RNA, 18 nt, Human
agaugaucaagcaucccc

SEQ ID NO: 773737 - RNA, 20 nt, Human
agcaaaaaccacccugccau

SEQ ID NO: 773738 - RNA, 24 nt, Human
aggaaaaacagaugagacauaaaa

SEQ ID NO: 773739 - RNA, 21 nt, Human
agguaaaaaucugugaacaac

SEQ ID NO: 773740 - RNA, 18 nt, Human
aguaauauguauacuuga

SEQ ID NO: 773741 - RNA, 19 nt, Human
aguucaggauauguuuuuu

SEQ ID NO: 773742 - RNA, 18 nt, Human
auaaaugcuaaaauaaca

SEQ ID NO: 773743 - RNA, 22 nt, Human
auacaaauaacugagaaguuaa

SEQ ID NO: 773744 - RNA, 22 nt, Human
aucaaaaguaacauguauccau

SEQ ID NO: 773745 - RNA, 23 nt, Human
augauaaugaauggcacauuauc

SEQ ID NO: 773746 - RNA, 22 nt, Human
auguguguguguauauauaugu

SEQ ID NO: 773747 - RNA, 24 nt, Human
auuaguauuuuuuccauuaagcag

SEQ ID NO: 773748 - RNA, 18 nt, Human
auucugauuccccugcuu

SEQ ID NO: 773749 - RNA, 24 nt, Human
caaaaauguuuagauacccuaaca

SEQ ID NO: 773750 - RNA, 19 nt, Human
caaaauaggcuaaagauua

SEQ ID NO: 773751 - RNA, 18 nt, Human
caaagggcaguggagcua

SEQ ID NO: 773752 - RNA, 22 nt, Human
caagcacauauaccauaaaagc

SEQ ID NO: 773753 - RNA, 22 nt, Human
cacaaacacauuuccauaacuu

SEQ ID NO: 773754 - RNA, 21 nt, Human
cacacucaaaaauguuuagau

SEQ ID NO: 773755 - RNA, 21 nt, Human
cacacucucacuacacacaca

SEQ ID NO: 773756 - RNA, 18 nt, Human
cacccugccauucaauuu

SEQ ID NO: 773757 - RNA, 20 nt, Human
cacuauuaagcugagaaaac

SEQ ID NO: 773758 - RNA, 23 nt, Human
cacugcagguuucaauacaccuu

SEQ ID NO: 773759 - RNA, 27 nt, Human
cagaaaacaagcacauauaccauaaaa

SEQ ID NO: 773760 - RNA, 21 nt, Human
cccaugcuacugucuuacuuc

SEQ ID NO: 773761 - RNA, 19 nt, Human
cccgcagcggccgccgaga

SEQ ID NO: 773762 - RNA, 18 nt, Human
ccgcagggccccuuccgc

SEQ ID NO: 773763 - RNA, 23 nt, Human
ccggcuuccgagagagggagucu

SEQ ID NO: 773764 - RNA, 21 nt, Human
ccuaaaaaugcagcuucccau

SEQ ID NO: 773765 - RNA, 22 nt, Human
ccugcagccgcggucucccggc

SEQ ID NO: 773766 - RNA, 20 nt, Human
ccuuuuaaaagacaaacaca

SEQ ID NO: 773767 - RNA, 20 nt, Human
cgagaccuccgcguuggucg

SEQ ID NO: 773768 - RNA, 19 nt, Human
cgccgagaccuccgcguug

SEQ ID NO: 773769 - RNA, 18 nt, Human
cggagaagcuccggggcg

SEQ ID NO: 773770 - RNA, 22 nt, Human
cggccacccccgucgacgacgu

SEQ ID NO: 773771 - RNA, 24 nt, Human
cguuucuaaauauauauaugugug

SEQ ID NO: 773772 - RNA, 21 nt, Human
cuaagagccagaaacuaaauc

SEQ ID NO: 773773 - RNA, 23 nt, Human
cucaacucuuucaauuauaucaa

SEQ ID NO: 773774 - RNA, 25 nt, Human
cuggcuccugcccuuaccccaguuc

SEQ ID NO: 773775 - RNA, 20 nt, Human
gaaaaucccuaaaacuagua

SEQ ID NO: 773776 - RNA, 24 nt, Human
gaaagguuugucacauaaacaguu

SEQ ID NO: 773777 - RNA, 19 nt, Human
gacaaaacaaaaaauaggc

SEQ ID NO: 773778 - RNA, 21 nt, Human
gagucuucuccgugcucagcu

SEQ ID NO: 773779 - RNA, 18 nt, Human
gcaaaaaccacccugcca

SEQ ID NO: 773780 - RNA, 23 nt, Human
gcaaccccaaccuaauuucacaa

SEQ ID NO: 773781 - RNA, 19 nt, Human
gcaggauuuuauauaucug

SEQ ID NO: 773782 - RNA, 19 nt, Human
gccccuuccgccuccguuc

SEQ ID NO: 773783 - RNA, 18 nt, Human
gcuuguaagcaaaaacca

SEQ ID NO: 773784 - RNA, 21 nt, Human
ggaaaaacagaugagacauaa

SEQ ID NO: 773785 - RNA, 18 nt, Human
ggaaaagucaaaacaaaa

SEQ ID NO: 773786 - RNA, 22 nt, Human
guaagcaaaaaccacccugcca

SEQ ID NO: 773787 - RNA, 18 nt, Human
uaaaagacaaacacaaau

SEQ ID NO: 773788 - RNA, 20 nt, Human
uaaaagacaaacacaaauga

SEQ ID NO: 773789 - RNA, 22 nt, Human
uaaaagacaaacacaaaugaga

SEQ ID NO: 773790 - RNA, 21 nt, Human
uaaaagauguugcaaccccaa

SEQ ID NO: 773791 - RNA, 18 nt, Human
uaaaauacaugccagcau

SEQ ID NO: 773792 - RNA, 21 nt, Human
uaaacugaaugagacaaaaca

SEQ ID NO: 773793 - RNA, 23 nt, Human
uaaaugcuaaaauaacauuuaac

SEQ ID NO: 773794 - RNA, 18 nt, Human
uaagcugagaaaacagga

SEQ ID NO: 773795 - RNA, 24 nt, Human
uaagcugagaaaacaggaauaacc

SEQ ID NO: 773796 - RNA, 24 nt, Human
uaauauguauacuugaaccuuaca

SEQ ID NO: 773797 - RNA, 18 nt, Human
uacaggaagaguuuuccu

SEQ ID NO: 773798 - RNA, 19 nt, Human
uacauauacacauauauau

SEQ ID NO: 773799 - RNA, 21 nt, Human
uaccauaaaagcuaaaaugaa

SEQ ID NO: 773800 - RNA, 24 nt, Human
uacuggaaauaauauuguuuuagc

SEQ ID NO: 773801 - RNA, 21 nt, Human
uagaaaacacuguggcaauaa

SEQ ID NO: 773802 - RNA, 21 nt, Human
uagauacccuaacaagaguuu

SEQ ID NO: 773803 - RNA, 21 nt, Human
uagcuaagcuuccuaguaauu

SEQ ID NO: 773804 - RNA, 21 nt, Human
uaggagagguuuuacuggaaa

SEQ ID NO: 773805 - RNA, 21 nt, Human
uauaaagcauaauaaauuuua

SEQ ID NO: 773806 - RNA, 19 nt, Human
uauacauauacacauauau

SEQ ID NO: 773807 - RNA, 20 nt, Human
uauacauauacacauauaua

SEQ ID NO: 773808 - RNA, 22 nt, Human
uauauauauguguauacauaua

SEQ ID NO: 773809 - RNA, 24 nt, Human
uauauauauguguguguguauaua

SEQ ID NO: 773810 - RNA, 18 nt, Human
uauauauguguauacaua

SEQ ID NO: 773811 - RNA, 20 nt, Human
uauaucuuauagacucaaaa

SEQ ID NO: 773812 - RNA, 21 nt, Human
uauaucuuauagacucaaaau

SEQ ID NO: 773813 - RNA, 22 nt, Human
uauauguguauacauauacaca

SEQ ID NO: 773814 - RNA, 18 nt, Human
uauguguauacauauaca

SEQ ID NO: 773815 - RNA, 22 nt, Human
uauguguauacauauacacaua

SEQ ID NO: 773816 - RNA, 26 nt, Human
uauguguauacauauacacauauaua

SEQ ID NO: 773817 - RNA, 23 nt, Human
uauguguguguguauauauaugu

SEQ ID NO: 773818 - RNA, 21 nt, Human
uauugaaagaauaaaguacag

SEQ ID NO: 773819 - RNA, 22 nt, Human
uauuggccuuuuaaaagacaaa

SEQ ID NO: 773820 - RNA, 19 nt, Human
ucacagguucacacuucca

SEQ ID NO: 773821 - RNA, 21 nt, Human
ucagcucccacggccaccccc

SEQ ID NO: 773822 - RNA, 21 nt, Human
uccauauucagaaaacaagca

SEQ ID NO: 773823 - RNA, 19 nt, Human
ugaaagaauaaaguacagg

SEQ ID NO: 773824 - RNA, 21 nt, Human
ugaaauaguacauacuagaug

SEQ ID NO: 773825 - RNA, 24 nt, Human
ugaaauuuuuuuguauuaacuucc

SEQ ID NO: 773826 - RNA, 22 nt, Human
ugaauguaaauuaaauuccagu

SEQ ID NO: 773827 - RNA, 21 nt, Human
ugaggcacuauuaagcugaga

SEQ ID NO: 773828 - RNA, 23 nt, Human
ugagucuaagagccagaaacuaa

SEQ ID NO: 773829 - RNA, 22 nt, Human
ugcagcuucccaucugaaaauc

SEQ ID NO: 773830 - RNA, 26 nt, Human
ugcagcuucccaucugaaaaucccua

SEQ ID NO: 773831 - RNA, 19 nt, Human
ugccacaaacacauuucca

SEQ ID NO: 773832 - RNA, 19 nt, Human
uggcuccugcccuuacccc

SEQ ID NO: 773833 - RNA, 18 nt, Human
uguaagcaaaaaccaccc

SEQ ID NO: 773834 - RNA, 22 nt, Human
uguauacauauacacauauaua

SEQ ID NO: 773835 - RNA, 18 nt, Human
uguauauauauguguaua

SEQ ID NO: 773836 - RNA, 21 nt, Human
uguauauauauguguauacau

SEQ ID NO: 773837 - RNA, 24 nt, Human
uguauauauauguguauacauaua

SEQ ID NO: 773838 - RNA, 18 nt, Human
ugugcaaaacaaaugaaa

SEQ ID NO: 773839 - RNA, 19 nt, Human
ugugcaaaacaaaugaaau

SEQ ID NO: 773840 - RNA, 18 nt, Human
uguguauauauaugugua

SEQ ID NO: 773841 - RNA, 20 nt, Human
uguguauauauauguguaua

SEQ ID NO: 773842 - RNA, 22 nt, Human
uguguauauauauguguauaca

SEQ ID NO: 773843 - RNA, 24 nt, Human
uguguauauauauguguauacaua

SEQ ID NO: 773844 - RNA, 22 nt, Human
uguguguguauauauaugugua

SEQ ID NO: 773845 - RNA, 23 nt, Human
uguguguguauauauauguguau

SEQ ID NO: 773846 - RNA, 22 nt, Human
uguguguguguauauauaugug

SEQ ID NO: 773847 - RNA, 25 nt, Human
uguguguguguauauauauguguca

SEQ ID NO: 773848 - RNA, 20 nt, Human
uguuuuugccuuaaaauuca

SEQ ID NO: 773849 - RNA, 18 nt, Human
uuaaaagauaaaauacca

SEQ ID NO: 773850 - RNA, 22 nt, Human
uuacaaguuaauccuaaaguca

SEQ ID NO: 773851 - RNA, 19 nt, Human
uuagaaggcaugucuaaaa

SEQ ID NO: 773852 - RNA, 25 nt, Human
uuagcagguaaaaaucugugaacaa

SEQ ID NO: 773853 - RNA, 21 nt, Human
uucaagggguguaacacaggu

SEQ ID NO: 773854 - RNA, 22 nt, Human
uuccugcagccgcggucucccg

SEQ ID NO: 773855 - RNA, 23 nt, Human
uugaaaauaacauucugauuccc

SEQ ID NO: 773856 - RNA, 19 nt, Human
uuuccauaacuugaaaaug

SEQ ID NO: 773857 - RNA, 28 nt, Human
uuugcauaucucaguucaggauauguuu

SEQ ID NO: 773858 - RNA, 18 nt, Human
aaaacacagaaaccugug

SEQ ID NO: 773859 - RNA, 19 nt, Human
aaaacacagaaaccugugg

SEQ ID NO: 773860 - RNA, 19 nt, Human
aacacacaaaagcuaaaag

SEQ ID NO: 773861 - RNA, 23 nt, Human
aagcaaaacacagaaaccugugg

SEQ ID NO: 773862 - RNA, 25 nt, Human
aagcaaaacacagaaaccuguggca

SEQ ID NO: 773863 - RNA, 21 nt, Human
aaggaccugguaucggcuuua

SEQ ID NO: 773864 - RNA, 24 nt, Human
acacacaaaagcuaaaaggcaccc

SEQ ID NO: 773865 - RNA, 20 nt, Human
acagaaaccuguggcauggg

SEQ ID NO: 773866 - RNA, 21 nt, Human
acagacacugaaauaccaccc

SEQ ID NO: 773867 - RNA, 19 nt, Human
acagcuuuggacguggccg

SEQ ID NO: 773868 - RNA, 22 nt, Human
accuacuucugcaccaaccgcu

SEQ ID NO: 773869 - RNA, 22 nt, Human
acgcccauuucaacacacaaaa

SEQ ID NO: 773870 - RNA, 22 nt, Human
acuccagcccaggugacagagc

SEQ ID NO: 773871 - RNA, 24 nt, Human
acuggacuccagcccaggugacag

SEQ ID NO: 773872 - RNA, 23 nt, Human
agagaggaagaggacaaagccag

SEQ ID NO: 773873 - RNA, 20 nt, Human
agaucacaucccagggccca

SEQ ID NO: 773874 - RNA, 19 nt, Human
agcgaggagcugaggaggg

SEQ ID NO: 773875 - RNA, 21 nt, Human
aggcccccccaccucggggcc

SEQ ID NO: 773876 - RNA, 21 nt, Human
agggagcgucucucugugcug

SEQ ID NO: 773877 - RNA, 24 nt, Human
aggggcacaguucuauugccacca

SEQ ID NO: 773878 - RNA, 24 nt, Human
agggguuggaggcuacagugagcu

SEQ ID NO: 773879 - RNA, 25 nt, Human
agggguuggaggcuacagugagcua

SEQ ID NO: 773880 - RNA, 19 nt, Human
aguguaaucuguggccgcc

SEQ ID NO: 773881 - RNA, 23 nt, Human
aucacgccacuggacuccagccc

SEQ ID NO: 773882 - RNA, 21 nt, Human
caaaacacagaaaccuguggc

SEQ ID NO: 773883 - RNA, 24 nt, Human
caaaacacagaaaccuguggcaug

SEQ ID NO: 773884 - RNA, 19 nt, Human
caauaaaguucccucucug

SEQ ID NO: 773885 - RNA, 21 nt, Human
cacacaaaagcuaaaaggcac

SEQ ID NO: 773886 - RNA, 22 nt, Human
cacacaaaagcuaaaaggcacc

SEQ ID NO: 773887 - RNA, 23 nt, Human
caccaggcugugccccuggccgc

SEQ ID NO: 773888 - RNA, 18 nt, Human
caccuuuagaagcugucc

SEQ ID NO: 773889 - RNA, 24 nt, Human
cacuggacuccagcccaggugaca

SEQ ID NO: 773890 - RNA, 22 nt, Human
cagggcaaggugguuauaaacc

SEQ ID NO: 773891 - RNA, 21 nt, Human
cagggguuggaggcuacagug

SEQ ID NO: 773892 - RNA, 19 nt, Human
cagucgacuggauccaggu

SEQ ID NO: 773893 - RNA, 22 nt, Human
caucggccccacuuccugccuc

SEQ ID NO: 773894 - RNA, 22 nt, Human
cauuccacgaaguggucugggu

SEQ ID NO: 773895 - RNA, 24 nt, Human
ccaccaggcugugccccuggccgc

SEQ ID NO: 773896 - RNA, 19 nt, Human
ccaccucggggccuugacu

SEQ ID NO: 773897 - RNA, 20 nt, Human
ccacuggacuccagcccagg

SEQ ID NO: 773898 - RNA, 20 nt, Human
ccacuggacuccagcccagg

SEQ ID NO: 773899 - RNA, 21 nt, Human
ccacuggacuccagcccaggu

SEQ ID NO: 773900 - RNA, 24 nt, Human
ccacuggacuccagcccaggugac

SEQ ID NO: 773901 - RNA, 21 nt, Human
ccagcccacaugaggggcaag

SEQ ID NO: 773902 - RNA, 22 nt, Human
ccagcccaggugacagagccuc

SEQ ID NO: 773903 - RNA, 18 nt, Human
ccagugggugccacuugg

SEQ ID NO: 773904 - RNA, 19 nt, Human
cccacagagcucacagccu

SEQ ID NO: 773905 - RNA, 22 nt, Human
cccacuuccugccucaugcccc

SEQ ID NO: 773906 - RNA, 23 nt, Human
cccccaccucggggccuugacuc

SEQ ID NO: 773907 - RNA, 21 nt, Human
ccccggggugcugcuggcccc

SEQ ID NO: 773908 - RNA, 25 nt, Human
ccccuggccgccagugggugccacu

SEQ ID NO: 773909 - RNA, 23 nt, Human
ccgcacccccaccccucaccaaa

SEQ ID NO: 773910 - RNA, 24 nt, Human
ccggcacuggcuaacugagcucug

SEQ ID NO: 773911 - RNA, 23 nt, Human
ccuccagagaggaagaggacaaa

SEQ ID NO: 773912 - RNA, 21 nt, Human
ccuggggaggaagaagggccc

SEQ ID NO: 773913 - RNA, 23 nt, Human
cgccagugggugccacuugggug

SEQ ID NO: 773914 - RNA, 19 nt, Human
cgcucuggacagggccgag

SEQ ID NO: 773915 - RNA, 23 nt, Human
cgggggaaucacagugagucuca

SEQ ID NO: 773916 - RNA, 21 nt, Human
cuaaagcaaaacacagaaacc

SEQ ID NO: 773917 - RNA, 18 nt, Human
cuccccugggcagacccc

SEQ ID NO: 773918 - RNA, 18 nt, Human
cuccuacaggguaccaug

SEQ ID NO: 773919 - RNA, 24 nt, Human
cuccuguaguuccagcugcuuggg

SEQ ID NO: 773920 - RNA, 20 nt, Human
cugaggaggggcacaguucu

SEQ ID NO: 773921 - RNA, 18 nt, Human
cuggaauaggccccccca

SEQ ID NO: 773922 - RNA, 25 nt, Human
cuggccaaaaccagguccuuucuca

SEQ ID NO: 773923 - RNA, 20 nt, Human
cuggggaggaagaagggccc

SEQ ID NO: 773924 - RNA, 22 nt, Human
cugggggcugcugggcggcggg

SEQ ID NO: 773925 - RNA, 22 nt, Human
cuggugugagcagagccaggga

SEQ ID NO: 773926 - RNA, 24 nt, Human
cuugucugucuuuuuucuuccugu

SEQ ID NO: 773927 - RNA, 23 nt, Human
cuugugaagggccuucuggagcc

SEQ ID NO: 773928 - RNA, 21 nt, Human
cuuuuaguaaugugcuagaaa

SEQ ID NO: 773929 - RNA, 18 nt, Human
gaagcaguagcagugaca

SEQ ID NO: 773930 - RNA, 24 nt, Human
gacaaagccagucugacucccggg

SEQ ID NO: 773931 - RNA, 19 nt, Human
gaccugguggccgcacccc

SEQ ID NO: 773932 - RNA, 25 nt, Human
gaggaagaagggcccaggcgaggcc

SEQ ID NO: 773933 - RNA, 23 nt, Human
gaggcuacagugagcuaugauca

SEQ ID NO: 773934 - RNA, 24 nt, Human
gaucacuugagcccagggguugga

SEQ ID NO: 773935 - RNA, 22 nt, Human
gaugcucaggucagagacucac

SEQ ID NO: 773936 - RNA, 19 nt, Human
gcccaggugacagagccuc

SEQ ID NO: 773937 - RNA, 18 nt, Human
gccgcagggagagggggc

SEQ ID NO: 773938 - RNA, 19 nt, Human
gcggcugccugggggcugc

SEQ ID NO: 773939 - RNA, 22 nt, Human
gcugaguugucgcugcugcucu

SEQ ID NO: 773940 - RNA, 19 nt, Human
ggcccagaugcucagguca

SEQ ID NO: 773941 - RNA, 21 nt, Human
ggcccccccaccucggggccu

SEQ ID NO: 773942 - RNA, 23 nt, Human
ggccgcagggagagggggcggga

SEQ ID NO: 773943 - RNA, 19 nt, Human
ggccggggccacggggcug

SEQ ID NO: 773944 - RNA, 19 nt, Human
ggcugugccccuggccgcc

SEQ ID NO: 773945 - RNA, 23 nt, Human
gggaagcgaggagcugaggaggg

SEQ ID NO: 773946 - RNA, 22 nt, Human
gggaggaucacuugagcccagg

SEQ ID NO: 773947 - RNA, 19 nt, Human
gggccgagaucccacuccu

SEQ ID NO: 773948 - RNA, 21 nt, Human
gggccgcagggagagggggcg

SEQ ID NO: 773949 - RNA, 23 nt, Human
gggcugcugggcggcgggggcug

SEQ ID NO: 773950 - RNA, 20 nt, Human
ggggaggaucacuugagccc

SEQ ID NO: 773951 - RNA, 24 nt, Human
ggggcugcugggcggcgggggcug

SEQ ID NO: 773952 - RNA, 18 nt, Human
gggguuggaggcuacagu

SEQ ID NO: 773953 - RNA, 24 nt, Human
gggugggaggcuugcagagccaag

SEQ ID NO: 773954 - RNA, 23 nt, Human
gguaccauggugggaggaggggu

SEQ ID NO: 773955 - RNA, 18 nt, Human
gguauuugucagguccug

SEQ ID NO: 773956 - RNA, 22 nt, Human
ggugcugcuggccccuccacgu

SEQ ID NO: 773957 - RNA, 18 nt, Human
gguggcgacguuaacuga

SEQ ID NO: 773958 - RNA, 20 nt, Human
gucuggguugcagacaucgg

SEQ ID NO: 773959 - RNA, 21 nt, Human
gugcacacgugugaaggaccu

SEQ ID NO: 773960 - RNA, 25 nt, Human
guggcaugggccgcagggagagggg

SEQ ID NO: 773961 - RNA, 24 nt, Human
uaaaaggcacccaauugugcaaua

SEQ ID NO: 773962 - RNA, 18 nt, Human
uaaagcaaaacacagaaa

SEQ ID NO: 773963 - RNA, 22 nt, Human
uaaagcaaaacacagaaaccug

SEQ ID NO: 773964 - RNA, 25 nt, Human
uaaagcaaaacacagaaaccugugg

SEQ ID NO: 773965 - RNA, 19 nt, Human
uaaccucaaugacaagggc

SEQ ID NO: 773966 - RNA, 21 nt, Human
uaaccucaaugacaagggcac

SEQ ID NO: 773967 - RNA, 21 nt, Human
uagauccugggcacugguccc

SEQ ID NO: 773968 - RNA, 18 nt, Human
uaggaaacaaaccaccag

SEQ ID NO: 773969 - RNA, 22 nt, Human
uaggaagagcucagaccuggug

SEQ ID NO: 773970 - RNA, 23 nt, Human
uaucacagacacugaaauaccac

SEQ ID NO: 773971 - RNA, 21 nt, Human
uaugugcauauacgugaguau

SEQ ID NO: 773972 - RNA, 22 nt, Human
uaugugcauauacgugaguaug

SEQ ID NO: 773973 - RNA, 23 nt, Human
ucaacacacaaaagcuaaaaggc

SEQ ID NO: 773974 - RNA, 24 nt, Human
ucaauaauguguugcuuucccaaa

SEQ ID NO: 773975 - RNA, 27 nt, Human
ucacagacacugaaauaccacccugga

SEQ ID NO: 773976 - RNA, 22 nt, Human
ucagguccuggccaaaaccagg

SEQ ID NO: 773977 - RNA, 19 nt, Human
uccacaguaggaagagcuc

SEQ ID NO: 773978 - RNA, 20 nt, Human
ucccagggcccacagagcuc

SEQ ID NO: 773979 - RNA, 21 nt, Human
ucccuaaagcaaaacacagaa

SEQ ID NO: 773980 - RNA, 22 nt, Human
ucccuaaagcaaaacacagaaa

SEQ ID NO: 773981 - RNA, 22 nt, Human
uccuccggguucugggucccca

SEQ ID NO: 773982 - RNA, 22 nt, Human
uccuggaauaggcccccccacc

SEQ ID NO: 773983 - RNA, 24 nt, Human
ucgcugcugcucuugcucccuggc

SEQ ID NO: 773984 - RNA, 19 nt, Human
ucggccccacuuccugccu

SEQ ID NO: 773985 - RNA, 19 nt, Human
ucggccccacuuccugccu

SEQ ID NO: 773986 - RNA, 18 nt, Human
ucucugugaaagggaggg

SEQ ID NO: 773987 - RNA, 21 nt, Human
ucucugugaaagggagggggu

SEQ ID NO: 773988 - RNA, 21 nt, Human
ucucugugcuguucgcuccug

SEQ ID NO: 773989 - RNA, 18 nt, Human
ucuggacagggccgagau

SEQ ID NO: 773990 - RNA, 23 nt, Human
ucuggaguuaaggaagacagggc

SEQ ID NO: 773991 - RNA, 19 nt, Human
ucugucuuuuuucuuccug

SEQ ID NO: 773992 - RNA, 22 nt, Human
ugacaucaaggaugagagggca

SEQ ID NO: 773993 - RNA, 21 nt, Human
ugagcagagccagggagggug

SEQ ID NO: 773994 - RNA, 19 nt, Human
ugagcuagaucacauccca

SEQ ID NO: 773995 - RNA, 24 nt, Human
ugagcucuggccacaugggcccag

SEQ ID NO: 773996 - RNA, 18 nt, Human
ugcaccaaccgcuccugc

SEQ ID NO: 773997 - RNA, 19 nt, Human
ugccugggggcugcugggc

SEQ ID NO: 773998 - RNA, 24 nt, Human
ugcuauggaaaucucuggugugag

SEQ ID NO: 773999 - RNA, 21 nt, Human
ugcuccucauaccacuccugu

SEQ ID NO: 774000 - RNA, 20 nt, Human
ugcugcugaguugucgcugc

SEQ ID NO: 774001 - RNA, 18 nt, Human
ugcugcuggccccuccac

SEQ ID NO: 774002 - RNA, 19 nt, Human
ugcugggcggcgggggcug

SEQ ID NO: 774003 - RNA, 18 nt, Human
ugcuggguggggccaggc

SEQ ID NO: 774004 - RNA, 24 nt, Human
ugcuggguggggccaggcauaacc

SEQ ID NO: 774005 - RNA, 19 nt, Human
uggaauaggcccccccacc

SEQ ID NO: 774006 - RNA, 21 nt, Human
uggacagggccgagaucccac

SEQ ID NO: 774007 - RNA, 19 nt, Human
uggauccaggugagggguc

SEQ ID NO: 774008 - RNA, 19 nt, Human
uggcaugcuccucauacca

SEQ ID NO: 774009 - RNA, 21 nt, Human
uggcaugggccgcagggagag

SEQ ID NO: 774010 - RNA, 25 nt, Human
uggccaaaaccagguccuuucucag

SEQ ID NO: 774011 - RNA, 24 nt, Human
uggccccuccacguuuccaccccu

SEQ ID NO: 774012 - RNA, 19 nt, Human
uggccgcacccccaccccu

SEQ ID NO: 774013 - RNA, 26 nt, Human
uggccgcacccccaccccucaccaaa

SEQ ID NO: 774014 - RNA, 24 nt, Human
uggcuggacucccgucuguugaca

SEQ ID NO: 774015 - RNA, 25 nt, Human
ugggagcgcuggcggcugccugggg

SEQ ID NO: 774016 - RNA, 18 nt, Human
ugggaggggaagcgagga

SEQ ID NO: 774017 - RNA, 18 nt, Human
uggggaggaagaagggcc

SEQ ID NO: 774018 - RNA, 20 nt, Human
uggggccaggcauaaccugg

SEQ ID NO: 774019 - RNA, 21 nt, Human
uggucaagagcccauuccacg

SEQ ID NO: 774020 - RNA, 20 nt, Human
ugguggaguaaggcuggggc

SEQ ID NO: 774021 - RNA, 20 nt, Human
uggugugagcagagccaggg

SEQ ID NO: 774022 - RNA, 23 nt, Human
uggugugagcagagccagggagg

SEQ ID NO: 774023 - RNA, 22 nt, Human
ugugaagggccuucuggagccu

SEQ ID NO: 774024 - RNA, 20 nt, Human
ugugagccugaagcaguagc

SEQ ID NO: 774025 - RNA, 24 nt, Human
ugugcauauacgugaguaugugua

SEQ ID NO: 774026 - RNA, 21 nt, Human
ugugcuagaaauccagagaca

SEQ ID NO: 774027 - RNA, 27 nt, Human
uguguacacacaccgcaguuccguaca

SEQ ID NO: 774028 - RNA, 24 nt, Human
uuaaccaaaacguuguuuugcuug

SEQ ID NO: 774029 - RNA, 20 nt, Human
uucuggaguuaaggaagaca

SEQ ID NO: 774030 - RNA, 19 nt, Human
uugcucccuggcaugcucc

SEQ ID NO: 774031 - RNA, 26 nt, Human
uuggguaggcugaguggggaggauca

SEQ ID NO: 774032 - RNA, 24 nt, Human
uuucuuccuguauauaaauaugug

SEQ ID NO: 774033 - RNA, 22 nt, Human
uuuuuuuuuuuuacaaagcaga

SEQ ID NO: 774034 - RNA, 24 nt, Human
uuuuuuuuuuuuuuuuuuacaaag

SEQ ID NO: 774035 - RNA, 23 nt, Human
aaaaaaaaaaaaaaaaaaagcau

SEQ ID NO: 774036 - RNA, 21 nt, Human
aaaaaaaaaaaaaaaagcaua

SEQ ID NO: 774037 - RNA, 27 nt, Human
aaaaaaaaaaaaagcauaugauccuaa

SEQ ID NO: 774038 - RNA, 23 nt, Human
aaaaaaacacuuuacacaacaca

SEQ ID NO: 774039 - RNA, 24 nt, Human
aaaaaaugaauuagaugaaaagga

SEQ ID NO: 774040 - RNA, 18 nt, Human
aaaagagaaauauaaaga

SEQ ID NO: 774041 - RNA, 18 nt, Human
aaagaggcaaaauccaaa

SEQ ID NO: 774042 - RNA, 18 nt, Human
aaauguuaaagcuuagca

SEQ ID NO: 774043 - RNA, 22 nt, Human
aacacuuuacacaacacacuuu

SEQ ID NO: 774044 - RNA, 18 nt, Human
aacauggugaaacccugu

SEQ ID NO: 774045 - RNA, 20 nt, Human
aacauggugaaacccuguuu

SEQ ID NO: 774046 - RNA, 21 nt, Human
aacauggugaaacccuguuuc

SEQ ID NO: 774047 - RNA, 19 nt, Human
aagaagaaaacuuucuccc

SEQ ID NO: 774048 - RNA, 18 nt, Human
aagcaaauuuugacuaua

SEQ ID NO: 774049 - RNA, 23 nt, Human
aagcacaaagaggcaaaauccaa

SEQ ID NO: 774050 - RNA, 22 nt, Human
aagcaggaaaagguccuaccaa

SEQ ID NO: 774051 - RNA, 24 nt, Human
aagcaggaaaagguccuaccaaag

SEQ ID NO: 774052 - RNA, 24 nt, Human
aaucgcuugaacccgggaggcgga

SEQ ID NO: 774053 - RNA, 18 nt, Human
aauuagccaggcauggug

SEQ ID NO: 774054 - RNA, 20 nt, Human
acaagagcgaaacucugucu

SEQ ID NO: 774055 - RNA, 21 nt, Human
acaagagcgaaacucugucuc

SEQ ID NO: 774056 - RNA, 19 nt, Human
acagaaugaggaaaaaaac

SEQ ID NO: 774057 - RNA, 21 nt, Human
acauguauaguaaaaaagcuu

SEQ ID NO: 774058 - RNA, 24 nt, Human
acccuguuucuacuaaaaauacaa

SEQ ID NO: 774059 - RNA, 28 nt, Human
acucugucucaaaaaaaaaaaaaaaaaa

SEQ ID NO: 774060 - RNA, 20 nt, Human
acugggcacccaacugaccc

SEQ ID NO: 774061 - RNA, 20 nt, Human
agaaaaagaaaaaugguaag

SEQ ID NO: 774062 - RNA, 22 nt, Human
agaaucgcuugaacccgggagg

SEQ ID NO: 774063 - RNA, 18 nt, Human
agagcgaaacucugucuc

SEQ ID NO: 774064 - RNA, 22 nt, Human
agagcgaaacucugucucaaaa

SEQ ID NO: 774065 - RNA, 20 nt, Human
agcacccugggagguggagg

SEQ ID NO: 774066 - RNA, 23 nt, Human
agccaggcaugguggugcgugcc

SEQ ID NO: 774067 - RNA, 22 nt, Human
agccuggcuaacauggugaaac

SEQ ID NO: 774068 - RNA, 24 nt, Human
agccuggcuaacauggugaaaccc

SEQ ID NO: 774069 - RNA, 24 nt, Human
aggcaggagaaucgcuugaacccg

SEQ ID NO: 774070 - RNA, 24 nt, Human
aggcaugguggugcgugccuguaa

SEQ ID NO: 774071 - RNA, 24 nt, Human
aggcggagguugcagugagccgag

SEQ ID NO: 774072 - RNA, 22 nt, Human
aggcgggcggaucaccugaggu

SEQ ID NO: 774073 - RNA, 26 nt, Human
aggcgggcggaucaccugaggucagg

SEQ ID NO: 774074 - RNA, 20 nt, Human
aggcugaggcaggagaaucg

SEQ ID NO: 774075 - RNA, 24 nt, Human
aggcugaggcaggagaaucgcuug

SEQ ID NO: 774076 - RNA, 21 nt, Human
agguggaggcgggcggaucac

SEQ ID NO: 774077 - RNA, 20 nt, Human
agugcaguggcaugaucucg

SEQ ID NO: 774078 - RNA, 23 nt, Human
agugcaguggcaugaucucggcu

SEQ ID NO: 774079 - RNA, 24 nt, Human
agugcaguggcaugaucucggcuc

SEQ ID NO: 774080 - RNA, 24 nt, Human
aguggcaugaucucggcucacugc

SEQ ID NO: 774081 - RNA, 20 nt, Human
auaaagccuccuguaguuaa

SEQ ID NO: 774082 - RNA, 24 nt, Human
aucaccugaggucaggaguuugag

SEQ ID NO: 774083 - RNA, 24 nt, Human
aucgugccauugcacuccagcuug

SEQ ID NO: 774084 - RNA, 23 nt, Human
aucugcacugagaaguaaccuuc

SEQ ID NO: 774085 - RNA, 22 nt, Human
augaaaugugcaauacuuuuaa

SEQ ID NO: 774086 - RNA, 21 nt, Human
augauccuaacuaaaucagaa

SEQ ID NO: 774087 - RNA, 24 nt, Human
auggagugcaguggcaugaucucg

SEQ ID NO: 774088 - RNA, 24 nt, Human
augugcaauacuuuuaaguagaga

SEQ ID NO: 774089 - RNA, 18 nt, Human
auuccuaaccacauacau

SEQ ID NO: 774090 - RNA, 18 nt, Human
auugcacuccagcuuggg

SEQ ID NO: 774091 - RNA, 19 nt, Human
caaauuuccucuuuuagag

SEQ ID NO: 774092 - RNA, 23 nt, Human
caacaagagcgaaacucugucuc

SEQ ID NO: 774093 - RNA, 21 nt, Human
caaguggacauaccaucugaa

SEQ ID NO: 774094 - RNA, 24 nt, Human
cacaccuguaaucccagcacccug

SEQ ID NO: 774095 - RNA, 23 nt, Human
caccugaggucaggaguuugagg

SEQ ID NO: 774096 - RNA, 21 nt, Human
caccuguaaucccagcacccu

SEQ ID NO: 774097 - RNA, 23 nt, Human
caccuguaaucccagcacccugg

SEQ ID NO: 774098 - RNA, 24 nt, Human
caccuguaaucccagcacccuggg

SEQ ID NO: 774099 - RNA, 24 nt, Human
cacuccagcuugggcaacaagagc

SEQ ID NO: 774100 - RNA, 25 nt, Human
cacuccagcuugggcaacaagagcg

SEQ ID NO: 774101 - RNA, 24 nt, Human
cagcuccuugggaggcugaggcag

SEQ ID NO: 774102 - RNA, 21 nt, Human
cagugugagcaagaagaaaac

SEQ ID NO: 774103 - RNA, 24 nt, Human
cauaaaaaauucaguagugccuaa

SEQ ID NO: 774104 - RNA, 19 nt, Human
caugacacuuugaaacugc

SEQ ID NO: 774105 - RNA, 18 nt, Human
cauugcacuccagcuugg

SEQ ID NO: 774106 - RNA, 19 nt, Human
cauugcacuccagcuuggg

SEQ ID NO: 774107 - RNA, 21 nt, Human
cauugcacuccagcuugggca

SEQ ID NO: 774108 - RNA, 24 nt, Human
cauugcacuccagcuugggcaaca

SEQ ID NO: 774109 - RNA, 20 nt, Human
ccaaaagauuuccaaggcca

SEQ ID NO: 774110 - RNA, 25 nt, Human
ccaacugaccccagggcaaguugau

SEQ ID NO: 774111 - RNA, 19 nt, Human
ccacauacaugguuuauau

SEQ ID NO: 774112 - RNA, 20 nt, Human
ccauugcacuccagcuuggg

SEQ ID NO: 774113 - RNA, 21 nt, Human
ccauugcacuccagcuugggc

SEQ ID NO: 774114 - RNA, 23 nt, Human
ccauugcacuccagcuugggcaa

SEQ ID NO: 774115 - RNA, 24 nt, Human
ccauugcacuccagcuugggcaac

SEQ ID NO: 774116 - RNA, 18 nt, Human
cccccagaagagcccuga

SEQ ID NO: 774117 - RNA, 19 nt, Human
cccugggagguggaggcgg

SEQ ID NO: 774118 - RNA, 21 nt, Human
ccuaaguugggggagaggggc

SEQ ID NO: 774119 - RNA, 24 nt, Human
ccuaaguugggggagaggggcaac

SEQ ID NO: 774120 - RNA, 22 nt, Human
ccuggcuaacauggugaaaccc

SEQ ID NO: 774121 - RNA, 24 nt, Human
ccuggcuaacauggugaaacccug

SEQ ID NO: 774122 - RNA, 18 nt, Human
ccuguaaucccagcuccu

SEQ ID NO: 774123 - RNA, 19 nt, Human
ccuguaaucccagcuccuu

SEQ ID NO: 774124 - RNA, 21 nt, Human
ccuguaaucccagcuccuugg

SEQ ID NO: 774125 - RNA, 24 nt, Human
cgagaucgugccauugcacuccag

SEQ ID NO: 774126 - RNA, 24 nt, Human
cggaucaccugaggucaggaguuu

SEQ ID NO: 774127 - RNA, 24 nt, Human
cgggaggcggagguugcagugagc

SEQ ID NO: 774128 - RNA, 24 nt, Human
cgggcggaucaccugaggucagga

SEQ ID NO: 774129 - RNA, 24 nt, Human
cgugccuguaaucccagcuccuug

SEQ ID NO: 774130 - RNA, 21 nt, Human
cuaaaauaaucuuagagcuaa

SEQ ID NO: 774131 - RNA, 23 nt, Human
cucaaaaaaaaaaaaaaaaaaaa

SEQ ID NO: 774132 - RNA, 21 nt, Human
cucaaaucauauuaaaaucau

SEQ ID NO: 774133 - RNA, 19 nt, Human
cucacaccuguaaucccag

SEQ ID NO: 774134 - RNA, 24 nt, Human
cucacaccuguaaucccagcaccc

SEQ ID NO: 774135 - RNA, 19 nt, Human
cuccuugggaggcugaggc

SEQ ID NO: 774136 - RNA, 19 nt, Human
cucugucucaaaaaaaaaa

SEQ ID NO: 774137 - RNA, 22 nt, Human
cugcuggucagcggcuccccuc

SEQ ID NO: 774138 - RNA, 24 nt, Human
cuggcuaacauggugaaacccugu

SEQ ID NO: 774139 - RNA, 27 nt, Human
cuguagauuaauuuacaggaguugugc

SEQ ID NO: 774140 - RNA, 20 nt, Human
cuuaacauucuccaagaccu

SEQ ID NO: 774141 - RNA, 24 nt, Human
cuugcaccaucuuuaggcccaaga

SEQ ID NO: 774142 - RNA, 19 nt, Human
gaaacccuguuucuacuaa

SEQ ID NO: 774143 - RNA, 25 nt, Human
gaggcgggcggaucaccugagguca

SEQ ID NO: 774144 - RNA, 23 nt, Human
gagguugcagugagccgagaucg

SEQ ID NO: 774145 - RNA, 24 nt, Human
gaucaccugaggucaggaguuuga

SEQ ID NO: 774146 - RNA, 24 nt, Human
gaucacgaccacaaguggacauac

SEQ ID NO: 774147 - RNA, 22 nt, Human
gcacaaagaggcaaaauccaaa

SEQ ID NO: 774148 - RNA, 23 nt, Human
gcaggaaaagguccuaccaaaga

SEQ ID NO: 774149 - RNA, 22 nt, Human
gccauugcacuccagcuugggc

SEQ ID NO: 774150 - RNA, 24 nt, Human
gccauugcacuccagcuugggcaa

SEQ ID NO: 774151 - RNA, 24 nt, Human
gcccaagagcccccagaagagccc

SEQ ID NO: 774152 - RNA, 25 nt, Human
gcccaagagcccccagaagagcccu

SEQ ID NO: 774153 - RNA, 24 nt, Human
gcuaacauggugaaacccuguuuc

SEQ ID NO: 774154 - RNA, 19 nt, Human
gcucuuuaaaaauggcaga

SEQ ID NO: 774155 - RNA, 19 nt, Human
gcugggcaugguggcucac

SEQ ID NO: 774156 - RNA, 20 nt, Human
ggaggcgggcggaucaccug

SEQ ID NO: 774157 - RNA, 20 nt, Human
ggagguugcagugagccgag

SEQ ID NO: 774158 - RNA, 22 nt, Human
ggagguugcagugagccgagau

SEQ ID NO: 774159 - RNA, 24 nt, Human
ggagguugcagugagccgagaucg

SEQ ID NO: 774160 - RNA, 22 nt, Human
ggaucaccugaggucaggaguu

SEQ ID NO: 774161 - RNA, 22 nt, Human
ggaucaccugaggucaggaguu

SEQ ID NO: 774162 - RNA, 25 nt, Human
ggaucaccugaggucaggaguuuga

SEQ ID NO: 774163 - RNA, 23 nt, Human
ggcaugguggcucacaccuguaa

SEQ ID NO: 774164 - RNA, 21 nt, Human
ggcggaucaccugaggucagg

SEQ ID NO: 774165 - RNA, 24 nt, Human
gguggcucacaccuguaaucccag

SEQ ID NO: 774166 - RNA, 24 nt, Human
gguggugcgugccuguaaucccag

SEQ ID NO: 774167 - RNA, 22 nt, Human
guaaauaaauacaaaauguuaa

SEQ ID NO: 774168 - RNA, 30 nt, Human
guagauuaauuuacaggaguugugcucagg

SEQ ID NO: 774169 - RNA, 23 nt, Human
guagccaagacuaaagcaggaaa

SEQ ID NO: 774170 - RNA, 23 nt, Human
guggcucacaccuguaaucccag

SEQ ID NO: 774171 - RNA, 24 nt, Human
guggugcgugccuguaaucccagc

SEQ ID NO: 774172 - RNA, 19 nt, Human
guucuuguugcccaggaug

SEQ ID NO: 774173 - RNA, 24 nt, Human
guugcagugagccgagaucgugcc

SEQ ID NO: 774174 - RNA, 23 nt, Human
uaaaagagaaauauaaagaggcu

SEQ ID NO: 774175 - RNA, 19 nt, Human
uaacaugcaguauugaggg

SEQ ID NO: 774176 - RNA, 19 nt, Human
uaacauggugaaacccugu

SEQ ID NO: 774177 - RNA, 21 nt, Human
uaacauggugaaacccuguuu

SEQ ID NO: 774178 - RNA, 24 nt, Human
uaacauggugaaacccuguuucua

SEQ ID NO: 774179 - RNA, 19 nt, Human
uaaguugggggagaggggc

SEQ ID NO: 774180 - RNA, 18 nt, Human
uaaucaacacugcagaaa

SEQ ID NO: 774181 - RNA, 21 nt, Human
uaaucaccauuggagacuggu

SEQ ID NO: 774182 - RNA, 24 nt, Human
uacaaaauguuaaagcuuagcaua

SEQ ID NO: 774183 - RNA, 25 nt, Human
uacaaauuauuuuaaaaaguuucau

SEQ ID NO: 774184 - RNA, 23 nt, Human
uacacaaggaaauaauuuucaca

SEQ ID NO: 774185 - RNA, 23 nt, Human
uagcauacuucugugccucaaaa

SEQ ID NO: 774186 - RNA, 24 nt, Human
uagguaaaauuuacaaauuauuuu

SEQ ID NO: 774187 - RNA, 23 nt, Human
ucaaaaaaaaaaaaaaaaaaaaa

SEQ ID NO: 774188 - RNA, 21 nt, Human
ucacugcaacccauacauggg

SEQ ID NO: 774189 - RNA, 22 nt, Human
ucauuuaagaaaaacaugaaac

SEQ ID NO: 774190 - RNA, 19 nt, Human
uccagcuugggcaacaaga

SEQ ID NO: 774191 - RNA, 20 nt, Human
uccucuguaagucacuaaaa

SEQ ID NO: 774192 - RNA, 23 nt, Human
uccuuagagaggaccuaauuauu

SEQ ID NO: 774193 - RNA, 24 nt, Human
ucgcuugaacccgggaggcggagg

SEQ ID NO: 774194 - RNA, 24 nt, Human
ucuagaauugauccaccaaaagau

SEQ ID NO: 774195 - RNA, 23 nt, Human
ucugucucaaaaaaaaaaaaaaa

SEQ ID NO: 774196 - RNA, 27 nt, Human
ugaaauauucacaaauaaaaauccucc

SEQ ID NO: 774197 - RNA, 23 nt, Human
ugacgaggggcagaguaaauaag

SEQ ID NO: 774198 - RNA, 18 nt, Human
ugacuauaucacccagca

SEQ ID NO: 774199 - RNA, 21 nt, Human
ugacuauaucacccagcauaa

SEQ ID NO: 774200 - RNA, 23 nt, Human
ugagaaguaaccuucccuuagaa

SEQ ID NO: 774201 - RNA, 22 nt, Human
ugagccgagaucgugccauugc

SEQ ID NO: 774202 - RNA, 20 nt, Human
ugaggcaggagaaucgcuug

SEQ ID NO: 774203 - RNA, 24 nt, Human
ugaggcaggagaaucgcuugaacc

SEQ ID NO: 774204 - RNA, 25 nt, Human
ugaggcaggagaaucgcuugaaccc

SEQ ID NO: 774205 - RNA, 18 nt, Human
ugaggucaggaguuugag

SEQ ID NO: 774206 - RNA, 24 nt, Human
ugauccuaacuaaaucagaaacuu

SEQ ID NO: 774207 - RNA, 27 nt, Human
ugaugaaugccaugggucaaaugccau

SEQ ID NO: 774208 - RNA, 21 nt, Human
ugauuggaaacuaaucauuua

SEQ ID NO: 774209 - RNA, 19 nt, Human
ugcacuccagcuugggcaa

SEQ ID NO: 774210 - RNA, 22 nt, Human
ugcacuccagcuugggcaacaa

SEQ ID NO: 774211 - RNA, 22 nt, Human
ugcaguggcaugaucucggcuc

SEQ ID NO: 774212 - RNA, 19 nt, Human
ugccaugggucaaaugcca

SEQ ID NO: 774213 - RNA, 24 nt, Human
ugccuguaaucccagcuccuuggg

SEQ ID NO: 774214 - RNA, 20 nt, Human
ugcuaaaucuccacaugaca

SEQ ID NO: 774215 - RNA, 19 nt, Human
uggagugcaguggcaugau

SEQ ID NO: 774216 - RNA, 24 nt, Human
uggagugcaguggcaugaucucgg

SEQ ID NO: 774217 - RNA, 21 nt, Human
uggcucacaccuguaauccca

SEQ ID NO: 774218 - RNA, 22 nt, Human
uggcucacaccuguaaucccag

SEQ ID NO: 774219 - RNA, 24 nt, Human
uggcucacaccuguaaucccagca

SEQ ID NO: 774220 - RNA, 22 nt, Human
uggcugucaauaccugaaagcu

SEQ ID NO: 774221 - RNA, 19 nt, Human
ugggaggcugaggcaggag

SEQ ID NO: 774222 - RNA, 23 nt, Human
ugggaggcugaggcaggagaauc

SEQ ID NO: 774223 - RNA, 21 nt, Human
uggugcgugccuguaauccca

SEQ ID NO: 774224 - RNA, 22 nt, Human
uggugcgugccuguaaucccag

SEQ ID NO: 774225 - RNA, 24 nt, Human
uggugcgugccuguaaucccagcu

SEQ ID NO: 774226 - RNA, 24 nt, Human
ugguggcucacaccuguaauccca

SEQ ID NO: 774227 - RNA, 24 nt, Human
ugguggugcgugccuguaauccca

SEQ ID NO: 774228 - RNA, 18 nt, Human
uguauggacaggguaggc

SEQ ID NO: 774229 - RNA, 21 nt, Human
uguugcccaggauggagugca

SEQ ID NO: 774230 - RNA, 27 nt, Human
uuaaucaacacugcagaaaaagaaaaa

SEQ ID NO: 774231 - RNA, 24 nt, Human
uucguucuuguugcccaggaugga

SEQ ID NO: 774232 - RNA, 24 nt, Human
uugaacccgggaggcggagguugc

SEQ ID NO: 774233 - RNA, 18 nt, Human
uugcagugagccgagauc

SEQ ID NO: 774234 - RNA, 21 nt, Human
uugcagugagccgagaucgug

SEQ ID NO: 774235 - RNA, 22 nt, Human
uugcagugagccgagaucgugc

SEQ ID NO: 774236 - RNA, 18 nt, Human
uugcccaggauggagugc

SEQ ID NO: 774237 - RNA, 24 nt, Human
uugggaggcugaggcaggagaauc

SEQ ID NO: 774238 - RNA, 22 nt, Human
uuuccaaggccaacugggcacc

SEQ ID NO: 774239 - RNA, 20 nt, Human
uuucguucuuguugcccagg

SEQ ID NO: 774240 - RNA, 24 nt, Human
uuucguucuuguugcccaggaugg

SEQ ID NO: 774241 - RNA, 22 nt, Human
uuucuacuaaaaauacaaaaaa

SEQ ID NO: 774242 - RNA, 22 nt, Human
uuugaaacugcuagcaauaaac

SEQ ID NO: 774243 - RNA, 23 nt, Human
aaacgcagcccaggggagccuca

SEQ ID NO: 774244 - RNA, 23 nt, Human
aaauaaucaagaagaaauagaga

SEQ ID NO: 774245 - RNA, 22 nt, Human
aaauagagaacauuaacaaaau

SEQ ID NO: 774246 - RNA, 21 nt, Human
aaaucccacccuccuccuccc

SEQ ID NO: 774247 - RNA, 18 nt, Human
aaauccuccagcccccuu

SEQ ID NO: 774248 - RNA, 18 nt, Human
aagaagaaauagagaaca

SEQ ID NO: 774249 - RNA, 20 nt, Human
aagaagaaauagagaacauu

SEQ ID NO: 774250 - RNA, 22 nt, Human
aagcccccggaggccccucugg

SEQ ID NO: 774251 - RNA, 22 nt, Human
aaucccacccuccuccucccac

SEQ ID NO: 774252 - RNA, 26 nt, Human
aaucccacccuccuccucccacccag

SEQ ID NO: 774253 - RNA, 18 nt, Human
acaaaucccacccuccuc

SEQ ID NO: 774254 - RNA, 24 nt, Human
acagaaaacccugacacguggcca

SEQ ID NO: 774255 - RNA, 22 nt, Human
acaggcccacccuuagcugcac

SEQ ID NO: 774256 - RNA, 18 nt, Human
acauggggguuucaucug

SEQ ID NO: 774257 - RNA, 19 nt, Human
accacaagagggacagagg

SEQ ID NO: 774258 - RNA, 24 nt, Human
accagcagggggcaccacaggccc

SEQ ID NO: 774259 - RNA, 26 nt, Human
accauguuuaaugaacaccaaagcug

SEQ ID NO: 774260 - RNA, 25 nt, Human
acccagcagcucccaaacgcagccc

SEQ ID NO: 774261 - RNA, 18 nt, Human
accccagguagaggcagc

SEQ ID NO: 774262 - RNA, 19 nt, Human
accccaucccccugcgagc

SEQ ID NO: 774263 - RNA, 24 nt, Human
acgcagcccaggggagccucagag

SEQ ID NO: 774264 - RNA, 22 nt, Human
acucagcuuggagcccuggagu

SEQ ID NO: 774265 - RNA, 22 nt, Human
acuugggccucugugucucccu

SEQ ID NO: 774266 - RNA, 22 nt, Human
agaaacacaaggacaugugaca

SEQ ID NO: 774267 - RNA, 21 nt, Human
agacgaguugaaggaggucau

SEQ ID NO: 774268 - RNA, 21 nt, Human
agagaagcaguuggggcugca

SEQ ID NO: 774269 - RNA, 29 nt, Human
agagaagcaguuggggcugcacugagaug

SEQ ID NO: 774270 - RNA, 19 nt, Human
agaggcucacagaaaaccc

SEQ ID NO: 774271 - RNA, 18 nt, Human
agagggacagagggagga

SEQ ID NO: 774272 - RNA, 21 nt, Human
agcagcagguccaggcaacgc

SEQ ID NO: 774273 - RNA, 23 nt, Human
agcagggacgggggugggggcag

SEQ ID NO: 774274 - RNA, 20 nt, Human
agccccaugggaggagcagg

SEQ ID NO: 774275 - RNA, 21 nt, Human
aggcagggcaggggcccaggg

SEQ ID NO: 774276 - RNA, 23 nt, Human
aggcagggcaggggcccaggggc

SEQ ID NO: 774277 - RNA, 25 nt, Human
aggccagcagggacggggguggggg

SEQ ID NO: 774278 - RNA, 25 nt, Human
aggccugggcuggaagggaggggag

SEQ ID NO: 774279 - RNA, 23 nt, Human
agggggcaggcccaagggugcca

SEQ ID NO: 774280 - RNA, 24 nt, Human
agggggcaggcccaagggugccag

SEQ ID NO: 774281 - RNA, 22 nt, Human
aggguucccgguccuuccuccu

SEQ ID NO: 774282 - RNA, 23 nt, Human
aguggcuaaauccuccagccccc

SEQ ID NO: 774283 - RNA, 23 nt, Human
auagaaugugggugagcacuaca

SEQ ID NO: 774284 - RNA, 24 nt, Human
aucaugacccagcagcaauccguc

SEQ ID NO: 774285 - RNA, 20 nt, Human
caaaccccagguagaggcag

SEQ ID NO: 774286 - RNA, 22 nt, Human
caaacgcagcccaggggagccu

SEQ ID NO: 774287 - RNA, 21 nt, Human
caagacccagacacucccaag

SEQ ID NO: 774288 - RNA, 22 nt, Human
caagacgaguugaaggagguca

SEQ ID NO: 774289 - RNA, 24 nt, Human
caaggacaugugacaucccccucc

SEQ ID NO: 774290 - RNA, 20 nt, Human
cacagcaccacaagagggac

SEQ ID NO: 774291 - RNA, 23 nt, Human
cacagcaccacaagagggacaga

SEQ ID NO: 774292 - RNA, 18 nt, Human
cacaggguucccgguccu

SEQ ID NO: 774293 - RNA, 18 nt, Human
cacccuccuccucccacc

SEQ ID NO: 774294 - RNA, 19 nt, Human
cacccuccuccucccaccc

SEQ ID NO: 774295 - RNA, 22 nt, Human
cacugugcgcccagucagaggc

SEQ ID NO: 774296 - RNA, 26 nt, Human
cagagcagccacuuuugaccccuugg

SEQ ID NO: 774297 - RNA, 18 nt, Human
cagaugcagguggacugg

SEQ ID NO: 774298 - RNA, 23 nt, Human
cagcagcaauccgucuuccuggu

SEQ ID NO: 774299 - RNA, 22 nt, Human
cagcagggacgggggugggggc

SEQ ID NO: 774300 - RNA, 19 nt, Human
cagcagggcauggggacug

SEQ ID NO: 774301 - RNA, 20 nt, Human
cagcagggggcaccacaggc

SEQ ID NO: 774302 - RNA, 23 nt, Human
cagcccaggggagccucagaggc

SEQ ID NO: 774303 - RNA, 26 nt, Human
cagcccaggggagccucagaggcagg

SEQ ID NO: 774304 - RNA, 19 nt, Human
cagcucccaaacgcagccc

SEQ ID NO: 774305 - RNA, 21 nt, Human
cagggcaggggcccaggggcc

SEQ ID NO: 774306 - RNA, 21 nt, Human
caucccccuccagcucccacc

SEQ ID NO: 774307 - RNA, 18 nt, Human
caucugcucucugcugcc

SEQ ID NO: 774308 - RNA, 19 nt, Human
caugcacacaaaaaacaaa

SEQ ID NO: 774309 - RNA, 24 nt, Human
ccaacccugccuaccacauggggg

SEQ ID NO: 774310 - RNA, 20 nt, Human
ccacacaggguucccggucc

SEQ ID NO: 774311 - RNA, 20 nt, Human
ccaccgccccaccacggcuc

SEQ ID NO: 774312 - RNA, 21 nt, Human
ccacgcagaaccugcuggacu

SEQ ID NO: 774313 - RNA, 18 nt, Human
ccacggcucagucaccgu

SEQ ID NO: 774314 - RNA, 21 nt, Human
ccagcaaaagcuucaggcucu

SEQ ID NO: 774315 - RNA, 24 nt, Human
ccagcagcucccaaacgcagccca

SEQ ID NO: 774316 - RNA, 18 nt, Human
ccagccacagcaccacaa

SEQ ID NO: 774317 - RNA, 19 nt, Human
ccaggcuucucugggcaga

SEQ ID NO: 774318 - RNA, 22 nt, Human
cccaccgccccaccacggcuca

SEQ ID NO: 774319 - RNA, 20 nt, Human
cccagaggcaaggccucccc

SEQ ID NO: 774320 - RNA, 22 nt, Human
cccagcaaaagcuucaggcucu

SEQ ID NO: 774321 - RNA, 19 nt, Human
cccagccucggcccaccgc

SEQ ID NO: 774322 - RNA, 23 nt, Human
cccaggaagcccccggaggcccc

SEQ ID NO: 774323 - RNA, 24 nt, Human
ccccaggggcucaggcugccuaga

SEQ ID NO: 774324 - RNA, 18 nt, Human
ccccggaggccccucugg

SEQ ID NO: 774325 - RNA, 22 nt, Human
ccccuccagcucccacccuccc

SEQ ID NO: 774326 - RNA, 22 nt, Human
ccccucuggcugaagagaucag

SEQ ID NO: 774327 - RNA, 22 nt, Human
ccccuggguccaggcuucucug

SEQ ID NO: 774328 - RNA, 19 nt, Human
ccuccagcucccacccucc

SEQ ID NO: 774329 - RNA, 22 nt, Human
ccuccagcucccacccucccug

SEQ ID NO: 774330 - RNA, 19 nt, Human
ccuccucccacccagcagc

SEQ ID NO: 774331 - RNA, 26 nt, Human
ccugcaccacugugcgcccagucaga

SEQ ID NO: 774332 - RNA, 19 nt, Human
ccugccgucccccaacccu

SEQ ID NO: 774333 - RNA, 21 nt, Human
ccuggagggcugcggugggcu

SEQ ID NO: 774334 - RNA, 19 nt, Human
ccuugggcuauggaagccu

SEQ ID NO: 774335 - RNA, 26 nt, Human
cgaggcggcagcccagccucggccca

SEQ ID NO: 774336 - RNA, 22 nt, Human
cgccagaaaaaucaccacccag

SEQ ID NO: 774337 - RNA, 24 nt, Human
cuccuccucccacccagcagcucc

SEQ ID NO: 774338 - RNA, 18 nt, Human
cugcccccuauagugccc

SEQ ID NO: 774339 - RNA, 20 nt, Human
cuggacuuaacucgccagaa

SEQ ID NO: 774340 - RNA, 18 nt, Human
cuggaggccagcagggac

SEQ ID NO: 774341 - RNA, 24 nt, Human
cuggcgguacagaugagggccuca

SEQ ID NO: 774342 - RNA, 19 nt, Human
cugggcuggaagggagggg

SEQ ID NO: 774343 - RNA, 21 nt, Human
cuggguccaggcuucucuggg

SEQ ID NO: 774344 - RNA, 19 nt, Human
cuguguggccagggccagg

SEQ ID NO: 774345 - RNA, 20 nt, Human
gacaucccccuccagcuccc

SEQ ID NO: 774346 - RNA, 19 nt, Human
gacaugugacaucccccuc

SEQ ID NO: 774347 - RNA, 19 nt, Human
gacuucccucccauaccuc

SEQ ID NO: 774348 - RNA, 20 nt, Human
gaggagcaggcaauggugug

SEQ ID NO: 774349 - RNA, 23 nt, Human
gagggccucaggggcucaggcgg

SEQ ID NO: 774350 - RNA, 19 nt, Human
gaggguuuccugcaaaccu

SEQ ID NO: 774351 - RNA, 18 nt, Human
gauguggaaaucaugacc

SEQ ID NO: 774352 - RNA, 19 nt, Human
gcaaaagcuucaggcucug

SEQ ID NO: 774353 - RNA, 25 nt, Human
gcaccacugugcgcccagucagagg

SEQ ID NO: 774354 - RNA, 19 nt, Human
gcagguccaggcaacgcca

SEQ ID NO: 774355 - RNA, 21 nt, Human
gcccaggaagcccccggaggc

SEQ ID NO: 774356 - RNA, 19 nt, Human
gcucuggguggggcugggg

SEQ ID NO: 774357 - RNA, 20 nt, Human
gcugcacugagaugagcaug

SEQ ID NO: 774358 - RNA, 19 nt, Human
gcugcccgaggcggcagcc

SEQ ID NO: 774359 - RNA, 19 nt, Human
gcuucucugggcagacccc

SEQ ID NO: 774360 - RNA, 23 nt, Human
ggaaguuugcagagggaaggccc

SEQ ID NO: 774361 - RNA, 19 nt, Human
ggaggagcaggcaauggug

SEQ ID NO: 774362 - RNA, 20 nt, Human
ggcacuggcuggaggccagc

SEQ ID NO: 774363 - RNA, 21 nt, Human
ggcccaggggcccaaaggcug

SEQ ID NO: 774364 - RNA, 24 nt, Human
ggccugggcuggaagggaggggag

SEQ ID NO: 774365 - RNA, 22 nt, Human
ggcgcgaugcuaugcggcacca

SEQ ID NO: 774366 - RNA, 24 nt, Human
gggcacggggccuggugcagagaa

SEQ ID NO: 774367 - RNA, 21 nt, Human
gggcccaaaggcuguaaggug

SEQ ID NO: 774368 - RNA, 23 nt, Human
ggggcccaggggcccaaaggcug

SEQ ID NO: 774369 - RNA, 24 nt, Human
gggggccuggagggcugcgguggg

SEQ ID NO: 774370 - RNA, 21 nt, Human
gggggugggggcaggacugcu

SEQ ID NO: 774371 - RNA, 22 nt, Human
ggggugggguccgccagggggc

SEQ ID NO: 774372 - RNA, 21 nt, Human
gggugggguccgccagggggc

SEQ ID NO: 774373 - RNA, 21 nt, Human
ggucaggggaggcuaaagccc

SEQ ID NO: 774374 - RNA, 18 nt, Human
ggucugggucggucccug

SEQ ID NO: 774375 - RNA, 20 nt, Human
gguggccaaggaggugcugu

SEQ ID NO: 774376 - RNA, 20 nt, Human
ggugggggcaggacugcugg

SEQ ID NO: 774377 - RNA, 18 nt, Human
guggccaaggaggugcug

SEQ ID NO: 774378 - RNA, 22 nt, Human
guguggccagggccaggggagg

SEQ ID NO: 774379 - RNA, 25 nt, Human
uaacucgccagaaaaaucaccaccc

SEQ ID NO: 774380 - RNA, 27 nt, Human
uaacucgccagaaaaaucaccacccag

SEQ ID NO: 774381 - RNA, 24 nt, Human
uacaggagcucaaggaggccuggg

SEQ ID NO: 774382 - RNA, 23 nt, Human
ucaccccaucccccugcgagccu

SEQ ID NO: 774383 - RNA, 20 nt, Human
ucacuggaaggcccgggugg

SEQ ID NO: 774384 - RNA, 21 nt, Human
ucacuggaaggcccggguggg

SEQ ID NO: 774385 - RNA, 20 nt, Human
ucagaggcagccaagaaggg

SEQ ID NO: 774386 - RNA, 21 nt, Human
ucagaggcagccaagaagggu

SEQ ID NO: 774387 - RNA, 18 nt, Human
ucccacccagcagcuccc

SEQ ID NO: 774388 - RNA, 22 nt, Human
ucccacccagcagcucccaaac

SEQ ID NO: 774389 - RNA, 23 nt, Human
ucccacccagcagcucccaaacg

SEQ ID NO: 774390 - RNA, 19 nt, Human
ucccacccuccuccuccca

SEQ ID NO: 774391 - RNA, 22 nt, Human
ucccagaacagccacuugggcc

SEQ ID NO: 774392 - RNA, 22 nt, Human
ucccagaacagccacuugggcc

SEQ ID NO: 774393 - RNA, 18 nt, Human
ucccggggcuaccucuuc

SEQ ID NO: 774394 - RNA, 19 nt, Human
ucccuggggguggagccca

SEQ ID NO: 774395 - RNA, 20 nt, Human
ucccuggggguggagcccag

SEQ ID NO: 774396 - RNA, 18 nt, Human
uccguggugaccagaccc

SEQ ID NO: 774397 - RNA, 25 nt, Human
uccucccacccagcagcucccaaac

SEQ ID NO: 774398 - RNA, 19 nt, Human
ucucugggcagaccccugg

SEQ ID NO: 774399 - RNA, 20 nt, Human
ucugugucucccuucucccc

SEQ ID NO: 774400 - RNA, 23 nt, Human
ugaccagacccucaagacgaguu

SEQ ID NO: 774401 - RNA, 18 nt, Human
ugacccugggccccaggu

SEQ ID NO: 774402 - RNA, 19 nt, Human
ugagaugagcaugccacaa

SEQ ID NO: 774403 - RNA, 21 nt, Human
ugagaugagcaugccacaaag

SEQ ID NO: 774404 - RNA, 22 nt, Human
ugaggguuuccugcaaaccugu

SEQ ID NO: 774405 - RNA, 20 nt, Human
ugauaagaauaaaaaagaua

SEQ ID NO: 774406 - RNA, 23 nt, Human
ugcacacaaaaaacaaagaacuu

SEQ ID NO: 774407 - RNA, 21 nt, Human
ugcagcaagaccauguuuaau

SEQ ID NO: 774408 - RNA, 24 nt, Human
ugcagggcccugcucaggagggcg

SEQ ID NO: 774409 - RNA, 20 nt, Human
ugcaugcacacaaaaaacaa

SEQ ID NO: 774410 - RNA, 26 nt, Human
ugccagucuguucucgggaucuacgc

SEQ ID NO: 774411 - RNA, 24 nt, Human
ugcgucuggccagcgcagggcuca

SEQ ID NO: 774412 - RNA, 18 nt, Human
ugcuguguggccagggcc

SEQ ID NO: 774413 - RNA, 20 nt, Human
uggaaaguggcacggugcag

SEQ ID NO: 774414 - RNA, 20 nt, Human
uggccccauuucacagcugg

SEQ ID NO: 774415 - RNA, 20 nt, Human
ugggccccaggucauugcaa

SEQ ID NO: 774416 - RNA, 19 nt, Human
uggggcaaacgcccaggac

SEQ ID NO: 774417 - RNA, 20 nt, Human
uggggcaaacgcccaggacu

SEQ ID NO: 774418 - RNA, 21 nt, Human
uggggcugcacugagaugagc

SEQ ID NO: 774419 - RNA, 18 nt, Human
ugggggcaggacugcugg

SEQ ID NO: 774420 - RNA, 19 nt, Human
ugggggcaggacugcuggu

SEQ ID NO: 774421 - RNA, 18 nt, Human
uggguccaggcuucucug

SEQ ID NO: 774422 - RNA, 21 nt, Human
uggguggggcugggggcacag

SEQ ID NO: 774423 - RNA, 23 nt, Human
ugguccacggauaugacuucccu

SEQ ID NO: 774424 - RNA, 26 nt, Human
ugugagagguggcccaggaggccugg

SEQ ID NO: 774425 - RNA, 18 nt, Human
uucaucugcucucugcug

SEQ ID NO: 774426 - RNA, 21 nt, Human
uucccgguccuuccuccugca

SEQ ID NO: 774427 - RNA, 18 nt, Human
uugcccaaagccacacag

SEQ ID NO: 774428 - RNA, 24 nt, Human
uuuggcuaauuuuuaacauccaaa

SEQ ID NO: 774429 - RNA, 24 nt, Human
aaaaaaaaaaaaaaaaauagagag

SEQ ID NO: 774430 - RNA, 23 nt, Human
aaaguuacagcaaaaaggguaau

SEQ ID NO: 774431 - RNA, 19 nt, Human
aaguuacagcaaaaagggu

SEQ ID NO: 774432 - RNA, 22 nt, Human
acauuuucacaaauuccagucu

SEQ ID NO: 774433 - RNA, 27 nt, Human
acuuuuaaaaaguuacagcaaaaaggg

SEQ ID NO: 774434 - RNA, 18 nt, Human
aggaaaaggaggcggcgg

SEQ ID NO: 774435 - RNA, 23 nt, Human
auaauacagcaucuguacaccuc

SEQ ID NO: 774436 - RNA, 18 nt, Human
caaucaaauugcuuacag

SEQ ID NO: 774437 - RNA, 23 nt, Human
cacauuuucacaaauuccagucu

SEQ ID NO: 774438 - RNA, 18 nt, Human
caggaagaggcugcgccc

SEQ ID NO: 774439 - RNA, 18 nt, Human
caggaugaggaaaaggag

SEQ ID NO: 774440 - RNA, 20 nt, Human
ccccgcgcccucacgcacug

SEQ ID NO: 774441 - RNA, 18 nt, Human
ccucucucucccucucuc

SEQ ID NO: 774442 - RNA, 19 nt, Human
ccucucucucccucucucc

SEQ ID NO: 774443 - RNA, 19 nt, Human
ccugguggccggggggagg

SEQ ID NO: 774444 - RNA, 21 nt, Human
cgagcggcggaguccgaggcc

SEQ ID NO: 774445 - RNA, 18 nt, Human
cgaggcagaggcggagag

SEQ ID NO: 774446 - RNA, 23 nt, Human
cgccggucacauagaccucgcgc

SEQ ID NO: 774447 - RNA, 23 nt, Human
cgcugcggcggcggcugcuccgg

SEQ ID NO: 774448 - RNA, 18 nt, Human
cggccgaggcagaggcgg

SEQ ID NO: 774449 - RNA, 23 nt, Human
cggcgagcgggcgggccucucuc

SEQ ID NO: 774450 - RNA, 20 nt, Human
cggcugcgcucugcgucucg

SEQ ID NO: 774451 - RNA, 24 nt, Human
cggggcugcaguacagcgggagcg

SEQ ID NO: 774452 - RNA, 22 nt, Human
cucgcgccgcggcggagcgggg

SEQ ID NO: 774453 - RNA, 20 nt, Human
cucuacacuccaggaagugu

SEQ ID NO: 774454 - RNA, 19 nt, Human
cugcggcggcggcugcucc

SEQ ID NO: 774455 - RNA, 18 nt, Human
gagcggcggaguccgagg

SEQ ID NO: 774456 - RNA, 24 nt, Human
gagcggcggaguccgaggcccggg

SEQ ID NO: 774457 - RNA, 22 nt, Human
gaggcggagagguggcgggccc

SEQ ID NO: 774458 - RNA, 22 nt, Human
gcaggaagaggcugcgcccgaa

SEQ ID NO: 774459 - RNA, 18 nt, Human
gcggagagguggcgggcc

SEQ ID NO: 774460 - RNA, 21 nt, Human
gcggcggcggcugcuccgggc

SEQ ID NO: 774461 - RNA, 22 nt, Human
ggcaggaagaggcugcgcccga

SEQ ID NO: 774462 - RNA, 19 nt, Human
ggcugcaguacagcgggag

SEQ ID NO: 774463 - RNA, 22 nt, Human
ggcugggaaaccagccgggccu

SEQ ID NO: 774464 - RNA, 20 nt, Human
ggggaggcgacgagcggcgg

SEQ ID NO: 774465 - RNA, 21 nt, Human
gggggaggcgacgagcggcgg

SEQ ID NO: 774466 - RNA, 23 nt, Human
gggggaggcgacgagcggcggag

SEQ ID NO: 774467 - RNA, 20 nt, Human
ggucuucaacauguccguuu

SEQ ID NO: 774468 - RNA, 21 nt, Human
ggugguggcggcugcgcucug

SEQ ID NO: 774469 - RNA, 23 nt, Human
uauaauacagcaucuguacaccu

SEQ ID NO: 774470 - RNA, 21 nt, Human
ucgcgcugcggcggcggcugc

SEQ ID NO: 774471 - RNA, 19 nt, Human
ucuacacuccaggaagugu

SEQ ID NO: 774472 - RNA, 18 nt, Human
ucuguacaccucaagcuc

SEQ ID NO: 774473 - RNA, 22 nt, Human
ugcgcccgaagcggcgaggcgg

SEQ ID NO: 774474 - RNA, 22 nt, Human
ugucacauuuucacaaauucca

SEQ ID NO: 774475 - RNA, 21 nt, Human
uguccguuuggugguggcggc

SEQ ID NO: 774476 - RNA, 22 nt, Human
uguuuugaggagcuuucaccgu

SEQ ID NO: 774477 - RNA, 24 nt, Human
uuaaauuaaaaaaaaaaaaaaaaa

SEQ ID NO: 774478 - RNA, 22 nt, Human
uuggugguggcggcugcgcucu

SEQ ID NO: 774479 - RNA, 18 nt, Human
uuugaggagcuuucaccg

SEQ ID NO: 774480 - RNA, 26 nt, Human
acccucugccaaaaccgcuccugcca

SEQ ID NO: 774481 - RNA, 19 nt, Human
accggccccacccucugcc

SEQ ID NO: 774482 - RNA, 18 nt, Human
agagcccaucccucuacc

SEQ ID NO: 774483 - RNA, 20 nt, Human
agagcccaucccucuacccg

SEQ ID NO: 774484 - RNA, 18 nt, Human
aggccccaucuggcccaa

SEQ ID NO: 774485 - RNA, 18 nt, Human
auaccuuccagaggcacc

SEQ ID NO: 774486 - RNA, 21 nt, Human
ccccacucucucagcgcucug

SEQ ID NO: 774487 - RNA, 22 nt, Human
ccggccccacccucugccaaaa

SEQ ID NO: 774488 - RNA, 21 nt, Human
ccugccaaggcccccaugacc

SEQ ID NO: 774489 - RNA, 21 nt, Human
cggccccacccucugccaaaa

SEQ ID NO: 774490 - RNA, 21 nt, Human
cucagcgcucuguguauucag

SEQ ID NO: 774491 - RNA, 25 nt, Human
cucucagcgcucuguguauucagcc

SEQ ID NO: 774492 - RNA, 23 nt, Human
gacagggcuucauuuacaucuuc

SEQ ID NO: 774493 - RNA, 20 nt, Human
gccaaaaccgcuccugccaa

SEQ ID NO: 774494 - RNA, 21 nt, Human
gccaaaaccgcuccugccaag

SEQ ID NO: 774495 - RNA, 22 nt, Human
gccccacccucugccaaaaccg

SEQ ID NO: 774496 - RNA, 23 nt, Human
uagcugagcagagcccaucccuc

SEQ ID NO: 774497 - RNA, 25 nt, Human
ucucucagcgcucuguguauucagc

SEQ ID NO: 774498 - RNA, 22 nt, Human
ucugccaaaaccgcuccugcca

SEQ ID NO: 774499 - RNA, 22 nt, Human
ugaccuguguccgugaccacac

SEQ ID NO: 774500 - RNA, 25 nt, Human
ugccccacucucucagcgcucugug

SEQ ID NO: 774501 - RNA, 22 nt, Human
uggcccaagaauagcugagcag

SEQ ID NO: 774502 - RNA, 27 nt, Human
uuuuuuuuuguuuuuuuuuuuuuuuuu

SEQ ID NO: 774503 - RNA, 22 nt, Human
uuuuuuuuuuuuuuuuguuuuu

SEQ ID NO: 774504 - RNA, 18 nt, Human
uuuuuuuuuuuuuuuuug

SEQ ID NO: 774505 - RNA, 23 nt, Human
uuuuuuuuuuuuuuuuuuguugu

SEQ ID NO: 774506 - RNA, 22 nt, Human
aaaaagaaacacggggaaaaga

SEQ ID NO: 774507 - RNA, 22 nt, Human
aaaagggaaaggaugaagagga

SEQ ID NO: 774508 - RNA, 23 nt, Human
aaaauccuuccacuggacacucu

SEQ ID NO: 774509 - RNA, 22 nt, Human
aaacugacauccccuauguccu

SEQ ID NO: 774510 - RNA, 19 nt, Human
aaagggacuccuuccugua

SEQ ID NO: 774511 - RNA, 19 nt, Human
aaauggcagagacuugagc

SEQ ID NO: 774512 - RNA, 20 nt, Human
aacaucgagccauccucuac

SEQ ID NO: 774513 - RNA, 23 nt, Human
acacaacccccacucccugccac

SEQ ID NO: 774514 - RNA, 23 nt, Human
acacacccuuugggacacagcca

SEQ ID NO: 774515 - RNA, 22 nt, Human
accaucuuucguggaaggugcc

SEQ ID NO: 774516 - RNA, 23 nt, Human
accaucuuucguggaaggugccg

SEQ ID NO: 774517 - RNA, 24 nt, Human
acguguuggcaugugaccagcuga

SEQ ID NO: 774518 - RNA, 23 nt, Human
acuccuuccuguaacuggggaac

SEQ ID NO: 774519 - RNA, 20 nt, Human
acugcagaucccagcagagu

SEQ ID NO: 774520 - RNA, 24 nt, Human
agaaacacggggaaaagagguagc

SEQ ID NO: 774521 - RNA, 24 nt, Human
agaaaggggugggguaaagacuug

SEQ ID NO: 774522 - RNA, 18 nt, Human
agagguccacggacagga

SEQ ID NO: 774523 - RNA, 22 nt, Human
aggaacgaggagaagagaggaa

SEQ ID NO: 774524 - RNA, 19 nt, Human
aggagaagagaggaagagg

SEQ ID NO: 774525 - RNA, 21 nt, Human
aggaugaagaggagcagcagg

SEQ ID NO: 774526 - RNA, 19 nt, Human
agggccaaaggagacaggg

SEQ ID NO: 774527 - RNA, 24 nt, Human
augcauucugggauguuccccuga

SEQ ID NO: 774528 - RNA, 22 nt, Human
auggaaaacaggcguguggcuc

SEQ ID NO: 774529 - RNA, 24 nt, Human
auguuccccugagggaagagacug

SEQ ID NO: 774530 - RNA, 22 nt, Human
caaguggccaccgauaccagaa

SEQ ID NO: 774531 - RNA, 18 nt, Human
caagugggccacgauggc

SEQ ID NO: 774532 - RNA, 24 nt, Human
cacacacccuuugggacacagcca

SEQ ID NO: 774533 - RNA, 18 nt, Human
cacacauauucacacacc

SEQ ID NO: 774534 - RNA, 24 nt, Human
cacagcacacaggcugaggcacau

SEQ ID NO: 774535 - RNA, 18 nt, Human
cacagugucaagugggcc

SEQ ID NO: 774536 - RNA, 19 nt, Human
caggacaggccuggccugc

SEQ ID NO: 774537 - RNA, 23 nt, Human
caggccaggcgggccgcggcgcc

SEQ ID NO: 774538 - RNA, 22 nt, Human
cagggcacuggaggcaaggcug

SEQ ID NO: 774539 - RNA, 22 nt, Human
cauccucuacuuuccccccacu

SEQ ID NO: 774540 - RNA, 19 nt, Human
ccacacacccuuugggaca

SEQ ID NO: 774541 - RNA, 18 nt, Human
ccagcugauggaggagcc

SEQ ID NO: 774542 - RNA, 21 nt, Human
ccauccaaguggccaccgaua

SEQ ID NO: 774543 - RNA, 26 nt, Human
cccacacacccuuugggacacagcca

SEQ ID NO: 774544 - RNA, 22 nt, Human
cccacccugccccacccucuac

SEQ ID NO: 774545 - RNA, 19 nt, Human
ccccaagaucccuggacuc

SEQ ID NO: 774546 - RNA, 21 nt, Human
ccccaccccacccugccccac

SEQ ID NO: 774547 - RNA, 22 nt, Human
ccccacucccugccacugcaga

SEQ ID NO: 774548 - RNA, 19 nt, Human
ccccccugacacucgccac

SEQ ID NO: 774549 - RNA, 21 nt, Human
ccccccugacacucgccacuc

SEQ ID NO: 774550 - RNA, 26 nt, Human
ccccccugacacucgccacucgccac

SEQ ID NO: 774551 - RNA, 28 nt, Human
ccccccugacacucgccacucgccacuc

SEQ ID NO: 774552 - RNA, 24 nt, Human
ccccgcccccgccggccgcccccc

SEQ ID NO: 774553 - RNA, 25 nt, Human
ccccgcccccgccggccgccccccu

SEQ ID NO: 774554 - RNA, 20 nt, Human
cccugccccacccucuacag

SEQ ID NO: 774555 - RNA, 18 nt, Human
ccgauaccagaaauaacc

SEQ ID NO: 774556 - RNA, 21 nt, Human
ccgauaccagaaauaaccaaa

SEQ ID NO: 774557 - RNA, 18 nt, Human
ccgccccccugacacucg

SEQ ID NO: 774558 - RNA, 21 nt, Human
ccgcccccgccggccgccccc

SEQ ID NO: 774559 - RNA, 24 nt, Human
ccgccccgcccccgccggccgccc

SEQ ID NO: 774560 - RNA, 20 nt, Human
ccuggagcugccucaggggc

SEQ ID NO: 774561 - RNA, 20 nt, Human
ccuucagauuuugauuauaa

SEQ ID NO: 774562 - RNA, 18 nt, Human
ccuuugggcagccugguc

SEQ ID NO: 774563 - RNA, 21 nt, Human
cgaagccuggcugagagcuga

SEQ ID NO: 774564 - RNA, 22 nt, Human
cgccacucgccacucgccacuc

SEQ ID NO: 774565 - RNA, 20 nt, Human
cguguggcucucucccuggg

SEQ ID NO: 774566 - RNA, 25 nt, Human
cuccccuucauuacaaaaguaugca

SEQ ID NO: 774567 - RNA, 20 nt, Human
cucugcacccguagggaguc

SEQ ID NO: 774568 - RNA, 22 nt, Human
cucuggggcagguuggcugccc

SEQ ID NO: 774569 - RNA, 18 nt, Human
cuggaccauugcuccucc

SEQ ID NO: 774570 - RNA, 18 nt, Human
cuuccccuuuacacaacc

SEQ ID NO: 774571 - RNA, 21 nt, Human
cuucuuggaagaacaagaaag

SEQ ID NO: 774572 - RNA, 19 nt, Human
gaccauugcuccucccuuu

SEQ ID NO: 774573 - RNA, 25 nt, Human
gacuccccaccccuugccugacucu

SEQ ID NO: 774574 - RNA, 21 nt, Human
gagcagguggggcacccugga

SEQ ID NO: 774575 - RNA, 26 nt, Human
gagcccgcugccaacgccuccuccgg

SEQ ID NO: 774576 - RNA, 18 nt, Human
gccgggaagugacgcucc

SEQ ID NO: 774577 - RNA, 20 nt, Human
gcguguggcucucucccugg

SEQ ID NO: 774578 - RNA, 23 nt, Human
ggagcacagugucaagugggcca

SEQ ID NO: 774579 - RNA, 20 nt, Human
ggagcgcugcaggccaggcg

SEQ ID NO: 774580 - RNA, 24 nt, Human
ggaugaagaggagcagcaggguag

SEQ ID NO: 774581 - RNA, 22 nt, Human
ggcacacauauucacacaccaa

SEQ ID NO: 774582 - RNA, 19 nt, Human
ggcacuggaggcaaggcug

SEQ ID NO: 774583 - RNA, 24 nt, Human
ggcagguuggcugcccaggggagg

SEQ ID NO: 774584 - RNA, 21 nt, Human
ggccaggcgggccgcggcgcc

SEQ ID NO: 774585 - RNA, 25 nt, Human
ggccgcggcgccgcguggguccgag

SEQ ID NO: 774586 - RNA, 25 nt, Human
gggaaaagagguagcugcaaaacau

SEQ ID NO: 774587 - RNA, 26 nt, Human
gggaacagaauguaaaaaaauccauc

SEQ ID NO: 774588 - RNA, 20 nt, Human
gggcacuggaggcaaggcug

SEQ ID NO: 774589 - RNA, 21 nt, Human
gguaaagacuugaggccuggg

SEQ ID NO: 774590 - RNA, 22 nt, Human
ggugggguaaagacuugaggcc

SEQ ID NO: 774591 - RNA, 20 nt, Human
gugggagcgcugcaggccag

SEQ ID NO: 774592 - RNA, 23 nt, Human
uaaaaagaaacacggggaaaaga

SEQ ID NO: 774593 - RNA, 22 nt, Human
uaaccaaaugcauuuacacuca

SEQ ID NO: 774594 - RNA, 20 nt, Human
uaagaauaacgggucagagg

SEQ ID NO: 774595 - RNA, 20 nt, Human
uaagugcacaaaccaugucc

SEQ ID NO: 774596 - RNA, 19 nt, Human
uacaaauggcagagacuug

SEQ ID NO: 774597 - RNA, 23 nt, Human
uacacaacccccacucccugcca

SEQ ID NO: 774598 - RNA, 20 nt, Human
uagagaaacccaagugcucu

SEQ ID NO: 774599 - RNA, 23 nt, Human
uagagaaacccaagugcucugca

SEQ ID NO: 774600 - RNA, 19 nt, Human
uagugacaaaucauagggg

SEQ ID NO: 774601 - RNA, 25 nt, Human
uauguccucagaguuguuuuuuuuu

SEQ ID NO: 774602 - RNA, 20 nt, Human
ucaggacaaaagggaaagga

SEQ ID NO: 774603 - RNA, 19 nt, Human
uccacggacaggacaggcc

SEQ ID NO: 774604 - RNA, 23 nt, Human
uccacggacaggacaggccuggc

SEQ ID NO: 774605 - RNA, 23 nt, Human
uccagaagguagagguccacgga

SEQ ID NO: 774606 - RNA, 18 nt, Human
ucccaaagcugaaagccu

SEQ ID NO: 774607 - RNA, 24 nt, Human
uccccaagaucccuggacucccca

SEQ ID NO: 774608 - RNA, 25 nt, Human
uccccaagaucccuggacuccccac

SEQ ID NO: 774609 - RNA, 19 nt, Human
uccccaccccacccugccc

SEQ ID NO: 774610 - RNA, 20 nt, Human
uccccaccccacccugcccc

SEQ ID NO: 774611 - RNA, 21 nt, Human
uccccaccccuugccugacuc

SEQ ID NO: 774612 - RNA, 22 nt, Human
uccccuauguccucagaguugu

SEQ ID NO: 774613 - RNA, 23 nt, Human
ucuaguugaacccaacgaguggg

SEQ ID NO: 774614 - RNA, 21 nt, Human
ucuccaaucggagcuuagagc

SEQ ID NO: 774615 - RNA, 20 nt, Human
ucuccuaggaggggucccca

SEQ ID NO: 774616 - RNA, 20 nt, Human
ucucuaccgcugcugcugag

SEQ ID NO: 774617 - RNA, 25 nt, Human
ucuguucuuggggcuccccagggaa

SEQ ID NO: 774618 - RNA, 19 nt, Human
ugaagaggagcagcagggu

SEQ ID NO: 774619 - RNA, 21 nt, Human
ugagcaacugggcaucugcuu

SEQ ID NO: 774620 - RNA, 20 nt, Human
ugagggaagagacugcagcc

SEQ ID NO: 774621 - RNA, 20 nt, Human
ugcagcucuccuaggagggg

SEQ ID NO: 774622 - RNA, 26 nt, Human
ugccacacagcacacaggcugaggca

SEQ ID NO: 774623 - RNA, 22 nt, Human
ugccucuggggcagguuggcug

SEQ ID NO: 774624 - RNA, 24 nt, Human
uggaaaacaggcguguggcucucu

SEQ ID NO: 774625 - RNA, 18 nt, Human
uggaagaacaagaaaggg

SEQ ID NO: 774626 - RNA, 24 nt, Human
uggaaggugccggguguauaaagg

SEQ ID NO: 774627 - RNA, 30 nt, Human
uggaggagcacagugucaagugggccacgg

SEQ ID NO: 774628 - RNA, 26 nt, Human
uggcagugggaaccagaaugcugucg

SEQ ID NO: 774629 - RNA, 20 nt, Human
uggcaugugaccagcugaug

SEQ ID NO: 774630 - RNA, 28 nt, Human
ugggacacagccagauuugggaccaguc

SEQ ID NO: 774631 - RNA, 23 nt, Human
uggggcagguuggcugcccaggg

SEQ ID NO: 774632 - RNA, 20 nt, Human
uguaaaaaaauccauccaag

SEQ ID NO: 774633 - RNA, 24 nt, Human
uguagagaaacccaagugcucugc

SEQ ID NO: 774634 - RNA, 18 nt, Human
ugucaagugggccacgau

SEQ ID NO: 774635 - RNA, 19 nt, Human
ugucaagugggccacgaug

SEQ ID NO: 774636 - RNA, 21 nt, Human
ugucuaaaaagaaacacgggg

SEQ ID NO: 774637 - RNA, 20 nt, Human
ugugaccagcugauggagga

SEQ ID NO: 774638 - RNA, 22 nt, Human
uguguccaccuagugggggcug

SEQ ID NO: 774639 - RNA, 18 nt, Human
uuaaugccuggaccauug

SEQ ID NO: 774640 - RNA, 22 nt, Human
uuccacuggacacuccccuuca

SEQ ID NO: 774641 - RNA, 21 nt, Human
uuccccuuuacacaaccccca

SEQ ID NO: 774642 - RNA, 18 nt, Human
uucccuucagauuuugau

SEQ ID NO: 774643 - RNA, 26 nt, Human
uuggcagugggaaccagaaugcuguu

SEQ ID NO: 774644 - RNA, 19 nt, Human
uuggcaugugaccagcuga

SEQ ID NO: 774645 - RNA, 20 nt, Human
uuuccauccccaccccaccc

SEQ ID NO: 774646 - RNA, 24 nt, Human
aagcacaccuggggcccuccccac

SEQ ID NO: 774647 - RNA, 23 nt, Human
aagugucgcuguccaccggcucc

SEQ ID NO: 774648 - RNA, 23 nt, Human
acacacacacccccuccgggggc

SEQ ID NO: 774649 - RNA, 25 nt, Human
acaggcaacaccacaggcugcugug

SEQ ID NO: 774650 - RNA, 18 nt, Human
accgccuucuaucucuca

SEQ ID NO: 774651 - RNA, 22 nt, Human
agccugguccucaguggguggg

SEQ ID NO: 774652 - RNA, 22 nt, Human
aggcaugaaugaaggugggggg

SEQ ID NO: 774653 - RNA, 23 nt, Human
aggcgggcgggugcccugcgggg

SEQ ID NO: 774654 - RNA, 19 nt, Human
aggggaggggagggcgggg

SEQ ID NO: 774655 - RNA, 22 nt, Human
aggggaggggagggcgggggcc

SEQ ID NO: 774656 - RNA, 20 nt, Human
agguggggucccguggagac

SEQ ID NO: 774657 - RNA, 27 nt, Human
auuccuucccagggacaaguggggcag

SEQ ID NO: 774658 - RNA, 21 nt, Human
auugaacaccucugcaaauaa

SEQ ID NO: 774659 - RNA, 22 nt, Human
auugaacaccucugcaaauaau

SEQ ID NO: 774660 - RNA, 23 nt, Human
caacaccacaggcugcugugccc

SEQ ID NO: 774661 - RNA, 25 nt, Human
caagaaggcaugaaugaaggugggg

SEQ ID NO: 774662 - RNA, 20 nt, Human
caagcagaggggagcacccc

SEQ ID NO: 774663 - RNA, 21 nt, Human
cacacauugccccagggacaa

SEQ ID NO: 774664 - RNA, 27 nt, Human
cacacccaaacccuccuauuccuuccc

SEQ ID NO: 774665 - RNA, 20 nt, Human
cacagacccagggcccaguc

SEQ ID NO: 774666 - RNA, 21 nt, Human
caccacagacccagggcccag

SEQ ID NO: 774667 - RNA, 21 nt, Human
caccacaggcugcugugccca

SEQ ID NO: 774668 - RNA, 27 nt, Human
cacccaaacccuccuauuccuucccag

SEQ ID NO: 774669 - RNA, 18 nt, Human
cacccccuccgggggcaa

SEQ ID NO: 774670 - RNA, 24 nt, Human
cacugccagggaauggaaauuggg

SEQ ID NO: 774671 - RNA, 24 nt, Human
cacugcccaggugagccucugucc

SEQ ID NO: 774672 - RNA, 21 nt, Human
cacuucucuuuccuccuccca

SEQ ID NO: 774673 - RNA, 21 nt, Human
caggaagaggggaggggaggg

SEQ ID NO: 774674 - RNA, 24 nt, Human
caggccccgagagcgccacgaaga

SEQ ID NO: 774675 - RNA, 18 nt, Human
cagggacaaguggggcag

SEQ ID NO: 774676 - RNA, 23 nt, Human
cagggcagggcugggguuuccuc

SEQ ID NO: 774677 - RNA, 19 nt, Human
caggugagccucugucccu

SEQ ID NO: 774678 - RNA, 20 nt, Human
caggugagccucugucccuc

SEQ ID NO: 774679 - RNA, 20 nt, Human
cauaggacugggacagucug

SEQ ID NO: 774680 - RNA, 22 nt, Human
caucucuuccccuggcugggag

SEQ ID NO: 774681 - RNA, 24 nt, Human
ccacucagcccagaagaaccaaaa

SEQ ID NO: 774682 - RNA, 20 nt, Human
ccagccugguccucaguggg

SEQ ID NO: 774683 - RNA, 26 nt, Human
cccaaacccuccuauuccuucccagg

SEQ ID NO: 774684 - RNA, 21 nt, Human
cccacgcccugcagcaggucu

SEQ ID NO: 774685 - RNA, 21 nt, Human
cccacuuuccugcgagucgcu

SEQ ID NO: 774686 - RNA, 22 nt, Human
ccccaaauugaacaccucugca

SEQ ID NO: 774687 - RNA, 18 nt, Human
ccccacccacaggcaaca

SEQ ID NO: 774688 - RNA, 18 nt, Human
ccccccucccccuccucc

SEQ ID NO: 774689 - RNA, 21 nt, Human
ccccccucccccuccuccucc

SEQ ID NO: 774690 - RNA, 20 nt, Human
cccccggccugcgagggccc

SEQ ID NO: 774691 - RNA, 21 nt, Human
cccccuggcacgaugggcucc

SEQ ID NO: 774692 - RNA, 22 nt, Human
ccccgagagcgccacgaagagc

SEQ ID NO: 774693 - RNA, 19 nt, Human
ccccuccuccuccucuuuc

SEQ ID NO: 774694 - RNA, 24 nt, Human
cccgccuacucuggaaccuccagg

SEQ ID NO: 774695 - RNA, 23 nt, Human
cccggccugcgagggcccgagag

SEQ ID NO: 774696 - RNA, 22 nt, Human
cccucugcuccccccucccccc

SEQ ID NO: 774697 - RNA, 26 nt, Human
cccuggcugggagcuggggagcucau

SEQ ID NO: 774698 - RNA, 18 nt, Human
ccggccugcgagggcccg

SEQ ID NO: 774699 - RNA, 27 nt, Human
ccggcguccacacacacacccccuccg

SEQ ID NO: 774700 - RNA, 28 nt, Human
ccucccccuccuccuccucuuucccuuc

SEQ ID NO: 774701 - RNA, 21 nt, Human
ccuccucuuucccuucuccca

SEQ ID NO: 774702 - RNA, 21 nt, Human
ccucugcuccccccucccccu

SEQ ID NO: 774703 - RNA, 18 nt, Human
ccucuguuucuugguccc

SEQ ID NO: 774704 - RNA, 19 nt, Human
ccugcucgcagccugggcg

SEQ ID NO: 774705 - RNA, 20 nt, Human
ccugguccacuuggcgcguc

SEQ ID NO: 774706 - RNA, 18 nt, Human
ccuucggggccccucugg

SEQ ID NO: 774707 - RNA, 25 nt, Human
ccuuuccuccuccuccccuuccccc

SEQ ID NO: 774708 - RNA, 19 nt, Human
cgacgggucgguauaggcc

SEQ ID NO: 774709 - RNA, 21 nt, Human
cgcccacuucucuuuccuccu

SEQ ID NO: 774710 - RNA, 22 nt, Human
cgcccccggccugcgagggccc

SEQ ID NO: 774711 - RNA, 24 nt, Human
cggcccgggcgcgcugugaagcga

SEQ ID NO: 774712 - RNA, 20 nt, Human
cggcccugcgcugcugccuc

SEQ ID NO: 774713 - RNA, 25 nt, Human
cgggagaagcacaccuggggcccuc

SEQ ID NO: 774714 - RNA, 24 nt, Human
cuccaccacagacccagggcccag

SEQ ID NO: 774715 - RNA, 20 nt, Human
cucccccuccuccuccucuu

SEQ ID NO: 774716 - RNA, 18 nt, Human
cuccuccccuucccaacc

SEQ ID NO: 774717 - RNA, 19 nt, Human
cuccuccuccccuucccaa

SEQ ID NO: 774718 - RNA, 26 nt, Human
cugcagcaggucucagucagcuucua

SEQ ID NO: 774719 - RNA, 22 nt, Human
cugcggggccugcucgcagccu

SEQ ID NO: 774720 - RNA, 23 nt, Human
cugcuccccccucccccuccucc

SEQ ID NO: 774721 - RNA, 21 nt, Human
cuggucuggacugugagguca

SEQ ID NO: 774722 - RNA, 22 nt, Human
cuugggacagcagguugugaag

SEQ ID NO: 774723 - RNA, 19 nt, Human
cuugguccccacuuuccug

SEQ ID NO: 774724 - RNA, 22 nt, Human
cuuuccuuucuggaaucaucuc

SEQ ID NO: 774725 - RNA, 22 nt, Human
cuuuuaguaagggcugcaaggc

SEQ ID NO: 774726 - RNA, 19 nt, Human
gaagaggggaggggagggc

SEQ ID NO: 774727 - RNA, 18 nt, Human
gagccucugucccucaca

SEQ ID NO: 774728 - RNA, 22 nt, Human
gagcggugggucagcuccacug

SEQ ID NO: 774729 - RNA, 24 nt, Human
gagcggugggucagcuccacugga

SEQ ID NO: 774730 - RNA, 23 nt, Human
gagcuggggccuccccuggcuga

SEQ ID NO: 774731 - RNA, 21 nt, Human
gagggggcacccaggggagcc

SEQ ID NO: 774732 - RNA, 18 nt, Human
gcaaaacgcggcccgggc

SEQ ID NO: 774733 - RNA, 22 nt, Human
gcacagggagagaagccuagga

SEQ ID NO: 774734 - RNA, 19 nt, Human
gcaggagcugaagcauacg

SEQ ID NO: 774735 - RNA, 23 nt, Human
gcccacuucucuuuccuccuccc

SEQ ID NO: 774736 - RNA, 23 nt, Human
gcgcgcugugaagcgaggagauu

SEQ ID NO: 774737 - RNA, 18 nt, Human
gcgcugagcgguggguca

SEQ ID NO: 774738 - RNA, 22 nt, Human
gcgggugcccugcggggccugc

SEQ ID NO: 774739 - RNA, 24 nt, Human
gcuacgggagaagcacaccugggg

SEQ ID NO: 774740 - RNA, 22 nt, Human
gcucagccgggguugcaggagc

SEQ ID NO: 774741 - RNA, 20 nt, Human
ggaagaggggaggggagggc

SEQ ID NO: 774742 - RNA, 19 nt, Human
ggacaggaagaggggaggg

SEQ ID NO: 774743 - RNA, 23 nt, Human
ggacaggaagaggggaggggagg

SEQ ID NO: 774744 - RNA, 24 nt, Human
ggacaggaagaggggaggggaggg

SEQ ID NO: 774745 - RNA, 23 nt, Human
ggagaagcacaccuggggcccuc

SEQ ID NO: 774746 - RNA, 27 nt, Human
ggaggacaggaagaggggaggggaggg

SEQ ID NO: 774747 - RNA, 19 nt, Human
ggaggggagggcgggggcc

SEQ ID NO: 774748 - RNA, 20 nt, Human
ggcagguggccuuggccugg

SEQ ID NO: 774749 - RNA, 18 nt, Human
gggcacagggagagaagc

SEQ ID NO: 774750 - RNA, 20 nt, Human
gggcagggcccccuggcacg

SEQ ID NO: 774751 - RNA, 19 nt, Human
gggcccagggguccgacgg

SEQ ID NO: 774752 - RNA, 20 nt, Human
gggcccccaauccuggucca

SEQ ID NO: 774753 - RNA, 22 nt, Human
gggcgggggccacaggcgggcg

SEQ ID NO: 774754 - RNA, 18 nt, Human
ggggaggggagggcgggg

SEQ ID NO: 774755 - RNA, 20 nt, Human
ggggaggggagggcgggggc

SEQ ID NO: 774756 - RNA, 21 nt, Human
ggggccacaggcgggcgggug

SEQ ID NO: 774757 - RNA, 26 nt, Human
gggucacuguccagggacagccuccc

SEQ ID NO: 774758 - RNA, 24 nt, Human
ggugacacagggcacagggagaga

SEQ ID NO: 774759 - RNA, 23 nt, Human
gucagcuucuacaucuggguguc

SEQ ID NO: 774760 - RNA, 22 nt, Human
uaagugaauuaccccaaauuga

SEQ ID NO: 774761 - RNA, 19 nt, Human
uacacccagccugguccuc

SEQ ID NO: 774762 - RNA, 20 nt, Human
uacucuggaaccuccagggc

SEQ ID NO: 774763 - RNA, 26 nt, Human
ucacuuuacuggaggauccaggugac

SEQ ID NO: 774764 - RNA, 24 nt, Human
ucagcuccacuggagagggggcac

SEQ ID NO: 774765 - RNA, 21 nt, Human
ucaggauuauccaacuccucu

SEQ ID NO: 774766 - RNA, 21 nt, Human
uccacacacacacccccuccg

SEQ ID NO: 774767 - RNA, 21 nt, Human
ucccaaccgccuucuaucucc

SEQ ID NO: 774768 - RNA, 21 nt, Human
ucccaaccgccuucuaucucu

SEQ ID NO: 774769 - RNA, 25 nt, Human
uccccacccacaggcaacaccacag

SEQ ID NO: 774770 - RNA, 18 nt, Human
uccccaggucauuucauc

SEQ ID NO: 774771 - RNA, 19 nt, Human
uccccccucccccuccucc

SEQ ID NO: 774772 - RNA, 20 nt, Human
uccccccucccccuccuccu

SEQ ID NO: 774773 - RNA, 18 nt, Human
uccccuggcugggagcug

SEQ ID NO: 774774 - RNA, 25 nt, Human
uccuucccagggacaaguggggcag

SEQ ID NO: 774775 - RNA, 22 nt, Human
ucuacaucugggugucccugac

SEQ ID NO: 774776 - RNA, 20 nt, Human
ucucucacagccagcagggc

SEQ ID NO: 774777 - RNA, 22 nt, Human
ucucucacagccagcagggcug

SEQ ID NO: 774778 - RNA, 20 nt, Human
ucucuuuccuccucccaucc

SEQ ID NO: 774779 - RNA, 18 nt, Human
ucuggccuuuaauucacu

SEQ ID NO: 774780 - RNA, 23 nt, Human
ugacugagccuccaccacagacc

SEQ ID NO: 774781 - RNA, 22 nt, Human
ugagccuccaccacagacccag

SEQ ID NO: 774782 - RNA, 20 nt, Human
ugagccucugucccucacag

SEQ ID NO: 774783 - RNA, 18 nt, Human
ugagcggugggucagcuc

SEQ ID NO: 774784 - RNA, 19 nt, Human
ugaggucacacccaaaccc

SEQ ID NO: 774785 - RNA, 22 nt, Human
ugcaggagcugaagcauacggc

SEQ ID NO: 774786 - RNA, 23 nt, Human
ugccaggcgcaggccccgagagc

SEQ ID NO: 774787 - RNA, 18 nt, Human
ugcccaggugagccucug

SEQ ID NO: 774788 - RNA, 18 nt, Human
ugcggaggacaggaagag

SEQ ID NO: 774789 - RNA, 19 nt, Human
uggccuggggcugguuccu

SEQ ID NO: 774790 - RNA, 22 nt, Human
uggccuggggcugguuccuuug

SEQ ID NO: 774791 - RNA, 23 nt, Human
ugggagcuggggccuccccuggc

SEQ ID NO: 774792 - RNA, 19 nt, Human
uggggcagggcccccuggc

SEQ ID NO: 774793 - RNA, 23 nt, Human
uggucaggggcagguggccuugg

SEQ ID NO: 774794 - RNA, 21 nt, Human
uggucuggacugugagguccu

SEQ ID NO: 774795 - RNA, 24 nt, Human
uguuaucaggggcgccccaguagg

SEQ ID NO: 774796 - RNA, 24 nt, Human
uuccuccuccuccccuucccaacc

SEQ ID NO: 774797 - RNA, 18 nt, Human
uucuacaucugggugucc

SEQ ID NO: 774798 - RNA, 20 nt, Human
uuuccuccuccuccccuucc

SEQ ID NO: 774799 - RNA, 21 nt, Human
aaagaagaaaagggcugcgga

SEQ ID NO: 774800 - RNA, 23 nt, Human
acaaggcaggaggagcaggggaa

SEQ ID NO: 774801 - RNA, 23 nt, Human
acacaggaaaagagggcuccugg

SEQ ID NO: 774802 - RNA, 18 nt, Human
acucuaacuagucuggug

SEQ ID NO: 774803 - RNA, 21 nt, Human
acugugugcuaggcaccgugc

SEQ ID NO: 774804 - RNA, 20 nt, Human
agagcccccuccugccagcc

SEQ ID NO: 774805 - RNA, 18 nt, Human
agaggccagaucaugagg

SEQ ID NO: 774806 - RNA, 18 nt, Human
agaggcuguggcuagaga

SEQ ID NO: 774807 - RNA, 18 nt, Human
agaucaugaggggaaacu

SEQ ID NO: 774808 - RNA, 18 nt, Human
aggagcagcagagcugga

SEQ ID NO: 774809 - RNA, 26 nt, Human
aggagggggccuuugaggggaucgug

SEQ ID NO: 774810 - RNA, 20 nt, Human
aggcugugggaagagggcag

SEQ ID NO: 774811 - RNA, 23 nt, Human
agggguugccuuccuggaggagg

SEQ ID NO: 774812 - RNA, 19 nt, Human
agguggugguguuagcgau

SEQ ID NO: 774813 - RNA, 22 nt, Human
agugcagagguagccuggaggg

SEQ ID NO: 774814 - RNA, 18 nt, Human
auacagagaugcauaaga

SEQ ID NO: 774815 - RNA, 20 nt, Human
augaugcccgcuugggugcc

SEQ ID NO: 774816 - RNA, 25 nt, Human
augcggggagugggcugggcugggg

SEQ ID NO: 774817 - RNA, 19 nt, Human
auggagguggugguguuag

SEQ ID NO: 774818 - RNA, 22 nt, Human
caaucaggacccuccuucuucc

SEQ ID NO: 774819 - RNA, 19 nt, Human
cacagaggcaugaaacugc

SEQ ID NO: 774820 - RNA, 19 nt, Human
caccagaggugagcagagc

SEQ ID NO: 774821 - RNA, 21 nt, Human
cagagcccccuccugccagcc

SEQ ID NO: 774822 - RNA, 22 nt, Human
cagagcuggaggugaagcagag

SEQ ID NO: 774823 - RNA, 18 nt, Human
cagccucgcgcugcgggg

SEQ ID NO: 774824 - RNA, 22 nt, Human
caggcuuugacacaggaaaaga

SEQ ID NO: 774825 - RNA, 19 nt, Human
cagggcagaggcagaggcc

SEQ ID NO: 774826 - RNA, 23 nt, Human
cagugagaugaggccuccugacg

SEQ ID NO: 774827 - RNA, 23 nt, Human
caugcggggagugggcugggcug

SEQ ID NO: 774828 - RNA, 27 nt, Human
cauguaaacaaguaaaauacaguguga

SEQ ID NO: 774829 - RNA, 20 nt, Human
ccaagaguagaggagcagcg

SEQ ID NO: 774830 - RNA, 27 nt, Human
ccaggccagaugugcaaggagagcaug

SEQ ID NO: 774831 - RNA, 20 nt, Human
ccauguccuugcugccgucc

SEQ ID NO: 774832 - RNA, 21 nt, Human
ccccugagcagugugggggga

SEQ ID NO: 774833 - RNA, 18 nt, Human
cccuccuuuccucuugcc

SEQ ID NO: 774834 - RNA, 20 nt, Human
cccuggcaaggaggggcccu

SEQ ID NO: 774835 - RNA, 18 nt, Human
ccucacagucucaucgcc

SEQ ID NO: 774836 - RNA, 18 nt, Human
ccuucuuccaggcuguag

SEQ ID NO: 774837 - RNA, 24 nt, Human
cggagaagcuaacagcagccccca

SEQ ID NO: 774838 - RNA, 22 nt, Human
cgggccuaagaacaagggccaa

SEQ ID NO: 774839 - RNA, 18 nt, Human
cucaaagaagaaaagggc

SEQ ID NO: 774840 - RNA, 24 nt, Human
cucacagucucaucgccugauccc

SEQ ID NO: 774841 - RNA, 24 nt, Human
cugaggaccacaggguuccucgcu

SEQ ID NO: 774842 - RNA, 20 nt, Human
cuguggcuagagaagggggc

SEQ ID NO: 774843 - RNA, 21 nt, Human
gaacaagggccaaaaugagaa

SEQ ID NO: 774844 - RNA, 23 nt, Human
gaaggcacagaggcaugaaacug

SEQ ID NO: 774845 - RNA, 22 nt, Human
gacaaagugcagagguagccug

SEQ ID NO: 774846 - RNA, 20 nt, Human
gaccugcaagacuguggggc

SEQ ID NO: 774847 - RNA, 23 nt, Human
gaggagggggccuuugaggggau

SEQ ID NO: 774848 - RNA, 20 nt, Human
gagguguuggugguggcggc

SEQ ID NO: 774849 - RNA, 23 nt, Human
gaugaggccuccugacggagaag

SEQ ID NO: 774850 - RNA, 20 nt, Human
gaugagguguuggugguggc

SEQ ID NO: 774851 - RNA, 21 nt, Human
gaugagguguuggugguggcg

SEQ ID NO: 774852 - RNA, 23 nt, Human
gcagagcuggaggugaagcagag

SEQ ID NO: 774853 - RNA, 24 nt, Human
gcagagcuggaggugaagcagagg

SEQ ID NO: 774854 - RNA, 19 nt, Human
gccaggucugggacccaga

SEQ ID NO: 774855 - RNA, 22 nt, Human
gcccgcuugggugccgauggag

SEQ ID NO: 774856 - RNA, 18 nt, Human
gccuccaacaggcccgcu

SEQ ID NO: 774857 - RNA, 19 nt, Human
gcugugggaagagggcaga

SEQ ID NO: 774858 - RNA, 23 nt, Human
ggaacucuaacuagucugguggu

SEQ ID NO: 774859 - RNA, 18 nt, Human
ggaagaaacagcaugagc

SEQ ID NO: 774860 - RNA, 21 nt, Human
ggagagcaugugaccugcaag

SEQ ID NO: 774861 - RNA, 20 nt, Human
ggagaugucccgagaccccu

SEQ ID NO: 774862 - RNA, 19 nt, Human
ggaggccacugaggcagag

SEQ ID NO: 774863 - RNA, 20 nt, Human
ggaguagggaaggaggaggg

SEQ ID NO: 774864 - RNA, 21 nt, Human
ggagugggcugggcugggggc

SEQ ID NO: 774865 - RNA, 18 nt, Human
ggcagggaggcuguggga

SEQ ID NO: 774866 - RNA, 20 nt, Human
ggcaggggcaucuuggaggg

SEQ ID NO: 774867 - RNA, 24 nt, Human
ggccaggucugggacccagagcug

SEQ ID NO: 774868 - RNA, 19 nt, Human
ggcugggcugggggcgcug

SEQ ID NO: 774869 - RNA, 18 nt, Human
gggagugggcugggcugg

SEQ ID NO: 774870 - RNA, 19 nt, Human
gggcagaggcagaggccag

SEQ ID NO: 774871 - RNA, 25 nt, Human
gggcagaggccagaucaugagggga

SEQ ID NO: 774872 - RNA, 24 nt, Human
gggcagggaggcugugggaagagg

SEQ ID NO: 774873 - RNA, 19 nt, Human
ggggcuccacacuccagac

SEQ ID NO: 774874 - RNA, 22 nt, Human
gggggaugaugcccgcuugggu

SEQ ID NO: 774875 - RNA, 28 nt, Human
ggugaagcagaggggucgggccaggaaa

SEQ ID NO: 774876 - RNA, 21 nt, Human
guagaggagcagcagagcugg

SEQ ID NO: 774877 - RNA, 23 nt, Human
guggugguguuagcgaugagaag

SEQ ID NO: 774878 - RNA, 18 nt, Human
uaagauacaguccaugcc

SEQ ID NO: 774879 - RNA, 18 nt, Human
uacagcaucggccaaaga

SEQ ID NO: 774880 - RNA, 24 nt, Human
ucaggacaccagaguccagcugcc

SEQ ID NO: 774881 - RNA, 21 nt, Human
ucauucauucaacauuuauug

SEQ ID NO: 774882 - RNA, 18 nt, Human
ucccaaccauggaugggg

SEQ ID NO: 774883 - RNA, 20 nt, Human
ucccagccuccaacaggccc

SEQ ID NO: 774884 - RNA, 22 nt, Human
ucccagccuccaacaggcccgc

SEQ ID NO: 774885 - RNA, 18 nt, Human
ucccaggaguagggaagg

SEQ ID NO: 774886 - RNA, 18 nt, Human
uccucuugccguugauga

SEQ ID NO: 774887 - RNA, 21 nt, Human
uccuugcugccgucccaggag

SEQ ID NO: 774888 - RNA, 23 nt, Human
ucgccugaucccuccccuccccu

SEQ ID NO: 774889 - RNA, 20 nt, Human
ucucuccccuggcaaggagg

SEQ ID NO: 774890 - RNA, 23 nt, Human
ucuuuuggccucacagucucauc

SEQ ID NO: 774891 - RNA, 20 nt, Human
ugagaaggaugaugaggugu

SEQ ID NO: 774892 - RNA, 20 nt, Human
ugagaauacagcaucggcca

SEQ ID NO: 774893 - RNA, 18 nt, Human
ugagcaguguggggggau

SEQ ID NO: 774894 - RNA, 20 nt, Human
ugagcgaaggcacagaggca

SEQ ID NO: 774895 - RNA, 21 nt, Human
ugaggcagagaguggccagcc

SEQ ID NO: 774896 - RNA, 23 nt, Human
ugagggcaggggcaucuuggagg

SEQ ID NO: 774897 - RNA, 24 nt, Human
ugagguguuggugguggcggccuc

SEQ ID NO: 774898 - RNA, 24 nt, Human
ugaugagguguuggugguggcggc

SEQ ID NO: 774899 - RNA, 22 nt, Human
ugcaagacuguggggcuccaca

SEQ ID NO: 774900 - RNA, 23 nt, Human
ugcagagguagccuggaggggag

SEQ ID NO: 774901 - RNA, 23 nt, Human
ugccacaagagaagcauugacaa

SEQ ID NO: 774902 - RNA, 22 nt, Human
ugccgauggagguggugguguu

SEQ ID NO: 774903 - RNA, 21 nt, Human
uggacccuggguuccagggcu

SEQ ID NO: 774904 - RNA, 24 nt, Human
uggcaaggaggggcccuuuuggcc

SEQ ID NO: 774905 - RNA, 19 nt, Human
uggcaaucaggacccuccu

SEQ ID NO: 774906 - RNA, 19 nt, Human
uggcccagggcagaggcag

SEQ ID NO: 774907 - RNA, 18 nt, Human
ugggacccagagcugcca

SEQ ID NO: 774908 - RNA, 21 nt, Human
ugggcugggggcgcugggggc

SEQ ID NO: 774909 - RNA, 21 nt, Human
ugggggccuggauccaguggg

SEQ ID NO: 774910 - RNA, 18 nt, Human
uguaaacaaguaaaauac

SEQ ID NO: 774911 - RNA, 26 nt, Human
ugucugaaaaauggcuuugcagggau

SEQ ID NO: 774912 - RNA, 25 nt, Human
ugucugaaaaauggcuuugcagggg

SEQ ID NO: 774913 - RNA, 20 nt, Human
uguggcuccaaagggaucuc

SEQ ID NO: 774914 - RNA, 19 nt, Human
ugugugcuaggcaccgugc

SEQ ID NO: 774915 - RNA, 23 nt, Human
ugugugcuaggcaccgugcuagg

SEQ ID NO: 774916 - RNA, 22 nt, Human
uguuggugguggcggccucccc

SEQ ID NO: 774917 - RNA, 18 nt, Human
uugacacaggaaaagagg

SEQ ID NO: 774918 - RNA, 19 nt, Human
uuggcaaucaggacccucc

SEQ ID NO: 774919 - RNA, 23 nt, Human
uuggugguggcggccuccccaug

SEQ ID NO: 774920 - RNA, 22 nt, Human
uuuuuugauuaaaucauucauu

SEQ ID NO: 774921 - RNA, 27 nt, Human
uuuuuuuuuuuuuuuuuuuuuuugggg

SEQ ID NO: 774922 - RNA, 24 nt, Human
aaaaaaaaaaccaacaaaaaaacu

SEQ ID NO: 774923 - RNA, 20 nt, Human
aaaaacagaacaacgaauac

SEQ ID NO: 774924 - RNA, 21 nt, Human
aaaauggugaaaccccgucuc

SEQ ID NO: 774925 - RNA, 21 nt, Human
aacauuuugaacaguuaauuc

SEQ ID NO: 774926 - RNA, 24 nt, Human
aaucgcuugaacccaggagacaca

SEQ ID NO: 774927 - RNA, 20 nt, Human
acaaggccaacgacgagagc

SEQ ID NO: 774928 - RNA, 23 nt, Human
acagaacaacgaauacauacauc

SEQ ID NO: 774929 - RNA, 24 nt, Human
acagagcgagacuccaucucaaaa

SEQ ID NO: 774930 - RNA, 19 nt, Human
acagcacuguacuuuucuc

SEQ ID NO: 774931 - RNA, 23 nt, Human
acagcucacgccuguaaucccag

SEQ ID NO: 774932 - RNA, 24 nt, Human
acccaggagacacaggcugcagug

SEQ ID NO: 774933 - RNA, 24 nt, Human
accccgucucuacuaaaaauacaa

SEQ ID NO: 774934 - RNA, 23 nt, Human
accuguagucccagcuacuuggg

SEQ ID NO: 774935 - RNA, 18 nt, Human
acgccacugcacuccagc

SEQ ID NO: 774936 - RNA, 22 nt, Human
acgccacugcacuccagccugg

SEQ ID NO: 774937 - RNA, 21 nt, Human
acucgagaucacgccacugca

SEQ ID NO: 774938 - RNA, 23 nt, Human
acugcacuccagccuggcgacag

SEQ ID NO: 774939 - RNA, 25 nt, Human
acugcacuccagccuggcgacagag

SEQ ID NO: 774940 - RNA, 22 nt, Human
agaaucgcuugaacccaggaga

SEQ ID NO: 774941 - RNA, 20 nt, Human
agcacuuugaggggcagagg

SEQ ID NO: 774942 - RNA, 24 nt, Human
agcacuuugggaggcugaggcggg

SEQ ID NO: 774943 - RNA, 21 nt, Human
agccuggcgacagagcgagac

SEQ ID NO: 774944 - RNA, 23 nt, Human
agccuggcgacagagcgagacuc

SEQ ID NO: 774945 - RNA, 19 nt, Human
aggauuccaaacacacugc

SEQ ID NO: 774946 - RNA, 23 nt, Human
aggcaggagaaucgcuugaaccc

SEQ ID NO: 774947 - RNA, 24 nt, Human
aggcaggagaaucgcuugaaccca

SEQ ID NO: 774948 - RNA, 19 nt, Human
aggccaacgacgagagccc

SEQ ID NO: 774949 - RNA, 19 nt, Human
aggcggguggaucacguaa

SEQ ID NO: 774950 - RNA, 20 nt, Human
aggcugaggcaggagaaucg

SEQ ID NO: 774951 - RNA, 24 nt, Human
aggcugaggcaggagaaucgcuug

SEQ ID NO: 774952 - RNA, 21 nt, Human
aggcugaggcggguggaucac

SEQ ID NO: 774953 - RNA, 22 nt, Human
aggcugaggcggguggaucacg

SEQ ID NO: 774954 - RNA, 20 nt, Human
auagaaaccuccgcaaaacc

SEQ ID NO: 774955 - RNA, 24 nt, Human
aucacgccacugcacuccagccug

SEQ ID NO: 774956 - RNA, 21 nt, Human
auccuggucaaaauggugaaa

SEQ ID NO: 774957 - RNA, 23 nt, Human
caaaaaaaaaaaccaacaaaaaa

SEQ ID NO: 774958 - RNA, 21 nt, Human
caaaaccggccaaacaaacgc

SEQ ID NO: 774959 - RNA, 22 nt, Human
caaaauggugaaaccccgucuc

SEQ ID NO: 774960 - RNA, 24 nt, Human
caaaauggugaaaccccgucucua

SEQ ID NO: 774961 - RNA, 19 nt, Human
caaacaaacgcggacaggc

SEQ ID NO: 774962 - RNA, 21 nt, Human
caacaaaaaaacuggggugaa

SEQ ID NO: 774963 - RNA, 24 nt, Human
caagaccauccuggucaaaauggu

SEQ ID NO: 774964 - RNA, 24 nt, Human
cacaccuguagucccagcuacuug

SEQ ID NO: 774965 - RNA, 21 nt, Human
cacagcucacgccuguaaucc

SEQ ID NO: 774966 - RNA, 24 nt, Human
cacagcucacgccuguaaucccag

SEQ ID NO: 774967 - RNA, 22 nt, Human
caccagaagggagggcccgucc

SEQ ID NO: 774968 - RNA, 23 nt, Human
caccuguagucccagcuacuugg

SEQ ID NO: 774969 - RNA, 24 nt, Human
caccuguagucccagcuacuuggg

SEQ ID NO: 774970 - RNA, 25 nt, Human
caccuucaggcucccuuccagaucc

SEQ ID NO: 774971 - RNA, 26 nt, Human
caccuucaggcucccuuccagaucca

SEQ ID NO: 774972 - RNA, 24 nt, Human
cacgccuguaaucccagcacuuug

SEQ ID NO: 774973 - RNA, 22 nt, Human
cacuccagccuggcgacagagc

SEQ ID NO: 774974 - RNA, 23 nt, Human
cacuccagccuggcgacagagcg

SEQ ID NO: 774975 - RNA, 18 nt, Human
cacugcacuccagccugg

SEQ ID NO: 774976 - RNA, 18 nt, Human
cacugcacuccagccugg

SEQ ID NO: 774977 - RNA, 22 nt, Human
cacugcacuccagccuggcgac

SEQ ID NO: 774978 - RNA, 23 nt, Human
cacugcacuccagccuggcgaca

SEQ ID NO: 774979 - RNA, 23 nt, Human
cacugcacuccagccuggcgaca

SEQ ID NO: 774980 - RNA, 18 nt, Human
cagcacuuugaggggcag

SEQ ID NO: 774981 - RNA, 22 nt, Human
cagcacuuugaggggcagaggu

SEQ ID NO: 774982 - RNA, 24 nt, Human
cagcacuuugaggggcagaggugg

SEQ ID NO: 774983 - RNA, 24 nt, Human
cagcacuuugggaggcugaggcgg

SEQ ID NO: 774984 - RNA, 24 nt, Human
cagcuacuugggaggcugaggcag

SEQ ID NO: 774985 - RNA, 24 nt, Human
cagcucacgccuguaaucccagca

SEQ ID NO: 774986 - RNA, 22 nt, Human
ccaccaccagaagggagggccc

SEQ ID NO: 774987 - RNA, 20 nt, Human
ccaccacccggaccugcucc

SEQ ID NO: 774988 - RNA, 19 nt, Human
ccacugcacuccagccugg

SEQ ID NO: 774989 - RNA, 19 nt, Human
ccacugcacuccagccugg

SEQ ID NO: 774990 - RNA, 20 nt, Human
ccacugcacuccagccuggc

SEQ ID NO: 774991 - RNA, 23 nt, Human
ccacugcacuccagccuggcgac

SEQ ID NO: 774992 - RNA, 18 nt, Human
ccagagacugcaucggcu

SEQ ID NO: 774993 - RNA, 22 nt, Human
ccauguaucuacaugauucaga

SEQ ID NO: 774994 - RNA, 23 nt, Human
ccgcauagaaaccuccgcaaaac

SEQ ID NO: 774995 - RNA, 21 nt, Human
ccuggcgacagagcgagacuc

SEQ ID NO: 774996 - RNA, 22 nt, Human
ccuggucaaaauggugaaaccc

SEQ ID NO: 774997 - RNA, 23 nt, Human
ccuggucaaaauggugaaacccc

SEQ ID NO: 774998 - RNA, 24 nt, Human
ccuggucaaaauggugaaaccccg

SEQ ID NO: 774999 - RNA, 22 nt, Human
ccuguaaucccagcacuuuggg

SEQ ID NO: 775000 - RNA, 21 nt, Human
ccuguagucccagcuacuugg

SEQ ID NO: 775001 - RNA, 21 nt, Human
cgacgagagcccagaccagga

SEQ ID NO: 775002 - RNA, 23 nt, Human
cgagaauauuguggauccgcugu

SEQ ID NO: 775003 - RNA, 23 nt, Human
cgagacuccaucucaaaaaaaaa

SEQ ID NO: 775004 - RNA, 25 nt, Human
cgccacugcacuccagccuggcgac

SEQ ID NO: 775005 - RNA, 23 nt, Human
cgccuguaaucccagcacuuugg

SEQ ID NO: 775006 - RNA, 22 nt, Human
cggguacaccaccuucaggcuc

SEQ ID NO: 775007 - RNA, 20 nt, Human
cucaaaaaaaaaaaccaaca

SEQ ID NO: 775008 - RNA, 22 nt, Human
cucacgccuguaaucccagcac

SEQ ID NO: 775009 - RNA, 24 nt, Human
cucacgccuguaaucccagcacuu

SEQ ID NO: 775010 - RNA, 24 nt, Human
cuccagccuggcgacagagcgaga

SEQ ID NO: 775011 - RNA, 19 nt, Human
cuccaucucaaaaaaaaaa

SEQ ID NO: 775012 - RNA, 23 nt, Human
cugaacaucacucacuuccccua

SEQ ID NO: 775013 - RNA, 19 nt, Human
cuuccagauccaccacccg

SEQ ID NO: 775014 - RNA, 18 nt, Human
gacagaucaugaggucaa

SEQ ID NO: 775015 - RNA, 23 nt, Human
gagaucacgccacugcacuccag

SEQ ID NO: 775016 - RNA, 23 nt, Human
gagguggacagaucaugagguca

SEQ ID NO: 775017 - RNA, 23 nt, Human
gcacuccagccuggcgacagagc

SEQ ID NO: 775018 - RNA, 22 nt, Human
gcaggagaaucgcuugaaccca

SEQ ID NO: 775019 - RNA, 24 nt, Human
ggaucacguaaucccagcacuuug

SEQ ID NO: 775020 - RNA, 20 nt, Human
gggaggggcaguggccaggu

SEQ ID NO: 775021 - RNA, 19 nt, Human
ggggugggccaggcacagc

SEQ ID NO: 775022 - RNA, 18 nt, Human
gucaagagaucaagacca

SEQ ID NO: 775023 - RNA, 18 nt, Human
guggaucacguaauccca

SEQ ID NO: 775024 - RNA, 30 nt, Human
uaccugccauguaucuacaugauucagaac

SEQ ID NO: 775025 - RNA, 23 nt, Human
uacgacagaaucaucuggaaaaa

SEQ ID NO: 775026 - RNA, 21 nt, Human
uagaaaccuccgcaaaaccgg

SEQ ID NO: 775027 - RNA, 23 nt, Human
uaguggcacacaccuguaguccc

SEQ ID NO: 775028 - RNA, 24 nt, Human
uaguggcacacaccuguaguccca

SEQ ID NO: 775029 - RNA, 20 nt, Human
ucaaaaaccguaaaaucacu

SEQ ID NO: 775030 - RNA, 23 nt, Human
ucacgccacugcacuccagccug

SEQ ID NO: 775031 - RNA, 18 nt, Human
ucacguaaucccagcacu

SEQ ID NO: 775032 - RNA, 25 nt, Human
ucagcgcacgacagucacgugggga

SEQ ID NO: 775033 - RNA, 24 nt, Human
ucaugaggucaagagaucaagacc

SEQ ID NO: 775034 - RNA, 19 nt, Human
uccaccacccggaccugcu

SEQ ID NO: 775035 - RNA, 22 nt, Human
uccaccacccggaccugcucca

SEQ ID NO: 775036 - RNA, 22 nt, Human
uccagccuggcgacagagcgag

SEQ ID NO: 775037 - RNA, 24 nt, Human
uccaucucaaaaaaaaaaaccaac

SEQ ID NO: 775038 - RNA, 25 nt, Human
ucccaucaaaaaccguaaaaucacu

SEQ ID NO: 775039 - RNA, 20 nt, Human
uccgcaaaaccggccaaaca

SEQ ID NO: 775040 - RNA, 19 nt, Human
ucuaaaguguacuuuuuca

SEQ ID NO: 775041 - RNA, 21 nt, Human
ucucuacuaaaaauacaaaaa

SEQ ID NO: 775042 - RNA, 22 nt, Human
ugaacaucacucacuuccccua

SEQ ID NO: 775043 - RNA, 24 nt, Human
ugaggcaggagaaucgcuugaacc

SEQ ID NO: 775044 - RNA, 25 nt, Human
ugaggcaggagaaucgcuugaaccc

SEQ ID NO: 775045 - RNA, 18 nt, Human
ugaggcggguggaucacg

SEQ ID NO: 775046 - RNA, 19 nt, Human
ugaggcggguggaucacgu

SEQ ID NO: 775047 - RNA, 25 nt, Human
ugaggcggguggaucacguaauccc

SEQ ID NO: 775048 - RNA, 20 nt, Human
ugaggggcagagguggacag

SEQ ID NO: 775049 - RNA, 18 nt, Human
ugcuggggugggccaggc

SEQ ID NO: 775050 - RNA, 24 nt, Human
uggacggguacaccaccuucaggc

SEQ ID NO: 775051 - RNA, 19 nt, Human
uggaucacguaaucccagc

SEQ ID NO: 775052 - RNA, 22 nt, Human
uggcacacaccuguagucccag

SEQ ID NO: 775053 - RNA, 19 nt, Human
ugggaggcugaggcaggag

SEQ ID NO: 775054 - RNA, 23 nt, Human
ugggaggcugaggcaggagaauc

SEQ ID NO: 775055 - RNA, 20 nt, Human
ugggaggcugaggcgggugg

SEQ ID NO: 775056 - RNA, 23 nt, Human
ugggaggcugaggcggguggauc

SEQ ID NO: 775057 - RNA, 24 nt, Human
ugggaggcugaggcggguggauca

SEQ ID NO: 775058 - RNA, 22 nt, Human
ugggccaggcacagcucacgcc

SEQ ID NO: 775059 - RNA, 19 nt, Human
uguaacgacaacauagcau

SEQ ID NO: 775060 - RNA, 24 nt, Human
ugucagguaaguguccgucacuga

SEQ ID NO: 775061 - RNA, 23 nt, Human
uuccagauccaccacccggaccu

SEQ ID NO: 775062 - RNA, 25 nt, Human
uuccagauccaccacccggaccugc

SEQ ID NO: 775063 - RNA, 24 nt, Human
uugggaggcugaggcaggagaauc

SEQ ID NO: 775064 - RNA, 25 nt, Human
uugggaggcugaggcggguggauca

SEQ ID NO: 775065 - RNA, 20 nt, Human
aaaaagaaagaaacaaaggg

SEQ ID NO: 775066 - RNA, 20 nt, Human
aaaagaaaacagcuugucca

SEQ ID NO: 775067 - RNA, 18 nt, Human
aaagcuuuuugauuugag

SEQ ID NO: 775068 - RNA, 20 nt, Human
aaccauaggucacccaccuc

SEQ ID NO: 775069 - RNA, 21 nt, Human
aaccuagaaaagaaaacagcu

SEQ ID NO: 775070 - RNA, 22 nt, Human
aagaaagaaacaaaggguugaa

SEQ ID NO: 775071 - RNA, 22 nt, Human
aagauaccaaaagaaauaccag

SEQ ID NO: 775072 - RNA, 24 nt, Human
aagcaugaaaugaaaaauugugga

SEQ ID NO: 775073 - RNA, 23 nt, Human
aauggccaaccaucaccauuaug

SEQ ID NO: 775074 - RNA, 22 nt, Human
aauuguccuauugcaucaaucu

SEQ ID NO: 775075 - RNA, 22 nt, Human
acaggaagaaagauaccaaaag

SEQ ID NO: 775076 - RNA, 20 nt, Human
accaaucuucuagccccucc

SEQ ID NO: 775077 - RNA, 23 nt, Human
accaaugccaaagaauaguuuca

SEQ ID NO: 775078 - RNA, 22 nt, Human
accagacuuuccaucacuccaa

SEQ ID NO: 775079 - RNA, 18 nt, Human
acccuggggcaauagaau

SEQ ID NO: 775080 - RNA, 25 nt, Human
agaaaagaaaacagcuuguccaugu

SEQ ID NO: 775081 - RNA, 20 nt, Human
agaaguugucauuagaauau

SEQ ID NO: 775082 - RNA, 23 nt, Human
agagaaaaugugguaauagagag

SEQ ID NO: 775083 - RNA, 25 nt, Human
agagccagcaagccuacugaugaga

SEQ ID NO: 775084 - RNA, 20 nt, Human
agauguuuccuuggaccaga

SEQ ID NO: 775085 - RNA, 20 nt, Human
agcaagccuacugaugagag

SEQ ID NO: 775086 - RNA, 18 nt, Human
agcacagagcuaagagga

SEQ ID NO: 775087 - RNA, 22 nt, Human
agccacagaaauaaaacuaucc

SEQ ID NO: 775088 - RNA, 22 nt, Human
aggaagaaagauaccaaaagaa

SEQ ID NO: 775089 - RNA, 25 nt, Human
aggaagaaagauaccaaaagaaaua

SEQ ID NO: 775090 - RNA, 18 nt, Human
agguuacaaagacucaaa

SEQ ID NO: 775091 - RNA, 21 nt, Human
aguuucuauuuaucuagcaac

SEQ ID NO: 775092 - RNA, 23 nt, Human
auauuagagucccuuaagaggua

SEQ ID NO: 775093 - RNA, 22 nt, Human
augaacaugaagcauuuaccaa

SEQ ID NO: 775094 - RNA, 20 nt, Human
auuaauucucccucuucccu

SEQ ID NO: 775095 - RNA, 24 nt, Human
caaaagaaauaccagaaucauuuc

SEQ ID NO: 775096 - RNA, 23 nt, Human
caaauaguccccucaaauagucu

SEQ ID NO: 775097 - RNA, 18 nt, Human
cacaauggguuuaauuca

SEQ ID NO: 775098 - RNA, 19 nt, Human
cacagaugaagcuaagcgc

SEQ ID NO: 775099 - RNA, 20 nt, Human
caccucccuccaagugauaa

SEQ ID NO: 775100 - RNA, 20 nt, Human
cagaaauaaaacuauccaac

SEQ ID NO: 775101 - RNA, 18 nt, Human
cagaauuauccugacuga

SEQ ID NO: 775102 - RNA, 19 nt, Human
cagagaaauagagcuauua

SEQ ID NO: 775103 - RNA, 21 nt, Human
cagcacagaugaagcuaagcg

SEQ ID NO: 775104 - RNA, 20 nt, Human
caugcaaucugaaucagacc

SEQ ID NO: 775105 - RNA, 25 nt, Human
cauuagaauaugugggauuuaucac

SEQ ID NO: 775106 - RNA, 19 nt, Human
ccagaguccuuaccacccc

SEQ ID NO: 775107 - RNA, 21 nt, Human
ccauggacaccaaugccaaag

SEQ ID NO: 775108 - RNA, 21 nt, Human
ccucccuccaagugauaacuc

SEQ ID NO: 775109 - RNA, 21 nt, Human
cuagcaacagaggaaaacaaa

SEQ ID NO: 775110 - RNA, 21 nt, Human
cucaaaauacaggcucuugau

SEQ ID NO: 775111 - RNA, 23 nt, Human
cucuaguucuacaggaauccauc

SEQ ID NO: 775112 - RNA, 23 nt, Human
cuguauuacauucagacaauaag

SEQ ID NO: 775113 - RNA, 19 nt, Human
cuuguaaacaacuaaauaa

SEQ ID NO: 775114 - RNA, 22 nt, Human
gaaaaugugguaauagagaggg

SEQ ID NO: 775115 - RNA, 21 nt, Human
gcccaccaaucuucuagcccc

SEQ ID NO: 775116 - RNA, 19 nt, Human
gcuacauuuauagccgaau

SEQ ID NO: 775117 - RNA, 21 nt, Human
gcuuucaacucuguggcuuuc

SEQ ID NO: 775118 - RNA, 21 nt, Human
gcuuucaacucuguggcuuuc

SEQ ID NO: 775119 - RNA, 20 nt, Human
ggaccagagaucccacaggg

SEQ ID NO: 775120 - RNA, 18 nt, Human
gggggagagagagauggu

SEQ ID NO: 775121 - RNA, 24 nt, Human
guagguagggggagagagagaugg

SEQ ID NO: 775122 - RNA, 19 nt, Human
guaggugcuguuguuaucu

SEQ ID NO: 775123 - RNA, 19 nt, Human
uaaaagauaaaugcccaag

SEQ ID NO: 775124 - RNA, 22 nt, Human
uaaaauaguuucuguugacuaa

SEQ ID NO: 775125 - RNA, 20 nt, Human
uacuguuaauaagagaaaau

SEQ ID NO: 775126 - RNA, 21 nt, Human
uagagcuauuauuaguuucua

SEQ ID NO: 775127 - RNA, 22 nt, Human
uagcaaacagaauuauccugac

SEQ ID NO: 775128 - RNA, 21 nt, Human
uagcaacagaggaaaacaaaa

SEQ ID NO: 775129 - RNA, 25 nt, Human
uagcaacagaggaaaacaaaaaauc

SEQ ID NO: 775130 - RNA, 22 nt, Human
uagggccauggacaccaaugcc

SEQ ID NO: 775131 - RNA, 18 nt, Human
uagguuacaaagacucaa

SEQ ID NO: 775132 - RNA, 19 nt, Human
uauagaaugaggguaacag

SEQ ID NO: 775133 - RNA, 23 nt, Human
uaucagacugaauuuuuaucuag

SEQ ID NO: 775134 - RNA, 24 nt, Human
uaucuccauuuuauagacuagaaa

SEQ ID NO: 775135 - RNA, 23 nt, Human
uauggaagcaugaaaugaaaaau

SEQ ID NO: 775136 - RNA, 22 nt, Human
uauguuaaaaaucccccaugca

SEQ ID NO: 775137 - RNA, 24 nt, Human
uauuuaaauuguggauaguuuggu

SEQ ID NO: 775138 - RNA, 18 nt, Human
ucacagagccagcaagcc

SEQ ID NO: 775139 - RNA, 19 nt, Human
ucacagagccagcaagccu

SEQ ID NO: 775140 - RNA, 19 nt, Human
ucagagcucucccacuaaa

SEQ ID NO: 775141 - RNA, 24 nt, Human
ucagagcucucccacuaaaaauac

SEQ ID NO: 775142 - RNA, 19 nt, Human
uccacaaguacaauuuuaa

SEQ ID NO: 775143 - RNA, 22 nt, Human
uccauagguuguauagaaugag

SEQ ID NO: 775144 - RNA, 25 nt, Human
ucccacagggguucggcauuagcac

SEQ ID NO: 775145 - RNA, 22 nt, Human
ucccccaggggacugacugcuu

SEQ ID NO: 775146 - RNA, 19 nt, Human
uccuagguuacaaagacuc

SEQ ID NO: 775147 - RNA, 18 nt, Human
ucucuguagaugccaagg

SEQ ID NO: 775148 - RNA, 19 nt, Human
ugaagugcagagagauuaa

SEQ ID NO: 775149 - RNA, 22 nt, Human
ugacccggaaggauuaaagaag

SEQ ID NO: 775150 - RNA, 22 nt, Human
ugacugacaauugcucaucucc

SEQ ID NO: 775151 - RNA, 22 nt, Human
ugacuuuaacugugcuagacaa

SEQ ID NO: 775152 - RNA, 23 nt, Human
ugagagaagauucagugaauggu

SEQ ID NO: 775153 - RNA, 24 nt, Human
ugagagcacagagcuaagaggacc

SEQ ID NO: 775154 - RNA, 18 nt, Human
ugauagauaacacaauac

SEQ ID NO: 775155 - RNA, 19 nt, Human
uggacaccaaugccaaaga

SEQ ID NO: 775156 - RNA, 19 nt, Human
ugggcugagguccaguaaa

SEQ ID NO: 775157 - RNA, 21 nt, Human
ugggcugagguccaguaaauu

SEQ ID NO: 775158 - RNA, 23 nt, Human
uggguuuaauucaguuugaaagc

SEQ ID NO: 775159 - RNA, 26 nt, Human
uggugauaauagaaaaggcacagaau

SEQ ID NO: 775160 - RNA, 19 nt, Human
uguaagauggcgguauagg

SEQ ID NO: 775161 - RNA, 20 nt, Human
uguacaggaagaaagauacc

SEQ ID NO: 775162 - RNA, 26 nt, Human
uuauucuacagugaaaaagagaguca

SEQ ID NO: 775163 - RNA, 23 nt, Human
uucacaaaaugaaaaagaaagaa

SEQ ID NO: 775164 - RNA, 22 nt, Human
uugaaucacaaaagcucaagua

SEQ ID NO: 775165 - RNA, 24 nt, Human
uugccagagucugcaaaaucaagu

SEQ ID NO: 775166 - RNA, 23 nt, Human
aaaauguccccagcucccugccc

SEQ ID NO: 775167 - RNA, 21 nt, Human
aaacccaugucccaggacagg

SEQ ID NO: 775168 - RNA, 27 nt, Human
aaagagcuuaacuaggaaacauguagc

SEQ ID NO: 775169 - RNA, 22 nt, Human
aaagcuaguaaaacaggaaccc

SEQ ID NO: 775170 - RNA, 22 nt, Human
aacacacaccugggcauggcca

SEQ ID NO: 775171 - RNA, 19 nt, Human
aacuucuccccaaacccuc

SEQ ID NO: 775172 - RNA, 21 nt, Human
aacuucuccccaaacccucca

SEQ ID NO: 775173 - RNA, 24 nt, Human
aagcaggagccuggaguccccagc

SEQ ID NO: 775174 - RNA, 19 nt, Human
aagccucuucccacuccag

SEQ ID NO: 775175 - RNA, 21 nt, Human
aaggagucacagaaagggggg

SEQ ID NO: 775176 - RNA, 24 nt, Human
aaggagucacagaaagggggggca

SEQ ID NO: 775177 - RNA, 18 nt, Human
aaugacaacaaaaaaggg

SEQ ID NO: 775178 - RNA, 27 nt, Human
acacagugaagcacuggucugcagucu

SEQ ID NO: 775179 - RNA, 18 nt, Human
accagcugucaagcuguc

SEQ ID NO: 775180 - RNA, 20 nt, Human
acccaccggugcacaggccc

SEQ ID NO: 775181 - RNA, 22 nt, Human
acccagguccagucucaggccc

SEQ ID NO: 775182 - RNA, 22 nt, Human
acccugaggacaucacggaagc

SEQ ID NO: 775183 - RNA, 23 nt, Human
accggcagugcuaugggcgcccc

SEQ ID NO: 775184 - RNA, 23 nt, Human
accucgccacccuccacccccca

SEQ ID NO: 775185 - RNA, 19 nt, Human
accuugaaacccuaccagc

SEQ ID NO: 775186 - RNA, 23 nt, Human
accuugaaacccuaccagcacug

SEQ ID NO: 775187 - RNA, 19 nt, Human
acucugcccccaaagcugg

SEQ ID NO: 775188 - RNA, 21 nt, Human
acuggucugcagucuccgcac

SEQ ID NO: 775189 - RNA, 24 nt, Human
agaaagggggggcacuugggagug

SEQ ID NO: 775190 - RNA, 18 nt, Human
agaccagagagccccaag

SEQ ID NO: 775191 - RNA, 20 nt, Human
agacccagacuccaggccug

SEQ ID NO: 775192 - RNA, 18 nt, Human
agcaacagggaggggggg

SEQ ID NO: 775193 - RNA, 20 nt, Human
agccgcccugccccugcccc

SEQ ID NO: 775194 - RNA, 20 nt, Human
agccggggagggggcagacc

SEQ ID NO: 775195 - RNA, 19 nt, Human
agccuggaguccccagccu

SEQ ID NO: 775196 - RNA, 21 nt, Human
agcgggccuuugggggagcag

SEQ ID NO: 775197 - RNA, 18 nt, Human
agcuacaguaaagcagga

SEQ ID NO: 775198 - RNA, 23 nt, Human
agcuacaguaaagcaggagccug

SEQ ID NO: 775199 - RNA, 25 nt, Human
agcuggccugagaccagagagcccc

SEQ ID NO: 775200 - RNA, 23 nt, Human
aggaacuggggugcucugugagc

SEQ ID NO: 775201 - RNA, 23 nt, Human
aggacaucacggaagcccaaaga

SEQ ID NO: 775202 - RNA, 23 nt, Human
aggacucugcccccaaagcuggu

SEQ ID NO: 775203 - RNA, 21 nt, Human
aggcaggaauaaagacauuaa

SEQ ID NO: 775204 - RNA, 21 nt, Human
aggcagugggucccuccugga

SEQ ID NO: 775205 - RNA, 22 nt, Human
aggcuccuauccccaguggggc

SEQ ID NO: 775206 - RNA, 21 nt, Human
aggcugcugaggcugacccag

SEQ ID NO: 775207 - RNA, 23 nt, Human
aggcugcugaggcugacccaggc

SEQ ID NO: 775208 - RNA, 21 nt, Human
agggaggauaaggccuagagc

SEQ ID NO: 775209 - RNA, 21 nt, Human
agggggcagacccagacucca

SEQ ID NO: 775210 - RNA, 22 nt, Human
aggguugaaggcucccagaacu

SEQ ID NO: 775211 - RNA, 23 nt, Human
aggguuucauugccagcucccca

SEQ ID NO: 775212 - RNA, 18 nt, Human
aguaaagcaggagccugg

SEQ ID NO: 775213 - RNA, 22 nt, Human
aguagcuggugaggaacugggg

SEQ ID NO: 775214 - RNA, 23 nt, Human
auccugcgucccccuucccccag

SEQ ID NO: 775215 - RNA, 27 nt, Human
auccugcgucccccuucccccagcccu

SEQ ID NO: 775216 - RNA, 19 nt, Human
caaacaaaacuguauaaac

SEQ ID NO: 775217 - RNA, 21 nt, Human
caacuucuccccaaacccucc

SEQ ID NO: 775218 - RNA, 23 nt, Human
caagaacaugaaacccauguccc

SEQ ID NO: 775219 - RNA, 19 nt, Human
cacacagugaagcacuggu

SEQ ID NO: 775220 - RNA, 18 nt, Human
cacacuuguuccuucugg

SEQ ID NO: 775221 - RNA, 21 nt, Human
cacagugaagcacuggucugc

SEQ ID NO: 775222 - RNA, 18 nt, Human
caccccccacgcucaccc

SEQ ID NO: 775223 - RNA, 18 nt, Human
caccccccacgcucaccc

SEQ ID NO: 775224 - RNA, 19 nt, Human
cacccuccaccccccacgc

SEQ ID NO: 775225 - RNA, 19 nt, Human
caccucgccacccuccacc

SEQ ID NO: 775226 - RNA, 21 nt, Human
caccucgccacccuccacccc

SEQ ID NO: 775227 - RNA, 19 nt, Human
caccugcugcccaggcccc

SEQ ID NO: 775228 - RNA, 23 nt, Human
cacuggucugcagucuccgcacc

SEQ ID NO: 775229 - RNA, 19 nt, Human
cacuguacccuccaagccc

SEQ ID NO: 775230 - RNA, 20 nt, Human
cagacccccagcaccccccu

SEQ ID NO: 775231 - RNA, 22 nt, Human
cagaguggguggggaaggcaag

SEQ ID NO: 775232 - RNA, 20 nt, Human
cagcccacugggagagauca

SEQ ID NO: 775233 - RNA, 23 nt, Human
cagccucccccuccucccccucc

SEQ ID NO: 775234 - RNA, 19 nt, Human
cagccugcauaccccuccu

SEQ ID NO: 775235 - RNA, 24 nt, Human
cagcuucuggggacaucuccagga

SEQ ID NO: 775236 - RNA, 19 nt, Human
caggacccuuggugccacc

SEQ ID NO: 775237 - RNA, 24 nt, Human
caggacccuuggugccaccuggug

SEQ ID NO: 775238 - RNA, 19 nt, Human
caggcuccaacuggccaac

SEQ ID NO: 775239 - RNA, 23 nt, Human
caguauggccugacaggucucag

SEQ ID NO: 775240 - RNA, 21 nt, Human
cagucccccuaaccauucccc

SEQ ID NO: 775241 - RNA, 28 nt, Human
ccaaaaaaaaaaaaaaguaaaggcuucc

SEQ ID NO: 775242 - RNA, 22 nt, Human
ccaagcccagagaacaaccagg

SEQ ID NO: 775243 - RNA, 19 nt, Human
ccaccaacaauggcccaag

SEQ ID NO: 775244 - RNA, 19 nt, Human
ccagaagccuucuuccucg

SEQ ID NO: 775245 - RNA, 23 nt, Human
ccaggacagcaggagcgccugag

SEQ ID NO: 775246 - RNA, 19 nt, Human
ccaggcccgcacuacugug

SEQ ID NO: 775247 - RNA, 21 nt, Human
ccaggcccgcacuacugugcu

SEQ ID NO: 775248 - RNA, 22 nt, Human
ccaggccugaguucuagccaaa

SEQ ID NO: 775249 - RNA, 21 nt, Human
ccaucgccagcuggccugaga

SEQ ID NO: 775250 - RNA, 22 nt, Human
ccauggaggacccugccuacag

SEQ ID NO: 775251 - RNA, 20 nt, Human
cccacuaauagcaccuugaa

SEQ ID NO: 775252 - RNA, 19 nt, Human
cccaggccccuuucuuucu

SEQ ID NO: 775253 - RNA, 20 nt, Human
cccagugccaugggccucau

SEQ ID NO: 775254 - RNA, 23 nt, Human
cccaucgccagcuggccugagac

SEQ ID NO: 775255 - RNA, 23 nt, Human
ccccacuccacacagugaagcac

SEQ ID NO: 775256 - RNA, 18 nt, Human
ccccagcaccccccucac

SEQ ID NO: 775257 - RNA, 19 nt, Human
ccccagcaccccccucacc

SEQ ID NO: 775258 - RNA, 18 nt, Human
ccccaggacagcaggagc

SEQ ID NO: 775259 - RNA, 21 nt, Human
cccccagcaccccccucaccu

SEQ ID NO: 775260 - RNA, 22 nt, Human
cccccagccucccccuccuccc

SEQ ID NO: 775261 - RNA, 20 nt, Human
cccccuccucccccuccucc

SEQ ID NO: 775262 - RNA, 19 nt, Human
ccccuccucccccuccucc

SEQ ID NO: 775263 - RNA, 20 nt, Human
ccccuccuccuccucagagc

SEQ ID NO: 775264 - RNA, 23 nt, Human
ccccuccuccuccucagagcucu

SEQ ID NO: 775265 - RNA, 18 nt, Human
ccccucuggcacaggccu

SEQ ID NO: 775266 - RNA, 19 nt, Human
ccccugccugccccacucc

SEQ ID NO: 775267 - RNA, 22 nt, Human
ccccugcuugcccccagccucc

SEQ ID NO: 775268 - RNA, 28 nt, Human
ccccuucauccucucacucgcaugccug

SEQ ID NO: 775269 - RNA, 26 nt, Human
cccugcuugcccccagccucccccuc

SEQ ID NO: 775270 - RNA, 25 nt, Human
cccuuggugccaccuggugcagguc

SEQ ID NO: 775271 - RNA, 20 nt, Human
ccgcccugccccugccccac

SEQ ID NO: 775272 - RNA, 20 nt, Human
ccuaggacucugcccccaaa

SEQ ID NO: 775273 - RNA, 18 nt, Human
ccuccaagcccagagaac

SEQ ID NO: 775274 - RNA, 23 nt, Human
ccuccaagcccagagaacaacca

SEQ ID NO: 775275 - RNA, 18 nt, Human
ccuccaccccccacgcuc

SEQ ID NO: 775276 - RNA, 21 nt, Human
ccucgccacccuccacccccc

SEQ ID NO: 775277 - RNA, 22 nt, Human
ccucuucccacuccagccaugc

SEQ ID NO: 775278 - RNA, 20 nt, Human
ccugacuccaggccccagcc

SEQ ID NO: 775279 - RNA, 18 nt, Human
ccugagaccagagagccc

SEQ ID NO: 775280 - RNA, 19 nt, Human
ccugccccacuaauagcac

SEQ ID NO: 775281 - RNA, 24 nt, Human
ccugccccacuccacacagugaag

SEQ ID NO: 775282 - RNA, 21 nt, Human
ccuggaaagugaguauggugg

SEQ ID NO: 775283 - RNA, 19 nt, Human
ccuugaaacccuaccagca

SEQ ID NO: 775284 - RNA, 19 nt, Human
cgcaugccugcugugcccc

SEQ ID NO: 775285 - RNA, 20 nt, Human
cgucccccuucccccagccc

SEQ ID NO: 775286 - RNA, 27 nt, Human
cuaaccauucccccggggcccaagccu

SEQ ID NO: 775287 - RNA, 27 nt, Human
cucacagcgcugugaggcacagcagcu

SEQ ID NO: 775288 - RNA, 18 nt, Human
cucaugggggcaagcaau

SEQ ID NO: 775289 - RNA, 22 nt, Human
cucgcaugccugcugugcccca

SEQ ID NO: 775290 - RNA, 27 nt, Human
cugcgccuccccaguccccccaauccc

SEQ ID NO: 775291 - RNA, 19 nt, Human
cuggagugggcccugacuc

SEQ ID NO: 775292 - RNA, 20 nt, Human
cuggggcuguggggugccug

SEQ ID NO: 775293 - RNA, 21 nt, Human
cuggggcuguggggugccugu

SEQ ID NO: 775294 - RNA, 23 nt, Human
cugugcuccccgggaaggcagug

SEQ ID NO: 775295 - RNA, 20 nt, Human
cuuauggaaccuuccucccc

SEQ ID NO: 775296 - RNA, 21 nt, Human
gaaacccuaccagcacugccc

SEQ ID NO: 775297 - RNA, 20 nt, Human
gaagggcaccguggagacua

SEQ ID NO: 775298 - RNA, 26 nt, Human
gacaggguuucauugccagcucccca

SEQ ID NO: 775299 - RNA, 19 nt, Human
gacccccagcaccccccuc

SEQ ID NO: 775300 - RNA, 24 nt, Human
gaggaacuggggugcucugugagc

SEQ ID NO: 775301 - RNA, 20 nt, Human
gagggacuggccacaccugc

SEQ ID NO: 775302 - RNA, 24 nt, Human
gcaacagggagggggggacccuga

SEQ ID NO: 775303 - RNA, 24 nt, Human
gcaagcaauugggucuaggcugcg

SEQ ID NO: 775304 - RNA, 24 nt, Human
gcacaggcccaggagggacgagga

SEQ ID NO: 775305 - RNA, 20 nt, Human
gcagcagaguggguggggaa

SEQ ID NO: 775306 - RNA, 19 nt, Human
gccagccugcauaccccuc

SEQ ID NO: 775307 - RNA, 22 nt, Human
gccagcuccccaccagugucuc

SEQ ID NO: 775308 - RNA, 23 nt, Human
gccagcuccccaccagugucucu

SEQ ID NO: 775309 - RNA, 21 nt, Human
gcccgcacuacugugcucccc

SEQ ID NO: 775310 - RNA, 19 nt, Human
gcccugacuccaggcccca

SEQ ID NO: 775311 - RNA, 21 nt, Human
gccggggagggggcagaccca

SEQ ID NO: 775312 - RNA, 18 nt, Human
gcuacaguaaagcaggag

SEQ ID NO: 775313 - RNA, 21 nt, Human
gcucuggggcuguggggugcc

SEQ ID NO: 775314 - RNA, 24 nt, Human
gcugacccaggcuccaacuggcca

SEQ ID NO: 775315 - RNA, 18 nt, Human
gcugugccccaugcucug

SEQ ID NO: 775316 - RNA, 24 nt, Human
gcugugccccaugcucuggggcug

SEQ ID NO: 775317 - RNA, 19 nt, Human
gcuuccccguggccccugc

SEQ ID NO: 775318 - RNA, 26 nt, Human
ggaaacauguagcuuauggaaccuuc

SEQ ID NO: 775319 - RNA, 20 nt, Human
ggacacaggcuccuaucccc

SEQ ID NO: 775320 - RNA, 20 nt, Human
ggacauggggauaggcugcu

SEQ ID NO: 775321 - RNA, 23 nt, Human
ggagauccuggugccagugaugg

SEQ ID NO: 775322 - RNA, 21 nt, Human
ggaggacccugccuacagccc

SEQ ID NO: 775323 - RNA, 18 nt, Human
ggagggacgaggacgcug

SEQ ID NO: 775324 - RNA, 24 nt, Human
ggagggggcagacccagacuccag

SEQ ID NO: 775325 - RNA, 22 nt, Human
gggaaggcaauagugucgggga

SEQ ID NO: 775326 - RNA, 21 nt, Human
gggacaucuccaggacucagg

SEQ ID NO: 775327 - RNA, 20 nt, Human
gggaggauaaggccuagagc

SEQ ID NO: 775328 - RNA, 21 nt, Human
gggagugguggggguuuaagg

SEQ ID NO: 775329 - RNA, 21 nt, Human
gggcaggggccucccaggaga

SEQ ID NO: 775330 - RNA, 21 nt, Human
gggggacccugaggacaucac

SEQ ID NO: 775331 - RNA, 20 nt, Human
ggggguuuaaggugcaaaga

SEQ ID NO: 775332 - RNA, 18 nt, Human
gguggcacgccaacuucu

SEQ ID NO: 775333 - RNA, 21 nt, Human
ggugugggauauauggccaga

SEQ ID NO: 775334 - RNA, 23 nt, Human
gucacagaaagggggggcacuug

SEQ ID NO: 775335 - RNA, 21 nt, Human
gugccuguacacgagcaguug

SEQ ID NO: 775336 - RNA, 21 nt, Human
gugcugccagucagccugucu

SEQ ID NO: 775337 - RNA, 19 nt, Human
uaaaaagauguaaaagcua

SEQ ID NO: 775338 - RNA, 20 nt, Human
uaaaaauagcaacagggagg

SEQ ID NO: 775339 - RNA, 19 nt, Human
uaaaauguccccagcuccc

SEQ ID NO: 775340 - RNA, 22 nt, Human
uaaaauguccccagcucccugc

SEQ ID NO: 775341 - RNA, 21 nt, Human
uaaagcaggagccuggagucc

SEQ ID NO: 775342 - RNA, 25 nt, Human
uaccaagcccucugugaagggcacc

SEQ ID NO: 775343 - RNA, 18 nt, Human
uagcaacagggagggggg

SEQ ID NO: 775344 - RNA, 20 nt, Human
uagcaccuugaaacccuacc

SEQ ID NO: 775345 - RNA, 19 nt, Human
uagcuggugaggaacuggg

SEQ ID NO: 775346 - RNA, 19 nt, Human
uaggaaagagcuuaacuag

SEQ ID NO: 775347 - RNA, 19 nt, Human
uauggaaccuuccucccca

SEQ ID NO: 775348 - RNA, 18 nt, Human
ucacccagguccagucuc

SEQ ID NO: 775349 - RNA, 22 nt, Human
ucacuuccaaaaaaaaaaaaaa

SEQ ID NO: 775350 - RNA, 22 nt, Human
uccaagcccagagaacaaccag

SEQ ID NO: 775351 - RNA, 21 nt, Human
uccccaaacccuccaagauga

SEQ ID NO: 775352 - RNA, 24 nt, Human
uccccagccuuggggugggggucc

SEQ ID NO: 775353 - RNA, 20 nt, Human
uccccagcucccugccccag

SEQ ID NO: 775354 - RNA, 18 nt, Human
ucccccggggcccaagcc

SEQ ID NO: 775355 - RNA, 18 nt, Human
ucccccuaaccauucccc

SEQ ID NO: 775356 - RNA, 21 nt, Human
ucccccuucccccagcccugg

SEQ ID NO: 775357 - RNA, 18 nt, Human
uccgcaccucgccacccu

SEQ ID NO: 775358 - RNA, 18 nt, Human
ucgccacccuccaccccc

SEQ ID NO: 775359 - RNA, 19 nt, Human
ucggcuuccccguggcccc

SEQ ID NO: 775360 - RNA, 22 nt, Human
ucuccgcaccucgccacccucc

SEQ ID NO: 775361 - RNA, 19 nt, Human
ucugcagucuccgcaccuc

SEQ ID NO: 775362 - RNA, 21 nt, Human
ucuggaccccucaccugaucc

SEQ ID NO: 775363 - RNA, 20 nt, Human
ucuggggacaucuccaggac

SEQ ID NO: 775364 - RNA, 21 nt, Human
ugacuguggggaggggggucu

SEQ ID NO: 775365 - RNA, 21 nt, Human
ugagcagccgcccugccccug

SEQ ID NO: 775366 - RNA, 20 nt, Human
ugaggaagcaaauuaggggc

SEQ ID NO: 775367 - RNA, 26 nt, Human
ugaggacaucacggaagcccaaagau

SEQ ID NO: 775368 - RNA, 18 nt, Human
ugaggugccauuauugcu

SEQ ID NO: 775369 - RNA, 23 nt, Human
ugaguauggugcccuagucgccu

SEQ ID NO: 775370 - RNA, 18 nt, Human
ugaugacaccaccagugc

SEQ ID NO: 775371 - RNA, 22 nt, Human
ugcaaagaguauaacaaacaaa

SEQ ID NO: 775372 - RNA, 18 nt, Human
ugcacgggugcagcucgg

SEQ ID NO: 775373 - RNA, 21 nt, Human
ugccaccuggugcaggucagg

SEQ ID NO: 775374 - RNA, 18 nt, Human
ugcgccuccccagucccc

SEQ ID NO: 775375 - RNA, 20 nt, Human
ugcggcucucagacuggguc

SEQ ID NO: 775376 - RNA, 20 nt, Human
ugcucuggggcuguggggug

SEQ ID NO: 775377 - RNA, 24 nt, Human
ugcucuggggcuguggggugccug

SEQ ID NO: 775378 - RNA, 22 nt, Human
ugcuucggcuuccccguggccc

SEQ ID NO: 775379 - RNA, 22 nt, Human
uggacacagccacacuuguucc

SEQ ID NO: 775380 - RNA, 22 nt, Human
uggaccccucaccugaucccag

SEQ ID NO: 775381 - RNA, 23 nt, Human
uggagcagggcccaggcccgcac

SEQ ID NO: 775382 - RNA, 21 nt, Human
uggagccagccagggacaggu

SEQ ID NO: 775383 - RNA, 21 nt, Human
uggcacaggccuuggcagagg

SEQ ID NO: 775384 - RNA, 18 nt, Human
uggcagagggacuggcca

SEQ ID NO: 775385 - RNA, 27 nt, Human
ugggaaaaugugagccagcuccaaaga

SEQ ID NO: 775386 - RNA, 22 nt, Human
ugggagagaucaacuuuuuuug

SEQ ID NO: 775387 - RNA, 19 nt, Human
ugggaggggaugauccugc

SEQ ID NO: 775388 - RNA, 19 nt, Human
ugggcauggccauucugcc

SEQ ID NO: 775389 - RNA, 21 nt, Human
uggggacaucuccaggacuca

SEQ ID NO: 775390 - RNA, 22 nt, Human
uggggguggcacgccaacuucu

SEQ ID NO: 775391 - RNA, 21 nt, Human
uggggguuuaaggugcaaaga

SEQ ID NO: 775392 - RNA, 20 nt, Human
uggucugcagucuccgcacc

SEQ ID NO: 775393 - RNA, 20 nt, Human
ugucggggaguggugggggu

SEQ ID NO: 775394 - RNA, 23 nt, Human
ugucggggagugguggggguuua

SEQ ID NO: 775395 - RNA, 24 nt, Human
ugucugcccaaggagggucuggcu

SEQ ID NO: 775396 - RNA, 21 nt, Human
ugugggagauccuggugccag

SEQ ID NO: 775397 - RNA, 18 nt, Human
uuagugcuagccucaugg

SEQ ID NO: 775398 - RNA, 21 nt, Human
uuccccguggccccugcuugc

SEQ ID NO: 775399 - RNA, 25 nt, Human
uucuccccaaacccuccaagaugag

SEQ ID NO: 775400 - RNA, 18 nt, Human
uucuggagguggagcagg

SEQ ID NO: 775401 - RNA, 22 nt, Human
uucuuuuuccuucacuuccaaa

SEQ ID NO: 775402 - RNA, 21 nt, Human
uugcuucuggccuuguggucu

SEQ ID NO: 775403 - RNA, 24 nt, Human
uugggcaaggaagcugcuggcacu

SEQ ID NO: 775404 - RNA, 22 nt, Human
uuguguuguuuuguuuuaaaua

SEQ ID NO: 775405 - RNA, 20 nt, Human
aaaaagcagggggacucaag

SEQ ID NO: 775406 - RNA, 26 nt, Human
aaacauucuuuaccuaguaagcagug

SEQ ID NO: 775407 - RNA, 19 nt, Human
aaagguuccgagggcccac

SEQ ID NO: 775408 - RNA, 24 nt, Human
aaagugcugggauuacaggcguga

SEQ ID NO: 775409 - RNA, 20 nt, Human
aagaagccuggguuuuggaa

SEQ ID NO: 775410 - RNA, 19 nt, Human
aagaggccccacaugaaga

SEQ ID NO: 775411 - RNA, 27 nt, Human
aagcagguauuugagacaguguucaag

SEQ ID NO: 775412 - RNA, 23 nt, Human
aaguagcaaagcuucccaggaag

SEQ ID NO: 775413 - RNA, 19 nt, Human
aaguagcugggacuacagg

SEQ ID NO: 775414 - RNA, 20 nt, Human
aaguagcugggacuacaggc

SEQ ID NO: 775415 - RNA, 25 nt, Human
aaguagcugggacuacaggcgccca

SEQ ID NO: 775416 - RNA, 19 nt, Human
aagugcugggauuacaggc

SEQ ID NO: 775417 - RNA, 19 nt, Human
aagugcugggauuacaggc

SEQ ID NO: 775418 - RNA, 26 nt, Human
aagugcugggauuacaggcgugagcc

SEQ ID NO: 775419 - RNA, 20 nt, Human
aaugagguccccauacaccc

SEQ ID NO: 775420 - RNA, 21 nt, Human
acagugaaaugaugugaugac

SEQ ID NO: 775421 - RNA, 20 nt, Human
accacuggcuucacaugaac

SEQ ID NO: 775422 - RNA, 24 nt, Human
accauguuggccaggcuggucuug

SEQ ID NO: 775423 - RNA, 20 nt, Human
acccaagccauugugagagc

SEQ ID NO: 775424 - RNA, 18 nt, Human
acgggguuucaccauguu

SEQ ID NO: 775425 - RNA, 23 nt, Human
acgggguuucaccauguuggcca

SEQ ID NO: 775426 - RNA, 24 nt, Human
acgggguuucaccauguuggccag

SEQ ID NO: 775427 - RNA, 18 nt, Human
agaaaguaguaaggauuu

SEQ ID NO: 775428 - RNA, 24 nt, Human
agaaauaaaaagguggccgguacc

SEQ ID NO: 775429 - RNA, 19 nt, Human
agaaucccuggaaagaggg

SEQ ID NO: 775430 - RNA, 22 nt, Human
agacagugauccauuaggucug

SEQ ID NO: 775431 - RNA, 18 nt, Human
agagguucugugauccuc

SEQ ID NO: 775432 - RNA, 18 nt, Human
aggaagaguccauccaga

SEQ ID NO: 775433 - RNA, 18 nt, Human
aggcccugaccugaacaa

SEQ ID NO: 775434 - RNA, 21 nt, Human
aggcccugaccugaacaagga

SEQ ID NO: 775435 - RNA, 20 nt, Human
aggcgcccaccaccacgccc

SEQ ID NO: 775436 - RNA, 18 nt, Human
aggcuggagcacagcacc

SEQ ID NO: 775437 - RNA, 20 nt, Human
aggcuggagcacagcaccag

SEQ ID NO: 775438 - RNA, 21 nt, Human
agguauccaccuaccuuggcc

SEQ ID NO: 775439 - RNA, 23 nt, Human
agguauccaccuaccuuggccuc

SEQ ID NO: 775440 - RNA, 22 nt, Human
aguagagacgggguuucaccau

SEQ ID NO: 775441 - RNA, 18 nt, Human
agugcugggauuacaggc

SEQ ID NO: 775442 - RNA, 24 nt, Human
auuuuuguauuuuuaguagagacg

SEQ ID NO: 775443 - RNA, 23 nt, Human
caaaccuuggguccccuaacuga

SEQ ID NO: 775444 - RNA, 19 nt, Human
caaaguagcaaagcuuccc

SEQ ID NO: 775445 - RNA, 24 nt, Human
caaagugcugggauuacaggcgug

SEQ ID NO: 775446 - RNA, 20 nt, Human
caacagggccaaagucgucu

SEQ ID NO: 775447 - RNA, 22 nt, Human
caagaaaccaccuuuaccagaa

SEQ ID NO: 775448 - RNA, 26 nt, Human
caagacagugauccauuaggucugcc

SEQ ID NO: 775449 - RNA, 22 nt, Human
caagccauugugagagcggcgg

SEQ ID NO: 775450 - RNA, 23 nt, Human
caagguacuauccaaaacaaaaa

SEQ ID NO: 775451 - RNA, 20 nt, Human
cacaacaagggcaagcuuua

SEQ ID NO: 775452 - RNA, 21 nt, Human
cacagugaagagaaauaaaaa

SEQ ID NO: 775453 - RNA, 24 nt, Human
caccacgcccagcuaauuuuugua

SEQ ID NO: 775454 - RNA, 19 nt, Human
caccagucaucaacagggc

SEQ ID NO: 775455 - RNA, 21 nt, Human
caccauguuggccaggcuggu

SEQ ID NO: 775456 - RNA, 24 nt, Human
caccauguuggccaggcuggucuu

SEQ ID NO: 775457 - RNA, 27 nt, Human
caccauguuggccaggcuggucuugaa

SEQ ID NO: 775458 - RNA, 23 nt, Human
caccuaccuuggccucccaaagu

SEQ ID NO: 775459 - RNA, 22 nt, Human
cagcuaaauuaaucucacuuua

SEQ ID NO: 775460 - RNA, 19 nt, Human
caggcccugaccugaacaa

SEQ ID NO: 775461 - RNA, 22 nt, Human
caggcgauucuccugccucagc

SEQ ID NO: 775462 - RNA, 21 nt, Human
caggcgcccaccaccacgccc

SEQ ID NO: 775463 - RNA, 21 nt, Human
cagggccaaagucgucuuagc

SEQ ID NO: 775464 - RNA, 22 nt, Human
caggucccaaacaaaccuuggg

SEQ ID NO: 775465 - RNA, 22 nt, Human
cauagaaagaggagcaugccuc

SEQ ID NO: 775466 - RNA, 24 nt, Human
caucuccagcucuagccucaauuu

SEQ ID NO: 775467 - RNA, 24 nt, Human
cauguuggccaggcuggucuugaa

SEQ ID NO: 775468 - RNA, 22 nt, Human
ccaaagugcugggauuacaggc

SEQ ID NO: 775469 - RNA, 22 nt, Human
ccaaagugcugggauuacaggc

SEQ ID NO: 775470 - RNA, 24 nt, Human
ccaaagugcugggauuacaggcgu

SEQ ID NO: 775471 - RNA, 19 nt, Human
ccacaugaagaacuagcug

SEQ ID NO: 775472 - RNA, 23 nt, Human
cccaaguagcugggacuacaggc

SEQ ID NO: 775473 - RNA, 23 nt, Human
cccaaguagcugggacuacaggc

SEQ ID NO: 775474 - RNA, 21 nt, Human
cccaccaccacgcccagcuaa

SEQ ID NO: 775475 - RNA, 23 nt, Human
cccaggcuggaguguaauggcau

SEQ ID NO: 775476 - RNA, 21 nt, Human
cccaggucccaaacaaaccuu

SEQ ID NO: 775477 - RNA, 22 nt, Human
cccggaguccggcacuaaaaag

SEQ ID NO: 775478 - RNA, 24 nt, Human
ccucagguauccaccuaccuuggc

SEQ ID NO: 775479 - RNA, 23 nt, Human
ccugccucagccucccaaguagc

SEQ ID NO: 775480 - RNA, 19 nt, Human
cgaagguccccaagaccca

SEQ ID NO: 775481 - RNA, 21 nt, Human
cgcacaggcguuccaggcccu

SEQ ID NO: 775482 - RNA, 24 nt, Human
cgggguuucaccauguuggccagg

SEQ ID NO: 775483 - RNA, 24 nt, Human
cguucugucgcccaggcuggagug

SEQ ID NO: 775484 - RNA, 24 nt, Human
cucagccucccaaguagcugggac

SEQ ID NO: 775485 - RNA, 24 nt, Human
cucguucugucgcccaggcuggag

SEQ ID NO: 775486 - RNA, 23 nt, Human
cucuagccucaauuuaauagguu

SEQ ID NO: 775487 - RNA, 23 nt, Human
cugccucagccucccaaguagcu

SEQ ID NO: 775488 - RNA, 24 nt, Human
cuggaguguaauggcaugaucuca

SEQ ID NO: 775489 - RNA, 23 nt, Human
gaacuuguacacagugaagagaa

SEQ ID NO: 775490 - RNA, 23 nt, Human
gaccucagguauccaccuaccuu

SEQ ID NO: 775491 - RNA, 24 nt, Human
gagacgggguuucaccauguuggc

SEQ ID NO: 775492 - RNA, 20 nt, Human
gaggcucauuuuggugaaaa

SEQ ID NO: 775493 - RNA, 18 nt, Human
gauuacaggcgugagcca

SEQ ID NO: 775494 - RNA, 21 nt, Human
gauuacaggcgugagccacca

SEQ ID NO: 775495 - RNA, 22 nt, Human
gauuacaggcgugagccaccac

SEQ ID NO: 775496 - RNA, 21 nt, Human
gauucuccugccucagccucc

SEQ ID NO: 775497 - RNA, 18 nt, Human
gcauagaaagaggagcau

SEQ ID NO: 775498 - RNA, 22 nt, Human
gcccagcuaauuuuuguauuuu

SEQ ID NO: 775499 - RNA, 23 nt, Human
gcccaggcuggaguguaauggca

SEQ ID NO: 775500 - RNA, 24 nt, Human
gcgauucuccugccucagccuccc

SEQ ID NO: 775501 - RNA, 23 nt, Human
gcuggucuugaacuccugaccuc

SEQ ID NO: 775502 - RNA, 19 nt, Human
ggauuacaggcgugagcca

SEQ ID NO: 775503 - RNA, 18 nt, Human
ggcaugaucucagcucgg

SEQ ID NO: 775504 - RNA, 24 nt, Human
ggcuggucuugaacuccugaccuc

SEQ ID NO: 775505 - RNA, 23 nt, Human
gggguuucaccauguuggccagg

SEQ ID NO: 775506 - RNA, 18 nt, Human
gguaaaugaugaaaaaaa

SEQ ID NO: 775507 - RNA, 21 nt, Human
gguccccuaacugauaaggcu

SEQ ID NO: 775508 - RNA, 19 nt, Human
ggucuugaacuccugaccu

SEQ ID NO: 775509 - RNA, 23 nt, Human
guagagacgggguuucaccaugu

SEQ ID NO: 775510 - RNA, 24 nt, Human
uaauuuuuguauuuuuaguagaga

SEQ ID NO: 775511 - RNA, 22 nt, Human
uacacagugaagagaaauaaaa

SEQ ID NO: 775512 - RNA, 24 nt, Human
uacaggcgugagccaccacgccca

SEQ ID NO: 775513 - RNA, 22 nt, Human
uagagacgggguuucaccaugu

SEQ ID NO: 775514 - RNA, 24 nt, Human
uaguagagacgggguuucaccaug

SEQ ID NO: 775515 - RNA, 25 nt, Human
uaguagagacgggguuucaccaugu

SEQ ID NO: 775516 - RNA, 24 nt, Human
uauuucccucccucaguaagguua

SEQ ID NO: 775517 - RNA, 20 nt, Human
ucagccucccaaguagcugg

SEQ ID NO: 775518 - RNA, 19 nt, Human
ucaggcgauucuccugccu

SEQ ID NO: 775519 - RNA, 20 nt, Human
ucaguagacuuaauuuucuc

SEQ ID NO: 775520 - RNA, 21 nt, Human
uccaccuaccuuggccuccca

SEQ ID NO: 775521 - RNA, 24 nt, Human
ucccaaagugcugggauuacaggc

SEQ ID NO: 775522 - RNA, 24 nt, Human
ucccaaguagcugggacuacaggc

SEQ ID NO: 775523 - RNA, 23 nt, Human
uccccaagacccacuagguagca

SEQ ID NO: 775524 - RNA, 21 nt, Human
ucccgagaggcuguggcgcag

SEQ ID NO: 775525 - RNA, 23 nt, Human
ucccugccaccacagugaaauga

SEQ ID NO: 775526 - RNA, 20 nt, Human
uccugcugccgcgggacugc

SEQ ID NO: 775527 - RNA, 19 nt, Human
uccuggguucaggcgauuc

SEQ ID NO: 775528 - RNA, 20 nt, Human
uccuggguucaggcgauucu

SEQ ID NO: 775529 - RNA, 21 nt, Human
uccuggguucaggcgauucuc

SEQ ID NO: 775530 - RNA, 22 nt, Human
uccuggguucaggcgauucucc

SEQ ID NO: 775531 - RNA, 24 nt, Human
uccuggguucaggcgauucuccug

SEQ ID NO: 775532 - RNA, 18 nt, Human
ucgcccaggcuggagugu

SEQ ID NO: 775533 - RNA, 24 nt, Human
ucguucugucgcccaggcuggagu

SEQ ID NO: 775534 - RNA, 26 nt, Human
ucuccugccucagccucccaaguagc

SEQ ID NO: 775535 - RNA, 23 nt, Human
ucucguucugucgcccaggcugg

SEQ ID NO: 775536 - RNA, 24 nt, Human
ucucguucugucgcccaggcugga

SEQ ID NO: 775537 - RNA, 24 nt, Human
ucugucgcccaggcuggaguguaa

SEQ ID NO: 775538 - RNA, 22 nt, Human
ucuguggcauagaaagaggagc

SEQ ID NO: 775539 - RNA, 23 nt, Human
ucuugaacuccugaccucaggua

SEQ ID NO: 775540 - RNA, 18 nt, Human
ugaaagacugggauccag

SEQ ID NO: 775541 - RNA, 22 nt, Human
ugaaaugaugugaugacuaagc

SEQ ID NO: 775542 - RNA, 24 nt, Human
ugaacuuguacacagugaagagaa

SEQ ID NO: 775543 - RNA, 18 nt, Human
ugaccucagguauccacc

SEQ ID NO: 775544 - RNA, 19 nt, Human
ugaccucagguauccaccu

SEQ ID NO: 775545 - RNA, 20 nt, Human
ugagcaccucuaagccauga

SEQ ID NO: 775546 - RNA, 24 nt, Human
ugccucagccucccaaguagcugg

SEQ ID NO: 775547 - RNA, 24 nt, Human
ugcugggauuacaggcgugagcca

SEQ ID NO: 775548 - RNA, 24 nt, Human
uggaguguaauggcaugaucucag

SEQ ID NO: 775549 - RNA, 24 nt, Human
uggcaugaucucagcucgguacaa

SEQ ID NO: 775550 - RNA, 24 nt, Human
uggccaggcuggucuugaacuccu

SEQ ID NO: 775551 - RNA, 21 nt, Human
uggcgcagucuggacccaagc

SEQ ID NO: 775552 - RNA, 24 nt, Human
uggcgucucguucugucgcccagg

SEQ ID NO: 775553 - RNA, 21 nt, Human
uggcuuccguauuucccuccc

SEQ ID NO: 775554 - RNA, 21 nt, Human
ugggacuacaggcgcccacca

SEQ ID NO: 775555 - RNA, 24 nt, Human
ugggacuacaggcgcccaccacca

SEQ ID NO: 775556 - RNA, 18 nt, Human
ugggauuacaggcgugag

SEQ ID NO: 775557 - RNA, 19 nt, Human
ugggauuacaggcgugagc

SEQ ID NO: 775558 - RNA, 22 nt, Human
ugggauuacaggcgugagccac

SEQ ID NO: 775559 - RNA, 23 nt, Human
ugggauuacaggcgugagccacc

SEQ ID NO: 775560 - RNA, 24 nt, Human
ugggauuacaggcgugagccacca

SEQ ID NO: 775561 - RNA, 24 nt, Human
uggguucaggcgauucuccugccu

SEQ ID NO: 775562 - RNA, 22 nt, Human
ugguaaaggaauaaagaagccu

SEQ ID NO: 775563 - RNA, 21 nt, Human
uguauuuuuaguagagacggg

SEQ ID NO: 775564 - RNA, 20 nt, Human
ugucgcccaggcuggagugu

SEQ ID NO: 775565 - RNA, 21 nt, Human
uuaaagcaguacaaaauggcu

SEQ ID NO: 775566 - RNA, 18 nt, Human
uuaguagagacgggguuu

SEQ ID NO: 775567 - RNA, 22 nt, Human
uuaguagagacgggguuucacc

SEQ ID NO: 775568 - RNA, 24 nt, Human
uuaguagagacgggguuucaccau

SEQ ID NO: 775569 - RNA, 27 nt, Human
uuauacagacaagguacuauccaaaac

SEQ ID NO: 775570 - RNA, 18 nt, Human
uucaggcgauucuccugc

SEQ ID NO: 775571 - RNA, 21 nt, Human
uucaggcgauucuccugccuc

SEQ ID NO: 775572 - RNA, 23 nt, Human
uucaggcgauucuccugccucag

SEQ ID NO: 775573 - RNA, 21 nt, Human
uuccaggcccugaccugaaca

SEQ ID NO: 775574 - RNA, 19 nt, Human
uuccguauuucccucccuc

SEQ ID NO: 775575 - RNA, 18 nt, Human
uuggccucccaaagugcu

SEQ ID NO: 775576 - RNA, 23 nt, Human
uuguauuuuuaguagagacgggg

SEQ ID NO: 775577 - RNA, 24 nt, Human
uuucaccauguuggccaggcuggu

SEQ ID NO: 775578 - RNA, 24 nt, Human
uuuuuaguagagacgggguuucac

SEQ ID NO: 775579 - RNA, 20 nt, Human
uuuuuguauuuuuaguagag

SEQ ID NO: 775580 - RNA, 33 nt, Human
uuuuuuacuuuacuuuauuuauuuauuuauuuu

SEQ ID NO: 775581 - RNA, 18 nt, Human
uuuuuuuuuuuuuuuuug

SEQ ID NO: 775582 - RNA, 25 nt, Human
aaaaaaaaaagcaaaacaaaacaaa

SEQ ID NO: 775583 - RNA, 19 nt, Human
aaaaaaaccaagagaggac

SEQ ID NO: 775584 - RNA, 22 nt, Human
aaacagaaacagaaacgaacga

SEQ ID NO: 775585 - RNA, 24 nt, Human
aaacagaaacagaaacgaacgaga

SEQ ID NO: 775586 - RNA, 26 nt, Human
aaagcaaaacaaaacaaaaaaacaau

SEQ ID NO: 775587 - RNA, 26 nt, Human
aaagcacauccucaucaauacaccaa

SEQ ID NO: 775588 - RNA, 26 nt, Human
aaagcacauccucgucaauacaccaa

SEQ ID NO: 775589 - RNA, 20 nt, Human
aacaauacguagcccaccac

SEQ ID NO: 775590 - RNA, 30 nt, Human
aacccaaccagccugcaccgucccugcagg

SEQ ID NO: 775591 - RNA, 22 nt, Human
aaccucugcccucugugcccuc

SEQ ID NO: 775592 - RNA, 24 nt, Human
aagaggccggacgacacccggggc

SEQ ID NO: 775593 - RNA, 19 nt, Human
aagcaaaacaaaacaaaaa

SEQ ID NO: 775594 - RNA, 23 nt, Human
aagcaaaacaaaacaaaaaaaca

SEQ ID NO: 775595 - RNA, 24 nt, Human
aagcaaaacaaaacaaaaaaacaa

SEQ ID NO: 775596 - RNA, 26 nt, Human
aagcagaaggaggugcuaccccaagg

SEQ ID NO: 775597 - RNA, 24 nt, Human
aagggggguucaaggcaguuauca

SEQ ID NO: 775598 - RNA, 19 nt, Human
accaagagaggacugaaga

SEQ ID NO: 775599 - RNA, 19 nt, Human
acccaggccucuguccucu

SEQ ID NO: 775600 - RNA, 19 nt, Human
acccagguugccgaguggc

SEQ ID NO: 775601 - RNA, 20 nt, Human
accccaaggcccggggggug

SEQ ID NO: 775602 - RNA, 24 nt, Human
acucaggaggcggagguugcagug

SEQ ID NO: 775603 - RNA, 23 nt, Human
acugcacuccagccuggcgacag

SEQ ID NO: 775604 - RNA, 20 nt, Human
agaaggaagaccugcagggc

SEQ ID NO: 775605 - RNA, 23 nt, Human
agaaggaagaccugcagggcugg

SEQ ID NO: 775606 - RNA, 24 nt, Human
agcacuuugggaggccgaggcggg

SEQ ID NO: 775607 - RNA, 20 nt, Human
agcagcugcccacgaccccc

SEQ ID NO: 775608 - RNA, 23 nt, Human
agccaagcagggagcugagggcg

SEQ ID NO: 775609 - RNA, 23 nt, Human
agccuggcgacagugugagaccc

SEQ ID NO: 775610 - RNA, 23 nt, Human
aggaaaaaaaccaagagaggacu

SEQ ID NO: 775611 - RNA, 19 nt, Human
aggaagaccugcagggcug

SEQ ID NO: 775612 - RNA, 18 nt, Human
aggaagacugacagaggc

SEQ ID NO: 775613 - RNA, 26 nt, Human
aggcagcggcccggacccggguggca

SEQ ID NO: 775614 - RNA, 21 nt, Human
aggcaggagaaucgcgugaac

SEQ ID NO: 775615 - RNA, 23 nt, Human
aggcaggagaaucgcgugaacuc

SEQ ID NO: 775616 - RNA, 20 nt, Human
aggcaggagaccacgcgagg

SEQ ID NO: 775617 - RNA, 23 nt, Human
aggcagguggggguguaaagugc

SEQ ID NO: 775618 - RNA, 20 nt, Human
aggccgaggcgggagaacac

SEQ ID NO: 775619 - RNA, 24 nt, Human
aggcggagguugcagugagccgag

SEQ ID NO: 775620 - RNA, 23 nt, Human
aggcgggagaacacaaggucaag

SEQ ID NO: 775621 - RNA, 21 nt, Human
aggcgggcccagcggcagcgc

SEQ ID NO: 775622 - RNA, 20 nt, Human
aggcugaggcaggagaaucg

SEQ ID NO: 775623 - RNA, 20 nt, Human
aggcugaggcaggagaaucg

SEQ ID NO: 775624 - RNA, 19 nt, Human
agggcuggggcagcccgcg

SEQ ID NO: 775625 - RNA, 26 nt, Human
agguggggguguaaagugcggcuuuu

SEQ ID NO: 775626 - RNA, 23 nt, Human
auaugcaacccaaccagccugca

SEQ ID NO: 775627 - RNA, 19 nt, Human
aucacuucuaggaggcugc

SEQ ID NO: 775628 - RNA, 18 nt, Human
auccucaucaauacacca

SEQ ID NO: 775629 - RNA, 18 nt, Human
auccucgucaauacacca

SEQ ID NO: 775630 - RNA, 24 nt, Human
aucgcaccacugcacuccagccug

SEQ ID NO: 775631 - RNA, 23 nt, Human
augucucacgccuguaaucccag

SEQ ID NO: 775632 - RNA, 25 nt, Human
caaaaaaacaaugcagaccuaaagu

SEQ ID NO: 775633 - RNA, 23 nt, Human
caaagcacacccucaucagacac

SEQ ID NO: 775634 - RNA, 23 nt, Human
caaagcacacccucaucagacac

SEQ ID NO: 775635 - RNA, 23 nt, Human
caaagcacacccucaucagacac

SEQ ID NO: 775636 - RNA, 23 nt, Human
caaagcacacccucaucagacac

SEQ ID NO: 775637 - RNA, 24 nt, Human
caaagcacauccucaucaauacac

SEQ ID NO: 775638 - RNA, 21 nt, Human
caaagcacauccucaucagac

SEQ ID NO: 775639 - RNA, 21 nt, Human
caaagcacauccucaucagac

SEQ ID NO: 775640 - RNA, 21 nt, Human
caaagcacauccucaucagac

SEQ ID NO: 775641 - RNA, 21 nt, Human
caaagcacauccucaucagac

SEQ ID NO: 775642 - RNA, 21 nt, Human
caaagcacauccucaucagac

SEQ ID NO: 775643 - RNA, 21 nt, Human
caaagcacauccucaucagac

SEQ ID NO: 775644 - RNA, 21 nt, Human
caaagcacauccucaucagac

SEQ ID NO: 775645 - RNA, 21 nt, Human
caaagcacauccucaucagac

SEQ ID NO: 775646 - RNA, 21 nt, Human
caaagcacauccucaucagac

SEQ ID NO: 775647 - RNA, 21 nt, Human
caaagcacauccucaucagac

SEQ ID NO: 775648 - RNA, 21 nt, Human
caaagcacauccucaucagac

SEQ ID NO: 775649 - RNA, 21 nt, Human
caaagcacauccucaucagac

SEQ ID NO: 775650 - RNA, 21 nt, Human
caaagcacauccucaucagac

SEQ ID NO: 775651 - RNA, 21 nt, Human
caaagcacauccucaucagac

SEQ ID NO: 775652 - RNA, 21 nt, Human
caaagcacauccucaucagac

SEQ ID NO: 775653 - RNA, 21 nt, Human
caaagcacauccucaucagac

SEQ ID NO: 775654 - RNA, 21 nt, Human
caaagcacauccucaucagac

SEQ ID NO: 775655 - RNA, 21 nt, Human
caaagcacauccucaucagac

SEQ ID NO: 775656 - RNA, 21 nt, Human
caaagcacauccucaucagac

SEQ ID NO: 775657 - RNA, 21 nt, Human
caaagcacauccucaucagac

SEQ ID NO: 775658 - RNA, 21 nt, Human
caaagcacauccucaucagac

SEQ ID NO: 775659 - RNA, 21 nt, Human
caaagcacauccucaucagac

SEQ ID NO: 775660 - RNA, 21 nt, Human
caaagcacauccucaucagac

SEQ ID NO: 775661 - RNA, 21 nt, Human
caaagcacauccucaucagac

SEQ ID NO: 775662 - RNA, 21 nt, Human
caaagcacauccucaucagac

SEQ ID NO: 775663 - RNA, 21 nt, Human
caaagcacauccucaucagac

SEQ ID NO: 775664 - RNA, 21 nt, Human
caaagcacauccucaucagac

SEQ ID NO: 775665 - RNA, 23 nt, Human
caaagcacauccucaucagacac

SEQ ID NO: 775666 - RNA, 23 nt, Human
caaagcacauccucaucagacac

SEQ ID NO: 775667 - RNA, 23 nt, Human
caaagcacauccucaucagacac

SEQ ID NO: 775668 - RNA, 23 nt, Human
caaagcacauccucaucagacac

SEQ ID NO: 775669 - RNA, 23 nt, Human
caaagcacauccucaucagacac

SEQ ID NO: 775670 - RNA, 23 nt, Human
caaagcacauccucaucagacac

SEQ ID NO: 775671 - RNA, 23 nt, Human
caaagcacauccucaucagacac

SEQ ID NO: 775672 - RNA, 23 nt, Human
caaagcacauccucaucagacac

SEQ ID NO: 775673 - RNA, 21 nt, Human
caaagcacauccucaucggac

SEQ ID NO: 775674 - RNA, 24 nt, Human
caaagcacauccucgucaauacac

SEQ ID NO: 775675 - RNA, 21 nt, Human
caaagcacauucucaucagac

SEQ ID NO: 775676 - RNA, 21 nt, Human
caaagcacauucucaucagac

SEQ ID NO: 775677 - RNA, 21 nt, Human
caaagcacauucucaucagac

SEQ ID NO: 775678 - RNA, 21 nt, Human
caaagcacauucucaucagac

SEQ ID NO: 775679 - RNA, 21 nt, Human
caaagcacauucucaucagac

SEQ ID NO: 775680 - RNA, 23 nt, Human
caaagcacauucucaucagacac

SEQ ID NO: 775681 - RNA, 23 nt, Human
caaagcacauucucaucagacac

SEQ ID NO: 775682 - RNA, 23 nt, Human
caaagcacauucucaucagacac

SEQ ID NO: 775683 - RNA, 23 nt, Human
caaagcacauucucaucagacac

SEQ ID NO: 775684 - RNA, 23 nt, Human
caaagcacauucucaucagacac

SEQ ID NO: 775685 - RNA, 23 nt, Human
caaagcacauucucaucagacac

SEQ ID NO: 775686 - RNA, 23 nt, Human
caaagcacauucucaucagacac

SEQ ID NO: 775687 - RNA, 23 nt, Human
caaagcacauucucaucagacac

SEQ ID NO: 775688 - RNA, 23 nt, Human
caaagcacauucucaucagucac

SEQ ID NO: 775689 - RNA, 26 nt, Human
caacguguaaacagaaacagaaacga

SEQ ID NO: 775690 - RNA, 22 nt, Human
caagaccccugacucucccaca

SEQ ID NO: 775691 - RNA, 21 nt, Human
caauagucccugaggccaagc

SEQ ID NO: 775692 - RNA, 18 nt, Human
caaugcagaccucagccg

SEQ ID NO: 775693 - RNA, 22 nt, Human
caccaauagucccugaggccaa

SEQ ID NO: 775694 - RNA, 23 nt, Human
caccacagcacauccucuucaga

SEQ ID NO: 775695 - RNA, 27 nt, Human
caccacagcacauccucuucagacuca

SEQ ID NO: 775696 - RNA, 25 nt, Human
caccacugcacuccagccuggcgac

SEQ ID NO: 775697 - RNA, 26 nt, Human
caccacugcuguugucugcaagcccg

SEQ ID NO: 775698 - RNA, 21 nt, Human
cacccggggcagggcgcgccg

SEQ ID NO: 775699 - RNA, 20 nt, Human
caccugucuccucaaaccca

SEQ ID NO: 775700 - RNA, 24 nt, Human
cacgccuguaaucccagcacuuug

SEQ ID NO: 775701 - RNA, 20 nt, Human
cacuccagccuggcgacagu

SEQ ID NO: 775702 - RNA, 18 nt, Human
cacugcacuccagccugg

SEQ ID NO: 775703 - RNA, 18 nt, Human
cacugcacuccagccugg

SEQ ID NO: 775704 - RNA, 22 nt, Human
cacugcacuccagccuggcgac

SEQ ID NO: 775705 - RNA, 23 nt, Human
cacugcacuccagccuggcgaca

SEQ ID NO: 775706 - RNA, 23 nt, Human
cacugcacuccagccuggcgaca

SEQ ID NO: 775707 - RNA, 20 nt, Human
cacugcuguugucugcaagc

SEQ ID NO: 775708 - RNA, 18 nt, Human
cagcaaagggggguucaa

SEQ ID NO: 775709 - RNA, 22 nt, Human
cagcacuuugggaggccgaggc

SEQ ID NO: 775710 - RNA, 24 nt, Human
cagcacuuugggaggccgaggcgg

SEQ ID NO: 775711 - RNA, 22 nt, Human
cagccaccucaccccaguccug

SEQ ID NO: 775712 - RNA, 19 nt, Human
cagcggcagcgcuaagucc

SEQ ID NO: 775713 - RNA, 24 nt, Human
cagcuacucgggaggcugaggcag

SEQ ID NO: 775714 - RNA, 19 nt, Human
cagcuccuggcacaggcuc

SEQ ID NO: 775715 - RNA, 21 nt, Human
cagcugcccacgacccccagg

SEQ ID NO: 775716 - RNA, 19 nt, Human
caucaugcaagugguccug

SEQ ID NO: 775717 - RNA, 25 nt, Human
caugcaggcccccaagugagaugac

SEQ ID NO: 775718 - RNA, 26 nt, Human
ccaaagcacacccucaucagacaccu

SEQ ID NO: 775719 - RNA, 26 nt, Human
ccaaagcacacccucaucagacaccu

SEQ ID NO: 775720 - RNA, 26 nt, Human
ccaaagcacacccucaucagacaccu

SEQ ID NO: 775721 - RNA, 26 nt, Human
ccaaagcacacccucaucagacaccu

SEQ ID NO: 775722 - RNA, 21 nt, Human
ccaaagcacauccucaucaga

SEQ ID NO: 775723 - RNA, 21 nt, Human
ccaaagcacauccucaucaga

SEQ ID NO: 775724 - RNA, 21 nt, Human
ccaaagcacauccucaucaga

SEQ ID NO: 775725 - RNA, 21 nt, Human
ccaaagcacauccucaucaga

SEQ ID NO: 775726 - RNA, 21 nt, Human
ccaaagcacauccucaucaga

SEQ ID NO: 775727 - RNA, 21 nt, Human
ccaaagcacauccucaucaga

SEQ ID NO: 775728 - RNA, 21 nt, Human
ccaaagcacauccucaucaga

SEQ ID NO: 775729 - RNA, 22 nt, Human
ccaaagcacauccucaucagac

SEQ ID NO: 775730 - RNA, 22 nt, Human
ccaaagcacauccucaucagac

SEQ ID NO: 775731 - RNA, 22 nt, Human
ccaaagcacauccucaucagac

SEQ ID NO: 775732 - RNA, 22 nt, Human
ccaaagcacauccucaucagac

SEQ ID NO: 775733 - RNA, 22 nt, Human
ccaaagcacauccucaucagac

SEQ ID NO: 775734 - RNA, 22 nt, Human
ccaaagcacauccucaucagac

SEQ ID NO: 775735 - RNA, 22 nt, Human
ccaaagcacauccucaucagac

SEQ ID NO: 775736 - RNA, 22 nt, Human
ccaaagcacauccucaucagac

SEQ ID NO: 775737 - RNA, 22 nt, Human
ccaaagcacauccucaucagac

SEQ ID NO: 775738 - RNA, 26 nt, Human
ccaaagcacauccucaucagacaccu

SEQ ID NO: 775739 - RNA, 26 nt, Human
ccaaagcacauccucaucagacaccu

SEQ ID NO: 775740 - RNA, 26 nt, Human
ccaaagcacauccucaucagacaccu

SEQ ID NO: 775741 - RNA, 26 nt, Human
ccaaagcacauccucaucagacaccu

SEQ ID NO: 775742 - RNA, 26 nt, Human
ccaaagcacauccucaucagacaccu

SEQ ID NO: 775743 - RNA, 26 nt, Human
ccaaagcacauccucaucagacaccu

SEQ ID NO: 775744 - RNA, 26 nt, Human
ccaaagcacauccucaucagacaccu

SEQ ID NO: 775745 - RNA, 26 nt, Human
ccaaagcacauccucaucagacaccu

SEQ ID NO: 775746 - RNA, 25 nt, Human
ccaaagcacauccucaucagacucc

SEQ ID NO: 775747 - RNA, 25 nt, Human
ccaaagcacauccucaucagacucc

SEQ ID NO: 775748 - RNA, 25 nt, Human
ccaaagcacauccucaucagacucc

SEQ ID NO: 775749 - RNA, 25 nt, Human
ccaaagcacauccucaucagacucc

SEQ ID NO: 775750 - RNA, 25 nt, Human
ccaaagcacauccucaucagacucc

SEQ ID NO: 775751 - RNA, 25 nt, Human
ccaaagcacauccucaucagacucc

SEQ ID NO: 775752 - RNA, 25 nt, Human
ccaaagcacauccucaucagacucc

SEQ ID NO: 775753 - RNA, 25 nt, Human
ccaaagcacauccucaucagacucc

SEQ ID NO: 775754 - RNA, 25 nt, Human
ccaaagcacauccucaucagacucc

SEQ ID NO: 775755 - RNA, 25 nt, Human
ccaaagcacauccucaucagacucc

SEQ ID NO: 775756 - RNA, 25 nt, Human
ccaaagcacauccucaucagacucc

SEQ ID NO: 775757 - RNA, 23 nt, Human
ccaaagcacauccucaucggacu

SEQ ID NO: 775758 - RNA, 21 nt, Human
ccaaagcacauucucaucaga

SEQ ID NO: 775759 - RNA, 22 nt, Human
ccaaagcacauucucaucagac

SEQ ID NO: 775760 - RNA, 22 nt, Human
ccaaagcacauucucaucagac

SEQ ID NO: 775761 - RNA, 22 nt, Human
ccaaagcacauucucaucagac

SEQ ID NO: 775762 - RNA, 26 nt, Human
ccaaagcacauucucaucagacaccu

SEQ ID NO: 775763 - RNA, 26 nt, Human
ccaaagcacauucucaucagacaccu

SEQ ID NO: 775764 - RNA, 26 nt, Human
ccaaagcacauucucaucagacaccu

SEQ ID NO: 775765 - RNA, 26 nt, Human
ccaaagcacauucucaucagacaccu

SEQ ID NO: 775766 - RNA, 26 nt, Human
ccaaagcacauucucaucagacaccu

SEQ ID NO: 775767 - RNA, 26 nt, Human
ccaaagcacauucucaucagacaccu

SEQ ID NO: 775768 - RNA, 26 nt, Human
ccaaagcacauucucaucagacaccu

SEQ ID NO: 775769 - RNA, 26 nt, Human
ccaaagcacauucucaucagacaccu

SEQ ID NO: 775770 - RNA, 25 nt, Human
ccaaagcacauucucaucagacucc

SEQ ID NO: 775771 - RNA, 26 nt, Human
ccaaagcacauucucaucagucaccu

SEQ ID NO: 775772 - RNA, 19 nt, Human
ccacacccaucaugcaagu

SEQ ID NO: 775773 - RNA, 18 nt, Human
ccacagaaggaagaccug

SEQ ID NO: 775774 - RNA, 18 nt, Human
ccacccgauccaccacaa

SEQ ID NO: 775775 - RNA, 22 nt, Human
ccacgcgaggacucugccuccc

SEQ ID NO: 775776 - RNA, 19 nt, Human
ccacugcacuccagccugg

SEQ ID NO: 775777 - RNA, 19 nt, Human
ccacugcacuccagccugg

SEQ ID NO: 775778 - RNA, 20 nt, Human
ccacugcacuccagccuggc

SEQ ID NO: 775779 - RNA, 23 nt, Human
ccacugcacuccagccuggcgac

SEQ ID NO: 775780 - RNA, 18 nt, Human
ccaggacuccaagccauc

SEQ ID NO: 775781 - RNA, 25 nt, Human
ccaucaccaugcaugcccacauuuc

SEQ ID NO: 775782 - RNA, 20 nt, Human
cccaccacgucaugcccccg

SEQ ID NO: 775783 - RNA, 22 nt, Human
ccccaaacacccagguugccga

SEQ ID NO: 775784 - RNA, 28 nt, Human
ccccaccccgcccaaccucugcccucuu

SEQ ID NO: 775785 - RNA, 18 nt, Human
ccccagcccccacccgau

SEQ ID NO: 775786 - RNA, 20 nt, Human
ccccggcggaggcugcuggu

SEQ ID NO: 775787 - RNA, 21 nt, Human
ccccggcggaggcugcuggug

SEQ ID NO: 775788 - RNA, 21 nt, Human
cccgaccaccucuacccagac

SEQ ID NO: 775789 - RNA, 19 nt, Human
cccgucuccccgccggggc

SEQ ID NO: 775790 - RNA, 24 nt, Human
ccgaggcgggagaacacaagguca

SEQ ID NO: 775791 - RNA, 22 nt, Human
ccgcauacgccgcccgcggcca

SEQ ID NO: 775792 - RNA, 18 nt, Human
ccuacuguccccaccccg

SEQ ID NO: 775793 - RNA, 23 nt, Human
ccuacuguccccaccccgcccaa

SEQ ID NO: 775794 - RNA, 21 nt, Human
ccucaucagacaccucaauac

SEQ ID NO: 775795 - RNA, 21 nt, Human
ccucaucagacaccucaauac

SEQ ID NO: 775796 - RNA, 21 nt, Human
ccucaucagacaccucaauac

SEQ ID NO: 775797 - RNA, 21 nt, Human
ccucaucagacaccucaauac

SEQ ID NO: 775798 - RNA, 21 nt, Human
ccucaucagacaccucaauac

SEQ ID NO: 775799 - RNA, 21 nt, Human
ccucaucagacaccucaauac

SEQ ID NO: 775800 - RNA, 21 nt, Human
ccucaucagacaccucaauac

SEQ ID NO: 775801 - RNA, 21 nt, Human
ccucaucagacaccucaauac

SEQ ID NO: 775802 - RNA, 21 nt, Human
ccucaucagacaccucaauac

SEQ ID NO: 775803 - RNA, 21 nt, Human
ccucaucagacaccucaauac

SEQ ID NO: 775804 - RNA, 21 nt, Human
ccucaucagacaccucaauac

SEQ ID NO: 775805 - RNA, 21 nt, Human
ccucaucagacaccucaauac

SEQ ID NO: 775806 - RNA, 21 nt, Human
ccucaucagacaccucaauac

SEQ ID NO: 775807 - RNA, 21 nt, Human
ccucaucagacaccucaguac

SEQ ID NO: 775808 - RNA, 19 nt, Human
ccucccagcugggggccgg

SEQ ID NO: 775809 - RNA, 22 nt, Human
ccucccagcugggggccggccc

SEQ ID NO: 775810 - RNA, 22 nt, Human
ccugaggccaagccacagucac

SEQ ID NO: 775811 - RNA, 20 nt, Human
ccugccgccccagcccccac

SEQ ID NO: 775812 - RNA, 22 nt, Human
ccugccgccccagcccccaccc

SEQ ID NO: 775813 - RNA, 24 nt, Human
ccugggcaauaaggagaaacccca

SEQ ID NO: 775814 - RNA, 19 nt, Human
ccuguaaucccagcuacuc

SEQ ID NO: 775815 - RNA, 21 nt, Human
ccuguaaucccagcuacucgg

SEQ ID NO: 775816 - RNA, 21 nt, Human
cgagagggccagggaggaggg

SEQ ID NO: 775817 - RNA, 24 nt, Human
cgagaucgcaccacugcacuccag

SEQ ID NO: 775818 - RNA, 18 nt, Human
cgaggcaggagaccacgc

SEQ ID NO: 775819 - RNA, 21 nt, Human
cgaggcuggggugggggccgg

SEQ ID NO: 775820 - RNA, 21 nt, Human
cgagguauauggcucugugcc

SEQ ID NO: 775821 - RNA, 21 nt, Human
cgcaccacugcacuccagccu

SEQ ID NO: 775822 - RNA, 23 nt, Human
cgcccguaaucccagguggcggg

SEQ ID NO: 775823 - RNA, 24 nt, Human
cgccuguaaucccagcacuuuggg

SEQ ID NO: 775824 - RNA, 24 nt, Human
cgccuguaaucccagcuacucggg

SEQ ID NO: 775825 - RNA, 24 nt, Human
cgccuucccucgccucugcuggcu

SEQ ID NO: 775826 - RNA, 21 nt, Human
cgcuggguggggccguggguc

SEQ ID NO: 775827 - RNA, 23 nt, Human
cggaucccacgugcaggcagcgg

SEQ ID NO: 775828 - RNA, 21 nt, Human
cggcccggacccggguggcag

SEQ ID NO: 775829 - RNA, 19 nt, Human
cgggcccagcggcagcgcu

SEQ ID NO: 775830 - RNA, 20 nt, Human
cguccugcccgucuccccgc

SEQ ID NO: 775831 - RNA, 28 nt, Human
cuaaaaaaaaaaagcaaaacaaaacaaa

SEQ ID NO: 775832 - RNA, 24 nt, Human
cuaaguccagucugggccgcauac

SEQ ID NO: 775833 - RNA, 19 nt, Human
cuaugcccauccccaaaca

SEQ ID NO: 775834 - RNA, 26 nt, Human
cucaaaaccagugguacugaaaaauc

SEQ ID NO: 775835 - RNA, 19 nt, Human
cucacagcuccuggcacag

SEQ ID NO: 775836 - RNA, 22 nt, Human
cucacagcuccuggcacaggcu

SEQ ID NO: 775837 - RNA, 20 nt, Human
cucaccagcaagaccccuga

SEQ ID NO: 775838 - RNA, 21 nt, Human
cucacgacuuauccuggaccc

SEQ ID NO: 775839 - RNA, 22 nt, Human
cucacgccuguaaucccagcac

SEQ ID NO: 775840 - RNA, 24 nt, Human
cucacgccuguaaucccagcacuu

SEQ ID NO: 775841 - RNA, 22 nt, Human
cucaugaccuacuguccccacc

SEQ ID NO: 775842 - RNA, 20 nt, Human
cucccacacccaucaugcaa

SEQ ID NO: 775843 - RNA, 19 nt, Human
cuccucaauacaccaaagc

SEQ ID NO: 775844 - RNA, 19 nt, Human
cuccucaauacaccaaagc

SEQ ID NO: 775845 - RNA, 19 nt, Human
cuccucaauacaccaaagc

SEQ ID NO: 775846 - RNA, 19 nt, Human
cuccucaauacaccaaagc

SEQ ID NO: 775847 - RNA, 19 nt, Human
cuccucaauacaccaaagc

SEQ ID NO: 775848 - RNA, 19 nt, Human
cuccucaauacaccaaagc

SEQ ID NO: 775849 - RNA, 19 nt, Human
cuccucaauacaccaaagc

SEQ ID NO: 775850 - RNA, 19 nt, Human
cuccucaauacaccaaagc

SEQ ID NO: 775851 - RNA, 19 nt, Human
cuccucaauacaccaaagc

SEQ ID NO: 775852 - RNA, 19 nt, Human
cuccucaauacaccaaagc

SEQ ID NO: 775853 - RNA, 19 nt, Human
cuccucaauacaccaaagc

SEQ ID NO: 775854 - RNA, 19 nt, Human
cuccucaauacaccaaagc

SEQ ID NO: 775855 - RNA, 19 nt, Human
cuccucuaugcccaucccc

SEQ ID NO: 775856 - RNA, 23 nt, Human
cuccucuaugcccauccccaaac

SEQ ID NO: 775857 - RNA, 25 nt, Human
cucgaggcaggagaccacgcgagga

SEQ ID NO: 775858 - RNA, 20 nt, Human
cucucccacacccaucaugc

SEQ ID NO: 775859 - RNA, 20 nt, Human
cugcaagcccggcuccccug

SEQ ID NO: 775860 - RNA, 22 nt, Human
cugcguggccagcagggccggc

SEQ ID NO: 775861 - RNA, 18 nt, Human
cuggaggcagggcaagcu

SEQ ID NO: 775862 - RNA, 23 nt, Human
cuggccccugcguggccagcagg

SEQ ID NO: 775863 - RNA, 20 nt, Human
gaaguggagacgauggggug

SEQ ID NO: 775864 - RNA, 22 nt, Human
gacaccugccgccccagccccc

SEQ ID NO: 775865 - RNA, 19 nt, Human
gacagugugagacccuguc

SEQ ID NO: 775866 - RNA, 19 nt, Human
gaggcugcuggugcggggc

SEQ ID NO: 775867 - RNA, 23 nt, Human
gagguugcagugagccgagaucg

SEQ ID NO: 775868 - RNA, 24 nt, Human
gaugucucacgccuguaaucccag

SEQ ID NO: 775869 - RNA, 20 nt, Human
gauguggacaauaugcaacc

SEQ ID NO: 775870 - RNA, 20 nt, Human
gcaccacugcacuccagccu

SEQ ID NO: 775871 - RNA, 19 nt, Human
gcagggcgcgccgccgccc

SEQ ID NO: 775872 - RNA, 21 nt, Human
gcccugguucucacagcuccu

SEQ ID NO: 775873 - RNA, 26 nt, Human
gcccugguucucacagcuccuggcac

SEQ ID NO: 775874 - RNA, 20 nt, Human
gccgagaucgcaccacugca

SEQ ID NO: 775875 - RNA, 19 nt, Human
gccgccccagcccccaccc

SEQ ID NO: 775876 - RNA, 23 nt, Human
gccuguaaucccagcuacucggg

SEQ ID NO: 775877 - RNA, 20 nt, Human
gcgggcgccuguaaucccag

SEQ ID NO: 775878 - RNA, 20 nt, Human
ggaagaggcaggugggggug

SEQ ID NO: 775879 - RNA, 22 nt, Human
ggacuagguggccggcucugcc

SEQ ID NO: 775880 - RNA, 22 nt, Human
ggaggcggagguugcagugagc

SEQ ID NO: 775881 - RNA, 20 nt, Human
ggagguugcagugagccgag

SEQ ID NO: 775882 - RNA, 22 nt, Human
ggagguugcagugagccgagau

SEQ ID NO: 775883 - RNA, 24 nt, Human
ggagguugcagugagccgagaucg

SEQ ID NO: 775884 - RNA, 22 nt, Human
ggcagggcguccugcccgucuc

SEQ ID NO: 775885 - RNA, 20 nt, Human
ggcaugguggcgggcgcccg

SEQ ID NO: 775886 - RNA, 24 nt, Human
ggcccgggggguggggaagggguc

SEQ ID NO: 775887 - RNA, 23 nt, Human
ggcccugguucucacagcuccug

SEQ ID NO: 775888 - RNA, 27 nt, Human
ggcccugguucucacagcuccuggcac

SEQ ID NO: 775889 - RNA, 18 nt, Human
ggcuggggugggggccgg

SEQ ID NO: 775890 - RNA, 19 nt, Human
ggcuuccacaccaagaaca

SEQ ID NO: 775891 - RNA, 24 nt, Human
gggcgcgaugucucacgccuguaa

SEQ ID NO: 775892 - RNA, 18 nt, Human
ggggauguaaaucaccug

SEQ ID NO: 775893 - RNA, 23 nt, Human
gguggcgggcgccuguaauccca

SEQ ID NO: 775894 - RNA, 24 nt, Human
gguggcgggcgccuguaaucccag

SEQ ID NO: 775895 - RNA, 18 nt, Human
guagcugggcaugguggc

SEQ ID NO: 775896 - RNA, 21 nt, Human
guccucugcaucugcugucac

SEQ ID NO: 775897 - RNA, 21 nt, Human
gucugcaagcccggcuccccu

SEQ ID NO: 775898 - RNA, 24 nt, Human
gugaacucaggaggcggagguugc

SEQ ID NO: 775899 - RNA, 19 nt, Human
guugcagugagccgagauc

SEQ ID NO: 775900 - RNA, 21 nt, Human
uaaacagaaacagaaacgaac

SEQ ID NO: 775901 - RNA, 25 nt, Human
uaaggagaaaccccaucucuacaaa

SEQ ID NO: 775902 - RNA, 20 nt, Human
uauaaaaaguagcugggcau

SEQ ID NO: 775903 - RNA, 19 nt, Human
ucaagagauagagaccauc

SEQ ID NO: 775904 - RNA, 24 nt, Human
ucaauacaccaaagcacacccuca

SEQ ID NO: 775905 - RNA, 24 nt, Human
ucaauacaccaaagcacacccuca

SEQ ID NO: 775906 - RNA, 24 nt, Human
ucaauacaccaaagcacacccuca

SEQ ID NO: 775907 - RNA, 24 nt, Human
ucaauacaccaaagcacacccuca

SEQ ID NO: 775908 - RNA, 24 nt, Human
ucaauacaccaaagcacauccuca

SEQ ID NO: 775909 - RNA, 24 nt, Human
ucaauacaccaaagcacauccuca

SEQ ID NO: 775910 - RNA, 24 nt, Human
ucaauacaccaaagcacauccuca

SEQ ID NO: 775911 - RNA, 24 nt, Human
ucaauacaccaaagcacauccuca

SEQ ID NO: 775912 - RNA, 24 nt, Human
ucaauacaccaaagcacauccuca

SEQ ID NO: 775913 - RNA, 24 nt, Human
ucaauacaccaaagcacauccuca

SEQ ID NO: 775914 - RNA, 24 nt, Human
ucaauacaccaaagcacauccuca

SEQ ID NO: 775915 - RNA, 24 nt, Human
ucaauacaccaaagcacauccuca

SEQ ID NO: 775916 - RNA, 24 nt, Human
ucaauacaccaaagcacauccuca

SEQ ID NO: 775917 - RNA, 24 nt, Human
ucaauacaccaaagcacauccuca

SEQ ID NO: 775918 - RNA, 24 nt, Human
ucaauacaccaaagcacauccuca

SEQ ID NO: 775919 - RNA, 24 nt, Human
ucaauacaccaaagcacauccuca

SEQ ID NO: 775920 - RNA, 24 nt, Human
ucaauacaccaaagcacauccuca

SEQ ID NO: 775921 - RNA, 24 nt, Human
ucaauacaccaaagcacauccuca

SEQ ID NO: 775922 - RNA, 24 nt, Human
ucaauacaccaaagcacauccuca

SEQ ID NO: 775923 - RNA, 24 nt, Human
ucaauacaccaaagcacauccuca

SEQ ID NO: 775924 - RNA, 24 nt, Human
ucaauacaccaaagcacauccuca

SEQ ID NO: 775925 - RNA, 24 nt, Human
ucaauacaccaaagcacauccuca

SEQ ID NO: 775926 - RNA, 24 nt, Human
ucaauacaccaaagcacauccuca

SEQ ID NO: 775927 - RNA, 24 nt, Human
ucaauacaccaaagcacauccuca

SEQ ID NO: 775928 - RNA, 24 nt, Human
ucaauacaccaaagcacauccuca

SEQ ID NO: 775929 - RNA, 24 nt, Human
ucaauacaccaaagcacauccuca

SEQ ID NO: 775930 - RNA, 24 nt, Human
ucaauacaccaaagcacauccuca

SEQ ID NO: 775931 - RNA, 24 nt, Human
ucaauacaccaaagcacauccuca

SEQ ID NO: 775932 - RNA, 24 nt, Human
ucaauacaccaaagcacauccuca

SEQ ID NO: 775933 - RNA, 24 nt, Human
ucaauacaccaaagcacauccuca

SEQ ID NO: 775934 - RNA, 24 nt, Human
ucaauacaccaaagcacauccuca

SEQ ID NO: 775935 - RNA, 24 nt, Human
ucaauacaccaaagcacauccuca

SEQ ID NO: 775936 - RNA, 24 nt, Human
ucaauacaccaaagcacauccuca

SEQ ID NO: 775937 - RNA, 24 nt, Human
ucaauacaccaaagcacauccuca

SEQ ID NO: 775938 - RNA, 24 nt, Human
ucaauacaccaaagcacauccuca

SEQ ID NO: 775939 - RNA, 24 nt, Human
ucaauacaccaaagcacauccuca

SEQ ID NO: 775940 - RNA, 24 nt, Human
ucaauacaccaaagcacauccuca

SEQ ID NO: 775941 - RNA, 24 nt, Human
ucaauacaccaaagcacauccuca

SEQ ID NO: 775942 - RNA, 24 nt, Human
ucaauacaccaaagcacauccuca

SEQ ID NO: 775943 - RNA, 24 nt, Human
ucaauacaccaaagcacauccucg

SEQ ID NO: 775944 - RNA, 24 nt, Human
ucaauacaccaaagcacauucuca

SEQ ID NO: 775945 - RNA, 24 nt, Human
ucaauacaccaaagcacauucuca

SEQ ID NO: 775946 - RNA, 24 nt, Human
ucaauacaccaaagcacauucuca

SEQ ID NO: 775947 - RNA, 24 nt, Human
ucaauacaccaaagcacauucuca

SEQ ID NO: 775948 - RNA, 24 nt, Human
ucaauacaccaaagcacauucuca

SEQ ID NO: 775949 - RNA, 24 nt, Human
ucaauacaccaaagcacauucuca

SEQ ID NO: 775950 - RNA, 24 nt, Human
ucaauacaccaaagcacauucuca

SEQ ID NO: 775951 - RNA, 24 nt, Human
ucaauacaccaaagcacauucuca

SEQ ID NO: 775952 - RNA, 24 nt, Human
ucaauacaccaaagcacauucuca

SEQ ID NO: 775953 - RNA, 24 nt, Human
ucaauacaccaaagcacauucuca

SEQ ID NO: 775954 - RNA, 24 nt, Human
ucaauacaccaaagcacauucuca

SEQ ID NO: 775955 - RNA, 24 nt, Human
ucaauacaccaaagcacauucuca

SEQ ID NO: 775956 - RNA, 24 nt, Human
ucaauacaccaaagcacauucuca

SEQ ID NO: 775957 - RNA, 24 nt, Human
ucaauacaccaaagcacauucuca

SEQ ID NO: 775958 - RNA, 24 nt, Human
ucaauacaccaaaguacauccuca

SEQ ID NO: 775959 - RNA, 24 nt, Human
ucaauacaccaaaguacauccuca

SEQ ID NO: 775960 - RNA, 23 nt, Human
ucagccgggcgcgaugucucacg

SEQ ID NO: 775961 - RNA, 22 nt, Human
ucaggaggcggagguugcagug

SEQ ID NO: 775962 - RNA, 24 nt, Human
ucaguacaccaaagcacauccuca

SEQ ID NO: 775963 - RNA, 18 nt, Human
ucaugcaagugguccugg

SEQ ID NO: 775964 - RNA, 23 nt, Human
uccccaaacacccagguugccga

SEQ ID NO: 775965 - RNA, 20 nt, Human
ucccugccuugguaccgggg

SEQ ID NO: 775966 - RNA, 23 nt, Human
uccuggagacccaggccucuguc

SEQ ID NO: 775967 - RNA, 23 nt, Human
uccuucaccaauagucccugagg

SEQ ID NO: 775968 - RNA, 23 nt, Human
ucgcaccacugcacuccagccug

SEQ ID NO: 775969 - RNA, 20 nt, Human
ucgcgugaacucaggaggcg

SEQ ID NO: 775970 - RNA, 24 nt, Human
ucgggaggcugaggcaggagaauc

SEQ ID NO: 775971 - RNA, 21 nt, Human
ucuguccucugcaucugcugu

SEQ ID NO: 775972 - RNA, 18 nt, Human
ugaaguggagacgauggg

SEQ ID NO: 775973 - RNA, 23 nt, Human
ugaaguggagacgaugggguggg

SEQ ID NO: 775974 - RNA, 22 nt, Human
ugacgugaacaauacguagccc

SEQ ID NO: 775975 - RNA, 22 nt, Human
ugagccgagaucgcaccacugc

SEQ ID NO: 775976 - RNA, 20 nt, Human
ugaggcaggagaaucgcgug

SEQ ID NO: 775977 - RNA, 22 nt, Human
ugaggcaggagaaucgcgugaa

SEQ ID NO: 775978 - RNA, 23 nt, Human
ugaggcaggagaaucgcgugaac

SEQ ID NO: 775979 - RNA, 23 nt, Human
ugaggcaggagaaucgcgugaac

SEQ ID NO: 775980 - RNA, 22 nt, Human
ugauguggacaauaugcaaccc

SEQ ID NO: 775981 - RNA, 20 nt, Human
ugcaugcccacauuucccuc

SEQ ID NO: 775982 - RNA, 20 nt, Human
ugccgaguggcuggcccugg

SEQ ID NO: 775983 - RNA, 19 nt, Human
ugcugagggaccccacccc

SEQ ID NO: 775984 - RNA, 21 nt, Human
uggagggggaagaggcaggug

SEQ ID NO: 775985 - RNA, 24 nt, Human
uggagggggaagaggcaggugggg

SEQ ID NO: 775986 - RNA, 18 nt, Human
uggcacugaguagcagcu

SEQ ID NO: 775987 - RNA, 22 nt, Human
uggcgggcgccuguaaucccag

SEQ ID NO: 775988 - RNA, 19 nt, Human
uggcucugugccccacggg

SEQ ID NO: 775989 - RNA, 19 nt, Human
ugggaggccgaggcgggag

SEQ ID NO: 775990 - RNA, 22 nt, Human
ugggcaauaaggagaaacccca

SEQ ID NO: 775991 - RNA, 23 nt, Human
uggggaaggggucaggaagacug

SEQ ID NO: 775992 - RNA, 18 nt, Human
uggggugggaaggcgagg

SEQ ID NO: 775993 - RNA, 18 nt, Human
ugguggggugagggaugg

SEQ ID NO: 775994 - RNA, 22 nt, Human
uguccccaccccgcccaaccuc

SEQ ID NO: 775995 - RNA, 21 nt, Human
ugucucacgccuguaauccca

SEQ ID NO: 775996 - RNA, 24 nt, Human
ugucucacgccuguaaucccagca

SEQ ID NO: 775997 - RNA, 23 nt, Human
uguguggacaggggcaagggcuc

SEQ ID NO: 775998 - RNA, 23 nt, Human
uucacagugugguccuugguggg

SEQ ID NO: 775999 - RNA, 22 nt, Human
uucaccaauagucccugaggcc

SEQ ID NO: 776000 - RNA, 22 nt, Human
uucagacucaauacaccaaagc

SEQ ID NO: 776001 - RNA, 18 nt, Human
uucccucacugaugugga

SEQ ID NO: 776002 - RNA, 18 nt, Human
uugcagugagccgagauc

SEQ ID NO: 776003 - RNA, 20 nt, Human
uugcagugagccgagaucgc

SEQ ID NO: 776004 - RNA, 22 nt, Human
uugcagugagccgagaucgcac

SEQ ID NO: 776005 - RNA, 24 nt, Human
uugcuaggaagcuucccacagaag

SEQ ID NO: 776006 - RNA, 23 nt, Human
uuuaauaaauaaaacagcaaagg

SEQ ID NO: 776007 - RNA, 19 nt, Human
cagcgccgccaccgccgcc

SEQ ID NO: 776008 - RNA, 18 nt, Human
cagucccgcccgcugcug

SEQ ID NO: 776009 - RNA, 23 nt, Human
ccccgacgggccgccacuacgcc

SEQ ID NO: 776010 - RNA, 19 nt, Human
ccccggccucgcccuccuc

SEQ ID NO: 776011 - RNA, 18 nt, Human
cccgccgcugccuucgcc

SEQ ID NO: 776012 - RNA, 21 nt, Human
cccgccgcugccuucgccucc

SEQ ID NO: 776013 - RNA, 22 nt, Human
ccgccacuacgcccucccgccc

SEQ ID NO: 776014 - RNA, 18 nt, Human
ccgccgccgcuccucugc

SEQ ID NO: 776015 - RNA, 22 nt, Human
ccgccgccgcuccucugccgcc

SEQ ID NO: 776016 - RNA, 22 nt, Human
ccgccgccgcuccucugccgcc

SEQ ID NO: 776017 - RNA, 23 nt, Human
ccgccgccgcuccucugccgccu

SEQ ID NO: 776018 - RNA, 19 nt, Human
ccgccgcugccgccuccuc

SEQ ID NO: 776019 - RNA, 21 nt, Human
ccgccgcugccuucgccuccg

SEQ ID NO: 776020 - RNA, 19 nt, Human
ccuccgagagccacugcuu

SEQ ID NO: 776021 - RNA, 21 nt, Human
ccuccgcgccgccgucgccgc

SEQ ID NO: 776022 - RNA, 23 nt, Human
ccucgcugcgcccgccgcugccu

SEQ ID NO: 776023 - RNA, 24 nt, Human
ccucugccgccuuagucgcugcuc

SEQ ID NO: 776024 - RNA, 23 nt, Human
ccuuagucgcugcucuuuguucc

SEQ ID NO: 776025 - RNA, 22 nt, Human
ccuuccuccgccgcugccgcua

SEQ ID NO: 776026 - RNA, 19 nt, Human
cgcugcgcccgccgcugcc

SEQ ID NO: 776027 - RNA, 19 nt, Human
cgcugcgcccgccgcugcc

SEQ ID NO: 776028 - RNA, 22 nt, Human
cggcccccggccucgcccuccu

SEQ ID NO: 776029 - RNA, 20 nt, Human
cggggugcgccgccuuccuc

SEQ ID NO: 776030 - RNA, 21 nt, Human
cucugccgccuuagucgcugc

SEQ ID NO: 776031 - RNA, 22 nt, Human
cucuuuguucccccuccgagag

SEQ ID NO: 776032 - RNA, 25 nt, Human
cugcagcgccgccaccgccgccgcu

SEQ ID NO: 776033 - RNA, 21 nt, Human
cuuccuccgccgcugccgccu

SEQ ID NO: 776034 - RNA, 20 nt, Human
gcagcgccgccaccgccgcc

SEQ ID NO: 776035 - RNA, 18 nt, Human
gcccccggccucgcccuc

SEQ ID NO: 776036 - RNA, 19 nt, Human
gccgccuuagucgcugcuc

SEQ ID NO: 776037 - RNA, 20 nt, Human
ggcccccggccucgcccucc

SEQ ID NO: 776038 - RNA, 20 nt, Human
ggccucgcccuccucgcugc

SEQ ID NO: 776039 - RNA, 26 nt, Human
uaaacaaauaaccacuuacuucuuuu

SEQ ID NO: 776040 - RNA, 18 nt, Human
ucccgcccucucggcccc

SEQ ID NO: 776041 - RNA, 23 nt, Human
uccuccgccgcugccgccuccuc

SEQ ID NO: 776042 - RNA, 26 nt, Human
ucgccuccgcgccgccgucgccgccg

SEQ ID NO: 776043 - RNA, 23 nt, Human
uuccuccgccgcugccgccuccu

SEQ ID NO: 776044 - RNA, 21 nt, Human
aaaaaacccaaaccaagaaac

SEQ ID NO: 776045 - RNA, 23 nt, Human
aaaaaacccaaaccaagaaaccc

SEQ ID NO: 776046 - RNA, 26 nt, Human
aaaaaacccaaaccaagaaacccaaa

SEQ ID NO: 776047 - RNA, 21 nt, Human
aaaaacccaaaccaagaaacc

SEQ ID NO: 776048 - RNA, 21 nt, Human
aaaugaccacacaaccagaaa

SEQ ID NO: 776049 - RNA, 21 nt, Human
aaccacaggucaccagggaug

SEQ ID NO: 776050 - RNA, 24 nt, Human
aaccacaggucaccagggaugccu

SEQ ID NO: 776051 - RNA, 20 nt, Human
aagaaacccaaagcacggga

SEQ ID NO: 776052 - RNA, 21 nt, Human
aagaaacccaaagcacgggac

SEQ ID NO: 776053 - RNA, 19 nt, Human
aagaccccagacacauucc

SEQ ID NO: 776054 - RNA, 19 nt, Human
aaggggaccaagugggugg

SEQ ID NO: 776055 - RNA, 21 nt, Human
acaggaaggaaugccuccccc

SEQ ID NO: 776056 - RNA, 23 nt, Human
acagugauggcccguccccacgc

SEQ ID NO: 776057 - RNA, 19 nt, Human
accacacaaccagaaacaa

SEQ ID NO: 776058 - RNA, 23 nt, Human
accagacccucuucucuucuccc

SEQ ID NO: 776059 - RNA, 23 nt, Human
accaggcaggagggccaacgguc

SEQ ID NO: 776060 - RNA, 22 nt, Human
accagggcgcggggcggggacg

SEQ ID NO: 776061 - RNA, 30 nt, Human
accccacccuccaccuccggcuccuccagg

SEQ ID NO: 776062 - RNA, 20 nt, Human
acccuggacucccugccuga

SEQ ID NO: 776063 - RNA, 21 nt, Human
acccuggacucccugccugac

SEQ ID NO: 776064 - RNA, 18 nt, Human
accuaggcccccgcccag

SEQ ID NO: 776065 - RNA, 21 nt, Human
acgcugggucacgcccaucuc

SEQ ID NO: 776066 - RNA, 22 nt, Human
acuccacgaggcugcuccaacc

SEQ ID NO: 776067 - RNA, 18 nt, Human
acugagggcuccuggagg

SEQ ID NO: 776068 - RNA, 18 nt, Human
agaagcaaggggaccaag

SEQ ID NO: 776069 - RNA, 26 nt, Human
agacagaaggcugccuuucccccagu

SEQ ID NO: 776070 - RNA, 22 nt, Human
agacaggaaguguucugcaacc

SEQ ID NO: 776071 - RNA, 20 nt, Human
agagcuuggccacugggccu

SEQ ID NO: 776072 - RNA, 22 nt, Human
agagggagggcagaaaggaggg

SEQ ID NO: 776073 - RNA, 22 nt, Human
agaucugcagaaagggccccga

SEQ ID NO: 776074 - RNA, 21 nt, Human
agcaagaccccagggcccgaa

SEQ ID NO: 776075 - RNA, 22 nt, Human
agccaggccagcucugcccagc

SEQ ID NO: 776076 - RNA, 25 nt, Human
agccagggaagggacccggcagggc

SEQ ID NO: 776077 - RNA, 18 nt, Human
agcccucagcccacuccc

SEQ ID NO: 776078 - RNA, 23 nt, Human
aggcugccccagcagcagcugcc

SEQ ID NO: 776079 - RNA, 21 nt, Human
agggagggagccacaggcugu

SEQ ID NO: 776080 - RNA, 21 nt, Human
agggguggggguagugggcag

SEQ ID NO: 776081 - RNA, 21 nt, Human
agguagaaaacagaagcaagg

SEQ ID NO: 776082 - RNA, 20 nt, Human
aggugcccucaccagcccag

SEQ ID NO: 776083 - RNA, 19 nt, Human
aguacugccucccugagca

SEQ ID NO: 776084 - RNA, 21 nt, Human
aguacugccucccugagcagc

SEQ ID NO: 776085 - RNA, 20 nt, Human
auauauguauauauauaugg

SEQ ID NO: 776086 - RNA, 24 nt, Human
augccuaugggccccagcaagacc

SEQ ID NO: 776087 - RNA, 26 nt, Human
auucucaucguccagggucagugggg

SEQ ID NO: 776088 - RNA, 20 nt, Human
caaaaccccucccuugcccc

SEQ ID NO: 776089 - RNA, 21 nt, Human
caaaccaagaaacccaaagca

SEQ ID NO: 776090 - RNA, 22 nt, Human
caaaccaagaaacccaaagcac

SEQ ID NO: 776091 - RNA, 18 nt, Human
caaccccaguccccaaag

SEQ ID NO: 776092 - RNA, 22 nt, Human
caacccuccuggcuauugcacu

SEQ ID NO: 776093 - RNA, 19 nt, Human
caagaagcaaaaccccucc

SEQ ID NO: 776094 - RNA, 23 nt, Human
caagggaccccaaccccagagac

SEQ ID NO: 776095 - RNA, 24 nt, Human
caagggaccccaaccccagagacc

SEQ ID NO: 776096 - RNA, 24 nt, Human
caaguaccugagaggcuggggcag

SEQ ID NO: 776097 - RNA, 24 nt, Human
caagugauagcuggaaccucuuuc

SEQ ID NO: 776098 - RNA, 23 nt, Human
cacacccccagggcuggcagcug

SEQ ID NO: 776099 - RNA, 23 nt, Human
caccaagaccccagacacauucc

SEQ ID NO: 776100 - RNA, 23 nt, Human
caccaggaaacccuuagcaccaa

SEQ ID NO: 776101 - RNA, 22 nt, Human
cacccccagcaaaaaccagacc

SEQ ID NO: 776102 - RNA, 19 nt, Human
cacccucaccugccuuugc

SEQ ID NO: 776103 - RNA, 20 nt, Human
caccgucugcaccaggaaac

SEQ ID NO: 776104 - RNA, 21 nt, Human
caccuuggggagccccaaccc

SEQ ID NO: 776105 - RNA, 22 nt, Human
cacugggccuacccagauuggc

SEQ ID NO: 776106 - RNA, 20 nt, Human
cagacaggccuggggggcag

SEQ ID NO: 776107 - RNA, 21 nt, Human
cagagacccacgcccuggucc

SEQ ID NO: 776108 - RNA, 21 nt, Human
cagcaagggaccccaacccca

SEQ ID NO: 776109 - RNA, 25 nt, Human
cagcagcugccagaccccacccucc

SEQ ID NO: 776110 - RNA, 19 nt, Human
cagcccagcccccaggccc

SEQ ID NO: 776111 - RNA, 23 nt, Human
cagcccuuccgggcccuuuccug

SEQ ID NO: 776112 - RNA, 19 nt, Human
cagcugccagaccccaccc

SEQ ID NO: 776113 - RNA, 25 nt, Human
cagcugccagaccccacccuccacc

SEQ ID NO: 776114 - RNA, 20 nt, Human
caggaggcacccucaccugc

SEQ ID NO: 776115 - RNA, 20 nt, Human
caggcacccuggacucccug

SEQ ID NO: 776116 - RNA, 24 nt, Human
caggccgaggugugcguggguggg

SEQ ID NO: 776117 - RNA, 22 nt, Human
cagggaugccugagccuugggg

SEQ ID NO: 776118 - RNA, 22 nt, Human
cagggguggggguagugggcag

SEQ ID NO: 776119 - RNA, 22 nt, Human
caguagcccccacgccuaccuu

SEQ ID NO: 776120 - RNA, 23 nt, Human
caucaaccugcugugacuuuggc

SEQ ID NO: 776121 - RNA, 18 nt, Human
caucaagcuucugcugcc

SEQ ID NO: 776122 - RNA, 20 nt, Human
ccaaaccuacccccucugag

SEQ ID NO: 776123 - RNA, 20 nt, Human
ccaaguggguggccaagggc

SEQ ID NO: 776124 - RNA, 19 nt, Human
ccacaaaggggcaaagaca

SEQ ID NO: 776125 - RNA, 20 nt, Human
ccacccagggccccaccccu

SEQ ID NO: 776126 - RNA, 22 nt, Human
ccagaaggcugaacacuggagg

SEQ ID NO: 776127 - RNA, 23 nt, Human
ccagacccgggccugggggagcc

SEQ ID NO: 776128 - RNA, 18 nt, Human
ccagcccagaaccacagg

SEQ ID NO: 776129 - RNA, 25 nt, Human
ccagggcuggcagcuguguugaagg

SEQ ID NO: 776130 - RNA, 21 nt, Human
cccaaccccagagacccacgc

SEQ ID NO: 776131 - RNA, 24 nt, Human
cccaccacacucugggggucagcu

SEQ ID NO: 776132 - RNA, 21 nt, Human
cccaccccuugggaggagggc

SEQ ID NO: 776133 - RNA, 23 nt, Human
cccacucccacccacccuggaaa

SEQ ID NO: 776134 - RNA, 22 nt, Human
cccagaaccacaggucaccagg

SEQ ID NO: 776135 - RNA, 22 nt, Human
cccagauuggcagacagaaggc

SEQ ID NO: 776136 - RNA, 25 nt, Human
cccaguggggccccuucucccuggg

SEQ ID NO: 776137 - RNA, 22 nt, Human
cccaucucugccccagccucca

SEQ ID NO: 776138 - RNA, 18 nt, Human
ccccaaagugcuccugga

SEQ ID NO: 776139 - RNA, 18 nt, Human
ccccaaccccagagaccc

SEQ ID NO: 776140 - RNA, 21 nt, Human
ccccacgccacucgggaccag

SEQ ID NO: 776141 - RNA, 19 nt, Human
ccccagcaaaaaccagacc

SEQ ID NO: 776142 - RNA, 24 nt, Human
ccccagcaaaaaccagacccucuu

SEQ ID NO: 776143 - RNA, 22 nt, Human
ccccagcaagaccccagggccc

SEQ ID NO: 776144 - RNA, 27 nt, Human
ccccagccuccauccucucaucaggcc

SEQ ID NO: 776145 - RNA, 22 nt, Human
ccccaggcccaccgucugcacc

SEQ ID NO: 776146 - RNA, 19 nt, Human
ccccagggcuggcagcugu

SEQ ID NO: 776147 - RNA, 20 nt, Human
ccccaguccccaaagugcuc

SEQ ID NO: 776148 - RNA, 19 nt, Human
ccccaguggccacucagag

SEQ ID NO: 776149 - RNA, 23 nt, Human
cccccaggcccaccgucugcacc

SEQ ID NO: 776150 - RNA, 22 nt, Human
ccccgcccagugccugcucccc

SEQ ID NO: 776151 - RNA, 19 nt, Human
ccccuccccuccccucccc

SEQ ID NO: 776152 - RNA, 19 nt, Human
ccccuccccuccccucccc

SEQ ID NO: 776153 - RNA, 22 nt, Human
cccucagcccacucccacccac

SEQ ID NO: 776154 - RNA, 20 nt, Human
cccuccaccuccggcuccuc

SEQ ID NO: 776155 - RNA, 21 nt, Human
cccuggaaaauggccucccuc

SEQ ID NO: 776156 - RNA, 22 nt, Human
cccuggacucccugccugaccc

SEQ ID NO: 776157 - RNA, 23 nt, Human
cccuggacucccugccugacccc

SEQ ID NO: 776158 - RNA, 18 nt, Human
cccuugggaggagggcuc

SEQ ID NO: 776159 - RNA, 23 nt, Human
ccgucccuacuccacgaggcugc

SEQ ID NO: 776160 - RNA, 20 nt, Human
ccuaugggccccagcaagac

SEQ ID NO: 776161 - RNA, 22 nt, Human
ccucaccagcccagaaccacag

SEQ ID NO: 776162 - RNA, 22 nt, Human
ccucaccugccuuugcaccagc

SEQ ID NO: 776163 - RNA, 21 nt, Human
ccugcagguguucagguccac

SEQ ID NO: 776164 - RNA, 18 nt, Human
ccugcugagcuccaccca

SEQ ID NO: 776165 - RNA, 21 nt, Human
ccuggaaaauggccucccucc

SEQ ID NO: 776166 - RNA, 18 nt, Human
ccugggagguagcugggg

SEQ ID NO: 776167 - RNA, 19 nt, Human
ccuggggccccagacccgg

SEQ ID NO: 776168 - RNA, 22 nt, Human
ccuguggcaccaagaccccaga

SEQ ID NO: 776169 - RNA, 19 nt, Human
cgaggcaggggaaagccug

SEQ ID NO: 776170 - RNA, 22 nt, Human
cgcacacgggcaaacaucaaga

SEQ ID NO: 776171 - RNA, 21 nt, Human
cggagcuggcccugccuugaa

SEQ ID NO: 776172 - RNA, 21 nt, Human
cgggggugggggauggagaac

SEQ ID NO: 776173 - RNA, 20 nt, Human
cuacugcaggccaagcccag

SEQ ID NO: 776174 - RNA, 24 nt, Human
cuccaggggccccacacccccagg

SEQ ID NO: 776175 - RNA, 22 nt, Human
cuccuggcuauugcacuucugc

SEQ ID NO: 776176 - RNA, 18 nt, Human
cucugcgcugcagccccc

SEQ ID NO: 776177 - RNA, 20 nt, Human
cugaccccugcccuaccuau

SEQ ID NO: 776178 - RNA, 24 nt, Human
cugcaaccccaguccccaaagugc

SEQ ID NO: 776179 - RNA, 21 nt, Human
cugccagaccccacccuccac

SEQ ID NO: 776180 - RNA, 23 nt, Human
cugccagaccccacccuccaccu

SEQ ID NO: 776181 - RNA, 22 nt, Human
cugcuccccuccccuccccucc

SEQ ID NO: 776182 - RNA, 21 nt, Human
cugcugagcuccacccagggc

SEQ ID NO: 776183 - RNA, 20 nt, Human
cuggggggcagggccugagc

SEQ ID NO: 776184 - RNA, 19 nt, Human
cuggucccucucacugagg

SEQ ID NO: 776185 - RNA, 21 nt, Human
cuuccgggcccuuuccuguuc

SEQ ID NO: 776186 - RNA, 20 nt, Human
cuugccccaagcugggagaa

SEQ ID NO: 776187 - RNA, 22 nt, Human
cuuucaaaaugcacuuauguac

SEQ ID NO: 776188 - RNA, 20 nt, Human
cuuuggccaagccccucccc

SEQ ID NO: 776189 - RNA, 21 nt, Human
gaacacuggaggagagcacac

SEQ ID NO: 776190 - RNA, 19 nt, Human
gaagcaaaaccccucccuu

SEQ ID NO: 776191 - RNA, 24 nt, Human
gaaggaaugccucccccgacccuc

SEQ ID NO: 776192 - RNA, 19 nt, Human
gaagggacccggcagggcc

SEQ ID NO: 776193 - RNA, 18 nt, Human
gacacaggaaggaaugcc

SEQ ID NO: 776194 - RNA, 19 nt, Human
gacccagccguccucaggg

SEQ ID NO: 776195 - RNA, 25 nt, Human
gagcacacuccaggggccccacacc

SEQ ID NO: 776196 - RNA, 18 nt, Human
gagcugccaucaaccugc

SEQ ID NO: 776197 - RNA, 19 nt, Human
gaggaagcggagccggggg

SEQ ID NO: 776198 - RNA, 18 nt, Human
gaggagcagggguggggg

SEQ ID NO: 776199 - RNA, 22 nt, Human
gagggcuccuggaggccuaugu

SEQ ID NO: 776200 - RNA, 19 nt, Human
gcacacuccaggggcccca

SEQ ID NO: 776201 - RNA, 19 nt, Human
gccccagcaagaccccagg

SEQ ID NO: 776202 - RNA, 19 nt, Human
gccccagccuccauccucu

SEQ ID NO: 776203 - RNA, 18 nt, Human
gcccugguccagcccagc

SEQ ID NO: 776204 - RNA, 21 nt, Human
gccugggggagccgccugggg

SEQ ID NO: 776205 - RNA, 24 nt, Human
gccuugaacagagggcgguguggc

SEQ ID NO: 776206 - RNA, 18 nt, Human
gcgcggggcggggacgag

SEQ ID NO: 776207 - RNA, 18 nt, Human
gcucacuggcuccuuccc

SEQ ID NO: 776208 - RNA, 21 nt, Human
gcucaggugcccucaccagcc

SEQ ID NO: 776209 - RNA, 18 nt, Human
gcugcugaggguuggagc

SEQ ID NO: 776210 - RNA, 22 nt, Human
gcuguguugaagggcaucaagc

SEQ ID NO: 776211 - RNA, 24 nt, Human
gcuuugggagugucccggaaacuc

SEQ ID NO: 776212 - RNA, 23 nt, Human
ggaaugggggagggugggugcuu

SEQ ID NO: 776213 - RNA, 19 nt, Human
ggagguagcugggggugcu

SEQ ID NO: 776214 - RNA, 23 nt, Human
ggcagaaaggagggggucagacc

SEQ ID NO: 776215 - RNA, 21 nt, Human
ggccaagcccaguggggcccc

SEQ ID NO: 776216 - RNA, 22 nt, Human
ggcccaaggaugaagccagaga

SEQ ID NO: 776217 - RNA, 20 nt, Human
ggcccgaacucaccguugaa

SEQ ID NO: 776218 - RNA, 22 nt, Human
ggcccugccuugaacagagggc

SEQ ID NO: 776219 - RNA, 21 nt, Human
ggccugggggagccgccuggg

SEQ ID NO: 776220 - RNA, 21 nt, Human
gggagggggcucccaugagag

SEQ ID NO: 776221 - RNA, 21 nt, Human
gggcagacccugcugagcucc

SEQ ID NO: 776222 - RNA, 19 nt, Human
gggcagaggcagugcccag

SEQ ID NO: 776223 - RNA, 18 nt, Human
gggcagggccugagcaca

SEQ ID NO: 776224 - RNA, 18 nt, Human
gggcccgaacucaccguu

SEQ ID NO: 776225 - RNA, 19 nt, Human
ggggagggugggugcuggg

SEQ ID NO: 776226 - RNA, 20 nt, Human
ggggucaggcucacuggcuc

SEQ ID NO: 776227 - RNA, 20 nt, Human
ggguggggguagugggcagg

SEQ ID NO: 776228 - RNA, 18 nt, Human
ggugcuggaguuccagug

SEQ ID NO: 776229 - RNA, 24 nt, Human
gguggcugcccgugccagguugcu

SEQ ID NO: 776230 - RNA, 18 nt, Human
guagaaaacagaagcaag

SEQ ID NO: 776231 - RNA, 21 nt, Human
guccagcccagcccccaggcc

SEQ ID NO: 776232 - RNA, 18 nt, Human
gucccggagcuggcccug

SEQ ID NO: 776233 - RNA, 20 nt, Human
gucuguccugggagguagcu

SEQ ID NO: 776234 - RNA, 20 nt, Human
gugcuggaguuccaguguug

SEQ ID NO: 776235 - RNA, 22 nt, Human
guggcugcccgugccagguugc

SEQ ID NO: 776236 - RNA, 21 nt, Human
gugggggauggagaacuggag

SEQ ID NO: 776237 - RNA, 20 nt, Human
guguuggguggaggugaggc

SEQ ID NO: 776238 - RNA, 18 nt, Human
uaaaaaacccaaaccaag

SEQ ID NO: 776239 - RNA, 19 nt, Human
uacaagugauagcuggaac

SEQ ID NO: 776240 - RNA, 21 nt, Human
uacaagugauagcuggaaccu

SEQ ID NO: 776241 - RNA, 18 nt, Human
uacagugauggcccgucc

SEQ ID NO: 776242 - RNA, 24 nt, Human
uagaaaacagaagcaaggggacca

SEQ ID NO: 776243 - RNA, 25 nt, Human
uagaucugcagaaagggccccgacu

SEQ ID NO: 776244 - RNA, 18 nt, Human
uauauauguauauauaua

SEQ ID NO: 776245 - RNA, 19 nt, Human
uauauauguauauauauau

SEQ ID NO: 776246 - RNA, 21 nt, Human
uauauguauauauauaugguc

SEQ ID NO: 776247 - RNA, 18 nt, Human
uaucaaaugaccacacaa

SEQ ID NO: 776248 - RNA, 22 nt, Human
uauguauauauauaugguuaca

SEQ ID NO: 776249 - RNA, 20 nt, Human
uauugcacuucugcugggca

SEQ ID NO: 776250 - RNA, 23 nt, Human
ucaccugccuuugcaccagcaaa

SEQ ID NO: 776251 - RNA, 21 nt, Human
ucagcccacucccacccaccc

SEQ ID NO: 776252 - RNA, 23 nt, Human
uccaggacuccucuucccacacc

SEQ ID NO: 776253 - RNA, 20 nt, Human
uccccaagggccaaguaccu

SEQ ID NO: 776254 - RNA, 20 nt, Human
ucccgccauugguggcaagg

SEQ ID NO: 776255 - RNA, 21 nt, Human
ucccggaaacucacccccagc

SEQ ID NO: 776256 - RNA, 21 nt, Human
ucccuccaaaccuacccccuc

SEQ ID NO: 776257 - RNA, 22 nt, Human
uccgggucuccacacccacucc

SEQ ID NO: 776258 - RNA, 18 nt, Human
uccucagggccacaaagg

SEQ ID NO: 776259 - RNA, 20 nt, Human
ugacuuuggccaagccccuc

SEQ ID NO: 776260 - RNA, 18 nt, Human
ugagaggcuggggcaggc

SEQ ID NO: 776261 - RNA, 19 nt, Human
ugagaggcuggggcaggca

SEQ ID NO: 776262 - RNA, 20 nt, Human
ugagaggcuggggcaggcac

SEQ ID NO: 776263 - RNA, 21 nt, Human
ugagaggcuggggcaggcacc

SEQ ID NO: 776264 - RNA, 18 nt, Human
ugagcagcaagggacccc

SEQ ID NO: 776265 - RNA, 27 nt, Human
ugagcuccacccagggccccaccccuu

SEQ ID NO: 776266 - RNA, 21 nt, Human
ugagggcuccuggaggccuau

SEQ ID NO: 776267 - RNA, 21 nt, Human
ugcaccaggaaacccuuagca

SEQ ID NO: 776268 - RNA, 21 nt, Human
ugcaccuaggcccccgcccag

SEQ ID NO: 776269 - RNA, 22 nt, Human
ugccagguugcucaggugcccu

SEQ ID NO: 776270 - RNA, 18 nt, Human
ugccaucaaccugcugug

SEQ ID NO: 776271 - RNA, 26 nt, Human
ugccccacaugccuaugggccccagc

SEQ ID NO: 776272 - RNA, 18 nt, Human
ugcccgugccagguugcu

SEQ ID NO: 776273 - RNA, 21 nt, Human
ugcccuaccuauagacccagc

SEQ ID NO: 776274 - RNA, 18 nt, Human
ugcccucaccagcccaga

SEQ ID NO: 776275 - RNA, 20 nt, Human
ugcccuguggcagccuuaac

SEQ ID NO: 776276 - RNA, 19 nt, Human
ugccuacucugcgcugcag

SEQ ID NO: 776277 - RNA, 20 nt, Human
ugcucaggugcccucaccag

SEQ ID NO: 776278 - RNA, 19 nt, Human
ugcuccaaccuaggccugc

SEQ ID NO: 776279 - RNA, 22 nt, Human
ugcugaggguuggagccuucug

SEQ ID NO: 776280 - RNA, 18 nt, Human
ugcugggggcagaggcag

SEQ ID NO: 776281 - RNA, 19 nt, Human
uggaaaauggccucccucc

SEQ ID NO: 776282 - RNA, 21 nt, Human
uggaggagagcacacuccagg

SEQ ID NO: 776283 - RNA, 21 nt, Human
uggaggugaggccaggauggu

SEQ ID NO: 776284 - RNA, 20 nt, Human
uggcaaggacaaagugcacc

SEQ ID NO: 776285 - RNA, 20 nt, Human
uggcaagggcugcugagggu

SEQ ID NO: 776286 - RNA, 21 nt, Human
uggcaagggcugcugaggguu

SEQ ID NO: 776287 - RNA, 21 nt, Human
uggcagacagaaggcugccuu

SEQ ID NO: 776288 - RNA, 19 nt, Human
uggcagagggagggcagaa

SEQ ID NO: 776289 - RNA, 24 nt, Human
uggcagcuguguugaagggcaucc

SEQ ID NO: 776290 - RNA, 20 nt, Human
uggcauuaaaaaacccaaac

SEQ ID NO: 776291 - RNA, 22 nt, Human
uggccaagccccuccccuggcu

SEQ ID NO: 776292 - RNA, 18 nt, Human
uggccacugggccuaccc

SEQ ID NO: 776293 - RNA, 23 nt, Human
uggcccaaggaugaagccagaga

SEQ ID NO: 776294 - RNA, 23 nt, Human
uggcuauugcacuucugcugggc

SEQ ID NO: 776295 - RNA, 20 nt, Human
ugggccccagcaagacccca

SEQ ID NO: 776296 - RNA, 20 nt, Human
ugggggagccgccuggggcc

SEQ ID NO: 776297 - RNA, 20 nt, Human
ugggggcagaggcagugccc

SEQ ID NO: 776298 - RNA, 21 nt, Human
uggguggaggugaggccagga

SEQ ID NO: 776299 - RNA, 23 nt, Human
uggguggaggugaggccaggaug

SEQ ID NO: 776300 - RNA, 19 nt, Human
uggguggggggaguccggg

SEQ ID NO: 776301 - RNA, 18 nt, Human
uggucagacaggggucug

SEQ ID NO: 776302 - RNA, 24 nt, Human
uguauauauauaugguuacaagug

SEQ ID NO: 776303 - RNA, 23 nt, Human
ugucccggaaacucacccccagc

SEQ ID NO: 776304 - RNA, 20 nt, Human
uguggcggcugcaugggggc

SEQ ID NO: 776305 - RNA, 24 nt, Human
uguguugaagggcaucaagcuucu

SEQ ID NO: 776306 - RNA, 24 nt, Human
uguucugcaaccccaguccccaaa

SEQ ID NO: 776307 - RNA, 18 nt, Human
uguuuguauaaaaaacaa

SEQ ID NO: 776308 - RNA, 21 nt, Human
uuaaaaaaaaaaguggggagg

SEQ ID NO: 776309 - RNA, 25 nt, Human
uuaaaaaaaaaaguggggagggggc

SEQ ID NO: 776310 - RNA, 23 nt, Human
uucagggaagggagaguggcugg

SEQ ID NO: 776311 - RNA, 23 nt, Human
uuuaauacauacagugauggccc

SEQ ID NO: 776312 - RNA, 20 nt, Human
aaaaaaacaacaaacaaaca

SEQ ID NO: 776313 - RNA, 19 nt, Human
aaaaaacaaaccccacaaa

SEQ ID NO: 776314 - RNA, 22 nt, Human
aaaaaacaaaccccacaaaaga

SEQ ID NO: 776315 - RNA, 24 nt, Human
aaaaaacuagcucgguaugguggc

SEQ ID NO: 776316 - RNA, 18 nt, Human
aaaauuagcugggcaugg

SEQ ID NO: 776317 - RNA, 27 nt, Human
aaacaaaaacaaaaaacaaaccccaca

SEQ ID NO: 776318 - RNA, 24 nt, Human
aaacaaacaaaauaaccagccagg

SEQ ID NO: 776319 - RNA, 22 nt, Human
aaacaggagaauugcuugaacc

SEQ ID NO: 776320 - RNA, 24 nt, Human
aaacaggagaauugcuugaaccug

SEQ ID NO: 776321 - RNA, 23 nt, Human
aaacccacagguguaacagccca

SEQ ID NO: 776322 - RNA, 23 nt, Human
aaauauauauacacacagcccuc

SEQ ID NO: 776323 - RNA, 20 nt, Human
aacacacugacuugcuaaga

SEQ ID NO: 776324 - RNA, 19 nt, Human
aacacggugaaaccccguc

SEQ ID NO: 776325 - RNA, 20 nt, Human
aacacggugaaaccccgucu

SEQ ID NO: 776326 - RNA, 21 nt, Human
aacacggugaaaccccgucuc

SEQ ID NO: 776327 - RNA, 19 nt, Human
aacauggagaaaccccauc

SEQ ID NO: 776328 - RNA, 20 nt, Human
aacauggagaaaccccaucu

SEQ ID NO: 776329 - RNA, 21 nt, Human
aacauggagaaaccccaucuc

SEQ ID NO: 776330 - RNA, 20 nt, Human
aacauggugaaacacugucu

SEQ ID NO: 776331 - RNA, 21 nt, Human
aacauggugaaacacugucuc

SEQ ID NO: 776332 - RNA, 19 nt, Human
aacauggugaaaccccauc

SEQ ID NO: 776333 - RNA, 20 nt, Human
aacauggugaaaccccaucu

SEQ ID NO: 776334 - RNA, 21 nt, Human
aacauggugaaaccccaucuc

SEQ ID NO: 776335 - RNA, 21 nt, Human
aacauggugaaaccccaucuc

SEQ ID NO: 776336 - RNA, 19 nt, Human
aacauggugaaaccccguc

SEQ ID NO: 776337 - RNA, 19 nt, Human
aacauggugaaaccccguc

SEQ ID NO: 776338 - RNA, 20 nt, Human
aacauggugaaaccccgucu

SEQ ID NO: 776339 - RNA, 20 nt, Human
aacauggugaaaccccgucu

SEQ ID NO: 776340 - RNA, 21 nt, Human
aacauggugaaaccccgucuc

SEQ ID NO: 776341 - RNA, 21 nt, Human
aacauggugaaaccccgucuc

SEQ ID NO: 776342 - RNA, 23 nt, Human
aagaugcgaaccuuugucuuaga

SEQ ID NO: 776343 - RNA, 25 nt, Human
aagguggguggaucauuugagguca

SEQ ID NO: 776344 - RNA, 22 nt, Human
aagugaaggcuuuccuacacuc

SEQ ID NO: 776345 - RNA, 19 nt, Human
aaguggagguugcagugag

SEQ ID NO: 776346 - RNA, 24 nt, Human
aaguggagguugcagugagccaag

SEQ ID NO: 776347 - RNA, 22 nt, Human
aauaccuaucacaaaagauggc

SEQ ID NO: 776348 - RNA, 21 nt, Human
aauuacaucucaacaaaaaca

SEQ ID NO: 776349 - RNA, 19 nt, Human
aauugcuugaacccagagg

SEQ ID NO: 776350 - RNA, 24 nt, Human
aauugcuugaaccugagaagugga

SEQ ID NO: 776351 - RNA, 18 nt, Human
aauugcuugaaccuggga

SEQ ID NO: 776352 - RNA, 24 nt, Human
aauugcuugaaccugggaggcaga

SEQ ID NO: 776353 - RNA, 24 nt, Human
aauugcuugaauccgggaggcgga

SEQ ID NO: 776354 - RNA, 18 nt, Human
acaaaaaacaaaccccac

SEQ ID NO: 776355 - RNA, 21 nt, Human
acaaaaaacaaaccccacaaa

SEQ ID NO: 776356 - RNA, 22 nt, Human
acaaaaacaaaaaacaaacccc

SEQ ID NO: 776357 - RNA, 19 nt, Human
acaaaauaaccagccaggc

SEQ ID NO: 776358 - RNA, 25 nt, Human
acaaacccacagguguaacagccca

SEQ ID NO: 776359 - RNA, 20 nt, Human
acaccacugcacuccagccu

SEQ ID NO: 776360 - RNA, 25 nt, Human
acaccacugcacuccagccuggggc

SEQ ID NO: 776361 - RNA, 24 nt, Human
acagagcgagacugugucucaaaa

SEQ ID NO: 776362 - RNA, 24 nt, Human
acagaguaagacuccagcucaaaa

SEQ ID NO: 776363 - RNA, 19 nt, Human
acagagugagacaccaucu

SEQ ID NO: 776364 - RNA, 18 nt, Human
acauacagguggacagac

SEQ ID NO: 776365 - RNA, 22 nt, Human
accacugcacuccagccugggc

SEQ ID NO: 776366 - RNA, 21 nt, Human
accagcaccucccauacacaa

SEQ ID NO: 776367 - RNA, 23 nt, Human
accagguccuccacugcaucucc

SEQ ID NO: 776368 - RNA, 24 nt, Human
accccaucucuacuaaaaauacaa

SEQ ID NO: 776369 - RNA, 24 nt, Human
accccaucucuacuaaaauuacaa

SEQ ID NO: 776370 - RNA, 24 nt, Human
accccgucuccacuaaaaauacaa

SEQ ID NO: 776371 - RNA, 18 nt, Human
accccgucucuacuaaaa

SEQ ID NO: 776372 - RNA, 18 nt, Human
accccgucucuacuaaaa

SEQ ID NO: 776373 - RNA, 24 nt, Human
accugaggucaggaguucaagacc

SEQ ID NO: 776374 - RNA, 24 nt, Human
accugaggucaggaguuugagacc

SEQ ID NO: 776375 - RNA, 19 nt, Human
acucacacagacacauaca

SEQ ID NO: 776376 - RNA, 18 nt, Human
acucaggaggcugaaaca

SEQ ID NO: 776377 - RNA, 25 nt, Human
acuccagccuggggcaacagaguga

SEQ ID NO: 776378 - RNA, 23 nt, Human
acugcacuccagccuggcaacag

SEQ ID NO: 776379 - RNA, 18 nt, Human
acugcacuccagccuggg

SEQ ID NO: 776380 - RNA, 18 nt, Human
acugcacuccagccuggg

SEQ ID NO: 776381 - RNA, 18 nt, Human
acugcacuccagccuggg

SEQ ID NO: 776382 - RNA, 18 nt, Human
acugcacuccagccuggg

SEQ ID NO: 776383 - RNA, 21 nt, Human
acugcacuccagccugggcaa

SEQ ID NO: 776384 - RNA, 21 nt, Human
acugcacuccagccugggcaa

SEQ ID NO: 776385 - RNA, 25 nt, Human
acugcacuccagccugggcaacaag

SEQ ID NO: 776386 - RNA, 22 nt, Human
acugcacuccagccugggcaag

SEQ ID NO: 776387 - RNA, 25 nt, Human
acugcacuccagccuggggcaacag

SEQ ID NO: 776388 - RNA, 23 nt, Human
acugcaguccagcuuggugacag

SEQ ID NO: 776389 - RNA, 23 nt, Human
acuuucacuccagccuaggcaac

SEQ ID NO: 776390 - RNA, 22 nt, Human
agaaaacagggaaagcaaguua

SEQ ID NO: 776391 - RNA, 21 nt, Human
agaaugugaaaggaccugaaa

SEQ ID NO: 776392 - RNA, 22 nt, Human
agaauugcuugaaccugagaag

SEQ ID NO: 776393 - RNA, 22 nt, Human
agaauugcuugaauccgggagg

SEQ ID NO: 776394 - RNA, 19 nt, Human
agacaaauauacaaaaauc

SEQ ID NO: 776395 - RNA, 21 nt, Human
agaccgagguggguggaucac

SEQ ID NO: 776396 - RNA, 18 nt, Human
agagaagcgaaggugugc

SEQ ID NO: 776397 - RNA, 23 nt, Human
agagauugcagugagccgagauc

SEQ ID NO: 776398 - RNA, 19 nt, Human
agaggguguuuccuaacuu

SEQ ID NO: 776399 - RNA, 18 nt, Human
agagguuacagugagcca

SEQ ID NO: 776400 - RNA, 22 nt, Human
agaucaccugaggucaggaguu

SEQ ID NO: 776401 - RNA, 20 nt, Human
agaugggaaauggagcugga

SEQ ID NO: 776402 - RNA, 24 nt, Human
agcacuuugggaggccgaggaggg

SEQ ID NO: 776403 - RNA, 24 nt, Human
agcacuuugggaggccgaggcagg

SEQ ID NO: 776404 - RNA, 25 nt, Human
agcacuuuggggagaccgagguggg

SEQ ID NO: 776405 - RNA, 21 nt, Human
agccaagauugugccacugca

SEQ ID NO: 776406 - RNA, 23 nt, Human
agccaggcgugguggcgcaugcc

SEQ ID NO: 776407 - RNA, 24 nt, Human
agccuaggcaacagaguaagacuc

SEQ ID NO: 776408 - RNA, 22 nt, Human
agccuggcaacagugagaaucc

SEQ ID NO: 776409 - RNA, 22 nt, Human
agccuggccaacauggugaaac

SEQ ID NO: 776410 - RNA, 24 nt, Human
agccuggccaacauggugaaaccc

SEQ ID NO: 776411 - RNA, 22 nt, Human
agccuggucaacauggugaaac

SEQ ID NO: 776412 - RNA, 23 nt, Human
agcucgguaugguggcacgcgcc

SEQ ID NO: 776413 - RNA, 20 nt, Human
agcugggcaugguggugggc

SEQ ID NO: 776414 - RNA, 23 nt, Human
agcugguugugguggcacgcgcc

SEQ ID NO: 776415 - RNA, 24 nt, Human
aggagggcggaucacgaggucagg

SEQ ID NO: 776416 - RNA, 20 nt, Human
aggaguuugagaccagccug

SEQ ID NO: 776417 - RNA, 20 nt, Human
aggaugugcauaggcagauc

SEQ ID NO: 776418 - RNA, 23 nt, Human
aggcagaagaauugcuugaaccc

SEQ ID NO: 776419 - RNA, 21 nt, Human
aggcagagauugcagugagcc

SEQ ID NO: 776420 - RNA, 24 nt, Human
aggcagagauugcagugagccgag

SEQ ID NO: 776421 - RNA, 24 nt, Human
aggcagaguggcucacgccuguaa

SEQ ID NO: 776422 - RNA, 22 nt, Human
aggcagaucacaaggucaggag

SEQ ID NO: 776423 - RNA, 26 nt, Human
aggcagaucaccugaggucaggaguu

SEQ ID NO: 776424 - RNA, 20 nt, Human
aggcagaucccacuugggga

SEQ ID NO: 776425 - RNA, 21 nt, Human
aggcaggagaauggcgugaac

SEQ ID NO: 776426 - RNA, 27 nt, Human
aggcaggagaauggcgugaacccagga

SEQ ID NO: 776427 - RNA, 22 nt, Human
aggcaggagaauugcuugaacc

SEQ ID NO: 776428 - RNA, 24 nt, Human
aggcaggagaauugcuugaaccug

SEQ ID NO: 776429 - RNA, 24 nt, Human
aggcaggcagaucacaaggucagg

SEQ ID NO: 776430 - RNA, 26 nt, Human
aggcaggcagaucacaaggucaggag

SEQ ID NO: 776431 - RNA, 22 nt, Human
aggcaggcagaucaccugaggu

SEQ ID NO: 776432 - RNA, 26 nt, Human
aggcaggcagaucaccugaggucagg

SEQ ID NO: 776433 - RNA, 22 nt, Human
aggcagguggauuaccugaggu

SEQ ID NO: 776434 - RNA, 26 nt, Human
aggcagguggauuaccugaggucagg

SEQ ID NO: 776435 - RNA, 20 nt, Human
aggccaagguggguggauca

SEQ ID NO: 776436 - RNA, 21 nt, Human
aggccgaggagggcggaucac

SEQ ID NO: 776437 - RNA, 24 nt, Human
aggcggagcuugcagugagcugag

SEQ ID NO: 776438 - RNA, 19 nt, Human
aggcggagguugcggugag

SEQ ID NO: 776439 - RNA, 22 nt, Human
aggcggagguugcggugagccg

SEQ ID NO: 776440 - RNA, 24 nt, Human
aggcgugguggcgcaugccuguaa

SEQ ID NO: 776441 - RNA, 24 nt, Human
aggcugaggcagaagaauugcuug

SEQ ID NO: 776442 - RNA, 19 nt, Human
aggcugaggcaggagaaug

SEQ ID NO: 776443 - RNA, 21 nt, Human
aggcugaggcaggagaauugc

SEQ ID NO: 776444 - RNA, 24 nt, Human
aggcugaggcaggagaauugcuug

SEQ ID NO: 776445 - RNA, 24 nt, Human
aggcugcggcaggagaauugcuug

SEQ ID NO: 776446 - RNA, 22 nt, Human
agggaaagcaaguuaggggagg

SEQ ID NO: 776447 - RNA, 22 nt, Human
agggagacuguuguuacgaggg

SEQ ID NO: 776448 - RNA, 22 nt, Human
agguggauuaccugaggucagg

SEQ ID NO: 776449 - RNA, 24 nt, Human
agguggguggaucacaaggucagg

SEQ ID NO: 776450 - RNA, 24 nt, Human
aguggcucacgccuguaaucccag

SEQ ID NO: 776451 - RNA, 23 nt, Human
aguugggcgugguggcaugugcc

SEQ ID NO: 776452 - RNA, 24 nt, Human
aucacaccacugcacuccagccug

SEQ ID NO: 776453 - RNA, 24 nt, Human
aucaccugaggucaggaguuugag

SEQ ID NO: 776454 - RNA, 24 nt, Human
aucaugccacugcaguccagcuug

SEQ ID NO: 776455 - RNA, 24 nt, Human
aucgcaccacugcacuccagccug

SEQ ID NO: 776456 - RNA, 24 nt, Human
aucgcgccacugcacuccagccug

SEQ ID NO: 776457 - RNA, 24 nt, Human
auuaccugaggucaggaguucaag

SEQ ID NO: 776458 - RNA, 24 nt, Human
auugcagugagccgagaucaugcc

SEQ ID NO: 776459 - RNA, 23 nt, Human
auugcuuugaccugggaggcaga

SEQ ID NO: 776460 - RNA, 24 nt, Human
auugugccacugcacuccagccug

SEQ ID NO: 776461 - RNA, 18 nt, Human
caaaaaacaaaccccaca

SEQ ID NO: 776462 - RNA, 20 nt, Human
caaaaacaaaaaacaaaccc

SEQ ID NO: 776463 - RNA, 21 nt, Human
caaaaacaaaaaacaaacccc

SEQ ID NO: 776464 - RNA, 23 nt, Human
caaaaacaaaaaacaaaccccac

SEQ ID NO: 776465 - RNA, 24 nt, Human
caaaaacaaaaacaaaaaacaaac

SEQ ID NO: 776466 - RNA, 21 nt, Human
caaaaacaucaucauagaccc

SEQ ID NO: 776467 - RNA, 19 nt, Human
caaaacagcccuggaauaa

SEQ ID NO: 776468 - RNA, 21 nt, Human
caaaauaaccagccaggcaga

SEQ ID NO: 776469 - RNA, 27 nt, Human
caaaauaaccagccaggcagaguggcc

SEQ ID NO: 776470 - RNA, 23 nt, Human
caaacaaacaaaauaaccagcca

SEQ ID NO: 776471 - RNA, 19 nt, Human
caaaggacagacccgaccc

SEQ ID NO: 776472 - RNA, 23 nt, Human
caacaaaaacaaaaacaaaaaac

SEQ ID NO: 776473 - RNA, 25 nt, Human
caacaaaaacaaaaacaaaaaacaa

SEQ ID NO: 776474 - RNA, 28 nt, Human
caacaaaaacaaaaacaaaaaacaaaag

SEQ ID NO: 776475 - RNA, 28 nt, Human
caacaaaaacaaaaacaaaaaacaaacc

SEQ ID NO: 776476 - RNA, 24 nt, Human
caacaaaggacagacccgaccccu

SEQ ID NO: 776477 - RNA, 21 nt, Human
caacaagagcaaaauuacauc

SEQ ID NO: 776478 - RNA, 20 nt, Human
caacauggugaaacacuguc

SEQ ID NO: 776479 - RNA, 22 nt, Human
caacauggugaaacacugucuc

SEQ ID NO: 776480 - RNA, 24 nt, Human
caacauggugaaacacugucucua

SEQ ID NO: 776481 - RNA, 20 nt, Human
caacauggugaaaccccauc

SEQ ID NO: 776482 - RNA, 22 nt, Human
caacauggugaaaccccaucuc

SEQ ID NO: 776483 - RNA, 24 nt, Human
caacauggugaaaccccaucucua

SEQ ID NO: 776484 - RNA, 24 nt, Human
caacauggugaaaccccgucucua

SEQ ID NO: 776485 - RNA, 24 nt, Human
caacauggugaaaccccgucucua

SEQ ID NO: 776486 - RNA, 24 nt, Human
caagaccagccuggccaacauggu

SEQ ID NO: 776487 - RNA, 24 nt, Human
caagacuauccuggcuaacacggu

SEQ ID NO: 776488 - RNA, 24 nt, Human
caagauugugccacugcacuccag

SEQ ID NO: 776489 - RNA, 24 nt, Human
caagccucuaaucccagcacuuug

SEQ ID NO: 776490 - RNA, 24 nt, Human
caaggcagguggauuaccugaggu

SEQ ID NO: 776491 - RNA, 26 nt, Human
caaggcagguggauuaccugagguca

SEQ ID NO: 776492 - RNA, 24 nt, Human
caagguggguggaucauuugaggu

SEQ ID NO: 776493 - RNA, 26 nt, Human
cacaaacccacagguguaacagcccu

SEQ ID NO: 776494 - RNA, 20 nt, Human
cacacagacacauacacaaa

SEQ ID NO: 776495 - RNA, 21 nt, Human
cacaccacugcacuccagccu

SEQ ID NO: 776496 - RNA, 24 nt, Human
cacaccuguaaucccagcacuuug

SEQ ID NO: 776497 - RNA, 21 nt, Human
cacagucugacccgaggacac

SEQ ID NO: 776498 - RNA, 25 nt, Human
caccacugcacuccagccuggggca

SEQ ID NO: 776499 - RNA, 21 nt, Human
caccucagagccaccugcggu

SEQ ID NO: 776500 - RNA, 23 nt, Human
caccucagagccaccugcgguug

SEQ ID NO: 776501 - RNA, 22 nt, Human
caccucccauacacaacagagc

SEQ ID NO: 776502 - RNA, 23 nt, Human
caccugaggucaggaguuugaga

SEQ ID NO: 776503 - RNA, 23 nt, Human
caccuguaaucccagcacuuugg

SEQ ID NO: 776504 - RNA, 24 nt, Human
caccuguaaucccagcacuuuggg

SEQ ID NO: 776505 - RNA, 24 nt, Human
cacgccuauaaucccagcacuuug

SEQ ID NO: 776506 - RNA, 24 nt, Human
cacgccuguaaucccagcacuuug

SEQ ID NO: 776507 - RNA, 24 nt, Human
cacgccuguaaucccagcacuuug

SEQ ID NO: 776508 - RNA, 19 nt, Human
cacuccagccuaggcaaca

SEQ ID NO: 776509 - RNA, 23 nt, Human
cacuccagccuaggcaacagagu

SEQ ID NO: 776510 - RNA, 24 nt, Human
cacuccagccugggcaacaagagc

SEQ ID NO: 776511 - RNA, 23 nt, Human
cacuccagccuggggcaacagag

SEQ ID NO: 776512 - RNA, 24 nt, Human
cacuccagccuggggcaacagagu

SEQ ID NO: 776513 - RNA, 25 nt, Human
cacuccagccuggggcaacagagug

SEQ ID NO: 776514 - RNA, 24 nt, Human
cacugaggccucaucugccagcaa

SEQ ID NO: 776515 - RNA, 18 nt, Human
cacugcacuccagccugg

SEQ ID NO: 776516 - RNA, 18 nt, Human
cacugcacuccagccugg

SEQ ID NO: 776517 - RNA, 18 nt, Human
cacugcacuccagccugg

SEQ ID NO: 776518 - RNA, 20 nt, Human
cacugcacuccagccuggca

SEQ ID NO: 776519 - RNA, 23 nt, Human
cacugcacuccagccuggcaaca

SEQ ID NO: 776520 - RNA, 24 nt, Human
cacugcacuccagccuggcaacag

SEQ ID NO: 776521 - RNA, 19 nt, Human
cacugcacuccagccuggg

SEQ ID NO: 776522 - RNA, 19 nt, Human
cacugcacuccagccuggg

SEQ ID NO: 776523 - RNA, 19 nt, Human
cacugcacuccagccuggg

SEQ ID NO: 776524 - RNA, 21 nt, Human
cacugcacuccagccugggca

SEQ ID NO: 776525 - RNA, 21 nt, Human
cacugcacuccagccugggca

SEQ ID NO: 776526 - RNA, 22 nt, Human
cacugcacuccagccugggcaa

SEQ ID NO: 776527 - RNA, 23 nt, Human
cacugcacuccagccugggcaac

SEQ ID NO: 776528 - RNA, 24 nt, Human
cacugcacuccagccugggcaaca

SEQ ID NO: 776529 - RNA, 25 nt, Human
cacugcacuccagccugggcaacaa

SEQ ID NO: 776530 - RNA, 23 nt, Human
cacugcacuccagccugggcaag

SEQ ID NO: 776531 - RNA, 25 nt, Human
cacugcacuccagccugggcaagga

SEQ ID NO: 776532 - RNA, 23 nt, Human
cacugcacuccagccuggggcaa

SEQ ID NO: 776533 - RNA, 24 nt, Human
cacugcacuccagccuggggcaac

SEQ ID NO: 776534 - RNA, 24 nt, Human
cacugcaguccagcuuggugacag

SEQ ID NO: 776535 - RNA, 23 nt, Human
cacuuguaaucccagcuacuugg

SEQ ID NO: 776536 - RNA, 24 nt, Human
cagaucaccugaggucaggaguuu

SEQ ID NO: 776537 - RNA, 27 nt, Human
cagaucaccugaggucaggaguuugag

SEQ ID NO: 776538 - RNA, 24 nt, Human
cagcacuuugagaggccgaggcag

SEQ ID NO: 776539 - RNA, 25 nt, Human
cagcacuuugagaggccgaggcagg

SEQ ID NO: 776540 - RNA, 24 nt, Human
cagcacuuugggaggccaaggcag

SEQ ID NO: 776541 - RNA, 25 nt, Human
cagcacuuugggaggccaaggcagg

SEQ ID NO: 776542 - RNA, 23 nt, Human
cagcacuuugggaggccgaggag

SEQ ID NO: 776543 - RNA, 28 nt, Human
cagcacuuugggaggccgaggagggcgg

SEQ ID NO: 776544 - RNA, 24 nt, Human
cagcacuuugggaggccgaggcag

SEQ ID NO: 776545 - RNA, 25 nt, Human
cagcacuuugggaggccgaggcagg

SEQ ID NO: 776546 - RNA, 25 nt, Human
cagcacuuuggggagaccgaggugg

SEQ ID NO: 776547 - RNA, 24 nt, Human
cagccugaccaacauggagaaacc

SEQ ID NO: 776548 - RNA, 19 nt, Human
cagcguaaguacucucaua

SEQ ID NO: 776549 - RNA, 24 nt, Human
cagcuacucaggaggcugaggcag

SEQ ID NO: 776550 - RNA, 24 nt, Human
cagcuacucgggaggcugaggcag

SEQ ID NO: 776551 - RNA, 24 nt, Human
cagcuacuuggaaggcugaggcag

SEQ ID NO: 776552 - RNA, 18 nt, Human
caggauugcuuugaccug

SEQ ID NO: 776553 - RNA, 22 nt, Human
caggcagaucacaaggucagga

SEQ ID NO: 776554 - RNA, 24 nt, Human
caggcagaucaccugaggucagga

SEQ ID NO: 776555 - RNA, 20 nt, Human
cagguccuccacugcaucuc

SEQ ID NO: 776556 - RNA, 24 nt, Human
cagguggauuaccugaggucagga

SEQ ID NO: 776557 - RNA, 22 nt, Human
caguccagcuuggugacagagc

SEQ ID NO: 776558 - RNA, 21 nt, Human
cauacagguggacagacacaa

SEQ ID NO: 776559 - RNA, 28 nt, Human
caucucaacaaaaacaaaaacaaaaaac

SEQ ID NO: 776560 - RNA, 20 nt, Human
caucuccacaguagccguca

SEQ ID NO: 776561 - RNA, 24 nt, Human
caugccuguaaucccagcuucuug

SEQ ID NO: 776562 - RNA, 24 nt, Human
ccaacaaaggacagacccgacccc

SEQ ID NO: 776563 - RNA, 22 nt, Human
ccacagucugacccgaggacac

SEQ ID NO: 776564 - RNA, 19 nt, Human
ccacugcacuccagccugg

SEQ ID NO: 776565 - RNA, 19 nt, Human
ccacugcacuccagccugg

SEQ ID NO: 776566 - RNA, 20 nt, Human
ccacugcacuccagccuggc

SEQ ID NO: 776567 - RNA, 23 nt, Human
ccacugcacuccagccuggcaac

SEQ ID NO: 776568 - RNA, 20 nt, Human
ccacugcacuccagccuggg

SEQ ID NO: 776569 - RNA, 20 nt, Human
ccacugcacuccagccuggg

SEQ ID NO: 776570 - RNA, 20 nt, Human
ccacugcacuccagccuggg

SEQ ID NO: 776571 - RNA, 20 nt, Human
ccacugcacuccagccuggg

SEQ ID NO: 776572 - RNA, 21 nt, Human
ccacugcacuccagccugggc

SEQ ID NO: 776573 - RNA, 21 nt, Human
ccacugcacuccagccugggc

SEQ ID NO: 776574 - RNA, 22 nt, Human
ccacugcacuccagccugggca

SEQ ID NO: 776575 - RNA, 23 nt, Human
ccacugcacuccagccugggcaa

SEQ ID NO: 776576 - RNA, 24 nt, Human
ccacugcacuccagccugggcaac

SEQ ID NO: 776577 - RNA, 24 nt, Human
ccacugcacuccagccugggcaag

SEQ ID NO: 776578 - RNA, 21 nt, Human
ccacugcacuccagccugggg

SEQ ID NO: 776579 - RNA, 25 nt, Human
ccacugcacuccagccuggggcaac

SEQ ID NO: 776580 - RNA, 26 nt, Human
ccacugcacuccagccuggggcaaca

SEQ ID NO: 776581 - RNA, 19 nt, Human
ccacugcaguccagcuugg

SEQ ID NO: 776582 - RNA, 19 nt, Human
ccacugcaguccagcuugg

SEQ ID NO: 776583 - RNA, 20 nt, Human
ccacugcaguccagcuuggu

SEQ ID NO: 776584 - RNA, 23 nt, Human
ccacugcaguccagcuuggugac

SEQ ID NO: 776585 - RNA, 21 nt, Human
ccacugcaucuccacaguagc

SEQ ID NO: 776586 - RNA, 23 nt, Human
ccacuuucacuccagccuaggca

SEQ ID NO: 776587 - RNA, 21 nt, Human
ccagaaacacugcaggaagac

SEQ ID NO: 776588 - RNA, 23 nt, Human
ccagccaggcagaguggcucacg

SEQ ID NO: 776589 - RNA, 23 nt, Human
cccaaguccuucuuccccauucc

SEQ ID NO: 776590 - RNA, 25 nt, Human
cccuagaggguguuuccuaacuucu

SEQ ID NO: 776591 - RNA, 21 nt, Human
cccucaaugcugccaccuccc

SEQ ID NO: 776592 - RNA, 21 nt, Human
cccuguccccgcauccagaaa

SEQ ID NO: 776593 - RNA, 21 nt, Human
ccuauagucccagcuacucag

SEQ ID NO: 776594 - RNA, 24 nt, Human
ccugaccaacauggagaaacccca

SEQ ID NO: 776595 - RNA, 21 nt, Human
ccugagaaguggagguugcag

SEQ ID NO: 776596 - RNA, 22 nt, Human
ccuggccaacauggugaaaccc

SEQ ID NO: 776597 - RNA, 23 nt, Human
ccuggccaacauggugaaacccc

SEQ ID NO: 776598 - RNA, 23 nt, Human
ccuggccaacauggugaaacccc

SEQ ID NO: 776599 - RNA, 24 nt, Human
ccuggccaacauggugaaaccccg

SEQ ID NO: 776600 - RNA, 24 nt, Human
ccuggccaacauggugaaaccccg

SEQ ID NO: 776601 - RNA, 23 nt, Human
ccuggcuaacacggugaaacccc

SEQ ID NO: 776602 - RNA, 24 nt, Human
ccuggcuaacacggugaaaccccg

SEQ ID NO: 776603 - RNA, 20 nt, Human
ccuggucaacauggugaaac

SEQ ID NO: 776604 - RNA, 24 nt, Human
ccuggucaacauggugaaacacug

SEQ ID NO: 776605 - RNA, 22 nt, Human
ccuggucaacauggugaaaccc

SEQ ID NO: 776606 - RNA, 23 nt, Human
ccuggucaacauggugaaacccc

SEQ ID NO: 776607 - RNA, 24 nt, Human
ccuggucaacauggugaaacccca

SEQ ID NO: 776608 - RNA, 22 nt, Human
ccuguaaucccagcacuuuggg

SEQ ID NO: 776609 - RNA, 21 nt, Human
ccuguaaucccagcuacucag

SEQ ID NO: 776610 - RNA, 21 nt, Human
ccuguaaucccagcuucuugg

SEQ ID NO: 776611 - RNA, 22 nt, Human
ccuguaaucccagcuucuuggg

SEQ ID NO: 776612 - RNA, 22 nt, Human
ccuguaaugccagcuacuaggg

SEQ ID NO: 776613 - RNA, 21 nt, Human
ccuguagucccagcuacucgg

SEQ ID NO: 776614 - RNA, 19 nt, Human
ccuguccccgcauccagaa

SEQ ID NO: 776615 - RNA, 20 nt, Human
cgacccgagauccggaacaa

SEQ ID NO: 776616 - RNA, 24 nt, Human
cgagaccauccuggccaacauggu

SEQ ID NO: 776617 - RNA, 26 nt, Human
cgaggcaggcagaucacaaggucagg

SEQ ID NO: 776618 - RNA, 20 nt, Human
cgaggcaggcagaucaccug

SEQ ID NO: 776619 - RNA, 26 nt, Human
cgaggcaggcagaucaccugagguca

SEQ ID NO: 776620 - RNA, 21 nt, Human
cgcaccacugcacuccagccu

SEQ ID NO: 776621 - RNA, 19 nt, Human
cgcaggagaguggaugcug

SEQ ID NO: 776622 - RNA, 24 nt, Human
cgccacugcacuccagccugggca

SEQ ID NO: 776623 - RNA, 23 nt, Human
cgccuauaaucccagcacuuugg

SEQ ID NO: 776624 - RNA, 24 nt, Human
cgccuauaaucccagcacuuuggg

SEQ ID NO: 776625 - RNA, 24 nt, Human
cgccuauagucccagcuacucagg

SEQ ID NO: 776626 - RNA, 23 nt, Human
cgccuguaaucccagcacuuugg

SEQ ID NO: 776627 - RNA, 24 nt, Human
cgccuguaaucccagcacuuuggg

SEQ ID NO: 776628 - RNA, 24 nt, Human
cgccuguaaucccagcuacucagg

SEQ ID NO: 776629 - RNA, 23 nt, Human
cgccuguagucccagcuacucgg

SEQ ID NO: 776630 - RNA, 24 nt, Human
cgccuguagucccagcuacucggg

SEQ ID NO: 776631 - RNA, 24 nt, Human
cgggaggcggagguugcggugagc

SEQ ID NO: 776632 - RNA, 18 nt, Human
cgggccugguggcucaag

SEQ ID NO: 776633 - RNA, 26 nt, Human
cucaaaaaaaaaaaaaaaaaaaaaaa

SEQ ID NO: 776634 - RNA, 19 nt, Human
cucaaaaaaacaacaaaca

SEQ ID NO: 776635 - RNA, 24 nt, Human
cucaagccucuaaucccagcacuu

SEQ ID NO: 776636 - RNA, 22 nt, Human
cucacaccuguaaucccagcac

SEQ ID NO: 776637 - RNA, 24 nt, Human
cucacaccuguaaucccagcacuu

SEQ ID NO: 776638 - RNA, 22 nt, Human
cucacgccuauaaucccagcac

SEQ ID NO: 776639 - RNA, 24 nt, Human
cucacgccuauaaucccagcacuu

SEQ ID NO: 776640 - RNA, 22 nt, Human
cucacgccuguaaucccagcac

SEQ ID NO: 776641 - RNA, 22 nt, Human
cucacgccuguaaucccagcac

SEQ ID NO: 776642 - RNA, 24 nt, Human
cucacgccuguaaucccagcacuu

SEQ ID NO: 776643 - RNA, 24 nt, Human
cucacgccuguaaucccagcacuu

SEQ ID NO: 776644 - RNA, 19 nt, Human
cuccagcucaaaaaaaaaa

SEQ ID NO: 776645 - RNA, 24 nt, Human
cuccagcucaaaaaaaaaaaaaaa

SEQ ID NO: 776646 - RNA, 18 nt, Human
cucccaaauagaaggacc

SEQ ID NO: 776647 - RNA, 19 nt, Human
cucccaaauagaaggaccc

SEQ ID NO: 776648 - RNA, 21 nt, Human
cucccauacacaacagagcug

SEQ ID NO: 776649 - RNA, 19 nt, Human
cuccgucucaaaaaaaaaa

SEQ ID NO: 776650 - RNA, 19 nt, Human
cuccucgggaauaaccacc

SEQ ID NO: 776651 - RNA, 19 nt, Human
cugggggccggguguggug

SEQ ID NO: 776652 - RNA, 23 nt, Human
cuggucaacauggugaaacccca

SEQ ID NO: 776653 - RNA, 19 nt, Human
cuugcagugagcugagauc

SEQ ID NO: 776654 - RNA, 21 nt, Human
cuugcagugagcugagaucgc

SEQ ID NO: 776655 - RNA, 21 nt, Human
cuuguaaucccagcuacuugg

SEQ ID NO: 776656 - RNA, 24 nt, Human
gaaaaacuguaagaugcgaaccuu

SEQ ID NO: 776657 - RNA, 24 nt, Human
gaacaauuugggaggccaaggugg

SEQ ID NO: 776658 - RNA, 22 nt, Human
gaacuggaggccgggcgcggug

SEQ ID NO: 776659 - RNA, 22 nt, Human
gaacugggggccggguguggug

SEQ ID NO: 776660 - RNA, 20 nt, Human
gaaguacagcauucccacag

SEQ ID NO: 776661 - RNA, 18 nt, Human
gaaguggagguugcagug

SEQ ID NO: 776662 - RNA, 19 nt, Human
gacacaaauucacaaaccc

SEQ ID NO: 776663 - RNA, 26 nt, Human
gaccugguuucccucaaugcugccac

SEQ ID NO: 776664 - RNA, 23 nt, Human
gagaauugcuugaaccugggagg

SEQ ID NO: 776665 - RNA, 23 nt, Human
gagaucaugccacugcaguccag

SEQ ID NO: 776666 - RNA, 23 nt, Human
gagaucgcgccacugcacuccag

SEQ ID NO: 776667 - RNA, 23 nt, Human
gagcuugcagugagcugagaucg

SEQ ID NO: 776668 - RNA, 23 nt, Human
gaggagggcggaucacgagguca

SEQ ID NO: 776669 - RNA, 22 nt, Human
gagguggguggaucacaagguc

SEQ ID NO: 776670 - RNA, 24 nt, Human
gagguggguggaucacaaggucag

SEQ ID NO: 776671 - RNA, 18 nt, Human
gagguugcagugagccaa

SEQ ID NO: 776672 - RNA, 23 nt, Human
gagguugcagugagccaagauug

SEQ ID NO: 776673 - RNA, 24 nt, Human
gagguugcgccacuuucacuccag

SEQ ID NO: 776674 - RNA, 19 nt, Human
gaguugaguucaccuugcc

SEQ ID NO: 776675 - RNA, 24 nt, Human
gaucaccugaggucaggaguuuga

SEQ ID NO: 776676 - RNA, 23 nt, Human
gaucauuugaggucaagaguuua

SEQ ID NO: 776677 - RNA, 24 nt, Human
gaucauuugaggucaagaguuuaa

SEQ ID NO: 776678 - RNA, 18 nt, Human
gaugggaaauggagcugg

SEQ ID NO: 776679 - RNA, 23 nt, Human
gauuaccugaggucaggaguuca

SEQ ID NO: 776680 - RNA, 24 nt, Human
gauuaccugaggucaggaguucaa

SEQ ID NO: 776681 - RNA, 18 nt, Human
gauugcuuugaccuggga

SEQ ID NO: 776682 - RNA, 20 nt, Human
gcaccacugcacuccagccu

SEQ ID NO: 776683 - RNA, 25 nt, Human
gcacuccagccuggggcaacagagu

SEQ ID NO: 776684 - RNA, 22 nt, Human
gcagaagaauugcuugaaccca

SEQ ID NO: 776685 - RNA, 18 nt, Human
gcagagugugucugugac

SEQ ID NO: 776686 - RNA, 22 nt, Human
gcaggagaauggcgugaaccca

SEQ ID NO: 776687 - RNA, 24 nt, Human
gccaacauggugaaaccccgucuc

SEQ ID NO: 776688 - RNA, 24 nt, Human
gccaacauggugaaaccccgucuc

SEQ ID NO: 776689 - RNA, 22 nt, Human
gccacugcacuccagccugggc

SEQ ID NO: 776690 - RNA, 24 nt, Human
gccacugcacuccagccugggcaa

SEQ ID NO: 776691 - RNA, 19 nt, Human
gccaggaucacaccacugc

SEQ ID NO: 776692 - RNA, 23 nt, Human
gcccuggaauaaugcaaugcuga

SEQ ID NO: 776693 - RNA, 20 nt, Human
gccgagaucaugccacugca

SEQ ID NO: 776694 - RNA, 24 nt, Human
gcggcaggagaauugcuugaaucc

SEQ ID NO: 776695 - RNA, 20 nt, Human
gcggcggggaaaaaaagguu

SEQ ID NO: 776696 - RNA, 24 nt, Human
gcuaacacggugaaaccccgucuc

SEQ ID NO: 776697 - RNA, 20 nt, Human
gcugagaucgcgccacugca

SEQ ID NO: 776698 - RNA, 22 nt, Human
gcugaggcaggagaauggcgug

SEQ ID NO: 776699 - RNA, 20 nt, Human
gcuggggcccaaguccuucu

SEQ ID NO: 776700 - RNA, 20 nt, Human
gcuguggcucacaccuguaa

SEQ ID NO: 776701 - RNA, 22 nt, Human
ggaacaauuucugcuucaacac

SEQ ID NO: 776702 - RNA, 26 nt, Human
ggacagacacaaauucacaaacccac

SEQ ID NO: 776703 - RNA, 18 nt, Human
ggagcuugcagugagcug

SEQ ID NO: 776704 - RNA, 24 nt, Human
ggagcuugcagugagcugagaucg

SEQ ID NO: 776705 - RNA, 24 nt, Human
ggaggccgggcgcgguggcucacg

SEQ ID NO: 776706 - RNA, 20 nt, Human
ggagguugcagugagccaag

SEQ ID NO: 776707 - RNA, 22 nt, Human
ggagguugcagugagccaagau

SEQ ID NO: 776708 - RNA, 24 nt, Human
ggagguugcagugagccaagauug

SEQ ID NO: 776709 - RNA, 24 nt, Human
ggagguugcggugagccgcgaucg

SEQ ID NO: 776710 - RNA, 22 nt, Human
ggauuaccugaggucaggaguu

SEQ ID NO: 776711 - RNA, 21 nt, Human
ggcacgcgccuauagucccag

SEQ ID NO: 776712 - RNA, 24 nt, Human
ggcacuuguaaucccagcuacuug

SEQ ID NO: 776713 - RNA, 22 nt, Human
ggcaggagaauugcuugaaucc

SEQ ID NO: 776714 - RNA, 23 nt, Human
ggcaggagaauugcuugaauccg

SEQ ID NO: 776715 - RNA, 18 nt, Human
ggccagaggccuaaagag

SEQ ID NO: 776716 - RNA, 18 nt, Human
ggccgaggagggcggauc

SEQ ID NO: 776717 - RNA, 21 nt, Human
ggccgggugugguggcucacg

SEQ ID NO: 776718 - RNA, 21 nt, Human
ggccucaucugccagcaaacc

SEQ ID NO: 776719 - RNA, 20 nt, Human
ggccugaggcaggauugcuu

SEQ ID NO: 776720 - RNA, 22 nt, Human
ggcggggaaaaaaagguugggu

SEQ ID NO: 776721 - RNA, 18 nt, Human
ggcgugguggcgggcgcc

SEQ ID NO: 776722 - RNA, 21 nt, Human
ggcucacgccuguaaucccag

SEQ ID NO: 776723 - RNA, 23 nt, Human
gggagaccgagguggguggauca

SEQ ID NO: 776724 - RNA, 28 nt, Human
gggcaacagagugagacaccaucuuggg

SEQ ID NO: 776725 - RNA, 24 nt, Human
gggcgcgguggcucacgccuauaa

SEQ ID NO: 776726 - RNA, 24 nt, Human
gggcggaucacgaggucaggagau

SEQ ID NO: 776727 - RNA, 24 nt, Human
gggcgugguggcaugugccuguaa

SEQ ID NO: 776728 - RNA, 24 nt, Human
gggcgugguggcgggcgccuguag

SEQ ID NO: 776729 - RNA, 21 nt, Human
ggggccgggugugguggcuca

SEQ ID NO: 776730 - RNA, 23 nt, Human
ggggugcucccagggaaaucagg

SEQ ID NO: 776731 - RNA, 24 nt, Human
gggugugguggcucacgccuguaa

SEQ ID NO: 776732 - RNA, 23 nt, Human
gguaugguggcacgcgccuguaa

SEQ ID NO: 776733 - RNA, 19 nt, Human
ggucaggaguuugagacca

SEQ ID NO: 776734 - RNA, 21 nt, Human
gguggaucacaaggucaggag

SEQ ID NO: 776735 - RNA, 24 nt, Human
gguggcacgcgccuguaaucccag

SEQ ID NO: 776736 - RNA, 24 nt, Human
gguggcaugugccuguaaugccag

SEQ ID NO: 776737 - RNA, 24 nt, Human
gguggcgcaugccuguaaucccag

SEQ ID NO: 776738 - RNA, 24 nt, Human
gguggcgggcgccuguagucccag

SEQ ID NO: 776739 - RNA, 24 nt, Human
gguggcucaagccucuaaucccag

SEQ ID NO: 776740 - RNA, 24 nt, Human
gguggcucacgccuauaaucccag

SEQ ID NO: 776741 - RNA, 24 nt, Human
guccagcuuggugacagagcgaga

SEQ ID NO: 776742 - RNA, 25 nt, Human
gugcagggcugguaaccuggagccg

SEQ ID NO: 776743 - RNA, 20 nt, Human
gugcucccagggaaaucagg

SEQ ID NO: 776744 - RNA, 22 nt, Human
guggcucacaccuguaauccca

SEQ ID NO: 776745 - RNA, 23 nt, Human
guggcucacgccuguaaucccag

SEQ ID NO: 776746 - RNA, 23 nt, Human
guggugggcacuuguaaucccag

SEQ ID NO: 776747 - RNA, 19 nt, Human
guuuccuaacuucugacug

SEQ ID NO: 776748 - RNA, 19 nt, Human
uaaaaauaaaaaaacuagc

SEQ ID NO: 776749 - RNA, 20 nt, Human
uaaaaauaaaaaaacuagcu

SEQ ID NO: 776750 - RNA, 22 nt, Human
uaaaacacacugacuugcuaag

SEQ ID NO: 776751 - RNA, 22 nt, Human
uaaaacgaacaauuugggaggc

SEQ ID NO: 776752 - RNA, 19 nt, Human
uaaaaugaacuggaggccg

SEQ ID NO: 776753 - RNA, 23 nt, Human
uaaaaugaacuggaggccgggcg

SEQ ID NO: 776754 - RNA, 20 nt, Human
uaaaauuacaaaauuagcca

SEQ ID NO: 776755 - RNA, 18 nt, Human
uaacacggugaaaccccg

SEQ ID NO: 776756 - RNA, 22 nt, Human
uaacacggugaaaccccgucuc

SEQ ID NO: 776757 - RNA, 19 nt, Human
uaaccaccacagugccuua

SEQ ID NO: 776758 - RNA, 18 nt, Human
uaagaauucugagugucc

SEQ ID NO: 776759 - RNA, 21 nt, Human
uaagacuccagcucaaaaaaa

SEQ ID NO: 776760 - RNA, 20 nt, Human
uacagcauucccacagucug

SEQ ID NO: 776761 - RNA, 25 nt, Human
uacaucucaacaaaaacaaaaacaa

SEQ ID NO: 776762 - RNA, 23 nt, Human
uaccugaggucaggaguucaaga

SEQ ID NO: 776763 - RNA, 23 nt, Human
uacuaaaauuacaaaauuagcca

SEQ ID NO: 776764 - RNA, 24 nt, Human
uagaaggaccccagguguucugau

SEQ ID NO: 776765 - RNA, 19 nt, Human
uagaaugugccagaaaaca

SEQ ID NO: 776766 - RNA, 20 nt, Human
uagcugguugugguggcacg

SEQ ID NO: 776767 - RNA, 22 nt, Human
uaguugggcgugguggcaugug

SEQ ID NO: 776768 - RNA, 20 nt, Human
uauauaaauauauauacaca

SEQ ID NO: 776769 - RNA, 22 nt, Human
uauauacacacagcccucuaga

SEQ ID NO: 776770 - RNA, 21 nt, Human
uaugcaauucagaaaacggag

SEQ ID NO: 776771 - RNA, 20 nt, Human
uauuaggacucacacagaca

SEQ ID NO: 776772 - RNA, 22 nt, Human
ucaaaaaaaaaaaaaaagaacu

SEQ ID NO: 776773 - RNA, 18 nt, Human
ucaacacaauuguccacg

SEQ ID NO: 776774 - RNA, 21 nt, Human
ucaaggggugugugucccaug

SEQ ID NO: 776775 - RNA, 24 nt, Human
ucacaaggucaggagauugagacc

SEQ ID NO: 776776 - RNA, 24 nt, Human
ucacaaggucaggagggcgagacc

SEQ ID NO: 776777 - RNA, 21 nt, Human
ucacacagacacauacacaaa

SEQ ID NO: 776778 - RNA, 23 nt, Human
ucacaccacugcacuccagccug

SEQ ID NO: 776779 - RNA, 20 nt, Human
ucaccgugguuuuggaugcu

SEQ ID NO: 776780 - RNA, 18 nt, Human
ucacgaggucaggagauc

SEQ ID NO: 776781 - RNA, 23 nt, Human
ucacgaggucaggagaucaagac

SEQ ID NO: 776782 - RNA, 24 nt, Human
ucacgaggucaggagaucaagacu

SEQ ID NO: 776783 - RNA, 23 nt, Human
ucacgucuucaaagggaauuagg

SEQ ID NO: 776784 - RNA, 20 nt, Human
ucaugccacugcaguccagc

SEQ ID NO: 776785 - RNA, 23 nt, Human
ucauuugaggucaagaguuuaag

SEQ ID NO: 776786 - RNA, 18 nt, Human
uccaaaaggaacuaauac

SEQ ID NO: 776787 - RNA, 23 nt, Human
uccacggagggcaccaguuccgu

SEQ ID NO: 776788 - RNA, 22 nt, Human
uccacugaggccucaucugcca

SEQ ID NO: 776789 - RNA, 24 nt, Human
uccagccuggggcaacagagugag

SEQ ID NO: 776790 - RNA, 25 nt, Human
uccagccuggggcaacagagugaga

SEQ ID NO: 776791 - RNA, 22 nt, Human
uccagcuuggugacagagcgag

SEQ ID NO: 776792 - RNA, 23 nt, Human
uccagcuuggugacagagcgaga

SEQ ID NO: 776793 - RNA, 19 nt, Human
ucccacagucugacccgag

SEQ ID NO: 776794 - RNA, 26 nt, Human
uccccauuccuuuaauucuuccuacg

SEQ ID NO: 776795 - RNA, 19 nt, Human
uccgggaggcggagguugc

SEQ ID NO: 776796 - RNA, 23 nt, Human
uccgucucaaaaaaaaaaaaaaa

SEQ ID NO: 776797 - RNA, 23 nt, Human
ucgcaccacugcacuccagccug

SEQ ID NO: 776798 - RNA, 23 nt, Human
ucgcgccacugcacuccagccug

SEQ ID NO: 776799 - RNA, 18 nt, Human
ucucaaaaaaaaaaaaaa

SEQ ID NO: 776800 - RNA, 19 nt, Human
ucucccaaauagaaggacc

SEQ ID NO: 776801 - RNA, 23 nt, Human
ucucuacuaaaaauaaaaaaacu

SEQ ID NO: 776802 - RNA, 22 nt, Human
ucucuacuaaaaauacaaaaaa

SEQ ID NO: 776803 - RNA, 21 nt, Human
ucucuacuaaaaauauaaaaa

SEQ ID NO: 776804 - RNA, 21 nt, Human
ucucuacuaaaaauauaaaaa

SEQ ID NO: 776805 - RNA, 22 nt, Human
ucucuacuaaaauuacaaaauu

SEQ ID NO: 776806 - RNA, 19 nt, Human
ucuuggggugcggcgggga

SEQ ID NO: 776807 - RNA, 24 nt, Human
ugaaacaggagaauugcuugaacc

SEQ ID NO: 776808 - RNA, 24 nt, Human
ugaaacaggagaauugcuugaacc

SEQ ID NO: 776809 - RNA, 19 nt, Human
ugaaaccccaucucuacua

SEQ ID NO: 776810 - RNA, 22 nt, Human
ugaaaccccgucuccacuaaaa

SEQ ID NO: 776811 - RNA, 18 nt, Human
ugaauguucucacuccca

SEQ ID NO: 776812 - RNA, 23 nt, Human
ugaccugggaggcagagguugcg

SEQ ID NO: 776813 - RNA, 23 nt, Human
ugacuguggugguuggugcaggg

SEQ ID NO: 776814 - RNA, 24 nt, Human
ugacuugcuaagaaaaggggggac

SEQ ID NO: 776815 - RNA, 24 nt, Human
ugagaaguggagguugcagugagc

SEQ ID NO: 776816 - RNA, 24 nt, Human
ugagaccagccugaccaacaugga

SEQ ID NO: 776817 - RNA, 24 nt, Human
ugagaccauccuggucaacauggu

SEQ ID NO: 776818 - RNA, 18 nt, Human
ugagaggccgaggcaggc

SEQ ID NO: 776819 - RNA, 20 nt, Human
ugagaggccgaggcaggcag

SEQ ID NO: 776820 - RNA, 24 nt, Human
ugagaggccgaggcaggcagauca

SEQ ID NO: 776821 - RNA, 19 nt, Human
ugagaugggaaauggagcu

SEQ ID NO: 776822 - RNA, 19 nt, Human
ugagaugggaaauggagcu

SEQ ID NO: 776823 - RNA, 22 nt, Human
ugagaugggaaauggagcugga

SEQ ID NO: 776824 - RNA, 21 nt, Human
ugagauuauucugacuguggu

SEQ ID NO: 776825 - RNA, 22 nt, Human
ugagccaagauugugccacugc

SEQ ID NO: 776826 - RNA, 22 nt, Human
ugagccgagaucaugccacugc

SEQ ID NO: 776827 - RNA, 22 nt, Human
ugagcugagaucgcgccacugc

SEQ ID NO: 776828 - RNA, 24 nt, Human
ugaggcagaagaauugcuugaacc

SEQ ID NO: 776829 - RNA, 25 nt, Human
ugaggcagaagaauugcuugaaccc

SEQ ID NO: 776830 - RNA, 24 nt, Human
ugaggcaggagaauggcgugaacc

SEQ ID NO: 776831 - RNA, 25 nt, Human
ugaggcaggagaauggcgugaaccc

SEQ ID NO: 776832 - RNA, 24 nt, Human
ugaggcaggagaauugcuugaacc

SEQ ID NO: 776833 - RNA, 25 nt, Human
ugaggcaggagaauugcuugaaccu

SEQ ID NO: 776834 - RNA, 18 nt, Human
ugaggucaggaguuugag

SEQ ID NO: 776835 - RNA, 23 nt, Human
ugauacaggcucugcuucuucag

SEQ ID NO: 776836 - RNA, 24 nt, Human
ugcagaugucauugaagauguucc

SEQ ID NO: 776837 - RNA, 19 nt, Human
ugccagcaaaccuugcucc

SEQ ID NO: 776838 - RNA, 20 nt, Human
ugccuguaaucccagcuucu

SEQ ID NO: 776839 - RNA, 23 nt, Human
ugccuguaaucccagcuucuugg

SEQ ID NO: 776840 - RNA, 24 nt, Human
ugccuguaaucccagcuucuuggg

SEQ ID NO: 776841 - RNA, 23 nt, Human
ugccuguaaugccagcuacuagg

SEQ ID NO: 776842 - RNA, 22 nt, Human
ugcggugagccgcgaucgcacc

SEQ ID NO: 776843 - RNA, 21 nt, Human
ugcuucaacacaauuguccac

SEQ ID NO: 776844 - RNA, 18 nt, Human
ugcuugaauccgggaggc

SEQ ID NO: 776845 - RNA, 20 nt, Human
uggaaggcugaggcagaaga

SEQ ID NO: 776846 - RNA, 27 nt, Human
uggaaggcugaggcagaagaauugcuu

SEQ ID NO: 776847 - RNA, 23 nt, Human
uggaucauuugaggucaagaguu

SEQ ID NO: 776848 - RNA, 24 nt, Human
uggaucauuugaggucaagaguuu

SEQ ID NO: 776849 - RNA, 24 nt, Human
uggauuaccugaggucaggaguuc

SEQ ID NO: 776850 - RNA, 21 nt, Human
uggcacgcgccuguaauccca

SEQ ID NO: 776851 - RNA, 22 nt, Human
uggcacgcgccuguaaucccag

SEQ ID NO: 776852 - RNA, 24 nt, Human
uggcaugugccuguaaugccagcu

SEQ ID NO: 776853 - RNA, 24 nt, Human
uggccaacauggugaaaccccguc

SEQ ID NO: 776854 - RNA, 24 nt, Human
uggccaacauggugaaaccccguc

SEQ ID NO: 776855 - RNA, 21 nt, Human
uggcgcaugccuguaauccca

SEQ ID NO: 776856 - RNA, 24 nt, Human
uggcucaagccucuaaucccagca

SEQ ID NO: 776857 - RNA, 21 nt, Human
uggcucacaccuguaauccca

SEQ ID NO: 776858 - RNA, 24 nt, Human
uggcucacaccuguaaucccagca

SEQ ID NO: 776859 - RNA, 21 nt, Human
uggcucacgccuauaauccca

SEQ ID NO: 776860 - RNA, 24 nt, Human
uggcucacgccuauaaucccagca

SEQ ID NO: 776861 - RNA, 22 nt, Human
uggcucacgccuguaaucccag

SEQ ID NO: 776862 - RNA, 24 nt, Human
uggcucacgccuguaaucccagca

SEQ ID NO: 776863 - RNA, 24 nt, Human
uggcucacgccuguaaucccagca

SEQ ID NO: 776864 - RNA, 20 nt, Human
uggcuccuugagcccauucu

SEQ ID NO: 776865 - RNA, 18 nt, Human
ugggacccacccagggag

SEQ ID NO: 776866 - RNA, 23 nt, Human
ugggaggcagagauugcaguggc

SEQ ID NO: 776867 - RNA, 23 nt, Human
ugggaggccaagguggguggauc

SEQ ID NO: 776868 - RNA, 24 nt, Human
ugggaggccaagguggguggauca

SEQ ID NO: 776869 - RNA, 19 nt, Human
ugggaggccgaggagggcg

SEQ ID NO: 776870 - RNA, 24 nt, Human
ugggaggccgaggagggcggauca

SEQ ID NO: 776871 - RNA, 20 nt, Human
ugggaggccgaggcaggcag

SEQ ID NO: 776872 - RNA, 24 nt, Human
ugggaggccgaggcaggcagauca

SEQ ID NO: 776873 - RNA, 22 nt, Human
ugggcaaggacuccgucucaaa

SEQ ID NO: 776874 - RNA, 19 nt, Human
ugggggccggguguggugg

SEQ ID NO: 776875 - RNA, 23 nt, Human
ugggggccgggugugguggcuca

SEQ ID NO: 776876 - RNA, 24 nt, Human
uggguggaucauuugaggucaaga

SEQ ID NO: 776877 - RNA, 24 nt, Human
ugguggcacgcgccuguaauccca

SEQ ID NO: 776878 - RNA, 24 nt, Human
ugguggcaugugccuguaaugcca

SEQ ID NO: 776879 - RNA, 24 nt, Human
ugguggcgcaugccuguaauccca

SEQ ID NO: 776880 - RNA, 24 nt, Human
ugguggcgggcgccuguaguccca

SEQ ID NO: 776881 - RNA, 24 nt, Human
ugguggcucaagccucuaauccca

SEQ ID NO: 776882 - RNA, 24 nt, Human
ugguggcucacgccuguaauccca

SEQ ID NO: 776883 - RNA, 22 nt, Human
uggugggcacuuguaaucccag

SEQ ID NO: 776884 - RNA, 24 nt, Human
ugguggugggcacuuguaauccca

SEQ ID NO: 776885 - RNA, 19 nt, Human
uggugguuggugcagggcu

SEQ ID NO: 776886 - RNA, 22 nt, Human
uguaacagcccagauacuaaaa

SEQ ID NO: 776887 - RNA, 23 nt, Human
ugugccagaaaacagggaaagca

SEQ ID NO: 776888 - RNA, 24 nt, Human
uguggcucacaccuguaaucccag

SEQ ID NO: 776889 - RNA, 19 nt, Human
uuaaaagauuacgugaagu

SEQ ID NO: 776890 - RNA, 18 nt, Human
uuagcugggcaugguggu

SEQ ID NO: 776891 - RNA, 18 nt, Human
uuagcugguugugguggc

SEQ ID NO: 776892 - RNA, 22 nt, Human
uuagcugguugugguggcacgc

SEQ ID NO: 776893 - RNA, 22 nt, Human
uuaguugggcgugguggcaugu

SEQ ID NO: 776894 - RNA, 24 nt, Human
uuaguugggcgugguggcaugugc

SEQ ID NO: 776895 - RNA, 23 nt, Human
uuccccaauaccuaucacaaaag

SEQ ID NO: 776896 - RNA, 23 nt, Human
uucggaggcuccagcaagcaguu

SEQ ID NO: 776897 - RNA, 24 nt, Human
uugaaccugagaaguggagguugc

SEQ ID NO: 776898 - RNA, 24 nt, Human
uugaauccgggaggcggagguugc

SEQ ID NO: 776899 - RNA, 22 nt, Human
uugcagugagccaagauugugc

SEQ ID NO: 776900 - RNA, 18 nt, Human
uugcagugagccgagauc

SEQ ID NO: 776901 - RNA, 19 nt, Human
uugcagugagccgagauca

SEQ ID NO: 776902 - RNA, 20 nt, Human
uugcagugagccgagaucau

SEQ ID NO: 776903 - RNA, 18 nt, Human
uugcagugagcugagauc

SEQ ID NO: 776904 - RNA, 19 nt, Human
uugcagugagcugagaucg

SEQ ID NO: 776905 - RNA, 22 nt, Human
uugcagugagcugagaucgcgc

SEQ ID NO: 776906 - RNA, 22 nt, Human
uugcggugagccgcgaucgcac

SEQ ID NO: 776907 - RNA, 24 nt, Human
uugcuugaaccugagaaguggagg

SEQ ID NO: 776908 - RNA, 18 nt, Human
uugcuugaaccugggagg

SEQ ID NO: 776909 - RNA, 24 nt, Human
uugcuugaauccgggaggcggagg

SEQ ID NO: 776910 - RNA, 24 nt, Human
uugcuuugaccugggaggcagagg

SEQ ID NO: 776911 - RNA, 23 nt, Human
uuggaaggcugaggcagaagaau

SEQ ID NO: 776912 - RNA, 24 nt, Human
uuggaaggcugaggcagaagaauu

SEQ ID NO: 776913 - RNA, 25 nt, Human
uugggaggccgaggagggcggauca

SEQ ID NO: 776914 - RNA, 25 nt, Human
uugggaggccgaggcaggcagauca

SEQ ID NO: 776915 - RNA, 23 nt, Human
uugugccacugcacuccagccug

SEQ ID NO: 776916 - RNA, 18 nt, Human
uuugaccugggaggcaga

SEQ ID NO: 776917 - RNA, 21 nt, Human
uuugaccugggaggcagaggu

SEQ ID NO: 776918 - RNA, 23 nt, Human
uuugaggucaagaguuuaagauc

SEQ ID NO: 776919 - RNA, 20 nt, Human
uuuggggagaccgagguggg

SEQ ID NO: 776920 - RNA, 24 nt, Human
uuugucuuagaaguacagcauucc

SEQ ID NO: 776921 - RNA, 21 nt, Human
uuuuggaugcugccaccugac

SEQ ID NO: 776922 - RNA, 24 nt, Human
aaaaaagacaagcauuucagagga

SEQ ID NO: 776923 - RNA, 19 nt, Human
aaaaagacaagcauuucag

SEQ ID NO: 776924 - RNA, 24 nt, Human
aaaaugcccccagccuucauuccu

SEQ ID NO: 776925 - RNA, 25 nt, Human
aaaaugcccccagccuucauuccug

SEQ ID NO: 776926 - RNA, 29 nt, Human
aaagacaagcauuucagaggagcguugcu

SEQ ID NO: 776927 - RNA, 22 nt, Human
aagacaagcauuucagaggagc

SEQ ID NO: 776928 - RNA, 22 nt, Human
aagcagccauaucuuuaaaagc

SEQ ID NO: 776929 - RNA, 23 nt, Human
accacagauagaguucucccucu

SEQ ID NO: 776930 - RNA, 26 nt, Human
agaaaaaagacaagcauuucagagga

SEQ ID NO: 776931 - RNA, 19 nt, Human
agaaauaacaaggaggaca

SEQ ID NO: 776932 - RNA, 18 nt, Human
agacacccaagaucagcc

SEQ ID NO: 776933 - RNA, 19 nt, Human
agacauucaacauuccugg

SEQ ID NO: 776934 - RNA, 21 nt, Human
agacccagggagacucuggug

SEQ ID NO: 776935 - RNA, 19 nt, Human
agacccuggccgcgcucag

SEQ ID NO: 776936 - RNA, 22 nt, Human
agacccuggccgcgcucagccc

SEQ ID NO: 776937 - RNA, 18 nt, Human
agagcugcagagacagga

SEQ ID NO: 776938 - RNA, 20 nt, Human
agcacaacccaggucuccug

SEQ ID NO: 776939 - RNA, 20 nt, Human
aggaaagaguuugugguugg

SEQ ID NO: 776940 - RNA, 23 nt, Human
aggcagcugcuggcaggggcugg

SEQ ID NO: 776941 - RNA, 22 nt, Human
aggcugccucaucuccccccag

SEQ ID NO: 776942 - RNA, 19 nt, Human
caaaaugcccccagccuuc

SEQ ID NO: 776943 - RNA, 21 nt, Human
caaaguggaucuuugcuguca

SEQ ID NO: 776944 - RNA, 23 nt, Human
caacagaaaaaagacaagcauuu

SEQ ID NO: 776945 - RNA, 19 nt, Human
caagaaauguuuacauaca

SEQ ID NO: 776946 - RNA, 18 nt, Human
caccaaggggagggcggg

SEQ ID NO: 776947 - RNA, 19 nt, Human
caccaaggggagggcgggu

SEQ ID NO: 776948 - RNA, 21 nt, Human
caccaaggggagggcggguuu

SEQ ID NO: 776949 - RNA, 20 nt, Human
caccaauggggaguugcagc

SEQ ID NO: 776950 - RNA, 18 nt, Human
caccgccccaggggcucc

SEQ ID NO: 776951 - RNA, 21 nt, Human
cacucuauacaucuaacuccc

SEQ ID NO: 776952 - RNA, 20 nt, Human
cagaccccucaagcuaggca

SEQ ID NO: 776953 - RNA, 22 nt, Human
cagagcccuauggucaccuccc

SEQ ID NO: 776954 - RNA, 21 nt, Human
cagcaagggcuaggguggggc

SEQ ID NO: 776955 - RNA, 20 nt, Human
cagcagcugaaagggacugg

SEQ ID NO: 776956 - RNA, 21 nt, Human
cagcugaaagauguuuggugg

SEQ ID NO: 776957 - RNA, 20 nt, Human
cagcugcuggcaggggcugg

SEQ ID NO: 776958 - RNA, 21 nt, Human
cagcugcuggcaggggcuggg

SEQ ID NO: 776959 - RNA, 23 nt, Human
cagcugcuggcaggggcuggggg

SEQ ID NO: 776960 - RNA, 23 nt, Human
caggcccucccuuagcugugugg

SEQ ID NO: 776961 - RNA, 19 nt, Human
caggggcuccagguagaca

SEQ ID NO: 776962 - RNA, 21 nt, Human
caucuagggucuccuggaggc

SEQ ID NO: 776963 - RNA, 23 nt, Human
caucuagggucuccuggaggccc

SEQ ID NO: 776964 - RNA, 22 nt, Human
caucuccccccagcaaaaugcc

SEQ ID NO: 776965 - RNA, 21 nt, Human
ccaaacccccacugaagaggc

SEQ ID NO: 776966 - RNA, 23 nt, Human
ccaaacccccacugaagaggcac

SEQ ID NO: 776967 - RNA, 21 nt, Human
ccaaauuggcucaccagaaac

SEQ ID NO: 776968 - RNA, 19 nt, Human
ccacacuucuccaucauga

SEQ ID NO: 776969 - RNA, 21 nt, Human
ccagcccuccagacuaccucc

SEQ ID NO: 776970 - RNA, 24 nt, Human
cccaagaggcugcaggaaagugaa

SEQ ID NO: 776971 - RNA, 24 nt, Human
cccagcaucauggauaucagugga

SEQ ID NO: 776972 - RNA, 23 nt, Human
cccagccaucccccacuggucug

SEQ ID NO: 776973 - RNA, 20 nt, Human
cccccagccuucauuccugu

SEQ ID NO: 776974 - RNA, 19 nt, Human
cccucugcugggccucacc

SEQ ID NO: 776975 - RNA, 20 nt, Human
cccuggccgcgcucagcccc

SEQ ID NO: 776976 - RNA, 23 nt, Human
ccgccaggcgccgcgagcucccg

SEQ ID NO: 776977 - RNA, 20 nt, Human
ccucaucuccccccagcaaa

SEQ ID NO: 776978 - RNA, 22 nt, Human
ccucccugacaguuggcuccca

SEQ ID NO: 776979 - RNA, 25 nt, Human
ccucugcugggccucaccuguagag

SEQ ID NO: 776980 - RNA, 23 nt, Human
ccucugugcucauaagcagcaaa

SEQ ID NO: 776981 - RNA, 21 nt, Human
ccucuuugaaggaaagaguuu

SEQ ID NO: 776982 - RNA, 23 nt, Human
ccugauaugguccccaaaccccc

SEQ ID NO: 776983 - RNA, 18 nt, Human
ccugccacucaaagucuc

SEQ ID NO: 776984 - RNA, 18 nt, Human
ccuggccaccugaaagug

SEQ ID NO: 776985 - RNA, 19 nt, Human
cgaggggacuuguccccau

SEQ ID NO: 776986 - RNA, 22 nt, Human
cgaggggacuuguccccauuuc

SEQ ID NO: 776987 - RNA, 20 nt, Human
cgccucgcgggccaggagcu

SEQ ID NO: 776988 - RNA, 21 nt, Human
cgcgcucagccccgcuggcuc

SEQ ID NO: 776989 - RNA, 18 nt, Human
cggcagggagggcugaau

SEQ ID NO: 776990 - RNA, 23 nt, Human
cuaccaagaaaaugccuagauau

SEQ ID NO: 776991 - RNA, 20 nt, Human
cuacucccucugcugggccu

SEQ ID NO: 776992 - RNA, 21 nt, Human
cuacucccucugcugggccuc

SEQ ID NO: 776993 - RNA, 23 nt, Human
cuagggucuccuggaggcccccu

SEQ ID NO: 776994 - RNA, 21 nt, Human
cuauaaggugggccagggaga

SEQ ID NO: 776995 - RNA, 20 nt, Human
cuauacaucuaacucccgaa

SEQ ID NO: 776996 - RNA, 21 nt, Human
cuccagacuaccuccuagcug

SEQ ID NO: 776997 - RNA, 20 nt, Human
cucccgaaaaaggaccagcu

SEQ ID NO: 776998 - RNA, 21 nt, Human
cucuccaucccgugugcgcug

SEQ ID NO: 776999 - RNA, 21 nt, Human
cucugaccacacuucuccauc

SEQ ID NO: 777000 - RNA, 21 nt, Human
cugaaacacggccuucccagg

SEQ ID NO: 777001 - RNA, 18 nt, Human
cugcugaagaccaugggg

SEQ ID NO: 777002 - RNA, 23 nt, Human
cuguagccgagacagugucacgc

SEQ ID NO: 777003 - RNA, 22 nt, Human
cuucccaggcagcugcuggcag

SEQ ID NO: 777004 - RNA, 22 nt, Human
cuuccugagccuccccucugaa

SEQ ID NO: 777005 - RNA, 19 nt, Human
gaaguccuuccugugacuc

SEQ ID NO: 777006 - RNA, 23 nt, Human
gaaguccuuccugugacucuggc

SEQ ID NO: 777007 - RNA, 19 nt, Human
gacacccaagaucagccaa

SEQ ID NO: 777008 - RNA, 20 nt, Human
gaggcaaugugguguggcag

SEQ ID NO: 777009 - RNA, 20 nt, Human
gaggcugccucaucuccccc

SEQ ID NO: 777010 - RNA, 23 nt, Human
gagucaucuaguccaaguccaaa

SEQ ID NO: 777011 - RNA, 19 nt, Human
gcaaaaugcccccagccuu

SEQ ID NO: 777012 - RNA, 22 nt, Human
gcaccgccccaggggcuccagg

SEQ ID NO: 777013 - RNA, 24 nt, Human
gcagggcuugccucuuccccaagg

SEQ ID NO: 777014 - RNA, 24 nt, Human
gccagagagacgugagcaaagggc

SEQ ID NO: 777015 - RNA, 24 nt, Human
gccccaggggcuccagguagacac

SEQ ID NO: 777016 - RNA, 18 nt, Human
gccugggcacucuggggc

SEQ ID NO: 777017 - RNA, 22 nt, Human
ggaaagaaacuuuuauguacag

SEQ ID NO: 777018 - RNA, 22 nt, Human
ggaaaucuggguucagacccug

SEQ ID NO: 777019 - RNA, 24 nt, Human
ggauagccaguucuaccccagcuc

SEQ ID NO: 777020 - RNA, 22 nt, Human
ggcggguuugugugcgcuggga

SEQ ID NO: 777021 - RNA, 26 nt, Human
ggcugcaggaaagugaauguuuccag

SEQ ID NO: 777022 - RNA, 19 nt, Human
ggcugggggacccagccau

SEQ ID NO: 777023 - RNA, 22 nt, Human
gggcacccagcaucauggauau

SEQ ID NO: 777024 - RNA, 23 nt, Human
gggcuaggguggggcuccccagg

SEQ ID NO: 777025 - RNA, 23 nt, Human
ggggaucugugaaugaccagccc

SEQ ID NO: 777026 - RNA, 23 nt, Human
guaaagauuuccuuaaggccaag

SEQ ID NO: 777027 - RNA, 18 nt, Human
gucagggcuccugccaaa

SEQ ID NO: 777028 - RNA, 18 nt, Human
gugagcaaagggcgaccc

SEQ ID NO: 777029 - RNA, 23 nt, Human
gugcucccucugggucuguagcc

SEQ ID NO: 777030 - RNA, 23 nt, Human
guggauauccaugaacuguuggg

SEQ ID NO: 777031 - RNA, 21 nt, Human
gugguucuuucccaucuuggg

SEQ ID NO: 777032 - RNA, 24 nt, Human
uaacaaggaggacaauuuucuaag

SEQ ID NO: 777033 - RNA, 22 nt, Human
uaagcaagaagccuuccugagc

SEQ ID NO: 777034 - RNA, 28 nt, Human
uaagcagcagcugaaagggacuggggug

SEQ ID NO: 777035 - RNA, 21 nt, Human
uaaggcaggagcucacuucug

SEQ ID NO: 777036 - RNA, 18 nt, Human
uacaucuaacucccgaaa

SEQ ID NO: 777037 - RNA, 21 nt, Human
uaccaagaaaaugccuagaua

SEQ ID NO: 777038 - RNA, 21 nt, Human
uaccccagcuccuaauccugu

SEQ ID NO: 777039 - RNA, 19 nt, Human
uacugugaaacauauguac

SEQ ID NO: 777040 - RNA, 22 nt, Human
uaggguggggcuccccaggccc

SEQ ID NO: 777041 - RNA, 23 nt, Human
ucagacacccaagaucagccaaa

SEQ ID NO: 777042 - RNA, 20 nt, Human
ucagcaggcagcggcaggga

SEQ ID NO: 777043 - RNA, 21 nt, Human
uccaaaccugccacucaaagu

SEQ ID NO: 777044 - RNA, 23 nt, Human
uccagaggcugccucaucucccc

SEQ ID NO: 777045 - RNA, 19 nt, Human
uccaugaacuguuggguuc

SEQ ID NO: 777046 - RNA, 20 nt, Human
uccccaggcccucccuuagc

SEQ ID NO: 777047 - RNA, 24 nt, Human
uccccccagcaaaaugcccccagc

SEQ ID NO: 777048 - RNA, 20 nt, Human
ucccugacaguuggcuccca

SEQ ID NO: 777049 - RNA, 18 nt, Human
ucccugagccauuccaga

SEQ ID NO: 777050 - RNA, 21 nt, Human
ucccugagccauuccagaggc

SEQ ID NO: 777051 - RNA, 22 nt, Human
ucccuggaagaaguccuuccug

SEQ ID NO: 777052 - RNA, 24 nt, Human
ucccuggaagaaguccuuccugug

SEQ ID NO: 777053 - RNA, 20 nt, Human
ucggcaacagaaaaaagaca

SEQ ID NO: 777054 - RNA, 22 nt, Human
ucuccugauaugguccccaaac

SEQ ID NO: 777055 - RNA, 19 nt, Human
ucucugauagccuucccuu

SEQ ID NO: 777056 - RNA, 24 nt, Human
ucucugauagccuucccuuggccc

SEQ ID NO: 777057 - RNA, 21 nt, Human
ucuggccuuugaagcagccau

SEQ ID NO: 777058 - RNA, 22 nt, Human
ucuguagccgagacagugucac

SEQ ID NO: 777059 - RNA, 23 nt, Human
ucugugauuucuccaccuggcau

SEQ ID NO: 777060 - RNA, 20 nt, Human
ugaaaugcagcagauuucug

SEQ ID NO: 777061 - RNA, 24 nt, Human
ugaagcagccauaucuuuaaaagc

SEQ ID NO: 777062 - RNA, 25 nt, Human
ugaaggaaagaguuugugguugggg

SEQ ID NO: 777063 - RNA, 18 nt, Human
ugacuucuugaagugcac

SEQ ID NO: 777064 - RNA, 18 nt, Human
ugagagucaucuagucca

SEQ ID NO: 777065 - RNA, 26 nt, Human
ugcagugcacauggaccuuggaaggc

SEQ ID NO: 777066 - RNA, 22 nt, Human
ugcccccagccuucauuccugu

SEQ ID NO: 777067 - RNA, 18 nt, Human
ugccugggcacucugggg

SEQ ID NO: 777068 - RNA, 19 nt, Human
uggcagcaagggcuagggu

SEQ ID NO: 777069 - RNA, 21 nt, Human
uggcagcaagggcuagggugg

SEQ ID NO: 777070 - RNA, 24 nt, Human
uggcagcaagggcuaggguggggc

SEQ ID NO: 777071 - RNA, 22 nt, Human
uggccagcaccgccccaggggc

SEQ ID NO: 777072 - RNA, 23 nt, Human
uggggcaggaaaggggauaaaug

SEQ ID NO: 777073 - RNA, 22 nt, Human
ugggguggacccaauagcuguu

SEQ ID NO: 777074 - RNA, 19 nt, Human
ugguccccaaacccccacu

SEQ ID NO: 777075 - RNA, 18 nt, Human
ugguguggcagcaagggc

SEQ ID NO: 777076 - RNA, 19 nt, Human
ugguguggcagcaagggcu

SEQ ID NO: 777077 - RNA, 19 nt, Human
uguccccauuuccagaagc

SEQ ID NO: 777078 - RNA, 24 nt, Human
ugugaaaugcagcagauuucugga

SEQ ID NO: 777079 - RNA, 21 nt, Human
ugugcacccaggcugggcuga

SEQ ID NO: 777080 - RNA, 18 nt, Human
ugugguguggcagcaagg

SEQ ID NO: 777081 - RNA, 19 nt, Human
ugugguguggcagcaagga

SEQ ID NO: 777082 - RNA, 23 nt, Human
uguuuggugggaaagaccucccu

SEQ ID NO: 777083 - RNA, 22 nt, Human
uucacagugugagacccuugca

SEQ ID NO: 777084 - RNA, 23 nt, Human
uuccagcucugaaaucccaggcc

SEQ ID NO: 777085 - RNA, 22 nt, Human
uuuaacucuccucuccaucacc

SEQ ID NO: 777086 - RNA, 19 nt, Human
uuucagaggagcguugcuu

SEQ ID NO: 777087 - RNA, 22 nt, Human
uuucagaggagcguugcuuucc

SEQ ID NO: 777088 - RNA, 24 nt, Human
uuuccagcauuggccagcaccgcc

SEQ ID NO: 777089 - RNA, 25 nt, Human
aaaacuucaaguauaaauaagacca

SEQ ID NO: 777090 - RNA, 21 nt, Human
aaaagaggcagaaacuuggau

SEQ ID NO: 777091 - RNA, 19 nt, Human
aaaggcuucacagagacua

SEQ ID NO: 777092 - RNA, 24 nt, Human
aaauggcuguaaaacuacuugccu

SEQ ID NO: 777093 - RNA, 19 nt, Human
aacauggugaaaccccguc

SEQ ID NO: 777094 - RNA, 20 nt, Human
aacauggugaaaccccgucu

SEQ ID NO: 777095 - RNA, 21 nt, Human
aacauggugaaaccccgucuc

SEQ ID NO: 777096 - RNA, 20 nt, Human
aagaagaaggaaacaaauga

SEQ ID NO: 777097 - RNA, 18 nt, Human
aagaguagccgggggcug

SEQ ID NO: 777098 - RNA, 21 nt, Human
aaggaaacaaaugauggccca

SEQ ID NO: 777099 - RNA, 26 nt, Human
aaggcaaaagaugaaagaagggaccc

SEQ ID NO: 777100 - RNA, 22 nt, Human
aaguacauuuaaaagaggcaga

SEQ ID NO: 777101 - RNA, 26 nt, Human
aagugggcagaucaccugaggucagg

SEQ ID NO: 777102 - RNA, 21 nt, Human
aauucccagcagaaguuugcc

SEQ ID NO: 777103 - RNA, 19 nt, Human
aauugcuugaacccugugg

SEQ ID NO: 777104 - RNA, 28 nt, Human
acacauuucacagaacaagaguagcccc

SEQ ID NO: 777105 - RNA, 20 nt, Human
acaccuguaaucccagccac

SEQ ID NO: 777106 - RNA, 18 nt, Human
acagcagcaaaaagcaga

SEQ ID NO: 777107 - RNA, 24 nt, Human
accccgucucuacuaaaaauacaa

SEQ ID NO: 777108 - RNA, 24 nt, Human
accugaggucaggaguucgagacc

SEQ ID NO: 777109 - RNA, 21 nt, Human
accuugcgucgcucucgccgg

SEQ ID NO: 777110 - RNA, 19 nt, Human
acugugucccccgcccccc

SEQ ID NO: 777111 - RNA, 18 nt, Human
acuuggaugugcuucuuu

SEQ ID NO: 777112 - RNA, 23 nt, Human
agaaagaaaauuagcuuccuuga

SEQ ID NO: 777113 - RNA, 18 nt, Human
agacccgucacaguagua

SEQ ID NO: 777114 - RNA, 27 nt, Human
agacugccccagaaggggcuguaccaa

SEQ ID NO: 777115 - RNA, 20 nt, Human
agagggugggggaaauagau

SEQ ID NO: 777116 - RNA, 21 nt, Human
agauauuauaaaaccagagcu

SEQ ID NO: 777117 - RNA, 23 nt, Human
agaucaccugaggucaggaguuc

SEQ ID NO: 777118 - RNA, 25 nt, Human
agaucaccugaggucaggaguucga

SEQ ID NO: 777119 - RNA, 27 nt, Human
agauguuggaaaaucagaguaugaacu

SEQ ID NO: 777120 - RNA, 20 nt, Human
agcaccuuucccauuuggga

SEQ ID NO: 777121 - RNA, 24 nt, Human
agcacuuugggaggccaaaguggg

SEQ ID NO: 777122 - RNA, 22 nt, Human
agccuggccaacauggugaaac

SEQ ID NO: 777123 - RNA, 24 nt, Human
agccuggccaacauggugaaaccc

SEQ ID NO: 777124 - RNA, 19 nt, Human
aggagaagcuuacagcagc

SEQ ID NO: 777125 - RNA, 26 nt, Human
aggaugagacaaaaggccagacagaa

SEQ ID NO: 777126 - RNA, 19 nt, Human
aggcagaaacuuggaugug

SEQ ID NO: 777127 - RNA, 23 nt, Human
aggcaggagaauugcuugaaccc

SEQ ID NO: 777128 - RNA, 25 nt, Human
aggcaggagaauugcuugaacccug

SEQ ID NO: 777129 - RNA, 21 nt, Human
aggcugaggcaggagaauugc

SEQ ID NO: 777130 - RNA, 24 nt, Human
aggcugaggcaggagaauugcuug

SEQ ID NO: 777131 - RNA, 21 nt, Human
aggguuggggaggagagaggg

SEQ ID NO: 777132 - RNA, 20 nt, Human
aguagccgggggcuguuaga

SEQ ID NO: 777133 - RNA, 22 nt, Human
agugaacacagccuucaccgag

SEQ ID NO: 777134 - RNA, 22 nt, Human
aucccagcacuuugggaggcca

SEQ ID NO: 777135 - RNA, 19 nt, Human
auccuguuuagcgacguuc

SEQ ID NO: 777136 - RNA, 23 nt, Human
augagacaaaaggccagacagaa

SEQ ID NO: 777137 - RNA, 19 nt, Human
augccuguaaucccagcac

SEQ ID NO: 777138 - RNA, 23 nt, Human
auggcucaugccuguaaucccag

SEQ ID NO: 777139 - RNA, 20 nt, Human
auguacccucacccucaaac

SEQ ID NO: 777140 - RNA, 21 nt, Human
auguuauccugcaaagacugc

SEQ ID NO: 777141 - RNA, 24 nt, Human
caaacuaauucccagcagaaguuu

SEQ ID NO: 777142 - RNA, 24 nt, Human
caaagugggcagaucaccugaggu

SEQ ID NO: 777143 - RNA, 26 nt, Human
caaagugggcagaucaccugagguca

SEQ ID NO: 777144 - RNA, 24 nt, Human
caacauggugaaaccccgucucua

SEQ ID NO: 777145 - RNA, 21 nt, Human
caagauauuauaaaaccagag

SEQ ID NO: 777146 - RNA, 18 nt, Human
caaggagcauauccaggc

SEQ ID NO: 777147 - RNA, 19 nt, Human
cacaccuguaaucccagcc

SEQ ID NO: 777148 - RNA, 21 nt, Human
cacaccuguaaucccagccac

SEQ ID NO: 777149 - RNA, 22 nt, Human
cacauuucacagaacaagagua

SEQ ID NO: 777150 - RNA, 23 nt, Human
caccugaggucaggaguucgaga

SEQ ID NO: 777151 - RNA, 19 nt, Human
caccuguaaucccagccac

SEQ ID NO: 777152 - RNA, 24 nt, Human
caccuguaaucccagccacuccga

SEQ ID NO: 777153 - RNA, 22 nt, Human
cacugggcacacgggcgcccuc

SEQ ID NO: 777154 - RNA, 22 nt, Human
cacugugucccccgcccccccc

SEQ ID NO: 777155 - RNA, 24 nt, Human
cagaucaccugaggucaggaguuc

SEQ ID NO: 777156 - RNA, 19 nt, Human
cagcaaaaagcagagugca

SEQ ID NO: 777157 - RNA, 21 nt, Human
cagcacuuugggaggccaaag

SEQ ID NO: 777158 - RNA, 24 nt, Human
cagcacuuugggaggccaaagugg

SEQ ID NO: 777159 - RNA, 19 nt, Human
cagcagcaaaaagcagagg

SEQ ID NO: 777160 - RNA, 24 nt, Human
caugccuguaaucccagcacuuug

SEQ ID NO: 777161 - RNA, 20 nt, Human
ccaaugccuacauaccaaua

SEQ ID NO: 777162 - RNA, 22 nt, Human
ccccagaaagaaaauuagcuuc

SEQ ID NO: 777163 - RNA, 21 nt, Human
cccccgccccccccagaaaga

SEQ ID NO: 777164 - RNA, 22 nt, Human
cccgccccccccagaaagaaaa

SEQ ID NO: 777165 - RNA, 24 nt, Human
cccgucacaguaguaucauacccu

SEQ ID NO: 777166 - RNA, 18 nt, Human
cccucaaacuaauuccca

SEQ ID NO: 777167 - RNA, 21 nt, Human
ccuagagaguaaaggcuucac

SEQ ID NO: 777168 - RNA, 23 nt, Human
ccucugcacucaaucagaagguc

SEQ ID NO: 777169 - RNA, 22 nt, Human
ccugaggucaggaguucgagac

SEQ ID NO: 777170 - RNA, 20 nt, Human
ccugcaaagacugccccaga

SEQ ID NO: 777171 - RNA, 23 nt, Human
ccuggccaacauggugaaacccc

SEQ ID NO: 777172 - RNA, 24 nt, Human
ccuggccaacauggugaaaccccg

SEQ ID NO: 777173 - RNA, 23 nt, Human
ccuguaaucccagccacuccgaa

SEQ ID NO: 777174 - RNA, 19 nt, Human
ccuucaccgagcgcugucc

SEQ ID NO: 777175 - RNA, 24 nt, Human
cgagaccagccuggccaacauggu

SEQ ID NO: 777176 - RNA, 19 nt, Human
cgggccgccgccgcagccg

SEQ ID NO: 777177 - RNA, 24 nt, Human
cucaugccuguaaucccagcacuu

SEQ ID NO: 777178 - RNA, 20 nt, Human
cucucauguuaacaaagaau

SEQ ID NO: 777179 - RNA, 18 nt, Human
cugugucccccgcccccc

SEQ ID NO: 777180 - RNA, 20 nt, Human
cuucaccgagcgcuguccag

SEQ ID NO: 777181 - RNA, 18 nt, Human
gagcccuccagcgagcuc

SEQ ID NO: 777182 - RNA, 18 nt, Human
gaggagacugucuagucu

SEQ ID NO: 777183 - RNA, 24 nt, Human
gaucaccugaggucaggaguucga

SEQ ID NO: 777184 - RNA, 23 nt, Human
gauggcucaugccuguaauccca

SEQ ID NO: 777185 - RNA, 24 nt, Human
gauggcucaugccuguaaucccag

SEQ ID NO: 777186 - RNA, 24 nt, Human
gccaacauggugaaaccccgucuc

SEQ ID NO: 777187 - RNA, 24 nt, Human
gcccaguuuagugaguucuaggcu

SEQ ID NO: 777188 - RNA, 22 nt, Human
gccccccccagaaagaaaauua

SEQ ID NO: 777189 - RNA, 18 nt, Human
ggaggagagagggugggg

SEQ ID NO: 777190 - RNA, 21 nt, Human
ggcugggcgauggcucaugcc

SEQ ID NO: 777191 - RNA, 26 nt, Human
gggcagaucaccugaggucaggaguu

SEQ ID NO: 777192 - RNA, 24 nt, Human
gggcaugguggcgcacaccuguaa

SEQ ID NO: 777193 - RNA, 20 nt, Human
ggguuggggaggagagaggg

SEQ ID NO: 777194 - RNA, 24 nt, Human
gguggcgcacaccuguaaucccag

SEQ ID NO: 777195 - RNA, 21 nt, Human
gguguuggggaaucggguagg

SEQ ID NO: 777196 - RNA, 21 nt, Human
gugcuucuuuuuucaucaugc

SEQ ID NO: 777197 - RNA, 25 nt, Human
guuuacucuuccuuuggacuccuac

SEQ ID NO: 777198 - RNA, 18 nt, Human
guuuuguuuuuguuaggg

SEQ ID NO: 777199 - RNA, 25 nt, Human
uaaaagaggcagaaacuuggaugug

SEQ ID NO: 777200 - RNA, 23 nt, Human
uaacuuauagcacugaugcccuc

SEQ ID NO: 777201 - RNA, 20 nt, Human
uaaggcaaaagaugaaagaa

SEQ ID NO: 777202 - RNA, 22 nt, Human
uaaggcaccuagagaguaaagg

SEQ ID NO: 777203 - RNA, 20 nt, Human
uagcugcuuuuuauugacaa

SEQ ID NO: 777204 - RNA, 20 nt, Human
uagcuucugggcugggcgau

SEQ ID NO: 777205 - RNA, 20 nt, Human
uauguacccucacccucaaa

SEQ ID NO: 777206 - RNA, 21 nt, Human
ucacauauguacccucacccu

SEQ ID NO: 777207 - RNA, 20 nt, Human
ucaccugaggucaggaguuc

SEQ ID NO: 777208 - RNA, 22 nt, Human
ucaugccuguaaucccagcacu

SEQ ID NO: 777209 - RNA, 19 nt, Human
uccagcgagcucgcggccg

SEQ ID NO: 777210 - RNA, 19 nt, Human
ucccccgccccccccagaa

SEQ ID NO: 777211 - RNA, 23 nt, Human
ucccccgccccccccagaaagaa

SEQ ID NO: 777212 - RNA, 21 nt, Human
ucucuacuaaaaauacaaaaa

SEQ ID NO: 777213 - RNA, 18 nt, Human
ucuucuguguuucugacu

SEQ ID NO: 777214 - RNA, 19 nt, Human
ugaacacagccuucaccga

SEQ ID NO: 777215 - RNA, 21 nt, Human
ugaggaaaacagcuugaaucu

SEQ ID NO: 777216 - RNA, 24 nt, Human
ugaggcaggagaauugcuugaacc

SEQ ID NO: 777217 - RNA, 25 nt, Human
ugaggcaggagaauugcuugaaccc

SEQ ID NO: 777218 - RNA, 18 nt, Human
ugccaagaaggaugagac

SEQ ID NO: 777219 - RNA, 20 nt, Human
ugccaagaaggaugagacaa

SEQ ID NO: 777220 - RNA, 23 nt, Human
ugccuguaaucccagcacuuugg

SEQ ID NO: 777221 - RNA, 23 nt, Human
ugccuguaaucccagcacuuugg

SEQ ID NO: 777222 - RNA, 24 nt, Human
ugccuguaaucccagcacuuuggg

SEQ ID NO: 777223 - RNA, 21 nt, Human
ugcuucuuuuuucaucaugcu

SEQ ID NO: 777224 - RNA, 18 nt, Human
uggacugggugacauagu

SEQ ID NO: 777225 - RNA, 24 nt, Human
uggccaacauggugaaaccccguc

SEQ ID NO: 777226 - RNA, 22 nt, Human
uggcgcacaccuguaaucccag

SEQ ID NO: 777227 - RNA, 24 nt, Human
uggcucaugccuguaaucccagca

SEQ ID NO: 777228 - RNA, 20 nt, Human
ugggaggccaaagugggcag

SEQ ID NO: 777229 - RNA, 24 nt, Human
ugggaggccaaagugggcagauca

SEQ ID NO: 777230 - RNA, 18 nt, Human
ugggcagaucaccugagg

SEQ ID NO: 777231 - RNA, 24 nt, Human
ugggcagaucaccugaggucagga

SEQ ID NO: 777232 - RNA, 23 nt, Human
ugggcgauggcucaugccuguaa

SEQ ID NO: 777233 - RNA, 22 nt, Human
uggggaggagagaggguggggg

SEQ ID NO: 777234 - RNA, 24 nt, Human
ugguggcgcacaccuguaauccca

SEQ ID NO: 777235 - RNA, 19 nt, Human
uuacagcagcaaaaagcag

SEQ ID NO: 777236 - RNA, 21 nt, Human
uuacagcagcaaaaagcagag

SEQ ID NO: 777237 - RNA, 18 nt, Human
uuagccgggcaugguggc

SEQ ID NO: 777238 - RNA, 18 nt, Human
uuauccugcaaagacugc

SEQ ID NO: 777239 - RNA, 21 nt, Human
uucgagguagaaaugucucag

SEQ ID NO: 777240 - RNA, 19 nt, Human
uucugggcugggcgauggc

SEQ ID NO: 777241 - RNA, 20 nt, Human
uucugggcugggcgauggcu

SEQ ID NO: 777242 - RNA, 19 nt, Human
uucuguguuucugacucau

SEQ ID NO: 777243 - RNA, 24 nt, Human
uuggucuuuuacaagaagaaggaa

SEQ ID NO: 777244 - RNA, 24 nt, Human
uuuucuccaacucugucagcaccu

SEQ ID NO: 777245 - RNA, 18 nt, Human
uuuugcugugcaaaagau

SEQ ID NO: 777246 - RNA, 19 nt, Human
aaaccuacaucuagaaguc

SEQ ID NO: 777247 - RNA, 20 nt, Human
aaacugcuaauugcuaucua

SEQ ID NO: 777248 - RNA, 19 nt, Human
aaagugcugggauuucagg

SEQ ID NO: 777249 - RNA, 24 nt, Human
aaagugcugggauuucaggcguga

SEQ ID NO: 777250 - RNA, 26 nt, Human
aagaaaaaaauaaucaaaacauaaaa

SEQ ID NO: 777251 - RNA, 23 nt, Human
aagaacccccucccccaauaaug

SEQ ID NO: 777252 - RNA, 25 nt, Human
aagcagaaugaaggcacuuccuugg

SEQ ID NO: 777253 - RNA, 19 nt, Human
aagugcugggauuucaggc

SEQ ID NO: 777254 - RNA, 18 nt, Human
acaaagaagauugaaagc

SEQ ID NO: 777255 - RNA, 22 nt, Human
acaaagcagaaugaaggcacuu

SEQ ID NO: 777256 - RNA, 23 nt, Human
acccccucccccaauaaugaaac

SEQ ID NO: 777257 - RNA, 25 nt, Human
acucuguugcccaggauggagugca

SEQ ID NO: 777258 - RNA, 21 nt, Human
agaaacugcuaacaaagaaga

SEQ ID NO: 777259 - RNA, 19 nt, Human
agagauaggguuucaccgu

SEQ ID NO: 777260 - RNA, 20 nt, Human
agagggcuggaacaaacugc

SEQ ID NO: 777261 - RNA, 23 nt, Human
aggguuucaccguguuagccagg

SEQ ID NO: 777262 - RNA, 20 nt, Human
aguagagauaggguuucacc

SEQ ID NO: 777263 - RNA, 18 nt, Human
aguagcugggacuacugg

SEQ ID NO: 777264 - RNA, 19 nt, Human
agugcagugguguggucuc

SEQ ID NO: 777265 - RNA, 23 nt, Human
agugcagugguguggucucagcu

SEQ ID NO: 777266 - RNA, 24 nt, Human
agugcagugguguggucucagcuc

SEQ ID NO: 777267 - RNA, 24 nt, Human
agugguguggucucagcucacugc

SEQ ID NO: 777268 - RNA, 21 nt, Human
auaacaauaagaacccccucc

SEQ ID NO: 777269 - RNA, 18 nt, Human
auaggguuucaccguguu

SEQ ID NO: 777270 - RNA, 19 nt, Human
auaggguuucaccguguua

SEQ ID NO: 777271 - RNA, 20 nt, Human
auaggguuucaccguguuag

SEQ ID NO: 777272 - RNA, 24 nt, Human
auaggguuucaccguguuagccag

SEQ ID NO: 777273 - RNA, 21 nt, Human
auucuccugccucagccuccc

SEQ ID NO: 777274 - RNA, 20 nt, Human
auugcuaucuacuugcugag

SEQ ID NO: 777275 - RNA, 24 nt, Human
caaagugcugggauuucaggcgug

SEQ ID NO: 777276 - RNA, 22 nt, Human
caacacgagaagagcaagaaua

SEQ ID NO: 777277 - RNA, 22 nt, Human
caagcaauucuccugccucagc

SEQ ID NO: 777278 - RNA, 26 nt, Human
caauaagaacccccucccccaauaau

SEQ ID NO: 777279 - RNA, 18 nt, Human
caccguguuagccaggau

SEQ ID NO: 777280 - RNA, 23 nt, Human
caccguguuagccaggauggucu

SEQ ID NO: 777281 - RNA, 24 nt, Human
caccguguuagccaggauggucuu

SEQ ID NO: 777282 - RNA, 23 nt, Human
caccugccucggccucccaaagu

SEQ ID NO: 777283 - RNA, 24 nt, Human
caccugcgguaacccccagcaaug

SEQ ID NO: 777284 - RNA, 24 nt, Human
cacucuguugcccaggauggagug

SEQ ID NO: 777285 - RNA, 23 nt, Human
cagaaugaaggcacuuccuuggu

SEQ ID NO: 777286 - RNA, 26 nt, Human
cagcucccuuggguagaagcuugugg

SEQ ID NO: 777287 - RNA, 24 nt, Human
caggcagguaguugugagcaacac

SEQ ID NO: 777288 - RNA, 21 nt, Human
caggcgugagccaccaugccc

SEQ ID NO: 777289 - RNA, 22 nt, Human
ccaaagugcugggauuucaggc

SEQ ID NO: 777290 - RNA, 24 nt, Human
ccaaagugcugggauuucaggcgu

SEQ ID NO: 777291 - RNA, 20 nt, Human
ccaccacaccuggcuaauuu

SEQ ID NO: 777292 - RNA, 23 nt, Human
ccaccaugcccggccggaacugu

SEQ ID NO: 777293 - RNA, 19 nt, Human
ccagguucaagcaauucuc

SEQ ID NO: 777294 - RNA, 22 nt, Human
ccagguucaagcaauucuccug

SEQ ID NO: 777295 - RNA, 22 nt, Human
cccaauaaugaaaccuacaucu

SEQ ID NO: 777296 - RNA, 26 nt, Human
cccagcaauguaaaggaaagaugaaa

SEQ ID NO: 777297 - RNA, 27 nt, Human
cccccaauaaugaaaccuacaucuaga

SEQ ID NO: 777298 - RNA, 20 nt, Human
cccgaguagcugggacuacu

SEQ ID NO: 777299 - RNA, 22 nt, Human
cccucccccaauaaugaaaccu

SEQ ID NO: 777300 - RNA, 18 nt, Human
ccucaaggcagccagcuc

SEQ ID NO: 777301 - RNA, 19 nt, Human
ccugaccucgugauccacc

SEQ ID NO: 777302 - RNA, 21 nt, Human
ccugaccucgugauccaccug

SEQ ID NO: 777303 - RNA, 22 nt, Human
ccugcaaagcuugggugaggcc

SEQ ID NO: 777304 - RNA, 23 nt, Human
ccugccucagccucccgaguagc

SEQ ID NO: 777305 - RNA, 24 nt, Human
ccuuccagguucaagcaauucucc

SEQ ID NO: 777306 - RNA, 18 nt, Human
ccuugcugcagcucccuu

SEQ ID NO: 777307 - RNA, 23 nt, Human
cuaauuuuuuguauuuuuaguag

SEQ ID NO: 777308 - RNA, 24 nt, Human
cucacugcaaucucugccuuccag

SEQ ID NO: 777309 - RNA, 24 nt, Human
cucagccucccgaguagcugggac

SEQ ID NO: 777310 - RNA, 26 nt, Human
cuccaacuucccucuucucgccuuau

SEQ ID NO: 777311 - RNA, 24 nt, Human
cuccugaccucgugauccaccugc

SEQ ID NO: 777312 - RNA, 24 nt, Human
cugagaaacugcuaacaaagaaga

SEQ ID NO: 777313 - RNA, 24 nt, Human
cugcaaucucugccuuccagguuc

SEQ ID NO: 777314 - RNA, 23 nt, Human
cugccucagccucccgaguagcu

SEQ ID NO: 777315 - RNA, 23 nt, Human
cugccucggccucccaaagugcu

SEQ ID NO: 777316 - RNA, 25 nt, Human
gaaacaagaggugguaggaccaaag

SEQ ID NO: 777317 - RNA, 21 nt, Human
gaaauggcuggccacaagccc

SEQ ID NO: 777318 - RNA, 22 nt, Human
gaccucgugauccaccugccuc

SEQ ID NO: 777319 - RNA, 22 nt, Human
gaccucgugauccaccugccuc

SEQ ID NO: 777320 - RNA, 24 nt, Human
gaccucgugauccaccugccucgg

SEQ ID NO: 777321 - RNA, 22 nt, Human
gagaaacugcuaacaaagaaga

SEQ ID NO: 777322 - RNA, 22 nt, Human
gaguagcugggacuacuggugc

SEQ ID NO: 777323 - RNA, 18 nt, Human
gauuucaggcgugagcca

SEQ ID NO: 777324 - RNA, 21 nt, Human
gauuucaggcgugagccacca

SEQ ID NO: 777325 - RNA, 24 nt, Human
gauuucaggcgugagccaccaugc

SEQ ID NO: 777326 - RNA, 22 nt, Human
gcaaucucugccuuccagguuc

SEQ ID NO: 777327 - RNA, 19 nt, Human
gcgugagccaccaugcccg

SEQ ID NO: 777328 - RNA, 23 nt, Human
ggaaggagagugugguucuaaga

SEQ ID NO: 777329 - RNA, 23 nt, Human
ggacaggaagagggucacacuag

SEQ ID NO: 777330 - RNA, 24 nt, Human
ggauggucuugaucuccugaccuc

SEQ ID NO: 777331 - RNA, 24 nt, Human
ggauuucaggcgugagccaccaug

SEQ ID NO: 777332 - RNA, 24 nt, Human
gggaaggagagugugguucuaaga

SEQ ID NO: 777333 - RNA, 27 nt, Human
ggguagaagcuuguggcuuccccaggg

SEQ ID NO: 777334 - RNA, 21 nt, Human
ggguuucaccguguuagccag

SEQ ID NO: 777335 - RNA, 22 nt, Human
ggguuucaccguguuagccagg

SEQ ID NO: 777336 - RNA, 21 nt, Human
ggugaggcccugaaacuggug

SEQ ID NO: 777337 - RNA, 23 nt, Human
guacaaagcagaaugaaggcacu

SEQ ID NO: 777338 - RNA, 24 nt, Human
gugaagcccugggguaggcaccug

SEQ ID NO: 777339 - RNA, 24 nt, Human
gugauccaccugccucggccuccc

SEQ ID NO: 777340 - RNA, 20 nt, Human
gugcagugguguggucucag

SEQ ID NO: 777341 - RNA, 19 nt, Human
guuuucuuucuuucuuucu

SEQ ID NO: 777342 - RNA, 26 nt, Human
uaaaaauaaauaaaaucaaaaggcca

SEQ ID NO: 777343 - RNA, 23 nt, Human
uaaaauauaacaauaagaacccc

SEQ ID NO: 777344 - RNA, 22 nt, Human
uaacaaagaagauugaaagcac

SEQ ID NO: 777345 - RNA, 23 nt, Human
uaacaauaagaacccccuccccc

SEQ ID NO: 777346 - RNA, 24 nt, Human
uaacaauaagaacccccuccccca

SEQ ID NO: 777347 - RNA, 25 nt, Human
uaacaauaagaacccccucccccaa

SEQ ID NO: 777348 - RNA, 24 nt, Human
uaauuuuuuguauuuuuaguagag

SEQ ID NO: 777349 - RNA, 25 nt, Human
uaauuuuuuguauuuuuaguagaga

SEQ ID NO: 777350 - RNA, 24 nt, Human
uacuggugcgugccaccacaccug

SEQ ID NO: 777351 - RNA, 21 nt, Human
uacuugcccuuggcaacugug

SEQ ID NO: 777352 - RNA, 23 nt, Human
uagaagcuuguggcuuccccagg

SEQ ID NO: 777353 - RNA, 21 nt, Human
uagaggcuguugaugauaugg

SEQ ID NO: 777354 - RNA, 23 nt, Human
uagcugggacuacuggugcgugc

SEQ ID NO: 777355 - RNA, 20 nt, Human
uagcugguuaggaccacugc

SEQ ID NO: 777356 - RNA, 21 nt, Human
uaguagagauaggguuucacc

SEQ ID NO: 777357 - RNA, 24 nt, Human
uaguagagauaggguuucaccgug

SEQ ID NO: 777358 - RNA, 26 nt, Human
uaguagagauaggguuucaccguguu

SEQ ID NO: 777359 - RNA, 18 nt, Human
ucaaaacauaaaaauaaa

SEQ ID NO: 777360 - RNA, 24 nt, Human
ucaccguguuagccaggauggucu

SEQ ID NO: 777361 - RNA, 18 nt, Human
ucacugcaaucucugccu

SEQ ID NO: 777362 - RNA, 24 nt, Human
ucacugcaaucucugccuuccagg

SEQ ID NO: 777363 - RNA, 23 nt, Human
ucagccucccgaguagcugggac

SEQ ID NO: 777364 - RNA, 24 nt, Human
ucccaaagugcugggauuucaggc

SEQ ID NO: 777365 - RNA, 22 nt, Human
ucccacauggcugggcagggau

SEQ ID NO: 777366 - RNA, 21 nt, Human
uccccugaacuugcugcuggg

SEQ ID NO: 777367 - RNA, 23 nt, Human
ucccgaguagcugggacuacugg

SEQ ID NO: 777368 - RNA, 24 nt, Human
ucccgaguagcugggacuacuggu

SEQ ID NO: 777369 - RNA, 18 nt, Human
ucggccucccaaagugcu

SEQ ID NO: 777370 - RNA, 19 nt, Human
ucucacucuguugcccagg

SEQ ID NO: 777371 - RNA, 20 nt, Human
ucucacucuguugcccagga

SEQ ID NO: 777372 - RNA, 23 nt, Human
ucucacucuguugcccaggaugg

SEQ ID NO: 777373 - RNA, 24 nt, Human
ucucacucuguugcccaggaugga

SEQ ID NO: 777374 - RNA, 24 nt, Human
ucuccugccucagccucccgagua

SEQ ID NO: 777375 - RNA, 24 nt, Human
ucucugugcagcaaguacuugccc

SEQ ID NO: 777376 - RNA, 24 nt, Human
ucuguugcccaggauggagugcag

SEQ ID NO: 777377 - RNA, 18 nt, Human
ucuuucuuucuuucuuuc

SEQ ID NO: 777378 - RNA, 18 nt, Human
ucuuucuuucuuucuuuc

SEQ ID NO: 777379 - RNA, 22 nt, Human
ucuuucuuucuuucuuucuuuc

SEQ ID NO: 777380 - RNA, 25 nt, Human
ucuuucuuucuuucuuucuuucuuu

SEQ ID NO: 777381 - RNA, 25 nt, Human
ucuuucuuucuuucuuucuuucuuu

SEQ ID NO: 777382 - RNA, 25 nt, Human
ucuuucuuucuuucuuucuuucuuu

SEQ ID NO: 777383 - RNA, 25 nt, Human
ucuuucuuucuuucuuucuuucuuu

SEQ ID NO: 777384 - RNA, 24 nt, Human
ucuuucuuucuuucuuuucuuucc

SEQ ID NO: 777385 - RNA, 22 nt, Human
ucuuucuuuuugagacaaaguc

SEQ ID NO: 777386 - RNA, 22 nt, Human
ugaagcccugggguaggcaccu

SEQ ID NO: 777387 - RNA, 23 nt, Human
ugaagcccugggguaggcaccug

SEQ ID NO: 777388 - RNA, 19 nt, Human
ugagaaauggcuggccaca

SEQ ID NO: 777389 - RNA, 18 nt, Human
ugagacaaagucucacuc

SEQ ID NO: 777390 - RNA, 22 nt, Human
ugagacaaagucucacucuguu

SEQ ID NO: 777391 - RNA, 24 nt, Human
ugaggcccugaaacugggaccaag

SEQ ID NO: 777392 - RNA, 24 nt, Human
ugaucugcagaaaaugcuuuccuu

SEQ ID NO: 777393 - RNA, 18 nt, Human
ugcaaagcuugggugagg

SEQ ID NO: 777394 - RNA, 23 nt, Human
ugcaaucucugccuuccagguuc

SEQ ID NO: 777395 - RNA, 18 nt, Human
ugcagcaaguacuugccc

SEQ ID NO: 777396 - RNA, 18 nt, Human
ugcagcucccuuggguag

SEQ ID NO: 777397 - RNA, 22 nt, Human
ugcagugguguggucucagcuc

SEQ ID NO: 777398 - RNA, 24 nt, Human
ugcccaggauggagugcaguggug

SEQ ID NO: 777399 - RNA, 25 nt, Human
ugccuagccacgguggauucaggcu

SEQ ID NO: 777400 - RNA, 24 nt, Human
ugccucagccucccgaguagcugg

SEQ ID NO: 777401 - RNA, 21 nt, Human
ugccucggccucccaaagugc

SEQ ID NO: 777402 - RNA, 24 nt, Human
ugccucggccucccaaagugcugg

SEQ ID NO: 777403 - RNA, 19 nt, Human
ugcuaacaaagaagauuga

SEQ ID NO: 777404 - RNA, 20 nt, Human
uggagugcaguggugugguc

SEQ ID NO: 777405 - RNA, 23 nt, Human
uggagugcagugguguggucuca

SEQ ID NO: 777406 - RNA, 24 nt, Human
uggagugcagugguguggucucag

SEQ ID NO: 777407 - RNA, 19 nt, Human
uggcccauauggugaagcc

SEQ ID NO: 777408 - RNA, 23 nt, Human
uggcugggcagggaugcuguggc

SEQ ID NO: 777409 - RNA, 19 nt, Human
ugggaaggagagugugguu

SEQ ID NO: 777410 - RNA, 24 nt, Human
ugggacuacuggugcgugccacca

SEQ ID NO: 777411 - RNA, 18 nt, Human
ugggauuucaggcgugag

SEQ ID NO: 777412 - RNA, 24 nt, Human
ugggauuucaggcgugagccacca

SEQ ID NO: 777413 - RNA, 25 nt, Human
ugggauuucaggcgugagccaccau

SEQ ID NO: 777414 - RNA, 21 nt, Human
uggugcgugccaccacaccug

SEQ ID NO: 777415 - RNA, 24 nt, Human
ugguguggucucagcucacugcaa

SEQ ID NO: 777416 - RNA, 23 nt, Human
uuaggacaggaagagggucacaa

SEQ ID NO: 777417 - RNA, 18 nt, Human
uuaguagagauaggguuu

SEQ ID NO: 777418 - RNA, 22 nt, Human
uuaguagagauaggguuucacc

SEQ ID NO: 777419 - RNA, 24 nt, Human
uuaguagagauaggguuucaccgu

SEQ ID NO: 777420 - RNA, 27 nt, Human
uuaguuaaaaaagaaaaaaauaaucaa

SEQ ID NO: 777421 - RNA, 21 nt, Human
uucaagcaauucuccugccuc

SEQ ID NO: 777422 - RNA, 24 nt, Human
uucaagcaauucuccugccucagc

SEQ ID NO: 777423 - RNA, 19 nt, Human
uucaggcgugagccaccau

SEQ ID NO: 777424 - RNA, 24 nt, Human
uuccagguucaagcaauucuccug

SEQ ID NO: 777425 - RNA, 22 nt, Human
uuccccagggucuccuagcugg

SEQ ID NO: 777426 - RNA, 22 nt, Human
uucucgccuuauuaguuaaaaa

SEQ ID NO: 777427 - RNA, 24 nt, Human
uuuaaaauauaacaauaagaaccc

SEQ ID NO: 777428 - RNA, 19 nt, Human
uuucaccguguuagccagg

SEQ ID NO: 777429 - RNA, 25 nt, Human
uuuccuaaauucauccaggcaggua

SEQ ID NO: 777430 - RNA, 24 nt, Human
uuuuuaguagagauaggguuucac

SEQ ID NO: 777431 - RNA, 21 nt, Human
uuuuuguauuuuuaguagaga

SEQ ID NO: 777432 - RNA, 24 nt, Human
uuuuuuguauuuuuaguagagaua

SEQ ID NO: 777433 - RNA, 25 nt, Human
aaaaaaaaaaaaaaaaagaaaagaa

SEQ ID NO: 777434 - RNA, 23 nt, Human
aaaaaaaaaagaaaagcuaaaaa

SEQ ID NO: 777435 - RNA, 23 nt, Human
aaaaaaagaaaagaaagaaagaa

SEQ ID NO: 777436 - RNA, 18 nt, Human
aaaaaugcaacaccugac

SEQ ID NO: 777437 - RNA, 25 nt, Human
aaaagaaaaaaaaaguagugcagaa

SEQ ID NO: 777438 - RNA, 21 nt, Human
aaaccaacaccaaguccccaa

SEQ ID NO: 777439 - RNA, 26 nt, Human
aaaccaacaccaaguccccaacccua

SEQ ID NO: 777440 - RNA, 23 nt, Human
aaccaacaccaaguccccaaccc

SEQ ID NO: 777441 - RNA, 21 nt, Human
aacgucugaugccccucuaug

SEQ ID NO: 777442 - RNA, 21 nt, Human
aagaaaaaaaaaguagugcag

SEQ ID NO: 777443 - RNA, 23 nt, Human
aagaauaaaacuuuaaaaagcaa

SEQ ID NO: 777444 - RNA, 21 nt, Human
aaggcagcccuaacagagacu

SEQ ID NO: 777445 - RNA, 19 nt, Human
aaguggucuccagacuugc

SEQ ID NO: 777446 - RNA, 22 nt, Human
aauuaaaaaaaaaaaaaaaaag

SEQ ID NO: 777447 - RNA, 23 nt, Human
acaaaacaaaagcacaggaggcc

SEQ ID NO: 777448 - RNA, 27 nt, Human
acacacacgcauacacucacacacaca

SEQ ID NO: 777449 - RNA, 24 nt, Human
acagcaucgaaggcagccaguugc

SEQ ID NO: 777450 - RNA, 25 nt, Human
acagcaucgaaggcagccaguugcc

SEQ ID NO: 777451 - RNA, 21 nt, Human
acagcgagugaagaagugagu

SEQ ID NO: 777452 - RNA, 24 nt, Human
acauggcaccuuccucuuuaaucc

SEQ ID NO: 777453 - RNA, 24 nt, Human
accaacaccaaguccccaacccua

SEQ ID NO: 777454 - RNA, 21 nt, Human
acccaguuuagaaucuagaag

SEQ ID NO: 777455 - RNA, 19 nt, Human
acuacagugcaaaauucca

SEQ ID NO: 777456 - RNA, 19 nt, Human
acucacacacacacacaca

SEQ ID NO: 777457 - RNA, 18 nt, Human
acuguugcuauuuuuuuc

SEQ ID NO: 777458 - RNA, 23 nt, Human
acuugcauacuauuucaaaaauc

SEQ ID NO: 777459 - RNA, 18 nt, Human
acuugcucaagagaacca

SEQ ID NO: 777460 - RNA, 20 nt, Human
acuuugcuuaucugugaggu

SEQ ID NO: 777461 - RNA, 19 nt, Human
agaaaaacgagagcggugg

SEQ ID NO: 777462 - RNA, 18 nt, Human
agaacaaagaagaaauaa

SEQ ID NO: 777463 - RNA, 24 nt, Human
agacaggaucugaagugcauaugg

SEQ ID NO: 777464 - RNA, 18 nt, Human
agagacugacagacagga

SEQ ID NO: 777465 - RNA, 19 nt, Human
agaucccauggaaaaccaa

SEQ ID NO: 777466 - RNA, 21 nt, Human
agcaaacaaacauuacagaua

SEQ ID NO: 777467 - RNA, 21 nt, Human
agcuuuucugguucacagguu

SEQ ID NO: 777468 - RNA, 18 nt, Human
aggacuaaacuccaugac

SEQ ID NO: 777469 - RNA, 24 nt, Human
aggaggcuuuggugggagggcagg

SEQ ID NO: 777470 - RNA, 23 nt, Human
aggcaacuucuuuccucuccaag

SEQ ID NO: 777471 - RNA, 23 nt, Human
aggcuuuggugggagggcagggg

SEQ ID NO: 777472 - RNA, 18 nt, Human
aguaacuacuuucccaca

SEQ ID NO: 777473 - RNA, 26 nt, Human
auauacuuugcuuaucugugagguuu

SEQ ID NO: 777474 - RNA, 25 nt, Human
augaaauguaacgucugaugccccc

SEQ ID NO: 777475 - RNA, 20 nt, Human
augacacagucacccacaug

SEQ ID NO: 777476 - RNA, 24 nt, Human
augagaucuaccuacuaaacaaaa

SEQ ID NO: 777477 - RNA, 21 nt, Human
auuacagauacaacauuacug

SEQ ID NO: 777478 - RNA, 23 nt, Human
caaaaaaguacaaaacaaaagca

SEQ ID NO: 777479 - RNA, 21 nt, Human
caaaacccucauauccaaaga

SEQ ID NO: 777480 - RNA, 23 nt, Human
caaaucccugaagcuuucaguuu

SEQ ID NO: 777481 - RNA, 19 nt, Human
caacgagaaacccaggccu

SEQ ID NO: 777482 - RNA, 22 nt, Human
caagggucuaaaauuccagcua

SEQ ID NO: 777483 - RNA, 25 nt, Human
caaguaacuacuuucccacaagaua

SEQ ID NO: 777484 - RNA, 24 nt, Human
cacaaauacucccacauccguucc

SEQ ID NO: 777485 - RNA, 23 nt, Human
cacacaacgcuucaacauaccac

SEQ ID NO: 777486 - RNA, 25 nt, Human
cacacacacacacagucgggcacgu

SEQ ID NO: 777487 - RNA, 24 nt, Human
cacacacacagucgggcacgugac

SEQ ID NO: 777488 - RNA, 19 nt, Human
cacacacagcaauacugaa

SEQ ID NO: 777489 - RNA, 20 nt, Human
cacacagucgggcacgugac

SEQ ID NO: 777490 - RNA, 19 nt, Human
cacaccacaaauacuccca

SEQ ID NO: 777491 - RNA, 21 nt, Human
cacagucacccacauggcacc

SEQ ID NO: 777492 - RNA, 19 nt, Human
caccaaaaucugaacagua

SEQ ID NO: 777493 - RNA, 27 nt, Human
cacuuccuaggaccuaucccaagaguc

SEQ ID NO: 777494 - RNA, 19 nt, Human
cacuucgauugcagaaaua

SEQ ID NO: 777495 - RNA, 23 nt, Human
cacuugaucacacaacgcuucaa

SEQ ID NO: 777496 - RNA, 21 nt, Human
cagaaggaacagacuugcuca

SEQ ID NO: 777497 - RNA, 21 nt, Human
cagaaggcaacuucuuuccuc

SEQ ID NO: 777498 - RNA, 18 nt, Human
cagcccuaacagagacug

SEQ ID NO: 777499 - RNA, 21 nt, Human
cagcuacagcaaaucccugaa

SEQ ID NO: 777500 - RNA, 19 nt, Human
caggacagcgagugaagaa

SEQ ID NO: 777501 - RNA, 20 nt, Human
caggacgagaaaauacaaaa

SEQ ID NO: 777502 - RNA, 21 nt, Human
caggaggcuuuggugggaggg

SEQ ID NO: 777503 - RNA, 20 nt, Human
cauccuagacuagcugagua

SEQ ID NO: 777504 - RNA, 19 nt, Human
ccaaacuuucgggccaaau

SEQ ID NO: 777505 - RNA, 20 nt, Human
ccaacaccaaguccccaacc

SEQ ID NO: 777506 - RNA, 19 nt, Human
ccaacuauggaaauaaaau

SEQ ID NO: 777507 - RNA, 19 nt, Human
ccaagagauauucuugggg

SEQ ID NO: 777508 - RNA, 18 nt, Human
ccaccaaaaucugaacag

SEQ ID NO: 777509 - RNA, 24 nt, Human
ccagaucccauggaaaaccaaagg

SEQ ID NO: 777510 - RNA, 23 nt, Human
cccaacccuaccaaugaacuaaa

SEQ ID NO: 777511 - RNA, 20 nt, Human
cccaccaaaaucugaacagg

SEQ ID NO: 777512 - RNA, 24 nt, Human
ccccaacccuaccaaugaacuaaa

SEQ ID NO: 777513 - RNA, 27 nt, Human
cccuaaaggcugccacucuuggucccu

SEQ ID NO: 777514 - RNA, 20 nt, Human
cccucuaugugaaauaaagc

SEQ ID NO: 777515 - RNA, 19 nt, Human
cgagaaacccaggccuauc

SEQ ID NO: 777516 - RNA, 25 nt, Human
cgcauacacucacacacacacacac

SEQ ID NO: 777517 - RNA, 19 nt, Human
cgcuucaacauaccaccau

SEQ ID NO: 777518 - RNA, 20 nt, Human
cggaauccacgugaucucuu

SEQ ID NO: 777519 - RNA, 21 nt, Human
cggccagauggaacacacucc

SEQ ID NO: 777520 - RNA, 22 nt, Human
cuaaaucuuaaauacugccaag

SEQ ID NO: 777521 - RNA, 19 nt, Human
cuccuuuguaagaaaugca

SEQ ID NO: 777522 - RNA, 24 nt, Human
cucucuugacauuuaaaaaaaaaa

SEQ ID NO: 777523 - RNA, 24 nt, Human
cucugugcucaaagaaggcccucc

SEQ ID NO: 777524 - RNA, 19 nt, Human
cuuccuaggaccuauccca

SEQ ID NO: 777525 - RNA, 19 nt, Human
gaaaggcagcccuaacaga

SEQ ID NO: 777526 - RNA, 20 nt, Human
gaaugacaauguuccccuca

SEQ ID NO: 777527 - RNA, 21 nt, Human
gaccuugaaaaagcuugcaaa

SEQ ID NO: 777528 - RNA, 21 nt, Human
gagaaaauacaaaacggaugg

SEQ ID NO: 777529 - RNA, 22 nt, Human
gagaaacccaggccuaucaucc

SEQ ID NO: 777530 - RNA, 19 nt, Human
gagcccacagacacagggc

SEQ ID NO: 777531 - RNA, 19 nt, Human
gaugggaaauggucuaaga

SEQ ID NO: 777532 - RNA, 23 nt, Human
gauuuguagaaacguuuuuccuu

SEQ ID NO: 777533 - RNA, 21 nt, Human
gcaaaucccugaagcuuucag

SEQ ID NO: 777534 - RNA, 20 nt, Human
gcaacuucuuuccucuccaa

SEQ ID NO: 777535 - RNA, 22 nt, Human
gccaaauaaccuuuccuguggc

SEQ ID NO: 777536 - RNA, 21 nt, Human
gccgcagauguacugagcaga

SEQ ID NO: 777537 - RNA, 19 nt, Human
gcuccuuccuccuucuacg

SEQ ID NO: 777538 - RNA, 18 nt, Human
gcuugaugggcugugcuc

SEQ ID NO: 777539 - RNA, 23 nt, Human
ggcagaauaaggcgacgcuuuga

SEQ ID NO: 777540 - RNA, 19 nt, Human
ggcugugaugugcugggcu

SEQ ID NO: 777541 - RNA, 20 nt, Human
guaaaaccaggacagcgagu

SEQ ID NO: 777542 - RNA, 18 nt, Human
gugcaauggauguuuaca

SEQ ID NO: 777543 - RNA, 24 nt, Human
guggaaaauccauuccuagauaac

SEQ ID NO: 777544 - RNA, 19 nt, Human
gugguaacuuucacaaggc

SEQ ID NO: 777545 - RNA, 21 nt, Human
guuguaguuaauucacacaca

SEQ ID NO: 777546 - RNA, 19 nt, Human
uaaaaaaaaaagaaaagcu

SEQ ID NO: 777547 - RNA, 20 nt, Human
uaaaaaccuuugucuaauca

SEQ ID NO: 777548 - RNA, 21 nt, Human
uaaaaagcaaacaaacauuac

SEQ ID NO: 777549 - RNA, 25 nt, Human
uaaaaagcaaacaaacauuacagau

SEQ ID NO: 777550 - RNA, 26 nt, Human
uaaaaccaggacagcgagugaagaag

SEQ ID NO: 777551 - RNA, 26 nt, Human
uaaaauagcuucaugaugucuagaca

SEQ ID NO: 777552 - RNA, 22 nt, Human
uaaacaaaaaugagagguuuga

SEQ ID NO: 777553 - RNA, 23 nt, Human
uaaauaaacaucuuuacagauaa

SEQ ID NO: 777554 - RNA, 18 nt, Human
uaaaugagcuuuguucac

SEQ ID NO: 777555 - RNA, 19 nt, Human
uacagcaaaucccugaagc

SEQ ID NO: 777556 - RNA, 24 nt, Human
uacaguuuauagacacugacauuu

SEQ ID NO: 777557 - RNA, 18 nt, Human
uacuaaaaacuuuuccca

SEQ ID NO: 777558 - RNA, 20 nt, Human
uacucccacauccguuccca

SEQ ID NO: 777559 - RNA, 23 nt, Human
uacucccacauccguucccacug

SEQ ID NO: 777560 - RNA, 20 nt, Human
uacugagcagaugagagugg

SEQ ID NO: 777561 - RNA, 22 nt, Human
uacuggugugcaaccauccuag

SEQ ID NO: 777562 - RNA, 18 nt, Human
uagcagcaaaauaaaguu

SEQ ID NO: 777563 - RNA, 22 nt, Human
uaggagaagacagucuaugaua

SEQ ID NO: 777564 - RNA, 24 nt, Human
ucaaaaaaguacaaaacaaaagca

SEQ ID NO: 777565 - RNA, 22 nt, Human
ucaaaugagaucuaccuacuaa

SEQ ID NO: 777566 - RNA, 18 nt, Human
uccaacccagaaacacua

SEQ ID NO: 777567 - RNA, 19 nt, Human
uccacaguaaggacaaguc

SEQ ID NO: 777568 - RNA, 23 nt, Human
uccacaguaaggacaaguccugc

SEQ ID NO: 777569 - RNA, 21 nt, Human
uccccugcuuugcugcuguua

SEQ ID NO: 777570 - RNA, 19 nt, Human
uccucagcuacagcaaauc

SEQ ID NO: 777571 - RNA, 18 nt, Human
ucuccuuuguaagaaaug

SEQ ID NO: 777572 - RNA, 19 nt, Human
ucugaagugcauauguaac

SEQ ID NO: 777573 - RNA, 23 nt, Human
ugacgaaaaacgcuaauauuuaa

SEQ ID NO: 777574 - RNA, 20 nt, Human
ugagcagaugagaguggucg

SEQ ID NO: 777575 - RNA, 20 nt, Human
ugagcccacagacacagggc

SEQ ID NO: 777576 - RNA, 22 nt, Human
ugagugcaauggacaacaggcu

SEQ ID NO: 777577 - RNA, 24 nt, Human
ugagugcaauggacaacaggcuca

SEQ ID NO: 777578 - RNA, 21 nt, Human
ugauacuuccugauuuuuucu

SEQ ID NO: 777579 - RNA, 19 nt, Human
ugauggggcugugaugugc

SEQ ID NO: 777580 - RNA, 25 nt, Human
ugauggggcugugaugugcugggcu

SEQ ID NO: 777581 - RNA, 18 nt, Human
ugcaccaaggguucaaga

SEQ ID NO: 777582 - RNA, 19 nt, Human
uggauguuuacaagaaauc

SEQ ID NO: 777583 - RNA, 18 nt, Human
uggcaaagugacaaaugc

SEQ ID NO: 777584 - RNA, 18 nt, Human
uggcagaauaaggcgacg

SEQ ID NO: 777585 - RNA, 23 nt, Human
ugggaaaauuaaaaaaaaaaaaa

SEQ ID NO: 777586 - RNA, 22 nt, Human
ugguacugcuuugagaacccac

SEQ ID NO: 777587 - RNA, 18 nt, Human
uggugggagggcaggggu

SEQ ID NO: 777588 - RNA, 23 nt, Human
uguccagucuuucacccaguuua

SEQ ID NO: 777589 - RNA, 24 nt, Human
ugugaaauaaagcacgcuuauuuc

SEQ ID NO: 777590 - RNA, 20 nt, Human
ugugcuuaugacuugcauac

SEQ ID NO: 777591 - RNA, 19 nt, Human
uguggcaguaggagaaaug

SEQ ID NO: 777592 - RNA, 22 nt, Human
uuaaccccaaagcacauacacg

SEQ ID NO: 777593 - RNA, 19 nt, Human
uuccaguuagcuugguguc

SEQ ID NO: 777594 - RNA, 20 nt, Human
uugagaacccaccaaaaucu

SEQ ID NO: 777595 - RNA, 24 nt, Human
uugcucaagagaaccacaagccuu

SEQ ID NO: 777596 - RNA, 21 nt, Human
uuggaaacaaucacuucggcu

SEQ ID NO: 777597 - RNA, 21 nt, Human
uuucccacaagauacuuccca

SEQ ID NO: 777598 - RNA, 20 nt, Human
uuucccaggagaacugucac

SEQ ID NO: 777599 - RNA, 18 nt, Human
uuuccucuccaagcuaca

SEQ ID NO: 777600 - RNA, 20 nt, Human
uuuugugccuaccaggagau

SEQ ID NO: 777601 - RNA, 20 nt, Human
aaaaggcugaagaaagagaa

SEQ ID NO: 777602 - RNA, 24 nt, Human
aaaguguugggauuacagauguga

SEQ ID NO: 777603 - RNA, 18 nt, Human
aacuuccagaugaaucac

SEQ ID NO: 777604 - RNA, 20 nt, Human
aagaaagagaagucagaggc

SEQ ID NO: 777605 - RNA, 24 nt, Human
aagcauaaagaggaggccuucuaa

SEQ ID NO: 777606 - RNA, 22 nt, Human
aagcucuccccaccccuuacua

SEQ ID NO: 777607 - RNA, 24 nt, Human
aagcuggcccuguaauaacuucca

SEQ ID NO: 777608 - RNA, 19 nt, Human
aaguguugggauuacagau

SEQ ID NO: 777609 - RNA, 21 nt, Human
aaguguugggauuacagaugu

SEQ ID NO: 777610 - RNA, 22 nt, Human
acccaucucagccucccaaagu

SEQ ID NO: 777611 - RNA, 31 nt, Human
agaagucagaggccacaauaggcccaaacuu

SEQ ID NO: 777612 - RNA, 23 nt, Human
agacaccagcaggugaaccgaaa

SEQ ID NO: 777613 - RNA, 20 nt, Human
agaggaaaggagaaaggaag

SEQ ID NO: 777614 - RNA, 24 nt, Human
agaguugaagagcaaguuugagug

SEQ ID NO: 777615 - RNA, 22 nt, Human
agaugccuucacuucacaauug

SEQ ID NO: 777616 - RNA, 22 nt, Human
agauggaagaacuugggcuggg

SEQ ID NO: 777617 - RNA, 19 nt, Human
agcaauccacccaucucag

SEQ ID NO: 777618 - RNA, 22 nt, Human
aggcugccccuccgucucugcc

SEQ ID NO: 777619 - RNA, 24 nt, Human
auggggucucgcuguguugcccag

SEQ ID NO: 777620 - RNA, 18 nt, Human
auuccauccucuccccuu

SEQ ID NO: 777621 - RNA, 23 nt, Human
auuccauccucuccccuuaccua

SEQ ID NO: 777622 - RNA, 24 nt, Human
caaaguguugggauuacagaugug

SEQ ID NO: 777623 - RNA, 18 nt, Human
caaauuacuaaaagccag

SEQ ID NO: 777624 - RNA, 18 nt, Human
caagcucuccccaccccu

SEQ ID NO: 777625 - RNA, 19 nt, Human
caagcucuccccaccccuu

SEQ ID NO: 777626 - RNA, 22 nt, Human
caauaggcccaaacuugauaac

SEQ ID NO: 777627 - RNA, 24 nt, Human
caauccacccaucucagccuccca

SEQ ID NO: 777628 - RNA, 22 nt, Human
cacccaucucagccucccaaag

SEQ ID NO: 777629 - RNA, 23 nt, Human
cacccaucucagccucccaaagu

SEQ ID NO: 777630 - RNA, 21 nt, Human
caccccuuacuaagugccccg

SEQ ID NO: 777631 - RNA, 18 nt, Human
cacuuggaguccuaggga

SEQ ID NO: 777632 - RNA, 21 nt, Human
cauccugucgcugcugcccgc

SEQ ID NO: 777633 - RNA, 24 nt, Human
caucucagccucccaaaguguugg

SEQ ID NO: 777634 - RNA, 24 nt, Human
cauggaccccgcgggccgcgggcc

SEQ ID NO: 777635 - RNA, 23 nt, Human
cauuaugguaauccucagcccag

SEQ ID NO: 777636 - RNA, 22 nt, Human
cauuccauccucuccccuuacc

SEQ ID NO: 777637 - RNA, 21 nt, Human
ccaaaguguugggauuacaga

SEQ ID NO: 777638 - RNA, 22 nt, Human
ccaaaguguugggauuacagau

SEQ ID NO: 777639 - RNA, 24 nt, Human
ccaaaguguugggauuacagaugu

SEQ ID NO: 777640 - RNA, 25 nt, Human
ccaauagcaacauuuugagguuuga

SEQ ID NO: 777641 - RNA, 19 nt, Human
ccacccaucucagccuccc

SEQ ID NO: 777642 - RNA, 20 nt, Human
cccaaagaggcugccccucc

SEQ ID NO: 777643 - RNA, 26 nt, Human
cccaauagcaacauuuugagguuuga

SEQ ID NO: 777644 - RNA, 22 nt, Human
cccaccccuuacuaagugcccc

SEQ ID NO: 777645 - RNA, 20 nt, Human
cccgcgccgcuccggggccg

SEQ ID NO: 777646 - RNA, 20 nt, Human
cccuccgucucugccgcccc

SEQ ID NO: 777647 - RNA, 22 nt, Human
cccuccgucucugccgccccuc

SEQ ID NO: 777648 - RNA, 24 nt, Human
cccugcgcauggaccccgcgggcc

SEQ ID NO: 777649 - RNA, 19 nt, Human
cccugcguagcuacuggau

SEQ ID NO: 777650 - RNA, 18 nt, Human
ccgccccucugcuuggca

SEQ ID NO: 777651 - RNA, 20 nt, Human
ccgugcagacuggcagccgc

SEQ ID NO: 777652 - RNA, 19 nt, Human
ccucccuucauccucuccu

SEQ ID NO: 777653 - RNA, 19 nt, Human
ccuccuggagcuccucccu

SEQ ID NO: 777654 - RNA, 24 nt, Human
ccugcuagggcucuucccucgccu

SEQ ID NO: 777655 - RNA, 23 nt, Human
ccugggcucaagcaauccaccca

SEQ ID NO: 777656 - RNA, 22 nt, Human
ccuguaauaacuuccagaugaa

SEQ ID NO: 777657 - RNA, 20 nt, Human
ccuguauugcugggcccagc

SEQ ID NO: 777658 - RNA, 21 nt, Human
cgaggagacugcccagggggc

SEQ ID NO: 777659 - RNA, 24 nt, Human
cgguuuuuuucagacaccagcagg

SEQ ID NO: 777660 - RNA, 20 nt, Human
cuaaaagaacacguuugaaa

SEQ ID NO: 777661 - RNA, 18 nt, Human
cuaaccccaauagcaaca

SEQ ID NO: 777662 - RNA, 21 nt, Human
cucaagcaauccacccaucuc

SEQ ID NO: 777663 - RNA, 25 nt, Human
cucagcccagccuccacccugcgua

SEQ ID NO: 777664 - RNA, 24 nt, Human
cuccagggauuccagggaaagagc

SEQ ID NO: 777665 - RNA, 21 nt, Human
cucccgggcuagaucaccggc

SEQ ID NO: 777666 - RNA, 20 nt, Human
cuccgucucugccgccccuc

SEQ ID NO: 777667 - RNA, 19 nt, Human
cuggucuugaacuccuggg

SEQ ID NO: 777668 - RNA, 19 nt, Human
cuucacaauugcauaccua

SEQ ID NO: 777669 - RNA, 25 nt, Human
gaaagagcauuaaaaagcauaaaga

SEQ ID NO: 777670 - RNA, 20 nt, Human
gaagaaagagaagucagagg

SEQ ID NO: 777671 - RNA, 20 nt, Human
gaagaacuugggcugggggc

SEQ ID NO: 777672 - RNA, 20 nt, Human
gaauauuuucugcuggugcc

SEQ ID NO: 777673 - RNA, 20 nt, Human
gaugaggggaauuauggaag

SEQ ID NO: 777674 - RNA, 23 nt, Human
gaugaggggaauuauggaaggga

SEQ ID NO: 777675 - RNA, 18 nt, Human
gauuacagaugugaggca

SEQ ID NO: 777676 - RNA, 18 nt, Human
gcccagccuccacccugc

SEQ ID NO: 777677 - RNA, 22 nt, Human
gcccugcgcauggaccccgcgg

SEQ ID NO: 777678 - RNA, 21 nt, Human
gcccugggcccgcugucucgc

SEQ ID NO: 777679 - RNA, 23 nt, Human
gcccuguaauaacuuccagauga

SEQ ID NO: 777680 - RNA, 22 nt, Human
gcucaagcaauccacccaucuc

SEQ ID NO: 777681 - RNA, 18 nt, Human
ggaaaggagaaaggaagg

SEQ ID NO: 777682 - RNA, 18 nt, Human
ggccgcaucggaagaugg

SEQ ID NO: 777683 - RNA, 20 nt, Human
ggccuucuaaccccaauagc

SEQ ID NO: 777684 - RNA, 19 nt, Human
ggcucaagcaauccaccca

SEQ ID NO: 777685 - RNA, 18 nt, Human
ggcuggucuugaacuccu

SEQ ID NO: 777686 - RNA, 22 nt, Human
gggucucgcuguguugcccagg

SEQ ID NO: 777687 - RNA, 22 nt, Human
gucucagaguuugcucuugauu

SEQ ID NO: 777688 - RNA, 24 nt, Human
uaaaagaacacguuugaaagagca

SEQ ID NO: 777689 - RNA, 20 nt, Human
uaaagaaagcagaugccuuc

SEQ ID NO: 777690 - RNA, 21 nt, Human
uaagaagggcaacucucagug

SEQ ID NO: 777691 - RNA, 20 nt, Human
uaagaugggcucccgggcua

SEQ ID NO: 777692 - RNA, 18 nt, Human
uacuaagugccccggaga

SEQ ID NO: 777693 - RNA, 26 nt, Human
uagggcucuucccucgccuccuggag

SEQ ID NO: 777694 - RNA, 22 nt, Human
uauuuuuuaagagauggggucu

SEQ ID NO: 777695 - RNA, 18 nt, Human
ucacgccuuccuuuuuuu

SEQ ID NO: 777696 - RNA, 21 nt, Human
ucagacaccagcaggugaacc

SEQ ID NO: 777697 - RNA, 21 nt, Human
uccacccaucucagccuccca

SEQ ID NO: 777698 - RNA, 31 nt, Human
ucccaaagaggcugccccuccgucucugccc

SEQ ID NO: 777699 - RNA, 18 nt, Human
ucccaaaguguugggauu

SEQ ID NO: 777700 - RNA, 23 nt, Human
ucccaaaguguugggauuacaga

SEQ ID NO: 777701 - RNA, 20 nt, Human
ucccaaauuacuaaaagcca

SEQ ID NO: 777702 - RNA, 22 nt, Human
ucccuucauccucuccuguauu

SEQ ID NO: 777703 - RNA, 20 nt, Human
ucccuugaccacucuucuag

SEQ ID NO: 777704 - RNA, 18 nt, Human
uccuggagcuccucccuu

SEQ ID NO: 777705 - RNA, 18 nt, Human
uccugggcucaagcaauc

SEQ ID NO: 777706 - RNA, 19 nt, Human
uccugggcucaagcaaucc

SEQ ID NO: 777707 - RNA, 18 nt, Human
uccugucgcugcugcccg

SEQ ID NO: 777708 - RNA, 24 nt, Human
ucuauggugacauccuguucuugg

SEQ ID NO: 777709 - RNA, 19 nt, Human
ucucgcuguguugcccagg

SEQ ID NO: 777710 - RNA, 23 nt, Human
ucucgcuguguugcccaggcugg

SEQ ID NO: 777711 - RNA, 24 nt, Human
ucucgcuguguugcccaggcuggu

SEQ ID NO: 777712 - RNA, 26 nt, Human
ucucgcuguguugcccaggcuggucu

SEQ ID NO: 777713 - RNA, 27 nt, Human
ucucgcuguguugcccaggcuggucuu

SEQ ID NO: 777714 - RNA, 19 nt, Human
ucuugaacuccugggcuca

SEQ ID NO: 777715 - RNA, 23 nt, Human
ucuugaacuccugggcucaagca

SEQ ID NO: 777716 - RNA, 18 nt, Human
ucuuggacucugauacug

SEQ ID NO: 777717 - RNA, 24 nt, Human
ugaacuccugggcucaagcaaucc

SEQ ID NO: 777718 - RNA, 19 nt, Human
ugaggcaccgcaccuggcc

SEQ ID NO: 777719 - RNA, 24 nt, Human
ugcccaggcuggucuugaacuccu

SEQ ID NO: 777720 - RNA, 28 nt, Human
ugcccaggcuggucuugaacuccugggc

SEQ ID NO: 777721 - RNA, 21 nt, Human
uggaagaacuugggcuggggg

SEQ ID NO: 777722 - RNA, 19 nt, Human
uggaagggagagggguucc

SEQ ID NO: 777723 - RNA, 22 nt, Human
uggaagggagagggguuccuca

SEQ ID NO: 777724 - RNA, 22 nt, Human
uggagugggcgguggaugaggg

SEQ ID NO: 777725 - RNA, 19 nt, Human
uggauugugccagucucag

SEQ ID NO: 777726 - RNA, 21 nt, Human
uggcagccgcgggccggcucg

SEQ ID NO: 777727 - RNA, 18 nt, Human
ugggauuacagaugugag

SEQ ID NO: 777728 - RNA, 18 nt, Human
ugggauuacagaugugag

SEQ ID NO: 777729 - RNA, 19 nt, Human
ugggauuacagaugugagg

SEQ ID NO: 777730 - RNA, 20 nt, Human
ugggauuacagaugugaggc

SEQ ID NO: 777731 - RNA, 21 nt, Human
ugggauuacagaugugaggca

SEQ ID NO: 777732 - RNA, 23 nt, Human
ugggauuacagaugugaggcacc

SEQ ID NO: 777733 - RNA, 24 nt, Human
ugggauuacagaugugaggcaccg

SEQ ID NO: 777734 - RNA, 25 nt, Human
ugggggcccugcgcaugggggacac

SEQ ID NO: 777735 - RNA, 24 nt, Human
uggggucucgcuguguugcccagg

SEQ ID NO: 777736 - RNA, 21 nt, Human
uguggaagaagaguaaagcug

SEQ ID NO: 777737 - RNA, 24 nt, Human
uguguugcccaggcuggucuugaa

SEQ ID NO: 777738 - RNA, 18 nt, Human
uguugcccaggcuggucu

SEQ ID NO: 777739 - RNA, 18 nt, Human
uguugcccaggcuggucu

SEQ ID NO: 777740 - RNA, 18 nt, Human
uguugcccaggcuggucu

SEQ ID NO: 777741 - RNA, 22 nt, Human
uguugcccaggcuggucuugaa

SEQ ID NO: 777742 - RNA, 22 nt, Human
uguugggauuacagaugugagg

SEQ ID NO: 777743 - RNA, 18 nt, Human
uugaccacucuucuagca

SEQ ID NO: 777744 - RNA, 24 nt, Human
uugugccagucucagaguuugcuc

SEQ ID NO: 777745 - RNA, 20 nt, Human
uuuaagagauggggucucgc

SEQ ID NO: 777746 - RNA, 21 nt, Human
uuugguagagcgaaaaacaag

SEQ ID NO: 777747 - RNA, 19 nt, Human
aagccaccccacccccccc

SEQ ID NO: 777748 - RNA, 21 nt, Human
aagccaccccaccccccccag

SEQ ID NO: 777749 - RNA, 18 nt, Human
aagcccaagaaagagcaa

SEQ ID NO: 777750 - RNA, 22 nt, Human
aagcccaagaaagagcaagaga

SEQ ID NO: 777751 - RNA, 21 nt, Human
acccuucuccccccuccaccu

SEQ ID NO: 777752 - RNA, 19 nt, Human
accuccccaagccccugcc

SEQ ID NO: 777753 - RNA, 25 nt, Human
acgccaaaugcccugcggagggaau

SEQ ID NO: 777754 - RNA, 26 nt, Human
agaaagagcaagagacaaaggguagu

SEQ ID NO: 777755 - RNA, 24 nt, Human
agacaaaggguagugggagcaggg

SEQ ID NO: 777756 - RNA, 23 nt, Human
agagaggggacccuucucccccc

SEQ ID NO: 777757 - RNA, 22 nt, Human
agcaaagaucuuggccugcagg

SEQ ID NO: 777758 - RNA, 18 nt, Human
agcaggggguggggcggg

SEQ ID NO: 777759 - RNA, 19 nt, Human
agcaggggguggggcgggg

SEQ ID NO: 777760 - RNA, 19 nt, Human
aggacacgguucuguccca

SEQ ID NO: 777761 - RNA, 23 nt, Human
aggagaccgauaaaaaauagaac

SEQ ID NO: 777762 - RNA, 27 nt, Human
aggggacccuucuccccccuccaccuc

SEQ ID NO: 777763 - RNA, 22 nt, Human
augggcagugggugggggccag

SEQ ID NO: 777764 - RNA, 26 nt, Human
augggggaugggcagugggugggggc

SEQ ID NO: 777765 - RNA, 19 nt, Human
caagagacaaaggguagug

SEQ ID NO: 777766 - RNA, 25 nt, Human
cacgguucugucccaauucucgguu

SEQ ID NO: 777767 - RNA, 22 nt, Human
cagcacagacacacccugaccc

SEQ ID NO: 777768 - RNA, 23 nt, Human
cagccauacauagacuuuuccua

SEQ ID NO: 777769 - RNA, 22 nt, Human
cauccagacaacaaugggggau

SEQ ID NO: 777770 - RNA, 19 nt, Human
ccaagccccugccccaggu

SEQ ID NO: 777771 - RNA, 20 nt, Human
cccaagaaagagcaagagac

SEQ ID NO: 777772 - RNA, 21 nt, Human
cccaagaaagagcaagagaca

SEQ ID NO: 777773 - RNA, 23 nt, Human
cccccagcucucugaagccaccc

SEQ ID NO: 777774 - RNA, 21 nt, Human
ccccccuccaccuccccaagc

SEQ ID NO: 777775 - RNA, 23 nt, Human
ccccccuccaccuccccaagccc

SEQ ID NO: 777776 - RNA, 22 nt, Human
ccccucacaagcuggggcgggg

SEQ ID NO: 777777 - RNA, 22 nt, Human
ccccugccccagguauguacaa

SEQ ID NO: 777778 - RNA, 22 nt, Human
cccggcgauggagcccaggugu

SEQ ID NO: 777779 - RNA, 21 nt, Human
cccuccaccuccccaagcccc

SEQ ID NO: 777780 - RNA, 23 nt, Human
cccuucuccccccuccaccuccc

SEQ ID NO: 777781 - RNA, 19 nt, Human
ccucacaagcuggggcggg

SEQ ID NO: 777782 - RNA, 27 nt, Human
ccugacccaugacccccuuuccccggc

SEQ ID NO: 777783 - RNA, 22 nt, Human
ccugcaggggggacuugggggg

SEQ ID NO: 777784 - RNA, 18 nt, Human
cuccaccuccccaagccc

SEQ ID NO: 777785 - RNA, 19 nt, Human
cuccccaagccccugcccc

SEQ ID NO: 777786 - RNA, 22 nt, Human
cucugaagccaccccacccccc

SEQ ID NO: 777787 - RNA, 22 nt, Human
cugaagccaccccacccccccc

SEQ ID NO: 777788 - RNA, 23 nt, Human
cugaagccaccccacccccccca

SEQ ID NO: 777789 - RNA, 23 nt, Human
gacacgguucugucccaauucuc

SEQ ID NO: 777790 - RNA, 20 nt, Human
gacccaugacccccuuuccc

SEQ ID NO: 777791 - RNA, 19 nt, Human
gacccuucuccccccucca

SEQ ID NO: 777792 - RNA, 18 nt, Human
gagaacggggaggagggg

SEQ ID NO: 777793 - RNA, 19 nt, Human
gagggggcgggggcugugg

SEQ ID NO: 777794 - RNA, 19 nt, Human
gcagcacagacacacccug

SEQ ID NO: 777795 - RNA, 18 nt, Human
gccccccucacaagcugg

SEQ ID NO: 777796 - RNA, 19 nt, Human
gcgagaacggggaggaggg

SEQ ID NO: 777797 - RNA, 22 nt, Human
ggaauggggagggaguggaggg

SEQ ID NO: 777798 - RNA, 23 nt, Human
ggacccuucuccccccuccaccu

SEQ ID NO: 777799 - RNA, 25 nt, Human
ggacccuucuccccccuccaccucc

SEQ ID NO: 777800 - RNA, 20 nt, Human
ggagggggcgggggcugugg

SEQ ID NO: 777801 - RNA, 20 nt, Human
ggcuguggagggggggucgg

SEQ ID NO: 777802 - RNA, 24 nt, Human
ggcuugggagagggggggagucgg

SEQ ID NO: 777803 - RNA, 25 nt, Human
gggaaggggucccccagcucucuga

SEQ ID NO: 777804 - RNA, 22 nt, Human
gggacuuggggggaaggggucc

SEQ ID NO: 777805 - RNA, 23 nt, Human
gggagcaggggguggggcggggg

SEQ ID NO: 777806 - RNA, 22 nt, Human
gggagggaguggagggggcuug

SEQ ID NO: 777807 - RNA, 24 nt, Human
gggagggaguggagggggcuuggg

SEQ ID NO: 777808 - RNA, 18 nt, Human
gggaugggcagugggugg

SEQ ID NO: 777809 - RNA, 22 nt, Human
gggcgagaacggggaggagggg

SEQ ID NO: 777810 - RNA, 23 nt, Human
gggcgggggcuguggcuguggaa

SEQ ID NO: 777811 - RNA, 22 nt, Human
gggcuugggagagggggggagu

SEQ ID NO: 777812 - RNA, 19 nt, Human
ggggaugggcagugggugg

SEQ ID NO: 777813 - RNA, 22 nt, Human
ggggaugggcaguggguggggg

SEQ ID NO: 777814 - RNA, 21 nt, Human
ggggcgggggcuguggcugug

SEQ ID NO: 777815 - RNA, 20 nt, Human
gggggaugggcagugggugg

SEQ ID NO: 777816 - RNA, 23 nt, Human
gggggcgagaacggggaggaggg

SEQ ID NO: 777817 - RNA, 19 nt, Human
gggggcuguggcuguggag

SEQ ID NO: 777818 - RNA, 23 nt, Human
ggggggaaggggucccccagcuc

SEQ ID NO: 777819 - RNA, 20 nt, Human
gggggucggggcaaggggag

SEQ ID NO: 777820 - RNA, 19 nt, Human
ggguagugggagcaggggg

SEQ ID NO: 777821 - RNA, 19 nt, Human
gguuguguguacacagugu

SEQ ID NO: 777822 - RNA, 23 nt, Human
guagugggagcaggggguggggc

SEQ ID NO: 777823 - RNA, 23 nt, Human
uaaaaaauagaaccacauccaga

SEQ ID NO: 777824 - RNA, 23 nt, Human
uagaaaaggagugggaggggcag

SEQ ID NO: 777825 - RNA, 22 nt, Human
uagacauuuauacauauauaua

SEQ ID NO: 777826 - RNA, 25 nt, Human
ucgccguagaaaaggagugggaggg

SEQ ID NO: 777827 - RNA, 18 nt, Human
ugaagccaccccaccccc

SEQ ID NO: 777828 - RNA, 22 nt, Human
ugaagccaccccacccccccca

SEQ ID NO: 777829 - RNA, 22 nt, Human
ugacccaugacccccuuucccc

SEQ ID NO: 777830 - RNA, 23 nt, Human
ugcccuggagggggcagcacaga

SEQ ID NO: 777831 - RNA, 24 nt, Human
uggagggggcuugggagagggggg

SEQ ID NO: 777832 - RNA, 20 nt, Human
uggccugcaggggggacuug

SEQ ID NO: 777833 - RNA, 22 nt, Human
ugggagcaggggguggggcggg

SEQ ID NO: 777834 - RNA, 21 nt, Human
ugggcagugggugggggccag

SEQ ID NO: 777835 - RNA, 20 nt, Human
uggggagggaguggaggggg

SEQ ID NO: 777836 - RNA, 22 nt, Human
uggggagggaguggagggggcu

SEQ ID NO: 777837 - RNA, 24 nt, Human
ugggggaugggcaguggguggggg

SEQ ID NO: 777838 - RNA, 22 nt, Human
uguggcuguggagggggggucg

SEQ ID NO: 777839 - RNA, 18 nt, Human
uguguguacacaguguau

SEQ ID NO: 777840 - RNA, 24 nt, Human
uucauggaggaggcgccccccucu

SEQ ID NO: 777841 - RNA, 24 nt, Human
uugggagagggggggagucggacu

SEQ ID NO: 777842 - RNA, 21 nt, Human
aaaaaaaauugaaccuucagu

SEQ ID NO: 777843 - RNA, 21 nt, Human
aaaaaaacuuucuugugguac

SEQ ID NO: 777844 - RNA, 21 nt, Human
aaaaaacuuucuugugguacu

SEQ ID NO: 777845 - RNA, 20 nt, Human
aaaaacauacuuucuuggcc

SEQ ID NO: 777846 - RNA, 22 nt, Human
aaaaagucuccuugcugccuuu

SEQ ID NO: 777847 - RNA, 19 nt, Human
aaaaauacaaacaugauua

SEQ ID NO: 777848 - RNA, 23 nt, Human
aaaacaaacaaacaaaaaaacca

SEQ ID NO: 777849 - RNA, 23 nt, Human
aaaacaaacuguuuuaaacaaaa

SEQ ID NO: 777850 - RNA, 22 nt, Human
aaaaccaaccaaacaaaaaaac

SEQ ID NO: 777851 - RNA, 21 nt, Human
aaacaaaaaaaccaaccaaac

SEQ ID NO: 777852 - RNA, 22 nt, Human
aaacaaacaaaaaaaccaacca

SEQ ID NO: 777853 - RNA, 21 nt, Human
aaacaaacaaacaaaaaaacc

SEQ ID NO: 777854 - RNA, 21 nt, Human
aaacaggcacacaaaaugguc

SEQ ID NO: 777855 - RNA, 26 nt, Human
aaacaugauuauauauauauacacac

SEQ ID NO: 777856 - RNA, 26 nt, Human
aaauaaacacaauaaagaaggaaugu

SEQ ID NO: 777857 - RNA, 23 nt, Human
aacaaaaaaaccaaccaaacaaa

SEQ ID NO: 777858 - RNA, 23 nt, Human
aacaaacaaaaaaaccaaccaaa

SEQ ID NO: 777859 - RNA, 20 nt, Human
aacaugaugaaaccccgccu

SEQ ID NO: 777860 - RNA, 19 nt, Human
aaccuaaagccauguagac

SEQ ID NO: 777861 - RNA, 24 nt, Human
aacuugggcaacagggagagacuc

SEQ ID NO: 777862 - RNA, 21 nt, Human
aagaaaaaaacaaacaaacaa

SEQ ID NO: 777863 - RNA, 24 nt, Human
aagcgaaaaugcgaaacagcuuuc

SEQ ID NO: 777864 - RNA, 21 nt, Human
acaaaaacccuaaaaugggca

SEQ ID NO: 777865 - RNA, 25 nt, Human
acaauaaagaaggaauguucccaga

SEQ ID NO: 777866 - RNA, 23 nt, Human
acauccccaccccaccucuaaaa

SEQ ID NO: 777867 - RNA, 24 nt, Human
acauccccaccccaccucuaaaac

SEQ ID NO: 777868 - RNA, 19 nt, Human
accgcuugagaaagcauuc

SEQ ID NO: 777869 - RNA, 24 nt, Human
accggggagguggaggcugcagug

SEQ ID NO: 777870 - RNA, 18 nt, Human
accugaaaacaacgaaaa

SEQ ID NO: 777871 - RNA, 19 nt, Human
acgaaaaaaaggcucccau

SEQ ID NO: 777872 - RNA, 19 nt, Human
acucaggcuuaagcacauc

SEQ ID NO: 777873 - RNA, 22 nt, Human
acuuucuuggccgggcgcagug

SEQ ID NO: 777874 - RNA, 22 nt, Human
agaaaaaaacaaacaaacaaaa

SEQ ID NO: 777875 - RNA, 24 nt, Human
agaaaaaaacaaacaaacaaaaaa

SEQ ID NO: 777876 - RNA, 27 nt, Human
agaaaaagaggcauaggacuuaacaaa

SEQ ID NO: 777877 - RNA, 23 nt, Human
agaaacaggcacacaaaaugguc

SEQ ID NO: 777878 - RNA, 22 nt, Human
agaaucgcuggaaccggggagg

SEQ ID NO: 777879 - RNA, 24 nt, Human
agacggaucaugagaucaggaguu

SEQ ID NO: 777880 - RNA, 18 nt, Human
agaucaggaguucgagac

SEQ ID NO: 777881 - RNA, 24 nt, Human
agccuggccaacaugaugaaaccc

SEQ ID NO: 777882 - RNA, 21 nt, Human
aggaaaaaaauacaaacauga

SEQ ID NO: 777883 - RNA, 24 nt, Human
aggcagacggaucaugagaucagg

SEQ ID NO: 777884 - RNA, 22 nt, Human
aggcaggagaaucgcuggaacc

SEQ ID NO: 777885 - RNA, 23 nt, Human
aggcaggagaaucgcuggaaccg

SEQ ID NO: 777886 - RNA, 20 nt, Human
aggccgaggcagacggauca

SEQ ID NO: 777887 - RNA, 25 nt, Human
aggccgaggcagacggaucaugaga

SEQ ID NO: 777888 - RNA, 20 nt, Human
aggcugaggcaggagaaucg

SEQ ID NO: 777889 - RNA, 22 nt, Human
aggcugaggcaggagaaucgcu

SEQ ID NO: 777890 - RNA, 19 nt, Human
agguggaggcugcagugag

SEQ ID NO: 777891 - RNA, 24 nt, Human
agguggaggcugcagugagccaag

SEQ ID NO: 777892 - RNA, 24 nt, Human
aggugugguggcgggcgccuguaa

SEQ ID NO: 777893 - RNA, 23 nt, Human
aguggcucaugccuguaauccca

SEQ ID NO: 777894 - RNA, 24 nt, Human
aguggcucaugccuguaaucccag

SEQ ID NO: 777895 - RNA, 22 nt, Human
auagguaauacaaaugcacuua

SEQ ID NO: 777896 - RNA, 21 nt, Human
augaaaccccgccucuacuaa

SEQ ID NO: 777897 - RNA, 19 nt, Human
augccuguaaucccagcac

SEQ ID NO: 777898 - RNA, 20 nt, Human
auguacaccugauuaaaaug

SEQ ID NO: 777899 - RNA, 23 nt, Human
auugcacuccaacuugggcaaca

SEQ ID NO: 777900 - RNA, 24 nt, Human
auugcacuccaacuugggcaacag

SEQ ID NO: 777901 - RNA, 21 nt, Human
caaaaacccuaaaaugggcac

SEQ ID NO: 777902 - RNA, 23 nt, Human
caaaaagcgaaaaugcgaaacag

SEQ ID NO: 777903 - RNA, 22 nt, Human
caaaaugugagauauaagcaua

SEQ ID NO: 777904 - RNA, 23 nt, Human
caaacaaacaaaaaaaccaacca

SEQ ID NO: 777905 - RNA, 23 nt, Human
cacaaaaacccuaaaaugggcac

SEQ ID NO: 777906 - RNA, 24 nt, Human
cacaaaaacccuaaaaugggcacc

SEQ ID NO: 777907 - RNA, 25 nt, Human
cacaaauauaaccaaaaugugagau

SEQ ID NO: 777908 - RNA, 25 nt, Human
cacaucgucugccuucagcugaugc

SEQ ID NO: 777909 - RNA, 23 nt, Human
caccuaguaaccaaagauuucau

SEQ ID NO: 777910 - RNA, 19 nt, Human
cagaaucccaaacucagga

SEQ ID NO: 777911 - RNA, 18 nt, Human
cagcacucugggaggccg

SEQ ID NO: 777912 - RNA, 24 nt, Human
cagcacucugggaggccgaggcag

SEQ ID NO: 777913 - RNA, 24 nt, Human
cagcuauucaagaggcugaggcag

SEQ ID NO: 777914 - RNA, 19 nt, Human
cagggagagacucagucuc

SEQ ID NO: 777915 - RNA, 21 nt, Human
cagggccaggaucaaguuggu

SEQ ID NO: 777916 - RNA, 21 nt, Human
cauccccaccccaccucuaaa

SEQ ID NO: 777917 - RNA, 19 nt, Human
caugaagacacucagcaug

SEQ ID NO: 777918 - RNA, 20 nt, Human
caugccuguaaucccagcac

SEQ ID NO: 777919 - RNA, 21 nt, Human
cauguagaccuuuuauacagu

SEQ ID NO: 777920 - RNA, 23 nt, Human
caugugcuacaguacaauccggg

SEQ ID NO: 777921 - RNA, 25 nt, Human
ccugcagccaaugacuccucagggc

SEQ ID NO: 777922 - RNA, 23 nt, Human
ccuggccaacaugaugaaacccc

SEQ ID NO: 777923 - RNA, 24 nt, Human
ccuggccaacaugaugaaaccccg

SEQ ID NO: 777924 - RNA, 20 nt, Human
ccuguaaucccagcacucug

SEQ ID NO: 777925 - RNA, 22 nt, Human
ccuguaaucccagcacucuggg

SEQ ID NO: 777926 - RNA, 21 nt, Human
cgagaccagccuggccaacau

SEQ ID NO: 777927 - RNA, 24 nt, Human
cgaggcagacggaucaugagauca

SEQ ID NO: 777928 - RNA, 22 nt, Human
cgccuguaaucccagcuauuca

SEQ ID NO: 777929 - RNA, 22 nt, Human
cggaucaugagaucaggaguuc

SEQ ID NO: 777930 - RNA, 23 nt, Human
cggaucaugagaucaggaguucg

SEQ ID NO: 777931 - RNA, 23 nt, Human
cucaugccuguaaucccagcacu

SEQ ID NO: 777932 - RNA, 22 nt, Human
cugcagugagccaagauugcac

SEQ ID NO: 777933 - RNA, 24 nt, Human
cuuggccgggcgcaguggcucaug

SEQ ID NO: 777934 - RNA, 22 nt, Human
gaaaaaaacaaacaaacaaaaa

SEQ ID NO: 777935 - RNA, 18 nt, Human
gaaacuaguaagaacuug

SEQ ID NO: 777936 - RNA, 19 nt, Human
gaaacuaguaagaacuuga

SEQ ID NO: 777937 - RNA, 18 nt, Human
gagaagcaagaaacuugg

SEQ ID NO: 777938 - RNA, 23 nt, Human
gaggcugcagugagccaagauug

SEQ ID NO: 777939 - RNA, 19 nt, Human
gagggcaggaacgccuggc

SEQ ID NO: 777940 - RNA, 21 nt, Human
gagguggaggcugcagugagc

SEQ ID NO: 777941 - RNA, 22 nt, Human
gaucaugagaucaggaguucga

SEQ ID NO: 777942 - RNA, 24 nt, Human
gaucaugagaucaggaguucgaga

SEQ ID NO: 777943 - RNA, 23 nt, Human
gauugcacuccaacuugggcaac

SEQ ID NO: 777944 - RNA, 24 nt, Human
gauugcacuccaacuugggcaaca

SEQ ID NO: 777945 - RNA, 22 nt, Human
gcaucgucagccauuuccaaaa

SEQ ID NO: 777946 - RNA, 24 nt, Human
gccaacaugaugaaaccccgccuc

SEQ ID NO: 777947 - RNA, 20 nt, Human
ggagaagcaagaaacuuggg

SEQ ID NO: 777948 - RNA, 22 nt, Human
ggaggcugcagugagccaagau

SEQ ID NO: 777949 - RNA, 24 nt, Human
ggaggcugcagugagccaagauug

SEQ ID NO: 777950 - RNA, 24 nt, Human
ggccgaggcagacggaucaugaga

SEQ ID NO: 777951 - RNA, 24 nt, Human
ggccuucuggauaacaggaaagga

SEQ ID NO: 777952 - RNA, 24 nt, Human
gggcgcaguggcucaugccuguaa

SEQ ID NO: 777953 - RNA, 24 nt, Human
gguggcgggcgccuguaaucccag

SEQ ID NO: 777954 - RNA, 24 nt, Human
guaauuucugagagucagacagaa

SEQ ID NO: 777955 - RNA, 21 nt, Human
guacauauaacuuuuccucgu

SEQ ID NO: 777956 - RNA, 19 nt, Human
gucagccauuuccaaaagu

SEQ ID NO: 777957 - RNA, 23 nt, Human
guggcgggcgccuguaaucccag

SEQ ID NO: 777958 - RNA, 22 nt, Human
guuaaaagucuaaaaacuuuca

SEQ ID NO: 777959 - RNA, 22 nt, Human
uaaaacaaacuguuuuaaacaa

SEQ ID NO: 777960 - RNA, 21 nt, Human
uaaaaugagaauacaaaggcc

SEQ ID NO: 777961 - RNA, 22 nt, Human
uaaaaugagaauacaaaggcca

SEQ ID NO: 777962 - RNA, 21 nt, Human
uaagaaguugauucaagcagu

SEQ ID NO: 777963 - RNA, 27 nt, Human
uaauacaaaugcacuuacacacaccuc

SEQ ID NO: 777964 - RNA, 25 nt, Human
uaauuucugagagucagacagaaca

SEQ ID NO: 777965 - RNA, 23 nt, Human
uacaguaucacaaugaaauguga

SEQ ID NO: 777966 - RNA, 25 nt, Human
uacaugaaacaugaagacacucagc

SEQ ID NO: 777967 - RNA, 21 nt, Human
uagcacaaaaacccuaaaaug

SEQ ID NO: 777968 - RNA, 22 nt, Human
uauauuagaaacaugaugagca

SEQ ID NO: 777969 - RNA, 22 nt, Human
uauauuauuguaucuuuuaaaa

SEQ ID NO: 777970 - RNA, 24 nt, Human
uaugagaagaauacuuuggagaag

SEQ ID NO: 777971 - RNA, 24 nt, Human
uauugaccuugguuuucucuaagc

SEQ ID NO: 777972 - RNA, 19 nt, Human
ucaaaaugacauaaaagaa

SEQ ID NO: 777973 - RNA, 24 nt, Human
ucagacagaacaauaauaugaacc

SEQ ID NO: 777974 - RNA, 26 nt, Human
ucaggaaaaaaauacaaacaugauua

SEQ ID NO: 777975 - RNA, 18 nt, Human
ucauaaggaguuagauca

SEQ ID NO: 777976 - RNA, 20 nt, Human
ucaugagaucaggaguucga

SEQ ID NO: 777977 - RNA, 24 nt, Human
ucaugagaucaggaguucgagacc

SEQ ID NO: 777978 - RNA, 22 nt, Human
ucaugccuguaaucccagcacu

SEQ ID NO: 777979 - RNA, 22 nt, Human
uccaaaaguugugcuguaaaag

SEQ ID NO: 777980 - RNA, 18 nt, Human
ucccagaccaugcuauuc

SEQ ID NO: 777981 - RNA, 22 nt, Human
ucguuauauacauccccacccc

SEQ ID NO: 777982 - RNA, 18 nt, Human
ucuaggccuuguccagga

SEQ ID NO: 777983 - RNA, 21 nt, Human
ucucuaagccaguaaggaaau

SEQ ID NO: 777984 - RNA, 19 nt, Human
ucugcguacagaaaauggg

SEQ ID NO: 777985 - RNA, 21 nt, Human
ucuuugauuuugcuuuuuauu

SEQ ID NO: 777986 - RNA, 18 nt, Human
ugaaaacaacgaaaaaaa

SEQ ID NO: 777987 - RNA, 21 nt, Human
ugaaaacaacgaaaaaaaggc

SEQ ID NO: 777988 - RNA, 24 nt, Human
ugaaaacaacgaaaaaaaggcucc

SEQ ID NO: 777989 - RNA, 23 nt, Human
ugaagacacucagcaugagaaaa

SEQ ID NO: 777990 - RNA, 22 nt, Human
ugaccuugguuuucucuaagcc

SEQ ID NO: 777991 - RNA, 18 nt, Human
ugagaagaauacuuugga

SEQ ID NO: 777992 - RNA, 19 nt, Human
ugagaagaauacuuuggag

SEQ ID NO: 777993 - RNA, 22 nt, Human
ugagauauaagcauaauucuuu

SEQ ID NO: 777994 - RNA, 19 nt, Human
ugaggcaggagaaucgcug

SEQ ID NO: 777995 - RNA, 24 nt, Human
ugaggcaggagaaucgcuggaacc

SEQ ID NO: 777996 - RNA, 26 nt, Human
ugaugagcagcucguucucuaggccg

SEQ ID NO: 777997 - RNA, 22 nt, Human
ugauuuugcuuuuuauucaaug

SEQ ID NO: 777998 - RNA, 23 nt, Human
ugcaacaagacacuggcgugaag

SEQ ID NO: 777999 - RNA, 22 nt, Human
ugcacuccaacuugggcaacag

SEQ ID NO: 778000 - RNA, 22 nt, Human
ugcacuccaacuugggcaacag

SEQ ID NO: 778001 - RNA, 19 nt, Human
ugcaucgucagccauuucc

SEQ ID NO: 778002 - RNA, 23 nt, Human
ugccuguaaucccagcacucugg

SEQ ID NO: 778003 - RNA, 23 nt, Human
ugccuguaaucccagcacucugg

SEQ ID NO: 778004 - RNA, 24 nt, Human
ugcgaaacagcuuuccugggacaa

SEQ ID NO: 778005 - RNA, 24 nt, Human
ugcuagucugugcagcgccuuccg

SEQ ID NO: 778006 - RNA, 22 nt, Human
uggaaaggauaaauuuaaagug

SEQ ID NO: 778007 - RNA, 24 nt, Human
uggccgggcgcaguggcucaugcc

SEQ ID NO: 778008 - RNA, 22 nt, Human
uggcucaugccuguaaucccag

SEQ ID NO: 778009 - RNA, 24 nt, Human
uggcucaugccuguaaucccagca

SEQ ID NO: 778010 - RNA, 20 nt, Human
ugggaggccgaggcagacgg

SEQ ID NO: 778011 - RNA, 24 nt, Human
ugggaggccgaggcagacggauca

SEQ ID NO: 778012 - RNA, 24 nt, Human
ugguggcgggcgccuguaauccca

SEQ ID NO: 778013 - RNA, 23 nt, Human
uguaaaagaaaguauauuuuaca

SEQ ID NO: 778014 - RNA, 21 nt, Human
ugugaaaaagucuccuugcug

SEQ ID NO: 778015 - RNA, 19 nt, Human
ugugguggcgggcgccugu

SEQ ID NO: 778016 - RNA, 25 nt, Human
uucaggaaaaaaauacaaacaugau

SEQ ID NO: 778017 - RNA, 23 nt, Human
uugauucaagcaguuauuaugaa

SEQ ID NO: 778018 - RNA, 24 nt, Human
uugggauguggaacuuugguuaca

SEQ ID NO: 778019 - RNA, 18 nt, Human
uuugguuacagcugaugg

SEQ ID NO: 778020 - RNA, 23 nt, Human
aaaauacgaaaacaaaauuagcc

SEQ ID NO: 778021 - RNA, 23 nt, Human
aaaauagcauuaucaaaauggca

SEQ ID NO: 778022 - RNA, 18 nt, Human
aaagcagcacaguguaac

SEQ ID NO: 778023 - RNA, 19 nt, Human
aaaggacaagaagcuacau

SEQ ID NO: 778024 - RNA, 19 nt, Human
aacauggugaaaccccguc

SEQ ID NO: 778025 - RNA, 20 nt, Human
aacauggugaaaccccgucu

SEQ ID NO: 778026 - RNA, 21 nt, Human
aacauggugaaaccccgucuc

SEQ ID NO: 778027 - RNA, 21 nt, Human
aacuaacuucuagugaaccua

SEQ ID NO: 778028 - RNA, 21 nt, Human
aagagaaagacagagaaagga

SEQ ID NO: 778029 - RNA, 24 nt, Human
aauaaaugcugaugcuccacacaa

SEQ ID NO: 778030 - RNA, 18 nt, Human
acacagugauaacuacuc

SEQ ID NO: 778031 - RNA, 25 nt, Human
acagaacuuuguuguuaacugugga

SEQ ID NO: 778032 - RNA, 21 nt, Human
acagagcgagacucugucuca

SEQ ID NO: 778033 - RNA, 23 nt, Human
acagagcgagacucugucucaaa

SEQ ID NO: 778034 - RNA, 24 nt, Human
acagagcgagacucugucucaaaa

SEQ ID NO: 778035 - RNA, 30 nt, Human
acagguucacugugaaaaaaaggaagggaa

SEQ ID NO: 778036 - RNA, 24 nt, Human
acaguaaaaagaucacuacauaga

SEQ ID NO: 778037 - RNA, 21 nt, Human
acccaaggagaaagcaucagg

SEQ ID NO: 778038 - RNA, 22 nt, Human
accccgucucuacuaaaaauac

SEQ ID NO: 778039 - RNA, 28 nt, Human
acucugucucaaaaaaaaaaaaaaaaaa

SEQ ID NO: 778040 - RNA, 18 nt, Human
acugcacuccaaucuggg

SEQ ID NO: 778041 - RNA, 24 nt, Human
acugcacuccaaucuggguaacag

SEQ ID NO: 778042 - RNA, 23 nt, Human
acuuauuuugcuuaauacaagug

SEQ ID NO: 778043 - RNA, 19 nt, Human
agaggaaaugcuggguuuc

SEQ ID NO: 778044 - RNA, 22 nt, Human
agcggaaaguucauuucucugu

SEQ ID NO: 778045 - RNA, 23 nt, Human
agcucugacaccucacuaccucu

SEQ ID NO: 778046 - RNA, 23 nt, Human
agcuuuugggaggcugaggcggg

SEQ ID NO: 778047 - RNA, 23 nt, Human
aggcauuuaaaaagaacuuaauc

SEQ ID NO: 778048 - RNA, 24 nt, Human
aggcggagcuugcagugagcggag

SEQ ID NO: 778049 - RNA, 24 nt, Human
aggcgggagaguggcgugaacccg

SEQ ID NO: 778050 - RNA, 24 nt, Human
aggcgggcggaucacgaggucagg

SEQ ID NO: 778051 - RNA, 21 nt, Human
aggcugaggcgggcggaucac

SEQ ID NO: 778052 - RNA, 22 nt, Human
aggcugaggcgggcggaucacg

SEQ ID NO: 778053 - RNA, 21 nt, Human
agggagcuuuguguaagugcu

SEQ ID NO: 778054 - RNA, 18 nt, Human
agucccagcuagucggga

SEQ ID NO: 778055 - RNA, 22 nt, Human
aucaacaaaacccagcaccaag

SEQ ID NO: 778056 - RNA, 19 nt, Human
aucccucucauccucuuuc

SEQ ID NO: 778057 - RNA, 21 nt, Human
auccuggccaacauggugaaa

SEQ ID NO: 778058 - RNA, 24 nt, Human
aucgcgccacugcacuccaaucug

SEQ ID NO: 778059 - RNA, 21 nt, Human
augcaaaauuuagcauguaau

SEQ ID NO: 778060 - RNA, 23 nt, Human
augcuggguuucugggugcuggc

SEQ ID NO: 778061 - RNA, 18 nt, Human
auuaaggaacuggcucug

SEQ ID NO: 778062 - RNA, 20 nt, Human
auugcacucuugcuuugggc

SEQ ID NO: 778063 - RNA, 24 nt, Human
auuuagcauguaauuguacugugu

SEQ ID NO: 778064 - RNA, 22 nt, Human
caaaagaaaaagaccguguggc

SEQ ID NO: 778065 - RNA, 18 nt, Human
caaaauggcaaaggcaca

SEQ ID NO: 778066 - RNA, 25 nt, Human
caaagcagcacaguguaacagaggc

SEQ ID NO: 778067 - RNA, 24 nt, Human
caacauggugaaaccccgucucua

SEQ ID NO: 778068 - RNA, 24 nt, Human
caagaccauccuggccaacauggu

SEQ ID NO: 778069 - RNA, 18 nt, Human
cacagcugaccaucccuc

SEQ ID NO: 778070 - RNA, 21 nt, Human
cacaguaguauugggacaaga

SEQ ID NO: 778071 - RNA, 23 nt, Human
cacgccuguaaucccagcuuuug

SEQ ID NO: 778072 - RNA, 23 nt, Human
cacuccaaucuggguaacagagc

SEQ ID NO: 778073 - RNA, 23 nt, Human
cacugcacuccaaucuggguaac

SEQ ID NO: 778074 - RNA, 24 nt, Human
cacugcacuccaaucuggguaaca

SEQ ID NO: 778075 - RNA, 19 nt, Human
cagcaucaacaaaacccag

SEQ ID NO: 778076 - RNA, 21 nt, Human
cagcaucaacaaaacccagca

SEQ ID NO: 778077 - RNA, 22 nt, Human
cagcaucaacaaaacccagcac

SEQ ID NO: 778078 - RNA, 21 nt, Human
cagcuaaucuaccaggaguac

SEQ ID NO: 778079 - RNA, 21 nt, Human
cagcuuuugggaggcugaggc

SEQ ID NO: 778080 - RNA, 20 nt, Human
ccacugcacuccaaucuggg

SEQ ID NO: 778081 - RNA, 24 nt, Human
ccacugcacuccaaucuggguaac

SEQ ID NO: 778082 - RNA, 18 nt, Human
ccagaggaguaagauaau

SEQ ID NO: 778083 - RNA, 23 nt, Human
ccagcaccaaguguuuugguggc

SEQ ID NO: 778084 - RNA, 20 nt, Human
ccagcaucaacaaaacccag

SEQ ID NO: 778085 - RNA, 24 nt, Human
ccagcaucaacaaaacccagcacc

SEQ ID NO: 778086 - RNA, 24 nt, Human
ccagcuuuugggaggcugaggcgg

SEQ ID NO: 778087 - RNA, 18 nt, Human
ccagggacacagggaaga

SEQ ID NO: 778088 - RNA, 24 nt, Human
ccaucccucucauccucuuucuca

SEQ ID NO: 778089 - RNA, 23 nt, Human
ccccugagggguagugguuucug

SEQ ID NO: 778090 - RNA, 19 nt, Human
ccucucauccucuuucuca

SEQ ID NO: 778091 - RNA, 22 nt, Human
ccuggccaacauggugaaaccc

SEQ ID NO: 778092 - RNA, 23 nt, Human
ccuggccaacauggugaaacccc

SEQ ID NO: 778093 - RNA, 24 nt, Human
ccuggccaacauggugaaaccccg

SEQ ID NO: 778094 - RNA, 21 nt, Human
ccuguaaucccagcuuuuggg

SEQ ID NO: 778095 - RNA, 19 nt, Human
ccuguagucccagcuaguc

SEQ ID NO: 778096 - RNA, 21 nt, Human
ccuguagucccagcuagucgg

SEQ ID NO: 778097 - RNA, 21 nt, Human
cgaaaacaaaauuagccgggc

SEQ ID NO: 778098 - RNA, 22 nt, Human
cgccuguaaucccagcuuuugg

SEQ ID NO: 778099 - RNA, 24 nt, Human
cgccuguagucccagcuagucggg

SEQ ID NO: 778100 - RNA, 21 nt, Human
cuacaaaagaaaaagaccgug

SEQ ID NO: 778101 - RNA, 23 nt, Human
cucaaaaaaaaaaaaaaaaaaaa

SEQ ID NO: 778102 - RNA, 20 nt, Human
cucacgccuguaaucccagc

SEQ ID NO: 778103 - RNA, 20 nt, Human
cucacgccuguaaucccagc

SEQ ID NO: 778104 - RNA, 20 nt, Human
cuccaccuuaaugcuggaac

SEQ ID NO: 778105 - RNA, 19 nt, Human
cucugucucaaaaaaaaaa

SEQ ID NO: 778106 - RNA, 25 nt, Human
cugaggcgggagaguggcgugaacc

SEQ ID NO: 778107 - RNA, 19 nt, Human
cugaugcuuggccgggcgc

SEQ ID NO: 778108 - RNA, 23 nt, Human
cugauuuacucacuuaaagcuuc

SEQ ID NO: 778109 - RNA, 21 nt, Human
cuggguaacagagcgagacuc

SEQ ID NO: 778110 - RNA, 25 nt, Human
cugugaaaaaaaggaagggaggugu

SEQ ID NO: 778111 - RNA, 21 nt, Human
cuguuuaagcaaagcagcaca

SEQ ID NO: 778112 - RNA, 18 nt, Human
cuuaauaaauucuuaguu

SEQ ID NO: 778113 - RNA, 21 nt, Human
cuugcagugagcggagaucgc

SEQ ID NO: 778114 - RNA, 24 nt, Human
cuuggccgggcgcgguggcucacg

SEQ ID NO: 778115 - RNA, 19 nt, Human
cuuuguguaagugcucugc

SEQ ID NO: 778116 - RNA, 21 nt, Human
gagaaaaugcaaaauuuagca

SEQ ID NO: 778117 - RNA, 24 nt, Human
gauggcgggcgccuguagucccag

SEQ ID NO: 778118 - RNA, 20 nt, Human
gcaaagacagcugaggggaa

SEQ ID NO: 778119 - RNA, 24 nt, Human
gcaaagcagcacaguguaacagag

SEQ ID NO: 778120 - RNA, 24 nt, Human
gccaacauggugaaaccccgucuc

SEQ ID NO: 778121 - RNA, 21 nt, Human
gccacugcacuccaaucuggg

SEQ ID NO: 778122 - RNA, 20 nt, Human
gcggagaucgcgccacugca

SEQ ID NO: 778123 - RNA, 23 nt, Human
gcugugcagaaauuuucuuggag

SEQ ID NO: 778124 - RNA, 24 nt, Human
gcuuugggcuaaaaccuugugaag

SEQ ID NO: 778125 - RNA, 25 nt, Human
gcuuuuggcaucuguagaacucuaa

SEQ ID NO: 778126 - RNA, 20 nt, Human
ggaaaggacaagaagcuaca

SEQ ID NO: 778127 - RNA, 23 nt, Human
ggagaucgcgccacugcacucca

SEQ ID NO: 778128 - RNA, 18 nt, Human
ggagcuugcagugagcgg

SEQ ID NO: 778129 - RNA, 24 nt, Human
ggagcuugcagugagcggagaucg

SEQ ID NO: 778130 - RNA, 20 nt, Human
ggaguucuccaccuuaaugc

SEQ ID NO: 778131 - RNA, 23 nt, Human
ggcgcgguggcucacgccuguaa

SEQ ID NO: 778132 - RNA, 18 nt, Human
ggcgugauggcgggcgcc

SEQ ID NO: 778133 - RNA, 22 nt, Human
ggcgugauggcgggcgccugua

SEQ ID NO: 778134 - RNA, 20 nt, Human
gggacaagaagcaaaacauu

SEQ ID NO: 778135 - RNA, 19 nt, Human
gggcagcaccccacucaga

SEQ ID NO: 778136 - RNA, 24 nt, Human
gggcggaucacgaggucaggagau

SEQ ID NO: 778137 - RNA, 23 nt, Human
gguggcucacgccuguaauccca

SEQ ID NO: 778138 - RNA, 24 nt, Human
gguggcucacgccuguaaucccag

SEQ ID NO: 778139 - RNA, 20 nt, Human
gugcucgcuacagccaggcc

SEQ ID NO: 778140 - RNA, 23 nt, Human
guggcucacgccuguaaucccag

SEQ ID NO: 778141 - RNA, 18 nt, Human
uaaaaaagggaagggagg

SEQ ID NO: 778142 - RNA, 26 nt, Human
uaaaaauacgaaaacaaaauuagccg

SEQ ID NO: 778143 - RNA, 20 nt, Human
uaaaauaaaugcugaugcuc

SEQ ID NO: 778144 - RNA, 22 nt, Human
uaaagaaguagaaaaguuguca

SEQ ID NO: 778145 - RNA, 25 nt, Human
uaacuaacuucuagugaaccuagau

SEQ ID NO: 778146 - RNA, 19 nt, Human
uaauuugcauuucuaaggc

SEQ ID NO: 778147 - RNA, 26 nt, Human
uacaaaagaaaaagaccguguggcaa

SEQ ID NO: 778148 - RNA, 21 nt, Human
uagaaaaaugagcuagguuua

SEQ ID NO: 778149 - RNA, 22 nt, Human
uagaaaaaugagcuagguuuac

SEQ ID NO: 778150 - RNA, 23 nt, Human
uagaggaaaugcuggguuucugg

SEQ ID NO: 778151 - RNA, 23 nt, Human
uauauagagaaaaugcaaaauuu

SEQ ID NO: 778152 - RNA, 20 nt, Human
uauguccaaagagggagcuu

SEQ ID NO: 778153 - RNA, 24 nt, Human
uauuucauucaaauaauuauguuu

SEQ ID NO: 778154 - RNA, 23 nt, Human
ucaaaaaaaaaaaaaaaaaaaaa

SEQ ID NO: 778155 - RNA, 20 nt, Human
ucaagaccauccuggccaac

SEQ ID NO: 778156 - RNA, 20 nt, Human
ucaagaccauccuggccaac

SEQ ID NO: 778157 - RNA, 18 nt, Human
ucacgaggucaggagauc

SEQ ID NO: 778158 - RNA, 24 nt, Human
ucacgaggucaggagaucaagacc

SEQ ID NO: 778159 - RNA, 22 nt, Human
ucagaauauaaaggcacaguca

SEQ ID NO: 778160 - RNA, 23 nt, Human
ucgacgugggguauguccaaaga

SEQ ID NO: 778161 - RNA, 23 nt, Human
ucgcgccacugcacuccaaucug

SEQ ID NO: 778162 - RNA, 18 nt, Human
ucuaccaggaguacccag

SEQ ID NO: 778163 - RNA, 19 nt, Human
ucucacucucccuuuuugg

SEQ ID NO: 778164 - RNA, 24 nt, Human
ucuccuagaaaaaugagcuagguu

SEQ ID NO: 778165 - RNA, 22 nt, Human
ucucuacuaaaaauacgaaaac

SEQ ID NO: 778166 - RNA, 18 nt, Human
ucuggguaacagagcgag

SEQ ID NO: 778167 - RNA, 23 nt, Human
ucugucucaaaaaaaaaaaaaaa

SEQ ID NO: 778168 - RNA, 22 nt, Human
ugaaaaaaaggaagggaggugu

SEQ ID NO: 778169 - RNA, 19 nt, Human
ugaagcaaagacagcugag

SEQ ID NO: 778170 - RNA, 20 nt, Human
ugagaggggaaaagcugauu

SEQ ID NO: 778171 - RNA, 22 nt, Human
ugagcggagaucgcgccacugc

SEQ ID NO: 778172 - RNA, 24 nt, Human
ugaggcgggcggaucacgagguca

SEQ ID NO: 778173 - RNA, 18 nt, Human
ugauggaaaguacagcuu

SEQ ID NO: 778174 - RNA, 21 nt, Human
ugauggaaaguacagcuuuug

SEQ ID NO: 778175 - RNA, 18 nt, Human
ugauggacuaacccucca

SEQ ID NO: 778176 - RNA, 24 nt, Human
ugauggcgggcgccuguaguccca

SEQ ID NO: 778177 - RNA, 18 nt, Human
ugcagaaauuuucuugga

SEQ ID NO: 778178 - RNA, 18 nt, Human
ugcucgcuacagccaggc

SEQ ID NO: 778179 - RNA, 20 nt, Human
ugcuuugcauauaucuuaaa

SEQ ID NO: 778180 - RNA, 19 nt, Human
uggaaaguacagcuuuugg

SEQ ID NO: 778181 - RNA, 21 nt, Human
uggaaccagagaggaaggagc

SEQ ID NO: 778182 - RNA, 25 nt, Human
uggaaccagagaggaaggagcucca

SEQ ID NO: 778183 - RNA, 19 nt, Human
uggacuaacccuccagagg

SEQ ID NO: 778184 - RNA, 25 nt, Human
uggcaucuguagaacucuaauuuca

SEQ ID NO: 778185 - RNA, 24 nt, Human
uggccaacauggugaaaccccguc

SEQ ID NO: 778186 - RNA, 21 nt, Human
uggcucacgccuguaauccca

SEQ ID NO: 778187 - RNA, 22 nt, Human
uggcucacgccuguaaucccag

SEQ ID NO: 778188 - RNA, 18 nt, Human
ugggacaagaagcaaaac

SEQ ID NO: 778189 - RNA, 19 nt, Human
ugggaggcugaggcgggcg

SEQ ID NO: 778190 - RNA, 24 nt, Human
ugggaggcugaggcgggcggauca

SEQ ID NO: 778191 - RNA, 24 nt, Human
uggggguaaaggugccuacaucuu

SEQ ID NO: 778192 - RNA, 20 nt, Human
ugguugagggaaaugacaau

SEQ ID NO: 778193 - RNA, 18 nt, Human
ugugaagcaaagacagcu

SEQ ID NO: 778194 - RNA, 18 nt, Human
uucucuguggcuuuggga

SEQ ID NO: 778195 - RNA, 19 nt, Human
uugcagugagcggagaucg

SEQ ID NO: 778196 - RNA, 22 nt, Human
uugcagugagcggagaucgcgc

SEQ ID NO: 778197 - RNA, 25 nt, Human
uugggaggcugaggcgggcggauca

SEQ ID NO: 778198 - RNA, 18 nt, Human
uuuaauagaggaaaugcu

SEQ ID NO: 778199 - RNA, 21 nt, Human
uuuaucugaaagcaaccccug

SEQ ID NO: 778200 - RNA, 21 nt, Human
uuuuggucuucccucuucucc

SEQ ID NO: 778201 - RNA, 23 nt, Human
aaaaaaccauuaccaaagguugg

SEQ ID NO: 778202 - RNA, 25 nt, Human
aaaaaaccauuaccaaagguuggca

SEQ ID NO: 778203 - RNA, 18 nt, Human
aaaaaggccacuuaaaac

SEQ ID NO: 778204 - RNA, 23 nt, Human
aaaaaggccacuuaaaacucaga

SEQ ID NO: 778205 - RNA, 22 nt, Human
aaaaagucaauucagaagaauu

SEQ ID NO: 778206 - RNA, 24 nt, Human
aaaaauaaauaaauaaaaagggca

SEQ ID NO: 778207 - RNA, 20 nt, Human
aaagaccaaagggaauuuuc

SEQ ID NO: 778208 - RNA, 20 nt, Human
aaagacuuugauggaaaaau

SEQ ID NO: 778209 - RNA, 24 nt, Human
aaagauucccauuaaaaaguguua

SEQ ID NO: 778210 - RNA, 18 nt, Human
aacaaaugccuacauaua

SEQ ID NO: 778211 - RNA, 29 nt, Human
aacacuaugaaauauaagguuagcaccaa

SEQ ID NO: 778212 - RNA, 22 nt, Human
aagaaaaagucaauucagaaga

SEQ ID NO: 778213 - RNA, 22 nt, Human
aagaacuacugcccuagaugga

SEQ ID NO: 778214 - RNA, 23 nt, Human
aagaacuacugcccuagauggag

SEQ ID NO: 778215 - RNA, 20 nt, Human
agaauacauauuccuggccc

SEQ ID NO: 778216 - RNA, 24 nt, Human
agaauuccccauaguuuguugcuc

SEQ ID NO: 778217 - RNA, 20 nt, Human
agcauuaucauuccagggcu

SEQ ID NO: 778218 - RNA, 21 nt, Human
agccaauacaaaguugacaca

SEQ ID NO: 778219 - RNA, 24 nt, Human
agcucuucccaucccucagccucc

SEQ ID NO: 778220 - RNA, 20 nt, Human
aggagccaauaacuggcagu

SEQ ID NO: 778221 - RNA, 20 nt, Human
aggaugaaagaaaaagucaa

SEQ ID NO: 778222 - RNA, 20 nt, Human
agguuaaucaucuauaaccc

SEQ ID NO: 778223 - RNA, 18 nt, Human
aguauggaagacgugcag

SEQ ID NO: 778224 - RNA, 20 nt, Human
auaagaacuacugcccuaga

SEQ ID NO: 778225 - RNA, 21 nt, Human
auggaaaaauuuuaacugagg

SEQ ID NO: 778226 - RNA, 22 nt, Human
auguucccugggagccaacugg

SEQ ID NO: 778227 - RNA, 21 nt, Human
caaaaaaccauuaccaaaggu

SEQ ID NO: 778228 - RNA, 22 nt, Human
caaaugccuacauauaagauuu

SEQ ID NO: 778229 - RNA, 19 nt, Human
caagaagagacaauacaua

SEQ ID NO: 778230 - RNA, 19 nt, Human
caaugaacaccaccaguuc

SEQ ID NO: 778231 - RNA, 24 nt, Human
cacaagaagagacaauacauacua

SEQ ID NO: 778232 - RNA, 18 nt, Human
caccuccgccuccugcug

SEQ ID NO: 778233 - RNA, 24 nt, Human
caccuccgccuccugcuguuccag

SEQ ID NO: 778234 - RNA, 18 nt, Human
cacugcauucaggagaau

SEQ ID NO: 778235 - RNA, 18 nt, Human
cacuugaccacacaugcc

SEQ ID NO: 778236 - RNA, 20 nt, Human
cacuugaccacacaugccag

SEQ ID NO: 778237 - RNA, 23 nt, Human
cagaauacauauuccuggcccag

SEQ ID NO: 778238 - RNA, 26 nt, Human
cagaauuccccauaguuuguugcucc

SEQ ID NO: 778239 - RNA, 20 nt, Human
cagaguggggaaaacucaug

SEQ ID NO: 778240 - RNA, 21 nt, Human
cagccaauacaaaguugacac

SEQ ID NO: 778241 - RNA, 19 nt, Human
caugaaaacuaagaugggc

SEQ ID NO: 778242 - RNA, 21 nt, Human
caugaaaacuaagaugggcac

SEQ ID NO: 778243 - RNA, 20 nt, Human
caugguagaauaacagcaca

SEQ ID NO: 778244 - RNA, 18 nt, Human
ccagcucuucccaucccu

SEQ ID NO: 778245 - RNA, 25 nt, Human
ccauaauugggauauuguccaaagc

SEQ ID NO: 778246 - RNA, 18 nt, Human
ccccagauccuccuccuc

SEQ ID NO: 778247 - RNA, 22 nt, Human
cccccagauccuccuccuccgc

SEQ ID NO: 778248 - RNA, 19 nt, Human
ccccugcaccuccgccucc

SEQ ID NO: 778249 - RNA, 23 nt, Human
ccccuucgaagucugaaaaauua

SEQ ID NO: 778250 - RNA, 19 nt, Human
ccccuucuucucucuuuuc

SEQ ID NO: 778251 - RNA, 18 nt, Human
cccucugcacagagcaaa

SEQ ID NO: 778252 - RNA, 25 nt, Human
ccuccugccaccgcagcuccuccac

SEQ ID NO: 778253 - RNA, 24 nt, Human
ccugccaccgcagcuccuccaccu

SEQ ID NO: 778254 - RNA, 22 nt, Human
ccugcuguuccagcucuuccca

SEQ ID NO: 778255 - RNA, 22 nt, Human
cgcggcuuccaccggccccucu

SEQ ID NO: 778256 - RNA, 19 nt, Human
cgggcggccccugcaccuc

SEQ ID NO: 778257 - RNA, 19 nt, Human
cucacaguucuuaaccuuu

SEQ ID NO: 778258 - RNA, 20 nt, Human
cucagagacagaaagugaac

SEQ ID NO: 778259 - RNA, 18 nt, Human
cuccuccuccucuucccc

SEQ ID NO: 778260 - RNA, 21 nt, Human
cucguccaccuccugccaccg

SEQ ID NO: 778261 - RNA, 19 nt, Human
cugcaccuccgccuccugc

SEQ ID NO: 778262 - RNA, 24 nt, Human
cugcaccuccgccuccugcuguuc

SEQ ID NO: 778263 - RNA, 23 nt, Human
cuugauuucuuuaccccauauaa

SEQ ID NO: 778264 - RNA, 19 nt, Human
cuugcaagaguacaacuau

SEQ ID NO: 778265 - RNA, 19 nt, Human
cuuuguaugcacaugugua

SEQ ID NO: 778266 - RNA, 20 nt, Human
gaaagaaaaagucaauucag

SEQ ID NO: 778267 - RNA, 20 nt, Human
gaggcugcgcggcuuccacc

SEQ ID NO: 778268 - RNA, 24 nt, Human
gccccgccggcccuccccagucuc

SEQ ID NO: 778269 - RNA, 23 nt, Human
gccggcccuccccagucuccucc

SEQ ID NO: 778270 - RNA, 20 nt, Human
ggaaaacucaugaaaacuaa

SEQ ID NO: 778271 - RNA, 22 nt, Human
ggccaaaugcuucacauguccu

SEQ ID NO: 778272 - RNA, 23 nt, Human
ggccaaaugcuucacauguccuu

SEQ ID NO: 778273 - RNA, 22 nt, Human
ggccccugcaccuccgccuccu

SEQ ID NO: 778274 - RNA, 23 nt, Human
ggcccuccuccuccucuuccccc

SEQ ID NO: 778275 - RNA, 24 nt, Human
gggaauuuucaaacauguaauguc

SEQ ID NO: 778276 - RNA, 21 nt, Human
gggcacagugauaucccagcc

SEQ ID NO: 778277 - RNA, 18 nt, Human
guaaauguuuuggacaaa

SEQ ID NO: 778278 - RNA, 19 nt, Human
guagaguaaauguuuugga

SEQ ID NO: 778279 - RNA, 21 nt, Human
guccaccuccugccaccgcag

SEQ ID NO: 778280 - RNA, 20 nt, Human
gugugugggugggugugugu

SEQ ID NO: 778281 - RNA, 22 nt, Human
guuguuuuauuauuuuuccugu

SEQ ID NO: 778282 - RNA, 19 nt, Human
uaaaaaaaaagucuugaac

SEQ ID NO: 778283 - RNA, 30 nt, Human
uaaaaaauaaauaaauaaaaagggcaaaac

SEQ ID NO: 778284 - RNA, 19 nt, Human
uaaaaaggccacuuaaaac

SEQ ID NO: 778285 - RNA, 24 nt, Human
uaaaaagggcaagagaggagccaa

SEQ ID NO: 778286 - RNA, 23 nt, Human
uaaaacucagauguuuuuuaaag

SEQ ID NO: 778287 - RNA, 22 nt, Human
uaaaauguucccugggagccaa

SEQ ID NO: 778288 - RNA, 20 nt, Human
uaaauggcuggcuugggggg

SEQ ID NO: 778289 - RNA, 18 nt, Human
uaacuggcaguagggaug

SEQ ID NO: 778290 - RNA, 19 nt, Human
uacaacuuuuuguaacuga

SEQ ID NO: 778291 - RNA, 18 nt, Human
uacagcuucagagugggg

SEQ ID NO: 778292 - RNA, 18 nt, Human
uacagugaggcugagcua

SEQ ID NO: 778293 - RNA, 25 nt, Human
uagaaaggauaaacauucccagaca

SEQ ID NO: 778294 - RNA, 19 nt, Human
uagaauaacagcacauugc

SEQ ID NO: 778295 - RNA, 23 nt, Human
uagcauuaucauuccagggcugu

SEQ ID NO: 778296 - RNA, 18 nt, Human
uaggcccuaggagggagc

SEQ ID NO: 778297 - RNA, 21 nt, Human
uaguaaagaaaagacuuucug

SEQ ID NO: 778298 - RNA, 23 nt, Human
uagugcauagaaucaaaaaacca

SEQ ID NO: 778299 - RNA, 25 nt, Human
uaugucuguuucauguaaauuuagg

SEQ ID NO: 778300 - RNA, 24 nt, Human
uauuacaaaggcuccaaaucuugg

SEQ ID NO: 778301 - RNA, 18 nt, Human
ucacugcauucaggagaa

SEQ ID NO: 778302 - RNA, 25 nt, Human
ucacugcauucaggagaaugggugu

SEQ ID NO: 778303 - RNA, 24 nt, Human
uccacucuuuacaaugaacaccac

SEQ ID NO: 778304 - RNA, 20 nt, Human
uccagcucuucccaucccuc

SEQ ID NO: 778305 - RNA, 23 nt, Human
uccccagucuccuccaacgccuc

SEQ ID NO: 778306 - RNA, 18 nt, Human
uccccauaguuuguugcu

SEQ ID NO: 778307 - RNA, 19 nt, Human
ucccuaaagaccaaaggga

SEQ ID NO: 778308 - RNA, 18 nt, Human
ucccugggagccaacugg

SEQ ID NO: 778309 - RNA, 23 nt, Human
ucccugggagccaacugggccaa

SEQ ID NO: 778310 - RNA, 26 nt, Human
uccuggcccaguccccacaggcucug

SEQ ID NO: 778311 - RNA, 19 nt, Human
uccuguggacggaauuuuc

SEQ ID NO: 778312 - RNA, 20 nt, Human
uccuguggacggaauuuucu

SEQ ID NO: 778313 - RNA, 18 nt, Human
ucucguccaccuccugcc

SEQ ID NO: 778314 - RNA, 24 nt, Human
ucugaucuagaauugucuuucuuc

SEQ ID NO: 778315 - RNA, 20 nt, Human
ucugucucucguccaccucc

SEQ ID NO: 778316 - RNA, 23 nt, Human
ucugucucucguccaccuccugc

SEQ ID NO: 778317 - RNA, 19 nt, Human
ugagugaaugagccucccc

SEQ ID NO: 778318 - RNA, 24 nt, Human
ugcacagagcaaaggauguguacc

SEQ ID NO: 778319 - RNA, 20 nt, Human
ugccuucuggguuacagcuu

SEQ ID NO: 778320 - RNA, 21 nt, Human
ugcuuuuagcuagauaugauc

SEQ ID NO: 778321 - RNA, 19 nt, Human
uggaaagauucccauuaaa

SEQ ID NO: 778322 - RNA, 21 nt, Human
uggcaguagggaugggugaga

SEQ ID NO: 778323 - RNA, 20 nt, Human
ugggcacagugauaucccag

SEQ ID NO: 778324 - RNA, 24 nt, Human
ugggugggugugugugcaaggcca

SEQ ID NO: 778325 - RNA, 19 nt, Human
uggugugugggugggugug

SEQ ID NO: 778326 - RNA, 23 nt, Human
uggugugugggugggugugugug

SEQ ID NO: 778327 - RNA, 18 nt, Human
uguaaugucaauaaccug

SEQ ID NO: 778328 - RNA, 19 nt, Human
uguaggagaggaaaaagga

SEQ ID NO: 778329 - RNA, 24 nt, Human
uuaaauaaaaaaaaaaaaaaguua

SEQ ID NO: 778330 - RNA, 27 nt, Human
uuacauugauuuuuaacagucugaagg

SEQ ID NO: 778331 - RNA, 18 nt, Human
uuagugaggaaaucauug

SEQ ID NO: 778332 - RNA, 19 nt, Human
uuauaguaaagaaaagacu

SEQ ID NO: 778333 - RNA, 22 nt, Human
uucaagggcggcggcuucuuuc

SEQ ID NO: 778334 - RNA, 24 nt, Human
uucauugguauuuagugcaaauuu

SEQ ID NO: 778335 - RNA, 20 nt, Human
uucccccagauccuccuccu

SEQ ID NO: 778336 - RNA, 22 nt, Human
uucuucucucuuuuccucgggc

SEQ ID NO: 778337 - RNA, 22 nt, Human
uuuaacagucugaagguccagu

SEQ ID NO: 778338 - RNA, 20 nt, Human
uuuccugucucacuguugcu

SEQ ID NO: 778339 - RNA, 23 nt, Human
uuuccugucucacuguugcuuuu

SEQ ID NO: 778340 - RNA, 19 nt, Human
uuuuaaacugccaaguccc

SEQ ID NO: 778341 - RNA, 18 nt, Human
acucuguuucuuuugugc

SEQ ID NO: 778342 - RNA, 22 nt, Human
acucuguuucuuuugugcugcu

SEQ ID NO: 778343 - RNA, 23 nt, Human
acucuguuucuuuugugcugcuc

SEQ ID NO: 778344 - RNA, 19 nt, Human
agauuccccucccugcccu

SEQ ID NO: 778345 - RNA, 19 nt, Human
caaggcggguccucuggcu

SEQ ID NO: 778346 - RNA, 22 nt, Human
caaggcggguccucuggcuuua

SEQ ID NO: 778347 - RNA, 26 nt, Human
cacucuguuucuuuugugcugcuuua

SEQ ID NO: 778348 - RNA, 24 nt, Human
cagaaucucucugugccucaguuu

SEQ ID NO: 778349 - RNA, 23 nt, Human
cccacagcagccacuaauaacgg

SEQ ID NO: 778350 - RNA, 18 nt, Human
cccagugaugucaugguu

SEQ ID NO: 778351 - RNA, 18 nt, Human
ccucccugcccagugaug

SEQ ID NO: 778352 - RNA, 20 nt, Human
ccugggauuggaggcuggag

SEQ ID NO: 778353 - RNA, 20 nt, Human
cucaaaagauaaaacugacc

SEQ ID NO: 778354 - RNA, 20 nt, Human
cuggagacacuggagaggga

SEQ ID NO: 778355 - RNA, 20 nt, Human
cuggcagagugauggccgcu

SEQ ID NO: 778356 - RNA, 23 nt, Human
cugugccucaguuuacucaucug

SEQ ID NO: 778357 - RNA, 23 nt, Human
cugugugcuguuugcugcuggag

SEQ ID NO: 778358 - RNA, 18 nt, Human
cuuugugcuuggccuguc

SEQ ID NO: 778359 - RNA, 21 nt, Human
gggcguuuugaauggcuuuga

SEQ ID NO: 778360 - RNA, 22 nt, Human
gguaaguagauugucuuugggc

SEQ ID NO: 778361 - RNA, 21 nt, Human
guacuagugauguccugggau

SEQ ID NO: 778362 - RNA, 19 nt, Human
guagauuccccucccugcc

SEQ ID NO: 778363 - RNA, 21 nt, Human
uaaacugacuacaggaacugg

SEQ ID NO: 778364 - RNA, 26 nt, Human
uaacugcacucacugcacuggggugu

SEQ ID NO: 778365 - RNA, 19 nt, Human
uaaugacaauguucucaga

SEQ ID NO: 778366 - RNA, 19 nt, Human
uagguuaggaauuuucucu

SEQ ID NO: 778367 - RNA, 21 nt, Human
ucagaaucucucugugccuca

SEQ ID NO: 778368 - RNA, 18 nt, Human
ucccacagacugucgugg

SEQ ID NO: 778369 - RNA, 26 nt, Human
uccucuggcuuuaagaaacaugguuc

SEQ ID NO: 778370 - RNA, 19 nt, Human
uccuuugugcuuggccugu

SEQ ID NO: 778371 - RNA, 20 nt, Human
ugagacaggcuuuuguuuuc

SEQ ID NO: 778372 - RNA, 18 nt, Human
ugggauuggaggcuggag

SEQ ID NO: 778373 - RNA, 19 nt, Human
ugggauuggaggcuggaga

SEQ ID NO: 778374 - RNA, 24 nt, Human
ugugugcuguuugcugcuggaggu

SEQ ID NO: 778375 - RNA, 22 nt, Human
uuaggaauuuucucuaaacuga

SEQ ID NO: 778376 - RNA, 23 nt, Human
uugaaccgugucuucucucccac

SEQ ID NO: 778377 - RNA, 23 nt, Human
uuggcaucaaguagauuccccuc

SEQ ID NO: 778378 - RNA, 24 nt, Human
uuucgcaggaaagacugugugcug

SEQ ID NO: 778379 - RNA, 22 nt, Human
aaaacagaccaucugacuccaa

SEQ ID NO: 778380 - RNA, 21 nt, Human
aaaagcucccuccugcaacuu

SEQ ID NO: 778381 - RNA, 20 nt, Human
aaacagaugguuguagcucu

SEQ ID NO: 778382 - RNA, 22 nt, Human
aaacaugaacagguuauggcaa

SEQ ID NO: 778383 - RNA, 19 nt, Human
aaagcucccuccugcaacu

SEQ ID NO: 778384 - RNA, 19 nt, Human
aaaguuauuaaaccucauc

SEQ ID NO: 778385 - RNA, 21 nt, Human
aacaagguaaaagcccuccuc

SEQ ID NO: 778386 - RNA, 19 nt, Human
aacagauauagcaacugaa

SEQ ID NO: 778387 - RNA, 26 nt, Human
aaccaccaaaacaucaaaccaaacag

SEQ ID NO: 778388 - RNA, 24 nt, Human
aacccaccguuugauuccacaucg

SEQ ID NO: 778389 - RNA, 23 nt, Human
aagaagaccuacaacugaguaga

SEQ ID NO: 778390 - RNA, 18 nt, Human
aagaaguacaucugcauc

SEQ ID NO: 778391 - RNA, 19 nt, Human
aagagcccauuuuccccuc

SEQ ID NO: 778392 - RNA, 21 nt, Human
aagcguucuucccacucccuc

SEQ ID NO: 778393 - RNA, 24 nt, Human
aaguauuuacugggcgccuacuau

SEQ ID NO: 778394 - RNA, 23 nt, Human
aaucuuuaaaacagaccaucuga

SEQ ID NO: 778395 - RNA, 25 nt, Human
acaauaauggagagagugggguauc

SEQ ID NO: 778396 - RNA, 20 nt, Human
acccaacagauauagcaacu

SEQ ID NO: 778397 - RNA, 21 nt, Human
accucaucuucuuccugugaa

SEQ ID NO: 778398 - RNA, 19 nt, Human
acuaaagaagaaagcacau

SEQ ID NO: 778399 - RNA, 18 nt, Human
acuuguauucaucaauga

SEQ ID NO: 778400 - RNA, 18 nt, Human
agaaagaggagguuaucu

SEQ ID NO: 778401 - RNA, 24 nt, Human
agccauuucuaacaguagccaccc

SEQ ID NO: 778402 - RNA, 25 nt, Human
agcuggaugacaagaagaccuacaa

SEQ ID NO: 778403 - RNA, 19 nt, Human
aggacaaggccaugcucca

SEQ ID NO: 778404 - RNA, 21 nt, Human
agugauuuguuuuuauuuuua

SEQ ID NO: 778405 - RNA, 21 nt, Human
agugccagaaauauuuacaga

SEQ ID NO: 778406 - RNA, 21 nt, Human
augacaacagccauuucuaac

SEQ ID NO: 778407 - RNA, 21 nt, Human
caaaaugcacauuucuggaau

SEQ ID NO: 778408 - RNA, 21 nt, Human
caaaguccagaaaacaugaca

SEQ ID NO: 778409 - RNA, 20 nt, Human
cacacugaagaaguacaucu

SEQ ID NO: 778410 - RNA, 19 nt, Human
caccaaaacaucaaaccaa

SEQ ID NO: 778411 - RNA, 23 nt, Human
caccaaaacaucaaaccaaacag

SEQ ID NO: 778412 - RNA, 26 nt, Human
cacucauccacccccggcauacccaa

SEQ ID NO: 778413 - RNA, 21 nt, Human
cagaaaacaugacaacagcca

SEQ ID NO: 778414 - RNA, 22 nt, Human
cagagucugacaaaugcuuccc

SEQ ID NO: 778415 - RNA, 22 nt, Human
cauaaaagccuuucuccucaaa

SEQ ID NO: 778416 - RNA, 21 nt, Human
cauacaaacuguauauaugau

SEQ ID NO: 778417 - RNA, 21 nt, Human
ccaacccucauacacacacac

SEQ ID NO: 778418 - RNA, 18 nt, Human
ccaaucucuccaacucag

SEQ ID NO: 778419 - RNA, 23 nt, Human
ccacaaaacacaucuuugagcaa

SEQ ID NO: 778420 - RNA, 20 nt, Human
ccagaagaaaugaauacucu

SEQ ID NO: 778421 - RNA, 27 nt, Human
cccacaaacuuuauuugcauccccauu

SEQ ID NO: 778422 - RNA, 23 nt, Human
ccccagaggcuagaacauaugcu

SEQ ID NO: 778423 - RNA, 23 nt, Human
ccccucaaaaugucaaucuagaa

SEQ ID NO: 778424 - RNA, 18 nt, Human
cccuccugcaacuuaaga

SEQ ID NO: 778425 - RNA, 19 nt, Human
ccuacaacugaguagaagg

SEQ ID NO: 778426 - RNA, 21 nt, Human
ccucacuguccucagugcucc

SEQ ID NO: 778427 - RNA, 25 nt, Human
ccuccuaaaaagugagguaaaaaac

SEQ ID NO: 778428 - RNA, 20 nt, Human
ccuguaagauucugagauuu

SEQ ID NO: 778429 - RNA, 22 nt, Human
ccuucagaggagaaagaugucu

SEQ ID NO: 778430 - RNA, 18 nt, Human
ccuuucuccucaaaaggc

SEQ ID NO: 778431 - RNA, 23 nt, Human
cggaaugccacacucauccaccc

SEQ ID NO: 778432 - RNA, 25 nt, Human
cguaaguaaaccaccaaaacaucaa

SEQ ID NO: 778433 - RNA, 21 nt, Human
cuacugcaguuugcugcuugg

SEQ ID NO: 778434 - RNA, 29 nt, Human
cuacugcaguuugcugcuugggggcccuc

SEQ ID NO: 778435 - RNA, 23 nt, Human
cuccuaaaaagugagguaaaaaa

SEQ ID NO: 778436 - RNA, 24 nt, Human
cucugcucacuucaacuagaacaa

SEQ ID NO: 778437 - RNA, 20 nt, Human
cugaaggaucagcaagacca

SEQ ID NO: 778438 - RNA, 19 nt, Human
cugagaaacacacuagaag

SEQ ID NO: 778439 - RNA, 19 nt, Human
cuucaggggcugcacaucc

SEQ ID NO: 778440 - RNA, 22 nt, Human
cuucuauauugcaaauuuguug

SEQ ID NO: 778441 - RNA, 20 nt, Human
gaaaaaaauaugacaucuuu

SEQ ID NO: 778442 - RNA, 22 nt, Human
gaauaauacuauaaccugaaug

SEQ ID NO: 778443 - RNA, 26 nt, Human
ggaaaucuuuaaaacagaccaucuga

SEQ ID NO: 778444 - RNA, 20 nt, Human
ggaauaagagacauuugcac

SEQ ID NO: 778445 - RNA, 18 nt, Human
ggaguugccagaauuuag

SEQ ID NO: 778446 - RNA, 20 nt, Human
ggaguuucaugccuucaggg

SEQ ID NO: 778447 - RNA, 18 nt, Human
ggguaaagcuccaccuuc

SEQ ID NO: 778448 - RNA, 20 nt, Human
ggucacucagaaacugaggc

SEQ ID NO: 778449 - RNA, 30 nt, Human
guaugcgagugugugugugugugugugugg

SEQ ID NO: 778450 - RNA, 18 nt, Human
gucaaauuaccuccaaua

SEQ ID NO: 778451 - RNA, 21 nt, Human
gugauuuuuaacaaaggcagg

SEQ ID NO: 778452 - RNA, 20 nt, Human
gugugugugugugugugugu

SEQ ID NO: 778453 - RNA, 21 nt, Human
gugugugugugugugugugug

SEQ ID NO: 778454 - RNA, 19 nt, Human
guugauacuaccaaugcac

SEQ ID NO: 778455 - RNA, 20 nt, Human
uaaaaagugagguaaaaaaa

SEQ ID NO: 778456 - RNA, 26 nt, Human
uaaaacagaccaucugacuccaaugu

SEQ ID NO: 778457 - RNA, 24 nt, Human
uaaaagcccuccucacuguccuca

SEQ ID NO: 778458 - RNA, 20 nt, Human
uaaaauguauaucaucauua

SEQ ID NO: 778459 - RNA, 18 nt, Human
uaaauauguuccuccagu

SEQ ID NO: 778460 - RNA, 24 nt, Human
uaaguaaaccaccaaaacaucaaa

SEQ ID NO: 778461 - RNA, 28 nt, Human
uaaguaaaccaccaaaacaucaaaccaa

SEQ ID NO: 778462 - RNA, 19 nt, Human
uacacagaaccugcagcag

SEQ ID NO: 778463 - RNA, 20 nt, Human
uacagcacauuuuucugaaa

SEQ ID NO: 778464 - RNA, 21 nt, Human
uaccugagcuuaaaacaaaca

SEQ ID NO: 778465 - RNA, 19 nt, Human
uagaaagaggagguuaucu

SEQ ID NO: 778466 - RNA, 22 nt, Human
uagaacaagagcccauuuuccc

SEQ ID NO: 778467 - RNA, 18 nt, Human
uagaaguacauggcuucu

SEQ ID NO: 778468 - RNA, 21 nt, Human
uauaaccugaauggaaacugg

SEQ ID NO: 778469 - RNA, 18 nt, Human
uauaugcaaggcacugug

SEQ ID NO: 778470 - RNA, 23 nt, Human
uaugcgagugugugugugugugu

SEQ ID NO: 778471 - RNA, 20 nt, Human
ucaaaccaaacagaugguug

SEQ ID NO: 778472 - RNA, 18 nt, Human
ucaaacuguucugcugug

SEQ ID NO: 778473 - RNA, 23 nt, Human
ucaaaggcccaauggauggaaga

SEQ ID NO: 778474 - RNA, 23 nt, Human
ucaacagucuuagaaauucagug

SEQ ID NO: 778475 - RNA, 21 nt, Human
ucacuagauagcccaaagucu

SEQ ID NO: 778476 - RNA, 24 nt, Human
ucacucauguuugucaauuaugag

SEQ ID NO: 778477 - RNA, 18 nt, Human
uccagaagaaaugaauac

SEQ ID NO: 778478 - RNA, 18 nt, Human
uccauuucugaucuguuc

SEQ ID NO: 778479 - RNA, 24 nt, Human
uccgcucacauucaagaacuguuc

SEQ ID NO: 778480 - RNA, 24 nt, Human
ucuaacaguagccacccaaagagg

SEQ ID NO: 778481 - RNA, 23 nt, Human
ucugggagcccauuucacuagau

SEQ ID NO: 778482 - RNA, 18 nt, Human
ugaaauaaaggaucugga

SEQ ID NO: 778483 - RNA, 21 nt, Human
ugaagaaguacaucugcauca

SEQ ID NO: 778484 - RNA, 23 nt, Human
ugaauccagaggaaaaugggcug

SEQ ID NO: 778485 - RNA, 24 nt, Human
ugacaagaagaccuacaacugagu

SEQ ID NO: 778486 - RNA, 22 nt, Human
ugagaaacacacuagaaguaca

SEQ ID NO: 778487 - RNA, 21 nt, Human
ugaggacuugggaaacuuggu

SEQ ID NO: 778488 - RNA, 18 nt, Human
ugaguagaaggcugugac

SEQ ID NO: 778489 - RNA, 19 nt, Human
ugaguagaaggcugugacu

SEQ ID NO: 778490 - RNA, 25 nt, Human
ugaguaugcgagugugugugugugu

SEQ ID NO: 778491 - RNA, 32 nt, Human
ugaguaugcgaguguguguguguguguguggu

SEQ ID NO: 778492 - RNA, 24 nt, Human
ugaugagaaggacaacuuuuugaa

SEQ ID NO: 778493 - RNA, 18 nt, Human
ugauuuguuuuuauuuuu

SEQ ID NO: 778494 - RNA, 20 nt, Human
ugcauaaaagccuuucuccu

SEQ ID NO: 778495 - RNA, 19 nt, Human
ugcccucucccauguuacc

SEQ ID NO: 778496 - RNA, 21 nt, Human
ugcuaugcccauauuucuugc

SEQ ID NO: 778497 - RNA, 21 nt, Human
uggaauuacaaggaguugcca

SEQ ID NO: 778498 - RNA, 23 nt, Human
uggacuacuaaauauuaauauua

SEQ ID NO: 778499 - RNA, 23 nt, Human
uggagagagugggguaucacugc

SEQ ID NO: 778500 - RNA, 24 nt, Human
uggagagagugggguaucacugcu

SEQ ID NO: 778501 - RNA, 21 nt, Human
uggagucauagaaagaggagg

SEQ ID NO: 778502 - RNA, 24 nt, Human
uggauguucugggucuggccaccc

SEQ ID NO: 778503 - RNA, 21 nt, Human
uggcagggaucuguuggcugg

SEQ ID NO: 778504 - RNA, 25 nt, Human
uggcuaaaauguauaucaucauuau

SEQ ID NO: 778505 - RNA, 19 nt, Human
ugggguaucacugcugucu

SEQ ID NO: 778506 - RNA, 24 nt, Human
uggguaaagcuccaccuuccagaa

SEQ ID NO: 778507 - RNA, 23 nt, Human
ugugagcagaaggaaccagcgcc

SEQ ID NO: 778508 - RNA, 28 nt, Human
ugugugugugugugucugauuaguccuu

SEQ ID NO: 778509 - RNA, 20 nt, Human
ugugugugugugugugucug

SEQ ID NO: 778510 - RNA, 18 nt, Human
ugugugugugugugugug

SEQ ID NO: 778511 - RNA, 18 nt, Human
ugugugugugugugugug

SEQ ID NO: 778512 - RNA, 18 nt, Human
ugugugugugugugugug

SEQ ID NO: 778513 - RNA, 18 nt, Human
ugugugugugugugugug

SEQ ID NO: 778514 - RNA, 18 nt, Human
ugugugugugugugugug

SEQ ID NO: 778515 - RNA, 18 nt, Human
ugugugugugugugugug

SEQ ID NO: 778516 - RNA, 18 nt, Human
ugugugugugugugugug

SEQ ID NO: 778517 - RNA, 18 nt, Human
ugugugugugugugugug

SEQ ID NO: 778518 - RNA, 22 nt, Human
ugugugugugugugugugucug

SEQ ID NO: 778519 - RNA, 21 nt, Human
ugugugugugugugugugugu

SEQ ID NO: 778520 - RNA, 21 nt, Human
ugugugugugugugugugugu

SEQ ID NO: 778521 - RNA, 21 nt, Human
ugugugugugugugugugugu

SEQ ID NO: 778522 - RNA, 21 nt, Human
ugugugugugugugugugugu

SEQ ID NO: 778523 - RNA, 21 nt, Human
ugugugugugugugugugugu

SEQ ID NO: 778524 - RNA, 21 nt, Human
ugugugugugugugugugugu

SEQ ID NO: 778525 - RNA, 21 nt, Human
ugugugugugugugugugugu

SEQ ID NO: 778526 - RNA, 21 nt, Human
ugugugugugugugugugugu

SEQ ID NO: 778527 - RNA, 21 nt, Human
ugugugugugugugugugugu

SEQ ID NO: 778528 - RNA, 21 nt, Human
ugugugugugugugugugugu

SEQ ID NO: 778529 - RNA, 21 nt, Human
ugugugugugugugugugugu

SEQ ID NO: 778530 - RNA, 21 nt, Human
ugugugugugugugugugugu

SEQ ID NO: 778531 - RNA, 21 nt, Human
ugugugugugugugugugugu

SEQ ID NO: 778532 - RNA, 21 nt, Human
ugugugugugugugugugugu

SEQ ID NO: 778533 - RNA, 22 nt, Human
ugugugugugugugugugugug

SEQ ID NO: 778534 - RNA, 22 nt, Human
ugugugugugugugugugugug

SEQ ID NO: 778535 - RNA, 22 nt, Human
ugugugugugugugugugugug

SEQ ID NO: 778536 - RNA, 22 nt, Human
ugugugugugugugugugugug

SEQ ID NO: 778537 - RNA, 22 nt, Human
ugugugugugugugugugugug

SEQ ID NO: 778538 - RNA, 19 nt, Human
uuacaguucagugccagaa

SEQ ID NO: 778539 - RNA, 21 nt, Human
uuacuaaagaagaaagcacau

SEQ ID NO: 778540 - RNA, 20 nt, Human
uuauuuauuuauuuauuuuu

SEQ ID NO: 778541 - RNA, 19 nt, Human
uucaacuagaacaagagcc

SEQ ID NO: 778542 - RNA, 22 nt, Human
uucacaaacuacugcaguuugc

SEQ ID NO: 778543 - RNA, 18 nt, Human
uucaugaaggccucauac

SEQ ID NO: 778544 - RNA, 22 nt, Human
uuccaaaaccuggcagggaucu

SEQ ID NO: 778545 - RNA, 21 nt, Human
uugcugcuugguccugucauu

SEQ ID NO: 778546 - RNA, 30 nt, Human
uuucuuuuuuuauuauuuauuuauuuauuu

SEQ ID NO: 778547 - RNA, 28 nt, Human
uuuuuuuauuauuuauuuauuuauuuau

SEQ ID NO: 778548 - RNA, 26 nt, Human
aaaaagaaaaaaaaauaaauacaagg

SEQ ID NO: 778549 - RNA, 21 nt, Human
aaaacuuuuacaaugugaaau

SEQ ID NO: 778550 - RNA, 22 nt, Human
aaacaggaaagaguaugaggau

SEQ ID NO: 778551 - RNA, 24 nt, Human
aaagaaaaaaaaauaaauacaagg

SEQ ID NO: 778552 - RNA, 21 nt, Human
aaagaagaaaacaggaaagag

SEQ ID NO: 778553 - RNA, 23 nt, Human
aaauacaaggaacacugccuuuu

SEQ ID NO: 778554 - RNA, 24 nt, Human
aagaaaaaaaaauaaauacaagga

SEQ ID NO: 778555 - RNA, 20 nt, Human
aagaaacaggccauacacua

SEQ ID NO: 778556 - RNA, 23 nt, Human
aagaaccacuccaucacaauguc

SEQ ID NO: 778557 - RNA, 19 nt, Human
aagaagaaaacaggaaaga

SEQ ID NO: 778558 - RNA, 21 nt, Human
aagaagaaaacaggaaagagu

SEQ ID NO: 778559 - RNA, 25 nt, Human
aagaagaaaacaggaaagaguauga

SEQ ID NO: 778560 - RNA, 22 nt, Human
acaaagaagaaaacaggaaaga

SEQ ID NO: 778561 - RNA, 21 nt, Human
acaaggaacacugccuuuuca

SEQ ID NO: 778562 - RNA, 20 nt, Human
acccuggcauccagcccucc

SEQ ID NO: 778563 - RNA, 21 nt, Human
acuugaaacauucacauuuga

SEQ ID NO: 778564 - RNA, 19 nt, Human
agaaaaguauuuacuucug

SEQ ID NO: 778565 - RNA, 18 nt, Human
agaagaaaacaggaaaga

SEQ ID NO: 778566 - RNA, 23 nt, Human
agacaggugcauuucucucugca

SEQ ID NO: 778567 - RNA, 24 nt, Human
agagaucacauucuucauuuuuuu

SEQ ID NO: 778568 - RNA, 19 nt, Human
agagucccauuaauuuuau

SEQ ID NO: 778569 - RNA, 20 nt, Human
agcaaauucaguacaauauc

SEQ ID NO: 778570 - RNA, 20 nt, Human
aggacuuuguucugccuaca

SEQ ID NO: 778571 - RNA, 21 nt, Human
aggguucucuuucuaaagaaa

SEQ ID NO: 778572 - RNA, 19 nt, Human
agguguagugaacauagaa

SEQ ID NO: 778573 - RNA, 20 nt, Human
auccaucacuauuaaguaac

SEQ ID NO: 778574 - RNA, 22 nt, Human
auggagcagaagccauuuucau

SEQ ID NO: 778575 - RNA, 18 nt, Human
auucaguacaauauccuc

SEQ ID NO: 778576 - RNA, 18 nt, Human
caaaaaucuacccuuaga

SEQ ID NO: 778577 - RNA, 23 nt, Human
caaauauuugcauagccaaaaca

SEQ ID NO: 778578 - RNA, 22 nt, Human
caagaaaagccuuacaauaaga

SEQ ID NO: 778579 - RNA, 24 nt, Human
caagaaacaggccauacacuacaa

SEQ ID NO: 778580 - RNA, 23 nt, Human
cacaugcacauuuuuuaucacaa

SEQ ID NO: 778581 - RNA, 23 nt, Human
cauaccucaaaccaagggaaaaa

SEQ ID NO: 778582 - RNA, 25 nt, Human
caucacaaugucuucuguuucacag

SEQ ID NO: 778583 - RNA, 20 nt, Human
caugccucaggaaugauagu

SEQ ID NO: 778584 - RNA, 20 nt, Human
cccagcggaugaaauaggac

SEQ ID NO: 778585 - RNA, 25 nt, Human
cucaaagucauuuauguucuauucc

SEQ ID NO: 778586 - RNA, 18 nt, Human
cuccaucacaaugucuuc

SEQ ID NO: 778587 - RNA, 21 nt, Human
cuccccaugcugcugcucuca

SEQ ID NO: 778588 - RNA, 23 nt, Human
cuccccaugcugcugcucucaaa

SEQ ID NO: 778589 - RNA, 20 nt, Human
cucguaguccucacuaugac

SEQ ID NO: 778590 - RNA, 23 nt, Human
cucucuuaacccuggcauccagc

SEQ ID NO: 778591 - RNA, 20 nt, Human
cuuaacccuggcauccagcc

SEQ ID NO: 778592 - RNA, 24 nt, Human
gaaacaaauaagcaaggcagggca

SEQ ID NO: 778593 - RNA, 25 nt, Human
gaggauagaaaagugcaaauccauc

SEQ ID NO: 778594 - RNA, 22 nt, Human
gauuuaagaguaaggagacuaa

SEQ ID NO: 778595 - RNA, 20 nt, Human
ggacauauucuaaagauuuu

SEQ ID NO: 778596 - RNA, 25 nt, Human
guaacaauaaaaaguacacaugugc

SEQ ID NO: 778597 - RNA, 21 nt, Human
gucauuuuuccuuccaaaacc

SEQ ID NO: 778598 - RNA, 20 nt, Human
uaaaaagaaagcauuuguuu

SEQ ID NO: 778599 - RNA, 21 nt, Human
uaaaagcaagaaaagccuuac

SEQ ID NO: 778600 - RNA, 20 nt, Human
uaaacgacccaucuaagcua

SEQ ID NO: 778601 - RNA, 20 nt, Human
uaaacuacuuaaagcagcuc

SEQ ID NO: 778602 - RNA, 18 nt, Human
uaaagcagcucccuaaac

SEQ ID NO: 778603 - RNA, 20 nt, Human
uaaggagacuaaggcugugg

SEQ ID NO: 778604 - RNA, 19 nt, Human
uaagguaacuguacugcag

SEQ ID NO: 778605 - RNA, 23 nt, Human
uaaguaucaaacuauuuuuggug

SEQ ID NO: 778606 - RNA, 20 nt, Human
uacaauauccucguguccuc

SEQ ID NO: 778607 - RNA, 24 nt, Human
uacaaugcaaugugacugaaacag

SEQ ID NO: 778608 - RNA, 22 nt, Human
uacuugaaacauucacauuuga

SEQ ID NO: 778609 - RNA, 21 nt, Human
uagaaaaugauuuuuauccaa

SEQ ID NO: 778610 - RNA, 23 nt, Human
uagccaggaggaagaggucaguu

SEQ ID NO: 778611 - RNA, 23 nt, Human
uagcugaagaaccacuccaucac

SEQ ID NO: 778612 - RNA, 19 nt, Human
uauaguauggauaugaaaa

SEQ ID NO: 778613 - RNA, 22 nt, Human
uauuaaggaguuuuauauuugg

SEQ ID NO: 778614 - RNA, 20 nt, Human
uccacaaccuuggcuucuaa

SEQ ID NO: 778615 - RNA, 18 nt, Human
uccuccccaugcugcugc

SEQ ID NO: 778616 - RNA, 23 nt, Human
ucuagaaguagcaaugguuuugu

SEQ ID NO: 778617 - RNA, 24 nt, Human
ucuccagcacccauccuaucaucc

SEQ ID NO: 778618 - RNA, 19 nt, Human
ugaagaaccacuccaucac

SEQ ID NO: 778619 - RNA, 21 nt, Human
ugaagaaccacuccaucacaa

SEQ ID NO: 778620 - RNA, 20 nt, Human
ugauuuaagaguaaggagaa

SEQ ID NO: 778621 - RNA, 22 nt, Human
ugcacacacaugugacugaggc

SEQ ID NO: 778622 - RNA, 23 nt, Human
ugcaugcaauuguacaaagaaga

SEQ ID NO: 778623 - RNA, 21 nt, Human
ugcugcuaucaaagcaguucu

SEQ ID NO: 778624 - RNA, 22 nt, Human
ugcugcuaucaaagcaguucua

SEQ ID NO: 778625 - RNA, 22 nt, Human
ugcugcugcuaucaaagcaguu

SEQ ID NO: 778626 - RNA, 24 nt, Human
uguaaaaacaauaaaauuaaauaa

SEQ ID NO: 778627 - RNA, 25 nt, Human
ugugacugaggcauggccggggucc

SEQ ID NO: 778628 - RNA, 22 nt, Human
uguucauauuuauuaauagacu

SEQ ID NO: 778629 - RNA, 20 nt, Human
uuaaaaagugcuuauuccug

SEQ ID NO: 778630 - RNA, 21 nt, Human
uuauuaauauugccaugucac

SEQ ID NO: 778631 - RNA, 18 nt, Human
uucagcaaaucaacaggc

SEQ ID NO: 778632 - RNA, 23 nt, Human
uucaggguucucuuucccuaagg

SEQ ID NO: 778633 - RNA, 25 nt, Human
uugcauagccaaaacaauauugaga

SEQ ID NO: 778634 - RNA, 18 nt, Human
uuucacagaauaggaaac

SEQ ID NO: 778635 - RNA, 19 nt, Human
uuucaggguucucuuucua

SEQ ID NO: 778636 - RNA, 22 nt, Human
uuucaggucauuuuuccuucca

SEQ ID NO: 778637 - RNA, 22 nt, Human
uuugcugacuuuaaaaaauaaa

SEQ ID NO: 778638 - RNA, 21 nt, Human
uuugucccugagaauuuucau

SEQ ID NO: 778639 - RNA, 23 nt, Human
aaaaggaauucuuaccgugcaga

SEQ ID NO: 778640 - RNA, 20 nt, Human
aaacaaggccauaauaaagc

SEQ ID NO: 778641 - RNA, 22 nt, Human
aaacaaggccauaauaaagcac

SEQ ID NO: 778642 - RNA, 24 nt, Human
aaagugcugggauuacaggcguga

SEQ ID NO: 778643 - RNA, 21 nt, Human
aaauacaugcacugucacgug

SEQ ID NO: 778644 - RNA, 21 nt, Human
aagaugggguuucuccauguu

SEQ ID NO: 778645 - RNA, 24 nt, Human
aagaugggguuucuccauguuggc

SEQ ID NO: 778646 - RNA, 19 nt, Human
aagugcugggauuacaggc

SEQ ID NO: 778647 - RNA, 19 nt, Human
aagugcugggauuacaggc

SEQ ID NO: 778648 - RNA, 21 nt, Human
aauaaagcacagacacauccg

SEQ ID NO: 778649 - RNA, 22 nt, Human
aaugcaauauccugucuacuca

SEQ ID NO: 778650 - RNA, 18 nt, Human
aauguuaauauuuugaau

SEQ ID NO: 778651 - RNA, 21 nt, Human
acauccgacuccuacggacac

SEQ ID NO: 778652 - RNA, 19 nt, Human
accacagaaaaaacacaca

SEQ ID NO: 778653 - RNA, 19 nt, Human
accauaguuaaauguuuug

SEQ ID NO: 778654 - RNA, 20 nt, Human
acuccacugccucagggcag

SEQ ID NO: 778655 - RNA, 21 nt, Human
acuccugaccucaggucaucc

SEQ ID NO: 778656 - RNA, 25 nt, Human
acucuguugcccaggcuggagugca

SEQ ID NO: 778657 - RNA, 22 nt, Human
agaacucagauguaugggaugu

SEQ ID NO: 778658 - RNA, 22 nt, Human
agcagcgccagcgcgcggcaca

SEQ ID NO: 778659 - RNA, 28 nt, Human
agccaccagccuuguuuauaaauucaaa

SEQ ID NO: 778660 - RNA, 21 nt, Human
agccccagguagcccagcgcg

SEQ ID NO: 778661 - RNA, 19 nt, Human
aggaaaaguacaagguguc

SEQ ID NO: 778662 - RNA, 22 nt, Human
aggacaacguguaccuuccuuu

SEQ ID NO: 778663 - RNA, 20 nt, Human
aggcacggugcugcucuacc

SEQ ID NO: 778664 - RNA, 20 nt, Human
aggcacuuugguuuguuugg

SEQ ID NO: 778665 - RNA, 21 nt, Human
aggcagcuacuggaggccaag

SEQ ID NO: 778666 - RNA, 21 nt, Human
aggccaagcaccuccaggcac

SEQ ID NO: 778667 - RNA, 23 nt, Human
aggccgcggcugcggcgacacca

SEQ ID NO: 778668 - RNA, 25 nt, Human
aggcuggagugcaguggugcgaucu

SEQ ID NO: 778669 - RNA, 18 nt, Human
aggucauccgcccgccuc

SEQ ID NO: 778670 - RNA, 19 nt, Human
aguagcugggacuacaggc

SEQ ID NO: 778671 - RNA, 19 nt, Human
aguagcugggacuacaggc

SEQ ID NO: 778672 - RNA, 23 nt, Human
agugcaguggugcgaucuuggcu

SEQ ID NO: 778673 - RNA, 24 nt, Human
agugcaguggugcgaucuuggcuc

SEQ ID NO: 778674 - RNA, 21 nt, Human
agugcugcugcuuuauagauu

SEQ ID NO: 778675 - RNA, 18 nt, Human
agugcugggauuacaggc

SEQ ID NO: 778676 - RNA, 24 nt, Human
auaaagcacagacacauccgacuc

SEQ ID NO: 778677 - RNA, 31 nt, Human
auaacuaaauccaugaaauuauaaaaauaaa

SEQ ID NO: 778678 - RNA, 23 nt, Human
augaaacaagcuaaaagcuccaa

SEQ ID NO: 778679 - RNA, 18 nt, Human
augggguuucuccauguu

SEQ ID NO: 778680 - RNA, 20 nt, Human
augggguuucuccauguugg

SEQ ID NO: 778681 - RNA, 24 nt, Human
augggguuucuccauguuggccag

SEQ ID NO: 778682 - RNA, 22 nt, Human
auguaagaaauuucagauuagc

SEQ ID NO: 778683 - RNA, 24 nt, Human
caaagugcugggauuacaggcgug

SEQ ID NO: 778684 - RNA, 22 nt, Human
caaauaauccuauauacuaaca

SEQ ID NO: 778685 - RNA, 19 nt, Human
caagagcuaccgccgcccu

SEQ ID NO: 778686 - RNA, 22 nt, Human
caagcaauucuccugccucagc

SEQ ID NO: 778687 - RNA, 19 nt, Human
cacacagccuacgacacug

SEQ ID NO: 778688 - RNA, 22 nt, Human
cacacagcuacacacaggccug

SEQ ID NO: 778689 - RNA, 24 nt, Human
cacacgaauuuaauaaguuuuaga

SEQ ID NO: 778690 - RNA, 24 nt, Human
cacagaaaaaacacacagcuacac

SEQ ID NO: 778691 - RNA, 24 nt, Human
caccacgcccggcuaauuuuugua

SEQ ID NO: 778692 - RNA, 24 nt, Human
cacucuguugcccaggcuggagug

SEQ ID NO: 778693 - RNA, 21 nt, Human
cacugcaaccuccgccuccug

SEQ ID NO: 778694 - RNA, 23 nt, Human
cacugcaaccuccgccuccuggg

SEQ ID NO: 778695 - RNA, 19 nt, Human
cacuucagugccucagaau

SEQ ID NO: 778696 - RNA, 18 nt, Human
cagcagcagcgcgaagcu

SEQ ID NO: 778697 - RNA, 20 nt, Human
cagcagcgccagcgcgcggc

SEQ ID NO: 778698 - RNA, 18 nt, Human
cagcgcgagcgcgaggag

SEQ ID NO: 778699 - RNA, 19 nt, Human
caguggugcgaucuuggcu

SEQ ID NO: 778700 - RNA, 20 nt, Human
cauguacgagcuaacagagc

SEQ ID NO: 778701 - RNA, 24 nt, Human
cauguuggccaggcuggucuugaa

SEQ ID NO: 778702 - RNA, 23 nt, Human
cauucugcucuuucagugucugg

SEQ ID NO: 778703 - RNA, 22 nt, Human
ccaaagugcugggauuacaggc

SEQ ID NO: 778704 - RNA, 22 nt, Human
ccaaagugcugggauuacaggc

SEQ ID NO: 778705 - RNA, 24 nt, Human
ccaaagugcugggauuacaggcgu

SEQ ID NO: 778706 - RNA, 21 nt, Human
ccaugaaauuauaaaaauaac

SEQ ID NO: 778707 - RNA, 19 nt, Human
ccauguuggccaggcuggu

SEQ ID NO: 778708 - RNA, 21 nt, Human
ccauguuggccaggcuggucu

SEQ ID NO: 778709 - RNA, 21 nt, Human
ccauguuggccaggcuggucu

SEQ ID NO: 778710 - RNA, 24 nt, Human
cccacauguacgagcuaacagagc

SEQ ID NO: 778711 - RNA, 22 nt, Human
cccccgggguucucaggcccuc

SEQ ID NO: 778712 - RNA, 23 nt, Human
cccgaguagcugggacuacaggc

SEQ ID NO: 778713 - RNA, 24 nt, Human
cccgaguagcugggacuacaggcg

SEQ ID NO: 778714 - RNA, 21 nt, Human
cccuuuucuuagauaaacuga

SEQ ID NO: 778715 - RNA, 26 nt, Human
ccgccuccuggguucaagcaauucuu

SEQ ID NO: 778716 - RNA, 18 nt, Human
ccuacuuuaaggcacagg

SEQ ID NO: 778717 - RNA, 19 nt, Human
ccuccgccuccuggguuca

SEQ ID NO: 778718 - RNA, 24 nt, Human
ccuccuggguucaagcaauucucc

SEQ ID NO: 778719 - RNA, 24 nt, Human
ccugccucagccucccgaguagcu

SEQ ID NO: 778720 - RNA, 23 nt, Human
ccuggguucaagcaauucuccug

SEQ ID NO: 778721 - RNA, 24 nt, Human
ccuucauuggcuuggcucaaggua

SEQ ID NO: 778722 - RNA, 21 nt, Human
cgacacugcaacagagccuca

SEQ ID NO: 778723 - RNA, 20 nt, Human
cgacuccuacggacacagcu

SEQ ID NO: 778724 - RNA, 22 nt, Human
cgaggagaacccagcugaagcu

SEQ ID NO: 778725 - RNA, 24 nt, Human
cgccucggccucccaaagugcugg

SEQ ID NO: 778726 - RNA, 25 nt, Human
cgcguacacgggcagcagcagcgcg

SEQ ID NO: 778727 - RNA, 24 nt, Human
cggagucucacucuguugcccagg

SEQ ID NO: 778728 - RNA, 18 nt, Human
cggcacaggcgcagggcc

SEQ ID NO: 778729 - RNA, 24 nt, Human
cggcacaggcgcagggccuugagg

SEQ ID NO: 778730 - RNA, 23 nt, Human
cggcgacaccaggcgagcagcgc

SEQ ID NO: 778731 - RNA, 19 nt, Human
cgggcagcagcagcgcgaa

SEQ ID NO: 778732 - RNA, 19 nt, Human
cucaagguagaaaaguuaa

SEQ ID NO: 778733 - RNA, 24 nt, Human
cucacucuguugcccaggcuggag

SEQ ID NO: 778734 - RNA, 24 nt, Human
cucacugcaaccuccgccuccugg

SEQ ID NO: 778735 - RNA, 24 nt, Human
cucagccucccgaguagcugggac

SEQ ID NO: 778736 - RNA, 21 nt, Human
cuccacgcucagcacgccccc

SEQ ID NO: 778737 - RNA, 26 nt, Human
cuccugaccucaggucauccgcccgc

SEQ ID NO: 778738 - RNA, 21 nt, Human
cuccuggguucaagcaauucu

SEQ ID NO: 778739 - RNA, 23 nt, Human
cugcaaccuccgccuccuggguu

SEQ ID NO: 778740 - RNA, 19 nt, Human
cuguugcccaggcuggagu

SEQ ID NO: 778741 - RNA, 19 nt, Human
cuuauaagcccuucaacuu

SEQ ID NO: 778742 - RNA, 25 nt, Human
gaaaaaacacacagcuacacacagg

SEQ ID NO: 778743 - RNA, 24 nt, Human
gaacagcaggggccgggcucgcag

SEQ ID NO: 778744 - RNA, 24 nt, Human
gaccucaggucauccgcccgccuc

SEQ ID NO: 778745 - RNA, 23 nt, Human
gaggcagccugggaaguggcugc

SEQ ID NO: 778746 - RNA, 24 nt, Human
gaguagcugggacuacaggcgugc

SEQ ID NO: 778747 - RNA, 18 nt, Human
gauuacaggcgugagcca

SEQ ID NO: 778748 - RNA, 22 nt, Human
gauuacaggcgugagccaccgc

SEQ ID NO: 778749 - RNA, 23 nt, Human
gauuacaggcgugagccaccgca

SEQ ID NO: 778750 - RNA, 22 nt, Human
gcaacagagccucaccucacag

SEQ ID NO: 778751 - RNA, 22 nt, Human
gcaaccuccgccuccuggguuc

SEQ ID NO: 778752 - RNA, 25 nt, Human
gcagcagcagcgcgaagcuccgcgc

SEQ ID NO: 778753 - RNA, 21 nt, Human
gcagugggggguccagcugga

SEQ ID NO: 778754 - RNA, 18 nt, Human
gcccccaacccugguggu

SEQ ID NO: 778755 - RNA, 22 nt, Human
gcccggcuaauuuuuguauuuu

SEQ ID NO: 778756 - RNA, 20 nt, Human
gccucagccucccgaguagc

SEQ ID NO: 778757 - RNA, 19 nt, Human
gcgcggcacaggcgcaggg

SEQ ID NO: 778758 - RNA, 18 nt, Human
gcuagaagggaggguggg

SEQ ID NO: 778759 - RNA, 18 nt, Human
gcuagaagggaggguggg

SEQ ID NO: 778760 - RNA, 23 nt, Human
gcucgcagcuguggcgcccccaa

SEQ ID NO: 778761 - RNA, 23 nt, Human
gcuggucuugaacuccugaccuc

SEQ ID NO: 778762 - RNA, 20 nt, Human
gcuuggcucaagguagaaaa

SEQ ID NO: 778763 - RNA, 18 nt, Human
ggaaaugguuuauaaaga

SEQ ID NO: 778764 - RNA, 21 nt, Human
ggaaaugguuuauaaagaggc

SEQ ID NO: 778765 - RNA, 21 nt, Human
ggagguggaauaaaugcggca

SEQ ID NO: 778766 - RNA, 23 nt, Human
ggagucucacucuguugcccagg

SEQ ID NO: 778767 - RNA, 21 nt, Human
ggcacucaaggcccuggggac

SEQ ID NO: 778768 - RNA, 20 nt, Human
ggcagaaacauacuagcauu

SEQ ID NO: 778769 - RNA, 20 nt, Human
ggccgaggcgggcugggugc

SEQ ID NO: 778770 - RNA, 24 nt, Human
ggcuggucuugaacuccugaccuc

SEQ ID NO: 778771 - RNA, 18 nt, Human
gggcagcagcagcgcgaa

SEQ ID NO: 778772 - RNA, 22 nt, Human
gggguuucuccauguuggccag

SEQ ID NO: 778773 - RNA, 19 nt, Human
ggucuugaacuccugaccu

SEQ ID NO: 778774 - RNA, 24 nt, Human
gucauccgcccgccucggccuccc

SEQ ID NO: 778775 - RNA, 23 nt, Human
uaaaaggacaacguguaccuucc

SEQ ID NO: 778776 - RNA, 23 nt, Human
uaaaauaaacauaagacacuuca

SEQ ID NO: 778777 - RNA, 21 nt, Human
uaaaauucccuuuucuuagau

SEQ ID NO: 778778 - RNA, 24 nt, Human
uaaauacaugcacugucacgugaa

SEQ ID NO: 778779 - RNA, 24 nt, Human
uaacaauaucccaauauuaagguc

SEQ ID NO: 778780 - RNA, 23 nt, Human
uaacauugaaagucugcucuuac

SEQ ID NO: 778781 - RNA, 24 nt, Human
uaacauugaaagucugcucuuacu

SEQ ID NO: 778782 - RNA, 23 nt, Human
uaacccccaucccccaccgcugu

SEQ ID NO: 778783 - RNA, 18 nt, Human
uaagauguucucauggcu

SEQ ID NO: 778784 - RNA, 24 nt, Human
uaaguuacaacagcaauuaaaaua

SEQ ID NO: 778785 - RNA, 24 nt, Human
uaauuuuuguauuuuuaguaaaga

SEQ ID NO: 778786 - RNA, 21 nt, Human
uacacacuggacugcagaacu

SEQ ID NO: 778787 - RNA, 23 nt, Human
uacaggcgugagccaccgcaccc

SEQ ID NO: 778788 - RNA, 23 nt, Human
uacaggcgugcgcuccaccacca

SEQ ID NO: 778789 - RNA, 18 nt, Human
uacauguucguauuuguc

SEQ ID NO: 778790 - RNA, 23 nt, Human
uacccacaaguuguauaguucca

SEQ ID NO: 778791 - RNA, 18 nt, Human
uaccuuuaauugugucua

SEQ ID NO: 778792 - RNA, 21 nt, Human
uacgacacugcaacagagccu

SEQ ID NO: 778793 - RNA, 21 nt, Human
uacgcuucccaaauaauccua

SEQ ID NO: 778794 - RNA, 22 nt, Human
uacuuuuuaacccccauccccc

SEQ ID NO: 778795 - RNA, 23 nt, Human
uagcccagcgcguacacgggcag

SEQ ID NO: 778796 - RNA, 24 nt, Human
uaguaaagaugggguuucuccaug

SEQ ID NO: 778797 - RNA, 22 nt, Human
uaguuccaugaaacaagcuaaa

SEQ ID NO: 778798 - RNA, 18 nt, Human
uauccugucuacucacuc

SEQ ID NO: 778799 - RNA, 19 nt, Human
uauccugucuacucacucc

SEQ ID NO: 778800 - RNA, 22 nt, Human
uaugugccugaaaaagaagggc

SEQ ID NO: 778801 - RNA, 20 nt, Human
uauuuacauggcauaguaua

SEQ ID NO: 778802 - RNA, 24 nt, Human
uauuuauuuuuugagacggagucu

SEQ ID NO: 778803 - RNA, 21 nt, Human
ucaagagugucugacaucgcu

SEQ ID NO: 778804 - RNA, 22 nt, Human
ucaagagugucugacaucgcug

SEQ ID NO: 778805 - RNA, 19 nt, Human
ucaagcaauucuccugccu

SEQ ID NO: 778806 - RNA, 21 nt, Human
ucaaugauaauauuggccaaa

SEQ ID NO: 778807 - RNA, 20 nt, Human
ucacgugaaauuaguugaac

SEQ ID NO: 778808 - RNA, 23 nt, Human
ucacugcaaccuccgccuccugg

SEQ ID NO: 778809 - RNA, 24 nt, Human
ucacugcaaccuccgccuccuggg

SEQ ID NO: 778810 - RNA, 25 nt, Human
ucacugcaaccuccgccuccugggu

SEQ ID NO: 778811 - RNA, 26 nt, Human
ucacugcaaccuccgccuccuggguu

SEQ ID NO: 778812 - RNA, 19 nt, Human
ucagauguaugggauguug

SEQ ID NO: 778813 - RNA, 23 nt, Human
ucagccucccgaguagcugggac

SEQ ID NO: 778814 - RNA, 20 nt, Human
ucagggcaggcacggugcug

SEQ ID NO: 778815 - RNA, 23 nt, Human
uccacagacacaagagcuaccgc

SEQ ID NO: 778816 - RNA, 24 nt, Human
uccacgcucagcacgcccccgggg

SEQ ID NO: 778817 - RNA, 24 nt, Human
uccauaaauaccauaguuaaaugu

SEQ ID NO: 778818 - RNA, 19 nt, Human
uccaugaaacaagcuaaaa

SEQ ID NO: 778819 - RNA, 24 nt, Human
ucccaaagugcugggauuacaggc

SEQ ID NO: 778820 - RNA, 24 nt, Human
ucccaauauuaaggucagucaugg

SEQ ID NO: 778821 - RNA, 24 nt, Human
ucccgaguagcugggacuacaggc

SEQ ID NO: 778822 - RNA, 18 nt, Human
ucccgggcggcucagccc

SEQ ID NO: 778823 - RNA, 24 nt, Human
uccgccuccuggguucaagcaauu

SEQ ID NO: 778824 - RNA, 19 nt, Human
uccuacuuuaaggcacagg

SEQ ID NO: 778825 - RNA, 21 nt, Human
uccuggagugcugaguguggc

SEQ ID NO: 778826 - RNA, 21 nt, Human
uccuggguucaagcaauucuc

SEQ ID NO: 778827 - RNA, 24 nt, Human
uccuggguucaagcaauucuccug

SEQ ID NO: 778828 - RNA, 20 nt, Human
ucgaugguggcuucacuccg

SEQ ID NO: 778829 - RNA, 18 nt, Human
ucggccucccaaagugcu

SEQ ID NO: 778830 - RNA, 23 nt, Human
ucucacucuguugcccaggcugg

SEQ ID NO: 778831 - RNA, 24 nt, Human
ucucacucuguugcccaggcugga

SEQ ID NO: 778832 - RNA, 26 nt, Human
ucucacucuguugcccaggcuggagu

SEQ ID NO: 778833 - RNA, 24 nt, Human
ucuccugccucagccucccgagua

SEQ ID NO: 778834 - RNA, 18 nt, Human
ucuguugcccaggcugga

SEQ ID NO: 778835 - RNA, 24 nt, Human
ucuguugcccaggcuggagugcag

SEQ ID NO: 778836 - RNA, 23 nt, Human
ucuugaacuccugaccucagguc

SEQ ID NO: 778837 - RNA, 24 nt, Human
ugacagaagacuuucaacagaccu

SEQ ID NO: 778838 - RNA, 18 nt, Human
ugaccucaggucauccgc

SEQ ID NO: 778839 - RNA, 20 nt, Human
ugaccucaggucauccgccc

SEQ ID NO: 778840 - RNA, 24 nt, Human
ugaccucaggucauccgcccgccu

SEQ ID NO: 778841 - RNA, 20 nt, Human
ugagaacuuuuugcugccaa

SEQ ID NO: 778842 - RNA, 19 nt, Human
ugagaggguguguuccggg

SEQ ID NO: 778843 - RNA, 24 nt, Human
ugagcagaguccacagacacaaga

SEQ ID NO: 778844 - RNA, 19 nt, Human
ugagccccagguagcccag

SEQ ID NO: 778845 - RNA, 19 nt, Human
ugaggaaaaguacaaggug

SEQ ID NO: 778846 - RNA, 24 nt, Human
ugagugcugcugcuuuauagauua

SEQ ID NO: 778847 - RNA, 23 nt, Human
ugcaacagagccucaccucacag

SEQ ID NO: 778848 - RNA, 25 nt, Human
ugcaauauccugucuacucacucca

SEQ ID NO: 778849 - RNA, 21 nt, Human
ugccaagaugaaaaugauuau

SEQ ID NO: 778850 - RNA, 18 nt, Human
ugcccaggcuggagugca

SEQ ID NO: 778851 - RNA, 21 nt, Human
ugcccaggcuggagugcagug

SEQ ID NO: 778852 - RNA, 24 nt, Human
ugcccaggcuggagugcaguggug

SEQ ID NO: 778853 - RNA, 24 nt, Human
ugccucagccucccgaguagcugg

SEQ ID NO: 778854 - RNA, 19 nt, Human
ugccucagggcaggcacgg

SEQ ID NO: 778855 - RNA, 25 nt, Human
ugccugaaaaagaagggccgaccuc

SEQ ID NO: 778856 - RNA, 23 nt, Human
ugcggcaaccacagaaaaaacac

SEQ ID NO: 778857 - RNA, 24 nt, Human
ugcugggauuacaggcgugagcca

SEQ ID NO: 778858 - RNA, 18 nt, Human
uggaaaaugaacccaggc

SEQ ID NO: 778859 - RNA, 23 nt, Human
uggaaaugguuuauaaagaggcu

SEQ ID NO: 778860 - RNA, 24 nt, Human
uggagagcuacgcugaagaggacg

SEQ ID NO: 778861 - RNA, 23 nt, Human
uggagugcaguggugcgaucuug

SEQ ID NO: 778862 - RNA, 24 nt, Human
uggagugcaguggugcgaucuugg

SEQ ID NO: 778863 - RNA, 21 nt, Human
uggagugcugaguguggccuc

SEQ ID NO: 778864 - RNA, 24 nt, Human
uggccaggcuggucuugaacuccu

SEQ ID NO: 778865 - RNA, 19 nt, Human
uggcugcugagaacagcag

SEQ ID NO: 778866 - RNA, 18 nt, Human
uggcuuggcucaagguag

SEQ ID NO: 778867 - RNA, 23 nt, Human
uggcuuggcucaagguagaaaag

SEQ ID NO: 778868 - RNA, 18 nt, Human
ugggaaaacauugaaaau

SEQ ID NO: 778869 - RNA, 18 nt, Human
ugggacuacaggcgugcg

SEQ ID NO: 778870 - RNA, 26 nt, Human
ugggacuacaggcgugcgcuccacca

SEQ ID NO: 778871 - RNA, 28 nt, Human
ugggacuacaggcgugcgcuccaccacc

SEQ ID NO: 778872 - RNA, 29 nt, Human
ugggacuacaggcgugcgcuccaccacca

SEQ ID NO: 778873 - RNA, 19 nt, Human
ugggauuacaggcgugagc

SEQ ID NO: 778874 - RNA, 21 nt, Human
ugggauuacaggcgugagcca

SEQ ID NO: 778875 - RNA, 22 nt, Human
ugggauuacaggcgugagccac

SEQ ID NO: 778876 - RNA, 23 nt, Human
ugggauuacaggcgugagccacc

SEQ ID NO: 778877 - RNA, 24 nt, Human
ugggauuacaggcgugagccaccg

SEQ ID NO: 778878 - RNA, 24 nt, Human
ugggguuucuccauguuggccagg

SEQ ID NO: 778879 - RNA, 25 nt, Human
uggguagacagccaccagccuuguu

SEQ ID NO: 778880 - RNA, 24 nt, Human
uggguagacgccacccgccccguc

SEQ ID NO: 778881 - RNA, 21 nt, Human
uggguucaagcaauucuccug

SEQ ID NO: 778882 - RNA, 23 nt, Human
uggguucaagcaauucuccugcc

SEQ ID NO: 778883 - RNA, 21 nt, Human
uggugguggccagugcacauc

SEQ ID NO: 778884 - RNA, 21 nt, Human
uguauuuuuaguaaagauggg

SEQ ID NO: 778885 - RNA, 24 nt, Human
ugugaagcuacagacuccauuaua

SEQ ID NO: 778886 - RNA, 21 nt, Human
ugugagaggguguguuccggg

SEQ ID NO: 778887 - RNA, 20 nt, Human
ugugugcauacauguucgua

SEQ ID NO: 778888 - RNA, 23 nt, Human
uuaaaauaaacauaagacacuuc

SEQ ID NO: 778889 - RNA, 21 nt, Human
uuacacacuggacugcagaac

SEQ ID NO: 778890 - RNA, 18 nt, Human
uuaguaaagaugggguuu

SEQ ID NO: 778891 - RNA, 24 nt, Human
uuaguaaagaugggguuucuccau

SEQ ID NO: 778892 - RNA, 21 nt, Human
uuauaaauugaaacaaaauca

SEQ ID NO: 778893 - RNA, 21 nt, Human
uucaagcaauucuccugccuc

SEQ ID NO: 778894 - RNA, 24 nt, Human
uucaagcaauucuccugccucagc

SEQ ID NO: 778895 - RNA, 19 nt, Human
uuccuuauaagcccuucaa

SEQ ID NO: 778896 - RNA, 24 nt, Human
uugcccaggcuggagugcaguggu

SEQ ID NO: 778897 - RNA, 23 nt, Human
uuguauuuuuaguaaagaugggg

SEQ ID NO: 778898 - RNA, 20 nt, Human
uuuacagacacacacagccu

SEQ ID NO: 778899 - RNA, 21 nt, Human
uuucuccauguuggccaggcu

SEQ ID NO: 778900 - RNA, 20 nt, Human
uuuucuuuucaaaaagaaac

SEQ ID NO: 778901 - RNA, 22 nt, Human
uuuuuaguaaagaugggguuuc

SEQ ID NO: 778902 - RNA, 20 nt, Human
uuuuuguauuuuuaguaaag

SEQ ID NO: 778903 - RNA, 23 nt, Human
uuuuuguauuuuuaguaaagaug

SEQ ID NO: 778904 - RNA, 19 nt, Human
aaaaagggucagaggcgcc

SEQ ID NO: 778905 - RNA, 21 nt, Human
aaaaguuuagaaauaaaugga

SEQ ID NO: 778906 - RNA, 25 nt, Human
aaauacugcccacuuaacugucccc

SEQ ID NO: 778907 - RNA, 18 nt, Human
aauauacauucauuuagc

SEQ ID NO: 778908 - RNA, 19 nt, Human
acaccauuuauuaaauagg

SEQ ID NO: 778909 - RNA, 24 nt, Human
accaggcgaauuccuagaccugcu

SEQ ID NO: 778910 - RNA, 19 nt, Human
acuaauuuacacucccacc

SEQ ID NO: 778911 - RNA, 19 nt, Human
acuacaguggguagacuag

SEQ ID NO: 778912 - RNA, 24 nt, Human
agaaaauacaaaaaggccugcagg

SEQ ID NO: 778913 - RNA, 20 nt, Human
agagguccuucacauuccuu

SEQ ID NO: 778914 - RNA, 24 nt, Human
agauucuggauauuggcccuuugu

SEQ ID NO: 778915 - RNA, 24 nt, Human
agcaauaauagcauucauuccaaa

SEQ ID NO: 778916 - RNA, 21 nt, Human
agggagcgggacgcagggggc

SEQ ID NO: 778917 - RNA, 24 nt, Human
agguauuuuauucucuuuguggca

SEQ ID NO: 778918 - RNA, 26 nt, Human
auccuauuucuccacauccucuccag

SEQ ID NO: 778919 - RNA, 21 nt, Human
auggaauguuuuccauuuguu

SEQ ID NO: 778920 - RNA, 26 nt, Human
auggcaauaaaaucaaauugugcaug

SEQ ID NO: 778921 - RNA, 21 nt, Human
auggcugcauaguauuccaug

SEQ ID NO: 778922 - RNA, 21 nt, Human
augguauugccuagguuuuuc

SEQ ID NO: 778923 - RNA, 24 nt, Human
augguauuucugguucuagauccu

SEQ ID NO: 778924 - RNA, 23 nt, Human
caaaaaucauuuaacucuugaau

SEQ ID NO: 778925 - RNA, 24 nt, Human
caaauaucaucuagccuccaauua

SEQ ID NO: 778926 - RNA, 18 nt, Human
caacaguguaaaagcauc

SEQ ID NO: 778927 - RNA, 19 nt, Human
caauucaaauggggcugaa

SEQ ID NO: 778928 - RNA, 24 nt, Human
cacucugaugauaguuucuuuugc

SEQ ID NO: 778929 - RNA, 19 nt, Human
cacuugggaauuaaaaaaa

SEQ ID NO: 778930 - RNA, 19 nt, Human
cagauaagcaauaauagca

SEQ ID NO: 778931 - RNA, 22 nt, Human
cagaucuguacauccauucugc

SEQ ID NO: 778932 - RNA, 19 nt, Human
cagcaucuguuguuuccug

SEQ ID NO: 778933 - RNA, 24 nt, Human
cagcgacuucuccacauaaggccc

SEQ ID NO: 778934 - RNA, 21 nt, Human
caguuucaguuuucugcauau

SEQ ID NO: 778935 - RNA, 23 nt, Human
cauaucagguguucaaugacacc

SEQ ID NO: 778936 - RNA, 22 nt, Human
caucaacccgucaucuacauua

SEQ ID NO: 778937 - RNA, 21 nt, Human
caucuguuguuuccugucuuu

SEQ ID NO: 778938 - RNA, 27 nt, Human
ccaacaccauuuauuaaauagggaauc

SEQ ID NO: 778939 - RNA, 18 nt, Human
ccacauuuucuuuauuca

SEQ ID NO: 778940 - RNA, 20 nt, Human
cccagcucaggaaaugaggc

SEQ ID NO: 778941 - RNA, 21 nt, Human
ccccacgcccugacaggcccu

SEQ ID NO: 778942 - RNA, 18 nt, Human
cccuggaaggcauaaaac

SEQ ID NO: 778943 - RNA, 24 nt, Human
cgucgccgcgauauaaaaaaaggg

SEQ ID NO: 778944 - RNA, 19 nt, Human
cuagauagaaaagagagaa

SEQ ID NO: 778945 - RNA, 21 nt, Human
cucuccagcaucuguuguuuc

SEQ ID NO: 778946 - RNA, 24 nt, Human
cugcaauggaaaccguggcaaucc

SEQ ID NO: 778947 - RNA, 18 nt, Human
cugcagguaagcagggca

SEQ ID NO: 778948 - RNA, 18 nt, Human
cuuaaaaguugauagaau

SEQ ID NO: 778949 - RNA, 24 nt, Human
cuuccgcagugguugaacuaauuu

SEQ ID NO: 778950 - RNA, 20 nt, Human
cuugauggggauagcacuga

SEQ ID NO: 778951 - RNA, 18 nt, Human
cuuuccccauuucuuguu

SEQ ID NO: 778952 - RNA, 21 nt, Human
cuuugcacacuuuuugauggg

SEQ ID NO: 778953 - RNA, 18 nt, Human
gacauuucaggcuucccg

SEQ ID NO: 778954 - RNA, 19 nt, Human
gaugauaguuucuuuugcu

SEQ ID NO: 778955 - RNA, 21 nt, Human
gauucuggauauuggcccuuu

SEQ ID NO: 778956 - RNA, 21 nt, Human
gcacacuuuuugaugggguuu

SEQ ID NO: 778957 - RNA, 23 nt, Human
gcagggcacugugggagacacca

SEQ ID NO: 778958 - RNA, 19 nt, Human
gcccugacaggcccuggug

SEQ ID NO: 778959 - RNA, 18 nt, Human
gcgauauaaaaaaagggu

SEQ ID NO: 778960 - RNA, 24 nt, Human
ggaauccuuuccccauuucuuguu

SEQ ID NO: 778961 - RNA, 21 nt, Human
ggacaugaacucauccuuuuu

SEQ ID NO: 778962 - RNA, 19 nt, Human
ggcugcauaguauuccaug

SEQ ID NO: 778963 - RNA, 19 nt, Human
ggucagaggcgccacggcu

SEQ ID NO: 778964 - RNA, 21 nt, Human
ggucagaggcgccacggcugc

SEQ ID NO: 778965 - RNA, 25 nt, Human
ggugugacaugguaucucacuguag

SEQ ID NO: 778966 - RNA, 18 nt, Human
gguuacuguagccuugua

SEQ ID NO: 778967 - RNA, 23 nt, Human
guaguauaguuugaagucaggua

SEQ ID NO: 778968 - RNA, 24 nt, Human
guaguuuugauuugcauuucucug

SEQ ID NO: 778969 - RNA, 18 nt, Human
gugugcaugugucucuau

SEQ ID NO: 778970 - RNA, 20 nt, Human
gugugcaugugucucuauag

SEQ ID NO: 778971 - RNA, 20 nt, Human
guuccuguucacucugauga

SEQ ID NO: 778972 - RNA, 18 nt, Human
uaaaaaaagggucagagg

SEQ ID NO: 778973 - RNA, 22 nt, Human
uaaaaucaaauugugcaugcca

SEQ ID NO: 778974 - RNA, 22 nt, Human
uaaauaauucuuaauacucuca

SEQ ID NO: 778975 - RNA, 21 nt, Human
uaaaugucuucucuugagaag

SEQ ID NO: 778976 - RNA, 19 nt, Human
uaaugugaacauuuucuua

SEQ ID NO: 778977 - RNA, 22 nt, Human
uacaaaaaggccugcagguaag

SEQ ID NO: 778978 - RNA, 21 nt, Human
uacauguacagaacguacagg

SEQ ID NO: 778979 - RNA, 21 nt, Human
uagauucuggauauuggcccu

SEQ ID NO: 778980 - RNA, 19 nt, Human
uagcagcaugauuuauagu

SEQ ID NO: 778981 - RNA, 19 nt, Human
uaggaaggaaggcaaggga

SEQ ID NO: 778982 - RNA, 25 nt, Human
uaggguagaauauaaaaugucaaug

SEQ ID NO: 778983 - RNA, 21 nt, Human
uauaauauacauucauuuagc

SEQ ID NO: 778984 - RNA, 26 nt, Human
uaucagaaagucaaauggugaguuaa

SEQ ID NO: 778985 - RNA, 19 nt, Human
uaucagguuuaacaaaaca

SEQ ID NO: 778986 - RNA, 19 nt, Human
uaucccuccccuagccccc

SEQ ID NO: 778987 - RNA, 24 nt, Human
uauugugaauagugccacaauaaa

SEQ ID NO: 778988 - RNA, 21 nt, Human
ucaaauggugaguuaaaaaaa

SEQ ID NO: 778989 - RNA, 21 nt, Human
ucacauuccuuguaauuugga

SEQ ID NO: 778990 - RNA, 22 nt, Human
uccaguuucaguuuucugccac

SEQ ID NO: 778991 - RNA, 22 nt, Human
uccccauuucuuguuuuucuca

SEQ ID NO: 778992 - RNA, 20 nt, Human
ucccugcaaaggacaugaac

SEQ ID NO: 778993 - RNA, 24 nt, Human
uccgcagugguugaacuaauuuac

SEQ ID NO: 778994 - RNA, 22 nt, Human
uccuaaguaggugaguucacug

SEQ ID NO: 778995 - RNA, 20 nt, Human
uccuuaagcagugguuugua

SEQ ID NO: 778996 - RNA, 24 nt, Human
ucuaauguuaucccuccccuagcc

SEQ ID NO: 778997 - RNA, 25 nt, Human
ucucugaaugaccagugaugagcuu

SEQ ID NO: 778998 - RNA, 19 nt, Human
ucuucauauuacacugguu

SEQ ID NO: 778999 - RNA, 23 nt, Human
ucuuugcuauugugaauagugcc

SEQ ID NO: 779000 - RNA, 18 nt, Human
ucuuuuuaaugaucacca

SEQ ID NO: 779001 - RNA, 19 nt, Human
ugaaguauucguccaugcc

SEQ ID NO: 779002 - RNA, 22 nt, Human
ugaagucagguagcgugaugcc

SEQ ID NO: 779003 - RNA, 20 nt, Human
ugacaugguaucucacugua

SEQ ID NO: 779004 - RNA, 24 nt, Human
ugacaugguaucucacuguaguuu

SEQ ID NO: 779005 - RNA, 24 nt, Human
ugaccagugaugagcuuuuuuuca

SEQ ID NO: 779006 - RNA, 24 nt, Human
ugagaaugaugguuuccagcuuca

SEQ ID NO: 779007 - RNA, 24 nt, Human
ugagugagaacaugcgguguuugg

SEQ ID NO: 779008 - RNA, 20 nt, Human
ugaguuaaaaaaaaguuuaa

SEQ ID NO: 779009 - RNA, 22 nt, Human
ugaguucacugacaaugcuuua

SEQ ID NO: 779010 - RNA, 22 nt, Human
ugauaguuucuuuugcugugca

SEQ ID NO: 779011 - RNA, 23 nt, Human
uggaaaccguggcaauccuucuu

SEQ ID NO: 779012 - RNA, 20 nt, Human
uggaaggcauaaaacacaca

SEQ ID NO: 779013 - RNA, 21 nt, Human
uggaaggcauaaaacacacaa

SEQ ID NO: 779014 - RNA, 27 nt, Human
uggacagaaaauacaaaaaggccugca

SEQ ID NO: 779015 - RNA, 19 nt, Human
uggcaauaaaaucaaauug

SEQ ID NO: 779016 - RNA, 19 nt, Human
uggcuagccaguuuuccca

SEQ ID NO: 779017 - RNA, 24 nt, Human
uggcuccaagucuuugcuauugug

SEQ ID NO: 779018 - RNA, 19 nt, Human
ugguguaugugccacauuu

SEQ ID NO: 779019 - RNA, 20 nt, Human
uggugugugauguucccugc

SEQ ID NO: 779020 - RNA, 22 nt, Human
uguaaggaagggauccaguuuc

SEQ ID NO: 779021 - RNA, 23 nt, Human
uguacauccauucugcaccaccc

SEQ ID NO: 779022 - RNA, 20 nt, Human
uguaugugccacauuuucuu

SEQ ID NO: 779023 - RNA, 20 nt, Human
ugucuugguuaugugagcuc

SEQ ID NO: 779024 - RNA, 20 nt, Human
ugugaagaaagucaauggua

SEQ ID NO: 779025 - RNA, 22 nt, Human
uguucaaugacaccugauaccu

SEQ ID NO: 779026 - RNA, 24 nt, Human
uguuugguuuucuguucuuguguu

SEQ ID NO: 779027 - RNA, 21 nt, Human
uuacauagguauacacguggu

SEQ ID NO: 779028 - RNA, 24 nt, Human
uuaugagugagaacaugcgguguu

SEQ ID NO: 779029 - RNA, 23 nt, Human
uucacugacaaugcuuuagauaa

SEQ ID NO: 779030 - RNA, 18 nt, Human
uuccaugguguaugugcc

SEQ ID NO: 779031 - RNA, 20 nt, Human
uuccugauguugugcuuucu

SEQ ID NO: 779032 - RNA, 24 nt, Human
uucuuuguagauucuggauauugg

SEQ ID NO: 779033 - RNA, 18 nt, Human
uugaugggguuuuuuuuc

SEQ ID NO: 779034 - RNA, 21 nt, Human
uugccuagguuuuccucuagg

SEQ ID NO: 779035 - RNA, 24 nt, Human
uuggacagaaaauacaaaaaggcc

SEQ ID NO: 779036 - RNA, 23 nt, Human
uuuacacucccaccaacagugua

SEQ ID NO: 779037 - RNA, 21 nt, Human
uuuacauccuucauaucaggu

SEQ ID NO: 779038 - RNA, 19 nt, Human
uuuccagcuucauccaugu

SEQ ID NO: 779039 - RNA, 23 nt, Human
uuucuaauguuaucccuccccua

SEQ ID NO: 779040 - RNA, 20 nt, Human
uuucugguucuagauccuug

SEQ ID NO: 779041 - RNA, 19 nt, Human
uuucuuguuuuucucaggu

SEQ ID NO: 779042 - RNA, 18 nt, Human
uuugcacacuuuuugaug

SEQ ID NO: 779043 - RNA, 20 nt, Human
uuuggcaccaguaccaugcu

SEQ ID NO: 779044 - RNA, 22 nt, Human
uuuuccauuuguuuguguccuc

SEQ ID NO: 779045 - RNA, 24 nt, Human
aaacucagcaagcuuguccacaga

SEQ ID NO: 779046 - RNA, 19 nt, Human
aacuaaugggcuggugugu

SEQ ID NO: 779047 - RNA, 18 nt, Human
aacucacuucagcaacaa

SEQ ID NO: 779048 - RNA, 21 nt, Human
aacuguugaaaaccugcaacu

SEQ ID NO: 779049 - RNA, 20 nt, Human
aagaugccaugcuuccauga

SEQ ID NO: 779050 - RNA, 24 nt, Human
aaggaucaugaaacagaaacauua

SEQ ID NO: 779051 - RNA, 18 nt, Human
aaucaccaaacccuccac

SEQ ID NO: 779052 - RNA, 20 nt, Human
aauccuaaaacugaaacuaa

SEQ ID NO: 779053 - RNA, 22 nt, Human
acaacaaugaaaguacaauagc

SEQ ID NO: 779054 - RNA, 23 nt, Human
acaacucuagccuuaaccuuaac

SEQ ID NO: 779055 - RNA, 20 nt, Human
acagacacauccaaagccaa

SEQ ID NO: 779056 - RNA, 19 nt, Human
acagcagcaucaugacccc

SEQ ID NO: 779057 - RNA, 25 nt, Human
acaggggaaagaccccauaaccaaa

SEQ ID NO: 779058 - RNA, 20 nt, Human
acauccaaagccaaaaugca

SEQ ID NO: 779059 - RNA, 24 nt, Human
acccuuaaagacaacucuagccuu

SEQ ID NO: 779060 - RNA, 21 nt, Human
acccuuacccuuuuccucaaa

SEQ ID NO: 779061 - RNA, 23 nt, Human
agaaagcucugaauauacuacga

SEQ ID NO: 779062 - RNA, 21 nt, Human
agaacuuacaauuuaaugcua

SEQ ID NO: 779063 - RNA, 18 nt, Human
agacacauccaaagccaa

SEQ ID NO: 779064 - RNA, 19 nt, Human
aggaagucauggguugcug

SEQ ID NO: 779065 - RNA, 19 nt, Human
agugcaguggcaugcaugc

SEQ ID NO: 779066 - RNA, 23 nt, Human
auaaauuucuguaguuguauaaa

SEQ ID NO: 779067 - RNA, 23 nt, Human
auccauucccaaucaccaaaccc

SEQ ID NO: 779068 - RNA, 19 nt, Human
augaaacagaaacauuaac

SEQ ID NO: 779069 - RNA, 24 nt, Human
auggguguucuaaaagcaaggaca

SEQ ID NO: 779070 - RNA, 22 nt, Human
caaaccuaaccuccauccugac

SEQ ID NO: 779071 - RNA, 23 nt, Human
caacaccucgugcggaauccggc

SEQ ID NO: 779072 - RNA, 19 nt, Human
caacgcuuacuccaaaccu

SEQ ID NO: 779073 - RNA, 19 nt, Human
cacagacacauccaaagcc

SEQ ID NO: 779074 - RNA, 23 nt, Human
cacagacacauccaaagccaaaa

SEQ ID NO: 779075 - RNA, 18 nt, Human
caccagcacuggccccaa

SEQ ID NO: 779076 - RNA, 18 nt, Human
caccaggaccuuccccga

SEQ ID NO: 779077 - RNA, 22 nt, Human
cagaacuuacaauuuaaugcua

SEQ ID NO: 779078 - RNA, 19 nt, Human
cagaagccgcccgucaaca

SEQ ID NO: 779079 - RNA, 20 nt, Human
cagcgacauggggaaaagag

SEQ ID NO: 779080 - RNA, 20 nt, Human
caguggcaugcaugcuauag

SEQ ID NO: 779081 - RNA, 19 nt, Human
caucuaaagacacaacuuu

SEQ ID NO: 779082 - RNA, 24 nt, Human
ccaacaucuuaacaacuacuggcc

SEQ ID NO: 779083 - RNA, 26 nt, Human
ccaacccugaccuaaccugguccuaa

SEQ ID NO: 779084 - RNA, 19 nt, Human
ccacagacacauccaaagc

SEQ ID NO: 779085 - RNA, 19 nt, Human
cccaauccaacccugaccu

SEQ ID NO: 779086 - RNA, 25 nt, Human
cccauaaccaaaucagcuucagaac

SEQ ID NO: 779087 - RNA, 20 nt, Human
ccccggggccgcgcgggcuc

SEQ ID NO: 779088 - RNA, 20 nt, Human
cccgacgccggccuccagcc

SEQ ID NO: 779089 - RNA, 21 nt, Human
cccgcggcgccgcagucgccg

SEQ ID NO: 779090 - RNA, 24 nt, Human
cccuccacauacaguagugcucaa

SEQ ID NO: 779091 - RNA, 19 nt, Human
ccgggucucaguuguagcc

SEQ ID NO: 779092 - RNA, 23 nt, Human
ccuaacccuaacccuuaaagaca

SEQ ID NO: 779093 - RNA, 19 nt, Human
ccuccagcccgcggcgccg

SEQ ID NO: 779094 - RNA, 22 nt, Human
ccuccauccugacacuaucacu

SEQ ID NO: 779095 - RNA, 21 nt, Human
ccugaacucacuucagcaaca

SEQ ID NO: 779096 - RNA, 28 nt, Human
ccugaccuaaccugguccuaacccuaac

SEQ ID NO: 779097 - RNA, 26 nt, Human
ccugguccuaacccuaacccuuaaag

SEQ ID NO: 779098 - RNA, 23 nt, Human
cgccgcagucgccgccgccgccg

SEQ ID NO: 779099 - RNA, 20 nt, Human
cuaaaacugaaacuaacccu

SEQ ID NO: 779100 - RNA, 22 nt, Human
cuaaacccaauccaacccugac

SEQ ID NO: 779101 - RNA, 18 nt, Human
cuaaagacacaacuggua

SEQ ID NO: 779102 - RNA, 19 nt, Human
cuaacaccagcacuggccc

SEQ ID NO: 779103 - RNA, 23 nt, Human
cuaauccuaaaacugaaacuaac

SEQ ID NO: 779104 - RNA, 22 nt, Human
cuaaugggcugguguguccucc

SEQ ID NO: 779105 - RNA, 24 nt, Human
cucacugucccccauccauuccca

SEQ ID NO: 779106 - RNA, 22 nt, Human
cuccucacugucccccauccau

SEQ ID NO: 779107 - RNA, 18 nt, Human
cugaacucacuucagcaa

SEQ ID NO: 779108 - RNA, 22 nt, Human
cugaacucacuucagcaacaac

SEQ ID NO: 779109 - RNA, 22 nt, Human
cugguccuaacccuaacccuua

SEQ ID NO: 779110 - RNA, 20 nt, Human
cuuucccucuucuuugacuu

SEQ ID NO: 779111 - RNA, 20 nt, Human
gacacauccaaagccaaaaa

SEQ ID NO: 779112 - RNA, 27 nt, Human
gauuacuuucuuauaaauuuuccaaaa

SEQ ID NO: 779113 - RNA, 18 nt, Human
gccccggggccgcgcggg

SEQ ID NO: 779114 - RNA, 24 nt, Human
gcuauaguauuuuguucauccuug

SEQ ID NO: 779115 - RNA, 27 nt, Human
gguagagaaacucagcaagcuugucca

SEQ ID NO: 779116 - RNA, 19 nt, Human
gucauggguugcuguguuu

SEQ ID NO: 779117 - RNA, 22 nt, Human
guccacagacacauccaaagcc

SEQ ID NO: 779118 - RNA, 27 nt, Human
uaaacuaaauucugauuccaaccccug

SEQ ID NO: 779119 - RNA, 19 nt, Human
uaaagacaacucuagccuu

SEQ ID NO: 779120 - RNA, 22 nt, Human
uaacccuaacccuuaaagacaa

SEQ ID NO: 779121 - RNA, 18 nt, Human
uaaccuccauccugacac

SEQ ID NO: 779122 - RNA, 21 nt, Human
uaaccuccauccugacacuau

SEQ ID NO: 779123 - RNA, 24 nt, Human
uaaggaucaugaaacagaaacauu

SEQ ID NO: 779124 - RNA, 20 nt, Human
uaaugccaacaucuuaacaa

SEQ ID NO: 779125 - RNA, 18 nt, Human
uaccacucugugcuaguc

SEQ ID NO: 779126 - RNA, 22 nt, Human
uacccuuuuccucaaaucuuaa

SEQ ID NO: 779127 - RNA, 22 nt, Human
uacucuguguuuucuuccaugg

SEQ ID NO: 779128 - RNA, 21 nt, Human
uaggauguaccacucugugcu

SEQ ID NO: 779129 - RNA, 24 nt, Human
uauacaggggaaagaccccauaac

SEQ ID NO: 779130 - RNA, 22 nt, Human
uaucacuaacaccagcacuggc

SEQ ID NO: 779131 - RNA, 18 nt, Human
ucauggguugcuguguuu

SEQ ID NO: 779132 - RNA, 23 nt, Human
uccacagacacauccaaagccaa

SEQ ID NO: 779133 - RNA, 19 nt, Human
uccauagaaucuagucuuu

SEQ ID NO: 779134 - RNA, 18 nt, Human
uccccgacgccggccucc

SEQ ID NO: 779135 - RNA, 23 nt, Human
uccccgacgccggccuccagccc

SEQ ID NO: 779136 - RNA, 20 nt, Human
ucgccgccgccgccgcgaag

SEQ ID NO: 779137 - RNA, 23 nt, Human
ucuguguuuucuuccaugggugu

SEQ ID NO: 779138 - RNA, 19 nt, Human
ugaaaaaucagcccaaaac

SEQ ID NO: 779139 - RNA, 19 nt, Human
ugaaacagaaacauuaacu

SEQ ID NO: 779140 - RNA, 20 nt, Human
ugacaacaaugaaaguacaa

SEQ ID NO: 779141 - RNA, 22 nt, Human
ugaccaggaacuaggcucagca

SEQ ID NO: 779142 - RNA, 18 nt, Human
ugauugaugauuaacaac

SEQ ID NO: 779143 - RNA, 20 nt, Human
ugcaaauaccuuauaaaacu

SEQ ID NO: 779144 - RNA, 21 nt, Human
ugcacuguucaguuauuacug

SEQ ID NO: 779145 - RNA, 20 nt, Human
ugccacugaauaaucaaagu

SEQ ID NO: 779146 - RNA, 19 nt, Human
ugccaugcuuccaugaacc

SEQ ID NO: 779147 - RNA, 25 nt, Human
ugcuuccaugaacccuuaggucagu

SEQ ID NO: 779148 - RNA, 20 nt, Human
uggccccaaucuaaacccaa

SEQ ID NO: 779149 - RNA, 24 nt, Human
ugguguuuuugcaucaaccucugu

SEQ ID NO: 779150 - RNA, 18 nt, Human
uguacaggcagcugagac

SEQ ID NO: 779151 - RNA, 20 nt, Human
uguauaaaugacagcaauau

SEQ ID NO: 779152 - RNA, 20 nt, Human
uguccuccucacuguccccc

SEQ ID NO: 779153 - RNA, 22 nt, Human
uguugccaagaagauguagggg

SEQ ID NO: 779154 - RNA, 23 nt, Human
uuauuacugaccaggaacuaggc

SEQ ID NO: 779155 - RNA, 20 nt, Human
uucacagacuaaaccaagga

SEQ ID NO: 779156 - RNA, 20 nt, Human
uucagaacuuacaauuuaau

SEQ ID NO: 779157 - RNA, 21 nt, Human
uucagcaacaacgcuuacucc

SEQ ID NO: 779158 - RNA, 24 nt, Human
uucagcaacaacgcuuacuccaaa

SEQ ID NO: 779159 - RNA, 22 nt, Human
uuccccgacgccggccuccagc

SEQ ID NO: 779160 - RNA, 20 nt, Human
uucccucuucuuugacuucc

SEQ ID NO: 779161 - RNA, 24 nt, Human
uugaaugacaacaaugaaaguaca

SEQ ID NO: 779162 - RNA, 24 nt, Human
uuggugauuucucgauucaacuga

SEQ ID NO: 779163 - RNA, 20 nt, Human
uuuacaccuuaacaguggug

SEQ ID NO: 779164 - RNA, 19 nt, Human
aaaaaguuauuucuucagc

SEQ ID NO: 779165 - RNA, 22 nt, Human
aaaacacucuuaauccacucca

SEQ ID NO: 779166 - RNA, 27 nt, Human
aaacagauccaaaaggaaaccucccac

SEQ ID NO: 779167 - RNA, 22 nt, Human
aacagauccaaaaggaaaccuc

SEQ ID NO: 779168 - RNA, 18 nt, Human
aacagcuuugagugguug

SEQ ID NO: 779169 - RNA, 23 nt, Human
aaccggaagucuucaguucuccc

SEQ ID NO: 779170 - RNA, 24 nt, Human
aaccugccuauucagcccaucccu

SEQ ID NO: 779171 - RNA, 25 nt, Human
aagaagcauuguuggaacucacagg

SEQ ID NO: 779172 - RNA, 21 nt, Human
aagaagccuagucugugggcc

SEQ ID NO: 779173 - RNA, 21 nt, Human
aagccaguauuuugcugcaaa

SEQ ID NO: 779174 - RNA, 21 nt, Human
aauggcaauaagacccucugg

SEQ ID NO: 779175 - RNA, 21 nt, Human
acagucucaaaacagauccaa

SEQ ID NO: 779176 - RNA, 21 nt, Human
acauccaccugucuccuccac

SEQ ID NO: 779177 - RNA, 22 nt, Human
acaugugucaccuugacuuaaa

SEQ ID NO: 779178 - RNA, 22 nt, Human
accaggucccugcacugaaguc

SEQ ID NO: 779179 - RNA, 23 nt, Human
accuugacuuaaaaaacacauug

SEQ ID NO: 779180 - RNA, 21 nt, Human
acuaaaaugcaccuccccuga

SEQ ID NO: 779181 - RNA, 22 nt, Human
acuucagugguacgcucauccu

SEQ ID NO: 779182 - RNA, 23 nt, Human
agacaugcuuuacucaugucccc

SEQ ID NO: 779183 - RNA, 18 nt, Human
agauccaaaaggaaaccu

SEQ ID NO: 779184 - RNA, 24 nt, Human
agauucuggguacaaagugcugca

SEQ ID NO: 779185 - RNA, 21 nt, Human
agcccuuucucucuugcccuu

SEQ ID NO: 779186 - RNA, 22 nt, Human
agccgaauaaacagcuuugagu

SEQ ID NO: 779187 - RNA, 20 nt, Human
agcuaggaaccccgugcagg

SEQ ID NO: 779188 - RNA, 19 nt, Human
agcugaagucuucuggcuc

SEQ ID NO: 779189 - RNA, 19 nt, Human
agcugcaggagcucagaac

SEQ ID NO: 779190 - RNA, 19 nt, Human
agcugggggagucaggcgg

SEQ ID NO: 779191 - RNA, 23 nt, Human
aggaagccuucuuucuggaacag

SEQ ID NO: 779192 - RNA, 22 nt, Human
aggaauccacacagcuucccaa

SEQ ID NO: 779193 - RNA, 20 nt, Human
aggcauaauaaauaagauga

SEQ ID NO: 779194 - RNA, 18 nt, Human
aggggugugccaggacag

SEQ ID NO: 779195 - RNA, 23 nt, Human
agguuguuugugagacagaaagu

SEQ ID NO: 779196 - RNA, 18 nt, Human
agguuucuguaccugaga

SEQ ID NO: 779197 - RNA, 22 nt, Human
auaagacccucuggagcuuaaa

SEQ ID NO: 779198 - RNA, 18 nt, Human
auccaccugucuccucca

SEQ ID NO: 779199 - RNA, 24 nt, Human
auccacuccauacggaagaaaccc

SEQ ID NO: 779200 - RNA, 18 nt, Human
caaaaggaaaccucccac

SEQ ID NO: 779201 - RNA, 21 nt, Human
caaauccugggcgcagccucc

SEQ ID NO: 779202 - RNA, 23 nt, Human
caauuuaacuacuaaaaugcacc

SEQ ID NO: 779203 - RNA, 20 nt, Human
cacacaccccaggugcaggg

SEQ ID NO: 779204 - RNA, 23 nt, Human
cacacagaugccccugcgcccgg

SEQ ID NO: 779205 - RNA, 19 nt, Human
cacacagcuucccaaagca

SEQ ID NO: 779206 - RNA, 20 nt, Human
cacacagcuucccaaagcac

SEQ ID NO: 779207 - RNA, 19 nt, Human
cacagcugcggguucuggg

SEQ ID NO: 779208 - RNA, 21 nt, Human
cacccccaaacgccuccugga

SEQ ID NO: 779209 - RNA, 21 nt, Human
cacgugaaucacacaccccag

SEQ ID NO: 779210 - RNA, 19 nt, Human
cagaggucccaggugacug

SEQ ID NO: 779211 - RNA, 21 nt, Human
caggacagggguagaagauga

SEQ ID NO: 779212 - RNA, 20 nt, Human
caggacccacaucacaggca

SEQ ID NO: 779213 - RNA, 23 nt, Human
cagggccaaggauuauguaagaa

SEQ ID NO: 779214 - RNA, 22 nt, Human
caggugcaggggcugacaugga

SEQ ID NO: 779215 - RNA, 24 nt, Human
cauccgccuaaagaaacagacucc

SEQ ID NO: 779216 - RNA, 20 nt, Human
ccaaaaggaaaccucccacc

SEQ ID NO: 779217 - RNA, 23 nt, Human
ccaaaaggaaaccucccacccaa

SEQ ID NO: 779218 - RNA, 19 nt, Human
ccacuguggucacgccccg

SEQ ID NO: 779219 - RNA, 22 nt, Human
ccagccacccuucccugcugca

SEQ ID NO: 779220 - RNA, 21 nt, Human
ccaggacaguaaggcaggggg

SEQ ID NO: 779221 - RNA, 19 nt, Human
cccaagauuucaaaaaggc

SEQ ID NO: 779222 - RNA, 22 nt, Human
cccacagcugcggguucugggg

SEQ ID NO: 779223 - RNA, 22 nt, Human
cccacaucacaggcauaauaaa

SEQ ID NO: 779224 - RNA, 18 nt, Human
cccacauucacguucaca

SEQ ID NO: 779225 - RNA, 23 nt, Human
cccacccaauuuacuaaagugca

SEQ ID NO: 779226 - RNA, 23 nt, Human
cccacccccaaacgccuccugga

SEQ ID NO: 779227 - RNA, 25 nt, Human
ccccacccccaaacgccuccuggaa

SEQ ID NO: 779228 - RNA, 23 nt, Human
ccccuuccucucaccuuccccca

SEQ ID NO: 779229 - RNA, 18 nt, Human
cccugcgcccggcuccuc

SEQ ID NO: 779230 - RNA, 21 nt, Human
ccgaauaaacagcuuugagug

SEQ ID NO: 779231 - RNA, 23 nt, Human
ccuacauggcucuucccacagcu

SEQ ID NO: 779232 - RNA, 18 nt, Human
ccuccuuuuuuucucagu

SEQ ID NO: 779233 - RNA, 20 nt, Human
ccuuagagccucaugcucug

SEQ ID NO: 779234 - RNA, 23 nt, Human
ccuugcccagagccuggucaugg

SEQ ID NO: 779235 - RNA, 18 nt, Human
cgaagggaaaaccagguc

SEQ ID NO: 779236 - RNA, 20 nt, Human
cgcagcugccucuggccucc

SEQ ID NO: 779237 - RNA, 19 nt, Human
cggugccucacacauuucc

SEQ ID NO: 779238 - RNA, 19 nt, Human
cuaaccacauccagcugca

SEQ ID NO: 779239 - RNA, 21 nt, Human
cucaaaacagauccaaaagga

SEQ ID NO: 779240 - RNA, 19 nt, Human
cucaaccuugugggugccu

SEQ ID NO: 779241 - RNA, 21 nt, Human
cucuggagcuuaaaccaaacc

SEQ ID NO: 779242 - RNA, 21 nt, Human
cuggcucaaggggcagaggaa

SEQ ID NO: 779243 - RNA, 18 nt, Human
cuugaagaaacaaccaug

SEQ ID NO: 779244 - RNA, 24 nt, Human
gaaaaagugagauuuaacugcaaa

SEQ ID NO: 779245 - RNA, 21 nt, Human
gaagaaacaaccaugcccggg

SEQ ID NO: 779246 - RNA, 24 nt, Human
gaaguauaaccacguuucuggagg

SEQ ID NO: 779247 - RNA, 18 nt, Human
gaccaugggacacaggag

SEQ ID NO: 779248 - RNA, 18 nt, Human
gacugugugaccucaacc

SEQ ID NO: 779249 - RNA, 20 nt, Human
gagccuccagcuaaaaccaa

SEQ ID NO: 779250 - RNA, 21 nt, Human
gagccuggucaugguaggagc

SEQ ID NO: 779251 - RNA, 18 nt, Human
gagcucagaacucuccag

SEQ ID NO: 779252 - RNA, 24 nt, Human
gaggagccuugcccagagccuggu

SEQ ID NO: 779253 - RNA, 20 nt, Human
gaugcaggaaaucuaaccug

SEQ ID NO: 779254 - RNA, 20 nt, Human
gauggugaggggugugccag

SEQ ID NO: 779255 - RNA, 25 nt, Human
gcaaagagauuuuaaaaaaaaaucu

SEQ ID NO: 779256 - RNA, 19 nt, Human
gccugcugagccuccagcu

SEQ ID NO: 779257 - RNA, 21 nt, Human
gcucagagcaaugagucccuc

SEQ ID NO: 779258 - RNA, 20 nt, Human
gcugcggaaggagccaagaa

SEQ ID NO: 779259 - RNA, 18 nt, Human
gcugggggagucaggcgg

SEQ ID NO: 779260 - RNA, 18 nt, Human
gcuuguuugaaaaaguga

SEQ ID NO: 779261 - RNA, 22 nt, Human
ggacagggguagaagaugacug

SEQ ID NO: 779262 - RNA, 19 nt, Human
ggauuauauuuagaggacc

SEQ ID NO: 779263 - RNA, 19 nt, Human
ggcuacagugggcagagua

SEQ ID NO: 779264 - RNA, 24 nt, Human
gggcuacagugggcagaguagcug

SEQ ID NO: 779265 - RNA, 21 nt, Human
gguccucugagcagagguccc

SEQ ID NO: 779266 - RNA, 23 nt, Human
ggugugcauccaggccucuucug

SEQ ID NO: 779267 - RNA, 23 nt, Human
gucccaggccccaggcugggccc

SEQ ID NO: 779268 - RNA, 26 nt, Human
gugacgggacacacagaugccccugc

SEQ ID NO: 779269 - RNA, 20 nt, Human
guggaacuuccuucccgaag

SEQ ID NO: 779270 - RNA, 19 nt, Human
guuugacauuucuccucca

SEQ ID NO: 779271 - RNA, 25 nt, Human
uaaaaaaauaacuuaucuuuaaagc

SEQ ID NO: 779272 - RNA, 20 nt, Human
uaacuacuaaaaugcaccuc

SEQ ID NO: 779273 - RNA, 18 nt, Human
uacuggaugucucccugg

SEQ ID NO: 779274 - RNA, 23 nt, Human
uacuggcccacauucacguucac

SEQ ID NO: 779275 - RNA, 23 nt, Human
uauucagcccaucccucuaacca

SEQ ID NO: 779276 - RNA, 21 nt, Human
ucacuaauuugguuacuucuu

SEQ ID NO: 779277 - RNA, 19 nt, Human
ucacugggucacagacaug

SEQ ID NO: 779278 - RNA, 25 nt, Human
ucagcccaucccucuaaccacaucc

SEQ ID NO: 779279 - RNA, 21 nt, Human
ucaggcggacaaggguuucag

SEQ ID NO: 779280 - RNA, 24 nt, Human
ucaguuagaacaacaaaauaaaac

SEQ ID NO: 779281 - RNA, 19 nt, Human
uccaaaaccaggaugcccc

SEQ ID NO: 779282 - RNA, 20 nt, Human
uccaaaaggaaaccucccac

SEQ ID NO: 779283 - RNA, 23 nt, Human
uccacauccaccugucuccucca

SEQ ID NO: 779284 - RNA, 22 nt, Human
uccacuccauacggaagaaacc

SEQ ID NO: 779285 - RNA, 23 nt, Human
uccacugauaaaaacaguucucc

SEQ ID NO: 779286 - RNA, 21 nt, Human
uccagaaaugugaagcgggac

SEQ ID NO: 779287 - RNA, 21 nt, Human
ucccaggccccaggcugggcc

SEQ ID NO: 779288 - RNA, 23 nt, Human
ucccaggccccaggcugggcccu

SEQ ID NO: 779289 - RNA, 20 nt, Human
uccccacccccaaacgccuc

SEQ ID NO: 779290 - RNA, 18 nt, Human
uccccuuagagccucaug

SEQ ID NO: 779291 - RNA, 21 nt, Human
ucccucuaaccacauccagcu

SEQ ID NO: 779292 - RNA, 24 nt, Human
ucccugcugcagugugugacggga

SEQ ID NO: 779293 - RNA, 22 nt, Human
ucggcucccuguucuuccucag

SEQ ID NO: 779294 - RNA, 26 nt, Human
ucucaguuagaacaacaaaauaaaac

SEQ ID NO: 779295 - RNA, 19 nt, Human
ucuccaguuaggugcgagg

SEQ ID NO: 779296 - RNA, 18 nt, Human
ucucggcucccuguucuu

SEQ ID NO: 779297 - RNA, 21 nt, Human
ucucgggaaaggaagccuucu

SEQ ID NO: 779298 - RNA, 21 nt, Human
ugaaaugaagucacaggaguc

SEQ ID NO: 779299 - RNA, 19 nt, Human
ugaagaaacaaccaugccc

SEQ ID NO: 779300 - RNA, 19 nt, Human
ugagcagaggucccaggug

SEQ ID NO: 779301 - RNA, 21 nt, Human
ugaggggugugccaggacagu

SEQ ID NO: 779302 - RNA, 19 nt, Human
ugagugguggagaccaugg

SEQ ID NO: 779303 - RNA, 20 nt, Human
ugauggugagugguggagac

SEQ ID NO: 779304 - RNA, 24 nt, Human
ugcaggggcucaacaagcugcuuu

SEQ ID NO: 779305 - RNA, 20 nt, Human
ugcccugggcaggacagggg

SEQ ID NO: 779306 - RNA, 21 nt, Human
ugcccugggcaggacaggggu

SEQ ID NO: 779307 - RNA, 19 nt, Human
ugcucuggaggugccuucc

SEQ ID NO: 779308 - RNA, 21 nt, Human
uggagacugugugaccucaac

SEQ ID NO: 779309 - RNA, 22 nt, Human
uggauaagugcaauuuaacuac

SEQ ID NO: 779310 - RNA, 18 nt, Human
uggaugaaaagugccccc

SEQ ID NO: 779311 - RNA, 23 nt, Human
uggcgacaucuucagacuucagu

SEQ ID NO: 779312 - RNA, 18 nt, Human
ugggcagaguagcugggg

SEQ ID NO: 779313 - RNA, 22 nt, Human
ugguacgcucauccucaucugu

SEQ ID NO: 779314 - RNA, 24 nt, Human
uggugaggggugugccaggacagu

SEQ ID NO: 779315 - RNA, 24 nt, Human
uggugcaggauuguggcaucugug

SEQ ID NO: 779316 - RNA, 18 nt, Human
uguugaugucugaaauga

SEQ ID NO: 779317 - RNA, 22 nt, Human
uucaaaaaggcgacacuuugaa

SEQ ID NO: 779318 - RNA, 18 nt, Human
uuuaagcaucucuugagc

SEQ ID NO: 779319 - RNA, 25 nt, Human
aaaaaaaaaaaaaaaagcaacauua

SEQ ID NO: 779320 - RNA, 24 nt, Human
aaaaaagacuaaaacacuaacaaa

SEQ ID NO: 779321 - RNA, 23 nt, Human
aaaaacauccaacccacccccaa

SEQ ID NO: 779322 - RNA, 19 nt, Human
aaaaagcaacauuaacaga

SEQ ID NO: 779323 - RNA, 23 nt, Human
aaaaggccuaaaaaagcaucuac

SEQ ID NO: 779324 - RNA, 19 nt, Human
aaaaugcauagccagaagc

SEQ ID NO: 779325 - RNA, 19 nt, Human
aaacaaaaacauccaaccc

SEQ ID NO: 779326 - RNA, 26 nt, Human
aaacaaaaagcaaaacacagggaccc

SEQ ID NO: 779327 - RNA, 28 nt, Human
aaacaaaaggaaaaaaacaaagggaccc

SEQ ID NO: 779328 - RNA, 20 nt, Human
aaagagccccucaagauuuc

SEQ ID NO: 779329 - RNA, 27 nt, Human
aaaguccaguuuucaucaugggugaca

SEQ ID NO: 779330 - RNA, 18 nt, Human
aaaugcccaacuaccaaa

SEQ ID NO: 779331 - RNA, 24 nt, Human
aacaaaaacauccaacccaccccc

SEQ ID NO: 779332 - RNA, 18 nt, Human
aacuaauuucacauauuu

SEQ ID NO: 779333 - RNA, 19 nt, Human
aagauuucauaaacuacaa

SEQ ID NO: 779334 - RNA, 18 nt, Human
aagccccacaagccccaa

SEQ ID NO: 779335 - RNA, 21 nt, Human
aagugggggaaggagaggagg

SEQ ID NO: 779336 - RNA, 24 nt, Human
aauaaguccccaaacaaaaacauc

SEQ ID NO: 779337 - RNA, 24 nt, Human
aauuaagcaguucuuucuuccuca

SEQ ID NO: 779338 - RNA, 21 nt, Human
acacaaacaugaacuacauac

SEQ ID NO: 779339 - RNA, 25 nt, Human
acacaugcaugcgugcacacacaua

SEQ ID NO: 779340 - RNA, 24 nt, Human
acauauacucccucguaaaaugug

SEQ ID NO: 779341 - RNA, 23 nt, Human
accgggagccgccuccuuucucc

SEQ ID NO: 779342 - RNA, 24 nt, Human
acuacuaaauaaguccccaaacaa

SEQ ID NO: 779343 - RNA, 22 nt, Human
agcaguucuuucuuccucauuu

SEQ ID NO: 779344 - RNA, 20 nt, Human
agcaucuacucacccuaugu

SEQ ID NO: 779345 - RNA, 21 nt, Human
agccccacaagccccaaacug

SEQ ID NO: 779346 - RNA, 21 nt, Human
aggaaauguuagacuagcaug

SEQ ID NO: 779347 - RNA, 21 nt, Human
aggagaggagggggagggggu

SEQ ID NO: 779348 - RNA, 22 nt, Human
aggagggggagggggucgggau

SEQ ID NO: 779349 - RNA, 18 nt, Human
aggauuuguaaaugaaag

SEQ ID NO: 779350 - RNA, 22 nt, Human
agggaccaugaaaaaaaaaaag

SEQ ID NO: 779351 - RNA, 23 nt, Human
agggggagggggucgggauaccc

SEQ ID NO: 779352 - RNA, 23 nt, Human
agguccaucugaaggaaaauagc

SEQ ID NO: 779353 - RNA, 20 nt, Human
auaccauccaaacccaucaa

SEQ ID NO: 779354 - RNA, 18 nt, Human
auagaaaagaagaaagaa

SEQ ID NO: 779355 - RNA, 22 nt, Human
aucuaucucccacucucuccaa

SEQ ID NO: 779356 - RNA, 22 nt, Human
auuuguaaaugaaaguaacauc

SEQ ID NO: 779357 - RNA, 22 nt, Human
caaaaacaaaagcaagggacca

SEQ ID NO: 779358 - RNA, 21 nt, Human
caaaaacauccaacccacccc

SEQ ID NO: 779359 - RNA, 22 nt, Human
caaaaacauccaacccaccccc

SEQ ID NO: 779360 - RNA, 23 nt, Human
caaaaacauccaacccaccccca

SEQ ID NO: 779361 - RNA, 21 nt, Human
caaacaaaaacauccaaccca

SEQ ID NO: 779362 - RNA, 27 nt, Human
caaauacaagugaaugcacauauuuua

SEQ ID NO: 779363 - RNA, 21 nt, Human
caacccacccccaaucccaaa

SEQ ID NO: 779364 - RNA, 22 nt, Human
caacccacccccaaucccaaau

SEQ ID NO: 779365 - RNA, 25 nt, Human
caauuugaccucccaccaaauuaag

SEQ ID NO: 779366 - RNA, 22 nt, Human
caccaaaaaagaaaaaaacuau

SEQ ID NO: 779367 - RNA, 18 nt, Human
cacccccaaucccaaauc

SEQ ID NO: 779368 - RNA, 18 nt, Human
cagagcacaucuuucaaa

SEQ ID NO: 779369 - RNA, 22 nt, Human
cagcgaaagaaguaccaaguau

SEQ ID NO: 779370 - RNA, 24 nt, Human
cagcuucucccucaccccacuccc

SEQ ID NO: 779371 - RNA, 21 nt, Human
cagcuuuauacuuagaacuca

SEQ ID NO: 779372 - RNA, 24 nt, Human
caggcuagaaacaaaaggaaaaaa

SEQ ID NO: 779373 - RNA, 22 nt, Human
caguaaaagagccccucaagau

SEQ ID NO: 779374 - RNA, 19 nt, Human
cauagagcaggaaauguua

SEQ ID NO: 779375 - RNA, 24 nt, Human
cauccaacccacccccaaucccaa

SEQ ID NO: 779376 - RNA, 23 nt, Human
caugugaaugcauaauagugaau

SEQ ID NO: 779377 - RNA, 18 nt, Human
cauuacacauauuugaua

SEQ ID NO: 779378 - RNA, 25 nt, Human
ccaaacaaaaacauccaacccaccc

SEQ ID NO: 779379 - RNA, 22 nt, Human
ccaaguauuucuuucuguuaau

SEQ ID NO: 779380 - RNA, 23 nt, Human
ccacucccacacacucucacucc

SEQ ID NO: 779381 - RNA, 24 nt, Human
ccagccaaauagcccauaaaccuu

SEQ ID NO: 779382 - RNA, 18 nt, Human
cccgcaggcuggccgggc

SEQ ID NO: 779383 - RNA, 22 nt, Human
cccgucagcuucucccucaccc

SEQ ID NO: 779384 - RNA, 18 nt, Human
ccgacugagccgggcugg

SEQ ID NO: 779385 - RNA, 22 nt, Human
ccugggucggggggcuccuccc

SEQ ID NO: 779386 - RNA, 21 nt, Human
ccuugccuggauuauuuccuc

SEQ ID NO: 779387 - RNA, 23 nt, Human
ccuugccuggauuauuuccucuu

SEQ ID NO: 779388 - RNA, 18 nt, Human
cuaagccccacaagcccc

SEQ ID NO: 779389 - RNA, 20 nt, Human
cucaccccacucccacacac

SEQ ID NO: 779390 - RNA, 23 nt, Human
cucacugaugacaaaucuuccaa

SEQ ID NO: 779391 - RNA, 19 nt, Human
cucccucaccccacuccca

SEQ ID NO: 779392 - RNA, 19 nt, Human
cuccgccgacugcggcucc

SEQ ID NO: 779393 - RNA, 19 nt, Human
cucuaagccccacaagccc

SEQ ID NO: 779394 - RNA, 20 nt, Human
cucuccaacuaauccuacua

SEQ ID NO: 779395 - RNA, 18 nt, Human
cugagcaccuacauuuuc

SEQ ID NO: 779396 - RNA, 18 nt, Human
cuuccugagcauccucca

SEQ ID NO: 779397 - RNA, 18 nt, Human
cuuuuauaaauucugcaa

SEQ ID NO: 779398 - RNA, 20 nt, Human
gaaaauagcacuggagaggc

SEQ ID NO: 779399 - RNA, 23 nt, Human
gaacaaacaaacaaauaaaaaca

SEQ ID NO: 779400 - RNA, 21 nt, Human
gaaggagaggagggggagggg

SEQ ID NO: 779401 - RNA, 18 nt, Human
gagaggagggggaggggg

SEQ ID NO: 779402 - RNA, 21 nt, Human
gaggagggggagggggucggg

SEQ ID NO: 779403 - RNA, 25 nt, Human
gcauguauuaaaaaaaaaaaaaaaa

SEQ ID NO: 779404 - RNA, 18 nt, Human
gcccauaaaccuucucaa

SEQ ID NO: 779405 - RNA, 18 nt, Human
gcggcuggaaguggggga

SEQ ID NO: 779406 - RNA, 19 nt, Human
gcucugcagcaucuccauu

SEQ ID NO: 779407 - RNA, 23 nt, Human
ggaaaaaacaaaaaaauaagaaa

SEQ ID NO: 779408 - RNA, 19 nt, Human
ggaaggagaggagggggag

SEQ ID NO: 779409 - RNA, 19 nt, Human
gggcuggggccuucgagga

SEQ ID NO: 779410 - RNA, 23 nt, Human
ggggaaggagaggagggggaggg

SEQ ID NO: 779411 - RNA, 18 nt, Human
gggggaaggagaggaggg

SEQ ID NO: 779412 - RNA, 24 nt, Human
gggggaaggagaggagggggaggg

SEQ ID NO: 779413 - RNA, 22 nt, Human
gggucgggauaccgggagccgc

SEQ ID NO: 779414 - RNA, 21 nt, Human
gucccgucagcuucucccuca

SEQ ID NO: 779415 - RNA, 22 nt, Human
guguaugugucauaauacacau

SEQ ID NO: 779416 - RNA, 20 nt, Human
uaaaaacaguagcagcagug

SEQ ID NO: 779417 - RNA, 24 nt, Human
uaaagcuaaugaacuaauuucaca

SEQ ID NO: 779418 - RNA, 18 nt, Human
uaacuauucaaaguguau

SEQ ID NO: 779419 - RNA, 19 nt, Human
uaagaaaagacuaacuaca

SEQ ID NO: 779420 - RNA, 25 nt, Human
uaagcaugaucaaaccucuguuaua

SEQ ID NO: 779421 - RNA, 20 nt, Human
uaaggaaauggcagaauuuu

SEQ ID NO: 779422 - RNA, 20 nt, Human
uaaggugaauaccucuaccc

SEQ ID NO: 779423 - RNA, 23 nt, Human
uaaguccccaaacaaaaacaucc

SEQ ID NO: 779424 - RNA, 25 nt, Human
uaaguccccaaacaaaaacauccaa

SEQ ID NO: 779425 - RNA, 18 nt, Human
uaaguuaagaaaagacua

SEQ ID NO: 779426 - RNA, 23 nt, Human
uaauuuaugcagauguuuuccuc

SEQ ID NO: 779427 - RNA, 23 nt, Human
uacacugaacaggcuagaaacaa

SEQ ID NO: 779428 - RNA, 18 nt, Human
uacaggaagauuucaaug

SEQ ID NO: 779429 - RNA, 25 nt, Human
uacuacuaaauaaguccccaaacaa

SEQ ID NO: 779430 - RNA, 20 nt, Human
uagaauauccuaagauaaau

SEQ ID NO: 779431 - RNA, 25 nt, Human
uagcacuggagaggcaagaaagggc

SEQ ID NO: 779432 - RNA, 24 nt, Human
uagcagaggucucaucuaucuccc

SEQ ID NO: 779433 - RNA, 24 nt, Human
uauacacaaaaaggccuaaaaaag

SEQ ID NO: 779434 - RNA, 21 nt, Human
uauguaacuauucaaagugua

SEQ ID NO: 779435 - RNA, 26 nt, Human
uauucaucaacaaucaaccuuucacu

SEQ ID NO: 779436 - RNA, 20 nt, Human
ucaaaaaagacuaaaacacu

SEQ ID NO: 779437 - RNA, 24 nt, Human
ucaaaaaagacuaaaacacuaaca

SEQ ID NO: 779438 - RNA, 27 nt, Human
ucaauuauaggcaccaaaaaagaaaaa

SEQ ID NO: 779439 - RNA, 21 nt, Human
ucauuaagaagccuuuauugg

SEQ ID NO: 779440 - RNA, 20 nt, Human
uccaaacccaucaaugggau

SEQ ID NO: 779441 - RNA, 19 nt, Human
uccaugaacagcauugcaa

SEQ ID NO: 779442 - RNA, 19 nt, Human
ucccaguaaaagagccccu

SEQ ID NO: 779443 - RNA, 20 nt, Human
uccccaaacaaaaacaucca

SEQ ID NO: 779444 - RNA, 21 nt, Human
uccccaaacaaaaacauccaa

SEQ ID NO: 779445 - RNA, 23 nt, Human
uccccaaacaaaaacauccaacc

SEQ ID NO: 779446 - RNA, 22 nt, Human
ucccgucagcuucucccucacc

SEQ ID NO: 779447 - RNA, 21 nt, Human
ucgcccaguuucucacagccu

SEQ ID NO: 779448 - RNA, 25 nt, Human
ucuauucaucaacaaucaaccuuuc

SEQ ID NO: 779449 - RNA, 23 nt, Human
ucucugaggugaaaugagacacu

SEQ ID NO: 779450 - RNA, 19 nt, Human
ugaaaacaacucaucuguu

SEQ ID NO: 779451 - RNA, 19 nt, Human
ugaaggaauucaagaagau

SEQ ID NO: 779452 - RNA, 21 nt, Human
ugagaaaaagagaugauuuuc

SEQ ID NO: 779453 - RNA, 22 nt, Human
ugagucccccauuuacccugcg

SEQ ID NO: 779454 - RNA, 25 nt, Human
ugaguguacguuuuaauaucaugug

SEQ ID NO: 779455 - RNA, 21 nt, Human
ugauauauacauucucucuca

SEQ ID NO: 779456 - RNA, 23 nt, Human
ugauauauacauucucucucaua

SEQ ID NO: 779457 - RNA, 21 nt, Human
ugauauguaacuauucaaagu

SEQ ID NO: 779458 - RNA, 19 nt, Human
ugcaugcgugcacacacau

SEQ ID NO: 779459 - RNA, 20 nt, Human
uggccgggcguccucgcaca

SEQ ID NO: 779460 - RNA, 24 nt, Human
ugggggaaggagaggagggggagg

SEQ ID NO: 779461 - RNA, 18 nt, Human
uggguaaaagcuucagag

SEQ ID NO: 779462 - RNA, 22 nt, Human
uguacaaguaagcaugaucaaa

SEQ ID NO: 779463 - RNA, 25 nt, Human
uuaaaaaaaaaaaaaaaagcaacau

SEQ ID NO: 779464 - RNA, 18 nt, Human
uuaaaaggguaacuauga

SEQ ID NO: 779465 - RNA, 23 nt, Human
uuaaaugcccaacuaccaaaaca

SEQ ID NO: 779466 - RNA, 24 nt, Human
uuacaauuuuaacaauauacaaaa

SEQ ID NO: 779467 - RNA, 18 nt, Human
uuagacuagcauguauua

SEQ ID NO: 779468 - RNA, 21 nt, Human
uuagacuagcauguauuaaaa

SEQ ID NO: 779469 - RNA, 22 nt, Human
uucaucaugcaaacaugccaau

SEQ ID NO: 779470 - RNA, 19 nt, Human
uucucccucaccccacucc

SEQ ID NO: 779471 - RNA, 20 nt, Human
uugaauaaacuguacacuga

SEQ ID NO: 779472 - RNA, 23 nt, Human
uuggccauuguuaaagaugcagg

SEQ ID NO: 779473 - RNA, 26 nt, Human
uuguacaaaaacaaaagcaagggacc

SEQ ID NO: 779474 - RNA, 22 nt, Human
uuguaggauuuguaaaugaaag

SEQ ID NO: 779475 - RNA, 20 nt, Human
uuucuuccucauuuauuucu

SEQ ID NO: 779476 - RNA, 24 nt, Human
uuugaaauacaauuuagaauuaca

SEQ ID NO: 779477 - RNA, 22 nt, Human
aaaacuaaacucaaccaaaagu

SEQ ID NO: 779478 - RNA, 23 nt, Human
aaagaccacacccaagacuaacc

SEQ ID NO: 779479 - RNA, 22 nt, Human
aacacacugaugaaguuaaaga

SEQ ID NO: 779480 - RNA, 23 nt, Human
aacugcuuuccaagaggaaauac

SEQ ID NO: 779481 - RNA, 19 nt, Human
aagaggaaauacaauugac

SEQ ID NO: 779482 - RNA, 24 nt, Human
aagaggaaauacaauugaccugga

SEQ ID NO: 779483 - RNA, 25 nt, Human
aaucauuugaagucaagcagcucuu

SEQ ID NO: 779484 - RNA, 23 nt, Human
aaucuucuuuacacccagcacaa

SEQ ID NO: 779485 - RNA, 18 nt, Human
acaaacaaggacaauaaa

SEQ ID NO: 779486 - RNA, 27 nt, Human
acaacacacugaugaaguuaaagaccu

SEQ ID NO: 779487 - RNA, 18 nt, Human
acacuuugacaaaaagac

SEQ ID NO: 779488 - RNA, 22 nt, Human
acacuuugacaaaaagaccaca

SEQ ID NO: 779489 - RNA, 18 nt, Human
acuaaacucaaccaaaag

SEQ ID NO: 779490 - RNA, 19 nt, Human
acugaaaaacaucuuucac

SEQ ID NO: 779491 - RNA, 25 nt, Human
agcuaauuuaaaaacuuuuagccuc

SEQ ID NO: 779492 - RNA, 23 nt, Human
agcuaucaguugcaaacaaguua

SEQ ID NO: 779493 - RNA, 22 nt, Human
aggcauuuaauucuuagaaaug

SEQ ID NO: 779494 - RNA, 18 nt, Human
auaaaacacuggaauucc

SEQ ID NO: 779495 - RNA, 23 nt, Human
auggaaauggacagguguuuuga

SEQ ID NO: 779496 - RNA, 19 nt, Human
auucuggauacacuuugac

SEQ ID NO: 779497 - RNA, 21 nt, Human
caaaaagaccacacccaagac

SEQ ID NO: 779498 - RNA, 23 nt, Human
caaaaagaccacacccaagacua

SEQ ID NO: 779499 - RNA, 25 nt, Human
cacaaauaugcauuucaaaaagaug

SEQ ID NO: 779500 - RNA, 23 nt, Human
cacagcuucugcuuugaaaugga

SEQ ID NO: 779501 - RNA, 23 nt, Human
caccacacagcuaauuuaaaaac

SEQ ID NO: 779502 - RNA, 22 nt, Human
cacuucacaaaaacaacacacu

SEQ ID NO: 779503 - RNA, 27 nt, Human
cacuuugacaaaaagaccacacccaag

SEQ ID NO: 779504 - RNA, 18 nt, Human
cagcagcugguguuugag

SEQ ID NO: 779505 - RNA, 21 nt, Human
caucaguaucucagagauggc

SEQ ID NO: 779506 - RNA, 18 nt, Human
cauguugagaaagcuugc

SEQ ID NO: 779507 - RNA, 19 nt, Human
gaccacacccaagacuaac

SEQ ID NO: 779508 - RNA, 23 nt, Human
gaccagauuuguaaugcccuucc

SEQ ID NO: 779509 - RNA, 21 nt, Human
gaccguucacugcagacuagg

SEQ ID NO: 779510 - RNA, 21 nt, Human
gccuagagcaaaucaauuccu

SEQ ID NO: 779511 - RNA, 21 nt, Human
gcuuucuaugaagacuaacug

SEQ ID NO: 779512 - RNA, 19 nt, Human
ggaagaaagaacaaucauc

SEQ ID NO: 779513 - RNA, 22 nt, Human
guagcuaaaccauaaguaacau

SEQ ID NO: 779514 - RNA, 21 nt, Human
guucacauaaaucugcuggcc

SEQ ID NO: 779515 - RNA, 21 nt, Human
uaaagacugacucuccauguu

SEQ ID NO: 779516 - RNA, 23 nt, Human
uaacuaaauguaacauuuaugaa

SEQ ID NO: 779517 - RNA, 22 nt, Human
uaagaaaacuaaacucaaccaa

SEQ ID NO: 779518 - RNA, 19 nt, Human
uaaguaacauacugaaaaa

SEQ ID NO: 779519 - RNA, 23 nt, Human
uaauacauacacaagacuguaua

SEQ ID NO: 779520 - RNA, 19 nt, Human
uaaugacaggaaugagaau

SEQ ID NO: 779521 - RNA, 22 nt, Human
uacagaaacccucgcaugcaau

SEQ ID NO: 779522 - RNA, 26 nt, Human
uacauguuaaacugcuuuccaagagg

SEQ ID NO: 779523 - RNA, 22 nt, Human
uacugcuucccaaugucccuau

SEQ ID NO: 779524 - RNA, 20 nt, Human
uagaacuaauucccauccaa

SEQ ID NO: 779525 - RNA, 20 nt, Human
uagcaucaauaaucaugaug

SEQ ID NO: 779526 - RNA, 26 nt, Human
uaguagcuaaaccauaaguaacauac

SEQ ID NO: 779527 - RNA, 20 nt, Human
uaucccagaguauuugguca

SEQ ID NO: 779528 - RNA, 19 nt, Human
ucaauaaucaugauguugc

SEQ ID NO: 779529 - RNA, 23 nt, Human
uccaagaggaaauacaauugacc

SEQ ID NO: 779530 - RNA, 20 nt, Human
ucuccauguucaguagcccc

SEQ ID NO: 779531 - RNA, 20 nt, Human
ucucucaucuuaaccagugg

SEQ ID NO: 779532 - RNA, 20 nt, Human
ucucucaucuuaaccagugg

SEQ ID NO: 779533 - RNA, 18 nt, Human
ucucugggcuaccaccuc

SEQ ID NO: 779534 - RNA, 24 nt, Human
ucugcauuuuacacaggaaagaga

SEQ ID NO: 779535 - RNA, 24 nt, Human
ucuucaugauuucagcugauuuuu

SEQ ID NO: 779536 - RNA, 19 nt, Human
ugaaauggauaggacuaua

SEQ ID NO: 779537 - RNA, 24 nt, Human
ugaaauggauaggacuauaaaagg

SEQ ID NO: 779538 - RNA, 18 nt, Human
ugaccagauuuguaaugc

SEQ ID NO: 779539 - RNA, 19 nt, Human
ugaccuggauucucuaugg

SEQ ID NO: 779540 - RNA, 22 nt, Human
ugccuaaagagcucaaaagcau

SEQ ID NO: 779541 - RNA, 18 nt, Human
ugccucaccacacagcua

SEQ ID NO: 779542 - RNA, 19 nt, Human
uggaagaaagaacaaucau

SEQ ID NO: 779543 - RNA, 28 nt, Human
uggaucacauauuucugcuuagcuggaa

SEQ ID NO: 779544 - RNA, 21 nt, Human
uguaaagagagauuaaggcug

SEQ ID NO: 779545 - RNA, 21 nt, Human
uguggauaccuuuugaaaagu

SEQ ID NO: 779546 - RNA, 20 nt, Human
uguguugccuaaagagcuca

SEQ ID NO: 779547 - RNA, 22 nt, Human
uguucaguagcccuaugauagu

SEQ ID NO: 779548 - RNA, 18 nt, Human
uucuaugaagacuaacug

SEQ ID NO: 779549 - RNA, 21 nt, Human
uugaacgcuuacauguuaaac

SEQ ID NO: 779550 - RNA, 23 nt, Human
uuuugcacuucacaaaaacaaca

SEQ ID NO: 779551 - RNA, 24 nt, Human
aaaaaaacaaacaaacaaaagcaa

SEQ ID NO: 779552 - RNA, 19 nt, Human
aaaaauugauaaagcauuu

SEQ ID NO: 779553 - RNA, 20 nt, Human
aaaacaaacaaacaaaagca

SEQ ID NO: 779554 - RNA, 19 nt, Human
aaaacacaauuaacuccac

SEQ ID NO: 779555 - RNA, 18 nt, Human
aaaaucuccaagcugugg

SEQ ID NO: 779556 - RNA, 20 nt, Human
aaacaaacaaaagcaacuug

SEQ ID NO: 779557 - RNA, 18 nt, Human
aaacaaacaaacaaaagc

SEQ ID NO: 779558 - RNA, 18 nt, Human
aagaaaaaauggccacua

SEQ ID NO: 779559 - RNA, 19 nt, Human
aagcugcuuuaaacuauag

SEQ ID NO: 779560 - RNA, 23 nt, Human
aaguagacauacaugacugaaac

SEQ ID NO: 779561 - RNA, 23 nt, Human
aauaaauacuaaagaaagcauga

SEQ ID NO: 779562 - RNA, 18 nt, Human
aaucaaaaaagggaagaa

SEQ ID NO: 779563 - RNA, 20 nt, Human
acaaaaagcugagguagcuc

SEQ ID NO: 779564 - RNA, 18 nt, Human
acaaacccaaaauagacc

SEQ ID NO: 779565 - RNA, 24 nt, Human
acacaccugcagcuaacggcuaca

SEQ ID NO: 779566 - RNA, 20 nt, Human
acacuacaaagagccaaaga

SEQ ID NO: 779567 - RNA, 18 nt, Human
acagaaacuucacagacu

SEQ ID NO: 779568 - RNA, 19 nt, Human
acagcccauccuuuuagcc

SEQ ID NO: 779569 - RNA, 27 nt, Human
acauuacgguuaaaaaaacaaacaaac

SEQ ID NO: 779570 - RNA, 20 nt, Human
accauagcugaaccaacuua

SEQ ID NO: 779571 - RNA, 24 nt, Human
acuaaaauacaaaaagcugaggua

SEQ ID NO: 779572 - RNA, 25 nt, Human
acuacaaacccaaaauagaccauag

SEQ ID NO: 779573 - RNA, 22 nt, Human
agaaagcaugaaaauccuccca

SEQ ID NO: 779574 - RNA, 21 nt, Human
agaauuagaaggcguuagaug

SEQ ID NO: 779575 - RNA, 19 nt, Human
agacaauagcaccaaauuc

SEQ ID NO: 779576 - RNA, 19 nt, Human
agauacauacaauucacag

SEQ ID NO: 779577 - RNA, 22 nt, Human
agcaaaaaugaaaaacuuacag

SEQ ID NO: 779578 - RNA, 23 nt, Human
agcaaaaaugaaaaacuuacaga

SEQ ID NO: 779579 - RNA, 19 nt, Human
agcaccaaaaucuccaagc

SEQ ID NO: 779580 - RNA, 20 nt, Human
agccaaagacaaggagacaa

SEQ ID NO: 779581 - RNA, 21 nt, Human
aguggcaguuccuauacugag

SEQ ID NO: 779582 - RNA, 19 nt, Human
aguuccuauacugagguug

SEQ ID NO: 779583 - RNA, 21 nt, Human
auagugcagcaagaaccugag

SEQ ID NO: 779584 - RNA, 22 nt, Human
aucuguaaaauaagcaaaacug

SEQ ID NO: 779585 - RNA, 23 nt, Human
auguuucugaaguucuguuuggu

SEQ ID NO: 779586 - RNA, 19 nt, Human
caaaaaagggaagaaauua

SEQ ID NO: 779587 - RNA, 21 nt, Human
caaaaagcccccagggucccc

SEQ ID NO: 779588 - RNA, 22 nt, Human
caaaauacaaaaugcuaaugua

SEQ ID NO: 779589 - RNA, 25 nt, Human
caaagacaaggagacaaguaccuua

SEQ ID NO: 779590 - RNA, 21 nt, Human
caaaucuuuaaauucuguaac

SEQ ID NO: 779591 - RNA, 20 nt, Human
caaauuacaguaaauguuca

SEQ ID NO: 779592 - RNA, 24 nt, Human
caaauuuaguaaccuacuaagaaa

SEQ ID NO: 779593 - RNA, 21 nt, Human
caacuuaaucaaaaaagggaa

SEQ ID NO: 779594 - RNA, 22 nt, Human
caagaccauucgcccuaauuaa

SEQ ID NO: 779595 - RNA, 18 nt, Human
cacagaaaucacucaaca

SEQ ID NO: 779596 - RNA, 22 nt, Human
cacagaaaucacucaacaagau

SEQ ID NO: 779597 - RNA, 22 nt, Human
caccaaaaucuccaagcugugg

SEQ ID NO: 779598 - RNA, 22 nt, Human
caccagaacagaccauagccaa

SEQ ID NO: 779599 - RNA, 23 nt, Human
caccagaacagaccauagccaac

SEQ ID NO: 779600 - RNA, 19 nt, Human
caccauagcugaaccaacu

SEQ ID NO: 779601 - RNA, 19 nt, Human
cacuacaaagagccaaaga

SEQ ID NO: 779602 - RNA, 24 nt, Human
cagaauacaaaagaugcagguaca

SEQ ID NO: 779603 - RNA, 20 nt, Human
cagaugaugacuguuucuuu

SEQ ID NO: 779604 - RNA, 21 nt, Human
cagguacaagcccaaauucaa

SEQ ID NO: 779605 - RNA, 21 nt, Human
caguaggcuauggccaaagua

SEQ ID NO: 779606 - RNA, 21 nt, Human
caguaguccaagaccauucgc

SEQ ID NO: 779607 - RNA, 19 nt, Human
caguuucaacccuagugcg

SEQ ID NO: 779608 - RNA, 25 nt, Human
ccaaaacagaccuuacaagaaaacu

SEQ ID NO: 779609 - RNA, 19 nt, Human
ccagagcucguuugcaauu

SEQ ID NO: 779610 - RNA, 21 nt, Human
ccauagccaacucuaaaacag

SEQ ID NO: 779611 - RNA, 24 nt, Human
cccacucccuaaaaauaaaaucca

SEQ ID NO: 779612 - RNA, 21 nt, Human
ccugagacuugcaaaaaaccc

SEQ ID NO: 779613 - RNA, 18 nt, Human
ccugagugacaauugguc

SEQ ID NO: 779614 - RNA, 25 nt, Human
cgaaaacacaauuaacuccacagcc

SEQ ID NO: 779615 - RNA, 25 nt, Human
cuccaaaagagagugcacaaaaaga

SEQ ID NO: 779616 - RNA, 22 nt, Human
cucccuaagagaggagucucca

SEQ ID NO: 779617 - RNA, 22 nt, Human
cugaaaccaaauuggacuccca

SEQ ID NO: 779618 - RNA, 21 nt, Human
cuguugguaacuaaaauacaa

SEQ ID NO: 779619 - RNA, 21 nt, Human
cuugucaucuuuauucaagua

SEQ ID NO: 779620 - RNA, 20 nt, Human
gaaaauccucccaauaauca

SEQ ID NO: 779621 - RNA, 19 nt, Human
gagggaaggagggccagag

SEQ ID NO: 779622 - RNA, 20 nt, Human
gagugagagagcacuuuaca

SEQ ID NO: 779623 - RNA, 25 nt, Human
gcucugcacauaauuggggucucua

SEQ ID NO: 779624 - RNA, 20 nt, Human
ggcuacaaugaaugaagaua

SEQ ID NO: 779625 - RNA, 18 nt, Human
gggaaggagggccagagg

SEQ ID NO: 779626 - RNA, 24 nt, Human
gggaaggagggccagaggaguugg

SEQ ID NO: 779627 - RNA, 23 nt, Human
gggggaaaaauaugauuaaagaa

SEQ ID NO: 779628 - RNA, 18 nt, Human
guaacaauuuccaucaaa

SEQ ID NO: 779629 - RNA, 20 nt, Human
gucuccaaauuuguagaaag

SEQ ID NO: 779630 - RNA, 21 nt, Human
gugugcaguuuuguuuuuugu

SEQ ID NO: 779631 - RNA, 18 nt, Human
guugguacaauuucagcu

SEQ ID NO: 779632 - RNA, 21 nt, Human
uaaaaaggcacguuaaaggca

SEQ ID NO: 779633 - RNA, 24 nt, Human
uaaaacuacaaacccaaaauagac

SEQ ID NO: 779634 - RNA, 26 nt, Human
uaaaacuacaaacccaaaauagacca

SEQ ID NO: 779635 - RNA, 22 nt, Human
uaacuaaaauacaaaaagcuga

SEQ ID NO: 779636 - RNA, 26 nt, Human
uaagacaggcauuucauacccaaacc

SEQ ID NO: 779637 - RNA, 19 nt, Human
uaagagaggagucuccaaa

SEQ ID NO: 779638 - RNA, 20 nt, Human
uaagagaggagucuccaaaa

SEQ ID NO: 779639 - RNA, 20 nt, Human
uaagcaaaacugguaagugu

SEQ ID NO: 779640 - RNA, 24 nt, Human
uacaaugaaugaagauaccaagcc

SEQ ID NO: 779641 - RNA, 25 nt, Human
uacaaugaaugaagauaccaagcca

SEQ ID NO: 779642 - RNA, 22 nt, Human
uaccagaaacuugcuacaaaaa

SEQ ID NO: 779643 - RNA, 21 nt, Human
uacccacucccuaaaaauaaa

SEQ ID NO: 779644 - RNA, 18 nt, Human
uagcaccauagcugaacc

SEQ ID NO: 779645 - RNA, 23 nt, Human
uagccaacucuaaaacagguuuc

SEQ ID NO: 779646 - RNA, 19 nt, Human
uagcuucaggauguaaacg

SEQ ID NO: 779647 - RNA, 19 nt, Human
uauacagcaaaaaugaaaa

SEQ ID NO: 779648 - RNA, 20 nt, Human
uauacagcaaaaaugaaaaa

SEQ ID NO: 779649 - RNA, 21 nt, Human
uauacagcaaaaaugaaaaac

SEQ ID NO: 779650 - RNA, 24 nt, Human
uauagaaccaccagauaucuguaa

SEQ ID NO: 779651 - RNA, 23 nt, Human
uauuacaaauuacaguaaauguu

SEQ ID NO: 779652 - RNA, 22 nt, Human
ucaaaaagcccccagggucccc

SEQ ID NO: 779653 - RNA, 20 nt, Human
ucaaaauacaaaaugcuaau

SEQ ID NO: 779654 - RNA, 19 nt, Human
ucacugcauccuuugccuc

SEQ ID NO: 779655 - RNA, 23 nt, Human
ucacugcauccuuugccucauug

SEQ ID NO: 779656 - RNA, 20 nt, Human
ucagcuucccaccagaacag

SEQ ID NO: 779657 - RNA, 24 nt, Human
ucagcuucccaccagaacaggacu

SEQ ID NO: 779658 - RNA, 23 nt, Human
uccaucaaaauacaaaaugcuaa

SEQ ID NO: 779659 - RNA, 19 nt, Human
ucccuaaaaauaaaaucca

SEQ ID NO: 779660 - RNA, 19 nt, Human
ucccuaaaaauaaaaucca

SEQ ID NO: 779661 - RNA, 26 nt, Human
ucccuaaaaauaaaauccaguaaacc

SEQ ID NO: 779662 - RNA, 21 nt, Human
uccuauacugagguugccucc

SEQ ID NO: 779663 - RNA, 24 nt, Human
uccuauacugagguugccuccaau

SEQ ID NO: 779664 - RNA, 23 nt, Human
uccucaaaugaauaaaaaggcac

SEQ ID NO: 779665 - RNA, 22 nt, Human
uccucuaaaauuaaaguuucua

SEQ ID NO: 779666 - RNA, 21 nt, Human
uccuuucacaagugcugcugu

SEQ ID NO: 779667 - RNA, 21 nt, Human
ucgcccuaauuaaaacccaaa

SEQ ID NO: 779668 - RNA, 22 nt, Human
ucuccaaaagagagugcacaaa

SEQ ID NO: 779669 - RNA, 19 nt, Human
ucugauaaaaaaagucacu

SEQ ID NO: 779670 - RNA, 19 nt, Human
ucugggaacucaaacauga

SEQ ID NO: 779671 - RNA, 23 nt, Human
ugaaaaacuuacagaaagguaaa

SEQ ID NO: 779672 - RNA, 19 nt, Human
ugaaaagaaugcuucugaa

SEQ ID NO: 779673 - RNA, 21 nt, Human
ugaaaagaaugcuucugaauu

SEQ ID NO: 779674 - RNA, 24 nt, Human
ugaagauaccaagccaacuugcug

SEQ ID NO: 779675 - RNA, 24 nt, Human
ugaagauaccuacugaauagcacc

SEQ ID NO: 779676 - RNA, 23 nt, Human
ugacagaagaaaaaauggccacu

SEQ ID NO: 779677 - RNA, 21 nt, Human
ugaccaaagaaauauuucuaa

SEQ ID NO: 779678 - RNA, 23 nt, Human
ugagggaaggagggccagaggag

SEQ ID NO: 779679 - RNA, 24 nt, Human
ugagugacaauuggucucaaaaau

SEQ ID NO: 779680 - RNA, 18 nt, Human
ugcacaaaaagaggagca

SEQ ID NO: 779681 - RNA, 18 nt, Human
uggaaagacacaccugca

SEQ ID NO: 779682 - RNA, 21 nt, Human
uggcaaaauuuucuuuuuguu

SEQ ID NO: 779683 - RNA, 18 nt, Human
ugggaacucaaacaugaa

SEQ ID NO: 779684 - RNA, 22 nt, Human
ugguacaauuucagcucauugu

SEQ ID NO: 779685 - RNA, 23 nt, Human
ugguacaauuucagcucauuguu

SEQ ID NO: 779686 - RNA, 21 nt, Human
uguaaaacuaguaacccauaa

SEQ ID NO: 779687 - RNA, 21 nt, Human
uguggcuuacugggugucuug

SEQ ID NO: 779688 - RNA, 25 nt, Human
uguuugguucuuguaggcugguugg

SEQ ID NO: 779689 - RNA, 22 nt, Human
uuaaaaaaaaaaaaucacaggu

SEQ ID NO: 779690 - RNA, 23 nt, Human
uucaaaaagcccccagggucccc

SEQ ID NO: 779691 - RNA, 25 nt, Human
uucaaacucacugauggcuaaaauc

SEQ ID NO: 779692 - RNA, 20 nt, Human
uucaacuaaugucaaaugaa

SEQ ID NO: 779693 - RNA, 23 nt, Human
uucagauacauacaauucacaga

SEQ ID NO: 779694 - RNA, 24 nt, Human
uugagggaaggagggccagaggag

SEQ ID NO: 779695 - RNA, 24 nt, Human
uuggaagcauuuuaaugcugaaaa

SEQ ID NO: 779696 - RNA, 21 nt, Human
uuggucucaaaaauugauaaa

SEQ ID NO: 779697 - RNA, 22 nt, Human
uuugcaauuaagcauacagaaa

SEQ ID NO: 779698 - RNA, 19 nt, Human
uuuuuguuuuuuugugugu

SEQ ID NO: 779699 - RNA, 18 nt, Human
uuuuuuuuccuuucacaa

SEQ ID NO: 779700 - RNA, 23 nt, Human
aaaaaaacgacacagguuucuga

SEQ ID NO: 779701 - RNA, 23 nt, Human
aaaaaacuuuguauuacuacuga

SEQ ID NO: 779702 - RNA, 19 nt, Human
aaaaacuguggccaagaac

SEQ ID NO: 779703 - RNA, 21 nt, Human
aaaaaggaaauuuaaauaaga

SEQ ID NO: 779704 - RNA, 25 nt, Human
aaaagaaaacuaauuucuacauaga

SEQ ID NO: 779705 - RNA, 25 nt, Human
aaacaaacacaauaguaucuaagca

SEQ ID NO: 779706 - RNA, 21 nt, Human
aaacacaauaguaucuaagca

SEQ ID NO: 779707 - RNA, 22 nt, Human
aaacacgcaccugcucauugcc

SEQ ID NO: 779708 - RNA, 26 nt, Human
aaacacuagaacgugaaccacuaaca

SEQ ID NO: 779709 - RNA, 20 nt, Human
aaacacuauagaugugauga

SEQ ID NO: 779710 - RNA, 19 nt, Human
aaacagcaaauacaaaggc

SEQ ID NO: 779711 - RNA, 20 nt, Human
aaaccaacaaaacaacucua

SEQ ID NO: 779712 - RNA, 25 nt, Human
aaacuguagaaauucacuacugaac

SEQ ID NO: 779713 - RNA, 25 nt, Human
aaauagccuggcccuggagacaggc

SEQ ID NO: 779714 - RNA, 18 nt, Human
aacauuucccgaucagcu

SEQ ID NO: 779715 - RNA, 20 nt, Human
aacccagaagguugcuaaua

SEQ ID NO: 779716 - RNA, 19 nt, Human
aaccuggaacauguagugg

SEQ ID NO: 779717 - RNA, 19 nt, Human
aagcaauaaagggacccga

SEQ ID NO: 779718 - RNA, 22 nt, Human
aauauccacccuuccucauugc

SEQ ID NO: 779719 - RNA, 22 nt, Human
aauucagaauacaucuauguac

SEQ ID NO: 779720 - RNA, 20 nt, Human
aauuuuguggccucuagggc

SEQ ID NO: 779721 - RNA, 21 nt, Human
acaaaauagguagugcgcccc

SEQ ID NO: 779722 - RNA, 22 nt, Human
acaacaacaacaaccagucuuu

SEQ ID NO: 779723 - RNA, 22 nt, Human
acaagccuguaaaaugauaacc

SEQ ID NO: 779724 - RNA, 28 nt, Human
acacaaaaaugcaaaauugcugagauau

SEQ ID NO: 779725 - RNA, 20 nt, Human
acaccaaaaaaacgacacaa

SEQ ID NO: 779726 - RNA, 25 nt, Human
acaccaaaaaaacgacacagguuuc

SEQ ID NO: 779727 - RNA, 20 nt, Human
acaccacuguauucacuggc

SEQ ID NO: 779728 - RNA, 21 nt, Human
acacugagcacaguggccucu

SEQ ID NO: 779729 - RNA, 18 nt, Human
acauuucucuaaaaaguc

SEQ ID NO: 779730 - RNA, 24 nt, Human
accacugcuuaaaccacacacguc

SEQ ID NO: 779731 - RNA, 21 nt, Human
acccaggggaaccaaccugac

SEQ ID NO: 779732 - RNA, 23 nt, Human
acccgugguuugggaucuuugca

SEQ ID NO: 779733 - RNA, 19 nt, Human
accuggacuucugacagua

SEQ ID NO: 779734 - RNA, 23 nt, Human
accuuccauucuucuaacucgcc

SEQ ID NO: 779735 - RNA, 20 nt, Human
acuguguuuugagaacaugu

SEQ ID NO: 779736 - RNA, 21 nt, Human
acuugaggucaaguacuuuug

SEQ ID NO: 779737 - RNA, 23 nt, Human
agaaaagaaaacuaauuucuaca

SEQ ID NO: 779738 - RNA, 19 nt, Human
agaauccuaacgucacugu

SEQ ID NO: 779739 - RNA, 20 nt, Human
agacagacagggaguaccug

SEQ ID NO: 779740 - RNA, 18 nt, Human
agagugcuggacgacaaa

SEQ ID NO: 779741 - RNA, 20 nt, Human
agcucuuaggcaaaacacaa

SEQ ID NO: 779742 - RNA, 24 nt, Human
aggaagccugagucagcucuggug

SEQ ID NO: 779743 - RNA, 24 nt, Human
aggagcugcaggccgugggggagg

SEQ ID NO: 779744 - RNA, 21 nt, Human
aggagugaguccugaagagga

SEQ ID NO: 779745 - RNA, 21 nt, Human
aggcaaaacacaaacccagaa

SEQ ID NO: 779746 - RNA, 24 nt, Human
aggcagcaccacccugccuuugcc

SEQ ID NO: 779747 - RNA, 19 nt, Human
agguagugcgccccugagc

SEQ ID NO: 779748 - RNA, 23 nt, Human
aguuauugaagguuugaaccagg

SEQ ID NO: 779749 - RNA, 19 nt, Human
auagaaccaaaagucuuca

SEQ ID NO: 779750 - RNA, 20 nt, Human
auggaggguaagagcucuuc

SEQ ID NO: 779751 - RNA, 21 nt, Human
auggguauucucuugucagua

SEQ ID NO: 779752 - RNA, 22 nt, Human
augguccagcauaccugaguga

SEQ ID NO: 779753 - RNA, 21 nt, Human
auuccaaaaaaucacaaaaua

SEQ ID NO: 779754 - RNA, 18 nt, Human
auuucaggaaaaacacua

SEQ ID NO: 779755 - RNA, 22 nt, Human
auuuugugacccaggggaacca

SEQ ID NO: 779756 - RNA, 24 nt, Human
caaaaaaacgacacagguuucuga

SEQ ID NO: 779757 - RNA, 19 nt, Human
caaaacacaaacccagaaa

SEQ ID NO: 779758 - RNA, 19 nt, Human
caaaacacaaacccagaaa

SEQ ID NO: 779759 - RNA, 20 nt, Human
caaaauagguagugcgcccc

SEQ ID NO: 779760 - RNA, 24 nt, Human
caaaauugcugagauaucaaacau

SEQ ID NO: 779761 - RNA, 20 nt, Human
caaaugucuaauauauacag

SEQ ID NO: 779762 - RNA, 23 nt, Human
caaccacuccauguuguccaagu

SEQ ID NO: 779763 - RNA, 24 nt, Human
caacuggcgacuuugacuugugcu

SEQ ID NO: 779764 - RNA, 24 nt, Human
caagaaaagaaaacuaauuucuac

SEQ ID NO: 779765 - RNA, 19 nt, Human
caagaugaccaccuacucc

SEQ ID NO: 779766 - RNA, 20 nt, Human
caagccaggagagaggaggg

SEQ ID NO: 779767 - RNA, 20 nt, Human
cacaaaucagaaauaagauu

SEQ ID NO: 779768 - RNA, 18 nt, Human
cacauauaaaaauacagu

SEQ ID NO: 779769 - RNA, 21 nt, Human
cacauuucaggaaaaacacua

SEQ ID NO: 779770 - RNA, 18 nt, Human
caccaaaaaaacgacaca

SEQ ID NO: 779771 - RNA, 18 nt, Human
caccucccucacaucagc

SEQ ID NO: 779772 - RNA, 19 nt, Human
cacugccuuugaccucugc

SEQ ID NO: 779773 - RNA, 21 nt, Human
cagacagaaacccucagcaaa

SEQ ID NO: 779774 - RNA, 18 nt, Human
cagacuacacugagcaca

SEQ ID NO: 779775 - RNA, 20 nt, Human
cagcaaaaaaacuguggcca

SEQ ID NO: 779776 - RNA, 21 nt, Human
cagcaaaaaaacuguggccaa

SEQ ID NO: 779777 - RNA, 19 nt, Human
cagcagaaagguaaggcug

SEQ ID NO: 779778 - RNA, 18 nt, Human
cagcggcaccaugagcuc

SEQ ID NO: 779779 - RNA, 24 nt, Human
cagcggcaccaugagcuccccacc

SEQ ID NO: 779780 - RNA, 18 nt, Human
cagugaccucucaccucc

SEQ ID NO: 779781 - RNA, 21 nt, Human
cagugaccucucaccucccuc

SEQ ID NO: 779782 - RNA, 21 nt, Human
cauccaagaaagcuucuaguu

SEQ ID NO: 779783 - RNA, 18 nt, Human
ccaaaaaaacgacacagg

SEQ ID NO: 779784 - RNA, 19 nt, Human
ccaaggcucuccacugccu

SEQ ID NO: 779785 - RNA, 24 nt, Human
ccagugagcagagggcuccagugu

SEQ ID NO: 779786 - RNA, 21 nt, Human
ccucccucacaucagccuuag

SEQ ID NO: 779787 - RNA, 19 nt, Human
ccuuccauaggcagcagcu

SEQ ID NO: 779788 - RNA, 24 nt, Human
cgagagcuagaaaacuaucuacac

SEQ ID NO: 779789 - RNA, 18 nt, Human
cgccccugagccaucacu

SEQ ID NO: 779790 - RNA, 21 nt, Human
cuaaacaacaacaacaaccag

SEQ ID NO: 779791 - RNA, 25 nt, Human
cuaaccaacccagaagguugcuaau

SEQ ID NO: 779792 - RNA, 24 nt, Human
cuagaaaacuaucuacacaauuca

SEQ ID NO: 779793 - RNA, 18 nt, Human
cuauugcaagcaagaaaa

SEQ ID NO: 779794 - RNA, 20 nt, Human
cucauugcacucaccaucac

SEQ ID NO: 779795 - RNA, 22 nt, Human
cugaacacuuaaacuauucauc

SEQ ID NO: 779796 - RNA, 21 nt, Human
cugagcacaguggccucugcc

SEQ ID NO: 779797 - RNA, 21 nt, Human
cugagcacaguggccucugcc

SEQ ID NO: 779798 - RNA, 19 nt, Human
cugaggacacaguguuugu

SEQ ID NO: 779799 - RNA, 19 nt, Human
cuggacucccaaauagaga

SEQ ID NO: 779800 - RNA, 19 nt, Human
cuuguagauccgagauugc

SEQ ID NO: 779801 - RNA, 24 nt, Human
gaaagcuaugcugccuggaaugau

SEQ ID NO: 779802 - RNA, 25 nt, Human
gacaaaauagguagugcgccccuga

SEQ ID NO: 779803 - RNA, 27 nt, Human
gacacuaaccuaaacaacaacaacaac

SEQ ID NO: 779804 - RNA, 22 nt, Human
gacagcaccuuguagauccgag

SEQ ID NO: 779805 - RNA, 18 nt, Human
gacgacaaauugcugggg

SEQ ID NO: 779806 - RNA, 21 nt, Human
gacuuggggugguggccggga

SEQ ID NO: 779807 - RNA, 26 nt, Human
gagaucucuccacucuuaaggcacuc

SEQ ID NO: 779808 - RNA, 24 nt, Human
gagcuccccaccugagugacagcc

SEQ ID NO: 779809 - RNA, 28 nt, Human
gagguuuccuaguggaugcuuugcugaa

SEQ ID NO: 779810 - RNA, 18 nt, Human
gaguaccugcagcaaacu

SEQ ID NO: 779811 - RNA, 20 nt, Human
gaucugcaguuggaggaguu

SEQ ID NO: 779812 - RNA, 25 nt, Human
gcaauaaagggacccgagagcuaga

SEQ ID NO: 779813 - RNA, 18 nt, Human
gcacuguguauuuuugga

SEQ ID NO: 779814 - RNA, 22 nt, Human
gcagcuugcaggcagcaccacc

SEQ ID NO: 779815 - RNA, 21 nt, Human
gcaggcagcaccacccugccu

SEQ ID NO: 779816 - RNA, 22 nt, Human
gccaagaacuguaagaaaaaua

SEQ ID NO: 779817 - RNA, 22 nt, Human
gccacuguuucuaaacagcacu

SEQ ID NO: 779818 - RNA, 22 nt, Human
gccuugaaccgucuggaaggca

SEQ ID NO: 779819 - RNA, 25 nt, Human
gccuuugaccucugcugugucuugg

SEQ ID NO: 779820 - RNA, 21 nt, Human
gcgcguccucacuccaaccug

SEQ ID NO: 779821 - RNA, 22 nt, Human
ggaaaucucuggcagaggggcc

SEQ ID NO: 779822 - RNA, 19 nt, Human
ggcacaugagcacuguuag

SEQ ID NO: 779823 - RNA, 21 nt, Human
ggcuggugacccaagccagga

SEQ ID NO: 779824 - RNA, 18 nt, Human
gggaggacaggagcugca

SEQ ID NO: 779825 - RNA, 20 nt, Human
gggcagggacguggaggccc

SEQ ID NO: 779826 - RNA, 19 nt, Human
gggcaugguaauguccaac

SEQ ID NO: 779827 - RNA, 21 nt, Human
ggggugguggccgggacacca

SEQ ID NO: 779828 - RNA, 22 nt, Human
ggguccaggaagccugagucag

SEQ ID NO: 779829 - RNA, 19 nt, Human
gguaaggcugguacuacug

SEQ ID NO: 779830 - RNA, 25 nt, Human
gguaaggcugguacuacuguguuuu

SEQ ID NO: 779831 - RNA, 21 nt, Human
guaaaguuccauccaagaaag

SEQ ID NO: 779832 - RNA, 21 nt, Human
gugccuccuuuuggcaaauac

SEQ ID NO: 779833 - RNA, 20 nt, Human
gugguaaacucuuguagggc

SEQ ID NO: 779834 - RNA, 22 nt, Human
gugugguaaacucuuguagggc

SEQ ID NO: 779835 - RNA, 24 nt, Human
guguucugguuaacagagaguuau

SEQ ID NO: 779836 - RNA, 21 nt, Human
uaaaaaacaacauaaaggcaa

SEQ ID NO: 779837 - RNA, 22 nt, Human
uaaaaaacaacauaaaggcaau

SEQ ID NO: 779838 - RNA, 22 nt, Human
uaaaaacacuaauaaagccucc

SEQ ID NO: 779839 - RNA, 23 nt, Human
uaaaaacacuaauaaagccucca

SEQ ID NO: 779840 - RNA, 18 nt, Human
uaaaaagcaauaaaggga

SEQ ID NO: 779841 - RNA, 22 nt, Human
uaaaaagcaauaaagggacccg

SEQ ID NO: 779842 - RNA, 21 nt, Human
uaaaaucaaucuaaccaaccc

SEQ ID NO: 779843 - RNA, 21 nt, Human
uaaaaucaaucuaaccaaccc

SEQ ID NO: 779844 - RNA, 22 nt, Human
uaaacagcacugaaagccaaaa

SEQ ID NO: 779845 - RNA, 21 nt, Human
uaaaccacacacacacaaauc

SEQ ID NO: 779846 - RNA, 21 nt, Human
uaaauaaaaagugccuccuuu

SEQ ID NO: 779847 - RNA, 24 nt, Human
uaaaugugcacacauauaaaaaua

SEQ ID NO: 779848 - RNA, 18 nt, Human
uaaccuuaaauggauaau

SEQ ID NO: 779849 - RNA, 18 nt, Human
uaagaaaaauacuuuccc

SEQ ID NO: 779850 - RNA, 24 nt, Human
uacaaaucacaaugucagagcaua

SEQ ID NO: 779851 - RNA, 25 nt, Human
uacaacaccaaaaaaacgacacagg

SEQ ID NO: 779852 - RNA, 19 nt, Human
uacaacaguaccacugcuu

SEQ ID NO: 779853 - RNA, 24 nt, Human
uacaacaguaccacugcuuaaacc

SEQ ID NO: 779854 - RNA, 26 nt, Human
uacaagaugaccaccuacuccuagac

SEQ ID NO: 779855 - RNA, 23 nt, Human
uacacaauucaggauuauggaaa

SEQ ID NO: 779856 - RNA, 19 nt, Human
uacacugagcacaguggcc

SEQ ID NO: 779857 - RNA, 23 nt, Human
uacagguggugccauuuggacuu

SEQ ID NO: 779858 - RNA, 22 nt, Human
uacauagaaaaaaaacuuugua

SEQ ID NO: 779859 - RNA, 23 nt, Human
uacauuucucuaaaaagucccca

SEQ ID NO: 779860 - RNA, 18 nt, Human
uacgguguuugucauuug

SEQ ID NO: 779861 - RNA, 23 nt, Human
uacuugaggucaaguacuuuugg

SEQ ID NO: 779862 - RNA, 23 nt, Human
uagaucuaucucuaaaaacugac

SEQ ID NO: 779863 - RNA, 24 nt, Human
uagauugcacauuucaggaaaaac

SEQ ID NO: 779864 - RNA, 19 nt, Human
uagauugguaucuuucucc

SEQ ID NO: 779865 - RNA, 26 nt, Human
uaggagaagguucuucuuuuaugggg

SEQ ID NO: 779866 - RNA, 18 nt, Human
uaggcccagacagaaacc

SEQ ID NO: 779867 - RNA, 18 nt, Human
uaguuguuuuccaguuuu

SEQ ID NO: 779868 - RNA, 25 nt, Human
uauaaaaacacuaauaaagccucca

SEQ ID NO: 779869 - RNA, 20 nt, Human
uauccaguuacaagccugua

SEQ ID NO: 779870 - RNA, 21 nt, Human
uaucuacaucuuagugaaaau

SEQ ID NO: 779871 - RNA, 28 nt, Human
uauguacaguacaugugcaaaauguaug

SEQ ID NO: 779872 - RNA, 23 nt, Human
uauguugaaagaucuugcauuua

SEQ ID NO: 779873 - RNA, 24 nt, Human
uauucaucacagacuacacugagc

SEQ ID NO: 779874 - RNA, 19 nt, Human
ucacuggucucauuuugga

SEQ ID NO: 779875 - RNA, 20 nt, Human
ucagaaauaagaucagcucu

SEQ ID NO: 779876 - RNA, 21 nt, Human
ucaguauggaacauuuaccau

SEQ ID NO: 779877 - RNA, 21 nt, Human
uccacaaauucagaauacauc

SEQ ID NO: 779878 - RNA, 23 nt, Human
uccaccuauucuuucugugacaa

SEQ ID NO: 779879 - RNA, 22 nt, Human
ucccaaguaaauagccuggccc

SEQ ID NO: 779880 - RNA, 26 nt, Human
uccuaaaugcuuccucuuccuaccaa

SEQ ID NO: 779881 - RNA, 21 nt, Human
uccucgaucagagagaagggc

SEQ ID NO: 779882 - RNA, 23 nt, Human
uccugaagaggaguugggcaugg

SEQ ID NO: 779883 - RNA, 22 nt, Human
uccuggguagaugacagaccuu

SEQ ID NO: 779884 - RNA, 22 nt, Human
ucuccacugccuuugaccucug

SEQ ID NO: 779885 - RNA, 27 nt, Human
ucuccacugccuuugaccucugcugug

SEQ ID NO: 779886 - RNA, 22 nt, Human
ucuuaaaccaacaaaacaacuc

SEQ ID NO: 779887 - RNA, 19 nt, Human
ucuugguucuuugagaugg

SEQ ID NO: 779888 - RNA, 19 nt, Human
ugaaauguuuucaaacuug

SEQ ID NO: 779889 - RNA, 19 nt, Human
ugaaccacuaacacugucc

SEQ ID NO: 779890 - RNA, 19 nt, Human
ugaaccgucuggaaggcac

SEQ ID NO: 779891 - RNA, 18 nt, Human
ugaagaaagcuaugcugc

SEQ ID NO: 779892 - RNA, 22 nt, Human
ugaaugaagaagaugcucaggg

SEQ ID NO: 779893 - RNA, 22 nt, Human
ugaaugguccagcauaccugag

SEQ ID NO: 779894 - RNA, 21 nt, Human
ugacacuaaccuaaacaacaa

SEQ ID NO: 779895 - RNA, 19 nt, Human
ugacagaccuuccccuuac

SEQ ID NO: 779896 - RNA, 19 nt, Human
ugacagccaggacuucugu

SEQ ID NO: 779897 - RNA, 18 nt, Human
ugaccuuccaguuuaugu

SEQ ID NO: 779898 - RNA, 21 nt, Human
ugagacacaaaaaugcaaaac

SEQ ID NO: 779899 - RNA, 18 nt, Human
ugagaugcuaagacauaa

SEQ ID NO: 779900 - RNA, 19 nt, Human
ugagcacuguuagugccuu

SEQ ID NO: 779901 - RNA, 24 nt, Human
ugagugacagccaggacuucugug

SEQ ID NO: 779902 - RNA, 23 nt, Human
ugagugacucagcagaucauucu

SEQ ID NO: 779903 - RNA, 21 nt, Human
ugauaggcccagacagaaacc

SEQ ID NO: 779904 - RNA, 24 nt, Human
ugauuucaggggugcaaacagcaa

SEQ ID NO: 779905 - RNA, 23 nt, Human
ugcaaacagcaaauacaaaggca

SEQ ID NO: 779906 - RNA, 21 nt, Human
ugcagugaccucucaccuccc

SEQ ID NO: 779907 - RNA, 19 nt, Human
ugcauggaggguaagagcu

SEQ ID NO: 779908 - RNA, 23 nt, Human
ugcugaaauguacaagaugacca

SEQ ID NO: 779909 - RNA, 23 nt, Human
ugcuggaaaagcagacuguuguu

SEQ ID NO: 779910 - RNA, 19 nt, Human
uggacuuggggugguggcc

SEQ ID NO: 779911 - RNA, 24 nt, Human
uggauucuugggauggcuuugcuu

SEQ ID NO: 779912 - RNA, 18 nt, Human
uggauugaagaacacugu

SEQ ID NO: 779913 - RNA, 20 nt, Human
uggcacagucugaccuguac

SEQ ID NO: 779914 - RNA, 20 nt, Human
uggcccuggagacaggcccc

SEQ ID NO: 779915 - RNA, 20 nt, Human
ugggaauucugaaaggacug

SEQ ID NO: 779916 - RNA, 18 nt, Human
ugggauggcuuugcuuca

SEQ ID NO: 779917 - RNA, 21 nt, Human
ugggcaugguaauguccaacc

SEQ ID NO: 779918 - RNA, 19 nt, Human
ugggcuaauuuuguggccu

SEQ ID NO: 779919 - RNA, 23 nt, Human
uggggaggacaggagcugcaggc

SEQ ID NO: 779920 - RNA, 19 nt, Human
ugggggaggcugaucugca

SEQ ID NO: 779921 - RNA, 18 nt, Human
ugguuacuugaggucaag

SEQ ID NO: 779922 - RNA, 21 nt, Human
uguaaacaugugcagcuuuuc

SEQ ID NO: 779923 - RNA, 22 nt, Human
uguagguaucuucuguuuaugu

SEQ ID NO: 779924 - RNA, 23 nt, Human
ugucacaaagcugugacaccaca

SEQ ID NO: 779925 - RNA, 26 nt, Human
ugucacaaagcugugacaccacagag

SEQ ID NO: 779926 - RNA, 23 nt, Human
uguccaaguuugagucugacagg

SEQ ID NO: 779927 - RNA, 21 nt, Human
ugugacaccacagagcaaagu

SEQ ID NO: 779928 - RNA, 19 nt, Human
ugugcagcuuuucgaauug

SEQ ID NO: 779929 - RNA, 22 nt, Human
uguggcauguuucaaacccuau

SEQ ID NO: 779930 - RNA, 22 nt, Human
uguggggaggacaggagcugca

SEQ ID NO: 779931 - RNA, 21 nt, Human
uguguuagguccauuuugcag

SEQ ID NO: 779932 - RNA, 22 nt, Human
uguguugguuuaccaauuucug

SEQ ID NO: 779933 - RNA, 20 nt, Human
uguucgguuaccuucuacag

SEQ ID NO: 779934 - RNA, 20 nt, Human
uguuuguggggaggacaggg

SEQ ID NO: 779935 - RNA, 22 nt, Human
uuacucuuaaaccaacaaaaca

SEQ ID NO: 779936 - RNA, 18 nt, Human
uucacuggcauuguggug

SEQ ID NO: 779937 - RNA, 19 nt, Human
uucagccagaagcugucac

SEQ ID NO: 779938 - RNA, 25 nt, Human
uucccgacagcaccuuguagauccg

SEQ ID NO: 779939 - RNA, 24 nt, Human
uugaaccaggaaaaaaaaauuacu

SEQ ID NO: 779940 - RNA, 22 nt, Human
uugaagaacacuguucugugcg

SEQ ID NO: 779941 - RNA, 21 nt, Human
uugaagaacacuguucugugg

SEQ ID NO: 779942 - RNA, 24 nt, Human
uugcaagcaagaaaagaaaacuaa

SEQ ID NO: 779943 - RNA, 19 nt, Human
uugcugggguggcgggggu

SEQ ID NO: 779944 - RNA, 22 nt, Human
uuggugguacuuuaacuucuuu

SEQ ID NO: 779945 - RNA, 20 nt, Human
uugguuacuugaggucaagu

SEQ ID NO: 779946 - RNA, 26 nt, Human
uuuaccauuuugugacccaggggaaa

SEQ ID NO: 779947 - RNA, 18 nt, Human
uuuagggucuuaaaguga

SEQ ID NO: 779948 - RNA, 23 nt, Human
uuucaaacuuggguuccaggcuc

SEQ ID NO: 779949 - RNA, 18 nt, Human
uuuggcaaauacuuggca

SEQ ID NO: 779950 - RNA, 20 nt, Human
uuuguaguggaggaauuuca

SEQ ID NO: 779951 - RNA, 18 nt, Human
uuuuaaauucaucccacc

SEQ ID NO: 779952 - RNA, 20 nt, Human
aaaaacugaaggcaaacaga

SEQ ID NO: 779953 - RNA, 20 nt, Human
aaacaaacaccacaagaaca

SEQ ID NO: 779954 - RNA, 18 nt, Human
aaacugaaggcaaacaga

SEQ ID NO: 779955 - RNA, 21 nt, Human
aaagaaacaaagcaacugugg

SEQ ID NO: 779956 - RNA, 23 nt, Human
aaagaagucagaacacugccuuc

SEQ ID NO: 779957 - RNA, 18 nt, Human
aaauaccccuuuaaaucc

SEQ ID NO: 779958 - RNA, 19 nt, Human
aacaaaggacuaaggcacc

SEQ ID NO: 779959 - RNA, 22 nt, Human
aagaaacaaagcaacuguggug

SEQ ID NO: 779960 - RNA, 19 nt, Human
aaguagcugggauuacagg

SEQ ID NO: 779961 - RNA, 18 nt, Human
aagugcugggauuacagg

SEQ ID NO: 779962 - RNA, 19 nt, Human
aagugcugggauuacaggc

SEQ ID NO: 779963 - RNA, 19 nt, Human
aagugcugggauuacaggc

SEQ ID NO: 779964 - RNA, 23 nt, Human
aagugcugggauuacaggcguga

SEQ ID NO: 779965 - RNA, 26 nt, Human
aagugcugggauuacaggcgugagcc

SEQ ID NO: 779966 - RNA, 22 nt, Human
aaguuuacaaauaccccuuuaa

SEQ ID NO: 779967 - RNA, 22 nt, Human
acaacacuguaagcaaaagcac

SEQ ID NO: 779968 - RNA, 23 nt, Human
accacaccuggcuaauuuuugua

SEQ ID NO: 779969 - RNA, 20 nt, Human
accuuauguucagacaauug

SEQ ID NO: 779970 - RNA, 18 nt, Human
acgagguuucaccauguu

SEQ ID NO: 779971 - RNA, 19 nt, Human
acgagguuucaccauguug

SEQ ID NO: 779972 - RNA, 24 nt, Human
acgagguuucaccauguuguccag

SEQ ID NO: 779973 - RNA, 19 nt, Human
acguaccagccacuuucac

SEQ ID NO: 779974 - RNA, 23 nt, Human
acugaagccuuuucccccaguaa

SEQ ID NO: 779975 - RNA, 20 nt, Human
agaaauaaagguacaacaca

SEQ ID NO: 779976 - RNA, 18 nt, Human
agccacagacuucaaacc

SEQ ID NO: 779977 - RNA, 20 nt, Human
agcgauucuccugucucggc

SEQ ID NO: 779978 - RNA, 20 nt, Human
agguacaacacaguaccuua

SEQ ID NO: 779979 - RNA, 24 nt, Human
agguuaucugcccaccuuggccuc

SEQ ID NO: 779980 - RNA, 23 nt, Human
agugcaauggugcaaucuuggcu

SEQ ID NO: 779981 - RNA, 24 nt, Human
agugcaauggugcaaucuuggcuc

SEQ ID NO: 779982 - RNA, 18 nt, Human
agugcugggauuacaggc

SEQ ID NO: 779983 - RNA, 18 nt, Human
aguuccauauuucucaag

SEQ ID NO: 779984 - RNA, 18 nt, Human
aucagugguuggaaaggc

SEQ ID NO: 779985 - RNA, 23 nt, Human
aucuacguaccagccacuuucac

SEQ ID NO: 779986 - RNA, 24 nt, Human
augaaaaguugcuauguauaaaua

SEQ ID NO: 779987 - RNA, 19 nt, Human
auuacaggugcauccuacc

SEQ ID NO: 779988 - RNA, 24 nt, Human
auuuuuguauuuuuaguagagacg

SEQ ID NO: 779989 - RNA, 21 nt, Human
caaacaccacaagaacagcca

SEQ ID NO: 779990 - RNA, 25 nt, Human
caacacuguaagcaaaagcacuggg

SEQ ID NO: 779991 - RNA, 21 nt, Human
cacaaagaagaacugaaccuc

SEQ ID NO: 779992 - RNA, 24 nt, Human
caccauguuguccagccuggucuc

SEQ ID NO: 779993 - RNA, 21 nt, Human
cacugcaacguccgccuccug

SEQ ID NO: 779994 - RNA, 23 nt, Human
cacugcaacguccgccuccuggg

SEQ ID NO: 779995 - RNA, 18 nt, Human
cacuguaagcaaaagcac

SEQ ID NO: 779996 - RNA, 21 nt, Human
cagacaauuguggggcaugga

SEQ ID NO: 779997 - RNA, 20 nt, Human
cagcuugacuuaccagcaga

SEQ ID NO: 779998 - RNA, 20 nt, Human
cauccuaccacaccuggcua

SEQ ID NO: 779999 - RNA, 24 nt, Human
cauguuguccagccuggucucaaa

SEQ ID NO: 780000 - RNA, 28 nt, Human
ccaaaguaagugcugggauuacaggcgu

SEQ ID NO: 780001 - RNA, 21 nt, Human
ccaccugaaauauuggucuga

SEQ ID NO: 780002 - RNA, 22 nt, Human
ccagccagacccauaaccauaa

SEQ ID NO: 780003 - RNA, 22 nt, Human
ccagccggaccagcucggcugc

SEQ ID NO: 780004 - RNA, 21 nt, Human
ccgcagguuaucugcccaccu

SEQ ID NO: 780005 - RNA, 26 nt, Human
ccgcagguuaucugcccaccuuggcc

SEQ ID NO: 780006 - RNA, 24 nt, Human
ccgccuccuggguucgagcgauuc

SEQ ID NO: 780007 - RNA, 22 nt, Human
ccuaaguagcugggauuacagg

SEQ ID NO: 780008 - RNA, 23 nt, Human
ccuaaguagcugggauuacaggu

SEQ ID NO: 780009 - RNA, 24 nt, Human
ccuaaguagcugggauuacaggug

SEQ ID NO: 780010 - RNA, 24 nt, Human
ccuccuggguucgagcgauucucc

SEQ ID NO: 780011 - RNA, 24 nt, Human
ccugucucggccuccuaaguagcu

SEQ ID NO: 780012 - RNA, 22 nt, Human
cgagcgauucuccugucucggc

SEQ ID NO: 780013 - RNA, 18 nt, Human
cgagguuucaccauguug

SEQ ID NO: 780014 - RNA, 18 nt, Human
cguaccagccacuuucac

SEQ ID NO: 780015 - RNA, 21 nt, Human
cuaaguagcugggauuacagg

SEQ ID NO: 780016 - RNA, 23 nt, Human
cuaaguagcugggauuacaggug

SEQ ID NO: 780017 - RNA, 23 nt, Human
cuaauuuuuguauuuuuaguaga

SEQ ID NO: 780018 - RNA, 24 nt, Human
cuaccacaccuggcuaauuuuugu

SEQ ID NO: 780019 - RNA, 24 nt, Human
cucaaggagggcaaaguuuacaaa

SEQ ID NO: 780020 - RNA, 24 nt, Human
cucacugcaacguccgccuccugg

SEQ ID NO: 780021 - RNA, 21 nt, Human
cuccuggguucgagcgauucu

SEQ ID NO: 780022 - RNA, 24 nt, Human
cucggccuccuaaguagcugggau

SEQ ID NO: 780023 - RNA, 23 nt, Human
cugcaacguccgccuccuggguu

SEQ ID NO: 780024 - RNA, 20 nt, Human
cugcccaccuuggccuccca

SEQ ID NO: 780025 - RNA, 21 nt, Human
cuucuuuuagaaauacagaaa

SEQ ID NO: 780026 - RNA, 22 nt, Human
cuuuccuuuccuuuccuuguuu

SEQ ID NO: 780027 - RNA, 21 nt, Human
cuuuucuucuuuccuuuccuu

SEQ ID NO: 780028 - RNA, 19 nt, Human
gacaacacuguaagcaaaa

SEQ ID NO: 780029 - RNA, 24 nt, Human
gacccauaaccauaaaucuuccuc

SEQ ID NO: 780030 - RNA, 18 nt, Human
gaguguuuaucagcuuga

SEQ ID NO: 780031 - RNA, 18 nt, Human
gauuacaggcgugagcca

SEQ ID NO: 780032 - RNA, 21 nt, Human
gauuacaggcgugagccaccg

SEQ ID NO: 780033 - RNA, 24 nt, Human
gauuacaggcgugagccaccgugc

SEQ ID NO: 780034 - RNA, 23 nt, Human
gcagguuaucugcccaccuuggc

SEQ ID NO: 780035 - RNA, 23 nt, Human
ggaaagaacuuucuucuuuuaga

SEQ ID NO: 780036 - RNA, 23 nt, Human
ggaguuucacucuugucacccag

SEQ ID NO: 780037 - RNA, 22 nt, Human
ggggcuagugguggggaaaaug

SEQ ID NO: 780038 - RNA, 23 nt, Human
ggucugaaugcaaagacaucaaa

SEQ ID NO: 780039 - RNA, 24 nt, Human
guaacugacaccauaauuuugcaa

SEQ ID NO: 780040 - RNA, 27 nt, Human
guaccagccacuuucacuggguacucu

SEQ ID NO: 780041 - RNA, 22 nt, Human
gugaguaaaaacugaaggcaaa

SEQ ID NO: 780042 - RNA, 20 nt, Human
uaaaaagaaacaaagcaacu

SEQ ID NO: 780043 - RNA, 19 nt, Human
uaaccucuaagguaguucc

SEQ ID NO: 780044 - RNA, 24 nt, Human
uaagcuauaaaaagaaacaaagca

SEQ ID NO: 780045 - RNA, 24 nt, Human
uaagugcugggauuacaggcguga

SEQ ID NO: 780046 - RNA, 24 nt, Human
uaauuuuuguauuuuuaguagaga

SEQ ID NO: 780047 - RNA, 21 nt, Human
uacaacacaguaccuuacaug

SEQ ID NO: 780048 - RNA, 24 nt, Human
uacaggcgugagccaccgugccca

SEQ ID NO: 780049 - RNA, 22 nt, Human
uacaggugcauccuaccacacc

SEQ ID NO: 780050 - RNA, 21 nt, Human
uaccagccacuuucacugggu

SEQ ID NO: 780051 - RNA, 24 nt, Human
uaccuuauguucagacaauugugg

SEQ ID NO: 780052 - RNA, 19 nt, Human
uacucugugucacaggcug

SEQ ID NO: 780053 - RNA, 22 nt, Human
uacuguaauucuagccucugcu

SEQ ID NO: 780054 - RNA, 23 nt, Human
uagaaauacagaaauaaagguac

SEQ ID NO: 780055 - RNA, 22 nt, Human
uagagacgagguuucaccaugu

SEQ ID NO: 780056 - RNA, 24 nt, Human
uaguagagacgagguuucaccaug

SEQ ID NO: 780057 - RNA, 26 nt, Human
uaguagagacgagguuucaccauguu

SEQ ID NO: 780058 - RNA, 18 nt, Human
uaguuccauauuucucaa

SEQ ID NO: 780059 - RNA, 21 nt, Human
uaguugucuucuucccagcca

SEQ ID NO: 780060 - RNA, 22 nt, Human
uauaaaaugaguugcgucuuaa

SEQ ID NO: 780061 - RNA, 23 nt, Human
uauuggucugaaugcaaagacau

SEQ ID NO: 780062 - RNA, 23 nt, Human
ucaaacuccugaccgcagguuau

SEQ ID NO: 780063 - RNA, 20 nt, Human
ucacaaagaagaacugaacc

SEQ ID NO: 780064 - RNA, 23 nt, Human
ucacugcaacguccgccuccugg

SEQ ID NO: 780065 - RNA, 24 nt, Human
ucacugcaacguccgccuccuggg

SEQ ID NO: 780066 - RNA, 26 nt, Human
ucacugcaacguccgccuccuggguu

SEQ ID NO: 780067 - RNA, 27 nt, Human
ucagugguuggaaaggcuuuuuacauu

SEQ ID NO: 780068 - RNA, 22 nt, Human
uccacagaccccaccagccgga

SEQ ID NO: 780069 - RNA, 24 nt, Human
uccacagaccccaccagccggacc

SEQ ID NO: 780070 - RNA, 26 nt, Human
uccacagaccccaccagccggaccag

SEQ ID NO: 780071 - RNA, 28 nt, Human
ucccaaaguaagugcugggauuacaggc

SEQ ID NO: 780072 - RNA, 18 nt, Human
ucccaacaauucauugcc

SEQ ID NO: 780073 - RNA, 24 nt, Human
uccuaaguagcugggauuacaggu

SEQ ID NO: 780074 - RNA, 21 nt, Human
uccuggguucgagcgauucuc

SEQ ID NO: 780075 - RNA, 24 nt, Human
uccuggguucgagcgauucuccug

SEQ ID NO: 780076 - RNA, 21 nt, Human
ucugcccaccuuggccuccca

SEQ ID NO: 780077 - RNA, 25 nt, Human
ucuguggugaucucuagaugguaca

SEQ ID NO: 780078 - RNA, 23 nt, Human
ucuucccagccagacccauaacc

SEQ ID NO: 780079 - RNA, 19 nt, Human
ugaaaaugacccauuuggg

SEQ ID NO: 780080 - RNA, 21 nt, Human
ugacuuauucauuaugaaugg

SEQ ID NO: 780081 - RNA, 25 nt, Human
ugagacuagagcuuguguaacugac

SEQ ID NO: 780082 - RNA, 24 nt, Human
ugaguaauccuugaaaaugaccca

SEQ ID NO: 780083 - RNA, 24 nt, Human
ugcugggauuacaggcgugagcca

SEQ ID NO: 780084 - RNA, 23 nt, Human
uggaaacaaacaccacaagaaca

SEQ ID NO: 780085 - RNA, 18 nt, Human
uggaaaggcuuuuuacau

SEQ ID NO: 780086 - RNA, 20 nt, Human
uggaacugggaaaaaaaugg

SEQ ID NO: 780087 - RNA, 18 nt, Human
uggaguacucacagguuc

SEQ ID NO: 780088 - RNA, 23 nt, Human
uggagugcaauggugcaaucuug

SEQ ID NO: 780089 - RNA, 24 nt, Human
uggagugcaauggugcaaucuugg

SEQ ID NO: 780090 - RNA, 20 nt, Human
uggcucacugcaacguccgc

SEQ ID NO: 780091 - RNA, 18 nt, Human
ugggauuacaggcgugag

SEQ ID NO: 780092 - RNA, 21 nt, Human
ugggauuacaggcgugagcca

SEQ ID NO: 780093 - RNA, 22 nt, Human
ugggauuacaggcgugagccac

SEQ ID NO: 780094 - RNA, 23 nt, Human
ugggauuacaggcgugagccacc

SEQ ID NO: 780095 - RNA, 23 nt, Human
ugggauuacaggcgugagccacc

SEQ ID NO: 780096 - RNA, 24 nt, Human
ugggauuacaggcgugagccaccg

SEQ ID NO: 780097 - RNA, 22 nt, Human
ugggauuacaggugcauccuac

SEQ ID NO: 780098 - RNA, 24 nt, Human
ugggauuacaggugcauccuacca

SEQ ID NO: 780099 - RNA, 24 nt, Human
uggguucgagcgauucuccugucu

SEQ ID NO: 780100 - RNA, 20 nt, Human
uggugggagaguagaacagg

SEQ ID NO: 780101 - RNA, 20 nt, Human
ugguggggaaaaugcaacag

SEQ ID NO: 780102 - RNA, 18 nt, Human
ugucuuucuccauuacuu

SEQ ID NO: 780103 - RNA, 21 nt, Human
uuaaaaaaagcaguuauccaa

SEQ ID NO: 780104 - RNA, 23 nt, Human
uuacaaauaccccuuuaaauccu

SEQ ID NO: 780105 - RNA, 24 nt, Human
uuaguagagacgagguuucaccau

SEQ ID NO: 780106 - RNA, 20 nt, Human
uuccuuuccuuguuugccuu

SEQ ID NO: 780107 - RNA, 23 nt, Human
uucgagcgauucuccugucucgg

SEQ ID NO: 780108 - RNA, 18 nt, Human
uucuugauuaugacaccc

SEQ ID NO: 780109 - RNA, 23 nt, Human
uugucacccagucuggagugcaa

SEQ ID NO: 780110 - RNA, 26 nt, Human
uuuacaaauaccccuuuaaauccuua

SEQ ID NO: 780111 - RNA, 21 nt, Human
uuuacugaagccuuuuccccc

SEQ ID NO: 780112 - RNA, 22 nt, Human
uuuacugaagccuuuuccccca

SEQ ID NO: 780113 - RNA, 21 nt, Human
uuucaccauguuguccagccu

SEQ ID NO: 780114 - RNA, 22 nt, Human
uuucaccauguuguccagccug

SEQ ID NO: 780115 - RNA, 24 nt, Human
uuuuuaguagagacgagguuucac

SEQ ID NO: 780116 - RNA, 20 nt, Human
uuuuuguauuuuuaguagag

SEQ ID NO: 780117 - RNA, 18 nt, Human
aaacccuccggcggcucc

SEQ ID NO: 780118 - RNA, 25 nt, Human
aaacuccacaaacacuugccaguga

SEQ ID NO: 780119 - RNA, 21 nt, Human
aacuuguucucuucucuucca

SEQ ID NO: 780120 - RNA, 28 nt, Human
aagaaaaauaauaauaauaaucccuccc

SEQ ID NO: 780121 - RNA, 21 nt, Human
aagaagaaggggggaaaagca

SEQ ID NO: 780122 - RNA, 24 nt, Human
aagaagaaggggggaaaagcacaa

SEQ ID NO: 780123 - RNA, 23 nt, Human
accccggccgggugguggggagg

SEQ ID NO: 780124 - RNA, 18 nt, Human
agaagaaggggggaaaag

SEQ ID NO: 780125 - RNA, 24 nt, Human
agcaucuacccccggcuggguggc

SEQ ID NO: 780126 - RNA, 23 nt, Human
agcuaaacccuccggcggcuccg

SEQ ID NO: 780127 - RNA, 20 nt, Human
aggcagcaucuacccccggc

SEQ ID NO: 780128 - RNA, 24 nt, Human
aggcuacauuugugauuaacaggg

SEQ ID NO: 780129 - RNA, 18 nt, Human
agggcucaguccggcauu

SEQ ID NO: 780130 - RNA, 26 nt, Human
aggugauguggguguugcgggguagg

SEQ ID NO: 780131 - RNA, 20 nt, Human
auggaaacuccacaaacacu

SEQ ID NO: 780132 - RNA, 20 nt, Human
caaacacucagggcucaguc

SEQ ID NO: 780133 - RNA, 22 nt, Human
caaguucagacgagccugccgg

SEQ ID NO: 780134 - RNA, 18 nt, Human
cagcgagagggagccagg

SEQ ID NO: 780135 - RNA, 21 nt, Human
cagugagauucuuuccccuuc

SEQ ID NO: 780136 - RNA, 23 nt, Human
caucaccauggaaacuccacaaa

SEQ ID NO: 780137 - RNA, 18 nt, Human
cauggaaacuccacaaac

SEQ ID NO: 780138 - RNA, 19 nt, Human
cauggaaacuccacaaaca

SEQ ID NO: 780139 - RNA, 18 nt, Human
ccauggaaacuccacaaa

SEQ ID NO: 780140 - RNA, 19 nt, Human
cccacccugcgcacaggaa

SEQ ID NO: 780141 - RNA, 24 nt, Human
cccccggcuggguggcaccgaggc

SEQ ID NO: 780142 - RNA, 23 nt, Human
ccccggcucggccacgcauccuu

SEQ ID NO: 780143 - RNA, 23 nt, Human
cgagcuaaacccuccggcggcuc

SEQ ID NO: 780144 - RNA, 18 nt, Human
cgcccgggcuccccggcu

SEQ ID NO: 780145 - RNA, 21 nt, Human
cggcuggguggcaccgaggcc

SEQ ID NO: 780146 - RNA, 21 nt, Human
cgggguagggggggacacgag

SEQ ID NO: 780147 - RNA, 24 nt, Human
cucuucucuuccagauuaaagaaa

SEQ ID NO: 780148 - RNA, 20 nt, Human
cugggcgaggcagcaucuac

SEQ ID NO: 780149 - RNA, 18 nt, Human
gaggaugccgguaggauu

SEQ ID NO: 780150 - RNA, 20 nt, Human
ggcagaugguggccucggac

SEQ ID NO: 780151 - RNA, 19 nt, Human
gggcaucuuggaauguggg

SEQ ID NO: 780152 - RNA, 21 nt, Human
ggggacacgaggccauugaca

SEQ ID NO: 780153 - RNA, 25 nt, Human
guaaacaucaccauggaaacuccac

SEQ ID NO: 780154 - RNA, 18 nt, Human
guaggauuuuccggaucg

SEQ ID NO: 780155 - RNA, 21 nt, Human
gucuucaaguucagacgagcc

SEQ ID NO: 780156 - RNA, 20 nt, Human
uaauaauaauaaucccuccc

SEQ ID NO: 780157 - RNA, 20 nt, Human
uaugugugaguguaugugug

SEQ ID NO: 780158 - RNA, 18 nt, Human
ucagggcucaguccggca

SEQ ID NO: 780159 - RNA, 18 nt, Human
uccacgcggggaaagccc

SEQ ID NO: 780160 - RNA, 18 nt, Human
uccagauuaaagaaaaau

SEQ ID NO: 780161 - RNA, 22 nt, Human
ucccugagcacaccccggccgg

SEQ ID NO: 780162 - RNA, 21 nt, Human
ugacagggagacgaaacuguc

SEQ ID NO: 780163 - RNA, 22 nt, Human
uggggaggugauguggguguug

SEQ ID NO: 780164 - RNA, 25 nt, Human
uggggaggugauguggguguugcgg

SEQ ID NO: 780165 - RNA, 19 nt, Human
ugguggggaggugaugugg

SEQ ID NO: 780166 - RNA, 24 nt, Human
ugguggggaggugauguggguguu

SEQ ID NO: 780167 - RNA, 19 nt, Human
uguaugugugaguguaugu

SEQ ID NO: 780168 - RNA, 19 nt, Human
ugugugaguguaugugugu

SEQ ID NO: 780169 - RNA, 20 nt, Human
uucuuuccccuucucccacc

SEQ ID NO: 780170 - RNA, 21 nt, Human
uucuuuccccuucucccaccc

SEQ ID NO: 780171 - RNA, 23 nt, Human
uuuuccggaucgaagaaccccag

SEQ ID NO: 780172 - RNA, 19 nt, Human
aaaaaaacagacacaccaa

SEQ ID NO: 780173 - RNA, 20 nt, Human
aaaaaaacagacacaccaaa

SEQ ID NO: 780174 - RNA, 21 nt, Human
aaaaaaacagacacaccaaaa

SEQ ID NO: 780175 - RNA, 23 nt, Human
aaaaaaacagacacaccaaaaaa

SEQ ID NO: 780176 - RNA, 22 nt, Human
aaaaaacagacacaccaaaaaa

SEQ ID NO: 780177 - RNA, 24 nt, Human
aaacagacacaccaaaaaacuccc

SEQ ID NO: 780178 - RNA, 18 nt, Human
aaagcaaaagcaggggca

SEQ ID NO: 780179 - RNA, 20 nt, Human
aacacacaaaccagggggca

SEQ ID NO: 780180 - RNA, 21 nt, Human
aacgacgugaaucugccucuu

SEQ ID NO: 780181 - RNA, 22 nt, Human
aagcaggggcaaaaauggacuu

SEQ ID NO: 780182 - RNA, 26 nt, Human
aagcaggggcaaaaauggagggaccc

SEQ ID NO: 780183 - RNA, 20 nt, Human
aagccuauuucaaauaaugg

SEQ ID NO: 780184 - RNA, 23 nt, Human
aauaaugguaacaguuucugaga

SEQ ID NO: 780185 - RNA, 23 nt, Human
aaucacccacaugguuuuucauu

SEQ ID NO: 780186 - RNA, 18 nt, Human
acaaaccaaaagaauaag

SEQ ID NO: 780187 - RNA, 21 nt, Human
acaggaacagaaauguccaca

SEQ ID NO: 780188 - RNA, 25 nt, Human
acgcagagcuggggucccggcggcu

SEQ ID NO: 780189 - RNA, 18 nt, Human
agaaauguccacaacugc

SEQ ID NO: 780190 - RNA, 23 nt, Human
agaaauguccacaacugcgaggg

SEQ ID NO: 780191 - RNA, 26 nt, Human
agcuggaaacgagggagggaagcgag

SEQ ID NO: 780192 - RNA, 21 nt, Human
aggccuccuggccaagacccu

SEQ ID NO: 780193 - RNA, 18 nt, Human
agggaagcgagccagagc

SEQ ID NO: 780194 - RNA, 18 nt, Human
agggaguugcuagggagc

SEQ ID NO: 780195 - RNA, 20 nt, Human
aguaccuuaaaaaaaaaaca

SEQ ID NO: 780196 - RNA, 18 nt, Human
agugaacgcagagcuggg

SEQ ID NO: 780197 - RNA, 19 nt, Human
aguugaaaucugucaacua

SEQ ID NO: 780198 - RNA, 21 nt, Human
auccaaagcaaaagcaggggc

SEQ ID NO: 780199 - RNA, 18 nt, Human
aucccuguuggguuaagg

SEQ ID NO: 780200 - RNA, 23 nt, Human
auugauuaauacuuuuuuaaaaa

SEQ ID NO: 780201 - RNA, 22 nt, Human
caaaagaauaagaggauuuaga

SEQ ID NO: 780202 - RNA, 18 nt, Human
caaagcaaaagcaggggc

SEQ ID NO: 780203 - RNA, 23 nt, Human
caaagcaaaagcaggggcaaaaa

SEQ ID NO: 780204 - RNA, 21 nt, Human
cacacucucgcuccugcucgc

SEQ ID NO: 780205 - RNA, 26 nt, Human
cacggccccggccccggccccgaagu

SEQ ID NO: 780206 - RNA, 22 nt, Human
cacucacucgacacacucucgc

SEQ ID NO: 780207 - RNA, 22 nt, Human
cacuguaugacaauacuuaaac

SEQ ID NO: 780208 - RNA, 22 nt, Human
cagcuggugagguauaauccaa

SEQ ID NO: 780209 - RNA, 21 nt, Human
cagucaggugaugccucuaug

SEQ ID NO: 780210 - RNA, 25 nt, Human
cauaacaaagaaauacuaggagaaa

SEQ ID NO: 780211 - RNA, 23 nt, Human
cauuuucuuccaaaaagauguug

SEQ ID NO: 780212 - RNA, 19 nt, Human
cauuuugugcagcugguga

SEQ ID NO: 780213 - RNA, 24 nt, Human
ccaaagcaaaagcaggggcaaaaa

SEQ ID NO: 780214 - RNA, 20 nt, Human
ccagaaucugucauguugac

SEQ ID NO: 780215 - RNA, 19 nt, Human
cccaggagcuggaaacgag

SEQ ID NO: 780216 - RNA, 22 nt, Human
ccccggccccgaaguccagcuc

SEQ ID NO: 780217 - RNA, 26 nt, Human
ccccggccccggccccgaaguccagc

SEQ ID NO: 780218 - RNA, 26 nt, Human
ccccggcgcacggccccggccccggc

SEQ ID NO: 780219 - RNA, 21 nt, Human
cccgcagcucaaucgcagggc

SEQ ID NO: 780220 - RNA, 22 nt, Human
cccggcccugccuguccccggc

SEQ ID NO: 780221 - RNA, 21 nt, Human
cccggccgggcgcuccccucg

SEQ ID NO: 780222 - RNA, 23 nt, Human
cccggcgccgagcgcgcacccuc

SEQ ID NO: 780223 - RNA, 19 nt, Human
cccucgucccucuucacuc

SEQ ID NO: 780224 - RNA, 23 nt, Human
cccucuucacucgcagaucuccg

SEQ ID NO: 780225 - RNA, 18 nt, Human
cccuugggagaaauuucc

SEQ ID NO: 780226 - RNA, 18 nt, Human
ccgagcgcgcacccucgc

SEQ ID NO: 780227 - RNA, 18 nt, Human
ccggccgcgacccgcagc

SEQ ID NO: 780228 - RNA, 19 nt, Human
ccuccagccacacacauuu

SEQ ID NO: 780229 - RNA, 18 nt, Human
ccucuccacguugccucu

SEQ ID NO: 780230 - RNA, 18 nt, Human
ccugaaguuaucucugcu

SEQ ID NO: 780231 - RNA, 26 nt, Human
ccugcugguuauccuccagaaucugu

SEQ ID NO: 780232 - RNA, 25 nt, Human
ccuguccccggcgcacggccccggc

SEQ ID NO: 780233 - RNA, 23 nt, Human
cgacugccuuugccgaaagccuc

SEQ ID NO: 780234 - RNA, 22 nt, Human
cgcacacucacucgacacacuc

SEQ ID NO: 780235 - RNA, 18 nt, Human
cgccuccagccacacaca

SEQ ID NO: 780236 - RNA, 21 nt, Human
cguuuauugacaccaccacuc

SEQ ID NO: 780237 - RNA, 23 nt, Human
cucccggcgccgagcgcgcaccc

SEQ ID NO: 780238 - RNA, 19 nt, Human
cuuuugggaugcgggaguc

SEQ ID NO: 780239 - RNA, 19 nt, Human
gaaauguccacaacugcga

SEQ ID NO: 780240 - RNA, 27 nt, Human
gacugcuuuuccccuauuaucuuuagg

SEQ ID NO: 780241 - RNA, 22 nt, Human
gagcguuuauugacaccaccac

SEQ ID NO: 780242 - RNA, 27 nt, Human
gagcuggaaacgagggagggaagcgag

SEQ ID NO: 780243 - RNA, 24 nt, Human
gcccaggagcuggaaacgagggag

SEQ ID NO: 780244 - RNA, 23 nt, Human
gccccgaaguccagcuccggacg

SEQ ID NO: 780245 - RNA, 23 nt, Human
gccccggccccgaaguccagcuc

SEQ ID NO: 780246 - RNA, 21 nt, Human
gcccucggcggagaguugaaa

SEQ ID NO: 780247 - RNA, 24 nt, Human
ggcagugaacgcagagcugggguc

SEQ ID NO: 780248 - RNA, 18 nt, Human
ggcuuuguuucuuuuccc

SEQ ID NO: 780249 - RNA, 20 nt, Human
gggagaaauuuccaaggaaa

SEQ ID NO: 780250 - RNA, 20 nt, Human
ggggcagugaacgcagagaa

SEQ ID NO: 780251 - RNA, 21 nt, Human
guccccggcgcacggccccgg

SEQ ID NO: 780252 - RNA, 22 nt, Human
gugagcuucugggggagggucg

SEQ ID NO: 780253 - RNA, 22 nt, Human
gugauaaauucaggagggccau

SEQ ID NO: 780254 - RNA, 18 nt, Human
guugaaacagauguggga

SEQ ID NO: 780255 - RNA, 25 nt, Human
uaaaaaaaaaacaucaguucuggga

SEQ ID NO: 780256 - RNA, 19 nt, Human
uaaaaaaacagacacacca

SEQ ID NO: 780257 - RNA, 20 nt, Human
uaaaaaaacagacacaccaa

SEQ ID NO: 780258 - RNA, 24 nt, Human
uaaaaaaacagacacaccaaaaaa

SEQ ID NO: 780259 - RNA, 21 nt, Human
uaaaaaacgccacuagggagu

SEQ ID NO: 780260 - RNA, 24 nt, Human
uaaaaaaugaaguaccaaagcugg

SEQ ID NO: 780261 - RNA, 21 nt, Human
uaacaaagaaauacuaggaga

SEQ ID NO: 780262 - RNA, 18 nt, Human
uacauguaaauagucaca

SEQ ID NO: 780263 - RNA, 19 nt, Human
uaccacaggucugcuggaa

SEQ ID NO: 780264 - RNA, 18 nt, Human
uaccuuaaaaaaaaaaca

SEQ ID NO: 780265 - RNA, 26 nt, Human
uacuuuaaaaaaacagacacaccaaa

SEQ ID NO: 780266 - RNA, 18 nt, Human
uagguaaaugucaucucu

SEQ ID NO: 780267 - RNA, 20 nt, Human
ucaaucgcagggcaaaccga

SEQ ID NO: 780268 - RNA, 19 nt, Human
ucauuucuuuucaguaccc

SEQ ID NO: 780269 - RNA, 22 nt, Human
uccaaagcaaaagcaggggcaa

SEQ ID NO: 780270 - RNA, 23 nt, Human
uccccgagaaauuaacuucggcu

SEQ ID NO: 780271 - RNA, 24 nt, Human
uccccggcgcacggccccggcccu

SEQ ID NO: 780272 - RNA, 18 nt, Human
ucccggcggcucucgacc

SEQ ID NO: 780273 - RNA, 20 nt, Human
ucccucgucccucuucacuc

SEQ ID NO: 780274 - RNA, 18 nt, Human
uccgcuuucuucuucucc

SEQ ID NO: 780275 - RNA, 22 nt, Human
ucuacaaccaucuacuccccuu

SEQ ID NO: 780276 - RNA, 19 nt, Human
ucucucucgcucgcucucu

SEQ ID NO: 780277 - RNA, 19 nt, Human
ucugcaaacacucgacugc

SEQ ID NO: 780278 - RNA, 20 nt, Human
ucugccucuuuuccgcuuuc

SEQ ID NO: 780279 - RNA, 24 nt, Human
ucugccucuuuuccgcuuucuucu

SEQ ID NO: 780280 - RNA, 18 nt, Human
ucugcuggaaaucaccca

SEQ ID NO: 780281 - RNA, 20 nt, Human
ucuucagaggcaaccagggu

SEQ ID NO: 780282 - RNA, 24 nt, Human
ugaaguaccaaagcugguauacua

SEQ ID NO: 780283 - RNA, 22 nt, Human
ugagguauaauccaaagcaaaa

SEQ ID NO: 780284 - RNA, 26 nt, Human
ugccucuguccugcuucuuaguuccu

SEQ ID NO: 780285 - RNA, 25 nt, Human
ugccucuguccugcuucuuaguucu

SEQ ID NO: 780286 - RNA, 21 nt, Human
ugccuguccccggcgcacggc

SEQ ID NO: 780287 - RNA, 21 nt, Human
ugccugugcgcgcccgagaac

SEQ ID NO: 780288 - RNA, 23 nt, Human
uggcuuuguuucuuuucccucgu

SEQ ID NO: 780289 - RNA, 22 nt, Human
uggggcauugaaacaaaugugg

SEQ ID NO: 780290 - RNA, 19 nt, Human
uggucauuggcugggguuu

SEQ ID NO: 780291 - RNA, 26 nt, Human
uguaaauagucacauauauacaauga

SEQ ID NO: 780292 - RNA, 21 nt, Human
ugucaaacgucucugcacugu

SEQ ID NO: 780293 - RNA, 19 nt, Human
ugugcacgugugugugcgu

SEQ ID NO: 780294 - RNA, 20 nt, Human
ugugcacgugugugugcgua

SEQ ID NO: 780295 - RNA, 20 nt, Human
ugugugcacgugugugugcg

SEQ ID NO: 780296 - RNA, 22 nt, Human
ugugugcacgugugugugcgua

SEQ ID NO: 780297 - RNA, 28 nt, Human
uguuuggggcauugaaacaaaugugggu

SEQ ID NO: 780298 - RNA, 24 nt, Human
uuaaaaaaacagacacaccaaaaa

SEQ ID NO: 780299 - RNA, 20 nt, Human
uuccccuaaaaguucccaug

SEQ ID NO: 780300 - RNA, 20 nt, Human
uugccugugcagucagguga

SEQ ID NO: 780301 - RNA, 23 nt, Human
uuucucaggccuccuggccaaua

SEQ ID NO: 780302 - RNA, 25 nt, Human
uuuuaaaaaaugaaguaccaaagcu

SEQ ID NO: 780303 - RNA, 23 nt, Human
uuuucagccucuccacguugccu

SEQ ID NO: 780304 - RNA, 21 nt, Human
aaagugcugggauuacaaggg

SEQ ID NO: 780305 - RNA, 24 nt, Human
aaagugcugggauuacaaggguga

SEQ ID NO: 780306 - RNA, 20 nt, Human
aaccucugccuccugggcuc

SEQ ID NO: 780307 - RNA, 21 nt, Human
aagagcagcggauacagacaa

SEQ ID NO: 780308 - RNA, 20 nt, Human
aagauuuuucagacaacugg

SEQ ID NO: 780309 - RNA, 19 nt, Human
aagcaaaaacauacacaac

SEQ ID NO: 780310 - RNA, 25 nt, Human
aagcaauccucccaccucagccucc

SEQ ID NO: 780311 - RNA, 23 nt, Human
aagcaguaaaaucuaauucaugc

SEQ ID NO: 780312 - RNA, 20 nt, Human
aagcuucauuagacacuagu

SEQ ID NO: 780313 - RNA, 18 nt, Human
aagugcugggauuacaag

SEQ ID NO: 780314 - RNA, 21 nt, Human
aagugcugggauuacaagggu

SEQ ID NO: 780315 - RNA, 26 nt, Human
aagugcugggauuacaagggugagcu

SEQ ID NO: 780316 - RNA, 18 nt, Human
acaggguuucaccauguu

SEQ ID NO: 780317 - RNA, 19 nt, Human
acaggguuucaccauguug

SEQ ID NO: 780318 - RNA, 24 nt, Human
acaggguuucaccauguugcccag

SEQ ID NO: 780319 - RNA, 22 nt, Human
accauguugcccaggcuggucu

SEQ ID NO: 780320 - RNA, 25 nt, Human
accauguugcccaggcuggucuuga

SEQ ID NO: 780321 - RNA, 20 nt, Human
accgacaccuccauccauaa

SEQ ID NO: 780322 - RNA, 24 nt, Human
accgacaccuccauccauaaccua

SEQ ID NO: 780323 - RNA, 19 nt, Human
accuguuuaugggucaugc

SEQ ID NO: 780324 - RNA, 25 nt, Human
acucuguugcccaggcuagagugca

SEQ ID NO: 780325 - RNA, 23 nt, Human
agaaugcuauuauuggccaacuu

SEQ ID NO: 780326 - RNA, 24 nt, Human
agcccaauaauggccacuuuuacu

SEQ ID NO: 780327 - RNA, 22 nt, Human
agcuucuuucucgccuuuccga

SEQ ID NO: 780328 - RNA, 20 nt, Human
aggaguuuauucuaaaacaa

SEQ ID NO: 780329 - RNA, 23 nt, Human
agguuggggaauuaagcugaauu

SEQ ID NO: 780330 - RNA, 19 nt, Human
aguaaucuacccaccucag

SEQ ID NO: 780331 - RNA, 20 nt, Human
agucuguauuucagugucuu

SEQ ID NO: 780332 - RNA, 20 nt, Human
agugcagugacgugaccuug

SEQ ID NO: 780333 - RNA, 24 nt, Human
agugcagugacgugaccuuggcuc

SEQ ID NO: 780334 - RNA, 19 nt, Human
auaagguuggggaauuaag

SEQ ID NO: 780335 - RNA, 21 nt, Human
auagaaacaggguuucaccau

SEQ ID NO: 780336 - RNA, 21 nt, Human
caaacacuuccuucuaaccca

SEQ ID NO: 780337 - RNA, 24 nt, Human
caaagugcugggauuacaagggug

SEQ ID NO: 780338 - RNA, 19 nt, Human
caaauaacuaaacucucau

SEQ ID NO: 780339 - RNA, 23 nt, Human
caacacaucaaauauuucaaaag

SEQ ID NO: 780340 - RNA, 23 nt, Human
caaccucugccuccugggcucaa

SEQ ID NO: 780341 - RNA, 20 nt, Human
caacgucacaagagcagcgg

SEQ ID NO: 780342 - RNA, 27 nt, Human
caagcaauccucccaccucagccuccu

SEQ ID NO: 780343 - RNA, 19 nt, Human
caaguaaucuacccaccuc

SEQ ID NO: 780344 - RNA, 24 nt, Human
caccauguugcccaggcuggucuu

SEQ ID NO: 780345 - RNA, 27 nt, Human
caccauguugcccaggcuggucuugaa

SEQ ID NO: 780346 - RNA, 24 nt, Human
caccucagccucccaaagugcugg

SEQ ID NO: 780347 - RNA, 24 nt, Human
caccucagccuccucaguagcugg

SEQ ID NO: 780348 - RNA, 21 nt, Human
cacugcaaccucugccuccug

SEQ ID NO: 780349 - RNA, 23 nt, Human
cacugcaaccucugccuccuggg

SEQ ID NO: 780350 - RNA, 21 nt, Human
cacuggagaaguuacauggga

SEQ ID NO: 780351 - RNA, 19 nt, Human
cacuuuguuggcaaaggcc

SEQ ID NO: 780352 - RNA, 24 nt, Human
caggguuucaccauguugcccagg

SEQ ID NO: 780353 - RNA, 24 nt, Human
caguagcugggaccacaggcauau

SEQ ID NO: 780354 - RNA, 19 nt, Human
caucaaauauuucaaaagg

SEQ ID NO: 780355 - RNA, 18 nt, Human
caugcuggacaccagcaa

SEQ ID NO: 780356 - RNA, 19 nt, Human
cauguugcccaggcugguc

SEQ ID NO: 780357 - RNA, 20 nt, Human
cauguugcccaggcuggucu

SEQ ID NO: 780358 - RNA, 24 nt, Human
cauguugcccaggcuggucuugaa

SEQ ID NO: 780359 - RNA, 19 nt, Human
ccaaagugcugggauuaca

SEQ ID NO: 780360 - RNA, 21 nt, Human
ccaaagugcugggauuacaag

SEQ ID NO: 780361 - RNA, 24 nt, Human
ccaaagugcugggauuacaagggu

SEQ ID NO: 780362 - RNA, 22 nt, Human
ccaccucagccuccucaguagc

SEQ ID NO: 780363 - RNA, 19 nt, Human
ccacuaaacacucccuacc

SEQ ID NO: 780364 - RNA, 21 nt, Human
ccaggcaacacaucaaauauu

SEQ ID NO: 780365 - RNA, 22 nt, Human
cccaggcuagagugcagugacg

SEQ ID NO: 780366 - RNA, 25 nt, Human
ccgacaccuccauccauaaccuaca

SEQ ID NO: 780367 - RNA, 23 nt, Human
ccucccaccucagccuccucagu

SEQ ID NO: 780368 - RNA, 19 nt, Human
ccucugccuccugggcuca

SEQ ID NO: 780369 - RNA, 20 nt, Human
ccugggcucaagcaauccuc

SEQ ID NO: 780370 - RNA, 18 nt, Human
ccugggcucaaguaaucu

SEQ ID NO: 780371 - RNA, 24 nt, Human
ccugggcucaaguaaucuacccac

SEQ ID NO: 780372 - RNA, 21 nt, Human
ccuucuaacccaugauuaucc

SEQ ID NO: 780373 - RNA, 24 nt, Human
cucaagcaauccucccaccucagc

SEQ ID NO: 780374 - RNA, 24 nt, Human
cucaaguaaucuacccaccucagc

SEQ ID NO: 780375 - RNA, 24 nt, Human
cucacugcaaccucugccuccugg

SEQ ID NO: 780376 - RNA, 24 nt, Human
cucagccuccucaguagcugggac

SEQ ID NO: 780377 - RNA, 24 nt, Human
cuccucaguagcugggaccacagg

SEQ ID NO: 780378 - RNA, 23 nt, Human
cugcaaccucugccuccugggcu

SEQ ID NO: 780379 - RNA, 24 nt, Human
cugcaaccucugccuccugggcuc

SEQ ID NO: 780380 - RNA, 21 nt, Human
cuggacaccagcaauccacau

SEQ ID NO: 780381 - RNA, 20 nt, Human
cuugaauuccugggcucaag

SEQ ID NO: 780382 - RNA, 21 nt, Human
cuuucaugcuagaagucucac

SEQ ID NO: 780383 - RNA, 20 nt, Human
gacaccuccauccauaaccu

SEQ ID NO: 780384 - RNA, 19 nt, Human
gaccuuggcucacugcaac

SEQ ID NO: 780385 - RNA, 19 nt, Human
gcuagagugcagugacgug

SEQ ID NO: 780386 - RNA, 21 nt, Human
gcucacugcaaccucugccuc

SEQ ID NO: 780387 - RNA, 19 nt, Human
ggauacagacaagauggag

SEQ ID NO: 780388 - RNA, 18 nt, Human
gggcucaaguaaucuacc

SEQ ID NO: 780389 - RNA, 24 nt, Human
gggcucaaguaaucuacccaccuc

SEQ ID NO: 780390 - RNA, 24 nt, Human
guaaucuacccaccucagccuccc

SEQ ID NO: 780391 - RNA, 19 nt, Human
guggaauacaaugucuaca

SEQ ID NO: 780392 - RNA, 19 nt, Human
uaaaacacagccauucaaa

SEQ ID NO: 780393 - RNA, 24 nt, Human
uaaaaucuaauucaugccagaaca

SEQ ID NO: 780394 - RNA, 23 nt, Human
uaacaaaaugacaagcaguaaaa

SEQ ID NO: 780395 - RNA, 26 nt, Human
uaacuaaacucucauacugcuugauu

SEQ ID NO: 780396 - RNA, 25 nt, Human
uaagaaaauaacaaaaugacaagca

SEQ ID NO: 780397 - RNA, 19 nt, Human
uaagguuggggaauuaagc

SEQ ID NO: 780398 - RNA, 24 nt, Human
uaaucuacccaccucagccuccca

SEQ ID NO: 780399 - RNA, 20 nt, Human
uaaugcuugcuaaaacagcu

SEQ ID NO: 780400 - RNA, 20 nt, Human
uacaaauaacuaaacucuca

SEQ ID NO: 780401 - RNA, 22 nt, Human
uacaagggugagcuaccgugcu

SEQ ID NO: 780402 - RNA, 22 nt, Human
uacccaccucagccucccaaag

SEQ ID NO: 780403 - RNA, 23 nt, Human
uacccaccucagccucccaaagu

SEQ ID NO: 780404 - RNA, 24 nt, Human
uacucuguugcccaggcuagagug

SEQ ID NO: 780405 - RNA, 22 nt, Human
uagaaacaggguuucaccaugu

SEQ ID NO: 780406 - RNA, 27 nt, Human
uagugacacauacaaauaacuaaacuc

SEQ ID NO: 780407 - RNA, 23 nt, Human
uauagaaacaggguuucaccaug

SEQ ID NO: 780408 - RNA, 18 nt, Human
uauagagcagagaauaag

SEQ ID NO: 780409 - RNA, 21 nt, Human
uauuauuggccaacuugaaau

SEQ ID NO: 780410 - RNA, 18 nt, Human
uauucuaaaacauuccau

SEQ ID NO: 780411 - RNA, 19 nt, Human
ucaaagugacuuucaaaca

SEQ ID NO: 780412 - RNA, 24 nt, Human
ucacugcaaccucugccuccuggg

SEQ ID NO: 780413 - RNA, 25 nt, Human
ucacugcaaccucugccuccugggc

SEQ ID NO: 780414 - RNA, 26 nt, Human
ucacugcaaccucugccuccugggcu

SEQ ID NO: 780415 - RNA, 21 nt, Human
ucacuuuguuggcaaaggcca

SEQ ID NO: 780416 - RNA, 21 nt, Human
ucagaguuccaaacauuucca

SEQ ID NO: 780417 - RNA, 18 nt, Human
ucagccucccaaagugcu

SEQ ID NO: 780418 - RNA, 20 nt, Human
ucaguagcugggaccacagg

SEQ ID NO: 780419 - RNA, 21 nt, Human
ucaguagcugggaccacaggc

SEQ ID NO: 780420 - RNA, 23 nt, Human
ucccaaagugcugggauuacaag

SEQ ID NO: 780421 - RNA, 25 nt, Human
ucccaaagugcugggauuacaaggg

SEQ ID NO: 780422 - RNA, 18 nt, Human
uccugggcucaagcaauc

SEQ ID NO: 780423 - RNA, 22 nt, Human
uccugggcucaagcaauccucc

SEQ ID NO: 780424 - RNA, 24 nt, Human
uccugggcucaagcaauccuccca

SEQ ID NO: 780425 - RNA, 19 nt, Human
ucuacacacagaauaaggu

SEQ ID NO: 780426 - RNA, 21 nt, Human
ucuacccaccucagccuccca

SEQ ID NO: 780427 - RNA, 24 nt, Human
ucugccuccugggcucaagcaauc

SEQ ID NO: 780428 - RNA, 21 nt, Human
ucuguauuucagugucuucau

SEQ ID NO: 780429 - RNA, 18 nt, Human
ucuguugcccaggcuaga

SEQ ID NO: 780430 - RNA, 24 nt, Human
ucuguugcccaggcuagagugcag

SEQ ID NO: 780431 - RNA, 19 nt, Human
ucuuacucuguugcccagg

SEQ ID NO: 780432 - RNA, 23 nt, Human
ucuuacucuguugcccaggcuag

SEQ ID NO: 780433 - RNA, 24 nt, Human
ucuuacucuguugcccaggcuaga

SEQ ID NO: 780434 - RNA, 20 nt, Human
ugacaagcaguaaaaucuaa

SEQ ID NO: 780435 - RNA, 24 nt, Human
ugacacauacaaauaacuaaacuc

SEQ ID NO: 780436 - RNA, 20 nt, Human
ugcagugacgugaccuuggc

SEQ ID NO: 780437 - RNA, 23 nt, Human
ugcccaggcuagagugcagugac

SEQ ID NO: 780438 - RNA, 24 nt, Human
ugcccaggcuggucuugaauuccu

SEQ ID NO: 780439 - RNA, 24 nt, Human
ugccuccugggcucaagcaauccu

SEQ ID NO: 780440 - RNA, 20 nt, Human
ugcugggauuacaaggguga

SEQ ID NO: 780441 - RNA, 20 nt, Human
uggcauuuaagugacuuguu

SEQ ID NO: 780442 - RNA, 21 nt, Human
uggcccaaaacuaacuuucaa

SEQ ID NO: 780443 - RNA, 19 nt, Human
ugggaccacaggcauaugc

SEQ ID NO: 780444 - RNA, 21 nt, Human
ugggaccacaggcauaugcua

SEQ ID NO: 780445 - RNA, 23 nt, Human
ugggaccacaggcauaugcuaca

SEQ ID NO: 780446 - RNA, 22 nt, Human
ugggauuacaagggugagcuac

SEQ ID NO: 780447 - RNA, 23 nt, Human
ugggauuacaagggugagcuacc

SEQ ID NO: 780448 - RNA, 24 nt, Human
ugggauuacaagggugagcuaccg

SEQ ID NO: 780449 - RNA, 20 nt, Human
ugguaagaaaauaacaaaau

SEQ ID NO: 780450 - RNA, 23 nt, Human
uuauagaaacaggguuucaccau

SEQ ID NO: 780451 - RNA, 24 nt, Human
uuauagaaacaggguuucaccaug

SEQ ID NO: 780452 - RNA, 21 nt, Human
uucaaacacuuccuucuaacc

SEQ ID NO: 780453 - RNA, 22 nt, Human
uucauuuuuuuaaaugagagaa

SEQ ID NO: 780454 - RNA, 19 nt, Human
uugcaguauccugccaggc

SEQ ID NO: 780455 - RNA, 18 nt, Human
uugcccaggcuagagugc

SEQ ID NO: 780456 - RNA, 21 nt, Human
uuucaaagugacuuucaaaca

SEQ ID NO: 780457 - RNA, 22 nt, Human
uuucaccauguugcccaggcug

SEQ ID NO: 780458 - RNA, 23 nt, Human
uuucaccauguugcccaggcugg

SEQ ID NO: 780459 - RNA, 24 nt, Human
uuucaccauguugcccaggcuggu

SEQ ID NO: 780460 - RNA, 23 nt, Human
uuuuuauagaaacaggguuucac

SEQ ID NO: 780461 - RNA, 22 nt, Human
aaaaaaaauucaacgaagcuaa

SEQ ID NO: 780462 - RNA, 20 nt, Human
aaaauacaacagugaugcug

SEQ ID NO: 780463 - RNA, 18 nt, Human
aaacaaagcaaaacaaaa

SEQ ID NO: 780464 - RNA, 24 nt, Human
aaacacucaaaagauaacaaagaa

SEQ ID NO: 780465 - RNA, 24 nt, Human
aaaggccaccucacucaagaagcc

SEQ ID NO: 780466 - RNA, 29 nt, Human
aaaucauaaaaaugcuauccaaucuacaa

SEQ ID NO: 780467 - RNA, 19 nt, Human
aacauggugaaaccccauc

SEQ ID NO: 780468 - RNA, 20 nt, Human
aacauggugaaaccccaucu

SEQ ID NO: 780469 - RNA, 20 nt, Human
aacauggugaaaccccaucu

SEQ ID NO: 780470 - RNA, 21 nt, Human
aacauggugaaaccccaucuc

SEQ ID NO: 780471 - RNA, 22 nt, Human
aagaaaacaagucagcaagcuc

SEQ ID NO: 780472 - RNA, 29 nt, Human
aagaaaugugacaauaaaauaaugagauu

SEQ ID NO: 780473 - RNA, 24 nt, Human
aagaacuaccacucccgaagugga

SEQ ID NO: 780474 - RNA, 25 nt, Human
aagaacuaccacucccgaaguggag

SEQ ID NO: 780475 - RNA, 20 nt, Human
aagaagccuuuccaaacacc

SEQ ID NO: 780476 - RNA, 27 nt, Human
aagaaggaaaaagaaauucaugcauag

SEQ ID NO: 780477 - RNA, 21 nt, Human
aaguaucccuaagauaaggau

SEQ ID NO: 780478 - RNA, 20 nt, Human
aagucucaacuuuuucuuac

SEQ ID NO: 780479 - RNA, 20 nt, Human
aaucaccugaacccaggaga

SEQ ID NO: 780480 - RNA, 24 nt, Human
aaucaccugaacccaggagacaga

SEQ ID NO: 780481 - RNA, 26 nt, Human
aaucauaaaaaugcuauccaaucuag

SEQ ID NO: 780482 - RNA, 18 nt, Human
aaucuuaucccacccgcc

SEQ ID NO: 780483 - RNA, 18 nt, Human
aaugaaaagaaacaaacu

SEQ ID NO: 780484 - RNA, 22 nt, Human
aauuacccuugccccaaaccuu

SEQ ID NO: 780485 - RNA, 18 nt, Human
acaaagcaaaacaaaagu

SEQ ID NO: 780486 - RNA, 23 nt, Human
acagcucgggcgccaaugacgcc

SEQ ID NO: 780487 - RNA, 24 nt, Human
acauuauacaaagcauaaauuuuu

SEQ ID NO: 780488 - RNA, 24 nt, Human
acccaggagacagagguugcagug

SEQ ID NO: 780489 - RNA, 18 nt, Human
accccaucucuacuaaaa

SEQ ID NO: 780490 - RNA, 18 nt, Human
accuacaccgcuuuccuu

SEQ ID NO: 780491 - RNA, 19 nt, Human
accuguggucaacuguggu

SEQ ID NO: 780492 - RNA, 23 nt, Human
acuacccacccauuaaucaccua

SEQ ID NO: 780493 - RNA, 18 nt, Human
acuacuauccaacaagau

SEQ ID NO: 780494 - RNA, 23 nt, Human
acuaguauagucccaguuuagau

SEQ ID NO: 780495 - RNA, 20 nt, Human
acugcacuccagccuggcug

SEQ ID NO: 780496 - RNA, 22 nt, Human
acugccaacuaacccucuccac

SEQ ID NO: 780497 - RNA, 21 nt, Human
acuuagaaacaaaagaaaaga

SEQ ID NO: 780498 - RNA, 23 nt, Human
acuuugggagguagacaugugug

SEQ ID NO: 780499 - RNA, 29 nt, Human
agacaagaagugaguguaagagggacccc

SEQ ID NO: 780500 - RNA, 24 nt, Human
agacaccagaaucagucucauuau

SEQ ID NO: 780501 - RNA, 20 nt, Human
agacagagguugcagugagc

SEQ ID NO: 780502 - RNA, 24 nt, Human
agacagagguugcagugagcugag

SEQ ID NO: 780503 - RNA, 22 nt, Human
agagguugcagugagcugagau

SEQ ID NO: 780504 - RNA, 24 nt, Human
agagguugcagugagcugagaucg

SEQ ID NO: 780505 - RNA, 22 nt, Human
agcacuuugggagguagacaug

SEQ ID NO: 780506 - RNA, 30 nt, Human
agcauaaaauggggcccuucauggucugcc

SEQ ID NO: 780507 - RNA, 23 nt, Human
agccgggugugguggcacgugcc

SEQ ID NO: 780508 - RNA, 22 nt, Human
agccuggccaacauggugaaac

SEQ ID NO: 780509 - RNA, 24 nt, Human
agccuggccaacauggugaaaccc

SEQ ID NO: 780510 - RNA, 20 nt, Human
aggagaaucaccugaaccca

SEQ ID NO: 780511 - RNA, 22 nt, Human
aggcgggguacaguggcucacg

SEQ ID NO: 780512 - RNA, 18 nt, Human
agggaggagaaucaccug

SEQ ID NO: 780513 - RNA, 20 nt, Human
agucccaccguauccacggc

SEQ ID NO: 780514 - RNA, 24 nt, Human
aguggcucacgacuguaaucccag

SEQ ID NO: 780515 - RNA, 21 nt, Human
aguucaguucaaaggccaccu

SEQ ID NO: 780516 - RNA, 19 nt, Human
auaaaaacaaccugcucgc

SEQ ID NO: 780517 - RNA, 21 nt, Human
auacacaucucucacaaacaa

SEQ ID NO: 780518 - RNA, 22 nt, Human
auccccuggccgcccaguuucc

SEQ ID NO: 780519 - RNA, 24 nt, Human
aucgugucacugcacuccagccug

SEQ ID NO: 780520 - RNA, 25 nt, Human
aucuauguuagaguucaauguauuu

SEQ ID NO: 780521 - RNA, 20 nt, Human
augacccaacccagaaaucu

SEQ ID NO: 780522 - RNA, 21 nt, Human
auuauauuuauucagaaagau

SEQ ID NO: 780523 - RNA, 23 nt, Human
caaaaaaaauucaacgaagcuaa

SEQ ID NO: 780524 - RNA, 25 nt, Human
caaaagagaugaccauagaacuaac

SEQ ID NO: 780525 - RNA, 22 nt, Human
caaaagcucacaacaccuacac

SEQ ID NO: 780526 - RNA, 21 nt, Human
caaagcaaaacaaaagucuca

SEQ ID NO: 780527 - RNA, 18 nt, Human
caacaagaugacccaacc

SEQ ID NO: 780528 - RNA, 22 nt, Human
caacaagaugacccaacccaga

SEQ ID NO: 780529 - RNA, 24 nt, Human
caacauggugaaaccccaucucua

SEQ ID NO: 780530 - RNA, 20 nt, Human
caacccagaaaucuagaagu

SEQ ID NO: 780531 - RNA, 18 nt, Human
caagaacagccuggccaa

SEQ ID NO: 780532 - RNA, 24 nt, Human
caagaacagccuggccaacauggu

SEQ ID NO: 780533 - RNA, 21 nt, Human
caagaagccuuuccaaacacc

SEQ ID NO: 780534 - RNA, 22 nt, Human
caagaugacccaacccagaaau

SEQ ID NO: 780535 - RNA, 18 nt, Human
caaguaucccuaagauaa

SEQ ID NO: 780536 - RNA, 23 nt, Human
caauccuaguauauccauauaaa

SEQ ID NO: 780537 - RNA, 21 nt, Human
cacaaacaaagcaaaacaaaa

SEQ ID NO: 780538 - RNA, 24 nt, Human
cacagcucgggcgccaaugacgcc

SEQ ID NO: 780539 - RNA, 22 nt, Human
cacaguguuuguguucaaguau

SEQ ID NO: 780540 - RNA, 20 nt, Human
cacaucucucacaaacaaag

SEQ ID NO: 780541 - RNA, 24 nt, Human
cacgacuguaaucccagcacuuug

SEQ ID NO: 780542 - RNA, 23 nt, Human
cacuccagccuggcugacaaagc

SEQ ID NO: 780543 - RNA, 18 nt, Human
cacugcacuccagccugg

SEQ ID NO: 780544 - RNA, 18 nt, Human
cacugcacuccagccugg

SEQ ID NO: 780545 - RNA, 21 nt, Human
cacugcacuccagccuggcug

SEQ ID NO: 780546 - RNA, 23 nt, Human
cacugcacuccagccuggcugac

SEQ ID NO: 780547 - RNA, 24 nt, Human
cacugcacuccagccuggcugaca

SEQ ID NO: 780548 - RNA, 25 nt, Human
cacugcacuccagccuggcugacaa

SEQ ID NO: 780549 - RNA, 18 nt, Human
cagcacuuugggagguag

SEQ ID NO: 780550 - RNA, 19 nt, Human
cagcuucaccuuuguucau

SEQ ID NO: 780551 - RNA, 21 nt, Human
cauagcaaauccucauuucuc

SEQ ID NO: 780552 - RNA, 20 nt, Human
caucuccaaaugaccuuccu

SEQ ID NO: 780553 - RNA, 18 nt, Human
caugcacaaaaucuguug

SEQ ID NO: 780554 - RNA, 24 nt, Human
ccaaacacaauucucaucuccaau

SEQ ID NO: 780555 - RNA, 24 nt, Human
ccaacaagaugacccaacccagaa

SEQ ID NO: 780556 - RNA, 21 nt, Human
ccacucccgaaguggagcgca

SEQ ID NO: 780557 - RNA, 20 nt, Human
ccauagaacuaacugccaac

SEQ ID NO: 780558 - RNA, 19 nt, Human
cccaaaauacaacagugau

SEQ ID NO: 780559 - RNA, 18 nt, Human
ccuauagucccagcuacu

SEQ ID NO: 780560 - RNA, 21 nt, Human
ccuauagucccagcuacuugg

SEQ ID NO: 780561 - RNA, 20 nt, Human
ccuccagacagccugaggcc

SEQ ID NO: 780562 - RNA, 21 nt, Human
ccuccagcucuacccugcuuc

SEQ ID NO: 780563 - RNA, 23 nt, Human
ccuggccaacauggugaaacccc

SEQ ID NO: 780564 - RNA, 24 nt, Human
ccuggccaacauggugaaacccca

SEQ ID NO: 780565 - RNA, 22 nt, Human
ccuguccuuagccuucccuaca

SEQ ID NO: 780566 - RNA, 23 nt, Human
cgacuguaaucccagcacuuugg

SEQ ID NO: 780567 - RNA, 23 nt, Human
cgcagugcaugccgugacgcgua

SEQ ID NO: 780568 - RNA, 20 nt, Human
cgcguagucccgccugcgcc

SEQ ID NO: 780569 - RNA, 21 nt, Human
cggcaggcggugaccggcugg

SEQ ID NO: 780570 - RNA, 22 nt, Human
cguagucccgccugcgccuccu

SEQ ID NO: 780571 - RNA, 24 nt, Human
cuagggaggagaaucaccugaacc

SEQ ID NO: 780572 - RNA, 19 nt, Human
cuauaguaagaacaaaccc

SEQ ID NO: 780573 - RNA, 19 nt, Human
cucacaacaccuacaccgc

SEQ ID NO: 780574 - RNA, 24 nt, Human
cucacgacuguaaucccagcacuu

SEQ ID NO: 780575 - RNA, 18 nt, Human
cuccagacagccugaggc

SEQ ID NO: 780576 - RNA, 24 nt, Human
cuccagacagccugaggccaccau

SEQ ID NO: 780577 - RNA, 22 nt, Human
cucugcugcaaauuuaacacaa

SEQ ID NO: 780578 - RNA, 22 nt, Human
cugcaaauuuaacacaaacauc

SEQ ID NO: 780579 - RNA, 23 nt, Human
cuggccaacauggugaaacccca

SEQ ID NO: 780580 - RNA, 21 nt, Human
cuguaaucccagcacuuuggg

SEQ ID NO: 780581 - RNA, 21 nt, Human
cuguggcugaaggugcuucug

SEQ ID NO: 780582 - RNA, 24 nt, Human
cuguggcugaaggugcuucugcuc

SEQ ID NO: 780583 - RNA, 24 nt, Human
cuuucuacuucuccuucacaagaa

SEQ ID NO: 780584 - RNA, 21 nt, Human
gaaaagaaacaaacuuggcca

SEQ ID NO: 780585 - RNA, 23 nt, Human
gaacauauauccugaagauaagg

SEQ ID NO: 780586 - RNA, 27 nt, Human
gaacauuuccagugucaaaaaaaauuc

SEQ ID NO: 780587 - RNA, 19 nt, Human
gaagccuuuccaaacaccu

SEQ ID NO: 780588 - RNA, 19 nt, Human
gaaguucuccauguccuac

SEQ ID NO: 780589 - RNA, 23 nt, Human
gacauguguggaucacuugaggu

SEQ ID NO: 780590 - RNA, 21 nt, Human
gagacagagguugcagugagc

SEQ ID NO: 780591 - RNA, 23 nt, Human
gagaucgugucacugcacuccag

SEQ ID NO: 780592 - RNA, 18 nt, Human
gaucacuugaggucagga

SEQ ID NO: 780593 - RNA, 22 nt, Human
gaucacuugaggucaggauuuc

SEQ ID NO: 780594 - RNA, 24 nt, Human
gaucacuugaggucaggauuucaa

SEQ ID NO: 780595 - RNA, 21 nt, Human
gaugaccauagaacuaacugc

SEQ ID NO: 780596 - RNA, 19 nt, Human
gauuguaaagaaggaaaaa

SEQ ID NO: 780597 - RNA, 23 nt, Human
gcagcggugaagagaagaacuac

SEQ ID NO: 780598 - RNA, 24 nt, Human
gccaacauggugaaaccccaucuc

SEQ ID NO: 780599 - RNA, 22 nt, Human
gccauuugucuuccauuagugc

SEQ ID NO: 780600 - RNA, 20 nt, Human
gccucuuauaaaaacaaccu

SEQ ID NO: 780601 - RNA, 21 nt, Human
gcugcaaauuuaacacaaaca

SEQ ID NO: 780602 - RNA, 27 nt, Human
gcuuccgucacuacuucacuggaaguc

SEQ ID NO: 780603 - RNA, 18 nt, Human
ggcgggguacaguggcuc

SEQ ID NO: 780604 - RNA, 18 nt, Human
ggcugccccaguggcggc

SEQ ID NO: 780605 - RNA, 23 nt, Human
gguacaguggcucacgacuguaa

SEQ ID NO: 780606 - RNA, 24 nt, Human
gguggcacgugccuauagucccag

SEQ ID NO: 780607 - RNA, 20 nt, Human
guagcagucuguuaaucaga

SEQ ID NO: 780608 - RNA, 21 nt, Human
guaguuuuauuguuucuucca

SEQ ID NO: 780609 - RNA, 24 nt, Human
gucaacuguggucugaaaauguua

SEQ ID NO: 780610 - RNA, 24 nt, Human
guugcagugagcugagaucguguc

SEQ ID NO: 780611 - RNA, 21 nt, Human
guugcucauuccuagcuucca

SEQ ID NO: 780612 - RNA, 23 nt, Human
uaaaaaaugaagcuaacauuuga

SEQ ID NO: 780613 - RNA, 21 nt, Human
uaaaaaugcuauccaaucuac

SEQ ID NO: 780614 - RNA, 19 nt, Human
uaaagacaccagaaucagu

SEQ ID NO: 780615 - RNA, 18 nt, Human
uaaagcacaacucuuaga

SEQ ID NO: 780616 - RNA, 27 nt, Human
uaagugaaauucccuucccugucugca

SEQ ID NO: 780617 - RNA, 20 nt, Human
uaccacucccgaaguggagc

SEQ ID NO: 780618 - RNA, 19 nt, Human
uacccugcuuccuuaaagc

SEQ ID NO: 780619 - RNA, 18 nt, Human
uacugucauccccuggcc

SEQ ID NO: 780620 - RNA, 25 nt, Human
uagacauguguggaucacuugaggu

SEQ ID NO: 780621 - RNA, 18 nt, Human
uagauaccagcuuaauga

SEQ ID NO: 780622 - RNA, 22 nt, Human
uagccgggugugguggcacgug

SEQ ID NO: 780623 - RNA, 19 nt, Human
uagggaggagaaucaccug

SEQ ID NO: 780624 - RNA, 24 nt, Human
uagucccaccguauccacggcuuu

SEQ ID NO: 780625 - RNA, 19 nt, Human
uauaaggcuguggcugaag

SEQ ID NO: 780626 - RNA, 21 nt, Human
ucaagaagccuuuccaaacac

SEQ ID NO: 780627 - RNA, 28 nt, Human
ucacucaagaagccuuuccaaacaccuc

SEQ ID NO: 780628 - RNA, 19 nt, Human
ucacugcacuccagccugg

SEQ ID NO: 780629 - RNA, 20 nt, Human
ucacugcacuccagccuggc

SEQ ID NO: 780630 - RNA, 24 nt, Human
ucacugcacuccagccuggcugac

SEQ ID NO: 780631 - RNA, 21 nt, Human
ucagaaauaauucaucaguuu

SEQ ID NO: 780632 - RNA, 20 nt, Human
ucauaccuuucccaucaauc

SEQ ID NO: 780633 - RNA, 20 nt, Human
uccagugucaaaaaaaauuc

SEQ ID NO: 780634 - RNA, 23 nt, Human
uccagugucaaaaaaaauucaac

SEQ ID NO: 780635 - RNA, 18 nt, Human
uccccuggccgcccaguu

SEQ ID NO: 780636 - RNA, 23 nt, Human
ucgugucacugcacuccagccug

SEQ ID NO: 780637 - RNA, 24 nt, Human
ucuauaguaagaacaaaccggggc

SEQ ID NO: 780638 - RNA, 21 nt, Human
ucucuacuaaaaauaugaaaa

SEQ ID NO: 780639 - RNA, 23 nt, Human
ucucucaguggccauaaagcaca

SEQ ID NO: 780640 - RNA, 22 nt, Human
ucuucagaaguucuccaugucc

SEQ ID NO: 780641 - RNA, 24 nt, Human
ugaaaagaaacaaacuuggccaaa

SEQ ID NO: 780642 - RNA, 27 nt, Human
ugaaaagaaacaaacuuggccaaagua

SEQ ID NO: 780643 - RNA, 22 nt, Human
ugaaaauuagccggguguggug

SEQ ID NO: 780644 - RNA, 19 nt, Human
ugaaaccccaucucuacua

SEQ ID NO: 780645 - RNA, 21 nt, Human
ugaaggggcagcgccaccucc

SEQ ID NO: 780646 - RNA, 26 nt, Human
ugacccaacccagaaaucuagaaguc

SEQ ID NO: 780647 - RNA, 23 nt, Human
ugagauggcuuuuggauuuucaa

SEQ ID NO: 780648 - RNA, 22 nt, Human
ugagcugagaucgugucacugc

SEQ ID NO: 780649 - RNA, 23 nt, Human
ugaguaauguaaugaaauaaugc

SEQ ID NO: 780650 - RNA, 19 nt, Human
ugccgugacgcguaguccc

SEQ ID NO: 780651 - RNA, 24 nt, Human
ugccuauagucccagcuacuuggg

SEQ ID NO: 780652 - RNA, 23 nt, Human
ugccuggaguuuucaauauuuac

SEQ ID NO: 780653 - RNA, 25 nt, Human
uggaauggacaagugaaaauaggug

SEQ ID NO: 780654 - RNA, 20 nt, Human
uggaucacuugaggucagga

SEQ ID NO: 780655 - RNA, 23 nt, Human
uggaucacuugaggucaggauuu

SEQ ID NO: 780656 - RNA, 21 nt, Human
uggcaaaaaagggaaacacuc

SEQ ID NO: 780657 - RNA, 24 nt, Human
uggcaaaaaagggaaacacucaaa

SEQ ID NO: 780658 - RNA, 24 nt, Human
uggccaacauggugaaaccccauc

SEQ ID NO: 780659 - RNA, 18 nt, Human
uggcggcggucacagcuc

SEQ ID NO: 780660 - RNA, 24 nt, Human
uggcucacgacuguaaucccagca

SEQ ID NO: 780661 - RNA, 18 nt, Human
uggcugaaggugcuucug

SEQ ID NO: 780662 - RNA, 22 nt, Human
uggcuuuuggauuuucaaggua

SEQ ID NO: 780663 - RNA, 24 nt, Human
ugggagguagacauguguggauca

SEQ ID NO: 780664 - RNA, 24 nt, Human
ugguggcacgugccuauaguccca

SEQ ID NO: 780665 - RNA, 20 nt, Human
uguauuuacacuacccaccc

SEQ ID NO: 780666 - RNA, 20 nt, Human
ugucaaaaaaaauucaacga

SEQ ID NO: 780667 - RNA, 27 nt, Human
uguggucaacuguggucugaaaauguu

SEQ ID NO: 780668 - RNA, 24 nt, Human
uguguggaucacuugaggucagga

SEQ ID NO: 780669 - RNA, 21 nt, Human
uuacuuagcuugugagcuccu

SEQ ID NO: 780670 - RNA, 23 nt, Human
uuacuuucuacuucuccuucaca

SEQ ID NO: 780671 - RNA, 20 nt, Human
uuagccgggugugguggcac

SEQ ID NO: 780672 - RNA, 20 nt, Human
uuagccgggugugguggcac

SEQ ID NO: 780673 - RNA, 24 nt, Human
uuagccgggugugguggcacgugc

SEQ ID NO: 780674 - RNA, 20 nt, Human
uucaaagguaaaaaaugaag

SEQ ID NO: 780675 - RNA, 21 nt, Human
uucaacgaagcuaaacuacag

SEQ ID NO: 780676 - RNA, 21 nt, Human
uucacaagaaaacaagucagc

SEQ ID NO: 780677 - RNA, 24 nt, Human
uucauuuauuuacuuagcuuguga

SEQ ID NO: 780678 - RNA, 23 nt, Human
uucccuacaaccccauggauguu

SEQ ID NO: 780679 - RNA, 19 nt, Human
uucugugauugagguuucc

SEQ ID NO: 780680 - RNA, 22 nt, Human
uugaacauuuccagugucaaaa

SEQ ID NO: 780681 - RNA, 18 nt, Human
uugcagugagcugagauc

SEQ ID NO: 780682 - RNA, 21 nt, Human
uugcagugagcugagaucgug

SEQ ID NO: 780683 - RNA, 22 nt, Human
uugcagugagcugagaucgugu

SEQ ID NO: 780684 - RNA, 22 nt, Human
uuuaagcucuuacacugaaagg

SEQ ID NO: 780685 - RNA, 26 nt, Human
uuuauuguuucuuccacgauauucag

SEQ ID NO: 780686 - RNA, 18 nt, Human
uuugcucaagucaaagug

SEQ ID NO: 780687 - RNA, 18 nt, Human
uuuuaaauguuuucucca

SEQ ID NO: 780688 - RNA, 22 nt, Human
aaaacacugugcagaaaagucc

SEQ ID NO: 780689 - RNA, 22 nt, Human
aaaagacuucagggcaagagga

SEQ ID NO: 780690 - RNA, 19 nt, Human
aaacaggacucaauguucu

SEQ ID NO: 780691 - RNA, 21 nt, Human
aaagaaaaaaagacuucaggg

SEQ ID NO: 780692 - RNA, 22 nt, Human
aacacauauuguucaucucaga

SEQ ID NO: 780693 - RNA, 20 nt, Human
aaccaagcuaccuaagcccu

SEQ ID NO: 780694 - RNA, 25 nt, Human
aagcaugccuagucccagccagggc

SEQ ID NO: 780695 - RNA, 19 nt, Human
aagccaauggaaaacagga

SEQ ID NO: 780696 - RNA, 23 nt, Human
aagccaauggaaaacaggacuca

SEQ ID NO: 780697 - RNA, 19 nt, Human
aaggacauaggaccugccg

SEQ ID NO: 780698 - RNA, 23 nt, Human
aaguccacagccacuuacccuag

SEQ ID NO: 780699 - RNA, 21 nt, Human
aagucuguggaaagaggcuuu

SEQ ID NO: 780700 - RNA, 23 nt, Human
aaucauauggaaucauuugaaau

SEQ ID NO: 780701 - RNA, 21 nt, Human
aaucaugauucucuuacuuuc

SEQ ID NO: 780702 - RNA, 20 nt, Human
acaaagaacaggcuguugca

SEQ ID NO: 780703 - RNA, 20 nt, Human
acacuauccagaaaagaaug

SEQ ID NO: 780704 - RNA, 18 nt, Human
acaugccucacauggcca

SEQ ID NO: 780705 - RNA, 19 nt, Human
acccuagaguaaagccagc

SEQ ID NO: 780706 - RNA, 22 nt, Human
accgcaauacagaggacacacu

SEQ ID NO: 780707 - RNA, 21 nt, Human
acuccaguuuaucagcucauu

SEQ ID NO: 780708 - RNA, 19 nt, Human
agaaaagaaugaacaaaga

SEQ ID NO: 780709 - RNA, 18 nt, Human
agaacaggcuguugcaaa

SEQ ID NO: 780710 - RNA, 22 nt, Human
agaacagguauccauguaccaa

SEQ ID NO: 780711 - RNA, 22 nt, Human
agaagcauuugugucaaggaca

SEQ ID NO: 780712 - RNA, 21 nt, Human
agacaggacgcagcaagacga

SEQ ID NO: 780713 - RNA, 18 nt, Human
agcaagaagcauuugugu

SEQ ID NO: 780714 - RNA, 24 nt, Human
agcuacacagaacugggaccaaca

SEQ ID NO: 780715 - RNA, 19 nt, Human
agcugcacuccugacaccu

SEQ ID NO: 780716 - RNA, 18 nt, Human
agggagagcacgggaagg

SEQ ID NO: 780717 - RNA, 22 nt, Human
agggaggauuucagcaagaagc

SEQ ID NO: 780718 - RNA, 21 nt, Human
augaucuuaagauucugagug

SEQ ID NO: 780719 - RNA, 22 nt, Human
auggccaaauguuugccaagac

SEQ ID NO: 780720 - RNA, 21 nt, Human
caaagaacaggcuguugcaaa

SEQ ID NO: 780721 - RNA, 23 nt, Human
caaagcugaucauuagaaucacu

SEQ ID NO: 780722 - RNA, 23 nt, Human
caacaaguucuggcagccucauc

SEQ ID NO: 780723 - RNA, 22 nt, Human
cacacacugacaaucauaugga

SEQ ID NO: 780724 - RNA, 21 nt, Human
cacacuauccagaaaagaaug

SEQ ID NO: 780725 - RNA, 18 nt, Human
caccaagcuacuggaagg

SEQ ID NO: 780726 - RNA, 21 nt, Human
cacuccugacaccucaguagc

SEQ ID NO: 780727 - RNA, 23 nt, Human
cacuccugacaccucaguagcau

SEQ ID NO: 780728 - RNA, 21 nt, Human
cagaacugggaccaacagcac

SEQ ID NO: 780729 - RNA, 25 nt, Human
cagcacacaagccagagacuuccaa

SEQ ID NO: 780730 - RNA, 20 nt, Human
cagccugcugagugcagccc

SEQ ID NO: 780731 - RNA, 19 nt, Human
cagcuuccuacgcugagag

SEQ ID NO: 780732 - RNA, 25 nt, Human
caggacgcagcaagacgagagaaug

SEQ ID NO: 780733 - RNA, 24 nt, Human
cagggcauguuggagucagcuccc

SEQ ID NO: 780734 - RNA, 20 nt, Human
cagggcccuuggcugguggc

SEQ ID NO: 780735 - RNA, 18 nt, Human
cauggccaaauguuugcc

SEQ ID NO: 780736 - RNA, 23 nt, Human
cauggccaaauguuugccaagac

SEQ ID NO: 780737 - RNA, 22 nt, Human
ccacaugccucacauggccaaa

SEQ ID NO: 780738 - RNA, 20 nt, Human
cccccucucaucacuuggcc

SEQ ID NO: 780739 - RNA, 21 nt, Human
cccuuggggcugaagccuugg

SEQ ID NO: 780740 - RNA, 24 nt, Human
ccuauauccacauggaugcgcccu

SEQ ID NO: 780741 - RNA, 23 nt, Human
ccucauccagcacacaagccaga

SEQ ID NO: 780742 - RNA, 18 nt, Human
ccugacaccucaguagca

SEQ ID NO: 780743 - RNA, 21 nt, Human
ccuggacucaggcuuagaagc

SEQ ID NO: 780744 - RNA, 24 nt, Human
cgcccugaagccaauggaaaacag

SEQ ID NO: 780745 - RNA, 22 nt, Human
cguaaaaagaaaaaaagacuuc

SEQ ID NO: 780746 - RNA, 22 nt, Human
cuacacagaacugggaccaaca

SEQ ID NO: 780747 - RNA, 23 nt, Human
cuacacagaacugggaccaacag

SEQ ID NO: 780748 - RNA, 23 nt, Human
cugaagccaauggaaaacaggac

SEQ ID NO: 780749 - RNA, 24 nt, Human
cugacacacacacugacaaucaua

SEQ ID NO: 780750 - RNA, 18 nt, Human
cugaggcuggagaugccc

SEQ ID NO: 780751 - RNA, 19 nt, Human
cuggguggggucaggcugg

SEQ ID NO: 780752 - RNA, 22 nt, Human
gcaucacuagggaggauuucag

SEQ ID NO: 780753 - RNA, 22 nt, Human
gccuuggugacucccccucuca

SEQ ID NO: 780754 - RNA, 23 nt, Human
gcugguggcccuucauggggcag

SEQ ID NO: 780755 - RNA, 21 nt, Human
ggaagacuucaugaaugcucu

SEQ ID NO: 780756 - RNA, 22 nt, Human
ggccucacccuugacucaucuc

SEQ ID NO: 780757 - RNA, 22 nt, Human
ggccugaggcuggagaugcccu

SEQ ID NO: 780758 - RNA, 23 nt, Human
gggcccuuggcugguggcccuuc

SEQ ID NO: 780759 - RNA, 21 nt, Human
guaaaaagaaaaaaagacuuc

SEQ ID NO: 780760 - RNA, 18 nt, Human
guacgcaaguguugacag

SEQ ID NO: 780761 - RNA, 19 nt, Human
guagaguuuuuccuuggag

SEQ ID NO: 780762 - RNA, 18 nt, Human
guuuuuccuuggagauuc

SEQ ID NO: 780763 - RNA, 25 nt, Human
uaauagaaaauggaaacugaccaca

SEQ ID NO: 780764 - RNA, 23 nt, Human
uaccaaccacuucaauucauauc

SEQ ID NO: 780765 - RNA, 20 nt, Human
uacuggaaggggaaaugguu

SEQ ID NO: 780766 - RNA, 21 nt, Human
uagaaaauggaaacugaccac

SEQ ID NO: 780767 - RNA, 21 nt, Human
uagaaacuggccaaaccuuca

SEQ ID NO: 780768 - RNA, 19 nt, Human
uagcaugaacacuguaaag

SEQ ID NO: 780769 - RNA, 25 nt, Human
uauaacacauauuguucaucucaga

SEQ ID NO: 780770 - RNA, 21 nt, Human
uauccauguaccaaccacuuc

SEQ ID NO: 780771 - RNA, 25 nt, Human
ucaaaagaaaaguuuaacaccucac

SEQ ID NO: 780772 - RNA, 23 nt, Human
ucaccgacaaugcagcucuauaa

SEQ ID NO: 780773 - RNA, 21 nt, Human
uccacagccacuuacccuaga

SEQ ID NO: 780774 - RNA, 19 nt, Human
uccagcacacaagccagag

SEQ ID NO: 780775 - RNA, 21 nt, Human
ugaaaacacugugcagaaaag

SEQ ID NO: 780776 - RNA, 20 nt, Human
ugaaaucgaucacagucuga

SEQ ID NO: 780777 - RNA, 19 nt, Human
ugaccaaggacguggccug

SEQ ID NO: 780778 - RNA, 21 nt, Human
ugacugaggacuccacagaca

SEQ ID NO: 780779 - RNA, 18 nt, Human
ugagcagagcagcugcug

SEQ ID NO: 780780 - RNA, 23 nt, Human
ugagcugagguccagucaaagcu

SEQ ID NO: 780781 - RNA, 23 nt, Human
ugcagaaaaguccacagccacuu

SEQ ID NO: 780782 - RNA, 19 nt, Human
ugcagggaugugugagggu

SEQ ID NO: 780783 - RNA, 19 nt, Human
ugcucuacucauucagaag

SEQ ID NO: 780784 - RNA, 19 nt, Human
ugcucuguagaguuuuucc

SEQ ID NO: 780785 - RNA, 21 nt, Human
ugcucuguagaguuuuuccuu

SEQ ID NO: 780786 - RNA, 22 nt, Human
uggaaggggaaaugguuuucca

SEQ ID NO: 780787 - RNA, 23 nt, Human
uggagucagcucccacucaagca

SEQ ID NO: 780788 - RNA, 23 nt, Human
uggcagccucauccagcacacaa

SEQ ID NO: 780789 - RNA, 24 nt, Human
uggccaaaccuucaaaagaaaagu

SEQ ID NO: 780790 - RNA, 23 nt, Human
uggcugguggcccuucauggggc

SEQ ID NO: 780791 - RNA, 20 nt, Human
ugggaccaacagcacucgca

SEQ ID NO: 780792 - RNA, 21 nt, Human
ugggaucuaucacaccauggu

SEQ ID NO: 780793 - RNA, 19 nt, Human
ugguaugguagggcauggg

SEQ ID NO: 780794 - RNA, 19 nt, Human
ugguggcccuucauggggc

SEQ ID NO: 780795 - RNA, 24 nt, Human
uguauaaaucuaccgcaauacaga

SEQ ID NO: 780796 - RNA, 18 nt, Human
uguaugaaucucuugcuc

SEQ ID NO: 780797 - RNA, 18 nt, Human
ugugcacaagcuuauauu

SEQ ID NO: 780798 - RNA, 25 nt, Human
uuaaugcaaaaaaauguagugguua

SEQ ID NO: 780799 - RNA, 18 nt, Human
uuagaaacuggccaaacc

SEQ ID NO: 780800 - RNA, 18 nt, Human
uuaugaaaacacugugca

SEQ ID NO: 780801 - RNA, 22 nt, Human
uucaaaagaaaaguuuaacacc

SEQ ID NO: 780802 - RNA, 18 nt, Human
uucaccuuuuuaaaaggg

SEQ ID NO: 780803 - RNA, 20 nt, Human
uucagggcaagaggauccua

SEQ ID NO: 780804 - RNA, 20 nt, Human
uuccaaaguaagguggcgca

SEQ ID NO: 780805 - RNA, 18 nt, Human
uuccuaagucuguggaaa

SEQ ID NO: 780806 - RNA, 24 nt, Human
uugaaaugggaucuaucacaccau

SEQ ID NO: 780807 - RNA, 18 nt, Human
uuugccaagacuagcaga

SEQ ID NO: 780808 - RNA, 23 nt, Human
aaaaaaaaaaaaaagacuacuca

SEQ ID NO: 780809 - RNA, 20 nt, Human
aaaaaaaaaaaaagugcaaa

SEQ ID NO: 780810 - RNA, 21 nt, Human
aaaaauacaaaaucagccgga

SEQ ID NO: 780811 - RNA, 26 nt, Human
aaaacaaauaaacaaaaaaaaucacc

SEQ ID NO: 780812 - RNA, 23 nt, Human
aaaagaaaaaaaaagggggggag

SEQ ID NO: 780813 - RNA, 20 nt, Human
aaaaugccuccacacacagc

SEQ ID NO: 780814 - RNA, 22 nt, Human
aaaaugccuccacacacagcca

SEQ ID NO: 780815 - RNA, 18 nt, Human
aaacaaaaaaaaucaccu

SEQ ID NO: 780816 - RNA, 19 nt, Human
aaagacgggguuucaccgu

SEQ ID NO: 780817 - RNA, 21 nt, Human
aaagcaaaauaauuaaauccc

SEQ ID NO: 780818 - RNA, 24 nt, Human
aaaguguagggauuacaggcguga

SEQ ID NO: 780819 - RNA, 22 nt, Human
aaauggagaaaccucgucucua

SEQ ID NO: 780820 - RNA, 18 nt, Human
aacaaacacaaugaugac

SEQ ID NO: 780821 - RNA, 20 nt, Human
aagacaaucacgaggucagg

SEQ ID NO: 780822 - RNA, 23 nt, Human
aagcaacauaauuuuaccaaaau

SEQ ID NO: 780823 - RNA, 22 nt, Human
aagcaggagaauugcuuaaacc

SEQ ID NO: 780824 - RNA, 24 nt, Human
aagcaggagaauugcuuaaaccug

SEQ ID NO: 780825 - RNA, 18 nt, Human
aagcaggaggauuacuug

SEQ ID NO: 780826 - RNA, 24 nt, Human
aagccaauuccccugaguuuccug

SEQ ID NO: 780827 - RNA, 21 nt, Human
aagggaauguuugugcuccuc

SEQ ID NO: 780828 - RNA, 19 nt, Human
aaguagcugggacuacagg

SEQ ID NO: 780829 - RNA, 20 nt, Human
aaguagcugggacuacaggu

SEQ ID NO: 780830 - RNA, 18 nt, Human
aagugccugcacccagag

SEQ ID NO: 780831 - RNA, 24 nt, Human
aaucacgaggucaggaguucaaga

SEQ ID NO: 780832 - RNA, 24 nt, Human
aaucgcuugaacccgggaggcgga

SEQ ID NO: 780833 - RNA, 24 nt, Human
acaagcccccugaguuaagagccc

SEQ ID NO: 780834 - RNA, 20 nt, Human
acagagcaagacuccaucuc

SEQ ID NO: 780835 - RNA, 21 nt, Human
acaguggcacggucuuggcuc

SEQ ID NO: 780836 - RNA, 23 nt, Human
accaaaaauacaaaaucagccgg

SEQ ID NO: 780837 - RNA, 25 nt, Human
accaaaauggagaaaccucgucucu

SEQ ID NO: 780838 - RNA, 22 nt, Human
accagcauccaaaccaguucug

SEQ ID NO: 780839 - RNA, 24 nt, Human
accucgucucuaccaaaaauacaa

SEQ ID NO: 780840 - RNA, 20 nt, Human
acggggcagguuauagagag

SEQ ID NO: 780841 - RNA, 18 nt, Human
acgggguuucaccguguu

SEQ ID NO: 780842 - RNA, 19 nt, Human
acgggguuucaccguguua

SEQ ID NO: 780843 - RNA, 20 nt, Human
acgggguuucaccguguuag

SEQ ID NO: 780844 - RNA, 24 nt, Human
acgggguuucaccguguuagccag

SEQ ID NO: 780845 - RNA, 23 nt, Human
acuccagccugggcaacaagagc

SEQ ID NO: 780846 - RNA, 19 nt, Human
acugaauugacaccaaccc

SEQ ID NO: 780847 - RNA, 23 nt, Human
acugaauugacaccaacccaaga

SEQ ID NO: 780848 - RNA, 21 nt, Human
acugcaaacugccaaaugcgg

SEQ ID NO: 780849 - RNA, 24 nt, Human
acugcacuccagccugggcgacag

SEQ ID NO: 780850 - RNA, 26 nt, Human
acugcacuccagccugggcgacagag

SEQ ID NO: 780851 - RNA, 21 nt, Human
agaaggaauccccauugcaaa

SEQ ID NO: 780852 - RNA, 19 nt, Human
agacaaucacgaggucagg

SEQ ID NO: 780853 - RNA, 23 nt, Human
agacaaucacgaggucaggaguu

SEQ ID NO: 780854 - RNA, 24 nt, Human
agacauacaccagaacagaauucc

SEQ ID NO: 780855 - RNA, 24 nt, Human
agagagcaagacccuaucucaaaa

SEQ ID NO: 780856 - RNA, 24 nt, Human
agaggcuguagugagccgagaucg

SEQ ID NO: 780857 - RNA, 24 nt, Human
agcacuuugggaggcugaggcagg

SEQ ID NO: 780858 - RNA, 18 nt, Human
agccaccacacccagccc

SEQ ID NO: 780859 - RNA, 23 nt, Human
agccaggugugguggugugcacc

SEQ ID NO: 780860 - RNA, 23 nt, Human
agccggacgugguagcgcaugcc

SEQ ID NO: 780861 - RNA, 23 nt, Human
agccuggcaugguggcaugcgcc

SEQ ID NO: 780862 - RNA, 24 nt, Human
agccuggccaaaauugugaaaccc

SEQ ID NO: 780863 - RNA, 23 nt, Human
agccugggcaacauagcaagacc

SEQ ID NO: 780864 - RNA, 24 nt, Human
agccugggcaacauagcaagaccu

SEQ ID NO: 780865 - RNA, 24 nt, Human
agccugggcgacagagcaagacuc

SEQ ID NO: 780866 - RNA, 21 nt, Human
agcucacgccuguaaucccag

SEQ ID NO: 780867 - RNA, 20 nt, Human
aggaguuugagaccagccug

SEQ ID NO: 780868 - RNA, 18 nt, Human
aggaucauggguuccucc

SEQ ID NO: 780869 - RNA, 24 nt, Human
aggauuacuugugaccaggaguuu

SEQ ID NO: 780870 - RNA, 19 nt, Human
aggcaggauugaccugggu

SEQ ID NO: 780871 - RNA, 19 nt, Human
aggcaggauugaccugggu

SEQ ID NO: 780872 - RNA, 18 nt, Human
aggcaggcggaucaccug

SEQ ID NO: 780873 - RNA, 22 nt, Human
aggcaggcggaucaccugaagg

SEQ ID NO: 780874 - RNA, 26 nt, Human
aggcaggcggaucaccugaagucggg

SEQ ID NO: 780875 - RNA, 22 nt, Human
aggcagguggaucacugucagg

SEQ ID NO: 780876 - RNA, 21 nt, Human
aggccgaggcaggcggaucac

SEQ ID NO: 780877 - RNA, 20 nt, Human
aggcggagguugcggugagc

SEQ ID NO: 780878 - RNA, 24 nt, Human
aggcugaagcaggaggauuacuug

SEQ ID NO: 780879 - RNA, 21 nt, Human
aggcugaggcagguggaucac

SEQ ID NO: 780880 - RNA, 23 nt, Human
aggcugaggcagguggaucacug

SEQ ID NO: 780881 - RNA, 18 nt, Human
agggauuacaggcgugag

SEQ ID NO: 780882 - RNA, 22 nt, Human
agggauuacaggcgugagccac

SEQ ID NO: 780883 - RNA, 23 nt, Human
agggauuacaggcgugagccacc

SEQ ID NO: 780884 - RNA, 24 nt, Human
agggauuacaggcgugagccacca

SEQ ID NO: 780885 - RNA, 19 nt, Human
aggggaccauguccuggcu

SEQ ID NO: 780886 - RNA, 23 nt, Human
agggggggaguucaccccauauu

SEQ ID NO: 780887 - RNA, 23 nt, Human
agguggaucacugucaggccucu

SEQ ID NO: 780888 - RNA, 24 nt, Human
aggugugguggugugcaccuguag

SEQ ID NO: 780889 - RNA, 24 nt, Human
agguucuuuauaaucucccccacc

SEQ ID NO: 780890 - RNA, 20 nt, Human
agguugaagcaggagaauug

SEQ ID NO: 780891 - RNA, 24 nt, Human
aguacaguggcacggucuuggcuc

SEQ ID NO: 780892 - RNA, 19 nt, Human
agucccgggccaggugugc

SEQ ID NO: 780893 - RNA, 19 nt, Human
agucgggaguuugagacca

SEQ ID NO: 780894 - RNA, 22 nt, Human
aucacgaggucaggaguucaag

SEQ ID NO: 780895 - RNA, 24 nt, Human
aucgcgccacugcacuccagccug

SEQ ID NO: 780896 - RNA, 24 nt, Human
aucgcgccauuguacuccagccug

SEQ ID NO: 780897 - RNA, 19 nt, Human
aucucaaaaaaaaaaaaag

SEQ ID NO: 780898 - RNA, 18 nt, Human
augcaggagaaucgcuug

SEQ ID NO: 780899 - RNA, 22 nt, Human
augcggcagcucaugccuguaa

SEQ ID NO: 780900 - RNA, 24 nt, Human
auuguacuccagccugggcaacaa

SEQ ID NO: 780901 - RNA, 23 nt, Human
caaaaauaauuaugcugggcuua

SEQ ID NO: 780902 - RNA, 23 nt, Human
caaaaauacaaaaucagccggac

SEQ ID NO: 780903 - RNA, 24 nt, Human
caaacugaauugacaccaacccaa

SEQ ID NO: 780904 - RNA, 28 nt, Human
caaacugaauugacaccaacccaagagc

SEQ ID NO: 780905 - RNA, 22 nt, Human
caacauagcaagaccuugucuc

SEQ ID NO: 780906 - RNA, 24 nt, Human
caacauagcaagaccuugucucua

SEQ ID NO: 780907 - RNA, 22 nt, Human
caagcuaagccaucauaucccc

SEQ ID NO: 780908 - RNA, 23 nt, Human
caaucacgaggucaggaguucaa

SEQ ID NO: 780909 - RNA, 21 nt, Human
cacaaagccuguuuggucucu

SEQ ID NO: 780910 - RNA, 24 nt, Human
cacacauggccucaggacagcugc

SEQ ID NO: 780911 - RNA, 21 nt, Human
cacagccaccaccacaccaca

SEQ ID NO: 780912 - RNA, 21 nt, Human
caccacaccacagguuggcug

SEQ ID NO: 780913 - RNA, 18 nt, Human
caccacacccagcccaga

SEQ ID NO: 780914 - RNA, 20 nt, Human
caccacacccagcccagaau

SEQ ID NO: 780915 - RNA, 20 nt, Human
caccacagccaccaccacac

SEQ ID NO: 780916 - RNA, 19 nt, Human
caccagaacagaauuccag

SEQ ID NO: 780917 - RNA, 18 nt, Human
cacccccugcccccaaaa

SEQ ID NO: 780918 - RNA, 18 nt, Human
cacccuuugcugacucuc

SEQ ID NO: 780919 - RNA, 22 nt, Human
caccguguuagccaggcuguuc

SEQ ID NO: 780920 - RNA, 24 nt, Human
caccguguuagccaggcuguucuc

SEQ ID NO: 780921 - RNA, 26 nt, Human
caccugggcgaagagaccggggguuc

SEQ ID NO: 780922 - RNA, 22 nt, Human
caccuguagucuuagcuaugcg

SEQ ID NO: 780923 - RNA, 24 nt, Human
caccuguagucuuagcuaugcggg

SEQ ID NO: 780924 - RNA, 22 nt, Human
cacgccauucuccugccucagc

SEQ ID NO: 780925 - RNA, 24 nt, Human
cacgccuauaaucccagcaguuug

SEQ ID NO: 780926 - RNA, 24 nt, Human
cacgccuguaaucccagcacuuug

SEQ ID NO: 780927 - RNA, 23 nt, Human
cacuccagccugggcgacagagc

SEQ ID NO: 780928 - RNA, 18 nt, Human
cacuccagccugggugag

SEQ ID NO: 780929 - RNA, 23 nt, Human
cacuccagccugggugagagagc

SEQ ID NO: 780930 - RNA, 19 nt, Human
cacugcacuccagccuggg

SEQ ID NO: 780931 - RNA, 21 nt, Human
cacugcacuccagccugggcg

SEQ ID NO: 780932 - RNA, 22 nt, Human
cacugcacuccagccugggcga

SEQ ID NO: 780933 - RNA, 23 nt, Human
cacugcacuccagccugggcgac

SEQ ID NO: 780934 - RNA, 24 nt, Human
cacugcacuccagccugggcgaca

SEQ ID NO: 780935 - RNA, 26 nt, Human
cacugcacuccagccugggcgacaga

SEQ ID NO: 780936 - RNA, 24 nt, Human
cacuguugccucucaagagguucu

SEQ ID NO: 780937 - RNA, 20 nt, Human
cacuuacacuccagccuggg

SEQ ID NO: 780938 - RNA, 23 nt, Human
cacuuacacuccagccuggguga

SEQ ID NO: 780939 - RNA, 24 nt, Human
cagagucuugcucugcugcccagg

SEQ ID NO: 780940 - RNA, 24 nt, Human
cagcacuuugggaggcugaggcag

SEQ ID NO: 780941 - RNA, 24 nt, Human
cagcacuuugggaggcugaggcag

SEQ ID NO: 780942 - RNA, 24 nt, Human
cagcaguuuggcaggccgaggcag

SEQ ID NO: 780943 - RNA, 19 nt, Human
cagcucagaaaagaccaac

SEQ ID NO: 780944 - RNA, 21 nt, Human
caggaaggcuaaugcaggaga

SEQ ID NO: 780945 - RNA, 21 nt, Human
cagggagacauacaccagaac

SEQ ID NO: 780946 - RNA, 20 nt, Human
caggugaaauaaacagccuu

SEQ ID NO: 780947 - RNA, 25 nt, Human
cauagcaagaccuugucucuacaga

SEQ ID NO: 780948 - RNA, 18 nt, Human
cauccagauggccugaag

SEQ ID NO: 780949 - RNA, 19 nt, Human
cauugcucuuaacuccacu

SEQ ID NO: 780950 - RNA, 19 nt, Human
cauuguacuccagccuggg

SEQ ID NO: 780951 - RNA, 21 nt, Human
cauuguacuccagccugggca

SEQ ID NO: 780952 - RNA, 22 nt, Human
cauuguacuccagccugggcaa

SEQ ID NO: 780953 - RNA, 24 nt, Human
cauuguacuccagccugggcaaca

SEQ ID NO: 780954 - RNA, 22 nt, Human
ccaaaaugccuccacacacagc

SEQ ID NO: 780955 - RNA, 20 nt, Human
ccaaaguguagggauuacag

SEQ ID NO: 780956 - RNA, 22 nt, Human
ccaaaguguagggauuacaggc

SEQ ID NO: 780957 - RNA, 24 nt, Human
ccaaaguguagggauuacaggcgu

SEQ ID NO: 780958 - RNA, 23 nt, Human
ccacagccaccaccacaccacag

SEQ ID NO: 780959 - RNA, 19 nt, Human
ccaccacagccaccaccac

SEQ ID NO: 780960 - RNA, 23 nt, Human
ccaccacagccaccaccacacca

SEQ ID NO: 780961 - RNA, 22 nt, Human
ccaccaccacaccacagguugg

SEQ ID NO: 780962 - RNA, 21 nt, Human
ccacccuaacuaucaauguac

SEQ ID NO: 780963 - RNA, 20 nt, Human
ccacugcacuccagccuggg

SEQ ID NO: 780964 - RNA, 20 nt, Human
ccacugcacuccagccuggg

SEQ ID NO: 780965 - RNA, 21 nt, Human
ccacugcacuccagccugggc

SEQ ID NO: 780966 - RNA, 21 nt, Human
ccacugcacuccagccugggc

SEQ ID NO: 780967 - RNA, 23 nt, Human
ccacugcacuccagccugggcga

SEQ ID NO: 780968 - RNA, 23 nt, Human
ccacugcacuccagccugggcga

SEQ ID NO: 780969 - RNA, 24 nt, Human
ccacugcacuccagccugggcgac

SEQ ID NO: 780970 - RNA, 29 nt, Human
ccagcaguuuggcaggccgaggcaggcgg

SEQ ID NO: 780971 - RNA, 21 nt, Human
ccagccugaccaaaauggaga

SEQ ID NO: 780972 - RNA, 25 nt, Human
ccagucccaaacaugcgcuaauguc

SEQ ID NO: 780973 - RNA, 25 nt, Human
ccaugaucaaaguguuuuggucacc

SEQ ID NO: 780974 - RNA, 20 nt, Human
ccauuguacuccagccuggg

SEQ ID NO: 780975 - RNA, 21 nt, Human
ccauuguacuccagccugggc

SEQ ID NO: 780976 - RNA, 23 nt, Human
ccauuguacuccagccugggcaa

SEQ ID NO: 780977 - RNA, 24 nt, Human
ccauuguacuccagccugggcaac

SEQ ID NO: 780978 - RNA, 23 nt, Human
cccaaguagcugggacuacaggu

SEQ ID NO: 780979 - RNA, 24 nt, Human
cccaaguagcugggacuacaggug

SEQ ID NO: 780980 - RNA, 19 nt, Human
cccaggcuggaguacagug

SEQ ID NO: 780981 - RNA, 23 nt, Human
cccccaaaacauugcucuuaacu

SEQ ID NO: 780982 - RNA, 18 nt, Human
ccccugaguuaagagccc

SEQ ID NO: 780983 - RNA, 21 nt, Human
cccguaccggauccacagcca

SEQ ID NO: 780984 - RNA, 19 nt, Human
cccuaucucaaaaaaaaaa

SEQ ID NO: 780985 - RNA, 21 nt, Human
ccgggccaggugugcacagcc

SEQ ID NO: 780986 - RNA, 19 nt, Human
ccuccaacagccaguccca

SEQ ID NO: 780987 - RNA, 19 nt, Human
ccucccaaaguguagggau

SEQ ID NO: 780988 - RNA, 20 nt, Human
ccugaccucgugauccaccc

SEQ ID NO: 780989 - RNA, 19 nt, Human
ccuggccaaaauugugaaa

SEQ ID NO: 780990 - RNA, 24 nt, Human
ccuggccaaaauugugaaacccca

SEQ ID NO: 780991 - RNA, 21 nt, Human
ccugggcaacauagcaagacc

SEQ ID NO: 780992 - RNA, 22 nt, Human
ccugggcgacagagcaagacuc

SEQ ID NO: 780993 - RNA, 22 nt, Human
ccuguaaucccagcuacucuag

SEQ ID NO: 780994 - RNA, 23 nt, Human
ccuguaaucccagcuacucuaga

SEQ ID NO: 780995 - RNA, 20 nt, Human
ccuguaauucuagaacucug

SEQ ID NO: 780996 - RNA, 25 nt, Human
ccuuggguuuaaaggauuaagaaag

SEQ ID NO: 780997 - RNA, 18 nt, Human
cgaaaaaaaaaaaagaga

SEQ ID NO: 780998 - RNA, 20 nt, Human
cgaggcaggcggaucaccug

SEQ ID NO: 780999 - RNA, 24 nt, Human
cgccauuguacuccagccugggca

SEQ ID NO: 781000 - RNA, 24 nt, Human
cgccuguaaucccagcacuuuggg

SEQ ID NO: 781001 - RNA, 23 nt, Human
cgccuguaaucccagcuacucua

SEQ ID NO: 781002 - RNA, 21 nt, Human
cgcugggcggcagcggggagu

SEQ ID NO: 781003 - RNA, 24 nt, Human
cggaucaccugaagucgggaguuu

SEQ ID NO: 781004 - RNA, 23 nt, Human
cggcaacucccguaccggaucca

SEQ ID NO: 781005 - RNA, 24 nt, Human
cgggaggcggagguugcggugagc

SEQ ID NO: 781006 - RNA, 24 nt, Human
cgggguuucaccguguuagccagg

SEQ ID NO: 781007 - RNA, 21 nt, Human
cuaaaaagaaaaaaaaagggg

SEQ ID NO: 781008 - RNA, 22 nt, Human
cucaaaaaaaaaaaaagugcaa

SEQ ID NO: 781009 - RNA, 21 nt, Human
cucacgccuauaaucccagca

SEQ ID NO: 781010 - RNA, 26 nt, Human
cucacgccuauaaucccagcaguuug

SEQ ID NO: 781011 - RNA, 22 nt, Human
cucacgccuguaaucccagcac

SEQ ID NO: 781012 - RNA, 24 nt, Human
cucacgccuguaaucccagcacuu

SEQ ID NO: 781013 - RNA, 24 nt, Human
cucacugcuagcuacgccuccugg

SEQ ID NO: 781014 - RNA, 24 nt, Human
cucagccucccaaguagcugggac

SEQ ID NO: 781015 - RNA, 24 nt, Human
cuccacaccugcacccccuggguc

SEQ ID NO: 781016 - RNA, 18 nt, Human
cuccacacugcugacagu

SEQ ID NO: 781017 - RNA, 19 nt, Human
cuccgucucaaaaaaaaaa

SEQ ID NO: 781018 - RNA, 24 nt, Human
cuccugaccucgugauccacccgc

SEQ ID NO: 781019 - RNA, 21 nt, Human
cuccuggguucacgccauucu

SEQ ID NO: 781020 - RNA, 20 nt, Human
cucugaaaguuuacucucug

SEQ ID NO: 781021 - RNA, 25 nt, Human
cugcccccaaaacauugcucuuaac

SEQ ID NO: 781022 - RNA, 23 nt, Human
cugccucagccucccaaguagcu

SEQ ID NO: 781023 - RNA, 23 nt, Human
cuggccaaaauugugaaacccca

SEQ ID NO: 781024 - RNA, 21 nt, Human
cugggccuuuguuucccccug

SEQ ID NO: 781025 - RNA, 20 nt, Human
cuguagugagccgagaucgc

SEQ ID NO: 781026 - RNA, 22 nt, Human
cuguagugagccgagaucgcgc

SEQ ID NO: 781027 - RNA, 18 nt, Human
cuuacacuccagccuggg

SEQ ID NO: 781028 - RNA, 19 nt, Human
cuucauucugcuggaaaca

SEQ ID NO: 781029 - RNA, 22 nt, Human
gaccucgugauccacccgccuc

SEQ ID NO: 781030 - RNA, 22 nt, Human
gaccucgugauccacccgccuc

SEQ ID NO: 781031 - RNA, 24 nt, Human
gaccucgugauccacccgccucgg

SEQ ID NO: 781032 - RNA, 19 nt, Human
gagaaaccucgucucuacc

SEQ ID NO: 781033 - RNA, 23 nt, Human
gagaaucgcuugaacccgggagg

SEQ ID NO: 781034 - RNA, 23 nt, Human
gagaucgcgccacugcacuccag

SEQ ID NO: 781035 - RNA, 24 nt, Human
gagcuggguucaaguccaggcuuc

SEQ ID NO: 781036 - RNA, 23 nt, Human
gagguugcggugagcugagaucg

SEQ ID NO: 781037 - RNA, 18 nt, Human
gauaaccaccacagccac

SEQ ID NO: 781038 - RNA, 24 nt, Human
gaucaccugaagucgggaguuuga

SEQ ID NO: 781039 - RNA, 18 nt, Human
gauuacaggcgugagcca

SEQ ID NO: 781040 - RNA, 21 nt, Human
gauuacaggcgugagccacca

SEQ ID NO: 781041 - RNA, 22 nt, Human
gauuacaggcgugagccaccac

SEQ ID NO: 781042 - RNA, 22 nt, Human
gauuacuugugaccaggaguuu

SEQ ID NO: 781043 - RNA, 24 nt, Human
gauuacuugugaccaggaguuuga

SEQ ID NO: 781044 - RNA, 24 nt, Human
gcacuccagccugggcgacagagc

SEQ ID NO: 781045 - RNA, 22 nt, Human
gcaggagaaucgcuugaacccg

SEQ ID NO: 781046 - RNA, 24 nt, Human
gccaaaauugugaaaccccaucuc

SEQ ID NO: 781047 - RNA, 18 nt, Human
gccaagucgcucacauuc

SEQ ID NO: 781048 - RNA, 22 nt, Human
gccacugcacuccagccugggc

SEQ ID NO: 781049 - RNA, 24 nt, Human
gccacugcacuccagccugggcga

SEQ ID NO: 781050 - RNA, 22 nt, Human
gccauuguacuccagccugggc

SEQ ID NO: 781051 - RNA, 23 nt, Human
gccauuguacuccagccugggca

SEQ ID NO: 781052 - RNA, 24 nt, Human
gccauuguacuccagccugggcaa

SEQ ID NO: 781053 - RNA, 19 nt, Human
gcccacacacauggccuca

SEQ ID NO: 781054 - RNA, 19 nt, Human
gcccaggcuggaguacagu

SEQ ID NO: 781055 - RNA, 21 nt, Human
gcccccugaguuaagagcccu

SEQ ID NO: 781056 - RNA, 20 nt, Human
gccgagaucgcgccacugca

SEQ ID NO: 781057 - RNA, 20 nt, Human
gcgguagcucacgccuguaa

SEQ ID NO: 781058 - RNA, 22 nt, Human
ggagagggcgcacaagacacgu

SEQ ID NO: 781059 - RNA, 25 nt, Human
ggagcggcccacacacauggccuca

SEQ ID NO: 781060 - RNA, 22 nt, Human
ggagguugcggugagcugagau

SEQ ID NO: 781061 - RNA, 24 nt, Human
ggagguugcggugagcugagaucg

SEQ ID NO: 781062 - RNA, 19 nt, Human
ggagugagcuaugaucaug

SEQ ID NO: 781063 - RNA, 19 nt, Human
ggaguuugagaccagccug

SEQ ID NO: 781064 - RNA, 22 nt, Human
ggaucaccugaagucgggaguu

SEQ ID NO: 781065 - RNA, 23 nt, Human
ggaucaccugaagucgggaguuu

SEQ ID NO: 781066 - RNA, 19 nt, Human
ggauuacaggcgugagcca

SEQ ID NO: 781067 - RNA, 22 nt, Human
ggauuacuugugaccaggaguu

SEQ ID NO: 781068 - RNA, 20 nt, Human
ggcagaggcuguagugagcc

SEQ ID NO: 781069 - RNA, 23 nt, Human
ggcagaggcuguagugagccgag

SEQ ID NO: 781070 - RNA, 19 nt, Human
ggcagcucaugccuguaau

SEQ ID NO: 781071 - RNA, 24 nt, Human
ggcagcucaugccuguaauucuag

SEQ ID NO: 781072 - RNA, 21 nt, Human
ggccaaaauugugaaacccca

SEQ ID NO: 781073 - RNA, 20 nt, Human
ggccacugagcuguguggga

SEQ ID NO: 781074 - RNA, 19 nt, Human
ggcuggagcgugggguggg

SEQ ID NO: 781075 - RNA, 23 nt, Human
gggauagacaccaccuuccuugg

SEQ ID NO: 781076 - RNA, 18 nt, Human
gggauuacaggcgugagc

SEQ ID NO: 781077 - RNA, 23 nt, Human
gggauuacaggcgugagccacca

SEQ ID NO: 781078 - RNA, 18 nt, Human
gggcggcagcggggaguu

SEQ ID NO: 781079 - RNA, 23 nt, Human
gggguuucaccguguuagccagg

SEQ ID NO: 781080 - RNA, 23 nt, Human
gguacgguggcucacgccuauaa

SEQ ID NO: 781081 - RNA, 24 nt, Human
gguagcucacgccuguaaucccag

SEQ ID NO: 781082 - RNA, 24 nt, Human
gguggcaugcgccuguaaucccag

SEQ ID NO: 781083 - RNA, 24 nt, Human
gguggcucacgccuauaaucccag

SEQ ID NO: 781084 - RNA, 24 nt, Human
gguggugugcaccuguagucuuag

SEQ ID NO: 781085 - RNA, 25 nt, Human
guacuccagccugggcaacaagagc

SEQ ID NO: 781086 - RNA, 20 nt, Human
gucucaaaaaaaaaaaaaag

SEQ ID NO: 781087 - RNA, 24 nt, Human
gucuugcucugcugcccaggcugg

SEQ ID NO: 781088 - RNA, 24 nt, Human
gugauccacccgccucggccuccc

SEQ ID NO: 781089 - RNA, 19 nt, Human
uaaaaagaaaaaaaaaggg

SEQ ID NO: 781090 - RNA, 19 nt, Human
uaaaacaagucccgggcca

SEQ ID NO: 781091 - RNA, 19 nt, Human
uaaaauaagagcucauucc

SEQ ID NO: 781092 - RNA, 25 nt, Human
uaacaguaucuuacuagaugccagu

SEQ ID NO: 781093 - RNA, 18 nt, Human
uaaccaccacagccacca

SEQ ID NO: 781094 - RNA, 18 nt, Human
uaacuccacugccuaucc

SEQ ID NO: 781095 - RNA, 19 nt, Human
uaaggaaaaaacaaaacaa

SEQ ID NO: 781096 - RNA, 22 nt, Human
uaagggaauguuugugcuccuc

SEQ ID NO: 781097 - RNA, 24 nt, Human
uaaugcaggagaaucgcuugaacc

SEQ ID NO: 781098 - RNA, 19 nt, Human
uaauuuuuuguauuguuag

SEQ ID NO: 781099 - RNA, 22 nt, Human
uacacuccagccugggugagag

SEQ ID NO: 781100 - RNA, 24 nt, Human
uacagaaaauaaaaaaaauagcca

SEQ ID NO: 781101 - RNA, 22 nt, Human
uacagcauuguacaugacgggg

SEQ ID NO: 781102 - RNA, 24 nt, Human
uacaggcgugagccaccacaccca

SEQ ID NO: 781103 - RNA, 20 nt, Human
uaccaaaaauacaaaaucag

SEQ ID NO: 781104 - RNA, 22 nt, Human
uacuuugugagauccacccccu

SEQ ID NO: 781105 - RNA, 19 nt, Human
uagagucuccaaggcucaa

SEQ ID NO: 781106 - RNA, 22 nt, Human
uagcucacgccuguaaucccag

SEQ ID NO: 781107 - RNA, 24 nt, Human
uagcucacgccuguaaucccagca

SEQ ID NO: 781108 - RNA, 21 nt, Human
uaguaaagacgggguuucacc

SEQ ID NO: 781109 - RNA, 24 nt, Human
uaguaaagacgggguuucaccgug

SEQ ID NO: 781110 - RNA, 19 nt, Human
uaucuuacuagaugccagu

SEQ ID NO: 781111 - RNA, 24 nt, Human
ucaaacugaauugacaccaaccca

SEQ ID NO: 781112 - RNA, 24 nt, Human
ucaaucaucaaaacauauugauau

SEQ ID NO: 781113 - RNA, 19 nt, Human
ucaccguguuagccaggcu

SEQ ID NO: 781114 - RNA, 24 nt, Human
ucacgaggucaggaguucaagacc

SEQ ID NO: 781115 - RNA, 24 nt, Human
ucacugcuagcuacgccuccuggg

SEQ ID NO: 781116 - RNA, 18 nt, Human
ucagaaaagaccaacgca

SEQ ID NO: 781117 - RNA, 19 nt, Human
ucagacucagccugccugc

SEQ ID NO: 781118 - RNA, 22 nt, Human
ucagacucagccugccugcacc

SEQ ID NO: 781119 - RNA, 20 nt, Human
ucagccucccaaguagcugg

SEQ ID NO: 781120 - RNA, 24 nt, Human
ucaugucacuuacacuccagccug

SEQ ID NO: 781121 - RNA, 22 nt, Human
uccacacacagccaaguguccc

SEQ ID NO: 781122 - RNA, 19 nt, Human
uccacccccugcccccaaa

SEQ ID NO: 781123 - RNA, 24 nt, Human
uccagccugggcgacagagcaaga

SEQ ID NO: 781124 - RNA, 18 nt, Human
uccagccugggugagaga

SEQ ID NO: 781125 - RNA, 19 nt, Human
uccagccugggugagagag

SEQ ID NO: 781126 - RNA, 24 nt, Human
ucccaaaguguagggauuacaggc

SEQ ID NO: 781127 - RNA, 23 nt, Human
ucccaaguagcugggacuacagg

SEQ ID NO: 781128 - RNA, 22 nt, Human
ucccaugguacgcucccccagg

SEQ ID NO: 781129 - RNA, 23 nt, Human
uccccagcagacacaagcccccu

SEQ ID NO: 781130 - RNA, 21 nt, Human
uccccauugcaaaaauaaaaa

SEQ ID NO: 781131 - RNA, 21 nt, Human
uccccugaguuuccugaggug

SEQ ID NO: 781132 - RNA, 22 nt, Human
uccgucucaaaaaaaaaaaaaa

SEQ ID NO: 781133 - RNA, 18 nt, Human
uccuggcuucauucugcu

SEQ ID NO: 781134 - RNA, 24 nt, Human
uccuggguucacgccauucuccug

SEQ ID NO: 781135 - RNA, 24 nt, Human
uccuugggacuguaggacgaagga

SEQ ID NO: 781136 - RNA, 23 nt, Human
ucgcgccacugcacuccagccug

SEQ ID NO: 781137 - RNA, 24 nt, Human
ucgcuugaacccgggaggcggagg

SEQ ID NO: 781138 - RNA, 18 nt, Human
ucucgaaaaaaaaaaaag

SEQ ID NO: 781139 - RNA, 20 nt, Human
ucucugucacuguugccucu

SEQ ID NO: 781140 - RNA, 23 nt, Human
ucuugcucugcugcccaggcugg

SEQ ID NO: 781141 - RNA, 24 nt, Human
ucuugcucugcugcccaggcugga

SEQ ID NO: 781142 - RNA, 21 nt, Human
ucuuugaguucuuuuccucac

SEQ ID NO: 781143 - RNA, 20 nt, Human
ugaaccccugcacuguacag

SEQ ID NO: 781144 - RNA, 24 nt, Human
ugaagcaggagaauugcuuaaacc

SEQ ID NO: 781145 - RNA, 21 nt, Human
ugacaccaacccaagagcgcg

SEQ ID NO: 781146 - RNA, 23 nt, Human
ugacggggcagguuauagagagg

SEQ ID NO: 781147 - RNA, 24 nt, Human
ugagaccagccugaccaaaaugga

SEQ ID NO: 781148 - RNA, 18 nt, Human
ugagagagcaagacccua

SEQ ID NO: 781149 - RNA, 21 nt, Human
ugagaggagcguccgccggug

SEQ ID NO: 781150 - RNA, 22 nt, Human
ugagaggcugaagcaggaggau

SEQ ID NO: 781151 - RNA, 24 nt, Human
ugagaggcugaagcaggaggauua

SEQ ID NO: 781152 - RNA, 22 nt, Human
ugagccgagaucgcgccacugc

SEQ ID NO: 781153 - RNA, 22 nt, Human
ugagcugagaucgcgccauugu

SEQ ID NO: 781154 - RNA, 22 nt, Human
ugaggcagguggaucacuguca

SEQ ID NO: 781155 - RNA, 19 nt, Human
ugagguaggaguaaucacc

SEQ ID NO: 781156 - RNA, 20 nt, Human
ugaucaggaaggacaagcug

SEQ ID NO: 781157 - RNA, 23 nt, Human
ugcagagcgcacugcuggccgcc

SEQ ID NO: 781158 - RNA, 21 nt, Human
ugcccaggcuggaguacagug

SEQ ID NO: 781159 - RNA, 24 nt, Human
ugcccaggcuggaguacaguggca

SEQ ID NO: 781160 - RNA, 19 nt, Human
ugccccacccuaacuauca

SEQ ID NO: 781161 - RNA, 24 nt, Human
ugccucagccucccaaguagcugg

SEQ ID NO: 781162 - RNA, 20 nt, Human
ugccuccacaccugcacccc

SEQ ID NO: 781163 - RNA, 23 nt, Human
ugccuccacaccugcacccccug

SEQ ID NO: 781164 - RNA, 23 nt, Human
ugccuguaauucuagaacucuga

SEQ ID NO: 781165 - RNA, 24 nt, Human
ugccuguauucccaacuacucagg

SEQ ID NO: 781166 - RNA, 20 nt, Human
ugcgcugggcggcagcgggg

SEQ ID NO: 781167 - RNA, 22 nt, Human
ugcucugcugcccaggcuggag

SEQ ID NO: 781168 - RNA, 21 nt, Human
uggaggcaggauugaccuggg

SEQ ID NO: 781169 - RNA, 18 nt, Human
uggaguacaguggcacgg

SEQ ID NO: 781170 - RNA, 24 nt, Human
uggaguacaguggcacggucuugg

SEQ ID NO: 781171 - RNA, 18 nt, Human
uggcaaaaaaacgaacaa

SEQ ID NO: 781172 - RNA, 19 nt, Human
uggcacggucuuggcucac

SEQ ID NO: 781173 - RNA, 19 nt, Human
uggcagaggcgggaggcuu

SEQ ID NO: 781174 - RNA, 24 nt, Human
uggcaggccgaggcaggcggauca

SEQ ID NO: 781175 - RNA, 21 nt, Human
uggcaugcgccuguaauccca

SEQ ID NO: 781176 - RNA, 24 nt, Human
uggcaugguggcaugcgccuguaa

SEQ ID NO: 781177 - RNA, 21 nt, Human
uggcucacgccuauaauccca

SEQ ID NO: 781178 - RNA, 24 nt, Human
uggcucacgccuauaaucccagca

SEQ ID NO: 781179 - RNA, 18 nt, Human
ugggacuacaggugcccg

SEQ ID NO: 781180 - RNA, 20 nt, Human
ugggacuacaggugcccgac

SEQ ID NO: 781181 - RNA, 18 nt, Human
ugggaggcugaggcaggu

SEQ ID NO: 781182 - RNA, 24 nt, Human
ugggaggcugaggcagguggauca

SEQ ID NO: 781183 - RNA, 22 nt, Human
ugggggaaaugaggcccagagu

SEQ ID NO: 781184 - RNA, 22 nt, Human
ugggguaagacccucugaaagu

SEQ ID NO: 781185 - RNA, 20 nt, Human
uggguucacgccauucuccu

SEQ ID NO: 781186 - RNA, 19 nt, Human
ugguaacuaugauaaccac

SEQ ID NO: 781187 - RNA, 22 nt, Human
uggucugagaaguaagugaugu

SEQ ID NO: 781188 - RNA, 24 nt, Human
ugguggcaugcgccuguaauccca

SEQ ID NO: 781189 - RNA, 21 nt, Human
ugguggugugcaccuguaguc

SEQ ID NO: 781190 - RNA, 18 nt, Human
uggugugcaccuguaguc

SEQ ID NO: 781191 - RNA, 24 nt, Human
uguaaucccagcuacucuagaggu

SEQ ID NO: 781192 - RNA, 19 nt, Human
uguacuccagccugggcaa

SEQ ID NO: 781193 - RNA, 22 nt, Human
uguacuccagccugggcaacaa

SEQ ID NO: 781194 - RNA, 19 nt, Human
uguauaaaguccaguucau

SEQ ID NO: 781195 - RNA, 25 nt, Human
uguggaacugaacuggaggcucuga

SEQ ID NO: 781196 - RNA, 21 nt, Human
uguugccucucaagagguucu

SEQ ID NO: 781197 - RNA, 18 nt, Human
uuacacuccagccugggu

SEQ ID NO: 781198 - RNA, 20 nt, Human
uuacacuccagccuggguga

SEQ ID NO: 781199 - RNA, 20 nt, Human
uuacacuccagccuggguga

SEQ ID NO: 781200 - RNA, 22 nt, Human
uuaguaaagacgggguuucacc

SEQ ID NO: 781201 - RNA, 24 nt, Human
uuaguaaagacgggguuucaccgu

SEQ ID NO: 781202 - RNA, 24 nt, Human
uugaacccgggaggcggagguugc

SEQ ID NO: 781203 - RNA, 24 nt, Human
uugcucugcugcccaggcuggagu

SEQ ID NO: 781204 - RNA, 18 nt, Human
uugcuuaaaccugggggg

SEQ ID NO: 781205 - RNA, 20 nt, Human
uuggaaucaaacagagcugg

SEQ ID NO: 781206 - RNA, 25 nt, Human
uugggaggcugaggcagguggauca

SEQ ID NO: 781207 - RNA, 24 nt, Human
uuggucaccaaaguucuccuuccg

SEQ ID NO: 781208 - RNA, 24 nt, Human
uuguuucugccccacccuaacuau

SEQ ID NO: 781209 - RNA, 22 nt, Human
uuuaaaacugcaaacugccaaa

SEQ ID NO: 781210 - RNA, 21 nt, Human
uuucaccguguuagccaggcu

SEQ ID NO: 781211 - RNA, 18 nt, Human
uuugaaauugaagaugau

SEQ ID NO: 781212 - RNA, 24 nt, Human
aaaugauuccccuauacccccuac

SEQ ID NO: 781213 - RNA, 20 nt, Human
aagagaaaaggcuuggcauu

SEQ ID NO: 781214 - RNA, 18 nt, Human
auacccccuacuccaaaa

SEQ ID NO: 781215 - RNA, 19 nt, Human
augauuccccuauaccccc

SEQ ID NO: 781216 - RNA, 19 nt, Human
caccugcggagacuuugca

SEQ ID NO: 781217 - RNA, 30 nt, Human
cccccuacuccaaaaaaguuuuaaaaaucc

SEQ ID NO: 781218 - RNA, 23 nt, Human
cccggagguaccugcuccaccag

SEQ ID NO: 781219 - RNA, 20 nt, Human
cccucuucaccucacuccug

SEQ ID NO: 781220 - RNA, 22 nt, Human
ccgcccggagguaccugcucca

SEQ ID NO: 781221 - RNA, 19 nt, Human
ccucugucucuacuggagg

SEQ ID NO: 781222 - RNA, 20 nt, Human
ccuugcaaacacugccccuc

SEQ ID NO: 781223 - RNA, 19 nt, Human
cuauacccccuacuccaaa

SEQ ID NO: 781224 - RNA, 19 nt, Human
cucacuccauuuuauuuaa

SEQ ID NO: 781225 - RNA, 19 nt, Human
cugcccccucucuccgccc

SEQ ID NO: 781226 - RNA, 19 nt, Human
cugcccccucucuccgccc

SEQ ID NO: 781227 - RNA, 24 nt, Human
gcccucuucaccucacuccugcug

SEQ ID NO: 781228 - RNA, 20 nt, Human
gcucaggcuggccgggcugg

SEQ ID NO: 781229 - RNA, 20 nt, Human
gcugauccaugcccuguggc

SEQ ID NO: 781230 - RNA, 23 nt, Human
ggagggcagcaagcucaggcugg

SEQ ID NO: 781231 - RNA, 22 nt, Human
ggccggugccgagccugccccc

SEQ ID NO: 781232 - RNA, 23 nt, Human
uacccccuacuccaaaaaaguuu

SEQ ID NO: 781233 - RNA, 19 nt, Human
uacuggagggcagcaagcu

SEQ ID NO: 781234 - RNA, 20 nt, Human
ucagaggcuugcccgcccgg

SEQ ID NO: 781235 - RNA, 21 nt, Human
uccauuuuauuuaagauuuuu

SEQ ID NO: 781236 - RNA, 23 nt, Human
uccccuauacccccuacuccaaa

SEQ ID NO: 781237 - RNA, 23 nt, Human
ucccuugcaaacacugccccucu

SEQ ID NO: 781238 - RNA, 23 nt, Human
uccugcugucccuuccucucuca

SEQ ID NO: 781239 - RNA, 19 nt, Human
ucucucagugcaauauaga

SEQ ID NO: 781240 - RNA, 21 nt, Human
ugagaugcaguggggcugauc

SEQ ID NO: 781241 - RNA, 24 nt, Human
ugagcaucuaaagggggucugugu

SEQ ID NO: 781242 - RNA, 20 nt, Human
uggcauuuuucugauucccu

SEQ ID NO: 781243 - RNA, 21 nt, Human
uggccgggcugggagggccgg

SEQ ID NO: 781244 - RNA, 18 nt, Human
ugucaggcuugccccgug

SEQ ID NO: 781245 - RNA, 24 nt, Human
ugugucucucuuuauacauaugua

SEQ ID NO: 781246 - RNA, 23 nt, Human
uuccccuauacccccuacuccaa

SEQ ID NO: 781247 - RNA, 24 nt, Human
uuuuuuuuuuuuaaaauuaucuca

SEQ ID NO: 781248 - RNA, 21 nt, Human
aaaaaaugacaagcuguugga

SEQ ID NO: 781249 - RNA, 21 nt, Human
aaagacacaugucuuccuucc

SEQ ID NO: 781250 - RNA, 24 nt, Human
aagaaaagccucuuuuguugggga

SEQ ID NO: 781251 - RNA, 19 nt, Human
aagcaacucuuccuaaaca

SEQ ID NO: 781252 - RNA, 23 nt, Human
aagcaauaggauuugggggugac

SEQ ID NO: 781253 - RNA, 25 nt, Human
aagcaauaggauuugggggugacuu

SEQ ID NO: 781254 - RNA, 19 nt, Human
aagcugugaucauccaaca

SEQ ID NO: 781255 - RNA, 21 nt, Human
aagggccagagcuacagaacg

SEQ ID NO: 781256 - RNA, 27 nt, Human
aauauucaccguuuggugaccggauac

SEQ ID NO: 781257 - RNA, 20 nt, Human
acacaaauccacaaaaagug

SEQ ID NO: 781258 - RNA, 18 nt, Human
acaccucuuugcacagaa

SEQ ID NO: 781259 - RNA, 22 nt, Human
acagaaccguacagauuucgcu

SEQ ID NO: 781260 - RNA, 18 nt, Human
acagacgaaaccaacaug

SEQ ID NO: 781261 - RNA, 23 nt, Human
acagagcacaaugaaaagcacaa

SEQ ID NO: 781262 - RNA, 25 nt, Human
acagagcacaaugaaaagcacaacc

SEQ ID NO: 781263 - RNA, 25 nt, Human
acauuacagacagacgaaaccaaca

SEQ ID NO: 781264 - RNA, 21 nt, Human
acccacaauggagccgaggaa

SEQ ID NO: 781265 - RNA, 21 nt, Human
acugauauaucacuauaguuu

SEQ ID NO: 781266 - RNA, 23 nt, Human
agaaauguguacuucucacauuu

SEQ ID NO: 781267 - RNA, 18 nt, Human
agacaaagcccagaggcg

SEQ ID NO: 781268 - RNA, 19 nt, Human
agagagauagggcuuucca

SEQ ID NO: 781269 - RNA, 20 nt, Human
agagccauccauuguguggc

SEQ ID NO: 781270 - RNA, 20 nt, Human
agcccauugcaaggaggcag

SEQ ID NO: 781271 - RNA, 26 nt, Human
agccgaggaacaugaucuucaaauau

SEQ ID NO: 781272 - RNA, 21 nt, Human
agcggagagauuuaagacugg

SEQ ID NO: 781273 - RNA, 20 nt, Human
agcuaagcugagcagguacu

SEQ ID NO: 781274 - RNA, 23 nt, Human
aggagacaacuggaaauacuaaa

SEQ ID NO: 781275 - RNA, 24 nt, Human
aggcaagcuuucuucuuuuuuugg

SEQ ID NO: 781276 - RNA, 22 nt, Human
aggcagccgucauuucaucuuc

SEQ ID NO: 781277 - RNA, 21 nt, Human
aucacucucaaauuuaaccca

SEQ ID NO: 781278 - RNA, 24 nt, Human
auccgaggcccggagaugaaggag

SEQ ID NO: 781279 - RNA, 25 nt, Human
augacuaaugugugugugugugugg

SEQ ID NO: 781280 - RNA, 19 nt, Human
augacugccuuuuugcauu

SEQ ID NO: 781281 - RNA, 21 nt, Human
caagauaagcaauaggauuug

SEQ ID NO: 781282 - RNA, 22 nt, Human
caaggagacaaagcccagaggc

SEQ ID NO: 781283 - RNA, 21 nt, Human
caccaaaggcaagcuuucuuc

SEQ ID NO: 781284 - RNA, 20 nt, Human
caccuuauaacacucaaaac

SEQ ID NO: 781285 - RNA, 24 nt, Human
cacuccacuuuggggacccaucuc

SEQ ID NO: 781286 - RNA, 20 nt, Human
cagagagauagggcuuucca

SEQ ID NO: 781287 - RNA, 22 nt, Human
cagcgcgccuggaucguucccu

SEQ ID NO: 781288 - RNA, 20 nt, Human
cagggcccugaaaugggaag

SEQ ID NO: 781289 - RNA, 18 nt, Human
cauagccccaccaaaggc

SEQ ID NO: 781290 - RNA, 21 nt, Human
cauagccccaccaaaggcaag

SEQ ID NO: 781291 - RNA, 23 nt, Human
caucggccaaacccucccgcagc

SEQ ID NO: 781292 - RNA, 24 nt, Human
ccaagccaggucuaaucaaucacg

SEQ ID NO: 781293 - RNA, 20 nt, Human
ccacacagaccgucuggguc

SEQ ID NO: 781294 - RNA, 18 nt, Human
ccagagcuacagaacggg

SEQ ID NO: 781295 - RNA, 18 nt, Human
ccagugauguggcuccaa

SEQ ID NO: 781296 - RNA, 21 nt, Human
ccaugugcugggcaaaaucuc

SEQ ID NO: 781297 - RNA, 19 nt, Human
cccacaauggagccgagga

SEQ ID NO: 781298 - RNA, 21 nt, Human
cccacaauggagccgaggaac

SEQ ID NO: 781299 - RNA, 21 nt, Human
cccuaggucaccaauuuaaaa

SEQ ID NO: 781300 - RNA, 18 nt, Human
ccuccuacaaaugagaau

SEQ ID NO: 781301 - RNA, 18 nt, Human
ccuucucucuuuccuucc

SEQ ID NO: 781302 - RNA, 22 nt, Human
ccuugcuaaaagcucuuucaaa

SEQ ID NO: 781303 - RNA, 19 nt, Human
ccuuucuucccccauucuu

SEQ ID NO: 781304 - RNA, 21 nt, Human
cggccaaacccucccgcagcu

SEQ ID NO: 781305 - RNA, 24 nt, Human
cggggccuugaaauggugaugucc

SEQ ID NO: 781306 - RNA, 24 nt, Human
cgggggaaauaggccacacagacc

SEQ ID NO: 781307 - RNA, 20 nt, Human
cuccaugugcugggcaaaau

SEQ ID NO: 781308 - RNA, 23 nt, Human
cuuaugaaaacuccaaggcagcc

SEQ ID NO: 781309 - RNA, 21 nt, Human
cuucuuuuuuuggcagggccc

SEQ ID NO: 781310 - RNA, 22 nt, Human
cuuuccuucccucuucuauguu

SEQ ID NO: 781311 - RNA, 20 nt, Human
cuuuccuucucucuuuccuu

SEQ ID NO: 781312 - RNA, 26 nt, Human
cuuucuucuuuuuuuggcagggcccu

SEQ ID NO: 781313 - RNA, 23 nt, Human
cuuuguaguuucacagagagccu

SEQ ID NO: 781314 - RNA, 24 nt, Human
gagcacaaugaaaagcacaaccuu

SEQ ID NO: 781315 - RNA, 19 nt, Human
gaggucacucucaaacacu

SEQ ID NO: 781316 - RNA, 24 nt, Human
gcaaaacaccucuuugcacagaac

SEQ ID NO: 781317 - RNA, 19 nt, Human
gcaaugcuccaaggaagcu

SEQ ID NO: 781318 - RNA, 19 nt, Human
gccuggaucguucccuagc

SEQ ID NO: 781319 - RNA, 20 nt, Human
gcuggacaauuuuuaugggg

SEQ ID NO: 781320 - RNA, 22 nt, Human
ggaaaacaccaacgauaagggu

SEQ ID NO: 781321 - RNA, 24 nt, Human
ggaaaacaccaacgauaagggucu

SEQ ID NO: 781322 - RNA, 19 nt, Human
ggagaugaaggagggaaaa

SEQ ID NO: 781323 - RNA, 19 nt, Human
ggaggaaacagaggugaua

SEQ ID NO: 781324 - RNA, 19 nt, Human
ggcuccaaggagacaaagc

SEQ ID NO: 781325 - RNA, 24 nt, Human
ggcuccaaggagacaaagcccaga

SEQ ID NO: 781326 - RNA, 21 nt, Human
gggacaauuucuuaugaaaac

SEQ ID NO: 781327 - RNA, 21 nt, Human
gggcuuuccagggagcaguag

SEQ ID NO: 781328 - RNA, 18 nt, Human
gucagcugcuuccaugac

SEQ ID NO: 781329 - RNA, 26 nt, Human
gucuuaagucagugggacaaaaacau

SEQ ID NO: 781330 - RNA, 20 nt, Human
gugaaaacaccaauaaaagg

SEQ ID NO: 781331 - RNA, 22 nt, Human
gugguugcucagguggggucau

SEQ ID NO: 781332 - RNA, 24 nt, Human
uaaaagcucuuucaaagugaaaac

SEQ ID NO: 781333 - RNA, 23 nt, Human
uaacacguacaagucaaaaguuu

SEQ ID NO: 781334 - RNA, 22 nt, Human
uaacccacaauggagccgagga

SEQ ID NO: 781335 - RNA, 23 nt, Human
uaagaacaagcacagccguuuuc

SEQ ID NO: 781336 - RNA, 24 nt, Human
uaaggagagccauccauugugugg

SEQ ID NO: 781337 - RNA, 20 nt, Human
uaaugugugugugugugugu

SEQ ID NO: 781338 - RNA, 22 nt, Human
uaauguguguguguguguguau

SEQ ID NO: 781339 - RNA, 21 nt, Human
uacagacagacgaaaccaaca

SEQ ID NO: 781340 - RNA, 23 nt, Human
uacuggaauucacauuacagaca

SEQ ID NO: 781341 - RNA, 25 nt, Human
uagaauaacccacaauggagccgaa

SEQ ID NO: 781342 - RNA, 25 nt, Human
uagcggagagauuuaagacuggauu

SEQ ID NO: 781343 - RNA, 20 nt, Human
uagcucuaugaaacaaugaa

SEQ ID NO: 781344 - RNA, 19 nt, Human
uaggaagggaaauagggca

SEQ ID NO: 781345 - RNA, 23 nt, Human
uauauacauuuuucuuuuuuaca

SEQ ID NO: 781346 - RNA, 21 nt, Human
uauauauauauauuuauauac

SEQ ID NO: 781347 - RNA, 19 nt, Human
uauccgaggcccggagaug

SEQ ID NO: 781348 - RNA, 24 nt, Human
uaugaaacaaugaauucggaauga

SEQ ID NO: 781349 - RNA, 27 nt, Human
uaugacuaaugugugugugugugugua

SEQ ID NO: 781350 - RNA, 22 nt, Human
uauguugcugagcggguagggc

SEQ ID NO: 781351 - RNA, 21 nt, Human
uauucuauccuuucuuccccc

SEQ ID NO: 781352 - RNA, 22 nt, Human
ucaaagugaaaacaccaauaaa

SEQ ID NO: 781353 - RNA, 21 nt, Human
ucacagggucagaaguugauc

SEQ ID NO: 781354 - RNA, 24 nt, Human
ucacauuacagacagacgaaacca

SEQ ID NO: 781355 - RNA, 19 nt, Human
ucaccaauuuaaaaugggu

SEQ ID NO: 781356 - RNA, 21 nt, Human
ucacucucaaacacugauaua

SEQ ID NO: 781357 - RNA, 21 nt, Human
uccaaggggcauagccccacc

SEQ ID NO: 781358 - RNA, 21 nt, Human
uccaccuuauaacacucaaaa

SEQ ID NO: 781359 - RNA, 21 nt, Human
uccuaauuucccagaaaaccc

SEQ ID NO: 781360 - RNA, 24 nt, Human
uccuccuacaaaugagaaucucau

SEQ ID NO: 781361 - RNA, 22 nt, Human
ucggccaaacccucccgcagcu

SEQ ID NO: 781362 - RNA, 18 nt, Human
ucuaaaaacacuuuucuu

SEQ ID NO: 781363 - RNA, 19 nt, Human
ucuacguuuccuucucucu

SEQ ID NO: 781364 - RNA, 25 nt, Human
ucucuguaggaaagaaauguugcuu

SEQ ID NO: 781365 - RNA, 19 nt, Human
ucucuuuccuucccucuuc

SEQ ID NO: 781366 - RNA, 26 nt, Human
ucugcauccacauccacagcuguccc

SEQ ID NO: 781367 - RNA, 22 nt, Human
ucuguacugcaauuucaugaag

SEQ ID NO: 781368 - RNA, 24 nt, Human
ucugugggacaucacauccuccua

SEQ ID NO: 781369 - RNA, 20 nt, Human
ucuuuccuucucucuuuccu

SEQ ID NO: 781370 - RNA, 19 nt, Human
ucuuucucucucucuuucc

SEQ ID NO: 781371 - RNA, 20 nt, Human
ugaaaaaugagaagagaaau

SEQ ID NO: 781372 - RNA, 27 nt, Human
ugaaaacaccaauaaaagcuggagacc

SEQ ID NO: 781373 - RNA, 21 nt, Human
ugaaaacuccaaggcagccgu

SEQ ID NO: 781374 - RNA, 23 nt, Human
ugaaaacuccaaggcagccguca

SEQ ID NO: 781375 - RNA, 21 nt, Human
ugaaaagcacaaccuugcuaa

SEQ ID NO: 781376 - RNA, 23 nt, Human
ugaaaagcacaaccuugcuaaaa

SEQ ID NO: 781377 - RNA, 24 nt, Human
ugaaaagcacaaccuugcuaaaag

SEQ ID NO: 781378 - RNA, 23 nt, Human
ugaaaucuuaccaugacaccucu

SEQ ID NO: 781379 - RNA, 23 nt, Human
ugaaguuauccuaauuucccaga

SEQ ID NO: 781380 - RNA, 20 nt, Human
ugacuaaugugugugugugu

SEQ ID NO: 781381 - RNA, 22 nt, Human
ugagaagagaaaugaaaaaaug

SEQ ID NO: 781382 - RNA, 25 nt, Human
ugauaugacuaaugugugugugugu

SEQ ID NO: 781383 - RNA, 24 nt, Human
ugaucuucaaauaucuuuggcuac

SEQ ID NO: 781384 - RNA, 23 nt, Human
ugcaauaauuuuucaaaaaagua

SEQ ID NO: 781385 - RNA, 23 nt, Human
ugcucagguggggucauacauug

SEQ ID NO: 781386 - RNA, 23 nt, Human
uggaaagacaaaucucugauuaa

SEQ ID NO: 781387 - RNA, 21 nt, Human
uggauuucuagaauaacccac

SEQ ID NO: 781388 - RNA, 23 nt, Human
uggcaaaacaccucuuugcacag

SEQ ID NO: 781389 - RNA, 21 nt, Human
uggcagcccauugcaaggagg

SEQ ID NO: 781390 - RNA, 19 nt, Human
ugggacaucacauccuccu

SEQ ID NO: 781391 - RNA, 19 nt, Human
uguacuaaaaucacuuuug

SEQ ID NO: 781392 - RNA, 21 nt, Human
uguagaaauaagauaucauuu

SEQ ID NO: 781393 - RNA, 22 nt, Human
uguaggaaagaaauguugcuuc

SEQ ID NO: 781394 - RNA, 24 nt, Human
uguauauauauauauauuuauaua

SEQ ID NO: 781395 - RNA, 18 nt, Human
uguguauauauauauaua

SEQ ID NO: 781396 - RNA, 19 nt, Human
uguguauauauauauauau

SEQ ID NO: 781397 - RNA, 19 nt, Human
uguguauauauauauauau

SEQ ID NO: 781398 - RNA, 24 nt, Human
uguguauauauauauauauuuaua

SEQ ID NO: 781399 - RNA, 18 nt, Human
uguguguguauauauaua

SEQ ID NO: 781400 - RNA, 18 nt, Human
uguguguguauauauaua

SEQ ID NO: 781401 - RNA, 24 nt, Human
uguguguguauauauauauauauu

SEQ ID NO: 781402 - RNA, 23 nt, Human
uguguguguguauauauauauau

SEQ ID NO: 781403 - RNA, 23 nt, Human
uguguguguguguauauauauau

SEQ ID NO: 781404 - RNA, 20 nt, Human
uguguguguguguguauaaa

SEQ ID NO: 781405 - RNA, 21 nt, Human
uguguguguguguguauauaa

SEQ ID NO: 781406 - RNA, 22 nt, Human
uguguguguguguguguauaua

SEQ ID NO: 781407 - RNA, 20 nt, Human
uuccugaaaaaugagaagag

SEQ ID NO: 781408 - RNA, 20 nt, Human
uuccuucucucuuuccuucc

SEQ ID NO: 781409 - RNA, 21 nt, Human
uucucacauuucacaggguca

SEQ ID NO: 781410 - RNA, 28 nt, Human
uucucauagaacucuaugaagauucuau

SEQ ID NO: 781411 - RNA, 22 nt, Human
uugcaaggaggcagcccucccu

SEQ ID NO: 781412 - RNA, 22 nt, Human
uuggggaggaaacagaggugau

SEQ ID NO: 781413 - RNA, 23 nt, Human
uuucacauauuuauauacagaga

SEQ ID NO: 781414 - RNA, 22 nt, Human
uuucagaagugucagcugcuuc

SEQ ID NO: 781415 - RNA, 20 nt, Human
uuuccauguagaaauaagau

SEQ ID NO: 781416 - RNA, 21 nt, Human
uuucuucuuuuuuuggcaggg

SEQ ID NO: 781417 - RNA, 19 nt, Human
uuuguuggggaggaaacag

SEQ ID NO: 781418 - RNA, 21 nt, Human
uuuuauggggaauguccacuu

SEQ ID NO: 781419 - RNA, 19 nt, Human
uuuuuuggcagggcccuga

SEQ ID NO: 781420 - RNA, 22 nt, Human
aaaaaacaaaacagaaagaaca

SEQ ID NO: 781421 - RNA, 23 nt, Human
aaaaaacaaaacagaaagaacac

SEQ ID NO: 781422 - RNA, 25 nt, Human
aaaaaacaaaacagaaagaacaccc

SEQ ID NO: 781423 - RNA, 23 nt, Human
aaaacaaaacagaaagaacaccc

SEQ ID NO: 781424 - RNA, 24 nt, Human
aaacaaaaguuuagauauuuuagc

SEQ ID NO: 781425 - RNA, 24 nt, Human
aaacacacaaaaaaugucucccca

SEQ ID NO: 781426 - RNA, 18 nt, Human
aaacagaaagaacacccc

SEQ ID NO: 781427 - RNA, 19 nt, Human
aaacagaaagcuacaugca

SEQ ID NO: 781428 - RNA, 18 nt, Human
aaagaacaccccaacacc

SEQ ID NO: 781429 - RNA, 25 nt, Human
aaagauuuguaagaaucuagcaaau

SEQ ID NO: 781430 - RNA, 25 nt, Human
aaaggaauguuggagccaaaagaaa

SEQ ID NO: 781431 - RNA, 23 nt, Human
aaaguaaaaaacaaaacagaaag

SEQ ID NO: 781432 - RNA, 20 nt, Human
aaaugucuccccaaaguccc

SEQ ID NO: 781433 - RNA, 20 nt, Human
aacaaagcuagcugcacaua

SEQ ID NO: 781434 - RNA, 20 nt, Human
aacaccuaagcucccuugcu

SEQ ID NO: 781435 - RNA, 23 nt, Human
aacuucuuuauauacuucagcau

SEQ ID NO: 781436 - RNA, 18 nt, Human
aagaacaccccaacacca

SEQ ID NO: 781437 - RNA, 23 nt, Human
aagauagauuguuacagcagcua

SEQ ID NO: 781438 - RNA, 24 nt, Human
aaggaacagaugcaaagcugcaug

SEQ ID NO: 781439 - RNA, 24 nt, Human
aauacaaagaaccauuaugaaucu

SEQ ID NO: 781440 - RNA, 19 nt, Human
aaucacauuuaagccacug

SEQ ID NO: 781441 - RNA, 19 nt, Human
aaugugcauacaguacaag

SEQ ID NO: 781442 - RNA, 20 nt, Human
acaaaacagaaagaacaccc

SEQ ID NO: 781443 - RNA, 23 nt, Human
acaaaacagaaagaacaccccaa

SEQ ID NO: 781444 - RNA, 23 nt, Human
acacaaaaaaugucuccccaaag

SEQ ID NO: 781445 - RNA, 18 nt, Human
acaccccaacaccaagua

SEQ ID NO: 781446 - RNA, 25 nt, Human
acuaagcaccagccucuugugguua

SEQ ID NO: 781447 - RNA, 23 nt, Human
acugacuuuccuuugagcaaugu

SEQ ID NO: 781448 - RNA, 24 nt, Human
agcaagaaucaccuugcaggacca

SEQ ID NO: 781449 - RNA, 21 nt, Human
agcauaaucaaucaaucacag

SEQ ID NO: 781450 - RNA, 23 nt, Human
aggaaagaagaguacuaaaugaa

SEQ ID NO: 781451 - RNA, 21 nt, Human
aggaggaaagaagaguacuaa

SEQ ID NO: 781452 - RNA, 20 nt, Human
auaaagguucuaaaaugaag

SEQ ID NO: 781453 - RNA, 20 nt, Human
auacaguuuaccuggcauaa

SEQ ID NO: 781454 - RNA, 21 nt, Human
auauauuugaacaauaagaua

SEQ ID NO: 781455 - RNA, 27 nt, Human
caaaacaaaauuaaaguaaaaaacaaa

SEQ ID NO: 781456 - RNA, 24 nt, Human
caaaacagaaagaacaccccaaca

SEQ ID NO: 781457 - RNA, 25 nt, Human
caaaacagaaagaacaccccaacac

SEQ ID NO: 781458 - RNA, 24 nt, Human
caaacugguaaagcaaugugaaca

SEQ ID NO: 781459 - RNA, 22 nt, Human
caagaauaagggcuuuucccaa

SEQ ID NO: 781460 - RNA, 26 nt, Human
caagcuaaaaggaauguuggagccaa

SEQ ID NO: 781461 - RNA, 21 nt, Human
cacaaaaaaugucuccccaaa

SEQ ID NO: 781462 - RNA, 24 nt, Human
cacauaguucaaauacaguuuacc

SEQ ID NO: 781463 - RNA, 18 nt, Human
caccacaugaauauaugu

SEQ ID NO: 781464 - RNA, 22 nt, Human
cauuacagacaugguaaacuuc

SEQ ID NO: 781465 - RNA, 27 nt, Human
cauuaugaaucuuucauuaaacugaag

SEQ ID NO: 781466 - RNA, 23 nt, Human
ccaaacccucaccuacccccgcc

SEQ ID NO: 781467 - RNA, 23 nt, Human
ccaagcagauuaaaacaaagcua

SEQ ID NO: 781468 - RNA, 23 nt, Human
ccaaugcuaaauucauacucuaa

SEQ ID NO: 781469 - RNA, 23 nt, Human
ccauuuuugagagaauauaaaac

SEQ ID NO: 781470 - RNA, 22 nt, Human
ccccgccaaaaaaaaaaaaaaa

SEQ ID NO: 781471 - RNA, 22 nt, Human
cccgccaaaaaaaaaaaaaaaa

SEQ ID NO: 781472 - RNA, 20 nt, Human
ccuacccccgccaaaaaaaa

SEQ ID NO: 781473 - RNA, 31 nt, Human
ccuacccccgccaaaaaaaaaaaaaaaaaaa

SEQ ID NO: 781474 - RNA, 19 nt, Human
cgccaaaaaaaaaaaaaaa

SEQ ID NO: 781475 - RNA, 24 nt, Human
cgccaaaaaaaaaaaaaaaaaauc

SEQ ID NO: 781476 - RNA, 22 nt, Human
cguggguauaaaaacccaaaag

SEQ ID NO: 781477 - RNA, 24 nt, Human
cuagauagauagauaucuaaauca

SEQ ID NO: 781478 - RNA, 25 nt, Human
cucacacaaacauacaaucacaaau

SEQ ID NO: 781479 - RNA, 19 nt, Human
cucaccuacccccgccaaa

SEQ ID NO: 781480 - RNA, 21 nt, Human
cugaagcucacacaaacauac

SEQ ID NO: 781481 - RNA, 20 nt, Human
cugagcuuuccucuaguucc

SEQ ID NO: 781482 - RNA, 22 nt, Human
gaaaaaaaaaaaacagcauuug

SEQ ID NO: 781483 - RNA, 20 nt, Human
gaacagaugcaaagcugcau

SEQ ID NO: 781484 - RNA, 18 nt, Human
gaccauguggcauaggau

SEQ ID NO: 781485 - RNA, 20 nt, Human
gcaccuaaaagacuaauccc

SEQ ID NO: 781486 - RNA, 27 nt, Human
gccaaaaaaaaaaaaaaaaaaucaaaa

SEQ ID NO: 781487 - RNA, 22 nt, Human
gcuggaaugcagaauccuaccg

SEQ ID NO: 781488 - RNA, 23 nt, Human
ggaaaaucaacuauuuaaaccac

SEQ ID NO: 781489 - RNA, 18 nt, Human
ggagucccauauucuccu

SEQ ID NO: 781490 - RNA, 27 nt, Human
uaaaaaacaaaacagaaagaacacccc

SEQ ID NO: 781491 - RNA, 21 nt, Human
uaaaaaaugauucaguuaaaa

SEQ ID NO: 781492 - RNA, 28 nt, Human
uaaaauaggaaaaucaacuauuuaaacc

SEQ ID NO: 781493 - RNA, 21 nt, Human
uaaaguaaaaaacaaaacaga

SEQ ID NO: 781494 - RNA, 20 nt, Human
uaagcaccagccucuugugg

SEQ ID NO: 781495 - RNA, 23 nt, Human
uaagcauaaucaaucaaucacag

SEQ ID NO: 781496 - RNA, 27 nt, Human
uaauaauacaaagaaccauuaugaauc

SEQ ID NO: 781497 - RNA, 19 nt, Human
uaauucagugcccaaugcu

SEQ ID NO: 781498 - RNA, 18 nt, Human
uagcaagaaucaccuugc

SEQ ID NO: 781499 - RNA, 21 nt, Human
uagcaagaaucaccuugcagg

SEQ ID NO: 781500 - RNA, 23 nt, Human
uauaaaaacccaaaagugaacua

SEQ ID NO: 781501 - RNA, 20 nt, Human
uauauaccaaaauucauaug

SEQ ID NO: 781502 - RNA, 23 nt, Human
ucaaucaggcauuuauuuuaaaa

SEQ ID NO: 781503 - RNA, 18 nt, Human
ucagcauaaccuacuugc

SEQ ID NO: 781504 - RNA, 22 nt, Human
ucaggcaccaacagcauaucuu

SEQ ID NO: 781505 - RNA, 20 nt, Human
ucaguuaaaacaaaacaaaa

SEQ ID NO: 781506 - RNA, 21 nt, Human
ucguaaucaacagugauuacu

SEQ ID NO: 781507 - RNA, 18 nt, Human
ucuccucucuuuaucaca

SEQ ID NO: 781508 - RNA, 21 nt, Human
ugaaaaaaaaaaaacagcauu

SEQ ID NO: 781509 - RNA, 21 nt, Human
ugacacaccacuguugacaau

SEQ ID NO: 781510 - RNA, 18 nt, Human
ugaccuccaacaaacaca

SEQ ID NO: 781511 - RNA, 19 nt, Human
ugacuuguuuguuuguuaa

SEQ ID NO: 781512 - RNA, 18 nt, Human
ugaggacuguccuaauuc

SEQ ID NO: 781513 - RNA, 22 nt, Human
ugauugauauauaccaaaauuc

SEQ ID NO: 781514 - RNA, 19 nt, Human
ugcauagccacagaaguuu

SEQ ID NO: 781515 - RNA, 19 nt, Human
ugccaagcagauuaaaaca

SEQ ID NO: 781516 - RNA, 25 nt, Human
uggaaaaaauucacacugcaucuag

SEQ ID NO: 781517 - RNA, 22 nt, Human
uggaaugcagaauccuaccgug

SEQ ID NO: 781518 - RNA, 22 nt, Human
uggcuugcacuucucacaaauc

SEQ ID NO: 781519 - RNA, 19 nt, Human
ugugaaaagucuuaaucaa

SEQ ID NO: 781520 - RNA, 21 nt, Human
uuaaaacaaaacaaaaguuua

SEQ ID NO: 781521 - RNA, 21 nt, Human
uucaguaguuuaggcugcagg

SEQ ID NO: 781522 - RNA, 21 nt, Human
uucuaaauugacacuucaugu

SEQ ID NO: 781523 - RNA, 22 nt, Human
uucucguaaucaacagugauua

SEQ ID NO: 781524 - RNA, 21 nt, Human
uuggcacaagaugaucaagug

SEQ ID NO: 781525 - RNA, 24 nt, Human
aaacacaguucucucacuccacac

SEQ ID NO: 781526 - RNA, 22 nt, Human
aaacacccacggggcagcuccu

SEQ ID NO: 781527 - RNA, 19 nt, Human
aaaccgcccuccaccucac

SEQ ID NO: 781528 - RNA, 20 nt, Human
aaagccguuuccucucuagg

SEQ ID NO: 781529 - RNA, 24 nt, Human
aacagaaucuccaaacacccacgg

SEQ ID NO: 781530 - RNA, 19 nt, Human
aaccccugccugccaccuc

SEQ ID NO: 781531 - RNA, 18 nt, Human
aacccucucagcaccaaa

SEQ ID NO: 781532 - RNA, 23 nt, Human
aaccuuccggcgacacccuccag

SEQ ID NO: 781533 - RNA, 22 nt, Human
aaggggccggccuggagccugc

SEQ ID NO: 781534 - RNA, 18 nt, Human
aaucauuuccccuucugg

SEQ ID NO: 781535 - RNA, 18 nt, Human
acaagauguugggcugga

SEQ ID NO: 781536 - RNA, 23 nt, Human
acaagcugcgcuuuucccaaagc

SEQ ID NO: 781537 - RNA, 18 nt, Human
acacagcacgcucucucu

SEQ ID NO: 781538 - RNA, 21 nt, Human
acagagucugucugcuuaaaa

SEQ ID NO: 781539 - RNA, 25 nt, Human
accaaaugcuucugacacaggcccc

SEQ ID NO: 781540 - RNA, 19 nt, Human
acccugugccugcaaacag

SEQ ID NO: 781541 - RNA, 19 nt, Human
accuccaccccucucacca

SEQ ID NO: 781542 - RNA, 25 nt, Human
accucuggguugccccucacucccu

SEQ ID NO: 781543 - RNA, 22 nt, Human
acggggcagcuccuccaccucc

SEQ ID NO: 781544 - RNA, 25 nt, Human
acuccacaccucuaggccaaacaga

SEQ ID NO: 781545 - RNA, 19 nt, Human
agaaagaugccauggcccu

SEQ ID NO: 781546 - RNA, 26 nt, Human
agaaccccugccugccaccuccaccc

SEQ ID NO: 781547 - RNA, 20 nt, Human
agaagggaggagguggaggg

SEQ ID NO: 781548 - RNA, 22 nt, Human
agacagacaauccacacugugg

SEQ ID NO: 781549 - RNA, 18 nt, Human
agacagguccacagugug

SEQ ID NO: 781550 - RNA, 24 nt, Human
agagagaaagugaaagggugaggg

SEQ ID NO: 781551 - RNA, 24 nt, Human
agaggaacaggagggguggacaga

SEQ ID NO: 781552 - RNA, 20 nt, Human
agcagggacaccauggcccc

SEQ ID NO: 781553 - RNA, 22 nt, Human
agccuguguccucaccccaggg

SEQ ID NO: 781554 - RNA, 20 nt, Human
agcgccccaagccaagaccc

SEQ ID NO: 781555 - RNA, 19 nt, Human
agcuugcagcagccccacu

SEQ ID NO: 781556 - RNA, 24 nt, Human
aggacacagacaucuacagcauca

SEQ ID NO: 781557 - RNA, 22 nt, Human
aggagggguggacagaaaacuu

SEQ ID NO: 781558 - RNA, 19 nt, Human
aggcaccugcaggacucug

SEQ ID NO: 781559 - RNA, 21 nt, Human
aggcgaugacugagccagagg

SEQ ID NO: 781560 - RNA, 23 nt, Human
agggaggagguggagggggggac

SEQ ID NO: 781561 - RNA, 23 nt, Human
agggcgcugcagaagggaggagg

SEQ ID NO: 781562 - RNA, 21 nt, Human
aggguggcagcggcucugagc

SEQ ID NO: 781563 - RNA, 21 nt, Human
aguggcaggggacugacccgg

SEQ ID NO: 781564 - RNA, 25 nt, Human
auaaaggcuucccccucccucccca

SEQ ID NO: 781565 - RNA, 21 nt, Human
aucccaugcucgcccuugcag

SEQ ID NO: 781566 - RNA, 24 nt, Human
augcuuccaacggcaaaggcacag

SEQ ID NO: 781567 - RNA, 22 nt, Human
auguuucugacaagaaucaugg

SEQ ID NO: 781568 - RNA, 19 nt, Human
caaaggcacagacuagagg

SEQ ID NO: 781569 - RNA, 20 nt, Human
caaaggcacagacuagaggc

SEQ ID NO: 781570 - RNA, 20 nt, Human
caacggcaaaggcacagacu

SEQ ID NO: 781571 - RNA, 21 nt, Human
caagaguggguggugguggag

SEQ ID NO: 781572 - RNA, 22 nt, Human
caagauguugggcuggaggggu

SEQ ID NO: 781573 - RNA, 23 nt, Human
cacagccccaccugcuugcccuc

SEQ ID NO: 781574 - RNA, 22 nt, Human
cacagcuacucagcacagcuga

SEQ ID NO: 781575 - RNA, 20 nt, Human
caccacuuaguagggguuca

SEQ ID NO: 781576 - RNA, 25 nt, Human
caccauggccccagaaagggagcgg

SEQ ID NO: 781577 - RNA, 20 nt, Human
cacccucagcgccccaagcc

SEQ ID NO: 781578 - RNA, 25 nt, Human
caccgagugcacugaggagcucacu

SEQ ID NO: 781579 - RNA, 18 nt, Human
cacgaagagcccaagcca

SEQ ID NO: 781580 - RNA, 22 nt, Human
cacuccacaccucuaggccaaa

SEQ ID NO: 781581 - RNA, 19 nt, Human
cagaagccuaagaugagaa

SEQ ID NO: 781582 - RNA, 18 nt, Human
cagaaucuccaaacaccc

SEQ ID NO: 781583 - RNA, 20 nt, Human
cagagucugucugcuuaaaa

SEQ ID NO: 781584 - RNA, 19 nt, Human
cagcaggacagugcagcaa

SEQ ID NO: 781585 - RNA, 19 nt, Human
cagccccaccugcuugccc

SEQ ID NO: 781586 - RNA, 19 nt, Human
cagcuccaagagugggugg

SEQ ID NO: 781587 - RNA, 22 nt, Human
cagcugccagcacaaguagcac

SEQ ID NO: 781588 - RNA, 21 nt, Human
cagcugguuuggcugcaaggg

SEQ ID NO: 781589 - RNA, 22 nt, Human
caggcagcagggugccuuccuc

SEQ ID NO: 781590 - RNA, 22 nt, Human
caguggccuuggccccaggcuc

SEQ ID NO: 781591 - RNA, 24 nt, Human
caguuucucuccaaccacaaaaca

SEQ ID NO: 781592 - RNA, 19 nt, Human
ccaaaggaaaacagggaca

SEQ ID NO: 781593 - RNA, 18 nt, Human
ccaacggcaaaggcacag

SEQ ID NO: 781594 - RNA, 22 nt, Human
ccacacagacucauacccacaa

SEQ ID NO: 781595 - RNA, 23 nt, Human
ccacacagacucauacccacaaa

SEQ ID NO: 781596 - RNA, 19 nt, Human
ccacccucagcgccccaag

SEQ ID NO: 781597 - RNA, 24 nt, Human
ccacguugccacuugcagucuugu

SEQ ID NO: 781598 - RNA, 22 nt, Human
ccagaaagggagcggguggcug

SEQ ID NO: 781599 - RNA, 23 nt, Human
ccagccagucucaggaugggggc

SEQ ID NO: 781600 - RNA, 20 nt, Human
ccaggcucagacaugacacc

SEQ ID NO: 781601 - RNA, 19 nt, Human
ccauggaugcacgcagagg

SEQ ID NO: 781602 - RNA, 22 nt, Human
ccaugugcucacugaaccacag

SEQ ID NO: 781603 - RNA, 22 nt, Human
cccaaaaggcagagaaaaugaa

SEQ ID NO: 781604 - RNA, 22 nt, Human
cccacccucagcgccccaagcc

SEQ ID NO: 781605 - RNA, 21 nt, Human
cccagccagucucaggauggg

SEQ ID NO: 781606 - RNA, 24 nt, Human
cccaggucuuugcugaagggaccc

SEQ ID NO: 781607 - RNA, 20 nt, Human
ccccaaagccguuuccucuc

SEQ ID NO: 781608 - RNA, 21 nt, Human
ccccaaagccguuuccucucu

SEQ ID NO: 781609 - RNA, 19 nt, Human
ccccaagccaagacccagc

SEQ ID NO: 781610 - RNA, 23 nt, Human
ccccaggggcaugucugcugggg

SEQ ID NO: 781611 - RNA, 22 nt, Human
cccccauuucaaaaaaacaagg

SEQ ID NO: 781612 - RNA, 27 nt, Human
ccccccuguggcugcccuaguaggcaa

SEQ ID NO: 781613 - RNA, 19 nt, Human
cccccucucucugccuggg

SEQ ID NO: 781614 - RNA, 19 nt, Human
ccccucccuccccaaagcc

SEQ ID NO: 781615 - RNA, 19 nt, Human
ccccucccuccccaaagcc

SEQ ID NO: 781616 - RNA, 18 nt, Human
cccucagcgccccaagcc

SEQ ID NO: 781617 - RNA, 21 nt, Human
cccucagcgccccaagccaag

SEQ ID NO: 781618 - RNA, 19 nt, Human
cccuggugcccagccaguc

SEQ ID NO: 781619 - RNA, 20 nt, Human
ccuccaccccucucaccaaa

SEQ ID NO: 781620 - RNA, 20 nt, Human
ccugcaggcucuagggccaa

SEQ ID NO: 781621 - RNA, 19 nt, Human
ccugccugccaccuccacc

SEQ ID NO: 781622 - RNA, 22 nt, Human
ccugcuugcccucagcccccug

SEQ ID NO: 781623 - RNA, 19 nt, Human
ccugugccugcaaacagag

SEQ ID NO: 781624 - RNA, 21 nt, Human
cgccagggacuuaggacagcg

SEQ ID NO: 781625 - RNA, 19 nt, Human
cgcccuugcagaagccuaa

SEQ ID NO: 781626 - RNA, 23 nt, Human
cuccagcccccaccagacagguc

SEQ ID NO: 781627 - RNA, 20 nt, Human
cucccaaaaggcagagaaaa

SEQ ID NO: 781628 - RNA, 23 nt, Human
cuccuaggaugacuggacuacag

SEQ ID NO: 781629 - RNA, 20 nt, Human
cuccuccucagaaaagaagc

SEQ ID NO: 781630 - RNA, 25 nt, Human
cuccuuacagacagacaauccacac

SEQ ID NO: 781631 - RNA, 22 nt, Human
cucuggguuagcuucccuggca

SEQ ID NO: 781632 - RNA, 19 nt, Human
cugagagauggaaacuggg

SEQ ID NO: 781633 - RNA, 21 nt, Human
cugccugccaccuccaccccu

SEQ ID NO: 781634 - RNA, 18 nt, Human
cugcggaaacacucauga

SEQ ID NO: 781635 - RNA, 18 nt, Human
cuggagcugucugugacc

SEQ ID NO: 781636 - RNA, 20 nt, Human
cuggaggggugggggucaug

SEQ ID NO: 781637 - RNA, 19 nt, Human
cuggaugaaaacccccacu

SEQ ID NO: 781638 - RNA, 18 nt, Human
cuuggaggaguaggaggg

SEQ ID NO: 781639 - RNA, 22 nt, Human
cuuggccccaggcucuggugac

SEQ ID NO: 781640 - RNA, 25 nt, Human
gaaacccucucagcaccaaaugcuu

SEQ ID NO: 781641 - RNA, 21 nt, Human
gaagccuaagaugagaaccaa

SEQ ID NO: 781642 - RNA, 18 nt, Human
gacaauaaauccagagca

SEQ ID NO: 781643 - RNA, 21 nt, Human
gagacaucccaugcucgcccu

SEQ ID NO: 781644 - RNA, 20 nt, Human
gaggcuccagcccccaccag

SEQ ID NO: 781645 - RNA, 23 nt, Human
gaguugccagccucacaucugcu

SEQ ID NO: 781646 - RNA, 28 nt, Human
gcacagcuccaagaguggggggaacgcc

SEQ ID NO: 781647 - RNA, 21 nt, Human
gcagagccgggcagaacacca

SEQ ID NO: 781648 - RNA, 27 nt, Human
gcagaggaacaggagggguggacagaa

SEQ ID NO: 781649 - RNA, 21 nt, Human
gcagcugcuuccaacuggguu

SEQ ID NO: 781650 - RNA, 20 nt, Human
gccaccuccaccccucucac

SEQ ID NO: 781651 - RNA, 24 nt, Human
gccaggaagauuccgggugcuucc

SEQ ID NO: 781652 - RNA, 22 nt, Human
gccccaccugcuugcccucagc

SEQ ID NO: 781653 - RNA, 21 nt, Human
gcgccccaagccaagacccag

SEQ ID NO: 781654 - RNA, 18 nt, Human
gcucccagggcagcugcu

SEQ ID NO: 781655 - RNA, 23 nt, Human
gcucuggguuagcuucccuggca

SEQ ID NO: 781656 - RNA, 22 nt, Human
ggaaacacucaugagcacaggu

SEQ ID NO: 781657 - RNA, 26 nt, Human
ggaacgugcacucccacaguuccuuc

SEQ ID NO: 781658 - RNA, 20 nt, Human
ggaauggugaggaggggcug

SEQ ID NO: 781659 - RNA, 22 nt, Human
ggagggguggacagaaaacugg

SEQ ID NO: 781660 - RNA, 19 nt, Human
ggauucugucagaacgagg

SEQ ID NO: 781661 - RNA, 24 nt, Human
ggcacggcugugaacaucagcagg

SEQ ID NO: 781662 - RNA, 21 nt, Human
gggaaacacgaagagcccaag

SEQ ID NO: 781663 - RNA, 22 nt, Human
gggaaccccccuguggcugccc

SEQ ID NO: 781664 - RNA, 18 nt, Human
gggaauggugaggagggg

SEQ ID NO: 781665 - RNA, 19 nt, Human
gggcaggcugaaaccuucc

SEQ ID NO: 781666 - RNA, 19 nt, Human
gggcaggggaguugccagc

SEQ ID NO: 781667 - RNA, 19 nt, Human
ggggcccccucucucugcc

SEQ ID NO: 781668 - RNA, 22 nt, Human
gguccacaguguggcagguccc

SEQ ID NO: 781669 - RNA, 18 nt, Human
gguugccccucacucccc

SEQ ID NO: 781670 - RNA, 20 nt, Human
gguuucacuacugugaggca

SEQ ID NO: 781671 - RNA, 21 nt, Human
gucccuggggaaccccccugu

SEQ ID NO: 781672 - RNA, 19 nt, Human
gugcaggcagcagggugcc

SEQ ID NO: 781673 - RNA, 19 nt, Human
uaaaacagaaucuccaaac

SEQ ID NO: 781674 - RNA, 23 nt, Human
uaaaagcauacuacuuuugcuuc

SEQ ID NO: 781675 - RNA, 22 nt, Human
uaaacaaaucucuggaugaaaa

SEQ ID NO: 781676 - RNA, 23 nt, Human
uaagaugagaaccaacuccuccu

SEQ ID NO: 781677 - RNA, 22 nt, Human
uaauucuguuccuuggaggagu

SEQ ID NO: 781678 - RNA, 27 nt, Human
uacagaaccacgagcuuuacuuacaag

SEQ ID NO: 781679 - RNA, 20 nt, Human
uaccaaguuaccucgugcuu

SEQ ID NO: 781680 - RNA, 22 nt, Human
uaccaaguuaccucgugcuucc

SEQ ID NO: 781681 - RNA, 22 nt, Human
uaucgagaaaaagcugagugac

SEQ ID NO: 781682 - RNA, 20 nt, Human
ucacagugauacacacgcuu

SEQ ID NO: 781683 - RNA, 21 nt, Human
ucagcaggacagugcagcaag

SEQ ID NO: 781684 - RNA, 21 nt, Human
uccaaguacgacaauaaaucc

SEQ ID NO: 781685 - RNA, 22 nt, Human
uccacacguggagacacaggau

SEQ ID NO: 781686 - RNA, 20 nt, Human
ucccaggcucccagggcagc

SEQ ID NO: 781687 - RNA, 20 nt, Human
ucccaugcucgcccuugcag

SEQ ID NO: 781688 - RNA, 19 nt, Human
ucccccucccuccccaaag

SEQ ID NO: 781689 - RNA, 25 nt, Human
ucucacuccacaccucuaggccaaa

SEQ ID NO: 781690 - RNA, 19 nt, Human
ucuccaaccacaaaacaca

SEQ ID NO: 781691 - RNA, 19 nt, Human
ucugcaaaaccgcccucca

SEQ ID NO: 781692 - RNA, 22 nt, Human
ucugcaaaaccgcccuccaccu

SEQ ID NO: 781693 - RNA, 22 nt, Human
ucugccaagcggagcucagccu

SEQ ID NO: 781694 - RNA, 23 nt, Human
ucugcuuaaaaugaaacuagguc

SEQ ID NO: 781695 - RNA, 23 nt, Human
ucugugaccaagcagagccgggc

SEQ ID NO: 781696 - RNA, 18 nt, Human
ucuucuauccuucuuauu

SEQ ID NO: 781697 - RNA, 23 nt, Human
ugaaaacccccacuugaaaucca

SEQ ID NO: 781698 - RNA, 25 nt, Human
ugacaugccacugacacacagcagg

SEQ ID NO: 781699 - RNA, 23 nt, Human
ugacgguaacagcaaggacaggg

SEQ ID NO: 781700 - RNA, 21 nt, Human
ugacuccugucuccaaaucuc

SEQ ID NO: 781701 - RNA, 21 nt, Human
ugagccagagggggagauagc

SEQ ID NO: 781702 - RNA, 23 nt, Human
ugaggagaaccccugccugccac

SEQ ID NO: 781703 - RNA, 20 nt, Human
ugccucucagcuuuucuugu

SEQ ID NO: 781704 - RNA, 21 nt, Human
ugccugggggauucugucaga

SEQ ID NO: 781705 - RNA, 21 nt, Human
ugcgcagacagucucugcacg

SEQ ID NO: 781706 - RNA, 23 nt, Human
ugcucacugaaccacagugacau

SEQ ID NO: 781707 - RNA, 22 nt, Human
ugcugcugauccacacguggag

SEQ ID NO: 781708 - RNA, 20 nt, Human
ugcuggguggggcgcagggc

SEQ ID NO: 781709 - RNA, 20 nt, Human
ugcuuccacguugccacuug

SEQ ID NO: 781710 - RNA, 22 nt, Human
uggaaacugggcugugcacaag

SEQ ID NO: 781711 - RNA, 18 nt, Human
uggaggccaagaggaggg

SEQ ID NO: 781712 - RNA, 20 nt, Human
uggaggccaagaggagggga

SEQ ID NO: 781713 - RNA, 21 nt, Human
uggaggccaagaggaggggag

SEQ ID NO: 781714 - RNA, 21 nt, Human
uggcaggggacugacccggug

SEQ ID NO: 781715 - RNA, 28 nt, Human
uggccacacagacucauacccacaaaca

SEQ ID NO: 781716 - RNA, 21 nt, Human
uggccccagaaagggagcggg

SEQ ID NO: 781717 - RNA, 22 nt, Human
uggcugggagaucagacuccag

SEQ ID NO: 781718 - RNA, 18 nt, Human
ugggcuggaggggugggg

SEQ ID NO: 781719 - RNA, 20 nt, Human
ugggcuggaggggugggggu

SEQ ID NO: 781720 - RNA, 26 nt, Human
ugggugggcccugagagauggaaacu

SEQ ID NO: 781721 - RNA, 20 nt, Human
uuccagaaucugcagucacc

SEQ ID NO: 781722 - RNA, 21 nt, Human
uuccagaaucugcagucacca

SEQ ID NO: 781723 - RNA, 19 nt, Human
uuccuauccuugcagcugc

SEQ ID NO: 781724 - RNA, 19 nt, Human
uugaaccucauaaacacug

SEQ ID NO: 781725 - RNA, 20 nt, Human
uugcuggagcugucugugac

SEQ ID NO: 781726 - RNA, 26 nt, Human
uugcuguuguuguuccccaccucugg

SEQ ID NO: 781727 - RNA, 20 nt, Human
aaacgagacucggguacccc

SEQ ID NO: 781728 - RNA, 19 nt, Human
aaagcugugaggcaggagg

SEQ ID NO: 781729 - RNA, 22 nt, Human
aaagcugugaggcaggaggguc

SEQ ID NO: 781730 - RNA, 24 nt, Human
aaagugcugggauuacaggcguga

SEQ ID NO: 781731 - RNA, 18 nt, Human
aacagugggugagcuugg

SEQ ID NO: 781732 - RNA, 19 nt, Human
aacccauaaggauaccccc

SEQ ID NO: 781733 - RNA, 20 nt, Human
aaccuggcugcugggagugg

SEQ ID NO: 781734 - RNA, 18 nt, Human
aacggaacagaugggugg

SEQ ID NO: 781735 - RNA, 20 nt, Human
aagacgacaggugcaccacc

SEQ ID NO: 781736 - RNA, 19 nt, Human
aagauugguggugggggau

SEQ ID NO: 781737 - RNA, 20 nt, Human
aagauugguggugggggaug

SEQ ID NO: 781738 - RNA, 19 nt, Human
aagccaaggacggggaccc

SEQ ID NO: 781739 - RNA, 24 nt, Human
aagcuucugggcucaagugauccu

SEQ ID NO: 781740 - RNA, 20 nt, Human
aaggauacccccaauccacc

SEQ ID NO: 781741 - RNA, 24 nt, Human
aaggcacaagauaaaguaaggggc

SEQ ID NO: 781742 - RNA, 25 nt, Human
aagugauccucccaccucagccucc

SEQ ID NO: 781743 - RNA, 19 nt, Human
aagugcugggauuacaggc

SEQ ID NO: 781744 - RNA, 19 nt, Human
aagugcugggauuacaggc

SEQ ID NO: 781745 - RNA, 26 nt, Human
aagugcugggauuacaggcgugagcc

SEQ ID NO: 781746 - RNA, 19 nt, Human
aauagcugggauuacagac

SEQ ID NO: 781747 - RNA, 23 nt, Human
acaggagaggcauucccaagcac

SEQ ID NO: 781748 - RNA, 23 nt, Human
acaggucuuccucaggccugaca

SEQ ID NO: 781749 - RNA, 19 nt, Human
acaggugcaccaccacgcc

SEQ ID NO: 781750 - RNA, 21 nt, Human
acagugagcccagccccugau

SEQ ID NO: 781751 - RNA, 20 nt, Human
acauauauccaacccuuggu

SEQ ID NO: 781752 - RNA, 18 nt, Human
accacucugucgcccagg

SEQ ID NO: 781753 - RNA, 19 nt, Human
acccacacaaggcaccgug

SEQ ID NO: 781754 - RNA, 24 nt, Human
acccuguuggccaggcuggucuug

SEQ ID NO: 781755 - RNA, 25 nt, Human
acccuguuggccaggcuggucuuga

SEQ ID NO: 781756 - RNA, 20 nt, Human
accucagccucccaaguagc

SEQ ID NO: 781757 - RNA, 18 nt, Human
acgggguuucacccuguu

SEQ ID NO: 781758 - RNA, 20 nt, Human
acgggguuucacccuguugg

SEQ ID NO: 781759 - RNA, 24 nt, Human
acgggguuucacccuguuggccag

SEQ ID NO: 781760 - RNA, 19 nt, Human
acucugucgcccaggcugg

SEQ ID NO: 781761 - RNA, 25 nt, Human
acucugucgcccaggcuggagcgca

SEQ ID NO: 781762 - RNA, 21 nt, Human
acugcaggaacggaacagaug

SEQ ID NO: 781763 - RNA, 23 nt, Human
acuguccacguggagaagcaaga

SEQ ID NO: 781764 - RNA, 19 nt, Human
agacagauaaaucccuugc

SEQ ID NO: 781765 - RNA, 22 nt, Human
agacagauaaaucccuugccca

SEQ ID NO: 781766 - RNA, 22 nt, Human
agaccagaagucugacaucugc

SEQ ID NO: 781767 - RNA, 20 nt, Human
agacgacaggugcaccacca

SEQ ID NO: 781768 - RNA, 21 nt, Human
agaggggagggaaagaggagg

SEQ ID NO: 781769 - RNA, 21 nt, Human
agcacugggggcagcccagga

SEQ ID NO: 781770 - RNA, 20 nt, Human
agcaggggagggggcccagu

SEQ ID NO: 781771 - RNA, 23 nt, Human
agccacugcgcucggcccauguu

SEQ ID NO: 781772 - RNA, 18 nt, Human
agccuccugaauagcugg

SEQ ID NO: 781773 - RNA, 24 nt, Human
agcgcaguggcacaaucucggcuc

SEQ ID NO: 781774 - RNA, 26 nt, Human
aggaaccuccagaccuucccaggauu

SEQ ID NO: 781775 - RNA, 27 nt, Human
aggcacaagauaaaguaagggggaccc

SEQ ID NO: 781776 - RNA, 21 nt, Human
aggcaggagggucugagucug

SEQ ID NO: 781777 - RNA, 18 nt, Human
aggcagguugggacgcag

SEQ ID NO: 781778 - RNA, 25 nt, Human
aggcagguugggacgcaggccuagg

SEQ ID NO: 781779 - RNA, 22 nt, Human
aggccugcagucccuuaacucc

SEQ ID NO: 781780 - RNA, 24 nt, Human
aggcgaucugcccaccuuggccuc

SEQ ID NO: 781781 - RNA, 21 nt, Human
aggcugccugugcugcagagc

SEQ ID NO: 781782 - RNA, 23 nt, Human
agggaaagaggaggcuggagagg

SEQ ID NO: 781783 - RNA, 19 nt, Human
aggguagggggacagaggg

SEQ ID NO: 781784 - RNA, 19 nt, Human
agguuggagugcaguggca

SEQ ID NO: 781785 - RNA, 21 nt, Human
agugcaguggcacgauccuag

SEQ ID NO: 781786 - RNA, 23 nt, Human
agugcaguggcacgauccuagcu

SEQ ID NO: 781787 - RNA, 18 nt, Human
agugcugggauuacaggc

SEQ ID NO: 781788 - RNA, 20 nt, Human
aguggggcaggaacucaagg

SEQ ID NO: 781789 - RNA, 20 nt, Human
auagcugggauuacagacgu

SEQ ID NO: 781790 - RNA, 24 nt, Human
caaagugcugggauuacaggcgug

SEQ ID NO: 781791 - RNA, 21 nt, Human
caacaggagaggcauucccaa

SEQ ID NO: 781792 - RNA, 27 nt, Human
caagaccagaagucugacaucugccaa

SEQ ID NO: 781793 - RNA, 27 nt, Human
caagugauccucccaccucagccuccc

SEQ ID NO: 781794 - RNA, 27 nt, Human
caagugauccucccaccucagccuccc

SEQ ID NO: 781795 - RNA, 24 nt, Human
cacaauccccaagaaagggacaag

SEQ ID NO: 781796 - RNA, 20 nt, Human
cacacaccacauaccugccc

SEQ ID NO: 781797 - RNA, 22 nt, Human
cacagagcuggugagaggcagg

SEQ ID NO: 781798 - RNA, 27 nt, Human
cacagccccggaagugagggagcugaa

SEQ ID NO: 781799 - RNA, 25 nt, Human
cacaggaaccuccagaccuucccag

SEQ ID NO: 781800 - RNA, 22 nt, Human
caccaccacgccuggcuaauuu

SEQ ID NO: 781801 - RNA, 23 nt, Human
caccaggugucuccuccccagcc

SEQ ID NO: 781802 - RNA, 21 nt, Human
cacccugccgcuccugccugc

SEQ ID NO: 781803 - RNA, 21 nt, Human
cacccuguuggccaggcuggu

SEQ ID NO: 781804 - RNA, 23 nt, Human
cacccuguuggccaggcuggucu

SEQ ID NO: 781805 - RNA, 24 nt, Human
cacccuguuggccaggcuggucuu

SEQ ID NO: 781806 - RNA, 24 nt, Human
caccucagccucccaaguagcuaa

SEQ ID NO: 781807 - RNA, 24 nt, Human
caccugggccaacagggcugaggc

SEQ ID NO: 781808 - RNA, 20 nt, Human
cacucugccucucaugcccu

SEQ ID NO: 781809 - RNA, 24 nt, Human
cacucugucgcccaggcuggagcg

SEQ ID NO: 781810 - RNA, 23 nt, Human
cacugcaaccuccgcauccuggg

SEQ ID NO: 781811 - RNA, 18 nt, Human
cacugggggcagcccagg

SEQ ID NO: 781812 - RNA, 24 nt, Human
cagaagucugacaucugccaaagc

SEQ ID NO: 781813 - RNA, 25 nt, Human
cagccaaggcauguccugcugccaa

SEQ ID NO: 781814 - RNA, 23 nt, Human
cagcccaggacccagaaagccaa

SEQ ID NO: 781815 - RNA, 19 nt, Human
caggcacuuggcaaacacc

SEQ ID NO: 781816 - RNA, 24 nt, Human
caggcacuuggcaaacaccuguag

SEQ ID NO: 781817 - RNA, 21 nt, Human
caggucuuccucaggccugac

SEQ ID NO: 781818 - RNA, 22 nt, Human
cagugaagaaugagccagauac

SEQ ID NO: 781819 - RNA, 23 nt, Human
cauccuaagaccuacaucgauaa

SEQ ID NO: 781820 - RNA, 22 nt, Human
ccaaagugcugggauuacaggc

SEQ ID NO: 781821 - RNA, 22 nt, Human
ccaaagugcugggauuacaggc

SEQ ID NO: 781822 - RNA, 24 nt, Human
ccaaagugcugggauuacaggcgu

SEQ ID NO: 781823 - RNA, 27 nt, Human
ccacaggaaccuccagaccuucccagg

SEQ ID NO: 781824 - RNA, 21 nt, Human
ccacagugagcccagccccug

SEQ ID NO: 781825 - RNA, 22 nt, Human
ccaccaggugucuccuccccag

SEQ ID NO: 781826 - RNA, 22 nt, Human
ccacccugccgcuccugccugc

SEQ ID NO: 781827 - RNA, 22 nt, Human
ccacucugucgcccaggcugga

SEQ ID NO: 781828 - RNA, 22 nt, Human
ccagccuccacaauccccaaga

SEQ ID NO: 781829 - RNA, 23 nt, Human
ccagggugcagguugcuggacuu

SEQ ID NO: 781830 - RNA, 22 nt, Human
cccacacaaggcaccgugggga

SEQ ID NO: 781831 - RNA, 23 nt, Human
cccacacaccacauaccugcccu

SEQ ID NO: 781832 - RNA, 22 nt, Human
cccaccaggugucuccucccca

SEQ ID NO: 781833 - RNA, 20 nt, Human
cccauaaggauacccccaau

SEQ ID NO: 781834 - RNA, 25 nt, Human
ccccaagaaagggacaaggggcuuc

SEQ ID NO: 781835 - RNA, 25 nt, Human
cccccggcccugagaccuggcgacc

SEQ ID NO: 781836 - RNA, 26 nt, Human
ccccucugacccagccuccacaaucc

SEQ ID NO: 781837 - RNA, 18 nt, Human
ccccugauggcucuaguu

SEQ ID NO: 781838 - RNA, 21 nt, Human
cccuguugcccagcaugccug

SEQ ID NO: 781839 - RNA, 18 nt, Human
cccuugguaaaugccagg

SEQ ID NO: 781840 - RNA, 18 nt, Human
ccgcuccugccugccuca

SEQ ID NO: 781841 - RNA, 20 nt, Human
ccggaagugagggagcugaa

SEQ ID NO: 781842 - RNA, 23 nt, Human
ccucccaccucagccucccaagu

SEQ ID NO: 781843 - RNA, 19 nt, Human
ccuccgcauccuggguuca

SEQ ID NO: 781844 - RNA, 18 nt, Human
ccuccugcuccaccuggg

SEQ ID NO: 781845 - RNA, 19 nt, Human
ccugaauagcugggauuac

SEQ ID NO: 781846 - RNA, 21 nt, Human
ccugccgcuccugccugccuc

SEQ ID NO: 781847 - RNA, 20 nt, Human
ccugugccuuguccagcaau

SEQ ID NO: 781848 - RNA, 23 nt, Human
ccuugcccaaggucacagagcug

SEQ ID NO: 781849 - RNA, 24 nt, Human
cgaucugcccaccuuggccuccca

SEQ ID NO: 781850 - RNA, 18 nt, Human
cgcccggggcccaggacc

SEQ ID NO: 781851 - RNA, 24 nt, Human
cgcucucucacccagguuggagug

SEQ ID NO: 781852 - RNA, 23 nt, Human
cucaaggcacaagauaaaguaag

SEQ ID NO: 781853 - RNA, 24 nt, Human
cucaagugauccucccaccucagc

SEQ ID NO: 781854 - RNA, 24 nt, Human
cucacugcaaccuccgcauccugg

SEQ ID NO: 781855 - RNA, 24 nt, Human
cucacugcagcuucaagcuucugg

SEQ ID NO: 781856 - RNA, 19 nt, Human
cucagaagaacccagugaa

SEQ ID NO: 781857 - RNA, 24 nt, Human
cucaggcgaucugcccaccuuggc

SEQ ID NO: 781858 - RNA, 23 nt, Human
cuccugaauagcugggauuacag

SEQ ID NO: 781859 - RNA, 25 nt, Human
cucgugccucagccuccugaauagc

SEQ ID NO: 781860 - RNA, 19 nt, Human
cucugccugagcucugccc

SEQ ID NO: 781861 - RNA, 22 nt, Human
cugaaaagaacccauaaggaua

SEQ ID NO: 781862 - RNA, 21 nt, Human
cugaggccuggaggaggaagc

SEQ ID NO: 781863 - RNA, 23 nt, Human
cugcaaccuccgcauccuggguu

SEQ ID NO: 781864 - RNA, 20 nt, Human
cugcagucccuuaacucccc

SEQ ID NO: 781865 - RNA, 18 nt, Human
cuggagcacugggggcag

SEQ ID NO: 781866 - RNA, 22 nt, Human
cuggaggcugacggcuuggggu

SEQ ID NO: 781867 - RNA, 18 nt, Human
cuggugagaggcagguug

SEQ ID NO: 781868 - RNA, 23 nt, Human
cuguuggccaggcuggucuugaa

SEQ ID NO: 781869 - RNA, 23 nt, Human
cuucugggcucaagugauccucc

SEQ ID NO: 781870 - RNA, 25 nt, Human
cuucugggcucaagugauccuccca

SEQ ID NO: 781871 - RNA, 26 nt, Human
gaauagcugggauuacagacgucugc

SEQ ID NO: 781872 - RNA, 22 nt, Human
gaauucucgugccucagccucc

SEQ ID NO: 781873 - RNA, 21 nt, Human
gacagauaaaucccuugccca

SEQ ID NO: 781874 - RNA, 23 nt, Human
gaccucaggcgaucugcccaccu

SEQ ID NO: 781875 - RNA, 24 nt, Human
gacggcuugggguggggccacagu

SEQ ID NO: 781876 - RNA, 21 nt, Human
gagaauggagaccagagggga

SEQ ID NO: 781877 - RNA, 25 nt, Human
gagaauggagaccagaggggaggga

SEQ ID NO: 781878 - RNA, 24 nt, Human
gagacgggguuucacccuguuggc

SEQ ID NO: 781879 - RNA, 21 nt, Human
gagcugaagagaauggagacc

SEQ ID NO: 781880 - RNA, 21 nt, Human
gaggagcuccacaggucuucc

SEQ ID NO: 781881 - RNA, 23 nt, Human
gagugaaaaagcuguagcagccc

SEQ ID NO: 781882 - RNA, 18 nt, Human
gauuacaggcgugagcca

SEQ ID NO: 781883 - RNA, 22 nt, Human
gauuacaggcgugagccacugc

SEQ ID NO: 781884 - RNA, 22 nt, Human
gauuacaggcgugagccacugc

SEQ ID NO: 781885 - RNA, 19 nt, Human
gauucuggagagagggcuc

SEQ ID NO: 781886 - RNA, 22 nt, Human
gcaaccuccgcauccuggguuc

SEQ ID NO: 781887 - RNA, 21 nt, Human
gcaguggcacaaucucggcuc

SEQ ID NO: 781888 - RNA, 23 nt, Human
gcccaaggucacagagcugguga

SEQ ID NO: 781889 - RNA, 24 nt, Human
gcccaaggucacagagcuggugag

SEQ ID NO: 781890 - RNA, 19 nt, Human
gcccaggacccagaaagcc

SEQ ID NO: 781891 - RNA, 23 nt, Human
gcccaggcuggagcgcaguggca

SEQ ID NO: 781892 - RNA, 19 nt, Human
gcccauguugccuuuuuga

SEQ ID NO: 781893 - RNA, 22 nt, Human
gcccggggcccaggacccuucc

SEQ ID NO: 781894 - RNA, 22 nt, Human
gcccugagaccuggcgaccgcc

SEQ ID NO: 781895 - RNA, 18 nt, Human
gcucaagugauccuccca

SEQ ID NO: 781896 - RNA, 21 nt, Human
gcuccuggagagcagccaccc

SEQ ID NO: 781897 - RNA, 19 nt, Human
gcugccugugcugcagagc

SEQ ID NO: 781898 - RNA, 19 nt, Human
gcuggagcgcaguggcaca

SEQ ID NO: 781899 - RNA, 22 nt, Human
ggaaagaggaggcuggagagga

SEQ ID NO: 781900 - RNA, 21 nt, Human
ggacugagaggaaacgagacu

SEQ ID NO: 781901 - RNA, 19 nt, Human
ggaggacauggaugauaac

SEQ ID NO: 781902 - RNA, 22 nt, Human
ggagggaaagaggaggcuggag

SEQ ID NO: 781903 - RNA, 21 nt, Human
ggagucgcccacacaccacau

SEQ ID NO: 781904 - RNA, 25 nt, Human
ggcacaagauaaaguaaggggcaaa

SEQ ID NO: 781905 - RNA, 18 nt, Human
ggcaggagagagauggga

SEQ ID NO: 781906 - RNA, 19 nt, Human
ggccuggaggaggaagcuc

SEQ ID NO: 781907 - RNA, 24 nt, Human
ggcgaccgccgcccggggcccagg

SEQ ID NO: 781908 - RNA, 22 nt, Human
ggcuggagaggagcuccacagg

SEQ ID NO: 781909 - RNA, 24 nt, Human
ggcuggucuugaacuccagaccuc

SEQ ID NO: 781910 - RNA, 21 nt, Human
ggcuucggagaggggccaggu

SEQ ID NO: 781911 - RNA, 22 nt, Human
ggcuugggguggggccacagug

SEQ ID NO: 781912 - RNA, 23 nt, Human
gggaaagaggaggcuggagagga

SEQ ID NO: 781913 - RNA, 19 nt, Human
gggaccaaugcaacaggag

SEQ ID NO: 781914 - RNA, 21 nt, Human
gggagggaaagaggaggcugg

SEQ ID NO: 781915 - RNA, 22 nt, Human
gggcagcccaggacccagaaag

SEQ ID NO: 781916 - RNA, 22 nt, Human
gggcucaagugauccucccacc

SEQ ID NO: 781917 - RNA, 24 nt, Human
gggcugccaggaugggaggcaggu

SEQ ID NO: 781918 - RNA, 18 nt, Human
gggcuucggagaggggcc

SEQ ID NO: 781919 - RNA, 19 nt, Human
ggggcagcccaggacccag

SEQ ID NO: 781920 - RNA, 21 nt, Human
gggggcagcccaggacccaga

SEQ ID NO: 781921 - RNA, 23 nt, Human
gggguuucacccuguuggccagg

SEQ ID NO: 781922 - RNA, 22 nt, Human
ggguuucacccuguuggccagg

SEQ ID NO: 781923 - RNA, 19 nt, Human
gguggggccacagugagcc

SEQ ID NO: 781924 - RNA, 20 nt, Human
gguggugggaagagcccagg

SEQ ID NO: 781925 - RNA, 23 nt, Human
gguggugggaagagcccagggcu

SEQ ID NO: 781926 - RNA, 18 nt, Human
guccacaggaaccuccag

SEQ ID NO: 781927 - RNA, 24 nt, Human
gugauccucccaccucagccuccc

SEQ ID NO: 781928 - RNA, 22 nt, Human
gugccucagccuccugaauagc

SEQ ID NO: 781929 - RNA, 24 nt, Human
guggagaagcaagaccagaagucu

SEQ ID NO: 781930 - RNA, 18 nt, Human
guggggccacagugagcc

SEQ ID NO: 781931 - RNA, 23 nt, Human
uaaagcugugaggcaggaggguc

SEQ ID NO: 781932 - RNA, 23 nt, Human
uaaaucccuugcccaaggucaca

SEQ ID NO: 781933 - RNA, 19 nt, Human
uaaccuggauugccagugg

SEQ ID NO: 781934 - RNA, 24 nt, Human
uaacugggguuuaggguaggggga

SEQ ID NO: 781935 - RNA, 21 nt, Human
uaagacgacaggugcaccacc

SEQ ID NO: 781936 - RNA, 18 nt, Human
uaaggauacccccaaucc

SEQ ID NO: 781937 - RNA, 19 nt, Human
uacaaagauaaagcuguga

SEQ ID NO: 781938 - RNA, 22 nt, Human
uacaggcgugagccacugcgcu

SEQ ID NO: 781939 - RNA, 24 nt, Human
uaccacucugucgcccaggcugga

SEQ ID NO: 781940 - RNA, 20 nt, Human
uacccccggcccugagaccu

SEQ ID NO: 781941 - RNA, 21 nt, Human
uacccuggaacgguaauacaa

SEQ ID NO: 781942 - RNA, 22 nt, Human
uagcucacugcagcuucaagcu

SEQ ID NO: 781943 - RNA, 21 nt, Human
uaggguagggggacagagggc

SEQ ID NO: 781944 - RNA, 19 nt, Human
ucacccagguuggagugca

SEQ ID NO: 781945 - RNA, 24 nt, Human
ucacccagguuggagugcaguggc

SEQ ID NO: 781946 - RNA, 18 nt, Human
ucacugcaaccuccgcau

SEQ ID NO: 781947 - RNA, 24 nt, Human
ucacugcaaccuccgcauccuggg

SEQ ID NO: 781948 - RNA, 18 nt, Human
ucacugcagcuucaagcu

SEQ ID NO: 781949 - RNA, 24 nt, Human
ucacugcagcuucaagcuucuggg

SEQ ID NO: 781950 - RNA, 21 nt, Human
ucagccucccaaguagcuaag

SEQ ID NO: 781951 - RNA, 19 nt, Human
uccaaaccucugccugagc

SEQ ID NO: 781952 - RNA, 25 nt, Human
uccacaggaaccuccagaccuuccc

SEQ ID NO: 781953 - RNA, 20 nt, Human
uccacaggucuuccucaggg

SEQ ID NO: 781954 - RNA, 20 nt, Human
uccaccugggccaacagggc

SEQ ID NO: 781955 - RNA, 21 nt, Human
uccagcaaugguucccugaaa

SEQ ID NO: 781956 - RNA, 24 nt, Human
ucccaaagugcugggauuacaggc

SEQ ID NO: 781957 - RNA, 24 nt, Human
ucccaagcaccacauguuccagug

SEQ ID NO: 781958 - RNA, 20 nt, Human
ucccugagguccacaggaac

SEQ ID NO: 781959 - RNA, 22 nt, Human
ucccugagguccacaggaaccu

SEQ ID NO: 781960 - RNA, 19 nt, Human
ucccuggaggcugacggcu

SEQ ID NO: 781961 - RNA, 18 nt, Human
uccuccauccuguacagc

SEQ ID NO: 781962 - RNA, 22 nt, Human
uccuccauccuguacagcugcc

SEQ ID NO: 781963 - RNA, 27 nt, Human
uccucccaccucagccucccaaguagc

SEQ ID NO: 781964 - RNA, 20 nt, Human
uccuggguucauggaauucu

SEQ ID NO: 781965 - RNA, 21 nt, Human
uccuggguucauggaauucuc

SEQ ID NO: 781966 - RNA, 18 nt, Human
ucgcccaggcuggagcgc

SEQ ID NO: 781967 - RNA, 24 nt, Human
ucgcucucucacccagguuggagu

SEQ ID NO: 781968 - RNA, 23 nt, Human
ucuccccaacagugggugagcuu

SEQ ID NO: 781969 - RNA, 23 nt, Human
ucucgcucucucacccagguugg

SEQ ID NO: 781970 - RNA, 24 nt, Human
ucucgcucucucacccagguugga

SEQ ID NO: 781971 - RNA, 22 nt, Human
ucucugcauuuuucuuuuucuu

SEQ ID NO: 781972 - RNA, 27 nt, Human
ucuggagcacugggggcagcccaggac

SEQ ID NO: 781973 - RNA, 22 nt, Human
ucugggcucaagugauccuccc

SEQ ID NO: 781974 - RNA, 18 nt, Human
ucugucgcccaggcugga

SEQ ID NO: 781975 - RNA, 18 nt, Human
ucuuuuucuugagacagg

SEQ ID NO: 781976 - RNA, 21 nt, Human
ugaagagaauggagaccagag

SEQ ID NO: 781977 - RNA, 23 nt, Human
ugaagagaauggagaccagaggg

SEQ ID NO: 781978 - RNA, 22 nt, Human
ugacccagccuccacaaucccc

SEQ ID NO: 781979 - RNA, 19 nt, Human
ugagaaaacuaagggacag

SEQ ID NO: 781980 - RNA, 23 nt, Human
ugagaggaaacgagacucgggua

SEQ ID NO: 781981 - RNA, 22 nt, Human
ugagaggcagguugggacgcag

SEQ ID NO: 781982 - RNA, 22 nt, Human
ugagauacuuuuuucaaagcua

SEQ ID NO: 781983 - RNA, 18 nt, Human
ugagccagauacucacug

SEQ ID NO: 781984 - RNA, 21 nt, Human
ugagccagauacucacugucc

SEQ ID NO: 781985 - RNA, 25 nt, Human
ugagccagauacucacuguccacgu

SEQ ID NO: 781986 - RNA, 20 nt, Human
ugaggcaggagggucugagu

SEQ ID NO: 781987 - RNA, 21 nt, Human
ugagguccacaggaaccucca

SEQ ID NO: 781988 - RNA, 19 nt, Human
ugcagagcucagaaaugga

SEQ ID NO: 781989 - RNA, 18 nt, Human
ugccaggccugcaguccc

SEQ ID NO: 781990 - RNA, 22 nt, Human
ugccaguggggaaggucuggag

SEQ ID NO: 781991 - RNA, 22 nt, Human
ugccucagccuccugaauagcu

SEQ ID NO: 781992 - RNA, 27 nt, Human
ugccucagccuccugaauagcugggau

SEQ ID NO: 781993 - RNA, 23 nt, Human
ugccuggacccucaacacuuaau

SEQ ID NO: 781994 - RNA, 21 nt, Human
ugccugugcugcagagcugca

SEQ ID NO: 781995 - RNA, 23 nt, Human
ugcgcucggcccauguugccuuu

SEQ ID NO: 781996 - RNA, 24 nt, Human
ugcugggauuacaggcgugagcca

SEQ ID NO: 781997 - RNA, 20 nt, Human
uggaaacgcccuauauccuc

SEQ ID NO: 781998 - RNA, 21 nt, Human
uggaaacgcccuauauccucc

SEQ ID NO: 781999 - RNA, 24 nt, Human
uggagcgcaguggcacaaucucgg

SEQ ID NO: 782000 - RNA, 19 nt, Human
uggagugcaguggcacgau

SEQ ID NO: 782001 - RNA, 18 nt, Human
uggaugauaaccuggauu

SEQ ID NO: 782002 - RNA, 24 nt, Human
uggcacaaucucggcucacugcaa

SEQ ID NO: 782003 - RNA, 23 nt, Human
uggcacgauccuagcucacugca

SEQ ID NO: 782004 - RNA, 23 nt, Human
uggccaggcuggucuugaacucc

SEQ ID NO: 782005 - RNA, 20 nt, Human
uggcgaccgccgcccggggc

SEQ ID NO: 782006 - RNA, 19 nt, Human
uggcuccugugccuugucc

SEQ ID NO: 782007 - RNA, 20 nt, Human
ugggagaagcaguggccacu

SEQ ID NO: 782008 - RNA, 18 nt, Human
ugggauuacagacgucug

SEQ ID NO: 782009 - RNA, 19 nt, Human
ugggauuacagacgucugc

SEQ ID NO: 782010 - RNA, 21 nt, Human
ugggauuacagacgucugcca

SEQ ID NO: 782011 - RNA, 24 nt, Human
ugggauuacagacgucugccacua

SEQ ID NO: 782012 - RNA, 18 nt, Human
ugggauuacaggcgugag

SEQ ID NO: 782013 - RNA, 19 nt, Human
ugggauuacaggcgugagc

SEQ ID NO: 782014 - RNA, 21 nt, Human
ugggauuacaggcgugagcca

SEQ ID NO: 782015 - RNA, 22 nt, Human
ugggauuacaggcgugagccac

SEQ ID NO: 782016 - RNA, 22 nt, Human
ugggauuacaggcgugagccac

SEQ ID NO: 782017 - RNA, 24 nt, Human
ugggauuacaggcgugagccacug

SEQ ID NO: 782018 - RNA, 24 nt, Human
ugggauuacaggcgugagccacug

SEQ ID NO: 782019 - RNA, 24 nt, Human
ugggccaggcacuuggcaaacacc

SEQ ID NO: 782020 - RNA, 24 nt, Human
ugggcucaagugauccucccaccu

SEQ ID NO: 782021 - RNA, 21 nt, Human
ugggggauggggauuaauaca

SEQ ID NO: 782022 - RNA, 22 nt, Human
ugggguggggccacagugagcc

SEQ ID NO: 782023 - RNA, 19 nt, Human
ugggguuuaggguaggggg

SEQ ID NO: 782024 - RNA, 25 nt, Human
uggugggggauggggauuaauacag

SEQ ID NO: 782025 - RNA, 19 nt, Human
ugguggugggggaugggga

SEQ ID NO: 782026 - RNA, 24 nt, Human
uguagagacgggguuucacccugu

SEQ ID NO: 782027 - RNA, 19 nt, Human
uguagagauggggucccug

SEQ ID NO: 782028 - RNA, 19 nt, Human
uguccagcaaugguucccu

SEQ ID NO: 782029 - RNA, 24 nt, Human
ugugaggcaggagggucugaggag

SEQ ID NO: 782030 - RNA, 19 nt, Human
uguucagagauagagauca

SEQ ID NO: 782031 - RNA, 20 nt, Human
uguucagagauagagaucau

SEQ ID NO: 782032 - RNA, 21 nt, Human
uguucagagauagagaucauu

SEQ ID NO: 782033 - RNA, 21 nt, Human
uguuccaguggucccuccugc

SEQ ID NO: 782034 - RNA, 24 nt, Human
uuaaacuuuuuuguagagauggga

SEQ ID NO: 782035 - RNA, 27 nt, Human
uucugguguuauuguagauaaucuccc

SEQ ID NO: 782036 - RNA, 22 nt, Human
uucuugucccuugcagagcuca

SEQ ID NO: 782037 - RNA, 21 nt, Human
uuggagcaugggaugaagaga

SEQ ID NO: 782038 - RNA, 22 nt, Human
uugggcaggagagagaugggag

SEQ ID NO: 782039 - RNA, 24 nt, Human
uuguagagacgggguuucacccug

SEQ ID NO: 782040 - RNA, 26 nt, Human
uuguagagacgggguuucacccuguu

SEQ ID NO: 782041 - RNA, 22 nt, Human
uuucacccuguuggccaggcug

SEQ ID NO: 782042 - RNA, 24 nt, Human
uuucacccuguuggccaggcuggu

SEQ ID NO: 782043 - RNA, 25 nt, Human
uuuguagagacgggguuucacccug

SEQ ID NO: 782044 - RNA, 25 nt, Human
uuuguagagacgggguuucacccug

SEQ ID NO: 782045 - RNA, 21 nt, Human
uuuguagagauggggucccug

SEQ ID NO: 782046 - RNA, 25 nt, Human
uuuuaagauugguggugggggaugg

SEQ ID NO: 782047 - RNA, 23 nt, Human
uuuuuguagagacgggguuucac

SEQ ID NO: 782048 - RNA, 19 nt, Human
uuuuuuguagagauggggu

SEQ ID NO: 782049 - RNA, 21 nt, Human
aaaagcuuugugugacaagaa

SEQ ID NO: 782050 - RNA, 21 nt, Human
aaagaccccggggaaagccaa

SEQ ID NO: 782051 - RNA, 20 nt, Human
aagaccccggggaaagccaa

SEQ ID NO: 782052 - RNA, 24 nt, Human
acaacugagguaaaacuucuccug

SEQ ID NO: 782053 - RNA, 22 nt, Human
acaagaaacauuucugaggccu

SEQ ID NO: 782054 - RNA, 20 nt, Human
accauaaauccuaacauaaa

SEQ ID NO: 782055 - RNA, 22 nt, Human
agaagcaagcugcccucugccc

SEQ ID NO: 782056 - RNA, 25 nt, Human
agaagcaagcugcccucugcccccu

SEQ ID NO: 782057 - RNA, 22 nt, Human
agcagccacaccagugcccacg

SEQ ID NO: 782058 - RNA, 23 nt, Human
agccacaccagugcccacguguc

SEQ ID NO: 782059 - RNA, 23 nt, Human
agguaccaugugggaaaacacug

SEQ ID NO: 782060 - RNA, 21 nt, Human
aucacugucaugaccugaagc

SEQ ID NO: 782061 - RNA, 24 nt, Human
aucccucgcuuggaaucggcuacc

SEQ ID NO: 782062 - RNA, 21 nt, Human
aucugagacacgguaguggga

SEQ ID NO: 782063 - RNA, 23 nt, Human
caaaagaccccggggaaagccaa

SEQ ID NO: 782064 - RNA, 20 nt, Human
caagcugcccucugcccccu

SEQ ID NO: 782065 - RNA, 19 nt, Human
cacagcaccaccaccaaca

SEQ ID NO: 782066 - RNA, 21 nt, Human
caguggguucaucucugguuu

SEQ ID NO: 782067 - RNA, 24 nt, Human
ccucucugggcaacagacaggagc

SEQ ID NO: 782068 - RNA, 20 nt, Human
ccugaagccggcaugcgccu

SEQ ID NO: 782069 - RNA, 22 nt, Human
ccugcugucaucugcccagagc

SEQ ID NO: 782070 - RNA, 24 nt, Human
cggggaaagccaauuuccaugaug

SEQ ID NO: 782071 - RNA, 21 nt, Human
cuccgugggcccaccaccauc

SEQ ID NO: 782072 - RNA, 24 nt, Human
cugagacacgguagugggauucac

SEQ ID NO: 782073 - RNA, 20 nt, Human
cugcacagcaccaccaccaa

SEQ ID NO: 782074 - RNA, 22 nt, Human
cuucuuuggaaguccaagguuu

SEQ ID NO: 782075 - RNA, 20 nt, Human
gacacuuccuguccugcagg

SEQ ID NO: 782076 - RNA, 19 nt, Human
gacccuguauuucuggaau

SEQ ID NO: 782077 - RNA, 25 nt, Human
gagaagaaacaacuuggggugcaga

SEQ ID NO: 782078 - RNA, 19 nt, Human
gaggagagccucugcuuag

SEQ ID NO: 782079 - RNA, 20 nt, Human
gagucccaucugagacacgg

SEQ ID NO: 782080 - RNA, 23 nt, Human
gcaucacugucaugaccugaagc

SEQ ID NO: 782081 - RNA, 18 nt, Human
gcugcuguuagaauggcu

SEQ ID NO: 782082 - RNA, 23 nt, Human
ggugaggagagccucugcuuagu

SEQ ID NO: 782083 - RNA, 18 nt, Human
gucagguaccauguggga

SEQ ID NO: 782084 - RNA, 22 nt, Human
gugaggcuuuuggaggcacaag

SEQ ID NO: 782085 - RNA, 24 nt, Human
uaaaccauaaauccuaacauaaaa

SEQ ID NO: 782086 - RNA, 19 nt, Human
uaaaucccucgcuuggaau

SEQ ID NO: 782087 - RNA, 23 nt, Human
uaauaagccuuccuuggagccaa

SEQ ID NO: 782088 - RNA, 21 nt, Human
uauuucuggaaucuucugagu

SEQ ID NO: 782089 - RNA, 19 nt, Human
ucaucucugguuuuuggug

SEQ ID NO: 782090 - RNA, 24 nt, Human
ucaucugcccagagcagccacacc

SEQ ID NO: 782091 - RNA, 23 nt, Human
uccaugaugaugaaauuuuugag

SEQ ID NO: 782092 - RNA, 22 nt, Human
ucuccugggcaaaagaccccgg

SEQ ID NO: 782093 - RNA, 21 nt, Human
ucuuuuccugcugucaucugc

SEQ ID NO: 782094 - RNA, 18 nt, Human
ugagaagaaacaacuugg

SEQ ID NO: 782095 - RNA, 19 nt, Human
ugagaagaaacaacuuggg

SEQ ID NO: 782096 - RNA, 26 nt, Human
ugagaagaaacaacuuggggugcaga

SEQ ID NO: 782097 - RNA, 20 nt, Human
ugaggagagccucugcuuag

SEQ ID NO: 782098 - RNA, 18 nt, Human
ugcccagagcagccacac

SEQ ID NO: 782099 - RNA, 19 nt, Human
ugcccagagcagccacacc

SEQ ID NO: 782100 - RNA, 18 nt, Human
ugcguggugaggagagcc

SEQ ID NO: 782101 - RNA, 24 nt, Human
ugggaaaacacuggacaacugagg

SEQ ID NO: 782102 - RNA, 25 nt, Human
ugggcaacagacaggagcagcaaag

SEQ ID NO: 782103 - RNA, 21 nt, Human
uggguucaucucugguuuuug

SEQ ID NO: 782104 - RNA, 18 nt, Human
ugugagguuucaggacaa

SEQ ID NO: 782105 - RNA, 23 nt, Human
ugugggaaaacacuggacaacug

SEQ ID NO: 782106 - RNA, 19 nt, Human
uucuuuggaaguccaaggu

SEQ ID NO: 782107 - RNA, 22 nt, Human
uugggacacuuccuguccugca

SEQ ID NO: 782108 - RNA, 24 nt, Human
uuuccugcugucaucugcccagag

SEQ ID NO: 782109 - RNA, 21 nt, Human
aaaaaaaaaaaaaaucacaaa

SEQ ID NO: 782110 - RNA, 25 nt, Human
aaaaaaaaaaaaaaucacaaaugaa

SEQ ID NO: 782111 - RNA, 18 nt, Human
aaaccugaaaagguagug

SEQ ID NO: 782112 - RNA, 21 nt, Human
aaacugaggcagagaggugau

SEQ ID NO: 782113 - RNA, 22 nt, Human
aaaguucuuucuaaaaaggcuc

SEQ ID NO: 782114 - RNA, 19 nt, Human
aacacuguccccuccaccc

SEQ ID NO: 782115 - RNA, 22 nt, Human
aagucagagccaaccaugagaa

SEQ ID NO: 782116 - RNA, 23 nt, Human
aagucagagccaaccaugagaac

SEQ ID NO: 782117 - RNA, 19 nt, Human
aaugaauccucacaacacc

SEQ ID NO: 782118 - RNA, 18 nt, Human
acaaaugaauccucacaa

SEQ ID NO: 782119 - RNA, 22 nt, Human
acauccuuuuuuuuuuuuccug

SEQ ID NO: 782120 - RNA, 21 nt, Human
acauggcacuucucugccacc

SEQ ID NO: 782121 - RNA, 20 nt, Human
acugggugaagcugccuuuc

SEQ ID NO: 782122 - RNA, 21 nt, Human
agaacacuguccccuccaccc

SEQ ID NO: 782123 - RNA, 18 nt, Human
agagaggggagaagagga

SEQ ID NO: 782124 - RNA, 22 nt, Human
agagauccacaguguuuggcaa

SEQ ID NO: 782125 - RNA, 20 nt, Human
agaggacagagagauccaca

SEQ ID NO: 782126 - RNA, 27 nt, Human
agaugcucagcaaggauggccuggaac

SEQ ID NO: 782127 - RNA, 23 nt, Human
agcagccucaggaccccagaccu

SEQ ID NO: 782128 - RNA, 20 nt, Human
agccucaggaccccagaccu

SEQ ID NO: 782129 - RNA, 23 nt, Human
aggcagagaggugaugugaucag

SEQ ID NO: 782130 - RNA, 21 nt, Human
aggcucaaagaugcucagcaa

SEQ ID NO: 782131 - RNA, 24 nt, Human
aggggagaagaggacagagagauc

SEQ ID NO: 782132 - RNA, 18 nt, Human
agguggcuccggaggugg

SEQ ID NO: 782133 - RNA, 19 nt, Human
auccgugcuccugcggccg

SEQ ID NO: 782134 - RNA, 18 nt, Human
auccuuuuuuuuuuuucc

SEQ ID NO: 782135 - RNA, 20 nt, Human
auggggaaacugaggcagag

SEQ ID NO: 782136 - RNA, 19 nt, Human
caacgcaaacauggcacuu

SEQ ID NO: 782137 - RNA, 22 nt, Human
cacaacaccccugugagguagg

SEQ ID NO: 782138 - RNA, 21 nt, Human
cacacaguaguucugcaaaag

SEQ ID NO: 782139 - RNA, 18 nt, Human
cacaccucacuguccaug

SEQ ID NO: 782140 - RNA, 24 nt, Human
caccacccucagugcacccuugcc

SEQ ID NO: 782141 - RNA, 20 nt, Human
caccccagcaaccacccuca

SEQ ID NO: 782142 - RNA, 21 nt, Human
caccccucagggccgcuccca

SEQ ID NO: 782143 - RNA, 19 nt, Human
caccucagacaccccaggc

SEQ ID NO: 782144 - RNA, 19 nt, Human
caccucagacaccccaggc

SEQ ID NO: 782145 - RNA, 19 nt, Human
cacgagccuaaccaaagac

SEQ ID NO: 782146 - RNA, 22 nt, Human
cacgagccuaaccaaagacagg

SEQ ID NO: 782147 - RNA, 24 nt, Human
cagagccaaccaugagaacacaaa

SEQ ID NO: 782148 - RNA, 21 nt, Human
cagcuccaggccuuggcuucc

SEQ ID NO: 782149 - RNA, 21 nt, Human
cagcucgcuccucccaacuuc

SEQ ID NO: 782150 - RNA, 22 nt, Human
caggaccccagaccugccagcc

SEQ ID NO: 782151 - RNA, 24 nt, Human
caggccugcguggggcccuguggg

SEQ ID NO: 782152 - RNA, 21 nt, Human
caguccccagcuggaagagcu

SEQ ID NO: 782153 - RNA, 22 nt, Human
cagugugcaccuugugagcacu

SEQ ID NO: 782154 - RNA, 18 nt, Human
cauccugccagccccacc

SEQ ID NO: 782155 - RNA, 22 nt, Human
cauccugccagccccaccaggc

SEQ ID NO: 782156 - RNA, 23 nt, Human
caugcaaaaauaaaaacaauaaa

SEQ ID NO: 782157 - RNA, 25 nt, Human
caugcaaaaauaaaaacaauaaacc

SEQ ID NO: 782158 - RNA, 23 nt, Human
cauucagucccaucucugacucc

SEQ ID NO: 782159 - RNA, 21 nt, Human
ccaaagacaggcuuuccuggu

SEQ ID NO: 782160 - RNA, 23 nt, Human
ccacccaccucaggcugccagac

SEQ ID NO: 782161 - RNA, 23 nt, Human
ccagccaagagcaccucagacac

SEQ ID NO: 782162 - RNA, 20 nt, Human
ccagccaagagcaccucagg

SEQ ID NO: 782163 - RNA, 18 nt, Human
cccagacaaguggagcag

SEQ ID NO: 782164 - RNA, 18 nt, Human
cccagaccugccagcccg

SEQ ID NO: 782165 - RNA, 19 nt, Human
cccaggucggagauggggg

SEQ ID NO: 782166 - RNA, 22 nt, Human
ccccaggccugcguggggcccu

SEQ ID NO: 782167 - RNA, 22 nt, Human
ccccuggaagcucuuuccuccc

SEQ ID NO: 782168 - RNA, 23 nt, Human
ccucaggaccccagaccugccag

SEQ ID NO: 782169 - RNA, 20 nt, Human
ccucccaccacccucagugc

SEQ ID NO: 782170 - RNA, 23 nt, Human
ccugcagcuccaggccuuggcuu

SEQ ID NO: 782171 - RNA, 18 nt, Human
cgagucaggcagcgacgg

SEQ ID NO: 782172 - RNA, 21 nt, Human
cgcggcuccggggggcauccg

SEQ ID NO: 782173 - RNA, 21 nt, Human
cgcucuggcuccagcucgcuc

SEQ ID NO: 782174 - RNA, 22 nt, Human
cgggcgccgagucaggcagcga

SEQ ID NO: 782175 - RNA, 21 nt, Human
cguggggcccugugggugggg

SEQ ID NO: 782176 - RNA, 22 nt, Human
cucacuguccaugaggaccacc

SEQ ID NO: 782177 - RNA, 22 nt, Human
cucaggaccccagaccugccag

SEQ ID NO: 782178 - RNA, 24 nt, Human
cucccaccggaaggcaggcucaaa

SEQ ID NO: 782179 - RNA, 19 nt, Human
cucccagccaagagcaccu

SEQ ID NO: 782180 - RNA, 22 nt, Human
cucugacuccgcaucuagaccu

SEQ ID NO: 782181 - RNA, 22 nt, Human
cucuguacaaaaaaaaaaaaaa

SEQ ID NO: 782182 - RNA, 21 nt, Human
cucugugcugcguucgccccc

SEQ ID NO: 782183 - RNA, 24 nt, Human
cuggaacccaggugauccccuccc

SEQ ID NO: 782184 - RNA, 20 nt, Human
cuggccuuuucugcucccac

SEQ ID NO: 782185 - RNA, 18 nt, Human
cugugccuccugcccagg

SEQ ID NO: 782186 - RNA, 22 nt, Human
gaaaccuccaccauccugccag

SEQ ID NO: 782187 - RNA, 24 nt, Human
gaggacagagagauccacaguguu

SEQ ID NO: 782188 - RNA, 22 nt, Human
gaggaccaccccagcaaccacc

SEQ ID NO: 782189 - RNA, 24 nt, Human
gcaaaaauaaaaacaauaaaccug

SEQ ID NO: 782190 - RNA, 20 nt, Human
gcagagguggcuccggaggu

SEQ ID NO: 782191 - RNA, 22 nt, Human
gccaagcaagguggacagccuc

SEQ ID NO: 782192 - RNA, 24 nt, Human
gcccuguggguggggggggguccc

SEQ ID NO: 782193 - RNA, 23 nt, Human
gccgggacagagagagaugccgg

SEQ ID NO: 782194 - RNA, 23 nt, Human
gccuccugcccagguucccagac

SEQ ID NO: 782195 - RNA, 23 nt, Human
gccuuggcuuccucugugccucc

SEQ ID NO: 782196 - RNA, 22 nt, Human
gcgcccggcgcgcgcucuggcu

SEQ ID NO: 782197 - RNA, 19 nt, Human
gcucaccggcgacgggacc

SEQ ID NO: 782198 - RNA, 23 nt, Human
gcucccugaagucuccagcuccu

SEQ ID NO: 782199 - RNA, 23 nt, Human
gcuccggggggcauccgugcucc

SEQ ID NO: 782200 - RNA, 26 nt, Human
gcucuggcuccagcucgcuccuccca

SEQ ID NO: 782201 - RNA, 23 nt, Human
ggaccugcagcuccaggccuugg

SEQ ID NO: 782202 - RNA, 20 nt, Human
gggggagugagccccuugga

SEQ ID NO: 782203 - RNA, 18 nt, Human
gguuucagcaagcaccag

SEQ ID NO: 782204 - RNA, 19 nt, Human
guccaugaggaccacccca

SEQ ID NO: 782205 - RNA, 20 nt, Human
gucccaucucugacuccgca

SEQ ID NO: 782206 - RNA, 25 nt, Human
gugaacagacacacaguaguucugc

SEQ ID NO: 782207 - RNA, 19 nt, Human
gugccuccugcccagguuc

SEQ ID NO: 782208 - RNA, 21 nt, Human
uacacgagccuaaccaaagac

SEQ ID NO: 782209 - RNA, 24 nt, Human
uacagauggggaaacugaggcaga

SEQ ID NO: 782210 - RNA, 24 nt, Human
uagaccuugucugcaaagaaauua

SEQ ID NO: 782211 - RNA, 20 nt, Human
uagcacuccuuggggcuccu

SEQ ID NO: 782212 - RNA, 21 nt, Human
ucaaauaucaugaccaaugac

SEQ ID NO: 782213 - RNA, 24 nt, Human
ucagccaguggucccaacacagcu

SEQ ID NO: 782214 - RNA, 21 nt, Human
ucaggcagcgacggggcgcgc

SEQ ID NO: 782215 - RNA, 19 nt, Human
ucagucccaucucugacuc

SEQ ID NO: 782216 - RNA, 19 nt, Human
uccacaguguuuggcaacu

SEQ ID NO: 782217 - RNA, 24 nt, Human
uccacaguguuuggcaacuggggg

SEQ ID NO: 782218 - RNA, 21 nt, Human
uccacccaccucaggcugcca

SEQ ID NO: 782219 - RNA, 24 nt, Human
ucccaacuccgcucagucucucca

SEQ ID NO: 782220 - RNA, 23 nt, Human
ucccagacaaguggagcaggccu

SEQ ID NO: 782221 - RNA, 25 nt, Human
uccccagcuggaagagcugcaaggc

SEQ ID NO: 782222 - RNA, 20 nt, Human
uccccaugagaggggcuccc

SEQ ID NO: 782223 - RNA, 25 nt, Human
uccccucccaccacccucagugcac

SEQ ID NO: 782224 - RNA, 18 nt, Human
uccgugcuccugcggccg

SEQ ID NO: 782225 - RNA, 19 nt, Human
uccugcugcagcagguggg

SEQ ID NO: 782226 - RNA, 23 nt, Human
ucucccauuuuacagauggggaa

SEQ ID NO: 782227 - RNA, 21 nt, Human
ucuguacaaaaaaaaaaaaaa

SEQ ID NO: 782228 - RNA, 19 nt, Human
ucugugccuccugcccagg

SEQ ID NO: 782229 - RNA, 23 nt, Human
ucugugccuccugcccagguucc

SEQ ID NO: 782230 - RNA, 20 nt, Human
ucugugcugcguucgccccc

SEQ ID NO: 782231 - RNA, 23 nt, Human
ugaaaagguagugaacagacaca

SEQ ID NO: 782232 - RNA, 24 nt, Human
ugaacagacacacaguaguucugc

SEQ ID NO: 782233 - RNA, 27 nt, Human
ugaacagacacacaguaguucugcaaa

SEQ ID NO: 782234 - RNA, 18 nt, Human
ugaauccucacaacaccc

SEQ ID NO: 782235 - RNA, 22 nt, Human
ugagaacacaaaggaucccucc

SEQ ID NO: 782236 - RNA, 18 nt, Human
ugagagaggggagaagag

SEQ ID NO: 782237 - RNA, 19 nt, Human
ugauccccucccaccaccc

SEQ ID NO: 782238 - RNA, 20 nt, Human
ugauccccucccaccacccu

SEQ ID NO: 782239 - RNA, 26 nt, Human
ugcaaaagaauucagccaaggggguc

SEQ ID NO: 782240 - RNA, 24 nt, Human
ugccagcccgcggcuccggggggc

SEQ ID NO: 782241 - RNA, 23 nt, Human
ugccaggggcugccaggccaauc

SEQ ID NO: 782242 - RNA, 24 nt, Human
ugccgggacagagagagaugccgg

SEQ ID NO: 782243 - RNA, 20 nt, Human
ugccuccugcccagguuccc

SEQ ID NO: 782244 - RNA, 21 nt, Human
ugcguggggcccugugggugg

SEQ ID NO: 782245 - RNA, 19 nt, Human
uggaagagcugcaaggcuc

SEQ ID NO: 782246 - RNA, 24 nt, Human
uggcagagcagcaggaguaaggaa

SEQ ID NO: 782247 - RNA, 21 nt, Human
uggccgggucugcucugugcc

SEQ ID NO: 782248 - RNA, 19 nt, Human
uggggaaacugaggcagag

SEQ ID NO: 782249 - RNA, 19 nt, Human
uggggcccugugggugggg

SEQ ID NO: 782250 - RNA, 23 nt, Human
uggguuucagcaagcaccagucc

SEQ ID NO: 782251 - RNA, 19 nt, Human
uguccccuccacccaccuc

SEQ ID NO: 782252 - RNA, 23 nt, Human
uguucagcuccuggguuucagca

SEQ ID NO: 782253 - RNA, 18 nt, Human
uguuuggcaacuggggga

SEQ ID NO: 782254 - RNA, 23 nt, Human
uucccagcagccuucccgcugug

SEQ ID NO: 782255 - RNA, 24 nt, Human
uuccucugugcugcguucgccccc

SEQ ID NO: 782256 - RNA, 18 nt, Human
aaacaaaugcacaaaaug

SEQ ID NO: 782257 - RNA, 19 nt, Human
aaacaaaugcacaaaaugg

SEQ ID NO: 782258 - RNA, 23 nt, Human
aaagaacuggcacaaacagauga

SEQ ID NO: 782259 - RNA, 26 nt, Human
aacuagaaaccacgcccuggcuucua

SEQ ID NO: 782260 - RNA, 20 nt, Human
aagcaaauucaugaugugaa

SEQ ID NO: 782261 - RNA, 19 nt, Human
aaugcacaaaaugggaaag

SEQ ID NO: 782262 - RNA, 21 nt, Human
agaaagugcagcaagaucaga

SEQ ID NO: 782263 - RNA, 22 nt, Human
auagaaagugcagcaagaucag

SEQ ID NO: 782264 - RNA, 19 nt, Human
aucuaacugaugaggaaac

SEQ ID NO: 782265 - RNA, 27 nt, Human
aucugcacaacauacccccuuagccac

SEQ ID NO: 782266 - RNA, 22 nt, Human
augacaauaguuaaaguauguc

SEQ ID NO: 782267 - RNA, 19 nt, Human
augaggaaacaggcucaga

SEQ ID NO: 782268 - RNA, 22 nt, Human
caaaugcacaaaaugggaaaga

SEQ ID NO: 782269 - RNA, 22 nt, Human
cagcaagaucagacgacugaca

SEQ ID NO: 782270 - RNA, 22 nt, Human
cauacccccuuagccacugguc

SEQ ID NO: 782271 - RNA, 18 nt, Human
cccccuuagccacugccc

SEQ ID NO: 782272 - RNA, 24 nt, Human
gaaagacaaaugguuauuaguugg

SEQ ID NO: 782273 - RNA, 19 nt, Human
gaucacaucuucucuggcc

SEQ ID NO: 782274 - RNA, 19 nt, Human
gggcucaaaaaaucaacag

SEQ ID NO: 782275 - RNA, 18 nt, Human
uaaaguaugucuuauuuu

SEQ ID NO: 782276 - RNA, 29 nt, Human
uaaaucgcauacugggcucaaaaaaucag

SEQ ID NO: 782277 - RNA, 19 nt, Human
uccagcacauaaagcaaau

SEQ ID NO: 782278 - RNA, 21 nt, Human
ucgcauacugggcucaaaaaa

SEQ ID NO: 782279 - RNA, 21 nt, Human
ugaaagaggcaaaugacaaua

SEQ ID NO: 782280 - RNA, 19 nt, Human
ugaggaaacaggcucagau

SEQ ID NO: 782281 - RNA, 22 nt, Human
ugaggaaacaggcucagauggg

SEQ ID NO: 782282 - RNA, 23 nt, Human
ugaggaaacaggcucagaugggu

SEQ ID NO: 782283 - RNA, 24 nt, Human
uguaaagaacuggcacaaacagau

SEQ ID NO: 782284 - RNA, 23 nt, Human
uguucacauuauuuccugaaauc

SEQ ID NO: 782285 - RNA, 18 nt, Human
uuagagguccaggcccug

SEQ ID NO: 782286 - RNA, 28 nt, Human
uucacauuauuuccugaaaucaucuuag

SEQ ID NO: 782287 - RNA, 22 nt, Human
uuugcuaauuuuguuccccagc

SEQ ID NO: 782288 - RNA, 21 nt, Human
aaaacgcgcccagcacucaga

SEQ ID NO: 782289 - RNA, 24 nt, Human
aaagugaugggauuacaggcguga

SEQ ID NO: 782290 - RNA, 18 nt, Human
aacagccagcuucucccc

SEQ ID NO: 782291 - RNA, 24 nt, Human
aagcaguccaucugccucagccuc

SEQ ID NO: 782292 - RNA, 25 nt, Human
aagcaguccaucugccucagccucc

SEQ ID NO: 782293 - RNA, 24 nt, Human
aaguaccugggaccacaggcacac

SEQ ID NO: 782294 - RNA, 22 nt, Human
aaguauccucugugauguaucc

SEQ ID NO: 782295 - RNA, 23 nt, Human
aagugauccucccgccucagucc

SEQ ID NO: 782296 - RNA, 26 nt, Human
aagugauccucccgccucaguccccc

SEQ ID NO: 782297 - RNA, 19 nt, Human
acagccagcuucuccccaa

SEQ ID NO: 782298 - RNA, 21 nt, Human
accugaauccucuccuucagc

SEQ ID NO: 782299 - RNA, 21 nt, Human
accugggaccacaggcacacg

SEQ ID NO: 782300 - RNA, 24 nt, Human
acucaagcaguccaucugccucag

SEQ ID NO: 782301 - RNA, 23 nt, Human
agaacaguaugaaguguuaacgc

SEQ ID NO: 782302 - RNA, 23 nt, Human
agccggcccugcgggguagccuc

SEQ ID NO: 782303 - RNA, 23 nt, Human
agcuccuccuggugcgcuucccg

SEQ ID NO: 782304 - RNA, 19 nt, Human
agcuuccggaccugagccu

SEQ ID NO: 782305 - RNA, 20 nt, Human
agggcucuccuggggcagcc

SEQ ID NO: 782306 - RNA, 21 nt, Human
agguucaagugauccucccgc

SEQ ID NO: 782307 - RNA, 24 nt, Human
augggguuucaccauauuggccag

SEQ ID NO: 782308 - RNA, 24 nt, Human
caaagugaugggauuacaggcgug

SEQ ID NO: 782309 - RNA, 24 nt, Human
caaauuccuggacucaagcagucc

SEQ ID NO: 782310 - RNA, 27 nt, Human
caagugauccucccgccucaguccccc

SEQ ID NO: 782311 - RNA, 22 nt, Human
cacaggcacacgccaccaugcc

SEQ ID NO: 782312 - RNA, 21 nt, Human
caccauauuggccaggcuggu

SEQ ID NO: 782313 - RNA, 24 nt, Human
caccauauuggccaggcuggucuc

SEQ ID NO: 782314 - RNA, 24 nt, Human
caccaugccuggcuaauuuuugua

SEQ ID NO: 782315 - RNA, 20 nt, Human
caccgucggcuuuggagccc

SEQ ID NO: 782316 - RNA, 20 nt, Human
cacucgcagccgcugcaccu

SEQ ID NO: 782317 - RNA, 18 nt, Human
cacugcaaccucugccuc

SEQ ID NO: 782318 - RNA, 21 nt, Human
cacugcaaccucugccuccua

SEQ ID NO: 782319 - RNA, 18 nt, Human
cagaagccaucgcuaaaa

SEQ ID NO: 782320 - RNA, 22 nt, Human
cagccagcuucuccccaaguuu

SEQ ID NO: 782321 - RNA, 23 nt, Human
cagccucuuuugcagcuccaggg

SEQ ID NO: 782322 - RNA, 24 nt, Human
cagccuugagcuccagcauuuccc

SEQ ID NO: 782323 - RNA, 18 nt, Human
cagcuccucggccuugcg

SEQ ID NO: 782324 - RNA, 22 nt, Human
cagcucucucuccuucgucucc

SEQ ID NO: 782325 - RNA, 24 nt, Human
cauauuggccaggcuggucucaaa

SEQ ID NO: 782326 - RNA, 22 nt, Human
ccaaagugaugggauuacaggc

SEQ ID NO: 782327 - RNA, 24 nt, Human
ccaaagugaugggauuacaggcgu

SEQ ID NO: 782328 - RNA, 23 nt, Human
ccagcauuucccuggagagcgug

SEQ ID NO: 782329 - RNA, 19 nt, Human
ccaggcugguuggaaugca

SEQ ID NO: 782330 - RNA, 26 nt, Human
ccagggccuggaugcgcuguagaagg

SEQ ID NO: 782331 - RNA, 23 nt, Human
ccgggcccuggccuggcuccgac

SEQ ID NO: 782332 - RNA, 22 nt, Human
ccuagguucaagugauccuccc

SEQ ID NO: 782333 - RNA, 24 nt, Human
ccucccgccucagucccccaagua

SEQ ID NO: 782334 - RNA, 24 nt, Human
ccuccuagguucaagugauccucc

SEQ ID NO: 782335 - RNA, 21 nt, Human
ccucucguagucagccuugag

SEQ ID NO: 782336 - RNA, 18 nt, Human
ccugcagcuccucggccu

SEQ ID NO: 782337 - RNA, 18 nt, Human
ccugcaggagccuggccu

SEQ ID NO: 782338 - RNA, 22 nt, Human
ccuggaccuggaaguucuugcc

SEQ ID NO: 782339 - RNA, 20 nt, Human
cgcuaaaacgcgcccagcac

SEQ ID NO: 782340 - RNA, 25 nt, Human
cggcccugcgggguagccucguggc

SEQ ID NO: 782341 - RNA, 24 nt, Human
cggccucugugcuccaggucuccu

SEQ ID NO: 782342 - RNA, 24 nt, Human
cucacugcaaccucugccuccuag

SEQ ID NO: 782343 - RNA, 21 nt, Human
cuccaugcuggccucagccuc

SEQ ID NO: 782344 - RNA, 24 nt, Human
cucccgccucagucccccaaguac

SEQ ID NO: 782345 - RNA, 22 nt, Human
cucugucacccaggcugguugg

SEQ ID NO: 782346 - RNA, 19 nt, Human
cugcaaccucugccuccua

SEQ ID NO: 782347 - RNA, 23 nt, Human
cugcaaccucugccuccuagguu

SEQ ID NO: 782348 - RNA, 24 nt, Human
cugcaaccucugccuccuagguuc

SEQ ID NO: 782349 - RNA, 21 nt, Human
cugcagggcugacuccuggac

SEQ ID NO: 782350 - RNA, 20 nt, Human
cugccaccgcauucuggagc

SEQ ID NO: 782351 - RNA, 18 nt, Human
cugcgcagcccuguuccu

SEQ ID NO: 782352 - RNA, 21 nt, Human
cuggcuccgacuugguuucag

SEQ ID NO: 782353 - RNA, 23 nt, Human
gacucaagcaguccaucugccuc

SEQ ID NO: 782354 - RNA, 20 nt, Human
gagacagggucucccucugu

SEQ ID NO: 782355 - RNA, 21 nt, Human
gagacagggucucccucuguc

SEQ ID NO: 782356 - RNA, 23 nt, Human
gagaugggguuucaccauauugg

SEQ ID NO: 782357 - RNA, 24 nt, Human
gagaugggguuucaccauauuggc

SEQ ID NO: 782358 - RNA, 23 nt, Human
gagguccgacuccuucuccugcc

SEQ ID NO: 782359 - RNA, 18 nt, Human
gauuacaggcgugagcug

SEQ ID NO: 782360 - RNA, 21 nt, Human
gauuacaggcgugagcugcug

SEQ ID NO: 782361 - RNA, 24 nt, Human
gauuacaggcgugagcugcugugc

SEQ ID NO: 782362 - RNA, 18 nt, Human
gcaguccaucugccucag

SEQ ID NO: 782363 - RNA, 24 nt, Human
gcaguccaucugccucagccuccc

SEQ ID NO: 782364 - RNA, 18 nt, Human
gccacugccacagggccu

SEQ ID NO: 782365 - RNA, 21 nt, Human
gccaggcuggucucaaauucc

SEQ ID NO: 782366 - RNA, 20 nt, Human
gccgcugcaccucuagcagg

SEQ ID NO: 782367 - RNA, 23 nt, Human
gccucagucccccaaguaccugg

SEQ ID NO: 782368 - RNA, 21 nt, Human
gcucacugcaaccucugccuc

SEQ ID NO: 782369 - RNA, 23 nt, Human
gcuggccucagccucauccuggc

SEQ ID NO: 782370 - RNA, 21 nt, Human
ggagcuccuccuggugcgcuu

SEQ ID NO: 782371 - RNA, 18 nt, Human
gggguuucaccauauugg

SEQ ID NO: 782372 - RNA, 22 nt, Human
gggguuucaccauauuggccag

SEQ ID NO: 782373 - RNA, 19 nt, Human
guagagaugggguuucacc

SEQ ID NO: 782374 - RNA, 21 nt, Human
guagagaugggguuucaccau

SEQ ID NO: 782375 - RNA, 23 nt, Human
gugcuccaggucuccuuccagcu

SEQ ID NO: 782376 - RNA, 23 nt, Human
gugcuggagccuccucucguagu

SEQ ID NO: 782377 - RNA, 24 nt, Human
uaauuuuuguauauuuuguagaga

SEQ ID NO: 782378 - RNA, 24 nt, Human
uagguucaagugauccucccgccu

SEQ ID NO: 782379 - RNA, 24 nt, Human
uauuuuguagagaugggguuucac

SEQ ID NO: 782380 - RNA, 26 nt, Human
ucaacucugaauucuccugucgagcc

SEQ ID NO: 782381 - RNA, 19 nt, Human
ucaagugauccucccgccu

SEQ ID NO: 782382 - RNA, 19 nt, Human
ucacugcaaccucugccuc

SEQ ID NO: 782383 - RNA, 24 nt, Human
ucacugcaaccucugccuccuagg

SEQ ID NO: 782384 - RNA, 25 nt, Human
ucacugcaaccucugccuccuaggu

SEQ ID NO: 782385 - RNA, 27 nt, Human
ucacugcaaccucugccuccuagguuc

SEQ ID NO: 782386 - RNA, 24 nt, Human
ucagccucuuuugcagcuccaggg

SEQ ID NO: 782387 - RNA, 21 nt, Human
uccauucuccagccggcgcca

SEQ ID NO: 782388 - RNA, 24 nt, Human
ucccaaagugaugggauuacaggc

SEQ ID NO: 782389 - RNA, 20 nt, Human
ucccucugucacccaggcug

SEQ ID NO: 782390 - RNA, 18 nt, Human
ucccuggagagcgugagg

SEQ ID NO: 782391 - RNA, 21 nt, Human
uccuagguucaagugauccuc

SEQ ID NO: 782392 - RNA, 24 nt, Human
uccuagguucaagugauccucccg

SEQ ID NO: 782393 - RNA, 19 nt, Human
uccuggacucaagcagucc

SEQ ID NO: 782394 - RNA, 24 nt, Human
uccuucagcuucugggcguacuuc

SEQ ID NO: 782395 - RNA, 24 nt, Human
ucucaaauuccuggacucaagcag

SEQ ID NO: 782396 - RNA, 23 nt, Human
ucucccucugucacccaggcugg

SEQ ID NO: 782397 - RNA, 26 nt, Human
ucucccucugucacccaggcugguug

SEQ ID NO: 782398 - RNA, 19 nt, Human
ucuccgggcccuggccugg

SEQ ID NO: 782399 - RNA, 22 nt, Human
ucuccgggcccuggccuggcuc

SEQ ID NO: 782400 - RNA, 21 nt, Human
ucugucacccaggcugguugg

SEQ ID NO: 782401 - RNA, 28 nt, Human
ucugucacccaggcugguuggaaugcag

SEQ ID NO: 782402 - RNA, 21 nt, Human
ucuugcggccucugugcucca

SEQ ID NO: 782403 - RNA, 24 nt, Human
ucuugcggccucugugcuccaggu

SEQ ID NO: 782404 - RNA, 19 nt, Human
ucuuuugcagcuccagggc

SEQ ID NO: 782405 - RNA, 20 nt, Human
ugagccugcagggcugacuc

SEQ ID NO: 782406 - RNA, 23 nt, Human
ugagcuccagcauuucccuggag

SEQ ID NO: 782407 - RNA, 18 nt, Human
ugcagcuccagggcgcuc

SEQ ID NO: 782408 - RNA, 24 nt, Human
ugcagcuccagggcgcucuccagg

SEQ ID NO: 782409 - RNA, 24 nt, Human
ugccucagccucccaaagugaugg

SEQ ID NO: 782410 - RNA, 20 nt, Human
ugccuccacccucagcucuc

SEQ ID NO: 782411 - RNA, 24 nt, Human
ugccuccuagguucaagugauccu

SEQ ID NO: 782412 - RNA, 18 nt, Human
ugcucugccuccacccuc

SEQ ID NO: 782413 - RNA, 22 nt, Human
uggaaugcaggaguucgaacuu

SEQ ID NO: 782414 - RNA, 19 nt, Human
uggagcccuggcaagugcc

SEQ ID NO: 782415 - RNA, 20 nt, Human
uggcaagugccgggcggguu

SEQ ID NO: 782416 - RNA, 24 nt, Human
uggccaggcuggucucaaauuccu

SEQ ID NO: 782417 - RNA, 21 nt, Human
ugggaccacaggcacacgcca

SEQ ID NO: 782418 - RNA, 24 nt, Human
ugggaccacaggcacacgccacca

SEQ ID NO: 782419 - RNA, 18 nt, Human
ugggauuacaggcgugag

SEQ ID NO: 782420 - RNA, 19 nt, Human
ugggauuacaggcgugagc

SEQ ID NO: 782421 - RNA, 19 nt, Human
ugggauuacaggcgugagc

SEQ ID NO: 782422 - RNA, 19 nt, Human
ugggauuacaggcgugagc

SEQ ID NO: 782423 - RNA, 20 nt, Human
ugggauuacaggcgugagcu

SEQ ID NO: 782424 - RNA, 22 nt, Human
ugggauuacaggcgugagcugc

SEQ ID NO: 782425 - RNA, 22 nt, Human
ugggauuacaggcgugagcugc

SEQ ID NO: 782426 - RNA, 24 nt, Human
ugggauuacaggcgugagcugcug

SEQ ID NO: 782427 - RNA, 24 nt, Human
ugggguuucaccauauuggccagg

SEQ ID NO: 782428 - RNA, 22 nt, Human
uguagagaugggguuucaccau

SEQ ID NO: 782429 - RNA, 23 nt, Human
uuaacgccaaaauuuguuuuagc

SEQ ID NO: 782430 - RNA, 19 nt, Human
uuaguucauuccuucaauc

SEQ ID NO: 782431 - RNA, 23 nt, Human
uucaagugauccucccgccucag

SEQ ID NO: 782432 - RNA, 24 nt, Human
uucaagugauccucccgccucagu

SEQ ID NO: 782433 - RNA, 18 nt, Human
uucagggcauaaaucacc

SEQ ID NO: 782434 - RNA, 22 nt, Human
uuccagcuuccggaccugagcc

SEQ ID NO: 782435 - RNA, 18 nt, Human
uucccuggagagcgugag

SEQ ID NO: 782436 - RNA, 21 nt, Human
uugguguuaguucauuccuuc

SEQ ID NO: 782437 - RNA, 23 nt, Human
uuguagagaugggguuucaccau

SEQ ID NO: 782438 - RNA, 24 nt, Human
uuguagagaugggguuucaccaua

SEQ ID NO: 782439 - RNA, 22 nt, Human
uuuaccugaauccucuccuuca

SEQ ID NO: 782440 - RNA, 24 nt, Human
uuucaccauauuggccaggcuggu

SEQ ID NO: 782441 - RNA, 24 nt, Human
uuuguagagaugggguuucaccau

SEQ ID NO: 782442 - RNA, 23 nt, Human
aaaaaaaaaaacccaaccaccaa

SEQ ID NO: 782443 - RNA, 24 nt, Human
aaaaaaaaaaacccaaccaccaaa

SEQ ID NO: 782444 - RNA, 23 nt, Human
aaaaaaaaaacccaaccaccaaa

SEQ ID NO: 782445 - RNA, 26 nt, Human
aaaaaacccaaccaccaaaacaaccc

SEQ ID NO: 782446 - RNA, 23 nt, Human
aaaaacccaaccaccaaaacaac

SEQ ID NO: 782447 - RNA, 19 nt, Human
aaaagguccccccgccccc

SEQ ID NO: 782448 - RNA, 23 nt, Human
aaacccaaccaccaaaacaaccc

SEQ ID NO: 782449 - RNA, 24 nt, Human
aaagugcugggauuauaggcauga

SEQ ID NO: 782450 - RNA, 26 nt, Human
aagaagagucagguccauuugggaaa

SEQ ID NO: 782451 - RNA, 19 nt, Human
aagguccccccgcccccca

SEQ ID NO: 782452 - RNA, 21 nt, Human
aagguccccccgccccccacc

SEQ ID NO: 782453 - RNA, 19 nt, Human
aagugcugggauuauaggc

SEQ ID NO: 782454 - RNA, 21 nt, Human
aagugcugggauuauaggcau

SEQ ID NO: 782455 - RNA, 18 nt, Human
acaccaaagccuggguag

SEQ ID NO: 782456 - RNA, 18 nt, Human
acagcucuuaggucgccc

SEQ ID NO: 782457 - RNA, 21 nt, Human
acccagccuuucagaaaggcc

SEQ ID NO: 782458 - RNA, 18 nt, Human
accugccugccuuggccu

SEQ ID NO: 782459 - RNA, 19 nt, Human
acggggucaaaguuguggc

SEQ ID NO: 782460 - RNA, 18 nt, Human
acugcaaccuucuccucc

SEQ ID NO: 782461 - RNA, 22 nt, Human
agauacauauauuccugagccc

SEQ ID NO: 782462 - RNA, 20 nt, Human
aggcacgcaccacgaugccc

SEQ ID NO: 782463 - RNA, 23 nt, Human
aggcagucaagaagagucagguc

SEQ ID NO: 782464 - RNA, 20 nt, Human
aggcaugagccauugcgccc

SEQ ID NO: 782465 - RNA, 25 nt, Human
aggcuggagugcaguggcaugaucu

SEQ ID NO: 782466 - RNA, 24 nt, Human
agguaguugggauuacaggcacgc

SEQ ID NO: 782467 - RNA, 19 nt, Human
agguccccccgccccccac

SEQ ID NO: 782468 - RNA, 21 nt, Human
agucaagaagagucaggucca

SEQ ID NO: 782469 - RNA, 20 nt, Human
agugcaguggcaugaucucg

SEQ ID NO: 782470 - RNA, 23 nt, Human
agugcaguggcaugaucucggcu

SEQ ID NO: 782471 - RNA, 24 nt, Human
agugcaguggcaugaucucggcuc

SEQ ID NO: 782472 - RNA, 24 nt, Human
aguggcaugaucucggcucacugc

SEQ ID NO: 782473 - RNA, 23 nt, Human
augggguuuugccauguuggcca

SEQ ID NO: 782474 - RNA, 24 nt, Human
augggguuuugccauguuggccag

SEQ ID NO: 782475 - RNA, 23 nt, Human
caaagugcugggauuauaggcau

SEQ ID NO: 782476 - RNA, 24 nt, Human
caaagugcugggauuauaggcaug

SEQ ID NO: 782477 - RNA, 18 nt, Human
caaccaccaaaacaaccc

SEQ ID NO: 782478 - RNA, 18 nt, Human
caaccuucuccuccccag

SEQ ID NO: 782479 - RNA, 22 nt, Human
caagcgauucuucugccucagc

SEQ ID NO: 782480 - RNA, 22 nt, Human
cacacggcucaugacgccgccc

SEQ ID NO: 782481 - RNA, 22 nt, Human
caccacuccucuuagcuccauu

SEQ ID NO: 782482 - RNA, 24 nt, Human
cacccacacacacccagccagagu

SEQ ID NO: 782483 - RNA, 20 nt, Human
caccgugacaaccugggacc

SEQ ID NO: 782484 - RNA, 22 nt, Human
caccgugacaaccugggaccca

SEQ ID NO: 782485 - RNA, 27 nt, Human
caccugccugccuuggccucucaaagu

SEQ ID NO: 782486 - RNA, 22 nt, Human
caccugguaguggcccugaggc

SEQ ID NO: 782487 - RNA, 21 nt, Human
cacuaggaggccucacucccu

SEQ ID NO: 782488 - RNA, 25 nt, Human
caggacagcucuuaggucgcccuga

SEQ ID NO: 782489 - RNA, 24 nt, Human
cauguuggccaggcugaucuugaa

SEQ ID NO: 782490 - RNA, 22 nt, Human
cauucaggcaucccccuagucc

SEQ ID NO: 782491 - RNA, 27 nt, Human
ccaaccaccaaaacaacccauuugcau

SEQ ID NO: 782492 - RNA, 28 nt, Human
ccacacccucccugcuucugguccagaa

SEQ ID NO: 782493 - RNA, 22 nt, Human
ccagguaguugggauuacaggc

SEQ ID NO: 782494 - RNA, 23 nt, Human
ccagguaguugggauuacaggca

SEQ ID NO: 782495 - RNA, 19 nt, Human
ccauguuggccaggcugau

SEQ ID NO: 782496 - RNA, 23 nt, Human
cccacccacacacacccagccag

SEQ ID NO: 782497 - RNA, 23 nt, Human
ccccacuguccccgcugcaggac

SEQ ID NO: 782498 - RNA, 25 nt, Human
ccccccgccccccaccguguacagg

SEQ ID NO: 782499 - RNA, 21 nt, Human
cccccuaguccccacccacac

SEQ ID NO: 782500 - RNA, 23 nt, Human
ccccgcugucccugcugucccca

SEQ ID NO: 782501 - RNA, 25 nt, Human
ccccugccaggcaguauggccccuc

SEQ ID NO: 782502 - RNA, 19 nt, Human
cccgccccccaccguguac

SEQ ID NO: 782503 - RNA, 19 nt, Human
cccggcuaaguuuuucuug

SEQ ID NO: 782504 - RNA, 18 nt, Human
cccuaaagguugagaacc

SEQ ID NO: 782505 - RNA, 24 nt, Human
cccucccugcuucugguccagaaa

SEQ ID NO: 782506 - RNA, 23 nt, Human
cccugaacccgaggcaccggcuc

SEQ ID NO: 782507 - RNA, 23 nt, Human
cccugcuguccccacuguccccg

SEQ ID NO: 782508 - RNA, 19 nt, Human
cccuggaaugagaugggaa

SEQ ID NO: 782509 - RNA, 24 nt, Human
ccgcaaaagguccccccgcccccc

SEQ ID NO: 782510 - RNA, 24 nt, Human
ccuccccaguucaagcgauucuuc

SEQ ID NO: 782511 - RNA, 21 nt, Human
ccugaccucaggugauccacc

SEQ ID NO: 782512 - RNA, 23 nt, Human
ccugaccucaggugauccaccug

SEQ ID NO: 782513 - RNA, 23 nt, Human
ccugaccucaggugauccaccug

SEQ ID NO: 782514 - RNA, 20 nt, Human
ccugagcccacacacaaacu

SEQ ID NO: 782515 - RNA, 21 nt, Human
ccugaggcuugcucugagaac

SEQ ID NO: 782516 - RNA, 19 nt, Human
ccugccuccccgcuguccc

SEQ ID NO: 782517 - RNA, 22 nt, Human
ccugccuuggccucucaaagug

SEQ ID NO: 782518 - RNA, 24 nt, Human
ccuuccagguaguugggauuacag

SEQ ID NO: 782519 - RNA, 19 nt, Human
ccuucuccacacccucccu

SEQ ID NO: 782520 - RNA, 24 nt, Human
cgcaagcugccucucuggcugcac

SEQ ID NO: 782521 - RNA, 19 nt, Human
cgcuggugagagcugaggg

SEQ ID NO: 782522 - RNA, 19 nt, Human
cguguacaggcagugcaca

SEQ ID NO: 782523 - RNA, 24 nt, Human
cucacugcaaccuucuccucccca

SEQ ID NO: 782524 - RNA, 20 nt, Human
cucccuagccuccacucuag

SEQ ID NO: 782525 - RNA, 22 nt, Human
cucccugaacccgaggcaccgg

SEQ ID NO: 782526 - RNA, 24 nt, Human
cuccgccuccuccccucacagucc

SEQ ID NO: 782527 - RNA, 25 nt, Human
cucuagggcaagggcccagccuuuc

SEQ ID NO: 782528 - RNA, 20 nt, Human
cucucuggcugcacacggcu

SEQ ID NO: 782529 - RNA, 21 nt, Human
cugccucagccuuccagguag

SEQ ID NO: 782530 - RNA, 18 nt, Human
cugccuccccgcuguccc

SEQ ID NO: 782531 - RNA, 23 nt, Human
cuggggcuguccucccaggcggc

SEQ ID NO: 782532 - RNA, 22 nt, Human
cugguaguggcccugaggcuug

SEQ ID NO: 782533 - RNA, 23 nt, Human
cuguccccgcugcaggacagcuc

SEQ ID NO: 782534 - RNA, 24 nt, Human
cuguccccgcugcaggacagcucu

SEQ ID NO: 782535 - RNA, 24 nt, Human
cuuggccucucaaagugcugggau

SEQ ID NO: 782536 - RNA, 26 nt, Human
gaccucaggugauccaccugccugcc

SEQ ID NO: 782537 - RNA, 20 nt, Human
gagugcaguggcaugaucuc

SEQ ID NO: 782538 - RNA, 18 nt, Human
gaugggacgaacgagggg

SEQ ID NO: 782539 - RNA, 22 nt, Human
gauuauaggcaugagccauugc

SEQ ID NO: 782540 - RNA, 22 nt, Human
gauuauaggcaugagccauugc

SEQ ID NO: 782541 - RNA, 19 nt, Human
gauucuucugccucagccu

SEQ ID NO: 782542 - RNA, 23 nt, Human
gcaaaagguccccccgcccccca

SEQ ID NO: 782543 - RNA, 20 nt, Human
gcaccacgaugcccggcuaa

SEQ ID NO: 782544 - RNA, 19 nt, Human
gcagcgugucugggaagcc

SEQ ID NO: 782545 - RNA, 19 nt, Human
gcaucacugucccuucugg

SEQ ID NO: 782546 - RNA, 21 nt, Human
gcaucccccuaguccccaccc

SEQ ID NO: 782547 - RNA, 24 nt, Human
gccauguuggccaggcugaucuug

SEQ ID NO: 782548 - RNA, 20 nt, Human
gcccaucaccacuccucuua

SEQ ID NO: 782549 - RNA, 22 nt, Human
gccuuggccucucaaagugcug

SEQ ID NO: 782550 - RNA, 24 nt, Human
gcgauucuucugccucagccuucc

SEQ ID NO: 782551 - RNA, 21 nt, Human
gcggcucccagguccucaucc

SEQ ID NO: 782552 - RNA, 20 nt, Human
gcucacugcaaccuucuccu

SEQ ID NO: 782553 - RNA, 22 nt, Human
gcucccguuccucccuagccuc

SEQ ID NO: 782554 - RNA, 23 nt, Human
gcugaucuugaacuccugaccuc

SEQ ID NO: 782555 - RNA, 19 nt, Human
gcuggagugcaguggcaug

SEQ ID NO: 782556 - RNA, 20 nt, Human
ggaagccacauccgucuaca

SEQ ID NO: 782557 - RNA, 24 nt, Human
ggcugaucuugaacuccugaccuc

SEQ ID NO: 782558 - RNA, 19 nt, Human
gggaacguguagggcagga

SEQ ID NO: 782559 - RNA, 18 nt, Human
gggcaagggcccagccuu

SEQ ID NO: 782560 - RNA, 18 nt, Human
gggcaggacaggcuccuc

SEQ ID NO: 782561 - RNA, 22 nt, Human
gggguuuugccauguuggccag

SEQ ID NO: 782562 - RNA, 23 nt, Human
gggguuuugccauguuggccagg

SEQ ID NO: 782563 - RNA, 22 nt, Human
ggguuuugccauguuggccagg

SEQ ID NO: 782564 - RNA, 23 nt, Human
guacagaugggguuuugccaugu

SEQ ID NO: 782565 - RNA, 18 nt, Human
guaguugggauuacaggc

SEQ ID NO: 782566 - RNA, 19 nt, Human
guauuuuuaguacagaugg

SEQ ID NO: 782567 - RNA, 24 nt, Human
guccaggcuggagugcaguggcau

SEQ ID NO: 782568 - RNA, 21 nt, Human
gugagcagugucguaaacuug

SEQ ID NO: 782569 - RNA, 26 nt, Human
gugauccaccugccugccuuggccuc

SEQ ID NO: 782570 - RNA, 18 nt, Human
guggcccugaggcuugcu

SEQ ID NO: 782571 - RNA, 18 nt, Human
guuguccaggcuggagug

SEQ ID NO: 782572 - RNA, 19 nt, Human
uaaacagaaaacccacaca

SEQ ID NO: 782573 - RNA, 24 nt, Human
uaaacagaaaacccacacauuuuu

SEQ ID NO: 782574 - RNA, 26 nt, Human
uaaguaaacaauauaaugcgaaauaa

SEQ ID NO: 782575 - RNA, 24 nt, Human
uaauccaaggagcuuguuagauac

SEQ ID NO: 782576 - RNA, 22 nt, Human
uacagaugggguuuugccaugu

SEQ ID NO: 782577 - RNA, 21 nt, Human
uagaacuuggaggggcgaggg

SEQ ID NO: 782578 - RNA, 18 nt, Human
uaggaggaaguuuucccu

SEQ ID NO: 782579 - RNA, 25 nt, Human
uagggcaagggcccagccuuucacu

SEQ ID NO: 782580 - RNA, 22 nt, Human
uagggcaggacaggcuccucuu

SEQ ID NO: 782581 - RNA, 24 nt, Human
uaguacagaugggguuuugccaug

SEQ ID NO: 782582 - RNA, 24 nt, Human
uagucugaggagcuugcuagauac

SEQ ID NO: 782583 - RNA, 23 nt, Human
uauuccugaacccccacacucaa

SEQ ID NO: 782584 - RNA, 22 nt, Human
uauuccugagcccacacacaaa

SEQ ID NO: 782585 - RNA, 24 nt, Human
ucaaagugcugggauuauaggcau

SEQ ID NO: 782586 - RNA, 18 nt, Human
ucacugcaaccuucuccu

SEQ ID NO: 782587 - RNA, 19 nt, Human
ucacugcaaccuucuccuc

SEQ ID NO: 782588 - RNA, 24 nt, Human
ucagccgcaaaagguccccccgcc

SEQ ID NO: 782589 - RNA, 23 nt, Human
ucagucccgcuccgaggagcacc

SEQ ID NO: 782590 - RNA, 26 nt, Human
uccacacccucccugcuucuggucca

SEQ ID NO: 782591 - RNA, 23 nt, Human
uccagguaguugggauuacaggc

SEQ ID NO: 782592 - RNA, 24 nt, Human
uccagguaguugggauuacaggca

SEQ ID NO: 782593 - RNA, 20 nt, Human
uccaucuuguuaccaucagc

SEQ ID NO: 782594 - RNA, 30 nt, Human
ucccagguccucauccagggaagagccccu

SEQ ID NO: 782595 - RNA, 20 nt, Human
uccccacuguccccgcugca

SEQ ID NO: 782596 - RNA, 20 nt, Human
uccccaguucaagcgauucu

SEQ ID NO: 782597 - RNA, 24 nt, Human
uccccaguucaagcgauucuucug

SEQ ID NO: 782598 - RNA, 23 nt, Human
uccccgcugcaggacagcucuua

SEQ ID NO: 782599 - RNA, 25 nt, Human
uccccgcugucccugcuguccccac

SEQ ID NO: 782600 - RNA, 23 nt, Human
ucccguuccucccuagccuccac

SEQ ID NO: 782601 - RNA, 20 nt, Human
ucccuaaagguugagaaccc

SEQ ID NO: 782602 - RNA, 25 nt, Human
ucccuaaagguugagaaccccugcc

SEQ ID NO: 782603 - RNA, 19 nt, Human
ucccugcuguccccacugu

SEQ ID NO: 782604 - RNA, 23 nt, Human
ucccugcuguccccacugucccc

SEQ ID NO: 782605 - RNA, 23 nt, Human
ucccuuucuggggcuguccuccc

SEQ ID NO: 782606 - RNA, 23 nt, Human
uccgcaccgugacaaccugggac

SEQ ID NO: 782607 - RNA, 23 nt, Human
uccgccuccuccccucacagucc

SEQ ID NO: 782608 - RNA, 19 nt, Human
ucuacagcucccguuccuc

SEQ ID NO: 782609 - RNA, 22 nt, Human
ucuaccauucugggagcaucuu

SEQ ID NO: 782610 - RNA, 24 nt, Human
ucucaaagugcugggauuauaggc

SEQ ID NO: 782611 - RNA, 18 nt, Human
ucuccuccccaguucaag

SEQ ID NO: 782612 - RNA, 24 nt, Human
ucuguuguccaggcuggagugcag

SEQ ID NO: 782613 - RNA, 23 nt, Human
ucuugaacuccugaccucaggug

SEQ ID NO: 782614 - RNA, 23 nt, Human
ucuugcucuguuguccaggcugg

SEQ ID NO: 782615 - RNA, 24 nt, Human
ucuugcucuguuguccaggcugga

SEQ ID NO: 782616 - RNA, 18 nt, Human
ugaagaccccuagaacag

SEQ ID NO: 782617 - RNA, 24 nt, Human
ugaccucaggugauccaccugccu

SEQ ID NO: 782618 - RNA, 18 nt, Human
ugagaugggaacgggguc

SEQ ID NO: 782619 - RNA, 20 nt, Human
ugagaugggaacggggucaa

SEQ ID NO: 782620 - RNA, 24 nt, Human
ugccauguuggccaggcugaucuu

SEQ ID NO: 782621 - RNA, 27 nt, Human
ugccauguuggccaggcugaucuugaa

SEQ ID NO: 782622 - RNA, 22 nt, Human
uggacaguuccauggcuucuuc

SEQ ID NO: 782623 - RNA, 19 nt, Human
uggagugcaguggcaugau

SEQ ID NO: 782624 - RNA, 24 nt, Human
uggagugcaguggcaugaucucgg

SEQ ID NO: 782625 - RNA, 19 nt, Human
uggcaucacugucccuucu

SEQ ID NO: 782626 - RNA, 24 nt, Human
uggccaggcugaucuugaacuccu

SEQ ID NO: 782627 - RNA, 19 nt, Human
uggccuucuccacacccuc

SEQ ID NO: 782628 - RNA, 24 nt, Human
ugggagcaucuuugagaauuugau

SEQ ID NO: 782629 - RNA, 21 nt, Human
ugggauuacaggcacgcacca

SEQ ID NO: 782630 - RNA, 26 nt, Human
ugggauuacaggcacgcaccacgaug

SEQ ID NO: 782631 - RNA, 18 nt, Human
ugggauuauaggcaugag

SEQ ID NO: 782632 - RNA, 19 nt, Human
ugggauuauaggcaugagc

SEQ ID NO: 782633 - RNA, 21 nt, Human
ugggauuauaggcaugagcca

SEQ ID NO: 782634 - RNA, 21 nt, Human
ugggauuauaggcaugagcca

SEQ ID NO: 782635 - RNA, 21 nt, Human
ugggauuauaggcaugagcca

SEQ ID NO: 782636 - RNA, 22 nt, Human
ugggauuauaggcaugagccau

SEQ ID NO: 782637 - RNA, 24 nt, Human
ugggauuauaggcaugagccauug

SEQ ID NO: 782638 - RNA, 31 nt, Human
ugggauuauaggcaugagccauugcgcccgg

SEQ ID NO: 782639 - RNA, 22 nt, Human
uggggcuguccucccaggcggc

SEQ ID NO: 782640 - RNA, 24 nt, Human
ugggguuuugccauguuggccagg

SEQ ID NO: 782641 - RNA, 20 nt, Human
uguccaggcuggagugcagu

SEQ ID NO: 782642 - RNA, 21 nt, Human
uguccaggcuggagugcagug

SEQ ID NO: 782643 - RNA, 22 nt, Human
uguccaggcuggagugcagugg

SEQ ID NO: 782644 - RNA, 24 nt, Human
uguccaggcuggagugcaguggca

SEQ ID NO: 782645 - RNA, 19 nt, Human
ugucccuucuggaagagca

SEQ ID NO: 782646 - RNA, 20 nt, Human
ugucugggaagccacauccg

SEQ ID NO: 782647 - RNA, 22 nt, Human
uguguuucugugagggucgcug

SEQ ID NO: 782648 - RNA, 23 nt, Human
uuagauacauauuccugaacccc

SEQ ID NO: 782649 - RNA, 18 nt, Human
uuaguacagaugggguuu

SEQ ID NO: 782650 - RNA, 22 nt, Human
uuaguacagaugggguuuugcc

SEQ ID NO: 782651 - RNA, 24 nt, Human
uuaguacagaugggguuuugccau

SEQ ID NO: 782652 - RNA, 21 nt, Human
uuauccucggaaggccccuug

SEQ ID NO: 782653 - RNA, 23 nt, Human
uucaagcgauucuucugccucag

SEQ ID NO: 782654 - RNA, 24 nt, Human
uucaagcgauucuucugccucagc

SEQ ID NO: 782655 - RNA, 24 nt, Human
uugcucuguuguccaggcuggagu

SEQ ID NO: 782656 - RNA, 23 nt, Human
uuguauuuuuaguacagaugggg

SEQ ID NO: 782657 - RNA, 24 nt, Human
uuguccaggcuggagugcaguggc

SEQ ID NO: 782658 - RNA, 19 nt, Human
uuucugugagggucgcugg

SEQ ID NO: 782659 - RNA, 18 nt, Human
uuugagaaggagucuugc

SEQ ID NO: 782660 - RNA, 23 nt, Human
uuuuccugccuccccgcuguccc

SEQ ID NO: 782661 - RNA, 21 nt, Human
uuuuuaguacagaugggguuu

SEQ ID NO: 782662 - RNA, 24 nt, Human
uuuuuaguacagaugggguuuugc

SEQ ID NO: 782663 - RNA, 25 nt, Human
aaaaaacccagccaggcaugguggc

SEQ ID NO: 782664 - RNA, 23 nt, Human
aaaaaaucaaaauaggcuaggca

SEQ ID NO: 782665 - RNA, 22 nt, Human
aaaaaggaauuggccaaaaaga

SEQ ID NO: 782666 - RNA, 22 nt, Human
aaaacaaaaaaaccccuuuggg

SEQ ID NO: 782667 - RNA, 24 nt, Human
aaaacaaaaaaaccccuuugggug

SEQ ID NO: 782668 - RNA, 25 nt, Human
aaaacaaaacaaaacaaaaaaaccc

SEQ ID NO: 782669 - RNA, 23 nt, Human
aaaacagcauaaaaacuguacau

SEQ ID NO: 782670 - RNA, 22 nt, Human
aaaagaaaaaaaaaaggcaaaa

SEQ ID NO: 782671 - RNA, 27 nt, Human
aaaagaaaaaaaaaaggcaaaacaugg

SEQ ID NO: 782672 - RNA, 18 nt, Human
aaaagcaucaggauuuca

SEQ ID NO: 782673 - RNA, 24 nt, Human
aaaaggcaaaacauggcaguggga

SEQ ID NO: 782674 - RNA, 19 nt, Human
aaacaaaacaaaacaaaaa

SEQ ID NO: 782675 - RNA, 23 nt, Human
aaacaccagcggcacuuggaacu

SEQ ID NO: 782676 - RNA, 31 nt, Human
aaacaccagcggcacuuggaacuccagagcc

SEQ ID NO: 782677 - RNA, 18 nt, Human
aaaggaaguucgucccca

SEQ ID NO: 782678 - RNA, 20 nt, Human
aaagguccaggaggaagagu

SEQ ID NO: 782679 - RNA, 18 nt, Human
aaauagacucggaugugg

SEQ ID NO: 782680 - RNA, 20 nt, Human
aacaaaaaaaccccuuuggg

SEQ ID NO: 782681 - RNA, 21 nt, Human
aacaaaacaaaaaaaccccuu

SEQ ID NO: 782682 - RNA, 22 nt, Human
aacaaaacaaaaaaaccccuuu

SEQ ID NO: 782683 - RNA, 23 nt, Human
aacaaaacaaaaaaaccccuuug

SEQ ID NO: 782684 - RNA, 22 nt, Human
aacaaggaaaaaccaagcccug

SEQ ID NO: 782685 - RNA, 20 nt, Human
aacagcuggggccuggagac

SEQ ID NO: 782686 - RNA, 20 nt, Human
aacaguacaaaugacacaau

SEQ ID NO: 782687 - RNA, 24 nt, Human
aacucacuucguuucugucuucca

SEQ ID NO: 782688 - RNA, 25 nt, Human
aagcaagacccugucucaaaaacaa

SEQ ID NO: 782689 - RNA, 19 nt, Human
aagcagaauccucuccgug

SEQ ID NO: 782690 - RNA, 20 nt, Human
aagcagguuauacaaggggg

SEQ ID NO: 782691 - RNA, 22 nt, Human
aagccgggccagcugcugcugg

SEQ ID NO: 782692 - RNA, 18 nt, Human
aagcguagaagcuggcuu

SEQ ID NO: 782693 - RNA, 24 nt, Human
aauggcucaugccuaucaucucag

SEQ ID NO: 782694 - RNA, 20 nt, Human
acaaaacaaaacaaaaaaac

SEQ ID NO: 782695 - RNA, 23 nt, Human
acaaaacaaaacaaaaaaacccc

SEQ ID NO: 782696 - RNA, 24 nt, Human
acaaagcaagacccugucucaaaa

SEQ ID NO: 782697 - RNA, 22 nt, Human
acaaucggcaaaggucaauggc

SEQ ID NO: 782698 - RNA, 23 nt, Human
acagaaggcuacuuauuucuaca

SEQ ID NO: 782699 - RNA, 19 nt, Human
acagacagccaccacaagc

SEQ ID NO: 782700 - RNA, 25 nt, Human
acagagcaagaccuugacucuaaga

SEQ ID NO: 782701 - RNA, 21 nt, Human
acaggcuggguguccuggggc

SEQ ID NO: 782702 - RNA, 20 nt, Human
acauagcaagagacaagaag

SEQ ID NO: 782703 - RNA, 21 nt, Human
acauagcaagagacaagaagu

SEQ ID NO: 782704 - RNA, 24 nt, Human
accacgucacugcacuccagccug

SEQ ID NO: 782705 - RNA, 18 nt, Human
acccgcggcugcuccccg

SEQ ID NO: 782706 - RNA, 25 nt, Human
acccguauguccuucccucccccaa

SEQ ID NO: 782707 - RNA, 22 nt, Human
acccugucucaaaaacaaaaca

SEQ ID NO: 782708 - RNA, 23 nt, Human
accuccuccuccguguacuccag

SEQ ID NO: 782709 - RNA, 24 nt, Human
acgucacugcacuccagccugggc

SEQ ID NO: 782710 - RNA, 22 nt, Human
acuccagcuuggcccgcuccuc

SEQ ID NO: 782711 - RNA, 18 nt, Human
acugcacuccagccuggg

SEQ ID NO: 782712 - RNA, 23 nt, Human
acugcacuccagccugggcaaca

SEQ ID NO: 782713 - RNA, 18 nt, Human
acuggggcguguccaggg

SEQ ID NO: 782714 - RNA, 27 nt, Human
acuguucucuuggauccucaaucuggg

SEQ ID NO: 782715 - RNA, 19 nt, Human
acuucaaauggaaaucugu

SEQ ID NO: 782716 - RNA, 25 nt, Human
acuugacaucuuccgaucaaucucu

SEQ ID NO: 782717 - RNA, 23 nt, Human
agaaauauuuuucaaacaguaca

SEQ ID NO: 782718 - RNA, 20 nt, Human
agaacuuugggaggcugagg

SEQ ID NO: 782719 - RNA, 24 nt, Human
agaauccucuccguggcgcccuuc

SEQ ID NO: 782720 - RNA, 27 nt, Human
agacaagaagugugaaaagcaucagga

SEQ ID NO: 782721 - RNA, 23 nt, Human
agagagaaaagagugacaaaaaa

SEQ ID NO: 782722 - RNA, 22 nt, Human
agagcuccucauucagcugccu

SEQ ID NO: 782723 - RNA, 22 nt, Human
agcaucucgccccagagagucg

SEQ ID NO: 782724 - RNA, 18 nt, Human
agccaggcaugguggcuc

SEQ ID NO: 782725 - RNA, 20 nt, Human
agccaggcaugguggcucgc

SEQ ID NO: 782726 - RNA, 24 nt, Human
agccugggcaacagagcaagaccu

SEQ ID NO: 782727 - RNA, 19 nt, Human
agcggguggcuucuuccag

SEQ ID NO: 782728 - RNA, 20 nt, Human
agcugccucccugaacagcc

SEQ ID NO: 782729 - RNA, 19 nt, Human
agcugugccgugguucugg

SEQ ID NO: 782730 - RNA, 22 nt, Human
aggaagggcguguccaggggcg

SEQ ID NO: 782731 - RNA, 18 nt, Human
aggaauagugggacgacc

SEQ ID NO: 782732 - RNA, 18 nt, Human
aggcaaaauauuuauauc

SEQ ID NO: 782733 - RNA, 21 nt, Human
aggcacaauggcucaugccua

SEQ ID NO: 782734 - RNA, 18 nt, Human
aggcaggagggucacuug

SEQ ID NO: 782735 - RNA, 23 nt, Human
aggcaggagggucacuugagccc

SEQ ID NO: 782736 - RNA, 24 nt, Human
aggcaggagggucacuugagccca

SEQ ID NO: 782737 - RNA, 21 nt, Human
aggcugaggcaggagggucac

SEQ ID NO: 782738 - RNA, 24 nt, Human
aggcugaggcaggagggucacuug

SEQ ID NO: 782739 - RNA, 18 nt, Human
agggcgggguggggggag

SEQ ID NO: 782740 - RNA, 18 nt, Human
aggguucgucuuuccaaa

SEQ ID NO: 782741 - RNA, 23 nt, Human
aggugucaaaaaccaaaccagcc

SEQ ID NO: 782742 - RNA, 24 nt, Human
agguugaggcugcagugagcuaug

SEQ ID NO: 782743 - RNA, 20 nt, Human
aguccagggaggugcgggcc

SEQ ID NO: 782744 - RNA, 20 nt, Human
agugacaaaaaacaaagaga

SEQ ID NO: 782745 - RNA, 19 nt, Human
auaaagucugcaaacauac

SEQ ID NO: 782746 - RNA, 18 nt, Human
auagccgaggcgugugcc

SEQ ID NO: 782747 - RNA, 22 nt, Human
auauacaugguaaaugcacaua

SEQ ID NO: 782748 - RNA, 19 nt, Human
auccgacagacaugcggag

SEQ ID NO: 782749 - RNA, 24 nt, Human
augaaaauaaaacagguggauaaa

SEQ ID NO: 782750 - RNA, 20 nt, Human
augacgguagucaaguuugg

SEQ ID NO: 782751 - RNA, 19 nt, Human
auggagauggugugugcag

SEQ ID NO: 782752 - RNA, 19 nt, Human
augguaaaugcacauauga

SEQ ID NO: 782753 - RNA, 21 nt, Human
caaaacaaaaaaaccccuuug

SEQ ID NO: 782754 - RNA, 23 nt, Human
caaaacaaaacaaaaaaaccccu

SEQ ID NO: 782755 - RNA, 23 nt, Human
caaacaccccacugucgcuggcu

SEQ ID NO: 782756 - RNA, 25 nt, Human
caaagcaagacccugucucaaaaac

SEQ ID NO: 782757 - RNA, 22 nt, Human
caacaaagcaagacccugucuc

SEQ ID NO: 782758 - RNA, 18 nt, Human
caacagagcaagaccuug

SEQ ID NO: 782759 - RNA, 19 nt, Human
caacgcgcuggaaugcacg

SEQ ID NO: 782760 - RNA, 23 nt, Human
caagacccugucucaaaaacaaa

SEQ ID NO: 782761 - RNA, 21 nt, Human
caaggaaaaaaaaguacuaua

SEQ ID NO: 782762 - RNA, 19 nt, Human
caaugcacuccaucagacg

SEQ ID NO: 782763 - RNA, 21 nt, Human
caauggcucaugccuaucauc

SEQ ID NO: 782764 - RNA, 22 nt, Human
caauuagagagaaaagagugac

SEQ ID NO: 782765 - RNA, 21 nt, Human
cacaacaaggaaaaaccaagc

SEQ ID NO: 782766 - RNA, 23 nt, Human
cacaagcaagcaggcugaagccc

SEQ ID NO: 782767 - RNA, 20 nt, Human
cacacaggcuuuuuaacugg

SEQ ID NO: 782768 - RNA, 21 nt, Human
cacacaggcuuuuuaacuggg

SEQ ID NO: 782769 - RNA, 18 nt, Human
cacacaugcuuccgaguc

SEQ ID NO: 782770 - RNA, 23 nt, Human
cacacccagccucccgcguccuu

SEQ ID NO: 782771 - RNA, 21 nt, Human
cacacguauaacugaagugac

SEQ ID NO: 782772 - RNA, 21 nt, Human
cacaggcuggguguccugggg

SEQ ID NO: 782773 - RNA, 25 nt, Human
caccacaagcaagcaggcugaagcc

SEQ ID NO: 782774 - RNA, 18 nt, Human
cacccagccucccgcguc

SEQ ID NO: 782775 - RNA, 22 nt, Human
caccgccagccccgccggguuc

SEQ ID NO: 782776 - RNA, 21 nt, Human
cacggcuggaggcuagggacc

SEQ ID NO: 782777 - RNA, 21 nt, Human
cacugaacacacguauaacug

SEQ ID NO: 782778 - RNA, 19 nt, Human
cacugcacuccagccuggg

SEQ ID NO: 782779 - RNA, 20 nt, Human
cacugcacuccagccugggc

SEQ ID NO: 782780 - RNA, 21 nt, Human
cacugcacuccagccugggca

SEQ ID NO: 782781 - RNA, 22 nt, Human
cacugcacuccagccugggcaa

SEQ ID NO: 782782 - RNA, 23 nt, Human
cacugcacuccagccugggcaac

SEQ ID NO: 782783 - RNA, 24 nt, Human
cacugcacuccagccugggcaaca

SEQ ID NO: 782784 - RNA, 26 nt, Human
cacugcacuccagccugggcaacaaa

SEQ ID NO: 782785 - RNA, 18 nt, Human
cacuuggaugggcucuuu

SEQ ID NO: 782786 - RNA, 25 nt, Human
cagaacugcugggguacaccagcau

SEQ ID NO: 782787 - RNA, 18 nt, Human
cagaacuuugggaggcug

SEQ ID NO: 782788 - RNA, 24 nt, Human
cagaacuuugggaggcugaggcag

SEQ ID NO: 782789 - RNA, 21 nt, Human
cagcagggccuccuucuccuu

SEQ ID NO: 782790 - RNA, 20 nt, Human
cagcaucgccaggcacgccu

SEQ ID NO: 782791 - RNA, 25 nt, Human
cagccucggccgugcuuggccagga

SEQ ID NO: 782792 - RNA, 19 nt, Human
cagcgaggacagcgaggag

SEQ ID NO: 782793 - RNA, 20 nt, Human
cagcucucguuuuaaucugg

SEQ ID NO: 782794 - RNA, 21 nt, Human
cagcugcggagucacugaaca

SEQ ID NO: 782795 - RNA, 19 nt, Human
cagcugcugguauuccucc

SEQ ID NO: 782796 - RNA, 21 nt, Human
cagcugguagaucuccuugga

SEQ ID NO: 782797 - RNA, 20 nt, Human
cagggucccgggcggagcuc

SEQ ID NO: 782798 - RNA, 26 nt, Human
cagucuuaaaauacaucuuaaaguca

SEQ ID NO: 782799 - RNA, 20 nt, Human
cagugaauuugccugaacuc

SEQ ID NO: 782800 - RNA, 20 nt, Human
cauagccgaggcgugugccc

SEQ ID NO: 782801 - RNA, 25 nt, Human
caucaaagacaaacuccccgaugau

SEQ ID NO: 782802 - RNA, 26 nt, Human
caucaaagacaaacuccccgaugaua

SEQ ID NO: 782803 - RNA, 22 nt, Human
cauccgucuugccggagaugga

SEQ ID NO: 782804 - RNA, 25 nt, Human
caucuucguuccuuuugguuagagg

SEQ ID NO: 782805 - RNA, 19 nt, Human
caugccuaucaucucagaa

SEQ ID NO: 782806 - RNA, 19 nt, Human
caugcgcucuugcucucgc

SEQ ID NO: 782807 - RNA, 22 nt, Human
ccaaaaagaaaaaaaaaaggca

SEQ ID NO: 782808 - RNA, 21 nt, Human
ccaaguccagggaggugcggg

SEQ ID NO: 782809 - RNA, 24 nt, Human
ccacaagcaagcaggcugaagccc

SEQ ID NO: 782810 - RNA, 21 nt, Human
ccacagacagccaccacaagc

SEQ ID NO: 782811 - RNA, 23 nt, Human
ccaccacaagcaagcaggcugaa

SEQ ID NO: 782812 - RNA, 18 nt, Human
ccacuccgaacaaaaggc

SEQ ID NO: 782813 - RNA, 20 nt, Human
ccagagccuuggagcaguaa

SEQ ID NO: 782814 - RNA, 21 nt, Human
cccaaacaagcacuuucaaag

SEQ ID NO: 782815 - RNA, 24 nt, Human
cccaaacaagcacuuucaaaggug

SEQ ID NO: 782816 - RNA, 22 nt, Human
cccacggcuggaggcuagggac

SEQ ID NO: 782817 - RNA, 28 nt, Human
cccauagccgaggcgugugccggggucc

SEQ ID NO: 782818 - RNA, 19 nt, Human
ccccacagacagccaccac

SEQ ID NO: 782819 - RNA, 24 nt, Human
ccccagagagucgaagggaaugag

SEQ ID NO: 782820 - RNA, 24 nt, Human
ccccauagccgaggcgugugcccg

SEQ ID NO: 782821 - RNA, 21 nt, Human
ccccggcuggaggccagagac

SEQ ID NO: 782822 - RNA, 19 nt, Human
ccccguguggcugaagggc

SEQ ID NO: 782823 - RNA, 22 nt, Human
cccgccggguucuucagcugca

SEQ ID NO: 782824 - RNA, 24 nt, Human
cccgcuccuccuccagccgggcca

SEQ ID NO: 782825 - RNA, 19 nt, Human
cccuccucuccaaccucuu

SEQ ID NO: 782826 - RNA, 18 nt, Human
ccgcagcaggccacggag

SEQ ID NO: 782827 - RNA, 19 nt, Human
ccgccggguucuucagcug

SEQ ID NO: 782828 - RNA, 22 nt, Human
ccgucuugccggagauggagau

SEQ ID NO: 782829 - RNA, 18 nt, Human
ccguguacuccagcuugg

SEQ ID NO: 782830 - RNA, 19 nt, Human
ccguguacuccagcuuggc

SEQ ID NO: 782831 - RNA, 23 nt, Human
ccguguggcugaagggccgccau

SEQ ID NO: 782832 - RNA, 28 nt, Human
ccucccccaaacaagcacuuucaaaggu

SEQ ID NO: 782833 - RNA, 23 nt, Human
ccucccgcagcaggccacggagc

SEQ ID NO: 782834 - RNA, 23 nt, Human
ccucccugaacagccuagggucc

SEQ ID NO: 782835 - RNA, 24 nt, Human
ccuccguguacuccagcuuggccc

SEQ ID NO: 782836 - RNA, 22 nt, Human
ccuccucccagccggcgggcag

SEQ ID NO: 782837 - RNA, 19 nt, Human
ccuccugacucaaaccuga

SEQ ID NO: 782838 - RNA, 22 nt, Human
ccuccugacucaaaccugaucc

SEQ ID NO: 782839 - RNA, 21 nt, Human
ccuccugggccagcucgaacc

SEQ ID NO: 782840 - RNA, 20 nt, Human
ccucggccaguucccucucc

SEQ ID NO: 782841 - RNA, 19 nt, Human
ccucuccaaccucuuggca

SEQ ID NO: 782842 - RNA, 22 nt, Human
ccucugcaacacacacaugcuu

SEQ ID NO: 782843 - RNA, 18 nt, Human
ccugggccagcucgaacc

SEQ ID NO: 782844 - RNA, 20 nt, Human
ccuguggcccaccccauuga

SEQ ID NO: 782845 - RNA, 21 nt, Human
ccuucaugacacaguggcgug

SEQ ID NO: 782846 - RNA, 21 nt, Human
cgaauaauccgacagacaugc

SEQ ID NO: 782847 - RNA, 19 nt, Human
cgacucgcuggguaguucu

SEQ ID NO: 782848 - RNA, 24 nt, Human
cgaggacagcgaggagcgggagga

SEQ ID NO: 782849 - RNA, 23 nt, Human
cgcuggguaguucuaguuacccg

SEQ ID NO: 782850 - RNA, 20 nt, Human
cggagaugcggcgugcccuc

SEQ ID NO: 782851 - RNA, 25 nt, Human
cggcaaaggucaauggcuuuguuau

SEQ ID NO: 782852 - RNA, 19 nt, Human
cggcccacgccagagacug

SEQ ID NO: 782853 - RNA, 24 nt, Human
cggccugcuccuccuugcgcucca

SEQ ID NO: 782854 - RNA, 23 nt, Human
cgggaggacagcgaugccaggga

SEQ ID NO: 782855 - RNA, 24 nt, Human
cgucacugcacuccagccugggca

SEQ ID NO: 782856 - RNA, 24 nt, Human
cguguccaggggcgagcuuggggg

SEQ ID NO: 782857 - RNA, 21 nt, Human
cuaggcacaauggcucaugcc

SEQ ID NO: 782858 - RNA, 20 nt, Human
cucaaaaacaaaacaaaaca

SEQ ID NO: 782859 - RNA, 26 nt, Human
cucauugucaagccgggccagcugcu

SEQ ID NO: 782860 - RNA, 21 nt, Human
cuccagccgggccacaucucc

SEQ ID NO: 782861 - RNA, 20 nt, Human
cucccgcagcaggccacgga

SEQ ID NO: 782862 - RNA, 21 nt, Human
cuccgccacccuccuggucug

SEQ ID NO: 782863 - RNA, 26 nt, Human
cucgcgccuccucccagccggcgggc

SEQ ID NO: 782864 - RNA, 20 nt, Human
cucucguuuuaaucuggaaa

SEQ ID NO: 782865 - RNA, 21 nt, Human
cugaacacuucguuaaacacc

SEQ ID NO: 782866 - RNA, 21 nt, Human
cugacacaguggguuucccca

SEQ ID NO: 782867 - RNA, 22 nt, Human
cugaccucugcaacacacacau

SEQ ID NO: 782868 - RNA, 21 nt, Human
cugagcagcaaauggguggcc

SEQ ID NO: 782869 - RNA, 18 nt, Human
cugcagcagggccuccuu

SEQ ID NO: 782870 - RNA, 20 nt, Human
cugccacugucgcgcaggag

SEQ ID NO: 782871 - RNA, 20 nt, Human
cugcuccuccuugcgcucca

SEQ ID NO: 782872 - RNA, 19 nt, Human
cugucgcgcaggaguccca

SEQ ID NO: 782873 - RNA, 22 nt, Human
cugucucaaaaacaaaacaaaa

SEQ ID NO: 782874 - RNA, 22 nt, Human
cuucagacucacgcugagcaca

SEQ ID NO: 782875 - RNA, 21 nt, Human
cuuccccguccccggggaccc

SEQ ID NO: 782876 - RNA, 23 nt, Human
cuugagcccaggagguugaggcu

SEQ ID NO: 782877 - RNA, 20 nt, Human
cuuguggggcacaggcuggg

SEQ ID NO: 782878 - RNA, 23 nt, Human
cuuucuggcuucuucauauugcc

SEQ ID NO: 782879 - RNA, 25 nt, Human
gaaaaaaaaaaggcaaaacauggca

SEQ ID NO: 782880 - RNA, 21 nt, Human
gaagagugcauuucaucuaca

SEQ ID NO: 782881 - RNA, 23 nt, Human
gacaagaagugugaaaagcauca

SEQ ID NO: 782882 - RNA, 21 nt, Human
gacacaguggcguggcaggag

SEQ ID NO: 782883 - RNA, 21 nt, Human
gacacaguggcguggcaggag

SEQ ID NO: 782884 - RNA, 20 nt, Human
gacagcgaggacagcgagga

SEQ ID NO: 782885 - RNA, 21 nt, Human
gaccacgucacugcacuccag

SEQ ID NO: 782886 - RNA, 21 nt, Human
gagacaagaagugugaaaagc

SEQ ID NO: 782887 - RNA, 18 nt, Human
gagcgcuggcuggugggg

SEQ ID NO: 782888 - RNA, 27 nt, Human
gagcugccucccugaacagccuagggu

SEQ ID NO: 782889 - RNA, 18 nt, Human
gagcuggcguacgagcgg

SEQ ID NO: 782890 - RNA, 23 nt, Human
gaggugcgggccaugagcucagc

SEQ ID NO: 782891 - RNA, 18 nt, Human
gcaaacauacuggcuucg

SEQ ID NO: 782892 - RNA, 22 nt, Human
gcaaggcuagaggcagaaauac

SEQ ID NO: 782893 - RNA, 21 nt, Human
gcacacaggcuuuuuaacugg

SEQ ID NO: 782894 - RNA, 21 nt, Human
gcaggagucccacguggaucu

SEQ ID NO: 782895 - RNA, 22 nt, Human
gcaggagucccacguggaucug

SEQ ID NO: 782896 - RNA, 19 nt, Human
gcaguucuuccugcagcug

SEQ ID NO: 782897 - RNA, 24 nt, Human
gcccagcaguucuuccugcagcug

SEQ ID NO: 782898 - RNA, 24 nt, Human
gcccaggagguugaggcugcagug

SEQ ID NO: 782899 - RNA, 25 nt, Human
gcccuccucuccaaccucuuggcac

SEQ ID NO: 782900 - RNA, 23 nt, Human
gccugagcagcaaauggguggcc

SEQ ID NO: 782901 - RNA, 21 nt, Human
gccuucuucagcaucuucuca

SEQ ID NO: 782902 - RNA, 21 nt, Human
gcgaaggguucgucuuuccaa

SEQ ID NO: 782903 - RNA, 19 nt, Human
gcgcuccaucuccaggacc

SEQ ID NO: 782904 - RNA, 21 nt, Human
gcuacaauuaaauauuccuuc

SEQ ID NO: 782905 - RNA, 18 nt, Human
gcucucguuuuaaucugg

SEQ ID NO: 782906 - RNA, 22 nt, Human
gcugcggagucacugaacacac

SEQ ID NO: 782907 - RNA, 19 nt, Human
gcugcuucuuccagaaaga

SEQ ID NO: 782908 - RNA, 22 nt, Human
gcuggaaugcacggggauucug

SEQ ID NO: 782909 - RNA, 19 nt, Human
ggaagaccugcaugacugc

SEQ ID NO: 782910 - RNA, 21 nt, Human
ggaagcccgaggggccugggg

SEQ ID NO: 782911 - RNA, 18 nt, Human
ggacagcgaggagcggga

SEQ ID NO: 782912 - RNA, 22 nt, Human
ggagcucucuccugcacacccu

SEQ ID NO: 782913 - RNA, 20 nt, Human
ggaggaagggcguguccagg

SEQ ID NO: 782914 - RNA, 21 nt, Human
ggcucaugccuaucaucucag

SEQ ID NO: 782915 - RNA, 21 nt, Human
ggcuccucggcaucuucguuc

SEQ ID NO: 782916 - RNA, 21 nt, Human
ggcuggaggccagagacccac

SEQ ID NO: 782917 - RNA, 21 nt, Human
gggaggaagggcguguccagg

SEQ ID NO: 782918 - RNA, 23 nt, Human
gggcagcguugaacugucgcugu

SEQ ID NO: 782919 - RNA, 21 nt, Human
gggcucuuuguggcucugccc

SEQ ID NO: 782920 - RNA, 21 nt, Human
ggggccgggguggaaaugagc

SEQ ID NO: 782921 - RNA, 25 nt, Human
gguccaggaggaagaguucugaguu

SEQ ID NO: 782922 - RNA, 19 nt, Human
ggucccgccucuccuucuc

SEQ ID NO: 782923 - RNA, 23 nt, Human
guacggagggcuggucugggugc

SEQ ID NO: 782924 - RNA, 24 nt, Human
gucacugcacuccagccugggcaa

SEQ ID NO: 782925 - RNA, 20 nt, Human
gucacuguuccacccacggg

SEQ ID NO: 782926 - RNA, 22 nt, Human
gucagucuggccacggagcugg

SEQ ID NO: 782927 - RNA, 23 nt, Human
guccagugggggcaaauagacuc

SEQ ID NO: 782928 - RNA, 21 nt, Human
gucgauacccaugcaacaggg

SEQ ID NO: 782929 - RNA, 18 nt, Human
uaaaaaacccagccaggc

SEQ ID NO: 782930 - RNA, 19 nt, Human
uaaaaaggaauuggccaaa

SEQ ID NO: 782931 - RNA, 23 nt, Human
uaaaaaggaauuggccaaaaaga

SEQ ID NO: 782932 - RNA, 24 nt, Human
uaaaacagguggauaaauacuuca

SEQ ID NO: 782933 - RNA, 23 nt, Human
uaaaagacgcgaccgucguaguc

SEQ ID NO: 782934 - RNA, 20 nt, Human
uaaaauaaccugucuucaga

SEQ ID NO: 782935 - RNA, 23 nt, Human
uaaaauaaccugucuucagagau

SEQ ID NO: 782936 - RNA, 23 nt, Human
uaaauaaauuacaauacagugaa

SEQ ID NO: 782937 - RNA, 22 nt, Human
uaaaugcacauaugauacggug

SEQ ID NO: 782938 - RNA, 26 nt, Human
uaaaugcacauaugauacggugacaa

SEQ ID NO: 782939 - RNA, 21 nt, Human
uaagaaaaaaaucaaaauagg

SEQ ID NO: 782940 - RNA, 22 nt, Human
uaagaaaaaaaucaaaauaggc

SEQ ID NO: 782941 - RNA, 18 nt, Human
uaagucuucgucccccau

SEQ ID NO: 782942 - RNA, 18 nt, Human
uacaaaauccacuuuuaa

SEQ ID NO: 782943 - RNA, 23 nt, Human
uacagugaauuugccugaacuca

SEQ ID NO: 782944 - RNA, 22 nt, Human
uacaugguaaaugcacauauga

SEQ ID NO: 782945 - RNA, 25 nt, Human
uacauuaaaaaauguuuuuccucac

SEQ ID NO: 782946 - RNA, 23 nt, Human
uacuaaagaacaaaauuucaguc

SEQ ID NO: 782947 - RNA, 23 nt, Human
uagcaagagacaagaagugugaa

SEQ ID NO: 782948 - RNA, 18 nt, Human
uaggcacaauggcucaug

SEQ ID NO: 782949 - RNA, 23 nt, Human
uaggcuaggcacaauggcucaug

SEQ ID NO: 782950 - RNA, 21 nt, Human
uagucagccagguuaaucuga

SEQ ID NO: 782951 - RNA, 18 nt, Human
uauacaaggggggaagcu

SEQ ID NO: 782952 - RNA, 19 nt, Human
uauauauguauagauauac

SEQ ID NO: 782953 - RNA, 18 nt, Human
uauccagagaaugagcug

SEQ ID NO: 782954 - RNA, 19 nt, Human
ucaaacaccccacugucgc

SEQ ID NO: 782955 - RNA, 18 nt, Human
ucaaaggugauggugugu

SEQ ID NO: 782956 - RNA, 21 nt, Human
ucaaaguuucaacagcugggg

SEQ ID NO: 782957 - RNA, 20 nt, Human
ucaacagcuggggccuggag

SEQ ID NO: 782958 - RNA, 19 nt, Human
ucacaacaaggaaaaacca

SEQ ID NO: 782959 - RNA, 22 nt, Human
ucacaagcugguucuaagauuu

SEQ ID NO: 782960 - RNA, 22 nt, Human
ucacacauuuugugcagcugcu

SEQ ID NO: 782961 - RNA, 20 nt, Human
ucacgaggcuggcugcuucu

SEQ ID NO: 782962 - RNA, 20 nt, Human
ucacugcacuccagccuggg

SEQ ID NO: 782963 - RNA, 21 nt, Human
ucacugcacuccagccugggc

SEQ ID NO: 782964 - RNA, 24 nt, Human
ucacugcacuccagccugggcaac

SEQ ID NO: 782965 - RNA, 20 nt, Human
ucagaacuuugggaggcuga

SEQ ID NO: 782966 - RNA, 19 nt, Human
ucagacucacgcugagcac

SEQ ID NO: 782967 - RNA, 19 nt, Human
ucagagcuggugaacaccu

SEQ ID NO: 782968 - RNA, 21 nt, Human
ucagccucggccgugcuuggc

SEQ ID NO: 782969 - RNA, 23 nt, Human
uccaaccgcugccgcagcucacg

SEQ ID NO: 782970 - RNA, 23 nt, Human
uccaagggaagggaagaaagguc

SEQ ID NO: 782971 - RNA, 20 nt, Human
uccaccgaguccgcuugcca

SEQ ID NO: 782972 - RNA, 19 nt, Human
uccaggggcgagcuugggg

SEQ ID NO: 782973 - RNA, 21 nt, Human
ucccacaacagaaggcuacuu

SEQ ID NO: 782974 - RNA, 19 nt, Human
ucccacguggaucugggga

SEQ ID NO: 782975 - RNA, 18 nt, Human
uccccgaggacaccguca

SEQ ID NO: 782976 - RNA, 21 nt, Human
ucccugaacagccuagggucc

SEQ ID NO: 782977 - RNA, 20 nt, Human
ucccuuucacuuuccuucau

SEQ ID NO: 782978 - RNA, 19 nt, Human
uccguguacuccagcuugg

SEQ ID NO: 782979 - RNA, 21 nt, Human
uccuaacugcuguauucaccc

SEQ ID NO: 782980 - RNA, 23 nt, Human
uccuacuuccucguucccuuuca

SEQ ID NO: 782981 - RNA, 18 nt, Human
uccugcacugacacagug

SEQ ID NO: 782982 - RNA, 21 nt, Human
uccugcagcugcggagucacu

SEQ ID NO: 782983 - RNA, 20 nt, Human
uccugggccagcucgaaccg

SEQ ID NO: 782984 - RNA, 20 nt, Human
uccuugaugagcugcagccg

SEQ ID NO: 782985 - RNA, 24 nt, Human
uccuugcgcuccaucuccaggacc

SEQ ID NO: 782986 - RNA, 20 nt, Human
ucgcuggguaguucuaguua

SEQ ID NO: 782987 - RNA, 18 nt, Human
ucggccaguucccucucc

SEQ ID NO: 782988 - RNA, 18 nt, Human
ucguagucucgcgccucc

SEQ ID NO: 782989 - RNA, 18 nt, Human
ucuaagaaaaaaaucaaa

SEQ ID NO: 782990 - RNA, 22 nt, Human
ucuccacccccuuuucuuugua

SEQ ID NO: 782991 - RNA, 18 nt, Human
ucuccccaccucuguugu

SEQ ID NO: 782992 - RNA, 23 nt, Human
ucucgaagagucacuguuccacc

SEQ ID NO: 782993 - RNA, 22 nt, Human
ucucgccccagagagucgaagg

SEQ ID NO: 782994 - RNA, 18 nt, Human
ugaaaaguacuaaagaac

SEQ ID NO: 782995 - RNA, 27 nt, Human
ugaaaugcuuuuacaaaauccacuuuu

SEQ ID NO: 782996 - RNA, 22 nt, Human
ugacaaaaaacaaagagaugaa

SEQ ID NO: 782997 - RNA, 22 nt, Human
ugagcccaggagguugaggcug

SEQ ID NO: 782998 - RNA, 20 nt, Human
ugaggcaggagggucacuug

SEQ ID NO: 782999 - RNA, 24 nt, Human
ugaggcaggagggucacuugagcc

SEQ ID NO: 783000 - RNA, 25 nt, Human
ugaggcaggagggucacuugagccc

SEQ ID NO: 783001 - RNA, 18 nt, Human
ugaggcagggaggaaggc

SEQ ID NO: 783002 - RNA, 22 nt, Human
ugcaacacacacaugcuuccga

SEQ ID NO: 783003 - RNA, 18 nt, Human
ugcaacagggcucugggu

SEQ ID NO: 783004 - RNA, 23 nt, Human
ugcacaaauauuuuaaagacaaa

SEQ ID NO: 783005 - RNA, 24 nt, Human
ugcacgaggagacacucgcugcca

SEQ ID NO: 783006 - RNA, 18 nt, Human
ugcaguuccugcuucauc

SEQ ID NO: 783007 - RNA, 18 nt, Human
ugcccuccucuccaaccu

SEQ ID NO: 783008 - RNA, 23 nt, Human
ugccgcagcucacggagggcgca

SEQ ID NO: 783009 - RNA, 19 nt, Human
ugccgugguucuggccagg

SEQ ID NO: 783010 - RNA, 19 nt, Human
ugccugagcagcaaauggg

SEQ ID NO: 783011 - RNA, 22 nt, Human
ugcuccgugucuccccaccucu

SEQ ID NO: 783012 - RNA, 20 nt, Human
uggaaaucugugcaggcugg

SEQ ID NO: 783013 - RNA, 19 nt, Human
uggaaaugagcugccuccc

SEQ ID NO: 783014 - RNA, 19 nt, Human
uggaagcccgaggggccug

SEQ ID NO: 783015 - RNA, 23 nt, Human
uggaagcccgaggggccuggggg

SEQ ID NO: 783016 - RNA, 18 nt, Human
uggaugggaaguacuuca

SEQ ID NO: 783017 - RNA, 18 nt, Human
uggcaaggcuagaggcag

SEQ ID NO: 783018 - RNA, 18 nt, Human
uggccaaaaagaaaaaaa

SEQ ID NO: 783019 - RNA, 19 nt, Human
uggcccaggauggagucga

SEQ ID NO: 783020 - RNA, 21 nt, Human
uggcccaggauggagucgauc

SEQ ID NO: 783021 - RNA, 24 nt, Human
uggcguggcaggaguuccuccgcc

SEQ ID NO: 783022 - RNA, 20 nt, Human
uggcugguggggguccucgc

SEQ ID NO: 783023 - RNA, 18 nt, Human
ugggaaggacccagggug

SEQ ID NO: 783024 - RNA, 23 nt, Human
ugggaaggacccagggugcuccg

SEQ ID NO: 783025 - RNA, 20 nt, Human
ugggaggcugaggcaggagg

SEQ ID NO: 783026 - RNA, 24 nt, Human
ugggaggcugaggcaggaggguca

SEQ ID NO: 783027 - RNA, 24 nt, Human
ugggccagcucgaaccgcugcugc

SEQ ID NO: 783028 - RNA, 21 nt, Human
ugggggcgacagcgaggacag

SEQ ID NO: 783029 - RNA, 21 nt, Human
ugggggcucugaaaagggagc

SEQ ID NO: 783030 - RNA, 23 nt, Human
uggguggcccaggauggagucga

SEQ ID NO: 783031 - RNA, 18 nt, Human
uggguguccuggggccgg

SEQ ID NO: 783032 - RNA, 22 nt, Human
ugguagaucuccuuggaggccu

SEQ ID NO: 783033 - RNA, 18 nt, Human
uggugugugcaggguccc

SEQ ID NO: 783034 - RNA, 25 nt, Human
uguauagauauacguguuuuuuuuu

SEQ ID NO: 783035 - RNA, 20 nt, Human
ugucaggguggaugggaagu

SEQ ID NO: 783036 - RNA, 22 nt, Human
uguccaggggcgagcuuggggg

SEQ ID NO: 783037 - RNA, 23 nt, Human
ugucucaaaaacaaaacaaaaca

SEQ ID NO: 783038 - RNA, 20 nt, Human
ugugaagaaugcuaucuucu

SEQ ID NO: 783039 - RNA, 23 nt, Human
uguggaagcccgaggggccuggg

SEQ ID NO: 783040 - RNA, 24 nt, Human
ugugggucauacuuuguauuuguu

SEQ ID NO: 783041 - RNA, 23 nt, Human
uguuguggucaauguaaaagacg

SEQ ID NO: 783042 - RNA, 23 nt, Human
uucaaaguuucaacagcuggggc

SEQ ID NO: 783043 - RNA, 24 nt, Human
uucaaaucgaggccucaucgagaa

SEQ ID NO: 783044 - RNA, 19 nt, Human
uucaaggaaaaaaaaguac

SEQ ID NO: 783045 - RNA, 23 nt, Human
uucacaacaaggaaaaaccaagc

SEQ ID NO: 783046 - RNA, 28 nt, Human
uucagucuuaaaauacaucuuaaaguca

SEQ ID NO: 783047 - RNA, 23 nt, Human
uucaugaaaauaaaacaggugga

SEQ ID NO: 783048 - RNA, 24 nt, Human
uuccucguucccuuucacuuuccu

SEQ ID NO: 783049 - RNA, 21 nt, Human
uuccuucaccgccagccccgc

SEQ ID NO: 783050 - RNA, 21 nt, Human
uucguuccuuuugguuagagg

SEQ ID NO: 783051 - RNA, 22 nt, Human
uugaaaacauuugucuagggcu

SEQ ID NO: 783052 - RNA, 23 nt, Human
uugcagggucuccacccccuuuu

SEQ ID NO: 783053 - RNA, 24 nt, Human
uuggccaaaaagaaaaaaaaaagg

SEQ ID NO: 783054 - RNA, 22 nt, Human
uugggaggcugaggcaggaggg

SEQ ID NO: 783055 - RNA, 25 nt, Human
uugggaggcugaggcaggaggguca

SEQ ID NO: 783056 - RNA, 25 nt, Human
uuuccuguggcccaccccauugauu

SEQ ID NO: 783057 - RNA, 25 nt, Human
uuucuuggcauugagagccuccuga

SEQ ID NO: 783058 - RNA, 20 nt, Human
uuuguauuuguugaauaucc

SEQ ID NO: 783059 - RNA, 20 nt, Human
aaaaaaaaaucuucuaaucu

SEQ ID NO: 783060 - RNA, 22 nt, Human
aaaaaacagagaguuuagagaa

SEQ ID NO: 783061 - RNA, 24 nt, Human
aaaaaaggaaagcauucaauauac

SEQ ID NO: 783062 - RNA, 19 nt, Human
aaaaugccuuucccacucc

SEQ ID NO: 783063 - RNA, 20 nt, Human
aaaaugccuuucccacucca

SEQ ID NO: 783064 - RNA, 23 nt, Human
aaaaugccuuucccacuccacuc

SEQ ID NO: 783065 - RNA, 24 nt, Human
aaacagaaguuuaauuacagcaac

SEQ ID NO: 783066 - RNA, 25 nt, Human
aaacagagaguuuagagaaaaaagu

SEQ ID NO: 783067 - RNA, 21 nt, Human
aaagguuuuuuuuuccucuua

SEQ ID NO: 783068 - RNA, 22 nt, Human
aaaguuuucccaacuucucauu

SEQ ID NO: 783069 - RNA, 22 nt, Human
aaaugaucaagaaggaagaaac

SEQ ID NO: 783070 - RNA, 21 nt, Human
aacaaucacagaugucucugg

SEQ ID NO: 783071 - RNA, 26 nt, Human
aacacuuuuuaacaugacaaauacau

SEQ ID NO: 783072 - RNA, 20 nt, Human
accccaugccuuccaaaagu

SEQ ID NO: 783073 - RNA, 21 nt, Human
acucgauaacauuauuccacc

SEQ ID NO: 783074 - RNA, 21 nt, Human
aggcagguauaaaaaaggaaa

SEQ ID NO: 783075 - RNA, 19 nt, Human
auauauguauauauacaga

SEQ ID NO: 783076 - RNA, 19 nt, Human
augaucccauguagcaaac

SEQ ID NO: 783077 - RNA, 24 nt, Human
auucaaguaauagaacaaucacag

SEQ ID NO: 783078 - RNA, 24 nt, Human
caaaaugccuuucccacuccacuc

SEQ ID NO: 783079 - RNA, 23 nt, Human
caaauaacacaucucagccagaa

SEQ ID NO: 783080 - RNA, 21 nt, Human
caaauagacaucuaaauugua

SEQ ID NO: 783081 - RNA, 25 nt, Human
caagauuaucaaaaaaugacaccuc

SEQ ID NO: 783082 - RNA, 19 nt, Human
caaguaaccaggcaauggc

SEQ ID NO: 783083 - RNA, 20 nt, Human
caauacacaaguacaaacag

SEQ ID NO: 783084 - RNA, 19 nt, Human
cacaaguacaaacagugac

SEQ ID NO: 783085 - RNA, 21 nt, Human
cacaaguacaaacagugacua

SEQ ID NO: 783086 - RNA, 21 nt, Human
cacaguuuuugugguacuggc

SEQ ID NO: 783087 - RNA, 20 nt, Human
caccaaagguuuuuuuuucc

SEQ ID NO: 783088 - RNA, 19 nt, Human
caccauggaacugaugucu

SEQ ID NO: 783089 - RNA, 23 nt, Human
cacuccacucggcaaacaagccu

SEQ ID NO: 783090 - RNA, 19 nt, Human
cacuguacagcuggaaaau

SEQ ID NO: 783091 - RNA, 20 nt, Human
cagaugcucauuauuucccc

SEQ ID NO: 783092 - RNA, 21 nt, Human
caguuagccuuucugaggggc

SEQ ID NO: 783093 - RNA, 22 nt, Human
cauaaaacaaguaaccaggcaa

SEQ ID NO: 783094 - RNA, 26 nt, Human
cauucaagauuaucaaaaaaugacac

SEQ ID NO: 783095 - RNA, 21 nt, Human
cauucaauauacauuuuacau

SEQ ID NO: 783096 - RNA, 26 nt, Human
ccaccaaauagacaucuaaauuguac

SEQ ID NO: 783097 - RNA, 20 nt, Human
ccaccuuuuccuuuuaaucc

SEQ ID NO: 783098 - RNA, 21 nt, Human
ccacuccacucggcaaacaag

SEQ ID NO: 783099 - RNA, 18 nt, Human
cccaccccccuuuuggca

SEQ ID NO: 783100 - RNA, 24 nt, Human
cccaccccccuuuuggcaaacgaa

SEQ ID NO: 783101 - RNA, 21 nt, Human
cccacuccacucggcaaacaa

SEQ ID NO: 783102 - RNA, 19 nt, Human
ccccacgaauguguccagg

SEQ ID NO: 783103 - RNA, 21 nt, Human
ccccacgaauguguccaggga

SEQ ID NO: 783104 - RNA, 20 nt, Human
ccgccuucaguuccagacuu

SEQ ID NO: 783105 - RNA, 20 nt, Human
ccucuucuuuuuccugcccc

SEQ ID NO: 783106 - RNA, 22 nt, Human
ccucuucuuuuuccugccccac

SEQ ID NO: 783107 - RNA, 24 nt, Human
ccuuccaaaaguacuuuuuccaca

SEQ ID NO: 783108 - RNA, 20 nt, Human
ccuuuuguggcuaacacuuu

SEQ ID NO: 783109 - RNA, 23 nt, Human
cgauaacauuauuccaccucccc

SEQ ID NO: 783110 - RNA, 24 nt, Human
cgauaacauuauuccaccucccca

SEQ ID NO: 783111 - RNA, 18 nt, Human
cggcaaacaagccugugc

SEQ ID NO: 783112 - RNA, 24 nt, Human
cguauauauauauaaaacagaagu

SEQ ID NO: 783113 - RNA, 19 nt, Human
cucaaagaaaaaaaaaauc

SEQ ID NO: 783114 - RNA, 24 nt, Human
cugguuacugauacaaaaaguaaa

SEQ ID NO: 783115 - RNA, 19 nt, Human
cuguauaaagcgcuucccc

SEQ ID NO: 783116 - RNA, 18 nt, Human
cugugugugcgagccugg

SEQ ID NO: 783117 - RNA, 21 nt, Human
gacccugugugugcgagccug

SEQ ID NO: 783118 - RNA, 23 nt, Human
gaggggcuuaugggaaauaugug

SEQ ID NO: 783119 - RNA, 22 nt, Human
gcagacccugugugugcgagcc

SEQ ID NO: 783120 - RNA, 27 nt, Human
gccuuuuguggcuaacacuuuuuuuuu

SEQ ID NO: 783121 - RNA, 22 nt, Human
guauacguauauauauauaaaa

SEQ ID NO: 783122 - RNA, 23 nt, Human
guccuuuucuccuuaaaaaaaau

SEQ ID NO: 783123 - RNA, 18 nt, Human
uaaaacaaguaaccaggc

SEQ ID NO: 783124 - RNA, 22 nt, Human
uaaacauuaaaaaaaaaaaaag

SEQ ID NO: 783125 - RNA, 18 nt, Human
uaacauuauuccaccucc

SEQ ID NO: 783126 - RNA, 20 nt, Human
uacaggaacauuuuacacug

SEQ ID NO: 783127 - RNA, 18 nt, Human
uauacguauauauauaua

SEQ ID NO: 783128 - RNA, 28 nt, Human
uauauacagauauguauacguauauaua

SEQ ID NO: 783129 - RNA, 18 nt, Human
uauauauauguauauaua

SEQ ID NO: 783130 - RNA, 18 nt, Human
uauauauguauauauaca

SEQ ID NO: 783131 - RNA, 21 nt, Human
uauauguauauauacagauau

SEQ ID NO: 783132 - RNA, 20 nt, Human
uauauuuauauauauauaua

SEQ ID NO: 783133 - RNA, 24 nt, Human
uauauuuauauauauauauaugua

SEQ ID NO: 783134 - RNA, 29 nt, Human
uauauuuauauuuauauauauauauaugu

SEQ ID NO: 783135 - RNA, 18 nt, Human
uaucaaaaaaugacaccu

SEQ ID NO: 783136 - RNA, 22 nt, Human
uauguauauauacagauaugua

SEQ ID NO: 783137 - RNA, 18 nt, Human
ucaagaaggaagaaacca

SEQ ID NO: 783138 - RNA, 18 nt, Human
ucacaguuagccuuucug

SEQ ID NO: 783139 - RNA, 22 nt, Human
ucacaguuagccuuucugaggg

SEQ ID NO: 783140 - RNA, 21 nt, Human
uccaccuuuuccuuuuaaucc

SEQ ID NO: 783141 - RNA, 20 nt, Human
ucccacuccacucggcaaac

SEQ ID NO: 783142 - RNA, 21 nt, Human
ucuagaauaaaaauccgauga

SEQ ID NO: 783143 - RNA, 20 nt, Human
ucucucaaagaaaaaaaaaa

SEQ ID NO: 783144 - RNA, 18 nt, Human
ugaagaugagcucucuag

SEQ ID NO: 783145 - RNA, 23 nt, Human
ugacaauguacauguccaaucuu

SEQ ID NO: 783146 - RNA, 21 nt, Human
ugagugguuugcgacguggca

SEQ ID NO: 783147 - RNA, 19 nt, Human
ugaucaguaaugaucccau

SEQ ID NO: 783148 - RNA, 18 nt, Human
uguauacguauauauaua

SEQ ID NO: 783149 - RNA, 20 nt, Human
uguauauauacagauaugua

SEQ ID NO: 783150 - RNA, 22 nt, Human
uguauauauacagauauguaua

SEQ ID NO: 783151 - RNA, 29 nt, Human
uguauauauacagauauguauacguuaca

SEQ ID NO: 783152 - RNA, 21 nt, Human
uguccagggauuuuacacccu

SEQ ID NO: 783153 - RNA, 20 nt, Human
uucagagucaccgugaucag

SEQ ID NO: 783154 - RNA, 22 nt, Human
uuccagacuucagagucaccgu

SEQ ID NO: 783155 - RNA, 20 nt, Human
uuccucuucuuuuuccugcc

SEQ ID NO: 783156 - RNA, 24 nt, Human
uuguaccaaagugucaucaucaca

SEQ ID NO: 783157 - RNA, 18 nt, Human
uuuaaaggaaaaggaaaa

SEQ ID NO: 783158 - RNA, 24 nt, Human
uuuacauuauauacaacacaguuu

SEQ ID NO: 783159 - RNA, 22 nt, Human
uuugugguacuggcaaccccau

SEQ ID NO: 783160 - RNA, 23 nt, Human
uuuuugugguacuggcaacccca

SEQ ID NO: 783161 - RNA, 19 nt, Human
uuuuuuuuccucuuaacaa

SEQ ID NO: 783162 - RNA, 20 nt, Human
aaacagagggagcugcaauc

SEQ ID NO: 783163 - RNA, 20 nt, Human
acacaggcuuguccgucugg

SEQ ID NO: 783164 - RNA, 19 nt, Human
aguaacguguauucuuguc

SEQ ID NO: 783165 - RNA, 24 nt, Human
auggucacgcugaugacuuccucc

SEQ ID NO: 783166 - RNA, 19 nt, Human
caaguaacccggggccuga

SEQ ID NO: 783167 - RNA, 21 nt, Human
cacgcccgcgcgaaaaacaga

SEQ ID NO: 783168 - RNA, 18 nt, Human
cagcagcaggagcaggag

SEQ ID NO: 783169 - RNA, 23 nt, Human
caggauggcucccuggcucugca

SEQ ID NO: 783170 - RNA, 21 nt, Human
ccacaggcacaagcugggugu

SEQ ID NO: 783171 - RNA, 23 nt, Human
ccagaguuuucugagauguuaac

SEQ ID NO: 783172 - RNA, 22 nt, Human
cccgcgccgacagcagcaggag

SEQ ID NO: 783173 - RNA, 21 nt, Human
ccgcgccgacagcagcaggag

SEQ ID NO: 783174 - RNA, 24 nt, Human
cgaaaaacagagggagcugcaauc

SEQ ID NO: 783175 - RNA, 27 nt, Human
cgacagcagcaggagcaggagcgggag

SEQ ID NO: 783176 - RNA, 22 nt, Human
cggcucacccugggccaccagc

SEQ ID NO: 783177 - RNA, 18 nt, Human
cguugacaggccucagau

SEQ ID NO: 783178 - RNA, 22 nt, Human
cugcaaucaaguaacccggggc

SEQ ID NO: 783179 - RNA, 21 nt, Human
cuucccuuggagaguuaaaga

SEQ ID NO: 783180 - RNA, 19 nt, Human
gaaagaggggccccuccuc

SEQ ID NO: 783181 - RNA, 21 nt, Human
gacagcagcaggagcaggagc

SEQ ID NO: 783182 - RNA, 19 nt, Human
gcaggagcaggagcgggag

SEQ ID NO: 783183 - RNA, 22 nt, Human
guacacaggcuuguccgucugg

SEQ ID NO: 783184 - RNA, 18 nt, Human
gucuggaugaauacagaa

SEQ ID NO: 783185 - RNA, 27 nt, Human
ucccuggcucugcaccaccggcucacc

SEQ ID NO: 783186 - RNA, 18 nt, Human
ugaaagaggggccccucc

SEQ ID NO: 783187 - RNA, 22 nt, Human
ugaauacagaagcgccccggcc

SEQ ID NO: 783188 - RNA, 20 nt, Human
ugaaugguccccaggaccaa

SEQ ID NO: 783189 - RNA, 18 nt, Human
ugaguaagaucaguaacg

SEQ ID NO: 783190 - RNA, 25 nt, Human
ugaguuugauugucccuuuauccag

SEQ ID NO: 783191 - RNA, 22 nt, Human
ugcaaucaaguaacccggggcc

SEQ ID NO: 783192 - RNA, 20 nt, Human
uggcucccuggcucugcacc

SEQ ID NO: 783193 - RNA, 23 nt, Human
uggggucuguacacaggcuuguc

SEQ ID NO: 783194 - RNA, 20 nt, Human
ugucaauauccuggagugau

SEQ ID NO: 783195 - RNA, 18 nt, Human
ugugaaagaggggccccu

SEQ ID NO: 783196 - RNA, 21 nt, Human
aauaaguuaacaaucccuucu

SEQ ID NO: 783197 - RNA, 23 nt, Human
aaucucgcagcuauagcuugcua

SEQ ID NO: 783198 - RNA, 20 nt, Human
acaauauuauguucaauauu

SEQ ID NO: 783199 - RNA, 23 nt, Human
auugaauaguaaaaagaagcuaa

SEQ ID NO: 783200 - RNA, 20 nt, Human
caugcacguguuucuacgca

SEQ ID NO: 783201 - RNA, 18 nt, Human
cgaguggaguaauucaaa

SEQ ID NO: 783202 - RNA, 20 nt, Human
uaaaaagaagcuaaacuuua

SEQ ID NO: 783203 - RNA, 22 nt, Human
uaaucugauauaaaaaacacuu

SEQ ID NO: 783204 - RNA, 25 nt, Human
uagcaauaaguuaacaaucccuucu

SEQ ID NO: 783205 - RNA, 21 nt, Human
ugaauaguaaaaagaagcuaa

SEQ ID NO: 783206 - RNA, 24 nt, Human
uuaacaaucccuucuuucacauuu

SEQ ID NO: 783207 - RNA, 24 nt, Human
aacucuguucuccuugcuugcaac

SEQ ID NO: 783208 - RNA, 22 nt, Human
auuggcuccgacagccuuccuc

SEQ ID NO: 783209 - RNA, 20 nt, Human
cagcccaggcgacgugcugg

SEQ ID NO: 783210 - RNA, 20 nt, Human
ccugggguccucgccugccc

SEQ ID NO: 783211 - RNA, 18 nt, Human
gguccucgccugcccagg

SEQ ID NO: 783212 - RNA, 22 nt, Human
ucucuacaacucuguucuccuu

SEQ ID NO: 783213 - RNA, 23 nt, Human
ucucuacaacucuguucuccuug

SEQ ID NO: 783214 - RNA, 21 nt, Human
ugcuggggucuggaggcggcu

SEQ ID NO: 783215 - RNA, 20 nt, Human
uguguguggguauaugaggg

SEQ ID NO: 783216 - RNA, 23 nt, Human
uguugugaucucuacaacucugu

SEQ ID NO: 783217 - RNA, 18 nt, Human
uuggcuccgacagccuuc

SEQ ID NO: 783218 - RNA, 30 nt, Human
aaaaaaaaaaaaaaaacacaagugaagagg

SEQ ID NO: 783219 - RNA, 24 nt, Human
aaaaaaaaaaaacacaagugaaga

SEQ ID NO: 783220 - RNA, 25 nt, Human
aaaaaaaaaacacaagugaagaggu

SEQ ID NO: 783221 - RNA, 24 nt, Human
aaaaaagggaauuacuuucuacau

SEQ ID NO: 783222 - RNA, 21 nt, Human
aaacagcuacaaacucauucu

SEQ ID NO: 783223 - RNA, 23 nt, Human
aaacagcuacaaacucauucuca

SEQ ID NO: 783224 - RNA, 22 nt, Human
aaacuacaccuucuuauuagcc

SEQ ID NO: 783225 - RNA, 19 nt, Human
aacaaaucugaugaaaaag

SEQ ID NO: 783226 - RNA, 18 nt, Human
aacacugcauuuucuuac

SEQ ID NO: 783227 - RNA, 20 nt, Human
aacaggggaagacuccaccu

SEQ ID NO: 783228 - RNA, 20 nt, Human
aagaggucuguuucaagugg

SEQ ID NO: 783229 - RNA, 20 nt, Human
aaguaucucuuuaaacauau

SEQ ID NO: 783230 - RNA, 24 nt, Human
aaucccuugaacccagguggcaga

SEQ ID NO: 783231 - RNA, 20 nt, Human
acacagcagguuaugaccag

SEQ ID NO: 783232 - RNA, 24 nt, Human
acaggggaagacuccaccucagga

SEQ ID NO: 783233 - RNA, 28 nt, Human
accucaggaaaaaaaaaaaaaaaacaca

SEQ ID NO: 783234 - RNA, 21 nt, Human
accugaauaugucugccuaau

SEQ ID NO: 783235 - RNA, 19 nt, Human
acucaggagguugaggcac

SEQ ID NO: 783236 - RNA, 24 nt, Human
acugcacuccagccugggcaacag

SEQ ID NO: 783237 - RNA, 24 nt, Human
acugcacuccagccugggcaacag

SEQ ID NO: 783238 - RNA, 20 nt, Human
agaaguugcagugagccaag

SEQ ID NO: 783239 - RNA, 20 nt, Human
agaggaaggguggcugcgag

SEQ ID NO: 783240 - RNA, 24 nt, Human
agcacuuugggaggccaagguggg

SEQ ID NO: 783241 - RNA, 24 nt, Human
agccugggcaacaggggaagacuc

SEQ ID NO: 783242 - RNA, 21 nt, Human
aggccaaggugggcagaucac

SEQ ID NO: 783243 - RNA, 22 nt, Human
aggccucaguuuaaaaaaaaaa

SEQ ID NO: 783244 - RNA, 24 nt, Human
aggugcgguggcucacaccuguaa

SEQ ID NO: 783245 - RNA, 24 nt, Human
agguggcagaaguugcagugagcc

SEQ ID NO: 783246 - RNA, 22 nt, Human
aggugggcagaucaccugaggg

SEQ ID NO: 783247 - RNA, 23 nt, Human
agucugggcaacauggcaaaccc

SEQ ID NO: 783248 - RNA, 23 nt, Human
aucaccugaggccaggaguucaa

SEQ ID NO: 783249 - RNA, 24 nt, Human
aucaucccacugcacuccagccug

SEQ ID NO: 783250 - RNA, 18 nt, Human
auccccagcgucugacuc

SEQ ID NO: 783251 - RNA, 22 nt, Human
aucuaauaaaaaguuauaaaua

SEQ ID NO: 783252 - RNA, 20 nt, Human
auuagaaaacauacuuuuaa

SEQ ID NO: 783253 - RNA, 23 nt, Human
caaaguagauccaaagaugugcc

SEQ ID NO: 783254 - RNA, 23 nt, Human
caagacaauauuuucuacacuuu

SEQ ID NO: 783255 - RNA, 22 nt, Human
caagaucaucccacugcacucc

SEQ ID NO: 783256 - RNA, 19 nt, Human
caaggugggcagaucaccu

SEQ ID NO: 783257 - RNA, 26 nt, Human
caaggugggcagaucaccugaggcca

SEQ ID NO: 783258 - RNA, 24 nt, Human
cacaccuguaaucccagcacuuug

SEQ ID NO: 783259 - RNA, 23 nt, Human
caccuguaaucccagcacuuugg

SEQ ID NO: 783260 - RNA, 24 nt, Human
caccuguaaucccagcacuuuggg

SEQ ID NO: 783261 - RNA, 19 nt, Human
cacugcacuccagccuggg

SEQ ID NO: 783262 - RNA, 21 nt, Human
cacugcacuccagccugggca

SEQ ID NO: 783263 - RNA, 22 nt, Human
cacugcacuccagccugggcaa

SEQ ID NO: 783264 - RNA, 23 nt, Human
cacugcacuccagccugggcaac

SEQ ID NO: 783265 - RNA, 24 nt, Human
cacugcacuccagccugggcaaca

SEQ ID NO: 783266 - RNA, 27 nt, Human
cacugcacuccagccugggcaacaggg

SEQ ID NO: 783267 - RNA, 18 nt, Human
cagagagaaaaaagggaa

SEQ ID NO: 783268 - RNA, 27 nt, Human
cagaucaccugaggccaggaguucaaa

SEQ ID NO: 783269 - RNA, 24 nt, Human
cagcacuuugggaggccaaggugg

SEQ ID NO: 783270 - RNA, 18 nt, Human
cagccugggcaacagggg

SEQ ID NO: 783271 - RNA, 24 nt, Human
caugaauauuaacauuuacuaaua

SEQ ID NO: 783272 - RNA, 22 nt, Human
cauggcaaacccccgucuuuac

SEQ ID NO: 783273 - RNA, 23 nt, Human
ccaagagcucuuuaauccagugg

SEQ ID NO: 783274 - RNA, 21 nt, Human
ccaaucagaaacaagcaagca

SEQ ID NO: 783275 - RNA, 20 nt, Human
ccacugcacuccagccuggg

SEQ ID NO: 783276 - RNA, 21 nt, Human
ccacugcacuccagccugggc

SEQ ID NO: 783277 - RNA, 23 nt, Human
ccacugcacuccagccugggcaa

SEQ ID NO: 783278 - RNA, 24 nt, Human
ccacugcacuccagccugggcaac

SEQ ID NO: 783279 - RNA, 23 nt, Human
ccccgucuuuacuaaaaauacaa

SEQ ID NO: 783280 - RNA, 18 nt, Human
cccuuuacccuuuuuucc

SEQ ID NO: 783281 - RNA, 19 nt, Human
cccuuuuuuccucucccau

SEQ ID NO: 783282 - RNA, 19 nt, Human
ccugcagucccagcuacuc

SEQ ID NO: 783283 - RNA, 21 nt, Human
ccugcagucccagcuacucag

SEQ ID NO: 783284 - RNA, 22 nt, Human
ccugcagucccagcuacucagg

SEQ ID NO: 783285 - RNA, 23 nt, Human
ccuuucccuuuacccuuuuuuuu

SEQ ID NO: 783286 - RNA, 22 nt, Human
cucacaccuguaaucccagcac

SEQ ID NO: 783287 - RNA, 24 nt, Human
cucacaccuguaaucccagcacuu

SEQ ID NO: 783288 - RNA, 18 nt, Human
cucauuuuuauaagaaau

SEQ ID NO: 783289 - RNA, 32 nt, Human
cugaacuccuagggcauaucuauucacacuac

SEQ ID NO: 783290 - RNA, 23 nt, Human
cuuuaaauccucaucuguauuuc

SEQ ID NO: 783291 - RNA, 18 nt, Human
gaaguugcagugagccaa

SEQ ID NO: 783292 - RNA, 18 nt, Human
gaucaccugaggccagga

SEQ ID NO: 783293 - RNA, 24 nt, Human
gaucaccugaggccaggaguucaa

SEQ ID NO: 783294 - RNA, 19 nt, Human
gaugacaaaccaagagcuc

SEQ ID NO: 783295 - RNA, 20 nt, Human
gcaacauggcaaacccccgu

SEQ ID NO: 783296 - RNA, 20 nt, Human
gcacgagaaucccuugaacc

SEQ ID NO: 783297 - RNA, 20 nt, Human
gcacuuugggaggccaaggu

SEQ ID NO: 783298 - RNA, 22 nt, Human
ggaguucaaaaccagucugggc

SEQ ID NO: 783299 - RNA, 23 nt, Human
ggcagaaguugcagugagccaag

SEQ ID NO: 783300 - RNA, 21 nt, Human
ggccaggugcgguggcucaca

SEQ ID NO: 783301 - RNA, 23 nt, Human
gguggcucacaccuguaauccca

SEQ ID NO: 783302 - RNA, 24 nt, Human
gguggcucacaccuguaaucccag

SEQ ID NO: 783303 - RNA, 25 nt, Human
guugaauugaauuguuuuagugauu

SEQ ID NO: 783304 - RNA, 26 nt, Human
guuucuguaaacacuuuuacaccagu

SEQ ID NO: 783305 - RNA, 20 nt, Human
uaaaacauaaaacuaaauga

SEQ ID NO: 783306 - RNA, 18 nt, Human
uaaaauaaacacuagggc

SEQ ID NO: 783307 - RNA, 24 nt, Human
uaaaugagaucucucagguucuuc

SEQ ID NO: 783308 - RNA, 25 nt, Human
uacaccaguaucuuaaaauuccaaa

SEQ ID NO: 783309 - RNA, 23 nt, Human
uacaugaauauuaacauuuacua

SEQ ID NO: 783310 - RNA, 21 nt, Human
uacccuuuuuuccucucccau

SEQ ID NO: 783311 - RNA, 18 nt, Human
uagauccaaagaugugcc

SEQ ID NO: 783312 - RNA, 19 nt, Human
uagauccaaagaugugcca

SEQ ID NO: 783313 - RNA, 27 nt, Human
uagauccaaagaugugccaaucagaaa

SEQ ID NO: 783314 - RNA, 21 nt, Human
uaucagcaaaguagauccaaa

SEQ ID NO: 783315 - RNA, 23 nt, Human
uauucuaucacaugugauacuau

SEQ ID NO: 783316 - RNA, 21 nt, Human
ucaaaaccagucugggcaaca

SEQ ID NO: 783317 - RNA, 25 nt, Human
ucaaaguaagauaugaauuauaauc

SEQ ID NO: 783318 - RNA, 19 nt, Human
ucaccugaggccaggaguu

SEQ ID NO: 783319 - RNA, 22 nt, Human
ucaggaaaaaaaaaaaaaaaaa

SEQ ID NO: 783320 - RNA, 26 nt, Human
ucaggaaaaaaaaaaaaaaaacacaa

SEQ ID NO: 783321 - RNA, 20 nt, Human
ucaguuuaaaaaaaaaagga

SEQ ID NO: 783322 - RNA, 22 nt, Human
uccaaauuauucaaguaucucu

SEQ ID NO: 783323 - RNA, 24 nt, Human
ucccacugcacuccagccugggca

SEQ ID NO: 783324 - RNA, 27 nt, Human
uccucagguucaaacacugcauuuucu

SEQ ID NO: 783325 - RNA, 19 nt, Human
ucuccuuucccuuuacccu

SEQ ID NO: 783326 - RNA, 18 nt, Human
ucuggccaggugcggugg

SEQ ID NO: 783327 - RNA, 19 nt, Human
ugaaaaagagcauauguga

SEQ ID NO: 783328 - RNA, 22 nt, Human
ugacaaauuuuauaaccuuaac

SEQ ID NO: 783329 - RNA, 18 nt, Human
ugagaggaaggguggcug

SEQ ID NO: 783330 - RNA, 27 nt, Human
ugagaggaaggguggcugcgagaggaa

SEQ ID NO: 783331 - RNA, 24 nt, Human
ugaggcacgagaaucccuugaacc

SEQ ID NO: 783332 - RNA, 23 nt, Human
ugaggccaggaguucaaaaccag

SEQ ID NO: 783333 - RNA, 20 nt, Human
ugaugacaaaccaagagcuc

SEQ ID NO: 783334 - RNA, 22 nt, Human
ugcaaaauccuucggcaagaca

SEQ ID NO: 783335 - RNA, 24 nt, Human
ugccugcagucccagcuacucagg

SEQ ID NO: 783336 - RNA, 19 nt, Human
uggcagaaguugcagugag

SEQ ID NO: 783337 - RNA, 21 nt, Human
uggcagaaguugcagugagcc

SEQ ID NO: 783338 - RNA, 24 nt, Human
uggccaggugcgguggcucacacc

SEQ ID NO: 783339 - RNA, 24 nt, Human
uggcgcgugccugcagucccagcu

SEQ ID NO: 783340 - RNA, 21 nt, Human
uggcucacaccuguaauccca

SEQ ID NO: 783341 - RNA, 22 nt, Human
uggcucacaccuguaaucccag

SEQ ID NO: 783342 - RNA, 24 nt, Human
uggcucacaccuguaaucccagca

SEQ ID NO: 783343 - RNA, 20 nt, Human
ugggaggccaaggugggcag

SEQ ID NO: 783344 - RNA, 24 nt, Human
ugggaggccaaggugggcagauca

SEQ ID NO: 783345 - RNA, 24 nt, Human
ugggcagaucaccugaggccagga

SEQ ID NO: 783346 - RNA, 24 nt, Human
uggggguggggaagugugugauug

SEQ ID NO: 783347 - RNA, 26 nt, Human
uuaaaagucuucucaauacucuuucu

SEQ ID NO: 783348 - RNA, 23 nt, Human
uuaaaauaaacacuagggcuacc

SEQ ID NO: 783349 - RNA, 22 nt, Human
uuaggguuuaccugaauauguc

SEQ ID NO: 783350 - RNA, 20 nt, Human
uuccucagguucaaacacug

SEQ ID NO: 783351 - RNA, 21 nt, Human
uuccuuaauucuccuuucccu

SEQ ID NO: 783352 - RNA, 24 nt, Human
uucuuacucaaagaucuucucaaa

SEQ ID NO: 783353 - RNA, 20 nt, Human
uucuucuuugaacaaagaug

SEQ ID NO: 783354 - RNA, 20 nt, Human
uugaauauugauccaggaau

SEQ ID NO: 783355 - RNA, 20 nt, Human
uugcagugagccaagaucau

SEQ ID NO: 783356 - RNA, 23 nt, Human
uuuccaauaaugaguuucuuaca

SEQ ID NO: 783357 - RNA, 19 nt, Human
uuucucaaaaacuacaccu

SEQ ID NO: 783358 - RNA, 20 nt, Human
aaaccgaggggccucugccg

SEQ ID NO: 783359 - RNA, 24 nt, Human
aaagacagcagcguggggcuuggg

SEQ ID NO: 783360 - RNA, 23 nt, Human
aaagcgagcaguuuccccagccc

SEQ ID NO: 783361 - RNA, 20 nt, Human
aagcaccccugccgaucucc

SEQ ID NO: 783362 - RNA, 18 nt, Human
aagccguccgaacagcgg

SEQ ID NO: 783363 - RNA, 18 nt, Human
aagcggccccccacaauc

SEQ ID NO: 783364 - RNA, 21 nt, Human
aagcggccccccacaauccga

SEQ ID NO: 783365 - RNA, 24 nt, Human
aagggggugagggcuugcugcugc

SEQ ID NO: 783366 - RNA, 24 nt, Human
aauaccggaaccugucacugagcc

SEQ ID NO: 783367 - RNA, 22 nt, Human
aauccgaggaggaugagagccc

SEQ ID NO: 783368 - RNA, 21 nt, Human
acagcagcguggggcuugggc

SEQ ID NO: 783369 - RNA, 21 nt, Human
acggaaccucacagucacgcc

SEQ ID NO: 783370 - RNA, 20 nt, Human
acugccaaaguccacaaucu

SEQ ID NO: 783371 - RNA, 25 nt, Human
agaauccgaggaggaugagagcccc

SEQ ID NO: 783372 - RNA, 19 nt, Human
agacagaggaaggcaacaa

SEQ ID NO: 783373 - RNA, 20 nt, Human
agacccccguccugccgcag

SEQ ID NO: 783374 - RNA, 18 nt, Human
agacuggggggaagucug

SEQ ID NO: 783375 - RNA, 19 nt, Human
agagaagccccagcggagc

SEQ ID NO: 783376 - RNA, 21 nt, Human
agcaccaucccacaccagcag

SEQ ID NO: 783377 - RNA, 23 nt, Human
agcacgugguggccguggaggua

SEQ ID NO: 783378 - RNA, 21 nt, Human
agcaggguggcugccuccccc

SEQ ID NO: 783379 - RNA, 21 nt, Human
agcagguugucuggcuugaug

SEQ ID NO: 783380 - RNA, 20 nt, Human
agcagugcaggcugcagcag

SEQ ID NO: 783381 - RNA, 24 nt, Human
agccagagaacucgggcugcagug

SEQ ID NO: 783382 - RNA, 18 nt, Human
agcccagggacucggcgg

SEQ ID NO: 783383 - RNA, 18 nt, Human
agccgggccucccgacgc

SEQ ID NO: 783384 - RNA, 20 nt, Human
agccuggccagcagccgggc

SEQ ID NO: 783385 - RNA, 21 nt, Human
agccuggccagcagccgggcc

SEQ ID NO: 783386 - RNA, 19 nt, Human
agcgcucaggccgucgcac

SEQ ID NO: 783387 - RNA, 24 nt, Human
agcggcgugcugcggcccgacgcg

SEQ ID NO: 783388 - RNA, 19 nt, Human
agcucggugacaaugacca

SEQ ID NO: 783389 - RNA, 18 nt, Human
aggagguguggggggaga

SEQ ID NO: 783390 - RNA, 21 nt, Human
aggcagagcaggguggcugcc

SEQ ID NO: 783391 - RNA, 21 nt, Human
aggcucaggagggggcucagg

SEQ ID NO: 783392 - RNA, 18 nt, Human
aggcucugcacagucacc

SEQ ID NO: 783393 - RNA, 21 nt, Human
agggggcucaggggcuggggg

SEQ ID NO: 783394 - RNA, 20 nt, Human
agguguagacgccuccaucc

SEQ ID NO: 783395 - RNA, 18 nt, Human
aguuuccccagcccccac

SEQ ID NO: 783396 - RNA, 26 nt, Human
auacuggcaguacuggggcucuccug

SEQ ID NO: 783397 - RNA, 21 nt, Human
auagcaggcagcuuugcccag

SEQ ID NO: 783398 - RNA, 21 nt, Human
aucaaagcggccccccacaau

SEQ ID NO: 783399 - RNA, 19 nt, Human
augcugcccaguacguugg

SEQ ID NO: 783400 - RNA, 22 nt, Human
caaagcggccccccacaauccg

SEQ ID NO: 783401 - RNA, 19 nt, Human
caacaacacccacaggcca

SEQ ID NO: 783402 - RNA, 21 nt, Human
caaggggccuaagggccuggg

SEQ ID NO: 783403 - RNA, 19 nt, Human
cacacagacuccccaucca

SEQ ID NO: 783404 - RNA, 20 nt, Human
cacaccagcagguucucagg

SEQ ID NO: 783405 - RNA, 18 nt, Human
cacagccacgguacagga

SEQ ID NO: 783406 - RNA, 20 nt, Human
caccaagcgauggacauccc

SEQ ID NO: 783407 - RNA, 20 nt, Human
caccagcgccguguccuggu

SEQ ID NO: 783408 - RNA, 22 nt, Human
caccagcuccagcggggucccc

SEQ ID NO: 783409 - RNA, 24 nt, Human
caccaggcacucaaacagcgccau

SEQ ID NO: 783410 - RNA, 21 nt, Human
cacccgggagccagagaacuc

SEQ ID NO: 783411 - RNA, 22 nt, Human
caccuccacaucuuccagcagc

SEQ ID NO: 783412 - RNA, 22 nt, Human
caccucugcgcccuuugccuga

SEQ ID NO: 783413 - RNA, 20 nt, Human
cacgugguggccguggaggu

SEQ ID NO: 783414 - RNA, 18 nt, Human
cacugagggcagcucuuc

SEQ ID NO: 783415 - RNA, 25 nt, Human
cacugagggcucugaccucaaggac

SEQ ID NO: 783416 - RNA, 18 nt, Human
cacuguguacgucaggga

SEQ ID NO: 783417 - RNA, 22 nt, Human
cagacacaaaggaagucaccac

SEQ ID NO: 783418 - RNA, 20 nt, Human
cagacuccuggggggguucc

SEQ ID NO: 783419 - RNA, 22 nt, Human
cagagcaggguggcugccuccc

SEQ ID NO: 783420 - RNA, 20 nt, Human
cagcaccaucccacaccagc

SEQ ID NO: 783421 - RNA, 21 nt, Human
cagcagcagguugucuggcuu

SEQ ID NO: 783422 - RNA, 21 nt, Human
cagcagcguggggcuugggcu

SEQ ID NO: 783423 - RNA, 22 nt, Human
cagcaggagcuagggguggggc

SEQ ID NO: 783424 - RNA, 23 nt, Human
cagcccccaccuccacguccucc

SEQ ID NO: 783425 - RNA, 21 nt, Human
cagccgcagccccagcgacag

SEQ ID NO: 783426 - RNA, 22 nt, Human
cagccgcagccccagcgacagg

SEQ ID NO: 783427 - RNA, 21 nt, Human
cagccgcuccagcucacccug

SEQ ID NO: 783428 - RNA, 22 nt, Human
cagccgguccugcaccaacacu

SEQ ID NO: 783429 - RNA, 23 nt, Human
cagcucacccugcucuggcuccu

SEQ ID NO: 783430 - RNA, 22 nt, Human
caggcggccacggcacagccaa

SEQ ID NO: 783431 - RNA, 18 nt, Human
caggcucuccgacagccc

SEQ ID NO: 783432 - RNA, 23 nt, Human
cagggcaggccgcuggcaggcag

SEQ ID NO: 783433 - RNA, 24 nt, Human
caggggccagcagcagguugucug

SEQ ID NO: 783434 - RNA, 22 nt, Human
caggggcugguggugcagacac

SEQ ID NO: 783435 - RNA, 19 nt, Human
cagggugaagcucagccgc

SEQ ID NO: 783436 - RNA, 23 nt, Human
cagugggccccgccaccaggcac

SEQ ID NO: 783437 - RNA, 23 nt, Human
cauccugggcccccgugcugagc

SEQ ID NO: 783438 - RNA, 20 nt, Human
cauuuguagcugaucuggga

SEQ ID NO: 783439 - RNA, 24 nt, Human
ccaacaccuccacaucuuccagca

SEQ ID NO: 783440 - RNA, 20 nt, Human
ccacaaucuugagggcauug

SEQ ID NO: 783441 - RNA, 21 nt, Human
ccacugggggguggccuucug

SEQ ID NO: 783442 - RNA, 20 nt, Human
ccagacgaccugggccucca

SEQ ID NO: 783443 - RNA, 20 nt, Human
ccaggcacucaaacagcgcc

SEQ ID NO: 783444 - RNA, 19 nt, Human
ccaguacguugguggccga

SEQ ID NO: 783445 - RNA, 18 nt, Human
ccaucccacaccagcagg

SEQ ID NO: 783446 - RNA, 20 nt, Human
ccaucgaaaugcaucuugca

SEQ ID NO: 783447 - RNA, 22 nt, Human
ccaucuccggagccaugaacuc

SEQ ID NO: 783448 - RNA, 23 nt, Human
cccacggcagggaacaccaagcg

SEQ ID NO: 783449 - RNA, 18 nt, Human
cccaggccggguggcgcu

SEQ ID NO: 783450 - RNA, 18 nt, Human
cccaggggagcugaccac

SEQ ID NO: 783451 - RNA, 24 nt, Human
cccaggggagcugaccaccuccuu

SEQ ID NO: 783452 - RNA, 21 nt, Human
ccccacggcagggaacaccaa

SEQ ID NO: 783453 - RNA, 21 nt, Human
ccccacugggggguggccuuc

SEQ ID NO: 783454 - RNA, 19 nt, Human
cccccacaauccgagccuc

SEQ ID NO: 783455 - RNA, 18 nt, Human
cccccacugggggguggc

SEQ ID NO: 783456 - RNA, 18 nt, Human
cccccaugucccggcggc

SEQ ID NO: 783457 - RNA, 22 nt, Human
cccccguccugccgcagccgca

SEQ ID NO: 783458 - RNA, 20 nt, Human
ccccgacccccucgaccucc

SEQ ID NO: 783459 - RNA, 22 nt, Human
ccccgccgcgggccucccaggc

SEQ ID NO: 783460 - RNA, 19 nt, Human
ccccgcgccgagcucccgc

SEQ ID NO: 783461 - RNA, 23 nt, Human
ccccgcgccgagcucccgcccuc

SEQ ID NO: 783462 - RNA, 24 nt, Human
ccccgcgccgagcucccgcccucc

SEQ ID NO: 783463 - RNA, 21 nt, Human
ccccggcgccucucgaaggcc

SEQ ID NO: 783464 - RNA, 24 nt, Human
ccccgggccucccugcucaggcuc

SEQ ID NO: 783465 - RNA, 25 nt, Human
ccccgugcugagcaccaccagggag

SEQ ID NO: 783466 - RNA, 18 nt, Human
ccccuggcuuucuccucc

SEQ ID NO: 783467 - RNA, 21 nt, Human
cccgcagcaccaucccacacc

SEQ ID NO: 783468 - RNA, 21 nt, Human
cccgccaccaggcacucaaac

SEQ ID NO: 783469 - RNA, 18 nt, Human
cccgcgccgagcucccgc

SEQ ID NO: 783470 - RNA, 18 nt, Human
cccguccugccgcagccg

SEQ ID NO: 783471 - RNA, 20 nt, Human
cccguccugccgcagccgca

SEQ ID NO: 783472 - RNA, 23 nt, Human
cccgugcugagcaccaccaggga

SEQ ID NO: 783473 - RNA, 22 nt, Human
cccucggcagcauagggcacga

SEQ ID NO: 783474 - RNA, 19 nt, Human
cccuugaggaguggaggcu

SEQ ID NO: 783475 - RNA, 21 nt, Human
ccgacgcgccccccgaguccu

SEQ ID NO: 783476 - RNA, 19 nt, Human
ccgagcccagcaccuggug

SEQ ID NO: 783477 - RNA, 19 nt, Human
ccgcgccgagcucccgccc

SEQ ID NO: 783478 - RNA, 22 nt, Human
ccggagcuacgcuccacuaugc

SEQ ID NO: 783479 - RNA, 21 nt, Human
ccguccccgccgcgggccucc

SEQ ID NO: 783480 - RNA, 24 nt, Human
ccucagaauaccggaaccugucac

SEQ ID NO: 783481 - RNA, 22 nt, Human
ccuccacaucuuccagcagccg

SEQ ID NO: 783482 - RNA, 22 nt, Human
ccuccacgucagugggccccgc

SEQ ID NO: 783483 - RNA, 21 nt, Human
ccuccagguccugcaguggcc

SEQ ID NO: 783484 - RNA, 23 nt, Human
ccuccauggggcagccaaaauga

SEQ ID NO: 783485 - RNA, 22 nt, Human
ccucccugcucaggcucaggaa

SEQ ID NO: 783486 - RNA, 24 nt, Human
ccucgaugguccucauccuccccg

SEQ ID NO: 783487 - RNA, 19 nt, Human
ccucggagcccagggacuc

SEQ ID NO: 783488 - RNA, 20 nt, Human
ccucgggaauggauggcauc

SEQ ID NO: 783489 - RNA, 23 nt, Human
ccugacaaagaccuucucagaag

SEQ ID NO: 783490 - RNA, 18 nt, Human
ccugcaggacccgccgcu

SEQ ID NO: 783491 - RNA, 19 nt, Human
ccugcaggacccgccgcuu

SEQ ID NO: 783492 - RNA, 19 nt, Human
ccuugaggaguggaggcug

SEQ ID NO: 783493 - RNA, 21 nt, Human
cgaggggcccugggcguggcc

SEQ ID NO: 783494 - RNA, 24 nt, Human
cgcaucgccagcaccggggagccc

SEQ ID NO: 783495 - RNA, 25 nt, Human
cgccaccaggcacucaaacagcgcc

SEQ ID NO: 783496 - RNA, 18 nt, Human
cgccccguggcauucucc

SEQ ID NO: 783497 - RNA, 22 nt, Human
cgcccuccgagcucucuccguc

SEQ ID NO: 783498 - RNA, 21 nt, Human
cgccgcuccagcguauacgug

SEQ ID NO: 783499 - RNA, 18 nt, Human
cgcugccaccuccgccgg

SEQ ID NO: 783500 - RNA, 23 nt, Human
cggaaccucacagucacgccagu

SEQ ID NO: 783501 - RNA, 19 nt, Human
cggcacagccaauccaccu

SEQ ID NO: 783502 - RNA, 19 nt, Human
cggccccuggcuuucuccu

SEQ ID NO: 783503 - RNA, 21 nt, Human
cggcgcggcagggcccugcga

SEQ ID NO: 783504 - RNA, 21 nt, Human
cgggggugugggggcagcagg

SEQ ID NO: 783505 - RNA, 22 nt, Human
cguggggcuugggcucugaagg

SEQ ID NO: 783506 - RNA, 23 nt, Human
cuacaaacucaggugugccauac

SEQ ID NO: 783507 - RNA, 18 nt, Human
cuacauacagcugggcug

SEQ ID NO: 783508 - RNA, 19 nt, Human
cucacccugcucuggcucc

SEQ ID NO: 783509 - RNA, 18 nt, Human
cucagacucacacacggu

SEQ ID NO: 783510 - RNA, 20 nt, Human
cucaggccgucgcaccagcu

SEQ ID NO: 783511 - RNA, 22 nt, Human
cuccaacaccuccacaucuucc

SEQ ID NO: 783512 - RNA, 22 nt, Human
cuccaggaagguguaggguuuc

SEQ ID NO: 783513 - RNA, 22 nt, Human
cuccauccugggcccccgugcu

SEQ ID NO: 783514 - RNA, 23 nt, Human
cucccuucaccaucuccggagcc

SEQ ID NO: 783515 - RNA, 22 nt, Human
cucgcacaacaccaaagcggcc

SEQ ID NO: 783516 - RNA, 19 nt, Human
cucguacacaccggcccgu

SEQ ID NO: 783517 - RNA, 21 nt, Human
cucguacacgaagcucacaug

SEQ ID NO: 783518 - RNA, 19 nt, Human
cugaaugcacagccaacuc

SEQ ID NO: 783519 - RNA, 20 nt, Human
cugacaaagaccuucucaga

SEQ ID NO: 783520 - RNA, 24 nt, Human
cugagcccacagaggaguucccgg

SEQ ID NO: 783521 - RNA, 22 nt, Human
cugagcucacagggugccacac

SEQ ID NO: 783522 - RNA, 23 nt, Human
cugcaggccccugugucuucgug

SEQ ID NO: 783523 - RNA, 19 nt, Human
cugcucuggaugcgguggc

SEQ ID NO: 783524 - RNA, 20 nt, Human
cuggagccuggccagcagcc

SEQ ID NO: 783525 - RNA, 19 nt, Human
cuggcaaagacagcagcgu

SEQ ID NO: 783526 - RNA, 21 nt, Human
cugucccuccaccacauacac

SEQ ID NO: 783527 - RNA, 27 nt, Human
cuguccggggcucuucuacauacagcu

SEQ ID NO: 783528 - RNA, 19 nt, Human
cuuccacagcaccagcgcc

SEQ ID NO: 783529 - RNA, 24 nt, Human
cuugaacuuggccucgaacacggc

SEQ ID NO: 783530 - RNA, 19 nt, Human
gaacacggccuccgacucc

SEQ ID NO: 783531 - RNA, 18 nt, Human
gaagaugugcuggacccc

SEQ ID NO: 783532 - RNA, 18 nt, Human
gacccgccgcuugcccuc

SEQ ID NO: 783533 - RNA, 18 nt, Human
gagaagccccagcggagc

SEQ ID NO: 783534 - RNA, 20 nt, Human
gagagccccccacugggggg

SEQ ID NO: 783535 - RNA, 18 nt, Human
gagaugugcggugcaggg

SEQ ID NO: 783536 - RNA, 20 nt, Human
gagcaguuuccccagccccc

SEQ ID NO: 783537 - RNA, 22 nt, Human
gagcgcgaacggcucagcagcc

SEQ ID NO: 783538 - RNA, 18 nt, Human
gagguguggggggagaug

SEQ ID NO: 783539 - RNA, 21 nt, Human
gaugagagccccccacugggg

SEQ ID NO: 783540 - RNA, 20 nt, Human
gauguucuagggucucuucu

SEQ ID NO: 783541 - RNA, 19 nt, Human
gcacacccgcuccccagau

SEQ ID NO: 783542 - RNA, 18 nt, Human
gcacagcugaagaaucuu

SEQ ID NO: 783543 - RNA, 25 nt, Human
gcacaggcucagaagggggggaacc

SEQ ID NO: 783544 - RNA, 25 nt, Human
gcagcguggggcuugggcucugaag

SEQ ID NO: 783545 - RNA, 20 nt, Human
gcagguguagacgccuccau

SEQ ID NO: 783546 - RNA, 19 nt, Human
gcagucgaaacgggcagcu

SEQ ID NO: 783547 - RNA, 23 nt, Human
gcaucgccagcaccggggagccc

SEQ ID NO: 783548 - RNA, 22 nt, Human
gccaauccaccuccacgucagu

SEQ ID NO: 783549 - RNA, 21 nt, Human
gccauggguguuaacagcacu

SEQ ID NO: 783550 - RNA, 23 nt, Human
gcccccaccuccacguccuccau

SEQ ID NO: 783551 - RNA, 22 nt, Human
gcccccaugucccggcggcuca

SEQ ID NO: 783552 - RNA, 20 nt, Human
gccccuggcuuucuccucca

SEQ ID NO: 783553 - RNA, 23 nt, Human
gcccgcagcagcucggggauggg

SEQ ID NO: 783554 - RNA, 18 nt, Human
gcccuggcuggccuugag

SEQ ID NO: 783555 - RNA, 22 nt, Human
gcccuggcuggccuugagguga

SEQ ID NO: 783556 - RNA, 25 nt, Human
gccgcuggcaggcagagcagggugg

SEQ ID NO: 783557 - RNA, 19 nt, Human
gccuccuuggccaguccca

SEQ ID NO: 783558 - RNA, 20 nt, Human
gccuggggguuguagggcug

SEQ ID NO: 783559 - RNA, 18 nt, Human
gcggccccccacaauccg

SEQ ID NO: 783560 - RNA, 19 nt, Human
gcggcgcggcagggcccug

SEQ ID NO: 783561 - RNA, 24 nt, Human
gcggcgugcugcggcccgacgcgc

SEQ ID NO: 783562 - RNA, 21 nt, Human
gcuacaaacucaggugugcca

SEQ ID NO: 783563 - RNA, 24 nt, Human
gcucagcucguacacaccggcccg

SEQ ID NO: 783564 - RNA, 23 nt, Human
gcucgcacaacaccaaagcggcc

SEQ ID NO: 783565 - RNA, 19 nt, Human
gcugagcaccaccagggag

SEQ ID NO: 783566 - RNA, 23 nt, Human
gcugcagugggcggggcacugag

SEQ ID NO: 783567 - RNA, 19 nt, Human
gcugcucucggucagcagc

SEQ ID NO: 783568 - RNA, 20 nt, Human
ggaaggcaacaacacccaca

SEQ ID NO: 783569 - RNA, 22 nt, Human
ggaaggcaacaacacccacagg

SEQ ID NO: 783570 - RNA, 21 nt, Human
ggaguucccgguugccacagc

SEQ ID NO: 783571 - RNA, 19 nt, Human
ggaugucauaaaagucgcu

SEQ ID NO: 783572 - RNA, 18 nt, Human
ggcagagagguuuggugg

SEQ ID NO: 783573 - RNA, 24 nt, Human
ggcaguacuggggcucuccuggag

SEQ ID NO: 783574 - RNA, 21 nt, Human
ggccgggcagccugcaggccc

SEQ ID NO: 783575 - RNA, 23 nt, Human
ggcgccggccugggcggccaacu

SEQ ID NO: 783576 - RNA, 18 nt, Human
ggcgcggcagggcccugc

SEQ ID NO: 783577 - RNA, 19 nt, Human
ggcggugcaggugagggcc

SEQ ID NO: 783578 - RNA, 21 nt, Human
ggcguggccugacagcuggag

SEQ ID NO: 783579 - RNA, 22 nt, Human
ggcucaggggcugggggcucag

SEQ ID NO: 783580 - RNA, 19 nt, Human
gggacagugacagcgagag

SEQ ID NO: 783581 - RNA, 20 nt, Human
gggagagcuucggggacugc

SEQ ID NO: 783582 - RNA, 21 nt, Human
gggagcacucauucuccucgu

SEQ ID NO: 783583 - RNA, 22 nt, Human
gggaguccgggucgauggccau

SEQ ID NO: 783584 - RNA, 24 nt, Human
gggaugccugagcucacagggugc

SEQ ID NO: 783585 - RNA, 18 nt, Human
gggcagcaggagcuaggg

SEQ ID NO: 783586 - RNA, 19 nt, Human
gggccucugccagcuccaa

SEQ ID NO: 783587 - RNA, 19 nt, Human
gggcugggggcucaggggc

SEQ ID NO: 783588 - RNA, 18 nt, Human
gggcuugggcucugaagg

SEQ ID NO: 783589 - RNA, 19 nt, Human
ggggagccccgcgccgagc

SEQ ID NO: 783590 - RNA, 22 nt, Human
ggggcccgcagcagcucgggga

SEQ ID NO: 783591 - RNA, 18 nt, Human
gggggcagcaggagcuag

SEQ ID NO: 783592 - RNA, 24 nt, Human
gggggcagcaggagcuaggggugg

SEQ ID NO: 783593 - RNA, 25 nt, Human
ggggguggccuucugggcaugguca

SEQ ID NO: 783594 - RNA, 20 nt, Human
gggggugugggggcagcagg

SEQ ID NO: 783595 - RNA, 23 nt, Human
ggggugccacugaucuugcaguc

SEQ ID NO: 783596 - RNA, 23 nt, Human
ggguagggugggcuccgcuggcc

SEQ ID NO: 783597 - RNA, 23 nt, Human
gggugauguaggccucgugcagg

SEQ ID NO: 783598 - RNA, 18 nt, Human
ggguugggccgugcucca

SEQ ID NO: 783599 - RNA, 19 nt, Human
gguccccgccgggcugggc

SEQ ID NO: 783600 - RNA, 18 nt, Human
ggugugggggcagcagga

SEQ ID NO: 783601 - RNA, 19 nt, Human
guacaggagcuggugaugc

SEQ ID NO: 783602 - RNA, 19 nt, Human
gugagggcccccauguccc

SEQ ID NO: 783603 - RNA, 24 nt, Human
gugcggugcagggcaggccgcugg

SEQ ID NO: 783604 - RNA, 21 nt, Human
gugcgguggccaaggggccua

SEQ ID NO: 783605 - RNA, 22 nt, Human
gugcuggacccccuuacgcagc

SEQ ID NO: 783606 - RNA, 20 nt, Human
guggagcacgugguggccgg

SEQ ID NO: 783607 - RNA, 20 nt, Human
guggggcuugggcucugaag

SEQ ID NO: 783608 - RNA, 30 nt, Human
guggugcagacacaaaggaagucaccgucc

SEQ ID NO: 783609 - RNA, 23 nt, Human
guguagacgccuccauccugggc

SEQ ID NO: 783610 - RNA, 18 nt, Human
gugugggggcagcaggag

SEQ ID NO: 783611 - RNA, 27 nt, Human
uaagugagcacacccgcuccccugaag

SEQ ID NO: 783612 - RNA, 21 nt, Human
uacgcagcccuguggcugccc

SEQ ID NO: 783613 - RNA, 23 nt, Human
uacuggugacccaacuccuccug

SEQ ID NO: 783614 - RNA, 22 nt, Human
uagcuucaggugauccgugcuc

SEQ ID NO: 783615 - RNA, 24 nt, Human
uaggagguguggggggagaugagg

SEQ ID NO: 783616 - RNA, 21 nt, Human
uaggcucaggagggggcucag

SEQ ID NO: 783617 - RNA, 20 nt, Human
uagggucucuucugcgguag

SEQ ID NO: 783618 - RNA, 20 nt, Human
ucacugagcccacagaggag

SEQ ID NO: 783619 - RNA, 18 nt, Human
ucagaagaguugcugaag

SEQ ID NO: 783620 - RNA, 21 nt, Human
ucagaauaccggaaccuguca

SEQ ID NO: 783621 - RNA, 18 nt, Human
ucagcagccgcagcccca

SEQ ID NO: 783622 - RNA, 22 nt, Human
ucaggugauccgugcucaccuc

SEQ ID NO: 783623 - RNA, 22 nt, Human
uccaccacauacacgaugucug

SEQ ID NO: 783624 - RNA, 22 nt, Human
uccaccacauacacgaugucug

SEQ ID NO: 783625 - RNA, 25 nt, Human
uccaccacauacacgaugucugguu

SEQ ID NO: 783626 - RNA, 22 nt, Human
uccagacgaccugggccuccac

SEQ ID NO: 783627 - RNA, 27 nt, Human
uccagcucuuccucuucaggggccgcc

SEQ ID NO: 783628 - RNA, 18 nt, Human
uccaggccggagcuacgc

SEQ ID NO: 783629 - RNA, 24 nt, Human
uccccgccgcgggccucccaggcc

SEQ ID NO: 783630 - RNA, 18 nt, Human
uccgcggccgagagaagc

SEQ ID NO: 783631 - RNA, 24 nt, Human
uccgcggccgagagaagccccagc

SEQ ID NO: 783632 - RNA, 22 nt, Human
uccuccccgacccccucgaccu

SEQ ID NO: 783633 - RNA, 19 nt, Human
uccucgcugcugccacugc

SEQ ID NO: 783634 - RNA, 19 nt, Human
ucggcagcauagggcacga

SEQ ID NO: 783635 - RNA, 23 nt, Human
ucgggcugcagugggcggggcaa

SEQ ID NO: 783636 - RNA, 21 nt, Human
ucuccagcuucgagcuggggc

SEQ ID NO: 783637 - RNA, 22 nt, Human
ucuccuccauggggcagccaaa

SEQ ID NO: 783638 - RNA, 26 nt, Human
ucucgcccucggacguggcccugcga

SEQ ID NO: 783639 - RNA, 19 nt, Human
ucugguuuguccagcaugg

SEQ ID NO: 783640 - RNA, 27 nt, Human
ucuuccagcagccgugugaacaggggu

SEQ ID NO: 783641 - RNA, 21 nt, Human
ugaagaaucuugaguaccccu

SEQ ID NO: 783642 - RNA, 18 nt, Human
ugaccgagcaggucugug

SEQ ID NO: 783643 - RNA, 21 nt, Human
ugagcacacccgcuccccaga

SEQ ID NO: 783644 - RNA, 23 nt, Human
ugagcagugcaggcugcagcagg

SEQ ID NO: 783645 - RNA, 18 nt, Human
ugagcauaauguaaguga

SEQ ID NO: 783646 - RNA, 18 nt, Human
ugagcauaauguaaguga

SEQ ID NO: 783647 - RNA, 18 nt, Human
ugagcugaaugcacagcc

SEQ ID NO: 783648 - RNA, 21 nt, Human
ugagggcuugcugcugcucuu

SEQ ID NO: 783649 - RNA, 26 nt, Human
ugaggugacaggggccucuugguggg

SEQ ID NO: 783650 - RNA, 25 nt, Human
ugaguccagguaacaacagggggcg

SEQ ID NO: 783651 - RNA, 23 nt, Human
ugcagugggcggggcacugaggg

SEQ ID NO: 783652 - RNA, 25 nt, Human
ugccaaaguccacaaucuugagggc

SEQ ID NO: 783653 - RNA, 23 nt, Human
ugccacugaucuugcagucgaaa

SEQ ID NO: 783654 - RNA, 19 nt, Human
ugcccgugcgguggccaag

SEQ ID NO: 783655 - RNA, 20 nt, Human
ugccugaguuuugaaccaag

SEQ ID NO: 783656 - RNA, 18 nt, Human
ugcgaggggcccugggcg

SEQ ID NO: 783657 - RNA, 21 nt, Human
ugcgccggucgucgcugcucu

SEQ ID NO: 783658 - RNA, 23 nt, Human
ugcugcuacugagacugcugccu

SEQ ID NO: 783659 - RNA, 21 nt, Human
ugcugcugcucuugacagugg

SEQ ID NO: 783660 - RNA, 20 nt, Human
uggaagacuggggggaaguc

SEQ ID NO: 783661 - RNA, 21 nt, Human
uggaagacuggggggaagucu

SEQ ID NO: 783662 - RNA, 20 nt, Human
uggacccccuuacgcagccc

SEQ ID NO: 783663 - RNA, 22 nt, Human
uggcaggcugucccuccaccac

SEQ ID NO: 783664 - RNA, 22 nt, Human
uggcaguacuggggcucuccug

SEQ ID NO: 783665 - RNA, 19 nt, Human
uggcauuuguagcugaucu

SEQ ID NO: 783666 - RNA, 20 nt, Human
uggccgggcugaggcucugc

SEQ ID NO: 783667 - RNA, 19 nt, Human
uggcucccgcaggccugug

SEQ ID NO: 783668 - RNA, 21 nt, Human
uggcugccucccccuccagca

SEQ ID NO: 783669 - RNA, 18 nt, Human
uggcuggggaugaacuug

SEQ ID NO: 783670 - RNA, 26 nt, Human
ugggagagcuucggggaccaggagcc

SEQ ID NO: 783671 - RNA, 22 nt, Human
ugggagagcuucggggacugcu

SEQ ID NO: 783672 - RNA, 20 nt, Human
ugggcauggucacccacacc

SEQ ID NO: 783673 - RNA, 21 nt, Human
ugggggcagcaggagcuaggg

SEQ ID NO: 783674 - RNA, 21 nt, Human
ugggggcucaggggcuggugg

SEQ ID NO: 783675 - RNA, 22 nt, Human
uggggggaagucugacucacug

SEQ ID NO: 783676 - RNA, 19 nt, Human
uggggguuguagggcuggg

SEQ ID NO: 783677 - RNA, 19 nt, Human
uggggugguggacccacag

SEQ ID NO: 783678 - RNA, 23 nt, Human
uggugcaggguccgcagcaccuc

SEQ ID NO: 783679 - RNA, 22 nt, Human
ugguugaaugugacggugacgc

SEQ ID NO: 783680 - RNA, 24 nt, Human
uguaagugagcacacccgcucccc

SEQ ID NO: 783681 - RNA, 20 nt, Human
uguaccacaugauguccggc

SEQ ID NO: 783682 - RNA, 23 nt, Human
uguagacaccggcgugcugaggc

SEQ ID NO: 783683 - RNA, 19 nt, Human
ugucccggcggcucacccg

SEQ ID NO: 783684 - RNA, 19 nt, Human
uguccggucauuuucccca

SEQ ID NO: 783685 - RNA, 22 nt, Human
ugucuagguggagcacguggug

SEQ ID NO: 783686 - RNA, 23 nt, Human
ugugggggcagcaggagcuaggg

SEQ ID NO: 783687 - RNA, 24 nt, Human
ugugggggcagcaggagcuagggg

SEQ ID NO: 783688 - RNA, 26 nt, Human
uuccugggggucuggcuccccggcgg

SEQ ID NO: 783689 - RNA, 22 nt, Human
uugucuuucauccaggagaugu

SEQ ID NO: 783690 - RNA, 18 nt, Human
uuuccccagcccccaccu

SEQ ID NO: 783691 - RNA, 19 nt, Human
uuuccccagcccccaccuu

SEQ ID NO: 783692 - RNA, 21 nt, Human
uuuccuggcgauucgcuccag

SEQ ID NO: 783693 - RNA, 22 nt, Human
uuugaugaggaagccccgggcc

SEQ ID NO: 783694 - RNA, 19 nt, Human
uuuuccccaacaaacgggg

SEQ ID NO: 783695 - RNA, 22 nt, Human
aaacacaaaguucauguucagc

SEQ ID NO: 783696 - RNA, 25 nt, Human
aaacaggaaagaaaggugagaaauc

SEQ ID NO: 783697 - RNA, 28 nt, Human
aaacaggaaagaaaggugagaaauccaa

SEQ ID NO: 783698 - RNA, 22 nt, Human
aaagggagaaaaaaagcaaaaa

SEQ ID NO: 783699 - RNA, 23 nt, Human
aacaccccugccucaggccaaga

SEQ ID NO: 783700 - RNA, 23 nt, Human
aaccugguucuauagugucuucc

SEQ ID NO: 783701 - RNA, 24 nt, Human
aacucagccuccaacccugacccc

SEQ ID NO: 783702 - RNA, 21 nt, Human
aagaacucagccuccaacccu

SEQ ID NO: 783703 - RNA, 25 nt, Human
aagaacucagccuccaacccugacc

SEQ ID NO: 783704 - RNA, 18 nt, Human
aagcaauuuuaaaaaacc

SEQ ID NO: 783705 - RNA, 21 nt, Human
aauauaucaugucaccaaaaa

SEQ ID NO: 783706 - RNA, 18 nt, Human
acaagaaaacugaaccca

SEQ ID NO: 783707 - RNA, 22 nt, Human
accacaucuucugaauccccag

SEQ ID NO: 783708 - RNA, 19 nt, Human
acccacucuccaucccacc

SEQ ID NO: 783709 - RNA, 24 nt, Human
accugguucuauagugucguguac

SEQ ID NO: 783710 - RNA, 21 nt, Human
acugcaguccccggcucugcu

SEQ ID NO: 783711 - RNA, 18 nt, Human
agacuucugucaacccag

SEQ ID NO: 783712 - RNA, 18 nt, Human
agagcaucaucgcucaac

SEQ ID NO: 783713 - RNA, 20 nt, Human
agccuccaacccugacccca

SEQ ID NO: 783714 - RNA, 26 nt, Human
aggcuaaaguacaagaaaacugaacc

SEQ ID NO: 783715 - RNA, 18 nt, Human
agggagaaaaaaagcaaa

SEQ ID NO: 783716 - RNA, 18 nt, Human
aguagagcugaaugcuag

SEQ ID NO: 783717 - RNA, 19 nt, Human
caaaaaauuuacccgagaa

SEQ ID NO: 783718 - RNA, 26 nt, Human
caacaagccacucaccuccucuggga

SEQ ID NO: 783719 - RNA, 21 nt, Human
caccaucuggcugccacucca

SEQ ID NO: 783720 - RNA, 21 nt, Human
caccccugccucaggccaaga

SEQ ID NO: 783721 - RNA, 18 nt, Human
cacucuccaucccacccc

SEQ ID NO: 783722 - RNA, 22 nt, Human
cacucuccaucccaccccaucc

SEQ ID NO: 783723 - RNA, 23 nt, Human
cacucuccaucccaccccauccu

SEQ ID NO: 783724 - RNA, 22 nt, Human
cacugcaguccccggcucugcu

SEQ ID NO: 783725 - RNA, 25 nt, Human
cagccaggcuaaaguacaagaaaac

SEQ ID NO: 783726 - RNA, 25 nt, Human
cagccugggccugcaucucagcagc

SEQ ID NO: 783727 - RNA, 23 nt, Human
caucuucugaauccccaguuccc

SEQ ID NO: 783728 - RNA, 21 nt, Human
ccaacaagccacucaccuccu

SEQ ID NO: 783729 - RNA, 25 nt, Human
ccaacccugaccccaaaucugucca

SEQ ID NO: 783730 - RNA, 19 nt, Human
ccagcccugcagacuucug

SEQ ID NO: 783731 - RNA, 18 nt, Human
ccaucccaccccauccua

SEQ ID NO: 783732 - RNA, 18 nt, Human
cccaccccuaccacuucc

SEQ ID NO: 783733 - RNA, 18 nt, Human
cccaucacacaguagagc

SEQ ID NO: 783734 - RNA, 18 nt, Human
ccccaaaucuguccaacc

SEQ ID NO: 783735 - RNA, 23 nt, Human
cccccaggauuugcgcuuggucu

SEQ ID NO: 783736 - RNA, 24 nt, Human
ccccugccucaggccaagacccaa

SEQ ID NO: 783737 - RNA, 21 nt, Human
cccuggaagguacuacacagg

SEQ ID NO: 783738 - RNA, 22 nt, Human
ccuccaacccugaccccaaauc

SEQ ID NO: 783739 - RNA, 24 nt, Human
ccuccaacccugaccccaaaucug

SEQ ID NO: 783740 - RNA, 21 nt, Human
ccucccaacaagccacucacc

SEQ ID NO: 783741 - RNA, 20 nt, Human
ccuccucucccuuccucaaa

SEQ ID NO: 783742 - RNA, 22 nt, Human
ccucuagacgggcugagagucc

SEQ ID NO: 783743 - RNA, 22 nt, Human
cgagaaauagaaguuuaaaagc

SEQ ID NO: 783744 - RNA, 22 nt, Human
cucaacaccccugccucaggcc

SEQ ID NO: 783745 - RNA, 25 nt, Human
cucagccuccaacccugaccccaaa

SEQ ID NO: 783746 - RNA, 23 nt, Human
cucaggacuccaccccucccaag

SEQ ID NO: 783747 - RNA, 19 nt, Human
cucaggccguuugcucugc

SEQ ID NO: 783748 - RNA, 20 nt, Human
cucccaagugcacugaggua

SEQ ID NO: 783749 - RNA, 22 nt, Human
cucuaaaacacaguaaaguaga

SEQ ID NO: 783750 - RNA, 25 nt, Human
cucugccacacuacagaaauagacc

SEQ ID NO: 783751 - RNA, 18 nt, Human
cuggcaguggaauuggcc

SEQ ID NO: 783752 - RNA, 26 nt, Human
cuuccucccaacaagccacucaccuc

SEQ ID NO: 783753 - RNA, 18 nt, Human
gaagcaccuugccaaagc

SEQ ID NO: 783754 - RNA, 18 nt, Human
gaauccccaguucccucc

SEQ ID NO: 783755 - RNA, 20 nt, Human
gagcucuagagugacagcuc

SEQ ID NO: 783756 - RNA, 20 nt, Human
gagcuuccucccaacaagcc

SEQ ID NO: 783757 - RNA, 23 nt, Human
gcauggcugucggcaaggaagag

SEQ ID NO: 783758 - RNA, 19 nt, Human
gccgcagagucccagaaac

SEQ ID NO: 783759 - RNA, 24 nt, Human
gccuccaacccugaccccaaaucu

SEQ ID NO: 783760 - RNA, 18 nt, Human
gccugcuucccuaccagc

SEQ ID NO: 783761 - RNA, 26 nt, Human
gcuaaaguacaagaaaacugaaccca

SEQ ID NO: 783762 - RNA, 19 nt, Human
gcucugcacuggugccagc

SEQ ID NO: 783763 - RNA, 21 nt, Human
ggaagguacuacacagggugg

SEQ ID NO: 783764 - RNA, 20 nt, Human
ggagaaaagauucugaaucg

SEQ ID NO: 783765 - RNA, 21 nt, Human
ggccaagacccaaaugucuuc

SEQ ID NO: 783766 - RNA, 23 nt, Human
gggccagggcagaaaucauggaa

SEQ ID NO: 783767 - RNA, 24 nt, Human
gggugucuacauggggcuuccucc

SEQ ID NO: 783768 - RNA, 18 nt, Human
gguaagagggaaaaaugc

SEQ ID NO: 783769 - RNA, 18 nt, Human
gguggguggauaguaugu

SEQ ID NO: 783770 - RNA, 22 nt, Human
guccucaaaagaacucagccuc

SEQ ID NO: 783771 - RNA, 20 nt, Human
uaaaaaaccuucaaucaaca

SEQ ID NO: 783772 - RNA, 23 nt, Human
uaaaaaaccuucaaucaacaaua

SEQ ID NO: 783773 - RNA, 26 nt, Human
uaaaagcaauuuuaaaaaaccuucaa

SEQ ID NO: 783774 - RNA, 18 nt, Human
uaccagccugcggaagca

SEQ ID NO: 783775 - RNA, 22 nt, Human
uagaaaaacacaucucugccac

SEQ ID NO: 783776 - RNA, 23 nt, Human
uagaaaaacacaucucugccaca

SEQ ID NO: 783777 - RNA, 18 nt, Human
uagcaucagcuuuuccug

SEQ ID NO: 783778 - RNA, 26 nt, Human
uagugucuuccaucugaccgagcucu

SEQ ID NO: 783779 - RNA, 18 nt, Human
uaucagagcaucaucgcu

SEQ ID NO: 783780 - RNA, 25 nt, Human
uaucaugucaccaaaaaauuuaccc

SEQ ID NO: 783781 - RNA, 18 nt, Human
ucaaaagaacucagccuc

SEQ ID NO: 783782 - RNA, 19 nt, Human
uccaacccugaccccaaau

SEQ ID NO: 783783 - RNA, 18 nt, Human
uccaccccucccaagugc

SEQ ID NO: 783784 - RNA, 18 nt, Human
uccaucuaccaaagauuu

SEQ ID NO: 783785 - RNA, 20 nt, Human
ucccaacaagccacucaccu

SEQ ID NO: 783786 - RNA, 24 nt, Human
ucccaacaagccacucaccuccuc

SEQ ID NO: 783787 - RNA, 23 nt, Human
uccccaauucccccaggauuugc

SEQ ID NO: 783788 - RNA, 20 nt, Human
uccccaguucccuccaucua

SEQ ID NO: 783789 - RNA, 22 nt, Human
uccccaguucccuccaucuacc

SEQ ID NO: 783790 - RNA, 20 nt, Human
uccccggcucugcuggcugu

SEQ ID NO: 783791 - RNA, 18 nt, Human
ucccuaggucaccaucuc

SEQ ID NO: 783792 - RNA, 20 nt, Human
ucccuaggucaccaucucua

SEQ ID NO: 783793 - RNA, 20 nt, Human
ucccuugggugucuacaugg

SEQ ID NO: 783794 - RNA, 26 nt, Human
ucucccaccccuaccacuuccaggua

SEQ ID NO: 783795 - RNA, 18 nt, Human
ucuggaacugagcuuccu

SEQ ID NO: 783796 - RNA, 18 nt, Human
ugaaaagagguaggagua

SEQ ID NO: 783797 - RNA, 21 nt, Human
ugaccgagcucuagagugaca

SEQ ID NO: 783798 - RNA, 24 nt, Human
ugacugggcuuugcuagcaucccu

SEQ ID NO: 783799 - RNA, 21 nt, Human
ugagguaagagggaaaaaugc

SEQ ID NO: 783800 - RNA, 22 nt, Human
ugagguaagagggaaaaaugcc

SEQ ID NO: 783801 - RNA, 19 nt, Human
ugagguaaguucuggaacu

SEQ ID NO: 783802 - RNA, 21 nt, Human
ugcaaaaacucaagagggaga

SEQ ID NO: 783803 - RNA, 18 nt, Human
ugcacuggugccagcugu

SEQ ID NO: 783804 - RNA, 19 nt, Human
ugccacuccaaccaguccu

SEQ ID NO: 783805 - RNA, 19 nt, Human
ugccgcagagucccagaaa

SEQ ID NO: 783806 - RNA, 22 nt, Human
ugccgcagagucccagaaacag

SEQ ID NO: 783807 - RNA, 24 nt, Human
ugccgcagagucccagaaacagga

SEQ ID NO: 783808 - RNA, 18 nt, Human
ugcggaagcaccuugcca

SEQ ID NO: 783809 - RNA, 19 nt, Human
ugcucaggacuccaccccu

SEQ ID NO: 783810 - RNA, 22 nt, Human
uggaagguacuacacagggugg

SEQ ID NO: 783811 - RNA, 26 nt, Human
uggaauuggccuggaauguuugccgu

SEQ ID NO: 783812 - RNA, 21 nt, Human
uggcaguggaauuggccugga

SEQ ID NO: 783813 - RNA, 20 nt, Human
uggcugugcccaguccuggu

SEQ ID NO: 783814 - RNA, 19 nt, Human
ugggaggaauaagcaugag

SEQ ID NO: 783815 - RNA, 21 nt, Human
ugggaguucauucaccuccuc

SEQ ID NO: 783816 - RNA, 24 nt, Human
ugggccaggagcucaggaccaaag

SEQ ID NO: 783817 - RNA, 18 nt, Human
ugucaccaaaaaauuuac

SEQ ID NO: 783818 - RNA, 22 nt, Human
ugugaccaaguacugacugggc

SEQ ID NO: 783819 - RNA, 24 nt, Human
uucaccuccucucccuuccucaaa

SEQ ID NO: 783820 - RNA, 21 nt, Human
uuugcuagcaucccugggcca

SEQ ID NO: 783821 - RNA, 20 nt, Human
uuugguauuuuuaacguccc

SEQ ID NO: 783822 - RNA, 23 nt, Human
aaaacaccuaugaaaacuaugca

SEQ ID NO: 783823 - RNA, 19 nt, Human
aaacagaacucacugugua

SEQ ID NO: 783824 - RNA, 28 nt, Human
aagaacauaaacauaaugaaccuacaag

SEQ ID NO: 783825 - RNA, 21 nt, Human
aagcaagaaaugaauauucug

SEQ ID NO: 783826 - RNA, 21 nt, Human
aagcauccucuugaaacuucc

SEQ ID NO: 783827 - RNA, 22 nt, Human
aaggaagcauccucuugaaacu

SEQ ID NO: 783828 - RNA, 25 nt, Human
acaaaacaccuaugaaaacuaugca

SEQ ID NO: 783829 - RNA, 24 nt, Human
acccaaauccuuccaagaggacuc

SEQ ID NO: 783830 - RNA, 22 nt, Human
agaucucaaagaaauguuuggg

SEQ ID NO: 783831 - RNA, 23 nt, Human
aggcacucauaagcaagaaauga

SEQ ID NO: 783832 - RNA, 26 nt, Human
agugcaggaguguaacauaaguggua

SEQ ID NO: 783833 - RNA, 23 nt, Human
augaaaacuaugcauaugaccuc

SEQ ID NO: 783834 - RNA, 25 nt, Human
augaaccuacaaaaaauaaacagaa

SEQ ID NO: 783835 - RNA, 20 nt, Human
augcauaucauacuaucaca

SEQ ID NO: 783836 - RNA, 20 nt, Human
auggaacaugaaaauggaau

SEQ ID NO: 783837 - RNA, 22 nt, Human
auggaacaugaaaauggaauga

SEQ ID NO: 783838 - RNA, 20 nt, Human
caaaauauuuggggaauuuu

SEQ ID NO: 783839 - RNA, 24 nt, Human
caacagcacauagcuuuauccuaa

SEQ ID NO: 783840 - RNA, 19 nt, Human
cacccaaauccuuccaaga

SEQ ID NO: 783841 - RNA, 23 nt, Human
cagcagaggauguucacggcaca

SEQ ID NO: 783842 - RNA, 23 nt, Human
caggccccaagcuccagcagagg

SEQ ID NO: 783843 - RNA, 19 nt, Human
cauaacaaauggaaaaagu

SEQ ID NO: 783844 - RNA, 22 nt, Human
cauaauuacacacauaccacuu

SEQ ID NO: 783845 - RNA, 20 nt, Human
cccaguaguaaacauagcuu

SEQ ID NO: 783846 - RNA, 26 nt, Human
ccuauggugcacaccaugcaggcacu

SEQ ID NO: 783847 - RNA, 24 nt, Human
cuauaacccuuuuucagaacauuu

SEQ ID NO: 783848 - RNA, 24 nt, Human
cucauaaaauuaagcagaaguaag

SEQ ID NO: 783849 - RNA, 21 nt, Human
cuccaggccccaagcuccagc

SEQ ID NO: 783850 - RNA, 18 nt, Human
cucugggauuggcugccu

SEQ ID NO: 783851 - RNA, 25 nt, Human
cugcagccccaguuugcuccaggcc

SEQ ID NO: 783852 - RNA, 20 nt, Human
cuggaaaacaacagcacaua

SEQ ID NO: 783853 - RNA, 21 nt, Human
cuucucugggauuggcugccu

SEQ ID NO: 783854 - RNA, 21 nt, Human
cuuuauccuaaaggaagcauc

SEQ ID NO: 783855 - RNA, 20 nt, Human
gaacauaaacauaaugaacc

SEQ ID NO: 783856 - RNA, 23 nt, Human
gaacauaaacauaaugaaccuac

SEQ ID NO: 783857 - RNA, 20 nt, Human
gaguuucaauuugugguguc

SEQ ID NO: 783858 - RNA, 19 nt, Human
gcagcuucugaaccugccu

SEQ ID NO: 783859 - RNA, 24 nt, Human
gccccaguuugcuccaggccccaa

SEQ ID NO: 783860 - RNA, 23 nt, Human
ggcacauucccaaccaaaaagga

SEQ ID NO: 783861 - RNA, 19 nt, Human
ggccccaagcuccagcaga

SEQ ID NO: 783862 - RNA, 24 nt, Human
guccucucccucaacugaugcuca

SEQ ID NO: 783863 - RNA, 31 nt, Human
gucuuuagccauaauuacacacauaccacuu

SEQ ID NO: 783864 - RNA, 20 nt, Human
gugucuucacugaugaggga

SEQ ID NO: 783865 - RNA, 21 nt, Human
uaacaaauggaaaaaguuugg

SEQ ID NO: 783866 - RNA, 20 nt, Human
uacaaaacaccuaugaaaac

SEQ ID NO: 783867 - RNA, 23 nt, Human
uacacacauaccacuugcauaua

SEQ ID NO: 783868 - RNA, 18 nt, Human
uacagcaugauagguagg

SEQ ID NO: 783869 - RNA, 22 nt, Human
uaccucauauugacuugguuuc

SEQ ID NO: 783870 - RNA, 22 nt, Human
uagugcaggaguguaacauaag

SEQ ID NO: 783871 - RNA, 24 nt, Human
uauccuaaaggaagcauccucuug

SEQ ID NO: 783872 - RNA, 25 nt, Human
uauuguaaugucccuucaccuuugg

SEQ ID NO: 783873 - RNA, 25 nt, Human
ucaagcucacccaaauccuuccaag

SEQ ID NO: 783874 - RNA, 23 nt, Human
ucacccaaauccuuccaagagga

SEQ ID NO: 783875 - RNA, 19 nt, Human
ucagaacauuucuucacac

SEQ ID NO: 783876 - RNA, 24 nt, Human
uccacagagaugggcauucagcuu

SEQ ID NO: 783877 - RNA, 25 nt, Human
ucccaguaguaaacauaggguaccc

SEQ ID NO: 783878 - RNA, 22 nt, Human
uccugagucccuaaaaauuacc

SEQ ID NO: 783879 - RNA, 20 nt, Human
ucuauaaaauguaagauugc

SEQ ID NO: 783880 - RNA, 24 nt, Human
ucugcagccccaguuugcuccagg

SEQ ID NO: 783881 - RNA, 19 nt, Human
ucugcagucucgcguccuc

SEQ ID NO: 783882 - RNA, 18 nt, Human
ucugcuucucugggauug

SEQ ID NO: 783883 - RNA, 22 nt, Human
ugauggaguugcuguuagucau

SEQ ID NO: 783884 - RNA, 19 nt, Human
ugcacaccaugcaggcacu

SEQ ID NO: 783885 - RNA, 24 nt, Human
ugcaguacgugccuuuagugcagg

SEQ ID NO: 783886 - RNA, 23 nt, Human
ugcauaucauacuaucacauaua

SEQ ID NO: 783887 - RNA, 21 nt, Human
ugccaacaucccauaauagga

SEQ ID NO: 783888 - RNA, 20 nt, Human
ugccauagaaaaacugucuc

SEQ ID NO: 783889 - RNA, 19 nt, Human
ugcccgaguaugcauggaa

SEQ ID NO: 783890 - RNA, 23 nt, Human
ugcuccaggccccaagcuccagc

SEQ ID NO: 783891 - RNA, 24 nt, Human
ugcuccaggccccaagcuccagcc

SEQ ID NO: 783892 - RNA, 20 nt, Human
uggaaaaaguuuggcaguca

SEQ ID NO: 783893 - RNA, 22 nt, Human
uggaguugcuguuagucauauu

SEQ ID NO: 783894 - RNA, 18 nt, Human
uggcugccuacaaagcuc

SEQ ID NO: 783895 - RNA, 22 nt, Human
uuacacacauaccacuugcaua

SEQ ID NO: 783896 - RNA, 20 nt, Human
uucaagauucuccugagucc

SEQ ID NO: 783897 - RNA, 22 nt, Human
uucaugaucaauaaguacaaag

SEQ ID NO: 783898 - RNA, 20 nt, Human
uuccauggcugcuuauaaau

SEQ ID NO: 783899 - RNA, 21 nt, Human
uuggagaugccauagaaaaac

SEQ ID NO: 783900 - RNA, 18 nt, Human
aaaauaccaucauugugg

SEQ ID NO: 783901 - RNA, 22 nt, Human
aaaauuucgaaacagacuagcc

SEQ ID NO: 783902 - RNA, 18 nt, Human
aaacagacuagccaccag

SEQ ID NO: 783903 - RNA, 23 nt, Human
aaagaacacuuuucaaaauacca

SEQ ID NO: 783904 - RNA, 24 nt, Human
aaagaacacuuuucaaaauaccau

SEQ ID NO: 783905 - RNA, 19 nt, Human
aaaggagcagcggaggggc

SEQ ID NO: 783906 - RNA, 19 nt, Human
aacuggaguccagagaccu

SEQ ID NO: 783907 - RNA, 22 nt, Human
aaggagccccguggauuaaggc

SEQ ID NO: 783908 - RNA, 21 nt, Human
aauaaauagauaaugagccuc

SEQ ID NO: 783909 - RNA, 22 nt, Human
acagaacaggagagggacagag

SEQ ID NO: 783910 - RNA, 24 nt, Human
acagaacaggagagggacagaggc

SEQ ID NO: 783911 - RNA, 26 nt, Human
acagaggcgccguggccgcgggggug

SEQ ID NO: 783912 - RNA, 23 nt, Human
acagguggugauuuugucucaaa

SEQ ID NO: 783913 - RNA, 24 nt, Human
acagguggugauuuugucucaaaa

SEQ ID NO: 783914 - RNA, 23 nt, Human
accugccuccccugugcaccgcc

SEQ ID NO: 783915 - RNA, 19 nt, Human
acuggaguccagagaccug

SEQ ID NO: 783916 - RNA, 20 nt, Human
agcgggggcggggggggguc

SEQ ID NO: 783917 - RNA, 25 nt, Human
aggcauggagaccacaggucgggcu

SEQ ID NO: 783918 - RNA, 22 nt, Human
agguggugggccuggcuggggc

SEQ ID NO: 783919 - RNA, 19 nt, Human
agugccucuugccuguaug

SEQ ID NO: 783920 - RNA, 19 nt, Human
augaagccaccuggcuccu

SEQ ID NO: 783921 - RNA, 28 nt, Human
caaaacaaacagaaacgcguguugggua

SEQ ID NO: 783922 - RNA, 23 nt, Human
cacacagcuccugucugcaccac

SEQ ID NO: 783923 - RNA, 20 nt, Human
caccagccacaccgcaggag

SEQ ID NO: 783924 - RNA, 21 nt, Human
cacccggagccguccgggacc

SEQ ID NO: 783925 - RNA, 24 nt, Human
caccuggaugcuggugcucagugg

SEQ ID NO: 783926 - RNA, 19 nt, Human
cacgacagcgaagacagac

SEQ ID NO: 783927 - RNA, 23 nt, Human
cacgacagcgaagacagacaaaa

SEQ ID NO: 783928 - RNA, 20 nt, Human
cagaagaugcucuuggccac

SEQ ID NO: 783929 - RNA, 22 nt, Human
cagcaaguccugucugaagagc

SEQ ID NO: 783930 - RNA, 23 nt, Human
cagcagcuaaggcagcagccaac

SEQ ID NO: 783931 - RNA, 21 nt, Human
cagcaggcggccguggccugg

SEQ ID NO: 783932 - RNA, 23 nt, Human
cagcgccugccucuccgccaggg

SEQ ID NO: 783933 - RNA, 26 nt, Human
cagcuaaggcagcagccaacguucac

SEQ ID NO: 783934 - RNA, 21 nt, Human
cagcucagcccccugagggcc

SEQ ID NO: 783935 - RNA, 23 nt, Human
cagcucagcccccugagggccag

SEQ ID NO: 783936 - RNA, 23 nt, Human
cagcucagucuccagcucagccc

SEQ ID NO: 783937 - RNA, 20 nt, Human
cagcugccccagggacccgu

SEQ ID NO: 783938 - RNA, 22 nt, Human
caggccaccagccacaccgcag

SEQ ID NO: 783939 - RNA, 19 nt, Human
cagggacccguaggagccc

SEQ ID NO: 783940 - RNA, 18 nt, Human
caucugcacaugcgugug

SEQ ID NO: 783941 - RNA, 24 nt, Human
cauggagaccacaggucgggcugc

SEQ ID NO: 783942 - RNA, 18 nt, Human
caugugugugcccccagg

SEQ ID NO: 783943 - RNA, 21 nt, Human
ccacagcggccccugcugaca

SEQ ID NO: 783944 - RNA, 25 nt, Human
ccacccagaagaugcucuuggccac

SEQ ID NO: 783945 - RNA, 22 nt, Human
ccacgccgccugcaugugugug

SEQ ID NO: 783946 - RNA, 21 nt, Human
ccagaagaugcucuuggccac

SEQ ID NO: 783947 - RNA, 21 nt, Human
ccagacacgacagcgaagaca

SEQ ID NO: 783948 - RNA, 23 nt, Human
ccagcgccugccucuccgccagg

SEQ ID NO: 783949 - RNA, 19 nt, Human
ccccagcgccugccucucc

SEQ ID NO: 783950 - RNA, 24 nt, Human
ccccagggacccguaggagcccca

SEQ ID NO: 783951 - RNA, 18 nt, Human
cccccugagggccaggug

SEQ ID NO: 783952 - RNA, 18 nt, Human
ccccugggcggcuuccuu

SEQ ID NO: 783953 - RNA, 19 nt, Human
cccgagcccuccccuuccc

SEQ ID NO: 783954 - RNA, 23 nt, Human
cccguggucaugggccucucacu

SEQ ID NO: 783955 - RNA, 21 nt, Human
ccgacgccccgugccccggcg

SEQ ID NO: 783956 - RNA, 18 nt, Human
ccggaaccuucuucuggu

SEQ ID NO: 783957 - RNA, 21 nt, Human
ccgggcugcuuucucggccca

SEQ ID NO: 783958 - RNA, 25 nt, Human
ccucgccaaggaccugccuccccug

SEQ ID NO: 783959 - RNA, 19 nt, Human
ccucucaauaauccugauu

SEQ ID NO: 783960 - RNA, 23 nt, Human
ccucucacugccagaaugaagcc

SEQ ID NO: 783961 - RNA, 21 nt, Human
ccugccgucaucagcagcuaa

SEQ ID NO: 783962 - RNA, 19 nt, Human
ccugccucuccgccagggc

SEQ ID NO: 783963 - RNA, 22 nt, Human
ccuggaggugcggggagggugg

SEQ ID NO: 783964 - RNA, 27 nt, Human
cgaaacagacuagccaccagcaagucc

SEQ ID NO: 783965 - RNA, 21 nt, Human
cgacagcgaagacagacaaaa

SEQ ID NO: 783966 - RNA, 22 nt, Human
cgcccugcggccccuccugggc

SEQ ID NO: 783967 - RNA, 21 nt, Human
cggaccccugggcggcuuccu

SEQ ID NO: 783968 - RNA, 19 nt, Human
cggccaaggacagcccgga

SEQ ID NO: 783969 - RNA, 20 nt, Human
cggcucaaggcuggagacgg

SEQ ID NO: 783970 - RNA, 21 nt, Human
cgggacccggcagugccucuu

SEQ ID NO: 783971 - RNA, 24 nt, Human
cguggugccaucugcacaugcgug

SEQ ID NO: 783972 - RNA, 19 nt, Human
cgugugcuacaccugugug

SEQ ID NO: 783973 - RNA, 18 nt, Human
cuagccaccagcaagucc

SEQ ID NO: 783974 - RNA, 23 nt, Human
cucacugccagaaugaagccacc

SEQ ID NO: 783975 - RNA, 24 nt, Human
cuccagcucagcccccugagggcc

SEQ ID NO: 783976 - RNA, 20 nt, Human
cuccugccgucaucagcagc

SEQ ID NO: 783977 - RNA, 22 nt, Human
cugcaccacaggcccagcuguc

SEQ ID NO: 783978 - RNA, 25 nt, Human
cugcaugugugugcccccaggugcc

SEQ ID NO: 783979 - RNA, 22 nt, Human
cugcggccccuccugggcggga

SEQ ID NO: 783980 - RNA, 19 nt, Human
cuguccugccuugucacgu

SEQ ID NO: 783981 - RNA, 20 nt, Human
cuucccugacauuccagaca

SEQ ID NO: 783982 - RNA, 21 nt, Human
cuuccucucucuugguuuccc

SEQ ID NO: 783983 - RNA, 18 nt, Human
gaaauaaagugagguguu

SEQ ID NO: 783984 - RNA, 22 nt, Human
gaccuggaggugcggggagggu

SEQ ID NO: 783985 - RNA, 22 nt, Human
gagaccacgccgccugcaugug

SEQ ID NO: 783986 - RNA, 19 nt, Human
gagcgggggcggggggggg

SEQ ID NO: 783987 - RNA, 23 nt, Human
gcaggccaccagccacaccgcag

SEQ ID NO: 783988 - RNA, 18 nt, Human
gcccggaccccugggcgg

SEQ ID NO: 783989 - RNA, 19 nt, Human
gcccugcggccccuccugg

SEQ ID NO: 783990 - RNA, 24 nt, Human
gccgcagcagccgacgccccgugc

SEQ ID NO: 783991 - RNA, 20 nt, Human
gccugccucuccgccagggc

SEQ ID NO: 783992 - RNA, 21 nt, Human
gcgggggcgggggggggucuu

SEQ ID NO: 783993 - RNA, 21 nt, Human
gcgugugcggguggagcuggg

SEQ ID NO: 783994 - RNA, 21 nt, Human
ggccacggcaggccaccagcc

SEQ ID NO: 783995 - RNA, 18 nt, Human
ggccucucacugccagaa

SEQ ID NO: 783996 - RNA, 18 nt, Human
gggcacaggcauggagac

SEQ ID NO: 783997 - RNA, 23 nt, Human
gggccaaaacuggaguccagaga

SEQ ID NO: 783998 - RNA, 21 nt, Human
gggccuggcuggggcagcgcc

SEQ ID NO: 783999 - RNA, 22 nt, Human
gggcuggugucacccggagccg

SEQ ID NO: 784000 - RNA, 24 nt, Human
gggggugcaccuggaugcuggugc

SEQ ID NO: 784001 - RNA, 19 nt, Human
ggugcggggagggugggcu

SEQ ID NO: 784002 - RNA, 19 nt, Human
ggugcucagugggaagcca

SEQ ID NO: 784003 - RNA, 20 nt, Human
gguggagcgggggcgggggg

SEQ ID NO: 784004 - RNA, 24 nt, Human
guccacacagcuccugucugcacc

SEQ ID NO: 784005 - RNA, 18 nt, Human
gugccggaaccuucuucu

SEQ ID NO: 784006 - RNA, 23 nt, Human
guggagcgggggcgggggggggu

SEQ ID NO: 784007 - RNA, 18 nt, Human
uaaaaaauuucgaaacag

SEQ ID NO: 784008 - RNA, 19 nt, Human
uagccaccagcaaguccug

SEQ ID NO: 784009 - RNA, 28 nt, Human
uaugugaggaacguguggggacagagca

SEQ ID NO: 784010 - RNA, 24 nt, Human
ucagaccugugaagacagcccacg

SEQ ID NO: 784011 - RNA, 22 nt, Human
ucagcagcuaaggcagcagcca

SEQ ID NO: 784012 - RNA, 28 nt, Human
ucagcccccugagggccaggugugucuc

SEQ ID NO: 784013 - RNA, 19 nt, Human
ucccccagcuggcuaggaa

SEQ ID NO: 784014 - RNA, 26 nt, Human
uccgccaauaaaaaauuucgaaacag

SEQ ID NO: 784015 - RNA, 18 nt, Human
uccuccugucguucaggc

SEQ ID NO: 784016 - RNA, 22 nt, Human
ucgcucuuggccugauggggac

SEQ ID NO: 784017 - RNA, 21 nt, Human
ucucaaaacaaacagaaacgc

SEQ ID NO: 784018 - RNA, 20 nt, Human
ucucagagaaacacagaaca

SEQ ID NO: 784019 - RNA, 18 nt, Human
ucuccuucuuccucucuc

SEQ ID NO: 784020 - RNA, 18 nt, Human
ugagagguggugggccug

SEQ ID NO: 784021 - RNA, 23 nt, Human
ugagagguggugggccuggcugg

SEQ ID NO: 784022 - RNA, 19 nt, Human
ugagcugagugaggccggg

SEQ ID NO: 784023 - RNA, 24 nt, Human
ugauggcugugaagauccaguuca

SEQ ID NO: 784024 - RNA, 20 nt, Human
ugauuacauggaaauaaagu

SEQ ID NO: 784025 - RNA, 22 nt, Human
ugccggccguggugccaucugc

SEQ ID NO: 784026 - RNA, 23 nt, Human
ugcggggagggugggcugugcgc

SEQ ID NO: 784027 - RNA, 22 nt, Human
ugcuuucucggcccagacgugg

SEQ ID NO: 784028 - RNA, 30 nt, Human
uggaaauaaagugagguguuuccccuuucc

SEQ ID NO: 784029 - RNA, 20 nt, Human
uggaagauucugguguugcc

SEQ ID NO: 784030 - RNA, 23 nt, Human
uggagccaccugccuuuugacag

SEQ ID NO: 784031 - RNA, 19 nt, Human
uggaugcuggugcucagug

SEQ ID NO: 784032 - RNA, 20 nt, Human
ugggccucucacugccagaa

SEQ ID NO: 784033 - RNA, 23 nt, Human
uggugggccuggcuggggcagcg

SEQ ID NO: 784034 - RNA, 22 nt, Human
uguccacacagcuccugucugc

SEQ ID NO: 784035 - RNA, 19 nt, Human
ugucucaaaacaaacagaa

SEQ ID NO: 784036 - RNA, 20 nt, Human
ugucugaagagcuuuuggaa

SEQ ID NO: 784037 - RNA, 19 nt, Human
ugucugugauggcugugaa

SEQ ID NO: 784038 - RNA, 22 nt, Human
ugugaagauccaguucaguuca

SEQ ID NO: 784039 - RNA, 21 nt, Human
ugugagggcacaggcauggag

SEQ ID NO: 784040 - RNA, 21 nt, Human
uguuuugucaaaguccgucuc

SEQ ID NO: 784041 - RNA, 22 nt, Human
uucuggaagauucugguguugc

SEQ ID NO: 784042 - RNA, 21 nt, Human
uugaaggacuggaugggaagc

SEQ ID NO: 784043 - RNA, 20 nt, Human
uuggaggggcgucuccuucu

SEQ ID NO: 784044 - RNA, 21 nt, Human
uuuacuguuggucacucucug

SEQ ID NO: 784045 - RNA, 20 nt, Human
uuuggaagagaucccggggg

SEQ ID NO: 784046 - RNA, 20 nt, Human
aaaaccacugggagugggga

SEQ ID NO: 784047 - RNA, 18 nt, Human
aaccuguugccagaaccc

SEQ ID NO: 784048 - RNA, 23 nt, Human
aacuugcugugugacuuugggug

SEQ ID NO: 784049 - RNA, 23 nt, Human
acagagagccccgguaggagguu

SEQ ID NO: 784050 - RNA, 20 nt, Human
acuccaccacugcccacccc

SEQ ID NO: 784051 - RNA, 23 nt, Human
acucugcaaugccaagcguucug

SEQ ID NO: 784052 - RNA, 19 nt, Human
agagagcaccugccaaaaa

SEQ ID NO: 784053 - RNA, 19 nt, Human
agagcaggcuugggugagg

SEQ ID NO: 784054 - RNA, 20 nt, Human
agcaggcuugggugagggag

SEQ ID NO: 784055 - RNA, 24 nt, Human
aggaaagagagcaccugccaaaaa

SEQ ID NO: 784056 - RNA, 19 nt, Human
aggaagagaaaggauggcg

SEQ ID NO: 784057 - RNA, 18 nt, Human
aggccagccagagugacg

SEQ ID NO: 784058 - RNA, 18 nt, Human
agggagggagagugaggc

SEQ ID NO: 784059 - RNA, 25 nt, Human
agggaugagaggccagaggugaggg

SEQ ID NO: 784060 - RNA, 21 nt, Human
agugacguggcacuggccuuc

SEQ ID NO: 784061 - RNA, 21 nt, Human
auccuuuggcaaacuccacca

SEQ ID NO: 784062 - RNA, 18 nt, Human
augaacuugcugugugac

SEQ ID NO: 784063 - RNA, 25 nt, Human
cacaggacucggggggugauacaga

SEQ ID NO: 784064 - RNA, 24 nt, Human
cacauccuuuggcaaacuccacca

SEQ ID NO: 784065 - RNA, 18 nt, Human
caccuggaaggaacucac

SEQ ID NO: 784066 - RNA, 19 nt, Human
cacugggaguggggacugg

SEQ ID NO: 784067 - RNA, 23 nt, Human
caggagaaggaucgcccccagac

SEQ ID NO: 784068 - RNA, 18 nt, Human
caggauacaguggaggua

SEQ ID NO: 784069 - RNA, 24 nt, Human
ccacugcccaccccccugggcacc

SEQ ID NO: 784070 - RNA, 21 nt, Human
ccacugggaguggggacuggc

SEQ ID NO: 784071 - RNA, 20 nt, Human
cccacacuuuccacuucuca

SEQ ID NO: 784072 - RNA, 22 nt, Human
ccgcaggccacggcugccaggu

SEQ ID NO: 784073 - RNA, 19 nt, Human
ccuccagaggggcaggagc

SEQ ID NO: 784074 - RNA, 25 nt, Human
ccugccaaaaaucccacacuuucca

SEQ ID NO: 784075 - RNA, 20 nt, Human
ccuggucucagcucagccau

SEQ ID NO: 784076 - RNA, 19 nt, Human
cgcauacagcaccagggag

SEQ ID NO: 784077 - RNA, 22 nt, Human
cgcccgcuccccgcacggcucg

SEQ ID NO: 784078 - RNA, 22 nt, Human
cggaagggaugagaggccagag

SEQ ID NO: 784079 - RNA, 24 nt, Human
cucacacucacugcaagggugauc

SEQ ID NO: 784080 - RNA, 22 nt, Human
cuccaccacugcccaccccccu

SEQ ID NO: 784081 - RNA, 19 nt, Human
cucccacaggaggcugaag

SEQ ID NO: 784082 - RNA, 22 nt, Human
cugcccaccccccugggcaccc

SEQ ID NO: 784083 - RNA, 19 nt, Human
cugcccaccccccugggcu

SEQ ID NO: 784084 - RNA, 18 nt, Human
cuggagcuugguccccuu

SEQ ID NO: 784085 - RNA, 18 nt, Human
cuggcaaccugggcuaga

SEQ ID NO: 784086 - RNA, 20 nt, Human
cuuugggaugggguugggag

SEQ ID NO: 784087 - RNA, 19 nt, Human
gaaccuguugccagaaccc

SEQ ID NO: 784088 - RNA, 20 nt, Human
gaagauccaguugcagugag

SEQ ID NO: 784089 - RNA, 22 nt, Human
gaagccccgagcccuccagagg

SEQ ID NO: 784090 - RNA, 20 nt, Human
gaagggaugagaggccagag

SEQ ID NO: 784091 - RNA, 24 nt, Human
gagcaggcuugggugagggagugg

SEQ ID NO: 784092 - RNA, 20 nt, Human
gaggggcaggagcucccaca

SEQ ID NO: 784093 - RNA, 19 nt, Human
gaguuggagagaauguggg

SEQ ID NO: 784094 - RNA, 24 nt, Human
gcacacaccuggaaggaacucaca

SEQ ID NO: 784095 - RNA, 18 nt, Human
gcacccugcuuggccagg

SEQ ID NO: 784096 - RNA, 25 nt, Human
gccaaaaaucccacacuuuccacuu

SEQ ID NO: 784097 - RNA, 18 nt, Human
gcgcccgcccucuggagc

SEQ ID NO: 784098 - RNA, 18 nt, Human
gcucgggcgcccgcccuc

SEQ ID NO: 784099 - RNA, 21 nt, Human
ggaaaaccacugggagugggg

SEQ ID NO: 784100 - RNA, 21 nt, Human
ggaagccccgagcccuccaga

SEQ ID NO: 784101 - RNA, 21 nt, Human
ggagaugaagaguuggagaga

SEQ ID NO: 784102 - RNA, 28 nt, Human
ggaggaagagaaaggauggcgcgggggg

SEQ ID NO: 784103 - RNA, 23 nt, Human
ggagguagaaggagcagaggacu

SEQ ID NO: 784104 - RNA, 23 nt, Human
ggaugggguugggagggguuggg

SEQ ID NO: 784105 - RNA, 19 nt, Human
ggcauggggacucacugua

SEQ ID NO: 784106 - RNA, 22 nt, Human
ggcgcggggggcggaggaaaga

SEQ ID NO: 784107 - RNA, 22 nt, Human
gggaguggggacuggccaaagc

SEQ ID NO: 784108 - RNA, 19 nt, Human
gggaugggguugggagggg

SEQ ID NO: 784109 - RNA, 24 nt, Human
ggguguagcauuuugaaggauucu

SEQ ID NO: 784110 - RNA, 23 nt, Human
uaagaaggccagccagagugacg

SEQ ID NO: 784111 - RNA, 19 nt, Human
uaaggggagcaggagaagg

SEQ ID NO: 784112 - RNA, 25 nt, Human
uacagcaccagggagggagagugag

SEQ ID NO: 784113 - RNA, 21 nt, Human
uagaaggagcagaggacugua

SEQ ID NO: 784114 - RNA, 23 nt, Human
uauugacaaaucaaaugaaaaaa

SEQ ID NO: 784115 - RNA, 20 nt, Human
ucagggagaugaagaguugg

SEQ ID NO: 784116 - RNA, 18 nt, Human
uccacuucucagcuauca

SEQ ID NO: 784117 - RNA, 24 nt, Human
ucccacaggaggcugaagauccag

SEQ ID NO: 784118 - RNA, 18 nt, Human
ucccucugugauccucuu

SEQ ID NO: 784119 - RNA, 21 nt, Human
ucugcaaugccaagcguucug

SEQ ID NO: 784120 - RNA, 22 nt, Human
ugaaaaaaauucacuuaaaaga

SEQ ID NO: 784121 - RNA, 21 nt, Human
ugacaaaucaaaugaaaaaaa

SEQ ID NO: 784122 - RNA, 24 nt, Human
ugaggcuggacauaccauuacaga

SEQ ID NO: 784123 - RNA, 24 nt, Human
ugagugaggaaaaccacugggagu

SEQ ID NO: 784124 - RNA, 19 nt, Human
ugccccgcccgcuccccgc

SEQ ID NO: 784125 - RNA, 21 nt, Human
ugcugugugacuuugggugaa

SEQ ID NO: 784126 - RNA, 22 nt, Human
uggaagaucagggagaugaaga

SEQ ID NO: 784127 - RNA, 23 nt, Human
uggacauaccauuacagagagga

SEQ ID NO: 784128 - RNA, 20 nt, Human
uggcaaccugggcuagacca

SEQ ID NO: 784129 - RNA, 21 nt, Human
uggcaaguucuccacuggcuc

SEQ ID NO: 784130 - RNA, 22 nt, Human
uggcagcggcagcaauucagag

SEQ ID NO: 784131 - RNA, 24 nt, Human
uggcugugagggagccuggguuuu

SEQ ID NO: 784132 - RNA, 19 nt, Human
ugggagggguugggaggua

SEQ ID NO: 784133 - RNA, 18 nt, Human
ugggaguggggacuggcc

SEQ ID NO: 784134 - RNA, 21 nt, Human
ugggaguggggacuggccaaa

SEQ ID NO: 784135 - RNA, 21 nt, Human
uguaggggcuggcacauccuu

SEQ ID NO: 784136 - RNA, 20 nt, Human
uuccucugcuguaaaacaau

SEQ ID NO: 784137 - RNA, 18 nt, Human
uugcagugagugaggaaa

SEQ ID NO: 784138 - RNA, 23 nt, Human
uugcagugagugaggaaaaccac

SEQ ID NO: 784139 - RNA, 19 nt, Human
uuugggugaaucauuuucc

SEQ ID NO: 784140 - RNA, 20 nt, Human
aaaaaagauaaaacauggaa

SEQ ID NO: 784141 - RNA, 23 nt, Human
aaacauucuaggccaaacaaaga

SEQ ID NO: 784142 - RNA, 20 nt, Human
aaauaaccuuaugaacugag

SEQ ID NO: 784143 - RNA, 23 nt, Human
aacaaaaaaagauaaaacaugga

SEQ ID NO: 784144 - RNA, 19 nt, Human
aagagcacaaauaacauca

SEQ ID NO: 784145 - RNA, 20 nt, Human
aauaacaucaauguugucuu

SEQ ID NO: 784146 - RNA, 21 nt, Human
aauaacaucaauguugucuuu

SEQ ID NO: 784147 - RNA, 27 nt, Human
acaaaaaaagauaaaacauggaaguug

SEQ ID NO: 784148 - RNA, 19 nt, Human
acuuugugcuaaauaaccu

SEQ ID NO: 784149 - RNA, 23 nt, Human
agcucaugcgaguuggcaaccuu

SEQ ID NO: 784150 - RNA, 19 nt, Human
aggcaccagcacccgcacc

SEQ ID NO: 784151 - RNA, 24 nt, Human
auaaacauucuaggccaaacaaag

SEQ ID NO: 784152 - RNA, 27 nt, Human
auacauuuccagaaugguuguguuacc

SEQ ID NO: 784153 - RNA, 24 nt, Human
auguguguauguguauguauguau

SEQ ID NO: 784154 - RNA, 20 nt, Human
auugcaaagauagaacuacg

SEQ ID NO: 784155 - RNA, 24 nt, Human
caaacaaagagcacaaauaacauc

SEQ ID NO: 784156 - RNA, 24 nt, Human
caaauaacaucaauguugucuuuu

SEQ ID NO: 784157 - RNA, 18 nt, Human
cacuuuaaaaacaccaaa

SEQ ID NO: 784158 - RNA, 21 nt, Human
cagaauacauauaauaugcaa

SEQ ID NO: 784159 - RNA, 22 nt, Human
ccagcacccgcaccuucgcacc

SEQ ID NO: 784160 - RNA, 19 nt, Human
cccgccgcuuguccgccgg

SEQ ID NO: 784161 - RNA, 24 nt, Human
cgagggccaaagagggagucgcgc

SEQ ID NO: 784162 - RNA, 20 nt, Human
cuccgagggccaaagaggga

SEQ ID NO: 784163 - RNA, 24 nt, Human
cucgccgcguccuggcgucccgcc

SEQ ID NO: 784164 - RNA, 21 nt, Human
cugccuccaagggacaauuuc

SEQ ID NO: 784165 - RNA, 18 nt, Human
cuuuuuuuuucauauguu

SEQ ID NO: 784166 - RNA, 27 nt, Human
gcaccagcacccgcaccuucgcacccu

SEQ ID NO: 784167 - RNA, 21 nt, Human
guauacacacuuuaaaaacac

SEQ ID NO: 784168 - RNA, 25 nt, Human
guguauguauguauacacacuuuaa

SEQ ID NO: 784169 - RNA, 25 nt, Human
guguuggucuuccucuuccacgaga

SEQ ID NO: 784170 - RNA, 18 nt, Human
uaacauauauacuacuua

SEQ ID NO: 784171 - RNA, 19 nt, Human
uacacacuuuaaaaacacc

SEQ ID NO: 784172 - RNA, 19 nt, Human
uacagcaucuuaguuguag

SEQ ID NO: 784173 - RNA, 19 nt, Human
uacagucaaagaugaaagg

SEQ ID NO: 784174 - RNA, 22 nt, Human
uaccuuacacccaauacacagc

SEQ ID NO: 784175 - RNA, 24 nt, Human
uaccuuacacccaauacacagcau

SEQ ID NO: 784176 - RNA, 21 nt, Human
uacugaagaaacauuuuauag

SEQ ID NO: 784177 - RNA, 24 nt, Human
uagugaauuuaagcuacuucuccu

SEQ ID NO: 784178 - RNA, 19 nt, Human
uaugugcauguguguaugu

SEQ ID NO: 784179 - RNA, 20 nt, Human
uaugugcauguguguaugug

SEQ ID NO: 784180 - RNA, 22 nt, Human
uccucuuccacgagagaucuug

SEQ ID NO: 784181 - RNA, 20 nt, Human
ucgcacccucugcucgcccc

SEQ ID NO: 784182 - RNA, 21 nt, Human
ucuccugugugucuaggaaac

SEQ ID NO: 784183 - RNA, 18 nt, Human
ucuuccucuuccacgaga

SEQ ID NO: 784184 - RNA, 24 nt, Human
ugaagccuagugagcacaguugua

SEQ ID NO: 784185 - RNA, 21 nt, Human
ugacauaugugcaugugugua

SEQ ID NO: 784186 - RNA, 20 nt, Human
ugagcaaaagcagcucucca

SEQ ID NO: 784187 - RNA, 22 nt, Human
ugagcaaaagcagcucuccagg

SEQ ID NO: 784188 - RNA, 19 nt, Human
ugcaaagauagaacuacag

SEQ ID NO: 784189 - RNA, 18 nt, Human
ugcaaguuaccucaacag

SEQ ID NO: 784190 - RNA, 19 nt, Human
ugcauguguguauguguau

SEQ ID NO: 784191 - RNA, 21 nt, Human
ugcauguguguauguguaugu

SEQ ID NO: 784192 - RNA, 19 nt, Human
ugcuuuuuggaagaauucu

SEQ ID NO: 784193 - RNA, 22 nt, Human
uguaugguucuacauauaugca

SEQ ID NO: 784194 - RNA, 21 nt, Human
uguguauguauguauacacac

SEQ ID NO: 784195 - RNA, 19 nt, Human
uguguauguguauguaugu

SEQ ID NO: 784196 - RNA, 20 nt, Human
uguguauguguauguaugua

SEQ ID NO: 784197 - RNA, 20 nt, Human
uguguauguguauguaugua

SEQ ID NO: 784198 - RNA, 19 nt, Human
uguguguauguguauguau

SEQ ID NO: 784199 - RNA, 21 nt, Human
uguguguauguguauguaugu

SEQ ID NO: 784200 - RNA, 19 nt, Human
uguuggucuuccucuucca

SEQ ID NO: 784201 - RNA, 24 nt, Human
uguugucuuuuuuccaauaucugu

SEQ ID NO: 784202 - RNA, 24 nt, Human
uuaaaaacaccaaacccuuguuua

SEQ ID NO: 784203 - RNA, 19 nt, Human
uuaagcuacuucuccugug

SEQ ID NO: 784204 - RNA, 27 nt, Human
uuggcaaccuuuuguguauuguuuccu

SEQ ID NO: 784205 - RNA, 23 nt, Human
uuuauaaacauucuaggccaaac

SEQ ID NO: 784206 - RNA, 23 nt, Human
aaaacaaacaaaaggccggaccc

SEQ ID NO: 784207 - RNA, 18 nt, Human
aaacaaaaacggcuacaa

SEQ ID NO: 784208 - RNA, 19 nt, Human
aaacaaaaggaaaaaccaa

SEQ ID NO: 784209 - RNA, 24 nt, Human
aaacaaaaggaaaaaccaaaauua

SEQ ID NO: 784210 - RNA, 20 nt, Human
aaacagguaaacgaccgagg

SEQ ID NO: 784211 - RNA, 24 nt, Human
aaacauugaaaagaaugaagacau

SEQ ID NO: 784212 - RNA, 21 nt, Human
aaagaauaccacuuaaauuca

SEQ ID NO: 784213 - RNA, 20 nt, Human
aaagcaaucaaaauccacag

SEQ ID NO: 784214 - RNA, 18 nt, Human
aaagugccagagaggugu

SEQ ID NO: 784215 - RNA, 23 nt, Human
aaauuagucauuguuuuccuccu

SEQ ID NO: 784216 - RNA, 23 nt, Human
aacauugaaaagaaugaagacau

SEQ ID NO: 784217 - RNA, 19 nt, Human
aacucaacucccaagauaa

SEQ ID NO: 784218 - RNA, 21 nt, Human
aagaaguaaagcagagaaaau

SEQ ID NO: 784219 - RNA, 18 nt, Human
aagaucaaauaucugcua

SEQ ID NO: 784220 - RNA, 20 nt, Human
aagcaaguaaaaauguagcu

SEQ ID NO: 784221 - RNA, 21 nt, Human
aagcccugaugagaggagguu

SEQ ID NO: 784222 - RNA, 20 nt, Human
aaucccaaaggcaaacaaaa

SEQ ID NO: 784223 - RNA, 23 nt, Human
aaucuacccuguggauuuacaug

SEQ ID NO: 784224 - RNA, 20 nt, Human
aaucuuuggaaaggauccuu

SEQ ID NO: 784225 - RNA, 18 nt, Human
acaacacaggaacacaga

SEQ ID NO: 784226 - RNA, 22 nt, Human
acaggugaagugaugcugaaaa

SEQ ID NO: 784227 - RNA, 20 nt, Human
acaguacuuccagugacaac

SEQ ID NO: 784228 - RNA, 21 nt, Human
accaggacuuagaagcuuuuc

SEQ ID NO: 784229 - RNA, 22 nt, Human
acgaacacuccuuuugcagugu

SEQ ID NO: 784230 - RNA, 23 nt, Human
acugaaaugcaugaggaaugcug

SEQ ID NO: 784231 - RNA, 22 nt, Human
acuuguaagaaagggaaaagga

SEQ ID NO: 784232 - RNA, 22 nt, Human
agaaacauugaaaagaaugaag

SEQ ID NO: 784233 - RNA, 22 nt, Human
agaaagaaaucuacccugugga

SEQ ID NO: 784234 - RNA, 19 nt, Human
agaaagcccagaagcagaa

SEQ ID NO: 784235 - RNA, 21 nt, Human
agaaagcccagaagcagaaag

SEQ ID NO: 784236 - RNA, 21 nt, Human
agacaaagagcaaagcaguaa

SEQ ID NO: 784237 - RNA, 19 nt, Human
agacagaacaucuuacaua

SEQ ID NO: 784238 - RNA, 24 nt, Human
agagaugccggcggggggcccggg

SEQ ID NO: 784239 - RNA, 22 nt, Human
agagcauguacucuuauaacuc

SEQ ID NO: 784240 - RNA, 25 nt, Human
agaucaguucauuuuugauaguggg

SEQ ID NO: 784241 - RNA, 21 nt, Human
agcaauuuauggcccuuguca

SEQ ID NO: 784242 - RNA, 20 nt, Human
aggaacacagaacuuaaugu

SEQ ID NO: 784243 - RNA, 23 nt, Human
aggaaugcugaaaauaaaacugg

SEQ ID NO: 784244 - RNA, 18 nt, Human
aggcaagaaaccauccag

SEQ ID NO: 784245 - RNA, 23 nt, Human
agggaaugaucucccaaagcuca

SEQ ID NO: 784246 - RNA, 19 nt, Human
auccacagccaaacugagu

SEQ ID NO: 784247 - RNA, 19 nt, Human
caaagcaguaaaauggagc

SEQ ID NO: 784248 - RNA, 19 nt, Human
caaagcccgaaucccaaag

SEQ ID NO: 784249 - RNA, 22 nt, Human
caaaucccaaacagguaaaggg

SEQ ID NO: 784250 - RNA, 23 nt, Human
caacuccauucaaaccuucagga

SEQ ID NO: 784251 - RNA, 18 nt, Human
caagaaaccauccaggga

SEQ ID NO: 784252 - RNA, 19 nt, Human
cacaaggaauguuugacca

SEQ ID NO: 784253 - RNA, 21 nt, Human
cagaaggcaaucuaaguuggg

SEQ ID NO: 784254 - RNA, 23 nt, Human
cagaggaacacugccacgaacac

SEQ ID NO: 784255 - RNA, 22 nt, Human
cagcagugcaggcaagaaacca

SEQ ID NO: 784256 - RNA, 25 nt, Human
cagccaaagcccgaaucccaaaggc

SEQ ID NO: 784257 - RNA, 21 nt, Human
cagccuuuuacuggccagguc

SEQ ID NO: 784258 - RNA, 22 nt, Human
cagcuccgagucacguccuccu

SEQ ID NO: 784259 - RNA, 22 nt, Human
caggguagagaaggcugagugu

SEQ ID NO: 784260 - RNA, 20 nt, Human
caguuaccuuguuggguugu

SEQ ID NO: 784261 - RNA, 19 nt, Human
cauaaaaaugacacagcua

SEQ ID NO: 784262 - RNA, 18 nt, Human
caucauaaaaaugacaca

SEQ ID NO: 784263 - RNA, 22 nt, Human
cauugggccagaucuuuuucua

SEQ ID NO: 784264 - RNA, 21 nt, Human
ccaaagcccgaaucccaaagg

SEQ ID NO: 784265 - RNA, 21 nt, Human
ccacaacaacacaggaacaca

SEQ ID NO: 784266 - RNA, 18 nt, Human
ccacagccaaacugaguc

SEQ ID NO: 784267 - RNA, 21 nt, Human
ccagcucuccucauccucucu

SEQ ID NO: 784268 - RNA, 22 nt, Human
ccaggggaaaagaaaaauggaa

SEQ ID NO: 784269 - RNA, 25 nt, Human
ccaggggaaaagaaaaauggaaaaa

SEQ ID NO: 784270 - RNA, 19 nt, Human
cccaaacagguaaacgacc

SEQ ID NO: 784271 - RNA, 23 nt, Human
cccaaacagguaaacgaccgagg

SEQ ID NO: 784272 - RNA, 23 nt, Human
cccaagaaaucaaaauguauaag

SEQ ID NO: 784273 - RNA, 25 nt, Human
cccaagauaaacuuucuuuuucacu

SEQ ID NO: 784274 - RNA, 18 nt, Human
cccaggggaaaagaaaaa

SEQ ID NO: 784275 - RNA, 20 nt, Human
cccauucauuguauccacuc

SEQ ID NO: 784276 - RNA, 18 nt, Human
cccccaaccccauaaaca

SEQ ID NO: 784277 - RNA, 23 nt, Human
ccugcuagggucccagguagcca

SEQ ID NO: 784278 - RNA, 18 nt, Human
ccugucuuccccuuuucc

SEQ ID NO: 784279 - RNA, 21 nt, Human
cggcaagggcaaacggacucc

SEQ ID NO: 784280 - RNA, 18 nt, Human
cggcggggggcccggggc

SEQ ID NO: 784281 - RNA, 21 nt, Human
cgugugcgucauguguauaua

SEQ ID NO: 784282 - RNA, 25 nt, Human
cgugugcgucauguguauauacauu

SEQ ID NO: 784283 - RNA, 20 nt, Human
cuaaaacaaacaaaaggccg

SEQ ID NO: 784284 - RNA, 24 nt, Human
cuagagcauguacucuuauaacuc

SEQ ID NO: 784285 - RNA, 23 nt, Human
cucuugacaacucaacucccaag

SEQ ID NO: 784286 - RNA, 22 nt, Human
cugaaaaaguaguuuaaacccu

SEQ ID NO: 784287 - RNA, 22 nt, Human
cugaaaauaaaacuggucuuuu

SEQ ID NO: 784288 - RNA, 20 nt, Human
cuggcacauauagauuugag

SEQ ID NO: 784289 - RNA, 25 nt, Human
cuuaaaggaauauggcuuggagaaa

SEQ ID NO: 784290 - RNA, 19 nt, Human
gaaaaagaaaucuuuggaa

SEQ ID NO: 784291 - RNA, 21 nt, Human
gaaaagaaaaauggaaaaaga

SEQ ID NO: 784292 - RNA, 18 nt, Human
gaaaugcaugaggaaugc

SEQ ID NO: 784293 - RNA, 18 nt, Human
gagaaagcggaggcagcc

SEQ ID NO: 784294 - RNA, 21 nt, Human
gagaggagguuggguugaaga

SEQ ID NO: 784295 - RNA, 24 nt, Human
gagagguggcccagaauaaaaaua

SEQ ID NO: 784296 - RNA, 20 nt, Human
gagcuucaguuaccuuguug

SEQ ID NO: 784297 - RNA, 22 nt, Human
gagucacagccuuauccuuugg

SEQ ID NO: 784298 - RNA, 23 nt, Human
gcgcagagaugccggcggggggc

SEQ ID NO: 784299 - RNA, 19 nt, Human
gcggaggcagcuccgaguc

SEQ ID NO: 784300 - RNA, 22 nt, Human
ggaaaagaaaaauggaaaaaga

SEQ ID NO: 784301 - RNA, 23 nt, Human
ggaaaagaaaaauggaaaaagaa

SEQ ID NO: 784302 - RNA, 18 nt, Human
ggacaaggaaacauuagc

SEQ ID NO: 784303 - RNA, 21 nt, Human
guacuuccagugacaacacaa

SEQ ID NO: 784304 - RNA, 19 nt, Human
guaguuuaaacccuggaug

SEQ ID NO: 784305 - RNA, 20 nt, Human
guggaauacaacuuucucua

SEQ ID NO: 784306 - RNA, 22 nt, Human
guucccccuuuuauuuuaauuc

SEQ ID NO: 784307 - RNA, 23 nt, Human
uaaagcagagaaaauauucaacc

SEQ ID NO: 784308 - RNA, 22 nt, Human
uaacucuggagcuucaguuacc

SEQ ID NO: 784309 - RNA, 20 nt, Human
uaacuucagggaaacaugcc

SEQ ID NO: 784310 - RNA, 23 nt, Human
uaagaucaaauaucugcuaauau

SEQ ID NO: 784311 - RNA, 23 nt, Human
uaauucaccaugcaugcauuuuc

SEQ ID NO: 784312 - RNA, 23 nt, Human
uaauuuccuguuuaaagaaugua

SEQ ID NO: 784313 - RNA, 21 nt, Human
uacaaaggauaacaucagugc

SEQ ID NO: 784314 - RNA, 19 nt, Human
uaccaugggaugagugcca

SEQ ID NO: 784315 - RNA, 18 nt, Human
uagcacaugggacgaagu

SEQ ID NO: 784316 - RNA, 21 nt, Human
uagcaugggcacagccaaagc

SEQ ID NO: 784317 - RNA, 19 nt, Human
uauacaagucaggauguaa

SEQ ID NO: 784318 - RNA, 20 nt, Human
uauguauguauguagguaca

SEQ ID NO: 784319 - RNA, 18 nt, Human
uauuuauguauguaugua

SEQ ID NO: 784320 - RNA, 23 nt, Human
ucaaauaucugcuaauauauuaa

SEQ ID NO: 784321 - RNA, 23 nt, Human
ucaagcucacaugcaaggcaggc

SEQ ID NO: 784322 - RNA, 20 nt, Human
ucacaauaccauaugaucua

SEQ ID NO: 784323 - RNA, 18 nt, Human
ucagaaagcccagaagca

SEQ ID NO: 784324 - RNA, 18 nt, Human
ucagaagcucauccaucu

SEQ ID NO: 784325 - RNA, 21 nt, Human
ucagagcagagaaaacucaug

SEQ ID NO: 784326 - RNA, 21 nt, Human
ucaggucugaaauuuaaggaa

SEQ ID NO: 784327 - RNA, 19 nt, Human
ucauuuagaaaucugaaac

SEQ ID NO: 784328 - RNA, 23 nt, Human
uccacaggugaagugaugcugaa

SEQ ID NO: 784329 - RNA, 21 nt, Human
ucccaaggccucucagcuacu

SEQ ID NO: 784330 - RNA, 24 nt, Human
ucccagaaggcaaucuaaguuggg

SEQ ID NO: 784331 - RNA, 23 nt, Human
ucccagguagccaccccaccugc

SEQ ID NO: 784332 - RNA, 19 nt, Human
uccccccaaccccauaaac

SEQ ID NO: 784333 - RNA, 18 nt, Human
ucccuuucuucugcugcu

SEQ ID NO: 784334 - RNA, 19 nt, Human
uccugucuuccccuuuucc

SEQ ID NO: 784335 - RNA, 19 nt, Human
ucucuugacaacucaacuc

SEQ ID NO: 784336 - RNA, 23 nt, Human
ucucuugacaacucaacucccaa

SEQ ID NO: 784337 - RNA, 21 nt, Human
ucuggagcuucaguuaccuug

SEQ ID NO: 784338 - RNA, 23 nt, Human
ucuugacaacucaacucccaaga

SEQ ID NO: 784339 - RNA, 22 nt, Human
ugaaaaaaauaauaauaaccau

SEQ ID NO: 784340 - RNA, 21 nt, Human
ugacaguacuuccagugacaa

SEQ ID NO: 784341 - RNA, 22 nt, Human
ugaccuccucuuaucccaguau

SEQ ID NO: 784342 - RNA, 18 nt, Human
ugagagaaaaaacccagu

SEQ ID NO: 784343 - RNA, 19 nt, Human
ugagaggagguuggguuga

SEQ ID NO: 784344 - RNA, 22 nt, Human
ugagaggagguuggguugaaga

SEQ ID NO: 784345 - RNA, 21 nt, Human
ugcagacaaagagcaaagcag

SEQ ID NO: 784346 - RNA, 27 nt, Human
ugccacgaacacuccuuuugcaguguu

SEQ ID NO: 784347 - RNA, 23 nt, Human
ugccaugugcuaucaagaaacau

SEQ ID NO: 784348 - RNA, 19 nt, Human
ugcgucauguguauauaca

SEQ ID NO: 784349 - RNA, 19 nt, Human
ugcugcugcuauuuugauu

SEQ ID NO: 784350 - RNA, 24 nt, Human
uggaaaaagaaaucuuuggaaagg

SEQ ID NO: 784351 - RNA, 23 nt, Human
uggagacccaguucuugugaaaa

SEQ ID NO: 784352 - RNA, 19 nt, Human
uggaugguagugagcugcu

SEQ ID NO: 784353 - RNA, 20 nt, Human
uggcggcggagcuggguggu

SEQ ID NO: 784354 - RNA, 22 nt, Human
uggcucucauuauauauaagau

SEQ ID NO: 784355 - RNA, 20 nt, Human
ugggaugagugccagucgag

SEQ ID NO: 784356 - RNA, 24 nt, Human
ugggcacagccaaagcccgaaucc

SEQ ID NO: 784357 - RNA, 23 nt, Human
uguauaagaguccacaggugaag

SEQ ID NO: 784358 - RNA, 20 nt, Human
uguauguauguagguacaua

SEQ ID NO: 784359 - RNA, 22 nt, Human
ugugauuccccauucauuguau

SEQ ID NO: 784360 - RNA, 21 nt, Human
ugugcucuuggaaaauaacua

SEQ ID NO: 784361 - RNA, 22 nt, Human
uguggaauacaacuuucucuaa

SEQ ID NO: 784362 - RNA, 22 nt, Human
uuaaacccuggaugguggaugg

SEQ ID NO: 784363 - RNA, 24 nt, Human
uuaaacugugggcaguaagaacuc

SEQ ID NO: 784364 - RNA, 24 nt, Human
uuaaggugaacuagguaaaguagg

SEQ ID NO: 784365 - RNA, 23 nt, Human
uucaaccaaagcuuccccagggg

SEQ ID NO: 784366 - RNA, 19 nt, Human
uucaacuucuugacccauu

SEQ ID NO: 784367 - RNA, 19 nt, Human
uucagaauuaaacaaaaag

SEQ ID NO: 784368 - RNA, 22 nt, Human
uuccccccaaccccauaaacaa

SEQ ID NO: 784369 - RNA, 21 nt, Human
uugaauauuuuaccaugggau

SEQ ID NO: 784370 - RNA, 22 nt, Human
uugaauauuuuaccaugggaug

SEQ ID NO: 784371 - RNA, 19 nt, Human
uuuuuugucagcauuucag

SEQ ID NO: 784372 - RNA, 22 nt, Human
aaacaacagaucaagaggucaa

SEQ ID NO: 784373 - RNA, 23 nt, Human
aaacaacagaucaagaggucaga

SEQ ID NO: 784374 - RNA, 20 nt, Human
aacagaucaagaggucagaa

SEQ ID NO: 784375 - RNA, 24 nt, Human
aagaaaauaaaaacuacccauaac

SEQ ID NO: 784376 - RNA, 20 nt, Human
aagaggucagaagcugacaa

SEQ ID NO: 784377 - RNA, 19 nt, Human
aagcugggcuugucacucg

SEQ ID NO: 784378 - RNA, 22 nt, Human
aaggucaaaucagccaagugag

SEQ ID NO: 784379 - RNA, 23 nt, Human
aauguauagagaaguagaaggaa

SEQ ID NO: 784380 - RNA, 18 nt, Human
acaaaggccauaaacaac

SEQ ID NO: 784381 - RNA, 22 nt, Human
acaacugagggggucacccaga

SEQ ID NO: 784382 - RNA, 19 nt, Human
accaccugaaggcaaacac

SEQ ID NO: 784383 - RNA, 21 nt, Human
accauacacucuuguaguccc

SEQ ID NO: 784384 - RNA, 24 nt, Human
acccagaggucagagcuagagaac

SEQ ID NO: 784385 - RNA, 21 nt, Human
accgcugagagggagcgaagc

SEQ ID NO: 784386 - RNA, 30 nt, Human
acuacccauaaccccaccaccugaaggcag

SEQ ID NO: 784387 - RNA, 25 nt, Human
agaaaauaaaaacuacccauaaccc

SEQ ID NO: 784388 - RNA, 19 nt, Human
aggaagaaaauaaaaacua

SEQ ID NO: 784389 - RNA, 23 nt, Human
auagaccaagacccucaucaaga

SEQ ID NO: 784390 - RNA, 20 nt, Human
auggugcuugucaagaguuu

SEQ ID NO: 784391 - RNA, 18 nt, Human
caacagccaaggggagug

SEQ ID NO: 784392 - RNA, 19 nt, Human
caagacaaaggccauaaac

SEQ ID NO: 784393 - RNA, 19 nt, Human
cacaagaacaaguuguguu

SEQ ID NO: 784394 - RNA, 20 nt, Human
cacaggagaagauuccaugg

SEQ ID NO: 784395 - RNA, 18 nt, Human
cacaugcuuacuguagag

SEQ ID NO: 784396 - RNA, 18 nt, Human
caccauacacucuuguag

SEQ ID NO: 784397 - RNA, 26 nt, Human
cauacaccauacacucuuguaguccc

SEQ ID NO: 784398 - RNA, 21 nt, Human
cccauaaccccaccaccugaa

SEQ ID NO: 784399 - RNA, 23 nt, Human
cccauaaccccaccaccugaagg

SEQ ID NO: 784400 - RNA, 27 nt, Human
ccucauacaccauacacucuuguaguc

SEQ ID NO: 784401 - RNA, 19 nt, Human
ccugccuagacuucucccu

SEQ ID NO: 784402 - RNA, 20 nt, Human
ccuggaccaagaacuaggac

SEQ ID NO: 784403 - RNA, 21 nt, Human
ccuggaccaagaacuaggacc

SEQ ID NO: 784404 - RNA, 21 nt, Human
cgaaugguucaggauggauac

SEQ ID NO: 784405 - RNA, 20 nt, Human
cucacauuauguucuagcua

SEQ ID NO: 784406 - RNA, 25 nt, Human
cucauacaccauacacucuuguagu

SEQ ID NO: 784407 - RNA, 22 nt, Human
cugagggggucacccagagguc

SEQ ID NO: 784408 - RNA, 19 nt, Human
gccuggagcgggaggcuga

SEQ ID NO: 784409 - RNA, 19 nt, Human
ggagcccaggaggcaagaa

SEQ ID NO: 784410 - RNA, 27 nt, Human
ggugaaauagaaccagggcuuccucaa

SEQ ID NO: 784411 - RNA, 23 nt, Human
gugaugggaguucagaaccucau

SEQ ID NO: 784412 - RNA, 22 nt, Human
uaaaaacuacccauaaccccac

SEQ ID NO: 784413 - RNA, 24 nt, Human
uaaaaacuacccauaaccccacca

SEQ ID NO: 784414 - RNA, 20 nt, Human
uacuguaagaauguagugag

SEQ ID NO: 784415 - RNA, 22 nt, Human
uagaaccagggcuuccucaagu

SEQ ID NO: 784416 - RNA, 23 nt, Human
uagaccaagacccucaucaagaa

SEQ ID NO: 784417 - RNA, 22 nt, Human
uagcuaucuaugccuguuuaua

SEQ ID NO: 784418 - RNA, 21 nt, Human
uccaggaaccaguccuccagu

SEQ ID NO: 784419 - RNA, 25 nt, Human
ucugacucagccagugcuccccagg

SEQ ID NO: 784420 - RNA, 23 nt, Human
ugaaauagaaccagggcuuccuc

SEQ ID NO: 784421 - RNA, 18 nt, Human
ugagagggagcgaagcug

SEQ ID NO: 784422 - RNA, 19 nt, Human
ugagagggagcgaagcugg

SEQ ID NO: 784423 - RNA, 24 nt, Human
ugagauggugcuugucaagaguuu

SEQ ID NO: 784424 - RNA, 21 nt, Human
ugaugggaguucagaaccuca

SEQ ID NO: 784425 - RNA, 24 nt, Human
ugccacagccacaggauagugugg

SEQ ID NO: 784426 - RNA, 23 nt, Human
uggaauggguccaggaaccaguc

SEQ ID NO: 784427 - RNA, 24 nt, Human
uggcaagauacgcuaaggguuuuu

SEQ ID NO: 784428 - RNA, 21 nt, Human
uguuuauagaccaagacccuc

SEQ ID NO: 784429 - RNA, 21 nt, Human
uugagguaagauaugauuuau

SEQ ID NO: 784430 - RNA, 23 nt, Human
uuuaggugcuaugaguuggggca

SEQ ID NO: 784431 - RNA, 25 nt, Human
aaaacccugagcaggaccaagaccc

SEQ ID NO: 784432 - RNA, 21 nt, Human
aaagcccugaaucagagccaa

SEQ ID NO: 784433 - RNA, 23 nt, Human
aagacaaaaauauaggaacugga

SEQ ID NO: 784434 - RNA, 22 nt, Human
aagcaccucagaaaaugaaggu

SEQ ID NO: 784435 - RNA, 20 nt, Human
aaggcucaguuggcuugaaa

SEQ ID NO: 784436 - RNA, 18 nt, Human
aagguaggaauggcaaag

SEQ ID NO: 784437 - RNA, 19 nt, Human
aagguaggaauggcaaaga

SEQ ID NO: 784438 - RNA, 20 nt, Human
aagguaggaauggcaaagag

SEQ ID NO: 784439 - RNA, 20 nt, Human
aauuucuaucccuuccuauc

SEQ ID NO: 784440 - RNA, 25 nt, Human
acccugagcaggaccaagacccccg

SEQ ID NO: 784441 - RNA, 22 nt, Human
accggcucccuauacaaccugc

SEQ ID NO: 784442 - RNA, 24 nt, Human
agagaagccccaaggaaggccaca

SEQ ID NO: 784443 - RNA, 21 nt, Human
agagcagagcagcacuugcug

SEQ ID NO: 784444 - RNA, 18 nt, Human
agaggagggagaggagga

SEQ ID NO: 784445 - RNA, 23 nt, Human
agaggagggagaggaggaaggau

SEQ ID NO: 784446 - RNA, 25 nt, Human
agcaagaagagcauccuuaucuccu

SEQ ID NO: 784447 - RNA, 20 nt, Human
agcagggaaggcugagggcc

SEQ ID NO: 784448 - RNA, 23 nt, Human
aggaagaagacaaaaauauagga

SEQ ID NO: 784449 - RNA, 19 nt, Human
aggaauggcaaagagggga

SEQ ID NO: 784450 - RNA, 20 nt, Human
aggggucauuggcagagaaa

SEQ ID NO: 784451 - RNA, 23 nt, Human
agguaggaauggcaaagagggga

SEQ ID NO: 784452 - RNA, 21 nt, Human
aggugcaaccaccuuauaacc

SEQ ID NO: 784453 - RNA, 22 nt, Human
aggugcaaccaccuuauaacca

SEQ ID NO: 784454 - RNA, 21 nt, Human
aucaucccccuuaccucuucc

SEQ ID NO: 784455 - RNA, 19 nt, Human
auuccccucacccugcucc

SEQ ID NO: 784456 - RNA, 22 nt, Human
auuugugaaaacagccuuccuc

SEQ ID NO: 784457 - RNA, 18 nt, Human
caaagcagcacgcgcagc

SEQ ID NO: 784458 - RNA, 19 nt, Human
cacuuuaucaugacccuac

SEQ ID NO: 784459 - RNA, 23 nt, Human
cagccuaaugcugaccauccuuc

SEQ ID NO: 784460 - RNA, 20 nt, Human
caggaccaagacccccgcca

SEQ ID NO: 784461 - RNA, 21 nt, Human
caguccccaucagccuaaugc

SEQ ID NO: 784462 - RNA, 20 nt, Human
cauaacauuccccucacccu

SEQ ID NO: 784463 - RNA, 23 nt, Human
caucccccuuaccucuucccuac

SEQ ID NO: 784464 - RNA, 20 nt, Human
caugacccuaccaaaguccc

SEQ ID NO: 784465 - RNA, 22 nt, Human
ccaugccugcaugucuguuacc

SEQ ID NO: 784466 - RNA, 20 nt, Human
ccccucguccucucggccga

SEQ ID NO: 784467 - RNA, 21 nt, Human
ccccuuaccucuucccuacca

SEQ ID NO: 784468 - RNA, 21 nt, Human
cccuaccaaagucccucuccc

SEQ ID NO: 784469 - RNA, 24 nt, Human
ccuaccagggcuugguucucccca

SEQ ID NO: 784470 - RNA, 22 nt, Human
ccucacccugcuccagagugga

SEQ ID NO: 784471 - RNA, 24 nt, Human
ccugucuuaggucugaauaauugg

SEQ ID NO: 784472 - RNA, 22 nt, Human
ccuuccuauccuucucaguccc

SEQ ID NO: 784473 - RNA, 19 nt, Human
ccuuggcuaaggcacugac

SEQ ID NO: 784474 - RNA, 19 nt, Human
cgggcucgggcucgggcaa

SEQ ID NO: 784475 - RNA, 21 nt, Human
cuaccaaagucccucucccag

SEQ ID NO: 784476 - RNA, 25 nt, Human
cuccugccaccggcucccuauacaa

SEQ ID NO: 784477 - RNA, 20 nt, Human
cucgagccugguuucugagu

SEQ ID NO: 784478 - RNA, 18 nt, Human
cugagcaggaccaagacc

SEQ ID NO: 784479 - RNA, 22 nt, Human
cuuccuauccuucucagucccc

SEQ ID NO: 784480 - RNA, 21 nt, Human
cuugaaacguccacuccuaca

SEQ ID NO: 784481 - RNA, 18 nt, Human
cuuggcuaaggcacugac

SEQ ID NO: 784482 - RNA, 24 nt, Human
gaacuggagggguauggggacuac

SEQ ID NO: 784483 - RNA, 26 nt, Human
gaaucagagccaagcaccucagaaaa

SEQ ID NO: 784484 - RNA, 26 nt, Human
gaggaaggaugaaaacccugagcagg

SEQ ID NO: 784485 - RNA, 22 nt, Human
gcaaagcccugaaucagagcca

SEQ ID NO: 784486 - RNA, 23 nt, Human
gcaaagcccugaaucagagccaa

SEQ ID NO: 784487 - RNA, 22 nt, Human
gcaagguaggaauggcaaagag

SEQ ID NO: 784488 - RNA, 19 nt, Human
gcccuggcuggggaaaagc

SEQ ID NO: 784489 - RNA, 23 nt, Human
gcucuggcccucccccucguccu

SEQ ID NO: 784490 - RNA, 19 nt, Human
gcugagggcccuggcuggg

SEQ ID NO: 784491 - RNA, 19 nt, Human
ggcccucccccucguccuc

SEQ ID NO: 784492 - RNA, 21 nt, Human
ggcccuggcuggggaaaagcu

SEQ ID NO: 784493 - RNA, 24 nt, Human
gggaaaggaagaagacaaaaauau

SEQ ID NO: 784494 - RNA, 20 nt, Human
gggcacauguggucagagaa

SEQ ID NO: 784495 - RNA, 22 nt, Human
uaaaaagcaagaagagcauccu

SEQ ID NO: 784496 - RNA, 20 nt, Human
uaagagagaugagggaggug

SEQ ID NO: 784497 - RNA, 20 nt, Human
uaagagagaugagggaggug

SEQ ID NO: 784498 - RNA, 20 nt, Human
uaccagggcuugguucuccc

SEQ ID NO: 784499 - RNA, 18 nt, Human
uaccucuucccuaccagg

SEQ ID NO: 784500 - RNA, 21 nt, Human
ucacagaggagggagaggagg

SEQ ID NO: 784501 - RNA, 19 nt, Human
ucacuggggcagcagggaa

SEQ ID NO: 784502 - RNA, 19 nt, Human
ucacuggggcagcagggaa

SEQ ID NO: 784503 - RNA, 19 nt, Human
ucagaaaaugaaggucccu

SEQ ID NO: 784504 - RNA, 24 nt, Human
uccacuauaagagagaugagggag

SEQ ID NO: 784505 - RNA, 20 nt, Human
uccuuccacuauaagagaga

SEQ ID NO: 784506 - RNA, 23 nt, Human
ugaaaacagccuuccuccugcca

SEQ ID NO: 784507 - RNA, 22 nt, Human
ugaaaacccugagcaggaccaa

SEQ ID NO: 784508 - RNA, 19 nt, Human
ugaaucagagccaagcacc

SEQ ID NO: 784509 - RNA, 23 nt, Human
ugagccuuaggguuaagggcuaa

SEQ ID NO: 784510 - RNA, 24 nt, Human
ugccaccggcucccuauacaaccu

SEQ ID NO: 784511 - RNA, 21 nt, Human
ugccuuggcuaaggcacugac

SEQ ID NO: 784512 - RNA, 19 nt, Human
ugcugggauaggccucgag

SEQ ID NO: 784513 - RNA, 18 nt, Human
ugcuuaggaaauauggag

SEQ ID NO: 784514 - RNA, 19 nt, Human
uggaauuugugcagccagu

SEQ ID NO: 784515 - RNA, 18 nt, Human
uggcaaagaggggaaagg

SEQ ID NO: 784516 - RNA, 19 nt, Human
uggcaaagaggggaaagga

SEQ ID NO: 784517 - RNA, 19 nt, Human
uggcaaagaggggaaagga

SEQ ID NO: 784518 - RNA, 19 nt, Human
uggcagagaaaccccaaca

SEQ ID NO: 784519 - RNA, 23 nt, Human
uggcuggggaaaagcuggucuuu

SEQ ID NO: 784520 - RNA, 19 nt, Human
uugcugggauaggccucga

SEQ ID NO: 784521 - RNA, 24 nt, Human
uugucagggcucccaggugcaacc

SEQ ID NO: 784522 - RNA, 27 nt, Human
uuuuuaaucacgacauuacaagucauu

SEQ ID NO: 784523 - RNA, 23 nt, Human
uuuuuuuuuaucaccaucacucu

SEQ ID NO: 784524 - RNA, 22 nt, Human
aaaaaaaaaaaaaaaacaaaca

SEQ ID NO: 784525 - RNA, 29 nt, Human
aaaaaaaaaaaaaacaaacaaacaaacaa

SEQ ID NO: 784526 - RNA, 25 nt, Human
aaaaaaaaaaaacaaaacacaacua

SEQ ID NO: 784527 - RNA, 24 nt, Human
aaaaaaaaaaaacaaacaaacaaa

SEQ ID NO: 784528 - RNA, 25 nt, Human
aaaaaaaaaaaacaaacaaacaaac

SEQ ID NO: 784529 - RNA, 25 nt, Human
aaaaaaaaaaaacaaacaaacaaac

SEQ ID NO: 784530 - RNA, 25 nt, Human
aaaaaaaaaacaaacaaacaaacaa

SEQ ID NO: 784531 - RNA, 25 nt, Human
aaaaaaaacaaacaaacaaacaaaa

SEQ ID NO: 784532 - RNA, 28 nt, Human
aaaaaaacaaacaaacaaacaaaaaaaa

SEQ ID NO: 784533 - RNA, 22 nt, Human
aaaaaacaaaacacaacuagac

SEQ ID NO: 784534 - RNA, 24 nt, Human
aaaaacacaacaaaaccaacaaaa

SEQ ID NO: 784535 - RNA, 21 nt, Human
aaaaacccaccaacauccaag

SEQ ID NO: 784536 - RNA, 18 nt, Human
aaaaagcagaaaaacaca

SEQ ID NO: 784537 - RNA, 18 nt, Human
aaaaccaccacuacuaca

SEQ ID NO: 784538 - RNA, 21 nt, Human
aaaauacugacuagcaggccg

SEQ ID NO: 784539 - RNA, 25 nt, Human
aaaaugcuaaaaaaaucauugcaau

SEQ ID NO: 784540 - RNA, 25 nt, Human
aaacaaaaaaaaaaaccugcuagga

SEQ ID NO: 784541 - RNA, 19 nt, Human
aaacaaaacacaacuagac

SEQ ID NO: 784542 - RNA, 21 nt, Human
aaacaaaacacaacuagacaa

SEQ ID NO: 784543 - RNA, 22 nt, Human
aaacaaaacacaacuagacaaa

SEQ ID NO: 784544 - RNA, 23 nt, Human
aaacacaacaaaaccaacaaaac

SEQ ID NO: 784545 - RNA, 20 nt, Human
aaacuacaggauuaaaaaaa

SEQ ID NO: 784546 - RNA, 21 nt, Human
aaacuauuuccuauuauuauu

SEQ ID NO: 784547 - RNA, 24 nt, Human
aaacugauuaaccacccaaaaauu

SEQ ID NO: 784548 - RNA, 23 nt, Human
aaagcaaauuuaagaagcaaaaa

SEQ ID NO: 784549 - RNA, 24 nt, Human
aaagcagaaaaacacaacaaaacc

SEQ ID NO: 784550 - RNA, 27 nt, Human
aaagcagaaaaacacaacaaaaccaac

SEQ ID NO: 784551 - RNA, 22 nt, Human
aaauaccuucacugccacuuuc

SEQ ID NO: 784552 - RNA, 18 nt, Human
aaauacugacagauaccu

SEQ ID NO: 784553 - RNA, 22 nt, Human
aacaaaaccaacaaaaccacca

SEQ ID NO: 784554 - RNA, 25 nt, Human
aaccaaaaagcagaaaaacacaaca

SEQ ID NO: 784555 - RNA, 20 nt, Human
aaccaccacuacuacaaucu

SEQ ID NO: 784556 - RNA, 21 nt, Human
aagaaauuacaaaauguggca

SEQ ID NO: 784557 - RNA, 20 nt, Human
aagagaaucaaaaccaacga

SEQ ID NO: 784558 - RNA, 23 nt, Human
aagcacccagcugccauaaauac

SEQ ID NO: 784559 - RNA, 22 nt, Human
aagcagaaaaacacaacaaaac

SEQ ID NO: 784560 - RNA, 23 nt, Human
aaggcuacagugagcugugauca

SEQ ID NO: 784561 - RNA, 24 nt, Human
aaugaugaaaagcaaauuuaagaa

SEQ ID NO: 784562 - RNA, 18 nt, Human
aauuagccagacauggug

SEQ ID NO: 784563 - RNA, 20 nt, Human
acaaaaccaacaaaaccacc

SEQ ID NO: 784564 - RNA, 23 nt, Human
acaaacaaaaaaaaaaaccugcu

SEQ ID NO: 784565 - RNA, 23 nt, Human
acacauuacuacuauauauaauc

SEQ ID NO: 784566 - RNA, 18 nt, Human
acaccacugcacuccagc

SEQ ID NO: 784567 - RNA, 20 nt, Human
acaccacugcacuccagccu

SEQ ID NO: 784568 - RNA, 22 nt, Human
acagaaacauaucuguaaacau

SEQ ID NO: 784569 - RNA, 24 nt, Human
acagauaccuucacugaaaauucu

SEQ ID NO: 784570 - RNA, 24 nt, Human
acagggcgagacuccaucucaaaa

SEQ ID NO: 784571 - RNA, 25 nt, Human
acauuuucccaaauuacuucugcca

SEQ ID NO: 784572 - RNA, 25 nt, Human
accaccacuacuacaaucaacaaaa

SEQ ID NO: 784573 - RNA, 19 nt, Human
accacugcacuccagccug

SEQ ID NO: 784574 - RNA, 24 nt, Human
acccaggaggcagagguugcagug

SEQ ID NO: 784575 - RNA, 20 nt, Human
acuacaaucaacaaaaaccu

SEQ ID NO: 784576 - RNA, 18 nt, Human
acuauacuccagccuggg

SEQ ID NO: 784577 - RNA, 24 nt, Human
acuccagccugggugaaagaguga

SEQ ID NO: 784578 - RNA, 18 nt, Human
acugcacuccagccuggg

SEQ ID NO: 784579 - RNA, 24 nt, Human
acugcacuccagccugggugacag

SEQ ID NO: 784580 - RNA, 21 nt, Human
agaaaaacacaacaaaaccaa

SEQ ID NO: 784581 - RNA, 21 nt, Human
agaaaaacacaacaaaaccaa

SEQ ID NO: 784582 - RNA, 22 nt, Human
agaaaacacccuuuuaacaaga

SEQ ID NO: 784583 - RNA, 20 nt, Human
agaaggcagugacuucuaca

SEQ ID NO: 784584 - RNA, 20 nt, Human
agagaauaagagaaucaaaa

SEQ ID NO: 784585 - RNA, 20 nt, Human
agagguugcagugagcuaag

SEQ ID NO: 784586 - RNA, 23 nt, Human
agagguugcagugagcuaagauc

SEQ ID NO: 784587 - RNA, 24 nt, Human
agagguugcagugagcuaagauca

SEQ ID NO: 784588 - RNA, 21 nt, Human
agauaaaaguaaugaaaagaa

SEQ ID NO: 784589 - RNA, 19 nt, Human
agauuuggagucccugaac

SEQ ID NO: 784590 - RNA, 24 nt, Human
agcacuuugggaggccgagguggg

SEQ ID NO: 784591 - RNA, 20 nt, Human
agccuggccaacauggugaa

SEQ ID NO: 784592 - RNA, 24 nt, Human
agccugggugacagggcgagacuc

SEQ ID NO: 784593 - RNA, 20 nt, Human
aggaaaaacuaaaucuaaca

SEQ ID NO: 784594 - RNA, 23 nt, Human
aggaaaaacuaaaucuaacaaaa

SEQ ID NO: 784595 - RNA, 23 nt, Human
aggaauucgagaucagccuggcc

SEQ ID NO: 784596 - RNA, 20 nt, Human
aggauuaaaaaaaaaaaaac

SEQ ID NO: 784597 - RNA, 19 nt, Human
aggcacauaucacuugaac

SEQ ID NO: 784598 - RNA, 24 nt, Human
aggcagagguugcagugagcuaag

SEQ ID NO: 784599 - RNA, 18 nt, Human
aggcaggacgaucacuug

SEQ ID NO: 784600 - RNA, 23 nt, Human
aggcaggacgaucacuugaaccc

SEQ ID NO: 784601 - RNA, 21 nt, Human
aggccgagguggguagaucac

SEQ ID NO: 784602 - RNA, 21 nt, Human
aggcugaggcaggacgaucac

SEQ ID NO: 784603 - RNA, 24 nt, Human
aggcugaggcaggacgaucacuug

SEQ ID NO: 784604 - RNA, 23 nt, Human
agguggguagaucacuugagguc

SEQ ID NO: 784605 - RNA, 23 nt, Human
aguguuuuuuuaaaacaagagau

SEQ ID NO: 784606 - RNA, 18 nt, Human
auaagagaaucaaaacca

SEQ ID NO: 784607 - RNA, 24 nt, Human
aucacaccacugcacuccagccug

SEQ ID NO: 784608 - RNA, 21 nt, Human
aucacuugaggucaggaauuc

SEQ ID NO: 784609 - RNA, 24 nt, Human
aucaugucacuauacuccagccug

SEQ ID NO: 784610 - RNA, 23 nt, Human
augaaaagcaaauuuaagaagca

SEQ ID NO: 784611 - RNA, 24 nt, Human
augaccucauauaauauaucagaa

SEQ ID NO: 784612 - RNA, 22 nt, Human
augucacuauacuccagccugg

SEQ ID NO: 784613 - RNA, 21 nt, Human
auuagcuauccuucugcaaau

SEQ ID NO: 784614 - RNA, 20 nt, Human
caaaaaaaacuaauaugaca

SEQ ID NO: 784615 - RNA, 19 nt, Human
caaaaacccaccaacaucc

SEQ ID NO: 784616 - RNA, 23 nt, Human
caaaaagcagaaaaacacaacaa

SEQ ID NO: 784617 - RNA, 24 nt, Human
caaaacauaaaacauuauuagcuu

SEQ ID NO: 784618 - RNA, 20 nt, Human
caaaaccaacaaaaccacca

SEQ ID NO: 784619 - RNA, 25 nt, Human
caaacaaacaaaaaaaaaaaccugc

SEQ ID NO: 784620 - RNA, 23 nt, Human
caacaaaaccaccacuacuacaa

SEQ ID NO: 784621 - RNA, 21 nt, Human
cacaccacugcacuccagccu

SEQ ID NO: 784622 - RNA, 19 nt, Human
cacaccuauaauuccagcu

SEQ ID NO: 784623 - RNA, 23 nt, Human
caccuauaauuccagcuacucgg

SEQ ID NO: 784624 - RNA, 24 nt, Human
caccuauaauuccagcuacucggg

SEQ ID NO: 784625 - RNA, 24 nt, Human
cacgccuguaaucccagcacuuug

SEQ ID NO: 784626 - RNA, 21 nt, Human
cacuacuacaaucaacaaaaa

SEQ ID NO: 784627 - RNA, 19 nt, Human
cacuauacuccagccuggg

SEQ ID NO: 784628 - RNA, 19 nt, Human
cacuauacuccagccuggg

SEQ ID NO: 784629 - RNA, 20 nt, Human
cacuauacuccagccugggu

SEQ ID NO: 784630 - RNA, 22 nt, Human
cacuauacuccagccuggguga

SEQ ID NO: 784631 - RNA, 24 nt, Human
cacuauacuccagccugggugaaa

SEQ ID NO: 784632 - RNA, 22 nt, Human
cacuccagccugggugacaggg

SEQ ID NO: 784633 - RNA, 23 nt, Human
cacuccagccugggugacagggc

SEQ ID NO: 784634 - RNA, 24 nt, Human
cacuccagccugggugacagggcg

SEQ ID NO: 784635 - RNA, 19 nt, Human
cacugcacuccagccuggg

SEQ ID NO: 784636 - RNA, 19 nt, Human
cacugcacuccagccuggg

SEQ ID NO: 784637 - RNA, 22 nt, Human
cacugcacuccagccuggguga

SEQ ID NO: 784638 - RNA, 23 nt, Human
cacugcacuccagccugggugac

SEQ ID NO: 784639 - RNA, 24 nt, Human
cacugcacuccagccugggugaca

SEQ ID NO: 784640 - RNA, 24 nt, Human
cacugcacuccagccugggugaca

SEQ ID NO: 784641 - RNA, 20 nt, Human
cacuugaggucaggaauucg

SEQ ID NO: 784642 - RNA, 19 nt, Human
cagaaaaacacaacaaaac

SEQ ID NO: 784643 - RNA, 21 nt, Human
cagcacuuugggaggccgagg

SEQ ID NO: 784644 - RNA, 24 nt, Human
cagcacuuugggaggccgaggugg

SEQ ID NO: 784645 - RNA, 24 nt, Human
cagcuacucgggaggcugaggcag

SEQ ID NO: 784646 - RNA, 19 nt, Human
caggcaugcacuuguaguc

SEQ ID NO: 784647 - RNA, 23 nt, Human
caggccggagaugguggcucacg

SEQ ID NO: 784648 - RNA, 22 nt, Human
cauauacuuacagacacaaucc

SEQ ID NO: 784649 - RNA, 20 nt, Human
cauauuuauguauauacaua

SEQ ID NO: 784650 - RNA, 18 nt, Human
cauguuccuacuuccugu

SEQ ID NO: 784651 - RNA, 18 nt, Human
ccaacaaaaccaccacua

SEQ ID NO: 784652 - RNA, 20 nt, Human
ccacugcacuccagccuggg

SEQ ID NO: 784653 - RNA, 20 nt, Human
ccacugcacuccagccuggg

SEQ ID NO: 784654 - RNA, 21 nt, Human
ccacugcacuccagccugggu

SEQ ID NO: 784655 - RNA, 21 nt, Human
ccacugcacuccagccugggu

SEQ ID NO: 784656 - RNA, 23 nt, Human
ccacugcacuccagccuggguga

SEQ ID NO: 784657 - RNA, 23 nt, Human
ccacugcacuccagccuggguga

SEQ ID NO: 784658 - RNA, 24 nt, Human
ccacugcacuccagccugggugac

SEQ ID NO: 784659 - RNA, 25 nt, Human
ccacugcacuccagccugggugaca

SEQ ID NO: 784660 - RNA, 24 nt, Human
ccaucucaaaaaaaaaaaaaaaaa

SEQ ID NO: 784661 - RNA, 21 nt, Human
ccaugugcuacagaaagacuc

SEQ ID NO: 784662 - RNA, 22 nt, Human
cccaaaaauucaaaaacccacc

SEQ ID NO: 784663 - RNA, 24 nt, Human
cccaaauaaagauuaauaguuuau

SEQ ID NO: 784664 - RNA, 22 nt, Human
cccaucucuacuaaaaauacaa

SEQ ID NO: 784665 - RNA, 21 nt, Human
ccuauaauuccagcuacucgg

SEQ ID NO: 784666 - RNA, 21 nt, Human
ccuggccaacauggugaauug

SEQ ID NO: 784667 - RNA, 30 nt, Human
ccuggccaacauggugaauugaaaucccaa

SEQ ID NO: 784668 - RNA, 22 nt, Human
ccugggugacagggcgagacuc

SEQ ID NO: 784669 - RNA, 22 nt, Human
ccuguaaucccagcacuuuggg

SEQ ID NO: 784670 - RNA, 21 nt, Human
ccuucacugccacuuucagcc

SEQ ID NO: 784671 - RNA, 20 nt, Human
ccuuccguuagcauuucuuc

SEQ ID NO: 784672 - RNA, 23 nt, Human
ccuucugcaaauaaauauaaaag

SEQ ID NO: 784673 - RNA, 21 nt, Human
ccuuuauaaauuggaagcauc

SEQ ID NO: 784674 - RNA, 23 nt, Human
cgagacuccaucucaaaaaaaaa

SEQ ID NO: 784675 - RNA, 24 nt, Human
cgagaucagccuggccaacauggu

SEQ ID NO: 784676 - RNA, 24 nt, Human
cgagguggguagaucacuugaggu

SEQ ID NO: 784677 - RNA, 26 nt, Human
cgagguggguagaucacuugagguca

SEQ ID NO: 784678 - RNA, 23 nt, Human
cgccuguaaucccagcacuuugg

SEQ ID NO: 784679 - RNA, 24 nt, Human
cgggaggcugaggcaggacgauca

SEQ ID NO: 784680 - RNA, 22 nt, Human
cuacaggauuaaaaaaaaaaaa

SEQ ID NO: 784681 - RNA, 19 nt, Human
cuaguucacucacucaacc

SEQ ID NO: 784682 - RNA, 18 nt, Human
cucaaaaaaaaaaaaaaa

SEQ ID NO: 784683 - RNA, 20 nt, Human
cucacagauaaaaguaauga

SEQ ID NO: 784684 - RNA, 22 nt, Human
cucacgccuguaaucccagcac

SEQ ID NO: 784685 - RNA, 24 nt, Human
cucacgccuguaaucccagcacuu

SEQ ID NO: 784686 - RNA, 26 nt, Human
cuccaaaaaaaaaaaaaaaacaaaca

SEQ ID NO: 784687 - RNA, 27 nt, Human
cuccaaaaaaaaaaaaaaaacaaacaa

SEQ ID NO: 784688 - RNA, 19 nt, Human
cuccaucucaaaaaaaaaa

SEQ ID NO: 784689 - RNA, 19 nt, Human
cugaggcaggacgaucacu

SEQ ID NO: 784690 - RNA, 21 nt, Human
cugaggcaggacgaucacuug

SEQ ID NO: 784691 - RNA, 21 nt, Human
cuuccauacucacaacgguug

SEQ ID NO: 784692 - RNA, 21 nt, Human
gaaaaacacaacaaaaccaac

SEQ ID NO: 784693 - RNA, 19 nt, Human
gaaaaacuaaaucuaacaa

SEQ ID NO: 784694 - RNA, 20 nt, Human
gaaaagcaaauuuaagaagc

SEQ ID NO: 784695 - RNA, 23 nt, Human
gaaccccuaaguauaaucacuca

SEQ ID NO: 784696 - RNA, 24 nt, Human
gaagggggaggauugcuugagucu

SEQ ID NO: 784697 - RNA, 22 nt, Human
gagaauaagagaaucaaaacca

SEQ ID NO: 784698 - RNA, 24 nt, Human
gaucacuugaacccaggaggcaga

SEQ ID NO: 784699 - RNA, 18 nt, Human
gaucacuugaggucagga

SEQ ID NO: 784700 - RNA, 24 nt, Human
gaucacuugaggucaggaauucga

SEQ ID NO: 784701 - RNA, 28 nt, Human
gauuaaaaaaaaaaaaacaaaacacaac

SEQ ID NO: 784702 - RNA, 24 nt, Human
gauuuuuucaguuaaaaaaugaga

SEQ ID NO: 784703 - RNA, 24 nt, Human
gcacuccagccugggugacagggc

SEQ ID NO: 784704 - RNA, 22 nt, Human
gcaggacgaucacuugaaccca

SEQ ID NO: 784705 - RNA, 25 nt, Human
gcaggccggagaugguggcucacgc

SEQ ID NO: 784706 - RNA, 22 nt, Human
gccaacauggugaauugaaauc

SEQ ID NO: 784707 - RNA, 20 nt, Human
gccaggaaauucuucccaau

SEQ ID NO: 784708 - RNA, 23 nt, Human
gccauggaaggagauuauacaac

SEQ ID NO: 784709 - RNA, 18 nt, Human
gccugggugacagggcga

SEQ ID NO: 784710 - RNA, 20 nt, Human
gcuaagaucacaccacugca

SEQ ID NO: 784711 - RNA, 21 nt, Human
ggaaaagagagaaacagaaaa

SEQ ID NO: 784712 - RNA, 24 nt, Human
ggagaugguggcucacgccuguaa

SEQ ID NO: 784713 - RNA, 22 nt, Human
ggaggcagagguugcagugagc

SEQ ID NO: 784714 - RNA, 21 nt, Human
ggcacacaccuauaauuccag

SEQ ID NO: 784715 - RNA, 21 nt, Human
gggaagauccuaaacauaaca

SEQ ID NO: 784716 - RNA, 18 nt, Human
gggcaagaagcacccagc

SEQ ID NO: 784717 - RNA, 21 nt, Human
gguagaucacuugaggucagg

SEQ ID NO: 784718 - RNA, 24 nt, Human
gguggcucacgccuguaaucccag

SEQ ID NO: 784719 - RNA, 24 nt, Human
gucacuauacuccagccuggguga

SEQ ID NO: 784720 - RNA, 23 nt, Human
guggcucacgccuguaaucccag

SEQ ID NO: 784721 - RNA, 22 nt, Human
guugcauuuaggcugcuuuuuu

SEQ ID NO: 784722 - RNA, 23 nt, Human
uaaaaaaugagaaucccuaaaga

SEQ ID NO: 784723 - RNA, 22 nt, Human
uaaaauauuaaaaugcuaaaaa

SEQ ID NO: 784724 - RNA, 26 nt, Human
uaaacauaacaaauccuuccguuagc

SEQ ID NO: 784725 - RNA, 22 nt, Human
uaaauaaagcauccgaaucuua

SEQ ID NO: 784726 - RNA, 23 nt, Human
uaaauaaagcauccgaaucuuaa

SEQ ID NO: 784727 - RNA, 19 nt, Human
uaaauacugacagauaccu

SEQ ID NO: 784728 - RNA, 23 nt, Human
uaaaucaccucaggccuucauuu

SEQ ID NO: 784729 - RNA, 21 nt, Human
uaacaaauaccuucacugcca

SEQ ID NO: 784730 - RNA, 26 nt, Human
uaacuuuuaaauaauuccuaaauuuc

SEQ ID NO: 784731 - RNA, 23 nt, Human
uaauaaaaaggaaaaacuaaauc

SEQ ID NO: 784732 - RNA, 23 nt, Human
uaauaaaauuauacaaaugcuac

SEQ ID NO: 784733 - RNA, 24 nt, Human
uaauauauacauauggaaaacugg

SEQ ID NO: 784734 - RNA, 23 nt, Human
uaauuuguauguauguauuccuu

SEQ ID NO: 784735 - RNA, 21 nt, Human
uacagaaugcuacaaacuaca

SEQ ID NO: 784736 - RNA, 25 nt, Human
uacagaaugcuacaaacuacaccau

SEQ ID NO: 784737 - RNA, 21 nt, Human
uaccuucacugccacuuucag

SEQ ID NO: 784738 - RNA, 22 nt, Human
uacuacaaucaacaaaaaccua

SEQ ID NO: 784739 - RNA, 22 nt, Human
uacuccagccugggugaaagag

SEQ ID NO: 784740 - RNA, 23 nt, Human
uacuccagccugggugaaagagu

SEQ ID NO: 784741 - RNA, 24 nt, Human
uacuccagccugggugaaagagug

SEQ ID NO: 784742 - RNA, 24 nt, Human
uagaucacuugaggucaggaauuc

SEQ ID NO: 784743 - RNA, 27 nt, Human
uagaucacuugaggucaggaauucgag

SEQ ID NO: 784744 - RNA, 22 nt, Human
uagcauuuuaaaaaauaaaauc

SEQ ID NO: 784745 - RNA, 21 nt, Human
uaguuuauaagugguacagug

SEQ ID NO: 784746 - RNA, 28 nt, Human
uauaaacagaaacauaucuguaaacauu

SEQ ID NO: 784747 - RNA, 21 nt, Human
uauaaucacucaacauuuucu

SEQ ID NO: 784748 - RNA, 19 nt, Human
uauaauuccagcuacucgg

SEQ ID NO: 784749 - RNA, 21 nt, Human
uauacauauacuuacagacac

SEQ ID NO: 784750 - RNA, 24 nt, Human
uauaucagaaauuaggagaaaaca

SEQ ID NO: 784751 - RNA, 26 nt, Human
uaucagaaauuaggagaaaacacccu

SEQ ID NO: 784752 - RNA, 18 nt, Human
uauggaaaacuggccacu

SEQ ID NO: 784753 - RNA, 26 nt, Human
uauuauaugguuauaaacagaaacau

SEQ ID NO: 784754 - RNA, 22 nt, Human
uauuaucuaucucuuuuacaua

SEQ ID NO: 784755 - RNA, 19 nt, Human
ucacaaacagagaaaacau

SEQ ID NO: 784756 - RNA, 23 nt, Human
ucacaccacugcacuccagccug

SEQ ID NO: 784757 - RNA, 21 nt, Human
ucacuauacuccagccugggu

SEQ ID NO: 784758 - RNA, 18 nt, Human
ucaguagucagaggaguu

SEQ ID NO: 784759 - RNA, 21 nt, Human
ucaguuagcauuuuaaaaaau

SEQ ID NO: 784760 - RNA, 29 nt, Human
uccaaaaaaaaaaaaaaaacaaacaaacu

SEQ ID NO: 784761 - RNA, 26 nt, Human
uccaaguaaagauuaacaccuuucua

SEQ ID NO: 784762 - RNA, 23 nt, Human
uccagccugggugaaagagugag

SEQ ID NO: 784763 - RNA, 24 nt, Human
uccagccugggugaaagagugaga

SEQ ID NO: 784764 - RNA, 23 nt, Human
uccagccugggugacagggcgag

SEQ ID NO: 784765 - RNA, 24 nt, Human
uccagccugggugacagggcgaga

SEQ ID NO: 784766 - RNA, 23 nt, Human
uccaucucaaaaaaaaaaaaaaa

SEQ ID NO: 784767 - RNA, 25 nt, Human
ucgggaggcugaggcaggacgauca

SEQ ID NO: 784768 - RNA, 23 nt, Human
ucuauuaaaaaaaaaaaagauga

SEQ ID NO: 784769 - RNA, 20 nt, Human
ucuccaaaaaaaaaaaaaaa

SEQ ID NO: 784770 - RNA, 24 nt, Human
ucuccaaaaaaaaaaaaaaaacaa

SEQ ID NO: 784771 - RNA, 22 nt, Human
ucucuacuaaaaauacaaaaaa

SEQ ID NO: 784772 - RNA, 24 nt, Human
ucucucaaacauuacuggcaaaca

SEQ ID NO: 784773 - RNA, 24 nt, Human
ucuuuuuucaauuaaaaaaugaga

SEQ ID NO: 784774 - RNA, 23 nt, Human
ugaaaagcaaauuuaagaagcaa

SEQ ID NO: 784775 - RNA, 18 nt, Human
ugaacugcuuaaagaagg

SEQ ID NO: 784776 - RNA, 24 nt, Human
ugaggcaggacgaucacuugaacc

SEQ ID NO: 784777 - RNA, 25 nt, Human
ugaggcaggacgaucacuugaaccc

SEQ ID NO: 784778 - RNA, 21 nt, Human
ugauuaaccacccaaaaauuc

SEQ ID NO: 784779 - RNA, 18 nt, Human
ugcaaaaaaaacuaauau

SEQ ID NO: 784780 - RNA, 19 nt, Human
ugcaaauaauucauacaau

SEQ ID NO: 784781 - RNA, 21 nt, Human
ugcauguuccuacuuccuguu

SEQ ID NO: 784782 - RNA, 18 nt, Human
ugccaggaaauucuuccc

SEQ ID NO: 784783 - RNA, 19 nt, Human
ugccuuaauacaaucuugg

SEQ ID NO: 784784 - RNA, 19 nt, Human
uggaugaccucauauaaua

SEQ ID NO: 784785 - RNA, 19 nt, Human
uggaugaccucauauaaua

SEQ ID NO: 784786 - RNA, 22 nt, Human
uggcacacaccuauaauuccag

SEQ ID NO: 784787 - RNA, 18 nt, Human
uggccaacauggugaauu

SEQ ID NO: 784788 - RNA, 24 nt, Human
uggcucacgccuguaaucccagca

SEQ ID NO: 784789 - RNA, 20 nt, Human
ugggaggccgagguggguag

SEQ ID NO: 784790 - RNA, 24 nt, Human
ugggaggccgagguggguagauca

SEQ ID NO: 784791 - RNA, 24 nt, Human
uggguagaucacuugaggucagga

SEQ ID NO: 784792 - RNA, 23 nt, Human
ugguggcacacaccuauaauucc

SEQ ID NO: 784793 - RNA, 24 nt, Human
ugguggcucacgccuguaauccca

SEQ ID NO: 784794 - RNA, 26 nt, Human
uguauauacauauacuuacagacaca

SEQ ID NO: 784795 - RNA, 22 nt, Human
uguaugcauguuccuacuuccu

SEQ ID NO: 784796 - RNA, 21 nt, Human
ugugcuacagaaagacucacc

SEQ ID NO: 784797 - RNA, 21 nt, Human
uguggcauauuuauguauaua

SEQ ID NO: 784798 - RNA, 25 nt, Human
uguggcauauuuauguauauacauu

SEQ ID NO: 784799 - RNA, 23 nt, Human
uuaaaaaaaaaaaaacaaaacac

SEQ ID NO: 784800 - RNA, 23 nt, Human
uuaaaaaauaaaaucuacuguga

SEQ ID NO: 784801 - RNA, 26 nt, Human
uuaaccacccaaaaauucaaaaaccc

SEQ ID NO: 784802 - RNA, 19 nt, Human
uuagaaaauguuugaacua

SEQ ID NO: 784803 - RNA, 21 nt, Human
uuagcauuuuaaaaaauaaaa

SEQ ID NO: 784804 - RNA, 19 nt, Human
uucaaggaaagaaauaauc

SEQ ID NO: 784805 - RNA, 25 nt, Human
uucacaaucuuucuucuuuuaauuu

SEQ ID NO: 784806 - RNA, 21 nt, Human
uugaacuugacauuuuaauga

SEQ ID NO: 784807 - RNA, 19 nt, Human
uugcagugagcuaagauca

SEQ ID NO: 784808 - RNA, 20 nt, Human
uugcagugagcuaagaucac

SEQ ID NO: 784809 - RNA, 24 nt, Human
uugcuugagucucggaagucaagg

SEQ ID NO: 784810 - RNA, 25 nt, Human
uugggaggccgagguggguagauca

SEQ ID NO: 784811 - RNA, 21 nt, Human
uuuauguauauacauauacuu

SEQ ID NO: 784812 - RNA, 22 nt, Human
aaaaacaaaaacuaacagaaga

SEQ ID NO: 784813 - RNA, 22 nt, Human
aaaaaccuuuggacagacagag

SEQ ID NO: 784814 - RNA, 18 nt, Human
aaaauaggaacaaggcag

SEQ ID NO: 784815 - RNA, 21 nt, Human
aaacccagaaaguuucuugug

SEQ ID NO: 784816 - RNA, 23 nt, Human
aaagaaaauuuccagaauuucac

SEQ ID NO: 784817 - RNA, 23 nt, Human
aaagauaauuuacagaaaggucu

SEQ ID NO: 784818 - RNA, 22 nt, Human
aaagcagaauauauuuuugcuc

SEQ ID NO: 784819 - RNA, 20 nt, Human
aagcauccuagcuuuuggca

SEQ ID NO: 784820 - RNA, 23 nt, Human
aaggaugccucugcuuucaauug

SEQ ID NO: 784821 - RNA, 21 nt, Human
aaguauuuccccaacacccca

SEQ ID NO: 784822 - RNA, 19 nt, Human
aauaaauggaaagaaauaa

SEQ ID NO: 784823 - RNA, 30 nt, Human
aauaaguuauuuuauauauauauauauauu

SEQ ID NO: 784824 - RNA, 23 nt, Human
aaugcccuccccuauccccgccc

SEQ ID NO: 784825 - RNA, 27 nt, Human
acaaggcaauugaacacacagcagaac

SEQ ID NO: 784826 - RNA, 24 nt, Human
acacaaaaacacagacuuuuuuca

SEQ ID NO: 784827 - RNA, 26 nt, Human
acagacauuccuaacuacauaccucu

SEQ ID NO: 784828 - RNA, 21 nt, Human
acuaaaugcagggcacaucug

SEQ ID NO: 784829 - RNA, 18 nt, Human
agacagggcuaaugcucu

SEQ ID NO: 784830 - RNA, 22 nt, Human
agauauaauuagaagcuaacaa

SEQ ID NO: 784831 - RNA, 18 nt, Human
agcagaacuuuaaaaccu

SEQ ID NO: 784832 - RNA, 23 nt, Human
agccaaaguaguuacuuucuccc

SEQ ID NO: 784833 - RNA, 20 nt, Human
aggagacucaacaaaaauca

SEQ ID NO: 784834 - RNA, 26 nt, Human
aggcaggagacucaacaaaaaucaaa

SEQ ID NO: 784835 - RNA, 20 nt, Human
aggcugcgggcugcugcacc

SEQ ID NO: 784836 - RNA, 23 nt, Human
aggggacuagagaggggaaucug

SEQ ID NO: 784837 - RNA, 21 nt, Human
aguaccggagauuaaauaacc

SEQ ID NO: 784838 - RNA, 23 nt, Human
auaacuauauauauauauaugua

SEQ ID NO: 784839 - RNA, 23 nt, Human
auauauguauauauauauauuug

SEQ ID NO: 784840 - RNA, 18 nt, Human
auccagacuaaaaagaua

SEQ ID NO: 784841 - RNA, 23 nt, Human
augaaaacacaccuucuacaguc

SEQ ID NO: 784842 - RNA, 24 nt, Human
augaacgauggcucuaaugcugca

SEQ ID NO: 784843 - RNA, 23 nt, Human
auucacacuuaaaaacaaaaacu

SEQ ID NO: 784844 - RNA, 22 nt, Human
auuuuauauauauauauauauu

SEQ ID NO: 784845 - RNA, 24 nt, Human
caaaacaagaaaacccauccauac

SEQ ID NO: 784846 - RNA, 22 nt, Human
caaacagcacaaagagauuugu

SEQ ID NO: 784847 - RNA, 19 nt, Human
caaauaaucaacaaaacaa

SEQ ID NO: 784848 - RNA, 18 nt, Human
caacaaaacaagaaaacc

SEQ ID NO: 784849 - RNA, 22 nt, Human
caacaccccagaggccgcuuaa

SEQ ID NO: 784850 - RNA, 22 nt, Human
caauauguaaccgaagccaagu

SEQ ID NO: 784851 - RNA, 22 nt, Human
cagcagaacuuuaaaaccugua

SEQ ID NO: 784852 - RNA, 21 nt, Human
ccacaaguuucugaaccugga

SEQ ID NO: 784853 - RNA, 24 nt, Human
ccaggcaagcaaaauggacauuua

SEQ ID NO: 784854 - RNA, 21 nt, Human
ccauccauacuacagucacuc

SEQ ID NO: 784855 - RNA, 20 nt, Human
cccaaaauacugacaguuaa

SEQ ID NO: 784856 - RNA, 19 nt, Human
ccccaacaccccagaggcc

SEQ ID NO: 784857 - RNA, 18 nt, Human
ccccagaggccgcuuaac

SEQ ID NO: 784858 - RNA, 20 nt, Human
ccccagaggccgcuuaacuc

SEQ ID NO: 784859 - RNA, 21 nt, Human
ccccagaggccgcuuaacucc

SEQ ID NO: 784860 - RNA, 20 nt, Human
ccgucaggaucugagacugc

SEQ ID NO: 784861 - RNA, 21 nt, Human
ccuauccccgccccacaaaaa

SEQ ID NO: 784862 - RNA, 21 nt, Human
ccucaaauaaucaacaaaaca

SEQ ID NO: 784863 - RNA, 18 nt, Human
cgaauaggcagucugguc

SEQ ID NO: 784864 - RNA, 27 nt, Human
cggagagcaagucuggagcaccuacaa

SEQ ID NO: 784865 - RNA, 19 nt, Human
cuccccuauccccgccccc

SEQ ID NO: 784866 - RNA, 19 nt, Human
cucccuggcugaggcugcg

SEQ ID NO: 784867 - RNA, 20 nt, Human
cuuaaaaacccaucuugcuc

SEQ ID NO: 784868 - RNA, 23 nt, Human
cuuucaguugccuuuuuuaaaua

SEQ ID NO: 784869 - RNA, 22 nt, Human
gaaaauuuccagaauuucacau

SEQ ID NO: 784870 - RNA, 19 nt, Human
gaaagcggcugggacuccc

SEQ ID NO: 784871 - RNA, 19 nt, Human
gcucaaggaugccucugcu

SEQ ID NO: 784872 - RNA, 24 nt, Human
gcugcagugcaacaggauggcaau

SEQ ID NO: 784873 - RNA, 21 nt, Human
ggaacuggccuaccacaaguu

SEQ ID NO: 784874 - RNA, 23 nt, Human
ggagcaccuacaguugaaaagca

SEQ ID NO: 784875 - RNA, 21 nt, Human
ggugaaaugaaacuaucugga

SEQ ID NO: 784876 - RNA, 19 nt, Human
guaaaacaaacuggagccu

SEQ ID NO: 784877 - RNA, 22 nt, Human
guauauauauauauuuguauau

SEQ ID NO: 784878 - RNA, 18 nt, Human
uaaaaaaacacaaaaaca

SEQ ID NO: 784879 - RNA, 20 nt, Human
uaaaaaaacacaaaaacaca

SEQ ID NO: 784880 - RNA, 20 nt, Human
uaaaaaaacacaaaaacaca

SEQ ID NO: 784881 - RNA, 19 nt, Human
uaaaaccuguaaaacaaac

SEQ ID NO: 784882 - RNA, 22 nt, Human
uaaaguaaaaccaaaaagauca

SEQ ID NO: 784883 - RNA, 25 nt, Human
uacacaaggcaauugaacacacagc

SEQ ID NO: 784884 - RNA, 22 nt, Human
uacagucaggguuuauuaucuu

SEQ ID NO: 784885 - RNA, 18 nt, Human
uagagaggggaaucuggc

SEQ ID NO: 784886 - RNA, 18 nt, Human
uauauauauauauauaua

SEQ ID NO: 784887 - RNA, 19 nt, Human
uauauauauauauauauau

SEQ ID NO: 784888 - RNA, 18 nt, Human
uauauauauauguauaua

SEQ ID NO: 784889 - RNA, 18 nt, Human
uauauauauguauauaua

SEQ ID NO: 784890 - RNA, 23 nt, Human
uauauauauguauauauauauau

SEQ ID NO: 784891 - RNA, 18 nt, Human
uauauauguauauauaua

SEQ ID NO: 784892 - RNA, 18 nt, Human
uauauguauauauauaua

SEQ ID NO: 784893 - RNA, 21 nt, Human
uauggaaggaaauuagaaaag

SEQ ID NO: 784894 - RNA, 22 nt, Human
uauguauauauauauauuugua

SEQ ID NO: 784895 - RNA, 28 nt, Human
ucaaauaaucaacaaaacaagaaaaccc

SEQ ID NO: 784896 - RNA, 21 nt, Human
ucaaugcccuccccuaucccc

SEQ ID NO: 784897 - RNA, 19 nt, Human
ucacuggcuaaaaacauga

SEQ ID NO: 784898 - RNA, 22 nt, Human
uccauacuacagucacucaaaa

SEQ ID NO: 784899 - RNA, 21 nt, Human
ucccaaaguccugcuuguacc

SEQ ID NO: 784900 - RNA, 23 nt, Human
uccccaaauaccccaggggaucc

SEQ ID NO: 784901 - RNA, 22 nt, Human
uccccuauccccgccccacaaa

SEQ ID NO: 784902 - RNA, 24 nt, Human
uccccuauccccgccccacaaaaa

SEQ ID NO: 784903 - RNA, 21 nt, Human
ucccuggcugaggcugcgggc

SEQ ID NO: 784904 - RNA, 21 nt, Human
ucuaaguuugucuuaaauguu

SEQ ID NO: 784905 - RNA, 22 nt, Human
ucuaauuacuuucaguugccuu

SEQ ID NO: 784906 - RNA, 21 nt, Human
ucuggagcaccuacaguugaa

SEQ ID NO: 784907 - RNA, 20 nt, Human
ucuggcccuaaggcgacaag

SEQ ID NO: 784908 - RNA, 21 nt, Human
ucuggcccuaaggcgacaagu

SEQ ID NO: 784909 - RNA, 26 nt, Human
ucugugugugugaugugaugcugugu

SEQ ID NO: 784910 - RNA, 20 nt, Human
ucuuucaugaacuacuuguu

SEQ ID NO: 784911 - RNA, 20 nt, Human
ugaaaaacaaggaaaacagc

SEQ ID NO: 784912 - RNA, 21 nt, Human
ugaacacacagcagaacuuua

SEQ ID NO: 784913 - RNA, 21 nt, Human
ugaagcauccuagcuuuuggc

SEQ ID NO: 784914 - RNA, 21 nt, Human
ugaguugugagacggaagaac

SEQ ID NO: 784915 - RNA, 21 nt, Human
ugcaacaaauagaguuaagug

SEQ ID NO: 784916 - RNA, 23 nt, Human
ugcaacaggauggcaauguaaug

SEQ ID NO: 784917 - RNA, 19 nt, Human
ugcuauacacaagcugcag

SEQ ID NO: 784918 - RNA, 24 nt, Human
uggaaagaaauaaaguauuucccc

SEQ ID NO: 784919 - RNA, 20 nt, Human
uggagcaccuacaguugaaa

SEQ ID NO: 784920 - RNA, 24 nt, Human
uggcaagacaugcaaaucauauuc

SEQ ID NO: 784921 - RNA, 22 nt, Human
uggcaagcaggcaggagacuca

SEQ ID NO: 784922 - RNA, 23 nt, Human
uggcuucucugaacacugaggcc

SEQ ID NO: 784923 - RNA, 23 nt, Human
uggggucuggguuuguuuuuugu

SEQ ID NO: 784924 - RNA, 24 nt, Human
uguauauauauauauuuguauaua

SEQ ID NO: 784925 - RNA, 20 nt, Human
uguaugucacaaacccagaa

SEQ ID NO: 784926 - RNA, 18 nt, Human
uguauucauuaaucacuu

SEQ ID NO: 784927 - RNA, 19 nt, Human
ugugugaggaccuaaggag

SEQ ID NO: 784928 - RNA, 21 nt, Human
ugugugugugaugugaugcug

SEQ ID NO: 784929 - RNA, 23 nt, Human
ugugugugugaugugaugcugug

SEQ ID NO: 784930 - RNA, 24 nt, Human
uguucaaugcuuuaaagcucaagg

SEQ ID NO: 784931 - RNA, 22 nt, Human
uuaaaaacaaaaacuaacagaa

SEQ ID NO: 784932 - RNA, 20 nt, Human
uuaaaaccuguaaaacaaac

SEQ ID NO: 784933 - RNA, 23 nt, Human
uuaauuucugcacacacacacaa

SEQ ID NO: 784934 - RNA, 18 nt, Human
uucaaugcccuccccuau

SEQ ID NO: 784935 - RNA, 21 nt, Human
uucaaugcccuccccuauccc

SEQ ID NO: 784936 - RNA, 19 nt, Human
uucacauuauuuuccuuaa

SEQ ID NO: 784937 - RNA, 21 nt, Human
uucgcuaaaaaaauacacccu

SEQ ID NO: 784938 - RNA, 18 nt, Human
uucuccccaaauacccca

SEQ ID NO: 784939 - RNA, 24 nt, Human
uuguacaugggccugaagcauccu

SEQ ID NO: 784940 - RNA, 22 nt, Human
uuguagaacuucaaugcccucc

SEQ ID NO: 784941 - RNA, 21 nt, Human
uugucccaaaguccugcuugu

SEQ ID NO: 784942 - RNA, 19 nt, Human
uuuauauauauauauauau

SEQ ID NO: 784943 - RNA, 20 nt, Human
uuucuuuaaaugacacgcau

SEQ ID NO: 784944 - RNA, 28 nt, Human
uuuuaaauaacuauauauauauauaugu

SEQ ID NO: 784945 - RNA, 22 nt, Human
aaacagcccucaacaucagaaa

SEQ ID NO: 784946 - RNA, 22 nt, Human
aaagcaucucaagucucccaaa

SEQ ID NO: 784947 - RNA, 20 nt, Human
aaaggagugggggugagcca

SEQ ID NO: 784948 - RNA, 20 nt, Human
aacgacccugggaaagucag

SEQ ID NO: 784949 - RNA, 18 nt, Human
aacugcuucaccaggaac

SEQ ID NO: 784950 - RNA, 19 nt, Human
aagcaauuaaaacaugaua

SEQ ID NO: 784951 - RNA, 22 nt, Human
aagcacacguucuaaagucaaa

SEQ ID NO: 784952 - RNA, 20 nt, Human
aaggcaacauggcccagagc

SEQ ID NO: 784953 - RNA, 23 nt, Human
aaggcaacauggcccagagcuca

SEQ ID NO: 784954 - RNA, 18 nt, Human
aaguggucuccacgaugc

SEQ ID NO: 784955 - RNA, 24 nt, Human
acaacagaggggccgcggcauggg

SEQ ID NO: 784956 - RNA, 22 nt, Human
acacgcagggcugggcgcugaa

SEQ ID NO: 784957 - RNA, 20 nt, Human
acagagccaaacagcccuca

SEQ ID NO: 784958 - RNA, 20 nt, Human
acucuguguucucuccgcuu

SEQ ID NO: 784959 - RNA, 18 nt, Human
acuggagcccacgugugc

SEQ ID NO: 784960 - RNA, 24 nt, Human
acuggccugcccuuuagacugcgc

SEQ ID NO: 784961 - RNA, 23 nt, Human
agacagagccaaacagcccucaa

SEQ ID NO: 784962 - RNA, 19 nt, Human
agacaggacgccuccuccg

SEQ ID NO: 784963 - RNA, 20 nt, Human
agaugcaguggcuggcugug

SEQ ID NO: 784964 - RNA, 24 nt, Human
agcaucucaagucucccaaauaac

SEQ ID NO: 784965 - RNA, 19 nt, Human
agccaaagcaucucaaguc

SEQ ID NO: 784966 - RNA, 21 nt, Human
agcccacgugugcaccugcag

SEQ ID NO: 784967 - RNA, 21 nt, Human
agccccuagcccaaggcuccu

SEQ ID NO: 784968 - RNA, 28 nt, Human
agcuauacagacagagccaaacagcccu

SEQ ID NO: 784969 - RNA, 25 nt, Human
agcucggcuuuccuuccccagcccc

SEQ ID NO: 784970 - RNA, 22 nt, Human
aggcaacauggcccagagcuca

SEQ ID NO: 784971 - RNA, 19 nt, Human
aggcagagaggagccacug

SEQ ID NO: 784972 - RNA, 22 nt, Human
aggcagccucuacacuugccaa

SEQ ID NO: 784973 - RNA, 21 nt, Human
aggcagcggguccgacccgca

SEQ ID NO: 784974 - RNA, 19 nt, Human
agugggggugagccacugc

SEQ ID NO: 784975 - RNA, 24 nt, Human
agugugcagaccucuggaggagca

SEQ ID NO: 784976 - RNA, 18 nt, Human
augaacaaaaauaaguac

SEQ ID NO: 784977 - RNA, 22 nt, Human
augguccaguaugagcaucuga

SEQ ID NO: 784978 - RNA, 22 nt, Human
caaaguccucacacaaaguucu

SEQ ID NO: 784979 - RNA, 19 nt, Human
caaggcacacauguacgca

SEQ ID NO: 784980 - RNA, 18 nt, Human
caaggggccaccuccccc

SEQ ID NO: 784981 - RNA, 24 nt, Human
cacaucaguggccauccucagaga

SEQ ID NO: 784982 - RNA, 22 nt, Human
cacaucucuuucucuacccuuu

SEQ ID NO: 784983 - RNA, 24 nt, Human
caccgggacccccccgugaagaca

SEQ ID NO: 784984 - RNA, 20 nt, Human
cacugcacgaggcccuuugc

SEQ ID NO: 784985 - RNA, 25 nt, Human
cagaagauccccaggggcaaucuga

SEQ ID NO: 784986 - RNA, 18 nt, Human
cagagcucaccugcaggc

SEQ ID NO: 784987 - RNA, 22 nt, Human
cagcauuuaaaggccgaggcag

SEQ ID NO: 784988 - RNA, 23 nt, Human
cagcauuuaaaggccgaggcaga

SEQ ID NO: 784989 - RNA, 22 nt, Human
cagcggaccgccacgugggccc

SEQ ID NO: 784990 - RNA, 22 nt, Human
cagcucggcuuuccuuccccag

SEQ ID NO: 784991 - RNA, 26 nt, Human
caggccucaggcggccccucccacag

SEQ ID NO: 784992 - RNA, 18 nt, Human
cagggcucaaaggcagag

SEQ ID NO: 784993 - RNA, 22 nt, Human
caucagaaaugagaucagccug

SEQ ID NO: 784994 - RNA, 22 nt, Human
cauguacgcaugacuaaccaag

SEQ ID NO: 784995 - RNA, 23 nt, Human
ccaaacagcccucaacaucagaa

SEQ ID NO: 784996 - RNA, 21 nt, Human
ccacgugugcaccugcagccu

SEQ ID NO: 784997 - RNA, 20 nt, Human
ccacuggagcccacgugugc

SEQ ID NO: 784998 - RNA, 18 nt, Human
ccagagcucaccugcagg

SEQ ID NO: 784999 - RNA, 21 nt, Human
ccagcucuggaaaaacuaucu

SEQ ID NO: 785000 - RNA, 21 nt, Human
cccacaggcccagcucagacc

SEQ ID NO: 785001 - RNA, 22 nt, Human
cccacaugugcuguucugggcu

SEQ ID NO: 785002 - RNA, 22 nt, Human
ccccagccccuagcccaaggcu

SEQ ID NO: 785003 - RNA, 19 nt, Human
ccccgggacccgugggccc

SEQ ID NO: 785004 - RNA, 20 nt, Human
ccccuagcccaaggcuccug

SEQ ID NO: 785005 - RNA, 24 nt, Human
cccgcagcccaggccccgcgggac

SEQ ID NO: 785006 - RNA, 23 nt, Human
cccgcaggugcgcgcgagcagcc

SEQ ID NO: 785007 - RNA, 28 nt, Human
cccgggacccgugggcccgcagcccagg

SEQ ID NO: 785008 - RNA, 18 nt, Human
cccgugggcccgcagccc

SEQ ID NO: 785009 - RNA, 21 nt, Human
cccuggccggggacucagaac

SEQ ID NO: 785010 - RNA, 18 nt, Human
cccuuugccgcgccaccu

SEQ ID NO: 785011 - RNA, 18 nt, Human
ccgcagcagcucauccuu

SEQ ID NO: 785012 - RNA, 20 nt, Human
ccgcagcagcucauccuucc

SEQ ID NO: 785013 - RNA, 24 nt, Human
ccucacucuacugugcaggcugga

SEQ ID NO: 785014 - RNA, 18 nt, Human
cggcaugugaaguggagu

SEQ ID NO: 785015 - RNA, 23 nt, Human
cggcgaacagcggcgcgcacccu

SEQ ID NO: 785016 - RNA, 22 nt, Human
cgggcacgcgguaggcagcggg

SEQ ID NO: 785017 - RNA, 19 nt, Human
cgugggcccgcagcccagg

SEQ ID NO: 785018 - RNA, 20 nt, Human
cucaacaucagaaaugagau

SEQ ID NO: 785019 - RNA, 24 nt, Human
cucacucuacugugcaggcuggac

SEQ ID NO: 785020 - RNA, 22 nt, Human
cucaugcauccuggcuaagacu

SEQ ID NO: 785021 - RNA, 21 nt, Human
cucuauugccacagggcuucc

SEQ ID NO: 785022 - RNA, 20 nt, Human
cugcgcagcugcaaaacggu

SEQ ID NO: 785023 - RNA, 19 nt, Human
cuggccucugaagaggacc

SEQ ID NO: 785024 - RNA, 19 nt, Human
cugggaaggagggcacggg

SEQ ID NO: 785025 - RNA, 21 nt, Human
cuuaaaccacacacagaggca

SEQ ID NO: 785026 - RNA, 20 nt, Human
cuuccagacacuggccugcc

SEQ ID NO: 785027 - RNA, 25 nt, Human
gaaaauauauacaucuuuaaggaac

SEQ ID NO: 785028 - RNA, 18 nt, Human
gaaacugcuucaccagga

SEQ ID NO: 785029 - RNA, 20 nt, Human
gaagacaggacgccuccucc

SEQ ID NO: 785030 - RNA, 20 nt, Human
gaggacaacagcgcacaggc

SEQ ID NO: 785031 - RNA, 22 nt, Human
gaggacccaggaaacuggcgag

SEQ ID NO: 785032 - RNA, 24 nt, Human
gaggggccgcggcauggggcucug

SEQ ID NO: 785033 - RNA, 20 nt, Human
gcagaaugcuccccaggacc

SEQ ID NO: 785034 - RNA, 22 nt, Human
gcagaaugcuccccaggaccag

SEQ ID NO: 785035 - RNA, 21 nt, Human
gcagcccgcggcgaacagcgg

SEQ ID NO: 785036 - RNA, 18 nt, Human
gcagcucauccuuccacu

SEQ ID NO: 785037 - RNA, 19 nt, Human
gcagggcugggcgcugaag

SEQ ID NO: 785038 - RNA, 21 nt, Human
gcaguggcuggcugugguccg

SEQ ID NO: 785039 - RNA, 18 nt, Human
gcccaaggcuccuguuac

SEQ ID NO: 785040 - RNA, 18 nt, Human
gccccucccacaggccca

SEQ ID NO: 785041 - RNA, 23 nt, Human
gccccucccacaggcccagcuca

SEQ ID NO: 785042 - RNA, 22 nt, Human
gcccgcagcccaggccccgcgg

SEQ ID NO: 785043 - RNA, 22 nt, Human
gccgcgccaccuucuguacgac

SEQ ID NO: 785044 - RNA, 19 nt, Human
gcgagaccucaugugaccc

SEQ ID NO: 785045 - RNA, 22 nt, Human
gcgcgacgaggacgccgggcac

SEQ ID NO: 785046 - RNA, 21 nt, Human
gcgcugaagacacagaagauc

SEQ ID NO: 785047 - RNA, 18 nt, Human
ggacccaggaaacuggcg

SEQ ID NO: 785048 - RNA, 19 nt, Human
ggacccaggaaacuggcga

SEQ ID NO: 785049 - RNA, 21 nt, Human
ggcccuuugccgcgccaccuu

SEQ ID NO: 785050 - RNA, 19 nt, Human
ggccgaggcagaaaguggu

SEQ ID NO: 785051 - RNA, 23 nt, Human
ggccguggagugcagagcacccc

SEQ ID NO: 785052 - RNA, 20 nt, Human
ggccucugaagaggacccag

SEQ ID NO: 785053 - RNA, 18 nt, Human
ggggugagccacugccca

SEQ ID NO: 785054 - RNA, 19 nt, Human
ggguccagcugugcagggc

SEQ ID NO: 785055 - RNA, 18 nt, Human
gucaaugucucauuucca

SEQ ID NO: 785056 - RNA, 19 nt, Human
guccaaggagaaacggagu

SEQ ID NO: 785057 - RNA, 20 nt, Human
gucuguucuucucggcugcc

SEQ ID NO: 785058 - RNA, 24 nt, Human
gugaagacaggacgccuccuccga

SEQ ID NO: 785059 - RNA, 22 nt, Human
gugcaccugcagccucuacaac

SEQ ID NO: 785060 - RNA, 19 nt, Human
guggagugcagagcacccc

SEQ ID NO: 785061 - RNA, 20 nt, Human
guggagugcagagcacccca

SEQ ID NO: 785062 - RNA, 21 nt, Human
uaaaggagugggggugagcca

SEQ ID NO: 785063 - RNA, 21 nt, Human
uaacaugaacaaaaauaagua

SEQ ID NO: 785064 - RNA, 24 nt, Human
uaacucaaucagcgaucccuuucu

SEQ ID NO: 785065 - RNA, 22 nt, Human
uaagauugggaagguguuccaa

SEQ ID NO: 785066 - RNA, 26 nt, Human
uacagacagagccaaacagcccucaa

SEQ ID NO: 785067 - RNA, 21 nt, Human
uacuaaauaaaauuaaagguu

SEQ ID NO: 785068 - RNA, 18 nt, Human
uacuuaaaccacacacag

SEQ ID NO: 785069 - RNA, 23 nt, Human
uacuuugauacacuuuacuaaau

SEQ ID NO: 785070 - RNA, 18 nt, Human
uagcgcggcuccgacgcc

SEQ ID NO: 785071 - RNA, 25 nt, Human
uagugcugggaaggagggcacgggg

SEQ ID NO: 785072 - RNA, 18 nt, Human
uaucaggaguuuucagca

SEQ ID NO: 785073 - RNA, 22 nt, Human
ucaaggcaacauggcccagagc

SEQ ID NO: 785074 - RNA, 18 nt, Human
ucagcaaacuauuuaaaa

SEQ ID NO: 785075 - RNA, 26 nt, Human
ucaguggccauccucagagagccccu

SEQ ID NO: 785076 - RNA, 26 nt, Human
uccacaaacacacaucaguggccauc

SEQ ID NO: 785077 - RNA, 22 nt, Human
uccccagccccuagcccaaggc

SEQ ID NO: 785078 - RNA, 19 nt, Human
uccccaggaccagccugcc

SEQ ID NO: 785079 - RNA, 24 nt, Human
uccccgggacccgugggcccgcag

SEQ ID NO: 785080 - RNA, 18 nt, Human
uccgacccgcaggugcgc

SEQ ID NO: 785081 - RNA, 22 nt, Human
uccgggaaacgugacacaugau

SEQ ID NO: 785082 - RNA, 19 nt, Human
uccuguucagaagcggaau

SEQ ID NO: 785083 - RNA, 20 nt, Human
ucucuacccuuuuacuuaca

SEQ ID NO: 785084 - RNA, 20 nt, Human
ucugaacuaagauugggaag

SEQ ID NO: 785085 - RNA, 18 nt, Human
ucuggaaaaacuaucuca

SEQ ID NO: 785086 - RNA, 21 nt, Human
ucugugccgagguguuaaggg

SEQ ID NO: 785087 - RNA, 19 nt, Human
ucuguucuucucggcugcc

SEQ ID NO: 785088 - RNA, 22 nt, Human
ugaaacugcuucaccaggaaca

SEQ ID NO: 785089 - RNA, 18 nt, Human
ugaagacaggacgccucc

SEQ ID NO: 785090 - RNA, 21 nt, Human
ugaagacaggacgccuccucc

SEQ ID NO: 785091 - RNA, 20 nt, Human
ugaagaggacccaggaaacu

SEQ ID NO: 785092 - RNA, 21 nt, Human
ugaagucuuagacugugagag

SEQ ID NO: 785093 - RNA, 18 nt, Human
ugacacaugauagugcug

SEQ ID NO: 785094 - RNA, 21 nt, Human
ugaccggguccgcagaaugcu

SEQ ID NO: 785095 - RNA, 18 nt, Human
ugagaagggccguggagu

SEQ ID NO: 785096 - RNA, 22 nt, Human
ugcagcagaugcaguggcuggc

SEQ ID NO: 785097 - RNA, 20 nt, Human
ugcgcagcugcaaaacgguu

SEQ ID NO: 785098 - RNA, 19 nt, Human
ugcuguucugggcugcugc

SEQ ID NO: 785099 - RNA, 23 nt, Human
ugggaaggagggcacggggcagc

SEQ ID NO: 785100 - RNA, 22 nt, Human
ugggaagguguuccacacuggc

SEQ ID NO: 785101 - RNA, 25 nt, Human
ugggaaguguggcugagaagggccg

SEQ ID NO: 785102 - RNA, 24 nt, Human
ugggagagggcccagccacacauc

SEQ ID NO: 785103 - RNA, 23 nt, Human
ugucaaggcaacauggcccagag

SEQ ID NO: 785104 - RNA, 19 nt, Human
uguuaucaggaguuuucag

SEQ ID NO: 785105 - RNA, 24 nt, Human
uguucugggcugcugcccuggccu

SEQ ID NO: 785106 - RNA, 18 nt, Human
uuaggauggguccagcug

SEQ ID NO: 785107 - RNA, 23 nt, Human
uucugggcugcugcccuggccuc

SEQ ID NO: 785108 - RNA, 18 nt, Human
uuuggauaaccaaagucc

SEQ ID NO: 785109 - RNA, 24 nt, Human
aaaaaagcaaccuguauuaaagcc

SEQ ID NO: 785110 - RNA, 18 nt, Human
aaaaagcuuaucaacagc

SEQ ID NO: 785111 - RNA, 22 nt, Human
aaaacaaaaacaaaaaacacaa

SEQ ID NO: 785112 - RNA, 22 nt, Human
aaacaaaaaacacaauuuccaa

SEQ ID NO: 785113 - RNA, 21 nt, Human
aaacaaaaacaaaaaacacaa

SEQ ID NO: 785114 - RNA, 26 nt, Human
aaacaagagaaaugcaaaggggaccc

SEQ ID NO: 785115 - RNA, 22 nt, Human
aaaccagccagcaaagcucccc

SEQ ID NO: 785116 - RNA, 21 nt, Human
aaagaaagagauaauggaaau

SEQ ID NO: 785117 - RNA, 20 nt, Human
aaaggaaauaauuaaacuuc

SEQ ID NO: 785118 - RNA, 20 nt, Human
aaccagacacaucuuaagca

SEQ ID NO: 785119 - RNA, 18 nt, Human
aagaucacccacuugaaa

SEQ ID NO: 785120 - RNA, 23 nt, Human
aagcagacauaaagacaguugac

SEQ ID NO: 785121 - RNA, 21 nt, Human
aaggagaaaaugguaggguga

SEQ ID NO: 785122 - RNA, 18 nt, Human
aaucuuauuaucucucac

SEQ ID NO: 785123 - RNA, 21 nt, Human
acaaacuuccaccuuuaaauc

SEQ ID NO: 785124 - RNA, 19 nt, Human
acaagcagacauaaagaca

SEQ ID NO: 785125 - RNA, 24 nt, Human
acacuuccaacaaggcacacauaa

SEQ ID NO: 785126 - RNA, 21 nt, Human
acagcaauaugaagugguguc

SEQ ID NO: 785127 - RNA, 24 nt, Human
acagguaagcagacauuucuauac

SEQ ID NO: 785128 - RNA, 23 nt, Human
acgugaacaaauaccauuagaac

SEQ ID NO: 785129 - RNA, 18 nt, Human
acugaaguaagaaaagcu

SEQ ID NO: 785130 - RNA, 22 nt, Human
acugcugcacaauaaauucuga

SEQ ID NO: 785131 - RNA, 18 nt, Human
acugggauuuccccuuag

SEQ ID NO: 785132 - RNA, 18 nt, Human
agaaaacaaaaaggggag

SEQ ID NO: 785133 - RNA, 19 nt, Human
agaaaagauuuuuucuugg

SEQ ID NO: 785134 - RNA, 23 nt, Human
agaauaaaggagaaaaugguagg

SEQ ID NO: 785135 - RNA, 21 nt, Human
agacacaucuuaagcagcaug

SEQ ID NO: 785136 - RNA, 18 nt, Human
agagaagaaaagauuuuu

SEQ ID NO: 785137 - RNA, 19 nt, Human
agauaauggaaauaaggcc

SEQ ID NO: 785138 - RNA, 22 nt, Human
agauuuaaaggagggaaaaaaa

SEQ ID NO: 785139 - RNA, 23 nt, Human
agcuggucaauuugcaauguuua

SEQ ID NO: 785140 - RNA, 18 nt, Human
aggaaaaaccugacaugc

SEQ ID NO: 785141 - RNA, 20 nt, Human
aggagaaaacaaaaagggga

SEQ ID NO: 785142 - RNA, 21 nt, Human
aggagacaauaagauuacaaa

SEQ ID NO: 785143 - RNA, 18 nt, Human
aguuaaacaauguuccuu

SEQ ID NO: 785144 - RNA, 23 nt, Human
aguugacacuuccaacaaggcac

SEQ ID NO: 785145 - RNA, 22 nt, Human
aucaaugccacaaacaguucca

SEQ ID NO: 785146 - RNA, 22 nt, Human
auccuccaugaccaugcugcaa

SEQ ID NO: 785147 - RNA, 22 nt, Human
auccucuuuuuuucucuacacu

SEQ ID NO: 785148 - RNA, 20 nt, Human
augaaggauaacugaucaca

SEQ ID NO: 785149 - RNA, 25 nt, Human
augaaguggugucugucggcgcuug

SEQ ID NO: 785150 - RNA, 22 nt, Human
auugaccaugucuuggauauug

SEQ ID NO: 785151 - RNA, 24 nt, Human
caaaaaauacuauaaagaaagaga

SEQ ID NO: 785152 - RNA, 20 nt, Human
caaagcuccccauugcuuuc

SEQ ID NO: 785153 - RNA, 21 nt, Human
caacaguguaaauguacuuca

SEQ ID NO: 785154 - RNA, 25 nt, Human
caacaugauagucugucugucucuu

SEQ ID NO: 785155 - RNA, 22 nt, Human
caacuuuaccuaaaguuggaag

SEQ ID NO: 785156 - RNA, 18 nt, Human
caaguuaaacaauguucc

SEQ ID NO: 785157 - RNA, 18 nt, Human
cacguuuugcuucaaaag

SEQ ID NO: 785158 - RNA, 21 nt, Human
cacguuuugcuucaaaaguaa

SEQ ID NO: 785159 - RNA, 20 nt, Human
cagcaaagcuccccauugcu

SEQ ID NO: 785160 - RNA, 20 nt, Human
cagcacuaccucgauguagu

SEQ ID NO: 785161 - RNA, 19 nt, Human
cagccagcaaagcucccca

SEQ ID NO: 785162 - RNA, 20 nt, Human
cagcccaauuauacucuagu

SEQ ID NO: 785163 - RNA, 20 nt, Human
caggcuaacaccauaaaaau

SEQ ID NO: 785164 - RNA, 22 nt, Human
caucaaugccacaaacaguucc

SEQ ID NO: 785165 - RNA, 20 nt, Human
cauggaauuguugagacuac

SEQ ID NO: 785166 - RNA, 19 nt, Human
cauguggguaacuuccugu

SEQ ID NO: 785167 - RNA, 20 nt, Human
cauucugcucaccuagcaca

SEQ ID NO: 785168 - RNA, 24 nt, Human
ccaaacacuacucaaugacaacuc

SEQ ID NO: 785169 - RNA, 23 nt, Human
ccaagauguuccacaaacuucca

SEQ ID NO: 785170 - RNA, 20 nt, Human
ccacaaacuuccaccuuuaa

SEQ ID NO: 785171 - RNA, 22 nt, Human
ccaccuuuaaaucacugucuga

SEQ ID NO: 785172 - RNA, 19 nt, Human
ccacuguccugauccuacu

SEQ ID NO: 785173 - RNA, 19 nt, Human
ccuccuucugcacccugag

SEQ ID NO: 785174 - RNA, 24 nt, Human
ccugauauaaucuagcagcaauga

SEQ ID NO: 785175 - RNA, 21 nt, Human
ccugcagaugccaccuuggaa

SEQ ID NO: 785176 - RNA, 24 nt, Human
cuaaagaauuuagguguuucuuga

SEQ ID NO: 785177 - RNA, 24 nt, Human
cuccaugaccaugcugcaaagacu

SEQ ID NO: 785178 - RNA, 25 nt, Human
cuccaugaccaugcugcaaagacug

SEQ ID NO: 785179 - RNA, 25 nt, Human
cucccuuggcauccuggacacauuu

SEQ ID NO: 785180 - RNA, 18 nt, Human
cucugauuggccaaacuc

SEQ ID NO: 785181 - RNA, 20 nt, Human
cugauccuacucuaccccau

SEQ ID NO: 785182 - RNA, 25 nt, Human
cugauccuacucuaccccaucucua

SEQ ID NO: 785183 - RNA, 19 nt, Human
cugcaacaugauagucugu

SEQ ID NO: 785184 - RNA, 19 nt, Human
cugcuaggauaucaucacg

SEQ ID NO: 785185 - RNA, 22 nt, Human
cuuuaugugaacaucaucaguc

SEQ ID NO: 785186 - RNA, 22 nt, Human
gaacaaauuucaaggugauaca

SEQ ID NO: 785187 - RNA, 20 nt, Human
gacauccacguuuugcuuca

SEQ ID NO: 785188 - RNA, 18 nt, Human
gagaacagcaggauugaa

SEQ ID NO: 785189 - RNA, 21 nt, Human
gagcauuaaauccauuauugu

SEQ ID NO: 785190 - RNA, 26 nt, Human
gaugccauuuuuccacuguuguguau

SEQ ID NO: 785191 - RNA, 20 nt, Human
gcgccuucaucuccaaaagc

SEQ ID NO: 785192 - RNA, 21 nt, Human
ggagaaaaugguagggugagg

SEQ ID NO: 785193 - RNA, 24 nt, Human
ggaucucuuccuuuuaacuacaga

SEQ ID NO: 785194 - RNA, 23 nt, Human
gggaagagauggguagcccaugg

SEQ ID NO: 785195 - RNA, 20 nt, Human
guagacacuauguaaacacc

SEQ ID NO: 785196 - RNA, 23 nt, Human
guuuugcuucaaaaguaacuuca

SEQ ID NO: 785197 - RNA, 23 nt, Human
uaaaaacacuggcugaacaaaau

SEQ ID NO: 785198 - RNA, 19 nt, Human
uaaaacaaaaacaaaaaac

SEQ ID NO: 785199 - RNA, 23 nt, Human
uaaaacaaaaacaaaaaacacaa

SEQ ID NO: 785200 - RNA, 19 nt, Human
uaaaaccuacucaauuuaa

SEQ ID NO: 785201 - RNA, 22 nt, Human
uaaaauacacaacugcugcaca

SEQ ID NO: 785202 - RNA, 21 nt, Human
uaacugauacagagaagaaaa

SEQ ID NO: 785203 - RNA, 18 nt, Human
uaagaauucagaaacaaa

SEQ ID NO: 785204 - RNA, 22 nt, Human
uaagaugccauuuuuccacugu

SEQ ID NO: 785205 - RNA, 19 nt, Human
uaagugcuuuuccuuuugg

SEQ ID NO: 785206 - RNA, 18 nt, Human
uacaaaaccagccagcaa

SEQ ID NO: 785207 - RNA, 20 nt, Human
uacaagcagacauaaagaca

SEQ ID NO: 785208 - RNA, 22 nt, Human
uacagaaaacccacaaguacua

SEQ ID NO: 785209 - RNA, 25 nt, Human
uacaucugcaaagcuaaauagaacc

SEQ ID NO: 785210 - RNA, 21 nt, Human
uaccaggucaccaaucugcaa

SEQ ID NO: 785211 - RNA, 25 nt, Human
uaccaugaccuuagaucuugcaaac

SEQ ID NO: 785212 - RNA, 18 nt, Human
uagaaaacaagagaaaug

SEQ ID NO: 785213 - RNA, 21 nt, Human
uagaaagaaccucccuuggca

SEQ ID NO: 785214 - RNA, 18 nt, Human
uagaagaauaaaggagaa

SEQ ID NO: 785215 - RNA, 19 nt, Human
uagcaacaucuccauuggc

SEQ ID NO: 785216 - RNA, 19 nt, Human
uaguauaagcaguaagaac

SEQ ID NO: 785217 - RNA, 25 nt, Human
uaguucaugaauuuaacuaauucuu

SEQ ID NO: 785218 - RNA, 23 nt, Human
uauaaaaacugaaguaagaaaag

SEQ ID NO: 785219 - RNA, 25 nt, Human
uauaacaaaaaauacuauaaagaaa

SEQ ID NO: 785220 - RNA, 21 nt, Human
uaucaccaucuuuauccucug

SEQ ID NO: 785221 - RNA, 23 nt, Human
uaucaggaccuuuggaucucuuc

SEQ ID NO: 785222 - RNA, 18 nt, Human
uaucccagaggacauaug

SEQ ID NO: 785223 - RNA, 19 nt, Human
uaucccagaggacauaugc

SEQ ID NO: 785224 - RNA, 18 nt, Human
uaugcugcgcuauguggg

SEQ ID NO: 785225 - RNA, 21 nt, Human
ucagcccauucuccauguccu

SEQ ID NO: 785226 - RNA, 20 nt, Human
ucaguccauccuccaugacc

SEQ ID NO: 785227 - RNA, 27 nt, Human
uccacaaacuuccaccuuuaaaucacc

SEQ ID NO: 785228 - RNA, 19 nt, Human
uccacugaggagaaaacaa

SEQ ID NO: 785229 - RNA, 19 nt, Human
uccaugaccaugcugcaaa

SEQ ID NO: 785230 - RNA, 21 nt, Human
uccaugaccaugcugcaaaga

SEQ ID NO: 785231 - RNA, 23 nt, Human
uccaugaccaugcugcaaagacu

SEQ ID NO: 785232 - RNA, 24 nt, Human
uccauuggcagcagccuuaacuaa

SEQ ID NO: 785233 - RNA, 23 nt, Human
uccuacucuaccccaucucuaau

SEQ ID NO: 785234 - RNA, 23 nt, Human
uccucugcuucgacauccacguu

SEQ ID NO: 785235 - RNA, 22 nt, Human
uccugcagaugccaccuuggaa

SEQ ID NO: 785236 - RNA, 22 nt, Human
uccuggagacugggaugacagc

SEQ ID NO: 785237 - RNA, 23 nt, Human
ucgaggucgagaucuauauuuac

SEQ ID NO: 785238 - RNA, 23 nt, Human
ucuagugggaagagauggguagc

SEQ ID NO: 785239 - RNA, 22 nt, Human
ucuauaacagcgccuucaucuc

SEQ ID NO: 785240 - RNA, 21 nt, Human
ucuauucauggaacaaauuuc

SEQ ID NO: 785241 - RNA, 19 nt, Human
ucuccauuggcagcagccu

SEQ ID NO: 785242 - RNA, 19 nt, Human
ucucugauuggccaaacuc

SEQ ID NO: 785243 - RNA, 20 nt, Human
ucuguagaaagaaccucccu

SEQ ID NO: 785244 - RNA, 23 nt, Human
ugaaaaaguucuggagaucugcu

SEQ ID NO: 785245 - RNA, 22 nt, Human
ugaaaugaaggauaacugauca

SEQ ID NO: 785246 - RNA, 22 nt, Human
ugaaccagacacaucuuaagca

SEQ ID NO: 785247 - RNA, 24 nt, Human
ugaaggauaacugaucacaaagaa

SEQ ID NO: 785248 - RNA, 18 nt, Human
ugaaugaaugcgugucag

SEQ ID NO: 785249 - RNA, 22 nt, Human
ugacacuuccaacaaggcacac

SEQ ID NO: 785250 - RNA, 21 nt, Human
ugacccagcaaguuuugauau

SEQ ID NO: 785251 - RNA, 20 nt, Human
ugagacuacaaaaccagcca

SEQ ID NO: 785252 - RNA, 20 nt, Human
ugaugcacuccaguccugga

SEQ ID NO: 785253 - RNA, 23 nt, Human
ugaugcagagcauuaaauccauu

SEQ ID NO: 785254 - RNA, 22 nt, Human
ugcaagaugaaaaaguucugga

SEQ ID NO: 785255 - RNA, 18 nt, Human
ugcacuccaguccuggau

SEQ ID NO: 785256 - RNA, 18 nt, Human
ugcaugagucagccaggu

SEQ ID NO: 785257 - RNA, 22 nt, Human
ugcucuaucaccaucuuuaucc

SEQ ID NO: 785258 - RNA, 18 nt, Human
uggaagaugcuauuaccu

SEQ ID NO: 785259 - RNA, 20 nt, Human
uggaagaugcuauuaccuuu

SEQ ID NO: 785260 - RNA, 22 nt, Human
uggaaggaaaggaaaaaccuga

SEQ ID NO: 785261 - RNA, 20 nt, Human
uggauauuguuggcaguuuu

SEQ ID NO: 785262 - RNA, 19 nt, Human
uggcauggaaggaaaggaa

SEQ ID NO: 785263 - RNA, 21 nt, Human
uggccaaacucugcaugaguc

SEQ ID NO: 785264 - RNA, 21 nt, Human
uggcucaaaaugaaauaacaa

SEQ ID NO: 785265 - RNA, 21 nt, Human
ugguauguuguauguguaugu

SEQ ID NO: 785266 - RNA, 22 nt, Human
ugguauguuguauguguauguu

SEQ ID NO: 785267 - RNA, 19 nt, Human
uguaaaaaugacccagcaa

SEQ ID NO: 785268 - RNA, 20 nt, Human
uguaaacaccugauauaauc

SEQ ID NO: 785269 - RNA, 19 nt, Human
uguaggguuuuuuguucug

SEQ ID NO: 785270 - RNA, 25 nt, Human
ugucuaauauauuccuacacuaaua

SEQ ID NO: 785271 - RNA, 23 nt, Human
uguguaaaaccacgaugaaauga

SEQ ID NO: 785272 - RNA, 19 nt, Human
uuaaaaugugccucucccc

SEQ ID NO: 785273 - RNA, 21 nt, Human
uuaaacagccagaaacagugu

SEQ ID NO: 785274 - RNA, 19 nt, Human
uuaccaggucaccaaucug

SEQ ID NO: 785275 - RNA, 21 nt, Human
uuauugcuuauuuuuccuuuu

SEQ ID NO: 785276 - RNA, 22 nt, Human
uucaguuuugcaagaugaaaaa

SEQ ID NO: 785277 - RNA, 24 nt, Human
uuccaccuuuaaaucacugucuga

SEQ ID NO: 785278 - RNA, 20 nt, Human
uuccaggucauaacaaacuu

SEQ ID NO: 785279 - RNA, 20 nt, Human
uuccuguugccauucugcuc

SEQ ID NO: 785280 - RNA, 22 nt, Human
uugaugcacuccaguccuggau

SEQ ID NO: 785281 - RNA, 30 nt, Human
uugcauagcuguguggccagcacauugccu

SEQ ID NO: 785282 - RNA, 19 nt, Human
uuggauuaaaaaaagcaac

SEQ ID NO: 785283 - RNA, 19 nt, Human
uuuaaaggagggaaaaaaa

SEQ ID NO: 785284 - RNA, 26 nt, Human
uuucaucacaaaaaauacaaaaaacu

SEQ ID NO: 785285 - RNA, 21 nt, Human
cugcggcugcugcuucugcug

SEQ ID NO: 785286 - RNA, 21 nt, Human
gagcggcaguagcggcucagg

SEQ ID NO: 785287 - RNA, 23 nt, Human
ugcuggcagaaggcggaaaaaaa

SEQ ID NO: 785288 - RNA, 28 nt, Human
uggcagaaggcggaaaaaaagggacccc

SEQ ID NO: 785289 - RNA, 19 nt, Human
aaaaaaaaaacccauacac

SEQ ID NO: 785290 - RNA, 22 nt, Human
aaaaaaaaacccauacacacug

SEQ ID NO: 785291 - RNA, 21 nt, Human
aaaacaagaauaugaacaaaa

SEQ ID NO: 785292 - RNA, 21 nt, Human
aaaacagagccacaacuguga

SEQ ID NO: 785293 - RNA, 24 nt, Human
aaaaucucaguaagaaaccaugua

SEQ ID NO: 785294 - RNA, 23 nt, Human
aaacaacauaaaauccugaaacu

SEQ ID NO: 785295 - RNA, 23 nt, Human
aaagagaagccuauggccaccaa

SEQ ID NO: 785296 - RNA, 18 nt, Human
aaagcuugcaccuaggga

SEQ ID NO: 785297 - RNA, 23 nt, Human
aacaagaaaaagcuugcaccuag

SEQ ID NO: 785298 - RNA, 21 nt, Human
aacagaggaauuacaucugga

SEQ ID NO: 785299 - RNA, 18 nt, Human
aacccauacacacugaau

SEQ ID NO: 785300 - RNA, 19 nt, Human
aacugugaacagaaaagca

SEQ ID NO: 785301 - RNA, 18 nt, Human
aacuuuaccugaaccaga

SEQ ID NO: 785302 - RNA, 19 nt, Human
aagccaguuucuauacuga

SEQ ID NO: 785303 - RNA, 19 nt, Human
aaucccaauuuugaauguu

SEQ ID NO: 785304 - RNA, 24 nt, Human
acagaugcaaguauaaucuaaaaa

SEQ ID NO: 785305 - RNA, 18 nt, Human
accaccuucuuugcuguc

SEQ ID NO: 785306 - RNA, 22 nt, Human
accuucaccaccuucuuugcug

SEQ ID NO: 785307 - RNA, 20 nt, Human
agaaaaagcuugcaccuagg

SEQ ID NO: 785308 - RNA, 18 nt, Human
agaacagcacagaagagg

SEQ ID NO: 785309 - RNA, 24 nt, Human
agagggauuucugcugcaggugac

SEQ ID NO: 785310 - RNA, 21 nt, Human
aggagggaccuaaucuugaau

SEQ ID NO: 785311 - RNA, 21 nt, Human
aggcacaacagucacugaacu

SEQ ID NO: 785312 - RNA, 21 nt, Human
agggguuugcauucaugaugu

SEQ ID NO: 785313 - RNA, 21 nt, Human
aguggcaucuccuugagcaac

SEQ ID NO: 785314 - RNA, 22 nt, Human
auaaaauccugaaacuggauag

SEQ ID NO: 785315 - RNA, 24 nt, Human
auauaaaaucucaguaagaaacca

SEQ ID NO: 785316 - RNA, 22 nt, Human
auauuaagauaguuacagagca

SEQ ID NO: 785317 - RNA, 22 nt, Human
auuacaucuggaucauacgauu

SEQ ID NO: 785318 - RNA, 24 nt, Human
caaaacaguucuuuugucaaacag

SEQ ID NO: 785319 - RNA, 25 nt, Human
cauucuuaaaaaacagagccacaac

SEQ ID NO: 785320 - RNA, 23 nt, Human
ccuauggccaccaaggccggggc

SEQ ID NO: 785321 - RNA, 19 nt, Human
cuggagggguuugcauuca

SEQ ID NO: 785322 - RNA, 25 nt, Human
gaauaugaacaaaacauuuuaaaau

SEQ ID NO: 785323 - RNA, 20 nt, Human
gacugcauagcauuuaaaac

SEQ ID NO: 785324 - RNA, 23 nt, Human
gagccacaacugugaacagaaaa

SEQ ID NO: 785325 - RNA, 18 nt, Human
ggagucuaaauuugugga

SEQ ID NO: 785326 - RNA, 20 nt, Human
ggaucauacgauucccucag

SEQ ID NO: 785327 - RNA, 23 nt, Human
guaaaauaaacagauauauagua

SEQ ID NO: 785328 - RNA, 22 nt, Human
gucacauugggaaaucccaauu

SEQ ID NO: 785329 - RNA, 18 nt, Human
uaaaacaagaauaugaac

SEQ ID NO: 785330 - RNA, 26 nt, Human
uaaaacaagaauaugaacaaaacauu

SEQ ID NO: 785331 - RNA, 25 nt, Human
uaaagucacagaugcaaguauaauc

SEQ ID NO: 785332 - RNA, 19 nt, Human
uacauucuuaaaaaacaga

SEQ ID NO: 785333 - RNA, 18 nt, Human
uaccaguaggcagccugg

SEQ ID NO: 785334 - RNA, 25 nt, Human
uacugaaauaacuguguauaaaaca

SEQ ID NO: 785335 - RNA, 21 nt, Human
uagaguaaaauacaaccuauu

SEQ ID NO: 785336 - RNA, 22 nt, Human
uauaaaacaagaauaugaacaa

SEQ ID NO: 785337 - RNA, 24 nt, Human
ucaaaauaaaaaaaaaaacccaua

SEQ ID NO: 785338 - RNA, 18 nt, Human
ucacagauaaguuuucuc

SEQ ID NO: 785339 - RNA, 18 nt, Human
ucagacuuugguuaggga

SEQ ID NO: 785340 - RNA, 22 nt, Human
ucccucagaggcacaacaguca

SEQ ID NO: 785341 - RNA, 22 nt, Human
uccgcaggggaggugcuggcug

SEQ ID NO: 785342 - RNA, 18 nt, Human
ucuuaaggacuucugauu

SEQ ID NO: 785343 - RNA, 18 nt, Human
ugaaaaagacaauaugga

SEQ ID NO: 785344 - RNA, 23 nt, Human
ugaaaaagacaauauggaaagag

SEQ ID NO: 785345 - RNA, 24 nt, Human
ugaagagggauuucugcugcaggu

SEQ ID NO: 785346 - RNA, 21 nt, Human
uggaaagaguauugguagaag

SEQ ID NO: 785347 - RNA, 21 nt, Human
uggaaugugucuuuugcuagu

SEQ ID NO: 785348 - RNA, 19 nt, Human
uggcaauaaagccaguuuc

SEQ ID NO: 785349 - RNA, 23 nt, Human
ugggcuggagggguuugcauuca

SEQ ID NO: 785350 - RNA, 18 nt, Human
ugugucaacguggcuggu

SEQ ID NO: 785351 - RNA, 22 nt, Human
uuaaaaaaaaaauaaaguaaaa

SEQ ID NO: 785352 - RNA, 18 nt, Human
uuaaaaaacagagccaca

SEQ ID NO: 785353 - RNA, 27 nt, Human
uuaagagucaaaauaaaaaaaaaaacc

SEQ ID NO: 785354 - RNA, 19 nt, Human
uuauaaaacaagaauauga

SEQ ID NO: 785355 - RNA, 24 nt, Human
uucugauucccuaacagucagacu

SEQ ID NO: 785356 - RNA, 27 nt, Human
uucuuugcugucacuugucuuaaggac

SEQ ID NO: 785357 - RNA, 20 nt, Human
uugaauguuaaaauauacaa

SEQ ID NO: 785358 - RNA, 18 nt, Human
uugcugguguaucuacug

SEQ ID NO: 785359 - RNA, 20 nt, Human
uugcugguguaucuacugug

SEQ ID NO: 785360 - RNA, 27 nt, Human
uuuaaaaaaacacuuggcaauaaagcc

SEQ ID NO: 785361 - RNA, 25 nt, Human
uuucugcugcaggugacugacgcaa

SEQ ID NO: 785362 - RNA, 20 nt, Human
aaaacucucucuucccacaa

SEQ ID NO: 785363 - RNA, 19 nt, Human
aaacuccacucuguggcug

SEQ ID NO: 785364 - RNA, 20 nt, Human
aaagcccaucucugcuuuuc

SEQ ID NO: 785365 - RNA, 27 nt, Human
aaaggcagauuccuuugugccagaucc

SEQ ID NO: 785366 - RNA, 21 nt, Human
aaaggcuuuuugauaugggau

SEQ ID NO: 785367 - RNA, 20 nt, Human
aacuaguuagucuugacuuu

SEQ ID NO: 785368 - RNA, 18 nt, Human
aagaaggcuggguggagg

SEQ ID NO: 785369 - RNA, 24 nt, Human
aauacagagaugggguuucaccgu

SEQ ID NO: 785370 - RNA, 19 nt, Human
acagagaugggguuucacc

SEQ ID NO: 785371 - RNA, 18 nt, Human
acagccuccaucucucuu

SEQ ID NO: 785372 - RNA, 18 nt, Human
acagguguaagccaccgc

SEQ ID NO: 785373 - RNA, 20 nt, Human
accaacaccaacaaaauguc

SEQ ID NO: 785374 - RNA, 24 nt, Human
acccaggcuggagugcagcggcau

SEQ ID NO: 785375 - RNA, 22 nt, Human
acguaacaggaugcuagugaga

SEQ ID NO: 785376 - RNA, 19 nt, Human
acuacaggugcgugccacc

SEQ ID NO: 785377 - RNA, 18 nt, Human
acuucguccagcucugcc

SEQ ID NO: 785378 - RNA, 19 nt, Human
agagaugggguuucaccgu

SEQ ID NO: 785379 - RNA, 22 nt, Human
agaggcuacuagggaccacugc

SEQ ID NO: 785380 - RNA, 24 nt, Human
agcacuuugggaggccgagguggg

SEQ ID NO: 785381 - RNA, 20 nt, Human
aggaaacacucuugaaauga

SEQ ID NO: 785382 - RNA, 19 nt, Human
aggagcacgugugaugggg

SEQ ID NO: 785383 - RNA, 24 nt, Human
aggagcacgugugauggggggugg

SEQ ID NO: 785384 - RNA, 21 nt, Human
aggccgaggugggcauaucac

SEQ ID NO: 785385 - RNA, 24 nt, Human
aggugcaguggcucacgucuguaa

SEQ ID NO: 785386 - RNA, 19 nt, Human
aggugggcauaucacgagg

SEQ ID NO: 785387 - RNA, 19 nt, Human
agucaugacacagggggca

SEQ ID NO: 785388 - RNA, 18 nt, Human
agugaaagaaggcugggu

SEQ ID NO: 785389 - RNA, 18 nt, Human
agugagacaaguccccgu

SEQ ID NO: 785390 - RNA, 24 nt, Human
agugauucuccugccucagccucc

SEQ ID NO: 785391 - RNA, 24 nt, Human
agugcagcggcaugaucuuggcuc

SEQ ID NO: 785392 - RNA, 24 nt, Human
aguggcucacgucuguaaucccag

SEQ ID NO: 785393 - RNA, 22 nt, Human
auacacaucugggaacacaccc

SEQ ID NO: 785394 - RNA, 19 nt, Human
auacagagaugggguuuca

SEQ ID NO: 785395 - RNA, 24 nt, Human
auacagagaugggguuucaccgug

SEQ ID NO: 785396 - RNA, 22 nt, Human
auaggcuuucucugggucaaaa

SEQ ID NO: 785397 - RNA, 20 nt, Human
auccucucacuccagaguuu

SEQ ID NO: 785398 - RNA, 18 nt, Human
augggguuucaccguguu

SEQ ID NO: 785399 - RNA, 19 nt, Human
augggguuucaccguguua

SEQ ID NO: 785400 - RNA, 20 nt, Human
augggguuucaccguguuag

SEQ ID NO: 785401 - RNA, 24 nt, Human
augggguuucaccguguuagccag

SEQ ID NO: 785402 - RNA, 23 nt, Human
caaagccugggauuacaggugua

SEQ ID NO: 785403 - RNA, 21 nt, Human
caaaucccaaccagucaaggg

SEQ ID NO: 785404 - RNA, 20 nt, Human
caagugauucuccugccuca

SEQ ID NO: 785405 - RNA, 22 nt, Human
caagugauucuccugccucagc

SEQ ID NO: 785406 - RNA, 18 nt, Human
cacaaccuaccuaccucc

SEQ ID NO: 785407 - RNA, 21 nt, Human
cacagaaagcuccacacucca

SEQ ID NO: 785408 - RNA, 22 nt, Human
caccaacaccaacaaaaugucc

SEQ ID NO: 785409 - RNA, 21 nt, Human
cacccuccagcccauugagcu

SEQ ID NO: 785410 - RNA, 18 nt, Human
caccguguuagccaggau

SEQ ID NO: 785411 - RNA, 24 nt, Human
caccguguuagccaggauggucuc

SEQ ID NO: 785412 - RNA, 24 nt, Human
cacgucuguaaucccagcacuuug

SEQ ID NO: 785413 - RNA, 21 nt, Human
cacugcaaccuccgccucccg

SEQ ID NO: 785414 - RNA, 23 nt, Human
cacugcaaccuccgccucccggg

SEQ ID NO: 785415 - RNA, 21 nt, Human
cacugcauaacuuccauaggc

SEQ ID NO: 785416 - RNA, 18 nt, Human
cacuuugguucucugcau

SEQ ID NO: 785417 - RNA, 24 nt, Human
cagcacuuugggaggccgaggugg

SEQ ID NO: 785418 - RNA, 20 nt, Human
cagccuccugaguagccggg

SEQ ID NO: 785419 - RNA, 23 nt, Human
caucaggccucuccucuccccug

SEQ ID NO: 785420 - RNA, 23 nt, Human
caucauccccauuagcuugagag

SEQ ID NO: 785421 - RNA, 24 nt, Human
caugauccggcugccucggccucc

SEQ ID NO: 785422 - RNA, 20 nt, Human
ccaaagccugggauuacagg

SEQ ID NO: 785423 - RNA, 23 nt, Human
ccaaagccugggauuacaggugu

SEQ ID NO: 785424 - RNA, 24 nt, Human
ccaacaccaacaaaauguccauua

SEQ ID NO: 785425 - RNA, 22 nt, Human
ccacagaaagcuccacacucca

SEQ ID NO: 785426 - RNA, 20 nt, Human
ccaccacgcucagguaauuu

SEQ ID NO: 785427 - RNA, 18 nt, Human
ccauaggcuuucucuggg

SEQ ID NO: 785428 - RNA, 24 nt, Human
cccaaagccugggauuacaggugu

SEQ ID NO: 785429 - RNA, 20 nt, Human
cccaucagcuuugcagcagc

SEQ ID NO: 785430 - RNA, 21 nt, Human
ccccaggacuaaucacucccu

SEQ ID NO: 785431 - RNA, 25 nt, Human
ccccaggacuaaucacucccugaug

SEQ ID NO: 785432 - RNA, 18 nt, Human
ccccaucaggccucuccu

SEQ ID NO: 785433 - RNA, 21 nt, Human
cccccaaaaagccuuuaguuu

SEQ ID NO: 785434 - RNA, 21 nt, Human
cccggguucaagugauucucc

SEQ ID NO: 785435 - RNA, 23 nt, Human
cccggguucaagugauucuccug

SEQ ID NO: 785436 - RNA, 24 nt, Human
ccucccggguucaagugauucucc

SEQ ID NO: 785437 - RNA, 24 nt, Human
ccugaguagccgggacuacaggug

SEQ ID NO: 785438 - RNA, 23 nt, Human
ccugccucagccuccugaguagc

SEQ ID NO: 785439 - RNA, 18 nt, Human
ccuggcuaacacggugaa

SEQ ID NO: 785440 - RNA, 22 nt, Human
ccuugcaccaacaccaacaaaa

SEQ ID NO: 785441 - RNA, 24 nt, Human
cgagaucauccuggcuaacacggu

SEQ ID NO: 785442 - RNA, 18 nt, Human
cgcugcaugcaggcugcc

SEQ ID NO: 785443 - RNA, 21 nt, Human
cgggacuacaggugcgugcca

SEQ ID NO: 785444 - RNA, 24 nt, Human
cgucuguaaucccagcacuuuggg

SEQ ID NO: 785445 - RNA, 23 nt, Human
cuaaaggcaaacaagcuucuuca

SEQ ID NO: 785446 - RNA, 19 nt, Human
cuaccucccgcuacuaucu

SEQ ID NO: 785447 - RNA, 23 nt, Human
cuacuccaaagaauaaaaaaccc

SEQ ID NO: 785448 - RNA, 24 nt, Human
cucacgucuguaaucccagcacuu

SEQ ID NO: 785449 - RNA, 24 nt, Human
cucacugcaaccuccgccucccgg

SEQ ID NO: 785450 - RNA, 20 nt, Human
cucccggguucaagugauuc

SEQ ID NO: 785451 - RNA, 24 nt, Human
cuccugaccucaugauccggcugc

SEQ ID NO: 785452 - RNA, 23 nt, Human
cucugucacccaggcuggagugc

SEQ ID NO: 785453 - RNA, 23 nt, Human
cugcaaccuccgccucccggguu

SEQ ID NO: 785454 - RNA, 24 nt, Human
cugcaaccuccgccucccggguuc

SEQ ID NO: 785455 - RNA, 23 nt, Human
cugccaggcugauggcuacuggu

SEQ ID NO: 785456 - RNA, 22 nt, Human
cugccucagccuccugaguagc

SEQ ID NO: 785457 - RNA, 21 nt, Human
cugccucggccucccaaagcc

SEQ ID NO: 785458 - RNA, 18 nt, Human
cugcugaaagcccaucuc

SEQ ID NO: 785459 - RNA, 24 nt, Human
cuggagugcagcggcaugaucuug

SEQ ID NO: 785460 - RNA, 18 nt, Human
cuggcuaacacggugaaa

SEQ ID NO: 785461 - RNA, 18 nt, Human
cugucacccaggcuggag

SEQ ID NO: 785462 - RNA, 19 nt, Human
cugucacccaggcuggagu

SEQ ID NO: 785463 - RNA, 20 nt, Human
cuuuaguuuagacucuguuu

SEQ ID NO: 785464 - RNA, 19 nt, Human
cuuugugccagauccuuuc

SEQ ID NO: 785465 - RNA, 21 nt, Human
gaaacccacaaauuuccuaag

SEQ ID NO: 785466 - RNA, 21 nt, Human
gacccccaaaaagccuuuagu

SEQ ID NO: 785467 - RNA, 22 nt, Human
gaccucaugauccggcugccuc

SEQ ID NO: 785468 - RNA, 21 nt, Human
gacuugagacggaggaaaggc

SEQ ID NO: 785469 - RNA, 24 nt, Human
gagaugggguuucaccguguuagc

SEQ ID NO: 785470 - RNA, 20 nt, Human
gagcaaaucccaaccaguca

SEQ ID NO: 785471 - RNA, 21 nt, Human
gaggaaaagggagggccagag

SEQ ID NO: 785472 - RNA, 23 nt, Human
gaggugggcauaucacgagguca

SEQ ID NO: 785473 - RNA, 18 nt, Human
gauuacagguguaagcca

SEQ ID NO: 785474 - RNA, 22 nt, Human
gauuacagguguaagccaccgc

SEQ ID NO: 785475 - RNA, 19 nt, Human
gcaccaacaccaacaaaau

SEQ ID NO: 785476 - RNA, 21 nt, Human
gcagcggcaugaucuuggcuc

SEQ ID NO: 785477 - RNA, 20 nt, Human
gccggaagcagggacaagug

SEQ ID NO: 785478 - RNA, 18 nt, Human
gcuaacacggugaaaccc

SEQ ID NO: 785479 - RNA, 19 nt, Human
gcucuuaguuugccaucca

SEQ ID NO: 785480 - RNA, 18 nt, Human
gcugaauaugcaaugguu

SEQ ID NO: 785481 - RNA, 19 nt, Human
gcuggagugcagcggcaug

SEQ ID NO: 785482 - RNA, 19 nt, Human
gcuuuauuuuuucuccaca

SEQ ID NO: 785483 - RNA, 19 nt, Human
ggaaugggugacugugggc

SEQ ID NO: 785484 - RNA, 24 nt, Human
ggacccaucucaagagcucugugg

SEQ ID NO: 785485 - RNA, 20 nt, Human
ggagaguuuugaacucuggc

SEQ ID NO: 785486 - RNA, 24 nt, Human
ggauggucucgaucuccugaccuc

SEQ ID NO: 785487 - RNA, 22 nt, Human
ggauuacagguguaagccaccg

SEQ ID NO: 785488 - RNA, 18 nt, Human
ggcauaucacgaggucag

SEQ ID NO: 785489 - RNA, 18 nt, Human
ggcauaucacgaggucag

SEQ ID NO: 785490 - RNA, 23 nt, Human
gggacuacaggugcgugccacca

SEQ ID NO: 785491 - RNA, 19 nt, Human
gggggguggggugaauaag

SEQ ID NO: 785492 - RNA, 22 nt, Human
gggguuucaccguguuagccag

SEQ ID NO: 785493 - RNA, 19 nt, Human
gggucaaaacgaggccagu

SEQ ID NO: 785494 - RNA, 22 nt, Human
ggguucaagugauucuccugcc

SEQ ID NO: 785495 - RNA, 22 nt, Human
ggguuucaccguguuagccagg

SEQ ID NO: 785496 - RNA, 18 nt, Human
gugauggggggugggggg

SEQ ID NO: 785497 - RNA, 24 nt, Human
gugauucuccugccucagccuccu

SEQ ID NO: 785498 - RNA, 20 nt, Human
gugugauggggggugggggg

SEQ ID NO: 785499 - RNA, 19 nt, Human
guucaaaggacaugcugug

SEQ ID NO: 785500 - RNA, 23 nt, Human
guuuugaacucuggcuaaaccag

SEQ ID NO: 785501 - RNA, 20 nt, Human
uaaaagauaccaucuuccau

SEQ ID NO: 785502 - RNA, 23 nt, Human
uaaaauucccaaguaauacacau

SEQ ID NO: 785503 - RNA, 18 nt, Human
uaauuuuuuguauuuuua

SEQ ID NO: 785504 - RNA, 19 nt, Human
uacaggugcgugccaccac

SEQ ID NO: 785505 - RNA, 22 nt, Human
uacagguguaagccaccgcgcc

SEQ ID NO: 785506 - RNA, 22 nt, Human
uaccaucuuccauuccuacccc

SEQ ID NO: 785507 - RNA, 21 nt, Human
uacuagggaccacugcaagcu

SEQ ID NO: 785508 - RNA, 21 nt, Human
uacuaucugccucuuuccugc

SEQ ID NO: 785509 - RNA, 19 nt, Human
uacugagacugacucacaa

SEQ ID NO: 785510 - RNA, 18 nt, Human
uagcagaaguuugagaag

SEQ ID NO: 785511 - RNA, 19 nt, Human
uagcauauaaaagauacca

SEQ ID NO: 785512 - RNA, 19 nt, Human
ucaagugauucuccugccu

SEQ ID NO: 785513 - RNA, 18 nt, Human
ucacccaggcuggagugc

SEQ ID NO: 785514 - RNA, 24 nt, Human
ucaccguguuagccaggauggucu

SEQ ID NO: 785515 - RNA, 24 nt, Human
ucacgaggucagaaaaucgagauc

SEQ ID NO: 785516 - RNA, 18 nt, Human
ucacuccagaguuuuaag

SEQ ID NO: 785517 - RNA, 23 nt, Human
ucacugcaaccuccgccucccgg

SEQ ID NO: 785518 - RNA, 24 nt, Human
ucacugcaaccuccgccucccggg

SEQ ID NO: 785519 - RNA, 25 nt, Human
ucacugcaaccuccgccucccgggu

SEQ ID NO: 785520 - RNA, 27 nt, Human
ucacugcaaccuccgccucccggguuc

SEQ ID NO: 785521 - RNA, 19 nt, Human
ucauaauuucuuuugaccu

SEQ ID NO: 785522 - RNA, 25 nt, Human
ucauucauauguauguauauauuuc

SEQ ID NO: 785523 - RNA, 20 nt, Human
uccaaagaauaaaaaacccc

SEQ ID NO: 785524 - RNA, 23 nt, Human
uccaaagaauaaaaaaccccaag

SEQ ID NO: 785525 - RNA, 22 nt, Human
ucccaaagccugggauuacagg

SEQ ID NO: 785526 - RNA, 24 nt, Human
ucccaaagccugggauuacaggug

SEQ ID NO: 785527 - RNA, 19 nt, Human
uccccaugacauuuggggg

SEQ ID NO: 785528 - RNA, 19 nt, Human
uccccgugaaaggagagac

SEQ ID NO: 785529 - RNA, 21 nt, Human
ucccggguucaagugauucuc

SEQ ID NO: 785530 - RNA, 24 nt, Human
ucccggguucaagugauucuccug

SEQ ID NO: 785531 - RNA, 25 nt, Human
ucccucucuccccaugacauuuggg

SEQ ID NO: 785532 - RNA, 24 nt, Human
uccugaguagccgggacuacaggu

SEQ ID NO: 785533 - RNA, 18 nt, Human
ucguggaggaaaagggag

SEQ ID NO: 785534 - RNA, 24 nt, Human
ucuccugccucagccuccugagua

SEQ ID NO: 785535 - RNA, 31 nt, Human
ucugccucuuuccugcuuuauuuuuucuccc

SEQ ID NO: 785536 - RNA, 19 nt, Human
ucugccuuucugaaacugc

SEQ ID NO: 785537 - RNA, 20 nt, Human
ucugccuuucugaaacugcu

SEQ ID NO: 785538 - RNA, 21 nt, Human
ucuguaaugauuuuccaacuu

SEQ ID NO: 785539 - RNA, 24 nt, Human
ucugucacccaggcuggagugcag

SEQ ID NO: 785540 - RNA, 22 nt, Human
ucuuacucccaguuuaguuggg

SEQ ID NO: 785541 - RNA, 23 nt, Human
ucuugcucugucacccaggcugg

SEQ ID NO: 785542 - RNA, 24 nt, Human
ucuugcucugucacccaggcugga

SEQ ID NO: 785543 - RNA, 22 nt, Human
ugaagaguagcucugagggagc

SEQ ID NO: 785544 - RNA, 23 nt, Human
ugaauuuccccaggacuaaucac

SEQ ID NO: 785545 - RNA, 22 nt, Human
ugacuaagucuuacucccaguu

SEQ ID NO: 785546 - RNA, 23 nt, Human
ugagaaagaugagagagucugcc

SEQ ID NO: 785547 - RNA, 18 nt, Human
ugagacggaggaaaggca

SEQ ID NO: 785548 - RNA, 21 nt, Human
ugaggcucuguaacaaccuuu

SEQ ID NO: 785549 - RNA, 19 nt, Human
ugaguuggaaggaguccgc

SEQ ID NO: 785550 - RNA, 21 nt, Human
ugauggggggugggggggugg

SEQ ID NO: 785551 - RNA, 20 nt, Human
ugauucuccugccucagccu

SEQ ID NO: 785552 - RNA, 20 nt, Human
ugcagcagcuugcaucacuc

SEQ ID NO: 785553 - RNA, 18 nt, Human
ugccauaccacagaaagc

SEQ ID NO: 785554 - RNA, 21 nt, Human
ugccauaccacagaaagcucc

SEQ ID NO: 785555 - RNA, 24 nt, Human
ugccucagccuccugaguagccgg

SEQ ID NO: 785556 - RNA, 19 nt, Human
ugccucggccucccaaagc

SEQ ID NO: 785557 - RNA, 23 nt, Human
ugccucggccucccaaagccugg

SEQ ID NO: 785558 - RNA, 24 nt, Human
ugccucggccucccaaagccuggg

SEQ ID NO: 785559 - RNA, 24 nt, Human
ugcucugucacccaggcuggagug

SEQ ID NO: 785560 - RNA, 22 nt, Human
ugcuuugggaagugucuagagg

SEQ ID NO: 785561 - RNA, 18 nt, Human
uggaaagguuuuucuugu

SEQ ID NO: 785562 - RNA, 18 nt, Human
uggaaugggugacugugg

SEQ ID NO: 785563 - RNA, 23 nt, Human
uggaggaaaagggagggccagag

SEQ ID NO: 785564 - RNA, 19 nt, Human
uggagucuugcucugucac

SEQ ID NO: 785565 - RNA, 19 nt, Human
uggagugcagcggcaugau

SEQ ID NO: 785566 - RNA, 24 nt, Human
uggagugcagcggcaugaucuugg

SEQ ID NO: 785567 - RNA, 25 nt, Human
uggauaaacacaaguuugccuccug

SEQ ID NO: 785568 - RNA, 21 nt, Human
uggcaaccuaacuuuaacuga

SEQ ID NO: 785569 - RNA, 18 nt, Human
uggcaggggcaccaacuc

SEQ ID NO: 785570 - RNA, 24 nt, Human
uggcucacgucuguaaucccagca

SEQ ID NO: 785571 - RNA, 23 nt, Human
uggcugggucucacccuccagcc

SEQ ID NO: 785572 - RNA, 18 nt, Human
ugggaagugucuagaggc

SEQ ID NO: 785573 - RNA, 24 nt, Human
ugggaggccgaggugggcauauca

SEQ ID NO: 785574 - RNA, 20 nt, Human
ugggauagucugcaacagcu

SEQ ID NO: 785575 - RNA, 23 nt, Human
ugggaugggcagcugccaggcuu

SEQ ID NO: 785576 - RNA, 18 nt, Human
ugggauuacagguguaag

SEQ ID NO: 785577 - RNA, 19 nt, Human
ugggauuacagguguaagc

SEQ ID NO: 785578 - RNA, 21 nt, Human
ugggauuacagguguaagcca

SEQ ID NO: 785579 - RNA, 22 nt, Human
ugggauuacagguguaagccac

SEQ ID NO: 785580 - RNA, 23 nt, Human
ugggauuacagguguaagccacc

SEQ ID NO: 785581 - RNA, 24 nt, Human
ugggauuacagguguaagccaccg

SEQ ID NO: 785582 - RNA, 21 nt, Human
ugggcagcugccaggcugaug

SEQ ID NO: 785583 - RNA, 26 nt, Human
uggggccacgagcagagcaccuguga

SEQ ID NO: 785584 - RNA, 25 nt, Human
uggggggguggggugaauaagcuga

SEQ ID NO: 785585 - RNA, 21 nt, Human
ugggggguggggggguggggu

SEQ ID NO: 785586 - RNA, 24 nt, Human
ugggguuucaccguguuagccagg

SEQ ID NO: 785587 - RNA, 21 nt, Human
ugggugacugugggcauggga

SEQ ID NO: 785588 - RNA, 18 nt, Human
uggguggaggugacagcg

SEQ ID NO: 785589 - RNA, 18 nt, Human
uguaguagugagagaaca

SEQ ID NO: 785590 - RNA, 22 nt, Human
ugugaggaaacccacaaauuuc

SEQ ID NO: 785591 - RNA, 20 nt, Human
ugugaugggggguggggggg

SEQ ID NO: 785592 - RNA, 25 nt, Human
uguucuguauaccucuuauaauuca

SEQ ID NO: 785593 - RNA, 21 nt, Human
uuaugucauaugucaugucau

SEQ ID NO: 785594 - RNA, 25 nt, Human
uucaagaaacugugauccugugcgg

SEQ ID NO: 785595 - RNA, 21 nt, Human
uucaagugauucuccugccuc

SEQ ID NO: 785596 - RNA, 23 nt, Human
uucaagugauucuccugccucag

SEQ ID NO: 785597 - RNA, 24 nt, Human
uucaagugauucuccugccucagc

SEQ ID NO: 785598 - RNA, 18 nt, Human
uucuuuggggccacgagc

SEQ ID NO: 785599 - RNA, 31 nt, Human
uugaacauaggccaggugcaguggcucacgg

SEQ ID NO: 785600 - RNA, 22 nt, Human
uugcagcagcuugcaucacucu

SEQ ID NO: 785601 - RNA, 19 nt, Human
uuggccauucauggagagg

SEQ ID NO: 785602 - RNA, 21 nt, Human
uugguugauauucugcugaaa

SEQ ID NO: 785603 - RNA, 22 nt, Human
uugguugauauucugcugaaag

SEQ ID NO: 785604 - RNA, 19 nt, Human
uuucaccguguuagccagg

SEQ ID NO: 785605 - RNA, 23 nt, Human
uuugcucauauucaaaauacacu

SEQ ID NO: 785606 - RNA, 18 nt, Human
aaaagaaacagaaaguca

SEQ ID NO: 785607 - RNA, 23 nt, Human
aaaaggcaguuuccaaguaccau

SEQ ID NO: 785608 - RNA, 23 nt, Human
aaacacaauguccuaacacaagg

SEQ ID NO: 785609 - RNA, 20 nt, Human
aaacccagaaugacaaggug

SEQ ID NO: 785610 - RNA, 19 nt, Human
aacacaaaacccgcucugc

SEQ ID NO: 785611 - RNA, 23 nt, Human
aacuuuccucagccauaaaaggc

SEQ ID NO: 785612 - RNA, 23 nt, Human
aagaagacaagugcaaaggaugg

SEQ ID NO: 785613 - RNA, 25 nt, Human
aagagaccauggauaaugcaaagug

SEQ ID NO: 785614 - RNA, 22 nt, Human
aagcaaacagucugguuccagg

SEQ ID NO: 785615 - RNA, 19 nt, Human
aagcaaggauuggcaacag

SEQ ID NO: 785616 - RNA, 18 nt, Human
aagcacuccaaagaccaa

SEQ ID NO: 785617 - RNA, 19 nt, Human
aagcagccuguaagugaau

SEQ ID NO: 785618 - RNA, 22 nt, Human
aaggaccccacaugaucgaaca

SEQ ID NO: 785619 - RNA, 26 nt, Human
aaggcagcccagccccuguuaaaacc

SEQ ID NO: 785620 - RNA, 24 nt, Human
aagggaacacaaagagcaguuucu

SEQ ID NO: 785621 - RNA, 22 nt, Human
aaggugaaagaaaggaaaggga

SEQ ID NO: 785622 - RNA, 18 nt, Human
aaggugaccagugaaguc

SEQ ID NO: 785623 - RNA, 23 nt, Human
acaaagagcaguuucuggaacac

SEQ ID NO: 785624 - RNA, 19 nt, Human
acacaagaagcacuccaaa

SEQ ID NO: 785625 - RNA, 22 nt, Human
acacauaccccuccccacaagc

SEQ ID NO: 785626 - RNA, 21 nt, Human
acacgcccacagugcccagga

SEQ ID NO: 785627 - RNA, 25 nt, Human
acacuguuaugugcccaaaaugagg

SEQ ID NO: 785628 - RNA, 20 nt, Human
acagcaauagcgguaacacc

SEQ ID NO: 785629 - RNA, 20 nt, Human
acagggggcucuucaguuuc

SEQ ID NO: 785630 - RNA, 18 nt, Human
acagguuuuaggacuuca

SEQ ID NO: 785631 - RNA, 20 nt, Human
accacuuuuaagggggaagg

SEQ ID NO: 785632 - RNA, 23 nt, Human
acccaagcccuauuugggugaca

SEQ ID NO: 785633 - RNA, 27 nt, Human
acuguguugaaucacuuucccauggua

SEQ ID NO: 785634 - RNA, 27 nt, Human
agaaaaaagguagaagaaaagggaccc

SEQ ID NO: 785635 - RNA, 23 nt, Human
agaaggaaacccagaaugacaag

SEQ ID NO: 785636 - RNA, 21 nt, Human
agacaaaauugguaucaugug

SEQ ID NO: 785637 - RNA, 21 nt, Human
agacacaaaauguuuucugag

SEQ ID NO: 785638 - RNA, 21 nt, Human
agacagacagaccaaccaggg

SEQ ID NO: 785639 - RNA, 22 nt, Human
agaccaaccaggaauaccacuu

SEQ ID NO: 785640 - RNA, 24 nt, Human
agaccacaucauaaaagcuaaugg

SEQ ID NO: 785641 - RNA, 21 nt, Human
agagucuaaaacccuccaccu

SEQ ID NO: 785642 - RNA, 18 nt, Human
aggacuaagggaaagacu

SEQ ID NO: 785643 - RNA, 21 nt, Human
aggggagcagagcaaguagag

SEQ ID NO: 785644 - RNA, 21 nt, Human
agggugagguuguggagucca

SEQ ID NO: 785645 - RNA, 22 nt, Human
agguggcuucaggaggccugag

SEQ ID NO: 785646 - RNA, 20 nt, Human
auaauaaaaagaggaguguc

SEQ ID NO: 785647 - RNA, 19 nt, Human
auaauauauauauauauau

SEQ ID NO: 785648 - RNA, 21 nt, Human
auagggaaaaaacaguaucuu

SEQ ID NO: 785649 - RNA, 20 nt, Human
augaucgaacagucuuugcc

SEQ ID NO: 785650 - RNA, 23 nt, Human
augccaggaucaccacaaggaca

SEQ ID NO: 785651 - RNA, 24 nt, Human
auguuuuuuggcaacuugccacca

SEQ ID NO: 785652 - RNA, 21 nt, Human
auugcuaaaaagucaucaggg

SEQ ID NO: 785653 - RNA, 25 nt, Human
caaacacaauguccuaacacaaggu

SEQ ID NO: 785654 - RNA, 27 nt, Human
caagaagcacuccaaagaccggggccc

SEQ ID NO: 785655 - RNA, 21 nt, Human
caaggacagacagacagacca

SEQ ID NO: 785656 - RNA, 22 nt, Human
cacaaaauguuuucugagacac

SEQ ID NO: 785657 - RNA, 27 nt, Human
cacaaggacaaggacagacagacagac

SEQ ID NO: 785658 - RNA, 21 nt, Human
cacaaugacccggcacacaaa

SEQ ID NO: 785659 - RNA, 23 nt, Human
cacagcaccagcuucgccagggc

SEQ ID NO: 785660 - RNA, 26 nt, Human
caccacaaggacaaggacagacagac

SEQ ID NO: 785661 - RNA, 22 nt, Human
caccaggcgugguuagauccuc

SEQ ID NO: 785662 - RNA, 21 nt, Human
caccuggcaucccugaguugu

SEQ ID NO: 785663 - RNA, 23 nt, Human
cacgugaagucccaccgcacagg

SEQ ID NO: 785664 - RNA, 21 nt, Human
cacuguguugaaucacuuucc

SEQ ID NO: 785665 - RNA, 20 nt, Human
cagaccaaccaggaauacca

SEQ ID NO: 785666 - RNA, 18 nt, Human
cagcuuccucaccaccag

SEQ ID NO: 785667 - RNA, 20 nt, Human
caggacccagggccagcugc

SEQ ID NO: 785668 - RNA, 23 nt, Human
caggaggccugaggagacaauca

SEQ ID NO: 785669 - RNA, 19 nt, Human
cauguucuaagggaagaaa

SEQ ID NO: 785670 - RNA, 20 nt, Human
cauguuguuuccucauugaa

SEQ ID NO: 785671 - RNA, 20 nt, Human
ccacagaaaaggaaaggggu

SEQ ID NO: 785672 - RNA, 22 nt, Human
ccagagccugagucgcgaaagg

SEQ ID NO: 785673 - RNA, 23 nt, Human
ccaggacccagggccagcugcag

SEQ ID NO: 785674 - RNA, 21 nt, Human
ccaggagcuaccaagaccaac

SEQ ID NO: 785675 - RNA, 22 nt, Human
ccaucaccugccaauagccagg

SEQ ID NO: 785676 - RNA, 22 nt, Human
ccaugcacaaacacaauguccu

SEQ ID NO: 785677 - RNA, 19 nt, Human
cccacagugcccaggagcu

SEQ ID NO: 785678 - RNA, 21 nt, Human
cccaguaugcccuaaaaugaa

SEQ ID NO: 785679 - RNA, 24 nt, Human
cccaugguacacgcccacagugcc

SEQ ID NO: 785680 - RNA, 24 nt, Human
ccccuguuaaaacacagcaacaac

SEQ ID NO: 785681 - RNA, 22 nt, Human
cccugguuggagggaggggagc

SEQ ID NO: 785682 - RNA, 19 nt, Human
ccgccgccgcagcugcugc

SEQ ID NO: 785683 - RNA, 19 nt, Human
ccgccgccgccgcagcugc

SEQ ID NO: 785684 - RNA, 18 nt, Human
ccuccuccuccucuuuuc

SEQ ID NO: 785685 - RNA, 18 nt, Human
ccuggaaauucagcuucc

SEQ ID NO: 785686 - RNA, 23 nt, Human
ccuggaaauucagcuuccucacc

SEQ ID NO: 785687 - RNA, 19 nt, Human
ccuggcaucccugaguugu

SEQ ID NO: 785688 - RNA, 22 nt, Human
ccuguuaaaacacagcaacaac

SEQ ID NO: 785689 - RNA, 24 nt, Human
cgaagaccacaucauaaaagcuaa

SEQ ID NO: 785690 - RNA, 26 nt, Human
cgcccggagccgccaucuuccuccac

SEQ ID NO: 785691 - RNA, 21 nt, Human
cgccgccgccgccgcagcugc

SEQ ID NO: 785692 - RNA, 23 nt, Human
cuccccacaagcuaggcuuggca

SEQ ID NO: 785693 - RNA, 20 nt, Human
cuccuccuccuccucuuuuc

SEQ ID NO: 785694 - RNA, 23 nt, Human
cuccuccuccuccucuuuucuuu

SEQ ID NO: 785695 - RNA, 19 nt, Human
cugcagcaggcuuugugcc

SEQ ID NO: 785696 - RNA, 22 nt, Human
cuggaacacauaccccucccca

SEQ ID NO: 785697 - RNA, 23 nt, Human
cuuccuccuccuccuccucuuuu

SEQ ID NO: 785698 - RNA, 26 nt, Human
gaaaaaggcagcccagccccuguuaa

SEQ ID NO: 785699 - RNA, 18 nt, Human
gaacacggugagagggag

SEQ ID NO: 785700 - RNA, 23 nt, Human
gaagaccacaucauaaaagcuaa

SEQ ID NO: 785701 - RNA, 20 nt, Human
gaagcccauagggaaaaaaa

SEQ ID NO: 785702 - RNA, 27 nt, Human
gaagggaacacaaagagcaguuucugg

SEQ ID NO: 785703 - RNA, 24 nt, Human
gaauuaaagaguuuuggcuucugg

SEQ ID NO: 785704 - RNA, 20 nt, Human
gaccaauggacacuacuagg

SEQ ID NO: 785705 - RNA, 23 nt, Human
gagccgccaucuuccuccacuca

SEQ ID NO: 785706 - RNA, 22 nt, Human
gagcugucacagguccucugug

SEQ ID NO: 785707 - RNA, 21 nt, Human
gcaacaacuuuaucugaacca

SEQ ID NO: 785708 - RNA, 21 nt, Human
gcuagccuucuggcccagcuu

SEQ ID NO: 785709 - RNA, 19 nt, Human
ggaacacauaccccucccc

SEQ ID NO: 785710 - RNA, 21 nt, Human
ggaacacauaccccuccccac

SEQ ID NO: 785711 - RNA, 21 nt, Human
ggaacacauaccccuccccac

SEQ ID NO: 785712 - RNA, 24 nt, Human
ggagaaaacacacuuaucaguaca

SEQ ID NO: 785713 - RNA, 19 nt, Human
ggagcauaucaccaugcca

SEQ ID NO: 785714 - RNA, 23 nt, Human
ggagccgccaucuuccuccacuc

SEQ ID NO: 785715 - RNA, 23 nt, Human
ggcgacgguaaugagggagcccc

SEQ ID NO: 785716 - RNA, 20 nt, Human
gguaaugagggagccaggga

SEQ ID NO: 785717 - RNA, 22 nt, Human
gucacagguccucugugguuuu

SEQ ID NO: 785718 - RNA, 23 nt, Human
gugaagcagaaggaaacccagaa

SEQ ID NO: 785719 - RNA, 20 nt, Human
guggagcauaucaccaugcc

SEQ ID NO: 785720 - RNA, 18 nt, Human
guuuucuuucuuccuccu

SEQ ID NO: 785721 - RNA, 30 nt, Human
uaaauacggauaaauauuugcuucaggugg

SEQ ID NO: 785722 - RNA, 23 nt, Human
uaacaaaaaaugaaauugacaga

SEQ ID NO: 785723 - RNA, 20 nt, Human
uaagacaauuguccauuuua

SEQ ID NO: 785724 - RNA, 20 nt, Human
uaagauggacaaggugaccc

SEQ ID NO: 785725 - RNA, 21 nt, Human
uaagguugagauucuguacca

SEQ ID NO: 785726 - RNA, 24 nt, Human
uaaguagacacauguuguuuccuc

SEQ ID NO: 785727 - RNA, 23 nt, Human
uacagggggcucuucaguuucuu

SEQ ID NO: 785728 - RNA, 20 nt, Human
uacauaugcccuuucauuuu

SEQ ID NO: 785729 - RNA, 23 nt, Human
uaccagcaagguagaaaaaggca

SEQ ID NO: 785730 - RNA, 24 nt, Human
uacuugggggaaguggaaggaaaa

SEQ ID NO: 785731 - RNA, 21 nt, Human
uagaauucccuacuggccccc

SEQ ID NO: 785732 - RNA, 22 nt, Human
uaggcugccagaugcuggcuga

SEQ ID NO: 785733 - RNA, 20 nt, Human
uauauaauauauauauauau

SEQ ID NO: 785734 - RNA, 21 nt, Human
uauauaauauauauauauaua

SEQ ID NO: 785735 - RNA, 22 nt, Human
uaucucaggguaagccaccugg

SEQ ID NO: 785736 - RNA, 22 nt, Human
uaucugaaccaggauggaaauc

SEQ ID NO: 785737 - RNA, 19 nt, Human
uaugcccuaaaaugaaauu

SEQ ID NO: 785738 - RNA, 19 nt, Human
ucaaaacaaaacaaaggca

SEQ ID NO: 785739 - RNA, 21 nt, Human
ucaaaucaauccacagacagc

SEQ ID NO: 785740 - RNA, 23 nt, Human
ucaauggaguucagaggaaccag

SEQ ID NO: 785741 - RNA, 19 nt, Human
ucagaaauuuccacaauca

SEQ ID NO: 785742 - RNA, 19 nt, Human
ucaggccgcgacagccgug

SEQ ID NO: 785743 - RNA, 24 nt, Human
uccaaagaccaauggacacuacua

SEQ ID NO: 785744 - RNA, 18 nt, Human
uccaaauuaaaagccaca

SEQ ID NO: 785745 - RNA, 19 nt, Human
ucccaaaguguaggguagg

SEQ ID NO: 785746 - RNA, 19 nt, Human
ucccuuuuuuugucaacag

SEQ ID NO: 785747 - RNA, 22 nt, Human
ucccuuuuuuugucaacagagu

SEQ ID NO: 785748 - RNA, 18 nt, Human
uccucuuuccacugauga

SEQ ID NO: 785749 - RNA, 18 nt, Human
ucgccagggcacaugggg

SEQ ID NO: 785750 - RNA, 23 nt, Human
ucuaaaacccuccaccuuugcaa

SEQ ID NO: 785751 - RNA, 19 nt, Human
ucuaagcagcuucugauuu

SEQ ID NO: 785752 - RNA, 18 nt, Human
ucucaggguaagccaccu

SEQ ID NO: 785753 - RNA, 27 nt, Human
ucucccuuuuuuugucaacagaguugg

SEQ ID NO: 785754 - RNA, 19 nt, Human
ucugcaguucauggagagg

SEQ ID NO: 785755 - RNA, 18 nt, Human
ucugcuguauaaccugug

SEQ ID NO: 785756 - RNA, 22 nt, Human
ucuuaaguugguuuucuuucuu

SEQ ID NO: 785757 - RNA, 24 nt, Human
ucuuccuccuccuccuccucuuuu

SEQ ID NO: 785758 - RNA, 18 nt, Human
ugaaaacacaaaacccgc

SEQ ID NO: 785759 - RNA, 19 nt, Human
ugaaaacacaaaacccgcu

SEQ ID NO: 785760 - RNA, 25 nt, Human
ugaaaacacaaaacccgcucugcug

SEQ ID NO: 785761 - RNA, 18 nt, Human
ugaaagaaaggaaaggga

SEQ ID NO: 785762 - RNA, 19 nt, Human
ugaacacggugagagggag

SEQ ID NO: 785763 - RNA, 20 nt, Human
ugaagucacuaggccauggg

SEQ ID NO: 785764 - RNA, 26 nt, Human
ugaagugaaaguaaaaacccaagccc

SEQ ID NO: 785765 - RNA, 18 nt, Human
ugacaaugaacacgguga

SEQ ID NO: 785766 - RNA, 19 nt, Human
ugacccggcacacaaaugu

SEQ ID NO: 785767 - RNA, 27 nt, Human
ugagacacacaagaagcacuccaaaga

SEQ ID NO: 785768 - RNA, 20 nt, Human
ugagagucuaaaacccucca

SEQ ID NO: 785769 - RNA, 20 nt, Human
ugaggagacaaucaccuuca

SEQ ID NO: 785770 - RNA, 21 nt, Human
ugcaacuuacauaugcccuuu

SEQ ID NO: 785771 - RNA, 18 nt, Human
ugcacaaacacaaugucc

SEQ ID NO: 785772 - RNA, 21 nt, Human
ugcccaggagcuaccaagaca

SEQ ID NO: 785773 - RNA, 23 nt, Human
ugcccaggagcuaccaagaccaa

SEQ ID NO: 785774 - RNA, 21 nt, Human
ugcgucaagaagucaaguaca

SEQ ID NO: 785775 - RNA, 25 nt, Human
uggaugccacauaaguagacacagu

SEQ ID NO: 785776 - RNA, 19 nt, Human
uggcaacagcaccagagga

SEQ ID NO: 785777 - RNA, 20 nt, Human
uggcccccuagugacaccag

SEQ ID NO: 785778 - RNA, 18 nt, Human
uggccugacugcagcauc

SEQ ID NO: 785779 - RNA, 18 nt, Human
ugggagcucucaaaaggc

SEQ ID NO: 785780 - RNA, 25 nt, Human
ugggaugagugugcucaaugugcuu

SEQ ID NO: 785781 - RNA, 19 nt, Human
ugggggaaguggaaggaau

SEQ ID NO: 785782 - RNA, 21 nt, Human
uggggugugcacugacaugaa

SEQ ID NO: 785783 - RNA, 19 nt, Human
uguacaauggagccaacac

SEQ ID NO: 785784 - RNA, 23 nt, Human
uguacaauggagccaacaccuaa

SEQ ID NO: 785785 - RNA, 20 nt, Human
uguggaaaugcucgccuugg

SEQ ID NO: 785786 - RNA, 22 nt, Human
uguggaaaugcucgccuuggcc

SEQ ID NO: 785787 - RNA, 19 nt, Human
ugugguuuuaagagaaggg

SEQ ID NO: 785788 - RNA, 21 nt, Human
uguucuaagggaagaaagagg

SEQ ID NO: 785789 - RNA, 19 nt, Human
uguuucaacaccaaauuug

SEQ ID NO: 785790 - RNA, 23 nt, Human
uguuuccucauugaagggaacac

SEQ ID NO: 785791 - RNA, 20 nt, Human
uucagcuuccucaccaccag

SEQ ID NO: 785792 - RNA, 21 nt, Human
uucauggagaggcuacauggg

SEQ ID NO: 785793 - RNA, 22 nt, Human
uucauuuuuuaacuccaagaag

SEQ ID NO: 785794 - RNA, 20 nt, Human
uuccuccuccuccuccucuu

SEQ ID NO: 785795 - RNA, 21 nt, Human
uucucaacuccaucaccugcc

SEQ ID NO: 785796 - RNA, 19 nt, Human
uuuccacaaucagacacaa

SEQ ID NO: 785797 - RNA, 22 nt, Human
uuucuguccuccaaagucaagg

SEQ ID NO: 785798 - RNA, 22 nt, Human
aaaaauaugaaaagccacaaag

SEQ ID NO: 785799 - RNA, 21 nt, Human
aaacaugguugauuuucauac

SEQ ID NO: 785800 - RNA, 21 nt, Human
aaccaaaaacaagauaaacaa

SEQ ID NO: 785801 - RNA, 22 nt, Human
aacuacaaaauggauauuucug

SEQ ID NO: 785802 - RNA, 19 nt, Human
aagacaaagguccccaaga

SEQ ID NO: 785803 - RNA, 24 nt, Human
aaguuuucugcacaaucauaugaa

SEQ ID NO: 785804 - RNA, 20 nt, Human
aauacaauaaagaagacauu

SEQ ID NO: 785805 - RNA, 20 nt, Human
acacacacacgcacacaaaa

SEQ ID NO: 785806 - RNA, 25 nt, Human
acacagaagacaaagguccccaaga

SEQ ID NO: 785807 - RNA, 21 nt, Human
accacagauagaaaggagcaa

SEQ ID NO: 785808 - RNA, 18 nt, Human
acucccaugcuuccccca

SEQ ID NO: 785809 - RNA, 21 nt, Human
agaaacaauucagauuguaaa

SEQ ID NO: 785810 - RNA, 21 nt, Human
agaacuaaagcaaaugaaagu

SEQ ID NO: 785811 - RNA, 23 nt, Human
agcaagagauaccaaauauucau

SEQ ID NO: 785812 - RNA, 23 nt, Human
agugacaauguuucaacagaagc

SEQ ID NO: 785813 - RNA, 22 nt, Human
auaaaaccaacuagauugacuc

SEQ ID NO: 785814 - RNA, 24 nt, Human
auaagugugccaucccuacaaccc

SEQ ID NO: 785815 - RNA, 18 nt, Human
auagagaaagcucauuuc

SEQ ID NO: 785816 - RNA, 21 nt, Human
auaucaagaaaaaaucacucc

SEQ ID NO: 785817 - RNA, 21 nt, Human
augaaaacagacgcauaucaa

SEQ ID NO: 785818 - RNA, 22 nt, Human
augaaaagccacaaagauacca

SEQ ID NO: 785819 - RNA, 21 nt, Human
caaaugaaagugcaaccaaca

SEQ ID NO: 785820 - RNA, 20 nt, Human
caaccaacaaaucacaguaa

SEQ ID NO: 785821 - RNA, 18 nt, Human
caacuuggcauuacucaa

SEQ ID NO: 785822 - RNA, 21 nt, Human
caagagauaccaaauauucau

SEQ ID NO: 785823 - RNA, 23 nt, Human
cacaccacuuugaaacauguaau

SEQ ID NO: 785824 - RNA, 26 nt, Human
cacacgcacacaaaauuagguccaca

SEQ ID NO: 785825 - RNA, 22 nt, Human
cagaagacaaagguccccaaga

SEQ ID NO: 785826 - RNA, 21 nt, Human
cagacgcauaucaagaaaaaa

SEQ ID NO: 785827 - RNA, 18 nt, Human
cagcagcuccggaaagcu

SEQ ID NO: 785828 - RNA, 22 nt, Human
caguaaggggcuagaggcauga

SEQ ID NO: 785829 - RNA, 19 nt, Human
cauauagccauguauauau

SEQ ID NO: 785830 - RNA, 21 nt, Human
caucccuacaacccugaacau

SEQ ID NO: 785831 - RNA, 23 nt, Human
caugaagcacuaaaaauaugaaa

SEQ ID NO: 785832 - RNA, 20 nt, Human
caugagacauauaaagccuu

SEQ ID NO: 785833 - RNA, 20 nt, Human
cauguaaccaaaaacaagau

SEQ ID NO: 785834 - RNA, 23 nt, Human
ccaacuagauugacucauaauau

SEQ ID NO: 785835 - RNA, 19 nt, Human
ccacagauagaaaggagca

SEQ ID NO: 785836 - RNA, 19 nt, Human
ccacucccaugcuuccccc

SEQ ID NO: 785837 - RNA, 21 nt, Human
cccacucccaugcuuccccca

SEQ ID NO: 785838 - RNA, 22 nt, Human
cccaugcuucccccacucccua

SEQ ID NO: 785839 - RNA, 21 nt, Human
ccccacucccuacucccuuca

SEQ ID NO: 785840 - RNA, 19 nt, Human
cccuaaaaacagaaagucc

SEQ ID NO: 785841 - RNA, 24 nt, Human
ccucaaagacuucuggucuucucu

SEQ ID NO: 785842 - RNA, 21 nt, Human
cgcacacaaaauuagguccac

SEQ ID NO: 785843 - RNA, 22 nt, Human
cggaaagcucccgucgcccugg

SEQ ID NO: 785844 - RNA, 20 nt, Human
cuaaaaauaugaaaagccac

SEQ ID NO: 785845 - RNA, 23 nt, Human
cuaaagcaaaugaaagugcaacc

SEQ ID NO: 785846 - RNA, 19 nt, Human
cugguauagaacaaaugag

SEQ ID NO: 785847 - RNA, 22 nt, Human
cuugccccugacacccuucuau

SEQ ID NO: 785848 - RNA, 19 nt, Human
gagagaaaacaugguugau

SEQ ID NO: 785849 - RNA, 20 nt, Human
gcacacaaaauuagguccac

SEQ ID NO: 785850 - RNA, 22 nt, Human
gcacuaaaaauaugaaaagcca

SEQ ID NO: 785851 - RNA, 21 nt, Human
gcccucgacaaguaacgguuc

SEQ ID NO: 785852 - RNA, 23 nt, Human
gcuauaacuacaaaauggauauu

SEQ ID NO: 785853 - RNA, 20 nt, Human
ggaaaauucuagggcucagg

SEQ ID NO: 785854 - RNA, 23 nt, Human
ggaaagaagagauacucaagcau

SEQ ID NO: 785855 - RNA, 18 nt, Human
gguaucauguaaccaaaa

SEQ ID NO: 785856 - RNA, 21 nt, Human
gguccaacuuagugacaaugu

SEQ ID NO: 785857 - RNA, 18 nt, Human
guaaccaaaaacaagaua

SEQ ID NO: 785858 - RNA, 18 nt, Human
gugaaguguacuugcccc

SEQ ID NO: 785859 - RNA, 25 nt, Human
uaaaaucuaagaucucagcucuugg

SEQ ID NO: 785860 - RNA, 23 nt, Human
uaaaaugccaucgccucacuucu

SEQ ID NO: 785861 - RNA, 23 nt, Human
uaaaaugccaucgccucacuucu

SEQ ID NO: 785862 - RNA, 22 nt, Human
uaaccaaaaacaagauaaacaa

SEQ ID NO: 785863 - RNA, 24 nt, Human
uaacuacaaaauggauauuucugu

SEQ ID NO: 785864 - RNA, 21 nt, Human
uaagaucucagcucuuggaau

SEQ ID NO: 785865 - RNA, 22 nt, Human
uaagugugccaucccuacaacc

SEQ ID NO: 785866 - RNA, 21 nt, Human
uaauaagugugccaucccuuc

SEQ ID NO: 785867 - RNA, 19 nt, Human
uacacagaagacaaagguc

SEQ ID NO: 785868 - RNA, 24 nt, Human
uacagcuuuaucagucaguuccau

SEQ ID NO: 785869 - RNA, 22 nt, Human
uaccaaauauucaugaagcacu

SEQ ID NO: 785870 - RNA, 22 nt, Human
uaccaaauauucaugauacacu

SEQ ID NO: 785871 - RNA, 22 nt, Human
uaccauuuacacagaagacaaa

SEQ ID NO: 785872 - RNA, 23 nt, Human
uacuugccccugacacccuucua

SEQ ID NO: 785873 - RNA, 21 nt, Human
uagaacaaaugagaaagcugg

SEQ ID NO: 785874 - RNA, 21 nt, Human
uagagcguguaugugugacca

SEQ ID NO: 785875 - RNA, 19 nt, Human
uagcaaaacaauuuauaau

SEQ ID NO: 785876 - RNA, 22 nt, Human
uagugacaauguuucaacagaa

SEQ ID NO: 785877 - RNA, 23 nt, Human
uaugcaacuucucaccagguaau

SEQ ID NO: 785878 - RNA, 23 nt, Human
ucaacuuugccccacucccaugc

SEQ ID NO: 785879 - RNA, 21 nt, Human
ucaauauacuaccuaauucug

SEQ ID NO: 785880 - RNA, 20 nt, Human
ucccaugcuucccccacucc

SEQ ID NO: 785881 - RNA, 24 nt, Human
ucccccacucccuacucccuucaa

SEQ ID NO: 785882 - RNA, 24 nt, Human
ucccuacaacccugaacauuucuc

SEQ ID NO: 785883 - RNA, 25 nt, Human
ucccuacaacccugaacauuucucu

SEQ ID NO: 785884 - RNA, 26 nt, Human
ucccucaacaauacuuguguaaauaa

SEQ ID NO: 785885 - RNA, 20 nt, Human
uccuaagcucaucuaggcuc

SEQ ID NO: 785886 - RNA, 21 nt, Human
uccuaagcucaucuaggcucu

SEQ ID NO: 785887 - RNA, 20 nt, Human
ucgaaugaauucucagcuga

SEQ ID NO: 785888 - RNA, 19 nt, Human
ucucagcugauuccugaga

SEQ ID NO: 785889 - RNA, 18 nt, Human
ucucuacaagacaaaaac

SEQ ID NO: 785890 - RNA, 24 nt, Human
ucucuacaagacaaaaacauauga

SEQ ID NO: 785891 - RNA, 24 nt, Human
ucucuauguauugccucuacuaua

SEQ ID NO: 785892 - RNA, 26 nt, Human
ugaagcacuaaaaauaugaaaagcca

SEQ ID NO: 785893 - RNA, 21 nt, Human
ugaauucaguuaccuugacac

SEQ ID NO: 785894 - RNA, 20 nt, Human
ugaccaaacuguccugcagg

SEQ ID NO: 785895 - RNA, 21 nt, Human
ugaccaaacuguccugcagga

SEQ ID NO: 785896 - RNA, 21 nt, Human
ugagaaaaaaauuuauuugga

SEQ ID NO: 785897 - RNA, 22 nt, Human
ugagaaaaaaauuuauuuggaa

SEQ ID NO: 785898 - RNA, 25 nt, Human
ugagaaaaaaauuuauuuggaauau

SEQ ID NO: 785899 - RNA, 18 nt, Human
ugagaaauaaacagagaa

SEQ ID NO: 785900 - RNA, 23 nt, Human
ugagaaauaaacagagaacauua

SEQ ID NO: 785901 - RNA, 21 nt, Human
ugagagguuguuuuuagagau

SEQ ID NO: 785902 - RNA, 22 nt, Human
ugagcccacucucuauccuaag

SEQ ID NO: 785903 - RNA, 22 nt, Human
ugcaaaaacaaaguugcguauc

SEQ ID NO: 785904 - RNA, 24 nt, Human
ugccauaaaaauuauuuuauuaac

SEQ ID NO: 785905 - RNA, 24 nt, Human
ugccccacucccaugcuuccccca

SEQ ID NO: 785906 - RNA, 18 nt, Human
ugcuuuucuuuguccccc

SEQ ID NO: 785907 - RNA, 19 nt, Human
ugggaauucaugagaaaua

SEQ ID NO: 785908 - RNA, 23 nt, Human
ugguauagaacaaaugagaaagc

SEQ ID NO: 785909 - RNA, 22 nt, Human
ugguaucauguaaccaaaaaca

SEQ ID NO: 785910 - RNA, 18 nt, Human
ugguuucuggauccaacu

SEQ ID NO: 785911 - RNA, 25 nt, Human
ugucgaauaaaaccaacuagauuga

SEQ ID NO: 785912 - RNA, 19 nt, Human
ugucuauauacauaugcgc

SEQ ID NO: 785913 - RNA, 22 nt, Human
ugugcaaaaauucaacuauaaa

SEQ ID NO: 785914 - RNA, 23 nt, Human
uuacaauuguuuaacuuccuugu

SEQ ID NO: 785915 - RNA, 20 nt, Human
uuacccacuggugacacuca

SEQ ID NO: 785916 - RNA, 22 nt, Human
uuagagauacugguuucuggau

SEQ ID NO: 785917 - RNA, 22 nt, Human
uucaagauuuuuuaaugaauuc

SEQ ID NO: 785918 - RNA, 20 nt, Human
uucaauguuuauuauuuucg

SEQ ID NO: 785919 - RNA, 24 nt, Human
uucacaguuguauugccauaaaaa

SEQ ID NO: 785920 - RNA, 21 nt, Human
uucaucugauugagucaucug

SEQ ID NO: 785921 - RNA, 18 nt, Human
uucaugaagcacuaaaaa

SEQ ID NO: 785922 - RNA, 23 nt, Human
uucuagggcucaggcagcacaga

SEQ ID NO: 785923 - RNA, 18 nt, Human
uucucagcugauuccuga

SEQ ID NO: 785924 - RNA, 18 nt, Human
uugcuuucuccuuguucc

SEQ ID NO: 785925 - RNA, 20 nt, Human
uuuacaguuauauacaguuu

SEQ ID NO: 785926 - RNA, 19 nt, Human
uuucucuuuccuugaugaa

SEQ ID NO: 785927 - RNA, 24 nt, Human
uuugucccccuagucaagggagag

SEQ ID NO: 785928 - RNA, 23 nt, Human
uuuucugcacaaucauaugaaag

SEQ ID NO: 785929 - RNA, 18 nt, Human
aagcagcuccuguccccc

SEQ ID NO: 785930 - RNA, 21 nt, Human
acagggcagccacuguguccu

SEQ ID NO: 785931 - RNA, 23 nt, Human
acccccuacaaaaauaaccugac

SEQ ID NO: 785932 - RNA, 18 nt, Human
agacaggggcuuagaucc

SEQ ID NO: 785933 - RNA, 24 nt, Human
agcacugaggcagugugagaggga

SEQ ID NO: 785934 - RNA, 22 nt, Human
agcccccagagagggccuuuga

SEQ ID NO: 785935 - RNA, 24 nt, Human
agccggguccuucugucuucucug

SEQ ID NO: 785936 - RNA, 18 nt, Human
aggcagcaugguccacac

SEQ ID NO: 785937 - RNA, 18 nt, Human
aggcagugugagagggag

SEQ ID NO: 785938 - RNA, 18 nt, Human
aggcggccggcauggcag

SEQ ID NO: 785939 - RNA, 23 nt, Human
agggccuuugaggggccccuuga

SEQ ID NO: 785940 - RNA, 19 nt, Human
aggggccaucccccaaaac

SEQ ID NO: 785941 - RNA, 22 nt, Human
agggggugagaggcccccaccc

SEQ ID NO: 785942 - RNA, 21 nt, Human
auggcgcucggaggcagcucu

SEQ ID NO: 785943 - RNA, 21 nt, Human
augggaggagggcuggucucu

SEQ ID NO: 785944 - RNA, 24 nt, Human
caccacgcugcgcagacucgucuc

SEQ ID NO: 785945 - RNA, 18 nt, Human
cacgcugcgcagacucgu

SEQ ID NO: 785946 - RNA, 20 nt, Human
cagagcccccagagagggcc

SEQ ID NO: 785947 - RNA, 24 nt, Human
cagcucuggcucugcuacugaucc

SEQ ID NO: 785948 - RNA, 19 nt, Human
caggccuggggacacagcu

SEQ ID NO: 785949 - RNA, 20 nt, Human
ccacccaugggaccaaaggu

SEQ ID NO: 785950 - RNA, 24 nt, Human
ccacgcugcgcagacucgucuccu

SEQ ID NO: 785951 - RNA, 18 nt, Human
ccccagagcccccagaga

SEQ ID NO: 785952 - RNA, 23 nt, Human
cccuacaaaaauaaccugacccc

SEQ ID NO: 785953 - RNA, 27 nt, Human
cgagcugggaagcagcuccuguccccc

SEQ ID NO: 785954 - RNA, 24 nt, Human
cgcccugggcccaggccuggggac

SEQ ID NO: 785955 - RNA, 21 nt, Human
cggaggcagcucuggcucugc

SEQ ID NO: 785956 - RNA, 21 nt, Human
cucccagcuccacaaggcagc

SEQ ID NO: 785957 - RNA, 23 nt, Human
cuccccacaggggccauccccca

SEQ ID NO: 785958 - RNA, 25 nt, Human
cucuucugccacugggcaaaaagcc

SEQ ID NO: 785959 - RNA, 25 nt, Human
cugacccccauggugaccgggcaug

SEQ ID NO: 785960 - RNA, 20 nt, Human
cuggcccgcagggcgcccug

SEQ ID NO: 785961 - RNA, 20 nt, Human
cuggcgccucaguuuucaca

SEQ ID NO: 785962 - RNA, 22 nt, Human
gacagggcagccacuguguccu

SEQ ID NO: 785963 - RNA, 22 nt, Human
gagaggcccccacccuggaucc

SEQ ID NO: 785964 - RNA, 19 nt, Human
gcacuggccgccguaaagc

SEQ ID NO: 785965 - RNA, 20 nt, Human
gcagcuccugucccccaccc

SEQ ID NO: 785966 - RNA, 22 nt, Human
gcauggcagcuccuccccacag

SEQ ID NO: 785967 - RNA, 20 nt, Human
gccacuguguccuggcgccu

SEQ ID NO: 785968 - RNA, 18 nt, Human
gcgcagagggucgggggg

SEQ ID NO: 785969 - RNA, 18 nt, Human
ggaaagacaggggcuuag

SEQ ID NO: 785970 - RNA, 18 nt, Human
ggccuuugaggggccccu

SEQ ID NO: 785971 - RNA, 20 nt, Human
gggcuaggcugagccgccgg

SEQ ID NO: 785972 - RNA, 24 nt, Human
ggggggcggcggccaccacgcugc

SEQ ID NO: 785973 - RNA, 18 nt, Human
guaggacaugcagaagcc

SEQ ID NO: 785974 - RNA, 22 nt, Human
uaaccugacccccauggugacc

SEQ ID NO: 785975 - RNA, 22 nt, Human
uacaaaaauaaccugaccccca

SEQ ID NO: 785976 - RNA, 23 nt, Human
uacaaaaauaaccugacccccau

SEQ ID NO: 785977 - RNA, 19 nt, Human
ucagagucaggugggaaag

SEQ ID NO: 785978 - RNA, 22 nt, Human
uccacaaggcagcaugguccac

SEQ ID NO: 785979 - RNA, 19 nt, Human
ucccccaaaacauccacuc

SEQ ID NO: 785980 - RNA, 24 nt, Human
ucgcagggggaagcuucucggagc

SEQ ID NO: 785981 - RNA, 23 nt, Human
ucggaggcagcucuggcucugcu

SEQ ID NO: 785982 - RNA, 22 nt, Human
ucucuggccaagaccaaaaggc

SEQ ID NO: 785983 - RNA, 20 nt, Human
ucugccgugagcaggcggcu

SEQ ID NO: 785984 - RNA, 22 nt, Human
ugaggaaagcugugcugagccc

SEQ ID NO: 785985 - RNA, 24 nt, Human
ugaggaaagcugugcugagcccca

SEQ ID NO: 785986 - RNA, 18 nt, Human
ugaggcuggggucagggg

SEQ ID NO: 785987 - RNA, 25 nt, Human
ugccacugggcaaaaagccgagugu

SEQ ID NO: 785988 - RNA, 21 nt, Human
ugugagagggagacccccuac

SEQ ID NO: 785989 - RNA, 21 nt, Human
uguggcugccaguagcccggc

SEQ ID NO: 785990 - RNA, 18 nt, Human
aaaaaaacuugaaccagg

SEQ ID NO: 785991 - RNA, 24 nt, Human
aaaaaaggcuggaaaaauagcuaa

SEQ ID NO: 785992 - RNA, 19 nt, Human
aaaaguaacucuuaaaggc

SEQ ID NO: 785993 - RNA, 24 nt, Human
aaacaaaauaucugaacacagaac

SEQ ID NO: 785994 - RNA, 25 nt, Human
aaacaaaauaucugaacacagaacc

SEQ ID NO: 785995 - RNA, 22 nt, Human
aaagcaaaacaugaauuacaaa

SEQ ID NO: 785996 - RNA, 18 nt, Human
aaauuacaggucacugga

SEQ ID NO: 785997 - RNA, 18 nt, Human
aaccuguagucacuccuc

SEQ ID NO: 785998 - RNA, 19 nt, Human
aagaaucuaauugucaaca

SEQ ID NO: 785999 - RNA, 24 nt, Human
aagcaaaacaugaauuacaaagcu

SEQ ID NO: 786000 - RNA, 26 nt, Human
aagcacuuuaccuaacuucagaaaua

SEQ ID NO: 786001 - RNA, 22 nt, Human
aauuagaaagcugccgacuuaa

SEQ ID NO: 786002 - RNA, 24 nt, Human
acaaagccuuuaaaaaguuaagcu

SEQ ID NO: 786003 - RNA, 23 nt, Human
acaaaguuuuuuuagccuuaaaa

SEQ ID NO: 786004 - RNA, 23 nt, Human
acacacacaaccucaaaccuggu

SEQ ID NO: 786005 - RNA, 21 nt, Human
acacacacacacacacacaca

SEQ ID NO: 786006 - RNA, 27 nt, Human
acacacacacacacacacacaccccca

SEQ ID NO: 786007 - RNA, 25 nt, Human
acacacacacacacccccacacaca

SEQ ID NO: 786008 - RNA, 27 nt, Human
acacacacacacacccccacacacaca

SEQ ID NO: 786009 - RNA, 18 nt, Human
acaguuuuuuuuuucccc

SEQ ID NO: 786010 - RNA, 19 nt, Human
acaguuuuuuuuuuccccu

SEQ ID NO: 786011 - RNA, 28 nt, Human
acauacacacacacacacacacacaccc

SEQ ID NO: 786012 - RNA, 21 nt, Human
accagaaaccauuccacuucu

SEQ ID NO: 786013 - RNA, 21 nt, Human
accagccgcaggcccggcgcg

SEQ ID NO: 786014 - RNA, 21 nt, Human
acugcagaaagauggaaucca

SEQ ID NO: 786015 - RNA, 20 nt, Human
acuugaaccagguuuuuuuc

SEQ ID NO: 786016 - RNA, 18 nt, Human
agacagagucuugcacug

SEQ ID NO: 786017 - RNA, 19 nt, Human
agcccagaauaaccaaaau

SEQ ID NO: 786018 - RNA, 21 nt, Human
agcuaaauuaaaacuacccuc

SEQ ID NO: 786019 - RNA, 19 nt, Human
aggaauguugaucuaugau

SEQ ID NO: 786020 - RNA, 19 nt, Human
aggcaaauagacccaauga

SEQ ID NO: 786021 - RNA, 24 nt, Human
agugcaauggcacaaucucggcuc

SEQ ID NO: 786022 - RNA, 19 nt, Human
auaagaaaaagaaaaccuc

SEQ ID NO: 786023 - RNA, 24 nt, Human
auaggacaaagccuuuaaaaaguu

SEQ ID NO: 786024 - RNA, 25 nt, Human
auaugcaaacauacacacacacaca

SEQ ID NO: 786025 - RNA, 19 nt, Human
auguaaugaaauuacaggu

SEQ ID NO: 786026 - RNA, 24 nt, Human
auuaacugguuggcuggaauauug

SEQ ID NO: 786027 - RNA, 23 nt, Human
caaaaguaacucuuaaaggcaaa

SEQ ID NO: 786028 - RNA, 22 nt, Human
caaaguuuuuuuagccuuaaaa

SEQ ID NO: 786029 - RNA, 21 nt, Human
caacaagagaaccgagcuaaa

SEQ ID NO: 786030 - RNA, 20 nt, Human
cacacacacaaccucaaacc

SEQ ID NO: 786031 - RNA, 18 nt, Human
cacacacacacacacaca

SEQ ID NO: 786032 - RNA, 20 nt, Human
cacacacacacacacacaca

SEQ ID NO: 786033 - RNA, 22 nt, Human
cacacacccccacacacacaca

SEQ ID NO: 786034 - RNA, 19 nt, Human
cacagaacccuaaacauac

SEQ ID NO: 786035 - RNA, 23 nt, Human
cacagaacccuaaacauacuaga

SEQ ID NO: 786036 - RNA, 24 nt, Human
cacauaaauaaaauaagagguuuu

SEQ ID NO: 786037 - RNA, 19 nt, Human
caccagccgcaggcccggc

SEQ ID NO: 786038 - RNA, 21 nt, Human
cacugauaagaaaaagaaaac

SEQ ID NO: 786039 - RNA, 22 nt, Human
cacuuaaggugcuaaugauaug

SEQ ID NO: 786040 - RNA, 24 nt, Human
cagaaagauggaauccagcucaca

SEQ ID NO: 786041 - RNA, 22 nt, Human
cagaaauaccaccagaaaccau

SEQ ID NO: 786042 - RNA, 19 nt, Human
cagcaacgaaaaguuaaca

SEQ ID NO: 786043 - RNA, 19 nt, Human
caggaagagaauuaacugg

SEQ ID NO: 786044 - RNA, 23 nt, Human
cauuaggcaaauagacccaauga

SEQ ID NO: 786045 - RNA, 20 nt, Human
ccaagaaucuaauugucaac

SEQ ID NO: 786046 - RNA, 18 nt, Human
ccacacagacacaaugaa

SEQ ID NO: 786047 - RNA, 20 nt, Human
cccacacacacacacaaccu

SEQ ID NO: 786048 - RNA, 27 nt, Human
cccacacacacacacaaccucaaaccu

SEQ ID NO: 786049 - RNA, 20 nt, Human
cccccacacacacacacaac

SEQ ID NO: 786050 - RNA, 21 nt, Human
cccccacacacacacacaacc

SEQ ID NO: 786051 - RNA, 25 nt, Human
cccccacacacacacacaaccucaa

SEQ ID NO: 786052 - RNA, 21 nt, Human
ccccgcagccucuccgcccgg

SEQ ID NO: 786053 - RNA, 22 nt, Human
ccccgcgcgggcccaggagccc

SEQ ID NO: 786054 - RNA, 20 nt, Human
cccgccgcccuuuuccccgc

SEQ ID NO: 786055 - RNA, 21 nt, Human
cccgcgcgggcccaggagcca

SEQ ID NO: 786056 - RNA, 21 nt, Human
cccucacuugguccaagaauc

SEQ ID NO: 786057 - RNA, 20 nt, Human
ccgacuuaaauaugacaaag

SEQ ID NO: 786058 - RNA, 22 nt, Human
ccuacuuuaacccuucuuuacc

SEQ ID NO: 786059 - RNA, 26 nt, Human
ccuguagucacuccucuaauaaacca

SEQ ID NO: 786060 - RNA, 24 nt, Human
cgcccggggcgcgccggcuccgcc

SEQ ID NO: 786061 - RNA, 23 nt, Human
cgcccuuuuccccgcgcgggccc

SEQ ID NO: 786062 - RNA, 22 nt, Human
cucacaguuuaacugaugccau

SEQ ID NO: 786063 - RNA, 31 nt, Human
cugccacauaaauaaaauaagagguuuuauu

SEQ ID NO: 786064 - RNA, 21 nt, Human
cuggcagcccagaauaaccaa

SEQ ID NO: 786065 - RNA, 25 nt, Human
cuuggaaugggacaccacauuuuaa

SEQ ID NO: 786066 - RNA, 19 nt, Human
gaaauuacaggucacugga

SEQ ID NO: 786067 - RNA, 23 nt, Human
gagcuaaauuaaaacuacccuca

SEQ ID NO: 786068 - RNA, 19 nt, Human
gcccaggcuggagugcaau

SEQ ID NO: 786069 - RNA, 23 nt, Human
gcccaggcuggagugcaauggca

SEQ ID NO: 786070 - RNA, 23 nt, Human
gcgcagcugcgggaggcggaggg

SEQ ID NO: 786071 - RNA, 19 nt, Human
gcuggagugcaauggcaca

SEQ ID NO: 786072 - RNA, 22 nt, Human
ggccaugguuguaaagaaaacc

SEQ ID NO: 786073 - RNA, 18 nt, Human
gggaggacugaacacugg

SEQ ID NO: 786074 - RNA, 18 nt, Human
ggggaggacugaacacug

SEQ ID NO: 786075 - RNA, 24 nt, Human
gugcaaacaaaauaucugaacaca

SEQ ID NO: 786076 - RNA, 21 nt, Human
uaaaauaagaacuaagucaaa

SEQ ID NO: 786077 - RNA, 23 nt, Human
uaaccaaaaucuuuuuagauguc

SEQ ID NO: 786078 - RNA, 24 nt, Human
uacaaugaauauaaauuaacauua

SEQ ID NO: 786079 - RNA, 26 nt, Human
uacacacacacacacacacacacccc

SEQ ID NO: 786080 - RNA, 23 nt, Human
uaguccacaaaagcaaaacauga

SEQ ID NO: 786081 - RNA, 31 nt, Human
uauaauaugcaaacauacacacacacacaca

SEQ ID NO: 786082 - RNA, 24 nt, Human
ucaacauuaggcaaauagacccaa

SEQ ID NO: 786083 - RNA, 18 nt, Human
ucacugcaaccuccgccu

SEQ ID NO: 786084 - RNA, 20 nt, Human
ucacugcaaccuccgccuga

SEQ ID NO: 786085 - RNA, 21 nt, Human
ucacugcaaccuccgccugaa

SEQ ID NO: 786086 - RNA, 23 nt, Human
ucacugcaaccuccgccugaagg

SEQ ID NO: 786087 - RNA, 24 nt, Human
ucacugcaaccuccgccugaaggg

SEQ ID NO: 786088 - RNA, 23 nt, Human
ucagaaauaccaccagaaaccau

SEQ ID NO: 786089 - RNA, 24 nt, Human
uccaagaaucuaauugucaacauu

SEQ ID NO: 786090 - RNA, 27 nt, Human
uccauuuuucuaaauaauauauccucu

SEQ ID NO: 786091 - RNA, 18 nt, Human
uccccucacuccagcaca

SEQ ID NO: 786092 - RNA, 18 nt, Human
ucgcccaggcuggagugc

SEQ ID NO: 786093 - RNA, 22 nt, Human
ucuaaauaauauauccucuuua

SEQ ID NO: 786094 - RNA, 18 nt, Human
ucuaugauuggcagaagc

SEQ ID NO: 786095 - RNA, 22 nt, Human
ucuugcacugucgcccaggcug

SEQ ID NO: 786096 - RNA, 23 nt, Human
ucuugcacugucgcccaggcugg

SEQ ID NO: 786097 - RNA, 24 nt, Human
ucuugcacugucgcccaggcugga

SEQ ID NO: 786098 - RNA, 18 nt, Human
ugaauguaaccaggaaga

SEQ ID NO: 786099 - RNA, 20 nt, Human
ugacaagauacaaagaucug

SEQ ID NO: 786100 - RNA, 21 nt, Human
ugaggcacaugcuaacugaaa

SEQ ID NO: 786101 - RNA, 20 nt, Human
ugaggcccgggaagcugcgg

SEQ ID NO: 786102 - RNA, 26 nt, Human
ugcaaaaaaggcuggaaaaauagcua

SEQ ID NO: 786103 - RNA, 21 nt, Human
ugcaaacaaaauaucugaaca

SEQ ID NO: 786104 - RNA, 31 nt, Human
ugcaaacauacacacacacacacacacacag

SEQ ID NO: 786105 - RNA, 24 nt, Human
ugcacugucgcccaggcuggagug

SEQ ID NO: 786106 - RNA, 23 nt, Human
uggagugcaauggcacaaucucg

SEQ ID NO: 786107 - RNA, 24 nt, Human
uggagugcaauggcacaaucucgg

SEQ ID NO: 786108 - RNA, 24 nt, Human
uggcacaaucucggcucacugcaa

SEQ ID NO: 786109 - RNA, 20 nt, Human
ugggacaccacauuuuaaaa

SEQ ID NO: 786110 - RNA, 27 nt, Human
uggugacaagauacaaagaucuguuuc

SEQ ID NO: 786111 - RNA, 24 nt, Human
ugguguuuucuucccuucccauuu

SEQ ID NO: 786112 - RNA, 22 nt, Human
uguaaagaaaaccuguagucac

SEQ ID NO: 786113 - RNA, 19 nt, Human
ugucaacauuaggcaaaua

SEQ ID NO: 786114 - RNA, 26 nt, Human
ugucacaaaaugcacagaucuguucc

SEQ ID NO: 786115 - RNA, 18 nt, Human
uguccuacaucugcacaa

SEQ ID NO: 786116 - RNA, 20 nt, Human
ugucgcccaggcuggagugc

SEQ ID NO: 786117 - RNA, 22 nt, Human
ugucgcccaggcuggagugcaa

SEQ ID NO: 786118 - RNA, 19 nt, Human
uuaaaauaagaacuaaguc

SEQ ID NO: 786119 - RNA, 21 nt, Human
uuaaauuagaaagcugccgac

SEQ ID NO: 786120 - RNA, 26 nt, Human
uuaacaccaucuaaaauaaauagauu

SEQ ID NO: 786121 - RNA, 22 nt, Human
uuaaggugcuaaugauauguca

SEQ ID NO: 786122 - RNA, 23 nt, Human
uuccccuacaggacuuucuuaaa

SEQ ID NO: 786123 - RNA, 18 nt, Human
uugaaugcaugaauucgc

SEQ ID NO: 786124 - RNA, 24 nt, Human
uugcacugucgcccaggcuggagu

SEQ ID NO: 786125 - RNA, 22 nt, Human
uuuaaaugcuguccuuaccuua

SEQ ID NO: 786126 - RNA, 26 nt, Human
uuuaccauuugucccaauuauugacc

SEQ ID NO: 786127 - RNA, 20 nt, Human
uuuuaaaaucaucuuuacca

SEQ ID NO: 786128 - RNA, 21 nt, Human
uuuuggggaggacugaacacu

SEQ ID NO: 786129 - RNA, 25 nt, Human
uuuuggggaggacugaacacuggua

SEQ ID NO: 786130 - RNA, 20 nt, Human
aaaaagaaaaauacaguaga

SEQ ID NO: 786131 - RNA, 24 nt, Human
aaauauaacugucagcugcaugaa

SEQ ID NO: 786132 - RNA, 20 nt, Human
aacacuuccaugcuguccuc

SEQ ID NO: 786133 - RNA, 23 nt, Human
aagaaaugcaguaaguauaaaau

SEQ ID NO: 786134 - RNA, 23 nt, Human
aagaagaggaaggggaggcagag

SEQ ID NO: 786135 - RNA, 23 nt, Human
aagaagaggaaggggaggcagag

SEQ ID NO: 786136 - RNA, 24 nt, Human
aagaagaggaaggggaggcagagg

SEQ ID NO: 786137 - RNA, 19 nt, Human
aagaggaaggggaggcaga

SEQ ID NO: 786138 - RNA, 22 nt, Human
aagcagcagggcuggaagacuu

SEQ ID NO: 786139 - RNA, 25 nt, Human
aagcagcagggcuggaagacuugca

SEQ ID NO: 786140 - RNA, 18 nt, Human
aaggaaaugcaaauacuu

SEQ ID NO: 786141 - RNA, 22 nt, Human
aaggggaggcagaggaucaaaa

SEQ ID NO: 786142 - RNA, 21 nt, Human
aaugcaaauacuuggccaccu

SEQ ID NO: 786143 - RNA, 23 nt, Human
acaaauauaacugucagcugcau

SEQ ID NO: 786144 - RNA, 26 nt, Human
acaaaugucucaaaaaaugcacagag

SEQ ID NO: 786145 - RNA, 22 nt, Human
acaagguuuucuucaauuauag

SEQ ID NO: 786146 - RNA, 24 nt, Human
acagguuacuuuuaacacaagguu

SEQ ID NO: 786147 - RNA, 20 nt, Human
accagugucaauauugcuuu

SEQ ID NO: 786148 - RNA, 21 nt, Human
acuagccggguagccuggaac

SEQ ID NO: 786149 - RNA, 23 nt, Human
agacuagccggguagccuggaac

SEQ ID NO: 786150 - RNA, 19 nt, Human
agaggaaggggaggcagag

SEQ ID NO: 786151 - RNA, 21 nt, Human
agaggaaggggaggcagagga

SEQ ID NO: 786152 - RNA, 21 nt, Human
agcauccuaacucuuuaucac

SEQ ID NO: 786153 - RNA, 18 nt, Human
aggaaauaaauuaagucu

SEQ ID NO: 786154 - RNA, 18 nt, Human
aggaaggggaggcagagg

SEQ ID NO: 786155 - RNA, 19 nt, Human
aggaaggggaggcagagga

SEQ ID NO: 786156 - RNA, 25 nt, Human
aguaaaugaauccaaguauuucugc

SEQ ID NO: 786157 - RNA, 19 nt, Human
aguccugcuucuaauuucu

SEQ ID NO: 786158 - RNA, 19 nt, Human
aguucacuuuugagcaucc

SEQ ID NO: 786159 - RNA, 21 nt, Human
auauccuuuuagguaguuucc

SEQ ID NO: 786160 - RNA, 22 nt, Human
augaggccguguggcucaggga

SEQ ID NO: 786161 - RNA, 20 nt, Human
auuuuggguauacuacuggg

SEQ ID NO: 786162 - RNA, 22 nt, Human
caaaaaaugcacagagcaaaaa

SEQ ID NO: 786163 - RNA, 24 nt, Human
caaacagaucagucuaacagcuaa

SEQ ID NO: 786164 - RNA, 20 nt, Human
caagguuuucuucaauuaua

SEQ ID NO: 786165 - RNA, 25 nt, Human
cacuaaaugucaauaacugcccuag

SEQ ID NO: 786166 - RNA, 19 nt, Human
cacuucucccucccagccu

SEQ ID NO: 786167 - RNA, 18 nt, Human
cagaagacggggccgugc

SEQ ID NO: 786168 - RNA, 18 nt, Human
cagacacuuuauuuaaaa

SEQ ID NO: 786169 - RNA, 23 nt, Human
cagagacgcuucagaugagggag

SEQ ID NO: 786170 - RNA, 20 nt, Human
cagcauauuugguugacagu

SEQ ID NO: 786171 - RNA, 20 nt, Human
ccacuggaguauucuuuaga

SEQ ID NO: 786172 - RNA, 20 nt, Human
ccauauuagaaauaaaagca

SEQ ID NO: 786173 - RNA, 21 nt, Human
cccacuggaguauucuuuaga

SEQ ID NO: 786174 - RNA, 21 nt, Human
ccccugagguugacaaacgcu

SEQ ID NO: 786175 - RNA, 24 nt, Human
ccccugagguugacaaacgcugau

SEQ ID NO: 786176 - RNA, 18 nt, Human
cccucaagauuccucucc

SEQ ID NO: 786177 - RNA, 21 nt, Human
ccugagguugacaaacgcuga

SEQ ID NO: 786178 - RNA, 20 nt, Human
cgggcggggaccugggccga

SEQ ID NO: 786179 - RNA, 19 nt, Human
cggggaccugggccguucc

SEQ ID NO: 786180 - RNA, 20 nt, Human
cuaaauagucccaauacuga

SEQ ID NO: 786181 - RNA, 19 nt, Human
cucaagauuccucucccca

SEQ ID NO: 786182 - RNA, 21 nt, Human
cucaagauuccucuccccacu

SEQ ID NO: 786183 - RNA, 21 nt, Human
cugcccgggaccugcgggcgg

SEQ ID NO: 786184 - RNA, 23 nt, Human
cuguccaaugcagguuauuuagc

SEQ ID NO: 786185 - RNA, 21 nt, Human
cuucuucagaauaaauuccag

SEQ ID NO: 786186 - RNA, 20 nt, Human
gaaaugcaaauacuuggcca

SEQ ID NO: 786187 - RNA, 25 nt, Human
gaaugcacuguggaguuaacuguga

SEQ ID NO: 786188 - RNA, 23 nt, Human
gaccugcgggcggggaccugggc

SEQ ID NO: 786189 - RNA, 21 nt, Human
gaccugggccguucccgaggc

SEQ ID NO: 786190 - RNA, 23 nt, Human
gagcagaaccaggaaauucugga

SEQ ID NO: 786191 - RNA, 19 nt, Human
gagcagguaaaauugugau

SEQ ID NO: 786192 - RNA, 26 nt, Human
gaguaaaugaauccaaguauuucugc

SEQ ID NO: 786193 - RNA, 22 nt, Human
gcacaucuguuucuuucauaca

SEQ ID NO: 786194 - RNA, 19 nt, Human
gcagaagacggggccgugc

SEQ ID NO: 786195 - RNA, 21 nt, Human
gcugcaugaaugcacugugga

SEQ ID NO: 786196 - RNA, 18 nt, Human
ggaucccuggccucuacu

SEQ ID NO: 786197 - RNA, 18 nt, Human
gguaguuuccugcuucac

SEQ ID NO: 786198 - RNA, 20 nt, Human
guagagcaccaaauagaaua

SEQ ID NO: 786199 - RNA, 18 nt, Human
guauacuacugggugaaa

SEQ ID NO: 786200 - RNA, 20 nt, Human
gugccaucacugaacaaaau

SEQ ID NO: 786201 - RNA, 18 nt, Human
gugucuggcaagcagcag

SEQ ID NO: 786202 - RNA, 20 nt, Human
gugugucuggcaagcagcag

SEQ ID NO: 786203 - RNA, 19 nt, Human
uaaaagcaaaugaaaauga

SEQ ID NO: 786204 - RNA, 23 nt, Human
uaaaccaauuacuucuauuccaa

SEQ ID NO: 786205 - RNA, 20 nt, Human
uaaagaacaagauaucaagu

SEQ ID NO: 786206 - RNA, 21 nt, Human
uaaauagucccaauacugaca

SEQ ID NO: 786207 - RNA, 21 nt, Human
uaacugggaagauuuuccaca

SEQ ID NO: 786208 - RNA, 18 nt, Human
uaagaaaugcaguaagua

SEQ ID NO: 786209 - RNA, 22 nt, Human
uaagaggagguuuuaagacuca

SEQ ID NO: 786210 - RNA, 24 nt, Human
uaagcuggaagaggagguuuccaa

SEQ ID NO: 786211 - RNA, 20 nt, Human
uacagugccaucacugaaca

SEQ ID NO: 786212 - RNA, 24 nt, Human
uacagugccaucacugaacaaaau

SEQ ID NO: 786213 - RNA, 24 nt, Human
uagaauauucucaacaaaugucuc

SEQ ID NO: 786214 - RNA, 19 nt, Human
uagcuagugggaugcucuc

SEQ ID NO: 786215 - RNA, 19 nt, Human
uagucugcaaacuugaaau

SEQ ID NO: 786216 - RNA, 22 nt, Human
ucagaguuucaaucgguucuuu

SEQ ID NO: 786217 - RNA, 23 nt, Human
ucauacuuagaaaaucauaagcu

SEQ ID NO: 786218 - RNA, 22 nt, Human
ucaugacaucaaaaaugucucc

SEQ ID NO: 786219 - RNA, 19 nt, Human
uccagugauaacauauccu

SEQ ID NO: 786220 - RNA, 19 nt, Human
ucccuggccucuacucacu

SEQ ID NO: 786221 - RNA, 21 nt, Human
ucuauguuaucugcccgggac

SEQ ID NO: 786222 - RNA, 18 nt, Human
ucugaaacccagacacuu

SEQ ID NO: 786223 - RNA, 19 nt, Human
ucugaagucugaaauaacu

SEQ ID NO: 786224 - RNA, 19 nt, Human
ucugcaaacuugaaaugau

SEQ ID NO: 786225 - RNA, 21 nt, Human
ucuguuuuuucacugcugugu

SEQ ID NO: 786226 - RNA, 23 nt, Human
ugagacaaacaacugcuacaaac

SEQ ID NO: 786227 - RNA, 23 nt, Human
ugauacgugagcagaaccaggaa

SEQ ID NO: 786228 - RNA, 18 nt, Human
ugcccgggaccugcgggc

SEQ ID NO: 786229 - RNA, 22 nt, Human
uggcaaggaacacuugaaauau

SEQ ID NO: 786230 - RNA, 22 nt, Human
ugguuggacuaaauagucccaa

SEQ ID NO: 786231 - RNA, 21 nt, Human
uguaaaauaucucauuaauaa

SEQ ID NO: 786232 - RNA, 24 nt, Human
ugucuaguacugaacuguccaaua

SEQ ID NO: 786233 - RNA, 23 nt, Human
ugucucaaaaaaugcacagagca

SEQ ID NO: 786234 - RNA, 18 nt, Human
uguuaucugcccgggacc

SEQ ID NO: 786235 - RNA, 19 nt, Human
uuaaucaggcaucacaugc

SEQ ID NO: 786236 - RNA, 19 nt, Human
uuagaaauaaaagcaaaug

SEQ ID NO: 786237 - RNA, 18 nt, Human
uucacucucauuguuccc

SEQ ID NO: 786238 - RNA, 19 nt, Human
uuccaugaggagauggcag

SEQ ID NO: 786239 - RNA, 19 nt, Human
uuggcacgacuaccauuuc

SEQ ID NO: 786240 - RNA, 20 nt, Human
uuugaacuaugucuugugca

SEQ ID NO: 786241 - RNA, 21 nt, Human
uuuuucacugcuguguucugu

SEQ ID NO: 786242 - RNA, 22 nt, Human
aaaauuuucucauauccuaagu

SEQ ID NO: 786243 - RNA, 19 nt, Human
acagcaguugguggcuuga

SEQ ID NO: 786244 - RNA, 19 nt, Human
agcaguugguggcuugaaa

SEQ ID NO: 786245 - RNA, 18 nt, Human
cccugcacgggaugcucc

SEQ ID NO: 786246 - RNA, 19 nt, Human
ggagaggugggggaggauc

SEQ ID NO: 786247 - RNA, 21 nt, Human
gggaacuccugcggagaggug

SEQ ID NO: 786248 - RNA, 18 nt, Human
ugcggagaggugggggag

SEQ ID NO: 786249 - RNA, 20 nt, Human
ugcggagaggugggggagga

SEQ ID NO: 786250 - RNA, 19 nt, Human
uggggacagcaguuggugg

SEQ ID NO: 786251 - RNA, 21 nt, Human
uuccuuggggacagcaguugg

SEQ ID NO: 786252 - RNA, 22 nt, Human
aaaaaacaggaaaccaaaccua

SEQ ID NO: 786253 - RNA, 18 nt, Human
aaaaacaggaaaccaaac

SEQ ID NO: 786254 - RNA, 20 nt, Human
aaaacaagucauuccaagca

SEQ ID NO: 786255 - RNA, 26 nt, Human
aaaauuucucacaagcauaaucacua

SEQ ID NO: 786256 - RNA, 20 nt, Human
aaagggguaagaugagaaaa

SEQ ID NO: 786257 - RNA, 27 nt, Human
aaauaucucuucauagucuacaagucc

SEQ ID NO: 786258 - RNA, 21 nt, Human
aaaugccacagcaacucauga

SEQ ID NO: 786259 - RNA, 19 nt, Human
aagcaugcuuacaguaggc

SEQ ID NO: 786260 - RNA, 25 nt, Human
aagcgucccaucugauaagucucac

SEQ ID NO: 786261 - RNA, 19 nt, Human
aagguuuggauagcuaguu

SEQ ID NO: 786262 - RNA, 20 nt, Human
acaaaaaacaggaaaccaaa

SEQ ID NO: 786263 - RNA, 19 nt, Human
acagugccacaacugcggc

SEQ ID NO: 786264 - RNA, 23 nt, Human
acagugcugggauuacaggcgua

SEQ ID NO: 786265 - RNA, 24 nt, Human
accaaaacaagucauuccaagcau

SEQ ID NO: 786266 - RNA, 24 nt, Human
acucuuguugcccaggcuggagug

SEQ ID NO: 786267 - RNA, 22 nt, Human
agacaaaaaacaggaaaccaaa

SEQ ID NO: 786268 - RNA, 27 nt, Human
agacaaaaaacaggaaaccaaaccuag

SEQ ID NO: 786269 - RNA, 21 nt, Human
agaggcauagauccuaucagc

SEQ ID NO: 786270 - RNA, 20 nt, Human
agcauagcagagguagaagg

SEQ ID NO: 786271 - RNA, 18 nt, Human
aggcauagacuaguuacc

SEQ ID NO: 786272 - RNA, 19 nt, Human
aggcguaaacuacugcacc

SEQ ID NO: 786273 - RNA, 20 nt, Human
agggguucagcauagcagag

SEQ ID NO: 786274 - RNA, 24 nt, Human
aggugauccauccgccucggccuc

SEQ ID NO: 786275 - RNA, 21 nt, Human
aguagcugggauuacaggcau

SEQ ID NO: 786276 - RNA, 24 nt, Human
agugauuuuccugccucagccucc

SEQ ID NO: 786277 - RNA, 23 nt, Human
agugcaauggugcgaucuuggcu

SEQ ID NO: 786278 - RNA, 24 nt, Human
agugcaauggugcgaucuuggcuc

SEQ ID NO: 786279 - RNA, 18 nt, Human
agugcugggauuacaggc

SEQ ID NO: 786280 - RNA, 18 nt, Human
agugcugggauuacaggc

SEQ ID NO: 786281 - RNA, 24 nt, Human
auagacaaaaaacaggaaaccaaa

SEQ ID NO: 786282 - RNA, 23 nt, Human
auaggaagcaggaacaugugaaa

SEQ ID NO: 786283 - RNA, 26 nt, Human
auccuaucagcugaaaaccaaaacaa

SEQ ID NO: 786284 - RNA, 21 nt, Human
augcaggaaaggucaggaguu

SEQ ID NO: 786285 - RNA, 24 nt, Human
auggaguuucuccauguuggucag

SEQ ID NO: 786286 - RNA, 19 nt, Human
auuacacuuuuauuuuugc

SEQ ID NO: 786287 - RNA, 22 nt, Human
auucaucuccaaaauggauccc

SEQ ID NO: 786288 - RNA, 22 nt, Human
caaaauggauccacauaacuga

SEQ ID NO: 786289 - RNA, 21 nt, Human
caaaggcucagcccaggagga

SEQ ID NO: 786290 - RNA, 24 nt, Human
caagcgucccaucugauaagucuc

SEQ ID NO: 786291 - RNA, 22 nt, Human
caagugauuuuccugccucagc

SEQ ID NO: 786292 - RNA, 21 nt, Human
cacaacuaccacaugcaauca

SEQ ID NO: 786293 - RNA, 22 nt, Human
cacagcaacucaugagaugaag

SEQ ID NO: 786294 - RNA, 24 nt, Human
cacagugcugggauuacaggcgua

SEQ ID NO: 786295 - RNA, 24 nt, Human
caccaccaaauuagaaguauccca

SEQ ID NO: 786296 - RNA, 21 nt, Human
caccgcaaccuccgccucccg

SEQ ID NO: 786297 - RNA, 19 nt, Human
cacuccucccuccugccca

SEQ ID NO: 786298 - RNA, 24 nt, Human
cacucuuguugcccaggcuggagu

SEQ ID NO: 786299 - RNA, 18 nt, Human
cacugaaaaauguacaaa

SEQ ID NO: 786300 - RNA, 25 nt, Human
cagaaagcuuaaaugcugugaauca

SEQ ID NO: 786301 - RNA, 20 nt, Human
cagcccacagaaaccauuac

SEQ ID NO: 786302 - RNA, 19 nt, Human
cagccgcccgcuccguccg

SEQ ID NO: 786303 - RNA, 19 nt, Human
caggaaaggucaggaguua

SEQ ID NO: 786304 - RNA, 18 nt, Human
caggugcagggugaauga

SEQ ID NO: 786305 - RNA, 24 nt, Human
cagugcugggauuacaggcguaaa

SEQ ID NO: 786306 - RNA, 23 nt, Human
ccacagcaacucaugagaugaaa

SEQ ID NO: 786307 - RNA, 22 nt, Human
ccacagugcugggauuacaggc

SEQ ID NO: 786308 - RNA, 24 nt, Human
ccacagugcugggauuacaggcgu

SEQ ID NO: 786309 - RNA, 22 nt, Human
ccaccaaauuagaaguauccca

SEQ ID NO: 786310 - RNA, 19 nt, Human
ccauguuggucaggcuggu

SEQ ID NO: 786311 - RNA, 23 nt, Human
ccauguuggucaggcuggucucg

SEQ ID NO: 786312 - RNA, 18 nt, Human
cccacagaaaccauuaca

SEQ ID NO: 786313 - RNA, 18 nt, Human
cccccaaaggcucagccc

SEQ ID NO: 786314 - RNA, 19 nt, Human
cccgaccucaggugaucca

SEQ ID NO: 786315 - RNA, 22 nt, Human
cccgaccucaggugauccaucc

SEQ ID NO: 786316 - RNA, 23 nt, Human
cccgaguagcugggauuacaggc

SEQ ID NO: 786317 - RNA, 24 nt, Human
cccgaguagcugggauuacaggca

SEQ ID NO: 786318 - RNA, 23 nt, Human
cccggguucaagugauuuuccuc

SEQ ID NO: 786319 - RNA, 23 nt, Human
cccggguucaagugauuuuccug

SEQ ID NO: 786320 - RNA, 26 nt, Human
cccuccugcccaccaccucucaggaa

SEQ ID NO: 786321 - RNA, 23 nt, Human
ccgaguagcugggauuacaggca

SEQ ID NO: 786322 - RNA, 24 nt, Human
ccgaguagcugggauuacaggcau

SEQ ID NO: 786323 - RNA, 18 nt, Human
ccgcaaccuccgccuccc

SEQ ID NO: 786324 - RNA, 23 nt, Human
ccgcaaccuccgccucccggguu

SEQ ID NO: 786325 - RNA, 24 nt, Human
ccgcaaccuccgccucccggguuc

SEQ ID NO: 786326 - RNA, 24 nt, Human
ccgccucccggguucaagugauuu

SEQ ID NO: 786327 - RNA, 18 nt, Human
ccuauacuaaauaugguc

SEQ ID NO: 786328 - RNA, 20 nt, Human
ccucccggguucaagugauu

SEQ ID NO: 786329 - RNA, 19 nt, Human
ccucccuccugcccaccac

SEQ ID NO: 786330 - RNA, 22 nt, Human
ccucccuccugcccaccaccuc

SEQ ID NO: 786331 - RNA, 20 nt, Human
ccuccugcccaccaccucuc

SEQ ID NO: 786332 - RNA, 23 nt, Human
ccugccucagccucccgaguagc

SEQ ID NO: 786333 - RNA, 19 nt, Human
cgaccucaggugauccauc

SEQ ID NO: 786334 - RNA, 24 nt, Human
cgaccucaggugauccauccgccu

SEQ ID NO: 786335 - RNA, 24 nt, Human
cgccucggccucccacagugcugg

SEQ ID NO: 786336 - RNA, 21 nt, Human
cgcuaaauuaaccuguccugu

SEQ ID NO: 786337 - RNA, 24 nt, Human
cggguucaagugauuuuccugccu

SEQ ID NO: 786338 - RNA, 25 nt, Human
cgucuaucaccacaacuaccacaug

SEQ ID NO: 786339 - RNA, 19 nt, Human
cuacacaagcccaagccaa

SEQ ID NO: 786340 - RNA, 24 nt, Human
cucaccgcaaccuccgccucccgg

SEQ ID NO: 786341 - RNA, 24 nt, Human
cucagccucccgaguagcugggau

SEQ ID NO: 786342 - RNA, 24 nt, Human
cuccauguuggucaggcuggucuc

SEQ ID NO: 786343 - RNA, 18 nt, Human
cucuuguugcccaggcug

SEQ ID NO: 786344 - RNA, 23 nt, Human
cugccucagccucccgaguagcu

SEQ ID NO: 786345 - RNA, 23 nt, Human
cugggacauagacaaaaaacagg

SEQ ID NO: 786346 - RNA, 24 nt, Human
cuuguugcccaggcuggagugcaa

SEQ ID NO: 786347 - RNA, 26 nt, Human
gaaaaccaaaacaagucauuccaagc

SEQ ID NO: 786348 - RNA, 18 nt, Human
gaccucaggugauccauc

SEQ ID NO: 786349 - RNA, 23 nt, Human
gaccucaggugauccauccgccu

SEQ ID NO: 786350 - RNA, 24 nt, Human
gaccucaggugauccauccgccuc

SEQ ID NO: 786351 - RNA, 22 nt, Human
gagaaaagggaucaacaaaugu

SEQ ID NO: 786352 - RNA, 22 nt, Human
gagacagaguuucacucuuguu

SEQ ID NO: 786353 - RNA, 20 nt, Human
gagauggaguuucuccaugu

SEQ ID NO: 786354 - RNA, 24 nt, Human
gagauggaguuucuccauguuggu

SEQ ID NO: 786355 - RNA, 24 nt, Human
gaguagcugggauuacaggcaugc

SEQ ID NO: 786356 - RNA, 23 nt, Human
gauuacaggcguaaacuacugca

SEQ ID NO: 786357 - RNA, 19 nt, Human
gauugugaauucaggagaa

SEQ ID NO: 786358 - RNA, 20 nt, Human
gcaccaccacaccuggcuaa

SEQ ID NO: 786359 - RNA, 19 nt, Human
gcccaggcuggagugcaau

SEQ ID NO: 786360 - RNA, 18 nt, Human
gccugcgcacagugccac

SEQ ID NO: 786361 - RNA, 21 nt, Human
gccugcgcacagugccacaac

SEQ ID NO: 786362 - RNA, 22 nt, Human
ggaguuucuccauguuggucag

SEQ ID NO: 786363 - RNA, 23 nt, Human
ggaguuucuccauguuggucagg

SEQ ID NO: 786364 - RNA, 24 nt, Human
ggauuauauuuguuuccauuuagg

SEQ ID NO: 786365 - RNA, 20 nt, Human
gggauuauauuuguuuccau

SEQ ID NO: 786366 - RNA, 22 nt, Human
ggguucaagugauuuuccugcc

SEQ ID NO: 786367 - RNA, 23 nt, Human
ggguucaagugauuuuccugccu

SEQ ID NO: 786368 - RNA, 20 nt, Human
guagcugggauuacaggcau

SEQ ID NO: 786369 - RNA, 24 nt, Human
gugauccauccgccucggccuccc

SEQ ID NO: 786370 - RNA, 24 nt, Human
gugauuuuccugccucagccuccc

SEQ ID NO: 786371 - RNA, 21 nt, Human
gugggauuauauuuguuucca

SEQ ID NO: 786372 - RNA, 20 nt, Human
uaaaagacaaacaaauaaaa

SEQ ID NO: 786373 - RNA, 22 nt, Human
uaaauacaaagagucuacagcc

SEQ ID NO: 786374 - RNA, 23 nt, Human
uaaauacaaagagucuacagccc

SEQ ID NO: 786375 - RNA, 22 nt, Human
uacaggcaugcaccaccacacc

SEQ ID NO: 786376 - RNA, 23 nt, Human
uaccuccuagcauggcucaaagu

SEQ ID NO: 786377 - RNA, 23 nt, Human
uagacaaaaaacaggaaaccaaa

SEQ ID NO: 786378 - RNA, 21 nt, Human
uagagggcacaaaaagcugca

SEQ ID NO: 786379 - RNA, 20 nt, Human
uagcauggcucaaaguuucu

SEQ ID NO: 786380 - RNA, 24 nt, Human
uaguagagauggaguuucuccaug

SEQ ID NO: 786381 - RNA, 26 nt, Human
uauaagacuuaaucagaacauacagg

SEQ ID NO: 786382 - RNA, 20 nt, Human
uaucaccacaacuaccacau

SEQ ID NO: 786383 - RNA, 21 nt, Human
uauuacaaaauuucucacaag

SEQ ID NO: 786384 - RNA, 19 nt, Human
ucaagugauuuuccugccu

SEQ ID NO: 786385 - RNA, 24 nt, Human
ucaccgcaaccuccgccucccggg

SEQ ID NO: 786386 - RNA, 25 nt, Human
ucaccgcaaccuccgccucccgggu

SEQ ID NO: 786387 - RNA, 27 nt, Human
ucaccgcaaccuccgccucccggguuc

SEQ ID NO: 786388 - RNA, 22 nt, Human
ucacucuuguugcccaggcugg

SEQ ID NO: 786389 - RNA, 23 nt, Human
ucacucuuguugcccaggcugga

SEQ ID NO: 786390 - RNA, 20 nt, Human
ucagccucccgaguagcugg

SEQ ID NO: 786391 - RNA, 19 nt, Human
ucaucuccaaaauggaucc

SEQ ID NO: 786392 - RNA, 23 nt, Human
uccacaauccgcuaaauuaaccu

SEQ ID NO: 786393 - RNA, 24 nt, Human
ucccacagugcugggauuacaggc

SEQ ID NO: 786394 - RNA, 24 nt, Human
ucccgaguagcugggauuacaggc

SEQ ID NO: 786395 - RNA, 18 nt, Human
ucccggguucaagugauu

SEQ ID NO: 786396 - RNA, 24 nt, Human
ucccggguucaagugauuuuccug

SEQ ID NO: 786397 - RNA, 22 nt, Human
uccucaccucacccaggcgguc

SEQ ID NO: 786398 - RNA, 18 nt, Human
uccugcccaccaccucuc

SEQ ID NO: 786399 - RNA, 23 nt, Human
ucucacuccucccuccugcccac

SEQ ID NO: 786400 - RNA, 21 nt, Human
ucugaaacuauaccagcaaau

SEQ ID NO: 786401 - RNA, 22 nt, Human
ucuuguugcccaggcuggagug

SEQ ID NO: 786402 - RNA, 19 nt, Human
ugaaaaauguacaaagaaa

SEQ ID NO: 786403 - RNA, 23 nt, Human
ugaaaucacugcuauuucacugu

SEQ ID NO: 786404 - RNA, 22 nt, Human
ugaaggcucaggcugacacagu

SEQ ID NO: 786405 - RNA, 23 nt, Human
ugacacaguuuaacaacaucuuu

SEQ ID NO: 786406 - RNA, 22 nt, Human
ugacuggggcuacacaagccca

SEQ ID NO: 786407 - RNA, 24 nt, Human
ugagaaaagggaucaacaaaugua

SEQ ID NO: 786408 - RNA, 23 nt, Human
ugcaauggugcgaucuuggcucc

SEQ ID NO: 786409 - RNA, 19 nt, Human
ugcaggaaaggucaggagu

SEQ ID NO: 786410 - RNA, 18 nt, Human
ugcaguuggcaggugcag

SEQ ID NO: 786411 - RNA, 18 nt, Human
ugcccaggcuggagugca

SEQ ID NO: 786412 - RNA, 21 nt, Human
ugcccaggcuggagugcaaug

SEQ ID NO: 786413 - RNA, 24 nt, Human
ugcccaggcuggagugcaauggug

SEQ ID NO: 786414 - RNA, 19 nt, Human
ugccccaacuccuauacua

SEQ ID NO: 786415 - RNA, 24 nt, Human
ugccucagccucccgaguagcugg

SEQ ID NO: 786416 - RNA, 27 nt, Human
ugcugggauuacaggcguaaacuacug

SEQ ID NO: 786417 - RNA, 18 nt, Human
ugcuuuguaaaccuagac

SEQ ID NO: 786418 - RNA, 23 nt, Human
uggagugcaauggugcgaucuug

SEQ ID NO: 786419 - RNA, 24 nt, Human
uggagugcaauggugcgaucuugg

SEQ ID NO: 786420 - RNA, 24 nt, Human
uggaguuucuccauguuggucagg

SEQ ID NO: 786421 - RNA, 24 nt, Human
uggcaggugcagggugaaugaggg

SEQ ID NO: 786422 - RNA, 29 nt, Human
uggcuaauuuuguauuuuuaguagagaug

SEQ ID NO: 786423 - RNA, 21 nt, Human
ugggauuacaggcaugcacca

SEQ ID NO: 786424 - RNA, 24 nt, Human
ugggauuacaggcaugcaccacca

SEQ ID NO: 786425 - RNA, 19 nt, Human
ugggauuacaggcguaaac

SEQ ID NO: 786426 - RNA, 19 nt, Human
ugggauuacaggcguaaac

SEQ ID NO: 786427 - RNA, 24 nt, Human
ugggauuacaggcguaaacuacug

SEQ ID NO: 786428 - RNA, 24 nt, Human
ugggauuacaggcguaaacuacug

SEQ ID NO: 786429 - RNA, 25 nt, Human
ugggauuacaggcguaaacuacugc

SEQ ID NO: 786430 - RNA, 23 nt, Human
uggucaggcuggucucgaauucc

SEQ ID NO: 786431 - RNA, 19 nt, Human
uggucucgaauucccgacc

SEQ ID NO: 786432 - RNA, 23 nt, Human
ugguuagaaacuguuguccuuaa

SEQ ID NO: 786433 - RNA, 19 nt, Human
uguacaaagaaacaccacc

SEQ ID NO: 786434 - RNA, 20 nt, Human
uguccuuaagccuuuguguu

SEQ ID NO: 786435 - RNA, 19 nt, Human
uguggcaagaccuaagaag

SEQ ID NO: 786436 - RNA, 20 nt, Human
uguugcccaggcuggagugc

SEQ ID NO: 786437 - RNA, 18 nt, Human
uuaguagagauggaguuu

SEQ ID NO: 786438 - RNA, 24 nt, Human
uuaguagagauggaguuucuccau

SEQ ID NO: 786439 - RNA, 21 nt, Human
uucaagugauuuuccugccuc

SEQ ID NO: 786440 - RNA, 23 nt, Human
uucaagugauuuuccugccucag

SEQ ID NO: 786441 - RNA, 24 nt, Human
uucaagugauuuuccugccucagc

SEQ ID NO: 786442 - RNA, 24 nt, Human
uucacucuuguugcccaggcugga

SEQ ID NO: 786443 - RNA, 20 nt, Human
uugcauagaaaaggguccug

SEQ ID NO: 786444 - RNA, 18 nt, Human
uugcccaggcuggagugc

SEQ ID NO: 786445 - RNA, 23 nt, Human
uuguauuuuuaguagagauggag

SEQ ID NO: 786446 - RNA, 24 nt, Human
uuucacucuuguugcccaggcugg

SEQ ID NO: 786447 - RNA, 22 nt, Human
uuucagaauaaaaggaucaagg

SEQ ID NO: 786448 - RNA, 23 nt, Human
uuucaguagguggcauaaagggg

SEQ ID NO: 786449 - RNA, 21 nt, Human
uuucuccauguuggucaggcu

SEQ ID NO: 786450 - RNA, 20 nt, Human
uuuucuccuuuccugcagcc

SEQ ID NO: 786451 - RNA, 19 nt, Human
uuuuguauuuuuaguagag

SEQ ID NO: 786452 - RNA, 20 nt, Human
uuuuguauuuuuaguagaga

SEQ ID NO: 786453 - RNA, 19 nt, Human
uuuuuaguagagauggagu

SEQ ID NO: 786454 - RNA, 22 nt, Human
aaaaacacagaaaagaaaguag

SEQ ID NO: 786455 - RNA, 21 nt, Human
aaaacaaaaaauugaugaacc

SEQ ID NO: 786456 - RNA, 18 nt, Human
aaaagcaauaaauacaug

SEQ ID NO: 786457 - RNA, 23 nt, Human
aaacacagaaaagaaaguaaaaa

SEQ ID NO: 786458 - RNA, 23 nt, Human
aaacagaaauaaccaucauuaau

SEQ ID NO: 786459 - RNA, 19 nt, Human
aaccacacacacacacaua

SEQ ID NO: 786460 - RNA, 20 nt, Human
aagaaaagacagauaaauga

SEQ ID NO: 786461 - RNA, 20 nt, Human
acaggauaaugaucaccuac

SEQ ID NO: 786462 - RNA, 20 nt, Human
acauggauaaugaauauaug

SEQ ID NO: 786463 - RNA, 18 nt, Human
accacacacacacacaua

SEQ ID NO: 786464 - RNA, 18 nt, Human
acuaaaacagaaauaacc

SEQ ID NO: 786465 - RNA, 27 nt, Human
agacagauaaaugaauagaagggaccc

SEQ ID NO: 786466 - RNA, 21 nt, Human
agcugggcacaguggcucaug

SEQ ID NO: 786467 - RNA, 24 nt, Human
aggaaaaaauuaacuuaaaaacac

SEQ ID NO: 786468 - RNA, 22 nt, Human
agggauuaaagacuuaagugua

SEQ ID NO: 786469 - RNA, 24 nt, Human
aguaaaaaacaaaaaauugaugaa

SEQ ID NO: 786470 - RNA, 24 nt, Human
aguggcucaugccuauaaucucag

SEQ ID NO: 786471 - RNA, 23 nt, Human
auaucaaaaauauauaaaaagca

SEQ ID NO: 786472 - RNA, 23 nt, Human
auccuuucaucucucucaaaagu

SEQ ID NO: 786473 - RNA, 22 nt, Human
aucucucucaaaaguucacaua

SEQ ID NO: 786474 - RNA, 19 nt, Human
augaaccacuaaaacagaa

SEQ ID NO: 786475 - RNA, 19 nt, Human
augccuauaaucucagcac

SEQ ID NO: 786476 - RNA, 23 nt, Human
augucacaauuuaucuaaccagu

SEQ ID NO: 786477 - RNA, 21 nt, Human
auucacuuuguuugcaguugg

SEQ ID NO: 786478 - RNA, 20 nt, Human
auuuguucauuauuuuccuc

SEQ ID NO: 786479 - RNA, 21 nt, Human
caaaaaagagaaaaaucaagu

SEQ ID NO: 786480 - RNA, 22 nt, Human
caaaaaauugaugaaccacuaa

SEQ ID NO: 786481 - RNA, 27 nt, Human
caaaaacuaaaguagcaaauucaauga

SEQ ID NO: 786482 - RNA, 23 nt, Human
caaaccccaauagcuagcaaaag

SEQ ID NO: 786483 - RNA, 23 nt, Human
caaggaaaaaauuaacuuaaaaa

SEQ ID NO: 786484 - RNA, 18 nt, Human
cacuaaaacagaaauaac

SEQ ID NO: 786485 - RNA, 21 nt, Human
cagcauuuacauuuuucuguu

SEQ ID NO: 786486 - RNA, 20 nt, Human
caugccuauaaucucagcac

SEQ ID NO: 786487 - RNA, 24 nt, Human
caugccuauaaucucagcacuuug

SEQ ID NO: 786488 - RNA, 22 nt, Human
ccacacacacacacauaaacac

SEQ ID NO: 786489 - RNA, 33 nt, Human
ccaugugcaucuaaccacacacacacacauagu

SEQ ID NO: 786490 - RNA, 22 nt, Human
cccucuacaaacaguacuucaa

SEQ ID NO: 786491 - RNA, 22 nt, Human
ccuauaaucucagcacuuuggg

SEQ ID NO: 786492 - RNA, 18 nt, Human
ccucuacaaacaguacuu

SEQ ID NO: 786493 - RNA, 24 nt, Human
cucaugccuauaaucucagcacuu

SEQ ID NO: 786494 - RNA, 19 nt, Human
cuccagguuuauaagaaaa

SEQ ID NO: 786495 - RNA, 19 nt, Human
cuuauaacuucuaagauuu

SEQ ID NO: 786496 - RNA, 18 nt, Human
cuuccauaccugucucca

SEQ ID NO: 786497 - RNA, 23 nt, Human
gaaguauguuacacaaccuuuaa

SEQ ID NO: 786498 - RNA, 19 nt, Human
gauauauuguauauauaca

SEQ ID NO: 786499 - RNA, 21 nt, Human
gcauucacuuuguuugcaguu

SEQ ID NO: 786500 - RNA, 21 nt, Human
ggacugcugguggaaguaugu

SEQ ID NO: 786501 - RNA, 19 nt, Human
gggaaguuucaucucacug

SEQ ID NO: 786502 - RNA, 18 nt, Human
gggcacaguggcucaugc

SEQ ID NO: 786503 - RNA, 24 nt, Human
gggcacaguggcucaugccuauaa

SEQ ID NO: 786504 - RNA, 23 nt, Human
gggcauucacuuuguuugcaguu

SEQ ID NO: 786505 - RNA, 23 nt, Human
guacaugguuucccaaaccccaa

SEQ ID NO: 786506 - RNA, 19 nt, Human
gucuggggcaaaaaagaga

SEQ ID NO: 786507 - RNA, 25 nt, Human
uaaaaacacagaaaagaaaguaaaa

SEQ ID NO: 786508 - RNA, 27 nt, Human
uaaaaagcaccuccagguuuauaagaa

SEQ ID NO: 786509 - RNA, 22 nt, Human
uaaaugaauagaaaaauaggca

SEQ ID NO: 786510 - RNA, 18 nt, Human
uaacaaaaaugauauauu

SEQ ID NO: 786511 - RNA, 21 nt, Human
uaagaaaaacaucugcuacau

SEQ ID NO: 786512 - RNA, 20 nt, Human
uaagggaggcugguuuagca

SEQ ID NO: 786513 - RNA, 24 nt, Human
uaauaguacaugguuucccaaacc

SEQ ID NO: 786514 - RNA, 19 nt, Human
uacaaacaguacuucaaca

SEQ ID NO: 786515 - RNA, 23 nt, Human
uacaaacaguacuucaacaaaca

SEQ ID NO: 786516 - RNA, 24 nt, Human
uacaaacaguacuucaacaaacau

SEQ ID NO: 786517 - RNA, 18 nt, Human
uagaaaaauaggcaaaua

SEQ ID NO: 786518 - RNA, 27 nt, Human
uagauuaagaaaaacaucugcuacaua

SEQ ID NO: 786519 - RNA, 20 nt, Human
uagcaaaaacuaaaguagca

SEQ ID NO: 786520 - RNA, 21 nt, Human
uagcaaaaacuaaaguagcaa

SEQ ID NO: 786521 - RNA, 24 nt, Human
uagcaaaaacuaaaguagcaaauu

SEQ ID NO: 786522 - RNA, 19 nt, Human
uaggauacuacguauaacc

SEQ ID NO: 786523 - RNA, 20 nt, Human
uagugagaagaagguagggu

SEQ ID NO: 786524 - RNA, 22 nt, Human
uauaagaaaagacagauaaaug

SEQ ID NO: 786525 - RNA, 21 nt, Human
uauaagauucaucuuguggag

SEQ ID NO: 786526 - RNA, 21 nt, Human
uaugaaaucuggaugaacacu

SEQ ID NO: 786527 - RNA, 18 nt, Human
ucacaggauaaugaucac

SEQ ID NO: 786528 - RNA, 22 nt, Human
ucacuuuguuugcaguuggggc

SEQ ID NO: 786529 - RNA, 23 nt, Human
ucagcugggcacaguggcucaug

SEQ ID NO: 786530 - RNA, 21 nt, Human
ucccugagugcuuuuuagguu

SEQ ID NO: 786531 - RNA, 23 nt, Human
ucuacaaacaguacuucaacaaa

SEQ ID NO: 786532 - RNA, 19 nt, Human
ucuuaugcauugaugcugc

SEQ ID NO: 786533 - RNA, 20 nt, Human
ugaagaaccauccaguccag

SEQ ID NO: 786534 - RNA, 21 nt, Human
ugaagaaccauccaguccaga

SEQ ID NO: 786535 - RNA, 21 nt, Human
ugagaguuuccuuauaacuuc

SEQ ID NO: 786536 - RNA, 26 nt, Human
ugcaaggaaaaaauuaacuuaaaaac

SEQ ID NO: 786537 - RNA, 23 nt, Human
ugccuauaaucucagcacuuugg

SEQ ID NO: 786538 - RNA, 21 nt, Human
uggcucaugccuauaaucuca

SEQ ID NO: 786539 - RNA, 24 nt, Human
uggcucaugccuauaaucucagca

SEQ ID NO: 786540 - RNA, 22 nt, Human
uguauauucuuccauaccuguc

SEQ ID NO: 786541 - RNA, 18 nt, Human
uuggagaccauccuuuca

SEQ ID NO: 786542 - RNA, 23 nt, Human
uuuaacaaaaaugauauauugua

SEQ ID NO: 786543 - RNA, 24 nt, Human
uuuagcaaaaacuaaaguagcaaa

SEQ ID NO: 786544 - RNA, 23 nt, Human
uuuuuccuuuuaauguaaauauu

SEQ ID NO: 786545 - RNA, 19 nt, Human
aaaacaaaugggugaagcc

SEQ ID NO: 786546 - RNA, 24 nt, Human
aaauggccucugagaaguaaaagu

SEQ ID NO: 786547 - RNA, 20 nt, Human
aagacaaaaauucuaggagc

SEQ ID NO: 786548 - RNA, 25 nt, Human
aauaaaaauuccuuuaauuuucaaa

SEQ ID NO: 786549 - RNA, 18 nt, Human
acacauacauauguauag

SEQ ID NO: 786550 - RNA, 20 nt, Human
acacauauacacauacauau

SEQ ID NO: 786551 - RNA, 24 nt, Human
acgagauaaauaaauacacuaaag

SEQ ID NO: 786552 - RNA, 25 nt, Human
agaaaaaaaguaacgagauaaauaa

SEQ ID NO: 786553 - RNA, 20 nt, Human
agacaaaaauucuaggagcu

SEQ ID NO: 786554 - RNA, 20 nt, Human
agauuuucaaauucagauaa

SEQ ID NO: 786555 - RNA, 18 nt, Human
agcaaaauuaaauuccau

SEQ ID NO: 786556 - RNA, 22 nt, Human
agcagcccaaaguaaaccaaac

SEQ ID NO: 786557 - RNA, 21 nt, Human
agcccaaaguaaaccaaacca

SEQ ID NO: 786558 - RNA, 23 nt, Human
agguaauauuacagcaaagaaaa

SEQ ID NO: 786559 - RNA, 23 nt, Human
agugaacauaaaacuauucuaaa

SEQ ID NO: 786560 - RNA, 22 nt, Human
caauucuuugacaaaaaaguac

SEQ ID NO: 786561 - RNA, 19 nt, Human
cagaagggcagcuugaacc

SEQ ID NO: 786562 - RNA, 25 nt, Human
cagcccaaaguaaaccaaaccaaaa

SEQ ID NO: 786563 - RNA, 19 nt, Human
ccacagcuacgacacacac

SEQ ID NO: 786564 - RNA, 18 nt, Human
cccaaaguaaaccaaacc

SEQ ID NO: 786565 - RNA, 21 nt, Human
cccaaaguaaaccaaaccaaa

SEQ ID NO: 786566 - RNA, 24 nt, Human
ccccaaaugcuaucaaauucauaa

SEQ ID NO: 786567 - RNA, 21 nt, Human
cuaggagcaaaauuaaauucc

SEQ ID NO: 786568 - RNA, 25 nt, Human
cuugaaccaagauuauuauguaaca

SEQ ID NO: 786569 - RNA, 18 nt, Human
gaagggcagcuugaacca

SEQ ID NO: 786570 - RNA, 20 nt, Human
gagauaaauaaauacacuaa

SEQ ID NO: 786571 - RNA, 18 nt, Human
gcagcccaaaguaaacca

SEQ ID NO: 786572 - RNA, 21 nt, Human
gcagcccaaaguaaaccaaac

SEQ ID NO: 786573 - RNA, 21 nt, Human
gcccaaaguaaaccaaaccaa

SEQ ID NO: 786574 - RNA, 24 nt, Human
gggaauuucuaaaauaucuaagau

SEQ ID NO: 786575 - RNA, 22 nt, Human
gguaauauuacagcaaagaaaa

SEQ ID NO: 786576 - RNA, 33 nt, Human
guguauacacauauacacauacauauguauagu

SEQ ID NO: 786577 - RNA, 24 nt, Human
uaaaauaucuaagauauugaucau

SEQ ID NO: 786578 - RNA, 19 nt, Human
uaacacaggucuaguccuu

SEQ ID NO: 786579 - RNA, 23 nt, Human
uaacaguauucacauuaaauuag

SEQ ID NO: 786580 - RNA, 21 nt, Human
uacacauauacacauacauau

SEQ ID NO: 786581 - RNA, 21 nt, Human
uaccauaauaauaaaaauucc

SEQ ID NO: 786582 - RNA, 28 nt, Human
uacugguuaguuuaauacuucccagucu

SEQ ID NO: 786583 - RNA, 19 nt, Human
uagaauaaaagggaaggau

SEQ ID NO: 786584 - RNA, 23 nt, Human
uagcagcccaaaguaaaccaaac

SEQ ID NO: 786585 - RNA, 19 nt, Human
uagcauuuaugaauaccua

SEQ ID NO: 786586 - RNA, 23 nt, Human
uauacacauacauauguauagug

SEQ ID NO: 786587 - RNA, 18 nt, Human
uauauauguguauacaca

SEQ ID NO: 786588 - RNA, 22 nt, Human
uauauguguauacacauauaca

SEQ ID NO: 786589 - RNA, 21 nt, Human
uaugagguuuauccauuuagc

SEQ ID NO: 786590 - RNA, 26 nt, Human
ucauauaaaauuagaaaaaaaguaac

SEQ ID NO: 786591 - RNA, 23 nt, Human
uccccaaaugcuaucaaauucau

SEQ ID NO: 786592 - RNA, 26 nt, Human
ucuaaaccacaauuaguuuaccagca

SEQ ID NO: 786593 - RNA, 22 nt, Human
ucucuauaugaaagguagaaau

SEQ ID NO: 786594 - RNA, 22 nt, Human
ugaaccaagauuauuauguaac

SEQ ID NO: 786595 - RNA, 24 nt, Human
ugaagacaaaaauucuaggagcaa

SEQ ID NO: 786596 - RNA, 24 nt, Human
ugacaaccuauaagcagguaauau

SEQ ID NO: 786597 - RNA, 20 nt, Human
ugcuccacagcuacgacaca

SEQ ID NO: 786598 - RNA, 19 nt, Human
uggcuacauuuacuaguuu

SEQ ID NO: 786599 - RNA, 23 nt, Human
uggguugacaaccuauaagcagg

SEQ ID NO: 786600 - RNA, 19 nt, Human
uguaacacaggucuagucc

SEQ ID NO: 786601 - RNA, 24 nt, Human
uguauacacauauacacauacaua

SEQ ID NO: 786602 - RNA, 22 nt, Human
uguguauacacauauacacaua

SEQ ID NO: 786603 - RNA, 23 nt, Human
uguuuuaacacgauuuacgcaau

SEQ ID NO: 786604 - RNA, 19 nt, Human
uuauaagcaauuauuuucu

SEQ ID NO: 786605 - RNA, 19 nt, Human
uucccaauaagagggugcc

SEQ ID NO: 786606 - RNA, 22 nt, Human
uucccagucuacuggccacaaa

SEQ ID NO: 786607 - RNA, 21 nt, Human
uuuauguaucacuagguuugg

SEQ ID NO: 786608 - RNA, 24 nt, Human
uuucucaguuaucaggagugaaca

SEQ ID NO: 786609 - RNA, 23 nt, Human
uuuguucaaaguagaauaaaagg

SEQ ID NO: 786610 - RNA, 20 nt, Human
aaaaggacaggaacaucuga

SEQ ID NO: 786611 - RNA, 23 nt, Human
aaacacagcuaccgauagcacac

SEQ ID NO: 786612 - RNA, 25 nt, Human
aaagaaacacagcuaccgauagcac

SEQ ID NO: 786613 - RNA, 23 nt, Human
aaagcaguucucugaaaccugaa

SEQ ID NO: 786614 - RNA, 20 nt, Human
aaaucacccuguagcaggac

SEQ ID NO: 786615 - RNA, 21 nt, Human
aacaaagcaacuccaacagau

SEQ ID NO: 786616 - RNA, 21 nt, Human
aagaaacuucaaauauucuga

SEQ ID NO: 786617 - RNA, 20 nt, Human
aaggagaaaguuguuccuga

SEQ ID NO: 786618 - RNA, 23 nt, Human
aauacacaagcagaaaacaguaa

SEQ ID NO: 786619 - RNA, 19 nt, Human
acaaagggcuguggaccuc

SEQ ID NO: 786620 - RNA, 20 nt, Human
acagacaugacaaaaacuac

SEQ ID NO: 786621 - RNA, 27 nt, Human
acaugacaaaaacuacgaaaagaggga

SEQ ID NO: 786622 - RNA, 22 nt, Human
acaugcugacaaucuuccaggg

SEQ ID NO: 786623 - RNA, 18 nt, Human
accccaaaucacaaaaua

SEQ ID NO: 786624 - RNA, 21 nt, Human
acccuguagcaggaccacaaa

SEQ ID NO: 786625 - RNA, 19 nt, Human
acuaaguugggaggcugaa

SEQ ID NO: 786626 - RNA, 21 nt, Human
acuguaagaagauacaacuga

SEQ ID NO: 786627 - RNA, 20 nt, Human
agagauaccaaauacuggcu

SEQ ID NO: 786628 - RNA, 21 nt, Human
agauaacagaagggcaaaagg

SEQ ID NO: 786629 - RNA, 19 nt, Human
agcaacuccaacagauaac

SEQ ID NO: 786630 - RNA, 18 nt, Human
agcacauuuuuccucacu

SEQ ID NO: 786631 - RNA, 19 nt, Human
agcaccagggcaagcaccc

SEQ ID NO: 786632 - RNA, 21 nt, Human
aggcagaucacacagcucagg

SEQ ID NO: 786633 - RNA, 24 nt, Human
aggcagucacugcggcaccccucg

SEQ ID NO: 786634 - RNA, 24 nt, Human
agggccgggaacacaggccugggc

SEQ ID NO: 786635 - RNA, 19 nt, Human
aucaguuaccuuuauaucu

SEQ ID NO: 786636 - RNA, 19 nt, Human
aucauaaacagcauuaaaa

SEQ ID NO: 786637 - RNA, 20 nt, Human
augugugcaugcauguaugg

SEQ ID NO: 786638 - RNA, 21 nt, Human
auugucaauaaggagaaaguu

SEQ ID NO: 786639 - RNA, 23 nt, Human
caaaagcaguucucugaaaccug

SEQ ID NO: 786640 - RNA, 25 nt, Human
caaagcaacuccaacagauaacaga

SEQ ID NO: 786641 - RNA, 21 nt, Human
cacacacacacaauguauaua

SEQ ID NO: 786642 - RNA, 24 nt, Human
caccccaaaucacaaaauaaucau

SEQ ID NO: 786643 - RNA, 19 nt, Human
cagaaaucauaaacagcau

SEQ ID NO: 786644 - RNA, 19 nt, Human
cagacaugacaaaaacuac

SEQ ID NO: 786645 - RNA, 22 nt, Human
cagcauuaaaaugaaucaacac

SEQ ID NO: 786646 - RNA, 23 nt, Human
caucacaaaaagacaucuaaacu

SEQ ID NO: 786647 - RNA, 18 nt, Human
cauccacugaaaaucacc

SEQ ID NO: 786648 - RNA, 20 nt, Human
caugacaaaaacuacgaaaa

SEQ ID NO: 786649 - RNA, 23 nt, Human
ccaaaaagguggaaaaaagaacc

SEQ ID NO: 786650 - RNA, 23 nt, Human
ccaacagauaacagaagggcaaa

SEQ ID NO: 786651 - RNA, 18 nt, Human
ccagggcaagcaccccaa

SEQ ID NO: 786652 - RNA, 18 nt, Human
ccauaguguuccagaggc

SEQ ID NO: 786653 - RNA, 19 nt, Human
cccaugacguacugcaaag

SEQ ID NO: 786654 - RNA, 20 nt, Human
ccuagccccaacaccgagcc

SEQ ID NO: 786655 - RNA, 18 nt, Human
ccuccucucucccucucu

SEQ ID NO: 786656 - RNA, 19 nt, Human
ccuccucucucccucucuu

SEQ ID NO: 786657 - RNA, 20 nt, Human
ccuguaacuccauuugcuga

SEQ ID NO: 786658 - RNA, 23 nt, Human
ccuguagcaggaccacaaagggc

SEQ ID NO: 786659 - RNA, 20 nt, Human
cgaacggcccgcugcgcccu

SEQ ID NO: 786660 - RNA, 19 nt, Human
cgcagcggccaccggccug

SEQ ID NO: 786661 - RNA, 24 nt, Human
cgcugccgcuccuucagcaguucc

SEQ ID NO: 786662 - RNA, 27 nt, Human
cugaccaaaaagguggaaaaaagaacc

SEQ ID NO: 786663 - RNA, 22 nt, Human
cugggccugggcuugggccuag

SEQ ID NO: 786664 - RNA, 20 nt, Human
cugucuuugagacauggcca

SEQ ID NO: 786665 - RNA, 26 nt, Human
cuuaaaacccuauagcuuuguucaga

SEQ ID NO: 786666 - RNA, 22 nt, Human
gaccaaaaagguggaaaaaaga

SEQ ID NO: 786667 - RNA, 18 nt, Human
gagacauggccaaaagca

SEQ ID NO: 786668 - RNA, 22 nt, Human
gagagauaccaaauacuggcuu

SEQ ID NO: 786669 - RNA, 21 nt, Human
gauaacagaagggcaaaagga

SEQ ID NO: 786670 - RNA, 18 nt, Human
gaugacuaaguugggagg

SEQ ID NO: 786671 - RNA, 19 nt, Human
gcacauggacuggaacagc

SEQ ID NO: 786672 - RNA, 18 nt, Human
gcauugaagaggcugagg

SEQ ID NO: 786673 - RNA, 19 nt, Human
gcugccgcuccuucagcag

SEQ ID NO: 786674 - RNA, 24 nt, Human
ggagguaacuaguauuaauacuug

SEQ ID NO: 786675 - RNA, 19 nt, Human
ggauaaagaaguuauaacc

SEQ ID NO: 786676 - RNA, 23 nt, Human
gguaacgagguguccagaaagaa

SEQ ID NO: 786677 - RNA, 24 nt, Human
uaaaaaacugaguaauuaaaaaaa

SEQ ID NO: 786678 - RNA, 21 nt, Human
uaaaacagcuauguuaaauac

SEQ ID NO: 786679 - RNA, 21 nt, Human
uaaaaugaaucaacacuugua

SEQ ID NO: 786680 - RNA, 27 nt, Human
uaaaaugaaucaacacuuguaugggca

SEQ ID NO: 786681 - RNA, 19 nt, Human
uaaacauacuaaaagccag

SEQ ID NO: 786682 - RNA, 18 nt, Human
uaacagaagggcaaaagg

SEQ ID NO: 786683 - RNA, 24 nt, Human
uacacaagcagaaaacaguaaugu

SEQ ID NO: 786684 - RNA, 22 nt, Human
uaccuuuggcauugaagaggcu

SEQ ID NO: 786685 - RNA, 20 nt, Human
uagaagccaauucauuuugc

SEQ ID NO: 786686 - RNA, 18 nt, Human
uaggaugcacuucuugcu

SEQ ID NO: 786687 - RNA, 23 nt, Human
uauaacuugauacgaaaaacaaa

SEQ ID NO: 786688 - RNA, 22 nt, Human
uaucaagggaaggcagucacug

SEQ ID NO: 786689 - RNA, 19 nt, Human
uauguauguaugugugcau

SEQ ID NO: 786690 - RNA, 19 nt, Human
uauguaugugugcaugcau

SEQ ID NO: 786691 - RNA, 18 nt, Human
uauguguguguauacaua

SEQ ID NO: 786692 - RNA, 19 nt, Human
uauguguguguauacauau

SEQ ID NO: 786693 - RNA, 22 nt, Human
uauuaugggauugucaauaagg

SEQ ID NO: 786694 - RNA, 28 nt, Human
ucaaauauucugaaugcaaccacacaau

SEQ ID NO: 786695 - RNA, 18 nt, Human
ucaagggaaggcagucac

SEQ ID NO: 786696 - RNA, 21 nt, Human
ucaccucguccggccugcgcu

SEQ ID NO: 786697 - RNA, 25 nt, Human
ucaucugaaguaacgguuuagucac

SEQ ID NO: 786698 - RNA, 19 nt, Human
uccaacagauaacagaagg

SEQ ID NO: 786699 - RNA, 21 nt, Human
uccagaaagaacagaaagcuc

SEQ ID NO: 786700 - RNA, 18 nt, Human
ucccauuaaaaauuacca

SEQ ID NO: 786701 - RNA, 18 nt, Human
uccgcuguaccuagagug

SEQ ID NO: 786702 - RNA, 19 nt, Human
uccuccucucucccucucu

SEQ ID NO: 786703 - RNA, 20 nt, Human
uccuccucucucccucucuu

SEQ ID NO: 786704 - RNA, 19 nt, Human
uccucucucccucucuugc

SEQ ID NO: 786705 - RNA, 20 nt, Human
uccuguaacuccauuugcug

SEQ ID NO: 786706 - RNA, 20 nt, Human
ucucugguacugaauuucca

SEQ ID NO: 786707 - RNA, 21 nt, Human
ucugaaguugguccugucuuu

SEQ ID NO: 786708 - RNA, 24 nt, Human
ucugaucaaagaaacacagcuacc

SEQ ID NO: 786709 - RNA, 19 nt, Human
ucuuugggaaucugaaguu

SEQ ID NO: 786710 - RNA, 26 nt, Human
ugacaaaaacuacgaaaagagggagg

SEQ ID NO: 786711 - RNA, 19 nt, Human
ugauaaaagucccauuaaa

SEQ ID NO: 786712 - RNA, 24 nt, Human
ugauucaucaccugaaggcgguua

SEQ ID NO: 786713 - RNA, 21 nt, Human
ugccuugguuccugaguuuua

SEQ ID NO: 786714 - RNA, 22 nt, Human
uggaacagcaccagggcaagca

SEQ ID NO: 786715 - RNA, 26 nt, Human
uggacauaauuacacauuuaccacag

SEQ ID NO: 786716 - RNA, 20 nt, Human
uggcauugaagaggcugagg

SEQ ID NO: 786717 - RNA, 19 nt, Human
ugggaggcugaacuuaaaa

SEQ ID NO: 786718 - RNA, 22 nt, Human
uguaugugugcaugcauguagu

SEQ ID NO: 786719 - RNA, 28 nt, Human
uguauuacacacacacacaauguauaua

SEQ ID NO: 786720 - RNA, 24 nt, Human
ugucaauaaggagaaaguuguucc

SEQ ID NO: 786721 - RNA, 20 nt, Human
uguguauacauauguaugua

SEQ ID NO: 786722 - RNA, 23 nt, Human
uguguauacauauguauguaugu

SEQ ID NO: 786723 - RNA, 23 nt, Human
uguguauacauauguauguaugu

SEQ ID NO: 786724 - RNA, 18 nt, Human
ugugugcaugcauguaug

SEQ ID NO: 786725 - RNA, 26 nt, Human
ugugugcaugcauguauguuuguauu

SEQ ID NO: 786726 - RNA, 19 nt, Human
uguguguauacauauguau

SEQ ID NO: 786727 - RNA, 21 nt, Human
uguguguauacauauguaugu

SEQ ID NO: 786728 - RNA, 21 nt, Human
uguguguauacauauguaugu

SEQ ID NO: 786729 - RNA, 24 nt, Human
uguguguauacauauguauguaug

SEQ ID NO: 786730 - RNA, 20 nt, Human
uguguguguauacauaugua

SEQ ID NO: 786731 - RNA, 22 nt, Human
uguguguguauacauauguaug

SEQ ID NO: 786732 - RNA, 19 nt, Human
uguguguguauuacacaca

SEQ ID NO: 786733 - RNA, 22 nt, Human
uguuccagaggcucuguagcug

SEQ ID NO: 786734 - RNA, 24 nt, Human
uuaggaugacuaaguugggaggcu

SEQ ID NO: 786735 - RNA, 24 nt, Human
uuccagaggcucuguagcuggcuu

SEQ ID NO: 786736 - RNA, 22 nt, Human
uuccaggaaaguaccucuucag

SEQ ID NO: 786737 - RNA, 19 nt, Human
uucucugaaaccugaacuu

SEQ ID NO: 786738 - RNA, 24 nt, Human
uucugucuacguaagaaacuucaa

SEQ ID NO: 786739 - RNA, 19 nt, Human
uugcucagaucauagccuc

SEQ ID NO: 786740 - RNA, 20 nt, Human
uugcugauaaaagucccauu

SEQ ID NO: 786741 - RNA, 26 nt, Human
uuucauuaaguuuuacugaccaaaaa

SEQ ID NO: 786742 - RNA, 25 nt, Human
aaaaaaaaaaaacuguuguaaaagg

SEQ ID NO: 786743 - RNA, 22 nt, Human
aaaaaaaaaaucuuccccggga

SEQ ID NO: 786744 - RNA, 19 nt, Human
aaaaggaaaagcuccaccc

SEQ ID NO: 786745 - RNA, 20 nt, Human
aaaaucugauuggagaagau

SEQ ID NO: 786746 - RNA, 21 nt, Human
aaagaagcaaagucuaccucc

SEQ ID NO: 786747 - RNA, 20 nt, Human
aaccaauuagucacuuagcc

SEQ ID NO: 786748 - RNA, 19 nt, Human
acacugcagggcuggcaac

SEQ ID NO: 786749 - RNA, 22 nt, Human
acagcacagaagcagagugggc

SEQ ID NO: 786750 - RNA, 19 nt, Human
accccggggcccacagcac

SEQ ID NO: 786751 - RNA, 22 nt, Human
acuccuuuccaacccuuccccu

SEQ ID NO: 786752 - RNA, 19 nt, Human
agcaaagucuaccuccccc

SEQ ID NO: 786753 - RNA, 22 nt, Human
agcauuuagcaaaaaaaaaaaa

SEQ ID NO: 786754 - RNA, 20 nt, Human
agucuaccucccccagaaaa

SEQ ID NO: 786755 - RNA, 24 nt, Human
aguguggaaaaugcacacauacag

SEQ ID NO: 786756 - RNA, 19 nt, Human
augcacacauacacaccca

SEQ ID NO: 786757 - RNA, 20 nt, Human
augcacacauacacacccag

SEQ ID NO: 786758 - RNA, 24 nt, Human
caaaaggauauccaaaaguuagca

SEQ ID NO: 786759 - RNA, 19 nt, Human
cacagcacagaagcagagu

SEQ ID NO: 786760 - RNA, 25 nt, Human
caccucagcagcacacgugugcaua

SEQ ID NO: 786761 - RNA, 25 nt, Human
cagcacagaagcagagugggcuccc

SEQ ID NO: 786762 - RNA, 23 nt, Human
cagcagcaggcaccagguuacag

SEQ ID NO: 786763 - RNA, 20 nt, Human
ccacagcacagaagcagagu

SEQ ID NO: 786764 - RNA, 19 nt, Human
ccacagggcaagugccagg

SEQ ID NO: 786765 - RNA, 18 nt, Human
ccaggcccuaccaauuuu

SEQ ID NO: 786766 - RNA, 22 nt, Human
cccagaaaaaaguaccugaacc

SEQ ID NO: 786767 - RNA, 33 nt, Human
cccagcauuuagcaaaaaaaaaaaaaaaaaaaa

SEQ ID NO: 786768 - RNA, 22 nt, Human
ccccagaaaaaaguaccugaac

SEQ ID NO: 786769 - RNA, 22 nt, Human
cccccagaaaaaaguaccugaa

SEQ ID NO: 786770 - RNA, 24 nt, Human
cccccagaaaaaaguaccugaacc

SEQ ID NO: 786771 - RNA, 21 nt, Human
ccccggggcccacagcacaga

SEQ ID NO: 786772 - RNA, 19 nt, Human
cgccuagaccagaggacuc

SEQ ID NO: 786773 - RNA, 23 nt, Human
cgugcucaccagaccugccucac

SEQ ID NO: 786774 - RNA, 19 nt, Human
cgugugcauauaucugugu

SEQ ID NO: 786775 - RNA, 19 nt, Human
cuagaccagaggacuccgu

SEQ ID NO: 786776 - RNA, 19 nt, Human
cucuauguccacaccauca

SEQ ID NO: 786777 - RNA, 27 nt, Human
cucuccgugcucaccagaccugccuca

SEQ ID NO: 786778 - RNA, 23 nt, Human
cucugguuaaaaaaaaaaaaaaa

SEQ ID NO: 786779 - RNA, 24 nt, Human
cugcauugcucgucuccccccgug

SEQ ID NO: 786780 - RNA, 24 nt, Human
cuucuacuuguucuuaagccacag

SEQ ID NO: 786781 - RNA, 21 nt, Human
cuugcuuucuucuauuucugu

SEQ ID NO: 786782 - RNA, 23 nt, Human
gcaaaaaaaaaaaaaaaaaaaaa

SEQ ID NO: 786783 - RNA, 24 nt, Human
gcaaagucuaccucccccagaaaa

SEQ ID NO: 786784 - RNA, 25 nt, Human
gcaaagucuaccucccccagaaaag

SEQ ID NO: 786785 - RNA, 18 nt, Human
gcauugcucgucuccccc

SEQ ID NO: 786786 - RNA, 22 nt, Human
gccaggugaguccuaaauaacc

SEQ ID NO: 786787 - RNA, 21 nt, Human
ggcaaccccggggcccacagc

SEQ ID NO: 786788 - RNA, 24 nt, Human
gucacuuagccccuucccagccuc

SEQ ID NO: 786789 - RNA, 22 nt, Human
gugcucaccagaccugccucac

SEQ ID NO: 786790 - RNA, 18 nt, Human
gugugcauauaucugugu

SEQ ID NO: 786791 - RNA, 22 nt, Human
uaaaaggaaaagcuccacccau

SEQ ID NO: 786792 - RNA, 23 nt, Human
uaaacaaauauaaaaaugcacaa

SEQ ID NO: 786793 - RNA, 31 nt, Human
uaaacucugguuaaaaaaaaaaaaaaaaaaa

SEQ ID NO: 786794 - RNA, 24 nt, Human
uaaccaaaaggauauccaaaaguu

SEQ ID NO: 786795 - RNA, 18 nt, Human
uacucuaguuuauuuaac

SEQ ID NO: 786796 - RNA, 23 nt, Human
uagauuuugauaaaucuuucuga

SEQ ID NO: 786797 - RNA, 22 nt, Human
uagucacuuagccccuucccag

SEQ ID NO: 786798 - RNA, 24 nt, Human
ucaaggaggaaauucauuaaaaaa

SEQ ID NO: 786799 - RNA, 22 nt, Human
ucacucacacugcagggcuggc

SEQ ID NO: 786800 - RNA, 22 nt, Human
ucacuuagccccuucccagccu

SEQ ID NO: 786801 - RNA, 24 nt, Human
uccacccauaguucuguagugcaa

SEQ ID NO: 786802 - RNA, 19 nt, Human
uccccgggaagcacuuuca

SEQ ID NO: 786803 - RNA, 23 nt, Human
uccccgggaagcacuuucagaag

SEQ ID NO: 786804 - RNA, 20 nt, Human
uccccucucucuauguccac

SEQ ID NO: 786805 - RNA, 20 nt, Human
uccuuuccaacccuuccccu

SEQ ID NO: 786806 - RNA, 23 nt, Human
ucucuauguccacaccaucacuu

SEQ ID NO: 786807 - RNA, 22 nt, Human
ucucugaaagcaauuaccgccu

SEQ ID NO: 786808 - RNA, 21 nt, Human
ucuguacauguuguuugugua

SEQ ID NO: 786809 - RNA, 24 nt, Human
ucuguacauguuguuuguguauau

SEQ ID NO: 786810 - RNA, 20 nt, Human
ugcaaaaaaaccuuuuuaau

SEQ ID NO: 786811 - RNA, 19 nt, Human
ugcauuaagaaccagcaac

SEQ ID NO: 786812 - RNA, 19 nt, Human
ugcauugcucgucuccccc

SEQ ID NO: 786813 - RNA, 19 nt, Human
uggggguaaugagauuauu

SEQ ID NO: 786814 - RNA, 18 nt, Human
ugguuaaaaaaaaaaaaa

SEQ ID NO: 786815 - RNA, 22 nt, Human
uguaaccaaaaggauauccaaa

SEQ ID NO: 786816 - RNA, 18 nt, Human
uguccacaccaucacuuc

SEQ ID NO: 786817 - RNA, 22 nt, Human
uguccacaccaucacuucaguu

SEQ ID NO: 786818 - RNA, 21 nt, Human
uguguguauguggcugcacag

SEQ ID NO: 786819 - RNA, 20 nt, Human
uuaaaaaaaaaaaaaaaaaa

SEQ ID NO: 786820 - RNA, 21 nt, Human
uuaagaaccagcaacucuacu

SEQ ID NO: 786821 - RNA, 23 nt, Human
uuaagccacagggcaagugccag

SEQ ID NO: 786822 - RNA, 18 nt, Human
uuagaaguaauuagcaac

SEQ ID NO: 786823 - RNA, 21 nt, Human
uucaaggaaaaaaaaauagcc

SEQ ID NO: 786824 - RNA, 22 nt, Human
uucaaggaaaaaaaaauagcca

SEQ ID NO: 786825 - RNA, 19 nt, Human
uuccaacccuuccccucuc

SEQ ID NO: 786826 - RNA, 20 nt, Human
uucccagccucuccgugcuc

SEQ ID NO: 786827 - RNA, 24 nt, Human
uuuagcaaaaaaaaaaaaaaaaaa

SEQ ID NO: 786828 - RNA, 24 nt, Human
uuucauaggcaggaaacaaauucc

SEQ ID NO: 786829 - RNA, 18 nt, Human
aagaagaaaaggggcaga

SEQ ID NO: 786830 - RNA, 23 nt, Human
aagaagaaaaggggcagagucag

SEQ ID NO: 786831 - RNA, 18 nt, Human
agaagaaaaggggcagag

SEQ ID NO: 786832 - RNA, 21 nt, Human
agaagaagaaaaggggcagag

SEQ ID NO: 786833 - RNA, 21 nt, Human
agaagaagaaaaggggcagag

SEQ ID NO: 786834 - RNA, 21 nt, Human
agagaccccacccucccagca

SEQ ID NO: 786835 - RNA, 22 nt, Human
agagcuccuagagaccccaccc

SEQ ID NO: 786836 - RNA, 18 nt, Human
agcagaagaagaaaaggg

SEQ ID NO: 786837 - RNA, 18 nt, Human
agcaguggugggcguggc

SEQ ID NO: 786838 - RNA, 21 nt, Human
agucagaccccagagagccca

SEQ ID NO: 786839 - RNA, 19 nt, Human
caccgcugcuccacagaac

SEQ ID NO: 786840 - RNA, 22 nt, Human
cagcagaagaagaaaaggggca

SEQ ID NO: 786841 - RNA, 19 nt, Human
ccccagagagcccauccua

SEQ ID NO: 786842 - RNA, 23 nt, Human
cggccaccgcugcuccacagaac

SEQ ID NO: 786843 - RNA, 19 nt, Human
cuagagaccccacccuccc

SEQ ID NO: 786844 - RNA, 25 nt, Human
cuccacagaacugcuggcugucucu

SEQ ID NO: 786845 - RNA, 20 nt, Human
cugcucugcgggugcugggg

SEQ ID NO: 786846 - RNA, 23 nt, Human
cuguugggggcuucaucgugguc

SEQ ID NO: 786847 - RNA, 18 nt, Human
gaaaaggggcagagucag

SEQ ID NO: 786848 - RNA, 20 nt, Human
gagcaguggugggcguggcu

SEQ ID NO: 786849 - RNA, 20 nt, Human
gcaguggugggcguggcugu

SEQ ID NO: 786850 - RNA, 22 nt, Human
gccucguccgagcagugguggg

SEQ ID NO: 786851 - RNA, 21 nt, Human
gugcuggggccugcagagcuc

SEQ ID NO: 786852 - RNA, 18 nt, Human
uagccggccaccgcugcu

SEQ ID NO: 786853 - RNA, 18 nt, Human
ugagguuguggucuuggc

SEQ ID NO: 786854 - RNA, 19 nt, Human
ugcuggggccugcagagcu

SEQ ID NO: 786855 - RNA, 21 nt, Human
uggugggcguggcuguugggg

SEQ ID NO: 786856 - RNA, 18 nt, Human
aaaaacaaacaaacccgg

SEQ ID NO: 786857 - RNA, 24 nt, Human
aaaaacaaacaaacccggcagcca

SEQ ID NO: 786858 - RNA, 18 nt, Human
aaaaaucaaugaaguccu

SEQ ID NO: 786859 - RNA, 26 nt, Human
aaaaauccccuaucuagccaauucuu

SEQ ID NO: 786860 - RNA, 23 nt, Human
aaaacaaacaaacccggcagcca

SEQ ID NO: 786861 - RNA, 21 nt, Human
aaacaaacaaacccggcagcc

SEQ ID NO: 786862 - RNA, 24 nt, Human
aaacaaacaaacccggcagccaag

SEQ ID NO: 786863 - RNA, 25 nt, Human
aaacacaaaacagaacgcuuuacaa

SEQ ID NO: 786864 - RNA, 24 nt, Human
aaacagaaaaucacauaagccaaa

SEQ ID NO: 786865 - RNA, 21 nt, Human
aaacgucaggacacguaagcu

SEQ ID NO: 786866 - RNA, 25 nt, Human
aaugcaauccucacacaacuuguga

SEQ ID NO: 786867 - RNA, 24 nt, Human
acaaaacagaacgcuuuacaaaaa

SEQ ID NO: 786868 - RNA, 22 nt, Human
acaaagaaggcacaauugaaug

SEQ ID NO: 786869 - RNA, 22 nt, Human
acgucaggacacguaagcuuca

SEQ ID NO: 786870 - RNA, 19 nt, Human
acuguuuggggucuugggc

SEQ ID NO: 786871 - RNA, 18 nt, Human
auaaaauauaccauaugc

SEQ ID NO: 786872 - RNA, 18 nt, Human
auaagcaacaaaacguca

SEQ ID NO: 786873 - RNA, 20 nt, Human
augaagauuagucagcagcu

SEQ ID NO: 786874 - RNA, 21 nt, Human
augaagauuagucagcagcug

SEQ ID NO: 786875 - RNA, 18 nt, Human
auguguguguauauauau

SEQ ID NO: 786876 - RNA, 21 nt, Human
auuucugcuuucuuuuuuuag

SEQ ID NO: 786877 - RNA, 24 nt, Human
caaaaacaaacaaacccggcagcc

SEQ ID NO: 786878 - RNA, 26 nt, Human
caaaaacaaacaaacccggcagccaa

SEQ ID NO: 786879 - RNA, 27 nt, Human
caaaaacaaacaaacccggcagccaag

SEQ ID NO: 786880 - RNA, 26 nt, Human
caaacaaaguaaaaguacuguuuggg

SEQ ID NO: 786881 - RNA, 21 nt, Human
caaacccggcagccaaguacu

SEQ ID NO: 786882 - RNA, 22 nt, Human
cacaaaacagaacgcuuuacaa

SEQ ID NO: 786883 - RNA, 24 nt, Human
cacaaaacagaacgcuuuacaaaa

SEQ ID NO: 786884 - RNA, 20 nt, Human
cacaguauaagcaacaaaac

SEQ ID NO: 786885 - RNA, 19 nt, Human
cacaugcauaauauaugug

SEQ ID NO: 786886 - RNA, 21 nt, Human
caccauaugaacuuucagggc

SEQ ID NO: 786887 - RNA, 21 nt, Human
cacucagcuuccacacuguag

SEQ ID NO: 786888 - RNA, 18 nt, Human
cacuguggcaacuaaaca

SEQ ID NO: 786889 - RNA, 22 nt, Human
cagccaaguacuaugacauccc

SEQ ID NO: 786890 - RNA, 20 nt, Human
caguauaagcaacaaaacgu

SEQ ID NO: 786891 - RNA, 21 nt, Human
cauuauagagcuuagcuagga

SEQ ID NO: 786892 - RNA, 18 nt, Human
ccccaaaaacaaacaaac

SEQ ID NO: 786893 - RNA, 19 nt, Human
ccuaguuccuuuucaguag

SEQ ID NO: 786894 - RNA, 27 nt, Human
ccucacucugcugcgggaaggucggac

SEQ ID NO: 786895 - RNA, 26 nt, Human
ccucacucugcugcgggaaggucggc

SEQ ID NO: 786896 - RNA, 25 nt, Human
ccucucacccuucuggucuucccca

SEQ ID NO: 786897 - RNA, 23 nt, Human
cuacucucugaaaaaaucaauga

SEQ ID NO: 786898 - RNA, 22 nt, Human
cucacccuucuggucuucccca

SEQ ID NO: 786899 - RNA, 21 nt, Human
cuuguaaacagaaaaucacau

SEQ ID NO: 786900 - RNA, 18 nt, Human
gcauaauauauguguaug

SEQ ID NO: 786901 - RNA, 20 nt, Human
ggcagacagcuccagcggaa

SEQ ID NO: 786902 - RNA, 21 nt, Human
gugaucuccuuaaguaccccc

SEQ ID NO: 786903 - RNA, 24 nt, Human
guggaagugguguuucccccacug

SEQ ID NO: 786904 - RNA, 21 nt, Human
guggugaugaagauuagucag

SEQ ID NO: 786905 - RNA, 22 nt, Human
guucauggauuucugcuuucuu

SEQ ID NO: 786906 - RNA, 22 nt, Human
uaaacacaaaacagaacgcuuu

SEQ ID NO: 786907 - RNA, 22 nt, Human
uaauauauguguaugugugugu

SEQ ID NO: 786908 - RNA, 22 nt, Human
uacaguggugaugaagauuagu

SEQ ID NO: 786909 - RNA, 23 nt, Human
uaccaguaauaacuuauuucaau

SEQ ID NO: 786910 - RNA, 25 nt, Human
uagcacugaggcuugagacuugugg

SEQ ID NO: 786911 - RNA, 20 nt, Human
uaggauacagacacccaaaa

SEQ ID NO: 786912 - RNA, 24 nt, Human
uauauauauguacacacauacaca

SEQ ID NO: 786913 - RNA, 21 nt, Human
uauauauguacacacauacgc

SEQ ID NO: 786914 - RNA, 19 nt, Human
uauauguacacacauacac

SEQ ID NO: 786915 - RNA, 20 nt, Human
uauauguguaugugugugua

SEQ ID NO: 786916 - RNA, 24 nt, Human
uauauguguauguguguguauaua

SEQ ID NO: 786917 - RNA, 19 nt, Human
uaugacgcauucaggaaaa

SEQ ID NO: 786918 - RNA, 22 nt, Human
uauguacacacauacacauuua

SEQ ID NO: 786919 - RNA, 25 nt, Human
uauguacacacauacacauuuauuu

SEQ ID NO: 786920 - RNA, 19 nt, Human
uauguguauguguguguau

SEQ ID NO: 786921 - RNA, 25 nt, Human
uauguguguguauauauauguacca

SEQ ID NO: 786922 - RNA, 22 nt, Human
uauuucaacauaugcugccugc

SEQ ID NO: 786923 - RNA, 22 nt, Human
ucagaaacuucuuaggauacag

SEQ ID NO: 786924 - RNA, 22 nt, Human
ucagggccccucucacccuucu

SEQ ID NO: 786925 - RNA, 22 nt, Human
ucauaauacaaagaaggcacaa

SEQ ID NO: 786926 - RNA, 23 nt, Human
uccacacuguaguacccaaguga

SEQ ID NO: 786927 - RNA, 23 nt, Human
uccacuuuucaaaauuuccccaa

SEQ ID NO: 786928 - RNA, 21 nt, Human
uccagcggaauugccacucuc

SEQ ID NO: 786929 - RNA, 20 nt, Human
ucuacuuguaaacagaaaau

SEQ ID NO: 786930 - RNA, 18 nt, Human
ucugaaaaaaucaaugaa

SEQ ID NO: 786931 - RNA, 25 nt, Human
ucugaaaaaaucaaugaaguccuuu

SEQ ID NO: 786932 - RNA, 23 nt, Human
ugaaaaaaucaaugaaguccuuu

SEQ ID NO: 786933 - RNA, 19 nt, Human
ugaauggacaaaaaucacu

SEQ ID NO: 786934 - RNA, 20 nt, Human
ugcaguguucagaaaaaucc

SEQ ID NO: 786935 - RNA, 21 nt, Human
ugcaguguucagaaaaauccc

SEQ ID NO: 786936 - RNA, 21 nt, Human
uggcaauuugcaaauauggca

SEQ ID NO: 786937 - RNA, 21 nt, Human
uguauauauauguacacacau

SEQ ID NO: 786938 - RNA, 26 nt, Human
uguauauauauguacacacauacaca

SEQ ID NO: 786939 - RNA, 21 nt, Human
uguauguguguguauauauau

SEQ ID NO: 786940 - RNA, 21 nt, Human
uguauguguguguauauauau

SEQ ID NO: 786941 - RNA, 20 nt, Human
uguggaagugguguuuccua

SEQ ID NO: 786942 - RNA, 18 nt, Human
uguguauauauauguaca

SEQ ID NO: 786943 - RNA, 23 nt, Human
uguguauauauauguacacacau

SEQ ID NO: 786944 - RNA, 20 nt, Human
uguguauguguguguauaua

SEQ ID NO: 786945 - RNA, 24 nt, Human
uguguauguguguguauauauaug

SEQ ID NO: 786946 - RNA, 26 nt, Human
uguguauguguguguauauauaugua

SEQ ID NO: 786947 - RNA, 18 nt, Human
uguguguauauauaugua

SEQ ID NO: 786948 - RNA, 22 nt, Human
uuccuaguuccuuuucaguagu

SEQ ID NO: 786949 - RNA, 19 nt, Human
uugaaggcucauagguuug

SEQ ID NO: 786950 - RNA, 22 nt, Human
uuuuuaguccaaaugaggcuga

SEQ ID NO: 786951 - RNA, 24 nt, Human
aaaaaaaaaaaaucaaucugcaga

SEQ ID NO: 786952 - RNA, 22 nt, Human
aaaaaaaaaaaucaaucugcag

SEQ ID NO: 786953 - RNA, 28 nt, Human
aaaaaaccaccacauaaggagaggccaa

SEQ ID NO: 786954 - RNA, 23 nt, Human
aaaaacacaacaaaaaccuaaug

SEQ ID NO: 786955 - RNA, 18 nt, Human
aaaauagauccaccaaga

SEQ ID NO: 786956 - RNA, 25 nt, Human
aaaccuagaugacuuuacuaggcgg

SEQ ID NO: 786957 - RNA, 20 nt, Human
aaagaacaaugaaacucaag

SEQ ID NO: 786958 - RNA, 24 nt, Human
aaagaccagaggguacuugguccc

SEQ ID NO: 786959 - RNA, 22 nt, Human
aaagcagguguaggaggucaag

SEQ ID NO: 786960 - RNA, 28 nt, Human
aaagcagguguaggaggucaagaggggc

SEQ ID NO: 786961 - RNA, 30 nt, Human
aaagcagguguaggaggucaagaggggcuc

SEQ ID NO: 786962 - RNA, 19 nt, Human
aaagccauauaagugaaaa

SEQ ID NO: 786963 - RNA, 21 nt, Human
aaauaccccaucuucccagga

SEQ ID NO: 786964 - RNA, 24 nt, Human
aaccaaaaacacaacaaaaaccua

SEQ ID NO: 786965 - RNA, 20 nt, Human
aaccauccauucacaaaaga

SEQ ID NO: 786966 - RNA, 24 nt, Human
aacuuguucuuuccagaaaaccuu

SEQ ID NO: 786967 - RNA, 23 nt, Human
aagcggagaugagcagugugugc

SEQ ID NO: 786968 - RNA, 21 nt, Human
acacacacaggcacacauaca

SEQ ID NO: 786969 - RNA, 21 nt, Human
acacaggcacacauacauacu

SEQ ID NO: 786970 - RNA, 18 nt, Human
acagugguugaccucuuu

SEQ ID NO: 786971 - RNA, 22 nt, Human
acccuaaaaagcggagaugagc

SEQ ID NO: 786972 - RNA, 25 nt, Human
acccuaaggcaguuuuuuaaaaaau

SEQ ID NO: 786973 - RNA, 19 nt, Human
acgguguccuugcaaagug

SEQ ID NO: 786974 - RNA, 28 nt, Human
acucuaugauccagagcuggaagaacug

SEQ ID NO: 786975 - RNA, 19 nt, Human
agaaacuuguucuuuccag

SEQ ID NO: 786976 - RNA, 22 nt, Human
agaauaagaacuaaaaucccau

SEQ ID NO: 786977 - RNA, 28 nt, Human
agacaaccucaaaauaagggggaacgcc

SEQ ID NO: 786978 - RNA, 21 nt, Human
agccaaucagaggcugcgucg

SEQ ID NO: 786979 - RNA, 24 nt, Human
agccacaguacuaaaaaaaaaaaa

SEQ ID NO: 786980 - RNA, 19 nt, Human
aggaaggcaggcagagauc

SEQ ID NO: 786981 - RNA, 18 nt, Human
aggguacuugguccccag

SEQ ID NO: 786982 - RNA, 24 nt, Human
agugguugaccucuuuuuuccuuu

SEQ ID NO: 786983 - RNA, 20 nt, Human
augcccccucuacggugucc

SEQ ID NO: 786984 - RNA, 21 nt, Human
auggaauagaaauuccauaac

SEQ ID NO: 786985 - RNA, 24 nt, Human
auggacaucuuucugaaaaaccuu

SEQ ID NO: 786986 - RNA, 18 nt, Human
auuuuauuuucuuuuucu

SEQ ID NO: 786987 - RNA, 24 nt, Human
caaaaaaaccaccacauaaggaga

SEQ ID NO: 786988 - RNA, 24 nt, Human
caaaauaagguccaaauauugguu

SEQ ID NO: 786989 - RNA, 21 nt, Human
caaagauguucccacuggcag

SEQ ID NO: 786990 - RNA, 25 nt, Human
cacaacaaaaaccuaaugauauaua

SEQ ID NO: 786991 - RNA, 23 nt, Human
cacaguacuaaaaaaaaaaaauc

SEQ ID NO: 786992 - RNA, 25 nt, Human
caccaagauaauuauauaauagucu

SEQ ID NO: 786993 - RNA, 23 nt, Human
caccaggugccaguguacgcccu

SEQ ID NO: 786994 - RNA, 23 nt, Human
cacgcauuuaauacugcucugaa

SEQ ID NO: 786995 - RNA, 21 nt, Human
cacuauacagcacuucaaggu

SEQ ID NO: 786996 - RNA, 21 nt, Human
cagaauaagaacuaaaauccc

SEQ ID NO: 786997 - RNA, 25 nt, Human
cagacaaccucaaaauaagguccaa

SEQ ID NO: 786998 - RNA, 23 nt, Human
cauaaccaaaaacacaacaaaaa

SEQ ID NO: 786999 - RNA, 24 nt, Human
cauacaauacaucaauaaguaugc

SEQ ID NO: 787000 - RNA, 22 nt, Human
cauucacaaaagaccagagggu

SEQ ID NO: 787001 - RNA, 19 nt, Human
ccaacuggacuuacagaua

SEQ ID NO: 787002 - RNA, 20 nt, Human
ccagaaaaccuuugccaaaa

SEQ ID NO: 787003 - RNA, 22 nt, Human
ccauauaagugaaaaaauugag

SEQ ID NO: 787004 - RNA, 18 nt, Human
cggagaugagcagugugu

SEQ ID NO: 787005 - RNA, 23 nt, Human
cggagaugagcagugugugcccc

SEQ ID NO: 787006 - RNA, 20 nt, Human
cgggaggaaguuggagcgcg

SEQ ID NO: 787007 - RNA, 19 nt, Human
cuaccaaaaaaaccaccac

SEQ ID NO: 787008 - RNA, 21 nt, Human
cuaccaaaaaaaccaccacau

SEQ ID NO: 787009 - RNA, 22 nt, Human
cucuaaaucuaaauaaguuugc

SEQ ID NO: 787010 - RNA, 21 nt, Human
cucuaugauccagagcuggaa

SEQ ID NO: 787011 - RNA, 20 nt, Human
cucuccgcagccccuaaaag

SEQ ID NO: 787012 - RNA, 18 nt, Human
cuuccagaccuggcugga

SEQ ID NO: 787013 - RNA, 21 nt, Human
cuuguauaugcauauaaacac

SEQ ID NO: 787014 - RNA, 19 nt, Human
gaaagacgaggcccagaga

SEQ ID NO: 787015 - RNA, 23 nt, Human
gaaccaaauuuacauguuuugca

SEQ ID NO: 787016 - RNA, 21 nt, Human
gacuucaguuauggaauagaa

SEQ ID NO: 787017 - RNA, 21 nt, Human
gcauaaaauagauccaccaag

SEQ ID NO: 787018 - RNA, 18 nt, Human
gccagucugacaagacag

SEQ ID NO: 787019 - RNA, 24 nt, Human
ggaaaaaaagaccuucgaugaugc

SEQ ID NO: 787020 - RNA, 19 nt, Human
ggaaagacgaggcccagag

SEQ ID NO: 787021 - RNA, 18 nt, Human
ggagaugggggaucuagg

SEQ ID NO: 787022 - RNA, 21 nt, Human
ggaggagaugggggaucuagg

SEQ ID NO: 787023 - RNA, 21 nt, Human
gggacagcauaaccaaaaaca

SEQ ID NO: 787024 - RNA, 23 nt, Human
uaaaaagaacguccuaaugaagg

SEQ ID NO: 787025 - RNA, 25 nt, Human
uaaaaagaacguccuaaugaaggca

SEQ ID NO: 787026 - RNA, 24 nt, Human
uaaaagaacaaugaaacucaagua

SEQ ID NO: 787027 - RNA, 21 nt, Human
uaaaaguagcauggaucgggg

SEQ ID NO: 787028 - RNA, 21 nt, Human
uaaaauaggaaaagaaagcca

SEQ ID NO: 787029 - RNA, 21 nt, Human
uaaaaugcuacuggcucauac

SEQ ID NO: 787030 - RNA, 22 nt, Human
uaaaccuagaugacuuuacuag

SEQ ID NO: 787031 - RNA, 23 nt, Human
uaaauucuucacaaaucaauaaa

SEQ ID NO: 787032 - RNA, 19 nt, Human
uaacaagaacagagagaag

SEQ ID NO: 787033 - RNA, 19 nt, Human
uaaccaaaaacacaacaaa

SEQ ID NO: 787034 - RNA, 21 nt, Human
uaaccaaaaacacaacaaaaa

SEQ ID NO: 787035 - RNA, 22 nt, Human
uaaccaaaaacacaacaaaaac

SEQ ID NO: 787036 - RNA, 23 nt, Human
uaaccaaaaacacaacaaaaacc

SEQ ID NO: 787037 - RNA, 24 nt, Human
uaaccaaaaacacaacaaaaaccu

SEQ ID NO: 787038 - RNA, 23 nt, Human
uaagaauacaaacuaaaagaaca

SEQ ID NO: 787039 - RNA, 21 nt, Human
uacucagcucugcugcugcuc

SEQ ID NO: 787040 - RNA, 21 nt, Human
uagauauccagugcaugcgac

SEQ ID NO: 787041 - RNA, 23 nt, Human
uagguaucaguauaguuggcuaa

SEQ ID NO: 787042 - RNA, 22 nt, Human
uagguuguuucauuugucuguu

SEQ ID NO: 787043 - RNA, 19 nt, Human
uaguauuauaugaggagga

SEQ ID NO: 787044 - RNA, 23 nt, Human
uaucacagaauaagaacuaaaau

SEQ ID NO: 787045 - RNA, 23 nt, Human
uaucagaaacagugguugaccuc

SEQ ID NO: 787046 - RNA, 25 nt, Human
uaucauaaagacuucaguuauggaa

SEQ ID NO: 787047 - RNA, 21 nt, Human
uaucauuuuuuucauaaaaua

SEQ ID NO: 787048 - RNA, 27 nt, Human
ucaaguacauuaucagaaacagugguu

SEQ ID NO: 787049 - RNA, 18 nt, Human
ucacaaaagaccagaggg

SEQ ID NO: 787050 - RNA, 24 nt, Human
uccagagcuggaagaacugcuucu

SEQ ID NO: 787051 - RNA, 19 nt, Human
ucccuuuucaucugagaga

SEQ ID NO: 787052 - RNA, 21 nt, Human
uccgcagccccuaaaaguagc

SEQ ID NO: 787053 - RNA, 21 nt, Human
ucgagacagacaaccucaaaa

SEQ ID NO: 787054 - RNA, 20 nt, Human
ucuaugauccagagcuggaa

SEQ ID NO: 787055 - RNA, 19 nt, Human
ugaccuaccaaaaaaacca

SEQ ID NO: 787056 - RNA, 23 nt, Human
ugaccugaaagugcacgcauuua

SEQ ID NO: 787057 - RNA, 22 nt, Human
ugaggaggauaguuaucacaga

SEQ ID NO: 787058 - RNA, 18 nt, Human
ugccaaaauucccauagg

SEQ ID NO: 787059 - RNA, 25 nt, Human
ugccaaaauucccauaggaaacaaa

SEQ ID NO: 787060 - RNA, 20 nt, Human
ugccaguguacgcccuucac

SEQ ID NO: 787061 - RNA, 19 nt, Human
ugcccccucuacggugucc

SEQ ID NO: 787062 - RNA, 19 nt, Human
ugcccccucuacggugucc

SEQ ID NO: 787063 - RNA, 19 nt, Human
uggaaggaggagauggggg

SEQ ID NO: 787064 - RNA, 20 nt, Human
uggaaggaggagauggggga

SEQ ID NO: 787065 - RNA, 19 nt, Human
uggagcgcggacaugcccc

SEQ ID NO: 787066 - RNA, 20 nt, Human
uggagcgcggacaugccccc

SEQ ID NO: 787067 - RNA, 26 nt, Human
uggagugucuuguugugucaaagaug

SEQ ID NO: 787068 - RNA, 21 nt, Human
uggcuggaaggaggagauggg

SEQ ID NO: 787069 - RNA, 20 nt, Human
ugggaaauaagcaaagucaa

SEQ ID NO: 787070 - RNA, 23 nt, Human
ugggaaauaagcaaagucaaagg

SEQ ID NO: 787071 - RNA, 24 nt, Human
ugggaaauaagcaaagucaaaggu

SEQ ID NO: 787072 - RNA, 21 nt, Human
uguacgcccuucacucagaac

SEQ ID NO: 787073 - RNA, 18 nt, Human
ugugugccuugccuaagc

SEQ ID NO: 787074 - RNA, 20 nt, Human
uguuauuucguugcuggaag

SEQ ID NO: 787075 - RNA, 21 nt, Human
uguugugucaaagauguuccc

SEQ ID NO: 787076 - RNA, 22 nt, Human
uuaaaggucacucuaugaucca

SEQ ID NO: 787077 - RNA, 23 nt, Human
uuauaaguggaagagaccucaag

SEQ ID NO: 787078 - RNA, 23 nt, Human
uucacaaaucaauaaaacauuaa

SEQ ID NO: 787079 - RNA, 19 nt, Human
uucacuauacagcacuuca

SEQ ID NO: 787080 - RNA, 20 nt, Human
uucacuauacagcacuucaa

SEQ ID NO: 787081 - RNA, 24 nt, Human
uucauaaaaucuaccuuccccuuc

SEQ ID NO: 787082 - RNA, 22 nt, Human
uuccagaaaaccuuugccaaaa

SEQ ID NO: 787083 - RNA, 25 nt, Human
uucuuuccagaaaaccuuugccaaa

SEQ ID NO: 787084 - RNA, 19 nt, Human
uugguacuuuaugucagaa

SEQ ID NO: 787085 - RNA, 22 nt, Human
uuuaggaaaaaaagaccuucga

SEQ ID NO: 787086 - RNA, 21 nt, Human
uuucuuauaagcccaggagcu

SEQ ID NO: 787087 - RNA, 23 nt, Human
uuuuaacaauuuugaacuaauau

SEQ ID NO: 787088 - RNA, 25 nt, Human
uuuuuuuuuuuaggaaaaaaagacc

SEQ ID NO: 787089 - RNA, 24 nt, Human
aaagugcugggauuacaggcauga

SEQ ID NO: 787090 - RNA, 24 nt, Human
aagaaaccgagacacacagaggug

SEQ ID NO: 787091 - RNA, 24 nt, Human
aagcaauucucaugccuuacccuc

SEQ ID NO: 787092 - RNA, 27 nt, Human
aagcaauucucaugccuuacccuccca

SEQ ID NO: 787093 - RNA, 21 nt, Human
aagcagcucggcccagcaaac

SEQ ID NO: 787094 - RNA, 21 nt, Human
aaggguuuauaaauguguuuu

SEQ ID NO: 787095 - RNA, 19 nt, Human
aaguagcugggauuacagg

SEQ ID NO: 787096 - RNA, 19 nt, Human
aagugcugggauuacaggc

SEQ ID NO: 787097 - RNA, 21 nt, Human
aagugcugggauuacaggcau

SEQ ID NO: 787098 - RNA, 26 nt, Human
aagugcugggauuacaggcaugagcc

SEQ ID NO: 787099 - RNA, 18 nt, Human
acacagcaucucucaccc

SEQ ID NO: 787100 - RNA, 23 nt, Human
acacaggcuggagugcaguggug

SEQ ID NO: 787101 - RNA, 18 nt, Human
acaggguuucauuauguu

SEQ ID NO: 787102 - RNA, 23 nt, Human
acaggguuucauuauguuggcca

SEQ ID NO: 787103 - RNA, 24 nt, Human
acaggguuucauuauguuggccag

SEQ ID NO: 787104 - RNA, 22 nt, Human
acccagagucccuccccgugug

SEQ ID NO: 787105 - RNA, 22 nt, Human
acggagucucaccaucucccag

SEQ ID NO: 787106 - RNA, 21 nt, Human
agagucccuccccgugugccc

SEQ ID NO: 787107 - RNA, 21 nt, Human
agcaucucucacccucacugc

SEQ ID NO: 787108 - RNA, 20 nt, Human
aggaauaaauacuuccugaa

SEQ ID NO: 787109 - RNA, 21 nt, Human
aggcugcccccggcaugcacg

SEQ ID NO: 787110 - RNA, 18 nt, Human
agggcugagguggcgggu

SEQ ID NO: 787111 - RNA, 23 nt, Human
aguaagaugaggcauguauugca

SEQ ID NO: 787112 - RNA, 23 nt, Human
aguagcugggauuacaggugugc

SEQ ID NO: 787113 - RNA, 24 nt, Human
agugaugugcccaccuuggccucc

SEQ ID NO: 787114 - RNA, 20 nt, Human
agugcaguggugcaguggca

SEQ ID NO: 787115 - RNA, 18 nt, Human
agugcugggauuacaggc

SEQ ID NO: 787116 - RNA, 21 nt, Human
aguggcaugaucucggcucgc

SEQ ID NO: 787117 - RNA, 25 nt, Human
aguggugcaguggcaugaucucggc

SEQ ID NO: 787118 - RNA, 19 nt, Human
aguguacuggugugaucuc

SEQ ID NO: 787119 - RNA, 22 nt, Human
augccuuacccucccaaguagc

SEQ ID NO: 787120 - RNA, 19 nt, Human
auguuggccaggcuggucu

SEQ ID NO: 787121 - RNA, 21 nt, Human
auuacagcucuggaacugccu

SEQ ID NO: 787122 - RNA, 24 nt, Human
auuauguuggccaggcuggucuug

SEQ ID NO: 787123 - RNA, 24 nt, Human
auuuuuguauuuuuaguagagaca

SEQ ID NO: 787124 - RNA, 24 nt, Human
caaagugcugggauuacaggcaug

SEQ ID NO: 787125 - RNA, 20 nt, Human
caaccuccgccucccagguu

SEQ ID NO: 787126 - RNA, 22 nt, Human
cacacagcaucucucacccuca

SEQ ID NO: 787127 - RNA, 24 nt, Human
cacacaggcuggagugcaguggug

SEQ ID NO: 787128 - RNA, 22 nt, Human
caccaccaugcccagcuaauuu

SEQ ID NO: 787129 - RNA, 21 nt, Human
caccaucucccaggcuggagu

SEQ ID NO: 787130 - RNA, 24 nt, Human
caccaugcccagcuaauuuuugua

SEQ ID NO: 787131 - RNA, 24 nt, Human
cacccagagucccuccccgugugc

SEQ ID NO: 787132 - RNA, 21 nt, Human
cacugcaaccuccgccuccca

SEQ ID NO: 787133 - RNA, 22 nt, Human
cagcugaaagcagcucggccca

SEQ ID NO: 787134 - RNA, 24 nt, Human
caggguuucauuauguuggccagg

SEQ ID NO: 787135 - RNA, 19 nt, Human
cauuauguuggccaggcug

SEQ ID NO: 787136 - RNA, 24 nt, Human
cauuauguuggccaggcuggucuu

SEQ ID NO: 787137 - RNA, 24 nt, Human
cauucugucacacaggcuggagug

SEQ ID NO: 787138 - RNA, 23 nt, Human
ccaaagugcugggauuacaggca

SEQ ID NO: 787139 - RNA, 24 nt, Human
ccaaagugcugggauuacaggcau

SEQ ID NO: 787140 - RNA, 21 nt, Human
ccaaguagcugggauuacagg

SEQ ID NO: 787141 - RNA, 24 nt, Human
ccaaguagcugggauuacaggugu

SEQ ID NO: 787142 - RNA, 22 nt, Human
ccacuugaggccucugccccuc

SEQ ID NO: 787143 - RNA, 24 nt, Human
cccaaagugcugggauuacaggca

SEQ ID NO: 787144 - RNA, 22 nt, Human
cccaaguagcugggauuacagg

SEQ ID NO: 787145 - RNA, 23 nt, Human
cccaaguagcugggauuacaggu

SEQ ID NO: 787146 - RNA, 24 nt, Human
cccaaguagcugggauuacaggug

SEQ ID NO: 787147 - RNA, 23 nt, Human
cccagguucaagcaauucucaug

SEQ ID NO: 787148 - RNA, 23 nt, Human
cccagguucaagugauucuccuc

SEQ ID NO: 787149 - RNA, 23 nt, Human
cccagguucaagugauucuccug

SEQ ID NO: 787150 - RNA, 22 nt, Human
ccccacugccucucacaauuua

SEQ ID NO: 787151 - RNA, 26 nt, Human
ccgccucccagguucaagcaauucuu

SEQ ID NO: 787152 - RNA, 24 nt, Human
ccgccucccagguucaagugauuc

SEQ ID NO: 787153 - RNA, 22 nt, Human
ccucccagguucaagcaauucu

SEQ ID NO: 787154 - RNA, 24 nt, Human
ccucccagguucaagugauucucc

SEQ ID NO: 787155 - RNA, 22 nt, Human
ccugaccuuaagugaugugccc

SEQ ID NO: 787156 - RNA, 23 nt, Human
ccuguguuucuguccugaagccc

SEQ ID NO: 787157 - RNA, 21 nt, Human
cgagacacacagaggugagga

SEQ ID NO: 787158 - RNA, 22 nt, Human
cgccucccagguucaagugauu

SEQ ID NO: 787159 - RNA, 18 nt, Human
cggcaugcacggaggagc

SEQ ID NO: 787160 - RNA, 20 nt, Human
cucacccucacugcaggguc

SEQ ID NO: 787161 - RNA, 24 nt, Human
cucauucugucacacaggcuggag

SEQ ID NO: 787162 - RNA, 23 nt, Human
cuccaaggccacuugaggccucu

SEQ ID NO: 787163 - RNA, 21 nt, Human
cucccaggcuggaguguacug

SEQ ID NO: 787164 - RNA, 18 nt, Human
cucccagguucaagugau

SEQ ID NO: 787165 - RNA, 23 nt, Human
cugcaaccuccgccucccagguu

SEQ ID NO: 787166 - RNA, 24 nt, Human
cugcaaccuccgccucccagguuc

SEQ ID NO: 787167 - RNA, 24 nt, Human
cugcaaccuccgccucccagguuc

SEQ ID NO: 787168 - RNA, 19 nt, Human
cugccauaaaugccagggg

SEQ ID NO: 787169 - RNA, 24 nt, Human
cugcucugcucuccuuauccccac

SEQ ID NO: 787170 - RNA, 24 nt, Human
cuggaguguacuggugugaucuca

SEQ ID NO: 787171 - RNA, 24 nt, Human
cuuacccucccaaguagcugggau

SEQ ID NO: 787172 - RNA, 18 nt, Human
cuuccugaaucucugaau

SEQ ID NO: 787173 - RNA, 22 nt, Human
cuugaggccucugccccucggg

SEQ ID NO: 787174 - RNA, 21 nt, Human
gaaaauggugcugacccacac

SEQ ID NO: 787175 - RNA, 22 nt, Human
gauggaggaguccucacugacu

SEQ ID NO: 787176 - RNA, 18 nt, Human
gauuacaggcaugagcca

SEQ ID NO: 787177 - RNA, 22 nt, Human
gauuacaggcaugagccacugc

SEQ ID NO: 787178 - RNA, 22 nt, Human
gauuacaggcaugagccacugc

SEQ ID NO: 787179 - RNA, 22 nt, Human
gauuacaggugugcaccaccau

SEQ ID NO: 787180 - RNA, 22 nt, Human
gauucuccugugugagccaccg

SEQ ID NO: 787181 - RNA, 23 nt, Human
gcacauccccaaaggugucaccc

SEQ ID NO: 787182 - RNA, 21 nt, Human
gcaggaaagacaggaggccuc

SEQ ID NO: 787183 - RNA, 22 nt, Human
gcccagcuaauuuuuguauuuu

SEQ ID NO: 787184 - RNA, 23 nt, Human
gcgggcagcaggaaagacaggag

SEQ ID NO: 787185 - RNA, 21 nt, Human
gcucuggauagggaagcagag

SEQ ID NO: 787186 - RNA, 21 nt, Human
ggacggacuaggccucccuca

SEQ ID NO: 787187 - RNA, 19 nt, Human
ggacugcgggcagcaggaa

SEQ ID NO: 787188 - RNA, 20 nt, Human
ggagaaaauggugcugaccc

SEQ ID NO: 787189 - RNA, 26 nt, Human
ggagaguggggccuccaugggugcuu

SEQ ID NO: 787190 - RNA, 19 nt, Human
ggaggccucccuucacuga

SEQ ID NO: 787191 - RNA, 22 nt, Human
ggauuacaggcaugagccacug

SEQ ID NO: 787192 - RNA, 24 nt, Human
ggauuacaggugugcaccaccaug

SEQ ID NO: 787193 - RNA, 23 nt, Human
ggcccagcaaacaccuucuggaa

SEQ ID NO: 787194 - RNA, 21 nt, Human
ggcccggugcacugguggcug

SEQ ID NO: 787195 - RNA, 18 nt, Human
ggcugaacacuuugaagc

SEQ ID NO: 787196 - RNA, 22 nt, Human
ggcuggaguguacuggugugau

SEQ ID NO: 787197 - RNA, 23 nt, Human
ggcuggucuugaacuccugaccu

SEQ ID NO: 787198 - RNA, 18 nt, Human
gggcacaguggggagagu

SEQ ID NO: 787199 - RNA, 21 nt, Human
gggcacaguggggagaguggg

SEQ ID NO: 787200 - RNA, 23 nt, Human
gggcacaguggggagaguggggc

SEQ ID NO: 787201 - RNA, 22 nt, Human
ggguuucauuauguuggccagg

SEQ ID NO: 787202 - RNA, 19 nt, Human
ggucuugaacuccugaccu

SEQ ID NO: 787203 - RNA, 18 nt, Human
ggugcagcugaaagcagc

SEQ ID NO: 787204 - RNA, 20 nt, Human
ggugcaguggcaugaucucg

SEQ ID NO: 787205 - RNA, 23 nt, Human
ggugcaguggcaugaucucggcu

SEQ ID NO: 787206 - RNA, 24 nt, Human
ggugcaguggcaugaucucggcuc

SEQ ID NO: 787207 - RNA, 18 nt, Human
gucucauucugucacaca

SEQ ID NO: 787208 - RNA, 21 nt, Human
gugcagcugaaagcagcucgg

SEQ ID NO: 787209 - RNA, 21 nt, Human
gugcaguggcaugaucucggg

SEQ ID NO: 787210 - RNA, 21 nt, Human
gugugagccaccgugccuggc

SEQ ID NO: 787211 - RNA, 21 nt, Human
gugugcaccaccaugcccagc

SEQ ID NO: 787212 - RNA, 21 nt, Human
uaagaugaggcauguauugca

SEQ ID NO: 787213 - RNA, 24 nt, Human
uaagugaugugcccaccccugaag

SEQ ID NO: 787214 - RNA, 24 nt, Human
uaauuuuuguauuuuuaguagaga

SEQ ID NO: 787215 - RNA, 24 nt, Human
uacaggcaugagccacugcgccca

SEQ ID NO: 787216 - RNA, 18 nt, Human
uacaguggagaaaauggu

SEQ ID NO: 787217 - RNA, 22 nt, Human
uagagacaggguuucauuaugu

SEQ ID NO: 787218 - RNA, 24 nt, Human
uaguagagacaggguuucauuaug

SEQ ID NO: 787219 - RNA, 24 nt, Human
uauguuggccaggcuggucuugaa

SEQ ID NO: 787220 - RNA, 20 nt, Human
ucaaggguuuauaaaugugu

SEQ ID NO: 787221 - RNA, 23 nt, Human
ucaaggguuuauaaauguguuuu

SEQ ID NO: 787222 - RNA, 19 nt, Human
ucacugcaaccuccgccuc

SEQ ID NO: 787223 - RNA, 24 nt, Human
ucacugcaaccuccgccucccagg

SEQ ID NO: 787224 - RNA, 25 nt, Human
ucacugcaaccuccgccucccaggu

SEQ ID NO: 787225 - RNA, 27 nt, Human
ucacugcaaccuccgccucccagguuc

SEQ ID NO: 787226 - RNA, 18 nt, Human
ucauggcuaaaucaaggu

SEQ ID NO: 787227 - RNA, 22 nt, Human
ucauuauguuggccaggcuggu

SEQ ID NO: 787228 - RNA, 21 nt, Human
uccaaggccacuugaggccuc

SEQ ID NO: 787229 - RNA, 24 nt, Human
ucccaaagugcugggauuacaggc

SEQ ID NO: 787230 - RNA, 23 nt, Human
ucccaaguagcugggauuacagg

SEQ ID NO: 787231 - RNA, 25 nt, Human
ucccaaugacagacuugggguaccc

SEQ ID NO: 787232 - RNA, 24 nt, Human
ucccaggcuggaguguacuggugu

SEQ ID NO: 787233 - RNA, 21 nt, Human
ucccagguucaagcaauucuc

SEQ ID NO: 787234 - RNA, 24 nt, Human
ucccagguucaagcaauucucaug

SEQ ID NO: 787235 - RNA, 21 nt, Human
ucccagguucaagugauucuc

SEQ ID NO: 787236 - RNA, 24 nt, Human
ucccagguucaagugauucuccug

SEQ ID NO: 787237 - RNA, 18 nt, Human
uccccgugugcccguccu

SEQ ID NO: 787238 - RNA, 24 nt, Human
uccccgugugcccguccuucccuc

SEQ ID NO: 787239 - RNA, 19 nt, Human
ucccucaagacggcccggu

SEQ ID NO: 787240 - RNA, 19 nt, Human
ucgcugcaaccuccgccuc

SEQ ID NO: 787241 - RNA, 24 nt, Human
ucgcugcaaccuccgccucccagg

SEQ ID NO: 787242 - RNA, 25 nt, Human
ucgcugcaaccuccgccucccaggu

SEQ ID NO: 787243 - RNA, 18 nt, Human
ucucaccaucucccaggc

SEQ ID NO: 787244 - RNA, 22 nt, Human
ucucaccaucucccaggcugga

SEQ ID NO: 787245 - RNA, 24 nt, Human
ucucaccaucucccaggcuggagu

SEQ ID NO: 787246 - RNA, 24 nt, Human
ucucauucugucacacaggcugga

SEQ ID NO: 787247 - RNA, 18 nt, Human
ucucccaggcuggagugu

SEQ ID NO: 787248 - RNA, 24 nt, Human
ucugucacacaggcuggagugcag

SEQ ID NO: 787249 - RNA, 21 nt, Human
ucuugaacuccugaccuuaag

SEQ ID NO: 787250 - RNA, 19 nt, Human
ugacagacuuggagcuggg

SEQ ID NO: 787251 - RNA, 22 nt, Human
ugagauggagucucauucuguc

SEQ ID NO: 787252 - RNA, 18 nt, Human
ugaggcagcccaagaaug

SEQ ID NO: 787253 - RNA, 19 nt, Human
ugaggcuaagaaccuaaaa

SEQ ID NO: 787254 - RNA, 20 nt, Human
ugauacuggaagcccugggg

SEQ ID NO: 787255 - RNA, 23 nt, Human
ugcagacaccaaggcagaggcug

SEQ ID NO: 787256 - RNA, 26 nt, Human
ugcaguggugcaguggcaugaucucg

SEQ ID NO: 787257 - RNA, 19 nt, Human
ugcauagaugcugacugau

SEQ ID NO: 787258 - RNA, 19 nt, Human
ugccagggguuagccuucc

SEQ ID NO: 787259 - RNA, 22 nt, Human
ugcccguccuucccucugcugg

SEQ ID NO: 787260 - RNA, 21 nt, Human
ugccugggggacggacuaggc

SEQ ID NO: 787261 - RNA, 21 nt, Human
ugccuuacccucccaaguagc

SEQ ID NO: 787262 - RNA, 21 nt, Human
ugcucugcucuccuuaucccc

SEQ ID NO: 787263 - RNA, 19 nt, Human
ugcugacccacacucagcc

SEQ ID NO: 787264 - RNA, 23 nt, Human
uggaccuuaaaaaaacugcucug

SEQ ID NO: 787265 - RNA, 20 nt, Human
uggagagagagagugggcuc

SEQ ID NO: 787266 - RNA, 28 nt, Human
uggagugcaguggugcaguggcaugauc

SEQ ID NO: 787267 - RNA, 18 nt, Human
uggaguguacugguguga

SEQ ID NO: 787268 - RNA, 24 nt, Human
uggaguguacuggugugaucucag

SEQ ID NO: 787269 - RNA, 21 nt, Human
uggcaugaucucggcucgcug

SEQ ID NO: 787270 - RNA, 24 nt, Human
uggccaggcuggucuugaacuccu

SEQ ID NO: 787271 - RNA, 18 nt, Human
ugggauuacaggcaugag

SEQ ID NO: 787272 - RNA, 19 nt, Human
ugggauuacaggcaugagc

SEQ ID NO: 787273 - RNA, 21 nt, Human
ugggauuacaggcaugagcca

SEQ ID NO: 787274 - RNA, 22 nt, Human
ugggauuacaggcaugagccac

SEQ ID NO: 787275 - RNA, 22 nt, Human
ugggauuacaggcaugagccac

SEQ ID NO: 787276 - RNA, 24 nt, Human
ugggauuacaggcaugagccacug

SEQ ID NO: 787277 - RNA, 26 nt, Human
ugggauuacaggcaugagccacugcg

SEQ ID NO: 787278 - RNA, 21 nt, Human
ugggauuacaggugugcacca
